United States Patent Application Publication US 2019/0224279 A1 - sequence listing, part 6

SEQ ID NO: 76129 - protein, 32 aa, Artificial Sequence; identical to SEQ ID NO: 27821
  Cyclic GFR-binding peptide
  MOD_RES (32), (32): Xaa is C or S

SEQ ID NO: 76130 - protein, 29 aa, Artificial Sequence
  Cyclic GFR-binding peptide
  MOD_RES (2), (4): Xaa is C or S
SXKXSKVVMVTAKKVKPTRGVIKRIQVPR

SEQ ID NO: 76131 - protein, 23 aa, Artificial Sequence
  Cyclic GFR-binding peptide
VIMVQVEKIKPTKGIVKAIKVSR

SEQ ID NO: 76132 - protein, 40 aa, Artificial Sequence; identical to SEQ ID NO: 27828
  Cyclic GFR-binding peptide
  MOD_RES (2), (36): Xaa is C or S

SEQ ID NO: 76133 - protein, 29 aa, Artificial Sequence
  Cyclic GFR-binding peptide
EVVMDVTAKKVVKENEDIKRMQVPRLETP

SEQ ID NO: 76134 - protein, 34 aa, Artificial Sequence
  Cyclic GFR-binding peptide
  MOD_RES (30), (31): Xaa is C or S
KVVMVTAKKVKPTRGVIKRIQVPRLDQPVXXPSA

SEQ ID NO: 76135 - protein, 34 aa, Artificial Sequence
  Cyclic GFR-binding peptide
  MOD_RES (28), (29): Xaa is C or S
VMSMEGIVKPTRGVMIQITINSLDQPVXXPSASA

SEQ ID NO: 76136 - protein, 33 aa, Artificial Sequence; identical to SEQ ID NO: 27832
  Cyclic GFR-binding peptide
  MOD_RES (1), (33): Xaa is C or S

SEQ ID NO: 76137 - protein, 34 aa, Artificial Sequence; identical to SEQ ID NO: 27834
  Cyclic GFR-binding peptide
  MOD_RES (34), (34): Xaa is C or S

SEQ ID NO: 76138 - protein, 37 aa, Artificial Sequence; identical to SEQ ID NO: 27840
  Cyclic GFR-binding peptide
  MOD_RES (2), (2): Xaa is C or S

SEQ ID NO: 76139 - protein, 29 aa, Artificial Sequence
  Cyclic GFR-binding peptide
  MOD_RES (1), (1): Xaa is C or S
XSKVIMSMEGIIKPTKGIMIQITINSLDQ

SEQ ID NO: 76140 - protein, 41 aa, Artificial Sequence; identical to SEQ ID NO: 27843
  Cyclic GFR-binding peptide
  MOD_RES (37), (37): Xaa is C or S

SEQ ID NO: 76141 - protein, 26 aa, Artificial Sequence
  Cyclic GFR-binding peptide
MNVQVEKIVNSSDDVKAVKVSRLQTP

SEQ ID NO: 76142 - protein, 39 aa, Artificial Sequence; identical to SEQ ID NO: 27848
  Cyclic GFR-binding peptide
  MOD_RES (1), (3), (34), (35): Xaa is C or S

SEQ ID NO: 76143 - protein, 29 aa, Artificial Sequence
  Cyclic GFR-binding peptide
  MOD_RES (2), (2): Xaa is C or S
KXSKVIMVTAKKIKPTKGIIKRIQVPRLD

SEQ ID NO: 76144 - protein, 28 aa, Artificial Sequence
  Cyclic GFR-binding peptide
  MOD_RES (1), (1): Xaa is C or S
XGEVVMEVQVEKVVKDYEDVKAMKVSRL

SEQ ID NO: 76145 - protein, 33 aa, Artificial Sequence; identical to SEQ ID NO: 27850
  Cyclic GFR-binding peptide
  MOD_RES (1), (3): Xaa is C or S

SEQ ID NO: 76146 - protein, 30 aa, Artificial Sequence
  Cyclic GFR-binding peptide
  MOD_RES (30), (30): Xaa is C or S
KVIMVTAKKIKPTKGIIKRIQVPRLDQSVX

SEQ ID NO: 76147 - protein, 31 aa, Artificial Sequence
  Cyclic GFR-binding peptide
LTNSLQEFIPKKRVIEYYVVPLPELQVQTPR

SEQ ID NO: 76148 - protein, 27 aa, Artificial Sequence
  Cyclic GFR-binding peptide
RVVMNSMEGIIVNSSDDMIQVTINSLK

SEQ ID NO: 76149 - protein, 33 aa, Artificial Sequence; identical to SEQ ID NO: 27855
  Cyclic GFR-binding peptide
  MOD_RES (2), (2): Xaa is C or S

SEQ ID NO: 76150 - protein, 31 aa, Artificial Sequence
  Cyclic GFR-binding peptide
  MOD_RES (31), (31): Xaa is C or S
QLFNSLQEHQGQHPKIRYYVMPLPEEETPVX

SEQ ID NO: 76151 - protein, 38 aa, Artificial Sequence; identical to SEQ ID NO: 27856
  Cyclic GFR-binding peptide
  MOD_RES (2), (4), (35), (36): Xaa is C or S

SEQ ID NO: 76152 - protein, 31 aa, Artificial Sequence
  Cyclic GFR-binding peptide
  MOD_RES (29), (30): Xaa is C or S
VMDVQVEKVVKENEDVKAMKVSRLETPVXXA

SEQ ID NO: 76153 - protein, 28 aa, Artificial Sequence
  Cyclic GFR-binding peptide
LHEELRNSLQELKPKKRVYEYYVVPLPE

SEQ ID NO: 76154 - protein, 22 aa, Artificial Sequence
  Cyclic GFR-binding peptide
MNSMEGIIVNSSDDMIQVTINS

SEQ ID NO: 76155 - protein, 37 aa, Artificial Sequence; identical to SEQ ID NO: 27860
  Cyclic GFR-binding peptide
  MOD_RES (2), (4), (35), (36): Xaa is C or S

SEQ ID NO: 76156 - protein, 36 aa, Artificial Sequence
  Cyclic GFR-binding peptide
  MOD_RES (2), (4): Xaa is C or S
RXEXKNHQLFNSLQEHQGQHPKIRYYVMPLPEEETP

SEQ ID NO: 76157 - protein, 34 aa, Artificial Sequence; identical to SEQ ID NO: 27862
  Cyclic GFR-binding peptide
  MOD_RES (31), (32): Xaa is C or S

SEQ ID NO: 76158 - protein, 36 aa, Artificial Sequence; identical to SEQ ID NO: 27863
  Cyclic GFR-binding peptide
  MOD_RES (2), (34): Xaa is C or S

SEQ ID NO: 76159 - protein, 26 aa, Artificial Sequence
  Cyclic GFR-binding peptide
GEVVMDVTAKKVVKENEDIKRMQVPR

SEQ ID NO: 76160 - protein, 27 aa, Artificial Sequence
  Cyclic GFR-binding peptide
VVMESMEGIVVKDYEDMIQMTINSLET

SEQ ID NO: 76161 - protein, 41 aa, Artificial Sequence; identical to SEQ ID NO: 27866
  Cyclic GFR-binding peptide
  MOD_RES (2), (4), (35), (36): Xaa is C or S

SEQ ID NO: 76162 - protein, 31 aa, Artificial Sequence
  Cyclic GFR-binding peptide
  MOD_RES (2), (4): Xaa is C or S
SXKXSKVIMSMEGIIKPTKGIMIQITINSLD

SEQ ID NO: 76163 - protein, 27 aa, Artificial Sequence
  Cyclic GFR-binding peptide
VIMVTAKKIKPTKGIIKRIQVPRLDQS

SEQ ID NO: 76164 - protein, 24 aa, Artificial Sequence
  Cyclic GFR-binding peptide
SMEGIVVKDYEDMIQMTINSLETP

SEQ ID NO: 76165 - protein, 29 aa, Artificial Sequence
  Cyclic GFR-binding peptide
  MOD_RES (28), (28): Xaa is C or S
MNSMEGIIVNSSDDMIQVTINSLKTPAXT

SEQ ID NO: 76166 - protein, 38 aa, Artificial Sequence; identical to SEQ ID NO: 27868
  Cyclic GFR-binding peptide
  MOD_RES (2), (36): Xaa is C or S

SEQ ID NO: 76167 - protein, 33 aa, Artificial Sequence
  Cyclic GFR-binding peptide
  MOD_RES (27), (28): Xaa is C or S
NVTAKKIVNSSDDIKRVQVPRLKTPAXXPKPVY

SEQ ID NO: 76168 - protein, 35 aa, Artificial Sequence; identical to SEQ ID NO: 27875
  Cyclic GFR-binding peptide
  MOD_RES (32), (33): Xaa is C or S

SEQ ID NO: 76169 - protein, 27 aa, Artificial Sequence
  Cyclic GFR-binding peptide
VVMNSMEGIIVNSSDDMIQVTINSLKT

SEQ ID NO: 76170 - protein, 30 aa, Artificial Sequence
  Cyclic GFR-binding peptide
  MOD_RES (1), (1): Xaa is C or S
XARVVMNSMEGIIVNSSDDMIQVTINSLQT

SEQ ID NO: 76171 - protein, 30 aa, Artificial Sequence
  Cyclic GFR-binding peptide
LRNSLQELKPKKRVYEYYLVTLPEHHVRSP

SEQ ID NO: 76172 - protein, 33 aa, Artificial Sequence; identical to SEQ ID NO: 27878
  Cyclic GFR-binding peptide
  MOD_RES (31), (32): Xaa is C or S

SEQ ID NO: 76173 - protein, 34 aa, Artificial Sequence
  Cyclic GFR-binding peptide
  MOD_RES (29), (29): Xaa is C or S
VMNVTAKKIVNSSDDIKRVQVPRLKTPAXTPKTV

SEQ ID NO: 76174 - protein, 33 aa, Artificial Sequence
  Cyclic GFR-binding peptide
  MOD_RES (27), (28): Xaa is C or S
MVTAKKIKPTKGIIKRIQVPRLDQSVXXPSASA

SEQ ID NO: 76175 - protein, 31 aa, Artificial Sequence
  Cyclic GFR-binding peptide
KNHQLFNSLQEHQGQHPKIRYYLMTLPEEET

SEQ ID NO: 76176 - protein, 36 aa, Artificial Sequence; identical to SEQ ID NO: 27880
  Cyclic GFR-binding peptide
  MOD_RES (2), (33), (34): Xaa is C or S

SEQ ID NO: 76177 - protein, 31 aa, Artificial Sequence
  Cyclic GFR-binding peptide
  MOD_RES (28), (29): Xaa is C or S
MDVQVEKVVKENEDVKAMKVSRLETPVXXAK

SEQ ID NO: 76178 - protein, 30 aa, Artificial Sequence
  Cyclic GFR-binding peptide
  MOD_RES (1), (1): Xaa is C or S
XGEVVMDVQVEKVVKENEDVKAMKVSRLET

SEQ ID NO: 76179 - protein, 37 aa, Artificial Sequence; identical to SEQ ID NO: 27883
  Cyclic GFR-binding peptide
  MOD_RES (32), (32): Xaa is C or S

SEQ ID NO: 76180 - protein, 27 aa, Artificial Sequence
  Cyclic GFR-binding peptide
  MOD_RES (1), (1): Xaa is C or S
XGEVVMDVTAKKVVKENEDIKRMQVPR

SEQ ID NO: 76181 - protein, 29 aa, Artificial Sequence
  Cyclic GFR-binding peptide
AAAAAAAAAVTAKKIVNSSDDIKRVQVPR

SEQ ID NO: 76182 - protein, 35 aa, Artificial Sequence
  Cyclic GFR-binding peptide
  MOD_RES (30), (31): Xaa is C or S
VVMEVQVEKVVKDYEDVKAMKVSRLETPVXXAKPI

SEQ ID NO: 76183 - protein, 32 aa, Artificial Sequence
  Cyclic GFR-binding peptide
DELTNSLQEFIPKKRVIEYYVVPLPELQVQTP

SEQ ID NO: 76184 - protein, 31 aa, Artificial Sequence
  Cyclic GFR-binding peptide
  MOD_RES (28), (29): Xaa is C or S
IMVTAKKVKPKRGVIKRIQVPRLAQPVXXPA

SEQ ID NO: 76185 - protein, 34 aa, Artificial Sequence; identical to SEQ ID NO: 27893
  Cyclic GFR-binding peptide

SEQ ID NO: 76186 - protein, 35 aa, Artificial Sequence
  Cyclic GFR-binding peptide
  MOD_RES (33), (33): Xaa is C or S
ELTNSLQEFIPKKRVIEYYVVPLPELQVQTPRXQV

SEQ ID NO: 76187 - protein, 25 aa, Artificial Sequence
  Cyclic GFR-binding peptide
VVMNSMEGIIVNSSDDMIQVTINSL

SEQ ID NO: 76188 - protein, 25 aa, Artificial Sequence
  Cyclic GFR-binding peptide
VMESMEGIVVKDYEDMIQMTINSLE

SEQ ID NO: 76189 - protein, 31 aa, Artificial Sequence
  Cyclic GFR-binding peptide
  MOD_RES (2), (2): Xaa is C or S
AXELHEELRNSLQELKPKKRVYEYYVVPLPE

SEQ ID NO: 76190 - protein, 33 aa, Artificial Sequence; identical to SEQ ID NO: 27903
  Cyclic GFR-binding peptide
  MOD_RES (1), (32), (33): Xaa is C or S

SEQ ID NO: 76191 - protein, 26 aa, Artificial Sequence
  Cyclic GFR-binding peptide
VVMNVQVEKIVNSSDDVKAVKVSRLQ

SEQ ID NO: 76192 - protein, 38 aa, Artificial Sequence; identical to SEQ ID NO: 27909
  Cyclic GFR-binding peptide
  MOD_RES (1), (3), (35), (36): Xaa is C or S

SEQ ID NO: 76193 - protein, 29 aa, Artificial Sequence
  Cyclic GFR-binding peptide
  MOD_RES (2), (2): Xaa is C or S
GXSRVVMNSMEGIIVNSSDDMIQVTINSL

SEQ ID NO: 76194 - protein, 24 aa, Artificial Sequence
  Cyclic GFR-binding peptide
RNSLQELKPKKRVYEYYVVPLPEH

SEQ ID NO: 76195 - protein, 34 aa, Artificial Sequence
  Cyclic GFR-binding peptide
  MOD_RES (28), (29): Xaa is C or S
MDVQVEKVVKENEDVKAMKVSRLETPVXXAKPIK

SEQ ID NO: 76196 - protein, 31 aa, Artificial Sequence
  Cyclic GFR-binding peptide
  MOD_RES (2), (2): Xaa is C or S
GXSRVVMNVTAKKIVNSSDDIKRVQVPRLKT

SEQ ID NO: 76197 - protein, 34 aa, Artificial Sequence
  Cyclic GFR-binding peptide
  MOD_RES (28), (29): Xaa is C or S
MNVQVEKIVNSSDDVKAVKVSRLQTPAXXPKPVT

SEQ ID NO: 76198 - protein, 28 aa, Artificial Sequence
  Cyclic GFR-binding peptide
VIMSMEGIVKPKRGVMIQITINSLAQPV

SEQ ID NO: 76199 - protein, 34 aa, Artificial Sequence
  Cyclic GFR-binding peptide
  MOD_RES (2), (4): Xaa is C or S
HXGXSRVVMNSMEGIIVNSSDDMIQVTINSLKTP

SEQ ID NO: 76200 - protein, 27 aa, Artificial Sequence
  Cyclic GFR-binding peptide
  MOD_RES (27), (27): Xaa is C or S
NVQVEKIVNSSDDVKAVKVSRLKTPAX

SEQ ID NO: 76201 - protein, 25 aa, Artificial Sequence
  Cyclic GFR-binding peptide
EVQVEKVVKDYEDVKAMKVSRLETP

SEQ ID NO: 76202 - protein, 42 aa, Artificial Sequence; identical to SEQ ID NO: 27919
  Cyclic GFR-binding peptide
  MOD_RES (2), (4), (36), (37): Xaa is C or S

SEQ ID NO: 76203 - protein, 30 aa, Artificial Sequence; identical to SEQ ID NO: 27923
  Cyclic GFR-binding peptide

SEQ ID NO: 76204 - protein, 37 aa, Artificial Sequence; identical to SEQ ID NO: 27928
  Cyclic GFR-binding peptide
  MOD_RES (1), (33), (34): Xaa is C or S

SEQ ID NO: 76205 - protein, 33 aa, Artificial Sequence; identical to SEQ ID NO: 27931
  Cyclic GFR-binding peptide
  MOD_RES (31), (32): Xaa is C or S

SEQ ID NO: 76206 - protein, 36 aa, Artificial Sequence
  Cyclic GFR-binding peptide
  MOD_RES (30), (31): Xaa is C or S
KVIMSMEGIIKPTKGIMIQITINSLDQSVXXPSASA

SEQ ID NO: 76207 - protein, 29 aa, Artificial Sequence
  Cyclic GFR-binding peptide
ELRNSLQELKPKKRVYEYYVVPLPEHHVR

SEQ ID NO: 76208 - protein, 23 aa, Artificial Sequence
  Cyclic GFR-binding peptide
NSLQELKPKKRVYEYYLVTLPEH

SEQ ID NO: 76209 - protein, 25 aa, Artificial Sequence
  Cyclic GFR-binding peptide
MSMEGIVKPKRGVMIQITINSLAQP

SEQ ID NO: 76210 - protein, 38 aa, Artificial Sequence; identical to SEQ ID NO: 27939
  Cyclic GFR-binding peptide
  MOD_RES (2), (2): Xaa is C or S

SEQ ID NO: 76211 - protein, 34 aa, Artificial Sequence
  Cyclic GFR-binding peptide
  MOD_RES (32), (32): Xaa is C or S
LRNSLQELKPKKRVYEYYLVTLPEHHVRSPQXKV

SEQ ID NO: 76212 - protein, 40 aa, Artificial Sequence; identical to SEQ ID NO: 27942
  Cyclic GFR-binding peptide
  MOD_RES (2), (4), (35), (36): Xaa is C or S

SEQ ID NO: 76213 - protein, 45 aa, Artificial Sequence; identical to SEQ ID NO: 27944
  Cyclic GFR-binding peptide
  MOD_RES (2), (4), (41): Xaa is C or S

SEQ ID NO: 76214 - protein, 29 aa, Artificial Sequence
  Cyclic GFR-binding peptide
KVIMVTAKKIKPTKGIIKRIQVPRLDQSV

SEQ ID NO: 76215 - protein, 33 aa, Artificial Sequence
  Cyclic GFR-binding peptide
  MOD_RES (30), (30): Xaa is C or S
NSLQEFIPKKRVIEYYLVTLPELQVQTPRXQVN

SEQ ID NO: 76216 - protein, 30 aa, Artificial Sequence
  Cyclic GFR-binding peptide
  MOD_RES (1), (1): Xaa is C or S
XALHDELTNSLQEFIPKKRVIEYYVVPLPE

SEQ ID NO: 76217 - protein, 41 aa, Artificial Sequence; identical to SEQ ID NO: 27948
  Cyclic GFR-binding peptide
  MOD_RES (1), (3), (35), (36): Xaa is C or S

SEQ ID NO: 76218 - protein, 31 aa, Artificial Sequence; identical to SEQ ID NO: 27951
  Cyclic GFR-binding peptide
  MOD_RES (31), (31): Xaa is C or S

SEQ ID NO: 76219 - protein, 33 aa, Artificial Sequence
  Cyclic GFR-binding peptide
  MOD_RES (28), (29): Xaa is C or S
MESMEGIVVKDYEDMIQMTINSLETPVXXAKPI

SEQ ID NO: 76220 - protein, 34 aa, Artificial Sequence; identical to SEQ ID NO: 27952
  Cyclic GFR-binding peptide
  MOD_RES (1), (3): Xaa is C or S

SEQ ID NO: 76221 - protein, 26 aa, Artificial Sequence
  Cyclic GFR-binding peptide
VVMSMEGIVKPTRGVMIQITINSLDQ

SEQ ID NO: 76222 - protein, 32 aa, Artificial Sequence
  Cyclic GFR-binding peptide
  MOD_RES (27), (28): Xaa is C or S
ESMEGIVVKDYEDMIQMTINSLETPVXXAKPI

SEQ ID NO: 76223 - protein, 31 aa, Artificial Sequence
  Cyclic GFR-binding peptide
  MOD_RES (1), (3): Xaa is C or S
XKXSKVIMVQVEKIKPTKGIVKAIKVSRLDQ

SEQ ID NO: 76224 - protein, 31 aa, Artificial Sequence
  Cyclic GFR-binding peptide
NHQLFNSLQEHQGQHPKIRYYLMTLPEEETP

SEQ ID NO: 76225 - protein, 35 aa, Artificial Sequence; identical to SEQ ID NO: 27958
  Cyclic GFR-binding peptide
  MOD_RES (33), (33): Xaa is C or S

SEQ ID NO: 76226 - protein, 33 aa, Artificial Sequence
  Cyclic GFR-binding peptide
  MOD_RES (2), (4): Xaa is C or S
SXKXSKVIMVQVEKIKPTKGIVKAIKVSRLDQS

SEQ ID NO: 76227 - protein, 36 aa, Artificial Sequence; identical to SEQ ID NO: 27962
  Cyclic GFR-binding peptide
  MOD_RES (1), (3), (35): Xaa is C or S

SEQ ID NO: 76228 - protein, 26 aa, Artificial Sequence
  Cyclic GFR-binding peptide
DELTNSLQEFIPKKRVIEYYVVPLPE

SEQ ID NO: 76229 - protein, 26 aa, Artificial Sequence
  Cyclic GFR-binding peptide
LFNSLQEHQGQHPKIRYYVMPLPEEE

SEQ ID NO: 76230 - protein, 30 aa, Artificial Sequence
  Cyclic GFR-binding peptide
  MOD_RES (26), (27): Xaa is C or S
VTAKKIVNSSDDIKRVQVPRLQTPAXXPKP

SEQ ID NO: 76231 - protein, 42 aa, Artificial Sequence; identical to SEQ ID NO: 27966
  Cyclic GFR-binding peptide
  MOD_RES (2), (39): Xaa is C or S

SEQ ID NO: 76232 - protein, 27 aa, Artificial Sequence
  Cyclic GFR-binding peptide
NSLQEFIPKKRVIEYYVVPLPELQVQT

SEQ ID NO: 76233 - protein, 25 aa, Artificial Sequence
  Cyclic GFR-binding peptide
SRVIMVTAKKVKPKRGVIKRIQVPR

SEQ ID NO: 76234 - protein, 31 aa, Artificial Sequence
  Cyclic GFR-binding peptide
  MOD_RES (2), (2): Xaa is C or S
EXKNHQLFNSLQEHQGQHPKIRYYLMTLPEE

SEQ ID NO: 76235 - protein, 37 aa, Artificial Sequence; identical to SEQ ID NO: 27977
  Cyclic GFR-binding peptide
  MOD_RES (2), (34), (35): Xaa is C or S

SEQ ID NO: 76236 - protein, 32 aa, Artificial Sequence
  Cyclic GFR-binding peptide
  MOD_RES (27), (28): Xaa is C or S
MVQVEKIKPTKGIVKAIKVSRLDQSVXXPSAS

SEQ ID NO: 76237 - protein, 24 aa, Artificial Sequence
  Cyclic GFR-binding peptide
VTAKKIVNSSDDIKRVQVPRLQTP

SEQ ID NO: 76238 - protein, 32 aa, Artificial Sequence
  Cyclic GFR-binding peptide
  MOD_RES (2), (2): Xaa is C or S
KXALHDELTNSLQEFIPKKRVIEYYLVTLPEL

SEQ ID NO: 76239 - protein, 36 aa, Artificial Sequence; identical to SEQ ID NO: 27980
  Cyclic GFR-binding peptide
  MOD_RES (2), (4), (35), (36): Xaa is C or S

SEQ ID NO: 76240 - protein, 32 aa, Artificial Sequence; identical to SEQ ID NO: 27981
  Cyclic GFR-binding peptide
  MOD_RES (31), (32): Xaa is C or S

SEQ ID NO: 76241 - protein, 29 aa, Artificial Sequence
  Cyclic GFR-binding peptide
  MOD_RES (27), (28): Xaa is C or S
NVQVEKIVNSSDDVKAVKVSRLKTPAXXP

SEQ ID NO: 76242 - protein, 37 aa, Artificial Sequence; identical to SEQ ID NO: 27992
  Cyclic GFR-binding peptide
  MOD_RES (31), (31): Xaa is C or S

SEQ ID NO: 76243 - protein, 40 aa, Artificial Sequence; identical to SEQ ID NO: 27993
  Cyclic GFR-binding peptide
  MOD_RES (2), (4), (36), (37): Xaa is C or S

SEQ ID NO: 76244 - protein, 23 aa, Artificial Sequence
  Cyclic GFR-binding peptide
MDVQVEKVVKENEDVKAMKVSRL

SEQ ID NO: 76245 - protein, 31 aa, Artificial Sequence
  Cyclic GFR-binding peptide
  MOD_RES (1), (1): Xaa is C or S
XARVVMNVQVEKIVNSSDDVKAVKVSRLQTP

SEQ ID NO: 76246 - protein, 34 aa, Artificial Sequence; identical to SEQ ID NO: 27997
  Cyclic GFR-binding peptide
  MOD_RES (31), (32): Xaa is C or S

SEQ ID NO: 76247 - protein, 22 aa, Artificial Sequence
  Cyclic GFR-binding peptide
NSLQEFIPKKRVIEYYLVTLPE

SEQ ID NO: 76248 - protein, 25 aa, Artificial Sequence
  Cyclic GFR-binding peptide
IMVTAKKIKPTKGIIKRIQVPRLDQ

SEQ ID NO: 76249 - protein, 32 aa, Artificial Sequence
  Cyclic GFR-binding peptide
  MOD_RES (2), (2): Xaa is C or S
GXSRVVMNSMEGIIVNSSDDMIQVTINSLKTP

SEQ ID NO: 76250 - protein, 40 aa, Artificial Sequence; identical to SEQ ID NO: 28006
  Cyclic GFR-binding peptide
  MOD_RES (1), (3), (35), (36): Xaa is C or S

SEQ ID NO: 76251 - protein, 36 aa, Artificial Sequence; identical to SEQ ID NO: 28012
  Cyclic GFR-binding peptide
  MOD_RES (1), (1): Xaa is C or S

SEQ ID NO: 76252 - protein, 34 aa, Artificial Sequence; identical to SEQ ID NO: 28013
  Cyclic GFR-binding peptide
  MOD_RES (2), (33), (34): Xaa is C or S

SEQ ID NO: 76253 - protein, 24 aa, Artificial Sequence
  Cyclic GFR-binding peptide
NSMEGIIVNSSDDMIQVTINSLQT

SEQ ID NO: 76254 - protein, 29 aa, Artificial Sequence
  Cyclic GFR-binding peptide
  MOD_RES (2), (2): Xaa is C or S
KXSRVIMVQVEKVKPKRGVVKAIKVSRLA

SEQ ID NO: 76255 - protein, 32 aa, Artificial Sequence; identical to SEQ ID NO: 28017
  Cyclic GFR-binding peptide
  MOD_RES (2), (2): Xaa is C or S

SEQ ID NO: 76256 - protein, 37 aa, Artificial Sequence; identical to SEQ ID NO: 28019
  Cyclic GFR-binding peptide
  MOD_RES (1), (3), (35), (36): Xaa is C or S

SEQ ID NO: 76257 - protein, 35 aa, Artificial Sequence; identical to SEQ ID NO: 28020
  Cyclic GFR-binding peptide
  MOD_RES (2), (33), (34): Xaa is C or S

SEQ ID NO: 76258 - protein, 26 aa, Artificial Sequence
  Cyclic GFR-binding peptide
  MOD_RES (26), (26): Xaa is C or S
VTAKKVKPKRGVIKRIQVPRLAQPVX

SEQ ID NO: 76259 - protein, 33 aa, Artificial Sequence
  Cyclic GFR-binding peptide
  MOD_RES (29), (29): Xaa is C or S
VMNVTAKKIVNSSDDIKRVQVPRLKTPAXTPKT

SEQ ID NO: 76260 - protein, 30 aa, Artificial Sequence
  Cyclic GFR-binding peptide
  MOD_RES (28), (29): Xaa is C or S
MEVQVEKVVKDYEDVKAMKVSRLETPVXXA

SEQ ID NO: 76261 - protein, 26 aa, Artificial Sequence
  Cyclic GFR-binding peptide
MNVQVEKIVNSSDDVKAVKVSRLKTP

SEQ ID NO: 76262 - protein, 30 aa, Artificial Sequence
  Cyclic GFR-binding peptide
  MOD_RES (2), (2): Xaa is C or S
GXARVVMNSMEGIIVNSSDDMIQVTINSLQ

SEQ ID NO: 76263 - protein, 30 aa, Artificial Sequence
  Cyclic GFR-binding peptide
  MOD_RES (30), (30): Xaa is C or S
NSLQEFIPKKRVIEYYVVPLPELQVQTPRX

SEQ ID NO: 76264 - protein, 32 aa, Artificial Sequence; identical to SEQ ID NO: 28027
  Cyclic GFR-binding peptide
  MOD_RES (31), (31): Xaa is C or S

SEQ ID NO: 76265 - protein, 32 aa, Artificial Sequence
  Cyclic GFR-binding peptide
  MOD_RES (30), (31): Xaa is C or S
VVMNVTAKKIVNSSDDIKRVQVPRLKTPAXXP

SEQ ID NO: 76266 - protein, 36 aa, Artificial Sequence
  Cyclic GFR-binding peptide
  MOD_RES (32), (32): Xaa is C or S
LRNSLQELKPKKRVYEYYVVPLPEHHVRSPQXKVSS

SEQ ID NO: 76267 - protein, 26 aa, Artificial Sequence
  Cyclic GFR-binding peptide
DELTNSLQEFIPKKRVIEYYLVTLPE

SEQ ID NO: 76268 - protein, 38 aa, Artificial Sequence; identical to SEQ ID NO: 28035
  Cyclic GFR-binding peptide
  MOD_RES (1), (3), (34), (35): Xaa is C or S

SEQ ID NO: 76269 - protein, 39 aa, Artificial Sequence; identical to SEQ ID NO: 28037
  Cyclic GFR-binding peptide
  MOD_RES (2), (34), (35): Xaa is C or S

SEQ ID NO: 76270 - protein, 33 aa, Artificial Sequence
  Cyclic GFR-binding peptide
  MOD_RES (1), (3): Xaa is C or S
XGXGEVVMDSMEGIVVKENEDMIQMTINSLETP

SEQ ID NO: 76271 - protein, 24 aa, Artificial Sequence
  Cyclic GFR-binding peptide
NSLQEHQGQHPKIRYYVMPLPEEE

SEQ ID NO: 76272 - protein, 36 aa, Artificial Sequence; identical to SEQ ID NO: 28039
  Cyclic GFR-binding peptide
  MOD_RES (32), (33): Xaa is C or S

SEQ ID NO: 76273 - protein, 37 aa, Artificial Sequence; identical to SEQ ID NO: 28041
  Cyclic GFR-binding peptide
  MOD_RES (2), (33), (34): Xaa is C or S

SEQ ID NO: 76274 - protein, 26 aa, Artificial Sequence
  Cyclic GFR-binding peptide
VVMVQVEKVKPTRGVVKAIKVSRLDQ

SEQ ID NO: 76275 - protein, 26 aa, Artificial Sequence
  Cyclic GFR-binding peptide
VMNVQVEKIVNSSDDVKAVKVSRLKT

SEQ ID NO: 76276 - protein, 39 aa, Artificial Sequence; identical to SEQ ID NO: 28046
  Cyclic GFR-binding peptide
  MOD_RES (2), (4), (36), (37): Xaa is C or S

SEQ ID NO: 76277 - protein, 27 aa, Artificial Sequence
  Cyclic GFR-binding peptide
LRNSLQELKPKKRVYEYYVVPLPEHHV

SEQ ID NO: 76278 - protein, 31 aa, Artificial Sequence
  Cyclic GFR-binding peptide
  MOD_RES (2), (4): Xaa is C or S
HXGXSRVVMNSMEGIIVNSSDDMIQVTINSL

SEQ ID NO: 76279 - protein, 39 aa, Artificial Sequence; identical to SEQ ID NO: 28047
  Cyclic GFR-binding peptide
  MOD_RES (2), (39): Xaa is C or S

SEQ ID NO: 76280 - protein, 29 aa, Artificial Sequence
  Cyclic GFR-binding peptide
  MOD_RES (1), (3): Xaa is C or S
XGXARVVMNVQVEKIVNSSDDVKAVKVSR

SEQ ID NO: 76281 - protein, 30 aa, Artificial Sequence
  Cyclic GFR-binding peptide
  MOD_RES (28), (29): Xaa is C or S
MNSMEGIIVNSSDDMIQVTINSLQTPAXXP

SEQ ID NO: 76282 - protein, 33 aa, Artificial Sequence
  Cyclic GFR-binding peptide
  MOD_RES (30), (31): Xaa is C or S
VVMDVQVEKVVKENEDVKAMKVSRLETPVXXAK

SEQ ID NO: 76283 - protein, 27 aa, Artificial Sequence
  Cyclic GFR-binding peptide
  MOD_RES (26), (26): Xaa is C or S
SMEGIIVNSSDDMIQVTINSLKTPAXT

SEQ ID NO: 76284 - protein, 37 aa, Artificial Sequence; identical to SEQ ID NO: 28058
  Cyclic GFR-binding peptide
  MOD_RES (1), (3), (34), (35): Xaa is C or S

SEQ ID NO: 76285 - protein, 34 aa, Artificial Sequence
  Cyclic GFR-binding peptide
  MOD_RES (29), (30): Xaa is C or S
VMESMEGIVVKDYEDMIQMTINSLETPVXXAKPI

SEQ ID NO: 76286 - protein, 37 aa, Artificial Sequence; identical to SEQ ID NO: 28059
  Cyclic GFR-binding peptide
  MOD_RES (1), (33): Xaa is C or S

SEQ ID NO: 76287 - protein, 30 aa, Artificial Sequence; identical to SEQ ID NO: 28062
  Cyclic GFR-binding peptide

SEQ ID NO: 76288 - protein, 21 aa, Artificial Sequence
  Cyclic GFR-binding peptide
MVTAKKVKPKRGVIKRIQVPR

SEQ ID NO: 76289 - protein, 36 aa, Artificial Sequence; identical to SEQ ID NO: 28064
  Cyclic GFR-binding peptide
  MOD_RES (31), (32): Xaa is C or S

SEQ ID NO: 76290 - protein, 38 aa, Artificial Sequence; identical to SEQ ID NO: 28065
  Cyclic GFR-binding peptide
  MOD_RES (1), (3), (34), (35): Xaa is C or S

SEQ ID NO: 76291 - protein, 41 aa, Artificial Sequence; identical to SEQ ID NO: 28068
  Cyclic GFR-binding peptide
  MOD_RES (1), (3), (35), (36): Xaa is C or S

SEQ ID NO: 76292 - protein, 37 aa, Artificial Sequence; identical to SEQ ID NO: 28075
  Cyclic GFR-binding peptide
  MOD_RES (1), (35): Xaa is C or S

SEQ ID NO: 76293 - protein, 28 aa, Artificial Sequence
  Cyclic GFR-binding peptide
  MOD_RES (2), (2): Xaa is C or S
GXGEVVMDVQVEKVVKENEDVKAMKVSR

SEQ ID NO: 76294 - protein, 37 aa, Artificial Sequence; identical to SEQ ID NO: 28076
  Cyclic GFR-binding peptide
  MOD_RES (2), (4), (35), (36): Xaa is C or S

SEQ ID NO: 76295 - protein, 33 aa, Artificial Sequence
  Cyclic GFR-binding peptide
  MOD_RES (27), (28): Xaa is C or S
MSMEGIVKPKRGVMIQITINSLAQPVXXPAASA

SEQ ID NO: 76296 - protein, 36 aa, Artificial Sequence; identical to SEQ ID NO: 28078
  Cyclic GFR-binding peptide
  MOD_RES (31), (32): Xaa is C or S

SEQ ID NO: 76297 - protein, 29 aa, Artificial Sequence
  Cyclic GFR-binding peptide
LHEELRNSLQELKPKKRVYEYYLVTLPEH

SEQ ID NO: 76298 - protein, 37 aa, Artificial Sequence; identical to SEQ ID NO: 28082
  Cyclic GFR-binding peptide
  MOD_RES (1), (33), (34): Xaa is C or S

SEQ ID NO: 76299 - protein, 30 aa, Artificial Sequence
  Cyclic GFR-binding peptide
  MOD_RES (28), (29): Xaa is C or S
MNSMEGIIVNSSDDMIQVTINSLKTPAXXP

SEQ ID NO: 76300 - protein, 25 aa, Artificial Sequence
  Cyclic GFR-binding peptide
VTAKKVKPKRGVIKRIQVPRLAQPV

SEQ ID NO: 76301 - protein, 35 aa, Artificial Sequence
  Cyclic GFR-binding peptide
  MOD_RES (29), (30): Xaa is C or S
VIMSMEGIIKPTKGIMIQITINSLDQSVXXPSASA

SEQ ID NO: 76302 - protein, 33 aa, Artificial Sequence
  Cyclic GFR-binding peptide
  MOD_RES (29), (30): Xaa is C or S
VMEVQVEKVVKDYEDVKAMKVSRLETPVXXAKP

SEQ ID NO: 76303 - protein, 34 aa, Artificial Sequence; identical to SEQ ID NO: 28088
  Cyclic GFR-binding peptide
  MOD_RES (2), (4): Xaa is C or S

SEQ ID NO: 76304 - protein, 35 aa, Artificial Sequence
  Cyclic GFR-binding peptide
  MOD_RES (30), (31): Xaa is C or S
VVMNSMEGIIVNSSDDMIQVTINSLKTPAXXPKPV

SEQ ID NO: 76305 - protein, 33 aa, Artificial Sequence
  Cyclic GFR-binding peptide
  MOD_RES (29), (29): Xaa is C or S
VMNSMEGIIVNSSDDMIQVTINSLKTPAXTPKT

SEQ ID NO: 76306 - protein, 23 aa, Artificial Sequence
  Cyclic GFR-binding peptide
NVQVEKIVNSSDDVKAVKVSRLK

SEQ ID NO: 76307 - protein, 27 aa, Artificial Sequence
  Cyclic GFR-binding peptide
  MOD_RES (26), (27): Xaa is C or S
SMEGIVVKDYEDMIQMTINSLETPVXX

SEQ ID NO: 76308 - protein, 41 aa, Artificial Sequence; identical to SEQ ID NO: 28094
  Cyclic GFR-binding peptide
  MOD_RES (1), (3), (35), (36): Xaa is C or S

SEQ ID NO: 76309 - protein, 26 aa, Artificial Sequence
  Cyclic GFR-binding peptide
NVTAKKIVNSSDDIKRVQVPRLKTPA

SEQ ID NO: 76310 - protein, 26 aa, Artificial Sequence
  Cyclic GFR-binding peptide
SRVIMVTAKKVKPKRGVIKRIQVPRL

SEQ ID NO: 76311 - protein, 26 aa, Artificial Sequence
  Cyclic GFR-binding peptide
  MOD_RES (26), (26): Xaa is C or S
SMEGIVVKDYEDMIQMTINSLETPVX

SEQ ID NO: 76312 - protein, 25 aa, Artificial Sequence
  Cyclic GFR-binding peptide
RNSLQELKPKKRVYEYYLVTLPEHH

SEQ ID NO: 76313 - protein, 41 aa, Artificial Sequence; identical to SEQ ID NO: 28098
  Cyclic GFR-binding peptide
  MOD_RES (2), (4), (41): Xaa is C or S

SEQ ID NO: 76314 - protein, 36 aa, Artificial Sequence; identical to SEQ ID NO: 28101
  Cyclic GFR-binding peptide
  MOD_RES (1), (33), (34): Xaa is C or S

SEQ ID NO: 76315 - protein, 27 aa, Artificial Sequence
  Cyclic GFR-binding peptide
NSLQEHQGQHPKIRYYLMTLPEEETPV

SEQ ID NO: 76316 - protein, 30 aa, Artificial Sequence
  Cyclic GFR-binding peptide
  MOD_RES (26), (27): Xaa is C or S
SMEGIVVKENEDMIQMTINSLETPVXXAKP

SEQ ID NO: 76317 - protein, 28 aa, Artificial Sequence
  Cyclic GFR-binding peptide
  MOD_RES (28), (28): Xaa is C or S
NSLQEHQGQHPKIRYYLMTLPEEETPVX

SEQ ID NO: 76318 - protein, 37 aa, Artificial Sequence; identical to SEQ ID NO: 28102
  Cyclic GFR-binding peptide
  MOD_RES (1), (33), (34): Xaa is C or S

SEQ ID NO: 76319 - protein, 37 aa, Artificial Sequence; identical to SEQ ID NO: 28103
  Cyclic GFR-binding peptide
  MOD_RES (1), (3), (35), (36): Xaa is C or S

SEQ ID NO: 76320 - protein, 30 aa, Artificial Sequence
  Cyclic GFR-binding peptide
  MOD_RES (26), (27): Xaa is C or S
SMEGIVKPKRGVMIQITINSLAQPVXXPAA

SEQ ID NO: 76321 - protein, 33 aa, Artificial Sequence; identical to SEQ ID NO: 28109
  Cyclic GFR-binding peptide
  MOD_RES (2), (2): Xaa is C or S

SEQ ID NO: 76322 - protein, 34 aa, Artificial Sequence; identical to SEQ ID NO: 28114
  Cyclic GFR-binding peptide

SEQ ID NO: 76323 - protein, 38 aa, Artificial Sequence; identical to SEQ ID NO: 28115
  Cyclic GFR-binding peptide
  MOD_RES (1), (32), (33): Xaa is C or S

SEQ ID NO: 76324 - protein, 28 aa, Artificial Sequence
  Cyclic GFR-binding peptide
  MOD_RES (27), (28): Xaa is C or S
DVTAKKVVKENEDIKRMQVPRLETPVXX

SEQ ID NO: 76325 - protein, 30 aa, Artificial Sequence
  Cyclic GFR-binding peptide
  MOD_RES (27), (28): Xaa is C or S
DVQVEKVVKENEDVKAMKVSRLETPVXXAK

SEQ ID NO: 76326 - protein, 31 aa, Artificial Sequence
  Cyclic GFR-binding peptide
  MOD_RES (27), (28): Xaa is C or S
MVQVEKVKPTRGVVKAIKVSRLDQPVXXPSA

SEQ ID NO: 76327 - protein, 28 aa, Artificial Sequence
  Cyclic GFR-binding peptide
FNSLQEHQGQHPKIRYYVMPLPEEETPV

SEQ ID NO: 76328 - protein, 29 aa, Artificial Sequence
  Cyclic GFR-binding peptide
  MOD_RES (26), (27): Xaa is C or S
VTAKKVVKENEDIKRMQVPRLETPVXXAK

SEQ ID NO: 76329 - protein, 27 aa, Artificial Sequence
  Cyclic GFR-binding peptide
TNSLQEFIPKKRVIEYYLVTLPELQVQ

SEQ ID NO: 76330 - protein, 41 aa, Artificial Sequence; identical to SEQ ID NO: 28120
  Cyclic GFR-binding peptide
  MOD_RES (1), (3), (40): Xaa is C or S

SEQ ID NO: 76331 - protein, 29 aa, Artificial Sequence
  Cyclic GFR-binding peptide
AAAAAAAAAVQVEKIKPTKGIVKAIKVSR

SEQ ID NO: 76332 - protein, 33 aa, Artificial Sequence
  Cyclic GFR-binding peptide
  MOD_RES (1), (3): Xaa is C or S
XEXKNHQLFNSLQEHQGQHPKIRYYLMTLPEEE

SEQ ID NO: 76333 - protein, 37 aa, Artificial Sequence; identical to SEQ ID NO: 28122
  Cyclic GFR-binding peptide
  MOD_RES (1), (3), (34), (35): Xaa is C or S

SEQ ID NO: 76334 - protein, 23 aa, Artificial Sequence
  Cyclic GFR-binding peptide
MVTAKKIKPTKGIIKRIQVPRLD

SEQ ID NO: 76335 - protein, 40 aa, Artificial Sequence; identical to SEQ ID NO: 28128
  Cyclic GFR-binding peptide
  MOD_RES (2), (4), (36), (37): Xaa is C or S

SEQ ID NO: 76336 - protein, 34 aa, Artificial Sequence
  Cyclic GFR-binding peptide
  MOD_RES (2), (4): Xaa is C or S
RXEXKNHQLFNSLQEHQGQHPKIRYYLMTLPEEE

SEQ ID NO: 76337 - protein, 36 aa, Artificial Sequence; identical to SEQ ID NO: 28132
  Cyclic GFR-binding peptide
  MOD_RES (2), (4), (36): Xaa is C or S

SEQ ID NO: 76338 - protein, 30 aa, Artificial Sequence
  Cyclic GFR-binding peptide
GEVVMDVTAKKVVKENEDIKRMQVPRLETP

SEQ ID NO: 76339 - protein, 32 aa, Artificial Sequence; identical to SEQ ID NO: 28134
  Cyclic GFR-binding peptide

SEQ ID NO: 76340 - protein, 29 aa, Artificial Sequence
  Cyclic GFR-binding peptide
  MOD_RES (2), (4): Xaa is C or S
SXKXSKVVMVQVEKVKPTRGVVKAIKVSR

SEQ ID NO: 76341 - protein, 30 aa, Artificial Sequence
  Cyclic GFR-binding peptide
  MOD_RES (1), (3): Xaa is C or S
XGXGEVVMEVTAKKVVKDYEDIKRMQVPRL

SEQ ID NO: 76342 - protein, 40 aa, Artificial Sequence; identical to SEQ ID NO: 28139
  Cyclic GFR-binding peptide
  MOD_RES (2), (4), (38): Xaa is C or S

SEQ ID NO: 76343 - protein, 26 aa, Artificial Sequence
  Cyclic GFR-binding peptide
ELRNSLQELKPKKRVYEYYLVTLPEH

SEQ ID NO: 76344 - protein, 32 aa, Artificial Sequence
  Cyclic GFR-binding peptide
  MOD_RES (2), (4): Xaa is C or S
RXGXGEVVMESMEGIVVKDYEDMIQMTINSLE

SEQ ID NO: 76345 - protein, 38 aa, Artificial Sequence; identical to SEQ ID NO: 28145
  Cyclic GFR-binding peptide
  MOD_RES (1), (3), (34), (35): Xaa is C or S

SEQ ID NO: 76346 - protein, 32 aa, Artificial Sequence
  Cyclic GFR-binding peptide
  MOD_RES (2), (4): Xaa is C or S
SXKXSRVIMVTAKKVKPKRGVIKRIQVPRLAQ

SEQ ID NO: 76347 - protein, 44 aa, Artificial Sequence; identical to SEQ ID NO: 28148
  Cyclic GFR-binding peptide
  MOD_RES (2), (4), (38): Xaa is C or S

SEQ ID NO: 76348 - protein, 33 aa, Artificial Sequence; identical to SEQ ID NO: 28150
  Cyclic GFR-binding peptide
  MOD_RES (32), (32): Xaa is C or S

SEQ ID NO: 76349 - protein, 31 aa, Artificial Sequence
  Cyclic GFR-binding peptide
HQLFNSLQEHQGQHPKIRYYLMTLPEEETPV

SEQ ID NO: 76350 - protein, 30 aa, Artificial Sequence
  Cyclic GFR-binding peptide
  MOD_RES (2), (4): Xaa is C or S
SXKXSKVVMSMEGIVKPTRGVMIQITINSL

SEQ ID NO: 76351 - protein, 36 aa, Artificial Sequence
  Cyclic GFR-binding peptide
  MOD_RES (1), (3): Xaa is C or S
XAXELHEELRNSLQELKPKKRVYEYYVVPLPEHHVR

SEQ ID NO: 76352 - protein, 30 aa, Artificial Sequence
  Cyclic GFR-binding peptide
  MOD_RES (26), (27): Xaa is C or S
SMEGIIVNSSDDMIQVTINSLQTPAXXPKP

SEQ ID NO: 76353 - protein, 21 aa, Artificial Sequence
  Cyclic GFR-binding peptide
MVQVEKIKPTKGIVKAIKVSR

SEQ ID NO: 76354 - protein, 26 aa, Artificial Sequence
  Cyclic GFR-binding peptide
MNVTAKKIVNSSDDIKRVQVPRLKTP

SEQ ID NO: 76355 - protein, 29 aa, Artificial Sequence
  Cyclic GFR-binding peptide
KVIMVQVEKIKPTKGIVKAIKVSRLDQSV

SEQ ID NO: 76356 - protein, 37 aa, Artificial Sequence; identical to SEQ ID NO: 28162
  Cyclic GFR-binding peptide
  MOD_RES (31), (32): Xaa is C or S

SEQ ID NO: 76357 - protein, 36 aa, Artificial Sequence; identical to SEQ ID NO: 28163
  Cyclic GFR-binding peptide
  MOD_RES (34), (34): Xaa is C or S

SEQ ID NO: 76358 - protein, 25 aa, Artificial Sequence
  Cyclic GFR-binding peptide
MDSMEGIVVKENEDMIQMTINSLET

SEQ ID NO: 76359 - protein, 27 aa, Artificial Sequence
  Cyclic GFR-binding peptide
QLFNSLQEHQGQHPKIRYYVMPLPEEE

SEQ ID NO: 76360 - protein, 32 aa, Artificial Sequence
  Cyclic GFR-binding peptide
  MOD_RES (30), (30): Xaa is C or S
VVMNSMEGIIVNSSDDMIQVTINSLKTPAXTP

SEQ ID NO: 76361 - protein, 26 aa, Artificial Sequence
  Cyclic GFR-binding peptide
HQLFNSLQEHQGQHPKIRYYVMPLPE

SEQ ID NO: 76362 - protein, 21 aa, Artificial Sequence
  Cyclic GFR-binding peptide
NVQVEKIVNSSDDVKAVKVSR

SEQ ID NO: 76363 - protein, 21 aa, Artificial Sequence
  Cyclic GFR-binding peptide
VQVEKIKPTKGIVKAIKVSRL

SEQ ID NO: 76364 - protein, 29 aa, Artificial Sequence
  Cyclic GFR-binding peptide
GEVVMEVTAKKVVKDYEDIKRMQVPRLET

SEQ ID NO: 76365 - protein, 33 aa, Artificial Sequence
  Cyclic GFR-binding peptide
  MOD_RES (27), (28): Xaa is C or S
ESMEGIVVKDYEDMIQMTINSLETPVXXAKPIS

SEQ ID NO: 76366 - protein, 22 aa, Artificial Sequence
  Cyclic GFR-binding peptide
EVTAKKVVKDYEDIKRMQVPRL

SEQ ID NO: 76367 - protein, 25 aa, Artificial Sequence
  Cyclic GFR-binding peptide
ELRNSLQELKPKKRVYEYYVVPLPE

SEQ ID NO: 76368 - protein, 37 aa, Artificial Sequence; identical to SEQ ID NO: 28174
  Cyclic GFR-binding peptide
  MOD_RES (2), (34), (35): Xaa is C or S

SEQ ID NO: 76369 - protein, 35 aa, Artificial Sequence; identical to SEQ ID NO: 28175
  Cyclic GFR-binding peptide
  MOD_RES (31), (32): Xaa is C or S

SEQ ID NO: 76370 - protein, 30 aa, Artificial Sequence
  Cyclic GFR-binding peptide
  MOD_RES (30), (30): Xaa is C or S
NSLQELKPKKRVYEYYLVTLPEHHVRSPQX

SEQ ID NO: 76371 - protein, 31 aa, Artificial Sequence
  Cyclic GFR-binding peptide
ELHEELRNSLQELKPKKRVYEYYLVTLPEHH

SEQ ID NO: 76372 - protein, 28 aa, Artificial Sequence
  Cyclic GFR-binding peptide
  MOD_RES (26), (27): Xaa is C or S
SMEGIVVKDYEDMIQMTINSLETPVXXA

SEQ ID NO: 76373 - protein, 33 aa, Artificial Sequence
  Cyclic GFR-binding peptide
  MOD_RES (2), (4): Xaa is C or S
EXKXALHDELTNSLQEFIPKKRVIEYYVVPLPE

SEQ ID NO: 76374 - protein, 34 aa, Artificial Sequence
  Cyclic GFR-binding peptide
  MOD_RES (29), (30): Xaa is C or S
VVMVQVEKVKPTRGVVKAIKVSRLDQPVXXPSAS

SEQ ID NO: 76375 - protein, 41 aa, Artificial Sequence; identical to SEQ ID NO: 28191
  Cyclic GFR-binding peptide
  MOD_RES (2), (4), (36), (37): Xaa is C or S

SEQ ID NO: 76376 - protein, 34 aa, Artificial Sequence; identical to SEQ ID NO: 28192
  Cyclic GFR-binding peptide

SEQ ID NO: 76377 - protein, 28 aa, Artificial Sequence
  Cyclic GFR-binding peptide
RNSLQELKPKKRVYEYYLVTLPEHHVRS

SEQ ID NO: 76378 - protein, 30 aa, Artificial Sequence; identical to SEQ ID NO: 28196
  Cyclic GFR-binding peptide

SEQ ID NO: 76379 - protein, 31 aa, Artificial Sequence
  Cyclic GFR-binding peptide
  MOD_RES (1), (3): Xaa is C or S
XGXARVVMNVTAKKIVNSSDDIKRVQVPRLQ

SEQ ID NO: 76380 - protein, 40 aa, Artificial Sequence; identical to SEQ ID NO: 28198
  Cyclic GFR-binding peptide
  MOD_RES (37), (37): Xaa is C or S

SEQ ID NO: 76381 - protein, 29 aa, Artificial Sequence
  Cyclic GFR-binding peptide
  MOD_RES (26), (26): Xaa is C or S
VQVEKIVNSSDDVKAVKVSRLKTPAXTPK

SEQ ID NO: 76382 - protein, 34 aa, Artificial Sequence; identical to SEQ ID NO: 28201
  Cyclic GFR-binding peptide
  MOD_RES (2), (4): Xaa is C or S

SEQ ID NO: 76383 - protein, 36 aa, Artificial Sequence; identical to SEQ ID NO: 28203
  Cyclic GFR-binding peptide
  MOD_RES (1), (33), (34): Xaa is C or S

SEQ ID NO: 76384 - protein, 26 aa, Artificial Sequence
  Cyclic GFR-binding peptide
RVVMNVQVEKIVNSSDDVKAVKVSRL

SEQ ID NO: 76385 - protein, 29 aa, Artificial Sequence
  Cyclic GFR-binding peptide
KNHQLFNSLQEHQGQHPKIRYYLMTLPEE

SEQ ID NO: 76386 - protein, 30 aa, Artificial Sequence
  Cyclic GFR-binding peptide
  MOD_RES (1), (3): Xaa is C or S
XKXSKVVMSMEGIVKPTRGVMIQITINSLD

SEQ ID NO: 76387 - protein, 30 aa, Artificial Sequence
  Cyclic GFR-binding peptide
  MOD_RES (27), (28): Xaa is C or S
MSMEGIIKPTKGIMIQITINSLDQSVXXPS

SEQ ID NO: 76388 - protein, 23 aa, Artificial Sequence
  Cyclic GFR-binding peptide
NSLQEHQGQHPKIRYYLMTLPEE

SEQ ID NO: 76389 - protein, 27 aa, Artificial Sequence
  Cyclic GFR-binding peptide
DELTNSLQEFIPKKRVIEYYVVPLPEL

SEQ ID NO: 76390 - protein, 34 aa, Artificial Sequence; identical to SEQ ID NO: 28215
  Cyclic GFR-binding peptide
  MOD_RES (1), (3), (34): Xaa is C or S

SEQ ID NO: 76391 - protein, 35 aa, Artificial Sequence
  Cyclic GFR-binding peptide
  MOD_RES (30), (31): Xaa is C or S
VVMEVTAKKVVKDYEDIKRMQVPRLETPVXXAKPI

SEQ ID NO: 76392 - protein, 23 aa, Artificial Sequence
  Cyclic GFR-binding peptide
DSMEGIVVKENEDMIQMTINSLE

SEQ ID NO: 76393 - protein, 33 aa, Artificial Sequence
  Cyclic GFR-binding peptide
  MOD_RES (29), (29): Xaa is C or S
VMNVQVEKIVNSSDDVKAVKVSRLKTPAXTPKT

SEQ ID NO: 76394 - protein, 35 aa, Artificial Sequence; identical to SEQ ID NO: 28218
  Cyclic GFR-binding peptide
  MOD_RES (34), (34): Xaa is C or S

SEQ ID NO: 76395 - protein, 29 aa, Artificial Sequence
  Cyclic GFR-binding peptide
  MOD_RES (2), (2): Xaa is C or S
KXSRVIMSMEGIVKPKRGVMIQITINSLA

SEQ ID NO: 76396 - protein, 28 aa, Artificial Sequence
  Cyclic GFR-binding peptide
  MOD_RES (28), (28): Xaa is C or S
IMVQVEKVKPKRGVVKAIKVSRLAQPVX

SEQ ID NO: 76397 - protein, 37 aa, Artificial Sequence; identical to SEQ ID NO: 28224
  Cyclic GFR-binding peptide
  MOD_RES (1), (3), (35): Xaa is C or S

SEQ ID NO: 76398 - protein, 25 aa, Artificial Sequence
  Cyclic GFR-binding peptide
LRNSLQELKPKKRVYEYYVVPLPEH

SEQ ID NO: 76399 - protein, 28 aa, Artificial Sequence
  Cyclic GFR-binding peptide
GEVVMEVQVEKVVKDYEDVKAMKVSRLE

SEQ ID NO: 76400 - protein, 24 aa, Artificial Sequence
  Cyclic GFR-binding peptide
VTAKKVKPKRGVIKRIQVPRLAQP

SEQ ID NO: 76401 - protein, 38 aa, Artificial Sequence
  Cyclic GFR-binding peptide
  MOD_RES (34), (34): Xaa is C or S
DELTNSLQEFIPKKRVIEYYLVTLPELQVQTPRXQVNR

SEQ ID NO: 76402 - protein, 31 aa, Artificial Sequence
  Cyclic GFR-binding peptide
  MOD_RES (30), (31): Xaa is C or S
VVMEVTAKKVVKDYEDIKRMQVPRLETPVXX

SEQ ID NO: 76403 - protein, 34 aa, Artificial Sequence; identical to SEQ ID NO: 28230
  Cyclic GFR-binding peptide
  MOD_RES (1), (33), (34): Xaa is C or S

SEQ ID NO: 76404 - protein, 34 aa, Artificial Sequence; identical to SEQ ID NO: 28231
  Cyclic GFR-binding peptide
  MOD_RES (1), (3): Xaa is C or S

SEQ ID NO: 76405 - protein, 32 aa, Artificial Sequence
  Cyclic GFR-binding peptide
  MOD_RES (27), (28): Xaa is C or S
NSMEGIIVNSSDDMIQVTINSLQTPAXXPKPV

SEQ ID NO: 76406 - protein, 30 aa, Artificial Sequence
  Cyclic GFR-binding peptide
LHDELTNSLQEFIPKKRVIEYYLVTLPELQ

SEQ ID NO: 76407 - protein, 31 aa, Artificial Sequence
  Cyclic GFR-binding peptide
  MOD_RES (29), (30): Xaa is C or S
VMNVTAKKIVNSSDDIKRVQVPRLKTPAXXP

SEQ ID NO: 76408 - protein, 24 aa, Artificial Sequence
  Cyclic GFR-binding peptide
VQVEKVVKDYEDVKAMKVSRLETP

SEQ ID NO: 76409 - protein, 29 aa, Artificial Sequence
  Cyclic GFR-binding peptide
  MOD_RES (26), (27): Xaa is C or S
VTAKKVKPKRGVIKRIQVPRLAQPVXXPA

SEQ ID NO: 76410 - protein, 29 aa, Artificial Sequence
  Cyclic GFR-binding peptide
  MOD_RES (28), (29): Xaa is C or S
IMVQVEKVKPKRGVVKAIKVSRLAQPVXX

SEQ ID NO: 76411 - protein, 27 aa, Artificial Sequence
  Cyclic GFR-binding peptide
LFNSLQEHQGQHPKIRYYLMTLPEEET

SEQ ID NO: 76412 - protein, 40 aa, Artificial Sequence; identical to SEQ ID NO: 28235
  Cyclic GFR-binding peptide
  MOD_RES (1), (3), (34), (35): Xaa is C or S

SEQ ID NO: 76413 - protein, 38 aa, Artificial Sequence; identical to SEQ ID NO: 28236
  Cyclic GFR-binding peptide
  MOD_RES (35), (35): Xaa is C or S

SEQ ID NO: 76414 - protein, 32 aa, Artificial Sequence
  Cyclic GFR-binding peptide
  MOD_RES (2), (4): Xaa is C or S
SXKXSKVIMVQVEKIKPTKGIVKAIKVSRLDQ

SEQ ID NO: 76415 - protein, 30 aa, Artificial Sequence
  Cyclic GFR-binding peptide
  MOD_RES (27), (27): Xaa is C or S
NSMEGIIVNSSDDMIQVTINSLKTPAXTPK

SEQ ID NO: 76416 - protein, 25 aa, Artificial Sequence
  Cyclic GFR-binding peptide
LTNSLQEFIPKKRVIEYYVVPLPEL

SEQ ID NO: 76417 - protein, 32 aa, Artificial Sequence
  Cyclic GFR-binding peptide
  MOD_RES (28), (29): Xaa is C or S
VMVQVEKVKPTRGVVKAIKVSRLDQPVXXPSA

SEQ ID NO: 76418 - protein, 31 aa, Artificial Sequence
  Cyclic GFR-binding peptide
  MOD_RES (1), (1): Xaa is C or S
XGEVVMDSMEGIVVKENEDMIQMTINSLETP

SEQ ID NO: 76419 - protein, 34 aa, Artificial Sequence
  Cyclic GFR-binding peptide
  MOD_RES (29), (29): Xaa is C or S
FNSLQEHQGQHPKIRYYVMPLPEEETPVXELGED

SEQ ID NO: 76420 - protein, 35 aa, Artificial Sequence
  Cyclic GFR-binding peptide
  MOD_RES (29), (29): Xaa is C or S
VMNVQVEKIVNSSDDVKAVKVSRLKTPAXTPKTVH

SEQ ID NO: 76421 - protein, 25 aa, Artificial Sequence
  Cyclic GFR-binding peptide
EVTAKKVVKDYEDIKRMQVPRLETP

SEQ ID NO: 76422 - protein, 38 aa, Artificial Sequence; identical to SEQ ID NO: 28245
  Cyclic GFR-binding peptide
  MOD_RES (1), (33), (34): Xaa is C or S

SEQ ID NO: 76423 - protein, 35 aa, Artificial Sequence
  Cyclic GFR-binding peptide
  MOD_RES (30), (31): Xaa is C or S
VVMDSMEGIVVKENEDMIQMTINSLETPVXXAKPI

SEQ ID NO: 76424 - protein, 37 aa, Artificial Sequence; identical to SEQ ID NO: 28249
  Cyclic GFR-binding peptide
  MOD_RES (32), (33): Xaa is C or S

SEQ ID NO: 76425 - protein, 34 aa, Artificial Sequence; identical to SEQ ID NO: 28248
  Cyclic GFR-binding peptide
  MOD_RES (2), (34): Xaa is C or S

SEQ ID NO: 76426 - protein, 34 aa, Artificial Sequence; identical to SEQ ID NO: 28253
  Cyclic GFR-binding peptide
  MOD_RES (2), (34): Xaa is C or S

SEQ ID NO: 76427 - protein, 25 aa, Artificial Sequence
  Cyclic GFR-binding peptide
SMEGIVKPKRGVMIQITINSLAQPV

SEQ ID NO: 76428 - protein, 39 aa, Artificial Sequence; identical to SEQ ID NO: 28255
  Cyclic GFR-binding peptide
  MOD_RES (37), (37): Xaa is C or S

SEQ ID NO: 76429 - protein, 34 aa, Artificial Sequence
  Cyclic GFR-binding peptide
  MOD_RES (2), (4): Xaa is C or S
EXKXALHDELTNSLQEFIPKKRVIEYYVVPLPEL

SEQ ID NO: 76430 - protein, 35 aa, Artificial Sequence; identical to SEQ ID NO: 28258
  Cyclic GFR-binding peptide
  MOD_RES (1), (32), (33): Xaa is C or S

SEQ ID NO: 76431 - protein, 32 aa, Artificial Sequence
  Cyclic GFR-binding peptide
  MOD_RES (28), (29): Xaa is C or S
IMVQVEKIKPTKGIVKAIKVSRLDQSVXXPSA

SEQ ID NO: 76432 - protein, 37 aa, Artificial Sequence; identical to SEQ ID NO: 28260
  Cyclic GFR-binding peptide
  MOD_RES (1), (3), (35), (36): Xaa is C or S

SEQ ID NO: 76433 - protein, 42 aa, Artificial Sequence; identical to SEQ ID NO: 28263
  Cyclic GFR-binding peptide
  MOD_RES (2), (4), (36): Xaa is C or S

SEQ ID NO: 76434 - protein, 36 aa, Artificial Sequence; identical to SEQ ID NO: 28264
  Cyclic GFR-binding peptide
  MOD_RES (1), (3), (34), (35): Xaa is C or S

SEQ ID NO: 76435 - protein, 35 aa, Artificial Sequence; identical to SEQ ID NO: 28269
  Cyclic GFR-binding peptide
  MOD_RES (2), (33), (34): Xaa is C or S

SEQ ID NO: 76436 - protein, 30 aa, Artificial Sequence; identical to SEQ ID NO: 28270
  Cyclic GFR-binding peptide

SEQ ID NO: 76437 - protein, 39 aa, Artificial Sequence; identical to SEQ ID NO: 28271
  Cyclic GFR-binding peptide
  MOD_RES (2), (33), (34): Xaa is C or S

SEQ ID NO: 76438 - protein, 26 aa, Artificial Sequence
  Cyclic GFR-binding peptide
ELTNSLQEFIPKKRVIEYYLVTLPEL

SEQ ID NO: 76439 - protein, 27 aa, Artificial Sequence
  Cyclic GFR-binding peptide
LTNSLQEFIPKKRVIEYYVVPLPELQV

SEQ ID NO: 76440 - protein, 37 aa, Artificial Sequence; identical to SEQ ID NO: 28277
  Cyclic GFR-binding peptide
  MOD_RES (35), (35): Xaa is C or S

SEQ ID NO: 76441 - protein, 22 aa, Artificial Sequence
  Cyclic GFR-binding peptide
MDVQVEKVVKENEDVKAMKVSR

SEQ ID NO: 76442 - protein, 30 aa, Artificial Sequence
  Cyclic GFR-binding peptide
  MOD_RES (28), (29): Xaa is C or S
MDSMEGIVVKENEDMIQMTINSLETPVXXA

SEQ ID NO: 76443 - protein, 28 aa, Artificial Sequence
  Cyclic GFR-binding peptide
  MOD_RES (2), (2): Xaa is C or S
KXSRVIMSMEGIVKPKRGVMIQITINSL

SEQ ID NO: 76444 - protein, 34 aa, Artificial Sequence; identical to SEQ ID NO: 28279
  Cyclic GFR-binding peptide

SEQ ID NO: 76445 - protein, 34 aa, Artificial Sequence; identical to SEQ ID NO: 28280
  Cyclic GFR-binding peptide
  MOD_RES (31), (32): Xaa is C or S

SEQ ID NO: 76446 - protein, 36 aa, Artificial Sequence; identical to SEQ ID NO: 28285
  Cyclic GFR-binding peptide
  MOD_RES (1), (33), (34): Xaa is C or S

SEQ ID NO: 76447 - protein, 34 aa, Artificial Sequence; identical to SEQ ID NO: 28286
  Cyclic GFR-binding peptide
  MOD_RES (1), (32), (33): Xaa is C or S

SEQ ID NO: 76448 - protein, 31 aa, Artificial Sequence
  Cyclic GFR-binding peptide
  MOD_RES (2), (2): Xaa is C or S
KXALHDELTNSLQEFIPKKRVIEYYVVPLPE

SEQ ID NO: 76449 - protein, 30 aa, Artificial Sequence
  Cyclic GFR-binding peptide
  MOD_RES (2), (4): Xaa is C or S
RXGXGEVVMESMEGIVVKDYEDMIQMTINS

SEQ ID NO: 76450 - protein, 32 aa, Artificial Sequence
  Cyclic GFR-binding peptide
DELTNSLQEFIPKKRVIEYYLVTLPELQVQTP

SEQ ID NO: 76451 - protein, 29 aa, Artificial Sequence
  Cyclic GFR-binding peptide
GEVVMDSMEGIVVKENEDMIQMTINSLET

SEQ ID NO: 76452 - protein, 38 aa, Artificial Sequence; identical to SEQ ID NO: 28296
  Cyclic GFR-binding peptide
  MOD_RES (1), (3), (34), (35): Xaa is C or S

SEQ ID NO: 76453 - protein, 23 aa, Artificial Sequence
  Cyclic GFR-binding peptide
VIMVQVEKVKPKRGVVKAIKVSR

SEQ ID NO: 76454 - protein, 31 aa, Artificial Sequence
  Cyclic GFR-binding peptide
  MOD_RES (29), (30): Xaa is C or S
VMDVTAKKVVKENEDIKRMQVPRLETPVXXA

SEQ ID NO: 76455 - protein, 36 aa, Artificial Sequence; identical to SEQ ID NO: 28299
  Cyclic GFR-binding peptide
  MOD_RES (1), (3), (35), (36): Xaa is C or S

SEQ ID NO: 76456 - protein, 26 aa, Artificial Sequence
  Cyclic GFR-binding peptide
SRVIMVQVEKVKPKRGVVKAIKVSRL

SEQ ID NO: 76457 - protein, 33 aa, Artificial Sequence; identical to SEQ ID NO: 28300
  Cyclic GFR-binding peptide
  MOD_RES (1), (33): Xaa is C or S

SEQ ID NO: 76458 - protein, 32 aa, Artificial Sequence
  Cyclic GFR-binding peptide
  MOD_RES (2), (2): Xaa is C or S
GXARVVMNSMEGIIVNSSDDMIQVTINSLQTP

SEQ ID NO: 76459 - protein, 26 aa, Artificial Sequence
  Cyclic GFR-binding peptide
VMNSMEGIIVNSSDDMIQVTINSLKT

SEQ ID NO: 76460 - protein, 33 aa, Artificial Sequence
  Cyclic GFR-binding peptide
  MOD_RES (27), (28): Xaa is C or S
DVTAKKVVKENEDIKRMQVPRLETPVXXAKPIK

SEQ ID NO: 76461 - protein, 33 aa, Artificial Sequence
  Cyclic GFR-binding peptide
  MOD_RES (1), (3): Xaa is C or S
XGXGEVVMEVQVEKVVKDYEDVKAMKVSRLETP

SEQ ID NO: 76462 - protein, 39 aa, Artificial Sequence; identical to SEQ ID NO: 28305
  Cyclic GFR-binding peptide
  MOD_RES (2), (33), (34): Xaa is C or S

SEQ ID NO: 76463 - protein, 33 aa, Artificial Sequence
  Cyclic GFR-binding peptide
  MOD_RES (1), (1): Xaa is C or S
XKNHQLFNSLQEHQGQHPKIRYYVMPLPEEETP

SEQ ID NO: 76464 - protein, 27 aa, Artificial Sequence
  Cyclic GFR-binding peptide
HEELRNSLQELKPKKRVYEYYVVPLPE

SEQ ID NO: 76465 - protein, 31 aa, Artificial Sequence
  Cyclic GFR-binding peptide
  MOD_RES (2), (4): Xaa is C or S
SXKXSKVVMVQVEKVKPTRGVVKAIKVSRLD

SEQ ID NO: 76466 - protein, 33 aa, Artificial Sequence
  Cyclic GFR-binding peptide
  MOD_RES (2), (2): Xaa is C or S
EXKNHQLFNSLQEHQGQHPKIRYYLMTLPEEET

SEQ ID NO: 76467 - protein, 36 aa, Artificial Sequence; identical to SEQ ID NO: 28315
  Cyclic GFR-binding peptide
  MOD_RES (2), (4), (36): Xaa is C or S

SEQ ID NO: 76468 - protein, 21 aa, Artificial Sequence
  Cyclic GFR-binding peptide
DVQVEKVVKENEDVKAMKVSR

SEQ ID NO: 76469 - protein, 31 aa, Artificial Sequence
  Cyclic GFR-binding peptide
AAAAAAAAANSLQEFIPKKRVIEYYLVTLPE

SEQ ID NO: 76470 - protein, 32 aa, Artificial Sequence
  Cyclic GFR-binding peptide
  MOD_RES (32), (32): Xaa is C or S
LRNSLQELKPKKRVYEYYVVPLPEHHVRSPQX

SEQ ID NO: 76471 - protein, 30 aa, Artificial Sequence
  Cyclic GFR-binding peptide
  MOD_RES (29), (30): Xaa is C or S
VVMSMEGIVKPTRGVMIQITINSLDQPVXX

SEQ ID NO: 76472 - protein, 31 aa, Artificial Sequence
  Cyclic GFR-binding peptide
LRNSLQELKPKKRVYEYYLVTLPEHHVRSPQ

SEQ ID NO: 76473 - protein, 28 aa, Artificial Sequence
  Cyclic GFR-binding peptide
  MOD_RES (27), (28): Xaa is C or S
DVQVEKVVKENEDVKAMKVSRLETPVXX

SEQ ID NO: 76474 - protein, 33 aa, Artificial Sequence
  Cyclic GFR-binding peptide
  MOD_RES (2), (4): Xaa is C or S
AXAXELHEELRNSLQELKPKKRVYEYYLVTLPE

SEQ ID NO: 76475 - protein, 40 aa, Artificial Sequence; identical to SEQ ID NO: 28325
  Cyclic GFR-binding peptide
  MOD_RES (1), (3), (40): Xaa is C or S

SEQ ID NO: 76476 - protein, 35 aa, Artificial Sequence; identical to SEQ ID NO: 28327
  Cyclic GFR-binding peptide
  MOD_RES (2), (4): Xaa is C or S

SEQ ID NO: 76477 - protein, 41 aa, Artificial Sequence; identical to SEQ ID NO: 28331
  Cyclic GFR-binding peptide
  MOD_RES (1), (3), (35), (36): Xaa is C or S

SEQ ID NO: 76478 - protein, 28 aa, Artificial Sequence
  Cyclic GFR-binding peptide
VIMVQVEKVKPKRGVVKAIKVSRLAQPV

SEQ ID NO: 76479 - protein, 37 aa, Artificial Sequence; identical to SEQ ID NO: 28333
  Cyclic GFR-binding peptide
  MOD_RES (2), (4), (36): Xaa is C or S

SEQ ID NO: 76480 - protein, 35 aa, Artificial Sequence
  Cyclic GFR-binding peptide
  MOD_RES (29), (30): Xaa is C or S
VMNVQVEKIVNSSDDVKAVKVSRLKTPAXXPKPVY

SEQ ID NO: 76481 - protein, 32 aa, Artificial Sequence
  Cyclic GFR-binding peptide
  MOD_RES (2), (2): Xaa is C or S
GXGEVVMEVTAKKVVKDYEDIKRMQVPRLETP

SEQ ID NO: 76482 - protein, 35 aa, Artificial Sequence
  Cyclic GFR-binding peptide
  MOD_RES (34), (34): Xaa is C or S
EELRNSLQELKPKKRVYEYYLVTLPEHHVRSPQXK

SEQ ID NO: 76483 - protein, 31 aa, Artificial Sequence
  Cyclic GFR-binding peptide
  MOD_RES (1), (3): Xaa is C or S
XEXKNHQLFNSLQEHQGQHPKIRYYLMTLPE

SEQ ID NO: 76484 - protein, 32 aa, Artificial Sequence
  Cyclic GFR-binding peptide
  MOD_RES (2), (4): Xaa is C or S
SXKXSKVVMSMEGIVKPTRGVMIQITINSLDQ

SEQ ID NO: 76485 - protein, 30 aa, Artificial Sequence
  Cyclic GFR-binding peptide
  MOD_RES (1), (3): Xaa is C or S
XKXSRVIMVQVEKVKPKRGVVKAIKVSRLA

SEQ ID NO: 76486 - protein, 38 aa, Artificial Sequence; identical to SEQ ID NO: 28341
  Cyclic GFR-binding peptide
  MOD_RES (34), (34): Xaa is C or S

SEQ ID NO: 76487 - protein, 36 aa, Artificial Sequence; identical to SEQ ID NO: 28343
  Cyclic GFR-binding peptide
  MOD_RES (35), (35): Xaa is C or S

SEQ ID NO: 76488 - protein, 30 aa, Artificial Sequence
  Cyclic GFR-binding peptide
  MOD_RES (26), (27): Xaa is C or S
VQVEKVKPKRGVVKAIKVSRLAQPVXXPAA

SEQ ID NO: 76489 - protein, 27 aa, Artificial Sequence
  Cyclic GFR-binding peptide
  MOD_RES (26), (27): Xaa is C or S
VQVEKVVKDYEDVKAMKVSRLETPVXX

SEQ ID NO: 76490 - protein, 25 aa, Artificial Sequence
  Cyclic GFR-binding peptide
MSMEGIVKPTRGVMIQITINSLDQP

SEQ ID NO: 76491 - protein, 28 aa, Artificial Sequence
  Cyclic GFR-binding peptide
  MOD_RES (1), (1): Xaa is C or S
XSKVVMVQVEKVKPTRGVVKAIKVSRLD

SEQ ID NO: 76492 - protein, 30 aa, Artificial Sequence
  Cyclic GFR-binding peptide
  MOD_RES (1), (1): Xaa is C or S
XSKVIMVQVEKIKPTKGIVKAIKVSRLDQS

SEQ ID NO: 76493 - protein, 36 aa, Artificial Sequence; identical to SEQ ID NO: 28347
  Cyclic GFR-binding peptide
  MOD_RES (2), (2): Xaa is C or S

SEQ ID NO: 76494 - protein, 30 aa, Artificial Sequence; identical to SEQ ID NO: 28350
  Cyclic GFR-binding peptide

SEQ ID NO: 76495 - protein, 29 aa, Artificial Sequence
  Cyclic GFR-binding peptide
NSLQELKPKKRVYEYYLVTLPEHHVRSPQ

SEQ ID NO: 76496 - protein, 39 aa, Artificial Sequence; identical to SEQ ID NO: 28357
  Cyclic GFR-binding peptide
  MOD_RES (2), (33), (34): Xaa is C or S

SEQ ID NO: 76497 - protein, 27 aa, Artificial Sequence
  Cyclic GFR-binding peptide
EELRNSLQELKPKKRVYEYYLVTLPEH

SEQ ID NO: 76498 - protein, 31 aa, Artificial Sequence
  Cyclic GFR-binding peptide
  MOD_RES (30), (31): Xaa is C or S
VVMEVQVEKVVKDYEDVKAMKVSRLETPVXX

SEQ ID NO: 76499 - protein, 28 aa, Artificial Sequence
  Cyclic GFR-binding peptide
DELTNSLQEFIPKKRVIEYYLVTLPELQ

SEQ ID NO: 76500 - protein, 21 aa, Artificial Sequence
  Cyclic GFR-binding peptide
NVTAKKIVNSSDDIKRVQVPR

SEQ ID NO: 76501 - protein, 28 aa, Artificial Sequence
  Cyclic GFR-binding peptide
  MOD_RES (26), (27): Xaa is C or S
VQVEKVVKDYEDVKAMKVSRLETPVXXA

SEQ ID NO: 76502 - protein, 40 aa, Artificial Sequence; identical to SEQ ID NO: 28364
  Cyclic GFR-binding peptide
  MOD_RES (2), (4), (36): Xaa is C or S

SEQ ID NO: 76503 - protein, 27 aa, Artificial Sequence
  Cyclic GFR-binding peptide
GEVVMDVTAKKVVKENEDIKRMQVPRL

SEQ ID NO: 76504 - protein, 40 aa, Artificial Sequence; identical to SEQ ID NO: 28368
  Cyclic GFR-binding peptide
  MOD_RES (1), (35): Xaa is C or S

SEQ ID NO: 76505 - protein, 31 aa, Artificial Sequence
  Cyclic GFR-binding peptide
  MOD_RES (27), (28): Xaa is C or S
NVQVEKIVNSSDDVKAVKVSRLQTPAXXPKP

SEQ ID NO: 76506 - protein, 31 aa, Artificial Sequence
  Cyclic GFR-binding peptide
  MOD_RES (26), (27): Xaa is C or S
VQVEKVKPKRGVVKAIKVSRLAQPVXXPAAS

SEQ ID NO: 76507 - protein, 34 aa, Artificial Sequence
  Cyclic GFR-binding peptide
  MOD_RES (30), (31): Xaa is C or S
KVVMVQVEKVKPTRGVVKAIKVSRLDQPVXXPSA

SEQ ID NO: 76508 - protein, 23 aa, Artificial Sequence
  Cyclic GFR-binding peptide
NSLQEFIPKKRVIEYYLVTLPEL

SEQ ID NO: 76509 - protein, 37 aa, Artificial Sequence; identical to SEQ ID NO: 28374
  Cyclic GFR-binding peptide
  MOD_RES (2), (33), (34): Xaa is C or S

SEQ ID NO: 76510 - protein, 29 aa, Artificial Sequence
  Cyclic GFR-binding peptide
AAAAAAAAAVQVEKIVNSSDDVKAVKVSR

SEQ ID NO: 76511 - protein, 42 aa, Artificial Sequence; identical to SEQ ID NO: 28375
  Cyclic GFR-binding peptide
  MOD_RES (2), (4), (36), (37): Xaa is C or S

SEQ ID NO: 76512 - protein, 35 aa, Artificial Sequence; identical to SEQ ID NO: 28378
  Cyclic GFR-binding peptide
  MOD_RES (31), (32): Xaa is C or S

SEQ ID NO: 76513 - protein, 26 aa, Artificial Sequence
  Cyclic GFR-binding peptide
VIMVTAKKVKPKRGVIKRIQVPRLAQ

SEQ ID NO: 76514 - protein, 41 aa, Artificial Sequence; identical to SEQ ID NO: 28383
  Cyclic GFR-binding peptide
  MOD_RES (2), (4), (36), (37): Xaa is C or S

SEQ ID NO: 76515 - protein, 33 aa, Artificial Sequence; identical to SEQ ID NO: 28384
  Cyclic GFR-binding peptide
  MOD_RES (32), (33): Xaa is C or S

SEQ ID NO: 76516 - protein, 30 aa, Artificial Sequence
  Cyclic GFR-binding peptide
NHQLFNSLQEHQGQHPKIRYYVMPLPEEET

SEQ ID NO: 76517 - protein, 35 aa, Artificial Sequence; identical to SEQ ID NO: 28385
  Cyclic GFR-binding peptide
  MOD_RES (2), (34), (35): Xaa is C or S

SEQ ID NO: 76518 - protein, 33 aa, Artificial Sequence; identical to SEQ ID NO: 28386
  Cyclic GFR-binding peptide
  MOD_RES (1), (32), (33): Xaa is C or S

SEQ ID NO: 76519 - protein, 33 aa, Artificial Sequence
  Cyclic GFR-binding peptide
  MOD_RES (27), (28): Xaa is C or S
NVQVEKIVNSSDDVKAVKVSRLKTPAXXPKPVY

SEQ ID NO: 76520 - protein, 37 aa, Artificial Sequence; identical to SEQ ID NO: 28389
  Cyclic GFR-binding peptide
  MOD_RES (1), (1): Xaa is C or S

SEQ ID NO: 76521 - protein, 39 aa, Artificial Sequence; identical to SEQ ID NO: 28390
  Cyclic GFR-binding peptide
  MOD_RES (1), (3), (35), (36): Xaa is C or S

SEQ ID NO: 76522 - protein, 37 aa, Artificial Sequence; identical to SEQ ID NO: 28393
  Cyclic GFR-binding peptide
  MOD_RES (2), (34): Xaa is C or S

SEQ ID NO: 76523 - protein, 35 aa, Artificial Sequence; identical to SEQ ID NO: 28395
  Cyclic GFR-binding peptide

SEQ ID NO: 76524 - protein, 38 aa, Artificial Sequence; identical to SEQ ID NO: 28396
  Cyclic GFR-binding peptide
  MOD_RES (1), (3), (35), (36): Xaa is C or S

SEQ ID NO: 76525 - protein, 28 aa, Artificial Sequence
  Cyclic GFR-binding peptide
NHQLFNSLQEHQGQHPKIRYYVMPLPEE

SEQ ID NO: 76526 - protein, 25 aa, Artificial Sequence
  Cyclic GFR-binding peptide
MEVQVEKVVKDYEDVKAMKVSRLET

SEQ ID NO: 76527 - protein, 34 aa, Artificial Sequence; identical to SEQ ID NO: 28400
  Cyclic GFR-binding peptide
  MOD_RES (1), (3): Xaa is C or S

SEQ ID NO: 76528 - protein, 25 aa, Artificial Sequence
  Cyclic GFR-binding peptide
MVTAKKIKPTKGIIKRIQVPRLDQS

SEQ ID NO: 76529 - protein, 29 aa, Artificial Sequence
  Cyclic GFR-binding peptide
  MOD_RES (27), (28): Xaa is C or S
DSMEGIVVKENEDMIQMTINSLETPVXXA

SEQ ID NO: 76530 - protein, 30 aa, Artificial Sequence
  Cyclic GFR-binding peptide
  MOD_RES (27), (28): Xaa is C or S
DVTAKKVVKENEDIKRMQVPRLETPVXXAK

SEQ ID NO: 76531 - protein, 38 aa, Artificial Sequence; identical to SEQ ID NO: 28401
  Cyclic GFR-binding peptide
  MOD_RES (1), (3), (35), (36): Xaa is C or S

SEQ ID NO: 76532 - protein, 30 aa, Artificial Sequence
  Cyclic GFR-binding peptide
  MOD_RES (26), (27): Xaa is C or S
VTAKKVVKENEDIKRMQVPRLETPVXXAKP

SEQ ID NO: 76533 - protein, 31 aa, Artificial Sequence
  Cyclic GFR-binding peptide
  MOD_RES (1), (3): Xaa is C or S
XGXSRVVMNVTAKKIVNSSDDIKRVQVPRLK

SEQ ID NO: 76534 - protein, 22 aa, Artificial Sequence
  Cyclic GFR-binding peptide
VTAKKVKPTRGVIKRIQVPRLD

SEQ ID NO: 76535 - protein, 35 aa, Artificial Sequence
  Cyclic GFR-binding peptide
  MOD_RES (30), (31): Xaa is C or S
KVIMSMEGIIKPTKGIMIQITINSLDQSVXXPSAS

SEQ ID NO: 76536 - protein, 30 aa, Artificial Sequence
  Cyclic GFR-binding peptide
  MOD_RES (27), (28): Xaa is C or S
MVQVEKVKPKRGVVKAIKVSRLAQPVXXPA

SEQ ID NO: 76537 - protein, 34 aa, Artificial Sequence
  Cyclic GFR-binding peptide
  MOD_RES (29), (30): Xaa is C or S
VVMSMEGIVKPTRGVMIQITINSLDQPVXXPSAS

SEQ ID NO: 76538 - protein, 34 aa, Artificial Sequence
  Cyclic GFR-binding peptide
  MOD_RES (32), (32): Xaa is C or S
HQLFNSLQEHQGQHPKIRYYVMPLPEEETPVXEL

SEQ ID NO: 76539 - protein, 33 aa, Artificial Sequence
  Cyclic GFR-binding peptide
  MOD_RES (30), (30): Xaa is C or S
VVMNVTAKKIVNSSDDIKRVQVPRLKTPAXTPK

SEQ ID NO: 76540 - protein, 35 aa, Artificial Sequence; identical to SEQ ID NO: 28410
  Cyclic GFR-binding peptide
  MOD_RES (2), (34), (35): Xaa is C or S

SEQ ID NO: 76541 - protein, 42 aa, Artificial Sequence; identical to SEQ ID NO: 28411
  Cyclic GFR-binding peptide
  MOD_RES (2), (39): Xaa is C or S

SEQ ID NO: 76542 - protein, 24 aa, Artificial Sequence
  Cyclic GFR-binding peptide
VIMVTAKKVKPKRGVIKRIQVPRL

SEQ ID NO: 76543 - protein, 31 aa, Artificial Sequence
  Cyclic GFR-binding peptide
  MOD_RES (26), (27): Xaa is C or S
VTAKKVVKENEDIKRMQVPRLETPVXXAKPI

SEQ ID NO: 76544 - protein, 23 aa, Artificial Sequence
  Cyclic GFR-binding peptide
VIMSMEGIIKPTKGIMIQITINS

SEQ ID NO: 76545 - protein, 22 aa, Artificial Sequence
  Cyclic GFR-binding peptide
VTAKKVVKDYEDIKRMQVPRLE

SEQ ID NO: 76546 - protein, 34 aa, Artificial Sequence
  Cyclic GFR-binding peptide
  MOD_RES (30), (31): Xaa is C or S
RVIMVTAKKVKPKRGVIKRIQVPRLAQPVXXPAA

SEQ ID NO: 76547 - protein, 35 aa, Artificial Sequence
  Cyclic GFR-binding peptide
  MOD_RES (29), (30): Xaa is C or S
VMNSMEGIIVNSSDDMIQVTINSLKTPAXXPKPVY

SEQ ID NO: 76548 - protein, 32 aa, Artificial Sequence
  Cyclic GFR-binding peptide
  MOD_RES (26), (27): Xaa is C or S
VQVEKVKPTRGVVKAIKVSRLDQPVXXPSASA

SEQ ID NO: 76549 - protein, 30 aa, Artificial Sequence
  Cyclic GFR-binding peptide
  MOD_RES (30), (30): Xaa is C or S
KVIMVQVEKIKPTKGIVKAIKVSRLDQSVX

SEQ ID NO: 76550 - protein, 33 aa, Artificial Sequence
  Cyclic GFR-binding peptide
  MOD_RES (2), (4): Xaa is C or S
RXGXGEVVMEVTAKKVVKDYEDIKRMQVPRLET

SEQ ID NO: 76551 - protein, 35 aa, Artificial Sequence; identical to SEQ ID NO: 28426
  Cyclic GFR-binding peptide
  MOD_RES (1), (3), (34), (35): Xaa is C or S

SEQ ID NO: 76552 - protein, 34 aa, Artificial Sequence
  Cyclic GFR-binding peptide
  MOD_RES (28), (29): Xaa is C or S
IMSMEGIIKPTKGIMIQITINSLDQSVXXPSASA

SEQ ID NO: 76553 - protein, 31 aa, Artificial Sequence; identical to SEQ ID NO: 28434
  Cyclic GFR-binding peptide
  MOD_RES (31), (31): Xaa is C or S

SEQ ID NO: 76554 - protein, 34 aa, Artificial Sequence; identical to SEQ ID NO: 28437
  Cyclic GFR-binding peptide
  MOD_RES (32), (32): Xaa is C or S

SEQ ID NO: 76555 - protein, 26 aa, Artificial Sequence
  Cyclic GFR-binding peptide
NVQVEKIVNSSDDVKAVKVSRLKTPA

SEQ ID NO: 76556 - protein, 30 aa, Artificial Sequence
  Cyclic GFR-binding peptide
  MOD_RES (29), (30): Xaa is C or S
VIMVTAKKVKPKRGVIKRIQVPRLAQPVXX

SEQ ID NO: 76557 - protein, 35 aa, Artificial Sequence; identical to SEQ ID NO: 28445
  Cyclic GFR-binding peptide
  MOD_RES (32), (33): Xaa is C or S

SEQ ID NO: 76558 - protein, 37 aa, Artificial Sequence; identical to SEQ ID NO: 28446
  Cyclic GFR-binding peptide
  MOD_RES (1), (32), (33): Xaa is C or S

SEQ ID NO: 76559 - protein, 23 aa, Artificial Sequence
  Cyclic GFR-binding peptide
MVQVEKIKPTKGIVKAIKVSRLD

SEQ ID NO: 76560 - protein, 39 aa, Artificial Sequence; identical to SEQ ID NO: 28447
  Cyclic GFR-binding peptide
  MOD_RES (1), (3), (35), (36): Xaa is C or S

SEQ ID NO: 76561 - protein, 33 aa, Artificial Sequence; identical to SEQ ID NO: 28448
  Cyclic GFR-binding peptide
  MOD_RES (32), (33): Xaa is C or S

SEQ ID NO: 76562 - protein, 31 aa, Artificial Sequence
  Cyclic GFR-binding peptide
DELTNSLQEFIPKKRVIEYYVVPLPELQVQT

SEQ ID NO: 76563 - protein, 34 aa, Artificial Sequence; identical to SEQ ID NO: 28450
  Cyclic GFR-binding peptide
  MOD_RES (1), (32), (33): Xaa is C or S

SEQ ID NO: 76564 - protein, 23 aa, Artificial Sequence
  Cyclic GFR-binding peptide
VQVEKVVKENEDVKAMKVSRLET

SEQ ID NO: 76565 - protein, 30 aa, Artificial Sequence
  Cyclic GFR-binding peptide
TNSLQEFIPKKRVIEYYVVPLPELQVQTPR

SEQ ID NO: 76566 - protein, 37 aa, Artificial Sequence; identical to SEQ ID NO: 28452
  Cyclic GFR-binding peptide
  MOD_RES (1), (3), (34), (35): Xaa is C or S

SEQ ID NO: 76567 - protein, 29 aa, Artificial Sequence
  Cyclic GFR-binding peptide
LTNSLQEFIPKKRVIEYYLVTLPELQVQT

SEQ ID NO: 76568 - protein, 32 aa, Artificial Sequence
  Cyclic GFR-binding peptide
  MOD_RES (30), (31): Xaa is C or S
RVIMSMEGIVKPKRGVMIQITINSLAQPVXXP

SEQ ID NO: 76569 - protein, 22 aa, Artificial Sequence
  Cyclic GFR-binding peptide
IMSMEGIVKPKRGVMIQITINS

SEQ ID NO: 76570 - protein, 35 aa, Artificial Sequence; identical to SEQ ID NO: 28456
  Cyclic GFR-binding peptide
  MOD_RES (2), (2): Xaa is C or S

SEQ ID NO: 76571 - protein, 30 aa, Artificial Sequence
  Cyclic GFR-binding peptide
  MOD_RES (2), (4): Xaa is C or S
SXKXSKVIMVQVEKIKPTKGIVKAIKVSRL

SEQ ID NO: 76572 - protein, 31 aa, Artificial Sequence
  Cyclic GFR-binding peptide
  MOD_RES (2), (4): Xaa is C or S
RXGXGEVVMEVTAKKVVKDYEDIKRMQVPRL

SEQ ID NO: 76573 - protein, 27 aa, Artificial Sequence
  Cyclic GFR-binding peptide
IMVQVEKVKPKRGVVKAIKVSRLAQPV

SEQ ID NO: 76574 - protein, 39 aa, Artificial Sequence; identical to SEQ ID NO: 28463
  Cyclic GFR-binding peptide
  MOD_RES (2), (4), (36): Xaa is C or S

SEQ ID NO: 76575 - protein, 36 aa, Artificial Sequence; identical to SEQ ID NO: 28468
  Cyclic GFR-binding peptide
  MOD_RES (31), (32): Xaa is C or S

SEQ ID NO: 76576 - protein, 38 aa, Artificial Sequence; identical to SEQ ID NO: 28467
  Cyclic GFR-binding peptide
  MOD_RES (2), (34): Xaa is C or S

SEQ ID NO: 76577 - protein, 39 aa, Artificial Sequence; identical to SEQ ID NO: 28471
  Cyclic GFR-binding peptide
  MOD_RES (34), (34): Xaa is C or S

SEQ ID NO: 76578 - protein, 32 aa, Artificial Sequence; identical to SEQ ID NO: 28473
  Cyclic GFR-binding peptide
  MOD_RES (31), (32): Xaa is C or S

SEQ ID NO: 76579 - protein, 32 aa, Artificial Sequence
  Cyclic GFR-binding peptide
  MOD_RES (1), (3): Xaa is C or S
XAXELHEELRNSLQELKPKKRVYEYYLVTLPE

SEQ ID NO: 76580 - protein, 34 aa, Artificial Sequence; identical to SEQ ID NO: 25754
  Cyclic GFR-binding peptide
  MOD_RES (1), (33), (34): Xaa is C or S

SEQ ID NO: 76581 - protein, 28 aa, Artificial Sequence
  Cyclic GFR-binding peptide
  MOD_RES (26), (27): Xaa is C or S
VTAKKVVKDYEDIKRMQVPRLETPVXXA

SEQ ID NO: 76582 - protein, 35 aa, Artificial Sequence; identical to SEQ ID NO: 25755
  Cyclic GFR-binding peptide
  MOD_RES (2), (34), (35): Xaa is C or S

SEQ ID NO: 76583 - protein, 39 aa, Artificial Sequence; identical to SEQ ID NO: 25757
  Cyclic GFR-binding peptide
  MOD_RES (1), (3), (35), (36): Xaa is C or S

SEQ ID NO: 76584 - protein, 34 aa, Artificial Sequence; identical to SEQ ID NO: 25758
  Cyclic GFR-binding peptide
  MOD_RES (1), (3), (34): Xaa is C or S

SEQ ID NO: 76585 - protein, 30 aa, Artificial Sequence
  Cyclic GFR-binding peptide
  MOD_RES (28), (29): Xaa is C or S
MNVTAKKIVNSSDDIKRVQVPRLQTPAXXP

SEQ ID NO: 76586 - protein, 38 aa, Artificial Sequence; identical to SEQ ID NO: 25760
  Cyclic GFR-binding peptide
  MOD_RES (2), (4), (36): Xaa is C or S

SEQ ID NO: 76587 - protein, 41 aa, Artificial Sequence; identical to SEQ ID NO: 25761
  Cyclic GFR-binding peptide
  MOD_RES (2), (4), (38): Xaa is C or S

SEQ ID NO: 76588 - protein, 38 aa, Artificial Sequence; identical to SEQ ID NO: 25764
  Cyclic GFR-binding peptide
  MOD_RES (1), (3), (37): Xaa is C or S

SEQ ID NO: 76589 - protein, 36 aa, Artificial Sequence; identical to SEQ ID NO: 25768
  Cyclic GFR-binding peptide
  MOD_RES (2), (33), (34): Xaa is C or S

SEQ ID NO: 76590 - protein, 24 aa, Artificial Sequence
  Cyclic GFR-binding peptide
VMVQVEKVKPTRGVVKAIKVSRLD

SEQ ID NO: 76591 - protein, 23 aa, Artificial Sequence
  Cyclic GFR-binding peptide
VVMVTAKKVKPTRGVIKRIQVPR

SEQ ID NO: 76592 - protein, 33 aa, Artificial Sequence; identical to SEQ ID NO: 25778
  Cyclic GFR-binding peptide
  MOD_RES (1), (32), (33): Xaa is C or S

SEQ ID NO: 76593 - protein, 39 aa, Artificial Sequence; identical to SEQ ID NO: 25779
  Cyclic GFR-binding peptide
  MOD_RES (2), (33), (34): Xaa is C or S

SEQ ID NO: 76594 - protein, 39 aa, Artificial Sequence; identical to SEQ ID NO: 25781
  Cyclic GFR-binding peptide
  MOD_RES (2), (4), (36), (37): Xaa is C or S

SEQ ID NO: 76595 - protein, 27 aa, Artificial Sequence
  Cyclic GFR-binding peptide
NSLQEHQGQHPKIRYYVMPLPEEETPV

SEQ ID NO: 76596 - protein, 25 aa, Artificial Sequence
  Cyclic GFR-binding peptide
EVVMDVTAKKVVKENEDIKRMQVPR

SEQ ID NO: 76597 - protein, 29 aa, Artificial Sequence
  Cyclic GFR-binding peptide
VVMEVQVEKVVKDYEDVKAMKVSRLETPV

SEQ ID NO: 76598 - protein, 31 aa, Artificial Sequence; identical to SEQ ID NO: 25783
  Cyclic GFR-binding peptide
  MOD_RES (31), (31): Xaa is C or S

SEQ ID NO: 76599 - protein, 33 aa, Artificial Sequence; identical to SEQ ID NO: 25786
  Cyclic GFR-binding peptide
  MOD_RES (1), (33): Xaa is C or S

SEQ ID NO: 76600 - protein, 35 aa, Artificial Sequence
  Cyclic GFR-binding peptide
  MOD_RES (29), (29): Xaa is C or S
VMNSMEGIIVNSSDDMIQVTINSLKTPAXTPKTVH

SEQ ID NO: 76601 - protein, 32 aa, Artificial Sequence
  Cyclic GFR-binding peptide
  MOD_RES (1), (3): Xaa is C or S
XGXSRVVMNVQVEKIVNSSDDVKAVKVSRLKT

SEQ ID NO: 76602 - protein, 31 aa, Artificial Sequence
  Cyclic GFR-binding peptide
  MOD_RES (30), (31): Xaa is C or S
VVMNSMEGIIVNSSDDMIQVTINSLKTPAXX

SEQ ID NO: 76603 - protein, 36 aa, Artificial Sequence; identical to SEQ ID NO: 25792
  Cyclic GFR-binding peptide
  MOD_RES (32), (33): Xaa is C or S

SEQ ID NO: 76604 - protein, 31 aa, Artificial Sequence
  Cyclic GFR-binding peptide
  MOD_RES (1), (3): Xaa is C or S
XKXSKVVMVQVEKVKPTRGVVKAIKVSRLDQ

SEQ ID NO: 76605 - protein, 33 aa, Artificial Sequence
  Cyclic GFR-binding peptide
  MOD_RES (1), (3): Xaa is C or S
XGXARVVMNVTAKKIVNSSDDIKRVQVPRLQTP

SEQ ID NO: 76606 - protein, 29 aa, Artificial Sequence
  Cyclic GFR-binding peptide
  MOD_RES (29), (29): Xaa is C or S
VIMVTAKKVKPKRGVIKRIQVPRLAQPVX

SEQ ID NO: 76607 - protein, 33 aa, Artificial Sequence
  Cyclic GFR-binding peptide
DELTNSLQEFIPKKRVIEYYVVPLPELQVQTPR

SEQ ID NO: 76608 - protein, 33 aa, Artificial Sequence; identical to SEQ ID NO: 25800
  Cyclic GFR-binding peptide
  MOD_RES (1), (3): Xaa is C or S

SEQ ID NO: 76609 - protein, 40 aa, Artificial Sequence; identical to SEQ ID NO: 25804
  Cyclic GFR-binding peptide
  MOD_RES (1), (3), (37): Xaa is C or S

SEQ ID NO: 76610 - protein, 29 aa, Artificial Sequence
  Cyclic GFR-binding peptide
KNHQLFNSLQEHQGQHPKIRYYVMPLPEE

SEQ ID NO: 76611 - protein, 35 aa, Artificial Sequence; identical to SEQ ID NO: 25806
  Cyclic GFR-binding peptide
  MOD_RES (1), (3), (34), (35): Xaa is C or S

SEQ ID NO: 76612 - protein, 29 aa, Artificial Sequence
  Cyclic GFR-binding peptide
  MOD_RES (27), (28): Xaa is C or S
EVTAKKVVKDYEDIKRMQVPRLETPVXXA

SEQ ID NO: 76613 - protein, 22 aa, Artificial Sequence
  Cyclic GFR-binding peptide
VMSMEGIVKPTRGVMIQITINS

SEQ ID NO: 76614 - protein, 21 aa, Artificial Sequence
  Cyclic GFR-binding peptide
VTAKKVKPKRGVIKRIQVPRL

SEQ ID NO: 76615 - protein, 29 aa, Artificial Sequence
  Cyclic GFR-binding peptide
SRVVMNVQVEKIVNSSDDVKAVKVSRLKT

SEQ ID NO: 76616 - protein, 34 aa, Artificial Sequence; identical to SEQ ID NO: 25810
  Cyclic GFR-binding peptide
  MOD_RES (32), (33): Xaa is C or S

SEQ ID NO: 76617 - protein, 25 aa, Artificial Sequence
  Cyclic GFR-binding peptide
LTNSLQEFIPKKRVIEYYLVTLPEL

SEQ ID NO: 76618 - protein, 37 aa, Artificial Sequence; identical to SEQ ID NO: 25813
  Cyclic GFR-binding peptide
  MOD_RES (2), (36): Xaa is C or S

SEQ ID NO: 76619 - protein, 31 aa, Artificial Sequence
  Cyclic GFR-binding peptide
  MOD_RES (28), (29): Xaa is C or S
MEVQVEKVVKDYEDVKAMKVSRLETPVXXAK

SEQ ID NO: 76620 - protein, 35 aa, Artificial Sequence
  Cyclic GFR-binding peptide
  MOD_RES (2), (4): Xaa is C or S
RXEXKNHQLFNSLQEHQGQHPKIRYYVMPLPEEET

SEQ ID NO: 76621 - protein, 41 aa, Artificial Sequence; identical to SEQ ID NO: 25815
  Cyclic GFR-binding peptide
  MOD_RES (2), (39): Xaa is C or S

SEQ ID NO: 76622 - protein, 38 aa, Artificial Sequence; identical to SEQ ID NO: 25817
  Cyclic GFR-binding peptide
  MOD_RES (1), (32), (33): Xaa is C or S

SEQ ID NO: 76623 - protein, 35 aa, Artificial Sequence
  Cyclic GFR-binding peptide
  MOD_RES (29), (30): Xaa is C or S
VMNVQVEKIVNSSDDVKAVKVSRLQTPAXXPKPVT

SEQ ID NO: 76624 - protein, 28 aa, Artificial Sequence
  Cyclic GFR-binding peptide
  MOD_RES (26), (26): Xaa is C or S
VQVEKIVNSSDDVKAVKVSRLKTPAXTP

SEQ ID NO: 76625 - protein, 31 aa, Artificial Sequence
  Cyclic GFR-binding peptide
  MOD_RES (1), (1): Xaa is C or S
XKNHQLFNSLQEHQGQHPKIRYYVMPLPEEE

SEQ ID NO: 76626 - protein, 24 aa, Artificial Sequence
  Cyclic GFR-binding peptide
VIMVTAKKIKPTKGIIKRIQVPRL

SEQ ID NO: 76627 - protein, 40 aa, Artificial Sequence; identical to SEQ ID NO: 25819
  Cyclic GFR-binding peptide
  MOD_RES (2), (4), (36): Xaa is C or S

SEQ ID NO: 76628 - protein, 30 aa, Artificial Sequence
  Cyclic GFR-binding peptide
  MOD_RES (1), (3): Xaa is C or S
XGXARVVMNVTAKKIVNSSDDIKRVQVPRL

SEQ ID NO: 76629 - protein, 44 aa, Artificial Sequence; identical to SEQ ID NO: 25822
  Cyclic GFR-binding peptide
  MOD_RES (1), (3), (40): Xaa is C or S

SEQ ID NO: 76630 - protein, 24 aa, Artificial Sequence
  Cyclic GFR-binding peptide
VQVEKIVNSSDDVKAVKVSRLKTP

SEQ ID NO: 76631 - protein, 40 aa, Artificial Sequence; identical to SEQ ID NO: 25826
  Cyclic GFR-binding peptide
  MOD_RES (2), (34), (35): Xaa is C or S

SEQ ID NO: 76632 - protein, 28 aa, Artificial Sequence
  Cyclic GFR-binding peptide
  MOD_RES (28), (28): Xaa is C or S
VMVTAKKVKPTRGVIKRIQVPRLDQPVX

SEQ ID NO: 76633 - protein, 31 aa, Artificial Sequence
  Cyclic GFR-binding peptide
  MOD_RES (28), (29): Xaa is C or S
MNVQVEKIVNSSDDVKAVKVSRLKTPAXXPK

SEQ ID NO: 76634 - protein, 37 aa, Artificial Sequence; identical to SEQ ID NO: 25829
  Cyclic GFR-binding peptide
  MOD_RES (2), (4), (36): Xaa is C or S

SEQ ID NO: 76635 - protein, 31 aa, Artificial Sequence
  Cyclic GFR-binding peptide
  MOD_RES (30), (31): Xaa is C or S
VVMNVQVEKIVNSSDDVKAVKVSRLQTPAXX

SEQ ID NO: 76636 - protein, 31 aa, Artificial Sequence
  Cyclic GFR-binding peptide
  MOD_RES (28), (29): Xaa is C or S
IMSMEGIIKPTKGIMIQITINSLDQSVXXPS

SEQ ID NO: 76637 - protein, 35 aa, Artificial Sequence; identical to SEQ ID NO: 25832
  Cyclic GFR-binding peptide
  MOD_RES (2), (4), (35): Xaa is C or S

SEQ ID NO: 76638 - protein, 30 aa, Artificial Sequence
  Cyclic GFR-binding peptide
  MOD_RES (26), (27): Xaa is C or S
VTAKKIVNSSDDIKRVQVPRLKTPAXXPKP

SEQ ID NO: 76639 - protein, 26 aa, Artificial Sequence
  Cyclic GFR-binding peptide
  MOD_RES (1), (1): Xaa is C or S
XSKVIMVTAKKIKPTKGIIKRIQVPR

SEQ ID NO: 76640 - protein, 33 aa, Artificial Sequence
  Cyclic GFR-binding peptide
  MOD_RES (32), (32): Xaa is C or S
LTNSLQEFIPKKRVIEYYLVTLPELQVQTPRXQ

SEQ ID NO: 76641 - protein, 37 aa, Artificial Sequence; identical to SEQ ID NO: 25833
  Cyclic GFR-binding peptide
  MOD_RES (2), (33), (34): Xaa is C or S

SEQ ID NO: 76642 - protein, 32 aa, Artificial Sequence; identical to SEQ ID NO: 25835
  Cyclic GFR-binding peptide
  MOD_RES (32), (32): Xaa is C or S

SEQ ID NO: 76643 - protein, 40 aa, Artificial Sequence; identical to SEQ ID NO: 25836
  Cyclic GFR-binding peptide
  MOD_RES (1), (3), (40): Xaa is C or S

SEQ ID NO: 76644 - protein, 28 aa, Artificial Sequence
  Cyclic GFR-binding peptide
NHQLFNSLQEHQGQHPKIRYYLMTLPEE

SEQ ID NO: 76645 - protein, 37 aa, Artificial Sequence; identical to SEQ ID NO: 25838
  Cyclic GFR-binding peptide
  MOD_RES (37), (37): Xaa is C or S

SEQ ID NO: 76646 - protein, 22 aa, Artificial Sequence
  Cyclic GFR-binding peptide
SMEGIVVKENEDMIQMTINSLE

SEQ ID NO: 76647 - protein, 31 aa, Artificial Sequence; identical to SEQ ID NO: 25842
  Cyclic GFR-binding peptide

SEQ ID NO: 76648 - protein, 32 aa, Artificial Sequence
  Cyclic GFR-binding peptide
  MOD_RES (29), (30): Xaa is C or S
VMEVTAKKVVKDYEDIKRMQVPRLETPVXXAK

SEQ ID NO: 76649 - protein, 42 aa, Artificial Sequence; identical to SEQ ID NO: 25843
  Cyclic GFR-binding peptide
  MOD_RES (2), (4), (38): Xaa is C or S

SEQ ID NO: 76650 - protein, 29 aa, Artificial Sequence
  Cyclic GFR-binding peptide
LRNSLQELKPKKRVYEYYVVPLPEHHVRS

SEQ ID NO: 76651 - protein, 30 aa, Artificial Sequence
  Cyclic GFR-binding peptide
  MOD_RES (28), (29): Xaa is C or S
IMVTAKKVKPKRGVIKRIQVPRLAQPVXXP

SEQ ID NO: 76652 - protein, 28 aa, Artificial Sequence
  Cyclic GFR-binding peptide
SKVIMVQVEKIKPTKGIVKAIKVSRLDQ

SEQ ID NO: 76653 - protein, 29 aa, Artificial Sequence
  Cyclic GFR-binding peptide
  MOD_RES (1), (3): Xaa is C or S
XGXSRVVMNSMEGIIVNSSDDMIQVTINS

SEQ ID NO: 76654 - protein, 35 aa, Artificial Sequence
  Cyclic GFR-binding peptide
  MOD_RES (29), (30): Xaa is C or S
VVMSMEGIVKPTRGVMIQITINSLDQPVXXPSASA

SEQ ID NO: 76655 - protein, 29 aa, Artificial Sequence
  Cyclic GFR-binding peptide
DELTNSLQEFIPKKRVIEYYVVPLPELQV

SEQ ID NO: 76656 - protein, 28 aa, Artificial Sequence
  Cyclic GFR-binding peptide
SKVIMSMEGIIKPTKGIMIQITINSLDQ

SEQ ID NO: 76657 - protein, 26 aa, Artificial Sequence
  Cyclic GFR-binding peptide
  MOD_RES (26), (26): Xaa is C or S
SMEGIVKPTRGVMIQITINSLDQPVX

SEQ ID NO: 76658 - protein, 31 aa, Artificial Sequence
  Cyclic GFR-binding peptide
  MOD_RES (1), (3): Xaa is C or S
XGXSRVVMNSMEGIIVNSSDDMIQVTINSLK

SEQ ID NO: 76659 - protein, 26 aa, Artificial Sequence
  Cyclic GFR-binding peptide
ARVVMNVTAKKIVNSSDDIKRVQVPR

SEQ ID NO: 76660 - protein, 40 aa, Artificial Sequence; identical to SEQ ID NO: 25853
  Cyclic GFR-binding peptide
  MOD_RES (2), (34), (35): Xaa is C or S

SEQ ID NO: 76661 - protein, 31 aa, Artificial Sequence
  Cyclic GFR-binding peptide
  MOD_RES (27), (27): Xaa is C or S
NVQVEKIVNSSDDVKAVKVSRLKTPAXTPKT

SEQ ID NO: 76662 - protein, 34 aa, Artificial Sequence; identical to SEQ ID NO: 25856
  Cyclic GFR-binding peptide
  MOD_RES (31), (32): Xaa is C or S

SEQ ID NO: 76663 - protein, 26 aa, Artificial Sequence
  Cyclic GFR-binding peptide
SRVVMNVTAKKIVNSSDDIKRVQVPR

SEQ ID NO: 76664 - protein, 32 aa, Artificial Sequence; identical to SEQ ID NO: 25861
  Cyclic GFR-binding peptide
  MOD_RES (31), (32): Xaa is C or S

SEQ ID NO: 76665 - protein, 33 aa, Artificial Sequence
  Cyclic GFR-binding peptide
  MOD_RES (2), (4): Xaa is C or S
SXKXSRVIMVQVEKVKPKRGVVKAIKVSRLAQP

SEQ ID NO: 76666 - protein, 34 aa, Artificial Sequence; identical to SEQ ID NO: 25864
  Cyclic GFR-binding peptide
  MOD_RES (2), (33), (34): Xaa is C or S

SEQ ID NO: 76667 - protein, 25 aa, Artificial Sequence
  Cyclic GFR-binding peptide
EVVMEVQVEKVVKDYEDVKAMKVSR

SEQ ID NO: 76668 - protein, 39 aa, Artificial Sequence; identical to SEQ ID NO: 25875
  Cyclic GFR-binding peptide
  MOD_RES (1), (35): Xaa is C or S

SEQ ID NO: 76669 - protein, 33 aa, Artificial Sequence
  Cyclic GFR-binding peptide
  MOD_RES (31), (31): Xaa is C or S
RNSLQELKPKKRVYEYYVVPLPEHHVRSPQXKV

SEQ ID NO: 76670 - protein, 30 aa, Artificial Sequence
  Cyclic GFR-binding peptide
  MOD_RES (29), (29): Xaa is C or S
VMNVTAKKIVNSSDDIKRVQVPRLKTPAXT

SEQ ID NO: 76671 - protein, 41 aa, Artificial Sequence; identical to SEQ ID NO: 25877
  Cyclic GFR-binding peptide
  MOD_RES (1), (3), (40): Xaa is C or S

SEQ ID NO: 76672 - protein, 40 aa, Artificial Sequence; identical to SEQ ID NO: 25878
  Cyclic GFR-binding peptide
  MOD_RES (1), (3), (35): Xaa is C or S

SEQ ID NO: 76673 - protein, 31 aa, Artificial Sequence
  Cyclic GFR-binding peptide
  MOD_RES (2), (2): Xaa is C or S
GXGEVVMDSMEGIVVKENEDMIQMTINSLET

SEQ ID NO: 76674 - protein, 25 aa, Artificial Sequence
  Cyclic GFR-binding peptide
IMSMEGIVKPKRGVMIQITINSLAQ

SEQ ID NO: 76675 - protein, 32 aa, Artificial Sequence; identical to SEQ ID NO: 25888
  Cyclic GFR-binding peptide
  MOD_RES (31), (32): Xaa is C or S

SEQ ID NO: 76676 - protein, 35 aa, Artificial Sequence; identical to SEQ ID NO: 25889
  Cyclic GFR-binding peptide
  MOD_RES (2), (4): Xaa is C or S

SEQ ID NO: 76677 - protein, 35 aa, Artificial Sequence
  Cyclic GFR-binding peptide
  MOD_RES (29), (29): Xaa is C or S
FNSLQEHQGQHPKIRYYVMPLPEEETPVXELGEDN

SEQ ID NO: 76678 - protein, 36 aa, Artificial Sequence
  Cyclic GFR-binding peptide
  MOD_RES (30), (31): Xaa is C or S
RVIMVQVEKVKPKRGVVKAIKVSRLAQPVXXPAASA

SEQ ID NO: 76679 - protein, 35 aa, Artificial Sequence; identical to SEQ ID NO: 25897
  Cyclic GFR-binding peptide
  MOD_RES (2), (34): Xaa is C or S

SEQ ID NO: 76680 - protein, 35 aa, Artificial Sequence
  Cyclic GFR-binding peptide
  MOD_RES (30), (31): Xaa is C or S
RVIMVTAKKVKPKRGVIKRIQVPRLAQPVXXPAAS

SEQ ID NO: 76681 - protein, 27 aa, Artificial Sequence
  Cyclic GFR-binding peptide
VVMDVQVEKVVKENEDVKAMKVSRLET

SEQ ID NO: 76682 - protein, 38 aa, Artificial Sequence; identical to SEQ ID NO: 25908
  Cyclic GFR-binding peptide
  MOD_RES (33), (33): Xaa is C or S

SEQ ID NO: 76683 - protein, 39 aa, Artificial Sequence; identical to SEQ ID NO: 25910
  Cyclic GFR-binding peptide
  MOD_RES (2), (4), (38): Xaa is C or S

SEQ ID NO: 76684 - protein, 22 aa, Artificial Sequence
  Cyclic GFR-binding peptide
VTAKKIVNSSDDIKRVQVPRLQ

SEQ ID NO: 76685 - protein, 32 aa, Artificial Sequence
  Cyclic GFR-binding peptide
  MOD_RES (27), (28): Xaa is C or S
NVTAKKIVNSSDDIKRVQVPRLKTPAXXPKPV

SEQ ID NO: 76686 - protein, 23 aa, Artificial Sequence
  Cyclic GFR-binding peptide
NSLQEHQGQHPKIRYYVMPLPEE

SEQ ID NO: 76687 - protein, 31 aa, Artificial Sequence
  Cyclic GFR-binding peptide
  MOD_RES (1), (3): Xaa is C or S
XKXSKVIMSMEGIIKPTKGIMIQITINSLDQ

SEQ ID NO: 76688 - protein, 33 aa, Artificial Sequence
  Cyclic GFR-binding peptide
  MOD_RES (2), (2): Xaa is C or S
KXALHDELTNSLQEFIPKKRVIEYYLVTLPELQ

SEQ ID NO: 76689 - protein, 29 aa, Artificial Sequence
  Cyclic GFR-binding peptide
GEVVMDVQVEKVVKENEDVKAMKVSRLET

SEQ ID NO: 76690 - protein, 36 aa, Artificial Sequence; identical to SEQ ID NO: 25922
  Cyclic GFR-binding peptide
  MOD_RES (33), (33): Xaa is C or S

SEQ ID NO: 76691 - protein, 35 aa, Artificial Sequence; identical to SEQ ID NO: 25923
  Cyclic GFR-binding peptide
  MOD_RES (2), (33), (34): Xaa is C or S

SEQ ID NO: 76692 - protein, 24 aa, Artificial Sequence
  Cyclic GFR-binding peptide
IMVTAKKVKPKRGVIKRIQVPRLA

SEQ ID NO: 76693 - protein, 28 aa, Artificial Sequence
  Cyclic GFR-binding peptide
  MOD_RES (2), (2): Xaa is C or S
KXSKVIMVQVEKIKPTKGIVKAIKVSRL

SEQ ID NO: 76694 - protein, 25 aa, Artificial Sequence
  Cyclic GFR-binding peptide
NVTAKKIVNSSDDIKRVQVPRLQTP

SEQ ID NO: 76695 - protein, 33 aa, Artificial Sequence
  Cyclic GFR-binding peptide
  MOD_RES (28), (29): Xaa is C or S
VMVQVEKVKPTRGVVKAIKVSRLDQPVXXPSAS

SEQ ID NO: 76696 - protein, 31 aa, Artificial Sequence
  Cyclic GFR-binding peptide
  MOD_RES (30), (31): Xaa is C or S
KVIMVQVEKIKPTKGIVKAIKVSRLDQSVXX

SEQ ID NO: 76697 - protein, 37 aa, Artificial Sequence; identical to SEQ ID NO: 25928
  Cyclic GFR-binding peptide
  MOD_RES (31), (32): Xaa is C or S

SEQ ID NO: 76698 - protein, 33 aa, Artificial Sequence; identical to SEQ ID NO: 25930
  Cyclic GFR-binding peptide
  MOD_RES (1), (32), (33): Xaa is C or S

SEQ ID NO: 76699 - protein, 28 aa, Artificial Sequence
  Cyclic GFR-binding peptide
  MOD_RES (28), (28): Xaa is C or S
MNSMEGIIVNSSDDMIQVTINSLKTPAX

SEQ ID NO: 76700 - protein, 35 aa, Artificial Sequence
  Cyclic GFR-binding peptide
  MOD_RES (2), (4): Xaa is C or S
RXEXKNHQLFNSLQEHQGQHPKIRYYLMTLPEEET

SEQ ID NO: 76701 - protein, 40 aa, Artificial Sequence; identical to SEQ ID NO: 25934
  Cyclic GFR-binding peptide
  MOD_RES (1), (38): Xaa is C or S

SEQ ID NO: 76702 - protein, 31 aa, Artificial Sequence
  Cyclic GFR-binding peptide
  MOD_RES (1), (1): Xaa is C or S
XGEVVMDVQVEKVVKENEDVKAMKVSRLETP

SEQ ID NO: 76703 - protein, 29 aa, Artificial Sequence
  Cyclic GFR-binding peptide
GEVVMDVTAKKVVKENEDIKRMQVPRLET

SEQ ID NO: 76704 - protein, 24 aa, Artificial Sequence
  Cyclic GFR-binding peptide
VVMESMEGIVVKDYEDMIQMTINS

SEQ ID NO: 76705 - protein, 29 aa, Artificial Sequence
  Cyclic GFR-binding peptide
  MOD_RES (27), (28): Xaa is C or S
NVTAKKIVNSSDDIKRVQVPRLQTPAXXP

SEQ ID NO: 76706 - protein, 41 aa, Artificial Sequence; identical to SEQ ID NO: 25940
  Cyclic GFR-binding peptide
  MOD_RES (2), (39): Xaa is C or S

SEQ ID NO: 76707 - protein, 25 aa, Artificial Sequence
  Cyclic GFR-binding peptide
NSLQEFIPKKRVIEYYVVPLPELQV

SEQ ID NO: 76708 - protein, 27 aa, Artificial Sequence
  Cyclic GFR-binding peptide
RVIMSMEGIVKPKRGVMIQITINSLAQ

SEQ ID NO: 76709 - protein, 31 aa, Artificial Sequence; identical to SEQ ID NO: 25953
  Cyclic GFR-binding peptide
  MOD_RES (31), (31): Xaa is C or S

SEQ ID NO: 76710 - protein, 29 aa, Artificial Sequence
  Cyclic GFR-binding peptide
  MOD_RES (26), (27): Xaa is C or S
VTAKKVKPTRGVIKRIQVPRLDQPVXXPS

SEQ ID NO: 76711 - protein, 34 aa, Artificial Sequence
  Cyclic GFR-binding peptide
  MOD_RES (30), (31): Xaa is C or S
VVMEVQVEKVVKDYEDVKAMKVSRLETPVXXAKP

SEQ ID NO: 76712 - protein, 25 aa, Artificial Sequence
  Cyclic GFR-binding peptide
SKVIMSMEGIIKPTKGIMIQITINS

SEQ ID NO: 76713 - protein, 32 aa, Artificial Sequence
  Cyclic GFR-binding peptide
  MOD_RES (30), (31): Xaa is C or S
KVVMSMEGIVKPTRGVMIQITINSLDQPVXXP

SEQ ID NO: 76714 - protein, 34 aa, Artificial Sequence
  Cyclic GFR-binding peptide
  MOD_RES (30), (31): Xaa is C or S
RVIMVQVEKVKPKRGVVKAIKVSRLAQPVXXPAA

SEQ ID NO: 76715 - protein, 28 aa, Artificial Sequence
  Cyclic GFR-binding peptide
  MOD_RES (27), (28): Xaa is C or S
MVQVEKIKPTKGIVKAIKVSRLDQSVXX

SEQ ID NO: 76716 - protein, 35 aa, Artificial Sequence; identical to SEQ ID NO: 25964
  Cyclic GFR-binding peptide
  MOD_RES (35), (35): Xaa is C or S

SEQ ID NO: 76717 - protein, 26 aa, Artificial Sequence
  Cyclic GFR-binding peptide
RVVMNVTAKKIVNSSDDIKRVQVPRL

SEQ ID NO: 76718 - protein, 22 aa, Artificial Sequence
  Cyclic GFR-binding peptide
SMEGIVVKDYEDMIQMTINSLE

SEQ ID NO: 76719 - protein, 28 aa, Artificial Sequence
  Cyclic GFR-binding peptide
  MOD_RES (26), (27): Xaa is C or S
SMEGIIVNSSDDMIQVTINSLQTPAXXP

SEQ ID NO: 76720 - protein, 31 aa, Artificial Sequence
  Cyclic GFR-binding peptide
  MOD_RES (2), (4): Xaa is C or S
SXKXSRVIMVQVEKVKPKRGVVKAIKVSRLA

SEQ ID NO: 76721 - protein, 22 aa, Artificial Sequence
  Cyclic GFR-binding peptide
IMVTAKKVKPKRGVIKRIQVPR

SEQ ID NO: 76722 - protein, 32 aa, Artificial Sequence; identical to SEQ ID NO: 25974
  Cyclic GFR-binding peptide
  MOD_RES (2), (2): Xaa is C or S

SEQ ID NO: 76723 - protein, 30 aa, Artificial Sequence
  Cyclic GFR-binding peptide
  MOD_RES (1), (3): Xaa is C or S
XGXSRVVMNVQVEKIVNSSDDVKAVKVSRL

SEQ ID NO: 76724 - protein, 40 aa, Artificial Sequence; identical to SEQ ID NO: 25975
  Cyclic GFR-binding peptide
  MOD_RES (1), (3), (40): Xaa is C or S

SEQ ID NO: 76725 - protein, 38 aa, Artificial Sequence; identical to SEQ ID NO: 25976
  Cyclic GFR-binding peptide
  MOD_RES (1), (33): Xaa is C or S

SEQ ID NO: 76726 - protein, 31 aa, Artificial Sequence
  Cyclic GFR-binding peptide
  MOD_RES (27), (28): Xaa is C or S
EVTAKKVVKDYEDIKRMQVPRLETPVXXAKP

SEQ ID NO: 76727 - protein, 40 aa, Artificial Sequence; identical to SEQ ID NO: 25979
  Cyclic GFR-binding peptide
  MOD_RES (1), (3), (35), (36): Xaa is C or S

SEQ ID NO: 76728 - protein, 38 aa, Artificial Sequence; identical to SEQ ID NO: 25988
  Cyclic GFR-binding peptide
  MOD_RES (2), (4), (36): Xaa is C or S

SEQ ID NO: 76729 - protein, 26 aa, Artificial Sequence
  Cyclic GFR-binding peptide
MEVQVEKVVKDYEDVKAMKVSRLETP

SEQ ID NO: 76730 - protein, 29 aa, Artificial Sequence
  Cyclic GFR-binding peptide
  MOD_RES (1), (1): Xaa is C or S
XSKVIMVTAKKIKPTKGIIKRIQVPRLDQ

SEQ ID NO: 76731 - protein, 39 aa, Artificial Sequence; identical to SEQ ID NO: 25992
  Cyclic GFR-binding peptide
  MOD_RES (2), (4), (35), (36): Xaa is C or S

SEQ ID NO: 76732 - protein, 36 aa, Artificial Sequence; identical to SEQ ID NO: 25993
  Cyclic GFR-binding peptide
  MOD_RES (2), (34), (35): Xaa is C or S

SEQ ID NO: 76733 - protein, 30 aa, Artificial Sequence
  Cyclic GFR-binding peptide
  MOD_RES (1), (1): Xaa is C or S
XKNHQLFNSLQEHQGQHPKIRYYVMPLPEE

SEQ ID NO: 76734 - protein, 21 aa, Artificial Sequence
  Cyclic GFR-binding peptide
MVTAKKIKPTKGIIKRIQVPR

SEQ ID NO: 76735 - protein, 23 aa, Artificial Sequence
  Cyclic GFR-binding peptide
VIMSMEGIVKPKRGVMIQITINS

SEQ ID NO: 76736 - protein, 29 aa, Artificial Sequence
  Cyclic GFR-binding peptide
  MOD_RES (2), (4): Xaa is C or S
SXKXSKVIMVTAKKIKPTKGIIKRIQVPR

SEQ ID NO: 76737 - protein, 39 aa, Artificial Sequence; identical to SEQ ID NO: 25996
  Cyclic GFR-binding peptide
  MOD_RES (2), (34), (35): Xaa is C or S

SEQ ID NO: 76738 - protein, 36 aa, Artificial Sequence
  Cyclic GFR-binding peptide
  MOD_RES (32), (32): Xaa is C or S
LRNSLQELKPKKRVYEYYLVTLPEHHVRSPQXKVSS

SEQ ID NO: 76739 - protein, 29 aa, Artificial Sequence
  Cyclic GFR-binding peptide
LHDELTNSLQEFIPKKRVIEYYVVPLPEL

SEQ ID NO: 76740 - protein, 43 aa, Artificial Sequence; identical to SEQ ID NO: 25999
  Cyclic GFR-binding peptide
  MOD_RES (2), (39): Xaa is C or S

SEQ ID NO: 76741 - protein, 25 aa, Artificial Sequence
  Cyclic GFR-binding peptide
SRVIMSMEGIVKPKRGVMIQITINS

SEQ ID NO: 76742 - protein, 37 aa, Artificial Sequence; identical to SEQ ID NO: 26001
  Cyclic GFR-binding peptide
  MOD_RES (2), (4), (36), (37): Xaa is C or S

SEQ ID NO: 76743 - protein, 34 aa, Artificial Sequence; identical to SEQ ID NO: 26002
  Cyclic GFR-binding peptide
  MOD_RES (31), (32): Xaa is C or S

SEQ ID NO: 76744 - protein, 35 aa, Artificial Sequence
  Cyclic GFR-binding peptide
  MOD_RES (29), (30): Xaa is C or S
VVMVQVEKVKPTRGVVKAIKVSRLDQPVXXPSASA

SEQ ID NO: 76745 - protein, 27 aa, Artificial Sequence
  Cyclic GFR-binding peptide
  MOD_RES (1), (1): Xaa is C or S
XSRVIMSMEGIVKPKRGVMIQITINSL

SEQ ID NO: 76746 - protein, 29 aa, Artificial Sequence
  Cyclic GFR-binding peptide
KVIMSMEGIIKPTKGIMIQITINSLDQSV

SEQ ID NO: 76747 - protein, 45 aa, Artificial Sequence; identical to SEQ ID NO: 26009
  Cyclic GFR-binding peptide
  MOD_RES (2), (4), (41): Xaa is C or S

SEQ ID NO: 76748 - protein, 34 aa, Artificial Sequence; identical to SEQ ID NO: 26011
  Cyclic GFR-binding peptide
  MOD_RES (2), (4): Xaa is C or S

SEQ ID NO: 76749 - protein, 27 aa, Artificial Sequence
  Cyclic GFR-binding peptide
  MOD_RES (2), (2): Xaa is C or S
KXSRVIMSMEGIVKPKRGVMIQITINS

SEQ ID NO: 76750 - protein, 30 aa, Artificial Sequence
  Cyclic GFR-binding peptide
  MOD_RES (26), (27): Xaa is C or S
SMEGIIKPTKGIMIQITINSLDQSVXXPSA

SEQ ID NO: 76751 - protein, 39 aa, Artificial Sequence; identical to SEQ ID NO: 26013
  Cyclic GFR-binding peptide
  MOD_RES (2), (4), (36), (37): Xaa is C or S

SEQ ID NO: 76752 - protein, 25 aa, Artificial Sequence
  Cyclic GFR-binding peptide
SRVIMVQVEKVKPKRGVVKAIKVSR

SEQ ID NO: 76753 - protein, 29 aa, Artificial Sequence
  Cyclic GFR-binding peptide
  MOD_RES (26), (27): Xaa is C or S
VQVEKIKPTKGIVKAIKVSRLDQSVXXPS

SEQ ID NO: 76754 - protein, 36 aa, Artificial Sequence
  Cyclic GFR-binding peptide
  MOD_RES (30), (31): Xaa is C or S
VVMNVTAKKIVNSSDDIKRVQVPRLKTPAXXPKPVY

SEQ ID NO: 76755 - protein, 31 aa, Artificial Sequence
  Cyclic GFR-binding peptide
  MOD_RES (29), (29): Xaa is C or S
FNSLQEHQGQHPKIRYYVMPLPEEETPVXEL

SEQ ID NO: 76756 - protein, 22 aa, Artificial Sequence
  Cyclic GFR-binding peptide
SMEGIVKPTRGVMIQITINSLD

SEQ ID NO: 76757 - protein, 22 aa, Artificial Sequence
  Cyclic GFR-binding peptide
MDVTAKKVVKENEDIKRMQVPR

SEQ ID NO: 76758 - protein, 20 aa, Artificial Sequence
  Cyclic GFR-binding peptide
VQVEKIVNSSDDVKAVKVSR

SEQ ID NO: 76759 - protein, 26 aa, Artificial Sequence
  Cyclic GFR-binding peptide
KVIMVQVEKIKPTKGIVKAIKVSRLD

SEQ ID NO: 76760 - protein, 26 aa, Artificial Sequence
  Cyclic GFR-binding peptide
EELRNSLQELKPKKRVYEYYLVTLPE

SEQ ID NO: 76761 - protein, 39 aa, Artificial Sequence; identical to SEQ ID NO: 26023
  Cyclic GFR-binding peptide
  MOD_RES (2), (4), (35), (36): Xaa is C or S

SEQ ID NO: 76762 - protein, 35 aa, Artificial Sequence; identical to SEQ ID NO: 26024
  Cyclic GFR-binding peptide
  MOD_RES (1), (3), (35): Xaa is C or S

SEQ ID NO: 76763 - protein, 28 aa, Artificial Sequence
  Cyclic GFR-binding peptide
EVVMEVTAKKVVKDYEDIKRMQVPRLET

SEQ ID NO: 76764 - protein, 37 aa, Artificial Sequence; identical to SEQ ID NO: 26029
  Cyclic GFR-binding peptide
  MOD_RES (1), (3), (35), (36): Xaa is C or S

SEQ ID NO: 76765 - protein, 41 aa, Artificial Sequence; identical to SEQ ID NO: 26030
  Cyclic GFR-binding peptide
  MOD_RES (2), (4), (41): Xaa is C or S

SEQ ID NO: 76766 - protein, 33 aa, Artificial Sequence
  Cyclic GFR-binding peptide
  MOD_RES (32), (32): Xaa is C or S
LRNSLQELKPKKRVYEYYVVPLPEHHVRSPQXK

SEQ ID NO: 76767 - protein, 32 aa, Artificial Sequence; identical to SEQ ID NO: 26035
  Cyclic GFR-binding peptide
  MOD_RES (32), (32): Xaa is C or S

SEQ ID NO: 76768 - protein, 31 aa, Artificial Sequence
  Cyclic GFR-binding peptide
  MOD_RES (27), (28): Xaa is C or S
NVTAKKIVNSSDDIKRVQVPRLQTPAXXPKP

SEQ ID NO: 76769 - protein, 36 aa, Artificial Sequence; identical to SEQ ID NO: 26037
  Cyclic GFR-binding peptide
  MOD_RES (2), (4), (36): Xaa is C or S

SEQ ID NO: 76770 - protein, 33 aa, Artificial Sequence
  Cyclic GFR-binding peptide
  MOD_RES (30), (31): Xaa is C or S
RVIMVTAKKVKPKRGVIKRIQVPRLAQPVXXPA

SEQ ID NO: 76771 - protein, 35 aa, Artificial Sequence; identical to SEQ ID NO: 26039
  Cyclic GFR-binding peptide
  MOD_RES (1), (33), (34): Xaa is C or S

SEQ ID NO: 76772 - protein, 35 aa, Artificial Sequence; identical to SEQ ID NO: 26041
  Cyclic GFR-binding peptide
  MOD_RES (31), (32): Xaa is C or S

SEQ ID NO: 76773 - protein, 32 aa, Artificial Sequence
  Cyclic GFR-binding peptide
  MOD_RES (30), (31): Xaa is C or S
KVIMVTAKKIKPTKGIIKRIQVPRLDQSVXXP

SEQ ID NO: 76774 - protein, 40 aa, Artificial Sequence; identical to SEQ ID NO: 26047
  Cyclic GFR-binding peptide
  MOD_RES (2), (4), (35), (36): Xaa is C or S

SEQ ID NO: 76775 - protein, 32 aa, Artificial Sequence
  Cyclic GFR-binding peptide
  MOD_RES (29), (30): Xaa is C or S
VIMVQVEKVKPKRGVVKAIKVSRLAQPVXXPA

SEQ ID NO: 76776 - protein, 31 aa, Artificial Sequence
  Cyclic GFR-binding peptide
  MOD_RES (26), (26): Xaa is C or S
VTAKKIVNSSDDIKRVQVPRLKTPAXTPKTV

SEQ ID NO: 76777 - protein, 27 aa, Artificial Sequence
  Cyclic GFR-binding peptide
  MOD_RES (26), (27): Xaa is C or S
VQVEKVKPKRGVVKAIKVSRLAQPVXX

SEQ ID NO: 76778 - protein, 30 aa, Artificial Sequence
  Cyclic GFR-binding peptide
  MOD_RES (2), (4): Xaa is C or S
RXGXGEVVMEVTAKKVVKDYEDIKRMQVPR

SEQ ID NO: 76779 - protein, 38 aa, Artificial Sequence; identical to SEQ ID NO: 26058
  Cyclic GFR-binding peptide
  MOD_RES (2), (33), (34): Xaa is C or S

SEQ ID NO: 76780 - protein, 32 aa, Artificial Sequence
  Cyclic GFR-binding peptide
  MOD_RES (28), (29): Xaa is C or S
MDSMEGIVVKENEDMIQMTINSLETPVXXAKP

SEQ ID NO: 76781 - protein, 35 aa, Artificial Sequence
  Cyclic GFR-binding peptide
  MOD_RES (29), (30): Xaa is C or S
VMNSMEGIIVNSSDDMIQVTINSLQTPAXXPKPVT

SEQ ID NO: 76782 - protein, 36 aa, Artificial Sequence; identical to SEQ ID NO: 26063
  Cyclic GFR-binding peptide
  MOD_RES (36), (36): Xaa is C or S

SEQ ID NO: 76783 - protein, 36 aa, Artificial Sequence
  Cyclic GFR-binding peptide
  MOD_RES (30), (30): Xaa is C or S
VVMNSMEGIIVNSSDDMIQVTINSLKTPAXTPKTVH

SEQ ID NO: 76784 - protein, 23 aa, Artificial Sequence
  Cyclic GFR-binding peptide
NSMEGIIVNSSDDMIQVTINSLK

SEQ ID NO: 76785 - protein, 36 aa, Artificial Sequence
  Cyclic GFR-binding peptide
  MOD_RES (30), (31): Xaa is C or S
VVMEVTAKKVVKDYEDIKRMQVPRLETPVXXAKPIS

SEQ ID NO: 76786 - protein, 29 aa, Artificial Sequence
  Cyclic GFR-binding peptide
  MOD_RES (29), (29): Xaa is C or S
VMESMEGIVVKDYEDMIQMTINSLETPVX

SEQ ID NO: 76787 - protein, 35 aa, Artificial Sequence; identical to SEQ ID NO: 26068
  Cyclic GFR-binding peptide
  MOD_RES (31), (32): Xaa is C or S

SEQ ID NO: 76788 - protein, 29 aa, Artificial Sequence
  Cyclic GFR-binding peptide
  MOD_RES (27), (28): Xaa is C or S
MVQVEKVKPKRGVVKAIKVSRLAQPVXXP

SEQ ID NO: 76789 - protein, 35 aa, Artificial Sequence
  Cyclic GFR-binding peptide
  MOD_RES (30), (31): Xaa is C or S
KVIMVQVEKIKPTKGIVKAIKVSRLDQSVXXPSAS

SEQ ID NO: 76790 - protein, 39 aa, Artificial Sequence; identical to SEQ ID NO: 26072
  Cyclic GFR-binding peptide
  MOD_RES (1), (3), (35), (36): Xaa is C or S

SEQ ID NO: 76791 - protein, 32 aa, Artificial Sequence
  Cyclic GFR-binding peptide
ELRNSLQELKPKKRVYEYYVVPLPEHHVRSPQ

SEQ ID NO: 76792 - protein, 33 aa, Artificial Sequence
  Cyclic GFR-binding peptide
  MOD_RES (27), (28): Xaa is C or S
MVQVEKVKPKRGVVKAIKVSRLAQPVXXPAASA

SEQ ID NO: 76793 - protein, 32 aa, Artificial Sequence
  Cyclic GFR-binding peptide
  MOD_RES (1), (3): Xaa is C or S
XGXGEVVMEVTAKKVVKDYEDIKRMQVPRLET

SEQ ID NO: 76794 - protein, 32 aa, Artificial Sequence
  Cyclic GFR-binding peptide
  MOD_RES (2), (4): Xaa is C or S
SXKXSKVIMVTAKKIKPTKGIIKRIQVPRLDQ

SEQ ID NO: 76795 - protein, 33 aa, Artificial Sequence
  Cyclic GFR-binding peptide
  MOD_RES (2), (4): Xaa is C or S
HXGXARVVMNVQVEKIVNSSDDVKAVKVSRLQT

SEQ ID NO: 76796 - protein, 36 aa, Artificial Sequence; identical to SEQ ID NO: 26079
  Cyclic GFR-binding peptide
  MOD_RES (2), (2): Xaa is C or S

SEQ ID NO: 76797 - protein, 25 aa, Artificial Sequence
  Cyclic GFR-binding peptide
SKVIMVQVEKIKPTKGIVKAIKVSR

SEQ ID NO: 76798 - protein, 24 aa, Artificial Sequence
  Cyclic GFR-binding peptide
RVIMVTAKKVKPKRGVIKRIQVPR

SEQ ID NO: 76799 - protein, 28 aa, Artificial Sequence
  Cyclic GFR-binding peptide
  MOD_RES (2), (2): Xaa is C or S
GXGEVVMESMEGIVVKDYEDMIQMTINS

SEQ ID NO: 76800 - protein, 36 aa, Artificial Sequence
  Cyclic GFR-binding peptide
  MOD_RES (30), (31): Xaa is C or S
VVMNVTAKKIVNSSDDIKRVQVPRLQTPAXXPKPVT

SEQ ID NO: 76801 - protein, 30 aa, Artificial Sequence
  Cyclic GFR-binding peptide
  MOD_RES (28), (29): Xaa is C or S
VMVQVEKVKPTRGVVKAIKVSRLDQPVXXP

SEQ ID NO: 76802 - protein, 23 aa, Artificial Sequence
  Cyclic GFR-binding peptide
FNSLQEHQGQHPKIRYYVMPLPE

SEQ ID NO: 76803 - protein, 31 aa, Artificial Sequence
  Cyclic GFR-binding peptide
HEELRNSLQELKPKKRVYEYYLVTLPEHHVR

SEQ ID NO: 76804 - protein, 40 aa, Artificial Sequence; identical to SEQ ID NO: 26088
  Cyclic GFR-binding peptide
  MOD_RES (2), (4), (36), (37): Xaa is C or S

SEQ ID NO: 76805 - protein, 29 aa, Artificial Sequence
  Cyclic GFR-binding peptide
  MOD_RES (27), (28): Xaa is C or S
MVTAKKVKPTRGVIKRIQVPRLDQPVXXP

SEQ ID NO: 76806 - protein, 26 aa, Artificial Sequence
  Cyclic GFR-binding peptide
NSLQEFIPKKRVIEYYLVTLPELQVQ

SEQ ID NO: 76807 - protein, 25 aa, Artificial Sequence
  Cyclic GFR-binding peptide
RVVMNVQVEKIVNSSDDVKAVKVSR

SEQ ID NO: 76808 - protein, 32 aa, Artificial Sequence
  Cyclic GFR-binding peptide
  MOD_RES (26), (26): Xaa is C or S
VTAKKIVNSSDDIKRVQVPRLKTPAXTPKTVH

SEQ ID NO: 76809 - protein, 33 aa, Artificial Sequence
  Cyclic GFR-binding peptide
  MOD_RES (28), (29): Xaa is C or S
MNVTAKKIVNSSDDIKRVQVPRLQTPAXXPKPV

SEQ ID NO: 76810 - protein, 24 aa, Artificial Sequence
  Cyclic GFR-binding peptide
NSLQELKPKKRVYEYYVVPLPEHH

SEQ ID NO: 76811 - protein, 29 aa, Artificial Sequence
  Cyclic GFR-binding peptide
VVMDVTAKKVVKENEDIKRMQVPRLETPV

SEQ ID NO: 76812 - protein, 35 aa, Artificial Sequence
  Cyclic GFR-binding peptide
  MOD_RES (31), (31): Xaa is C or S
RNSLQELKPKKRVYEYYLVTLPEHHVRSPQXKVSS

SEQ ID NO: 76813 - protein, 26 aa, Artificial Sequence
  Cyclic GFR-binding peptide
VMESMEGIVVKDYEDMIQMTINSLET

SEQ ID NO: 76814 - protein, 33 aa, Artificial Sequence
  Cyclic GFR-binding peptide
  MOD_RES (28), (28): Xaa is C or S
MNVTAKKIVNSSDDIKRVQVPRLKTPAXTPKTV

SEQ ID NO: 76815 - protein, 38 aa, Artificial Sequence; identical to SEQ ID NO: 26101
  Cyclic GFR-binding peptide
  MOD_RES (33), (33): Xaa is C or S

SEQ ID NO: 76816 - protein, 25 aa, Artificial Sequence
  Cyclic GFR-binding peptide
TNSLQEFIPKKRVIEYYLVTLPELQ

SEQ ID NO: 76817 - protein, 38 aa, Artificial Sequence; identical to SEQ ID NO: 26107
  Cyclic GFR-binding peptide
  MOD_RES (1), (32), (33): Xaa is C or S

SEQ ID NO: 76818 - protein, 27 aa, Artificial Sequence
  Cyclic GFR-binding peptide
SRVIMVTAKKVKPKRGVIKRIQVPRLA

SEQ ID NO: 76819 - protein, 33 aa, Artificial Sequence; identical to SEQ ID NO: 26110
  Cyclic GFR-binding peptide
  MOD_RES (32), (33): Xaa is C or S

SEQ ID NO: 76820 - protein, 20 aa, Artificial Sequence
  Cyclic GFR-binding peptide
VQVEKVKPKRGVVKAIKVSR

SEQ ID NO: 76821 - protein, 22 aa, Artificial Sequence
  Cyclic GFR-binding peptide
NSLQELKPKKRVYEYYLVTLPE

SEQ ID NO: 76822 - protein, 33 aa, Artificial Sequence
  Cyclic GFR-binding peptide
  MOD_RES (30), (31): Xaa is C or S
KVIMVQVEKIKPTKGIVKAIKVSRLDQSVXXPS

SEQ ID NO: 76823 - protein, 35 aa, Artificial Sequence; identical to SEQ ID NO: 26114
  Cyclic GFR-binding peptide
  MOD_RES (2), (4): Xaa is C or S

SEQ ID NO: 76824 - protein, 34 aa, Artificial Sequence; identical to SEQ ID NO: 26117
  Cyclic GFR-binding peptide
  MOD_RES (1), (3): Xaa is C or S

SEQ ID NO: 76825 - protein, 26 aa, Artificial Sequence
  Cyclic GFR-binding peptide
  MOD_RES (1), (1): Xaa is C or S
XSKVVMVTAKKVKPTRGVIKRIQVPR

SEQ ID NO: 76826 - protein, 29 aa, Artificial Sequence
  Cyclic GFR-binding peptide
  MOD_RES (1), (3): Xaa is C or S
XGXGEVVMDVTAKKVVKENEDIKRMQVPR

SEQ ID NO: 76827 - protein, 32 aa, Artificial Sequence
  Cyclic GFR-binding peptide
  MOD_RES (1), (3): Xaa is C or S
XKXSRVIMSMEGIVKPKRGVMIQITINSLAQP

SEQ ID NO: 76828 - protein, 31 aa, Artificial Sequence
  Cyclic GFR-binding peptide
  MOD_RES (28), (29): Xaa is C or S
MESMEGIVVKDYEDMIQMTINSLETPVXXAK

SEQ ID NO: 76829 - protein, 33 aa, Artificial Sequence
  Cyclic GFR-binding peptide
  MOD_RES (28), (29): Xaa is C or S
VMSMEGIVKPTRGVMIQITINSLDQPVXXPSAS

SEQ ID NO: 76830 - protein, 32 aa, Artificial Sequence
  Cyclic GFR-binding peptide
  MOD_RES (2), (2): Xaa is C or S
GXGEVVMDVTAKKVVKENEDIKRMQVPRLETP

SEQ ID NO: 76831 - protein, 24 aa, Artificial Sequence
  Cyclic GFR-binding peptide
VMEVQVEKVVKDYEDVKAMKVSRL

SEQ ID NO: 76832 - protein, 34 aa, Artificial Sequence
  Cyclic GFR-binding peptide
  MOD_RES (32), (32): Xaa is C or S
LTNSLQEFIPKKRVIEYYVVPLPELQVQTPRXQV

SEQ ID NO: 76833 - protein, 39 aa, Artificial Sequence; identical to SEQ ID NO: 26124
  Cyclic GFR-binding peptide
  MOD_RES (2), (4), (35), (36): Xaa is C or S

SEQ ID NO: 76834 - protein, 33 aa, Artificial Sequence; identical to SEQ ID NO: 26125
  Cyclic GFR-binding peptide
  MOD_RES (32), (32): Xaa is C or S

SEQ ID NO: 76835 - protein, 31 aa, Artificial Sequence; identical to SEQ ID NO: 26126
  Cyclic GFR-binding peptide
  MOD_RES (31), (31): Xaa is C or S

SEQ ID NO: 76836 - protein, 32 aa, Artificial Sequence
  Cyclic GFR-binding peptide
ELRNSLQELKPKKRVYEYYLVTLPEHHVRSPQ

SEQ ID NO: 76837 - protein, 35 aa, Artificial Sequence; identical to SEQ ID NO: 26129
  Cyclic GFR-binding peptide
  MOD_RES (35), (35): Xaa is C or S

SEQ ID NO: 76838 - protein, 34 aa, Artificial Sequence; identical to SEQ ID NO: 26130
  Cyclic GFR-binding peptide
  MOD_RES (31), (32): Xaa is C or S

SEQ ID NO: 76839 - protein, 35 aa, Artificial Sequence
  Cyclic GFR-binding peptide
  MOD_RES (30), (31): Xaa is C or S
KVVMVTAKKVKPTRGVIKRIQVPRLDQPVXXPSAS

SEQ ID NO: 76840 - protein, 25 aa, Artificial Sequence
  Cyclic GFR-binding peptide
MNSMEGIIVNSSDDMIQVTINSLKT

SEQ ID NO: 76841 - protein, 26 aa, Artificial Sequence
  Cyclic GFR-binding peptide
VMNVTAKKIVNSSDDIKRVQVPRLKT

SEQ ID NO: 76842 - protein, 29 aa, Artificial Sequence
  Cyclic GFR-binding peptide
  MOD_RES (2), (4): Xaa is C or S
SXKXSRVIMSMEGIVKPKRGVMIQITINS

SEQ ID NO: 76843 - protein, 36 aa, Artificial Sequence; identical to SEQ ID NO: 26138
  Cyclic GFR-binding peptide
  MOD_RES (2), (4), (36): Xaa is C or S

SEQ ID NO: 76844 - protein, 28 aa, Artificial Sequence
  Cyclic GFR-binding peptide
  MOD_RES (27), (28): Xaa is C or S
MSMEGIIKPTKGIMIQITINSLDQSVXX

SEQ ID NO: 76845 - protein, 39 aa, Artificial Sequence; identical to SEQ ID NO: 26139
  Cyclic GFR-binding peptide
  MOD_RES (36), (36): Xaa is C or S

SEQ ID NO: 76846 - protein, 35 aa, Artificial Sequence; identical to SEQ ID NO: 26141
  Cyclic GFR-binding peptide
  MOD_RES (1), (33), (34): Xaa is C or S

SEQ ID NO: 76847 - protein, 30 aa, Artificial Sequence
  Cyclic GFR-binding peptide
  MOD_RES (2), (4): Xaa is C or S
SXKXSRVIMSMEGIVKPKRGVMIQITINSL

SEQ ID NO: 76848 - protein, 40 aa, Artificial Sequence; identical to SEQ ID NO: 26143
  Cyclic GFR-binding peptide
  MOD_RES (2), (4), (36), (37): Xaa is C or S

SEQ ID NO: 76849 - protein, 35 aa, Artificial Sequence; identical to SEQ ID NO: 26146
  Cyclic GFR-binding peptide
  MOD_RES (1), (3), (34), (35): Xaa is C or S

SEQ ID NO: 76850 - protein, 34 aa, Artificial Sequence
  Cyclic GFR-binding peptide
  MOD_RES (2), (4): Xaa is C or S
HXGXARVVMNVTAKKIVNSSDDIKRVQVPRLQTP

SEQ ID NO: 76851 - protein, 39 aa, Artificial Sequence; identical to SEQ ID NO: 26152
  Cyclic GFR-binding peptide
  MOD_RES (1), (3): Xaa is C or S

SEQ ID NO: 76852 - protein, 29 aa, Artificial Sequence
  Cyclic GFR-binding peptide
SRVVMNSMEGIIVNSSDDMIQVTINSLKT

SEQ ID NO: 76853 - protein, 27 aa, Artificial Sequence
  Cyclic GFR-binding peptide
  MOD_RES (26), (27): Xaa is C or S
VQVEKIVNSSDDVKAVKVSRLKTPAXX

SEQ ID NO: 76854 - protein, 35 aa, Artificial Sequence; identical to SEQ ID NO: 26153
  Cyclic GFR-binding peptide
  MOD_RES (1), (3), (34), (35): Xaa is C or S

SEQ ID NO: 76855 - protein, 31 aa, Artificial Sequence
  Cyclic GFR-binding peptide
  MOD_RES (30), (31): Xaa is C or S
RVIMVTAKKVKPKRGVIKRIQVPRLAQPVXX

SEQ ID NO: 76856 - protein, 35 aa, Artificial Sequence; identical to SEQ ID NO: 26155
  Cyclic GFR-binding peptide
  MOD_RES (1), (33), (34): Xaa is C or S

SEQ ID NO: 76857 - protein, 34 aa, Artificial Sequence; identical to SEQ ID NO: 26160
  Cyclic GFR-binding peptide
  MOD_RES (1), (3), (34): Xaa is C or S

SEQ ID NO: 76858 - protein, 23 aa, Artificial Sequence
  Cyclic GFR-binding peptide
MDVTAKKVVKENEDIKRMQVPRL

SEQ ID NO: 76859 - protein, 30 aa, Artificial Sequence
  Cyclic GFR-binding peptide
  MOD_RES (1), (3): Xaa is C or S
XGXGEVVMDVTAKKVVKENEDIKRMQVPRL

SEQ ID NO: 76860 - protein, 28 aa, Artificial Sequence
  Cyclic GFR-binding peptide
  MOD_RES (28), (28): Xaa is C or S
MESMEGIVVKDYEDMIQMTINSLETPVX

SEQ ID NO: 76861 - protein, 29 aa, Artificial Sequence
  Cyclic GFR-binding peptide
  MOD_RES (1), (1): Xaa is C or S
XGEVVMEVQVEKVVKDYEDVKAMKVSRLE

SEQ ID NO: 76862 - protein, 28 aa, Artificial Sequence
  Cyclic GFR-binding peptide
VIMVTAKKIKPTKGIIKRIQVPRLDQSV

SEQ ID NO: 76863 - protein, 31 aa, Artificial Sequence; identical to SEQ ID NO: 26172
  Cyclic GFR-binding peptide

SEQ ID NO: 76864 - protein, 36 aa, Artificial Sequence
  Cyclic GFR-binding peptide
  MOD_RES (30), (31): Xaa is C or S
VVMDVQVEKVVKENEDVKAMKVSRLETPVXXAKPIK

SEQ ID NO: 76865 - protein, 33 aa, Artificial Sequence
  Cyclic GFR-binding peptide
  MOD_RES (30), (31): Xaa is C or S
VVMNSMEGIIVNSSDDMIQVTINSLKTPAXXPK

SEQ ID NO: 76866 - protein, 22 aa, Artificial Sequence
  Cyclic GFR-binding peptide
SMEGIIVNSSDDMIQVTINSLQ

SEQ ID NO: 76867 - protein, 24 aa, Artificial Sequence
  Cyclic GFR-binding peptide
LFNSLQEHQGQHPKIRYYLMTLPE

SEQ ID NO: 76868 - protein, 28 aa, Artificial Sequence
  Cyclic GFR-binding peptide
  MOD_RES (27), (28): Xaa is C or S
ESMEGIVVKDYEDMIQMTINSLETPVXX

SEQ ID NO: 76869 - protein, 33 aa, Artificial Sequence
  Cyclic GFR-binding peptide
  MOD_RES (27), (28): Xaa is C or S
MVQVEKIKPTKGIVKAIKVSRLDQSVXXPSASA

SEQ ID NO: 76870 - protein, 32 aa, Artificial Sequence
  Cyclic GFR-binding peptide
  MOD_RES (27), (28): Xaa is C or S
DSMEGIVVKENEDMIQMTINSLETPVXXAKPI

SEQ ID NO: 76871 - protein, 24 aa, Artificial Sequence
  Cyclic GFR-binding peptide
MVTAKKVKPKRGVIKRIQVPRLAQ

SEQ ID NO: 76872 - protein, 43 aa, Artificial Sequence; identical to SEQ ID NO: 26187
  Cyclic GFR-binding peptide
  MOD_RES (2), (39): Xaa is C or S

SEQ ID NO: 76873 - protein, 32 aa, Artificial Sequence
  Cyclic GFR-binding peptide
  MOD_RES (29), (29): Xaa is C or S
FNSLQEHQGQHPKIRYYVMPLPEEETPVXELG

SEQ ID NO: 76874 - protein, 28 aa, Artificial Sequence
  Cyclic GFR-binding peptide
  MOD_RES (1), (1): Xaa is C or S
XSRVVMNSMEGIIVNSSDDMIQVTINSL

SEQ ID NO: 76875 - protein, 41 aa, Artificial Sequence; identical to SEQ ID NO: 26189
  Cyclic GFR-binding peptide
  MOD_RES (1), (3), (40): Xaa is C or S

SEQ ID NO: 76876 - protein, 26 aa, Artificial Sequence
  Cyclic GFR-binding peptide
QLFNSLQEHQGQHPKIRYYVMPLPEE

SEQ ID NO: 76877 - protein, 36 aa, Artificial Sequence; identical to SEQ ID NO: 26192
  Cyclic GFR-binding peptide
  MOD_RES (1), (32), (33): Xaa is C or S

SEQ ID NO: 76878 - protein, 31 aa, Artificial Sequence
  Cyclic GFR-binding peptide
  MOD_RES (30), (31): Xaa is C or S
VVMDSMEGIVVKENEDMIQMTINSLETPVXX

SEQ ID NO: 76879 - protein, 30 aa, Artificial Sequence
  Cyclic GFR-binding peptide
  MOD_RES (2), (2): Xaa is C or S
KXSRVIMVQVEKVKPKRGVVKAIKVSRLAQ

SEQ ID NO: 76880 - protein, 28 aa, Artificial Sequence
  Cyclic GFR-binding peptide
  MOD_RES (27), (27): Xaa is C or S
NVQVEKIVNSSDDVKAVKVSRLKTPAXT

SEQ ID NO: 76881 - protein, 31 aa, Artificial Sequence
  Cyclic GFR-binding peptide
  MOD_RES (1), (1): Xaa is C or S
XELHEELRNSLQELKPKKRVYEYYLVTLPEH

SEQ ID NO: 76882 - protein, 29 aa, Artificial Sequence
  Cyclic GFR-binding peptide
  MOD_RES (2), (2): Xaa is C or S
GXGEVVMESMEGIVVKDYEDMIQMTINSL

SEQ ID NO: 76883 - protein, 26 aa, Artificial Sequence
  Cyclic GFR-binding peptide
EVVMEVTAKKVVKDYEDIKRMQVPRL

SEQ ID NO: 76884 - protein, 34 aa, Artificial Sequence; identical to SEQ ID NO: 26197
  Cyclic GFR-binding peptide
  MOD_RES (31), (32): Xaa is C or S

SEQ ID NO: 76885 - protein, 24 aa, Artificial Sequence
  Cyclic GFR-binding peptide
LRNSLQELKPKKRVYEYYLVTLPE

SEQ ID NO: 76886 - protein, 26 aa, Artificial Sequence
  Cyclic GFR-binding peptide
VVMNVTAKKIVNSSDDIKRVQVPRLK

SEQ ID NO: 76887 - protein, 33 aa, Artificial Sequence; identical to SEQ ID NO: 26201
  Cyclic GFR-binding peptide
  MOD_RES (31), (32): Xaa is C or S

SEQ ID NO: 76888 - protein, 32 aa, Artificial Sequence
  Cyclic GFR-binding peptide
  MOD_RES (2), (4): Xaa is C or S
HXGXARVVMNVTAKKIVNSSDDIKRVQVPRLQ

SEQ ID NO: 76889 - protein, 36 aa, Artificial Sequence; identical to SEQ ID NO: 26208
  Cyclic GFR-binding peptide
  MOD_RES (1), (3), (35), (36): Xaa is C or S

SEQ ID NO: 76890 - protein, 32 aa, Artificial Sequence
  Cyclic GFR-binding peptide
LHDELTNSLQEFIPKKRVIEYYLVTLPELQVQ

SEQ ID NO: 76891 - protein, 42 aa, Artificial Sequence; identical to SEQ ID NO: 26209
  Cyclic GFR-binding peptide
  MOD_RES (2), (4), (36), (37): Xaa is C or S

SEQ ID NO: 76892 - protein, 29 aa, Artificial Sequence
  Cyclic GFR-binding peptide
  MOD_RES (27), (28): Xaa is C or S
MVTAKKIKPTKGIIKRIQVPRLDQSVXXP

SEQ ID NO: 76893 - protein, 33 aa, Artificial Sequence; identical to SEQ ID NO: 26211
  Cyclic GFR-binding peptide
  MOD_RES (1), (3): Xaa is C or S

SEQ ID NO: 76894 - protein, 37 aa, Artificial Sequence; identical to SEQ ID NO: 26213
  Cyclic GFR-binding peptide
  MOD_RES (31), (32): Xaa is C or S

SEQ ID NO: 76895 - protein, 25 aa, Artificial Sequence
  Cyclic GFR-binding peptide
VQVEKVKPKRGVVKAIKVSRLAQPV

SEQ ID NO: 76896 - protein, 37 aa, Artificial Sequence; identical to SEQ ID NO: 26215
  Cyclic GFR-binding peptide
  MOD_RES (31), (32): Xaa is C or S

SEQ ID NO: 76897 - protein, 31 aa, Artificial Sequence; identical to SEQ ID NO: 26216
  Cyclic GFR-binding peptide
  MOD_RES (1), (1): Xaa is C or S

SEQ ID NO: 76898 - protein, 37 aa, Artificial Sequence; identical to SEQ ID NO: 26217
  Cyclic GFR-binding peptide
  MOD_RES (1), (32), (33): Xaa is C or S

SEQ ID NO: 76899 - protein, 31 aa, Artificial Sequence
  Cyclic GFR-binding peptide
  MOD_RES (29), (30): Xaa is C or S
VMESMEGIVVKDYEDMIQMTINSLETPVXXA

SEQ ID NO: 76900 - protein, 32 aa, Artificial Sequence
  Cyclic GFR-binding peptide
LHEELRNSLQELKPKKRVYEYYLVTLPEHHVR

SEQ ID NO: 76901 - protein, 30 aa, Artificial Sequence
  Cyclic GFR-binding peptide
ELTNSLQEFIPKKRVIEYYLVTLPELQVQT

SEQ ID NO: 76902 - protein, 29 aa, Artificial Sequence
  Cyclic GFR-binding peptide
  MOD_RES (26), (27): Xaa is C or S
SMEGIVVKENEDMIQMTINSLETPVXXAK

SEQ ID NO: 76903 - protein, 27 aa, Artificial Sequence
  Cyclic GFR-binding peptide
  MOD_RES (2), (2): Xaa is C or S
KXSKVVMVTAKKVKPTRGVIKRIQVPR

SEQ ID NO: 76904 - protein, 33 aa, Artificial Sequence
  Cyclic GFR-binding peptide
  MOD_RES (30), (31): Xaa is C or S
VVMNVQVEKIVNSSDDVKAVKVSRLQTPAXXPK

SEQ ID NO: 76905 - protein, 25 aa, Artificial Sequence
  Cyclic GFR-binding peptide
MVTAKKVKPKRGVIKRIQVPRLAQP

SEQ ID NO: 76906 - protein, 31 aa, Artificial Sequence
  Cyclic GFR-binding peptide
  MOD_RES (28), (28): Xaa is C or S
MNVTAKKIVNSSDDIKRVQVPRLKTPAXTPK

SEQ ID NO: 76907 - protein, 33 aa, Artificial Sequence; identical to SEQ ID NO: 26233
  Cyclic GFR-binding peptide
  MOD_RES (1), (32), (33): Xaa is C or S

SEQ ID NO: 76908 - protein, 31 aa, Artificial Sequence
  Cyclic GFR-binding peptide
  MOD_RES (26), (27): Xaa is C or S
VQVEKIVNSSDDVKAVKVSRLQTPAXXPKPV

SEQ ID NO: 76909 - protein, 32 aa, Artificial Sequence; identical to SEQ ID NO: 26234
  Cyclic GFR-binding peptide
  MOD_RES (2), (2): Xaa is C or S

SEQ ID NO: 76910 - protein, 29 aa, Artificial Sequence
  Cyclic GFR-binding peptide
  MOD_RES (26), (27): Xaa is C or S
SMEGIVKPTRGVMIQITINSLDQPVXXPS

SEQ ID NO: 76911 - protein, 39 aa, Artificial Sequence; identical to SEQ ID NO: 26236
  Cyclic GFR-binding peptide
  MOD_RES (37), (37): Xaa is C or S

SEQ ID NO: 76912 - protein, 37 aa, Artificial Sequence; identical to SEQ ID NO: 26238
  Cyclic GFR-binding peptide
  MOD_RES (1), (3), (34), (35): Xaa is C or S

SEQ ID NO: 76913 - protein, 26 aa, Artificial Sequence
  Cyclic GFR-binding peptide
MESMEGIVVKDYEDMIQMTINSLETP

SEQ ID NO: 76914 - protein, 28 aa, Artificial Sequence
  Cyclic GFR-binding peptide
  MOD_RES (27), (28): Xaa is C or S
MSMEGIVKPTRGVMIQITINSLDQPVXX

SEQ ID NO: 76915 - protein, 28 aa, Artificial Sequence
  Cyclic GFR-binding peptide
  MOD_RES (27), (28): Xaa is C or S
NSMEGIIVNSSDDMIQVTINSLQTPAXX

SEQ ID NO: 76916 - protein, 27 aa, Artificial Sequence
  Cyclic GFR-binding peptide
  MOD_RES (27), (27): Xaa is C or S
NVTAKKIVNSSDDIKRVQVPRLKTPAX

SEQ ID NO: 76917 - protein, 30 aa, Artificial Sequence; identical to SEQ ID NO: 26240
  Cyclic GFR-binding peptide

SEQ ID NO: 76918 - protein, 27 aa, Artificial Sequence
  Cyclic GFR-binding peptide
HDELTNSLQEFIPKKRVIEYYVVPLPE

SEQ ID NO: 76919 - protein, 38 aa, Artificial Sequence; identical to SEQ ID NO: 26241
  Cyclic GFR-binding peptide
  MOD_RES (2), (4): Xaa is C or S

SEQ ID NO: 76920 - protein, 35 aa, Artificial Sequence
  Cyclic GFR-binding peptide
  MOD_RES (34), (34): Xaa is C or S
EELRNSLQELKPKKRVYEYYVVPLPEHHVRSPQXK

SEQ ID NO: 76921 - protein, 25 aa, Artificial Sequence
  Cyclic GFR-binding peptide
KVVMSMEGIVKPTRGVMIQITINSL

SEQ ID NO: 76922 - protein, 34 aa, Artificial Sequence; identical to SEQ ID NO: 26244
  Cyclic GFR-binding peptide
  MOD_RES (1), (33), (34): Xaa is C or S

SEQ ID NO: 76923 - protein, 30 aa, Artificial Sequence
  Cyclic GFR-binding peptide
  MOD_RES (26), (27): Xaa is C or S
SMEGIIVNSSDDMIQVTINSLKTPAXXPKP

SEQ ID NO: 76924 - protein, 36 aa, Artificial Sequence; identical to SEQ ID NO: 26249
  Cyclic GFR-binding peptide
  MOD_RES (1), (1): Xaa is C or S

SEQ ID NO: 76925 - protein, 32 aa, Artificial Sequence; identical to SEQ ID NO: 26250
  Cyclic GFR-binding peptide
  MOD_RES (1), (32): Xaa is C or S

SEQ ID NO: 76926 - protein, 37 aa, Artificial Sequence; identical to SEQ ID NO: 26252
  Cyclic GFR-binding peptide
  MOD_RES (2), (34), (35): Xaa is C or S

SEQ ID NO: 76927 - protein, 30 aa, Artificial Sequence
  Cyclic GFR-binding peptide
  MOD_RES (30), (30): Xaa is C or S
LFNSLQEHQGQHPKIRYYLMTLPEEETPVX

SEQ ID NO: 76928 - protein, 33 aa, Artificial Sequence
  Cyclic GFR-binding peptide
  MOD_RES (32), (32): Xaa is C or S
HQLFNSLQEHQGQHPKIRYYVMPLPEEETPVXE

SEQ ID NO: 76929 - protein, 29 aa, Artificial Sequence
  Cyclic GFR-binding peptide
ALHDELTNSLQEFIPKKRVIEYYLVTLPE

SEQ ID NO: 76930 - protein, 24 aa, Artificial Sequence
  Cyclic GFR-binding peptide
VQVEKVVKENEDVKAMKVSRLETP

SEQ ID NO: 76931 - protein, 28 aa, Artificial Sequence
  Cyclic GFR-binding peptide
VVMNSMEGIIVNSSDDMIQVTINSLQTP

SEQ ID NO: 76932 - protein, 35 aa, Artificial Sequence; identical to SEQ ID NO: 26258
  Cyclic GFR-binding peptide

SEQ ID NO: 76933 - protein, 30 aa, Artificial Sequence
  Cyclic GFR-binding peptide
  MOD_RES (1), (3): Xaa is C or S
XKXSKVIMVTAKKIKPTKGIIKRIQVPRLD

SEQ ID NO: 76934 - protein, 43 aa, Artificial Sequence; identical to SEQ ID NO: 26263
  Cyclic GFR-binding peptide
  MOD_RES (2), (4), (41): Xaa is C or S

SEQ ID NO: 76935 - protein, 22 aa, Artificial Sequence
  Cyclic GFR-binding peptide
MSMEGIVKPKRGVMIQITINSL

SEQ ID NO: 76936 - protein, 25 aa, Artificial Sequence
  Cyclic GFR-binding peptide
SMEGIIKPTKGIMIQITINSLDQSV

SEQ ID NO: 76937 - protein, 29 aa, Artificial Sequence
  Cyclic GFR-binding peptide
  MOD_RES (28), (28): Xaa is C or S
NSLQEHQGQHPKIRYYVMPLPEEETPVXE

SEQ ID NO: 76938 - protein, 36 aa, Artificial Sequence; identical to SEQ ID NO: 26267
  Cyclic GFR-binding peptide
  MOD_RES (33), (33): Xaa is C or S

SEQ ID NO: 76939 - protein, 39 aa, Artificial Sequence; identical to SEQ ID NO: 26269
  Cyclic GFR-binding peptide
  MOD_RES (2), (34), (35): Xaa is C or S

SEQ ID NO: 76940 - protein, 38 aa, Artificial Sequence; identical to SEQ ID NO: 26272
  Cyclic GFR-binding peptide
  MOD_RES (2), (4), (35), (36): Xaa is C or S

SEQ ID NO: 76941 - protein, 30 aa, Artificial Sequence; identical to SEQ ID NO: 2144
  Cyclic GFR-binding peptide

SEQ ID NO: 76942 - protein, 23 aa, Artificial Sequence
  Cyclic GFR-binding peptide
MVTAKKVKPKRGVIKRIQVPRLA

SEQ ID NO: 76943 - protein, 31 aa, Artificial Sequence
  Cyclic GFR-binding peptide
  MOD_RES (29), (30): Xaa is C or S
VMNVTAKKIVNSSDDIKRVQVPRLQTPAXXP

SEQ ID NO: 76944 - protein, 29 aa, Artificial Sequence
  Cyclic GFR-binding peptide
KVVMVQVEKVKPTRGVVKAIKVSRLDQPV

SEQ ID NO: 76945 - protein, 30 aa, Artificial Sequence
  Cyclic GFR-binding peptide
  MOD_RES (30), (30): Xaa is C or S
VVMESMEGIVVKDYEDMIQMTINSLETPVX

SEQ ID NO: 76946 - protein, 29 aa, Artificial Sequence
  Cyclic GFR-binding peptide
  MOD_RES (1), (3): Xaa is C or S
XKXSRVIMSMEGIVKPKRGVMIQITINSL

SEQ ID NO: 76947 - protein, 31 aa, Artificial Sequence
  Cyclic GFR-binding peptide
  MOD_RES (28), (29): Xaa is C or S
IMVQVEKVKPKRGVVKAIKVSRLAQPVXXPA

SEQ ID NO: 76948 - protein, 33 aa, Artificial Sequence
  Cyclic GFR-binding peptide
  MOD_RES (28), (29): Xaa is C or S
VMVTAKKVKPTRGVIKRIQVPRLDQPVXXPSAS

SEQ ID NO: 76949 - protein, 36 aa, Artificial Sequence; identical to SEQ ID NO: 26275
  Cyclic GFR-binding peptide
  MOD_RES (2), (2): Xaa is C or S

SEQ ID NO: 76950 - protein, 38 aa, Artificial Sequence; identical to SEQ ID NO: 26276
  Cyclic GFR-binding peptide
  MOD_RES (1), (33), (34): Xaa is C or S

SEQ ID NO: 76951 - protein, 27 aa, Artificial Sequence
  Cyclic GFR-binding peptide
HDELTNSLQEFIPKKRVIEYYLVTLPE

SEQ ID NO: 76952 - protein, 24 aa, Artificial Sequence
  Cyclic GFR-binding peptide
VVMNVQVEKIVNSSDDVKAVKVSR

SEQ ID NO: 76953 - protein, 35 aa, Artificial Sequence; identical to SEQ ID NO: 26284
  Cyclic GFR-binding peptide
  MOD_RES (31), (32): Xaa is C or S

SEQ ID NO: 76954 - protein, 26 aa, Artificial Sequence
  Cyclic GFR-binding peptide
EVVMDSMEGIVVKENEDMIQMTINSL

SEQ ID NO: 76955 - protein, 41 aa, Artificial Sequence; identical to SEQ ID NO: 26286
  Cyclic GFR-binding peptide
  MOD_RES (2), (36): Xaa is C or S

SEQ ID NO: 76956 - protein, 29 aa, Artificial Sequence
  Cyclic GFR-binding peptide
  MOD_RES (1), (1): Xaa is C or S
XSKVVMVTAKKVKPTRGVIKRIQVPRLDQ

SEQ ID NO: 76957 - protein, 34 aa, Artificial Sequence; identical to SEQ ID NO: 26287
  Cyclic GFR-binding peptide
  MOD_RES (2), (34): Xaa is C or S

SEQ ID NO: 76958 - protein, 24 aa, Artificial Sequence
  Cyclic GFR-binding peptide
KVVMVTAKKVKPTRGVIKRIQVPR

SEQ ID NO: 76959 - protein, 27 aa, Artificial Sequence
  Cyclic GFR-binding peptide
IMSMEGIVKPKRGVMIQITINSLAQPV

SEQ ID NO: 76960 - protein, 34 aa, Artificial Sequence; identical to SEQ ID NO: 26294
  Cyclic GFR-binding peptide
  MOD_RES (2), (4): Xaa is C or S

SEQ ID NO: 76961 - protein, 29 aa, Artificial Sequence
  Cyclic GFR-binding peptide
  MOD_RES (2), (2): Xaa is C or S
KXSKVVMVTAKKVKPTRGVIKRIQVPRLD

SEQ ID NO: 76962 - protein, 33 aa, Artificial Sequence; identical to SEQ ID NO: 26298
  Cyclic GFR-binding peptide
  MOD_RES (31), (32): Xaa is C or S

SEQ ID NO: 76963 - protein, 32 aa, Artificial Sequence
  Cyclic GFR-binding peptide
  MOD_RES (1), (1): Xaa is C or S
XALHDELTNSLQEFIPKKRVIEYYLVTLPELQ

SEQ ID NO: 76964 - protein, 35 aa, Artificial Sequence; identical to SEQ ID NO: 26299
  Cyclic GFR-binding peptide
  MOD_RES (31), (32): Xaa is C or S

SEQ ID NO: 76965 - protein, 28 aa, Artificial Sequence
  Cyclic GFR-binding peptide
VVMNVTAKKIVNSSDDIKRVQVPRLKTP

SEQ ID NO: 76966 - protein, 30 aa, Artificial Sequence
  Cyclic GFR-binding peptide
  MOD_RES (2), (2): Xaa is C or S
KXSRVIMSMEGIVKPKRGVMIQITINSLAQ

SEQ ID NO: 76967 - protein, 32 aa, Artificial Sequence
  Cyclic GFR-binding peptide
  MOD_RES (30), (31): Xaa is C or S
VVMDSMEGIVVKENEDMIQMTINSLETPVXXA

SEQ ID NO: 76968 - protein, 31 aa, Artificial Sequence
  Cyclic GFR-binding peptide
  MOD_RES (2), (4): Xaa is C or S
RXGXGEVVMDVTAKKVVKENEDIKRMQVPRL

SEQ ID NO: 76969 - protein, 35 aa, Artificial Sequence; identical to SEQ ID NO: 26309
  Cyclic GFR-binding peptide
  MOD_RES (1), (3), (35): Xaa is C or S

SEQ ID NO: 76970 - protein, 30 aa, Artificial Sequence
  Cyclic GFR-binding peptide
  MOD_RES (29), (30): Xaa is C or S
VMESMEGIVVKDYEDMIQMTINSLETPVXX

SEQ ID NO: 76971 - protein, 26 aa, Artificial Sequence
  Cyclic GFR-binding peptide
RVIMVTAKKVKPKRGVIKRIQVPRLA

SEQ ID NO: 76972 - protein, 38 aa, Artificial Sequence; identical to SEQ ID NO: 26314
  Cyclic GFR-binding peptide
  MOD_RES (2), (34), (35): Xaa is C or S

SEQ ID NO: 76973 - protein, 34 aa, Artificial Sequence
  Cyclic GFR-binding peptide
  MOD_RES (28), (29): Xaa is C or S
MNVTAKKIVNSSDDIKRVQVPRLKTPAXXPKPVY

SEQ ID NO: 76974 - protein, 42 aa, Artificial Sequence; identical to SEQ ID NO: 26315
  Cyclic GFR-binding peptide
  MOD_RES (2), (4), (36), (37): Xaa is C or S

SEQ ID NO: 76975 - protein, 28 aa, Artificial Sequence
  Cyclic GFR-binding peptide
  MOD_RES (28), (28): Xaa is C or S
IMVTAKKVKPKRGVIKRIQVPRLAQPVX

SEQ ID NO: 76976 - protein, 36 aa, Artificial Sequence; identical to SEQ ID NO: 26317
  Cyclic GFR-binding peptide
  MOD_RES (2), (4), (36): Xaa is C or S

SEQ ID NO: 76977 - protein, 37 aa, Artificial Sequence; identical to SEQ ID NO: 26318
  Cyclic GFR-binding peptide
  MOD_RES (1), (3), (35), (36): Xaa is C or S

SEQ ID NO: 76978 - protein, 29 aa, Artificial Sequence
  Cyclic GFR-binding peptide
  MOD_RES (28), (29): Xaa is C or S
MDVQVEKVVKENEDVKAMKVSRLETPVXX

SEQ ID NO: 76979 - protein, 34 aa, Artificial Sequence
  Cyclic GFR-binding peptide
  MOD_RES (30), (31): Xaa is C or S
VVMDVTAKKVVKENEDIKRMQVPRLETPVXXAKP

SEQ ID NO: 76980 - protein, 34 aa, Artificial Sequence
  Cyclic GFR-binding peptide
  MOD_RES (32), (32): Xaa is C or S
HQLFNSLQEHQGQHPKIRYYLMTLPEEETPVXEL

SEQ ID NO: 76981 - protein, 28 aa, Artificial Sequence
  Cyclic GFR-binding peptide
  MOD_RES (28), (28): Xaa is C or S
VMVQVEKVKPTRGVVKAIKVSRLDQPVX

SEQ ID NO: 76982 - protein, 26 aa, Artificial Sequence
  Cyclic GFR-binding peptide
KVVMVTAKKVKPTRGVIKRIQVPRLD

SEQ ID NO: 76983 - protein, 36 aa, Artificial Sequence; identical to SEQ ID NO: 26322
  Cyclic GFR-binding peptide
  MOD_RES (36), (36): Xaa is C or S

SEQ ID NO: 76984 - protein, 27 aa, Artificial Sequence
  Cyclic GFR-binding peptide
KVVMSMEGIVKPTRGVMIQITINSLDQ

SEQ ID NO: 76985 - protein, 32 aa, Artificial Sequence
  Cyclic GFR-binding peptide
  MOD_RES (30), (31): Xaa is C or S
VVMNVTAKKIVNSSDDIKRVQVPRLQTPAXXP

SEQ ID NO: 76986 - protein, 38 aa, Artificial Sequence; identical to SEQ ID NO: 26327
  Cyclic GFR-binding peptide
  MOD_RES (2), (4): Xaa is C or S

SEQ ID NO: 76987 - protein, 32 aa, Artificial Sequence
  Cyclic GFR-binding peptide
  MOD_RES (2), (2): Xaa is C or S
GXGEVVMDVQVEKVVKENEDVKAMKVSRLETP

SEQ ID NO: 76988 - protein, 30 aa, Artificial Sequence
  Cyclic GFR-binding peptide
  MOD_RES (28), (29): Xaa is C or S
IMVQVEKVKPKRGVVKAIKVSRLAQPVXXP

SEQ ID NO: 76989 - protein, 37 aa, Artificial Sequence; identical to SEQ ID NO: 26332
  Cyclic GFR-binding peptide
  MOD_RES (2), (4), (36), (37): Xaa is C or S

SEQ ID NO: 76990 - protein, 32 aa, Artificial Sequence; identical to SEQ ID NO: 26333
  Cyclic GFR-binding peptide
  MOD_RES (32), (32): Xaa is C or S

SEQ ID NO: 76991 - protein, 34 aa, Artificial Sequence
  Cyclic GFR-binding peptide
  MOD_RES (2), (4): Xaa is C or S
AXAXELHEELRNSLQELKPKKRVYEYYVVPLPEH

SEQ ID NO: 76992 - protein, 29 aa, Artificial Sequence
  Cyclic GFR-binding peptide
  MOD_RES (1), (1): Xaa is C or S
XGEVVMDVQVEKVVKENEDVKAMKVSRLE

SEQ ID NO: 76993 - protein, 30 aa, Artificial Sequence
  Cyclic GFR-binding peptide
  MOD_RES (1), (1): Xaa is C or S
XSRVVMNVTAKKIVNSSDDIKRVQVPRLKT

SEQ ID NO: 76994 - protein, 30 aa, Artificial Sequence
  Cyclic GFR-binding peptide
  MOD_RES (2), (2): Xaa is C or S
EXKNHQLFNSLQEHQGQHPKIRYYVMPLPE

SEQ ID NO: 76995 - protein, 35 aa, Artificial Sequence; identical to SEQ ID NO: 26338
  Cyclic GFR-binding peptide
  MOD_RES (32), (32): Xaa is C or S

SEQ ID NO: 76996 - protein, 35 aa, Artificial Sequence; identical to SEQ ID NO: 26340
  Cyclic GFR-binding peptide
  MOD_RES (2), (4), (35): Xaa is C or S

SEQ ID NO: 76997 - protein, 32 aa, Artificial Sequence; identical to SEQ ID NO: 26343
  Cyclic GFR-binding peptide
  MOD_RES (1), (32): Xaa is C or S

SEQ ID NO: 76998 - protein, 30 aa, Artificial Sequence
  Cyclic GFR-binding peptide
  MOD_RES (1), (3): Xaa is C or S
XKXSKVIMVQVEKIKPTKGIVKAIKVSRLD

SEQ ID NO: 76999 - protein, 29 aa, Artificial Sequence
  Cyclic GFR-binding peptide
VVMNVTAKKIVNSSDDIKRVQVPRLKTPA

SEQ ID NO: 77000 - protein, 24 aa, Artificial Sequence
  Cyclic GFR-binding peptide
MSMEGIIKPTKGIMIQITINSLDQ

SEQ ID NO: 77001 - protein, 31 aa, Artificial Sequence
  Cyclic GFR-binding peptide
  MOD_RES (29), (30): Xaa is C or S
VMEVQVEKVVKDYEDVKAMKVSRLETPVXXA

SEQ ID NO: 77002 - protein, 23 aa, Artificial Sequence
  Cyclic GFR-binding peptide
VTAKKVKPKRGVIKRIQVPRLAQ

SEQ ID NO: 77003 - protein, 25 aa, Artificial Sequence
  Cyclic GFR-binding peptide
NSLQEHQGQHPKIRYYVMPLPEEET

SEQ ID NO: 77004 - protein, 25 aa, Artificial Sequence
  Cyclic GFR-binding peptide
EVVMESMEGIVVKDYEDMIQMTINS

SEQ ID NO: 77005 - protein, 32 aa, Artificial Sequence; identical to SEQ ID NO: 26360
  Cyclic GFR-binding peptide
  MOD_RES (31), (32): Xaa is C or S

SEQ ID NO: 77006 - protein, 33 aa, Artificial Sequence; identical to SEQ ID NO: 26362
  Cyclic GFR-binding peptide
  MOD_RES (31), (31): Xaa is C or S

SEQ ID NO: 77007 - protein, 34 aa, Artificial Sequence
  Cyclic GFR-binding peptide
  MOD_RES (28), (28): Xaa is C or S
MNVTAKKIVNSSDDIKRVQVPRLKTPAXTPKTVH

SEQ ID NO: 77008 - protein, 35 aa, Artificial Sequence; identical to SEQ ID NO: 26363
  Cyclic GFR-binding peptide
  MOD_RES (31), (31): Xaa is C or S

SEQ ID NO: 77009 - protein, 32 aa, Artificial Sequence
  Cyclic GFR-binding peptide
  MOD_RES (1), (3): Xaa is C or S
XKXALHDELTNSLQEFIPKKRVIEYYLVTLPE

SEQ ID NO: 77010 - protein, 31 aa, Artificial Sequence
  Cyclic GFR-binding peptide
HEELRNSLQELKPKKRVYEYYVVPLPEHHVR

SEQ ID NO: 77011 - protein, 34 aa, Artificial Sequence
  Cyclic GFR-binding peptide
  MOD_RES (30), (31): Xaa is C or S
VVMNVQVEKIVNSSDDVKAVKVSRLQTPAXXPKP

SEQ ID NO: 77012 - protein, 26 aa, Artificial Sequence
  Cyclic GFR-binding peptide
VVMNSMEGIIVNSSDDMIQVTINSLQ

SEQ ID NO: 77013 - protein, 29 aa, Artificial Sequence
  Cyclic GFR-binding peptide
  MOD_RES (29), (29): Xaa is C or S
VMDVTAKKVVKENEDIKRMQVPRLETPVX

SEQ ID NO: 77014 - protein, 25 aa, Artificial Sequence
  Cyclic GFR-binding peptide
NSLQELKPKKRVYEYYLVTLPEHHV

SEQ ID NO: 77015 - protein, 40 aa, Artificial Sequence; identical to SEQ ID NO: 26374
  Cyclic GFR-binding peptide
  MOD_RES (1), (3), (35), (36): Xaa is C or S

SEQ ID NO: 77016 - protein, 31 aa, Artificial Sequence
  Cyclic GFR-binding peptide
  MOD_RES (30), (31): Xaa is C or S
KVVMVTAKKVKPTRGVIKRIQVPRLDQPVXX

SEQ ID NO: 77017 - protein, 28 aa, Artificial Sequence
  Cyclic GFR-binding peptide
NSLQEFIPKKRVIEYYLVTLPELQVQTP

SEQ ID NO: 77018 - protein, 36 aa, Artificial Sequence; identical to SEQ ID NO: 26382
  Cyclic GFR-binding peptide
  MOD_RES (32), (33): Xaa is C or S

SEQ ID NO: 77019 - protein, 33 aa, Artificial Sequence
  Cyclic GFR-binding peptide
  MOD_RES (2), (4): Xaa is C or S
EXKXALHDELTNSLQEFIPKKRVIEYYLVTLPE

SEQ ID NO: 77020 - protein, 28 aa, Artificial Sequence
  Cyclic GFR-binding peptide
LTNSLQEFIPKKRVIEYYLVTLPELQVQ

SEQ ID NO: 77021 - protein, 27 aa, Artificial Sequence
  Cyclic GFR-binding peptide
GEVVMDVQVEKVVKENEDVKAMKVSRL

SEQ ID NO: 77022 - protein, 27 aa, Artificial Sequence
  Cyclic GFR-binding peptide
RVVMNSMEGIIVNSSDDMIQVTINSLQ

SEQ ID NO: 77023 - protein, 31 aa, Artificial Sequence
  Cyclic GFR-binding peptide
  MOD_RES (2), (4): Xaa is C or S
HXGXSRVVMNVTAKKIVNSSDDIKRVQVPRL

SEQ ID NO: 77024 - protein, 37 aa, Artificial Sequence; identical to SEQ ID NO: 26387
  Cyclic GFR-binding peptide
  MOD_RES (33), (33): Xaa is C or S

SEQ ID NO: 77025 - protein, 30 aa, Artificial Sequence
  Cyclic GFR-binding peptide
  MOD_RES (29), (30): Xaa is C or S
VMEVQVEKVVKDYEDVKAMKVSRLETPVXX

SEQ ID NO: 77026 - protein, 35 aa, Artificial Sequence; identical to SEQ ID NO: 26388
  Cyclic GFR-binding peptide
  MOD_RES (1), (3), (35): Xaa is C or S

SEQ ID NO: 77027 - protein, 35 aa, Artificial Sequence; identical to SEQ ID NO: 26389
  Cyclic GFR-binding peptide
  MOD_RES (1), (32), (33): Xaa is C or S

SEQ ID NO: 77028 - protein, 30 aa, Artificial Sequence
  Cyclic GFR-binding peptide
DELTNSLQEFIPKKRVIEYYLVTLPELQVQ

SEQ ID NO: 77029 - protein, 22 aa, Artificial Sequence
  Cyclic GFR-binding peptide
MDSMEGIVVKENEDMIQMTINS

SEQ ID NO: 77030 - protein, 43 aa, Artificial Sequence; identical to SEQ ID NO: 26393
  Cyclic GFR-binding peptide
  MOD_RES (2), (39): Xaa is C or S

SEQ ID NO: 77031 - protein, 22 aa, Artificial Sequence
  Cyclic GFR-binding peptide
VTAKKVVKENEDIKRMQVPRLE

SEQ ID NO: 77032 - protein, 41 aa, Artificial Sequence; identical to SEQ ID NO: 26394
  Cyclic GFR-binding peptide
  MOD_RES (2), (4), (38): Xaa is C or S

SEQ ID NO: 77033 - protein, 31 aa, Artificial Sequence
  Cyclic GFR-binding peptide
  MOD_RES (1), (3): Xaa is C or S
XKXSKVVMVTAKKVKPTRGVIKRIQVPRLDQ

SEQ ID NO: 77034 - protein, 33 aa, Artificial Sequence; identical to SEQ ID NO: 26397
  Cyclic GFR-binding peptide

SEQ ID NO: 77035 - protein, 35 aa, Artificial Sequence
  Cyclic GFR-binding peptide
  MOD_RES (30), (30): Xaa is C or S
LFNSLQEHQGQHPKIRYYLMTLPEEETPVXELGED

SEQ ID NO: 77036 - protein, 30 aa, Artificial Sequence
  Cyclic GFR-binding peptide
ELHEELRNSLQELKPKKRVYEYYLVTLPEH

SEQ ID NO: 77037 - protein, 39 aa, Artificial Sequence; identical to SEQ ID NO: 26401
  Cyclic GFR-binding peptide
  MOD_RES (2), (4): Xaa is C or S

SEQ ID NO: 77038 - protein, 32 aa, Artificial Sequence; identical to SEQ ID NO: 26404
  Cyclic GFR-binding peptide
  MOD_RES (32), (32): Xaa is C or S

SEQ ID NO: 77039 - protein, 35 aa, Artificial Sequence
  Cyclic GFR-binding peptide
  MOD_RES (33), (33): Xaa is C or S
ELRNSLQELKPKKRVYEYYVVPLPEHHVRSPQXKV

SEQ ID NO: 77040 - protein, 34 aa, Artificial Sequence; identical to SEQ ID NO: 26408
  Cyclic GFR-binding peptide
  MOD_RES (2), (34): Xaa is C or S

SEQ ID NO: 77041 - protein, 31 aa, Artificial Sequence; identical to SEQ ID NO: 26411
  Cyclic GFR-binding peptide
  MOD_RES (1), (1): Xaa is C or S

SEQ ID NO: 77042 - protein, 21 aa, Artificial Sequence
  Cyclic GFR-binding peptide
SMEGIIVNSSDDMIQVTINSL

SEQ ID NO: 77043 - protein, 37 aa, Artificial Sequence; identical to SEQ ID NO: 26420
  Cyclic GFR-binding peptide
  MOD_RES (1), (3), (34), (35): Xaa is C or S

SEQ ID NO: 77044 - protein, 40 aa, Artificial Sequence; identical to SEQ ID NO: 26421
  Cyclic GFR-binding peptide
  MOD_RES (2), (4), (36), (37): Xaa is C or S

SEQ ID NO: 77045 - protein, 37 aa, Artificial Sequence; identical to SEQ ID NO: 26423
  Cyclic GFR-binding peptide
  MOD_RES (33), (33): Xaa is C or S

SEQ ID NO: 77046 - protein, 23 aa, Artificial Sequence
  Cyclic GFR-binding peptide
MSMEGIIKPTKGIMIQITINSLD

SEQ ID NO: 77047 - protein, 26 aa, Artificial Sequence
  Cyclic GFR-binding peptide
VMEVQVEKVVKDYEDVKAMKVSRLET

SEQ ID NO: 77048 - protein, 34 aa, Artificial Sequence; identical to SEQ ID NO: 26428
  Cyclic GFR-binding peptide
  MOD_RES (31), (31): Xaa is C or S

SEQ ID NO: 77049 - protein, 37 aa, Artificial Sequence; identical to SEQ ID NO: 26430
  Cyclic GFR-binding peptide
  MOD_RES (2), (4), (35), (36): Xaa is C or S

SEQ ID NO: 77050 - protein, 36 aa, Artificial Sequence; identical to SEQ ID NO: 26433
  Cyclic GFR-binding peptide
  MOD_RES (32), (32): Xaa is C or S

SEQ ID NO: 77051 - protein, 34 aa, Artificial Sequence
  Cyclic GFR-binding peptide
  MOD_RES (30), (30): Xaa is C or S
VVMNVQVEKIVNSSDDVKAVKVSRLKTPAXTPKT

SEQ ID NO: 77052 - protein, 27 aa, Artificial Sequence
  Cyclic GFR-binding peptide
ARVVMNSMEGIIVNSSDDMIQVTINSL

SEQ ID NO: 77053 - protein, 24 aa, Artificial Sequence
  Cyclic GFR-binding peptide
VQVEKIVNSSDDVKAVKVSRLQTP

SEQ ID NO: 77054 - protein, 28 aa, Artificial Sequence
  Cyclic GFR-binding peptide
HDELTNSLQEFIPKKRVIEYYLVTLPEL

SEQ ID NO: 77055 - protein, 32 aa, Artificial Sequence
  Cyclic GFR-binding peptide
  MOD_RES (28), (29): Xaa is C or S
IMSMEGIIKPTKGIMIQITINSLDQSVXXPSA

SEQ ID NO: 77056 - protein, 24 aa, Artificial Sequence
  Cyclic GFR-binding peptide
TNSLQEFIPKKRVIEYYLVTLPEL

SEQ ID NO: 77057 - protein, 24 aa, Artificial Sequence
  Cyclic GFR-binding peptide
KVVMVQVEKVKPTRGVVKAIKVSR

SEQ ID NO: 77058 - protein, 27 aa, Artificial Sequence
  Cyclic GFR-binding peptide
SRVVMNSMEGIIVNSSDDMIQVTINSL

SEQ ID NO: 77059 - protein, 29 aa, Artificial Sequence
  Cyclic GFR-binding peptide
  MOD_RES (27), (28): Xaa is C or S
DVQVEKVVKENEDVKAMKVSRLETPVXXA

SEQ ID NO: 77060 - protein, 29 aa, Artificial Sequence
  Cyclic GFR-binding peptide
AAAAAAAAAVTAKKVKPKRGVIKRIQVPR

SEQ ID NO: 77061 - protein, 31 aa, Artificial Sequence
  Cyclic GFR-binding peptide
  MOD_RES (27), (28): Xaa is C or S
DVQVEKVVKENEDVKAMKVSRLETPVXXAKP

SEQ ID NO: 77062 - protein, 27 aa, Artificial Sequence
  Cyclic GFR-binding peptide
  MOD_RES (26), (26): Xaa is C or S
VQVEKIVNSSDDVKAVKVSRLKTPAXT

SEQ ID NO: 77063 - protein, 35 aa, Artificial Sequence; identical to SEQ ID NO: 26449
  Cyclic GFR-binding peptide
  MOD_RES (2), (33), (34): Xaa is C or S

SEQ ID NO: 77064 - protein, 29 aa, Artificial Sequence
  Cyclic GFR-binding peptide
VVMNSMEGIIVNSSDDMIQVTINSLQTPA

SEQ ID NO: 77065 - protein, 23 aa, Artificial Sequence
  Cyclic GFR-binding peptide
VMVTAKKVKPTRGVIKRIQVPRL

SEQ ID NO: 77066 - protein, 41 aa, Artificial Sequence; identical to SEQ ID NO: 26451
  Cyclic GFR-binding peptide
  MOD_RES (1), (3), (35), (36): Xaa is C or S

SEQ ID NO: 77067 - protein, 29 aa, Artificial Sequence
  Cyclic GFR-binding peptide
  MOD_RES (29), (29): Xaa is C or S
VVMVQVEKVKPTRGVVKAIKVSRLDQPVX

SEQ ID NO: 77068 - protein, 28 aa, Artificial Sequence
  Cyclic GFR-binding peptide
  MOD_RES (26), (27): Xaa is C or S
SMEGIIKPTKGIMIQITINSLDQSVXXP

SEQ ID NO: 77069 - protein, 27 aa, Artificial Sequence
  Cyclic GFR-binding peptide
  MOD_RES (27), (27): Xaa is C or S
MVTAKKVKPKRGVIKRIQVPRLAQPVX

SEQ ID NO: 77070 - protein, 34 aa, Artificial Sequence
  Cyclic GFR-binding peptide
  MOD_RES (28), (29): Xaa is C or S
MNSMEGIIVNSSDDMIQVTINSLKTPAXXPKPVY

SEQ ID NO: 77071 - protein, 28 aa, Artificial Sequence
  Cyclic GFR-binding peptide
  MOD_RES (26), (27): Xaa is C or S
SMEGIVKPKRGVMIQITINSLAQPVXXP

SEQ ID NO: 77072 - protein, 31 aa, Artificial Sequence
  Cyclic GFR-binding peptide
EELRNSLQELKPKKRVYEYYLVTLPEHHVRS

SEQ ID NO: 77073 - protein, 36 aa, Artificial Sequence; identical to SEQ ID NO: 26461
  Cyclic GFR-binding peptide
  MOD_RES (32), (32): Xaa is C or S

SEQ ID NO: 77074 - protein, 30 aa, Artificial Sequence; identical to SEQ ID NO: 2183
  Cyclic GFR-binding peptide

SEQ ID NO: 77075 - protein, 30 aa, Artificial Sequence
  Cyclic GFR-binding peptide
  MOD_RES (1), (1): Xaa is C or S
XSKVVMSMEGIVKPTRGVMIQITINSLDQP

SEQ ID NO: 77076 - protein, 22 aa, Artificial Sequence
  Cyclic GFR-binding peptide
IMVQVEKVKPKRGVVKAIKVSR

SEQ ID NO: 77077 - protein, 40 aa, Artificial Sequence; identical to SEQ ID NO: 26462
  Cyclic GFR-binding peptide
  MOD_RES (1), (3), (35), (36): Xaa is C or S

SEQ ID NO: 77078 - protein, 34 aa, Artificial Sequence
  Cyclic GFR-binding peptide
  MOD_RES (29), (30): Xaa is C or S
VIMVQVEKIKPTKGIVKAIKVSRLDQSVXXPSAS

SEQ ID NO: 77079 - protein, 28 aa, Artificial Sequence
  Cyclic GFR-binding peptide
  MOD_RES (1), (1): Xaa is C or S
XGEVVMEVTAKKVVKDYEDIKRMQVPRL

SEQ ID NO: 77080 - protein, 38 aa, Artificial Sequence; identical to SEQ ID NO: 26464
  Cyclic GFR-binding peptide
  MOD_RES (1), (3), (35), (36): Xaa is C or S

SEQ ID NO: 77081 - protein, 38 aa, Artificial Sequence; identical to SEQ ID NO: 26466
  Cyclic GFR-binding peptide
  MOD_RES (2), (34), (35): Xaa is C or S

SEQ ID NO: 77082 - protein, 39 aa, Artificial Sequence; identical to SEQ ID NO: 26468
  Cyclic GFR-binding peptide
  MOD_RES (2), (34), (35): Xaa is C or S

SEQ ID NO: 77083 - protein, 40 aa, Artificial Sequence; identical to SEQ ID NO: 26469
  Cyclic GFR-binding peptide
  MOD_RES (2), (4), (35), (36): Xaa is C or S

SEQ ID NO: 77084 - protein, 34 aa, Artificial Sequence
  Cyclic GFR-binding peptide
  MOD_RES (29), (30): Xaa is C or S
VMDVTAKKVVKENEDIKRMQVPRLETPVXXAKPI

SEQ ID NO: 77085 - protein, 37 aa, Artificial Sequence
  Cyclic GFR-binding peptide
  MOD_RES (2), (4): Xaa is C or S
EXKXALHDELTNSLQEFIPKKRVIEYYLVTLPELQVQ

SEQ ID NO: 77086 - protein, 36 aa, Artificial Sequence; identical to SEQ ID NO: 26471
  Cyclic GFR-binding peptide
  MOD_RES (1), (3), (35), (36): Xaa is C or S

SEQ ID NO: 77087 - protein, 27 aa, Artificial Sequence
  Cyclic GFR-binding peptide
HQLFNSLQEHQGQHPKIRYYLMTLPEE

SEQ ID NO: 77088 - protein, 32 aa, Artificial Sequence
  Cyclic GFR-binding peptide
  MOD_RES (26), (27): Xaa is C or S
VQVEKVKPKRGVVKAIKVSRLAQPVXXPAASA

SEQ ID NO: 77089 - protein, 39 aa, Artificial Sequence; identical to SEQ ID NO: 26476
  Cyclic GFR-binding peptide
  MOD_RES (2), (4), (36), (37): Xaa is C or S

SEQ ID NO: 77090 - protein, 37 aa, Artificial Sequence; identical to SEQ ID NO: 26477
  Cyclic GFR-binding peptide
  MOD_RES (1), (33), (34): Xaa is C or S

SEQ ID NO: 77091 - protein, 22 aa, Artificial Sequence
  Cyclic GFR-binding peptide
VTAKKIVNSSDDIKRVQVPRLK

SEQ ID NO: 77092 - protein, 38 aa, Artificial Sequence; identical to SEQ ID NO: 26480
  Cyclic GFR-binding peptide
  MOD_RES (2), (34): Xaa is C or S

SEQ ID NO: 77093 - protein, 26 aa, Artificial Sequence
  Cyclic GFR-binding peptide
  MOD_RES (26), (26): Xaa is C or S
VTAKKIVNSSDDIKRVQVPRLKTPAX

SEQ ID NO: 77094 - protein, 32 aa, Artificial Sequence
  Cyclic GFR-binding peptide
  MOD_RES (2), (2): Xaa is C or S
KXALHDELTNSLQEFIPKKRVIEYYVVPLPEL

SEQ ID NO: 77095 - protein, 32 aa, Artificial Sequence
  Cyclic GFR-binding peptide
  MOD_RES (28), (29): Xaa is C or S
MDVQVEKVVKENEDVKAMKVSRLETPVXXAKP

SEQ ID NO: 77096 - protein, 27 aa, Artificial Sequence
  Cyclic GFR-binding peptide
VVMNVQVEKIVNSSDDVKAVKVSRLQT

SEQ ID NO: 77097 - protein, 24 aa, Artificial Sequence
  Cyclic GFR-binding peptide
DVTAKKVVKENEDIKRMQVPRLET

SEQ ID NO: 77098 - protein, 34 aa, Artificial Sequence
  Cyclic GFR-binding peptide
  MOD_RES (28), (28): Xaa is C or S
MNVQVEKIVNSSDDVKAVKVSRLKTPAXTPKTVH

SEQ ID NO: 77099 - protein, 35 aa, Artificial Sequence; identical to SEQ ID NO: 26488
  Cyclic GFR-binding peptide
  MOD_RES (31), (32): Xaa is C or S

SEQ ID NO: 77100 - protein, 32 aa, Artificial Sequence
  Cyclic GFR-binding peptide
  MOD_RES (1), (3): Xaa is C or S
XAXELHEELRNSLQELKPKKRVYEYYVVPLPE

SEQ ID NO: 77101 - protein, 35 aa, Artificial Sequence; identical to SEQ ID NO: 26491
  Cyclic GFR-binding peptide
  MOD_RES (1), (3), (34), (35): Xaa is C or S

SEQ ID NO: 77102 - protein, 35 aa, Artificial Sequence
  Cyclic GFR-binding peptide
  MOD_RES (29), (30): Xaa is C or S
VMESMEGIVVKDYEDMIQMTINSLETPVXXAKPIS

SEQ ID NO: 77103 - protein, 25 aa, Artificial Sequence
  Cyclic GFR-binding peptide
MNVTAKKIVNSSDDIKRVQVPRLQT

SEQ ID NO: 77104 - protein, 29 aa, Artificial Sequence
  Cyclic GFR-binding peptide
  MOD_RES (29), (29): Xaa is C or S
VMNSMEGIIVNSSDDMIQVTINSLKTPAX

SEQ ID NO: 77105 - protein, 35 aa, Artificial Sequence
  Cyclic GFR-binding peptide
  MOD_RES (33), (33): Xaa is C or S
ELRNSLQELKPKKRVYEYYLVTLPEHHVRSPQXKV

SEQ ID NO: 77106 - protein, 34 aa, Artificial Sequence
  Cyclic GFR-binding peptide
  MOD_RES (30), (31): Xaa is C or S
KVIMSMEGIIKPTKGIMIQITINSLDQSVXXPSA

SEQ ID NO: 77107 - protein, 36 aa, Artificial Sequence; identical to SEQ ID NO: 26498
  Cyclic GFR-binding peptide
  MOD_RES (31), (32): Xaa is C or S

SEQ ID NO: 77108 - protein, 42 aa, Artificial Sequence; identical to SEQ ID NO: 26499
  Cyclic GFR-binding peptide
  MOD_RES (1), (38): Xaa is C or S

SEQ ID NO: 77109 - protein, 26 aa, Artificial Sequence
  Cyclic GFR-binding peptide
  MOD_RES (26), (26): Xaa is C or S
VQVEKIKPTKGIVKAIKVSRLDQSVX

SEQ ID NO: 77110 - protein, 35 aa, Artificial Sequence
  Cyclic GFR-binding peptide
  MOD_RES (30), (30): Xaa is C or S
VVMNSMEGIIVNSSDDMIQVTINSLKTPAXTPKTV

SEQ ID NO: 77111 - protein, 39 aa, Artificial Sequence; identical to SEQ ID NO: 26507
  Cyclic GFR-binding peptide
  MOD_RES (2), (4): Xaa is C or S

SEQ ID NO: 77112 - protein, 34 aa, Artificial Sequence; identical to SEQ ID NO: 26513
  Cyclic GFR-binding peptide
  MOD_RES (1), (33), (34): Xaa is C or S

SEQ ID NO: 77113 - protein, 32 aa, Artificial Sequence; identical to SEQ ID NO: 26514
  Cyclic GFR-binding peptide
  MOD_RES (32), (32): Xaa is C or S

SEQ ID NO: 77114 - protein, 29 aa, Artificial Sequence
  Cyclic GFR-binding peptide
  MOD_RES (1), (3): Xaa is C or S
XGXARVVMNVTAKKIVNSSDDIKRVQVPR

SEQ ID NO: 77115 - protein, 37 aa, Artificial Sequence
  Cyclic GFR-binding peptide
  MOD_RES (31), (31): Xaa is C or S
QLFNSLQEHQGQHPKIRYYVMPLPEEETPVXELGEDN

SEQ ID NO: 77116 - protein, 33 aa, Artificial Sequence; identical to SEQ ID NO: 26519
  Cyclic GFR-binding peptide
  MOD_RES (31), (32): Xaa is C or S

SEQ ID NO: 77117 - protein, 34 aa, Artificial Sequence; identical to SEQ ID NO: 26521
  Cyclic GFR-binding peptide
  MOD_RES (1), (33), (34): Xaa is C or S

SEQ ID NO: 77118 - protein, 33 aa, Artificial Sequence
  Cyclic GFR-binding peptide
  MOD_RES (29), (30): Xaa is C or S
VMEVTAKKVVKDYEDIKRMQVPRLETPVXXAKP

SEQ ID NO: 77119 - protein, 35 aa, Artificial Sequence; identical to SEQ ID NO: 26524
  Cyclic GFR-binding peptide
  MOD_RES (1), (3), (35): Xaa is C or S

SEQ ID NO: 77120 - protein, 27 aa, Artificial Sequence
  Cyclic GFR-binding peptide
FNSLQEHQGQHPKIRYYLMTLPEEETP

SEQ ID NO: 77121 - protein, 31 aa, Artificial Sequence
  Cyclic GFR-binding peptide
  MOD_RES (28), (28): Xaa is C or S
MNVQVEKIVNSSDDVKAVKVSRLKTPAXTPK

SEQ ID NO: 77122 - protein, 35 aa, Artificial Sequence; identical to SEQ ID NO: 26531
  Cyclic GFR-binding peptide
  MOD_RES (1), (3), (34), (35): Xaa is C or S

SEQ ID NO: 77123 - protein, 26 aa, Artificial Sequence
  Cyclic GFR-binding peptide
VVMESMEGIVVKDYEDMIQMTINSLE

SEQ ID NO: 77124 - protein, 23 aa, Artificial Sequence
  Cyclic GFR-binding peptide
VTAKKIVNSSDDIKRVQVPRLKT

SEQ ID NO: 77125 - protein, 22 aa, Artificial Sequence
  Cyclic GFR-binding peptide
DVTAKKVVKENEDIKRMQVPRL

SEQ ID NO: 77126 - protein, 29 aa, Artificial Sequence
  Cyclic GFR-binding peptide
  MOD_RES (28), (28): Xaa is C or S
NSLQEHQGQHPKIRYYLMTLPEEETPVXE

SEQ ID NO: 77127 - protein, 36 aa, Artificial Sequence; identical to SEQ ID NO: 26536
  Cyclic GFR-binding peptide
  MOD_RES (1), (3), (35), (36): Xaa is C or S

SEQ ID NO: 77128 - protein, 32 aa, Artificial Sequence
  Cyclic GFR-binding peptide
  MOD_RES (1), (1): Xaa is C or S
XELHEELRNSLQELKPKKRVYEYYLVTLPEHH

SEQ ID NO: 77129 - protein, 28 aa, Artificial Sequence
  Cyclic GFR-binding peptide
  MOD_RES (27), (28): Xaa is C or S
EVTAKKVVKDYEDIKRMQVPRLETPVXX

SEQ ID NO: 77130 - protein, 30 aa, Artificial Sequence
  Cyclic GFR-binding peptide
  MOD_RES (27), (28): Xaa is C or S
NVTAKKIVNSSDDIKRVQVPRLKTPAXXPK

SEQ ID NO: 77131 - protein, 31 aa, Artificial Sequence
  Cyclic GFR-binding peptide
  MOD_RES (2), (2): Xaa is C or S
EXKNHQLFNSLQEHQGQHPKIRYYVMPLPEE

SEQ ID NO: 77132 - protein, 26 aa, Artificial Sequence
  Cyclic GFR-binding peptide
VMNSMEGIIVNSSDDMIQVTINSLQT

SEQ ID NO: 77133 - protein, 40 aa, Artificial Sequence; identical to SEQ ID NO: 26540
  Cyclic GFR-binding peptide
  MOD_RES (2), (4), (36), (37): Xaa is C or S

SEQ ID NO: 77134 - protein, 37 aa, Artificial Sequence; identical to SEQ ID NO: 26542
  Cyclic GFR-binding peptide
  MOD_RES (1), (3), (35): Xaa is C or S

SEQ ID NO: 77135 - protein, 23 aa, Artificial Sequence
  Cyclic GFR-binding peptide
SMEGIVKPTRGVMIQITINSLDQ

SEQ ID NO: 77136 - protein, 41 aa, Artificial Sequence; identical to SEQ ID NO: 26544
  Cyclic GFR-binding peptide
  MOD_RES (1), (3), (35), (36): Xaa is C or S

SEQ ID NO: 77137 - protein, 36 aa, Artificial Sequence; identical to SEQ ID NO: 26545
  Cyclic GFR-binding peptide
  MOD_RES (31), (32): Xaa is C or S

SEQ ID NO: 77138 - protein, 27 aa, Artificial Sequence
  Cyclic GFR-binding peptide
RVVMNVQVEKIVNSSDDVKAVKVSRLQ

SEQ ID NO: 77139 - protein, 39 aa, Artificial Sequence; identical to SEQ ID NO: 26550
  Cyclic GFR-binding peptide
  MOD_RES (2), (34), (35): Xaa is C or S

SEQ ID NO: 77140 - protein, 30 aa, Artificial Sequence
  Cyclic GFR-binding peptide
  MOD_RES (1), (1): Xaa is C or S
XGEVVMESMEGIVVKDYEDMIQMTINSLET

SEQ ID NO: 77141 - protein, 44 aa, Artificial Sequence; identical to SEQ ID NO: 26553
  Cyclic GFR-binding peptide
  MOD_RES (2), (4), (41): Xaa is C or S

SEQ ID NO: 77142 - protein, 33 aa, Artificial Sequence
  Cyclic GFR-binding peptide
  MOD_RES (28), (29): Xaa is C or S
MNSMEGIIVNSSDDMIQVTINSLKTPAXXPKPV

SEQ ID NO: 77143 - protein, 32 aa, Artificial Sequence
  Cyclic GFR-binding peptide
  MOD_RES (2), (4): Xaa is C or S
RXGXGEVVMDVQVEKVVKENEDVKAMKVSRLE

SEQ ID NO: 77144 - protein, 35 aa, Artificial Sequence; identical to SEQ ID NO: 26560
  Cyclic GFR-binding peptide
  MOD_RES (2), (33), (34): Xaa is C or S

SEQ ID NO: 77145 - protein, 28 aa, Artificial Sequence
  Cyclic GFR-binding peptide
GEVVMESMEGIVVKDYEDMIQMTINSLE

SEQ ID NO: 77146 - protein, 22 aa, Artificial Sequence
  Cyclic GFR-binding peptide
NVTAKKIVNSSDDIKRVQVPRL

SEQ ID NO: 77147 - protein, 39 aa, Artificial Sequence; identical to SEQ ID NO: 26562
  Cyclic GFR-binding peptide
  MOD_RES (1), (3): Xaa is C or S

SEQ ID NO: 77148 - protein, 27 aa, Artificial Sequence
  Cyclic GFR-binding peptide
MNSMEGIIVNSSDDMIQVTINSLQTPA

SEQ ID NO: 77149 - protein, 24 aa, Artificial Sequence
  Cyclic GFR-binding peptide
VVMDVQVEKVVKENEDVKAMKVSR

SEQ ID NO: 77150 - protein, 25 aa, Artificial Sequence
  Cyclic GFR-binding peptide
NVQVEKIVNSSDDVKAVKVSRLKTP

SEQ ID NO: 77151 - protein, 36 aa, Artificial Sequence; identical to SEQ ID NO: 26564
  Cyclic GFR-binding peptide
  MOD_RES (1), (33): Xaa is C or S

SEQ ID NO: 77152 - protein, 30 aa, Artificial Sequence
  Cyclic GFR-binding peptide
  MOD_RES (2), (2): Xaa is C or S
KXSKVIMVTAKKIKPTKGIIKRIQVPRLDQ

SEQ ID NO: 77153 - protein, 41 aa, Artificial Sequence; identical to SEQ ID NO: 26565
  Cyclic GFR-binding peptide
  MOD_RES (2), (4), (36), (37): Xaa is C or S

SEQ ID NO: 77154 - protein, 36 aa, Artificial Sequence
  Cyclic GFR-binding peptide
  MOD_RES (32), (32): Xaa is C or S
LTNSLQEFIPKKRVIEYYVVPLPELQVQTPRXQVNR

SEQ ID NO: 77155 - protein, 30 aa, Artificial Sequence
  Cyclic GFR-binding peptide
  MOD_RES (1), (1): Xaa is C or S
XALHDELTNSLQEFIPKKRVIEYYLVTLPE

SEQ ID NO: 77156 - protein, 29 aa, Artificial Sequence
  Cyclic GFR-binding peptide
  MOD_RES (26), (27): Xaa is C or S
SMEGIVVKDYEDMIQMTINSLETPVXXAK

SEQ ID NO: 77157 - protein, 23 aa, Artificial Sequence
  Cyclic GFR-binding peptide
VMSMEGIVKPTRGVMIQITINSL

SEQ ID NO: 77158 - protein, 32 aa, Artificial Sequence
  Cyclic GFR-binding peptide
  MOD_RES (30), (30): Xaa is C or S
LFNSLQEHQGQHPKIRYYLMTLPEEETPVXEL

SEQ ID NO: 77159 - protein, 33 aa, Artificial Sequence
  Cyclic GFR-binding peptide
ELHEELRNSLQELKPKKRVYEYYVVPLPEHHVR

SEQ ID NO: 77160 - protein, 27 aa, Artificial Sequence
  Cyclic GFR-binding peptide
QLFNSLQEHQGQHPKIRYYLMTLPEEE

SEQ ID NO: 77161 - protein, 30 aa, Artificial Sequence
  Cyclic GFR-binding peptide
  MOD_RES (30), (30): Xaa is C or S
NSLQELKPKKRVYEYYVVPLPEHHVRSPQX

SEQ ID NO: 77162 - protein, 30 aa, Artificial Sequence
  Cyclic GFR-binding peptide
  MOD_RES (28), (29): Xaa is C or S
MNVQVEKIVNSSDDVKAVKVSRLKTPAXXP

SEQ ID NO: 77163 - protein, 32 aa, Artificial Sequence
  Cyclic GFR-binding peptide
  MOD_RES (1), (3): Xaa is C or S
XGXARVVMNVTAKKIVNSSDDIKRVQVPRLQT

SEQ ID NO: 77164 - protein, 35 aa, Artificial Sequence; identical to SEQ ID NO: 26572
  Cyclic GFR-binding peptide
  MOD_RES (31), (32): Xaa is C or S

SEQ ID NO: 77165 - protein, 23 aa, Artificial Sequence
  Cyclic GFR-binding peptide
RNSLQELKPKKRVYEYYVVPLPE

SEQ ID NO: 77166 - protein, 25 aa, Artificial Sequence
  Cyclic GFR-binding peptide
VVMEVQVEKVVKDYEDVKAMKVSRL

SEQ ID NO: 77167 - protein, 31 aa, Artificial Sequence
  Cyclic GFR-binding peptide
  MOD_RES (27), (28): Xaa is C or S
NVQVEKIVNSSDDVKAVKVSRLKTPAXXPKP

SEQ ID NO: 77168 - protein, 39 aa, Artificial Sequence; identical to SEQ ID NO: 26575
  Cyclic GFR-binding peptide
  MOD_RES (2), (4), (35), (36): Xaa is C or S

SEQ ID NO: 77169 - protein, 36 aa, Artificial Sequence; identical to SEQ ID NO: 26581
  Cyclic GFR-binding peptide
  MOD_RES (2), (34): Xaa is C or S

SEQ ID NO: 77170 - protein, 34 aa, Artificial Sequence
  Cyclic GFR-binding peptide
  MOD_RES (29), (30): Xaa is C or S
VMNSMEGIIVNSSDDMIQVTINSLQTPAXXPKPV

SEQ ID NO: 77171 - protein, 35 aa, Artificial Sequence
  Cyclic GFR-binding peptide
  MOD_RES (31), (31): Xaa is C or S
TNSLQEFIPKKRVIEYYLVTLPELQVQTPRXQVNR

SEQ ID NO: 77172 - protein, 30 aa, Artificial Sequence
  Cyclic GFR-binding peptide
  MOD_RES (29), (30): Xaa is C or S
VIMSMEGIVKPKRGVMIQITINSLAQPVXX

SEQ ID NO: 77173 - protein, 35 aa, Artificial Sequence; identical to SEQ ID NO: 26587
  Cyclic GFR-binding peptide
  MOD_RES (1), (33), (34): Xaa is C or S

SEQ ID NO: 77174 - protein, 33 aa, Artificial Sequence
  Cyclic GFR-binding peptide
  MOD_RES (1), (3): Xaa is C or S
XGXSRVVMNVQVEKIVNSSDDVKAVKVSRLKTP

SEQ ID NO: 77175 - protein, 37 aa, Artificial Sequence; identical to SEQ ID NO: 26589
  Cyclic GFR-binding peptide
  MOD_RES (32), (33): Xaa is C or S

SEQ ID NO: 77176 - protein, 27 aa, Artificial Sequence
  Cyclic GFR-binding peptide
VIMSMEGIIKPTKGIMIQITINSLDQS

SEQ ID NO: 77177 - protein, 37 aa, Artificial Sequence
  Cyclic GFR-binding peptide
  MOD_RES (2), (4): Xaa is C or S
EXKXALHDELTNSLQEFIPKKRVIEYYVVPLPELQVQ

SEQ ID NO: 77178 - protein, 36 aa, Artificial Sequence; identical to SEQ ID NO: 26594
  Cyclic GFR-binding peptide

SEQ ID NO: 77179 - protein, 30 aa, Artificial Sequence
  Cyclic GFR-binding peptide
  MOD_RES (27), (27): Xaa is C or S
NVQVEKIVNSSDDVKAVKVSRLKTPAXTPK

SEQ ID NO: 77180 - protein, 20 aa, Artificial Sequence
  Cyclic GFR-binding peptide
SMEGIVKPTRGVMIQITINS

SEQ ID NO: 77181 - protein, 30 aa, Artificial Sequence
  Cyclic GFR-binding peptide
  MOD_RES (26), (27): Xaa is C or S
VTAKKVKPKRGVIKRIQVPRLAQPVXXPAA

SEQ ID NO: 77182 - protein, 28 aa, Artificial Sequence
  Cyclic GFR-binding peptide
  MOD_RES (27), (28): Xaa is C or S
NVTAKKIVNSSDDIKRVQVPRLQTPAXX

SEQ ID NO: 77183 - protein, 33 aa, Artificial Sequence; identical to SEQ ID NO: 26595
  Cyclic GFR-binding peptide
  MOD_RES (1), (33): Xaa is C or S

SEQ ID NO: 77184 - protein, 36 aa, Artificial Sequence
  Cyclic GFR-binding peptide
  MOD_RES (32), (32): Xaa is C or S
HQLFNSLQEHQGQHPKIRYYVMPLPEEETPVXELGE

SEQ ID NO: 77185 - protein, 28 aa, Artificial Sequence
  Cyclic GFR-binding peptide
  MOD_RES (1), (3): Xaa is C or S
XKXSKVVMVTAKKVKPTRGVIKRIQVPR

SEQ ID NO: 77186 - protein, 32 aa, Artificial Sequence
  Cyclic GFR-binding peptide
  MOD_RES (2), (4): Xaa is C or S
RXEXKNHQLFNSLQEHQGQHPKIRYYLMTLPE

SEQ ID NO: 77187 - protein, 39 aa, Artificial Sequence; identical to SEQ ID NO: 26599
  Cyclic GFR-binding peptide
  MOD_RES (1), (38): Xaa is C or S

SEQ ID NO: 77188 - protein, 33 aa, Artificial Sequence
  Cyclic GFR-binding peptide
  MOD_RES (2), (4): Xaa is C or S
HXGXARVVMNSMEGIIVNSSDDMIQVTINSLQT

SEQ ID NO: 77189 - protein, 35 aa, Artificial Sequence
  Cyclic GFR-binding peptide
  MOD_RES (29), (30): Xaa is C or S
VMNVTAKKIVNSSDDIKRVQVPRLKTPAXXPKPVY

SEQ ID NO: 77190 - protein, 27 aa, Artificial Sequence
  Cyclic GFR-binding peptide
VMEVTAKKVVKDYEDIKRMQVPRLETP

SEQ ID NO: 77191 - protein, 35 aa, Artificial Sequence; identical to SEQ ID NO: 26602
  Cyclic GFR-binding peptide
  MOD_RES (1), (3), (35): Xaa is C or S

SEQ ID NO: 77192 - protein, 30 aa, Artificial Sequence
  Cyclic GFR-binding peptide
  MOD_RES (2), (4): Xaa is C or S
SXKXSKVIMVTAKKIKPTKGIIKRIQVPRL

SEQ ID NO: 77193 - protein, 26 aa, Artificial Sequence
  Cyclic GFR-binding peptide
VMNVTAKKIVNSSDDIKRVQVPRLQT

SEQ ID NO: 77194 - protein, 29 aa, Artificial Sequence
  Cyclic GFR-binding peptide
SRVIMSMEGIVKPKRGVMIQITINSLAQP

SEQ ID NO: 77195 - protein, 38 aa, Artificial Sequence; identical to SEQ ID NO: 26607
  Cyclic GFR-binding peptide
  MOD_RES (2), (4), (35), (36): Xaa is C or S

SEQ ID NO: 77196 - protein, 28 aa, Artificial Sequence
  Cyclic GFR-binding peptide
  MOD_RES (26), (27): Xaa is C or S
VTAKKIVNSSDDIKRVQVPRLQTPAXXP

SEQ ID NO: 77197 - protein, 34 aa, Artificial Sequence; identical to SEQ ID NO: 26610
  Cyclic GFR-binding peptide
  MOD_RES (1), (1): Xaa is C or S

SEQ ID NO: 77198 - protein, 32 aa, Artificial Sequence
  Cyclic GFR-binding peptide
  MOD_RES (2), (4): Xaa is C or S
SXKXSRVIMVQVEKVKPKRGVVKAIKVSRLAQ

SEQ ID NO: 77199 - protein, 33 aa, Artificial Sequence
  Cyclic GFR-binding peptide
EELRNSLQELKPKKRVYEYYLVTLPEHHVRSPQ

SEQ ID NO: 77200 - protein, 39 aa, Artificial Sequence; identical to SEQ ID NO: 26613
  Cyclic GFR-binding peptide
  MOD_RES (1), (33), (34): Xaa is C or S

SEQ ID NO: 77201 - protein, 24 aa, Artificial Sequence
  Cyclic GFR-binding peptide
MNSMEGIIVNSSDDMIQVTINSLQ

SEQ ID NO: 77202 - protein, 22 aa, Artificial Sequence
  Cyclic GFR-binding peptide
MVTAKKIKPTKGIIKRIQVPRL

SEQ ID NO: 77203 - protein, 38 aa, Artificial Sequence; identical to SEQ ID NO: 26614
  Cyclic GFR-binding peptide
  MOD_RES (2), (4), (36), (37): Xaa is C or S

SEQ ID NO: 77204 - protein, 31 aa, Artificial Sequence
  Cyclic GFR-binding peptide
  MOD_RES (2), (4): Xaa is C or S
RXGXGEVVMESMEGIVVKDYEDMIQMTINSL

SEQ ID NO: 77205 - protein, 28 aa, Artificial Sequence
  Cyclic GFR-binding peptide
  MOD_RES (27), (28): Xaa is C or S
NVQVEKIVNSSDDVKAVKVSRLQTPAXX

SEQ ID NO: 77206 - protein, 26 aa, Artificial Sequence
  Cyclic GFR-binding peptide
LTNSLQEFIPKKRVIEYYLVTLPELQ

SEQ ID NO: 77207 - protein, 27 aa, Artificial Sequence
  Cyclic GFR-binding peptide
  MOD_RES (1), (1): Xaa is C or S
XSKVVMVTAKKVKPTRGVIKRIQVPRL

SEQ ID NO: 77208 - protein, 25 aa, Artificial Sequence
  Cyclic GFR-binding peptide
MNVTAKKIVNSSDDIKRVQVPRLKT

SEQ ID NO: 77209 - protein, 34 aa, Artificial Sequence
  Cyclic GFR-binding peptide
  MOD_RES (29), (30): Xaa is C or S
VVMVTAKKVKPTRGVIKRIQVPRLDQPVXXPSAS

SEQ ID NO: 77210 - protein, 32 aa, Artificial Sequence
  Cyclic GFR-binding peptide
  MOD_RES (1), (3): Xaa is C or S
XKXSKVVMSMEGIVKPTRGVMIQITINSLDQP

SEQ ID NO: 77211 - protein, 29 aa, Artificial Sequence
  Cyclic GFR-binding peptide
  MOD_RES (1), (3): Xaa is C or S
XKXSKVVMVTAKKVKPTRGVIKRIQVPRL

SEQ ID NO: 77212 - protein, 31 aa, Artificial Sequence
  Cyclic GFR-binding peptide
  MOD_RES (2), (2): Xaa is C or S
KXSKVVMSMEGIVKPTRGVMIQITINSLDQP

SEQ ID NO: 77213 - protein, 26 aa, Artificial Sequence
  Cyclic GFR-binding peptide
IMSMEGIIKPTKGIMIQITINSLDQS

SEQ ID NO: 77214 - protein, 35 aa, Artificial Sequence; identical to SEQ ID NO: 26623
  Cyclic GFR-binding peptide

SEQ ID NO: 77215 - protein, 37 aa, Artificial Sequence; identical to SEQ ID NO: 26628
  Cyclic GFR-binding peptide
  MOD_RES (1), (33): Xaa is C or S

SEQ ID NO: 77216 - protein, 33 aa, Artificial Sequence
  Cyclic GFR-binding peptide
  MOD_RES (28), (29): Xaa is C or S
MNSMEGIIVNSSDDMIQVTINSLQTPAXXPKPV

SEQ ID NO: 77217 - protein, 35 aa, Artificial Sequence; identical to SEQ ID NO: 26629
  Cyclic GFR-binding peptide
  MOD_RES (1), (35): Xaa is C or S

SEQ ID NO: 77218 - protein, 43 aa, Artificial Sequence; identical to SEQ ID NO: 26633
  Cyclic GFR-binding peptide
  MOD_RES (2), (4), (41): Xaa is C or S

SEQ ID NO: 77219 - protein, 30 aa, Artificial Sequence
  Cyclic GFR-binding peptide
  MOD_RES (1), (1): Xaa is C or S
XSRVIMVTAKKVKPKRGVIKRIQVPRLAQP

SEQ ID NO: 77220 - protein, 34 aa, Artificial Sequence
  Cyclic GFR-binding peptide
  MOD_RES (29), (30): Xaa is C or S
VMNVTAKKIVNSSDDIKRVQVPRLQTPAXXPKPV

SEQ ID NO: 77221 - protein, 25 aa, Artificial Sequence
  Cyclic GFR-binding peptide
VMVQVEKVKPTRGVVKAIKVSRLDQ

SEQ ID NO: 77222 - protein, 37 aa, Artificial Sequence; identical to SEQ ID NO: 26639
  Cyclic GFR-binding peptide
  MOD_RES (2), (34), (35): Xaa is C or S

SEQ ID NO: 77223 - protein, 28 aa, Artificial Sequence
  Cyclic GFR-binding peptide
SRVIMVQVEKVKPKRGVVKAIKVSRLAQ

SEQ ID NO: 77224 - protein, 33 aa, Artificial Sequence
  Cyclic GFR-binding peptide
  MOD_RES (27), (27): Xaa is C or S
NVTAKKIVNSSDDIKRVQVPRLKTPAXTPKTVH

SEQ ID NO: 77225 - protein, 32 aa, Artificial Sequence
  Cyclic GFR-binding peptide
  MOD_RES (30), (31): Xaa is C or S
VVMEVTAKKVVKDYEDIKRMQVPRLETPVXXA

SEQ ID NO: 77226 - protein, 37 aa, Artificial Sequence; identical to SEQ ID NO: 26640
  Cyclic GFR-binding peptide
  MOD_RES (36), (36): Xaa is C or S

SEQ ID NO: 77227 - protein, 32 aa, Artificial Sequence; identical to SEQ ID NO: 26641
  Cyclic GFR-binding peptide

SEQ ID NO: 77228 - protein, 25 aa, Artificial Sequence
  Cyclic GFR-binding peptide
LRNSLQELKPKKRVYEYYLVTLPEH

SEQ ID NO: 77229 - protein, 32 aa, Artificial Sequence; identical to SEQ ID NO: 26646
  Cyclic GFR-binding peptide
  MOD_RES (31), (32): Xaa is C or S

SEQ ID NO: 77230 - protein, 25 aa, Artificial Sequence
  Cyclic GFR-binding peptide
RVVMNSMEGIIVNSSDDMIQVTINS

SEQ ID NO: 77231 - protein, 38 aa, Artificial Sequence; identical to SEQ ID NO: 26648
  Cyclic GFR-binding peptide
  MOD_RES (32), (33): Xaa is C or S

SEQ ID NO: 77232 - protein, 31 aa, Artificial Sequence
  Cyclic GFR-binding peptide
  MOD_RES (28), (29): Xaa is C or S
MEVTAKKVVKDYEDIKRMQVPRLETPVXXAK

SEQ ID NO: 77233 - protein, 28 aa, Artificial Sequence
  Cyclic GFR-binding peptide
  MOD_RES (26), (27): Xaa is C or S
SMEGIVVKENEDMIQMTINSLETPVXXA

SEQ ID NO: 77234 - protein, 24 aa, Artificial Sequence
  Cyclic GFR-binding peptide
VMVTAKKVKPTRGVIKRIQVPRLD

SEQ ID NO: 77235 - protein, 30 aa, Artificial Sequence
  Cyclic GFR-binding peptide
  MOD_RES (30), (30): Xaa is C or S
RVIMVTAKKVKPKRGVIKRIQVPRLAQPVX

SEQ ID NO: 77236 - protein, 32 aa, Artificial Sequence
  Cyclic GFR-binding peptide
  MOD_RES (2), (2): Xaa is C or S
EXKNHQLFNSLQEHQGQHPKIRYYVMPLPEEE

SEQ ID NO: 77237 - protein, 31 aa, Artificial Sequence
  Cyclic GFR-binding peptide
  MOD_RES (28), (29): Xaa is C or S
MNVTAKKIVNSSDDIKRVQVPRLQTPAXXPK

SEQ ID NO: 77238 - protein, 38 aa, Artificial Sequence; identical to SEQ ID NO: 26652
  Cyclic GFR-binding peptide
  MOD_RES (1), (3), (37): Xaa is C or S

SEQ ID NO: 77239 - protein, 29 aa, Artificial Sequence
  Cyclic GFR-binding peptide
  MOD_RES (29), (29): Xaa is C or S
VMNVQVEKIVNSSDDVKAVKVSRLKTPAX

SEQ ID NO: 77240 - protein, 27 aa, Artificial Sequence
  Cyclic GFR-binding peptide
VIMVQVEKIKPTKGIVKAIKVSRLDQS

SEQ ID NO: 77241 - protein, 38 aa, Artificial Sequence; identical to SEQ ID NO: 26656
  Cyclic GFR-binding peptide
  MOD_RES (2), (4): Xaa is C or S

SEQ ID NO: 77242 - protein, 31 aa, Artificial Sequence; identical to SEQ ID NO: 26657
  Cyclic GFR-binding peptide
  MOD_RES (1), (1): Xaa is C or S

SEQ ID NO: 77243 - protein, 41 aa, Artificial Sequence; identical to SEQ ID NO: 26658
  Cyclic GFR-binding peptide
  MOD_RES (2), (4), (36), (37): Xaa is C or S

SEQ ID NO: 77244 - protein, 25 aa, Artificial Sequence
  Cyclic GFR-binding peptide
VVMEVTAKKVVKDYEDIKRMQVPRL

SEQ ID NO: 77245 - protein, 32 aa, Artificial Sequence
  Cyclic GFR-binding peptide
  MOD_RES (2), (4): Xaa is C or S
RXGXGEVVMDSMEGIVVKENEDMIQMTINSLE

SEQ ID NO: 77246 - protein, 33 aa, Artificial Sequence
  Cyclic GFR-binding peptide
  MOD_RES (28), (28): Xaa is C or S
MNVQVEKIVNSSDDVKAVKVSRLKTPAXTPKTV

SEQ ID NO: 77247 - protein, 29 aa, Artificial Sequence
  Cyclic GFR-binding peptide
RVIMVQVEKVKPKRGVVKAIKVSRLAQPV

SEQ ID NO: 77248 - protein, 36 aa, Artificial Sequence
  Cyclic GFR-binding peptide
  MOD_RES (34), (34): Xaa is C or S
EELRNSLQELKPKKRVYEYYVVPLPEHHVRSPQXKV

SEQ ID NO: 77249 - protein, 35 aa, Artificial Sequence; identical to SEQ ID NO: 26663
  Cyclic GFR-binding peptide
  MOD_RES (2), (4): Xaa is C or S

SEQ ID NO: 77250 - protein, 26 aa, Artificial Sequence
  Cyclic GFR-binding peptide
ARVVMNSMEGIIVNSSDDMIQVTINS

SEQ ID NO: 77251 - protein, 29 aa, Artificial Sequence
  Cyclic GFR-binding peptide
  MOD_RES (1), (1): Xaa is C or S
XSRVIMVTAKKVKPKRGVIKRIQVPRLAQ

SEQ ID NO: 77252 - protein, 38 aa, Artificial Sequence; identical to SEQ ID NO: 26667
  Cyclic GFR-binding peptide
  MOD_RES (1), (38): Xaa is C or S

SEQ ID NO: 77253 - protein, 26 aa, Artificial Sequence
  Cyclic GFR-binding peptide
SRVVMNSMEGIIVNSSDDMIQVTINS

SEQ ID NO: 77254 - protein, 31 aa, Artificial Sequence
  Cyclic GFR-binding peptide
  MOD_RES (1), (3): Xaa is C or S
XGXGEVVMEVTAKKVVKDYEDIKRMQVPRLE

SEQ ID NO: 77255 - protein, 34 aa, Artificial Sequence; identical to SEQ ID NO: 26670
  Cyclic GFR-binding peptide
  MOD_RES (1), (33): Xaa is C or S

SEQ ID NO: 77256 - protein, 37 aa, Artificial Sequence; identical to SEQ ID NO: 26671
  Cyclic GFR-binding peptide
  MOD_RES (31), (32): Xaa is C or S

SEQ ID NO: 77257 - protein, 26 aa, Artificial Sequence
  Cyclic GFR-binding peptide
VMDVTAKKVVKENEDIKRMQVPRLET

SEQ ID NO: 77258 - protein, 30 aa, Artificial Sequence
  Cyclic GFR-binding peptide
  MOD_RES (28), (29): Xaa is C or S
VMSMEGIVKPTRGVMIQITINSLDQPVXXP

SEQ ID NO: 77259 - protein, 28 aa, Artificial Sequence
  Cyclic GFR-binding peptide
  MOD_RES (28), (28): Xaa is C or S
MNVTAKKIVNSSDDIKRVQVPRLKTPAX

SEQ ID NO: 77260 - protein, 31 aa, Artificial Sequence
  Cyclic GFR-binding peptide
  MOD_RES (29), (30): Xaa is C or S
VIMVQVEKVKPKRGVVKAIKVSRLAQPVXXP

SEQ ID NO: 77261 - protein, 31 aa, Artificial Sequence
  Cyclic GFR-binding peptide
ALHDELTNSLQEFIPKKRVIEYYLVTLPELQ

SEQ ID NO: 77262 - protein, 31 aa, Artificial Sequence
  Cyclic GFR-binding peptide
  MOD_RES (26), (27): Xaa is C or S
VQVEKVVKENEDVKAMKVSRLETPVXXAKPI

SEQ ID NO: 77263 - protein, 20 aa, Artificial Sequence
  Cyclic GFR-binding peptide
VTAKKIKPTKGIIKRIQVPR

SEQ ID NO: 77264 - protein, 28 aa, Artificial Sequence
  Cyclic GFR-binding peptide
  MOD_RES (2), (2): Xaa is C or S
GXSRVVMNSMEGIIVNSSDDMIQVTINS

SEQ ID NO: 77265 - protein, 28 aa, Artificial Sequence
  Cyclic GFR-binding peptide
  MOD_RES (26), (27): Xaa is C or S
VQVEKVKPTRGVVKAIKVSRLDQPVXXP

SEQ ID NO: 77266 - protein, 40 aa, Artificial Sequence; identical to SEQ ID NO: 26678
  Cyclic GFR-binding peptide
  MOD_RES (2), (4), (35), (36): Xaa is C or S

SEQ ID NO: 77267 - protein, 32 aa, Artificial Sequence
  Cyclic GFR-binding peptide
  MOD_RES (30), (30): Xaa is C or S
NSLQELKPKKRVYEYYLVTLPEHHVRSPQXKV

SEQ ID NO: 77268 - protein, 35 aa, Artificial Sequence; identical to SEQ ID NO: 26680
  Cyclic GFR-binding peptide
  MOD_RES (2), (4), (35): Xaa is C or S

SEQ ID NO: 77269 - protein, 37 aa, Artificial Sequence; identical to SEQ ID NO: 26681
  Cyclic GFR-binding peptide
  MOD_RES (2), (2): Xaa is C or S

SEQ ID NO: 77270 - protein, 37 aa, Artificial Sequence; identical to SEQ ID NO: 26685
  Cyclic GFR-binding peptide
  MOD_RES (32), (33): Xaa is C or S

SEQ ID NO: 77271 - protein, 34 aa, Artificial Sequence; identical to SEQ ID NO: 26686
  Cyclic GFR-binding peptide
  MOD_RES (2), (4): Xaa is C or S

SEQ ID NO: 77272 - protein, 34 aa, Artificial Sequence
  Cyclic GFR-binding peptide
  MOD_RES (31), (31): Xaa is C or S
TNSLQEFIPKKRVIEYYLVTLPELQVQTPRXQVN

SEQ ID NO: 77273 - protein, 28 aa, Artificial Sequence
  Cyclic GFR-binding peptide
NSLQEFIPKKRVIEYYVVPLPELQVQTP

SEQ ID NO: 77274 - protein, 39 aa, Artificial Sequence; identical to SEQ ID NO: 26691
  Cyclic GFR-binding peptide
  MOD_RES (1), (33), (34): Xaa is C or S

SEQ ID NO: 77275 - protein, 31 aa, Artificial Sequence
  Cyclic GFR-binding peptide
  MOD_RES (30), (30): Xaa is C or S
NSLQELKPKKRVYEYYVVPLPEHHVRSPQXK

SEQ ID NO: 77276 - protein, 39 aa, Artificial Sequence; identical to SEQ ID NO: 26695
  Cyclic GFR-binding peptide
  MOD_RES (2), (33), (34): Xaa is C or S

SEQ ID NO: 77277 - protein, 27 aa, Artificial Sequence
  Cyclic GFR-binding peptide
  MOD_RES (1), (1): Xaa is C or S
XGEVVMESMEGIVVKDYEDMIQMTINS

SEQ ID NO: 77278 - protein, 32 aa, Artificial Sequence
  Cyclic GFR-binding peptide
  MOD_RES (32), (32): Xaa is C or S
HQLFNSLQEHQGQHPKIRYYLMTLPEEETPVX

SEQ ID NO: 77279 - protein, 29 aa, Artificial Sequence
  Cyclic GFR-binding peptide
  MOD_RES (29), (29): Xaa is C or S
VMEVQVEKVVKDYEDVKAMKVSRLETPVX

SEQ ID NO: 77280 - protein, 30 aa, Artificial Sequence
  Cyclic GFR-binding peptide
  MOD_RES (30), (30): Xaa is C or S
VVMNSMEGIIVNSSDDMIQVTINSLKTPAX

SEQ ID NO: 77281 - protein, 25 aa, Artificial Sequence
  Cyclic GFR-binding peptide
FNSLQEHQGQHPKIRYYVMPLPEEE

SEQ ID NO: 77282 - protein, 27 aa, Artificial Sequence
  Cyclic GFR-binding peptide
GEVVMDSMEGIVVKENEDMIQMTINSL

SEQ ID NO: 77283 - protein, 31 aa, Artificial Sequence
  Cyclic GFR-binding peptide
  MOD_RES (1), (1): Xaa is C or S
XGEVVMEVTAKKVVKDYEDIKRMQVPRLETP

SEQ ID NO: 77284 - protein, 31 aa, Artificial Sequence
  Cyclic GFR-binding peptide
  MOD_RES (28), (29): Xaa is C or S
MNVTAKKIVNSSDDIKRVQVPRLKTPAXXPK

SEQ ID NO: 77285 - protein, 33 aa, Artificial Sequence
  Cyclic GFR-binding peptide
  MOD_RES (30), (30): Xaa is C or S
NSLQELKPKKRVYEYYLVTLPEHHVRSPQXKVS

SEQ ID NO: 77286 - protein, 40 aa, Artificial Sequence; identical to SEQ ID NO: 26700
  Cyclic GFR-binding peptide
  MOD_RES (1), (3), (35), (36): Xaa is C or S

SEQ ID NO: 77287 - protein, 40 aa, Artificial Sequence; identical to SEQ ID NO: 26704
  Cyclic GFR-binding peptide
  MOD_RES (34), (34): Xaa is C or S

SEQ ID NO: 77288 - protein, 30 aa, Artificial Sequence; identical to SEQ ID NO: 26707
  Cyclic GFR-binding peptide

SEQ ID NO: 77289 - protein, 32 aa, Artificial Sequence
  Cyclic GFR-binding peptide
  MOD_RES (1), (3): Xaa is C or S
XEXKNHQLFNSLQEHQGQHPKIRYYLMTLPEE

SEQ ID NO: 77290 - protein, 38 aa, Artificial Sequence; identical to SEQ ID NO: 26713
  Cyclic GFR-binding peptide
  MOD_RES (1), (3), (35), (36): Xaa is C or S

SEQ ID NO: 77291 - protein, 31 aa, Artificial Sequence
  Cyclic GFR-binding peptide
  MOD_RES (26), (27): Xaa is C or S
SMEGIVKPTRGVMIQITINSLDQPVXXPSAS

SEQ ID NO: 77292 - protein, 28 aa, Artificial Sequence
  Cyclic GFR-binding peptide
  MOD_RES (28), (28): Xaa is C or S
MNVTAKKIVNSSDDIKRVQVPRLQTPAX

SEQ ID NO: 77293 - protein, 29 aa, Artificial Sequence
  Cyclic GFR-binding peptide
  MOD_RES (26), (27): Xaa is C or S
VQVEKVKPKRGVVKAIKVSRLAQPVXXPA

SEQ ID NO: 77294 - protein, 41 aa, Artificial Sequence; identical to SEQ ID NO: 26720
  Cyclic GFR-binding peptide
  MOD_RES (2), (4), (35), (36): Xaa is C or S

SEQ ID NO: 77295 - protein, 36 aa, Artificial Sequence; identical to SEQ ID NO: 26721
  Cyclic GFR-binding peptide
  MOD_RES (2), (4), (35), (36): Xaa is C or S

SEQ ID NO: 77296 - protein, 26 aa, Artificial Sequence
  Cyclic GFR-binding peptide
FNSLQEHQGQHPKIRYYLMTLPEEET

SEQ ID NO: 77297 - protein, 35 aa, Artificial Sequence
  Cyclic GFR-binding peptide
  MOD_RES (34), (34): Xaa is C or S
DELTNSLQEFIPKKRVIEYYVVPLPELQVQTPRXQ

SEQ ID NO: 77298 - protein, 21 aa, Artificial Sequence
  Cyclic GFR-binding peptide
SMEGIVVKDYEDMIQMTINSL

SEQ ID NO: 77299 - protein, 42 aa, Artificial Sequence; identical to SEQ ID NO: 26730
  Cyclic GFR-binding peptide
  MOD_RES (2), (39): Xaa is C or S

SEQ ID NO: 77300 - protein, 34 aa, Artificial Sequence
  Cyclic GFR-binding peptide
  MOD_RES (29), (30): Xaa is C or S
VMNVTAKKIVNSSDDIKRVQVPRLKTPAXXPKPV

SEQ ID NO: 77301 - protein, 27 aa, Artificial Sequence
  Cyclic GFR-binding peptide
  MOD_RES (1), (1): Xaa is C or S
XSRVVMNVQVEKIVNSSDDVKAVKVSR

SEQ ID NO: 77302 - protein, 33 aa, Artificial Sequence
  Cyclic GFR-binding peptide
  MOD_RES (28), (29): Xaa is C or S
MEVQVEKVVKDYEDVKAMKVSRLETPVXXAKPI

SEQ ID NO: 77303 - protein, 28 aa, Artificial Sequence
  Cyclic GFR-binding peptide
HEELRNSLQELKPKKRVYEYYLVTLPEH

SEQ ID NO: 77304 - protein, 28 aa, Artificial Sequence
  Cyclic GFR-binding peptide
  MOD_RES (1), (1): Xaa is C or S
XSRVIMVQVEKVKPKRGVVKAIKVSRLA

SEQ ID NO: 77305 - protein, 31 aa, Artificial Sequence
  Cyclic GFR-binding peptide
  MOD_RES (2), (2): Xaa is C or S
KXSKVIMVTAKKIKPTKGIIKRIQVPRLDQS

SEQ ID NO: 77306 - protein, 36 aa, Artificial Sequence; identical to SEQ ID NO: 26736
  Cyclic GFR-binding peptide
  MOD_RES (2), (4), (36): Xaa is C or S

SEQ ID NO: 77307 - protein, 30 aa, Artificial Sequence
  Cyclic GFR-binding peptide
  MOD_RES (29), (29): Xaa is C or S
FNSLQEHQGQHPKIRYYLMTLPEEETPVXE

SEQ ID NO: 77308 - protein, 30 aa, Artificial Sequence; identical to SEQ ID NO: 2203
  Cyclic GFR-binding peptide

SEQ ID NO: 77309 - protein, 30 aa, Artificial Sequence
  Cyclic GFR-binding peptide
GEVVMEVTAKKVVKDYEDIKRMQVPRLETP

SEQ ID NO: 77310 - protein, 30 aa, Artificial Sequence
  Cyclic GFR-binding peptide
  MOD_RES (28), (29): Xaa is C or S
MNVQVEKIVNSSDDVKAVKVSRLQTPAXXP

SEQ ID NO: 77311 - protein, 37 aa, Artificial Sequence
  Cyclic GFR-binding peptide
  MOD_RES (34), (34): Xaa is C or S
DELTNSLQEFIPKKRVIEYYVVPLPELQVQTPRXQVN

SEQ ID NO: 77312 - protein, 29 aa, Artificial Sequence
  Cyclic GFR-binding peptide
  MOD_RES (27), (28): Xaa is C or S
MSMEGIVKPKRGVMIQITINSLAQPVXXP

SEQ ID NO: 77313 - protein, 33 aa, Artificial Sequence; identical to SEQ ID NO: 26749
  Cyclic GFR-binding peptide
  MOD_RES (2), (2): Xaa is C or S

SEQ ID NO: 77314 - protein, 26 aa, Artificial Sequence
  Cyclic GFR-binding peptide
LFNSLQEHQGQHPKIRYYLMTLPEEE

SEQ ID NO: 77315 - protein, 38 aa, Artificial Sequence; identical to SEQ ID NO: 26753
  Cyclic GFR-binding peptide
  MOD_RES (35), (35): Xaa is C or S

SEQ ID NO: 77316 - protein, 28 aa, Artificial Sequence
  Cyclic GFR-binding peptide
  MOD_RES (1), (3): Xaa is C or S
XKXSKVIMVQVEKIKPTKGIVKAIKVSR

SEQ ID NO: 77317 - protein, 36 aa, Artificial Sequence; identical to SEQ ID NO: 26754
  Cyclic GFR-binding peptide
  MOD_RES (1), (3), (35): Xaa is C or S

SEQ ID NO: 77318 - protein, 37 aa, Artificial Sequence; identical to SEQ ID NO: 26755
  Cyclic GFR-binding peptide
  MOD_RES (1), (32), (33): Xaa is C or S

SEQ ID NO: 77319 - protein, 21 aa, Artificial Sequence
  Cyclic GFR-binding peptide
SMEGIVVKENEDMIQMTINSL

SEQ ID NO: 77320 - protein, 33 aa, Artificial Sequence
  Cyclic GFR-binding peptide
  MOD_RES (1), (3): Xaa is C or S
XGXGEVVMEVTAKKVVKDYEDIKRMQVPRLETP

SEQ ID NO: 77321 - protein, 38 aa, Artificial Sequence; identical to SEQ ID NO: 26758
  Cyclic GFR-binding peptide
  MOD_RES (35), (35): Xaa is C or S

SEQ ID NO: 77322 - protein, 32 aa, Artificial Sequence
  Cyclic GFR-binding peptide
  MOD_RES (26), (26): Xaa is C or S
SMEGIIVNSSDDMIQVTINSLKTPAXTPKTVH

SEQ ID NO: 77323 - protein, 31 aa, Artificial Sequence
  Cyclic GFR-binding peptide
  MOD_RES (28), (29): Xaa is C or S
IMVTAKKIKPTKGIIKRIQVPRLDQSVXXPS

SEQ ID NO: 77324 - protein, 33 aa, Artificial Sequence; identical to SEQ ID NO: 26762
  Cyclic GFR-binding peptide
  MOD_RES (2), (33): Xaa is C or S

SEQ ID NO: 77325 - protein, 29 aa, Artificial Sequence
  Cyclic GFR-binding peptide
ARVVMNVQVEKIVNSSDDVKAVKVSRLQT

SEQ ID NO: 77326 - protein, 30 aa, Artificial Sequence
  Cyclic GFR-binding peptide
  MOD_RES (29), (30): Xaa is C or S
VIMVTAKKIKPTKGIIKRIQVPRLDQSVXX

SEQ ID NO: 77327 - protein, 29 aa, Artificial Sequence
  Cyclic GFR-binding peptide
  MOD_RES (26), (27): Xaa is C or S
VQVEKIVNSSDDVKAVKVSRLKTPAXXPK

SEQ ID NO: 77328 - protein, 38 aa, Artificial Sequence; identical to SEQ ID NO: 26764
  Cyclic GFR-binding peptide
  MOD_RES (2), (4), (36), (37): Xaa is C or S

SEQ ID NO: 77329 - protein, 25 aa, Artificial Sequence
  Cyclic GFR-binding peptide
DVTAKKVVKENEDIKRMQVPRLETP

SEQ ID NO: 77330 - protein, 40 aa, Artificial Sequence; identical to SEQ ID NO: 26767
  Cyclic GFR-binding peptide
  MOD_RES (1), (3), (34), (35): Xaa is C or S

SEQ ID NO: 77331 - protein, 29 aa, Artificial Sequence
  Cyclic GFR-binding peptide
  MOD_RES (26), (27): Xaa is C or S
VTAKKVVKDYEDIKRMQVPRLETPVXXAK

SEQ ID NO: 77332 - protein, 41 aa, Artificial Sequence; identical to SEQ ID NO: 26770
  Cyclic GFR-binding peptide
  MOD_RES (37), (37): Xaa is C or S

SEQ ID NO: 77333 - protein, 25 aa, Artificial Sequence
  Cyclic GFR-binding peptide
NSLQEHQGQHPKIRYYLMTLPEEET

SEQ ID NO: 77334 - protein, 33 aa, Artificial Sequence
  Cyclic GFR-binding peptide
  MOD_RES (30), (31): Xaa is C or S
KVVMVTAKKVKPTRGVIKRIQVPRLDQPVXXPS

SEQ ID NO: 77335 - protein, 32 aa, Artificial Sequence
  Cyclic GFR-binding peptide
  MOD_RES (26), (27): Xaa is C or S
SMEGIIVNSSDDMIQVTINSLKTPAXXPKPVY

SEQ ID NO: 77336 - protein, 30 aa, Artificial Sequence
  Cyclic GFR-binding peptide
  MOD_RES (27), (28): Xaa is C or S
NSMEGIIVNSSDDMIQVTINSLKTPAXXPK

SEQ ID NO: 77337 - protein, 34 aa, Artificial Sequence; identical to SEQ ID NO: 26783
  Cyclic GFR-binding peptide
  MOD_RES (1), (3): Xaa is C or S

SEQ ID NO: 77338 - protein, 29 aa, Artificial Sequence
  Cyclic GFR-binding peptide
SRVVMNVTAKKIVNSSDDIKRVQVPRLKT

SEQ ID NO: 77339 - protein, 26 aa, Artificial Sequence
  Cyclic GFR-binding peptide
EVVMDVQVEKVVKENEDVKAMKVSRL

SEQ ID NO: 77340 - protein, 33 aa, Artificial Sequence
  Cyclic GFR-binding peptide
  MOD_RES (2), (4): Xaa is C or S
HXGXSRVVMNVQVEKIVNSSDDVKAVKVSRLKT

SEQ ID NO: 77341 - protein, 28 aa, Artificial Sequence
  Cyclic GFR-binding peptide
  MOD_RES (28), (28): Xaa is C or S
MNVQVEKIVNSSDDVKAVKVSRLKTPAX

SEQ ID NO: 77342 - protein, 39 aa, Artificial Sequence; identical to SEQ ID NO: 26789
  Cyclic GFR-binding peptide
  MOD_RES (2), (4): Xaa is C or S

SEQ ID NO: 77343 - protein, 28 aa, Artificial Sequence
  Cyclic GFR-binding peptide
VVMDVQVEKVVKENEDVKAMKVSRLETP

SEQ ID NO: 77344 - protein, 28 aa, Artificial Sequence
  Cyclic GFR-binding peptide
  MOD_RES (1), (3): Xaa is C or S
XKXSKVIMSMEGIIKPTKGIMIQITINS

SEQ ID NO: 77345 - protein, 29 aa, Artificial Sequence
  Cyclic GFR-binding peptide
RNSLQELKPKKRVYEYYLVTLPEHHVRSP

SEQ ID NO: 77346 - protein, 24 aa, Artificial Sequence
  Cyclic GFR-binding peptide
MVQVEKIKPTKGIVKAIKVSRLDQ

SEQ ID NO: 77347 - protein, 34 aa, Artificial Sequence
  Cyclic GFR-binding peptide
  MOD_RES (2), (4): Xaa is C or S
HXGXSRVVMNVTAKKIVNSSDDIKRVQVPRLKTP

SEQ ID NO: 77348 - protein, 30 aa, Artificial Sequence
  Cyclic GFR-binding peptide
ALHDELTNSLQEFIPKKRVIEYYLVTLPEL

SEQ ID NO: 77349 - protein, 32 aa, Artificial Sequence
  Cyclic GFR-binding peptide
  MOD_RES (1), (3): Xaa is C or S
XKXALHDELTNSLQEFIPKKRVIEYYVVPLPE

SEQ ID NO: 77350 - protein, 28 aa, Artificial Sequence
  Cyclic GFR-binding peptide
  MOD_RES (2), (2): Xaa is C or S
KXSKVIMSMEGIIKPTKGIMIQITINSL

SEQ ID NO: 77351 - protein, 29 aa, Artificial Sequence
  Cyclic GFR-binding peptide
  MOD_RES (27), (28): Xaa is C or S
NSMEGIIVNSSDDMIQVTINSLKTPAXXP

SEQ ID NO: 77352 - protein, 31 aa, Artificial Sequence
  Cyclic GFR-binding peptide
  MOD_RES (2), (2): Xaa is C or S
KXSKVIMVQVEKIKPTKGIVKAIKVSRLDQS

SEQ ID NO: 77353 - protein, 32 aa, Artificial Sequence
  Cyclic GFR-binding peptide
  MOD_RES (1), (3): Xaa is C or S
XKXSKVIMSMEGIIKPTKGIMIQITINSLDQS

SEQ ID NO: 77354 - protein, 40 aa, Artificial Sequence; identical to SEQ ID NO: 26803
  Cyclic GFR-binding peptide
  MOD_RES (2), (4), (35), (36): Xaa is C or S

SEQ ID NO: 77355 - protein, 37 aa, Artificial Sequence; identical to SEQ ID NO: 26805
  Cyclic GFR-binding peptide
  MOD_RES (2), (34): Xaa is C or S

SEQ ID NO: 77356 - protein, 41 aa, Artificial Sequence; identical to SEQ ID NO: 26807
  Cyclic GFR-binding peptide
  MOD_RES (2), (4), (35), (36): Xaa is C or S

SEQ ID NO: 77357 - protein, 30 aa, Artificial Sequence
  Cyclic GFR-binding peptide
HQLFNSLQEHQGQHPKIRYYLMTLPEEETP

SEQ ID NO: 77358 - protein, 30 aa, Artificial Sequence
  Cyclic GFR-binding peptide
  MOD_RES (28), (28): Xaa is C or S
NSLQEHQGQHPKIRYYVMPLPEEETPVXEL

SEQ ID NO: 77359 - protein, 24 aa, Artificial Sequence
  Cyclic GFR-binding peptide
VMSMEGIVKPTRGVMIQITINSLD

SEQ ID NO: 77360 - protein, 30 aa, Artificial Sequence
  Cyclic GFR-binding peptide
  MOD_RES (1), (1): Xaa is C or S
XKNHQLFNSLQEHQGQHPKIRYYLMTLPEE

SEQ ID NO: 77361 - protein, 31 aa, Artificial Sequence
  Cyclic GFR-binding peptide
  MOD_RES (30), (30): Xaa is C or S
NSLQEFIPKKRVIEYYLVTLPELQVQTPRXQ

SEQ ID NO: 77362 - protein, 30 aa, Artificial Sequence; identical to SEQ ID NO: 26815
  Cyclic GFR-binding peptide

SEQ ID NO: 77363 - protein, 27 aa, Artificial Sequence
  Cyclic GFR-binding peptide
ARVVMNVTAKKIVNSSDDIKRVQVPRL

SEQ ID NO: 77364 - protein, 33 aa, Artificial Sequence
  Cyclic GFR-binding peptide
  MOD_RES (31), (31): Xaa is C or S
TNSLQEFIPKKRVIEYYVVPLPELQVQTPRXQV

SEQ ID NO: 77365 - protein, 30 aa, Artificial Sequence
  Cyclic GFR-binding peptide
  MOD_RES (28), (29): Xaa is C or S
VMVTAKKVKPTRGVIKRIQVPRLDQPVXXP

SEQ ID NO: 77366 - protein, 24 aa, Artificial Sequence
  Cyclic GFR-binding peptide
VMDVTAKKVVKENEDIKRMQVPRL

SEQ ID NO: 77367 - protein, 33 aa, Artificial Sequence; identical to SEQ ID NO: 26817
  Cyclic GFR-binding peptide
  MOD_RES (32), (33): Xaa is C or S

SEQ ID NO: 77368 - protein, 33 aa, Artificial Sequence; identical to SEQ ID NO: 26819
  Cyclic GFR-binding peptide
  MOD_RES (1), (33): Xaa is C or S

SEQ ID NO: 77369 - protein, 38 aa, Artificial Sequence; identical to SEQ ID NO: 26818
  Cyclic GFR-binding peptide
  MOD_RES (1), (35): Xaa is C or S

SEQ ID NO: 77370 - protein, 42 aa, Artificial Sequence; identical to SEQ ID NO: 26821
  Cyclic GFR-binding peptide
  MOD_RES (2), (4), (36), (37): Xaa is C or S

SEQ ID NO: 77371 - protein, 34 aa, Artificial Sequence; identical to SEQ ID NO: 26824
  Cyclic GFR-binding peptide
  MOD_RES (31), (32): Xaa is C or S

SEQ ID NO: 77372 - protein, 41 aa, Artificial Sequence; identical to SEQ ID NO: 26825
  Cyclic GFR-binding peptide
  MOD_RES (37), (37): Xaa is C or S

SEQ ID NO: 77373 - protein, 25 aa, Artificial Sequence
  Cyclic GFR-binding peptide
SMEGIVVKENEDMIQMTINSLETPV

SEQ ID NO: 77374 - protein, 27 aa, Artificial Sequence
  Cyclic GFR-binding peptide
SRVVMNVTAKKIVNSSDDIKRVQVPRL

SEQ ID NO: 77375 - protein, 32 aa, Artificial Sequence; identical to SEQ ID NO: 26827
  Cyclic GFR-binding peptide
  MOD_RES (1), (1): Xaa is C or S

SEQ ID NO: 77376 - protein, 22 aa, Artificial Sequence
  Cyclic GFR-binding peptide
NSLQEHQGQHPKIRYYLMTLPE

SEQ ID NO: 77377 - protein, 32 aa, Artificial Sequence; identical to SEQ ID NO: 26828
  Cyclic GFR-binding peptide

SEQ ID NO: 77378 - protein, 36 aa, Artificial Sequence; identical to SEQ ID NO: 26829
  Cyclic GFR-binding peptide
  MOD_RES (32), (33): Xaa is C or S

SEQ ID NO: 77379 - protein, 29 aa, Artificial Sequence
  Cyclic GFR-binding peptide
  MOD_RES (27), (28): Xaa is C or S
ESMEGIVVKDYEDMIQMTINSLETPVXXA

SEQ ID NO: 77380 - protein, 40 aa, Artificial Sequence; identical to SEQ ID NO: 26833
  Cyclic GFR-binding peptide
  MOD_RES (2), (4), (36): Xaa is C or S

SEQ ID NO: 77381 - protein, 39 aa, Artificial Sequence; identical to SEQ ID NO: 26834
  Cyclic GFR-binding peptide
  MOD_RES (1), (35): Xaa is C or S

SEQ ID NO: 77382 - protein, 26 aa, Artificial Sequence
  Cyclic GFR-binding peptide
MEVTAKKVVKDYEDIKRMQVPRLETP

SEQ ID NO: 77383 - protein, 34 aa, Artificial Sequence; identical to SEQ ID NO: 26836
  Cyclic GFR-binding peptide
  MOD_RES (1), (32), (33): Xaa is C or S

SEQ ID NO: 77384 - protein, 42 aa, Artificial Sequence; identical to SEQ ID NO: 26837
  Cyclic GFR-binding peptide
  MOD_RES (2), (4), (41): Xaa is C or S

SEQ ID NO: 77385 - protein, 27 aa, Artificial Sequence
  Cyclic GFR-binding peptide
VVMVTAKKVKPTRGVIKRIQVPRLDQP

SEQ ID NO: 77386 - protein, 32 aa, Artificial Sequence
  Cyclic GFR-binding peptide
  MOD_RES (29), (30): Xaa is C or S
VIMVTAKKIKPTKGIIKRIQVPRLDQSVXXPS

SEQ ID NO: 77387 - protein, 28 aa, Artificial Sequence
  Cyclic GFR-binding peptide
VMDSMEGIVVKENEDMIQMTINSLETPV

SEQ ID NO: 77388 - protein, 32 aa, Artificial Sequence
  Cyclic GFR-binding peptide
  MOD_RES (28), (29): Xaa is C or S
IMSMEGIVKPKRGVMIQITINSLAQPVXXPAA

SEQ ID NO: 77389 - protein, 38 aa, Artificial Sequence
  Cyclic GFR-binding peptide
  MOD_RES (32), (32): Xaa is C or S
HQLFNSLQEHQGQHPKIRYYLMTLPEEETPVXELGEDN

SEQ ID NO: 77390 - protein, 20 aa, Artificial Sequence
  Cyclic GFR-binding peptide
VTAKKVKPTRGVIKRIQVPR

SEQ ID NO: 77391 - protein, 27 aa, Artificial Sequence
  Cyclic GFR-binding peptide
MDVTAKKVVKENEDIKRMQVPRLETPV

SEQ ID NO: 77392 - protein, 39 aa, Artificial Sequence; identical to SEQ ID NO: 26846
  Cyclic GFR-binding peptide
  MOD_RES (2), (4), (38): Xaa is C or S

SEQ ID NO: 77393 - protein, 29 aa, Artificial Sequence
  Cyclic GFR-binding peptide
AAAAAAAAAVQVEKVKPTRGVVKAIKVSR

SEQ ID NO: 77394 - protein, 30 aa, Artificial Sequence
  Cyclic GFR-binding peptide
  MOD_RES (2), (2): Xaa is C or S
KXSKVVMVTAKKVKPTRGVIKRIQVPRLDQ

SEQ ID NO: 77395 - protein, 31 aa, Artificial Sequence
  Cyclic GFR-binding peptide
LTNSLQEFIPKKRVIEYYLVTLPELQVQTPR

SEQ ID NO: 77396 - protein, 32 aa, Artificial Sequence
  Cyclic GFR-binding peptide
  MOD_RES (28), (29): Xaa is C or S
MNVTAKKIVNSSDDIKRVQVPRLKTPAXXPKP

SEQ ID NO: 77397 - protein, 25 aa, Artificial Sequence
  Cyclic GFR-binding peptide
VVMDVTAKKVVKENEDIKRMQVPRL

SEQ ID NO: 77398 - protein, 36 aa, Artificial Sequence
  Cyclic GFR-binding peptide
  MOD_RES (34), (34): Xaa is C or S
DELTNSLQEFIPKKRVIEYYLVTLPELQVQTPRXQV

SEQ ID NO: 77399 - protein, 31 aa, Artificial Sequence
  Cyclic GFR-binding peptide
  MOD_RES (26), (26): Xaa is C or S
SMEGIIVNSSDDMIQVTINSLKTPAXTPKTV

SEQ ID NO: 77400 - protein, 24 aa, Artificial Sequence
  Cyclic GFR-binding peptide
MDVQVEKVVKENEDVKAMKVSRLE

SEQ ID NO: 77401 - protein, 39 aa, Artificial Sequence; identical to SEQ ID NO: 26851
  Cyclic GFR-binding peptide
  MOD_RES (1), (33), (34): Xaa is C or S

SEQ ID NO: 77402 - protein, 34 aa, Artificial Sequence
  Cyclic GFR-binding peptide
  MOD_RES (30), (30): Xaa is C or S
NSLQELKPKKRVYEYYVVPLPEHHVRSPQXKVSS

SEQ ID NO: 77403 - protein, 34 aa, Artificial Sequence; identical to SEQ ID NO: 26853
  Cyclic GFR-binding peptide
  MOD_RES (31), (32): Xaa is C or S

SEQ ID NO: 77404 - protein, 26 aa, Artificial Sequence
  Cyclic GFR-binding peptide
  MOD_RES (26), (26): Xaa is C or S
SMEGIIVNSSDDMIQVTINSLKTPAX

SEQ ID NO: 77405 - protein, 33 aa, Artificial Sequence
  Cyclic GFR-binding peptide
  MOD_RES (33), (33): Xaa is C or S
ELTNSLQEFIPKKRVIEYYVVPLPELQVQTPRX

SEQ ID NO: 77406 - protein, 32 aa, Artificial Sequence
  Cyclic GFR-binding peptide
  MOD_RES (27), (28): Xaa is C or S
DVQVEKVVKENEDVKAMKVSRLETPVXXAKPI

SEQ ID NO: 77407 - protein, 24 aa, Artificial Sequence
  Cyclic GFR-binding peptide
VQVEKVKPKRGVVKAIKVSRLAQP

SEQ ID NO: 77408 - protein, 27 aa, Artificial Sequence
  Cyclic GFR-binding peptide
MNVQVEKIVNSSDDVKAVKVSRLQTPA

SEQ ID NO: 77409 - protein, 37 aa, Artificial Sequence; identical to SEQ ID NO: 26858
  Cyclic GFR-binding peptide
  MOD_RES (2), (4), (35), (36): Xaa is C or S

SEQ ID NO: 77410 - protein, 29 aa, Artificial Sequence
  Cyclic GFR-binding peptide
  MOD_RES (28), (29): Xaa is C or S
MDVTAKKVVKENEDIKRMQVPRLETPVXX

SEQ ID NO: 77411 - protein, 34 aa, Artificial Sequence; identical to SEQ ID NO: 26859
  Cyclic GFR-binding peptide
  MOD_RES (32), (33): Xaa is C or S

SEQ ID NO: 77412 - protein, 23 aa, Artificial Sequence
  Cyclic GFR-binding peptide
NVTAKKIVNSSDDIKRVQVPRLQ

SEQ ID NO: 77413 - protein, 40 aa, Artificial Sequence; identical to SEQ ID NO: 26863
  Cyclic GFR-binding peptide
  MOD_RES (1), (3), (34), (35): Xaa is C or S

SEQ ID NO: 77414 - protein, 27 aa, Artificial Sequence
  Cyclic GFR-binding peptide
  MOD_RES (1), (1): Xaa is C or S
XSRVIMVQVEKVKPKRGVVKAIKVSRL

SEQ ID NO: 77415 - protein, 34 aa, Artificial Sequence; identical to SEQ ID NO: 26869
  Cyclic GFR-binding peptide
  MOD_RES (2), (34): Xaa is C or S

SEQ ID NO: 77416 - protein, 33 aa, Artificial Sequence; identical to SEQ ID NO: 26871
  Cyclic GFR-binding peptide
  MOD_RES (2), (2): Xaa is C or S

SEQ ID NO: 77417 - protein, 41 aa, Artificial Sequence; identical to SEQ ID NO: 26874
  Cyclic GFR-binding peptide
  MOD_RES (1), (3), (35), (36): Xaa is C or S

SEQ ID NO: 77418 - protein, 32 aa, Artificial Sequence
  Cyclic GFR-binding peptide
  MOD_RES (1), (3): Xaa is C or S
XGXGEVVMDSMEGIVVKENEDMIQMTINSLET

SEQ ID NO: 77419 - protein, 28 aa, Artificial Sequence
  Cyclic GFR-binding peptide
  MOD_RES (2), (2): Xaa is C or S
KXSKVVMVQVEKVKPTRGVVKAIKVSRL

SEQ ID NO: 77420 - protein, 31 aa, Artificial Sequence; identical to SEQ ID NO: 26875
  Cyclic GFR-binding peptide
  MOD_RES (31), (31): Xaa is C or S

SEQ ID NO: 77421 - protein, 30 aa, Artificial Sequence
  Cyclic GFR-binding peptide
  MOD_RES (1), (1): Xaa is C or S
XSRVVMNVQVEKIVNSSDDVKAVKVSRLKT

SEQ ID NO: 77422 - protein, 27 aa, Artificial Sequence
  Cyclic GFR-binding peptide
EVVMDSMEGIVVKENEDMIQMTINSLE

SEQ ID NO: 77423 - protein, 27 aa, Artificial Sequence
  Cyclic GFR-binding peptide
  MOD_RES (1), (1): Xaa is C or S
XSRVVMNVTAKKIVNSSDDIKRVQVPR

SEQ ID NO: 77424 - protein, 30 aa, Artificial Sequence
  Cyclic GFR-binding peptide
  MOD_RES (29), (30): Xaa is C or S
VMDVTAKKVVKENEDIKRMQVPRLETPVXX

SEQ ID NO: 77425 - protein, 28 aa, Artificial Sequence
  Cyclic GFR-binding peptide
  MOD_RES (27), (28): Xaa is C or S
MVQVEKVKPTRGVVKAIKVSRLDQPVXX

SEQ ID NO: 77426 - protein, 39 aa, Artificial Sequence; identical to SEQ ID NO: 26884
  Cyclic GFR-binding peptide
  MOD_RES (35), (35): Xaa is C or S

SEQ ID NO: 77427 - protein, 30 aa, Artificial Sequence
  Cyclic GFR-binding peptide
  MOD_RES (26), (27): Xaa is C or S
VQVEKVKPTRGVVKAIKVSRLDQPVXXPSA

SEQ ID NO: 77428 - protein, 39 aa, Artificial Sequence; identical to SEQ ID NO: 26888
  Cyclic GFR-binding peptide
  MOD_RES (1), (33), (34): Xaa is C or S

SEQ ID NO: 77429 - protein, 27 aa, Artificial Sequence
  Cyclic GFR-binding peptide
VMSMEGIVKPTRGVMIQITINSLDQPV

SEQ ID NO: 77430 - protein, 28 aa, Artificial Sequence
  Cyclic GFR-binding peptide
VIMVQVEKIKPTKGIVKAIKVSRLDQSV

SEQ ID NO: 77431 - protein, 31 aa, Artificial Sequence
  Cyclic GFR-binding peptide
  MOD_RES (1), (1): Xaa is C or S
XGEVVMEVQVEKVVKDYEDVKAMKVSRLETP

SEQ ID NO: 77432 - protein, 29 aa, Artificial Sequence
  Cyclic GFR-binding peptide
  MOD_RES (26), (26): Xaa is C or S
VTAKKIVNSSDDIKRVQVPRLKTPAXTPK

SEQ ID NO: 77433 - protein, 34 aa, Artificial Sequence; identical to SEQ ID NO: 26897
  Cyclic GFR-binding peptide
  MOD_RES (1), (33), (34): Xaa is C or S

SEQ ID NO: 77434 - protein, 24 aa, Artificial Sequence
  Cyclic GFR-binding peptide
VQVEKIKPTKGIVKAIKVSRLDQS

SEQ ID NO: 77435 - protein, 31 aa, Artificial Sequence
  Cyclic GFR-binding peptide
  MOD_RES (26), (27): Xaa is C or S
VQVEKVVKDYEDVKAMKVSRLETPVXXAKPI

SEQ ID NO: 77436 - protein, 40 aa, Artificial Sequence; identical to SEQ ID NO: 26905
  Cyclic GFR-binding peptide
  MOD_RES (1), (3), (35), (36): Xaa is C or S

SEQ ID NO: 77437 - protein, 25 aa, Artificial Sequence
  Cyclic GFR-binding peptide
VQVEKIVNSSDDVKAVKVSRLKTPA

SEQ ID NO: 77438 - protein, 42 aa, Artificial Sequence; identical to SEQ ID NO: 26906
  Cyclic GFR-binding peptide
  MOD_RES (2), (4), (38): Xaa is C or S

SEQ ID NO: 77439 - protein, 31 aa, Artificial Sequence
  Cyclic GFR-binding peptide
  MOD_RES (1), (3): Xaa is C or S
XGXGEVVMDVTAKKVVKENEDIKRMQVPRLE

SEQ ID NO: 77440 - protein, 35 aa, Artificial Sequence; identical to SEQ ID NO: 26907
  Cyclic GFR-binding peptide
  MOD_RES (32), (32): Xaa is C or S

SEQ ID NO: 77441 - protein, 29 aa, Artificial Sequence
  Cyclic GFR-binding peptide
LTNSLQEFIPKKRVIEYYVVPLPELQVQT

SEQ ID NO: 77442 - protein, 43 aa, Artificial Sequence; identical to SEQ ID NO: 26911
  Cyclic GFR-binding peptide
  MOD_RES (2), (39): Xaa is C or S

SEQ ID NO: 77443 - protein, 31 aa, Artificial Sequence; identical to SEQ ID NO: 26913
  Cyclic GFR-binding peptide
  MOD_RES (31), (31): Xaa is C or S

SEQ ID NO: 77444 - protein, 21 aa, Artificial Sequence
  Cyclic GFR-binding peptide
VTAKKVVKDYEDIKRMQVPRL

SEQ ID NO: 77445 - protein, 40 aa, Artificial Sequence; identical to SEQ ID NO: 26917
  Cyclic GFR-binding peptide
  MOD_RES (2), (4): Xaa is C or S

SEQ ID NO: 77446 - protein, 31 aa, Artificial Sequence
  Cyclic GFR-binding peptide
  MOD_RES (28), (29): Xaa is C or S
IMVQVEKIKPTKGIVKAIKVSRLDQSVXXPS

SEQ ID NO: 77447 - protein, 28 aa, Artificial Sequence
  Cyclic GFR-binding peptide
VIMSMEGIIKPTKGIMIQITINSLDQSV

SEQ ID NO: 77448 - protein, 33 aa, Artificial Sequence; identical to SEQ ID NO: 26918
  Cyclic GFR-binding peptide
  MOD_RES (2), (33): Xaa is C or S

SEQ ID NO: 77449 - protein, 35 aa, Artificial Sequence; identical to SEQ ID NO: 26919
  Cyclic GFR-binding peptide
  MOD_RES (32), (33): Xaa is C or S

SEQ ID NO: 77450 - protein, 27 aa, Artificial Sequence
  Cyclic GFR-binding peptide
RVVMNVQVEKIVNSSDDVKAVKVSRLK

SEQ ID NO: 77451 - protein, 32 aa, Artificial Sequence
  Cyclic GFR-binding peptide
  MOD_RES (27), (28): Xaa is C or S
NSMEGIIVNSSDDMIQVTINSLKTPAXXPKPV

SEQ ID NO: 77452 - protein, 39 aa, Artificial Sequence; identical to SEQ ID NO: 26927
  Cyclic GFR-binding peptide
  MOD_RES (35), (35): Xaa is C or S

SEQ ID NO: 77453 - protein, 39 aa, Artificial Sequence; identical to SEQ ID NO: 26928
  Cyclic GFR-binding peptide
  MOD_RES (1), (3), (35), (36): Xaa is C or S

SEQ ID NO: 77454 - protein, 28 aa, Artificial Sequence
  Cyclic GFR-binding peptide
  MOD_RES (26), (27): Xaa is C or S
VTAKKIKPTKGIIKRIQVPRLDQSVXXP

SEQ ID NO: 77455 - protein, 31 aa, Artificial Sequence; identical to SEQ ID NO: 26930
  Cyclic GFR-binding peptide
  MOD_RES (31), (31): Xaa is C or S

SEQ ID NO: 77456 - protein, 34 aa, Artificial Sequence
  Cyclic GFR-binding peptide
  MOD_RES (2), (4): Xaa is C or S
RXEXKNHQLFNSLQEHQGQHPKIRYYVMPLPEEE

SEQ ID NO: 77457 - protein, 22 aa, Artificial Sequence
  Cyclic GFR-binding peptide
MSMEGIIKPTKGIMIQITINSL

SEQ ID NO: 77458 - protein, 29 aa, Artificial Sequence
  Cyclic GFR-binding peptide
  MOD_RES (28), (29): Xaa is C or S
IMVTAKKIKPTKGIIKRIQVPRLDQSVXX

SEQ ID NO: 77459 - protein, 28 aa, Artificial Sequence
  Cyclic GFR-binding peptide
VVMESMEGIVVKDYEDMIQMTINSLETP

SEQ ID NO: 77460 - protein, 29 aa, Artificial Sequence
  Cyclic GFR-binding peptide
  MOD_RES (28), (29): Xaa is C or S
MDSMEGIVVKENEDMIQMTINSLETPVXX

SEQ ID NO: 77461 - protein, 24 aa, Artificial Sequence
  Cyclic GFR-binding peptide
NVQVEKIVNSSDDVKAVKVSRLKT

SEQ ID NO: 77462 - protein, 39 aa, Artificial Sequence; identical to SEQ ID NO: 26944
  Cyclic GFR-binding peptide
  MOD_RES (2), (34): Xaa is C or S

SEQ ID NO: 77463 - protein, 30 aa, Artificial Sequence
  Cyclic GFR-binding peptide
  MOD_RES (26), (27): Xaa is C or S
VTAKKIKPTKGIIKRIQVPRLDQSVXXPSA

SEQ ID NO: 77464 - protein, 36 aa, Artificial Sequence
  Cyclic GFR-binding peptide
  MOD_RES (30), (31): Xaa is C or S
KVVMVQVEKVKPTRGVVKAIKVSRLDQPVXXPSASA

SEQ ID NO: 77465 - protein, 31 aa, Artificial Sequence
  Cyclic GFR-binding peptide
  MOD_RES (28), (29): Xaa is C or S
MNSMEGIIVNSSDDMIQVTINSLKTPAXXPK

SEQ ID NO: 77466 - protein, 28 aa, Artificial Sequence
  Cyclic GFR-binding peptide
  MOD_RES (28), (28): Xaa is C or S
MNVQVEKIVNSSDDVKAVKVSRLQTPAX

SEQ ID NO: 77467 - protein, 34 aa, Artificial Sequence
  Cyclic GFR-binding peptide
  MOD_RES (2), (2): Xaa is C or S
EXKNHQLFNSLQEHQGQHPKIRYYLMTLPEEETP

SEQ ID NO: 77468 - protein, 22 aa, Artificial Sequence
  Cyclic GFR-binding peptide
SMEGIIVNSSDDMIQVTINSLK

SEQ ID NO: 77469 - protein, 34 aa, Artificial Sequence
  Cyclic GFR-binding peptide
  MOD_RES (2), (4): Xaa is C or S
RXGXGEVVMEVTAKKVVKDYEDIKRMQVPRLETP

SEQ ID NO: 77470 - protein, 35 aa, Artificial Sequence; identical to SEQ ID NO: 26949
  Cyclic GFR-binding peptide
  MOD_RES (2), (4): Xaa is C or S

SEQ ID NO: 77471 - protein, 32 aa, Artificial Sequence
  Cyclic GFR-binding peptide
  MOD_RES (2), (4): Xaa is C or S
SXKXSRVIMSMEGIVKPKRGVMIQITINSLAQ

SEQ ID NO: 77472 - protein, 23 aa, Artificial Sequence
  Cyclic GFR-binding peptide
VTAKKIKPTKGIIKRIQVPRLDQ

SEQ ID NO: 77473 - protein, 31 aa, Artificial Sequence
  Cyclic GFR-binding peptide
  MOD_RES (1), (3): Xaa is C or S
XKXSRVIMSMEGIVKPKRGVMIQITINSLAQ

SEQ ID NO: 77474 - protein, 26 aa, Artificial Sequence
  Cyclic GFR-binding peptide
EVQVEKVVKDYEDVKAMKVSRLETPV

SEQ ID NO: 77475 - protein, 33 aa, Artificial Sequence
  Cyclic GFR-binding peptide
  MOD_RES (29), (29): Xaa is C or S
FNSLQEHQGQHPKIRYYLMTLPEEETPVXELGE

SEQ ID NO: 77476 - protein, 31 aa, Artificial Sequence
  Cyclic GFR-binding peptide
  MOD_RES (1), (3): Xaa is C or S
XKXSRVIMVQVEKVKPKRGVVKAIKVSRLAQ

SEQ ID NO: 77477 - protein, 38 aa, Artificial Sequence; identical to SEQ ID NO: 26955
  Cyclic GFR-binding peptide
  MOD_RES (37), (37): Xaa is C or S

SEQ ID NO: 77478 - protein, 37 aa, Artificial Sequence; identical to SEQ ID NO: 26959
  Cyclic GFR-binding peptide
  MOD_RES (32), (33): Xaa is C or S

SEQ ID NO: 77479 - protein, 35 aa, Artificial Sequence; identical to SEQ ID NO: 26960
  Cyclic GFR-binding peptide
  MOD_RES (31), (32): Xaa is C or S

SEQ ID NO: 77480 - protein, 38 aa, Artificial Sequence; identical to SEQ ID NO: 26961
  Cyclic GFR-binding peptide
  MOD_RES (2), (2): Xaa is C or S

SEQ ID NO: 77481 - protein, 31 aa, Artificial Sequence
  Cyclic GFR-binding peptide
  MOD_RES (27), (28): Xaa is C or S
DSMEGIVVKENEDMIQMTINSLETPVXXAKP

SEQ ID NO: 77482 - protein, 32 aa, Artificial Sequence
  Cyclic GFR-binding peptide
  MOD_RES (2), (2): Xaa is C or S
GXGEVVMESMEGIVVKDYEDMIQMTINSLETP

SEQ ID NO: 77483 - protein, 40 aa, Artificial Sequence; identical to SEQ ID NO: 26964
  Cyclic GFR-binding peptide
  MOD_RES (2), (34), (35): Xaa is C or S

SEQ ID NO: 77484 - protein, 25 aa, Artificial Sequence
  Cyclic GFR-binding peptide
SKVVMVTAKKVKPTRGVIKRIQVPR

SEQ ID NO: 77485 - protein, 29 aa, Artificial Sequence
  Cyclic GFR-binding peptide
TNSLQEFIPKKRVIEYYVVPLPELQVQTP

SEQ ID NO: 77486 - protein, 36 aa, Artificial Sequence
  Cyclic GFR-binding peptide
  MOD_RES (30), (31): Xaa is C or S
KVVMVTAKKVKPTRGVIKRIQVPRLDQPVXXPSASA

SEQ ID NO: 77487 - protein, 41 aa, Artificial Sequence; identical to SEQ ID NO: 26967
  Cyclic GFR-binding peptide
  MOD_RES (1), (3), (40): Xaa is C or S

SEQ ID NO: 77488 - protein, 25 aa, Artificial Sequence
  Cyclic GFR-binding peptide
MNVQVEKIVNSSDDVKAVKVSRLQT

SEQ ID NO: 77489 - protein, 23 aa, Artificial Sequence
  Cyclic GFR-binding peptide
SMEGIVKPKRGVMIQITINSLAQ

SEQ ID NO: 77490 - protein, 33 aa, Artificial Sequence; identical to SEQ ID NO: 26973
  Cyclic GFR-binding peptide
  MOD_RES (1), (33): Xaa is C or S

SEQ ID NO: 77491 - protein, 31 aa, Artificial Sequence
  Cyclic GFR-binding peptide
  MOD_RES (2), (4): Xaa is C or S
RXGXGEVVMEVQVEKVVKDYEDVKAMKVSRL

SEQ ID NO: 77492 - protein, 30 aa, Artificial Sequence
  Cyclic GFR-binding peptide
HEELRNSLQELKPKKRVYEYYLVTLPEHHV

SEQ ID NO: 77493 - protein, 44 aa, Artificial Sequence; identical to SEQ ID NO: 26976
  Cyclic GFR-binding peptide
  MOD_RES (1), (3), (40): Xaa is C or S

SEQ ID NO: 77494 - protein, 30 aa, Artificial Sequence
  Cyclic GFR-binding peptide
  MOD_RES (2), (2): Xaa is C or S
GXGEVVMDSMEGIVVKENEDMIQMTINSLE

SEQ ID NO: 77495 - protein, 43 aa, Artificial Sequence; identical to SEQ ID NO: 26979
  Cyclic GFR-binding peptide
  MOD_RES (1), (3), (40): Xaa is C or S

SEQ ID NO: 77496 - protein, 35 aa, Artificial Sequence; identical to SEQ ID NO: 26980
  Cyclic GFR-binding peptide
  MOD_RES (2), (34), (35): Xaa is C or S

SEQ ID NO: 77497 - protein, 25 aa, Artificial Sequence
  Cyclic GFR-binding peptide
RNSLQELKPKKRVYEYYVVPLPEHH

SEQ ID NO: 77498 - protein, 43 aa, Artificial Sequence; identical to SEQ ID NO: 26986
  Cyclic GFR-binding peptide
  MOD_RES (1), (3), (37): Xaa is C or S

SEQ ID NO: 77499 - protein, 33 aa, Artificial Sequence
  Cyclic GFR-binding peptide
  MOD_RES (2), (2): Xaa is C or S
KXALHDELTNSLQEFIPKKRVIEYYVVPLPELQ

SEQ ID NO: 77500 - protein, 33 aa, Artificial Sequence
  Cyclic GFR-binding peptide
  MOD_RES (29), (30): Xaa is C or S
VIMVTAKKVKPKRGVIKRIQVPRLAQPVXXPAA

SEQ ID NO: 77501 - protein, 35 aa, Artificial Sequence; identical to SEQ ID NO: 26993
  Cyclic GFR-binding peptide
  MOD_RES (1), (32), (33): Xaa is C or S

SEQ ID NO: 77502 - protein, 38 aa, Artificial Sequence; identical to SEQ ID NO: 26995
  Cyclic GFR-binding peptide
  MOD_RES (2), (4), (35), (36): Xaa is C or S

SEQ ID NO: 77503 - protein, 34 aa, Artificial Sequence; identical to SEQ ID NO: 26996
  Cyclic GFR-binding peptide
  MOD_RES (1), (33), (34): Xaa is C or S

SEQ ID NO: 77504 - protein, 39 aa, Artificial Sequence; identical to SEQ ID NO: 26998
  Cyclic GFR-binding peptide
  MOD_RES (2), (4), (36), (37): Xaa is C or S

SEQ ID NO: 77505 - protein, 28 aa, Artificial Sequence
  Cyclic GFR-binding peptide
  MOD_RES (27), (28): Xaa is C or S
EVQVEKVVKDYEDVKAMKVSRLETPVXX

SEQ ID NO: 77506 - protein, 28 aa, Artificial Sequence
  Cyclic GFR-binding peptide
LFNSLQEHQGQHPKIRYYLMTLPEEETP

SEQ ID NO: 77507 - protein, 31 aa, Artificial Sequence
  Cyclic GFR-binding peptide
  MOD_RES (31), (31): Xaa is C or S
RNSLQELKPKKRVYEYYLVTLPEHHVRSPQX

SEQ ID NO: 77508 - protein, 30 aa, Artificial Sequence
  Cyclic GFR-binding peptide
ARVVMNSMEGIIVNSSDDMIQVTINSLQTP

SEQ ID NO: 77509 - protein, 28 aa, Artificial Sequence
  Cyclic GFR-binding peptide
  MOD_RES (26), (27): Xaa is C or S
VTAKKVVKENEDIKRMQVPRLETPVXXA

SEQ ID NO: 77510 - protein, 38 aa, Artificial Sequence; identical to SEQ ID NO: 27005
  Cyclic GFR-binding peptide
  MOD_RES (1), (3), (35), (36): Xaa is C or S

SEQ ID NO: 77511 - protein, 38 aa, Artificial Sequence; identical to SEQ ID NO: 27006
  Cyclic GFR-binding peptide
  MOD_RES (1), (3), (35), (36): Xaa is C or S

SEQ ID NO: 77512 - protein, 29 aa, Artificial Sequence
  Cyclic GFR-binding peptide
  MOD_RES (28), (29): Xaa is C or S
IMSMEGIIKPTKGIMIQITINSLDQSVXX

SEQ ID NO: 77513 - protein, 36 aa, Artificial Sequence; identical to SEQ ID NO: 27012
  Cyclic GFR-binding peptide
  MOD_RES (2), (4), (35), (36): Xaa is C or S

SEQ ID NO: 77514 - protein, 29 aa, Artificial Sequence
  Cyclic GFR-binding peptide
  MOD_RES (27), (28): Xaa is C or S
MVQVEKVKPTRGVVKAIKVSRLDQPVXXP

SEQ ID NO: 77515 - protein, 29 aa, Artificial Sequence
  Cyclic GFR-binding peptide
RVVMNVTAKKIVNSSDDIKRVQVPRLKTP

SEQ ID NO: 77516 - protein, 32 aa, Artificial Sequence
  Cyclic GFR-binding peptide
  MOD_RES (1), (3): Xaa is C or S
XGXGEVVMDVQVEKVVKENEDVKAMKVSRLET

SEQ ID NO: 77517 - protein, 33 aa, Artificial Sequence
  Cyclic GFR-binding peptide
  MOD_RES (1), (3): Xaa is C or S
XAXELHEELRNSLQELKPKKRVYEYYVVPLPEH

SEQ ID NO: 77518 - protein, 26 aa, Artificial Sequence
  Cyclic GFR-binding peptide
NSLQELKPKKRVYEYYLVTLPEHHVR

SEQ ID NO: 77519 - protein, 25 aa, Artificial Sequence
  Cyclic GFR-binding peptide
VMNVTAKKIVNSSDDIKRVQVPRLQ

SEQ ID NO: 77520 - protein, 34 aa, Artificial Sequence
  Cyclic GFR-binding peptide
  MOD_RES (2), (2): Xaa is C or S
AXELHEELRNSLQELKPKKRVYEYYLVTLPEHHV

SEQ ID NO: 77521 - protein, 25 aa, Artificial Sequence
  Cyclic GFR-binding peptide
VMEVTAKKVVKDYEDIKRMQVPRLE

SEQ ID NO: 77522 - protein, 27 aa, Artificial Sequence
  Cyclic GFR-binding peptide
  MOD_RES (1), (1): Xaa is C or S
XARVVMNVTAKKIVNSSDDIKRVQVPR

SEQ ID NO: 77523 - protein, 36 aa, Artificial Sequence
  Cyclic GFR-binding peptide
  MOD_RES (2), (4): Xaa is C or S
RXEXKNHQLFNSLQEHQGQHPKIRYYLMTLPEEETP

SEQ ID NO: 77524 - protein, 32 aa, Artificial Sequence
  Cyclic GFR-binding peptide
  MOD_RES (28), (28): Xaa is C or S
NSLQEHQGQHPKIRYYLMTLPEEETPVXELGE

SEQ ID NO: 77525 - protein, 28 aa, Artificial Sequence
  Cyclic GFR-binding peptide
  MOD_RES (2), (2): Xaa is C or S
KXSKVVMSMEGIVKPTRGVMIQITINSL

SEQ ID NO: 77526 - protein, 24 aa, Artificial Sequence
  Cyclic GFR-binding peptide
MVQVEKVKPKRGVVKAIKVSRLAQ

SEQ ID NO: 77527 - protein, 37 aa, Artificial Sequence; identical to SEQ ID NO: 27026
  Cyclic GFR-binding peptide
  MOD_RES (31), (32): Xaa is C or S

SEQ ID NO: 77528 - protein, 32 aa, Artificial Sequence
  Cyclic GFR-binding peptide
  MOD_RES (28), (29): Xaa is C or S
MDVTAKKVVKENEDIKRMQVPRLETPVXXAKP

SEQ ID NO: 77529 - protein, 26 aa, Artificial Sequence
  Cyclic GFR-binding peptide
NSLQEFIPKKRVIEYYVVPLPELQVQ

SEQ ID NO: 77530 - protein, 33 aa, Artificial Sequence; identical to SEQ ID NO: 27035
  Cyclic GFR-binding peptide
  MOD_RES (1), (33): Xaa is C or S

SEQ ID NO: 77531 - protein, 32 aa, Artificial Sequence
  Cyclic GFR-binding peptide
  MOD_RES (26), (27): Xaa is C or S
VQVEKIVNSSDDVKAVKVSRLQTPAXXPKPVT

SEQ ID NO: 77532 - protein, 35 aa, Artificial Sequence
  Cyclic GFR-binding peptide
  MOD_RES (30), (31): Xaa is C or S
RVIMVQVEKVKPKRGVVKAIKVSRLAQPVXXPAAS

SEQ ID NO: 77533 - protein, 33 aa, Artificial Sequence; identical to SEQ ID NO: 27037
  Cyclic GFR-binding peptide
  MOD_RES (32), (32): Xaa is C or S

SEQ ID NO: 77534 - protein, 36 aa, Artificial Sequence; identical to SEQ ID NO: 27038
  Cyclic GFR-binding peptide
  MOD_RES (2), (33), (34): Xaa is C or S

SEQ ID NO: 77535 - protein, 33 aa, Artificial Sequence
  Cyclic GFR-binding peptide
  MOD_RES (27), (28): Xaa is C or S
NVTAKKIVNSSDDIKRVQVPRLQTPAXXPKPVT

SEQ ID NO: 77536 - protein, 37 aa, Artificial Sequence; identical to SEQ ID NO: 27040
  Cyclic GFR-binding peptide
  MOD_RES (31), (31): Xaa is C or S

SEQ ID NO: 77537 - protein, 27 aa, Artificial Sequence
  Cyclic GFR-binding peptide
SKVIMVTAKKIKPTKGIIKRIQVPRLD

SEQ ID NO: 77538 - protein, 33 aa, Artificial Sequence; identical to SEQ ID NO: 27042
  Cyclic GFR-binding peptide
  MOD_RES (31), (32): Xaa is C or S

SEQ ID NO: 77539 - protein, 33 aa, Artificial Sequence; identical to SEQ ID NO: 27043
  Cyclic GFR-binding peptide
  MOD_RES (31), (32): Xaa is C or S

SEQ ID NO: 77540 - protein, 23 aa, Artificial Sequence
  Cyclic GFR-binding peptide
SMEGIIVNSSDDMIQVTINSLKT

SEQ ID NO: 77541 - protein, 35 aa, Artificial Sequence; identical to SEQ ID NO: 27044
  Cyclic GFR-binding peptide
  MOD_RES (2), (4): Xaa is C or S

SEQ ID NO: 77542 - protein, 24 aa, Artificial Sequence
  Cyclic GFR-binding peptide
NSLQELKPKKRVYEYYLVTLPEHH

SEQ ID NO: 77543 - protein, 36 aa, Artificial Sequence; identical to SEQ ID NO: 27047
  Cyclic GFR-binding peptide
  MOD_RES (35), (35): Xaa is C or S

SEQ ID NO: 77544 - protein, 29 aa, Artificial Sequence
  Cyclic GFR-binding peptide
EVVMDSMEGIVVKENEDMIQMTINSLETP

SEQ ID NO: 77545 - protein, 36 aa, Artificial Sequence; identical to SEQ ID NO: 27051
  Cyclic GFR-binding peptide

SEQ ID NO: 77546 - protein, 31 aa, Artificial Sequence; identical to SEQ ID NO: 27056
  Cyclic GFR-binding peptide

SEQ ID NO: 77547 - protein, 25 aa, Artificial Sequence
  Cyclic GFR-binding peptide
IMVQVEKVKPKRGVVKAIKVSRLAQ

SEQ ID NO: 77548 - protein, 20 aa, Artificial Sequence
  Cyclic GFR-binding peptide
VQVEKVVKENEDVKAMKVSR

SEQ ID NO: 77549 - protein, 30 aa, Artificial Sequence
  Cyclic GFR-binding peptide
HEELRNSLQELKPKKRVYEYYVVPLPEHHV

SEQ ID NO: 77550 - protein, 42 aa, Artificial Sequence; identical to SEQ ID NO: 27059
  Cyclic GFR-binding peptide
  MOD_RES (2), (4), (36), (37): Xaa is C or S

SEQ ID NO: 77551 - protein, 25 aa, Artificial Sequence
  Cyclic GFR-binding peptide
MNVQVEKIVNSSDDVKAVKVSRLKT

SEQ ID NO: 77552 - protein, 40 aa, Artificial Sequence; identical to SEQ ID NO: 27065
  Cyclic GFR-binding peptide
  MOD_RES (36), (36): Xaa is C or S

SEQ ID NO: 77553 - protein, 39 aa, Artificial Sequence; identical to SEQ ID NO: 27067
  Cyclic GFR-binding peptide
  MOD_RES (1), (3), (35), (36): Xaa is C or S

SEQ ID NO: 77554 - protein, 28 aa, Artificial Sequence
  Cyclic GFR-binding peptide
  MOD_RES (1), (3): Xaa is C or S
XKXSKVVMVQVEKVKPTRGVVKAIKVSR

SEQ ID NO: 77555 - protein, 26 aa, Artificial Sequence
  Cyclic GFR-binding peptide
VMEVTAKKVVKDYEDIKRMQVPRLET

SEQ ID NO: 77556 - protein, 36 aa, Artificial Sequence; identical to SEQ ID NO: 27072
  Cyclic GFR-binding peptide
  MOD_RES (1), (33): Xaa is C or S

SEQ ID NO: 77557 - protein, 39 aa, Artificial Sequence; identical to SEQ ID NO: 27074
  Cyclic GFR-binding peptide
  MOD_RES (2), (39): Xaa is C or S

SEQ ID NO: 77558 - protein, 29 aa, Artificial Sequence
  Cyclic GFR-binding peptide
SKVVMVTAKKVKPTRGVIKRIQVPRLDQP

SEQ ID NO: 77559 - protein, 28 aa, Artificial Sequence
  Cyclic GFR-binding peptide
VMDVQVEKVVKENEDVKAMKVSRLETPV

SEQ ID NO: 77560 - protein, 27 aa, Artificial Sequence
  Cyclic GFR-binding peptide
  MOD_RES (26), (27): Xaa is C or S
VQVEKIKPTKGIVKAIKVSRLDQSVXX

SEQ ID NO: 77561 - protein, 28 aa, Artificial Sequence
  Cyclic GFR-binding peptide
  MOD_RES (28), (28): Xaa is C or S
MEVQVEKVVKDYEDVKAMKVSRLETPVX

SEQ ID NO: 77562 - protein, 28 aa, Artificial Sequence
  Cyclic GFR-binding peptide
  MOD_RES (28), (28): Xaa is C or S
VMSMEGIVKPTRGVMIQITINSLDQPVX

SEQ ID NO: 77563 - protein, 29 aa, Artificial Sequence
  Cyclic GFR-binding peptide
  MOD_RES (29), (29): Xaa is C or S
FNSLQEHQGQHPKIRYYLMTLPEEETPVX

SEQ ID NO: 77564 - protein, 25 aa, Artificial Sequence
  Cyclic GFR-binding peptide
VVMDSMEGIVVKENEDMIQMTINSL

SEQ ID NO: 77565 - protein, 31 aa, Artificial Sequence
  Cyclic GFR-binding peptide
  MOD_RES (30), (31): Xaa is C or S
KVIMVTAKKIKPTKGIIKRIQVPRLDQSVXX

SEQ ID NO: 77566 - protein, 21 aa, Artificial Sequence
  Cyclic GFR-binding peptide
SMEGIVKPKRGVMIQITINSL

SEQ ID NO: 77567 - protein, 34 aa, Artificial Sequence; identical to SEQ ID NO: 27103
  Cyclic GFR-binding peptide
  MOD_RES (1), (33), (34): Xaa is C or S

SEQ ID NO: 77568 - protein, 33 aa, Artificial Sequence
  Cyclic GFR-binding peptide
  MOD_RES (27), (28): Xaa is C or S
MVQVEKVKPTRGVVKAIKVSRLDQPVXXPSASA

SEQ ID NO: 77569 - protein, 30 aa, Artificial Sequence
  Cyclic GFR-binding peptide
  MOD_RES (28), (29): Xaa is C or S
IMSMEGIVKPKRGVMIQITINSLAQPVXXP

SEQ ID NO: 77570 - protein, 35 aa, Artificial Sequence; identical to SEQ ID NO: 27104
  Cyclic GFR-binding peptide
  MOD_RES (2), (34): Xaa is C or S

SEQ ID NO: 77571 - protein, 39 aa, Artificial Sequence; identical to SEQ ID NO: 27105
  Cyclic GFR-binding peptide
  MOD_RES (1), (3), (35), (36): Xaa is C or S

SEQ ID NO: 77572 - protein, 28 aa, Artificial Sequence
  Cyclic GFR-binding peptide
  MOD_RES (1), (3): Xaa is C or S
XKXSRVIMSMEGIVKPKRGVMIQITINS

SEQ ID NO: 77573 - protein, 35 aa, Artificial Sequence
  Cyclic GFR-binding peptide
  MOD_RES (29), (30): Xaa is C or S
VMEVQVEKVVKDYEDVKAMKVSRLETPVXXAKPIS

SEQ ID NO: 77574 - protein, 39 aa, Artificial Sequence; identical to SEQ ID NO: 27111
  Cyclic GFR-binding peptide
  MOD_RES (2), (34): Xaa is C or S

SEQ ID NO: 77575 - protein, 27 aa, Artificial Sequence
  Cyclic GFR-binding peptide
  MOD_RES (26), (27): Xaa is C or S
VQVEKIVNSSDDVKAVKVSRLQTPAXX

SEQ ID NO: 77576 - protein, 27 aa, Artificial Sequence
  Cyclic GFR-binding peptide
  MOD_RES (27), (27): Xaa is C or S
EVQVEKVVKDYEDVKAMKVSRLETPVX

SEQ ID NO: 77577 - protein, 38 aa, Artificial Sequence; identical to SEQ ID NO: 27113
  Cyclic GFR-binding peptide
  MOD_RES (2), (4), (36), (37): Xaa is C or S

SEQ ID NO: 77578 - protein, 34 aa, Artificial Sequence; identical to SEQ ID NO: 27115
  Cyclic GFR-binding peptide
  MOD_RES (2), (4): Xaa is C or S

SEQ ID NO: 77579 - protein, 27 aa, Artificial Sequence
  Cyclic GFR-binding peptide
MDSMEGIVVKENEDMIQMTINSLETPV

SEQ ID NO: 77580 - protein, 31 aa, Artificial Sequence
  Cyclic GFR-binding peptide
  MOD_RES (30), (30): Xaa is C or S
VVMNSMEGIIVNSSDDMIQVTINSLKTPAXT

SEQ ID NO: 77581 - protein, 39 aa, Artificial Sequence; identical to SEQ ID NO: 27118
  Cyclic GFR-binding peptide
  MOD_RES (2), (33), (34): Xaa is C or S

SEQ ID NO: 77582 - protein, 27 aa, Artificial Sequence
  Cyclic GFR-binding peptide
  MOD_RES (26), (27): Xaa is C or S
VTAKKIKPTKGIIKRIQVPRLDQSVXX

SEQ ID NO: 77583 - protein, 30 aa, Artificial Sequence
  Cyclic GFR-binding peptide
  MOD_RES (2), (4): Xaa is C or S
SXKXSKVVMVTAKKVKPTRGVIKRIQVPRL

SEQ ID NO: 77584 - protein, 28 aa, Artificial Sequence
  Cyclic GFR-binding peptide
  MOD_RES (28), (28): Xaa is C or S
IMSMEGIVKPKRGVMIQITINSLAQPVX

SEQ ID NO: 77585 - protein, 32 aa, Artificial Sequence
  Cyclic GFR-binding peptide
  MOD_RES (29), (29): Xaa is C or S
VMNVQVEKIVNSSDDVKAVKVSRLKTPAXTPK

SEQ ID NO: 77586 - protein, 24 aa, Artificial Sequence
  Cyclic GFR-binding peptide
VTAKKVKPTRGVIKRIQVPRLDQP

SEQ ID NO: 77587 - protein, 29 aa, Artificial Sequence
  Cyclic GFR-binding peptide
SKVIMSMEGIIKPTKGIMIQITINSLDQS

SEQ ID NO: 77588 - protein, 24 aa, Artificial Sequence
  Cyclic GFR-binding peptide
NVQVEKIVNSSDDVKAVKVSRLQT

SEQ ID NO: 77589 - protein, 26 aa, Artificial Sequence
  Cyclic GFR-binding peptide
IMVTAKKVKPKRGVIKRIQVPRLAQP

SEQ ID NO: 77590 - protein, 34 aa, Artificial Sequence
  Cyclic GFR-binding peptide
  MOD_RES (30), (31): Xaa is C or S
VVMEVTAKKVVKDYEDIKRMQVPRLETPVXXAKP

SEQ ID NO: 77591 - protein, 32 aa, Artificial Sequence; identical to SEQ ID NO: 27134
  Cyclic GFR-binding peptide
  MOD_RES (1), (32): Xaa is C or S

SEQ ID NO: 77592 - protein, 25 aa, Artificial Sequence
  Cyclic GFR-binding peptide
SMEGIIVNSSDDMIQVTINSLQTPA

SEQ ID NO: 77593 - protein, 32 aa, Artificial Sequence; identical to SEQ ID NO: 27136
  Cyclic GFR-binding peptide
  MOD_RES (1), (1): Xaa is C or S

SEQ ID NO: 77594 - protein, 32 aa, Artificial Sequence
  Cyclic GFR-binding peptide
  MOD_RES (26), (27): Xaa is C or S
VTAKKIVNSSDDIKRVQVPRLKTPAXXPKPVY

SEQ ID NO: 77595 - protein, 34 aa, Artificial Sequence
  Cyclic GFR-binding peptide
  MOD_RES (30), (31): Xaa is C or S
KVIMVQVEKIKPTKGIVKAIKVSRLDQSVXXPSA

SEQ ID NO: 77596 - protein, 33 aa, Artificial Sequence
  Cyclic GFR-binding peptide
  MOD_RES (27), (28): Xaa is C or S
EVTAKKVVKDYEDIKRMQVPRLETPVXXAKPIS

SEQ ID NO: 77597 - protein, 34 aa, Artificial Sequence; identical to SEQ ID NO: 27146
  Cyclic GFR-binding peptide
  MOD_RES (1), (33), (34): Xaa is C or S

SEQ ID NO: 77598 - protein, 36 aa, Artificial Sequence; identical to SEQ ID NO: 27149
  Cyclic GFR-binding peptide
  MOD_RES (35), (35): Xaa is C or S

SEQ ID NO: 77599 - protein, 24 aa, Artificial Sequence
  Cyclic GFR-binding peptide
VVMDSMEGIVVKENEDMIQMTINS

SEQ ID NO: 77600 - protein, 34 aa, Artificial Sequence
  Cyclic GFR-binding peptide
  MOD_RES (2), (4): Xaa is C or S
RXGXGEVVMDSMEGIVVKENEDMIQMTINSLETP

SEQ ID NO: 77601 - protein, 25 aa, Artificial Sequence
  Cyclic GFR-binding peptide
MVQVEKVKPKRGVVKAIKVSRLAQP

SEQ ID NO: 77602 - protein, 26 aa, Artificial Sequence
  Cyclic GFR-binding peptide
RVIMVQVEKVKPKRGVVKAIKVSRLA

SEQ ID NO: 77603 - protein, 21 aa, Artificial Sequence
  Cyclic GFR-binding peptide
MVQVEKVKPTRGVVKAIKVSR

SEQ ID NO: 77604 - protein, 25 aa, Artificial Sequence
  Cyclic GFR-binding peptide
TNSLQEFIPKKRVIEYYVVPLPELQ

SEQ ID NO: 77605 - protein, 37 aa, Artificial Sequence; identical to SEQ ID NO: 27154
  Cyclic GFR-binding peptide
  MOD_RES (1), (3): Xaa is C or S

SEQ ID NO: 77606 - protein, 25 aa, Artificial Sequence
  Cyclic GFR-binding peptide
IMSMEGIIKPTKGIMIQITINSLDQ

SEQ ID NO: 77607 - protein, 42 aa, Artificial Sequence; identical to SEQ ID NO: 27161
  Cyclic GFR-binding peptide
  MOD_RES (2), (4), (36): Xaa is C or S

SEQ ID NO: 77608 - protein, 23 aa, Artificial Sequence
  Cyclic GFR-binding peptide
IMVQVEKVKPKRGVVKAIKVSRL

SEQ ID NO: 77609 - protein, 40 aa, Artificial Sequence; identical to SEQ ID NO: 27167
  Cyclic GFR-binding peptide
  MOD_RES (2), (34), (35): Xaa is C or S

SEQ ID NO: 77610 - protein, 30 aa, Artificial Sequence
  Cyclic GFR-binding peptide
  MOD_RES (29), (30): Xaa is C or S
VMNSMEGIIVNSSDDMIQVTINSLKTPAXX

SEQ ID NO: 77611 - protein, 27 aa, Artificial Sequence
  Cyclic GFR-binding peptide
VMVQVEKVKPTRGVVKAIKVSRLDQPV

SEQ ID NO: 77612 - protein, 31 aa, Artificial Sequence
  Cyclic GFR-binding peptide
  MOD_RES (1), (1): Xaa is C or S
XELHEELRNSLQELKPKKRVYEYYVVPLPEH

SEQ ID NO: 77613 - protein, 40 aa, Artificial Sequence; identical to SEQ ID NO: 27175
  Cyclic GFR-binding peptide
  MOD_RES (1), (38): Xaa is C or S

SEQ ID NO: 77614 - protein, 38 aa, Artificial Sequence; identical to SEQ ID NO: 27176
  Cyclic GFR-binding peptide
  MOD_RES (32), (33): Xaa is C or S

SEQ ID NO: 77615 - protein, 33 aa, Artificial Sequence; identical to SEQ ID NO: 27178
  Cyclic GFR-binding peptide
  MOD_RES (2), (33): Xaa is C or S

SEQ ID NO: 77616 - protein, 38 aa, Artificial Sequence; identical to SEQ ID NO: 27179
  Cyclic GFR-binding peptide
  MOD_RES (1), (3), (35): Xaa is C or S

SEQ ID NO: 77617 - protein, 28 aa, Artificial Sequence
  Cyclic GFR-binding peptide
  MOD_RES (2), (2): Xaa is C or S
GXARVVMNVQVEKIVNSSDDVKAVKVSR

SEQ ID NO: 77618 - protein, 33 aa, Artificial Sequence
  Cyclic GFR-binding peptide
  MOD_RES (2), (4): Xaa is C or S
AXAXELHEELRNSLQELKPKKRVYEYYVVPLPE

SEQ ID NO: 77619 - protein, 30 aa, Artificial Sequence
  Cyclic GFR-binding peptide
  MOD_RES (30), (30): Xaa is C or S
RVIMSMEGIVKPKRGVMIQITINSLAQPVX

SEQ ID NO: 77620 - protein, 34 aa, Artificial Sequence; identical to SEQ ID NO: 27185
  Cyclic GFR-binding peptide
  MOD_RES (31), (32): Xaa is C or S

SEQ ID NO: 77621 - protein, 28 aa, Artificial Sequence
  Cyclic GFR-binding peptide
  MOD_RES (27), (28): Xaa is C or S
MVTAKKIKPTKGIIKRIQVPRLDQSVXX

SEQ ID NO: 77622 - protein, 36 aa, Artificial Sequence; identical to SEQ ID NO: 27189
  Cyclic GFR-binding peptide
  MOD_RES (2), (4), (35), (36): Xaa is C or S

SEQ ID NO: 77623 - protein, 33 aa, Artificial Sequence
  Cyclic GFR-binding peptide
  MOD_RES (29), (30): Xaa is C or S
VIMVQVEKVKPKRGVVKAIKVSRLAQPVXXPAA

SEQ ID NO: 77624 - protein, 26 aa, Artificial Sequence
  Cyclic GFR-binding peptide
  MOD_RES (26), (26): Xaa is C or S
VTAKKIVNSSDDIKRVQVPRLQTPAX

SEQ ID NO: 77625 - protein, 32 aa, Artificial Sequence
  Cyclic GFR-binding peptide
  MOD_RES (28), (29): Xaa is C or S
MEVQVEKVVKDYEDVKAMKVSRLETPVXXAKP

SEQ ID NO: 77626 - protein, 33 aa, Artificial Sequence; identical to SEQ ID NO: 27192
  Cyclic GFR-binding peptide
  MOD_RES (2), (2): Xaa is C or S

SEQ ID NO: 77627 - protein, 43 aa, Artificial Sequence; identical to SEQ ID NO: 27193
  Cyclic GFR-binding peptide
  MOD_RES (1), (3), (40): Xaa is C or S

SEQ ID NO: 77628 - protein, 32 aa, Artificial Sequence
  Cyclic GFR-binding peptide
  MOD_RES (27), (28): Xaa is C or S
DVTAKKVVKENEDIKRMQVPRLETPVXXAKPI

SEQ ID NO: 77629 - protein, 35 aa, Artificial Sequence
  Cyclic GFR-binding peptide
  MOD_RES (1), (3): Xaa is C or S
XEXKNHQLFNSLQEHQGQHPKIRYYVMPLPEEETP

SEQ ID NO: 77630 - protein, 25 aa, Artificial Sequence
  Cyclic GFR-binding peptide
MDVQVEKVVKENEDVKAMKVSRLET

SEQ ID NO: 77631 - protein, 36 aa, Artificial Sequence; identical to SEQ ID NO: 27197
  Cyclic GFR-binding peptide
  MOD_RES (2), (34), (35): Xaa is C or S

SEQ ID NO: 77632 - protein, 34 aa, Artificial Sequence
  Cyclic GFR-binding peptide
  MOD_RES (2), (4): Xaa is C or S
HXGXARVVMNSMEGIIVNSSDDMIQVTINSLQTP

SEQ ID NO: 77633 - protein, 28 aa, Artificial Sequence
  Cyclic GFR-binding peptide
  MOD_RES (26), (27): Xaa is C or S
VQVEKIVNSSDDVKAVKVSRLKTPAXXP

SEQ ID NO: 77634 - protein, 22 aa, Artificial Sequence
  Cyclic GFR-binding peptide
IMVQVEKIKPTKGIVKAIKVSR

SEQ ID NO: 77635 - protein, 34 aa, Artificial Sequence; identical to SEQ ID NO: 27199
  Cyclic GFR-binding peptide
  MOD_RES (33), (33): Xaa is C or S

SEQ ID NO: 77636 - protein, 30 aa, Artificial Sequence
  Cyclic GFR-binding peptide
  MOD_RES (1), (3): Xaa is C or S
XGXGEVVMDSMEGIVVKENEDMIQMTINSL

SEQ ID NO: 77637 - protein, 26 aa, Artificial Sequence
  Cyclic GFR-binding peptide
GEVVMDSMEGIVVKENEDMIQMTINS

SEQ ID NO: 77638 - protein, 30 aa, Artificial Sequence
  Cyclic GFR-binding peptide
  MOD_RES (27), (28): Xaa is C or S
EVTAKKVVKDYEDIKRMQVPRLETPVXXAK

SEQ ID NO: 77639 - protein, 34 aa, Artificial Sequence
  Cyclic GFR-binding peptide
  MOD_RES (28), (29): Xaa is C or S
IMVTAKKIKPTKGIIKRIQVPRLDQSVXXPSASA

SEQ ID NO: 77640 - protein, 42 aa, Artificial Sequence; identical to SEQ ID NO: 27200
  Cyclic GFR-binding peptide
  MOD_RES (2), (4), (36), (37): Xaa is C or S

SEQ ID NO: 77641 - protein, 39 aa, Artificial Sequence; identical to SEQ ID NO: 27203
  Cyclic GFR-binding peptide
  MOD_RES (36), (36): Xaa is C or S

SEQ ID NO: 77642 - protein, 36 aa, Artificial Sequence; identical to SEQ ID NO: 27204
  Cyclic GFR-binding peptide
  MOD_RES (1), (33), (34): Xaa is C or S

SEQ ID NO: 77643 - protein, 33 aa, Artificial Sequence
  Cyclic GFR-binding peptide
  MOD_RES (28), (29): Xaa is C or S
MEVTAKKVVKDYEDIKRMQVPRLETPVXXAKPI

SEQ ID NO: 77644 - protein, 26 aa, Artificial Sequence
  Cyclic GFR-binding peptide
RNSLQELKPKKRVYEYYVVPLPEHHV

SEQ ID NO: 77645 - protein, 23 aa, Artificial Sequence
  Cyclic GFR-binding peptide
ESMEGIVVKDYEDMIQMTINSLE

SEQ ID NO: 77646 - protein, 41 aa, Artificial Sequence; identical to SEQ ID NO: 27212
  Cyclic GFR-binding peptide
  MOD_RES (1), (3), (35), (36): Xaa is C or S

SEQ ID NO: 77647 - protein, 36 aa, Artificial Sequence; identical to SEQ ID NO: 27214
  Cyclic GFR-binding peptide
  MOD_RES (31), (32): Xaa is C or S

SEQ ID NO: 77648 - protein, 30 aa, Artificial Sequence
  Cyclic GFR-binding peptide
GEVVMESMEGIVVKDYEDMIQMTINSLETP

SEQ ID NO: 77649 - protein, 32 aa, Artificial Sequence
  Cyclic GFR-binding peptide
  MOD_RES (27), (28): Xaa is C or S
NVQVEKIVNSSDDVKAVKVSRLKTPAXXPKPV

SEQ ID NO: 77650 - protein, 39 aa, Artificial Sequence; identical to SEQ ID NO: 27216
  Cyclic GFR-binding peptide
  MOD_RES (1), (3), (35): Xaa is C or S

SEQ ID NO: 77651 - protein, 35 aa, Artificial Sequence; identical to SEQ ID NO: 27218
  Cyclic GFR-binding peptide
  MOD_RES (31), (32): Xaa is C or S

SEQ ID NO: 77652 - protein, 27 aa, Artificial Sequence
  Cyclic GFR-binding peptide
EVVMEVQVEKVVKDYEDVKAMKVSRLE

SEQ ID NO: 77653 - protein, 30 aa, Artificial Sequence
  Cyclic GFR-binding peptide
GEVVMDSMEGIVVKENEDMIQMTINSLETP

SEQ ID NO: 77654 - protein, 29 aa, Artificial Sequence
  Cyclic GFR-binding peptide
  MOD_RES (1), (1): Xaa is C or S
XSRVVMNSMEGIIVNSSDDMIQVTINSLK

SEQ ID NO: 77655 - protein, 29 aa, Artificial Sequence
  Cyclic GFR-binding peptide
QLFNSLQEHQGQHPKIRYYLMTLPEEETP

SEQ ID NO: 77656 - protein, 28 aa, Artificial Sequence
  Cyclic GFR-binding peptide
VVMVTAKKVKPTRGVIKRIQVPRLDQPV

SEQ ID NO: 77657 - protein, 34 aa, Artificial Sequence; identical to SEQ ID NO: 27229
  Cyclic GFR-binding peptide

SEQ ID NO: 77658 - protein, 31 aa, Artificial Sequence
  Cyclic GFR-binding peptide
  MOD_RES (27), (28): Xaa is C or S
MVTAKKIKPTKGIIKRIQVPRLDQSVXXPSA

SEQ ID NO: 77659 - protein, 36 aa, Artificial Sequence
  Cyclic GFR-binding peptide
  MOD_RES (30), (31): Xaa is C or S
VVMEVQVEKVVKDYEDVKAMKVSRLETPVXXAKPIS

SEQ ID NO: 77660 - protein, 34 aa, Artificial Sequence; identical to SEQ ID NO: 27237
  Cyclic GFR-binding peptide

SEQ ID NO: 77661 - protein, 32 aa, Artificial Sequence; identical to SEQ ID NO: 27238
  Cyclic GFR-binding peptide
  MOD_RES (31), (32): Xaa is C or S

SEQ ID NO: 77662 - protein, 36 aa, Artificial Sequence; identical to SEQ ID NO: 27240
  Cyclic GFR-binding peptide
  MOD_RES (1), (33), (34): Xaa is C or S

SEQ ID NO: 77663 - protein, 30 aa, Artificial Sequence
  Cyclic GFR-binding peptide
EELRNSLQELKPKKRVYEYYVVPLPEHHVR

SEQ ID NO: 77664 - protein, 31 aa, Artificial Sequence; identical to SEQ ID NO: 27241
  Cyclic GFR-binding peptide

SEQ ID NO: 77665 - protein, 32 aa, Artificial Sequence
  Cyclic GFR-binding peptide
  MOD_RES (27), (28): Xaa is C or S
EVQVEKVVKDYEDVKAMKVSRLETPVXXAKPI

SEQ ID NO: 77666 - protein, 38 aa, Artificial Sequence; identical to SEQ ID NO: 27250
  Cyclic GFR-binding peptide
  MOD_RES (2), (4), (36), (37): Xaa is C or S

SEQ ID NO: 77667 - protein, 28 aa, Artificial Sequence
  Cyclic GFR-binding peptide
  MOD_RES (1), (1): Xaa is C or S
XSKVVMVTAKKVKPTRGVIKRIQVPRLD

SEQ ID NO: 77668 - protein, 32 aa, Artificial Sequence
  Cyclic GFR-binding peptide
  MOD_RES (30), (31): Xaa is C or S
KVIMVQVEKIKPTKGIVKAIKVSRLDQSVXXP

SEQ ID NO: 77669 - protein, 29 aa, Artificial Sequence
  Cyclic GFR-binding peptide
  MOD_RES (27), (27): Xaa is C or S
NVQVEKIVNSSDDVKAVKVSRLKTPAXTP

SEQ ID NO: 77670 - protein, 39 aa, Artificial Sequence; identical to SEQ ID NO: 27256
  Cyclic GFR-binding peptide
  MOD_RES (1), (33), (34): Xaa is C or S

SEQ ID NO: 77671 - protein, 36 aa, Artificial Sequence; identical to SEQ ID NO: 27258
  Cyclic GFR-binding peptide
  MOD_RES (36), (36): Xaa is C or S

SEQ ID NO: 77672 - protein, 40 aa, Artificial Sequence; identical to SEQ ID NO: 27259
  Cyclic GFR-binding peptide
  MOD_RES (2), (4): Xaa is C or S

SEQ ID NO: 77673 - protein, 27 aa, Artificial Sequence
  Cyclic GFR-binding peptide
  MOD_RES (27), (27): Xaa is C or S
NSMEGIIVNSSDDMIQVTINSLKTPAX

SEQ ID NO: 77674 - protein, 32 aa, Artificial Sequence; identical to SEQ ID NO: 27264
  Cyclic GFR-binding peptide
  MOD_RES (31), (32): Xaa is C or S

SEQ ID NO: 77675 - protein, 36 aa, Artificial Sequence
  Cyclic GFR-binding peptide
  MOD_RES (30), (31): Xaa is C or S
VVMNVQVEKIVNSSDDVKAVKVSRLKTPAXXPKPVY

SEQ ID NO: 77676 - protein, 28 aa, Artificial Sequence
  Cyclic GFR-binding peptide
ELTNSLQEFIPKKRVIEYYLVTLPELQV

SEQ ID NO: 77677 - protein, 35 aa, Artificial Sequence
  Cyclic GFR-binding peptide
  MOD_RES (30), (31): Xaa is C or S
KVIMVTAKKIKPTKGIIKRIQVPRLDQSVXXPSAS

SEQ ID NO: 77678 - protein, 22 aa, Artificial Sequence
  Cyclic GFR-binding peptide
NSLQELKPKKRVYEYYVVPLPE

SEQ ID NO: 77679 - protein, 34 aa, Artificial Sequence; identical to SEQ ID NO: 27277
  Cyclic GFR-binding peptide
  MOD_RES (31), (32): Xaa is C or S

SEQ ID NO: 77680 - protein, 38 aa, Artificial Sequence; identical to SEQ ID NO: 27279
  Cyclic GFR-binding peptide
  MOD_RES (2), (33), (34): Xaa is C or S

SEQ ID NO: 77681 - protein, 36 aa, Artificial Sequence; identical to SEQ ID NO: 27281
  Cyclic GFR-binding peptide
  MOD_RES (2), (4), (36): Xaa is C or S

SEQ ID NO: 77682 - protein, 34 aa, Artificial Sequence
  Cyclic GFR-binding peptide
  MOD_RES (1), (3): Xaa is C or S
XKXALHDELTNSLQEFIPKKRVIEYYVVPLPELQ

SEQ ID NO: 77683 - protein, 29 aa, Artificial Sequence
  Cyclic GFR-binding peptide
LHEELRNSLQELKPKKRVYEYYVVPLPEH

SEQ ID NO: 77684 - protein, 35 aa, Artificial Sequence; identical to SEQ ID NO: 27284
  Cyclic GFR-binding peptide

SEQ ID NO: 77685 - protein, 35 aa, Artificial Sequence; identical to SEQ ID NO: 27286
  Cyclic GFR-binding peptide
  MOD_RES (2), (34): Xaa is C or S

SEQ ID NO: 77686 - protein, 33 aa, Artificial Sequence
  Cyclic GFR-binding peptide
  MOD_RES (29), (30): Xaa is C or S
VMNSMEGIIVNSSDDMIQVTINSLKTPAXXPKP

SEQ ID NO: 77687 - protein, 26 aa, Artificial Sequence
  Cyclic GFR-binding peptide
ESMEGIVVKDYEDMIQMTINSLETPV

SEQ ID NO: 77688 - protein, 29 aa, Artificial Sequence
  Cyclic GFR-binding peptide
RVIMSMEGIVKPKRGVMIQITINSLAQPV

SEQ ID NO: 77689 - protein, 22 aa, Artificial Sequence
  Cyclic GFR-binding peptide
MVTAKKVKPKRGVIKRIQVPRL

SEQ ID NO: 77690 - protein, 32 aa, Artificial Sequence
  Cyclic GFR-binding peptide
  MOD_RES (2), (4): Xaa is C or S
SXKXSKVIMSMEGIIKPTKGIMIQITINSLDQ

SEQ ID NO: 77691 - protein, 24 aa, Artificial Sequence
  Cyclic GFR-binding peptide
NSMEGIIVNSSDDMIQVTINSLKT

SEQ ID NO: 77692 - protein, 32 aa, Artificial Sequence
  Cyclic GFR-binding peptide
  MOD_RES (32), (32): Xaa is C or S
LTNSLQEFIPKKRVIEYYVVPLPELQVQTPRX

SEQ ID NO: 77693 - protein, 38 aa, Artificial Sequence; identical to SEQ ID NO: 27294
  Cyclic GFR-binding peptide
  MOD_RES (2), (4), (38): Xaa is C or S

SEQ ID NO: 77694 - protein, 25 aa, Artificial Sequence
  Cyclic GFR-binding peptide
NSLQELKPKKRVYEYYVVPLPEHHV

SEQ ID NO: 77695 - protein, 29 aa, Artificial Sequence
  Cyclic GFR-binding peptide
RVVMNVTAKKIVNSSDDIKRVQVPRLQTP

SEQ ID NO: 77696 - protein, 31 aa, Artificial Sequence
  Cyclic GFR-binding peptide
  MOD_RES (27), (28): Xaa is C or S
DVTAKKVVKENEDIKRMQVPRLETPVXXAKP

SEQ ID NO: 77697 - protein, 41 aa, Artificial Sequence; identical to SEQ ID NO: 27312
  Cyclic GFR-binding peptide
  MOD_RES (1), (3), (35), (36): Xaa is C or S

SEQ ID NO: 77698 - protein, 34 aa, Artificial Sequence; identical to SEQ ID NO: 27314
  Cyclic GFR-binding peptide
  MOD_RES (2), (4): Xaa is C or S

SEQ ID NO: 77699 - protein, 29 aa, Artificial Sequence
  Cyclic GFR-binding peptide
  MOD_RES (29), (29): Xaa is C or S
VIMVQVEKVKPKRGVVKAIKVSRLAQPVX

SEQ ID NO: 77700 - protein, 37 aa, Artificial Sequence; identical to SEQ ID NO: 27319
  Cyclic GFR-binding peptide
  MOD_RES (2), (4): Xaa is C or S

SEQ ID NO: 77701 - protein, 34 aa, Artificial Sequence
  Cyclic GFR-binding peptide
  MOD_RES (31), (31): Xaa is C or S
RNSLQELKPKKRVYEYYVVPLPEHHVRSPQXKVS

SEQ ID NO: 77702 - protein, 34 aa, Artificial Sequence
  Cyclic GFR-binding peptide
  MOD_RES (28), (29): Xaa is C or S
VMVTAKKVKPTRGVIKRIQVPRLDQPVXXPSASA

SEQ ID NO: 77703 - protein, 27 aa, Artificial Sequence
  Cyclic GFR-binding peptide
IMVQVEKIKPTKGIVKAIKVSRLDQSV

SEQ ID NO: 77704 - protein, 37 aa, Artificial Sequence; identical to SEQ ID NO: 27321
  Cyclic GFR-binding peptide
  MOD_RES (2), (34), (35): Xaa is C or S

SEQ ID NO: 77705 - protein, 34 aa, Artificial Sequence
  Cyclic GFR-binding peptide
  MOD_RES (30), (31): Xaa is C or S
VVMNSMEGIIVNSSDDMIQVTINSLQTPAXXPKP

SEQ ID NO: 77706 - protein, 30 aa, Artificial Sequence
  Cyclic GFR-binding peptide
  MOD_RES (26), (27): Xaa is C or S
SMEGIVVKDYEDMIQMTINSLETPVXXAKP

SEQ ID NO: 77707 - protein, 29 aa, Artificial Sequence
  Cyclic GFR-binding peptide
VVMEVTAKKVVKDYEDIKRMQVPRLETPV

SEQ ID NO: 77708 - protein, 28 aa, Artificial Sequence
  Cyclic GFR-binding peptide
GEVVMDVTAKKVVKENEDIKRMQVPRLE

SEQ ID NO: 77709 - protein, 26 aa, Artificial Sequence
  Cyclic GFR-binding peptide
VVMEVTAKKVVKDYEDIKRMQVPRLE

SEQ ID NO: 77710 - protein, 33 aa, Artificial Sequence
  Cyclic GFR-binding peptide
  MOD_RES (33), (33): Xaa is C or S
ELTNSLQEFIPKKRVIEYYLVTLPELQVQTPRX

SEQ ID NO: 77711 - protein, 25 aa, Artificial Sequence
  Cyclic GFR-binding peptide
MVTAKKVKPTRGVIKRIQVPRLDQP

SEQ ID NO: 77712 - protein, 23 aa, Artificial Sequence
  Cyclic GFR-binding peptide
MDSMEGIVVKENEDMIQMTINSL

SEQ ID NO: 77713 - protein, 37 aa, Artificial Sequence; identical to SEQ ID NO: 27324
  Cyclic GFR-binding peptide
  MOD_RES (32), (33): Xaa is C or S

SEQ ID NO: 77714 - protein, 22 aa, Artificial Sequence
  Cyclic GFR-binding peptide
SMEGIIKPTKGIMIQITINSLD

SEQ ID NO: 77715 - protein, 41 aa, Artificial Sequence; identical to SEQ ID NO: 27326
  Cyclic GFR-binding peptide
  MOD_RES (2), (4), (35), (36): Xaa is C or S

SEQ ID NO: 77716 - protein, 31 aa, Artificial Sequence
  Cyclic GFR-binding peptide
  MOD_RES (2), (4): Xaa is C or S
SXKXSKVIMVQVEKIKPTKGIVKAIKVSRLD

SEQ ID NO: 77717 - protein, 29 aa, Artificial Sequence
  Cyclic GFR-binding peptide
SKVIMVQVEKIKPTKGIVKAIKVSRLDQS

SEQ ID NO: 77718 - protein, 36 aa, Artificial Sequence; identical to SEQ ID NO: 27330
  Cyclic GFR-binding peptide
  MOD_RES (1), (35): Xaa is C or S

SEQ ID NO: 77719 - protein, 26 aa, Artificial Sequence
  Cyclic GFR-binding peptide
SKVVMVQVEKVKPTRGVVKAIKVSRL

SEQ ID NO: 77720 - protein, 27 aa, Artificial Sequence
  Cyclic GFR-binding peptide
  MOD_RES (1), (1): Xaa is C or S
XGEVVMDSMEGIVVKENEDMIQMTINS

SEQ ID NO: 77721 - protein, 25 aa, Artificial Sequence
  Cyclic GFR-binding peptide
RVIMVQVEKVKPKRGVVKAIKVSRL

SEQ ID NO: 77722 - protein, 28 aa, Artificial Sequence
  Cyclic GFR-binding peptide
  MOD_RES (27), (28): Xaa is C or S
NVQVEKIVNSSDDVKAVKVSRLKTPAXX

SEQ ID NO: 77723 - protein, 27 aa, Artificial Sequence
  Cyclic GFR-binding peptide
  MOD_RES (26), (27): Xaa is C or S
VQVEKVKPTRGVVKAIKVSRLDQPVXX

SEQ ID NO: 77724 - protein, 25 aa, Artificial Sequence
  Cyclic GFR-binding peptide
VVMNVTAKKIVNSSDDIKRVQVPRL

SEQ ID NO: 77725 - protein, 30 aa, Artificial Sequence
  Cyclic GFR-binding peptide
EELRNSLQELKPKKRVYEYYLVTLPEHHVR

SEQ ID NO: 77726 - protein, 23 aa, Artificial Sequence
  Cyclic GFR-binding peptide
SMEGIVVKDYEDMIQMTINSLET

SEQ ID NO: 77727 - protein, 33 aa, Artificial Sequence
  Cyclic GFR-binding peptide
  MOD_RES (30), (31): Xaa is C or S
KVVMVQVEKVKPTRGVVKAIKVSRLDQPVXXPS

SEQ ID NO: 77728 - protein, 31 aa, Artificial Sequence
  Cyclic GFR-binding peptide
  MOD_RES (30), (31): Xaa is C or S
VVMNVTAKKIVNSSDDIKRVQVPRLQTPAXX

SEQ ID NO: 77729 - protein, 40 aa, Artificial Sequence; identical to SEQ ID NO: 27337
  Cyclic GFR-binding peptide
  MOD_RES (1), (38): Xaa is C or S

SEQ ID NO: 77730 - protein, 35 aa, Artificial Sequence
  Cyclic GFR-binding peptide
  MOD_RES (2), (4): Xaa is C or S
AXAXELHEELRNSLQELKPKKRVYEYYVVPLPEHH

SEQ ID NO: 77731 - protein, 24 aa, Artificial Sequence
  Cyclic GFR-binding peptide
MVTAKKIKPTKGIIKRIQVPRLDQ

SEQ ID NO: 77732 - protein, 22 aa, Artificial Sequence
  Cyclic GFR-binding peptide
VTAKKIKPTKGIIKRIQVPRLD

SEQ ID NO: 77733 - protein, 38 aa, Artificial Sequence; identical to SEQ ID NO: 27342
  Cyclic GFR-binding peptide
  MOD_RES (2), (4), (35), (36): Xaa is C or S

SEQ ID NO: 77734 - protein, 35 aa, Artificial Sequence
  Cyclic GFR-binding peptide
  MOD_RES (31), (31): Xaa is C or S
QLFNSLQEHQGQHPKIRYYVMPLPEEETPVXELGE

SEQ ID NO: 77735 - protein, 31 aa, Artificial Sequence
  Cyclic GFR-binding peptide
  MOD_RES (1), (3): Xaa is C or S
XKXSRVIMVTAKKVKPKRGVIKRIQVPRLAQ

SEQ ID NO: 77736 - protein, 29 aa, Artificial Sequence
  Cyclic GFR-binding peptide
AAAAAAAAAVTAKKVKPTRGVIKRIQVPR

SEQ ID NO: 77737 - protein, 37 aa, Artificial Sequence; identical to SEQ ID NO: 27350
  Cyclic GFR-binding peptide
  MOD_RES (31), (32): Xaa is C or S

SEQ ID NO: 77738 - protein, 23 aa, Artificial Sequence
  Cyclic GFR-binding peptide
VVMVQVEKVKPTRGVVKAIKVSR

SEQ ID NO: 77739 - protein, 33 aa, Artificial Sequence
  Cyclic GFR-binding peptide
  MOD_RES (27), (28): Xaa is C or S
NSMEGIIVNSSDDMIQVTINSLQTPAXXPKPVT

SEQ ID NO: 77740 - protein, 30 aa, Artificial Sequence
  Cyclic GFR-binding peptide
  MOD_RES (26), (26): Xaa is C or S
VQVEKIVNSSDDVKAVKVSRLKTPAXTPKT

SEQ ID NO: 77741 - protein, 36 aa, Artificial Sequence; identical to SEQ ID NO: 27359
  Cyclic GFR-binding peptide
  MOD_RES (1), (3), (34), (35): Xaa is C or S

SEQ ID NO: 77742 - protein, 26 aa, Artificial Sequence
  Cyclic GFR-binding peptide
NSMEGIIVNSSDDMIQVTINSLQTPA

SEQ ID NO: 77743 - protein, 28 aa, Artificial Sequence
  Cyclic GFR-binding peptide
  MOD_RES (26), (27): Xaa is C or S
VTAKKIVNSSDDIKRVQVPRLKTPAXXP

SEQ ID NO: 77744 - protein, 29 aa, Artificial Sequence
  Cyclic GFR-binding peptide
  MOD_RES (28), (29): Xaa is C or S
IMSMEGIVKPKRGVMIQITINSLAQPVXX

SEQ ID NO: 77745 - protein, 27 aa, Artificial Sequence
  Cyclic GFR-binding peptide
  MOD_RES (27), (27): Xaa is C or S
NVQVEKIVNSSDDVKAVKVSRLQTPAX

SEQ ID NO: 77746 - protein, 24 aa, Artificial Sequence
  Cyclic GFR-binding peptide
KVIMSMEGIIKPTKGIMIQITINS

SEQ ID NO: 77747 - protein, 35 aa, Artificial Sequence
  Cyclic GFR-binding peptide
  MOD_RES (29), (30): Xaa is C or S
VMNVTAKKIVNSSDDIKRVQVPRLQTPAXXPKPVT

SEQ ID NO: 77748 - protein, 34 aa, Artificial Sequence; identical to SEQ ID NO: 27365
  Cyclic GFR-binding peptide
  MOD_RES (2), (33), (34): Xaa is C or S

SEQ ID NO: 77749 - protein, 24 aa, Artificial Sequence
  Cyclic GFR-binding peptide
MNVTAKKIVNSSDDIKRVQVPRLQ

SEQ ID NO: 77750 - protein, 36 aa, Artificial Sequence; identical to SEQ ID NO: 27369
  Cyclic GFR-binding peptide
  MOD_RES (2), (4), (35), (36): Xaa is C or S

SEQ ID NO: 77751 - protein, 27 aa, Artificial Sequence
  Cyclic GFR-binding peptide
RNSLQELKPKKRVYEYYVVPLPEHHVR

SEQ ID NO: 77752 - protein, 29 aa, Artificial Sequence
  Cyclic GFR-binding peptide
  MOD_RES (1), (1): Xaa is C or S
XKNHQLFNSLQEHQGQHPKIRYYLMTLPE

SEQ ID NO: 77753 - protein, 39 aa, Artificial Sequence; identical to SEQ ID NO: 27371
  Cyclic GFR-binding peptide
  MOD_RES (1), (3), (34), (35): Xaa is C or S

SEQ ID NO: 77754 - protein, 36 aa, Artificial Sequence
  Cyclic GFR-binding peptide
  MOD_RES (30), (31): Xaa is C or S
RVIMVTAKKVKPKRGVIKRIQVPRLAQPVXXPAASA

SEQ ID NO: 77755 - protein, 29 aa, Artificial Sequence
  Cyclic GFR-binding peptide
  MOD_RES (29), (29): Xaa is C or S
VIMSMEGIVKPKRGVMIQITINSLAQPVX

SEQ ID NO: 77756 - protein, 29 aa, Artificial Sequence
  Cyclic GFR-binding peptide
  MOD_RES (1), (3): Xaa is C or S
XKXSKVIMVQVEKIKPTKGIVKAIKVSRL

SEQ ID NO: 77757 - protein, 36 aa, Artificial Sequence; identical to SEQ ID NO: 27377
  Cyclic GFR-binding peptide
  MOD_RES (31), (32): Xaa is C or S

SEQ ID NO: 77758 - protein, 32 aa, Artificial Sequence
  Cyclic GFR-binding peptide
  MOD_RES (1), (3): Xaa is C or S
XGXGEVVMDVTAKKVVKENEDIKRMQVPRLET

SEQ ID NO: 77759 - protein, 39 aa, Artificial Sequence; identical to SEQ ID NO: 27383
  Cyclic GFR-binding peptide
  MOD_RES (2), (34), (35): Xaa is C or S

SEQ ID NO: 77760 - protein, 37 aa, Artificial Sequence; identical to SEQ ID NO: 27386
  Cyclic GFR-binding peptide
  MOD_RES (2), (36): Xaa is C or S

SEQ ID NO: 77761 - protein, 32 aa, Artificial Sequence
  Cyclic GFR-binding peptide
  MOD_RES (1), (3): Xaa is C or S
XKXSKVVMVTAKKVKPTRGVIKRIQVPRLDQP

SEQ ID NO: 77762 - protein, 28 aa, Artificial Sequence
  Cyclic GFR-binding peptide
QLFNSLQEHQGQHPKIRYYVMPLPEEET

SEQ ID NO: 77763 - protein, 30 aa, Artificial Sequence
  Cyclic GFR-binding peptide
  MOD_RES (1), (1): Xaa is C or S
XSRVIMVQVEKVKPKRGVVKAIKVSRLAQP

SEQ ID NO: 77764 - protein, 24 aa, Artificial Sequence
  Cyclic GFR-binding peptide
SMEGIIKPTKGIMIQITINSLDQS

SEQ ID NO: 77765 - protein, 29 aa, Artificial Sequence
  Cyclic GFR-binding peptide
ELHEELRNSLQELKPKKRVYEYYLVTLPE

SEQ ID NO: 77766 - protein, 34 aa, Artificial Sequence; identical to SEQ ID NO: 27393
  Cyclic GFR-binding peptide
  MOD_RES (2), (34): Xaa is C or S

SEQ ID NO: 77767 - protein, 37 aa, Artificial Sequence; identical to SEQ ID NO: 27399
  Cyclic GFR-binding peptide
  MOD_RES (2), (34), (35): Xaa is C or S

SEQ ID NO: 77768 - protein, 34 aa, Artificial Sequence; identical to SEQ ID NO: 27400
  Cyclic GFR-binding peptide

SEQ ID NO: 77769 - protein, 32 aa, Artificial Sequence
  Cyclic GFR-binding peptide
  MOD_RES (29), (29): Xaa is C or S
VMNSMEGIIVNSSDDMIQVTINSLKTPAXTPK

SEQ ID NO: 77770 - protein, 30 aa, Artificial Sequence
  Cyclic GFR-binding peptide
  MOD_RES (27), (28): Xaa is C or S
DSMEGIVVKENEDMIQMTINSLETPVXXAK

SEQ ID NO: 77771 - protein, 39 aa, Artificial Sequence; identical to SEQ ID NO: 27404
  Cyclic GFR-binding peptide
  MOD_RES (1), (33), (34): Xaa is C or S

SEQ ID NO: 77772 - protein, 32 aa, Artificial Sequence; identical to SEQ ID NO: 27406
  Cyclic GFR-binding peptide
  MOD_RES (1), (1): Xaa is C or S

SEQ ID NO: 77773 - protein, 33 aa, Artificial Sequence; identical to SEQ ID NO: 27407
  Cyclic GFR-binding peptide

SEQ ID NO: 77774 - protein, 34 aa, Artificial Sequence; identical to SEQ ID NO: 27411
  Cyclic GFR-binding peptide
  MOD_RES (2), (33), (34): Xaa is C or S

SEQ ID NO: 77775 - protein, 37 aa, Artificial Sequence; identical to SEQ ID NO: 27410
  Cyclic GFR-binding peptide
  MOD_RES (37), (37): Xaa is C or S

SEQ ID NO: 77776 - protein, 27 aa, Artificial Sequence
  Cyclic GFR-binding peptide
MNVTAKKIVNSSDDIKRVQVPRLQTPA

SEQ ID NO: 77777 - protein, 32 aa, Artificial Sequence
  Cyclic GFR-binding peptide
  MOD_RES (32), (32): Xaa is C or S
LRNSLQELKPKKRVYEYYLVTLPEHHVRSPQX

SEQ ID NO: 77778 - protein, 25 aa, Artificial Sequence
  Cyclic GFR-binding peptide
VQVEKVVKENEDVKAMKVSRLETPV

SEQ ID NO: 77779 - protein, 37 aa, Artificial Sequence; identical to SEQ ID NO: 27413
  Cyclic GFR-binding peptide
  MOD_RES (31), (32): Xaa is C or S

SEQ ID NO: 77780 - protein, 28 aa, Artificial Sequence
  Cyclic GFR-binding peptide
  MOD_RES (2), (2): Xaa is C or S
KXSRVIMVTAKKVKPKRGVIKRIQVPRL

SEQ ID NO: 77781 - protein, 35 aa, Artificial Sequence; identical to SEQ ID NO: 27414
  Cyclic GFR-binding peptide
  MOD_RES (2), (33), (34): Xaa is C or S

SEQ ID NO: 77782 - protein, 36 aa, Artificial Sequence; identical to SEQ ID NO: 27417
  Cyclic GFR-binding peptide
  MOD_RES (2), (4), (36): Xaa is C or S

SEQ ID NO: 77783 - protein, 23 aa, Artificial Sequence
  Cyclic GFR-binding peptide
VTAKKIVNSSDDIKRVQVPRLQT

SEQ ID NO: 77784 - protein, 27 aa, Artificial Sequence
  Cyclic GFR-binding peptide
  MOD_RES (2), (2): Xaa is C or S
KXSKVVMVQVEKVKPTRGVVKAIKVSR

SEQ ID NO: 77785 - protein, 37 aa, Artificial Sequence; identical to SEQ ID NO: 27420
  Cyclic GFR-binding peptide
  MOD_RES (32), (33): Xaa is C or S

SEQ ID NO: 77786 - protein, 36 aa, Artificial Sequence; identical to SEQ ID NO: 27424
  Cyclic GFR-binding peptide
  MOD_RES (2), (34): Xaa is C or S

SEQ ID NO: 77787 - protein, 24 aa, Artificial Sequence
  Cyclic GFR-binding peptide
VQVEKVKPTRGVVKAIKVSRLDQP

SEQ ID NO: 77788 - protein, 30 aa, Artificial Sequence
  Cyclic GFR-binding peptide
  MOD_RES (29), (29): Xaa is C or S
VMNSMEGIIVNSSDDMIQVTINSLKTPAXT

SEQ ID NO: 77789 - protein, 37 aa, Artificial Sequence; identical to SEQ ID NO: 27427
  Cyclic GFR-binding peptide
  MOD_RES (32), (33): Xaa is C or S

SEQ ID NO: 77790 - protein, 39 aa, Artificial Sequence; identical to SEQ ID NO: 27428
  Cyclic GFR-binding peptide
  MOD_RES (2), (34), (35): Xaa is C or S

SEQ ID NO: 77791 - protein, 36 aa, Artificial Sequence; identical to SEQ ID NO: 27432
  Cyclic GFR-binding peptide
  MOD_RES (36), (36): Xaa is C or S

SEQ ID NO: 77792 - protein, 38 aa, Artificial Sequence; identical to SEQ ID NO: 27431
  Cyclic GFR-binding peptide
  MOD_RES (36), (36): Xaa is C or S

SEQ ID NO: 77793 - protein, 35 aa, Artificial Sequence; identical to SEQ ID NO: 27433
  Cyclic GFR-binding peptide

SEQ ID NO: 77794 - protein, 33 aa, Artificial Sequence; identical to SEQ ID NO: 27438
  Cyclic GFR-binding peptide
  MOD_RES (1), (33): Xaa is C or S

SEQ ID NO: 77795 - protein, 27 aa, Artificial Sequence
  Cyclic GFR-binding peptide
IMVTAKKIKPTKGIIKRIQVPRLDQSV

SEQ ID NO: 77796 - protein, 30 aa, Artificial Sequence
  Cyclic GFR-binding peptide
  MOD_RES (2), (4): Xaa is C or S
RXGXGEVVMDVTAKKVVKENEDIKRMQVPR

SEQ ID NO: 77797 - protein, 33 aa, Artificial Sequence
  Cyclic GFR-binding peptide
  MOD_RES (29), (30): Xaa is C or S
VIMVTAKKIKPTKGIIKRIQVPRLDQSVXXPSA

SEQ ID NO: 77798 - protein, 31 aa, Artificial Sequence
  Cyclic GFR-binding peptide
  MOD_RES (30), (31): Xaa is C or S
VVMESMEGIVVKDYEDMIQMTINSLETPVXX

SEQ ID NO: 77799 - protein, 36 aa, Artificial Sequence; identical to SEQ ID NO: 27443
  Cyclic GFR-binding peptide
  MOD_RES (32), (33): Xaa is C or S

SEQ ID NO: 77800 - protein, 26 aa, Artificial Sequence
  Cyclic GFR-binding peptide
  MOD_RES (26), (26): Xaa is C or S
SMEGIIVNSSDDMIQVTINSLQTPAX

SEQ ID NO: 77801 - protein, 36 aa, Artificial Sequence; identical to SEQ ID NO: 27447
  Cyclic GFR-binding peptide
  MOD_RES (1), (3), (34), (35): Xaa is C or S

SEQ ID NO: 77802 - protein, 30 aa, Artificial Sequence
  Cyclic GFR-binding peptide
  MOD_RES (2), (4): Xaa is C or S
RXGXGEVVMEVQVEKVVKDYEDVKAMKVSR

SEQ ID NO: 77803 - protein, 31 aa, Artificial Sequence
  Cyclic GFR-binding peptide
  MOD_RES (1), (1): Xaa is C or S
XGEVVMDVTAKKVVKENEDIKRMQVPRLETP

SEQ ID NO: 77804 - protein, 32 aa, Artificial Sequence
  Cyclic GFR-binding peptide
  MOD_RES (29), (29): Xaa is C or S
FNSLQEHQGQHPKIRYYLMTLPEEETPVXELG

SEQ ID NO: 77805 - protein, 27 aa, Artificial Sequence
  Cyclic GFR-binding peptide
  MOD_RES (26), (27): Xaa is C or S
SMEGIVVKENEDMIQMTINSLETPVXX

SEQ ID NO: 77806 - protein, 26 aa, Artificial Sequence
  Cyclic GFR-binding peptide
TNSLQEFIPKKRVIEYYLVTLPELQV

SEQ ID NO: 77807 - protein, 32 aa, Artificial Sequence
  Cyclic GFR-binding peptide
  MOD_RES (30), (31): Xaa is C or S
VVMNSMEGIIVNSSDDMIQVTINSLKTPAXXP

SEQ ID NO: 77808 - protein, 36 aa, Artificial Sequence
  Cyclic GFR-binding peptide
  MOD_RES (32), (32): Xaa is C or S
LTNSLQEFIPKKRVIEYYLVTLPELQVQTPRXQVNR

SEQ ID NO: 77809 - protein, 34 aa, Artificial Sequence
  Cyclic GFR-binding peptide
  MOD_RES (34), (34): Xaa is C or S
EELRNSLQELKPKKRVYEYYLVTLPEHHVRSPQX

SEQ ID NO: 77810 - protein, 28 aa, Artificial Sequence
  Cyclic GFR-binding peptide
RVVMNVTAKKIVNSSDDIKRVQVPRLQT

SEQ ID NO: 77811 - protein, 36 aa, Artificial Sequence; identical to SEQ ID NO: 27459
  Cyclic GFR-binding peptide
  MOD_RES (2), (4), (36): Xaa is C or S

SEQ ID NO: 77812 - protein, 23 aa, Artificial Sequence
  Cyclic GFR-binding peptide
VVMSMEGIVKPTRGVMIQITINS

SEQ ID NO: 77813 - protein, 32 aa, Artificial Sequence
  Cyclic GFR-binding peptide
  MOD_RES (29), (30): Xaa is C or S
VMNVQVEKIVNSSDDVKAVKVSRLKTPAXXPK

SEQ ID NO: 77814 - protein, 26 aa, Artificial Sequence
  Cyclic GFR-binding peptide
NVQVEKIVNSSDDVKAVKVSRLQTPA

SEQ ID NO: 77815 - protein, 31 aa, Artificial Sequence
  Cyclic GFR-binding peptide
  MOD_RES (2), (4): Xaa is C or S
SXKXSRVIMSMEGIVKPKRGVMIQITINSLA

SEQ ID NO: 77816 - protein, 36 aa, Artificial Sequence
  Cyclic GFR-binding peptide
  MOD_RES (30), (31): Xaa is C or S
VVMDSMEGIVVKENEDMIQMTINSLETPVXXAKPIK

SEQ ID NO: 77817 - protein, 33 aa, Artificial Sequence; identical to SEQ ID NO: 27466
  Cyclic GFR-binding peptide

SEQ ID NO: 77818 - protein, 30 aa, Artificial Sequence
  Cyclic GFR-binding peptide
  MOD_RES (2), (2): Xaa is C or S
EXKNHQLFNSLQEHQGQHPKIRYYLMTLPE

SEQ ID NO: 77819 - protein, 36 aa, Artificial Sequence; identical to SEQ ID NO: 27468
  Cyclic GFR-binding peptide
  MOD_RES (1), (35): Xaa is C or S

SEQ ID NO: 77820 - protein, 32 aa, Artificial Sequence; identical to SEQ ID NO: 27469
  Cyclic GFR-binding peptide
  MOD_RES (1), (32): Xaa is C or S

SEQ ID NO: 77821 - protein, 33 aa, Artificial Sequence; identical to SEQ ID NO: 27471
  Cyclic GFR-binding peptide
  MOD_RES (31), (32): Xaa is C or S

SEQ ID NO: 77822 - protein, 33 aa, Artificial Sequence; identical to SEQ ID NO: 27470
  Cyclic GFR-binding peptide

SEQ ID NO: 77823 - protein, 34 aa, Artificial Sequence; identical to SEQ ID NO: 27475
  Cyclic GFR-binding peptide
  MOD_RES (2), (34): Xaa is C or S

SEQ ID NO: 77824 - protein, 29 aa, Artificial Sequence
  Cyclic GFR-binding peptide
  MOD_RES (2), (4): Xaa is C or S
SXKXSKVVMSMEGIVKPTRGVMIQITINS

SEQ ID NO: 77825 - protein, 29 aa, Artificial Sequence
  Cyclic GFR-binding peptide
VVMNVQVEKIVNSSDDVKAVKVSRLKTPA

SEQ ID NO: 77826 - protein, 26 aa, Artificial Sequence
  Cyclic GFR-binding peptide
KVVMSMEGIVKPTRGVMIQITINSLD

SEQ ID NO: 77827 - protein, 41 aa, Artificial Sequence; identical to SEQ ID NO: 27478
  Cyclic GFR-binding peptide
  MOD_RES (2), (4), (36), (37): Xaa is C or S

SEQ ID NO: 77828 - protein, 31 aa, Artificial Sequence
  Cyclic GFR-binding peptide
  MOD_RES (2), (4): Xaa is C or S
RXGXGEVVMDVQVEKVVKENEDVKAMKVSRL

SEQ ID NO: 77829 - protein, 23 aa, Artificial Sequence
  Cyclic GFR-binding peptide
NSLQEFIPKKRVIEYYVVPLPEL

SEQ ID NO: 77830 - protein, 41 aa, Artificial Sequence; identical to SEQ ID NO: 27484
  Cyclic GFR-binding peptide
  MOD_RES (2), (4), (36), (37): Xaa is C or S

SEQ ID NO: 77831 - protein, 36 aa, Artificial Sequence; identical to SEQ ID NO: 27485
  Cyclic GFR-binding peptide
  MOD_RES (2), (33), (34): Xaa is C or S

SEQ ID NO: 77832 - protein, 35 aa, Artificial Sequence; identical to SEQ ID NO: 27486
  Cyclic GFR-binding peptide
  MOD_RES (31), (32): Xaa is C or S

SEQ ID NO: 77833 - protein, 27 aa, Artificial Sequence
  Cyclic GFR-binding peptide
VIMVTAKKVKPKRGVIKRIQVPRLAQP

SEQ ID NO: 77834 - protein, 36 aa, Artificial Sequence; identical to SEQ ID NO: 27491
  Cyclic GFR-binding peptide
  MOD_RES (32), (33): Xaa is C or S

SEQ ID NO: 77835 - protein, 38 aa, Artificial Sequence; identical to SEQ ID NO: 27497
  Cyclic GFR-binding peptide
  MOD_RES (1), (3), (35), (36): Xaa is C or S

SEQ ID NO: 77836 - protein, 31 aa, Artificial Sequence
  Cyclic GFR-binding peptide
AAAAAAAAANSLQELKPKKRVYEYYLVTLPE

SEQ ID NO: 77837 - protein, 27 aa, Artificial Sequence
  Cyclic GFR-binding peptide
NSLQELKPKKRVYEYYVVPLPEHHVRS

SEQ ID NO: 77838 - protein, 34 aa, Artificial Sequence; identical to SEQ ID NO: 27500
  Cyclic GFR-binding peptide
  MOD_RES (31), (32): Xaa is C or S

SEQ ID NO: 77839 - protein, 36 aa, Artificial Sequence; identical to SEQ ID NO: 27501
  Cyclic GFR-binding peptide
  MOD_RES (1), (3), (34), (35): Xaa is C or S

SEQ ID NO: 77840 - protein, 44 aa, Artificial Sequence; identical to SEQ ID NO: 27503
  Cyclic GFR-binding peptide
  MOD_RES (2), (4), (38): Xaa is C or S

SEQ ID NO: 77841 - protein, 36 aa, Artificial Sequence; identical to SEQ ID NO: 27507
  Cyclic GFR-binding peptide
  MOD_RES (1), (3), (34), (35): Xaa is C or S

SEQ ID NO: 77842 - protein, 38 aa, Artificial Sequence; identical to SEQ ID NO: 27510
  Cyclic GFR-binding peptide
  MOD_RES (32), (33): Xaa is C or S

SEQ ID NO: 77843 - protein, 30 aa, Artificial Sequence
  Cyclic GFR-binding peptide
  MOD_RES (30), (30): Xaa is C or S
VVMEVTAKKVVKDYEDIKRMQVPRLETPVX

SEQ ID NO: 77844 - protein, 28 aa, Artificial Sequence
  Cyclic GFR-binding peptide
KNHQLFNSLQEHQGQHPKIRYYVMPLPE

SEQ ID NO: 77845 - protein, 24 aa, Artificial Sequence
  Cyclic GFR-binding peptide
MEVQVEKVVKDYEDVKAMKVSRLE

SEQ ID NO: 77846 - protein, 33 aa, Artificial Sequence
  Cyclic GFR-binding peptide
  MOD_RES (30), (30): Xaa is C or S
NSLQEFIPKKRVIEYYVVPLPELQVQTPRXQVN

SEQ ID NO: 77847 - protein, 32 aa, Artificial Sequence; identical to SEQ ID NO: 27516
  Cyclic GFR-binding peptide
  MOD_RES (31), (32): Xaa is C or S

SEQ ID NO: 77848 - protein, 36 aa, Artificial Sequence; identical to SEQ ID NO: 27518
  Cyclic GFR-binding peptide
  MOD_RES (32), (33): Xaa is C or S

SEQ ID NO: 77849 - protein, 30 aa, Artificial Sequence
  Cyclic GFR-binding peptide
  MOD_RES (2), (4): Xaa is C or S
HXGXSRVVMNVTAKKIVNSSDDIKRVQVPR

SEQ ID NO: 77850 - protein, 34 aa, Artificial Sequence; identical to SEQ ID NO: 27521
  Cyclic GFR-binding peptide

SEQ ID NO: 77851 - protein, 34 aa, Artificial Sequence; identical to SEQ ID NO: 27524
  Cyclic GFR-binding peptide
  MOD_RES (1), (33), (34): Xaa is C or S

SEQ ID NO: 77852 - protein, 33 aa, Artificial Sequence; identical to SEQ ID NO: 27523
  Cyclic GFR-binding peptide
  MOD_RES (31), (32): Xaa is C or S

SEQ ID NO: 77853 - protein, 29 aa, Artificial Sequence
  Cyclic GFR-binding peptide
KVVMVTAKKVKPTRGVIKRIQVPRLDQPV

SEQ ID NO: 77854 - protein, 33 aa, Artificial Sequence
  Cyclic GFR-binding peptide
  MOD_RES (27), (28): Xaa is C or S
NSMEGIIVNSSDDMIQVTINSLKTPAXXPKPVY

SEQ ID NO: 77855 - protein, 34 aa, Artificial Sequence
  Cyclic GFR-binding peptide
  MOD_RES (29), (30): Xaa is C or S
VIMVTAKKVKPKRGVIKRIQVPRLAQPVXXPAAS

SEQ ID NO: 77856 - protein, 39 aa, Artificial Sequence; identical to SEQ ID NO: 27529
  Cyclic GFR-binding peptide
  MOD_RES (1), (3), (35), (36): Xaa is C or S

SEQ ID NO: 77857 - protein, 30 aa, Artificial Sequence
  Cyclic GFR-binding peptide
LRNSLQELKPKKRVYEYYVVPLPEHHVRSP

SEQ ID NO: 77858 - protein, 42 aa, Artificial Sequence; identical to SEQ ID NO: 27530
  Cyclic GFR-binding peptide
  MOD_RES (1), (3), (37): Xaa is C or S

SEQ ID NO: 77859 - protein, 32 aa, Artificial Sequence
  Cyclic GFR-binding peptide
  MOD_RES (1), (1): Xaa is C or S
XKNHQLFNSLQEHQGQHPKIRYYLMTLPEEET

SEQ ID NO: 77860 - protein, 28 aa, Artificial Sequence
  Cyclic GFR-binding peptide
VVMNVQVEKIVNSSDDVKAVKVSRLKTP

SEQ ID NO: 77861 - protein, 31 aa, Artificial Sequence
  Cyclic GFR-binding peptide
  MOD_RES (2), (4): Xaa is C or S
SXKXSKVIMVTAKKIKPTKGIIKRIQVPRLD

SEQ ID NO: 77862 - protein, 35 aa, Artificial Sequence; identical to SEQ ID NO: 27539
  Cyclic GFR-binding peptide
  MOD_RES (1), (3), (35): Xaa is C or S

SEQ ID NO: 77863 - protein, 40 aa, Artificial Sequence; identical to SEQ ID NO: 27540
  Cyclic GFR-binding peptide
  MOD_RES (2), (39): Xaa is C or S

SEQ ID NO: 77864 - protein, 27 aa, Artificial Sequence
  Cyclic GFR-binding peptide
  MOD_RES (26), (27): Xaa is C or S
SMEGIIKPTKGIMIQITINSLDQSVXX

SEQ ID NO: 77865 - protein, 31 aa, Artificial Sequence
  Cyclic GFR-binding peptide
ELHEELRNSLQELKPKKRVYEYYVVPLPEHH

SEQ ID NO: 77866 - protein, 24 aa, Artificial Sequence
  Cyclic GFR-binding peptide
SMEGIVKPTRGVMIQITINSLDQP

SEQ ID NO: 77867 - protein, 36 aa, Artificial Sequence; identical to SEQ ID NO: 27549
  Cyclic GFR-binding peptide
  MOD_RES (2), (34), (35): Xaa is C or S

SEQ ID NO: 77868 - protein, 30 aa, Artificial Sequence
  Cyclic GFR-binding peptide
  MOD_RES (30), (30): Xaa is C or S
VVMDSMEGIVVKENEDMIQMTINSLETPVX

SEQ ID NO: 77869 - protein, 27 aa, Artificial Sequence
  Cyclic GFR-binding peptide
NSLQEFIPKKRVIEYYLVTLPELQVQT

SEQ ID NO: 77870 - protein, 23 aa, Artificial Sequence
  Cyclic GFR-binding peptide
MVTAKKVKPTRGVIKRIQVPRLD

SEQ ID NO: 77871 - protein, 28 aa, Artificial Sequence
  Cyclic GFR-binding peptide
RVVMNSMEGIIVNSSDDMIQVTINSLQT

SEQ ID NO: 77872 - protein, 35 aa, Artificial Sequence; identical to SEQ ID NO: 27556
  Cyclic GFR-binding peptide
  MOD_RES (2), (4), (35): Xaa is C or S

SEQ ID NO: 77873 - protein, 33 aa, Artificial Sequence
  Cyclic GFR-binding peptide
  MOD_RES (29), (30): Xaa is C or S
VMNVQVEKIVNSSDDVKAVKVSRLKTPAXXPKP

SEQ ID NO: 77874 - protein, 42 aa, Artificial Sequence; identical to SEQ ID NO: 27563
  Cyclic GFR-binding peptide
  MOD_RES (2), (4), (36), (37): Xaa is C or S

SEQ ID NO: 77875 - protein, 29 aa, Artificial Sequence
  Cyclic GFR-binding peptide
  MOD_RES (29), (29): Xaa is C or S
VMEVTAKKVVKDYEDIKRMQVPRLETPVX

SEQ ID NO: 77876 - protein, 37 aa, Artificial Sequence; identical to SEQ ID NO: 27565
  Cyclic GFR-binding peptide
  MOD_RES (2), (4), (35), (36): Xaa is C or S

SEQ ID NO: 77877 - protein, 36 aa, Artificial Sequence; identical to SEQ ID NO: 27566
  Cyclic GFR-binding peptide
  MOD_RES (31), (32): Xaa is C or S

SEQ ID NO: 77878 - protein, 35 aa, Artificial Sequence
  Cyclic GFR-binding peptide
  MOD_RES (30), (31): Xaa is C or S
KVVMSMEGIVKPTRGVMIQITINSLDQPVXXPSAS

SEQ ID NO: 77879 - protein, 31 aa, Artificial Sequence; identical to SEQ ID NO: 27568
  Cyclic GFR-binding peptide
  MOD_RES (1), (1): Xaa is C or S

SEQ ID NO: 77880 - protein, 33 aa, Artificial Sequence
  Cyclic GFR-binding peptide
  MOD_RES (29), (30): Xaa is C or S
VMDVQVEKVVKENEDVKAMKVSRLETPVXXAKP

SEQ ID NO: 77881 - protein, 29 aa, Artificial Sequence
  Cyclic GFR-binding peptide
  MOD_RES (27), (28): Xaa is C or S
EVQVEKVVKDYEDVKAMKVSRLETPVXXA

SEQ ID NO: 77882 - protein, 29 aa, Artificial Sequence
  Cyclic GFR-binding peptide
AAAAAAAAASMEGIVKPKRGVMIQITINS

SEQ ID NO: 77883 - protein, 39 aa, Artificial Sequence; identical to SEQ ID NO: 27573
  Cyclic GFR-binding peptide
  MOD_RES (35), (35): Xaa is C or S

SEQ ID NO: 77884 - protein, 30 aa, Artificial Sequence
  Cyclic GFR-binding peptide
  MOD_RES (29), (30): Xaa is C or S
VMNVTAKKIVNSSDDIKRVQVPRLQTPAXX

SEQ ID NO: 77885 - protein, 26 aa, Artificial Sequence
  Cyclic GFR-binding peptide
  MOD_RES (1), (1): Xaa is C or S
XSKVVMVQVEKVKPTRGVVKAIKVSR

SEQ ID NO: 77886 - protein, 33 aa, Artificial Sequence; identical to SEQ ID NO: 27575
  Cyclic GFR-binding peptide
  MOD_RES (1), (3): Xaa is C or S

SEQ ID NO: 77887 - protein, 37 aa, Artificial Sequence; identical to SEQ ID NO: 27576
  Cyclic GFR-binding peptide
  MOD_RES (2), (4), (36), (37): Xaa is C or S

SEQ ID NO: 77888 - protein, 37 aa, Artificial Sequence; identical to SEQ ID NO: 27578
  Cyclic GFR-binding peptide
  MOD_RES (1), (3), (35), (36): Xaa is C or S

SEQ ID NO: 77889 - protein, 27 aa, Artificial Sequence
  Cyclic GFR-binding peptide
SRVIMSMEGIVKPKRGVMIQITINSLA

SEQ ID NO: 77890 - protein, 34 aa, Artificial Sequence
  Cyclic GFR-binding peptide
  MOD_RES (28), (29): Xaa is C or S
IMVQVEKIKPTKGIVKAIKVSRLDQSVXXPSASA

SEQ ID NO: 77891 - protein, 33 aa, Artificial Sequence; identical to SEQ ID NO: 27581
  Cyclic GFR-binding peptide
  MOD_RES (32), (33): Xaa is C or S

SEQ ID NO: 77892 - protein, 33 aa, Artificial Sequence
  Cyclic GFR-binding peptide
  MOD_RES (28), (29): Xaa is C or S
MNVTAKKIVNSSDDIKRVQVPRLKTPAXXPKPV

SEQ ID NO: 77893 - protein, 27 aa, Artificial Sequence
  Cyclic GFR-binding peptide
VVMNVTAKKIVNSSDDIKRVQVPRLQT

SEQ ID NO: 77894 - protein, 25 aa, Artificial Sequence
  Cyclic GFR-binding peptide
VQVEKIVNSSDDVKAVKVSRLQTPA

SEQ ID NO: 77895 - protein, 29 aa, Artificial Sequence
  Cyclic GFR-binding peptide
  MOD_RES (2), (2): Xaa is C or S
GXGEVVMEVTAKKVVKDYEDIKRMQVPRL

SEQ ID NO: 77896 - protein, 22 aa, Artificial Sequence
  Cyclic GFR-binding peptide
MVTAKKVKPTRGVIKRIQVPRL

SEQ ID NO: 77897 - protein, 32 aa, Artificial Sequence
  Cyclic GFR-binding peptide
  MOD_RES (27), (28): Xaa is C or S
NVQVEKIVNSSDDVKAVKVSRLQTPAXXPKPV

SEQ ID NO: 77898 - protein, 31 aa, Artificial Sequence; identical to SEQ ID NO: 27587
  Cyclic GFR-binding peptide

SEQ ID NO: 77899 - protein, 39 aa, Artificial Sequence; identical to SEQ ID NO: 27588
  Cyclic GFR-binding peptide
  MOD_RES (2), (4), (36), (37): Xaa is C or S

SEQ ID NO: 77900 - protein, 28 aa, Artificial Sequence
  Cyclic GFR-binding peptide
KVVMSMEGIVKPTRGVMIQITINSLDQP

SEQ ID NO: 77901 - protein, 41 aa, Artificial Sequence; identical to SEQ ID NO: 27594
  Cyclic GFR-binding peptide
  MOD_RES (1), (3), (37): Xaa is C or S

SEQ ID NO: 77902 - protein, 23 aa, Artificial Sequence
  Cyclic GFR-binding peptide
EVQVEKVVKDYEDVKAMKVSRLE

SEQ ID NO: 77903 - protein, 41 aa, Artificial Sequence; identical to SEQ ID NO: 27598
  Cyclic GFR-binding peptide
  MOD_RES (1), (35): Xaa is C or S

SEQ ID NO: 77904 - protein, 35 aa, Artificial Sequence; identical to SEQ ID NO: 27599
  Cyclic GFR-binding peptide
  MOD_RES (1), (3), (35): Xaa is C or S

SEQ ID NO: 77905 - protein, 30 aa, Artificial Sequence
  Cyclic GFR-binding peptide
  MOD_RES (30), (30): Xaa is C or S
NSLQEFIPKKRVIEYYLVTLPELQVQTPRX

SEQ ID NO: 77906 - protein, 31 aa, Artificial Sequence; identical to SEQ ID NO: 27604
  Cyclic GFR-binding peptide

SEQ ID NO: 77907 - protein, 26 aa, Artificial Sequence
  Cyclic GFR-binding peptide
VMNVQVEKIVNSSDDVKAVKVSRLQT

SEQ ID NO: 77908 - protein, 33 aa, Artificial Sequence; identical to SEQ ID NO: 27606
  Cyclic GFR-binding peptide

SEQ ID NO: 77909 - protein, 33 aa, Artificial Sequence
  Cyclic GFR-binding peptide
  MOD_RES (1), (1): Xaa is C or S
XELHEELRNSLQELKPKKRVYEYYLVTLPEHHV

SEQ ID NO: 77910 - protein, 37 aa, Artificial Sequence; identical to SEQ ID NO: 27609
  Cyclic GFR-binding peptide
  MOD_RES (31), (32): Xaa is C or S

SEQ ID NO: 77911 - protein, 35 aa, Artificial Sequence; identical to SEQ ID NO: 27611
  Cyclic GFR-binding peptide

SEQ ID NO: 77912 - protein, 26 aa, Artificial Sequence
  Cyclic GFR-binding peptide
  MOD_RES (26), (26): Xaa is C or S
VQVEKVVKENEDVKAMKVSRLETPVX

SEQ ID NO: 77913 - protein, 30 aa, Artificial Sequence
  Cyclic GFR-binding peptide
  MOD_RES (29), (30): Xaa is C or S
VMNVQVEKIVNSSDDVKAVKVSRLKTPAXX

SEQ ID NO: 77914 - protein, 34 aa, Artificial Sequence
  Cyclic GFR-binding peptide
  MOD_RES (30), (30): Xaa is C or S
VVMNVTAKKIVNSSDDIKRVQVPRLKTPAXTPKT

SEQ ID NO: 77915 - protein, 34 aa, Artificial Sequence
  Cyclic GFR-binding peptide
  MOD_RES (28), (29): Xaa is C or S
VMVQVEKVKPTRGVVKAIKVSRLDQPVXXPSASA

SEQ ID NO: 77916 - protein, 22 aa, Artificial Sequence
  Cyclic GFR-binding peptide
MVQVEKIKPTKGIVKAIKVSRL

SEQ ID NO: 77917 - protein, 32 aa, Artificial Sequence; identical to SEQ ID NO: 27617
  Cyclic GFR-binding peptide
  MOD_RES (2), (2): Xaa is C or S

SEQ ID NO: 77918 - protein, 27 aa, Artificial Sequence
  Cyclic GFR-binding peptide
SKVVMVQVEKVKPTRGVVKAIKVSRLD

SEQ ID NO: 77919 - protein, 36 aa, Artificial Sequence
  Cyclic GFR-binding peptide
  MOD_RES (2), (4): Xaa is C or S
EXKXALHDELTNSLQEFIPKKRVIEYYLVTLPELQV

SEQ ID NO: 77920 - protein, 28 aa, Artificial Sequence
  Cyclic GFR-binding peptide
SKVVMSMEGIVKPTRGVMIQITINSLDQ

SEQ ID NO: 77921 - protein, 35 aa, Artificial Sequence
  Cyclic GFR-binding peptide
  MOD_RES (29), (30): Xaa is C or S
VIMVTAKKVKPKRGVIKRIQVPRLAQPVXXPAASA

SEQ ID NO: 77922 - protein, 28 aa, Artificial Sequence
  Cyclic GFR-binding peptide
  MOD_RES (26), (27): Xaa is C or S
VTAKKVKPKRGVIKRIQVPRLAQPVXXP

SEQ ID NO: 77923 - protein, 37 aa, Artificial Sequence; identical to SEQ ID NO: 27622
  Cyclic GFR-binding peptide
  MOD_RES (31), (32): Xaa is C or S

SEQ ID NO: 77924 - protein, 30 aa, Artificial Sequence
  Cyclic GFR-binding peptide
  MOD_RES (30), (30): Xaa is C or S
KVVMVTAKKVKPTRGVIKRIQVPRLDQPVX

SEQ ID NO: 77925 - protein, 34 aa, Artificial Sequence; identical to SEQ ID NO: 27625
  Cyclic GFR-binding peptide
  MOD_RES (1), (32), (33): Xaa is C or S

SEQ ID NO: 77926 - protein, 28 aa, Artificial Sequence
  Cyclic GFR-binding peptide
EELRNSLQELKPKKRVYEYYVVPLPEHH

SEQ ID NO: 77927 - protein, 39 aa, Artificial Sequence; identical to SEQ ID NO: 27629
  Cyclic GFR-binding peptide
  MOD_RES (1), (33): Xaa is C or S

SEQ ID NO: 77928 - protein, 25 aa, Artificial Sequence
  Cyclic GFR-binding peptide
MNSMEGIIVNSSDDMIQVTINSLQT

SEQ ID NO: 77929 - protein, 31 aa, Artificial Sequence; identical to SEQ ID NO: 27631
  Cyclic GFR-binding peptide

SEQ ID NO: 77930 - protein, 29 aa, Artificial Sequence
  Cyclic GFR-binding peptide
AAAAAAAAASMEGIVVKENEDMIQMTINS

SEQ ID NO: 77931 - protein, 25 aa, Artificial Sequence
  Cyclic GFR-binding peptide
NSMEGIIVNSSDDMIQVTINSLQTP

SEQ ID NO: 77932 - protein, 39 aa, Artificial Sequence; identical to SEQ ID NO: 27635
  Cyclic GFR-binding peptide
  MOD_RES (2), (39): Xaa is C or S

SEQ ID NO: 77933 - protein, 34 aa, Artificial Sequence
  Cyclic GFR-binding peptide
  MOD_RES (28), (29): Xaa is C or S
IMVTAKKVKPKRGVIKRIQVPRLAQPVXXPAASA

SEQ ID NO: 77934 - protein, 20 aa, Artificial Sequence
  Cyclic GFR-binding peptide
SMEGIIKPTKGIMIQITINS

SEQ ID NO: 77935 - protein, 38 aa, Artificial Sequence
  Cyclic GFR-binding peptide
  MOD_RES (34), (34): Xaa is C or S
EELRNSLQELKPKKRVYEYYVVPLPEHHVRSPQXKVSS

SEQ ID NO: 77936 - protein, 26 aa, Artificial Sequence
  Cyclic GFR-binding peptide
VVMDSMEGIVVKENEDMIQMTINSLE

SEQ ID NO: 77937 - protein, 32 aa, Artificial Sequence
  Cyclic GFR-binding peptide
  MOD_RES (28), (29): Xaa is C or S
MEVTAKKVVKDYEDIKRMQVPRLETPVXXAKP

SEQ ID NO: 77938 - protein, 29 aa, Artificial Sequence
  Cyclic GFR-binding peptide
  MOD_RES (29), (29): Xaa is C or S
VVMSMEGIVKPTRGVMIQITINSLDQPVX

SEQ ID NO: 77939 - protein, 35 aa, Artificial Sequence
  Cyclic GFR-binding peptide
  MOD_RES (30), (30): Xaa is C or S
VVMNVTAKKIVNSSDDIKRVQVPRLKTPAXTPKTV

SEQ ID NO: 77940 - protein, 25 aa, Artificial Sequence
  Cyclic GFR-binding peptide
VMDVQVEKVVKENEDVKAMKVSRLE

SEQ ID NO: 77941 - protein, 39 aa, Artificial Sequence; identical to SEQ ID NO: 27646
  Cyclic GFR-binding peptide
  MOD_RES (2), (34), (35): Xaa is C or S

SEQ ID NO: 77942 - protein, 38 aa, Artificial Sequence; identical to SEQ ID NO: 27648
  Cyclic GFR-binding peptide
  MOD_RES (2), (34), (35): Xaa is C or S

SEQ ID NO: 77943 - protein, 36 aa, Artificial Sequence
  Cyclic GFR-binding peptide
  MOD_RES (30), (31): Xaa is C or S
KVIMVQVEKIKPTKGIVKAIKVSRLDQSVXXPSASA

SEQ ID NO: 77944 - protein, 35 aa, Artificial Sequence; identical to SEQ ID NO: 27651
  Cyclic GFR-binding peptide
  MOD_RES (33), (33): Xaa is C or S

SEQ ID NO: 77945 - protein, 29 aa, Artificial Sequence
  Cyclic GFR-binding peptide
ELTNSLQEFIPKKRVIEYYVVPLPELQVQ

SEQ ID NO: 77946 - protein, 35 aa, Artificial Sequence; identical to SEQ ID NO: 27654
  Cyclic GFR-binding peptide
  MOD_RES (2), (4): Xaa is C or S

SEQ ID NO: 77947 - protein, 28 aa, Artificial Sequence
  Cyclic GFR-binding peptide
  MOD_RES (27), (28): Xaa is C or S
MVQVEKVKPKRGVVKAIKVSRLAQPVXX

SEQ ID NO: 77948 - protein, 23 aa, Artificial Sequence
  Cyclic GFR-binding peptide
SMEGIIVNSSDDMIQVTINSLQT

SEQ ID NO: 77949 - protein, 28 aa, Artificial Sequence
  Cyclic GFR-binding peptide
EVVMESMEGIVVKDYEDMIQMTINSLET

SEQ ID NO: 77950 - protein, 21 aa, Artificial Sequence
  Cyclic GFR-binding peptide
VQVEKVKPTRGVVKAIKVSRL

SEQ ID NO: 77951 - protein, 35 aa, Artificial Sequence; identical to SEQ ID NO: 27662
  Cyclic GFR-binding peptide
  MOD_RES (1), (3), (35): Xaa is C or S

SEQ ID NO: 77952 - protein, 28 aa, Artificial Sequence
  Cyclic GFR-binding peptide
  MOD_RES (28), (28): Xaa is C or S
NSLQEHQGQHPKIRYYVMPLPEEETPVX

SEQ ID NO: 77953 - protein, 24 aa, Artificial Sequence
  Cyclic GFR-binding peptide
FNSLQEHQGQHPKIRYYLMTLPEE

SEQ ID NO: 77954 - protein, 31 aa, Artificial Sequence
  Cyclic GFR-binding peptide
ELTNSLQEFIPKKRVIEYYLVTLPELQVQTP

SEQ ID NO: 77955 - protein, 33 aa, Artificial Sequence
  Cyclic GFR-binding peptide
  MOD_RES (30), (31): Xaa is C or S
KVIMVTAKKIKPTKGIIKRIQVPRLDQSVXXPS

SEQ ID NO: 77956 - protein, 30 aa, Artificial Sequence
  Cyclic GFR-binding peptide
  MOD_RES (27), (28): Xaa is C or S
NVTAKKIVNSSDDIKRVQVPRLQTPAXXPK

SEQ ID NO: 77957 - protein, 37 aa, Artificial Sequence; identical to SEQ ID NO: 27665
  Cyclic GFR-binding peptide
  MOD_RES (2), (33), (34): Xaa is C or S

SEQ ID NO: 77958 - protein, 38 aa, Artificial Sequence; identical to SEQ ID NO: 27668
  Cyclic GFR-binding peptide
  MOD_RES (32), (32): Xaa is C or S

SEQ ID NO: 77959 - protein, 33 aa, Artificial Sequence
  Cyclic GFR-binding peptide
  MOD_RES (30), (31): Xaa is C or S
RVIMVQVEKVKPKRGVVKAIKVSRLAQPVXXPA

SEQ ID NO: 77960 - protein, 42 aa, Artificial Sequence; identical to SEQ ID NO: 27669
  Cyclic GFR-binding peptide
  MOD_RES (2), (4), (41): Xaa is C or S

SEQ ID NO: 77961 - protein, 33 aa, Artificial Sequence
  Cyclic GFR-binding peptide
  MOD_RES (30), (31): Xaa is C or S
VVMDSMEGIVVKENEDMIQMTINSLETPVXXAK

SEQ ID NO: 77962 - protein, 32 aa, Artificial Sequence
  Cyclic GFR-binding peptide
  MOD_RES (26), (27): Xaa is C or S
SMEGIVVKENEDMIQMTINSLETPVXXAKPIK

SEQ ID NO: 77963 - protein, 42 aa, Artificial Sequence; identical to SEQ ID NO: 27673
  Cyclic GFR-binding peptide
  MOD_RES (1), (3), (37): Xaa is C or S

SEQ ID NO: 77964 - protein, 23 aa, Artificial Sequence
  Cyclic GFR-binding peptide
NSLQELKPKKRVYEYYVVPLPEH

SEQ ID NO: 77965 - protein, 30 aa, Artificial Sequence
  Cyclic GFR-binding peptide
RNSLQELKPKKRVYEYYLVTLPEHHVRSPQ

SEQ ID NO: 77966 - protein, 32 aa, Artificial Sequence; identical to SEQ ID NO: 27676
  Cyclic GFR-binding peptide
  MOD_RES (31), (32): Xaa is C or S

SEQ ID NO: 77967 - protein, 36 aa, Artificial Sequence
  Cyclic GFR-binding peptide
  MOD_RES (30), (30): Xaa is C or S
VVMNVQVEKIVNSSDDVKAVKVSRLKTPAXTPKTVH

SEQ ID NO: 77968 - protein, 35 aa, Artificial Sequence
  Cyclic GFR-binding peptide
  MOD_RES (2), (2): Xaa is C or S
AXELHEELRNSLQELKPKKRVYEYYVVPLPEHHVR

SEQ ID NO: 77969 - protein, 35 aa, Artificial Sequence; identical to SEQ ID NO: 27678
  Cyclic GFR-binding peptide
  MOD_RES (2), (4): Xaa is C or S

SEQ ID NO: 77970 - protein, 36 aa, Artificial Sequence
  Cyclic GFR-binding peptide
  MOD_RES (1), (3): Xaa is C or S
XAXELHEELRNSLQELKPKKRVYEYYLVTLPEHHVR

SEQ ID NO: 77971 - protein, 22 aa, Artificial Sequence
  Cyclic GFR-binding peptide
VQVEKIVNSSDDVKAVKVSRLK

SEQ ID NO: 77972 - protein, 32 aa, Artificial Sequence
  Cyclic GFR-binding peptide
KNHQLFNSLQEHQGQHPKIRYYVMPLPEEETP

SEQ ID NO: 77973 - protein, 27 aa, Artificial Sequence
  Cyclic GFR-binding peptide
VVMVQVEKVKPTRGVVKAIKVSRLDQP

SEQ ID NO: 77974 - protein, 23 aa, Artificial Sequence
  Cyclic GFR-binding peptide
IMVTAKKIKPTKGIIKRIQVPRL

SEQ ID NO: 77975 - protein, 35 aa, Artificial Sequence; identical to SEQ ID NO: 27680
  Cyclic GFR-binding peptide
  MOD_RES (31), (32): Xaa is C or S

SEQ ID NO: 77976 - protein, 30 aa, Artificial Sequence
  Cyclic GFR-binding peptide
  MOD_RES (26), (27): Xaa is C or S
VTAKKVVKDYEDIKRMQVPRLETPVXXAKP

SEQ ID NO: 77977 - protein, 32 aa, Artificial Sequence
  Cyclic GFR-binding peptide
  MOD_RES (31), (31): Xaa is C or S
QLFNSLQEHQGQHPKIRYYLMTLPEEETPVXE

SEQ ID NO: 77978 - protein, 26 aa, Artificial Sequence
  Cyclic GFR-binding peptide
  MOD_RES (1), (1): Xaa is C or S
XSKVVMSMEGIVKPTRGVMIQITINS

SEQ ID NO: 77979 - protein, 41 aa, Artificial Sequence; identical to SEQ ID NO: 27686
  Cyclic GFR-binding peptide
  MOD_RES (2), (4), (35), (36): Xaa is C or S

SEQ ID NO: 77980 - protein, 29 aa, Artificial Sequence
  Cyclic GFR-binding peptide
  MOD_RES (1), (3): Xaa is C or S
XGXGEVVMEVTAKKVVKDYEDIKRMQVPR

SEQ ID NO: 77981 - protein, 25 aa, Artificial Sequence
  Cyclic GFR-binding peptide
IMVTAKKVKPKRGVIKRIQVPRLAQ

SEQ ID NO: 77982 - protein, 34 aa, Artificial Sequence
  Cyclic GFR-binding peptide
  MOD_RES (2), (4): Xaa is C or S
EXKXALHDELTNSLQEFIPKKRVIEYYLVTLPEL

SEQ ID NO: 77983 - protein, 31 aa, Artificial Sequence
  Cyclic GFR-binding peptide
  MOD_RES (2), (2): Xaa is C or S
AXELHEELRNSLQELKPKKRVYEYYLVTLPE

SEQ ID NO: 77984 - protein, 23 aa, Artificial Sequence
  Cyclic GFR-binding peptide
DVQVEKVVKENEDVKAMKVSRLE

SEQ ID NO: 77985 - protein, 36 aa, Artificial Sequence
  Cyclic GFR-binding peptide
  MOD_RES (30), (30): Xaa is C or S
LFNSLQEHQGQHPKIRYYVMPLPEEETPVXELGEDN

SEQ ID NO: 77986 - protein, 31 aa, Artificial Sequence; identical to SEQ ID NO: 27691
  Cyclic GFR-binding peptide
  MOD_RES (31), (31): Xaa is C or S

SEQ ID NO: 77987 - protein, 31 aa, Artificial Sequence
  Cyclic GFR-binding peptide
  MOD_RES (26), (27): Xaa is C or S
VQVEKIKPTKGIVKAIKVSRLDQSVXXPSAS

SEQ ID NO: 77988 - protein, 36 aa, Artificial Sequence; identical to SEQ ID NO: 27694
  Cyclic GFR-binding peptide
  MOD_RES (2), (4), (35), (36): Xaa is C or S

SEQ ID NO: 77989 - protein, 40 aa, Artificial Sequence; identical to SEQ ID NO: 27695
  Cyclic GFR-binding peptide
  MOD_RES (1), (3), (35), (36): Xaa is C or S

SEQ ID NO: 77990 - protein, 26 aa, Artificial Sequence
  Cyclic GFR-binding peptide
ELTNSLQEFIPKKRVIEYYVVPLPEL

SEQ ID NO: 77991 - protein, 29 aa, Artificial Sequence
  Cyclic GFR-binding peptide
HDELTNSLQEFIPKKRVIEYYLVTLPELQ

SEQ ID NO: 77992 - protein, 21 aa, Artificial Sequence
  Cyclic GFR-binding peptide
MSMEGIIKPTKGIMIQITINS

SEQ ID NO: 77993 - protein, 36 aa, Artificial Sequence; identical to SEQ ID NO: 27699
  Cyclic GFR-binding peptide
  MOD_RES (31), (32): Xaa is C or S

SEQ ID NO: 77994 - protein, 30 aa, Artificial Sequence
  Cyclic GFR-binding peptide
LTNSLQEFIPKKRVIEYYVVPLPELQVQTP

SEQ ID NO: 77995 - protein, 32 aa, Artificial Sequence
  Cyclic GFR-binding peptide
  MOD_RES (27), (28): Xaa is C or S
MVQVEKVKPKRGVVKAIKVSRLAQPVXXPAAS

SEQ ID NO: 77996 - protein, 26 aa, Artificial Sequence
  Cyclic GFR-binding peptide
  MOD_RES (1), (1): Xaa is C or S
XSRVIMVTAKKVKPKRGVIKRIQVPR

SEQ ID NO: 77997 - protein, 24 aa, Artificial Sequence
  Cyclic GFR-binding peptide
VMNSMEGIIVNSSDDMIQVTINSL

SEQ ID NO: 77998 - protein, 34 aa, Artificial Sequence; identical to SEQ ID NO: 27704
  Cyclic GFR-binding peptide
  MOD_RES (32), (33): Xaa is C or S

SEQ ID NO: 77999 - protein, 38 aa, Artificial Sequence; identical to SEQ ID NO: 27705
  Cyclic GFR-binding peptide
  MOD_RES (1), (33), (34): Xaa is C or S

SEQ ID NO: 78000 - protein, 30 aa, Artificial Sequence
  Cyclic GFR-binding peptide
  MOD_RES (27), (28): Xaa is C or S
NVQVEKIVNSSDDVKAVKVSRLKTPAXXPK

SEQ ID NO: 78001 - protein, 33 aa, Artificial Sequence
  Cyclic GFR-binding peptide
  MOD_RES (30), (30): Xaa is C or S
LFNSLQEHQGQHPKIRYYLMTLPEEETPVXELG

SEQ ID NO: 78002 - protein, 29 aa, Artificial Sequence
  Cyclic GFR-binding peptide
  MOD_RES (27), (28): Xaa is C or S
NSMEGIIVNSSDDMIQVTINSLQTPAXXP

SEQ ID NO: 78003 - protein, 26 aa, Artificial Sequence
  Cyclic GFR-binding peptide
GEVVMESMEGIVVKDYEDMIQMTINS

SEQ ID NO: 78004 - protein, 36 aa, Artificial Sequence; identical to SEQ ID NO: 27707
  Cyclic GFR-binding peptide
  MOD_RES (2), (36): Xaa is C or S

SEQ ID NO: 78005 - protein, 32 aa, Artificial Sequence; identical to SEQ ID NO: 27708
  Cyclic GFR-binding peptide
  MOD_RES (32), (32): Xaa is C or S

SEQ ID NO: 78006 - protein, 25 aa, Artificial Sequence
  Cyclic GFR-binding peptide
VVMVTAKKVKPTRGVIKRIQVPRLD

SEQ ID NO: 78007 - protein, 29 aa, Artificial Sequence
  Cyclic GFR-binding peptide
AAAAAAAAASMEGIIKPTKGIMIQITINS

SEQ ID NO: 78008 - protein, 35 aa, Artificial Sequence
  Cyclic GFR-binding peptide
  MOD_RES (29), (30): Xaa is C or S
VMDVQVEKVVKENEDVKAMKVSRLETPVXXAKPIK

SEQ ID NO: 78009 - protein, 36 aa, Artificial Sequence
  Cyclic GFR-binding peptide
  MOD_RES (30), (30): Xaa is C or S
LFNSLQEHQGQHPKIRYYLMTLPEEETPVXELGEDN

SEQ ID NO: 78010 - protein, 34 aa, Artificial Sequence
  Cyclic GFR-binding peptide
  MOD_RES (1), (1): Xaa is C or S
XALHDELTNSLQEFIPKKRVIEYYLVTLPELQVQ

SEQ ID NO: 78011 - protein, 31 aa, Artificial Sequence
  Cyclic GFR-binding peptide
  MOD_RES (30), (31): Xaa is C or S
KVVMSMEGIVKPTRGVMIQITINSLDQPVXX

SEQ ID NO: 78012 - protein, 33 aa, Artificial Sequence; identical to SEQ ID NO: 27713
  Cyclic GFR-binding peptide
  MOD_RES (1), (33): Xaa is C or S

SEQ ID NO: 78013 - protein, 34 aa, Artificial Sequence; identical to SEQ ID NO: 27715
  Cyclic GFR-binding peptide
  MOD_RES (2), (34): Xaa is C or S

SEQ ID NO: 78014 - protein, 35 aa, Artificial Sequence; identical to SEQ ID NO: 27716
  Cyclic GFR-binding peptide
  MOD_RES (1), (33), (34): Xaa is C or S

SEQ ID NO: 78015 - protein, 28 aa, Artificial Sequence
  Cyclic GFR-binding peptide
ELRNSLQELKPKKRVYEYYVVPLPEHHV

SEQ ID NO: 78016 - protein, 24 aa, Artificial Sequence
  Cyclic GFR-binding peptide
VTAKKIKPTKGIIKRIQVPRLDQS

SEQ ID NO: 78017 - protein, 25 aa, Artificial Sequence
  Cyclic GFR-binding peptide
VMDSMEGIVVKENEDMIQMTINSLE

SEQ ID NO: 78018 - protein, 36 aa, Artificial Sequence; identical to SEQ ID NO: 27721
  Cyclic GFR-binding peptide
  MOD_RES (1), (1): Xaa is C or S

SEQ ID NO: 78019 - protein, 30 aa, Artificial Sequence
  Cyclic GFR-binding peptide
LTNSLQEFIPKKRVIEYYLVTLPELQVQTP

SEQ ID NO: 78020 - protein, 29 aa, Artificial Sequence
  Cyclic GFR-binding peptide
  MOD_RES (1), (3): Xaa is C or S
XGXSRVVMNVTAKKIVNSSDDIKRVQVPR

SEQ ID NO: 78021 - protein, 31 aa, Artificial Sequence
  Cyclic GFR-binding peptide
  MOD_RES (2), (4): Xaa is C or S
HXGXSRVVMNVQVEKIVNSSDDVKAVKVSRL

SEQ ID NO: 78022 - protein, 39 aa, Artificial Sequence; identical to SEQ ID NO: 27725
  Cyclic GFR-binding peptide
  MOD_RES (1), (38): Xaa is C or S

SEQ ID NO: 78023 - protein, 30 aa, Artificial Sequence
  Cyclic GFR-binding peptide
  MOD_RES (28), (29): Xaa is C or S
MNVTAKKIVNSSDDIKRVQVPRLKTPAXXP

SEQ ID NO: 78024 - protein, 36 aa, Artificial Sequence; identical to SEQ ID NO: 27729
  Cyclic GFR-binding peptide
  MOD_RES (2), (33), (34): Xaa is C or S

SEQ ID NO: 78025 - protein, 34 aa, Artificial Sequence; identical to SEQ ID NO: 27732
  Cyclic GFR-binding peptide
  MOD_RES (32), (33): Xaa is C or S

SEQ ID NO: 78026 - protein, 36 aa, Artificial Sequence; identical to SEQ ID NO: 27738
  Cyclic GFR-binding peptide
  MOD_RES (1), (33), (34): Xaa is C or S

SEQ ID NO: 78027 - protein, 25 aa, Artificial Sequence
  Cyclic GFR-binding peptide
MESMEGIVVKDYEDMIQMTINSLET

SEQ ID NO: 78028 - protein, 31 aa, Artificial Sequence
  Cyclic GFR-binding peptide
  MOD_RES (26), (27): Xaa is C or S
VTAKKVVKDYEDIKRMQVPRLETPVXXAKPI

SEQ ID NO: 78029 - protein, 26 aa, Artificial Sequence
  Cyclic GFR-binding peptide
NSMEGIIVNSSDDMIQVTINSLKTPA

SEQ ID NO: 78030 - protein, 31 aa, Artificial Sequence
  Cyclic GFR-binding peptide
  MOD_RES (2), (2): Xaa is C or S
GXARVVMNVQVEKIVNSSDDVKAVKVSRLQT

SEQ ID NO: 78031 - protein, 31 aa, Artificial Sequence
  Cyclic GFR-binding peptide
  MOD_RES (27), (28): Xaa is C or S
NSMEGIIVNSSDDMIQVTINSLQTPAXXPKP

SEQ ID NO: 78032 - protein, 38 aa, Artificial Sequence; identical to SEQ ID NO: 27741
  Cyclic GFR-binding peptide
  MOD_RES (2), (4), (36), (37): Xaa is C or S

SEQ ID NO: 78033 - protein, 39 aa, Artificial Sequence; identical to SEQ ID NO: 27745
  Cyclic GFR-binding peptide
  MOD_RES (2), (33), (34): Xaa is C or S

SEQ ID NO: 78034 - protein, 29 aa, Artificial Sequence
  Cyclic GFR-binding peptide
  MOD_RES (1), (1): Xaa is C or S
XARVVMNSMEGIIVNSSDDMIQVTINSLQ

SEQ ID NO: 78035 - protein, 31 aa, Artificial Sequence
  Cyclic GFR-binding peptide
AAAAAAAAANSLQEHQGQHPKIRYYLMTLPE

SEQ ID NO: 78036 - protein, 29 aa, Artificial Sequence
  Cyclic GFR-binding peptide
EVVMESMEGIVVKDYEDMIQMTINSLETP

SEQ ID NO: 78037 - protein, 36 aa, Artificial Sequence; identical to SEQ ID NO: 27749
  Cyclic GFR-binding peptide
  MOD_RES (2), (4), (36): Xaa is C or S

SEQ ID NO: 78038 - protein, 32 aa, Artificial Sequence
  Cyclic GFR-binding peptide
  MOD_RES (28), (29): Xaa is C or S
MNVQVEKIVNSSDDVKAVKVSRLKTPAXXPKP

SEQ ID NO: 78039 - protein, 29 aa, Artificial Sequence
  Cyclic GFR-binding peptide
  MOD_RES (28), (29): Xaa is C or S
IMVQVEKIKPTKGIVKAIKVSRLDQSVXX

SEQ ID NO: 78040 - protein, 27 aa, Artificial Sequence
  Cyclic GFR-binding peptide
VMNVQVEKIVNSSDDVKAVKVSRLKTP

SEQ ID NO: 78041 - protein, 27 aa, Artificial Sequence
  Cyclic GFR-binding peptide
EVVMESMEGIVVKDYEDMIQMTINSLE

SEQ ID NO: 78042 - protein, 28 aa, Artificial Sequence
  Cyclic GFR-binding peptide
VMDVTAKKVVKENEDIKRMQVPRLETPV

SEQ ID NO: 78043 - protein, 32 aa, Artificial Sequence
  Cyclic GFR-binding peptide
  MOD_RES (28), (29): Xaa is C or S
VMSMEGIVKPTRGVMIQITINSLDQPVXXPSA

SEQ ID NO: 78044 - protein, 38 aa, Artificial Sequence; identical to SEQ ID NO: 27759
  Cyclic GFR-binding peptide
  MOD_RES (1), (32), (33): Xaa is C or S

SEQ ID NO: 78045 - protein, 30 aa, Artificial Sequence
  Cyclic GFR-binding peptide
  MOD_RES (2), (4): Xaa is C or S
HXGXARVVMNVQVEKIVNSSDDVKAVKVSR

SEQ ID NO: 78046 - protein, 27 aa, Artificial Sequence
  Cyclic GFR-binding peptide
  MOD_RES (27), (27): Xaa is C or S
ESMEGIVVKDYEDMIQMTINSLETPVX

SEQ ID NO: 78047 - protein, 36 aa, Artificial Sequence; identical to SEQ ID NO: 27761
  Cyclic GFR-binding peptide
  MOD_RES (1), (1): Xaa is C or S

SEQ ID NO: 78048 - protein, 41 aa, Artificial Sequence; identical to SEQ ID NO: 27762
  Cyclic GFR-binding peptide
  MOD_RES (2), (36): Xaa is C or S

SEQ ID NO: 78049 - protein, 28 aa, Artificial Sequence
  Cyclic GFR-binding peptide
  MOD_RES (27), (28): Xaa is C or S
DSMEGIVVKENEDMIQMTINSLETPVXX

SEQ ID NO: 78050 - protein, 38 aa, Artificial Sequence; identical to SEQ ID NO: 27765
  Cyclic GFR-binding peptide
  MOD_RES (37), (37): Xaa is C or S

SEQ ID NO: 78051 - protein, 44 aa, Artificial Sequence; identical to SEQ ID NO: 27770
  Cyclic GFR-binding peptide
  MOD_RES (1), (3), (40): Xaa is C or S

SEQ ID NO: 78052 - protein, 27 aa, Artificial Sequence
  Cyclic GFR-binding peptide
VMNVTAKKIVNSSDDIKRVQVPRLQTP

SEQ ID NO: 78053 - protein, 30 aa, Artificial Sequence
  Cyclic GFR-binding peptide
  MOD_RES (30), (30): Xaa is C or S
VVMNVQVEKIVNSSDDVKAVKVSRLKTPAX

SEQ ID NO: 78054 - protein, 38 aa, Artificial Sequence; identical to SEQ ID NO: 27772
  Cyclic GFR-binding peptide
  MOD_RES (1), (33), (34): Xaa is C or S

SEQ ID NO: 78055 - protein, 29 aa, Artificial Sequence
  Cyclic GFR-binding peptide
VVMDSMEGIVVKENEDMIQMTINSLETPV

SEQ ID NO: 78056 - protein, 29 aa, Artificial Sequence
  Cyclic GFR-binding peptide
NHQLFNSLQEHQGQHPKIRYYLMTLPEEE

SEQ ID NO: 78057 - protein, 27 aa, Artificial Sequence
  Cyclic GFR-binding peptide
VVMNVTAKKIVNSSDDIKRVQVPRLKT

SEQ ID NO: 78058 - protein, 28 aa, Artificial Sequence
  Cyclic GFR-binding peptide
RVIMVTAKKVKPKRGVIKRIQVPRLAQP

SEQ ID NO: 78059 - protein, 24 aa, Artificial Sequence
  Cyclic GFR-binding peptide
VMNVQVEKIVNSSDDVKAVKVSRL

SEQ ID NO: 78060 - protein, 23 aa, Artificial Sequence
  Cyclic GFR-binding peptide
TNSLQEFIPKKRVIEYYVVPLPE

SEQ ID NO: 78061 - protein, 26 aa, Artificial Sequence
  Cyclic GFR-binding peptide
MNSMEGIIVNSSDDMIQVTINSLQTP

SEQ ID NO: 78062 - protein, 33 aa, Artificial Sequence
  Cyclic GFR-binding peptide
  MOD_RES (29), (30): Xaa is C or S
VIMSMEGIVKPKRGVMIQITINSLAQPVXXPAA

SEQ ID NO: 78063 - protein, 31 aa, Artificial Sequence
  Cyclic GFR-binding peptide
  MOD_RES (2), (2): Xaa is C or S
GXSRVVMNVQVEKIVNSSDDVKAVKVSRLKT

SEQ ID NO: 78064 - protein, 29 aa, Artificial Sequence
  Cyclic GFR-binding peptide
  MOD_RES (1), (1): Xaa is C or S
XGEVVMDSMEGIVVKENEDMIQMTINSLE

SEQ ID NO: 78065 - protein, 32 aa, Artificial Sequence
  Cyclic GFR-binding peptide
  MOD_RES (31), (31): Xaa is C or S
TNSLQEFIPKKRVIEYYVVPLPELQVQTPRXQ

SEQ ID NO: 78066 - protein, 34 aa, Artificial Sequence
  Cyclic GFR-binding peptide
  MOD_RES (30), (31): Xaa is C or S
VVMDSMEGIVVKENEDMIQMTINSLETPVXXAKP

SEQ ID NO: 78067 - protein, 28 aa, Artificial Sequence
  Cyclic GFR-binding peptide
HDELTNSLQEFIPKKRVIEYYVVPLPEL

SEQ ID NO: 78068 - protein, 31 aa, Artificial Sequence
  Cyclic GFR-binding peptide
  MOD_RES (29), (30): Xaa is C or S
VIMVTAKKIKPTKGIIKRIQVPRLDQSVXXP

SEQ ID NO: 78069 - protein, 27 aa, Artificial Sequence
  Cyclic GFR-binding peptide
SKVVMVTAKKVKPTRGVIKRIQVPRLD

SEQ ID NO: 78070 - protein, 40 aa, Artificial Sequence; identical to SEQ ID NO: 27794
  Cyclic GFR-binding peptide
  MOD_RES (2), (34), (35): Xaa is C or S

SEQ ID NO: 78071 - protein, 27 aa, Artificial Sequence
  Cyclic GFR-binding peptide
VVMSMEGIVKPTRGVMIQITINSLDQP

SEQ ID NO: 78072 - protein, 23 aa, Artificial Sequence
  Cyclic GFR-binding peptide
VQVEKVVKDYEDVKAMKVSRLET

SEQ ID NO: 78073 - protein, 33 aa, Artificial Sequence; identical to SEQ ID NO: 27805
  Cyclic GFR-binding peptide
  MOD_RES (31), (32): Xaa is C or S

SEQ ID NO: 78074 - protein, 38 aa, Artificial Sequence; identical to SEQ ID NO: 27804
  Cyclic GFR-binding peptide
  MOD_RES (1), (33), (34): Xaa is C or S

SEQ ID NO: 78075 - protein, 35 aa, Artificial Sequence
  Cyclic GFR-binding peptide
  MOD_RES (29), (30): Xaa is C or S
VMDSMEGIVVKENEDMIQMTINSLETPVXXAKPIK

SEQ ID NO: 78076 - protein, 34 aa, Artificial Sequence
  Cyclic GFR-binding peptide
  MOD_RES (28), (29): Xaa is C or S
MDSMEGIVVKENEDMIQMTINSLETPVXXAKPIK

SEQ ID NO: 78077 - protein, 26 aa, Artificial Sequence
  Cyclic GFR-binding peptide
QLFNSLQEHQGQHPKIRYYLMTLPEE

SEQ ID NO: 78078 - protein, 41 aa, Artificial Sequence; identical to SEQ ID NO: 27807
  Cyclic GFR-binding peptide
  MOD_RES (2), (4), (35), (36): Xaa is C or S

SEQ ID NO: 78079 - protein, 21 aa, Artificial Sequence
  Cyclic GFR-binding peptide
VTAKKVVKENEDIKRMQVPRL

SEQ ID NO: 78080 - protein, 30 aa, Artificial Sequence
  Cyclic GFR-binding peptide
  MOD_RES (26), (26): Xaa is C or S
SMEGIIVNSSDDMIQVTINSLKTPAXTPKT

SEQ ID NO: 78081 - protein, 41 aa, Artificial Sequence; identical to SEQ ID NO: 27810
  Cyclic GFR-binding peptide
  MOD_RES (2), (4), (36), (37): Xaa is C or S

SEQ ID NO: 78082 - protein, 25 aa, Artificial Sequence
  Cyclic GFR-binding peptide
VMNSMEGIIVNSSDDMIQVTINSLK

SEQ ID NO: 78083 - protein, 39 aa, Artificial Sequence; identical to SEQ ID NO: 27817
  Cyclic GFR-binding peptide
  MOD_RES (2), (4), (36), (37): Xaa is C or S

SEQ ID NO: 78084 - protein, 41 aa, Artificial Sequence; identical to SEQ ID NO: 27818
  Cyclic GFR-binding peptide
  MOD_RES (2), (4), (41): Xaa is C or S

SEQ ID NO: 78085 - protein, 34 aa, Artificial Sequence; identical to SEQ ID NO: 27820
  Cyclic GFR-binding peptide
  MOD_RES (1), (3): Xaa is C or S

SEQ ID NO: 78086 - protein, 32 aa, Artificial Sequence; identical to SEQ ID NO: 27824
  Cyclic GFR-binding peptide
  MOD_RES (31), (32): Xaa is C or S

SEQ ID NO: 78087 - protein, 28 aa, Artificial Sequence
  Cyclic GFR-binding peptide
  MOD_RES (26), (27): Xaa is C or S
VQVEKIVNSSDDVKAVKVSRLQTPAXXP

SEQ ID NO: 78088 - protein, 37 aa, Artificial Sequence; identical to SEQ ID NO: 27825
  Cyclic GFR-binding peptide
  MOD_RES (37), (37): Xaa is C or S

SEQ ID NO: 78089 - protein, 40 aa, Artificial Sequence; identical to SEQ ID NO: 27827
  Cyclic GFR-binding peptide
  MOD_RES (1), (3), (34), (35): Xaa is C or S

SEQ ID NO: 78090 - protein, 28 aa, Artificial Sequence
  Cyclic GFR-binding peptide
  MOD_RES (28), (28): Xaa is C or S
IMVQVEKIKPTKGIVKAIKVSRLDQSVX

SEQ ID NO: 78091 - protein, 31 aa, Artificial Sequence
  Cyclic GFR-binding peptide
  MOD_RES (28), (28): Xaa is C or S
NSLQEHQGQHPKIRYYLMTLPEEETPVXELG

SEQ ID NO: 78092 - protein, 38 aa, Artificial Sequence; identical to SEQ ID NO: 27829
  Cyclic GFR-binding peptide
  MOD_RES (1), (3), (35), (36): Xaa is C or S

SEQ ID NO: 78093 - protein, 30 aa, Artificial Sequence
  Cyclic GFR-binding peptide
  MOD_RES (30), (30): Xaa is C or S
VVMNVTAKKIVNSSDDIKRVQVPRLQTPAX

SEQ ID NO: 78094 - protein, 29 aa, Artificial Sequence
  Cyclic GFR-binding peptide
  MOD_RES (28), (29): Xaa is C or S
VMVQVEKVKPTRGVVKAIKVSRLDQPVXX

SEQ ID NO: 78095 - protein, 35 aa, Artificial Sequence; identical to SEQ ID NO: 27831
  Cyclic GFR-binding peptide
  MOD_RES (34), (34): Xaa is C or S

SEQ ID NO: 78096 - protein, 27 aa, Artificial Sequence
  Cyclic GFR-binding peptide
RVIMVTAKKVKPKRGVIKRIQVPRLAQ

SEQ ID NO: 78097 - protein, 34 aa, Artificial Sequence; identical to SEQ ID NO: 27835
  Cyclic GFR-binding peptide
  MOD_RES (2), (33), (34): Xaa is C or S

SEQ ID NO: 78098 - protein, 39 aa, Artificial Sequence; identical to SEQ ID NO: 27836
  Cyclic GFR-binding peptide
  MOD_RES (1), (33): Xaa is C or S

SEQ ID NO: 78099 - protein, 35 aa, Artificial Sequence; identical to SEQ ID NO: 27838
  Cyclic GFR-binding peptide
  MOD_RES (1), (32), (33): Xaa is C or S

SEQ ID NO: 78100 - protein, 26 aa, Artificial Sequence
  Cyclic GFR-binding peptide
ELRNSLQELKPKKRVYEYYVVPLPEH

SEQ ID NO: 78101 - protein, 33 aa, Artificial Sequence; identical to SEQ ID NO: 27841
  Cyclic GFR-binding peptide
  MOD_RES (1), (32), (33): Xaa is C or S

SEQ ID NO: 78102 - protein, 34 aa, Artificial Sequence
  Cyclic GFR-binding peptide
  MOD_RES (2), (2): Xaa is C or S
AXELHEELRNSLQELKPKKRVYEYYVVPLPEHHV

SEQ ID NO: 78103 - protein, 34 aa, Artificial Sequence
  Cyclic GFR-binding peptide
  MOD_RES (28), (29): Xaa is C or S
IMVQVEKVKPKRGVVKAIKVSRLAQPVXXPAASA

SEQ ID NO: 78104 - protein, 30 aa, Artificial Sequence
  Cyclic GFR-binding peptide
  MOD_RES (1), (1): Xaa is C or S
XSKVVMVQVEKVKPTRGVVKAIKVSRLDQP

SEQ ID NO: 78105 - protein, 34 aa, Artificial Sequence; identical to SEQ ID NO: 27845
  Cyclic GFR-binding peptide
  MOD_RES (1), (3), (34): Xaa is C or S

SEQ ID NO: 78106 - protein, 32 aa, Artificial Sequence; identical to SEQ ID NO: 27847
  Cyclic GFR-binding peptide
  MOD_RES (1), (32): Xaa is C or S

SEQ ID NO: 78107 - protein, 25 aa, Artificial Sequence
  Cyclic GFR-binding peptide
VQVEKVKPTRGVVKAIKVSRLDQPV

SEQ ID NO: 78108 - protein, 28 aa, Artificial Sequence
  Cyclic GFR-binding peptide
SRVIMSMEGIVKPKRGVMIQITINSLAQ

SEQ ID NO: 78109 - protein, 39 aa, Artificial Sequence; identical to SEQ ID NO: 27853
  Cyclic GFR-binding peptide
  MOD_RES (2), (34), (35): Xaa is C or S

SEQ ID NO: 78110 - protein, 40 aa, Artificial Sequence; identical to SEQ ID NO: 27854
  Cyclic GFR-binding peptide
  MOD_RES (2), (34): Xaa is C or S

SEQ ID NO: 78111 - protein, 31 aa, Artificial Sequence
  Cyclic GFR-binding peptide
  MOD_RES (27), (27): Xaa is C or S
NSMEGIIVNSSDDMIQVTINSLKTPAXTPKT

SEQ ID NO: 78112 - protein, 32 aa, Artificial Sequence
  Cyclic GFR-binding peptide
  MOD_RES (31), (31): Xaa is C or S
RNSLQELKPKKRVYEYYLVTLPEHHVRSPQXK

SEQ ID NO: 78113 - protein, 41 aa, Artificial Sequence; identical to SEQ ID NO: 27859
  Cyclic GFR-binding peptide
  MOD_RES (1), (38): Xaa is C or S

SEQ ID NO: 78114 - protein, 30 aa, Artificial Sequence
  Cyclic GFR-binding peptide
  MOD_RES (28), (29): Xaa is C or S
MDVTAKKVVKENEDIKRMQVPRLETPVXXA

SEQ ID NO: 78115 - protein, 30 aa, Artificial Sequence
  Cyclic GFR-binding peptide
  MOD_RES (2), (4): Xaa is C or S
SXKXSRVIMVTAKKVKPKRGVIKRIQVPRL

SEQ ID NO: 78116 - protein, 37 aa, Artificial Sequence
  Cyclic GFR-binding peptide
  MOD_RES (33), (33): Xaa is C or S
ELTNSLQEFIPKKRVIEYYLVTLPELQVQTPRXQVNR

SEQ ID NO: 78117 - protein, 30 aa, Artificial Sequence
  Cyclic GFR-binding peptide
  MOD_RES (27), (28): Xaa is C or S
MVTAKKIKPTKGIIKRIQVPRLDQSVXXPS

SEQ ID NO: 78118 - protein, 36 aa, Artificial Sequence; identical to SEQ ID NO: 27865
  Cyclic GFR-binding peptide
  MOD_RES (1), (32), (33): Xaa is C or S

SEQ ID NO: 78119 - protein, 27 aa, Artificial Sequence
  Cyclic GFR-binding peptide
  MOD_RES (26), (27): Xaa is C or S
VQVEKVVKENEDVKAMKVSRLETPVXX

SEQ ID NO: 78120 - protein, 27 aa, Artificial Sequence
  Cyclic GFR-binding peptide
  MOD_RES (1), (1): Xaa is C or S
XGEVVMDVQVEKVVKENEDVKAMKVSR

SEQ ID NO: 78121 - protein, 23 aa, Artificial Sequence
  Cyclic GFR-binding peptide
MVQVEKVKPTRGVVKAIKVSRLD

SEQ ID NO: 78122 - protein, 35 aa, Artificial Sequence; identical to SEQ ID NO: 27869
  Cyclic GFR-binding peptide
  MOD_RES (2), (4), (35): Xaa is C or S

SEQ ID NO: 78123 - protein, 34 aa, Artificial Sequence; identical to SEQ ID NO: 27870
  Cyclic GFR-binding peptide
  MOD_RES (1), (3), (34): Xaa is C or S

SEQ ID NO: 78124 - protein, 43 aa, Artificial Sequence; identical to SEQ ID NO: 27872
  Cyclic GFR-binding peptide
  MOD_RES (2), (4), (41): Xaa is C or S

SEQ ID NO: 78125 - protein, 23 aa, Artificial Sequence
  Cyclic GFR-binding peptide
IMVQVEKIKPTKGIVKAIKVSRL

SEQ ID NO: 78126 - protein, 40 aa, Artificial Sequence; identical to SEQ ID NO: 27873
  Cyclic GFR-binding peptide
  MOD_RES (2), (4), (36), (37): Xaa is C or S

SEQ ID NO: 78127 - protein, 35 aa, Artificial Sequence
  Cyclic GFR-binding peptide
  MOD_RES (34), (34): Xaa is C or S
DELTNSLQEFIPKKRVIEYYLVTLPELQVQTPRXQ

SEQ ID NO: 78128 - protein, 30 aa, Artificial Sequence
  Cyclic GFR-binding peptide
  MOD_RES (1), (1): Xaa is C or S
XGEVVMDVTAKKVVKENEDIKRMQVPRLET

SEQ ID NO: 78129 - protein, 33 aa, Artificial Sequence; identical to SEQ ID NO: 27877
  Cyclic GFR-binding peptide
  MOD_RES (32), (33): Xaa is C or S

SEQ ID NO: 78130 - protein, 30 aa, Artificial Sequence
  Cyclic GFR-binding peptide
LHDELTNSLQEFIPKKRVIEYYVVPLPELQ

SEQ ID NO: 78131 - protein, 33 aa, Artificial Sequence
  Cyclic GFR-binding peptide
  MOD_RES (30), (31): Xaa is C or S
VVMEVQVEKVVKDYEDVKAMKVSRLETPVXXAK

SEQ ID NO: 78132 - protein, 44 aa, Artificial Sequence; identical to SEQ ID NO: 27879
  Cyclic GFR-binding peptide
  MOD_RES (2), (4), (41): Xaa is C or S

SEQ ID NO: 78133 - protein, 33 aa, Artificial Sequence
  Cyclic GFR-binding peptide
  MOD_RES (30), (30): Xaa is C or S
VVMNSMEGIIVNSSDDMIQVTINSLKTPAXTPK

SEQ ID NO: 78134 - protein, 23 aa, Artificial Sequence
  Cyclic GFR-binding peptide
DVTAKKVVKENEDIKRMQVPRLE

SEQ ID NO: 78135 - protein, 34 aa, Artificial Sequence
  Cyclic GFR-binding peptide
  MOD_RES (29), (30): Xaa is C or S
VMDSMEGIVVKENEDMIQMTINSLETPVXXAKPI

SEQ ID NO: 78136 - protein, 36 aa, Artificial Sequence; identical to SEQ ID NO: 27885
  Cyclic GFR-binding peptide
  MOD_RES (34), (34): Xaa is C or S

SEQ ID NO: 78137 - protein, 40 aa, Artificial Sequence; identical to SEQ ID NO: 27886
  Cyclic GFR-binding peptide
  MOD_RES (1), (3), (35), (36): Xaa is C or S

SEQ ID NO: 78138 - protein, 20 aa, Artificial Sequence
  Cyclic GFR-binding peptide
VQVEKIKPTKGIVKAIKVSR

SEQ ID NO: 78139 - protein, 34 aa, Artificial Sequence
  Cyclic GFR-binding peptide
  MOD_RES (33), (33): Xaa is C or S
ELRNSLQELKPKKRVYEYYVVPLPEHHVRSPQXK

SEQ ID NO: 78140 - protein, 24 aa, Artificial Sequence
  Cyclic GFR-binding peptide
MSMEGIVKPKRGVMIQITINSLAQ

SEQ ID NO: 78141 - protein, 28 aa, Artificial Sequence
  Cyclic GFR-binding peptide
RVIMVQVEKVKPKRGVVKAIKVSRLAQP

SEQ ID NO: 78142 - protein, 29 aa, Artificial Sequence
  Cyclic GFR-binding peptide
  MOD_RES (27), (28): Xaa is C or S
MSMEGIIKPTKGIMIQITINSLDQSVXXP

SEQ ID NO: 78143 - protein, 30 aa, Artificial Sequence
  Cyclic GFR-binding peptide
  MOD_RES (2), (4): Xaa is C or S
SXKXSRVIMVQVEKVKPKRGVVKAIKVSRL

SEQ ID NO: 78144 - protein, 38 aa, Artificial Sequence; identical to SEQ ID NO: 27898
  Cyclic GFR-binding peptide
  MOD_RES (1), (38): Xaa is C or S

SEQ ID NO: 78145 - protein, 30 aa, Artificial Sequence
  Cyclic GFR-binding peptide
RNSLQELKPKKRVYEYYVVPLPEHHVRSPQ

SEQ ID NO: 78146 - protein, 35 aa, Artificial Sequence; identical to SEQ ID NO: 27901
  Cyclic GFR-binding peptide
  MOD_RES (2), (34), (35): Xaa is C or S

SEQ ID NO: 78147 - protein, 29 aa, Artificial Sequence
  Cyclic GFR-binding peptide
VVMNVTAKKIVNSSDDIKRVQVPRLQTPA

SEQ ID NO: 78148 - protein, 35 aa, Artificial Sequence; identical to SEQ ID NO: 27904
  Cyclic GFR-binding peptide
  MOD_RES (32), (32): Xaa is C or S

SEQ ID NO: 78149 - protein, 31 aa, Artificial Sequence
  Cyclic GFR-binding peptide
  MOD_RES (29), (30): Xaa is C or S
VIMSMEGIIKPTKGIMIQITINSLDQSVXXP

SEQ ID NO: 78150 - protein, 31 aa, Artificial Sequence
  Cyclic GFR-binding peptide
  MOD_RES (29), (29): Xaa is C or S
VMNSMEGIIVNSSDDMIQVTINSLKTPAXTP

SEQ ID NO: 78151 - protein, 30 aa, Artificial Sequence
  Cyclic GFR-binding peptide
  MOD_RES (27), (27): Xaa is C or S
NVTAKKIVNSSDDIKRVQVPRLKTPAXTPK

SEQ ID NO: 78152 - protein, 38 aa, Artificial Sequence; identical to SEQ ID NO: 27907
  Cyclic GFR-binding peptide
  MOD_RES (32), (33): Xaa is C or S

SEQ ID NO: 78153 - protein, 37 aa, Artificial Sequence; identical to SEQ ID NO: 27913
  Cyclic GFR-binding peptide
  MOD_RES (2), (4), (36), (37): Xaa is C or S

SEQ ID NO: 78154 - protein, 27 aa, Artificial Sequence
  Cyclic GFR-binding peptide
  MOD_RES (1), (1): Xaa is C or S
XSKVIMVQVEKIKPTKGIVKAIKVSRL

SEQ ID NO: 78155 - protein, 30 aa, Artificial Sequence
  Cyclic GFR-binding peptide
  MOD_RES (28), (28): Xaa is C or S
NSLQEHQGQHPKIRYYLMTLPEEETPVXEL

SEQ ID NO: 78156 - protein, 28 aa, Artificial Sequence
  Cyclic GFR-binding peptide
ARVVMNVTAKKIVNSSDDIKRVQVPRLQ

SEQ ID NO: 78157 - protein, 36 aa, Artificial Sequence; identical to SEQ ID NO: 27916
  Cyclic GFR-binding peptide
  MOD_RES (2), (4), (35), (36): Xaa is C or S

SEQ ID NO: 78158 - protein, 24 aa, Artificial Sequence
  Cyclic GFR-binding peptide
RVIMSMEGIVKPKRGVMIQITINS

SEQ ID NO: 78159 - protein, 32 aa, Artificial Sequence
  Cyclic GFR-binding peptide
  MOD_RES (2), (2): Xaa is C or S
EXKNHQLFNSLQEHQGQHPKIRYYLMTLPEEE

SEQ ID NO: 78160 - protein, 37 aa, Artificial Sequence; identical to SEQ ID NO: 27917
  Cyclic GFR-binding peptide
  MOD_RES (1), (33), (34): Xaa is C or S

SEQ ID NO: 78161 - protein, 25 aa, Artificial Sequence
  Cyclic GFR-binding peptide
EVVMDSMEGIVVKENEDMIQMTINS

SEQ ID NO: 78162 - protein, 30 aa, Artificial Sequence
  Cyclic GFR-binding peptide
  MOD_RES (1), (3): Xaa is C or S
XKXSRVIMVTAKKVKPKRGVIKRIQVPRLA

SEQ ID NO: 78163 - protein, 35 aa, Artificial Sequence
  Cyclic GFR-binding peptide
  MOD_RES (2), (4): Xaa is C or S
EXKXALHDELTNSLQEFIPKKRVIEYYVVPLPELQ

SEQ ID NO: 78164 - protein, 33 aa, Artificial Sequence; identical to SEQ ID NO: 27925
  Cyclic GFR-binding peptide
  MOD_RES (32), (33): Xaa is C or S

SEQ ID NO: 78165 - protein, 28 aa, Artificial Sequence
  Cyclic GFR-binding peptide
HQLFNSLQEHQGQHPKIRYYVMPLPEEE

SEQ ID NO: 78166 - protein, 24 aa, Artificial Sequence
  Cyclic GFR-binding peptide
LTNSLQEFIPKKRVIEYYVVPLPE

SEQ ID NO: 78167 - protein, 32 aa, Artificial Sequence
  Cyclic GFR-binding peptide
  MOD_RES (27), (28): Xaa is C or S
NVTAKKIVNSSDDIKRVQVPRLQTPAXXPKPV

SEQ ID NO: 78168 - protein, 28 aa, Artificial Sequence
  Cyclic GFR-binding peptide
  MOD_RES (1), (1): Xaa is C or S
XSRVVMNVQVEKIVNSSDDVKAVKVSRL

SEQ ID NO: 78169 - protein, 28 aa, Artificial Sequence
  Cyclic GFR-binding peptide
KVIMVTAKKIKPTKGIIKRIQVPRLDQS

SEQ ID NO: 78170 - protein, 37 aa, Artificial Sequence; identical to SEQ ID NO: 27932
  Cyclic GFR-binding peptide
  MOD_RES (2), (33), (34): Xaa is C or S

SEQ ID NO: 78171 - protein, 29 aa, Artificial Sequence
  Cyclic GFR-binding peptide
  MOD_RES (2), (2): Xaa is C or S
GXGEVVMDVQVEKVVKENEDVKAMKVSRL

SEQ ID NO: 78172 - protein, 31 aa, Artificial Sequence; identical to SEQ ID NO: 27935
  Cyclic GFR-binding peptide

SEQ ID NO: 78173 - protein, 35 aa, Artificial Sequence; identical to SEQ ID NO: 27940
  Cyclic GFR-binding peptide
  MOD_RES (32), (33): Xaa is C or S

SEQ ID NO: 78174 - protein, 23 aa, Artificial Sequence
  Cyclic GFR-binding peptide
MVQVEKVKPKRGVVKAIKVSRLA

SEQ ID NO: 78175 - protein, 37 aa, Artificial Sequence; identical to SEQ ID NO: 27941
  Cyclic GFR-binding peptide
  MOD_RES (1), (3), (34), (35): Xaa is C or S

SEQ ID NO: 78176 - protein, 28 aa, Artificial Sequence
  Cyclic GFR-binding peptide
SRVVMNSMEGIIVNSSDDMIQVTINSLK

SEQ ID NO: 78177 - protein, 34 aa, Artificial Sequence; identical to SEQ ID NO: 27945
  Cyclic GFR-binding peptide
  MOD_RES (2), (33), (34): Xaa is C or S

SEQ ID NO: 78178 - protein, 37 aa, Artificial Sequence; identical to SEQ ID NO: 27946
  Cyclic GFR-binding peptide
  MOD_RES (1), (32), (33): Xaa is C or S

SEQ ID NO: 78179 - protein, 27 aa, Artificial Sequence
  Cyclic GFR-binding peptide
VIMVQVEKVKPKRGVVKAIKVSRLAQP

SEQ ID NO: 78180 - protein, 40 aa, Artificial Sequence; identical to SEQ ID NO: 27950
  Cyclic GFR-binding peptide
  MOD_RES (2), (4), (35), (36): Xaa is C or S

SEQ ID NO: 78181 - protein, 25 aa, Artificial Sequence
  Cyclic GFR-binding peptide
KVIMVQVEKIKPTKGIVKAIKVSRL

SEQ ID NO: 78182 - protein, 31 aa, Artificial Sequence
  Cyclic GFR-binding peptide
  MOD_RES (31), (31): Xaa is C or S
TNSLQEFIPKKRVIEYYVVPLPELQVQTPRX

SEQ ID NO: 78183 - protein, 33 aa, Artificial Sequence
  Cyclic GFR-binding peptide
  MOD_RES (1), (3): Xaa is C or S
XGXGEVVMESMEGIVVKDYEDMIQMTINSLETP

SEQ ID NO: 78184 - protein, 32 aa, Artificial Sequence
  Cyclic GFR-binding peptide
  MOD_RES (30), (31): Xaa is C or S
VVMNSMEGIIVNSSDDMIQVTINSLQTPAXXP

SEQ ID NO: 78185 - protein, 32 aa, Artificial Sequence
  Cyclic GFR-binding peptide
  MOD_RES (2), (4): Xaa is C or S
RXGXGEVVMEVQVEKVVKDYEDVKAMKVSRLE

SEQ ID NO: 78186 - protein, 34 aa, Artificial Sequence; identical to SEQ ID NO: 27963
  Cyclic GFR-binding peptide
  MOD_RES (1), (32), (33): Xaa is C or S

SEQ ID NO: 78187 - protein, 23 aa, Artificial Sequence
  Cyclic GFR-binding peptide
VTAKKVVKDYEDIKRMQVPRLET

SEQ ID NO: 78188 - protein, 37 aa, Artificial Sequence
  Cyclic GFR-binding peptide
  MOD_RES (32), (32): Xaa is C or S
HQLFNSLQEHQGQHPKIRYYVMPLPEEETPVXELGED

SEQ ID NO: 78189 - protein, 36 aa, Artificial Sequence
  Cyclic GFR-binding peptide
  MOD_RES (34), (34): Xaa is C or S
EELRNSLQELKPKKRVYEYYLVTLPEHHVRSPQXKV

SEQ ID NO: 78190 - protein, 27 aa, Artificial Sequence
  Cyclic GFR-binding peptide
  MOD_RES (26), (27): Xaa is C or S
SMEGIVKPTRGVMIQITINSLDQPVXX

SEQ ID NO: 78191 - protein, 30 aa, Artificial Sequence
  Cyclic GFR-binding peptide
  MOD_RES (28), (29): Xaa is C or S
MESMEGIVVKDYEDMIQMTINSLETPVXXA

SEQ ID NO: 78192 - protein, 27 aa, Artificial Sequence
  Cyclic GFR-binding peptide
NHQLFNSLQEHQGQHPKIRYYVMPLPE

SEQ ID NO: 78193 - protein, 27 aa, Artificial Sequence
  Cyclic GFR-binding peptide
KVIMVTAKKIKPTKGIIKRIQVPRLDQ

SEQ ID NO: 78194 - protein, 33 aa, Artificial Sequence
  Cyclic GFR-binding peptide
  MOD_RES (27), (28): Xaa is C or S
DSMEGIVVKENEDMIQMTINSLETPVXXAKPIK

SEQ ID NO: 78195 - protein, 31 aa, Artificial Sequence; identical to SEQ ID NO: 27971
  Cyclic GFR-binding peptide

SEQ ID NO: 78196 - protein, 29 aa, Artificial Sequence
  Cyclic GFR-binding peptide
AAAAAAAAAVTAKKVVKDYEDIKRMQVPR

SEQ ID NO: 78197 - protein, 24 aa, Artificial Sequence
  Cyclic GFR-binding peptide
MSMEGIVKPTRGVMIQITINSLDQ

SEQ ID NO: 78198 - protein, 34 aa, Artificial Sequence
  Cyclic GFR-binding peptide
  MOD_RES (1), (1): Xaa is C or S
XALHDELTNSLQEFIPKKRVIEYYVVPLPELQVQ

SEQ ID NO: 78199 - protein, 41 aa, Artificial Sequence; identical to SEQ ID NO: 27976
  Cyclic GFR-binding peptide
  MOD_RES (2), (4), (36): Xaa is C or S

SEQ ID NO: 78200 - protein, 31 aa, Artificial Sequence
  Cyclic GFR-binding peptide
  MOD_RES (30), (31): Xaa is C or S
RVIMSMEGIVKPKRGVMIQITINSLAQPVXX

SEQ ID NO: 78201 - protein, 35 aa, Artificial Sequence
  Cyclic GFR-binding peptide
  MOD_RES (1), (3): Xaa is C or S
XEXKNHQLFNSLQEHQGQHPKIRYYLMTLPEEETP

SEQ ID NO: 78202 - protein, 25 aa, Artificial Sequence
  Cyclic GFR-binding peptide
VTAKKVKPTRGVIKRIQVPRLDQPV

SEQ ID NO: 78203 - protein, 31 aa, Artificial Sequence
  Cyclic GFR-binding peptide
  MOD_RES (29), (29): Xaa is C or S
VMNVQVEKIVNSSDDVKAVKVSRLKTPAXTP

SEQ ID NO: 78204 - protein, 32 aa, Artificial Sequence; identical to SEQ ID NO: 27983
  Cyclic GFR-binding peptide
  MOD_RES (2), (2): Xaa is C or S

SEQ ID NO: 78205 - protein, 33 aa, Artificial Sequence
  Cyclic GFR-binding peptide
  MOD_RES (29), (30): Xaa is C or S
VMDSMEGIVVKENEDMIQMTINSLETPVXXAKP

SEQ ID NO: 78206 - protein, 34 aa, Artificial Sequence; identical to SEQ ID NO: 27984
  Cyclic GFR-binding peptide
  MOD_RES (32), (33): Xaa is C or S

SEQ ID NO: 78207 - protein, 39 aa, Artificial Sequence; identical to SEQ ID NO: 27985
  Cyclic GFR-binding peptide
  MOD_RES (2), (4), (36), (37): Xaa is C or S

SEQ ID NO: 78208 - protein, 31 aa, Artificial Sequence
  Cyclic GFR-binding peptide
  MOD_RES (1), (1): Xaa is C or S
XKNHQLFNSLQEHQGQHPKIRYYLMTLPEEE

SEQ ID NO: 78209 - protein, 33 aa, Artificial Sequence
  Cyclic GFR-binding peptide
  MOD_RES (30), (31): Xaa is C or S
VVMEVTAKKVVKDYEDIKRMQVPRLETPVXXAK

SEQ ID NO: 78210 - protein, 23 aa, Artificial Sequence
  Cyclic GFR-binding peptide
IMVTAKKVKPKRGVIKRIQVPRL

SEQ ID NO: 78211 - protein, 26 aa, Artificial Sequence
  Cyclic GFR-binding peptide
MDVQVEKVVKENEDVKAMKVSRLETP

SEQ ID NO: 78212 - protein, 32 aa, Artificial Sequence; identical to SEQ ID NO: 27991
  Cyclic GFR-binding peptide
  MOD_RES (31), (32): Xaa is C or S

SEQ ID NO: 78213 - protein, 32 aa, Artificial Sequence
  Cyclic GFR-binding peptide
  MOD_RES (2), (4): Xaa is C or S
RXEXKNHQLFNSLQEHQGQHPKIRYYVMPLPE

SEQ ID NO: 78214 - protein, 33 aa, Artificial Sequence
  Cyclic GFR-binding peptide
  MOD_RES (1), (1): Xaa is C or S
XALHDELTNSLQEFIPKKRVIEYYVVPLPELQV

SEQ ID NO: 78215 - protein, 33 aa, Artificial Sequence; identical to SEQ ID NO: 28000
  Cyclic GFR-binding peptide
  MOD_RES (31), (32): Xaa is C or S

SEQ ID NO: 78216 - protein, 29 aa, Artificial Sequence
  Cyclic GFR-binding peptide
  MOD_RES (2), (2): Xaa is C or S
GXARVVMNVTAKKIVNSSDDIKRVQVPRL

SEQ ID NO: 78217 - protein, 33 aa, Artificial Sequence
  Cyclic GFR-binding peptide
  MOD_RES (28), (28): Xaa is C or S
NSLQEHQGQHPKIRYYVMPLPEEETPVXELGED

SEQ ID NO: 78218 - protein, 25 aa, Artificial Sequence
  Cyclic GFR-binding peptide
KVIMVTAKKIKPTKGIIKRIQVPRL

SEQ ID NO: 78219 - protein, 28 aa, Artificial Sequence
  Cyclic GFR-binding peptide
  MOD_RES (26), (27): Xaa is C or S
SMEGIIVNSSDDMIQVTINSLKTPAXXP

SEQ ID NO: 78220 - protein, 32 aa, Artificial Sequence
  Cyclic GFR-binding peptide
  MOD_RES (32), (32): Xaa is C or S
LTNSLQEFIPKKRVIEYYLVTLPELQVQTPRX

SEQ ID NO: 78221 - protein, 37 aa, Artificial Sequence; identical to SEQ ID NO: 28003
  Cyclic GFR-binding peptide
  MOD_RES (31), (32): Xaa is C or S

SEQ ID NO: 78222 - protein, 30 aa, Artificial Sequence
  Cyclic GFR-binding peptide
  MOD_RES (30), (30): Xaa is C or S
VVMNVQVEKIVNSSDDVKAVKVSRLQTPAX

SEQ ID NO: 78223 - protein, 38 aa, Artificial Sequence; identical to SEQ ID NO: 28007
  Cyclic GFR-binding peptide
  MOD_RES (1), (3), (34), (35): Xaa is C or S

SEQ ID NO: 78224 - protein, 32 aa, Artificial Sequence
  Cyclic GFR-binding peptide
  MOD_RES (1), (1): Xaa is C or S
XKNHQLFNSLQEHQGQHPKIRYYVMPLPEEET

SEQ ID NO: 78225 - protein, 31 aa, Artificial Sequence
  Cyclic GFR-binding peptide
  MOD_RES (1), (1): Xaa is C or S
XARVVMNVTAKKIVNSSDDIKRVQVPRLQTP

SEQ ID NO: 78226 - protein, 33 aa, Artificial Sequence
  Cyclic GFR-binding peptide
  MOD_RES (33), (33): Xaa is C or S
ELRNSLQELKPKKRVYEYYLVTLPEHHVRSPQX

SEQ ID NO: 78227 - protein, 22 aa, Artificial Sequence
  Cyclic GFR-binding peptide
SMEGIVKPKRGVMIQITINSLA

SEQ ID NO: 78228 - protein, 23 aa, Artificial Sequence
  Cyclic GFR-binding peptide
VMNVTAKKIVNSSDDIKRVQVPR

SEQ ID NO: 78229 - protein, 34 aa, Artificial Sequence
  Cyclic GFR-binding peptide
  MOD_RES (30), (31): Xaa is C or S
VVMNSMEGIIVNSSDDMIQVTINSLKTPAXXPKP

SEQ ID NO: 78230 - protein, 25 aa, Artificial Sequence
  Cyclic GFR-binding peptide
KVVMVQVEKVKPTRGVVKAIKVSRL

SEQ ID NO: 78231 - protein, 25 aa, Artificial Sequence
  Cyclic GFR-binding peptide
MDVTAKKVVKENEDIKRMQVPRLET

SEQ ID NO: 78232 - protein, 27 aa, Artificial Sequence
  Cyclic GFR-binding peptide
EVVMEVTAKKVVKDYEDIKRMQVPRLE

SEQ ID NO: 78233 - protein, 26 aa, Artificial Sequence
  Cyclic GFR-binding peptide
GEVVMEVQVEKVVKDYEDVKAMKVSR

SEQ ID NO: 78234 - protein, 35 aa, Artificial Sequence
  Cyclic GFR-binding peptide
  MOD_RES (1), (3): Xaa is C or S
XAXELHEELRNSLQELKPKKRVYEYYVVPLPEHHV

SEQ ID NO: 78235 - protein, 32 aa, Artificial Sequence
  Cyclic GFR-binding peptide
  MOD_RES (26), (27): Xaa is C or S
VTAKKVVKENEDIKRMQVPRLETPVXXAKPIK

SEQ ID NO: 78236 - protein, 29 aa, Artificial Sequence
  Cyclic GFR-binding peptide
SRVIMVQVEKVKPKRGVVKAIKVSRLAQP

SEQ ID NO: 78237 - protein, 34 aa, Artificial Sequence; identical to SEQ ID NO: 28028
  Cyclic GFR-binding peptide
  MOD_RES (1), (3): Xaa is C or S

SEQ ID NO: 78238 - protein, 40 aa, Artificial Sequence; identical to SEQ ID NO: 28033
  Cyclic GFR-binding peptide
  MOD_RES (2), (4), (36), (37): Xaa is C or S

SEQ ID NO: 78239 - protein, 35 aa, Artificial Sequence
  Cyclic GFR-binding peptide
  MOD_RES (2), (2): Xaa is C or S
KXALHDELTNSLQEFIPKKRVIEYYVVPLPELQVQ

SEQ ID NO: 78240 - protein, 29 aa, Artificial Sequence
  Cyclic GFR-binding peptide
HQLFNSLQEHQGQHPKIRYYVMPLPEEET

SEQ ID NO: 78241 - protein, 26 aa, Artificial Sequence
  Cyclic GFR-binding peptide
SKVIMVTAKKIKPTKGIIKRIQVPRL

SEQ ID NO: 78242 - protein, 28 aa, Artificial Sequence
  Cyclic GFR-binding peptide
ARVVMNVQVEKIVNSSDDVKAVKVSRLQ

SEQ ID NO: 78243 - protein, 38 aa, Artificial Sequence; identical to SEQ ID NO: 28042
  Cyclic GFR-binding peptide
  MOD_RES (35), (35): Xaa is C or S

SEQ ID NO: 78244 - protein, 29 aa, Artificial Sequence
  Cyclic GFR-binding peptide
  MOD_RES (2), (2): Xaa is C or S
KXSRVIMVTAKKVKPKRGVIKRIQVPRLA

SEQ ID NO: 78245 - protein, 32 aa, Artificial Sequence
  Cyclic GFR-binding peptide
  MOD_RES (29), (30): Xaa is C or S
VIMSMEGIVKPKRGVMIQITINSLAQPVXXPA

SEQ ID NO: 78246 - protein, 35 aa, Artificial Sequence; identical to SEQ ID NO: 28045
  Cyclic GFR-binding peptide
  MOD_RES (31), (32): Xaa is C or S

SEQ ID NO: 78247 - protein, 35 aa, Artificial Sequence
  Cyclic GFR-binding peptide
  MOD_RES (32), (32): Xaa is C or S
LTNSLQEFIPKKRVIEYYVVPLPELQVQTPRXQVN

SEQ ID NO: 78248 - protein, 33 aa, Artificial Sequence
  Cyclic GFR-binding peptide
  MOD_RES (2), (2): Xaa is C or S
AXELHEELRNSLQELKPKKRVYEYYVVPLPEHH

SEQ ID NO: 78249 - protein, 27 aa, Artificial Sequence
  Cyclic GFR-binding peptide
VVMDSMEGIVVKENEDMIQMTINSLET

SEQ ID NO: 78250 - protein, 32 aa, Artificial Sequence
  Cyclic GFR-binding peptide
  MOD_RES (31), (31): Xaa is C or S
TNSLQEFIPKKRVIEYYLVTLPELQVQTPRXQ

SEQ ID NO: 78251 - protein, 30 aa, Artificial Sequence
  Cyclic GFR-binding peptide
  MOD_RES (1), (3): Xaa is C or S
XKXSKVVMVQVEKVKPTRGVVKAIKVSRLD

SEQ ID NO: 78252 - protein, 41 aa, Artificial Sequence; identical to SEQ ID NO: 28049
  Cyclic GFR-binding peptide
  MOD_RES (1), (35): Xaa is C or S

SEQ ID NO: 78253 - protein, 26 aa, Artificial Sequence
  Cyclic GFR-binding peptide
LRNSLQELKPKKRVYEYYVVPLPEHH

SEQ ID NO: 78254 - protein, 32 aa, Artificial Sequence
  Cyclic GFR-binding peptide
  MOD_RES (27), (28): Xaa is C or S
MVQVEKVKPTRGVVKAIKVSRLDQPVXXPSAS

SEQ ID NO: 78255 - protein, 45 aa, Artificial Sequence; identical to SEQ ID NO: 28051
  Cyclic GFR-binding peptide
  MOD_RES (2), (4), (41): Xaa is C or S

SEQ ID NO: 78256 - protein, 38 aa, Artificial Sequence; identical to SEQ ID NO: 28054
  Cyclic GFR-binding peptide
  MOD_RES (1), (32), (33): Xaa is C or S

SEQ ID NO: 78257 - protein, 32 aa, Artificial Sequence; identical to SEQ ID NO: 28055
  Cyclic GFR-binding peptide
  MOD_RES (32), (32): Xaa is C or S

SEQ ID NO: 78258 - protein, 27 aa, Artificial Sequence
  Cyclic GFR-binding peptide
SKVVMSMEGIVKPTRGVMIQITINSLD

SEQ ID NO: 78259 - protein, 28 aa, Artificial Sequence
  Cyclic GFR-binding peptide
  MOD_RES (1), (1): Xaa is C or S
XSRVIMSMEGIVKPKRGVMIQITINSLA

SEQ ID NO: 78260 - protein, 30 aa, Artificial Sequence
  Cyclic GFR-binding peptide
  MOD_RES (2), (2): Xaa is C or S
GXGEVVMEVQVEKVVKDYEDVKAMKVSRLE

SEQ ID NO: 78261 - protein, 30 aa, Artificial Sequence
  Cyclic GFR-binding peptide
  MOD_RES (2), (2): Xaa is C or S
KXSRVIMVTAKKVKPKRGVIKRIQVPRLAQ

SEQ ID NO: 78262 - protein, 28 aa, Artificial Sequence
  Cyclic GFR-binding peptide
LFNSLQEHQGQHPKIRYYVMPLPEEETP

SEQ ID NO: 78263 - protein, 24 aa, Artificial Sequence
  Cyclic GFR-binding peptide
TNSLQEFIPKKRVIEYYVVPLPEL

SEQ ID NO: 78264 - protein, 42 aa, Artificial Sequence; identical to SEQ ID NO: 28067
  Cyclic GFR-binding peptide
  MOD_RES (1), (3), (40): Xaa is C or S

SEQ ID NO: 78265 - protein, 32 aa, Artificial Sequence; identical to SEQ ID NO: 28072
  Cyclic GFR-binding peptide
  MOD_RES (2), (2): Xaa is C or S

SEQ ID NO: 78266 - protein, 26 aa, Artificial Sequence
  Cyclic GFR-binding peptide
DVQVEKVVKENEDVKAMKVSRLETPV

SEQ ID NO: 78267 - protein, 34 aa, Artificial Sequence; identical to SEQ ID NO: 28079
  Cyclic GFR-binding peptide
  MOD_RES (2), (34): Xaa is C or S

SEQ ID NO: 78268 - protein, 39 aa, Artificial Sequence; identical to SEQ ID NO: 28081
  Cyclic GFR-binding peptide
  MOD_RES (1), (3), (35): Xaa is C or S

SEQ ID NO: 78269 - protein, 37 aa, Artificial Sequence; identical to SEQ ID NO: 28084
  Cyclic GFR-binding peptide
  MOD_RES (1), (32), (33): Xaa is C or S

SEQ ID NO: 78270 - protein, 40 aa, Artificial Sequence; identical to SEQ ID NO: 28085
  Cyclic GFR-binding peptide
  MOD_RES (37), (37): Xaa is C or S

SEQ ID NO: 78271 - protein, 27 aa, Artificial Sequence
  Cyclic GFR-binding peptide
KVVMVQVEKVKPTRGVVKAIKVSRLDQ

SEQ ID NO: 78272 - protein, 23 aa, Artificial Sequence
  Cyclic GFR-binding peptide
VMNSMEGIIVNSSDDMIQVTINS

SEQ ID NO: 78273 - protein, 29 aa, Artificial Sequence
  Cyclic GFR-binding peptide
NSLQEFIPKKRVIEYYLVTLPELQVQTPR

SEQ ID NO: 78274 - protein, 25 aa, Artificial Sequence
  Cyclic GFR-binding peptide
MSMEGIIKPTKGIMIQITINSLDQS

SEQ ID NO: 78275 - protein, 30 aa, Artificial Sequence; identical to SEQ ID NO: 28089
  Cyclic GFR-binding peptide

SEQ ID NO: 78276 - protein, 31 aa, Artificial Sequence
  Cyclic GFR-binding peptide
  MOD_RES (2), (2): Xaa is C or S
GXGEVVMDVQVEKVVKENEDVKAMKVSRLET

SEQ ID NO: 78277 - protein, 41 aa, Artificial Sequence; identical to SEQ ID NO: 28091
  Cyclic GFR-binding peptide
  MOD_RES (1), (38): Xaa is C or S

SEQ ID NO: 78278 - protein, 33 aa, Artificial Sequence
  Cyclic GFR-binding peptide
  MOD_RES (1), (3): Xaa is C or S
XAXELHEELRNSLQELKPKKRVYEYYLVTLPEH

SEQ ID NO: 78279 - protein, 31 aa, Artificial Sequence
  Cyclic GFR-binding peptide
  MOD_RES (1), (3): Xaa is C or S
XKXSKVIMVTAKKIKPTKGIIKRIQVPRLDQ

SEQ ID NO: 78280 - protein, 24 aa, Artificial Sequence
  Cyclic GFR-binding peptide
VMESMEGIVVKDYEDMIQMTINSL

SEQ ID NO: 78281 - protein, 38 aa, Artificial Sequence; identical to SEQ ID NO: 28099
  Cyclic GFR-binding peptide
  MOD_RES (2), (33), (34): Xaa is C or S

SEQ ID NO: 78282 - protein, 23 aa, Artificial Sequence
  Cyclic GFR-binding peptide
MNVQVEKIVNSSDDVKAVKVSRL

SEQ ID NO: 78283 - protein, 35 aa, Artificial Sequence; identical to SEQ ID NO: 28100
  Cyclic GFR-binding peptide
  MOD_RES (32), (33): Xaa is C or S

SEQ ID NO: 78284 - protein, 31 aa, Artificial Sequence
  Cyclic GFR-binding peptide
  MOD_RES (2), (2): Xaa is C or S
GXGEVVMESMEGIVVKDYEDMIQMTINSLET

SEQ ID NO: 78285 - protein, 22 aa, Artificial Sequence
  Cyclic GFR-binding peptide
IMVTAKKIKPTKGIIKRIQVPR

SEQ ID NO: 78286 - protein, 36 aa, Artificial Sequence
  Cyclic GFR-binding peptide
  MOD_RES (1), (3): Xaa is C or S
XKXALHDELTNSLQEFIPKKRVIEYYVVPLPELQVQ

SEQ ID NO: 78287 - protein, 28 aa, Artificial Sequence
  Cyclic GFR-binding peptide
  MOD_RES (1), (1): Xaa is C or S
XARVVMNSMEGIIVNSSDDMIQVTINSL

SEQ ID NO: 78288 - protein, 40 aa, Artificial Sequence; identical to SEQ ID NO: 28108
  Cyclic GFR-binding peptide
  MOD_RES (1), (3), (35), (36): Xaa is C or S

SEQ ID NO: 78289 - protein, 32 aa, Artificial Sequence
  Cyclic GFR-binding peptide
  MOD_RES (29), (30): Xaa is C or S
VIMVTAKKVKPKRGVIKRIQVPRLAQPVXXPA

SEQ ID NO: 78290 - protein, 28 aa, Artificial Sequence
  Cyclic GFR-binding peptide
  MOD_RES (2), (2): Xaa is C or S
GXSRVVMNVTAKKIVNSSDDIKRVQVPR

SEQ ID NO: 78291 - protein, 32 aa, Artificial Sequence; identical to SEQ ID NO: 28113
  Cyclic GFR-binding peptide
  MOD_RES (32), (32): Xaa is C or S

SEQ ID NO: 78292 - protein, 28 aa, Artificial Sequence
  Cyclic GFR-binding peptide
KVIMVQVEKIKPTKGIVKAIKVSRLDQS

SEQ ID NO: 78293 - protein, 28 aa, Artificial Sequence
  Cyclic GFR-binding peptide
  MOD_RES (2), (2): Xaa is C or S
GXARVVMNSMEGIIVNSSDDMIQVTINS

SEQ ID NO: 78294 - protein, 22 aa, Artificial Sequence
  Cyclic GFR-binding peptide
VMVQVEKVKPTRGVVKAIKVSR

SEQ ID NO: 78295 - protein, 31 aa, Artificial Sequence; identical to SEQ ID NO: 28116
  Cyclic GFR-binding peptide
  MOD_RES (31), (31): Xaa is C or S

SEQ ID NO: 78296 - protein, 32 aa, Artificial Sequence
  Cyclic GFR-binding peptide
EELRNSLQELKPKKRVYEYYVVPLPEHHVRSP

SEQ ID NO: 78297 - protein, 28 aa, Artificial Sequence
  Cyclic GFR-binding peptide
VMNVTAKKIVNSSDDIKRVQVPRLQTPA

SEQ ID NO: 78298 - protein, 24 aa, Artificial Sequence
  Cyclic GFR-binding peptide
MDSMEGIVVKENEDMIQMTINSLE

SEQ ID NO: 78299 - protein, 35 aa, Artificial Sequence; identical to SEQ ID NO: 28119
  Cyclic GFR-binding peptide
  MOD_RES (1), (1): Xaa is C or S

SEQ ID NO: 78300 - protein, 30 aa, Artificial Sequence
  Cyclic GFR-binding peptide
  MOD_RES (2), (4): Xaa is C or S
SXKXSKVIMSMEGIIKPTKGIMIQITINSL

SEQ ID NO: 78301 - protein, 37 aa, Artificial Sequence; identical to SEQ ID NO: 28121
  Cyclic GFR-binding peptide
  MOD_RES (31), (32): Xaa is C or S

SEQ ID NO: 78302 - protein, 37 aa, Artificial Sequence; identical to SEQ ID NO: 28123
  Cyclic GFR-binding peptide
  MOD_RES (36), (36): Xaa is C or S

SEQ ID NO: 78303 - protein, 26 aa, Artificial Sequence
  Cyclic GFR-binding peptide
NSLQELKPKKRVYEYYVVPLPEHHVR

SEQ ID NO: 78304 - protein, 38 aa, Artificial Sequence; identical to SEQ ID NO: 28125
  Cyclic GFR-binding peptide
  MOD_RES (2), (2): Xaa is C or S

SEQ ID NO: 78305 - protein, 27 aa, Artificial Sequence
  Cyclic GFR-binding peptide
SRVVMNVQVEKIVNSSDDVKAVKVSRL

SEQ ID NO: 78306 - protein, 37 aa, Artificial Sequence; identical to SEQ ID NO: 28129
  Cyclic GFR-binding peptide
  MOD_RES (1), (3), (34), (35): Xaa is C or S

SEQ ID NO: 78307 - protein, 38 aa, Artificial Sequence; identical to SEQ ID NO: 28130
  Cyclic GFR-binding peptide
  MOD_RES (2), (4), (35), (36): Xaa is C or S

SEQ ID NO: 78308 - protein, 36 aa, Artificial Sequence; identical to SEQ ID NO: 28131
  Cyclic GFR-binding peptide
  MOD_RES (31), (32): Xaa is C or S

SEQ ID NO: 78309 - protein, 30 aa, Artificial Sequence
  Cyclic GFR-binding peptide
  MOD_RES (27), (28): Xaa is C or S
MSMEGIVKPTRGVMIQITINSLDQPVXXPS

SEQ ID NO: 78310 - protein, 27 aa, Artificial Sequence
  Cyclic GFR-binding peptide
KVIMVQVEKIKPTKGIVKAIKVSRLDQ

SEQ ID NO: 78311 - protein, 35 aa, Artificial Sequence; identical to SEQ ID NO: 28133
  Cyclic GFR-binding peptide
  MOD_RES (31), (32): Xaa is C or S

SEQ ID NO: 78312 - protein, 34 aa, Artificial Sequence
  Cyclic GFR-binding peptide
  MOD_RES (29), (30): Xaa is C or S
VMNVQVEKIVNSSDDVKAVKVSRLKTPAXXPKPV

SEQ ID NO: 78313 - protein, 34 aa, Artificial Sequence
  Cyclic GFR-binding peptide
  MOD_RES (31), (31): Xaa is C or S
QLFNSLQEHQGQHPKIRYYVMPLPEEETPVXELG

SEQ ID NO: 78314 - protein, 27 aa, Artificial Sequence
  Cyclic GFR-binding peptide
ARVVMNVQVEKIVNSSDDVKAVKVSRL

SEQ ID NO: 78315 - protein, 32 aa, Artificial Sequence
  Cyclic GFR-binding peptide
  MOD_RES (26), (27): Xaa is C or S
VTAKKVKPKRGVIKRIQVPRLAQPVXXPAASA

SEQ ID NO: 78316 - protein, 29 aa, Artificial Sequence
  Cyclic GFR-binding peptide
  MOD_RES (27), (28): Xaa is C or S
DVTAKKVVKENEDIKRMQVPRLETPVXXA

SEQ ID NO: 78317 - protein, 29 aa, Artificial Sequence
  Cyclic GFR-binding peptide
HQLFNSLQEHQGQHPKIRYYLMTLPEEET

SEQ ID NO: 78318 - protein, 27 aa, Artificial Sequence
  Cyclic GFR-binding peptide
FNSLQEHQGQHPKIRYYVMPLPEEETP

SEQ ID NO: 78319 - protein, 36 aa, Artificial Sequence; identical to SEQ ID NO: 28140
  Cyclic GFR-binding peptide
  MOD_RES (1), (32), (33): Xaa is C or S

SEQ ID NO: 78320 - protein, 42 aa, Artificial Sequence; identical to SEQ ID NO: 28144
  Cyclic GFR-binding peptide
  MOD_RES (1), (38): Xaa is C or S

SEQ ID NO: 78321 - protein, 32 aa, Artificial Sequence
  Cyclic GFR-binding peptide
  MOD_RES (1), (1): Xaa is C or S
XELHEELRNSLQELKPKKRVYEYYVVPLPEHH

SEQ ID NO: 78322 - protein, 32 aa, Artificial Sequence; identical to SEQ ID NO: 28149
  Cyclic GFR-binding peptide

SEQ ID NO: 78323 - protein, 31 aa, Artificial Sequence
  Cyclic GFR-binding peptide
KNHQLFNSLQEHQGQHPKIRYYVMPLPEEET

SEQ ID NO: 78324 - protein, 36 aa, Artificial Sequence; identical to SEQ ID NO: 28153
  Cyclic GFR-binding peptide
  MOD_RES (31), (32): Xaa is C or S

SEQ ID NO: 78325 - protein, 31 aa, Artificial Sequence
  Cyclic GFR-binding peptide
  MOD_RES (2), (2): Xaa is C or S
KXSRVIMVTAKKVKPKRGVIKRIQVPRLAQP

SEQ ID NO: 78326 - protein, 35 aa, Artificial Sequence
  Cyclic GFR-binding peptide
  MOD_RES (32), (32): Xaa is C or S
HQLFNSLQEHQGQHPKIRYYVMPLPEEETPVXELG

SEQ ID NO: 78327 - protein, 40 aa, Artificial Sequence; identical to SEQ ID NO: 28155
  Cyclic GFR-binding peptide
  MOD_RES (1), (38): Xaa is C or S

SEQ ID NO: 78328 - protein, 37 aa, Artificial Sequence; identical to SEQ ID NO: 28156
  Cyclic GFR-binding peptide
  MOD_RES (2), (34): Xaa is C or S

SEQ ID NO: 78329 - protein, 28 aa, Artificial Sequence
  Cyclic GFR-binding peptide
VVMNVQVEKIVNSSDDVKAVKVSRLQTP

SEQ ID NO: 78330 - protein, 23 aa, Artificial Sequence
  Cyclic GFR-binding peptide
VMNVQVEKIVNSSDDVKAVKVSR

SEQ ID NO: 78331 - protein, 31 aa, Artificial Sequence
  Cyclic GFR-binding peptide
  MOD_RES (1), (1): Xaa is C or S
XSRVVMNVTAKKIVNSSDDIKRVQVPRLKTP

SEQ ID NO: 78332 - protein, 29 aa, Artificial Sequence
  Cyclic GFR-binding peptide
DELTNSLQEFIPKKRVIEYYLVTLPELQV

SEQ ID NO: 78333 - protein, 34 aa, Artificial Sequence
  Cyclic GFR-binding peptide
  MOD_RES (1), (3): Xaa is C or S
XEXKNHQLFNSLQEHQGQHPKIRYYVMPLPEEET

SEQ ID NO: 78334 - protein, 26 aa, Artificial Sequence
  Cyclic GFR-binding peptide
LTNSLQEFIPKKRVIEYYVVPLPELQ

SEQ ID NO: 78335 - protein, 31 aa, Artificial Sequence
  Cyclic GFR-binding peptide
  MOD_RES (29), (30): Xaa is C or S
VMNVQVEKIVNSSDDVKAVKVSRLQTPAXXP

SEQ ID NO: 78336 - protein, 31 aa, Artificial Sequence
  Cyclic GFR-binding peptide
AAAAAAAAANSLQEHQGQHPKIRYYVMPLPE

SEQ ID NO: 78337 - protein, 30 aa, Artificial Sequence
  Cyclic GFR-binding peptide
  MOD_RES (1), (1): Xaa is C or S
XELHEELRNSLQELKPKKRVYEYYLVTLPE

SEQ ID NO: 78338 - protein, 30 aa, Artificial Sequence
  Cyclic GFR-binding peptide
NHQLFNSLQEHQGQHPKIRYYLMTLPEEET

SEQ ID NO: 78339 - protein, 32 aa, Artificial Sequence
  Cyclic GFR-binding peptide
  MOD_RES (2), (2): Xaa is C or S
GXGEVVMEVQVEKVVKDYEDVKAMKVSRLETP

SEQ ID NO: 78340 - protein, 27 aa, Artificial Sequence
  Cyclic GFR-binding peptide
  MOD_RES (2), (2): Xaa is C or S
KXSRVIMVQVEKVKPKRGVVKAIKVSR

SEQ ID NO: 78341 - protein, 30 aa, Artificial Sequence
  Cyclic GFR-binding peptide
  MOD_RES (26), (26): Xaa is C or S
VTAKKIVNSSDDIKRVQVPRLKTPAXTPKT

SEQ ID NO: 78342 - protein, 28 aa, Artificial Sequence
  Cyclic GFR-binding peptide
LHDELTNSLQEFIPKKRVIEYYLVTLPE

SEQ ID NO: 78343 - protein, 32 aa, Artificial Sequence
  Cyclic GFR-binding peptide
  MOD_RES (30), (31): Xaa is C or S
RVIMVTAKKVKPKRGVIKRIQVPRLAQPVXXP

SEQ ID NO: 78344 - protein, 29 aa, Artificial Sequence
  Cyclic GFR-binding peptide
  MOD_RES (1), (1): Xaa is C or S
XSRVVMNVQVEKIVNSSDDVKAVKVSRLK

SEQ ID NO: 78345 - protein, 38 aa, Artificial Sequence; identical to SEQ ID NO: 28179
  Cyclic GFR-binding peptide
  MOD_RES (1), (3): Xaa is C or S

SEQ ID NO: 78346 - protein, 38 aa, Artificial Sequence; identical to SEQ ID NO: 28180
  Cyclic GFR-binding peptide
  MOD_RES (2), (4), (35), (36): Xaa is C or S

SEQ ID NO: 78347 - protein, 40 aa, Artificial Sequence; identical to SEQ ID NO: 28181
  Cyclic GFR-binding peptide
  MOD_RES (1), (3), (35): Xaa is C or S

SEQ ID NO: 78348 - protein, 23 aa, Artificial Sequence
  Cyclic GFR-binding peptide
RNSLQELKPKKRVYEYYLVTLPE

SEQ ID NO: 78349 - protein, 27 aa, Artificial Sequence
  Cyclic GFR-binding peptide
  MOD_RES (27), (27): Xaa is C or S
DVTAKKVVKENEDIKRMQVPRLETPVX

SEQ ID NO: 78350 - protein, 26 aa, Artificial Sequence
  Cyclic GFR-binding peptide
NSLQEHQGQHPKIRYYLMTLPEEETP

SEQ ID NO: 78351 - protein, 34 aa, Artificial Sequence
  Cyclic GFR-binding peptide
  MOD_RES (29), (30): Xaa is C or S
VIMSMEGIVKPKRGVMIQITINSLAQPVXXPAAS

SEQ ID NO: 78352 - protein, 31 aa, Artificial Sequence; identical to SEQ ID NO: 28185
  Cyclic GFR-binding peptide
  MOD_RES (31), (31): Xaa is C or S

SEQ ID NO: 78353 - protein, 29 aa, Artificial Sequence
  Cyclic GFR-binding peptide
EVVMEVTAKKVVKDYEDIKRMQVPRLETP

SEQ ID NO: 78354 - protein, 33 aa, Artificial Sequence; identical to SEQ ID NO: 28186
  Cyclic GFR-binding peptide
  MOD_RES (2), (2): Xaa is C or S

SEQ ID NO: 78355 - protein, 25 aa, Artificial Sequence
  Cyclic GFR-binding peptide
VTAKKIVNSSDDIKRVQVPRLQTPA

SEQ ID NO: 78356 - protein, 25 aa, Artificial Sequence
  Cyclic GFR-binding peptide
VVMVQVEKVKPTRGVVKAIKVSRLD

SEQ ID NO: 78357 - protein, 32 aa, Artificial Sequence; identical to SEQ ID NO: 28200
  Cyclic GFR-binding peptide
  MOD_RES (31), (32): Xaa is C or S

SEQ ID NO: 78358 - protein, 29 aa, Artificial Sequence
  Cyclic GFR-binding peptide
  MOD_RES (1), (1): Xaa is C or S
XGEVVMEVTAKKVVKDYEDIKRMQVPRLE

SEQ ID NO: 78359 - protein, 28 aa, Artificial Sequence
  Cyclic GFR-binding peptide
  MOD_RES (1), (1): Xaa is C or S
XARVVMNVQVEKIVNSSDDVKAVKVSRL

SEQ ID NO: 78360 - protein, 35 aa, Artificial Sequence; identical to SEQ ID NO: 28205
  Cyclic GFR-binding peptide
  MOD_RES (2), (34), (35): Xaa is C or S

SEQ ID NO: 78361 - protein, 29 aa, Artificial Sequence
  Cyclic GFR-binding peptide
  MOD_RES (1), (3): Xaa is C or S
XGXARVVMNSMEGIIVNSSDDMIQVTINS

SEQ ID NO: 78362 - protein, 30 aa, Artificial Sequence
  Cyclic GFR-binding peptide
  MOD_RES (29), (29): Xaa is C or S
VMNVQVEKIVNSSDDVKAVKVSRLKTPAXT

SEQ ID NO: 78363 - protein, 30 aa, Artificial Sequence
  Cyclic GFR-binding peptide
  MOD_RES (1), (3): Xaa is C or S
XKXSKVIMSMEGIIKPTKGIMIQITINSLD

SEQ ID NO: 78364 - protein, 31 aa, Artificial Sequence
  Cyclic GFR-binding peptide
HDELTNSLQEFIPKKRVIEYYVVPLPELQVQ

SEQ ID NO: 78365 - protein, 24 aa, Artificial Sequence
  Cyclic GFR-binding peptide
EVTAKKVVKDYEDIKRMQVPRLET

SEQ ID NO: 78366 - protein, 36 aa, Artificial Sequence
  Cyclic GFR-binding peptide
  MOD_RES (2), (4): Xaa is C or S
AXAXELHEELRNSLQELKPKKRVYEYYLVTLPEHHV

SEQ ID NO: 78367 - protein, 27 aa, Artificial Sequence
  Cyclic GFR-binding peptide
VIMSMEGIVKPKRGVMIQITINSLAQP

SEQ ID NO: 78368 - protein, 34 aa, Artificial Sequence
  Cyclic GFR-binding peptide
  MOD_RES (29), (30): Xaa is C or S
VMNSMEGIIVNSSDDMIQVTINSLKTPAXXPKPV

SEQ ID NO: 78369 - protein, 30 aa, Artificial Sequence
  Cyclic GFR-binding peptide
  MOD_RES (1), (1): Xaa is C or S
XARVVMNVTAKKIVNSSDDIKRVQVPRLQT

SEQ ID NO: 78370 - protein, 34 aa, Artificial Sequence; identical to SEQ ID NO: 28211
  Cyclic GFR-binding peptide
  MOD_RES (1), (32), (33): Xaa is C or S

SEQ ID NO: 78371 - protein, 35 aa, Artificial Sequence
  Cyclic GFR-binding peptide
  MOD_RES (29), (30): Xaa is C or S
VMDVTAKKVVKENEDIKRMQVPRLETPVXXAKPIK

SEQ ID NO: 78372 - protein, 33 aa, Artificial Sequence; identical to SEQ ID NO: 28213
  Cyclic GFR-binding peptide
  MOD_RES (2), (2): Xaa is C or S

SEQ ID NO: 78373 - protein, 28 aa, Artificial Sequence
  Cyclic GFR-binding peptide
SKVVMVTAKKVKPTRGVIKRIQVPRLDQ

SEQ ID NO: 78374 - protein, 25 aa, Artificial Sequence
  Cyclic GFR-binding peptide
QLFNSLQEHQGQHPKIRYYVMPLPE

SEQ ID NO: 78375 - protein, 32 aa, Artificial Sequence
  Cyclic GFR-binding peptide
  MOD_RES (2), (4): Xaa is C or S
SXKXSKVVMVQVEKVKPTRGVVKAIKVSRLDQ

SEQ ID NO: 78376 - protein, 31 aa, Artificial Sequence
  Cyclic GFR-binding peptide
  MOD_RES (30), (31): Xaa is C or S
VVMDVQVEKVVKENEDVKAMKVSRLETPVXX

SEQ ID NO: 78377 - protein, 34 aa, Artificial Sequence
  Cyclic GFR-binding peptide
  MOD_RES (28), (29): Xaa is C or S
MNVQVEKIVNSSDDVKAVKVSRLKTPAXXPKPVY

SEQ ID NO: 78378 - protein, 31 aa, Artificial Sequence
  Cyclic GFR-binding peptide
EELRNSLQELKPKKRVYEYYVVPLPEHHVRS

SEQ ID NO: 78379 - protein, 28 aa, Artificial Sequence
  Cyclic GFR-binding peptide
  MOD_RES (27), (27): Xaa is C or S
NSMEGIIVNSSDDMIQVTINSLKTPAXT

SEQ ID NO: 78380 - protein, 29 aa, Artificial Sequence
  Cyclic GFR-binding peptide
ALHDELTNSLQEFIPKKRVIEYYVVPLPE

SEQ ID NO: 78381 - protein, 33 aa, Artificial Sequence
  Cyclic GFR-binding peptide
  MOD_RES (27), (28): Xaa is C or S
MSMEGIIKPTKGIMIQITINSLDQSVXXPSASA

SEQ ID NO: 78382 - protein, 36 aa, Artificial Sequence; identical to SEQ ID NO: 28222
  Cyclic GFR-binding peptide
  MOD_RES (1), (3), (35), (36): Xaa is C or S

SEQ ID NO: 78383 - protein, 36 aa, Artificial Sequence
  Cyclic GFR-binding peptide
  MOD_RES (33), (33): Xaa is C or S
ELRNSLQELKPKKRVYEYYLVTLPEHHVRSPQXKVS

SEQ ID NO: 78384 - protein, 28 aa, Artificial Sequence
  Cyclic GFR-binding peptide
  MOD_RES (1), (1): Xaa is C or S
XGEVVMDVTAKKVVKENEDIKRMQVPRL

SEQ ID NO: 78385 - protein, 34 aa, Artificial Sequence
  Cyclic GFR-binding peptide
  MOD_RES (30), (31): Xaa is C or S
RVIMSMEGIVKPKRGVMIQITINSLAQPVXXPAA

SEQ ID NO: 78386 - protein, 37 aa, Artificial Sequence; identical to SEQ ID NO: 28226
  Cyclic GFR-binding peptide
  MOD_RES (35), (35): Xaa is C or S

SEQ ID NO: 78387 - protein, 33 aa, Artificial Sequence; identical to SEQ ID NO: 28227
  Cyclic GFR-binding peptide
  MOD_RES (1), (3): Xaa is C or S

SEQ ID NO: 78388 - protein, 23 aa, Artificial Sequence
  Cyclic GFR-binding peptide
MNVTAKKIVNSSDDIKRVQVPRL

SEQ ID NO: 78389 - protein, 28 aa, Artificial Sequence
  Cyclic GFR-binding peptide
  MOD_RES (1), (1): Xaa is C or S
XSKVIMVTAKKIKPTKGIIKRIQVPRLD

SEQ ID NO: 78390 - protein, 32 aa, Artificial Sequence
  Cyclic GFR-binding peptide
  MOD_RES (2), (2): Xaa is C or S
AXELHEELRNSLQELKPKKRVYEYYLVTLPEH

SEQ ID NO: 78391 - protein, 28 aa, Artificial Sequence
  Cyclic GFR-binding peptide
NSLQELKPKKRVYEYYLVTLPEHHVRSP

SEQ ID NO: 78392 - protein, 37 aa, Artificial Sequence; identical to SEQ ID NO: 28232
  Cyclic GFR-binding peptide
  MOD_RES (1), (33), (34): Xaa is C or S

SEQ ID NO: 78393 - protein, 27 aa, Artificial Sequence
  Cyclic GFR-binding peptide
  MOD_RES (2), (2): Xaa is C or S
KXSKVIMVTAKKIKPTKGIIKRIQVPR

SEQ ID NO: 78394 - protein, 36 aa, Artificial Sequence; identical to SEQ ID NO: 28233
  Cyclic GFR-binding peptide
  MOD_RES (1), (3), (35): Xaa is C or S

SEQ ID NO: 78395 - protein, 28 aa, Artificial Sequence
  Cyclic GFR-binding peptide
  MOD_RES (2), (2): Xaa is C or S
GXGEVVMEVQVEKVVKDYEDVKAMKVSR

SEQ ID NO: 78396 - protein, 39 aa, Artificial Sequence; identical to SEQ ID NO: 28234
  Cyclic GFR-binding peptide
  MOD_RES (1), (3), (34), (35): Xaa is C or S

SEQ ID NO: 78397 - protein, 28 aa, Artificial Sequence
  Cyclic GFR-binding peptide
LHEELRNSLQELKPKKRVYEYYLVTLPE

SEQ ID NO: 78398 - protein, 25 aa, Artificial Sequence
  Cyclic GFR-binding peptide
VMNVQVEKIVNSSDDVKAVKVSRLK

SEQ ID NO: 78399 - protein, 35 aa, Artificial Sequence
  Cyclic GFR-binding peptide
  MOD_RES (30), (31): Xaa is C or S
VVMDVTAKKVVKENEDIKRMQVPRLETPVXXAKPI

SEQ ID NO: 78400 - protein, 39 aa, Artificial Sequence; identical to SEQ ID NO: 28239
  Cyclic GFR-binding peptide
  MOD_RES (34), (34): Xaa is C or S

SEQ ID NO: 78401 - protein, 36 aa, Artificial Sequence; identical to SEQ ID NO: 28238
  Cyclic GFR-binding peptide
  MOD_RES (32), (32): Xaa is C or S

SEQ ID NO: 78402 - protein, 33 aa, Artificial Sequence
  Cyclic GFR-binding peptide
  MOD_RES (1), (3): Xaa is C or S
XGXGEVVMDVQVEKVVKENEDVKAMKVSRLETP

SEQ ID NO: 78403 - protein, 31 aa, Artificial Sequence
  Cyclic GFR-binding peptide
  MOD_RES (30), (30): Xaa is C or S
LFNSLQEHQGQHPKIRYYLMTLPEEETPVXE

SEQ ID NO: 78404 - protein, 32 aa, Artificial Sequence; identical to SEQ ID NO: 28257
  Cyclic GFR-binding peptide
  MOD_RES (1), (1): Xaa is C or S

SEQ ID NO: 78405 - protein, 26 aa, Artificial Sequence
  Cyclic GFR-binding peptide
  MOD_RES (26), (26): Xaa is C or S
VTAKKVKPTRGVIKRIQVPRLDQPVX

SEQ ID NO: 78406 - protein, 37 aa, Artificial Sequence; identical to SEQ ID NO: 28259
  Cyclic GFR-binding peptide
  MOD_RES (1), (3), (34), (35): Xaa is C or S

SEQ ID NO: 78407 - protein, 31 aa, Artificial Sequence
  Cyclic GFR-binding peptide
  MOD_RES (2), (4): Xaa is C or S
HXGXARVVMNSMEGIIVNSSDDMIQVTINSL

SEQ ID NO: 78408 - protein, 32 aa, Artificial Sequence
  Cyclic GFR-binding peptide
  MOD_RES (2), (4): Xaa is C or S
HXGXSRVVMNSMEGIIVNSSDDMIQVTINSLK

SEQ ID NO: 78409 - protein, 36 aa, Artificial Sequence; identical to SEQ ID NO: 28266
  Cyclic GFR-binding peptide
  MOD_RES (1), (3), (35), (36): Xaa is C or S

SEQ ID NO: 78410 - protein, 30 aa, Artificial Sequence
  Cyclic GFR-binding peptide
GEVVMEVQVEKVVKDYEDVKAMKVSRLETP

SEQ ID NO: 78411 - protein, 23 aa, Artificial Sequence
  Cyclic GFR-binding peptide
VMVQVEKVKPTRGVVKAIKVSRL

SEQ ID NO: 78412 - protein, 32 aa, Artificial Sequence
  Cyclic GFR-binding peptide
  MOD_RES (2), (4): Xaa is C or S
RXGXGEVVMDVTAKKVVKENEDIKRMQVPRLE

SEQ ID NO: 78413 - protein, 33 aa, Artificial Sequence; identical to SEQ ID NO: 28276
  Cyclic GFR-binding peptide
  MOD_RES (31), (32): Xaa is C or S

SEQ ID NO: 78414 - protein, 22 aa, Artificial Sequence
  Cyclic GFR-binding peptide
VQVEKVVKENEDVKAMKVSRLE

SEQ ID NO: 78415 - protein, 21 aa, Artificial Sequence
  Cyclic GFR-binding peptide
VTAKKIVNSSDDIKRVQVPRL

SEQ ID NO: 78416 - protein, 33 aa, Artificial Sequence; identical to SEQ ID NO: 28283
  Cyclic GFR-binding peptide
  MOD_RES (2), (33): Xaa is C or S

SEQ ID NO: 78417 - protein, 39 aa, Artificial Sequence; identical to SEQ ID NO: 28284
  Cyclic GFR-binding peptide
  MOD_RES (2), (4), (36): Xaa is C or S

SEQ ID NO: 78418 - protein, 26 aa, Artificial Sequence
  Cyclic GFR-binding peptide
IMVQVEKVKPKRGVVKAIKVSRLAQP

SEQ ID NO: 78419 - protein, 31 aa, Artificial Sequence
  Cyclic GFR-binding peptide
  MOD_RES (29), (30): Xaa is C or S
VVMVTAKKVKPTRGVIKRIQVPRLDQPVXXP

SEQ ID NO: 78420 - protein, 22 aa, Artificial Sequence
  Cyclic GFR-binding peptide
MVQVEKVKPKRGVVKAIKVSRL

SEQ ID NO: 78421 - protein, 32 aa, Artificial Sequence
  Cyclic GFR-binding peptide
  MOD_RES (27), (28): Xaa is C or S
EVTAKKVVKDYEDIKRMQVPRLETPVXXAKPI

SEQ ID NO: 78422 - protein, 34 aa, Artificial Sequence
  Cyclic GFR-binding peptide
  MOD_RES (33), (33): Xaa is C or S
ELTNSLQEFIPKKRVIEYYLVTLPELQVQTPRXQ

SEQ ID NO: 78423 - protein, 36 aa, Artificial Sequence; identical to SEQ ID NO: 28287
  Cyclic GFR-binding peptide
  MOD_RES (1), (33), (34): Xaa is C or S

SEQ ID NO: 78424 - protein, 32 aa, Artificial Sequence
  Cyclic GFR-binding peptide
  MOD_RES (30), (30): Xaa is C or S
VVMNVTAKKIVNSSDDIKRVQVPRLKTPAXTP

SEQ ID NO: 78425 - protein, 35 aa, Artificial Sequence; identical to SEQ ID NO: 28290
  Cyclic GFR-binding peptide
  MOD_RES (31), (31): Xaa is C or S

SEQ ID NO: 78426 - protein, 37 aa, Artificial Sequence; identical to SEQ ID NO: 28292
  Cyclic GFR-binding peptide
  MOD_RES (1), (3), (35), (36): Xaa is C or S

SEQ ID NO: 78427 - protein, 28 aa, Artificial Sequence
  Cyclic GFR-binding peptide
RVVMNVQVEKIVNSSDDVKAVKVSRLQT

SEQ ID NO: 78428 - protein, 36 aa, Artificial Sequence; identical to SEQ ID NO: 28295
  Cyclic GFR-binding peptide
  MOD_RES (31), (32): Xaa is C or S

SEQ ID NO: 78429 - protein, 38 aa, Artificial Sequence; identical to SEQ ID NO: 28297
  Cyclic GFR-binding peptide
  MOD_RES (1), (3), (34), (35): Xaa is C or S

SEQ ID NO: 78430 - protein, 29 aa, Artificial Sequence
  Cyclic GFR-binding peptide
ARVVMNVTAKKIVNSSDDIKRVQVPRLQT

SEQ ID NO: 78431 - protein, 29 aa, Artificial Sequence
  Cyclic GFR-binding peptide
ELRNSLQELKPKKRVYEYYLVTLPEHHVR

SEQ ID NO: 78432 - protein, 25 aa, Artificial Sequence
  Cyclic GFR-binding peptide
VIMVTAKKVKPKRGVIKRIQVPRLA

SEQ ID NO: 78433 - protein, 31 aa, Artificial Sequence
  Cyclic GFR-binding peptide
NHQLFNSLQEHQGQHPKIRYYVMPLPEEETP

SEQ ID NO: 78434 - protein, 33 aa, Artificial Sequence; identical to SEQ ID NO: 28302
  Cyclic GFR-binding peptide
  MOD_RES (2), (33): Xaa is C or S

SEQ ID NO: 78435 - protein, 33 aa, Artificial Sequence
  Cyclic GFR-binding peptide
  MOD_RES (2), (4): Xaa is C or S
SXKXSRVIMSMEGIVKPKRGVMIQITINSLAQP

SEQ ID NO: 78436 - protein, 32 aa, Artificial Sequence
  Cyclic GFR-binding peptide
  MOD_RES (30), (30): Xaa is C or S
NSLQELKPKKRVYEYYVVPLPEHHVRSPQXKV

SEQ ID NO: 78437 - protein, 35 aa, Artificial Sequence; identical to SEQ ID NO: 28304
  Cyclic GFR-binding peptide
  MOD_RES (2), (4): Xaa is C or S

SEQ ID NO: 78438 - protein, 36 aa, Artificial Sequence; identical to SEQ ID NO: 28306
  Cyclic GFR-binding peptide
  MOD_RES (1), (3), (35), (36): Xaa is C or S

SEQ ID NO: 78439 - protein, 33 aa, Artificial Sequence
  Cyclic GFR-binding peptide
  MOD_RES (2), (4): Xaa is C or S
SXKXSKVIMSMEGIIKPTKGIMIQITINSLDQS

SEQ ID NO: 78440 - protein, 31 aa, Artificial Sequence
  Cyclic GFR-binding peptide
  MOD_RES (30), (30): Xaa is C or S
NSLQELKPKKRVYEYYLVTLPEHHVRSPQXK

SEQ ID NO: 78441 - protein, 30 aa, Artificial Sequence
  Cyclic GFR-binding peptide
ELRNSLQELKPKKRVYEYYVVPLPEHHVRS

SEQ ID NO: 78442 - protein, 37 aa, Artificial Sequence; identical to SEQ ID NO: 28309
  Cyclic GFR-binding peptide
  MOD_RES (1), (33), (34): Xaa is C or S

SEQ ID NO: 78443 - protein, 22 aa, Artificial Sequence
  Cyclic GFR-binding peptide
VMVTAKKVKPTRGVIKRIQVPR

SEQ ID NO: 78444 - protein, 38 aa, Artificial Sequence; identical to SEQ ID NO: 28312
  Cyclic GFR-binding peptide
  MOD_RES (2), (34): Xaa is C or S

SEQ ID NO: 78445 - protein, 41 aa, Artificial Sequence; identical to SEQ ID NO: 28314
  Cyclic GFR-binding peptide
  MOD_RES (2), (4), (41): Xaa is C or S

SEQ ID NO: 78446 - protein, 28 aa, Artificial Sequence
  Cyclic GFR-binding peptide
  MOD_RES (2), (2): Xaa is C or S
GXGEVVMDVTAKKVVKENEDIKRMQVPR

SEQ ID NO: 78447 - protein, 34 aa, Artificial Sequence
  Cyclic GFR-binding peptide
  MOD_RES (29), (30): Xaa is C or S
VMDVQVEKVVKENEDVKAMKVSRLETPVXXAKPI

SEQ ID NO: 78448 - protein, 35 aa, Artificial Sequence; identical to SEQ ID NO: 28322
  Cyclic GFR-binding peptide
  MOD_RES (2), (34), (35): Xaa is C or S

SEQ ID NO: 78449 - protein, 34 aa, Artificial Sequence
  Cyclic GFR-binding peptide
  MOD_RES (2), (4): Xaa is C or S
HXGXSRVVMNVQVEKIVNSSDDVKAVKVSRLKTP

SEQ ID NO: 78450 - protein, 35 aa, Artificial Sequence
  Cyclic GFR-binding peptide
  MOD_RES (30), (31): Xaa is C or S
VVMNVQVEKIVNSSDDVKAVKVSRLKTPAXXPKPV

SEQ ID NO: 78451 - protein, 35 aa, Artificial Sequence
  Cyclic GFR-binding peptide
  MOD_RES (33), (33): Xaa is C or S
ELTNSLQEFIPKKRVIEYYLVTLPELQVQTPRXQV

SEQ ID NO: 78452 - protein, 32 aa, Artificial Sequence
  Cyclic GFR-binding peptide
  MOD_RES (29), (30): Xaa is C or S
VMNVTAKKIVNSSDDIKRVQVPRLKTPAXXPK

SEQ ID NO: 78453 - protein, 25 aa, Artificial Sequence
  Cyclic GFR-binding peptide
LFNSLQEHQGQHPKIRYYVMPLPEE

SEQ ID NO: 78454 - protein, 34 aa, Artificial Sequence
  Cyclic GFR-binding peptide
  MOD_RES (1), (3): Xaa is C or S
XEXKNHQLFNSLQEHQGQHPKIRYYLMTLPEEET

SEQ ID NO: 78455 - protein, 32 aa, Artificial Sequence; identical to SEQ ID NO: 28329
  Cyclic GFR-binding peptide
  MOD_RES (2), (2): Xaa is C or S

SEQ ID NO: 78456 - protein, 33 aa, Artificial Sequence; identical to SEQ ID NO: 28330
  Cyclic GFR-binding peptide
  MOD_RES (2), (2): Xaa is C or S

SEQ ID NO: 78457 - protein, 22 aa, Artificial Sequence
  Cyclic GFR-binding peptide
VTAKKVKPKRGVIKRIQVPRLA

SEQ ID NO: 78458 - protein, 27 aa, Artificial Sequence
  Cyclic GFR-binding peptide
  MOD_RES (27), (27): Xaa is C or S
DVQVEKVVKENEDVKAMKVSRLETPVX

SEQ ID NO: 78459 - protein, 33 aa, Artificial Sequence
  Cyclic GFR-binding peptide
  MOD_RES (28), (28): Xaa is C or S
MNSMEGIIVNSSDDMIQVTINSLKTPAXTPKTV

SEQ ID NO: 78460 - protein, 33 aa, Artificial Sequence
  Cyclic GFR-binding peptide
  MOD_RES (28), (29): Xaa is C or S
MNVQVEKIVNSSDDVKAVKVSRLQTPAXXPKPV

SEQ ID NO: 78461 - protein, 34 aa, Artificial Sequence
  Cyclic GFR-binding peptide
  MOD_RES (30), (30): Xaa is C or S
NSLQEFIPKKRVIEYYLVTLPELQVQTPRXQVNR

SEQ ID NO: 78462 - protein, 34 aa, Artificial Sequence
  Cyclic GFR-binding peptide
  MOD_RES (30), (30): Xaa is C or S
LFNSLQEHQGQHPKIRYYVMPLPEEETPVXELGE

SEQ ID NO: 78463 - protein, 33 aa, Artificial Sequence; identical to SEQ ID NO: 28339
  Cyclic GFR-binding peptide
  MOD_RES (2), (33): Xaa is C or S

SEQ ID NO: 78464 - protein, 25 aa, Artificial Sequence
  Cyclic GFR-binding peptide
SMEGIVKPTRGVMIQITINSLDQPV

SEQ ID NO: 78465 - protein, 28 aa, Artificial Sequence
  Cyclic GFR-binding peptide
SKVVMVQVEKVKPTRGVVKAIKVSRLDQ

SEQ ID NO: 78466 - protein, 40 aa, Artificial Sequence; identical to SEQ ID NO: 28344
  Cyclic GFR-binding peptide
  MOD_RES (2), (34), (35): Xaa is C or S

SEQ ID NO: 78467 - protein, 34 aa, Artificial Sequence; identical to SEQ ID NO: 28346
  Cyclic GFR-binding peptide
  MOD_RES (1), (3): Xaa is C or S

SEQ ID NO: 78468 - protein, 37 aa, Artificial Sequence; identical to SEQ ID NO: 28345
  Cyclic GFR-binding peptide
  MOD_RES (2), (33), (34): Xaa is C or S

SEQ ID NO: 78469 - protein, 28 aa, Artificial Sequence
  Cyclic GFR-binding peptide
RVVMNVTAKKIVNSSDDIKRVQVPRLKT

SEQ ID NO: 78470 - protein, 31 aa, Artificial Sequence
  Cyclic GFR-binding peptide
  MOD_RES (29), (30): Xaa is C or S
VIMVQVEKIKPTKGIVKAIKVSRLDQSVXXP

SEQ ID NO: 78471 - protein, 35 aa, Artificial Sequence; identical to SEQ ID NO: 28349
  Cyclic GFR-binding peptide
  MOD_RES (31), (32): Xaa is C or S

SEQ ID NO: 78472 - protein, 32 aa, Artificial Sequence
  Cyclic GFR-binding peptide
  MOD_RES (30), (30): Xaa is C or S
LFNSLQEHQGQHPKIRYYVMPLPEEETPVXEL

SEQ ID NO: 78473 - protein, 24 aa, Artificial Sequence
  Cyclic GFR-binding peptide
MEVTAKKVVKDYEDIKRMQVPRLE

SEQ ID NO: 78474 - protein, 35 aa, Artificial Sequence
  Cyclic GFR-binding peptide
  MOD_RES (30), (31): Xaa is C or S
VVMDVQVEKVVKENEDVKAMKVSRLETPVXXAKPI

SEQ ID NO: 78475 - protein, 26 aa, Artificial Sequence
  Cyclic GFR-binding peptide
SRVVMNVQVEKIVNSSDDVKAVKVSR

SEQ ID NO: 78476 - protein, 42 aa, Artificial Sequence; identical to SEQ ID NO: 28353
  Cyclic GFR-binding peptide
  MOD_RES (2), (4), (36), (37): Xaa is C or S

SEQ ID NO: 78477 - protein, 30 aa, Artificial Sequence
  Cyclic GFR-binding peptide
ELHEELRNSLQELKPKKRVYEYYVVPLPEH

SEQ ID NO: 78478 - protein, 35 aa, Artificial Sequence
  Cyclic GFR-binding peptide
  MOD_RES (30), (31): Xaa is C or S
VVMNVQVEKIVNSSDDVKAVKVSRLQTPAXXPKPV

SEQ ID NO: 78479 - protein, 38 aa, Artificial Sequence; identical to SEQ ID NO: 28358
  Cyclic GFR-binding peptide
  MOD_RES (2), (34), (35): Xaa is C or S

SEQ ID NO: 78480 - protein, 26 aa, Artificial Sequence
  Cyclic GFR-binding peptide
DVTAKKVVKENEDIKRMQVPRLETPV

SEQ ID NO: 78481 - protein, 36 aa, Artificial Sequence; identical to SEQ ID NO: 28363
  Cyclic GFR-binding peptide
  MOD_RES (2), (4), (35), (36): Xaa is C or S

SEQ ID NO: 78482 - protein, 24 aa, Artificial Sequence
  Cyclic GFR-binding peptide
NVTAKKIVNSSDDIKRVQVPRLQT

SEQ ID NO: 78483 - protein, 29 aa, Artificial Sequence
  Cyclic GFR-binding peptide
  MOD_RES (1), (3): Xaa is C or S
XGXSRVVMNVQVEKIVNSSDDVKAVKVSR

SEQ ID NO: 78484 - protein, 26 aa, Artificial Sequence
  Cyclic GFR-binding peptide
ARVVMNVQVEKIVNSSDDVKAVKVSR

SEQ ID NO: 78485 - protein, 32 aa, Artificial Sequence
  Cyclic GFR-binding peptide
  MOD_RES (30), (30): Xaa is C or S
NSLQEFIPKKRVIEYYLVTLPELQVQTPRXQV

SEQ ID NO: 78486 - protein, 30 aa, Artificial Sequence
  Cyclic GFR-binding peptide
  MOD_RES (2), (2): Xaa is C or S
GXGEVVMDVTAKKVVKENEDIKRMQVPRLE

SEQ ID NO: 78487 - protein, 26 aa, Artificial Sequence
  Cyclic GFR-binding peptide
  MOD_RES (1), (1): Xaa is C or S
XSKVIMSMEGIIKPTKGIMIQITINS

SEQ ID NO: 78488 - protein, 21 aa, Artificial Sequence
  Cyclic GFR-binding peptide
MSMEGIVKPKRGVMIQITINS

SEQ ID NO: 78489 - protein, 35 aa, Artificial Sequence; identical to SEQ ID NO: 28376
  Cyclic GFR-binding peptide
  MOD_RES (1), (33), (34): Xaa is C or S

SEQ ID NO: 78490 - protein, 37 aa, Artificial Sequence; identical to SEQ ID NO: 28377
  Cyclic GFR-binding peptide
  MOD_RES (1), (3), (35): Xaa is C or S

SEQ ID NO: 78491 - protein, 34 aa, Artificial Sequence; identical to SEQ ID NO: 28379
  Cyclic GFR-binding peptide
  MOD_RES (2), (4): Xaa is C or S

SEQ ID NO: 78492 - protein, 37 aa, Artificial Sequence; identical to SEQ ID NO: 28381
  Cyclic GFR-binding peptide
  MOD_RES (1), (1): Xaa is C or S

SEQ ID NO: 78493 - protein, 31 aa, Artificial Sequence
  Cyclic GFR-binding peptide
  MOD_RES (27), (28): Xaa is C or S
ESMEGIVVKDYEDMIQMTINSLETPVXXAKP

SEQ ID NO: 78494 - protein, 38 aa, Artificial Sequence; identical to SEQ ID NO: 28387
  Cyclic GFR-binding peptide
  MOD_RES (34), (34): Xaa is C or S

SEQ ID NO: 78495 - protein, 32 aa, Artificial Sequence
  Cyclic GFR-binding peptide
  MOD_RES (29), (30): Xaa is C or S
VMDVTAKKVVKENEDIKRMQVPRLETPVXXAK

SEQ ID NO: 78496 - protein, 30 aa, Artificial Sequence
  Cyclic GFR-binding peptide
ELTNSLQEFIPKKRVIEYYVVPLPELQVQT

SEQ ID NO: 78497 - protein, 29 aa, Artificial Sequence
  Cyclic GFR-binding peptide
  MOD_RES (26), (27): Xaa is C or S
SMEGIIKPTKGIMIQITINSLDQSVXXPS

SEQ ID NO: 78498 - protein, 34 aa, Artificial Sequence; identical to SEQ ID NO: 28394
  Cyclic GFR-binding peptide
  MOD_RES (2), (33), (34): Xaa is C or S

SEQ ID NO: 78499 - protein, 33 aa, Artificial Sequence
  Cyclic GFR-binding peptide
  MOD_RES (2), (4): Xaa is C or S
HXGXSRVVMNVTAKKIVNSSDDIKRVQVPRLKT

SEQ ID NO: 78500 - protein, 25 aa, Artificial Sequence
  Cyclic GFR-binding peptide
VMSMEGIVKPTRGVMIQITINSLDQ

SEQ ID NO: 78501 - protein, 26 aa, Artificial Sequence
  Cyclic GFR-binding peptide
TNSLQEFIPKKRVIEYYVVPLPELQV

SEQ ID NO: 78502 - protein, 29 aa, Artificial Sequence
  Cyclic GFR-binding peptide
EVVMEVQVEKVVKDYEDVKAMKVSRLETP

SEQ ID NO: 78503 - protein, 27 aa, Artificial Sequence
  Cyclic GFR-binding peptide
  MOD_RES (26), (27): Xaa is C or S
VTAKKVKPTRGVIKRIQVPRLDQPVXX

SEQ ID NO: 78504 - protein, 31 aa, Artificial Sequence
  Cyclic GFR-binding peptide
AAAAAAAAANSLQELKPKKRVYEYYVVPLPE

SEQ ID NO: 78505 - protein, 30 aa, Artificial Sequence
  Cyclic GFR-binding peptide
  MOD_RES (1), (3): Xaa is C or S
XGXSRVVMNSMEGIIVNSSDDMIQVTINSL

SEQ ID NO: 78506 - protein, 38 aa, Artificial Sequence; identical to SEQ ID NO: 28404
  Cyclic GFR-binding peptide
  MOD_RES (2), (34), (35): Xaa is C or S

SEQ ID NO: 78507 - protein, 32 aa, Artificial Sequence; identical to SEQ ID NO: 28406
  Cyclic GFR-binding peptide
  MOD_RES (2), (2): Xaa is C or S

SEQ ID NO: 78508 - protein, 37 aa, Artificial Sequence; identical to SEQ ID NO: 28408
  Cyclic GFR-binding peptide
  MOD_RES (1), (32), (33): Xaa is C or S

SEQ ID NO: 78509 - protein, 25 aa, Artificial Sequence
  Cyclic GFR-binding peptide
VTAKKIKPTKGIIKRIQVPRLDQSV

SEQ ID NO: 78510 - protein, 35 aa, Artificial Sequence
  Cyclic GFR-binding peptide
  MOD_RES (30), (31): Xaa is C or S
VVMNVTAKKIVNSSDDIKRVQVPRLQTPAXXPKPV

SEQ ID NO: 78511 - protein, 33 aa, Artificial Sequence
  Cyclic GFR-binding peptide
  MOD_RES (27), (28): Xaa is C or S
MVTAKKVKPKRGVIKRIQVPRLAQPVXXPAASA

SEQ ID NO: 78512 - protein, 31 aa, Artificial Sequence; identical to SEQ ID NO: 28409
  Cyclic GFR-binding peptide
  MOD_RES (31), (31): Xaa is C or S

SEQ ID NO: 78513 - protein, 32 aa, Artificial Sequence
  Cyclic GFR-binding peptide
  MOD_RES (27), (28): Xaa is C or S
MVTAKKVKPTRGVIKRIQVPRLDQPVXXPSAS

SEQ ID NO: 78514 - protein, 24 aa, Artificial Sequence
  Cyclic GFR-binding peptide
IMVQVEKVKPKRGVVKAIKVSRLA

SEQ ID NO: 78515 - protein, 43 aa, Artificial Sequence; identical to SEQ ID NO: 28413
  Cyclic GFR-binding peptide
  MOD_RES (1), (3), (40): Xaa is C or S

SEQ ID NO: 78516 - protein, 27 aa, Artificial Sequence
  Cyclic GFR-binding peptide
VVMEVQVEKVVKDYEDVKAMKVSRLET

SEQ ID NO: 78517 - protein, 39 aa, Artificial Sequence; identical to SEQ ID NO: 28417
  Cyclic GFR-binding peptide
  MOD_RES (2), (4), (36), (37): Xaa is C or S

SEQ ID NO: 78518 - protein, 32 aa, Artificial Sequence
  Cyclic GFR-binding peptide
  MOD_RES (30), (30): Xaa is C or S
VVMNVQVEKIVNSSDDVKAVKVSRLKTPAXTP

SEQ ID NO: 78519 - protein, 34 aa, Artificial Sequence; identical to SEQ ID NO: 28419
  Cyclic GFR-binding peptide
  MOD_RES (31), (32): Xaa is C or S

SEQ ID NO: 78520 - protein, 41 aa, Artificial Sequence; identical to SEQ ID NO: 28422
  Cyclic GFR-binding peptide
  MOD_RES (1), (3), (35), (36): Xaa is C or S

SEQ ID NO: 78521 - protein, 32 aa, Artificial Sequence
  Cyclic GFR-binding peptide
  MOD_RES (1), (3): Xaa is C or S
XGXARVVMNVQVEKIVNSSDDVKAVKVSRLQT

SEQ ID NO: 78522 - protein, 34 aa, Artificial Sequence
  Cyclic GFR-binding peptide
  MOD_RES (29), (30): Xaa is C or S
VIMVQVEKVKPKRGVVKAIKVSRLAQPVXXPAAS

SEQ ID NO: 78523 - protein, 31 aa, Artificial Sequence; identical to SEQ ID NO: 28425
  Cyclic GFR-binding peptide
  MOD_RES (1), (1): Xaa is C or S

SEQ ID NO: 78524 - protein, 24 aa, Artificial Sequence
  Cyclic GFR-binding peptide
VMNVTAKKIVNSSDDIKRVQVPRL

SEQ ID NO: 78525 - protein, 33 aa, Artificial Sequence; identical to SEQ ID NO: 28430
  Cyclic GFR-binding peptide
  MOD_RES (31), (32): Xaa is C or S

SEQ ID NO: 78526 - protein, 38 aa, Artificial Sequence; identical to SEQ ID NO: 28431
  Cyclic GFR-binding peptide
  MOD_RES (2), (33), (34): Xaa is C or S

SEQ ID NO: 78527 - protein, 35 aa, Artificial Sequence
  Cyclic GFR-binding peptide
  MOD_RES (31), (31): Xaa is C or S
TNSLQEFIPKKRVIEYYVVPLPELQVQTPRXQVNR

SEQ ID NO: 78528 - protein, 34 aa, Artificial Sequence
  Cyclic GFR-binding peptide
  MOD_RES (2), (4): Xaa is C or S
RXGXGEVVMESMEGIVVKDYEDMIQMTINSLETP

SEQ ID NO: 78529 - protein, 31 aa, Artificial Sequence
  Cyclic GFR-binding peptide
  MOD_RES (29), (30): Xaa is C or S
VMEVTAKKVVKDYEDIKRMQVPRLETPVXXA

SEQ ID NO: 78530 - protein, 30 aa, Artificial Sequence
  Cyclic GFR-binding peptide
  MOD_RES (2), (4): Xaa is C or S
SXKXSKVVMVQVEKVKPTRGVVKAIKVSRL

SEQ ID NO: 78531 - protein, 37 aa, Artificial Sequence; identical to SEQ ID NO: 28438
  Cyclic GFR-binding peptide
  MOD_RES (2), (4), (36), (37): Xaa is C or S

SEQ ID NO: 78532 - protein, 25 aa, Artificial Sequence
  Cyclic GFR-binding peptide
VVMSMEGIVKPTRGVMIQITINSLD

SEQ ID NO: 78533 - protein, 31 aa, Artificial Sequence
  Cyclic GFR-binding peptide
  MOD_RES (26), (27): Xaa is C or S
VQVEKIVNSSDDVKAVKVSRLKTPAXXPKPV

SEQ ID NO: 78534 - protein, 35 aa, Artificial Sequence
  Cyclic GFR-binding peptide
  MOD_RES (30), (31): Xaa is C or S
VVMESMEGIVVKDYEDMIQMTINSLETPVXXAKPI

SEQ ID NO: 78535 - protein, 34 aa, Artificial Sequence; identical to SEQ ID NO: 28442
  Cyclic GFR-binding peptide

SEQ ID NO: 78536 - protein, 36 aa, Artificial Sequence; identical to SEQ ID NO: 28443
  Cyclic GFR-binding peptide
  MOD_RES (32), (33): Xaa is C or S

SEQ ID NO: 78537 - protein, 37 aa, Artificial Sequence
  Cyclic GFR-binding peptide
  MOD_RES (33), (33): Xaa is C or S
ELRNSLQELKPKKRVYEYYVVPLPEHHVRSPQXKVSS

SEQ ID NO: 78538 - protein, 38 aa, Artificial Sequence; identical to SEQ ID NO: 28449
  Cyclic GFR-binding peptide
  MOD_RES (2), (33), (34): Xaa is C or S

SEQ ID NO: 78539 - protein, 31 aa, Artificial Sequence
  Cyclic GFR-binding peptide
  MOD_RES (28), (29): Xaa is C or S
IMSMEGIVKPKRGVMIQITINSLAQPVXXPA

SEQ ID NO: 78540 - protein, 37 aa, Artificial Sequence; identical to SEQ ID NO: 28451
  Cyclic GFR-binding peptide
  MOD_RES (32), (33): Xaa is C or S

SEQ ID NO: 78541 - protein, 37 aa, Artificial Sequence; identical to SEQ ID NO: 28453
  Cyclic GFR-binding peptide
  MOD_RES (2), (34), (35): Xaa is C or S

SEQ ID NO: 78542 - protein, 39 aa, Artificial Sequence; identical to SEQ ID NO: 28454
  Cyclic GFR-binding peptide
  MOD_RES (2), (34): Xaa is C or S

SEQ ID NO: 78543 - protein, 31 aa, Artificial Sequence
  Cyclic GFR-binding peptide
  MOD_RES (29), (30): Xaa is C or S
VMNSMEGIIVNSSDDMIQVTINSLQTPAXXP

SEQ ID NO: 78544 - protein, 37 aa, Artificial Sequence; identical to SEQ ID NO: 28455
  Cyclic GFR-binding peptide
  MOD_RES (1), (3), (34), (35): Xaa is C or S

SEQ ID NO: 78545 - protein, 35 aa, Artificial Sequence; identical to SEQ ID NO: 28457
  Cyclic GFR-binding peptide
  MOD_RES (2), (33), (34): Xaa is C or S

SEQ ID NO: 78546 - protein, 34 aa, Artificial Sequence; identical to SEQ ID NO: 28459
  Cyclic GFR-binding peptide
  MOD_RES (31), (32): Xaa is C or S

SEQ ID NO: 78547 - protein, 38 aa, Artificial Sequence; identical to SEQ ID NO: 28460
  Cyclic GFR-binding peptide
  MOD_RES (1), (32), (33): Xaa is C or S

SEQ ID NO: 78548 - protein, 33 aa, Artificial Sequence
  Cyclic GFR-binding peptide
  MOD_RES (28), (29): Xaa is C or S
MNVQVEKIVNSSDDVKAVKVSRLKTPAXXPKPV

SEQ ID NO: 78549 - protein, 32 aa, Artificial Sequence
  Cyclic GFR-binding peptide
ALHDELTNSLQEFIPKKRVIEYYLVTLPELQV

SEQ ID NO: 78550 - protein, 38 aa, Artificial Sequence; identical to SEQ ID NO: 28462
  Cyclic GFR-binding peptide
  MOD_RES (2), (4), (36), (37): Xaa is C or S

SEQ ID NO: 78551 - protein, 37 aa, Artificial Sequence; identical to SEQ ID NO: 28465
  Cyclic GFR-binding peptide
  MOD_RES (2), (33), (34): Xaa is C or S

SEQ ID NO: 78552 - protein, 31 aa, Artificial Sequence; identical to SEQ ID NO: 28466
  Cyclic GFR-binding peptide

SEQ ID NO: 78553 - protein, 29 aa, Artificial Sequence
  Cyclic GFR-binding peptide
AAAAAAAAAVQVEKVVKDYEDVKAMKVSR

SEQ ID NO: 78554 - protein, 41 aa, Artificial Sequence; identical to SEQ ID NO: 28475
  Cyclic GFR-binding peptide
  MOD_RES (3), (40): Xaa is C or S

SEQ ID NO: 78555 - protein, 32 aa, Artificial Sequence
  Cyclic GFR-binding peptide
VHHEPLPVVYYEYVRKKPKLEQLSNRLEEHLE

SEQ ID NO: 78556 - protein, 34 aa, Artificial Sequence
  Cyclic GFR-binding peptide
  MOD_RES (32), (34): Xaa is C or S
HHEPLTVLYYEYVRKKPKLEQLSNRLEEHLEXAX

SEQ ID NO: 78557 - protein, 27 aa, Artificial Sequence
  Cyclic GFR-binding peptide
  MOD_RES (1), (2): Xaa is C or S
XXVPQALRPVQIRKIVGRKPKVKKATV

SEQ ID NO: 78558 - protein, 23 aa, Artificial Sequence
  Cyclic GFR-binding peptide
EPLTVLYYEIVRKKPIFEQLSNT

SEQ ID NO: 78559 - protein, 35 aa, Artificial Sequence
  Cyclic GFR-binding peptide
  MOD_RES (32), (34): Xaa is C or S
HHEPLTVLYYEYVRKKPKLEQLSNRLEEHLEXAXA

SEQ ID NO: 78560 - protein, 31 aa, Artificial Sequence
  Cyclic GFR-binding peptide
  MOD_RES (28), (30): Xaa is C or S
ALRPVQIRKIVGRKPKVKKATVMIVRSXKXS

SEQ ID NO: 78561 - protein, 28 aa, Artificial Sequence
  Cyclic GFR-binding peptide
  MOD_RES (28), (28): Xaa is C or S
LSNITMQIMDENEKVVIGEMSDMVVEGX

SEQ ID NO: 78562 - protein, 28 aa, Artificial Sequence
  Cyclic GFR-binding peptide
PSRVHHEPLPVVYYEYVRKKPKLEQLSN

SEQ ID NO: 78563 - protein, 40 aa, Artificial Sequence; identical to SEQ ID NO: 28488
  Cyclic GFR-binding peptide
  MOD_RES (6), (7), (39): Xaa is C or S

SEQ ID NO: 78564 - protein, 32 aa, Artificial Sequence
  Cyclic GFR-binding peptide
  MOD_RES (29), (31): Xaa is C or S
KLRSVKVAKVDDSSNVIKEVQVNMVVRSXGXH

SEQ ID NO: 78565 - protein, 28 aa, Artificial Sequence
  Cyclic GFR-binding peptide
APTKLSNITVQIMDDSSNVIIGEMSNMV

SEQ ID NO: 78566 - protein, 30 aa, Artificial Sequence
  Cyclic GFR-binding peptide
VQLEPLTVLYYEIVRKKPIFEQLSNTLEDH

SEQ ID NO: 78567 - protein, 27 aa, Artificial Sequence
  Cyclic GFR-binding peptide
  MOD_RES (1), (1): Xaa is C or S
XVPTELSNITMQIMDENEKVVIGEMSD

SEQ ID NO: 78568 - protein, 35 aa, Artificial Sequence; identical to SEQ ID NO: 28495
  Cyclic GFR-binding peptide
  MOD_RES (32), (34): Xaa is C or S

SEQ ID NO: 78569 - protein, 27 aa, Artificial Sequence
  Cyclic GFR-binding peptide
TKLRSVKVAKVDDSSNVIKEVQVNMVV

SEQ ID NO: 78570 - protein, 30 aa, Artificial Sequence; identical to SEQ ID NO: 28496
  Cyclic GFR-binding peptide

SEQ ID NO: 78571 - protein, 40 aa, Artificial Sequence; identical to SEQ ID NO: 28499
  Cyclic GFR-binding peptide
  MOD_RES (6), (38), (40): Xaa is C or S

SEQ ID NO: 78572 - protein, 25 aa, Artificial Sequence
  Cyclic GFR-binding peptide
QLRSVKVAKVDDSSNVIKEVQVNMV

SEQ ID NO: 78573 - protein, 26 aa, Artificial Sequence
  Cyclic GFR-binding peptide
QDLRSVKIAKVIGKTPKIKEVQVMIV

SEQ ID NO: 78574 - protein, 22 aa, Artificial Sequence
  Cyclic GFR-binding peptide
LSNITMQIMDEYDKVVIGEMSE

SEQ ID NO: 78575 - protein, 32 aa, Artificial Sequence
  Cyclic GFR-binding peptide
  MOD_RES (3), (4): Xaa is C or S
SPXXVPQDLSNITIQIMVGRTPKVIGEMSMVV

SEQ ID NO: 78576 - protein, 30 aa, Artificial Sequence
  Cyclic GFR-binding peptide
  MOD_RES (27), (29): Xaa is C or S
RSVKMAKVDENEKVVKEVQVDMVVEGXGXR

SEQ ID NO: 78577 - protein, 30 aa, Artificial Sequence
  Cyclic GFR-binding peptide
  MOD_RES (1), (1): Xaa is C or S
XAPTKLRPVQVRKIDDSSNVIKKATVNMVV

SEQ ID NO: 78578 - protein, 36 aa, Artificial Sequence; identical to SEQ ID NO: 28512
  Cyclic GFR-binding peptide
  MOD_RES (2), (3), (35): Xaa is C or S

SEQ ID NO: 78579 - protein, 32 aa, Artificial Sequence; identical to SEQ ID NO: 28513
  Cyclic GFR-binding peptide
  MOD_RES (32), (32): Xaa is C or S

SEQ ID NO: 78580 - protein, 29 aa, Artificial Sequence
  Cyclic GFR-binding peptide
  MOD_RES (3), (4): Xaa is C or S
SPXXVPQDLRSVKIAKVVGRTPKVKEVQV

SEQ ID NO: 78581 - protein, 33 aa, Artificial Sequence; identical to SEQ ID NO: 28518
  Cyclic GFR-binding peptide
  MOD_RES (32), (32): Xaa is C or S

SEQ ID NO: 78582 - protein, 35 aa, Artificial Sequence
  Cyclic GFR-binding peptide
  MOD_RES (33), (35): Xaa is C or S
VQLEPLTVLYYEIVRKKPIFEQLSNTLEDHLAXKX

SEQ ID NO: 78583 - protein, 41 aa, Artificial Sequence; identical to SEQ ID NO: 28523
  Cyclic GFR-binding peptide
  MOD_RES (5), (5): Xaa is C or S

SEQ ID NO: 78584 - protein, 30 aa, Artificial Sequence
  Cyclic GFR-binding peptide
VPTEEEPLPMVYYRIKPHQGQHEQLSNFLQ

SEQ ID NO: 78585 - protein, 28 aa, Artificial Sequence
  Cyclic GFR-binding peptide
SQDLSNITIQIMIGKTPKIIGEMSMIVK

SEQ ID NO: 78586 - protein, 25 aa, Artificial Sequence
  Cyclic GFR-binding peptide
PQDLRSVKIAKVVGRTPKVKEVQVM

SEQ ID NO: 78587 - protein, 38 aa, Artificial Sequence; identical to SEQ ID NO: 28529
  Cyclic GFR-binding peptide
  MOD_RES (4), (5), (36), (38): Xaa is C or S

SEQ ID NO: 78588 - protein, 37 aa, Artificial Sequence; identical to SEQ ID NO: 28531
  Cyclic GFR-binding peptide
  MOD_RES (6), (6): Xaa is C or S

SEQ ID NO: 78589 - protein, 34 aa, Artificial Sequence
  Cyclic GFR-binding peptide
  MOD_RES (5), (5): Xaa is C or S
EGLEXVPTEEEPLTMLYYRIKPHQGQHEQLSNFL

SEQ ID NO: 78590 - protein, 23 aa, Artificial Sequence
  Cyclic GFR-binding peptide
QALRSVKIAKVVGRKPKVKEVQV

SEQ ID NO: 78591 - protein, 35 aa, Artificial Sequence
  Cyclic GFR-binding peptide
  MOD_RES (6), (6): Xaa is C or S
VTKPTXAPTKLRSVKVAKVDDSSNVIKEVQVNMVV

SEQ ID NO: 78592 - protein, 35 aa, Artificial Sequence
  Cyclic GFR-binding peptide
  MOD_RES (5), (6): Xaa is C or S
VPKPXXAPTKLRPVQVRKIDDSSNVIKKATVNMVV

SEQ ID NO: 78593 - protein, 39 aa, Artificial Sequence; identical to SEQ ID NO: 28538
  Cyclic GFR-binding peptide
  MOD_RES (4), (5), (37), (39): Xaa is C or S

SEQ ID NO: 78594 - protein, 24 aa, Artificial Sequence
  Cyclic GFR-binding peptide
EPLPVVYYEYVRKKPKLEQLSNRL

SEQ ID NO: 78595 - protein, 24 aa, Artificial Sequence
  Cyclic GFR-binding peptide
TELSNITMQIMDEYDKVVIGEMSE

SEQ ID NO: 78596 - protein, 29 aa, Artificial Sequence
  Cyclic GFR-binding peptide
PTKLRSVKVAKVDDSSNVIKEVQVNMVVR

SEQ ID NO: 78597 - protein, 24 aa, Artificial Sequence
  Cyclic GFR-binding peptide
SNITIQIMVGRTPKVIGEMSMVVK

SEQ ID NO: 78598 - protein, 28 aa, Artificial Sequence
  Cyclic GFR-binding peptide
  MOD_RES (1), (2): Xaa is C or S
XXVPQALRPVQIRKIVGRKPKVKKATVM

SEQ ID NO: 78599 - protein, 29 aa, Artificial Sequence
  Cyclic GFR-binding peptide
  MOD_RES (1), (1): Xaa is C or S
XVPTEEEPLPMVYYRIKPHQGQHEQLSNF

SEQ ID NO: 78600 - protein, 34 aa, Artificial Sequence; identical to SEQ ID NO: 28543
  Cyclic GFR-binding peptide
  MOD_RES (4), (4): Xaa is C or S

SEQ ID NO: 78601 - protein, 30 aa, Artificial Sequence
  Cyclic GFR-binding peptide
  MOD_RES (4), (5): Xaa is C or S
PKPXXAPTKLRSVKVAKVDDSSNVIKEVQV

SEQ ID NO: 78602 - protein, 40 aa, Artificial Sequence; identical to SEQ ID NO: 28545
  Cyclic GFR-binding peptide
  MOD_RES (6), (7), (38), (40): Xaa is C or S

SEQ ID NO: 78603 - protein, 30 aa, Artificial Sequence
  Cyclic GFR-binding peptide
EEEPLTMLYYRIKPHQGQHEQLSNFLQHNK

SEQ ID NO: 78604 - protein, 39 aa, Artificial Sequence; identical to SEQ ID NO: 28550
  Cyclic GFR-binding peptide
  MOD_RES (4), (5), (36), (38): Xaa is C or S

SEQ ID NO: 78605 - protein, 35 aa, Artificial Sequence; identical to SEQ ID NO: 28552
  Cyclic GFR-binding peptide
  MOD_RES (4), (5): Xaa is C or S

SEQ ID NO: 78606 - protein, 31 aa, Artificial Sequence
  Cyclic GFR-binding peptide
PSRVHHEPLPVVYYEYVRKKPKLEQLSNRLE

SEQ ID NO: 78607 - protein, 25 aa, Artificial Sequence
  Cyclic GFR-binding peptide
LRSVKVAKVDDSSNVIKEVQVNMVV

SEQ ID NO: 78608 - protein, 23 aa, Artificial Sequence
  Cyclic GFR-binding peptide
DLSNITIQIMVGRTPKVIGEMSM

SEQ ID NO: 78609 - protein, 23 aa, Artificial Sequence
  Cyclic GFR-binding peptide
QLRSVKVAKVDDSSNVIKEVQVN

SEQ ID NO: 78610 - protein, 33 aa, Artificial Sequence
  Cyclic GFR-binding peptide
  MOD_RES (5), (5): Xaa is C or S
EGLEXVPTEEEPLPMVYYRIKPHQGQHEQLSNF

SEQ ID NO: 78611 - protein, 36 aa, Artificial Sequence; identical to SEQ ID NO: 28559
  Cyclic GFR-binding peptide
  MOD_RES (35), (35): Xaa is C or S

SEQ ID NO: 78612 - protein, 31 aa, Artificial Sequence
  Cyclic GFR-binding peptide
  MOD_RES (5), (6): Xaa is C or S
SAAPXXVPQALRPVQIRKIVGRKPKVKKATV

SEQ ID NO: 78613 - protein, 35 aa, Artificial Sequence; identical to SEQ ID NO: 28561
  Cyclic GFR-binding peptide
  MOD_RES (2), (3), (35): Xaa is C or S

SEQ ID NO: 78614 - protein, 35 aa, Artificial Sequence
  Cyclic GFR-binding peptide
  MOD_RES (4), (4): Xaa is C or S
NVQXRPTQVQLEPLTVLYYEIVRKKPIFEQLSNTL

SEQ ID NO: 78615 - protein, 27 aa, Artificial Sequence
  Cyclic GFR-binding peptide
QLEPLPVVYYEIVRKKPIFEQLSNTLE

SEQ ID NO: 78616 - protein, 29 aa, Artificial Sequence
  Cyclic GFR-binding peptide
  MOD_RES (29), (29): Xaa is C or S
QALSNITIQIMVGRKPKVIGEMSMIVRSX

SEQ ID NO: 78617 - protein, 25 aa, Artificial Sequence
  Cyclic GFR-binding peptide
RPVQVRKIDDSSNVIKKATVNMVVR

SEQ ID NO: 78618 - protein, 28 aa, Artificial Sequence
  Cyclic GFR-binding peptide
TKLRSVKVAKVDDSSNVIKEVQVNMVVR

SEQ ID NO: 78619 - protein, 34 aa, Artificial Sequence; identical to SEQ ID NO: 28571
  Cyclic GFR-binding peptide
  MOD_RES (1), (32), (34): Xaa is C or S

SEQ ID NO: 78620 - protein, 34 aa, Artificial Sequence
  Cyclic GFR-binding peptide
  MOD_RES (4), (5): Xaa is C or S
PKPXXAPTKLRSVKVAKVDDSSNVIKEVQVNMVV

SEQ ID NO: 78621 - protein, 31 aa, Artificial Sequence
  Cyclic GFR-binding peptide
QVQLEPLTVLYYEIVRKKPIFEQLSNTLEDH

SEQ ID NO: 78622 - protein, 34 aa, Artificial Sequence
  Cyclic GFR-binding peptide
  MOD_RES (7), (7): Xaa is C or S
NDEGLEXVPTEEEPLPMVYYRIKPHQGQHEQLSN

SEQ ID NO: 78623 - protein, 31 aa, Artificial Sequence
  Cyclic GFR-binding peptide
  MOD_RES (5), (6): Xaa is C or S
VPKPXXAPTKLRPVQVRKIDDSSNVIKKATV

SEQ ID NO: 78624 - protein, 32 aa, Artificial Sequence
  Cyclic GFR-binding peptide
  MOD_RES (3), (4): Xaa is C or S
KPXXAPTQLRSVKVAKVDDSSNVIKEVQVNMV

SEQ ID NO: 78625 - protein, 29 aa, Artificial Sequence
  Cyclic GFR-binding peptide
TELRSVKMAKVDEYDKVVKEVQVEMVVEG

SEQ ID NO: 78626 - protein, 40 aa, Artificial Sequence; identical to SEQ ID NO: 28576
  Cyclic GFR-binding peptide
  MOD_RES (6), (7), (38), (40): Xaa is C or S

SEQ ID NO: 78627 - protein, 31 aa, Artificial Sequence
  Cyclic GFR-binding peptide
  MOD_RES (30), (30): Xaa is C or S
TQLSNITVQIMDDSSNVIIGEMSNMVVRAXG

SEQ ID NO: 78628 - protein, 31 aa, Artificial Sequence
  Cyclic GFR-binding peptide
  MOD_RES (28), (30): Xaa is C or S
DLSNITIQIMVGRTPKVIGEMSMVVKSXKXS

SEQ ID NO: 78629 - protein, 32 aa, Artificial Sequence
  Cyclic GFR-binding peptide
PTEEEPLTMLYYRIKPHQGQHEQLSNFLQHNK

SEQ ID NO: 78630 - protein, 31 aa, Artificial Sequence
  Cyclic GFR-binding peptide
  MOD_RES (31), (31): Xaa is C or S
LEPLPVVYYEIVRKKPIFEQLSNTLEDHLAX

SEQ ID NO: 78631 - protein, 35 aa, Artificial Sequence; identical to SEQ ID NO: 28589
  Cyclic GFR-binding peptide
  MOD_RES (3), (4), (35): Xaa is C or S

SEQ ID NO: 78632 - protein, 32 aa, Artificial Sequence
  Cyclic GFR-binding peptide
  MOD_RES (6), (6): Xaa is C or S
VTKPTXAPTKLRSVKVAKVDDSSNVIKEVQVN

SEQ ID NO: 78633 - protein, 28 aa, Artificial Sequence
  Cyclic GFR-binding peptide
  MOD_RES (27), (27): Xaa is C or S
RSVKVAKVDDSSNVIKEVQVNMVVRSXG

SEQ ID NO: 78634 - protein, 30 aa, Artificial Sequence
  Cyclic GFR-binding peptide
  MOD_RES (1), (2): Xaa is C or S
XXVPQDLRPVQIRKIVGRTPKVKKATVMVV

SEQ ID NO: 78635 - protein, 38 aa, Artificial Sequence; identical to SEQ ID NO: 28592
  Cyclic GFR-binding peptide
  MOD_RES (1), (38): Xaa is C or S

SEQ ID NO: 78636 - protein, 28 aa, Artificial Sequence
  Cyclic GFR-binding peptide
  MOD_RES (2), (3): Xaa is C or S
AXXVPTELRSVKMAKVDENEKVVKEVQV

SEQ ID NO: 78637 - protein, 31 aa, Artificial Sequence
  Cyclic GFR-binding peptide
  MOD_RES (2), (3): Xaa is C or S
PXXAPTKLRSVKVAKVDDSSNVIKEVQVNMV

SEQ ID NO: 78638 - protein, 39 aa, Artificial Sequence; identical to SEQ ID NO: 28594
  Cyclic GFR-binding peptide
  MOD_RES (5), (6), (37), (39): Xaa is C or S

SEQ ID NO: 78639 - protein, 33 aa, Artificial Sequence
  Cyclic GFR-binding peptide
  MOD_RES (5), (6): Xaa is C or S
SASPXXVSQDLRSVKIAKVIGKTPKIKEVQVMI

SEQ ID NO: 78640 - protein, 34 aa, Artificial Sequence; identical to SEQ ID NO: 28596
  Cyclic GFR-binding peptide
  MOD_RES (4), (4): Xaa is C or S

SEQ ID NO: 78641 - protein, 25 aa, Artificial Sequence
  Cyclic GFR-binding peptide
PTELSNITMQIMDEYDKVVIGEMSE

SEQ ID NO: 78642 - protein, 38 aa, Artificial Sequence; identical to SEQ ID NO: 28598
  Cyclic GFR-binding peptide
  MOD_RES (3), (4), (36), (38): Xaa is C or S

SEQ ID NO: 78643 - protein, 34 aa, Artificial Sequence
  Cyclic GFR-binding peptide
  MOD_RES (33), (33): Xaa is C or S
VQLEPLTVLYYEIVRKKPIFEQLSNTLEDHLAXK

SEQ ID NO: 78644 - protein, 26 aa, Artificial Sequence
  Cyclic GFR-binding peptide
PTEEEPLPMVYYRIKPHQGQHEQLSN

SEQ ID NO: 78645 - protein, 33 aa, Artificial Sequence; identical to SEQ ID NO: 28604
  Cyclic GFR-binding peptide

SEQ ID NO: 78646 - protein, 28 aa, Artificial Sequence
  Cyclic GFR-binding peptide
QALRPVQIRKIVGRKPKVKKATVMIVRS

SEQ ID NO: 78647 - protein, 27 aa, Artificial Sequence
  Cyclic GFR-binding peptide
TELRPVQMRKIDEYDKVVKKATVEMVV

SEQ ID NO: 78648 - protein, 22 aa, Artificial Sequence
  Cyclic GFR-binding peptide
LSNITIQIMVGRTPKVIGEMSM

SEQ ID NO: 78649 - protein, 28 aa, Artificial Sequence
  Cyclic GFR-binding peptide
TKLSNITVQIMDDSSNVIIGEMSNMVVR

SEQ ID NO: 78650 - protein, 35 aa, Artificial Sequence; identical to SEQ ID NO: 28608
  Cyclic GFR-binding peptide
  MOD_RES (4), (5): Xaa is C or S

SEQ ID NO: 78651 - protein, 26 aa, Artificial Sequence
  Cyclic GFR-binding peptide
ELRSVKMAKVDEYDKVVKEVQVEMVV

SEQ ID NO: 78652 - protein, 27 aa, Artificial Sequence
  Cyclic GFR-binding peptide
APTKLRPVQVRKIDDSSNVIKKATVNM

SEQ ID NO: 78653 - protein, 34 aa, Artificial Sequence; identical to SEQ ID NO: 28614
  Cyclic GFR-binding peptide
  MOD_RES (32), (34): Xaa is C or S

SEQ ID NO: 78654 - protein, 28 aa, Artificial Sequence
  Cyclic GFR-binding peptide
QLEPLPVVYYEIVRKKPIFEQLSNTLED

SEQ ID NO: 78655 - protein, 27 aa, Artificial Sequence
  Cyclic GFR-binding peptide
  MOD_RES (2), (2): Xaa is C or S
TXAPTKLRPVQVRKIDDSSNVIKKATV

SEQ ID NO: 78656 - protein, 32 aa, Artificial Sequence
  Cyclic GFR-binding peptide
  MOD_RES (3), (4): Xaa is C or S
KAXXVPTELSNITMQIMDENEKVVIGEMSDMV

SEQ ID NO: 78657 - protein, 31 aa, Artificial Sequence; identical to SEQ ID NO: 28616
  Cyclic GFR-binding peptide
  MOD_RES (31), (31): Xaa is C or S

SEQ ID NO: 78658 - protein, 37 aa, Artificial Sequence; identical to SEQ ID NO: 28617
  Cyclic GFR-binding peptide
  MOD_RES (1), (2), (34), (36): Xaa is C or S

SEQ ID NO: 78659 - protein, 20 aa, Artificial Sequence
  Cyclic GFR-binding peptide
RPVQVRKIDDSSNVIKKATV

SEQ ID NO: 78660 - protein, 29 aa, Artificial Sequence
  Cyclic GFR-binding peptide
PSRVHHEPLPVVYYEYVRKKPKLEQLSNR

SEQ ID NO: 78661 - protein, 34 aa, Artificial Sequence; identical to SEQ ID NO: 28623
  Cyclic GFR-binding peptide
  MOD_RES (3), (4): Xaa is C or S

SEQ ID NO: 78662 - protein, 25 aa, Artificial Sequence
  Cyclic GFR-binding peptide
TELRPVQMRKIDEYDKVVKKATVEM

SEQ ID NO: 78663 - protein, 29 aa, Artificial Sequence
  Cyclic GFR-binding peptide
  MOD_RES (3), (4): Xaa is C or S
SPXXVSQDLRPVQIRKIIGKTPKIKKATV

SEQ ID NO: 78664 - protein, 38 aa, Artificial Sequence; identical to SEQ ID NO: 28633
  Cyclic GFR-binding peptide
  MOD_RES (5), (6), (38): Xaa is C or S

SEQ ID NO: 78665 - protein, 40 aa, Artificial Sequence; identical to SEQ ID NO: 28634
  Cyclic GFR-binding peptide
  MOD_RES (5), (6), (38), (40): Xaa is C or S

SEQ ID NO: 78666 - protein, 32 aa, Artificial Sequence
  Cyclic GFR-binding peptide
  MOD_RES (4), (5): Xaa is C or S
PKPXXAPTQLRSVKVAKVDDSSNVIKEVQVNM

SEQ ID NO: 78667 - protein, 33 aa, Artificial Sequence; identical to SEQ ID NO: 28637
  Cyclic GFR-binding peptide
  MOD_RES (2), (3): Xaa is C or S

SEQ ID NO: 78668 - protein, 35 aa, Artificial Sequence; identical to SEQ ID NO: 28640
  Cyclic GFR-binding peptide
  MOD_RES (3), (4): Xaa is C or S

SEQ ID NO: 78669 - protein, 33 aa, Artificial Sequence
  Cyclic GFR-binding peptide
  MOD_RES (5), (6): Xaa is C or S
SAAPXXVPQALRPVQIRKIVGRKPKVKKATVMI

SEQ ID NO: 78670 - protein, 27 aa, Artificial Sequence
  Cyclic GFR-binding peptide
  MOD_RES (1), (2): Xaa is C or S
XXAPTKLSNITVQIMDDSSNVIIGEMS

SEQ ID NO: 78671 - protein, 35 aa, Artificial Sequence; identical to SEQ ID NO: 28642
  Cyclic GFR-binding peptide
  MOD_RES (2), (3), (34): Xaa is C or S

SEQ ID NO: 78672 - protein, 30 aa, Artificial Sequence
  Cyclic GFR-binding peptide
  MOD_RES (1), (2): Xaa is C or S
XXAPTKLRPVQVRKIDDSSNVIKKATVNMV

SEQ ID NO: 78673 - protein, 24 aa, Artificial Sequence
  Cyclic GFR-binding peptide
KLRPVQVRKIDDSSNVIKKATVNM

SEQ ID NO: 78674 - protein, 30 aa, Artificial Sequence; identical to SEQ ID NO: 28646
  Cyclic GFR-binding peptide

SEQ ID NO: 78675 - protein, 30 aa, Artificial Sequence
  Cyclic GFR-binding peptide
  MOD_RES (28), (30): Xaa is C or S
LSNITMQIMDEYDKVVIGEMSEMVVEGXGX

SEQ ID NO: 78676 - protein, 34 aa, Artificial Sequence
  Cyclic GFR-binding peptide
  MOD_RES (31), (33): Xaa is C or S
PTELRSVKMAKVDEYDKVVKEVQVEMVVEGXGXR

SEQ ID NO: 78677 - protein, 32 aa, Artificial Sequence
  Cyclic GFR-binding peptide
  MOD_RES (5), (6): Xaa is C or S
SASPXXVSQDLSNITIQIMIGKTPKIIGEMSM

SEQ ID NO: 78678 - protein, 27 aa, Artificial Sequence
  Cyclic GFR-binding peptide
EPLTVLYYEYVRKKPKLEQLSNRLEEH

SEQ ID NO: 78679 - protein, 35 aa, Artificial Sequence
  Cyclic GFR-binding peptide
  MOD_RES (5), (6): Xaa is C or S
VPKPXXAPTQLSNITVQIMDDSSNVIIGEMSNMVV

SEQ ID NO: 78680 - protein, 25 aa, Artificial Sequence
  Cyclic GFR-binding peptide
LSNITMQIMDEYDKVVIGEMSEMVV

SEQ ID NO: 78681 - protein, 34 aa, Artificial Sequence; identical to SEQ ID NO: 28651
  Cyclic GFR-binding peptide
  MOD_RES (1), (32), (34): Xaa is C or S

SEQ ID NO: 78682 - protein, 24 aa, Artificial Sequence
  Cyclic GFR-binding peptide
QDLRSVKIAKVVGRTPKVKEVQVM

SEQ ID NO: 78683 - protein, 32 aa, Artificial Sequence
  Cyclic GFR-binding peptide
  MOD_RES (3), (4): Xaa is C or S
KPXXAPTQLSNITVQIMDDSSNVIIGEMSNMV

SEQ ID NO: 78684 - protein, 27 aa, Artificial Sequence
  Cyclic GFR-binding peptide
  MOD_RES (1), (2): Xaa is C or S
XXAPTKLRPVQVRKIDDSSNVIKKATV

SEQ ID NO: 78685 - protein, 31 aa, Artificial Sequence
  Cyclic GFR-binding peptide
VHHEPLPVVYYEYVRKKPKLEQLSNRLEEHL

SEQ ID NO: 78686 - protein, 37 aa, Artificial Sequence; identical to SEQ ID NO: 28659
  Cyclic GFR-binding peptide
  MOD_RES (4), (5), (36): Xaa is C or S

SEQ ID NO: 78687 - protein, 32 aa, Artificial Sequence
  Cyclic GFR-binding peptide
  MOD_RES (4), (4): Xaa is C or S
KPTXAPTKLRPVQVRKIDDSSNVIKKATVNMV

SEQ ID NO: 78688 - protein, 35 aa, Artificial Sequence; identical to SEQ ID NO: 28665
  Cyclic GFR-binding peptide
  MOD_RES (35), (35): Xaa is C or S

SEQ ID NO: 78689 - protein, 39 aa, Artificial Sequence; identical to SEQ ID NO: 28666
  Cyclic GFR-binding peptide
  MOD_RES (5), (6), (38): Xaa is C or S

SEQ ID NO: 78690 - protein, 24 aa, Artificial Sequence
  Cyclic GFR-binding peptide
PTKLRPVQVRKIDDSSNVIKKATV

SEQ ID NO: 78691 - protein, 30 aa, Artificial Sequence
  Cyclic GFR-binding peptide
  MOD_RES (4), (5): Xaa is C or S
ASPXXVPQDLSNITIQIMVGRTPKVIGEMS

SEQ ID NO: 78692 - protein, 40 aa, Artificial Sequence; identical to SEQ ID NO: 28668
  Cyclic GFR-binding peptide
  MOD_RES (37), (39): Xaa is C or S

SEQ ID NO: 78693 - protein, 33 aa, Artificial Sequence; identical to SEQ ID NO: 28669
  Cyclic GFR-binding peptide
  MOD_RES (1), (2): Xaa is C or S

SEQ ID NO: 78694 - protein, 34 aa, Artificial Sequence; identical to SEQ ID NO: 28671
  Cyclic GFR-binding peptide
  MOD_RES (2), (3), (34): Xaa is C or S

SEQ ID NO: 78695 - protein, 29 aa, Artificial Sequence
  Cyclic GFR-binding peptide
  MOD_RES (27), (29): Xaa is C or S
RSVKMAKVDENEKVVKEVQVDMVVEGXGX

SEQ ID NO: 78696 - protein, 29 aa, Artificial Sequence
  Cyclic GFR-binding peptide
  MOD_RES (27), (29): Xaa is C or S
LSNITIQIMVGRTPKVIGEMSMVVKSXKX

SEQ ID NO: 78697 - protein, 26 aa, Artificial Sequence
  Cyclic GFR-binding peptide
  MOD_RES (1), (1): Xaa is C or S
XVSQDLSNITIQIMIGKTPKIIGEMS

SEQ ID NO: 78698 - protein, 31 aa, Artificial Sequence
  Cyclic GFR-binding peptide
  MOD_RES (6), (6): Xaa is C or S
VTKPTXAPTKLRSVKVAKVDDSSNVIKEVQV

SEQ ID NO: 78699 - protein, 23 aa, Artificial Sequence
  Cyclic GFR-binding peptide
RPVQMRKIDENEKVVKKATVDMV

SEQ ID NO: 78700 - protein, 29 aa, Artificial Sequence
  Cyclic GFR-binding peptide
  MOD_RES (1), (2): Xaa is C or S
XXVPQDLRPVQIRKIVGRTPKVKKATVMV

SEQ ID NO: 78701 - protein, 28 aa, Artificial Sequence
  Cyclic GFR-binding peptide
TQVQLEPLTVLYYEIVRKKPIFEQLSNT

SEQ ID NO: 78702 - protein, 30 aa, Artificial Sequence
  Cyclic GFR-binding peptide
  MOD_RES (2), (3): Xaa is C or S
AXXVPTELRSVKMAKVDENEKVVKEVQVDM

SEQ ID NO: 78703 - protein, 28 aa, Artificial Sequence
  Cyclic GFR-binding peptide
  MOD_RES (3), (3): Xaa is C or S
PTXAPTKLRPVQVRKIDDSSNVIKKATV

SEQ ID NO: 78704 - protein, 30 aa, Artificial Sequence
  Cyclic GFR-binding peptide
  MOD_RES (3), (4): Xaa is C or S
KPXXAPTQLSNITVQIMDDSSNVIIGEMSN

SEQ ID NO: 78705 - protein, 34 aa, Artificial Sequence
  Cyclic GFR-binding peptide
  MOD_RES (4), (5): Xaa is C or S
ASPXXVPQDLSNITIQIMVGRTPKVIGEMSMVVK

SEQ ID NO: 78706 - protein, 35 aa, Artificial Sequence
  Cyclic GFR-binding peptide
  MOD_RES (6), (6): Xaa is C or S
DEGLEXVPTEEEPLPMVYYRIKPHQGQHEQLSNFL

SEQ ID NO: 78707 - protein, 42 aa, Artificial Sequence; identical to SEQ ID NO: 28685
  Cyclic GFR-binding peptide
  MOD_RES (7), (39), (41): Xaa is C or S

SEQ ID NO: 78708 - protein, 33 aa, Artificial Sequence
  Cyclic GFR-binding peptide
  MOD_RES (5), (6): Xaa is C or S
IPKAXXVPTELSNITMQIMDENEKVVIGEMSDM

SEQ ID NO: 78709 - protein, 33 aa, Artificial Sequence
  Cyclic GFR-binding peptide
  MOD_RES (5), (6): Xaa is C or S
IPKAXXVPTELRSVKMAKVDENEKVVKEVQVDM

SEQ ID NO: 78710 - protein, 28 aa, Artificial Sequence
  Cyclic GFR-binding peptide
PTQLRPVQVRKIDDSSNVIKKATVNMVV

SEQ ID NO: 78711 - protein, 34 aa, Artificial Sequence
  Cyclic GFR-binding peptide
  MOD_RES (4), (5): Xaa is C or S
ASPXXVSQDLRPVQIRKIIGKTPKIKKATVMIVK

SEQ ID NO: 78712 - protein, 40 aa, Artificial Sequence; identical to SEQ ID NO: 28689
  Cyclic GFR-binding peptide
  MOD_RES (4), (4): Xaa is C or S

SEQ ID NO: 78713 - protein, 29 aa, Artificial Sequence
  Cyclic GFR-binding peptide
SNITVQIMDDSSNVIIGEMSAAAAAAAAA

SEQ ID NO: 78714 - protein, 33 aa, Artificial Sequence
  Cyclic GFR-binding peptide
  MOD_RES (6), (7): Xaa is C or S
SIPKAXXVPTELRSVKMAKVDEYDKVVKEVQVE

SEQ ID NO: 78715 - protein, 33 aa, Artificial Sequence; identical to SEQ ID NO: 28690
  Cyclic GFR-binding peptide
  MOD_RES (1), (2), (33): Xaa is C or S

SEQ ID NO: 78716 - protein, 27 aa, Artificial Sequence
  Cyclic GFR-binding peptide
DLRSVKIAKVIGKTPKIKEVQVMIVKS

SEQ ID NO: 78717 - protein, 38 aa, Artificial Sequence; identical to SEQ ID NO: 28691
  Cyclic GFR-binding peptide
  MOD_RES (3), (4), (35), (37): Xaa is C or S

SEQ ID NO: 78718 - protein, 29 aa, Artificial Sequence
  Cyclic GFR-binding peptide
PQALRPVQIRKIVGRKPKVKKATVMIVRS

SEQ ID NO: 78719 - protein, 28 aa, Artificial Sequence
  Cyclic GFR-binding peptide
  MOD_RES (1), (1): Xaa is C or S
XVSQDLRPVQIRKIIGKTPKIKKATVMI

SEQ ID NO: 78720 - protein, 39 aa, Artificial Sequence; identical to SEQ ID NO: 28695
  Cyclic GFR-binding peptide
  MOD_RES (3), (37), (39): Xaa is C or S

SEQ ID NO: 78721 - protein, 32 aa, Artificial Sequence
  Cyclic GFR-binding peptide
  MOD_RES (3), (4): Xaa is C or S
SPXXVPQDLRSVKIAKVVGRTPKVKEVQVMVV

SEQ ID NO: 78722 - protein, 33 aa, Artificial Sequence
  Cyclic GFR-binding peptide
  MOD_RES (2), (2): Xaa is C or S
EXVPTEEEPLTMLYYRIKPHQGQHEQLSNFLQH

SEQ ID NO: 78723 - protein, 32 aa, Artificial Sequence
  Cyclic GFR-binding peptide
  MOD_RES (31), (31): Xaa is C or S
HEPLPVVYYEYVRKKPKLEQLSNRLEEHLEXA

SEQ ID NO: 78724 - protein, 27 aa, Artificial Sequence
  Cyclic GFR-binding peptide
SRVHHEPLTVLYYEYVRKKPKLEQLSN

SEQ ID NO: 78725 - protein, 31 aa, Artificial Sequence
  Cyclic GFR-binding peptide
  MOD_RES (3), (4): Xaa is C or S
KAXXVPTELRPVQMRKIDENEKVVKKATVDM

SEQ ID NO: 78726 - protein, 29 aa, Artificial Sequence
  Cyclic GFR-binding peptide
PTQVQLEPLTVLYYEIVRKKPIFEQLSNT

SEQ ID NO: 78727 - protein, 30 aa, Artificial Sequence
  Cyclic GFR-binding peptide
  MOD_RES (29), (29): Xaa is C or S
QDLSNITIQIMVGRTPKVIGEMSMVVKSXK

SEQ ID NO: 78728 - protein, 37 aa, Artificial Sequence; identical to SEQ ID NO: 28700
  Cyclic GFR-binding peptide
  MOD_RES (4), (4): Xaa is C or S

SEQ ID NO: 78729 - protein, 31 aa, Artificial Sequence
  Cyclic GFR-binding peptide
  MOD_RES (1), (2): Xaa is C or S
XXVPTELRPVQMRKIDENEKVVKKATVDMVV

SEQ ID NO: 78730 - protein, 26 aa, Artificial Sequence
  Cyclic GFR-binding peptide
VPTELSNITMQIMDENEKVVIGEMSD

SEQ ID NO: 78731 - protein, 32 aa, Artificial Sequence; identical to SEQ ID NO: 28703
  Cyclic GFR-binding peptide
  MOD_RES (32), (32): Xaa is C or S

SEQ ID NO: 78732 - protein, 38 aa, Artificial Sequence; identical to SEQ ID NO: 28704
  Cyclic GFR-binding peptide
  MOD_RES (6), (7): Xaa is C or S

SEQ ID NO: 78733 - protein, 21 aa, Artificial Sequence
  Cyclic GFR-binding peptide
SNITVQIMDDSSNVIIGEMSN

SEQ ID NO: 78734 - protein, 40 aa, Artificial Sequence; identical to SEQ ID NO: 28707
  Cyclic GFR-binding peptide
  MOD_RES (7), (39): Xaa is C or S

SEQ ID NO: 78735 - protein, 36 aa, Artificial Sequence; identical to SEQ ID NO: 28708
  Cyclic GFR-binding peptide
  MOD_RES (1), (2), (34), (36): Xaa is C or S

SEQ ID NO: 78736 - protein, 31 aa, Artificial Sequence
  Cyclic GFR-binding peptide
  MOD_RES (29), (31): Xaa is C or S
ELSNITMQIMDEYDKVVIGEMSEMVVEGXGX

SEQ ID NO: 78737 - protein, 34 aa, Artificial Sequence
  Cyclic GFR-binding peptide
  MOD_RES (32), (34): Xaa is C or S
HHEPLPVVYYEYVRKKPKLEQLSNRLEEHLEXAX

SEQ ID NO: 78738 - protein, 38 aa, Artificial Sequence; identical to SEQ ID NO: 28709
  Cyclic GFR-binding peptide
  MOD_RES (6), (7): Xaa is C or S

SEQ ID NO: 78739 - protein, 28 aa, Artificial Sequence
  Cyclic GFR-binding peptide
  MOD_RES (27), (27): Xaa is C or S
LRSVKIAKVVGRKPKVKEVQVMIVRSXK

SEQ ID NO: 78740 - protein, 36 aa, Artificial Sequence; identical to SEQ ID NO: 28712
  Cyclic GFR-binding peptide
  MOD_RES (2), (3), (35): Xaa is C or S

SEQ ID NO: 78741 - protein, 26 aa, Artificial Sequence
  Cyclic GFR-binding peptide
PTQLRPVQVRKIDDSSNVIKKATVNM

SEQ ID NO: 78742 - protein, 30 aa, Artificial Sequence
  Cyclic GFR-binding peptide
  MOD_RES (2), (3): Xaa is C or S
PXXVSQDLRPVQIRKIIGKTPKIKKATVMI

SEQ ID NO: 78743 - protein, 24 aa, Artificial Sequence
  Cyclic GFR-binding peptide
EPLPMVYYRIKPHQGQHEQLSNFL

SEQ ID NO: 78744 - protein, 30 aa, Artificial Sequence
  Cyclic GFR-binding peptide
  MOD_RES (27), (29): Xaa is C or S
RSVKVAKVDDSSNVIKEVQVNMVVRSXGXH

SEQ ID NO: 78745 - protein, 34 aa, Artificial Sequence
  Cyclic GFR-binding peptide
  MOD_RES (33), (33): Xaa is C or S
PTEEEPLPMVYYRIKPHQGQHEQLSNFLQHNKXE

SEQ ID NO: 78746 - protein, 36 aa, Artificial Sequence; identical to SEQ ID NO: 28722
  Cyclic GFR-binding peptide
  MOD_RES (4), (5), (36): Xaa is C or S

SEQ ID NO: 78747 - protein, 29 aa, Artificial Sequence
  Cyclic GFR-binding peptide
  MOD_RES (1), (1): Xaa is C or S
XAPTQLRPVQVRKIDDSSNVIKKATVNMV

SEQ ID NO: 78748 - protein, 33 aa, Artificial Sequence; identical to SEQ ID NO: 28725
  Cyclic GFR-binding peptide
  MOD_RES (1), (2), (33): Xaa is C or S

SEQ ID NO: 78749 - protein, 33 aa, Artificial Sequence
  Cyclic GFR-binding peptide
  MOD_RES (4), (5): Xaa is C or S
ASPXXVSQDLSNITIQIMIGKTPKIIGEMSMIV

SEQ ID NO: 78750 - protein, 29 aa, Artificial Sequence
  Cyclic GFR-binding peptide
  MOD_RES (28), (28): Xaa is C or S
DLSNITIQIMVGRTPKVIGEMSMVVKSXK

SEQ ID NO: 78751 - protein, 33 aa, Artificial Sequence; identical to SEQ ID NO: 28727
  Cyclic GFR-binding peptide
  MOD_RES (2), (3): Xaa is C or S

SEQ ID NO: 78752 - protein, 41 aa, Artificial Sequence; identical to SEQ ID NO: 28729
  Cyclic GFR-binding peptide
  MOD_RES (6), (7), (39), (41): Xaa is C or S

SEQ ID NO: 78753 - protein, 36 aa, Artificial Sequence; identical to SEQ ID NO: 28732
  Cyclic GFR-binding peptide
  MOD_RES (4), (5), (36): Xaa is C or S

SEQ ID NO: 78754 - protein, 32 aa, Artificial Sequence
  Cyclic GFR-binding peptide
  MOD_RES (5), (6): Xaa is C or S
SASPXXVPQDLSNITIQIMVGRTPKVIGEMSM

SEQ ID NO: 78755 - protein, 33 aa, Artificial Sequence; identical to SEQ ID NO: 28734
  Cyclic GFR-binding peptide
  MOD_RES (32), (32): Xaa is C or S

SEQ ID NO: 78756 - protein, 29 aa, Artificial Sequence
  Cyclic GFR-binding peptide
  MOD_RES (28), (28): Xaa is C or S
LSNITMQIMDENEKVVIGEMSDMVVEGXG

SEQ ID NO: 78757 - protein, 27 aa, Artificial Sequence
  Cyclic GFR-binding peptide
  MOD_RES (27), (27): Xaa is C or S
LRSVKIAKVVGRTPKVKEVQVMVVKSX

SEQ ID NO: 78758 - protein, 28 aa, Artificial Sequence
  Cyclic GFR-binding peptide
SRVHHEPLPVVYYEYVRKKPKLEQLSNR

SEQ ID NO: 78759 - protein, 26 aa, Artificial Sequence
  Cyclic GFR-binding peptide
LRPVQMRKIDENEKVVKKATVDMVVE

SEQ ID NO: 78760 - protein, 40 aa, Artificial Sequence; identical to SEQ ID NO: 28739
  Cyclic GFR-binding peptide
  MOD_RES (6), (40): Xaa is C or S

SEQ ID NO: 78761 - protein, 34 aa, Artificial Sequence
  Cyclic GFR-binding peptide
  MOD_RES (6), (7): Xaa is C or S
SIPKAXXVPTELRSVKMAKVDEYDKVVKEVQVEM

SEQ ID NO: 78762 - protein, 21 aa, Artificial Sequence
  Cyclic GFR-binding peptide
LRSVKIAKVVGRKPKVKEVQV

SEQ ID NO: 78763 - protein, 41 aa, Artificial Sequence; identical to SEQ ID NO: 28742
  Cyclic GFR-binding peptide
  MOD_RES (5), (6), (38), (40): Xaa is C or S

SEQ ID NO: 78764 - protein, 27 aa, Artificial Sequence
  Cyclic GFR-binding peptide
LSNITMQIMDEYDKVVIGEMSEMVVEG

SEQ ID NO: 78765 - protein, 31 aa, Artificial Sequence; identical to SEQ ID NO: 28743
  Cyclic GFR-binding peptide
  MOD_RES (31), (31): Xaa is C or S

SEQ ID NO: 78766 - protein, 36 aa, Artificial Sequence; identical to SEQ ID NO: 28748
  Cyclic GFR-binding peptide
  MOD_RES (3), (4), (35): Xaa is C or S

SEQ ID NO: 78767 - protein, 30 aa, Artificial Sequence
  Cyclic GFR-binding peptide
  MOD_RES (1), (2): Xaa is C or S
XXVSQDLRSVKIAKVIGKTPKIKEVQVMIV

SEQ ID NO: 78768 - protein, 34 aa, Artificial Sequence
  Cyclic GFR-binding peptide
  MOD_RES (3), (3): Xaa is C or S
VKXQPSRVHHEPLPVVYYEYVRKKPKLEQLSNRL

SEQ ID NO: 78769 - protein, 34 aa, Artificial Sequence; identical to SEQ ID NO: 28755
  Cyclic GFR-binding peptide
  MOD_RES (2), (3): Xaa is C or S

SEQ ID NO: 78770 - protein, 21 aa, Artificial Sequence
  Cyclic GFR-binding peptide
RPVQIRKIVGRTPKVKKATVM

SEQ ID NO: 78771 - protein, 31 aa, Artificial Sequence
  Cyclic GFR-binding peptide
  MOD_RES (28), (30): Xaa is C or S
LRSVKVAKVDDSSNVIKEVQVNMVVRAXGXH

SEQ ID NO: 78772 - protein, 31 aa, Artificial Sequence
  Cyclic GFR-binding peptide
  MOD_RES (5), (6): Xaa is C or S
VPKPXXAPTKLSNITVQIMDDSSNVIIGEMS

SEQ ID NO: 78773 - protein, 29 aa, Artificial Sequence
  Cyclic GFR-binding peptide
  MOD_RES (26), (28): Xaa is C or S
RSVKIAKVIGKTPKIKEVQVMIVKSXKXS

SEQ ID NO: 78774 - protein, 32 aa, Artificial Sequence
  Cyclic GFR-binding peptide
  MOD_RES (30), (32): Xaa is C or S
TQLSNITVQIMDDSSNVIIGEMSNMVVRAXGX

SEQ ID NO: 78775 - protein, 34 aa, Artificial Sequence
  Cyclic GFR-binding peptide
  MOD_RES (34), (34): Xaa is C or S
RVHHEPLPVVYYEYVRKKPKLEQLSNRLEEHLEX

SEQ ID NO: 78776 - protein, 28 aa, Artificial Sequence
  Cyclic GFR-binding peptide
APTKLRSVKVAKVDDSSNVIKEVQVNMV

SEQ ID NO: 78777 - protein, 32 aa, Artificial Sequence
  Cyclic GFR-binding peptide
PSRVHHEPLTVLYYEYVRKKPKLEQLSNRLEE

SEQ ID NO: 78778 - protein, 30 aa, Artificial Sequence
  Cyclic GFR-binding peptide
  MOD_RES (2), (3): Xaa is C or S
PXXVSQDLRSVKIAKVIGKTPKIKEVQVMI

SEQ ID NO: 78779 - protein, 32 aa, Artificial Sequence
  Cyclic GFR-binding peptide
  MOD_RES (2), (3): Xaa is C or S
PXXVPQALRSVKIAKVVGRKPKVKEVQVMIVR

SEQ ID NO: 78780 - protein, 30 aa, Artificial Sequence
  Cyclic GFR-binding peptide
  MOD_RES (1), (1): Xaa is C or S
XVPTELRSVKMAKVDEYDKVVKEVQVEMVV

SEQ ID NO: 78781 - protein, 30 aa, Artificial Sequence
  Cyclic GFR-binding peptide
  MOD_RES (28), (30): Xaa is C or S
ALSNITIQIMVGRKPKVIGEMSMIVRSXKX

SEQ ID NO: 78782 - protein, 34 aa, Artificial Sequence; identical to SEQ ID NO: 28760
  Cyclic GFR-binding peptide
  MOD_RES (1), (33): Xaa is C or S

SEQ ID NO: 78783 - protein, 23 aa, Artificial Sequence
  Cyclic GFR-binding peptide
LRSVKMAKVDEYDKVVKEVQVEM

SEQ ID NO: 78784 - protein, 40 aa, Artificial Sequence; identical to SEQ ID NO: 28762
  Cyclic GFR-binding peptide
  MOD_RES (5), (5): Xaa is C or S

SEQ ID NO: 78785 - protein, 37 aa, Artificial Sequence
  Cyclic GFR-binding peptide
  MOD_RES (4), (4): Xaa is C or S
NVQXRPTQVQLEPLTVLYYEIVRKKPIFEQLSNTLED

SEQ ID NO: 78786 - protein, 35 aa, Artificial Sequence; identical to SEQ ID NO: 28765
  Cyclic GFR-binding peptide
  MOD_RES (1), (2), (33), (35): Xaa is C or S

SEQ ID NO: 78787 - protein, 33 aa, Artificial Sequence
  Cyclic GFR-binding peptide
  MOD_RES (31), (33): Xaa is C or S
EEEPLPMVYYRIKPHQGQHEQLSNFLQHNKXEX

SEQ ID NO: 78788 - protein, 32 aa, Artificial Sequence; identical to SEQ ID NO: 28774
  Cyclic GFR-binding peptide
  MOD_RES (32), (32): Xaa is C or S

SEQ ID NO: 78789 - protein, 36 aa, Artificial Sequence; identical to SEQ ID NO: 28773
  Cyclic GFR-binding peptide
  MOD_RES (3), (4), (36): Xaa is C or S

SEQ ID NO: 78790 - protein, 33 aa, Artificial Sequence
  Cyclic GFR-binding peptide
  MOD_RES (4), (5): Xaa is C or S
ASPXXVSQDLRSVKIAKVIGKTPKIKEVQVMIV

SEQ ID NO: 78791 - protein, 35 aa, Artificial Sequence; identical to SEQ ID NO: 28775
  Cyclic GFR-binding peptide
  MOD_RES (1), (2), (33), (35): Xaa is C or S

SEQ ID NO: 78792 - protein, 37 aa, Artificial Sequence; identical to SEQ ID NO: 28777
  Cyclic GFR-binding peptide
  MOD_RES (4), (5), (37): Xaa is C or S

SEQ ID NO: 78793 - protein, 35 aa, Artificial Sequence; identical to SEQ ID NO: 28778
  Cyclic GFR-binding peptide
  MOD_RES (3), (4), (35): Xaa is C or S

SEQ ID NO: 78794 - protein, 36 aa, Artificial Sequence; identical to SEQ ID NO: 28779
  Cyclic GFR-binding peptide
  MOD_RES (1), (33), (35): Xaa is C or S

SEQ ID NO: 78795 - protein, 29 aa, Artificial Sequence
  Cyclic GFR-binding peptide
PTKLSNITVQIMDDSSNVIIGEMSNMVVR

SEQ ID NO: 78796 - protein, 23 aa, Artificial Sequence
  Cyclic GFR-binding peptide
LSNITIQIMIGKTPKIIGEMSMI

SEQ ID NO: 78797 - protein, 32 aa, Artificial Sequence
  Cyclic GFR-binding peptide
  MOD_RES (31), (31): Xaa is C or S
PTQLRSVKVAKVDDSSNVIKEVQVNMVVRAXG

SEQ ID NO: 78798 - protein, 34 aa, Artificial Sequence
  Cyclic GFR-binding peptide
  MOD_RES (6), (7): Xaa is C or S
TVPKPXXAPTQLRPVQVRKIDDSSNVIKKATVNM

SEQ ID NO: 78799 - protein, 35 aa, Artificial Sequence; identical to SEQ ID NO: 28788
  Cyclic GFR-binding peptide
  MOD_RES (3), (4): Xaa is C or S

SEQ ID NO: 78800 - protein, 25 aa, Artificial Sequence
  Cyclic GFR-binding peptide
SQDLRSVKIAKVIGKTPKIKEVQVM

SEQ ID NO: 78801 - protein, 33 aa, Artificial Sequence
  Cyclic GFR-binding peptide
  MOD_RES (3), (4): Xaa is C or S
KAXXVPTELSNITMQIMDEYDKVVIGEMSEMVV

SEQ ID NO: 78802 - protein, 35 aa, Artificial Sequence; identical to SEQ ID NO: 28791
  Cyclic GFR-binding peptide
  MOD_RES (4), (5): Xaa is C or S

SEQ ID NO: 78803 - protein, 37 aa, Artificial Sequence; identical to SEQ ID NO: 28793
  Cyclic GFR-binding peptide
  MOD_RES (4), (5), (37): Xaa is C or S

SEQ ID NO: 78804 - protein, 33 aa, Artificial Sequence
  Cyclic GFR-binding peptide
  MOD_RES (30), (32): Xaa is C or S
PQALRPVQIRKIVGRKPKVKKATVMIVRSXKXS

SEQ ID NO: 78805 - protein, 38 aa, Artificial Sequence; identical to SEQ ID NO: 28795
  Cyclic GFR-binding peptide
  MOD_RES (2), (3), (35), (37): Xaa is C or S

SEQ ID NO: 78806 - protein, 33 aa, Artificial Sequence
  Cyclic GFR-binding peptide
  MOD_RES (31), (33): Xaa is C or S
LEPLPVVYYEIVRKKPIFEQLSNTLEDHLAXKX

SEQ ID NO: 78807 - protein, 30 aa, Artificial Sequence
  Cyclic GFR-binding peptide
  MOD_RES (3), (3): Xaa is C or S
PTXAPTKLSNITVQIMDDSSNVIIGEMSNM

SEQ ID NO: 78808 - protein, 31 aa, Artificial Sequence
  Cyclic GFR-binding peptide
  MOD_RES (4), (5): Xaa is C or S
ASPXXVPQDLSNITIQIMVGRTPKVIGEMSM

SEQ ID NO: 78809 - protein, 30 aa, Artificial Sequence
  Cyclic GFR-binding peptide
  MOD_RES (1), (1): Xaa is C or S
XVSQDLSNITIQIMIGKTPKIIGEMSMIVK

SEQ ID NO: 78810 - protein, 22 aa, Artificial Sequence
  Cyclic GFR-binding peptide
RPVQVRKIDDSSNVIKKATVNM

SEQ ID NO: 78811 - protein, 31 aa, Artificial Sequence
  Cyclic GFR-binding peptide
  MOD_RES (30), (30): Xaa is C or S
PQALSNITIQIMVGRKPKVIGEMSMIVRSXK

SEQ ID NO: 78812 - protein, 27 aa, Artificial Sequence
  Cyclic GFR-binding peptide
  MOD_RES (1), (1): Xaa is C or S
XVPTELRPVQMRKIDEYDKVVKKATVE

SEQ ID NO: 78813 - protein, 41 aa, Artificial Sequence; identical to SEQ ID NO: 28802
  Cyclic GFR-binding peptide
  MOD_RES (3), (40): Xaa is C or S

SEQ ID NO: 78814 - protein, 35 aa, Artificial Sequence; identical to SEQ ID NO: 28803
  Cyclic GFR-binding peptide
  MOD_RES (5), (5): Xaa is C or S

SEQ ID NO: 78815 - protein, 29 aa, Artificial Sequence
  Cyclic GFR-binding peptide
  MOD_RES (2), (2): Xaa is C or S
TXAPTKLRPVQVRKIDDSSNVIKKATVNM

SEQ ID NO: 78816 - protein, 32 aa, Artificial Sequence
  Cyclic GFR-binding peptide
  MOD_RES (6), (7): Xaa is C or S
TVPKPXXAPTQLSNITVQIMDDSSNVIIGEMS

SEQ ID NO: 78817 - protein, 38 aa, Artificial Sequence; identical to SEQ ID NO: 28808
  Cyclic GFR-binding peptide
  MOD_RES (7), (7): Xaa is C or S

SEQ ID NO: 78818 - protein, 32 aa, Artificial Sequence
  Cyclic GFR-binding peptide
  MOD_RES (31), (31): Xaa is C or S
PTKLRSVKVAKVDDSSNVIKEVQVNMVVRSXG

SEQ ID NO: 78819 - protein, 29 aa, Artificial Sequence
  Cyclic GFR-binding peptide
VPTEEEPLTMLYYRIKPHQGQHEQLSNFL

SEQ ID NO: 78820 - protein, 27 aa, Artificial Sequence
  Cyclic GFR-binding peptide
VPTELRPVQMRKIDEYDKVVKKATVEM

SEQ ID NO: 78821 - protein, 38 aa, Artificial Sequence; identical to SEQ ID NO: 28817
  Cyclic GFR-binding peptide
  MOD_RES (3), (3): Xaa is C or S

SEQ ID NO: 78822 - protein, 36 aa, Artificial Sequence
  Cyclic GFR-binding peptide
  MOD_RES (6), (6): Xaa is C or S
DEGLEXVPTEEEPLTMLYYRIKPHQGQHEQLSNFLQ

SEQ ID NO: 78823 - protein, 33 aa, Artificial Sequence
  Cyclic GFR-binding peptide
  MOD_RES (5), (6): Xaa is C or S
SAAPXXVPQALRSVKIAKVVGRKPKVKEVQVMI

SEQ ID NO: 78824 - protein, 31 aa, Artificial Sequence
  Cyclic GFR-binding peptide
  MOD_RES (5), (6): Xaa is C or S
SAAPXXVPQALSNITIQIMVGRKPKVIGEMS

SEQ ID NO: 78825 - protein, 40 aa, Artificial Sequence; identical to SEQ ID NO: 28820
  Cyclic GFR-binding peptide
  MOD_RES (6), (7), (38), (40): Xaa is C or S

SEQ ID NO: 78826 - protein, 27 aa, Artificial Sequence
  Cyclic GFR-binding peptide
DLSNITIQIMIGKTPKIIGEMSMIVKS

SEQ ID NO: 78827 - protein, 35 aa, Artificial Sequence; identical to SEQ ID NO: 28824
  Cyclic GFR-binding peptide
  MOD_RES (1), (32), (34): Xaa is C or S

SEQ ID NO: 78828 - protein, 30 aa, Artificial Sequence
  Cyclic GFR-binding peptide
  MOD_RES (3), (4): Xaa is C or S
SPXXVPQDLRSVKIAKVVGRTPKVKEVQVM

SEQ ID NO: 78829 - protein, 34 aa, Artificial Sequence
  Cyclic GFR-binding peptide
  MOD_RES (6), (7): Xaa is C or S
ASAAPXXVPQALSNITIQIMVGRKPKVIGEMSMI

SEQ ID NO: 78830 - protein, 25 aa, Artificial Sequence
  Cyclic GFR-binding peptide
ELRSVKMAKVDEYDKVVKEVQVEMV

SEQ ID NO: 78831 - protein, 37 aa, Artificial Sequence; identical to SEQ ID NO: 28833
  Cyclic GFR-binding peptide
  MOD_RES (1), (1): Xaa is C or S

SEQ ID NO: 78832 - protein, 32 aa, Artificial Sequence
  Cyclic GFR-binding peptide
RPTQVQLEPLTVLYYEIVRKKPIFEQLSNTLE

SEQ ID NO: 78833 - protein, 35 aa, Artificial Sequence; identical to SEQ ID NO: 28835
  Cyclic GFR-binding peptide
  MOD_RES (4), (5): Xaa is C or S

SEQ ID NO: 78834 - protein, 27 aa, Artificial Sequence
  Cyclic GFR-binding peptide
  MOD_RES (1), (1): Xaa is C or S
XVSQDLSNITIQIMIGKTPKIIGEMSM

SEQ ID NO: 78835 - protein, 28 aa, Artificial Sequence
  Cyclic GFR-binding peptide
  MOD_RES (28), (28): Xaa is C or S
ALRPVQIRKIVGRKPKVKKATVMIVRSX

SEQ ID NO: 78836 - protein, 20 aa, Artificial Sequence
  Cyclic GFR-binding peptide
SNITVQIMDDSSNVIIGEMS

SEQ ID NO: 78837 - protein, 24 aa, Artificial Sequence
  Cyclic GFR-binding peptide
KLRSVKVAKVDDSSNVIKEVQVNM

SEQ ID NO: 78838 - protein, 29 aa, Artificial Sequence
  Cyclic GFR-binding peptide
  MOD_RES (3), (3): Xaa is C or S
PTXAPTKLRPVQVRKIDDSSNVIKKATVN

SEQ ID NO: 78839 - protein, 28 aa, Artificial Sequence
  Cyclic GFR-binding peptide
  MOD_RES (26), (28): Xaa is C or S
SNITIQIMVGRTPKVIGEMSMVVKSXKX

SEQ ID NO: 78840 - protein, 28 aa, Artificial Sequence
  Cyclic GFR-binding peptide
  MOD_RES (1), (2): Xaa is C or S
XXAPTKLRPVQVRKIDDSSNVIKKATVN

SEQ ID NO: 78841 - protein, 37 aa, Artificial Sequence
  Cyclic GFR-binding peptide
  MOD_RES (34), (36): Xaa is C or S
RVHHEPLTVLYYEYVRKKPKLEQLSNRLEEHLEXAXA

SEQ ID NO: 78842 - protein, 21 aa, Artificial Sequence
  Cyclic GFR-binding peptide
LRSVKMAKVDEYDKVVKEVQV

SEQ ID NO: 78843 - protein, 25 aa, Artificial Sequence
  Cyclic GFR-binding peptide
LRPVQIRKIVGRTPKVKKATVMVVK

SEQ ID NO: 78844 - protein, 27 aa, Artificial Sequence
  Cyclic GFR-binding peptide
  MOD_RES (26), (26): Xaa is C or S
RPVQIRKIVGRKPKVKKATVMIVRSXK

SEQ ID NO: 78845 - protein, 25 aa, Artificial Sequence
  Cyclic GFR-binding peptide
PTKLRPVQVRKIDDSSNVIKKATVN

SEQ ID NO: 78846 - protein, 29 aa, Artificial Sequence
  Cyclic GFR-binding peptide
APTQLRSVKVAKVDDSSNVIKEVQVNMVV

SEQ ID NO: 78847 - protein, 38 aa, Artificial Sequence; identical to SEQ ID NO: 28856
  Cyclic GFR-binding peptide
  MOD_RES (36), (38): Xaa is C or S

SEQ ID NO: 78848 - protein, 30 aa, Artificial Sequence
  Cyclic GFR-binding peptide
  MOD_RES (29), (29): Xaa is C or S
ELRPVQMRKIDEYDKVVKKATVEMVVEGXG

SEQ ID NO: 78849 - protein, 31 aa, Artificial Sequence
  Cyclic GFR-binding peptide
  MOD_RES (4), (5): Xaa is C or S
ASPXXVSQDLRSVKIAKVIGKTPKIKEVQVM

SEQ ID NO: 78850 - protein, 36 aa, Artificial Sequence
  Cyclic GFR-binding peptide
  MOD_RES (33), (35): Xaa is C or S
VQLEPLPVVYYEIVRKKPIFEQLSNTLEDHLAXKXE

SEQ ID NO: 78851 - protein, 39 aa, Artificial Sequence; identical to SEQ ID NO: 28864
  Cyclic GFR-binding peptide
  MOD_RES (3), (3): Xaa is C or S

SEQ ID NO: 78852 - protein, 31 aa, Artificial Sequence
  Cyclic GFR-binding peptide
  MOD_RES (2), (3): Xaa is C or S
PXXAPTKLSNITVQIMDDSSNVIIGEMSNMV

SEQ ID NO: 78853 - protein, 27 aa, Artificial Sequence
  Cyclic GFR-binding peptide
  MOD_RES (27), (27): Xaa is C or S
LRPVQIRKIVGRKPKVKKATVMIVRSX

SEQ ID NO: 78854 - protein, 35 aa, Artificial Sequence; identical to SEQ ID NO: 28869
  Cyclic GFR-binding peptide
  MOD_RES (3), (4): Xaa is C or S

SEQ ID NO: 78855 - protein, 32 aa, Artificial Sequence
  Cyclic GFR-binding peptide
  MOD_RES (3), (4): Xaa is C or S
KAXXVPTELRSVKMAKVDENEKVVKEVQVDMV

SEQ ID NO: 78856 - protein, 36 aa, Artificial Sequence; identical to SEQ ID NO: 28870
  Cyclic GFR-binding peptide

SEQ ID NO: 78857 - protein, 29 aa, Artificial Sequence
  Cyclic GFR-binding peptide
  MOD_RES (28), (28): Xaa is C or S
DLSNITIQIMIGKTPKIIGEMSMIVKSXK

SEQ ID NO: 78858 - protein, 33 aa, Artificial Sequence
  Cyclic GFR-binding peptide
RPTQVQLEPLTVLYYEIVRKKPIFEQLSNTLED

SEQ ID NO: 78859 - protein, 30 aa, Artificial Sequence
  Cyclic GFR-binding peptide
  MOD_RES (29), (29): Xaa is C or S
KLRPVQVRKIDDSSNVIKKATVNMVVRSXG

SEQ ID NO: 78860 - protein, 38 aa, Artificial Sequence; identical to SEQ ID NO: 28878
  Cyclic GFR-binding peptide
  MOD_RES (4), (5), (36), (38): Xaa is C or S

SEQ ID NO: 78861 - protein, 39 aa, Artificial Sequence; identical to SEQ ID NO: 28879
  Cyclic GFR-binding peptide
  MOD_RES (3), (4), (36), (38): Xaa is C or S

SEQ ID NO: 78862 - protein, 27 aa, Artificial Sequence
  Cyclic GFR-binding peptide
  MOD_RES (1), (2): Xaa is C or S
XXVPQALSNITIQIMVGRKPKVIGEMS

SEQ ID NO: 78863 - protein, 31 aa, Artificial Sequence
  Cyclic GFR-binding peptide
  MOD_RES (31), (31): Xaa is C or S
PTKLRSVKVAKVDDSSNVIKEVQVNMVVRSX

SEQ ID NO: 78864 - protein, 42 aa, Artificial Sequence; identical to SEQ ID NO: 28880
  Cyclic GFR-binding peptide
  MOD_RES (2), (39), (41): Xaa is C or S

SEQ ID NO: 78865 - protein, 34 aa, Artificial Sequence
  Cyclic GFR-binding peptide
  MOD_RES (6), (7): Xaa is C or S
KIPKAXXVPTELRPVQMRKIDENEKVVKKATVDM

SEQ ID NO: 78866 - protein, 37 aa, Artificial Sequence; identical to SEQ ID NO: 28884
  Cyclic GFR-binding peptide
  MOD_RES (6), (6): Xaa is C or S

SEQ ID NO: 78867 - protein, 30 aa, Artificial Sequence
  Cyclic GFR-binding peptide
RPTQVQLEPLTVLYYEIVRKKPIFEQLSNT

SEQ ID NO: 78868 - protein, 27 aa, Artificial Sequence
  Cyclic GFR-binding peptide
  MOD_RES (1), (1): Xaa is C or S
XVPQDLSNITIQIMVGRTPKVIGEMSM

SEQ ID NO: 78869 - protein, 33 aa, Artificial Sequence
  Cyclic GFR-binding peptide
  MOD_RES (3), (4): Xaa is C or S
KPXXAPTQLSNITVQIMDDSSNVIIGEMSNMVV

SEQ ID NO: 78870 - protein, 39 aa, Artificial Sequence; identical to SEQ ID NO: 28886
  Cyclic GFR-binding peptide
  MOD_RES (6), (7), (39): Xaa is C or S

SEQ ID NO: 78871 - protein, 26 aa, Artificial Sequence
  Cyclic GFR-binding peptide
PTELRPVQMRKIDENEKVVKKATVDM

SEQ ID NO: 78872 - protein, 32 aa, Artificial Sequence; identical to SEQ ID NO: 28888
  Cyclic GFR-binding peptide
  MOD_RES (32), (32): Xaa is C or S

SEQ ID NO: 78873 - protein, 30 aa, Artificial Sequence
  Cyclic GFR-binding peptide
  MOD_RES (3), (4): Xaa is C or S
KAXXVPTELSNITMQIMDEYDKVVIGEMSE

SEQ ID NO: 78874 - protein, 39 aa, Artificial Sequence; identical to SEQ ID NO: 28890
  Cyclic GFR-binding peptide
  MOD_RES (6), (7), (39): Xaa is C or S

SEQ ID NO: 78875 - protein, 39 aa, Artificial Sequence; identical to SEQ ID NO: 28891
  Cyclic GFR-binding peptide
  MOD_RES (7), (7): Xaa is C or S

SEQ ID NO: 78876 - protein, 33 aa, Artificial Sequence
  Cyclic GFR-binding peptide
  MOD_RES (5), (6): Xaa is C or S
SASPXXVSQDLRPVQIRKIIGKTPKIKKATVMI

SEQ ID NO: 78877 - protein, 34 aa, Artificial Sequence
  Cyclic GFR-binding peptide
  MOD_RES (6), (7): Xaa is C or S
SIPKAXXVPTELSNITMQIMDEYDKVVIGEMSEM

SEQ ID NO: 78878 - protein, 36 aa, Artificial Sequence; identical to SEQ ID NO: 28896
  Cyclic GFR-binding peptide
  MOD_RES (2), (3), (35): Xaa is C or S

SEQ ID NO: 78879 - protein, 35 aa, Artificial Sequence
  Cyclic GFR-binding peptide
  MOD_RES (6), (7): Xaa is C or S
ASASPXXVSQDLRPVQIRKIIGKTPKIKKATVMIV

SEQ ID NO: 78880 - protein, 33 aa, Artificial Sequence
  Cyclic GFR-binding peptide
  MOD_RES (30), (32): Xaa is C or S
TELRSVKMAKVDENEKVVKEVQVDMVVEGXGXR

SEQ ID NO: 78881 - protein, 40 aa, Artificial Sequence; identical to SEQ ID NO: 28904
  Cyclic GFR-binding peptide
  MOD_RES (5), (6), (37), (39): Xaa is C or S

SEQ ID NO: 78882 - protein, 34 aa, Artificial Sequence
  Cyclic GFR-binding peptide
  MOD_RES (33), (33): Xaa is C or S
VQLEPLPVVYYEIVRKKPIFEQLSNTLEDHLAXK

SEQ ID NO: 78883 - protein, 36 aa, Artificial Sequence; identical to SEQ ID NO: 28906
  Cyclic GFR-binding peptide
  MOD_RES (5), (6): Xaa is C or S

SEQ ID NO: 78884 - protein, 32 aa, Artificial Sequence; identical to SEQ ID NO: 28907
  Cyclic GFR-binding peptide
  MOD_RES (1), (2): Xaa is C or S

SEQ ID NO: 78885 - protein, 28 aa, Artificial Sequence
  Cyclic GFR-binding peptide
  MOD_RES (28), (28): Xaa is C or S
LSNITMQIMDEYDKVVIGEMSEMVVEGX

SEQ ID NO: 78886 - protein, 25 aa, Artificial Sequence
  Cyclic GFR-binding peptide
RSVKMAKVDENEKVVKEVQVDMVVE

SEQ ID NO: 78887 - protein, 36 aa, Artificial Sequence; identical to SEQ ID NO: 28912
  Cyclic GFR-binding peptide
  MOD_RES (4), (5): Xaa is C or S

SEQ ID NO: 78888 - protein, 29 aa, Artificial Sequence
  Cyclic GFR-binding peptide
APTKLSNITVQIMDDSSNVIIGEMSNMVV

SEQ ID NO: 78889 - protein, 32 aa, Artificial Sequence
  Cyclic GFR-binding peptide
  MOD_RES (6), (7): Xaa is C or S
ASAAPXXVPQALSNITIQIMVGRKPKVIGEMS

SEQ ID NO: 78890 - protein, 42 aa, Artificial Sequence; identical to SEQ ID NO: 28917
  Cyclic GFR-binding peptide
  MOD_RES (5), (42): Xaa is C or S

SEQ ID NO: 78891 - protein, 31 aa, Artificial Sequence
  Cyclic GFR-binding peptide
  MOD_RES (5), (6): Xaa is C or S
IPKAXXVPTELSNITMQIMDENEKVVIGEMS

SEQ ID NO: 78892 - protein, 27 aa, Artificial Sequence
  Cyclic GFR-binding peptide
EEPLPMVYYRIKPHQGQHEQLSNFLQH

SEQ ID NO: 78893 - protein, 37 aa, Artificial Sequence
  Cyclic GFR-binding peptide
  MOD_RES (6), (6): Xaa is C or S
DEGLEXVPTEEEPLTMLYYRIKPHQGQHEQLSNFLQH

SEQ ID NO: 78894 - protein, 30 aa, Artificial Sequence
  Cyclic GFR-binding peptide
  MOD_RES (3), (4): Xaa is C or S
SPXXVSQDLRSVKIAKVIGKTPKIKEVQVM

SEQ ID NO: 78895 - protein, 36 aa, Artificial Sequence
  Cyclic GFR-binding peptide
  MOD_RES (7), (7): Xaa is C or S
HVTKPTXAPTKLRPVQVRKIDDSSNVIKKATVNMVV

SEQ ID NO: 78896 - protein, 32 aa, Artificial Sequence
  Cyclic GFR-binding peptide
  MOD_RES (2), (3): Xaa is C or S
PXXVPQDLRSVKIAKVVGRTPKVKEVQVMVVK

SEQ ID NO: 78897 - protein, 35 aa, Artificial Sequence; identical to SEQ ID NO: 28922
  Cyclic GFR-binding peptide
  MOD_RES (3), (4): Xaa is C or S

SEQ ID NO: 78898 - protein, 35 aa, Artificial Sequence; identical to SEQ ID NO: 28924
  Cyclic GFR-binding peptide
  MOD_RES (35), (35): Xaa is C or S

SEQ ID NO: 78899 - protein, 31 aa, Artificial Sequence; identical to SEQ ID NO: 28932
  Cyclic GFR-binding peptide
  MOD_RES (1), (1): Xaa is C or S

SEQ ID NO: 78900 - protein, 22 aa, Artificial Sequence
  Cyclic GFR-binding peptide
RSVKVAKVDDSSNVIKEVQVNM

SEQ ID NO: 78901 - protein, 39 aa, Artificial Sequence; identical to SEQ ID NO: 28936
  Cyclic GFR-binding peptide
  MOD_RES (3), (4), (36), (38): Xaa is C or S

SEQ ID NO: 78902 - protein, 28 aa, Artificial Sequence
  Cyclic GFR-binding peptide
VPTELRPVQMRKIDEYDKVVKKATVEMV

SEQ ID NO: 78903 - protein, 31 aa, Artificial Sequence
  Cyclic GFR-binding peptide
  MOD_RES (4), (5): Xaa is C or S
PKPXXAPTKLRPVQVRKIDDSSNVIKKATVN

SEQ ID NO: 78904 - protein, 36 aa, Artificial Sequence
  Cyclic GFR-binding peptide
  MOD_RES (5), (5): Xaa is C or S
EGLEXVPTEEEPLTMLYYRIKPHQGQHEQLSNFLQH

SEQ ID NO: 78905 - protein, 38 aa, Artificial Sequence; identical to SEQ ID NO: 28940
  Cyclic GFR-binding peptide
  MOD_RES (6), (38): Xaa is C or S

SEQ ID NO: 78906 - protein, 41 aa, Artificial Sequence; identical to SEQ ID NO: 28941
  Cyclic GFR-binding peptide
  MOD_RES (6), (7), (38), (40): Xaa is C or S

SEQ ID NO: 78907 - protein, 37 aa, Artificial Sequence; identical to SEQ ID NO: 28942
  Cyclic GFR-binding peptide
  MOD_RES (2), (3), (35), (37): Xaa is C or S

SEQ ID NO: 78908 - protein, 33 aa, Artificial Sequence; identical to SEQ ID NO: 28943
  Cyclic GFR-binding peptide
  MOD_RES (31), (33): Xaa is C or S

SEQ ID NO: 78909 - protein, 35 aa, Artificial Sequence; identical to SEQ ID NO: 28944
  Cyclic GFR-binding peptide
  MOD_RES (1), (1): Xaa is C or S

SEQ ID NO: 78910 - protein, 34 aa, Artificial Sequence
  Cyclic GFR-binding peptide
  MOD_RES (31), (33): Xaa is C or S
PTELRPVQMRKIDENEKVVKKATVDMVVEGXGXR

SEQ ID NO: 78911 - protein, 33 aa, Artificial Sequence
  Cyclic GFR-binding peptide
  MOD_RES (33), (33): Xaa is C or S
PTEEEPLTMLYYRIKPHQGQHEQLSNFLQHNKX

SEQ ID NO: 78912 - protein, 27 aa, Artificial Sequence
  Cyclic GFR-binding peptide
  MOD_RES (27), (27): Xaa is C or S
LSNITIQIMVGRTPKVIGEMSMVVKSX

SEQ ID NO: 78913 - protein, 31 aa, Artificial Sequence; identical to SEQ ID NO: 28951
  Cyclic GFR-binding peptide
  MOD_RES (1), (1): Xaa is C or S

SEQ ID NO: 78914 - protein, 25 aa, Artificial Sequence
  Cyclic GFR-binding peptide
LRPVQIRKIVGRKPKVKKATVMIVR

SEQ ID NO: 78915 - protein, 30 aa, Artificial Sequence
  Cyclic GFR-binding peptide
  MOD_RES (27), (29): Xaa is C or S
SNITMQIMDENEKVVIGEMSDMVVEGXGXR

SEQ ID NO: 78916 - protein, 40 aa, Artificial Sequence; identical to SEQ ID NO: 28959
  Cyclic GFR-binding peptide
  MOD_RES (6), (7), (39): Xaa is C or S

SEQ ID NO: 78917 - protein, 22 aa, Artificial Sequence
  Cyclic GFR-binding peptide
LRSVKVAKVDDSSNVIKEVQVN

SEQ ID NO: 78918 - protein, 37 aa, Artificial Sequence; identical to SEQ ID NO: 28961
  Cyclic GFR-binding peptide
  MOD_RES (5), (37): Xaa is C or S

SEQ ID NO: 78919 - protein, 22 aa, Artificial Sequence
  Cyclic GFR-binding peptide
ALRSVKIAKVVGRKPKVKEVQV

SEQ ID NO: 78920 - protein, 29 aa, Artificial Sequence
  Cyclic GFR-binding peptide
  MOD_RES (2), (2): Xaa is C or S
TXAPTKLRSVKVAKVDDSSNVIKEVQVNM

SEQ ID NO: 78921 - protein, 27 aa, Artificial Sequence
  Cyclic GFR-binding peptide
RVHHEPLTVLYYEYVRKKPKLEQLSNR

SEQ ID NO: 78922 - protein, 32 aa, Artificial Sequence
  Cyclic GFR-binding peptide
  MOD_RES (6), (6): Xaa is C or S
VTKPTXAPTKLSNITVQIMDDSSNVIIGEMSN

SEQ ID NO: 78923 - protein, 20 aa, Artificial Sequence
  Cyclic GFR-binding peptide
RPVQIRKIVGRKPKVKKATV

SEQ ID NO: 78924 - protein, 40 aa, Artificial Sequence; identical to SEQ ID NO: 28969
  Cyclic GFR-binding peptide
  MOD_RES (1), (38), (40): Xaa is C or S

SEQ ID NO: 78925 - protein, 23 aa, Artificial Sequence
  Cyclic GFR-binding peptide
LSNITMQIMDEYDKVVIGEMSEM

SEQ ID NO: 78926 - protein, 37 aa, Artificial Sequence; identical to SEQ ID NO: 28970
  Cyclic GFR-binding peptide
  MOD_RES (6), (7): Xaa is C or S

SEQ ID NO: 78927 - protein, 33 aa, Artificial Sequence
  Cyclic GFR-binding peptide
  MOD_RES (3), (4): Xaa is C or S
KPXXAPTKLRPVQVRKIDDSSNVIKKATVNMVV

SEQ ID NO: 78928 - protein, 26 aa, Artificial Sequence
  Cyclic GFR-binding peptide
LRSVKIAKVIGKTPKIKEVQVMIVKS

SEQ ID NO: 78929 - protein, 26 aa, Artificial Sequence
  Cyclic GFR-binding peptide
ELRPVQMRKIDENEKVVKKATVDMVV

SEQ ID NO: 78930 - protein, 29 aa, Artificial Sequence
  Cyclic GFR-binding peptide
QPSRVHHEPLPVVYYEYVRKKPKLEQLSN

SEQ ID NO: 78931 - protein, 34 aa, Artificial Sequence
  Cyclic GFR-binding peptide
  MOD_RES (4), (4): Xaa is C or S
NVQXRPTQVQLEPLPVVYYEIVRKKPIFEQLSNT

SEQ ID NO: 78932 - protein, 27 aa, Artificial Sequence
  Cyclic GFR-binding peptide
  MOD_RES (1), (2): Xaa is C or S
XXAPTQLRPVQVRKIDDSSNVIKKATV

SEQ ID NO: 78933 - protein, 32 aa, Artificial Sequence
  Cyclic GFR-binding peptide
  MOD_RES (5), (5): Xaa is C or S
TKPTXAPTKLRSVKVAKVDDSSNVIKEVQVNM

SEQ ID NO: 78934 - protein, 31 aa, Artificial Sequence
  Cyclic GFR-binding peptide
  MOD_RES (2), (3): Xaa is C or S
PXXVPQDLRSVKIAKVVGRTPKVKEVQVMVV

SEQ ID NO: 78935 - protein, 27 aa, Artificial Sequence
  Cyclic GFR-binding peptide
QDLRPVQIRKIVGRTPKVKKATVMVVK

SEQ ID NO: 78936 - protein, 38 aa, Artificial Sequence; identical to SEQ ID NO: 28978
  Cyclic GFR-binding peptide
  MOD_RES (3), (37): Xaa is C or S

SEQ ID NO: 78937 - protein, 26 aa, Artificial Sequence
  Cyclic GFR-binding peptide
VPQALRSVKIAKVVGRKPKVKEVQVM

SEQ ID NO: 78938 - protein, 35 aa, Artificial Sequence
  Cyclic GFR-binding peptide
  MOD_RES (33), (35): Xaa is C or S
VQLEPLPVVYYEIVRKKPIFEQLSNTLEDHLAXKX

SEQ ID NO: 78939 - protein, 39 aa, Artificial Sequence; identical to SEQ ID NO: 28982
  Cyclic GFR-binding peptide
  MOD_RES (5), (6), (37), (39): Xaa is C or S

SEQ ID NO: 78940 - protein, 24 aa, Artificial Sequence
  Cyclic GFR-binding peptide
PTKLSNITVQIMDDSSNVIIGEMS

SEQ ID NO: 78941 - protein, 41 aa, Artificial Sequence; identical to SEQ ID NO: 28983
  Cyclic GFR-binding peptide
  MOD_RES (5), (39), (41): Xaa is C or S

SEQ ID NO: 78942 - protein, 35 aa, Artificial Sequence; identical to SEQ ID NO: 28984
  Cyclic GFR-binding peptide
  MOD_RES (3), (4): Xaa is C or S

SEQ ID NO: 78943 - protein, 36 aa, Artificial Sequence; identical to SEQ ID NO: 28987
  Cyclic GFR-binding peptide
  MOD_RES (1), (35): Xaa is C or S

SEQ ID NO: 78944 - protein, 25 aa, Artificial Sequence
  Cyclic GFR-binding peptide
ALRSVKIAKVVGRKPKVKEVQVMIV

SEQ ID NO: 78945 - protein, 36 aa, Artificial Sequence
  Cyclic GFR-binding peptide
  MOD_RES (33), (35): Xaa is C or S
VHHEPLPVVYYEYVRKKPKLEQLSNRLEEHLEXAXA

SEQ ID NO: 78946 - protein, 21 aa, Artificial Sequence
  Cyclic GFR-binding peptide
SNITMQIMDENEKVVIGEMSD

SEQ ID NO: 78947 - protein, 37 aa, Artificial Sequence; identical to SEQ ID NO: 28993
  Cyclic GFR-binding peptide
  MOD_RES (36), (36): Xaa is C or S

SEQ ID NO: 78948 - protein, 24 aa, Artificial Sequence
  Cyclic GFR-binding peptide
TKLRPVQVRKIDDSSNVIKKATVN

SEQ ID NO: 78949 - protein, 29 aa, Artificial Sequence
  Cyclic GFR-binding peptide
  MOD_RES (1), (2): Xaa is C or S
XXVPTELSNITMQIMDEYDKVVIGEMSEM

SEQ ID NO: 78950 - protein, 28 aa, Artificial Sequence
  Cyclic GFR-binding peptide
QDLRPVQIRKIIGKTPKIKKATVMIVKS

SEQ ID NO: 78951 - protein, 38 aa, Artificial Sequence; identical to SEQ ID NO: 28996
  Cyclic GFR-binding peptide
  MOD_RES (4), (36), (38): Xaa is C or S

SEQ ID NO: 78952 - protein, 27 aa, Artificial Sequence
  Cyclic GFR-binding peptide
  MOD_RES (27), (27): Xaa is C or S
SNITVQIMDDSSNVIIGEMSNMVVRAX

SEQ ID NO: 78953 - protein, 24 aa, Artificial Sequence
  Cyclic GFR-binding peptide
TELRSVKMAKVDEYDKVVKEVQVE

SEQ ID NO: 78954 - protein, 26 aa, Artificial Sequence
  Cyclic GFR-binding peptide
DLSNITIQIMIGKTPKIIGEMSMIVK

SEQ ID NO: 78955 - protein, 32 aa, Artificial Sequence; identical to SEQ ID NO: 29001
  Cyclic GFR-binding peptide

SEQ ID NO: 78956 - protein, 31 aa, Artificial Sequence
  Cyclic GFR-binding peptide
  MOD_RES (3), (4): Xaa is C or S
SPXXVPQDLSNITIQIMVGRTPKVIGEMSMV

SEQ ID NO: 78957 - protein, 32 aa, Artificial Sequence; identical to SEQ ID NO: 29004
  Cyclic GFR-binding peptide
  MOD_RES (1), (2): Xaa is C or S

SEQ ID NO: 78958 - protein, 41 aa, Artificial Sequence; identical to SEQ ID NO: 29005
  Cyclic GFR-binding peptide
  MOD_RES (4), (41): Xaa is C or S

SEQ ID NO: 78959 - protein, 33 aa, Artificial Sequence; identical to SEQ ID NO: 29007
  Cyclic GFR-binding peptide
  MOD_RES (1), (2): Xaa is C or S

SEQ ID NO: 78960 - protein, 24 aa, Artificial Sequence
  Cyclic GFR-binding peptide
LRPVQIRKIVGRTPKVKKATVMVV

SEQ ID NO: 78961 - protein, 31 aa, Artificial Sequence
  Cyclic GFR-binding peptide
PSRVHHEPLTVLYYEYVRKKPKLEQLSNRLE

SEQ ID NO: 78962 - protein, 26 aa, Artificial Sequence
  Cyclic GFR-binding peptide
TEEEPLPMVYYRIKPHQGQHEQLSNF

SEQ ID NO: 78963 - protein, 38 aa, Artificial Sequence; identical to SEQ ID NO: 29011
  Cyclic GFR-binding peptide
  MOD_RES (6), (7), (38): Xaa is C or S

SEQ ID NO: 78964 - protein, 23 aa, Artificial Sequence
  Cyclic GFR-binding peptide
RSVKMAKVDEYDKVVKEVQVEMV

SEQ ID NO: 78965 - protein, 35 aa, Artificial Sequence; identical to SEQ ID NO: 29013
  Cyclic GFR-binding peptide
  MOD_RES (1), (2), (34): Xaa is C or S

SEQ ID NO: 78966 - protein, 27 aa, Artificial Sequence
  Cyclic GFR-binding peptide
VPTELSNITMQIMDEYDKVVIGEMSEM

SEQ ID NO: 78967 - protein, 26 aa, Artificial Sequence
  Cyclic GFR-binding peptide
LSNITIQIMVGRKPKVIGEMSMIVRS

SEQ ID NO: 78968 - protein, 32 aa, Artificial Sequence
  Cyclic GFR-binding peptide
  MOD_RES (29), (31): Xaa is C or S
QLSNITVQIMDDSSNVIIGEMSNMVVRAXGXH

SEQ ID NO: 78969 - protein, 33 aa, Artificial Sequence; identical to SEQ ID NO: 29022
  Cyclic GFR-binding peptide
  MOD_RES (1), (2): Xaa is C or S

SEQ ID NO: 78970 - protein, 33 aa, Artificial Sequence; identical to SEQ ID NO: 29024
  Cyclic GFR-binding peptide
  MOD_RES (31), (33): Xaa is C or S

SEQ ID NO: 78971 - protein, 40 aa, Artificial Sequence; identical to SEQ ID NO: 29026
  Cyclic GFR-binding peptide
  MOD_RES (6), (7), (38), (40): Xaa is C or S

SEQ ID NO: 78972 - protein, 26 aa, Artificial Sequence
  Cyclic GFR-binding peptide
PTKLSNITVQIMDDSSNVIIGEMSNM

SEQ ID NO: 78973 - protein, 41 aa, Artificial Sequence; identical to SEQ ID NO: 29027
  Cyclic GFR-binding peptide
  MOD_RES (5), (6), (38), (40): Xaa is C or S

SEQ ID NO: 78974 - protein, 39 aa, Artificial Sequence; identical to SEQ ID NO: 29028
  Cyclic GFR-binding peptide
  MOD_RES (37), (39): Xaa is C or S

SEQ ID NO: 78975 - protein, 35 aa, Artificial Sequence; identical to SEQ ID NO: 29033
  Cyclic GFR-binding peptide
  MOD_RES (1), (1): Xaa is C or S

SEQ ID NO: 78976 - protein, 38 aa, Artificial Sequence; identical to SEQ ID NO: 29034
  Cyclic GFR-binding peptide
  MOD_RES (2), (3), (35), (37): Xaa is C or S

SEQ ID NO: 78977 - protein, 28 aa, Artificial Sequence
  Cyclic GFR-binding peptide
  MOD_RES (26), (28): Xaa is C or S
RPVQIRKIVGRKPKVKKATVMIVRSXKX

SEQ ID NO: 78978 - protein, 30 aa, Artificial Sequence
  Cyclic GFR-binding peptide
VQLEPLPVVYYEIVRKKPIFEQLSNTLEDH

SEQ ID NO: 78979 - protein, 22 aa, Artificial Sequence
  Cyclic GFR-binding peptide
LRSVKMAKVDEYDKVVKEVQVE

SEQ ID NO: 78980 - protein, 30 aa, Artificial Sequence
  Cyclic GFR-binding peptide
  MOD_RES (4), (5): Xaa is C or S
ASPXXVPQDLRPVQIRKIVGRTPKVKKATV

SEQ ID NO: 78981 - protein, 30 aa, Artificial Sequence
  Cyclic GFR-binding peptide
  MOD_RES (28), (30): Xaa is C or S
LRSVKVAKVDDSSNVIKEVQVNMVVRAXGX

SEQ ID NO: 78982 - protein, 23 aa, Artificial Sequence
  Cyclic GFR-binding peptide
RPVQIRKIIGKTPKIKKATVMIV

SEQ ID NO: 78983 - protein, 24 aa, Artificial Sequence
  Cyclic GFR-binding peptide
TELRSVKMAKVDENEKVVKEVQVD

SEQ ID NO: 78984 - protein, 27 aa, Artificial Sequence
  Cyclic GFR-binding peptide
PTKLSNITVQIMDDSSNVIIGEMSNMV

SEQ ID NO: 78985 - protein, 22 aa, Artificial Sequence
  Cyclic GFR-binding peptide
RSVKMAKVDEYDKVVKEVQVEM

SEQ ID NO: 78986 - protein, 38 aa, Artificial Sequence; identical to SEQ ID NO: 29051
  Cyclic GFR-binding peptide
  MOD_RES (5), (6), (37): Xaa is C or S

SEQ ID NO: 78987 - protein, 22 aa, Artificial Sequence
  Cyclic GFR-binding peptide
LRSVKMAKVDENEKVVKEVQVD

SEQ ID NO: 78988 - protein, 31 aa, Artificial Sequence; identical to SEQ ID NO: 29052
  Cyclic GFR-binding peptide
  MOD_RES (1), (1): Xaa is C or S

SEQ ID NO: 78989 - protein, 42 aa, Artificial Sequence; identical to SEQ ID NO: 29058
  Cyclic GFR-binding peptide
  MOD_RES (7), (41): Xaa is C or S

SEQ ID NO: 78990 - protein, 29 aa, Artificial Sequence
  Cyclic GFR-binding peptide
  MOD_RES (1), (2): Xaa is C or S
XXAPTKLSNITVQIMDDSSNVIIGEMSNM

SEQ ID NO: 78991 - protein, 29 aa, Artificial Sequence
  Cyclic GFR-binding peptide
  MOD_RES (27), (29): Xaa is C or S
SNITMQIMDEYDKVVIGEMSEMVVEGXGX

SEQ ID NO: 78992 - protein, 30 aa, Artificial Sequence
  Cyclic GFR-binding peptide
  MOD_RES (27), (29): Xaa is C or S
SNITVQIMDDSSNVIIGEMSNMVVRSXGXH

SEQ ID NO: 78993 - protein, 41 aa, Artificial Sequence; identical to SEQ ID NO: 29059
  Cyclic GFR-binding peptide
  MOD_RES (6), (7), (38), (40): Xaa is C or S

SEQ ID NO: 78994 - protein, 38 aa, Artificial Sequence; identical to SEQ ID NO: 29061
  Cyclic GFR-binding peptide
  MOD_RES (2), (3), (35), (37): Xaa is C or S

SEQ ID NO: 78995 - protein, 30 aa, Artificial Sequence
  Cyclic GFR-binding peptide
HHEPLPVVYYEYVRKKPKLEQLSNRLEEHL

SEQ ID NO: 78996 - protein, 27 aa, Artificial Sequence
  Cyclic GFR-binding peptide
QALRSVKIAKVVGRKPKVKEVQVMIVR

SEQ ID NO: 78997 - protein, 40 aa, Artificial Sequence; identical to SEQ ID NO: 29063
  Cyclic GFR-binding peptide
  MOD_RES (5), (39): Xaa is C or S

SEQ ID NO: 78998 - protein, 30 aa, Artificial Sequence
  Cyclic GFR-binding peptide
  MOD_RES (1), (1): Xaa is C or S
XAPTQLSNITVQIMDDSSNVIIGEMSNMVV

SEQ ID NO: 78999 - protein, 27 aa, Artificial Sequence
  Cyclic GFR-binding peptide
  MOD_RES (26), (26): Xaa is C or S
SNITIQIMIGKTPKIIGEMSMIVKSXK

SEQ ID NO: 79000 - protein, 32 aa, Artificial Sequence
  Cyclic GFR-binding peptide
  MOD_RES (6), (7): Xaa is C or S
TVPKPXXAPTQLRPVQVRKIDDSSNVIKKATV

SEQ ID NO: 79001 - protein, 38 aa, Artificial Sequence; identical to SEQ ID NO: 29069
  Cyclic GFR-binding peptide
  MOD_RES (6), (7): Xaa is C or S

SEQ ID NO: 79002 - protein, 34 aa, Artificial Sequence
  Cyclic GFR-binding peptide
  MOD_RES (3), (3): Xaa is C or S
VQXRPTQVQLEPLTVLYYEIVRKKPIFEQLSNTL

SEQ ID NO: 79003 - protein, 39 aa, Artificial Sequence; identical to SEQ ID NO: 29074
  Cyclic GFR-binding peptide
  MOD_RES (7), (7): Xaa is C or S

SEQ ID NO: 79004 - protein, 37 aa, Artificial Sequence; identical to SEQ ID NO: 29075
  Cyclic GFR-binding peptide
  MOD_RES (1), (35), (37): Xaa is C or S

SEQ ID NO: 79005 - protein, 31 aa, Artificial Sequence
  Cyclic GFR-binding peptide
  MOD_RES (1), (2): Xaa is C or S
XXAPTKLRPVQVRKIDDSSNVIKKATVNMVV

SEQ ID NO: 79006 - protein, 28 aa, Artificial Sequence
  Cyclic GFR-binding peptide
ELSNITMQIMDENEKVVIGEMSDMVVEG

SEQ ID NO: 79007 - protein, 33 aa, Artificial Sequence
  Cyclic GFR-binding peptide
  MOD_RES (30), (32): Xaa is C or S
TELSNITMQIMDENEKVVIGEMSDMVVEGXGXR

SEQ ID NO: 79008 - protein, 29 aa, Artificial Sequence
  Cyclic GFR-binding peptide
  MOD_RES (29), (29): Xaa is C or S
QLRSVKVAKVDDSSNVIKEVQVNMVVRAX

SEQ ID NO: 79009 - protein, 40 aa, Artificial Sequence; identical to SEQ ID NO: 29076
  Cyclic GFR-binding peptide
  MOD_RES (5), (6), (37), (39): Xaa is C or S

SEQ ID NO: 79010 - protein, 33 aa, Artificial Sequence; identical to SEQ ID NO: 29077
  Cyclic GFR-binding peptide
  MOD_RES (2), (3): Xaa is C or S

SEQ ID NO: 79011 - protein, 26 aa, Artificial Sequence
  Cyclic GFR-binding peptide
PQALSNITIQIMVGRKPKVIGEMSMI

SEQ ID NO: 79012 - protein, 28 aa, Artificial Sequence
  Cyclic GFR-binding peptide
QVQLEPLPVVYYEIVRKKPIFEQLSNTL

SEQ ID NO: 79013 - protein, 26 aa, Artificial Sequence
  Cyclic GFR-binding peptide
  MOD_RES (1), (1): Xaa is C or S
XVSQDLRPVQIRKIIGKTPKIKKATV

SEQ ID NO: 79014 - protein, 23 aa, Artificial Sequence
  Cyclic GFR-binding peptide
QLSNITVQIMDDSSNVIIGEMSN

SEQ ID NO: 79015 - protein, 43 aa, Artificial Sequence; identical to SEQ ID NO: 29083
  Cyclic GFR-binding peptide
  MOD_RES (6), (40), (42): Xaa is C or S

SEQ ID NO: 79016 - protein, 28 aa, Artificial Sequence
  Cyclic GFR-binding peptide
VPQDLRSVKIAKVVGRTPKVKEVQVMVV

SEQ ID NO: 79017 - protein, 36 aa, Artificial Sequence; identical to SEQ ID NO: 29089
  Cyclic GFR-binding peptide
  MOD_RES (2), (3), (35): Xaa is C or S

SEQ ID NO: 79018 - protein, 38 aa, Artificial Sequence; identical to SEQ ID NO: 29094
  Cyclic GFR-binding peptide
  MOD_RES (2), (3), (35), (37): Xaa is C or S

SEQ ID NO: 79019 - protein, 36 aa, Artificial Sequence; identical to SEQ ID NO: 29098
  Cyclic GFR-binding peptide
  MOD_RES (2), (3), (35): Xaa is C or S

SEQ ID NO: 79020 - protein, 33 aa, Artificial Sequence; identical to SEQ ID NO: 29099
  Cyclic GFR-binding peptide
  MOD_RES (2), (3): Xaa is C or S

SEQ ID NO: 79021 - protein, 32 aa, Artificial Sequence; identical to SEQ ID NO: 29100
  Cyclic GFR-binding peptide
  MOD_RES (1), (2): Xaa is C or S

SEQ ID NO: 79022 - protein, 25 aa, Artificial Sequence
  Cyclic GFR-binding peptide
APTKLRPVQVRKIDDSSNVIKKATV

SEQ ID NO: 79023 - protein, 39 aa, Artificial Sequence; identical to SEQ ID NO: 29102
  Cyclic GFR-binding peptide
  MOD_RES (4), (38): Xaa is C or S

SEQ ID NO: 79024 - protein, 33 aa, Artificial Sequence
  Cyclic GFR-binding peptide
  MOD_RES (33), (33): Xaa is C or S
VHHEPLPVVYYEYVRKKPKLEQLSNRLEEHLEX

SEQ ID NO: 79025 - protein, 23 aa, Artificial Sequence
  Cyclic GFR-binding peptide
SNITMQIMDEYDKVVIGEMSEMV

SEQ ID NO: 79026 - protein, 38 aa, Artificial Sequence; identical to SEQ ID NO: 29106
  Cyclic GFR-binding peptide
  MOD_RES (5), (6), (38): Xaa is C or S

SEQ ID NO: 79027 - protein, 32 aa, Artificial Sequence; identical to SEQ ID NO: 29107
  Cyclic GFR-binding peptide
  MOD_RES (32), (32): Xaa is C or S

SEQ ID NO: 79028 - protein, 31 aa, Artificial Sequence
  Cyclic GFR-binding peptide
  MOD_RES (29), (31): Xaa is C or S
ELRSVKMAKVDENEKVVKEVQVDMVVEGXGX

SEQ ID NO: 79029 - protein, 32 aa, Artificial Sequence
  Cyclic GFR-binding peptide
VQLEPLPVVYYEIVRKKPIFEQLSNTLEDHLA

SEQ ID NO: 79030 - protein, 31 aa, Artificial Sequence
  Cyclic GFR-binding peptide
  MOD_RES (4), (5): Xaa is C or S
AAPXXVPQALSNITIQIMVGRKPKVIGEMSM

SEQ ID NO: 79031 - protein, 30 aa, Artificial Sequence
  Cyclic GFR-binding peptide
  MOD_RES (1), (1): Xaa is C or S
XVPTELRPVQMRKIDENEKVVKKATVDMVV

SEQ ID NO: 79032 - protein, 30 aa, Artificial Sequence
  Cyclic GFR-binding peptide
  MOD_RES (3), (4): Xaa is C or S
APXXVPQALSNITIQIMVGRKPKVIGEMSM

SEQ ID NO: 79033 - protein, 39 aa, Artificial Sequence; identical to SEQ ID NO: 29113
  Cyclic GFR-binding peptide
  MOD_RES (6), (7), (39): Xaa is C or S

SEQ ID NO: 79034 - protein, 33 aa, Artificial Sequence
  Cyclic GFR-binding peptide
  MOD_RES (32), (32): Xaa is C or S
HHEPLTVLYYEYVRKKPKLEQLSNRLEEHLEXA

SEQ ID NO: 79035 - protein, 29 aa, Artificial Sequence
  Cyclic GFR-binding peptide
  MOD_RES (29), (29): Xaa is C or S
QALRSVKIAKVVGRKPKVKEVQVMIVRSX

SEQ ID NO: 79036 - protein, 27 aa, Artificial Sequence
  Cyclic GFR-binding peptide
LRSVKMAKVDEYDKVVKEVQVEMVVEG

SEQ ID NO: 79037 - protein, 29 aa, Artificial Sequence
  Cyclic GFR-binding peptide
RPVQMRKIDENEKVVKKATVAAAAAAAAA

SEQ ID NO: 79038 - protein, 39 aa, Artificial Sequence; identical to SEQ ID NO: 29118
  Cyclic GFR-binding peptide
  MOD_RES (5), (6), (37), (39): Xaa is C or S

SEQ ID NO: 79039 - protein, 41 aa, Artificial Sequence; identical to SEQ ID NO: 29120
  Cyclic GFR-binding peptide
  MOD_RES (6), (7), (39), (41): Xaa is C or S

SEQ ID NO: 79040 - protein, 24 aa, Artificial Sequence
  Cyclic GFR-binding peptide
LRSVKIAKVVGRKPKVKEVQVMIV

SEQ ID NO: 79041 - protein, 26 aa, Artificial Sequence
  Cyclic GFR-binding peptide
LSNITVQIMDDSSNVIIGEMSNMVVR

SEQ ID NO: 79042 - protein, 35 aa, Artificial Sequence
  Cyclic GFR-binding peptide
  MOD_RES (4), (4): Xaa is C or S
GLEXVPTEEEPLTMLYYRIKPHQGQHEQLSNFLQH

SEQ ID NO: 79043 - protein, 27 aa, Artificial Sequence
  Cyclic GFR-binding peptide
HHEPLPVVYYEYVRKKPKLEQLSNRLE

SEQ ID NO: 79044 - protein, 28 aa, Artificial Sequence
  Cyclic GFR-binding peptide
  MOD_RES (2), (3): Xaa is C or S
PXXVSQDLRSVKIAKVIGKTPKIKEVQV

SEQ ID NO: 79045 - protein, 24 aa, Artificial Sequence
  Cyclic GFR-binding peptide
LSNITIQIMVGRKPKVIGEMSMIV

SEQ ID NO: 79046 - protein, 35 aa, Artificial Sequence; identical to SEQ ID NO: 29124
  Cyclic GFR-binding peptide
  MOD_RES (1), (33), (35): Xaa is C or S

SEQ ID NO: 79047 - protein, 25 aa, Artificial Sequence
  Cyclic GFR-binding peptide
QLSNITVQIMDDSSNVIIGEMSNMV

SEQ ID NO: 79048 - protein, 29 aa, Artificial Sequence
  Cyclic GFR-binding peptide
  MOD_RES (1), (2): Xaa is C or S
XXVPQALRPVQIRKIVGRKPKVKKATVMI

SEQ ID NO: 79049 - protein, 24 aa, Artificial Sequence
  Cyclic GFR-binding peptide
PTELRPVQMRKIDEYDKVVKKATV

SEQ ID NO: 79050 - protein, 26 aa, Artificial Sequence
  Cyclic GFR-binding peptide
  MOD_RES (1), (1): Xaa is C or S
XAPTKLRSVKVAKVDDSSNVIKEVQV

SEQ ID NO: 79051 - protein, 26 aa, Artificial Sequence
  Cyclic GFR-binding peptide
VSQDLSNITIQIMIGKTPKIIGEMSM

SEQ ID NO: 79052 - protein, 26 aa, Artificial Sequence
  Cyclic GFR-binding peptide
QLRPVQVRKIDDSSNVIKKATVNMVV

SEQ ID NO: 79053 - protein, 30 aa, Artificial Sequence
  Cyclic GFR-binding peptide
VPTEEEPLTMLYYRIKPHQGQHEQLSNFLQ

SEQ ID NO: 79054 - protein, 36 aa, Artificial Sequence; identical to SEQ ID NO: 29129
  Cyclic GFR-binding peptide
  MOD_RES (1), (2), (34), (36): Xaa is C or S

SEQ ID NO: 79055 - protein, 39 aa, Artificial Sequence; identical to SEQ ID NO: 29132
  Cyclic GFR-binding peptide
  MOD_RES (2), (39): Xaa is C or S

SEQ ID NO: 79056 - protein, 44 aa, Artificial Sequence; identical to SEQ ID NO: 29135
  Cyclic GFR-binding peptide
  MOD_RES (4), (41), (43): Xaa is C or S

SEQ ID NO: 79057 - protein, 25 aa, Artificial Sequence
  Cyclic GFR-binding peptide
PTELRSVKMAKVDENEKVVKEVQVD

SEQ ID NO: 79058 - protein, 32 aa, Artificial Sequence; identical to SEQ ID NO: 29137
  Cyclic GFR-binding peptide
  MOD_RES (2), (2): Xaa is C or S

SEQ ID NO: 79059 - protein, 39 aa, Artificial Sequence; identical to SEQ ID NO: 29138
  Cyclic GFR-binding peptide
  MOD_RES (5), (6), (37), (39): Xaa is C or S

SEQ ID NO: 79060 - protein, 27 aa, Artificial Sequence
  Cyclic GFR-binding peptide
PTELRPVQMRKIDENEKVVKKATVDMV

SEQ ID NO: 79061 - protein, 31 aa, Artificial Sequence
  Cyclic GFR-binding peptide
  MOD_RES (30), (30): Xaa is C or S
PQDLRPVQIRKIVGRTPKVKKATVMVVKSXK

SEQ ID NO: 79062 - protein, 27 aa, Artificial Sequence
  Cyclic GFR-binding peptide
  MOD_RES (1), (1): Xaa is C or S
XVPQALRSVKIAKVVGRKPKVKEVQVM

SEQ ID NO: 79063 - protein, 28 aa, Artificial Sequence
  Cyclic GFR-binding peptide
  MOD_RES (1), (1): Xaa is C or S
XVPTELRSVKMAKVDENEKVVKEVQVDM

SEQ ID NO: 79064 - protein, 30 aa, Artificial Sequence
  Cyclic GFR-binding peptide
  MOD_RES (4), (5): Xaa is C or S
PKPXXAPTQLRSVKVAKVDDSSNVIKEVQV

SEQ ID NO: 79065 - protein, 37 aa, Artificial Sequence
  Cyclic GFR-binding peptide
  MOD_RES (5), (5): Xaa is C or S
SSVKXQPSRVHHEPLTVLYYEYVRKKPKLEQLSNRLE

SEQ ID NO: 79066 - protein, 33 aa, Artificial Sequence
  Cyclic GFR-binding peptide
  MOD_RES (31), (33): Xaa is C or S
PTKLRPVQVRKIDDSSNVIKKATVNMVVRSXGX

SEQ ID NO: 79067 - protein, 37 aa, Artificial Sequence; identical to SEQ ID NO: 29147
  Cyclic GFR-binding peptide
  MOD_RES (4), (5), (37): Xaa is C or S

SEQ ID NO: 79068 - protein, 35 aa, Artificial Sequence; identical to SEQ ID NO: 29148
  Cyclic GFR-binding peptide
  MOD_RES (1), (2), (34): Xaa is C or S

SEQ ID NO: 79069 - protein, 32 aa, Artificial Sequence
  Cyclic GFR-binding peptide
  MOD_RES (30), (32): Xaa is C or S
TKLRPVQVRKIDDSSNVIKKATVNMVVRSXGX

SEQ ID NO: 79070 - protein, 36 aa, Artificial Sequence; identical to SEQ ID NO: 29153
  Cyclic GFR-binding peptide
  MOD_RES (4), (5): Xaa is C or S

SEQ ID NO: 79071 - protein, 38 aa, Artificial Sequence; identical to SEQ ID NO: 29154
  Cyclic GFR-binding peptide
  MOD_RES (36), (38): Xaa is C or S

SEQ ID NO: 79072 - protein, 24 aa, Artificial Sequence
  Cyclic GFR-binding peptide
PQALSNITIQIMVGRKPKVIGEMS

SEQ ID NO: 79073 - protein, 30 aa, Artificial Sequence
  Cyclic GFR-binding peptide
  MOD_RES (4), (5): Xaa is C or S
ASPXXVSQDLRSVKIAKVIGKTPKIKEVQV

SEQ ID NO: 79074 - protein, 30 aa, Artificial Sequence
  Cyclic GFR-binding peptide
  MOD_RES (1), (1): Xaa is C or S
XVPQDLRSVKIAKVVGRTPKVKEVQVMVVK

SEQ ID NO: 79075 - protein, 30 aa, Artificial Sequence
  Cyclic GFR-binding peptide
  MOD_RES (27), (29): Xaa is C or S
RPVQVRKIDDSSNVIKKATVNMVVRAXGXH

SEQ ID NO: 79076 - protein, 36 aa, Artificial Sequence
  Cyclic GFR-binding peptide
  MOD_RES (6), (7): Xaa is C or S
ASASPXXVSQDLRPVQIRKIIGKTPKIKKATVMIVK

SEQ ID NO: 79077 - protein, 36 aa, Artificial Sequence; identical to SEQ ID NO: 29158
  Cyclic GFR-binding peptide
  MOD_RES (3), (4), (36): Xaa is C or S

SEQ ID NO: 79078 - protein, 34 aa, Artificial Sequence; identical to SEQ ID NO: 29164
  Cyclic GFR-binding peptide
  MOD_RES (1), (1): Xaa is C or S

SEQ ID NO: 79079 - protein, 32 aa, Artificial Sequence; identical to SEQ ID NO: 29165
  Cyclic GFR-binding peptide

SEQ ID NO: 79080 - protein, 30 aa, Artificial Sequence; identical to SEQ ID NO: 29167
  Cyclic GFR-binding peptide

SEQ ID NO: 79081 - protein, 28 aa, Artificial Sequence
  Cyclic GFR-binding peptide
VPQDLSNITIQIMVGRTPKVIGEMSMVV

SEQ ID NO: 79082 - protein, 33 aa, Artificial Sequence
  Cyclic GFR-binding peptide
  MOD_RES (3), (3): Xaa is C or S
VQXRPTQVQLEPLTVLYYEIVRKKPIFEQLSNT

SEQ ID NO: 79083 - protein, 38 aa, Artificial Sequence; identical to SEQ ID NO: 29172
  Cyclic GFR-binding peptide
  MOD_RES (4), (5), (36), (38): Xaa is C or S

SEQ ID NO: 79084 - protein, 29 aa, Artificial Sequence
  Cyclic GFR-binding peptide
  MOD_RES (28), (28): Xaa is C or S
LRSVKVAKVDDSSNVIKEVQVNMVVRSXG

SEQ ID NO: 79085 - protein, 26 aa, Artificial Sequence
  Cyclic GFR-binding peptide
LRSVKMAKVDEYDKVVKEVQVEMVVE

SEQ ID NO: 79086 - protein, 27 aa, Artificial Sequence
  Cyclic GFR-binding peptide
LEPLTVLYYEIVRKKPIFEQLSNTLED

SEQ ID NO: 79087 - protein, 31 aa, Artificial Sequence
  Cyclic GFR-binding peptide
  MOD_RES (1), (2): Xaa is C or S
XXAPTQLSNITVQIMDDSSNVIIGEMSNMVV

SEQ ID NO: 79088 - protein, 32 aa, Artificial Sequence
  Cyclic GFR-binding peptide
  MOD_RES (5), (6): Xaa is C or S
SAAPXXVPQALSNITIQIMVGRKPKVIGEMSM

SEQ ID NO: 79089 - protein, 31 aa, Artificial Sequence
  Cyclic GFR-binding peptide
  MOD_RES (29), (31): Xaa is C or S
ELRSVKMAKVDEYDKVVKEVQVEMVVEGXGX

SEQ ID NO: 79090 - protein, 24 aa, Artificial Sequence
  Cyclic GFR-binding peptide
KLSNITVQIMDDSSNVIIGEMSNM

SEQ ID NO: 79091 - protein, 24 aa, Artificial Sequence
  Cyclic GFR-binding peptide
RPVQIRKIIGKTPKIKKATVMIVK

SEQ ID NO: 79092 - protein, 30 aa, Artificial Sequence
  Cyclic GFR-binding peptide
  MOD_RES (1), (1): Xaa is C or S
XVPTEEEPLPMVYYRIKPHQGQHEQLSNFL

SEQ ID NO: 79093 - protein, 37 aa, Artificial Sequence; identical to SEQ ID NO: 29175
  Cyclic GFR-binding peptide
  MOD_RES (36), (36): Xaa is C or S

SEQ ID NO: 79094 - protein, 34 aa, Artificial Sequence; identical to SEQ ID NO: 29177
  Cyclic GFR-binding peptide
  MOD_RES (1), (2), (34): Xaa is C or S

SEQ ID NO: 79095 - protein, 31 aa, Artificial Sequence
  Cyclic GFR-binding peptide
  MOD_RES (2), (2): Xaa is C or S
TXAPTKLRSVKVAKVDDSSNVIKEVQVNMVV

SEQ ID NO: 79096 - protein, 31 aa, Artificial Sequence
  Cyclic GFR-binding peptide
VQLEPLPVVYYEIVRKKPIFEQLSNTLEDHL

SEQ ID NO: 79097 - protein, 36 aa, Artificial Sequence
  Cyclic GFR-binding peptide
  MOD_RES (6), (7): Xaa is C or S
SIPKAXXVPTELSNITMQIMDEYDKVVIGEMSEMVV

SEQ ID NO: 79098 - protein, 30 aa, Artificial Sequence
  Cyclic GFR-binding peptide
PTKLRPVQVRKIDDSSNVIKKATVNMVVRS

SEQ ID NO: 79099 - protein, 38 aa, Artificial Sequence; identical to SEQ ID NO: 29187
  Cyclic GFR-binding peptide
  MOD_RES (37), (37): Xaa is C or S

SEQ ID NO: 79100 - protein, 27 aa, Artificial Sequence
  Cyclic GFR-binding peptide
QVQLEPLPVVYYEIVRKKPIFEQLSNT

SEQ ID NO: 79101 - protein, 35 aa, Artificial Sequence
  Cyclic GFR-binding peptide
  MOD_RES (5), (6): Xaa is C or S
SAAPXXVPQALSNITIQIMVGRKPKVIGEMSMIVR

SEQ ID NO: 79102 - protein, 40 aa, Artificial Sequence; identical to SEQ ID NO: 29195
  Cyclic GFR-binding peptide
  MOD_RES (7), (39): Xaa is C or S

SEQ ID NO: 79103 - protein, 32 aa, Artificial Sequence; identical to SEQ ID NO: 29196
  Cyclic GFR-binding peptide
  MOD_RES (1), (2): Xaa is C or S

SEQ ID NO: 79104 - protein, 39 aa, Artificial Sequence; identical to SEQ ID NO: 29197
  Cyclic GFR-binding peptide
  MOD_RES (1), (38): Xaa is C or S

SEQ ID NO: 79105 - protein, 31 aa, Artificial Sequence
  Cyclic GFR-binding peptide
  MOD_RES (3), (3): Xaa is C or S
PTXAPTKLRPVQVRKIDDSSNVIKKATVNMV

SEQ ID NO: 79106 - protein, 38 aa, Artificial Sequence; identical to SEQ ID NO: 29203
  Cyclic GFR-binding peptide
  MOD_RES (3), (4), (35), (37): Xaa is C or S

SEQ ID NO: 79107 - protein, 33 aa, Artificial Sequence
  Cyclic GFR-binding peptide
  MOD_RES (5), (6): Xaa is C or S
SAAPXXVPQALSNITIQIMVGRKPKVIGEMSMI

SEQ ID NO: 79108 - protein, 28 aa, Artificial Sequence
  Cyclic GFR-binding peptide
TELRSVKMAKVDEYDKVVKEVQVEMVVE

SEQ ID NO: 79109 - protein, 30 aa, Artificial Sequence
  Cyclic GFR-binding peptide
  MOD_RES (1), (1): Xaa is C or S
XVPQALRSVKIAKVVGRKPKVKEVQVMIVR

SEQ ID NO: 79110 - protein, 28 aa, Artificial Sequence
  Cyclic GFR-binding peptide
  MOD_RES (1), (2): Xaa is C or S
XXAPTKLSNITVQIMDDSSNVIIGEMSN

SEQ ID NO: 79111 - protein, 30 aa, Artificial Sequence
  Cyclic GFR-binding peptide
QVQLEPLPVVYYEIVRKKPIFEQLSNTLED

SEQ ID NO: 79112 - protein, 33 aa, Artificial Sequence
  Cyclic GFR-binding peptide
  MOD_RES (30), (32): Xaa is C or S
TELSNITMQIMDEYDKVVIGEMSEMVVEGXGXR

SEQ ID NO: 79113 - protein, 38 aa, Artificial Sequence; identical to SEQ ID NO: 29206
  Cyclic GFR-binding peptide
  MOD_RES (4), (5), (37): Xaa is C or S

SEQ ID NO: 79114 - protein, 28 aa, Artificial Sequence
  Cyclic GFR-binding peptide
EPLTMLYYRIKPHQGQHEQLSNFLQHNK

SEQ ID NO: 79115 - protein, 29 aa, Artificial Sequence
  Cyclic GFR-binding peptide
  MOD_RES (3), (3): Xaa is C or S
PTXAPTKLSNITVQIMDDSSNVIIGEMSN

SEQ ID NO: 79116 - protein, 29 aa, Artificial Sequence
  Cyclic GFR-binding peptide
  MOD_RES (27), (29): Xaa is C or S
SNITMQIMDENEKVVIGEMSDMVVEGXGX

SEQ ID NO: 79117 - protein, 26 aa, Artificial Sequence
  Cyclic GFR-binding peptide
QDLRPVQIRKIVGRTPKVKKATVMVV

SEQ ID NO: 79118 - protein, 35 aa, Artificial Sequence
  Cyclic GFR-binding peptide
  MOD_RES (5), (5): Xaa is C or S
SSVKXQPSRVHHEPLPVVYYEYVRKKPKLEQLSNR

SEQ ID NO: 79119 - protein, 29 aa, Artificial Sequence
  Cyclic GFR-binding peptide
  MOD_RES (2), (3): Xaa is C or S
PXXAPTKLRPVQVRKIDDSSNVIKKATVN

SEQ ID NO: 79120 - protein, 42 aa, Artificial Sequence; identical to SEQ ID NO: 29209
  Cyclic GFR-binding peptide
  MOD_RES (6), (7), (39), (41): Xaa is C or S

SEQ ID NO: 79121 - protein, 43 aa, Artificial Sequence; identical to SEQ ID NO: 29211
  Cyclic GFR-binding peptide
  MOD_RES (3), (40), (42): Xaa is C or S

SEQ ID NO: 79122 - protein, 34 aa, Artificial Sequence; identical to SEQ ID NO: 29212
  Cyclic GFR-binding peptide
  MOD_RES (3), (4): Xaa is C or S

SEQ ID NO: 79123 - protein, 33 aa, Artificial Sequence
  Cyclic GFR-binding peptide
  MOD_RES (6), (7): Xaa is C or S
TVPKPXXAPTQLRSVKVAKVDDSSNVIKEVQVN

SEQ ID NO: 79124 - protein, 33 aa, Artificial Sequence
  Cyclic GFR-binding peptide
  MOD_RES (7), (7): Xaa is C or S
HVTKPTXAPTKLRSVKVAKVDDSSNVIKEVQVN

SEQ ID NO: 79125 - protein, 32 aa, Artificial Sequence
  Cyclic GFR-binding peptide
  MOD_RES (29), (31): Xaa is C or S
QLRSVKVAKVDDSSNVIKEVQVNMVVRAXGXH

SEQ ID NO: 79126 - protein, 28 aa, Artificial Sequence
  Cyclic GFR-binding peptide
  MOD_RES (28), (28): Xaa is C or S
LRPVQVRKIDDSSNVIKKATVNMVVRSX

SEQ ID NO: 79127 - protein, 33 aa, Artificial Sequence
  Cyclic GFR-binding peptide
  MOD_RES (5), (6): Xaa is C or S
IPKAXXVPTELRPVQMRKIDENEKVVKKATVDM

SEQ ID NO: 79128 - protein, 37 aa, Artificial Sequence; identical to SEQ ID NO: 29216
  Cyclic GFR-binding peptide
  MOD_RES (4), (5), (37): Xaa is C or S

SEQ ID NO: 79129 - protein, 34 aa, Artificial Sequence; identical to SEQ ID NO: 29217
  Cyclic GFR-binding peptide
  MOD_RES (2), (3): Xaa is C or S

SEQ ID NO: 79130 - protein, 31 aa, Artificial Sequence
  Cyclic GFR-binding peptide
  MOD_RES (29), (31): Xaa is C or S
QLSNITVQIMDDSSNVIIGEMSNMVVRAXGX

SEQ ID NO: 79131 - protein, 32 aa, Artificial Sequence
  Cyclic GFR-binding peptide
VHHEPLTVLYYEYVRKKPKLEQLSNRLEEHLE

SEQ ID NO: 79132 - protein, 29 aa, Artificial Sequence
  Cyclic GFR-binding peptide
  MOD_RES (29), (29): Xaa is C or S
EPLPMVYYRIKPHQGQHEQLSNFLQHNKX

SEQ ID NO: 79133 - protein, 33 aa, Artificial Sequence; identical to SEQ ID NO: 29222
  Cyclic GFR-binding peptide
  MOD_RES (1), (1): Xaa is C or S

SEQ ID NO: 79134 - protein, 32 aa, Artificial Sequence
  Cyclic GFR-binding peptide
  MOD_RES (2), (2): Xaa is C or S
EXVPTEEEPLPMVYYRIKPHQGQHEQLSNFLQ

SEQ ID NO: 79135 - protein, 26 aa, Artificial Sequence
  Cyclic GFR-binding peptide
VPQDLSNITIQIMVGRTPKVIGEMSM

SEQ ID NO: 79136 - protein, 33 aa, Artificial Sequence; identical to SEQ ID NO: 29224
  Cyclic GFR-binding peptide

SEQ ID NO: 79137 - protein, 26 aa, Artificial Sequence
  Cyclic GFR-binding peptide
  MOD_RES (1), (1): Xaa is C or S
XVPQALRSVKIAKVVGRKPKVKEVQV

SEQ ID NO: 79138 - protein, 29 aa, Artificial Sequence
  Cyclic GFR-binding peptide
  MOD_RES (29), (29): Xaa is C or S
QDLRSVKIAKVIGKTPKIKEVQVMIVKSX

SEQ ID NO: 79139 - protein, 27 aa, Artificial Sequence
  Cyclic GFR-binding peptide
  MOD_RES (26), (26): Xaa is C or S
SNITIQIMVGRTPKVIGEMSMVVKSXK

SEQ ID NO: 79140 - protein, 39 aa, Artificial Sequence; identical to SEQ ID NO: 29228
  Cyclic GFR-binding peptide
  MOD_RES (4), (5), (37), (39): Xaa is C or S

SEQ ID NO: 79141 - protein, 34 aa, Artificial Sequence; identical to SEQ ID NO: 29230
  Cyclic GFR-binding peptide
  MOD_RES (1), (2), (33): Xaa is C or S

SEQ ID NO: 79142 - protein, 30 aa, Artificial Sequence
  Cyclic GFR-binding peptide
  MOD_RES (30), (30): Xaa is C or S
SQDLRPVQIRKIIGKTPKIKKATVMIVKSX

SEQ ID NO: 79143 - protein, 31 aa, Artificial Sequence
  Cyclic GFR-binding peptide
  MOD_RES (1), (2): Xaa is C or S
XXVSQDLSNITIQIMIGKTPKIIGEMSMIVK

SEQ ID NO: 79144 - protein, 35 aa, Artificial Sequence; identical to SEQ ID NO: 29231
  Cyclic GFR-binding peptide
  MOD_RES (3), (4), (35): Xaa is C or S

SEQ ID NO: 79145 - protein, 37 aa, Artificial Sequence; identical to SEQ ID NO: 29234
  Cyclic GFR-binding peptide
  MOD_RES (4), (5), (37): Xaa is C or S

SEQ ID NO: 79146 - protein, 21 aa, Artificial Sequence
  Cyclic GFR-binding peptide
SNITMQIMDEYDKVVIGEMSE

SEQ ID NO: 79147 - protein, 36 aa, Artificial Sequence; identical to SEQ ID NO: 29238
  Cyclic GFR-binding peptide
  MOD_RES (4), (5): Xaa is C or S

SEQ ID NO: 79148 - protein, 32 aa, Artificial Sequence
  Cyclic GFR-binding peptide
  MOD_RES (2), (3): Xaa is C or S
PXXVPQDLRPVQIRKIVGRTPKVKKATVMVVK

SEQ ID NO: 79149 - protein, 44 aa, Artificial Sequence; identical to SEQ ID NO: 29240
  Cyclic GFR-binding peptide
  MOD_RES (4), (41), (43): Xaa is C or S

SEQ ID NO: 79150 - protein, 26 aa, Artificial Sequence
  Cyclic GFR-binding peptide
  MOD_RES (1), (1): Xaa is C or S
XVPTELSNITMQIMDENEKVVIGEMS

SEQ ID NO: 79151 - protein, 30 aa, Artificial Sequence
  Cyclic GFR-binding peptide
  MOD_RES (1), (2): Xaa is C or S
XXAPTQLRSVKVAKVDDSSNVIKEVQVNMV

SEQ ID NO: 79152 - protein, 27 aa, Artificial Sequence
  Cyclic GFR-binding peptide
  MOD_RES (1), (1): Xaa is C or S
XVPQDLRPVQIRKIVGRTPKVKKATVM

SEQ ID NO: 79153 - protein, 32 aa, Artificial Sequence
  Cyclic GFR-binding peptide
RPTQVQLEPLPVVYYEIVRKKPIFEQLSNTLE

SEQ ID NO: 79154 - protein, 33 aa, Artificial Sequence
  Cyclic GFR-binding peptide
  MOD_RES (3), (4): Xaa is C or S
APXXVPQALSNITIQIMVGRKPKVIGEMSMIVR

SEQ ID NO: 79155 - protein, 39 aa, Artificial Sequence; identical to SEQ ID NO: 29249
  Cyclic GFR-binding peptide
  MOD_RES (4), (4): Xaa is C or S

SEQ ID NO: 79156 - protein, 36 aa, Artificial Sequence; identical to SEQ ID NO: 29250
  Cyclic GFR-binding peptide
  MOD_RES (2), (3), (35): Xaa is C or S

SEQ ID NO: 79157 - protein, 34 aa, Artificial Sequence; identical to SEQ ID NO: 29254
  Cyclic GFR-binding peptide
  MOD_RES (3), (4): Xaa is C or S

SEQ ID NO: 79158 - protein, 27 aa, Artificial Sequence
  Cyclic GFR-binding peptide
  MOD_RES (27), (27): Xaa is C or S
LSNITIQIMIGKTPKIIGEMSMIVKSX

SEQ ID NO: 79159 - protein, 27 aa, Artificial Sequence
  Cyclic GFR-binding peptide
PTELSNITMQIMDENEKVVIGEMSDMV

SEQ ID NO: 79160 - protein, 32 aa, Artificial Sequence
  Cyclic GFR-binding peptide
  MOD_RES (2), (3): Xaa is C or S
PXXVSQDLSNITIQIMIGKTPKIIGEMSMIVK

SEQ ID NO: 79161 - protein, 28 aa, Artificial Sequence
  Cyclic GFR-binding peptide
  MOD_RES (2), (3): Xaa is C or S
PXXVPQDLRPVQIRKIVGRTPKVKKATV

SEQ ID NO: 79162 - protein, 42 aa, Artificial Sequence; identical to SEQ ID NO: 29259
  Cyclic GFR-binding peptide
  MOD_RES (4), (41): Xaa is C or S

SEQ ID NO: 79163 - protein, 28 aa, Artificial Sequence
  Cyclic GFR-binding peptide
TELRPVQMRKIDENEKVVKKATVDMVVE

SEQ ID NO: 79164 - protein, 34 aa, Artificial Sequence; identical to SEQ ID NO: 29263
  Cyclic GFR-binding peptide
  MOD_RES (1), (33): Xaa is C or S

SEQ ID NO: 79165 - protein, 26 aa, Artificial Sequence
  Cyclic GFR-binding peptide
ALSNITIQIMVGRKPKVIGEMSMIVR

SEQ ID NO: 79166 - protein, 36 aa, Artificial Sequence
  Cyclic GFR-binding peptide
  MOD_RES (6), (6): Xaa is C or S
DEGLEXVPTEEEPLPMVYYRIKPHQGQHEQLSNFLQ

SEQ ID NO: 79167 - protein, 34 aa, Artificial Sequence; identical to SEQ ID NO: 29271
  Cyclic GFR-binding peptide
  MOD_RES (1), (32), (34): Xaa is C or S

SEQ ID NO: 79168 - protein, 29 aa, Artificial Sequence
  Cyclic GFR-binding peptide
SQDLRPVQIRKIIGKTPKIKKATVMIVKS

SEQ ID NO: 79169 - protein, 30 aa, Artificial Sequence
  Cyclic GFR-binding peptide
  MOD_RES (3), (3): Xaa is C or S
PTXAPTKLRSVKVAKVDDSSNVIKEVQVNM

SEQ ID NO: 79170 - protein, 40 aa, Artificial Sequence; identical to SEQ ID NO: 29278
  Cyclic GFR-binding peptide
  MOD_RES (5), (6), (38), (40): Xaa is C or S

SEQ ID NO: 79171 - protein, 30 aa, Artificial Sequence
  Cyclic GFR-binding peptide
  MOD_RES (2), (3): Xaa is C or S
PXXVSQDLSNITIQIMIGKTPKIIGEMSMI

SEQ ID NO: 79172 - protein, 22 aa, Artificial Sequence
  Cyclic GFR-binding peptide
ELRSVKMAKVDEYDKVVKEVQV

SEQ ID NO: 79173 - protein, 26 aa, Artificial Sequence
  Cyclic GFR-binding peptide
VPQALSNITIQIMVGRKPKVIGEMSM

SEQ ID NO: 79174 - protein, 34 aa, Artificial Sequence
  Cyclic GFR-binding peptide
  MOD_RES (1), (1): Xaa is C or S
XRPTQVQLEPLPVVYYEIVRKKPIFEQLSNTLED

SEQ ID NO: 79175 - protein, 24 aa, Artificial Sequence
  Cyclic GFR-binding peptide
QLEPLTVLYYEIVRKKPIFEQLSN

SEQ ID NO: 79176 - protein, 35 aa, Artificial Sequence; identical to SEQ ID NO: 29289
  Cyclic GFR-binding peptide
  MOD_RES (1), (33), (35): Xaa is C or S

SEQ ID NO: 79177 - protein, 26 aa, Artificial Sequence
  Cyclic GFR-binding peptide
TELRSVKMAKVDENEKVVKEVQVDMV

SEQ ID NO: 79178 - protein, 24 aa, Artificial Sequence
  Cyclic GFR-binding peptide
EEPLPMVYYRIKPHQGQHEQLSNF

SEQ ID NO: 79179 - protein, 35 aa, Artificial Sequence; identical to SEQ ID NO: 29296
  Cyclic GFR-binding peptide
  MOD_RES (1), (2), (34): Xaa is C or S

SEQ ID NO: 79180 - protein, 31 aa, Artificial Sequence
  Cyclic GFR-binding peptide
  MOD_RES (28), (30): Xaa is C or S
LSNITMQIMDENEKVVIGEMSDMVVEGXGXR

SEQ ID NO: 79181 - protein, 32 aa, Artificial Sequence
  Cyclic GFR-binding peptide
  MOD_RES (6), (7): Xaa is C or S
KIPKAXXVPTELRSVKMAKVDENEKVVKEVQV

SEQ ID NO: 79182 - protein, 35 aa, Artificial Sequence; identical to SEQ ID NO: 29300
  Cyclic GFR-binding peptide
  MOD_RES (3), (35): Xaa is C or S

SEQ ID NO: 79183 - protein, 25 aa, Artificial Sequence
  Cyclic GFR-binding peptide
KLRPVQVRKIDDSSNVIKKATVNMV

SEQ ID NO: 79184 - protein, 24 aa, Artificial Sequence
  Cyclic GFR-binding peptide
LSNITIQIMVGRTPKVIGEMSMVV

SEQ ID NO: 79185 - protein, 25 aa, Artificial Sequence
  Cyclic GFR-binding peptide
RPVQIRKIIGKTPKIKKATVMIVKS

SEQ ID NO: 79186 - protein, 30 aa, Artificial Sequence
  Cyclic GFR-binding peptide
  MOD_RES (29), (29): Xaa is C or S
QLRPVQVRKIDDSSNVIKKATVNMVVRAXG

SEQ ID NO: 79187 - protein, 22 aa, Artificial Sequence
  Cyclic GFR-binding peptide
LRSVKIAKVVGRTPKVKEVQVM

SEQ ID NO: 79188 - protein, 36 aa, Artificial Sequence
  Cyclic GFR-binding peptide
  MOD_RES (6), (7): Xaa is C or S
ASAAPXXVPQALSNITIQIMVGRKPKVIGEMSMIVR

SEQ ID NO: 79189 - protein, 33 aa, Artificial Sequence
  Cyclic GFR-binding peptide
  MOD_RES (4), (5): Xaa is C or S
PKPXXAPTQLRPVQVRKIDDSSNVIKKATVNMV

SEQ ID NO: 79190 - protein, 33 aa, Artificial Sequence; identical to SEQ ID NO: 29308
  Cyclic GFR-binding peptide
  MOD_RES (1), (33): Xaa is C or S

SEQ ID NO: 79191 - protein, 36 aa, Artificial Sequence; identical to SEQ ID NO: 29313
  Cyclic GFR-binding peptide
  MOD_RES (2), (3), (35): Xaa is C or S

SEQ ID NO: 79192 - protein, 22 aa, Artificial Sequence
  Cyclic GFR-binding peptide
DLRSVKIAKVVGRTPKVKEVQV

SEQ ID NO: 79193 - protein, 33 aa, Artificial Sequence
  Cyclic GFR-binding peptide
  MOD_RES (4), (5): Xaa is C or S
PKPXXAPTQLRSVKVAKVDDSSNVIKEVQVNMV

SEQ ID NO: 79194 - protein, 29 aa, Artificial Sequence
  Cyclic GFR-binding peptide
  MOD_RES (3), (4): Xaa is C or S
KPXXAPTKLRPVQVRKIDDSSNVIKKATV

SEQ ID NO: 79195 - protein, 33 aa, Artificial Sequence
  Cyclic GFR-binding peptide
  MOD_RES (2), (2): Xaa is C or S
KXQPSRVHHEPLTVLYYEYVRKKPKLEQLSNRL

SEQ ID NO: 79196 - protein, 34 aa, Artificial Sequence
  Cyclic GFR-binding peptide
  MOD_RES (6), (7): Xaa is C or S
SIPKAXXVPTELRPVQMRKIDEYDKVVKKATVEM

SEQ ID NO: 79197 - protein, 37 aa, Artificial Sequence; identical to SEQ ID NO: 29319
  Cyclic GFR-binding peptide
  MOD_RES (3), (4), (36): Xaa is C or S

SEQ ID NO: 79198 - protein, 31 aa, Artificial Sequence
  Cyclic GFR-binding peptide
  MOD_RES (29), (31): Xaa is C or S
QDLSNITIQIMVGRTPKVIGEMSMVVKSXKX

SEQ ID NO: 79199 - protein, 27 aa, Artificial Sequence
  Cyclic GFR-binding peptide
  MOD_RES (1), (2): Xaa is C or S
XXVPTELRPVQMRKIDEYDKVVKKATV

SEQ ID NO: 79200 - protein, 31 aa, Artificial Sequence
  Cyclic GFR-binding peptide
  MOD_RES (5), (6): Xaa is C or S
IPKAXXVPTELSNITMQIMDEYDKVVIGEMS

SEQ ID NO: 79201 - protein, 41 aa, Artificial Sequence; identical to SEQ ID NO: 29323
  Cyclic GFR-binding peptide
  MOD_RES (5), (6), (38), (40): Xaa is C or S

SEQ ID NO: 79202 - protein, 29 aa, Artificial Sequence
  Cyclic GFR-binding peptide
  MOD_RES (28), (28): Xaa is C or S
DLRSVKIAKVIGKTPKIKEVQVMIVKSXK

SEQ ID NO: 79203 - protein, 27 aa, Artificial Sequence
  Cyclic GFR-binding peptide
  MOD_RES (1), (1): Xaa is C or S
XVSQDLRPVQIRKIIGKTPKIKKATVM

SEQ ID NO: 79204 - protein, 34 aa, Artificial Sequence
  Cyclic GFR-binding peptide
  MOD_RES (4), (5): Xaa is C or S
PKAXXVPTELSNITMQIMDEYDKVVIGEMSEMVV

SEQ ID NO: 79205 - protein, 34 aa, Artificial Sequence
  Cyclic GFR-binding peptide
  MOD_RES (2), (2): Xaa is C or S
QXRPTQVQLEPLPVVYYEIVRKKPIFEQLSNTLE

SEQ ID NO: 79206 - protein, 25 aa, Artificial Sequence
  Cyclic GFR-binding peptide
EPLTVLYYEYVRKKPKLEQLSNRLE

SEQ ID NO: 79207 - protein, 32 aa, Artificial Sequence
  Cyclic GFR-binding peptide
  MOD_RES (2), (3): Xaa is C or S
AXXVPTELRPVQMRKIDENEKVVKKATVDMVV

SEQ ID NO: 79208 - protein, 31 aa, Artificial Sequence
  Cyclic GFR-binding peptide
  MOD_RES (5), (6): Xaa is C or S
SASPXXVSQDLSNITIQIMIGKTPKIIGEMS

SEQ ID NO: 79209 - protein, 32 aa, Artificial Sequence; identical to SEQ ID NO: 29334
  Cyclic GFR-binding peptide
  MOD_RES (32), (32): Xaa is C or S

SEQ ID NO: 79210 - protein, 27 aa, Artificial Sequence
  Cyclic GFR-binding peptide
PTELRSVKMAKVDEYDKVVKEVQVEMV

SEQ ID NO: 79211 - protein, 31 aa, Artificial Sequence
  Cyclic GFR-binding peptide
  MOD_RES (30), (30): Xaa is C or S
TKLSNITVQIMDDSSNVIIGEMSNMVVRSXG

SEQ ID NO: 79212 - protein, 31 aa, Artificial Sequence
  Cyclic GFR-binding peptide
  MOD_RES (30), (30): Xaa is C or S
SQDLSNITIQIMIGKTPKIIGEMSMIVKSXK

SEQ ID NO: 79213 - protein, 34 aa, Artificial Sequence; identical to SEQ ID NO: 29338
  Cyclic GFR-binding peptide

SEQ ID NO: 79214 - protein, 24 aa, Artificial Sequence
  Cyclic GFR-binding peptide
RPVQMRKIDEYDKVVKKATVEMVV

SEQ ID NO: 79215 - protein, 30 aa, Artificial Sequence
  Cyclic GFR-binding peptide
  MOD_RES (28), (30): Xaa is C or S
LRSVKMAKVDEYDKVVKEVQVEMVVEGXGX

SEQ ID NO: 79216 - protein, 32 aa, Artificial Sequence
  Cyclic GFR-binding peptide
  MOD_RES (29), (31): Xaa is C or S
ELRPVQMRKIDEYDKVVKKATVEMVVEGXGXR

SEQ ID NO: 79217 - protein, 32 aa, Artificial Sequence
  Cyclic GFR-binding peptide
  MOD_RES (3), (4): Xaa is C or S
KPXXAPTKLSNITVQIMDDSSNVIIGEMSNMV

SEQ ID NO: 79218 - protein, 29 aa, Artificial Sequence
  Cyclic GFR-binding peptide
  MOD_RES (28), (28): Xaa is C or S
LRPVQVRKIDDSSNVIKKATVNMVVRSXG

SEQ ID NO: 79219 - protein, 29 aa, Artificial Sequence
  Cyclic GFR-binding peptide
VPTELSNITMQIMDEYDKVVIGEMSEMVV

SEQ ID NO: 79220 - protein, 30 aa, Artificial Sequence
  Cyclic GFR-binding peptide
  MOD_RES (29), (29): Xaa is C or S
KLRSVKVAKVDDSSNVIKEVQVNMVVRSXG

SEQ ID NO: 79221 - protein, 32 aa, Artificial Sequence
  Cyclic GFR-binding peptide
  MOD_RES (30), (32): Xaa is C or S
SQDLRPVQIRKIIGKTPKIKKATVMIVKSXKX

SEQ ID NO: 79222 - protein, 33 aa, Artificial Sequence; identical to SEQ ID NO: 29342
  Cyclic GFR-binding peptide
  MOD_RES (1), (2): Xaa is C or S

SEQ ID NO: 79223 - protein, 33 aa, Artificial Sequence; identical to SEQ ID NO: 29346
  Cyclic GFR-binding peptide
  MOD_RES (1), (1): Xaa is C or S

SEQ ID NO: 79224 - protein, 31 aa, Artificial Sequence
  Cyclic GFR-binding peptide
  MOD_RES (2), (2): Xaa is C or S
EXVPTEEEPLPMVYYRIKPHQGQHEQLSNFL

SEQ ID NO: 79225 - protein, 21 aa, Artificial Sequence
  Cyclic GFR-binding peptide
LRSVKVAKVDDSSNVIKEVQV

SEQ ID NO: 79226 - protein, 34 aa, Artificial Sequence; identical to SEQ ID NO: 29348
  Cyclic GFR-binding peptide
  MOD_RES (3), (4): Xaa is C or S

SEQ ID NO: 79227 - protein, 36 aa, Artificial Sequence; identical to SEQ ID NO: 29347
  Cyclic GFR-binding peptide
  MOD_RES (4), (5), (36): Xaa is C or S

SEQ ID NO: 79228 - protein, 40 aa, Artificial Sequence; identical to SEQ ID NO: 29349
  Cyclic GFR-binding peptide
  MOD_RES (5), (5): Xaa is C or S

SEQ ID NO: 79229 - protein, 30 aa, Artificial Sequence
  Cyclic GFR-binding peptide
  MOD_RES (30), (30): Xaa is C or S
TKLSNITVQIMDDSSNVIIGEMSNMVVRSX

SEQ ID NO: 79230 - protein, 38 aa, Artificial Sequence; identical to SEQ ID NO: 29356
  Cyclic GFR-binding peptide
  MOD_RES (6), (7): Xaa is C or S

SEQ ID NO: 79231 - protein, 27 aa, Artificial Sequence
  Cyclic GFR-binding peptide
  MOD_RES (1), (1): Xaa is C or S
XVSQDLRSVKIAKVIGKTPKIKEVQVM

SEQ ID NO: 79232 - protein, 30 aa, Artificial Sequence
  Cyclic GFR-binding peptide
  MOD_RES (1), (2): Xaa is C or S
XXVSQDLSNITIQIMIGKTPKIIGEMSMIV

SEQ ID NO: 79233 - protein, 33 aa, Artificial Sequence
  Cyclic GFR-binding peptide
  MOD_RES (6), (7): Xaa is C or S
ASASPXXVPQDLRPVQIRKIVGRTPKVKKATVM

SEQ ID NO: 79234 - protein, 34 aa, Artificial Sequence
  Cyclic GFR-binding peptide
  MOD_RES (6), (6): Xaa is C or S
VTKPTXAPTKLRSVKVAKVDDSSNVIKEVQVNMV

SEQ ID NO: 79235 - protein, 34 aa, Artificial Sequence; identical to SEQ ID NO: 29364
  Cyclic GFR-binding peptide
  MOD_RES (1), (2), (34): Xaa is C or S

SEQ ID NO: 79236 - protein, 35 aa, Artificial Sequence
  Cyclic GFR-binding peptide
  MOD_RES (32), (34): Xaa is C or S
QLEPLTVLYYEIVRKKPIFEQLSNTLEDHLAXKXE

SEQ ID NO: 79237 - protein, 27 aa, Artificial Sequence
  Cyclic GFR-binding peptide
APTKLRSVKVAKVDDSSNVIKEVQVNM

SEQ ID NO: 79238 - protein, 36 aa, Artificial Sequence
  Cyclic GFR-binding peptide
  MOD_RES (6), (7): Xaa is C or S
TVPKPXXAPTQLSNITVQIMDDSSNVIIGEMSNMVV

SEQ ID NO: 79239 - protein, 33 aa, Artificial Sequence; identical to SEQ ID NO: 29369
  Cyclic GFR-binding peptide
  MOD_RES (31), (33): Xaa is C or S

SEQ ID NO: 79240 - protein, 31 aa, Artificial Sequence
  Cyclic GFR-binding peptide
  MOD_RES (3), (4): Xaa is C or S
SPXXVPQDLRSVKIAKVVGRTPKVKEVQVMV

SEQ ID NO: 79241 - protein, 38 aa, Artificial Sequence; identical to SEQ ID NO: 29372
  Cyclic GFR-binding peptide
  MOD_RES (7), (7): Xaa is C or S

SEQ ID NO: 79242 - protein, 32 aa, Artificial Sequence
  Cyclic GFR-binding peptide
  MOD_RES (29), (31): Xaa is C or S
QDLRPVQIRKIVGRTPKVKKATVMVVKSXKXS

SEQ ID NO: 79243 - protein, 36 aa, Artificial Sequence; identical to SEQ ID NO: 29377
  Cyclic GFR-binding peptide
  MOD_RES (34), (36): Xaa is C or S

SEQ ID NO: 79244 - protein, 33 aa, Artificial Sequence
  Cyclic GFR-binding peptide
QVQLEPLTVLYYEIVRKKPIFEQLSNTLEDHLA

SEQ ID NO: 79245 - protein, 31 aa, Artificial Sequence
  Cyclic GFR-binding peptide
  MOD_RES (5), (6): Xaa is C or S
VPKPXXAPTQLSNITVQIMDDSSNVIIGEMS

SEQ ID NO: 79246 - protein, 34 aa, Artificial Sequence
  Cyclic GFR-binding peptide
  MOD_RES (2), (2): Xaa is C or S
KXQPSRVHHEPLTVLYYEYVRKKPKLEQLSNRLE

SEQ ID NO: 79247 - protein, 32 aa, Artificial Sequence; identical to SEQ ID NO: 29383
  Cyclic GFR-binding peptide
  MOD_RES (1), (32): Xaa is C or S

SEQ ID NO: 79248 - protein, 34 aa, Artificial Sequence; identical to SEQ ID NO: 29384
  Cyclic GFR-binding peptide
  MOD_RES (2), (34): Xaa is C or S

SEQ ID NO: 79249 - protein, 34 aa, Artificial Sequence
  Cyclic GFR-binding peptide
  MOD_RES (5), (6): Xaa is C or S
SASPXXVSQDLRPVQIRKIIGKTPKIKKATVMIV

SEQ ID NO: 79250 - protein, 28 aa, Artificial Sequence
  Cyclic GFR-binding peptide
RVHHEPLTVLYYEYVRKKPKLEQLSNRL

SEQ ID NO: 79251 - protein, 23 aa, Artificial Sequence
  Cyclic GFR-binding peptide
TKLRSVKVAKVDDSSNVIKEVQV

SEQ ID NO: 79252 - protein, 24 aa, Artificial Sequence
  Cyclic GFR-binding peptide
LRPVQMRKIDEYDKVVKKATVEMV

SEQ ID NO: 79253 - protein, 26 aa, Artificial Sequence
  Cyclic GFR-binding peptide
KLSNITVQIMDDSSNVIIGEMSNMVV

SEQ ID NO: 79254 - protein, 29 aa, Artificial Sequence
  Cyclic GFR-binding peptide
  MOD_RES (1), (2): Xaa is C or S
XXAPTQLRPVQVRKIDDSSNVIKKATVNM

SEQ ID NO: 79255 - protein, 40 aa, Artificial Sequence; identical to SEQ ID NO: 29387
  Cyclic GFR-binding peptide
  MOD_RES (6), (7), (39): Xaa is C or S

SEQ ID NO: 79256 - protein, 31 aa, Artificial Sequence; identical to SEQ ID NO: 29388
  Cyclic GFR-binding peptide
  MOD_RES (1), (1): Xaa is C or S

SEQ ID NO: 79257 - protein, 28 aa, Artificial Sequence
  Cyclic GFR-binding peptide
VPTELSNITMQIMDEYDKVVIGEMSEMV

SEQ ID NO: 79258 - protein, 28 aa, Artificial Sequence
  Cyclic GFR-binding peptide
  MOD_RES (27), (27): Xaa is C or S
LRPVQIRKIVGRTPKVKKATVMVVKSXK

SEQ ID NO: 79259 - protein, 33 aa, Artificial Sequence
  Cyclic GFR-binding peptide
  MOD_RES (31), (33): Xaa is C or S
PTELRPVQMRKIDENEKVVKKATVDMVVEGXGX

SEQ ID NO: 79260 - protein, 33 aa, Artificial Sequence
  Cyclic GFR-binding peptide
  MOD_RES (4), (5): Xaa is C or S
PKPXXAPTQLSNITVQIMDDSSNVIIGEMSNMV

SEQ ID NO: 79261 - protein, 36 aa, Artificial Sequence
  Cyclic GFR-binding peptide
  MOD_RES (6), (7): Xaa is C or S
YVPKPXXAPTKLSNITVQIMDDSSNVIIGEMSNMVV

SEQ ID NO: 79262 - protein, 27 aa, Artificial Sequence
  Cyclic GFR-binding peptide
  MOD_RES (27), (27): Xaa is C or S
RPVQMRKIDEYDKVVKKATVEMVVEGX

SEQ ID NO: 79263 - protein, 28 aa, Artificial Sequence
  Cyclic GFR-binding peptide
PTELRPVQMRKIDENEKVVKKATVDMVV

SEQ ID NO: 79264 - protein, 37 aa, Artificial Sequence; identical to SEQ ID NO: 29396
  Cyclic GFR-binding peptide
  MOD_RES (1), (2), (34), (36): Xaa is C or S

SEQ ID NO: 79265 - protein, 30 aa, Artificial Sequence
  Cyclic GFR-binding peptide
  MOD_RES (30), (30): Xaa is C or S
EPLPVVYYEYVRKKPKLEQLSNRLEEHLEX

SEQ ID NO: 79266 - protein, 27 aa, Artificial Sequence
  Cyclic GFR-binding peptide
  MOD_RES (1), (2): Xaa is C or S
XXAPTQLSNITVQIMDDSSNVIIGEMS

SEQ ID NO: 79267 - protein, 28 aa, Artificial Sequence
  Cyclic GFR-binding peptide
  MOD_RES (27), (27): Xaa is C or S
RPVQVRKIDDSSNVIKKATVNMVVRAXG

SEQ ID NO: 79268 - protein, 41 aa, Artificial Sequence; identical to SEQ ID NO: 29404
  Cyclic GFR-binding peptide
  MOD_RES (5), (6), (38), (40): Xaa is C or S

SEQ ID NO: 79269 - protein, 24 aa, Artificial Sequence
  Cyclic GFR-binding peptide
PTELSNITMQIMDENEKVVIGEMS

SEQ ID NO: 79270 - protein, 34 aa, Artificial Sequence; identical to SEQ ID NO: 29406
  Cyclic GFR-binding peptide
  MOD_RES (2), (34): Xaa is C or S

SEQ ID NO: 79271 - protein, 25 aa, Artificial Sequence
  Cyclic GFR-binding peptide
VSQDLRSVKIAKVIGKTPKIKEVQV

SEQ ID NO: 79272 - protein, 33 aa, Artificial Sequence
  Cyclic GFR-binding peptide
  MOD_RES (2), (2): Xaa is C or S
QXRPTQVQLEPLPVVYYEIVRKKPIFEQLSNTL

SEQ ID NO: 79273 - protein, 25 aa, Artificial Sequence
  Cyclic GFR-binding peptide
DLSNITIQIMIGKTPKIIGEMSMIV

SEQ ID NO: 79274 - protein, 21 aa, Artificial Sequence
  Cyclic GFR-binding peptide
LRPVQIRKIIGKTPKIKKATV

SEQ ID NO: 79275 - protein, 39 aa, Artificial Sequence; identical to SEQ ID NO: 29411
  Cyclic GFR-binding peptide
  MOD_RES (5), (5): Xaa is C or S

SEQ ID NO: 79276 - protein, 31 aa, Artificial Sequence
  Cyclic GFR-binding peptide
  MOD_RES (2), (3): Xaa is C or S
PXXVPQDLSNITIQIMVGRTPKVIGEMSMVV

SEQ ID NO: 79277 - protein, 27 aa, Artificial Sequence
  Cyclic GFR-binding peptide
PTELSNITMQIMDEYDKVVIGEMSEMV

SEQ ID NO: 79278 - protein, 27 aa, Artificial Sequence
  Cyclic GFR-binding peptide
  MOD_RES (1), (1): Xaa is C or S
XAPTQLSNITVQIMDDSSNVIIGEMSN

SEQ ID NO: 79279 - protein, 29 aa, Artificial Sequence
  Cyclic GFR-binding peptide
  MOD_RES (29), (29): Xaa is C or S
QLRPVQVRKIDDSSNVIKKATVNMVVRAX

SEQ ID NO: 79280 - protein, 33 aa, Artificial Sequence
  Cyclic GFR-binding peptide
  MOD_RES (32), (32): Xaa is C or S
TEEEPLPMVYYRIKPHQGQHEQLSNFLQHNKXE

SEQ ID NO: 79281 - protein, 26 aa, Artificial Sequence
  Cyclic GFR-binding peptide
LRPVQIRKIVGRTPKVKKATVMVVKS

SEQ ID NO: 79282 - protein, 31 aa, Artificial Sequence
  Cyclic GFR-binding peptide
  MOD_RES (1), (2): Xaa is C or S
XXAPTKLRSVKVAKVDDSSNVIKEVQVNMVV

SEQ ID NO: 79283 - protein, 34 aa, Artificial Sequence; identical to SEQ ID NO: 29418
  Cyclic GFR-binding peptide
  MOD_RES (1), (2), (33): Xaa is C or S

SEQ ID NO: 79284 - protein, 27 aa, Artificial Sequence
  Cyclic GFR-binding peptide
APTKLSNITVQIMDDSSNVIIGEMSNM

SEQ ID NO: 79285 - protein, 29 aa, Artificial Sequence
  Cyclic GFR-binding peptide
  MOD_RES (28), (28): Xaa is C or S
LSNITVQIMDDSSNVIIGEMSNMVVRAXG

SEQ ID NO: 79286 - protein, 32 aa, Artificial Sequence
  Cyclic GFR-binding peptide
  MOD_RES (30), (32): Xaa is C or S
EEPLPMVYYRIKPHQGQHEQLSNFLQHNKXEX

SEQ ID NO: 79287 - protein, 25 aa, Artificial Sequence
  Cyclic GFR-binding peptide
ALSNITIQIMVGRKPKVIGEMSMIV

SEQ ID NO: 79288 - protein, 27 aa, Artificial Sequence
  Cyclic GFR-binding peptide
  MOD_RES (27), (27): Xaa is C or S
SNITVQIMDDSSNVIIGEMSNMVVRSX

SEQ ID NO: 79289 - protein, 29 aa, Artificial Sequence
  Cyclic GFR-binding peptide
  MOD_RES (27), (29): Xaa is C or S
LRSVKIAKVVGRKPKVKEVQVMIVRSXKX

SEQ ID NO: 79290 - protein, 37 aa, Artificial Sequence; identical to SEQ ID NO: 29419
  Cyclic GFR-binding peptide
  MOD_RES (6), (7): Xaa is C or S

SEQ ID NO: 79291 - protein, 34 aa, Artificial Sequence
  Cyclic GFR-binding peptide
  MOD_RES (5), (5): Xaa is C or S
TKPTXAPTKLSNITVQIMDDSSNVIIGEMSNMVV

SEQ ID NO: 79292 - protein, 40 aa, Artificial Sequence; identical to SEQ ID NO: 29421
  Cyclic GFR-binding peptide
  MOD_RES (4), (5), (37), (39): Xaa is C or S

SEQ ID NO: 79293 - protein, 34 aa, Artificial Sequence
  Cyclic GFR-binding peptide
  MOD_RES (6), (6): Xaa is C or S
VTKPTXAPTKLSNITVQIMDDSSNVIIGEMSNMV

SEQ ID NO: 79294 - protein, 37 aa, Artificial Sequence; identical to SEQ ID NO: 29424
  Cyclic GFR-binding peptide
  MOD_RES (2), (3), (35), (37): Xaa is C or S

SEQ ID NO: 79295 - protein, 25 aa, Artificial Sequence
  Cyclic GFR-binding peptide
LRSVKMAKVDENEKVVKEVQVDMVV

SEQ ID NO: 79296 - protein, 34 aa, Artificial Sequence
  Cyclic GFR-binding peptide
  MOD_RES (5), (5): Xaa is C or S
RNVQXRPTQVQLEPLPVVYYEIVRKKPIFEQLSN

SEQ ID NO: 79297 - protein, 38 aa, Artificial Sequence; identical to SEQ ID NO: 29431
  Cyclic GFR-binding peptide
  MOD_RES (6), (7): Xaa is C or S

SEQ ID NO: 79298 - protein, 33 aa, Artificial Sequence; identical to SEQ ID NO: 29432
  Cyclic GFR-binding peptide
  MOD_RES (3), (3): Xaa is C or S

SEQ ID NO: 79299 - protein, 24 aa, Artificial Sequence
  Cyclic GFR-binding peptide
SNITVQIMDDSSNVIIGEMSNMVV

SEQ ID NO: 79300 - protein, 31 aa, Artificial Sequence
  Cyclic GFR-binding peptide
  MOD_RES (4), (5): Xaa is C or S
AAPXXVPQALRPVQIRKIVGRKPKVKKATVM

SEQ ID NO: 79301 - protein, 33 aa, Artificial Sequence; identical to SEQ ID NO: 29436
  Cyclic GFR-binding peptide
  MOD_RES (1), (32): Xaa is C or S

SEQ ID NO: 79302 - protein, 40 aa, Artificial Sequence; identical to SEQ ID NO: 29437
  Cyclic GFR-binding peptide
  MOD_RES (4), (5), (37), (39): Xaa is C or S

SEQ ID NO: 79303 - protein, 25 aa, Artificial Sequence
  Cyclic GFR-binding peptide
DLRPVQIRKIIGKTPKIKKATVMIV

SEQ ID NO: 79304 - protein, 39 aa, Artificial Sequence; identical to SEQ ID NO: 29438
  Cyclic GFR-binding peptide
  MOD_RES (4), (5), (36), (38): Xaa is C or S

SEQ ID NO: 79305 - protein, 39 aa, Artificial Sequence; identical to SEQ ID NO: 29439
  Cyclic GFR-binding peptide
  MOD_RES (37), (39): Xaa is C or S

SEQ ID NO: 79306 - protein, 27 aa, Artificial Sequence
  Cyclic GFR-binding peptide
  MOD_RES (27), (27): Xaa is C or S
RSVKMAKVDEYDKVVKEVQVEMVVEGX

SEQ ID NO: 79307 - protein, 43 aa, Artificial Sequence; identical to SEQ ID NO: 29441
  Cyclic GFR-binding peptide
  MOD_RES (6), (40), (42): Xaa is C or S

SEQ ID NO: 79308 - protein, 25 aa, Artificial Sequence
  Cyclic GFR-binding peptide
APTKLSNITVQIMDDSSNVIIGEMS

SEQ ID NO: 79309 - protein, 34 aa, Artificial Sequence
  Cyclic GFR-binding peptide
  MOD_RES (31), (33): Xaa is C or S
HEPLTVLYYEYVRKKPKLEQLSNRLEEHLEXAXA

SEQ ID NO: 79310 - protein, 27 aa, Artificial Sequence
  Cyclic GFR-binding peptide
ALRSVKIAKVVGRKPKVKEVQVMIVRS

SEQ ID NO: 79311 - protein, 38 aa, Artificial Sequence; identical to SEQ ID NO: 29449
  Cyclic GFR-binding peptide
  MOD_RES (2), (2): Xaa is C or S

SEQ ID NO: 79312 - protein, 33 aa, Artificial Sequence; identical to SEQ ID NO: 29451
  Cyclic GFR-binding peptide
  MOD_RES (1), (33): Xaa is C or S

SEQ ID NO: 79313 - protein, 30 aa, Artificial Sequence
  Cyclic GFR-binding peptide
  MOD_RES (3), (4): Xaa is C or S
KPXXAPTQLRSVKVAKVDDSSNVIKEVQVN

SEQ ID NO: 79314 - protein, 29 aa, Artificial Sequence
  Cyclic GFR-binding peptide
VPQALRPVQIRKIVGRKPKVKKATVMIVR

SEQ ID NO: 79315 - protein, 32 aa, Artificial Sequence
  Cyclic GFR-binding peptide
  MOD_RES (5), (5): Xaa is C or S
TKPTXAPTKLSNITVQIMDDSSNVIIGEMSNM

SEQ ID NO: 79316 - protein, 26 aa, Artificial Sequence
  Cyclic GFR-binding peptide
  MOD_RES (1), (1): Xaa is C or S
XVPQDLRSVKIAKVVGRTPKVKEVQV

SEQ ID NO: 79317 - protein, 33 aa, Artificial Sequence
  Cyclic GFR-binding peptide
  MOD_RES (5), (6): Xaa is C or S
SASPXXVSQDLSNITIQIMIGKTPKIIGEMSMI

SEQ ID NO: 79318 - protein, 31 aa, Artificial Sequence
  Cyclic GFR-binding peptide
  MOD_RES (2), (3): Xaa is C or S
PXXVPQALRPVQIRKIVGRKPKVKKATVMIV

SEQ ID NO: 79319 - protein, 35 aa, Artificial Sequence; identical to SEQ ID NO: 29467
  Cyclic GFR-binding peptide
  MOD_RES (3), (4): Xaa is C or S

SEQ ID NO: 79320 - protein, 41 aa, Artificial Sequence; identical to SEQ ID NO: 29469
  Cyclic GFR-binding peptide
  MOD_RES (4), (41): Xaa is C or S

SEQ ID NO: 79321 - protein, 38 aa, Artificial Sequence; identical to SEQ ID NO: 29470
  Cyclic GFR-binding peptide
  MOD_RES (5), (6), (38): Xaa is C or S

SEQ ID NO: 79322 - protein, 36 aa, Artificial Sequence; identical to SEQ ID NO: 29473
  Cyclic GFR-binding peptide
  MOD_RES (34), (36): Xaa is C or S

SEQ ID NO: 79323 - protein, 32 aa, Artificial Sequence
  Cyclic GFR-binding peptide
  MOD_RES (1), (1): Xaa is C or S
XVPTEEEPLPMVYYRIKPHQGQHEQLSNFLQH

SEQ ID NO: 79324 - protein, 26 aa, Artificial Sequence
  Cyclic GFR-binding peptide
VSQDLRPVQIRKIIGKTPKIKKATVM

SEQ ID NO: 79325 - protein, 28 aa, Artificial Sequence
  Cyclic GFR-binding peptide
APTQLRSVKVAKVDDSSNVIKEVQVNMV

SEQ ID NO: 79326 - protein, 29 aa, Artificial Sequence
  Cyclic GFR-binding peptide
  MOD_RES (1), (1): Xaa is C or S
XAPTKLRPVQVRKIDDSSNVIKKATVNMV

SEQ ID NO: 79327 - protein, 40 aa, Artificial Sequence; identical to SEQ ID NO: 29481
  Cyclic GFR-binding peptide
  MOD_RES (6), (7), (39): Xaa is C or S

SEQ ID NO: 79328 - protein, 24 aa, Artificial Sequence
  Cyclic GFR-binding peptide
RPVQMRKIDENEKVVKKATVDMVV

SEQ ID NO: 79329 - protein, 29 aa, Artificial Sequence
  Cyclic GFR-binding peptide
  MOD_RES (1), (2): Xaa is C or S
XXAPTKLRPVQVRKIDDSSNVIKKATVNM

SEQ ID NO: 79330 - protein, 28 aa, Artificial Sequence
  Cyclic GFR-binding peptide
  MOD_RES (26), (28): Xaa is C or S
RSVKIAKVVGRKPKVKEVQVMIVRSXKX

SEQ ID NO: 79331 - protein, 29 aa, Artificial Sequence
  Cyclic GFR-binding peptide
EPLPVVYYEYVRKKPKLEQLSNRLEEHLE

SEQ ID NO: 79332 - protein, 25 aa, Artificial Sequence
  Cyclic GFR-binding peptide
RPVQMRKIDEYDKVVKKATVEMVVE

SEQ ID NO: 79333 - protein, 32 aa, Artificial Sequence
  Cyclic GFR-binding peptide
  MOD_RES (2), (3): Xaa is C or S
AXXVPTELRSVKMAKVDENEKVVKEVQVDMVV

SEQ ID NO: 79334 - protein, 27 aa, Artificial Sequence
  Cyclic GFR-binding peptide
VPQDLRPVQIRKIVGRTPKVKKATVMV

SEQ ID NO: 79335 - protein, 36 aa, Artificial Sequence
  Cyclic GFR-binding peptide
  MOD_RES (3), (3): Xaa is C or S
VQXRPTQVQLEPLPVVYYEIVRKKPIFEQLSNTLED

SEQ ID NO: 79336 - protein, 31 aa, Artificial Sequence
  Cyclic GFR-binding peptide
  MOD_RES (30), (30): Xaa is C or S
TELRPVQMRKIDEYDKVVKKATVEMVVEGXG

SEQ ID NO: 79337 - protein, 30 aa, Artificial Sequence
  Cyclic GFR-binding peptide
  MOD_RES (1), (2): Xaa is C or S
XXAPTQLSNITVQIMDDSSNVIIGEMSNMV

SEQ ID NO: 79338 - protein, 32 aa, Artificial Sequence; identical to SEQ ID NO: 29494
  Cyclic GFR-binding peptide
  MOD_RES (1), (2): Xaa is C or S

SEQ ID NO: 79339 - protein, 27 aa, Artificial Sequence
  Cyclic GFR-binding peptide
TEEEPLPMVYYRIKPHQGQHEQLSNFL

SEQ ID NO: 79340 - protein, 31 aa, Artificial Sequence; identical to SEQ ID NO: 29496
  Cyclic GFR-binding peptide
  MOD_RES (1), (1): Xaa is C or S

SEQ ID NO: 79341 - protein, 36 aa, Artificial Sequence; identical to SEQ ID NO: 29497
  Cyclic GFR-binding peptide
  MOD_RES (3), (4), (36): Xaa is C or S

SEQ ID NO: 79342 - protein, 25 aa, Artificial Sequence
  Cyclic GFR-binding peptide
DLRSVKIAKVIGKTPKIKEVQVMIV

SEQ ID NO: 79343 - protein, 28 aa, Artificial Sequence
  Cyclic GFR-binding peptide
VPTEEEPLTMLYYRIKPHQGQHEQLSNF

SEQ ID NO: 79344 - protein, 24 aa, Artificial Sequence
  Cyclic GFR-binding peptide
TELSNITMQIMDENEKVVIGEMSD

SEQ ID NO: 79345 - protein, 26 aa, Artificial Sequence
  Cyclic GFR-binding peptide
  MOD_RES (1), (1): Xaa is C or S
XVPTELRPVQMRKIDENEKVVKKATV

SEQ ID NO: 79346 - protein, 37 aa, Artificial Sequence; identical to SEQ ID NO: 29500
  Cyclic GFR-binding peptide
  MOD_RES (3), (4), (36): Xaa is C or S

SEQ ID NO: 79347 - protein, 32 aa, Artificial Sequence
  Cyclic GFR-binding peptide
  MOD_RES (5), (6): Xaa is C or S
SAAPXXVPQALRPVQIRKIVGRKPKVKKATVM

SEQ ID NO: 79348 - protein, 31 aa, Artificial Sequence
  Cyclic GFR-binding peptide
  MOD_RES (5), (6): Xaa is C or S
SASPXXVSQDLRPVQIRKIIGKTPKIKKATV

SEQ ID NO: 79349 - protein, 41 aa, Artificial Sequence; identical to SEQ ID NO: 29503
  Cyclic GFR-binding peptide
  MOD_RES (7), (39), (41): Xaa is C or S

SEQ ID NO: 79350 - protein, 33 aa, Artificial Sequence
  Cyclic GFR-binding peptide
  MOD_RES (30), (32): Xaa is C or S
PQDLRSVKIAKVVGRTPKVKEVQVMVVKSXKXS

SEQ ID NO: 79351 - protein, 37 aa, Artificial Sequence; identical to SEQ ID NO: 29504
  Cyclic GFR-binding peptide
  MOD_RES (2), (3), (35), (37): Xaa is C or S

SEQ ID NO: 79352 - protein, 36 aa, Artificial Sequence; identical to SEQ ID NO: 29506
  Cyclic GFR-binding peptide
  MOD_RES (3), (4), (35): Xaa is C or S

SEQ ID NO: 79353 - protein, 31 aa, Artificial Sequence
  Cyclic GFR-binding peptide
  MOD_RES (3), (4): Xaa is C or S
SPXXVPQDLRPVQIRKIVGRTPKVKKATVMV

SEQ ID NO: 79354 - protein, 27 aa, Artificial Sequence
  Cyclic GFR-binding peptide
  MOD_RES (1), (1): Xaa is C or S
XVPQALSNITIQIMVGRKPKVIGEMSM

SEQ ID NO: 79355 - protein, 27 aa, Artificial Sequence
  Cyclic GFR-binding peptide
QLRPVQVRKIDDSSNVIKKATVNMVVR

SEQ ID NO: 79356 - protein, 28 aa, Artificial Sequence
  Cyclic GFR-binding peptide
  MOD_RES (1), (2): Xaa is C or S
XXVPQALSNITIQIMVGRKPKVIGEMSM

SEQ ID NO: 79357 - protein, 29 aa, Artificial Sequence
  Cyclic GFR-binding peptide
  MOD_RES (27), (29): Xaa is C or S
LRPVQIRKIVGRKPKVKKATVMIVRSXKX

SEQ ID NO: 79358 - protein, 35 aa, Artificial Sequence; identical to SEQ ID NO: 29515
  Cyclic GFR-binding peptide
  MOD_RES (3), (4): Xaa is C or S

SEQ ID NO: 79359 - protein, 26 aa, Artificial Sequence
  Cyclic GFR-binding peptide
EPLPVVYYEYVRKKPKLEQLSNRLEE

SEQ ID NO: 79360 - protein, 37 aa, Artificial Sequence; identical to SEQ ID NO: 29522
  Cyclic GFR-binding peptide
  MOD_RES (6), (7): Xaa is C or S

SEQ ID NO: 79361 - protein, 26 aa, Artificial Sequence
  Cyclic GFR-binding peptide
PQDLSNITIQIMVGRTPKVIGEMSMV

SEQ ID NO: 79362 - protein, 31 aa, Artificial Sequence
  Cyclic GFR-binding peptide
  MOD_RES (3), (4): Xaa is C or S
KPXXAPTQLSNITVQIMDDSSNVIIGEMSNM

SEQ ID NO: 79363 - protein, 37 aa, Artificial Sequence
  Cyclic GFR-binding peptide
  MOD_RES (5), (5): Xaa is C or S
RNVQXRPTQVQLEPLPVVYYEIVRKKPIFEQLSNTLE

SEQ ID NO: 79364 - protein, 40 aa, Artificial Sequence; identical to SEQ ID NO: 29526
  Cyclic GFR-binding peptide
  MOD_RES (37), (39): Xaa is C or S

SEQ ID NO: 79365 - protein, 33 aa, Artificial Sequence
  Cyclic GFR-binding peptide
  MOD_RES (3), (3): Xaa is C or S
LEXVPTEEEPLPMVYYRIKPHQGQHEQLSNFLQ

SEQ ID NO: 79366 - protein, 40 aa, Artificial Sequence; identical to SEQ ID NO: 29532
  Cyclic GFR-binding peptide
  MOD_RES (3), (37), (39): Xaa is C or S

SEQ ID NO: 79367 - protein, 24 aa, Artificial Sequence
  Cyclic GFR-binding peptide
LRSVKIAKVVGRTPKVKEVQVMVV

SEQ ID NO: 79368 - protein, 29 aa, Artificial Sequence
  Cyclic GFR-binding peptide
  MOD_RES (1), (2): Xaa is C or S
XXVPQDLSNITIQIMVGRTPKVIGEMSMV

SEQ ID NO: 79369 - protein, 31 aa, Artificial Sequence; identical to SEQ ID NO: 29535
  Cyclic GFR-binding peptide
  MOD_RES (31), (31): Xaa is C or S

SEQ ID NO: 79370 - protein, 30 aa, Artificial Sequence; identical to SEQ ID NO: 1149
  Cyclic GFR-binding peptide

SEQ ID NO: 79371 - protein, 26 aa, Artificial Sequence
  Cyclic GFR-binding peptide
VPQDLRPVQIRKIVGRTPKVKKATVM

SEQ ID NO: 79372 - protein, 30 aa, Artificial Sequence
  Cyclic GFR-binding peptide
  MOD_RES (29), (29): Xaa is C or S
QDLSNITIQIMIGKTPKIIGEMSMIVKSXK

SEQ ID NO: 79373 - protein, 28 aa, Artificial Sequence
  Cyclic GFR-binding peptide
  MOD_RES (1), (1): Xaa is C or S
XVPTELSNITMQIMDENEKVVIGEMSDM

SEQ ID NO: 79374 - protein, 39 aa, Artificial Sequence; identical to SEQ ID NO: 29542
  Cyclic GFR-binding peptide
  MOD_RES (6), (7), (39): Xaa is C or S

SEQ ID NO: 79375 - protein, 36 aa, Artificial Sequence
  Cyclic GFR-binding peptide
  MOD_RES (6), (7): Xaa is C or S
ASASPXXVPQDLSNITIQIMVGRTPKVIGEMSMVVK

SEQ ID NO: 79376 - protein, 37 aa, Artificial Sequence; identical to SEQ ID NO: 29544
  Cyclic GFR-binding peptide
  MOD_RES (6), (7): Xaa is C or S

SEQ ID NO: 79377 - protein, 28 aa, Artificial Sequence
  Cyclic GFR-binding peptide
PQDLRSVKIAKVVGRTPKVKEVQVMVVK

SEQ ID NO: 79378 - protein, 29 aa, Artificial Sequence
  Cyclic GFR-binding peptide
  MOD_RES (2), (3): Xaa is C or S
PXXAPTQLRSVKVAKVDDSSNVIKEVQVN

SEQ ID NO: 79379 - protein, 34 aa, Artificial Sequence
  Cyclic GFR-binding peptide
  MOD_RES (6), (7): Xaa is C or S
TVPKPXXAPTQLSNITVQIMDDSSNVIIGEMSNM

SEQ ID NO: 79380 - protein, 30 aa, Artificial Sequence
  Cyclic GFR-binding peptide
  MOD_RES (29), (29): Xaa is C or S
QDLRSVKIAKVVGRTPKVKEVQVMVVKSXK

SEQ ID NO: 79381 - protein, 28 aa, Artificial Sequence
  Cyclic GFR-binding peptide
EEEPLTMLYYRIKPHQGQHEQLSNFLQH

SEQ ID NO: 79382 - protein, 36 aa, Artificial Sequence; identical to SEQ ID NO: 29554
  Cyclic GFR-binding peptide
  MOD_RES (6), (6): Xaa is C or S

SEQ ID NO: 79383 - protein, 25 aa, Artificial Sequence
  Cyclic GFR-binding peptide
EEPLTMLYYRIKPHQGQHEQLSNFL

SEQ ID NO: 79384 - protein, 33 aa, Artificial Sequence
  Cyclic GFR-binding peptide
  MOD_RES (4), (5): Xaa is C or S
ASPXXVPQDLRPVQIRKIVGRTPKVKKATVMVV

SEQ ID NO: 79385 - protein, 30 aa, Artificial Sequence
  Cyclic GFR-binding peptide
  MOD_RES (30), (30): Xaa is C or S
TELRPVQMRKIDEYDKVVKKATVEMVVEGX

SEQ ID NO: 79386 - protein, 36 aa, Artificial Sequence; identical to SEQ ID NO: 29564
  Cyclic GFR-binding peptide
  MOD_RES (4), (5), (36): Xaa is C or S

SEQ ID NO: 79387 - protein, 34 aa, Artificial Sequence
  Cyclic GFR-binding peptide
  MOD_RES (32), (34): Xaa is C or S
QLEPLTVLYYEIVRKKPIFEQLSNTLEDHLAXKX

SEQ ID NO: 79388 - protein, 36 aa, Artificial Sequence; identical to SEQ ID NO: 29566
  Cyclic GFR-binding peptide
  MOD_RES (1), (2), (33), (35): Xaa is C or S

SEQ ID NO: 79389 - protein, 27 aa, Artificial Sequence
  Cyclic GFR-binding peptide
LRPVQMRKIDEYDKVVKKATVEMVVEG

SEQ ID NO: 79390 - protein, 29 aa, Artificial Sequence
  Cyclic GFR-binding peptide
SRVHHEPLTVLYYEYVRKKPKLEQLSNRL

SEQ ID NO: 79391 - protein, 25 aa, Artificial Sequence
  Cyclic GFR-binding peptide
ELRPVQMRKIDENEKVVKKATVDMV

SEQ ID NO: 79392 - protein, 35 aa, Artificial Sequence; identical to SEQ ID NO: 29567
  Cyclic GFR-binding peptide
  MOD_RES (1), (32), (34): Xaa is C or S

SEQ ID NO: 79393 - protein, 21 aa, Artificial Sequence
  Cyclic GFR-binding peptide
RPVQMRKIDEYDKVVKKATVE

SEQ ID NO: 79394 - protein, 28 aa, Artificial Sequence
  Cyclic GFR-binding peptide
APTQLSNITVQIMDDSSNVIIGEMSNMV

SEQ ID NO: 79395 - protein, 33 aa, Artificial Sequence; identical to SEQ ID NO: 29571
  Cyclic GFR-binding peptide

SEQ ID NO: 79396 - protein, 31 aa, Artificial Sequence
  Cyclic GFR-binding peptide
QPSRVHHEPLPVVYYEYVRKKPKLEQLSNRL

SEQ ID NO: 79397 - protein, 29 aa, Artificial Sequence
  Cyclic GFR-binding peptide
  MOD_RES (1), (2): Xaa is C or S
XXAPTQLRSVKVAKVDDSSNVIKEVQVNM

SEQ ID NO: 79398 - protein, 22 aa, Artificial Sequence
  Cyclic GFR-binding peptide
RPVQMRKIDEYDKVVKKATVEM

SEQ ID NO: 79399 - protein, 30 aa, Artificial Sequence
  Cyclic GFR-binding peptide
  MOD_RES (3), (4): Xaa is C or S
KAXXVPTELRSVKMAKVDEYDKVVKEVQVE

SEQ ID NO: 79400 - protein, 42 aa, Artificial Sequence; identical to SEQ ID NO: 29576
  Cyclic GFR-binding peptide
  MOD_RES (6), (7), (39), (41): Xaa is C or S

SEQ ID NO: 79401 - protein, 22 aa, Artificial Sequence
  Cyclic GFR-binding peptide
LSNITMQIMDENEKVVIGEMSD

SEQ ID NO: 79402 - protein, 23 aa, Artificial Sequence
  Cyclic GFR-binding peptide
LRPVQMRKIDEYDKVVKKATVEM

SEQ ID NO: 79403 - protein, 32 aa, Artificial Sequence; identical to SEQ ID NO: 29578
  Cyclic GFR-binding peptide
  MOD_RES (32), (32): Xaa is C or S

SEQ ID NO: 79404 - protein, 29 aa, Artificial Sequence
  Cyclic GFR-binding peptide
  MOD_RES (3), (4): Xaa is C or S
KPXXAPTKLSNITVQIMDDSSNVIIGEMS

SEQ ID NO: 79405 - protein, 27 aa, Artificial Sequence
  Cyclic GFR-binding peptide
HHEPLTVLYYEYVRKKPKLEQLSNRLE

SEQ ID NO: 79406 - protein, 32 aa, Artificial Sequence
  Cyclic GFR-binding peptide
  MOD_RES (4), (5): Xaa is C or S
PKPXXAPTQLSNITVQIMDDSSNVIIGEMSNM

SEQ ID NO: 79407 - protein, 28 aa, Artificial Sequence
  Cyclic GFR-binding peptide
  MOD_RES (27), (27): Xaa is C or S
SNITMQIMDENEKVVIGEMSDMVVEGXG

SEQ ID NO: 79408 - protein, 38 aa, Artificial Sequence; identical to SEQ ID NO: 29587
  Cyclic GFR-binding peptide
  MOD_RES (6), (7): Xaa is C or S

SEQ ID NO: 79409 - protein, 31 aa, Artificial Sequence
  Cyclic GFR-binding peptide
  MOD_RES (30), (30): Xaa is C or S
PQDLRSVKIAKVVGRTPKVKEVQVMVVKSXK

SEQ ID NO: 79410 - protein, 36 aa, Artificial Sequence; identical to SEQ ID NO: 29588
  Cyclic GFR-binding peptide

SEQ ID NO: 79411 - protein, 30 aa, Artificial Sequence
  Cyclic GFR-binding peptide
PTELRSVKMAKVDENEKVVKEVQVDMVVEG

SEQ ID NO: 79412 - protein, 29 aa, Artificial Sequence
  Cyclic GFR-binding peptide
  MOD_RES (1), (1): Xaa is C or S
XVSQDLRSVKIAKVIGKTPKIKEVQVMIV

SEQ ID NO: 79413 - protein, 39 aa, Artificial Sequence; identical to SEQ ID NO: 29590
  Cyclic GFR-binding peptide
  MOD_RES (4), (5), (37), (39): Xaa is C or S

SEQ ID NO: 79414 - protein, 38 aa, Artificial Sequence; identical to SEQ ID NO: 29592
  Cyclic GFR-binding peptide
  MOD_RES (3), (3): Xaa is C or S

SEQ ID NO: 79415 - protein, 38 aa, Artificial Sequence; identical to SEQ ID NO: 29594
  Cyclic GFR-binding peptide
  MOD_RES (3), (4), (36), (38): Xaa is C or S

SEQ ID NO: 79416 - protein, 30 aa, Artificial Sequence
  Cyclic GFR-binding peptide
  MOD_RES (28), (30): Xaa is C or S
LRPVQVRKIDDSSNVIKKATVNMVVRSXGX

SEQ ID NO: 79417 - protein, 23 aa, Artificial Sequence
  Cyclic GFR-binding peptide
TQLRSVKVAKVDDSSNVIKEVQV

SEQ ID NO: 79418 - protein, 35 aa, Artificial Sequence
  Cyclic GFR-binding peptide
  MOD_RES (6), (7): Xaa is C or S
ASAAPXXVPQALRSVKIAKVVGRKPKVKEVQVMIV

SEQ ID NO: 79419 - protein, 31 aa, Artificial Sequence
  Cyclic GFR-binding peptide
  MOD_RES (4), (5): Xaa is C or S
ASPXXVSQDLSNITIQIMIGKTPKIIGEMSM

SEQ ID NO: 79420 - protein, 32 aa, Artificial Sequence
  Cyclic GFR-binding peptide
  MOD_RES (4), (5): Xaa is C or S
PKPXXAPTKLSNITVQIMDDSSNVIIGEMSNM

SEQ ID NO: 79421 - protein, 27 aa, Artificial Sequence
  Cyclic GFR-binding peptide
  MOD_RES (1), (1): Xaa is C or S
XVPQDLRSVKIAKVVGRTPKVKEVQVM

SEQ ID NO: 79422 - protein, 30 aa, Artificial Sequence
  Cyclic GFR-binding peptide
  MOD_RES (4), (5): Xaa is C or S
PKAXXVPTELRSVKMAKVDEYDKVVKEVQV

SEQ ID NO: 79423 - protein, 38 aa, Artificial Sequence; identical to SEQ ID NO: 29600
  Cyclic GFR-binding peptide
  MOD_RES (4), (5), (37): Xaa is C or S

SEQ ID NO: 79424 - protein, 32 aa, Artificial Sequence
  Cyclic GFR-binding peptide
  MOD_RES (2), (2): Xaa is C or S
KXQPSRVHHEPLPVVYYEYVRKKPKLEQLSNR

SEQ ID NO: 79425 - protein, 33 aa, Artificial Sequence; identical to SEQ ID NO: 29602
  Cyclic GFR-binding peptide
  MOD_RES (2), (3): Xaa is C or S

SEQ ID NO: 79426 - protein, 22 aa, Artificial Sequence
  Cyclic GFR-binding peptide
LSNITVQIMDDSSNVIIGEMSN

SEQ ID NO: 79427 - protein, 28 aa, Artificial Sequence
  Cyclic GFR-binding peptide
  MOD_RES (2), (3): Xaa is C or S
PXXVPQDLSNITIQIMVGRTPKVIGEMS

SEQ ID NO: 79428 - protein, 37 aa, Artificial Sequence; identical to SEQ ID NO: 29607
  Cyclic GFR-binding peptide
  MOD_RES (2), (34), (36): Xaa is C or S

SEQ ID NO: 79429 - protein, 28 aa, Artificial Sequence
  Cyclic GFR-binding peptide
ELRSVKMAKVDENEKVVKEVQVDMVVEG

SEQ ID NO: 79430 - protein, 38 aa, Artificial Sequence; identical to SEQ ID NO: 29608
  Cyclic GFR-binding peptide
  MOD_RES (5), (6), (38): Xaa is C or S

SEQ ID NO: 79431 - protein, 39 aa, Artificial Sequence; identical to SEQ ID NO: 29609
  Cyclic GFR-binding peptide
  MOD_RES (4), (5), (36), (38): Xaa is C or S

SEQ ID NO: 79432 - protein, 39 aa, Artificial Sequence; identical to SEQ ID NO: 29611
  Cyclic GFR-binding peptide
  MOD_RES (3), (37), (39): Xaa is C or S

SEQ ID NO: 79433 - protein, 31 aa, Artificial Sequence
  Cyclic GFR-binding peptide
  MOD_RES (4), (4): Xaa is C or S
GLEXVPTEEEPLPMVYYRIKPHQGQHEQLSN

SEQ ID NO: 79434 - protein, 35 aa, Artificial Sequence; identical to SEQ ID NO: 29614
  Cyclic GFR-binding peptide
  MOD_RES (1), (2), (34): Xaa is C or S

SEQ ID NO: 79435 - protein, 32 aa, Artificial Sequence
  Cyclic GFR-binding peptide
  MOD_RES (30), (32): Xaa is C or S
PQALRSVKIAKVVGRKPKVKEVQVMIVRSXKX

SEQ ID NO: 79436 - protein, 37 aa, Artificial Sequence; identical to SEQ ID NO: 29617
  Cyclic GFR-binding peptide
  MOD_RES (2), (3), (34), (36): Xaa is C or S

SEQ ID NO: 79437 - protein, 32 aa, Artificial Sequence
  Cyclic GFR-binding peptide
  MOD_RES (30), (32): Xaa is C or S
SQDLRSVKIAKVIGKTPKIKEVQVMIVKSXKX

SEQ ID NO: 79438 - protein, 27 aa, Artificial Sequence
  Cyclic GFR-binding peptide
PTQLSNITVQIMDDSSNVIIGEMSNMV

SEQ ID NO: 79439 - protein, 31 aa, Artificial Sequence
  Cyclic GFR-binding peptide
  MOD_RES (5), (6): Xaa is C or S
SASPXXVPQDLRSVKIAKVVGRTPKVKEVQV

SEQ ID NO: 79440 - protein, 29 aa, Artificial Sequence
  Cyclic GFR-binding peptide
  MOD_RES (1), (2): Xaa is C or S
XXAPTKLRSVKVAKVDDSSNVIKEVQVNM

SEQ ID NO: 79441 - protein, 23 aa, Artificial Sequence
  Cyclic GFR-binding peptide
ELRPVQMRKIDEYDKVVKKATVE

SEQ ID NO: 79442 - protein, 31 aa, Artificial Sequence
  Cyclic GFR-binding peptide
VQLEPLTVLYYEIVRKKPIFEQLSNTLEDHL

SEQ ID NO: 79443 - protein, 37 aa, Artificial Sequence; identical to SEQ ID NO: 29625
  Cyclic GFR-binding peptide
  MOD_RES (3), (3): Xaa is C or S

SEQ ID NO: 79444 - protein, 27 aa, Artificial Sequence
  Cyclic GFR-binding peptide
QLEPLTVLYYEIVRKKPIFEQLSNTLE

SEQ ID NO: 79445 - protein, 30 aa, Artificial Sequence
  Cyclic GFR-binding peptide
PTKLRSVKVAKVDDSSNVIKEVQVNMVVRS

SEQ ID NO: 79446 - protein, 29 aa, Artificial Sequence
  Cyclic GFR-binding peptide
  MOD_RES (28), (28): Xaa is C or S
DLRSVKIAKVVGRTPKVKEVQVMVVKSXK

SEQ ID NO: 79447 - protein, 31 aa, Artificial Sequence
  Cyclic GFR-binding peptide
  MOD_RES (1), (1): Xaa is C or S
XVPTEEEPLTMLYYRIKPHQGQHEQLSNFLQ

SEQ ID NO: 79448 - protein, 33 aa, Artificial Sequence
  Cyclic GFR-binding peptide
  MOD_RES (33), (33): Xaa is C or S
VQLEPLTVLYYEIVRKKPIFEQLSNTLEDHLAX

SEQ ID NO: 79449 - protein, 38 aa, Artificial Sequence; identical to SEQ ID NO: 29638
  Cyclic GFR-binding peptide
  MOD_RES (5), (6), (38): Xaa is C or S

SEQ ID NO: 79450 - protein, 26 aa, Artificial Sequence
  Cyclic GFR-binding peptide
QDLSNITIQIMIGKTPKIIGEMSMIV

SEQ ID NO: 79451 - protein, 21 aa, Artificial Sequence
  Cyclic GFR-binding peptide
LSNITIQIMVGRTPKVIGEMS

SEQ ID NO: 79452 - protein, 32 aa, Artificial Sequence
  Cyclic GFR-binding peptide
  MOD_RES (31), (31): Xaa is C or S
PTQLRPVQVRKIDDSSNVIKKATVNMVVRAXG

SEQ ID NO: 79453 - protein, 26 aa, Artificial Sequence
  Cyclic GFR-binding peptide
LSNITIQIMIGKTPKIIGEMSMIVKS

SEQ ID NO: 79454 - protein, 37 aa, Artificial Sequence; identical to SEQ ID NO: 29644
  Cyclic GFR-binding peptide
  MOD_RES (37), (37): Xaa is C or S

SEQ ID NO: 79455 - protein, 38 aa, Artificial Sequence; identical to SEQ ID NO: 29646
  Cyclic GFR-binding peptide
  MOD_RES (35), (37): Xaa is C or S

SEQ ID NO: 79456 - protein, 34 aa, Artificial Sequence
  Cyclic GFR-binding peptide
  MOD_RES (4), (4): Xaa is C or S
SVKXQPSRVHHEPLTVLYYEYVRKKPKLEQLSNR

SEQ ID NO: 79457 - protein, 29 aa, Artificial Sequence
  Cyclic GFR-binding peptide
  MOD_RES (1), (1): Xaa is C or S
XAPTQLSNITVQIMDDSSNVIIGEMSNMV

SEQ ID NO: 79458 - protein, 28 aa, Artificial Sequence
  Cyclic GFR-binding peptide
KLRSVKVAKVDDSSNVIKEVQVNMVVRS

SEQ ID NO: 79459 - protein, 37 aa, Artificial Sequence; identical to SEQ ID NO: 29657
  Cyclic GFR-binding peptide
  MOD_RES (35), (37): Xaa is C or S

SEQ ID NO: 79460 - protein, 36 aa, Artificial Sequence; identical to SEQ ID NO: 29658
  Cyclic GFR-binding peptide
  MOD_RES (3), (4), (36): Xaa is C or S

SEQ ID NO: 79461 - protein, 29 aa, Artificial Sequence
  Cyclic GFR-binding peptide
HHEPLTVLYYEYVRKKPKLEQLSNRLEEH

SEQ ID NO: 79462 - protein, 23 aa, Artificial Sequence
  Cyclic GFR-binding peptide
QDLRSVKIAKVVGRTPKVKEVQV

SEQ ID NO: 79463 - protein, 29 aa, Artificial Sequence
  Cyclic GFR-binding peptide
  MOD_RES (1), (1): Xaa is C or S
XVPTELSNITMQIMDENEKVVIGEMSDMV

SEQ ID NO: 79464 - protein, 40 aa, Artificial Sequence; identical to SEQ ID NO: 29662
  Cyclic GFR-binding peptide
  MOD_RES (4), (5), (37), (39): Xaa is C or S

SEQ ID NO: 79465 - protein, 29 aa, Artificial Sequence
  Cyclic GFR-binding peptide
TELSNITMQIMDEYDKVVIGEMSEMVVEG

SEQ ID NO: 79466 - protein, 32 aa, Artificial Sequence
  Cyclic GFR-binding peptide
  MOD_RES (2), (3): Xaa is C or S
AXXVPTELRSVKMAKVDEYDKVVKEVQVEMVV

SEQ ID NO: 79467 - protein, 36 aa, Artificial Sequence
  Cyclic GFR-binding peptide
  MOD_RES (4), (4): Xaa is C or S
NVQXRPTQVQLEPLTVLYYEIVRKKPIFEQLSNTLE

SEQ ID NO: 79468 - protein, 32 aa, Artificial Sequence
  Cyclic GFR-binding peptide
  MOD_RES (30), (32): Xaa is C or S
TELRSVKMAKVDEYDKVVKEVQVEMVVEGXGX

SEQ ID NO: 79469 - protein, 28 aa, Artificial Sequence
  Cyclic GFR-binding peptide
  MOD_RES (1), (1): Xaa is C or S
XVPTELRPVQMRKIDENEKVVKKATVDM

SEQ ID NO: 79470 - protein, 26 aa, Artificial Sequence
  Cyclic GFR-binding peptide
VPTELRPVQMRKIDEYDKVVKKATVE

SEQ ID NO: 79471 - protein, 41 aa, Artificial Sequence; identical to SEQ ID NO: 29668
  Cyclic GFR-binding peptide
  MOD_RES (6), (38), (40): Xaa is C or S

SEQ ID NO: 79472 - protein, 36 aa, Artificial Sequence
  Cyclic GFR-binding peptide
  MOD_RES (34), (36): Xaa is C or S
QVQLEPLTVLYYEIVRKKPIFEQLSNTLEDHLAXKX

SEQ ID NO: 79473 - protein, 20 aa, Artificial Sequence
  Cyclic GFR-binding peptide
RPVQMRKIDEYDKVVKKATV

SEQ ID NO: 79474 - protein, 37 aa, Artificial Sequence; identical to SEQ ID NO: 29673
  Cyclic GFR-binding peptide
  MOD_RES (7), (7): Xaa is C or S

SEQ ID NO: 79475 - protein, 37 aa, Artificial Sequence; identical to SEQ ID NO: 29674
  Cyclic GFR-binding peptide
  MOD_RES (37), (37): Xaa is C or S

SEQ ID NO: 79476 - protein, 32 aa, Artificial Sequence
  Cyclic GFR-binding peptide
  MOD_RES (31), (31): Xaa is C or S
PTKLRPVQVRKIDDSSNVIKKATVNMVVRSXG

SEQ ID NO: 79477 - protein, 28 aa, Artificial Sequence
  Cyclic GFR-binding peptide
VPTELRSVKMAKVDEYDKVVKEVQVEMV

SEQ ID NO: 79478 - protein, 26 aa, Artificial Sequence
  Cyclic GFR-binding peptide
LSNITMQIMDEYDKVVIGEMSEMVVE

SEQ ID NO: 79479 - protein, 32 aa, Artificial Sequence
  Cyclic GFR-binding peptide
  MOD_RES (30), (32): Xaa is C or S
PQALRPVQIRKIVGRKPKVKKATVMIVRSXKX

SEQ ID NO: 79480 - protein, 27 aa, Artificial Sequence
  Cyclic GFR-binding peptide
  MOD_RES (1), (2): Xaa is C or S
XXVPTELRPVQMRKIDENEKVVKKATV

SEQ ID NO: 79481 - protein, 34 aa, Artificial Sequence; identical to SEQ ID NO: 29679
  Cyclic GFR-binding peptide
  MOD_RES (2), (3), (34): Xaa is C or S

SEQ ID NO: 79482 - protein, 35 aa, Artificial Sequence
  Cyclic GFR-binding peptide
  MOD_RES (6), (7): Xaa is C or S
ASAAPXXVPQALSNITIQIMVGRKPKVIGEMSMIV

SEQ ID NO: 79483 - protein, 29 aa, Artificial Sequence
  Cyclic GFR-binding peptide
  MOD_RES (3), (4): Xaa is C or S
KAXXVPTELRSVKMAKVDENEKVVKEVQV

SEQ ID NO: 79484 - protein, 28 aa, Artificial Sequence
  Cyclic GFR-binding peptide
  MOD_RES (3), (3): Xaa is C or S
PTXAPTKLSNITVQIMDDSSNVIIGEMS

SEQ ID NO: 79485 - protein, 29 aa, Artificial Sequence
  Cyclic GFR-binding peptide
  MOD_RES (1), (1): Xaa is C or S
XVSQDLSNITIQIMIGKTPKIIGEMSMIV

SEQ ID NO: 79486 - protein, 29 aa, Artificial Sequence
  Cyclic GFR-binding peptide
HHEPLPVVYYEYVRKKPKLEQLSNRLEEH

SEQ ID NO: 79487 - protein, 32 aa, Artificial Sequence
  Cyclic GFR-binding peptide
  MOD_RES (4), (5): Xaa is C or S
PKPXXAPTQLRPVQVRKIDDSSNVIKKATVNM

SEQ ID NO: 79488 - protein, 33 aa, Artificial Sequence; identical to SEQ ID NO: 29690
  Cyclic GFR-binding peptide
  MOD_RES (1), (2): Xaa is C or S

SEQ ID NO: 79489 - protein, 35 aa, Artificial Sequence; identical to SEQ ID NO: 29692
  Cyclic GFR-binding peptide
  MOD_RES (2), (3), (35): Xaa is C or S

SEQ ID NO: 79490 - protein, 33 aa, Artificial Sequence
  Cyclic GFR-binding peptide
  MOD_RES (7), (7): Xaa is C or S
HVTKPTXAPTKLSNITVQIMDDSSNVIIGEMSN

SEQ ID NO: 79491 - protein, 22 aa, Artificial Sequence
  Cyclic GFR-binding peptide
SNITMQIMDEYDKVVIGEMSEM

SEQ ID NO: 79492 - protein, 35 aa, Artificial Sequence; identical to SEQ ID NO: 29696
  Cyclic GFR-binding peptide
  MOD_RES (2), (3), (35): Xaa is C or S

SEQ ID NO: 79493 - protein, 30 aa, Artificial Sequence
  Cyclic GFR-binding peptide
  MOD_RES (28), (30): Xaa is C or S
LRSVKMAKVDENEKVVKEVQVDMVVEGXGX

SEQ ID NO: 79494 - protein, 33 aa, Artificial Sequence
  Cyclic GFR-binding peptide
  MOD_RES (30), (32): Xaa is C or S
PQDLSNITIQIMVGRTPKVIGEMSMVVKSXKXS

SEQ ID NO: 79495 - protein, 26 aa, Artificial Sequence
  Cyclic GFR-binding peptide
RPVQMRKIDEYDKVVKKATVEMVVEG

SEQ ID NO: 79496 - protein, 37 aa, Artificial Sequence; identical to SEQ ID NO: 29705
  Cyclic GFR-binding peptide
  MOD_RES (3), (3): Xaa is C or S

SEQ ID NO: 79497 - protein, 40 aa, Artificial Sequence; identical to SEQ ID NO: 29710
  Cyclic GFR-binding peptide
  MOD_RES (4), (4): Xaa is C or S

SEQ ID NO: 79498 - protein, 33 aa, Artificial Sequence
  Cyclic GFR-binding peptide
  MOD_RES (3), (4): Xaa is C or S
SPXXVPQDLSNITIQIMVGRTPKVIGEMSMVVK

SEQ ID NO: 79499 - protein, 28 aa, Artificial Sequence
  Cyclic GFR-binding peptide
PTELRSVKMAKVDEYDKVVKEVQVEMVV

SEQ ID NO: 79500 - protein, 33 aa, Artificial Sequence; identical to SEQ ID NO: 29713
  Cyclic GFR-binding peptide
  MOD_RES (1), (2), (33): Xaa is C or S

SEQ ID NO: 79501 - protein, 38 aa, Artificial Sequence; identical to SEQ ID NO: 29714
  Cyclic GFR-binding peptide
  MOD_RES (4), (5), (37): Xaa is C or S

SEQ ID NO: 79502 - protein, 32 aa, Artificial Sequence; identical to SEQ ID NO: 29716
  Cyclic GFR-binding peptide
  MOD_RES (31), (31): Xaa is C or S

SEQ ID NO: 79503 - protein, 33 aa, Artificial Sequence
  Cyclic GFR-binding peptide
  MOD_RES (3), (3): Xaa is C or S
VKXQPSRVHHEPLTVLYYEYVRKKPKLEQLSNR

SEQ ID NO: 79504 - protein, 33 aa, Artificial Sequence; identical to SEQ ID NO: 29719
  Cyclic GFR-binding peptide
  MOD_RES (2), (3): Xaa is C or S

SEQ ID NO: 79505 - protein, 24 aa, Artificial Sequence
  Cyclic GFR-binding peptide
HEPLTVLYYEYVRKKPKLEQLSNR

SEQ ID NO: 79506 - protein, 27 aa, Artificial Sequence
  Cyclic GFR-binding peptide
PTKLRPVQVRKIDDSSNVIKKATVNMV

SEQ ID NO: 79507 - protein, 30 aa, Artificial Sequence; identical to SEQ ID NO: 1107
  Cyclic GFR-binding peptide

SEQ ID NO: 79508 - protein, 33 aa, Artificial Sequence
  Cyclic GFR-binding peptide
QPSRVHHEPLPVVYYEYVRKKPKLEQLSNRLEE

SEQ ID NO: 79509 - protein, 33 aa, Artificial Sequence
  Cyclic GFR-binding peptide
  MOD_RES (4), (5): Xaa is C or S
PKPXXAPTKLRPVQVRKIDDSSNVIKKATVNMV

SEQ ID NO: 79510 - protein, 26 aa, Artificial Sequence
  Cyclic GFR-binding peptide
APTQLRPVQVRKIDDSSNVIKKATVN

SEQ ID NO: 79511 - protein, 42 aa, Artificial Sequence; identical to SEQ ID NO: 29722
  Cyclic GFR-binding peptide
  MOD_RES (3), (40), (42): Xaa is C or S

SEQ ID NO: 79512 - protein, 36 aa, Artificial Sequence; identical to SEQ ID NO: 29724
  Cyclic GFR-binding peptide
  MOD_RES (4), (5): Xaa is C or S

SEQ ID NO: 79513 - protein, 31 aa, Artificial Sequence
  Cyclic GFR-binding peptide
  MOD_RES (2), (2): Xaa is C or S
TXAPTKLRPVQVRKIDDSSNVIKKATVNMVV

SEQ ID NO: 79514 - protein, 40 aa, Artificial Sequence; identical to SEQ ID NO: 29730
  Cyclic GFR-binding peptide
  MOD_RES (7), (7): Xaa is C or S

SEQ ID NO: 79515 - protein, 33 aa, Artificial Sequence; identical to SEQ ID NO: 29731
  Cyclic GFR-binding peptide
  MOD_RES (32), (32): Xaa is C or S

SEQ ID NO: 79516 - protein, 21 aa, Artificial Sequence
  Cyclic GFR-binding peptide
RSVKMAKVDEYDKVVKEVQVE

SEQ ID NO: 79517 - protein, 33 aa, Artificial Sequence
  Cyclic GFR-binding peptide
  MOD_RES (31), (33): Xaa is C or S
LEPLTVLYYEIVRKKPIFEQLSNTLEDHLAXKX

SEQ ID NO: 79518 - protein, 32 aa, Artificial Sequence
  Cyclic GFR-binding peptide
  MOD_RES (5), (5): Xaa is C or S
TKPTXAPTKLRPVQVRKIDDSSNVIKKATVNM

SEQ ID NO: 79519 - protein, 32 aa, Artificial Sequence
  Cyclic GFR-binding peptide
  MOD_RES (7), (7): Xaa is C or S
HVTKPTXAPTKLRSVKVAKVDDSSNVIKEVQV

SEQ ID NO: 79520 - protein, 31 aa, Artificial Sequence
  Cyclic GFR-binding peptide
  MOD_RES (5), (6): Xaa is C or S
VPKPXXAPTQLRPVQVRKIDDSSNVIKKATV

SEQ ID NO: 79521 - protein, 35 aa, Artificial Sequence; identical to SEQ ID NO: 29739
  Cyclic GFR-binding peptide
  MOD_RES (34), (34): Xaa is C or S

SEQ ID NO: 79522 - protein, 26 aa, Artificial Sequence
  Cyclic GFR-binding peptide
  MOD_RES (26), (26): Xaa is C or S
RSVKIAKVIGKTPKIKEVQVMIVKSX

SEQ ID NO: 79523 - protein, 24 aa, Artificial Sequence
  Cyclic GFR-binding peptide
EPLTVLYYEIVRKKPIFEQLSNTL

SEQ ID NO: 79524 - protein, 21 aa, Artificial Sequence
  Cyclic GFR-binding peptide
LRSVKMAKVDENEKVVKEVQV

SEQ ID NO: 79525 - protein, 28 aa, Artificial Sequence
  Cyclic GFR-binding peptide
QLSNITVQIMDDSSNVIIGEMSNMVVRA

SEQ ID NO: 79526 - protein, 28 aa, Artificial Sequence
  Cyclic GFR-binding peptide
  MOD_RES (28), (28): Xaa is C or S
DLSNITIQIMVGRTPKVIGEMSMVVKSX

SEQ ID NO: 79527 - protein, 31 aa, Artificial Sequence
  Cyclic GFR-binding peptide
  MOD_RES (30), (30): Xaa is C or S
EPLTVLYYEIVRKKPIFEQLSNTLEDHLAXK

SEQ ID NO: 79528 - protein, 33 aa, Artificial Sequence
  Cyclic GFR-binding peptide
  MOD_RES (4), (5): Xaa is C or S
PKAXXVPTELRPVQMRKIDENEKVVKKATVDMV

SEQ ID NO: 79529 - protein, 38 aa, Artificial Sequence; identical to SEQ ID NO: 29741
  Cyclic GFR-binding peptide
  MOD_RES (4), (5), (37): Xaa is C or S

SEQ ID NO: 79530 - protein, 34 aa, Artificial Sequence; identical to SEQ ID NO: 29742
  Cyclic GFR-binding peptide

SEQ ID NO: 79531 - protein, 37 aa, Artificial Sequence
  Cyclic GFR-binding peptide
  MOD_RES (34), (36): Xaa is C or S
RVHHEPLPVVYYEYVRKKPKLEQLSNRLEEHLEXAXA

SEQ ID NO: 79532 - protein, 38 aa, Artificial Sequence
  Cyclic GFR-binding peptide
  MOD_RES (5), (5): Xaa is C or S
SSVKXQPSRVHHEPLTVLYYEYVRKKPKLEQLSNRLEE

SEQ ID NO: 79533 - protein, 28 aa, Artificial Sequence
  Cyclic GFR-binding peptide
HHEPLTVLYYEYVRKKPKLEQLSNRLEE

SEQ ID NO: 79534 - protein, 27 aa, Artificial Sequence
  Cyclic GFR-binding peptide
  MOD_RES (1), (1): Xaa is C or S
XAPTQLRPVQVRKIDDSSNVIKKATVN

SEQ ID NO: 79535 - protein, 27 aa, Artificial Sequence
  Cyclic GFR-binding peptide
VSQDLSNITIQIMIGKTPKIIGEMSMI

SEQ ID NO: 79536 - protein, 27 aa, Artificial Sequence
  Cyclic GFR-binding peptide
VPTELRSVKMAKVDEYDKVVKEVQVEM

SEQ ID NO: 79537 - protein, 25 aa, Artificial Sequence
  Cyclic GFR-binding peptide
VPTELRPVQMRKIDEYDKVVKKATV

SEQ ID NO: 79538 - protein, 26 aa, Artificial Sequence
  Cyclic GFR-binding peptide
  MOD_RES (1), (1): Xaa is C or S
XAPTQLRSVKVAKVDDSSNVIKEVQV

SEQ ID NO: 79539 - protein, 26 aa, Artificial Sequence
  Cyclic GFR-binding peptide
HHEPLTVLYYEYVRKKPKLEQLSNRL

SEQ ID NO: 79540 - protein, 38 aa, Artificial Sequence; identical to SEQ ID NO: 29749
  Cyclic GFR-binding peptide
  MOD_RES (3), (4), (36), (38): Xaa is C or S

SEQ ID NO: 79541 - protein, 31 aa, Artificial Sequence
  Cyclic GFR-binding peptide
  MOD_RES (3), (3): Xaa is C or S
LEXVPTEEEPLTMLYYRIKPHQGQHEQLSNF

SEQ ID NO: 79542 - protein, 29 aa, Artificial Sequence
  Cyclic GFR-binding peptide
PTQLRSVKVAKVDDSSNVIKEVQVNMVVR

SEQ ID NO: 79543 - protein, 37 aa, Artificial Sequence; identical to SEQ ID NO: 29754
  Cyclic GFR-binding peptide
  MOD_RES (4), (4): Xaa is C or S

SEQ ID NO: 79544 - protein, 24 aa, Artificial Sequence
  Cyclic GFR-binding peptide
PTELRPVQMRKIDENEKVVKKATV

SEQ ID NO: 79545 - protein, 33 aa, Artificial Sequence
  Cyclic GFR-binding peptide
  MOD_RES (30), (32): Xaa is C or S
TELRSVKMAKVDEYDKVVKEVQVEMVVEGXGXR

SEQ ID NO: 79546 - protein, 30 aa, Artificial Sequence; identical to SEQ ID NO: 29758
  Cyclic GFR-binding peptide

SEQ ID NO: 79547 - protein, 37 aa, Artificial Sequence; identical to SEQ ID NO: 29761
  Cyclic GFR-binding peptide
  MOD_RES (5), (6): Xaa is C or S

SEQ ID NO: 79548 - protein, 30 aa, Artificial Sequence
  Cyclic GFR-binding peptide
EEEPLPMVYYRIKPHQGQHEQLSNFLQHNK

SEQ ID NO: 79549 - protein, 29 aa, Artificial Sequence
  Cyclic GFR-binding peptide
  MOD_RES (1), (1): Xaa is C or S
XVPTELRSVKMAKVDENEKVVKEVQVDMV

SEQ ID NO: 79550 - protein, 29 aa, Artificial Sequence
  Cyclic GFR-binding peptide
  MOD_RES (1), (2): Xaa is C or S
XXVPTELRSVKMAKVDEYDKVVKEVQVEM

SEQ ID NO: 79551 - protein, 38 aa, Artificial Sequence; identical to SEQ ID NO: 29767
  Cyclic GFR-binding peptide
  MOD_RES (4), (38): Xaa is C or S

SEQ ID NO: 79552 - protein, 32 aa, Artificial Sequence; identical to SEQ ID NO: 29768
  Cyclic GFR-binding peptide
  MOD_RES (1), (2): Xaa is C or S

SEQ ID NO: 79553 - protein, 38 aa, Artificial Sequence; identical to SEQ ID NO: 29772
  Cyclic GFR-binding peptide
  MOD_RES (36), (38): Xaa is C or S

SEQ ID NO: 79554 - protein, 33 aa, Artificial Sequence; identical to SEQ ID NO: 29774
  Cyclic GFR-binding peptide
  MOD_RES (1), (33): Xaa is C or S

SEQ ID NO: 79555 - protein, 22 aa, Artificial Sequence
  Cyclic GFR-binding peptide
EPLPVVYYEIVRKKPIFEQLSN

SEQ ID NO: 79556 - protein, 29 aa, Artificial Sequence
  Cyclic GFR-binding peptide
QVQLEPLTVLYYEIVRKKPIFEQLSNTLE

SEQ ID NO: 79557 - protein, 35 aa, Artificial Sequence; identical to SEQ ID NO: 29777
  Cyclic GFR-binding peptide

SEQ ID NO: 79558 - protein, 28 aa, Artificial Sequence
  Cyclic GFR-binding peptide
PTELRPVQMRKIDEYDKVVKKATVEMVV

SEQ ID NO: 79559 - protein, 29 aa, Artificial Sequence
  Cyclic GFR-binding peptide
  MOD_RES (1), (1): Xaa is C or S
XVPQDLRPVQIRKIVGRTPKVKKATVMVV

SEQ ID NO: 79560 - protein, 38 aa, Artificial Sequence; identical to SEQ ID NO: 29782
  Cyclic GFR-binding peptide
  MOD_RES (4), (5), (37): Xaa is C or S

SEQ ID NO: 79561 - protein, 38 aa, Artificial Sequence; identical to SEQ ID NO: 29783
  Cyclic GFR-binding peptide
  MOD_RES (5), (6), (37): Xaa is C or S

SEQ ID NO: 79562 - protein, 26 aa, Artificial Sequence
  Cyclic GFR-binding peptide
VSQDLRSVKIAKVIGKTPKIKEVQVM

SEQ ID NO: 79563 - protein, 36 aa, Artificial Sequence; identical to SEQ ID NO: 29786
  Cyclic GFR-binding peptide
  MOD_RES (2), (2): Xaa is C or S

SEQ ID NO: 79564 - protein, 31 aa, Artificial Sequence
  Cyclic GFR-binding peptide
  MOD_RES (1), (1): Xaa is C or S
XRPTQVQLEPLTVLYYEIVRKKPIFEQLSNT

SEQ ID NO: 79565 - protein, 21 aa, Artificial Sequence
  Cyclic GFR-binding peptide
SNITIQIMVGRTPKVIGEMSM

SEQ ID NO: 79566 - protein, 36 aa, Artificial Sequence; identical to SEQ ID NO: 29791
  Cyclic GFR-binding peptide
  MOD_RES (1), (2), (34), (36): Xaa is C or S

SEQ ID NO: 79567 - protein, 20 aa, Artificial Sequence
  Cyclic GFR-binding peptide
SNITIQIMVGRKPKVIGEMS

SEQ ID NO: 79568 - protein, 37 aa, Artificial Sequence; identical to SEQ ID NO: 29792
  Cyclic GFR-binding peptide
  MOD_RES (1), (2), (34), (36): Xaa is C or S

SEQ ID NO: 79569 - protein, 25 aa, Artificial Sequence
  Cyclic GFR-binding peptide
EPLPVVYYEIVRKKPIFEQLSNTLE

SEQ ID NO: 79570 - protein, 30 aa, Artificial Sequence
  Cyclic GFR-binding peptide
  MOD_RES (1), (2): Xaa is C or S
XXVPTELRPVQMRKIDEYDKVVKKATVEMV

SEQ ID NO: 79571 - protein, 22 aa, Artificial Sequence
  Cyclic GFR-binding peptide
DLRSVKIAKVIGKTPKIKEVQV

SEQ ID NO: 79572 - protein, 35 aa, Artificial Sequence
  Cyclic GFR-binding peptide
  MOD_RES (33), (35): Xaa is C or S
VHHEPLTVLYYEYVRKKPKLEQLSNRLEEHLEXAX

SEQ ID NO: 79573 - protein, 41 aa, Artificial Sequence; identical to SEQ ID NO: 29800
  Cyclic GFR-binding peptide
  MOD_RES (5), (6), (38), (40): Xaa is C or S

SEQ ID NO: 79574 - protein, 35 aa, Artificial Sequence; identical to SEQ ID NO: 29802
  Cyclic GFR-binding peptide
  MOD_RES (3), (35): Xaa is C or S

SEQ ID NO: 79575 - protein, 37 aa, Artificial Sequence; identical to SEQ ID NO: 29803
  Cyclic GFR-binding peptide
  MOD_RES (2), (2): Xaa is C or S

SEQ ID NO: 79576 - protein, 30 aa, Artificial Sequence
  Cyclic GFR-binding peptide
  MOD_RES (29), (29): Xaa is C or S
QDLRSVKIAKVIGKTPKIKEVQVMIVKSXK

SEQ ID NO: 79577 - protein, 37 aa, Artificial Sequence; identical to SEQ ID NO: 29805
  Cyclic GFR-binding peptide
  MOD_RES (2), (3), (35), (37): Xaa is C or S

SEQ ID NO: 79578 - protein, 27 aa, Artificial Sequence
  Cyclic GFR-binding peptide
PTQLRSVKVAKVDDSSNVIKEVQVNMV

SEQ ID NO: 79579 - protein, 33 aa, Artificial Sequence
  Cyclic GFR-binding peptide
  MOD_RES (31), (33): Xaa is C or S
PTQLRSVKVAKVDDSSNVIKEVQVNMVVRAXGX

SEQ ID NO: 79580 - protein, 39 aa, Artificial Sequence; identical to SEQ ID NO: 29808
  Cyclic GFR-binding peptide
  MOD_RES (4), (36), (38): Xaa is C or S

SEQ ID NO: 79581 - protein, 32 aa, Artificial Sequence; identical to SEQ ID NO: 29812
  Cyclic GFR-binding peptide
  MOD_RES (2), (2): Xaa is C or S

SEQ ID NO: 79582 - protein, 43 aa, Artificial Sequence; identical to SEQ ID NO: 29813
  Cyclic GFR-binding peptide
  MOD_RES (7), (41), (43): Xaa is C or S

SEQ ID NO: 79583 - protein, 24 aa, Artificial Sequence
  Cyclic GFR-binding peptide
EEEPLTMLYYRIKPHQGQHEQLSN

SEQ ID NO: 79584 - protein, 24 aa, Artificial Sequence
  Cyclic GFR-binding peptide
DLSNITIQIMIGKTPKIIGEMSMI

SEQ ID NO: 79585 - protein, 39 aa, Artificial Sequence; identical to SEQ ID NO: 29814
  Cyclic GFR-binding peptide
  MOD_RES (36), (38): Xaa is C or S

SEQ ID NO: 79586 - protein, 31 aa, Artificial Sequence
  Cyclic GFR-binding peptide
  MOD_RES (3), (4): Xaa is C or S
KAXXVPTELSNITMQIMDENEKVVIGEMSDM

SEQ ID NO: 79587 - protein, 37 aa, Artificial Sequence; identical to SEQ ID NO: 29818
  Cyclic GFR-binding peptide
  MOD_RES (2), (3), (35), (37): Xaa is C or S

SEQ ID NO: 79588 - protein, 31 aa, Artificial Sequence
  Cyclic GFR-binding peptide
  MOD_RES (4), (5): Xaa is C or S
AAPXXVPQALRSVKIAKVVGRKPKVKEVQVM

SEQ ID NO: 79589 - protein, 35 aa, Artificial Sequence; identical to SEQ ID NO: 29822
  Cyclic GFR-binding peptide
  MOD_RES (4), (5): Xaa is C or S

SEQ ID NO: 79590 - protein, 27 aa, Artificial Sequence
  Cyclic GFR-binding peptide
KLRPVQVRKIDDSSNVIKKATVNMVVR

SEQ ID NO: 79591 - protein, 31 aa, Artificial Sequence; identical to SEQ ID NO: 29824
  Cyclic GFR-binding peptide
  MOD_RES (1), (1): Xaa is C or S

SEQ ID NO: 79592 - protein, 25 aa, Artificial Sequence
  Cyclic GFR-binding peptide
PTELSNITMQIMDENEKVVIGEMSD

SEQ ID NO: 79593 - protein, 27 aa, Artificial Sequence
  Cyclic GFR-binding peptide
VQLEPLTVLYYEIVRKKPIFEQLSNTL

SEQ ID NO: 79594 - protein, 24 aa, Artificial Sequence
  Cyclic GFR-binding peptide
RSVKMAKVDEYDKVVKEVQVEMVV

SEQ ID NO: 79595 - protein, 29 aa, Artificial Sequence
  Cyclic GFR-binding peptide
  MOD_RES (2), (3): Xaa is C or S
PXXVPQALRPVQIRKIVGRKPKVKKATVM

SEQ ID NO: 79596 - protein, 38 aa, Artificial Sequence; identical to SEQ ID NO: 29828
  Cyclic GFR-binding peptide
  MOD_RES (3), (3): Xaa is C or S

SEQ ID NO: 79597 - protein, 31 aa, Artificial Sequence; identical to SEQ ID NO: 29829
  Cyclic GFR-binding peptide

SEQ ID NO: 79598 - protein, 37 aa, Artificial Sequence; identical to SEQ ID NO: 29831
  Cyclic GFR-binding peptide
  MOD_RES (3), (4), (36): Xaa is C or S

SEQ ID NO: 79599 - protein, 41 aa, Artificial Sequence; identical to SEQ ID NO: 29832
  Cyclic GFR-binding peptide
  MOD_RES (6), (38), (40): Xaa is C or S

SEQ ID NO: 79600 - protein, 33 aa, Artificial Sequence
  Cyclic GFR-binding peptide
  MOD_RES (30), (32): Xaa is C or S
SQDLRPVQIRKIIGKTPKIKKATVMIVKSXKXS

SEQ ID NO: 79601 - protein, 35 aa, Artificial Sequence; identical to SEQ ID NO: 29834
  Cyclic GFR-binding peptide
  MOD_RES (32), (34): Xaa is C or S

SEQ ID NO: 79602 - protein, 26 aa, Artificial Sequence
  Cyclic GFR-binding peptide
VHHEPLTVLYYEYVRKKPKLEQLSNR

SEQ ID NO: 79603 - protein, 30 aa, Artificial Sequence; identical to SEQ ID NO: 1167
  Cyclic GFR-binding peptide

SEQ ID NO: 79604 - protein, 36 aa, Artificial Sequence; identical to SEQ ID NO: 29836
  Cyclic GFR-binding peptide
  MOD_RES (4), (36): Xaa is C or S

SEQ ID NO: 79605 - protein, 22 aa, Artificial Sequence
  Cyclic GFR-binding peptide
QLRSVKVAKVDDSSNVIKEVQV

SEQ ID NO: 79606 - protein, 27 aa, Artificial Sequence
  Cyclic GFR-binding peptide
PTELRSVKMAKVDENEKVVKEVQVDMV

SEQ ID NO: 79607 - protein, 28 aa, Artificial Sequence
  Cyclic GFR-binding peptide
  MOD_RES (1), (1): Xaa is C or S
XVSQDLSNITIQIMIGKTPKIIGEMSMI

SEQ ID NO: 79608 - protein, 31 aa, Artificial Sequence
  Cyclic GFR-binding peptide
  MOD_RES (4), (5): Xaa is C or S
PKAXXVPTELRSVKMAKVDEYDKVVKEVQVE

SEQ ID NO: 79609 - protein, 37 aa, Artificial Sequence; identical to SEQ ID NO: 29841
  Cyclic GFR-binding peptide
  MOD_RES (6), (7): Xaa is C or S

SEQ ID NO: 79610 - protein, 28 aa, Artificial Sequence
  Cyclic GFR-binding peptide
KLRPVQVRKIDDSSNVIKKATVNMVVRS

SEQ ID NO: 79611 - protein, 26 aa, Artificial Sequence
  Cyclic GFR-binding peptide
  MOD_RES (1), (1): Xaa is C or S
XVPTELRSVKMAKVDEYDKVVKEVQV

SEQ ID NO: 79612 - protein, 37 aa, Artificial Sequence; identical to SEQ ID NO: 29846
  Cyclic GFR-binding peptide
  MOD_RES (1), (35), (37): Xaa is C or S

SEQ ID NO: 79613 - protein, 41 aa, Artificial Sequence; identical to SEQ ID NO: 29848
  Cyclic GFR-binding peptide
  MOD_RES (7), (39), (41): Xaa is C or S

SEQ ID NO: 79614 - protein, 36 aa, Artificial Sequence; identical to SEQ ID NO: 29849
  Cyclic GFR-binding peptide
  MOD_RES (5), (6): Xaa is C or S

SEQ ID NO: 79615 - protein, 26 aa, Artificial Sequence
  Cyclic GFR-binding peptide
PQDLRSVKIAKVVGRTPKVKEVQVMV

SEQ ID NO: 79616 - protein, 28 aa, Artificial Sequence
  Cyclic GFR-binding peptide
VHHEPLTVLYYEYVRKKPKLEQLSNRLE

SEQ ID NO: 79617 - protein, 40 aa, Artificial Sequence; identical to SEQ ID NO: 29851
  Cyclic GFR-binding peptide
  MOD_RES (5), (5): Xaa is C or S

SEQ ID NO: 79618 - protein, 23 aa, Artificial Sequence
  Cyclic GFR-binding peptide
TELSNITMQIMDENEKVVIGEMS

SEQ ID NO: 79619 - protein, 33 aa, Artificial Sequence
  Cyclic GFR-binding peptide
  MOD_RES (4), (4): Xaa is C or S
SVKXQPSRVHHEPLPVVYYEYVRKKPKLEQLSN

SEQ ID NO: 79620 - protein, 37 aa, Artificial Sequence; identical to SEQ ID NO: 29855
  Cyclic GFR-binding peptide
  MOD_RES (35), (37): Xaa is C or S

SEQ ID NO: 79621 - protein, 34 aa, Artificial Sequence; identical to SEQ ID NO: 29857
  Cyclic GFR-binding peptide
  MOD_RES (2), (3): Xaa is C or S

SEQ ID NO: 79622 - protein, 32 aa, Artificial Sequence; identical to SEQ ID NO: 29860
  Cyclic GFR-binding peptide
  MOD_RES (1), (1): Xaa is C or S

SEQ ID NO: 79623 - protein, 34 aa, Artificial Sequence; identical to SEQ ID NO: 29864
  Cyclic GFR-binding peptide
  MOD_RES (2), (3): Xaa is C or S

SEQ ID NO: 79624 - protein, 28 aa, Artificial Sequence
  Cyclic GFR-binding peptide
RVHHEPLPVVYYEYVRKKPKLEQLSNRL

SEQ ID NO: 79625 - protein, 27 aa, Artificial Sequence
  Cyclic GFR-binding peptide
VPQALRPVQIRKIVGRKPKVKKATVMI

SEQ ID NO: 79626 - protein, 24 aa, Artificial Sequence
  Cyclic GFR-binding peptide
ELSNITMQIMDEYDKVVIGEMSEM

SEQ ID NO: 79627 - protein, 35 aa, Artificial Sequence; identical to SEQ ID NO: 29867
  Cyclic GFR-binding peptide
  MOD_RES (1), (32), (34): Xaa is C or S

SEQ ID NO: 79628 - protein, 25 aa, Artificial Sequence
  Cyclic GFR-binding peptide
EPLTMLYYRIKPHQGQHEQLSNFLQ

SEQ ID NO: 79629 - protein, 32 aa, Artificial Sequence
  Cyclic GFR-binding peptide
  MOD_RES (6), (7): Xaa is C or S
ASASPXXVPQDLRPVQIRKIVGRTPKVKKATV

SEQ ID NO: 79630 - protein, 35 aa, Artificial Sequence
  Cyclic GFR-binding peptide
  MOD_RES (6), (7): Xaa is C or S
ASASPXXVPQDLRPVQIRKIVGRTPKVKKATVMVV

SEQ ID NO: 79631 - protein, 36 aa, Artificial Sequence; identical to SEQ ID NO: 29874
  Cyclic GFR-binding peptide
  MOD_RES (3), (4), (36): Xaa is C or S

SEQ ID NO: 79632 - protein, 39 aa, Artificial Sequence; identical to SEQ ID NO: 29875
  Cyclic GFR-binding peptide
  MOD_RES (4), (5), (36), (38): Xaa is C or S

SEQ ID NO: 79633 - protein, 29 aa, Artificial Sequence
  Cyclic GFR-binding peptide
  MOD_RES (29), (29): Xaa is C or S
ELSNITMQIMDEYDKVVIGEMSEMVVEGX

SEQ ID NO: 79634 - protein, 36 aa, Artificial Sequence; identical to SEQ ID NO: 29882
  Cyclic GFR-binding peptide
  MOD_RES (3), (4), (35): Xaa is C or S

SEQ ID NO: 79635 - protein, 35 aa, Artificial Sequence; identical to SEQ ID NO: 29885
  Cyclic GFR-binding peptide
  MOD_RES (1), (33), (35): Xaa is C or S

SEQ ID NO: 79636 - protein, 38 aa, Artificial Sequence; identical to SEQ ID NO: 29887
  Cyclic GFR-binding peptide
  MOD_RES (4), (5), (37): Xaa is C or S

SEQ ID NO: 79637 - protein, 37 aa, Artificial Sequence; identical to SEQ ID NO: 29890
  Cyclic GFR-binding peptide
  MOD_RES (5), (6): Xaa is C or S

SEQ ID NO: 79638 - protein, 39 aa, Artificial Sequence; identical to SEQ ID NO: 29892
  Cyclic GFR-binding peptide
  MOD_RES (5), (37), (39): Xaa is C or S

SEQ ID NO: 79639 - protein, 27 aa, Artificial Sequence
  Cyclic GFR-binding peptide
QDLSNITIQIMIGKTPKIIGEMSMIVK

SEQ ID NO: 79640 - protein, 35 aa, Artificial Sequence; identical to SEQ ID NO: 29894
  Cyclic GFR-binding peptide
  MOD_RES (2), (3), (35): Xaa is C or S

SEQ ID NO: 79641 - protein, 35 aa, Artificial Sequence; identical to SEQ ID NO: 29896
  Cyclic GFR-binding peptide
  MOD_RES (35), (35): Xaa is C or S

SEQ ID NO: 79642 - protein, 29 aa, Artificial Sequence
  Cyclic GFR-binding peptide
  MOD_RES (28), (28): Xaa is C or S
LRSVKVAKVDDSSNVIKEVQVNMVVRAXG

SEQ ID NO: 79643 - protein, 28 aa, Artificial Sequence
  Cyclic GFR-binding peptide
APTKLRPVQVRKIDDSSNVIKKATVNMV

SEQ ID NO: 79644 - protein, 29 aa, Artificial Sequence
  Cyclic GFR-binding peptide
  MOD_RES (26), (28): Xaa is C or S
RPVQIRKIVGRKPKVKKATVMIVRSXKXS

SEQ ID NO: 79645 - protein, 34 aa, Artificial Sequence
  Cyclic GFR-binding peptide
  MOD_RES (4), (5): Xaa is C or S
PKAXXVPTELRSVKMAKVDENEKVVKEVQVDMVV

SEQ ID NO: 79646 - protein, 37 aa, Artificial Sequence; identical to SEQ ID NO: 29902
  Cyclic GFR-binding peptide
  MOD_RES (5), (6), (37): Xaa is C or S

SEQ ID NO: 79647 - protein, 25 aa, Artificial Sequence
  Cyclic GFR-binding peptide
PTKLSNITVQIMDDSSNVIIGEMSN

SEQ ID NO: 79648 - protein, 32 aa, Artificial Sequence; identical to SEQ ID NO: 29905
  Cyclic GFR-binding peptide
  MOD_RES (1), (32): Xaa is C or S

SEQ ID NO: 79649 - protein, 37 aa, Artificial Sequence; identical to SEQ ID NO: 29906
  Cyclic GFR-binding peptide
  MOD_RES (34), (36): Xaa is C or S

SEQ ID NO: 79650 - protein, 37 aa, Artificial Sequence; identical to SEQ ID NO: 29908
  Cyclic GFR-binding peptide
  MOD_RES (1), (2), (34), (36): Xaa is C or S

SEQ ID NO: 79651 - protein, 30 aa, Artificial Sequence
  Cyclic GFR-binding peptide
  MOD_RES (29), (29): Xaa is C or S
ELRSVKMAKVDENEKVVKEVQVDMVVEGXG

SEQ ID NO: 79652 - protein, 42 aa, Artificial Sequence; identical to SEQ ID NO: 29912
  Cyclic GFR-binding peptide
  MOD_RES (5), (42): Xaa is C or S

SEQ ID NO: 79653 - protein, 26 aa, Artificial Sequence
  Cyclic GFR-binding peptide
  MOD_RES (26), (26): Xaa is C or S
SNITIQIMVGRKPKVIGEMSMIVRSX

SEQ ID NO: 79654 - protein, 29 aa, Artificial Sequence
  Cyclic GFR-binding peptide
  MOD_RES (1), (1): Xaa is C or S
XAPTQLRSVKVAKVDDSSNVIKEVQVNMV

SEQ ID NO: 79655 - protein, 28 aa, Artificial Sequence
  Cyclic GFR-binding peptide
TEEEPLTMLYYRIKPHQGQHEQLSNFLQ

SEQ ID NO: 79656 - protein, 33 aa, Artificial Sequence
  Cyclic GFR-binding peptide
  MOD_RES (30), (32): Xaa is C or S
TELRPVQMRKIDENEKVVKKATVDMVVEGXGXR

SEQ ID NO: 79657 - protein, 24 aa, Artificial Sequence
  Cyclic GFR-binding peptide
DLRPVQIRKIIGKTPKIKKATVMI

SEQ ID NO: 79658 - protein, 33 aa, Artificial Sequence
  Cyclic GFR-binding peptide
  MOD_RES (30), (32): Xaa is C or S
EEPLPMVYYRIKPHQGQHEQLSNFLQHNKXEXR

SEQ ID NO: 79659 - protein, 29 aa, Artificial Sequence
  Cyclic GFR-binding peptide
QLEPLPVVYYEIVRKKPIFEQLSNTLEDH

SEQ ID NO: 79660 - protein, 29 aa, Artificial Sequence
  Cyclic GFR-binding peptide
VHHEPLTVLYYEYVRKKPKLEQLSNRLEE

SEQ ID NO: 79661 - protein, 34 aa, Artificial Sequence
  Cyclic GFR-binding peptide
  MOD_RES (6), (6): Xaa is C or S
DEGLEXVPTEEEPLTMLYYRIKPHQGQHEQLSNF

SEQ ID NO: 79662 - protein, 37 aa, Artificial Sequence; identical to SEQ ID NO: 29923
  Cyclic GFR-binding peptide
  MOD_RES (2), (3), (34), (36): Xaa is C or S

SEQ ID NO: 79663 - protein, 21 aa, Artificial Sequence
  Cyclic GFR-binding peptide
LRPVQIRKIVGRTPKVKKATV

SEQ ID NO: 79664 - protein, 33 aa, Artificial Sequence
  Cyclic GFR-binding peptide
  MOD_RES (4), (4): Xaa is C or S
GLEXVPTEEEPLPMVYYRIKPHQGQHEQLSNFL

SEQ ID NO: 79665 - protein, 30 aa, Artificial Sequence
  Cyclic GFR-binding peptide
  MOD_RES (2), (3): Xaa is C or S
AXXVPTELRPVQMRKIDEYDKVVKKATVEM

SEQ ID NO: 79666 - protein, 32 aa, Artificial Sequence
  Cyclic GFR-binding peptide
  MOD_RES (6), (7): Xaa is C or S
ASASPXXVSQDLSNITIQIMIGKTPKIIGEMS

SEQ ID NO: 79667 - protein, 31 aa, Artificial Sequence; identical to SEQ ID NO: 29928
  Cyclic GFR-binding peptide
  MOD_RES (1), (1): Xaa is C or S

SEQ ID NO: 79668 - protein, 28 aa, Artificial Sequence
  Cyclic GFR-binding peptide
  MOD_RES (2), (2): Xaa is C or S
TXAPTKLRPVQVRKIDDSSNVIKKATVN

SEQ ID NO: 79669 - protein, 37 aa, Artificial Sequence; identical to SEQ ID NO: 29930
  Cyclic GFR-binding peptide
  MOD_RES (5), (6), (37): Xaa is C or S

SEQ ID NO: 79670 - protein, 32 aa, Artificial Sequence
  Cyclic GFR-binding peptide
  MOD_RES (6), (7): Xaa is C or S
SIPKAXXVPTELRPVQMRKIDEYDKVVKKATV

SEQ ID NO: 79671 - protein, 29 aa, Artificial Sequence
  Cyclic GFR-binding peptide
  MOD_RES (27), (29): Xaa is C or S
RSVKMAKVDEYDKVVKEVQVEMVVEGXGX

SEQ ID NO: 79672 - protein, 32 aa, Artificial Sequence
  Cyclic GFR-binding peptide
  MOD_RES (4), (5): Xaa is C or S
ASPXXVSQDLRPVQIRKIIGKTPKIKKATVMI

SEQ ID NO: 79673 - protein, 36 aa, Artificial Sequence
  Cyclic GFR-binding peptide
  MOD_RES (4), (4): Xaa is C or S
SVKXQPSRVHHEPLPVVYYEYVRKKPKLEQLSNRLE

SEQ ID NO: 79674 - protein, 44 aa, Artificial Sequence; identical to SEQ ID NO: 29939
  Cyclic GFR-binding peptide
  MOD_RES (5), (42), (44): Xaa is C or S

SEQ ID NO: 79675 - protein, 29 aa, Artificial Sequence
  Cyclic GFR-binding peptide
  MOD_RES (3), (4): Xaa is C or S
KPXXAPTQLRPVQVRKIDDSSNVIKKATV

SEQ ID NO: 79676 - protein, 30 aa, Artificial Sequence
  Cyclic GFR-binding peptide
  MOD_RES (1), (2): Xaa is C or S
XXVPTELRSVKMAKVDENEKVVKEVQVDMV

SEQ ID NO: 79677 - protein, 39 aa, Artificial Sequence; identical to SEQ ID NO: 29944
  Cyclic GFR-binding peptide
  MOD_RES (3), (4), (36), (38): Xaa is C or S

SEQ ID NO: 79678 - protein, 28 aa, Artificial Sequence
  Cyclic GFR-binding peptide
EPLPVVYYEIVRKKPIFEQLSNTLEDHL

SEQ ID NO: 79679 - protein, 30 aa, Artificial Sequence
  Cyclic GFR-binding peptide
  MOD_RES (1), (2): Xaa is C or S
XXVPQDLRSVKIAKVVGRTPKVKEVQVMVV

SEQ ID NO: 79680 - protein, 28 aa, Artificial Sequence
  Cyclic GFR-binding peptide
PQDLRPVQIRKIVGRTPKVKKATVMVVK

SEQ ID NO: 79681 - protein, 32 aa, Artificial Sequence; identical to SEQ ID NO: 29950
  Cyclic GFR-binding peptide
  MOD_RES (1), (32): Xaa is C or S

SEQ ID NO: 79682 - protein, 40 aa, Artificial Sequence; identical to SEQ ID NO: 29949
  Cyclic GFR-binding peptide
  MOD_RES (2), (39): Xaa is C or S

SEQ ID NO: 79683 - protein, 25 aa, Artificial Sequence
  Cyclic GFR-binding peptide
VPTELRPVQMRKIDENEKVVKKATV

SEQ ID NO: 79684 - protein, 31 aa, Artificial Sequence
  Cyclic GFR-binding peptide
VPTEEEPLPMVYYRIKPHQGQHEQLSNFLQH

SEQ ID NO: 79685 - protein, 30 aa, Artificial Sequence
  Cyclic GFR-binding peptide
HHEPLTVLYYEYVRKKPKLEQLSNRLEEHL

SEQ ID NO: 79686 - protein, 30 aa, Artificial Sequence
  Cyclic GFR-binding peptide
PTEEEPLPMVYYRIKPHQGQHEQLSNFLQH

SEQ ID NO: 79687 - protein, 38 aa, Artificial Sequence; identical to SEQ ID NO: 29955
  Cyclic GFR-binding peptide
  MOD_RES (6), (7), (38): Xaa is C or S

SEQ ID NO: 79688 - protein, 31 aa, Artificial Sequence
  Cyclic GFR-binding peptide
  MOD_RES (31), (31): Xaa is C or S
LEPLTVLYYEIVRKKPIFEQLSNTLEDHLAX

SEQ ID NO: 79689 - protein, 31 aa, Artificial Sequence
  Cyclic GFR-binding peptide
VHHEPLTVLYYEYVRKKPKLEQLSNRLEEHL

SEQ ID NO: 79690 - protein, 32 aa, Artificial Sequence
  Cyclic GFR-binding peptide
  MOD_RES (3), (4): Xaa is C or S
KPXXAPTQLRPVQVRKIDDSSNVIKKATVNMV

SEQ ID NO: 79691 - protein, 37 aa, Artificial Sequence
  Cyclic GFR-binding peptide
  MOD_RES (4), (4): Xaa is C or S
SVKXQPSRVHHEPLPVVYYEYVRKKPKLEQLSNRLEE

SEQ ID NO: 79692 - protein, 36 aa, Artificial Sequence; identical to SEQ ID NO: 29967
  Cyclic GFR-binding peptide
  MOD_RES (3), (4), (35): Xaa is C or S

SEQ ID NO: 79693 - protein, 29 aa, Artificial Sequence
  Cyclic GFR-binding peptide
  MOD_RES (29), (29): Xaa is C or S
ELRPVQMRKIDENEKVVKKATVDMVVEGX

SEQ ID NO: 79694 - protein, 31 aa, Artificial Sequence
  Cyclic GFR-binding peptide
  MOD_RES (4), (5): Xaa is C or S
PKPXXAPTKLSNITVQIMDDSSNVIIGEMSN

SEQ ID NO: 79695 - protein, 30 aa, Artificial Sequence
  Cyclic GFR-binding peptide
PTKLSNITVQIMDDSSNVIIGEMSNMVVRS

SEQ ID NO: 79696 - protein, 31 aa, Artificial Sequence; identical to SEQ ID NO: 29974
  Cyclic GFR-binding peptide

SEQ ID NO: 79697 - protein, 30 aa, Artificial Sequence
  Cyclic GFR-binding peptide
  MOD_RES (4), (5): Xaa is C or S
PKAXXVPTELRSVKMAKVDENEKVVKEVQV

SEQ ID NO: 79698 - protein, 28 aa, Artificial Sequence
  Cyclic GFR-binding peptide
  MOD_RES (28), (28): Xaa is C or S
DLSNITIQIMIGKTPKIIGEMSMIVKSX

SEQ ID NO: 79699 - protein, 32 aa, Artificial Sequence
  Cyclic GFR-binding peptide
  MOD_RES (2), (3): Xaa is C or S
PXXAPTQLRSVKVAKVDDSSNVIKEVQVNMVV

SEQ ID NO: 79700 - protein, 28 aa, Artificial Sequence
  Cyclic GFR-binding peptide
TQVQLEPLPVVYYEIVRKKPIFEQLSNT

SEQ ID NO: 79701 - protein, 32 aa, Artificial Sequence
  Cyclic GFR-binding peptide
  MOD_RES (6), (7): Xaa is C or S
YVPKPXXAPTKLRSVKVAKVDDSSNVIKEVQV

SEQ ID NO: 79702 - protein, 37 aa, Artificial Sequence; identical to SEQ ID NO: 29983
  Cyclic GFR-binding peptide
  MOD_RES (1), (2), (34), (36): Xaa is C or S

SEQ ID NO: 79703 - protein, 40 aa, Artificial Sequence; identical to SEQ ID NO: 29987
  Cyclic GFR-binding peptide
  MOD_RES (2), (39): Xaa is C or S

SEQ ID NO: 79704 - protein, 24 aa, Artificial Sequence
  Cyclic GFR-binding peptide
RPVQVRKIDDSSNVIKKATVNMVV

SEQ ID NO: 79705 - protein, 40 aa, Artificial Sequence; identical to SEQ ID NO: 29989
  Cyclic GFR-binding peptide
  MOD_RES (6), (7), (39): Xaa is C or S

SEQ ID NO: 79706 - protein, 38 aa, Artificial Sequence; identical to SEQ ID NO: 29990
  Cyclic GFR-binding peptide
  MOD_RES (2), (3), (35), (37): Xaa is C or S

SEQ ID NO: 79707 - protein, 28 aa, Artificial Sequence
  Cyclic GFR-binding peptide
  MOD_RES (1), (2): Xaa is C or S
XXVPQDLRPVQIRKIVGRTPKVKKATVM

SEQ ID NO: 79708 - protein, 26 aa, Artificial Sequence
  Cyclic GFR-binding peptide
LSNITIQIMVGRTPKVIGEMSMVVKS

SEQ ID NO: 79709 - protein, 32 aa, Artificial Sequence
  Cyclic GFR-binding peptide
  MOD_RES (5), (5): Xaa is C or S
EGLEXVPTEEEPLPMVYYRIKPHQGQHEQLSN

SEQ ID NO: 79710 - protein, 35 aa, Artificial Sequence; identical to SEQ ID NO: 29994
  Cyclic GFR-binding peptide
  MOD_RES (1), (32), (34): Xaa is C or S

SEQ ID NO: 79711 - protein, 35 aa, Artificial Sequence
  Cyclic GFR-binding peptide
  MOD_RES (7), (7): Xaa is C or S
HVTKPTXAPTKLRPVQVRKIDDSSNVIKKATVNMV

SEQ ID NO: 79712 - protein, 25 aa, Artificial Sequence
  Cyclic GFR-binding peptide
LSNITIQIMIGKTPKIIGEMSMIVK

SEQ ID NO: 79713 - protein, 31 aa, Artificial Sequence
  Cyclic GFR-binding peptide
  MOD_RES (3), (4): Xaa is C or S
KPXXAPTQLRSVKVAKVDDSSNVIKEVQVNM

SEQ ID NO: 79714 - protein, 32 aa, Artificial Sequence
  Cyclic GFR-binding peptide
  MOD_RES (3), (4): Xaa is C or S
SPXXVPQDLRPVQIRKIVGRTPKVKKATVMVV

SEQ ID NO: 79715 - protein, 37 aa, Artificial Sequence; identical to SEQ ID NO: 29995
  Cyclic GFR-binding peptide
  MOD_RES (4), (5), (36): Xaa is C or S

SEQ ID NO: 79716 - protein, 33 aa, Artificial Sequence
  Cyclic GFR-binding peptide
  MOD_RES (4), (4): Xaa is C or S
KPTXAPTKLRSVKVAKVDDSSNVIKEVQVNMVV

SEQ ID NO: 79717 - protein, 31 aa, Artificial Sequence
  Cyclic GFR-binding peptide
  MOD_RES (30), (30): Xaa is C or S
TELRPVQMRKIDENEKVVKKATVDMVVEGXG

SEQ ID NO: 79718 - protein, 43 aa, Artificial Sequence; identical to SEQ ID NO: 30004
  Cyclic GFR-binding peptide
  MOD_RES (4), (41), (43): Xaa is C or S

SEQ ID NO: 79719 - protein, 23 aa, Artificial Sequence
  Cyclic GFR-binding peptide
RPVQMRKIDEYDKVVKKATVEMV

SEQ ID NO: 79720 - protein, 31 aa, Artificial Sequence
  Cyclic GFR-binding peptide
PTQVQLEPLPVVYYEIVRKKPIFEQLSNTLE

SEQ ID NO: 79721 - protein, 38 aa, Artificial Sequence; identical to SEQ ID NO: 30007
  Cyclic GFR-binding peptide
  MOD_RES (5), (6), (38): Xaa is C or S

SEQ ID NO: 79722 - protein, 39 aa, Artificial Sequence; identical to SEQ ID NO: 30009
  Cyclic GFR-binding peptide
  MOD_RES (4), (5), (37), (39): Xaa is C or S

SEQ ID NO: 79723 - protein, 31 aa, Artificial Sequence
  Cyclic GFR-binding peptide
  MOD_RES (31), (31): Xaa is C or S
PTQLSNITVQIMDDSSNVIIGEMSNMVVRAX

SEQ ID NO: 79724 - protein, 30 aa, Artificial Sequence
  Cyclic GFR-binding peptide
  MOD_RES (27), (29): Xaa is C or S
SNITVQIMDDSSNVIIGEMSNMVVRAXGXH

SEQ ID NO: 79725 - protein, 26 aa, Artificial Sequence
  Cyclic GFR-binding peptide
PTELSNITMQIMDENEKVVIGEMSDM

SEQ ID NO: 79726 - protein, 31 aa, Artificial Sequence
  Cyclic GFR-binding peptide
  MOD_RES (31), (31): Xaa is C or S
PTELSNITMQIMDEYDKVVIGEMSEMVVEGX

SEQ ID NO: 79727 - protein, 29 aa, Artificial Sequence
  Cyclic GFR-binding peptide
  MOD_RES (27), (29): Xaa is C or S
LRPVQIRKIIGKTPKIKKATVMIVKSXKX

SEQ ID NO: 79728 - protein, 32 aa, Artificial Sequence
  Cyclic GFR-binding peptide
  MOD_RES (30), (32): Xaa is C or S
TELSNITMQIMDEYDKVVIGEMSEMVVEGXGX

SEQ ID NO: 79729 - protein, 37 aa, Artificial Sequence; identical to SEQ ID NO: 30014
  Cyclic GFR-binding peptide
  MOD_RES (3), (4), (36): Xaa is C or S

SEQ ID NO: 79730 - protein, 39 aa, Artificial Sequence; identical to SEQ ID NO: 30015
  Cyclic GFR-binding peptide
  MOD_RES (5), (6), (37), (39): Xaa is C or S

SEQ ID NO: 79731 - protein, 32 aa, Artificial Sequence
  Cyclic GFR-binding peptide
  MOD_RES (30), (32): Xaa is C or S
PQDLRSVKIAKVVGRTPKVKEVQVMVVKSXKX

SEQ ID NO: 79732 - protein, 21 aa, Artificial Sequence
  Cyclic GFR-binding peptide
RPVQMRKIDENEKVVKKATVD

SEQ ID NO: 79733 - protein, 32 aa, Artificial Sequence
  Cyclic GFR-binding peptide
  MOD_RES (4), (5): Xaa is C or S
AAPXXVPQALRPVQIRKIVGRKPKVKKATVMI

SEQ ID NO: 79734 - protein, 30 aa, Artificial Sequence
  Cyclic GFR-binding peptide
PTQLRPVQVRKIDDSSNVIKKATVNMVVRA

SEQ ID NO: 79735 - protein, 36 aa, Artificial Sequence
  Cyclic GFR-binding peptide
  MOD_RES (6), (7): Xaa is C or S
TVPKPXXAPTQLRSVKVAKVDDSSNVIKEVQVNMVV

SEQ ID NO: 79736 - protein, 38 aa, Artificial Sequence
  Cyclic GFR-binding peptide
  MOD_RES (7), (7): Xaa is C or S
NDEGLEXVPTEEEPLPMVYYRIKPHQGQHEQLSNFLQH

SEQ ID NO: 79737 - protein, 24 aa, Artificial Sequence
  Cyclic GFR-binding peptide
RSVKIAKVVGRKPKVKEVQVMIVR

SEQ ID NO: 79738 - protein, 36 aa, Artificial Sequence; identical to SEQ ID NO: 30020
  Cyclic GFR-binding peptide
  MOD_RES (6), (6): Xaa is C or S

SEQ ID NO: 79739 - protein, 24 aa, Artificial Sequence
  Cyclic GFR-binding peptide
LSNITIQIMIGKTPKIIGEMSMIV

SEQ ID NO: 79740 - protein, 33 aa, Artificial Sequence
  Cyclic GFR-binding peptide
  MOD_RES (6), (7): Xaa is C or S
KIPKAXXVPTELRSVKMAKVDENEKVVKEVQVD

SEQ ID NO: 79741 - protein, 23 aa, Artificial Sequence
  Cyclic GFR-binding peptide
ALSNITIQIMVGRKPKVIGEMSM

SEQ ID NO: 79742 - protein, 31 aa, Artificial Sequence
  Cyclic GFR-binding peptide
  MOD_RES (30), (30): Xaa is C or S
TELRSVKMAKVDEYDKVVKEVQVEMVVEGXG

SEQ ID NO: 79743 - protein, 36 aa, Artificial Sequence; identical to SEQ ID NO: 30024
  Cyclic GFR-binding peptide
  MOD_RES (5), (6): Xaa is C or S

SEQ ID NO: 79744 - protein, 28 aa, Artificial Sequence
  Cyclic GFR-binding peptide
TELSNITMQIMDENEKVVIGEMSDMVVE

SEQ ID NO: 79745 - protein, 25 aa, Artificial Sequence
  Cyclic GFR-binding peptide
PTQLRSVKVAKVDDSSNVIKEVQVN

SEQ ID NO: 79746 - protein, 35 aa, Artificial Sequence; identical to SEQ ID NO: 30025
  Cyclic GFR-binding peptide
  MOD_RES (1), (35): Xaa is C or S

SEQ ID NO: 79747 - protein, 35 aa, Artificial Sequence
  Cyclic GFR-binding peptide
  MOD_RES (6), (7): Xaa is C or S
ASASPXXVSQDLRSVKIAKVIGKTPKIKEVQVMIV

SEQ ID NO: 79748 - protein, 35 aa, Artificial Sequence
  Cyclic GFR-binding peptide
  MOD_RES (7), (7): Xaa is C or S
NDEGLEXVPTEEEPLTMLYYRIKPHQGQHEQLSNF

SEQ ID NO: 79749 - protein, 40 aa, Artificial Sequence; identical to SEQ ID NO: 30027
  Cyclic GFR-binding peptide
  MOD_RES (5), (6), (37), (39): Xaa is C or S

SEQ ID NO: 79750 - protein, 27 aa, Artificial Sequence
  Cyclic GFR-binding peptide
  MOD_RES (27), (27): Xaa is C or S
LRPVQIRKIIGKTPKIKKATVMIVKSX

SEQ ID NO: 79751 - protein, 42 aa, Artificial Sequence; identical to SEQ ID NO: 30030
  Cyclic GFR-binding peptide
  MOD_RES (2), (39), (41): Xaa is C or S

SEQ ID NO: 79752 - protein, 29 aa, Artificial Sequence
  Cyclic GFR-binding peptide
SNITMQIMDEYDKVVIGEMSAAAAAAAAA

SEQ ID NO: 79753 - protein, 27 aa, Artificial Sequence
  Cyclic GFR-binding peptide
ELRPVQMRKIDENEKVVKKATVDMVVE

SEQ ID NO: 79754 - protein, 33 aa, Artificial Sequence; identical to SEQ ID NO: 30032
  Cyclic GFR-binding peptide
  MOD_RES (31), (33): Xaa is C or S

SEQ ID NO: 79755 - protein, 26 aa, Artificial Sequence
  Cyclic GFR-binding peptide
VPQDLRSVKIAKVVGRTPKVKEVQVM

SEQ ID NO: 79756 - protein, 35 aa, Artificial Sequence; identical to SEQ ID NO: 30038
  Cyclic GFR-binding peptide
  MOD_RES (3), (35): Xaa is C or S

SEQ ID NO: 79757 - protein, 34 aa, Artificial Sequence; identical to SEQ ID NO: 30040
  Cyclic GFR-binding peptide
  MOD_RES (2), (2): Xaa is C or S

SEQ ID NO: 79758 - protein, 29 aa, Artificial Sequence
  Cyclic GFR-binding peptide
PTEEEPLPMVYYRIKPHQGQHEQLSNFLQ

SEQ ID NO: 79759 - protein, 34 aa, Artificial Sequence
  Cyclic GFR-binding peptide
  MOD_RES (4), (4): Xaa is C or S
GLEXVPTEEEPLTMLYYRIKPHQGQHEQLSNFLQ

SEQ ID NO: 79760 - protein, 33 aa, Artificial Sequence
  Cyclic GFR-binding peptide
  MOD_RES (30), (32): Xaa is C or S
PQDLRPVQIRKIVGRTPKVKKATVMVVKSXKXS

SEQ ID NO: 79761 - protein, 26 aa, Artificial Sequence
  Cyclic GFR-binding peptide
SQDLRSVKIAKVIGKTPKIKEVQVMI

SEQ ID NO: 79762 - protein, 29 aa, Artificial Sequence
  Cyclic GFR-binding peptide
LEPLTVLYYEIVRKKPIFEQLSNTLEDHL

SEQ ID NO: 79763 - protein, 20 aa, Artificial Sequence
  Cyclic GFR-binding peptide
SNITMQIMDEYDKVVIGEMS

SEQ ID NO: 79764 - protein, 30 aa, Artificial Sequence
  Cyclic GFR-binding peptide
SRVHHEPLTVLYYEYVRKKPKLEQLSNRLE

SEQ ID NO: 79765 - protein, 33 aa, Artificial Sequence
  Cyclic GFR-binding peptide
  MOD_RES (30), (32): Xaa is C or S
EEPLTMLYYRIKPHQGQHEQLSNFLQHNKXEXR

SEQ ID NO: 79766 - protein, 32 aa, Artificial Sequence; identical to SEQ ID NO: 30044
  Cyclic GFR-binding peptide
  MOD_RES (1), (1): Xaa is C or S

SEQ ID NO: 79767 - protein, 32 aa, Artificial Sequence
  Cyclic GFR-binding peptide
  MOD_RES (3), (4): Xaa is C or S
KAXXVPTELRSVKMAKVDEYDKVVKEVQVEMV

SEQ ID NO: 79768 - protein, 31 aa, Artificial Sequence
  Cyclic GFR-binding peptide
QLEPLPVVYYEIVRKKPIFEQLSNTLEDHLA

SEQ ID NO: 79769 - protein, 32 aa, Artificial Sequence
  Cyclic GFR-binding peptide
  MOD_RES (29), (31): Xaa is C or S
KLRPVQVRKIDDSSNVIKKATVNMVVRSXGXH

SEQ ID NO: 79770 - protein, 31 aa, Artificial Sequence
  Cyclic GFR-binding peptide
  MOD_RES (28), (30): Xaa is C or S
LRPVQVRKIDDSSNVIKKATVNMVVRAXGXH

SEQ ID NO: 79771 - protein, 37 aa, Artificial Sequence
  Cyclic GFR-binding peptide
  MOD_RES (4), (4): Xaa is C or S
SVKXQPSRVHHEPLTVLYYEYVRKKPKLEQLSNRLEE

SEQ ID NO: 79772 - protein, 30 aa, Artificial Sequence
  Cyclic GFR-binding peptide
PTQLRSVKVAKVDDSSNVIKEVQVNMVVRA

SEQ ID NO: 79773 - protein, 35 aa, Artificial Sequence
  Cyclic GFR-binding peptide
  MOD_RES (5), (6): Xaa is C or S
SASPXXVPQDLRSVKIAKVVGRTPKVKEVQVMVVK

SEQ ID NO: 79774 - protein, 31 aa, Artificial Sequence
  Cyclic GFR-binding peptide
  MOD_RES (30), (30): Xaa is C or S
TQLRPVQVRKIDDSSNVIKKATVNMVVRAXG

SEQ ID NO: 79775 - protein, 29 aa, Artificial Sequence
  Cyclic GFR-binding peptide
PQDLRSVKIAKVVGRTPKVKEVQVMVVKS

SEQ ID NO: 79776 - protein, 32 aa, Artificial Sequence; identical to SEQ ID NO: 30055
  Cyclic GFR-binding peptide
  MOD_RES (1), (2): Xaa is C or S

SEQ ID NO: 79777 - protein, 39 aa, Artificial Sequence; identical to SEQ ID NO: 30054
  Cyclic GFR-binding peptide
  MOD_RES (5), (6), (38): Xaa is C or S

SEQ ID NO: 79778 - protein, 23 aa, Artificial Sequence
  Cyclic GFR-binding peptide
QDLSNITIQIMIGKTPKIIGEMS

SEQ ID NO: 79779 - protein, 29 aa, Artificial Sequence
  Cyclic GFR-binding peptide
VPTELRSVKMAKVDENEKVVKEVQVDMVV

SEQ ID NO: 79780 - protein, 24 aa, Artificial Sequence
  Cyclic GFR-binding peptide
QLRSVKVAKVDDSSNVIKEVQVNM

SEQ ID NO: 79781 - protein, 37 aa, Artificial Sequence; identical to SEQ ID NO: 30061
  Cyclic GFR-binding peptide
  MOD_RES (6), (7): Xaa is C or S

SEQ ID NO: 79782 - protein, 35 aa, Artificial Sequence
  Cyclic GFR-binding peptide
  MOD_RES (5), (5): Xaa is C or S
EGLEXVPTEEEPLTMLYYRIKPHQGQHEQLSNFLQ

SEQ ID NO: 79783 - protein, 32 aa, Artificial Sequence
  Cyclic GFR-binding peptide
  MOD_RES (6), (7): Xaa is C or S
SIPKAXXVPTELRSVKMAKVDEYDKVVKEVQV

SEQ ID NO: 79784 - protein, 34 aa, Artificial Sequence
  Cyclic GFR-binding peptide
  MOD_RES (31), (33): Xaa is C or S
PTQLRSVKVAKVDDSSNVIKEVQVNMVVRAXGXH

SEQ ID NO: 79785 - protein, 32 aa, Artificial Sequence
  Cyclic GFR-binding peptide
  MOD_RES (4), (5): Xaa is C or S
ASPXXVPQDLRPVQIRKIVGRTPKVKKATVMV

SEQ ID NO: 79786 - protein, 37 aa, Artificial Sequence; identical to SEQ ID NO: 30065
  Cyclic GFR-binding peptide
  MOD_RES (6), (7): Xaa is C or S

SEQ ID NO: 79787 - protein, 32 aa, Artificial Sequence; identical to SEQ ID NO: 30066
  Cyclic GFR-binding peptide
  MOD_RES (32), (32): Xaa is C or S

SEQ ID NO: 79788 - protein, 32 aa, Artificial Sequence; identical to SEQ ID NO: 30068
  Cyclic GFR-binding peptide
  MOD_RES (1), (32): Xaa is C or S

SEQ ID NO: 79789 - protein, 29 aa, Artificial Sequence
  Cyclic GFR-binding peptide
  MOD_RES (3), (4): Xaa is C or S
KPXXAPTQLRSVKVAKVDDSSNVIKEVQV

SEQ ID NO: 79790 - protein, 42 aa, Artificial Sequence; identical to SEQ ID NO: 30069
  Cyclic GFR-binding peptide
  MOD_RES (3), (40), (42): Xaa is C or S

SEQ ID NO: 79791 - protein, 24 aa, Artificial Sequence
  Cyclic GFR-binding peptide
LRSVKIAKVIGKTPKIKEVQVMIV

SEQ ID NO: 79792 - protein, 36 aa, Artificial Sequence; identical to SEQ ID NO: 30077
  Cyclic GFR-binding peptide
  MOD_RES (5), (6): Xaa is C or S

SEQ ID NO: 79793 - protein, 35 aa, Artificial Sequence; identical to SEQ ID NO: 30080
  Cyclic GFR-binding peptide
  MOD_RES (2), (3), (35): Xaa is C or S

SEQ ID NO: 79794 - protein, 30 aa, Artificial Sequence
  Cyclic GFR-binding peptide
  MOD_RES (30), (30): Xaa is C or S
SQDLSNITIQIMIGKTPKIIGEMSMIVKSX

SEQ ID NO: 79795 - protein, 34 aa, Artificial Sequence; identical to SEQ ID NO: 30086
  Cyclic GFR-binding peptide
  MOD_RES (3), (4): Xaa is C or S

SEQ ID NO: 79796 - protein, 23 aa, Artificial Sequence
  Cyclic GFR-binding peptide
SNITMQIMDENEKVVIGEMSDMV

SEQ ID NO: 79797 - protein, 33 aa, Artificial Sequence
  Cyclic GFR-binding peptide
  MOD_RES (30), (32): Xaa is C or S
TKLSNITVQIMDDSSNVIIGEMSNMVVRSXGXH

SEQ ID NO: 79798 - protein, 36 aa, Artificial Sequence; identical to SEQ ID NO: 30090
  Cyclic GFR-binding peptide
  MOD_RES (5), (6): Xaa is C or S

SEQ ID NO: 79799 - protein, 33 aa, Artificial Sequence; identical to SEQ ID NO: 30095
  Cyclic GFR-binding peptide
  MOD_RES (1), (32): Xaa is C or S

SEQ ID NO: 79800 - protein, 31 aa, Artificial Sequence
  Cyclic GFR-binding peptide
  MOD_RES (1), (1): Xaa is C or S
XQPSRVHHEPLPVVYYEYVRKKPKLEQLSNR

SEQ ID NO: 79801 - protein, 35 aa, Artificial Sequence; identical to SEQ ID NO: 30098
  Cyclic GFR-binding peptide
  MOD_RES (3), (4), (35): Xaa is C or S

SEQ ID NO: 79802 - protein, 34 aa, Artificial Sequence; identical to SEQ ID NO: 30100
  Cyclic GFR-binding peptide
  MOD_RES (2), (3), (34): Xaa is C or S

SEQ ID NO: 79803 - protein, 34 aa, Artificial Sequence; identical to SEQ ID NO: 30101
  Cyclic GFR-binding peptide
  MOD_RES (2), (3): Xaa is C or S

SEQ ID NO: 79804 - protein, 36 aa, Artificial Sequence; identical to SEQ ID NO: 30102
  Cyclic GFR-binding peptide
  MOD_RES (1), (2), (34), (36): Xaa is C or S

SEQ ID NO: 79805 - protein, 39 aa, Artificial Sequence; identical to SEQ ID NO: 30104
  Cyclic GFR-binding peptide
  MOD_RES (3), (3): Xaa is C or S

SEQ ID NO: 79806 - protein, 27 aa, Artificial Sequence
  Cyclic GFR-binding peptide
VHHEPLTVLYYEYVRKKPKLEQLSNRL

SEQ ID NO: 79807 - protein, 40 aa, Artificial Sequence; identical to SEQ ID NO: 30107
  Cyclic GFR-binding peptide
  MOD_RES (2), (39): Xaa is C or S

SEQ ID NO: 79808 - protein, 23 aa, Artificial Sequence
  Cyclic GFR-binding peptide
LSNITVQIMDDSSNVIIGEMSNM

SEQ ID NO: 79809 - protein, 32 aa, Artificial Sequence
  Cyclic GFR-binding peptide
  MOD_RES (6), (7): Xaa is C or S
ASASPXXVSQDLRPVQIRKIIGKTPKIKKATV

SEQ ID NO: 79810 - protein, 25 aa, Artificial Sequence
  Cyclic GFR-binding peptide
SNITIQIMVGRTPKVIGEMSMVVKS

SEQ ID NO: 79811 - protein, 26 aa, Artificial Sequence
  Cyclic GFR-binding peptide
ELRSVKMAKVDENEKVVKEVQVDMVV

SEQ ID NO: 79812 - protein, 26 aa, Artificial Sequence
  Cyclic GFR-binding peptide
  MOD_RES (26), (26): Xaa is C or S
RSVKIAKVVGRKPKVKEVQVMIVRSX

SEQ ID NO: 79813 - protein, 25 aa, Artificial Sequence
  Cyclic GFR-binding peptide
RSVKIAKVVGRTPKVKEVQVMVVKS

SEQ ID NO: 79814 - protein, 24 aa, Artificial Sequence
  Cyclic GFR-binding peptide
PTQLSNITVQIMDDSSNVIIGEMS

SEQ ID NO: 79815 - protein, 27 aa, Artificial Sequence
  Cyclic GFR-binding peptide
TELRPVQMRKIDENEKVVKKATVDMVV

SEQ ID NO: 79816 - protein, 37 aa, Artificial Sequence; identical to SEQ ID NO: 30110
  Cyclic GFR-binding peptide
  MOD_RES (5), (6): Xaa is C or S

SEQ ID NO: 79817 - protein, 28 aa, Artificial Sequence
  Cyclic GFR-binding peptide
  MOD_RES (27), (27): Xaa is C or S
RPVQMRKIDEYDKVVKKATVEMVVEGXG

SEQ ID NO: 79818 - protein, 38 aa, Artificial Sequence; identical to SEQ ID NO: 30114
  Cyclic GFR-binding peptide
  MOD_RES (1), (38): Xaa is C or S

SEQ ID NO: 79819 - protein, 26 aa, Artificial Sequence
  Cyclic GFR-binding peptide
DLRSVKIAKVVGRTPKVKEVQVMVVK

SEQ ID NO: 79820 - protein, 25 aa, Artificial Sequence
  Cyclic GFR-binding peptide
VPTELRSVKMAKVDEYDKVVKEVQV

SEQ ID NO: 79821 - protein, 34 aa, Artificial Sequence
  Cyclic GFR-binding peptide
  MOD_RES (1), (1): Xaa is C or S
XQPSRVHHEPLPVVYYEYVRKKPKLEQLSNRLEE

SEQ ID NO: 79822 - protein, 37 aa, Artificial Sequence; identical to SEQ ID NO: 30116
  Cyclic GFR-binding peptide
  MOD_RES (6), (7): Xaa is C or S

SEQ ID NO: 79823 - protein, 37 aa, Artificial Sequence; identical to SEQ ID NO: 30119
  Cyclic GFR-binding peptide
  MOD_RES (2), (3), (34), (36): Xaa is C or S

SEQ ID NO: 79824 - protein, 34 aa, Artificial Sequence
  Cyclic GFR-binding peptide
  MOD_RES (34), (34): Xaa is C or S
RVHHEPLTVLYYEYVRKKPKLEQLSNRLEEHLEX

SEQ ID NO: 79825 - protein, 38 aa, Artificial Sequence; identical to SEQ ID NO: 30123
  Cyclic GFR-binding peptide
  MOD_RES (1), (35), (37): Xaa is C or S

SEQ ID NO: 79826 - protein, 33 aa, Artificial Sequence; identical to SEQ ID NO: 30125
  Cyclic GFR-binding peptide

SEQ ID NO: 79827 - protein, 20 aa, Artificial Sequence
  Cyclic GFR-binding peptide
SNITMQIMDENEKVVIGEMS

SEQ ID NO: 79828 - protein, 29 aa, Artificial Sequence
  Cyclic GFR-binding peptide
  MOD_RES (28), (28): Xaa is C or S
LRPVQMRKIDENEKVVKKATVDMVVEGXG

SEQ ID NO: 79829 - protein, 34 aa, Artificial Sequence; identical to SEQ ID NO: 30130
  Cyclic GFR-binding peptide
  MOD_RES (32), (34): Xaa is C or S

SEQ ID NO: 79830 - protein, 30 aa, Artificial Sequence
  Cyclic GFR-binding peptide
  MOD_RES (29), (29): Xaa is C or S
QLRSVKVAKVDDSSNVIKEVQVNMVVRAXG

SEQ ID NO: 79831 - protein, 31 aa, Artificial Sequence
  Cyclic GFR-binding peptide
  MOD_RES (29), (31): Xaa is C or S
ELSNITMQIMDENEKVVIGEMSDMVVEGXGX

SEQ ID NO: 79832 - protein, 36 aa, Artificial Sequence; identical to SEQ ID NO: 30134
  Cyclic GFR-binding peptide
  MOD_RES (5), (6): Xaa is C or S

SEQ ID NO: 79833 - protein, 29 aa, Artificial Sequence
  Cyclic GFR-binding peptide
  MOD_RES (29), (29): Xaa is C or S
QDLRSVKIAKVVGRTPKVKEVQVMVVKSX

SEQ ID NO: 79834 - protein, 34 aa, Artificial Sequence; identical to SEQ ID NO: 30140
  Cyclic GFR-binding peptide
  MOD_RES (32), (34): Xaa is C or S

SEQ ID NO: 79835 - protein, 38 aa, Artificial Sequence; identical to SEQ ID NO: 30143
  Cyclic GFR-binding peptide
  MOD_RES (6), (38): Xaa is C or S

SEQ ID NO: 79836 - protein, 36 aa, Artificial Sequence; identical to SEQ ID NO: 30152
  Cyclic GFR-binding peptide
  MOD_RES (6), (6): Xaa is C or S

SEQ ID NO: 79837 - protein, 34 aa, Artificial Sequence; identical to SEQ ID NO: 30157
  Cyclic GFR-binding peptide
  MOD_RES (3), (4): Xaa is C or S

SEQ ID NO: 79838 - protein, 30 aa, Artificial Sequence
  Cyclic GFR-binding peptide
  MOD_RES (3), (4): Xaa is C or S
APXXVPQALRPVQIRKIVGRKPKVKKATVM

SEQ ID NO: 79839 - protein, 28 aa, Artificial Sequence
  Cyclic GFR-binding peptide
ELRPVQMRKIDEYDKVVKKATVEMVVEG

SEQ ID NO: 79840 - protein, 40 aa, Artificial Sequence; identical to SEQ ID NO: 30159
  Cyclic GFR-binding peptide
  MOD_RES (5), (6), (38), (40): Xaa is C or S

SEQ ID NO: 79841 - protein, 36 aa, Artificial Sequence; identical to SEQ ID NO: 30162
  Cyclic GFR-binding peptide
  MOD_RES (2), (3), (34), (36): Xaa is C or S

SEQ ID NO: 79842 - protein, 32 aa, Artificial Sequence
  Cyclic GFR-binding peptide
  MOD_RES (3), (4): Xaa is C or S
KAXXVPTELSNITMQIMDEYDKVVIGEMSEMV

SEQ ID NO: 79843 - protein, 33 aa, Artificial Sequence
  Cyclic GFR-binding peptide
  MOD_RES (30), (32): Xaa is C or S
TQLRPVQVRKIDDSSNVIKKATVNMVVRAXGXH

SEQ ID NO: 79844 - protein, 25 aa, Artificial Sequence
  Cyclic GFR-binding peptide
QDLRPVQIRKIVGRTPKVKKATVMV

SEQ ID NO: 79845 - protein, 38 aa, Artificial Sequence; identical to SEQ ID NO: 30171
  Cyclic GFR-binding peptide
  MOD_RES (6), (7), (38): Xaa is C or S

SEQ ID NO: 79846 - protein, 36 aa, Artificial Sequence; identical to SEQ ID NO: 30175
  Cyclic GFR-binding peptide
  MOD_RES (1), (2), (34), (36): Xaa is C or S

SEQ ID NO: 79847 - protein, 28 aa, Artificial Sequence
  Cyclic GFR-binding peptide
PTELSNITMQIMDENEKVVIGEMSDMVV

SEQ ID NO: 79848 - protein, 32 aa, Artificial Sequence
  Cyclic GFR-binding peptide
  MOD_RES (4), (5): Xaa is C or S
PKAXXVPTELSNITMQIMDEYDKVVIGEMSEM

SEQ ID NO: 79849 - protein, 33 aa, Artificial Sequence; identical to SEQ ID NO: 30177
  Cyclic GFR-binding peptide
  MOD_RES (2), (3): Xaa is C or S

SEQ ID NO: 79850 - protein, 34 aa, Artificial Sequence; identical to SEQ ID NO: 30179
  Cyclic GFR-binding peptide
  MOD_RES (3), (3): Xaa is C or S

SEQ ID NO: 79851 - protein, 23 aa, Artificial Sequence
  Cyclic GFR-binding peptide
RSVKMAKVDENEKVVKEVQVDMV

SEQ ID NO: 79852 - protein, 33 aa, Artificial Sequence
  Cyclic GFR-binding peptide
  MOD_RES (1), (1): Xaa is C or S
XQPSRVHHEPLPVVYYEYVRKKPKLEQLSNRLE

SEQ ID NO: 79853 - protein, 28 aa, Artificial Sequence
  Cyclic GFR-binding peptide
  MOD_RES (2), (3): Xaa is C or S
PXXVPQALRSVKIAKVVGRKPKVKEVQV

SEQ ID NO: 79854 - protein, 33 aa, Artificial Sequence; identical to SEQ ID NO: 30184
  Cyclic GFR-binding peptide
  MOD_RES (3), (3): Xaa is C or S

SEQ ID NO: 79855 - protein, 32 aa, Artificial Sequence
  Cyclic GFR-binding peptide
  MOD_RES (31), (31): Xaa is C or S
PTELSNITMQIMDENEKVVIGEMSDMVVEGXG

SEQ ID NO: 79856 - protein, 30 aa, Artificial Sequence
  Cyclic GFR-binding peptide
  MOD_RES (29), (29): Xaa is C or S
KLSNITVQIMDDSSNVIIGEMSNMVVRSXG

SEQ ID NO: 79857 - protein, 28 aa, Artificial Sequence
  Cyclic GFR-binding peptide
  MOD_RES (28), (28): Xaa is C or S
LRPVQVRKIDDSSNVIKKATVNMVVRAX

SEQ ID NO: 79858 - protein, 28 aa, Artificial Sequence
  Cyclic GFR-binding peptide
HEPLPVVYYEYVRKKPKLEQLSNRLEEH

SEQ ID NO: 79859 - protein, 32 aa, Artificial Sequence
  Cyclic GFR-binding peptide
  MOD_RES (6), (7): Xaa is C or S
ASASPXXVPQDLSNITIQIMVGRTPKVIGEMS

SEQ ID NO: 79860 - protein, 34 aa, Artificial Sequence
  Cyclic GFR-binding peptide
  MOD_RES (7), (7): Xaa is C or S
NDEGLEXVPTEEEPLTMLYYRIKPHQGQHEQLSN

SEQ ID NO: 79861 - protein, 30 aa, Artificial Sequence; identical to SEQ ID NO: 30187
  Cyclic GFR-binding peptide

SEQ ID NO: 79862 - protein, 24 aa, Artificial Sequence
  Cyclic GFR-binding peptide
QLEPLPVVYYEIVRKKPIFEQLSN

SEQ ID NO: 79863 - protein, 30 aa, Artificial Sequence
  Cyclic GFR-binding peptide
  MOD_RES (29), (29): Xaa is C or S
ELSNITMQIMDEYDKVVIGEMSEMVVEGXG

SEQ ID NO: 79864 - protein, 33 aa, Artificial Sequence; identical to SEQ ID NO: 30198
  Cyclic GFR-binding peptide
  MOD_RES (1), (32): Xaa is C or S

SEQ ID NO: 79865 - protein, 29 aa, Artificial Sequence
  Cyclic GFR-binding peptide
RPTQVQLEPLPVVYYEIVRKKPIFEQLSN

SEQ ID NO: 79866 - protein, 34 aa, Artificial Sequence; identical to SEQ ID NO: 30202
  Cyclic GFR-binding peptide
  MOD_RES (2), (3): Xaa is C or S

SEQ ID NO: 79867 - protein, 34 aa, Artificial Sequence
  Cyclic GFR-binding peptide
  MOD_RES (5), (6): Xaa is C or S
VPKPXXAPTQLRSVKVAKVDDSSNVIKEVQVNMV

SEQ ID NO: 79868 - protein, 32 aa, Artificial Sequence
  Cyclic GFR-binding peptide
  MOD_RES (6), (7): Xaa is C or S
SIPKAXXVPTELSNITMQIMDEYDKVVIGEMS

SEQ ID NO: 79869 - protein, 30 aa, Artificial Sequence
  Cyclic GFR-binding peptide
  MOD_RES (1), (2): Xaa is C or S
XXVPTELSNITMQIMDENEKVVIGEMSDMV

SEQ ID NO: 79870 - protein, 29 aa, Artificial Sequence
  Cyclic GFR-binding peptide
RPVQIRKIIGKTPKIKKATVAAAAAAAAA

SEQ ID NO: 79871 - protein, 31 aa, Artificial Sequence
  Cyclic GFR-binding peptide
  MOD_RES (2), (3): Xaa is C or S
PXXVPQALSNITIQIMVGRKPKVIGEMSMIV

SEQ ID NO: 79872 - protein, 38 aa, Artificial Sequence; identical to SEQ ID NO: 30216
  Cyclic GFR-binding peptide
  MOD_RES (2), (2): Xaa is C or S

SEQ ID NO: 79873 - protein, 39 aa, Artificial Sequence; identical to SEQ ID NO: 30221
  Cyclic GFR-binding peptide
  MOD_RES (5), (6), (38): Xaa is C or S

SEQ ID NO: 79874 - protein, 33 aa, Artificial Sequence
  Cyclic GFR-binding peptide
  MOD_RES (31), (33): Xaa is C or S
PTQLSNITVQIMDDSSNVIIGEMSNMVVRAXGX

SEQ ID NO: 79875 - protein, 30 aa, Artificial Sequence
  Cyclic GFR-binding peptide
  MOD_RES (30), (30): Xaa is C or S
TELRSVKMAKVDEYDKVVKEVQVEMVVEGX

SEQ ID NO: 79876 - protein, 31 aa, Artificial Sequence
  Cyclic GFR-binding peptide
  MOD_RES (30), (30): Xaa is C or S
PQALRSVKIAKVVGRKPKVKEVQVMIVRSXK

SEQ ID NO: 79877 - protein, 30 aa, Artificial Sequence
  Cyclic GFR-binding peptide
  MOD_RES (30), (30): Xaa is C or S
TELSNITMQIMDENEKVVIGEMSDMVVEGX

SEQ ID NO: 79878 - protein, 36 aa, Artificial Sequence; identical to SEQ ID NO: 30230
  Cyclic GFR-binding peptide
  MOD_RES (1), (33), (35): Xaa is C or S

SEQ ID NO: 79879 - protein, 30 aa, Artificial Sequence
  Cyclic GFR-binding peptide
  MOD_RES (1), (1): Xaa is C or S
XVPQDLSNITIQIMVGRTPKVIGEMSMVVK

SEQ ID NO: 79880 - protein, 34 aa, Artificial Sequence; identical to SEQ ID NO: 30235
  Cyclic GFR-binding peptide
  MOD_RES (3), (3): Xaa is C or S

SEQ ID NO: 79881 - protein, 29 aa, Artificial Sequence
  Cyclic GFR-binding peptide
  MOD_RES (29), (29): Xaa is C or S
KLRPVQVRKIDDSSNVIKKATVNMVVRSX

SEQ ID NO: 79882 - protein, 30 aa, Artificial Sequence
  Cyclic GFR-binding peptide
  MOD_RES (28), (30): Xaa is C or S
LSNITVQIMDDSSNVIIGEMSNMVVRAXGX

SEQ ID NO: 79883 - protein, 31 aa, Artificial Sequence; identical to SEQ ID NO: 30237
  Cyclic GFR-binding peptide
  MOD_RES (1), (1): Xaa is C or S

SEQ ID NO: 79884 - protein, 32 aa, Artificial Sequence
  Cyclic GFR-binding peptide
  MOD_RES (2), (3): Xaa is C or S
AXXVPTELSNITMQIMDEYDKVVIGEMSEMVV

SEQ ID NO: 79885 - protein, 31 aa, Artificial Sequence
  Cyclic GFR-binding peptide
  MOD_RES (5), (5): Xaa is C or S
TKPTXAPTKLRPVQVRKIDDSSNVIKKATVN

SEQ ID NO: 79886 - protein, 37 aa, Artificial Sequence; identical to SEQ ID NO: 30244
  Cyclic GFR-binding peptide
  MOD_RES (1), (2), (34), (36): Xaa is C or S

SEQ ID NO: 79887 - protein, 29 aa, Artificial Sequence
  Cyclic GFR-binding peptide
PQDLSNITIQIMVGRTPKVIGEMSMVVKS

SEQ ID NO: 79888 - protein, 34 aa, Artificial Sequence
  Cyclic GFR-binding peptide
  MOD_RES (4), (5): Xaa is C or S
PKPXXAPTKLRPVQVRKIDDSSNVIKKATVNMVV

SEQ ID NO: 79889 - protein, 23 aa, Artificial Sequence
  Cyclic GFR-binding peptide
EPLTMLYYRIKPHQGQHEQLSNF

SEQ ID NO: 79890 - protein, 39 aa, Artificial Sequence; identical to SEQ ID NO: 30249
  Cyclic GFR-binding peptide
  MOD_RES (6), (7), (38): Xaa is C or S

SEQ ID NO: 79891 - protein, 28 aa, Artificial Sequence
  Cyclic GFR-binding peptide
TELRSVKMAKVDENEKVVKEVQVDMVVE

SEQ ID NO: 79892 - protein, 25 aa, Artificial Sequence
  Cyclic GFR-binding peptide
QDLRSVKIAKVIGKTPKIKEVQVMI

SEQ ID NO: 79893 - protein, 38 aa, Artificial Sequence; identical to SEQ ID NO: 30255
  Cyclic GFR-binding peptide
  MOD_RES (2), (3), (35), (37): Xaa is C or S

SEQ ID NO: 79894 - protein, 33 aa, Artificial Sequence
  Cyclic GFR-binding peptide
  MOD_RES (3), (4): Xaa is C or S
SPXXVSQDLSNITIQIMIGKTPKIIGEMSMIVK

SEQ ID NO: 79895 - protein, 31 aa, Artificial Sequence; identical to SEQ ID NO: 30259
  Cyclic GFR-binding peptide
  MOD_RES (31), (31): Xaa is C or S

SEQ ID NO: 79896 - protein, 31 aa, Artificial Sequence
  Cyclic GFR-binding peptide
TQVQLEPLTVLYYEIVRKKPIFEQLSNTLED

SEQ ID NO: 79897 - protein, 41 aa, Artificial Sequence; identical to SEQ ID NO: 30264
  Cyclic GFR-binding peptide
  MOD_RES (6), (7), (38), (40): Xaa is C or S

SEQ ID NO: 79898 - protein, 29 aa, Artificial Sequence
  Cyclic GFR-binding peptide
  MOD_RES (1), (2): Xaa is C or S
XXVPTELRPVQMRKIDEYDKVVKKATVEM

SEQ ID NO: 79899 - protein, 36 aa, Artificial Sequence; identical to SEQ ID NO: 30268
  Cyclic GFR-binding peptide
  MOD_RES (4), (5), (36): Xaa is C or S

SEQ ID NO: 79900 - protein, 39 aa, Artificial Sequence; identical to SEQ ID NO: 30269
  Cyclic GFR-binding peptide
  MOD_RES (4), (5), (36), (38): Xaa is C or S

SEQ ID NO: 79901 - protein, 32 aa, Artificial Sequence; identical to SEQ ID NO: 30272
  Cyclic GFR-binding peptide
  MOD_RES (1), (1): Xaa is C or S

SEQ ID NO: 79902 - protein, 33 aa, Artificial Sequence
  Cyclic GFR-binding peptide
  MOD_RES (3), (4): Xaa is C or S
KAXXVPTELRPVQMRKIDENEKVVKKATVDMVV

SEQ ID NO: 79903 - protein, 30 aa, Artificial Sequence
  Cyclic GFR-binding peptide
  MOD_RES (3), (3): Xaa is C or S
PTXAPTKLRPVQVRKIDDSSNVIKKATVNM

SEQ ID NO: 79904 - protein, 21 aa, Artificial Sequence
  Cyclic GFR-binding peptide
RSVKIAKVVGRKPKVKEVQVM

SEQ ID NO: 79905 - protein, 20 aa, Artificial Sequence
  Cyclic GFR-binding peptide
RSVKIAKVVGRTPKVKEVQV

SEQ ID NO: 79906 - protein, 28 aa, Artificial Sequence
  Cyclic GFR-binding peptide
VQLEPLPVVYYEIVRKKPIFEQLSNTLE

SEQ ID NO: 79907 - protein, 34 aa, Artificial Sequence
  Cyclic GFR-binding peptide
  MOD_RES (4), (5): Xaa is C or S
PKPXXAPTQLRPVQVRKIDDSSNVIKKATVNMVV

SEQ ID NO: 79908 - protein, 26 aa, Artificial Sequence
  Cyclic GFR-binding peptide
RSVKMAKVDENEKVVKEVQVDMVVEG

SEQ ID NO: 79909 - protein, 29 aa, Artificial Sequence
  Cyclic GFR-binding peptide
  MOD_RES (29), (29): Xaa is C or S
QDLSNITIQIMVGRTPKVIGEMSMVVKSX

SEQ ID NO: 79910 - protein, 22 aa, Artificial Sequence
  Cyclic GFR-binding peptide
SNITIQIMIGKTPKIIGEMSMI

SEQ ID NO: 79911 - protein, 34 aa, Artificial Sequence
  Cyclic GFR-binding peptide
  MOD_RES (5), (6): Xaa is C or S
SASPXXVSQDLSNITIQIMIGKTPKIIGEMSMIV

SEQ ID NO: 79912 - protein, 34 aa, Artificial Sequence; identical to SEQ ID NO: 30286
  Cyclic GFR-binding peptide
  MOD_RES (31), (33): Xaa is C or S

SEQ ID NO: 79913 - protein, 27 aa, Artificial Sequence
  Cyclic GFR-binding peptide
ELRSVKMAKVDENEKVVKEVQVDMVVE

SEQ ID NO: 79914 - protein, 35 aa, Artificial Sequence
  Cyclic GFR-binding peptide
  MOD_RES (34), (34): Xaa is C or S
RVHHEPLTVLYYEYVRKKPKLEQLSNRLEEHLEXA

SEQ ID NO: 79915 - protein, 39 aa, Artificial Sequence; identical to SEQ ID NO: 30291
  Cyclic GFR-binding peptide
  MOD_RES (2), (39): Xaa is C or S

SEQ ID NO: 79916 - protein, 35 aa, Artificial Sequence
  Cyclic GFR-binding peptide
  MOD_RES (4), (4): Xaa is C or S
SVKXQPSRVHHEPLPVVYYEYVRKKPKLEQLSNRL

SEQ ID NO: 79917 - protein, 38 aa, Artificial Sequence; identical to SEQ ID NO: 30292
  Cyclic GFR-binding peptide
  MOD_RES (3), (35), (37): Xaa is C or S

SEQ ID NO: 79918 - protein, 29 aa, Artificial Sequence
  Cyclic GFR-binding peptide
PTELRSVKMAKVDENEKVVKEVQVDMVVE

SEQ ID NO: 79919 - protein, 28 aa, Artificial Sequence
  Cyclic GFR-binding peptide
  MOD_RES (28), (28): Xaa is C or S
LRSVKMAKVDENEKVVKEVQVDMVVEGX

SEQ ID NO: 79920 - protein, 39 aa, Artificial Sequence; identical to SEQ ID NO: 30296
  Cyclic GFR-binding peptide
  MOD_RES (4), (4): Xaa is C or S

SEQ ID NO: 79921 - protein, 29 aa, Artificial Sequence
  Cyclic GFR-binding peptide
VPQDLSNITIQIMVGRTPKVIGEMSMVVK

SEQ ID NO: 79922 - protein, 36 aa, Artificial Sequence
  Cyclic GFR-binding peptide
  MOD_RES (4), (4): Xaa is C or S
NVQXRPTQVQLEPLPVVYYEIVRKKPIFEQLSNTLE

SEQ ID NO: 79923 - protein, 32 aa, Artificial Sequence
  Cyclic GFR-binding peptide
  MOD_RES (30), (32): Xaa is C or S
TKLSNITVQIMDDSSNVIIGEMSNMVVRSXGX

SEQ ID NO: 79924 - protein, 33 aa, Artificial Sequence
  Cyclic GFR-binding peptide
  MOD_RES (6), (6): Xaa is C or S
DEGLEXVPTEEEPLTMLYYRIKPHQGQHEQLSN

SEQ ID NO: 79925 - protein, 20 aa, Artificial Sequence
  Cyclic GFR-binding peptide
RPVQMRKIDENEKVVKKATV

SEQ ID NO: 79926 - protein, 30 aa, Artificial Sequence
  Cyclic GFR-binding peptide
  MOD_RES (1), (1): Xaa is C or S
XVPTELRSVKMAKVDENEKVVKEVQVDMVV

SEQ ID NO: 79927 - protein, 35 aa, Artificial Sequence; identical to SEQ ID NO: 30304
  Cyclic GFR-binding peptide
  MOD_RES (4), (5): Xaa is C or S

SEQ ID NO: 79928 - protein, 24 aa, Artificial Sequence
  Cyclic GFR-binding peptide
LSNITMQIMDENEKVVIGEMSDMV

SEQ ID NO: 79929 - protein, 37 aa, Artificial Sequence; identical to SEQ ID NO: 30306
  Cyclic GFR-binding peptide
  MOD_RES (5), (6): Xaa is C or S

SEQ ID NO: 79930 - protein, 30 aa, Artificial Sequence
  Cyclic GFR-binding peptide
LEPLPVVYYEIVRKKPIFEQLSNTLEDHLA

SEQ ID NO: 79931 - protein, 31 aa, Artificial Sequence
  Cyclic GFR-binding peptide
  MOD_RES (1), (2): Xaa is C or S
XXVPQDLRSVKIAKVVGRTPKVKEVQVMVVK

SEQ ID NO: 79932 - protein, 33 aa, Artificial Sequence
  Cyclic GFR-binding peptide
  MOD_RES (4), (5): Xaa is C or S
ASPXXVPQDLSNITIQIMVGRTPKVIGEMSMVV

SEQ ID NO: 79933 - protein, 29 aa, Artificial Sequence
  Cyclic GFR-binding peptide
SNITIQIMVGRTPKVIGEMSAAAAAAAAA

SEQ ID NO: 79934 - protein, 24 aa, Artificial Sequence
  Cyclic GFR-binding peptide
DLRSVKIAKVIGKTPKIKEVQVMI

SEQ ID NO: 79935 - protein, 36 aa, Artificial Sequence; identical to SEQ ID NO: 30317
  Cyclic GFR-binding peptide
  MOD_RES (2), (3), (34), (36): Xaa is C or S

SEQ ID NO: 79936 - protein, 34 aa, Artificial Sequence
  Cyclic GFR-binding peptide
  MOD_RES (31), (33): Xaa is C or S
PTELRSVKMAKVDENEKVVKEVQVDMVVEGXGXR

SEQ ID NO: 79937 - protein, 33 aa, Artificial Sequence; identical to SEQ ID NO: 30319
  Cyclic GFR-binding peptide
  MOD_RES (2), (3): Xaa is C or S

SEQ ID NO: 79938 - protein, 33 aa, Artificial Sequence
  Cyclic GFR-binding peptide
  MOD_RES (4), (5): Xaa is C or S
ASPXXVPQDLRSVKIAKVVGRTPKVKEVQVMVV

SEQ ID NO: 79939 - protein, 26 aa, Artificial Sequence
  Cyclic GFR-binding peptide
PQDLRPVQIRKIVGRTPKVKKATVMV

SEQ ID NO: 79940 - protein, 29 aa, Artificial Sequence
  Cyclic GFR-binding peptide
  MOD_RES (3), (4): Xaa is C or S
KAXXVPTELRSVKMAKVDEYDKVVKEVQV

SEQ ID NO: 79941 - protein, 32 aa, Artificial Sequence
  Cyclic GFR-binding peptide
  MOD_RES (6), (7): Xaa is C or S
ASASPXXVSQDLRSVKIAKVIGKTPKIKEVQV

SEQ ID NO: 79942 - protein, 32 aa, Artificial Sequence; identical to SEQ ID NO: 30325
  Cyclic GFR-binding peptide
  MOD_RES (1), (2): Xaa is C or S

SEQ ID NO: 79943 - protein, 23 aa, Artificial Sequence
  Cyclic GFR-binding peptide
RPVQIRKIVGRKPKVKKATVMIV

SEQ ID NO: 79944 - protein, 26 aa, Artificial Sequence
  Cyclic GFR-binding peptide
DLRPVQIRKIIGKTPKIKKATVMIVK

SEQ ID NO: 79945 - protein, 25 aa, Artificial Sequence
  Cyclic GFR-binding peptide
EEEPLTMLYYRIKPHQGQHEQLSNF

SEQ ID NO: 79946 - protein, 34 aa, Artificial Sequence; identical to SEQ ID NO: 30332
  Cyclic GFR-binding peptide
  MOD_RES (34), (34): Xaa is C or S

SEQ ID NO: 79947 - protein, 33 aa, Artificial Sequence
  Cyclic GFR-binding peptide
  MOD_RES (31), (33): Xaa is C or S
PTKLSNITVQIMDDSSNVIIGEMSNMVVRSXGX

SEQ ID NO: 79948 - protein, 29 aa, Artificial Sequence
  Cyclic GFR-binding peptide
VHHEPLPVVYYEYVRKKPKLEQLSNRLEE

SEQ ID NO: 79949 - protein, 31 aa, Artificial Sequence
  Cyclic GFR-binding peptide
  MOD_RES (29), (31): Xaa is C or S
KLRSVKVAKVDDSSNVIKEVQVNMVVRSXGX

SEQ ID NO: 79950 - protein, 34 aa, Artificial Sequence
  Cyclic GFR-binding peptide
  MOD_RES (7), (7): Xaa is C or S
HVTKPTXAPTKLSNITVQIMDDSSNVIIGEMSNM

SEQ ID NO: 79951 - protein, 29 aa, Artificial Sequence
  Cyclic GFR-binding peptide
  MOD_RES (2), (3): Xaa is C or S
PXXVSQDLRSVKIAKVIGKTPKIKEVQVM

SEQ ID NO: 79952 - protein, 40 aa, Artificial Sequence; identical to SEQ ID NO: 30336
  Cyclic GFR-binding peptide
  MOD_RES (4), (38), (40): Xaa is C or S

SEQ ID NO: 79953 - protein, 32 aa, Artificial Sequence
  Cyclic GFR-binding peptide
  MOD_RES (3), (3): Xaa is C or S
VQXRPTQVQLEPLPVVYYEIVRKKPIFEQLSN

SEQ ID NO: 79954 - protein, 37 aa, Artificial Sequence
  Cyclic GFR-binding peptide
  MOD_RES (7), (7): Xaa is C or S
NDEGLEXVPTEEEPLTMLYYRIKPHQGQHEQLSNFLQ

SEQ ID NO: 79955 - protein, 23 aa, Artificial Sequence
  Cyclic GFR-binding peptide
LSNITIQIMVGRKPKVIGEMSMI

SEQ ID NO: 79956 - protein, 32 aa, Artificial Sequence
  Cyclic GFR-binding peptide
  MOD_RES (3), (4): Xaa is C or S
SPXXVSQDLSNITIQIMIGKTPKIIGEMSMIV

SEQ ID NO: 79957 - protein, 31 aa, Artificial Sequence
  Cyclic GFR-binding peptide
EPLPVVYYEIVRKKPIFEQLSNAAAAAAAAA

SEQ ID NO: 79958 - protein, 37 aa, Artificial Sequence; identical to SEQ ID NO: 30343
  Cyclic GFR-binding peptide
  MOD_RES (2), (2): Xaa is C or S

SEQ ID NO: 79959 - protein, 32 aa, Artificial Sequence
  Cyclic GFR-binding peptide
  MOD_RES (5), (6): Xaa is C or S
SASPXXVSQDLRPVQIRKIIGKTPKIKKATVM

SEQ ID NO: 79960 - protein, 40 aa, Artificial Sequence; identical to SEQ ID NO: 30345
  Cyclic GFR-binding peptide
  MOD_RES (6), (7), (39): Xaa is C or S

SEQ ID NO: 79961 - protein, 34 aa, Artificial Sequence
  Cyclic GFR-binding peptide
  MOD_RES (5), (6): Xaa is C or S
IPKAXXVPTELRPVQMRKIDEYDKVVKKATVEMV

SEQ ID NO: 79962 - protein, 36 aa, Artificial Sequence; identical to SEQ ID NO: 30346
  Cyclic GFR-binding peptide
  MOD_RES (5), (6): Xaa is C or S

SEQ ID NO: 79963 - protein, 26 aa, Artificial Sequence
  Cyclic GFR-binding peptide
SQDLRPVQIRKIIGKTPKIKKATVMI

SEQ ID NO: 79964 - protein, 29 aa, Artificial Sequence
  Cyclic GFR-binding peptide
  MOD_RES (1), (1): Xaa is C or S
XVSQDLRPVQIRKIIGKTPKIKKATVMIV

SEQ ID NO: 79965 - protein, 26 aa, Artificial Sequence
  Cyclic GFR-binding peptide
VPQALRPVQIRKIVGRKPKVKKATVM

SEQ ID NO: 79966 - protein, 27 aa, Artificial Sequence
  Cyclic GFR-binding peptide
EPLTMLYYRIKPHQGQHEQLSNFLQHN

SEQ ID NO: 79967 - protein, 34 aa, Artificial Sequence; identical to SEQ ID NO: 30348
  Cyclic GFR-binding peptide
  MOD_RES (1), (32), (34): Xaa is C or S

SEQ ID NO: 79968 - protein, 37 aa, Artificial Sequence; identical to SEQ ID NO: 30349
  Cyclic GFR-binding peptide
  MOD_RES (3), (4), (36): Xaa is C or S

SEQ ID NO: 79969 - protein, 30 aa, Artificial Sequence
  Cyclic GFR-binding peptide
  MOD_RES (28), (30): Xaa is C or S
DLRPVQIRKIVGRTPKVKKATVMVVKSXKX

SEQ ID NO: 79970 - protein, 23 aa, Artificial Sequence
  Cyclic GFR-binding peptide
TELRPVQMRKIDENEKVVKKATV

SEQ ID NO: 79971 - protein, 30 aa, Artificial Sequence
  Cyclic GFR-binding peptide
  MOD_RES (30), (30): Xaa is C or S
PQALSNITIQIMVGRKPKVIGEMSMIVRSX

SEQ ID NO: 79972 - protein, 24 aa, Artificial Sequence
  Cyclic GFR-binding peptide
QDLRPVQIRKIVGRTPKVKKATVM

SEQ ID NO: 79973 - protein, 29 aa, Artificial Sequence
  Cyclic GFR-binding peptide
RSVKIAKVVGRKPKVKEVQVAAAAAAAAA

SEQ ID NO: 79974 - protein, 38 aa, Artificial Sequence; identical to SEQ ID NO: 30356
  Cyclic GFR-binding peptide
  MOD_RES (5), (6), (37): Xaa is C or S

SEQ ID NO: 79975 - protein, 38 aa, Artificial Sequence; identical to SEQ ID NO: 30359
  Cyclic GFR-binding peptide
  MOD_RES (5), (6), (37): Xaa is C or S

SEQ ID NO: 79976 - protein, 33 aa, Artificial Sequence
  Cyclic GFR-binding peptide
QVQLEPLPVVYYEIVRKKPIFEQLSNTLEDHLA

SEQ ID NO: 79977 - protein, 39 aa, Artificial Sequence; identical to SEQ ID NO: 30362
  Cyclic GFR-binding peptide
  MOD_RES (5), (6), (37), (39): Xaa is C or S

SEQ ID NO: 79978 - protein, 34 aa, Artificial Sequence; identical to SEQ ID NO: 30365
  Cyclic GFR-binding peptide

SEQ ID NO: 79979 - protein, 28 aa, Artificial Sequence
  Cyclic GFR-binding peptide
  MOD_RES (1), (1): Xaa is C or S
XVPTELRPVQMRKIDEYDKVVKKATVEM

SEQ ID NO: 79980 - protein, 42 aa, Artificial Sequence; identical to SEQ ID NO: 30366
  Cyclic GFR-binding peptide
  MOD_RES (6), (7), (39), (41): Xaa is C or S

SEQ ID NO: 79981 - protein, 38 aa, Artificial Sequence; identical to SEQ ID NO: 30367
  Cyclic GFR-binding peptide
  MOD_RES (5), (6), (38): Xaa is C or S

SEQ ID NO: 79982 - protein, 36 aa, Artificial Sequence; identical to SEQ ID NO: 30369
  Cyclic GFR-binding peptide
  MOD_RES (5), (6): Xaa is C or S

SEQ ID NO: 79983 - protein, 29 aa, Artificial Sequence
  Cyclic GFR-binding peptide
  MOD_RES (27), (29): Xaa is C or S
LSNITIQIMIGKTPKIIGEMSMIVKSXKX

SEQ ID NO: 79984 - protein, 37 aa, Artificial Sequence; identical to SEQ ID NO: 30371
  Cyclic GFR-binding peptide
  MOD_RES (5), (6), (37): Xaa is C or S

SEQ ID NO: 79985 - protein, 36 aa, Artificial Sequence; identical to SEQ ID NO: 30372
  Cyclic GFR-binding peptide
  MOD_RES (2), (3), (35): Xaa is C or S

SEQ ID NO: 79986 - protein, 38 aa, Artificial Sequence
  Cyclic GFR-binding peptide
  MOD_RES (5), (5): Xaa is C or S
RNVQXRPTQVQLEPLPVVYYEIVRKKPIFEQLSNTLED

SEQ ID NO: 79987 - protein, 39 aa, Artificial Sequence; identical to SEQ ID NO: 30374
  Cyclic GFR-binding peptide
  MOD_RES (6), (7), (39): Xaa is C or S

SEQ ID NO: 79988 - protein, 26 aa, Artificial Sequence
  Cyclic GFR-binding peptide
  MOD_RES (1), (1): Xaa is C or S
XVPQALSNITIQIMVGRKPKVIGEMS

SEQ ID NO: 79989 - protein, 33 aa, Artificial Sequence
  Cyclic GFR-binding peptide
  MOD_RES (6), (7): Xaa is C or S
ASASPXXVPQDLSNITIQIMVGRTPKVIGEMSM

SEQ ID NO: 79990 - protein, 28 aa, Artificial Sequence
  Cyclic GFR-binding peptide
PQALSNITIQIMVGRKPKVIGEMSMIVR

SEQ ID NO: 79991 - protein, 38 aa, Artificial Sequence; identical to SEQ ID NO: 30378
  Cyclic GFR-binding peptide
  MOD_RES (6), (7): Xaa is C or S

SEQ ID NO: 79992 - protein, 38 aa, Artificial Sequence; identical to SEQ ID NO: 30379
  Cyclic GFR-binding peptide
  MOD_RES (4), (36), (38): Xaa is C or S

SEQ ID NO: 79993 - protein, 33 aa, Artificial Sequence; identical to SEQ ID NO: 30380
  Cyclic GFR-binding peptide
  MOD_RES (32), (32): Xaa is C or S

SEQ ID NO: 79994 - protein, 29 aa, Artificial Sequence
  Cyclic GFR-binding peptide
EEEPLPMVYYRIKPHQGQHEQLSNFLQHN

SEQ ID NO: 79995 - protein, 37 aa, Artificial Sequence; identical to SEQ ID NO: 30383
  Cyclic GFR-binding peptide
  MOD_RES (1), (2), (34), (36): Xaa is C or S

SEQ ID NO: 79996 - protein, 32 aa, Artificial Sequence
  Cyclic GFR-binding peptide
  MOD_RES (6), (6): Xaa is C or S
VTKPTXAPTKLRPVQVRKIDDSSNVIKKATVN

SEQ ID NO: 79997 - protein, 29 aa, Artificial Sequence
  Cyclic GFR-binding peptide
RSVKMAKVDENEKVVKEVQVAAAAAAAAA

SEQ ID NO: 79998 - protein, 25 aa, Artificial Sequence
  Cyclic GFR-binding peptide
VPTELSNITMQIMDEYDKVVIGEMS

SEQ ID NO: 79999 - protein, 24 aa, Artificial Sequence
  Cyclic GFR-binding peptide
LRSVKMAKVDENEKVVKEVQVDMV

SEQ ID NO: 80000 - protein, 28 aa, Artificial Sequence
  Cyclic GFR-binding peptide
  MOD_RES (26), (28): Xaa is C or S
RPVQIRKIIGKTPKIKKATVMIVKSXKX

SEQ ID NO: 80001 - protein, 26 aa, Artificial Sequence
  Cyclic GFR-binding peptide
TELSNITMQIMDENEKVVIGEMSDMV

SEQ ID NO: 80002 - protein, 30 aa, Artificial Sequence
  Cyclic GFR-binding peptide
  MOD_RES (30), (30): Xaa is C or S
PQDLRPVQIRKIVGRTPKVKKATVMVVKSX

SEQ ID NO: 80003 - protein, 35 aa, Artificial Sequence; identical to SEQ ID NO: 30393
  Cyclic GFR-binding peptide
  MOD_RES (2), (3), (34): Xaa is C or S

SEQ ID NO: 80004 - protein, 33 aa, Artificial Sequence
  Cyclic GFR-binding peptide
  MOD_RES (3), (4): Xaa is C or S
KPXXAPTQLRPVQVRKIDDSSNVIKKATVNMVV

SEQ ID NO: 80005 - protein, 45 aa, Artificial Sequence; identical to SEQ ID NO: 30396
  Cyclic GFR-binding peptide
  MOD_RES (5), (42), (44): Xaa is C or S

SEQ ID NO: 80006 - protein, 30 aa, Artificial Sequence
  Cyclic GFR-binding peptide
  MOD_RES (1), (2): Xaa is C or S
XXVPQALRSVKIAKVVGRKPKVKEVQVMIV

SEQ ID NO: 80007 - protein, 24 aa, Artificial Sequence
  Cyclic GFR-binding peptide
ALSNITIQIMVGRKPKVIGEMSMI

SEQ ID NO: 80008 - protein, 31 aa, Artificial Sequence; identical to SEQ ID NO: 30397
  Cyclic GFR-binding peptide
  MOD_RES (1), (1): Xaa is C or S

SEQ ID NO: 80009 - protein, 26 aa, Artificial Sequence
  Cyclic GFR-binding peptide
  MOD_RES (1), (1): Xaa is C or S
XVPTELRPVQMRKIDEYDKVVKKATV

SEQ ID NO: 80010 - protein, 35 aa, Artificial Sequence; identical to SEQ ID NO: 30403
  Cyclic GFR-binding peptide

SEQ ID NO: 80011 - protein, 32 aa, Artificial Sequence
  Cyclic GFR-binding peptide
  MOD_RES (3), (4): Xaa is C or S
SPXXVSQDLRSVKIAKVIGKTPKIKEVQVMIV

SEQ ID NO: 80012 - protein, 24 aa, Artificial Sequence
  Cyclic GFR-binding peptide
ELRPVQMRKIDENEKVVKKATVDM

SEQ ID NO: 80013 - protein, 38 aa, Artificial Sequence; identical to SEQ ID NO: 30409
  Cyclic GFR-binding peptide
  MOD_RES (6), (7): Xaa is C or S

SEQ ID NO: 80014 - protein, 27 aa, Artificial Sequence
  Cyclic GFR-binding peptide
VPTELRSVKMAKVDENEKVVKEVQVDM

SEQ ID NO: 80015 - protein, 35 aa, Artificial Sequence; identical to SEQ ID NO: 30411
  Cyclic GFR-binding peptide
  MOD_RES (2), (3), (35): Xaa is C or S

SEQ ID NO: 80016 - protein, 41 aa, Artificial Sequence; identical to SEQ ID NO: 30412
  Cyclic GFR-binding peptide
  MOD_RES (7), (39), (41): Xaa is C or S

SEQ ID NO: 80017 - protein, 39 aa, Artificial Sequence; identical to SEQ ID NO: 30415
  Cyclic GFR-binding peptide
  MOD_RES (6), (7), (38): Xaa is C or S

SEQ ID NO: 80018 - protein, 34 aa, Artificial Sequence; identical to SEQ ID NO: 30418
  Cyclic GFR-binding peptide
  MOD_RES (1), (33): Xaa is C or S

SEQ ID NO: 80019 - protein, 37 aa, Artificial Sequence; identical to SEQ ID NO: 30419
  Cyclic GFR-binding peptide
  MOD_RES (2), (3), (34), (36): Xaa is C or S

SEQ ID NO: 80020 - protein, 29 aa, Artificial Sequence
  Cyclic GFR-binding peptide
  MOD_RES (26), (28): Xaa is C or S
SNITIQIMIGKTPKIIGEMSMIVKSXKXS

SEQ ID NO: 80021 - protein, 34 aa, Artificial Sequence
  Cyclic GFR-binding peptide
  MOD_RES (1), (1): Xaa is C or S
XRPTQVQLEPLTVLYYEIVRKKPIFEQLSNTLED

SEQ ID NO: 80022 - protein, 29 aa, Artificial Sequence
  Cyclic GFR-binding peptide
VPTEEEPLPMVYYRIKPHQGQHEQLSNFL

SEQ ID NO: 80023 - protein, 37 aa, Artificial Sequence; identical to SEQ ID NO: 30422
  Cyclic GFR-binding peptide
  MOD_RES (6), (7): Xaa is C or S

SEQ ID NO: 80024 - protein, 27 aa, Artificial Sequence
  Cyclic GFR-binding peptide
TQLSNITVQIMDDSSNVIIGEMSNMVV

SEQ ID NO: 80025 - protein, 35 aa, Artificial Sequence; identical to SEQ ID NO: 30425
  Cyclic GFR-binding peptide
  MOD_RES (1), (33), (35): Xaa is C or S

SEQ ID NO: 80026 - protein, 33 aa, Artificial Sequence
  Cyclic GFR-binding peptide
RVHHEPLTVLYYEYVRKKPKLEQLSNRLEEHLE

SEQ ID NO: 80027 - protein, 26 aa, Artificial Sequence
  Cyclic GFR-binding peptide
QDLRPVQIRKIIGKTPKIKKATVMIV

SEQ ID NO: 80028 - protein, 35 aa, Artificial Sequence
  Cyclic GFR-binding peptide
  MOD_RES (4), (4): Xaa is C or S
SVKXQPSRVHHEPLTVLYYEYVRKKPKLEQLSNRL

SEQ ID NO: 80029 - protein, 37 aa, Artificial Sequence; identical to SEQ ID NO: 30428
  Cyclic GFR-binding peptide
  MOD_RES (35), (37): Xaa is C or S

SEQ ID NO: 80030 - protein, 36 aa, Artificial Sequence; identical to SEQ ID NO: 30432
  Cyclic GFR-binding peptide
  MOD_RES (2), (3), (34), (36): Xaa is C or S

SEQ ID NO: 80031 - protein, 34 aa, Artificial Sequence; identical to SEQ ID NO: 30433
  Cyclic GFR-binding peptide
  MOD_RES (32), (34): Xaa is C or S

SEQ ID NO: 80032 - protein, 28 aa, Artificial Sequence
  Cyclic GFR-binding peptide
  MOD_RES (28), (28): Xaa is C or S
DLRSVKIAKVIGKTPKIKEVQVMIVKSX

SEQ ID NO: 80033 - protein, 36 aa, Artificial Sequence
  Cyclic GFR-binding peptide
  MOD_RES (6), (7): Xaa is C or S
KIPKAXXVPTELRPVQMRKIDENEKVVKKATVDMVV

SEQ ID NO: 80034 - protein, 31 aa, Artificial Sequence
  Cyclic GFR-binding peptide
  MOD_RES (29), (31): Xaa is C or S
QLRSVKVAKVDDSSNVIKEVQVNMVVRAXGX

SEQ ID NO: 80035 - protein, 35 aa, Artificial Sequence; identical to SEQ ID NO: 30439
  Cyclic GFR-binding peptide
  MOD_RES (3), (4), (35): Xaa is C or S

SEQ ID NO: 80036 - protein, 31 aa, Artificial Sequence
  Cyclic GFR-binding peptide
  MOD_RES (4), (4): Xaa is C or S
KPTXAPTKLSNITVQIMDDSSNVIIGEMSNM

SEQ ID NO: 80037 - protein, 40 aa, Artificial Sequence; identical to SEQ ID NO: 30441
  Cyclic GFR-binding peptide
  MOD_RES (4), (5), (37), (39): Xaa is C or S

SEQ ID NO: 80038 - protein, 33 aa, Artificial Sequence
  Cyclic GFR-binding peptide
  MOD_RES (3), (4): Xaa is C or S
KPXXAPTKLRSVKVAKVDDSSNVIKEVQVNMVV

SEQ ID NO: 80039 - protein, 25 aa, Artificial Sequence
  Cyclic GFR-binding peptide
VQLEPLTVLYYEIVRKKPIFEQLSN

SEQ ID NO: 80040 - protein, 32 aa, Artificial Sequence
  Cyclic GFR-binding peptide
  MOD_RES (2), (3): Xaa is C or S
PXXAPTKLRSVKVAKVDDSSNVIKEVQVNMVV

SEQ ID NO: 80041 - protein, 30 aa, Artificial Sequence
  Cyclic GFR-binding peptide
  MOD_RES (2), (2): Xaa is C or S
EXVPTEEEPLPMVYYRIKPHQGQHEQLSNF

SEQ ID NO: 80042 - protein, 27 aa, Artificial Sequence
  Cyclic GFR-binding peptide
  MOD_RES (27), (27): Xaa is C or S
RSVKVAKVDDSSNVIKEVQVNMVVRAX

SEQ ID NO: 80043 - protein, 36 aa, Artificial Sequence; identical to SEQ ID NO: 30445
  Cyclic GFR-binding peptide
  MOD_RES (5), (6): Xaa is C or S

SEQ ID NO: 80044 - protein, 42 aa, Artificial Sequence; identical to SEQ ID NO: 30446
  Cyclic GFR-binding peptide
  MOD_RES (7), (41): Xaa is C or S

SEQ ID NO: 80045 - protein, 21 aa, Artificial Sequence
  Cyclic GFR-binding peptide
LSNITIQIMIGKTPKIIGEMS

SEQ ID NO: 80046 - protein, 29 aa, Artificial Sequence
  Cyclic GFR-binding peptide
  MOD_RES (27), (29): Xaa is C or S
LRSVKIAKVVGRTPKVKEVQVMVVKSXKX

SEQ ID NO: 80047 - protein, 31 aa, Artificial Sequence
  Cyclic GFR-binding peptide
  MOD_RES (1), (2): Xaa is C or S
XXVPQALRSVKIAKVVGRKPKVKEVQVMIVR

SEQ ID NO: 80048 - protein, 35 aa, Artificial Sequence
  Cyclic GFR-binding peptide
  MOD_RES (34), (34): Xaa is C or S
QVQLEPLTVLYYEIVRKKPIFEQLSNTLEDHLAXK

SEQ ID NO: 80049 - protein, 29 aa, Artificial Sequence
  Cyclic GFR-binding peptide
  MOD_RES (28), (28): Xaa is C or S
LRSVKMAKVDEYDKVVKEVQVEMVVEGXG

SEQ ID NO: 80050 - protein, 29 aa, Artificial Sequence
  Cyclic GFR-binding peptide
  MOD_RES (4), (4): Xaa is C or S
KPTXAPTKLSNITVQIMDDSSNVIIGEMS

SEQ ID NO: 80051 - protein, 29 aa, Artificial Sequence
  Cyclic GFR-binding peptide
TQLSNITVQIMDDSSNVIIGEMSNMVVRA

SEQ ID NO: 80052 - protein, 31 aa, Artificial Sequence
  Cyclic GFR-binding peptide
  MOD_RES (28), (30): Xaa is C or S
DLRPVQIRKIVGRTPKVKKATVMVVKSXKXS

SEQ ID NO: 80053 - protein, 29 aa, Artificial Sequence
  Cyclic GFR-binding peptide
  MOD_RES (26), (28): Xaa is C or S
RSVKIAKVVGRKPKVKEVQVMIVRSXKXS

SEQ ID NO: 80054 - protein, 23 aa, Artificial Sequence
  Cyclic GFR-binding peptide
QDLRSVKIAKVIGKTPKIKEVQV

SEQ ID NO: 80055 - protein, 28 aa, Artificial Sequence
  Cyclic GFR-binding peptide
  MOD_RES (1), (1): Xaa is C or S
XAPTQLSNITVQIMDDSSNVIIGEMSNM

SEQ ID NO: 80056 - protein, 29 aa, Artificial Sequence
  Cyclic GFR-binding peptide
PTQLSNITVQIMDDSSNVIIGEMSNMVVR

SEQ ID NO: 80057 - protein, 31 aa, Artificial Sequence
  Cyclic GFR-binding peptide
  MOD_RES (5), (6): Xaa is C or S
SASPXXVPQDLRPVQIRKIVGRTPKVKKATV

SEQ ID NO: 80058 - protein, 20 aa, Artificial Sequence
  Cyclic GFR-binding peptide
RSVKMAKVDEYDKVVKEVQV

SEQ ID NO: 80059 - protein, 36 aa, Artificial Sequence; identical to SEQ ID NO: 30461
  Cyclic GFR-binding peptide
  MOD_RES (4), (5), (36): Xaa is C or S

SEQ ID NO: 80060 - protein, 30 aa, Artificial Sequence
  Cyclic GFR-binding peptide
  MOD_RES (30), (30): Xaa is C or S
TQLRSVKVAKVDDSSNVIKEVQVNMVVRAX

SEQ ID NO: 80061 - protein, 31 aa, Artificial Sequence
  Cyclic GFR-binding peptide
  MOD_RES (31), (31): Xaa is C or S
PTKLSNITVQIMDDSSNVIIGEMSNMVVRSX

SEQ ID NO: 80062 - protein, 27 aa, Artificial Sequence
  Cyclic GFR-binding peptide
HEPLPVVYYEYVRKKPKLEQLSNRLEE

SEQ ID NO: 80063 - protein, 35 aa, Artificial Sequence
  Cyclic GFR-binding peptide
  MOD_RES (6), (7): Xaa is C or S
SIPKAXXVPTELRPVQMRKIDEYDKVVKKATVEMV

SEQ ID NO: 80064 - protein, 31 aa, Artificial Sequence
  Cyclic GFR-binding peptide
  MOD_RES (2), (2): Xaa is C or S
QXRPTQVQLEPLPVVYYEIVRKKPIFEQLSN

SEQ ID NO: 80065 - protein, 26 aa, Artificial Sequence
  Cyclic GFR-binding peptide
EPLTMLYYRIKPHQGQHEQLSNFLQH

SEQ ID NO: 80066 - protein, 30 aa, Artificial Sequence; identical to SEQ ID NO: 30473
  Cyclic GFR-binding peptide

SEQ ID NO: 80067 - protein, 26 aa, Artificial Sequence
  Cyclic GFR-binding peptide
QALSNITIQIMVGRKPKVIGEMSMIV

SEQ ID NO: 80068 - protein, 31 aa, Artificial Sequence
  Cyclic GFR-binding peptide
  MOD_RES (2), (3): Xaa is C or S
AXXVPTELSNITMQIMDENEKVVIGEMSDMV

SEQ ID NO: 80069 - protein, 26 aa, Artificial Sequence
  Cyclic GFR-binding peptide
QALRSVKIAKVVGRKPKVKEVQVMIV

SEQ ID NO: 80070 - protein, 42 aa, Artificial Sequence; identical to SEQ ID NO: 30475
  Cyclic GFR-binding peptide
  MOD_RES (3), (40), (42): Xaa is C or S

SEQ ID NO: 80071 - protein, 39 aa, Artificial Sequence; identical to SEQ ID NO: 30477
  Cyclic GFR-binding peptide
  MOD_RES (6), (7), (39): Xaa is C or S

SEQ ID NO: 80072 - protein, 32 aa, Artificial Sequence
  Cyclic GFR-binding peptide
  MOD_RES (4), (5): Xaa is C or S
AAPXXVPQALRSVKIAKVVGRKPKVKEVQVMI

SEQ ID NO: 80073 - protein, 29 aa, Artificial Sequence
  Cyclic GFR-binding peptide
  MOD_RES (3), (4): Xaa is C or S
APXXVPQALSNITIQIMVGRKPKVIGEMS

SEQ ID NO: 80074 - protein, 35 aa, Artificial Sequence; identical to SEQ ID NO: 30480
  Cyclic GFR-binding peptide
  MOD_RES (32), (34): Xaa is C or S

SEQ ID NO: 80075 - protein, 35 aa, Artificial Sequence; identical to SEQ ID NO: 30482
  Cyclic GFR-binding peptide
  MOD_RES (1), (2), (33), (35): Xaa is C or S

SEQ ID NO: 80076 - protein, 28 aa, Artificial Sequence
  Cyclic GFR-binding peptide
  MOD_RES (27), (27): Xaa is C or S
LRPVQIRKIIGKTPKIKKATVMIVKSXK

SEQ ID NO: 80077 - protein, 28 aa, Artificial Sequence
  Cyclic GFR-binding peptide
PTKLSNITVQIMDDSSNVIIGEMSNMVV

SEQ ID NO: 80078 - protein, 24 aa, Artificial Sequence
  Cyclic GFR-binding peptide
RSVKIAKVIGKTPKIKEVQVMIVK

SEQ ID NO: 80079 - protein, 39 aa, Artificial Sequence; identical to SEQ ID NO: 30486
  Cyclic GFR-binding peptide
  MOD_RES (4), (38): Xaa is C or S

SEQ ID NO: 80080 - protein, 22 aa, Artificial Sequence
  Cyclic GFR-binding peptide
EPLPMVYYRIKPHQGQHEQLSN

SEQ ID NO: 80081 - protein, 29 aa, Artificial Sequence
  Cyclic GFR-binding peptide
  MOD_RES (1), (2): Xaa is C or S
XXAPTQLSNITVQIMDDSSNVIIGEMSNM

SEQ ID NO: 80082 - protein, 29 aa, Artificial Sequence
  Cyclic GFR-binding peptide
  MOD_RES (3), (4): Xaa is C or S
KPXXAPTQLSNITVQIMDDSSNVIIGEMS

SEQ ID NO: 80083 - protein, 23 aa, Artificial Sequence
  Cyclic GFR-binding peptide
KLRPVQVRKIDDSSNVIKKATVN

SEQ ID NO: 80084 - protein, 32 aa, Artificial Sequence
  Cyclic GFR-binding peptide
  MOD_RES (32), (32): Xaa is C or S
QLEPLPVVYYEIVRKKPIFEQLSNTLEDHLAX

SEQ ID NO: 80085 - protein, 34 aa, Artificial Sequence; identical to SEQ ID NO: 30501
  Cyclic GFR-binding peptide
  MOD_RES (3), (4): Xaa is C or S

SEQ ID NO: 80086 - protein, 33 aa, Artificial Sequence; identical to SEQ ID NO: 30502
  Cyclic GFR-binding peptide

SEQ ID NO: 80087 - protein, 32 aa, Artificial Sequence
  Cyclic GFR-binding peptide
QVQLEPLPVVYYEIVRKKPIFEQLSNTLEDHL

SEQ ID NO: 80088 - protein, 36 aa, Artificial Sequence; identical to SEQ ID NO: 30505
  Cyclic GFR-binding peptide
  MOD_RES (2), (3), (34), (36): Xaa is C or S

SEQ ID NO: 80089 - protein, 26 aa, Artificial Sequence
  Cyclic GFR-binding peptide
KLRSVKVAKVDDSSNVIKEVQVNMVV

SEQ ID NO: 80090 - protein, 23 aa, Artificial Sequence
  Cyclic GFR-binding peptide
QDLRPVQIRKIVGRTPKVKKATV

SEQ ID NO: 80091 - protein, 27 aa, Artificial Sequence
  Cyclic GFR-binding peptide
  MOD_RES (26), (26): Xaa is C or S
RSVKIAKVIGKTPKIKEVQVMIVKSXK

SEQ ID NO: 80092 - protein, 30 aa, Artificial Sequence
  Cyclic GFR-binding peptide
  MOD_RES (3), (4): Xaa is C or S
SPXXVPQDLRPVQIRKIVGRTPKVKKATVM

SEQ ID NO: 80093 - protein, 31 aa, Artificial Sequence
  Cyclic GFR-binding peptide
  MOD_RES (4), (5): Xaa is C or S
ASPXXVPQDLRPVQIRKIVGRTPKVKKATVM

SEQ ID NO: 80094 - protein, 35 aa, Artificial Sequence; identical to SEQ ID NO: 30518
  Cyclic GFR-binding peptide
  MOD_RES (1), (2), (34): Xaa is C or S

SEQ ID NO: 80095 - protein, 25 aa, Artificial Sequence
  Cyclic GFR-binding peptide
EPLTVLYYEIVRKKPIFEQLSNTLE

SEQ ID NO: 80096 - protein, 34 aa, Artificial Sequence
  Cyclic GFR-binding peptide
  MOD_RES (5), (5): Xaa is C or S
SSVKXQPSRVHHEPLTVLYYEYVRKKPKLEQLSN

SEQ ID NO: 80097 - protein, 37 aa, Artificial Sequence; identical to SEQ ID NO: 30522
  Cyclic GFR-binding peptide
  MOD_RES (3), (37): Xaa is C or S

SEQ ID NO: 80098 - protein, 25 aa, Artificial Sequence
  Cyclic GFR-binding peptide
LSNITIQIMVGRKPKVIGEMSMIVR

SEQ ID NO: 80099 - protein, 40 aa, Artificial Sequence; identical to SEQ ID NO: 30525
  Cyclic GFR-binding peptide
  MOD_RES (6), (7), (38), (40): Xaa is C or S

SEQ ID NO: 80100 - protein, 33 aa, Artificial Sequence
  Cyclic GFR-binding peptide
  MOD_RES (3), (3): Xaa is C or S
LEXVPTEEEPLTMLYYRIKPHQGQHEQLSNFLQ

SEQ ID NO: 80101 - protein, 39 aa, Artificial Sequence; identical to SEQ ID NO: 30530
  Cyclic GFR-binding peptide
  MOD_RES (7), (39): Xaa is C or S

SEQ ID NO: 80102 - protein, 32 aa, Artificial Sequence
  Cyclic GFR-binding peptide
RVHHEPLPVVYYEYVRKKPKLEQLSNRLEEHL

SEQ ID NO: 80103 - protein, 33 aa, Artificial Sequence
  Cyclic GFR-binding peptide
  MOD_RES (4), (5): Xaa is C or S
PKAXXVPTELSNITMQIMDEYDKVVIGEMSEMV

SEQ ID NO: 80104 - protein, 38 aa, Artificial Sequence; identical to SEQ ID NO: 30534
  Cyclic GFR-binding peptide
  MOD_RES (4), (5), (37): Xaa is C or S

SEQ ID NO: 80105 - protein, 34 aa, Artificial Sequence
  Cyclic GFR-binding peptide
  MOD_RES (5), (6): Xaa is C or S
IPKAXXVPTELRSVKMAKVDEYDKVVKEVQVEMV

SEQ ID NO: 80106 - protein, 36 aa, Artificial Sequence; identical to SEQ ID NO: 30536
  Cyclic GFR-binding peptide
  MOD_RES (2), (3), (35): Xaa is C or S

SEQ ID NO: 80107 - protein, 34 aa, Artificial Sequence; identical to SEQ ID NO: 30535
  Cyclic GFR-binding peptide
  MOD_RES (2), (3): Xaa is C or S

SEQ ID NO: 80108 - protein, 31 aa, Artificial Sequence
  Cyclic GFR-binding peptide
  MOD_RES (29), (31): Xaa is C or S
EPLPMVYYRIKPHQGQHEQLSNFLQHNKXEX

SEQ ID NO: 80109 - protein, 28 aa, Artificial Sequence
  Cyclic GFR-binding peptide
VPQALRPVQIRKIVGRKPKVKKATVMIV

SEQ ID NO: 80110 - protein, 29 aa, Artificial Sequence
  Cyclic GFR-binding peptide
  MOD_RES (2), (3): Xaa is C or S
PXXVPQDLSNITIQIMVGRTPKVIGEMSM

SEQ ID NO: 80111 - protein, 32 aa, Artificial Sequence; identical to SEQ ID NO: 30543
  Cyclic GFR-binding peptide
  MOD_RES (1), (1): Xaa is C or S

SEQ ID NO: 80112 - protein, 29 aa, Artificial Sequence
  Cyclic GFR-binding peptide
  MOD_RES (26), (28): Xaa is C or S
RPVQIRKIVGRTPKVKKATVMVVKSXKXS

SEQ ID NO: 80113 - protein, 23 aa, Artificial Sequence
  Cyclic GFR-binding peptide
RSVKIAKVIGKTPKIKEVQVMIV

SEQ ID NO: 80114 - protein, 40 aa, Artificial Sequence; identical to SEQ ID NO: 30550
  Cyclic GFR-binding peptide
  MOD_RES (5), (39): Xaa is C or S

SEQ ID NO: 80115 - protein, 29 aa, Artificial Sequence
  Cyclic GFR-binding peptide
PTELRPVQMRKIDENEKVVKKATVDMVVE

SEQ ID NO: 80116 - protein, 34 aa, Artificial Sequence
  Cyclic GFR-binding peptide
  MOD_RES (4), (5): Xaa is C or S
ASPXXVPQDLRPVQIRKIVGRTPKVKKATVMVVK

SEQ ID NO: 80117 - protein, 34 aa, Artificial Sequence
  Cyclic GFR-binding peptide
  MOD_RES (6), (7): Xaa is C or S
ASASPXXVPQDLSNITIQIMVGRTPKVIGEMSMV

SEQ ID NO: 80118 - protein, 33 aa, Artificial Sequence; identical to SEQ ID NO: 30554
  Cyclic GFR-binding peptide
  MOD_RES (1), (33): Xaa is C or S

SEQ ID NO: 80119 - protein, 34 aa, Artificial Sequence; identical to SEQ ID NO: 30556
  Cyclic GFR-binding peptide
  MOD_RES (1), (1): Xaa is C or S

SEQ ID NO: 80120 - protein, 37 aa, Artificial Sequence; identical to SEQ ID NO: 30562
  Cyclic GFR-binding peptide
  MOD_RES (36), (36): Xaa is C or S

SEQ ID NO: 80121 - protein, 29 aa, Artificial Sequence
  Cyclic GFR-binding peptide
  MOD_RES (29), (29): Xaa is C or S
QDLSNITIQIMIGKTPKIIGEMSMIVKSX

SEQ ID NO: 80122 - protein, 41 aa, Artificial Sequence; identical to SEQ ID NO: 30565
  Cyclic GFR-binding peptide
  MOD_RES (5), (5): Xaa is C or S

SEQ ID NO: 80123 - protein, 26 aa, Artificial Sequence
  Cyclic GFR-binding peptide
PTQLRSVKVAKVDDSSNVIKEVQVNM

SEQ ID NO: 80124 - protein, 39 aa, Artificial Sequence; identical to SEQ ID NO: 30570
  Cyclic GFR-binding peptide
  MOD_RES (5), (6), (37), (39): Xaa is C or S

SEQ ID NO: 80125 - protein, 29 aa, Artificial Sequence
  Cyclic GFR-binding peptide
  MOD_RES (28), (28): Xaa is C or S
DLRPVQIRKIIGKTPKIKKATVMIVKSXK

SEQ ID NO: 80126 - protein, 28 aa, Artificial Sequence
  Cyclic GFR-binding peptide
  MOD_RES (28), (28): Xaa is C or S
LRSVKMAKVDEYDKVVKEVQVEMVVEGX

SEQ ID NO: 80127 - protein, 33 aa, Artificial Sequence; identical to SEQ ID NO: 30572
  Cyclic GFR-binding peptide
  MOD_RES (31), (33): Xaa is C or S

SEQ ID NO: 80128 - protein, 30 aa, Artificial Sequence
  Cyclic GFR-binding peptide
  MOD_RES (1), (1): Xaa is C or S
XVSQDLRPVQIRKIIGKTPKIKKATVMIVK

SEQ ID NO: 80129 - protein, 31 aa, Artificial Sequence
  Cyclic GFR-binding peptide
RPTQVQLEPLPVVYYEIVRKKPIFEQLSNTL

SEQ ID NO: 80130 - protein, 27 aa, Artificial Sequence
  Cyclic GFR-binding peptide
KLSNITVQIMDDSSNVIIGEMSNMVVR

SEQ ID NO: 80131 - protein, 33 aa, Artificial Sequence; identical to SEQ ID NO: 30577
  Cyclic GFR-binding peptide
  MOD_RES (32), (32): Xaa is C or S

SEQ ID NO: 80132 - protein, 31 aa, Artificial Sequence
  Cyclic GFR-binding peptide
  MOD_RES (1), (1): Xaa is C or S
XVPTEEEPLPMVYYRIKPHQGQHEQLSNFLQ

SEQ ID NO: 80133 - protein, 38 aa, Artificial Sequence; identical to SEQ ID NO: 30578
  Cyclic GFR-binding peptide
  MOD_RES (3), (4), (35), (37): Xaa is C or S

SEQ ID NO: 80134 - protein, 31 aa, Artificial Sequence
  Cyclic GFR-binding peptide
  MOD_RES (2), (3): Xaa is C or S
AXXVPTELRSVKMAKVDENEKVVKEVQVDMV

SEQ ID NO: 80135 - protein, 28 aa, Artificial Sequence
  Cyclic GFR-binding peptide
EPLPVVYYEYVRKKPKLEQLSNRLEEHL

SEQ ID NO: 80136 - protein, 22 aa, Artificial Sequence
  Cyclic GFR-binding peptide
SNITVQIMDDSSNVIIGEMSNM

SEQ ID NO: 80137 - protein, 37 aa, Artificial Sequence; identical to SEQ ID NO: 30582
  Cyclic GFR-binding peptide
  MOD_RES (2), (3), (34), (36): Xaa is C or S

SEQ ID NO: 80138 - protein, 36 aa, Artificial Sequence
  Cyclic GFR-binding peptide
  MOD_RES (33), (35): Xaa is C or S
PTEEEPLPMVYYRIKPHQGQHEQLSNFLQHNKXEXR

SEQ ID NO: 80139 - protein, 34 aa, Artificial Sequence; identical to SEQ ID NO: 30584
  Cyclic GFR-binding peptide
  MOD_RES (3), (4): Xaa is C or S

SEQ ID NO: 80140 - protein, 36 aa, Artificial Sequence; identical to SEQ ID NO: 30585
  Cyclic GFR-binding peptide
  MOD_RES (3), (35): Xaa is C or S

SEQ ID NO: 80141 - protein, 26 aa, Artificial Sequence
  Cyclic GFR-binding peptide
RPVQMRKIDENEKVVKKATVDMVVEG

SEQ ID NO: 80142 - protein, 27 aa, Artificial Sequence
  Cyclic GFR-binding peptide
TELSNITMQIMDEYDKVVIGEMSEMVV

SEQ ID NO: 80143 - protein, 41 aa, Artificial Sequence; identical to SEQ ID NO: 30588
  Cyclic GFR-binding peptide
  MOD_RES (6), (7), (38), (40): Xaa is C or S

SEQ ID NO: 80144 - protein, 31 aa, Artificial Sequence
  Cyclic GFR-binding peptide
  MOD_RES (28), (30): Xaa is C or S
DLSNITIQIMIGKTPKIIGEMSMIVKSXKXS

SEQ ID NO: 80145 - protein, 27 aa, Artificial Sequence
  Cyclic GFR-binding peptide
SQDLRPVQIRKIIGKTPKIKKATVMIV

SEQ ID NO: 80146 - protein, 24 aa, Artificial Sequence
  Cyclic GFR-binding peptide
PTELSNITMQIMDEYDKVVIGEMS

SEQ ID NO: 80147 - protein, 29 aa, Artificial Sequence
  Cyclic GFR-binding peptide
  MOD_RES (2), (2): Xaa is C or S
TXAPTKLSNITVQIMDDSSNVIIGEMSNM

SEQ ID NO: 80148 - protein, 38 aa, Artificial Sequence; identical to SEQ ID NO: 30590
  Cyclic GFR-binding peptide
  MOD_RES (3), (37): Xaa is C or S

SEQ ID NO: 80149 - protein, 33 aa, Artificial Sequence
  Cyclic GFR-binding peptide
  MOD_RES (6), (7): Xaa is C or S
YVPKPXXAPTKLRPVQVRKIDDSSNVIKKATVN

SEQ ID NO: 80150 - protein, 35 aa, Artificial Sequence; identical to SEQ ID NO: 30597
  Cyclic GFR-binding peptide
  MOD_RES (3), (4): Xaa is C or S

SEQ ID NO: 80151 - protein, 27 aa, Artificial Sequence
  Cyclic GFR-binding peptide
TKLSNITVQIMDDSSNVIIGEMSNMVV

SEQ ID NO: 80152 - protein, 30 aa, Artificial Sequence
  Cyclic GFR-binding peptide
  MOD_RES (30), (30): Xaa is C or S
TQLSNITVQIMDDSSNVIIGEMSNMVVRAX

SEQ ID NO: 80153 - protein, 30 aa, Artificial Sequence
  Cyclic GFR-binding peptide
PSRVHHEPLTVLYYEYVRKKPKLEQLSNRL

SEQ ID NO: 80154 - protein, 33 aa, Artificial Sequence; identical to SEQ ID NO: 30600
  Cyclic GFR-binding peptide
  MOD_RES (2), (3): Xaa is C or S

SEQ ID NO: 80155 - protein, 34 aa, Artificial Sequence
  Cyclic GFR-binding peptide
  MOD_RES (6), (6): Xaa is C or S
VTKPTXAPTKLRPVQVRKIDDSSNVIKKATVNMV

SEQ ID NO: 80156 - protein, 33 aa, Artificial Sequence
  Cyclic GFR-binding peptide
  MOD_RES (6), (7): Xaa is C or S
ASASPXXVSQDLRPVQIRKIIGKTPKIKKATVM

SEQ ID NO: 80157 - protein, 31 aa, Artificial Sequence
  Cyclic GFR-binding peptide
TEEEPLTMLYYRIKPHQGQHEQLSNFLQHNK

SEQ ID NO: 80158 - protein, 36 aa, Artificial Sequence; identical to SEQ ID NO: 30602
  Cyclic GFR-binding peptide
  MOD_RES (3), (4), (35): Xaa is C or S

SEQ ID NO: 80159 - protein, 31 aa, Artificial Sequence
  Cyclic GFR-binding peptide
  MOD_RES (3), (4): Xaa is C or S
KAXXVPTELRSVKMAKVDENEKVVKEVQVDM

SEQ ID NO: 80160 - protein, 30 aa, Artificial Sequence
  Cyclic GFR-binding peptide
  MOD_RES (30), (30): Xaa is C or S
TELRSVKMAKVDENEKVVKEVQVDMVVEGX

SEQ ID NO: 80161 - protein, 37 aa, Artificial Sequence; identical to SEQ ID NO: 30605
  Cyclic GFR-binding peptide
  MOD_RES (6), (6): Xaa is C or S

SEQ ID NO: 80162 - protein, 27 aa, Artificial Sequence
  Cyclic GFR-binding peptide
  MOD_RES (27), (27): Xaa is C or S
RPVQMRKIDENEKVVKKATVDMVVEGX

SEQ ID NO: 80163 - protein, 29 aa, Artificial Sequence
  Cyclic GFR-binding peptide
RPVQVRKIDDSSNVIKKATVAAAAAAAAA

SEQ ID NO: 80164 - protein, 35 aa, Artificial Sequence
  Cyclic GFR-binding peptide
  MOD_RES (5), (6): Xaa is C or S
IPKAXXVPTELRSVKMAKVDEYDKVVKEVQVEMVV

SEQ ID NO: 80165 - protein, 32 aa, Artificial Sequence
  Cyclic GFR-binding peptide
PTQVQLEPLPVVYYEIVRKKPIFEQLSNTLED

SEQ ID NO: 80166 - protein, 31 aa, Artificial Sequence
  Cyclic GFR-binding peptide
  MOD_RES (3), (4): Xaa is C or S
APXXVPQALRPVQIRKIVGRKPKVKKATVMI

SEQ ID NO: 80167 - protein, 34 aa, Artificial Sequence; identical to SEQ ID NO: 30615
  Cyclic GFR-binding peptide

SEQ ID NO: 80168 - protein, 35 aa, Artificial Sequence
  Cyclic GFR-binding peptide
  MOD_RES (3), (3): Xaa is C or S
VQXRPTQVQLEPLPVVYYEIVRKKPIFEQLSNTLE

SEQ ID NO: 80169 - protein, 25 aa, Artificial Sequence
  Cyclic GFR-binding peptide
LSNITVQIMDDSSNVIIGEMSNMVV

SEQ ID NO: 80170 - protein, 25 aa, Artificial Sequence
  Cyclic GFR-binding peptide
ELSNITMQIMDEYDKVVIGEMSEMV

SEQ ID NO: 80171 - protein, 31 aa, Artificial Sequence
  Cyclic GFR-binding peptide
  MOD_RES (30), (30): Xaa is C or S
EPLPVVYYEYVRKKPKLEQLSNRLEEHLEXA

SEQ ID NO: 80172 - protein, 33 aa, Artificial Sequence; identical to SEQ ID NO: 30625
  Cyclic GFR-binding peptide
  MOD_RES (1), (2), (33): Xaa is C or S

SEQ ID NO: 80173 - protein, 26 aa, Artificial Sequence
  Cyclic GFR-binding peptide
QLRSVKVAKVDDSSNVIKEVQVNMVV

SEQ ID NO: 80174 - protein, 38 aa, Artificial Sequence; identical to SEQ ID NO: 30631
  Cyclic GFR-binding peptide
  MOD_RES (3), (4), (36), (38): Xaa is C or S

SEQ ID NO: 80175 - protein, 29 aa, Artificial Sequence
  Cyclic GFR-binding peptide
  MOD_RES (28), (28): Xaa is C or S
LSNITVQIMDDSSNVIIGEMSNMVVRSXG

SEQ ID NO: 80176 - protein, 24 aa, Artificial Sequence
  Cyclic GFR-binding peptide
HEPLPVVYYEYVRKKPKLEQLSNR

SEQ ID NO: 80177 - protein, 34 aa, Artificial Sequence
  Cyclic GFR-binding peptide
  MOD_RES (6), (7): Xaa is C or S
KIPKAXXVPTELRSVKMAKVDENEKVVKEVQVDM

SEQ ID NO: 80178 - protein, 31 aa, Artificial Sequence
  Cyclic GFR-binding peptide
  MOD_RES (30), (30): Xaa is C or S
TKLRPVQVRKIDDSSNVIKKATVNMVVRSXG

SEQ ID NO: 80179 - protein, 34 aa, Artificial Sequence
  Cyclic GFR-binding peptide
  MOD_RES (6), (7): Xaa is C or S
TVPKPXXAPTQLRSVKVAKVDDSSNVIKEVQVNM

SEQ ID NO: 80180 - protein, 28 aa, Artificial Sequence
  Cyclic GFR-binding peptide
VPQALSNITIQIMVGRKPKVIGEMSMIV

SEQ ID NO: 80181 - protein, 34 aa, Artificial Sequence
  Cyclic GFR-binding peptide
  MOD_RES (31), (33): Xaa is C or S
PTKLSNITVQIMDDSSNVIIGEMSNMVVRSXGXH

SEQ ID NO: 80182 - protein, 27 aa, Artificial Sequence
  Cyclic GFR-binding peptide
  MOD_RES (1), (1): Xaa is C or S
XAPTKLRSVKVAKVDDSSNVIKEVQVN

SEQ ID NO: 80183 - protein, 25 aa, Artificial Sequence
  Cyclic GFR-binding peptide
PTELRSVKMAKVDEYDKVVKEVQVE

SEQ ID NO: 80184 - protein, 42 aa, Artificial Sequence; identical to SEQ ID NO: 30641
  Cyclic GFR-binding peptide
  MOD_RES (6), (7), (39), (41): Xaa is C or S

SEQ ID NO: 80185 - protein, 30 aa, Artificial Sequence; identical to SEQ ID NO: 30645
  Cyclic GFR-binding peptide

SEQ ID NO: 80186 - protein, 37 aa, Artificial Sequence; identical to SEQ ID NO: 30650
  Cyclic GFR-binding peptide
  MOD_RES (4), (5), (37): Xaa is C or S

SEQ ID NO: 80187 - protein, 33 aa, Artificial Sequence; identical to SEQ ID NO: 30653
  Cyclic GFR-binding peptide
  MOD_RES (2), (3): Xaa is C or S

SEQ ID NO: 80188 - protein, 36 aa, Artificial Sequence
  Cyclic GFR-binding peptide
  MOD_RES (6), (7): Xaa is C or S
ASASPXXVSQDLSNITIQIMIGKTPKIIGEMSMIVK

SEQ ID NO: 80189 - protein, 29 aa, Artificial Sequence
  Cyclic GFR-binding peptide
RVHHEPLPVVYYEYVRKKPKLEQLSNRLE

SEQ ID NO: 80190 - protein, 23 aa, Artificial Sequence
  Cyclic GFR-binding peptide
HEPLTVLYYEYVRKKPKLEQLSN

SEQ ID NO: 80191 - protein, 25 aa, Artificial Sequence
  Cyclic GFR-binding peptide
PQALSNITIQIMVGRKPKVIGEMSM

SEQ ID NO: 80192 - protein, 38 aa, Artificial Sequence; identical to SEQ ID NO: 30661
  Cyclic GFR-binding peptide
  MOD_RES (37), (37): Xaa is C or S

SEQ ID NO: 80193 - protein, 34 aa, Artificial Sequence
  Cyclic GFR-binding peptide
  MOD_RES (3), (3): Xaa is C or S
VKXQPSRVHHEPLTVLYYEYVRKKPKLEQLSNRL

SEQ ID NO: 80194 - protein, 40 aa, Artificial Sequence; identical to SEQ ID NO: 30664
  Cyclic GFR-binding peptide
  MOD_RES (5), (6), (37), (39): Xaa is C or S

SEQ ID NO: 80195 - protein, 45 aa, Artificial Sequence; identical to SEQ ID NO: 30666
  Cyclic GFR-binding peptide
  MOD_RES (5), (42), (44): Xaa is C or S

SEQ ID NO: 80196 - protein, 29 aa, Artificial Sequence
  Cyclic GFR-binding peptide
VSQDLRPVQIRKIIGKTPKIKKATVMIVK

SEQ ID NO: 80197 - protein, 33 aa, Artificial Sequence
  Cyclic GFR-binding peptide
  MOD_RES (4), (4): Xaa is C or S
NVQXRPTQVQLEPLTVLYYEIVRKKPIFEQLSN

SEQ ID NO: 80198 - protein, 30 aa, Artificial Sequence
  Cyclic GFR-binding peptide
  MOD_RES (30), (30): Xaa is C or S
EPLPVVYYEIVRKKPIFEQLSNTLEDHLAX

SEQ ID NO: 80199 - protein, 41 aa, Artificial Sequence; identical to SEQ ID NO: 30670
  Cyclic GFR-binding peptide
  MOD_RES (6), (7), (39), (41): Xaa is C or S

SEQ ID NO: 80200 - protein, 31 aa, Artificial Sequence; identical to SEQ ID NO: 30673
  Cyclic GFR-binding peptide
  MOD_RES (1), (1): Xaa is C or S

SEQ ID NO: 80201 - protein, 33 aa, Artificial Sequence
  Cyclic GFR-binding peptide
  MOD_RES (5), (6): Xaa is C or S
IPKAXXVPTELSNITMQIMDEYDKVVIGEMSEM

SEQ ID NO: 80202 - protein, 34 aa, Artificial Sequence; identical to SEQ ID NO: 30674
  Cyclic GFR-binding peptide
  MOD_RES (32), (34): Xaa is C or S

SEQ ID NO: 80203 - protein, 26 aa, Artificial Sequence
  Cyclic GFR-binding peptide
QDLSNITIQIMVGRTPKVIGEMSMVV

SEQ ID NO: 80204 - protein, 32 aa, Artificial Sequence
  Cyclic GFR-binding peptide
  MOD_RES (5), (6): Xaa is C or S
IPKAXXVPTELSNITMQIMDEYDKVVIGEMSE

SEQ ID NO: 80205 - protein, 31 aa, Artificial Sequence
  Cyclic GFR-binding peptide
  MOD_RES (29), (31): Xaa is C or S
QDLRSVKIAKVIGKTPKIKEVQVMIVKSXKX

SEQ ID NO: 80206 - protein, 31 aa, Artificial Sequence
  Cyclic GFR-binding peptide
PTEEEPLTMLYYRIKPHQGQHEQLSNFLQHN

SEQ ID NO: 80207 - protein, 35 aa, Artificial Sequence; identical to SEQ ID NO: 30680
  Cyclic GFR-binding peptide
  MOD_RES (3), (3): Xaa is C or S

SEQ ID NO: 80208 - protein, 33 aa, Artificial Sequence
  Cyclic GFR-binding peptide
  MOD_RES (30), (32): Xaa is C or S
SQDLRSVKIAKVIGKTPKIKEVQVMIVKSXKXS

SEQ ID NO: 80209 - protein, 36 aa, Artificial Sequence; identical to SEQ ID NO: 30684
  Cyclic GFR-binding peptide
  MOD_RES (2), (34), (36): Xaa is C or S

SEQ ID NO: 80210 - protein, 26 aa, Artificial Sequence
  Cyclic GFR-binding peptide
EPLPVVYYEIVRKKPIFEQLSNTLED

SEQ ID NO: 80211 - protein, 26 aa, Artificial Sequence
  Cyclic GFR-binding peptide
EEEPLPMVYYRIKPHQGQHEQLSNFL

SEQ ID NO: 80212 - protein, 30 aa, Artificial Sequence
  Cyclic GFR-binding peptide
  MOD_RES (4), (5): Xaa is C or S
PKPXXAPTQLRPVQVRKIDDSSNVIKKATV

SEQ ID NO: 80213 - protein, 42 aa, Artificial Sequence; identical to SEQ ID NO: 30688
  Cyclic GFR-binding peptide
  MOD_RES (4), (41): Xaa is C or S

SEQ ID NO: 80214 - protein, 27 aa, Artificial Sequence
  Cyclic GFR-binding peptide
TQVQLEPLPVVYYEIVRKKPIFEQLSN

SEQ ID NO: 80215 - protein, 25 aa, Artificial Sequence
  Cyclic GFR-binding peptide
RPVQIRKIVGRKPKVKKATVMIVRS

SEQ ID NO: 80216 - protein, 31 aa, Artificial Sequence
  Cyclic GFR-binding peptide
  MOD_RES (30), (30): Xaa is C or S
EEPLTMLYYRIKPHQGQHEQLSNFLQHNKXE

SEQ ID NO: 80217 - protein, 37 aa, Artificial Sequence; identical to SEQ ID NO: 30699
  Cyclic GFR-binding peptide
  MOD_RES (3), (4), (36): Xaa is C or S

SEQ ID NO: 80218 - protein, 32 aa, Artificial Sequence
  Cyclic GFR-binding peptide
  MOD_RES (5), (6): Xaa is C or S
SASPXXVSQDLRSVKIAKVIGKTPKIKEVQVM

SEQ ID NO: 80219 - protein, 24 aa, Artificial Sequence
  Cyclic GFR-binding peptide
PTQLRPVQVRKIDDSSNVIKKATV

SEQ ID NO: 80220 - protein, 32 aa, Artificial Sequence
  Cyclic GFR-binding peptide
  MOD_RES (31), (31): Xaa is C or S
LEPLTVLYYEIVRKKPIFEQLSNTLEDHLAXK

SEQ ID NO: 80221 - protein, 36 aa, Artificial Sequence; identical to SEQ ID NO: 30702
  Cyclic GFR-binding peptide
  MOD_RES (1), (2), (33), (35): Xaa is C or S

SEQ ID NO: 80222 - protein, 32 aa, Artificial Sequence; identical to SEQ ID NO: 30703
  Cyclic GFR-binding peptide
  MOD_RES (1), (2): Xaa is C or S

SEQ ID NO: 80223 - protein, 29 aa, Artificial Sequence
  Cyclic GFR-binding peptide
  MOD_RES (2), (3): Xaa is C or S
PXXAPTKLRSVKVAKVDDSSNVIKEVQVN

SEQ ID NO: 80224 - protein, 37 aa, Artificial Sequence; identical to SEQ ID NO: 30714
  Cyclic GFR-binding peptide
  MOD_RES (7), (7): Xaa is C or S

SEQ ID NO: 80225 - protein, 40 aa, Artificial Sequence; identical to SEQ ID NO: 30715
  Cyclic GFR-binding peptide
  MOD_RES (4), (5), (37), (39): Xaa is C or S

SEQ ID NO: 80226 - protein, 23 aa, Artificial Sequence
  Cyclic GFR-binding peptide
LRSVKMAKVDENEKVVKEVQVDM

SEQ ID NO: 80227 - protein, 31 aa, Artificial Sequence
  Cyclic GFR-binding peptide
  MOD_RES (31), (31): Xaa is C or S
PTQLRSVKVAKVDDSSNVIKEVQVNMVVRAX

SEQ ID NO: 80228 - protein, 34 aa, Artificial Sequence; identical to SEQ ID NO: 30719
  Cyclic GFR-binding peptide
  MOD_RES (3), (4): Xaa is C or S

SEQ ID NO: 80229 - protein, 22 aa, Artificial Sequence
  Cyclic GFR-binding peptide
EPLTVLYYEIVRKKPIFEQLSN

SEQ ID NO: 80230 - protein, 25 aa, Artificial Sequence
  Cyclic GFR-binding peptide
QDLRPVQIRKIIGKTPKIKKATVMI

SEQ ID NO: 80231 - protein, 32 aa, Artificial Sequence
  Cyclic GFR-binding peptide
  MOD_RES (31), (31): Xaa is C or S
PTKLSNITVQIMDDSSNVIIGEMSNMVVRSXG

SEQ ID NO: 80232 - protein, 40 aa, Artificial Sequence; identical to SEQ ID NO: 30728
  Cyclic GFR-binding peptide
  MOD_RES (5), (6), (38), (40): Xaa is C or S

SEQ ID NO: 80233 - protein, 36 aa, Artificial Sequence; identical to SEQ ID NO: 30734
  Cyclic GFR-binding peptide
  MOD_RES (36), (36): Xaa is C or S

SEQ ID NO: 80234 - protein, 34 aa, Artificial Sequence; identical to SEQ ID NO: 30735
  Cyclic GFR-binding peptide
  MOD_RES (1), (2), (33): Xaa is C or S

SEQ ID NO: 80235 - protein, 24 aa, Artificial Sequence
  Cyclic GFR-binding peptide
TQLSNITVQIMDDSSNVIIGEMSN

SEQ ID NO: 80236 - protein, 29 aa, Artificial Sequence
  Cyclic GFR-binding peptide
  MOD_RES (28), (28): Xaa is C or S
ALRSVKIAKVVGRKPKVKEVQVMIVRSXK

SEQ ID NO: 80237 - protein, 32 aa, Artificial Sequence; identical to SEQ ID NO: 30739
  Cyclic GFR-binding peptide
  MOD_RES (31), (31): Xaa is C or S

SEQ ID NO: 80238 - protein, 37 aa, Artificial Sequence; identical to SEQ ID NO: 30741
  Cyclic GFR-binding peptide
  MOD_RES (2), (3), (35), (37): Xaa is C or S

SEQ ID NO: 80239 - protein, 35 aa, Artificial Sequence; identical to SEQ ID NO: 30742
  Cyclic GFR-binding peptide
  MOD_RES (2), (3), (34): Xaa is C or S

SEQ ID NO: 80240 - protein, 26 aa, Artificial Sequence
  Cyclic GFR-binding peptide
  MOD_RES (1), (1): Xaa is C or S
XVPQALRPVQIRKIVGRKPKVKKATV

SEQ ID NO: 80241 - protein, 33 aa, Artificial Sequence
  Cyclic GFR-binding peptide
  MOD_RES (5), (5): Xaa is C or S
TKPTXAPTKLRPVQVRKIDDSSNVIKKATVNMV

SEQ ID NO: 80242 - protein, 30 aa, Artificial Sequence
  Cyclic GFR-binding peptide
  MOD_RES (2), (3): Xaa is C or S
AXXVPTELRSVKMAKVDEYDKVVKEVQVEM

SEQ ID NO: 80243 - protein, 26 aa, Artificial Sequence
  Cyclic GFR-binding peptide
PTKLRSVKVAKVDDSSNVIKEVQVNM

SEQ ID NO: 80244 - protein, 30 aa, Artificial Sequence
  Cyclic GFR-binding peptide
  MOD_RES (29), (29): Xaa is C or S
QLSNITVQIMDDSSNVIIGEMSNMVVRAXG

SEQ ID NO: 80245 - protein, 30 aa, Artificial Sequence
  Cyclic GFR-binding peptide
  MOD_RES (1), (1): Xaa is C or S
XRPTQVQLEPLPVVYYEIVRKKPIFEQLSN

SEQ ID NO: 80246 - protein, 32 aa, Artificial Sequence; identical to SEQ ID NO: 30749
  Cyclic GFR-binding peptide
  MOD_RES (2), (2): Xaa is C or S

SEQ ID NO: 80247 - protein, 32 aa, Artificial Sequence
  Cyclic GFR-binding peptide
  MOD_RES (2), (3): Xaa is C or S
PXXAPTKLRPVQVRKIDDSSNVIKKATVNMVV

SEQ ID NO: 80248 - protein, 36 aa, Artificial Sequence
  Cyclic GFR-binding peptide
  MOD_RES (5), (5): Xaa is C or S
SSVKXQPSRVHHEPLPVVYYEYVRKKPKLEQLSNRL

SEQ ID NO: 80249 - protein, 26 aa, Artificial Sequence
  Cyclic GFR-binding peptide
EPLTVLYYEIVRKKPIFEQLSNTLED

SEQ ID NO: 80250 - protein, 38 aa, Artificial Sequence; identical to SEQ ID NO: 30757
  Cyclic GFR-binding peptide
  MOD_RES (4), (5), (36), (38): Xaa is C or S

SEQ ID NO: 80251 - protein, 39 aa, Artificial Sequence; identical to SEQ ID NO: 30759
  Cyclic GFR-binding peptide
  MOD_RES (5), (6), (38): Xaa is C or S

SEQ ID NO: 80252 - protein, 33 aa, Artificial Sequence
  Cyclic GFR-binding peptide
  MOD_RES (31), (33): Xaa is C or S
PTELSNITMQIMDENEKVVIGEMSDMVVEGXGX

SEQ ID NO: 80253 - protein, 24 aa, Artificial Sequence
  Cyclic GFR-binding peptide
EEEPLPMVYYRIKPHQGQHEQLSN

SEQ ID NO: 80254 - protein, 36 aa, Artificial Sequence; identical to SEQ ID NO: 30761
  Cyclic GFR-binding peptide
  MOD_RES (4), (5): Xaa is C or S

SEQ ID NO: 80255 - protein, 37 aa, Artificial Sequence; identical to SEQ ID NO: 30763
  Cyclic GFR-binding peptide
  MOD_RES (4), (5), (36): Xaa is C or S

SEQ ID NO: 80256 - protein, 26 aa, Artificial Sequence
  Cyclic GFR-binding peptide
QDLRSVKIAKVVGRTPKVKEVQVMVV

SEQ ID NO: 80257 - protein, 26 aa, Artificial Sequence
  Cyclic GFR-binding peptide
TKLRSVKVAKVDDSSNVIKEVQVNMV

SEQ ID NO: 80258 - protein, 39 aa, Artificial Sequence; identical to SEQ ID NO: 30768
  Cyclic GFR-binding peptide
  MOD_RES (3), (4), (36), (38): Xaa is C or S

SEQ ID NO: 80259 - protein, 27 aa, Artificial Sequence
  Cyclic GFR-binding peptide
VHHEPLPVVYYEYVRKKPKLEQLSNRL

SEQ ID NO: 80260 - protein, 31 aa, Artificial Sequence
  Cyclic GFR-binding peptide
  MOD_RES (28), (30): Xaa is C or S
LSNITVQIMDDSSNVIIGEMSNMVVRSXGXH

SEQ ID NO: 80261 - protein, 39 aa, Artificial Sequence; identical to SEQ ID NO: 30769
  Cyclic GFR-binding peptide
  MOD_RES (1), (38): Xaa is C or S

SEQ ID NO: 80262 - protein, 29 aa, Artificial Sequence
  Cyclic GFR-binding peptide
  MOD_RES (27), (29): Xaa is C or S
RSVKVAKVDDSSNVIKEVQVNMVVRAXGX

SEQ ID NO: 80263 - protein, 30 aa, Artificial Sequence
  Cyclic GFR-binding peptide
  MOD_RES (2), (3): Xaa is C or S
PXXAPTQLSNITVQIMDDSSNVIIGEMSNM

SEQ ID NO: 80264 - protein, 33 aa, Artificial Sequence
  Cyclic GFR-binding peptide
  MOD_RES (3), (4): Xaa is C or S
KAXXVPTELRSVKMAKVDENEKVVKEVQVDMVV

SEQ ID NO: 80265 - protein, 27 aa, Artificial Sequence
  Cyclic GFR-binding peptide
  MOD_RES (2), (2): Xaa is C or S
TXAPTKLSNITVQIMDDSSNVIIGEMS

SEQ ID NO: 80266 - protein, 37 aa, Artificial Sequence; identical to SEQ ID NO: 30780
  Cyclic GFR-binding peptide
  MOD_RES (3), (4), (35), (37): Xaa is C or S

SEQ ID NO: 80267 - protein, 34 aa, Artificial Sequence
  Cyclic GFR-binding peptide
  MOD_RES (5), (6): Xaa is C or S
IPKAXXVPTELSNITMQIMDEYDKVVIGEMSEMV

SEQ ID NO: 80268 - protein, 37 aa, Artificial Sequence; identical to SEQ ID NO: 30781
  Cyclic GFR-binding peptide
  MOD_RES (5), (37): Xaa is C or S

SEQ ID NO: 80269 - protein, 30 aa, Artificial Sequence; identical to SEQ ID NO: 30784
  Cyclic GFR-binding peptide

SEQ ID NO: 80270 - protein, 21 aa, Artificial Sequence
  Cyclic GFR-binding peptide
RPVQIRKIVGRKPKVKKATVM

SEQ ID NO: 80271 - protein, 36 aa, Artificial Sequence; identical to SEQ ID NO: 30786
  Cyclic GFR-binding peptide
  MOD_RES (5), (6): Xaa is C or S

SEQ ID NO: 80272 - protein, 38 aa, Artificial Sequence; identical to SEQ ID NO: 30787
  Cyclic GFR-binding peptide
  MOD_RES (4), (5), (36), (38): Xaa is C or S

SEQ ID NO: 80273 - protein, 41 aa, Artificial Sequence; identical to SEQ ID NO: 30790
  Cyclic GFR-binding peptide
  MOD_RES (6), (7), (39), (41): Xaa is C or S

SEQ ID NO: 80274 - protein, 37 aa, Artificial Sequence; identical to SEQ ID NO: 30797
  Cyclic GFR-binding peptide
  MOD_RES (3), (37): Xaa is C or S

SEQ ID NO: 80275 - protein, 28 aa, Artificial Sequence
  Cyclic GFR-binding peptide
  MOD_RES (27), (27): Xaa is C or S
RSVKMAKVDENEKVVKEVQVDMVVEGXG

SEQ ID NO: 80276 - protein, 37 aa, Artificial Sequence; identical to SEQ ID NO: 30798
  Cyclic GFR-binding peptide
  MOD_RES (2), (3), (34), (36): Xaa is C or S

SEQ ID NO: 80277 - protein, 33 aa, Artificial Sequence
  Cyclic GFR-binding peptide
  MOD_RES (6), (7): Xaa is C or S
ASAAPXXVPQALSNITIQIMVGRKPKVIGEMSM

SEQ ID NO: 80278 - protein, 36 aa, Artificial Sequence; identical to SEQ ID NO: 30800
  Cyclic GFR-binding peptide
  MOD_RES (5), (6): Xaa is C or S

SEQ ID NO: 80279 - protein, 29 aa, Artificial Sequence
  Cyclic GFR-binding peptide
HEPLTVLYYEYVRKKPKLEQLSNRLEEHL

SEQ ID NO: 80280 - protein, 37 aa, Artificial Sequence; identical to SEQ ID NO: 30804
  Cyclic GFR-binding peptide
  MOD_RES (4), (5), (37): Xaa is C or S

SEQ ID NO: 80281 - protein, 30 aa, Artificial Sequence
  Cyclic GFR-binding peptide
  MOD_RES (2), (3): Xaa is C or S
PXXAPTKLSNITVQIMDDSSNVIIGEMSNM

SEQ ID NO: 80282 - protein, 25 aa, Artificial Sequence
  Cyclic GFR-binding peptide
VPQALRPVQIRKIVGRKPKVKKATV

SEQ ID NO: 80283 - protein, 35 aa, Artificial Sequence
  Cyclic GFR-binding peptide
  MOD_RES (6), (7): Xaa is C or S
ASASPXXVSQDLSNITIQIMIGKTPKIIGEMSMIV

SEQ ID NO: 80284 - protein, 33 aa, Artificial Sequence
  Cyclic GFR-binding peptide
  MOD_RES (4), (5): Xaa is C or S
PKAXXVPTELRSVKMAKVDEYDKVVKEVQVEMV

SEQ ID NO: 80285 - protein, 34 aa, Artificial Sequence; identical to SEQ ID NO: 30810
  Cyclic GFR-binding peptide
  MOD_RES (31), (33): Xaa is C or S

SEQ ID NO: 80286 - protein, 35 aa, Artificial Sequence
  Cyclic GFR-binding peptide
  MOD_RES (5), (6): Xaa is C or S
VPKPXXAPTKLSNITVQIMDDSSNVIIGEMSNMVV

SEQ ID NO: 80287 - protein, 33 aa, Artificial Sequence
  Cyclic GFR-binding peptide
  MOD_RES (5), (5): Xaa is C or S
TKPTXAPTKLSNITVQIMDDSSNVIIGEMSNMV

SEQ ID NO: 80288 - protein, 23 aa, Artificial Sequence
  Cyclic GFR-binding peptide
KLRSVKVAKVDDSSNVIKEVQVN

SEQ ID NO: 80289 - protein, 27 aa, Artificial Sequence
  Cyclic GFR-binding peptide
  MOD_RES (1), (2): Xaa is C or S
XXVPTELSNITMQIMDEYDKVVIGEMS

SEQ ID NO: 80290 - protein, 41 aa, Artificial Sequence; identical to SEQ ID NO: 30816
  Cyclic GFR-binding peptide
  MOD_RES (6), (7), (39), (41): Xaa is C or S

SEQ ID NO: 80291 - protein, 26 aa, Artificial Sequence
  Cyclic GFR-binding peptide
APTKLRPVQVRKIDDSSNVIKKATVN

SEQ ID NO: 80292 - protein, 26 aa, Artificial Sequence
  Cyclic GFR-binding peptide
LRPVQIRKIVGRKPKVKKATVMIVRS

SEQ ID NO: 80293 - protein, 26 aa, Artificial Sequence
  Cyclic GFR-binding peptide
  MOD_RES (1), (1): Xaa is C or S
XVPTELSNITMQIMDEYDKVVIGEMS

SEQ ID NO: 80294 - protein, 25 aa, Artificial Sequence
  Cyclic GFR-binding peptide
HHEPLTVLYYEYVRKKPKLEQLSNR

SEQ ID NO: 80295 - protein, 41 aa, Artificial Sequence; identical to SEQ ID NO: 30820
  Cyclic GFR-binding peptide
  MOD_RES (1), (38), (40): Xaa is C or S

SEQ ID NO: 80296 - protein, 36 aa, Artificial Sequence; identical to SEQ ID NO: 30823
  Cyclic GFR-binding peptide
  MOD_RES (3), (4), (36): Xaa is C or S

SEQ ID NO: 80297 - protein, 27 aa, Artificial Sequence
  Cyclic GFR-binding peptide
VPTEEEPLTMLYYRIKPHQGQHEQLSN

SEQ ID NO: 80298 - protein, 30 aa, Artificial Sequence
  Cyclic GFR-binding peptide
  MOD_RES (4), (5): Xaa is C or S
PKAXXVPTELSNITMQIMDENEKVVIGEMS

SEQ ID NO: 80299 - protein, 28 aa, Artificial Sequence
  Cyclic GFR-binding peptide
  MOD_RES (1), (1): Xaa is C or S
XVPTEEEPLTMLYYRIKPHQGQHEQLSN

SEQ ID NO: 80300 - protein, 37 aa, Artificial Sequence; identical to SEQ ID NO: 30824
  Cyclic GFR-binding peptide
  MOD_RES (4), (5), (37): Xaa is C or S

SEQ ID NO: 80301 - protein, 37 aa, Artificial Sequence; identical to SEQ ID NO: 30825
  Cyclic GFR-binding peptide
  MOD_RES (2), (3), (35), (37): Xaa is C or S

SEQ ID NO: 80302 - protein, 30 aa, Artificial Sequence
  Cyclic GFR-binding peptide
  MOD_RES (4), (5): Xaa is C or S
AAPXXVPQALSNITIQIMVGRKPKVIGEMS

SEQ ID NO: 80303 - protein, 33 aa, Artificial Sequence; identical to SEQ ID NO: 30831
  Cyclic GFR-binding peptide
  MOD_RES (32), (32): Xaa is C or S

SEQ ID NO: 80304 - protein, 34 aa, Artificial Sequence; identical to SEQ ID NO: 30836
  Cyclic GFR-binding peptide

SEQ ID NO: 80305 - protein, 38 aa, Artificial Sequence; identical to SEQ ID NO: 30837
  Cyclic GFR-binding peptide
  MOD_RES (6), (7), (38): Xaa is C or S

SEQ ID NO: 80306 - protein, 28 aa, Artificial Sequence
  Cyclic GFR-binding peptide
  MOD_RES (1), (2): Xaa is C or S
XXVPTELRPVQMRKIDENEKVVKKATVD

SEQ ID NO: 80307 - protein, 30 aa, Artificial Sequence
  Cyclic GFR-binding peptide
  MOD_RES (3), (4): Xaa is C or S
KAXXVPTELRSVKMAKVDENEKVVKEVQVD

SEQ ID NO: 80308 - protein, 31 aa, Artificial Sequence
  Cyclic GFR-binding peptide
  MOD_RES (4), (5): Xaa is C or S
ASPXXVPQDLRSVKIAKVVGRTPKVKEVQVM

SEQ ID NO: 80309 - protein, 28 aa, Artificial Sequence
  Cyclic GFR-binding peptide
VPTEEEPLPMVYYRIKPHQGQHEQLSNF

SEQ ID NO: 80310 - protein, 29 aa, Artificial Sequence
  Cyclic GFR-binding peptide
  MOD_RES (3), (4): Xaa is C or S
KAXXVPTELRPVQMRKIDENEKVVKKATV

SEQ ID NO: 80311 - protein, 27 aa, Artificial Sequence
  Cyclic GFR-binding peptide
QVQLEPLTVLYYEIVRKKPIFEQLSNT

SEQ ID NO: 80312 - protein, 41 aa, Artificial Sequence; identical to SEQ ID NO: 30842
  Cyclic GFR-binding peptide
  MOD_RES (2), (39), (41): Xaa is C or S

SEQ ID NO: 80313 - protein, 29 aa, Artificial Sequence
  Cyclic GFR-binding peptide
RSVKIAKVIGKTPKIKEVQVAAAAAAAAA

SEQ ID NO: 80314 - protein, 33 aa, Artificial Sequence
  Cyclic GFR-binding peptide
  MOD_RES (31), (33): Xaa is C or S
EEEPLTMLYYRIKPHQGQHEQLSNFLQHNKXEX

SEQ ID NO: 80315 - protein, 37 aa, Artificial Sequence; identical to SEQ ID NO: 30844
  Cyclic GFR-binding peptide
  MOD_RES (3), (4), (35), (37): Xaa is C or S

SEQ ID NO: 80316 - protein, 23 aa, Artificial Sequence
  Cyclic GFR-binding peptide
DLRPVQIRKIIGKTPKIKKATVM

SEQ ID NO: 80317 - protein, 40 aa, Artificial Sequence; identical to SEQ ID NO: 30850
  Cyclic GFR-binding peptide
  MOD_RES (4), (5), (37), (39): Xaa is C or S

SEQ ID NO: 80318 - protein, 34 aa, Artificial Sequence
  Cyclic GFR-binding peptide
  MOD_RES (31), (33): Xaa is C or S
EEEPLTMLYYRIKPHQGQHEQLSNFLQHNKXEXR

SEQ ID NO: 80319 - protein, 36 aa, Artificial Sequence; identical to SEQ ID NO: 30854
  Cyclic GFR-binding peptide
  MOD_RES (1), (33), (35): Xaa is C or S

SEQ ID NO: 80320 - protein, 30 aa, Artificial Sequence
  Cyclic GFR-binding peptide
PTELRPVQMRKIDENEKVVKKATVDMVVEG

SEQ ID NO: 80321 - protein, 32 aa, Artificial Sequence; identical to SEQ ID NO: 30856
  Cyclic GFR-binding peptide

SEQ ID NO: 80322 - protein, 29 aa, Artificial Sequence
  Cyclic GFR-binding peptide
  MOD_RES (26), (28): Xaa is C or S
RSVKIAKVVGRTPKVKEVQVMVVKSXKXS

SEQ ID NO: 80323 - protein, 30 aa, Artificial Sequence
  Cyclic GFR-binding peptide
  MOD_RES (28), (30): Xaa is C or S
LRPVQMRKIDEYDKVVKKATVEMVVEGXGX

SEQ ID NO: 80324 - protein, 40 aa, Artificial Sequence; identical to SEQ ID NO: 30861
  Cyclic GFR-binding peptide
  MOD_RES (3), (37), (39): Xaa is C or S

SEQ ID NO: 80325 - protein, 26 aa, Artificial Sequence
  Cyclic GFR-binding peptide
HEPLTVLYYEYVRKKPKLEQLSNRLE

SEQ ID NO: 80326 - protein, 32 aa, Artificial Sequence
  Cyclic GFR-binding peptide
  MOD_RES (29), (31): Xaa is C or S
ELSNITMQIMDEYDKVVIGEMSEMVVEGXGXR

SEQ ID NO: 80327 - protein, 38 aa, Artificial Sequence; identical to SEQ ID NO: 30867
  Cyclic GFR-binding peptide
  MOD_RES (4), (5), (36), (38): Xaa is C or S

SEQ ID NO: 80328 - protein, 32 aa, Artificial Sequence
  Cyclic GFR-binding peptide
  MOD_RES (29), (31): Xaa is C or S
QALRPVQIRKIVGRKPKVKKATVMIVRSXKXS

SEQ ID NO: 80329 - protein, 44 aa, Artificial Sequence; identical to SEQ ID NO: 30870
  Cyclic GFR-binding peptide
  MOD_RES (7), (41), (43): Xaa is C or S

SEQ ID NO: 80330 - protein, 33 aa, Artificial Sequence; identical to SEQ ID NO: 30872
  Cyclic GFR-binding peptide
  MOD_RES (2), (2): Xaa is C or S

SEQ ID NO: 80331 - protein, 31 aa, Artificial Sequence
  Cyclic GFR-binding peptide
VPTEEEPLTMLYYRIKPHQGQHEQLSNFLQH

SEQ ID NO: 80332 - protein, 30 aa, Artificial Sequence
  Cyclic GFR-binding peptide
  MOD_RES (27), (29): Xaa is C or S
LSNITIQIMVGRTPKVIGEMSMVVKSXKXS

SEQ ID NO: 80333 - protein, 36 aa, Artificial Sequence
  Cyclic GFR-binding peptide
  MOD_RES (34), (36): Xaa is C or S
RVHHEPLPVVYYEYVRKKPKLEQLSNRLEEHLEXAX

SEQ ID NO: 80334 - protein, 30 aa, Artificial Sequence
  Cyclic GFR-binding peptide
  MOD_RES (4), (5): Xaa is C or S
PKPXXAPTQLSNITVQIMDDSSNVIIGEMS

SEQ ID NO: 80335 - protein, 21 aa, Artificial Sequence
  Cyclic GFR-binding peptide
RSVKIAKVIGKTPKIKEVQVM

SEQ ID NO: 80336 - protein, 26 aa, Artificial Sequence
  Cyclic GFR-binding peptide
PTKLRPVQVRKIDDSSNVIKKATVNM

SEQ ID NO: 80337 - protein, 29 aa, Artificial Sequence
  Cyclic GFR-binding peptide
VSQDLRSVKIAKVIGKTPKIKEVQVMIVK

SEQ ID NO: 80338 - protein, 37 aa, Artificial Sequence; identical to SEQ ID NO: 30884
  Cyclic GFR-binding peptide
  MOD_RES (6), (7): Xaa is C or S

SEQ ID NO: 80339 - protein, 36 aa, Artificial Sequence; identical to SEQ ID NO: 30885
  Cyclic GFR-binding peptide
  MOD_RES (3), (3): Xaa is C or S

SEQ ID NO: 80340 - protein, 25 aa, Artificial Sequence
  Cyclic GFR-binding peptide
TELSNITMQIMDENEKVVIGEMSDM

SEQ ID NO: 80341 - protein, 27 aa, Artificial Sequence
  Cyclic GFR-binding peptide
EEEPLPMVYYRIKPHQGQHEQLSNFLQ

SEQ ID NO: 80342 - protein, 32 aa, Artificial Sequence
  Cyclic GFR-binding peptide
  MOD_RES (3), (3): Xaa is C or S
PTXAPTKLSNITVQIMDDSSNVIIGEMSNMVV

SEQ ID NO: 80343 - protein, 26 aa, Artificial Sequence
  Cyclic GFR-binding peptide
EPLPMVYYRIKPHQGQHEQLSNFLQH

SEQ ID NO: 80344 - protein, 21 aa, Artificial Sequence
  Cyclic GFR-binding peptide
RSVKVAKVDDSSNVIKEVQVN

SEQ ID NO: 80345 - protein, 21 aa, Artificial Sequence
  Cyclic GFR-binding peptide
LRSVKIAKVIGKTPKIKEVQV

SEQ ID NO: 80346 - protein, 29 aa, Artificial Sequence
  Cyclic GFR-binding peptide
TELRPVQMRKIDEYDKVVKKATVEMVVEG

SEQ ID NO: 80347 - protein, 33 aa, Artificial Sequence
  Cyclic GFR-binding peptide
  MOD_RES (6), (7): Xaa is C or S
SIPKAXXVPTELSNITMQIMDEYDKVVIGEMSE

SEQ ID NO: 80348 - protein, 22 aa, Artificial Sequence
  Cyclic GFR-binding peptide
LRPVQMRKIDEYDKVVKKATVE

SEQ ID NO: 80349 - protein, 25 aa, Artificial Sequence
  Cyclic GFR-binding peptide
EPLPVVYYEYVRKKPKLEQLSNRLE

SEQ ID NO: 80350 - protein, 37 aa, Artificial Sequence; identical to SEQ ID NO: 30896
  Cyclic GFR-binding peptide
  MOD_RES (3), (4), (36): Xaa is C or S

SEQ ID NO: 80351 - protein, 35 aa, Artificial Sequence; identical to SEQ ID NO: 30897
  Cyclic GFR-binding peptide
  MOD_RES (4), (5): Xaa is C or S

SEQ ID NO: 80352 - protein, 30 aa, Artificial Sequence
  Cyclic GFR-binding peptide
  MOD_RES (1), (1): Xaa is C or S
XQPSRVHHEPLTVLYYEYVRKKPKLEQLSN

SEQ ID NO: 80353 - protein, 31 aa, Artificial Sequence
  Cyclic GFR-binding peptide
HHEPLTVLYYEYVRKKPKLEQLSNRLEEHLE

SEQ ID NO: 80354 - protein, 28 aa, Artificial Sequence
  Cyclic GFR-binding peptide
  MOD_RES (2), (3): Xaa is C or S
AXXVPTELSNITMQIMDEYDKVVIGEMS

SEQ ID NO: 80355 - protein, 33 aa, Artificial Sequence
  Cyclic GFR-binding peptide
  MOD_RES (30), (32): Xaa is C or S
EPLPVVYYEIVRKKPIFEQLSNTLEDHLAXKXE

SEQ ID NO: 80356 - protein, 34 aa, Artificial Sequence
  Cyclic GFR-binding peptide
  MOD_RES (5), (6): Xaa is C or S
SASPXXVPQDLRSVKIAKVVGRTPKVKEVQVMVV

SEQ ID NO: 80357 - protein, 41 aa, Artificial Sequence; identical to SEQ ID NO: 30913
  Cyclic GFR-binding peptide
  MOD_RES (5), (6), (38), (40): Xaa is C or S

SEQ ID NO: 80358 - protein, 34 aa, Artificial Sequence; identical to SEQ ID NO: 30914
  Cyclic GFR-binding peptide

SEQ ID NO: 80359 - protein, 28 aa, Artificial Sequence
  Cyclic GFR-binding peptide
SRVHHEPLTVLYYEYVRKKPKLEQLSNR

SEQ ID NO: 80360 - protein, 30 aa, Artificial Sequence; identical to SEQ ID NO: 30918
  Cyclic GFR-binding peptide

SEQ ID NO: 80361 - protein, 31 aa, Artificial Sequence
  Cyclic GFR-binding peptide
  MOD_RES (29), (31): Xaa is C or S
QLRPVQVRKIDDSSNVIKKATVNMVVRAXGX

SEQ ID NO: 80362 - protein, 40 aa, Artificial Sequence; identical to SEQ ID NO: 30920
  Cyclic GFR-binding peptide
  MOD_RES (4), (4): Xaa is C or S

SEQ ID NO: 80363 - protein, 29 aa, Artificial Sequence
  Cyclic GFR-binding peptide
  MOD_RES (4), (4): Xaa is C or S
KPTXAPTKLRSVKVAKVDDSSNVIKEVQV

SEQ ID NO: 80364 - protein, 34 aa, Artificial Sequence; identical to SEQ ID NO: 30923
  Cyclic GFR-binding peptide
  MOD_RES (31), (33): Xaa is C or S

SEQ ID NO: 80365 - protein, 36 aa, Artificial Sequence; identical to SEQ ID NO: 30925
  Cyclic GFR-binding peptide
  MOD_RES (3), (4), (36): Xaa is C or S

SEQ ID NO: 80366 - protein, 26 aa, Artificial Sequence
  Cyclic GFR-binding peptide
LRSVKVAKVDDSSNVIKEVQVNMVVR

SEQ ID NO: 80367 - protein, 29 aa, Artificial Sequence
  Cyclic GFR-binding peptide
EEPLTMLYYRIKPHQGQHEQLSNFLQHNK

SEQ ID NO: 80368 - protein, 30 aa, Artificial Sequence
  Cyclic GFR-binding peptide
  MOD_RES (28), (30): Xaa is C or S
DLSNITIQIMVGRTPKVIGEMSMVVKSXKX

SEQ ID NO: 80369 - protein, 30 aa, Artificial Sequence
  Cyclic GFR-binding peptide
  MOD_RES (3), (4): Xaa is C or S
SPXXVSQDLSNITIQIMIGKTPKIIGEMSM

SEQ ID NO: 80370 - protein, 23 aa, Artificial Sequence
  Cyclic GFR-binding peptide
EEPLTMLYYRIKPHQGQHEQLSN

SEQ ID NO: 80371 - protein, 27 aa, Artificial Sequence
  Cyclic GFR-binding peptide
LEPLPVVYYEIVRKKPIFEQLSNTLED

SEQ ID NO: 80372 - protein, 34 aa, Artificial Sequence; identical to SEQ ID NO: 30937
  Cyclic GFR-binding peptide
  MOD_RES (1), (32), (34): Xaa is C or S

SEQ ID NO: 80373 - protein, 35 aa, Artificial Sequence
  Cyclic GFR-binding peptide
  MOD_RES (5), (6): Xaa is C or S
IPKAXXVPTELRPVQMRKIDEYDKVVKKATVEMVV

SEQ ID NO: 80374 - protein, 23 aa, Artificial Sequence
  Cyclic GFR-binding peptide
ELSNITMQIMDENEKVVIGEMSD

SEQ ID NO: 80375 - protein, 33 aa, Artificial Sequence
  Cyclic GFR-binding peptide
  MOD_RES (5), (5): Xaa is C or S
TKPTXAPTKLRSVKVAKVDDSSNVIKEVQVNMV

SEQ ID NO: 80376 - protein, 35 aa, Artificial Sequence; identical to SEQ ID NO: 30940
  Cyclic GFR-binding peptide
  MOD_RES (2), (2): Xaa is C or S

SEQ ID NO: 80377 - protein, 29 aa, Artificial Sequence
  Cyclic GFR-binding peptide
  MOD_RES (28), (28): Xaa is C or S
ALSNITIQIMVGRKPKVIGEMSMIVRSXK

SEQ ID NO: 80378 - protein, 28 aa, Artificial Sequence
  Cyclic GFR-binding peptide
  MOD_RES (1), (1): Xaa is C or S
XVPQALRSVKIAKVVGRKPKVKEVQVMI

SEQ ID NO: 80379 - protein, 37 aa, Artificial Sequence; identical to SEQ ID NO: 30946
  Cyclic GFR-binding peptide
  MOD_RES (3), (35), (37): Xaa is C or S

SEQ ID NO: 80380 - protein, 25 aa, Artificial Sequence
  Cyclic GFR-binding peptide
HEPLPVVYYEYVRKKPKLEQLSNRL

SEQ ID NO: 80381 - protein, 28 aa, Artificial Sequence
  Cyclic GFR-binding peptide
ELRSVKMAKVDEYDKVVKEVQVEMVVEG

SEQ ID NO: 80382 - protein, 24 aa, Artificial Sequence
  Cyclic GFR-binding peptide
PQALRPVQIRKIVGRKPKVKKATV

SEQ ID NO: 80383 - protein, 38 aa, Artificial Sequence
  Cyclic GFR-binding peptide
  MOD_RES (5), (5): Xaa is C or S
RNVQXRPTQVQLEPLTVLYYEIVRKKPIFEQLSNTLED

SEQ ID NO: 80384 - protein, 31 aa, Artificial Sequence
  Cyclic GFR-binding peptide
  MOD_RES (1), (2): Xaa is C or S
XXVPTELRPVQMRKIDEYDKVVKKATVEMVV

SEQ ID NO: 80385 - protein, 34 aa, Artificial Sequence; identical to SEQ ID NO: 30952
  Cyclic GFR-binding peptide
  MOD_RES (1), (2), (34): Xaa is C or S

SEQ ID NO: 80386 - protein, 34 aa, Artificial Sequence; identical to SEQ ID NO: 30953
  Cyclic GFR-binding peptide
  MOD_RES (32), (34): Xaa is C or S

SEQ ID NO: 80387 - protein, 32 aa, Artificial Sequence
  Cyclic GFR-binding peptide
  MOD_RES (5), (6): Xaa is C or S
VPKPXXAPTQLSNITVQIMDDSSNVIIGEMSN

SEQ ID NO: 80388 - protein, 30 aa, Artificial Sequence
  Cyclic GFR-binding peptide
QLEPLTVLYYEIVRKKPIFEQLSNTLEDHL

SEQ ID NO: 80389 - protein, 31 aa, Artificial Sequence
  Cyclic GFR-binding peptide
  MOD_RES (2), (3): Xaa is C or S
PXXAPTKLRPVQVRKIDDSSNVIKKATVNMV

SEQ ID NO: 80390 - protein, 24 aa, Artificial Sequence
  Cyclic GFR-binding peptide
PTELRSVKMAKVDEYDKVVKEVQV

SEQ ID NO: 80391 - protein, 29 aa, Artificial Sequence
  Cyclic GFR-binding peptide
  MOD_RES (3), (4): Xaa is C or S
APXXVPQALRPVQIRKIVGRKPKVKKATV

SEQ ID NO: 80392 - protein, 29 aa, Artificial Sequence
  Cyclic GFR-binding peptide
  MOD_RES (1), (2): Xaa is C or S
XXVPQALRSVKIAKVVGRKPKVKEVQVMI

SEQ ID NO: 80393 - protein, 27 aa, Artificial Sequence
  Cyclic GFR-binding peptide
TEEEPLTMLYYRIKPHQGQHEQLSNFL

SEQ ID NO: 80394 - protein, 40 aa, Artificial Sequence; identical to SEQ ID NO: 30957
  Cyclic GFR-binding peptide
  MOD_RES (6), (7), (38), (40): Xaa is C or S

SEQ ID NO: 80395 - protein, 38 aa, Artificial Sequence; identical to SEQ ID NO: 30958
  Cyclic GFR-binding peptide
  MOD_RES (4), (4): Xaa is C or S

SEQ ID NO: 80396 - protein, 32 aa, Artificial Sequence
  Cyclic GFR-binding peptide
  MOD_RES (29), (31): Xaa is C or S
QDLRSVKIAKVIGKTPKIKEVQVMIVKSXKXS

SEQ ID NO: 80397 - protein, 30 aa, Artificial Sequence
  Cyclic GFR-binding peptide
  MOD_RES (4), (4): Xaa is C or S
KPTXAPTKLSNITVQIMDDSSNVIIGEMSN

SEQ ID NO: 80398 - protein, 25 aa, Artificial Sequence
  Cyclic GFR-binding peptide
LEPLPVVYYEIVRKKPIFEQLSNTL

SEQ ID NO: 80399 - protein, 32 aa, Artificial Sequence
  Cyclic GFR-binding peptide
  MOD_RES (4), (5): Xaa is C or S
ASPXXVPQDLRSVKIAKVVGRTPKVKEVQVMV

SEQ ID NO: 80400 - protein, 31 aa, Artificial Sequence
  Cyclic GFR-binding peptide
  MOD_RES (31), (31): Xaa is C or S
PTELSNITMQIMDENEKVVIGEMSDMVVEGX

SEQ ID NO: 80401 - protein, 34 aa, Artificial Sequence
  Cyclic GFR-binding peptide
  MOD_RES (6), (6): Xaa is C or S
DEGLEXVPTEEEPLPMVYYRIKPHQGQHEQLSNF

SEQ ID NO: 80402 - protein, 35 aa, Artificial Sequence
  Cyclic GFR-binding peptide
  MOD_RES (7), (7): Xaa is C or S
HVTKPTXAPTKLRSVKVAKVDDSSNVIKEVQVNMV

SEQ ID NO: 80403 - protein, 25 aa, Artificial Sequence
  Cyclic GFR-binding peptide
PTELRPVQMRKIDEYDKVVKKATVE

SEQ ID NO: 80404 - protein, 38 aa, Artificial Sequence; identical to SEQ ID NO: 30967
  Cyclic GFR-binding peptide
  MOD_RES (5), (6), (38): Xaa is C or S

SEQ ID NO: 80405 - protein, 35 aa, Artificial Sequence
  Cyclic GFR-binding peptide
  MOD_RES (5), (6): Xaa is C or S
IPKAXXVPTELSNITMQIMDENEKVVIGEMSDMVV

SEQ ID NO: 80406 - protein, 37 aa, Artificial Sequence; identical to SEQ ID NO: 30971
  Cyclic GFR-binding peptide
  MOD_RES (5), (6): Xaa is C or S

SEQ ID NO: 80407 - protein, 34 aa, Artificial Sequence; identical to SEQ ID NO: 30970
  Cyclic GFR-binding peptide
  MOD_RES (1), (33): Xaa is C or S

SEQ ID NO: 80408 - protein, 34 aa, Artificial Sequence; identical to SEQ ID NO: 30975
  Cyclic GFR-binding peptide
  MOD_RES (1), (33): Xaa is C or S

SEQ ID NO: 80409 - protein, 25 aa, Artificial Sequence
  Cyclic GFR-binding peptide
VPQALSNITIQIMVGRKPKVIGEMS

SEQ ID NO: 80410 - protein, 39 aa, Artificial Sequence; identical to SEQ ID NO: 30977
  Cyclic GFR-binding peptide
  MOD_RES (3), (3): Xaa is C or S

SEQ ID NO: 80411 - protein, 34 aa, Artificial Sequence
  Cyclic GFR-binding peptide
  MOD_RES (31), (33): Xaa is C or S
LEPLPVVYYEIVRKKPIFEQLSNTLEDHLAXKXE

SEQ ID NO: 80412 - protein, 35 aa, Artificial Sequence; identical to SEQ ID NO: 30980
  Cyclic GFR-binding peptide
  MOD_RES (3), (4), (35): Xaa is C or S

SEQ ID NO: 80413 - protein, 32 aa, Artificial Sequence
  Cyclic GFR-binding peptide
  MOD_RES (4), (5): Xaa is C or S
ASPXXVSQDLRSVKIAKVIGKTPKIKEVQVMI

SEQ ID NO: 80414 - protein, 37 aa, Artificial Sequence; identical to SEQ ID NO: 30982
  Cyclic GFR-binding peptide
  MOD_RES (2), (3), (35), (37): Xaa is C or S

SEQ ID NO: 80415 - protein, 42 aa, Artificial Sequence; identical to SEQ ID NO: 30985
  Cyclic GFR-binding peptide
  MOD_RES (7), (39), (41): Xaa is C or S

SEQ ID NO: 80416 - protein, 36 aa, Artificial Sequence; identical to SEQ ID NO: 30986
  Cyclic GFR-binding peptide
  MOD_RES (2), (3), (34), (36): Xaa is C or S

SEQ ID NO: 80417 - protein, 35 aa, Artificial Sequence; identical to SEQ ID NO: 30991
  Cyclic GFR-binding peptide
  MOD_RES (2), (3), (34): Xaa is C or S

SEQ ID NO: 80418 - protein, 30 aa, Artificial Sequence; identical to SEQ ID NO: 30992
  Cyclic GFR-binding peptide

SEQ ID NO: 80419 - protein, 39 aa, Artificial Sequence; identical to SEQ ID NO: 30993
  Cyclic GFR-binding peptide
  MOD_RES (6), (7), (38): Xaa is C or S

SEQ ID NO: 80420 - protein, 26 aa, Artificial Sequence
  Cyclic GFR-binding peptide
LEPLTVLYYEIVRKKPIFEQLSNTLE

SEQ ID NO: 80421 - protein, 27 aa, Artificial Sequence
  Cyclic GFR-binding peptide
VQLEPLPVVYYEIVRKKPIFEQLSNTL

SEQ ID NO: 80422 - protein, 37 aa, Artificial Sequence; identical to SEQ ID NO: 30999
  Cyclic GFR-binding peptide
  MOD_RES (3), (3): Xaa is C or S

SEQ ID NO: 80423 - protein, 22 aa, Artificial Sequence
  Cyclic GFR-binding peptide
RSVKMAKVDENEKVVKEVQVDM

SEQ ID NO: 80424 - protein, 30 aa, Artificial Sequence
  Cyclic GFR-binding peptide
  MOD_RES (2), (3): Xaa is C or S
AXXVPTELSNITMQIMDENEKVVIGEMSDM

SEQ ID NO: 80425 - protein, 28 aa, Artificial Sequence
  Cyclic GFR-binding peptide
  MOD_RES (27), (27): Xaa is C or S
LSNITIQIMVGRKPKVIGEMSMIVRSXK

SEQ ID NO: 80426 - protein, 34 aa, Artificial Sequence; identical to SEQ ID NO: 31001
  Cyclic GFR-binding peptide

SEQ ID NO: 80427 - protein, 34 aa, Artificial Sequence; identical to SEQ ID NO: 31002
  Cyclic GFR-binding peptide
  MOD_RES (3), (4): Xaa is C or S

SEQ ID NO: 80428 - protein, 36 aa, Artificial Sequence; identical to SEQ ID NO: 31007
  Cyclic GFR-binding peptide
  MOD_RES (3), (4), (36): Xaa is C or S

SEQ ID NO: 80429 - protein, 34 aa, Artificial Sequence; identical to SEQ ID NO: 31008
  Cyclic GFR-binding peptide
  MOD_RES (2), (3), (34): Xaa is C or S

SEQ ID NO: 80430 - protein, 31 aa, Artificial Sequence
  Cyclic GFR-binding peptide
  MOD_RES (30), (30): Xaa is C or S
EPLPVVYYEIVRKKPIFEQLSNTLEDHLAXK

SEQ ID NO: 80431 - protein, 30 aa, Artificial Sequence
  Cyclic GFR-binding peptide
  MOD_RES (27), (29): Xaa is C or S
SNITMQIMDEYDKVVIGEMSEMVVEGXGXR

SEQ ID NO: 80432 - protein, 32 aa, Artificial Sequence
  Cyclic GFR-binding peptide
PTQVQLEPLTVLYYEIVRKKPIFEQLSNTLED

SEQ ID NO: 80433 - protein, 29 aa, Artificial Sequence
  Cyclic GFR-binding peptide
TELSNITMQIMDENEKVVIGEMSDMVVEG

SEQ ID NO: 80434 - protein, 38 aa, Artificial Sequence; identical to SEQ ID NO: 31018
  Cyclic GFR-binding peptide
  MOD_RES (4), (5), (36), (38): Xaa is C or S

SEQ ID NO: 80435 - protein, 23 aa, Artificial Sequence
  Cyclic GFR-binding peptide
RSVKIAKVVGRKPKVKEVQVMIV

SEQ ID NO: 80436 - protein, 31 aa, Artificial Sequence
  Cyclic GFR-binding peptide
  MOD_RES (2), (3): Xaa is C or S
AXXVPTELRPVQMRKIDENEKVVKKATVDMV

SEQ ID NO: 80437 - protein, 36 aa, Artificial Sequence; identical to SEQ ID NO: 31021
  Cyclic GFR-binding peptide
  MOD_RES (1), (2), (34), (36): Xaa is C or S

SEQ ID NO: 80438 - protein, 26 aa, Artificial Sequence
  Cyclic GFR-binding peptide
LRSVKIAKVVGRKPKVKEVQVMIVRS

SEQ ID NO: 80439 - protein, 33 aa, Artificial Sequence; identical to SEQ ID NO: 31022
  Cyclic GFR-binding peptide
  MOD_RES (1), (33): Xaa is C or S

SEQ ID NO: 80440 - protein, 32 aa, Artificial Sequence
  Cyclic GFR-binding peptide
  MOD_RES (31), (31): Xaa is C or S
PTQLSNITVQIMDDSSNVIIGEMSNMVVRAXG

SEQ ID NO: 80441 - protein, 26 aa, Artificial Sequence
  Cyclic GFR-binding peptide
TKLSNITVQIMDDSSNVIIGEMSNMV

SEQ ID NO: 80442 - protein, 33 aa, Artificial Sequence
  Cyclic GFR-binding peptide
  MOD_RES (6), (7): Xaa is C or S
KIPKAXXVPTELRPVQMRKIDENEKVVKKATVD

SEQ ID NO: 80443 - protein, 33 aa, Artificial Sequence
  Cyclic GFR-binding peptide
  MOD_RES (31), (33): Xaa is C or S
PTELRSVKMAKVDEYDKVVKEVQVEMVVEGXGX

SEQ ID NO: 80444 - protein, 39 aa, Artificial Sequence; identical to SEQ ID NO: 31027
  Cyclic GFR-binding peptide
  MOD_RES (6), (7), (38): Xaa is C or S

SEQ ID NO: 80445 - protein, 33 aa, Artificial Sequence
  Cyclic GFR-binding peptide
  MOD_RES (33), (33): Xaa is C or S
PTEEEPLPMVYYRIKPHQGQHEQLSNFLQHNKX

SEQ ID NO: 80446 - protein, 27 aa, Artificial Sequence
  Cyclic GFR-binding peptide
EPLPVVYYEYVRKKPKLEQLSNRLEEH

SEQ ID NO: 80447 - protein, 31 aa, Artificial Sequence
  Cyclic GFR-binding peptide
  MOD_RES (28), (30): Xaa is C or S
DLRSVKIAKVVGRTPKVKEVQVMVVKSXKXS

SEQ ID NO: 80448 - protein, 33 aa, Artificial Sequence
  Cyclic GFR-binding peptide
  MOD_RES (32), (32): Xaa is C or S
TEEEPLTMLYYRIKPHQGQHEQLSNFLQHNKXE

SEQ ID NO: 80449 - protein, 36 aa, Artificial Sequence; identical to SEQ ID NO: 31037
  Cyclic GFR-binding peptide
  MOD_RES (1), (33), (35): Xaa is C or S

SEQ ID NO: 80450 - protein, 21 aa, Artificial Sequence
  Cyclic GFR-binding peptide
RSVKMAKVDENEKVVKEVQVD

SEQ ID NO: 80451 - protein, 31 aa, Artificial Sequence
  Cyclic GFR-binding peptide
EPLTVLYYEIVRKKPIFEQLSNAAAAAAAAA

SEQ ID NO: 80452 - protein, 32 aa, Artificial Sequence
  Cyclic GFR-binding peptide
  MOD_RES (1), (1): Xaa is C or S
XQPSRVHHEPLPVVYYEYVRKKPKLEQLSNRL

SEQ ID NO: 80453 - protein, 30 aa, Artificial Sequence
  Cyclic GFR-binding peptide
  MOD_RES (1), (2): Xaa is C or S
XXVPQDLSNITIQIMVGRTPKVIGEMSMVV

SEQ ID NO: 80454 - protein, 31 aa, Artificial Sequence
  Cyclic GFR-binding peptide
QPSRVHHEPLTVLYYEYVRKKPKLEQLSNRL

SEQ ID NO: 80455 - protein, 28 aa, Artificial Sequence
  Cyclic GFR-binding peptide
  MOD_RES (1), (2): Xaa is C or S
XXVPTELRSVKMAKVDENEKVVKEVQVD

SEQ ID NO: 80456 - protein, 33 aa, Artificial Sequence
  Cyclic GFR-binding peptide
  MOD_RES (30), (32): Xaa is C or S
EPLTVLYYEYVRKKPKLEQLSNRLEEHLEXAXA

SEQ ID NO: 80457 - protein, 40 aa, Artificial Sequence; identical to SEQ ID NO: 31047
  Cyclic GFR-binding peptide
  MOD_RES (1), (38), (40): Xaa is C or S

SEQ ID NO: 80458 - protein, 35 aa, Artificial Sequence; identical to SEQ ID NO: 31049
  Cyclic GFR-binding peptide
  MOD_RES (32), (34): Xaa is C or S

SEQ ID NO: 80459 - protein, 41 aa, Artificial Sequence; identical to SEQ ID NO: 31053
  Cyclic GFR-binding peptide
  MOD_RES (6), (7), (39), (41): Xaa is C or S

SEQ ID NO: 80460 - protein, 28 aa, Artificial Sequence
  Cyclic GFR-binding peptide
VPQALRSVKIAKVVGRKPKVKEVQVMIV

SEQ ID NO: 80461 - protein, 37 aa, Artificial Sequence; identical to SEQ ID NO: 31055
  Cyclic GFR-binding peptide
  MOD_RES (2), (34), (36): Xaa is C or S

SEQ ID NO: 80462 - protein, 35 aa, Artificial Sequence
  Cyclic GFR-binding peptide
  MOD_RES (6), (7): Xaa is C or S
YVPKPXXAPTKLRSVKVAKVDDSSNVIKEVQVNMV

SEQ ID NO: 80463 - protein, 32 aa, Artificial Sequence
  Cyclic GFR-binding peptide
  MOD_RES (31), (31): Xaa is C or S
PTELRPVQMRKIDEYDKVVKKATVEMVVEGXG

SEQ ID NO: 80464 - protein, 35 aa, Artificial Sequence
  Cyclic GFR-binding peptide
  MOD_RES (2), (2): Xaa is C or S
KXQPSRVHHEPLTVLYYEYVRKKPKLEQLSNRLEE

SEQ ID NO: 80465 - protein, 31 aa, Artificial Sequence
  Cyclic GFR-binding peptide
  MOD_RES (29), (31): Xaa is C or S
EPLTMLYYRIKPHQGQHEQLSNFLQHNKXEX

SEQ ID NO: 80466 - protein, 32 aa, Artificial Sequence
  Cyclic GFR-binding peptide
  MOD_RES (29), (31): Xaa is C or S
QDLSNITIQIMVGRTPKVIGEMSMVVKSXKXS

SEQ ID NO: 80467 - protein, 30 aa, Artificial Sequence
  Cyclic GFR-binding peptide
  MOD_RES (28), (30): Xaa is C or S
ALRSVKIAKVVGRKPKVKEVQVMIVRSXKX

SEQ ID NO: 80468 - protein, 38 aa, Artificial Sequence; identical to SEQ ID NO: 31063
  Cyclic GFR-binding peptide
  MOD_RES (5), (5): Xaa is C or S

SEQ ID NO: 80469 - protein, 36 aa, Artificial Sequence; identical to SEQ ID NO: 31065
  Cyclic GFR-binding peptide
  MOD_RES (2), (2): Xaa is C or S

SEQ ID NO: 80470 - protein, 30 aa, Artificial Sequence
  Cyclic GFR-binding peptide
  MOD_RES (4), (5): Xaa is C or S
AAPXXVPQALRSVKIAKVVGRKPKVKEVQV

SEQ ID NO: 80471 - protein, 27 aa, Artificial Sequence
  Cyclic GFR-binding peptide
  MOD_RES (1), (2): Xaa is C or S
XXVPTELRSVKMAKVDEYDKVVKEVQV

SEQ ID NO: 80472 - protein, 25 aa, Artificial Sequence
  Cyclic GFR-binding peptide
PQDLSNITIQIMVGRTPKVIGEMSM

SEQ ID NO: 80473 - protein, 28 aa, Artificial Sequence
  Cyclic GFR-binding peptide
  MOD_RES (28), (28): Xaa is C or S
DLRSVKIAKVVGRTPKVKEVQVMVVKSX

SEQ ID NO: 80474 - protein, 30 aa, Artificial Sequence
  Cyclic GFR-binding peptide
  MOD_RES (30), (30): Xaa is C or S
SQDLRSVKIAKVIGKTPKIKEVQVMIVKSX

SEQ ID NO: 80475 - protein, 36 aa, Artificial Sequence; identical to SEQ ID NO: 31069
  Cyclic GFR-binding peptide
  MOD_RES (35), (35): Xaa is C or S

SEQ ID NO: 80476 - protein, 30 aa, Artificial Sequence; identical to SEQ ID NO: 31072
  Cyclic GFR-binding peptide

SEQ ID NO: 80477 - protein, 29 aa, Artificial Sequence
  Cyclic GFR-binding peptide
QPSRVHHEPLTVLYYEYVRKKPKLEQLSN

SEQ ID NO: 80478 - protein, 39 aa, Artificial Sequence; identical to SEQ ID NO: 31079
  Cyclic GFR-binding peptide
  MOD_RES (6), (7), (38): Xaa is C or S

SEQ ID NO: 80479 - protein, 27 aa, Artificial Sequence
  Cyclic GFR-binding peptide
HEPLTVLYYEYVRKKPKLEQLSNRLEE

SEQ ID NO: 80480 - protein, 31 aa, Artificial Sequence
  Cyclic GFR-binding peptide
  MOD_RES (1), (2): Xaa is C or S
XXVPTELRSVKMAKVDEYDKVVKEVQVEMVV

SEQ ID NO: 80481 - protein, 28 aa, Artificial Sequence
  Cyclic GFR-binding peptide
QLEPLTVLYYEIVRKKPIFEQLSNTLED

SEQ ID NO: 80482 - protein, 21 aa, Artificial Sequence
  Cyclic GFR-binding peptide
RPVQVRKIDDSSNVIKKATVN

SEQ ID NO: 80483 - protein, 28 aa, Artificial Sequence
  Cyclic GFR-binding peptide
  MOD_RES (2), (3): Xaa is C or S
AXXVPTELRSVKMAKVDEYDKVVKEVQV

SEQ ID NO: 80484 - protein, 40 aa, Artificial Sequence; identical to SEQ ID NO: 31086
  Cyclic GFR-binding peptide
  MOD_RES (5), (37), (39): Xaa is C or S

SEQ ID NO: 80485 - protein, 27 aa, Artificial Sequence
  Cyclic GFR-binding peptide
LRPVQMRKIDENEKVVKKATVDMVVEG

SEQ ID NO: 80486 - protein, 40 aa, Artificial Sequence; identical to SEQ ID NO: 31090
  Cyclic GFR-binding peptide
  MOD_RES (6), (40): Xaa is C or S

SEQ ID NO: 80487 - protein, 31 aa, Artificial Sequence
  Cyclic GFR-binding peptide
  MOD_RES (4), (5): Xaa is C or S
PKPXXAPTQLRSVKVAKVDDSSNVIKEVQVN

SEQ ID NO: 80488 - protein, 31 aa, Artificial Sequence
  Cyclic GFR-binding peptide
  MOD_RES (5), (6): Xaa is C or S
SAAPXXVPQALRSVKIAKVVGRKPKVKEVQV

SEQ ID NO: 80489 - protein, 34 aa, Artificial Sequence
  Cyclic GFR-binding peptide
  MOD_RES (4), (5): Xaa is C or S
ASPXXVPQDLRSVKIAKVVGRTPKVKEVQVMVVK

SEQ ID NO: 80490 - protein, 23 aa, Artificial Sequence
  Cyclic GFR-binding peptide
LEPLTVLYYEIVRKKPIFEQLSN

SEQ ID NO: 80491 - protein, 37 aa, Artificial Sequence; identical to SEQ ID NO: 31096
  Cyclic GFR-binding peptide
  MOD_RES (4), (5), (36): Xaa is C or S

SEQ ID NO: 80492 - protein, 29 aa, Artificial Sequence
  Cyclic GFR-binding peptide
RSVKVAKVDDSSNVIKEVQVAAAAAAAAA

SEQ ID NO: 80493 - protein, 42 aa, Artificial Sequence; identical to SEQ ID NO: 31097
  Cyclic GFR-binding peptide
  MOD_RES (6), (7), (39), (41): Xaa is C or S

SEQ ID NO: 80494 - protein, 35 aa, Artificial Sequence; identical to SEQ ID NO: 31100
  Cyclic GFR-binding peptide
  MOD_RES (4), (5): Xaa is C or S

SEQ ID NO: 80495 - protein, 26 aa, Artificial Sequence
  Cyclic GFR-binding peptide
QALRPVQIRKIVGRKPKVKKATVMIV

SEQ ID NO: 80496 - protein, 41 aa, Artificial Sequence; identical to SEQ ID NO: 31105
  Cyclic GFR-binding peptide
  MOD_RES (5), (6), (38), (40): Xaa is C or S

SEQ ID NO: 80497 - protein, 33 aa, Artificial Sequence; identical to SEQ ID NO: 31106
  Cyclic GFR-binding peptide
  MOD_RES (1), (2): Xaa is C or S

SEQ ID NO: 80498 - protein, 30 aa, Artificial Sequence
  Cyclic GFR-binding peptide
TEEEPLPMVYYRIKPHQGQHEQLSNFLQHN

SEQ ID NO: 80499 - protein, 35 aa, Artificial Sequence; identical to SEQ ID NO: 31107
  Cyclic GFR-binding peptide
  MOD_RES (1), (2), (34): Xaa is C or S

SEQ ID NO: 80500 - protein, 33 aa, Artificial Sequence; identical to SEQ ID NO: 31108
  Cyclic GFR-binding peptide
  MOD_RES (1), (2), (33): Xaa is C or S

SEQ ID NO: 80501 - protein, 33 aa, Artificial Sequence
  Cyclic GFR-binding peptide
  MOD_RES (6), (7): Xaa is C or S
YVPKPXXAPTKLRSVKVAKVDDSSNVIKEVQVN

SEQ ID NO: 80502 - protein, 37 aa, Artificial Sequence; identical to SEQ ID NO: 31111
  Cyclic GFR-binding peptide
  MOD_RES (37), (37): Xaa is C or S

SEQ ID NO: 80503 - protein, 39 aa, Artificial Sequence; identical to SEQ ID NO: 31112
  Cyclic GFR-binding peptide
  MOD_RES (4), (5), (37), (39): Xaa is C or S

SEQ ID NO: 80504 - protein, 37 aa, Artificial Sequence; identical to SEQ ID NO: 31115
  Cyclic GFR-binding peptide
  MOD_RES (4), (36): Xaa is C or S

SEQ ID NO: 80505 - protein, 35 aa, Artificial Sequence; identical to SEQ ID NO: 31117
  Cyclic GFR-binding peptide

SEQ ID NO: 80506 - protein, 38 aa, Artificial Sequence; identical to SEQ ID NO: 31118
  Cyclic GFR-binding peptide
  MOD_RES (3), (4), (36), (38): Xaa is C or S

SEQ ID NO: 80507 - protein, 28 aa, Artificial Sequence
  Cyclic GFR-binding peptide
EEPLPMVYYRIKPHQGQHEQLSNFLQHN

SEQ ID NO: 80508 - protein, 25 aa, Artificial Sequence
  Cyclic GFR-binding peptide
TELRSVKMAKVDEYDKVVKEVQVEM

SEQ ID NO: 80509 - protein, 34 aa, Artificial Sequence; identical to SEQ ID NO: 31122
  Cyclic GFR-binding peptide
  MOD_RES (32), (34): Xaa is C or S

SEQ ID NO: 80510 - protein, 25 aa, Artificial Sequence
  Cyclic GFR-binding peptide
SQDLRPVQIRKIIGKTPKIKKATVM

SEQ ID NO: 80511 - protein, 29 aa, Artificial Sequence
  Cyclic GFR-binding peptide
  MOD_RES (2), (3): Xaa is C or S
AXXVPTELSNITMQIMDENEKVVIGEMSD

SEQ ID NO: 80512 - protein, 30 aa, Artificial Sequence
  Cyclic GFR-binding peptide
  MOD_RES (3), (4): Xaa is C or S
KAXXVPTELRPVQMRKIDENEKVVKKATVD

SEQ ID NO: 80513 - protein, 38 aa, Artificial Sequence; identical to SEQ ID NO: 31123
  Cyclic GFR-binding peptide
  MOD_RES (3), (4), (36), (38): Xaa is C or S

SEQ ID NO: 80514 - protein, 30 aa, Artificial Sequence
  Cyclic GFR-binding peptide
  MOD_RES (4), (5): Xaa is C or S
PKAXXVPTELRPVQMRKIDENEKVVKKATV

SEQ ID NO: 80515 - protein, 31 aa, Artificial Sequence
  Cyclic GFR-binding peptide
  MOD_RES (29), (31): Xaa is C or S
KLRPVQVRKIDDSSNVIKKATVNMVVRSXGX

SEQ ID NO: 80516 - protein, 22 aa, Artificial Sequence
  Cyclic GFR-binding peptide
DLRPVQIRKIVGRTPKVKKATV

SEQ ID NO: 80517 - protein, 35 aa, Artificial Sequence
  Cyclic GFR-binding peptide
  MOD_RES (5), (6): Xaa is C or S
SASPXXVSQDLSNITIQIMIGKTPKIIGEMSMIVK

SEQ ID NO: 80518 - protein, 30 aa, Artificial Sequence
  Cyclic GFR-binding peptide
  MOD_RES (3), (4): Xaa is C or S
APXXVPQALRSVKIAKVVGRKPKVKEVQVM

SEQ ID NO: 80519 - protein, 34 aa, Artificial Sequence
  Cyclic GFR-binding peptide
  MOD_RES (5), (6): Xaa is C or S
SASPXXVPQDLSNITIQIMVGRTPKVIGEMSMVV

SEQ ID NO: 80520 - protein, 34 aa, Artificial Sequence
  Cyclic GFR-binding peptide
  MOD_RES (3), (3): Xaa is C or S
LEXVPTEEEPLPMVYYRIKPHQGQHEQLSNFLQH

SEQ ID NO: 80521 - protein, 33 aa, Artificial Sequence
  Cyclic GFR-binding peptide
  MOD_RES (4), (4): Xaa is C or S
KPTXAPTKLRPVQVRKIDDSSNVIKKATVNMVV

SEQ ID NO: 80522 - protein, 35 aa, Artificial Sequence; identical to SEQ ID NO: 31132
  Cyclic GFR-binding peptide
  MOD_RES (1), (2), (34): Xaa is C or S

SEQ ID NO: 80523 - protein, 42 aa, Artificial Sequence; identical to SEQ ID NO: 31133
  Cyclic GFR-binding peptide
  MOD_RES (4), (41): Xaa is C or S

SEQ ID NO: 80524 - protein, 24 aa, Artificial Sequence
  Cyclic GFR-binding peptide
LRPVQIRKIVGRKPKVKKATVMIV

SEQ ID NO: 80525 - protein, 31 aa, Artificial Sequence
  Cyclic GFR-binding peptide
  MOD_RES (5), (6): Xaa is C or S
IPKAXXVPTELRPVQMRKIDENEKVVKKATV

SEQ ID NO: 80526 - protein, 23 aa, Artificial Sequence
  Cyclic GFR-binding peptide
SNITIQIMIGKTPKIIGEMSMIV

SEQ ID NO: 80527 - protein, 22 aa, Artificial Sequence
  Cyclic GFR-binding peptide
ELRPVQMRKIDEYDKVVKKATV

SEQ ID NO: 80528 - protein, 34 aa, Artificial Sequence
  Cyclic GFR-binding peptide
  MOD_RES (4), (5): Xaa is C or S
AAPXXVPQALRPVQIRKIVGRKPKVKKATVMIVR

SEQ ID NO: 80529 - protein, 35 aa, Artificial Sequence
  Cyclic GFR-binding peptide
  MOD_RES (6), (7): Xaa is C or S
YVPKPXXAPTKLSNITVQIMDDSSNVIIGEMSNMV

SEQ ID NO: 80530 - protein, 32 aa, Artificial Sequence
  Cyclic GFR-binding peptide
  MOD_RES (6), (7): Xaa is C or S
ASASPXXVPQDLRSVKIAKVVGRTPKVKEVQV

SEQ ID NO: 80531 - protein, 30 aa, Artificial Sequence
  Cyclic GFR-binding peptide
  MOD_RES (1), (1): Xaa is C or S
XVSQDLRSVKIAKVIGKTPKIKEVQVMIVK

SEQ ID NO: 80532 - protein, 33 aa, Artificial Sequence
  Cyclic GFR-binding peptide
  MOD_RES (30), (32): Xaa is C or S
TELRPVQMRKIDEYDKVVKKATVEMVVEGXGXR

SEQ ID NO: 80533 - protein, 35 aa, Artificial Sequence; identical to SEQ ID NO: 31148
  Cyclic GFR-binding peptide
  MOD_RES (1), (2), (33), (35): Xaa is C or S

SEQ ID NO: 80534 - protein, 34 aa, Artificial Sequence
  Cyclic GFR-binding peptide
  MOD_RES (6), (7): Xaa is C or S
ASASPXXVSQDLSNITIQIMIGKTPKIIGEMSMI

SEQ ID NO: 80535 - protein, 31 aa, Artificial Sequence; identical to SEQ ID NO: 31156
  Cyclic GFR-binding peptide
  MOD_RES (1), (1): Xaa is C or S

SEQ ID NO: 80536 - protein, 34 aa, Artificial Sequence; identical to SEQ ID NO: 31159
  Cyclic GFR-binding peptide
  MOD_RES (3), (3): Xaa is C or S

SEQ ID NO: 80537 - protein, 26 aa, Artificial Sequence
  Cyclic GFR-binding peptide
APTKLRSVKVAKVDDSSNVIKEVQVN

SEQ ID NO: 80538 - protein, 30 aa, Artificial Sequence
  Cyclic GFR-binding peptide
  MOD_RES (1), (2): Xaa is C or S
XXVPQALRPVQIRKIVGRKPKVKKATVMIV

SEQ ID NO: 80539 - protein, 35 aa, Artificial Sequence; identical to SEQ ID NO: 31167
  Cyclic GFR-binding peptide
  MOD_RES (3), (4): Xaa is C or S

SEQ ID NO: 80540 - protein, 37 aa, Artificial Sequence; identical to SEQ ID NO: 31168
  Cyclic GFR-binding peptide
  MOD_RES (5), (6), (37): Xaa is C or S

SEQ ID NO: 80541 - protein, 23 aa, Artificial Sequence
  Cyclic GFR-binding peptide
DLRSVKIAKVIGKTPKIKEVQVM

SEQ ID NO: 80542 - protein, 39 aa, Artificial Sequence; identical to SEQ ID NO: 31169
  Cyclic GFR-binding peptide
  MOD_RES (4), (5), (37), (39): Xaa is C or S

SEQ ID NO: 80543 - protein, 33 aa, Artificial Sequence; identical to SEQ ID NO: 31170
  Cyclic GFR-binding peptide
  MOD_RES (1), (2): Xaa is C or S

SEQ ID NO: 80544 - protein, 31 aa, Artificial Sequence
  Cyclic GFR-binding peptide
TQVQLEPLPVVYYEIVRKKPIFEQLSNTLED

SEQ ID NO: 80545 - protein, 34 aa, Artificial Sequence; identical to SEQ ID NO: 31172
  Cyclic GFR-binding peptide
  MOD_RES (2), (3), (34): Xaa is C or S

SEQ ID NO: 80546 - protein, 23 aa, Artificial Sequence
  Cyclic GFR-binding peptide
TELRSVKMAKVDENEKVVKEVQV

SEQ ID NO: 80547 - protein, 30 aa, Artificial Sequence
  Cyclic GFR-binding peptide
RPTQVQLEPLPVVYYEIVRKKPIFEQLSNT

SEQ ID NO: 80548 - protein, 37 aa, Artificial Sequence; identical to SEQ ID NO: 31174
  Cyclic GFR-binding peptide
  MOD_RES (3), (4), (35), (37): Xaa is C or S

SEQ ID NO: 80549 - protein, 29 aa, Artificial Sequence
  Cyclic GFR-binding peptide
TQVQLEPLTVLYYEIVRKKPIFEQLSNTL

SEQ ID NO: 80550 - protein, 32 aa, Artificial Sequence
  Cyclic GFR-binding peptide
  MOD_RES (2), (3): Xaa is C or S
PXXVPQALSNITIQIMVGRKPKVIGEMSMIVR

SEQ ID NO: 80551 - protein, 22 aa, Artificial Sequence
  Cyclic GFR-binding peptide
SNITIQIMVGRKPKVIGEMSMI

SEQ ID NO: 80552 - protein, 35 aa, Artificial Sequence; identical to SEQ ID NO: 31178
  Cyclic GFR-binding peptide
  MOD_RES (34), (34): Xaa is C or S

SEQ ID NO: 80553 - protein, 30 aa, Artificial Sequence
  Cyclic GFR-binding peptide
  MOD_RES (27), (29): Xaa is C or S
LRSVKIAKVIGKTPKIKEVQVMIVKSXKXS

SEQ ID NO: 80554 - protein, 31 aa, Artificial Sequence
  Cyclic GFR-binding peptide
  MOD_RES (28), (30): Xaa is C or S
LRPVQMRKIDEYDKVVKKATVEMVVEGXGXR

SEQ ID NO: 80555 - protein, 27 aa, Artificial Sequence
  Cyclic GFR-binding peptide
VPQALRSVKIAKVVGRKPKVKEVQVMI

SEQ ID NO: 80556 - protein, 39 aa, Artificial Sequence; identical to SEQ ID NO: 31185
  Cyclic GFR-binding peptide
  MOD_RES (4), (36), (38): Xaa is C or S

SEQ ID NO: 80557 - protein, 36 aa, Artificial Sequence; identical to SEQ ID NO: 31190
  Cyclic GFR-binding peptide
  MOD_RES (5), (6): Xaa is C or S

SEQ ID NO: 80558 - protein, 38 aa, Artificial Sequence; identical to SEQ ID NO: 31189
  Cyclic GFR-binding peptide
  MOD_RES (5), (37): Xaa is C or S

SEQ ID NO: 80559 - protein, 39 aa, Artificial Sequence; identical to SEQ ID NO: 31193
  Cyclic GFR-binding peptide
  MOD_RES (6), (6): Xaa is C or S

SEQ ID NO: 80560 - protein, 32 aa, Artificial Sequence; identical to SEQ ID NO: 31195
  Cyclic GFR-binding peptide
  MOD_RES (1), (2): Xaa is C or S

SEQ ID NO: 80561 - protein, 32 aa, Artificial Sequence
  Cyclic GFR-binding peptide
  MOD_RES (30), (32): Xaa is C or S
EPLTVLYYEYVRKKPKLEQLSNRLEEHLEXAX

SEQ ID NO: 80562 - protein, 34 aa, Artificial Sequence; identical to SEQ ID NO: 28476
  Cyclic GFR-binding peptide
  MOD_RES (1), (2), (34): Xaa is C or S

SEQ ID NO: 80563 - protein, 28 aa, Artificial Sequence
  Cyclic GFR-binding peptide
  MOD_RES (2), (3): Xaa is C or S
AXXVPTELRPVQMRKIDEYDKVVKKATV

SEQ ID NO: 80564 - protein, 35 aa, Artificial Sequence; identical to SEQ ID NO: 28477
  Cyclic GFR-binding peptide
  MOD_RES (1), (2), (34): Xaa is C or S

SEQ ID NO: 80565 - protein, 39 aa, Artificial Sequence; identical to SEQ ID NO: 28479
  Cyclic GFR-binding peptide
  MOD_RES (4), (5), (37), (39): Xaa is C or S

SEQ ID NO: 80566 - protein, 34 aa, Artificial Sequence; identical to SEQ ID NO: 28480
  Cyclic GFR-binding peptide
  MOD_RES (1), (32), (34): Xaa is C or S

SEQ ID NO: 80567 - protein, 30 aa, Artificial Sequence
  Cyclic GFR-binding peptide
  MOD_RES (2), (3): Xaa is C or S
PXXAPTQLRPVQVRKIDDSSNVIKKATVNM

SEQ ID NO: 80568 - protein, 38 aa, Artificial Sequence; identical to SEQ ID NO: 28482
  Cyclic GFR-binding peptide
  MOD_RES (3), (35), (37): Xaa is C or S

SEQ ID NO: 80569 - protein, 41 aa, Artificial Sequence; identical to SEQ ID NO: 28483
  Cyclic GFR-binding peptide
  MOD_RES (4), (38), (40): Xaa is C or S

SEQ ID NO: 80570 - protein, 38 aa, Artificial Sequence; identical to SEQ ID NO: 28486
  Cyclic GFR-binding peptide
  MOD_RES (2), (36), (38): Xaa is C or S

SEQ ID NO: 80571 - protein, 36 aa, Artificial Sequence; identical to SEQ ID NO: 28490
  Cyclic GFR-binding peptide
  MOD_RES (3), (4), (35): Xaa is C or S

SEQ ID NO: 80572 - protein, 24 aa, Artificial Sequence
  Cyclic GFR-binding peptide
DLRSVKIAKVVGRTPKVKEVQVMV

SEQ ID NO: 80573 - protein, 23 aa, Artificial Sequence
  Cyclic GFR-binding peptide
RPVQIRKIVGRTPKVKKATVMVV

SEQ ID NO: 80574 - protein, 33 aa, Artificial Sequence; identical to SEQ ID NO: 28500
  Cyclic GFR-binding peptide
  MOD_RES (1), (2), (33): Xaa is C or S

SEQ ID NO: 80575 - protein, 39 aa, Artificial Sequence; identical to SEQ ID NO: 28501
  Cyclic GFR-binding peptide
  MOD_RES (6), (7), (38): Xaa is C or S

SEQ ID NO: 80576 - protein, 39 aa, Artificial Sequence; identical to SEQ ID NO: 28503
  Cyclic GFR-binding peptide
  MOD_RES (3), (4), (36), (38): Xaa is C or S

SEQ ID NO: 80577 - protein, 27 aa, Artificial Sequence
  Cyclic GFR-binding peptide
VPTEEEPLPMVYYRIKPHQGQHEQLSN

SEQ ID NO: 80578 - protein, 25 aa, Artificial Sequence
  Cyclic GFR-binding peptide
RPVQMRKIDENEKVVKKATVDMVVE

SEQ ID NO: 80579 - protein, 29 aa, Artificial Sequence
  Cyclic GFR-binding peptide
VPTELRSVKMAKVDEYDKVVKEVQVEMVV

SEQ ID NO: 80580 - protein, 31 aa, Artificial Sequence; identical to SEQ ID NO: 28505
  Cyclic GFR-binding peptide
  MOD_RES (1), (1): Xaa is C or S

SEQ ID NO: 80581 - protein, 33 aa, Artificial Sequence; identical to SEQ ID NO: 28508
  Cyclic GFR-binding peptide
  MOD_RES (1), (33): Xaa is C or S

SEQ ID NO: 80582 - protein, 35 aa, Artificial Sequence
  Cyclic GFR-binding peptide
  MOD_RES (7), (7): Xaa is C or S
HVTKPTXAPTKLSNITVQIMDDSSNVIIGEMSNMV

SEQ ID NO: 80583 - protein, 32 aa, Artificial Sequence
  Cyclic GFR-binding peptide
  MOD_RES (30), (32): Xaa is C or S
TKLRSVKVAKVDDSSNVIKEVQVNMVVRSXGX

SEQ ID NO: 80584 - protein, 31 aa, Artificial Sequence
  Cyclic GFR-binding peptide
  MOD_RES (1), (2): Xaa is C or S
XXAPTKLSNITVQIMDDSSNVIIGEMSNMVV

SEQ ID NO: 80585 - protein, 36 aa, Artificial Sequence; identical to SEQ ID NO: 28514
  Cyclic GFR-binding peptide
  MOD_RES (4), (5): Xaa is C or S

SEQ ID NO: 80586 - protein, 31 aa, Artificial Sequence
  Cyclic GFR-binding peptide
  MOD_RES (29), (31): Xaa is C or S
QDLRSVKIAKVVGRTPKVKEVQVMVVKSXKX

SEQ ID NO: 80587 - protein, 33 aa, Artificial Sequence
  Cyclic GFR-binding peptide
  MOD_RES (31), (33): Xaa is C or S
PTQLRPVQVRKIDDSSNVIKKATVNMVVRAXGX

SEQ ID NO: 80588 - protein, 29 aa, Artificial Sequence
  Cyclic GFR-binding peptide
  MOD_RES (1), (1): Xaa is C or S
XVPQALRPVQIRKIVGRKPKVKKATVMIV

SEQ ID NO: 80589 - protein, 33 aa, Artificial Sequence
  Cyclic GFR-binding peptide
RPTQVQLEPLPVVYYEIVRKKPIFEQLSNTLED

SEQ ID NO: 80590 - protein, 33 aa, Artificial Sequence; identical to SEQ ID NO: 28522
  Cyclic GFR-binding peptide
  MOD_RES (31), (33): Xaa is C or S

SEQ ID NO: 80591 - protein, 40 aa, Artificial Sequence; identical to SEQ ID NO: 28526
  Cyclic GFR-binding peptide
  MOD_RES (4), (38), (40): Xaa is C or S

SEQ ID NO: 80592 - protein, 29 aa, Artificial Sequence
  Cyclic GFR-binding peptide
EEPLPMVYYRIKPHQGQHEQLSNFLQHNK

SEQ ID NO: 80593 - protein, 35 aa, Artificial Sequence; identical to SEQ ID NO: 28528
  Cyclic GFR-binding peptide
  MOD_RES (1), (2), (33), (35): Xaa is C or S

SEQ ID NO: 80594 - protein, 29 aa, Artificial Sequence
  Cyclic GFR-binding peptide
  MOD_RES (2), (3): Xaa is C or S
AXXVPTELRPVQMRKIDEYDKVVKKATVE

SEQ ID NO: 80595 - protein, 22 aa, Artificial Sequence
  Cyclic GFR-binding peptide
SNITIQIMVGRTPKVIGEMSMV

SEQ ID NO: 80596 - protein, 21 aa, Artificial Sequence
  Cyclic GFR-binding peptide
LRPVQIRKIVGRKPKVKKATV

SEQ ID NO: 80597 - protein, 29 aa, Artificial Sequence
  Cyclic GFR-binding peptide
TKLRSVKVAKVDDSSNVIKEVQVNMVVRS

SEQ ID NO: 80598 - protein, 34 aa, Artificial Sequence; identical to SEQ ID NO: 28532
  Cyclic GFR-binding peptide
  MOD_RES (2), (3): Xaa is C or S

SEQ ID NO: 80599 - protein, 25 aa, Artificial Sequence
  Cyclic GFR-binding peptide
LEPLTVLYYEIVRKKPIFEQLSNTL

SEQ ID NO: 80600 - protein, 37 aa, Artificial Sequence; identical to SEQ ID NO: 28535
  Cyclic GFR-binding peptide
  MOD_RES (2), (36): Xaa is C or S

SEQ ID NO: 80601 - protein, 31 aa, Artificial Sequence
  Cyclic GFR-binding peptide
  MOD_RES (3), (4): Xaa is C or S
KAXXVPTELRSVKMAKVDEYDKVVKEVQVEM

SEQ ID NO: 80602 - protein, 35 aa, Artificial Sequence
  Cyclic GFR-binding peptide
  MOD_RES (32), (34): Xaa is C or S
TEEEPLPMVYYRIKPHQGQHEQLSNFLQHNKXEXR

SEQ ID NO: 80603 - protein, 41 aa, Artificial Sequence; identical to SEQ ID NO: 28537
  Cyclic GFR-binding peptide
  MOD_RES (3), (40): Xaa is C or S

SEQ ID NO: 80604 - protein, 38 aa, Artificial Sequence; identical to SEQ ID NO: 28539
  Cyclic GFR-binding peptide
  MOD_RES (6), (7), (38): Xaa is C or S

SEQ ID NO: 80605 - protein, 35 aa, Artificial Sequence
  Cyclic GFR-binding peptide
  MOD_RES (6), (7): Xaa is C or S
TVPKPXXAPTQLRSVKVAKVDDSSNVIKEVQVNMV

SEQ ID NO: 80606 - protein, 28 aa, Artificial Sequence
  Cyclic GFR-binding peptide
  MOD_RES (3), (3): Xaa is C or S
PTXAPTKLRSVKVAKVDDSSNVIKEVQV

SEQ ID NO: 80607 - protein, 31 aa, Artificial Sequence
  Cyclic GFR-binding peptide
  MOD_RES (31), (31): Xaa is C or S
EEEPLPMVYYRIKPHQGQHEQLSNFLQHNKX

SEQ ID NO: 80608 - protein, 24 aa, Artificial Sequence
  Cyclic GFR-binding peptide
LRPVQIRKIIGKTPKIKKATVMIV

SEQ ID NO: 80609 - protein, 40 aa, Artificial Sequence; identical to SEQ ID NO: 28541
  Cyclic GFR-binding peptide
  MOD_RES (5), (37), (39): Xaa is C or S

SEQ ID NO: 80610 - protein, 30 aa, Artificial Sequence
  Cyclic GFR-binding peptide
  MOD_RES (28), (30): Xaa is C or S
LRPVQVRKIDDSSNVIKKATVNMVVRAXGX

SEQ ID NO: 80611 - protein, 44 aa, Artificial Sequence; identical to SEQ ID NO: 28544
  Cyclic GFR-binding peptide
  MOD_RES (5), (42), (44): Xaa is C or S

SEQ ID NO: 80612 - protein, 24 aa, Artificial Sequence
  Cyclic GFR-binding peptide
PTKLRSVKVAKVDDSSNVIKEVQV

SEQ ID NO: 80613 - protein, 40 aa, Artificial Sequence; identical to SEQ ID NO: 28548
  Cyclic GFR-binding peptide
  MOD_RES (6), (7), (39): Xaa is C or S

SEQ ID NO: 80614 - protein, 28 aa, Artificial Sequence
  Cyclic GFR-binding peptide
  MOD_RES (1), (1): Xaa is C or S
XVPQDLRPVQIRKIVGRTPKVKKATVMV

SEQ ID NO: 80615 - protein, 31 aa, Artificial Sequence
  Cyclic GFR-binding peptide
  MOD_RES (3), (4): Xaa is C or S
KPXXAPTKLRSVKVAKVDDSSNVIKEVQVNM

SEQ ID NO: 80616 - protein, 37 aa, Artificial Sequence; identical to SEQ ID NO: 28551
  Cyclic GFR-binding peptide
  MOD_RES (2), (34), (36): Xaa is C or S

SEQ ID NO: 80617 - protein, 31 aa, Artificial Sequence
  Cyclic GFR-binding peptide
  MOD_RES (1), (2): Xaa is C or S
XXAPTQLRSVKVAKVDDSSNVIKEVQVNMVV

SEQ ID NO: 80618 - protein, 31 aa, Artificial Sequence
  Cyclic GFR-binding peptide
  MOD_RES (3), (4): Xaa is C or S
SPXXVSQDLSNITIQIMIGKTPKIIGEMSMI

SEQ ID NO: 80619 - protein, 35 aa, Artificial Sequence; identical to SEQ ID NO: 28554
  Cyclic GFR-binding peptide
  MOD_RES (1), (32), (34): Xaa is C or S

SEQ ID NO: 80620 - protein, 30 aa, Artificial Sequence
  Cyclic GFR-binding peptide
  MOD_RES (4), (5): Xaa is C or S
PKPXXAPTKLRPVQVRKIDDSSNVIKKATV

SEQ ID NO: 80621 - protein, 26 aa, Artificial Sequence
  Cyclic GFR-binding peptide
  MOD_RES (26), (26): Xaa is C or S
RPVQIRKIIGKTPKIKKATVMIVKSX

SEQ ID NO: 80622 - protein, 33 aa, Artificial Sequence
  Cyclic GFR-binding peptide
  MOD_RES (2), (2): Xaa is C or S
QXRPTQVQLEPLTVLYYEIVRKKPIFEQLSNTL

SEQ ID NO: 80623 - protein, 37 aa, Artificial Sequence; identical to SEQ ID NO: 28555
  Cyclic GFR-binding peptide
  MOD_RES (4), (5), (36): Xaa is C or S

SEQ ID NO: 80624 - protein, 32 aa, Artificial Sequence; identical to SEQ ID NO: 28557
  Cyclic GFR-binding peptide
  MOD_RES (1), (1): Xaa is C or S

SEQ ID NO: 80625 - protein, 40 aa, Artificial Sequence; identical to SEQ ID NO: 28558
  Cyclic GFR-binding peptide
  MOD_RES (1), (38), (40): Xaa is C or S

SEQ ID NO: 80626 - protein, 28 aa, Artificial Sequence
  Cyclic GFR-binding peptide
EEPLTMLYYRIKPHQGQHEQLSNFLQHN

SEQ ID NO: 80627 - protein, 37 aa, Artificial Sequence; identical to SEQ ID NO: 28560
  Cyclic GFR-binding peptide
  MOD_RES (1), (1): Xaa is C or S

SEQ ID NO: 80628 - protein, 22 aa, Artificial Sequence
  Cyclic GFR-binding peptide
ELSNITMQIMDENEKVVIGEMS

SEQ ID NO: 80629 - protein, 31 aa, Artificial Sequence; identical to SEQ ID NO: 28564
  Cyclic GFR-binding peptide

SEQ ID NO: 80630 - protein, 32 aa, Artificial Sequence
  Cyclic GFR-binding peptide
  MOD_RES (3), (4): Xaa is C or S
KAXXVPTELRPVQMRKIDEYDKVVKKATVEMV

SEQ ID NO: 80631 - protein, 42 aa, Artificial Sequence; identical to SEQ ID NO: 28565
  Cyclic GFR-binding peptide
  MOD_RES (5), (39), (41): Xaa is C or S

SEQ ID NO: 80632 - protein, 29 aa, Artificial Sequence
  Cyclic GFR-binding peptide
SRVHHEPLPVVYYEYVRKKPKLEQLSNRL

SEQ ID NO: 80633 - protein, 30 aa, Artificial Sequence
  Cyclic GFR-binding peptide
  MOD_RES (2), (3): Xaa is C or S
PXXVPQALRPVQIRKIVGRKPKVKKATVMI

SEQ ID NO: 80634 - protein, 28 aa, Artificial Sequence
  Cyclic GFR-binding peptide
QDLRSVKIAKVIGKTPKIKEVQVMIVKS

SEQ ID NO: 80635 - protein, 29 aa, Artificial Sequence
  Cyclic GFR-binding peptide
  MOD_RES (27), (29): Xaa is C or S
SNITVQIMDDSSNVIIGEMSNMVVRSXGX

SEQ ID NO: 80636 - protein, 35 aa, Artificial Sequence
  Cyclic GFR-binding peptide
  MOD_RES (6), (7): Xaa is C or S
ASASPXXVPQDLSNITIQIMVGRTPKVIGEMSMVV

SEQ ID NO: 80637 - protein, 29 aa, Artificial Sequence
  Cyclic GFR-binding peptide
VQLEPLPVVYYEIVRKKPIFEQLSNTLED

SEQ ID NO: 80638 - protein, 28 aa, Artificial Sequence
  Cyclic GFR-binding peptide
QDLSNITIQIMIGKTPKIIGEMSMIVKS

SEQ ID NO: 80639 - protein, 26 aa, Artificial Sequence
  Cyclic GFR-binding peptide
  MOD_RES (1), (1): Xaa is C or S
XVPQDLSNITIQIMVGRTPKVIGEMS

SEQ ID NO: 80640 - protein, 31 aa, Artificial Sequence
  Cyclic GFR-binding peptide
  MOD_RES (29), (31): Xaa is C or S
KLSNITVQIMDDSSNVIIGEMSNMVVRSXGX

SEQ ID NO: 80641 - protein, 26 aa, Artificial Sequence
  Cyclic GFR-binding peptide
RPVQVRKIDDSSNVIKKATVNMVVRA

SEQ ID NO: 80642 - protein, 40 aa, Artificial Sequence; identical to SEQ ID NO: 28575
  Cyclic GFR-binding peptide
  MOD_RES (6), (7), (39): Xaa is C or S

SEQ ID NO: 80643 - protein, 31 aa, Artificial Sequence
  Cyclic GFR-binding peptide
  MOD_RES (5), (5): Xaa is C or S
TKPTXAPTKLRSVKVAKVDDSSNVIKEVQVN

SEQ ID NO: 80644 - protein, 34 aa, Artificial Sequence; identical to SEQ ID NO: 28578
  Cyclic GFR-binding peptide
  MOD_RES (3), (4): Xaa is C or S

SEQ ID NO: 80645 - protein, 26 aa, Artificial Sequence
  Cyclic GFR-binding peptide
RPVQVRKIDDSSNVIKKATVNMVVRS

SEQ ID NO: 80646 - protein, 32 aa, Artificial Sequence; identical to SEQ ID NO: 28583
  Cyclic GFR-binding peptide
  MOD_RES (1), (2): Xaa is C or S

SEQ ID NO: 80647 - protein, 33 aa, Artificial Sequence
  Cyclic GFR-binding peptide
  MOD_RES (30), (32): Xaa is C or S
PQALRSVKIAKVVGRKPKVKEVQVMIVRSXKXS

SEQ ID NO: 80648 - protein, 34 aa, Artificial Sequence; identical to SEQ ID NO: 28586
  Cyclic GFR-binding peptide
  MOD_RES (1), (2), (33): Xaa is C or S

SEQ ID NO: 80649 - protein, 25 aa, Artificial Sequence
  Cyclic GFR-binding peptide
RSVKMAKVDEYDKVVKEVQVEMVVE

SEQ ID NO: 80650 - protein, 39 aa, Artificial Sequence; identical to SEQ ID NO: 28597
  Cyclic GFR-binding peptide
  MOD_RES (5), (39): Xaa is C or S

SEQ ID NO: 80651 - protein, 33 aa, Artificial Sequence
  Cyclic GFR-binding peptide
  MOD_RES (3), (3): Xaa is C or S
VKXQPSRVHHEPLPVVYYEYVRKKPKLEQLSNR

SEQ ID NO: 80652 - protein, 30 aa, Artificial Sequence
  Cyclic GFR-binding peptide
  MOD_RES (2), (2): Xaa is C or S
TXAPTKLRPVQVRKIDDSSNVIKKATVNMV

SEQ ID NO: 80653 - protein, 41 aa, Artificial Sequence; identical to SEQ ID NO: 28599
  Cyclic GFR-binding peptide
  MOD_RES (2), (39), (41): Xaa is C or S

SEQ ID NO: 80654 - protein, 40 aa, Artificial Sequence; identical to SEQ ID NO: 28600
  Cyclic GFR-binding peptide
  MOD_RES (6), (38), (40): Xaa is C or S

SEQ ID NO: 80655 - protein, 31 aa, Artificial Sequence
  Cyclic GFR-binding peptide
  MOD_RES (30), (30): Xaa is C or S
TELSNITMQIMDENEKVVIGEMSDMVVEGXG

SEQ ID NO: 80656 - protein, 25 aa, Artificial Sequence
  Cyclic GFR-binding peptide
QALSNITIQIMVGRKPKVIGEMSMI

SEQ ID NO: 80657 - protein, 32 aa, Artificial Sequence; identical to SEQ ID NO: 28610
  Cyclic GFR-binding peptide
  MOD_RES (1), (2): Xaa is C or S

SEQ ID NO: 80658 - protein, 35 aa, Artificial Sequence; identical to SEQ ID NO: 28611
  Cyclic GFR-binding peptide
  MOD_RES (32), (34): Xaa is C or S

SEQ ID NO: 80659 - protein, 35 aa, Artificial Sequence
  Cyclic GFR-binding peptide
  MOD_RES (7), (7): Xaa is C or S
NDEGLEXVPTEEEPLPMVYYRIKPHQGQHEQLSNF

SEQ ID NO: 80660 - protein, 36 aa, Artificial Sequence
  Cyclic GFR-binding peptide
  MOD_RES (6), (7): Xaa is C or S
ASAAPXXVPQALRSVKIAKVVGRKPKVKEVQVMIVR

SEQ ID NO: 80661 - protein, 35 aa, Artificial Sequence; identical to SEQ ID NO: 28619
  Cyclic GFR-binding peptide
  MOD_RES (2), (34): Xaa is C or S

SEQ ID NO: 80662 - protein, 35 aa, Artificial Sequence
  Cyclic GFR-binding peptide
  MOD_RES (5), (6): Xaa is C or S
SAAPXXVPQALRPVQIRKIVGRKPKVKKATVMIVR

SEQ ID NO: 80663 - protein, 27 aa, Artificial Sequence
  Cyclic GFR-binding peptide
TELRSVKMAKVDENEKVVKEVQVDMVV

SEQ ID NO: 80664 - protein, 38 aa, Artificial Sequence; identical to SEQ ID NO: 28630
  Cyclic GFR-binding peptide
  MOD_RES (6), (6): Xaa is C or S

SEQ ID NO: 80665 - protein, 39 aa, Artificial Sequence; identical to SEQ ID NO: 28632
  Cyclic GFR-binding peptide
  MOD_RES (2), (36), (38): Xaa is C or S

SEQ ID NO: 80666 - protein, 22 aa, Artificial Sequence
  Cyclic GFR-binding peptide
QLRPVQVRKIDDSSNVIKKATV

SEQ ID NO: 80667 - protein, 32 aa, Artificial Sequence
  Cyclic GFR-binding peptide
  MOD_RES (5), (6): Xaa is C or S
VPKPXXAPTKLRPVQVRKIDDSSNVIKKATVN

SEQ ID NO: 80668 - protein, 23 aa, Artificial Sequence
  Cyclic GFR-binding peptide
EEPLPMVYYRIKPHQGQHEQLSN

SEQ ID NO: 80669 - protein, 31 aa, Artificial Sequence
  Cyclic GFR-binding peptide
  MOD_RES (29), (31): Xaa is C or S
QDLSNITIQIMIGKTPKIIGEMSMIVKSXKX

SEQ ID NO: 80670 - protein, 33 aa, Artificial Sequence
  Cyclic GFR-binding peptide
  MOD_RES (32), (32): Xaa is C or S
QLEPLTVLYYEIVRKKPIFEQLSNTLEDHLAXK

SEQ ID NO: 80671 - protein, 29 aa, Artificial Sequence
  Cyclic GFR-binding peptide
TELRSVKMAKVDENEKVVKEVQVDMVVEG

SEQ ID NO: 80672 - protein, 36 aa, Artificial Sequence; identical to SEQ ID NO: 28644
  Cyclic GFR-binding peptide
  MOD_RES (4), (4): Xaa is C or S

SEQ ID NO: 80673 - protein, 35 aa, Artificial Sequence; identical to SEQ ID NO: 28645
  Cyclic GFR-binding peptide
  MOD_RES (2), (3), (34): Xaa is C or S

SEQ ID NO: 80674 - protein, 24 aa, Artificial Sequence
  Cyclic GFR-binding peptide
ALRPVQIRKIVGRKPKVKKATVMI

SEQ ID NO: 80675 - protein, 28 aa, Artificial Sequence
  Cyclic GFR-binding peptide
  MOD_RES (27), (27): Xaa is C or S
LRSVKIAKVIGKTPKIKEVQVMIVKSXK

SEQ ID NO: 80676 - protein, 25 aa, Artificial Sequence
  Cyclic GFR-binding peptide
PTQLRPVQVRKIDDSSNVIKKATVN

SEQ ID NO: 80677 - protein, 33 aa, Artificial Sequence
  Cyclic GFR-binding peptide
  MOD_RES (5), (6): Xaa is C or S
SASPXXVPQDLRSVKIAKVVGRTPKVKEVQVMV

SEQ ID NO: 80678 - protein, 31 aa, Artificial Sequence
  Cyclic GFR-binding peptide
  MOD_RES (1), (2): Xaa is C or S
XXVSQDLRSVKIAKVIGKTPKIKEVQVMIVK

SEQ ID NO: 80679 - protein, 37 aa, Artificial Sequence; identical to SEQ ID NO: 28650
  Cyclic GFR-binding peptide
  MOD_RES (6), (7): Xaa is C or S

SEQ ID NO: 80680 - protein, 33 aa, Artificial Sequence; identical to SEQ ID NO: 28652
  Cyclic GFR-binding peptide
  MOD_RES (1), (2), (33): Xaa is C or S

SEQ ID NO: 80681 - protein, 28 aa, Artificial Sequence
  Cyclic GFR-binding peptide
  MOD_RES (1), (1): Xaa is C or S
XAPTKLSNITVQIMDDSSNVIIGEMSNM

SEQ ID NO: 80682 - protein, 35 aa, Artificial Sequence
  Cyclic GFR-binding peptide
  MOD_RES (32), (34): Xaa is C or S
TEEEPLTMLYYRIKPHQGQHEQLSNFLQHNKXEXR

SEQ ID NO: 80683 - protein, 40 aa, Artificial Sequence; identical to SEQ ID NO: 28656
  Cyclic GFR-binding peptide
  MOD_RES (3), (40): Xaa is C or S

SEQ ID NO: 80684 - protein, 31 aa, Artificial Sequence
  Cyclic GFR-binding peptide
  MOD_RES (31), (31): Xaa is C or S
PTELRSVKMAKVDENEKVVKEVQVDMVVEGX

SEQ ID NO: 80685 - protein, 29 aa, Artificial Sequence
  Cyclic GFR-binding peptide
TELRPVQMRKIDENEKVVKKATVDMVVEG

SEQ ID NO: 80686 - protein, 24 aa, Artificial Sequence
  Cyclic GFR-binding peptide
SNITMQIMDEYDKVVIGEMSEMVV

SEQ ID NO: 80687 - protein, 29 aa, Artificial Sequence
  Cyclic GFR-binding peptide
  MOD_RES (2), (3): Xaa is C or S
PXXAPTQLRPVQVRKIDDSSNVIKKATVN

SEQ ID NO: 80688 - protein, 41 aa, Artificial Sequence; identical to SEQ ID NO: 28662
  Cyclic GFR-binding peptide
  MOD_RES (3), (40): Xaa is C or S

SEQ ID NO: 80689 - protein, 25 aa, Artificial Sequence
  Cyclic GFR-binding peptide
VQLEPLPVVYYEIVRKKPIFEQLSN

SEQ ID NO: 80690 - protein, 27 aa, Artificial Sequence
  Cyclic GFR-binding peptide
QALSNITIQIMVGRKPKVIGEMSMIVR

SEQ ID NO: 80691 - protein, 31 aa, Artificial Sequence; identical to SEQ ID NO: 28675
  Cyclic GFR-binding peptide
  MOD_RES (1), (1): Xaa is C or S

SEQ ID NO: 80692 - protein, 29 aa, Artificial Sequence
  Cyclic GFR-binding peptide
  MOD_RES (3), (4): Xaa is C or S
SPXXVPQDLRPVQIRKIVGRTPKVKKATV

SEQ ID NO: 80693 - protein, 34 aa, Artificial Sequence
  Cyclic GFR-binding peptide
  MOD_RES (4), (5): Xaa is C or S
PKAXXVPTELRSVKMAKVDEYDKVVKEVQVEMVV

SEQ ID NO: 80694 - protein, 25 aa, Artificial Sequence
  Cyclic GFR-binding peptide
SNITIQIMIGKTPKIIGEMSMIVKS

SEQ ID NO: 80695 - protein, 32 aa, Artificial Sequence
  Cyclic GFR-binding peptide
  MOD_RES (2), (3): Xaa is C or S
PXXVPQDLSNITIQIMVGRTPKVIGEMSMVVK

SEQ ID NO: 80696 - protein, 34 aa, Artificial Sequence
  Cyclic GFR-binding peptide
  MOD_RES (4), (5): Xaa is C or S
AAPXXVPQALRSVKIAKVVGRKPKVKEVQVMIVR

SEQ ID NO: 80697 - protein, 28 aa, Artificial Sequence
  Cyclic GFR-binding peptide
  MOD_RES (1), (2): Xaa is C or S
XXVSQDLRSVKIAKVIGKTPKIKEVQVM

SEQ ID NO: 80698 - protein, 35 aa, Artificial Sequence; identical to SEQ ID NO: 28686
  Cyclic GFR-binding peptide
  MOD_RES (1), (1): Xaa is C or S

SEQ ID NO: 80699 - protein, 26 aa, Artificial Sequence
  Cyclic GFR-binding peptide
LRPVQVRKIDDSSNVIKKATVNMVVR

SEQ ID NO: 80700 - protein, 22 aa, Artificial Sequence
  Cyclic GFR-binding peptide
ELSNITMQIMDEYDKVVIGEMS

SEQ ID NO: 80701 - protein, 28 aa, Artificial Sequence
  Cyclic GFR-binding peptide
  MOD_RES (2), (3): Xaa is C or S
PXXAPTQLSNITVQIMDDSSNVIIGEMS

SEQ ID NO: 80702 - protein, 31 aa, Artificial Sequence
  Cyclic GFR-binding peptide
  MOD_RES (28), (30): Xaa is C or S
ALRSVKIAKVVGRKPKVKEVQVMIVRSXKXS

SEQ ID NO: 80703 - protein, 22 aa, Artificial Sequence
  Cyclic GFR-binding peptide
RPVQIRKIVGRKPKVKKATVMI

SEQ ID NO: 80704 - protein, 32 aa, Artificial Sequence; identical to SEQ ID NO: 28696
  Cyclic GFR-binding peptide
  MOD_RES (31), (31): Xaa is C or S

SEQ ID NO: 80705 - protein, 30 aa, Artificial Sequence
  Cyclic GFR-binding peptide
  MOD_RES (28), (30): Xaa is C or S
LRSVKVAKVDDSSNVIKEVQVNMVVRSXGX

SEQ ID NO: 80706 - protein, 40 aa, Artificial Sequence; identical to SEQ ID NO: 28697
  Cyclic GFR-binding peptide
  MOD_RES (1), (38), (40): Xaa is C or S

SEQ ID NO: 80707 - protein, 38 aa, Artificial Sequence; identical to SEQ ID NO: 28698
  Cyclic GFR-binding peptide
  MOD_RES (6), (38): Xaa is C or S

SEQ ID NO: 80708 - protein, 31 aa, Artificial Sequence
  Cyclic GFR-binding peptide
  MOD_RES (4), (5): Xaa is C or S
PKAXXVPTELRPVQMRKIDEYDKVVKKATVE

SEQ ID NO: 80709 - protein, 40 aa, Artificial Sequence; identical to SEQ ID NO: 28701
  Cyclic GFR-binding peptide
  MOD_RES (5), (6), (38), (40): Xaa is C or S

SEQ ID NO: 80710 - protein, 38 aa, Artificial Sequence; identical to SEQ ID NO: 28710
  Cyclic GFR-binding peptide
  MOD_RES (3), (35), (37): Xaa is C or S

SEQ ID NO: 80711 - protein, 26 aa, Artificial Sequence
  Cyclic GFR-binding peptide
PTELRSVKMAKVDEYDKVVKEVQVEM

SEQ ID NO: 80712 - protein, 29 aa, Artificial Sequence
  Cyclic GFR-binding peptide
  MOD_RES (29), (29): Xaa is C or S
QDLRPVQIRKIIGKTPKIKKATVMIVKSX

SEQ ID NO: 80713 - protein, 39 aa, Artificial Sequence; identical to SEQ ID NO: 28714
  Cyclic GFR-binding peptide
  MOD_RES (4), (5), (36), (38): Xaa is C or S

SEQ ID NO: 80714 - protein, 36 aa, Artificial Sequence; identical to SEQ ID NO: 28715
  Cyclic GFR-binding peptide
  MOD_RES (2), (3), (35): Xaa is C or S

SEQ ID NO: 80715 - protein, 30 aa, Artificial Sequence
  Cyclic GFR-binding peptide
  MOD_RES (30), (30): Xaa is C or S
EEPLPMVYYRIKPHQGQHEQLSNFLQHNKX

SEQ ID NO: 80716 - protein, 21 aa, Artificial Sequence
  Cyclic GFR-binding peptide
RPVQIRKIIGKTPKIKKATVM

SEQ ID NO: 80717 - protein, 23 aa, Artificial Sequence
  Cyclic GFR-binding peptide
SNITIQIMVGRKPKVIGEMSMIV

SEQ ID NO: 80718 - protein, 29 aa, Artificial Sequence
  Cyclic GFR-binding peptide
  MOD_RES (26), (28): Xaa is C or S
RPVQIRKIIGKTPKIKKATVMIVKSXKXS

SEQ ID NO: 80719 - protein, 39 aa, Artificial Sequence; identical to SEQ ID NO: 28718
  Cyclic GFR-binding peptide
  MOD_RES (5), (6), (38): Xaa is C or S

SEQ ID NO: 80720 - protein, 36 aa, Artificial Sequence
  Cyclic GFR-binding peptide
  MOD_RES (5), (5): Xaa is C or S
SSVKXQPSRVHHEPLTVLYYEYVRKKPKLEQLSNRL

SEQ ID NO: 80721 - protein, 29 aa, Artificial Sequence
  Cyclic GFR-binding peptide
LEPLPVVYYEIVRKKPIFEQLSNTLEDHL

SEQ ID NO: 80722 - protein, 43 aa, Artificial Sequence; identical to SEQ ID NO: 28721
  Cyclic GFR-binding peptide
  MOD_RES (5), (42): Xaa is C or S

SEQ ID NO: 80723 - protein, 25 aa, Artificial Sequence
  Cyclic GFR-binding peptide
SNITIQIMVGRKPKVIGEMSMIVRS

SEQ ID NO: 80724 - protein, 37 aa, Artificial Sequence; identical to SEQ ID NO: 28723
  Cyclic GFR-binding peptide
  MOD_RES (1), (2), (34), (36): Xaa is C or S

SEQ ID NO: 80725 - protein, 34 aa, Artificial Sequence; identical to SEQ ID NO: 28724
  Cyclic GFR-binding peptide
  MOD_RES (3), (4): Xaa is C or S

SEQ ID NO: 80726 - protein, 35 aa, Artificial Sequence
  Cyclic GFR-binding peptide
  MOD_RES (6), (7): Xaa is C or S
ASASPXXVPQDLRSVKIAKVVGRTPKVKEVQVMVV

SEQ ID NO: 80727 - protein, 27 aa, Artificial Sequence
  Cyclic GFR-binding peptide
  MOD_RES (27), (27): Xaa is C or S
LSNITIQIMVGRKPKVIGEMSMIVRSX

SEQ ID NO: 80728 - protein, 29 aa, Artificial Sequence
  Cyclic GFR-binding peptide
VSQDLSNITIQIMIGKTPKIIGEMSMIVK

SEQ ID NO: 80729 - protein, 45 aa, Artificial Sequence; identical to SEQ ID NO: 28731
  Cyclic GFR-binding peptide
  MOD_RES (5), (42), (44): Xaa is C or S

SEQ ID NO: 80730 - protein, 34 aa, Artificial Sequence; identical to SEQ ID NO: 28733
  Cyclic GFR-binding peptide
  MOD_RES (31), (33): Xaa is C or S

SEQ ID NO: 80731 - protein, 27 aa, Artificial Sequence
  Cyclic GFR-binding peptide
  MOD_RES (26), (26): Xaa is C or S
SNITIQIMVGRKPKVIGEMSMIVRSXK

SEQ ID NO: 80732 - protein, 30 aa, Artificial Sequence
  Cyclic GFR-binding peptide
  MOD_RES (4), (5): Xaa is C or S
ASPXXVSQDLSNITIQIMIGKTPKIIGEMS

SEQ ID NO: 80733 - protein, 39 aa, Artificial Sequence; identical to SEQ ID NO: 28735
  Cyclic GFR-binding peptide
  MOD_RES (3), (4), (36), (38): Xaa is C or S

SEQ ID NO: 80734 - protein, 25 aa, Artificial Sequence
  Cyclic GFR-binding peptide
RSVKIAKVVGRKPKVKEVQVMIVRS

SEQ ID NO: 80735 - protein, 29 aa, Artificial Sequence
  Cyclic GFR-binding peptide
  MOD_RES (3), (4): Xaa is C or S
SPXXVSQDLRSVKIAKVIGKTPKIKEVQV

SEQ ID NO: 80736 - protein, 36 aa, Artificial Sequence
  Cyclic GFR-binding peptide
  MOD_RES (6), (7): Xaa is C or S
YVPKPXXAPTKLRPVQVRKIDDSSNVIKKATVNMVV

SEQ ID NO: 80737 - protein, 31 aa, Artificial Sequence
  Cyclic GFR-binding peptide
  MOD_RES (3), (3): Xaa is C or S
LEXVPTEEEPLPMVYYRIKPHQGQHEQLSNF

SEQ ID NO: 80738 - protein, 22 aa, Artificial Sequence
  Cyclic GFR-binding peptide
DLSNITIQIMVGRTPKVIGEMS

SEQ ID NO: 80739 - protein, 22 aa, Artificial Sequence
  Cyclic GFR-binding peptide
RPVQMRKIDENEKVVKKATVDM

SEQ ID NO: 80740 - protein, 20 aa, Artificial Sequence
  Cyclic GFR-binding peptide
RSVKVAKVDDSSNVIKEVQV

SEQ ID NO: 80741 - protein, 26 aa, Artificial Sequence
  Cyclic GFR-binding peptide
DLRSVKIAKVIGKTPKIKEVQVMIVK

SEQ ID NO: 80742 - protein, 26 aa, Artificial Sequence
  Cyclic GFR-binding peptide
EPLTVLYYEYVRKKPKLEQLSNRLEE

SEQ ID NO: 80743 - protein, 39 aa, Artificial Sequence; identical to SEQ ID NO: 28745
  Cyclic GFR-binding peptide
  MOD_RES (4), (5), (36), (38): Xaa is C or S

SEQ ID NO: 80744 - protein, 35 aa, Artificial Sequence; identical to SEQ ID NO: 28746
  Cyclic GFR-binding peptide
  MOD_RES (1), (33), (35): Xaa is C or S

SEQ ID NO: 80745 - protein, 28 aa, Artificial Sequence
  Cyclic GFR-binding peptide
TELRPVQMRKIDEYDKVVKKATVEMVVE

SEQ ID NO: 80746 - protein, 37 aa, Artificial Sequence; identical to SEQ ID NO: 28751
  Cyclic GFR-binding peptide
  MOD_RES (2), (3), (35), (37): Xaa is C or S

SEQ ID NO: 80747 - protein, 41 aa, Artificial Sequence; identical to SEQ ID NO: 28752
  Cyclic GFR-binding peptide
  MOD_RES (1), (38), (40): Xaa is C or S

SEQ ID NO: 80748 - protein, 33 aa, Artificial Sequence
  Cyclic GFR-binding peptide
  MOD_RES (2), (2): Xaa is C or S
KXQPSRVHHEPLPVVYYEYVRKKPKLEQLSNRL

SEQ ID NO: 80749 - protein, 32 aa, Artificial Sequence; identical to SEQ ID NO: 28757
  Cyclic GFR-binding peptide
  MOD_RES (1), (1): Xaa is C or S

SEQ ID NO: 80750 - protein, 31 aa, Artificial Sequence
  Cyclic GFR-binding peptide
  MOD_RES (4), (5): Xaa is C or S
PKPXXAPTQLRPVQVRKIDDSSNVIKKATVN

SEQ ID NO: 80751 - protein, 36 aa, Artificial Sequence; identical to SEQ ID NO: 28759
  Cyclic GFR-binding peptide
  MOD_RES (1), (33), (35): Xaa is C or S

SEQ ID NO: 80752 - protein, 33 aa, Artificial Sequence
  Cyclic GFR-binding peptide
  MOD_RES (3), (4): Xaa is C or S
APXXVPQALRPVQIRKIVGRKPKVKKATVMIVR

SEQ ID NO: 80753 - protein, 35 aa, Artificial Sequence; identical to SEQ ID NO: 28761
  Cyclic GFR-binding peptide
  MOD_RES (2), (3), (35): Xaa is C or S

SEQ ID NO: 80754 - protein, 35 aa, Artificial Sequence; identical to SEQ ID NO: 28763
  Cyclic GFR-binding peptide
  MOD_RES (4), (5): Xaa is C or S

SEQ ID NO: 80755 - protein, 32 aa, Artificial Sequence
  Cyclic GFR-binding peptide
  MOD_RES (2), (3): Xaa is C or S
PXXVSQDLRPVQIRKIIGKTPKIKKATVMIVK

SEQ ID NO: 80756 - protein, 40 aa, Artificial Sequence; identical to SEQ ID NO: 28769
  Cyclic GFR-binding peptide
  MOD_RES (5), (6), (37), (39): Xaa is C or S

SEQ ID NO: 80757 - protein, 32 aa, Artificial Sequence
  Cyclic GFR-binding peptide
  MOD_RES (3), (4): Xaa is C or S
APXXVPQALRSVKIAKVVGRKPKVKEVQVMIV

SEQ ID NO: 80758 - protein, 31 aa, Artificial Sequence
  Cyclic GFR-binding peptide
  MOD_RES (6), (6): Xaa is C or S
VTKPTXAPTKLRPVQVRKIDDSSNVIKKATV

SEQ ID NO: 80759 - protein, 27 aa, Artificial Sequence
  Cyclic GFR-binding peptide
  MOD_RES (1), (2): Xaa is C or S
XXVPQALRSVKIAKVVGRKPKVKEVQV

SEQ ID NO: 80760 - protein, 30 aa, Artificial Sequence
  Cyclic GFR-binding peptide
  MOD_RES (27), (29): Xaa is C or S
RPVQMRKIDEYDKVVKKATVEMVVEGXGXR

SEQ ID NO: 80761 - protein, 38 aa, Artificial Sequence; identical to SEQ ID NO: 28780
  Cyclic GFR-binding peptide
  MOD_RES (5), (6), (37): Xaa is C or S

SEQ ID NO: 80762 - protein, 32 aa, Artificial Sequence
  Cyclic GFR-binding peptide
  MOD_RES (4), (5): Xaa is C or S
PKAXXVPTELSNITMQIMDENEKVVIGEMSDM

SEQ ID NO: 80763 - protein, 35 aa, Artificial Sequence
  Cyclic GFR-binding peptide
  MOD_RES (6), (7): Xaa is C or S
TVPKPXXAPTQLSNITVQIMDDSSNVIIGEMSNMV

SEQ ID NO: 80764 - protein, 36 aa, Artificial Sequence; identical to SEQ ID NO: 28785
  Cyclic GFR-binding peptide
  MOD_RES (1), (1): Xaa is C or S

SEQ ID NO: 80765 - protein, 36 aa, Artificial Sequence
  Cyclic GFR-binding peptide
  MOD_RES (7), (7): Xaa is C or S
HVTKPTXAPTKLSNITVQIMDDSSNVIIGEMSNMVV

SEQ ID NO: 80766 - protein, 23 aa, Artificial Sequence
  Cyclic GFR-binding peptide
KLSNITVQIMDDSSNVIIGEMSN

SEQ ID NO: 80767 - protein, 36 aa, Artificial Sequence
  Cyclic GFR-binding peptide
  MOD_RES (6), (7): Xaa is C or S
SIPKAXXVPTELRPVQMRKIDEYDKVVKKATVEMVV

SEQ ID NO: 80768 - protein, 29 aa, Artificial Sequence
  Cyclic GFR-binding peptide
  MOD_RES (1), (1): Xaa is C or S
XVPTELSNITMQIMDEYDKVVIGEMSEMV

SEQ ID NO: 80769 - protein, 35 aa, Artificial Sequence; identical to SEQ ID NO: 28790
  Cyclic GFR-binding peptide
  MOD_RES (4), (5): Xaa is C or S

SEQ ID NO: 80770 - protein, 29 aa, Artificial Sequence
  Cyclic GFR-binding peptide
  MOD_RES (2), (3): Xaa is C or S
PXXVPQALRSVKIAKVVGRKPKVKEVQVM

SEQ ID NO: 80771 - protein, 35 aa, Artificial Sequence
  Cyclic GFR-binding peptide
  MOD_RES (5), (6): Xaa is C or S
SASPXXVSQDLRSVKIAKVIGKTPKIKEVQVMIVK

SEQ ID NO: 80772 - protein, 39 aa, Artificial Sequence; identical to SEQ ID NO: 28794
  Cyclic GFR-binding peptide
  MOD_RES (4), (5), (37), (39): Xaa is C or S

SEQ ID NO: 80773 - protein, 32 aa, Artificial Sequence
  Cyclic GFR-binding peptide
QPSRVHHEPLPVVYYEYVRKKPKLEQLSNRLE

SEQ ID NO: 80774 - protein, 33 aa, Artificial Sequence
  Cyclic GFR-binding peptide
  MOD_RES (6), (7): Xaa is C or S
ASAAPXXVPQALRSVKIAKVVGRKPKVKEVQVM

SEQ ID NO: 80775 - protein, 32 aa, Artificial Sequence
  Cyclic GFR-binding peptide
  MOD_RES (30), (32): Xaa is C or S
TELRPVQMRKIDEYDKVVKKATVEMVVEGXGX

SEQ ID NO: 80776 - protein, 32 aa, Artificial Sequence
  Cyclic GFR-binding peptide
  MOD_RES (29), (31): Xaa is C or S
QDLRPVQIRKIIGKTPKIKKATVMIVKSXKXS

SEQ ID NO: 80777 - protein, 33 aa, Artificial Sequence
  Cyclic GFR-binding peptide
  MOD_RES (30), (32): Xaa is C or S
TQLRSVKVAKVDDSSNVIKEVQVNMVVRAXGXH

SEQ ID NO: 80778 - protein, 36 aa, Artificial Sequence; identical to SEQ ID NO: 28801
  Cyclic GFR-binding peptide
  MOD_RES (35), (35): Xaa is C or S

SEQ ID NO: 80779 - protein, 25 aa, Artificial Sequence
  Cyclic GFR-binding peptide
RSVKIAKVIGKTPKIKEVQVMIVKS

SEQ ID NO: 80780 - protein, 24 aa, Artificial Sequence
  Cyclic GFR-binding peptide
RPVQIRKIVGRKPKVKKATVMIVR

SEQ ID NO: 80781 - protein, 28 aa, Artificial Sequence
  Cyclic GFR-binding peptide
  MOD_RES (27), (27): Xaa is C or S
SNITMQIMDEYDKVVIGEMSEMVVEGXG

SEQ ID NO: 80782 - protein, 36 aa, Artificial Sequence
  Cyclic GFR-binding peptide
  MOD_RES (6), (7): Xaa is C or S
TVPKPXXAPTQLRPVQVRKIDDSSNVIKKATVNMVV

SEQ ID NO: 80783 - protein, 30 aa, Artificial Sequence
  Cyclic GFR-binding peptide
  MOD_RES (2), (3): Xaa is C or S
PXXVPQDLRSVKIAKVVGRTPKVKEVQVMV

SEQ ID NO: 80784 - protein, 23 aa, Artificial Sequence
  Cyclic GFR-binding peptide
EPLPMVYYRIKPHQGQHEQLSNF

SEQ ID NO: 80785 - protein, 31 aa, Artificial Sequence
  Cyclic GFR-binding peptide
RVHHEPLTVLYYEYVRKKPKLEQLSNRLEEH

SEQ ID NO: 80786 - protein, 40 aa, Artificial Sequence; identical to SEQ ID NO: 28810
  Cyclic GFR-binding peptide
  MOD_RES (4), (5), (37), (39): Xaa is C or S

SEQ ID NO: 80787 - protein, 29 aa, Artificial Sequence
  Cyclic GFR-binding peptide
  MOD_RES (2), (3): Xaa is C or S
PXXVPQDLRPVQIRKIVGRTPKVKKATVM

SEQ ID NO: 80788 - protein, 26 aa, Artificial Sequence
  Cyclic GFR-binding peptide
QVQLEPLTVLYYEIVRKKPIFEQLSN

SEQ ID NO: 80789 - protein, 25 aa, Artificial Sequence
  Cyclic GFR-binding peptide
RSVKVAKVDDSSNVIKEVQVNMVVR

SEQ ID NO: 80790 - protein, 32 aa, Artificial Sequence
  Cyclic GFR-binding peptide
  MOD_RES (7), (7): Xaa is C or S
HVTKPTXAPTKLRPVQVRKIDDSSNVIKKATV

SEQ ID NO: 80791 - protein, 33 aa, Artificial Sequence
  Cyclic GFR-binding peptide
  MOD_RES (5), (6): Xaa is C or S
VPKPXXAPTQLRPVQVRKIDDSSNVIKKATVNM

SEQ ID NO: 80792 - protein, 24 aa, Artificial Sequence
  Cyclic GFR-binding peptide
HHEPLPVVYYEYVRKKPKLEQLSN

SEQ ID NO: 80793 - protein, 29 aa, Artificial Sequence
  Cyclic GFR-binding peptide
VPTELRPVQMRKIDENEKVVKKATVDMVV

SEQ ID NO: 80794 - protein, 35 aa, Artificial Sequence
  Cyclic GFR-binding peptide
  MOD_RES (5), (5): Xaa is C or S
SSVKXQPSRVHHEPLTVLYYEYVRKKPKLEQLSNR

SEQ ID NO: 80795 - protein, 26 aa, Artificial Sequence
  Cyclic GFR-binding peptide
TELSNITMQIMDEYDKVVIGEMSEMV

SEQ ID NO: 80796 - protein, 33 aa, Artificial Sequence
  Cyclic GFR-binding peptide
  MOD_RES (6), (6): Xaa is C or S
VTKPTXAPTKLRPVQVRKIDDSSNVIKKATVNM

SEQ ID NO: 80797 - protein, 38 aa, Artificial Sequence; identical to SEQ ID NO: 28823
  Cyclic GFR-binding peptide
  MOD_RES (6), (6): Xaa is C or S

SEQ ID NO: 80798 - protein, 25 aa, Artificial Sequence
  Cyclic GFR-binding peptide
QLEPLTVLYYEIVRKKPIFEQLSNT

SEQ ID NO: 80799 - protein, 38 aa, Artificial Sequence; identical to SEQ ID NO: 28829
  Cyclic GFR-binding peptide
  MOD_RES (6), (7), (38): Xaa is C or S

SEQ ID NO: 80800 - protein, 27 aa, Artificial Sequence
  Cyclic GFR-binding peptide
ALRPVQIRKIVGRKPKVKKATVMIVRS

SEQ ID NO: 80801 - protein, 33 aa, Artificial Sequence; identical to SEQ ID NO: 28832
  Cyclic GFR-binding peptide
  MOD_RES (1), (2): Xaa is C or S

SEQ ID NO: 80802 - protein, 20 aa, Artificial Sequence
  Cyclic GFR-binding peptide
RSVKIAKVVGRKPKVKEVQV

SEQ ID NO: 80803 - protein, 22 aa, Artificial Sequence
  Cyclic GFR-binding peptide
EPLTVLYYEYVRKKPKLEQLSN

SEQ ID NO: 80804 - protein, 33 aa, Artificial Sequence
  Cyclic GFR-binding peptide
  MOD_RES (3), (4): Xaa is C or S
SPXXVSQDLRSVKIAKVIGKTPKIKEVQVMIVK

SEQ ID NO: 80805 - protein, 35 aa, Artificial Sequence; identical to SEQ ID NO: 28836
  Cyclic GFR-binding peptide
  MOD_RES (32), (34): Xaa is C or S

SEQ ID NO: 80806 - protein, 34 aa, Artificial Sequence; identical to SEQ ID NO: 28839
  Cyclic GFR-binding peptide
  MOD_RES (32), (34): Xaa is C or S

SEQ ID NO: 80807 - protein, 26 aa, Artificial Sequence
  Cyclic GFR-binding peptide
  MOD_RES (26), (26): Xaa is C or S
RPVQIRKIVGRTPKVKKATVMVVKSX

SEQ ID NO: 80808 - protein, 29 aa, Artificial Sequence
  Cyclic GFR-binding peptide
  MOD_RES (27), (29): Xaa is C or S
RPVQMRKIDENEKVVKKATVDMVVEGXGX

SEQ ID NO: 80809 - protein, 32 aa, Artificial Sequence
  Cyclic GFR-binding peptide
  MOD_RES (30), (32): Xaa is C or S
PQALSNITIQIMVGRKPKVIGEMSMIVRSXKX

SEQ ID NO: 80810 - protein, 31 aa, Artificial Sequence
  Cyclic GFR-binding peptide
  MOD_RES (3), (4): Xaa is C or S
KAXXVPTELSNITMQIMDEYDKVVIGEMSEM

SEQ ID NO: 80811 - protein, 33 aa, Artificial Sequence
  Cyclic GFR-binding peptide
  MOD_RES (5), (6): Xaa is C or S
SASPXXVPQDLSNITIQIMVGRTPKVIGEMSMV

SEQ ID NO: 80812 - protein, 32 aa, Artificial Sequence
  Cyclic GFR-binding peptide
  MOD_RES (31), (31): Xaa is C or S
PTELRPVQMRKIDENEKVVKKATVDMVVEGXG

SEQ ID NO: 80813 - protein, 24 aa, Artificial Sequence
  Cyclic GFR-binding peptide
LRSVKMAKVDEYDKVVKEVQVEMV

SEQ ID NO: 80814 - protein, 34 aa, Artificial Sequence
  Cyclic GFR-binding peptide
  MOD_RES (3), (3): Xaa is C or S
VQXRPTQVQLEPLPVVYYEIVRKKPIFEQLSNTL

SEQ ID NO: 80815 - protein, 39 aa, Artificial Sequence; identical to SEQ ID NO: 28846
  Cyclic GFR-binding peptide
  MOD_RES (4), (5), (36), (38): Xaa is C or S

SEQ ID NO: 80816 - protein, 33 aa, Artificial Sequence; identical to SEQ ID NO: 28847
  Cyclic GFR-binding peptide
  MOD_RES (2), (2): Xaa is C or S

SEQ ID NO: 80817 - protein, 31 aa, Artificial Sequence; identical to SEQ ID NO: 28848
  Cyclic GFR-binding peptide
  MOD_RES (1), (1): Xaa is C or S

SEQ ID NO: 80818 - protein, 32 aa, Artificial Sequence
  Cyclic GFR-binding peptide
QPSRVHHEPLTVLYYEYVRKKPKLEQLSNRLE

SEQ ID NO: 80819 - protein, 35 aa, Artificial Sequence; identical to SEQ ID NO: 28851
  Cyclic GFR-binding peptide
  MOD_RES (1), (1): Xaa is C or S

SEQ ID NO: 80820 - protein, 34 aa, Artificial Sequence; identical to SEQ ID NO: 28852
  Cyclic GFR-binding peptide
  MOD_RES (3), (4): Xaa is C or S

SEQ ID NO: 80821 - protein, 35 aa, Artificial Sequence
  Cyclic GFR-binding peptide
  MOD_RES (5), (6): Xaa is C or S
SASPXXVPQDLRPVQIRKIVGRTPKVKKATVMVVK

SEQ ID NO: 80822 - protein, 25 aa, Artificial Sequence
  Cyclic GFR-binding peptide
TKLSNITVQIMDDSSNVIIGEMSNM

SEQ ID NO: 80823 - protein, 26 aa, Artificial Sequence
  Cyclic GFR-binding peptide
TKLRPVQVRKIDDSSNVIKKATVNMV

SEQ ID NO: 80824 - protein, 29 aa, Artificial Sequence
  Cyclic GFR-binding peptide
  MOD_RES (26), (28): Xaa is C or S
SNITIQIMVGRKPKVIGEMSMIVRSXKXS

SEQ ID NO: 80825 - protein, 36 aa, Artificial Sequence; identical to SEQ ID NO: 28860
  Cyclic GFR-binding peptide
  MOD_RES (1), (33), (35): Xaa is C or S

SEQ ID NO: 80826 - protein, 28 aa, Artificial Sequence
  Cyclic GFR-binding peptide
  MOD_RES (1), (2): Xaa is C or S
XXVSQDLSNITIQIMIGKTPKIIGEMSM

SEQ ID NO: 80827 - protein, 39 aa, Artificial Sequence; identical to SEQ ID NO: 28861
  Cyclic GFR-binding peptide
  MOD_RES (4), (4): Xaa is C or S

SEQ ID NO: 80828 - protein, 35 aa, Artificial Sequence; identical to SEQ ID NO: 28863
  Cyclic GFR-binding peptide
  MOD_RES (2), (3), (35): Xaa is C or S

SEQ ID NO: 80829 - protein, 30 aa, Artificial Sequence
  Cyclic GFR-binding peptide
  MOD_RES (27), (29): Xaa is C or S
LSNITIQIMVGRKPKVIGEMSMIVRSXKXS

SEQ ID NO: 80830 - protein, 40 aa, Artificial Sequence; identical to SEQ ID NO: 28865
  Cyclic GFR-binding peptide
  MOD_RES (4), (5), (37), (39): Xaa is C or S

SEQ ID NO: 80831 - protein, 35 aa, Artificial Sequence; identical to SEQ ID NO: 28868
  Cyclic GFR-binding peptide
  MOD_RES (1), (2), (33), (35): Xaa is C or S

SEQ ID NO: 80832 - protein, 34 aa, Artificial Sequence
  Cyclic GFR-binding peptide
  MOD_RES (31), (33): Xaa is C or S
PTQLRPVQVRKIDDSSNVIKKATVNMVVRAXGXH

SEQ ID NO: 80833 - protein, 39 aa, Artificial Sequence; identical to SEQ ID NO: 28874
  Cyclic GFR-binding peptide
  MOD_RES (37), (39): Xaa is C or S

SEQ ID NO: 80834 - protein, 29 aa, Artificial Sequence
  Cyclic GFR-binding peptide
TKLSNITVQIMDDSSNVIIGEMSNMVVRS

SEQ ID NO: 80835 - protein, 27 aa, Artificial Sequence
  Cyclic GFR-binding peptide
  MOD_RES (1), (2): Xaa is C or S
XXAPTKLRSVKVAKVDDSSNVIKEVQV

SEQ ID NO: 80836 - protein, 35 aa, Artificial Sequence; identical to SEQ ID NO: 28875
  Cyclic GFR-binding peptide
  MOD_RES (1), (2), (33), (35): Xaa is C or S

SEQ ID NO: 80837 - protein, 31 aa, Artificial Sequence
  Cyclic GFR-binding peptide
  MOD_RES (1), (2): Xaa is C or S
XXVPQALRPVQIRKIVGRKPKVKKATVMIVR

SEQ ID NO: 80838 - protein, 35 aa, Artificial Sequence; identical to SEQ ID NO: 28877
  Cyclic GFR-binding peptide
  MOD_RES (2), (3), (35): Xaa is C or S

SEQ ID NO: 80839 - protein, 34 aa, Artificial Sequence; identical to SEQ ID NO: 28882
  Cyclic GFR-binding peptide
  MOD_RES (1), (32), (34): Xaa is C or S

SEQ ID NO: 80840 - protein, 23 aa, Artificial Sequence
  Cyclic GFR-binding peptide
LRPVQMRKIDENEKVVKKATVDM

SEQ ID NO: 80841 - protein, 30 aa, Artificial Sequence
  Cyclic GFR-binding peptide
  MOD_RES (28), (30): Xaa is C or S
LRPVQMRKIDENEKVVKKATVDMVVEGXGX

SEQ ID NO: 80842 - protein, 28 aa, Artificial Sequence
  Cyclic GFR-binding peptide
  MOD_RES (1), (1): Xaa is C or S
XVPTELSNITMQIMDEYDKVVIGEMSEM

SEQ ID NO: 80843 - protein, 29 aa, Artificial Sequence
  Cyclic GFR-binding peptide
  MOD_RES (29), (29): Xaa is C or S
ELRSVKMAKVDEYDKVVKEVQVEMVVEGX

SEQ ID NO: 80844 - protein, 28 aa, Artificial Sequence
  Cyclic GFR-binding peptide
VSQDLRPVQIRKIIGKTPKIKKATVMIV

SEQ ID NO: 80845 - protein, 31 aa, Artificial Sequence; identical to SEQ ID NO: 28894
  Cyclic GFR-binding peptide

SEQ ID NO: 80846 - protein, 36 aa, Artificial Sequence
  Cyclic GFR-binding peptide
  MOD_RES (6), (7): Xaa is C or S
KIPKAXXVPTELRSVKMAKVDENEKVVKEVQVDMVV

SEQ ID NO: 80847 - protein, 33 aa, Artificial Sequence
  Cyclic GFR-binding peptide
  MOD_RES (3), (4): Xaa is C or S
KPXXAPTKLSNITVQIMDDSSNVIIGEMSNMVV

SEQ ID NO: 80848 - protein, 22 aa, Artificial Sequence
  Cyclic GFR-binding peptide
QLSNITVQIMDDSSNVIIGEMS

SEQ ID NO: 80849 - protein, 24 aa, Artificial Sequence
  Cyclic GFR-binding peptide
EPLTMLYYRIKPHQGQHEQLSNFL

SEQ ID NO: 80850 - protein, 28 aa, Artificial Sequence
  Cyclic GFR-binding peptide
  MOD_RES (1), (2): Xaa is C or S
XXVPTELSNITMQIMDEYDKVVIGEMSE

SEQ ID NO: 80851 - protein, 33 aa, Artificial Sequence
  Cyclic GFR-binding peptide
  MOD_RES (6), (7): Xaa is C or S
ASASPXXVSQDLRSVKIAKVIGKTPKIKEVQVM

SEQ ID NO: 80852 - protein, 32 aa, Artificial Sequence
  Cyclic GFR-binding peptide
  MOD_RES (5), (6): Xaa is C or S
IPKAXXVPTELSNITMQIMDENEKVVIGEMSD

SEQ ID NO: 80853 - protein, 24 aa, Artificial Sequence
  Cyclic GFR-binding peptide
QALRPVQIRKIVGRKPKVKKATVM

SEQ ID NO: 80854 - protein, 43 aa, Artificial Sequence; identical to SEQ ID NO: 28909
  Cyclic GFR-binding peptide
  MOD_RES (5), (42): Xaa is C or S

SEQ ID NO: 80855 - protein, 32 aa, Artificial Sequence
  Cyclic GFR-binding peptide
  MOD_RES (4), (4): Xaa is C or S
GLEXVPTEEEPLPMVYYRIKPHQGQHEQLSNF

SEQ ID NO: 80856 - protein, 28 aa, Artificial Sequence
  Cyclic GFR-binding peptide
  MOD_RES (28), (28): Xaa is C or S
LSNITVQIMDDSSNVIIGEMSNMVVRSX

SEQ ID NO: 80857 - protein, 41 aa, Artificial Sequence; identical to SEQ ID NO: 28911
  Cyclic GFR-binding peptide
  MOD_RES (2), (39), (41): Xaa is C or S

SEQ ID NO: 80858 - protein, 26 aa, Artificial Sequence
  Cyclic GFR-binding peptide
EEPLPMVYYRIKPHQGQHEQLSNFLQ

SEQ ID NO: 80859 - protein, 36 aa, Artificial Sequence; identical to SEQ ID NO: 28914
  Cyclic GFR-binding peptide
  MOD_RES (4), (5), (36): Xaa is C or S

SEQ ID NO: 80860 - protein, 31 aa, Artificial Sequence
  Cyclic GFR-binding peptide
  MOD_RES (1), (2): Xaa is C or S
XXVPTELSNITMQIMDENEKVVIGEMSDMVV

SEQ ID NO: 80861 - protein, 30 aa, Artificial Sequence
  Cyclic GFR-binding peptide
  MOD_RES (29), (29): Xaa is C or S
QALRSVKIAKVVGRKPKVKEVQVMIVRSXK

SEQ ID NO: 80862 - protein, 28 aa, Artificial Sequence
  Cyclic GFR-binding peptide
  MOD_RES (2), (2): Xaa is C or S
TXAPTKLRSVKVAKVDDSSNVIKEVQVN

SEQ ID NO: 80863 - protein, 31 aa, Artificial Sequence
  Cyclic GFR-binding peptide
  MOD_RES (31), (31): Xaa is C or S
HEPLTVLYYEYVRKKPKLEQLSNRLEEHLEX

SEQ ID NO: 80864 - protein, 29 aa, Artificial Sequence
  Cyclic GFR-binding peptide
  MOD_RES (28), (28): Xaa is C or S
LSNITMQIMDEYDKVVIGEMSEMVVEGXG

SEQ ID NO: 80865 - protein, 26 aa, Artificial Sequence
  Cyclic GFR-binding peptide
LRPVQMRKIDEYDKVVKKATVEMVVE

SEQ ID NO: 80866 - protein, 34 aa, Artificial Sequence; identical to SEQ ID NO: 28919
  Cyclic GFR-binding peptide
  MOD_RES (3), (4): Xaa is C or S

SEQ ID NO: 80867 - protein, 24 aa, Artificial Sequence
  Cyclic GFR-binding peptide
EPLTVLYYEYVRKKPKLEQLSNRL

SEQ ID NO: 80868 - protein, 26 aa, Artificial Sequence
  Cyclic GFR-binding peptide
KLRPVQVRKIDDSSNVIKKATVNMVV

SEQ ID NO: 80869 - protein, 33 aa, Artificial Sequence; identical to SEQ ID NO: 28923
  Cyclic GFR-binding peptide
  MOD_RES (2), (3): Xaa is C or S

SEQ ID NO: 80870 - protein, 32 aa, Artificial Sequence
  Cyclic GFR-binding peptide
  MOD_RES (29), (31): Xaa is C or S
QLRPVQVRKIDDSSNVIKKATVNMVVRAXGXH

SEQ ID NO: 80871 - protein, 36 aa, Artificial Sequence; identical to SEQ ID NO: 28930
  Cyclic GFR-binding peptide
  MOD_RES (1), (2), (34), (36): Xaa is C or S

SEQ ID NO: 80872 - protein, 32 aa, Artificial Sequence
  Cyclic GFR-binding peptide
QVQLEPLTVLYYEIVRKKPIFEQLSNTLEDHL

SEQ ID NO: 80873 - protein, 42 aa, Artificial Sequence; identical to SEQ ID NO: 28931
  Cyclic GFR-binding peptide
  MOD_RES (6), (7), (39), (41): Xaa is C or S

SEQ ID NO: 80874 - protein, 29 aa, Artificial Sequence
  Cyclic GFR-binding peptide
  MOD_RES (2), (3): Xaa is C or S
PXXVSQDLRPVQIRKIIGKTPKIKKATVM

SEQ ID NO: 80875 - protein, 33 aa, Artificial Sequence; identical to SEQ ID NO: 28933
  Cyclic GFR-binding peptide
  MOD_RES (31), (33): Xaa is C or S

SEQ ID NO: 80876 - protein, 37 aa, Artificial Sequence; identical to SEQ ID NO: 28935
  Cyclic GFR-binding peptide
  MOD_RES (6), (7): Xaa is C or S

SEQ ID NO: 80877 - protein, 25 aa, Artificial Sequence
  Cyclic GFR-binding peptide
VPQALRSVKIAKVVGRKPKVKEVQV

SEQ ID NO: 80878 - protein, 37 aa, Artificial Sequence; identical to SEQ ID NO: 28937
  Cyclic GFR-binding peptide
  MOD_RES (6), (7): Xaa is C or S

SEQ ID NO: 80879 - protein, 31 aa, Artificial Sequence; identical to SEQ ID NO: 28938
  Cyclic GFR-binding peptide
  MOD_RES (31), (31): Xaa is C or S

SEQ ID NO: 80880 - protein, 37 aa, Artificial Sequence; identical to SEQ ID NO: 28939
  Cyclic GFR-binding peptide
  MOD_RES (5), (6), (37): Xaa is C or S

SEQ ID NO: 80881 - protein, 31 aa, Artificial Sequence
  Cyclic GFR-binding peptide
  MOD_RES (2), (3): Xaa is C or S
AXXVPTELSNITMQIMDEYDKVVIGEMSEMV

SEQ ID NO: 80882 - protein, 32 aa, Artificial Sequence
  Cyclic GFR-binding peptide
RVHHEPLTVLYYEYVRKKPKLEQLSNRLEEHL

SEQ ID NO: 80883 - protein, 30 aa, Artificial Sequence
  Cyclic GFR-binding peptide
TQVQLEPLTVLYYEIVRKKPIFEQLSNTLE

SEQ ID NO: 80884 - protein, 29 aa, Artificial Sequence
  Cyclic GFR-binding peptide
  MOD_RES (3), (4): Xaa is C or S
KAXXVPTELSNITMQIMDENEKVVIGEMS

SEQ ID NO: 80885 - protein, 27 aa, Artificial Sequence
  Cyclic GFR-binding peptide
  MOD_RES (26), (26): Xaa is C or S
RPVQIRKIVGRTPKVKKATVMVVKSXK

SEQ ID NO: 80886 - protein, 33 aa, Artificial Sequence
  Cyclic GFR-binding peptide
  MOD_RES (3), (4): Xaa is C or S
KPXXAPTQLRSVKVAKVDDSSNVIKEVQVNMVV

SEQ ID NO: 80887 - protein, 25 aa, Artificial Sequence
  Cyclic GFR-binding peptide
PQALRPVQIRKIVGRKPKVKKATVM

SEQ ID NO: 80888 - protein, 31 aa, Artificial Sequence
  Cyclic GFR-binding peptide
  MOD_RES (4), (4): Xaa is C or S
KPTXAPTKLRPVQVRKIDDSSNVIKKATVNM

SEQ ID NO: 80889 - protein, 33 aa, Artificial Sequence; identical to SEQ ID NO: 28955
  Cyclic GFR-binding peptide
  MOD_RES (1), (2), (33): Xaa is C or S

SEQ ID NO: 80890 - protein, 31 aa, Artificial Sequence
  Cyclic GFR-binding peptide
  MOD_RES (5), (6): Xaa is C or S
VPKPXXAPTQLRSVKVAKVDDSSNVIKEVQV

SEQ ID NO: 80891 - protein, 32 aa, Artificial Sequence; identical to SEQ ID NO: 28956
  Cyclic GFR-binding peptide
  MOD_RES (31), (31): Xaa is C or S

SEQ ID NO: 80892 - protein, 29 aa, Artificial Sequence
  Cyclic GFR-binding peptide
  MOD_RES (3), (4): Xaa is C or S
SPXXVPQDLSNITIQIMVGRTPKVIGEMS

SEQ ID NO: 80893 - protein, 39 aa, Artificial Sequence; identical to SEQ ID NO: 28958
  Cyclic GFR-binding peptide
  MOD_RES (3), (3): Xaa is C or S

SEQ ID NO: 80894 - protein, 37 aa, Artificial Sequence; identical to SEQ ID NO: 28960
  Cyclic GFR-binding peptide
  MOD_RES (3), (4), (35), (37): Xaa is C or S

SEQ ID NO: 80895 - protein, 26 aa, Artificial Sequence
  Cyclic GFR-binding peptide
PTELSNITMQIMDEYDKVVIGEMSEM

SEQ ID NO: 80896 - protein, 28 aa, Artificial Sequence
  Cyclic GFR-binding peptide
  MOD_RES (1), (2): Xaa is C or S
XXVPQDLSNITIQIMVGRTPKVIGEMSM

SEQ ID NO: 80897 - protein, 28 aa, Artificial Sequence
  Cyclic GFR-binding peptide
  MOD_RES (1), (2): Xaa is C or S
XXAPTQLSNITVQIMDDSSNVIIGEMSN

SEQ ID NO: 80898 - protein, 27 aa, Artificial Sequence
  Cyclic GFR-binding peptide
  MOD_RES (1), (1): Xaa is C or S
XAPTKLRPVQVRKIDDSSNVIKKATVN

SEQ ID NO: 80899 - protein, 30 aa, Artificial Sequence; identical to SEQ ID NO: 28962
  Cyclic GFR-binding peptide

SEQ ID NO: 80900 - protein, 27 aa, Artificial Sequence
  Cyclic GFR-binding peptide
EPLPVVYYEIVRKKPIFEQLSNTLEDH

SEQ ID NO: 80901 - protein, 38 aa, Artificial Sequence; identical to SEQ ID NO: 28963
  Cyclic GFR-binding peptide
  MOD_RES (35), (37): Xaa is C or S

SEQ ID NO: 80902 - protein, 35 aa, Artificial Sequence
  Cyclic GFR-binding peptide
  MOD_RES (2), (2): Xaa is C or S
KXQPSRVHHEPLPVVYYEYVRKKPKLEQLSNRLEE

SEQ ID NO: 80903 - protein, 25 aa, Artificial Sequence
  Cyclic GFR-binding peptide
LSNITIQIMVGRTPKVIGEMSMVVK

SEQ ID NO: 80904 - protein, 34 aa, Artificial Sequence; identical to SEQ ID NO: 28966
  Cyclic GFR-binding peptide
  MOD_RES (1), (2), (34): Xaa is C or S

SEQ ID NO: 80905 - protein, 30 aa, Artificial Sequence
  Cyclic GFR-binding peptide
  MOD_RES (4), (5): Xaa is C or S
PKPXXAPTKLSNITVQIMDDSSNVIIGEMS

SEQ ID NO: 80906 - protein, 36 aa, Artificial Sequence; identical to SEQ ID NO: 28971
  Cyclic GFR-binding peptide
  MOD_RES (36), (36): Xaa is C or S

SEQ ID NO: 80907 - protein, 32 aa, Artificial Sequence; identical to SEQ ID NO: 28972
  Cyclic GFR-binding peptide
  MOD_RES (1), (32): Xaa is C or S

SEQ ID NO: 80908 - protein, 37 aa, Artificial Sequence; identical to SEQ ID NO: 28974
  Cyclic GFR-binding peptide
  MOD_RES (3), (4), (36): Xaa is C or S

SEQ ID NO: 80909 - protein, 30 aa, Artificial Sequence
  Cyclic GFR-binding peptide
  MOD_RES (1), (1): Xaa is C or S
XVPTEEEPLTMLYYRIKPHQGQHEQLSNFL

SEQ ID NO: 80910 - protein, 33 aa, Artificial Sequence
  Cyclic GFR-binding peptide
  MOD_RES (2), (2): Xaa is C or S
EXVPTEEEPLPMVYYRIKPHQGQHEQLSNFLQH

SEQ ID NO: 80911 - protein, 29 aa, Artificial Sequence
  Cyclic GFR-binding peptide
EPLTVLYYEIVRKKPIFEQLSNTLEDHLA

SEQ ID NO: 80912 - protein, 24 aa, Artificial Sequence
  Cyclic GFR-binding peptide
PTELRSVKMAKVDENEKVVKEVQV

SEQ ID NO: 80913 - protein, 28 aa, Artificial Sequence
  Cyclic GFR-binding peptide
PTQLSNITVQIMDDSSNVIIGEMSNMVV

SEQ ID NO: 80914 - protein, 35 aa, Artificial Sequence; identical to SEQ ID NO: 28980
  Cyclic GFR-binding peptide

SEQ ID NO: 80915 - protein, 30 aa, Artificial Sequence
  Cyclic GFR-binding peptide
  MOD_RES (28), (30): Xaa is C or S
DLRPVQIRKIIGKTPKIKKATVMIVKSXKX

SEQ ID NO: 80916 - protein, 43 aa, Artificial Sequence; identical to SEQ ID NO: 28985
  Cyclic GFR-binding peptide
  MOD_RES (3), (40), (42): Xaa is C or S

SEQ ID NO: 80917 - protein, 22 aa, Artificial Sequence
  Cyclic GFR-binding peptide
LSNITIQIMVGRKPKVIGEMSM

SEQ ID NO: 80918 - protein, 25 aa, Artificial Sequence
  Cyclic GFR-binding peptide
VSQDLSNITIQIMIGKTPKIIGEMS

SEQ ID NO: 80919 - protein, 29 aa, Artificial Sequence
  Cyclic GFR-binding peptide
  MOD_RES (2), (2): Xaa is C or S
EXVPTEEEPLPMVYYRIKPHQGQHEQLSN

SEQ ID NO: 80920 - protein, 36 aa, Artificial Sequence; identical to SEQ ID NO: 28989
  Cyclic GFR-binding peptide
  MOD_RES (4), (4): Xaa is C or S

SEQ ID NO: 80921 - protein, 39 aa, Artificial Sequence; identical to SEQ ID NO: 28991
  Cyclic GFR-binding peptide
  MOD_RES (5), (6), (38): Xaa is C or S

SEQ ID NO: 80922 - protein, 38 aa, Artificial Sequence; identical to SEQ ID NO: 28994
  Cyclic GFR-binding peptide
  MOD_RES (3), (4), (35), (37): Xaa is C or S

SEQ ID NO: 80923 - protein, 30 aa, Artificial Sequence; identical to SEQ ID NO: 1109
  Cyclic GFR-binding peptide

SEQ ID NO: 80924 - protein, 23 aa, Artificial Sequence
  Cyclic GFR-binding peptide
ALRPVQIRKIVGRKPKVKKATVM

SEQ ID NO: 80925 - protein, 31 aa, Artificial Sequence
  Cyclic GFR-binding peptide
  MOD_RES (2), (3): Xaa is C or S
PXXAPTQLRPVQVRKIDDSSNVIKKATVNMV

SEQ ID NO: 80926 - protein, 29 aa, Artificial Sequence
  Cyclic GFR-binding peptide
VPQDLRSVKIAKVVGRTPKVKEVQVMVVK

SEQ ID NO: 80927 - protein, 30 aa, Artificial Sequence
  Cyclic GFR-binding peptide
  MOD_RES (1), (1): Xaa is C or S
XVPTELSNITMQIMDEYDKVVIGEMSEMVV

SEQ ID NO: 80928 - protein, 29 aa, Artificial Sequence
  Cyclic GFR-binding peptide
  MOD_RES (27), (29): Xaa is C or S
LSNITIQIMVGRKPKVIGEMSMIVRSXKX

SEQ ID NO: 80929 - protein, 31 aa, Artificial Sequence
  Cyclic GFR-binding peptide
  MOD_RES (3), (4): Xaa is C or S
APXXVPQALRSVKIAKVVGRKPKVKEVQVMI

SEQ ID NO: 80930 - protein, 33 aa, Artificial Sequence
  Cyclic GFR-binding peptide
  MOD_RES (5), (6): Xaa is C or S
SASPXXVPQDLRPVQIRKIVGRTPKVKKATVMV

SEQ ID NO: 80931 - protein, 36 aa, Artificial Sequence; identical to SEQ ID NO: 28997
  Cyclic GFR-binding peptide
  MOD_RES (35), (35): Xaa is C or S

SEQ ID NO: 80932 - protein, 38 aa, Artificial Sequence; identical to SEQ ID NO: 28998
  Cyclic GFR-binding peptide
  MOD_RES (5), (6), (38): Xaa is C or S

SEQ ID NO: 80933 - protein, 27 aa, Artificial Sequence
  Cyclic GFR-binding peptide
EPLTVLYYEIVRKKPIFEQLSNTLEDH

SEQ ID NO: 80934 - protein, 24 aa, Artificial Sequence
  Cyclic GFR-binding peptide
RSVKVAKVDDSSNVIKEVQVNMVV

SEQ ID NO: 80935 - protein, 35 aa, Artificial Sequence; identical to SEQ ID NO: 29006
  Cyclic GFR-binding peptide
  MOD_RES (4), (5): Xaa is C or S

SEQ ID NO: 80936 - protein, 26 aa, Artificial Sequence
  Cyclic GFR-binding peptide
LSNITMQIMDENEKVVIGEMSDMVVE

SEQ ID NO: 80937 - protein, 41 aa, Artificial Sequence; identical to SEQ ID NO: 29008
  Cyclic GFR-binding peptide
  MOD_RES (6), (40): Xaa is C or S

SEQ ID NO: 80938 - protein, 29 aa, Artificial Sequence
  Cyclic GFR-binding peptide
  MOD_RES (29), (29): Xaa is C or S
QDLRPVQIRKIVGRTPKVKKATVMVVKSX

SEQ ID NO: 80939 - protein, 34 aa, Artificial Sequence; identical to SEQ ID NO: 29009
  Cyclic GFR-binding peptide
  MOD_RES (1), (33): Xaa is C or S

SEQ ID NO: 80940 - protein, 24 aa, Artificial Sequence
  Cyclic GFR-binding peptide
RPVQIRKIVGRTPKVKKATVMVVK

SEQ ID NO: 80941 - protein, 27 aa, Artificial Sequence
  Cyclic GFR-binding peptide
VPQALSNITIQIMVGRKPKVIGEMSMI

SEQ ID NO: 80942 - protein, 34 aa, Artificial Sequence; identical to SEQ ID NO: 29016
  Cyclic GFR-binding peptide
  MOD_RES (31), (33): Xaa is C or S

SEQ ID NO: 80943 - protein, 29 aa, Artificial Sequence
  Cyclic GFR-binding peptide
  MOD_RES (28), (28): Xaa is C or S
DLRPVQIRKIVGRTPKVKKATVMVVKSXK

SEQ ID NO: 80944 - protein, 33 aa, Artificial Sequence; identical to SEQ ID NO: 29020
  Cyclic GFR-binding peptide
  MOD_RES (2), (3): Xaa is C or S

SEQ ID NO: 80945 - protein, 32 aa, Artificial Sequence
  Cyclic GFR-binding peptide
  MOD_RES (32), (32): Xaa is C or S
QLEPLTVLYYEIVRKKPIFEQLSNTLEDHLAX

SEQ ID NO: 80946 - protein, 35 aa, Artificial Sequence; identical to SEQ ID NO: 29021
  Cyclic GFR-binding peptide
  MOD_RES (4), (5): Xaa is C or S

SEQ ID NO: 80947 - protein, 28 aa, Artificial Sequence
  Cyclic GFR-binding peptide
PTKLRPVQVRKIDDSSNVIKKATVNMVV

SEQ ID NO: 80948 - protein, 30 aa, Artificial Sequence
  Cyclic GFR-binding peptide
  MOD_RES (29), (29): Xaa is C or S
QALSNITIQIMVGRKPKVIGEMSMIVRSXK

SEQ ID NO: 80949 - protein, 32 aa, Artificial Sequence
  Cyclic GFR-binding peptide
  MOD_RES (2), (3): Xaa is C or S
AXXVPTELSNITMQIMDENEKVVIGEMSDMVV

SEQ ID NO: 80950 - protein, 31 aa, Artificial Sequence
  Cyclic GFR-binding peptide
  MOD_RES (28), (30): Xaa is C or S
LRPVQMRKIDENEKVVKKATVDMVVEGXGXR

SEQ ID NO: 80951 - protein, 35 aa, Artificial Sequence; identical to SEQ ID NO: 29031
  Cyclic GFR-binding peptide
  MOD_RES (1), (33), (35): Xaa is C or S

SEQ ID NO: 80952 - protein, 30 aa, Artificial Sequence
  Cyclic GFR-binding peptide
  MOD_RES (1), (2): Xaa is C or S
XXVPTELSNITMQIMDEYDKVVIGEMSEMV

SEQ ID NO: 80953 - protein, 26 aa, Artificial Sequence
  Cyclic GFR-binding peptide
ALRPVQIRKIVGRKPKVKKATVMIVR

SEQ ID NO: 80954 - protein, 38 aa, Artificial Sequence; identical to SEQ ID NO: 29036
  Cyclic GFR-binding peptide
  MOD_RES (4), (5), (37): Xaa is C or S

SEQ ID NO: 80955 - protein, 34 aa, Artificial Sequence
  Cyclic GFR-binding peptide
  MOD_RES (6), (7): Xaa is C or S
YVPKPXXAPTKLRPVQVRKIDDSSNVIKKATVNM

SEQ ID NO: 80956 - protein, 42 aa, Artificial Sequence; identical to SEQ ID NO: 29037
  Cyclic GFR-binding peptide
  MOD_RES (6), (7), (39), (41): Xaa is C or S

SEQ ID NO: 80957 - protein, 28 aa, Artificial Sequence
  Cyclic GFR-binding peptide
  MOD_RES (1), (1): Xaa is C or S
XVPQALRPVQIRKIVGRKPKVKKATVMI

SEQ ID NO: 80958 - protein, 36 aa, Artificial Sequence; identical to SEQ ID NO: 29039
  Cyclic GFR-binding peptide
  MOD_RES (1), (33), (35): Xaa is C or S

SEQ ID NO: 80959 - protein, 37 aa, Artificial Sequence; identical to SEQ ID NO: 29040
  Cyclic GFR-binding peptide
  MOD_RES (2), (3), (35), (37): Xaa is C or S

SEQ ID NO: 80960 - protein, 29 aa, Artificial Sequence
  Cyclic GFR-binding peptide
  MOD_RES (1), (2): Xaa is C or S
XXVPTELRSVKMAKVDENEKVVKEVQVDM

SEQ ID NO: 80961 - protein, 34 aa, Artificial Sequence
  Cyclic GFR-binding peptide
  MOD_RES (4), (5): Xaa is C or S
PKAXXVPTELRPVQMRKIDENEKVVKKATVDMVV

SEQ ID NO: 80962 - protein, 34 aa, Artificial Sequence
  Cyclic GFR-binding peptide
  MOD_RES (3), (3): Xaa is C or S
LEXVPTEEEPLTMLYYRIKPHQGQHEQLSNFLQH

SEQ ID NO: 80963 - protein, 28 aa, Artificial Sequence
  Cyclic GFR-binding peptide
  MOD_RES (1), (1): Xaa is C or S
XVPQDLRSVKIAKVVGRTPKVKEVQVMV

SEQ ID NO: 80964 - protein, 26 aa, Artificial Sequence
  Cyclic GFR-binding peptide
DLRPVQIRKIVGRTPKVKKATVMVVK

SEQ ID NO: 80965 - protein, 36 aa, Artificial Sequence; identical to SEQ ID NO: 29044
  Cyclic GFR-binding peptide
  MOD_RES (1), (1): Xaa is C or S

SEQ ID NO: 80966 - protein, 27 aa, Artificial Sequence
  Cyclic GFR-binding peptide
QDLSNITIQIMVGRTPKVIGEMSMVVK

SEQ ID NO: 80967 - protein, 32 aa, Artificial Sequence
  Cyclic GFR-binding peptide
  MOD_RES (2), (3): Xaa is C or S
PXXAPTQLRPVQVRKIDDSSNVIKKATVNMVV

SEQ ID NO: 80968 - protein, 38 aa, Artificial Sequence; identical to SEQ ID NO: 29049
  Cyclic GFR-binding peptide
  MOD_RES (35), (37): Xaa is C or S

SEQ ID NO: 80969 - protein, 32 aa, Artificial Sequence
  Cyclic GFR-binding peptide
  MOD_RES (31), (31): Xaa is C or S
PTELRSVKMAKVDENEKVVKEVQVDMVVEGXG

SEQ ID NO: 80970 - protein, 30 aa, Artificial Sequence
  Cyclic GFR-binding peptide
  MOD_RES (2), (3): Xaa is C or S
PXXVPQALRSVKIAKVVGRKPKVKEVQVMI

SEQ ID NO: 80971 - protein, 37 aa, Artificial Sequence; identical to SEQ ID NO: 29054
  Cyclic GFR-binding peptide
  MOD_RES (1), (2), (34), (36): Xaa is C or S

SEQ ID NO: 80972 - protein, 32 aa, Artificial Sequence; identical to SEQ ID NO: 29055
  Cyclic GFR-binding peptide
  MOD_RES (1), (1): Xaa is C or S

SEQ ID NO: 80973 - protein, 34 aa, Artificial Sequence
  Cyclic GFR-binding peptide
  MOD_RES (31), (33): Xaa is C or S
HEPLPVVYYEYVRKKPKLEQLSNRLEEHLEXAXA

SEQ ID NO: 80974 - protein, 29 aa, Artificial Sequence
  Cyclic GFR-binding peptide
  MOD_RES (29), (29): Xaa is C or S
ELRSVKMAKVDENEKVVKEVQVDMVVEGX

SEQ ID NO: 80975 - protein, 30 aa, Artificial Sequence
  Cyclic GFR-binding peptide
  MOD_RES (30), (30): Xaa is C or S
TKLRPVQVRKIDDSSNVIKKATVNMVVRSX

SEQ ID NO: 80976 - protein, 30 aa, Artificial Sequence
  Cyclic GFR-binding peptide
  MOD_RES (29), (29): Xaa is C or S
EPLPMVYYRIKPHQGQHEQLSNFLQHNKXE

SEQ ID NO: 80977 - protein, 35 aa, Artificial Sequence; identical to SEQ ID NO: 29060
  Cyclic GFR-binding peptide
  MOD_RES (4), (4): Xaa is C or S

SEQ ID NO: 80978 - protein, 35 aa, Artificial Sequence; identical to SEQ ID NO: 29062
  Cyclic GFR-binding peptide
  MOD_RES (1), (32), (34): Xaa is C or S

SEQ ID NO: 80979 - protein, 32 aa, Artificial Sequence; identical to SEQ ID NO: 29065
  Cyclic GFR-binding peptide
  MOD_RES (1), (32): Xaa is C or S

SEQ ID NO: 80980 - protein, 30 aa, Artificial Sequence
  Cyclic GFR-binding peptide
  MOD_RES (28), (30): Xaa is C or S
DLRSVKIAKVIGKTPKIKEVQVMIVKSXKX

SEQ ID NO: 80981 - protein, 29 aa, Artificial Sequence
  Cyclic GFR-binding peptide
APTKLRPVQVRKIDDSSNVIKKATVNMVV

SEQ ID NO: 80982 - protein, 24 aa, Artificial Sequence
  Cyclic GFR-binding peptide
QDLSNITIQIMIGKTPKIIGEMSM

SEQ ID NO: 80983 - protein, 31 aa, Artificial Sequence
  Cyclic GFR-binding peptide
  MOD_RES (2), (3): Xaa is C or S
AXXVPTELRSVKMAKVDEYDKVVKEVQVEMV

SEQ ID NO: 80984 - protein, 23 aa, Artificial Sequence
  Cyclic GFR-binding peptide
QALRPVQIRKIVGRKPKVKKATV

SEQ ID NO: 80985 - protein, 25 aa, Artificial Sequence
  Cyclic GFR-binding peptide
TEEEPLPMVYYRIKPHQGQHEQLSN

SEQ ID NO: 80986 - protein, 25 aa, Artificial Sequence
  Cyclic GFR-binding peptide
SNITMQIMDEYDKVVIGEMSEMVVE

SEQ ID NO: 80987 - protein, 32 aa, Artificial Sequence; identical to SEQ ID NO: 29082
  Cyclic GFR-binding peptide
  MOD_RES (1), (2): Xaa is C or S

SEQ ID NO: 80988 - protein, 33 aa, Artificial Sequence; identical to SEQ ID NO: 29084
  Cyclic GFR-binding peptide
  MOD_RES (3), (3): Xaa is C or S

SEQ ID NO: 80989 - protein, 34 aa, Artificial Sequence
  Cyclic GFR-binding peptide
  MOD_RES (7), (7): Xaa is C or S
HVTKPTXAPTKLRPVQVRKIDDSSNVIKKATVNM

SEQ ID NO: 80990 - protein, 35 aa, Artificial Sequence; identical to SEQ ID NO: 29085
  Cyclic GFR-binding peptide
  MOD_RES (5), (5): Xaa is C or S

SEQ ID NO: 80991 - protein, 32 aa, Artificial Sequence
  Cyclic GFR-binding peptide
  MOD_RES (30), (32): Xaa is C or S
EPLTVLYYEIVRKKPIFEQLSNTLEDHLAXKX

SEQ ID NO: 80992 - protein, 31 aa, Artificial Sequence
  Cyclic GFR-binding peptide
RVHHEPLPVVYYEYVRKKPKLEQLSNRLEEH

SEQ ID NO: 80993 - protein, 34 aa, Artificial Sequence
  Cyclic GFR-binding peptide
  MOD_RES (4), (5): Xaa is C or S
PKPXXAPTQLRSVKVAKVDDSSNVIKEVQVNMVV

SEQ ID NO: 80994 - protein, 26 aa, Artificial Sequence
  Cyclic GFR-binding peptide
QLSNITVQIMDDSSNVIIGEMSNMVV

SEQ ID NO: 80995 - protein, 29 aa, Artificial Sequence
  Cyclic GFR-binding peptide
  MOD_RES (1), (1): Xaa is C or S
XVPTELRPVQMRKIDENEKVVKKATVDMV

SEQ ID NO: 80996 - protein, 25 aa, Artificial Sequence
  Cyclic GFR-binding peptide
VHHEPLTVLYYEYVRKKPKLEQLSN

SEQ ID NO: 80997 - protein, 40 aa, Artificial Sequence; identical to SEQ ID NO: 29096
  Cyclic GFR-binding peptide
  MOD_RES (5), (6), (38), (40): Xaa is C or S

SEQ ID NO: 80998 - protein, 31 aa, Artificial Sequence
  Cyclic GFR-binding peptide
  MOD_RES (1), (2): Xaa is C or S
XXVPQDLRPVQIRKIVGRTPKVKKATVMVVK

SEQ ID NO: 80999 - protein, 28 aa, Artificial Sequence
  Cyclic GFR-binding peptide
PTQVQLEPLTVLYYEIVRKKPIFEQLSN

SEQ ID NO: 81000 - protein, 36 aa, Artificial Sequence; identical to SEQ ID NO: 29104
  Cyclic GFR-binding peptide
  MOD_RES (4), (5): Xaa is C or S

SEQ ID NO: 81001 - protein, 33 aa, Artificial Sequence
  Cyclic GFR-binding peptide
  MOD_RES (30), (32): Xaa is C or S
EPLTVLYYEIVRKKPIFEQLSNTLEDHLAXKXE

SEQ ID NO: 81002 - protein, 28 aa, Artificial Sequence
  Cyclic GFR-binding peptide
QVQLEPLTVLYYEIVRKKPIFEQLSNTL

SEQ ID NO: 81003 - protein, 27 aa, Artificial Sequence
  Cyclic GFR-binding peptide
LRSVKMAKVDENEKVVKEVQVDMVVEG

SEQ ID NO: 81004 - protein, 27 aa, Artificial Sequence
  Cyclic GFR-binding peptide
QLSNITVQIMDDSSNVIIGEMSNMVVR

SEQ ID NO: 81005 - protein, 31 aa, Artificial Sequence
  Cyclic GFR-binding peptide
  MOD_RES (28), (30): Xaa is C or S
LRPVQVRKIDDSSNVIKKATVNMVVRSXGXH

SEQ ID NO: 81006 - protein, 37 aa, Artificial Sequence; identical to SEQ ID NO: 29109
  Cyclic GFR-binding peptide
  MOD_RES (5), (5): Xaa is C or S

SEQ ID NO: 81007 - protein, 30 aa, Artificial Sequence
  Cyclic GFR-binding peptide
  MOD_RES (1), (2): Xaa is C or S
XXVPTELRSVKMAKVDEYDKVVKEVQVEMV

SEQ ID NO: 81008 - protein, 35 aa, Artificial Sequence; identical to SEQ ID NO: 29110
  Cyclic GFR-binding peptide
  MOD_RES (1), (33), (35): Xaa is C or S

SEQ ID NO: 81009 - protein, 35 aa, Artificial Sequence; identical to SEQ ID NO: 29111
  Cyclic GFR-binding peptide
  MOD_RES (3), (4), (35): Xaa is C or S

SEQ ID NO: 81010 - protein, 30 aa, Artificial Sequence
  Cyclic GFR-binding peptide
QVQLEPLTVLYYEIVRKKPIFEQLSNTLED

SEQ ID NO: 81011 - protein, 22 aa, Artificial Sequence
  Cyclic GFR-binding peptide
SNITMQIMDENEKVVIGEMSDM

SEQ ID NO: 81012 - protein, 43 aa, Artificial Sequence; identical to SEQ ID NO: 29115
  Cyclic GFR-binding peptide
  MOD_RES (5), (42): Xaa is C or S

SEQ ID NO: 81013 - protein, 22 aa, Artificial Sequence
  Cyclic GFR-binding peptide
ELRPVQMRKIDENEKVVKKATV

SEQ ID NO: 81014 - protein, 41 aa, Artificial Sequence; identical to SEQ ID NO: 29116
  Cyclic GFR-binding peptide
  MOD_RES (4), (38), (40): Xaa is C or S

SEQ ID NO: 81015 - protein, 31 aa, Artificial Sequence
  Cyclic GFR-binding peptide
  MOD_RES (29), (31): Xaa is C or S
QDLRPVQIRKIVGRTPKVKKATVMVVKSXKX

SEQ ID NO: 81016 - protein, 33 aa, Artificial Sequence; identical to SEQ ID NO: 29119
  Cyclic GFR-binding peptide

SEQ ID NO: 81017 - protein, 35 aa, Artificial Sequence
  Cyclic GFR-binding peptide
  MOD_RES (6), (6): Xaa is C or S
DEGLEXVPTEEEPLTMLYYRIKPHQGQHEQLSNFL

SEQ ID NO: 81018 - protein, 30 aa, Artificial Sequence
  Cyclic GFR-binding peptide
HEPLTVLYYEYVRKKPKLEQLSNRLEEHLE

SEQ ID NO: 81019 - protein, 39 aa, Artificial Sequence; identical to SEQ ID NO: 29123
  Cyclic GFR-binding peptide
  MOD_RES (36), (38): Xaa is C or S

SEQ ID NO: 81020 - protein, 32 aa, Artificial Sequence; identical to SEQ ID NO: 29126
  Cyclic GFR-binding peptide
  MOD_RES (1), (1): Xaa is C or S

SEQ ID NO: 81021 - protein, 35 aa, Artificial Sequence
  Cyclic GFR-binding peptide
  MOD_RES (3), (3): Xaa is C or S
VKXQPSRVHHEPLPVVYYEYVRKKPKLEQLSNRLE

SEQ ID NO: 81022 - protein, 34 aa, Artificial Sequence; identical to SEQ ID NO: 29130
  Cyclic GFR-binding peptide
  MOD_RES (1), (33): Xaa is C or S

SEQ ID NO: 81023 - protein, 31 aa, Artificial Sequence; identical to SEQ ID NO: 29133
  Cyclic GFR-binding peptide
  MOD_RES (31), (31): Xaa is C or S

SEQ ID NO: 81024 - protein, 21 aa, Artificial Sequence
  Cyclic GFR-binding peptide
LSNITVQIMDDSSNVIIGEMS

SEQ ID NO: 81025 - protein, 37 aa, Artificial Sequence; identical to SEQ ID NO: 29142
  Cyclic GFR-binding peptide
  MOD_RES (3), (4), (35), (37): Xaa is C or S

SEQ ID NO: 81026 - protein, 40 aa, Artificial Sequence; identical to SEQ ID NO: 29143
  Cyclic GFR-binding peptide
  MOD_RES (4), (5), (37), (39): Xaa is C or S

SEQ ID NO: 81027 - protein, 37 aa, Artificial Sequence; identical to SEQ ID NO: 29145
  Cyclic GFR-binding peptide
  MOD_RES (5), (5): Xaa is C or S

SEQ ID NO: 81028 - protein, 23 aa, Artificial Sequence
  Cyclic GFR-binding peptide
DLSNITIQIMIGKTPKIIGEMSM

SEQ ID NO: 81029 - protein, 26 aa, Artificial Sequence
  Cyclic GFR-binding peptide
TELRSVKMAKVDEYDKVVKEVQVEMV

SEQ ID NO: 81030 - protein, 34 aa, Artificial Sequence; identical to SEQ ID NO: 29150
  Cyclic GFR-binding peptide
  MOD_RES (4), (4): Xaa is C or S

SEQ ID NO: 81031 - protein, 37 aa, Artificial Sequence; identical to SEQ ID NO: 29152
  Cyclic GFR-binding peptide
  MOD_RES (2), (3), (34), (36): Xaa is C or S

SEQ ID NO: 81032 - protein, 36 aa, Artificial Sequence; identical to SEQ ID NO: 29155
  Cyclic GFR-binding peptide
  MOD_RES (5), (5): Xaa is C or S

SEQ ID NO: 81033 - protein, 34 aa, Artificial Sequence
  Cyclic GFR-binding peptide
  MOD_RES (5), (5): Xaa is C or S
TKPTXAPTKLRSVKVAKVDDSSNVIKEVQVNMVV

SEQ ID NO: 81034 - protein, 27 aa, Artificial Sequence
  Cyclic GFR-binding peptide
LSNITVQIMDDSSNVIIGEMSNMVVRA

SEQ ID NO: 81035 - protein, 24 aa, Artificial Sequence
  Cyclic GFR-binding peptide
PTQLRSVKVAKVDDSSNVIKEVQV

SEQ ID NO: 81036 - protein, 28 aa, Artificial Sequence
  Cyclic GFR-binding peptide
LEPLTVLYYEIVRKKPIFEQLSNTLEDH

SEQ ID NO: 81037 - protein, 32 aa, Artificial Sequence
  Cyclic GFR-binding peptide
  MOD_RES (4), (5): Xaa is C or S
ASPXXVSQDLSNITIQIMIGKTPKIIGEMSMI

SEQ ID NO: 81038 - protein, 24 aa, Artificial Sequence
  Cyclic GFR-binding peptide
LEPLTVLYYEIVRKKPIFEQLSNT

SEQ ID NO: 81039 - protein, 24 aa, Artificial Sequence
  Cyclic GFR-binding peptide
RSVKIAKVVGRTPKVKEVQVMVVK

SEQ ID NO: 81040 - protein, 27 aa, Artificial Sequence
  Cyclic GFR-binding peptide
LSNITVQIMDDSSNVIIGEMSNMVVRS

SEQ ID NO: 81041 - protein, 29 aa, Artificial Sequence
  Cyclic GFR-binding peptide
  MOD_RES (2), (3): Xaa is C or S
AXXVPTELRSVKMAKVDENEKVVKEVQVD

SEQ ID NO: 81042 - protein, 29 aa, Artificial Sequence
  Cyclic GFR-binding peptide
RPVQIRKIVGRKPKVKKATVAAAAAAAAA

SEQ ID NO: 81043 - protein, 31 aa, Artificial Sequence
  Cyclic GFR-binding peptide
  MOD_RES (4), (5): Xaa is C or S
PKAXXVPTELRSVKMAKVDENEKVVKEVQVD

SEQ ID NO: 81044 - protein, 27 aa, Artificial Sequence
  Cyclic GFR-binding peptide
  MOD_RES (2), (2): Xaa is C or S
TXAPTKLRSVKVAKVDDSSNVIKEVQV

SEQ ID NO: 81045 - protein, 35 aa, Artificial Sequence; identical to SEQ ID NO: 29171
  Cyclic GFR-binding peptide
  MOD_RES (2), (3), (34): Xaa is C or S

SEQ ID NO: 81046 - protein, 29 aa, Artificial Sequence
  Cyclic GFR-binding peptide
APTQLSNITVQIMDDSSNVIIGEMSNMVV

SEQ ID NO: 81047 - protein, 23 aa, Artificial Sequence
  Cyclic GFR-binding peptide
LRPVQIRKIVGRTPKVKKATVMV

SEQ ID NO: 81048 - protein, 41 aa, Artificial Sequence; identical to SEQ ID NO: 29173
  Cyclic GFR-binding peptide
  MOD_RES (6), (7), (39), (41): Xaa is C or S

SEQ ID NO: 81049 - protein, 29 aa, Artificial Sequence
  Cyclic GFR-binding peptide
  MOD_RES (1), (1): Xaa is C or S
XVPQDLRSVKIAKVVGRTPKVKEVQVMVV

SEQ ID NO: 81050 - protein, 28 aa, Artificial Sequence
  Cyclic GFR-binding peptide
  MOD_RES (2), (3): Xaa is C or S
PXXVSQDLSNITIQIMIGKTPKIIGEMS

SEQ ID NO: 81051 - protein, 27 aa, Artificial Sequence
  Cyclic GFR-binding peptide
  MOD_RES (1), (1): Xaa is C or S
XVPQALRPVQIRKIVGRKPKVKKATVM

SEQ ID NO: 81052 - protein, 34 aa, Artificial Sequence
  Cyclic GFR-binding peptide
  MOD_RES (6), (7): Xaa is C or S
YVPKPXXAPTKLSNITVQIMDDSSNVIIGEMSNM

SEQ ID NO: 81053 - protein, 28 aa, Artificial Sequence
  Cyclic GFR-binding peptide
  MOD_RES (2), (3): Xaa is C or S
PXXVPQALSNITIQIMVGRKPKVIGEMS

SEQ ID NO: 81054 - protein, 31 aa, Artificial Sequence
  Cyclic GFR-binding peptide
SRVHHEPLTVLYYEYVRKKPKLEQLSNRLEE

SEQ ID NO: 81055 - protein, 36 aa, Artificial Sequence; identical to SEQ ID NO: 29183
  Cyclic GFR-binding peptide
  MOD_RES (5), (5): Xaa is C or S

SEQ ID NO: 81056 - protein, 30 aa, Artificial Sequence; identical to SEQ ID NO: 1148
  Cyclic GFR-binding peptide

SEQ ID NO: 81057 - protein, 30 aa, Artificial Sequence
  Cyclic GFR-binding peptide
  MOD_RES (30), (30): Xaa is C or S
PQDLSNITIQIMVGRTPKVIGEMSMVVKSX

SEQ ID NO: 81058 - protein, 22 aa, Artificial Sequence
  Cyclic GFR-binding peptide
RSVKIAKVVGRKPKVKEVQVMI

SEQ ID NO: 81059 - protein, 40 aa, Artificial Sequence; identical to SEQ ID NO: 29184
  Cyclic GFR-binding peptide
  MOD_RES (5), (6), (38), (40): Xaa is C or S

SEQ ID NO: 81060 - protein, 34 aa, Artificial Sequence
  Cyclic GFR-binding peptide
  MOD_RES (5), (6): Xaa is C or S
SASPXXVSQDLRSVKIAKVIGKTPKIKEVQVMIV

SEQ ID NO: 81061 - protein, 28 aa, Artificial Sequence
  Cyclic GFR-binding peptide
  MOD_RES (28), (28): Xaa is C or S
LRPVQMRKIDEYDKVVKKATVEMVVEGX

SEQ ID NO: 81062 - protein, 38 aa, Artificial Sequence; identical to SEQ ID NO: 29186
  Cyclic GFR-binding peptide
  MOD_RES (3), (4), (36), (38): Xaa is C or S

SEQ ID NO: 81063 - protein, 38 aa, Artificial Sequence; identical to SEQ ID NO: 29188
  Cyclic GFR-binding peptide
  MOD_RES (4), (5), (37): Xaa is C or S

SEQ ID NO: 81064 - protein, 39 aa, Artificial Sequence; identical to SEQ ID NO: 29190
  Cyclic GFR-binding peptide
  MOD_RES (5), (6), (38): Xaa is C or S

SEQ ID NO: 81065 - protein, 40 aa, Artificial Sequence; identical to SEQ ID NO: 29191
  Cyclic GFR-binding peptide
  MOD_RES (5), (6), (37), (39): Xaa is C or S

SEQ ID NO: 81066 - protein, 34 aa, Artificial Sequence
  Cyclic GFR-binding peptide
  MOD_RES (5), (6): Xaa is C or S
IPKAXXVPTELRPVQMRKIDENEKVVKKATVDMV

SEQ ID NO: 81067 - protein, 37 aa, Artificial Sequence
  Cyclic GFR-binding peptide
  MOD_RES (34), (36): Xaa is C or S
QVQLEPLTVLYYEIVRKKPIFEQLSNTLEDHLAXKXE

SEQ ID NO: 81068 - protein, 36 aa, Artificial Sequence; identical to SEQ ID NO: 29193
  Cyclic GFR-binding peptide
  MOD_RES (1), (2), (34), (36): Xaa is C or S

SEQ ID NO: 81069 - protein, 27 aa, Artificial Sequence
  Cyclic GFR-binding peptide
EEPLTMLYYRIKPHQGQHEQLSNFLQH

SEQ ID NO: 81070 - protein, 32 aa, Artificial Sequence
  Cyclic GFR-binding peptide
  MOD_RES (6), (7): Xaa is C or S
ASAAPXXVPQALRSVKIAKVVGRKPKVKEVQV

SEQ ID NO: 81071 - protein, 39 aa, Artificial Sequence; identical to SEQ ID NO: 29198
  Cyclic GFR-binding peptide
  MOD_RES (3), (4), (36), (38): Xaa is C or S

SEQ ID NO: 81072 - protein, 37 aa, Artificial Sequence; identical to SEQ ID NO: 29199
  Cyclic GFR-binding peptide
  MOD_RES (4), (5), (37): Xaa is C or S

SEQ ID NO: 81073 - protein, 22 aa, Artificial Sequence
  Cyclic GFR-binding peptide
KLRPVQVRKIDDSSNVIKKATV

SEQ ID NO: 81074 - protein, 38 aa, Artificial Sequence; identical to SEQ ID NO: 29202
  Cyclic GFR-binding peptide
  MOD_RES (5), (37): Xaa is C or S

SEQ ID NO: 81075 - protein, 26 aa, Artificial Sequence
  Cyclic GFR-binding peptide
  MOD_RES (1), (1): Xaa is C or S
XAPTKLRPVQVRKIDDSSNVIKKATV

SEQ ID NO: 81076 - protein, 32 aa, Artificial Sequence
  Cyclic GFR-binding peptide
  MOD_RES (31), (31): Xaa is C or S
LEPLPVVYYEIVRKKPIFEQLSNTLEDHLAXK

SEQ ID NO: 81077 - protein, 32 aa, Artificial Sequence
  Cyclic GFR-binding peptide
  MOD_RES (4), (5): Xaa is C or S
PKAXXVPTELRSVKMAKVDENEKVVKEVQVDM

SEQ ID NO: 81078 - protein, 27 aa, Artificial Sequence
  Cyclic GFR-binding peptide
TQLRSVKVAKVDDSSNVIKEVQVNMVV

SEQ ID NO: 81079 - protein, 24 aa, Artificial Sequence
  Cyclic GFR-binding peptide
TELRPVQMRKIDENEKVVKKATVD

SEQ ID NO: 81080 - protein, 34 aa, Artificial Sequence
  Cyclic GFR-binding peptide
  MOD_RES (7), (7): Xaa is C or S
HVTKPTXAPTKLRSVKVAKVDDSSNVIKEVQVNM

SEQ ID NO: 81081 - protein, 35 aa, Artificial Sequence; identical to SEQ ID NO: 29210
  Cyclic GFR-binding peptide
  MOD_RES (4), (5): Xaa is C or S

SEQ ID NO: 81082 - protein, 32 aa, Artificial Sequence
  Cyclic GFR-binding peptide
  MOD_RES (30), (32): Xaa is C or S
EPLPVVYYEYVRKKPKLEQLSNRLEEHLEXAX

SEQ ID NO: 81083 - protein, 35 aa, Artificial Sequence; identical to SEQ ID NO: 29213
  Cyclic GFR-binding peptide
  MOD_RES (1), (2), (33), (35): Xaa is C or S

SEQ ID NO: 81084 - protein, 35 aa, Artificial Sequence
  Cyclic GFR-binding peptide
  MOD_RES (6), (7): Xaa is C or S
SIPKAXXVPTELSNITMQIMDEYDKVVIGEMSEMV

SEQ ID NO: 81085 - protein, 25 aa, Artificial Sequence
  Cyclic GFR-binding peptide
TQLRPVQVRKIDDSSNVIKKATVNM

SEQ ID NO: 81086 - protein, 29 aa, Artificial Sequence
  Cyclic GFR-binding peptide
  MOD_RES (1), (1): Xaa is C or S
XAPTKLSNITVQIMDDSSNVIIGEMSNMV

SEQ ID NO: 81087 - protein, 35 aa, Artificial Sequence
  Cyclic GFR-binding peptide
  MOD_RES (3), (3): Xaa is C or S
VKXQPSRVHHEPLTVLYYEYVRKKPKLEQLSNRLE

SEQ ID NO: 81088 - protein, 34 aa, Artificial Sequence
  Cyclic GFR-binding peptide
  MOD_RES (4), (5): Xaa is C or S
ASPXXVSQDLSNITIQIMIGKTPKIIGEMSMIVK

SEQ ID NO: 81089 - protein, 36 aa, Artificial Sequence; identical to SEQ ID NO: 29220
  Cyclic GFR-binding peptide
  MOD_RES (5), (6): Xaa is C or S

SEQ ID NO: 81090 - protein, 42 aa, Artificial Sequence; identical to SEQ ID NO: 29221
  Cyclic GFR-binding peptide
  MOD_RES (5), (42): Xaa is C or S

SEQ ID NO: 81091 - protein, 26 aa, Artificial Sequence
  Cyclic GFR-binding peptide
  MOD_RES (1), (1): Xaa is C or S
XVSQDLRSVKIAKVIGKTPKIKEVQV

SEQ ID NO: 81092 - protein, 35 aa, Artificial Sequence
  Cyclic GFR-binding peptide
  MOD_RES (6), (6): Xaa is C or S
VTKPTXAPTKLSNITVQIMDDSSNVIIGEMSNMVV

SEQ ID NO: 81093 - protein, 39 aa, Artificial Sequence; identical to SEQ ID NO: 29229
  Cyclic GFR-binding peptide
  MOD_RES (36), (38): Xaa is C or S

SEQ ID NO: 81094 - protein, 34 aa, Artificial Sequence; identical to SEQ ID NO: 29235
  Cyclic GFR-binding peptide
  MOD_RES (1), (2), (34): Xaa is C or S

SEQ ID NO: 81095 - protein, 32 aa, Artificial Sequence; identical to SEQ ID NO: 29236
  Cyclic GFR-binding peptide
  MOD_RES (1), (1): Xaa is C or S

SEQ ID NO: 81096 - protein, 29 aa, Artificial Sequence
  Cyclic GFR-binding peptide
  MOD_RES (27), (29): Xaa is C or S
RPVQVRKIDDSSNVIKKATVNMVVRAXGX

SEQ ID NO: 81097 - protein, 37 aa, Artificial Sequence
  Cyclic GFR-binding peptide
  MOD_RES (7), (7): Xaa is C or S
NDEGLEXVPTEEEPLPMVYYRIKPHQGQHEQLSNFLQ

SEQ ID NO: 81098 - protein, 33 aa, Artificial Sequence; identical to SEQ ID NO: 29241
  Cyclic GFR-binding peptide
  MOD_RES (2), (3): Xaa is C or S

SEQ ID NO: 81099 - protein, 34 aa, Artificial Sequence; identical to SEQ ID NO: 29243
  Cyclic GFR-binding peptide
  MOD_RES (1), (2), (34): Xaa is C or S

SEQ ID NO: 81100 - protein, 33 aa, Artificial Sequence
  Cyclic GFR-binding peptide
  MOD_RES (4), (5): Xaa is C or S
PKAXXVPTELRPVQMRKIDEYDKVVKKATVEMV

SEQ ID NO: 81101 - protein, 35 aa, Artificial Sequence; identical to SEQ ID NO: 29246
  Cyclic GFR-binding peptide
  MOD_RES (1), (33), (35): Xaa is C or S

SEQ ID NO: 81102 - protein, 27 aa, Artificial Sequence
  Cyclic GFR-binding peptide
PTEEEPLTMLYYRIKPHQGQHEQLSNF

SEQ ID NO: 81103 - protein, 31 aa, Artificial Sequence
  Cyclic GFR-binding peptide
  MOD_RES (4), (4): Xaa is C or S
KPTXAPTKLRSVKVAKVDDSSNVIKEVQVNM

SEQ ID NO: 81104 - protein, 35 aa, Artificial Sequence; identical to SEQ ID NO: 29253
  Cyclic GFR-binding peptide
  MOD_RES (1), (2), (33), (35): Xaa is C or S

SEQ ID NO: 81105 - protein, 26 aa, Artificial Sequence
  Cyclic GFR-binding peptide
ELSNITMQIMDEYDKVVIGEMSEMVV

SEQ ID NO: 81106 - protein, 23 aa, Artificial Sequence
  Cyclic GFR-binding peptide
TKLRPVQVRKIDDSSNVIKKATV

SEQ ID NO: 81107 - protein, 22 aa, Artificial Sequence
  Cyclic GFR-binding peptide
LRPVQMRKIDENEKVVKKATVD

SEQ ID NO: 81108 - protein, 29 aa, Artificial Sequence
  Cyclic GFR-binding peptide
  MOD_RES (2), (2): Xaa is C or S
EXVPTEEEPLTMLYYRIKPHQGQHEQLSN

SEQ ID NO: 81109 - protein, 36 aa, Artificial Sequence; identical to SEQ ID NO: 29258
  Cyclic GFR-binding peptide
  MOD_RES (1), (2), (34), (36): Xaa is C or S

SEQ ID NO: 81110 - protein, 32 aa, Artificial Sequence
  Cyclic GFR-binding peptide
  MOD_RES (32), (32): Xaa is C or S
HHEPLTVLYYEYVRKKPKLEQLSNRLEEHLEX

SEQ ID NO: 81111 - protein, 28 aa, Artificial Sequence
  Cyclic GFR-binding peptide
  MOD_RES (1), (2): Xaa is C or S
XXVPTELRPVQMRKIDEYDKVVKKATVE

SEQ ID NO: 81112 - protein, 30 aa, Artificial Sequence
  Cyclic GFR-binding peptide
  MOD_RES (3), (4): Xaa is C or S
KPXXAPTKLRPVQVRKIDDSSNVIKKATVN

SEQ ID NO: 81113 - protein, 31 aa, Artificial Sequence
  Cyclic GFR-binding peptide
  MOD_RES (30), (30): Xaa is C or S
EEPLPMVYYRIKPHQGQHEQLSNFLQHNKXE

SEQ ID NO: 81114 - protein, 26 aa, Artificial Sequence
  Cyclic GFR-binding peptide
TQLSNITVQIMDDSSNVIIGEMSNMV

SEQ ID NO: 81115 - protein, 40 aa, Artificial Sequence; identical to SEQ ID NO: 29262
  Cyclic GFR-binding peptide
  MOD_RES (4), (5), (37), (39): Xaa is C or S

SEQ ID NO: 81116 - protein, 37 aa, Artificial Sequence; identical to SEQ ID NO: 29264
  Cyclic GFR-binding peptide
  MOD_RES (3), (35), (37): Xaa is C or S

SEQ ID NO: 81117 - protein, 23 aa, Artificial Sequence
  Cyclic GFR-binding peptide
QDLSNITIQIMVGRTPKVIGEMS

SEQ ID NO: 81118 - protein, 41 aa, Artificial Sequence; identical to SEQ ID NO: 29266
  Cyclic GFR-binding peptide
  MOD_RES (6), (7), (39), (41): Xaa is C or S

SEQ ID NO: 81119 - protein, 36 aa, Artificial Sequence; identical to SEQ ID NO: 29267
  Cyclic GFR-binding peptide
  MOD_RES (5), (6): Xaa is C or S

SEQ ID NO: 81120 - protein, 27 aa, Artificial Sequence
  Cyclic GFR-binding peptide
QLRSVKVAKVDDSSNVIKEVQVNMVVR

SEQ ID NO: 81121 - protein, 39 aa, Artificial Sequence; identical to SEQ ID NO: 29272
  Cyclic GFR-binding peptide
  MOD_RES (5), (6), (38): Xaa is C or S

SEQ ID NO: 81122 - protein, 30 aa, Artificial Sequence
  Cyclic GFR-binding peptide
  MOD_RES (30), (30): Xaa is C or S
TELSNITMQIMDEYDKVVIGEMSEMVVEGX

SEQ ID NO: 81123 - protein, 44 aa, Artificial Sequence; identical to SEQ ID NO: 29275
  Cyclic GFR-binding peptide
  MOD_RES (4), (41), (43): Xaa is C or S

SEQ ID NO: 81124 - protein, 33 aa, Artificial Sequence
  Cyclic GFR-binding peptide
  MOD_RES (5), (6): Xaa is C or S
VPKPXXAPTKLSNITVQIMDDSSNVIIGEMSNM

SEQ ID NO: 81125 - protein, 32 aa, Artificial Sequence
  Cyclic GFR-binding peptide
  MOD_RES (29), (31): Xaa is C or S
ELRSVKMAKVDENEKVVKEVQVDMVVEGXGXR

SEQ ID NO: 81126 - protein, 35 aa, Artificial Sequence; identical to SEQ ID NO: 29282
  Cyclic GFR-binding peptide
  MOD_RES (2), (3), (34): Xaa is C or S

SEQ ID NO: 81127 - protein, 28 aa, Artificial Sequence
  Cyclic GFR-binding peptide
ELSNITMQIMDEYDKVVIGEMSEMVVEG

SEQ ID NO: 81128 - protein, 22 aa, Artificial Sequence
  Cyclic GFR-binding peptide
LRPVQVRKIDDSSNVIKKATVN

SEQ ID NO: 81129 - protein, 39 aa, Artificial Sequence; identical to SEQ ID NO: 29284
  Cyclic GFR-binding peptide
  MOD_RES (37), (39): Xaa is C or S

SEQ ID NO: 81130 - protein, 27 aa, Artificial Sequence
  Cyclic GFR-binding peptide
APTQLSNITVQIMDDSSNVIIGEMSNM

SEQ ID NO: 81131 - protein, 24 aa, Artificial Sequence
  Cyclic GFR-binding peptide
RSVKMAKVDENEKVVKEVQVDMVV

SEQ ID NO: 81132 - protein, 25 aa, Artificial Sequence
  Cyclic GFR-binding peptide
PTKLRSVKVAKVDDSSNVIKEVQVN

SEQ ID NO: 81133 - protein, 36 aa, Artificial Sequence; identical to SEQ ID NO: 29286
  Cyclic GFR-binding peptide
  MOD_RES (4), (36): Xaa is C or S

SEQ ID NO: 81134 - protein, 30 aa, Artificial Sequence
  Cyclic GFR-binding peptide
  MOD_RES (29), (29): Xaa is C or S
QDLRPVQIRKIIGKTPKIKKATVMIVKSXK

SEQ ID NO: 81135 - protein, 41 aa, Artificial Sequence; identical to SEQ ID NO: 29287
  Cyclic GFR-binding peptide
  MOD_RES (5), (6), (38), (40): Xaa is C or S

SEQ ID NO: 81136 - protein, 36 aa, Artificial Sequence
  Cyclic GFR-binding peptide
  MOD_RES (5), (5): Xaa is C or S
RNVQXRPTQVQLEPLPVVYYEIVRKKPIFEQLSNTL

SEQ ID NO: 81137 - protein, 30 aa, Artificial Sequence
  Cyclic GFR-binding peptide
  MOD_RES (30), (30): Xaa is C or S
EPLTVLYYEIVRKKPIFEQLSNTLEDHLAX

SEQ ID NO: 81138 - protein, 29 aa, Artificial Sequence
  Cyclic GFR-binding peptide
  MOD_RES (3), (4): Xaa is C or S
KAXXVPTELSNITMQIMDEYDKVVIGEMS

SEQ ID NO: 81139 - protein, 23 aa, Artificial Sequence
  Cyclic GFR-binding peptide
LSNITIQIMVGRTPKVIGEMSMV

SEQ ID NO: 81140 - protein, 32 aa, Artificial Sequence
  Cyclic GFR-binding peptide
  MOD_RES (3), (3): Xaa is C or S
LEXVPTEEEPLTMLYYRIKPHQGQHEQLSNFL

SEQ ID NO: 81141 - protein, 33 aa, Artificial Sequence
  Cyclic GFR-binding peptide
RVHHEPLPVVYYEYVRKKPKLEQLSNRLEEHLE

SEQ ID NO: 81142 - protein, 27 aa, Artificial Sequence
  Cyclic GFR-binding peptide
EEEPLTMLYYRIKPHQGQHEQLSNFLQ

SEQ ID NO: 81143 - protein, 30 aa, Artificial Sequence
  Cyclic GFR-binding peptide
  MOD_RES (1), (1): Xaa is C or S
XQPSRVHHEPLPVVYYEYVRKKPKLEQLSN

SEQ ID NO: 81144 - protein, 30 aa, Artificial Sequence
  Cyclic GFR-binding peptide
  MOD_RES (2), (3): Xaa is C or S
PXXAPTKLRSVKVAKVDDSSNVIKEVQVNM

SEQ ID NO: 81145 - protein, 32 aa, Artificial Sequence
  Cyclic GFR-binding peptide
  MOD_RES (30), (32): Xaa is C or S
TQLRPVQVRKIDDSSNVIKKATVNMVVRAXGX

SEQ ID NO: 81146 - protein, 35 aa, Artificial Sequence; identical to SEQ ID NO: 29294
  Cyclic GFR-binding peptide
  MOD_RES (4), (5): Xaa is C or S

SEQ ID NO: 81147 - protein, 23 aa, Artificial Sequence
  Cyclic GFR-binding peptide
EPLPVVYYEYVRKKPKLEQLSNR

SEQ ID NO: 81148 - protein, 25 aa, Artificial Sequence
  Cyclic GFR-binding peptide
LRSVKMAKVDEYDKVVKEVQVEMVV

SEQ ID NO: 81149 - protein, 31 aa, Artificial Sequence
  Cyclic GFR-binding peptide
  MOD_RES (4), (5): Xaa is C or S
PKPXXAPTKLRSVKVAKVDDSSNVIKEVQVN

SEQ ID NO: 81150 - protein, 39 aa, Artificial Sequence; identical to SEQ ID NO: 29297
  Cyclic GFR-binding peptide
  MOD_RES (4), (5), (36), (38): Xaa is C or S

SEQ ID NO: 81151 - protein, 36 aa, Artificial Sequence; identical to SEQ ID NO: 29303
  Cyclic GFR-binding peptide
  MOD_RES (3), (35): Xaa is C or S

SEQ ID NO: 81152 - protein, 34 aa, Artificial Sequence
  Cyclic GFR-binding peptide
  MOD_RES (5), (6): Xaa is C or S
VPKPXXAPTQLSNITVQIMDDSSNVIIGEMSNMV

SEQ ID NO: 81153 - protein, 35 aa, Artificial Sequence
  Cyclic GFR-binding peptide
  MOD_RES (5), (5): Xaa is C or S
RNVQXRPTQVQLEPLTVLYYEIVRKKPIFEQLSNT

SEQ ID NO: 81154 - protein, 30 aa, Artificial Sequence
  Cyclic GFR-binding peptide
  MOD_RES (1), (2): Xaa is C or S
XXVPQALSNITIQIMVGRKPKVIGEMSMIV

SEQ ID NO: 81155 - protein, 35 aa, Artificial Sequence; identical to SEQ ID NO: 29309
  Cyclic GFR-binding peptide
  MOD_RES (2), (3), (35): Xaa is C or S

SEQ ID NO: 81156 - protein, 33 aa, Artificial Sequence
  Cyclic GFR-binding peptide
  MOD_RES (31), (33): Xaa is C or S
PTKLRSVKVAKVDDSSNVIKEVQVNMVVRSXGX

SEQ ID NO: 81157 - protein, 37 aa, Artificial Sequence; identical to SEQ ID NO: 29311
  Cyclic GFR-binding peptide
  MOD_RES (5), (6): Xaa is C or S

SEQ ID NO: 81158 - protein, 27 aa, Artificial Sequence
  Cyclic GFR-binding peptide
SQDLSNITIQIMIGKTPKIIGEMSMIV

SEQ ID NO: 81159 - protein, 37 aa, Artificial Sequence
  Cyclic GFR-binding peptide
  MOD_RES (34), (36): Xaa is C or S
QVQLEPLPVVYYEIVRKKPIFEQLSNTLEDHLAXKXE

SEQ ID NO: 81160 - protein, 36 aa, Artificial Sequence; identical to SEQ ID NO: 29316
  Cyclic GFR-binding peptide

SEQ ID NO: 81161 - protein, 30 aa, Artificial Sequence
  Cyclic GFR-binding peptide
  MOD_RES (4), (4): Xaa is C or S
KPTXAPTKLRSVKVAKVDDSSNVIKEVQVN

SEQ ID NO: 81162 - protein, 20 aa, Artificial Sequence
  Cyclic GFR-binding peptide
SNITIQIMVGRTPKVIGEMS

SEQ ID NO: 81163 - protein, 30 aa, Artificial Sequence
  Cyclic GFR-binding peptide
  MOD_RES (4), (5): Xaa is C or S
AAPXXVPQALRPVQIRKIVGRKPKVKKATV

SEQ ID NO: 81164 - protein, 28 aa, Artificial Sequence
  Cyclic GFR-binding peptide
  MOD_RES (1), (2): Xaa is C or S
XXAPTQLRPVQVRKIDDSSNVIKKATVN

SEQ ID NO: 81165 - protein, 33 aa, Artificial Sequence; identical to SEQ ID NO: 29317
  Cyclic GFR-binding peptide
  MOD_RES (1), (33): Xaa is C or S

SEQ ID NO: 81166 - protein, 36 aa, Artificial Sequence
  Cyclic GFR-binding peptide
  MOD_RES (5), (5): Xaa is C or S
EGLEXVPTEEEPLPMVYYRIKPHQGQHEQLSNFLQH

SEQ ID NO: 81167 - protein, 28 aa, Artificial Sequence
  Cyclic GFR-binding peptide
  MOD_RES (26), (28): Xaa is C or S
RPVQIRKIVGRTPKVKKATVMVVKSXKX

SEQ ID NO: 81168 - protein, 32 aa, Artificial Sequence
  Cyclic GFR-binding peptide
  MOD_RES (29), (31): Xaa is C or S
EPLTMLYYRIKPHQGQHEQLSNFLQHNKXEXR

SEQ ID NO: 81169 - protein, 39 aa, Artificial Sequence; identical to SEQ ID NO: 29321
  Cyclic GFR-binding peptide
  MOD_RES (2), (39): Xaa is C or S

SEQ ID NO: 81170 - protein, 33 aa, Artificial Sequence
  Cyclic GFR-binding peptide
  MOD_RES (30), (32): Xaa is C or S
TQLSNITVQIMDDSSNVIIGEMSNMVVRAXGXH

SEQ ID NO: 81171 - protein, 35 aa, Artificial Sequence
  Cyclic GFR-binding peptide
  MOD_RES (6), (7): Xaa is C or S
YVPKPXXAPTKLRPVQVRKIDDSSNVIKKATVNMV

SEQ ID NO: 81172 - protein, 27 aa, Artificial Sequence
  Cyclic GFR-binding peptide
PTELRPVQMRKIDEYDKVVKKATVEMV

SEQ ID NO: 81173 - protein, 35 aa, Artificial Sequence; identical to SEQ ID NO: 29324
  Cyclic GFR-binding peptide
  MOD_RES (1), (33), (35): Xaa is C or S

SEQ ID NO: 81174 - protein, 30 aa, Artificial Sequence
  Cyclic GFR-binding peptide
  MOD_RES (27), (29): Xaa is C or S
LRPVQIRKIIGKTPKIKKATVMIVKSXKXS

SEQ ID NO: 81175 - protein, 26 aa, Artificial Sequence
  Cyclic GFR-binding peptide
TQLRPVQVRKIDDSSNVIKKATVNMV

SEQ ID NO: 81176 - protein, 29 aa, Artificial Sequence
  Cyclic GFR-binding peptide
PQALSNITIQIMVGRKPKVIGEMSMIVRS

SEQ ID NO: 81177 - protein, 38 aa, Artificial Sequence; identical to SEQ ID NO: 29329
  Cyclic GFR-binding peptide
  MOD_RES (3), (4), (35), (37): Xaa is C or S

SEQ ID NO: 81178 - protein, 28 aa, Artificial Sequence
  Cyclic GFR-binding peptide
  MOD_RES (2), (3): Xaa is C or S
PXXAPTQLRPVQVRKIDDSSNVIKKATV

SEQ ID NO: 81179 - protein, 34 aa, Artificial Sequence; identical to SEQ ID NO: 29332
  Cyclic GFR-binding peptide
  MOD_RES (34), (34): Xaa is C or S

SEQ ID NO: 81180 - protein, 32 aa, Artificial Sequence
  Cyclic GFR-binding peptide
  MOD_RES (29), (31): Xaa is C or S
QALRSVKIAKVVGRKPKVKEVQVMIVRSXKXS

SEQ ID NO: 81181 - protein, 33 aa, Artificial Sequence
  Cyclic GFR-binding peptide
QPSRVHHEPLTVLYYEYVRKKPKLEQLSNRLEE

SEQ ID NO: 81182 - protein, 39 aa, Artificial Sequence; identical to SEQ ID NO: 29335
  Cyclic GFR-binding peptide
  MOD_RES (6), (7), (39): Xaa is C or S

SEQ ID NO: 81183 - protein, 24 aa, Artificial Sequence
  Cyclic GFR-binding peptide
QLSNITVQIMDDSSNVIIGEMSNM

SEQ ID NO: 81184 - protein, 22 aa, Artificial Sequence
  Cyclic GFR-binding peptide
LRPVQIRKIIGKTPKIKKATVM

SEQ ID NO: 81185 - protein, 38 aa, Artificial Sequence; identical to SEQ ID NO: 29336
  Cyclic GFR-binding peptide
  MOD_RES (2), (3), (35), (37): Xaa is C or S

SEQ ID NO: 81186 - protein, 31 aa, Artificial Sequence
  Cyclic GFR-binding peptide
  MOD_RES (28), (30): Xaa is C or S
LSNITMQIMDEYDKVVIGEMSEMVVEGXGXR

SEQ ID NO: 81187 - protein, 28 aa, Artificial Sequence
  Cyclic GFR-binding peptide
  MOD_RES (1), (2): Xaa is C or S
XXAPTQLRSVKVAKVDDSSNVIKEVQVN

SEQ ID NO: 81188 - protein, 26 aa, Artificial Sequence
  Cyclic GFR-binding peptide
QLEPLTVLYYEIVRKKPIFEQLSNTL

SEQ ID NO: 81189 - protein, 27 aa, Artificial Sequence
  Cyclic GFR-binding peptide
  MOD_RES (27), (27): Xaa is C or S
LRPVQIRKIVGRTPKVKKATVMVVKSX

SEQ ID NO: 81190 - protein, 25 aa, Artificial Sequence
  Cyclic GFR-binding peptide
TKLRPVQVRKIDDSSNVIKKATVNM

SEQ ID NO: 81191 - protein, 34 aa, Artificial Sequence
  Cyclic GFR-binding peptide
  MOD_RES (5), (6): Xaa is C or S
SASPXXVPQDLRPVQIRKIVGRTPKVKKATVMVV

SEQ ID NO: 81192 - protein, 32 aa, Artificial Sequence
  Cyclic GFR-binding peptide
  MOD_RES (30), (32): Xaa is C or S
PQDLSNITIQIMVGRTPKVIGEMSMVVKSXKX

SEQ ID NO: 81193 - protein, 29 aa, Artificial Sequence
  Cyclic GFR-binding peptide
  MOD_RES (27), (29): Xaa is C or S
LRPVQIRKIVGRTPKVKKATVMVVKSXKX

SEQ ID NO: 81194 - protein, 31 aa, Artificial Sequence
  Cyclic GFR-binding peptide
  MOD_RES (30), (30): Xaa is C or S
PQDLSNITIQIMVGRTPKVIGEMSMVVKSXK

SEQ ID NO: 81195 - protein, 26 aa, Artificial Sequence
  Cyclic GFR-binding peptide
SQDLSNITIQIMIGKTPKIIGEMSMI

SEQ ID NO: 81196 - protein, 35 aa, Artificial Sequence; identical to SEQ ID NO: 29345
  Cyclic GFR-binding peptide

SEQ ID NO: 81197 - protein, 37 aa, Artificial Sequence; identical to SEQ ID NO: 29350
  Cyclic GFR-binding peptide
  MOD_RES (5), (37): Xaa is C or S

SEQ ID NO: 81198 - protein, 33 aa, Artificial Sequence
  Cyclic GFR-binding peptide
  MOD_RES (5), (6): Xaa is C or S
VPKPXXAPTQLSNITVQIMDDSSNVIIGEMSNM

SEQ ID NO: 81199 - protein, 35 aa, Artificial Sequence; identical to SEQ ID NO: 29351
  Cyclic GFR-binding peptide
  MOD_RES (1), (35): Xaa is C or S

SEQ ID NO: 81200 - protein, 43 aa, Artificial Sequence; identical to SEQ ID NO: 29355
  Cyclic GFR-binding peptide
  MOD_RES (3), (40), (42): Xaa is C or S

SEQ ID NO: 81201 - protein, 30 aa, Artificial Sequence
  Cyclic GFR-binding peptide
  MOD_RES (30), (30): Xaa is C or S
PQALRPVQIRKIVGRKPKVKKATVMIVRSX

SEQ ID NO: 81202 - protein, 34 aa, Artificial Sequence
  Cyclic GFR-binding peptide
  MOD_RES (5), (6): Xaa is C or S
VPKPXXAPTQLRPVQVRKIDDSSNVIKKATVNMV

SEQ ID NO: 81203 - protein, 25 aa, Artificial Sequence
  Cyclic GFR-binding peptide
QDLRSVKIAKVVGRTPKVKEVQVMV

SEQ ID NO: 81204 - protein, 37 aa, Artificial Sequence; identical to SEQ ID NO: 29361
  Cyclic GFR-binding peptide
  MOD_RES (3), (4), (36): Xaa is C or S

SEQ ID NO: 81205 - protein, 28 aa, Artificial Sequence
  Cyclic GFR-binding peptide
QALRSVKIAKVVGRKPKVKEVQVMIVRS

SEQ ID NO: 81206 - protein, 33 aa, Artificial Sequence
  Cyclic GFR-binding peptide
  MOD_RES (7), (7): Xaa is C or S
HVTKPTXAPTKLRPVQVRKIDDSSNVIKKATVN

SEQ ID NO: 81207 - protein, 32 aa, Artificial Sequence
  Cyclic GFR-binding peptide
  MOD_RES (2), (3): Xaa is C or S
AXXVPTELRPVQMRKIDEYDKVVKKATVEMVV

SEQ ID NO: 81208 - protein, 37 aa, Artificial Sequence; identical to SEQ ID NO: 29362
  Cyclic GFR-binding peptide
  MOD_RES (2), (2): Xaa is C or S

SEQ ID NO: 81209 - protein, 32 aa, Artificial Sequence; identical to SEQ ID NO: 29363
  Cyclic GFR-binding peptide

SEQ ID NO: 81210 - protein, 25 aa, Artificial Sequence
  Cyclic GFR-binding peptide
HEPLTVLYYEYVRKKPKLEQLSNRL

SEQ ID NO: 81211 - protein, 32 aa, Artificial Sequence; identical to SEQ ID NO: 29368
  Cyclic GFR-binding peptide
  MOD_RES (1), (2): Xaa is C or S

SEQ ID NO: 81212 - protein, 25 aa, Artificial Sequence
  Cyclic GFR-binding peptide
SNITVQIMDDSSNVIIGEMSNMVVR

SEQ ID NO: 81213 - protein, 38 aa, Artificial Sequence; identical to SEQ ID NO: 29370
  Cyclic GFR-binding peptide
  MOD_RES (6), (7): Xaa is C or S

SEQ ID NO: 81214 - protein, 31 aa, Artificial Sequence
  Cyclic GFR-binding peptide
  MOD_RES (3), (4): Xaa is C or S
KAXXVPTELRPVQMRKIDEYDKVVKKATVEM

SEQ ID NO: 81215 - protein, 28 aa, Artificial Sequence
  Cyclic GFR-binding peptide
  MOD_RES (2), (3): Xaa is C or S
AXXVPTELSNITMQIMDENEKVVIGEMS

SEQ ID NO: 81216 - protein, 24 aa, Artificial Sequence
  Cyclic GFR-binding peptide
DLRPVQIRKIVGRTPKVKKATVMV

SEQ ID NO: 81217 - protein, 30 aa, Artificial Sequence
  Cyclic GFR-binding peptide
  MOD_RES (1), (1): Xaa is C or S
XVPQALRPVQIRKIVGRKPKVKKATVMIVR

SEQ ID NO: 81218 - protein, 32 aa, Artificial Sequence
  Cyclic GFR-binding peptide
  MOD_RES (31), (31): Xaa is C or S
EEEPLPMVYYRIKPHQGQHEQLSNFLQHNKXE

SEQ ID NO: 81219 - protein, 31 aa, Artificial Sequence
  Cyclic GFR-binding peptide
  MOD_RES (3), (4): Xaa is C or S
KPXXAPTQLRPVQVRKIDDSSNVIKKATVNM

SEQ ID NO: 81220 - protein, 38 aa, Artificial Sequence; identical to SEQ ID NO: 29374
  Cyclic GFR-binding peptide
  MOD_RES (2), (36), (38): Xaa is C or S

SEQ ID NO: 81221 - protein, 29 aa, Artificial Sequence
  Cyclic GFR-binding peptide
  MOD_RES (1), (1): Xaa is C or S
XAPTKLRSVKVAKVDDSSNVIKEVQVNMV

SEQ ID NO: 81222 - protein, 27 aa, Artificial Sequence
  Cyclic GFR-binding peptide
SQDLRSVKIAKVIGKTPKIKEVQVMIV

SEQ ID NO: 81223 - protein, 38 aa, Artificial Sequence; identical to SEQ ID NO: 29378
  Cyclic GFR-binding peptide
  MOD_RES (35), (37): Xaa is C or S

SEQ ID NO: 81224 - protein, 31 aa, Artificial Sequence; identical to SEQ ID NO: 29379
  Cyclic GFR-binding peptide
  MOD_RES (31), (31): Xaa is C or S

SEQ ID NO: 81225 - protein, 41 aa, Artificial Sequence; identical to SEQ ID NO: 29380
  Cyclic GFR-binding peptide
  MOD_RES (5), (6), (38), (40): Xaa is C or S

SEQ ID NO: 81226 - protein, 25 aa, Artificial Sequence
  Cyclic GFR-binding peptide
LRPVQMRKIDEYDKVVKKATVEMVV

SEQ ID NO: 81227 - protein, 32 aa, Artificial Sequence
  Cyclic GFR-binding peptide
  MOD_RES (29), (31): Xaa is C or S
ELSNITMQIMDENEKVVIGEMSDMVVEGXGXR

SEQ ID NO: 81228 - protein, 33 aa, Artificial Sequence
  Cyclic GFR-binding peptide
  MOD_RES (6), (6): Xaa is C or S
VTKPTXAPTKLRSVKVAKVDDSSNVIKEVQVNM

SEQ ID NO: 81229 - protein, 29 aa, Artificial Sequence
  Cyclic GFR-binding peptide
VPQALRSVKIAKVVGRKPKVKEVQVMIVR

SEQ ID NO: 81230 - protein, 36 aa, Artificial Sequence
  Cyclic GFR-binding peptide
  MOD_RES (3), (3): Xaa is C or S
VKXQPSRVHHEPLPVVYYEYVRKKPKLEQLSNRLEE

SEQ ID NO: 81231 - protein, 35 aa, Artificial Sequence; identical to SEQ ID NO: 29385
  Cyclic GFR-binding peptide
  MOD_RES (32), (34): Xaa is C or S

SEQ ID NO: 81232 - protein, 26 aa, Artificial Sequence
  Cyclic GFR-binding peptide
SNITVQIMDDSSNVIIGEMSNMVVRA

SEQ ID NO: 81233 - protein, 29 aa, Artificial Sequence
  Cyclic GFR-binding peptide
  MOD_RES (29), (29): Xaa is C or S
QALRPVQIRKIVGRKPKVKKATVMIVRSX

SEQ ID NO: 81234 - protein, 38 aa, Artificial Sequence; identical to SEQ ID NO: 29389
  Cyclic GFR-binding peptide
  MOD_RES (1), (38): Xaa is C or S

SEQ ID NO: 81235 - protein, 26 aa, Artificial Sequence
  Cyclic GFR-binding peptide
SNITVQIMDDSSNVIIGEMSNMVVRS

SEQ ID NO: 81236 - protein, 31 aa, Artificial Sequence
  Cyclic GFR-binding peptide
  MOD_RES (29), (31): Xaa is C or S
ELRPVQMRKIDEYDKVVKKATVEMVVEGXGX

SEQ ID NO: 81237 - protein, 34 aa, Artificial Sequence; identical to SEQ ID NO: 29392
  Cyclic GFR-binding peptide
  MOD_RES (2), (34): Xaa is C or S

SEQ ID NO: 81238 - protein, 37 aa, Artificial Sequence; identical to SEQ ID NO: 29393
  Cyclic GFR-binding peptide
  MOD_RES (6), (7): Xaa is C or S

SEQ ID NO: 81239 - protein, 26 aa, Artificial Sequence
  Cyclic GFR-binding peptide
TELRPVQMRKIDENEKVVKKATVDMV

SEQ ID NO: 81240 - protein, 30 aa, Artificial Sequence
  Cyclic GFR-binding peptide
  MOD_RES (2), (3): Xaa is C or S
PXXVPQDLSNITIQIMVGRTPKVIGEMSMV

SEQ ID NO: 81241 - protein, 28 aa, Artificial Sequence
  Cyclic GFR-binding peptide
  MOD_RES (1), (1): Xaa is C or S
XAPTKLRPVQVRKIDDSSNVIKKATVNM

SEQ ID NO: 81242 - protein, 31 aa, Artificial Sequence
  Cyclic GFR-binding peptide
  MOD_RES (2), (3): Xaa is C or S
PXXVPQALRSVKIAKVVGRKPKVKEVQVMIV

SEQ ID NO: 81243 - protein, 31 aa, Artificial Sequence
  Cyclic GFR-binding peptide
QLEPLTVLYYEIVRKKPIFEQLSNTLEDHLA

SEQ ID NO: 81244 - protein, 31 aa, Artificial Sequence
  Cyclic GFR-binding peptide
  MOD_RES (5), (6): Xaa is C or S
IPKAXXVPTELRSVKMAKVDENEKVVKEVQV

SEQ ID NO: 81245 - protein, 20 aa, Artificial Sequence
  Cyclic GFR-binding peptide
RPVQIRKIIGKTPKIKKATV

SEQ ID NO: 81246 - protein, 28 aa, Artificial Sequence
  Cyclic GFR-binding peptide
  MOD_RES (27), (27): Xaa is C or S
SNITVQIMDDSSNVIIGEMSNMVVRSXG

SEQ ID NO: 81247 - protein, 28 aa, Artificial Sequence
  Cyclic GFR-binding peptide
  MOD_RES (2), (3): Xaa is C or S
PXXVPQDLRSVKIAKVVGRTPKVKEVQV

SEQ ID NO: 81248 - protein, 40 aa, Artificial Sequence; identical to SEQ ID NO: 29400
  Cyclic GFR-binding peptide
  MOD_RES (5), (6), (37), (39): Xaa is C or S

SEQ ID NO: 81249 - protein, 32 aa, Artificial Sequence
  Cyclic GFR-binding peptide
  MOD_RES (3), (3): Xaa is C or S
VKXQPSRVHHEPLTVLYYEYVRKKPKLEQLSN

SEQ ID NO: 81250 - protein, 35 aa, Artificial Sequence; identical to SEQ ID NO: 29402
  Cyclic GFR-binding peptide
  MOD_RES (1), (32), (34): Xaa is C or S

SEQ ID NO: 81251 - protein, 37 aa, Artificial Sequence; identical to SEQ ID NO: 29403
  Cyclic GFR-binding peptide
  MOD_RES (36), (36): Xaa is C or S

SEQ ID NO: 81252 - protein, 37 aa, Artificial Sequence; identical to SEQ ID NO: 29407
  Cyclic GFR-binding peptide
  MOD_RES (5), (6): Xaa is C or S

SEQ ID NO: 81253 - protein, 34 aa, Artificial Sequence; identical to SEQ ID NO: 29408
  Cyclic GFR-binding peptide
  MOD_RES (31), (33): Xaa is C or S

SEQ ID NO: 81254 - protein, 34 aa, Artificial Sequence
  Cyclic GFR-binding peptide
  MOD_RES (4), (4): Xaa is C or S
NVQXRPTQVQLEPLTVLYYEIVRKKPIFEQLSNT

SEQ ID NO: 81255 - protein, 28 aa, Artificial Sequence
  Cyclic GFR-binding peptide
PTQVQLEPLPVVYYEIVRKKPIFEQLSN

SEQ ID NO: 81256 - protein, 39 aa, Artificial Sequence; identical to SEQ ID NO: 29413
  Cyclic GFR-binding peptide
  MOD_RES (6), (7), (39): Xaa is C or S

SEQ ID NO: 81257 - protein, 31 aa, Artificial Sequence
  Cyclic GFR-binding peptide
  MOD_RES (2), (2): Xaa is C or S
KXQPSRVHHEPLPVVYYEYVRKKPKLEQLSN

SEQ ID NO: 81258 - protein, 39 aa, Artificial Sequence; identical to SEQ ID NO: 29417
  Cyclic GFR-binding peptide
  MOD_RES (6), (7), (38): Xaa is C or S

SEQ ID NO: 81259 - protein, 27 aa, Artificial Sequence
  Cyclic GFR-binding peptide
  MOD_RES (27), (27): Xaa is C or S
SNITMQIMDEYDKVVIGEMSEMVVEGX

SEQ ID NO: 81260 - protein, 32 aa, Artificial Sequence
  Cyclic GFR-binding peptide
  MOD_RES (1), (1): Xaa is C or S
XVPTEEEPLTMLYYRIKPHQGQHEQLSNFLQH

SEQ ID NO: 81261 - protein, 29 aa, Artificial Sequence
  Cyclic GFR-binding peptide
  MOD_RES (1), (1): Xaa is C or S
XVPTELRSVKMAKVDEYDKVVKEVQVEMV

SEQ ID NO: 81262 - protein, 30 aa, Artificial Sequence
  Cyclic GFR-binding peptide
  MOD_RES (1), (1): Xaa is C or S
XAPTKLSNITVQIMDDSSNVIIGEMSNMVV

SEQ ID NO: 81263 - protein, 25 aa, Artificial Sequence
  Cyclic GFR-binding peptide
EEEPLPMVYYRIKPHQGQHEQLSNF

SEQ ID NO: 81264 - protein, 27 aa, Artificial Sequence
  Cyclic GFR-binding peptide
LSNITMQIMDENEKVVIGEMSDMVVEG

SEQ ID NO: 81265 - protein, 31 aa, Artificial Sequence
  Cyclic GFR-binding peptide
  MOD_RES (31), (31): Xaa is C or S
PTELRPVQMRKIDEYDKVVKKATVEMVVEGX

SEQ ID NO: 81266 - protein, 31 aa, Artificial Sequence
  Cyclic GFR-binding peptide
  MOD_RES (3), (4): Xaa is C or S
KPXXAPTKLRPVQVRKIDDSSNVIKKATVNM

SEQ ID NO: 81267 - protein, 33 aa, Artificial Sequence
  Cyclic GFR-binding peptide
  MOD_RES (4), (4): Xaa is C or S
SVKXQPSRVHHEPLTVLYYEYVRKKPKLEQLSN

SEQ ID NO: 81268 - protein, 40 aa, Artificial Sequence; identical to SEQ ID NO: 29422
  Cyclic GFR-binding peptide
  MOD_RES (5), (6), (38), (40): Xaa is C or S

SEQ ID NO: 81269 - protein, 40 aa, Artificial Sequence; identical to SEQ ID NO: 29426
  Cyclic GFR-binding peptide
  MOD_RES (7), (7): Xaa is C or S

SEQ ID NO: 81270 - protein, 30 aa, Artificial Sequence; identical to SEQ ID NO: 29429
  Cyclic GFR-binding peptide

SEQ ID NO: 81271 - protein, 32 aa, Artificial Sequence
  Cyclic GFR-binding peptide
  MOD_RES (30), (32): Xaa is C or S
EEPLTMLYYRIKPHQGQHEQLSNFLQHNKXEX

SEQ ID NO: 81272 - protein, 38 aa, Artificial Sequence; identical to SEQ ID NO: 29435
  Cyclic GFR-binding peptide
  MOD_RES (3), (4), (36), (38): Xaa is C or S

SEQ ID NO: 81273 - protein, 31 aa, Artificial Sequence
  Cyclic GFR-binding peptide
  MOD_RES (5), (6): Xaa is C or S
SASPXXVPQDLSNITIQIMVGRTPKVIGEMS

SEQ ID NO: 81274 - protein, 28 aa, Artificial Sequence
  Cyclic GFR-binding peptide
  MOD_RES (1), (1): Xaa is C or S
XAPTQLRPVQVRKIDDSSNVIKKATVNM

SEQ ID NO: 81275 - protein, 29 aa, Artificial Sequence
  Cyclic GFR-binding peptide
  MOD_RES (3), (4): Xaa is C or S
APXXVPQALRSVKIAKVVGRKPKVKEVQV

SEQ ID NO: 81276 - protein, 41 aa, Artificial Sequence; identical to SEQ ID NO: 29442
  Cyclic GFR-binding peptide
  MOD_RES (6), (7), (38), (40): Xaa is C or S

SEQ ID NO: 81277 - protein, 36 aa, Artificial Sequence; identical to SEQ ID NO: 29443
  Cyclic GFR-binding peptide
  MOD_RES (1), (2), (33), (35): Xaa is C or S

SEQ ID NO: 81278 - protein, 26 aa, Artificial Sequence
  Cyclic GFR-binding peptide
TEEEPLTMLYYRIKPHQGQHEQLSNF

SEQ ID NO: 81279 - protein, 35 aa, Artificial Sequence
  Cyclic GFR-binding peptide
  MOD_RES (2), (2): Xaa is C or S
QXRPTQVQLEPLPVVYYEIVRKKPIFEQLSNTLED

SEQ ID NO: 81280 - protein, 21 aa, Artificial Sequence
  Cyclic GFR-binding peptide
LSNITMQIMDEYDKVVIGEMS

SEQ ID NO: 81281 - protein, 42 aa, Artificial Sequence; identical to SEQ ID NO: 29452
  Cyclic GFR-binding peptide
  MOD_RES (4), (41): Xaa is C or S

SEQ ID NO: 81282 - protein, 34 aa, Artificial Sequence
  Cyclic GFR-binding peptide
  MOD_RES (5), (6): Xaa is C or S
VPKPXXAPTKLRPVQVRKIDDSSNVIKKATVNMV

SEQ ID NO: 81283 - protein, 27 aa, Artificial Sequence
  Cyclic GFR-binding peptide
  MOD_RES (27), (27): Xaa is C or S
RSVKVAKVDDSSNVIKEVQVNMVVRSX

SEQ ID NO: 81284 - protein, 33 aa, Artificial Sequence
  Cyclic GFR-binding peptide
  MOD_RES (5), (6): Xaa is C or S
IPKAXXVPTELRSVKMAKVDEYDKVVKEVQVEM

SEQ ID NO: 81285 - protein, 28 aa, Artificial Sequence
  Cyclic GFR-binding peptide
HEPLTVLYYEYVRKKPKLEQLSNRLEEH

SEQ ID NO: 81286 - protein, 28 aa, Artificial Sequence
  Cyclic GFR-binding peptide
  MOD_RES (28), (28): Xaa is C or S
ALRSVKIAKVVGRKPKVKEVQVMIVRSX

SEQ ID NO: 81287 - protein, 31 aa, Artificial Sequence
  Cyclic GFR-binding peptide
  MOD_RES (30), (30): Xaa is C or S
SQDLRPVQIRKIIGKTPKIKKATVMIVKSXK

SEQ ID NO: 81288 - protein, 36 aa, Artificial Sequence; identical to SEQ ID NO: 29458
  Cyclic GFR-binding peptide
  MOD_RES (1), (33), (35): Xaa is C or S

SEQ ID NO: 81289 - protein, 30 aa, Artificial Sequence
  Cyclic GFR-binding peptide
  MOD_RES (2), (2): Xaa is C or S
EXVPTEEEPLTMLYYRIKPHQGQHEQLSNF

SEQ ID NO: 81290 - protein, 30 aa, Artificial Sequence; identical to SEQ ID NO: 1168
  Cyclic GFR-binding peptide

SEQ ID NO: 81291 - protein, 30 aa, Artificial Sequence
  Cyclic GFR-binding peptide
PTELRPVQMRKIDEYDKVVKKATVEMVVEG

SEQ ID NO: 81292 - protein, 30 aa, Artificial Sequence
  Cyclic GFR-binding peptide
  MOD_RES (2), (3): Xaa is C or S
PXXAPTQLRSVKVAKVDDSSNVIKEVQVNM

SEQ ID NO: 81293 - protein, 37 aa, Artificial Sequence
  Cyclic GFR-binding peptide
  MOD_RES (4), (4): Xaa is C or S
NVQXRPTQVQLEPLPVVYYEIVRKKPIFEQLSNTLED

SEQ ID NO: 81294 - protein, 29 aa, Artificial Sequence
  Cyclic GFR-binding peptide
  MOD_RES (2), (3): Xaa is C or S
PXXVPQALSNITIQIMVGRKPKVIGEMSM

SEQ ID NO: 81295 - protein, 33 aa, Artificial Sequence; identical to SEQ ID NO: 29471
  Cyclic GFR-binding peptide
  MOD_RES (32), (32): Xaa is C or S

SEQ ID NO: 81296 - protein, 26 aa, Artificial Sequence
  Cyclic GFR-binding peptide
EEEPLTMLYYRIKPHQGQHEQLSNFL

SEQ ID NO: 81297 - protein, 38 aa, Artificial Sequence; identical to SEQ ID NO: 29475
  Cyclic GFR-binding peptide
  MOD_RES (4), (4): Xaa is C or S

SEQ ID NO: 81298 - protein, 28 aa, Artificial Sequence
  Cyclic GFR-binding peptide
  MOD_RES (26), (28): Xaa is C or S
RSVKIAKVIGKTPKIKEVQVMIVKSXKX

SEQ ID NO: 81299 - protein, 36 aa, Artificial Sequence; identical to SEQ ID NO: 29476
  Cyclic GFR-binding peptide
  MOD_RES (2), (34), (36): Xaa is C or S

SEQ ID NO: 81300 - protein, 37 aa, Artificial Sequence; identical to SEQ ID NO: 29477
  Cyclic GFR-binding peptide
  MOD_RES (5), (6), (37): Xaa is C or S

SEQ ID NO: 81301 - protein, 21 aa, Artificial Sequence
  Cyclic GFR-binding peptide
LSNITMQIMDENEKVVIGEMS

SEQ ID NO: 81302 - protein, 33 aa, Artificial Sequence
  Cyclic GFR-binding peptide
  MOD_RES (31), (33): Xaa is C or S
PTELRPVQMRKIDEYDKVVKKATVEMVVEGXGX

SEQ ID NO: 81303 - protein, 38 aa, Artificial Sequence; identical to SEQ ID NO: 29480
  Cyclic GFR-binding peptide
  MOD_RES (4), (4): Xaa is C or S

SEQ ID NO: 81304 - protein, 32 aa, Artificial Sequence
  Cyclic GFR-binding peptide
  MOD_RES (7), (7): Xaa is C or S
HVTKPTXAPTKLSNITVQIMDDSSNVIIGEMS

SEQ ID NO: 81305 - protein, 31 aa, Artificial Sequence
  Cyclic GFR-binding peptide
  MOD_RES (3), (4): Xaa is C or S
SPXXVSQDLRPVQIRKIIGKTPKIKKATVMI

SEQ ID NO: 81306 - protein, 33 aa, Artificial Sequence; identical to SEQ ID NO: 29484
  Cyclic GFR-binding peptide
  MOD_RES (1), (32): Xaa is C or S

SEQ ID NO: 81307 - protein, 29 aa, Artificial Sequence
  Cyclic GFR-binding peptide
TQLRSVKVAKVDDSSNVIKEVQVNMVVRA

SEQ ID NO: 81308 - protein, 30 aa, Artificial Sequence
  Cyclic GFR-binding peptide
  MOD_RES (1), (2): Xaa is C or S
XXVSQDLRPVQIRKIIGKTPKIKKATVMIV

SEQ ID NO: 81309 - protein, 29 aa, Artificial Sequence
  Cyclic GFR-binding peptide
  MOD_RES (3), (4): Xaa is C or S
KPXXAPTKLRSVKVAKVDDSSNVIKEVQV

SEQ ID NO: 81310 - protein, 38 aa, Artificial Sequence; identical to SEQ ID NO: 29486
  Cyclic GFR-binding peptide
  MOD_RES (2), (3), (35), (37): Xaa is C or S

SEQ ID NO: 81311 - protein, 25 aa, Artificial Sequence
  Cyclic GFR-binding peptide
PTELRPVQMRKIDENEKVVKKATVD

SEQ ID NO: 81312 - protein, 40 aa, Artificial Sequence; identical to SEQ ID NO: 29489
  Cyclic GFR-binding peptide
  MOD_RES (6), (7), (38), (40): Xaa is C or S

SEQ ID NO: 81313 - protein, 29 aa, Artificial Sequence
  Cyclic GFR-binding peptide
  MOD_RES (3), (4): Xaa is C or S
KAXXVPTELRPVQMRKIDEYDKVVKKATV

SEQ ID NO: 81314 - protein, 41 aa, Artificial Sequence; identical to SEQ ID NO: 29492
  Cyclic GFR-binding peptide
  MOD_RES (5), (5): Xaa is C or S

SEQ ID NO: 81315 - protein, 25 aa, Artificial Sequence
  Cyclic GFR-binding peptide
TEEEPLTMLYYRIKPHQGQHEQLSN

SEQ ID NO: 81316 - protein, 33 aa, Artificial Sequence
  Cyclic GFR-binding peptide
  MOD_RES (3), (4): Xaa is C or S
SPXXVPQDLRPVQIRKIVGRTPKVKKATVMVVK

SEQ ID NO: 81317 - protein, 32 aa, Artificial Sequence
  Cyclic GFR-binding peptide
  MOD_RES (6), (7): Xaa is C or S
YVPKPXXAPTKLSNITVQIMDDSSNVIIGEMS

SEQ ID NO: 81318 - protein, 30 aa, Artificial Sequence
  Cyclic GFR-binding peptide
  MOD_RES (3), (4): Xaa is C or S
KPXXAPTKLSNITVQIMDDSSNVIIGEMSN

SEQ ID NO: 81319 - protein, 34 aa, Artificial Sequence; identical to SEQ ID NO: 29505
  Cyclic GFR-binding peptide
  MOD_RES (32), (34): Xaa is C or S

SEQ ID NO: 81320 - protein, 29 aa, Artificial Sequence
  Cyclic GFR-binding peptide
TKLRPVQVRKIDDSSNVIKKATVNMVVRS

SEQ ID NO: 81321 - protein, 26 aa, Artificial Sequence
  Cyclic GFR-binding peptide
LRSVKMAKVDENEKVVKEVQVDMVVE

SEQ ID NO: 81322 - protein, 33 aa, Artificial Sequence
  Cyclic GFR-binding peptide
  MOD_RES (30), (32): Xaa is C or S
TKLRSVKVAKVDDSSNVIKEVQVNMVVRSXGXH

SEQ ID NO: 81323 - protein, 28 aa, Artificial Sequence
  Cyclic GFR-binding peptide
  MOD_RES (1), (1): Xaa is C or S
XAPTKLRSVKVAKVDDSSNVIKEVQVNM

SEQ ID NO: 81324 - protein, 39 aa, Artificial Sequence; identical to SEQ ID NO: 29511
  Cyclic GFR-binding peptide
  MOD_RES (36), (38): Xaa is C or S

SEQ ID NO: 81325 - protein, 28 aa, Artificial Sequence
  Cyclic GFR-binding peptide
PTELRSVKMAKVDENEKVVKEVQVDMVV

SEQ ID NO: 81326 - protein, 28 aa, Artificial Sequence
  Cyclic GFR-binding peptide
  MOD_RES (26), (28): Xaa is C or S
SNITIQIMIGKTPKIIGEMSMIVKSXKX

SEQ ID NO: 81327 - protein, 29 aa, Artificial Sequence
  Cyclic GFR-binding peptide
PSRVHHEPLTVLYYEYVRKKPKLEQLSNR

SEQ ID NO: 81328 - protein, 24 aa, Artificial Sequence
  Cyclic GFR-binding peptide
QDLRSVKIAKVIGKTPKIKEVQVM

SEQ ID NO: 81329 - protein, 34 aa, Artificial Sequence
  Cyclic GFR-binding peptide
  MOD_RES (31), (33): Xaa is C or S
PTKLRPVQVRKIDDSSNVIKKATVNMVVRSXGXH

SEQ ID NO: 81330 - protein, 30 aa, Artificial Sequence
  Cyclic GFR-binding peptide
LEPLTVLYYEIVRKKPIFEQLSNTLEDHLA

SEQ ID NO: 81331 - protein, 32 aa, Artificial Sequence
  Cyclic GFR-binding peptide
  MOD_RES (30), (32): Xaa is C or S
EPLPVVYYEIVRKKPIFEQLSNTLEDHLAXKX

SEQ ID NO: 81332 - protein, 28 aa, Artificial Sequence
  Cyclic GFR-binding peptide
  MOD_RES (27), (27): Xaa is C or S
LSNITIQIMIGKTPKIIGEMSMIVKSXK

SEQ ID NO: 81333 - protein, 29 aa, Artificial Sequence
  Cyclic GFR-binding peptide
  MOD_RES (2), (3): Xaa is C or S
PXXAPTKLSNITVQIMDDSSNVIIGEMSN

SEQ ID NO: 81334 - protein, 31 aa, Artificial Sequence
  Cyclic GFR-binding peptide
  MOD_RES (30), (30): Xaa is C or S
SQDLRSVKIAKVIGKTPKIKEVQVMIVKSXK

SEQ ID NO: 81335 - protein, 32 aa, Artificial Sequence
  Cyclic GFR-binding peptide
  MOD_RES (30), (32): Xaa is C or S
SQDLSNITIQIMIGKTPKIIGEMSMIVKSXKX

SEQ ID NO: 81336 - protein, 40 aa, Artificial Sequence; identical to SEQ ID NO: 29525
  Cyclic GFR-binding peptide
  MOD_RES (5), (6), (37), (39): Xaa is C or S

SEQ ID NO: 81337 - protein, 37 aa, Artificial Sequence; identical to SEQ ID NO: 29527
  Cyclic GFR-binding peptide
  MOD_RES (4), (36): Xaa is C or S

SEQ ID NO: 81338 - protein, 41 aa, Artificial Sequence; identical to SEQ ID NO: 29529
  Cyclic GFR-binding peptide
  MOD_RES (6), (7), (38), (40): Xaa is C or S

SEQ ID NO: 81339 - protein, 30 aa, Artificial Sequence
  Cyclic GFR-binding peptide
PTEEEPLTMLYYRIKPHQGQHEQLSNFLQH

SEQ ID NO: 81340 - protein, 30 aa, Artificial Sequence
  Cyclic GFR-binding peptide
  MOD_RES (3), (3): Xaa is C or S
LEXVPTEEEPLPMVYYRIKPHQGQHEQLSN

SEQ ID NO: 81341 - protein, 24 aa, Artificial Sequence
  Cyclic GFR-binding peptide
DLSNITIQIMVGRTPKVIGEMSMV

SEQ ID NO: 81342 - protein, 30 aa, Artificial Sequence
  Cyclic GFR-binding peptide
  MOD_RES (30), (30): Xaa is C or S
EEPLTMLYYRIKPHQGQHEQLSNFLQHNKX

SEQ ID NO: 81343 - protein, 31 aa, Artificial Sequence
  Cyclic GFR-binding peptide
  MOD_RES (2), (2): Xaa is C or S
QXRPTQVQLEPLTVLYYEIVRKKPIFEQLSN

SEQ ID NO: 81344 - protein, 30 aa, Artificial Sequence; identical to SEQ ID NO: 29537
  Cyclic GFR-binding peptide

SEQ ID NO: 81345 - protein, 27 aa, Artificial Sequence
  Cyclic GFR-binding peptide
LRPVQVRKIDDSSNVIKKATVNMVVRA

SEQ ID NO: 81346 - protein, 33 aa, Artificial Sequence
  Cyclic GFR-binding peptide
  MOD_RES (3), (3): Xaa is C or S
VQXRPTQVQLEPLPVVYYEIVRKKPIFEQLSNT

SEQ ID NO: 81347 - protein, 30 aa, Artificial Sequence
  Cyclic GFR-binding peptide
  MOD_RES (2), (3): Xaa is C or S
PXXVPQDLRPVQIRKIVGRTPKVKKATVMV

SEQ ID NO: 81348 - protein, 24 aa, Artificial Sequence
  Cyclic GFR-binding peptide
LRPVQMRKIDENEKVVKKATVDMV

SEQ ID NO: 81349 - protein, 33 aa, Artificial Sequence; identical to SEQ ID NO: 29539
  Cyclic GFR-binding peptide
  MOD_RES (1), (2): Xaa is C or S

SEQ ID NO: 81350 - protein, 33 aa, Artificial Sequence; identical to SEQ ID NO: 29541
  Cyclic GFR-binding peptide
  MOD_RES (1), (33): Xaa is C or S

SEQ ID NO: 81351 - protein, 38 aa, Artificial Sequence; identical to SEQ ID NO: 29540
  Cyclic GFR-binding peptide
  MOD_RES (4), (38): Xaa is C or S

SEQ ID NO: 81352 - protein, 42 aa, Artificial Sequence; identical to SEQ ID NO: 29543
  Cyclic GFR-binding peptide
  MOD_RES (6), (7), (39), (41): Xaa is C or S

SEQ ID NO: 81353 - protein, 34 aa, Artificial Sequence; identical to SEQ ID NO: 29546
  Cyclic GFR-binding peptide
  MOD_RES (3), (4): Xaa is C or S

SEQ ID NO: 81354 - protein, 41 aa, Artificial Sequence; identical to SEQ ID NO: 29547
  Cyclic GFR-binding peptide
  MOD_RES (5), (5): Xaa is C or S

SEQ ID NO: 81355 - protein, 25 aa, Artificial Sequence
  Cyclic GFR-binding peptide
VPTELSNITMQIMDENEKVVIGEMS

SEQ ID NO: 81356 - protein, 27 aa, Artificial Sequence
  Cyclic GFR-binding peptide
LRPVQVRKIDDSSNVIKKATVNMVVRS

SEQ ID NO: 81357 - protein, 32 aa, Artificial Sequence; identical to SEQ ID NO: 29549
  Cyclic GFR-binding peptide
  MOD_RES (32), (32): Xaa is C or S

SEQ ID NO: 81358 - protein, 22 aa, Artificial Sequence
  Cyclic GFR-binding peptide
EPLTMLYYRIKPHQGQHEQLSN

SEQ ID NO: 81359 - protein, 32 aa, Artificial Sequence; identical to SEQ ID NO: 29550
  Cyclic GFR-binding peptide

SEQ ID NO: 81360 - protein, 36 aa, Artificial Sequence; identical to SEQ ID NO: 29551
  Cyclic GFR-binding peptide
  MOD_RES (4), (5): Xaa is C or S

SEQ ID NO: 81361 - protein, 29 aa, Artificial Sequence
  Cyclic GFR-binding peptide
  MOD_RES (2), (3): Xaa is C or S
AXXVPTELSNITMQIMDEYDKVVIGEMSE

SEQ ID NO: 81362 - protein, 40 aa, Artificial Sequence; identical to SEQ ID NO: 29555
  Cyclic GFR-binding peptide
  MOD_RES (5), (37), (39): Xaa is C or S

SEQ ID NO: 81363 - protein, 39 aa, Artificial Sequence; identical to SEQ ID NO: 29556
  Cyclic GFR-binding peptide
  MOD_RES (5), (39): Xaa is C or S

SEQ ID NO: 81364 - protein, 26 aa, Artificial Sequence
  Cyclic GFR-binding peptide
PTELRPVQMRKIDEYDKVVKKATVEM

SEQ ID NO: 81365 - protein, 34 aa, Artificial Sequence; identical to SEQ ID NO: 29558
  Cyclic GFR-binding peptide
  MOD_RES (2), (3), (34): Xaa is C or S

SEQ ID NO: 81366 - protein, 42 aa, Artificial Sequence; identical to SEQ ID NO: 29559
  Cyclic GFR-binding peptide
  MOD_RES (2), (39), (41): Xaa is C or S

SEQ ID NO: 81367 - protein, 27 aa, Artificial Sequence
  Cyclic GFR-binding peptide
PQDLRPVQIRKIVGRTPKVKKATVMVV

SEQ ID NO: 81368 - protein, 32 aa, Artificial Sequence
  Cyclic GFR-binding peptide
  MOD_RES (3), (4): Xaa is C or S
SPXXVSQDLRPVQIRKIIGKTPKIKKATVMIV

SEQ ID NO: 81369 - protein, 28 aa, Artificial Sequence
  Cyclic GFR-binding peptide
VPTELSNITMQIMDENEKVVIGEMSDMV

SEQ ID NO: 81370 - protein, 32 aa, Artificial Sequence
  Cyclic GFR-binding peptide
  MOD_RES (4), (5): Xaa is C or S
AAPXXVPQALSNITIQIMVGRKPKVIGEMSMI

SEQ ID NO: 81371 - protein, 38 aa, Artificial Sequence
  Cyclic GFR-binding peptide
  MOD_RES (7), (7): Xaa is C or S
NDEGLEXVPTEEEPLTMLYYRIKPHQGQHEQLSNFLQH

SEQ ID NO: 81372 - protein, 20 aa, Artificial Sequence
  Cyclic GFR-binding peptide
RPVQIRKIVGRTPKVKKATV

SEQ ID NO: 81373 - protein, 27 aa, Artificial Sequence
  Cyclic GFR-binding peptide
VPTELRPVQMRKIDENEKVVKKATVDM

SEQ ID NO: 81374 - protein, 39 aa, Artificial Sequence; identical to SEQ ID NO: 29568
  Cyclic GFR-binding peptide
  MOD_RES (2), (36), (38): Xaa is C or S

SEQ ID NO: 81375 - protein, 29 aa, Artificial Sequence
  Cyclic GFR-binding peptide
RSVKIAKVVGRTPKVKEVQVAAAAAAAAA

SEQ ID NO: 81376 - protein, 30 aa, Artificial Sequence
  Cyclic GFR-binding peptide
  MOD_RES (29), (29): Xaa is C or S
QDLRPVQIRKIVGRTPKVKKATVMVVKSXK

SEQ ID NO: 81377 - protein, 31 aa, Artificial Sequence
  Cyclic GFR-binding peptide
RPTQVQLEPLTVLYYEIVRKKPIFEQLSNTL

SEQ ID NO: 81378 - protein, 32 aa, Artificial Sequence
  Cyclic GFR-binding peptide
  MOD_RES (4), (5): Xaa is C or S
PKPXXAPTKLRPVQVRKIDDSSNVIKKATVNM

SEQ ID NO: 81379 - protein, 25 aa, Artificial Sequence
  Cyclic GFR-binding peptide
LRPVQMRKIDENEKVVKKATVDMVV

SEQ ID NO: 81380 - protein, 36 aa, Artificial Sequence
  Cyclic GFR-binding peptide
  MOD_RES (3), (3): Xaa is C or S
VQXRPTQVQLEPLTVLYYEIVRKKPIFEQLSNTLED

SEQ ID NO: 81381 - protein, 31 aa, Artificial Sequence
  Cyclic GFR-binding peptide
  MOD_RES (6), (6): Xaa is C or S
VTKPTXAPTKLSNITVQIMDDSSNVIIGEMS

SEQ ID NO: 81382 - protein, 24 aa, Artificial Sequence
  Cyclic GFR-binding peptide
ELRSVKMAKVDENEKVVKEVQVDM

SEQ ID NO: 81383 - protein, 39 aa, Artificial Sequence; identical to SEQ ID NO: 29573
  Cyclic GFR-binding peptide
  MOD_RES (6), (7), (39): Xaa is C or S

SEQ ID NO: 81384 - protein, 34 aa, Artificial Sequence
  Cyclic GFR-binding peptide
  MOD_RES (5), (5): Xaa is C or S
SSVKXQPSRVHHEPLPVVYYEYVRKKPKLEQLSN

SEQ ID NO: 81385 - protein, 34 aa, Artificial Sequence; identical to SEQ ID NO: 29575
  Cyclic GFR-binding peptide
  MOD_RES (3), (4): Xaa is C or S

SEQ ID NO: 81386 - protein, 26 aa, Artificial Sequence
  Cyclic GFR-binding peptide
  MOD_RES (1), (1): Xaa is C or S
XAPTKLSNITVQIMDDSSNVIIGEMS

SEQ ID NO: 81387 - protein, 33 aa, Artificial Sequence
  Cyclic GFR-binding peptide
  MOD_RES (1), (1): Xaa is C or S
XRPTQVQLEPLPVVYYEIVRKKPIFEQLSNTLE

SEQ ID NO: 81388 - protein, 32 aa, Artificial Sequence
  Cyclic GFR-binding peptide
  MOD_RES (5), (6): Xaa is C or S
IPKAXXVPTELRSVKMAKVDENEKVVKEVQVD

SEQ ID NO: 81389 - protein, 24 aa, Artificial Sequence
  Cyclic GFR-binding peptide
PQALRSVKIAKVVGRKPKVKEVQV

SEQ ID NO: 81390 - protein, 27 aa, Artificial Sequence
  Cyclic GFR-binding peptide
APTQLRSVKVAKVDDSSNVIKEVQVNM

SEQ ID NO: 81391 - protein, 37 aa, Artificial Sequence; identical to SEQ ID NO: 29580
  Cyclic GFR-binding peptide
  MOD_RES (2), (3), (34), (36): Xaa is C or S

SEQ ID NO: 81392 - protein, 29 aa, Artificial Sequence
  Cyclic GFR-binding peptide
  MOD_RES (1), (2): Xaa is C or S
XXVPTELRPVQMRKIDENEKVVKKATVDM

SEQ ID NO: 81393 - protein, 34 aa, Artificial Sequence; identical to SEQ ID NO: 29581
  Cyclic GFR-binding peptide
  MOD_RES (2), (3): Xaa is C or S

SEQ ID NO: 81394 - protein, 23 aa, Artificial Sequence
  Cyclic GFR-binding peptide
QLRPVQVRKIDDSSNVIKKATVN

SEQ ID NO: 81395 - protein, 40 aa, Artificial Sequence; identical to SEQ ID NO: 29585
  Cyclic GFR-binding peptide
  MOD_RES (6), (7), (38), (40): Xaa is C or S

SEQ ID NO: 81396 - protein, 27 aa, Artificial Sequence
  Cyclic GFR-binding peptide
  MOD_RES (27), (27): Xaa is C or S
LRSVKIAKVVGRKPKVKEVQVMIVRSX

SEQ ID NO: 81397 - protein, 34 aa, Artificial Sequence; identical to SEQ ID NO: 29591
  Cyclic GFR-binding peptide
  MOD_RES (1), (33): Xaa is C or S

SEQ ID NO: 81398 - protein, 33 aa, Artificial Sequence; identical to SEQ ID NO: 29593
  Cyclic GFR-binding peptide
  MOD_RES (32), (32): Xaa is C or S

SEQ ID NO: 81399 - protein, 41 aa, Artificial Sequence; identical to SEQ ID NO: 29596
  Cyclic GFR-binding peptide
  MOD_RES (6), (7), (39), (41): Xaa is C or S

SEQ ID NO: 81400 - protein, 32 aa, Artificial Sequence
  Cyclic GFR-binding peptide
  MOD_RES (30), (32): Xaa is C or S
TELSNITMQIMDENEKVVIGEMSDMVVEGXGX

SEQ ID NO: 81401 - protein, 28 aa, Artificial Sequence
  Cyclic GFR-binding peptide
  MOD_RES (27), (27): Xaa is C or S
LRSVKIAKVVGRTPKVKEVQVMVVKSXK

SEQ ID NO: 81402 - protein, 31 aa, Artificial Sequence; identical to SEQ ID NO: 29597
  Cyclic GFR-binding peptide
  MOD_RES (1), (1): Xaa is C or S

SEQ ID NO: 81403 - protein, 30 aa, Artificial Sequence
  Cyclic GFR-binding peptide
  MOD_RES (30), (30): Xaa is C or S
TKLRSVKVAKVDDSSNVIKEVQVNMVVRSX

SEQ ID NO: 81404 - protein, 27 aa, Artificial Sequence
  Cyclic GFR-binding peptide
ELSNITMQIMDENEKVVIGEMSDMVVE

SEQ ID NO: 81405 - protein, 27 aa, Artificial Sequence
  Cyclic GFR-binding peptide
  MOD_RES (27), (27): Xaa is C or S
RPVQVRKIDDSSNVIKKATVNMVVRSX

SEQ ID NO: 81406 - protein, 30 aa, Artificial Sequence
  Cyclic GFR-binding peptide
  MOD_RES (1), (2): Xaa is C or S
XXVPTELRPVQMRKIDENEKVVKKATVDMV

SEQ ID NO: 81407 - protein, 28 aa, Artificial Sequence
  Cyclic GFR-binding peptide
  MOD_RES (1), (2): Xaa is C or S
XXVPQDLRSVKIAKVVGRTPKVKEVQVM

SEQ ID NO: 81408 - protein, 39 aa, Artificial Sequence; identical to SEQ ID NO: 29606
  Cyclic GFR-binding peptide
  MOD_RES (5), (5): Xaa is C or S

SEQ ID NO: 81409 - protein, 30 aa, Artificial Sequence
  Cyclic GFR-binding peptide
  MOD_RES (4), (5): Xaa is C or S
ASPXXVPQDLRSVKIAKVVGRTPKVKEVQV

SEQ ID NO: 81410 - protein, 39 aa, Artificial Sequence; identical to SEQ ID NO: 29610
  Cyclic GFR-binding peptide
  MOD_RES (6), (7), (39): Xaa is C or S

SEQ ID NO: 81411 - protein, 27 aa, Artificial Sequence
  Cyclic GFR-binding peptide
VPQDLSNITIQIMVGRTPKVIGEMSMV

SEQ ID NO: 81412 - protein, 28 aa, Artificial Sequence
  Cyclic GFR-binding peptide
VSQDLRSVKIAKVIGKTPKIKEVQVMIV

SEQ ID NO: 81413 - protein, 31 aa, Artificial Sequence
  Cyclic GFR-binding peptide
  MOD_RES (31), (31): Xaa is C or S
PTELRSVKMAKVDEYDKVVKEVQVEMVVEGX

SEQ ID NO: 81414 - protein, 29 aa, Artificial Sequence
  Cyclic GFR-binding peptide
  MOD_RES (4), (4): Xaa is C or S
KPTXAPTKLRPVQVRKIDDSSNVIKKATV

SEQ ID NO: 81415 - protein, 34 aa, Artificial Sequence; identical to SEQ ID NO: 29619
  Cyclic GFR-binding peptide
  MOD_RES (1), (2), (34): Xaa is C or S

SEQ ID NO: 81416 - protein, 24 aa, Artificial Sequence
  Cyclic GFR-binding peptide
SQDLRSVKIAKVIGKTPKIKEVQV

SEQ ID NO: 81417 - protein, 31 aa, Artificial Sequence
  Cyclic GFR-binding peptide
  MOD_RES (5), (6): Xaa is C or S
IPKAXXVPTELRSVKMAKVDEYDKVVKEVQV

SEQ ID NO: 81418 - protein, 40 aa, Artificial Sequence; identical to SEQ ID NO: 29627
  Cyclic GFR-binding peptide
  MOD_RES (5), (6), (38), (40): Xaa is C or S

SEQ ID NO: 81419 - protein, 25 aa, Artificial Sequence
  Cyclic GFR-binding peptide
APTKLRSVKVAKVDDSSNVIKEVQV

SEQ ID NO: 81420 - protein, 42 aa, Artificial Sequence; identical to SEQ ID NO: 29628
  Cyclic GFR-binding peptide
  MOD_RES (5), (39), (41): Xaa is C or S

SEQ ID NO: 81421 - protein, 31 aa, Artificial Sequence
  Cyclic GFR-binding peptide
  MOD_RES (29), (31): Xaa is C or S
ELRPVQMRKIDENEKVVKKATVDMVVEGXGX

SEQ ID NO: 81422 - protein, 35 aa, Artificial Sequence; identical to SEQ ID NO: 29629
  Cyclic GFR-binding peptide
  MOD_RES (4), (4): Xaa is C or S

SEQ ID NO: 81423 - protein, 29 aa, Artificial Sequence
  Cyclic GFR-binding peptide
TQVQLEPLPVVYYEIVRKKPIFEQLSNTL

SEQ ID NO: 81424 - protein, 43 aa, Artificial Sequence; identical to SEQ ID NO: 29633
  Cyclic GFR-binding peptide
  MOD_RES (5), (42): Xaa is C or S

SEQ ID NO: 81425 - protein, 31 aa, Artificial Sequence; identical to SEQ ID NO: 29635
  Cyclic GFR-binding peptide
  MOD_RES (1), (1): Xaa is C or S

SEQ ID NO: 81426 - protein, 21 aa, Artificial Sequence
  Cyclic GFR-binding peptide
LRPVQMRKIDEYDKVVKKATV

SEQ ID NO: 81427 - protein, 40 aa, Artificial Sequence; identical to SEQ ID NO: 29639
  Cyclic GFR-binding peptide
  MOD_RES (37), (39): Xaa is C or S

SEQ ID NO: 81428 - protein, 31 aa, Artificial Sequence
  Cyclic GFR-binding peptide
  MOD_RES (3), (4): Xaa is C or S
SPXXVSQDLRSVKIAKVIGKTPKIKEVQVMI

SEQ ID NO: 81429 - protein, 28 aa, Artificial Sequence
  Cyclic GFR-binding peptide
VSQDLSNITIQIMIGKTPKIIGEMSMIV

SEQ ID NO: 81430 - protein, 33 aa, Artificial Sequence; identical to SEQ ID NO: 29640
  Cyclic GFR-binding peptide
  MOD_RES (1), (32): Xaa is C or S

SEQ ID NO: 81431 - protein, 35 aa, Artificial Sequence; identical to SEQ ID NO: 29641
  Cyclic GFR-binding peptide
  MOD_RES (3), (4): Xaa is C or S

SEQ ID NO: 81432 - protein, 27 aa, Artificial Sequence
  Cyclic GFR-binding peptide
KLRSVKVAKVDDSSNVIKEVQVNMVVR

SEQ ID NO: 81433 - protein, 32 aa, Artificial Sequence
  Cyclic GFR-binding peptide
  MOD_RES (5), (6): Xaa is C or S
VPKPXXAPTKLSNITVQIMDDSSNVIIGEMSN

SEQ ID NO: 81434 - protein, 39 aa, Artificial Sequence; identical to SEQ ID NO: 29649
  Cyclic GFR-binding peptide
  MOD_RES (5), (5): Xaa is C or S

SEQ ID NO: 81435 - protein, 39 aa, Artificial Sequence; identical to SEQ ID NO: 29650
  Cyclic GFR-binding peptide
  MOD_RES (4), (5), (37), (39): Xaa is C or S

SEQ ID NO: 81436 - protein, 28 aa, Artificial Sequence
  Cyclic GFR-binding peptide
  MOD_RES (2), (3): Xaa is C or S
PXXVSQDLRPVQIRKIIGKTPKIKKATV

SEQ ID NO: 81437 - protein, 31 aa, Artificial Sequence; identical to SEQ ID NO: 29652
  Cyclic GFR-binding peptide
  MOD_RES (1), (1): Xaa is C or S

SEQ ID NO: 81438 - protein, 34 aa, Artificial Sequence
  Cyclic GFR-binding peptide
  MOD_RES (31), (33): Xaa is C or S
EEEPLPMVYYRIKPHQGQHEQLSNFLQHNKXEXR

SEQ ID NO: 81439 - protein, 22 aa, Artificial Sequence
  Cyclic GFR-binding peptide
LSNITIQIMIGKTPKIIGEMSM

SEQ ID NO: 81440 - protein, 29 aa, Artificial Sequence
  Cyclic GFR-binding peptide
  MOD_RES (1), (2): Xaa is C or S
XXVSQDLRPVQIRKIIGKTPKIKKATVMI

SEQ ID NO: 81441 - protein, 28 aa, Artificial Sequence
  Cyclic GFR-binding peptide
PTELSNITMQIMDEYDKVVIGEMSEMVV

SEQ ID NO: 81442 - protein, 29 aa, Artificial Sequence
  Cyclic GFR-binding peptide
  MOD_RES (1), (2): Xaa is C or S
XXVPTELSNITMQIMDENEKVVIGEMSDM

SEQ ID NO: 81443 - protein, 24 aa, Artificial Sequence
  Cyclic GFR-binding peptide
TKLRSVKVAKVDDSSNVIKEVQVN

SEQ ID NO: 81444 - protein, 39 aa, Artificial Sequence; identical to SEQ ID NO: 29666
  Cyclic GFR-binding peptide
  MOD_RES (6), (38): Xaa is C or S

SEQ ID NO: 81445 - protein, 30 aa, Artificial Sequence
  Cyclic GFR-binding peptide
  MOD_RES (4), (5): Xaa is C or S
ASPXXVSQDLRPVQIRKIIGKTPKIKKATV

SEQ ID NO: 81446 - protein, 36 aa, Artificial Sequence
  Cyclic GFR-binding peptide
  MOD_RES (6), (7): Xaa is C or S
ASASPXXVPQDLRSVKIAKVVGRTPKVKEVQVMVVK

SEQ ID NO: 81447 - protein, 31 aa, Artificial Sequence
  Cyclic GFR-binding peptide
  MOD_RES (3), (4): Xaa is C or S
KPXXAPTKLSNITVQIMDDSSNVIIGEMSNM

SEQ ID NO: 81448 - protein, 28 aa, Artificial Sequence
  Cyclic GFR-binding peptide
  MOD_RES (1), (1): Xaa is C or S
XAPTQLRSVKVAKVDDSSNVIKEVQVNM

SEQ ID NO: 81449 - protein, 34 aa, Artificial Sequence
  Cyclic GFR-binding peptide
  MOD_RES (33), (33): Xaa is C or S
PTEEEPLTMLYYRIKPHQGQHEQLSNFLQHNKXE

SEQ ID NO: 81450 - protein, 22 aa, Artificial Sequence
  Cyclic GFR-binding peptide
KLSNITVQIMDDSSNVIIGEMS

SEQ ID NO: 81451 - protein, 34 aa, Artificial Sequence
  Cyclic GFR-binding peptide
  MOD_RES (31), (33): Xaa is C or S
PTELRPVQMRKIDEYDKVVKKATVEMVVEGXGXR

SEQ ID NO: 81452 - protein, 35 aa, Artificial Sequence; identical to SEQ ID NO: 29671
  Cyclic GFR-binding peptide
  MOD_RES (32), (34): Xaa is C or S

SEQ ID NO: 81453 - protein, 32 aa, Artificial Sequence
  Cyclic GFR-binding peptide
  MOD_RES (29), (31): Xaa is C or S
QALSNITIQIMVGRKPKVIGEMSMIVRSXKXS

SEQ ID NO: 81454 - protein, 23 aa, Artificial Sequence
  Cyclic GFR-binding peptide
QDLRPVQIRKIIGKTPKIKKATV

SEQ ID NO: 81455 - protein, 31 aa, Artificial Sequence
  Cyclic GFR-binding peptide
  MOD_RES (29), (31): Xaa is C or S
QALSNITIQIMVGRKPKVIGEMSMIVRSXKX

SEQ ID NO: 81456 - protein, 26 aa, Artificial Sequence
  Cyclic GFR-binding peptide
VPTELRSVKMAKVDEYDKVVKEVQVE

SEQ ID NO: 81457 - protein, 33 aa, Artificial Sequence
  Cyclic GFR-binding peptide
  MOD_RES (5), (5): Xaa is C or S
EGLEXVPTEEEPLTMLYYRIKPHQGQHEQLSNF

SEQ ID NO: 81458 - protein, 31 aa, Artificial Sequence
  Cyclic GFR-binding peptide
  MOD_RES (29), (31): Xaa is C or S
QALRSVKIAKVVGRKPKVKEVQVMIVRSXKX

SEQ ID NO: 81459 - protein, 38 aa, Artificial Sequence; identical to SEQ ID NO: 29677
  Cyclic GFR-binding peptide
  MOD_RES (2), (2): Xaa is C or S

SEQ ID NO: 81460 - protein, 37 aa, Artificial Sequence; identical to SEQ ID NO: 29681
  Cyclic GFR-binding peptide
  MOD_RES (5), (6): Xaa is C or S

SEQ ID NO: 81461 - protein, 35 aa, Artificial Sequence; identical to SEQ ID NO: 29682
  Cyclic GFR-binding peptide
  MOD_RES (4), (5): Xaa is C or S

SEQ ID NO: 81462 - protein, 38 aa, Artificial Sequence; identical to SEQ ID NO: 29683
  Cyclic GFR-binding peptide
  MOD_RES (37), (37): Xaa is C or S

SEQ ID NO: 81463 - protein, 31 aa, Artificial Sequence
  Cyclic GFR-binding peptide
  MOD_RES (4), (5): Xaa is C or S
PKAXXVPTELSNITMQIMDENEKVVIGEMSD

SEQ ID NO: 81464 - protein, 32 aa, Artificial Sequence
  Cyclic GFR-binding peptide
  MOD_RES (31), (31): Xaa is C or S
PTELSNITMQIMDEYDKVVIGEMSEMVVEGXG

SEQ ID NO: 81465 - protein, 40 aa, Artificial Sequence; identical to SEQ ID NO: 29686
  Cyclic GFR-binding peptide
  MOD_RES (6), (7), (39): Xaa is C or S

SEQ ID NO: 81466 - protein, 25 aa, Artificial Sequence
  Cyclic GFR-binding peptide
RPVQIRKIVGRTPKVKKATVMVVKS

SEQ ID NO: 81467 - protein, 29 aa, Artificial Sequence
  Cyclic GFR-binding peptide
PTQVQLEPLPVVYYEIVRKKPIFEQLSNT

SEQ ID NO: 81468 - protein, 36 aa, Artificial Sequence
  Cyclic GFR-binding peptide
  MOD_RES (6), (7): Xaa is C or S
ASASPXXVPQDLRPVQIRKIVGRTPKVKKATVMVVK

SEQ ID NO: 81469 - protein, 41 aa, Artificial Sequence; identical to SEQ ID NO: 29689
  Cyclic GFR-binding peptide
  MOD_RES (2), (39), (41): Xaa is C or S

SEQ ID NO: 81470 - protein, 25 aa, Artificial Sequence
  Cyclic GFR-binding peptide
TQLRSVKVAKVDDSSNVIKEVQVNM

SEQ ID NO: 81471 - protein, 23 aa, Artificial Sequence
  Cyclic GFR-binding peptide
QALSNITIQIMVGRKPKVIGEMS

SEQ ID NO: 81472 - protein, 33 aa, Artificial Sequence; identical to SEQ ID NO: 29695
  Cyclic GFR-binding peptide
  MOD_RES (1), (33): Xaa is C or S

SEQ ID NO: 81473 - protein, 31 aa, Artificial Sequence
  Cyclic GFR-binding peptide
  MOD_RES (28), (30): Xaa is C or S
LRSVKMAKVDEYDKVVKEVQVEMVVEGXGXR

SEQ ID NO: 81474 - protein, 30 aa, Artificial Sequence
  Cyclic GFR-binding peptide
VHHEPLTVLYYEYVRKKPKLEQLSNRLEEH

SEQ ID NO: 81475 - protein, 44 aa, Artificial Sequence; identical to SEQ ID NO: 29698
  Cyclic GFR-binding peptide
  MOD_RES (5), (42), (44): Xaa is C or S

SEQ ID NO: 81476 - protein, 30 aa, Artificial Sequence
  Cyclic GFR-binding peptide
  MOD_RES (29), (29): Xaa is C or S
ELSNITMQIMDENEKVVIGEMSDMVVEGXG

SEQ ID NO: 81477 - protein, 43 aa, Artificial Sequence; identical to SEQ ID NO: 29701
  Cyclic GFR-binding peptide
  MOD_RES (4), (41), (43): Xaa is C or S

SEQ ID NO: 81478 - protein, 35 aa, Artificial Sequence; identical to SEQ ID NO: 29702
  Cyclic GFR-binding peptide
  MOD_RES (1), (2), (34): Xaa is C or S

SEQ ID NO: 81479 - protein, 25 aa, Artificial Sequence
  Cyclic GFR-binding peptide
HHEPLPVVYYEYVRKKPKLEQLSNR

SEQ ID NO: 81480 - protein, 43 aa, Artificial Sequence; identical to SEQ ID NO: 29708
  Cyclic GFR-binding peptide
  MOD_RES (7), (41), (43): Xaa is C or S

SEQ ID NO: 81481 - protein, 33 aa, Artificial Sequence
  Cyclic GFR-binding peptide
  MOD_RES (32), (32): Xaa is C or S
QLEPLPVVYYEIVRKKPIFEQLSNTLEDHLAXK

SEQ ID NO: 81482 - protein, 33 aa, Artificial Sequence
  Cyclic GFR-binding peptide
  MOD_RES (4), (5): Xaa is C or S
AAPXXVPQALRPVQIRKIVGRKPKVKKATVMIV

SEQ ID NO: 81483 - protein, 35 aa, Artificial Sequence; identical to SEQ ID NO: 29715
  Cyclic GFR-binding peptide
  MOD_RES (3), (4), (35): Xaa is C or S

SEQ ID NO: 81484 - protein, 38 aa, Artificial Sequence; identical to SEQ ID NO: 29717
  Cyclic GFR-binding peptide
  MOD_RES (3), (4), (35), (37): Xaa is C or S

SEQ ID NO: 81485 - protein, 34 aa, Artificial Sequence; identical to SEQ ID NO: 29718
  Cyclic GFR-binding peptide
  MOD_RES (1), (2), (34): Xaa is C or S

SEQ ID NO: 81486 - protein, 39 aa, Artificial Sequence; identical to SEQ ID NO: 29720
  Cyclic GFR-binding peptide
  MOD_RES (3), (4), (36), (38): Xaa is C or S

SEQ ID NO: 81487 - protein, 28 aa, Artificial Sequence
  Cyclic GFR-binding peptide
  MOD_RES (1), (2): Xaa is C or S
XXVPTELRSVKMAKVDEYDKVVKEVQVE

SEQ ID NO: 81488 - protein, 28 aa, Artificial Sequence
  Cyclic GFR-binding peptide
PTEEEPLTMLYYRIKPHQGQHEQLSNFL

SEQ ID NO: 81489 - protein, 31 aa, Artificial Sequence
  Cyclic GFR-binding peptide
  MOD_RES (1), (1): Xaa is C or S
XQPSRVHHEPLTVLYYEYVRKKPKLEQLSNR

SEQ ID NO: 81490 - protein, 30 aa, Artificial Sequence
  Cyclic GFR-binding peptide
PTQLSNITVQIMDDSSNVIIGEMSNMVVRA

SEQ ID NO: 81491 - protein, 28 aa, Artificial Sequence
  Cyclic GFR-binding peptide
  MOD_RES (2), (3): Xaa is C or S
AXXVPTELRPVQMRKIDENEKVVKKATV

SEQ ID NO: 81492 - protein, 38 aa, Artificial Sequence; identical to SEQ ID NO: 29727
  Cyclic GFR-binding peptide
  MOD_RES (3), (4), (36), (38): Xaa is C or S

SEQ ID NO: 81493 - protein, 38 aa, Artificial Sequence; identical to SEQ ID NO: 29728
  Cyclic GFR-binding peptide
  MOD_RES (3), (4), (36), (38): Xaa is C or S

SEQ ID NO: 81494 - protein, 29 aa, Artificial Sequence
  Cyclic GFR-binding peptide
  MOD_RES (1), (2): Xaa is C or S
XXVSQDLSNITIQIMIGKTPKIIGEMSMI

SEQ ID NO: 81495 - protein, 36 aa, Artificial Sequence; identical to SEQ ID NO: 29734
  Cyclic GFR-binding peptide
  MOD_RES (1), (2), (33), (35): Xaa is C or S

SEQ ID NO: 81496 - protein, 29 aa, Artificial Sequence
  Cyclic GFR-binding peptide
  MOD_RES (2), (3): Xaa is C or S
PXXVPQDLRSVKIAKVVGRTPKVKEVQVM

SEQ ID NO: 81497 - protein, 29 aa, Artificial Sequence
  Cyclic GFR-binding peptide
PTKLRPVQVRKIDDSSNVIKKATVNMVVR

SEQ ID NO: 81498 - protein, 32 aa, Artificial Sequence
  Cyclic GFR-binding peptide
  MOD_RES (30), (32): Xaa is C or S
TELRSVKMAKVDENEKVVKEVQVDMVVEGXGX

SEQ ID NO: 81499 - protein, 33 aa, Artificial Sequence
  Cyclic GFR-binding peptide
  MOD_RES (31), (33): Xaa is C or S
HEPLPVVYYEYVRKKPKLEQLSNRLEEHLEXAX

SEQ ID NO: 81500 - protein, 26 aa, Artificial Sequence
  Cyclic GFR-binding peptide
RVHHEPLTVLYYEYVRKKPKLEQLSN

SEQ ID NO: 81501 - protein, 25 aa, Artificial Sequence
  Cyclic GFR-binding peptide
QLRPVQVRKIDDSSNVIKKATVNMV

SEQ ID NO: 81502 - protein, 34 aa, Artificial Sequence
  Cyclic GFR-binding peptide
  MOD_RES (33), (33): Xaa is C or S
VHHEPLTVLYYEYVRKKPKLEQLSNRLEEHLEXA

SEQ ID NO: 81503 - protein, 25 aa, Artificial Sequence
  Cyclic GFR-binding peptide
ELRPVQMRKIDEYDKVVKKATVEMV

SEQ ID NO: 81504 - protein, 27 aa, Artificial Sequence
  Cyclic GFR-binding peptide
  MOD_RES (27), (27): Xaa is C or S
RPVQVRKIDDSSNVIKKATVNMVVRAX

SEQ ID NO: 81505 - protein, 36 aa, Artificial Sequence
  Cyclic GFR-binding peptide
  MOD_RES (33), (35): Xaa is C or S
PTEEEPLTMLYYRIKPHQGQHEQLSNFLQHNKXEXR

SEQ ID NO: 81506 - protein, 32 aa, Artificial Sequence
  Cyclic GFR-binding peptide
  MOD_RES (5), (5): Xaa is C or S
EGLEXVPTEEEPLTMLYYRIKPHQGQHEQLSN

SEQ ID NO: 81507 - protein, 28 aa, Artificial Sequence
  Cyclic GFR-binding peptide
  MOD_RES (27), (27): Xaa is C or S
LSNITIQIMVGRTPKVIGEMSMVVKSXK

SEQ ID NO: 81508 - protein, 24 aa, Artificial Sequence
  Cyclic GFR-binding peptide
QALRSVKIAKVVGRKPKVKEVQVM

SEQ ID NO: 81509 - protein, 37 aa, Artificial Sequence; identical to SEQ ID NO: 29748
  Cyclic GFR-binding peptide
  MOD_RES (6), (7): Xaa is C or S

SEQ ID NO: 81510 - protein, 32 aa, Artificial Sequence
  Cyclic GFR-binding peptide
  MOD_RES (4), (5): Xaa is C or S
PKAXXVPTELRPVQMRKIDENEKVVKKATVDM

SEQ ID NO: 81511 - protein, 26 aa, Artificial Sequence
  Cyclic GFR-binding peptide
QVQLEPLPVVYYEIVRKKPIFEQLSN

SEQ ID NO: 81512 - protein, 33 aa, Artificial Sequence; identical to SEQ ID NO: 29757
  Cyclic GFR-binding peptide
  MOD_RES (1), (33): Xaa is C or S

SEQ ID NO: 81513 - protein, 32 aa, Artificial Sequence
  Cyclic GFR-binding peptide
  MOD_RES (6), (7): Xaa is C or S
TVPKPXXAPTQLRSVKVAKVDDSSNVIKEVQV

SEQ ID NO: 81514 - protein, 35 aa, Artificial Sequence
  Cyclic GFR-binding peptide
  MOD_RES (5), (6): Xaa is C or S
SAAPXXVPQALRSVKIAKVVGRKPKVKEVQVMIVR

SEQ ID NO: 81515 - protein, 33 aa, Artificial Sequence; identical to SEQ ID NO: 29759
  Cyclic GFR-binding peptide
  MOD_RES (2), (2): Xaa is C or S

SEQ ID NO: 81516 - protein, 36 aa, Artificial Sequence; identical to SEQ ID NO: 29760
  Cyclic GFR-binding peptide
  MOD_RES (3), (4), (35): Xaa is C or S

SEQ ID NO: 81517 - protein, 33 aa, Artificial Sequence
  Cyclic GFR-binding peptide
  MOD_RES (6), (7): Xaa is C or S
TVPKPXXAPTQLRPVQVRKIDDSSNVIKKATVN

SEQ ID NO: 81518 - protein, 37 aa, Artificial Sequence; identical to SEQ ID NO: 29762
  Cyclic GFR-binding peptide
  MOD_RES (7), (7): Xaa is C or S

SEQ ID NO: 81519 - protein, 27 aa, Artificial Sequence
  Cyclic GFR-binding peptide
DLRPVQIRKIIGKTPKIKKATVMIVKS

SEQ ID NO: 81520 - protein, 33 aa, Artificial Sequence; identical to SEQ ID NO: 29764
  Cyclic GFR-binding peptide
  MOD_RES (2), (3): Xaa is C or S

SEQ ID NO: 81521 - protein, 33 aa, Artificial Sequence; identical to SEQ ID NO: 29765
  Cyclic GFR-binding peptide
  MOD_RES (2), (3): Xaa is C or S

SEQ ID NO: 81522 - protein, 23 aa, Artificial Sequence
  Cyclic GFR-binding peptide
TKLSNITVQIMDDSSNVIIGEMS

SEQ ID NO: 81523 - protein, 35 aa, Artificial Sequence; identical to SEQ ID NO: 29766
  Cyclic GFR-binding peptide
  MOD_RES (32), (34): Xaa is C or S

SEQ ID NO: 81524 - protein, 24 aa, Artificial Sequence
  Cyclic GFR-binding peptide
HHEPLTVLYYEYVRKKPKLEQLSN

SEQ ID NO: 81525 - protein, 36 aa, Artificial Sequence; identical to SEQ ID NO: 29769
  Cyclic GFR-binding peptide
  MOD_RES (2), (2): Xaa is C or S

SEQ ID NO: 81526 - protein, 29 aa, Artificial Sequence
  Cyclic GFR-binding peptide
PTELSNITMQIMDENEKVVIGEMSDMVVE

SEQ ID NO: 81527 - protein, 36 aa, Artificial Sequence; identical to SEQ ID NO: 29773
  Cyclic GFR-binding peptide

SEQ ID NO: 81528 - protein, 31 aa, Artificial Sequence; identical to SEQ ID NO: 29778
  Cyclic GFR-binding peptide

SEQ ID NO: 81529 - protein, 25 aa, Artificial Sequence
  Cyclic GFR-binding peptide
QALRSVKIAKVVGRKPKVKEVQVMI

SEQ ID NO: 81530 - protein, 20 aa, Artificial Sequence
  Cyclic GFR-binding peptide
RSVKMAKVDENEKVVKEVQV

SEQ ID NO: 81531 - protein, 30 aa, Artificial Sequence
  Cyclic GFR-binding peptide
VHHEPLPVVYYEYVRKKPKLEQLSNRLEEH

SEQ ID NO: 81532 - protein, 42 aa, Artificial Sequence; identical to SEQ ID NO: 29781
  Cyclic GFR-binding peptide
  MOD_RES (6), (7), (39), (41): Xaa is C or S

SEQ ID NO: 81533 - protein, 25 aa, Artificial Sequence
  Cyclic GFR-binding peptide
TKLRSVKVAKVDDSSNVIKEVQVNM

SEQ ID NO: 81534 - protein, 40 aa, Artificial Sequence; identical to SEQ ID NO: 29787
  Cyclic GFR-binding peptide
  MOD_RES (5), (5): Xaa is C or S

SEQ ID NO: 81535 - protein, 39 aa, Artificial Sequence; identical to SEQ ID NO: 29789
  Cyclic GFR-binding peptide
  MOD_RES (4), (5), (37), (39): Xaa is C or S

SEQ ID NO: 81536 - protein, 28 aa, Artificial Sequence
  Cyclic GFR-binding peptide
  MOD_RES (26), (28): Xaa is C or S
RSVKIAKVVGRTPKVKEVQVMVVKSXKX

SEQ ID NO: 81537 - protein, 26 aa, Artificial Sequence
  Cyclic GFR-binding peptide
TELRPVQMRKIDEYDKVVKKATVEMV

SEQ ID NO: 81538 - protein, 36 aa, Artificial Sequence; identical to SEQ ID NO: 29794
  Cyclic GFR-binding peptide
  MOD_RES (4), (36): Xaa is C or S

SEQ ID NO: 81539 - protein, 39 aa, Artificial Sequence; identical to SEQ ID NO: 29796
  Cyclic GFR-binding peptide
  MOD_RES (1), (38): Xaa is C or S

SEQ ID NO: 81540 - protein, 29 aa, Artificial Sequence
  Cyclic GFR-binding peptide
PQDLRPVQIRKIVGRTPKVKKATVMVVKS

SEQ ID NO: 81541 - protein, 28 aa, Artificial Sequence
  Cyclic GFR-binding peptide
VPTELRSVKMAKVDENEKVVKEVQVDMV

SEQ ID NO: 81542 - protein, 27 aa, Artificial Sequence
  Cyclic GFR-binding peptide
  MOD_RES (1), (2): Xaa is C or S
XXVSQDLRSVKIAKVIGKTPKIKEVQV

SEQ ID NO: 81543 - protein, 28 aa, Artificial Sequence
  Cyclic GFR-binding peptide
  MOD_RES (1), (1): Xaa is C or S
XVPTELRSVKMAKVDEYDKVVKEVQVEM

SEQ ID NO: 81544 - protein, 28 aa, Artificial Sequence
  Cyclic GFR-binding peptide
  MOD_RES (1), (1): Xaa is C or S
XVPQDLSNITIQIMVGRTPKVIGEMSMV

SEQ ID NO: 81545 - protein, 29 aa, Artificial Sequence
  Cyclic GFR-binding peptide
  MOD_RES (1), (1): Xaa is C or S
XVPTEEEPLTMLYYRIKPHQGQHEQLSNF

SEQ ID NO: 81546 - protein, 25 aa, Artificial Sequence
  Cyclic GFR-binding peptide
LSNITMQIMDENEKVVIGEMSDMVV

SEQ ID NO: 81547 - protein, 31 aa, Artificial Sequence
  Cyclic GFR-binding peptide
  MOD_RES (1), (2): Xaa is C or S
XXVSQDLRPVQIRKIIGKTPKIKKATVMIVK

SEQ ID NO: 81548 - protein, 21 aa, Artificial Sequence
  Cyclic GFR-binding peptide
LSNITIQIMVGRKPKVIGEMS

SEQ ID NO: 81549 - protein, 34 aa, Artificial Sequence; identical to SEQ ID NO: 29825
  Cyclic GFR-binding peptide
  MOD_RES (1), (2), (34): Xaa is C or S

SEQ ID NO: 81550 - protein, 33 aa, Artificial Sequence
  Cyclic GFR-binding peptide
  MOD_RES (6), (7): Xaa is C or S
ASASPXXVPQDLRSVKIAKVVGRTPKVKEVQVM

SEQ ID NO: 81551 - protein, 30 aa, Artificial Sequence
  Cyclic GFR-binding peptide
  MOD_RES (2), (3): Xaa is C or S
PXXVPQALSNITIQIMVGRKPKVIGEMSMI

SEQ ID NO: 81552 - protein, 35 aa, Artificial Sequence; identical to SEQ ID NO: 29826
  Cyclic GFR-binding peptide
  MOD_RES (2), (34): Xaa is C or S

SEQ ID NO: 81553 - protein, 39 aa, Artificial Sequence; identical to SEQ ID NO: 29827
  Cyclic GFR-binding peptide
  MOD_RES (4), (5), (37), (39): Xaa is C or S

SEQ ID NO: 81554 - protein, 28 aa, Artificial Sequence
  Cyclic GFR-binding peptide
  MOD_RES (26), (28): Xaa is C or S
SNITIQIMVGRKPKVIGEMSMIVRSXKX

SEQ ID NO: 81555 - protein, 35 aa, Artificial Sequence
  Cyclic GFR-binding peptide
  MOD_RES (6), (7): Xaa is C or S
SIPKAXXVPTELRSVKMAKVDEYDKVVKEVQVEMV

SEQ ID NO: 81556 - protein, 39 aa, Artificial Sequence; identical to SEQ ID NO: 29833
  Cyclic GFR-binding peptide
  MOD_RES (6), (38): Xaa is C or S

SEQ ID NO: 81557 - protein, 27 aa, Artificial Sequence
  Cyclic GFR-binding peptide
  MOD_RES (1), (2): Xaa is C or S
XXAPTQLRSVKVAKVDDSSNVIKEVQV

SEQ ID NO: 81558 - protein, 27 aa, Artificial Sequence
  Cyclic GFR-binding peptide
  MOD_RES (1), (1): Xaa is C or S
XVPTELRSVKMAKVDEYDKVVKEVQVE

SEQ ID NO: 81559 - protein, 38 aa, Artificial Sequence; identical to SEQ ID NO: 29835
  Cyclic GFR-binding peptide
  MOD_RES (2), (3), (35), (37): Xaa is C or S

SEQ ID NO: 81560 - protein, 34 aa, Artificial Sequence; identical to SEQ ID NO: 29837
  Cyclic GFR-binding peptide
  MOD_RES (31), (33): Xaa is C or S

SEQ ID NO: 81561 - protein, 27 aa, Artificial Sequence
  Cyclic GFR-binding peptide
VPTELSNITMQIMDENEKVVIGEMSDM

SEQ ID NO: 81562 - protein, 31 aa, Artificial Sequence
  Cyclic GFR-binding peptide
  MOD_RES (2), (2): Xaa is C or S
TXAPTKLSNITVQIMDDSSNVIIGEMSNMVV

SEQ ID NO: 81563 - protein, 39 aa, Artificial Sequence; identical to SEQ ID NO: 29840
  Cyclic GFR-binding peptide
  MOD_RES (6), (7), (38): Xaa is C or S

SEQ ID NO: 81564 - protein, 27 aa, Artificial Sequence
  Cyclic GFR-binding peptide
  MOD_RES (1), (2): Xaa is C or S
XXVSQDLRPVQIRKIIGKTPKIKKATV

SEQ ID NO: 81565 - protein, 30 aa, Artificial Sequence
  Cyclic GFR-binding peptide
  MOD_RES (27), (29): Xaa is C or S
LRPVQIRKIVGRTPKVKKATVMVVKSXKXS

SEQ ID NO: 81566 - protein, 28 aa, Artificial Sequence
  Cyclic GFR-binding peptide
  MOD_RES (1), (1): Xaa is C or S
XVPQALSNITIQIMVGRKPKVIGEMSMI

SEQ ID NO: 81567 - protein, 32 aa, Artificial Sequence
  Cyclic GFR-binding peptide
  MOD_RES (4), (4): Xaa is C or S
KPTXAPTKLRSVKVAKVDDSSNVIKEVQVNMV

SEQ ID NO: 81568 - protein, 24 aa, Artificial Sequence
  Cyclic GFR-binding peptide
PQDLRPVQIRKIVGRTPKVKKATV

SEQ ID NO: 81569 - protein, 29 aa, Artificial Sequence
  Cyclic GFR-binding peptide
SQDLSNITIQIMIGKTPKIIGEMSMIVKS

SEQ ID NO: 81570 - protein, 24 aa, Artificial Sequence
  Cyclic GFR-binding peptide
TQLRSVKVAKVDDSSNVIKEVQVN

SEQ ID NO: 81571 - protein, 26 aa, Artificial Sequence
  Cyclic GFR-binding peptide
PQALRPVQIRKIVGRKPKVKKATVMI

SEQ ID NO: 81572 - protein, 34 aa, Artificial Sequence
  Cyclic GFR-binding peptide
  MOD_RES (4), (5): Xaa is C or S
PKAXXVPTELRPVQMRKIDEYDKVVKKATVEMVV

SEQ ID NO: 81573 - protein, 32 aa, Artificial Sequence; identical to SEQ ID NO: 29856
  Cyclic GFR-binding peptide
  MOD_RES (1), (32): Xaa is C or S

SEQ ID NO: 81574 - protein, 25 aa, Artificial Sequence
  Cyclic GFR-binding peptide
APTQLSNITVQIMDDSSNVIIGEMS

SEQ ID NO: 81575 - protein, 32 aa, Artificial Sequence; identical to SEQ ID NO: 29858
  Cyclic GFR-binding peptide
  MOD_RES (32), (32): Xaa is C or S

SEQ ID NO: 81576 - protein, 32 aa, Artificial Sequence
  Cyclic GFR-binding peptide
  MOD_RES (6), (7): Xaa is C or S
YVPKPXXAPTKLRPVQVRKIDDSSNVIKKATV

SEQ ID NO: 81577 - protein, 34 aa, Artificial Sequence
  Cyclic GFR-binding peptide
  MOD_RES (4), (5): Xaa is C or S
ASPXXVSQDLRSVKIAKVIGKTPKIKEVQVMIVK

SEQ ID NO: 81578 - protein, 33 aa, Artificial Sequence
  Cyclic GFR-binding peptide
  MOD_RES (6), (7): Xaa is C or S
SIPKAXXVPTELRPVQMRKIDEYDKVVKKATVE

SEQ ID NO: 81579 - protein, 34 aa, Artificial Sequence; identical to SEQ ID NO: 29868
  Cyclic GFR-binding peptide
  MOD_RES (1), (2), (34): Xaa is C or S

SEQ ID NO: 81580 - protein, 36 aa, Artificial Sequence; identical to SEQ ID NO: 29871
  Cyclic GFR-binding peptide
  MOD_RES (2), (2): Xaa is C or S

SEQ ID NO: 81581 - protein, 24 aa, Artificial Sequence
  Cyclic GFR-binding peptide
SNITMQIMDENEKVVIGEMSDMVV

SEQ ID NO: 81582 - protein, 34 aa, Artificial Sequence
  Cyclic GFR-binding peptide
  MOD_RES (31), (33): Xaa is C or S
PTELSNITMQIMDENEKVVIGEMSDMVVEGXGXR

SEQ ID NO: 81583 - protein, 25 aa, Artificial Sequence
  Cyclic GFR-binding peptide
PQALRSVKIAKVVGRKPKVKEVQVM

SEQ ID NO: 81584 - protein, 26 aa, Artificial Sequence
  Cyclic GFR-binding peptide
ALRSVKIAKVVGRKPKVKEVQVMIVR

SEQ ID NO: 81585 - protein, 21 aa, Artificial Sequence
  Cyclic GFR-binding peptide
RSVKIAKVVGRTPKVKEVQVM

SEQ ID NO: 81586 - protein, 25 aa, Artificial Sequence
  Cyclic GFR-binding peptide
QLEPLPVVYYEIVRKKPIFEQLSNT

SEQ ID NO: 81587 - protein, 37 aa, Artificial Sequence; identical to SEQ ID NO: 29876
  Cyclic GFR-binding peptide
  MOD_RES (35), (37): Xaa is C or S

SEQ ID NO: 81588 - protein, 25 aa, Artificial Sequence
  Cyclic GFR-binding peptide
QDLSNITIQIMIGKTPKIIGEMSMI

SEQ ID NO: 81589 - protein, 42 aa, Artificial Sequence; identical to SEQ ID NO: 29883
  Cyclic GFR-binding peptide
  MOD_RES (7), (39), (41): Xaa is C or S

SEQ ID NO: 81590 - protein, 23 aa, Artificial Sequence
  Cyclic GFR-binding peptide
LRSVKIAKVVGRKPKVKEVQVMI

SEQ ID NO: 81591 - protein, 40 aa, Artificial Sequence; identical to SEQ ID NO: 29889
  Cyclic GFR-binding peptide
  MOD_RES (6), (7), (39): Xaa is C or S

SEQ ID NO: 81592 - protein, 30 aa, Artificial Sequence
  Cyclic GFR-binding peptide
  MOD_RES (1), (2): Xaa is C or S
XXAPTKLSNITVQIMDDSSNVIIGEMSNMV

SEQ ID NO: 81593 - protein, 27 aa, Artificial Sequence
  Cyclic GFR-binding peptide
VPQDLRSVKIAKVVGRTPKVKEVQVMV

SEQ ID NO: 81594 - protein, 31 aa, Artificial Sequence
  Cyclic GFR-binding peptide
  MOD_RES (31), (31): Xaa is C or S
HEPLPVVYYEYVRKKPKLEQLSNRLEEHLEX

SEQ ID NO: 81595 - protein, 40 aa, Artificial Sequence; identical to SEQ ID NO: 29897
  Cyclic GFR-binding peptide
  MOD_RES (3), (40): Xaa is C or S

SEQ ID NO: 81596 - protein, 38 aa, Artificial Sequence; identical to SEQ ID NO: 29898
  Cyclic GFR-binding peptide
  MOD_RES (6), (7): Xaa is C or S

SEQ ID NO: 81597 - protein, 33 aa, Artificial Sequence; identical to SEQ ID NO: 29900
  Cyclic GFR-binding peptide
  MOD_RES (1), (32): Xaa is C or S

SEQ ID NO: 81598 - protein, 38 aa, Artificial Sequence; identical to SEQ ID NO: 29901
  Cyclic GFR-binding peptide
  MOD_RES (4), (36), (38): Xaa is C or S

SEQ ID NO: 81599 - protein, 28 aa, Artificial Sequence
  Cyclic GFR-binding peptide
  MOD_RES (27), (27): Xaa is C or S
RSVKVAKVDDSSNVIKEVQVNMVVRAXG

SEQ ID NO: 81600 - protein, 33 aa, Artificial Sequence
  Cyclic GFR-binding peptide
  MOD_RES (30), (32): Xaa is C or S
EPLPVVYYEYVRKKPKLEQLSNRLEEHLEXAXA

SEQ ID NO: 81601 - protein, 30 aa, Artificial Sequence
  Cyclic GFR-binding peptide
  MOD_RES (1), (1): Xaa is C or S
XVPQALSNITIQIMVGRKPKVIGEMSMIVR

SEQ ID NO: 81602 - protein, 34 aa, Artificial Sequence; identical to SEQ ID NO: 29907
  Cyclic GFR-binding peptide
  MOD_RES (3), (4): Xaa is C or S

SEQ ID NO: 81603 - protein, 28 aa, Artificial Sequence
  Cyclic GFR-binding peptide
  MOD_RES (1), (2): Xaa is C or S
XXVSQDLRPVQIRKIIGKTPKIKKATVM

SEQ ID NO: 81604 - protein, 36 aa, Artificial Sequence; identical to SEQ ID NO: 29911
  Cyclic GFR-binding peptide
  MOD_RES (1), (2), (33), (35): Xaa is C or S

SEQ ID NO: 81605 - protein, 33 aa, Artificial Sequence
  Cyclic GFR-binding peptide
  MOD_RES (4), (5): Xaa is C or S
AAPXXVPQALRSVKIAKVVGRKPKVKEVQVMIV

SEQ ID NO: 81606 - protein, 26 aa, Artificial Sequence
  Cyclic GFR-binding peptide
  MOD_RES (1), (1): Xaa is C or S
XAPTQLRPVQVRKIDDSSNVIKKATV

SEQ ID NO: 81607 - protein, 32 aa, Artificial Sequence
  Cyclic GFR-binding peptide
  MOD_RES (4), (5): Xaa is C or S
PKAXXVPTELRSVKMAKVDEYDKVVKEVQVEM

SEQ ID NO: 81608 - protein, 33 aa, Artificial Sequence; identical to SEQ ID NO: 29914
  Cyclic GFR-binding peptide
  MOD_RES (32), (32): Xaa is C or S

SEQ ID NO: 81609 - protein, 43 aa, Artificial Sequence; identical to SEQ ID NO: 29915
  Cyclic GFR-binding peptide
  MOD_RES (4), (41), (43): Xaa is C or S

SEQ ID NO: 81610 - protein, 32 aa, Artificial Sequence
  Cyclic GFR-binding peptide
  MOD_RES (5), (6): Xaa is C or S
IPKAXXVPTELRPVQMRKIDENEKVVKKATVD

SEQ ID NO: 81611 - protein, 35 aa, Artificial Sequence
  Cyclic GFR-binding peptide
  MOD_RES (33), (35): Xaa is C or S
PTEEEPLPMVYYRIKPHQGQHEQLSNFLQHNKXEX

SEQ ID NO: 81612 - protein, 25 aa, Artificial Sequence
  Cyclic GFR-binding peptide
TELRSVKMAKVDENEKVVKEVQVDM

SEQ ID NO: 81613 - protein, 36 aa, Artificial Sequence; identical to SEQ ID NO: 29919
  Cyclic GFR-binding peptide
  MOD_RES (2), (3), (35): Xaa is C or S

SEQ ID NO: 81614 - protein, 34 aa, Artificial Sequence
  Cyclic GFR-binding peptide
  MOD_RES (31), (33): Xaa is C or S
PTQLSNITVQIMDDSSNVIIGEMSNMVVRAXGXH

SEQ ID NO: 81615 - protein, 28 aa, Artificial Sequence
  Cyclic GFR-binding peptide
  MOD_RES (2), (3): Xaa is C or S
PXXAPTKLRSVKVAKVDDSSNVIKEVQV

SEQ ID NO: 81616 - protein, 22 aa, Artificial Sequence
  Cyclic GFR-binding peptide
RSVKIAKVIGKTPKIKEVQVMI

SEQ ID NO: 81617 - protein, 34 aa, Artificial Sequence; identical to SEQ ID NO: 29921
  Cyclic GFR-binding peptide
  MOD_RES (2), (2): Xaa is C or S

SEQ ID NO: 81618 - protein, 30 aa, Artificial Sequence
  Cyclic GFR-binding peptide
  MOD_RES (28), (30): Xaa is C or S
LSNITMQIMDENEKVVIGEMSDMVVEGXGX

SEQ ID NO: 81619 - protein, 26 aa, Artificial Sequence
  Cyclic GFR-binding peptide
SNITMQIMDENEKVVIGEMSDMVVEG

SEQ ID NO: 81620 - protein, 30 aa, Artificial Sequence
  Cyclic GFR-binding peptide
  MOD_RES (3), (4): Xaa is C or S
KAXXVPTELRPVQMRKIDEYDKVVKKATVE

SEQ ID NO: 81621 - protein, 34 aa, Artificial Sequence
  Cyclic GFR-binding peptide
  MOD_RES (6), (7): Xaa is C or S
ASASPXXVSQDLRPVQIRKIIGKTPKIKKATVMI

SEQ ID NO: 81622 - protein, 42 aa, Artificial Sequence; identical to SEQ ID NO: 29922
  Cyclic GFR-binding peptide
  MOD_RES (6), (7), (39), (41): Xaa is C or S

SEQ ID NO: 81623 - protein, 39 aa, Artificial Sequence; identical to SEQ ID NO: 29925
  Cyclic GFR-binding peptide
  MOD_RES (4), (4): Xaa is C or S

SEQ ID NO: 81624 - protein, 36 aa, Artificial Sequence; identical to SEQ ID NO: 29926
  Cyclic GFR-binding peptide
  MOD_RES (3), (4), (36): Xaa is C or S

SEQ ID NO: 81625 - protein, 33 aa, Artificial Sequence
  Cyclic GFR-binding peptide
  MOD_RES (5), (6): Xaa is C or S
IPKAXXVPTELRPVQMRKIDEYDKVVKKATVEM

SEQ ID NO: 81626 - protein, 26 aa, Artificial Sequence
  Cyclic GFR-binding peptide
VHHEPLPVVYYEYVRKKPKLEQLSNR

SEQ ID NO: 81627 - protein, 23 aa, Artificial Sequence
  Cyclic GFR-binding peptide
ELSNITMQIMDEYDKVVIGEMSE

SEQ ID NO: 81628 - protein, 41 aa, Artificial Sequence; identical to SEQ ID NO: 29934
  Cyclic GFR-binding peptide
  MOD_RES (6), (7), (39), (41): Xaa is C or S

SEQ ID NO: 81629 - protein, 36 aa, Artificial Sequence; identical to SEQ ID NO: 29936
  Cyclic GFR-binding peptide
  MOD_RES (5), (6): Xaa is C or S

SEQ ID NO: 81630 - protein, 30 aa, Artificial Sequence
  Cyclic GFR-binding peptide
PTELSNITMQIMDEYDKVVIGEMSEMVVEG

SEQ ID NO: 81631 - protein, 32 aa, Artificial Sequence
  Cyclic GFR-binding peptide
  MOD_RES (5), (6): Xaa is C or S
VPKPXXAPTKLRSVKVAKVDDSSNVIKEVQVN

SEQ ID NO: 81632 - protein, 39 aa, Artificial Sequence; identical to SEQ ID NO: 29938
  Cyclic GFR-binding peptide
  MOD_RES (5), (37), (39): Xaa is C or S

SEQ ID NO: 81633 - protein, 35 aa, Artificial Sequence; identical to SEQ ID NO: 29940
  Cyclic GFR-binding peptide
  MOD_RES (4), (5): Xaa is C or S

SEQ ID NO: 81634 - protein, 27 aa, Artificial Sequence
  Cyclic GFR-binding peptide
ELRSVKMAKVDEYDKVVKEVQVEMVVE

SEQ ID NO: 81635 - protein, 30 aa, Artificial Sequence
  Cyclic GFR-binding peptide
PTELSNITMQIMDENEKVVIGEMSDMVVEG

SEQ ID NO: 81636 - protein, 29 aa, Artificial Sequence
  Cyclic GFR-binding peptide
  MOD_RES (29), (29): Xaa is C or S
KLSNITVQIMDDSSNVIIGEMSNMVVRSX

SEQ ID NO: 81637 - protein, 29 aa, Artificial Sequence
  Cyclic GFR-binding peptide
PTEEEPLTMLYYRIKPHQGQHEQLSNFLQ

SEQ ID NO: 81638 - protein, 28 aa, Artificial Sequence
  Cyclic GFR-binding peptide
VPQDLRPVQIRKIVGRTPKVKKATVMVV

SEQ ID NO: 81639 - protein, 34 aa, Artificial Sequence; identical to SEQ ID NO: 29951
  Cyclic GFR-binding peptide

SEQ ID NO: 81640 - protein, 31 aa, Artificial Sequence
  Cyclic GFR-binding peptide
  MOD_RES (4), (5): Xaa is C or S
ASPXXVSQDLRPVQIRKIIGKTPKIKKATVM

SEQ ID NO: 81641 - protein, 36 aa, Artificial Sequence
  Cyclic GFR-binding peptide
  MOD_RES (6), (7): Xaa is C or S
SIPKAXXVPTELRSVKMAKVDEYDKVVKEVQVEMVV

SEQ ID NO: 81642 - protein, 34 aa, Artificial Sequence; identical to SEQ ID NO: 29959
  Cyclic GFR-binding peptide

SEQ ID NO: 81643 - protein, 32 aa, Artificial Sequence; identical to SEQ ID NO: 29960
  Cyclic GFR-binding peptide
  MOD_RES (1), (2): Xaa is C or S

SEQ ID NO: 81644 - protein, 36 aa, Artificial Sequence; identical to SEQ ID NO: 29962
  Cyclic GFR-binding peptide
  MOD_RES (3), (4), (36): Xaa is C or S

SEQ ID NO: 81645 - protein, 30 aa, Artificial Sequence
  Cyclic GFR-binding peptide
RVHHEPLPVVYYEYVRKKPKLEQLSNRLEE

SEQ ID NO: 81646 - protein, 31 aa, Artificial Sequence; identical to SEQ ID NO: 29963
  Cyclic GFR-binding peptide

SEQ ID NO: 81647 - protein, 32 aa, Artificial Sequence
  Cyclic GFR-binding peptide
  MOD_RES (5), (6): Xaa is C or S
IPKAXXVPTELRSVKMAKVDEYDKVVKEVQVE

SEQ ID NO: 81648 - protein, 38 aa, Artificial Sequence; identical to SEQ ID NO: 29972
  Cyclic GFR-binding peptide
  MOD_RES (2), (3), (35), (37): Xaa is C or S

SEQ ID NO: 81649 - protein, 28 aa, Artificial Sequence
  Cyclic GFR-binding peptide
  MOD_RES (28), (28): Xaa is C or S
DLRPVQIRKIVGRTPKVKKATVMVVKSX

SEQ ID NO: 81650 - protein, 32 aa, Artificial Sequence
  Cyclic GFR-binding peptide
  MOD_RES (2), (3): Xaa is C or S
PXXVSQDLRSVKIAKVIGKTPKIKEVQVMIVK

SEQ ID NO: 81651 - protein, 29 aa, Artificial Sequence
  Cyclic GFR-binding peptide
  MOD_RES (3), (3): Xaa is C or S
PTXAPTKLRSVKVAKVDDSSNVIKEVQVN

SEQ ID NO: 81652 - protein, 39 aa, Artificial Sequence; identical to SEQ ID NO: 29978
  Cyclic GFR-binding peptide
  MOD_RES (6), (7), (39): Xaa is C or S

SEQ ID NO: 81653 - protein, 36 aa, Artificial Sequence; identical to SEQ ID NO: 29980
  Cyclic GFR-binding peptide
  MOD_RES (1), (1): Xaa is C or S

SEQ ID NO: 81654 - protein, 40 aa, Artificial Sequence; identical to SEQ ID NO: 29981
  Cyclic GFR-binding peptide
  MOD_RES (37), (39): Xaa is C or S

SEQ ID NO: 81655 - protein, 27 aa, Artificial Sequence
  Cyclic GFR-binding peptide
  MOD_RES (1), (1): Xaa is C or S
XAPTKLSNITVQIMDDSSNVIIGEMSN

SEQ ID NO: 81656 - protein, 32 aa, Artificial Sequence; identical to SEQ ID NO: 29986
  Cyclic GFR-binding peptide
  MOD_RES (1), (2): Xaa is C or S

SEQ ID NO: 81657 - protein, 36 aa, Artificial Sequence
  Cyclic GFR-binding peptide
  MOD_RES (6), (7): Xaa is C or S
YVPKPXXAPTKLRSVKVAKVDDSSNVIKEVQVNMVV

SEQ ID NO: 81658 - protein, 28 aa, Artificial Sequence
  Cyclic GFR-binding peptide
VQLEPLTVLYYEIVRKKPIFEQLSNTLE

SEQ ID NO: 81659 - protein, 35 aa, Artificial Sequence
  Cyclic GFR-binding peptide
  MOD_RES (5), (6): Xaa is C or S
SASPXXVSQDLRPVQIRKIIGKTPKIKKATVMIVK

SEQ ID NO: 81660 - protein, 22 aa, Artificial Sequence
  Cyclic GFR-binding peptide
EPLPVVYYEYVRKKPKLEQLSN

SEQ ID NO: 81661 - protein, 34 aa, Artificial Sequence; identical to SEQ ID NO: 29999
  Cyclic GFR-binding peptide
  MOD_RES (3), (4): Xaa is C or S

SEQ ID NO: 81662 - protein, 38 aa, Artificial Sequence; identical to SEQ ID NO: 30001
  Cyclic GFR-binding peptide
  MOD_RES (5), (6), (37): Xaa is C or S

SEQ ID NO: 81663 - protein, 36 aa, Artificial Sequence; identical to SEQ ID NO: 30003
  Cyclic GFR-binding peptide
  MOD_RES (1), (33), (35): Xaa is C or S

SEQ ID NO: 81664 - protein, 34 aa, Artificial Sequence
  Cyclic GFR-binding peptide
  MOD_RES (32), (34): Xaa is C or S
QLEPLPVVYYEIVRKKPIFEQLSNTLEDHLAXKX

SEQ ID NO: 81665 - protein, 29 aa, Artificial Sequence
  Cyclic GFR-binding peptide
HEPLPVVYYEYVRKKPKLEQLSNRLEEHL

SEQ ID NO: 81666 - protein, 35 aa, Artificial Sequence; identical to SEQ ID NO: 30006
  Cyclic GFR-binding peptide

SEQ ID NO: 81667 - protein, 35 aa, Artificial Sequence; identical to SEQ ID NO: 30008
  Cyclic GFR-binding peptide
  MOD_RES (2), (34): Xaa is C or S

SEQ ID NO: 81668 - protein, 33 aa, Artificial Sequence
  Cyclic GFR-binding peptide
  MOD_RES (4), (5): Xaa is C or S
PKPXXAPTKLSNITVQIMDDSSNVIIGEMSNMV

SEQ ID NO: 81669 - protein, 26 aa, Artificial Sequence
  Cyclic GFR-binding peptide
VPTELSNITMQIMDEYDKVVIGEMSE

SEQ ID NO: 81670 - protein, 29 aa, Artificial Sequence
  Cyclic GFR-binding peptide
VPQALSNITIQIMVGRKPKVIGEMSMIVR

SEQ ID NO: 81671 - protein, 22 aa, Artificial Sequence
  Cyclic GFR-binding peptide
LRPVQIRKIVGRKPKVKKATVM

SEQ ID NO: 81672 - protein, 32 aa, Artificial Sequence
  Cyclic GFR-binding peptide
  MOD_RES (29), (31): Xaa is C or S
QDLSNITIQIMIGKTPKIIGEMSMIVKSXKXS

SEQ ID NO: 81673 - protein, 24 aa, Artificial Sequence
  Cyclic GFR-binding peptide
TKLSNITVQIMDDSSNVIIGEMSN

SEQ ID NO: 81674 - protein, 32 aa, Artificial Sequence
  Cyclic GFR-binding peptide
  MOD_RES (1), (1): Xaa is C or S
XRPTQVQLEPLPVVYYEIVRKKPIFEQLSNTL

SEQ ID NO: 81675 - protein, 38 aa, Artificial Sequence; identical to SEQ ID NO: 30016
  Cyclic GFR-binding peptide
  MOD_RES (1), (35), (37): Xaa is C or S

SEQ ID NO: 81676 - protein, 25 aa, Artificial Sequence
  Cyclic GFR-binding peptide
VHHEPLPVVYYEYVRKKPKLEQLSN

SEQ ID NO: 81677 - protein, 29 aa, Artificial Sequence
  Cyclic GFR-binding peptide
PTQLRPVQVRKIDDSSNVIKKATVNMVVR

SEQ ID NO: 81678 - protein, 31 aa, Artificial Sequence
  Cyclic GFR-binding peptide
  MOD_RES (4), (5): Xaa is C or S
PKAXXVPTELRPVQMRKIDENEKVVKKATVD

SEQ ID NO: 81679 - protein, 41 aa, Artificial Sequence; identical to SEQ ID NO: 30034
  Cyclic GFR-binding peptide
  MOD_RES (6), (7), (39), (41): Xaa is C or S

SEQ ID NO: 81680 - protein, 34 aa, Artificial Sequence; identical to SEQ ID NO: 30036
  Cyclic GFR-binding peptide
  MOD_RES (31), (33): Xaa is C or S

SEQ ID NO: 81681 - protein, 29 aa, Artificial Sequence
  Cyclic GFR-binding peptide
  MOD_RES (1), (1): Xaa is C or S
XVPQALRSVKIAKVVGRKPKVKEVQVMIV

SEQ ID NO: 81682 - protein, 37 aa, Artificial Sequence; identical to SEQ ID NO: 30041
  Cyclic GFR-binding peptide
  MOD_RES (34), (36): Xaa is C or S

SEQ ID NO: 81683 - protein, 34 aa, Artificial Sequence
  Cyclic GFR-binding peptide
  MOD_RES (4), (4): Xaa is C or S
SVKXQPSRVHHEPLPVVYYEYVRKKPKLEQLSNR

SEQ ID NO: 81684 - protein, 34 aa, Artificial Sequence
  Cyclic GFR-binding peptide
  MOD_RES (6), (7): Xaa is C or S
ASASPXXVPQDLRPVQIRKIVGRTPKVKKATVMV

SEQ ID NO: 81685 - protein, 27 aa, Artificial Sequence
  Cyclic GFR-binding peptide
VSQDLRSVKIAKVIGKTPKIKEVQVMI

SEQ ID NO: 81686 - protein, 37 aa, Artificial Sequence; identical to SEQ ID NO: 30043
  Cyclic GFR-binding peptide
  MOD_RES (3), (4), (36): Xaa is C or S

SEQ ID NO: 81687 - protein, 34 aa, Artificial Sequence
  Cyclic GFR-binding peptide
  MOD_RES (4), (5): Xaa is C or S
PKPXXAPTQLSNITVQIMDDSSNVIIGEMSNMVV

SEQ ID NO: 81688 - protein, 30 aa, Artificial Sequence
  Cyclic GFR-binding peptide
  MOD_RES (4), (5): Xaa is C or S
PKAXXVPTELSNITMQIMDEYDKVVIGEMS

SEQ ID NO: 81689 - protein, 29 aa, Artificial Sequence
  Cyclic GFR-binding peptide
VPTELRPVQMRKIDEYDKVVKKATVEMVV

SEQ ID NO: 81690 - protein, 28 aa, Artificial Sequence
  Cyclic GFR-binding peptide
ELRPVQMRKIDENEKVVKKATVDMVVEG

SEQ ID NO: 81691 - protein, 26 aa, Artificial Sequence
  Cyclic GFR-binding peptide
ELRPVQMRKIDEYDKVVKKATVEMVV

SEQ ID NO: 81692 - protein, 33 aa, Artificial Sequence
  Cyclic GFR-binding peptide
  MOD_RES (1), (1): Xaa is C or S
XRPTQVQLEPLTVLYYEIVRKKPIFEQLSNTLE

SEQ ID NO: 81693 - protein, 25 aa, Artificial Sequence
  Cyclic GFR-binding peptide
PQDLRPVQIRKIVGRTPKVKKATVM

SEQ ID NO: 81694 - protein, 23 aa, Artificial Sequence
  Cyclic GFR-binding peptide
LSNITMQIMDENEKVVIGEMSDM

SEQ ID NO: 81695 - protein, 37 aa, Artificial Sequence; identical to SEQ ID NO: 30046
  Cyclic GFR-binding peptide
  MOD_RES (5), (6): Xaa is C or S

SEQ ID NO: 81696 - protein, 22 aa, Artificial Sequence
  Cyclic GFR-binding peptide
DLSNITIQIMIGKTPKIIGEMS

SEQ ID NO: 81697 - protein, 41 aa, Artificial Sequence; identical to SEQ ID NO: 30048
  Cyclic GFR-binding peptide
  MOD_RES (6), (7), (38), (40): Xaa is C or S

SEQ ID NO: 81698 - protein, 31 aa, Artificial Sequence
  Cyclic GFR-binding peptide
  MOD_RES (28), (30): Xaa is C or S
DLRSVKIAKVIGKTPKIKEVQVMIVKSXKXS

SEQ ID NO: 81699 - protein, 29 aa, Artificial Sequence
  Cyclic GFR-binding peptide
SQDLRSVKIAKVIGKTPKIKEVQVMIVKS

SEQ ID NO: 81700 - protein, 36 aa, Artificial Sequence; identical to SEQ ID NO: 30052
  Cyclic GFR-binding peptide
  MOD_RES (2), (36): Xaa is C or S

SEQ ID NO: 81701 - protein, 26 aa, Artificial Sequence
  Cyclic GFR-binding peptide
LRSVKIAKVVGRTPKVKEVQVMVVKS

SEQ ID NO: 81702 - protein, 27 aa, Artificial Sequence
  Cyclic GFR-binding peptide
  MOD_RES (27), (27): Xaa is C or S
SNITMQIMDENEKVVIGEMSDMVVEGX

SEQ ID NO: 81703 - protein, 25 aa, Artificial Sequence
  Cyclic GFR-binding peptide
LRSVKIAKVVGRKPKVKEVQVMIVR

SEQ ID NO: 81704 - protein, 28 aa, Artificial Sequence
  Cyclic GFR-binding peptide
  MOD_RES (1), (2): Xaa is C or S
XXAPTKLRSVKVAKVDDSSNVIKEVQVN

SEQ ID NO: 81705 - protein, 27 aa, Artificial Sequence
  Cyclic GFR-binding peptide
  MOD_RES (1), (2): Xaa is C or S
XXVPQDLRSVKIAKVVGRTPKVKEVQV

SEQ ID NO: 81706 - protein, 25 aa, Artificial Sequence
  Cyclic GFR-binding peptide
LRPVQVRKIDDSSNVIKKATVNMVV

SEQ ID NO: 81707 - protein, 30 aa, Artificial Sequence
  Cyclic GFR-binding peptide
RVHHEPLTVLYYEYVRKKPKLEQLSNRLEE

SEQ ID NO: 81708 - protein, 23 aa, Artificial Sequence
  Cyclic GFR-binding peptide
TELSNITMQIMDEYDKVVIGEMS

SEQ ID NO: 81709 - protein, 33 aa, Artificial Sequence
  Cyclic GFR-binding peptide
  MOD_RES (3), (4): Xaa is C or S
SPXXVPQDLRSVKIAKVVGRTPKVKEVQVMVVK

SEQ ID NO: 81710 - protein, 31 aa, Artificial Sequence
  Cyclic GFR-binding peptide
  MOD_RES (1), (2): Xaa is C or S
XXAPTQLRPVQVRKIDDSSNVIKKATVNMVV

SEQ ID NO: 81711 - protein, 40 aa, Artificial Sequence; identical to SEQ ID NO: 30059
  Cyclic GFR-binding peptide
  MOD_RES (3), (40): Xaa is C or S

SEQ ID NO: 81712 - protein, 35 aa, Artificial Sequence
  Cyclic GFR-binding peptide
  MOD_RES (32), (34): Xaa is C or S
HHEPLPVVYYEYVRKKPKLEQLSNRLEEHLEXAXA

SEQ ID NO: 81713 - protein, 24 aa, Artificial Sequence
  Cyclic GFR-binding peptide
QDLRPVQIRKIIGKTPKIKKATVM

SEQ ID NO: 81714 - protein, 22 aa, Artificial Sequence
  Cyclic GFR-binding peptide
DLRPVQIRKIIGKTPKIKKATV

SEQ ID NO: 81715 - protein, 38 aa, Artificial Sequence; identical to SEQ ID NO: 30064
  Cyclic GFR-binding peptide
  MOD_RES (3), (4), (35), (37): Xaa is C or S

SEQ ID NO: 81716 - protein, 35 aa, Artificial Sequence
  Cyclic GFR-binding peptide
  MOD_RES (5), (5): Xaa is C or S
EGLEXVPTEEEPLPMVYYRIKPHQGQHEQLSNFLQ

SEQ ID NO: 81717 - protein, 31 aa, Artificial Sequence
  Cyclic GFR-binding peptide
  MOD_RES (29), (31): Xaa is C or S
QALRPVQIRKIVGRKPKVKKATVMIVRSXKX

SEQ ID NO: 81718 - protein, 29 aa, Artificial Sequence
  Cyclic GFR-binding peptide
RPVQIRKIVGRTPKVKKATVAAAAAAAAA

SEQ ID NO: 81719 - protein, 37 aa, Artificial Sequence; identical to SEQ ID NO: 30072
  Cyclic GFR-binding peptide
  MOD_RES (6), (7): Xaa is C or S

SEQ ID NO: 81720 - protein, 23 aa, Artificial Sequence
  Cyclic GFR-binding peptide
RSVKIAKVVGRTPKVKEVQVMVV

SEQ ID NO: 81721 - protein, 33 aa, Artificial Sequence
  Cyclic GFR-binding peptide
  MOD_RES (6), (7): Xaa is C or S
TVPKPXXAPTQLSNITVQIMDDSSNVIIGEMSN

SEQ ID NO: 81722 - protein, 30 aa, Artificial Sequence
  Cyclic GFR-binding peptide
  MOD_RES (5), (5): Xaa is C or S
TKPTXAPTKLRSVKVAKVDDSSNVIKEVQV

SEQ ID NO: 81723 - protein, 36 aa, Artificial Sequence; identical to SEQ ID NO: 30081
  Cyclic GFR-binding peptide
  MOD_RES (2), (3), (34), (36): Xaa is C or S

SEQ ID NO: 81724 - protein, 26 aa, Artificial Sequence
  Cyclic GFR-binding peptide
APTQLSNITVQIMDDSSNVIIGEMSN

SEQ ID NO: 81725 - protein, 28 aa, Artificial Sequence
  Cyclic GFR-binding peptide
  MOD_RES (2), (3): Xaa is C or S
PXXAPTKLRPVQVRKIDDSSNVIKKATV

SEQ ID NO: 81726 - protein, 29 aa, Artificial Sequence
  Cyclic GFR-binding peptide
  MOD_RES (1), (2): Xaa is C or S
XXVPQALSNITIQIMVGRKPKVIGEMSMI

SEQ ID NO: 81727 - protein, 27 aa, Artificial Sequence
  Cyclic GFR-binding peptide
  MOD_RES (1), (1): Xaa is C or S
XAPTQLRSVKVAKVDDSSNVIKEVQVN

SEQ ID NO: 81728 - protein, 24 aa, Artificial Sequence
  Cyclic GFR-binding peptide
SNITIQIMIGKTPKIIGEMSMIVK

SEQ ID NO: 81729 - protein, 35 aa, Artificial Sequence
  Cyclic GFR-binding peptide
  MOD_RES (6), (7): Xaa is C or S
TVPKPXXAPTQLRPVQVRKIDDSSNVIKKATVNMV

SEQ ID NO: 81730 - protein, 34 aa, Artificial Sequence; identical to SEQ ID NO: 30087
  Cyclic GFR-binding peptide
  MOD_RES (1), (2), (33): Xaa is C or S

SEQ ID NO: 81731 - protein, 24 aa, Artificial Sequence
  Cyclic GFR-binding peptide
QLRPVQVRKIDDSSNVIKKATVNM

SEQ ID NO: 81732 - protein, 36 aa, Artificial Sequence; identical to SEQ ID NO: 30091
  Cyclic GFR-binding peptide
  MOD_RES (1), (2), (33), (35): Xaa is C or S

SEQ ID NO: 81733 - protein, 27 aa, Artificial Sequence
  Cyclic GFR-binding peptide
RVHHEPLPVVYYEYVRKKPKLEQLSNR

SEQ ID NO: 81734 - protein, 29 aa, Artificial Sequence
  Cyclic GFR-binding peptide
  MOD_RES (29), (29): Xaa is C or S
EPLTMLYYRIKPHQGQHEQLSNFLQHNKX

SEQ ID NO: 81735 - protein, 39 aa, Artificial Sequence; identical to SEQ ID NO: 30093
  Cyclic GFR-binding peptide
  MOD_RES (5), (6), (37), (39): Xaa is C or S

SEQ ID NO: 81736 - protein, 36 aa, Artificial Sequence
  Cyclic GFR-binding peptide
  MOD_RES (6), (7): Xaa is C or S
ASAAPXXVPQALRPVQIRKIVGRKPKVKKATVMIVR

SEQ ID NO: 81737 - protein, 29 aa, Artificial Sequence
  Cyclic GFR-binding peptide
  MOD_RES (1), (1): Xaa is C or S
XVPQALSNITIQIMVGRKPKVIGEMSMIV

SEQ ID NO: 81738 - protein, 29 aa, Artificial Sequence
  Cyclic GFR-binding peptide
  MOD_RES (27), (29): Xaa is C or S
LRSVKIAKVIGKTPKIKEVQVMIVKSXKX

SEQ ID NO: 81739 - protein, 36 aa, Artificial Sequence; identical to SEQ ID NO: 30099
  Cyclic GFR-binding peptide
  MOD_RES (5), (6): Xaa is C or S

SEQ ID NO: 81740 - protein, 32 aa, Artificial Sequence
  Cyclic GFR-binding peptide
  MOD_RES (30), (32): Xaa is C or S
TELRPVQMRKIDENEKVVKKATVDMVVEGXGX

SEQ ID NO: 81741 - protein, 39 aa, Artificial Sequence; identical to SEQ ID NO: 30105
  Cyclic GFR-binding peptide
  MOD_RES (5), (6), (38): Xaa is C or S

SEQ ID NO: 81742 - protein, 37 aa, Artificial Sequence; identical to SEQ ID NO: 30108
  Cyclic GFR-binding peptide
  MOD_RES (2), (36): Xaa is C or S

SEQ ID NO: 81743 - protein, 32 aa, Artificial Sequence
  Cyclic GFR-binding peptide
  MOD_RES (30), (32): Xaa is C or S
PQDLRPVQIRKIVGRTPKVKKATVMVVKSXKX

SEQ ID NO: 81744 - protein, 28 aa, Artificial Sequence
  Cyclic GFR-binding peptide
TEEEPLPMVYYRIKPHQGQHEQLSNFLQ

SEQ ID NO: 81745 - protein, 30 aa, Artificial Sequence
  Cyclic GFR-binding peptide
  MOD_RES (30), (30): Xaa is C or S
PQALRSVKIAKVVGRKPKVKEVQVMIVRSX

SEQ ID NO: 81746 - protein, 24 aa, Artificial Sequence
  Cyclic GFR-binding peptide
SQDLSNITIQIMIGKTPKIIGEMS

SEQ ID NO: 81747 - protein, 29 aa, Artificial Sequence
  Cyclic GFR-binding peptide
EPLTVLYYEYVRKKPKLEQLSNRLEEHLE

SEQ ID NO: 81748 - protein, 34 aa, Artificial Sequence; identical to SEQ ID NO: 30115
  Cyclic GFR-binding peptide
  MOD_RES (1), (33): Xaa is C or S

SEQ ID NO: 81749 - protein, 37 aa, Artificial Sequence; identical to SEQ ID NO: 30121
  Cyclic GFR-binding peptide
  MOD_RES (3), (4), (36): Xaa is C or S

SEQ ID NO: 81750 - protein, 34 aa, Artificial Sequence; identical to SEQ ID NO: 30122
  Cyclic GFR-binding peptide

SEQ ID NO: 81751 - protein, 32 aa, Artificial Sequence
  Cyclic GFR-binding peptide
  MOD_RES (4), (4): Xaa is C or S
KPTXAPTKLSNITVQIMDDSSNVIIGEMSNMV

SEQ ID NO: 81752 - protein, 30 aa, Artificial Sequence
  Cyclic GFR-binding peptide
  MOD_RES (3), (4): Xaa is C or S
KAXXVPTELSNITMQIMDENEKVVIGEMSD

SEQ ID NO: 81753 - protein, 39 aa, Artificial Sequence; identical to SEQ ID NO: 30126
  Cyclic GFR-binding peptide
  MOD_RES (6), (7), (39): Xaa is C or S

SEQ ID NO: 81754 - protein, 32 aa, Artificial Sequence; identical to SEQ ID NO: 30128
  Cyclic GFR-binding peptide
  MOD_RES (32), (32): Xaa is C or S

SEQ ID NO: 81755 - protein, 33 aa, Artificial Sequence; identical to SEQ ID NO: 30129
  Cyclic GFR-binding peptide

SEQ ID NO: 81756 - protein, 34 aa, Artificial Sequence; identical to SEQ ID NO: 30133
  Cyclic GFR-binding peptide
  MOD_RES (1), (2), (33): Xaa is C or S

SEQ ID NO: 81757 - protein, 37 aa, Artificial Sequence; identical to SEQ ID NO: 30132
  Cyclic GFR-binding peptide
  MOD_RES (1), (1): Xaa is C or S

SEQ ID NO: 81758 - protein, 27 aa, Artificial Sequence
  Cyclic GFR-binding peptide
APTQLRPVQVRKIDDSSNVIKKATVNM

SEQ ID NO: 81759 - protein, 32 aa, Artificial Sequence
  Cyclic GFR-binding peptide
  MOD_RES (1), (1): Xaa is C or S
XQPSRVHHEPLTVLYYEYVRKKPKLEQLSNRL

SEQ ID NO: 81760 - protein, 25 aa, Artificial Sequence
  Cyclic GFR-binding peptide
VPTELRSVKMAKVDENEKVVKEVQV

SEQ ID NO: 81761 - protein, 37 aa, Artificial Sequence; identical to SEQ ID NO: 30135
  Cyclic GFR-binding peptide
  MOD_RES (6), (7): Xaa is C or S

SEQ ID NO: 81762 - protein, 28 aa, Artificial Sequence
  Cyclic GFR-binding peptide
  MOD_RES (27), (27): Xaa is C or S
LRPVQIRKIVGRKPKVKKATVMIVRSXK

SEQ ID NO: 81763 - protein, 35 aa, Artificial Sequence; identical to SEQ ID NO: 30136
  Cyclic GFR-binding peptide
  MOD_RES (2), (3), (34): Xaa is C or S

SEQ ID NO: 81764 - protein, 36 aa, Artificial Sequence; identical to SEQ ID NO: 30139
  Cyclic GFR-binding peptide
  MOD_RES (1), (33), (35): Xaa is C or S

SEQ ID NO: 81765 - protein, 23 aa, Artificial Sequence
  Cyclic GFR-binding peptide
TQLRPVQVRKIDDSSNVIKKATV

SEQ ID NO: 81766 - protein, 27 aa, Artificial Sequence
  Cyclic GFR-binding peptide
  MOD_RES (26), (26): Xaa is C or S
RSVKIAKVVGRTPKVKEVQVMVVKSXK

SEQ ID NO: 81767 - protein, 37 aa, Artificial Sequence; identical to SEQ ID NO: 30142
  Cyclic GFR-binding peptide
  MOD_RES (5), (6): Xaa is C or S

SEQ ID NO: 81768 - protein, 36 aa, Artificial Sequence; identical to SEQ ID NO: 30146
  Cyclic GFR-binding peptide
  MOD_RES (3), (35): Xaa is C or S

SEQ ID NO: 81769 - protein, 24 aa, Artificial Sequence
  Cyclic GFR-binding peptide
PQDLRSVKIAKVVGRTPKVKEVQV

SEQ ID NO: 81770 - protein, 30 aa, Artificial Sequence
  Cyclic GFR-binding peptide
  MOD_RES (2), (2): Xaa is C or S
TXAPTKLSNITVQIMDDSSNVIIGEMSNMV

SEQ ID NO: 81771 - protein, 37 aa, Artificial Sequence; identical to SEQ ID NO: 30149
  Cyclic GFR-binding peptide
  MOD_RES (5), (6): Xaa is C or S

SEQ ID NO: 81772 - protein, 39 aa, Artificial Sequence; identical to SEQ ID NO: 30150
  Cyclic GFR-binding peptide
  MOD_RES (5), (6), (38): Xaa is C or S

SEQ ID NO: 81773 - protein, 36 aa, Artificial Sequence; identical to SEQ ID NO: 30154
  Cyclic GFR-binding peptide
  MOD_RES (1), (1): Xaa is C or S

SEQ ID NO: 81774 - protein, 38 aa, Artificial Sequence; identical to SEQ ID NO: 30153
  Cyclic GFR-binding peptide
  MOD_RES (3), (3): Xaa is C or S

SEQ ID NO: 81775 - protein, 35 aa, Artificial Sequence; identical to SEQ ID NO: 30155
  Cyclic GFR-binding peptide

SEQ ID NO: 81776 - protein, 33 aa, Artificial Sequence; identical to SEQ ID NO: 30160
  Cyclic GFR-binding peptide
  MOD_RES (1), (33): Xaa is C or S

SEQ ID NO: 81777 - protein, 27 aa, Artificial Sequence
  Cyclic GFR-binding peptide
VSQDLRPVQIRKIIGKTPKIKKATVMI

SEQ ID NO: 81778 - protein, 30 aa, Artificial Sequence
  Cyclic GFR-binding peptide
  MOD_RES (27), (29): Xaa is C or S
RPVQMRKIDENEKVVKKATVDMVVEGXGXR

SEQ ID NO: 81779 - protein, 33 aa, Artificial Sequence
  Cyclic GFR-binding peptide
  MOD_RES (4), (5): Xaa is C or S
ASPXXVSQDLRPVQIRKIIGKTPKIKKATVMIV

SEQ ID NO: 81780 - protein, 31 aa, Artificial Sequence
  Cyclic GFR-binding peptide
  MOD_RES (1), (2): Xaa is C or S
XXVPTELSNITMQIMDEYDKVVIGEMSEMVV

SEQ ID NO: 81781 - protein, 36 aa, Artificial Sequence; identical to SEQ ID NO: 30165
  Cyclic GFR-binding peptide
  MOD_RES (4), (5): Xaa is C or S

SEQ ID NO: 81782 - protein, 26 aa, Artificial Sequence
  Cyclic GFR-binding peptide
  MOD_RES (1), (1): Xaa is C or S
XAPTQLSNITVQIMDDSSNVIIGEMS

SEQ ID NO: 81783 - protein, 36 aa, Artificial Sequence; identical to SEQ ID NO: 30169
  Cyclic GFR-binding peptide
  MOD_RES (2), (3), (34), (36): Xaa is C or S

SEQ ID NO: 81784 - protein, 30 aa, Artificial Sequence
  Cyclic GFR-binding peptide
  MOD_RES (27), (29): Xaa is C or S
RSVKMAKVDEYDKVVKEVQVEMVVEGXGXR

SEQ ID NO: 81785 - protein, 31 aa, Artificial Sequence
  Cyclic GFR-binding peptide
  MOD_RES (31), (31): Xaa is C or S
PTELRPVQMRKIDENEKVVKKATVDMVVEGX

SEQ ID NO: 81786 - protein, 32 aa, Artificial Sequence
  Cyclic GFR-binding peptide
  MOD_RES (4), (4): Xaa is C or S
GLEXVPTEEEPLTMLYYRIKPHQGQHEQLSNF

SEQ ID NO: 81787 - protein, 27 aa, Artificial Sequence
  Cyclic GFR-binding peptide
  MOD_RES (1), (2): Xaa is C or S
XXVPTELSNITMQIMDENEKVVIGEMS

SEQ ID NO: 81788 - protein, 26 aa, Artificial Sequence
  Cyclic GFR-binding peptide
VQLEPLTVLYYEIVRKKPIFEQLSNT

SEQ ID NO: 81789 - protein, 32 aa, Artificial Sequence
  Cyclic GFR-binding peptide
  MOD_RES (2), (3): Xaa is C or S
PXXAPTKLSNITVQIMDDSSNVIIGEMSNMVV

SEQ ID NO: 81790 - protein, 36 aa, Artificial Sequence
  Cyclic GFR-binding peptide
  MOD_RES (5), (5): Xaa is C or S
RNVQXRPTQVQLEPLTVLYYEIVRKKPIFEQLSNTL

SEQ ID NO: 81791 - protein, 34 aa, Artificial Sequence
  Cyclic GFR-binding peptide
  MOD_RES (1), (1): Xaa is C or S
XQPSRVHHEPLTVLYYEYVRKKPKLEQLSNRLEE

SEQ ID NO: 81792 - protein, 28 aa, Artificial Sequence
  Cyclic GFR-binding peptide
TQLRPVQVRKIDDSSNVIKKATVNMVVR

SEQ ID NO: 81793 - protein, 36 aa, Artificial Sequence; identical to SEQ ID NO: 30181
  Cyclic GFR-binding peptide
  MOD_RES (1), (33), (35): Xaa is C or S

SEQ ID NO: 81794 - protein, 23 aa, Artificial Sequence
  Cyclic GFR-binding peptide
SNITIQIMVGRTPKVIGEMSMVV

SEQ ID NO: 81795 - protein, 32 aa, Artificial Sequence
  Cyclic GFR-binding peptide
  MOD_RES (3), (4): Xaa is C or S
KPXXAPTKLRSVKVAKVDDSSNVIKEVQVNMV

SEQ ID NO: 81796 - protein, 26 aa, Artificial Sequence
  Cyclic GFR-binding peptide
APTQLRSVKVAKVDDSSNVIKEVQVN

SEQ ID NO: 81797 - protein, 31 aa, Artificial Sequence
  Cyclic GFR-binding peptide
  MOD_RES (28), (30): Xaa is C or S
ALSNITIQIMVGRKPKVIGEMSMIVRSXKXS

SEQ ID NO: 81798 - protein, 36 aa, Artificial Sequence
  Cyclic GFR-binding peptide
  MOD_RES (6), (7): Xaa is C or S
KIPKAXXVPTELSNITMQIMDENEKVVIGEMSDMVV

SEQ ID NO: 81799 - protein, 33 aa, Artificial Sequence; identical to SEQ ID NO: 30188
  Cyclic GFR-binding peptide

SEQ ID NO: 81800 - protein, 30 aa, Artificial Sequence
  Cyclic GFR-binding peptide
  MOD_RES (29), (29): Xaa is C or S
EPLTMLYYRIKPHQGQHEQLSNFLQHNKXE

SEQ ID NO: 81801 - protein, 36 aa, Artificial Sequence; identical to SEQ ID NO: 30190
  Cyclic GFR-binding peptide
  MOD_RES (2), (36): Xaa is C or S

SEQ ID NO: 81802 - protein, 32 aa, Artificial Sequence; identical to SEQ ID NO: 30191
  Cyclic GFR-binding peptide
  MOD_RES (1), (32): Xaa is C or S

SEQ ID NO: 81803 - protein, 33 aa, Artificial Sequence; identical to SEQ ID NO: 30193
  Cyclic GFR-binding peptide
  MOD_RES (2), (3): Xaa is C or S

SEQ ID NO: 81804 - protein, 33 aa, Artificial Sequence; identical to SEQ ID NO: 30192
  Cyclic GFR-binding peptide

SEQ ID NO: 81805 - protein, 34 aa, Artificial Sequence; identical to SEQ ID NO: 30197
  Cyclic GFR-binding peptide
  MOD_RES (1), (33): Xaa is C or S

SEQ ID NO: 81806 - protein, 29 aa, Artificial Sequence
  Cyclic GFR-binding peptide
  MOD_RES (26), (28): Xaa is C or S
SNITIQIMVGRTPKVIGEMSMVVKSXKXS

SEQ ID NO: 81807 - protein, 29 aa, Artificial Sequence
  Cyclic GFR-binding peptide
APTKLRSVKVAKVDDSSNVIKEVQVNMVV

SEQ ID NO: 81808 - protein, 26 aa, Artificial Sequence
  Cyclic GFR-binding peptide
DLSNITIQIMVGRTPKVIGEMSMVVK

SEQ ID NO: 81809 - protein, 41 aa, Artificial Sequence; identical to SEQ ID NO: 30200
  Cyclic GFR-binding peptide
  MOD_RES (5), (6), (38), (40): Xaa is C or S

SEQ ID NO: 81810 - protein, 31 aa, Artificial Sequence
  Cyclic GFR-binding peptide
  MOD_RES (28), (30): Xaa is C or S
LRSVKMAKVDENEKVVKEVQVDMVVEGXGXR

SEQ ID NO: 81811 - protein, 23 aa, Artificial Sequence
  Cyclic GFR-binding peptide
LEPLPVVYYEIVRKKPIFEQLSN

SEQ ID NO: 81812 - protein, 41 aa, Artificial Sequence; identical to SEQ ID NO: 30206
  Cyclic GFR-binding peptide
  MOD_RES (5), (6), (38), (40): Xaa is C or S

SEQ ID NO: 81813 - protein, 36 aa, Artificial Sequence; identical to SEQ ID NO: 30207
  Cyclic GFR-binding peptide
  MOD_RES (3), (4), (35): Xaa is C or S

SEQ ID NO: 81814 - protein, 35 aa, Artificial Sequence; identical to SEQ ID NO: 30208
  Cyclic GFR-binding peptide
  MOD_RES (4), (5): Xaa is C or S

SEQ ID NO: 81815 - protein, 27 aa, Artificial Sequence
  Cyclic GFR-binding peptide
PQALRPVQIRKIVGRKPKVKKATVMIV

SEQ ID NO: 81816 - protein, 36 aa, Artificial Sequence; identical to SEQ ID NO: 30213
  Cyclic GFR-binding peptide
  MOD_RES (4), (5): Xaa is C or S

SEQ ID NO: 81817 - protein, 38 aa, Artificial Sequence; identical to SEQ ID NO: 30219
  Cyclic GFR-binding peptide
  MOD_RES (3), (4), (36), (38): Xaa is C or S

SEQ ID NO: 81818 - protein, 31 aa, Artificial Sequence
  Cyclic GFR-binding peptide
EPLTVLYYEYVRKKPKLEQLSNAAAAAAAAA

SEQ ID NO: 81819 - protein, 27 aa, Artificial Sequence
  Cyclic GFR-binding peptide
SRVHHEPLPVVYYEYVRKKPKLEQLSN

SEQ ID NO: 81820 - protein, 34 aa, Artificial Sequence; identical to SEQ ID NO: 30222
  Cyclic GFR-binding peptide
  MOD_RES (3), (4): Xaa is C or S

SEQ ID NO: 81821 - protein, 36 aa, Artificial Sequence; identical to SEQ ID NO: 30223
  Cyclic GFR-binding peptide
  MOD_RES (2), (3), (34), (36): Xaa is C or S

SEQ ID NO: 81822 - protein, 44 aa, Artificial Sequence; identical to SEQ ID NO: 30225
  Cyclic GFR-binding peptide
  MOD_RES (7), (41), (43): Xaa is C or S

SEQ ID NO: 81823 - protein, 36 aa, Artificial Sequence; identical to SEQ ID NO: 30229
  Cyclic GFR-binding peptide
  MOD_RES (2), (3), (34), (36): Xaa is C or S

SEQ ID NO: 81824 - protein, 38 aa, Artificial Sequence; identical to SEQ ID NO: 30232
  Cyclic GFR-binding peptide
  MOD_RES (6), (7): Xaa is C or S

SEQ ID NO: 81825 - protein, 30 aa, Artificial Sequence
  Cyclic GFR-binding peptide
  MOD_RES (1), (1): Xaa is C or S
XVPTELRPVQMRKIDEYDKVVKKATVEMVV

SEQ ID NO: 81826 - protein, 28 aa, Artificial Sequence
  Cyclic GFR-binding peptide
EPLPMVYYRIKPHQGQHEQLSNFLQHNK

SEQ ID NO: 81827 - protein, 24 aa, Artificial Sequence
  Cyclic GFR-binding peptide
ELRSVKMAKVDEYDKVVKEVQVEM

SEQ ID NO: 81828 - protein, 33 aa, Artificial Sequence
  Cyclic GFR-binding peptide
  MOD_RES (4), (4): Xaa is C or S
NVQXRPTQVQLEPLPVVYYEIVRKKPIFEQLSN

SEQ ID NO: 81829 - protein, 32 aa, Artificial Sequence; identical to SEQ ID NO: 30238
  Cyclic GFR-binding peptide
  MOD_RES (1), (2): Xaa is C or S

SEQ ID NO: 81830 - protein, 36 aa, Artificial Sequence; identical to SEQ ID NO: 30240
  Cyclic GFR-binding peptide
  MOD_RES (4), (5): Xaa is C or S

SEQ ID NO: 81831 - protein, 30 aa, Artificial Sequence
  Cyclic GFR-binding peptide
  MOD_RES (27), (29): Xaa is C or S
RPVQVRKIDDSSNVIKKATVNMVVRSXGXH

SEQ ID NO: 81832 - protein, 34 aa, Artificial Sequence; identical to SEQ ID NO: 30243
  Cyclic GFR-binding peptide

SEQ ID NO: 81833 - protein, 34 aa, Artificial Sequence; identical to SEQ ID NO: 30246
  Cyclic GFR-binding peptide
  MOD_RES (1), (2), (34): Xaa is C or S

SEQ ID NO: 81834 - protein, 33 aa, Artificial Sequence; identical to SEQ ID NO: 30245
  Cyclic GFR-binding peptide
  MOD_RES (2), (3): Xaa is C or S

SEQ ID NO: 81835 - protein, 29 aa, Artificial Sequence
  Cyclic GFR-binding peptide
VPQDLRPVQIRKIVGRTPKVKKATVMVVK

SEQ ID NO: 81836 - protein, 33 aa, Artificial Sequence
  Cyclic GFR-binding peptide
  MOD_RES (6), (7): Xaa is C or S
YVPKPXXAPTKLSNITVQIMDDSSNVIIGEMSN

SEQ ID NO: 81837 - protein, 34 aa, Artificial Sequence
  Cyclic GFR-binding peptide
  MOD_RES (5), (6): Xaa is C or S
SAAPXXVPQALRPVQIRKIVGRKPKVKKATVMIV

SEQ ID NO: 81838 - protein, 39 aa, Artificial Sequence; identical to SEQ ID NO: 30251
  Cyclic GFR-binding peptide
  MOD_RES (4), (5), (37), (39): Xaa is C or S

SEQ ID NO: 81839 - protein, 30 aa, Artificial Sequence
  Cyclic GFR-binding peptide
PSRVHHEPLPVVYYEYVRKKPKLEQLSNRL

SEQ ID NO: 81840 - protein, 42 aa, Artificial Sequence; identical to SEQ ID NO: 30252
  Cyclic GFR-binding peptide
  MOD_RES (6), (40), (42): Xaa is C or S

SEQ ID NO: 81841 - protein, 32 aa, Artificial Sequence
  Cyclic GFR-binding peptide
  MOD_RES (32), (32): Xaa is C or S
TEEEPLTMLYYRIKPHQGQHEQLSNFLQHNKX

SEQ ID NO: 81842 - protein, 28 aa, Artificial Sequence
  Cyclic GFR-binding peptide
PTKLRSVKVAKVDDSSNVIKEVQVNMVV

SEQ ID NO: 81843 - protein, 31 aa, Artificial Sequence
  Cyclic GFR-binding peptide
  MOD_RES (28), (30): Xaa is C or S
DLRPVQIRKIIGKTPKIKKATVMIVKSXKXS

SEQ ID NO: 81844 - protein, 35 aa, Artificial Sequence; identical to SEQ ID NO: 30261
  Cyclic GFR-binding peptide
  MOD_RES (1), (33), (35): Xaa is C or S

SEQ ID NO: 81845 - protein, 40 aa, Artificial Sequence; identical to SEQ ID NO: 30262
  Cyclic GFR-binding peptide
  MOD_RES (2), (39): Xaa is C or S

SEQ ID NO: 81846 - protein, 27 aa, Artificial Sequence
  Cyclic GFR-binding peptide
  MOD_RES (1), (2): Xaa is C or S
XXVSQDLSNITIQIMIGKTPKIIGEMS

SEQ ID NO: 81847 - protein, 31 aa, Artificial Sequence
  Cyclic GFR-binding peptide
HHEPLPVVYYEYVRKKPKLEQLSNRLEEHLE

SEQ ID NO: 81848 - protein, 24 aa, Artificial Sequence
  Cyclic GFR-binding peptide
PQDLSNITIQIMVGRTPKVIGEMS

SEQ ID NO: 81849 - protein, 36 aa, Artificial Sequence; identical to SEQ ID NO: 30271
  Cyclic GFR-binding peptide
  MOD_RES (2), (3), (35): Xaa is C or S

SEQ ID NO: 81850 - protein, 30 aa, Artificial Sequence
  Cyclic GFR-binding peptide
  MOD_RES (1), (1): Xaa is C or S
XVPTELSNITMQIMDENEKVVIGEMSDMVV

SEQ ID NO: 81851 - protein, 27 aa, Artificial Sequence
  Cyclic GFR-binding peptide
TQVQLEPLTVLYYEIVRKKPIFEQLSN

SEQ ID NO: 81852 - protein, 23 aa, Artificial Sequence
  Cyclic GFR-binding peptide
DLRPVQIRKIVGRTPKVKKATVM

SEQ ID NO: 81853 - protein, 28 aa, Artificial Sequence
  Cyclic GFR-binding peptide
TQLSNITVQIMDDSSNVIIGEMSNMVVR

SEQ ID NO: 81854 - protein, 35 aa, Artificial Sequence; identical to SEQ ID NO: 30278
  Cyclic GFR-binding peptide
  MOD_RES (1), (32), (34): Xaa is C or S

SEQ ID NO: 81855 - protein, 33 aa, Artificial Sequence
  Cyclic GFR-binding peptide
  MOD_RES (4), (5): Xaa is C or S
PKPXXAPTKLRSVKVAKVDDSSNVIKEVQVNMV

SEQ ID NO: 81856 - protein, 42 aa, Artificial Sequence; identical to SEQ ID NO: 30285
  Cyclic GFR-binding peptide
  MOD_RES (6), (7), (39), (41): Xaa is C or S

SEQ ID NO: 81857 - protein, 29 aa, Artificial Sequence
  Cyclic GFR-binding peptide
  MOD_RES (1), (1): Xaa is C or S
XVPTELRPVQMRKIDEYDKVVKKATVEMV

SEQ ID NO: 81858 - protein, 37 aa, Artificial Sequence; identical to SEQ ID NO: 30287
  Cyclic GFR-binding peptide
  MOD_RES (2), (3), (34), (36): Xaa is C or S

SEQ ID NO: 81859 - protein, 36 aa, Artificial Sequence; identical to SEQ ID NO: 30288
  Cyclic GFR-binding peptide
  MOD_RES (5), (6): Xaa is C or S

SEQ ID NO: 81860 - protein, 35 aa, Artificial Sequence
  Cyclic GFR-binding peptide
  MOD_RES (5), (6): Xaa is C or S
SASPXXVPQDLSNITIQIMVGRTPKVIGEMSMVVK

SEQ ID NO: 81861 - protein, 31 aa, Artificial Sequence; identical to SEQ ID NO: 30290
  Cyclic GFR-binding peptide
  MOD_RES (31), (31): Xaa is C or S

SEQ ID NO: 81862 - protein, 33 aa, Artificial Sequence
  Cyclic GFR-binding peptide
  MOD_RES (4), (5): Xaa is C or S
PKAXXVPTELRSVKMAKVDENEKVVKEVQVDMV

SEQ ID NO: 81863 - protein, 29 aa, Artificial Sequence
  Cyclic GFR-binding peptide
  MOD_RES (2), (3): Xaa is C or S
AXXVPTELRSVKMAKVDEYDKVVKEVQVE

SEQ ID NO: 81864 - protein, 29 aa, Artificial Sequence
  Cyclic GFR-binding peptide
SNITIQIMVGRKPKVIGEMSAAAAAAAAA

SEQ ID NO: 81865 - protein, 39 aa, Artificial Sequence; identical to SEQ ID NO: 30295
  Cyclic GFR-binding peptide
  MOD_RES (5), (5): Xaa is C or S

SEQ ID NO: 81866 - protein, 30 aa, Artificial Sequence
  Cyclic GFR-binding peptide
  MOD_RES (1), (2): Xaa is C or S
XXAPTQLRPVQVRKIDDSSNVIKKATVNMV

SEQ ID NO: 81867 - protein, 26 aa, Artificial Sequence
  Cyclic GFR-binding peptide
  MOD_RES (26), (26): Xaa is C or S
RSVKIAKVVGRTPKVKEVQVMVVKSX

SEQ ID NO: 81868 - protein, 33 aa, Artificial Sequence; identical to SEQ ID NO: 30297
  Cyclic GFR-binding peptide
  MOD_RES (31), (33): Xaa is C or S

SEQ ID NO: 81869 - protein, 37 aa, Artificial Sequence; identical to SEQ ID NO: 30298
  Cyclic GFR-binding peptide
  MOD_RES (1), (2), (34), (36): Xaa is C or S

SEQ ID NO: 81870 - protein, 37 aa, Artificial Sequence; identical to SEQ ID NO: 30300
  Cyclic GFR-binding peptide
  MOD_RES (2), (3), (35), (37): Xaa is C or S

SEQ ID NO: 81871 - protein, 27 aa, Artificial Sequence
  Cyclic GFR-binding peptide
ALSNITIQIMVGRKPKVIGEMSMIVRS

SEQ ID NO: 81872 - protein, 34 aa, Artificial Sequence
  Cyclic GFR-binding peptide
  MOD_RES (6), (7): Xaa is C or S
ASASPXXVSQDLRSVKIAKVIGKTPKIKEVQVMI

SEQ ID NO: 81873 - protein, 33 aa, Artificial Sequence; identical to SEQ ID NO: 30303
  Cyclic GFR-binding peptide
  MOD_RES (1), (2): Xaa is C or S

SEQ ID NO: 81874 - protein, 33 aa, Artificial Sequence
  Cyclic GFR-binding peptide
  MOD_RES (5), (6): Xaa is C or S
VPKPXXAPTKLRPVQVRKIDDSSNVIKKATVNM

SEQ ID NO: 81875 - protein, 27 aa, Artificial Sequence
  Cyclic GFR-binding peptide
TQLRPVQVRKIDDSSNVIKKATVNMVV

SEQ ID NO: 81876 - protein, 25 aa, Artificial Sequence
  Cyclic GFR-binding peptide
APTQLRSVKVAKVDDSSNVIKEVQV

SEQ ID NO: 81877 - protein, 29 aa, Artificial Sequence
  Cyclic GFR-binding peptide
  MOD_RES (28), (28): Xaa is C or S
LRPVQMRKIDEYDKVVKKATVEMVVEGXG

SEQ ID NO: 81878 - protein, 22 aa, Artificial Sequence
  Cyclic GFR-binding peptide
LRPVQIRKIVGRTPKVKKATVM

SEQ ID NO: 81879 - protein, 32 aa, Artificial Sequence
  Cyclic GFR-binding peptide
  MOD_RES (5), (6): Xaa is C or S
VPKPXXAPTQLRSVKVAKVDDSSNVIKEVQVN

SEQ ID NO: 81880 - protein, 31 aa, Artificial Sequence; identical to SEQ ID NO: 30309
  Cyclic GFR-binding peptide

SEQ ID NO: 81881 - protein, 39 aa, Artificial Sequence; identical to SEQ ID NO: 30310
  Cyclic GFR-binding peptide
  MOD_RES (3), (4), (36), (38): Xaa is C or S

SEQ ID NO: 81882 - protein, 28 aa, Artificial Sequence
  Cyclic GFR-binding peptide
PQDLSNITIQIMVGRTPKVIGEMSMVVK

SEQ ID NO: 81883 - protein, 41 aa, Artificial Sequence; identical to SEQ ID NO: 30316
  Cyclic GFR-binding peptide
  MOD_RES (5), (39), (41): Xaa is C or S

SEQ ID NO: 81884 - protein, 23 aa, Artificial Sequence
  Cyclic GFR-binding peptide
ELRSVKMAKVDEYDKVVKEVQVE

SEQ ID NO: 81885 - protein, 41 aa, Artificial Sequence; identical to SEQ ID NO: 30320
  Cyclic GFR-binding peptide
  MOD_RES (7), (41): Xaa is C or S

SEQ ID NO: 81886 - protein, 35 aa, Artificial Sequence; identical to SEQ ID NO: 30321
  Cyclic GFR-binding peptide
  MOD_RES (1), (33), (35): Xaa is C or S

SEQ ID NO: 81887 - protein, 30 aa, Artificial Sequence
  Cyclic GFR-binding peptide
  MOD_RES (1), (1): Xaa is C or S
XRPTQVQLEPLTVLYYEIVRKKPIFEQLSN

SEQ ID NO: 81888 - protein, 31 aa, Artificial Sequence; identical to SEQ ID NO: 30326
  Cyclic GFR-binding peptide

SEQ ID NO: 81889 - protein, 26 aa, Artificial Sequence
  Cyclic GFR-binding peptide
TQLRSVKVAKVDDSSNVIKEVQVNMV

SEQ ID NO: 81890 - protein, 33 aa, Artificial Sequence; identical to SEQ ID NO: 30328
  Cyclic GFR-binding peptide

SEQ ID NO: 81891 - protein, 33 aa, Artificial Sequence
  Cyclic GFR-binding peptide
  MOD_RES (33), (33): Xaa is C or S
VHHEPLTVLYYEYVRKKPKLEQLSNRLEEHLEX

SEQ ID NO: 81892 - protein, 37 aa, Artificial Sequence; identical to SEQ ID NO: 30331
  Cyclic GFR-binding peptide
  MOD_RES (6), (7): Xaa is C or S

SEQ ID NO: 81893 - protein, 35 aa, Artificial Sequence; identical to SEQ ID NO: 30333
  Cyclic GFR-binding peptide

SEQ ID NO: 81894 - protein, 26 aa, Artificial Sequence
  Cyclic GFR-binding peptide
  MOD_RES (1), (1): Xaa is C or S
XVPTELRSVKMAKVDENEKVVKEVQV

SEQ ID NO: 81895 - protein, 30 aa, Artificial Sequence
  Cyclic GFR-binding peptide
  MOD_RES (1), (2): Xaa is C or S
XXAPTKLRSVKVAKVDDSSNVIKEVQVNMV

SEQ ID NO: 81896 - protein, 34 aa, Artificial Sequence
  Cyclic GFR-binding peptide
  MOD_RES (5), (5): Xaa is C or S
TKPTXAPTKLRPVQVRKIDDSSNVIKKATVNMVV

SEQ ID NO: 81897 - protein, 34 aa, Artificial Sequence
  Cyclic GFR-binding peptide
  MOD_RES (6), (7): Xaa is C or S
ASASPXXVPQDLRSVKIAKVVGRTPKVKEVQVMV

SEQ ID NO: 81898 - protein, 22 aa, Artificial Sequence
  Cyclic GFR-binding peptide
LRSVKIAKVIGKTPKIKEVQVM

SEQ ID NO: 81899 - protein, 32 aa, Artificial Sequence; identical to SEQ ID NO: 30339
  Cyclic GFR-binding peptide
  MOD_RES (31), (31): Xaa is C or S

SEQ ID NO: 81900 - protein, 27 aa, Artificial Sequence
  Cyclic GFR-binding peptide
DLRSVKIAKVVGRTPKVKEVQVMVVKS

SEQ ID NO: 81901 - protein, 36 aa, Artificial Sequence
  Cyclic GFR-binding peptide
  MOD_RES (33), (35): Xaa is C or S
VQLEPLTVLYYEIVRKKPIFEQLSNTLEDHLAXKXE

SEQ ID NO: 81902 - protein, 28 aa, Artificial Sequence
  Cyclic GFR-binding peptide
QDLSNITIQIMVGRTPKVIGEMSMVVKS

SEQ ID NO: 81903 - protein, 35 aa, Artificial Sequence
  Cyclic GFR-binding peptide
  MOD_RES (6), (7): Xaa is C or S
ASAAPXXVPQALRPVQIRKIVGRKPKVKKATVMIV

SEQ ID NO: 81904 - protein, 28 aa, Artificial Sequence
  Cyclic GFR-binding peptide
  MOD_RES (2), (3): Xaa is C or S
PXXVPQALRPVQIRKIVGRKPKVKKATV

SEQ ID NO: 81905 - protein, 37 aa, Artificial Sequence; identical to SEQ ID NO: 30344
  Cyclic GFR-binding peptide
  MOD_RES (6), (7): Xaa is C or S

SEQ ID NO: 81906 - protein, 30 aa, Artificial Sequence
  Cyclic GFR-binding peptide
  MOD_RES (1), (1): Xaa is C or S
XVPQDLRPVQIRKIVGRTPKVKKATVMVVK

SEQ ID NO: 81907 - protein, 34 aa, Artificial Sequence; identical to SEQ ID NO: 30347
  Cyclic GFR-binding peptide
  MOD_RES (2), (3), (34): Xaa is C or S

SEQ ID NO: 81908 - protein, 28 aa, Artificial Sequence
  Cyclic GFR-binding peptide
HHEPLPVVYYEYVRKKPKLEQLSNRLEE

SEQ ID NO: 81909 - protein, 39 aa, Artificial Sequence; identical to SEQ ID NO: 30351
  Cyclic GFR-binding peptide
  MOD_RES (7), (39): Xaa is C or S

SEQ ID NO: 81910 - protein, 25 aa, Artificial Sequence
  Cyclic GFR-binding peptide
TQLSNITVQIMDDSSNVIIGEMSNM

SEQ ID NO: 81911 - protein, 31 aa, Artificial Sequence; identical to SEQ ID NO: 30353
  Cyclic GFR-binding peptide

SEQ ID NO: 81912 - protein, 29 aa, Artificial Sequence
  Cyclic GFR-binding peptide
SNITMQIMDENEKVVIGEMSAAAAAAAAA

SEQ ID NO: 81913 - protein, 25 aa, Artificial Sequence
  Cyclic GFR-binding peptide
PTQLSNITVQIMDDSSNVIIGEMSN

SEQ ID NO: 81914 - protein, 39 aa, Artificial Sequence; identical to SEQ ID NO: 30357
  Cyclic GFR-binding peptide
  MOD_RES (1), (38): Xaa is C or S

SEQ ID NO: 81915 - protein, 34 aa, Artificial Sequence
  Cyclic GFR-binding peptide
  MOD_RES (6), (7): Xaa is C or S
ASAAPXXVPQALRPVQIRKIVGRKPKVKKATVMI

SEQ ID NO: 81916 - protein, 20 aa, Artificial Sequence
  Cyclic GFR-binding peptide
SNITIQIMIGKTPKIIGEMS

SEQ ID NO: 81917 - protein, 38 aa, Artificial Sequence
  Cyclic GFR-binding peptide
  MOD_RES (5), (5): Xaa is C or S
SSVKXQPSRVHHEPLPVVYYEYVRKKPKLEQLSNRLEE

SEQ ID NO: 81918 - protein, 26 aa, Artificial Sequence
  Cyclic GFR-binding peptide
ELSNITMQIMDENEKVVIGEMSDMVV

SEQ ID NO: 81919 - protein, 32 aa, Artificial Sequence
  Cyclic GFR-binding peptide
  MOD_RES (4), (5): Xaa is C or S
PKAXXVPTELRPVQMRKIDEYDKVVKKATVEM

SEQ ID NO: 81920 - protein, 29 aa, Artificial Sequence
  Cyclic GFR-binding peptide
  MOD_RES (1), (1): Xaa is C or S
XVPQDLSNITIQIMVGRTPKVIGEMSMVV

SEQ ID NO: 81921 - protein, 35 aa, Artificial Sequence
  Cyclic GFR-binding peptide
  MOD_RES (6), (6): Xaa is C or S
VTKPTXAPTKLRPVQVRKIDDSSNVIKKATVNMVV

SEQ ID NO: 81922 - protein, 25 aa, Artificial Sequence
  Cyclic GFR-binding peptide
ELRSVKMAKVDENEKVVKEVQVDMV

SEQ ID NO: 81923 - protein, 39 aa, Artificial Sequence; identical to SEQ ID NO: 30368
  Cyclic GFR-binding peptide
  MOD_RES (5), (6), (38): Xaa is C or S

SEQ ID NO: 81924 - protein, 38 aa, Artificial Sequence; identical to SEQ ID NO: 30370
  Cyclic GFR-binding peptide
  MOD_RES (4), (5), (37): Xaa is C or S

SEQ ID NO: 81925 - protein, 36 aa, Artificial Sequence
  Cyclic GFR-binding peptide
  MOD_RES (6), (7): Xaa is C or S
ASASPXXVSQDLRSVKIAKVIGKTPKIKEVQVMIVK

SEQ ID NO: 81926 - protein, 35 aa, Artificial Sequence; identical to SEQ ID NO: 30373
  Cyclic GFR-binding peptide
  MOD_RES (3), (3): Xaa is C or S

SEQ ID NO: 81927 - protein, 29 aa, Artificial Sequence
  Cyclic GFR-binding peptide
QVQLEPLPVVYYEIVRKKPIFEQLSNTLE

SEQ ID NO: 81928 - protein, 35 aa, Artificial Sequence; identical to SEQ ID NO: 30376
  Cyclic GFR-binding peptide
  MOD_RES (32), (34): Xaa is C or S

SEQ ID NO: 81929 - protein, 28 aa, Artificial Sequence
  Cyclic GFR-binding peptide
  MOD_RES (1), (2): Xaa is C or S
XXVPQALRSVKIAKVVGRKPKVKEVQVM

SEQ ID NO: 81930 - protein, 23 aa, Artificial Sequence
  Cyclic GFR-binding peptide
TQLSNITVQIMDDSSNVIIGEMS

SEQ ID NO: 81931 - protein, 28 aa, Artificial Sequence
  Cyclic GFR-binding peptide
TELSNITMQIMDEYDKVVIGEMSEMVVE

SEQ ID NO: 81932 - protein, 21 aa, Artificial Sequence
  Cyclic GFR-binding peptide
LRSVKIAKVVGRTPKVKEVQV

SEQ ID NO: 81933 - protein, 35 aa, Artificial Sequence; identical to SEQ ID NO: 30384
  Cyclic GFR-binding peptide
  MOD_RES (1), (33), (35): Xaa is C or S

SEQ ID NO: 81934 - protein, 28 aa, Artificial Sequence
  Cyclic GFR-binding peptide
  MOD_RES (1), (1): Xaa is C or S
XVPTEEEPLPMVYYRIKPHQGQHEQLSN

SEQ ID NO: 81935 - protein, 24 aa, Artificial Sequence
  Cyclic GFR-binding peptide
EEPLTMLYYRIKPHQGQHEQLSNF

SEQ ID NO: 81936 - protein, 31 aa, Artificial Sequence
  Cyclic GFR-binding peptide
PTQVQLEPLTVLYYEIVRKKPIFEQLSNTLE

SEQ ID NO: 81937 - protein, 33 aa, Artificial Sequence
  Cyclic GFR-binding peptide
  MOD_RES (3), (4): Xaa is C or S
SPXXVSQDLRPVQIRKIIGKTPKIKKATVMIVK

SEQ ID NO: 81938 - protein, 30 aa, Artificial Sequence
  Cyclic GFR-binding peptide
  MOD_RES (3), (4): Xaa is C or S
KPXXAPTQLRPVQVRKIDDSSNVIKKATVN

SEQ ID NO: 81939 - protein, 37 aa, Artificial Sequence; identical to SEQ ID NO: 30387
  Cyclic GFR-binding peptide
  MOD_RES (4), (5), (36): Xaa is C or S

SEQ ID NO: 81940 - protein, 38 aa, Artificial Sequence; identical to SEQ ID NO: 30390
  Cyclic GFR-binding peptide
  MOD_RES (7), (7): Xaa is C or S

SEQ ID NO: 81941 - protein, 33 aa, Artificial Sequence
  Cyclic GFR-binding peptide
  MOD_RES (3), (4): Xaa is C or S
APXXVPQALRSVKIAKVVGRKPKVKEVQVMIVR

SEQ ID NO: 81942 - protein, 42 aa, Artificial Sequence; identical to SEQ ID NO: 30391
  Cyclic GFR-binding peptide
  MOD_RES (2), (39), (41): Xaa is C or S

SEQ ID NO: 81943 - protein, 33 aa, Artificial Sequence
  Cyclic GFR-binding peptide
  MOD_RES (3), (4): Xaa is C or S
KAXXVPTELSNITMQIMDENEKVVIGEMSDMVV

SEQ ID NO: 81944 - protein, 32 aa, Artificial Sequence
  Cyclic GFR-binding peptide
  MOD_RES (6), (7): Xaa is C or S
KIPKAXXVPTELSNITMQIMDENEKVVIGEMS

SEQ ID NO: 81945 - protein, 42 aa, Artificial Sequence; identical to SEQ ID NO: 30395
  Cyclic GFR-binding peptide
  MOD_RES (6), (40), (42): Xaa is C or S

SEQ ID NO: 81946 - protein, 23 aa, Artificial Sequence
  Cyclic GFR-binding peptide
HEPLPVVYYEYVRKKPKLEQLSN

SEQ ID NO: 81947 - protein, 30 aa, Artificial Sequence
  Cyclic GFR-binding peptide
QPSRVHHEPLTVLYYEYVRKKPKLEQLSNR

SEQ ID NO: 81948 - protein, 32 aa, Artificial Sequence; identical to SEQ ID NO: 30398
  Cyclic GFR-binding peptide
  MOD_RES (1), (2): Xaa is C or S

SEQ ID NO: 81949 - protein, 36 aa, Artificial Sequence
  Cyclic GFR-binding peptide
  MOD_RES (7), (7): Xaa is C or S
HVTKPTXAPTKLRSVKVAKVDDSSNVIKEVQVNMVV

SEQ ID NO: 81950 - protein, 35 aa, Artificial Sequence
  Cyclic GFR-binding peptide
  MOD_RES (34), (34): Xaa is C or S
RVHHEPLPVVYYEYVRKKPKLEQLSNRLEEHLEXA

SEQ ID NO: 81951 - protein, 35 aa, Artificial Sequence; identical to SEQ ID NO: 30400
  Cyclic GFR-binding peptide
  MOD_RES (32), (34): Xaa is C or S

SEQ ID NO: 81952 - protein, 36 aa, Artificial Sequence
  Cyclic GFR-binding peptide
  MOD_RES (34), (36): Xaa is C or S
RVHHEPLTVLYYEYVRKKPKLEQLSNRLEEHLEXAX

SEQ ID NO: 81953 - protein, 22 aa, Artificial Sequence
  Cyclic GFR-binding peptide
KLRSVKVAKVDDSSNVIKEVQV

SEQ ID NO: 81954 - protein, 32 aa, Artificial Sequence
  Cyclic GFR-binding peptide
PTEEEPLPMVYYRIKPHQGQHEQLSNFLQHNK

SEQ ID NO: 81955 - protein, 27 aa, Artificial Sequence
  Cyclic GFR-binding peptide
PQDLRSVKIAKVVGRTPKVKEVQVMVV

SEQ ID NO: 81956 - protein, 23 aa, Artificial Sequence
  Cyclic GFR-binding peptide
LRPVQIRKIIGKTPKIKKATVMI

SEQ ID NO: 81957 - protein, 35 aa, Artificial Sequence; identical to SEQ ID NO: 30402
  Cyclic GFR-binding peptide
  MOD_RES (4), (5): Xaa is C or S

SEQ ID NO: 81958 - protein, 30 aa, Artificial Sequence
  Cyclic GFR-binding peptide
  MOD_RES (4), (5): Xaa is C or S
PKAXXVPTELRPVQMRKIDEYDKVVKKATV

SEQ ID NO: 81959 - protein, 32 aa, Artificial Sequence
  Cyclic GFR-binding peptide
  MOD_RES (2), (2): Xaa is C or S
EXVPTEEEPLTMLYYRIKPHQGQHEQLSNFLQ

SEQ ID NO: 81960 - protein, 26 aa, Artificial Sequence
  Cyclic GFR-binding peptide
  MOD_RES (26), (26): Xaa is C or S
SNITIQIMVGRTPKVIGEMSMVVKSX

SEQ ID NO: 81961 - protein, 41 aa, Artificial Sequence; identical to SEQ ID NO: 30408
  Cyclic GFR-binding peptide
  MOD_RES (6), (7), (38), (40): Xaa is C or S

SEQ ID NO: 81962 - protein, 29 aa, Artificial Sequence
  Cyclic GFR-binding peptide
  MOD_RES (27), (29): Xaa is C or S
RPVQMRKIDEYDKVVKKATVEMVVEGXGX

SEQ ID NO: 81963 - protein, 25 aa, Artificial Sequence
  Cyclic GFR-binding peptide
QALRPVQIRKIVGRKPKVKKATVMI

SEQ ID NO: 81964 - protein, 34 aa, Artificial Sequence
  Cyclic GFR-binding peptide
  MOD_RES (31), (33): Xaa is C or S
LEPLTVLYYEIVRKKPIFEQLSNTLEDHLAXKXE

SEQ ID NO: 81965 - protein, 31 aa, Artificial Sequence
  Cyclic GFR-binding peptide
  MOD_RES (30), (30): Xaa is C or S
EPLTVLYYEYVRKKPKLEQLSNRLEEHLEXA

SEQ ID NO: 81966 - protein, 23 aa, Artificial Sequence
  Cyclic GFR-binding peptide
ELRSVKMAKVDENEKVVKEVQVD

SEQ ID NO: 81967 - protein, 36 aa, Artificial Sequence
  Cyclic GFR-binding peptide
  MOD_RES (7), (7): Xaa is C or S
NDEGLEXVPTEEEPLPMVYYRIKPHQGQHEQLSNFL

SEQ ID NO: 81968 - protein, 31 aa, Artificial Sequence; identical to SEQ ID NO: 30413
  Cyclic GFR-binding peptide
  MOD_RES (1), (1): Xaa is C or S

SEQ ID NO: 81969 - protein, 31 aa, Artificial Sequence
  Cyclic GFR-binding peptide
  MOD_RES (5), (6): Xaa is C or S
SASPXXVSQDLRSVKIAKVIGKTPKIKEVQV

SEQ ID NO: 81970 - protein, 36 aa, Artificial Sequence; identical to SEQ ID NO: 30416
  Cyclic GFR-binding peptide
  MOD_RES (1), (2), (33), (35): Xaa is C or S

SEQ ID NO: 81971 - protein, 40 aa, Artificial Sequence; identical to SEQ ID NO: 30417
  Cyclic GFR-binding peptide
  MOD_RES (5), (6), (38), (40): Xaa is C or S

SEQ ID NO: 81972 - protein, 26 aa, Artificial Sequence
  Cyclic GFR-binding peptide
LEPLPVVYYEIVRKKPIFEQLSNTLE

SEQ ID NO: 81973 - protein, 29 aa, Artificial Sequence
  Cyclic GFR-binding peptide
QLEPLTVLYYEIVRKKPIFEQLSNTLEDH

SEQ ID NO: 81974 - protein, 21 aa, Artificial Sequence
  Cyclic GFR-binding peptide
SNITIQIMIGKTPKIIGEMSM

SEQ ID NO: 81975 - protein, 36 aa, Artificial Sequence; identical to SEQ ID NO: 30421
  Cyclic GFR-binding peptide
  MOD_RES (5), (6): Xaa is C or S

SEQ ID NO: 81976 - protein, 30 aa, Artificial Sequence
  Cyclic GFR-binding peptide
PTQVQLEPLPVVYYEIVRKKPIFEQLSNTL

SEQ ID NO: 81977 - protein, 32 aa, Artificial Sequence
  Cyclic GFR-binding peptide
  MOD_RES (5), (6): Xaa is C or S
SAAPXXVPQALRSVKIAKVVGRKPKVKEVQVM

SEQ ID NO: 81978 - protein, 26 aa, Artificial Sequence
  Cyclic GFR-binding peptide
  MOD_RES (26), (26): Xaa is C or S
RPVQIRKIVGRKPKVKKATVMIVRSX

SEQ ID NO: 81979 - protein, 24 aa, Artificial Sequence
  Cyclic GFR-binding peptide
LSNITVQIMDDSSNVIIGEMSNMV

SEQ ID NO: 81980 - protein, 34 aa, Artificial Sequence; identical to SEQ ID NO: 30426
  Cyclic GFR-binding peptide
  MOD_RES (2), (3): Xaa is C or S

SEQ ID NO: 81981 - protein, 38 aa, Artificial Sequence; identical to SEQ ID NO: 30427
  Cyclic GFR-binding peptide
  MOD_RES (5), (6), (38): Xaa is C or S

SEQ ID NO: 81982 - protein, 30 aa, Artificial Sequence
  Cyclic GFR-binding peptide
  MOD_RES (3), (4): Xaa is C or S
KPXXAPTKLRSVKVAKVDDSSNVIKEVQVN

SEQ ID NO: 81983 - protein, 33 aa, Artificial Sequence
  Cyclic GFR-binding peptide
  MOD_RES (4), (4): Xaa is C or S
GLEXVPTEEEPLTMLYYRIKPHQGQHEQLSNFL

SEQ ID NO: 81984 - protein, 29 aa, Artificial Sequence
  Cyclic GFR-binding peptide
  MOD_RES (2), (3): Xaa is C or S
PXXAPTQLSNITVQIMDDSSNVIIGEMSN

SEQ ID NO: 81985 - protein, 26 aa, Artificial Sequence
  Cyclic GFR-binding peptide
SNITMQIMDEYDKVVIGEMSEMVVEG

SEQ ID NO: 81986 - protein, 36 aa, Artificial Sequence; identical to SEQ ID NO: 30429
  Cyclic GFR-binding peptide
  MOD_RES (1), (35): Xaa is C or S

SEQ ID NO: 81987 - protein, 32 aa, Artificial Sequence; identical to SEQ ID NO: 30430
  Cyclic GFR-binding peptide
  MOD_RES (1), (1): Xaa is C or S

SEQ ID NO: 81988 - protein, 25 aa, Artificial Sequence
  Cyclic GFR-binding peptide
DLRPVQIRKIVGRTPKVKKATVMVV

SEQ ID NO: 81989 - protein, 29 aa, Artificial Sequence
  Cyclic GFR-binding peptide
SNITIQIMIGKTPKIIGEMSAAAAAAAAA

SEQ ID NO: 81990 - protein, 35 aa, Artificial Sequence
  Cyclic GFR-binding peptide
  MOD_RES (6), (7): Xaa is C or S
KIPKAXXVPTELRSVKMAKVDENEKVVKEVQVDMV

SEQ ID NO: 81991 - protein, 36 aa, Artificial Sequence
  Cyclic GFR-binding peptide
  MOD_RES (7), (7): Xaa is C or S
NDEGLEXVPTEEEPLTMLYYRIKPHQGQHEQLSNFL

SEQ ID NO: 81992 - protein, 34 aa, Artificial Sequence
  Cyclic GFR-binding peptide
  MOD_RES (34), (34): Xaa is C or S
QVQLEPLTVLYYEIVRKKPIFEQLSNTLEDHLAX

SEQ ID NO: 81993 - protein, 31 aa, Artificial Sequence
  Cyclic GFR-binding peptide
  MOD_RES (1), (2): Xaa is C or S
XXVPQDLSNITIQIMVGRTPKVIGEMSMVVK

SEQ ID NO: 81994 - protein, 33 aa, Artificial Sequence; identical to SEQ ID NO: 30435
  Cyclic GFR-binding peptide
  MOD_RES (1), (33): Xaa is C or S

SEQ ID NO: 81995 - protein, 34 aa, Artificial Sequence; identical to SEQ ID NO: 30437
  Cyclic GFR-binding peptide
  MOD_RES (1), (33): Xaa is C or S

SEQ ID NO: 81996 - protein, 35 aa, Artificial Sequence; identical to SEQ ID NO: 30438
  Cyclic GFR-binding peptide
  MOD_RES (2), (3), (35): Xaa is C or S

SEQ ID NO: 81997 - protein, 28 aa, Artificial Sequence
  Cyclic GFR-binding peptide
VHHEPLPVVYYEYVRKKPKLEQLSNRLE

SEQ ID NO: 81998 - protein, 24 aa, Artificial Sequence
  Cyclic GFR-binding peptide
SQDLRPVQIRKIIGKTPKIKKATV

SEQ ID NO: 81999 - protein, 25 aa, Artificial Sequence
  Cyclic GFR-binding peptide
ELSNITMQIMDENEKVVIGEMSDMV

SEQ ID NO: 82000 - protein, 36 aa, Artificial Sequence; identical to SEQ ID NO: 30443
  Cyclic GFR-binding peptide
  MOD_RES (36), (36): Xaa is C or S

SEQ ID NO: 82001 - protein, 30 aa, Artificial Sequence
  Cyclic GFR-binding peptide
PTQVQLEPLTVLYYEIVRKKPIFEQLSNTL

SEQ ID NO: 82002 - protein, 29 aa, Artificial Sequence
  Cyclic GFR-binding peptide
  MOD_RES (27), (29): Xaa is C or S
RPVQVRKIDDSSNVIKKATVNMVVRSXGX

SEQ ID NO: 82003 - protein, 31 aa, Artificial Sequence
  Cyclic GFR-binding peptide
  MOD_RES (28), (30): Xaa is C or S
LRSVKVAKVDDSSNVIKEVQVNMVVRSXGXH

SEQ ID NO: 82004 - protein, 39 aa, Artificial Sequence; identical to SEQ ID NO: 30447
  Cyclic GFR-binding peptide
  MOD_RES (2), (39): Xaa is C or S

SEQ ID NO: 82005 - protein, 30 aa, Artificial Sequence
  Cyclic GFR-binding peptide
  MOD_RES (2), (3): Xaa is C or S
PXXAPTKLRPVQVRKIDDSSNVIKKATVNM

SEQ ID NO: 82006 - protein, 36 aa, Artificial Sequence; identical to SEQ ID NO: 30451
  Cyclic GFR-binding peptide
  MOD_RES (3), (4), (35): Xaa is C or S

SEQ ID NO: 82007 - protein, 34 aa, Artificial Sequence; identical to SEQ ID NO: 30454
  Cyclic GFR-binding peptide
  MOD_RES (2), (3): Xaa is C or S

SEQ ID NO: 82008 - protein, 36 aa, Artificial Sequence; identical to SEQ ID NO: 30460
  Cyclic GFR-binding peptide
  MOD_RES (3), (4), (36): Xaa is C or S

SEQ ID NO: 82009 - protein, 25 aa, Artificial Sequence
  Cyclic GFR-binding peptide
TELSNITMQIMDEYDKVVIGEMSEM

SEQ ID NO: 82010 - protein, 31 aa, Artificial Sequence
  Cyclic GFR-binding peptide
  MOD_RES (5), (6): Xaa is C or S
IPKAXXVPTELRPVQMRKIDEYDKVVKKATV

SEQ ID NO: 82011 - protein, 26 aa, Artificial Sequence
  Cyclic GFR-binding peptide
APTKLSNITVQIMDDSSNVIIGEMSN

SEQ ID NO: 82012 - protein, 31 aa, Artificial Sequence
  Cyclic GFR-binding peptide
  MOD_RES (30), (30): Xaa is C or S
TQLRSVKVAKVDDSSNVIKEVQVNMVVRAXG

SEQ ID NO: 82013 - protein, 31 aa, Artificial Sequence
  Cyclic GFR-binding peptide
  MOD_RES (4), (5): Xaa is C or S
PKPXXAPTQLSNITVQIMDDSSNVIIGEMSN

SEQ ID NO: 82014 - protein, 38 aa, Artificial Sequence; identical to SEQ ID NO: 30463
  Cyclic GFR-binding peptide
  MOD_RES (2), (3), (35), (37): Xaa is C or S

SEQ ID NO: 82015 - protein, 39 aa, Artificial Sequence; identical to SEQ ID NO: 30467
  Cyclic GFR-binding peptide
  MOD_RES (6), (7), (38): Xaa is C or S

SEQ ID NO: 82016 - protein, 29 aa, Artificial Sequence
  Cyclic GFR-binding peptide
  MOD_RES (29), (29): Xaa is C or S
QLSNITVQIMDDSSNVIIGEMSNMVVRAX

SEQ ID NO: 82017 - protein, 31 aa, Artificial Sequence
  Cyclic GFR-binding peptide
EPLTMLYYRIKPHQGQHEQLSNAAAAAAAAA

SEQ ID NO: 82018 - protein, 29 aa, Artificial Sequence
  Cyclic GFR-binding peptide
PTELSNITMQIMDEYDKVVIGEMSEMVVE

SEQ ID NO: 82019 - protein, 36 aa, Artificial Sequence; identical to SEQ ID NO: 30471
  Cyclic GFR-binding peptide
  MOD_RES (1), (33), (35): Xaa is C or S

SEQ ID NO: 82020 - protein, 32 aa, Artificial Sequence
  Cyclic GFR-binding peptide
  MOD_RES (4), (5): Xaa is C or S
PKPXXAPTKLRSVKVAKVDDSSNVIKEVQVNM

SEQ ID NO: 82021 - protein, 29 aa, Artificial Sequence
  Cyclic GFR-binding peptide
  MOD_RES (1), (2): Xaa is C or S
XXVSQDLRSVKIAKVIGKTPKIKEVQVMI

SEQ ID NO: 82022 - protein, 27 aa, Artificial Sequence
  Cyclic GFR-binding peptide
PTKLRSVKVAKVDDSSNVIKEVQVNMV

SEQ ID NO: 82023 - protein, 27 aa, Artificial Sequence
  Cyclic GFR-binding peptide
ELSNITMQIMDEYDKVVIGEMSEMVVE

SEQ ID NO: 82024 - protein, 28 aa, Artificial Sequence
  Cyclic GFR-binding peptide
VPTELRPVQMRKIDENEKVVKKATVDMV

SEQ ID NO: 82025 - protein, 32 aa, Artificial Sequence
  Cyclic GFR-binding peptide
  MOD_RES (4), (5): Xaa is C or S
ASPXXVPQDLSNITIQIMVGRTPKVIGEMSMV

SEQ ID NO: 82026 - protein, 38 aa, Artificial Sequence; identical to SEQ ID NO: 30481
  Cyclic GFR-binding peptide
  MOD_RES (6), (7), (38): Xaa is C or S

SEQ ID NO: 82027 - protein, 30 aa, Artificial Sequence
  Cyclic GFR-binding peptide
  MOD_RES (27), (29): Xaa is C or S
RSVKVAKVDDSSNVIKEVQVNMVVRAXGXH

SEQ ID NO: 82028 - protein, 27 aa, Artificial Sequence
  Cyclic GFR-binding peptide
  MOD_RES (1), (1): Xaa is C or S
XVPTELSNITMQIMDEYDKVVIGEMSE

SEQ ID NO: 82029 - protein, 36 aa, Artificial Sequence; identical to SEQ ID NO: 30483
  Cyclic GFR-binding peptide
  MOD_RES (36), (36): Xaa is C or S

SEQ ID NO: 82030 - protein, 41 aa, Artificial Sequence; identical to SEQ ID NO: 30484
  Cyclic GFR-binding peptide
  MOD_RES (6), (40): Xaa is C or S

SEQ ID NO: 82031 - protein, 28 aa, Artificial Sequence
  Cyclic GFR-binding peptide
  MOD_RES (1), (2): Xaa is C or S
XXVPTELSNITMQIMDENEKVVIGEMSD

SEQ ID NO: 82032 - protein, 38 aa, Artificial Sequence; identical to SEQ ID NO: 30487
  Cyclic GFR-binding peptide
  MOD_RES (2), (2): Xaa is C or S

SEQ ID NO: 82033 - protein, 44 aa, Artificial Sequence; identical to SEQ ID NO: 30492
  Cyclic GFR-binding peptide
  MOD_RES (5), (42), (44): Xaa is C or S

SEQ ID NO: 82034 - protein, 27 aa, Artificial Sequence
  Cyclic GFR-binding peptide
PTQLRPVQVRKIDDSSNVIKKATVNMV

SEQ ID NO: 82035 - protein, 30 aa, Artificial Sequence
  Cyclic GFR-binding peptide
  MOD_RES (1), (1): Xaa is C or S
XAPTKLRSVKVAKVDDSSNVIKEVQVNMVV

SEQ ID NO: 82036 - protein, 38 aa, Artificial Sequence; identical to SEQ ID NO: 30494
  Cyclic GFR-binding peptide
  MOD_RES (5), (6), (38): Xaa is C or S

SEQ ID NO: 82037 - protein, 29 aa, Artificial Sequence
  Cyclic GFR-binding peptide
VPTELSNITMQIMDENEKVVIGEMSDMVV

SEQ ID NO: 82038 - protein, 29 aa, Artificial Sequence
  Cyclic GFR-binding peptide
EEEPLTMLYYRIKPHQGQHEQLSNFLQHN

SEQ ID NO: 82039 - protein, 27 aa, Artificial Sequence
  Cyclic GFR-binding peptide
TKLRPVQVRKIDDSSNVIKKATVNMVV

SEQ ID NO: 82040 - protein, 28 aa, Artificial Sequence
  Cyclic GFR-binding peptide
PQALRPVQIRKIVGRKPKVKKATVMIVR

SEQ ID NO: 82041 - protein, 24 aa, Artificial Sequence
  Cyclic GFR-binding peptide
LRSVKVAKVDDSSNVIKEVQVNMV

SEQ ID NO: 82042 - protein, 23 aa, Artificial Sequence
  Cyclic GFR-binding peptide
EPLPVVYYEIVRKKPIFEQLSNT

SEQ ID NO: 82043 - protein, 26 aa, Artificial Sequence
  Cyclic GFR-binding peptide
PTQLSNITVQIMDDSSNVIIGEMSNM

SEQ ID NO: 82044 - protein, 33 aa, Artificial Sequence
  Cyclic GFR-binding peptide
  MOD_RES (4), (5): Xaa is C or S
AAPXXVPQALSNITIQIMVGRKPKVIGEMSMIV

SEQ ID NO: 82045 - protein, 31 aa, Artificial Sequence
  Cyclic GFR-binding peptide
  MOD_RES (30), (30): Xaa is C or S
TKLRSVKVAKVDDSSNVIKEVQVNMVVRSXG

SEQ ID NO: 82046 - protein, 29 aa, Artificial Sequence
  Cyclic GFR-binding peptide
  MOD_RES (29), (29): Xaa is C or S
ELSNITMQIMDENEKVVIGEMSDMVVEGX

SEQ ID NO: 82047 - protein, 32 aa, Artificial Sequence
  Cyclic GFR-binding peptide
  MOD_RES (2), (2): Xaa is C or S
QXRPTQVQLEPLPVVYYEIVRKKPIFEQLSNT

SEQ ID NO: 82048 - protein, 34 aa, Artificial Sequence
  Cyclic GFR-binding peptide
  MOD_RES (4), (5): Xaa is C or S
PKAXXVPTELSNITMQIMDENEKVVIGEMSDMVV

SEQ ID NO: 82049 - protein, 28 aa, Artificial Sequence
  Cyclic GFR-binding peptide
LEPLPVVYYEIVRKKPIFEQLSNTLEDH

SEQ ID NO: 82050 - protein, 31 aa, Artificial Sequence
  Cyclic GFR-binding peptide
  MOD_RES (2), (3): Xaa is C or S
PXXVSQDLRPVQIRKIIGKTPKIKKATVMIV

SEQ ID NO: 82051 - protein, 27 aa, Artificial Sequence
  Cyclic GFR-binding peptide
DLRPVQIRKIVGRTPKVKKATVMVVKS

SEQ ID NO: 82052 - protein, 40 aa, Artificial Sequence; identical to SEQ ID NO: 30516
  Cyclic GFR-binding peptide
  MOD_RES (6), (7), (39): Xaa is C or S

SEQ ID NO: 82053 - protein, 27 aa, Artificial Sequence
  Cyclic GFR-binding peptide
PQDLSNITIQIMVGRTPKVIGEMSMVV

SEQ ID NO: 82054 - protein, 23 aa, Artificial Sequence
  Cyclic GFR-binding peptide
TELRSVKMAKVDEYDKVVKEVQV

SEQ ID NO: 82055 - protein, 33 aa, Artificial Sequence; identical to SEQ ID NO: 30527
  Cyclic GFR-binding peptide
  MOD_RES (2), (3): Xaa is C or S

SEQ ID NO: 82056 - protein, 38 aa, Artificial Sequence; identical to SEQ ID NO: 30526
  Cyclic GFR-binding peptide
  MOD_RES (5), (6), (38): Xaa is C or S

SEQ ID NO: 82057 - protein, 35 aa, Artificial Sequence
  Cyclic GFR-binding peptide
  MOD_RES (6), (7): Xaa is C or S
KIPKAXXVPTELSNITMQIMDENEKVVIGEMSDMV

SEQ ID NO: 82058 - protein, 34 aa, Artificial Sequence
  Cyclic GFR-binding peptide
  MOD_RES (6), (7): Xaa is C or S
KIPKAXXVPTELSNITMQIMDENEKVVIGEMSDM

SEQ ID NO: 82059 - protein, 26 aa, Artificial Sequence
  Cyclic GFR-binding peptide
EEPLTMLYYRIKPHQGQHEQLSNFLQ

SEQ ID NO: 82060 - protein, 41 aa, Artificial Sequence; identical to SEQ ID NO: 30529
  Cyclic GFR-binding peptide
  MOD_RES (6), (7), (38), (40): Xaa is C or S

SEQ ID NO: 82061 - protein, 21 aa, Artificial Sequence
  Cyclic GFR-binding peptide
LRPVQMRKIDENEKVVKKATV

SEQ ID NO: 82062 - protein, 30 aa, Artificial Sequence
  Cyclic GFR-binding peptide
  MOD_RES (5), (5): Xaa is C or S
TKPTXAPTKLSNITVQIMDDSSNVIIGEMS

SEQ ID NO: 82063 - protein, 41 aa, Artificial Sequence; identical to SEQ ID NO: 30532
  Cyclic GFR-binding peptide
  MOD_RES (5), (6), (38), (40): Xaa is C or S

SEQ ID NO: 82064 - protein, 25 aa, Artificial Sequence
  Cyclic GFR-binding peptide
KLSNITVQIMDDSSNVIIGEMSNMV

SEQ ID NO: 82065 - protein, 39 aa, Artificial Sequence; identical to SEQ ID NO: 30539
  Cyclic GFR-binding peptide
  MOD_RES (3), (4), (36), (38): Xaa is C or S

SEQ ID NO: 82066 - protein, 41 aa, Artificial Sequence; identical to SEQ ID NO: 30540
  Cyclic GFR-binding peptide
  MOD_RES (1), (38), (40): Xaa is C or S

SEQ ID NO: 82067 - protein, 34 aa, Artificial Sequence; identical to SEQ ID NO: 30542
  Cyclic GFR-binding peptide
  MOD_RES (32), (34): Xaa is C or S

SEQ ID NO: 82068 - protein, 32 aa, Artificial Sequence; identical to SEQ ID NO: 30546
  Cyclic GFR-binding peptide
  MOD_RES (1), (2): Xaa is C or S

SEQ ID NO: 82069 - protein, 28 aa, Artificial Sequence
  Cyclic GFR-binding peptide
  MOD_RES (2), (3): Xaa is C or S
PXXAPTQLRSVKVAKVDDSSNVIKEVQV

SEQ ID NO: 82070 - protein, 37 aa, Artificial Sequence; identical to SEQ ID NO: 30547
  Cyclic GFR-binding peptide
  MOD_RES (1), (1): Xaa is C or S

SEQ ID NO: 82071 - protein, 40 aa, Artificial Sequence; identical to SEQ ID NO: 30549
  Cyclic GFR-binding peptide
  MOD_RES (6), (7), (38), (40): Xaa is C or S

SEQ ID NO: 82072 - protein, 28 aa, Artificial Sequence
  Cyclic GFR-binding peptide
  MOD_RES (1), (1): Xaa is C or S
XVSQDLRSVKIAKVIGKTPKIKEVQVMI

SEQ ID NO: 82073 - protein, 31 aa, Artificial Sequence
  Cyclic GFR-binding peptide
  MOD_RES (4), (4): Xaa is C or S
GLEXVPTEEEPLTMLYYRIKPHQGQHEQLSN

SEQ ID NO: 82074 - protein, 38 aa, Artificial Sequence; identical to SEQ ID NO: 30551
  Cyclic GFR-binding peptide
  MOD_RES (3), (4), (36), (38): Xaa is C or S

SEQ ID NO: 82075 - protein, 30 aa, Artificial Sequence
  Cyclic GFR-binding peptide
  MOD_RES (1), (1): Xaa is C or S
XAPTQLRPVQVRKIDDSSNVIKKATVNMVV

SEQ ID NO: 82076 - protein, 29 aa, Artificial Sequence
  Cyclic GFR-binding peptide
  MOD_RES (1), (2): Xaa is C or S
XXVPQDLRSVKIAKVVGRTPKVKEVQVMV

SEQ ID NO: 82077 - protein, 35 aa, Artificial Sequence; identical to SEQ ID NO: 30553
  Cyclic GFR-binding peptide
  MOD_RES (2), (2): Xaa is C or S

SEQ ID NO: 82078 - protein, 27 aa, Artificial Sequence
  Cyclic GFR-binding peptide
QALRPVQIRKIVGRKPKVKKATVMIVR

SEQ ID NO: 82079 - protein, 34 aa, Artificial Sequence; identical to SEQ ID NO: 30557
  Cyclic GFR-binding peptide
  MOD_RES (1), (2), (33): Xaa is C or S

SEQ ID NO: 82080 - protein, 39 aa, Artificial Sequence; identical to SEQ ID NO: 30558
  Cyclic GFR-binding peptide
  MOD_RES (7), (39): Xaa is C or S

SEQ ID NO: 82081 - protein, 35 aa, Artificial Sequence; identical to SEQ ID NO: 30560
  Cyclic GFR-binding peptide
  MOD_RES (3), (4), (35): Xaa is C or S

SEQ ID NO: 82082 - protein, 26 aa, Artificial Sequence
  Cyclic GFR-binding peptide
HEPLPVVYYEYVRKKPKLEQLSNRLE

SEQ ID NO: 82083 - protein, 33 aa, Artificial Sequence; identical to SEQ ID NO: 30563
  Cyclic GFR-binding peptide
  MOD_RES (1), (2), (33): Xaa is C or S

SEQ ID NO: 82084 - protein, 34 aa, Artificial Sequence
  Cyclic GFR-binding peptide
  MOD_RES (33), (33): Xaa is C or S
VHHEPLPVVYYEYVRKKPKLEQLSNRLEEHLEXA

SEQ ID NO: 82085 - protein, 34 aa, Artificial Sequence
  Cyclic GFR-binding peptide
  MOD_RES (6), (7): Xaa is C or S
ASAAPXXVPQALRSVKIAKVVGRKPKVKEVQVMI

SEQ ID NO: 82086 - protein, 30 aa, Artificial Sequence
  Cyclic GFR-binding peptide
  MOD_RES (30), (30): Xaa is C or S
PQDLRSVKIAKVVGRTPKVKEVQVMVVKSX

SEQ ID NO: 82087 - protein, 34 aa, Artificial Sequence; identical to SEQ ID NO: 30567
  Cyclic GFR-binding peptide
  MOD_RES (1), (32), (34): Xaa is C or S

SEQ ID NO: 82088 - protein, 32 aa, Artificial Sequence; identical to SEQ ID NO: 30569
  Cyclic GFR-binding peptide
  MOD_RES (1), (32): Xaa is C or S

SEQ ID NO: 82089 - protein, 25 aa, Artificial Sequence
  Cyclic GFR-binding peptide
VPQDLRSVKIAKVVGRTPKVKEVQV

SEQ ID NO: 82090 - protein, 28 aa, Artificial Sequence
  Cyclic GFR-binding peptide
QALSNITIQIMVGRKPKVIGEMSMIVRS

SEQ ID NO: 82091 - protein, 39 aa, Artificial Sequence; identical to SEQ ID NO: 30575
  Cyclic GFR-binding peptide
  MOD_RES (5), (6), (38): Xaa is C or S

SEQ ID NO: 82092 - protein, 40 aa, Artificial Sequence; identical to SEQ ID NO: 30576
  Cyclic GFR-binding peptide
  MOD_RES (7), (39): Xaa is C or S

SEQ ID NO: 82093 - protein, 31 aa, Artificial Sequence
  Cyclic GFR-binding peptide
  MOD_RES (5), (5): Xaa is C or S
TKPTXAPTKLSNITVQIMDDSSNVIIGEMSN

SEQ ID NO: 82094 - protein, 32 aa, Artificial Sequence
  Cyclic GFR-binding peptide
  MOD_RES (2), (2): Xaa is C or S
KXQPSRVHHEPLTVLYYEYVRKKPKLEQLSNR

SEQ ID NO: 82095 - protein, 41 aa, Artificial Sequence; identical to SEQ ID NO: 30581
  Cyclic GFR-binding peptide
  MOD_RES (4), (41): Xaa is C or S

SEQ ID NO: 82096 - protein, 30 aa, Artificial Sequence
  Cyclic GFR-binding peptide
  MOD_RES (2), (3): Xaa is C or S
AXXVPTELRPVQMRKIDENEKVVKKATVDM

SEQ ID NO: 82097 - protein, 30 aa, Artificial Sequence
  Cyclic GFR-binding peptide
  MOD_RES (27), (29): Xaa is C or S
LRPVQIRKIVGRKPKVKKATVMIVRSXKXS

SEQ ID NO: 82098 - protein, 37 aa, Artificial Sequence
  Cyclic GFR-binding peptide
  MOD_RES (5), (5): Xaa is C or S
RNVQXRPTQVQLEPLTVLYYEIVRKKPIFEQLSNTLE

SEQ ID NO: 82099 - protein, 30 aa, Artificial Sequence
  Cyclic GFR-binding peptide
  MOD_RES (3), (4): Xaa is C or S
SPXXVSQDLRPVQIRKIIGKTPKIKKATVM

SEQ ID NO: 82100 - protein, 36 aa, Artificial Sequence; identical to SEQ ID NO: 30587
  Cyclic GFR-binding peptide
  MOD_RES (4), (5), (36): Xaa is C or S

SEQ ID NO: 82101 - protein, 27 aa, Artificial Sequence
  Cyclic GFR-binding peptide
  MOD_RES (1), (2): Xaa is C or S
XXVPTELRSVKMAKVDENEKVVKEVQV

SEQ ID NO: 82102 - protein, 27 aa, Artificial Sequence
  Cyclic GFR-binding peptide
  MOD_RES (27), (27): Xaa is C or S
RSVKMAKVDENEKVVKEVQVDMVVEGX

SEQ ID NO: 82103 - protein, 23 aa, Artificial Sequence
  Cyclic GFR-binding peptide
DLRSVKIAKVVGRTPKVKEVQVM

SEQ ID NO: 82104 - protein, 35 aa, Artificial Sequence; identical to SEQ ID NO: 30591
  Cyclic GFR-binding peptide
  MOD_RES (1), (32), (34): Xaa is C or S

SEQ ID NO: 82105 - protein, 34 aa, Artificial Sequence; identical to SEQ ID NO: 30592
  Cyclic GFR-binding peptide
  MOD_RES (1), (32), (34): Xaa is C or S

SEQ ID NO: 82106 - protein, 43 aa, Artificial Sequence; identical to SEQ ID NO: 30594
  Cyclic GFR-binding peptide
  MOD_RES (3), (40), (42): Xaa is C or S

SEQ ID NO: 82107 - protein, 23 aa, Artificial Sequence
  Cyclic GFR-binding peptide
LRSVKIAKVIGKTPKIKEVQVMI

SEQ ID NO: 82108 - protein, 40 aa, Artificial Sequence; identical to SEQ ID NO: 30595
  Cyclic GFR-binding peptide
  MOD_RES (4), (5), (37), (39): Xaa is C or S

SEQ ID NO: 82109 - protein, 35 aa, Artificial Sequence
  Cyclic GFR-binding peptide
  MOD_RES (2), (2): Xaa is C or S
QXRPTQVQLEPLTVLYYEIVRKKPIFEQLSNTLED

SEQ ID NO: 82110 - protein, 30 aa, Artificial Sequence
  Cyclic GFR-binding peptide
  MOD_RES (30), (30): Xaa is C or S
TELRPVQMRKIDENEKVVKKATVDMVVEGX

SEQ ID NO: 82111 - protein, 33 aa, Artificial Sequence; identical to SEQ ID NO: 30599
  Cyclic GFR-binding peptide
  MOD_RES (1), (2): Xaa is C or S

SEQ ID NO: 82112 - protein, 30 aa, Artificial Sequence
  Cyclic GFR-binding peptide
QLEPLPVVYYEIVRKKPIFEQLSNTLEDHL

SEQ ID NO: 82113 - protein, 33 aa, Artificial Sequence
  Cyclic GFR-binding peptide
  MOD_RES (3), (4): Xaa is C or S
KAXXVPTELRSVKMAKVDEYDKVVKEVQVEMVV

SEQ ID NO: 82114 - protein, 44 aa, Artificial Sequence; identical to SEQ ID NO: 30601
  Cyclic GFR-binding peptide
  MOD_RES (4), (41), (43): Xaa is C or S

SEQ ID NO: 82115 - protein, 33 aa, Artificial Sequence
  Cyclic GFR-binding peptide
  MOD_RES (4), (4): Xaa is C or S
KPTXAPTKLSNITVQIMDDSSNVIIGEMSNMVV

SEQ ID NO: 82116 - protein, 23 aa, Artificial Sequence
  Cyclic GFR-binding peptide
ELRPVQMRKIDENEKVVKKATVD

SEQ ID NO: 82117 - protein, 34 aa, Artificial Sequence
  Cyclic GFR-binding peptide
  MOD_RES (5), (6): Xaa is C or S
IPKAXXVPTELSNITMQIMDENEKVVIGEMSDMV

SEQ ID NO: 82118 - protein, 36 aa, Artificial Sequence; identical to SEQ ID NO: 30607
  Cyclic GFR-binding peptide
  MOD_RES (3), (3): Xaa is C or S

SEQ ID NO: 82119 - protein, 40 aa, Artificial Sequence; identical to SEQ ID NO: 30608
  Cyclic GFR-binding peptide
  MOD_RES (5), (6), (38), (40): Xaa is C or S

SEQ ID NO: 82120 - protein, 20 aa, Artificial Sequence
  Cyclic GFR-binding peptide
RSVKIAKVIGKTPKIKEVQV

SEQ ID NO: 82121 - protein, 34 aa, Artificial Sequence
  Cyclic GFR-binding peptide
  MOD_RES (2), (2): Xaa is C or S
KXQPSRVHHEPLPVVYYEYVRKKPKLEQLSNRLE

SEQ ID NO: 82122 - protein, 24 aa, Artificial Sequence
  Cyclic GFR-binding peptide
QALSNITIQIMVGRKPKVIGEMSM

SEQ ID NO: 82123 - protein, 28 aa, Artificial Sequence
  Cyclic GFR-binding peptide
PQALRSVKIAKVVGRKPKVKEVQVMIVR

SEQ ID NO: 82124 - protein, 29 aa, Artificial Sequence
  Cyclic GFR-binding peptide
  MOD_RES (2), (3): Xaa is C or S
PXXVSQDLSNITIQIMIGKTPKIIGEMSM

SEQ ID NO: 82125 - protein, 30 aa, Artificial Sequence
  Cyclic GFR-binding peptide
  MOD_RES (27), (29): Xaa is C or S
LRSVKIAKVVGRKPKVKEVQVMIVRSXKXS

SEQ ID NO: 82126 - protein, 38 aa, Artificial Sequence; identical to SEQ ID NO: 30620
  Cyclic GFR-binding peptide
  MOD_RES (1), (38): Xaa is C or S

SEQ ID NO: 82127 - protein, 30 aa, Artificial Sequence
  Cyclic GFR-binding peptide
QPSRVHHEPLPVVYYEYVRKKPKLEQLSNR

SEQ ID NO: 82128 - protein, 35 aa, Artificial Sequence; identical to SEQ ID NO: 30623
  Cyclic GFR-binding peptide
  MOD_RES (1), (2), (34): Xaa is C or S

SEQ ID NO: 82129 - protein, 29 aa, Artificial Sequence
  Cyclic GFR-binding peptide
APTQLRPVQVRKIDDSSNVIKKATVNMVV

SEQ ID NO: 82130 - protein, 35 aa, Artificial Sequence; identical to SEQ ID NO: 30626
  Cyclic GFR-binding peptide
  MOD_RES (4), (4): Xaa is C or S

SEQ ID NO: 82131 - protein, 31 aa, Artificial Sequence
  Cyclic GFR-binding peptide
  MOD_RES (2), (3): Xaa is C or S
PXXVSQDLSNITIQIMIGKTPKIIGEMSMIV

SEQ ID NO: 82132 - protein, 31 aa, Artificial Sequence
  Cyclic GFR-binding peptide
  MOD_RES (3), (3): Xaa is C or S
PTXAPTKLSNITVQIMDDSSNVIIGEMSNMV

SEQ ID NO: 82133 - protein, 30 aa, Artificial Sequence
  Cyclic GFR-binding peptide
  MOD_RES (4), (4): Xaa is C or S
KPTXAPTKLRPVQVRKIDDSSNVIKKATVN

SEQ ID NO: 82134 - protein, 38 aa, Artificial Sequence; identical to SEQ ID NO: 30629
  Cyclic GFR-binding peptide
  MOD_RES (6), (7): Xaa is C or S

SEQ ID NO: 82135 - protein, 37 aa, Artificial Sequence; identical to SEQ ID NO: 30635
  Cyclic GFR-binding peptide
  MOD_RES (1), (2), (34), (36): Xaa is C or S

SEQ ID NO: 82136 - protein, 27 aa, Artificial Sequence
  Cyclic GFR-binding peptide
  MOD_RES (27), (27): Xaa is C or S
LRSVKIAKVIGKTPKIKEVQVMIVKSX

SEQ ID NO: 82137 - protein, 30 aa, Artificial Sequence
  Cyclic GFR-binding peptide
  MOD_RES (3), (3): Xaa is C or S
LEXVPTEEEPLTMLYYRIKPHQGQHEQLSN

SEQ ID NO: 82138 - protein, 28 aa, Artificial Sequence
  Cyclic GFR-binding peptide
QLRPVQVRKIDDSSNVIKKATVNMVVRA

SEQ ID NO: 82139 - protein, 36 aa, Artificial Sequence; identical to SEQ ID NO: 30638
  Cyclic GFR-binding peptide
  MOD_RES (1), (2), (33), (35): Xaa is C or S

SEQ ID NO: 82140 - protein, 24 aa, Artificial Sequence
  Cyclic GFR-binding peptide
SNITIQIMVGRKPKVIGEMSMIVR

SEQ ID NO: 82141 - protein, 32 aa, Artificial Sequence
  Cyclic GFR-binding peptide
  MOD_RES (31), (31): Xaa is C or S
EEEPLTMLYYRIKPHQGQHEQLSNFLQHNKXE

SEQ ID NO: 82142 - protein, 37 aa, Artificial Sequence; identical to SEQ ID NO: 30639
  Cyclic GFR-binding peptide
  MOD_RES (4), (5), (37): Xaa is C or S

SEQ ID NO: 82143 - protein, 25 aa, Artificial Sequence
  Cyclic GFR-binding peptide
SNITMQIMDENEKVVIGEMSDMVVE

SEQ ID NO: 82144 - protein, 30 aa, Artificial Sequence
  Cyclic GFR-binding peptide
  MOD_RES (28), (30): Xaa is C or S
ALRPVQIRKIVGRKPKVKKATVMIVRSXKX

SEQ ID NO: 82145 - protein, 35 aa, Artificial Sequence
  Cyclic GFR-binding peptide
  MOD_RES (32), (34): Xaa is C or S
QLEPLPVVYYEIVRKKPIFEQLSNTLEDHLAXKXE

SEQ ID NO: 82146 - protein, 33 aa, Artificial Sequence; identical to SEQ ID NO: 30647
  Cyclic GFR-binding peptide
  MOD_RES (1), (2): Xaa is C or S

SEQ ID NO: 82147 - protein, 28 aa, Artificial Sequence
  Cyclic GFR-binding peptide
EEEPLPMVYYRIKPHQGQHEQLSNFLQH

SEQ ID NO: 82148 - protein, 24 aa, Artificial Sequence
  Cyclic GFR-binding peptide
EPLPVVYYEIVRKKPIFEQLSNTL

SEQ ID NO: 82149 - protein, 32 aa, Artificial Sequence
  Cyclic GFR-binding peptide
  MOD_RES (5), (6): Xaa is C or S
VPKPXXAPTQLRPVQVRKIDDSSNVIKKATVN

SEQ ID NO: 82150 - protein, 28 aa, Artificial Sequence
  Cyclic GFR-binding peptide
  MOD_RES (28), (28): Xaa is C or S
LRSVKVAKVDDSSNVIKEVQVNMVVRSX

SEQ ID NO: 82151 - protein, 28 aa, Artificial Sequence
  Cyclic GFR-binding peptide
SQDLRPVQIRKIIGKTPKIKKATVMIVK

SEQ ID NO: 82152 - protein, 37 aa, Artificial Sequence; identical to SEQ ID NO: 30654
  Cyclic GFR-binding peptide
  MOD_RES (4), (5), (36): Xaa is C or S

SEQ ID NO: 82153 - protein, 29 aa, Artificial Sequence
  Cyclic GFR-binding peptide
  MOD_RES (28), (28): Xaa is C or S
LRSVKMAKVDENEKVVKEVQVDMVVEGXG

SEQ ID NO: 82154 - protein, 31 aa, Artificial Sequence; identical to SEQ ID NO: 30657
  Cyclic GFR-binding peptide

SEQ ID NO: 82155 - protein, 35 aa, Artificial Sequence; identical to SEQ ID NO: 30662
  Cyclic GFR-binding peptide
  MOD_RES (3), (4): Xaa is C or S

SEQ ID NO: 82156 - protein, 23 aa, Artificial Sequence
  Cyclic GFR-binding peptide
ALRSVKIAKVVGRKPKVKEVQVM

SEQ ID NO: 82157 - protein, 37 aa, Artificial Sequence; identical to SEQ ID NO: 30663
  Cyclic GFR-binding peptide
  MOD_RES (3), (4), (35), (37): Xaa is C or S

SEQ ID NO: 82158 - protein, 28 aa, Artificial Sequence
  Cyclic GFR-binding peptide
KLSNITVQIMDDSSNVIIGEMSNMVVRS

SEQ ID NO: 82159 - protein, 34 aa, Artificial Sequence; identical to SEQ ID NO: 30667
  Cyclic GFR-binding peptide
  MOD_RES (1), (2), (33): Xaa is C or S

SEQ ID NO: 82160 - protein, 37 aa, Artificial Sequence; identical to SEQ ID NO: 30668
  Cyclic GFR-binding peptide
  MOD_RES (5), (6), (37): Xaa is C or S

SEQ ID NO: 82161 - protein, 27 aa, Artificial Sequence
  Cyclic GFR-binding peptide
PQALRSVKIAKVVGRKPKVKEVQVMIV

SEQ ID NO: 82162 - protein, 40 aa, Artificial Sequence; identical to SEQ ID NO: 30672
  Cyclic GFR-binding peptide
  MOD_RES (5), (6), (37), (39): Xaa is C or S

SEQ ID NO: 82163 - protein, 25 aa, Artificial Sequence
  Cyclic GFR-binding peptide
LRSVKIAKVIGKTPKIKEVQVMIVK

SEQ ID NO: 82164 - protein, 31 aa, Artificial Sequence
  Cyclic GFR-binding peptide
  MOD_RES (1), (1): Xaa is C or S
XRPTQVQLEPLPVVYYEIVRKKPIFEQLSNT

SEQ ID NO: 82165 - protein, 33 aa, Artificial Sequence
  Cyclic GFR-binding peptide
  MOD_RES (31), (33): Xaa is C or S
PTELSNITMQIMDEYDKVVIGEMSEMVVEGXGX

SEQ ID NO: 82166 - protein, 32 aa, Artificial Sequence
  Cyclic GFR-binding peptide
  MOD_RES (2), (3): Xaa is C or S
PXXAPTQLSNITVQIMDDSSNVIIGEMSNMVV

SEQ ID NO: 82167 - protein, 32 aa, Artificial Sequence
  Cyclic GFR-binding peptide
  MOD_RES (29), (31): Xaa is C or S
ELRSVKMAKVDEYDKVVKEVQVEMVVEGXGXR

SEQ ID NO: 82168 - protein, 34 aa, Artificial Sequence; identical to SEQ ID NO: 30685
  Cyclic GFR-binding peptide
  MOD_RES (2), (3), (34): Xaa is C or S

SEQ ID NO: 82169 - protein, 23 aa, Artificial Sequence
  Cyclic GFR-binding peptide
TELRPVQMRKIDEYDKVVKKATV

SEQ ID NO: 82170 - protein, 37 aa, Artificial Sequence
  Cyclic GFR-binding peptide
  MOD_RES (6), (6): Xaa is C or S
DEGLEXVPTEEEPLPMVYYRIKPHQGQHEQLSNFLQH

SEQ ID NO: 82171 - protein, 36 aa, Artificial Sequence
  Cyclic GFR-binding peptide
  MOD_RES (3), (3): Xaa is C or S
VKXQPSRVHHEPLTVLYYEYVRKKPKLEQLSNRLEE

SEQ ID NO: 82172 - protein, 27 aa, Artificial Sequence
  Cyclic GFR-binding peptide
  MOD_RES (1), (2): Xaa is C or S
XXVPQDLSNITIQIMVGRTPKVIGEMS

SEQ ID NO: 82173 - protein, 30 aa, Artificial Sequence
  Cyclic GFR-binding peptide
  MOD_RES (2), (3): Xaa is C or S
AXXVPTELSNITMQIMDEYDKVVIGEMSEM

SEQ ID NO: 82174 - protein, 27 aa, Artificial Sequence
  Cyclic GFR-binding peptide
EPLPMVYYRIKPHQGQHEQLSNFLQHN

SEQ ID NO: 82175 - protein, 27 aa, Artificial Sequence
  Cyclic GFR-binding peptide
QDLRPVQIRKIIGKTPKIKKATVMIVK

SEQ ID NO: 82176 - protein, 33 aa, Artificial Sequence
  Cyclic GFR-binding peptide
  MOD_RES (6), (7): Xaa is C or S
KIPKAXXVPTELSNITMQIMDENEKVVIGEMSD

SEQ ID NO: 82177 - protein, 31 aa, Artificial Sequence; identical to SEQ ID NO: 30693
  Cyclic GFR-binding peptide

SEQ ID NO: 82178 - protein, 29 aa, Artificial Sequence
  Cyclic GFR-binding peptide
RPVQMRKIDEYDKVVKKATVAAAAAAAAA

SEQ ID NO: 82179 - protein, 24 aa, Artificial Sequence
  Cyclic GFR-binding peptide
QDLSNITIQIMVGRTPKVIGEMSM

SEQ ID NO: 82180 - protein, 34 aa, Artificial Sequence
  Cyclic GFR-binding peptide
  MOD_RES (34), (34): Xaa is C or S
QVQLEPLPVVYYEIVRKKPIFEQLSNTLEDHLAX

SEQ ID NO: 82181 - protein, 41 aa, Artificial Sequence; identical to SEQ ID NO: 30698
  Cyclic GFR-binding peptide
  MOD_RES (6), (38), (40): Xaa is C or S

SEQ ID NO: 82182 - protein, 31 aa, Artificial Sequence
  Cyclic GFR-binding peptide
  MOD_RES (1), (2): Xaa is C or S
XXVPQALSNITIQIMVGRKPKVIGEMSMIVR

SEQ ID NO: 82183 - protein, 35 aa, Artificial Sequence
  Cyclic GFR-binding peptide
  MOD_RES (33), (35): Xaa is C or S
PTEEEPLTMLYYRIKPHQGQHEQLSNFLQHNKXEX

SEQ ID NO: 82184 - protein, 25 aa, Artificial Sequence
  Cyclic GFR-binding peptide
VPQDLRPVQIRKIVGRTPKVKKATV

SEQ ID NO: 82185 - protein, 31 aa, Artificial Sequence
  Cyclic GFR-binding peptide
  MOD_RES (3), (3): Xaa is C or S
PTXAPTKLRSVKVAKVDDSSNVIKEVQVNMV

SEQ ID NO: 82186 - protein, 32 aa, Artificial Sequence; identical to SEQ ID NO: 30705
  Cyclic GFR-binding peptide
  MOD_RES (31), (31): Xaa is C or S

SEQ ID NO: 82187 - protein, 33 aa, Artificial Sequence
  Cyclic GFR-binding peptide
  MOD_RES (4), (5): Xaa is C or S
PKAXXVPTELSNITMQIMDENEKVVIGEMSDMV

SEQ ID NO: 82188 - protein, 34 aa, Artificial Sequence; identical to SEQ ID NO: 30706
  Cyclic GFR-binding peptide
  MOD_RES (2), (3): Xaa is C or S

SEQ ID NO: 82189 - protein, 39 aa, Artificial Sequence; identical to SEQ ID NO: 30707
  Cyclic GFR-binding peptide
  MOD_RES (3), (4), (36), (38): Xaa is C or S

SEQ ID NO: 82190 - protein, 31 aa, Artificial Sequence
  Cyclic GFR-binding peptide
  MOD_RES (31), (31): Xaa is C or S
EEEPLTMLYYRIKPHQGQHEQLSNFLQHNKX

SEQ ID NO: 82191 - protein, 33 aa, Artificial Sequence
  Cyclic GFR-binding peptide
  MOD_RES (3), (4): Xaa is C or S
KAXXVPTELRPVQMRKIDEYDKVVKKATVEMVV

SEQ ID NO: 82192 - protein, 23 aa, Artificial Sequence
  Cyclic GFR-binding peptide
LRPVQIRKIVGRKPKVKKATVMI

SEQ ID NO: 82193 - protein, 26 aa, Artificial Sequence
  Cyclic GFR-binding peptide
PTELRSVKMAKVDENEKVVKEVQVDM

SEQ ID NO: 82194 - protein, 32 aa, Artificial Sequence; identical to SEQ ID NO: 30713
  Cyclic GFR-binding peptide
  MOD_RES (1), (2): Xaa is C or S

SEQ ID NO: 82195 - protein, 32 aa, Artificial Sequence
  Cyclic GFR-binding peptide
  MOD_RES (29), (31): Xaa is C or S
EPLPMVYYRIKPHQGQHEQLSNFLQHNKXEXR

SEQ ID NO: 82196 - protein, 33 aa, Artificial Sequence
  Cyclic GFR-binding peptide
  MOD_RES (33), (33): Xaa is C or S
VQLEPLPVVYYEIVRKKPIFEQLSNTLEDHLAX

SEQ ID NO: 82197 - protein, 33 aa, Artificial Sequence; identical to SEQ ID NO: 30722
  Cyclic GFR-binding peptide
  MOD_RES (2), (3): Xaa is C or S

SEQ ID NO: 82198 - protein, 29 aa, Artificial Sequence
  Cyclic GFR-binding peptide
  MOD_RES (28), (28): Xaa is C or S
LRPVQVRKIDDSSNVIKKATVNMVVRAXG

SEQ ID NO: 82199 - protein, 33 aa, Artificial Sequence
  Cyclic GFR-binding peptide
  MOD_RES (6), (6): Xaa is C or S
DEGLEXVPTEEEPLPMVYYRIKPHQGQHEQLSN

SEQ ID NO: 82200 - protein, 25 aa, Artificial Sequence
  Cyclic GFR-binding peptide
LRPVQIRKIIGKTPKIKKATVMIVK

SEQ ID NO: 82201 - protein, 28 aa, Artificial Sequence
  Cyclic GFR-binding peptide
  MOD_RES (2), (3): Xaa is C or S
PXXAPTKLSNITVQIMDDSSNVIIGEMS

SEQ ID NO: 82202 - protein, 32 aa, Artificial Sequence
  Cyclic GFR-binding peptide
  MOD_RES (1), (1): Xaa is C or S
XRPTQVQLEPLTVLYYEIVRKKPIFEQLSNTL

SEQ ID NO: 82203 - protein, 37 aa, Artificial Sequence; identical to SEQ ID NO: 30725
  Cyclic GFR-binding peptide
  MOD_RES (6), (7): Xaa is C or S

SEQ ID NO: 82204 - protein, 30 aa, Artificial Sequence
  Cyclic GFR-binding peptide
  MOD_RES (1), (1): Xaa is C or S
XAPTQLRSVKVAKVDDSSNVIKEVQVNMVV

SEQ ID NO: 82205 - protein, 38 aa, Artificial Sequence; identical to SEQ ID NO: 30729
  Cyclic GFR-binding peptide
  MOD_RES (4), (5), (36), (38): Xaa is C or S

SEQ ID NO: 82206 - protein, 32 aa, Artificial Sequence
  Cyclic GFR-binding peptide
  MOD_RES (32), (32): Xaa is C or S
TEEEPLPMVYYRIKPHQGQHEQLSNFLQHNKX

SEQ ID NO: 82207 - protein, 31 aa, Artificial Sequence
  Cyclic GFR-binding peptide
  MOD_RES (31), (31): Xaa is C or S
PTQLRPVQVRKIDDSSNVIKKATVNMVVRAX

SEQ ID NO: 82208 - protein, 33 aa, Artificial Sequence
  Cyclic GFR-binding peptide
  MOD_RES (1), (1): Xaa is C or S
XQPSRVHHEPLTVLYYEYVRKKPKLEQLSNRLE

SEQ ID NO: 82209 - protein, 22 aa, Artificial Sequence
  Cyclic GFR-binding peptide
ALSNITIQIMVGRKPKVIGEMS

SEQ ID NO: 82210 - protein, 23 aa, Artificial Sequence
  Cyclic GFR-binding peptide
RPVQVRKIDDSSNVIKKATVNMV

SEQ ID NO: 82211 - protein, 34 aa, Artificial Sequence
  Cyclic GFR-binding peptide
  MOD_RES (4), (5): Xaa is C or S
PKPXXAPTKLSNITVQIMDDSSNVIIGEMSNMVV

SEQ ID NO: 82212 - protein, 25 aa, Artificial Sequence
  Cyclic GFR-binding peptide
LRSVKIAKVVGRTPKVKEVQVMVVK

SEQ ID NO: 82213 - protein, 25 aa, Artificial Sequence
  Cyclic GFR-binding peptide
TELRPVQMRKIDENEKVVKKATVDM

SEQ ID NO: 82214 - protein, 27 aa, Artificial Sequence
  Cyclic GFR-binding peptide
ELRPVQMRKIDEYDKVVKKATVEMVVE

SEQ ID NO: 82215 - protein, 26 aa, Artificial Sequence
  Cyclic GFR-binding peptide
RSVKMAKVDEYDKVVKEVQVEMVVEG

SEQ ID NO: 82216 - protein, 35 aa, Artificial Sequence
  Cyclic GFR-binding peptide
  MOD_RES (33), (35): Xaa is C or S
VHHEPLPVVYYEYVRKKPKLEQLSNRLEEHLEXAX

SEQ ID NO: 82217 - protein, 32 aa, Artificial Sequence
  Cyclic GFR-binding peptide
  MOD_RES (6), (7): Xaa is C or S
KIPKAXXVPTELRPVQMRKIDENEKVVKKATV

SEQ ID NO: 82218 - protein, 29 aa, Artificial Sequence
  Cyclic GFR-binding peptide
PQALRSVKIAKVVGRKPKVKEVQVMIVRS

SEQ ID NO: 82219 - protein, 34 aa, Artificial Sequence; identical to SEQ ID NO: 30750
  Cyclic GFR-binding peptide
  MOD_RES (32), (34): Xaa is C or S

SEQ ID NO: 82220 - protein, 40 aa, Artificial Sequence; identical to SEQ ID NO: 30755
  Cyclic GFR-binding peptide
  MOD_RES (4), (5), (37), (39): Xaa is C or S

SEQ ID NO: 82221 - protein, 35 aa, Artificial Sequence
  Cyclic GFR-binding peptide
  MOD_RES (34), (34): Xaa is C or S
QVQLEPLPVVYYEIVRKKPIFEQLSNTLEDHLAXK

SEQ ID NO: 82222 - protein, 29 aa, Artificial Sequence
  Cyclic GFR-binding peptide
TEEEPLPMVYYRIKPHQGQHEQLSNFLQH

SEQ ID NO: 82223 - protein, 26 aa, Artificial Sequence
  Cyclic GFR-binding peptide
LRPVQIRKIIGKTPKIKKATVMIVKS

SEQ ID NO: 82224 - protein, 28 aa, Artificial Sequence
  Cyclic GFR-binding peptide
QLRSVKVAKVDDSSNVIKEVQVNMVVRA

SEQ ID NO: 82225 - protein, 38 aa, Artificial Sequence; identical to SEQ ID NO: 30764
  Cyclic GFR-binding peptide
  MOD_RES (4), (4): Xaa is C or S

SEQ ID NO: 82226 - protein, 29 aa, Artificial Sequence
  Cyclic GFR-binding peptide
  MOD_RES (28), (28): Xaa is C or S
ALRPVQIRKIVGRKPKVKKATVMIVRSXK

SEQ ID NO: 82227 - protein, 32 aa, Artificial Sequence
  Cyclic GFR-binding peptide
  MOD_RES (3), (4): Xaa is C or S
APXXVPQALSNITIQIMVGRKPKVIGEMSMIV

SEQ ID NO: 82228 - protein, 35 aa, Artificial Sequence; identical to SEQ ID NO: 30767
  Cyclic GFR-binding peptide
  MOD_RES (4), (5): Xaa is C or S

SEQ ID NO: 82229 - protein, 35 aa, Artificial Sequence
  Cyclic GFR-binding peptide
  MOD_RES (4), (4): Xaa is C or S
NVQXRPTQVQLEPLPVVYYEIVRKKPIFEQLSNTL

SEQ ID NO: 82230 - protein, 33 aa, Artificial Sequence
  Cyclic GFR-binding peptide
  MOD_RES (32), (32): Xaa is C or S
HHEPLPVVYYEYVRKKPKLEQLSNRLEEHLEXA

SEQ ID NO: 82231 - protein, 27 aa, Artificial Sequence
  Cyclic GFR-binding peptide
TELSNITMQIMDENEKVVIGEMSDMVV

SEQ ID NO: 82232 - protein, 32 aa, Artificial Sequence
  Cyclic GFR-binding peptide
  MOD_RES (2), (2): Xaa is C or S
QXRPTQVQLEPLTVLYYEIVRKKPIFEQLSNT

SEQ ID NO: 82233 - protein, 30 aa, Artificial Sequence
  Cyclic GFR-binding peptide
  MOD_RES (28), (30): Xaa is C or S
DLRSVKIAKVVGRTPKVKEVQVMVVKSXKX

SEQ ID NO: 82234 - protein, 41 aa, Artificial Sequence; identical to SEQ ID NO: 30771
  Cyclic GFR-binding peptide
  MOD_RES (7), (41): Xaa is C or S

SEQ ID NO: 82235 - protein, 26 aa, Artificial Sequence
  Cyclic GFR-binding peptide
HHEPLPVVYYEYVRKKPKLEQLSNRL

SEQ ID NO: 82236 - protein, 32 aa, Artificial Sequence
  Cyclic GFR-binding peptide
  MOD_RES (5), (6): Xaa is C or S
SASPXXVPQDLRSVKIAKVVGRTPKVKEVQVM

SEQ ID NO: 82237 - protein, 45 aa, Artificial Sequence; identical to SEQ ID NO: 30773
  Cyclic GFR-binding peptide
  MOD_RES (5), (42), (44): Xaa is C or S

SEQ ID NO: 82238 - protein, 38 aa, Artificial Sequence; identical to SEQ ID NO: 30776
  Cyclic GFR-binding peptide
  MOD_RES (6), (7), (38): Xaa is C or S

SEQ ID NO: 82239 - protein, 32 aa, Artificial Sequence; identical to SEQ ID NO: 30777
  Cyclic GFR-binding peptide
  MOD_RES (1), (1): Xaa is C or S

SEQ ID NO: 82240 - protein, 27 aa, Artificial Sequence
  Cyclic GFR-binding peptide
DLSNITIQIMVGRTPKVIGEMSMVVKS

SEQ ID NO: 82241 - protein, 28 aa, Artificial Sequence
  Cyclic GFR-binding peptide
  MOD_RES (28), (28): Xaa is C or S
ALSNITIQIMVGRKPKVIGEMSMIVRSX

SEQ ID NO: 82242 - protein, 30 aa, Artificial Sequence
  Cyclic GFR-binding peptide
  MOD_RES (29), (29): Xaa is C or S
ELRSVKMAKVDEYDKVVKEVQVEMVVEGXG

SEQ ID NO: 82243 - protein, 30 aa, Artificial Sequence
  Cyclic GFR-binding peptide
  MOD_RES (29), (29): Xaa is C or S
QALRPVQIRKIVGRKPKVKKATVMIVRSXK

SEQ ID NO: 82244 - protein, 28 aa, Artificial Sequence
  Cyclic GFR-binding peptide
PTEEEPLPMVYYRIKPHQGQHEQLSNFL

SEQ ID NO: 82245 - protein, 24 aa, Artificial Sequence
  Cyclic GFR-binding peptide
LEPLPVVYYEIVRKKPIFEQLSNT

SEQ ID NO: 82246 - protein, 42 aa, Artificial Sequence; identical to SEQ ID NO: 30789
  Cyclic GFR-binding peptide
  MOD_RES (3), (40), (42): Xaa is C or S

SEQ ID NO: 82247 - protein, 32 aa, Artificial Sequence; identical to SEQ ID NO: 30794
  Cyclic GFR-binding peptide
  MOD_RES (31), (31): Xaa is C or S

SEQ ID NO: 82248 - protein, 26 aa, Artificial Sequence
  Cyclic GFR-binding peptide
VPTELRSVKMAKVDENEKVVKEVQVD

SEQ ID NO: 82249 - protein, 34 aa, Artificial Sequence; identical to SEQ ID NO: 30801
  Cyclic GFR-binding peptide
  MOD_RES (1), (33): Xaa is C or S

SEQ ID NO: 82250 - protein, 39 aa, Artificial Sequence; identical to SEQ ID NO: 30803
  Cyclic GFR-binding peptide
  MOD_RES (5), (37), (39): Xaa is C or S

SEQ ID NO: 82251 - protein, 37 aa, Artificial Sequence; identical to SEQ ID NO: 30806
  Cyclic GFR-binding peptide
  MOD_RES (5), (6), (37): Xaa is C or S

SEQ ID NO: 82252 - protein, 40 aa, Artificial Sequence; identical to SEQ ID NO: 30807
  Cyclic GFR-binding peptide
  MOD_RES (4), (4): Xaa is C or S

SEQ ID NO: 82253 - protein, 27 aa, Artificial Sequence
  Cyclic GFR-binding peptide
QDLRSVKIAKVVGRTPKVKEVQVMVVK

SEQ ID NO: 82254 - protein, 23 aa, Artificial Sequence
  Cyclic GFR-binding peptide
SNITVQIMDDSSNVIIGEMSNMV

SEQ ID NO: 82255 - protein, 29 aa, Artificial Sequence
  Cyclic GFR-binding peptide
RPTQVQLEPLTVLYYEIVRKKPIFEQLSN

SEQ ID NO: 82256 - protein, 25 aa, Artificial Sequence
  Cyclic GFR-binding peptide
SQDLSNITIQIMIGKTPKIIGEMSM

SEQ ID NO: 82257 - protein, 30 aa, Artificial Sequence; identical to SEQ ID NO: 30811
  Cyclic GFR-binding peptide

SEQ ID NO: 82258 - protein, 31 aa, Artificial Sequence
  Cyclic GFR-binding peptide
  MOD_RES (30), (30): Xaa is C or S
TELRSVKMAKVDENEKVVKEVQVDMVVEGXG

SEQ ID NO: 82259 - protein, 41 aa, Artificial Sequence; identical to SEQ ID NO: 30813
  Cyclic GFR-binding peptide
  MOD_RES (4), (41): Xaa is C or S

SEQ ID NO: 82260 - protein, 33 aa, Artificial Sequence
  Cyclic GFR-binding peptide
  MOD_RES (31), (33): Xaa is C or S
HEPLTVLYYEYVRKKPKLEQLSNRLEEHLEXAX

SEQ ID NO: 82261 - protein, 31 aa, Artificial Sequence
  Cyclic GFR-binding peptide
  MOD_RES (29), (31): Xaa is C or S
QDLRPVQIRKIIGKTPKIKKATVMIVKSXKX

SEQ ID NO: 82262 - protein, 24 aa, Artificial Sequence
  Cyclic GFR-binding peptide
LSNITMQIMDEYDKVVIGEMSEMV

SEQ ID NO: 82263 - protein, 38 aa, Artificial Sequence; identical to SEQ ID NO: 30821
  Cyclic GFR-binding peptide
  MOD_RES (5), (6), (37): Xaa is C or S

SEQ ID NO: 82264 - protein, 23 aa, Artificial Sequence
  Cyclic GFR-binding peptide
LRSVKVAKVDDSSNVIKEVQVNM

SEQ ID NO: 82265 - protein, 35 aa, Artificial Sequence; identical to SEQ ID NO: 30822
  Cyclic GFR-binding peptide
  MOD_RES (3), (4): Xaa is C or S

SEQ ID NO: 82266 - protein, 31 aa, Artificial Sequence
  Cyclic GFR-binding peptide
  MOD_RES (30), (30): Xaa is C or S
TELSNITMQIMDEYDKVVIGEMSEMVVEGXG

SEQ ID NO: 82267 - protein, 22 aa, Artificial Sequence
  Cyclic GFR-binding peptide
RPVQIRKIIGKTPKIKKATVMI

SEQ ID NO: 82268 - protein, 36 aa, Artificial Sequence
  Cyclic GFR-binding peptide
  MOD_RES (34), (36): Xaa is C or S
QVQLEPLPVVYYEIVRKKPIFEQLSNTLEDHLAXKX

SEQ ID NO: 82269 - protein, 28 aa, Artificial Sequence
  Cyclic GFR-binding peptide
  MOD_RES (28), (28): Xaa is C or S
LSNITVQIMDDSSNVIIGEMSNMVVRAX

SEQ ID NO: 82270 - protein, 40 aa, Artificial Sequence; identical to SEQ ID NO: 30830
  Cyclic GFR-binding peptide
  MOD_RES (5), (6), (38), (40): Xaa is C or S

SEQ ID NO: 82271 - protein, 32 aa, Artificial Sequence
  Cyclic GFR-binding peptide
  MOD_RES (3), (4): Xaa is C or S
APXXVPQALRPVQIRKIVGRKPKVKKATVMIV

SEQ ID NO: 82272 - protein, 28 aa, Artificial Sequence
  Cyclic GFR-binding peptide
  MOD_RES (27), (27): Xaa is C or S
RPVQVRKIDDSSNVIKKATVNMVVRSXG

SEQ ID NO: 82273 - protein, 32 aa, Artificial Sequence; identical to SEQ ID NO: 30835
  Cyclic GFR-binding peptide
  MOD_RES (1), (1): Xaa is C or S

SEQ ID NO: 82274 - protein, 28 aa, Artificial Sequence
  Cyclic GFR-binding peptide
SQDLRSVKIAKVIGKTPKIKEVQVMIVK

SEQ ID NO: 82275 - protein, 28 aa, Artificial Sequence
  Cyclic GFR-binding peptide
  MOD_RES (27), (27): Xaa is C or S
SNITVQIMDDSSNVIIGEMSNMVVRAXG

SEQ ID NO: 82276 - protein, 22 aa, Artificial Sequence
  Cyclic GFR-binding peptide
RSVKIAKVVGRTPKVKEVQVMV

SEQ ID NO: 82277 - protein, 31 aa, Artificial Sequence; identical to SEQ ID NO: 30838
  Cyclic GFR-binding peptide
  MOD_RES (1), (1): Xaa is C or S

SEQ ID NO: 82278 - protein, 32 aa, Artificial Sequence
  Cyclic GFR-binding peptide
PSRVHHEPLPVVYYEYVRKKPKLEQLSNRLEE

SEQ ID NO: 82279 - protein, 28 aa, Artificial Sequence
  Cyclic GFR-binding peptide
APTQLRPVQVRKIDDSSNVIKKATVNMV

SEQ ID NO: 82280 - protein, 24 aa, Artificial Sequence
  Cyclic GFR-binding peptide
ELSNITMQIMDENEKVVIGEMSDM

SEQ ID NO: 82281 - protein, 35 aa, Artificial Sequence; identical to SEQ ID NO: 30841
  Cyclic GFR-binding peptide
  MOD_RES (35), (35): Xaa is C or S

SEQ ID NO: 82282 - protein, 30 aa, Artificial Sequence
  Cyclic GFR-binding peptide
  MOD_RES (27), (29): Xaa is C or S
LSNITIQIMIGKTPKIIGEMSMIVKSXKXS

SEQ ID NO: 82283 - protein, 37 aa, Artificial Sequence; identical to SEQ ID NO: 30843
  Cyclic GFR-binding peptide
  MOD_RES (6), (7): Xaa is C or S

SEQ ID NO: 82284 - protein, 37 aa, Artificial Sequence; identical to SEQ ID NO: 30845
  Cyclic GFR-binding peptide
  MOD_RES (2), (2): Xaa is C or S

SEQ ID NO: 82285 - protein, 26 aa, Artificial Sequence
  Cyclic GFR-binding peptide
RVHHEPLPVVYYEYVRKKPKLEQLSN

SEQ ID NO: 82286 - protein, 38 aa, Artificial Sequence; identical to SEQ ID NO: 30847
  Cyclic GFR-binding peptide
  MOD_RES (37), (37): Xaa is C or S

SEQ ID NO: 82287 - protein, 27 aa, Artificial Sequence
  Cyclic GFR-binding peptide
LRSVKVAKVDDSSNVIKEVQVNMVVRS

SEQ ID NO: 82288 - protein, 37 aa, Artificial Sequence; identical to SEQ ID NO: 30851
  Cyclic GFR-binding peptide
  MOD_RES (3), (4), (35), (37): Xaa is C or S

SEQ ID NO: 82289 - protein, 38 aa, Artificial Sequence; identical to SEQ ID NO: 30852
  Cyclic GFR-binding peptide
  MOD_RES (3), (4), (35), (37): Xaa is C or S

SEQ ID NO: 82290 - protein, 36 aa, Artificial Sequence; identical to SEQ ID NO: 30853
  Cyclic GFR-binding peptide
  MOD_RES (5), (6): Xaa is C or S

SEQ ID NO: 82291 - protein, 30 aa, Artificial Sequence
  Cyclic GFR-binding peptide
  MOD_RES (3), (4): Xaa is C or S
SPXXVPQDLSNITIQIMVGRTPKVIGEMSM

SEQ ID NO: 82292 - protein, 27 aa, Artificial Sequence
  Cyclic GFR-binding peptide
QDLRSVKIAKVIGKTPKIKEVQVMIVK

SEQ ID NO: 82293 - protein, 35 aa, Artificial Sequence; identical to SEQ ID NO: 30855
  Cyclic GFR-binding peptide
  MOD_RES (4), (5): Xaa is C or S

SEQ ID NO: 82294 - protein, 34 aa, Artificial Sequence
  Cyclic GFR-binding peptide
  MOD_RES (5), (6): Xaa is C or S
VPKPXXAPTKLRSVKVAKVDDSSNVIKEVQVNMV

SEQ ID NO: 82295 - protein, 34 aa, Artificial Sequence
  Cyclic GFR-binding peptide
  MOD_RES (4), (4): Xaa is C or S
GLEXVPTEEEPLPMVYYRIKPHQGQHEQLSNFLQ

SEQ ID NO: 82296 - protein, 27 aa, Artificial Sequence
  Cyclic GFR-binding peptide
LRSVKVAKVDDSSNVIKEVQVNMVVRA

SEQ ID NO: 82297 - protein, 32 aa, Artificial Sequence
  Cyclic GFR-binding peptide
  MOD_RES (6), (7): Xaa is C or S
ASAAPXXVPQALRPVQIRKIVGRKPKVKKATV

SEQ ID NO: 82298 - protein, 29 aa, Artificial Sequence
  Cyclic GFR-binding peptide
  MOD_RES (2), (3): Xaa is C or S
AXXVPTELRPVQMRKIDENEKVVKKATVD

SEQ ID NO: 82299 - protein, 29 aa, Artificial Sequence
  Cyclic GFR-binding peptide
TEEEPLTMLYYRIKPHQGQHEQLSNFLQH

SEQ ID NO: 82300 - protein, 27 aa, Artificial Sequence
  Cyclic GFR-binding peptide
PTEEEPLPMVYYRIKPHQGQHEQLSNF

SEQ ID NO: 82301 - protein, 36 aa, Artificial Sequence; identical to SEQ ID NO: 30862
  Cyclic GFR-binding peptide
  MOD_RES (4), (5), (36): Xaa is C or S

SEQ ID NO: 82302 - protein, 42 aa, Artificial Sequence; identical to SEQ ID NO: 30866
  Cyclic GFR-binding peptide
  MOD_RES (5), (42): Xaa is C or S

SEQ ID NO: 82303 - protein, 32 aa, Artificial Sequence
  Cyclic GFR-binding peptide
  MOD_RES (32), (32): Xaa is C or S
HHEPLPVVYYEYVRKKPKLEQLSNRLEEHLEX

SEQ ID NO: 82304 - protein, 32 aa, Artificial Sequence; identical to SEQ ID NO: 30871
  Cyclic GFR-binding peptide

SEQ ID NO: 82305 - protein, 31 aa, Artificial Sequence
  Cyclic GFR-binding peptide
TEEEPLPMVYYRIKPHQGQHEQLSNFLQHNK

SEQ ID NO: 82306 - protein, 36 aa, Artificial Sequence; identical to SEQ ID NO: 30875
  Cyclic GFR-binding peptide
  MOD_RES (5), (6): Xaa is C or S

SEQ ID NO: 82307 - protein, 31 aa, Artificial Sequence
  Cyclic GFR-binding peptide
  MOD_RES (30), (30): Xaa is C or S
PQALRPVQIRKIVGRKPKVKKATVMIVRSXK

SEQ ID NO: 82308 - protein, 35 aa, Artificial Sequence
  Cyclic GFR-binding peptide
  MOD_RES (4), (4): Xaa is C or S
GLEXVPTEEEPLPMVYYRIKPHQGQHEQLSNFLQH

SEQ ID NO: 82309 - protein, 40 aa, Artificial Sequence; identical to SEQ ID NO: 30877
  Cyclic GFR-binding peptide
  MOD_RES (3), (40): Xaa is C or S

SEQ ID NO: 82310 - protein, 37 aa, Artificial Sequence; identical to SEQ ID NO: 30878
  Cyclic GFR-binding peptide
  MOD_RES (4), (36): Xaa is C or S

SEQ ID NO: 82311 - protein, 28 aa, Artificial Sequence
  Cyclic GFR-binding peptide
PTQLRSVKVAKVDDSSNVIKEVQVNMVV

SEQ ID NO: 82312 - protein, 23 aa, Artificial Sequence
  Cyclic GFR-binding peptide
RSVKVAKVDDSSNVIKEVQVNMV

SEQ ID NO: 82313 - protein, 31 aa, Artificial Sequence
  Cyclic GFR-binding peptide
  MOD_RES (31), (31): Xaa is C or S
PTKLRPVQVRKIDDSSNVIKKATVNMVVRSX

SEQ ID NO: 82314 - protein, 29 aa, Artificial Sequence
  Cyclic GFR-binding peptide
VQLEPLTVLYYEIVRKKPIFEQLSNTLED

SEQ ID NO: 82315 - protein, 34 aa, Artificial Sequence
  Cyclic GFR-binding peptide
  MOD_RES (32), (34): Xaa is C or S
TEEEPLPMVYYRIKPHQGQHEQLSNFLQHNKXEX

SEQ ID NO: 82316 - protein, 26 aa, Artificial Sequence
  Cyclic GFR-binding peptide
QLEPLPVVYYEIVRKKPIFEQLSNTL

SEQ ID NO: 82317 - protein, 31 aa, Artificial Sequence
  Cyclic GFR-binding peptide
  MOD_RES (2), (3): Xaa is C or S
PXXAPTQLRSVKVAKVDDSSNVIKEVQVNMV

SEQ ID NO: 82318 - protein, 31 aa, Artificial Sequence
  Cyclic GFR-binding peptide
EPLPMVYYRIKPHQGQHEQLSNAAAAAAAAA

SEQ ID NO: 82319 - protein, 30 aa, Artificial Sequence
  Cyclic GFR-binding peptide
  MOD_RES (30), (30): Xaa is C or S
EPLTVLYYEYVRKKPKLEQLSNRLEEHLEX

SEQ ID NO: 82320 - protein, 30 aa, Artificial Sequence
  Cyclic GFR-binding peptide
TEEEPLTMLYYRIKPHQGQHEQLSNFLQHN

SEQ ID NO: 82321 - protein, 32 aa, Artificial Sequence
  Cyclic GFR-binding peptide
  MOD_RES (31), (31): Xaa is C or S
PTELRSVKMAKVDEYDKVVKEVQVEMVVEGXG

SEQ ID NO: 82322 - protein, 27 aa, Artificial Sequence
  Cyclic GFR-binding peptide
  MOD_RES (26), (26): Xaa is C or S
RSVKIAKVVGRKPKVKEVQVMIVRSXK

SEQ ID NO: 82323 - protein, 30 aa, Artificial Sequence
  Cyclic GFR-binding peptide
  MOD_RES (5), (5): Xaa is C or S
TKPTXAPTKLRPVQVRKIDDSSNVIKKATV

SEQ ID NO: 82324 - protein, 28 aa, Artificial Sequence
  Cyclic GFR-binding peptide
EPLTVLYYEIVRKKPIFEQLSNTLEDHL

SEQ ID NO: 82325 - protein, 32 aa, Artificial Sequence
  Cyclic GFR-binding peptide
  MOD_RES (2), (3): Xaa is C or S
PXXVPQALRPVQIRKIVGRKPKVKKATVMIVR

SEQ ID NO: 82326 - protein, 29 aa, Artificial Sequence
  Cyclic GFR-binding peptide
  MOD_RES (29), (29): Xaa is C or S
KLRSVKVAKVDDSSNVIKEVQVNMVVRSX

SEQ ID NO: 82327 - protein, 38 aa, Artificial Sequence; identical to SEQ ID NO: 30901
  Cyclic GFR-binding peptide
  MOD_RES (36), (38): Xaa is C or S

SEQ ID NO: 82328 - protein, 38 aa, Artificial Sequence; identical to SEQ ID NO: 30902
  Cyclic GFR-binding peptide
  MOD_RES (3), (4), (35), (37): Xaa is C or S

SEQ ID NO: 82329 - protein, 40 aa, Artificial Sequence; identical to SEQ ID NO: 30903
  Cyclic GFR-binding peptide
  MOD_RES (6), (38), (40): Xaa is C or S

SEQ ID NO: 82330 - protein, 23 aa, Artificial Sequence
  Cyclic GFR-binding peptide
EPLTVLYYEYVRKKPKLEQLSNR

SEQ ID NO: 82331 - protein, 27 aa, Artificial Sequence
  Cyclic GFR-binding peptide
  MOD_RES (1), (1): Xaa is C or S
XVPTELRPVQMRKIDENEKVVKKATVD

SEQ ID NO: 82332 - protein, 26 aa, Artificial Sequence
  Cyclic GFR-binding peptide
PTEEEPLTMLYYRIKPHQGQHEQLSN

SEQ ID NO: 82333 - protein, 34 aa, Artificial Sequence
  Cyclic GFR-binding peptide
  MOD_RES (5), (6): Xaa is C or S
SAAPXXVPQALSNITIQIMVGRKPKVIGEMSMIV

SEQ ID NO: 82334 - protein, 31 aa, Artificial Sequence; identical to SEQ ID NO: 30907
  Cyclic GFR-binding peptide
  MOD_RES (1), (1): Xaa is C or S

SEQ ID NO: 82335 - protein, 29 aa, Artificial Sequence
  Cyclic GFR-binding peptide
PTELRPVQMRKIDEYDKVVKKATVEMVVE

SEQ ID NO: 82336 - protein, 33 aa, Artificial Sequence; identical to SEQ ID NO: 30908
  Cyclic GFR-binding peptide
  MOD_RES (32), (32): Xaa is C or S

SEQ ID NO: 82337 - protein, 25 aa, Artificial Sequence
  Cyclic GFR-binding peptide
APTQLRPVQVRKIDDSSNVIKKATV

SEQ ID NO: 82338 - protein, 25 aa, Artificial Sequence
  Cyclic GFR-binding peptide
DLRSVKIAKVVGRTPKVKEVQVMVV

SEQ ID NO: 82339 - protein, 32 aa, Artificial Sequence; identical to SEQ ID NO: 30922
  Cyclic GFR-binding peptide
  MOD_RES (1), (2): Xaa is C or S

SEQ ID NO: 82340 - protein, 29 aa, Artificial Sequence
  Cyclic GFR-binding peptide
  MOD_RES (29), (29): Xaa is C or S
ELRPVQMRKIDEYDKVVKKATVEMVVEGX

SEQ ID NO: 82341 - protein, 28 aa, Artificial Sequence
  Cyclic GFR-binding peptide
  MOD_RES (28), (28): Xaa is C or S
LRSVKVAKVDDSSNVIKEVQVNMVVRAX

SEQ ID NO: 82342 - protein, 35 aa, Artificial Sequence; identical to SEQ ID NO: 30927
  Cyclic GFR-binding peptide
  MOD_RES (1), (2), (34): Xaa is C or S

SEQ ID NO: 82343 - protein, 29 aa, Artificial Sequence
  Cyclic GFR-binding peptide
  MOD_RES (27), (29): Xaa is C or S
SNITVQIMDDSSNVIIGEMSNMVVRAXGX

SEQ ID NO: 82344 - protein, 30 aa, Artificial Sequence
  Cyclic GFR-binding peptide
  MOD_RES (2), (2): Xaa is C or S
TXAPTKLRSVKVAKVDDSSNVIKEVQVNMV

SEQ ID NO: 82345 - protein, 30 aa, Artificial Sequence
  Cyclic GFR-binding peptide
  MOD_RES (28), (30): Xaa is C or S
DLSNITIQIMIGKTPKIIGEMSMIVKSXKX

SEQ ID NO: 82346 - protein, 31 aa, Artificial Sequence
  Cyclic GFR-binding peptide
QVQLEPLPVVYYEIVRKKPIFEQLSNTLEDH

SEQ ID NO: 82347 - protein, 24 aa, Artificial Sequence
  Cyclic GFR-binding peptide
TELRPVQMRKIDEYDKVVKKATVE

SEQ ID NO: 82348 - protein, 36 aa, Artificial Sequence
  Cyclic GFR-binding peptide
  MOD_RES (33), (35): Xaa is C or S
VHHEPLTVLYYEYVRKKPKLEQLSNRLEEHLEXAXA

SEQ ID NO: 82349 - protein, 27 aa, Artificial Sequence
  Cyclic GFR-binding peptide
PQALSNITIQIMVGRKPKVIGEMSMIV

SEQ ID NO: 82350 - protein, 34 aa, Artificial Sequence
  Cyclic GFR-binding peptide
  MOD_RES (5), (6): Xaa is C or S
VPKPXXAPTKLSNITVQIMDDSSNVIIGEMSNMV

SEQ ID NO: 82351 - protein, 30 aa, Artificial Sequence
  Cyclic GFR-binding peptide
  MOD_RES (30), (30): Xaa is C or S
TQLRPVQVRKIDDSSNVIKKATVNMVVRAX

SEQ ID NO: 82352 - protein, 34 aa, Artificial Sequence; identical to SEQ ID NO: 30933
  Cyclic GFR-binding peptide
  MOD_RES (2), (3), (34): Xaa is C or S

SEQ ID NO: 82353 - protein, 35 aa, Artificial Sequence
  Cyclic GFR-binding peptide
  MOD_RES (6), (7): Xaa is C or S
KIPKAXXVPTELRPVQMRKIDENEKVVKKATVDMV

SEQ ID NO: 82354 - protein, 33 aa, Artificial Sequence; identical to SEQ ID NO: 30935
  Cyclic GFR-binding peptide
  MOD_RES (32), (32): Xaa is C or S

SEQ ID NO: 82355 - protein, 28 aa, Artificial Sequence
  Cyclic GFR-binding peptide
QDLRPVQIRKIVGRTPKVKKATVMVVKS

SEQ ID NO: 82356 - protein, 25 aa, Artificial Sequence
  Cyclic GFR-binding peptide
EPLPMVYYRIKPHQGQHEQLSNFLQ

SEQ ID NO: 82357 - protein, 32 aa, Artificial Sequence
  Cyclic GFR-binding peptide
  MOD_RES (29), (31): Xaa is C or S
QDLRSVKIAKVVGRTPKVKEVQVMVVKSXKXS

SEQ ID NO: 82358 - protein, 31 aa, Artificial Sequence
  Cyclic GFR-binding peptide
  MOD_RES (1), (2): Xaa is C or S
XXVPTELRSVKMAKVDENEKVVKEVQVDMVV

SEQ ID NO: 82359 - protein, 34 aa, Artificial Sequence
  Cyclic GFR-binding peptide
  MOD_RES (6), (7): Xaa is C or S
YVPKPXXAPTKLRSVKVAKVDDSSNVIKEVQVNM

SEQ ID NO: 82360 - protein, 31 aa, Artificial Sequence
  Cyclic GFR-binding peptide
SRVHHEPLPVVYYEYVRKKPKLEQLSNRLEE

SEQ ID NO: 82361 - protein, 28 aa, Artificial Sequence
  Cyclic GFR-binding peptide
  MOD_RES (2), (2): Xaa is C or S
TXAPTKLSNITVQIMDDSSNVIIGEMSN

SEQ ID NO: 82362 - protein, 29 aa, Artificial Sequence
  Cyclic GFR-binding peptide
EPLPVVYYEIVRKKPIFEQLSNTLEDHLA

SEQ ID NO: 82363 - protein, 33 aa, Artificial Sequence
  Cyclic GFR-binding peptide
  MOD_RES (6), (7): Xaa is C or S
ASASPXXVSQDLSNITIQIMIGKTPKIIGEMSM

SEQ ID NO: 82364 - protein, 36 aa, Artificial Sequence; identical to SEQ ID NO: 30944
  Cyclic GFR-binding peptide
  MOD_RES (1), (2), (34), (36): Xaa is C or S

SEQ ID NO: 82365 - protein, 36 aa, Artificial Sequence
  Cyclic GFR-binding peptide
  MOD_RES (4), (4): Xaa is C or S
SVKXQPSRVHHEPLTVLYYEYVRKKPKLEQLSNRLE

SEQ ID NO: 82366 - protein, 28 aa, Artificial Sequence
  Cyclic GFR-binding peptide
  MOD_RES (28), (28): Xaa is C or S
LRPVQMRKIDENEKVVKKATVDMVVEGX

SEQ ID NO: 82367 - protein, 34 aa, Artificial Sequence
  Cyclic GFR-binding peptide
  MOD_RES (4), (5): Xaa is C or S
AAPXXVPQALSNITIQIMVGRKPKVIGEMSMIVR

SEQ ID NO: 82368 - protein, 37 aa, Artificial Sequence; identical to SEQ ID NO: 30948
  Cyclic GFR-binding peptide
  MOD_RES (3), (3): Xaa is C or S

SEQ ID NO: 82369 - protein, 33 aa, Artificial Sequence; identical to SEQ ID NO: 30949
  Cyclic GFR-binding peptide
  MOD_RES (31), (33): Xaa is C or S

SEQ ID NO: 82370 - protein, 23 aa, Artificial Sequence
  Cyclic GFR-binding peptide
LRPVQVRKIDDSSNVIKKATVNM

SEQ ID NO: 82371 - protein, 28 aa, Artificial Sequence
  Cyclic GFR-binding peptide
  MOD_RES (28), (28): Xaa is C or S
DLRPVQIRKIIGKTPKIKKATVMIVKSX

SEQ ID NO: 82372 - protein, 32 aa, Artificial Sequence
  Cyclic GFR-binding peptide
  MOD_RES (31), (31): Xaa is C or S
HEPLTVLYYEYVRKKPKLEQLSNRLEEHLEXA

SEQ ID NO: 82373 - protein, 28 aa, Artificial Sequence
  Cyclic GFR-binding peptide
PSRVHHEPLTVLYYEYVRKKPKLEQLSN

SEQ ID NO: 82374 - protein, 37 aa, Artificial Sequence; identical to SEQ ID NO: 30954
  Cyclic GFR-binding peptide
  MOD_RES (4), (5), (37): Xaa is C or S

SEQ ID NO: 82375 - protein, 27 aa, Artificial Sequence
  Cyclic GFR-binding peptide
  MOD_RES (26), (26): Xaa is C or S
RPVQIRKIIGKTPKIKKATVMIVKSXK

SEQ ID NO: 82376 - protein, 36 aa, Artificial Sequence; identical to SEQ ID NO: 30955
  Cyclic GFR-binding peptide
  MOD_RES (2), (34), (36): Xaa is C or S

SEQ ID NO: 82377 - protein, 28 aa, Artificial Sequence
  Cyclic GFR-binding peptide
  MOD_RES (27), (27): Xaa is C or S
RSVKMAKVDEYDKVVKEVQVEMVVEGXG

SEQ ID NO: 82378 - protein, 39 aa, Artificial Sequence; identical to SEQ ID NO: 30956
  Cyclic GFR-binding peptide
  MOD_RES (5), (6), (37), (39): Xaa is C or S

SEQ ID NO: 82379 - protein, 28 aa, Artificial Sequence
  Cyclic GFR-binding peptide
EPLTVLYYEYVRKKPKLEQLSNRLEEHL

SEQ ID NO: 82380 - protein, 25 aa, Artificial Sequence
  Cyclic GFR-binding peptide
KLRSVKVAKVDDSSNVIKEVQVNMV

SEQ ID NO: 82381 - protein, 35 aa, Artificial Sequence
  Cyclic GFR-binding peptide
  MOD_RES (5), (6): Xaa is C or S
IPKAXXVPTELRPVQMRKIDENEKVVKKATVDMVV

SEQ ID NO: 82382 - protein, 39 aa, Artificial Sequence; identical to SEQ ID NO: 30961
  Cyclic GFR-binding peptide
  MOD_RES (6), (6): Xaa is C or S

SEQ ID NO: 82383 - protein, 36 aa, Artificial Sequence; identical to SEQ ID NO: 30960
  Cyclic GFR-binding peptide
  MOD_RES (5), (5): Xaa is C or S

SEQ ID NO: 82384 - protein, 33 aa, Artificial Sequence
  Cyclic GFR-binding peptide
  MOD_RES (31), (33): Xaa is C or S
PTELRSVKMAKVDENEKVVKEVQVDMVVEGXGX

SEQ ID NO: 82385 - protein, 31 aa, Artificial Sequence
  Cyclic GFR-binding peptide
  MOD_RES (2), (2): Xaa is C or S
EXVPTEEEPLTMLYYRIKPHQGQHEQLSNFL

SEQ ID NO: 82386 - protein, 32 aa, Artificial Sequence; identical to SEQ ID NO: 30979
  Cyclic GFR-binding peptide
  MOD_RES (32), (32): Xaa is C or S

SEQ ID NO: 82387 - protein, 26 aa, Artificial Sequence
  Cyclic GFR-binding peptide
  MOD_RES (1), (1): Xaa is C or S
XVPQDLRPVQIRKIVGRTPKVKKATV

SEQ ID NO: 82388 - protein, 37 aa, Artificial Sequence; identical to SEQ ID NO: 30981
  Cyclic GFR-binding peptide
  MOD_RES (3), (4), (35), (37): Xaa is C or S

SEQ ID NO: 82389 - protein, 31 aa, Artificial Sequence
  Cyclic GFR-binding peptide
  MOD_RES (28), (30): Xaa is C or S
LSNITVQIMDDSSNVIIGEMSNMVVRAXGXH

SEQ ID NO: 82390 - protein, 32 aa, Artificial Sequence
  Cyclic GFR-binding peptide
  MOD_RES (29), (31): Xaa is C or S
KLSNITVQIMDDSSNVIIGEMSNMVVRSXGXH

SEQ ID NO: 82391 - protein, 36 aa, Artificial Sequence; identical to SEQ ID NO: 30988
  Cyclic GFR-binding peptide
  MOD_RES (1), (2), (34), (36): Xaa is C or S

SEQ ID NO: 82392 - protein, 30 aa, Artificial Sequence
  Cyclic GFR-binding peptide
PTELRSVKMAKVDEYDKVVKEVQVEMVVEG

SEQ ID NO: 82393 - protein, 23 aa, Artificial Sequence
  Cyclic GFR-binding peptide
LRSVKIAKVVGRTPKVKEVQVMV

SEQ ID NO: 82394 - protein, 32 aa, Artificial Sequence
  Cyclic GFR-binding peptide
  MOD_RES (29), (31): Xaa is C or S
ELRPVQMRKIDENEKVVKKATVDMVVEGXGXR

SEQ ID NO: 82395 - protein, 33 aa, Artificial Sequence; identical to SEQ ID NO: 30998
  Cyclic GFR-binding peptide
  MOD_RES (2), (3): Xaa is C or S

SEQ ID NO: 82396 - protein, 22 aa, Artificial Sequence
  Cyclic GFR-binding peptide
ELRSVKMAKVDENEKVVKEVQV

SEQ ID NO: 82397 - protein, 21 aa, Artificial Sequence
  Cyclic GFR-binding peptide
LRPVQVRKIDDSSNVIKKATV

SEQ ID NO: 82398 - protein, 33 aa, Artificial Sequence; identical to SEQ ID NO: 31005
  Cyclic GFR-binding peptide
  MOD_RES (1), (32): Xaa is C or S

SEQ ID NO: 82399 - protein, 39 aa, Artificial Sequence; identical to SEQ ID NO: 31006
  Cyclic GFR-binding peptide
  MOD_RES (4), (36), (38): Xaa is C or S

SEQ ID NO: 82400 - protein, 26 aa, Artificial Sequence
  Cyclic GFR-binding peptide
PQALRSVKIAKVVGRKPKVKEVQVMI

SEQ ID NO: 82401 - protein, 31 aa, Artificial Sequence
  Cyclic GFR-binding peptide
  MOD_RES (2), (3): Xaa is C or S
PXXVPQDLRPVQIRKIVGRTPKVKKATVMVV

SEQ ID NO: 82402 - protein, 22 aa, Artificial Sequence
  Cyclic GFR-binding peptide
LRSVKIAKVVGRKPKVKEVQVM

SEQ ID NO: 82403 - protein, 32 aa, Artificial Sequence
  Cyclic GFR-binding peptide
  MOD_RES (5), (6): Xaa is C or S
IPKAXXVPTELRPVQMRKIDEYDKVVKKATVE

SEQ ID NO: 82404 - protein, 34 aa, Artificial Sequence
  Cyclic GFR-binding peptide
  MOD_RES (2), (2): Xaa is C or S
QXRPTQVQLEPLTVLYYEIVRKKPIFEQLSNTLE

SEQ ID NO: 82405 - protein, 36 aa, Artificial Sequence; identical to SEQ ID NO: 31009
  Cyclic GFR-binding peptide
  MOD_RES (3), (4), (36): Xaa is C or S

SEQ ID NO: 82406 - protein, 32 aa, Artificial Sequence
  Cyclic GFR-binding peptide
  MOD_RES (3), (3): Xaa is C or S
PTXAPTKLRPVQVRKIDDSSNVIKKATVNMVV

SEQ ID NO: 82407 - protein, 35 aa, Artificial Sequence; identical to SEQ ID NO: 31012
  Cyclic GFR-binding peptide
  MOD_RES (5), (5): Xaa is C or S

SEQ ID NO: 82408 - protein, 37 aa, Artificial Sequence; identical to SEQ ID NO: 31014
  Cyclic GFR-binding peptide
  MOD_RES (2), (3), (35), (37): Xaa is C or S

SEQ ID NO: 82409 - protein, 28 aa, Artificial Sequence
  Cyclic GFR-binding peptide
TQLRSVKVAKVDDSSNVIKEVQVNMVVR

SEQ ID NO: 82410 - protein, 36 aa, Artificial Sequence; identical to SEQ ID NO: 31017
  Cyclic GFR-binding peptide
  MOD_RES (5), (6): Xaa is C or S

SEQ ID NO: 82411 - protein, 38 aa, Artificial Sequence; identical to SEQ ID NO: 31019
  Cyclic GFR-binding peptide
  MOD_RES (4), (5), (36), (38): Xaa is C or S

SEQ ID NO: 82412 - protein, 29 aa, Artificial Sequence
  Cyclic GFR-binding peptide
TQLRPVQVRKIDDSSNVIKKATVNMVVRA

SEQ ID NO: 82413 - protein, 29 aa, Artificial Sequence
  Cyclic GFR-binding peptide
RVHHEPLTVLYYEYVRKKPKLEQLSNRLE

SEQ ID NO: 82414 - protein, 25 aa, Artificial Sequence
  Cyclic GFR-binding peptide
ALRPVQIRKIVGRKPKVKKATVMIV

SEQ ID NO: 82415 - protein, 31 aa, Artificial Sequence
  Cyclic GFR-binding peptide
PTEEEPLPMVYYRIKPHQGQHEQLSNFLQHN

SEQ ID NO: 82416 - protein, 33 aa, Artificial Sequence; identical to SEQ ID NO: 31024
  Cyclic GFR-binding peptide
  MOD_RES (1), (32): Xaa is C or S

SEQ ID NO: 82417 - protein, 33 aa, Artificial Sequence
  Cyclic GFR-binding peptide
  MOD_RES (30), (32): Xaa is C or S
PQALSNITIQIMVGRKPKVIGEMSMIVRSXKXS

SEQ ID NO: 82418 - protein, 32 aa, Artificial Sequence
  Cyclic GFR-binding peptide
  MOD_RES (3), (3): Xaa is C or S
VKXQPSRVHHEPLPVVYYEYVRKKPKLEQLSN

SEQ ID NO: 82419 - protein, 35 aa, Artificial Sequence; identical to SEQ ID NO: 31026
  Cyclic GFR-binding peptide
  MOD_RES (32), (34): Xaa is C or S

SEQ ID NO: 82420 - protein, 36 aa, Artificial Sequence; identical to SEQ ID NO: 31028
  Cyclic GFR-binding peptide
  MOD_RES (1), (2), (34), (36): Xaa is C or S

SEQ ID NO: 82421 - protein, 33 aa, Artificial Sequence
  Cyclic GFR-binding peptide
  MOD_RES (30), (32): Xaa is C or S
SQDLSNITIQIMIGKTPKIIGEMSMIVKSXKXS

SEQ ID NO: 82422 - protein, 31 aa, Artificial Sequence
  Cyclic GFR-binding peptide
  MOD_RES (2), (2): Xaa is C or S
KXQPSRVHHEPLTVLYYEYVRKKPKLEQLSN

SEQ ID NO: 82423 - protein, 30 aa, Artificial Sequence
  Cyclic GFR-binding peptide
SRVHHEPLPVVYYEYVRKKPKLEQLSNRLE

SEQ ID NO: 82424 - protein, 37 aa, Artificial Sequence; identical to SEQ ID NO: 31031
  Cyclic GFR-binding peptide
  MOD_RES (4), (5), (37): Xaa is C or S

SEQ ID NO: 82425 - protein, 22 aa, Artificial Sequence
  Cyclic GFR-binding peptide
RPVQIRKIVGRTPKVKKATVMV

SEQ ID NO: 82426 - protein, 38 aa, Artificial Sequence; identical to SEQ ID NO: 31034
  Cyclic GFR-binding peptide
  MOD_RES (5), (37): Xaa is C or S

SEQ ID NO: 82427 - protein, 41 aa, Artificial Sequence; identical to SEQ ID NO: 31036
  Cyclic GFR-binding peptide
  MOD_RES (1), (38), (40): Xaa is C or S

SEQ ID NO: 82428 - protein, 28 aa, Artificial Sequence
  Cyclic GFR-binding peptide
  MOD_RES (27), (27): Xaa is C or S
RPVQMRKIDENEKVVKKATVDMVVEGXG

SEQ ID NO: 82429 - protein, 34 aa, Artificial Sequence
  Cyclic GFR-binding peptide
  MOD_RES (5), (6): Xaa is C or S
IPKAXXVPTELRSVKMAKVDENEKVVKEVQVDMV

SEQ ID NO: 82430 - protein, 35 aa, Artificial Sequence; identical to SEQ ID NO: 31044
  Cyclic GFR-binding peptide
  MOD_RES (1), (2), (34): Xaa is C or S

SEQ ID NO: 82431 - protein, 34 aa, Artificial Sequence
  Cyclic GFR-binding peptide
  MOD_RES (31), (33): Xaa is C or S
PTKLRSVKVAKVDDSSNVIKEVQVNMVVRSXGXH

SEQ ID NO: 82432 - protein, 35 aa, Artificial Sequence
  Cyclic GFR-binding peptide
  MOD_RES (5), (6): Xaa is C or S
VPKPXXAPTKLRSVKVAKVDDSSNVIKEVQVNMVV

SEQ ID NO: 82433 - protein, 35 aa, Artificial Sequence
  Cyclic GFR-binding peptide
  MOD_RES (3), (3): Xaa is C or S
VQXRPTQVQLEPLTVLYYEIVRKKPIFEQLSNTLE

SEQ ID NO: 82434 - protein, 32 aa, Artificial Sequence
  Cyclic GFR-binding peptide
  MOD_RES (3), (4): Xaa is C or S
KPXXAPTKLRPVQVRKIDDSSNVIKKATVNMV

SEQ ID NO: 82435 - protein, 25 aa, Artificial Sequence
  Cyclic GFR-binding peptide
EEPLPMVYYRIKPHQGQHEQLSNFL

SEQ ID NO: 82436 - protein, 34 aa, Artificial Sequence
  Cyclic GFR-binding peptide
  MOD_RES (32), (34): Xaa is C or S
TEEEPLTMLYYRIKPHQGQHEQLSNFLQHNKXEX

SEQ ID NO: 82437 - protein, 32 aa, Artificial Sequence; identical to SEQ ID NO: 31051
  Cyclic GFR-binding peptide
  MOD_RES (31), (31): Xaa is C or S

SEQ ID NO: 82438 - protein, 33 aa, Artificial Sequence; identical to SEQ ID NO: 31052
  Cyclic GFR-binding peptide
  MOD_RES (32), (32): Xaa is C or S

SEQ ID NO: 82439 - protein, 22 aa, Artificial Sequence
  Cyclic GFR-binding peptide
ALRPVQIRKIVGRKPKVKKATV

SEQ ID NO: 82440 - protein, 27 aa, Artificial Sequence
  Cyclic GFR-binding peptide
  MOD_RES (1), (1): Xaa is C or S
XVPTELRSVKMAKVDENEKVVKEVQVD

SEQ ID NO: 82441 - protein, 33 aa, Artificial Sequence
  Cyclic GFR-binding peptide
  MOD_RES (6), (6): Xaa is C or S
VTKPTXAPTKLSNITVQIMDDSSNVIIGEMSNM

SEQ ID NO: 82442 - protein, 33 aa, Artificial Sequence
  Cyclic GFR-binding peptide
  MOD_RES (5), (6): Xaa is C or S
VPKPXXAPTQLRSVKVAKVDDSSNVIKEVQVNM

SEQ ID NO: 82443 - protein, 34 aa, Artificial Sequence
  Cyclic GFR-binding peptide
  MOD_RES (5), (5): Xaa is C or S
RNVQXRPTQVQLEPLTVLYYEIVRKKPIFEQLSN

SEQ ID NO: 82444 - protein, 34 aa, Artificial Sequence
  Cyclic GFR-binding peptide
  MOD_RES (5), (5): Xaa is C or S
EGLEXVPTEEEPLPMVYYRIKPHQGQHEQLSNFL

SEQ ID NO: 82445 - protein, 33 aa, Artificial Sequence; identical to SEQ ID NO: 31061
  Cyclic GFR-binding peptide
  MOD_RES (1), (32): Xaa is C or S

SEQ ID NO: 82446 - protein, 25 aa, Artificial Sequence
  Cyclic GFR-binding peptide
VPQDLSNITIQIMVGRTPKVIGEMS

SEQ ID NO: 82447 - protein, 28 aa, Artificial Sequence
  Cyclic GFR-binding peptide
QDLRSVKIAKVVGRTPKVKEVQVMVVKS

SEQ ID NO: 82448 - protein, 40 aa, Artificial Sequence; identical to SEQ ID NO: 31066
  Cyclic GFR-binding peptide
  MOD_RES (6), (7), (39): Xaa is C or S

SEQ ID NO: 82449 - protein, 34 aa, Artificial Sequence; identical to SEQ ID NO: 31068
  Cyclic GFR-binding peptide
  MOD_RES (32), (34): Xaa is C or S

SEQ ID NO: 82450 - protein, 37 aa, Artificial Sequence; identical to SEQ ID NO: 31067
  Cyclic GFR-binding peptide
  MOD_RES (4), (5), (36): Xaa is C or S

SEQ ID NO: 82451 - protein, 28 aa, Artificial Sequence
  Cyclic GFR-binding peptide
TKLRPVQVRKIDDSSNVIKKATVNMVVR

SEQ ID NO: 82452 - protein, 31 aa, Artificial Sequence
  Cyclic GFR-binding peptide
  MOD_RES (2), (3): Xaa is C or S
PXXVSQDLRSVKIAKVIGKTPKIKEVQVMIV

SEQ ID NO: 82453 - protein, 35 aa, Artificial Sequence; identical to SEQ ID NO: 31071
  Cyclic GFR-binding peptide
  MOD_RES (4), (5): Xaa is C or S

SEQ ID NO: 82454 - protein, 32 aa, Artificial Sequence
  Cyclic GFR-binding peptide
  MOD_RES (3), (3): Xaa is C or S
LEXVPTEEEPLPMVYYRIKPHQGQHEQLSNFL

SEQ ID NO: 82455 - protein, 24 aa, Artificial Sequence
  Cyclic GFR-binding peptide
ELRPVQMRKIDEYDKVVKKATVEM

SEQ ID NO: 82456 - protein, 35 aa, Artificial Sequence
  Cyclic GFR-binding peptide
  MOD_RES (5), (6): Xaa is C or S
IPKAXXVPTELRSVKMAKVDENEKVVKEVQVDMVV

SEQ ID NO: 82457 - protein, 26 aa, Artificial Sequence
  Cyclic GFR-binding peptide
RSVKVAKVDDSSNVIKEVQVNMVVRS

SEQ ID NO: 82458 - protein, 42 aa, Artificial Sequence; identical to SEQ ID NO: 31075
  Cyclic GFR-binding peptide
  MOD_RES (6), (7), (39), (41): Xaa is C or S

SEQ ID NO: 82459 - protein, 30 aa, Artificial Sequence
  Cyclic GFR-binding peptide
HEPLPVVYYEYVRKKPKLEQLSNRLEEHLE

SEQ ID NO: 82460 - protein, 35 aa, Artificial Sequence
  Cyclic GFR-binding peptide
  MOD_RES (5), (6): Xaa is C or S
VPKPXXAPTQLRSVKVAKVDDSSNVIKEVQVNMVV

SEQ ID NO: 82461 - protein, 38 aa, Artificial Sequence; identical to SEQ ID NO: 31080
  Cyclic GFR-binding peptide
  MOD_RES (4), (5), (37): Xaa is C or S

SEQ ID NO: 82462 - protein, 26 aa, Artificial Sequence
  Cyclic GFR-binding peptide
VPTELRPVQMRKIDENEKVVKKATVD

SEQ ID NO: 82463 - protein, 36 aa, Artificial Sequence; identical to SEQ ID NO: 31085
  Cyclic GFR-binding peptide
  MOD_RES (1), (2), (33), (35): Xaa is C or S

SEQ ID NO: 82464 - protein, 24 aa, Artificial Sequence
  Cyclic GFR-binding peptide
TQLRPVQVRKIDDSSNVIKKATVN

SEQ ID NO: 82465 - protein, 29 aa, Artificial Sequence
  Cyclic GFR-binding peptide
  MOD_RES (27), (29): Xaa is C or S
RSVKVAKVDDSSNVIKEVQVNMVVRSXGX

SEQ ID NO: 82466 - protein, 26 aa, Artificial Sequence
  Cyclic GFR-binding peptide
RSVKVAKVDDSSNVIKEVQVNMVVRA

SEQ ID NO: 82467 - protein, 32 aa, Artificial Sequence
  Cyclic GFR-binding peptide
  MOD_RES (3), (3): Xaa is C or S
VQXRPTQVQLEPLTVLYYEIVRKKPIFEQLSN

SEQ ID NO: 82468 - protein, 30 aa, Artificial Sequence
  Cyclic GFR-binding peptide
  MOD_RES (29), (29): Xaa is C or S
ELRPVQMRKIDENEKVVKKATVDMVVEGXG

SEQ ID NO: 82469 - protein, 26 aa, Artificial Sequence
  Cyclic GFR-binding peptide
  MOD_RES (26), (26): Xaa is C or S
SNITIQIMIGKTPKIIGEMSMIVKSX

SEQ ID NO: 82470 - protein, 21 aa, Artificial Sequence
  Cyclic GFR-binding peptide
SNITIQIMVGRKPKVIGEMSM

SEQ ID NO: 82471 - protein, 35 aa, Artificial Sequence; identical to SEQ ID NO: 31098
  Cyclic GFR-binding peptide
  MOD_RES (2), (3), (35): Xaa is C or S

SEQ ID NO: 82472 - protein, 37 aa, Artificial Sequence; identical to SEQ ID NO: 31099
  Cyclic GFR-binding peptide
  MOD_RES (3), (35), (37): Xaa is C or S

SEQ ID NO: 82473 - protein, 34 aa, Artificial Sequence; identical to SEQ ID NO: 31101
  Cyclic GFR-binding peptide
  MOD_RES (31), (33): Xaa is C or S

SEQ ID NO: 82474 - protein, 37 aa, Artificial Sequence; identical to SEQ ID NO: 31103
  Cyclic GFR-binding peptide
  MOD_RES (37), (37): Xaa is C or S

SEQ ID NO: 82475 - protein, 31 aa, Artificial Sequence
  Cyclic GFR-binding peptide
  MOD_RES (4), (5): Xaa is C or S
PKAXXVPTELSNITMQIMDEYDKVVIGEMSE

SEQ ID NO: 82476 - protein, 38 aa, Artificial Sequence; identical to SEQ ID NO: 31109
  Cyclic GFR-binding peptide
  MOD_RES (5), (5): Xaa is C or S

SEQ ID NO: 82477 - protein, 32 aa, Artificial Sequence
  Cyclic GFR-binding peptide
  MOD_RES (3), (4): Xaa is C or S
KAXXVPTELRPVQMRKIDENEKVVKKATVDMV

SEQ ID NO: 82478 - protein, 30 aa, Artificial Sequence
  Cyclic GFR-binding peptide
TQVQLEPLPVVYYEIVRKKPIFEQLSNTLE

SEQ ID NO: 82479 - protein, 29 aa, Artificial Sequence
  Cyclic GFR-binding peptide
  MOD_RES (3), (4): Xaa is C or S
SPXXVSQDLSNITIQIMIGKTPKIIGEMS

SEQ ID NO: 82480 - protein, 34 aa, Artificial Sequence; identical to SEQ ID NO: 31116
  Cyclic GFR-binding peptide
  MOD_RES (1), (2), (33): Xaa is C or S

SEQ ID NO: 82481 - protein, 33 aa, Artificial Sequence
  Cyclic GFR-binding peptide
  MOD_RES (30), (32): Xaa is C or S
TKLRPVQVRKIDDSSNVIKKATVNMVVRSXGXH

SEQ ID NO: 82482 - protein, 25 aa, Artificial Sequence
  Cyclic GFR-binding peptide
QDLSNITIQIMVGRTPKVIGEMSMV

SEQ ID NO: 82483 - protein, 26 aa, Artificial Sequence
  Cyclic GFR-binding peptide
VQLEPLPVVYYEIVRKKPIFEQLSNT

SEQ ID NO: 82484 - protein, 29 aa, Artificial Sequence
  Cyclic GFR-binding peptide
PTELRSVKMAKVDEYDKVVKEVQVEMVVE

SEQ ID NO: 82485 - protein, 27 aa, Artificial Sequence
  Cyclic GFR-binding peptide
  MOD_RES (1), (2): Xaa is C or S
XXVPQDLRPVQIRKIVGRTPKVKKATV

SEQ ID NO: 82486 - protein, 31 aa, Artificial Sequence
  Cyclic GFR-binding peptide
EPLPVVYYEYVRKKPKLEQLSNAAAAAAAAA

SEQ ID NO: 82487 - protein, 30 aa, Artificial Sequence
  Cyclic GFR-binding peptide
  MOD_RES (28), (30): Xaa is C or S
LSNITVQIMDDSSNVIIGEMSNMVVRSXGX

SEQ ID NO: 82488 - protein, 38 aa, Artificial Sequence; identical to SEQ ID NO: 31126
  Cyclic GFR-binding peptide
  MOD_RES (4), (5), (37): Xaa is C or S

SEQ ID NO: 82489 - protein, 32 aa, Artificial Sequence; identical to SEQ ID NO: 31128
  Cyclic GFR-binding peptide
  MOD_RES (31), (31): Xaa is C or S

SEQ ID NO: 82490 - protein, 37 aa, Artificial Sequence; identical to SEQ ID NO: 31130
  Cyclic GFR-binding peptide
  MOD_RES (5), (6), (37): Xaa is C or S

SEQ ID NO: 82491 - protein, 25 aa, Artificial Sequence
  Cyclic GFR-binding peptide
VSQDLRPVQIRKIIGKTPKIKKATV

SEQ ID NO: 82492 - protein, 35 aa, Artificial Sequence
  Cyclic GFR-binding peptide
  MOD_RES (5), (6): Xaa is C or S
VPKPXXAPTQLRPVQVRKIDDSSNVIKKATVNMVV

SEQ ID NO: 82493 - protein, 33 aa, Artificial Sequence
  Cyclic GFR-binding peptide
  MOD_RES (6), (7): Xaa is C or S
ASAAPXXVPQALRPVQIRKIVGRKPKVKKATVM

SEQ ID NO: 82494 - protein, 31 aa, Artificial Sequence; identical to SEQ ID NO: 31131
  Cyclic GFR-binding peptide
  MOD_RES (1), (1): Xaa is C or S

SEQ ID NO: 82495 - protein, 32 aa, Artificial Sequence
  Cyclic GFR-binding peptide
  MOD_RES (5), (6): Xaa is C or S
SASPXXVPQDLRPVQIRKIVGRTPKVKKATVM

SEQ ID NO: 82496 - protein, 24 aa, Artificial Sequence
  Cyclic GFR-binding peptide
ALRSVKIAKVVGRKPKVKEVQVMI

SEQ ID NO: 82497 - protein, 43 aa, Artificial Sequence; identical to SEQ ID NO: 31135
  Cyclic GFR-binding peptide
  MOD_RES (4), (41), (43): Xaa is C or S

SEQ ID NO: 82498 - protein, 27 aa, Artificial Sequence
  Cyclic GFR-binding peptide
TELRSVKMAKVDEYDKVVKEVQVEMVV

SEQ ID NO: 82499 - protein, 39 aa, Artificial Sequence; identical to SEQ ID NO: 31139
  Cyclic GFR-binding peptide
  MOD_RES (3), (4), (36), (38): Xaa is C or S

SEQ ID NO: 82500 - protein, 32 aa, Artificial Sequence
  Cyclic GFR-binding peptide
  MOD_RES (3), (3): Xaa is C or S
PTXAPTKLRSVKVAKVDDSSNVIKEVQVNMVV

SEQ ID NO: 82501 - protein, 34 aa, Artificial Sequence; identical to SEQ ID NO: 31141
  Cyclic GFR-binding peptide
  MOD_RES (3), (4): Xaa is C or S

SEQ ID NO: 82502 - protein, 41 aa, Artificial Sequence; identical to SEQ ID NO: 31144
  Cyclic GFR-binding peptide
  MOD_RES (6), (7), (39), (41): Xaa is C or S

SEQ ID NO: 82503 - protein, 32 aa, Artificial Sequence
  Cyclic GFR-binding peptide
  MOD_RES (30), (32): Xaa is C or S
TQLRSVKVAKVDDSSNVIKEVQVNMVVRAXGX

SEQ ID NO: 82504 - protein, 34 aa, Artificial Sequence
  Cyclic GFR-binding peptide
  MOD_RES (5), (6): Xaa is C or S
SAAPXXVPQALRSVKIAKVVGRKPKVKEVQVMIV

SEQ ID NO: 82505 - protein, 31 aa, Artificial Sequence; identical to SEQ ID NO: 31147
  Cyclic GFR-binding peptide
  MOD_RES (31), (31): Xaa is C or S

SEQ ID NO: 82506 - protein, 24 aa, Artificial Sequence
  Cyclic GFR-binding peptide
LRPVQVRKIDDSSNVIKKATVNMV

SEQ ID NO: 82507 - protein, 33 aa, Artificial Sequence; identical to SEQ ID NO: 31152
  Cyclic GFR-binding peptide
  MOD_RES (2), (3): Xaa is C or S

SEQ ID NO: 82508 - protein, 38 aa, Artificial Sequence; identical to SEQ ID NO: 31153
  Cyclic GFR-binding peptide
  MOD_RES (5), (6), (37): Xaa is C or S

SEQ ID NO: 82509 - protein, 35 aa, Artificial Sequence
  Cyclic GFR-binding peptide
  MOD_RES (5), (5): Xaa is C or S
RNVQXRPTQVQLEPLPVVYYEIVRKKPIFEQLSNT

SEQ ID NO: 82510 - protein, 34 aa, Artificial Sequence
  Cyclic GFR-binding peptide
  MOD_RES (31), (33): Xaa is C or S
PTELSNITMQIMDEYDKVVIGEMSEMVVEGXGXR

SEQ ID NO: 82511 - protein, 31 aa, Artificial Sequence
  Cyclic GFR-binding peptide
  MOD_RES (2), (3): Xaa is C or S
AXXVPTELRPVQMRKIDEYDKVVKKATVEMV

SEQ ID NO: 82512 - protein, 30 aa, Artificial Sequence
  Cyclic GFR-binding peptide
  MOD_RES (27), (29): Xaa is C or S
LRSVKIAKVVGRTPKVKEVQVMVVKSXKXS

SEQ ID NO: 82513 - protein, 37 aa, Artificial Sequence; identical to SEQ ID NO: 31160
  Cyclic GFR-binding peptide
  MOD_RES (1), (2), (34), (36): Xaa is C or S

SEQ ID NO: 82514 - protein, 25 aa, Artificial Sequence
  Cyclic GFR-binding peptide
DLSNITIQIMVGRTPKVIGEMSMVV

SEQ ID NO: 82515 - protein, 31 aa, Artificial Sequence
  Cyclic GFR-binding peptide
  MOD_RES (5), (6): Xaa is C or S
VPKPXXAPTKLRSVKVAKVDDSSNVIKEVQV

SEQ ID NO: 82516 - protein, 35 aa, Artificial Sequence
  Cyclic GFR-binding peptide
  MOD_RES (5), (6): Xaa is C or S
IPKAXXVPTELSNITMQIMDEYDKVVIGEMSEMVV

SEQ ID NO: 82517 - protein, 34 aa, Artificial Sequence; identical to SEQ ID NO: 31164
  Cyclic GFR-binding peptide

SEQ ID NO: 82518 - protein, 36 aa, Artificial Sequence; identical to SEQ ID NO: 31165
  Cyclic GFR-binding peptide
  MOD_RES (4), (5): Xaa is C or S

SEQ ID NO: 82519 - protein, 37 aa, Artificial Sequence
  Cyclic GFR-binding peptide
  MOD_RES (5), (5): Xaa is C or S
SSVKXQPSRVHHEPLPVVYYEYVRKKPKLEQLSNRLE

SEQ ID NO: 82520 - protein, 38 aa, Artificial Sequence; identical to SEQ ID NO: 31171
  Cyclic GFR-binding peptide
  MOD_RES (5), (6), (37): Xaa is C or S

SEQ ID NO: 82521 - protein, 31 aa, Artificial Sequence
  Cyclic GFR-binding peptide
  MOD_RES (3), (4): Xaa is C or S
APXXVPQALSNITIQIMVGRKPKVIGEMSMI

SEQ ID NO: 82522 - protein, 37 aa, Artificial Sequence; identical to SEQ ID NO: 31173
  Cyclic GFR-binding peptide
  MOD_RES (5), (6): Xaa is C or S

SEQ ID NO: 82523 - protein, 37 aa, Artificial Sequence; identical to SEQ ID NO: 31175
  Cyclic GFR-binding peptide
  MOD_RES (3), (4), (36): Xaa is C or S

SEQ ID NO: 82524 - protein, 39 aa, Artificial Sequence; identical to SEQ ID NO: 31176
  Cyclic GFR-binding peptide
  MOD_RES (6), (38): Xaa is C or S

SEQ ID NO: 82525 - protein, 31 aa, Artificial Sequence
  Cyclic GFR-binding peptide
  MOD_RES (2), (3): Xaa is C or S
PXXAPTQLSNITVQIMDDSSNVIIGEMSNMV

SEQ ID NO: 82526 - protein, 37 aa, Artificial Sequence; identical to SEQ ID NO: 31177
  Cyclic GFR-binding peptide
  MOD_RES (3), (4), (35), (37): Xaa is C or S

SEQ ID NO: 82527 - protein, 35 aa, Artificial Sequence; identical to SEQ ID NO: 31179
  Cyclic GFR-binding peptide
  MOD_RES (2), (3), (34): Xaa is C or S

SEQ ID NO: 82528 - protein, 34 aa, Artificial Sequence; identical to SEQ ID NO: 31181
  Cyclic GFR-binding peptide
  MOD_RES (3), (4): Xaa is C or S

SEQ ID NO: 82529 - protein, 38 aa, Artificial Sequence; identical to SEQ ID NO: 31182
  Cyclic GFR-binding peptide
  MOD_RES (6), (7), (38): Xaa is C or S

SEQ ID NO: 82530 - protein, 33 aa, Artificial Sequence
  Cyclic GFR-binding peptide
  MOD_RES (5), (6): Xaa is C or S
VPKPXXAPTKLRSVKVAKVDDSSNVIKEVQVNM

SEQ ID NO: 82531 - protein, 32 aa, Artificial Sequence
  Cyclic GFR-binding peptide
VQLEPLTVLYYEIVRKKPIFEQLSNTLEDHLA

SEQ ID NO: 82532 - protein, 38 aa, Artificial Sequence; identical to SEQ ID NO: 31184
  Cyclic GFR-binding peptide
  MOD_RES (2), (3), (35), (37): Xaa is C or S

SEQ ID NO: 82533 - protein, 37 aa, Artificial Sequence; identical to SEQ ID NO: 31187
  Cyclic GFR-binding peptide
  MOD_RES (4), (5), (36): Xaa is C or S

SEQ ID NO: 82534 - protein, 31 aa, Artificial Sequence; identical to SEQ ID NO: 31188
  Cyclic GFR-binding peptide

SEQ ID NO: 82535 - protein, 29 aa, Artificial Sequence
  Cyclic GFR-binding peptide
RSVKMAKVDEYDKVVKEVQVAAAAAAAAA

SEQ ID NO: 82536 - protein, 32 aa, Artificial Sequence
  Cyclic GFR-binding peptide
  MOD_RES (2), (4): Xaa is C or S
SXGXRDVVMGRYKKLIIQQKDNFYLMSIANMK

SEQ ID NO: 82537 - protein, 31 aa, Artificial Sequence; identical to SEQ ID NO: 31202
  Cyclic GFR-binding peptide
  MOD_RES (1), (1): Xaa is C or S

SEQ ID NO: 82538 - protein, 25 aa, Artificial Sequence
  Cyclic GFR-binding peptide
VVMGRYKKLIIQQKDNFYLMSIANM

SEQ ID NO: 82539 - protein, 41 aa, Artificial Sequence; identical to SEQ ID NO: 31207
  Cyclic GFR-binding peptide
  MOD_RES (1), (3), (35), (36): Xaa is C or S

SEQ ID NO: 82540 - protein, 34 aa, Artificial Sequence; identical to SEQ ID NO: 31208
  Cyclic GFR-binding peptide
  MOD_RES (1), (32), (33): Xaa is C or S

SEQ ID NO: 82541 - protein, 35 aa, Artificial Sequence; identical to SEQ ID NO: 31209
  Cyclic GFR-binding peptide
  MOD_RES (2), (34), (35): Xaa is C or S

SEQ ID NO: 82542 - protein, 25 aa, Artificial Sequence
  Cyclic GFR-binding peptide
EVIMRYKKLLLVRGNDFYLMSIANT

SEQ ID NO: 82543 - protein, 32 aa, Artificial Sequence; identical to SEQ ID NO: 31211
  Cyclic GFR-binding peptide
  MOD_RES (32), (32): Xaa is C or S

SEQ ID NO: 82544 - protein, 34 aa, Artificial Sequence; identical to SEQ ID NO: 31214
  Cyclic GFR-binding peptide
  MOD_RES (2), (4): Xaa is C or S

SEQ ID NO: 82545 - protein, 28 aa, Artificial Sequence
  Cyclic GFR-binding peptide
  MOD_RES (28), (28): Xaa is C or S
MGRYKKLIIQQKDNFYLMSIANMKTPTX

SEQ ID NO: 82546 - protein, 40 aa, Artificial Sequence; identical to SEQ ID NO: 31216
  Cyclic GFR-binding peptide
  MOD_RES (1), (3), (35), (36): Xaa is C or S

SEQ ID NO: 82547 - protein, 34 aa, Artificial Sequence
  Cyclic GFR-binding peptide
  MOD_RES (30), (31): Xaa is C or S
EVIMRYKKLLLVRGNDFYLMSIANTKVPAXXTSP

SEQ ID NO: 82548 - protein, 30 aa, Artificial Sequence
  Cyclic GFR-binding peptide
  MOD_RES (2), (4): Xaa is C or S
SXGXRDVVMGRYKKLIIQQKDNFYLMSIAN

SEQ ID NO: 82549 - protein, 33 aa, Artificial Sequence
  Cyclic GFR-binding peptide
  MOD_RES (28), (29): Xaa is C or S
IMRYKKLLLVRGNDFYLMSIANTKVPAXXTSPV

SEQ ID NO: 82550 - protein, 32 aa, Artificial Sequence
  Cyclic GFR-binding peptide
  MOD_RES (27), (28): Xaa is C or S
GRYKKLIIQQKDNFYLMSIANMKTPTXXPGAS

SEQ ID NO: 82551 - protein, 26 aa, Artificial Sequence
  Cyclic GFR-binding peptide
EVIMRYKKLLLVRGNDFYLMSIANTK

SEQ ID NO: 82552 - protein, 33 aa, Artificial Sequence
  Cyclic GFR-binding peptide
  MOD_RES (29), (30): Xaa is C or S
VMGRYKKLIIQQKDNFYLMSIANMKTPTXXPGA

SEQ ID NO: 82553 - protein, 32 aa, Artificial Sequence
  Cyclic GFR-binding peptide
  MOD_RES (1), (3): Xaa is C or S
XGXRDVVMGRYKKLIIQQKDNFYLMSIANMKT

SEQ ID NO: 82554 - protein, 27 aa, Artificial Sequence
  Cyclic GFR-binding peptide
EEVIMRYKKLLLVRGNDFYLMSIANTK

SEQ ID NO: 82555 - protein, 26 aa, Artificial Sequence
  Cyclic GFR-binding peptide
EEVIMRYKKLLLVRGNDFYLMSIANT

SEQ ID NO: 82556 - protein, 30 aa, Artificial Sequence
  Cyclic GFR-binding peptide
  MOD_RES (30), (30): Xaa is C or S
EVIMRYKKLLLVRGNDFYLMSIANTKVPAX

SEQ ID NO: 82557 - protein, 38 aa, Artificial Sequence; identical to SEQ ID NO: 31223
  Cyclic GFR-binding peptide
  MOD_RES (2), (34), (35): Xaa is C or S

SEQ ID NO: 82558 - protein, 26 aa, Artificial Sequence
  Cyclic GFR-binding peptide
MRYKKLLLVRGNDFYLMSIANTKVPA

SEQ ID NO: 82559 - protein, 29 aa, Artificial Sequence
  Cyclic GFR-binding peptide
AAAAAAAAARYKKLIIQQKDNFYLMSIAN

SEQ ID NO: 82560 - protein, 21 aa, Artificial Sequence
  Cyclic GFR-binding peptide
GRYKKLIIQQKDNFYLMSIAN

SEQ ID NO: 82561 - protein, 36 aa, Artificial Sequence; identical to SEQ ID NO: 31224
  Cyclic GFR-binding peptide
  MOD_RES (31), (32): Xaa is C or S

SEQ ID NO: 82562 - protein, 26 aa, Artificial Sequence
  Cyclic GFR-binding peptide
RDVVMGRYKKLIIQQKDNFYLMSIAN

SEQ ID NO: 82563 - protein, 32 aa, Artificial Sequence
  Cyclic GFR-binding peptide
  MOD_RES (1), (3): Xaa is C or S
XGXEEVIMRYKKLLLVRGNDFYLMSIANTKVP

SEQ ID NO: 82564 - protein, 29 aa, Artificial Sequence
  Cyclic GFR-binding peptide
  MOD_RES (1), (1): Xaa is C or S
XEEVIMRYKKLLLVRGNDFYLMSIANTKV

SEQ ID NO: 82565 - protein, 29 aa, Artificial Sequence
  Cyclic GFR-binding peptide
  MOD_RES (27), (28): Xaa is C or S
GRYKKLIIQQKDNFYLMSIANMKTPTXXP

SEQ ID NO: 82566 - protein, 30 aa, Artificial Sequence
  Cyclic GFR-binding peptide
  MOD_RES (1), (3): Xaa is C or S
XGXRDVVMGRYKKLIIQQKDNFYLMSIANM

SEQ ID NO: 82567 - protein, 29 aa, Artificial Sequence
  Cyclic GFR-binding peptide
  MOD_RES (1), (3): Xaa is C or S
XGXRDVVMGRYKKLIIQQKDNFYLMSIAN

SEQ ID NO: 82568 - protein, 29 aa, Artificial Sequence
  Cyclic GFR-binding peptide
  MOD_RES (28), (29): Xaa is C or S
MGRYKKLIIQQKDNFYLMSIANMKTPTXX

SEQ ID NO: 82569 - protein, 34 aa, Artificial Sequence
  Cyclic GFR-binding peptide
  MOD_RES (28), (29): Xaa is C or S
MGRYKKLIIQQKDNFYLMSIANMKTPTXXPGASG

SEQ ID NO: 82570 - protein, 34 aa, Artificial Sequence; identical to SEQ ID NO: 31232
  Cyclic GFR-binding peptide
  MOD_RES (31), (32): Xaa is C or S

SEQ ID NO: 82571 - protein, 25 aa, Artificial Sequence
  Cyclic GFR-binding peptide
MRYKKLLLVRGNDFYLMSIANTKVP

SEQ ID NO: 82572 - protein, 31 aa, Artificial Sequence
  Cyclic GFR-binding peptide
  MOD_RES (1), (3): Xaa is C or S
XGXEEVIMRYKKLLLVRGNDFYLMSIANTKV

SEQ ID NO: 82573 - protein, 34 aa, Artificial Sequence; identical to SEQ ID NO: 31239
  Cyclic GFR-binding peptide
  MOD_RES (32), (33): Xaa is C or S

SEQ ID NO: 82574 - protein, 23 aa, Artificial Sequence
  Cyclic GFR-binding peptide
VIMRYKKLLLVRGNDFYLMSIAN

SEQ ID NO: 82575 - protein, 38 aa, Artificial Sequence; identical to SEQ ID NO: 31242
  Cyclic GFR-binding peptide
  MOD_RES (1), (3), (35), (36): Xaa is C or S

SEQ ID NO: 82576 - protein, 27 aa, Artificial Sequence
  Cyclic GFR-binding peptide
VVMGRYKKLIIQQKDNFYLMSIANMKT

SEQ ID NO: 82577 - protein, 21 aa, Artificial Sequence
  Cyclic GFR-binding peptide
RYKKLLLVRGNDFYLMSIANT

SEQ ID NO: 82578 - protein, 34 aa, Artificial Sequence; identical to SEQ ID NO: 31244
  Cyclic GFR-binding peptide
  MOD_RES (1), (33), (34): Xaa is C or S

SEQ ID NO: 82579 - protein, 32 aa, Artificial Sequence
  Cyclic GFR-binding peptide
  MOD_RES (30), (31): Xaa is C or S
VVMGRYKKLIIQQKDNFYLMSIANMKTPTXXP

SEQ ID NO: 82580 - protein, 39 aa, Artificial Sequence; identical to SEQ ID NO: 31248
  Cyclic GFR-binding peptide
  MOD_RES (2), (4), (35), (36): Xaa is C or S

SEQ ID NO: 82581 - protein, 36 aa, Artificial Sequence
  Cyclic GFR-binding peptide
  MOD_RES (30), (31): Xaa is C or S
EVIMRYKKLLLVRGNDFYLMSIANTKVPAXXTSPVR

SEQ ID NO: 82582 - protein, 28 aa, Artificial Sequence
  Cyclic GFR-binding peptide
VIMRYKKLLLVRGNDFYLMSIANTKVPA

SEQ ID NO: 82583 - protein, 33 aa, Artificial Sequence; identical to SEQ ID NO: 31250
  Cyclic GFR-binding peptide
  MOD_RES (1), (3): Xaa is C or S

SEQ ID NO: 82584 - protein, 33 aa, Artificial Sequence; identical to SEQ ID NO: 31251
  Cyclic GFR-binding peptide
  MOD_RES (31), (32): Xaa is C or S

SEQ ID NO: 82585 - protein, 28 aa, Artificial Sequence
  Cyclic GFR-binding peptide
  MOD_RES (2), (2): Xaa is C or S
GXRDVVMGRYKKLIIQQKDNFYLMSIAN

SEQ ID NO: 82586 - protein, 30 aa, Artificial Sequence
  Cyclic GFR-binding peptide
  MOD_RES (29), (30): Xaa is C or S
VIMRYKKLLLVRGNDFYLMSIANTKVPAXX

SEQ ID NO: 82587 - protein, 36 aa, Artificial Sequence; identical to SEQ ID NO: 31254
  Cyclic GFR-binding peptide
  MOD_RES (1), (33), (34): Xaa is C or S

SEQ ID NO: 82588 - protein, 37 aa, Artificial Sequence; identical to SEQ ID NO: 31255
  Cyclic GFR-binding peptide
  MOD_RES (1), (3), (35), (36): Xaa is C or S

SEQ ID NO: 82589 - protein, 34 aa, Artificial Sequence
  Cyclic GFR-binding peptide
  MOD_RES (28), (29): Xaa is C or S
IMRYKKLLLVRGNDFYLMSIANTKVPAXXTSPVR

SEQ ID NO: 82590 - protein, 31 aa, Artificial Sequence
  Cyclic GFR-binding peptide
  MOD_RES (28), (29): Xaa is C or S
MGRYKKLIIQQKDNFYLMSIANMKTPTXXPG

SEQ ID NO: 82591 - protein, 36 aa, Artificial Sequence; identical to SEQ ID NO: 31256
  Cyclic GFR-binding peptide
  MOD_RES (1), (32), (33): Xaa is C or S

SEQ ID NO: 82592 - protein, 27 aa, Artificial Sequence
  Cyclic GFR-binding peptide
RDVVMGRYKKLIIQQKDNFYLMSIANM

SEQ ID NO: 82593 - protein, 30 aa, Artificial Sequence
  Cyclic GFR-binding peptide
  MOD_RES (1), (3): Xaa is C or S
XGXEEVIMRYKKLLLVRGNDFYLMSIANTK

SEQ ID NO: 82594 - protein, 37 aa, Artificial Sequence; identical to SEQ ID NO: 31260
  Cyclic GFR-binding peptide
  MOD_RES (31), (32): Xaa is C or S

SEQ ID NO: 82595 - protein, 32 aa, Artificial Sequence; identical to SEQ ID NO: 31261
  Cyclic GFR-binding peptide
  MOD_RES (1), (1): Xaa is C or S

SEQ ID NO: 82596 - protein, 28 aa, Artificial Sequence
  Cyclic GFR-binding peptide
EEVIMRYKKLLLVRGNDFYLMSIANTKV

SEQ ID NO: 82597 - protein, 24 aa, Artificial Sequence
  Cyclic GFR-binding peptide
IMRYKKLLLVRGNDFYLMSIANTK

SEQ ID NO: 82598 - protein, 30 aa, Artificial Sequence
  Cyclic GFR-binding peptide
  MOD_RES (1), (1): Xaa is C or S
XRDVVMGRYKKLIIQQKDNFYLMSIANMKT

SEQ ID NO: 82599 - protein, 41 aa, Artificial Sequence; identical to SEQ ID NO: 31263
  Cyclic GFR-binding peptide
  MOD_RES (2), (4), (35), (36): Xaa is C or S

SEQ ID NO: 82600 - protein, 34 aa, Artificial Sequence; identical to SEQ ID NO: 31265
  Cyclic GFR-binding peptide
  MOD_RES (1), (3), (34): Xaa is C or S

SEQ ID NO: 82601 - protein, 35 aa, Artificial Sequence; identical to SEQ ID NO: 31267
  Cyclic GFR-binding peptide
  MOD_RES (1), (3), (34), (35): Xaa is C or S

SEQ ID NO: 82602 - protein, 36 aa, Artificial Sequence; identical to SEQ ID NO: 31268
  Cyclic GFR-binding peptide
  MOD_RES (2), (4), (35), (36): Xaa is C or S

SEQ ID NO: 82603 - protein, 38 aa, Artificial Sequence; identical to SEQ ID NO: 31271
  Cyclic GFR-binding peptide
  MOD_RES (1), (33), (34): Xaa is C or S

SEQ ID NO: 82604 - protein, 32 aa, Artificial Sequence
  Cyclic GFR-binding peptide
  MOD_RES (27), (28): Xaa is C or S
MRYKKLLLVRGNDFYLMSIANTKVPAXXTSPV

SEQ ID NO: 82605 - protein, 22 aa, Artificial Sequence
  Cyclic GFR-binding peptide
MRYKKLLLVRGNDFYLMSIANT

SEQ ID NO: 82606 - protein, 30 aa, Artificial Sequence
  Cyclic GFR-binding peptide
RDVVMGRYKKLIIQQKDNFYLMSIANMKTP

SEQ ID NO: 82607 - protein, 26 aa, Artificial Sequence
  Cyclic GFR-binding peptide
GRYKKLIIQQKDNFYLMSIANMKTPT

SEQ ID NO: 82608 - protein, 24 aa, Artificial Sequence
  Cyclic GFR-binding peptide
VIMRYKKLLLVRGNDFYLMSIANT

SEQ ID NO: 82609 - protein, 38 aa, Artificial Sequence; identical to SEQ ID NO: 31287
  Cyclic GFR-binding peptide
  MOD_RES (2), (33), (34): Xaa is C or S

SEQ ID NO: 82610 - protein, 27 aa, Artificial Sequence
  Cyclic GFR-binding peptide
  MOD_RES (26), (27): Xaa is C or S
RYKKLIIQQKDNFYLMSIANMKTPTXX

SEQ ID NO: 82611 - protein, 39 aa, Artificial Sequence; identical to SEQ ID NO: 31290
  Cyclic GFR-binding peptide
  MOD_RES (1), (33), (34): Xaa is C or S

SEQ ID NO: 82612 - protein, 34 aa, Artificial Sequence
  Cyclic GFR-binding peptide
  MOD_RES (30), (31): Xaa is C or S
VVMGRYKKLIIQQKDNFYLMSIANMKTPTXXPGA

SEQ ID NO: 82613 - protein, 36 aa, Artificial Sequence; identical to SEQ ID NO: 31292
  Cyclic GFR-binding peptide
  MOD_RES (1), (3), (34), (35): Xaa is C or S

SEQ ID NO: 82614 - protein, 26 aa, Artificial Sequence
  Cyclic GFR-binding peptide
VVMGRYKKLIIQQKDNFYLMSIANMK

SEQ ID NO: 82615 - protein, 28 aa, Artificial Sequence
  Cyclic GFR-binding peptide
  MOD_RES (1), (1): Xaa is C or S
XEEVIMRYKKLLLVRGNDFYLMSIANTK

SEQ ID NO: 82616 - protein, 30 aa, Artificial Sequence
  Cyclic GFR-binding peptide
  MOD_RES (26), (27): Xaa is C or S
RYKKLLLVRGNDFYLMSIANTKVPAXXTSP

SEQ ID NO: 82617 - protein, 38 aa, Artificial Sequence; identical to SEQ ID NO: 31296
  Cyclic GFR-binding peptide
  MOD_RES (1), (32), (33): Xaa is C or S

SEQ ID NO: 82618 - protein, 35 aa, Artificial Sequence; identical to SEQ ID NO: 31298
  Cyclic GFR-binding peptide
  MOD_RES (31), (32): Xaa is C or S

SEQ ID NO: 82619 - protein, 33 aa, Artificial Sequence; identical to SEQ ID NO: 31300
  Cyclic GFR-binding peptide
  MOD_RES (2), (33): Xaa is C or S

SEQ ID NO: 82620 - protein, 23 aa, Artificial Sequence
  Cyclic GFR-binding peptide
GRYKKLIIQQKDNFYLMSIANMK

SEQ ID NO: 82621 - protein, 22 aa, Artificial Sequence
  Cyclic GFR-binding peptide
MGRYKKLIIQQKDNFYLMSIAN

SEQ ID NO: 82622 - protein, 31 aa, Artificial Sequence; identical to SEQ ID NO: 31306
  Cyclic GFR-binding peptide
  MOD_RES (31), (31): Xaa is C or S

SEQ ID NO: 82623 - protein, 23 aa, Artificial Sequence
  Cyclic GFR-binding peptide
MGRYKKLIIQQKDNFYLMSIANM

SEQ ID NO: 82624 - protein, 25 aa, Artificial Sequence
  Cyclic GFR-binding peptide
IMRYKKLLLVRGNDFYLMSIANTKV

SEQ ID NO: 82625 - protein, 29 aa, Artificial Sequence
  Cyclic GFR-binding peptide
DVVMGRYKKLIIQQKDNFYLMSIANMKTP

SEQ ID NO: 82626 - protein, 33 aa, Artificial Sequence
  Cyclic GFR-binding peptide
  MOD_RES (2), (4): Xaa is C or S
LXGXEEVIMRYKKLLLVRGNDFYLMSIANTKVP

SEQ ID NO: 82627 - protein, 23 aa, Artificial Sequence
  Cyclic GFR-binding peptide
RYKKLLLVRGNDFYLMSIANTKV

SEQ ID NO: 82628 - protein, 26 aa, Artificial Sequence
  Cyclic GFR-binding peptide
  MOD_RES (26), (26): Xaa is C or S
RYKKLIIQQKDNFYLMSIANMKTPTX

SEQ ID NO: 82629 - protein, 28 aa, Artificial Sequence
  Cyclic GFR-binding peptide
  MOD_RES (1), (1): Xaa is C or S
XRDVVMGRYKKLIIQQKDNFYLMSIANM

SEQ ID NO: 82630 - protein, 35 aa, Artificial Sequence
  Cyclic GFR-binding peptide
  MOD_RES (30), (31): Xaa is C or S
EVIMRYKKLLLVRGNDFYLMSIANTKVPAXXTSPV

SEQ ID NO: 82631 - protein, 29 aa, Artificial Sequence
  Cyclic GFR-binding peptide
  MOD_RES (2), (2): Xaa is C or S
GXRDVVMGRYKKLIIQQKDNFYLMSIANM

SEQ ID NO: 82632 - protein, 26 aa, Artificial Sequence
  Cyclic GFR-binding peptide
  MOD_RES (26), (26): Xaa is C or S
RYKKLLLVRGNDFYLMSIANTKVPAX

SEQ ID NO: 82633 - protein, 33 aa, Artificial Sequence
  Cyclic GFR-binding peptide
  MOD_RES (2), (4): Xaa is C or S
SXGXRDVVMGRYKKLIIQQKDNFYLMSIANMKT

SEQ ID NO: 82634 - protein, 28 aa, Artificial Sequence
  Cyclic GFR-binding peptide
VVMGRYKKLIIQQKDNFYLMSIANMKTP

SEQ ID NO: 82635 - protein, 30 aa, Artificial Sequence
  Cyclic GFR-binding peptide
  MOD_RES (28), (29): Xaa is C or S
MGRYKKLIIQQKDNFYLMSIANMKTPTXXP

SEQ ID NO: 82636 - protein, 22 aa, Artificial Sequence
  Cyclic GFR-binding peptide
RYKKLIIQQKDNFYLMSIANMK

SEQ ID NO: 82637 - protein, 26 aa, Artificial Sequence
  Cyclic GFR-binding peptide
MGRYKKLIIQQKDNFYLMSIANMKTP

SEQ ID NO: 82638 - protein, 31 aa, Artificial Sequence
  Cyclic GFR-binding peptide
  MOD_RES (26), (27): Xaa is C or S
RYKKLLLVRGNDFYLMSIANTKVPAXXTSPV

SEQ ID NO: 82639 - protein, 28 aa, Artificial Sequence
  Cyclic GFR-binding peptide
DVVMGRYKKLIIQQKDNFYLMSIANMKT

SEQ ID NO: 82640 - protein, 30 aa, Artificial Sequence
  Cyclic GFR-binding peptide
  MOD_RES (26), (27): Xaa is C or S
RYKKLIIQQKDNFYLMSIANMKTPTXXPGA

SEQ ID NO: 82641 - protein, 37 aa, Artificial Sequence; identical to SEQ ID NO: 31323
  Cyclic GFR-binding peptide
  MOD_RES (1), (3), (34), (35): Xaa is C or S

SEQ ID NO: 82642 - protein, 30 aa, Artificial Sequence
  Cyclic GFR-binding peptide
  MOD_RES (1), (1): Xaa is C or S
XEEVIMRYKKLLLVRGNDFYLMSIANTKVP

SEQ ID NO: 82643 - protein, 24 aa, Artificial Sequence
  Cyclic GFR-binding peptide
GRYKKLIIQQKDNFYLMSIANMKT

SEQ ID NO: 82644 - protein, 24 aa, Artificial Sequence
  Cyclic GFR-binding peptide
VMGRYKKLIIQQKDNFYLMSIANM

SEQ ID NO: 82645 - protein, 32 aa, Artificial Sequence
  Cyclic GFR-binding peptide
  MOD_RES (2), (4): Xaa is C or S
LXGXEEVIMRYKKLLLVRGNDFYLMSIANTKV

SEQ ID NO: 82646 - protein, 27 aa, Artificial Sequence
  Cyclic GFR-binding peptide
IMRYKKLLLVRGNDFYLMSIANTKVPA

SEQ ID NO: 82647 - protein, 31 aa, Artificial Sequence
  Cyclic GFR-binding peptide
  MOD_RES (2), (2): Xaa is C or S
GXRDVVMGRYKKLIIQQKDNFYLMSIANMKT

SEQ ID NO: 82648 - protein, 41 aa, Artificial Sequence; identical to SEQ ID NO: 31331
  Cyclic GFR-binding peptide
  MOD_RES (2), (4), (36), (37): Xaa is C or S

SEQ ID NO: 82649 - protein, 37 aa, Artificial Sequence; identical to SEQ ID NO: 31333
  Cyclic GFR-binding peptide
  MOD_RES (32), (33): Xaa is C or S

SEQ ID NO: 82650 - protein, 22 aa, Artificial Sequence
  Cyclic GFR-binding peptide
GRYKKLIIQQKDNFYLMSIANM

SEQ ID NO: 82651 - protein, 33 aa, Artificial Sequence
  Cyclic GFR-binding peptide
  MOD_RES (28), (29): Xaa is C or S
MGRYKKLIIQQKDNFYLMSIANMKTPTXXPGAS

SEQ ID NO: 82652 - protein, 27 aa, Artificial Sequence
  Cyclic GFR-binding peptide
  MOD_RES (26), (27): Xaa is C or S
RYKKLLLVRGNDFYLMSIANTKVPAXX

SEQ ID NO: 82653 - protein, 36 aa, Artificial Sequence; identical to SEQ ID NO: 31337
  Cyclic GFR-binding peptide
  MOD_RES (2), (34), (35): Xaa is C or S

SEQ ID NO: 82654 - protein, 33 aa, Artificial Sequence
  Cyclic GFR-binding peptide
  MOD_RES (29), (30): Xaa is C or S
VIMRYKKLLLVRGNDFYLMSIANTKVPAXXTSP

SEQ ID NO: 82655 - protein, 40 aa, Artificial Sequence; identical to SEQ ID NO: 31339
  Cyclic GFR-binding peptide
  MOD_RES (2), (4), (35), (36): Xaa is C or S

SEQ ID NO: 82656 - protein, 32 aa, Artificial Sequence
  Cyclic GFR-binding peptide
  MOD_RES (29), (30): Xaa is C or S
VIMRYKKLLLVRGNDFYLMSIANTKVPAXXTS

SEQ ID NO: 82657 - protein, 25 aa, Artificial Sequence
  Cyclic GFR-binding peptide
GRYKKLIIQQKDNFYLMSIANMKTP

SEQ ID NO: 82658 - protein, 39 aa, Artificial Sequence; identical to SEQ ID NO: 31344
  Cyclic GFR-binding peptide
  MOD_RES (1), (3), (34), (35): Xaa is C or S

SEQ ID NO: 82659 - protein, 35 aa, Artificial Sequence; identical to SEQ ID NO: 31348
  Cyclic GFR-binding peptide
  MOD_RES (2), (33), (34): Xaa is C or S

SEQ ID NO: 82660 - protein, 25 aa, Artificial Sequence
  Cyclic GFR-binding peptide
EEVIMRYKKLLLVRGNDFYLMSIAN

SEQ ID NO: 82661 - protein, 29 aa, Artificial Sequence
  Cyclic GFR-binding peptide
  MOD_RES (28), (29): Xaa is C or S
IMRYKKLLLVRGNDFYLMSIANTKVPAXX

SEQ ID NO: 82662 - protein, 32 aa, Artificial Sequence; identical to SEQ ID NO: 31349
  Cyclic GFR-binding peptide
  MOD_RES (1), (32): Xaa is C or S

SEQ ID NO: 82663 - protein, 29 aa, Artificial Sequence
  Cyclic GFR-binding peptide
  MOD_RES (29), (29): Xaa is C or S
VIMRYKKLLLVRGNDFYLMSIANTKVPAX

SEQ ID NO: 82664 - protein, 35 aa, Artificial Sequence; identical to SEQ ID NO: 31352
  Cyclic GFR-binding peptide
  MOD_RES (2), (4), (35): Xaa is C or S

SEQ ID NO: 82665 - protein, 28 aa, Artificial Sequence
  Cyclic GFR-binding peptide
  MOD_RES (27), (28): Xaa is C or S
GRYKKLIIQQKDNFYLMSIANMKTPTXX

SEQ ID NO: 82666 - protein, 27 aa, Artificial Sequence
  Cyclic GFR-binding peptide
  MOD_RES (27), (27): Xaa is C or S
GRYKKLIIQQKDNFYLMSIANMKTPTX

SEQ ID NO: 82667 - protein, 27 aa, Artificial Sequence
  Cyclic GFR-binding peptide
DVVMGRYKKLIIQQKDNFYLMSIANMK

SEQ ID NO: 82668 - protein, 35 aa, Artificial Sequence; identical to SEQ ID NO: 31354
  Cyclic GFR-binding peptide
  MOD_RES (31), (32): Xaa is C or S

SEQ ID NO: 82669 - protein, 26 aa, Artificial Sequence
  Cyclic GFR-binding peptide
IMRYKKLLLVRGNDFYLMSIANTKVP

SEQ ID NO: 82670 - protein, 33 aa, Artificial Sequence
  Cyclic GFR-binding peptide
  MOD_RES (27), (28): Xaa is C or S
MRYKKLLLVRGNDFYLMSIANTKVPAXXTSPVR

SEQ ID NO: 82671 - protein, 23 aa, Artificial Sequence
  Cyclic GFR-binding peptide
MRYKKLLLVRGNDFYLMSIANTK

SEQ ID NO: 82672 - protein, 28 aa, Artificial Sequence
  Cyclic GFR-binding peptide
  MOD_RES (2), (2): Xaa is C or S
GXEEVIMRYKKLLLVRGNDFYLMSIANT

SEQ ID NO: 82673 - protein, 32 aa, Artificial Sequence
  Cyclic GFR-binding peptide
  MOD_RES (2), (2): Xaa is C or S
GXRDVVMGRYKKLIIQQKDNFYLMSIANMKTP

SEQ ID NO: 82674 - protein, 28 aa, Artificial Sequence
  Cyclic GFR-binding peptide
VMGRYKKLIIQQKDNFYLMSIANMKTPT

SEQ ID NO: 82675 - protein, 29 aa, Artificial Sequence
  Cyclic GFR-binding peptide
  MOD_RES (26), (27): Xaa is C or S
RYKKLLLVRGNDFYLMSIANTKVPAXXTS

SEQ ID NO: 82676 - protein, 23 aa, Artificial Sequence
  Cyclic GFR-binding peptide
RYKKLIIQQKDNFYLMSIANMKT

SEQ ID NO: 82677 - protein, 36 aa, Artificial Sequence; identical to SEQ ID NO: 31360
  Cyclic GFR-binding peptide
  MOD_RES (2), (4), (36): Xaa is C or S

SEQ ID NO: 82678 - protein, 32 aa, Artificial Sequence; identical to SEQ ID NO: 31361
  Cyclic GFR-binding peptide
  MOD_RES (31), (32): Xaa is C or S

SEQ ID NO: 82679 - protein, 25 aa, Artificial Sequence
  Cyclic GFR-binding peptide
MGRYKKLIIQQKDNFYLMSIANMKT

SEQ ID NO: 82680 - protein, 35 aa, Artificial Sequence; identical to SEQ ID NO: 31362
  Cyclic GFR-binding peptide
  MOD_RES (1), (3), (35): Xaa is C or S

SEQ ID NO: 82681 - protein, 40 aa, Artificial Sequence; identical to SEQ ID NO: 31363
  Cyclic GFR-binding peptide
  MOD_RES (1), (3), (34), (35): Xaa is C or S

SEQ ID NO: 82682 - protein, 31 aa, Artificial Sequence
  Cyclic GFR-binding peptide
  MOD_RES (26), (27): Xaa is C or S
RYKKLIIQQKDNFYLMSIANMKTPTXXPGAS

SEQ ID NO: 82683 - protein, 31 aa, Artificial Sequence
  Cyclic GFR-binding peptide
  MOD_RES (1), (1): Xaa is C or S
XRDVVMGRYKKLIIQQKDNFYLMSIANMKTP

SEQ ID NO: 82684 - protein, 32 aa, Artificial Sequence
  Cyclic GFR-binding peptide
  MOD_RES (30), (31): Xaa is C or S
EVIMRYKKLLLVRGNDFYLMSIANTKVPAXXT

SEQ ID NO: 82685 - protein, 29 aa, Artificial Sequence
  Cyclic GFR-binding peptide
  MOD_RES (2), (4): Xaa is C or S
LXGXEEVIMRYKKLLLVRGNDFYLMSIAN

SEQ ID NO: 82686 - protein, 38 aa, Artificial Sequence; identical to SEQ ID NO: 31367
  Cyclic GFR-binding peptide
  MOD_RES (2), (4), (36), (37): Xaa is C or S

SEQ ID NO: 82687 - protein, 33 aa, Artificial Sequence
  Cyclic GFR-binding peptide
  MOD_RES (30), (31): Xaa is C or S
VVMGRYKKLIIQQKDNFYLMSIANMKTPTXXPG

SEQ ID NO: 82688 - protein, 31 aa, Artificial Sequence; identical to SEQ ID NO: 31372
  Cyclic GFR-binding peptide
  MOD_RES (31), (31): Xaa is C or S

SEQ ID NO: 82689 - protein, 38 aa, Artificial Sequence; identical to SEQ ID NO: 31198
  Cyclic GFR-binding peptide
  MOD_RES (32), (33): Xaa is C or S

SEQ ID NO: 82690 - protein, 27 aa, Artificial Sequence
  Cyclic GFR-binding peptide
VIMRYKKLLLVRGNDFYLMSIANTKVP

SEQ ID NO: 82691 - protein, 37 aa, Artificial Sequence; identical to SEQ ID NO: 31204
  Cyclic GFR-binding peptide
  MOD_RES (2), (4), (36), (37): Xaa is C or S

SEQ ID NO: 82692 - protein, 25 aa, Artificial Sequence
  Cyclic GFR-binding peptide
RYKKLIIQQKDNFYLMSIANMKTPT

SEQ ID NO: 82693 - protein, 37 aa, Artificial Sequence; identical to SEQ ID NO: 31205
  Cyclic GFR-binding peptide
  MOD_RES (2), (34), (35): Xaa is C or S

SEQ ID NO: 82694 - protein, 40 aa, Artificial Sequence; identical to SEQ ID NO: 31206
  Cyclic GFR-binding peptide
  MOD_RES (2), (4), (36), (37): Xaa is C or S

SEQ ID NO: 82695 - protein, 29 aa, Artificial Sequence
  Cyclic GFR-binding peptide
  MOD_RES (26), (27): Xaa is C or S
RYKKLIIQQKDNFYLMSIANMKTPTXXPG

SEQ ID NO: 82696 - protein, 30 aa, Artificial Sequence
  Cyclic GFR-binding peptide
  MOD_RES (30), (30): Xaa is C or S
VVMGRYKKLIIQQKDNFYLMSIANMKTPTX

SEQ ID NO: 82697 - protein, 36 aa, Artificial Sequence
  Cyclic GFR-binding peptide
  MOD_RES (30), (31): Xaa is C or S
VVMGRYKKLIIQQKDNFYLMSIANMKTPTXXPGASG

SEQ ID NO: 82698 - protein, 23 aa, Artificial Sequence
  Cyclic GFR-binding peptide
VMGRYKKLIIQQKDNFYLMSIAN

SEQ ID NO: 82699 - protein, 31 aa, Artificial Sequence
  Cyclic GFR-binding peptide
  MOD_RES (29), (30): Xaa is C or S
VIMRYKKLLLVRGNDFYLMSIANTKVPAXXT

SEQ ID NO: 82700 - protein, 26 aa, Artificial Sequence
  Cyclic GFR-binding peptide
DVVMGRYKKLIIQQKDNFYLMSIANM

SEQ ID NO: 82701 - protein, 31 aa, Artificial Sequence
  Cyclic GFR-binding peptide
  MOD_RES (30), (31): Xaa is C or S
EVIMRYKKLLLVRGNDFYLMSIANTKVPAXX

SEQ ID NO: 82702 - protein, 34 aa, Artificial Sequence
  Cyclic GFR-binding peptide
  MOD_RES (29), (30): Xaa is C or S
VIMRYKKLLLVRGNDFYLMSIANTKVPAXXTSPV

SEQ ID NO: 82703 - protein, 25 aa, Artificial Sequence
  Cyclic GFR-binding peptide
VIMRYKKLLLVRGNDFYLMSIANTK

SEQ ID NO: 82704 - protein, 29 aa, Artificial Sequence
  Cyclic GFR-binding peptide
AAAAAAAAARYKKLLLVRGNDFYLMSIAN

SEQ ID NO: 82705 - protein, 27 aa, Artificial Sequence
  Cyclic GFR-binding peptide
VMGRYKKLIIQQKDNFYLMSIANMKTP

SEQ ID NO: 82706 - protein, 34 aa, Artificial Sequence; identical to SEQ ID NO: 31221
  Cyclic GFR-binding peptide
  MOD_RES (31), (32): Xaa is C or S

SEQ ID NO: 82707 - protein, 32 aa, Artificial Sequence
  Cyclic GFR-binding peptide
  MOD_RES (28), (29): Xaa is C or S
MGRYKKLIIQQKDNFYLMSIANMKTPTXXPGA

SEQ ID NO: 82708 - protein, 36 aa, Artificial Sequence; identical to SEQ ID NO: 31228
  Cyclic GFR-binding peptide
  MOD_RES (31), (32): Xaa is C or S

SEQ ID NO: 82709 - protein, 29 aa, Artificial Sequence
  Cyclic GFR-binding peptide
  MOD_RES (2), (2): Xaa is C or S
GXEEVIMRYKKLLLVRGNDFYLMSIANTK

SEQ ID NO: 82710 - protein, 29 aa, Artificial Sequence
  Cyclic GFR-binding peptide
VVMGRYKKLIIQQKDNFYLMSIANMKTPT

SEQ ID NO: 82711 - protein, 28 aa, Artificial Sequence
  Cyclic GFR-binding peptide
  MOD_RES (28), (28): Xaa is C or S
IMRYKKLLLVRGNDFYLMSIANTKVPAX

SEQ ID NO: 82712 - protein, 33 aa, Artificial Sequence
  Cyclic GFR-binding peptide
  MOD_RES (1), (3): Xaa is C or S
XGXRDVVMGRYKKLIIQQKDNFYLMSIANMKTP

SEQ ID NO: 82713 - protein, 35 aa, Artificial Sequence; identical to SEQ ID NO: 31230
  Cyclic GFR-binding peptide
  MOD_RES (2), (4): Xaa is C or S

SEQ ID NO: 82714 - protein, 35 aa, Artificial Sequence; identical to SEQ ID NO: 31231
  Cyclic GFR-binding peptide
  MOD_RES (32), (33): Xaa is C or S

SEQ ID NO: 82715 - protein, 30 aa, Artificial Sequence; identical to SEQ ID NO: 31235
  Cyclic GFR-binding peptide

SEQ ID NO: 82716 - protein, 33 aa, Artificial Sequence
  Cyclic GFR-binding peptide
  MOD_RES (27), (28): Xaa is C or S
GRYKKLIIQQKDNFYLMSIANMKTPTXXPGASG

SEQ ID NO: 82717 - protein, 29 aa, Artificial Sequence
  Cyclic GFR-binding peptide
  MOD_RES (29), (29): Xaa is C or S
VMGRYKKLIIQQKDNFYLMSIANMKTPTX

SEQ ID NO: 82718 - protein, 37 aa, Artificial Sequence; identical to SEQ ID NO: 31238
  Cyclic GFR-binding peptide
  MOD_RES (1), (33), (34): Xaa is C or S

SEQ ID NO: 82719 - protein, 38 aa, Artificial Sequence; identical to SEQ ID NO: 31246
  Cyclic GFR-binding peptide
  MOD_RES (2), (4), (35), (36): Xaa is C or S

SEQ ID NO: 82720 - protein, 34 aa, Artificial Sequence
  Cyclic GFR-binding peptide
  MOD_RES (2), (4): Xaa is C or S
SXGXRDVVMGRYKKLIIQQKDNFYLMSIANMKTP

SEQ ID NO: 82721 - protein, 31 aa, Artificial Sequence; identical to SEQ ID NO: 31249
  Cyclic GFR-binding peptide

SEQ ID NO: 82722 - protein, 30 aa, Artificial Sequence
  Cyclic GFR-binding peptide
  MOD_RES (2), (2): Xaa is C or S
GXEEVIMRYKKLLLVRGNDFYLMSIANTKV

SEQ ID NO: 82723 - protein, 20 aa, Artificial Sequence
  Cyclic GFR-binding peptide
RYKKLLLVRGNDFYLMSIAN

SEQ ID NO: 82724 - protein, 24 aa, Artificial Sequence
  Cyclic GFR-binding peptide
VVMGRYKKLIIQQKDNFYLMSIAN

SEQ ID NO: 82725 - protein, 32 aa, Artificial Sequence; identical to SEQ ID NO: 31258
  Cyclic GFR-binding peptide
  MOD_RES (31), (32): Xaa is C or S

SEQ ID NO: 82726 - protein, 39 aa, Artificial Sequence; identical to SEQ ID NO: 31259
  Cyclic GFR-binding peptide
  MOD_RES (1), (3), (35), (36): Xaa is C or S

SEQ ID NO: 82727 - protein, 22 aa, Artificial Sequence
  Cyclic GFR-binding peptide
RYKKLLLVRGNDFYLMSIANTK

SEQ ID NO: 82728 - protein, 35 aa, Artificial Sequence
  Cyclic GFR-binding peptide
  MOD_RES (29), (30): Xaa is C or S
VMGRYKKLIIQQKDNFYLMSIANMKTPTXXPGASG

SEQ ID NO: 82729 - protein, 23 aa, Artificial Sequence
  Cyclic GFR-binding peptide
IMRYKKLLLVRGNDFYLMSIANT

SEQ ID NO: 82730 - protein, 37 aa, Artificial Sequence; identical to SEQ ID NO: 31266
  Cyclic GFR-binding peptide
  MOD_RES (2), (4), (35), (36): Xaa is C or S

SEQ ID NO: 82731 - protein, 30 aa, Artificial Sequence
  Cyclic GFR-binding peptide
  MOD_RES (28), (29): Xaa is C or S
IMRYKKLLLVRGNDFYLMSIANTKVPAXXT

SEQ ID NO: 82732 - protein, 30 aa, Artificial Sequence
  Cyclic GFR-binding peptide
  MOD_RES (2), (4): Xaa is C or S
LXGXEEVIMRYKKLLLVRGNDFYLMSIANT

SEQ ID NO: 82733 - protein, 24 aa, Artificial Sequence
  Cyclic GFR-binding peptide
EVIMRYKKLLLVRGNDFYLMSIAN

SEQ ID NO: 82734 - protein, 34 aa, Artificial Sequence; identical to SEQ ID NO: 31273
  Cyclic GFR-binding peptide
  MOD_RES (2), (34): Xaa is C or S

SEQ ID NO: 82735 - protein, 37 aa, Artificial Sequence; identical to SEQ ID NO: 31274
  Cyclic GFR-binding peptide
  MOD_RES (2), (33), (34): Xaa is C or S

SEQ ID NO: 82736 - protein, 21 aa, Artificial Sequence
  Cyclic GFR-binding peptide
MRYKKLLLVRGNDFYLMSIAN

SEQ ID NO: 82737 - protein, 28 aa, Artificial Sequence
  Cyclic GFR-binding peptide
RDVVMGRYKKLIIQQKDNFYLMSIANMK

SEQ ID NO: 82738 - protein, 33 aa, Artificial Sequence
  Cyclic GFR-binding peptide
  MOD_RES (30), (31): Xaa is C or S
EVIMRYKKLLLVRGNDFYLMSIANTKVPAXXTS

SEQ ID NO: 82739 - protein, 34 aa, Artificial Sequence; identical to SEQ ID NO: 31278
  Cyclic GFR-binding peptide
  MOD_RES (2), (33), (34): Xaa is C or S

SEQ ID NO: 82740 - protein, 33 aa, Artificial Sequence; identical to SEQ ID NO: 31279
  Cyclic GFR-binding peptide
  MOD_RES (32), (33): Xaa is C or S

SEQ ID NO: 82741 - protein, 31 aa, Artificial Sequence
  Cyclic GFR-binding peptide
  MOD_RES (29), (30): Xaa is C or S
VMGRYKKLIIQQKDNFYLMSIANMKTPTXXP

SEQ ID NO: 82742 - protein, 25 aa, Artificial Sequence
  Cyclic GFR-binding peptide
DVVMGRYKKLIIQQKDNFYLMSIAN

SEQ ID NO: 82743 - protein, 36 aa, Artificial Sequence; identical to SEQ ID NO: 31280
  Cyclic GFR-binding peptide
  MOD_RES (32), (33): Xaa is C or S

SEQ ID NO: 82744 - protein, 33 aa, Artificial Sequence; identical to SEQ ID NO: 31283
  Cyclic GFR-binding peptide
  MOD_RES (1), (33): Xaa is C or S

SEQ ID NO: 82745 - protein, 39 aa, Artificial Sequence; identical to SEQ ID NO: 31285
  Cyclic GFR-binding peptide
  MOD_RES (2), (4), (36), (37): Xaa is C or S

SEQ ID NO: 82746 - protein, 37 aa, Artificial Sequence; identical to SEQ ID NO: 31286
  Cyclic GFR-binding peptide
  MOD_RES (31), (32): Xaa is C or S

SEQ ID NO: 82747 - protein, 27 aa, Artificial Sequence
  Cyclic GFR-binding peptide
MGRYKKLIIQQKDNFYLMSIANMKTPT

SEQ ID NO: 82748 - protein, 28 aa, Artificial Sequence
  Cyclic GFR-binding peptide
  MOD_RES (26), (27): Xaa is C or S
RYKKLIIQQKDNFYLMSIANMKTPTXXP

SEQ ID NO: 82749 - protein, 29 aa, Artificial Sequence
  Cyclic GFR-binding peptide
RDVVMGRYKKLIIQQKDNFYLMSIANMKT

SEQ ID NO: 82750 - protein, 24 aa, Artificial Sequence
  Cyclic GFR-binding peptide
MGRYKKLIIQQKDNFYLMSIANMK

SEQ ID NO: 82751 - protein, 30 aa, Artificial Sequence; identical to SEQ ID NO: 31301
  Cyclic GFR-binding peptide

SEQ ID NO: 82752 - protein, 34 aa, Artificial Sequence; identical to SEQ ID NO: 31302
  Cyclic GFR-binding peptide
  MOD_RES (1), (3): Xaa is C or S

SEQ ID NO: 82753 - protein, 32 aa, Artificial Sequence
  Cyclic GFR-binding peptide
  MOD_RES (29), (30): Xaa is C or S
VMGRYKKLIIQQKDNFYLMSIANMKTPTXXPG

SEQ ID NO: 82754 - protein, 30 aa, Artificial Sequence
  Cyclic GFR-binding peptide
  MOD_RES (27), (28): Xaa is C or S
MRYKKLLLVRGNDFYLMSIANTKVPAXXTS

SEQ ID NO: 82755 - protein, 42 aa, Artificial Sequence; identical to SEQ ID NO: 31311
  Cyclic GFR-binding peptide
  MOD_RES (2), (4), (36), (37): Xaa is C or S

SEQ ID NO: 82756 - protein, 36 aa, Artificial Sequence; identical to SEQ ID NO: 31313
  Cyclic GFR-binding peptide
  MOD_RES (2), (33), (34): Xaa is C or S

SEQ ID NO: 82757 - protein, 40 aa, Artificial Sequence; identical to SEQ ID NO: 31316
  Cyclic GFR-binding peptide
  MOD_RES (2), (34), (35): Xaa is C or S

SEQ ID NO: 82758 - protein, 24 aa, Artificial Sequence
  Cyclic GFR-binding peptide
RYKKLIIQQKDNFYLMSIANMKTP

SEQ ID NO: 82759 - protein, 28 aa, Artificial Sequence
  Cyclic GFR-binding peptide
  MOD_RES (1), (3): Xaa is C or S
XGXEEVIMRYKKLLLVRGNDFYLMSIAN

SEQ ID NO: 82760 - protein, 31 aa, Artificial Sequence
  Cyclic GFR-binding peptide
  MOD_RES (2), (4): Xaa is C or S
SXGXRDVVMGRYKKLIIQQKDNFYLMSIANM

SEQ ID NO: 82761 - protein, 36 aa, Artificial Sequence; identical to SEQ ID NO: 31319
  Cyclic GFR-binding peptide
  MOD_RES (1), (3), (35), (36): Xaa is C or S

SEQ ID NO: 82762 - protein, 39 aa, Artificial Sequence; identical to SEQ ID NO: 31320
  Cyclic GFR-binding peptide
  MOD_RES (2), (33), (34): Xaa is C or S

SEQ ID NO: 82763 - protein, 31 aa, Artificial Sequence
  Cyclic GFR-binding peptide
  MOD_RES (2), (2): Xaa is C or S
GXEEVIMRYKKLLLVRGNDFYLMSIANTKVP

SEQ ID NO: 82764 - protein, 35 aa, Artificial Sequence
  Cyclic GFR-binding peptide
  MOD_RES (29), (30): Xaa is C or S
VIMRYKKLLLVRGNDFYLMSIANTKVPAXXTSPVR

SEQ ID NO: 82765 - protein, 24 aa, Artificial Sequence
  Cyclic GFR-binding peptide
MRYKKLLLVRGNDFYLMSIANTKV

SEQ ID NO: 82766 - protein, 31 aa, Artificial Sequence
  Cyclic GFR-binding peptide
  MOD_RES (27), (28): Xaa is C or S
GRYKKLIIQQKDNFYLMSIANMKTPTXXPGA

SEQ ID NO: 82767 - protein, 33 aa, Artificial Sequence; identical to SEQ ID NO: 31325
  Cyclic GFR-binding peptide
  MOD_RES (31), (32): Xaa is C or S

SEQ ID NO: 82768 - protein, 26 aa, Artificial Sequence
  Cyclic GFR-binding peptide
VMGRYKKLIIQQKDNFYLMSIANMKT

SEQ ID NO: 82769 - protein, 38 aa, Artificial Sequence; identical to SEQ ID NO: 31328
  Cyclic GFR-binding peptide
  MOD_RES (1), (3), (34), (35): Xaa is C or S

SEQ ID NO: 82770 - protein, 28 aa, Artificial Sequence
  Cyclic GFR-binding peptide
  MOD_RES (26), (27): Xaa is C or S
RYKKLLLVRGNDFYLMSIANTKVPAXXT

SEQ ID NO: 82771 - protein, 37 aa, Artificial Sequence; identical to SEQ ID NO: 31330
  Cyclic GFR-binding peptide
  MOD_RES (1), (32), (33): Xaa is C or S

SEQ ID NO: 82772 - protein, 33 aa, Artificial Sequence; identical to SEQ ID NO: 31332
  Cyclic GFR-binding peptide
  MOD_RES (2), (2): Xaa is C or S

SEQ ID NO: 82773 - protein, 31 aa, Artificial Sequence
  Cyclic GFR-binding peptide
  MOD_RES (28), (29): Xaa is C or S
IMRYKKLLLVRGNDFYLMSIANTKVPAXXTS

SEQ ID NO: 82774 - protein, 30 aa, Artificial Sequence
  Cyclic GFR-binding peptide
  MOD_RES (27), (28): Xaa is C or S
GRYKKLIIQQKDNFYLMSIANMKTPTXXPG

SEQ ID NO: 82775 - protein, 32 aa, Artificial Sequence; identical to SEQ ID NO: 31334
  Cyclic GFR-binding peptide
  MOD_RES (2), (2): Xaa is C or S

SEQ ID NO: 82776 - protein, 20 aa, Artificial Sequence
  Cyclic GFR-binding peptide
RYKKLIIQQKDNFYLMSIAN

SEQ ID NO: 82777 - protein, 39 aa, Artificial Sequence; identical to SEQ ID NO: 31342
  Cyclic GFR-binding peptide
  MOD_RES (2), (34), (35): Xaa is C or S

SEQ ID NO: 82778 - protein, 28 aa, Artificial Sequence
  Cyclic GFR-binding peptide
  MOD_RES (27), (28): Xaa is C or S
MRYKKLLLVRGNDFYLMSIANTKVPAXX

SEQ ID NO: 82779 - protein, 27 aa, Artificial Sequence
  Cyclic GFR-binding peptide
  MOD_RES (27), (27): Xaa is C or S
MRYKKLLLVRGNDFYLMSIANTKVPAX

SEQ ID NO: 82780 - protein, 35 aa, Artificial Sequence; identical to SEQ ID NO: 31347
  Cyclic GFR-binding peptide
  MOD_RES (1), (33), (34): Xaa is C or S

SEQ ID NO: 82781 - protein, 32 aa, Artificial Sequence
  Cyclic GFR-binding peptide
  MOD_RES (28), (29): Xaa is C or S
IMRYKKLLLVRGNDFYLMSIANTKVPAXXTSP

SEQ ID NO: 82782 - protein, 24 aa, Artificial Sequence
  Cyclic GFR-binding peptide
RYKKLLLVRGNDFYLMSIANTKVP

SEQ ID NO: 82783 - protein, 22 aa, Artificial Sequence
  Cyclic GFR-binding peptide
IMRYKKLLLVRGNDFYLMSIAN

SEQ ID NO: 82784 - protein, 29 aa, Artificial Sequence
  Cyclic GFR-binding peptide
EEVIMRYKKLLLVRGNDFYLMSIANTKVP

SEQ ID NO: 82785 - protein, 35 aa, Artificial Sequence
  Cyclic GFR-binding peptide
  MOD_RES (30), (31): Xaa is C or S
VVMGRYKKLIIQQKDNFYLMSIANMKTPTXXPGAS

SEQ ID NO: 82786 - protein, 29 aa, Artificial Sequence
  Cyclic GFR-binding peptide
  MOD_RES (1), (1): Xaa is C or S
XRDVVMGRYKKLIIQQKDNFYLMSIANMK

SEQ ID NO: 82787 - protein, 27 aa, Artificial Sequence
  Cyclic GFR-binding peptide
  MOD_RES (2), (2): Xaa is C or S
GXEEVIMRYKKLLLVRGNDFYLMSIAN

SEQ ID NO: 82788 - protein, 27 aa, Artificial Sequence
  Cyclic GFR-binding peptide
  MOD_RES (1), (1): Xaa is C or S
XRDVVMGRYKKLIIQQKDNFYLMSIAN

SEQ ID NO: 82789 - protein, 29 aa, Artificial Sequence
  Cyclic GFR-binding peptide
  MOD_RES (1), (3): Xaa is C or S
XGXEEVIMRYKKLLLVRGNDFYLMSIANT

SEQ ID NO: 82790 - protein, 35 aa, Artificial Sequence; identical to SEQ ID NO: 31358
  Cyclic GFR-binding peptide
  MOD_RES (1), (32), (33): Xaa is C or S

SEQ ID NO: 82791 - protein, 29 aa, Artificial Sequence
  Cyclic GFR-binding peptide
EVIMRYKKLLLVRGNDFYLMSIANTKVPA

SEQ ID NO: 82792 - protein, 28 aa, Artificial Sequence
  Cyclic GFR-binding peptide
EVIMRYKKLLLVRGNDFYLMSIANTKVP

SEQ ID NO: 82793 - protein, 31 aa, Artificial Sequence
  Cyclic GFR-binding peptide
  MOD_RES (1), (3): Xaa is C or S
XGXRDVVMGRYKKLIIQQKDNFYLMSIANMK

SEQ ID NO: 82794 - protein, 25 aa, Artificial Sequence
  Cyclic GFR-binding peptide
RYKKLLLVRGNDFYLMSIANTKVPA

SEQ ID NO: 82795 - protein, 32 aa, Artificial Sequence
  Cyclic GFR-binding peptide
  MOD_RES (26), (27): Xaa is C or S
RYKKLLLVRGNDFYLMSIANTKVPAXXTSPVR

SEQ ID NO: 82796 - protein, 31 aa, Artificial Sequence
  Cyclic GFR-binding peptide
  MOD_RES (2), (4): Xaa is C or S
LXGXEEVIMRYKKLLLVRGNDFYLMSIANTK

SEQ ID NO: 82797 - protein, 34 aa, Artificial Sequence
  Cyclic GFR-binding peptide
  MOD_RES (29), (30): Xaa is C or S
VMGRYKKLIIQQKDNFYLMSIANMKTPTXXPGAS

SEQ ID NO: 82798 - protein, 31 aa, Artificial Sequence
  Cyclic GFR-binding peptide
  MOD_RES (27), (28): Xaa is C or S
MRYKKLLLVRGNDFYLMSIANTKVPAXXTSP

SEQ ID NO: 82799 - protein, 30 aa, Artificial Sequence
  Cyclic GFR-binding peptide
  MOD_RES (2), (2): Xaa is C or S
GXRDVVMGRYKKLIIQQKDNFYLMSIANMK

SEQ ID NO: 82800 - protein, 26 aa, Artificial Sequence
  Cyclic GFR-binding peptide
VIMRYKKLLLVRGNDFYLMSIANTKV

SEQ ID NO: 82801 - protein, 27 aa, Artificial Sequence
  Cyclic GFR-binding peptide
EVIMRYKKLLLVRGNDFYLMSIANTKV

SEQ ID NO: 82802 - protein, 21 aa, Artificial Sequence
  Cyclic GFR-binding peptide
RYKKLIIQQKDNFYLMSIANM

SEQ ID NO: 82803 - protein, 27 aa, Artificial Sequence
  Cyclic GFR-binding peptide
  MOD_RES (1), (1): Xaa is C or S
XEEVIMRYKKLLLVRGNDFYLMSIANT

SEQ ID NO: 82804 - protein, 31 aa, Artificial Sequence
  Cyclic GFR-binding peptide
  MOD_RES (30), (31): Xaa is C or S
VVMGRYKKLIIQQKDNFYLMSIANMKTPTXX

SEQ ID NO: 82805 - protein, 33 aa, Artificial Sequence; identical to SEQ ID NO: 31368
  Cyclic GFR-binding peptide
  MOD_RES (1), (32), (33): Xaa is C or S

SEQ ID NO: 82806 - protein, 25 aa, Artificial Sequence
  Cyclic GFR-binding peptide
VMGRYKKLIIQQKDNFYLMSIANMK

SEQ ID NO: 82807 - protein, 29 aa, Artificial Sequence
  Cyclic GFR-binding peptide
  MOD_RES (27), (28): Xaa is C or S
MRYKKLLLVRGNDFYLMSIANTKVPAXXT

SEQ ID NO: 82808 - protein, 30 aa, Artificial Sequence
  Cyclic GFR-binding peptide
  MOD_RES (29), (30): Xaa is C or S
VMGRYKKLIIQQKDNFYLMSIANMKTPTXX

SEQ ID NO: 82809 - protein, 32 aa, Artificial Sequence
  Cyclic GFR-binding peptide
  MOD_RES (26), (27): Xaa is C or S
RYKKLIIQQKDNFYLMSIANMKTPTXXPGASG

SEQ ID NO: 82810 - protein, 26 aa, Artificial Sequence
  Cyclic GFR-binding peptide
  MOD_RES (1), (1): Xaa is C or S
XEEVIMRYKKLLLVRGNDFYLMSIAN

SEQ ID NO: 82811 - protein, 32 aa, Artificial Sequence
  Cyclic GFR-binding peptide
  MOD_RES (29), (31): Xaa is C or S
KMNAISMLYFNDKQQIILKKYRGMVVDRXGXS

SEQ ID NO: 82812 - protein, 31 aa, Artificial Sequence; identical to SEQ ID NO: 31378
  Cyclic GFR-binding peptide
  MOD_RES (31), (31): Xaa is C or S

SEQ ID NO: 82813 - protein, 25 aa, Artificial Sequence
  Cyclic GFR-binding peptide
MNAISMLYFNDKQQIILKKYRGMVV

SEQ ID NO: 82814 - protein, 41 aa, Artificial Sequence; identical to SEQ ID NO: 31383
  Cyclic GFR-binding peptide
  MOD_RES (6), (7), (39), (41): Xaa is C or S

SEQ ID NO: 82815 - protein, 34 aa, Artificial Sequence; identical to SEQ ID NO: 31384
  Cyclic GFR-binding peptide
  MOD_RES (2), (3), (34): Xaa is C or S

SEQ ID NO: 82816 - protein, 35 aa, Artificial Sequence; identical to SEQ ID NO: 31385
  Cyclic GFR-binding peptide
  MOD_RES (1), (2), (34): Xaa is C or S

SEQ ID NO: 82817 - protein, 25 aa, Artificial Sequence
  Cyclic GFR-binding peptide
TNAISMLYFDNGRVLLLKKYRMIVE

SEQ ID NO: 82818 - protein, 32 aa, Artificial Sequence; identical to SEQ ID NO: 31387
  Cyclic GFR-binding peptide
  MOD_RES (1), (1): Xaa is C or S

SEQ ID NO: 82819 - protein, 34 aa, Artificial Sequence; identical to SEQ ID NO: 31390
  Cyclic GFR-binding peptide
  MOD_RES (31), (33): Xaa is C or S

SEQ ID NO: 82820 - protein, 28 aa, Artificial Sequence
  Cyclic GFR-binding peptide
  MOD_RES (1), (1): Xaa is C or S
XTPTKMNAISMLYFNDKQQIILKKYRGM

SEQ ID NO: 82821 - protein, 40 aa, Artificial Sequence; identical to SEQ ID NO: 31392
  Cyclic GFR-binding peptide
  MOD_RES (5), (6), (38), (40): Xaa is C or S

SEQ ID NO: 82822 - protein, 34 aa, Artificial Sequence
  Cyclic GFR-binding peptide
  MOD_RES (4), (5): Xaa is C or S
PSTXXAPVKTNAISMLYFDNGRVLLLKKYRMIVE

SEQ ID NO: 82823 - protein, 30 aa, Artificial Sequence
  Cyclic GFR-binding peptide
  MOD_RES (27), (29): Xaa is C or S
NAISMLYFNDKQQIILKKYRGMVVDRXGXS

SEQ ID NO: 82824 - protein, 33 aa, Artificial Sequence
  Cyclic GFR-binding peptide
  MOD_RES (5), (6): Xaa is C or S
VPSTXXAPVKTNAISMLYFDNGRVLLLKKYRMI

SEQ ID NO: 82825 - protein, 32 aa, Artificial Sequence
  Cyclic GFR-binding peptide
  MOD_RES (5), (6): Xaa is C or S
SAGPXXTPTKMNAISMLYFNDKQQIILKKYRG

SEQ ID NO: 82826 - protein, 26 aa, Artificial Sequence
  Cyclic GFR-binding peptide
KTNAISMLYFDNGRVLLLKKYRMIVE

SEQ ID NO: 82827 - protein, 33 aa, Artificial Sequence
  Cyclic GFR-binding peptide
  MOD_RES (4), (5): Xaa is C or S
AGPXXTPTKMNAISMLYFNDKQQIILKKYRGMV

SEQ ID NO: 82828 - protein, 32 aa, Artificial Sequence
  Cyclic GFR-binding peptide
  MOD_RES (30), (32): Xaa is C or S
TKMNAISMLYFNDKQQIILKKYRGMVVDRXGX

SEQ ID NO: 82829 - protein, 27 aa, Artificial Sequence
  Cyclic GFR-binding peptide
KTNAISMLYFDNGRVLLLKKYRMIVEE

SEQ ID NO: 82830 - protein, 26 aa, Artificial Sequence
  Cyclic GFR-binding peptide
TNAISMLYFDNGRVLLLKKYRMIVEE

SEQ ID NO: 82831 - protein, 30 aa, Artificial Sequence
  Cyclic GFR-binding peptide
  MOD_RES (1), (1): Xaa is C or S
XAPVKTNAISMLYFDNGRVLLLKKYRMIVE

SEQ ID NO: 82832 - protein, 38 aa, Artificial Sequence; identical to SEQ ID NO: 31399
  Cyclic GFR-binding peptide
  MOD_RES (4), (5), (37): Xaa is C or S

SEQ ID NO: 82833 - protein, 26 aa, Artificial Sequence
  Cyclic GFR-binding peptide
APVKTNAISMLYFDNGRVLLLKKYRM

SEQ ID NO: 82834 - protein, 29 aa, Artificial Sequence
  Cyclic GFR-binding peptide
NAISMLYFNDKQQIILKKYRAAAAAAAAA

SEQ ID NO: 82835 - protein, 21 aa, Artificial Sequence
  Cyclic GFR-binding peptide
NAISMLYFNDKQQIILKKYRG

SEQ ID NO: 82836 - protein, 36 aa, Artificial Sequence; identical to SEQ ID NO: 31400
  Cyclic GFR-binding peptide
  MOD_RES (5), (6): Xaa is C or S

SEQ ID NO: 82837 - protein, 26 aa, Artificial Sequence
  Cyclic GFR-binding peptide
NAISMLYFNDKQQIILKKYRGMVVDR

SEQ ID NO: 82838 - protein, 32 aa, Artificial Sequence
  Cyclic GFR-binding peptide
  MOD_RES (30), (32): Xaa is C or S
PVKTNAISMLYFDNGRVLLLKKYRMIVEEXGX

SEQ ID NO: 82839 - protein, 29 aa, Artificial Sequence
  Cyclic GFR-binding peptide
  MOD_RES (29), (29): Xaa is C or S
VKTNAISMLYFDNGRVLLLKKYRMIVEEX

SEQ ID NO: 82840 - protein, 29 aa, Artificial Sequence
  Cyclic GFR-binding peptide
  MOD_RES (2), (3): Xaa is C or S
PXXTPTKMNAISMLYFNDKQQIILKKYRG

SEQ ID NO: 82841 - protein, 30 aa, Artificial Sequence
  Cyclic GFR-binding peptide
  MOD_RES (28), (30): Xaa is C or S
MNAISMLYFNDKQQIILKKYRGMVVDRXGX

SEQ ID NO: 82842 - protein, 29 aa, Artificial Sequence
  Cyclic GFR-binding peptide
  MOD_RES (27), (29): Xaa is C or S
NAISMLYFNDKQQIILKKYRGMVVDRXGX

SEQ ID NO: 82843 - protein, 29 aa, Artificial Sequence
  Cyclic GFR-binding peptide
  MOD_RES (1), (2): Xaa is C or S
XXTPTKMNAISMLYFNDKQQIILKKYRGM

SEQ ID NO: 82844 - protein, 34 aa, Artificial Sequence
  Cyclic GFR-binding peptide
  MOD_RES (6), (7): Xaa is C or S
GSAGPXXTPTKMNAISMLYFNDKQQIILKKYRGM

SEQ ID NO: 82845 - protein, 34 aa, Artificial Sequence; identical to SEQ ID NO: 31408
  Cyclic GFR-binding peptide
  MOD_RES (3), (4): Xaa is C or S

SEQ ID NO: 82846 - protein, 25 aa, Artificial Sequence
  Cyclic GFR-binding peptide
PVKTNAISMLYFDNGRVLLLKKYRM

SEQ ID NO: 82847 - protein, 31 aa, Artificial Sequence
  Cyclic GFR-binding peptide
  MOD_RES (29), (31): Xaa is C or S
VKTNAISMLYFDNGRVLLLKKYRMIVEEXGX

SEQ ID NO: 82848 - protein, 34 aa, Artificial Sequence; identical to SEQ ID NO: 31415
  Cyclic GFR-binding peptide
  MOD_RES (2), (3): Xaa is C or S

SEQ ID NO: 82849 - protein, 23 aa, Artificial Sequence
  Cyclic GFR-binding peptide
NAISMLYFDNGRVLLLKKYRMIV

SEQ ID NO: 82850 - protein, 38 aa, Artificial Sequence; identical to SEQ ID NO: 31418
  Cyclic GFR-binding peptide
  MOD_RES (3), (4), (36), (38): Xaa is C or S

SEQ ID NO: 82851 - protein, 27 aa, Artificial Sequence
  Cyclic GFR-binding peptide
TKMNAISMLYFNDKQQIILKKYRGMVV

SEQ ID NO: 82852 - protein, 21 aa, Artificial Sequence
  Cyclic GFR-binding peptide
TNAISMLYFDNGRVLLLKKYR

SEQ ID NO: 82853 - protein, 34 aa, Artificial Sequence; identical to SEQ ID NO: 31420
  Cyclic GFR-binding peptide
  MOD_RES (1), (2), (34): Xaa is C or S

SEQ ID NO: 82854 - protein, 32 aa, Artificial Sequence
  Cyclic GFR-binding peptide
  MOD_RES (2), (3): Xaa is C or S
PXXTPTKMNAISMLYFNDKQQIILKKYRGMVV

SEQ ID NO: 82855 - protein, 39 aa, Artificial Sequence; identical to SEQ ID NO: 31424
  Cyclic GFR-binding peptide
  MOD_RES (4), (5), (36), (38): Xaa is C or S

SEQ ID NO: 82856 - protein, 36 aa, Artificial Sequence
  Cyclic GFR-binding peptide
  MOD_RES (6), (7): Xaa is C or S
RVPSTXXAPVKTNAISMLYFDNGRVLLLKKYRMIVE

SEQ ID NO: 82857 - protein, 28 aa, Artificial Sequence
  Cyclic GFR-binding peptide
APVKTNAISMLYFDNGRVLLLKKYRMIV

SEQ ID NO: 82858 - protein, 33 aa, Artificial Sequence; identical to SEQ ID NO: 31426
  Cyclic GFR-binding peptide
  MOD_RES (31), (33): Xaa is C or S

SEQ ID NO: 82859 - protein, 33 aa, Artificial Sequence; identical to SEQ ID NO: 31427
  Cyclic GFR-binding peptide
  MOD_RES (2), (3): Xaa is C or S

SEQ ID NO: 82860 - protein, 28 aa, Artificial Sequence
  Cyclic GFR-binding peptide
  MOD_RES (27), (27): Xaa is C or S
NAISMLYFNDKQQIILKKYRGMVVDRXG

SEQ ID NO: 82861 - protein, 30 aa, Artificial Sequence
  Cyclic GFR-binding peptide
  MOD_RES (1), (2): Xaa is C or S
XXAPVKTNAISMLYFDNGRVLLLKKYRMIV

SEQ ID NO: 82862 - protein, 36 aa, Artificial Sequence; identical to SEQ ID NO: 31430
  Cyclic GFR-binding peptide
  MOD_RES (3), (4), (36): Xaa is C or S

SEQ ID NO: 82863 - protein, 37 aa, Artificial Sequence; identical to SEQ ID NO: 31431
  Cyclic GFR-binding peptide
  MOD_RES (2), (3), (35), (37): Xaa is C or S

SEQ ID NO: 82864 - protein, 34 aa, Artificial Sequence
  Cyclic GFR-binding peptide
  MOD_RES (6), (7): Xaa is C or S
RVPSTXXAPVKTNAISMLYFDNGRVLLLKKYRMI

SEQ ID NO: 82865 - protein, 31 aa, Artificial Sequence
  Cyclic GFR-binding peptide
  MOD_RES (3), (4): Xaa is C or S
GPXXTPTKMNAISMLYFNDKQQIILKKYRGM

SEQ ID NO: 82866 - protein, 36 aa, Artificial Sequence; identical to SEQ ID NO: 31432
  Cyclic GFR-binding peptide
  MOD_RES (4), (5), (36): Xaa is C or S

SEQ ID NO: 82867 - protein, 27 aa, Artificial Sequence
  Cyclic GFR-binding peptide
MNAISMLYFNDKQQIILKKYRGMVVDR

SEQ ID NO: 82868 - protein, 30 aa, Artificial Sequence
  Cyclic GFR-binding peptide
  MOD_RES (28), (30): Xaa is C or S
KTNAISMLYFDNGRVLLLKKYRMIVEEXGX

SEQ ID NO: 82869 - protein, 37 aa, Artificial Sequence; identical to SEQ ID NO: 31436
  Cyclic GFR-binding peptide
  MOD_RES (6), (7): Xaa is C or S

SEQ ID NO: 82870 - protein, 32 aa, Artificial Sequence; identical to SEQ ID NO: 31437
  Cyclic GFR-binding peptide
  MOD_RES (32), (32): Xaa is C or S

SEQ ID NO: 82871 - protein, 28 aa, Artificial Sequence
  Cyclic GFR-binding peptide
VKTNAISMLYFDNGRVLLLKKYRMIVEE

SEQ ID NO: 82872 - protein, 24 aa, Artificial Sequence
  Cyclic GFR-binding peptide
KTNAISMLYFDNGRVLLLKKYRMI

SEQ ID NO: 82873 - protein, 30 aa, Artificial Sequence
  Cyclic GFR-binding peptide
  MOD_RES (30), (30): Xaa is C or S
TKMNAISMLYFNDKQQIILKKYRGMVVDRX

SEQ ID NO: 82874 - protein, 41 aa, Artificial Sequence; identical to SEQ ID NO: 31439
  Cyclic GFR-binding peptide
  MOD_RES (6), (7), (38), (40): Xaa is C or S

SEQ ID NO: 82875 - protein, 34 aa, Artificial Sequence; identical to SEQ ID NO: 31441
  Cyclic GFR-binding peptide
  MOD_RES (1), (32), (34): Xaa is C or S

SEQ ID NO: 82876 - protein, 35 aa, Artificial Sequence; identical to SEQ ID NO: 31443
  Cyclic GFR-binding peptide
  MOD_RES (1), (2), (33), (35): Xaa is C or S

SEQ ID NO: 82877 - protein, 36 aa, Artificial Sequence; identical to SEQ ID NO: 31444
  Cyclic GFR-binding peptide
  MOD_RES (1), (2), (33), (35): Xaa is C or S

SEQ ID NO: 82878 - protein, 38 aa, Artificial Sequence; identical to SEQ ID NO: 31447
  Cyclic GFR-binding peptide
  MOD_RES (5), (6), (38): Xaa is C or S

SEQ ID NO: 82879 - protein, 32 aa, Artificial Sequence
  Cyclic GFR-binding peptide
  MOD_RES (5), (6): Xaa is C or S
VPSTXXAPVKTNAISMLYFDNGRVLLLKKYRM

SEQ ID NO: 82880 - protein, 22 aa, Artificial Sequence
  Cyclic GFR-binding peptide
TNAISMLYFDNGRVLLLKKYRM

SEQ ID NO: 82881 - protein, 30 aa, Artificial Sequence
  Cyclic GFR-binding peptide
PTKMNAISMLYFNDKQQIILKKYRGMVVDR

SEQ ID NO: 82882 - protein, 26 aa, Artificial Sequence
  Cyclic GFR-binding peptide
TPTKMNAISMLYFNDKQQIILKKYRG

SEQ ID NO: 82883 - protein, 24 aa, Artificial Sequence
  Cyclic GFR-binding peptide
TNAISMLYFDNGRVLLLKKYRMIV

SEQ ID NO: 82884 - protein, 38 aa, Artificial Sequence; identical to SEQ ID NO: 31463
  Cyclic GFR-binding peptide
  MOD_RES (5), (6), (37): Xaa is C or S

SEQ ID NO: 82885 - protein, 27 aa, Artificial Sequence
  Cyclic GFR-binding peptide
  MOD_RES (1), (2): Xaa is C or S
XXTPTKMNAISMLYFNDKQQIILKKYR

SEQ ID NO: 82886 - protein, 39 aa, Artificial Sequence; identical to SEQ ID NO: 31466
  Cyclic GFR-binding peptide
  MOD_RES (6), (7), (39): Xaa is C or S

SEQ ID NO: 82887 - protein, 34 aa, Artificial Sequence
  Cyclic GFR-binding peptide
  MOD_RES (4), (5): Xaa is C or S
AGPXXTPTKMNAISMLYFNDKQQIILKKYRGMVV

SEQ ID NO: 82888 - protein, 36 aa, Artificial Sequence; identical to SEQ ID NO: 31468
  Cyclic GFR-binding peptide
  MOD_RES (2), (3), (34), (36): Xaa is C or S

SEQ ID NO: 82889 - protein, 26 aa, Artificial Sequence
  Cyclic GFR-binding peptide
KMNAISMLYFNDKQQIILKKYRGMVV

SEQ ID NO: 82890 - protein, 28 aa, Artificial Sequence
  Cyclic GFR-binding peptide
  MOD_RES (28), (28): Xaa is C or S
KTNAISMLYFDNGRVLLLKKYRMIVEEX

SEQ ID NO: 82891 - protein, 30 aa, Artificial Sequence
  Cyclic GFR-binding peptide
  MOD_RES (4), (5): Xaa is C or S
PSTXXAPVKTNAISMLYFDNGRVLLLKKYR

SEQ ID NO: 82892 - protein, 38 aa, Artificial Sequence; identical to SEQ ID NO: 31472
  Cyclic GFR-binding peptide
  MOD_RES (6), (7), (38): Xaa is C or S

SEQ ID NO: 82893 - protein, 35 aa, Artificial Sequence; identical to SEQ ID NO: 31474
  Cyclic GFR-binding peptide
  MOD_RES (4), (5): Xaa is C or S

SEQ ID NO: 82894 - protein, 33 aa, Artificial Sequence; identical to SEQ ID NO: 31476
  Cyclic GFR-binding peptide
  MOD_RES (1), (32): Xaa is C or S

SEQ ID NO: 82895 - protein, 23 aa, Artificial Sequence
  Cyclic GFR-binding peptide
KMNAISMLYFNDKQQIILKKYRG

SEQ ID NO: 82896 - protein, 22 aa, Artificial Sequence
  Cyclic GFR-binding peptide
NAISMLYFNDKQQIILKKYRGM

SEQ ID NO: 82897 - protein, 31 aa, Artificial Sequence; identical to SEQ ID NO: 31482
  Cyclic GFR-binding peptide
  MOD_RES (1), (1): Xaa is C or S

SEQ ID NO: 82898 - protein, 23 aa, Artificial Sequence
  Cyclic GFR-binding peptide
MNAISMLYFNDKQQIILKKYRGM

SEQ ID NO: 82899 - protein, 25 aa, Artificial Sequence
  Cyclic GFR-binding peptide
VKTNAISMLYFDNGRVLLLKKYRMI

SEQ ID NO: 82900 - protein, 29 aa, Artificial Sequence
  Cyclic GFR-binding peptide
PTKMNAISMLYFNDKQQIILKKYRGMVVD

SEQ ID NO: 82901 - protein, 33 aa, Artificial Sequence
  Cyclic GFR-binding peptide
  MOD_RES (30), (32): Xaa is C or S
PVKTNAISMLYFDNGRVLLLKKYRMIVEEXGXL

SEQ ID NO: 82902 - protein, 23 aa, Artificial Sequence
  Cyclic GFR-binding peptide
VKTNAISMLYFDNGRVLLLKKYR

SEQ ID NO: 82903 - protein, 26 aa, Artificial Sequence
  Cyclic GFR-binding peptide
  MOD_RES (1), (1): Xaa is C or S
XTPTKMNAISMLYFNDKQQIILKKYR

SEQ ID NO: 82904 - protein, 28 aa, Artificial Sequence
  Cyclic GFR-binding peptide
  MOD_RES (28), (28): Xaa is C or S
MNAISMLYFNDKQQIILKKYRGMVVDRX

SEQ ID NO: 82905 - protein, 35 aa, Artificial Sequence
  Cyclic GFR-binding peptide
  MOD_RES (5), (6): Xaa is C or S
VPSTXXAPVKTNAISMLYFDNGRVLLLKKYRMIVE

SEQ ID NO: 82906 - protein, 29 aa, Artificial Sequence
  Cyclic GFR-binding peptide
  MOD_RES (28), (28): Xaa is C or S
MNAISMLYFNDKQQIILKKYRGMVVDRXG

SEQ ID NO: 82907 - protein, 26 aa, Artificial Sequence
  Cyclic GFR-binding peptide
  MOD_RES (1), (1): Xaa is C or S
XAPVKTNAISMLYFDNGRVLLLKKYR

SEQ ID NO: 82908 - protein, 33 aa, Artificial Sequence
  Cyclic GFR-binding peptide
  MOD_RES (30), (32): Xaa is C or S
TKMNAISMLYFNDKQQIILKKYRGMVVDRXGXS

SEQ ID NO: 82909 - protein, 28 aa, Artificial Sequence
  Cyclic GFR-binding peptide
PTKMNAISMLYFNDKQQIILKKYRGMVV

SEQ ID NO: 82910 - protein, 30 aa, Artificial Sequence
  Cyclic GFR-binding peptide
  MOD_RES (2), (3): Xaa is C or S
PXXTPTKMNAISMLYFNDKQQIILKKYRGM

SEQ ID NO: 82911 - protein, 22 aa, Artificial Sequence
  Cyclic GFR-binding peptide
KMNAISMLYFNDKQQIILKKYR

SEQ ID NO: 82912 - protein, 26 aa, Artificial Sequence
  Cyclic GFR-binding peptide
PTKMNAISMLYFNDKQQIILKKYRGM

SEQ ID NO: 82913 - protein, 31 aa, Artificial Sequence
  Cyclic GFR-binding peptide
  MOD_RES (5), (6): Xaa is C or S
VPSTXXAPVKTNAISMLYFDNGRVLLLKKYR

SEQ ID NO: 82914 - protein, 28 aa, Artificial Sequence
  Cyclic GFR-binding peptide
TKMNAISMLYFNDKQQIILKKYRGMVVD

SEQ ID NO: 82915 - protein, 30 aa, Artificial Sequence
  Cyclic GFR-binding peptide
  MOD_RES (4), (5): Xaa is C or S
AGPXXTPTKMNAISMLYFNDKQQIILKKYR

SEQ ID NO: 82916 - protein, 37 aa, Artificial Sequence; identical to SEQ ID NO: 31499
  Cyclic GFR-binding peptide
  MOD_RES (3), (4), (35), (37): Xaa is C or S

SEQ ID NO: 82917 - protein, 30 aa, Artificial Sequence
  Cyclic GFR-binding peptide
  MOD_RES (30), (30): Xaa is C or S
PVKTNAISMLYFDNGRVLLLKKYRMIVEEX

SEQ ID NO: 82918 - protein, 24 aa, Artificial Sequence
  Cyclic GFR-binding peptide
TKMNAISMLYFNDKQQIILKKYRG

SEQ ID NO: 82919 - protein, 24 aa, Artificial Sequence
  Cyclic GFR-binding peptide
MNAISMLYFNDKQQIILKKYRGMV

SEQ ID NO: 82920 - protein, 32 aa, Artificial Sequence
  Cyclic GFR-binding peptide
  MOD_RES (29), (31): Xaa is C or S
VKTNAISMLYFDNGRVLLLKKYRMIVEEXGXL

SEQ ID NO: 82921 - protein, 27 aa, Artificial Sequence
  Cyclic GFR-binding peptide
APVKTNAISMLYFDNGRVLLLKKYRMI

SEQ ID NO: 82922 - protein, 31 aa, Artificial Sequence
  Cyclic GFR-binding peptide
  MOD_RES (30), (30): Xaa is C or S
TKMNAISMLYFNDKQQIILKKYRGMVVDRXG

SEQ ID NO: 82923 - protein, 41 aa, Artificial Sequence; identical to SEQ ID NO: 31507
  Cyclic GFR-binding peptide
  MOD_RES (5), (6), (38), (40): Xaa is C or S

SEQ ID NO: 82924 - protein, 37 aa, Artificial Sequence; identical to SEQ ID NO: 31509
  Cyclic GFR-binding peptide
  MOD_RES (5), (6): Xaa is C or S

SEQ ID NO: 82925 - protein, 22 aa, Artificial Sequence
  Cyclic GFR-binding peptide
MNAISMLYFNDKQQIILKKYRG

SEQ ID NO: 82926 - protein, 33 aa, Artificial Sequence
  Cyclic GFR-binding peptide
  MOD_RES (5), (6): Xaa is C or S
SAGPXXTPTKMNAISMLYFNDKQQIILKKYRGM

SEQ ID NO: 82927 - protein, 27 aa, Artificial Sequence
  Cyclic GFR-binding peptide
  MOD_RES (1), (2): Xaa is C or S
XXAPVKTNAISMLYFDNGRVLLLKKYR

SEQ ID NO: 82928 - protein, 36 aa, Artificial Sequence; identical to SEQ ID NO: 31513
  Cyclic GFR-binding peptide
  MOD_RES (2), (3), (35): Xaa is C or S

SEQ ID NO: 82929 - protein, 33 aa, Artificial Sequence
  Cyclic GFR-binding peptide
  MOD_RES (4), (5): Xaa is C or S
PSTXXAPVKTNAISMLYFDNGRVLLLKKYRMIV

SEQ ID NO: 82930 - protein, 40 aa, Artificial Sequence; identical to SEQ ID NO: 31515
  Cyclic GFR-binding peptide
  MOD_RES (5), (6), (37), (39): Xaa is C or S

SEQ ID NO: 82931 - protein, 32 aa, Artificial Sequence
  Cyclic GFR-binding peptide
  MOD_RES (3), (4): Xaa is C or S
STXXAPVKTNAISMLYFDNGRVLLLKKYRMIV

SEQ ID NO: 82932 - protein, 25 aa, Artificial Sequence
  Cyclic GFR-binding peptide
PTKMNAISMLYFNDKQQIILKKYRG

SEQ ID NO: 82933 - protein, 39 aa, Artificial Sequence; identical to SEQ ID NO: 31520
  Cyclic GFR-binding peptide
  MOD_RES (5), (6), (37), (39): Xaa is C or S

SEQ ID NO: 82934 - protein, 35 aa, Artificial Sequence; identical to SEQ ID NO: 31524
  Cyclic GFR-binding peptide
  MOD_RES (2), (3), (34): Xaa is C or S

SEQ ID NO: 82935 - protein, 25 aa, Artificial Sequence
  Cyclic GFR-binding peptide
NAISMLYFDNGRVLLLKKYRMIVEE

SEQ ID NO: 82936 - protein, 29 aa, Artificial Sequence
  Cyclic GFR-binding peptide
  MOD_RES (1), (2): Xaa is C or S
XXAPVKTNAISMLYFDNGRVLLLKKYRMI

SEQ ID NO: 82937 - protein, 32 aa, Artificial Sequence; identical to SEQ ID NO: 31525
  Cyclic GFR-binding peptide
  MOD_RES (1), (32): Xaa is C or S

SEQ ID NO: 82938 - protein, 29 aa, Artificial Sequence
  Cyclic GFR-binding peptide
  MOD_RES (1), (1): Xaa is C or S
XAPVKTNAISMLYFDNGRVLLLKKYRMIV

SEQ ID NO: 82939 - protein, 35 aa, Artificial Sequence; identical to SEQ ID NO: 31528
  Cyclic GFR-binding peptide
  MOD_RES (1), (32), (34): Xaa is C or S

SEQ ID NO: 82940 - protein, 28 aa, Artificial Sequence
  Cyclic GFR-binding peptide
  MOD_RES (1), (2): Xaa is C or S
XXTPTKMNAISMLYFNDKQQIILKKYRG

SEQ ID NO: 82941 - protein, 27 aa, Artificial Sequence
  Cyclic GFR-binding peptide
  MOD_RES (1), (1): Xaa is C or S
XTPTKMNAISMLYFNDKQQIILKKYRG

SEQ ID NO: 82942 - protein, 27 aa, Artificial Sequence
  Cyclic GFR-binding peptide
KMNAISMLYFNDKQQIILKKYRGMVVD

SEQ ID NO: 82943 - protein, 35 aa, Artificial Sequence; identical to SEQ ID NO: 31530
  Cyclic GFR-binding peptide
  MOD_RES (4), (5): Xaa is C or S

SEQ ID NO: 82944 - protein, 26 aa, Artificial Sequence
  Cyclic GFR-binding peptide
PVKTNAISMLYFDNGRVLLLKKYRMI

SEQ ID NO: 82945 - protein, 33 aa, Artificial Sequence
  Cyclic GFR-binding peptide
  MOD_RES (6), (7): Xaa is C or S
RVPSTXXAPVKTNAISMLYFDNGRVLLLKKYRM

SEQ ID NO: 82946 - protein, 23 aa, Artificial Sequence
  Cyclic GFR-binding peptide
KTNAISMLYFDNGRVLLLKKYRM

SEQ ID NO: 82947 - protein, 28 aa, Artificial Sequence
  Cyclic GFR-binding peptide
  MOD_RES (27), (27): Xaa is C or S
TNAISMLYFDNGRVLLLKKYRMIVEEXG

SEQ ID NO: 82948 - protein, 32 aa, Artificial Sequence
  Cyclic GFR-binding peptide
  MOD_RES (31), (31): Xaa is C or S
PTKMNAISMLYFNDKQQIILKKYRGMVVDRXG

SEQ ID NO: 82949 - protein, 28 aa, Artificial Sequence
  Cyclic GFR-binding peptide
TPTKMNAISMLYFNDKQQIILKKYRGMV

SEQ ID NO: 82950 - protein, 29 aa, Artificial Sequence
  Cyclic GFR-binding peptide
  MOD_RES (3), (4): Xaa is C or S
STXXAPVKTNAISMLYFDNGRVLLLKKYR

SEQ ID NO: 82951 - protein, 23 aa, Artificial Sequence
  Cyclic GFR-binding peptide
TKMNAISMLYFNDKQQIILKKYR

SEQ ID NO: 82952 - protein, 36 aa, Artificial Sequence; identical to SEQ ID NO: 31536
  Cyclic GFR-binding peptide
  MOD_RES (1), (33), (35): Xaa is C or S

SEQ ID NO: 82953 - protein, 32 aa, Artificial Sequence; identical to SEQ ID NO: 31537
  Cyclic GFR-binding peptide
  MOD_RES (1), (2): Xaa is C or S

SEQ ID NO: 82954 - protein, 25 aa, Artificial Sequence
  Cyclic GFR-binding peptide
TKMNAISMLYFNDKQQIILKKYRGM

SEQ ID NO: 82955 - protein, 35 aa, Artificial Sequence; identical to SEQ ID NO: 31538
  Cyclic GFR-binding peptide
  MOD_RES (1), (33), (35): Xaa is C or S

SEQ ID NO: 82956 - protein, 40 aa, Artificial Sequence; identical to SEQ ID NO: 31539
  Cyclic GFR-binding peptide
  MOD_RES (6), (7), (38), (40): Xaa is C or S

SEQ ID NO: 82957 - protein, 31 aa, Artificial Sequence
  Cyclic GFR-binding peptide
  MOD_RES (5), (6): Xaa is C or S
SAGPXXTPTKMNAISMLYFNDKQQIILKKYR

SEQ ID NO: 82958 - protein, 31 aa, Artificial Sequence
  Cyclic GFR-binding peptide
  MOD_RES (31), (31): Xaa is C or S
PTKMNAISMLYFNDKQQIILKKYRGMVVDRX

SEQ ID NO: 82959 - protein, 32 aa, Artificial Sequence
  Cyclic GFR-binding peptide
  MOD_RES (2), (3): Xaa is C or S
TXXAPVKTNAISMLYFDNGRVLLLKKYRMIVE

SEQ ID NO: 82960 - protein, 29 aa, Artificial Sequence
  Cyclic GFR-binding peptide
  MOD_RES (26), (28): Xaa is C or S
NAISMLYFDNGRVLLLKKYRMIVEEXGXL

SEQ ID NO: 82961 - protein, 38 aa, Artificial Sequence; identical to SEQ ID NO: 31543
  Cyclic GFR-binding peptide
  MOD_RES (2), (3), (35), (37): Xaa is C or S

SEQ ID NO: 82962 - protein, 33 aa, Artificial Sequence
  Cyclic GFR-binding peptide
  MOD_RES (3), (4): Xaa is C or S
GPXXTPTKMNAISMLYFNDKQQIILKKYRGMVV

SEQ ID NO: 82963 - protein, 31 aa, Artificial Sequence; identical to SEQ ID NO: 31548
  Cyclic GFR-binding peptide
  MOD_RES (1), (1): Xaa is C or S

SEQ ID NO: 82964 - protein, 38 aa, Artificial Sequence; identical to SEQ ID NO: 31374
  Cyclic GFR-binding peptide
  MOD_RES (6), (7): Xaa is C or S

SEQ ID NO: 82965 - protein, 27 aa, Artificial Sequence
  Cyclic GFR-binding peptide
PVKTNAISMLYFDNGRVLLLKKYRMIV

SEQ ID NO: 82966 - protein, 37 aa, Artificial Sequence; identical to SEQ ID NO: 31380
  Cyclic GFR-binding peptide
  MOD_RES (1), (2), (34), (36): Xaa is C or S

SEQ ID NO: 82967 - protein, 25 aa, Artificial Sequence
  Cyclic GFR-binding peptide
TPTKMNAISMLYFNDKQQIILKKYR

SEQ ID NO: 82968 - protein, 37 aa, Artificial Sequence; identical to SEQ ID NO: 31381
  Cyclic GFR-binding peptide
  MOD_RES (3), (4), (36): Xaa is C or S

SEQ ID NO: 82969 - protein, 40 aa, Artificial Sequence; identical to SEQ ID NO: 31382
  Cyclic GFR-binding peptide
  MOD_RES (4), (5), (37), (39): Xaa is C or S

SEQ ID NO: 82970 - protein, 29 aa, Artificial Sequence
  Cyclic GFR-binding peptide
  MOD_RES (3), (4): Xaa is C or S
GPXXTPTKMNAISMLYFNDKQQIILKKYR

SEQ ID NO: 82971 - protein, 30 aa, Artificial Sequence
  Cyclic GFR-binding peptide
  MOD_RES (1), (1): Xaa is C or S
XTPTKMNAISMLYFNDKQQIILKKYRGMVV

SEQ ID NO: 82972 - protein, 36 aa, Artificial Sequence
  Cyclic GFR-binding peptide
  MOD_RES (6), (7): Xaa is C or S
GSAGPXXTPTKMNAISMLYFNDKQQIILKKYRGMVV

SEQ ID NO: 82973 - protein, 23 aa, Artificial Sequence
  Cyclic GFR-binding peptide
NAISMLYFNDKQQIILKKYRGMV

SEQ ID NO: 82974 - protein, 31 aa, Artificial Sequence
  Cyclic GFR-binding peptide
  MOD_RES (2), (3): Xaa is C or S
TXXAPVKTNAISMLYFDNGRVLLLKKYRMIV

SEQ ID NO: 82975 - protein, 26 aa, Artificial Sequence
  Cyclic GFR-binding peptide
MNAISMLYFNDKQQIILKKYRGMVVD

SEQ ID NO: 82976 - protein, 31 aa, Artificial Sequence
  Cyclic GFR-binding peptide
  MOD_RES (1), (2): Xaa is C or S
XXAPVKTNAISMLYFDNGRVLLLKKYRMIVE

SEQ ID NO: 82977 - protein, 34 aa, Artificial Sequence
  Cyclic GFR-binding peptide
  MOD_RES (5), (6): Xaa is C or S
VPSTXXAPVKTNAISMLYFDNGRVLLLKKYRMIV

SEQ ID NO: 82978 - protein, 25 aa, Artificial Sequence
  Cyclic GFR-binding peptide
KTNAISMLYFDNGRVLLLKKYRMIV

SEQ ID NO: 82979 - protein, 29 aa, Artificial Sequence
  Cyclic GFR-binding peptide
NAISMLYFDNGRVLLLKKYRAAAAAAAAA

SEQ ID NO: 82980 - protein, 27 aa, Artificial Sequence
  Cyclic GFR-binding peptide
PTKMNAISMLYFNDKQQIILKKYRGMV

SEQ ID NO: 82981 - protein, 34 aa, Artificial Sequence; identical to SEQ ID NO: 31397
  Cyclic GFR-binding peptide
  MOD_RES (3), (4): Xaa is C or S

SEQ ID NO: 82982 - protein, 32 aa, Artificial Sequence
  Cyclic GFR-binding peptide
  MOD_RES (4), (5): Xaa is C or S
AGPXXTPTKMNAISMLYFNDKQQIILKKYRGM

SEQ ID NO: 82983 - protein, 36 aa, Artificial Sequence; identical to SEQ ID NO: 31404
  Cyclic GFR-binding peptide
  MOD_RES (5), (6): Xaa is C or S

SEQ ID NO: 82984 - protein, 29 aa, Artificial Sequence
  Cyclic GFR-binding peptide
  MOD_RES (28), (28): Xaa is C or S
KTNAISMLYFDNGRVLLLKKYRMIVEEXG

SEQ ID NO: 82985 - protein, 29 aa, Artificial Sequence
  Cyclic GFR-binding peptide
TPTKMNAISMLYFNDKQQIILKKYRGMVV

SEQ ID NO: 82986 - protein, 28 aa, Artificial Sequence
  Cyclic GFR-binding peptide
  MOD_RES (1), (1): Xaa is C or S
XAPVKTNAISMLYFDNGRVLLLKKYRMI

SEQ ID NO: 82987 - protein, 33 aa, Artificial Sequence
  Cyclic GFR-binding peptide
  MOD_RES (31), (33): Xaa is C or S
PTKMNAISMLYFNDKQQIILKKYRGMVVDRXGX

SEQ ID NO: 82988 - protein, 35 aa, Artificial Sequence; identical to SEQ ID NO: 31406
  Cyclic GFR-binding peptide
  MOD_RES (32), (34): Xaa is C or S

SEQ ID NO: 82989 - protein, 35 aa, Artificial Sequence; identical to SEQ ID NO: 31407
  Cyclic GFR-binding peptide
  MOD_RES (3), (4): Xaa is C or S

SEQ ID NO: 82990 - protein, 30 aa, Artificial Sequence; identical to SEQ ID NO: 31411
  Cyclic GFR-binding peptide

SEQ ID NO: 82991 - protein, 33 aa, Artificial Sequence
  Cyclic GFR-binding peptide
  MOD_RES (6), (7): Xaa is C or S
GSAGPXXTPTKMNAISMLYFNDKQQIILKKYRG

SEQ ID NO: 82992 - protein, 29 aa, Artificial Sequence
  Cyclic GFR-binding peptide
  MOD_RES (1), (1): Xaa is C or S
XTPTKMNAISMLYFNDKQQIILKKYRGMV

SEQ ID NO: 82993 - protein, 37 aa, Artificial Sequence; identical to SEQ ID NO: 31414
  Cyclic GFR-binding peptide
  MOD_RES (4), (5), (37): Xaa is C or S

SEQ ID NO: 82994 - protein, 38 aa, Artificial Sequence; identical to SEQ ID NO: 31422
  Cyclic GFR-binding peptide
  MOD_RES (3), (4), (35), (37): Xaa is C or S

SEQ ID NO: 82995 - protein, 34 aa, Artificial Sequence
  Cyclic GFR-binding peptide
  MOD_RES (31), (33): Xaa is C or S
PTKMNAISMLYFNDKQQIILKKYRGMVVDRXGXS

SEQ ID NO: 82996 - protein, 31 aa, Artificial Sequence; identical to SEQ ID NO: 31425
  Cyclic GFR-binding peptide

SEQ ID NO: 82997 - protein, 30 aa, Artificial Sequence
  Cyclic GFR-binding peptide
  MOD_RES (29), (29): Xaa is C or S
VKTNAISMLYFDNGRVLLLKKYRMIVEEXG

SEQ ID NO: 82998 - protein, 20 aa, Artificial Sequence
  Cyclic GFR-binding peptide
NAISMLYFDNGRVLLLKKYR

SEQ ID NO: 82999 - protein, 24 aa, Artificial Sequence
  Cyclic GFR-binding peptide
NAISMLYFNDKQQIILKKYRGMVV

SEQ ID NO: 83000 - protein, 32 aa, Artificial Sequence; identical to SEQ ID NO: 31434
  Cyclic GFR-binding peptide
  MOD_RES (1), (2): Xaa is C or S

SEQ ID NO: 83001 - protein, 39 aa, Artificial Sequence; identical to SEQ ID NO: 31435
  Cyclic GFR-binding peptide
  MOD_RES (4), (5), (37), (39): Xaa is C or S

SEQ ID NO: 83002 - protein, 22 aa, Artificial Sequence
  Cyclic GFR-binding peptide
KTNAISMLYFDNGRVLLLKKYR

SEQ ID NO: 83003 - protein, 35 aa, Artificial Sequence
  Cyclic GFR-binding peptide
  MOD_RES (6), (7): Xaa is C or S
GSAGPXXTPTKMNAISMLYFNDKQQIILKKYRGMV

SEQ ID NO: 83004 - protein, 23 aa, Artificial Sequence
  Cyclic GFR-binding peptide
TNAISMLYFDNGRVLLLKKYRMI

SEQ ID NO: 83005 - protein, 37 aa, Artificial Sequence; identical to SEQ ID NO: 31442
  Cyclic GFR-binding peptide
  MOD_RES (2), (3), (34), (36): Xaa is C or S

SEQ ID NO: 83006 - protein, 30 aa, Artificial Sequence
  Cyclic GFR-binding peptide
  MOD_RES (2), (3): Xaa is C or S
TXXAPVKTNAISMLYFDNGRVLLLKKYRMI

SEQ ID NO: 83007 - protein, 30 aa, Artificial Sequence
  Cyclic GFR-binding peptide
  MOD_RES (27), (29): Xaa is C or S
TNAISMLYFDNGRVLLLKKYRMIVEEXGXL

SEQ ID NO: 83008 - protein, 24 aa, Artificial Sequence
  Cyclic GFR-binding peptide
NAISMLYFDNGRVLLLKKYRMIVE

SEQ ID NO: 83009 - protein, 34 aa, Artificial Sequence; identical to SEQ ID NO: 31449
  Cyclic GFR-binding peptide
  MOD_RES (1), (33): Xaa is C or S

SEQ ID NO: 83010 - protein, 37 aa, Artificial Sequence; identical to SEQ ID NO: 31450
  Cyclic GFR-binding peptide
  MOD_RES (4), (5), (36): Xaa is C or S

SEQ ID NO: 83011 - protein, 21 aa, Artificial Sequence
  Cyclic GFR-binding peptide
NAISMLYFDNGRVLLLKKYRM

SEQ ID NO: 83012 - protein, 28 aa, Artificial Sequence
  Cyclic GFR-binding peptide
KMNAISMLYFNDKQQIILKKYRGMVVDR

SEQ ID NO: 83013 - protein, 33 aa, Artificial Sequence
  Cyclic GFR-binding peptide
  MOD_RES (3), (4): Xaa is C or S
STXXAPVKTNAISMLYFDNGRVLLLKKYRMIVE

SEQ ID NO: 83014 - protein, 34 aa, Artificial Sequence; identical to SEQ ID NO: 31454
  Cyclic GFR-binding peptide
  MOD_RES (1), (2), (33): Xaa is C or S

SEQ ID NO: 83015 - protein, 33 aa, Artificial Sequence; identical to SEQ ID NO: 31455
  Cyclic GFR-binding peptide
  MOD_RES (1), (2): Xaa is C or S

SEQ ID NO: 83016 - protein, 31 aa, Artificial Sequence
  Cyclic GFR-binding peptide
  MOD_RES (2), (3): Xaa is C or S
PXXTPTKMNAISMLYFNDKQQIILKKYRGMV

SEQ ID NO: 83017 - protein, 25 aa, Artificial Sequence
  Cyclic GFR-binding peptide
NAISMLYFNDKQQIILKKYRGMVVD

SEQ ID NO: 83018 - protein, 36 aa, Artificial Sequence; identical to SEQ ID NO: 31456
  Cyclic GFR-binding peptide
  MOD_RES (4), (5): Xaa is C or S

SEQ ID NO: 83019 - protein, 33 aa, Artificial Sequence; identical to SEQ ID NO: 31459
  Cyclic GFR-binding peptide
  MOD_RES (1), (33): Xaa is C or S

SEQ ID NO: 83020 - protein, 39 aa, Artificial Sequence; identical to SEQ ID NO: 31461
  Cyclic GFR-binding peptide
  MOD_RES (3), (4), (36), (38): Xaa is C or S

SEQ ID NO: 83021 - protein, 37 aa, Artificial Sequence; identical to SEQ ID NO: 31462
  Cyclic GFR-binding peptide
  MOD_RES (6), (7): Xaa is C or S

SEQ ID NO: 83022 - protein, 27 aa, Artificial Sequence
  Cyclic GFR-binding peptide
TPTKMNAISMLYFNDKQQIILKKYRGM

SEQ ID NO: 83023 - protein, 28 aa, Artificial Sequence
  Cyclic GFR-binding peptide
  MOD_RES (2), (3): Xaa is C or S
PXXTPTKMNAISMLYFNDKQQIILKKYR

SEQ ID NO: 83024 - protein, 29 aa, Artificial Sequence
  Cyclic GFR-binding peptide
TKMNAISMLYFNDKQQIILKKYRGMVVDR

SEQ ID NO: 83025 - protein, 24 aa, Artificial Sequence
  Cyclic GFR-binding peptide
KMNAISMLYFNDKQQIILKKYRGM

SEQ ID NO: 83026 - protein, 30 aa, Artificial Sequence; identical to SEQ ID NO: 31477
  Cyclic GFR-binding peptide

SEQ ID NO: 83027 - protein, 34 aa, Artificial Sequence; identical to SEQ ID NO: 31478
  Cyclic GFR-binding peptide
  MOD_RES (32), (34): Xaa is C or S

SEQ ID NO: 83028 - protein, 32 aa, Artificial Sequence
  Cyclic GFR-binding peptide
  MOD_RES (3), (4): Xaa is C or S
GPXXTPTKMNAISMLYFNDKQQIILKKYRGMV

SEQ ID NO: 83029 - protein, 30 aa, Artificial Sequence
  Cyclic GFR-binding peptide
  MOD_RES (3), (4): Xaa is C or S
STXXAPVKTNAISMLYFDNGRVLLLKKYRM

SEQ ID NO: 83030 - protein, 42 aa, Artificial Sequence; identical to SEQ ID NO: 31487
  Cyclic GFR-binding peptide
  MOD_RES (6), (7), (39), (41): Xaa is C or S

SEQ ID NO: 83031 - protein, 36 aa, Artificial Sequence; identical to SEQ ID NO: 31489
  Cyclic GFR-binding peptide
  MOD_RES (3), (4), (35): Xaa is C or S

SEQ ID NO: 83032 - protein, 40 aa, Artificial Sequence; identical to SEQ ID NO: 31492
  Cyclic GFR-binding peptide
  MOD_RES (6), (7), (39): Xaa is C or S

SEQ ID NO: 83033 - protein, 24 aa, Artificial Sequence
  Cyclic GFR-binding peptide
PTKMNAISMLYFNDKQQIILKKYR

SEQ ID NO: 83034 - protein, 28 aa, Artificial Sequence
  Cyclic GFR-binding peptide
  MOD_RES (26), (28): Xaa is C or S
NAISMLYFDNGRVLLLKKYRMIVEEXGX

SEQ ID NO: 83035 - protein, 31 aa, Artificial Sequence
  Cyclic GFR-binding peptide
  MOD_RES (28), (30): Xaa is C or S
MNAISMLYFNDKQQIILKKYRGMVVDRXGXS

SEQ ID NO: 83036 - protein, 36 aa, Artificial Sequence; identical to SEQ ID NO: 31495
  Cyclic GFR-binding peptide
  MOD_RES (1), (2), (34), (36): Xaa is C or S

SEQ ID NO: 83037 - protein, 39 aa, Artificial Sequence; identical to SEQ ID NO: 31496
  Cyclic GFR-binding peptide
  MOD_RES (6), (7), (38): Xaa is C or S

SEQ ID NO: 83038 - protein, 31 aa, Artificial Sequence
  Cyclic GFR-binding peptide
  MOD_RES (30), (30): Xaa is C or S
PVKTNAISMLYFDNGRVLLLKKYRMIVEEXG

SEQ ID NO: 83039 - protein, 35 aa, Artificial Sequence
  Cyclic GFR-binding peptide
  MOD_RES (6), (7): Xaa is C or S
RVPSTXXAPVKTNAISMLYFDNGRVLLLKKYRMIV

SEQ ID NO: 83040 - protein, 24 aa, Artificial Sequence
  Cyclic GFR-binding peptide
VKTNAISMLYFDNGRVLLLKKYRM

SEQ ID NO: 83041 - protein, 31 aa, Artificial Sequence
  Cyclic GFR-binding peptide
  MOD_RES (4), (5): Xaa is C or S
AGPXXTPTKMNAISMLYFNDKQQIILKKYRG

SEQ ID NO: 83042 - protein, 33 aa, Artificial Sequence; identical to SEQ ID NO: 31501
  Cyclic GFR-binding peptide
  MOD_RES (2), (3): Xaa is C or S

SEQ ID NO: 83043 - protein, 26 aa, Artificial Sequence
  Cyclic GFR-binding peptide
TKMNAISMLYFNDKQQIILKKYRGMV

SEQ ID NO: 83044 - protein, 38 aa, Artificial Sequence; identical to SEQ ID NO: 31504
  Cyclic GFR-binding peptide
  MOD_RES (4), (5), (36), (38): Xaa is C or S

SEQ ID NO: 83045 - protein, 28 aa, Artificial Sequence
  Cyclic GFR-binding peptide
  MOD_RES (2), (3): Xaa is C or S
TXXAPVKTNAISMLYFDNGRVLLLKKYR

SEQ ID NO: 83046 - protein, 37 aa, Artificial Sequence; identical to SEQ ID NO: 31506
  Cyclic GFR-binding peptide
  MOD_RES (5), (6), (37): Xaa is C or S

SEQ ID NO: 83047 - protein, 33 aa, Artificial Sequence; identical to SEQ ID NO: 31508
  Cyclic GFR-binding peptide
  MOD_RES (32), (32): Xaa is C or S

SEQ ID NO: 83048 - protein, 31 aa, Artificial Sequence
  Cyclic GFR-binding peptide
  MOD_RES (3), (4): Xaa is C or S
STXXAPVKTNAISMLYFDNGRVLLLKKYRMI

SEQ ID NO: 83049 - protein, 30 aa, Artificial Sequence
  Cyclic GFR-binding peptide
  MOD_RES (3), (4): Xaa is C or S
GPXXTPTKMNAISMLYFNDKQQIILKKYRG

SEQ ID NO: 83050 - protein, 32 aa, Artificial Sequence; identical to SEQ ID NO: 31510
  Cyclic GFR-binding peptide
  MOD_RES (31), (31): Xaa is C or S

SEQ ID NO: 83051 - protein, 20 aa, Artificial Sequence
  Cyclic GFR-binding peptide
NAISMLYFNDKQQIILKKYR

SEQ ID NO: 83052 - protein, 39 aa, Artificial Sequence; identical to SEQ ID NO: 31518
  Cyclic GFR-binding peptide
  MOD_RES (5), (6), (38): Xaa is C or S

SEQ ID NO: 83053 - protein, 28 aa, Artificial Sequence
  Cyclic GFR-binding peptide
  MOD_RES (1), (2): Xaa is C or S
XXAPVKTNAISMLYFDNGRVLLLKKYRM

SEQ ID NO: 83054 - protein, 27 aa, Artificial Sequence
  Cyclic GFR-binding peptide
  MOD_RES (1), (1): Xaa is C or S
XAPVKTNAISMLYFDNGRVLLLKKYRM

SEQ ID NO: 83055 - protein, 35 aa, Artificial Sequence; identical to SEQ ID NO: 31523
  Cyclic GFR-binding peptide
  MOD_RES (2), (3), (35): Xaa is C or S

SEQ ID NO: 83056 - protein, 32 aa, Artificial Sequence
  Cyclic GFR-binding peptide
  MOD_RES (4), (5): Xaa is C or S
PSTXXAPVKTNAISMLYFDNGRVLLLKKYRMI

SEQ ID NO: 83057 - protein, 24 aa, Artificial Sequence
  Cyclic GFR-binding peptide
PVKTNAISMLYFDNGRVLLLKKYR

SEQ ID NO: 83058 - protein, 22 aa, Artificial Sequence
  Cyclic GFR-binding peptide
NAISMLYFDNGRVLLLKKYRMI

SEQ ID NO: 83059 - protein, 29 aa, Artificial Sequence
  Cyclic GFR-binding peptide
PVKTNAISMLYFDNGRVLLLKKYRMIVEE

SEQ ID NO: 83060 - protein, 35 aa, Artificial Sequence
  Cyclic GFR-binding peptide
  MOD_RES (5), (6): Xaa is C or S
SAGPXXTPTKMNAISMLYFNDKQQIILKKYRGMVV

SEQ ID NO: 83061 - protein, 29 aa, Artificial Sequence
  Cyclic GFR-binding peptide
  MOD_RES (29), (29): Xaa is C or S
KMNAISMLYFNDKQQIILKKYRGMVVDRX

SEQ ID NO: 83062 - protein, 27 aa, Artificial Sequence
  Cyclic GFR-binding peptide
  MOD_RES (26), (26): Xaa is C or S
NAISMLYFDNGRVLLLKKYRMIVEEXG

SEQ ID NO: 83063 - protein, 27 aa, Artificial Sequence
  Cyclic GFR-binding peptide
  MOD_RES (27), (27): Xaa is C or S
NAISMLYFNDKQQIILKKYRGMVVDRX

SEQ ID NO: 83064 - protein, 29 aa, Artificial Sequence
  Cyclic GFR-binding peptide
  MOD_RES (27), (29): Xaa is C or S
TNAISMLYFDNGRVLLLKKYRMIVEEXGX

SEQ ID NO: 83065 - protein, 35 aa, Artificial Sequence; identical to SEQ ID NO: 31534
  Cyclic GFR-binding peptide
  MOD_RES (3), (4), (35): Xaa is C or S

SEQ ID NO: 83066 - protein, 29 aa, Artificial Sequence
  Cyclic GFR-binding peptide
APVKTNAISMLYFDNGRVLLLKKYRMIVE

SEQ ID NO: 83067 - protein, 28 aa, Artificial Sequence
  Cyclic GFR-binding peptide
PVKTNAISMLYFDNGRVLLLKKYRMIVE

SEQ ID NO: 83068 - protein, 31 aa, Artificial Sequence
  Cyclic GFR-binding peptide
  MOD_RES (29), (31): Xaa is C or S
KMNAISMLYFNDKQQIILKKYRGMVVDRXGX

SEQ ID NO: 83069 - protein, 25 aa, Artificial Sequence
  Cyclic GFR-binding peptide
APVKTNAISMLYFDNGRVLLLKKYR

SEQ ID NO: 83070 - protein, 32 aa, Artificial Sequence
  Cyclic GFR-binding peptide
  MOD_RES (6), (7): Xaa is C or S
RVPSTXXAPVKTNAISMLYFDNGRVLLLKKYR

SEQ ID NO: 83071 - protein, 31 aa, Artificial Sequence
  Cyclic GFR-binding peptide
  MOD_RES (28), (30): Xaa is C or S
KTNAISMLYFDNGRVLLLKKYRMIVEEXGXL

SEQ ID NO: 83072 - protein, 34 aa, Artificial Sequence
  Cyclic GFR-binding peptide
  MOD_RES (5), (6): Xaa is C or S
SAGPXXTPTKMNAISMLYFNDKQQIILKKYRGMV

SEQ ID NO: 83073 - protein, 31 aa, Artificial Sequence
  Cyclic GFR-binding peptide
  MOD_RES (4), (5): Xaa is C or S
PSTXXAPVKTNAISMLYFDNGRVLLLKKYRM

SEQ ID NO: 83074 - protein, 30 aa, Artificial Sequence
  Cyclic GFR-binding peptide
  MOD_RES (29), (29): Xaa is C or S
KMNAISMLYFNDKQQIILKKYRGMVVDRXG

SEQ ID NO: 83075 - protein, 26 aa, Artificial Sequence
  Cyclic GFR-binding peptide
VKTNAISMLYFDNGRVLLLKKYRMIV

SEQ ID NO: 83076 - protein, 27 aa, Artificial Sequence
  Cyclic GFR-binding peptide
VKTNAISMLYFDNGRVLLLKKYRMIVE

SEQ ID NO: 83077 - protein, 21 aa, Artificial Sequence
  Cyclic GFR-binding peptide
MNAISMLYFNDKQQIILKKYR

SEQ ID NO: 83078 - protein, 27 aa, Artificial Sequence
  Cyclic GFR-binding peptide
  MOD_RES (27), (27): Xaa is C or S
TNAISMLYFDNGRVLLLKKYRMIVEEX

SEQ ID NO: 83079 - protein, 31 aa, Artificial Sequence
  Cyclic GFR-binding peptide
  MOD_RES (1), (2): Xaa is C or S
XXTPTKMNAISMLYFNDKQQIILKKYRGMVV

SEQ ID NO: 83080 - protein, 33 aa, Artificial Sequence; identical to SEQ ID NO: 31544
  Cyclic GFR-binding peptide
  MOD_RES (1), (2), (33): Xaa is C or S

SEQ ID NO: 83081 - protein, 25 aa, Artificial Sequence
  Cyclic GFR-binding peptide
KMNAISMLYFNDKQQIILKKYRGMV

SEQ ID NO: 83082 - protein, 29 aa, Artificial Sequence
  Cyclic GFR-binding peptide
  MOD_RES (2), (3): Xaa is C or S
TXXAPVKTNAISMLYFDNGRVLLLKKYRM

SEQ ID NO: 83083 - protein, 30 aa, Artificial Sequence
  Cyclic GFR-binding peptide
  MOD_RES (1), (2): Xaa is C or S
XXTPTKMNAISMLYFNDKQQIILKKYRGMV

SEQ ID NO: 83084 - protein, 32 aa, Artificial Sequence
  Cyclic GFR-binding peptide
  MOD_RES (6), (7): Xaa is C or S
GSAGPXXTPTKMNAISMLYFNDKQQIILKKYR

SEQ ID NO: 83085 - protein, 26 aa, Artificial Sequence
  Cyclic GFR-binding peptide
  MOD_RES (26), (26): Xaa is C or S
NAISMLYFDNGRVLLLKKYRMIVEEX

SEQ ID NO: 83086 - protein, 35 aa, Artificial Sequence
  Cyclic GFR-binding peptide
  MOD_RES (30), (31): Xaa is C or S
VTMNEYKFKVVNKNEDLYLISIPEMKEPVXXPEPI

SEQ ID NO: 83087 - protein, 32 aa, Artificial Sequence
  Cyclic GFR-binding peptide
  MOD_RES (28), (29): Xaa is C or S
MDYHYKLVVNNASDKYLISIPSLRTPVXXTPP

SEQ ID NO: 83088 - protein, 36 aa, Artificial Sequence; identical to SEQ ID NO: 31550
  Cyclic GFR-binding peptide
  MOD_RES (31), (32): Xaa is C or S

SEQ ID NO: 83089 - protein, 31 aa, Artificial Sequence; identical to SEQ ID NO: 31549
  Cyclic GFR-binding peptide
  MOD_RES (31), (31): Xaa is C or S

SEQ ID NO: 83090 - protein, 32 aa, Artificial Sequence; identical to SEQ ID NO: 31551
  Cyclic GFR-binding peptide
  MOD_RES (31), (32): Xaa is C or S

SEQ ID NO: 83091 - protein, 28 aa, Artificial Sequence
  Cyclic GFR-binding peptide
  MOD_RES (26), (27): Xaa is C or S
YHYKLVVNNASDKYLISIPSLRTPVXXT

SEQ ID NO: 83092 - protein, 39 aa, Artificial Sequence; identical to SEQ ID NO: 31553
  Cyclic GFR-binding peptide
  MOD_RES (1), (33), (34): Xaa is C or S

SEQ ID NO: 83093 - protein, 29 aa, Artificial Sequence
  Cyclic GFR-binding peptide
  MOD_RES (1), (3): Xaa is C or S
XGXSEVVMDYHYKLVVNNASDKYLISIPS

SEQ ID NO: 83094 - protein, 32 aa, Artificial Sequence
  Cyclic GFR-binding peptide
  MOD_RES (28), (29): Xaa is C or S
MDRHKRLVVNNASDYYLISTASLRTPVXXTPP

SEQ ID NO: 83095 - protein, 33 aa, Artificial Sequence; identical to SEQ ID NO: 31554
  Cyclic GFR-binding peptide
  MOD_RES (1), (33): Xaa is C or S

SEQ ID NO: 83096 - protein, 32 aa, Artificial Sequence; identical to SEQ ID NO: 31555
  Cyclic GFR-binding peptide
  MOD_RES (32), (32): Xaa is C or S

SEQ ID NO: 83097 - protein, 33 aa, Artificial Sequence
  Cyclic GFR-binding peptide
  MOD_RES (29), (30): Xaa is C or S
VMDYHYKLVVNNASDKYLISIPSLRTPVXXTPP

SEQ ID NO: 83098 - protein, 23 aa, Artificial Sequence
  Cyclic GFR-binding peptide
EYKFKVVNNASDLYLISIPELRT

SEQ ID NO: 83099 - protein, 33 aa, Artificial Sequence; identical to SEQ ID NO: 31556
  Cyclic GFR-binding peptide
  MOD_RES (1), (32), (33): Xaa is C or S

SEQ ID NO: 83100 - protein, 29 aa, Artificial Sequence
  Cyclic GFR-binding peptide
RVIMPIKGYVKPKRGVFYLINIPSLAQPV

SEQ ID NO: 83101 - protein, 33 aa, Artificial Sequence
  Cyclic GFR-binding peptide
  MOD_RES (1), (3): Xaa is C or S
XGXAEVVMDRHKRLVVNNAADYYLISTASLRAP

SEQ ID NO: 83102 - protein, 34 aa, Artificial Sequence; identical to SEQ ID NO: 31561
  Cyclic GFR-binding peptide
  MOD_RES (1), (32), (33): Xaa is C or S

SEQ ID NO: 83103 - protein, 37 aa, Artificial Sequence; identical to SEQ ID NO: 31562
  Cyclic GFR-binding peptide
  MOD_RES (32), (33): Xaa is C or S

SEQ ID NO: 83104 - protein, 29 aa, Artificial Sequence
  Cyclic GFR-binding peptide
EVVMDYHYKLVVNNASDKYLISIPSLRTP

SEQ ID NO: 83105 - protein, 35 aa, Artificial Sequence; identical to SEQ ID NO: 31563
  Cyclic GFR-binding peptide
  MOD_RES (32), (33): Xaa is C or S

SEQ ID NO: 83106 - protein, 35 aa, Artificial Sequence
  Cyclic GFR-binding peptide
  MOD_RES (29), (30): Xaa is C or S
VIMRHKRLLLVRGNDYYLMSTASTKVPAXXTSPVR

SEQ ID NO: 83107 - protein, 37 aa, Artificial Sequence; identical to SEQ ID NO: 31564
  Cyclic GFR-binding peptide
  MOD_RES (31), (32): Xaa is C or S

SEQ ID NO: 83108 - protein, 26 aa, Artificial Sequence
  Cyclic GFR-binding peptide
NRYKKLVVNKNEDFYLISIANMKEPV

SEQ ID NO: 83109 - protein, 30 aa, Artificial Sequence; identical to SEQ ID NO: 31567
  Cyclic GFR-binding peptide

SEQ ID NO: 83110 - protein, 34 aa, Artificial Sequence; identical to SEQ ID NO: 31568
  Cyclic GFR-binding peptide
  MOD_RES (31), (32): Xaa is C or S

SEQ ID NO: 83111 - protein, 37 aa, Artificial Sequence; identical to SEQ ID NO: 31569
  Cyclic GFR-binding peptide
  MOD_RES (32), (33): Xaa is C or S

SEQ ID NO: 83112 - protein, 26 aa, Artificial Sequence
  Cyclic GFR-binding peptide
SEVVMDYHYKLVVNNASDKYLISIPS

SEQ ID NO: 83113 - protein, 33 aa, Artificial Sequence; identical to SEQ ID NO: 31574
  Cyclic GFR-binding peptide
  MOD_RES (32), (33): Xaa is C or S

SEQ ID NO: 83114 - protein, 27 aa, Artificial Sequence
  Cyclic GFR-binding peptide
  MOD_RES (26), (27): Xaa is C or S
RHKRLLLVRGNDYYLMSTASTKVPAXX

SEQ ID NO: 83115 - protein, 28 aa, Artificial Sequence
  Cyclic GFR-binding peptide
  MOD_RES (28), (28): Xaa is C or S
MDYHYKLVVNNASDKYLISIPSLRTPVX

SEQ ID NO: 83116 - protein, 28 aa, Artificial Sequence
  Cyclic GFR-binding peptide
  MOD_RES (28), (28): Xaa is C or S
MDRHKRLVVNNASDYYLISTASLRTPVX

SEQ ID NO: 83117 - protein, 24 aa, Artificial Sequence
  Cyclic GFR-binding peptide
VVMGRHKRLIIQQKDNYYLMSTAS

SEQ ID NO: 83118 - protein, 20 aa, Artificial Sequence
  Cyclic GFR-binding peptide
YHYKLVVNNASDKYLISIPS

SEQ ID NO: 83119 - protein, 28 aa, Artificial Sequence
  Cyclic GFR-binding peptide
EVVMDYHYKLVVNNASDKYLISIPSLRT

SEQ ID NO: 83120 - protein, 37 aa, Artificial Sequence; identical to SEQ ID NO: 31579
  Cyclic GFR-binding peptide
  MOD_RES (2), (33), (34): Xaa is C or S

SEQ ID NO: 83121 - protein, 27 aa, Artificial Sequence
  Cyclic GFR-binding peptide
MNPIKGYVVNKNEDFYLINIPSMKEPV

SEQ ID NO: 83122 - protein, 24 aa, Artificial Sequence
  Cyclic GFR-binding peptide
VTMNEYKFKVVNKNEDLYLISIPE

SEQ ID NO: 83123 - protein, 26 aa, Artificial Sequence
  Cyclic GFR-binding peptide
  MOD_RES (26), (26): Xaa is C or S
EYKFKIIQQKDNLYLMSIPEMKTPTX

SEQ ID NO: 83124 - protein, 28 aa, Artificial Sequence
  Cyclic GFR-binding peptide
  MOD_RES (26), (27): Xaa is C or S
RHKRLVVNNAADYYLISTASLRAPVXXS

SEQ ID NO: 83125 - protein, 34 aa, Artificial Sequence; identical to SEQ ID NO: 31580
  Cyclic GFR-binding peptide
  MOD_RES (1), (33), (34): Xaa is C or S

SEQ ID NO: 83126 - protein, 22 aa, Artificial Sequence
  Cyclic GFR-binding peptide
DYHYKLVVNNASDKYLISIPSL

SEQ ID NO: 83127 - protein, 31 aa, Artificial Sequence; identical to SEQ ID NO: 31581
  Cyclic GFR-binding peptide
  MOD_RES (31), (31): Xaa is C or S

SEQ ID NO: 83128 - protein, 30 aa, Artificial Sequence
  Cyclic GFR-binding peptide
  MOD_RES (30), (30): Xaa is C or S
VVMDEYKFKVVNNASDLYLISIPELRTPVX

SEQ ID NO: 83129 - protein, 20 aa, Artificial Sequence
  Cyclic GFR-binding peptide
RHKRLIIQQKDNYYLMSTAS

SEQ ID NO: 83130 - protein, 42 aa, Artificial Sequence; identical to SEQ ID NO: 31582
  Cyclic GFR-binding peptide
  MOD_RES (2), (4), (36), (37): Xaa is C or S

SEQ ID NO: 83131 - protein, 34 aa, Artificial Sequence; identical to SEQ ID NO: 31583
  Cyclic GFR-binding peptide
  MOD_RES (1), (3), (34): Xaa is C or S

SEQ ID NO: 83132 - protein, 38 aa, Artificial Sequence; identical to SEQ ID NO: 31584
  Cyclic GFR-binding peptide
  MOD_RES (1), (3), (35), (36): Xaa is C or S

SEQ ID NO: 83133 - protein, 40 aa, Artificial Sequence; identical to SEQ ID NO: 31585
  Cyclic GFR-binding peptide
  MOD_RES (2), (34), (35): Xaa is C or S

SEQ ID NO: 83134 - protein, 37 aa, Artificial Sequence; identical to SEQ ID NO: 31587
  Cyclic GFR-binding peptide
  MOD_RES (2), (4), (36), (37): Xaa is C or S

SEQ ID NO: 83135 - protein, 30 aa, Artificial Sequence
  Cyclic GFR-binding peptide
  MOD_RES (1), (1): Xaa is C or S
XEEVIMYHYKLLLVRGNDKYLMSIPSTKVP

SEQ ID NO: 83136 - protein, 37 aa, Artificial Sequence; identical to SEQ ID NO: 31588
  Cyclic GFR-binding peptide
  MOD_RES (1), (3), (35), (36): Xaa is C or S

SEQ ID NO: 83137 - protein, 31 aa, Artificial Sequence
  Cyclic GFR-binding peptide
  MOD_RES (2), (4): Xaa is C or S
RXAXSEVTMNYHYKLVVNKNEDKYLISIPSM

SEQ ID NO: 83138 - protein, 34 aa, Artificial Sequence; identical to SEQ ID NO: 31589
  Cyclic GFR-binding peptide
  MOD_RES (1), (3), (34): Xaa is C or S

SEQ ID NO: 83139 - protein, 27 aa, Artificial Sequence
  Cyclic GFR-binding peptide
IMRHKRLLLVRGNDYYLMSTASTKVPA

SEQ ID NO: 83140 - protein, 36 aa, Artificial Sequence; identical to SEQ ID NO: 31590
  Cyclic GFR-binding peptide
  MOD_RES (1), (32), (33): Xaa is C or S

SEQ ID NO: 83141 - protein, 38 aa, Artificial Sequence; identical to SEQ ID NO: 31591
  Cyclic GFR-binding peptide
  MOD_RES (32), (33): Xaa is C or S

SEQ ID NO: 83142 - protein, 40 aa, Artificial Sequence; identical to SEQ ID NO: 31592
  Cyclic GFR-binding peptide
  MOD_RES (2), (34), (35): Xaa is C or S

SEQ ID NO: 83143 - protein, 33 aa, Artificial Sequence
  Cyclic GFR-binding peptide
  MOD_RES (30), (31): Xaa is C or S
EVIMYHYKLLLVRGNDKYLMSIPSTKVPAXXTS

SEQ ID NO: 83144 - protein, 34 aa, Artificial Sequence; identical to SEQ ID NO: 31593
  Cyclic GFR-binding peptide
  MOD_RES (32), (33): Xaa is C or S

SEQ ID NO: 83145 - protein, 36 aa, Artificial Sequence; identical to SEQ ID NO: 31594
  Cyclic GFR-binding peptide
  MOD_RES (2), (4), (36): Xaa is C or S

SEQ ID NO: 83146 - protein, 25 aa, Artificial Sequence
  Cyclic GFR-binding peptide
VMDYHYKLVVNNASDKYLISIPSLR

SEQ ID NO: 83147 - protein, 27 aa, Artificial Sequence
  Cyclic GFR-binding peptide
  MOD_RES (27), (27): Xaa is C or S
MRHKRLLLVRGNDYYLMSTASTKVPAX

SEQ ID NO: 83148 - protein, 27 aa, Artificial Sequence
  Cyclic GFR-binding peptide
  MOD_RES (1), (1): Xaa is C or S
XSKVVMPIKGYVKPTRGVFYLINIPSL

SEQ ID NO: 83149 - protein, 31 aa, Artificial Sequence
  Cyclic GFR-binding peptide
  MOD_RES (1), (3): Xaa is C or S
XGXSEVVMDEYKFKVVNNASDLYLISIPELR

SEQ ID NO: 83150 - protein, 34 aa, Artificial Sequence; identical to SEQ ID NO: 31596
  Cyclic GFR-binding peptide
  MOD_RES (2), (4): Xaa is C or S

SEQ ID NO: 83151 - protein, 27 aa, Artificial Sequence
  Cyclic GFR-binding peptide
VMDYHYKLVVNNASDKYLISIPSLRTP

SEQ ID NO: 83152 - protein, 32 aa, Artificial Sequence
  Cyclic GFR-binding peptide
  MOD_RES (29), (30): Xaa is C or S
VMGRHKRLIIQQKDNYYLMSTASMKTPTXXPG

SEQ ID NO: 83153 - protein, 24 aa, Artificial Sequence
  Cyclic GFR-binding peptide
EVIMEYKFKLLVRGNDLYLMSIPE

SEQ ID NO: 83154 - protein, 34 aa, Artificial Sequence; identical to SEQ ID NO: 31598
  Cyclic GFR-binding peptide
  MOD_RES (1), (3): Xaa is C or S

SEQ ID NO: 83155 - protein, 25 aa, Artificial Sequence
  Cyclic GFR-binding peptide
VMDRHKRLVVNNASDYYLISTASLR

SEQ ID NO: 83156 - protein, 37 aa, Artificial Sequence; identical to SEQ ID NO: 31599
  Cyclic GFR-binding peptide
  MOD_RES (2), (34), (35): Xaa is C or S

SEQ ID NO: 83157 - protein, 23 aa, Artificial Sequence
  Cyclic GFR-binding peptide
RHKRLIIQQKDNYYLMSTASMKT

SEQ ID NO: 83158 - protein, 37 aa, Artificial Sequence; identical to SEQ ID NO: 31600
  Cyclic GFR-binding peptide
  MOD_RES (2), (4), (36), (37): Xaa is C or S

SEQ ID NO: 83159 - protein, 33 aa, Artificial Sequence
  Cyclic GFR-binding peptide
  MOD_RES (2), (4): Xaa is C or S
LXGXEEVIMRHKRLLLVRGNDYYLMSTASTKVP

SEQ ID NO: 83160 - protein, 27 aa, Artificial Sequence
  Cyclic GFR-binding peptide
TMNRYKKLVVNKNEDFYLISIANMKEP

SEQ ID NO: 83161 - protein, 37 aa, Artificial Sequence; identical to SEQ ID NO: 31601
  Cyclic GFR-binding peptide
  MOD_RES (1), (3), (34), (35): Xaa is C or S

SEQ ID NO: 83162 - protein, 31 aa, Artificial Sequence
  Cyclic GFR-binding peptide
  MOD_RES (1), (3): Xaa is C or S
XKXSKVVMPIKGYVKPTRGVFYLINIPSLDQ

SEQ ID NO: 83163 - protein, 38 aa, Artificial Sequence; identical to SEQ ID NO: 31602
  Cyclic GFR-binding peptide
  MOD_RES (1), (3), (35), (36): Xaa is C or S

SEQ ID NO: 83164 - protein, 28 aa, Artificial Sequence
  Cyclic GFR-binding peptide
  MOD_RES (26), (27): Xaa is C or S
PIKGYIKPTKGIFYLINIPSLDQSVXXP

SEQ ID NO: 83165 - protein, 31 aa, Artificial Sequence
  Cyclic GFR-binding peptide
  MOD_RES (1), (3): Xaa is C or S
XGXEEVIMYHYKLLLVRGNDKYLMSIPSTKV

SEQ ID NO: 83166 - protein, 36 aa, Artificial Sequence; identical to SEQ ID NO: 31607
  Cyclic GFR-binding peptide
  MOD_RES (31), (32): Xaa is C or S

SEQ ID NO: 83167 - protein, 37 aa, Artificial Sequence; identical to SEQ ID NO: 31606
  Cyclic GFR-binding peptide
  MOD_RES (1), (3), (34), (35): Xaa is C or S

SEQ ID NO: 83168 - protein, 26 aa, Artificial Sequence
  Cyclic GFR-binding peptide
GEYKFKIIQQKDNLYLMSIPEMKTPT

SEQ ID NO: 83169 - protein, 30 aa, Artificial Sequence
  Cyclic GFR-binding peptide
  MOD_RES (28), (29): Xaa is C or S
MNRYKKLVVNKNEDFYLISIANMKEPVXXP

SEQ ID NO: 83170 - protein, 31 aa, Artificial Sequence
  Cyclic GFR-binding peptide
  MOD_RES (28), (29): Xaa is C or S
MNRYKKLVVNKNEDFYLISIANMKEPVXXPE

SEQ ID NO: 83171 - protein, 35 aa, Artificial Sequence; identical to SEQ ID NO: 31608
  Cyclic GFR-binding peptide
  MOD_RES (1), (33), (34): Xaa is C or S

SEQ ID NO: 83172 - protein, 36 aa, Artificial Sequence; identical to SEQ ID NO: 31609
  Cyclic GFR-binding peptide
  MOD_RES (2), (34), (35): Xaa is C or S

SEQ ID NO: 83173 - protein, 31 aa, Artificial Sequence
  Cyclic GFR-binding peptide
  MOD_RES (28), (29): Xaa is C or S
VMPIKGYVKPTRGVFYLINIPSLDQPVXXPS

SEQ ID NO: 83174 - protein, 29 aa, Artificial Sequence
  Cyclic GFR-binding peptide
  MOD_RES (1), (3): Xaa is C or S
XGXAEVVMDRHKRLVVNNAADYYLISTAS

SEQ ID NO: 83175 - protein, 31 aa, Artificial Sequence; identical to SEQ ID NO: 31610
  Cyclic GFR-binding peptide
  MOD_RES (31), (31): Xaa is C or S

SEQ ID NO: 83176 - protein, 29 aa, Artificial Sequence
  Cyclic GFR-binding peptide
  MOD_RES (27), (28): Xaa is C or S
DEYKFKVVNNASDLYLISIPELRTPVXXT

SEQ ID NO: 83177 - protein, 24 aa, Artificial Sequence
  Cyclic GFR-binding peptide
KVIMPIKGYIKPTKGIFYLINIPS

SEQ ID NO: 83178 - protein, 31 aa, Artificial Sequence
  Cyclic GFR-binding peptide
  MOD_RES (2), (2): Xaa is C or S
GXSEVVMDEYKFKVVNNASDLYLISIPELRT

SEQ ID NO: 83179 - protein, 24 aa, Artificial Sequence
  Cyclic GFR-binding peptide
MPIKGYVKPTRGVFYLINIPSLDQ

SEQ ID NO: 83180 - protein, 28 aa, Artificial Sequence
  Cyclic GFR-binding peptide
VVMDEYKFKVVNNASDLYLISIPELRTP

SEQ ID NO: 83181 - protein, 32 aa, Artificial Sequence
  Cyclic GFR-binding peptide
  MOD_RES (2), (2): Xaa is C or S
AXSEVTMNRHKRLVVNKNEDYYLISTASMKEP

SEQ ID NO: 83182 - protein, 26 aa, Artificial Sequence
  Cyclic GFR-binding peptide
MPIKGYVKPKRGVFYLINIPSLAQPV

SEQ ID NO: 83183 - protein, 37 aa, Artificial Sequence; identical to SEQ ID NO: 31612
  Cyclic GFR-binding peptide
  MOD_RES (1), (33), (34): Xaa is C or S

SEQ ID NO: 83184 - protein, 38 aa, Artificial Sequence; identical to SEQ ID NO: 31613
  Cyclic GFR-binding peptide
  MOD_RES (1), (33), (34): Xaa is C or S

SEQ ID NO: 83185 - protein, 31 aa, Artificial Sequence
  Cyclic GFR-binding peptide
  MOD_RES (2), (2): Xaa is C or S
KXSRVIMPIKGYVKPKRGVFYLINIPSLAQP

SEQ ID NO: 83186 - protein, 27 aa, Artificial Sequence
  Cyclic GFR-binding peptide
EVTMNPIKGYVVNKNEDFYLINIPSMK

SEQ ID NO: 83187 - protein, 29 aa, Artificial Sequence
  Cyclic GFR-binding peptide
  MOD_RES (2), (2): Xaa is C or S
KXSKVIMPIKGYIKPTKGIFYLINIPSLD

SEQ ID NO: 83188 - protein, 30 aa, Artificial Sequence
  Cyclic GFR-binding peptide
  MOD_RES (27), (28): Xaa is C or S
MPIKGYVKPTRGVFYLINIPSLDQPVXXPS

SEQ ID NO: 83189 - protein, 35 aa, Artificial Sequence
  Cyclic GFR-binding peptide
  MOD_RES (29), (30): Xaa is C or S
VIMYHYKLLLVRGNDKYLMSIPSTKVPAXXTSPVR

SEQ ID NO: 83190 - protein, 34 aa, Artificial Sequence; identical to SEQ ID NO: 31618
  Cyclic GFR-binding peptide
  MOD_RES (1), (33), (34): Xaa is C or S

SEQ ID NO: 83191 - protein, 30 aa, Artificial Sequence
  Cyclic GFR-binding peptide
  MOD_RES (30), (30): Xaa is C or S
VVMGRHKRLIIQQKDNYYLMSTASMKTPTX

SEQ ID NO: 83192 - protein, 22 aa, Artificial Sequence
  Cyclic GFR-binding peptide
RHKRLYTVVGKDYYLISTASLK

SEQ ID NO: 83193 - protein, 26 aa, Artificial Sequence
  Cyclic GFR-binding peptide
MRHKRLLLVRGNDYYLMSTASTKVPA

SEQ ID NO: 83194 - protein, 30 aa, Artificial Sequence
  Cyclic GFR-binding peptide
  MOD_RES (30), (30): Xaa is C or S
VVMGYHYKLIIQQKDNKYLMSIPSMKTPTX

SEQ ID NO: 83195 - protein, 27 aa, Artificial Sequence
  Cyclic GFR-binding peptide
RDVVMGEYKFKIIQQKDNLYLMSIPEM

SEQ ID NO: 83196 - protein, 26 aa, Artificial Sequence
  Cyclic GFR-binding peptide
RDVVMGYHYKLIIQQKDNKYLMSIPS

SEQ ID NO: 83197 - protein, 39 aa, Artificial Sequence; identical to SEQ ID NO: 31620
  Cyclic GFR-binding peptide
  MOD_RES (1), (33), (34): Xaa is C or S

SEQ ID NO: 83198 - protein, 29 aa, Artificial Sequence
  Cyclic GFR-binding peptide
  MOD_RES (26), (27): Xaa is C or S
PIKGYVKPTRGVFYLINIPSLDQPVXXPS

SEQ ID NO: 83199 - protein, 32 aa, Artificial Sequence
  Cyclic GFR-binding peptide
  MOD_RES (29), (30): Xaa is C or S
VMGEYKFKIIQQKDNLYLMSIPEMKTPTXXPG

SEQ ID NO: 83200 - protein, 29 aa, Artificial Sequence
  Cyclic GFR-binding peptide
  MOD_RES (28), (29): Xaa is C or S
MNRHKRLVVNKNEDYYLISTASMKEPVXX

SEQ ID NO: 83201 - protein, 26 aa, Artificial Sequence
  Cyclic GFR-binding peptide
NRHKRLVVNKNEDYYLISTASMKEPV

SEQ ID NO: 83202 - protein, 32 aa, Artificial Sequence; identical to SEQ ID NO: 31621
  Cyclic GFR-binding peptide
  MOD_RES (31), (32): Xaa is C or S

SEQ ID NO: 83203 - protein, 24 aa, Artificial Sequence
  Cyclic GFR-binding peptide
DEYKFKVVNNASDLYLISIPELRT

SEQ ID NO: 83204 - protein, 29 aa, Artificial Sequence
  Cyclic GFR-binding peptide
  MOD_RES (26), (27): Xaa is C or S
RHKRLLLVRGNDYYLMSTASTKVPAXXTS

SEQ ID NO: 83205 - protein, 36 aa, Artificial Sequence; identical to SEQ ID NO: 31623
  Cyclic GFR-binding peptide
  MOD_RES (31), (32): Xaa is C or S

SEQ ID NO: 83206 - protein, 34 aa, Artificial Sequence
  Cyclic GFR-binding peptide
  MOD_RES (28), (29): Xaa is C or S
IMPIKGYVKPKRGVFYLINIPSLAQPVXXPAASA

SEQ ID NO: 83207 - protein, 28 aa, Artificial Sequence
  Cyclic GFR-binding peptide
  MOD_RES (2), (2): Xaa is C or S
GXSEVVMDRHKRLVVNNASDYYLISTAS

SEQ ID NO: 83208 - protein, 30 aa, Artificial Sequence
  Cyclic GFR-binding peptide
  MOD_RES (1), (1): Xaa is C or S
XEEVIMEYKFKLLVRGNDLYLMSIPETKVP

SEQ ID NO: 83209 - protein, 40 aa, Artificial Sequence; identical to SEQ ID NO: 31627
  Cyclic GFR-binding peptide
  MOD_RES (2), (34), (35): Xaa is C or S

SEQ ID NO: 83210 - protein, 41 aa, Artificial Sequence; identical to SEQ ID NO: 31628
  Cyclic GFR-binding peptide
  MOD_RES (1), (3), (35), (36): Xaa is C or S

SEQ ID NO: 83211 - protein, 35 aa, Artificial Sequence; identical to SEQ ID NO: 31629
  Cyclic GFR-binding peptide
  MOD_RES (1), (32), (33): Xaa is C or S

SEQ ID NO: 83212 - protein, 29 aa, Artificial Sequence
  Cyclic GFR-binding peptide
  MOD_RES (1), (3): Xaa is C or S
XGXEEVIMEYKFKLLVRGNDLYLMSIPET

SEQ ID NO: 83213 - protein, 39 aa, Artificial Sequence; identical to SEQ ID NO: 31631
  Cyclic GFR-binding peptide
  MOD_RES (2), (34), (35): Xaa is C or S

SEQ ID NO: 83214 - protein, 31 aa, Artificial Sequence
  Cyclic GFR-binding peptide
  MOD_RES (27), (28): Xaa is C or S
NEYKFKVVNKNEDLYLISIPEMKEPVXXPEP

SEQ ID NO: 83215 - protein, 27 aa, Artificial Sequence
  Cyclic GFR-binding peptide
  MOD_RES (27), (27): Xaa is C or S
NRYKKLVVNKNEDFYLISIANMKEPVX

SEQ ID NO: 83216 - protein, 28 aa, Artificial Sequence
  Cyclic GFR-binding peptide
  MOD_RES (1), (1): Xaa is C or S
XSEVTMNRHKRLVVNKNEDYYLISTASM

SEQ ID NO: 83217 - protein, 29 aa, Artificial Sequence
  Cyclic GFR-binding peptide
  MOD_RES (28), (29): Xaa is C or S
MNYHYKLVVNKNEDKYLISIPSMKEPVXX

SEQ ID NO: 83218 - protein, 34 aa, Artificial Sequence; identical to SEQ ID NO: 31633
  Cyclic GFR-binding peptide
  MOD_RES (32), (33): Xaa is C or S

SEQ ID NO: 83219 - protein, 40 aa, Artificial Sequence; identical to SEQ ID NO: 31635
  Cyclic GFR-binding peptide
  MOD_RES (2), (4), (35), (36): Xaa is C or S

SEQ ID NO: 83220 - protein, 28 aa, Artificial Sequence
  Cyclic GFR-binding peptide
  MOD_RES (2), (2): Xaa is C or S
GXRDVVMGYHYKLIIQQKDNKYLMSIPS

SEQ ID NO: 83221 - protein, 38 aa, Artificial Sequence; identical to SEQ ID NO: 31636
  Cyclic GFR-binding peptide
  MOD_RES (2), (33), (34): Xaa is C or S

SEQ ID NO: 83222 - protein, 39 aa, Artificial Sequence; identical to SEQ ID NO: 31637
  Cyclic GFR-binding peptide
  MOD_RES (1), (33), (34): Xaa is C or S

SEQ ID NO: 83223 - protein, 31 aa, Artificial Sequence
  Cyclic GFR-binding peptide
  MOD_RES (27), (28): Xaa is C or S
NYHYKLVVNKNEDKYLISIPSMKEPVXXPEP

SEQ ID NO: 83224 - protein, 32 aa, Artificial Sequence; identical to SEQ ID NO: 31639
  Cyclic GFR-binding peptide
  MOD_RES (32), (32): Xaa is C or S

SEQ ID NO: 83225 - protein, 33 aa, Artificial Sequence
  Cyclic GFR-binding peptide
  MOD_RES (30), (31): Xaa is C or S
VTMNEYKFKVVNKNEDLYLISIPEMKEPVXXPE

SEQ ID NO: 83226 - protein, 32 aa, Artificial Sequence
  Cyclic GFR-binding peptide
  MOD_RES (26), (27): Xaa is C or S
RHKRLVVNNAADYYLISTASLRAPVXXSAPAA

SEQ ID NO: 83227 - protein, 23 aa, Artificial Sequence
  Cyclic GFR-binding peptide
EYKFKVVNKNEDLYLISIPEMKE

SEQ ID NO: 83228 - protein, 30 aa, Artificial Sequence; identical to SEQ ID NO: 31641
  Cyclic GFR-binding peptide

SEQ ID NO: 83229 - protein, 38 aa, Artificial Sequence; identical to SEQ ID NO: 31642
  Cyclic GFR-binding peptide
  MOD_RES (1), (33), (34): Xaa is C or S

SEQ ID NO: 83230 - protein, 28 aa, Artificial Sequence
  Cyclic GFR-binding peptide
SEVTMNPIKGYVVNKNEDFYLINIPSMK

SEQ ID NO: 83231 - protein, 39 aa, Artificial Sequence; identical to SEQ ID NO: 31643
  Cyclic GFR-binding peptide
  MOD_RES (1), (3), (35), (36): Xaa is C or S

SEQ ID NO: 83232 - protein, 30 aa, Artificial Sequence
  Cyclic GFR-binding peptide
  MOD_RES (26), (27): Xaa is C or S
YHYKLLLVRGNDKYLMSIPSTKVPAXXTSP

SEQ ID NO: 83233 - protein, 25 aa, Artificial Sequence
  Cyclic GFR-binding peptide
DEYKFKVVNNASDLYLISIPELRTP

SEQ ID NO: 83234 - protein, 38 aa, Artificial Sequence; identical to SEQ ID NO: 31644
  Cyclic GFR-binding peptide
  MOD_RES (2), (4), (36), (37): Xaa is C or S

SEQ ID NO: 83235 - protein, 30 aa, Artificial Sequence
  Cyclic GFR-binding peptide
  MOD_RES (2), (2): Xaa is C or S
KXSKVVMPIKGYVKPTRGVFYLINIPSLDQ

SEQ ID NO: 83236 - protein, 35 aa, Artificial Sequence; identical to SEQ ID NO: 31646
  Cyclic GFR-binding peptide
  MOD_RES (1), (3), (34), (35): Xaa is C or S

SEQ ID NO: 83237 - protein, 25 aa, Artificial Sequence
  Cyclic GFR-binding peptide
MPIKGYIKPTKGIFYLINIPSLDQS

SEQ ID NO: 83238 - protein, 27 aa, Artificial Sequence
  Cyclic GFR-binding peptide
VTMNPIKGYVVNKNEDFYLINIPSMKE

SEQ ID NO: 83239 - protein, 35 aa, Artificial Sequence; identical to SEQ ID NO: 31647
  Cyclic GFR-binding peptide
  MOD_RES (2), (4): Xaa is C or S

SEQ ID NO: 83240 - protein, 33 aa, Artificial Sequence
  Cyclic GFR-binding peptide
  MOD_RES (27), (28): Xaa is C or S
MRHKRLLLVRGNDYYLMSTASTKVPAXXTSPVR

SEQ ID NO: 83241 - protein, 36 aa, Artificial Sequence; identical to SEQ ID NO: 31649
  Cyclic GFR-binding peptide
  MOD_RES (1), (3), (35), (36): Xaa is C or S

SEQ ID NO: 83242 - protein, 36 aa, Artificial Sequence; identical to SEQ ID NO: 31650
  Cyclic GFR-binding peptide
  MOD_RES (2), (4), (36): Xaa is C or S

SEQ ID NO: 83243 - protein, 31 aa, Artificial Sequence
  Cyclic GFR-binding peptide
  MOD_RES (1), (3): Xaa is C or S
XAXSEVTMNYHYKLVVNKNEDKYLISIPSMK

SEQ ID NO: 83244 - protein, 36 aa, Artificial Sequence; identical to SEQ ID NO: 31652
  Cyclic GFR-binding peptide
  MOD_RES (1), (3), (35), (36): Xaa is C or S

SEQ ID NO: 83245 - protein, 38 aa, Artificial Sequence; identical to SEQ ID NO: 31653
  Cyclic GFR-binding peptide
  MOD_RES (2), (34), (35): Xaa is C or S

SEQ ID NO: 83246 - protein, 35 aa, Artificial Sequence; identical to SEQ ID NO: 31654
  Cyclic GFR-binding peptide
  MOD_RES (32), (33): Xaa is C or S

SEQ ID NO: 83247 - protein, 27 aa, Artificial Sequence
  Cyclic GFR-binding peptide
  MOD_RES (27), (27): Xaa is C or S
NPIKGYVVNKNEDFYLINIPSMKEPVX

SEQ ID NO: 83248 - protein, 36 aa, Artificial Sequence; identical to SEQ ID NO: 31656
  Cyclic GFR-binding peptide
  MOD_RES (1), (32), (33): Xaa is C or S

SEQ ID NO: 83249 - protein, 30 aa, Artificial Sequence
  Cyclic GFR-binding peptide
  MOD_RES (28), (29): Xaa is C or S
MGEYKFKIIQQKDNLYLMSIPEMKTPTXXP

SEQ ID NO: 83250 - protein, 31 aa, Artificial Sequence
  Cyclic GFR-binding peptide
  MOD_RES (29), (30): Xaa is C or S
VMDEYKFKVVNNASDLYLISIPELRTPVXXT

SEQ ID NO: 83251 - protein, 30 aa, Artificial Sequence
  Cyclic GFR-binding peptide
  MOD_RES (26), (27): Xaa is C or S
PIKGYVVNKNEDFYLINIPSMKEPVXXPEP

SEQ ID NO: 83252 - protein, 29 aa, Artificial Sequence
  Cyclic GFR-binding peptide
EVIMYHYKLLLVRGNDKYLMSIPSTKVPA

SEQ ID NO: 83253 - protein, 31 aa, Artificial Sequence; identical to SEQ ID NO: 31661
  Cyclic GFR-binding peptide
  MOD_RES (1), (1): Xaa is C or S

SEQ ID NO: 83254 - protein, 37 aa, Artificial Sequence; identical to SEQ ID NO: 31663
  Cyclic GFR-binding peptide
  MOD_RES (2), (34), (35): Xaa is C or S

SEQ ID NO: 83255 - protein, 33 aa, Artificial Sequence
  Cyclic GFR-binding peptide
  MOD_RES (29), (30): Xaa is C or S
VMDRHKRLVVNNAADYYLISTASLRAPVXXSAP

SEQ ID NO: 83256 - protein, 38 aa, Artificial Sequence; identical to SEQ ID NO: 31665
  Cyclic GFR-binding peptide
  MOD_RES (1), (3), (35), (36): Xaa is C or S

SEQ ID NO: 83257 - protein, 24 aa, Artificial Sequence
  Cyclic GFR-binding peptide
VVMGYHYKLIIQQKDNKYLMSIPS

SEQ ID NO: 83258 - protein, 23 aa, Artificial Sequence
  Cyclic GFR-binding peptide
VIMEYKFKLLVRGNDLYLMSIPE

SEQ ID NO: 83259 - protein, 35 aa, Artificial Sequence; identical to SEQ ID NO: 31672
  Cyclic GFR-binding peptide
  MOD_RES (1), (33), (34): Xaa is C or S

SEQ ID NO: 83260 - protein, 28 aa, Artificial Sequence
  Cyclic GFR-binding peptide
  MOD_RES (1), (1): Xaa is C or S
XSEVVMDRHKRLVVNNASDYYLISTASL

SEQ ID NO: 83261 - protein, 29 aa, Artificial Sequence
  Cyclic GFR-binding peptide
  MOD_RES (29), (29): Xaa is C or S
VIMEYKFKLLVRGNDLYLMSIPETKVPAX

SEQ ID NO: 83262 - protein, 30 aa, Artificial Sequence
  Cyclic GFR-binding peptide
  MOD_RES (2), (2): Xaa is C or S
GXEEVIMRHKRLLLVRGNDYYLMSTASTKV

SEQ ID NO: 83263 - protein, 30 aa, Artificial Sequence
  Cyclic GFR-binding peptide
  MOD_RES (26), (27): Xaa is C or S
PIKGYVKPKRGVFYLINIPSLAQPVXXPAA

SEQ ID NO: 83264 - protein, 37 aa, Artificial Sequence; identical to SEQ ID NO: 31675
  Cyclic GFR-binding peptide
  MOD_RES (31), (32): Xaa is C or S

SEQ ID NO: 83265 - protein, 25 aa, Artificial Sequence
  Cyclic GFR-binding peptide
DVVMGYHYKLIIQQKDNKYLMSIPS

SEQ ID NO: 83266 - protein, 40 aa, Artificial Sequence; identical to SEQ ID NO: 31676
  Cyclic GFR-binding peptide
  MOD_RES (2), (34), (35): Xaa is C or S

SEQ ID NO: 83267 - protein, 25 aa, Artificial Sequence
  Cyclic GFR-binding peptide
DYHYKLVVNNASDKYLISIPSLRTP

SEQ ID NO: 83268 - protein, 33 aa, Artificial Sequence; identical to SEQ ID NO: 31677
  Cyclic GFR-binding peptide
  MOD_RES (1), (3): Xaa is C or S

SEQ ID NO: 83269 - protein, 26 aa, Artificial Sequence
  Cyclic GFR-binding peptide
  MOD_RES (26), (26): Xaa is C or S
RYKKLVVNKNEDFYLISIANMKEPVX

SEQ ID NO: 83270 - protein, 28 aa, Artificial Sequence
  Cyclic GFR-binding peptide
TMNYHYKLVVNKNEDKYLISIPSMKEPV

SEQ ID NO: 83271 - protein, 34 aa, Artificial Sequence
  Cyclic GFR-binding peptide
  MOD_RES (2), (4): Xaa is C or S
SXGXRDVVMGYHYKLIIQQKDNKYLMSIPSMKTP

SEQ ID NO: 83272 - protein, 25 aa, Artificial Sequence
  Cyclic GFR-binding peptide
VMDEYKFKVVNNASDLYLISIPELR

SEQ ID NO: 83273 - protein, 29 aa, Artificial Sequence
  Cyclic GFR-binding peptide
  MOD_RES (2), (2): Xaa is C or S
GXEEVIMRHKRLLLVRGNDYYLMSTASTK

SEQ ID NO: 83274 - protein, 37 aa, Artificial Sequence; identical to SEQ ID NO: 31681
  Cyclic GFR-binding peptide
  MOD_RES (32), (33): Xaa is C or S

SEQ ID NO: 83275 - protein, 31 aa, Artificial Sequence
  Cyclic GFR-binding peptide
  MOD_RES (30), (31): Xaa is C or S
VVMGRHKRLIIQQKDNYYLMSTASMKTPTXX

SEQ ID NO: 83276 - protein, 33 aa, Artificial Sequence
  Cyclic GFR-binding peptide
  MOD_RES (28), (29): Xaa is C or S
IMRHKRLLLVRGNDYYLMSTASTKVPAXXTSPV

SEQ ID NO: 83277 - protein, 29 aa, Artificial Sequence
  Cyclic GFR-binding peptide
  MOD_RES (28), (29): Xaa is C or S
MGRHKRLYTVVGKDYYLISTASLKTPVXX

SEQ ID NO: 83278 - protein, 30 aa, Artificial Sequence
  Cyclic GFR-binding peptide
  MOD_RES (1), (1): Xaa is C or S
XESVAMGRHKRLYTVVGKDYYLISTASLKT

SEQ ID NO: 83279 - protein, 26 aa, Artificial Sequence
  Cyclic GFR-binding peptide
EEVIMRHKRLLLVRGNDYYLMSTAST

SEQ ID NO: 83280 - protein, 36 aa, Artificial Sequence
  Cyclic GFR-binding peptide
  MOD_RES (30), (31): Xaa is C or S
EVIMYHYKLLLVRGNDKYLMSIPSTKVPAXXTSPVR

SEQ ID NO: 83281 - protein, 30 aa, Artificial Sequence
  Cyclic GFR-binding peptide
  MOD_RES (2), (2): Xaa is C or S
GXSEVVMDEYKFKVVNNASDLYLISIPELR

SEQ ID NO: 83282 - protein, 36 aa, Artificial Sequence; identical to SEQ ID NO: 31686
  Cyclic GFR-binding peptide
  MOD_RES (1), (3), (34), (35): Xaa is C or S

SEQ ID NO: 83283 - protein, 37 aa, Artificial Sequence; identical to SEQ ID NO: 31687
  Cyclic GFR-binding peptide
  MOD_RES (32), (33): Xaa is C or S

SEQ ID NO: 83284 - protein, 24 aa, Artificial Sequence
  Cyclic GFR-binding peptide
AMGRHKRLYTVVGKDYYLISTASL

SEQ ID NO: 83285 - protein, 34 aa, Artificial Sequence; identical to SEQ ID NO: 31688
  Cyclic GFR-binding peptide
  MOD_RES (1), (3): Xaa is C or S

SEQ ID NO: 83286 - protein, 41 aa, Artificial Sequence; identical to SEQ ID NO: 31690
  Cyclic GFR-binding peptide
  MOD_RES (1), (3), (35), (36): Xaa is C or S

SEQ ID NO: 83287 - protein, 41 aa, Artificial Sequence; identical to SEQ ID NO: 31692
  Cyclic GFR-binding peptide
  MOD_RES (1), (3), (35), (36): Xaa is C or S

SEQ ID NO: 83288 - protein, 33 aa, Artificial Sequence
  Cyclic GFR-binding peptide
  MOD_RES (30), (31): Xaa is C or S
VTMNPIKGYVVNKNEDFYLINIPSMKEPVXXPE

SEQ ID NO: 83289 - protein, 37 aa, Artificial Sequence; identical to SEQ ID NO: 31694
  Cyclic GFR-binding peptide
  MOD_RES (32), (33): Xaa is C or S

SEQ ID NO: 83290 - protein, 38 aa, Artificial Sequence; identical to SEQ ID NO: 31696
  Cyclic GFR-binding peptide
  MOD_RES (1), (33), (34): Xaa is C or S

SEQ ID NO: 83291 - protein, 28 aa, Artificial Sequence
  Cyclic GFR-binding peptide
EVVMDEYKFKVVNNASDLYLISIPELRT

SEQ ID NO: 83292 - protein, 30 aa, Artificial Sequence
  Cyclic GFR-binding peptide
  MOD_RES (29), (30): Xaa is C or S
VIMPIKGYIKPTKGIFYLINIPSLDQSVXX

SEQ ID NO: 83293 - protein, 21 aa, Artificial Sequence
  Cyclic GFR-binding peptide
DRHKRLVVNNAADYYLISTAS

SEQ ID NO: 83294 - protein, 36 aa, Artificial Sequence; identical to SEQ ID NO: 31699
  Cyclic GFR-binding peptide
  MOD_RES (31), (32): Xaa is C or S

SEQ ID NO: 83295 - protein, 30 aa, Artificial Sequence; identical to SEQ ID NO: 31700
  Cyclic GFR-binding peptide

SEQ ID NO: 83296 - protein, 35 aa, Artificial Sequence
  Cyclic GFR-binding peptide
  MOD_RES (29), (30): Xaa is C or S
VIMPIKGYVKPKRGVFYLINIPSLAQPVXXPAASA

SEQ ID NO: 83297 - protein, 36 aa, Artificial Sequence
  Cyclic GFR-binding peptide
  MOD_RES (30), (31): Xaa is C or S
VVMGEYKFKIIQQKDNLYLMSIPEMKTPTXXPGASG

SEQ ID NO: 83298 - protein, 36 aa, Artificial Sequence; identical to SEQ ID NO: 31701
  Cyclic GFR-binding peptide
  MOD_RES (32), (33): Xaa is C or S

SEQ ID NO: 83299 - protein, 31 aa, Artificial Sequence; identical to SEQ ID NO: 31702
  Cyclic GFR-binding peptide
  MOD_RES (31), (31): Xaa is C or S

SEQ ID NO: 83300 - protein, 23 aa, Artificial Sequence
  Cyclic GFR-binding peptide
TMNRYKKLVVNKNEDFYLISIAN

SEQ ID NO: 83301 - protein, 27 aa, Artificial Sequence
  Cyclic GFR-binding peptide
  MOD_RES (2), (2): Xaa is C or S
KXSKVIMPIKGYIKPTKGIFYLINIPS

SEQ ID NO: 83302 - protein, 27 aa, Artificial Sequence
  Cyclic GFR-binding peptide
  MOD_RES (2), (2): Xaa is C or S
GXEEVIMRHKRLLLVRGNDYYLMSTAS

SEQ ID NO: 83303 - protein, 36 aa, Artificial Sequence; identical to SEQ ID NO: 31705
  Cyclic GFR-binding peptide
  MOD_RES (1), (32), (33): Xaa is C or S

SEQ ID NO: 83304 - protein, 29 aa, Artificial Sequence
  Cyclic GFR-binding peptide
  MOD_RES (26), (27): Xaa is C or S
RHKRLIIQQKDNYYLMSTASMKTPTXXPG

SEQ ID NO: 83305 - protein, 26 aa, Artificial Sequence
  Cyclic GFR-binding peptide
MNEYKFKVVNKNEDLYLISIPEMKEP

SEQ ID NO: 83306 - protein, 26 aa, Artificial Sequence
  Cyclic GFR-binding peptide
SRVIMPIKGYVKPKRGVFYLINIPSL

SEQ ID NO: 83307 - protein, 30 aa, Artificial Sequence
  Cyclic GFR-binding peptide
  MOD_RES (27), (28): Xaa is C or S
MPIKGYIKPTKGIFYLINIPSLDQSVXXPS

SEQ ID NO: 83308 - protein, 25 aa, Artificial Sequence
  Cyclic GFR-binding peptide
VTMNYHYKLVVNKNEDKYLISIPSM

SEQ ID NO: 83309 - protein, 32 aa, Artificial Sequence
  Cyclic GFR-binding peptide
  MOD_RES (1), (3): Xaa is C or S
XAXSEVTMNPIKGYVVNKNEDFYLINIPSMKE

SEQ ID NO: 83310 - protein, 35 aa, Artificial Sequence; identical to SEQ ID NO: 31707
  Cyclic GFR-binding peptide
  MOD_RES (1), (3), (35): Xaa is C or S

SEQ ID NO: 83311 - protein, 32 aa, Artificial Sequence
  Cyclic GFR-binding peptide
  MOD_RES (28), (29): Xaa is C or S
MNEYKFKVVNKNEDLYLISIPEMKEPVXXPEP

SEQ ID NO: 83312 - protein, 34 aa, Artificial Sequence
  Cyclic GFR-binding peptide
  MOD_RES (30), (31): Xaa is C or S
VTMNPIKGYVVNKNEDFYLINIPSMKEPVXXPEP

SEQ ID NO: 83313 - protein, 35 aa, Artificial Sequence; identical to SEQ ID NO: 31708
  Cyclic GFR-binding peptide
  MOD_RES (1), (3), (35): Xaa is C or S

SEQ ID NO: 83314 - protein, 32 aa, Artificial Sequence
  Cyclic GFR-binding peptide
  MOD_RES (29), (30): Xaa is C or S
VMGYHYKLIIQQKDNKYLMSIPSMKTPTXXPG

SEQ ID NO: 83315 - protein, 33 aa, Artificial Sequence
  Cyclic GFR-binding peptide
  MOD_RES (28), (29): Xaa is C or S
MNPIKGYVVNKNEDFYLINIPSMKEPVXXPEPI

SEQ ID NO: 83316 - protein, 32 aa, Artificial Sequence
  Cyclic GFR-binding peptide
  MOD_RES (27), (28): Xaa is C or S
NEYKFKVVNKNEDLYLISIPEMKEPVXXPEPI

SEQ ID NO: 83317 - protein, 23 aa, Artificial Sequence
  Cyclic GFR-binding peptide
MDEYKFKVVNNASDLYLISIPEL

SEQ ID NO: 83318 - protein, 33 aa, Artificial Sequence
  Cyclic GFR-binding peptide
  MOD_RES (29), (30): Xaa is C or S
VMDRHKRLVVNNASDYYLISTASLRTPVXXTPP

SEQ ID NO: 83319 - protein, 24 aa, Artificial Sequence
  Cyclic GFR-binding peptide
DYHYKLVVNNASDKYLISIPSLRT

SEQ ID NO: 83320 - protein, 30 aa, Artificial Sequence
  Cyclic GFR-binding peptide
  MOD_RES (26), (27): Xaa is C or S
EYKFKLLVRGNDLYLMSIPETKVPAXXTSP

SEQ ID NO: 83321 - protein, 29 aa, Artificial Sequence
  Cyclic GFR-binding peptide
  MOD_RES (2), (2): Xaa is C or S
GXESVAMGRHKRLYTVVGKDYYLISTASL

SEQ ID NO: 83322 - protein, 26 aa, Artificial Sequence
  Cyclic GFR-binding peptide
GRHKRLYTVVGKDYYLISTASLKTPV

SEQ ID NO: 83323 - protein, 40 aa, Artificial Sequence; identical to SEQ ID NO: 31715
  Cyclic GFR-binding peptide
  MOD_RES (2), (4), (36), (37): Xaa is C or S

SEQ ID NO: 83324 - protein, 29 aa, Artificial Sequence
  Cyclic GFR-binding peptide
EVVMDEYKFKVVNNASDLYLISIPELRTP

SEQ ID NO: 83325 - protein, 24 aa, Artificial Sequence
  Cyclic GFR-binding peptide
YHYKLIIQQKDNKYLMSIPSMKTP

SEQ ID NO: 83326 - protein, 21 aa, Artificial Sequence
  Cyclic GFR-binding peptide
PIKGYVKPKRGVFYLINIPSL

SEQ ID NO: 83327 - protein, 35 aa, Artificial Sequence; identical to SEQ ID NO: 31723
  Cyclic GFR-binding peptide
  MOD_RES (2), (34), (35): Xaa is C or S

SEQ ID NO: 83328 - protein, 28 aa, Artificial Sequence
  Cyclic GFR-binding peptide
  MOD_RES (28), (28): Xaa is C or S
MNEYKFKVVNKNEDLYLISIPEMKEPVX

SEQ ID NO: 83329 - protein, 23 aa, Artificial Sequence
  Cyclic GFR-binding peptide
YHYKLVVNKNEDKYLISIPSMKE

SEQ ID NO: 83330 - protein, 24 aa, Artificial Sequence
  Cyclic GFR-binding peptide
MDRHKRLVVNNAADYYLISTASLR

SEQ ID NO: 83331 - protein, 34 aa, Artificial Sequence
  Cyclic GFR-binding peptide
  MOD_RES (28), (29): Xaa is C or S
MNRHKRLIVNSSDDYYLVSTASLKTPAXXPKPVH

SEQ ID NO: 83332 - protein, 35 aa, Artificial Sequence
  Cyclic GFR-binding peptide
  MOD_RES (30), (31): Xaa is C or S
KVIMPIKGYIKPTKGIFYLINIPSLDQSVXXPSAS

SEQ ID NO: 83333 - protein, 31 aa, Artificial Sequence
  Cyclic GFR-binding peptide
  MOD_RES (26), (27): Xaa is C or S
EYKFKVVNKNEDLYLISIPEMKEPVXXPEPI

SEQ ID NO: 83334 - protein, 21 aa, Artificial Sequence
  Cyclic GFR-binding peptide
MRHKRLLLVRGNDYYLMSTAS

SEQ ID NO: 83335 - protein, 42 aa, Artificial Sequence; identical to SEQ ID NO: 31725
  Cyclic GFR-binding peptide
  MOD_RES (2), (4), (36), (37): Xaa is C or S

SEQ ID NO: 83336 - protein, 32 aa, Artificial Sequence
  Cyclic GFR-binding peptide
  MOD_RES (26), (27): Xaa is C or S
RHKRLVVNNASDYYLISTASLRTPVXXTPPTS

SEQ ID NO: 83337 - protein, 29 aa, Artificial Sequence
  Cyclic GFR-binding peptide
  MOD_RES (29), (29): Xaa is C or S
AMGRHKRLYTVVGKDYYLISTASLKTPVX

SEQ ID NO: 83338 - protein, 25 aa, Artificial Sequence
  Cyclic GFR-binding peptide
RHKRLVVNKNEDYYLISTASMKEPV

SEQ ID NO: 83339 - protein, 27 aa, Artificial Sequence
  Cyclic GFR-binding peptide
MDRHKRLVVNNAADYYLISTASLRAPV

SEQ ID NO: 83340 - protein, 35 aa, Artificial Sequence; identical to SEQ ID NO: 31727
  Cyclic GFR-binding peptide
  MOD_RES (2), (33), (34): Xaa is C or S

SEQ ID NO: 83341 - protein, 25 aa, Artificial Sequence
  Cyclic GFR-binding peptide
MPIKGYVKPTRGVFYLINIPSLDQP

SEQ ID NO: 83342 - protein, 34 aa, Artificial Sequence; identical to SEQ ID NO: 31728
  Cyclic GFR-binding peptide
  MOD_RES (32), (33): Xaa is C or S

SEQ ID NO: 83343 - protein, 36 aa, Artificial Sequence; identical to SEQ ID NO: 31729
  Cyclic GFR-binding peptide
  MOD_RES (31), (32): Xaa is C or S

SEQ ID NO: 83344 - protein, 29 aa, Artificial Sequence
  Cyclic GFR-binding peptide
  MOD_RES (1), (1): Xaa is C or S
XSEVVMDRHKRLVVNNASDYYLISTASLR

SEQ ID NO: 83345 - protein, 32 aa, Artificial Sequence
  Cyclic GFR-binding peptide
  MOD_RES (26), (27): Xaa is C or S
RYKKLVVNKNEDFYLISIANMKEPVXXPEPIG

SEQ ID NO: 83346 - protein, 24 aa, Artificial Sequence
  Cyclic GFR-binding peptide
EYKFKIIQQKDNLYLMSIPEMKTP

SEQ ID NO: 83347 - protein, 29 aa, Artificial Sequence
  Cyclic GFR-binding peptide
  MOD_RES (28), (29): Xaa is C or S
MDRHKRLVVNNAADYYLISTASLRAPVXX

SEQ ID NO: 83348 - protein, 20 aa, Artificial Sequence
  Cyclic GFR-binding peptide
RHKRLVVNKNEDYYLISTAS

SEQ ID NO: 83349 - protein, 34 aa, Artificial Sequence; identical to SEQ ID NO: 31732
  Cyclic GFR-binding peptide
  MOD_RES (2), (34): Xaa is C or S

SEQ ID NO: 83350 - protein, 32 aa, Artificial Sequence
  Cyclic GFR-binding peptide
  MOD_RES (1), (3): Xaa is C or S
XGXSEVVMDRHKRLVVNNASDYYLISTASLRT

SEQ ID NO: 83351 - protein, 29 aa, Artificial Sequence
  Cyclic GFR-binding peptide
  MOD_RES (2), (2): Xaa is C or S
GXAEVVMDRHKRLVVNNAADYYLISTASL

SEQ ID NO: 83352 - protein, 31 aa, Artificial Sequence
  Cyclic GFR-binding peptide
  MOD_RES (27), (28): Xaa is C or S
MPIKGYIKPTKGIFYLINIPSLDQSVXXPSA

SEQ ID NO: 83353 - protein, 38 aa, Artificial Sequence; identical to SEQ ID NO: 31734
  Cyclic GFR-binding peptide
  MOD_RES (2), (4), (35), (36): Xaa is C or S

SEQ ID NO: 83354 - protein, 26 aa, Artificial Sequence
  Cyclic GFR-binding peptide
  MOD_RES (26), (26): Xaa is C or S
YHYKLVVNNASDKYLISIPSLRTPVX

SEQ ID NO: 83355 - protein, 26 aa, Artificial Sequence
  Cyclic GFR-binding peptide
VVMDEYKFKVVNNASDLYLISIPELR

SEQ ID NO: 83356 - protein, 32 aa, Artificial Sequence
  Cyclic GFR-binding peptide
  MOD_RES (1), (3): Xaa is C or S
XGXEEVIMRHKRLLLVRGNDYYLMSTASTKVP

SEQ ID NO: 83357 - protein, 26 aa, Artificial Sequence
  Cyclic GFR-binding peptide
EVIMRHKRLLLVRGNDYYLMSTASTK

SEQ ID NO: 83358 - protein, 33 aa, Artificial Sequence
  Cyclic GFR-binding peptide
  MOD_RES (29), (30): Xaa is C or S
TMNRYKKLVVNKNEDFYLISIANMKEPVXXPEP

SEQ ID NO: 83359 - protein, 38 aa, Artificial Sequence; identical to SEQ ID NO: 31737
  Cyclic GFR-binding peptide
  MOD_RES (2), (34), (35): Xaa is C or S

SEQ ID NO: 83360 - protein, 27 aa, Artificial Sequence
  Cyclic GFR-binding peptide
IMYHYKLLLVRGNDKYLMSIPSTKVPA

SEQ ID NO: 83361 - protein, 26 aa, Artificial Sequence
  Cyclic GFR-binding peptide
VVMGYHYKLIIQQKDNKYLMSIPSMK

SEQ ID NO: 83362 - protein, 33 aa, Artificial Sequence
  Cyclic GFR-binding peptide
  MOD_RES (30), (31): Xaa is C or S
EVIMRHKRLLLVRGNDYYLMSTASTKVPAXXTS

SEQ ID NO: 83363 - protein, 40 aa, Artificial Sequence; identical to SEQ ID NO: 31741
  Cyclic GFR-binding peptide
  MOD_RES (2), (4), (36), (37): Xaa is C or S

SEQ ID NO: 83364 - protein, 26 aa, Artificial Sequence
  Cyclic GFR-binding peptide
AEVVMDRHKRLVVNNAADYYLISTAS

SEQ ID NO: 83365 - protein, 29 aa, Artificial Sequence
  Cyclic GFR-binding peptide
  MOD_RES (28), (29): Xaa is C or S
MDEYKFKVVNNASDLYLISIPELRTPVXX

SEQ ID NO: 83366 - protein, 27 aa, Artificial Sequence
  Cyclic GFR-binding peptide
  MOD_RES (27), (27): Xaa is C or S
GRHKRLYTVVGKDYYLISTASLKTPVX

SEQ ID NO: 83367 - protein, 35 aa, Artificial Sequence; identical to SEQ ID NO: 31743
  Cyclic GFR-binding peptide
  MOD_RES (1), (3), (35): Xaa is C or S

SEQ ID NO: 83368 - protein, 31 aa, Artificial Sequence
  Cyclic GFR-binding peptide
  MOD_RES (1), (1): Xaa is C or S
XRDVVMGYHYKLIIQQKDNKYLMSIPSMKTP

SEQ ID NO: 83369 - protein, 34 aa, Artificial Sequence
  Cyclic GFR-binding peptide
  MOD_RES (30), (31): Xaa is C or S
EVIMRHKRLLLVRGNDYYLMSTASTKVPAXXTSP

SEQ ID NO: 83370 - protein, 33 aa, Artificial Sequence
  Cyclic GFR-binding peptide
  MOD_RES (29), (30): Xaa is C or S
VMDEYKFKVVNNASDLYLISIPELRTPVXXTPP

SEQ ID NO: 83371 - protein, 29 aa, Artificial Sequence
  Cyclic GFR-binding peptide
  MOD_RES (1), (1): Xaa is C or S
XRDVVMGRHKRLIIQQKDNYYLMSTASMK

SEQ ID NO: 83372 - protein, 29 aa, Artificial Sequence
  Cyclic GFR-binding peptide
  MOD_RES (29), (29): Xaa is C or S
VIMYHYKLLLVRGNDKYLMSIPSTKVPAX

SEQ ID NO: 83373 - protein, 33 aa, Artificial Sequence
  Cyclic GFR-binding peptide
  MOD_RES (2), (4): Xaa is C or S
RXGXSEVVMDEYKFKVVNNASDLYLISIPELRT

SEQ ID NO: 83374 - protein, 37 aa, Artificial Sequence; identical to SEQ ID NO: 31744
  Cyclic GFR-binding peptide
  MOD_RES (31), (32): Xaa is C or S

SEQ ID NO: 83375 - protein, 31 aa, Artificial Sequence
  Cyclic GFR-binding peptide
  MOD_RES (1), (1): Xaa is C or S
XSEVTMNYHYKLVVNKNEDKYLISIPSMKEP

SEQ ID NO: 83376 - protein, 32 aa, Artificial Sequence
  Cyclic GFR-binding peptide
  MOD_RES (27), (28): Xaa is C or S
DRHKRLVVNNAADYYLISTASLRAPVXXSAPA

SEQ ID NO: 83377 - protein, 23 aa, Artificial Sequence
  Cyclic GFR-binding peptide
VIMRHKRLLLVRGNDYYLMSTAS

SEQ ID NO: 83378 - protein, 26 aa, Artificial Sequence
  Cyclic GFR-binding peptide
VIMPIKGYIKPTKGIFYLINIPSLDQ

SEQ ID NO: 83379 - protein, 21 aa, Artificial Sequence
  Cyclic GFR-binding peptide
RHKRLYTVVGKDYYLISTASL

SEQ ID NO: 83380 - protein, 29 aa, Artificial Sequence
  Cyclic GFR-binding peptide
VVMDYHYKLVVNNASDKYLISIPSLRTPV

SEQ ID NO: 83381 - protein, 29 aa, Artificial Sequence
  Cyclic GFR-binding peptide
  MOD_RES (29), (29): Xaa is C or S
VIMRHKRLLLVRGNDYYLMSTASTKVPAX

SEQ ID NO: 83382 - protein, 30 aa, Artificial Sequence; identical to SEQ ID NO: 31745
  Cyclic GFR-binding peptide

SEQ ID NO: 83383 - protein, 33 aa, Artificial Sequence
  Cyclic GFR-binding peptide
  MOD_RES (28), (29): Xaa is C or S
IMPIKGYIKPTKGIFYLINIPSLDQSVXXPSAS

SEQ ID NO: 83384 - protein, 35 aa, Artificial Sequence; identical to SEQ ID NO: 31746
  Cyclic GFR-binding peptide
  MOD_RES (1), (3), (34), (35): Xaa is C or S

SEQ ID NO: 83385 - protein, 29 aa, Artificial Sequence
  Cyclic GFR-binding peptide
  MOD_RES (2), (2): Xaa is C or S
AXSEVTMNPIKGYVVNKNEDFYLINIPSM

SEQ ID NO: 83386 - protein, 34 aa, Artificial Sequence; identical to SEQ ID NO: 31748
  Cyclic GFR-binding peptide
  MOD_RES (1), (33), (34): Xaa is C or S

SEQ ID NO: 83387 - protein, 21 aa, Artificial Sequence
  Cyclic GFR-binding peptide
RHKRLLLVRGNDYYLMSTAST

SEQ ID NO: 83388 - protein, 28 aa, Artificial Sequence
  Cyclic GFR-binding peptide
  MOD_RES (1), (3): Xaa is C or S
XGXEEVIMRHKRLLLVRGNDYYLMSTAS

SEQ ID NO: 83389 - protein, 27 aa, Artificial Sequence
  Cyclic GFR-binding peptide
  MOD_RES (1), (1): Xaa is C or S
XSKVIMPIKGYIKPTKGIFYLINIPSL

SEQ ID NO: 83390 - protein, 27 aa, Artificial Sequence
  Cyclic GFR-binding peptide
  MOD_RES (2), (2): Xaa is C or S
GXEEVIMEYKFKLLVRGNDLYLMSIPE

SEQ ID NO: 83391 - protein, 38 aa, Artificial Sequence; identical to SEQ ID NO: 31753
  Cyclic GFR-binding peptide
  MOD_RES (2), (4), (36), (37): Xaa is C or S

SEQ ID NO: 83392 - protein, 38 aa, Artificial Sequence; identical to SEQ ID NO: 31754
  Cyclic GFR-binding peptide
  MOD_RES (2), (34), (35): Xaa is C or S

SEQ ID NO: 83393 - protein, 34 aa, Artificial Sequence
  Cyclic GFR-binding peptide
  MOD_RES (28), (29): Xaa is C or S
MDRHKRLVVNNASDYYLISTASLRTPVXXTPPTS

SEQ ID NO: 83394 - protein, 31 aa, Artificial Sequence; identical to SEQ ID NO: 31757
  Cyclic GFR-binding peptide

SEQ ID NO: 83395 - protein, 23 aa, Artificial Sequence
  Cyclic GFR-binding peptide
PIKGYVKPKRGVFYLINIPSLAQ

SEQ ID NO: 83396 - protein, 32 aa, Artificial Sequence
  Cyclic GFR-binding peptide
  MOD_RES (2), (2): Xaa is C or S
GXSEVVMDYHYKLVVNNASDKYLISIPSLRTP

SEQ ID NO: 83397 - protein, 23 aa, Artificial Sequence
  Cyclic GFR-binding peptide
IMPIKGYIKPTKGIFYLINIPSL

SEQ ID NO: 83398 - protein, 27 aa, Artificial Sequence
  Cyclic GFR-binding peptide
  MOD_RES (27), (27): Xaa is C or S
MPIKGYVKPKRGVFYLINIPSLAQPVX

SEQ ID NO: 83399 - protein, 30 aa, Artificial Sequence
  Cyclic GFR-binding peptide
SEVVMDYHYKLVVNNASDKYLISIPSLRTP

SEQ ID NO: 83400 - protein, 29 aa, Artificial Sequence
  Cyclic GFR-binding peptide
AAAAAAAAAEYKFKVVNKNEDLYLISIPE

SEQ ID NO: 83401 - protein, 32 aa, Artificial Sequence
  Cyclic GFR-binding peptide
  MOD_RES (27), (28): Xaa is C or S
NYHYKLVVNKNEDKYLISIPSMKEPVXXPEPI

SEQ ID NO: 83402 - protein, 22 aa, Artificial Sequence
  Cyclic GFR-binding peptide
DEYKFKVVNNASDLYLISIPEL

SEQ ID NO: 83403 - protein, 37 aa, Artificial Sequence; identical to SEQ ID NO: 31760
  Cyclic GFR-binding peptide
  MOD_RES (1), (33), (34): Xaa is C or S

SEQ ID NO: 83404 - protein, 22 aa, Artificial Sequence
  Cyclic GFR-binding peptide
MNYHYKLVVNKNEDKYLISIPS

SEQ ID NO: 83405 - protein, 33 aa, Artificial Sequence
  Cyclic GFR-binding peptide
  MOD_RES (2), (4): Xaa is C or S
SXGXRDVVMGYHYKLIIQQKDNKYLMSIPSMKT

SEQ ID NO: 83406 - protein, 29 aa, Artificial Sequence
  Cyclic GFR-binding peptide
  MOD_RES (1), (1): Xaa is C or S
XSEVVMDYHYKLVVNNASDKYLISIPSLR

SEQ ID NO: 83407 - protein, 32 aa, Artificial Sequence; identical to SEQ ID NO: 31762
  Cyclic GFR-binding peptide
  MOD_RES (32), (32): Xaa is C or S

SEQ ID NO: 83408 - protein, 31 aa, Artificial Sequence
  Cyclic GFR-binding peptide
  MOD_RES (1), (3): Xaa is C or S
XAXSEVTMNRHKRLVVNKNEDYYLISTASMK

SEQ ID NO: 83409 - protein, 39 aa, Artificial Sequence; identical to SEQ ID NO: 31763
  Cyclic GFR-binding peptide
  MOD_RES (2), (4), (36), (37): Xaa is C or S

SEQ ID NO: 83410 - protein, 30 aa, Artificial Sequence; identical to SEQ ID NO: 31764
  Cyclic GFR-binding peptide

SEQ ID NO: 83411 - protein, 31 aa, Artificial Sequence
  Cyclic GFR-binding peptide
  MOD_RES (30), (31): Xaa is C or S
KVIMPIKGYIKPTKGIFYLINIPSLDQSVXX

SEQ ID NO: 83412 - protein, 29 aa, Artificial Sequence
  Cyclic GFR-binding peptide
VTMNRHKRLVVNKNEDYYLISTASMKEPV

SEQ ID NO: 83413 - protein, 28 aa, Artificial Sequence
  Cyclic GFR-binding peptide
  MOD_RES (1), (1): Xaa is C or S
XSKVVMPIKGYVKPTRGVFYLINIPSLD

SEQ ID NO: 83414 - protein, 32 aa, Artificial Sequence
  Cyclic GFR-binding peptide
  MOD_RES (2), (2): Xaa is C or S
GXAEVVMDRHKRLVVNNAADYYLISTASLRAP

SEQ ID NO: 83415 - protein, 22 aa, Artificial Sequence
  Cyclic GFR-binding peptide
GEYKFKIIQQKDNLYLMSIPEM

SEQ ID NO: 83416 - protein, 26 aa, Artificial Sequence
  Cyclic GFR-binding peptide
  MOD_RES (26), (26): Xaa is C or S
EYKFKVVNNASDLYLISIPELRTPVX

SEQ ID NO: 83417 - protein, 26 aa, Artificial Sequence
  Cyclic GFR-binding peptide
  MOD_RES (1), (1): Xaa is C or S
XEEVIMYHYKLLLVRGNDKYLMSIPS

SEQ ID NO: 83418 - protein, 37 aa, Artificial Sequence; identical to SEQ ID NO: 31766
  Cyclic GFR-binding peptide
  MOD_RES (2), (34), (35): Xaa is C or S

SEQ ID NO: 83419 - protein, 30 aa, Artificial Sequence
  Cyclic GFR-binding peptide
  MOD_RES (27), (28): Xaa is C or S
DRHKRLVVNNASDYYLISTASLRTPVXXTP

SEQ ID NO: 83420 - protein, 21 aa, Artificial Sequence
  Cyclic GFR-binding peptide
NRHKRLVVNKNEDYYLISTAS

SEQ ID NO: 83421 - protein, 31 aa, Artificial Sequence
  Cyclic GFR-binding peptide
  MOD_RES (30), (31): Xaa is C or S
VVMDEYKFKVVNNASDLYLISIPELRTPVXX

SEQ ID NO: 83422 - protein, 30 aa, Artificial Sequence
  Cyclic GFR-binding peptide
  MOD_RES (2), (2): Xaa is C or S
GXEEVIMEYKFKLLVRGNDLYLMSIPETKV

SEQ ID NO: 83423 - protein, 36 aa, Artificial Sequence
  Cyclic GFR-binding peptide
  MOD_RES (30), (31): Xaa is C or S
EVIMRHKRLLLVRGNDYYLMSTASTKVPAXXTSPVR

SEQ ID NO: 83424 - protein, 38 aa, Artificial Sequence; identical to SEQ ID NO: 31769
  Cyclic GFR-binding peptide
  MOD_RES (1), (32), (33): Xaa is C or S

SEQ ID NO: 83425 - protein, 37 aa, Artificial Sequence; identical to SEQ ID NO: 31770
  Cyclic GFR-binding peptide
  MOD_RES (2), (34), (35): Xaa is C or S

SEQ ID NO: 83426 - protein, 25 aa, Artificial Sequence
  Cyclic GFR-binding peptide
GRHKRLYTVVGKDYYLISTASLKTP

SEQ ID NO: 83427 - protein, 33 aa, Artificial Sequence; identical to SEQ ID NO: 31771
  Cyclic GFR-binding peptide
  MOD_RES (32), (33): Xaa is C or S

SEQ ID NO: 83428 - protein, 25 aa, Artificial Sequence
  Cyclic GFR-binding peptide
EVVMDRHKRLVVNNAADYYLISTAS

SEQ ID NO: 83429 - protein, 30 aa, Artificial Sequence
  Cyclic GFR-binding peptide
  MOD_RES (2), (2): Xaa is C or S
GXAEVVMDRHKRLVVNNAADYYLISTASLR

SEQ ID NO: 83430 - protein, 25 aa, Artificial Sequence
  Cyclic GFR-binding peptide
MDRHKRLVVNNAADYYLISTASLRA

SEQ ID NO: 83431 - protein, 27 aa, Artificial Sequence
  Cyclic GFR-binding peptide
EVTMNEYKFKVVNKNEDLYLISIPEMK

SEQ ID NO: 83432 - protein, 41 aa, Artificial Sequence; identical to SEQ ID NO: 31775
  Cyclic GFR-binding peptide
  MOD_RES (1), (3), (35), (36): Xaa is C or S

SEQ ID NO: 83433 - protein, 31 aa, Artificial Sequence
  Cyclic GFR-binding peptide
  MOD_RES (1), (1): Xaa is C or S
XAEVVMDRHKRLVVNNAADYYLISTASLRAP

SEQ ID NO: 83434 - protein, 28 aa, Artificial Sequence
  Cyclic GFR-binding peptide
  MOD_RES (1), (1): Xaa is C or S
XEEVIMEYKFKLLVRGNDLYLMSIPETK

SEQ ID NO: 83435 - protein, 35 aa, Artificial Sequence; identical to SEQ ID NO: 20515
  Cyclic GFR-binding peptide
  MOD_RES (2), (4): Xaa is C or S

SEQ ID NO: 83436 - protein, 34 aa, Artificial Sequence; identical to SEQ ID NO: 31777
  Cyclic GFR-binding peptide
  MOD_RES (31), (32): Xaa is C or S

SEQ ID NO: 83437 - protein, 35 aa, Artificial Sequence; identical to SEQ ID NO: 31778
  Cyclic GFR-binding peptide
  MOD_RES (1), (33), (34): Xaa is C or S

SEQ ID NO: 83438 - protein, 28 aa, Artificial Sequence
  Cyclic GFR-binding peptide
  MOD_RES (1), (1): Xaa is C or S
XSEVVMDEYKFKVVNNASDLYLISIPEL

SEQ ID NO: 83439 - protein, 36 aa, Artificial Sequence; identical to SEQ ID NO: 31780
  Cyclic GFR-binding peptide
  MOD_RES (1), (3), (35), (36): Xaa is C or S

SEQ ID NO: 83440 - protein, 31 aa, Artificial Sequence
  Cyclic GFR-binding peptide
  MOD_RES (29), (30): Xaa is C or S
TMNPIKGYVVNKNEDFYLINIPSMKEPVXXP

SEQ ID NO: 83441 - protein, 34 aa, Artificial Sequence
  Cyclic GFR-binding peptide
  MOD_RES (30), (31): Xaa is C or S
VVMDRHKRLVVNNASDYYLISTASLRTPVXXTPP

SEQ ID NO: 83442 - protein, 38 aa, Artificial Sequence; identical to SEQ ID NO: 31781
  Cyclic GFR-binding peptide
  MOD_RES (1), (3), (34), (35): Xaa is C or S

SEQ ID NO: 83443 - protein, 30 aa, Artificial Sequence
  Cyclic GFR-binding peptide
  MOD_RES (26), (27): Xaa is C or S
PIKGYIKPTKGIFYLINIPSLDQSVXXPSA

SEQ ID NO: 83444 - protein, 36 aa, Artificial Sequence; identical to SEQ ID NO: 31785
  Cyclic GFR-binding peptide
  MOD_RES (2), (4), (36): Xaa is C or S

SEQ ID NO: 83445 - protein, 33 aa, Artificial Sequence; identical to SEQ ID NO: 31786
  Cyclic GFR-binding peptide
  MOD_RES (31), (32): Xaa is C or S

SEQ ID NO: 83446 - protein, 34 aa, Artificial Sequence; identical to SEQ ID NO: 31787
  Cyclic GFR-binding peptide
  MOD_RES (2), (34): Xaa is C or S

SEQ ID NO: 83447 - protein, 37 aa, Artificial Sequence; identical to SEQ ID NO: 31788
  Cyclic GFR-binding peptide
  MOD_RES (32), (33): Xaa is C or S

SEQ ID NO: 83448 - protein, 30 aa, Artificial Sequence
  Cyclic GFR-binding peptide
  MOD_RES (30), (30): Xaa is C or S
VAMGRHKRLYTVVGKDYYLISTASLKTPVX

SEQ ID NO: 83449 - protein, 35 aa, Artificial Sequence; identical to SEQ ID NO: 31789
  Cyclic GFR-binding peptide
  MOD_RES (32), (33): Xaa is C or S

SEQ ID NO: 83450 - protein, 36 aa, Artificial Sequence; identical to SEQ ID NO: 31790
  Cyclic GFR-binding peptide
  MOD_RES (1), (33), (34): Xaa is C or S

SEQ ID NO: 83451 - protein, 24 aa, Artificial Sequence
  Cyclic GFR-binding peptide
GRHKRLYTVVGKDYYLISTASLKT

SEQ ID NO: 83452 - protein, 24 aa, Artificial Sequence
  Cyclic GFR-binding peptide
NPIKGYVVNKNEDFYLINIPSMKE

SEQ ID NO: 83453 - protein, 30 aa, Artificial Sequence
  Cyclic GFR-binding peptide
  MOD_RES (2), (2): Xaa is C or S
GXSEVVMDYHYKLVVNNASDKYLISIPSLR

SEQ ID NO: 83454 - protein, 32 aa, Artificial Sequence
  Cyclic GFR-binding peptide
  MOD_RES (2), (4): Xaa is C or S
RXAXSEVTMNRHKRLVVNKNEDYYLISTASMK

SEQ ID NO: 83455 - protein, 24 aa, Artificial Sequence
  Cyclic GFR-binding peptide
MGRHKRLYTVVGKDYYLISTASLK

SEQ ID NO: 83456 - protein, 34 aa, Artificial Sequence; identical to SEQ ID NO: 31791
  Cyclic GFR-binding peptide
  MOD_RES (2), (33), (34): Xaa is C or S

SEQ ID NO: 83457 - protein, 22 aa, Artificial Sequence
  Cyclic GFR-binding peptide
GYHYKLIIQQKDNKYLMSIPSM

SEQ ID NO: 83458 - protein, 27 aa, Artificial Sequence
  Cyclic GFR-binding peptide
  MOD_RES (2), (2): Xaa is C or S
KXSKVVMPIKGYVKPTRGVFYLINIPS

SEQ ID NO: 83459 - protein, 23 aa, Artificial Sequence
  Cyclic GFR-binding peptide
PIKGYIKPTKGIFYLINIPSLDQ

SEQ ID NO: 83460 - protein, 28 aa, Artificial Sequence
  Cyclic GFR-binding peptide
  MOD_RES (26), (27): Xaa is C or S
RHKRLYTVVGKDYYLISTASLKTPVXXA

SEQ ID NO: 83461 - protein, 33 aa, Artificial Sequence; identical to SEQ ID NO: 31794
  Cyclic GFR-binding peptide
  MOD_RES (32), (33): Xaa is C or S

SEQ ID NO: 83462 - protein, 34 aa, Artificial Sequence; identical to SEQ ID NO: 31795
  Cyclic GFR-binding peptide
  MOD_RES (2), (34): Xaa is C or S

SEQ ID NO: 83463 - protein, 30 aa, Artificial Sequence
  Cyclic GFR-binding peptide
  MOD_RES (1), (3): Xaa is C or S
XGXAEVVMDRHKRLVVNNAADYYLISTASL

SEQ ID NO: 83464 - protein, 23 aa, Artificial Sequence
  Cyclic GFR-binding peptide
MNRHKRLVVNKNEDYYLISTASM

SEQ ID NO: 83465 - protein, 26 aa, Artificial Sequence
  Cyclic GFR-binding peptide
MGYHYKLIIQQKDNKYLMSIPSMKTP

SEQ ID NO: 83466 - protein, 35 aa, Artificial Sequence; identical to SEQ ID NO: 31797
  Cyclic GFR-binding peptide
  MOD_RES (2), (4): Xaa is C or S

SEQ ID NO: 83467 - protein, 31 aa, Artificial Sequence
  Cyclic GFR-binding peptide
  MOD_RES (28), (29): Xaa is C or S
IMRHKRLLLVRGNDYYLMSTASTKVPAXXTS

SEQ ID NO: 83468 - protein, 34 aa, Artificial Sequence; identical to SEQ ID NO: 31798
  Cyclic GFR-binding peptide
  MOD_RES (2), (34): Xaa is C or S

SEQ ID NO: 83469 - protein, 25 aa, Artificial Sequence
  Cyclic GFR-binding peptide
NPIKGYVVNKNEDFYLINIPSMKEP

SEQ ID NO: 83470 - protein, 30 aa, Artificial Sequence
  Cyclic GFR-binding peptide
  MOD_RES (2), (4): Xaa is C or S
RXAXSEVTMNRHKRLVVNKNEDYYLISTAS

SEQ ID NO: 83471 - protein, 39 aa, Artificial Sequence; identical to SEQ ID NO: 31800
  Cyclic GFR-binding peptide
  MOD_RES (1), (3), (35), (36): Xaa is C or S

SEQ ID NO: 83472 - protein, 32 aa, Artificial Sequence; identical to SEQ ID NO: 31801
  Cyclic GFR-binding peptide
  MOD_RES (31), (32): Xaa is C or S

SEQ ID NO: 83473 - protein, 29 aa, Artificial Sequence
  Cyclic GFR-binding peptide
  MOD_RES (2), (2): Xaa is C or S
GXEEVIMEYKFKLLVRGNDLYLMSIPETK

SEQ ID NO: 83474 - protein, 23 aa, Artificial Sequence
  Cyclic GFR-binding peptide
MNYHYKLVVNKNEDKYLISIPSM

SEQ ID NO: 83475 - protein, 38 aa, Artificial Sequence; identical to SEQ ID NO: 31803
  Cyclic GFR-binding peptide
  MOD_RES (2), (4), (36), (37): Xaa is C or S

SEQ ID NO: 83476 - protein, 37 aa, Artificial Sequence; identical to SEQ ID NO: 31804
  Cyclic GFR-binding peptide
  MOD_RES (2), (4), (36), (37): Xaa is C or S

SEQ ID NO: 83477 - protein, 22 aa, Artificial Sequence
  Cyclic GFR-binding peptide
RHKRLLLVRGNDYYLMSTASTK

SEQ ID NO: 83478 - protein, 32 aa, Artificial Sequence; identical to SEQ ID NO: 31805
  Cyclic GFR-binding peptide
  MOD_RES (1), (32): Xaa is C or S

SEQ ID NO: 83479 - protein, 27 aa, Artificial Sequence
  Cyclic GFR-binding peptide
VTMNEYKFKVVNKNEDLYLISIPEMKE

SEQ ID NO: 83480 - protein, 20 aa, Artificial Sequence
  Cyclic GFR-binding peptide
PIKGYIKPTKGIFYLINIPS

SEQ ID NO: 83481 - protein, 30 aa, Artificial Sequence; identical to SEQ ID NO: 1922
  Cyclic GFR-binding peptide

SEQ ID NO: 83482 - protein, 33 aa, Artificial Sequence
  Cyclic GFR-binding peptide
  MOD_RES (29), (30): Xaa is C or S
VIMPIKGYVKPKRGVFYLINIPSLAQPVXXPAA

SEQ ID NO: 83483 - protein, 22 aa, Artificial Sequence
  Cyclic GFR-binding peptide
IMPIKGYIKPTKGIFYLINIPS

SEQ ID NO: 83484 - protein, 34 aa, Artificial Sequence; identical to SEQ ID NO: 31811
  Cyclic GFR-binding peptide
  MOD_RES (31), (32): Xaa is C or S

SEQ ID NO: 83485 - protein, 27 aa, Artificial Sequence
  Cyclic GFR-binding peptide
DVVMGRHKRLIIQQKDNYYLMSTASMK

SEQ ID NO: 83486 - protein, 40 aa, Artificial Sequence; identical to SEQ ID NO: 31814
  Cyclic GFR-binding peptide
  MOD_RES (2), (34), (35): Xaa is C or S

SEQ ID NO: 83487 - protein, 30 aa, Artificial Sequence
  Cyclic GFR-binding peptide
  MOD_RES (29), (30): Xaa is C or S
VIMYHYKLLLVRGNDKYLMSIPSTKVPAXX

SEQ ID NO: 83488 - protein, 31 aa, Artificial Sequence
  Cyclic GFR-binding peptide
  MOD_RES (2), (2): Xaa is C or S
GXRDVVMGYHYKLIIQQKDNKYLMSIPSMKT

SEQ ID NO: 83489 - protein, 28 aa, Artificial Sequence
  Cyclic GFR-binding peptide
VVMPIKGYVKPTRGVFYLINIPSLDQPV

SEQ ID NO: 83490 - protein, 31 aa, Artificial Sequence
  Cyclic GFR-binding peptide
  MOD_RES (2), (4): Xaa is C or S
RXGXSEVVMDYHYKLVVNNASDKYLISIPSL

SEQ ID NO: 83491 - protein, 30 aa, Artificial Sequence
  Cyclic GFR-binding peptide
  MOD_RES (2), (2): Xaa is C or S
GXEEVIMYHYKLLLVRGNDKYLMSIPSTKV

SEQ ID NO: 83492 - protein, 24 aa, Artificial Sequence
  Cyclic GFR-binding peptide
VIMRHKRLLLVRGNDYYLMSTAST

SEQ ID NO: 83493 - protein, 23 aa, Artificial Sequence
  Cyclic GFR-binding peptide
MPIKGYVKPKRGVFYLINIPSLA

SEQ ID NO: 83494 - protein, 28 aa, Artificial Sequence
  Cyclic GFR-binding peptide
VAMGRHKRLYTVVGKDYYLISTASLKTP

SEQ ID NO: 83495 - protein, 31 aa, Artificial Sequence
  Cyclic GFR-binding peptide
  MOD_RES (26), (27): Xaa is C or S
RHKRLVVNNASDYYLISTASLRTPVXXTPPT

SEQ ID NO: 83496 - protein, 40 aa, Artificial Sequence; identical to SEQ ID NO: 31818
  Cyclic GFR-binding peptide
  MOD_RES (2), (4), (35), (36): Xaa is C or S

SEQ ID NO: 83497 - protein, 38 aa, Artificial Sequence; identical to SEQ ID NO: 31822
  Cyclic GFR-binding peptide
  MOD_RES (2), (34), (35): Xaa is C or S

SEQ ID NO: 83498 - protein, 22 aa, Artificial Sequence
  Cyclic GFR-binding peptide
IMRHKRLLLVRGNDYYLMSTAS

SEQ ID NO: 83499 - protein, 22 aa, Artificial Sequence
  Cyclic GFR-binding peptide
YHYKLVVNKNEDKYLISIPSMK

SEQ ID NO: 83500 - protein, 22 aa, Artificial Sequence
  Cyclic GFR-binding peptide
IMYHYKLLLVRGNDKYLMSIPS

SEQ ID NO: 83501 - protein, 29 aa, Artificial Sequence
  Cyclic GFR-binding peptide
  MOD_RES (28), (29): Xaa is C or S
IMYHYKLLLVRGNDKYLMSIPSTKVPAXX

SEQ ID NO: 83502 - protein, 36 aa, Artificial Sequence; identical to SEQ ID NO: 31826
  Cyclic GFR-binding peptide
  MOD_RES (2), (33), (34): Xaa is C or S

SEQ ID NO: 83503 - protein, 31 aa, Artificial Sequence; identical to SEQ ID NO: 31830
  Cyclic GFR-binding peptide

SEQ ID NO: 83504 - protein, 26 aa, Artificial Sequence
  Cyclic GFR-binding peptide
NPIKGYVVNKNEDFYLINIPSMKEPV

SEQ ID NO: 83505 - protein, 27 aa, Artificial Sequence
  Cyclic GFR-binding peptide
  MOD_RES (26), (27): Xaa is C or S
RHKRLVVNNASDYYLISTASLRTPVXX

SEQ ID NO: 83506 - protein, 23 aa, Artificial Sequence
  Cyclic GFR-binding peptide
YHYKLLLVRGNDKYLMSIPSTKV

SEQ ID NO: 83507 - protein, 39 aa, Artificial Sequence; identical to SEQ ID NO: 31831
  Cyclic GFR-binding peptide
  MOD_RES (2), (34), (35): Xaa is C or S

SEQ ID NO: 83508 - protein, 35 aa, Artificial Sequence
  Cyclic GFR-binding peptide
  MOD_RES (30), (31): Xaa is C or S
VTMNPIKGYVVNKNEDFYLINIPSMKEPVXXPEPI

SEQ ID NO: 83509 - protein, 27 aa, Artificial Sequence
  Cyclic GFR-binding peptide
MDEYKFKVVNNASDLYLISIPELRTPV

SEQ ID NO: 83510 - protein, 28 aa, Artificial Sequence
  Cyclic GFR-binding peptide
  MOD_RES (26), (27): Xaa is C or S
EYKFKVVNNASDLYLISIPELRTPVXXT

SEQ ID NO: 83511 - protein, 25 aa, Artificial Sequence
  Cyclic GFR-binding peptide
EVIMRHKRLLLVRGNDYYLMSTAST

SEQ ID NO: 83512 - protein, 25 aa, Artificial Sequence
  Cyclic GFR-binding peptide
VIMEYKFKLLVRGNDLYLMSIPETK

SEQ ID NO: 83513 - protein, 41 aa, Artificial Sequence; identical to SEQ ID NO: 31833
  Cyclic GFR-binding peptide
  MOD_RES (2), (4), (35), (36): Xaa is C or S

SEQ ID NO: 83514 - protein, 31 aa, Artificial Sequence
  Cyclic GFR-binding peptide
  MOD_RES (1), (3): Xaa is C or S
XGXEEVIMRHKRLLLVRGNDYYLMSTASTKV

SEQ ID NO: 83515 - protein, 26 aa, Artificial Sequence
  Cyclic GFR-binding peptide
SKVIMPIKGYIKPTKGIFYLINIPSL

SEQ ID NO: 83516 - protein, 35 aa, Artificial Sequence
  Cyclic GFR-binding peptide
  MOD_RES (30), (31): Xaa is C or S
VVMGEYKFKIIQQKDNLYLMSIPEMKTPTXXPGAS

SEQ ID NO: 83517 - protein, 32 aa, Artificial Sequence; identical to SEQ ID NO: 31835
  Cyclic GFR-binding peptide
  MOD_RES (1), (1): Xaa is C or S

SEQ ID NO: 83518 - protein, 26 aa, Artificial Sequence
  Cyclic GFR-binding peptide
  MOD_RES (1), (1): Xaa is C or S
XEEVIMEYKFKLLVRGNDLYLMSIPE

SEQ ID NO: 83519 - protein, 31 aa, Artificial Sequence
  Cyclic GFR-binding peptide
  MOD_RES (26), (27): Xaa is C or S
PIKGYVVNKNEDFYLINIPSMKEPVXXPEPI

SEQ ID NO: 83520 - protein, 26 aa, Artificial Sequence
  Cyclic GFR-binding peptide
VAMGRHKRLYTVVGKDYYLISTASLK

SEQ ID NO: 83521 - protein, 29 aa, Artificial Sequence
  Cyclic GFR-binding peptide
AAAAAAAAAPIKGYVKPTRGVFYLINIPS

SEQ ID NO: 83522 - protein, 37 aa, Artificial Sequence; identical to SEQ ID NO: 31838
  Cyclic GFR-binding peptide
  MOD_RES (32), (33): Xaa is C or S

SEQ ID NO: 83523 - protein, 23 aa, Artificial Sequence
  Cyclic GFR-binding peptide
VMDRHKRLVVNNAADYYLISTAS

SEQ ID NO: 83524 - protein, 27 aa, Artificial Sequence
  Cyclic GFR-binding peptide
MNYHYKLVVNKNEDKYLISIPSMKEPV

SEQ ID NO: 83525 - protein, 33 aa, Artificial Sequence; identical to SEQ ID NO: 31839
  Cyclic GFR-binding peptide
  MOD_RES (2), (33): Xaa is C or S

SEQ ID NO: 83526 - protein, 27 aa, Artificial Sequence
  Cyclic GFR-binding peptide
EVTMNRHKRLVVNKNEDYYLISTASMK

SEQ ID NO: 83527 - protein, 27 aa, Artificial Sequence
  Cyclic GFR-binding peptide
VVMDYHYKLVVNNASDKYLISIPSLRT

SEQ ID NO: 83528 - protein, 36 aa, Artificial Sequence; identical to SEQ ID NO: 31842
  Cyclic GFR-binding peptide
  MOD_RES (31), (32): Xaa is C or S

SEQ ID NO: 83529 - protein, 31 aa, Artificial Sequence; identical to SEQ ID NO: 31843
  Cyclic GFR-binding peptide

SEQ ID NO: 83530 - protein, 37 aa, Artificial Sequence; identical to SEQ ID NO: 31844
  Cyclic GFR-binding peptide
  MOD_RES (1), (33), (34): Xaa is C or S

SEQ ID NO: 83531 - protein, 39 aa, Artificial Sequence; identical to SEQ ID NO: 31845
  Cyclic GFR-binding peptide
  MOD_RES (2), (34), (35): Xaa is C or S

SEQ ID NO: 83532 - protein, 33 aa, Artificial Sequence
  Cyclic GFR-binding peptide
  MOD_RES (2), (4): Xaa is C or S
SXKXSKVVMPIKGYVKPTRGVFYLINIPSLDQP

SEQ ID NO: 83533 - protein, 36 aa, Artificial Sequence; identical to SEQ ID NO: 31849
  Cyclic GFR-binding peptide
  MOD_RES (1), (32), (33): Xaa is C or S

SEQ ID NO: 83534 - protein, 33 aa, Artificial Sequence; identical to SEQ ID NO: 31851
  Cyclic GFR-binding peptide
  MOD_RES (1), (33): Xaa is C or S

SEQ ID NO: 83535 - protein, 37 aa, Artificial Sequence; identical to SEQ ID NO: 31852
  Cyclic GFR-binding peptide
  MOD_RES (31), (32): Xaa is C or S

SEQ ID NO: 83536 - protein, 25 aa, Artificial Sequence
  Cyclic GFR-binding peptide
MNPIKGYVVNKNEDFYLINIPSMKE

SEQ ID NO: 83537 - protein, 28 aa, Artificial Sequence
  Cyclic GFR-binding peptide
EEVIMRHKRLLLVRGNDYYLMSTASTKV

SEQ ID NO: 83538 - protein, 42 aa, Artificial Sequence; identical to SEQ ID NO: 31854
  Cyclic GFR-binding peptide
  MOD_RES (2), (4), (36), (37): Xaa is C or S

SEQ ID NO: 83539 - protein, 25 aa, Artificial Sequence
  Cyclic GFR-binding peptide
RHKRLIIQQKDNYYLMSTASMKTPT

SEQ ID NO: 83540 - protein, 25 aa, Artificial Sequence
  Cyclic GFR-binding peptide
DVVMGRHKRLIIQQKDNYYLMSTAS

SEQ ID NO: 83541 - protein, 25 aa, Artificial Sequence
  Cyclic GFR-binding peptide
EVVMDRHKRLVVNNASDYYLISTAS

SEQ ID NO: 83542 - protein, 34 aa, Artificial Sequence
  Cyclic GFR-binding peptide
  MOD_RES (30), (31): Xaa is C or S
VTMNEYKFKVVNKNEDLYLISIPEMKEPVXXPEP

SEQ ID NO: 83543 - protein, 36 aa, Artificial Sequence; identical to SEQ ID NO: 31857
  Cyclic GFR-binding peptide
  MOD_RES (32), (33): Xaa is C or S

SEQ ID NO: 83544 - protein, 31 aa, Artificial Sequence
  Cyclic GFR-binding peptide
  MOD_RES (30), (31): Xaa is C or S
VTMNRYKKLVVNKNEDFYLISIANMKEPVXX

SEQ ID NO: 83545 - protein, 32 aa, Artificial Sequence
  Cyclic GFR-binding peptide
  MOD_RES (28), (29): Xaa is C or S
VMPIKGYVKPTRGVFYLINIPSLDQPVXXPSA

SEQ ID NO: 83546 - protein, 27 aa, Artificial Sequence
  Cyclic GFR-binding peptide
  MOD_RES (1), (1): Xaa is C or S
XSEVTMNRYKKLVVNKNEDFYLISIAN

SEQ ID NO: 83547 - protein, 37 aa, Artificial Sequence; identical to SEQ ID NO: 31858
  Cyclic GFR-binding peptide
  MOD_RES (1), (3), (35), (36): Xaa is C or S

SEQ ID NO: 83548 - protein, 32 aa, Artificial Sequence
  Cyclic GFR-binding peptide
  MOD_RES (27), (28): Xaa is C or S
MPIKGYVKPTRGVFYLINIPSLDQPVXXPSAS

SEQ ID NO: 83549 - protein, 37 aa, Artificial Sequence; identical to SEQ ID NO: 31859
  Cyclic GFR-binding peptide
  MOD_RES (2), (33), (34): Xaa is C or S

SEQ ID NO: 83550 - protein, 23 aa, Artificial Sequence
  Cyclic GFR-binding peptide
MYHYKLLLVRGNDKYLMSIPSTK

SEQ ID NO: 83551 - protein, 35 aa, Artificial Sequence; identical to SEQ ID NO: 31861
  Cyclic GFR-binding peptide
  MOD_RES (31), (32): Xaa is C or S

SEQ ID NO: 83552 - protein, 32 aa, Artificial Sequence; identical to SEQ ID NO: 31862
  Cyclic GFR-binding peptide
  MOD_RES (2), (2): Xaa is C or S

SEQ ID NO: 83553 - protein, 33 aa, Artificial Sequence
  Cyclic GFR-binding peptide
  MOD_RES (28), (29): Xaa is C or S
IMYHYKLLLVRGNDKYLMSIPSTKVPAXXTSPV

SEQ ID NO: 83554 - protein, 34 aa, Artificial Sequence
  Cyclic GFR-binding peptide
  MOD_RES (28), (29): Xaa is C or S
IMPIKGYIKPTKGIFYLINIPSLDQSVXXPSASA

SEQ ID NO: 83555 - protein, 33 aa, Artificial Sequence; identical to SEQ ID NO: 31866
  Cyclic GFR-binding peptide
  MOD_RES (31), (32): Xaa is C or S

SEQ ID NO: 83556 - protein, 39 aa, Artificial Sequence; identical to SEQ ID NO: 31867
  Cyclic GFR-binding peptide
  MOD_RES (2), (4), (36), (37): Xaa is C or S

SEQ ID NO: 83557 - protein, 27 aa, Artificial Sequence
  Cyclic GFR-binding peptide
MNRHKRLVVNKNEDYYLISTASMKEPV

SEQ ID NO: 83558 - protein, 36 aa, Artificial Sequence; identical to SEQ ID NO: 31868
  Cyclic GFR-binding peptide
  MOD_RES (2), (34), (35): Xaa is C or S

SEQ ID NO: 83559 - protein, 34 aa, Artificial Sequence
  Cyclic GFR-binding peptide
  MOD_RES (29), (30): Xaa is C or S
VIMEYKFKLLVRGNDLYLMSIPETKVPAXXTSPV

SEQ ID NO: 83560 - protein, 35 aa, Artificial Sequence; identical to SEQ ID NO: 31869
  Cyclic GFR-binding peptide
  MOD_RES (1), (32), (33): Xaa is C or S

SEQ ID NO: 83561 - protein, 29 aa, Artificial Sequence
  Cyclic GFR-binding peptide
EVIMRHKRLLLVRGNDYYLMSTASTKVPA

SEQ ID NO: 83562 - protein, 33 aa, Artificial Sequence
  Cyclic GFR-binding peptide
  MOD_RES (27), (28): Xaa is C or S
NRHKRLVVNKNEDYYLISTASMKEPVXXPEPIG

SEQ ID NO: 83563 - protein, 29 aa, Artificial Sequence
  Cyclic GFR-binding peptide
  MOD_RES (1), (3): Xaa is C or S
XGXSEVVMDRHKRLVVNNASDYYLISTAS

SEQ ID NO: 83564 - protein, 24 aa, Artificial Sequence
  Cyclic GFR-binding peptide
VIMEYKFKLLVRGNDLYLMSIPET

SEQ ID NO: 83565 - protein, 35 aa, Artificial Sequence; identical to SEQ ID NO: 31874
  Cyclic GFR-binding peptide
  MOD_RES (31), (32): Xaa is C or S

SEQ ID NO: 83566 - protein, 40 aa, Artificial Sequence; identical to SEQ ID NO: 31875
  Cyclic GFR-binding peptide
  MOD_RES (1), (3), (34), (35): Xaa is C or S

SEQ ID NO: 83567 - protein, 32 aa, Artificial Sequence
  Cyclic GFR-binding peptide
  MOD_RES (29), (30): Xaa is C or S
VMDRHKRLVVNNAADYYLISTASLRAPVXXSA

SEQ ID NO: 83568 - protein, 27 aa, Artificial Sequence
  Cyclic GFR-binding peptide
  MOD_RES (1), (1): Xaa is C or S
XAEVVMDRHKRLVVNNAADYYLISTAS

SEQ ID NO: 83569 - protein, 36 aa, Artificial Sequence
  Cyclic GFR-binding peptide
  MOD_RES (30), (31): Xaa is C or S
VTMNRHKRLVVNKNEDYYLISTASMKEPVXXPEPIG

SEQ ID NO: 83570 - protein, 33 aa, Artificial Sequence
  Cyclic GFR-binding peptide
  MOD_RES (27), (28): Xaa is C or S
DRHKRLVVNNASDYYLISTASLRTPVXXTPPTS

SEQ ID NO: 83571 - protein, 40 aa, Artificial Sequence; identical to SEQ ID NO: 31878
  Cyclic GFR-binding peptide
  MOD_RES (1), (3), (34), (35): Xaa is C or S

SEQ ID NO: 83572 - protein, 23 aa, Artificial Sequence
  Cyclic GFR-binding peptide
PIKGYVVNKNEDFYLINIPSMKE

SEQ ID NO: 83573 - protein, 31 aa, Artificial Sequence
  Cyclic GFR-binding peptide
  MOD_RES (2), (2): Xaa is C or S
KXSKVIMPIKGYIKPTKGIFYLINIPSLDQS

SEQ ID NO: 83574 - protein, 31 aa, Artificial Sequence
  Cyclic GFR-binding peptide
  MOD_RES (27), (28): Xaa is C or S
MPIKGYVKPTRGVFYLINIPSLDQPVXXPSA

SEQ ID NO: 83575 - protein, 34 aa, Artificial Sequence; identical to SEQ ID NO: 31885
  Cyclic GFR-binding peptide
  MOD_RES (31), (32): Xaa is C or S

SEQ ID NO: 83576 - protein, 34 aa, Artificial Sequence; identical to SEQ ID NO: 31886
  Cyclic GFR-binding peptide
  MOD_RES (2), (34): Xaa is C or S

SEQ ID NO: 83577 - protein, 36 aa, Artificial Sequence
  Cyclic GFR-binding peptide
  MOD_RES (30), (31): Xaa is C or S
VVMNEYKFKIVNSSDDLYLVSIPELKTPAXXPKPVH

SEQ ID NO: 83578 - protein, 28 aa, Artificial Sequence
  Cyclic GFR-binding peptide
  MOD_RES (27), (28): Xaa is C or S
NYHYKLVVNKNEDKYLISIPSMKEPVXX

SEQ ID NO: 83579 - protein, 30 aa, Artificial Sequence
  Cyclic GFR-binding peptide
  MOD_RES (29), (30): Xaa is C or S
TMNYHYKLVVNKNEDKYLISIPSMKEPVXX

SEQ ID NO: 83580 - protein, 30 aa, Artificial Sequence
  Cyclic GFR-binding peptide
  MOD_RES (2), (2): Xaa is C or S
GXRDVVMGYHYKLIIQQKDNKYLMSIPSMK

SEQ ID NO: 83581 - protein, 27 aa, Artificial Sequence
  Cyclic GFR-binding peptide
EVTMNYHYKLVVNKNEDKYLISIPSMK

SEQ ID NO: 83582 - protein, 32 aa, Artificial Sequence
  Cyclic GFR-binding peptide
  MOD_RES (26), (27): Xaa is C or S
RHKRLLLVRGNDYYLMSTASTKVPAXXTSPVR

SEQ ID NO: 83583 - protein, 33 aa, Artificial Sequence; identical to SEQ ID NO: 31891
  Cyclic GFR-binding peptide
  MOD_RES (32), (33): Xaa is C or S

SEQ ID NO: 83584 - protein, 28 aa, Artificial Sequence
  Cyclic GFR-binding peptide
  MOD_RES (2), (2): Xaa is C or S
GXEEVIMEYKFKLLVRGNDLYLMSIPET

SEQ ID NO: 83585 - protein, 34 aa, Artificial Sequence; identical to SEQ ID NO: 31893
  Cyclic GFR-binding peptide
  MOD_RES (2), (34): Xaa is C or S

SEQ ID NO: 83586 - protein, 26 aa, Artificial Sequence
  Cyclic GFR-binding peptide
AMGRHKRLYTVVGKDYYLISTASLKT

SEQ ID NO: 83587 - protein, 37 aa, Artificial Sequence; identical to SEQ ID NO: 31896
  Cyclic GFR-binding peptide
  MOD_RES (2), (4), (36), (37): Xaa is C or S

SEQ ID NO: 83588 - protein, 36 aa, Artificial Sequence; identical to SEQ ID NO: 31897
  Cyclic GFR-binding peptide
  MOD_RES (1), (33), (34): Xaa is C or S

SEQ ID NO: 83589 - protein, 34 aa, Artificial Sequence
  Cyclic GFR-binding peptide
  MOD_RES (29), (30): Xaa is C or S
TMNEYKFKVVNKNEDLYLISIPEMKEPVXXPEPI

SEQ ID NO: 83590 - protein, 31 aa, Artificial Sequence
  Cyclic GFR-binding peptide
  MOD_RES (1), (3): Xaa is C or S
XGXEEVIMEYKFKLLVRGNDLYLMSIPETKV

SEQ ID NO: 83591 - protein, 21 aa, Artificial Sequence
  Cyclic GFR-binding peptide
PIKGYVKPTRGVFYLINIPSL

SEQ ID NO: 83592 - protein, 35 aa, Artificial Sequence; identical to SEQ ID NO: 31899
  Cyclic GFR-binding peptide
  MOD_RES (2), (34), (35): Xaa is C or S

SEQ ID NO: 83593 - protein, 31 aa, Artificial Sequence
  Cyclic GFR-binding peptide
  MOD_RES (29), (30): Xaa is C or S
TMNEYKFKVVNKNEDLYLISIPEMKEPVXXP

SEQ ID NO: 83594 - protein, 34 aa, Artificial Sequence
  Cyclic GFR-binding peptide
  MOD_RES (29), (30): Xaa is C or S
VIMRHKRLLLVRGNDYYLMSTASTKVPAXXTSPV

SEQ ID NO: 83595 - protein, 25 aa, Artificial Sequence
  Cyclic GFR-binding peptide
MEYKFKLLVRGNDLYLMSIPETKVP

SEQ ID NO: 83596 - protein, 32 aa, Artificial Sequence
  Cyclic GFR-binding peptide
  MOD_RES (2), (2): Xaa is C or S
AXSEVTMNPIKGYVVNKNEDFYLINIPSMKEP

SEQ ID NO: 83597 - protein, 41 aa, Artificial Sequence; identical to SEQ ID NO: 31900
  Cyclic GFR-binding peptide
  MOD_RES (2), (4), (35), (36): Xaa is C or S

SEQ ID NO: 83598 - protein, 22 aa, Artificial Sequence
  Cyclic GFR-binding peptide
RYKKLVVNKNEDFYLISIANMK

SEQ ID NO: 83599 - protein, 26 aa, Artificial Sequence
  Cyclic GFR-binding peptide
IMPIKGYVKPKRGVFYLINIPSLAQP

SEQ ID NO: 83600 - protein, 21 aa, Artificial Sequence
  Cyclic GFR-binding peptide
GEYKFKIIQQKDNLYLMSIPE

SEQ ID NO: 83601 - protein, 25 aa, Artificial Sequence
  Cyclic GFR-binding peptide
VIMRHKRLLLVRGNDYYLMSTASTK

SEQ ID NO: 83602 - protein, 33 aa, Artificial Sequence; identical to SEQ ID NO: 31904
  Cyclic GFR-binding peptide
  MOD_RES (31), (32): Xaa is C or S

SEQ ID NO: 83603 - protein, 35 aa, Artificial Sequence
  Cyclic GFR-binding peptide
  MOD_RES (29), (30): Xaa is C or S
TMNRHKRLVVNKNEDYYLISTASMKEPVXXPEPIG

SEQ ID NO: 83604 - protein, 28 aa, Artificial Sequence
  Cyclic GFR-binding peptide
  MOD_RES (1), (1): Xaa is C or S
XSKVIMPIKGYIKPTKGIFYLINIPSLD

SEQ ID NO: 83605 - protein, 32 aa, Artificial Sequence
  Cyclic GFR-binding peptide
  MOD_RES (30), (31): Xaa is C or S
VVMGRHKRLIIQQKDNYYLMSTASMKTPTXXP

SEQ ID NO: 83606 - protein, 33 aa, Artificial Sequence
  Cyclic GFR-binding peptide
  MOD_RES (29), (30): Xaa is C or S
TMNPIKGYVVNKNEDFYLINIPSMKEPVXXPEP

SEQ ID NO: 83607 - protein, 25 aa, Artificial Sequence
  Cyclic GFR-binding peptide
RVIMPIKGYVKPKRGVFYLINIPSL

SEQ ID NO: 83608 - protein, 28 aa, Artificial Sequence
  Cyclic GFR-binding peptide
  MOD_RES (26), (27): Xaa is C or S
PIKGYVVNKNEDFYLINIPSMKEPVXXP

SEQ ID NO: 83609 - protein, 31 aa, Artificial Sequence
  Cyclic GFR-binding peptide
  MOD_RES (28), (29): Xaa is C or S
MGEYKFKIIQQKDNLYLMSIPEMKTPTXXPG

SEQ ID NO: 83610 - protein, 33 aa, Artificial Sequence
  Cyclic GFR-binding peptide
  MOD_RES (28), (29): Xaa is C or S
MNRYKKLVVNKNEDFYLISIANMKEPVXXPEPI

SEQ ID NO: 83611 - protein, 40 aa, Artificial Sequence; identical to SEQ ID NO: 31907
  Cyclic GFR-binding peptide
  MOD_RES (2), (4), (36), (37): Xaa is C or S

SEQ ID NO: 83612 - protein, 28 aa, Artificial Sequence
  Cyclic GFR-binding peptide
EVTMNRYKKLVVNKNEDFYLISIANMKE

SEQ ID NO: 83613 - protein, 29 aa, Artificial Sequence
  Cyclic GFR-binding peptide
  MOD_RES (2), (2): Xaa is C or S
KXSKVVMPIKGYVKPTRGVFYLINIPSLD

SEQ ID NO: 83614 - protein, 30 aa, Artificial Sequence
  Cyclic GFR-binding peptide
  MOD_RES (2), (2): Xaa is C or S
KXSKVIMPIKGYIKPTKGIFYLINIPSLDQ

SEQ ID NO: 83615 - protein, 24 aa, Artificial Sequence
  Cyclic GFR-binding peptide
MYHYKLLLVRGNDKYLMSIPSTKV

SEQ ID NO: 83616 - protein, 39 aa, Artificial Sequence; identical to SEQ ID NO: 31911
  Cyclic GFR-binding peptide
  MOD_RES (2), (4), (36), (37): Xaa is C or S

SEQ ID NO: 83617 - protein, 32 aa, Artificial Sequence
  Cyclic GFR-binding peptide
  MOD_RES (26), (27): Xaa is C or S
YHYKLVVNKNEDKYLISIPSMKEPVXXPEPIG

SEQ ID NO: 83618 - protein, 36 aa, Artificial Sequence; identical to SEQ ID NO: 31912
  Cyclic GFR-binding peptide
  MOD_RES (1), (3), (34), (35): Xaa is C or S

SEQ ID NO: 83619 - protein, 29 aa, Artificial Sequence
  Cyclic GFR-binding peptide
AAAAAAAAAEYKFKLLVRGNDLYLMSIPE

SEQ ID NO: 83620 - protein, 26 aa, Artificial Sequence
  Cyclic GFR-binding peptide
  MOD_RES (26), (26): Xaa is C or S
YHYKLLLVRGNDKYLMSIPSTKVPAX

SEQ ID NO: 83621 - protein, 28 aa, Artificial Sequence
  Cyclic GFR-binding peptide
EEVIMEYKFKLLVRGNDLYLMSIPETKV

SEQ ID NO: 83622 - protein, 28 aa, Artificial Sequence
  Cyclic GFR-binding peptide
  MOD_RES (27), (28): Xaa is C or S
NEYKFKVVNKNEDLYLISIPEMKEPVXX

SEQ ID NO: 83623 - protein, 30 aa, Artificial Sequence
  Cyclic GFR-binding peptide
  MOD_RES (1), (3): Xaa is C or S
XAXSEVTMNRYKKLVVNKNEDFYLISIANM

SEQ ID NO: 83624 - protein, 35 aa, Artificial Sequence; identical to SEQ ID NO: 31918
  Cyclic GFR-binding peptide
  MOD_RES (1), (3), (34), (35): Xaa is C or S

SEQ ID NO: 83625 - protein, 25 aa, Artificial Sequence
  Cyclic GFR-binding peptide
RHKRLVVNNASDYYLISTASLRTPV

SEQ ID NO: 83626 - protein, 29 aa, Artificial Sequence
  Cyclic GFR-binding peptide
KVVMPIKGYVKPTRGVFYLINIPSLDQPV

SEQ ID NO: 83627 - protein, 25 aa, Artificial Sequence
  Cyclic GFR-binding peptide
EVVMDEYKFKVVNNASDLYLISIPE

SEQ ID NO: 83628 - protein, 32 aa, Artificial Sequence
  Cyclic GFR-binding peptide
  MOD_RES (26), (27): Xaa is C or S
EYKFKVVNKNEDLYLISIPEMKEPVXXPEPIG

SEQ ID NO: 83629 - protein, 25 aa, Artificial Sequence
  Cyclic GFR-binding peptide
MYHYKLLLVRGNDKYLMSIPSTKVP

SEQ ID NO: 83630 - protein, 30 aa, Artificial Sequence
  Cyclic GFR-binding peptide
  MOD_RES (30), (30): Xaa is C or S
EVIMEYKFKLLVRGNDLYLMSIPETKVPAX

SEQ ID NO: 83631 - protein, 23 aa, Artificial Sequence
  Cyclic GFR-binding peptide
MGEYKFKIIQQKDNLYLMSIPEM

SEQ ID NO: 83632 - protein, 25 aa, Artificial Sequence
  Cyclic GFR-binding peptide
IMEYKFKLLVRGNDLYLMSIPETKV

SEQ ID NO: 83633 - protein, 26 aa, Artificial Sequence
  Cyclic GFR-binding peptide
  MOD_RES (1), (1): Xaa is C or S
XSRVIMPIKGYVKPKRGVFYLINIPS

SEQ ID NO: 83634 - protein, 29 aa, Artificial Sequence
  Cyclic GFR-binding peptide
  MOD_RES (28), (29): Xaa is C or S
MGRHKRLIIQQKDNYYLMSTASMKTPTXX

SEQ ID NO: 83635 - protein, 37 aa, Artificial Sequence; identical to SEQ ID NO: 31919
  Cyclic GFR-binding peptide
  MOD_RES (1), (3), (35), (36): Xaa is C or S

SEQ ID NO: 83636 - protein, 21 aa, Artificial Sequence
  Cyclic GFR-binding peptide
GYHYKLIIQQKDNKYLMSIPS

SEQ ID NO: 83637 - protein, 23 aa, Artificial Sequence
  Cyclic GFR-binding peptide
IMPIKGYVKPKRGVFYLINIPSL

SEQ ID NO: 83638 - protein, 36 aa, Artificial Sequence; identical to SEQ ID NO: 31920
  Cyclic GFR-binding peptide
  MOD_RES (2), (33), (34): Xaa is C or S

SEQ ID NO: 83639 - protein, 36 aa, Artificial Sequence; identical to SEQ ID NO: 31921
  Cyclic GFR-binding peptide
  MOD_RES (32), (33): Xaa is C or S

SEQ ID NO: 83640 - protein, 37 aa, Artificial Sequence; identical to SEQ ID NO: 31922
  Cyclic GFR-binding peptide
  MOD_RES (1), (33), (34): Xaa is C or S

SEQ ID NO: 83641 - protein, 26 aa, Artificial Sequence
  Cyclic GFR-binding peptide
MDYHYKLVVNNASDKYLISIPSLRTP

SEQ ID NO: 83642 - protein, 25 aa, Artificial Sequence
  Cyclic GFR-binding peptide
VTMNRYKKLVVNKNEDFYLISIANM

SEQ ID NO: 83643 - protein, 33 aa, Artificial Sequence
  Cyclic GFR-binding peptide
  MOD_RES (30), (31): Xaa is C or S
VVMDRHKRLVVNNAADYYLISTASLRAPVXXSA

SEQ ID NO: 83644 - protein, 32 aa, Artificial Sequence; identical to SEQ ID NO: 31923
  Cyclic GFR-binding peptide
  MOD_RES (31), (32): Xaa is C or S

SEQ ID NO: 83645 - protein, 32 aa, Artificial Sequence
  Cyclic GFR-binding peptide
  MOD_RES (1), (3): Xaa is C or S
XGXSEVVMDEYKFKVVNNASDLYLISIPELRT

SEQ ID NO: 83646 - protein, 28 aa, Artificial Sequence
  Cyclic GFR-binding peptide
EVTMNRHKRLVVNKNEDYYLISTASMKE

SEQ ID NO: 83647 - protein, 32 aa, Artificial Sequence
  Cyclic GFR-binding peptide
  MOD_RES (30), (31): Xaa is C or S
VTMNPIKGYVVNKNEDFYLINIPSMKEPVXXP

SEQ ID NO: 83648 - protein, 34 aa, Artificial Sequence
  Cyclic GFR-binding peptide
  MOD_RES (28), (29): Xaa is C or S
MNYHYKLIVNSSDDKYLVSIPSLKTPAXXPKPVH

SEQ ID NO: 83649 - protein, 26 aa, Artificial Sequence
  Cyclic GFR-binding peptide
VTMNYHYKLVVNKNEDKYLISIPSMK

SEQ ID NO: 83650 - protein, 36 aa, Artificial Sequence; identical to SEQ ID NO: 31924
  Cyclic GFR-binding peptide
  MOD_RES (31), (32): Xaa is C or S

SEQ ID NO: 83651 - protein, 33 aa, Artificial Sequence
  Cyclic GFR-binding peptide
  MOD_RES (2), (4): Xaa is C or S
LXGXEEVIMYHYKLLLVRGNDKYLMSIPSTKVP

SEQ ID NO: 83652 - protein, 36 aa, Artificial Sequence; identical to SEQ ID NO: 31927
  Cyclic GFR-binding peptide
  MOD_RES (2), (33), (34): Xaa is C or S

SEQ ID NO: 83653 - protein, 32 aa, Artificial Sequence
  Cyclic GFR-binding peptide
  MOD_RES (2), (2): Xaa is C or S
GXESVAMGRHKRLYTVVGKDYYLISTASLKTP

SEQ ID NO: 83654 - protein, 31 aa, Artificial Sequence
  Cyclic GFR-binding peptide
  MOD_RES (29), (30): Xaa is C or S
VMDRHKRLVVNNASDYYLISTASLRTPVXXT

SEQ ID NO: 83655 - protein, 28 aa, Artificial Sequence
  Cyclic GFR-binding peptide
  MOD_RES (1), (1): Xaa is C or S
XRDVVMGRHKRLIIQQKDNYYLMSTASM

SEQ ID NO: 83656 - protein, 27 aa, Artificial Sequence
  Cyclic GFR-binding peptide
VVMPIKGYVKPTRGVFYLINIPSLDQP

SEQ ID NO: 83657 - protein, 31 aa, Artificial Sequence
  Cyclic GFR-binding peptide
  MOD_RES (1), (1): Xaa is C or S
XSEVVMDRHKRLVVNNASDYYLISTASLRTP

SEQ ID NO: 83658 - protein, 27 aa, Artificial Sequence
  Cyclic GFR-binding peptide
  MOD_RES (1), (1): Xaa is C or S
XSEVVMDEYKFKVVNNASDLYLISIPE

SEQ ID NO: 83659 - protein, 32 aa, Artificial Sequence
  Cyclic GFR-binding peptide
  MOD_RES (27), (28): Xaa is C or S
MPIKGYIKPTKGIFYLINIPSLDQSVXXPSAS

SEQ ID NO: 83660 - protein, 30 aa, Artificial Sequence
  Cyclic GFR-binding peptide
RDVVMGYHYKLIIQQKDNKYLMSIPSMKTP

SEQ ID NO: 83661 - protein, 29 aa, Artificial Sequence
  Cyclic GFR-binding peptide
  MOD_RES (1), (3): Xaa is C or S
XKXSKVVMPIKGYVKPTRGVFYLINIPSL

SEQ ID NO: 83662 - protein, 30 aa, Artificial Sequence
  Cyclic GFR-binding peptide
  MOD_RES (29), (30): Xaa is C or S
AMGRHKRLYTVVGKDYYLISTASLKTPVXX

SEQ ID NO: 83663 - protein, 36 aa, Artificial Sequence; identical to SEQ ID NO: 31929
  Cyclic GFR-binding peptide
  MOD_RES (1), (33), (34): Xaa is C or S

SEQ ID NO: 83664 - protein, 40 aa, Artificial Sequence; identical to SEQ ID NO: 31930
  Cyclic GFR-binding peptide
  MOD_RES (2), (4), (36), (37): Xaa is C or S

SEQ ID NO: 83665 - protein, 28 aa, Artificial Sequence
  Cyclic GFR-binding peptide
EVVMDRHKRLVVNNASDYYLISTASLRT

SEQ ID NO: 83666 - protein, 29 aa, Artificial Sequence
  Cyclic GFR-binding peptide
RDVVMGEYKFKIIQQKDNLYLMSIPEMKT

SEQ ID NO: 83667 - protein, 29 aa, Artificial Sequence
  Cyclic GFR-binding peptide
  MOD_RES (1), (1): Xaa is C or S
XEEVIMEYKFKLLVRGNDLYLMSIPETKV

SEQ ID NO: 83668 - protein, 37 aa, Artificial Sequence; identical to SEQ ID NO: 31932
  Cyclic GFR-binding peptide
  MOD_RES (1), (3), (35), (36): Xaa is C or S

SEQ ID NO: 83669 - protein, 27 aa, Artificial Sequence
  Cyclic GFR-binding peptide
RDVVMGRHKRLIIQQKDNYYLMSTASM

SEQ ID NO: 83670 - protein, 35 aa, Artificial Sequence
  Cyclic GFR-binding peptide
  MOD_RES (30), (31): Xaa is C or S
EVIMYHYKLLLVRGNDKYLMSIPSTKVPAXXTSPV

SEQ ID NO: 83671 - protein, 33 aa, Artificial Sequence
  Cyclic GFR-binding peptide
  MOD_RES (2), (4): Xaa is C or S
RXGXSEVVMDRHKRLVVNNASDYYLISTASLRT

SEQ ID NO: 83672 - protein, 29 aa, Artificial Sequence
  Cyclic GFR-binding peptide
RDVVMGRHKRLIIQQKDNYYLMSTASMKT

SEQ ID NO: 83673 - protein, 41 aa, Artificial Sequence; identical to SEQ ID NO: 31935
  Cyclic GFR-binding peptide
  MOD_RES (1), (3), (35), (36): Xaa is C or S

SEQ ID NO: 83674 - protein, 26 aa, Artificial Sequence
  Cyclic GFR-binding peptide
KVIMPIKGYIKPTKGIFYLINIPSLD

SEQ ID NO: 83675 - protein, 35 aa, Artificial Sequence; identical to SEQ ID NO: 31936
  Cyclic GFR-binding peptide
  MOD_RES (2), (4): Xaa is C or S

SEQ ID NO: 83676 - protein, 37 aa, Artificial Sequence; identical to SEQ ID NO: 31937
  Cyclic GFR-binding peptide
  MOD_RES (2), (4), (36), (37): Xaa is C or S

SEQ ID NO: 83677 - protein, 32 aa, Artificial Sequence
  Cyclic GFR-binding peptide
  MOD_RES (28), (29): Xaa is C or S
MNRYKKLVVNKNEDFYLISIANMKEPVXXPEP

SEQ ID NO: 83678 - protein, 35 aa, Artificial Sequence
  Cyclic GFR-binding peptide
  MOD_RES (29), (30): Xaa is C or S
TMNEYKFKVVNKNEDLYLISIPEMKEPVXXPEPIG

SEQ ID NO: 83679 - protein, 31 aa, Artificial Sequence
  Cyclic GFR-binding peptide
  MOD_RES (29), (30): Xaa is C or S
TMNRHKRLVVNKNEDYYLISTASMKEPVXXP

SEQ ID NO: 83680 - protein, 25 aa, Artificial Sequence
  Cyclic GFR-binding peptide
TMNPIKGYVVNKNEDFYLINIPSMK

SEQ ID NO: 83681 - protein, 28 aa, Artificial Sequence
  Cyclic GFR-binding peptide
  MOD_RES (2), (2): Xaa is C or S
GXAEVVMDRHKRLVVNNAADYYLISTAS

SEQ ID NO: 83682 - protein, 37 aa, Artificial Sequence; identical to SEQ ID NO: 31939
  Cyclic GFR-binding peptide
  MOD_RES (1), (33), (34): Xaa is C or S

SEQ ID NO: 83683 - protein, 24 aa, Artificial Sequence
  Cyclic GFR-binding peptide
MEYKFKLLVRGNDLYLMSIPETKV

SEQ ID NO: 83684 - protein, 31 aa, Artificial Sequence
  Cyclic GFR-binding peptide
  MOD_RES (1), (1): Xaa is C or S
XSEVTMNPIKGYVVNKNEDFYLINIPSMKEP

SEQ ID NO: 83685 - protein, 31 aa, Artificial Sequence
  Cyclic GFR-binding peptide
  MOD_RES (28), (29): Xaa is C or S
IMYHYKLLLVRGNDKYLMSIPSTKVPAXXTS

SEQ ID NO: 83686 - protein, 35 aa, Artificial Sequence; identical to SEQ ID NO: 31942
  Cyclic GFR-binding peptide
  MOD_RES (1), (33), (34): Xaa is C or S

SEQ ID NO: 83687 - protein, 36 aa, Artificial Sequence; identical to SEQ ID NO: 31943
  Cyclic GFR-binding peptide
  MOD_RES (32), (33): Xaa is C or S

SEQ ID NO: 83688 - protein, 41 aa, Artificial Sequence; identical to SEQ ID NO: 31944
  Cyclic GFR-binding peptide
  MOD_RES (1), (3), (35), (36): Xaa is C or S

SEQ ID NO: 83689 - protein, 21 aa, Artificial Sequence
  Cyclic GFR-binding peptide
MPIKGYIKPTKGIFYLINIPS

SEQ ID NO: 83690 - protein, 27 aa, Artificial Sequence
  Cyclic GFR-binding peptide
  MOD_RES (27), (27): Xaa is C or S
DYHYKLVVNNASDKYLISIPSLRTPVX

SEQ ID NO: 83691 - protein, 33 aa, Artificial Sequence
  Cyclic GFR-binding peptide
  MOD_RES (30), (31): Xaa is C or S
KVIMPIKGYIKPTKGIFYLINIPSLDQSVXXPS

SEQ ID NO: 83692 - protein, 34 aa, Artificial Sequence
  Cyclic GFR-binding peptide
  MOD_RES (29), (30): Xaa is C or S
TMNRHKRLVVNKNEDYYLISTASMKEPVXXPEPI

SEQ ID NO: 83693 - protein, 30 aa, Artificial Sequence
  Cyclic GFR-binding peptide
  MOD_RES (27), (28): Xaa is C or S
MPIKGYVKPKRGVFYLINIPSLAQPVXXPA

SEQ ID NO: 83694 - protein, 32 aa, Artificial Sequence; identical to SEQ ID NO: 31947
  Cyclic GFR-binding peptide
  MOD_RES (1), (1): Xaa is C or S

SEQ ID NO: 83695 - protein, 33 aa, Artificial Sequence
  Cyclic GFR-binding peptide
  MOD_RES (30), (31): Xaa is C or S
VVMDYHYKLVVNNASDKYLISIPSLRTPVXXTP

SEQ ID NO: 83696 - protein, 36 aa, Artificial Sequence; identical to SEQ ID NO: 31948
  Cyclic GFR-binding peptide
  MOD_RES (1), (3), (35), (36): Xaa is C or S

SEQ ID NO: 83697 - protein, 34 aa, Artificial Sequence
  Cyclic GFR-binding peptide
  MOD_RES (29), (30): Xaa is C or S
VMDRHKRLVVNNAADYYLISTASLRAPVXXSAPA

SEQ ID NO: 83698 - protein, 27 aa, Artificial Sequence
  Cyclic GFR-binding peptide
SVAMGRHKRLYTVVGKDYYLISTASLK

SEQ ID NO: 83699 - protein, 31 aa, Artificial Sequence
  Cyclic GFR-binding peptide
  MOD_RES (28), (29): Xaa is C or S
MDEYKFKVVNNASDLYLISIPELRTPVXXTP

SEQ ID NO: 83700 - protein, 28 aa, Artificial Sequence
  Cyclic GFR-binding peptide
  MOD_RES (28), (28): Xaa is C or S
MNRYKKLVVNKNEDFYLISIANMKEPVX

SEQ ID NO: 83701 - protein, 37 aa, Artificial Sequence; identical to SEQ ID NO: 31952
  Cyclic GFR-binding peptide
  MOD_RES (31), (32): Xaa is C or S

SEQ ID NO: 83702 - protein, 35 aa, Artificial Sequence; identical to SEQ ID NO: 31954
  Cyclic GFR-binding peptide
  MOD_RES (1), (3), (34), (35): Xaa is C or S

SEQ ID NO: 83703 - protein, 39 aa, Artificial Sequence; identical to SEQ ID NO: 31955
  Cyclic GFR-binding peptide
  MOD_RES (2), (4), (35), (36): Xaa is C or S

SEQ ID NO: 83704 - protein, 32 aa, Artificial Sequence
  Cyclic GFR-binding peptide
  MOD_RES (1), (3): Xaa is C or S
XAXSEVTMNEYKFKVVNKNEDLYLISIPEMKE

SEQ ID NO: 83705 - protein, 29 aa, Artificial Sequence
  Cyclic GFR-binding peptide
  MOD_RES (26), (27): Xaa is C or S
EYKFKVVNNASDLYLISIPELRTPVXXTP

SEQ ID NO: 83706 - protein, 32 aa, Artificial Sequence
  Cyclic GFR-binding peptide
  MOD_RES (2), (2): Xaa is C or S
AXSEVTMNRYKKLVVNKNEDFYLISIANMKEP

SEQ ID NO: 83707 - protein, 28 aa, Artificial Sequence
  Cyclic GFR-binding peptide
SEVTMNRYKKLVVNKNEDFYLISIANMK

SEQ ID NO: 83708 - protein, 36 aa, Artificial Sequence
  Cyclic GFR-binding peptide
  MOD_RES (30), (31): Xaa is C or S
KVIMPIKGYIKPTKGIFYLINIPSLDQSVXXPSASA

SEQ ID NO: 83709 - protein, 25 aa, Artificial Sequence
  Cyclic GFR-binding peptide
VAMGRHKRLYTVVGKDYYLISTASL

SEQ ID NO: 83710 - protein, 36 aa, Artificial Sequence
  Cyclic GFR-binding peptide
  MOD_RES (30), (31): Xaa is C or S
VVMNRHKRLIVNSSDDYYLVSTASLKTPAXXPKPVH

SEQ ID NO: 83711 - protein, 32 aa, Artificial Sequence
  Cyclic GFR-binding peptide
  MOD_RES (1), (3): Xaa is C or S
XGXSEVVMDYHYKLVVNNASDKYLISIPSLRT

SEQ ID NO: 83712 - protein, 40 aa, Artificial Sequence; identical to SEQ ID NO: 31960
  Cyclic GFR-binding peptide
  MOD_RES (2), (34), (35): Xaa is C or S

SEQ ID NO: 83713 - protein, 30 aa, Artificial Sequence
  Cyclic GFR-binding peptide
  MOD_RES (1), (3): Xaa is C or S
XKXSKVIMPIKGYIKPTKGIFYLINIPSLD

SEQ ID NO: 83714 - protein, 34 aa, Artificial Sequence
  Cyclic GFR-binding peptide
  MOD_RES (28), (29): Xaa is C or S
MDYHYKLVVNNASDKYLISIPSLRTPVXXTPPTS

SEQ ID NO: 83715 - protein, 32 aa, Artificial Sequence
  Cyclic GFR-binding peptide
  MOD_RES (29), (30): Xaa is C or S
VIMPIKGYIKPTKGIFYLINIPSLDQSVXXPS

SEQ ID NO: 83716 - protein, 31 aa, Artificial Sequence
  Cyclic GFR-binding peptide
  MOD_RES (2), (4): Xaa is C or S
SXGXRDVVMGYHYKLIIQQKDNKYLMSIPSM

SEQ ID NO: 83717 - protein, 30 aa, Artificial Sequence
  Cyclic GFR-binding peptide
  MOD_RES (28), (29): Xaa is C or S
IMYHYKLLLVRGNDKYLMSIPSTKVPAXXT

SEQ ID NO: 83718 - protein, 29 aa, Artificial Sequence
  Cyclic GFR-binding peptide
  MOD_RES (26), (27): Xaa is C or S
YHYKLVVNNASDKYLISIPSLRTPVXXTP

SEQ ID NO: 83719 - protein, 42 aa, Artificial Sequence; identical to SEQ ID NO: 31965
  Cyclic GFR-binding peptide
  MOD_RES (2), (4), (36), (37): Xaa is C or S

SEQ ID NO: 83720 - protein, 35 aa, Artificial Sequence; identical to SEQ ID NO: 31968
  Cyclic GFR-binding peptide
  MOD_RES (1), (3), (34), (35): Xaa is C or S

SEQ ID NO: 83721 - protein, 33 aa, Artificial Sequence; identical to SEQ ID NO: 31969
  Cyclic GFR-binding peptide
  MOD_RES (31), (32): Xaa is C or S

SEQ ID NO: 83722 - protein, 25 aa, Artificial Sequence
  Cyclic GFR-binding peptide
EVVMDYHYKLVVNNASDKYLISIPS

SEQ ID NO: 83723 - protein, 31 aa, Artificial Sequence
  Cyclic GFR-binding peptide
  MOD_RES (1), (1): Xaa is C or S
XSEVVMDEYKFKVVNNASDLYLISIPELRTP

SEQ ID NO: 83724 - protein, 32 aa, Artificial Sequence
  Cyclic GFR-binding peptide
  MOD_RES (27), (28): Xaa is C or S
MYHYKLLLVRGNDKYLMSIPSTKVPAXXTSPV

SEQ ID NO: 83725 - protein, 29 aa, Artificial Sequence
  Cyclic GFR-binding peptide
  MOD_RES (1), (1): Xaa is C or S
XSEVTMNPIKGYVVNKNEDFYLINIPSMK

SEQ ID NO: 83726 - protein, 33 aa, Artificial Sequence
  Cyclic GFR-binding peptide
  MOD_RES (2), (4): Xaa is C or S
LXGXEEVIMEYKFKLLVRGNDLYLMSIPETKVP

SEQ ID NO: 83727 - protein, 26 aa, Artificial Sequence
  Cyclic GFR-binding peptide
  MOD_RES (1), (1): Xaa is C or S
XSKVVMPIKGYVKPTRGVFYLINIPS

SEQ ID NO: 83728 - protein, 28 aa, Artificial Sequence
  Cyclic GFR-binding peptide
EEVIMYHYKLLLVRGNDKYLMSIPSTKV

SEQ ID NO: 83729 - protein, 24 aa, Artificial Sequence
  Cyclic GFR-binding peptide
TMNRYKKLVVNKNEDFYLISIANM

SEQ ID NO: 83730 - protein, 32 aa, Artificial Sequence
  Cyclic GFR-binding peptide
  MOD_RES (27), (28): Xaa is C or S
DRHKRLVVNNASDYYLISTASLRTPVXXTPPT

SEQ ID NO: 83731 - protein, 28 aa, Artificial Sequence
  Cyclic GFR-binding peptide
  MOD_RES (1), (1): Xaa is C or S
XRDVVMGEYKFKIIQQKDNLYLMSIPEM

SEQ ID NO: 83732 - protein, 32 aa, Artificial Sequence
  Cyclic GFR-binding peptide
  MOD_RES (27), (28): Xaa is C or S
NRHKRLVVNKNEDYYLISTASMKEPVXXPEPI

SEQ ID NO: 83733 - protein, 35 aa, Artificial Sequence; identical to SEQ ID NO: 31983
  Cyclic GFR-binding peptide
  MOD_RES (2), (33), (34): Xaa is C or S

SEQ ID NO: 83734 - protein, 39 aa, Artificial Sequence; identical to SEQ ID NO: 31984
  Cyclic GFR-binding peptide
  MOD_RES (2), (4), (36), (37): Xaa is C or S

SEQ ID NO: 83735 - protein, 28 aa, Artificial Sequence
  Cyclic GFR-binding peptide
VMDRHKRLVVNNASDYYLISTASLRTPV

SEQ ID NO: 83736 - protein, 39 aa, Artificial Sequence; identical to SEQ ID NO: 31985
  Cyclic GFR-binding peptide
  MOD_RES (1), (33), (34): Xaa is C or S

SEQ ID NO: 83737 - protein, 40 aa, Artificial Sequence; identical to SEQ ID NO: 31986
  Cyclic GFR-binding peptide
  MOD_RES (2), (34), (35): Xaa is C or S

SEQ ID NO: 83738 - protein, 25 aa, Artificial Sequence
  Cyclic GFR-binding peptide
MNRHKRLVVNKNEDYYLISTASMKE

SEQ ID NO: 83739 - protein, 24 aa, Artificial Sequence
  Cyclic GFR-binding peptide
MNYHYKLVVNKNEDKYLISIPSMK

SEQ ID NO: 83740 - protein, 31 aa, Artificial Sequence
  Cyclic GFR-binding peptide
  MOD_RES (28), (29): Xaa is C or S
MDRHKRLVVNNASDYYLISTASLRTPVXXTP

SEQ ID NO: 83741 - protein, 25 aa, Artificial Sequence
  Cyclic GFR-binding peptide
MDYHYKLVVNNASDKYLISIPSLRT

SEQ ID NO: 83742 - protein, 36 aa, Artificial Sequence; identical to SEQ ID NO: 31988
  Cyclic GFR-binding peptide
  MOD_RES (1), (33), (34): Xaa is C or S

SEQ ID NO: 83743 - protein, 36 aa, Artificial Sequence; identical to SEQ ID NO: 31989
  Cyclic GFR-binding peptide
  MOD_RES (32), (33): Xaa is C or S

SEQ ID NO: 83744 - protein, 40 aa, Artificial Sequence; identical to SEQ ID NO: 31990
  Cyclic GFR-binding peptide
  MOD_RES (2), (4), (36), (37): Xaa is C or S

SEQ ID NO: 83745 - protein, 30 aa, Artificial Sequence
  Cyclic GFR-binding peptide
  MOD_RES (2), (2): Xaa is C or S
GXSEVVMDRHKRLVVNNASDYYLISTASLR

SEQ ID NO: 83746 - protein, 32 aa, Artificial Sequence; identical to SEQ ID NO: 31994
  Cyclic GFR-binding peptide
  MOD_RES (1), (32): Xaa is C or S

SEQ ID NO: 83747 - protein, 36 aa, Artificial Sequence; identical to SEQ ID NO: 31998
  Cyclic GFR-binding peptide
  MOD_RES (2), (34), (35): Xaa is C or S

SEQ ID NO: 83748 - protein, 38 aa, Artificial Sequence; identical to SEQ ID NO: 31999
  Cyclic GFR-binding peptide
  MOD_RES (2), (33), (34): Xaa is C or S

SEQ ID NO: 83749 - protein, 36 aa, Artificial Sequence; identical to SEQ ID NO: 32000
  Cyclic GFR-binding peptide
  MOD_RES (31), (32): Xaa is C or S

SEQ ID NO: 83750 - protein, 34 aa, Artificial Sequence; identical to SEQ ID NO: 32002
  Cyclic GFR-binding peptide
  MOD_RES (1), (3): Xaa is C or S

SEQ ID NO: 83751 - protein, 36 aa, Artificial Sequence; identical to SEQ ID NO: 32003
  Cyclic GFR-binding peptide
  MOD_RES (2), (34), (35): Xaa is C or S

SEQ ID NO: 83752 - protein, 32 aa, Artificial Sequence; identical to SEQ ID NO: 32004
  Cyclic GFR-binding peptide
  MOD_RES (31), (32): Xaa is C or S

SEQ ID NO: 83753 - protein, 29 aa, Artificial Sequence
  Cyclic GFR-binding peptide
  MOD_RES (27), (28): Xaa is C or S
NYHYKLVVNKNEDKYLISIPSMKEPVXXP

SEQ ID NO: 83754 - protein, 39 aa, Artificial Sequence; identical to SEQ ID NO: 32005
  Cyclic GFR-binding peptide
  MOD_RES (2), (34), (35): Xaa is C or S

SEQ ID NO: 83755 - protein, 33 aa, Artificial Sequence; identical to SEQ ID NO: 32006
  Cyclic GFR-binding peptide
  MOD_RES (31), (32): Xaa is C or S

SEQ ID NO: 83756 - protein, 36 aa, Artificial Sequence; identical to SEQ ID NO: 32007
  Cyclic GFR-binding peptide
  MOD_RES (31), (32): Xaa is C or S

SEQ ID NO: 83757 - protein, 33 aa, Artificial Sequence
  Cyclic GFR-binding peptide
  MOD_RES (27), (28): Xaa is C or S
DEYKFKVVNNASDLYLISIPELRTPVXXTPPTS

SEQ ID NO: 83758 - protein, 33 aa, Artificial Sequence; identical to SEQ ID NO: 32008
  Cyclic GFR-binding peptide
  MOD_RES (32), (33): Xaa is C or S

SEQ ID NO: 83759 - protein, 23 aa, Artificial Sequence
  Cyclic GFR-binding peptide
RHKRLYTVVGKDYYLISTASLKT

SEQ ID NO: 83760 - protein, 26 aa, Artificial Sequence
  Cyclic GFR-binding peptide
DEYKFKVVNNASDLYLISIPELRTPV

SEQ ID NO: 83761 - protein, 22 aa, Artificial Sequence
  Cyclic GFR-binding peptide
EYKFKVVNKNEDLYLISIPEMK

SEQ ID NO: 83762 - protein, 36 aa, Artificial Sequence; identical to SEQ ID NO: 32009
  Cyclic GFR-binding peptide
  MOD_RES (2), (4), (35), (36): Xaa is C or S

SEQ ID NO: 83763 - protein, 25 aa, Artificial Sequence
  Cyclic GFR-binding peptide
VIMPIKGYIKPTKGIFYLINIPSLD

SEQ ID NO: 83764 - protein, 27 aa, Artificial Sequence
  Cyclic GFR-binding peptide
AEVVMDRHKRLVVNNAADYYLISTASL

SEQ ID NO: 83765 - protein, 31 aa, Artificial Sequence
  Cyclic GFR-binding peptide
  MOD_RES (28), (29): Xaa is C or S
MNPIKGYVVNKNEDFYLINIPSMKEPVXXPE

SEQ ID NO: 83766 - protein, 27 aa, Artificial Sequence
  Cyclic GFR-binding peptide
  MOD_RES (26), (27): Xaa is C or S
YHYKLIIQQKDNKYLMSIPSMKTPTXX

SEQ ID NO: 83767 - protein, 27 aa, Artificial Sequence
  Cyclic GFR-binding peptide
  MOD_RES (27), (27): Xaa is C or S
GRHKRLIIQQKDNYYLMSTASMKTPTX

SEQ ID NO: 83768 - protein, 26 aa, Artificial Sequence
  Cyclic GFR-binding peptide
MPIKGYVKPTRGVFYLINIPSLDQPV

SEQ ID NO: 83769 - protein, 36 aa, Artificial Sequence; identical to SEQ ID NO: 32010
  Cyclic GFR-binding peptide
  MOD_RES (1), (3), (35), (36): Xaa is C or S

SEQ ID NO: 83770 - protein, 34 aa, Artificial Sequence; identical to SEQ ID NO: 32011
  Cyclic GFR-binding peptide
  MOD_RES (2), (33), (34): Xaa is C or S

SEQ ID NO: 83771 - protein, 29 aa, Artificial Sequence
  Cyclic GFR-binding peptide
  MOD_RES (27), (28): Xaa is C or S
MPIKGYVKPTRGVFYLINIPSLDQPVXXP

SEQ ID NO: 83772 - protein, 34 aa, Artificial Sequence; identical to SEQ ID NO: 32012
  Cyclic GFR-binding peptide
  MOD_RES (32), (33): Xaa is C or S

SEQ ID NO: 83773 - protein, 34 aa, Artificial Sequence; identical to SEQ ID NO: 32013
  Cyclic GFR-binding peptide
  MOD_RES (1), (33), (34): Xaa is C or S

SEQ ID NO: 83774 - protein, 24 aa, Artificial Sequence
  Cyclic GFR-binding peptide
KVVMPIKGYVKPTRGVFYLINIPS

SEQ ID NO: 83775 - protein, 30 aa, Artificial Sequence
  Cyclic GFR-binding peptide
  MOD_RES (26), (27): Xaa is C or S
RHKRLVVNNAADYYLISTASLRAPVXXSAP

SEQ ID NO: 83776 - protein, 37 aa, Artificial Sequence; identical to SEQ ID NO: 32014
  Cyclic GFR-binding peptide
  MOD_RES (31), (32): Xaa is C or S

SEQ ID NO: 83777 - protein, 30 aa, Artificial Sequence
  Cyclic GFR-binding peptide
  MOD_RES (26), (27): Xaa is C or S
RYKKLVVNKNEDFYLISIANMKEPVXXPEP

SEQ ID NO: 83778 - protein, 29 aa, Artificial Sequence
  Cyclic GFR-binding peptide
AAAAAAAAAYHYKLVVNKNEDKYLISIPS

SEQ ID NO: 83779 - protein, 39 aa, Artificial Sequence; identical to SEQ ID NO: 32020
  Cyclic GFR-binding peptide
  MOD_RES (1), (3), (34), (35): Xaa is C or S

SEQ ID NO: 83780 - protein, 27 aa, Artificial Sequence
  Cyclic GFR-binding peptide
VMGYHYKLIIQQKDNKYLMSIPSMKTP

SEQ ID NO: 83781 - protein, 28 aa, Artificial Sequence
  Cyclic GFR-binding peptide
EVIMRHKRLLLVRGNDYYLMSTASTKVP

SEQ ID NO: 83782 - protein, 33 aa, Artificial Sequence
  Cyclic GFR-binding peptide
  MOD_RES (29), (30): Xaa is C or S
VMGEYKFKIIQQKDNLYLMSIPEMKTPTXXPGA

SEQ ID NO: 83783 - protein, 27 aa, Artificial Sequence
  Cyclic GFR-binding peptide
  MOD_RES (26), (27): Xaa is C or S
RHKRLYTVVGKDYYLISTASLKTPVXX

SEQ ID NO: 83784 - protein, 38 aa, Artificial Sequence; identical to SEQ ID NO: 32024
  Cyclic GFR-binding peptide
  MOD_RES (1), (33), (34): Xaa is C or S

SEQ ID NO: 83785 - protein, 29 aa, Artificial Sequence
  Cyclic GFR-binding peptide
AEVVMDRHKRLVVNNAADYYLISTASLRA

SEQ ID NO: 83786 - protein, 29 aa, Artificial Sequence
  Cyclic GFR-binding peptide
  MOD_RES (29), (29): Xaa is C or S
TMNEYKFKVVNKNEDLYLISIPEMKEPVX

SEQ ID NO: 83787 - protein, 32 aa, Artificial Sequence; identical to SEQ ID NO: 32025
  Cyclic GFR-binding peptide
  MOD_RES (31), (32): Xaa is C or S

SEQ ID NO: 83788 - protein, 21 aa, Artificial Sequence
  Cyclic GFR-binding peptide
RYKKLVVNKNEDFYLISIANM

SEQ ID NO: 83789 - protein, 30 aa, Artificial Sequence
  Cyclic GFR-binding peptide
  MOD_RES (30), (30): Xaa is C or S
VTMNRYKKLVVNKNEDFYLISIANMKEPVX

SEQ ID NO: 83790 - protein, 30 aa, Artificial Sequence
  Cyclic GFR-binding peptide
  MOD_RES (1), (1): Xaa is C or S
XSEVTMNRYKKLVVNKNEDFYLISIANMKE

SEQ ID NO: 83791 - protein, 29 aa, Artificial Sequence
  Cyclic GFR-binding peptide
  MOD_RES (1), (3): Xaa is C or S
XGXSEVVMDEYKFKVVNNASDLYLISIPE

SEQ ID NO: 83792 - protein, 26 aa, Artificial Sequence
  Cyclic GFR-binding peptide
MNRYKKLVVNKNEDFYLISIANMKEP

SEQ ID NO: 83793 - protein, 28 aa, Artificial Sequence
  Cyclic GFR-binding peptide
DVVMGRHKRLIIQQKDNYYLMSTASMKT

SEQ ID NO: 83794 - protein, 23 aa, Artificial Sequence
  Cyclic GFR-binding peptide
MDRHKRLVVNNAADYYLISTASL

SEQ ID NO: 83795 - protein, 24 aa, Artificial Sequence
  Cyclic GFR-binding peptide
MDEYKFKVVNNASDLYLISIPELR

SEQ ID NO: 83796 - protein, 33 aa, Artificial Sequence
  Cyclic GFR-binding peptide
  MOD_RES (2), (4): Xaa is C or S
RXGXAEVVMDRHKRLVVNNAADYYLISTASLRA

SEQ ID NO: 83797 - protein, 25 aa, Artificial Sequence
  Cyclic GFR-binding peptide
VMGYHYKLIIQQKDNKYLMSIPSMK

SEQ ID NO: 83798 - protein, 30 aa, Artificial Sequence
  Cyclic GFR-binding peptide
  MOD_RES (26), (27): Xaa is C or S
YHYKLVVNKNEDKYLISIPSMKEPVXXPEP

SEQ ID NO: 83799 - protein, 33 aa, Artificial Sequence
  Cyclic GFR-binding peptide
  MOD_RES (27), (28): Xaa is C or S
NRHKRLIVNSSDDYYLVSTASLKTPAXXPKPVH

SEQ ID NO: 83800 - protein, 38 aa, Artificial Sequence; identical to SEQ ID NO: 32031
  Cyclic GFR-binding peptide
  MOD_RES (1), (3), (35), (36): Xaa is C or S

SEQ ID NO: 83801 - protein, 30 aa, Artificial Sequence
  Cyclic GFR-binding peptide
  MOD_RES (27), (28): Xaa is C or S
GYHYKLIIQQKDNKYLMSIPSMKTPTXXPG

SEQ ID NO: 83802 - protein, 33 aa, Artificial Sequence
  Cyclic GFR-binding peptide
  MOD_RES (28), (29): Xaa is C or S
MGRHKRLIIQQKDNYYLMSTASMKTPTXXPGAS

SEQ ID NO: 83803 - protein, 32 aa, Artificial Sequence; identical to SEQ ID NO: 32035
  Cyclic GFR-binding peptide
  MOD_RES (31), (32): Xaa is C or S

SEQ ID NO: 83804 - protein, 28 aa, Artificial Sequence
  Cyclic GFR-binding peptide
  MOD_RES (28), (28): Xaa is C or S
IMPIKGYVKPKRGVFYLINIPSLAQPVX

SEQ ID NO: 83805 - protein, 31 aa, Artificial Sequence
  Cyclic GFR-binding peptide
  MOD_RES (29), (30): Xaa is C or S
VMGRHKRLIIQQKDNYYLMSTASMKTPTXXP

SEQ ID NO: 83806 - protein, 37 aa, Artificial Sequence; identical to SEQ ID NO: 32042
  Cyclic GFR-binding peptide
  MOD_RES (31), (32): Xaa is C or S

SEQ ID NO: 83807 - protein, 32 aa, Artificial Sequence
  Cyclic GFR-binding peptide
  MOD_RES (27), (28): Xaa is C or S
MEYKFKLLVRGNDLYLMSIPETKVPAXXTSPV

SEQ ID NO: 83808 - protein, 28 aa, Artificial Sequence
  Cyclic GFR-binding peptide
VVMDRHKRLVVNNAADYYLISTASLRAP

SEQ ID NO: 83809 - protein, 22 aa, Artificial Sequence
  Cyclic GFR-binding peptide
IMPIKGYVKPKRGVFYLINIPS

SEQ ID NO: 83810 - protein, 41 aa, Artificial Sequence; identical to SEQ ID NO: 32045
  Cyclic GFR-binding peptide
  MOD_RES (2), (4), (36), (37): Xaa is C or S

SEQ ID NO: 83811 - protein, 24 aa, Artificial Sequence
  Cyclic GFR-binding peptide
NRYKKLVVNKNEDFYLISIANMKE

SEQ ID NO: 83812 - protein, 31 aa, Artificial Sequence
  Cyclic GFR-binding peptide
  MOD_RES (30), (31): Xaa is C or S
VVMGEYKFKIIQQKDNLYLMSIPEMKTPTXX

SEQ ID NO: 83813 - protein, 24 aa, Artificial Sequence
  Cyclic GFR-binding peptide
VTMNRHKRLVVNKNEDYYLISTAS

SEQ ID NO: 83814 - protein, 36 aa, Artificial Sequence; identical to SEQ ID NO: 32047
  Cyclic GFR-binding peptide
  MOD_RES (1), (3), (35), (36): Xaa is C or S

SEQ ID NO: 83815 - protein, 32 aa, Artificial Sequence
  Cyclic GFR-binding peptide
  MOD_RES (26), (27): Xaa is C or S
RHKRLIVNSSDDYYLVSTASLKTPAXXPKPVH

SEQ ID NO: 83816 - protein, 33 aa, Artificial Sequence; identical to SEQ ID NO: 32048
  Cyclic GFR-binding peptide
  MOD_RES (2), (2): Xaa is C or S

SEQ ID NO: 83817 - protein, 34 aa, Artificial Sequence; identical to SEQ ID NO: 32049
  Cyclic GFR-binding peptide
  MOD_RES (1), (33), (34): Xaa is C or S

SEQ ID NO: 83818 - protein, 30 aa, Artificial Sequence
  Cyclic GFR-binding peptide
  MOD_RES (26), (27): Xaa is C or S
RHKRLVVNKNEDYYLISTASMKEPVXXPEP

SEQ ID NO: 83819 - protein, 36 aa, Artificial Sequence; identical to SEQ ID NO: 32050
  Cyclic GFR-binding peptide
  MOD_RES (32), (33): Xaa is C or S

SEQ ID NO: 83820 - protein, 37 aa, Artificial Sequence; identical to SEQ ID NO: 32052
  Cyclic GFR-binding peptide
  MOD_RES (1), (3), (35), (36): Xaa is C or S

SEQ ID NO: 83821 - protein, 26 aa, Artificial Sequence
  Cyclic GFR-binding peptide
IMYHYKLLLVRGNDKYLMSIPSTKVP

SEQ ID NO: 83822 - protein, 23 aa, Artificial Sequence
  Cyclic GFR-binding peptide
DYHYKLVVNNASDKYLISIPSLR

SEQ ID NO: 83823 - protein, 30 aa, Artificial Sequence
  Cyclic GFR-binding peptide
  MOD_RES (2), (2): Xaa is C or S
AXSEVTMNPIKGYVVNKNEDFYLINIPSMK

SEQ ID NO: 83824 - protein, 37 aa, Artificial Sequence; identical to SEQ ID NO: 32055
  Cyclic GFR-binding peptide
  MOD_RES (2), (4), (35), (36): Xaa is C or S

SEQ ID NO: 83825 - protein, 27 aa, Artificial Sequence
  Cyclic GFR-binding peptide
  MOD_RES (27), (27): Xaa is C or S
DEYKFKVVNNASDLYLISIPELRTPVX

SEQ ID NO: 83826 - protein, 29 aa, Artificial Sequence
  Cyclic GFR-binding peptide
EEVIMEYKFKLLVRGNDLYLMSIPETKVP

SEQ ID NO: 83827 - protein, 28 aa, Artificial Sequence
  Cyclic GFR-binding peptide
DVVMGEYKFKIIQQKDNLYLMSIPEMKT

SEQ ID NO: 83828 - protein, 30 aa, Artificial Sequence
  Cyclic GFR-binding peptide
  MOD_RES (1), (1): Xaa is C or S
XRDVVMGYHYKLIIQQKDNKYLMSIPSMKT

SEQ ID NO: 83829 - protein, 41 aa, Artificial Sequence; identical to SEQ ID NO: 32057
  Cyclic GFR-binding peptide
  MOD_RES (2), (4), (36), (37): Xaa is C or S

SEQ ID NO: 83830 - protein, 27 aa, Artificial Sequence
  Cyclic GFR-binding peptide
MGRHKRLYTVVGKDYYLISTASLKTPV

SEQ ID NO: 83831 - protein, 30 aa, Artificial Sequence
  Cyclic GFR-binding peptide
  MOD_RES (30), (30): Xaa is C or S
KVIMPIKGYIKPTKGIFYLINIPSLDQSVX

SEQ ID NO: 83832 - protein, 26 aa, Artificial Sequence
  Cyclic GFR-binding peptide
RDVVMGEYKFKIIQQKDNLYLMSIPE

SEQ ID NO: 83833 - protein, 32 aa, Artificial Sequence
  Cyclic GFR-binding peptide
  MOD_RES (2), (4): Xaa is C or S
SXKXSKVVMPIKGYVKPTRGVFYLINIPSLDQ

SEQ ID NO: 83834 - protein, 35 aa, Artificial Sequence
  Cyclic GFR-binding peptide
  MOD_RES (30), (31): Xaa is C or S
VAMGRHKRLYTVVGKDYYLISTASLKTPVXXAKSA

SEQ ID NO: 83835 - protein, 34 aa, Artificial Sequence; identical to SEQ ID NO: 32058
  Cyclic GFR-binding peptide
  MOD_RES (2), (34): Xaa is C or S

SEQ ID NO: 83836 - protein, 29 aa, Artificial Sequence
  Cyclic GFR-binding peptide
VTMNRYKKLVVNKNEDFYLISIANMKEPV

SEQ ID NO: 83837 - protein, 36 aa, Artificial Sequence
  Cyclic GFR-binding peptide
  MOD_RES (30), (31): Xaa is C or S
VAMGRHKRLYTVVGKDYYLISTASLKTPVXXAKSAK

SEQ ID NO: 83838 - protein, 35 aa, Artificial Sequence
  Cyclic GFR-binding peptide
  MOD_RES (30), (31): Xaa is C or S
VVMDRHKRLVVNNAADYYLISTASLRAPVXXSAPA

SEQ ID NO: 83839 - protein, 22 aa, Artificial Sequence
  Cyclic GFR-binding peptide
NRYKKLVVNKNEDFYLISIANM

SEQ ID NO: 83840 - protein, 41 aa, Artificial Sequence; identical to SEQ ID NO: 32065
  Cyclic GFR-binding peptide
  MOD_RES (1), (3), (35), (36): Xaa is C or S

SEQ ID NO: 83841 - protein, 28 aa, Artificial Sequence
  Cyclic GFR-binding peptide
VVMGRHKRLIIQQKDNYYLMSTASMKTP

SEQ ID NO: 83842 - protein, 31 aa, Artificial Sequence
  Cyclic GFR-binding peptide
  MOD_RES (2), (2): Xaa is C or S
GXEEVIMEYKFKLLVRGNDLYLMSIPETKVP

SEQ ID NO: 83843 - protein, 29 aa, Artificial Sequence
  Cyclic GFR-binding peptide
SEVTMNPIKGYVVNKNEDFYLINIPSMKE

SEQ ID NO: 83844 - protein, 37 aa, Artificial Sequence; identical to SEQ ID NO: 32068
  Cyclic GFR-binding peptide
  MOD_RES (31), (32): Xaa is C or S

SEQ ID NO: 83845 - protein, 33 aa, Artificial Sequence; identical to SEQ ID NO: 32069
  Cyclic GFR-binding peptide
  MOD_RES (2), (33): Xaa is C or S

SEQ ID NO: 83846 - protein, 32 aa, Artificial Sequence
  Cyclic GFR-binding peptide
  MOD_RES (27), (28): Xaa is C or S
NRYKKLVVNKNEDFYLISIANMKEPVXXPEPI

SEQ ID NO: 83847 - protein, 29 aa, Artificial Sequence
  Cyclic GFR-binding peptide
  MOD_RES (26), (27): Xaa is C or S
EYKFKIIQQKDNLYLMSIPEMKTPTXXPG

SEQ ID NO: 83848 - protein, 34 aa, Artificial Sequence
  Cyclic GFR-binding peptide
  MOD_RES (30), (31): Xaa is C or S
KVVMPIKGYVKPTRGVFYLINIPSLDQPVXXPSA

SEQ ID NO: 83849 - protein, 37 aa, Artificial Sequence; identical to SEQ ID NO: 32071
  Cyclic GFR-binding peptide
  MOD_RES (1), (32), (33): Xaa is C or S

SEQ ID NO: 83850 - protein, 29 aa, Artificial Sequence
  Cyclic GFR-binding peptide
  MOD_RES (1), (3): Xaa is C or S
XAXSEVTMNYHYKLVVNKNEDKYLISIPS

SEQ ID NO: 83851 - protein, 34 aa, Artificial Sequence
  Cyclic GFR-binding peptide
  MOD_RES (2), (4): Xaa is C or S
SXGXRDVVMGRHKRLIIQQKDNYYLMSTASMKTP

SEQ ID NO: 83852 - protein, 33 aa, Artificial Sequence; identical to SEQ ID NO: 32072
  Cyclic GFR-binding peptide
  MOD_RES (32), (33): Xaa is C or S

SEQ ID NO: 83853 - protein, 26 aa, Artificial Sequence
  Cyclic GFR-binding peptide
MEYKFKLLVRGNDLYLMSIPETKVPA

SEQ ID NO: 83854 - protein, 33 aa, Artificial Sequence; identical to SEQ ID NO: 32073
  Cyclic GFR-binding peptide
  MOD_RES (1), (33): Xaa is C or S

SEQ ID NO: 83855 - protein, 27 aa, Artificial Sequence
  Cyclic GFR-binding peptide
VIMRHKRLLLVRGNDYYLMSTASTKVP

SEQ ID NO: 83856 - protein, 31 aa, Artificial Sequence
  Cyclic GFR-binding peptide
  MOD_RES (30), (31): Xaa is C or S
VAMGRHKRLYTVVGKDYYLISTASLKTPVXX

SEQ ID NO: 83857 - protein, 33 aa, Artificial Sequence
  Cyclic GFR-binding peptide
  MOD_RES (27), (28): Xaa is C or S
GRHKRLYTVVGKDYYLISTASLKTPVXXAKSAK

SEQ ID NO: 83858 - protein, 39 aa, Artificial Sequence; identical to SEQ ID NO: 32074
  Cyclic GFR-binding peptide
  MOD_RES (1), (33), (34): Xaa is C or S

SEQ ID NO: 83859 - protein, 31 aa, Artificial Sequence; identical to SEQ ID NO: 32075
  Cyclic GFR-binding peptide
  MOD_RES (31), (31): Xaa is C or S

SEQ ID NO: 83860 - protein, 33 aa, Artificial Sequence
  Cyclic GFR-binding peptide
  MOD_RES (2), (4): Xaa is C or S
RXAXSEVTMNRHKRLVVNKNEDYYLISTASMKE

SEQ ID NO: 83861 - protein, 38 aa, Artificial Sequence; identical to SEQ ID NO: 32076
  Cyclic GFR-binding peptide
  MOD_RES (32), (33): Xaa is C or S

SEQ ID NO: 83862 - protein, 25 aa, Artificial Sequence
  Cyclic GFR-binding peptide
GEYKFKIIQQKDNLYLMSIPEMKTP

SEQ ID NO: 83863 - protein, 25 aa, Artificial Sequence
  Cyclic GFR-binding peptide
MGRHKRLIIQQKDNYYLMSTASMKT

SEQ ID NO: 83864 - protein, 29 aa, Artificial Sequence
  Cyclic GFR-binding peptide
AAAAAAAAARHKRLLLVRGNDYYLMSTAS

SEQ ID NO: 83865 - protein, 38 aa, Artificial Sequence; identical to SEQ ID NO: 32079
  Cyclic GFR-binding peptide
  MOD_RES (2), (34), (35): Xaa is C or S

SEQ ID NO: 83866 - protein, 21 aa, Artificial Sequence
  Cyclic GFR-binding peptide
RHKRLVVNNAADYYLISTASL

SEQ ID NO: 83867 - protein, 35 aa, Artificial Sequence
  Cyclic GFR-binding peptide
  MOD_RES (29), (30): Xaa is C or S
VMDYHYKLVVNNASDKYLISIPSLRTPVXXTPPTS

SEQ ID NO: 83868 - protein, 37 aa, Artificial Sequence; identical to SEQ ID NO: 32082
  Cyclic GFR-binding peptide
  MOD_RES (31), (32): Xaa is C or S

SEQ ID NO: 83869 - protein, 31 aa, Artificial Sequence
  Cyclic GFR-binding peptide
  MOD_RES (26), (27): Xaa is C or S
PIKGYIKPTKGIFYLINIPSLDQSVXXPSAS

SEQ ID NO: 83870 - protein, 34 aa, Artificial Sequence
  Cyclic GFR-binding peptide
  MOD_RES (2), (4): Xaa is C or S
RXAXSEVTMNYHYKLVVNKNEDKYLISIPSMKEP

SEQ ID NO: 83871 - protein, 32 aa, Artificial Sequence
  Cyclic GFR-binding peptide
  MOD_RES (2), (2): Xaa is C or S
GXRDVVMGRHKRLIIQQKDNYYLMSTASMKTP

SEQ ID NO: 83872 - protein, 38 aa, Artificial Sequence; identical to SEQ ID NO: 32084
  Cyclic GFR-binding peptide
  MOD_RES (2), (34), (35): Xaa is C or S

SEQ ID NO: 83873 - protein, 30 aa, Artificial Sequence
  Cyclic GFR-binding peptide
SEVTMNRHKRLVVNKNEDYYLISTASMKEP

SEQ ID NO: 83874 - protein, 37 aa, Artificial Sequence; identical to SEQ ID NO: 32085
  Cyclic GFR-binding peptide
  MOD_RES (1), (3), (35), (36): Xaa is C or S

SEQ ID NO: 83875 - protein, 23 aa, Artificial Sequence
  Cyclic GFR-binding peptide
VMDEYKFKVVNNASDLYLISIPE

SEQ ID NO: 83876 - protein, 31 aa, Artificial Sequence
  Cyclic GFR-binding peptide
  MOD_RES (2), (2): Xaa is C or S
GXSEVVMDYHYKLVVNNASDKYLISIPSLRT

SEQ ID NO: 83877 - protein, 38 aa, Artificial Sequence; identical to SEQ ID NO: 32086
  Cyclic GFR-binding peptide
  MOD_RES (2), (34), (35): Xaa is C or S

SEQ ID NO: 83878 - protein, 28 aa, Artificial Sequence
  Cyclic GFR-binding peptide
  MOD_RES (1), (3): Xaa is C or S
XKXSKVIMPIKGYIKPTKGIFYLINIPS

SEQ ID NO: 83879 - protein, 32 aa, Artificial Sequence; identical to SEQ ID NO: 32087
  Cyclic GFR-binding peptide
  MOD_RES (1), (32): Xaa is C or S

SEQ ID NO: 83880 - protein, 29 aa, Artificial Sequence
  Cyclic GFR-binding peptide
AAAAAAAAAYHYKLLLVRGNDKYLMSIPS

SEQ ID NO: 83881 - protein, 36 aa, Artificial Sequence; identical to SEQ ID NO: 32091
  Cyclic GFR-binding peptide
  MOD_RES (1), (3), (34), (35): Xaa is C or S

SEQ ID NO: 83882 - protein, 28 aa, Artificial Sequence
  Cyclic GFR-binding peptide
  MOD_RES (28), (28): Xaa is C or S
MGYHYKLIIQQKDNKYLMSIPSMKTPTX

SEQ ID NO: 83883 - protein, 26 aa, Artificial Sequence
  Cyclic GFR-binding peptide
EVVMDEYKFKVVNNASDLYLISIPEL

SEQ ID NO: 83884 - protein, 35 aa, Artificial Sequence; identical to SEQ ID NO: 32094
  Cyclic GFR-binding peptide
  MOD_RES (1), (33), (34): Xaa is C or S

SEQ ID NO: 83885 - protein, 33 aa, Artificial Sequence; identical to SEQ ID NO: 32095
  Cyclic GFR-binding peptide
  MOD_RES (2), (33): Xaa is C or S

SEQ ID NO: 83886 - protein, 40 aa, Artificial Sequence; identical to SEQ ID NO: 32097
  Cyclic GFR-binding peptide
  MOD_RES (2), (34), (35): Xaa is C or S

SEQ ID NO: 83887 - protein, 31 aa, Artificial Sequence; identical to SEQ ID NO: 32098
  Cyclic GFR-binding peptide
  MOD_RES (31), (31): Xaa is C or S

SEQ ID NO: 83888 - protein, 33 aa, Artificial Sequence
  Cyclic GFR-binding peptide
  MOD_RES (28), (29): Xaa is C or S
MDYHYKLVVNNASDKYLISIPSLRTPVXXTPPT

SEQ ID NO: 83889 - protein, 30 aa, Artificial Sequence
  Cyclic GFR-binding peptide
  MOD_RES (30), (30): Xaa is C or S
VVMDRHKRLVVNNASDYYLISTASLRTPVX

SEQ ID NO: 83890 - protein, 32 aa, Artificial Sequence
  Cyclic GFR-binding peptide
  MOD_RES (1), (3): Xaa is C or S
XKXSKVIMPIKGYIKPTKGIFYLINIPSLDQS

SEQ ID NO: 83891 - protein, 34 aa, Artificial Sequence
  Cyclic GFR-binding peptide
  MOD_RES (30), (31): Xaa is C or S
EVIMEYKFKLLVRGNDLYLMSIPETKVPAXXTSP

SEQ ID NO: 83892 - protein, 28 aa, Artificial Sequence
  Cyclic GFR-binding peptide
VIMPIKGYIKPTKGIFYLINIPSLDQSV

SEQ ID NO: 83893 - protein, 33 aa, Artificial Sequence
  Cyclic GFR-binding peptide
  MOD_RES (29), (30): Xaa is C or S
VIMYHYKLLLVRGNDKYLMSIPSTKVPAXXTSP

SEQ ID NO: 83894 - protein, 31 aa, Artificial Sequence
  Cyclic GFR-binding peptide
  MOD_RES (26), (27): Xaa is C or S
RHKRLVVNKNEDYYLISTASMKEPVXXPEPI

SEQ ID NO: 83895 - protein, 32 aa, Artificial Sequence
  Cyclic GFR-binding peptide
  MOD_RES (28), (29): Xaa is C or S
IMEYKFKLLVRGNDLYLMSIPETKVPAXXTSP

SEQ ID NO: 83896 - protein, 27 aa, Artificial Sequence
  Cyclic GFR-binding peptide
VVMGEYKFKIIQQKDNLYLMSIPEMKT

SEQ ID NO: 83897 - protein, 30 aa, Artificial Sequence
  Cyclic GFR-binding peptide
  MOD_RES (28), (29): Xaa is C or S
IMPIKGYVKPKRGVFYLINIPSLAQPVXXP

SEQ ID NO: 83898 - protein, 35 aa, Artificial Sequence; identical to SEQ ID NO: 32104
  Cyclic GFR-binding peptide
  MOD_RES (2), (4): Xaa is C or S

SEQ ID NO: 83899 - protein, 30 aa, Artificial Sequence
  Cyclic GFR-binding peptide
  MOD_RES (1), (3): Xaa is C or S
XKXSKVVMPIKGYVKPTRGVFYLINIPSLD

SEQ ID NO: 83900 - protein, 21 aa, Artificial Sequence
  Cyclic GFR-binding peptide
EYKFKVVNKNEDLYLISIPEM

SEQ ID NO: 83901 - protein, 40 aa, Artificial Sequence; identical to SEQ ID NO: 32105
  Cyclic GFR-binding peptide
  MOD_RES (2), (4), (35), (36): Xaa is C or S

SEQ ID NO: 83902 - protein, 38 aa, Artificial Sequence; identical to SEQ ID NO: 32106
  Cyclic GFR-binding peptide
  MOD_RES (2), (4), (35), (36): Xaa is C or S

SEQ ID NO: 83903 - protein, 28 aa, Artificial Sequence
  Cyclic GFR-binding peptide
  MOD_RES (27), (28): Xaa is C or S
GEYKFKIIQQKDNLYLMSIPEMKTPTXX

SEQ ID NO: 83904 - protein, 35 aa, Artificial Sequence; identical to SEQ ID NO: 32109
  Cyclic GFR-binding peptide
  MOD_RES (1), (3), (35): Xaa is C or S

SEQ ID NO: 83905 - protein, 32 aa, Artificial Sequence; identical to SEQ ID NO: 32112
  Cyclic GFR-binding peptide
  MOD_RES (2), (2): Xaa is C or S

SEQ ID NO: 83906 - protein, 31 aa, Artificial Sequence
  Cyclic GFR-binding peptide
  MOD_RES (27), (28): Xaa is C or S
GRHKRLIIQQKDNYYLMSTASMKTPTXXPGA

SEQ ID NO: 83907 - protein, 21 aa, Artificial Sequence
  Cyclic GFR-binding peptide
RHKRLVVNKNEDYYLISTASM

SEQ ID NO: 83908 - protein, 21 aa, Artificial Sequence
  Cyclic GFR-binding peptide
RHKRLIIQQKDNYYLMSTASM

SEQ ID NO: 83909 - protein, 35 aa, Artificial Sequence; identical to SEQ ID NO: 32113
  Cyclic GFR-binding peptide
  MOD_RES (1), (32), (33): Xaa is C or S

SEQ ID NO: 83910 - protein, 33 aa, Artificial Sequence; identical to SEQ ID NO: 32115
  Cyclic GFR-binding peptide
  MOD_RES (31), (32): Xaa is C or S

SEQ ID NO: 83911 - protein, 24 aa, Artificial Sequence
  Cyclic GFR-binding peptide
RHKRLYTVVGKDYYLISTASLKTP

SEQ ID NO: 83912 - protein, 21 aa, Artificial Sequence
  Cyclic GFR-binding peptide
MYHYKLLLVRGNDKYLMSIPS

SEQ ID NO: 83913 - protein, 28 aa, Artificial Sequence
  Cyclic GFR-binding peptide
SEVTMNRHKRLVVNKNEDYYLISTASMK

SEQ ID NO: 83914 - protein, 36 aa, Artificial Sequence; identical to SEQ ID NO: 32118
  Cyclic GFR-binding peptide
  MOD_RES (2), (34), (35): Xaa is C or S

SEQ ID NO: 83915 - protein, 27 aa, Artificial Sequence
  Cyclic GFR-binding peptide
VMGRHKRLIIQQKDNYYLMSTASMKTP

SEQ ID NO: 83916 - protein, 37 aa, Artificial Sequence; identical to SEQ ID NO: 32119
  Cyclic GFR-binding peptide
  MOD_RES (2), (34), (35): Xaa is C or S

SEQ ID NO: 83917 - protein, 28 aa, Artificial Sequence
  Cyclic GFR-binding peptide
VTMNEYKFKVVNKNEDLYLISIPEMKEP

SEQ ID NO: 83918 - protein, 39 aa, Artificial Sequence; identical to SEQ ID NO: 32122
  Cyclic GFR-binding peptide
  MOD_RES (1), (33), (34): Xaa is C or S

SEQ ID NO: 83919 - protein, 39 aa, Artificial Sequence; identical to SEQ ID NO: 32126
  Cyclic GFR-binding peptide
  MOD_RES (2), (4), (36), (37): Xaa is C or S

SEQ ID NO: 83920 - protein, 35 aa, Artificial Sequence; identical to SEQ ID NO: 32127
  Cyclic GFR-binding peptide
  MOD_RES (1), (32), (33): Xaa is C or S

SEQ ID NO: 83921 - protein, 29 aa, Artificial Sequence
  Cyclic GFR-binding peptide
AAAAAAAAARHKRLVVNKNEDYYLISTAS

SEQ ID NO: 83922 - protein, 25 aa, Artificial Sequence
  Cyclic GFR-binding peptide
MNEYKFKVVNKNEDLYLISIPEMKE

SEQ ID NO: 83923 - protein, 29 aa, Artificial Sequence
  Cyclic GFR-binding peptide
  MOD_RES (28), (29): Xaa is C or S
IMPIKGYVKPKRGVFYLINIPSLAQPVXX

SEQ ID NO: 83924 - protein, 31 aa, Artificial Sequence
  Cyclic GFR-binding peptide
  MOD_RES (26), (27): Xaa is C or S
PIKGYVKPTRGVFYLINIPSLDQPVXXPSAS

SEQ ID NO: 83925 - protein, 40 aa, Artificial Sequence; identical to SEQ ID NO: 32130
  Cyclic GFR-binding peptide
  MOD_RES (2), (34), (35): Xaa is C or S

SEQ ID NO: 83926 - protein, 36 aa, Artificial Sequence; identical to SEQ ID NO: 32131
  Cyclic GFR-binding peptide
  MOD_RES (1), (33), (34): Xaa is C or S

SEQ ID NO: 83927 - protein, 34 aa, Artificial Sequence
  Cyclic GFR-binding peptide
  MOD_RES (28), (29): Xaa is C or S
MNYHYKLVVNKNEDKYLISIPSMKEPVXXPEPIG

SEQ ID NO: 83928 - protein, 21 aa, Artificial Sequence
  Cyclic GFR-binding peptide
YHYKLVVNKNEDKYLISIPSM

SEQ ID NO: 83929 - protein, 23 aa, Artificial Sequence
  Cyclic GFR-binding peptide
IMYHYKLLLVRGNDKYLMSIPST

SEQ ID NO: 83930 - protein, 39 aa, Artificial Sequence; identical to SEQ ID NO: 32136
  Cyclic GFR-binding peptide
  MOD_RES (2), (4), (36), (37): Xaa is C or S

SEQ ID NO: 83931 - protein, 32 aa, Artificial Sequence
  Cyclic GFR-binding peptide
  MOD_RES (28), (29): Xaa is C or S
MDRHKRLVVNNAADYYLISTASLRAPVXXSAP

SEQ ID NO: 83932 - protein, 32 aa, Artificial Sequence
  Cyclic GFR-binding peptide
  MOD_RES (26), (27): Xaa is C or S
PIKGYVKPTRGVFYLINIPSLDQPVXXPSASA

SEQ ID NO: 83933 - protein, 26 aa, Artificial Sequence
  Cyclic GFR-binding peptide
  MOD_RES (26), (26): Xaa is C or S
PIKGYVVNKNEDFYLINIPSMKEPVX

SEQ ID NO: 83934 - protein, 31 aa, Artificial Sequence; identical to SEQ ID NO: 32137
  Cyclic GFR-binding peptide

SEQ ID NO: 83935 - protein, 36 aa, Artificial Sequence; identical to SEQ ID NO: 32139
  Cyclic GFR-binding peptide
  MOD_RES (2), (34), (35): Xaa is C or S

SEQ ID NO: 83936 - protein, 33 aa, Artificial Sequence; identical to SEQ ID NO: 32140
  Cyclic GFR-binding peptide
  MOD_RES (31), (32): Xaa is C or S

SEQ ID NO: 83937 - protein, 38 aa, Artificial Sequence; identical to SEQ ID NO: 32138
  Cyclic GFR-binding peptide
  MOD_RES (1), (3), (34), (35): Xaa is C or S

SEQ ID NO: 83938 - protein, 25 aa, Artificial Sequence
  Cyclic GFR-binding peptide
RHKRLVVNNAADYYLISTASLRAPV

SEQ ID NO: 83939 - protein, 29 aa, Artificial Sequence
  Cyclic GFR-binding peptide
  MOD_RES (1), (1): Xaa is C or S
XRDVVMGEYKFKIIQQKDNLYLMSIPEMK

SEQ ID NO: 83940 - protein, 29 aa, Artificial Sequence
  Cyclic GFR-binding peptide
KVIMPIKGYIKPTKGIFYLINIPSLDQSV

SEQ ID NO: 83941 - protein, 26 aa, Artificial Sequence
  Cyclic GFR-binding peptide
EVIMEYKFKLLVRGNDLYLMSIPETK

SEQ ID NO: 83942 - protein, 28 aa, Artificial Sequence
  Cyclic GFR-binding peptide
EVIMYHYKLLLVRGNDKYLMSIPSTKVP

SEQ ID NO: 83943 - protein, 35 aa, Artificial Sequence; identical to SEQ ID NO: 32141
  Cyclic GFR-binding peptide
  MOD_RES (2), (4): Xaa is C or S

SEQ ID NO: 83944 - protein, 40 aa, Artificial Sequence; identical to SEQ ID NO: 32145
  Cyclic GFR-binding peptide
  MOD_RES (2), (34), (35): Xaa is C or S

SEQ ID NO: 83945 - protein, 35 aa, Artificial Sequence; identical to SEQ ID NO: 21170
  Cyclic GFR-binding peptide
  MOD_RES (2), (4): Xaa is C or S

SEQ ID NO: 83946 - protein, 32 aa, Artificial Sequence
  Cyclic GFR-binding peptide
  MOD_RES (26), (27): Xaa is C or S
YHYKLIVNSSDDKYLVSIPSLKTPAXXPKPVH

SEQ ID NO: 83947 - protein, 26 aa, Artificial Sequence
  Cyclic GFR-binding peptide
SKVVMPIKGYVKPTRGVFYLINIPSL

SEQ ID NO: 83948 - protein, 25 aa, Artificial Sequence
  Cyclic GFR-binding peptide
VVMPIKGYVKPTRGVFYLINIPSLD

SEQ ID NO: 83949 - protein, 37 aa, Artificial Sequence; identical to SEQ ID NO: 32147
  Cyclic GFR-binding peptide
  MOD_RES (2), (4), (35), (36): Xaa is C or S

SEQ ID NO: 83950 - protein, 37 aa, Artificial Sequence; identical to SEQ ID NO: 32148
  Cyclic GFR-binding peptide
  MOD_RES (1), (32), (33): Xaa is C or S

SEQ ID NO: 83951 - protein, 32 aa, Artificial Sequence
  Cyclic GFR-binding peptide
  MOD_RES (1), (3): Xaa is C or S
XAXSEVTMNRHKRLVVNKNEDYYLISTASMKE

SEQ ID NO: 83952 - protein, 33 aa, Artificial Sequence; identical to SEQ ID NO: 32149
  Cyclic GFR-binding peptide
  MOD_RES (1), (32), (33): Xaa is C or S

SEQ ID NO: 83953 - protein, 23 aa, Artificial Sequence
  Cyclic GFR-binding peptide
NYHYKLVVNKNEDKYLISIPSMK

SEQ ID NO: 83954 - protein, 28 aa, Artificial Sequence
  Cyclic GFR-binding peptide
TMNRYKKLVVNKNEDFYLISIANMKEPV

SEQ ID NO: 83955 - protein, 26 aa, Artificial Sequence
  Cyclic GFR-binding peptide
EVVMDRHKRLVVNNASDYYLISTASL

SEQ ID NO: 83956 - protein, 33 aa, Artificial Sequence; identical to SEQ ID NO: 32150
  Cyclic GFR-binding peptide
  MOD_RES (1), (3): Xaa is C or S

SEQ ID NO: 83957 - protein, 28 aa, Artificial Sequence
  Cyclic GFR-binding peptide
  MOD_RES (28), (28): Xaa is C or S
IMYHYKLLLVRGNDKYLMSIPSTKVPAX

SEQ ID NO: 83958 - protein, 32 aa, Artificial Sequence; identical to SEQ ID NO: 32152
  Cyclic GFR-binding peptide
  MOD_RES (31), (32): Xaa is C or S

SEQ ID NO: 83959 - protein, 34 aa, Artificial Sequence; identical to SEQ ID NO: 32151
  Cyclic GFR-binding peptide
  MOD_RES (1), (3): Xaa is C or S

SEQ ID NO: 83960 - protein, 26 aa, Artificial Sequence
  Cyclic GFR-binding peptide
VMPIKGYVKPTRGVFYLINIPSLDQP

SEQ ID NO: 83961 - protein, 27 aa, Artificial Sequence
  Cyclic GFR-binding peptide
MGYHYKLIIQQKDNKYLMSIPSMKTPT

SEQ ID NO: 83962 - protein, 29 aa, Artificial Sequence
  Cyclic GFR-binding peptide
  MOD_RES (2), (2): Xaa is C or S
GXSEVVMDYHYKLVVNNASDKYLISIPSL

SEQ ID NO: 83963 - protein, 34 aa, Artificial Sequence
  Cyclic GFR-binding peptide
  MOD_RES (30), (31): Xaa is C or S
VVMGEYKFKIIQQKDNLYLMSIPEMKTPTXXPGA

SEQ ID NO: 83964 - protein, 23 aa, Artificial Sequence
  Cyclic GFR-binding peptide
TMNRHKRLVVNKNEDYYLISTAS

SEQ ID NO: 83965 - protein, 35 aa, Artificial Sequence
  Cyclic GFR-binding peptide
  MOD_RES (29), (30): Xaa is C or S
TMNPIKGYVVNKNEDFYLINIPSMKEPVXXPEPIG

SEQ ID NO: 83966 - protein, 23 aa, Artificial Sequence
  Cyclic GFR-binding peptide
MNEYKFKVVNKNEDLYLISIPEM

SEQ ID NO: 83967 - protein, 38 aa, Artificial Sequence; identical to SEQ ID NO: 32157
  Cyclic GFR-binding peptide
  MOD_RES (2), (34), (35): Xaa is C or S

SEQ ID NO: 83968 - protein, 27 aa, Artificial Sequence
  Cyclic GFR-binding peptide
  MOD_RES (26), (27): Xaa is C or S
RHKRLIIQQKDNYYLMSTASMKTPTXX

SEQ ID NO: 83969 - protein, 30 aa, Artificial Sequence
  Cyclic GFR-binding peptide
  MOD_RES (27), (28): Xaa is C or S
NYHYKLVVNKNEDKYLISIPSMKEPVXXPE

SEQ ID NO: 83970 - protein, 28 aa, Artificial Sequence
  Cyclic GFR-binding peptide
EVTMNPIKGYVVNKNEDFYLINIPSMKE

SEQ ID NO: 83971 - protein, 34 aa, Artificial Sequence
  Cyclic GFR-binding peptide
  MOD_RES (29), (30): Xaa is C or S
VIMPIKGYVKPKRGVFYLINIPSLAQPVXXPAAS

SEQ ID NO: 83972 - protein, 26 aa, Artificial Sequence
  Cyclic GFR-binding peptide
MNRHKRLVVNKNEDYYLISTASMKEP

SEQ ID NO: 83973 - protein, 32 aa, Artificial Sequence; identical to SEQ ID NO: 32161
  Cyclic GFR-binding peptide
  MOD_RES (1), (1): Xaa is C or S

SEQ ID NO: 83974 - protein, 29 aa, Artificial Sequence
  Cyclic GFR-binding peptide
  MOD_RES (1), (1): Xaa is C or S
XSEVVMDEYKFKVVNNASDLYLISIPELR

SEQ ID NO: 83975 - protein, 31 aa, Artificial Sequence
  Cyclic GFR-binding peptide
  MOD_RES (27), (28): Xaa is C or S
DRHKRLVVNNAADYYLISTASLRAPVXXSAP

SEQ ID NO: 83976 - protein, 34 aa, Artificial Sequence
  Cyclic GFR-binding peptide
  MOD_RES (28), (29): Xaa is C or S
MNEYKFKIVNSSDDLYLVSIPELKTPAXXPKPVH

SEQ ID NO: 83977 - protein, 33 aa, Artificial Sequence; identical to SEQ ID NO: 32162
  Cyclic GFR-binding peptide
  MOD_RES (32), (33): Xaa is C or S

SEQ ID NO: 83978 - protein, 23 aa, Artificial Sequence
  Cyclic GFR-binding peptide
PIKGYVKPTRGVFYLINIPSLDQ

SEQ ID NO: 83979 - protein, 32 aa, Artificial Sequence; identical to SEQ ID NO: 32163
  Cyclic GFR-binding peptide
  MOD_RES (1), (32): Xaa is C or S

SEQ ID NO: 83980 - protein, 26 aa, Artificial Sequence
  Cyclic GFR-binding peptide
  MOD_RES (1), (1): Xaa is C or S
XEEVIMRHKRLLLVRGNDYYLMSTAS

SEQ ID NO: 83981 - protein, 22 aa, Artificial Sequence
  Cyclic GFR-binding peptide
MGRHKRLYTVVGKDYYLISTAS

SEQ ID NO: 83982 - protein, 31 aa, Artificial Sequence
  Cyclic GFR-binding peptide
  MOD_RES (2), (2): Xaa is C or S
GXEEVIMRHKRLLLVRGNDYYLMSTASTKVP

SEQ ID NO: 83983 - protein, 31 aa, Artificial Sequence
  Cyclic GFR-binding peptide
  MOD_RES (30), (31): Xaa is C or S
VTMNRHKRLVVNKNEDYYLISTASMKEPVXX

SEQ ID NO: 83984 - protein, 37 aa, Artificial Sequence; identical to SEQ ID NO: 32167
  Cyclic GFR-binding peptide
  MOD_RES (2), (4), (36), (37): Xaa is C or S

SEQ ID NO: 83985 - protein, 27 aa, Artificial Sequence
  Cyclic GFR-binding peptide
AMGRHKRLYTVVGKDYYLISTASLKTP

SEQ ID NO: 83986 - protein, 36 aa, Artificial Sequence; identical to SEQ ID NO: 32168
  Cyclic GFR-binding peptide
  MOD_RES (2), (33), (34): Xaa is C or S

SEQ ID NO: 83987 - protein, 27 aa, Artificial Sequence
  Cyclic GFR-binding peptide
VIMPIKGYVKPKRGVFYLINIPSLAQP

SEQ ID NO: 83988 - protein, 26 aa, Artificial Sequence
  Cyclic GFR-binding peptide
EVIMYHYKLLLVRGNDKYLMSIPSTK

SEQ ID NO: 83989 - protein, 30 aa, Artificial Sequence
  Cyclic GFR-binding peptide
  MOD_RES (1), (3): Xaa is C or S
XGXSEVVMDRHKRLVVNNASDYYLISTASL

SEQ ID NO: 83990 - protein, 29 aa, Artificial Sequence
  Cyclic GFR-binding peptide
  MOD_RES (28), (29): Xaa is C or S
MGYHYKLIIQQKDNKYLMSIPSMKTPTXX

SEQ ID NO: 83991 - protein, 31 aa, Artificial Sequence
  Cyclic GFR-binding peptide
  MOD_RES (26), (27): Xaa is C or S
YHYKLVVNKNEDKYLISIPSMKEPVXXPEPI

SEQ ID NO: 83992 - protein, 34 aa, Artificial Sequence; identical to SEQ ID NO: 32170
  Cyclic GFR-binding peptide
  MOD_RES (32), (33): Xaa is C or S

SEQ ID NO: 83993 - protein, 29 aa, Artificial Sequence
  Cyclic GFR-binding peptide
  MOD_RES (1), (1): Xaa is C or S
XSKVIMPIKGYIKPTKGIFYLINIPSLDQ

SEQ ID NO: 83994 - protein, 31 aa, Artificial Sequence
  Cyclic GFR-binding peptide
  MOD_RES (28), (29): Xaa is C or S
MGYHYKLIIQQKDNKYLMSIPSMKTPTXXPG

SEQ ID NO: 83995 - protein, 22 aa, Artificial Sequence
  Cyclic GFR-binding peptide
MEYKFKLLVRGNDLYLMSIPET

SEQ ID NO: 83996 - protein, 28 aa, Artificial Sequence
  Cyclic GFR-binding peptide
DVVMGYHYKLIIQQKDNKYLMSIPSMKT

SEQ ID NO: 83997 - protein, 29 aa, Artificial Sequence
  Cyclic GFR-binding peptide
  MOD_RES (27), (28): Xaa is C or S
GRHKRLIIQQKDNYYLMSTASMKTPTXXP

SEQ ID NO: 83998 - protein, 39 aa, Artificial Sequence; identical to SEQ ID NO: 32174
  Cyclic GFR-binding peptide
  MOD_RES (1), (3), (35), (36): Xaa is C or S

SEQ ID NO: 83999 - protein, 38 aa, Artificial Sequence; identical to SEQ ID NO: 32175
  Cyclic GFR-binding peptide
  MOD_RES (32), (33): Xaa is C or S

SEQ ID NO: 84000 - protein, 30 aa, Artificial Sequence
  Cyclic GFR-binding peptide
  MOD_RES (30), (30): Xaa is C or S
VTMNYHYKLVVNKNEDKYLISIPSMKEPVX

SEQ ID NO: 84001 - protein, 35 aa, Artificial Sequence; identical to SEQ ID NO: 32178
  Cyclic GFR-binding peptide
  MOD_RES (32), (33): Xaa is C or S

SEQ ID NO: 84002 - protein, 24 aa, Artificial Sequence
  Cyclic GFR-binding peptide
MGYHYKLIIQQKDNKYLMSIPSMK

SEQ ID NO: 84003 - protein, 24 aa, Artificial Sequence
  Cyclic GFR-binding peptide
VVMPIKGYVKPTRGVFYLINIPSL

SEQ ID NO: 84004 - protein, 29 aa, Artificial Sequence
  Cyclic GFR-binding peptide
VVMDRHKRLVVNNASDYYLISTASLRTPV

SEQ ID NO: 84005 - protein, 33 aa, Artificial Sequence
  Cyclic GFR-binding peptide
  MOD_RES (1), (3): Xaa is C or S
XGXSEVVMDRHKRLVVNNASDYYLISTASLRTP

SEQ ID NO: 84006 - protein, 25 aa, Artificial Sequence
  Cyclic GFR-binding peptide
VMDRHKRLVVNNAADYYLISTASLR

SEQ ID NO: 84007 - protein, 34 aa, Artificial Sequence
  Cyclic GFR-binding peptide
  MOD_RES (30), (31): Xaa is C or S
VVMGYHYKLIIQQKDNKYLMSIPSMKTPTXXPGA

SEQ ID NO: 84008 - protein, 41 aa, Artificial Sequence; identical to SEQ ID NO: 32181
  Cyclic GFR-binding peptide
  MOD_RES (1), (3), (35), (36): Xaa is C or S

SEQ ID NO: 84009 - protein, 28 aa, Artificial Sequence
  Cyclic GFR-binding peptide
VMGEYKFKIIQQKDNLYLMSIPEMKTPT

SEQ ID NO: 84010 - protein, 24 aa, Artificial Sequence
  Cyclic GFR-binding peptide
NRHKRLVVNKNEDYYLISTASMKE

SEQ ID NO: 84011 - protein, 27 aa, Artificial Sequence
  Cyclic GFR-binding peptide
  MOD_RES (1), (1): Xaa is C or S
XEEVIMRHKRLLLVRGNDYYLMSTAST

SEQ ID NO: 84012 - protein, 24 aa, Artificial Sequence
  Cyclic GFR-binding peptide
RYKKLVVNKNEDFYLISIANMKEP

SEQ ID NO: 84013 - protein, 27 aa, Artificial Sequence
  Cyclic GFR-binding peptide
MDRHKRLVVNNASDYYLISTASLRTPV

SEQ ID NO: 84014 - protein, 34 aa, Artificial Sequence; identical to SEQ ID NO: 32184
  Cyclic GFR-binding peptide
  MOD_RES (1), (3): Xaa is C or S

SEQ ID NO: 84015 - protein, 31 aa, Artificial Sequence
  Cyclic GFR-binding peptide
  MOD_RES (1), (1): Xaa is C or S
XSEVTMNRYKKLVVNKNEDFYLISIANMKEP

SEQ ID NO: 84016 - protein, 35 aa, Artificial Sequence; identical to SEQ ID NO: 32186
  Cyclic GFR-binding peptide
  MOD_RES (32), (33): Xaa is C or S

SEQ ID NO: 84017 - protein, 38 aa, Artificial Sequence; identical to SEQ ID NO: 32187
  Cyclic GFR-binding peptide
  MOD_RES (2), (33), (34): Xaa is C or S

SEQ ID NO: 84018 - protein, 23 aa, Artificial Sequence
  Cyclic GFR-binding peptide
VIMYHYKLLLVRGNDKYLMSIPS

SEQ ID NO: 84019 - protein, 33 aa, Artificial Sequence
  Cyclic GFR-binding peptide
  MOD_RES (27), (28): Xaa is C or S
NRYKKLVVNKNEDFYLISIANMKEPVXXPEPIG

SEQ ID NO: 84020 - protein, 34 aa, Artificial Sequence; identical to SEQ ID NO: 32188
  Cyclic GFR-binding peptide
  MOD_RES (32), (33): Xaa is C or S

SEQ ID NO: 84021 - protein, 35 aa, Artificial Sequence; identical to SEQ ID NO: 32191
  Cyclic GFR-binding peptide
  MOD_RES (1), (3), (34), (35): Xaa is C or S

SEQ ID NO: 84022 - protein, 31 aa, Artificial Sequence
  Cyclic GFR-binding peptide
  MOD_RES (29), (30): Xaa is C or S
VIMPIKGYIKPTKGIFYLINIPSLDQSVXXP

SEQ ID NO: 84023 - protein, 21 aa, Artificial Sequence
  Cyclic GFR-binding peptide
YHYKLIIQQKDNKYLMSIPSM

SEQ ID NO: 84024 - protein, 33 aa, Artificial Sequence
  Cyclic GFR-binding peptide
  MOD_RES (28), (29): Xaa is C or S
MGRHKRLYTVVGKDYYLISTASLKTPVXXAKSA

SEQ ID NO: 84025 - protein, 27 aa, Artificial Sequence
  Cyclic GFR-binding peptide
  MOD_RES (1), (1): Xaa is C or S
XEEVIMYHYKLLLVRGNDKYLMSIPST

SEQ ID NO: 84026 - protein, 26 aa, Artificial Sequence
  Cyclic GFR-binding peptide
VMDRHKRLVVNNASDYYLISTASLRT

SEQ ID NO: 84027 - protein, 37 aa, Artificial Sequence; identical to SEQ ID NO: 32195
  Cyclic GFR-binding peptide
  MOD_RES (1), (3), (34), (35): Xaa is C or S

SEQ ID NO: 84028 - protein, 35 aa, Artificial Sequence; identical to SEQ ID NO: 32197
  Cyclic GFR-binding peptide
  MOD_RES (2), (4): Xaa is C or S

SEQ ID NO: 84029 - protein, 33 aa, Artificial Sequence
  Cyclic GFR-binding peptide
  MOD_RES (30), (31): Xaa is C or S
EVIMEYKFKLLVRGNDLYLMSIPETKVPAXXTS

SEQ ID NO: 84030 - protein, 34 aa, Artificial Sequence
  Cyclic GFR-binding peptide
  MOD_RES (30), (31): Xaa is C or S
RVIMPIKGYVKPKRGVFYLINIPSLAQPVXXPAA

SEQ ID NO: 84031 - protein, 30 aa, Artificial Sequence
  Cyclic GFR-binding peptide
  MOD_RES (28), (29): Xaa is C or S
IMRHKRLLLVRGNDYYLMSTASTKVPAXXT

SEQ ID NO: 84032 - protein, 36 aa, Artificial Sequence
  Cyclic GFR-binding peptide
  MOD_RES (30), (31): Xaa is C or S
VVMGRHKRLIIQQKDNYYLMSTASMKTPTXXPGASG

SEQ ID NO: 84033 - protein, 31 aa, Artificial Sequence
  Cyclic GFR-binding peptide
  MOD_RES (27), (28): Xaa is C or S
DYHYKLVVNNASDKYLISIPSLRTPVXXTPP

SEQ ID NO: 84034 - protein, 39 aa, Artificial Sequence; identical to SEQ ID NO: 32202
  Cyclic GFR-binding peptide
  MOD_RES (1), (33), (34): Xaa is C or S

SEQ ID NO: 84035 - protein, 32 aa, Artificial Sequence
  Cyclic GFR-binding peptide
  MOD_RES (29), (30): Xaa is C or S
VMDEYKFKVVNNASDLYLISIPELRTPVXXTP

SEQ ID NO: 84036 - protein, 26 aa, Artificial Sequence
  Cyclic GFR-binding peptide
VVMDRHKRLVVNNASDYYLISTASLR

SEQ ID NO: 84037 - protein, 24 aa, Artificial Sequence
  Cyclic GFR-binding peptide
TMNPIKGYVVNKNEDFYLINIPSM

SEQ ID NO: 84038 - protein, 32 aa, Artificial Sequence
  Cyclic GFR-binding peptide
  MOD_RES (26), (27): Xaa is C or S
EYKFKVVNNASDLYLISIPELRTPVXXTPPTS

SEQ ID NO: 84039 - protein, 22 aa, Artificial Sequence
  Cyclic GFR-binding peptide
MNPIKGYVVNKNEDFYLINIPS

SEQ ID NO: 84040 - protein, 26 aa, Artificial Sequence
  Cyclic GFR-binding peptide
VMDYHYKLVVNNASDKYLISIPSLRT

SEQ ID NO: 84041 - protein, 35 aa, Artificial Sequence; identical to SEQ ID NO: 32205
  Cyclic GFR-binding peptide
  MOD_RES (31), (32): Xaa is C or S

SEQ ID NO: 84042 - protein, 20 aa, Artificial Sequence
  Cyclic GFR-binding peptide
RHKRLYTVVGKDYYLISTAS

SEQ ID NO: 84043 - protein, 23 aa, Artificial Sequence
  Cyclic GFR-binding peptide
MGYHYKLIIQQKDNKYLMSIPSM

SEQ ID NO: 84044 - protein, 34 aa, Artificial Sequence
  Cyclic GFR-binding peptide
  MOD_RES (30), (31): Xaa is C or S
EVIMYHYKLLLVRGNDKYLMSIPSTKVPAXXTSP

SEQ ID NO: 84045 - protein, 29 aa, Artificial Sequence
  Cyclic GFR-binding peptide
  MOD_RES (26), (27): Xaa is C or S
RHKRLVVNKNEDYYLISTASMKEPVXXPE

SEQ ID NO: 84046 - protein, 29 aa, Artificial Sequence
  Cyclic GFR-binding peptide
VTMNYHYKLVVNKNEDKYLISIPSMKEPV

SEQ ID NO: 84047 - protein, 25 aa, Artificial Sequence
  Cyclic GFR-binding peptide
IMRHKRLLLVRGNDYYLMSTASTKV

SEQ ID NO: 84048 - protein, 22 aa, Artificial Sequence
  Cyclic GFR-binding peptide
MDRHKRLVVNNAADYYLISTAS

SEQ ID NO: 84049 - protein, 31 aa, Artificial Sequence; identical to SEQ ID NO: 32208
  Cyclic GFR-binding peptide

SEQ ID NO: 84050 - protein, 34 aa, Artificial Sequence; identical to SEQ ID NO: 32209
  Cyclic GFR-binding peptide
  MOD_RES (31), (32): Xaa is C or S

SEQ ID NO: 84051 - protein, 23 aa, Artificial Sequence
  Cyclic GFR-binding peptide
RHKRLVVNNASDYYLISTASLRT

SEQ ID NO: 84052 - protein, 31 aa, Artificial Sequence
  Cyclic GFR-binding peptide
  MOD_RES (27), (28): Xaa is C or S
MYHYKLLLVRGNDKYLMSIPSTKVPAXXTSP

SEQ ID NO: 84053 - protein, 38 aa, Artificial Sequence; identical to SEQ ID NO: 32213
  Cyclic GFR-binding peptide
  MOD_RES (1), (3), (35), (36): Xaa is C or S

SEQ ID NO: 84054 - protein, 42 aa, Artificial Sequence; identical to SEQ ID NO: 32217
  Cyclic GFR-binding peptide
  MOD_RES (2), (4), (36), (37): Xaa is C or S

SEQ ID NO: 84055 - protein, 26 aa, Artificial Sequence
  Cyclic GFR-binding peptide
  MOD_RES (26), (26): Xaa is C or S
RHKRLIIQQKDNYYLMSTASMKTPTX

SEQ ID NO: 84056 - protein, 33 aa, Artificial Sequence; identical to SEQ ID NO: 32221
  Cyclic GFR-binding peptide
  MOD_RES (32), (33): Xaa is C or S

SEQ ID NO: 84057 - protein, 26 aa, Artificial Sequence
  Cyclic GFR-binding peptide
IMPIKGYIKPTKGIFYLINIPSLDQS

SEQ ID NO: 84058 - protein, 29 aa, Artificial Sequence
  Cyclic GFR-binding peptide
  MOD_RES (26), (27): Xaa is C or S
RYKKLVVNKNEDFYLISIANMKEPVXXPE

SEQ ID NO: 84059 - protein, 27 aa, Artificial Sequence
  Cyclic GFR-binding peptide
  MOD_RES (26), (27): Xaa is C or S
PIKGYVVNKNEDFYLINIPSMKEPVXX

SEQ ID NO: 84060 - protein, 30 aa, Artificial Sequence
  Cyclic GFR-binding peptide
  MOD_RES (2), (4): Xaa is C or S
SXKXSKVVMPIKGYVKPTRGVFYLINIPSL

SEQ ID NO: 84061 - protein, 30 aa, Artificial Sequence
  Cyclic GFR-binding peptide
  MOD_RES (28), (29): Xaa is C or S
MDEYKFKVVNNASDLYLISIPELRTPVXXT

SEQ ID NO: 84062 - protein, 30 aa, Artificial Sequence
  Cyclic GFR-binding peptide
ESVAMGRHKRLYTVVGKDYYLISTASLKTP

SEQ ID NO: 84063 - protein, 38 aa, Artificial Sequence; identical to SEQ ID NO: 32226
  Cyclic GFR-binding peptide
  MOD_RES (32), (33): Xaa is C or S

SEQ ID NO: 84064 - protein, 21 aa, Artificial Sequence
  Cyclic GFR-binding peptide
DYHYKLVVNNASDKYLISIPS

SEQ ID NO: 84065 - protein, 41 aa, Artificial Sequence; identical to SEQ ID NO: 32229
  Cyclic GFR-binding peptide
  MOD_RES (1), (3), (35), (36): Xaa is C or S

SEQ ID NO: 84066 - protein, 24 aa, Artificial Sequence
  Cyclic GFR-binding peptide
VMGEYKFKIIQQKDNLYLMSIPEM

SEQ ID NO: 84067 - protein, 35 aa, Artificial Sequence; identical to SEQ ID NO: 32230
  Cyclic GFR-binding peptide
  MOD_RES (31), (32): Xaa is C or S

SEQ ID NO: 84068 - protein, 29 aa, Artificial Sequence
  Cyclic GFR-binding peptide
  MOD_RES (26), (27): Xaa is C or S
RHKRLVVNNAADYYLISTASLRAPVXXSA

SEQ ID NO: 84069 - protein, 39 aa, Artificial Sequence; identical to SEQ ID NO: 32231
  Cyclic GFR-binding peptide
  MOD_RES (1), (3), (35), (36): Xaa is C or S

SEQ ID NO: 84070 - protein, 27 aa, Artificial Sequence
  Cyclic GFR-binding peptide
SEVTMNRHKRLVVNKNEDYYLISTASM

SEQ ID NO: 84071 - protein, 38 aa, Artificial Sequence; identical to SEQ ID NO: 32232
  Cyclic GFR-binding peptide
  MOD_RES (1), (33), (34): Xaa is C or S

SEQ ID NO: 84072 - protein, 26 aa, Artificial Sequence
  Cyclic GFR-binding peptide
VIMEYKFKLLVRGNDLYLMSIPETKV

SEQ ID NO: 84073 - protein, 32 aa, Artificial Sequence
  Cyclic GFR-binding peptide
  MOD_RES (1), (3): Xaa is C or S
XGXESVAMGRHKRLYTVVGKDYYLISTASLKT

SEQ ID NO: 84074 - protein, 30 aa, Artificial Sequence
  Cyclic GFR-binding peptide
  MOD_RES (2), (4): Xaa is C or S
LXGXEEVIMRHKRLLLVRGNDYYLMSTAST

SEQ ID NO: 84075 - protein, 30 aa, Artificial Sequence
  Cyclic GFR-binding peptide
  MOD_RES (2), (2): Xaa is C or S
GXRDVVMGEYKFKIIQQKDNLYLMSIPEMK

SEQ ID NO: 84076 - protein, 34 aa, Artificial Sequence; identical to SEQ ID NO: 32235
  Cyclic GFR-binding peptide
  MOD_RES (2), (33), (34): Xaa is C or S

SEQ ID NO: 84077 - protein, 33 aa, Artificial Sequence
  Cyclic GFR-binding peptide
  MOD_RES (29), (30): Xaa is C or S
VIMPIKGYIKPTKGIFYLINIPSLDQSVXXPSA

SEQ ID NO: 84078 - protein, 29 aa, Artificial Sequence
  Cyclic GFR-binding peptide
EEVIMYHYKLLLVRGNDKYLMSIPSTKVP

SEQ ID NO: 84079 - protein, 22 aa, Artificial Sequence
  Cyclic GFR-binding peptide
MPIKGYVKPTRGVFYLINIPSL

SEQ ID NO: 84080 - protein, 38 aa, Artificial Sequence; identical to SEQ ID NO: 32237
  Cyclic GFR-binding peptide
  MOD_RES (2), (4), (36), (37): Xaa is C or S

SEQ ID NO: 84081 - protein, 32 aa, Artificial Sequence; identical to SEQ ID NO: 32238
  Cyclic GFR-binding peptide
  MOD_RES (32), (32): Xaa is C or S

SEQ ID NO: 84082 - protein, 29 aa, Artificial Sequence
  Cyclic GFR-binding peptide
  MOD_RES (2), (2): Xaa is C or S
GXRDVVMGYHYKLIIQQKDNKYLMSIPSM

SEQ ID NO: 84083 - protein, 34 aa, Artificial Sequence; identical to SEQ ID NO: 32240
  Cyclic GFR-binding peptide
  MOD_RES (1), (3), (34): Xaa is C or S

SEQ ID NO: 84084 - protein, 37 aa, Artificial Sequence; identical to SEQ ID NO: 32241
  Cyclic GFR-binding peptide
  MOD_RES (1), (32), (33): Xaa is C or S

SEQ ID NO: 84085 - protein, 37 aa, Artificial Sequence; identical to SEQ ID NO: 32243
  Cyclic GFR-binding peptide
  MOD_RES (1), (3), (35), (36): Xaa is C or S

SEQ ID NO: 84086 - protein, 25 aa, Artificial Sequence
  Cyclic GFR-binding peptide
TMNEYKFKVVNKNEDLYLISIPEMK

SEQ ID NO: 84087 - protein, 26 aa, Artificial Sequence
  Cyclic GFR-binding peptide
MGRHKRLIIQQKDNYYLMSTASMKTP

SEQ ID NO: 84088 - protein, 29 aa, Artificial Sequence
  Cyclic GFR-binding peptide
  MOD_RES (1), (1): Xaa is C or S
XSEVTMNRHKRLVVNKNEDYYLISTASMK

SEQ ID NO: 84089 - protein, 21 aa, Artificial Sequence
  Cyclic GFR-binding peptide
RHKRLVVNNASDYYLISTASL

SEQ ID NO: 84090 - protein, 29 aa, Artificial Sequence
  Cyclic GFR-binding peptide
  MOD_RES (2), (4): Xaa is C or S
SXKXSKVIMPIKGYIKPTKGIFYLINIPS

SEQ ID NO: 84091 - protein, 35 aa, Artificial Sequence; identical to SEQ ID NO: 32246
  Cyclic GFR-binding peptide
  MOD_RES (1), (33), (34): Xaa is C or S

SEQ ID NO: 84092 - protein, 33 aa, Artificial Sequence
  Cyclic GFR-binding peptide
  MOD_RES (1), (3): Xaa is C or S
XGXRDVVMGRHKRLIIQQKDNYYLMSTASMKTP

SEQ ID NO: 84093 - protein, 29 aa, Artificial Sequence
  Cyclic GFR-binding peptide
  MOD_RES (29), (29): Xaa is C or S
VIMPIKGYVKPKRGVFYLINIPSLAQPVX

SEQ ID NO: 84094 - protein, 38 aa, Artificial Sequence; identical to SEQ ID NO: 32248
  Cyclic GFR-binding peptide
  MOD_RES (2), (33), (34): Xaa is C or S

SEQ ID NO: 84095 - protein, 25 aa, Artificial Sequence
  Cyclic GFR-binding peptide
VTMNRHKRLVVNKNEDYYLISTASM

SEQ ID NO: 84096 - protein, 39 aa, Artificial Sequence; identical to SEQ ID NO: 32249
  Cyclic GFR-binding peptide
  MOD_RES (2), (4), (35), (36): Xaa is C or S

SEQ ID NO: 84097 - protein, 26 aa, Artificial Sequence
  Cyclic GFR-binding peptide
DRHKRLVVNNAADYYLISTASLRAPV

SEQ ID NO: 84098 - protein, 27 aa, Artificial Sequence
  Cyclic GFR-binding peptide
  MOD_RES (26), (27): Xaa is C or S
YHYKLVVNKNEDKYLISIPSMKEPVXX

SEQ ID NO: 84099 - protein, 29 aa, Artificial Sequence
  Cyclic GFR-binding peptide
  MOD_RES (26), (27): Xaa is C or S
PIKGYVKPKRGVFYLINIPSLAQPVXXPA

SEQ ID NO: 84100 - protein, 26 aa, Artificial Sequence
  Cyclic GFR-binding peptide
  MOD_RES (26), (26): Xaa is C or S
EYKFKVVNKNEDLYLISIPEMKEPVX

SEQ ID NO: 84101 - protein, 33 aa, Artificial Sequence; identical to SEQ ID NO: 32251
  Cyclic GFR-binding peptide
  MOD_RES (32), (33): Xaa is C or S

SEQ ID NO: 84102 - protein, 37 aa, Artificial Sequence; identical to SEQ ID NO: 32252
  Cyclic GFR-binding peptide
  MOD_RES (2), (33), (34): Xaa is C or S

SEQ ID NO: 84103 - protein, 31 aa, Artificial Sequence
  Cyclic GFR-binding peptide
  MOD_RES (26), (27): Xaa is C or S
RHKRLVVNNAADYYLISTASLRAPVXXSAPA

SEQ ID NO: 84104 - protein, 29 aa, Artificial Sequence
  Cyclic GFR-binding peptide
  MOD_RES (2), (2): Xaa is C or S
GXEEVIMYHYKLLLVRGNDKYLMSIPSTK

SEQ ID NO: 84105 - protein, 30 aa, Artificial Sequence
  Cyclic GFR-binding peptide
RDVVMGRHKRLIIQQKDNYYLMSTASMKTP

SEQ ID NO: 84106 - protein, 25 aa, Artificial Sequence
  Cyclic GFR-binding peptide
MGEYKFKIIQQKDNLYLMSIPEMKT

SEQ ID NO: 84107 - protein, 34 aa, Artificial Sequence; identical to SEQ ID NO: 32255
  Cyclic GFR-binding peptide
  MOD_RES (1), (3), (34): Xaa is C or S

SEQ ID NO: 84108 - protein, 31 aa, Artificial Sequence; identical to SEQ ID NO: 32256
  Cyclic GFR-binding peptide

SEQ ID NO: 84109 - protein, 39 aa, Artificial Sequence; identical to SEQ ID NO: 32257
  Cyclic GFR-binding peptide
  MOD_RES (2), (4), (36), (37): Xaa is C or S

SEQ ID NO: 84110 - protein, 32 aa, Artificial Sequence
  Cyclic GFR-binding peptide
  MOD_RES (30), (31): Xaa is C or S
VVMGYHYKLIIQQKDNKYLMSIPSMKTPTXXP

SEQ ID NO: 84111 - protein, 26 aa, Artificial Sequence
  Cyclic GFR-binding peptide
  MOD_RES (26), (26): Xaa is C or S
PIKGYVKPKRGVFYLINIPSLAQPVX

SEQ ID NO: 84112 - protein, 23 aa, Artificial Sequence
  Cyclic GFR-binding peptide
YHYKLVVNNASDKYLISIPSLRT

SEQ ID NO: 84113 - protein, 38 aa, Artificial Sequence; identical to SEQ ID NO: 32262
  Cyclic GFR-binding peptide
  MOD_RES (32), (33): Xaa is C or S

SEQ ID NO: 84114 - protein, 23 aa, Artificial Sequence
  Cyclic GFR-binding peptide
VVMPIKGYVKPTRGVFYLINIPS

SEQ ID NO: 84115 - protein, 22 aa, Artificial Sequence
  Cyclic GFR-binding peptide
PIKGYVVNKNEDFYLINIPSMK

SEQ ID NO: 84116 - protein, 34 aa, Artificial Sequence; identical to SEQ ID NO: 20692
  Cyclic GFR-binding peptide
  MOD_RES (2), (4): Xaa is C or S

SEQ ID NO: 84117 - protein, 31 aa, Artificial Sequence
  Cyclic GFR-binding peptide
  MOD_RES (26), (27): Xaa is C or S
RHKRLLLVRGNDYYLMSTASTKVPAXXTSPV

SEQ ID NO: 84118 - protein, 30 aa, Artificial Sequence
  Cyclic GFR-binding peptide
  MOD_RES (29), (30): Xaa is C or S
VIMRHKRLLLVRGNDYYLMSTASTKVPAXX

SEQ ID NO: 84119 - protein, 24 aa, Artificial Sequence
  Cyclic GFR-binding peptide
PIKGYVKPKRGVFYLINIPSLAQP

SEQ ID NO: 84120 - protein, 33 aa, Artificial Sequence
  Cyclic GFR-binding peptide
  MOD_RES (27), (28): Xaa is C or S
GYHYKLIIQQKDNKYLMSIPSMKTPTXXPGASG

SEQ ID NO: 84121 - protein, 31 aa, Artificial Sequence
  Cyclic GFR-binding peptide
  MOD_RES (29), (30): Xaa is C or S
VMDYHYKLVVNNASDKYLISIPSLRTPVXXT

SEQ ID NO: 84122 - protein, 27 aa, Artificial Sequence
  Cyclic GFR-binding peptide
  MOD_RES (26), (27): Xaa is C or S
EYKFKIIQQKDNLYLMSIPEMKTPTXX

SEQ ID NO: 84123 - protein, 30 aa, Artificial Sequence
  Cyclic GFR-binding peptide
  MOD_RES (28), (29): Xaa is C or S
MGYHYKLIIQQKDNKYLMSIPSMKTPTXXP

SEQ ID NO: 84124 - protein, 30 aa, Artificial Sequence; identical to SEQ ID NO: 32269
  Cyclic GFR-binding peptide

SEQ ID NO: 84125 - protein, 32 aa, Artificial Sequence; identical to SEQ ID NO: 32270
  Cyclic GFR-binding peptide
  MOD_RES (32), (32): Xaa is C or S

SEQ ID NO: 84126 - protein, 28 aa, Artificial Sequence
  Cyclic GFR-binding peptide
TMNRHKRLVVNKNEDYYLISTASMKEPV

SEQ ID NO: 84127 - protein, 33 aa, Artificial Sequence
  Cyclic GFR-binding peptide
  MOD_RES (2), (4): Xaa is C or S
RXAXSEVTMNRYKKLVVNKNEDFYLISIANMKE

SEQ ID NO: 84128 - protein, 33 aa, Artificial Sequence
  Cyclic GFR-binding peptide
  MOD_RES (28), (29): Xaa is C or S
MGEYKFKIIQQKDNLYLMSIPEMKTPTXXPGAS

SEQ ID NO: 84129 - protein, 35 aa, Artificial Sequence; identical to SEQ ID NO: 32272
  Cyclic GFR-binding peptide
  MOD_RES (31), (32): Xaa is C or S

SEQ ID NO: 84130 - protein, 29 aa, Artificial Sequence
  Cyclic GFR-binding peptide
SEVVMDRHKRLVVNNASDYYLISTASLRT

SEQ ID NO: 84131 - protein, 24 aa, Artificial Sequence
  Cyclic GFR-binding peptide
VTMNYHYKLVVNKNEDKYLISIPS

SEQ ID NO: 84132 - protein, 27 aa, Artificial Sequence
  Cyclic GFR-binding peptide
VVMDRHKRLVVNNASDYYLISTASLRT

SEQ ID NO: 84133 - protein, 28 aa, Artificial Sequence
  Cyclic GFR-binding peptide
  MOD_RES (1), (1): Xaa is C or S
XEEVIMYHYKLLLVRGNDKYLMSIPSTK

SEQ ID NO: 84134 - protein, 31 aa, Artificial Sequence
  Cyclic GFR-binding peptide
  MOD_RES (2), (2): Xaa is C or S
GXESVAMGRHKRLYTVVGKDYYLISTASLKT

SEQ ID NO: 84135 - protein, 27 aa, Artificial Sequence
  Cyclic GFR-binding peptide
EVVMDYHYKLVVNNASDKYLISIPSLR

SEQ ID NO: 84136 - protein, 33 aa, Artificial Sequence; identical to SEQ ID NO: 32277
  Cyclic GFR-binding peptide
  MOD_RES (31), (32): Xaa is C or S

SEQ ID NO: 84137 - protein, 37 aa, Artificial Sequence; identical to SEQ ID NO: 32278
  Cyclic GFR-binding peptide
  MOD_RES (1), (33), (34): Xaa is C or S

SEQ ID NO: 84138 - protein, 30 aa, Artificial Sequence
  Cyclic GFR-binding peptide
  MOD_RES (29), (30): Xaa is C or S
TMNRHKRLVVNKNEDYYLISTASMKEPVXX

SEQ ID NO: 84139 - protein, 42 aa, Artificial Sequence; identical to SEQ ID NO: 32279
  Cyclic GFR-binding peptide
  MOD_RES (2), (4), (36), (37): Xaa is C or S

SEQ ID NO: 84140 - protein, 28 aa, Artificial Sequence
  Cyclic GFR-binding peptide
SEVVMDRHKRLVVNNASDYYLISTASLR

SEQ ID NO: 84141 - protein, 30 aa, Artificial Sequence; identical to SEQ ID NO: 32282
  Cyclic GFR-binding peptide

SEQ ID NO: 84142 - protein, 38 aa, Artificial Sequence; identical to SEQ ID NO: 32283
  Cyclic GFR-binding peptide
  MOD_RES (1), (3), (34), (35): Xaa is C or S

SEQ ID NO: 84143 - protein, 23 aa, Artificial Sequence
  Cyclic GFR-binding peptide
GRHKRLYTVVGKDYYLISTASLK

SEQ ID NO: 84144 - protein, 24 aa, Artificial Sequence
  Cyclic GFR-binding peptide
VTMNPIKGYVVNKNEDFYLINIPS

SEQ ID NO: 84145 - protein, 28 aa, Artificial Sequence
  Cyclic GFR-binding peptide
  MOD_RES (2), (2): Xaa is C or S
GXSEVVMDEYKFKVVNNASDLYLISIPE

SEQ ID NO: 84146 - protein, 25 aa, Artificial Sequence
  Cyclic GFR-binding peptide
EEVIMEYKFKLLVRGNDLYLMSIPE

SEQ ID NO: 84147 - protein, 32 aa, Artificial Sequence; identical to SEQ ID NO: 32285
  Cyclic GFR-binding peptide
  MOD_RES (2), (2): Xaa is C or S

SEQ ID NO: 84148 - protein, 37 aa, Artificial Sequence; identical to SEQ ID NO: 32286
  Cyclic GFR-binding peptide
  MOD_RES (1), (3), (35), (36): Xaa is C or S

SEQ ID NO: 84149 - protein, 30 aa, Artificial Sequence
  Cyclic GFR-binding peptide
  MOD_RES (26), (27): Xaa is C or S
EYKFKVVNKNEDLYLISIPEMKEPVXXPEP

SEQ ID NO: 84150 - protein, 28 aa, Artificial Sequence
  Cyclic GFR-binding peptide
  MOD_RES (1), (1): Xaa is C or S
XSEVTMNEYKFKVVNKNEDLYLISIPEM

SEQ ID NO: 84151 - protein, 27 aa, Artificial Sequence
  Cyclic GFR-binding peptide
EVVMDEYKFKVVNNASDLYLISIPELR

SEQ ID NO: 84152 - protein, 32 aa, Artificial Sequence
  Cyclic GFR-binding peptide
  MOD_RES (30), (31): Xaa is C or S
VVMDRHKRLVVNNAADYYLISTASLRAPVXXS

SEQ ID NO: 84153 - protein, 31 aa, Artificial Sequence; identical to SEQ ID NO: 32287
  Cyclic GFR-binding peptide

SEQ ID NO: 84154 - protein, 21 aa, Artificial Sequence
  Cyclic GFR-binding peptide
YHYKLVVNNASDKYLISIPSL

SEQ ID NO: 84155 - protein, 33 aa, Artificial Sequence; identical to SEQ ID NO: 32289
  Cyclic GFR-binding peptide
  MOD_RES (1), (3): Xaa is C or S

SEQ ID NO: 84156 - protein, 31 aa, Artificial Sequence
  Cyclic GFR-binding peptide
  MOD_RES (26), (27): Xaa is C or S
RHKRLIIQQKDNYYLMSTASMKTPTXXPGAS

SEQ ID NO: 84157 - protein, 29 aa, Artificial Sequence
  Cyclic GFR-binding peptide
  MOD_RES (1), (3): Xaa is C or S
XAXSEVTMNRYKKLVVNKNEDFYLISIAN

SEQ ID NO: 84158 - protein, 37 aa, Artificial Sequence; identical to SEQ ID NO: 32291
  Cyclic GFR-binding peptide
  MOD_RES (31), (32): Xaa is C or S

SEQ ID NO: 84159 - protein, 25 aa, Artificial Sequence
  Cyclic GFR-binding peptide
DRHKRLVVNNAADYYLISTASLRAP

SEQ ID NO: 84160 - protein, 32 aa, Artificial Sequence
  Cyclic GFR-binding peptide
  MOD_RES (26), (27): Xaa is C or S
PIKGYIKPTKGIFYLINIPSLDQSVXXPSASA

SEQ ID NO: 84161 - protein, 38 aa, Artificial Sequence; identical to SEQ ID NO: 32292
  Cyclic GFR-binding peptide
  MOD_RES (2), (33), (34): Xaa is C or S

SEQ ID NO: 84162 - protein, 27 aa, Artificial Sequence
  Cyclic GFR-binding peptide
  MOD_RES (26), (27): Xaa is C or S
RHKRLVVNKNEDYYLISTASMKEPVXX

SEQ ID NO: 84163 - protein, 33 aa, Artificial Sequence
  Cyclic GFR-binding peptide
  MOD_RES (28), (29): Xaa is C or S
MNEYKFKVVNKNEDLYLISIPEMKEPVXXPEPI

SEQ ID NO: 84164 - protein, 36 aa, Artificial Sequence
  Cyclic GFR-binding peptide
  MOD_RES (30), (31): Xaa is C or S
VTMNYHYKLVVNKNEDKYLISIPSMKEPVXXPEPIG

SEQ ID NO: 84165 - protein, 32 aa, Artificial Sequence
  Cyclic GFR-binding peptide
  MOD_RES (30), (31): Xaa is C or S
EVIMEYKFKLLVRGNDLYLMSIPETKVPAXXT

SEQ ID NO: 84166 - protein, 33 aa, Artificial Sequence
  Cyclic GFR-binding peptide
  MOD_RES (2), (4): Xaa is C or S
RXAXSEVTMNEYKFKVVNKNEDLYLISIPEMKE

SEQ ID NO: 84167 - protein, 24 aa, Artificial Sequence
  Cyclic GFR-binding peptide
EYKFKLLVRGNDLYLMSIPETKVP

SEQ ID NO: 84168 - protein, 23 aa, Artificial Sequence
  Cyclic GFR-binding peptide
GRHKRLIIQQKDNYYLMSTASMK

SEQ ID NO: 84169 - protein, 32 aa, Artificial Sequence; identical to SEQ ID NO: 32295
  Cyclic GFR-binding peptide
  MOD_RES (1), (1): Xaa is C or S

SEQ ID NO: 84170 - protein, 27 aa, Artificial Sequence
  Cyclic GFR-binding peptide
EVIMRHKRLLLVRGNDYYLMSTASTKV

SEQ ID NO: 84171 - protein, 35 aa, Artificial Sequence; identical to SEQ ID NO: 32298
  Cyclic GFR-binding peptide
  MOD_RES (2), (34), (35): Xaa is C or S

SEQ ID NO: 84172 - protein, 31 aa, Artificial Sequence
  Cyclic GFR-binding peptide
  MOD_RES (26), (27): Xaa is C or S
YHYKLLLVRGNDKYLMSIPSTKVPAXXTSPV

SEQ ID NO: 84173 - protein, 29 aa, Artificial Sequence
  Cyclic GFR-binding peptide
AAAAAAAAARYKKLVVNKNEDFYLISIAN

SEQ ID NO: 84174 - protein, 34 aa, Artificial Sequence
  Cyclic GFR-binding peptide
  MOD_RES (2), (4): Xaa is C or S
SXGXRDVVMGEYKFKIIQQKDNLYLMSIPEMKTP

SEQ ID NO: 84175 - protein, 34 aa, Artificial Sequence; identical to SEQ ID NO: 32301
  Cyclic GFR-binding peptide
  MOD_RES (31), (32): Xaa is C or S

SEQ ID NO: 84176 - protein, 36 aa, Artificial Sequence; identical to SEQ ID NO: 32302
  Cyclic GFR-binding peptide
  MOD_RES (2), (4), (36): Xaa is C or S

SEQ ID NO: 84177 - protein, 38 aa, Artificial Sequence; identical to SEQ ID NO: 32303
  Cyclic GFR-binding peptide
  MOD_RES (1), (3), (35), (36): Xaa is C or S

SEQ ID NO: 84178 - protein, 37 aa, Artificial Sequence; identical to SEQ ID NO: 32305
  Cyclic GFR-binding peptide
  MOD_RES (1), (33), (34): Xaa is C or S

SEQ ID NO: 84179 - protein, 36 aa, Artificial Sequence; identical to SEQ ID NO: 32307
  Cyclic GFR-binding peptide
  MOD_RES (1), (33), (34): Xaa is C or S

SEQ ID NO: 84180 - protein, 32 aa, Artificial Sequence
  Cyclic GFR-binding peptide
  MOD_RES (30), (31): Xaa is C or S
VTMNEYKFKVVNKNEDLYLISIPEMKEPVXXP

SEQ ID NO: 84181 - protein, 24 aa, Artificial Sequence
  Cyclic GFR-binding peptide
IMPIKGYIKPTKGIFYLINIPSLD

SEQ ID NO: 84182 - protein, 22 aa, Artificial Sequence
  Cyclic GFR-binding peptide
MGEYKFKIIQQKDNLYLMSIPE

SEQ ID NO: 84183 - protein, 25 aa, Artificial Sequence
  Cyclic GFR-binding peptide
RHKRLYTVVGKDYYLISTASLKTPV

SEQ ID NO: 84184 - protein, 21 aa, Artificial Sequence
  Cyclic GFR-binding peptide
GRHKRLYTVVGKDYYLISTAS

SEQ ID NO: 84185 - protein, 37 aa, Artificial Sequence; identical to SEQ ID NO: 32308
  Cyclic GFR-binding peptide
  MOD_RES (2), (4), (36), (37): Xaa is C or S

SEQ ID NO: 84186 - protein, 34 aa, Artificial Sequence
  Cyclic GFR-binding peptide
  MOD_RES (30), (31): Xaa is C or S
VVMDRHKRLVVNNAADYYLISTASLRAPVXXSAP

SEQ ID NO: 84187 - protein, 35 aa, Artificial Sequence
  Cyclic GFR-binding peptide
  MOD_RES (29), (30): Xaa is C or S
VMDRHKRLVVNNASDYYLISTASLRTPVXXTPPTS

SEQ ID NO: 84188 - protein, 36 aa, Artificial Sequence; identical to SEQ ID NO: 32310
  Cyclic GFR-binding peptide
  MOD_RES (2), (4), (35), (36): Xaa is C or S

SEQ ID NO: 84189 - protein, 39 aa, Artificial Sequence; identical to SEQ ID NO: 32311
  Cyclic GFR-binding peptide
  MOD_RES (1), (3), (34), (35): Xaa is C or S

SEQ ID NO: 84190 - protein, 28 aa, Artificial Sequence
  Cyclic GFR-binding peptide
VVMDYHYKLVVNNASDKYLISIPSLRTP

SEQ ID NO: 84191 - protein, 23 aa, Artificial Sequence
  Cyclic GFR-binding peptide
DRHKRLVVNNASDYYLISTASLR

SEQ ID NO: 84192 - protein, 39 aa, Artificial Sequence; identical to SEQ ID NO: 32312
  Cyclic GFR-binding peptide
  MOD_RES (2), (4), (36), (37): Xaa is C or S

SEQ ID NO: 84193 - protein, 29 aa, Artificial Sequence
  Cyclic GFR-binding peptide
  MOD_RES (29), (29): Xaa is C or S
VMGRHKRLIIQQKDNYYLMSTASMKTPTX

SEQ ID NO: 84194 - protein, 35 aa, Artificial Sequence; identical to SEQ ID NO: 32314
  Cyclic GFR-binding peptide
  MOD_RES (32), (33): Xaa is C or S

SEQ ID NO: 84195 - protein, 29 aa, Artificial Sequence
  Cyclic GFR-binding peptide
EVTMNRYKKLVVNKNEDFYLISIANMKEP

SEQ ID NO: 84196 - protein, 30 aa, Artificial Sequence
  Cyclic GFR-binding peptide
  MOD_RES (27), (28): Xaa is C or S
NPIKGYVVNKNEDFYLINIPSMKEPVXXPE

SEQ ID NO: 84197 - protein, 31 aa, Artificial Sequence
  Cyclic GFR-binding peptide
  MOD_RES (27), (28): Xaa is C or S
GEYKFKIIQQKDNLYLMSIPEMKTPTXXPGA

SEQ ID NO: 84198 - protein, 34 aa, Artificial Sequence; identical to SEQ ID NO: 32315
  Cyclic GFR-binding peptide
  MOD_RES (32), (33): Xaa is C or S

SEQ ID NO: 84199 - protein, 26 aa, Artificial Sequence
  Cyclic GFR-binding peptide
  MOD_RES (26), (26): Xaa is C or S
YHYKLIIQQKDNKYLMSIPSMKTPTX

SEQ ID NO: 84200 - protein, 24 aa, Artificial Sequence
  Cyclic GFR-binding peptide
RHKRLVVNKNEDYYLISTASMKEP

SEQ ID NO: 84201 - protein, 33 aa, Artificial Sequence
  Cyclic GFR-binding peptide
  MOD_RES (30), (31): Xaa is C or S
VVMDEYKFKVVNNASDLYLISIPELRTPVXXTP

SEQ ID NO: 84202 - protein, 35 aa, Artificial Sequence; identical to SEQ ID NO: 32318
  Cyclic GFR-binding peptide
  MOD_RES (2), (34), (35): Xaa is C or S

SEQ ID NO: 84203 - protein, 31 aa, Artificial Sequence
  Cyclic GFR-binding peptide
  MOD_RES (26), (27): Xaa is C or S
YHYKLIIQQKDNKYLMSIPSMKTPTXXPGAS

SEQ ID NO: 84204 - protein, 40 aa, Artificial Sequence; identical to SEQ ID NO: 32321
  Cyclic GFR-binding peptide
  MOD_RES (2), (4), (35), (36): Xaa is C or S

SEQ ID NO: 84205 - protein, 24 aa, Artificial Sequence
  Cyclic GFR-binding peptide
EYKFKVVNKNEDLYLISIPEMKEP

SEQ ID NO: 84206 - protein, 27 aa, Artificial Sequence
  Cyclic GFR-binding peptide
  MOD_RES (1), (1): Xaa is C or S
XESVAMGRHKRLYTVVGKDYYLISTAS

SEQ ID NO: 84207 - protein, 36 aa, Artificial Sequence; identical to SEQ ID NO: 32324
  Cyclic GFR-binding peptide
  MOD_RES (2), (4), (36): Xaa is C or S

SEQ ID NO: 84208 - protein, 30 aa, Artificial Sequence
  Cyclic GFR-binding peptide
  MOD_RES (1), (3): Xaa is C or S
XAXSEVTMNPIKGYVVNKNEDFYLINIPSM

SEQ ID NO: 84209 - protein, 33 aa, Artificial Sequence
  Cyclic GFR-binding peptide
  MOD_RES (30), (31): Xaa is C or S
VTMNRHKRLVVNKNEDYYLISTASMKEPVXXPE

SEQ ID NO: 84210 - protein, 26 aa, Artificial Sequence
  Cyclic GFR-binding peptide
DRHKRLVVNNASDYYLISTASLRTPV

SEQ ID NO: 84211 - protein, 33 aa, Artificial Sequence
  Cyclic GFR-binding peptide
  MOD_RES (2), (4): Xaa is C or S
RXAXSEVTMNYHYKLVVNKNEDKYLISIPSMKE

SEQ ID NO: 84212 - protein, 29 aa, Artificial Sequence
  Cyclic GFR-binding peptide
  MOD_RES (1), (1): Xaa is C or S
XSEVTMNEYKFKVVNKNEDLYLISIPEMK

SEQ ID NO: 84213 - protein, 35 aa, Artificial Sequence; identical to SEQ ID NO: 32325
  Cyclic GFR-binding peptide
  MOD_RES (1), (33), (34): Xaa is C or S

SEQ ID NO: 84214 - protein, 38 aa, Artificial Sequence; identical to SEQ ID NO: 32326
  Cyclic GFR-binding peptide
  MOD_RES (2), (34), (35): Xaa is C or S

SEQ ID NO: 84215 - protein, 27 aa, Artificial Sequence
  Cyclic GFR-binding peptide
  MOD_RES (27), (27): Xaa is C or S
MEYKFKLLVRGNDLYLMSIPETKVPAX

SEQ ID NO: 84216 - protein, 31 aa, Artificial Sequence
  Cyclic GFR-binding peptide
  MOD_RES (2), (4): Xaa is C or S
SXKXSKVIMPIKGYIKPTKGIFYLINIPSLD

SEQ ID NO: 84217 - protein, 24 aa, Artificial Sequence
  Cyclic GFR-binding peptide
VTMNRYKKLVVNKNEDFYLISIAN

SEQ ID NO: 84218 - protein, 29 aa, Artificial Sequence
  Cyclic GFR-binding peptide
  MOD_RES (27), (28): Xaa is C or S
GRHKRLYTVVGKDYYLISTASLKTPVXXA

SEQ ID NO: 84219 - protein, 29 aa, Artificial Sequence
  Cyclic GFR-binding peptide
  MOD_RES (29), (29): Xaa is C or S
VMDRHKRLVVNNAADYYLISTASLRAPVX

SEQ ID NO: 84220 - protein, 37 aa, Artificial Sequence; identical to SEQ ID NO: 32331
  Cyclic GFR-binding peptide
  MOD_RES (31), (32): Xaa is C or S

SEQ ID NO: 84221 - protein, 38 aa, Artificial Sequence; identical to SEQ ID NO: 32333
  Cyclic GFR-binding peptide
  MOD_RES (32), (33): Xaa is C or S

SEQ ID NO: 84222 - protein, 26 aa, Artificial Sequence
  Cyclic GFR-binding peptide
SEVTMNRHKRLVVNKNEDYYLISTAS

SEQ ID NO: 84223 - protein, 32 aa, Artificial Sequence; identical to SEQ ID NO: 32335
  Cyclic GFR-binding peptide
  MOD_RES (1), (1): Xaa is C or S

SEQ ID NO: 84224 - protein, 40 aa, Artificial Sequence; identical to SEQ ID NO: 32336
  Cyclic GFR-binding peptide
  MOD_RES (1), (3), (35), (36): Xaa is C or S

SEQ ID NO: 84225 - protein, 28 aa, Artificial Sequence
  Cyclic GFR-binding peptide
  MOD_RES (1), (1): Xaa is C or S
XEEVIMRHKRLLLVRGNDYYLMSTASTK

SEQ ID NO: 84226 - protein, 28 aa, Artificial Sequence
  Cyclic GFR-binding peptide
  MOD_RES (27), (28): Xaa is C or S
MPIKGYIKPTKGIFYLINIPSLDQSVXX

SEQ ID NO: 84227 - protein, 35 aa, Artificial Sequence; identical to SEQ ID NO: 32337
  Cyclic GFR-binding peptide
  MOD_RES (2), (33), (34): Xaa is C or S

SEQ ID NO: 84228 - protein, 31 aa, Artificial Sequence; identical to SEQ ID NO: 32339
  Cyclic GFR-binding peptide
  MOD_RES (31), (31): Xaa is C or S

SEQ ID NO: 84229 - protein, 30 aa, Artificial Sequence
  Cyclic GFR-binding peptide
  MOD_RES (30), (30): Xaa is C or S
EVIMYHYKLLLVRGNDKYLMSIPSTKVPAX

SEQ ID NO: 84230 - protein, 36 aa, Artificial Sequence
  Cyclic GFR-binding peptide
  MOD_RES (30), (31): Xaa is C or S
VTMNPIKGYVVNKNEDFYLINIPSMKEPVXXPEPIG

SEQ ID NO: 84231 - protein, 32 aa, Artificial Sequence; identical to SEQ ID NO: 32343
  Cyclic GFR-binding peptide
  MOD_RES (2), (2): Xaa is C or S

SEQ ID NO: 84232 - protein, 29 aa, Artificial Sequence
  Cyclic GFR-binding peptide
  MOD_RES (26), (27): Xaa is C or S
RHKRLYTVVGKDYYLISTASLKTPVXXAK

SEQ ID NO: 84233 - protein, 34 aa, Artificial Sequence
  Cyclic GFR-binding peptide
  MOD_RES (28), (29): Xaa is C or S
IMEYKFKLLVRGNDLYLMSIPETKVPAXXTSPVR

SEQ ID NO: 84234 - protein, 27 aa, Artificial Sequence
  Cyclic GFR-binding peptide
  MOD_RES (26), (27): Xaa is C or S
PIKGYVKPKRGVFYLINIPSLAQPVXX

SEQ ID NO: 84235 - protein, 24 aa, Artificial Sequence
  Cyclic GFR-binding peptide
GYHYKLIIQQKDNKYLMSIPSMKT

SEQ ID NO: 84236 - protein, 31 aa, Artificial Sequence
  Cyclic GFR-binding peptide
  MOD_RES (29), (30): Xaa is C or S
VVMPIKGYVKPTRGVFYLINIPSLDQPVXXP

SEQ ID NO: 84237 - protein, 30 aa, Artificial Sequence; identical to SEQ ID NO: 32344
  Cyclic GFR-binding peptide

SEQ ID NO: 84238 - protein, 30 aa, Artificial Sequence
  Cyclic GFR-binding peptide
  MOD_RES (26), (27): Xaa is C or S
YHYKLIIQQKDNKYLMSIPSMKTPTXXPGA

SEQ ID NO: 84239 - protein, 32 aa, Artificial Sequence
  Cyclic GFR-binding peptide
  MOD_RES (27), (28): Xaa is C or S
MRHKRLLLVRGNDYYLMSTASTKVPAXXTSPV

SEQ ID NO: 84240 - protein, 24 aa, Artificial Sequence
  Cyclic GFR-binding peptide
RHKRLLLVRGNDYYLMSTASTKVP

SEQ ID NO: 84241 - protein, 31 aa, Artificial Sequence
  Cyclic GFR-binding peptide
  MOD_RES (28), (29): Xaa is C or S
MGRHKRLYTVVGKDYYLISTASLKTPVXXAK

SEQ ID NO: 84242 - protein, 37 aa, Artificial Sequence; identical to SEQ ID NO: 32346
  Cyclic GFR-binding peptide
  MOD_RES (31), (32): Xaa is C or S

SEQ ID NO: 84243 - protein, 25 aa, Artificial Sequence
  Cyclic GFR-binding peptide
VIMPIKGYVKPKRGVFYLINIPSLA

SEQ ID NO: 84244 - protein, 34 aa, Artificial Sequence; identical to SEQ ID NO: 32348
  Cyclic GFR-binding peptide
  MOD_RES (1), (3): Xaa is C or S

SEQ ID NO: 84245 - protein, 31 aa, Artificial Sequence
  Cyclic GFR-binding peptide
  MOD_RES (29), (30): Xaa is C or S
VIMRHKRLLLVRGNDYYLMSTASTKVPAXXT

SEQ ID NO: 84246 - protein, 27 aa, Artificial Sequence
  Cyclic GFR-binding peptide
  MOD_RES (27), (27): Xaa is C or S
MPIKGYVKPTRGVFYLINIPSLDQPVX

SEQ ID NO: 84247 - protein, 29 aa, Artificial Sequence
  Cyclic GFR-binding peptide
  MOD_RES (29), (29): Xaa is C or S
VMDEYKFKVVNNASDLYLISIPELRTPVX

SEQ ID NO: 84248 - protein, 29 aa, Artificial Sequence
  Cyclic GFR-binding peptide
  MOD_RES (2), (4): Xaa is C or S
LXGXEEVIMEYKFKLLVRGNDLYLMSIPE

SEQ ID NO: 84249 - protein, 34 aa, Artificial Sequence; identical to SEQ ID NO: 32352
  Cyclic GFR-binding peptide
  MOD_RES (2), (4): Xaa is C or S

SEQ ID NO: 84250 - protein, 23 aa, Artificial Sequence
  Cyclic GFR-binding peptide
VMGEYKFKIIQQKDNLYLMSIPE

SEQ ID NO: 84251 - protein, 30 aa, Artificial Sequence
  Cyclic GFR-binding peptide
SEVTMNRYKKLVVNKNEDFYLISIANMKEP

SEQ ID NO: 84252 - protein, 30 aa, Artificial Sequence
  Cyclic GFR-binding peptide
  MOD_RES (27), (28): Xaa is C or S
DEYKFKVVNNASDLYLISIPELRTPVXXTP

SEQ ID NO: 84253 - protein, 37 aa, Artificial Sequence; identical to SEQ ID NO: 32353
  Cyclic GFR-binding peptide
  MOD_RES (2), (34), (35): Xaa is C or S

SEQ ID NO: 84254 - protein, 26 aa, Artificial Sequence
  Cyclic GFR-binding peptide
TMNRHKRLVVNKNEDYYLISTASMKE

SEQ ID NO: 84255 - protein, 35 aa, Artificial Sequence
  Cyclic GFR-binding peptide
  MOD_RES (29), (30): Xaa is C or S
VMDRHKRLVVNNAADYYLISTASLRAPVXXSAPAA

SEQ ID NO: 84256 - protein, 33 aa, Artificial Sequence
  Cyclic GFR-binding peptide
  MOD_RES (27), (28): Xaa is C or S
NYHYKLIVNSSDDKYLVSIPSLKTPAXXPKPVH

SEQ ID NO: 84257 - protein, 30 aa, Artificial Sequence
  Cyclic GFR-binding peptide
  MOD_RES (1), (1): Xaa is C or S
XEEVIMRHKRLLLVRGNDYYLMSTASTKVP

SEQ ID NO: 84258 - protein, 35 aa, Artificial Sequence; identical to SEQ ID NO: 32358
  Cyclic GFR-binding peptide
  MOD_RES (32), (33): Xaa is C or S

SEQ ID NO: 84259 - protein, 27 aa, Artificial Sequence
  Cyclic GFR-binding peptide
  MOD_RES (27), (27): Xaa is C or S
GYHYKLIIQQKDNKYLMSIPSMKTPTX

SEQ ID NO: 84260 - protein, 32 aa, Artificial Sequence; identical to SEQ ID NO: 32361
  Cyclic GFR-binding peptide
  MOD_RES (32), (32): Xaa is C or S

SEQ ID NO: 84261 - protein, 36 aa, Artificial Sequence; identical to SEQ ID NO: 32360
  Cyclic GFR-binding peptide
  MOD_RES (1), (32), (33): Xaa is C or S

SEQ ID NO: 84262 - protein, 28 aa, Artificial Sequence
  Cyclic GFR-binding peptide
  MOD_RES (27), (28): Xaa is C or S
MYHYKLLLVRGNDKYLMSIPSTKVPAXX

SEQ ID NO: 84263 - protein, 32 aa, Artificial Sequence
  Cyclic GFR-binding peptide
  MOD_RES (2), (4): Xaa is C or S
LXGXEEVIMYHYKLLLVRGNDKYLMSIPSTKV

SEQ ID NO: 84264 - protein, 29 aa, Artificial Sequence
  Cyclic GFR-binding peptide
AAAAAAAAAPIKGYVVNKNEDFYLINIPS

SEQ ID NO: 84265 - protein, 23 aa, Artificial Sequence
  Cyclic GFR-binding peptide
TMNPIKGYVVNKNEDFYLINIPS

SEQ ID NO: 84266 - protein, 33 aa, Artificial Sequence; identical to SEQ ID NO: 32363
  Cyclic GFR-binding peptide
  MOD_RES (31), (32): Xaa is C or S

SEQ ID NO: 84267 - protein, 27 aa, Artificial Sequence
  Cyclic GFR-binding peptide
  MOD_RES (2), (2): Xaa is C or S
KXSRVIMPIKGYVKPKRGVFYLINIPS

SEQ ID NO: 84268 - protein, 34 aa, Artificial Sequence
  Cyclic GFR-binding peptide
  MOD_RES (28), (29): Xaa is C or S
MGYHYKLIIQQKDNKYLMSIPSMKTPTXXPGASG

SEQ ID NO: 84269 - protein, 21 aa, Artificial Sequence
  Cyclic GFR-binding peptide
NPIKGYVVNKNEDFYLINIPS

SEQ ID NO: 84270 - protein, 31 aa, Artificial Sequence
  Cyclic GFR-binding peptide
  MOD_RES (2), (4): Xaa is C or S
SXGXRDVVMGRHKRLIIQQKDNYYLMSTASM

SEQ ID NO: 84271 - protein, 29 aa, Artificial Sequence
  Cyclic GFR-binding peptide
EEVIMRHKRLLLVRGNDYYLMSTASTKVP

SEQ ID NO: 84272 - protein, 22 aa, Artificial Sequence
  Cyclic GFR-binding peptide
DRHKRLVVNNAADYYLISTASL

SEQ ID NO: 84273 - protein, 39 aa, Artificial Sequence; identical to SEQ ID NO: 32367
  Cyclic GFR-binding peptide
  MOD_RES (2), (34), (35): Xaa is C or S

SEQ ID NO: 84274 - protein, 28 aa, Artificial Sequence
  Cyclic GFR-binding peptide
TMNPIKGYVVNKNEDFYLINIPSMKEPV

SEQ ID NO: 84275 - protein, 29 aa, Artificial Sequence
  Cyclic GFR-binding peptide
AAAAAAAAAPIKGYIKPTKGIFYLINIPS

SEQ ID NO: 84276 - protein, 31 aa, Artificial Sequence
  Cyclic GFR-binding peptide
  MOD_RES (29), (30): Xaa is C or S
VMGYHYKLIIQQKDNKYLMSIPSMKTPTXXP

SEQ ID NO: 84277 - protein, 25 aa, Artificial Sequence
  Cyclic GFR-binding peptide
SKVVMPIKGYVKPTRGVFYLINIPS

SEQ ID NO: 84278 - protein, 38 aa, Artificial Sequence; identical to SEQ ID NO: 32371
  Cyclic GFR-binding peptide
  MOD_RES (1), (33), (34): Xaa is C or S

SEQ ID NO: 84279 - protein, 33 aa, Artificial Sequence; identical to SEQ ID NO: 32373
  Cyclic GFR-binding peptide
  MOD_RES (2), (33): Xaa is C or S

SEQ ID NO: 84280 - protein, 36 aa, Artificial Sequence; identical to SEQ ID NO: 32375
  Cyclic GFR-binding peptide
  MOD_RES (1), (33), (34): Xaa is C or S

SEQ ID NO: 84281 - protein, 41 aa, Artificial Sequence; identical to SEQ ID NO: 32376
  Cyclic GFR-binding peptide
  MOD_RES (2), (4), (35), (36): Xaa is C or S

SEQ ID NO: 84282 - protein, 30 aa, Artificial Sequence
  Cyclic GFR-binding peptide
  MOD_RES (28), (29): Xaa is C or S
MNEYKFKVVNKNEDLYLISIPEMKEPVXXP

SEQ ID NO: 84283 - protein, 35 aa, Artificial Sequence
  Cyclic GFR-binding peptide
  MOD_RES (30), (31): Xaa is C or S
EVIMRHKRLLLVRGNDYYLMSTASTKVPAXXTSPV

SEQ ID NO: 84284 - protein, 34 aa, Artificial Sequence; identical to SEQ ID NO: 32377
  Cyclic GFR-binding peptide
  MOD_RES (31), (32): Xaa is C or S

SEQ ID NO: 84285 - protein, 32 aa, Artificial Sequence
  Cyclic GFR-binding peptide
  MOD_RES (2), (4): Xaa is C or S
LXGXEEVIMEYKFKLLVRGNDLYLMSIPETKV

SEQ ID NO: 84286 - protein, 30 aa, Artificial Sequence
  Cyclic GFR-binding peptide
SEVVMDEYKFKVVNNASDLYLISIPELRTP

SEQ ID NO: 84287 - protein, 33 aa, Artificial Sequence
  Cyclic GFR-binding peptide
  MOD_RES (1), (3): Xaa is C or S
XAXSEVTMNYHYKLVVNKNEDKYLISIPSMKEP

SEQ ID NO: 84288 - protein, 31 aa, Artificial Sequence
  Cyclic GFR-binding peptide
  MOD_RES (30), (31): Xaa is C or S
KVVMPIKGYVKPTRGVFYLINIPSLDQPVXX

SEQ ID NO: 84289 - protein, 33 aa, Artificial Sequence
  Cyclic GFR-binding peptide
  MOD_RES (27), (28): Xaa is C or S
MPIKGYVKPTRGVFYLINIPSLDQPVXXPSASA

SEQ ID NO: 84290 - protein, 40 aa, Artificial Sequence; identical to SEQ ID NO: 32380
  Cyclic GFR-binding peptide
  MOD_RES (1), (3), (35), (36): Xaa is C or S

SEQ ID NO: 84291 - protein, 38 aa, Artificial Sequence; identical to SEQ ID NO: 32381
  Cyclic GFR-binding peptide
  MOD_RES (2), (33), (34): Xaa is C or S

SEQ ID NO: 84292 - protein, 33 aa, Artificial Sequence
  Cyclic GFR-binding peptide
  MOD_RES (28), (29): Xaa is C or S
IMPIKGYVKPKRGVFYLINIPSLAQPVXXPAAS

SEQ ID NO: 84293 - protein, 23 aa, Artificial Sequence
  Cyclic GFR-binding peptide
MGRHKRLYTVVGKDYYLISTASL

SEQ ID NO: 84294 - protein, 26 aa, Artificial Sequence
  Cyclic GFR-binding peptide
EVTMNEYKFKVVNKNEDLYLISIPEM

SEQ ID NO: 84295 - protein, 32 aa, Artificial Sequence; identical to SEQ ID NO: 32382
  Cyclic GFR-binding peptide
  MOD_RES (31), (32): Xaa is C or S

SEQ ID NO: 84296 - protein, 37 aa, Artificial Sequence; identical to SEQ ID NO: 32384
  Cyclic GFR-binding peptide
  MOD_RES (1), (33), (34): Xaa is C or S

SEQ ID NO: 84297 - protein, 30 aa, Artificial Sequence
  Cyclic GFR-binding peptide
  MOD_RES (30), (30): Xaa is C or S
VTMNPIKGYVVNKNEDFYLINIPSMKEPVX

SEQ ID NO: 84298 - protein, 33 aa, Artificial Sequence; identical to SEQ ID NO: 32385
  Cyclic GFR-binding peptide
  MOD_RES (1), (33): Xaa is C or S

SEQ ID NO: 84299 - protein, 32 aa, Artificial Sequence
  Cyclic GFR-binding peptide
  MOD_RES (30), (31): Xaa is C or S
VVMDYHYKLVVNNASDKYLISIPSLRTPVXXT

SEQ ID NO: 84300 - protein, 27 aa, Artificial Sequence
  Cyclic GFR-binding peptide
VMDEYKFKVVNNASDLYLISIPELRTP

SEQ ID NO: 84301 - protein, 31 aa, Artificial Sequence
  Cyclic GFR-binding peptide
  MOD_RES (26), (27): Xaa is C or S
EYKFKIIQQKDNLYLMSIPEMKTPTXXPGAS

SEQ ID NO: 84302 - protein, 24 aa, Artificial Sequence
  Cyclic GFR-binding peptide
MPIKGYIKPTKGIFYLINIPSLDQ

SEQ ID NO: 84303 - protein, 34 aa, Artificial Sequence
  Cyclic GFR-binding peptide
  MOD_RES (29), (30): Xaa is C or S
VIMYHYKLLLVRGNDKYLMSIPSTKVPAXXTSPV

SEQ ID NO: 84304 - protein, 30 aa, Artificial Sequence
  Cyclic GFR-binding peptide
  MOD_RES (1), (3): Xaa is C or S
XAXSEVTMNRHKRLVVNKNEDYYLISTASM

SEQ ID NO: 84305 - protein, 30 aa, Artificial Sequence
  Cyclic GFR-binding peptide
  MOD_RES (2), (4): Xaa is C or S
RXGXSEVVMDYHYKLVVNNASDKYLISIPS

SEQ ID NO: 84306 - protein, 25 aa, Artificial Sequence
  Cyclic GFR-binding peptide
MPIKGYVKPKRGVFYLINIPSLAQP

SEQ ID NO: 84307 - protein, 24 aa, Artificial Sequence
  Cyclic GFR-binding peptide
IMRHKRLLLVRGNDYYLMSTASTK

SEQ ID NO: 84308 - protein, 34 aa, Artificial Sequence; identical to SEQ ID NO: 32388
  Cyclic GFR-binding peptide
  MOD_RES (1), (33), (34): Xaa is C or S

SEQ ID NO: 84309 - protein, 30 aa, Artificial Sequence
  Cyclic GFR-binding peptide
  MOD_RES (1), (1): Xaa is C or S
XSRVIMPIKGYVKPKRGVFYLINIPSLAQP

SEQ ID NO: 84310 - protein, 29 aa, Artificial Sequence
  Cyclic GFR-binding peptide
EVVMDRHKRLVVNNASDYYLISTASLRTP

SEQ ID NO: 84311 - protein, 30 aa, Artificial Sequence; identical to SEQ ID NO: 32389
  Cyclic GFR-binding peptide

SEQ ID NO: 84312 - protein, 36 aa, Artificial Sequence; identical to SEQ ID NO: 32391
  Cyclic GFR-binding peptide
  MOD_RES (1), (33), (34): Xaa is C or S

SEQ ID NO: 84313 - protein, 31 aa, Artificial Sequence
  Cyclic GFR-binding peptide
  MOD_RES (29), (30): Xaa is C or S
AMGRHKRLYTVVGKDYYLISTASLKTPVXXA

SEQ ID NO: 84314 - protein, 31 aa, Artificial Sequence
  Cyclic GFR-binding peptide
  MOD_RES (2), (4): Xaa is C or S
RXAXSEVTMNRYKKLVVNKNEDFYLISIANM

SEQ ID NO: 84315 - protein, 32 aa, Artificial Sequence
  Cyclic GFR-binding peptide
  MOD_RES (27), (28): Xaa is C or S
DEYKFKVVNNASDLYLISIPELRTPVXXTPPT

SEQ ID NO: 84316 - protein, 37 aa, Artificial Sequence; identical to SEQ ID NO: 32392
  Cyclic GFR-binding peptide
  MOD_RES (1), (3), (34), (35): Xaa is C or S

SEQ ID NO: 84317 - protein, 27 aa, Artificial Sequence
  Cyclic GFR-binding peptide
  MOD_RES (26), (27): Xaa is C or S
RHKRLVVNNAADYYLISTASLRAPVXX

SEQ ID NO: 84318 - protein, 27 aa, Artificial Sequence
  Cyclic GFR-binding peptide
  MOD_RES (2), (2): Xaa is C or S
GXEEVIMYHYKLLLVRGNDKYLMSIPS

SEQ ID NO: 84319 - protein, 40 aa, Artificial Sequence; identical to SEQ ID NO: 32394
  Cyclic GFR-binding peptide
  MOD_RES (1), (3), (35), (36): Xaa is C or S

SEQ ID NO: 84320 - protein, 22 aa, Artificial Sequence
  Cyclic GFR-binding peptide
PIKGYVKPTRGVFYLINIPSLD

SEQ ID NO: 84321 - protein, 21 aa, Artificial Sequence
  Cyclic GFR-binding peptide
NYHYKLVVNKNEDKYLISIPS

SEQ ID NO: 84322 - protein, 33 aa, Artificial Sequence; identical to SEQ ID NO: 32396
  Cyclic GFR-binding peptide
  MOD_RES (1), (33): Xaa is C or S

SEQ ID NO: 84323 - protein, 39 aa, Artificial Sequence; identical to SEQ ID NO: 32400
  Cyclic GFR-binding peptide
  MOD_RES (2), (34), (35): Xaa is C or S

SEQ ID NO: 84324 - protein, 33 aa, Artificial Sequence; identical to SEQ ID NO: 32401
  Cyclic GFR-binding peptide
  MOD_RES (1), (3): Xaa is C or S

SEQ ID NO: 84325 - protein, 23 aa, Artificial Sequence
  Cyclic GFR-binding peptide
EYKFKIIQQKDNLYLMSIPEMKT

SEQ ID NO: 84326 - protein, 33 aa, Artificial Sequence; identical to SEQ ID NO: 32402
  Cyclic GFR-binding peptide
  MOD_RES (1), (3): Xaa is C or S

SEQ ID NO: 84327 - protein, 37 aa, Artificial Sequence; identical to SEQ ID NO: 32403
  Cyclic GFR-binding peptide
  MOD_RES (1), (3), (35), (36): Xaa is C or S

SEQ ID NO: 84328 - protein, 34 aa, Artificial Sequence; identical to SEQ ID NO: 32404
  Cyclic GFR-binding peptide
  MOD_RES (2), (33), (34): Xaa is C or S

SEQ ID NO: 84329 - protein, 28 aa, Artificial Sequence
  Cyclic GFR-binding peptide
SVAMGRHKRLYTVVGKDYYLISTASLKT

SEQ ID NO: 84330 - protein, 31 aa, Artificial Sequence
  Cyclic GFR-binding peptide
  MOD_RES (2), (4): Xaa is C or S
RXGXAEVVMDRHKRLVVNNAADYYLISTASL

SEQ ID NO: 84331 - protein, 31 aa, Artificial Sequence
  Cyclic GFR-binding peptide
  MOD_RES (1), (3): Xaa is C or S
XGXRDVVMGRHKRLIIQQKDNYYLMSTASMK

SEQ ID NO: 84332 - protein, 30 aa, Artificial Sequence
  Cyclic GFR-binding peptide
  MOD_RES (2), (4): Xaa is C or S
SXKXSRVIMPIKGYVKPKRGVFYLINIPSL

SEQ ID NO: 84333 - protein, 30 aa, Artificial Sequence; identical to SEQ ID NO: 32407
  Cyclic GFR-binding peptide

SEQ ID NO: 84334 - protein, 38 aa, Artificial Sequence; identical to SEQ ID NO: 32408
  Cyclic GFR-binding peptide
  MOD_RES (32), (33): Xaa is C or S

SEQ ID NO: 84335 - protein, 22 aa, Artificial Sequence
  Cyclic GFR-binding peptide
MDEYKFKVVNNASDLYLISIPE

SEQ ID NO: 84336 - protein, 30 aa, Artificial Sequence
  Cyclic GFR-binding peptide
  MOD_RES (29), (30): Xaa is C or S
TMNRYKKLVVNKNEDFYLISIANMKEPVXX

SEQ ID NO: 84337 - protein, 39 aa, Artificial Sequence; identical to SEQ ID NO: 32409
  Cyclic GFR-binding peptide
  MOD_RES (2), (33), (34): Xaa is C or S

SEQ ID NO: 84338 - protein, 36 aa, Artificial Sequence
  Cyclic GFR-binding peptide
  MOD_RES (30), (31): Xaa is C or S
VVMNYHYKLIVNSSDDKYLVSIPSLKTPAXXPKPVH

SEQ ID NO: 84339 - protein, 25 aa, Artificial Sequence
  Cyclic GFR-binding peptide
VVMDRHKRLVVNNASDYYLISTASL

SEQ ID NO: 84340 - protein, 34 aa, Artificial Sequence
  Cyclic GFR-binding peptide
  MOD_RES (30), (31): Xaa is C or S
VVMDYHYKLVVNNASDKYLISIPSLRTPVXXTPP

SEQ ID NO: 84341 - protein, 39 aa, Artificial Sequence; identical to SEQ ID NO: 32412
  Cyclic GFR-binding peptide
  MOD_RES (1), (3), (35), (36): Xaa is C or S

SEQ ID NO: 84342 - protein, 34 aa, Artificial Sequence
  Cyclic GFR-binding peptide
  MOD_RES (29), (30): Xaa is C or S
TMNYHYKLVVNKNEDKYLISIPSMKEPVXXPEPI

SEQ ID NO: 84343 - protein, 26 aa, Artificial Sequence
  Cyclic GFR-binding peptide
GYHYKLIIQQKDNKYLMSIPSMKTPT

SEQ ID NO: 84344 - protein, 26 aa, Artificial Sequence
  Cyclic GFR-binding peptide
  MOD_RES (26), (26): Xaa is C or S
YHYKLVVNKNEDKYLISIPSMKEPVX

SEQ ID NO: 84345 - protein, 25 aa, Artificial Sequence
  Cyclic GFR-binding peptide
PIKGYVVNKNEDFYLINIPSMKEPV

SEQ ID NO: 84346 - protein, 27 aa, Artificial Sequence
  Cyclic GFR-binding peptide
VMDRHKRLVVNNAADYYLISTASLRAP

SEQ ID NO: 84347 - protein, 36 aa, Artificial Sequence; identical to SEQ ID NO: 32415
  Cyclic GFR-binding peptide
  MOD_RES (32), (33): Xaa is C or S

SEQ ID NO: 84348 - protein, 28 aa, Artificial Sequence
  Cyclic GFR-binding peptide
  MOD_RES (27), (28): Xaa is C or S
NRHKRLVVNKNEDYYLISTASMKEPVXX

SEQ ID NO: 84349 - protein, 29 aa, Artificial Sequence
  Cyclic GFR-binding peptide
AAAAAAAAARHKRLYTVVGKDYYLISTAS

SEQ ID NO: 84350 - protein, 34 aa, Artificial Sequence; identical to SEQ ID NO: 32416
  Cyclic GFR-binding peptide
  MOD_RES (1), (3), (34): Xaa is C or S

SEQ ID NO: 84351 - protein, 33 aa, Artificial Sequence
  Cyclic GFR-binding peptide
  MOD_RES (1), (3): Xaa is C or S
XAXSEVTMNEYKFKVVNKNEDLYLISIPEMKEP

SEQ ID NO: 84352 - protein, 27 aa, Artificial Sequence
  Cyclic GFR-binding peptide
  MOD_RES (1), (1): Xaa is C or S
XRDVVMGYHYKLIIQQKDNKYLMSIPS

SEQ ID NO: 84353 - protein, 26 aa, Artificial Sequence
  Cyclic GFR-binding peptide
VTMNEYKFKVVNKNEDLYLISIPEMK

SEQ ID NO: 84354 - protein, 29 aa, Artificial Sequence
  Cyclic GFR-binding peptide
  MOD_RES (2), (4): Xaa is C or S
LXGXEEVIMYHYKLLLVRGNDKYLMSIPS

SEQ ID NO: 84355 - protein, 29 aa, Artificial Sequence
  Cyclic GFR-binding peptide
SKVVMPIKGYVKPTRGVFYLINIPSLDQP

SEQ ID NO: 84356 - protein, 42 aa, Artificial Sequence; identical to SEQ ID NO: 32418
  Cyclic GFR-binding peptide
  MOD_RES (2), (4), (36), (37): Xaa is C or S

SEQ ID NO: 84357 - protein, 36 aa, Artificial Sequence; identical to SEQ ID NO: 32419
  Cyclic GFR-binding peptide
  MOD_RES (2), (4), (36): Xaa is C or S

SEQ ID NO: 84358 - protein, 36 aa, Artificial Sequence
  Cyclic GFR-binding peptide
  MOD_RES (30), (31): Xaa is C or S
VTMNRYKKLVVNKNEDFYLISIANMKEPVXXPEPIG

SEQ ID NO: 84359 - protein, 24 aa, Artificial Sequence
  Cyclic GFR-binding peptide
EVIMYHYKLLLVRGNDKYLMSIPS

SEQ ID NO: 84360 - protein, 35 aa, Artificial Sequence; identical to SEQ ID NO: 32421
  Cyclic GFR-binding peptide
  MOD_RES (1), (3), (35): Xaa is C or S

SEQ ID NO: 84361 - protein, 24 aa, Artificial Sequence
  Cyclic GFR-binding peptide
RHKRLVVNNAADYYLISTASLRAP

SEQ ID NO: 84362 - protein, 39 aa, Artificial Sequence; identical to SEQ ID NO: 32422
  Cyclic GFR-binding peptide
  MOD_RES (2), (34), (35): Xaa is C or S

SEQ ID NO: 84363 - protein, 26 aa, Artificial Sequence
  Cyclic GFR-binding peptide
TMNRYKKLVVNKNEDFYLISIANMKE

SEQ ID NO: 84364 - protein, 31 aa, Artificial Sequence
  Cyclic GFR-binding peptide
  MOD_RES (27), (28): Xaa is C or S
MPIKGYVKPKRGVFYLINIPSLAQPVXXPAA

SEQ ID NO: 84365 - protein, 30 aa, Artificial Sequence
  Cyclic GFR-binding peptide
  MOD_RES (29), (30): Xaa is C or S
VMGEYKFKIIQQKDNLYLMSIPEMKTPTXX

SEQ ID NO: 84366 - protein, 29 aa, Artificial Sequence
  Cyclic GFR-binding peptide
VTMNPIKGYVVNKNEDFYLINIPSMKEPV

SEQ ID NO: 84367 - protein, 40 aa, Artificial Sequence; identical to SEQ ID NO: 32423
  Cyclic GFR-binding peptide
  MOD_RES (1), (3), (35), (36): Xaa is C or S

SEQ ID NO: 84368 - protein, 27 aa, Artificial Sequence
  Cyclic GFR-binding peptide
EVVMDRHKRLVVNNASDYYLISTASLR

SEQ ID NO: 84369 - protein, 26 aa, Artificial Sequence
  Cyclic GFR-binding peptide
  MOD_RES (26), (26): Xaa is C or S
RHKRLVVNNAADYYLISTASLRAPVX

SEQ ID NO: 84370 - protein, 30 aa, Artificial Sequence
  Cyclic GFR-binding peptide
  MOD_RES (26), (27): Xaa is C or S
EYKFKIIQQKDNLYLMSIPEMKTPTXXPGA

SEQ ID NO: 84371 - protein, 24 aa, Artificial Sequence
  Cyclic GFR-binding peptide
YHYKLVVNKNEDKYLISIPSMKEP

SEQ ID NO: 84372 - protein, 30 aa, Artificial Sequence
  Cyclic GFR-binding peptide
  MOD_RES (27), (28): Xaa is C or S
MRHKRLLLVRGNDYYLMSTASTKVPAXXTS

SEQ ID NO: 84373 - protein, 32 aa, Artificial Sequence
  Cyclic GFR-binding peptide
  MOD_RES (28), (29): Xaa is C or S
MGEYKFKIIQQKDNLYLMSIPEMKTPTXXPGA

SEQ ID NO: 84374 - protein, 32 aa, Artificial Sequence
  Cyclic GFR-binding peptide
  MOD_RES (2), (2): Xaa is C or S
AXSEVTMNYHYKLVVNKNEDKYLISIPSMKEP

SEQ ID NO: 84375 - protein, 35 aa, Artificial Sequence; identical to SEQ ID NO: 32425
  Cyclic GFR-binding peptide
  MOD_RES (32), (33): Xaa is C or S

SEQ ID NO: 84376 - protein, 31 aa, Artificial Sequence
  Cyclic GFR-binding peptide
  MOD_RES (1), (3): Xaa is C or S
XGXSEVVMDRHKRLVVNNASDYYLISTASLR

SEQ ID NO: 84377 - protein, 22 aa, Artificial Sequence
  Cyclic GFR-binding peptide
MNRHKRLVVNKNEDYYLISTAS

SEQ ID NO: 84378 - protein, 32 aa, Artificial Sequence; identical to SEQ ID NO: 32432
  Cyclic GFR-binding peptide
  MOD_RES (31), (32): Xaa is C or S

SEQ ID NO: 84379 - protein, 26 aa, Artificial Sequence
  Cyclic GFR-binding peptide
SEVVMDRHKRLVVNNASDYYLISTAS

SEQ ID NO: 84380 - protein, 31 aa, Artificial Sequence
  Cyclic GFR-binding peptide
  MOD_RES (26), (27): Xaa is C or S
RYKKLVVNKNEDFYLISIANMKEPVXXPEPI

SEQ ID NO: 84381 - protein, 32 aa, Artificial Sequence; identical to SEQ ID NO: 32434
  Cyclic GFR-binding peptide
  MOD_RES (31), (32): Xaa is C or S

SEQ ID NO: 84382 - protein, 36 aa, Artificial Sequence
  Cyclic GFR-binding peptide
  MOD_RES (30), (31): Xaa is C or S
VVMDRHKRLVVNNASDYYLISTASLRTPVXXTPPTS

SEQ ID NO: 84383 - protein, 30 aa, Artificial Sequence
  Cyclic GFR-binding peptide
  MOD_RES (2), (2): Xaa is C or S
AXSEVTMNYHYKLVVNKNEDKYLISIPSMK

SEQ ID NO: 84384 - protein, 23 aa, Artificial Sequence
  Cyclic GFR-binding peptide
YHYKLIIQQKDNKYLMSIPSMKT

SEQ ID NO: 84385 - protein, 31 aa, Artificial Sequence; identical to SEQ ID NO: 32436
  Cyclic GFR-binding peptide
  MOD_RES (31), (31): Xaa is C or S

SEQ ID NO: 84386 - protein, 31 aa, Artificial Sequence; identical to SEQ ID NO: 32438
  Cyclic GFR-binding peptide
  MOD_RES (1), (1): Xaa is C or S

SEQ ID NO: 84387 - protein, 32 aa, Artificial Sequence; identical to SEQ ID NO: 32437
  Cyclic GFR-binding peptide
  MOD_RES (1), (32): Xaa is C or S

SEQ ID NO: 84388 - protein, 25 aa, Artificial Sequence
  Cyclic GFR-binding peptide
MNRYKKLVVNKNEDFYLISIANMKE

SEQ ID NO: 84389 - protein, 21 aa, Artificial Sequence
  Cyclic GFR-binding peptide
GRHKRLIIQQKDNYYLMSTAS

SEQ ID NO: 84390 - protein, 26 aa, Artificial Sequence
  Cyclic GFR-binding peptide
SEVTMNYHYKLVVNKNEDKYLISIPS

SEQ ID NO: 84391 - protein, 28 aa, Artificial Sequence
  Cyclic GFR-binding peptide
ESVAMGRHKRLYTVVGKDYYLISTASLK

SEQ ID NO: 84392 - protein, 36 aa, Artificial Sequence; identical to SEQ ID NO: 32440
  Cyclic GFR-binding peptide
  MOD_RES (1), (3), (35), (36): Xaa is C or S

SEQ ID NO: 84393 - protein, 26 aa, Artificial Sequence
  Cyclic GFR-binding peptide
  MOD_RES (26), (26): Xaa is C or S
RHKRLVVNNASDYYLISTASLRTPVX

SEQ ID NO: 84394 - protein, 31 aa, Artificial Sequence; identical to SEQ ID NO: 32442
  Cyclic GFR-binding peptide
  MOD_RES (31), (31): Xaa is C or S

SEQ ID NO: 84395 - protein, 38 aa, Artificial Sequence; identical to SEQ ID NO: 32443
  Cyclic GFR-binding peptide
  MOD_RES (1), (3), (34), (35): Xaa is C or S

SEQ ID NO: 84396 - protein, 30 aa, Artificial Sequence
  Cyclic GFR-binding peptide
  MOD_RES (1), (1): Xaa is C or S
XRDVVMGRHKRLIIQQKDNYYLMSTASMKT

SEQ ID NO: 84397 - protein, 34 aa, Artificial Sequence; identical to SEQ ID NO: 32445
  Cyclic GFR-binding peptide
  MOD_RES (1), (3): Xaa is C or S

SEQ ID NO: 84398 - protein, 27 aa, Artificial Sequence
  Cyclic GFR-binding peptide
KVIMPIKGYIKPTKGIFYLINIPSLDQ

SEQ ID NO: 84399 - protein, 40 aa, Artificial Sequence; identical to SEQ ID NO: 32446
  Cyclic GFR-binding peptide
  MOD_RES (1), (3), (34), (35): Xaa is C or S

SEQ ID NO: 84400 - protein, 37 aa, Artificial Sequence; identical to SEQ ID NO: 32448
  Cyclic GFR-binding peptide
  MOD_RES (2), (4), (36), (37): Xaa is C or S

SEQ ID NO: 84401 - protein, 39 aa, Artificial Sequence; identical to SEQ ID NO: 32449
  Cyclic GFR-binding peptide
  MOD_RES (1), (3), (34), (35): Xaa is C or S

SEQ ID NO: 84402 - protein, 34 aa, Artificial Sequence
  Cyclic GFR-binding peptide
  MOD_RES (2), (4): Xaa is C or S
RXAXSEVTMNRYKKLVVNKNEDFYLISIANMKEP

SEQ ID NO: 84403 - protein, 32 aa, Artificial Sequence
  Cyclic GFR-binding peptide
  MOD_RES (2), (4): Xaa is C or S
RXAXSEVTMNPIKGYVVNKNEDFYLINIPSMK

SEQ ID NO: 84404 - protein, 34 aa, Artificial Sequence; identical to SEQ ID NO: 32452
  Cyclic GFR-binding peptide
  MOD_RES (32), (33): Xaa is C or S

SEQ ID NO: 84405 - protein, 29 aa, Artificial Sequence
  Cyclic GFR-binding peptide
  MOD_RES (27), (28): Xaa is C or S
GYHYKLIIQQKDNKYLMSIPSMKTPTXXP

SEQ ID NO: 84406 - protein, 34 aa, Artificial Sequence
  Cyclic GFR-binding peptide
  MOD_RES (28), (29): Xaa is C or S
MNPIKGYVVNKNEDFYLINIPSMKEPVXXPEPIG

SEQ ID NO: 84407 - protein, 30 aa, Artificial Sequence
  Cyclic GFR-binding peptide
  MOD_RES (2), (4): Xaa is C or S
RXAXSEVTMNRYKKLVVNKNEDFYLISIAN

SEQ ID NO: 84408 - protein, 35 aa, Artificial Sequence
  Cyclic GFR-binding peptide
  MOD_RES (30), (31): Xaa is C or S
VVMGYHYKLIIQQKDNKYLMSIPSMKTPTXXPGAS

SEQ ID NO: 84409 - protein, 40 aa, Artificial Sequence; identical to SEQ ID NO: 32453
  Cyclic GFR-binding peptide
  MOD_RES (1), (3), (35), (36): Xaa is C or S

SEQ ID NO: 84410 - protein, 23 aa, Artificial Sequence
  Cyclic GFR-binding peptide
MDRHKRLVVNNASDYYLISTASL

SEQ ID NO: 84411 - protein, 28 aa, Artificial Sequence
  Cyclic GFR-binding peptide
VVMGEYKFKIIQQKDNLYLMSIPEMKTP

SEQ ID NO: 84412 - protein, 33 aa, Artificial Sequence
  Cyclic GFR-binding peptide
  MOD_RES (2), (4): Xaa is C or S
RXGXSEVVMDYHYKLVVNNASDKYLISIPSLRT

SEQ ID NO: 84413 - protein, 28 aa, Artificial Sequence
  Cyclic GFR-binding peptide
  MOD_RES (28), (28): Xaa is C or S
MNRHKRLVVNKNEDYYLISTASMKEPVX

SEQ ID NO: 84414 - protein, 24 aa, Artificial Sequence
  Cyclic GFR-binding peptide
NEYKFKVVNKNEDLYLISIPEMKE

SEQ ID NO: 84415 - protein, 37 aa, Artificial Sequence; identical to SEQ ID NO: 32454
  Cyclic GFR-binding peptide
  MOD_RES (2), (33), (34): Xaa is C or S

SEQ ID NO: 84416 - protein, 25 aa, Artificial Sequence
  Cyclic GFR-binding peptide
YHYKLVVNKNEDKYLISIPSMKEPV

SEQ ID NO: 84417 - protein, 22 aa, Artificial Sequence
  Cyclic GFR-binding peptide
NEYKFKVVNKNEDLYLISIPEM

SEQ ID NO: 84418 - protein, 35 aa, Artificial Sequence
  Cyclic GFR-binding peptide
  MOD_RES (29), (30): Xaa is C or S
VMGRHKRLIIQQKDNYYLMSTASMKTPTXXPGASG

SEQ ID NO: 84419 - protein, 32 aa, Artificial Sequence; identical to SEQ ID NO: 32456
  Cyclic GFR-binding peptide
  MOD_RES (31), (32): Xaa is C or S

SEQ ID NO: 84420 - protein, 32 aa, Artificial Sequence
  Cyclic GFR-binding peptide
  MOD_RES (28), (29): Xaa is C or S
MNPIKGYVVNKNEDFYLINIPSMKEPVXXPEP

SEQ ID NO: 84421 - protein, 27 aa, Artificial Sequence
  Cyclic GFR-binding peptide
SEVTMNEYKFKVVNKNEDLYLISIPEM

SEQ ID NO: 84422 - protein, 22 aa, Artificial Sequence
  Cyclic GFR-binding peptide
MGRHKRLIIQQKDNYYLMSTAS

SEQ ID NO: 84423 - protein, 22 aa, Artificial Sequence
  Cyclic GFR-binding peptide
EYKFKLLVRGNDLYLMSIPETK

SEQ ID NO: 84424 - protein, 33 aa, Artificial Sequence
  Cyclic GFR-binding peptide
  MOD_RES (28), (29): Xaa is C or S
MDRHKRLVVNNAADYYLISTASLRAPVXXSAPA

SEQ ID NO: 84425 - protein, 27 aa, Artificial Sequence
  Cyclic GFR-binding peptide
SEVVMDRHKRLVVNNASDYYLISTASL

SEQ ID NO: 84426 - protein, 35 aa, Artificial Sequence; identical to SEQ ID NO: 32458
  Cyclic GFR-binding peptide
  MOD_RES (2), (34), (35): Xaa is C or S

SEQ ID NO: 84427 - protein, 26 aa, Artificial Sequence
  Cyclic GFR-binding peptide
MNPIKGYVVNKNEDFYLINIPSMKEP

SEQ ID NO: 84428 - protein, 30 aa, Artificial Sequence
  Cyclic GFR-binding peptide
  MOD_RES (1), (3): Xaa is C or S
XGXEEVIMYHYKLLLVRGNDKYLMSIPSTK

SEQ ID NO: 84429 - protein, 30 aa, Artificial Sequence
  Cyclic GFR-binding peptide
  MOD_RES (29), (30): Xaa is C or S
VMDRHKRLVVNNASDYYLISTASLRTPVXX

SEQ ID NO: 84430 - protein, 29 aa, Artificial Sequence
  Cyclic GFR-binding peptide
  MOD_RES (29), (29): Xaa is C or S
VVMPIKGYVKPTRGVFYLINIPSLDQPVX

SEQ ID NO: 84431 - protein, 39 aa, Artificial Sequence; identical to SEQ ID NO: 32460
  Cyclic GFR-binding peptide
  MOD_RES (1), (3), (35), (36): Xaa is C or S

SEQ ID NO: 84432 - protein, 29 aa, Artificial Sequence
  Cyclic GFR-binding peptide
VVMGRHKRLIIQQKDNYYLMSTASMKTPT

SEQ ID NO: 84433 - protein, 38 aa, Artificial Sequence; identical to SEQ ID NO: 32462
  Cyclic GFR-binding peptide
  MOD_RES (2), (4), (36), (37): Xaa is C or S

SEQ ID NO: 84434 - protein, 25 aa, Artificial Sequence
  Cyclic GFR-binding peptide
VTMNPIKGYVVNKNEDFYLINIPSM

SEQ ID NO: 84435 - protein, 30 aa, Artificial Sequence
  Cyclic GFR-binding peptide
  MOD_RES (1), (1): Xaa is C or S
XSEVTMNYHYKLVVNKNEDKYLISIPSMKE

SEQ ID NO: 84436 - protein, 33 aa, Artificial Sequence
  Cyclic GFR-binding peptide
  MOD_RES (30), (31): Xaa is C or S
VVMGYHYKLIIQQKDNKYLMSIPSMKTPTXXPG

SEQ ID NO: 84437 - protein, 23 aa, Artificial Sequence
  Cyclic GFR-binding peptide
VIMPIKGYIKPTKGIFYLINIPS

SEQ ID NO: 84438 - protein, 27 aa, Artificial Sequence
  Cyclic GFR-binding peptide
  MOD_RES (27), (27): Xaa is C or S
DRHKRLVVNNASDYYLISTASLRTPVX

SEQ ID NO: 84439 - protein, 31 aa, Artificial Sequence; identical to SEQ ID NO: 32466
  Cyclic GFR-binding peptide
  MOD_RES (31), (31): Xaa is C or S

SEQ ID NO: 84440 - protein, 30 aa, Artificial Sequence
  Cyclic GFR-binding peptide
  MOD_RES (30), (30): Xaa is C or S
RVIMPIKGYVKPKRGVFYLINIPSLAQPVX

SEQ ID NO: 84441 - protein, 22 aa, Artificial Sequence
  Cyclic GFR-binding peptide
IMEYKFKLLVRGNDLYLMSIPE

SEQ ID NO: 84442 - protein, 25 aa, Artificial Sequence
  Cyclic GFR-binding peptide
RYKKLVVNKNEDFYLISIANMKEPV

SEQ ID NO: 84443 - protein, 30 aa, Artificial Sequence
  Cyclic GFR-binding peptide
  MOD_RES (2), (4): Xaa is C or S
RXAXSEVTMNPIKGYVVNKNEDFYLINIPS

SEQ ID NO: 84444 - protein, 27 aa, Artificial Sequence
  Cyclic GFR-binding peptide
  MOD_RES (26), (27): Xaa is C or S
YHYKLLLVRGNDKYLMSIPSTKVPAXX

SEQ ID NO: 84445 - protein, 33 aa, Artificial Sequence
  Cyclic GFR-binding peptide
  MOD_RES (1), (3): Xaa is C or S
XGXRDVVMGYHYKLIIQQKDNKYLMSIPSMKTP

SEQ ID NO: 84446 - protein, 35 aa, Artificial Sequence
  Cyclic GFR-binding peptide
  MOD_RES (29), (30): Xaa is C or S
VMNEYKFKIVNSSDDLYLVSIPELKTPAXXPKPVH

SEQ ID NO: 84447 - protein, 39 aa, Artificial Sequence; identical to SEQ ID NO: 32470
  Cyclic GFR-binding peptide
  MOD_RES (1), (3), (35), (36): Xaa is C or S

SEQ ID NO: 84448 - protein, 33 aa, Artificial Sequence
  Cyclic GFR-binding peptide
  MOD_RES (29), (30): Xaa is C or S
TMNEYKFKVVNKNEDLYLISIPEMKEPVXXPEP

SEQ ID NO: 84449 - protein, 31 aa, Artificial Sequence
  Cyclic GFR-binding peptide
  MOD_RES (28), (29): Xaa is C or S
IMPIKGYIKPTKGIFYLINIPSLDQSVXXPS

SEQ ID NO: 84450 - protein, 27 aa, Artificial Sequence
  Cyclic GFR-binding peptide
  MOD_RES (26), (27): Xaa is C or S
EYKFKVVNKNEDLYLISIPEMKEPVXX

SEQ ID NO: 84451 - protein, 34 aa, Artificial Sequence
  Cyclic GFR-binding peptide
  MOD_RES (2), (4): Xaa is C or S
RXAXSEVTMNPIKGYVVNKNEDFYLINIPSMKEP

SEQ ID NO: 84452 - protein, 33 aa, Artificial Sequence; identical to SEQ ID NO: 32472
  Cyclic GFR-binding peptide
  MOD_RES (31), (32): Xaa is C or S

SEQ ID NO: 84453 - protein, 20 aa, Artificial Sequence
  Cyclic GFR-binding peptide
EYKFKVVNKNEDLYLISIPE

SEQ ID NO: 84454 - protein, 39 aa, Artificial Sequence; identical to SEQ ID NO: 32474
  Cyclic GFR-binding peptide
  MOD_RES (2), (4), (36), (37): Xaa is C or S

SEQ ID NO: 84455 - protein, 35 aa, Artificial Sequence
  Cyclic GFR-binding peptide
  MOD_RES (29), (30): Xaa is C or S
TMNRYKKLVVNKNEDFYLISIANMKEPVXXPEPIG

SEQ ID NO: 84456 - protein, 22 aa, Artificial Sequence
  Cyclic GFR-binding peptide
MGYHYKLIIQQKDNKYLMSIPS

SEQ ID NO: 84457 - protein, 25 aa, Artificial Sequence
  Cyclic GFR-binding peptide
MRHKRLLLVRGNDYYLMSTASTKVP

SEQ ID NO: 84458 - protein, 32 aa, Artificial Sequence
  Cyclic GFR-binding peptide
  MOD_RES (30), (31): Xaa is C or S
VTMNYHYKLVVNKNEDKYLISIPSMKEPVXXP

SEQ ID NO: 84459 - protein, 37 aa, Artificial Sequence; identical to SEQ ID NO: 32479
  Cyclic GFR-binding peptide
  MOD_RES (2), (34), (35): Xaa is C or S

SEQ ID NO: 84460 - protein, 27 aa, Artificial Sequence
  Cyclic GFR-binding peptide
EEVIMEYKFKLLVRGNDLYLMSIPETK

SEQ ID NO: 84461 - protein, 27 aa, Artificial Sequence
  Cyclic GFR-binding peptide
SEVTMNRYKKLVVNKNEDFYLISIANM

SEQ ID NO: 84462 - protein, 30 aa, Artificial Sequence
  Cyclic GFR-binding peptide
  MOD_RES (26), (27): Xaa is C or S
RHKRLIIQQKDNYYLMSTASMKTPTXXPGA

SEQ ID NO: 84463 - protein, 24 aa, Artificial Sequence
  Cyclic GFR-binding peptide
VMDRHKRLVVNNAADYYLISTASL

SEQ ID NO: 84464 - protein, 32 aa, Artificial Sequence
  Cyclic GFR-binding peptide
  MOD_RES (2), (4): Xaa is C or S
RXGXSEVVMDRHKRLVVNNASDYYLISTASLR

SEQ ID NO: 84465 - protein, 37 aa, Artificial Sequence; identical to SEQ ID NO: 32482
  Cyclic GFR-binding peptide
  MOD_RES (32), (33): Xaa is C or S

SEQ ID NO: 84466 - protein, 25 aa, Artificial Sequence
  Cyclic GFR-binding peptide
NEYKFKVVNKNEDLYLISIPEMKEP

SEQ ID NO: 84467 - protein, 32 aa, Artificial Sequence
  Cyclic GFR-binding peptide
  MOD_RES (2), (4): Xaa is C or S
RXAXSEVTMNRYKKLVVNKNEDFYLISIANMK

SEQ ID NO: 84468 - protein, 34 aa, Artificial Sequence
  Cyclic GFR-binding peptide
  MOD_RES (29), (30): Xaa is C or S
TMNPIKGYVVNKNEDFYLINIPSMKEPVXXPEPI

SEQ ID NO: 84469 - protein, 30 aa, Artificial Sequence
  Cyclic GFR-binding peptide
  MOD_RES (1), (1): Xaa is C or S
XAEVVMDRHKRLVVNNAADYYLISTASLRA

SEQ ID NO: 84470 - protein, 29 aa, Artificial Sequence
  Cyclic GFR-binding peptide
  MOD_RES (1), (3): Xaa is C or S
XGXESVAMGRHKRLYTVVGKDYYLISTAS

SEQ ID NO: 84471 - protein, 35 aa, Artificial Sequence; identical to SEQ ID NO: 32487
  Cyclic GFR-binding peptide
  MOD_RES (2), (4): Xaa is C or S

SEQ ID NO: 84472 - protein, 37 aa, Artificial Sequence; identical to SEQ ID NO: 32488
  Cyclic GFR-binding peptide
  MOD_RES (2), (4), (35), (36): Xaa is C or S

SEQ ID NO: 84473 - protein, 35 aa, Artificial Sequence; identical to SEQ ID NO: 32489
  Cyclic GFR-binding peptide
  MOD_RES (2), (4): Xaa is C or S

SEQ ID NO: 84474 - protein, 31 aa, Artificial Sequence
  Cyclic GFR-binding peptide
  MOD_RES (30), (31): Xaa is C or S
EVIMRHKRLLLVRGNDYYLMSTASTKVPAXX

SEQ ID NO: 84475 - protein, 23 aa, Artificial Sequence
  Cyclic GFR-binding peptide
AMGRHKRLYTVVGKDYYLISTAS

SEQ ID NO: 84476 - protein, 32 aa, Artificial Sequence
  Cyclic GFR-binding peptide
  MOD_RES (2), (2): Xaa is C or S
GXSEVVMDRHKRLVVNNASDYYLISTASLRTP

SEQ ID NO: 84477 - protein, 41 aa, Artificial Sequence; identical to SEQ ID NO: 32490
  Cyclic GFR-binding peptide
  MOD_RES (2), (4), (36), (37): Xaa is C or S

SEQ ID NO: 84478 - protein, 20 aa, Artificial Sequence
  Cyclic GFR-binding peptide
RHKRLVVNNASDYYLISTAS

SEQ ID NO: 84479 - protein, 40 aa, Artificial Sequence; identical to SEQ ID NO: 32493
  Cyclic GFR-binding peptide
  MOD_RES (2), (4), (36), (37): Xaa is C or S

SEQ ID NO: 84480 - protein, 24 aa, Artificial Sequence
  Cyclic GFR-binding peptide
MRHKRLLLVRGNDYYLMSTASTKV

SEQ ID NO: 84481 - protein, 31 aa, Artificial Sequence
  Cyclic GFR-binding peptide
  MOD_RES (1), (3): Xaa is C or S
XAXSEVTMNPIKGYVVNKNEDFYLINIPSMK

SEQ ID NO: 84482 - protein, 33 aa, Artificial Sequence; identical to SEQ ID NO: 32494
  Cyclic GFR-binding peptide
  MOD_RES (2), (33): Xaa is C or S

SEQ ID NO: 84483 - protein, 34 aa, Artificial Sequence
  Cyclic GFR-binding peptide
  MOD_RES (30), (31): Xaa is C or S
VTMNYHYKLVVNKNEDKYLISIPSMKEPVXXPEP

SEQ ID NO: 84484 - protein, 35 aa, Artificial Sequence; identical to SEQ ID NO: 32496
  Cyclic GFR-binding peptide
  MOD_RES (1), (33), (34): Xaa is C or S

SEQ ID NO: 84485 - protein, 32 aa, Artificial Sequence
  Cyclic GFR-binding peptide
  MOD_RES (2), (4): Xaa is C or S
SXKXSRVIMPIKGYVKPKRGVFYLINIPSLAQ

SEQ ID NO: 84486 - protein, 38 aa, Artificial Sequence; identical to SEQ ID NO: 32497
  Cyclic GFR-binding peptide
  MOD_RES (2), (4), (35), (36): Xaa is C or S

SEQ ID NO: 84487 - protein, 29 aa, Artificial Sequence
  Cyclic GFR-binding peptide
  MOD_RES (27), (28): Xaa is C or S
NRHKRLVVNKNEDYYLISTASMKEPVXXP

SEQ ID NO: 84488 - protein, 41 aa, Artificial Sequence; identical to SEQ ID NO: 32498
  Cyclic GFR-binding peptide
  MOD_RES (2), (4), (35), (36): Xaa is C or S

SEQ ID NO: 84489 - protein, 27 aa, Artificial Sequence
  Cyclic GFR-binding peptide
  MOD_RES (26), (27): Xaa is C or S
EYKFKVVNNASDLYLISIPELRTPVXX

SEQ ID NO: 84490 - protein, 36 aa, Artificial Sequence; identical to SEQ ID NO: 32499
  Cyclic GFR-binding peptide
  MOD_RES (32), (33): Xaa is C or S

SEQ ID NO: 84491 - protein, 38 aa, Artificial Sequence; identical to SEQ ID NO: 32500
  Cyclic GFR-binding peptide
  MOD_RES (1), (32), (33): Xaa is C or S

SEQ ID NO: 84492 - protein, 29 aa, Artificial Sequence
  Cyclic GFR-binding peptide
  MOD_RES (2), (2): Xaa is C or S
AXSEVTMNYHYKLVVNKNEDKYLISIPSM

SEQ ID NO: 84493 - protein, 31 aa, Artificial Sequence
  Cyclic GFR-binding peptide
  MOD_RES (2), (2): Xaa is C or S
AXSEVTMNRYKKLVVNKNEDFYLISIANMKE

SEQ ID NO: 84494 - protein, 21 aa, Artificial Sequence
  Cyclic GFR-binding peptide
PIKGYIKPTKGIFYLINIPSL

SEQ ID NO: 84495 - protein, 23 aa, Artificial Sequence
  Cyclic GFR-binding peptide
NPIKGYVVNKNEDFYLINIPSMK

SEQ ID NO: 84496 - protein, 32 aa, Artificial Sequence
  Cyclic GFR-binding peptide
  MOD_RES (27), (28): Xaa is C or S
GEYKFKIIQQKDNLYLMSIPEMKTPTXXPGAS

SEQ ID NO: 84497 - protein, 40 aa, Artificial Sequence; identical to SEQ ID NO: 32502
  Cyclic GFR-binding peptide
  MOD_RES (1), (3), (35), (36): Xaa is C or S

SEQ ID NO: 84498 - protein, 26 aa, Artificial Sequence
  Cyclic GFR-binding peptide
EVTMNYHYKLVVNKNEDKYLISIPSM

SEQ ID NO: 84499 - protein, 38 aa, Artificial Sequence; identical to SEQ ID NO: 32505
  Cyclic GFR-binding peptide
  MOD_RES (1), (32), (33): Xaa is C or S

SEQ ID NO: 84500 - protein, 33 aa, Artificial Sequence
  Cyclic GFR-binding peptide
  MOD_RES (30), (31): Xaa is C or S
VAMGRHKRLYTVVGKDYYLISTASLKTPVXXAK

SEQ ID NO: 84501 - protein, 32 aa, Artificial Sequence; identical to SEQ ID NO: 32507
  Cyclic GFR-binding peptide
  MOD_RES (1), (1): Xaa is C or S

SEQ ID NO: 84502 - protein, 32 aa, Artificial Sequence
  Cyclic GFR-binding peptide
  MOD_RES (27), (28): Xaa is C or S
GYHYKLIIQQKDNKYLMSIPSMKTPTXXPGAS

SEQ ID NO: 84503 - protein, 31 aa, Artificial Sequence
  Cyclic GFR-binding peptide
  MOD_RES (26), (27): Xaa is C or S
EYKFKLLVRGNDLYLMSIPETKVPAXXTSPV

SEQ ID NO: 84504 - protein, 28 aa, Artificial Sequence
  Cyclic GFR-binding peptide
EVIMEYKFKLLVRGNDLYLMSIPETKVP

SEQ ID NO: 84505 - protein, 40 aa, Artificial Sequence; identical to SEQ ID NO: 32508
  Cyclic GFR-binding peptide
  MOD_RES (1), (3), (34), (35): Xaa is C or S

SEQ ID NO: 84506 - protein, 36 aa, Artificial Sequence; identical to SEQ ID NO: 32509
  Cyclic GFR-binding peptide
  MOD_RES (1), (33), (34): Xaa is C or S

SEQ ID NO: 84507 - protein, 28 aa, Artificial Sequence
  Cyclic GFR-binding peptide
  MOD_RES (26), (27): Xaa is C or S
RHKRLVVNNASDYYLISTASLRTPVXXT

SEQ ID NO: 84508 - protein, 32 aa, Artificial Sequence
  Cyclic GFR-binding peptide
  MOD_RES (27), (28): Xaa is C or S
GRHKRLYTVVGKDYYLISTASLKTPVXXAKSA

SEQ ID NO: 84509 - protein, 23 aa, Artificial Sequence
  Cyclic GFR-binding peptide
GYHYKLIIQQKDNKYLMSIPSMK

SEQ ID NO: 84510 - protein, 27 aa, Artificial Sequence
  Cyclic GFR-binding peptide
VTMNYHYKLVVNKNEDKYLISIPSMKE

SEQ ID NO: 84511 - protein, 32 aa, Artificial Sequence; identical to SEQ ID NO: 32513
  Cyclic GFR-binding peptide
  MOD_RES (32), (32): Xaa is C or S

SEQ ID NO: 84512 - protein, 33 aa, Artificial Sequence; identical to SEQ ID NO: 32514
  Cyclic GFR-binding peptide
  MOD_RES (1), (32), (33): Xaa is C or S

SEQ ID NO: 84513 - protein, 23 aa, Artificial Sequence
  Cyclic GFR-binding peptide
GEYKFKIIQQKDNLYLMSIPEMK

SEQ ID NO: 84514 - protein, 32 aa, Artificial Sequence; identical to SEQ ID NO: 32515
  Cyclic GFR-binding peptide
  MOD_RES (31), (32): Xaa is C or S

SEQ ID NO: 84515 - protein, 25 aa, Artificial Sequence
  Cyclic GFR-binding peptide
IMPIKGYVKPKRGVFYLINIPSLAQ

SEQ ID NO: 84516 - protein, 36 aa, Artificial Sequence; identical to SEQ ID NO: 32517
  Cyclic GFR-binding peptide
  MOD_RES (2), (34), (35): Xaa is C or S

SEQ ID NO: 84517 - protein, 34 aa, Artificial Sequence
  Cyclic GFR-binding peptide
  MOD_RES (30), (31): Xaa is C or S
VTMNRHKRLVVNKNEDYYLISTASMKEPVXXPEP

SEQ ID NO: 84518 - protein, 26 aa, Artificial Sequence
  Cyclic GFR-binding peptide
MDRHKRLVVNNAADYYLISTASLRAP

SEQ ID NO: 84519 - protein, 30 aa, Artificial Sequence
  Cyclic GFR-binding peptide
  MOD_RES (2), (4): Xaa is C or S
RXGXESVAMGRHKRLYTVVGKDYYLISTAS

SEQ ID NO: 84520 - protein, 35 aa, Artificial Sequence
  Cyclic GFR-binding peptide
  MOD_RES (29), (30): Xaa is C or S
VMGYHYKLIIQQKDNKYLMSIPSMKTPTXXPGASG

SEQ ID NO: 84521 - protein, 38 aa, Artificial Sequence; identical to SEQ ID NO: 32519
  Cyclic GFR-binding peptide
  MOD_RES (2), (4), (36), (37): Xaa is C or S

SEQ ID NO: 84522 - protein, 31 aa, Artificial Sequence
  Cyclic GFR-binding peptide
  MOD_RES (29), (30): Xaa is C or S
VIMYHYKLLLVRGNDKYLMSIPSTKVPAXXT

SEQ ID NO: 84523 - protein, 37 aa, Artificial Sequence; identical to SEQ ID NO: 32520
  Cyclic GFR-binding peptide
  MOD_RES (31), (32): Xaa is C or S

SEQ ID NO: 84524 - protein, 33 aa, Artificial Sequence; identical to SEQ ID NO: 32522
  Cyclic GFR-binding peptide
  MOD_RES (1), (32), (33): Xaa is C or S

SEQ ID NO: 84525 - protein, 29 aa, Artificial Sequence
  Cyclic GFR-binding peptide
AAAAAAAAAEYKFKVVNNASDLYLISIPE

SEQ ID NO: 84526 - protein, 26 aa, Artificial Sequence
  Cyclic GFR-binding peptide
  MOD_RES (26), (26): Xaa is C or S
RHKRLVVNKNEDYYLISTASMKEPVX

SEQ ID NO: 84527 - protein, 32 aa, Artificial Sequence
  Cyclic GFR-binding peptide
  MOD_RES (29), (30): Xaa is C or S
VIMRHKRLLLVRGNDYYLMSTASTKVPAXXTS

SEQ ID NO: 84528 - protein, 21 aa, Artificial Sequence
  Cyclic GFR-binding peptide
EYKFKVVNNASDLYLISIPEL

SEQ ID NO: 84529 - protein, 38 aa, Artificial Sequence; identical to SEQ ID NO: 32524
  Cyclic GFR-binding peptide
  MOD_RES (32), (33): Xaa is C or S

SEQ ID NO: 84530 - protein, 39 aa, Artificial Sequence; identical to SEQ ID NO: 32525
  Cyclic GFR-binding peptide
  MOD_RES (2), (4), (35), (36): Xaa is C or S

SEQ ID NO: 84531 - protein, 32 aa, Artificial Sequence
  Cyclic GFR-binding peptide
  MOD_RES (29), (30): Xaa is C or S
VIMYHYKLLLVRGNDKYLMSIPSTKVPAXXTS

SEQ ID NO: 84532 - protein, 38 aa, Artificial Sequence; identical to SEQ ID NO: 32526
  Cyclic GFR-binding peptide
  MOD_RES (2), (34), (35): Xaa is C or S

SEQ ID NO: 84533 - protein, 30 aa, Artificial Sequence
  Cyclic GFR-binding peptide
  MOD_RES (1), (1): Xaa is C or S
XSEVVMDEYKFKVVNNASDLYLISIPELRT

SEQ ID NO: 84534 - protein, 33 aa, Artificial Sequence
  Cyclic GFR-binding peptide
  MOD_RES (27), (28): Xaa is C or S
MPIKGYIKPTKGIFYLINIPSLDQSVXXPSASA

SEQ ID NO: 84535 - protein, 30 aa, Artificial Sequence
  Cyclic GFR-binding peptide
SEVTMNPIKGYVVNKNEDFYLINIPSMKEP

SEQ ID NO: 84536 - protein, 25 aa, Artificial Sequence
  Cyclic GFR-binding peptide
EYKFKIIQQKDNLYLMSIPEMKTPT

SEQ ID NO: 84537 - protein, 33 aa, Artificial Sequence
  Cyclic GFR-binding peptide
  MOD_RES (27), (28): Xaa is C or S
MPIKGYVKPKRGVFYLINIPSLAQPVXXPAASA

SEQ ID NO: 84538 - protein, 39 aa, Artificial Sequence; identical to SEQ ID NO: 32528
  Cyclic GFR-binding peptide
  MOD_RES (2), (4), (35), (36): Xaa is C or S

SEQ ID NO: 84539 - protein, 34 aa, Artificial Sequence
  Cyclic GFR-binding peptide
  MOD_RES (29), (30): Xaa is C or S
VIMPIKGYIKPTKGIFYLINIPSLDQSVXXPSAS

SEQ ID NO: 84540 - protein, 37 aa, Artificial Sequence; identical to SEQ ID NO: 32529
  Cyclic GFR-binding peptide
  MOD_RES (1), (33), (34): Xaa is C or S

SEQ ID NO: 84541 - protein, 30 aa, Artificial Sequence
  Cyclic GFR-binding peptide
  MOD_RES (2), (4): Xaa is C or S
LXGXEEVIMYHYKLLLVRGNDKYLMSIPST

SEQ ID NO: 84542 - protein, 27 aa, Artificial Sequence
  Cyclic GFR-binding peptide
EEVIMRHKRLLLVRGNDYYLMSTASTK

SEQ ID NO: 84543 - protein, 36 aa, Artificial Sequence; identical to SEQ ID NO: 32530
  Cyclic GFR-binding peptide
  MOD_RES (2), (34), (35): Xaa is C or S

SEQ ID NO: 84544 - protein, 33 aa, Artificial Sequence
  Cyclic GFR-binding peptide
  MOD_RES (30), (31): Xaa is C or S
VVMGRHKRLIIQQKDNYYLMSTASMKTPTXXPG

SEQ ID NO: 84545 - protein, 34 aa, Artificial Sequence; identical to SEQ ID NO: 32532
  Cyclic GFR-binding peptide
  MOD_RES (2), (34): Xaa is C or S

SEQ ID NO: 84546 - protein, 29 aa, Artificial Sequence
  Cyclic GFR-binding peptide
VVMGYHYKLIIQQKDNKYLMSIPSMKTPT

SEQ ID NO: 84547 - protein, 25 aa, Artificial Sequence
  Cyclic GFR-binding peptide
KVIMPIKGYIKPTKGIFYLINIPSL

SEQ ID NO: 84548 - protein, 31 aa, Artificial Sequence; identical to SEQ ID NO: 32533
  Cyclic GFR-binding peptide
  MOD_RES (31), (31): Xaa is C or S

SEQ ID NO: 84549 - protein, 32 aa, Artificial Sequence
  Cyclic GFR-binding peptide
  MOD_RES (2), (4): Xaa is C or S
RXGXESVAMGRHKRLYTVVGKDYYLISTASLK

SEQ ID NO: 84550 - protein, 25 aa, Artificial Sequence
  Cyclic GFR-binding peptide
PIKGYVKPKRGVFYLINIPSLAQPV

SEQ ID NO: 84551 - protein, 22 aa, Artificial Sequence
  Cyclic GFR-binding peptide
MNRYKKLVVNKNEDFYLISIAN

SEQ ID NO: 84552 - protein, 32 aa, Artificial Sequence
  Cyclic GFR-binding peptide
  MOD_RES (28), (29): Xaa is C or S
IMPIKGYVKPKRGVFYLINIPSLAQPVXXPAA

SEQ ID NO: 84553 - protein, 30 aa, Artificial Sequence
  Cyclic GFR-binding peptide
  MOD_RES (2), (4): Xaa is C or S
RXGXSEVVMDEYKFKVVNNASDLYLISIPE

SEQ ID NO: 84554 - protein, 27 aa, Artificial Sequence
  Cyclic GFR-binding peptide
VIMPIKGYIKPTKGIFYLINIPSLDQS

SEQ ID NO: 84555 - protein, 26 aa, Artificial Sequence
  Cyclic GFR-binding peptide
VVMPIKGYVKPTRGVFYLINIPSLDQ

SEQ ID NO: 84556 - protein, 31 aa, Artificial Sequence
  Cyclic GFR-binding peptide
  MOD_RES (29), (30): Xaa is C or S
VIMPIKGYVKPKRGVFYLINIPSLAQPVXXP

SEQ ID NO: 84557 - protein, 29 aa, Artificial Sequence
  Cyclic GFR-binding peptide
  MOD_RES (27), (28): Xaa is C or S
MYHYKLLLVRGNDKYLMSIPSTKVPAXXT

SEQ ID NO: 84558 - protein, 38 aa, Artificial Sequence; identical to SEQ ID NO: 32539
  Cyclic GFR-binding peptide
  MOD_RES (32), (33): Xaa is C or S

SEQ ID NO: 84559 - protein, 27 aa, Artificial Sequence
  Cyclic GFR-binding peptide
VVMDRHKRLVVNNAADYYLISTASLRA

SEQ ID NO: 84560 - protein, 20 aa, Artificial Sequence
  Cyclic GFR-binding peptide
RYKKLVVNKNEDFYLISIAN

SEQ ID NO: 84561 - protein, 39 aa, Artificial Sequence; identical to SEQ ID NO: 32540
  Cyclic GFR-binding peptide
  MOD_RES (2), (4), (36), (37): Xaa is C or S

SEQ ID NO: 84562 - protein, 28 aa, Artificial Sequence
  Cyclic GFR-binding peptide
  MOD_RES (28), (28): Xaa is C or S
MNYHYKLVVNKNEDKYLISIPSMKEPVX

SEQ ID NO: 84563 - protein, 38 aa, Artificial Sequence; identical to SEQ ID NO: 32542
  Cyclic GFR-binding peptide
  MOD_RES (2), (4), (35), (36): Xaa is C or S

SEQ ID NO: 84564 - protein, 28 aa, Artificial Sequence
  Cyclic GFR-binding peptide
  MOD_RES (28), (28): Xaa is C or S
MGRHKRLYTVVGKDYYLISTASLKTPVX

SEQ ID NO: 84565 - protein, 36 aa, Artificial Sequence; identical to SEQ ID NO: 32546
  Cyclic GFR-binding peptide
  MOD_RES (2), (4), (35), (36): Xaa is C or S

SEQ ID NO: 84566 - protein, 34 aa, Artificial Sequence; identical to SEQ ID NO: 32549
  Cyclic GFR-binding peptide
  MOD_RES (32), (33): Xaa is C or S

SEQ ID NO: 84567 - protein, 39 aa, Artificial Sequence; identical to SEQ ID NO: 32550
  Cyclic GFR-binding peptide
  MOD_RES (1), (33), (34): Xaa is C or S

SEQ ID NO: 84568 - protein, 40 aa, Artificial Sequence; identical to SEQ ID NO: 32551
  Cyclic GFR-binding peptide
  MOD_RES (1), (3), (35), (36): Xaa is C or S

SEQ ID NO: 84569 - protein, 34 aa, Artificial Sequence; identical to SEQ ID NO: 32552
  Cyclic GFR-binding peptide
  MOD_RES (2), (34): Xaa is C or S

SEQ ID NO: 84570 - protein, 29 aa, Artificial Sequence
  Cyclic GFR-binding peptide
  MOD_RES (27), (28): Xaa is C or S
MPIKGYVKPKRGVFYLINIPSLAQPVXXP

SEQ ID NO: 84571 - protein, 32 aa, Artificial Sequence
  Cyclic GFR-binding peptide
  MOD_RES (26), (27): Xaa is C or S
RHKRLVVNKNEDYYLISTASMKEPVXXPEPIG

SEQ ID NO: 84572 - protein, 32 aa, Artificial Sequence; identical to SEQ ID NO: 32553
  Cyclic GFR-binding peptide
  MOD_RES (31), (32): Xaa is C or S

SEQ ID NO: 84573 - protein, 31 aa, Artificial Sequence
  Cyclic GFR-binding peptide
  MOD_RES (28), (29): Xaa is C or S
IMPIKGYVKPKRGVFYLINIPSLAQPVXXPA

SEQ ID NO: 84574 - protein, 35 aa, Artificial Sequence; identical to SEQ ID NO: 32554
  Cyclic GFR-binding peptide
  MOD_RES (1), (33), (34): Xaa is C or S

SEQ ID NO: 84575 - protein, 39 aa, Artificial Sequence; identical to SEQ ID NO: 32555
  Cyclic GFR-binding peptide
  MOD_RES (2), (34), (35): Xaa is C or S

SEQ ID NO: 84576 - protein, 34 aa, Artificial Sequence; identical to SEQ ID NO: 32556
  Cyclic GFR-binding peptide
  MOD_RES (31), (32): Xaa is C or S

SEQ ID NO: 84577 - protein, 32 aa, Artificial Sequence; identical to SEQ ID NO: 32557
  Cyclic GFR-binding peptide
  MOD_RES (2), (2): Xaa is C or S

SEQ ID NO: 84578 - protein, 32 aa, Artificial Sequence; identical to SEQ ID NO: 32558
  Cyclic GFR-binding peptide
  MOD_RES (31), (32): Xaa is C or S

SEQ ID NO: 84579 - protein, 35 aa, Artificial Sequence
  Cyclic GFR-binding peptide
  MOD_RES (30), (31): Xaa is C or S
VVMGRHKRLIIQQKDNYYLMSTASMKTPTXXPGAS

SEQ ID NO: 84580 - protein, 33 aa, Artificial Sequence
  Cyclic GFR-binding peptide
  MOD_RES (29), (30): Xaa is C or S
TMNYHYKLVVNKNEDKYLISIPSMKEPVXXPEP

SEQ ID NO: 84581 - protein, 30 aa, Artificial Sequence
  Cyclic GFR-binding peptide
  MOD_RES (27), (28): Xaa is C or S
GRHKRLIIQQKDNYYLMSTASMKTPTXXPG

SEQ ID NO: 84582 - protein, 25 aa, Artificial Sequence
  Cyclic GFR-binding peptide
VMPIKGYVKPTRGVFYLINIPSLDQ

SEQ ID NO: 84583 - protein, 27 aa, Artificial Sequence
  Cyclic GFR-binding peptide
  MOD_RES (1), (1): Xaa is C or S
XSEVVMDYHYKLVVNNASDKYLISIPS

SEQ ID NO: 84584 - protein, 23 aa, Artificial Sequence
  Cyclic GFR-binding peptide
NRYKKLVVNKNEDFYLISIANMK

SEQ ID NO: 84585 - protein, 41 aa, Artificial Sequence; identical to SEQ ID NO: 32562
  Cyclic GFR-binding peptide
  MOD_RES (2), (4), (36), (37): Xaa is C or S

SEQ ID NO: 84586 - protein, 32 aa, Artificial Sequence
  Cyclic GFR-binding peptide
  MOD_RES (26), (27): Xaa is C or S
EYKFKLLVRGNDLYLMSIPETKVPAXXTSPVR

SEQ ID NO: 84587 - protein, 24 aa, Artificial Sequence
  Cyclic GFR-binding peptide
VMGYHYKLIIQQKDNKYLMSIPSM

SEQ ID NO: 84588 - protein, 35 aa, Artificial Sequence; identical to SEQ ID NO: 32563
  Cyclic GFR-binding peptide
  MOD_RES (2), (4), (35): Xaa is C or S

SEQ ID NO: 84589 - protein, 27 aa, Artificial Sequence
  Cyclic GFR-binding peptide
TMNEYKFKVVNKNEDLYLISIPEMKEP

SEQ ID NO: 84590 - protein, 28 aa, Artificial Sequence
  Cyclic GFR-binding peptide
  MOD_RES (28), (28): Xaa is C or S
MDEYKFKVVNNASDLYLISIPELRTPVX

SEQ ID NO: 84591 - protein, 29 aa, Artificial Sequence
  Cyclic GFR-binding peptide
  MOD_RES (1), (3): Xaa is C or S
XAXSEVTMNEYKFKVVNKNEDLYLISIPE

SEQ ID NO: 84592 - protein, 27 aa, Artificial Sequence
  Cyclic GFR-binding peptide
  MOD_RES (27), (27): Xaa is C or S
DRHKRLVVNNAADYYLISTASLRAPVX

SEQ ID NO: 84593 - protein, 29 aa, Artificial Sequence
  Cyclic GFR-binding peptide
  MOD_RES (1), (1): Xaa is C or S
XESVAMGRHKRLYTVVGKDYYLISTASLK

SEQ ID NO: 84594 - protein, 39 aa, Artificial Sequence; identical to SEQ ID NO: 32565
  Cyclic GFR-binding peptide
  MOD_RES (2), (4), (36), (37): Xaa is C or S

SEQ ID NO: 84595 - protein, 29 aa, Artificial Sequence
  Cyclic GFR-binding peptide
  MOD_RES (26), (27): Xaa is C or S
EYKFKVVNKNEDLYLISIPEMKEPVXXPE

SEQ ID NO: 84596 - protein, 31 aa, Artificial Sequence
  Cyclic GFR-binding peptide
  MOD_RES (26), (27): Xaa is C or S
PIKGYVKPKRGVFYLINIPSLAQPVXXPAAS

SEQ ID NO: 84597 - protein, 31 aa, Artificial Sequence
  Cyclic GFR-binding peptide
  MOD_RES (1), (3): Xaa is C or S
XGXRDVVMGEYKFKIIQQKDNLYLMSIPEMK

SEQ ID NO: 84598 - protein, 32 aa, Artificial Sequence
  Cyclic GFR-binding peptide
  MOD_RES (1), (3): Xaa is C or S
XKXSRVIMPIKGYVKPKRGVFYLINIPSLAQP

SEQ ID NO: 84599 - protein, 35 aa, Artificial Sequence; identical to SEQ ID NO: 32566
  Cyclic GFR-binding peptide
  MOD_RES (1), (3), (35): Xaa is C or S

SEQ ID NO: 84600 - protein, 30 aa, Artificial Sequence
  Cyclic GFR-binding peptide
  MOD_RES (27), (28): Xaa is C or S
NRHKRLVVNKNEDYYLISTASMKEPVXXPE

SEQ ID NO: 84601 - protein, 29 aa, Artificial Sequence
  Cyclic GFR-binding peptide
  MOD_RES (2), (2): Xaa is C or S
KXSRVIMPIKGYVKPKRGVFYLINIPSLA

SEQ ID NO: 84602 - protein, 33 aa, Artificial Sequence; identical to SEQ ID NO: 32568
  Cyclic GFR-binding peptide
  MOD_RES (2), (2): Xaa is C or S

SEQ ID NO: 84603 - protein, 36 aa, Artificial Sequence; identical to SEQ ID NO: 32567
  Cyclic GFR-binding peptide
  MOD_RES (1), (33), (34): Xaa is C or S

SEQ ID NO: 84604 - protein, 30 aa, Artificial Sequence
  Cyclic GFR-binding peptide
  MOD_RES (29), (30): Xaa is C or S
TMNPIKGYVVNKNEDFYLINIPSMKEPVXX

SEQ ID NO: 84605 - protein, 30 aa, Artificial Sequence
  Cyclic GFR-binding peptide
  MOD_RES (2), (2): Xaa is C or S
GXRDVVMGRHKRLIIQQKDNYYLMSTASMK

SEQ ID NO: 84606 - protein, 32 aa, Artificial Sequence
  Cyclic GFR-binding peptide
  MOD_RES (26), (27): Xaa is C or S
YHYKLVVNNASDKYLISIPSLRTPVXXTPPTS

SEQ ID NO: 84607 - protein, 28 aa, Artificial Sequence
  Cyclic GFR-binding peptide
  MOD_RES (1), (1): Xaa is C or S
XRDVVMGYHYKLIIQQKDNKYLMSIPSM

SEQ ID NO: 84608 - protein, 30 aa, Artificial Sequence
  Cyclic GFR-binding peptide
  MOD_RES (26), (27): Xaa is C or S
RHKRLLLVRGNDYYLMSTASTKVPAXXTSP

SEQ ID NO: 84609 - protein, 32 aa, Artificial Sequence
  Cyclic GFR-binding peptide
  MOD_RES (29), (30): Xaa is C or S
VIMPIKGYVKPKRGVFYLINIPSLAQPVXXPA

SEQ ID NO: 84610 - protein, 30 aa, Artificial Sequence
  Cyclic GFR-binding peptide
  MOD_RES (2), (2): Xaa is C or S
KXSRVIMPIKGYVKPKRGVFYLINIPSLAQ

SEQ ID NO: 84611 - protein, 30 aa, Artificial Sequence
  Cyclic GFR-binding peptide
  MOD_RES (28), (29): Xaa is C or S
MDYHYKLVVNNASDKYLISIPSLRTPVXXT

SEQ ID NO: 84612 - protein, 24 aa, Artificial Sequence
  Cyclic GFR-binding peptide
VVMDEYKFKVVNNASDLYLISIPE

SEQ ID NO: 84613 - protein, 27 aa, Artificial Sequence
  Cyclic GFR-binding peptide
SEVTMNPIKGYVVNKNEDFYLINIPSM

SEQ ID NO: 84614 - protein, 32 aa, Artificial Sequence
  Cyclic GFR-binding peptide
  MOD_RES (29), (30): Xaa is C or S
TMNYHYKLVVNKNEDKYLISIPSMKEPVXXPE

SEQ ID NO: 84615 - protein, 28 aa, Artificial Sequence
  Cyclic GFR-binding peptide
VIMEYKFKLLVRGNDLYLMSIPETKVPA

SEQ ID NO: 84616 - protein, 35 aa, Artificial Sequence
  Cyclic GFR-binding peptide
  MOD_RES (29), (30): Xaa is C or S
VMNYHYKLIVNSSDDKYLVSIPSLKTPAXXPKPVH

SEQ ID NO: 84617 - protein, 29 aa, Artificial Sequence
  Cyclic GFR-binding peptide
  MOD_RES (28), (29): Xaa is C or S
MNEYKFKVVNKNEDLYLISIPEMKEPVXX

SEQ ID NO: 84618 - protein, 25 aa, Artificial Sequence
  Cyclic GFR-binding peptide
EEVIMYHYKLLLVRGNDKYLMSIPS

SEQ ID NO: 84619 - protein, 33 aa, Artificial Sequence; identical to SEQ ID NO: 32573
  Cyclic GFR-binding peptide
  MOD_RES (31), (32): Xaa is C or S

SEQ ID NO: 84620 - protein, 33 aa, Artificial Sequence; identical to SEQ ID NO: 32574
  Cyclic GFR-binding peptide
  MOD_RES (32), (33): Xaa is C or S

SEQ ID NO: 84621 - protein, 31 aa, Artificial Sequence
  Cyclic GFR-binding peptide
  MOD_RES (28), (29): Xaa is C or S
IMEYKFKLLVRGNDLYLMSIPETKVPAXXTS

SEQ ID NO: 84622 - protein, 35 aa, Artificial Sequence; identical to SEQ ID NO: 21067
  Cyclic GFR-binding peptide
  MOD_RES (2), (4): Xaa is C or S

SEQ ID NO: 84623 - protein, 34 aa, Artificial Sequence; identical to SEQ ID NO: 32575
  Cyclic GFR-binding peptide
  MOD_RES (31), (32): Xaa is C or S

SEQ ID NO: 84624 - protein, 32 aa, Artificial Sequence
  Cyclic GFR-binding peptide
  MOD_RES (2), (4): Xaa is C or S
RXGXAEVVMDRHKRLVVNNAADYYLISTASLR

SEQ ID NO: 84625 - protein, 27 aa, Artificial Sequence
  Cyclic GFR-binding peptide
IMPIKGYVKPKRGVFYLINIPSLAQPV

SEQ ID NO: 84626 - protein, 30 aa, Artificial Sequence
  Cyclic GFR-binding peptide
  MOD_RES (27), (28): Xaa is C or S
NRYKKLVVNKNEDFYLISIANMKEPVXXPE

SEQ ID NO: 84627 - protein, 30 aa, Artificial Sequence
  Cyclic GFR-binding peptide
  MOD_RES (1), (3): Xaa is C or S
XAXSEVTMNEYKFKVVNKNEDLYLISIPEM

SEQ ID NO: 84628 - protein, 38 aa, Artificial Sequence; identical to SEQ ID NO: 32577
  Cyclic GFR-binding peptide
  MOD_RES (1), (32), (33): Xaa is C or S

SEQ ID NO: 84629 - protein, 33 aa, Artificial Sequence; identical to SEQ ID NO: 32578
  Cyclic GFR-binding peptide
  MOD_RES (2), (2): Xaa is C or S

SEQ ID NO: 84630 - protein, 37 aa, Artificial Sequence; identical to SEQ ID NO: 32580
  Cyclic GFR-binding peptide
  MOD_RES (2), (33), (34): Xaa is C or S

SEQ ID NO: 84631 - protein, 22 aa, Artificial Sequence
  Cyclic GFR-binding peptide
GRHKRLYTVVGKDYYLISTASL

SEQ ID NO: 84632 - protein, 27 aa, Artificial Sequence
  Cyclic GFR-binding peptide
VTMNRYKKLVVNKNEDFYLISIANMKE

SEQ ID NO: 84633 - protein, 29 aa, Artificial Sequence
  Cyclic GFR-binding peptide
  MOD_RES (26), (27): Xaa is C or S
PIKGYIKPTKGIFYLINIPSLDQSVXXPS

SEQ ID NO: 84634 - protein, 30 aa, Artificial Sequence
  Cyclic GFR-binding peptide
  MOD_RES (28), (29): Xaa is C or S
MNYHYKLVVNKNEDKYLISIPSMKEPVXXP

SEQ ID NO: 84635 - protein, 31 aa, Artificial Sequence; identical to SEQ ID NO: 32583
  Cyclic GFR-binding peptide
  MOD_RES (1), (1): Xaa is C or S

SEQ ID NO: 84636 - protein, 35 aa, Artificial Sequence; identical to SEQ ID NO: 32584
  Cyclic GFR-binding peptide
  MOD_RES (31), (32): Xaa is C or S

SEQ ID NO: 84637 - protein, 32 aa, Artificial Sequence
  Cyclic GFR-binding peptide
  MOD_RES (30), (31): Xaa is C or S
VTMNRHKRLVVNKNEDYYLISTASMKEPVXXP

SEQ ID NO: 84638 - protein, 33 aa, Artificial Sequence
  Cyclic GFR-binding peptide
  MOD_RES (27), (28): Xaa is C or S
NEYKFKVVNKNEDLYLISIPEMKEPVXXPEPIG

SEQ ID NO: 84639 - protein, 32 aa, Artificial Sequence; identical to SEQ ID NO: 32585
  Cyclic GFR-binding peptide
  MOD_RES (32), (32): Xaa is C or S

SEQ ID NO: 84640 - protein, 24 aa, Artificial Sequence
  Cyclic GFR-binding peptide
VAMGRHKRLYTVVGKDYYLISTAS

SEQ ID NO: 84641 - protein, 24 aa, Artificial Sequence
  Cyclic GFR-binding peptide
EYKFKVVNNASDLYLISIPELRTP

SEQ ID NO: 84642 - protein, 24 aa, Artificial Sequence
  Cyclic GFR-binding peptide
YHYKLLLVRGNDKYLMSIPSTKVP

SEQ ID NO: 84643 - protein, 31 aa, Artificial Sequence
  Cyclic GFR-binding peptide
  MOD_RES (2), (2): Xaa is C or S
GXAEVVMDRHKRLVVNNAADYYLISTASLRA

SEQ ID NO: 84644 - protein, 25 aa, Artificial Sequence
  Cyclic GFR-binding peptide
EVIMEYKFKLLVRGNDLYLMSIPET

SEQ ID NO: 84645 - protein, 36 aa, Artificial Sequence; identical to SEQ ID NO: 32590
  Cyclic GFR-binding peptide
  MOD_RES (2), (4), (36): Xaa is C or S

SEQ ID NO: 84646 - protein, 22 aa, Artificial Sequence
  Cyclic GFR-binding peptide
RHKRLVVNNAADYYLISTASLR

SEQ ID NO: 84647 - protein, 21 aa, Artificial Sequence
  Cyclic GFR-binding peptide
EYKFKIIQQKDNLYLMSIPEM

SEQ ID NO: 84648 - protein, 33 aa, Artificial Sequence; identical to SEQ ID NO: 32592
  Cyclic GFR-binding peptide
  MOD_RES (2), (2): Xaa is C or S

SEQ ID NO: 84649 - protein, 33 aa, Artificial Sequence
  Cyclic GFR-binding peptide
  MOD_RES (30), (31): Xaa is C or S
VTMNRYKKLVVNKNEDFYLISIANMKEPVXXPE

SEQ ID NO: 84650 - protein, 21 aa, Artificial Sequence
  Cyclic GFR-binding peptide
YHYKLLLVRGNDKYLMSIPST

SEQ ID NO: 84651 - protein, 31 aa, Artificial Sequence; identical to SEQ ID NO: 32595
  Cyclic GFR-binding peptide

SEQ ID NO: 84652 - protein, 24 aa, Artificial Sequence
  Cyclic GFR-binding peptide
PIKGYVVNKNEDFYLINIPSMKEP

SEQ ID NO: 84653 - protein, 38 aa, Artificial Sequence; identical to SEQ ID NO: 32597
  Cyclic GFR-binding peptide
  MOD_RES (2), (4), (36), (37): Xaa is C or S

SEQ ID NO: 84654 - protein, 32 aa, Artificial Sequence
  Cyclic GFR-binding peptide
  MOD_RES (26), (27): Xaa is C or S
YHYKLLLVRGNDKYLMSIPSTKVPAXXTSPVR

SEQ ID NO: 84655 - protein, 37 aa, Artificial Sequence; identical to SEQ ID NO: 32601
  Cyclic GFR-binding peptide
  MOD_RES (2), (4), (36), (37): Xaa is C or S

SEQ ID NO: 84656 - protein, 31 aa, Artificial Sequence; identical to SEQ ID NO: 32602
  Cyclic GFR-binding peptide

SEQ ID NO: 84657 - protein, 35 aa, Artificial Sequence; identical to SEQ ID NO: 32604
  Cyclic GFR-binding peptide
  MOD_RES (31), (32): Xaa is C or S

SEQ ID NO: 84658 - protein, 31 aa, Artificial Sequence
  Cyclic GFR-binding peptide
  MOD_RES (28), (29): Xaa is C or S
MDRHKRLVVNNAADYYLISTASLRAPVXXSA

SEQ ID NO: 84659 - protein, 33 aa, Artificial Sequence
  Cyclic GFR-binding peptide
  MOD_RES (2), (4): Xaa is C or S
SXGXRDVVMGRHKRLIIQQKDNYYLMSTASMKT

SEQ ID NO: 84660 - protein, 31 aa, Artificial Sequence
  Cyclic GFR-binding peptide
  MOD_RES (30), (31): Xaa is C or S
EVIMYHYKLLLVRGNDKYLMSIPSTKVPAXX

SEQ ID NO: 84661 - protein, 27 aa, Artificial Sequence
  Cyclic GFR-binding peptide
  MOD_RES (1), (1): Xaa is C or S
XRDVVMGRHKRLIIQQKDNYYLMSTAS

SEQ ID NO: 84662 - protein, 34 aa, Artificial Sequence; identical to SEQ ID NO: 32605
  Cyclic GFR-binding peptide
  MOD_RES (31), (32): Xaa is C or S

SEQ ID NO: 84663 - protein, 31 aa, Artificial Sequence
  Cyclic GFR-binding peptide
  MOD_RES (2), (4): Xaa is C or S
SXGXRDVVMGEYKFKIIQQKDNLYLMSIPEM

SEQ ID NO: 84664 - protein, 24 aa, Artificial Sequence
  Cyclic GFR-binding peptide
VMPIKGYVKPTRGVFYLINIPSLD

SEQ ID NO: 84665 - protein, 31 aa, Artificial Sequence
  Cyclic GFR-binding peptide
  MOD_RES (2), (2): Xaa is C or S
AXSEVTMNEYKFKVVNKNEDLYLISIPEMKE

SEQ ID NO: 84666 - protein, 26 aa, Artificial Sequence
  Cyclic GFR-binding peptide
EVTMNRHKRLVVNKNEDYYLISTASM

SEQ ID NO: 84667 - protein, 32 aa, Artificial Sequence
  Cyclic GFR-binding peptide
  MOD_RES (28), (29): Xaa is C or S
MGYHYKLIIQQKDNKYLMSIPSMKTPTXXPGA

SEQ ID NO: 84668 - protein, 32 aa, Artificial Sequence
  Cyclic GFR-binding peptide
  MOD_RES (1), (3): Xaa is C or S
XAXSEVTMNRYKKLVVNKNEDFYLISIANMKE

SEQ ID NO: 84669 - protein, 30 aa, Artificial Sequence
  Cyclic GFR-binding peptide
  MOD_RES (1), (3): Xaa is C or S
XGXESVAMGRHKRLYTVVGKDYYLISTASL

SEQ ID NO: 84670 - protein, 29 aa, Artificial Sequence
  Cyclic GFR-binding peptide
VVMDEYKFKVVNNASDLYLISIPELRTPV

SEQ ID NO: 84671 - protein, 27 aa, Artificial Sequence
  Cyclic GFR-binding peptide
EVVMDRHKRLVVNNAADYYLISTASLR

SEQ ID NO: 84672 - protein, 29 aa, Artificial Sequence
  Cyclic GFR-binding peptide
  MOD_RES (28), (29): Xaa is C or S
MDRHKRLVVNNASDYYLISTASLRTPVXX

SEQ ID NO: 84673 - protein, 30 aa, Artificial Sequence
  Cyclic GFR-binding peptide
  MOD_RES (2), (2): Xaa is C or S
AXSEVTMNEYKFKVVNKNEDLYLISIPEMK

SEQ ID NO: 84674 - protein, 40 aa, Artificial Sequence; identical to SEQ ID NO: 32609
  Cyclic GFR-binding peptide
  MOD_RES (2), (4), (36), (37): Xaa is C or S

SEQ ID NO: 84675 - protein, 30 aa, Artificial Sequence
  Cyclic GFR-binding peptide
  MOD_RES (29), (30): Xaa is C or S
VMDYHYKLVVNNASDKYLISIPSLRTPVXX

SEQ ID NO: 84676 - protein, 40 aa, Artificial Sequence; identical to SEQ ID NO: 32610
  Cyclic GFR-binding peptide
  MOD_RES (2), (4), (35), (36): Xaa is C or S

SEQ ID NO: 84677 - protein, 33 aa, Artificial Sequence
  Cyclic GFR-binding peptide
  MOD_RES (29), (30): Xaa is C or S
TMNRHKRLVVNKNEDYYLISTASMKEPVXXPEP

SEQ ID NO: 84678 - protein, 32 aa, Artificial Sequence
  Cyclic GFR-binding peptide
  MOD_RES (1), (3): Xaa is C or S
XGXRDVVMGRHKRLIIQQKDNYYLMSTASMKT

SEQ ID NO: 84679 - protein, 25 aa, Artificial Sequence
  Cyclic GFR-binding peptide
VVMDRHKRLVVNNAADYYLISTASL

SEQ ID NO: 84680 - protein, 32 aa, Artificial Sequence; identical to SEQ ID NO: 32613
  Cyclic GFR-binding peptide
  MOD_RES (32), (32): Xaa is C or S

SEQ ID NO: 84681 - protein, 34 aa, Artificial Sequence
  Cyclic GFR-binding peptide
  MOD_RES (28), (29): Xaa is C or S
MGRHKRLYTVVGKDYYLISTASLKTPVXXAKSAK

SEQ ID NO: 84682 - protein, 28 aa, Artificial Sequence
  Cyclic GFR-binding peptide
RDVVMGEYKFKIIQQKDNLYLMSIPEMK

SEQ ID NO: 84683 - protein, 33 aa, Artificial Sequence; identical to SEQ ID NO: 32616
  Cyclic GFR-binding peptide
  MOD_RES (2), (2): Xaa is C or S

SEQ ID NO: 84684 - protein, 33 aa, Artificial Sequence
  Cyclic GFR-binding peptide
  MOD_RES (2), (4): Xaa is C or S
SXKXSKVIMPIKGYIKPTKGIFYLINIPSLDQS

SEQ ID NO: 84685 - protein, 32 aa, Artificial Sequence
  Cyclic GFR-binding peptide
  MOD_RES (29), (30): Xaa is C or S
VIMEYKFKLLVRGNDLYLMSIPETKVPAXXTS

SEQ ID NO: 84686 - protein, 31 aa, Artificial Sequence
  Cyclic GFR-binding peptide
  MOD_RES (2), (4): Xaa is C or S
RXAXSEVTMNEYKFKVVNKNEDLYLISIPEM

SEQ ID NO: 84687 - protein, 32 aa, Artificial Sequence
  Cyclic GFR-binding peptide
  MOD_RES (2), (2): Xaa is C or S
GXRDVVMGYHYKLIIQQKDNKYLMSIPSMKTP

SEQ ID NO: 84688 - protein, 34 aa, Artificial Sequence
  Cyclic GFR-binding peptide
  MOD_RES (29), (30): Xaa is C or S
VMDYHYKLVVNNASDKYLISIPSLRTPVXXTPPT

SEQ ID NO: 84689 - protein, 27 aa, Artificial Sequence
  Cyclic GFR-binding peptide
  MOD_RES (26), (27): Xaa is C or S
RYKKLVVNKNEDFYLISIANMKEPVXX

SEQ ID NO: 84690 - protein, 37 aa, Artificial Sequence; identical to SEQ ID NO: 32618
  Cyclic GFR-binding peptide
  MOD_RES (1), (3), (35), (36): Xaa is C or S

SEQ ID NO: 84691 - protein, 33 aa, Artificial Sequence; identical to SEQ ID NO: 32619
  Cyclic GFR-binding peptide
  MOD_RES (1), (32), (33): Xaa is C or S

SEQ ID NO: 84692 - protein, 20 aa, Artificial Sequence
  Cyclic GFR-binding peptide
PIKGYVKPKRGVFYLINIPS

SEQ ID NO: 84693 - protein, 28 aa, Artificial Sequence
  Cyclic GFR-binding peptide
AMGRHKRLYTVVGKDYYLISTASLKTPV

SEQ ID NO: 84694 - protein, 36 aa, Artificial Sequence; identical to SEQ ID NO: 32620
  Cyclic GFR-binding peptide
  MOD_RES (2), (4), (36): Xaa is C or S

SEQ ID NO: 84695 - protein, 28 aa, Artificial Sequence
  Cyclic GFR-binding peptide
SKVIMPIKGYIKPTKGIFYLINIPSLDQ

SEQ ID NO: 84696 - protein, 36 aa, Artificial Sequence; identical to SEQ ID NO: 32623
  Cyclic GFR-binding peptide
  MOD_RES (2), (4), (35), (36): Xaa is C or S

SEQ ID NO: 84697 - protein, 31 aa, Artificial Sequence
  Cyclic GFR-binding peptide
  MOD_RES (28), (29): Xaa is C or S
MNRHKRLVVNKNEDYYLISTASMKEPVXXPE

SEQ ID NO: 84698 - protein, 35 aa, Artificial Sequence
  Cyclic GFR-binding peptide
  MOD_RES (29), (30): Xaa is C or S
VMNRHKRLIVNSSDDYYLVSTASLKTPAXXPKPVH

SEQ ID NO: 84699 - protein, 35 aa, Artificial Sequence; identical to SEQ ID NO: 32624
  Cyclic GFR-binding peptide
  MOD_RES (2), (34), (35): Xaa is C or S

SEQ ID NO: 84700 - protein, 35 aa, Artificial Sequence; identical to SEQ ID NO: 32625
  Cyclic GFR-binding peptide
  MOD_RES (31), (32): Xaa is C or S

SEQ ID NO: 84701 - protein, 32 aa, Artificial Sequence; identical to SEQ ID NO: 32627
  Cyclic GFR-binding peptide
  MOD_RES (31), (32): Xaa is C or S

SEQ ID NO: 84702 - protein, 26 aa, Artificial Sequence
  Cyclic GFR-binding peptide
VVMDYHYKLVVNNASDKYLISIPSLR

SEQ ID NO: 84703 - protein, 35 aa, Artificial Sequence; identical to SEQ ID NO: 32628
  Cyclic GFR-binding peptide
  MOD_RES (31), (32): Xaa is C or S

SEQ ID NO: 84704 - protein, 30 aa, Artificial Sequence
  Cyclic GFR-binding peptide
  MOD_RES (1), (1): Xaa is C or S
XSEVVMDRHKRLVVNNASDYYLISTASLRT

SEQ ID NO: 84705 - protein, 36 aa, Artificial Sequence; identical to SEQ ID NO: 32629
  Cyclic GFR-binding peptide
  MOD_RES (2), (4), (36): Xaa is C or S

SEQ ID NO: 84706 - protein, 24 aa, Artificial Sequence
  Cyclic GFR-binding peptide
RHKRLIIQQKDNYYLMSTASMKTP

SEQ ID NO: 84707 - protein, 22 aa, Artificial Sequence
  Cyclic GFR-binding peptide
NYHYKLVVNKNEDKYLISIPSM

SEQ ID NO: 84708 - protein, 31 aa, Artificial Sequence
  Cyclic GFR-binding peptide
  MOD_RES (30), (31): Xaa is C or S
VVMDYHYKLVVNNASDKYLISIPSLRTPVXX

SEQ ID NO: 84709 - protein, 20 aa, Artificial Sequence
  Cyclic GFR-binding peptide
YHYKLIIQQKDNKYLMSIPS

SEQ ID NO: 84710 - protein, 32 aa, Artificial Sequence
  Cyclic GFR-binding peptide
  MOD_RES (29), (30): Xaa is C or S
TMNRHKRLVVNKNEDYYLISTASMKEPVXXPE

SEQ ID NO: 84711 - protein, 36 aa, Artificial Sequence
  Cyclic GFR-binding peptide
  MOD_RES (30), (31): Xaa is C or S
EVIMEYKFKLLVRGNDLYLMSIPETKVPAXXTSPVR

SEQ ID NO: 84712 - protein, 21 aa, Artificial Sequence
  Cyclic GFR-binding peptide
EYKFKLLVRGNDLYLMSIPET

SEQ ID NO: 84713 - protein, 28 aa, Artificial Sequence
  Cyclic GFR-binding peptide
  MOD_RES (27), (28): Xaa is C or S
GRHKRLYTVVGKDYYLISTASLKTPVXX

SEQ ID NO: 84714 - protein, 31 aa, Artificial Sequence
  Cyclic GFR-binding peptide
  MOD_RES (30), (31): Xaa is C or S
VVMDRHKRLVVNNASDYYLISTASLRTPVXX

SEQ ID NO: 84715 - protein, 30 aa, Artificial Sequence
  Cyclic GFR-binding peptide
  MOD_RES (29), (30): Xaa is C or S
VMDEYKFKVVNNASDLYLISIPELRTPVXX

SEQ ID NO: 84716 - protein, 23 aa, Artificial Sequence
  Cyclic GFR-binding peptide
NRHKRLVVNKNEDYYLISTASMK

SEQ ID NO: 84717 - protein, 33 aa, Artificial Sequence
  Cyclic GFR-binding peptide
  MOD_RES (28), (29): Xaa is C or S
VMPIKGYVKPTRGVFYLINIPSLDQPVXXPSAS

SEQ ID NO: 84718 - protein, 27 aa, Artificial Sequence
  Cyclic GFR-binding peptide
MNEYKFKVVNKNEDLYLISIPEMKEPV

SEQ ID NO: 84719 - protein, 29 aa, Artificial Sequence
  Cyclic GFR-binding peptide
  MOD_RES (27), (28): Xaa is C or S
NRYKKLVVNKNEDFYLISIANMKEPVXXP

SEQ ID NO: 84720 - protein, 28 aa, Artificial Sequence
  Cyclic GFR-binding peptide
VIMRHKRLLLVRGNDYYLMSTASTKVPA

SEQ ID NO: 84721 - protein, 37 aa, Artificial Sequence; identical to SEQ ID NO: 32634
  Cyclic GFR-binding peptide
  MOD_RES (1), (3), (35), (36): Xaa is C or S

SEQ ID NO: 84722 - protein, 35 aa, Artificial Sequence; identical to SEQ ID NO: 32635
  Cyclic GFR-binding peptide
  MOD_RES (2), (34), (35): Xaa is C or S

SEQ ID NO: 84723 - protein, 29 aa, Artificial Sequence
  Cyclic GFR-binding peptide
  MOD_RES (2), (4): Xaa is C or S
LXGXEEVIMRHKRLLLVRGNDYYLMSTAS

SEQ ID NO: 84724 - protein, 29 aa, Artificial Sequence
  Cyclic GFR-binding peptide
  MOD_RES (27), (28): Xaa is C or S
GEYKFKIIQQKDNLYLMSIPEMKTPTXXP

SEQ ID NO: 84725 - protein, 28 aa, Artificial Sequence
  Cyclic GFR-binding peptide
VIMPIKGYVKPKRGVFYLINIPSLAQPV

SEQ ID NO: 84726 - protein, 35 aa, Artificial Sequence; identical to SEQ ID NO: 32637
  Cyclic GFR-binding peptide
  MOD_RES (2), (4): Xaa is C or S

SEQ ID NO: 84727 - protein, 25 aa, Artificial Sequence
  Cyclic GFR-binding peptide
SKVIMPIKGYIKPTKGIFYLINIPS

SEQ ID NO: 84728 - protein, 33 aa, Artificial Sequence
  Cyclic GFR-binding peptide
  MOD_RES (30), (31): Xaa is C or S
KVVMPIKGYVKPTRGVFYLINIPSLDQPVXXPS

SEQ ID NO: 84729 - protein, 35 aa, Artificial Sequence; identical to SEQ ID NO: 32639
  Cyclic GFR-binding peptide
  MOD_RES (31), (32): Xaa is C or S

SEQ ID NO: 84730 - protein, 36 aa, Artificial Sequence; identical to SEQ ID NO: 32640
  Cyclic GFR-binding peptide
  MOD_RES (32), (33): Xaa is C or S

SEQ ID NO: 84731 - protein, 33 aa, Artificial Sequence; identical to SEQ ID NO: 32641
  Cyclic GFR-binding peptide
  MOD_RES (1), (32), (33): Xaa is C or S

SEQ ID NO: 84732 - protein, 26 aa, Artificial Sequence
  Cyclic GFR-binding peptide
VVMGEYKFKIIQQKDNLYLMSIPEMK

SEQ ID NO: 84733 - protein, 32 aa, Artificial Sequence; identical to SEQ ID NO: 32643
  Cyclic GFR-binding peptide
  MOD_RES (32), (32): Xaa is C or S

SEQ ID NO: 84734 - protein, 29 aa, Artificial Sequence
  Cyclic GFR-binding peptide
  MOD_RES (1), (3): Xaa is C or S
XGXRDVVMGEYKFKIIQQKDNLYLMSIPE

SEQ ID NO: 84735 - protein, 35 aa, Artificial Sequence; identical to SEQ ID NO: 21376
  Cyclic GFR-binding peptide
  MOD_RES (2), (4): Xaa is C or S

SEQ ID NO: 84736 - protein, 34 aa, Artificial Sequence; identical to SEQ ID NO: 32645
  Cyclic GFR-binding peptide
  MOD_RES (31), (32): Xaa is C or S

SEQ ID NO: 84737 - protein, 31 aa, Artificial Sequence
  Cyclic GFR-binding peptide
  MOD_RES (27), (28): Xaa is C or S
DRHKRLVVNNASDYYLISTASLRTPVXXTPP

SEQ ID NO: 84738 - protein, 28 aa, Artificial Sequence
  Cyclic GFR-binding peptide
  MOD_RES (2), (2): Xaa is C or S
GXEEVIMYHYKLLLVRGNDKYLMSIPST

SEQ ID NO: 84739 - protein, 37 aa, Artificial Sequence; identical to SEQ ID NO: 32650
  Cyclic GFR-binding peptide
  MOD_RES (32), (33): Xaa is C or S

SEQ ID NO: 84740 - protein, 31 aa, Artificial Sequence; identical to SEQ ID NO: 32651
  Cyclic GFR-binding peptide

SEQ ID NO: 84741 - protein, 36 aa, Artificial Sequence; identical to SEQ ID NO: 32653
  Cyclic GFR-binding peptide
  MOD_RES (1), (3), (35), (36): Xaa is C or S

SEQ ID NO: 84742 - protein, 34 aa, Artificial Sequence
  Cyclic GFR-binding peptide
  MOD_RES (30), (31): Xaa is C or S
VTMNRYKKLVVNKNEDFYLISIANMKEPVXXPEP

SEQ ID NO: 84743 - protein, 24 aa, Artificial Sequence
  Cyclic GFR-binding peptide
NYHYKLVVNKNEDKYLISIPSMKE

SEQ ID NO: 84744 - protein, 33 aa, Artificial Sequence; identical to SEQ ID NO: 32655
  Cyclic GFR-binding peptide
  MOD_RES (1), (33): Xaa is C or S

SEQ ID NO: 84745 - protein, 28 aa, Artificial Sequence
  Cyclic GFR-binding peptide
  MOD_RES (26), (27): Xaa is C or S
PIKGYVKPTRGVFYLINIPSLDQPVXXP

SEQ ID NO: 84746 - protein, 25 aa, Artificial Sequence
  Cyclic GFR-binding peptide
EEVIMRHKRLLLVRGNDYYLMSTAS

SEQ ID NO: 84747 - protein, 34 aa, Artificial Sequence; identical to SEQ ID NO: 32656
  Cyclic GFR-binding peptide
  MOD_RES (1), (33), (34): Xaa is C or S

SEQ ID NO: 84748 - protein, 36 aa, Artificial Sequence; identical to SEQ ID NO: 32658
  Cyclic GFR-binding peptide
  MOD_RES (1), (3), (35), (36): Xaa is C or S

SEQ ID NO: 84749 - protein, 25 aa, Artificial Sequence
  Cyclic GFR-binding peptide
YHYKLLLVRGNDKYLMSIPSTKVPA

SEQ ID NO: 84750 - protein, 25 aa, Artificial Sequence
  Cyclic GFR-binding peptide
NYHYKLVVNKNEDKYLISIPSMKEP

SEQ ID NO: 84751 - protein, 25 aa, Artificial Sequence
  Cyclic GFR-binding peptide
EYKFKVVNKNEDLYLISIPEMKEPV

SEQ ID NO: 84752 - protein, 22 aa, Artificial Sequence
  Cyclic GFR-binding peptide
MRHKRLLLVRGNDYYLMSTAST

SEQ ID NO: 84753 - protein, 26 aa, Artificial Sequence
  Cyclic GFR-binding peptide
TMNPIKGYVVNKNEDFYLINIPSMKE

SEQ ID NO: 84754 - protein, 33 aa, Artificial Sequence; identical to SEQ ID NO: 32662
  Cyclic GFR-binding peptide
  MOD_RES (32), (33): Xaa is C or S

SEQ ID NO: 84755 - protein, 30 aa, Artificial Sequence
  Cyclic GFR-binding peptide
  MOD_RES (26), (27): Xaa is C or S
PIKGYVKPTRGVFYLINIPSLDQPVXXPSA

SEQ ID NO: 84756 - protein, 31 aa, Artificial Sequence
  Cyclic GFR-binding peptide
  MOD_RES (30), (31): Xaa is C or S
VTMNEYKFKVVNKNEDLYLISIPEMKEPVXX

SEQ ID NO: 84757 - protein, 29 aa, Artificial Sequence
  Cyclic GFR-binding peptide
  MOD_RES (27), (28): Xaa is C or S
DRHKRLVVNNAADYYLISTASLRAPVXXS

SEQ ID NO: 84758 - protein, 20 aa, Artificial Sequence
  Cyclic GFR-binding peptide
RHKRLLLVRGNDYYLMSTAS

SEQ ID NO: 84759 - protein, 29 aa, Artificial Sequence
  Cyclic GFR-binding peptide
  MOD_RES (1), (3): Xaa is C or S
XGXEEVIMRHKRLLLVRGNDYYLMSTAST

SEQ ID NO: 84760 - protein, 33 aa, Artificial Sequence
  Cyclic GFR-binding peptide
  MOD_RES (30), (31): Xaa is C or S
VTMNYHYKLVVNKNEDKYLISIPSMKEPVXXPE

SEQ ID NO: 84761 - protein, 41 aa, Artificial Sequence; identical to SEQ ID NO: 32668
  Cyclic GFR-binding peptide
  MOD_RES (1), (3), (35), (36): Xaa is C or S

SEQ ID NO: 84762 - protein, 34 aa, Artificial Sequence
  Cyclic GFR-binding peptide
  MOD_RES (29), (30): Xaa is C or S
VMDRHKRLVVNNASDYYLISTASLRTPVXXTPPT

SEQ ID NO: 84763 - protein, 25 aa, Artificial Sequence
  Cyclic GFR-binding peptide
IMYHYKLLLVRGNDKYLMSIPSTKV

SEQ ID NO: 84764 - protein, 36 aa, Artificial Sequence; identical to SEQ ID NO: 32672
  Cyclic GFR-binding peptide
  MOD_RES (31), (32): Xaa is C or S

SEQ ID NO: 84765 - protein, 28 aa, Artificial Sequence
  Cyclic GFR-binding peptide
  MOD_RES (28), (28): Xaa is C or S
MDRHKRLVVNNAADYYLISTASLRAPVX

SEQ ID NO: 84766 - protein, 29 aa, Artificial Sequence
  Cyclic GFR-binding peptide
SEVTMNRHKRLVVNKNEDYYLISTASMKE

SEQ ID NO: 84767 - protein, 37 aa, Artificial Sequence; identical to SEQ ID NO: 32673
  Cyclic GFR-binding peptide
  MOD_RES (2), (34), (35): Xaa is C or S

SEQ ID NO: 84768 - protein, 30 aa, Artificial Sequence
  Cyclic GFR-binding peptide
  MOD_RES (30), (30): Xaa is C or S
VVMDYHYKLVVNNASDKYLISIPSLRTPVX

SEQ ID NO: 84769 - protein, 30 aa, Artificial Sequence
  Cyclic GFR-binding peptide
SEVTMNYHYKLVVNKNEDKYLISIPSMKEP

SEQ ID NO: 84770 - protein, 28 aa, Artificial Sequence
  Cyclic GFR-binding peptide
  MOD_RES (2), (2): Xaa is C or S
AXSEVTMNPIKGYVVNKNEDFYLINIPS

SEQ ID NO: 84771 - protein, 37 aa, Artificial Sequence; identical to SEQ ID NO: 32675
  Cyclic GFR-binding peptide
  MOD_RES (31), (32): Xaa is C or S

SEQ ID NO: 84772 - protein, 36 aa, Artificial Sequence; identical to SEQ ID NO: 32676
  Cyclic GFR-binding peptide
  MOD_RES (2), (4), (36): Xaa is C or S

SEQ ID NO: 84773 - protein, 30 aa, Artificial Sequence
  Cyclic GFR-binding peptide
  MOD_RES (29), (30): Xaa is C or S
VVMPIKGYVKPTRGVFYLINIPSLDQPVXX

SEQ ID NO: 84774 - protein, 22 aa, Artificial Sequence
  Cyclic GFR-binding peptide
MDRHKRLVVNNASDYYLISTAS

SEQ ID NO: 84775 - protein, 40 aa, Artificial Sequence; identical to SEQ ID NO: 32679
  Cyclic GFR-binding peptide
  MOD_RES (1), (3), (35), (36): Xaa is C or S

SEQ ID NO: 84776 - protein, 26 aa, Artificial Sequence
  Cyclic GFR-binding peptide
EVVMDYHYKLVVNNASDKYLISIPSL

SEQ ID NO: 84777 - protein, 40 aa, Artificial Sequence; identical to SEQ ID NO: 32681
  Cyclic GFR-binding peptide
  MOD_RES (2), (34), (35): Xaa is C or S

SEQ ID NO: 84778 - protein, 37 aa, Artificial Sequence; identical to SEQ ID NO: 32683
  Cyclic GFR-binding peptide
  MOD_RES (1), (33), (34): Xaa is C or S

SEQ ID NO: 84779 - protein, 35 aa, Artificial Sequence; identical to SEQ ID NO: 32684
  Cyclic GFR-binding peptide
  MOD_RES (2), (4), (35): Xaa is C or S

SEQ ID NO: 84780 - protein, 31 aa, Artificial Sequence
  Cyclic GFR-binding peptide
  MOD_RES (26), (27): Xaa is C or S
YHYKLVVNNASDKYLISIPSLRTPVXXTPPT

SEQ ID NO: 84781 - protein, 25 aa, Artificial Sequence
  Cyclic GFR-binding peptide
EVTMNEYKFKVVNKNEDLYLISIPE

SEQ ID NO: 84782 - protein, 31 aa, Artificial Sequence
  Cyclic GFR-binding peptide
  MOD_RES (2), (4): Xaa is C or S
SXKXSRVIMPIKGYVKPKRGVFYLINIPSLA

SEQ ID NO: 84783 - protein, 41 aa, Artificial Sequence; identical to SEQ ID NO: 32687
  Cyclic GFR-binding peptide
  MOD_RES (1), (3), (35), (36): Xaa is C or S

SEQ ID NO: 84784 - protein, 34 aa, Artificial Sequence; identical to SEQ ID NO: 32688
  Cyclic GFR-binding peptide
  MOD_RES (31), (32): Xaa is C or S

SEQ ID NO: 84785 - protein, 34 aa, Artificial Sequence
  Cyclic GFR-binding peptide
  MOD_RES (29), (30): Xaa is C or S
VMGEYKFKIIQQKDNLYLMSIPEMKTPTXXPGAS

SEQ ID NO: 84786 - protein, 35 aa, Artificial Sequence; identical to SEQ ID NO: 32689
  Cyclic GFR-binding peptide
  MOD_RES (1), (33), (34): Xaa is C or S

SEQ ID NO: 84787 - protein, 31 aa, Artificial Sequence
  Cyclic GFR-binding peptide
  MOD_RES (2), (4): Xaa is C or S
LXGXEEVIMEYKFKLLVRGNDLYLMSIPETK

SEQ ID NO: 84788 - protein, 40 aa, Artificial Sequence; identical to SEQ ID NO: 32690
  Cyclic GFR-binding peptide
  MOD_RES (1), (3), (35), (36): Xaa is C or S

SEQ ID NO: 84789 - protein, 36 aa, Artificial Sequence; identical to SEQ ID NO: 32691
  Cyclic GFR-binding peptide
  MOD_RES (2), (34), (35): Xaa is C or S

SEQ ID NO: 84790 - protein, 23 aa, Artificial Sequence
  Cyclic GFR-binding peptide
RHKRLLLVRGNDYYLMSTASTKV

SEQ ID NO: 84791 - protein, 32 aa, Artificial Sequence
  Cyclic GFR-binding peptide
  MOD_RES (1), (3): Xaa is C or S
XGXRDVVMGYHYKLIIQQKDNKYLMSIPSMKT

SEQ ID NO: 84792 - protein, 22 aa, Artificial Sequence
  Cyclic GFR-binding peptide
RHKRLVVNKNEDYYLISTASMK

SEQ ID NO: 84793 - protein, 30 aa, Artificial Sequence
  Cyclic GFR-binding peptide
  MOD_RES (30), (30): Xaa is C or S
EVIMRHKRLLLVRGNDYYLMSTASTKVPAX

SEQ ID NO: 84794 - protein, 40 aa, Artificial Sequence; identical to SEQ ID NO: 32692
  Cyclic GFR-binding peptide
  MOD_RES (1), (3), (35), (36): Xaa is C or S

SEQ ID NO: 84795 - protein, 33 aa, Artificial Sequence; identical to SEQ ID NO: 32693
  Cyclic GFR-binding peptide
  MOD_RES (2), (2): Xaa is C or S

SEQ ID NO: 84796 - protein, 31 aa, Artificial Sequence
  Cyclic GFR-binding peptide
  MOD_RES (2), (4): Xaa is C or S
LXGXEEVIMYHYKLLLVRGNDKYLMSIPSTK

SEQ ID NO: 84797 - protein, 37 aa, Artificial Sequence; identical to SEQ ID NO: 32695
  Cyclic GFR-binding peptide
  MOD_RES (1), (33), (34): Xaa is C or S

SEQ ID NO: 84798 - protein, 39 aa, Artificial Sequence; identical to SEQ ID NO: 32696
  Cyclic GFR-binding peptide
  MOD_RES (2), (34), (35): Xaa is C or S

SEQ ID NO: 84799 - protein, 32 aa, Artificial Sequence
  Cyclic GFR-binding peptide
  MOD_RES (1), (3): Xaa is C or S
XGXRDVVMGEYKFKIIQQKDNLYLMSIPEMKT

SEQ ID NO: 84800 - protein, 25 aa, Artificial Sequence
  Cyclic GFR-binding peptide
GRHKRLIIQQKDNYYLMSTASMKTP

SEQ ID NO: 84801 - protein, 27 aa, Artificial Sequence
  Cyclic GFR-binding peptide
EVIMYHYKLLLVRGNDKYLMSIPSTKV

SEQ ID NO: 84802 - protein, 36 aa, Artificial Sequence; identical to SEQ ID NO: 32697
  Cyclic GFR-binding peptide
  MOD_RES (2), (4), (35), (36): Xaa is C or S

SEQ ID NO: 84803 - protein, 36 aa, Artificial Sequence; identical to SEQ ID NO: 32698
  Cyclic GFR-binding peptide
  MOD_RES (2), (34), (35): Xaa is C or S

SEQ ID NO: 84804 - protein, 40 aa, Artificial Sequence; identical to SEQ ID NO: 32699
  Cyclic GFR-binding peptide
  MOD_RES (2), (4), (36), (37): Xaa is C or S

SEQ ID NO: 84805 - protein, 28 aa, Artificial Sequence
  Cyclic GFR-binding peptide
  MOD_RES (27), (28): Xaa is C or S
MRHKRLLLVRGNDYYLMSTASTKVPAXX

SEQ ID NO: 84806 - protein, 35 aa, Artificial Sequence; identical to SEQ ID NO: 32700
  Cyclic GFR-binding peptide
  MOD_RES (31), (32): Xaa is C or S

SEQ ID NO: 84807 - protein, 31 aa, Artificial Sequence; identical to SEQ ID NO: 32703
  Cyclic GFR-binding peptide
  MOD_RES (1), (1): Xaa is C or S

SEQ ID NO: 84808 - protein, 28 aa, Artificial Sequence
  Cyclic GFR-binding peptide
  MOD_RES (1), (1): Xaa is C or S
XAEVVMDRHKRLVVNNAADYYLISTASL

SEQ ID NO: 84809 - protein, 23 aa, Artificial Sequence
  Cyclic GFR-binding peptide
TMNEYKFKVVNKNEDLYLISIPE

SEQ ID NO: 84810 - protein, 27 aa, Artificial Sequence
  Cyclic GFR-binding peptide
VTMNRHKRLVVNKNEDYYLISTASMKE

SEQ ID NO: 84811 - protein, 41 aa, Artificial Sequence; identical to SEQ ID NO: 32704
  Cyclic GFR-binding peptide
  MOD_RES (2), (4), (36), (37): Xaa is C or S

SEQ ID NO: 84812 - protein, 30 aa, Artificial Sequence
  Cyclic GFR-binding peptide
  MOD_RES (30), (30): Xaa is C or S
VTMNRHKRLVVNKNEDYYLISTASMKEPVX

SEQ ID NO: 84813 - protein, 24 aa, Artificial Sequence
  Cyclic GFR-binding peptide
VMDEYKFKVVNNASDLYLISIPEL

SEQ ID NO: 84814 - protein, 25 aa, Artificial Sequence
  Cyclic GFR-binding peptide
YHYKLIIQQKDNKYLMSIPSMKTPT

SEQ ID NO: 84815 - protein, 29 aa, Artificial Sequence
  Cyclic GFR-binding peptide
  MOD_RES (1), (3): Xaa is C or S
XGXRDVVMGYHYKLIIQQKDNKYLMSIPS

SEQ ID NO: 84816 - protein, 26 aa, Artificial Sequence
  Cyclic GFR-binding peptide
  MOD_RES (26), (26): Xaa is C or S
RHKRLYTVVGKDYYLISTASLKTPVX

SEQ ID NO: 84817 - protein, 39 aa, Artificial Sequence; identical to SEQ ID NO: 32708
  Cyclic GFR-binding peptide
  MOD_RES (1), (3), (35), (36): Xaa is C or S

SEQ ID NO: 84818 - protein, 39 aa, Artificial Sequence; identical to SEQ ID NO: 32709
  Cyclic GFR-binding peptide
  MOD_RES (2), (34), (35): Xaa is C or S

SEQ ID NO: 84819 - protein, 32 aa, Artificial Sequence
  Cyclic GFR-binding peptide
  MOD_RES (29), (30): Xaa is C or S
TMNEYKFKVVNKNEDLYLISIPEMKEPVXXPE

SEQ ID NO: 84820 - protein, 33 aa, Artificial Sequence; identical to SEQ ID NO: 32711
  Cyclic GFR-binding peptide
  MOD_RES (31), (32): Xaa is C or S

SEQ ID NO: 84821 - protein, 35 aa, Artificial Sequence
  Cyclic GFR-binding peptide
  MOD_RES (30), (31): Xaa is C or S
VTMNYHYKLVVNKNEDKYLISIPSMKEPVXXPEPI

SEQ ID NO: 84822 - protein, 28 aa, Artificial Sequence
  Cyclic GFR-binding peptide
  MOD_RES (1), (3): Xaa is C or S
XGXEEVIMEYKFKLLVRGNDLYLMSIPE

SEQ ID NO: 84823 - protein, 23 aa, Artificial Sequence
  Cyclic GFR-binding peptide
VMPIKGYVKPTRGVFYLINIPSL

SEQ ID NO: 84824 - protein, 33 aa, Artificial Sequence
  Cyclic GFR-binding peptide
  MOD_RES (29), (30): Xaa is C or S
VIMEYKFKLLVRGNDLYLMSIPETKVPAXXTSP

SEQ ID NO: 84825 - protein, 34 aa, Artificial Sequence
  Cyclic GFR-binding peptide
  MOD_RES (28), (29): Xaa is C or S
MDEYKFKVVNNASDLYLISIPELRTPVXXTPPTS

SEQ ID NO: 84826 - protein, 38 aa, Artificial Sequence; identical to SEQ ID NO: 32715
  Cyclic GFR-binding peptide
  MOD_RES (1), (3), (34), (35): Xaa is C or S

SEQ ID NO: 84827 - protein, 27 aa, Artificial Sequence
  Cyclic GFR-binding peptide
  MOD_RES (1), (1): Xaa is C or S
XSEVTMNPIKGYVVNKNEDFYLINIPS

SEQ ID NO: 84828 - protein, 36 aa, Artificial Sequence; identical to SEQ ID NO: 20658
  Cyclic GFR-binding peptide
  MOD_RES (2), (4): Xaa is C or S

SEQ ID NO: 84829 - protein, 36 aa, Artificial Sequence; identical to SEQ ID NO: 32717
  Cyclic GFR-binding peptide
  MOD_RES (2), (33), (34): Xaa is C or S

SEQ ID NO: 84830 - protein, 37 aa, Artificial Sequence; identical to SEQ ID NO: 32718
  Cyclic GFR-binding peptide
  MOD_RES (1), (33), (34): Xaa is C or S

SEQ ID NO: 84831 - protein, 26 aa, Artificial Sequence
  Cyclic GFR-binding peptide
SEVTMNPIKGYVVNKNEDFYLINIPS

SEQ ID NO: 84832 - protein, 33 aa, Artificial Sequence
  Cyclic GFR-binding peptide
  MOD_RES (28), (29): Xaa is C or S
IMEYKFKLLVRGNDLYLMSIPETKVPAXXTSPV

SEQ ID NO: 84833 - protein, 27 aa, Artificial Sequence
  Cyclic GFR-binding peptide
  MOD_RES (26), (27): Xaa is C or S
YHYKLVVNNASDKYLISIPSLRTPVXX

SEQ ID NO: 84834 - protein, 32 aa, Artificial Sequence; identical to SEQ ID NO: 32719
  Cyclic GFR-binding peptide
  MOD_RES (1), (1): Xaa is C or S

SEQ ID NO: 84835 - protein, 24 aa, Artificial Sequence
  Cyclic GFR-binding peptide
TMNRHKRLVVNKNEDYYLISTASM

SEQ ID NO: 84836 - protein, 22 aa, Artificial Sequence
  Cyclic GFR-binding peptide
MNEYKFKVVNKNEDLYLISIPE

SEQ ID NO: 84837 - protein, 30 aa, Artificial Sequence
  Cyclic GFR-binding peptide
  MOD_RES (28), (29): Xaa is C or S
MGRHKRLIIQQKDNYYLMSTASMKTPTXXP

SEQ ID NO: 84838 - protein, 26 aa, Artificial Sequence
  Cyclic GFR-binding peptide
VMGEYKFKIIQQKDNLYLMSIPEMKT

SEQ ID NO: 84839 - protein, 30 aa, Artificial Sequence
  Cyclic GFR-binding peptide
  MOD_RES (1), (3): Xaa is C or S
XGXRDVVMGYHYKLIIQQKDNKYLMSIPSM

SEQ ID NO: 84840 - protein, 42 aa, Artificial Sequence; identical to SEQ ID NO: 32720
  Cyclic GFR-binding peptide
  MOD_RES (2), (4), (36), (37): Xaa is C or S

SEQ ID NO: 84841 - protein, 29 aa, Artificial Sequence
  Cyclic GFR-binding peptide
AAAAAAAAARHKRLIIQQKDNYYLMSTAS

SEQ ID NO: 84842 - protein, 35 aa, Artificial Sequence
  Cyclic GFR-binding peptide
  MOD_RES (30), (31): Xaa is C or S
RVIMPIKGYVKPKRGVFYLINIPSLAQPVXXPAAS

SEQ ID NO: 84843 - protein, 35 aa, Artificial Sequence; identical to SEQ ID NO: 32721
  Cyclic GFR-binding peptide
  MOD_RES (32), (33): Xaa is C or S

SEQ ID NO: 84844 - protein, 29 aa, Artificial Sequence
  Cyclic GFR-binding peptide
  MOD_RES (1), (1): Xaa is C or S
XSEVTMNRYKKLVVNKNEDFYLISIANMK

SEQ ID NO: 84845 - protein, 28 aa, Artificial Sequence
  Cyclic GFR-binding peptide
  MOD_RES (1), (1): Xaa is C or S
XSEVTMNPIKGYVVNKNEDFYLINIPSM

SEQ ID NO: 84846 - protein, 34 aa, Artificial Sequence
  Cyclic GFR-binding peptide
  MOD_RES (29), (30): Xaa is C or S
AMGRHKRLYTVVGKDYYLISTASLKTPVXXAKSA

SEQ ID NO: 84847 - protein, 36 aa, Artificial Sequence; identical to SEQ ID NO: 32722
  Cyclic GFR-binding peptide
  MOD_RES (31), (32): Xaa is C or S

SEQ ID NO: 84848 - protein, 35 aa, Artificial Sequence; identical to SEQ ID NO: 32723
  Cyclic GFR-binding peptide
  MOD_RES (31), (32): Xaa is C or S

SEQ ID NO: 84849 - protein, 28 aa, Artificial Sequence
  Cyclic GFR-binding peptide
  MOD_RES (27), (28): Xaa is C or S
DYHYKLVVNNASDKYLISIPSLRTPVXX

SEQ ID NO: 84850 - protein, 27 aa, Artificial Sequence
  Cyclic GFR-binding peptide
EVTMNRYKKLVVNKNEDFYLISIANMK

SEQ ID NO: 84851 - protein, 33 aa, Artificial Sequence
  Cyclic GFR-binding peptide
  MOD_RES (1), (3): Xaa is C or S
XAXSEVTMNRYKKLVVNKNEDFYLISIANMKEP

SEQ ID NO: 84852 - protein, 37 aa, Artificial Sequence; identical to SEQ ID NO: 32727
  Cyclic GFR-binding peptide
  MOD_RES (32), (33): Xaa is C or S

SEQ ID NO: 84853 - protein, 29 aa, Artificial Sequence
  Cyclic GFR-binding peptide
EVIMEYKFKLLVRGNDLYLMSIPETKVPA

SEQ ID NO: 84854 - protein, 35 aa, Artificial Sequence; identical to SEQ ID NO: 32729
  Cyclic GFR-binding peptide
  MOD_RES (1), (3), (35): Xaa is C or S

SEQ ID NO: 84855 - protein, 29 aa, Artificial Sequence
  Cyclic GFR-binding peptide
  MOD_RES (29), (29): Xaa is C or S
VMDYHYKLVVNNASDKYLISIPSLRTPVX

SEQ ID NO: 84856 - protein, 34 aa, Artificial Sequence
  Cyclic GFR-binding peptide
  MOD_RES (30), (31): Xaa is C or S
VVMDEYKFKVVNNASDLYLISIPELRTPVXXTPP

SEQ ID NO: 84857 - protein, 21 aa, Artificial Sequence
  Cyclic GFR-binding peptide
DRHKRLVVNNASDYYLISTAS

SEQ ID NO: 84858 - protein, 34 aa, Artificial Sequence; identical to SEQ ID NO: 32730
  Cyclic GFR-binding peptide
  MOD_RES (31), (32): Xaa is C or S

SEQ ID NO: 84859 - protein, 31 aa, Artificial Sequence
  Cyclic GFR-binding peptide
  MOD_RES (26), (27): Xaa is C or S
RHKRLYTVVGKDYYLISTASLKTPVXXAKSA

SEQ ID NO: 84860 - protein, 30 aa, Artificial Sequence
  Cyclic GFR-binding peptide
  MOD_RES (1), (1): Xaa is C or S
XSKVVMPIKGYVKPTRGVFYLINIPSLDQP

SEQ ID NO: 84861 - protein, 32 aa, Artificial Sequence
  Cyclic GFR-binding peptide
  MOD_RES (26), (27): Xaa is C or S
EYKFKIVNSSDDLYLVSIPELKTPAXXPKPVH

SEQ ID NO: 84862 - protein, 33 aa, Artificial Sequence; identical to SEQ ID NO: 32734
  Cyclic GFR-binding peptide
  MOD_RES (31), (32): Xaa is C or S

SEQ ID NO: 84863 - protein, 32 aa, Artificial Sequence
  Cyclic GFR-binding peptide
  MOD_RES (30), (31): Xaa is C or S
VAMGRHKRLYTVVGKDYYLISTASLKTPVXXA

SEQ ID NO: 84864 - protein, 37 aa, Artificial Sequence; identical to SEQ ID NO: 32737
  Cyclic GFR-binding peptide
  MOD_RES (1), (32), (33): Xaa is C or S

SEQ ID NO: 84865 - protein, 28 aa, Artificial Sequence
  Cyclic GFR-binding peptide
KVVMPIKGYVKPTRGVFYLINIPSLDQP

SEQ ID NO: 84866 - protein, 29 aa, Artificial Sequence
  Cyclic GFR-binding peptide
  MOD_RES (1), (3): Xaa is C or S
XKXSRVIMPIKGYVKPKRGVFYLINIPSL

SEQ ID NO: 84867 - protein, 39 aa, Artificial Sequence; identical to SEQ ID NO: 32739
  Cyclic GFR-binding peptide
  MOD_RES (2), (34), (35): Xaa is C or S

SEQ ID NO: 84868 - protein, 32 aa, Artificial Sequence
  Cyclic GFR-binding peptide
  MOD_RES (28), (29): Xaa is C or S
MGRHKRLYTVVGKDYYLISTASLKTPVXXAKS

SEQ ID NO: 84869 - protein, 38 aa, Artificial Sequence; identical to SEQ ID NO: 32740
  Cyclic GFR-binding peptide
  MOD_RES (2), (34), (35): Xaa is C or S

SEQ ID NO: 84870 - protein, 29 aa, Artificial Sequence
  Cyclic GFR-binding peptide
  MOD_RES (26), (27): Xaa is C or S
YHYKLVVNKNEDKYLISIPSMKEPVXXPE

SEQ ID NO: 84871 - protein, 34 aa, Artificial Sequence; identical to SEQ ID NO: 32741
  Cyclic GFR-binding peptide
  MOD_RES (2), (33), (34): Xaa is C or S

SEQ ID NO: 84872 - protein, 28 aa, Artificial Sequence
  Cyclic GFR-binding peptide
AEVVMDRHKRLVVNNAADYYLISTASLR

SEQ ID NO: 84873 - protein, 36 aa, Artificial Sequence; identical to SEQ ID NO: 32742
  Cyclic GFR-binding peptide
  MOD_RES (1), (3), (35), (36): Xaa is C or S

SEQ ID NO: 84874 - protein, 32 aa, Artificial Sequence
  Cyclic GFR-binding peptide
  MOD_RES (28), (29): Xaa is C or S
IMRHKRLLLVRGNDYYLMSTASTKVPAXXTSP

SEQ ID NO: 84875 - protein, 35 aa, Artificial Sequence; identical to SEQ ID NO: 32743
  Cyclic GFR-binding peptide
  MOD_RES (31), (32): Xaa is C or S

SEQ ID NO: 84876 - protein, 25 aa, Artificial Sequence
  Cyclic GFR-binding peptide
VVMGRHKRLIIQQKDNYYLMSTASM

SEQ ID NO: 84877 - protein, 25 aa, Artificial Sequence
  Cyclic GFR-binding peptide
DRHKRLVVNNASDYYLISTASLRTP

SEQ ID NO: 84878 - protein, 30 aa, Artificial Sequence
  Cyclic GFR-binding peptide
  MOD_RES (2), (4): Xaa is C or S
RXGXAEVVMDRHKRLVVNNAADYYLISTAS

SEQ ID NO: 84879 - protein, 32 aa, Artificial Sequence
  Cyclic GFR-binding peptide
  MOD_RES (28), (29): Xaa is C or S
IMYHYKLLLVRGNDKYLMSIPSTKVPAXXTSP

SEQ ID NO: 84880 - protein, 33 aa, Artificial Sequence; identical to SEQ ID NO: 32747
  Cyclic GFR-binding peptide
  MOD_RES (2), (33): Xaa is C or S

SEQ ID NO: 84881 - protein, 29 aa, Artificial Sequence
  Cyclic GFR-binding peptide
  MOD_RES (26), (27): Xaa is C or S
YHYKLIIQQKDNKYLMSIPSMKTPTXXPG

SEQ ID NO: 84882 - protein, 32 aa, Artificial Sequence
  Cyclic GFR-binding peptide
  MOD_RES (26), (27): Xaa is C or S
RHKRLYTVVGKDYYLISTASLKTPVXXAKSAK

SEQ ID NO: 84883 - protein, 34 aa, Artificial Sequence
  Cyclic GFR-binding peptide
  MOD_RES (28), (29): Xaa is C or S
VMPIKGYVKPTRGVFYLINIPSLDQPVXXPSASA

SEQ ID NO: 84884 - protein, 25 aa, Artificial Sequence
  Cyclic GFR-binding peptide
EVTMNRHKRLVVNKNEDYYLISTAS

SEQ ID NO: 84885 - protein, 37 aa, Artificial Sequence; identical to SEQ ID NO: 32748
  Cyclic GFR-binding peptide
  MOD_RES (2), (33), (34): Xaa is C or S

SEQ ID NO: 84886 - protein, 35 aa, Artificial Sequence; identical to SEQ ID NO: 32749
  Cyclic GFR-binding peptide
  MOD_RES (1), (33), (34): Xaa is C or S

SEQ ID NO: 84887 - protein, 28 aa, Artificial Sequence
  Cyclic GFR-binding peptide
VMGYHYKLIIQQKDNKYLMSIPSMKTPT

SEQ ID NO: 84888 - protein, 32 aa, Artificial Sequence
  Cyclic GFR-binding peptide
  MOD_RES (28), (29): Xaa is C or S
MNRHKRLVVNKNEDYYLISTASMKEPVXXPEP

SEQ ID NO: 84889 - protein, 32 aa, Artificial Sequence
  Cyclic GFR-binding peptide
  MOD_RES (28), (29): Xaa is C or S
MNYHYKLVVNKNEDKYLISIPSMKEPVXXPEP

SEQ ID NO: 84890 - protein, 27 aa, Artificial Sequence
  Cyclic GFR-binding peptide
VVMGYHYKLIIQQKDNKYLMSIPSMKT

SEQ ID NO: 84891 - protein, 31 aa, Artificial Sequence
  Cyclic GFR-binding peptide
  MOD_RES (30), (31): Xaa is C or S
RVIMPIKGYVKPKRGVFYLINIPSLAQPVXX

SEQ ID NO: 84892 - protein, 32 aa, Artificial Sequence
  Cyclic GFR-binding peptide
  MOD_RES (28), (29): Xaa is C or S
MDEYKFKVVNNASDLYLISIPELRTPVXXTPP

SEQ ID NO: 84893 - protein, 37 aa, Artificial Sequence; identical to SEQ ID NO: 32753
  Cyclic GFR-binding peptide
  MOD_RES (1), (32), (33): Xaa is C or S

SEQ ID NO: 84894 - protein, 24 aa, Artificial Sequence
  Cyclic GFR-binding peptide
IMEYKFKLLVRGNDLYLMSIPETK

SEQ ID NO: 84895 - protein, 27 aa, Artificial Sequence
  Cyclic GFR-binding peptide
  MOD_RES (26), (27): Xaa is C or S
EYKFKLLVRGNDLYLMSIPETKVPAXX

SEQ ID NO: 84896 - protein, 33 aa, Artificial Sequence; identical to SEQ ID NO: 32754
  Cyclic GFR-binding peptide
  MOD_RES (31), (32): Xaa is C or S

SEQ ID NO: 84897 - protein, 22 aa, Artificial Sequence
  Cyclic GFR-binding peptide
YHYKLLLVRGNDKYLMSIPSTK

SEQ ID NO: 84898 - protein, 40 aa, Artificial Sequence; identical to SEQ ID NO: 32755
  Cyclic GFR-binding peptide
  MOD_RES (1), (3), (34), (35): Xaa is C or S

SEQ ID NO: 84899 - protein, 33 aa, Artificial Sequence
  Cyclic GFR-binding peptide
  MOD_RES (27), (28): Xaa is C or S
MEYKFKLLVRGNDLYLMSIPETKVPAXXTSPVR

SEQ ID NO: 84900 - protein, 32 aa, Artificial Sequence
  Cyclic GFR-binding peptide
  MOD_RES (26), (27): Xaa is C or S
PIKGYVVNKNEDFYLINIPSMKEPVXXPEPIG

SEQ ID NO: 84901 - protein, 24 aa, Artificial Sequence
  Cyclic GFR-binding peptide
IMPIKGYVKPKRGVFYLINIPSLA

SEQ ID NO: 84902 - protein, 27 aa, Artificial Sequence
  Cyclic GFR-binding peptide
  MOD_RES (1), (1): Xaa is C or S
XSEVTMNYHYKLVVNKNEDKYLISIPS

SEQ ID NO: 84903 - protein, 20 aa, Artificial Sequence
  Cyclic GFR-binding peptide
YHYKLVVNKNEDKYLISIPS

SEQ ID NO: 84904 - protein, 24 aa, Artificial Sequence
  Cyclic GFR-binding peptide
MDRHKRLVVNNASDYYLISTASLR

SEQ ID NO: 84905 - protein, 34 aa, Artificial Sequence; identical to SEQ ID NO: 32762
  Cyclic GFR-binding peptide
  MOD_RES (1), (32), (33): Xaa is C or S

SEQ ID NO: 84906 - protein, 26 aa, Artificial Sequence
  Cyclic GFR-binding peptide
MDEYKFKVVNNASDLYLISIPELRTP

SEQ ID NO: 84907 - protein, 38 aa, Artificial Sequence; identical to SEQ ID NO: 32763
  Cyclic GFR-binding peptide
  MOD_RES (1), (32), (33): Xaa is C or S

SEQ ID NO: 84908 - protein, 32 aa, Artificial Sequence
  Cyclic GFR-binding peptide
  MOD_RES (28), (29): Xaa is C or S
IMPIKGYIKPTKGIFYLINIPSLDQSVXXPSA

SEQ ID NO: 84909 - protein, 33 aa, Artificial Sequence
  Cyclic GFR-binding peptide
  MOD_RES (29), (30): Xaa is C or S
VIMRHKRLLLVRGNDYYLMSTASTKVPAXXTSP

SEQ ID NO: 84910 - protein, 31 aa, Artificial Sequence
  Cyclic GFR-binding peptide
  MOD_RES (27), (28): Xaa is C or S
MRHKRLLLVRGNDYYLMSTASTKVPAXXTSP

SEQ ID NO: 84911 - protein, 40 aa, Artificial Sequence; identical to SEQ ID NO: 32764
  Cyclic GFR-binding peptide
  MOD_RES (2), (4), (36), (37): Xaa is C or S

SEQ ID NO: 84912 - protein, 28 aa, Artificial Sequence
  Cyclic GFR-binding peptide
  MOD_RES (27), (28): Xaa is C or S
NRYKKLVVNKNEDFYLISIANMKEPVXX

SEQ ID NO: 84913 - protein, 38 aa, Artificial Sequence; identical to SEQ ID NO: 32767
  Cyclic GFR-binding peptide
  MOD_RES (1), (3), (35), (36): Xaa is C or S

SEQ ID NO: 84914 - protein, 28 aa, Artificial Sequence
  Cyclic GFR-binding peptide
  MOD_RES (2), (2): Xaa is C or S
AXSEVTMNRHKRLVVNKNEDYYLISTAS

SEQ ID NO: 84915 - protein, 42 aa, Artificial Sequence; identical to SEQ ID NO: 32768
  Cyclic GFR-binding peptide
  MOD_RES (2), (4), (36), (37): Xaa is C or S

SEQ ID NO: 84916 - protein, 32 aa, Artificial Sequence
  Cyclic GFR-binding peptide
  MOD_RES (2), (2): Xaa is C or S
GXRDVVMGEYKFKIIQQKDNLYLMSIPEMKTP

SEQ ID NO: 84917 - protein, 27 aa, Artificial Sequence
  Cyclic GFR-binding peptide
TMNYHYKLVVNKNEDKYLISIPSMKEP

SEQ ID NO: 84918 - protein, 26 aa, Artificial Sequence
  Cyclic GFR-binding peptide
  MOD_RES (26), (26): Xaa is C or S
RHKRLLLVRGNDYYLMSTASTKVPAX

SEQ ID NO: 84919 - protein, 32 aa, Artificial Sequence
  Cyclic GFR-binding peptide
  MOD_RES (30), (31): Xaa is C or S
KVIMPIKGYIKPTKGIFYLINIPSLDQSVXXP

SEQ ID NO: 84920 - protein, 34 aa, Artificial Sequence
  Cyclic GFR-binding peptide
  MOD_RES (29), (30): Xaa is C or S
VMDEYKFKVVNNASDLYLISIPELRTPVXXTPPT

SEQ ID NO: 84921 - protein, 34 aa, Artificial Sequence; identical to SEQ ID NO: 32769
  Cyclic GFR-binding peptide
  MOD_RES (2), (34): Xaa is C or S

SEQ ID NO: 84922 - protein, 28 aa, Artificial Sequence
  Cyclic GFR-binding peptide
  MOD_RES (27), (28): Xaa is C or S
DEYKFKVVNNASDLYLISIPELRTPVXX

SEQ ID NO: 84923 - protein, 35 aa, Artificial Sequence
  Cyclic GFR-binding peptide
  MOD_RES (30), (31): Xaa is C or S
VVMDEYKFKVVNNASDLYLISIPELRTPVXXTPPT

SEQ ID NO: 84924 - protein, 28 aa, Artificial Sequence
  Cyclic GFR-binding peptide
VTMNYHYKLVVNKNEDKYLISIPSMKEP

SEQ ID NO: 84925 - protein, 30 aa, Artificial Sequence
  Cyclic GFR-binding peptide
  MOD_RES (1), (3): Xaa is C or S
XGXRDVVMGEYKFKIIQQKDNLYLMSIPEM

SEQ ID NO: 84926 - protein, 35 aa, Artificial Sequence; identical to SEQ ID NO: 20936
  Cyclic GFR-binding peptide
  MOD_RES (2), (4): Xaa is C or S

SEQ ID NO: 84927 - protein, 28 aa, Artificial Sequence
  Cyclic GFR-binding peptide
  MOD_RES (27), (28): Xaa is C or S
GRHKRLIIQQKDNYYLMSTASMKTPTXX

SEQ ID NO: 84928 - protein, 24 aa, Artificial Sequence
  Cyclic GFR-binding peptide
RVIMPIKGYVKPKRGVFYLINIPS

SEQ ID NO: 84929 - protein, 38 aa, Artificial Sequence; identical to SEQ ID NO: 32772
  Cyclic GFR-binding peptide
  MOD_RES (2), (4), (35), (36): Xaa is C or S

SEQ ID NO: 84930 - protein, 36 aa, Artificial Sequence; identical to SEQ ID NO: 32773
  Cyclic GFR-binding peptide
  MOD_RES (31), (32): Xaa is C or S

SEQ ID NO: 84931 - protein, 25 aa, Artificial Sequence
  Cyclic GFR-binding peptide
EVTMNRYKKLVVNKNEDFYLISIAN

SEQ ID NO: 84932 - protein, 28 aa, Artificial Sequence
  Cyclic GFR-binding peptide
  MOD_RES (2), (2): Xaa is C or S
AXSEVTMNEYKFKVVNKNEDLYLISIPE

SEQ ID NO: 84933 - protein, 31 aa, Artificial Sequence
  Cyclic GFR-binding peptide
  MOD_RES (2), (2): Xaa is C or S
AXSEVTMNYHYKLVVNKNEDKYLISIPSMKE

SEQ ID NO: 84934 - protein, 27 aa, Artificial Sequence
  Cyclic GFR-binding peptide
EEVIMYHYKLLLVRGNDKYLMSIPSTK

SEQ ID NO: 84935 - protein, 28 aa, Artificial Sequence
  Cyclic GFR-binding peptide
  MOD_RES (28), (28): Xaa is C or S
MGRHKRLIIQQKDNYYLMSTASMKTPTX

SEQ ID NO: 84936 - protein, 25 aa, Artificial Sequence
  Cyclic GFR-binding peptide
VVMGEYKFKIIQQKDNLYLMSIPEM

SEQ ID NO: 84937 - protein, 33 aa, Artificial Sequence
  Cyclic GFR-binding peptide
  MOD_RES (27), (28): Xaa is C or S
MYHYKLLLVRGNDKYLMSIPSTKVPAXXTSPVR

SEQ ID NO: 84938 - protein, 29 aa, Artificial Sequence
  Cyclic GFR-binding peptide
  MOD_RES (29), (29): Xaa is C or S
TMNYHYKLVVNKNEDKYLISIPSMKEPVX

SEQ ID NO: 84939 - protein, 33 aa, Artificial Sequence
  Cyclic GFR-binding peptide
  MOD_RES (28), (29): Xaa is C or S
MDRHKRLVVNNASDYYLISTASLRTPVXXTPPT

SEQ ID NO: 84940 - protein, 34 aa, Artificial Sequence; identical to SEQ ID NO: 32779
  Cyclic GFR-binding peptide
  MOD_RES (2), (34): Xaa is C or S

SEQ ID NO: 84941 - protein, 26 aa, Artificial Sequence
  Cyclic GFR-binding peptide
VIMYHYKLLLVRGNDKYLMSIPSTKV

SEQ ID NO: 84942 - protein, 30 aa, Artificial Sequence
  Cyclic GFR-binding peptide
SEVTMNEYKFKVVNKNEDLYLISIPEMKEP

SEQ ID NO: 84943 - protein, 36 aa, Artificial Sequence
  Cyclic GFR-binding peptide
  MOD_RES (30), (31): Xaa is C or S
VVMDRHKRLVVNNAADYYLISTASLRAPVXXSAPAA

SEQ ID NO: 84944 - protein, 30 aa, Artificial Sequence
  Cyclic GFR-binding peptide
  MOD_RES (1), (3): Xaa is C or S
XGXRDVVMGRHKRLIIQQKDNYYLMSTASM

SEQ ID NO: 84945 - protein, 29 aa, Artificial Sequence
  Cyclic GFR-binding peptide
  MOD_RES (2), (2): Xaa is C or S
GXRDVVMGEYKFKIIQQKDNLYLMSIPEM

SEQ ID NO: 84946 - protein, 24 aa, Artificial Sequence
  Cyclic GFR-binding peptide
TMNEYKFKVVNKNEDLYLISIPEM

SEQ ID NO: 84947 - protein, 38 aa, Artificial Sequence; identical to SEQ ID NO: 32782
  Cyclic GFR-binding peptide
  MOD_RES (2), (4), (36), (37): Xaa is C or S

SEQ ID NO: 84948 - protein, 30 aa, Artificial Sequence
  Cyclic GFR-binding peptide
  MOD_RES (2), (4): Xaa is C or S
RXGXSEVVMDRHKRLVVNNASDYYLISTAS

SEQ ID NO: 84949 - protein, 35 aa, Artificial Sequence
  Cyclic GFR-binding peptide
  MOD_RES (30), (31): Xaa is C or S
VTMNRYKKLVVNKNEDFYLISIANMKEPVXXPEPI

SEQ ID NO: 84950 - protein, 33 aa, Artificial Sequence
  Cyclic GFR-binding peptide
  MOD_RES (29), (30): Xaa is C or S
VVMPIKGYVKPTRGVFYLINIPSLDQPVXXPSA

SEQ ID NO: 84951 - protein, 30 aa, Artificial Sequence
  Cyclic GFR-binding peptide
  MOD_RES (2), (2): Xaa is C or S
AXSEVTMNRYKKLVVNKNEDFYLISIANMK

SEQ ID NO: 84952 - protein, 28 aa, Artificial Sequence
  Cyclic GFR-binding peptide
  MOD_RES (2), (2): Xaa is C or S
KXSKVVMPIKGYVKPTRGVFYLINIPSL

SEQ ID NO: 84953 - protein, 26 aa, Artificial Sequence
  Cyclic GFR-binding peptide
KVVMPIKGYVKPTRGVFYLINIPSLD

SEQ ID NO: 84954 - protein, 27 aa, Artificial Sequence
  Cyclic GFR-binding peptide
  MOD_RES (27), (27): Xaa is C or S
NEYKFKVVNKNEDLYLISIPEMKEPVX

SEQ ID NO: 84955 - protein, 29 aa, Artificial Sequence
  Cyclic GFR-binding peptide
AAAAAAAAAEYKFKIIQQKDNLYLMSIPE

SEQ ID NO: 84956 - protein, 32 aa, Artificial Sequence
  Cyclic GFR-binding peptide
  MOD_RES (30), (31): Xaa is C or S
VVMDEYKFKVVNNASDLYLISIPELRTPVXXT

SEQ ID NO: 84957 - protein, 25 aa, Artificial Sequence
  Cyclic GFR-binding peptide
EVTMNYHYKLVVNKNEDKYLISIPS

SEQ ID NO: 84958 - protein, 27 aa, Artificial Sequence
  Cyclic GFR-binding peptide
  MOD_RES (27), (27): Xaa is C or S
NYHYKLVVNKNEDKYLISIPSMKEPVX

SEQ ID NO: 84959 - protein, 35 aa, Artificial Sequence; identical to SEQ ID NO: 32785
  Cyclic GFR-binding peptide
  MOD_RES (2), (4), (35): Xaa is C or S

SEQ ID NO: 84960 - protein, 37 aa, Artificial Sequence; identical to SEQ ID NO: 32787
  Cyclic GFR-binding peptide
  MOD_RES (1), (3), (35), (36): Xaa is C or S

SEQ ID NO: 84961 - protein, 31 aa, Artificial Sequence
  Cyclic GFR-binding peptide
  MOD_RES (2), (2): Xaa is C or S
GXEEVIMYHYKLLLVRGNDKYLMSIPSTKVP

SEQ ID NO: 84962 - protein, 30 aa, Artificial Sequence
  Cyclic GFR-binding peptide
  MOD_RES (28), (29): Xaa is C or S
MDRHKRLVVNNASDYYLISTASLRTPVXXT

SEQ ID NO: 84963 - protein, 25 aa, Artificial Sequence
  Cyclic GFR-binding peptide
SRVIMPIKGYVKPKRGVFYLINIPS

SEQ ID NO: 84964 - protein, 35 aa, Artificial Sequence
  Cyclic GFR-binding peptide
  MOD_RES (29), (30): Xaa is C or S
AMGRHKRLYTVVGKDYYLISTASLKTPVXXAKSAK

SEQ ID NO: 84965 - protein, 33 aa, Artificial Sequence; identical to SEQ ID NO: 32788
  Cyclic GFR-binding peptide
  MOD_RES (2), (2): Xaa is C or S

SEQ ID NO: 84966 - protein, 35 aa, Artificial Sequence
  Cyclic GFR-binding peptide
  MOD_RES (29), (30): Xaa is C or S
VMGEYKFKIIQQKDNLYLMSIPEMKTPTXXPGASG

SEQ ID NO: 84967 - protein, 37 aa, Artificial Sequence; identical to SEQ ID NO: 32789
  Cyclic GFR-binding peptide
  MOD_RES (2), (4), (36), (37): Xaa is C or S

SEQ ID NO: 84968 - protein, 34 aa, Artificial Sequence
  Cyclic GFR-binding peptide
  MOD_RES (28), (29): Xaa is C or S
MNRHKRLVVNKNEDYYLISTASMKEPVXXPEPIG

SEQ ID NO: 84969 - protein, 35 aa, Artificial Sequence; identical to SEQ ID NO: 32790
  Cyclic GFR-binding peptide
  MOD_RES (1), (3), (35): Xaa is C or S

SEQ ID NO: 84970 - protein, 39 aa, Artificial Sequence; identical to SEQ ID NO: 32792
  Cyclic GFR-binding peptide
  MOD_RES (1), (33), (34): Xaa is C or S

SEQ ID NO: 84971 - protein, 39 aa, Artificial Sequence; identical to SEQ ID NO: 32793
  Cyclic GFR-binding peptide
  MOD_RES (1), (3), (34), (35): Xaa is C or S

SEQ ID NO: 84972 - protein, 34 aa, Artificial Sequence; identical to SEQ ID NO: 32794
  Cyclic GFR-binding peptide
  MOD_RES (1), (3): Xaa is C or S

SEQ ID NO: 84973 - protein, 38 aa, Artificial Sequence; identical to SEQ ID NO: 32795
  Cyclic GFR-binding peptide
  MOD_RES (32), (33): Xaa is C or S

SEQ ID NO: 84974 - protein, 36 aa, Artificial Sequence; identical to SEQ ID NO: 32796
  Cyclic GFR-binding peptide
  MOD_RES (2), (34), (35): Xaa is C or S

SEQ ID NO: 84975 - protein, 30 aa, Artificial Sequence
  Cyclic GFR-binding peptide
  MOD_RES (27), (28): Xaa is C or S
MYHYKLLLVRGNDKYLMSIPSTKVPAXXTS

SEQ ID NO: 84976 - protein, 31 aa, Artificial Sequence
  Cyclic GFR-binding peptide
  MOD_RES (30), (31): Xaa is C or S
VTMNPIKGYVVNKNEDFYLINIPSMKEPVXX

SEQ ID NO: 84977 - protein, 36 aa, Artificial Sequence; identical to SEQ ID NO: 32797
  Cyclic GFR-binding peptide
  MOD_RES (1), (3), (34), (35): Xaa is C or S

SEQ ID NO: 84978 - protein, 26 aa, Artificial Sequence
  Cyclic GFR-binding peptide
SEVTMNRYKKLVVNKNEDFYLISIAN

SEQ ID NO: 84979 - protein, 28 aa, Artificial Sequence
  Cyclic GFR-binding peptide
  MOD_RES (27), (28): Xaa is C or S
NPIKGYVVNKNEDFYLINIPSMKEPVXX

SEQ ID NO: 84980 - protein, 31 aa, Artificial Sequence; identical to SEQ ID NO: 32800
  Cyclic GFR-binding peptide

SEQ ID NO: 84981 - protein, 29 aa, Artificial Sequence
  Cyclic GFR-binding peptide
  MOD_RES (26), (27): Xaa is C or S
RHKRLVVNNASDYYLISTASLRTPVXXTP

SEQ ID NO: 84982 - protein, 36 aa, Artificial Sequence; identical to SEQ ID NO: 32801
  Cyclic GFR-binding peptide
  MOD_RES (2), (34), (35): Xaa is C or S

SEQ ID NO: 84983 - protein, 30 aa, Artificial Sequence
  Cyclic GFR-binding peptide
AEVVMDRHKRLVVNNAADYYLISTASLRAP

SEQ ID NO: 84984 - protein, 23 aa, Artificial Sequence
  Cyclic GFR-binding peptide
IMRHKRLLLVRGNDYYLMSTAST

SEQ ID NO: 84985 - protein, 36 aa, Artificial Sequence; identical to SEQ ID NO: 32802
  Cyclic GFR-binding peptide
  MOD_RES (2), (34), (35): Xaa is C or S

SEQ ID NO: 84986 - protein, 35 aa, Artificial Sequence; identical to SEQ ID NO: 21119
  Cyclic GFR-binding peptide
  MOD_RES (2), (4): Xaa is C or S

SEQ ID NO: 84987 - protein, 33 aa, Artificial Sequence; identical to SEQ ID NO: 32803
  Cyclic GFR-binding peptide
  MOD_RES (32), (33): Xaa is C or S

SEQ ID NO: 84988 - protein, 34 aa, Artificial Sequence; identical to SEQ ID NO: 32804
  Cyclic GFR-binding peptide
  MOD_RES (2), (33), (34): Xaa is C or S

SEQ ID NO: 84989 - protein, 32 aa, Artificial Sequence
  Cyclic GFR-binding peptide
  MOD_RES (1), (3): Xaa is C or S
XAXSEVTMNYHYKLVVNKNEDKYLISIPSMKE

SEQ ID NO: 84990 - protein, 36 aa, Artificial Sequence; identical to SEQ ID NO: 32806
  Cyclic GFR-binding peptide
  MOD_RES (32), (33): Xaa is C or S

SEQ ID NO: 84991 - protein, 35 aa, Artificial Sequence; identical to SEQ ID NO: 32807
  Cyclic GFR-binding peptide
  MOD_RES (2), (4): Xaa is C or S

SEQ ID NO: 84992 - protein, 40 aa, Artificial Sequence; identical to SEQ ID NO: 32808
  Cyclic GFR-binding peptide
  MOD_RES (1), (3), (34), (35): Xaa is C or S

SEQ ID NO: 84993 - protein, 20 aa, Artificial Sequence
  Cyclic GFR-binding peptide
PIKGYVVNKNEDFYLINIPS

SEQ ID NO: 84994 - protein, 22 aa, Artificial Sequence
  Cyclic GFR-binding peptide
MPIKGYVKPKRGVFYLINIPSL

SEQ ID NO: 84995 - protein, 36 aa, Artificial Sequence; identical to SEQ ID NO: 32809
  Cyclic GFR-binding peptide
  MOD_RES (32), (33): Xaa is C or S

SEQ ID NO: 84996 - protein, 30 aa, Artificial Sequence
  Cyclic GFR-binding peptide
  MOD_RES (30), (30): Xaa is C or S
KVVMPIKGYVKPTRGVFYLINIPSLDQPVX

SEQ ID NO: 84997 - protein, 32 aa, Artificial Sequence
  Cyclic GFR-binding peptide
  MOD_RES (28), (29): Xaa is C or S
MGRHKRLIIQQKDNYYLMSTASMKTPTXXPGA

SEQ ID NO: 84998 - protein, 34 aa, Artificial Sequence; identical to SEQ ID NO: 32810
  Cyclic GFR-binding peptide
  MOD_RES (2), (4): Xaa is C or S

SEQ ID NO: 84999 - protein, 35 aa, Artificial Sequence
  Cyclic GFR-binding peptide
  MOD_RES (30), (31): Xaa is C or S
KVVMPIKGYVKPTRGVFYLINIPSLDQPVXXPSAS

SEQ ID NO: 85000 - protein, 28 aa, Artificial Sequence
  Cyclic GFR-binding peptide
VMDYHYKLVVNNASDKYLISIPSLRTPV

SEQ ID NO: 85001 - protein, 30 aa, Artificial Sequence
  Cyclic GFR-binding peptide
  MOD_RES (29), (30): Xaa is C or S
VMGYHYKLIIQQKDNKYLMSIPSMKTPTXX

SEQ ID NO: 85002 - protein, 42 aa, Artificial Sequence; identical to SEQ ID NO: 32811
  Cyclic GFR-binding peptide
  MOD_RES (2), (4), (36), (37): Xaa is C or S

SEQ ID NO: 85003 - protein, 30 aa, Artificial Sequence; identical to SEQ ID NO: 32812
  Cyclic GFR-binding peptide

SEQ ID NO: 85004 - protein, 29 aa, Artificial Sequence
  Cyclic GFR-binding peptide
  MOD_RES (27), (28): Xaa is C or S
MEYKFKLLVRGNDLYLMSIPETKVPAXXT

SEQ ID NO: 85005 - protein, 24 aa, Artificial Sequence
  Cyclic GFR-binding peptide
GRHKRLIIQQKDNYYLMSTASMKT

SEQ ID NO: 85006 - protein, 32 aa, Artificial Sequence
  Cyclic GFR-binding peptide
  MOD_RES (2), (4): Xaa is C or S
RXGXSEVVMDEYKFKVVNNASDLYLISIPELR

SEQ ID NO: 85007 - protein, 23 aa, Artificial Sequence
  Cyclic GFR-binding peptide
MNRYKKLVVNKNEDFYLISIANM

SEQ ID NO: 85008 - protein, 34 aa, Artificial Sequence
  Cyclic GFR-binding peptide
  MOD_RES (29), (30): Xaa is C or S
TMNRYKKLVVNKNEDFYLISIANMKEPVXXPEPI

SEQ ID NO: 85009 - protein, 31 aa, Artificial Sequence
  Cyclic GFR-binding peptide
  MOD_RES (1), (1): Xaa is C or S
XESVAMGRHKRLYTVVGKDYYLISTASLKTP

SEQ ID NO: 85010 - protein, 32 aa, Artificial Sequence
  Cyclic GFR-binding peptide
  MOD_RES (2), (2): Xaa is C or S
GXSEVVMDEYKFKVVNNASDLYLISIPELRTP

SEQ ID NO: 85011 - protein, 28 aa, Artificial Sequence
  Cyclic GFR-binding peptide
EVVMDRHKRLVVNNAADYYLISTASLRA

SEQ ID NO: 85012 - protein, 34 aa, Artificial Sequence; identical to SEQ ID NO: 32815
  Cyclic GFR-binding peptide
  MOD_RES (31), (32): Xaa is C or S

SEQ ID NO: 85013 - protein, 33 aa, Artificial Sequence
  Cyclic GFR-binding peptide
  MOD_RES (2), (4): Xaa is C or S
SXGXRDVVMGEYKFKIIQQKDNLYLMSIPEMKT

SEQ ID NO: 85014 - protein, 30 aa, Artificial Sequence
  Cyclic GFR-binding peptide
  MOD_RES (28), (29): Xaa is C or S
MNRHKRLVVNKNEDYYLISTASMKEPVXXP

SEQ ID NO: 85015 - protein, 35 aa, Artificial Sequence; identical to SEQ ID NO: 32816
  Cyclic GFR-binding peptide
  MOD_RES (32), (33): Xaa is C or S

SEQ ID NO: 85016 - protein, 34 aa, Artificial Sequence; identical to SEQ ID NO: 32817
  Cyclic GFR-binding peptide
  MOD_RES (32), (33): Xaa is C or S

SEQ ID NO: 85017 - protein, 29 aa, Artificial Sequence
  Cyclic GFR-binding peptide
SRVIMPIKGYVKPKRGVFYLINIPSLAQP

SEQ ID NO: 85018 - protein, 32 aa, Artificial Sequence
  Cyclic GFR-binding peptide
  MOD_RES (1), (3): Xaa is C or S
XGXEEVIMEYKFKLLVRGNDLYLMSIPETKVP

SEQ ID NO: 85019 - protein, 36 aa, Artificial Sequence; identical to SEQ ID NO: 32818
  Cyclic GFR-binding peptide
  MOD_RES (1), (3), (34), (35): Xaa is C or S

SEQ ID NO: 85020 - protein, 34 aa, Artificial Sequence
  Cyclic GFR-binding peptide
  MOD_RES (2), (4): Xaa is C or S
RXGXSEVVMDYHYKLVVNNASDKYLISIPSLRTP

SEQ ID NO: 85021 - protein, 29 aa, Artificial Sequence
  Cyclic GFR-binding peptide
  MOD_RES (28), (29): Xaa is C or S
MDYHYKLVVNNASDKYLISIPSLRTPVXX

SEQ ID NO: 85022 - protein, 26 aa, Artificial Sequence
  Cyclic GFR-binding peptide
VMGRHKRLIIQQKDNYYLMSTASMKT

SEQ ID NO: 85023 - protein, 26 aa, Artificial Sequence
  Cyclic GFR-binding peptide
MNYHYKLVVNKNEDKYLISIPSMKEP

SEQ ID NO: 85024 - protein, 29 aa, Artificial Sequence
  Cyclic GFR-binding peptide
  MOD_RES (26), (27): Xaa is C or S
PIKGYVVNKNEDFYLINIPSMKEPVXXPE

SEQ ID NO: 85025 - protein, 27 aa, Artificial Sequence
  Cyclic GFR-binding peptide
MGRHKRLIIQQKDNYYLMSTASMKTPT

SEQ ID NO: 85026 - protein, 36 aa, Artificial Sequence; identical to SEQ ID NO: 32819
  Cyclic GFR-binding peptide
  MOD_RES (1), (3), (34), (35): Xaa is C or S

SEQ ID NO: 85027 - protein, 28 aa, Artificial Sequence
  Cyclic GFR-binding peptide
  MOD_RES (2), (2): Xaa is C or S
GXSEVVMDYHYKLVVNNASDKYLISIPS

SEQ ID NO: 85028 - protein, 30 aa, Artificial Sequence
  Cyclic GFR-binding peptide
  MOD_RES (27), (28): Xaa is C or S
MEYKFKLLVRGNDLYLMSIPETKVPAXXTS

SEQ ID NO: 85029 - protein, 34 aa, Artificial Sequence
  Cyclic GFR-binding peptide
  MOD_RES (29), (30): Xaa is C or S
VMGRHKRLIIQQKDNYYLMSTASMKTPTXXPGAS

SEQ ID NO: 85030 - protein, 32 aa, Artificial Sequence
  Cyclic GFR-binding peptide
  MOD_RES (30), (31): Xaa is C or S
VVMDRHKRLVVNNASDYYLISTASLRTPVXXT

SEQ ID NO: 85031 - protein, 28 aa, Artificial Sequence
  Cyclic GFR-binding peptide
RDVVMGYHYKLIIQQKDNKYLMSIPSMK

SEQ ID NO: 85032 - protein, 35 aa, Artificial Sequence; identical to SEQ ID NO: 32821
  Cyclic GFR-binding peptide
  MOD_RES (2), (4), (35): Xaa is C or S

SEQ ID NO: 85033 - protein, 31 aa, Artificial Sequence
  Cyclic GFR-binding peptide
  MOD_RES (28), (29): Xaa is C or S
MNYHYKLVVNKNEDKYLISIPSMKEPVXXPE

SEQ ID NO: 85034 - protein, 34 aa, Artificial Sequence; identical to SEQ ID NO: 32823
  Cyclic GFR-binding peptide
  MOD_RES (1), (33), (34): Xaa is C or S

SEQ ID NO: 85035 - protein, 31 aa, Artificial Sequence; identical to SEQ ID NO: 32824
  Cyclic GFR-binding peptide
  MOD_RES (1), (1): Xaa is C or S

SEQ ID NO: 85036 - protein, 26 aa, Artificial Sequence
  Cyclic GFR-binding peptide
NEYKFKVVNKNEDLYLISIPEMKEPV

SEQ ID NO: 85037 - protein, 31 aa, Artificial Sequence
  Cyclic GFR-binding peptide
  MOD_RES (2), (4): Xaa is C or S
LXGXEEVIMRHKRLLLVRGNDYYLMSTASTK

SEQ ID NO: 85038 - protein, 38 aa, Artificial Sequence; identical to SEQ ID NO: 32829
  Cyclic GFR-binding peptide
  MOD_RES (1), (3), (35), (36): Xaa is C or S

SEQ ID NO: 85039 - protein, 31 aa, Artificial Sequence
  Cyclic GFR-binding peptide
  MOD_RES (27), (28): Xaa is C or S
NPIKGYVVNKNEDFYLINIPSMKEPVXXPEP

SEQ ID NO: 85040 - protein, 29 aa, Artificial Sequence
  Cyclic GFR-binding peptide
  MOD_RES (28), (29): Xaa is C or S
MNRYKKLVVNKNEDFYLISIANMKEPVXX

SEQ ID NO: 85041 - protein, 36 aa, Artificial Sequence; identical to SEQ ID NO: 32833
  Cyclic GFR-binding peptide
  MOD_RES (2), (4), (36): Xaa is C or S

SEQ ID NO: 85042 - protein, 36 aa, Artificial Sequence
  Cyclic GFR-binding peptide
  MOD_RES (30), (31): Xaa is C or S
VVMDYHYKLVVNNASDKYLISIPSLRTPVXXTPPTS

SEQ ID NO: 85043 - protein, 28 aa, Artificial Sequence
  Cyclic GFR-binding peptide
  MOD_RES (2), (2): Xaa is C or S
AXSEVTMNRYKKLVVNKNEDFYLISIAN

SEQ ID NO: 85044 - protein, 29 aa, Artificial Sequence
  Cyclic GFR-binding peptide
SEVVMDYHYKLVVNNASDKYLISIPSLRT

SEQ ID NO: 85045 - protein, 32 aa, Artificial Sequence; identical to SEQ ID NO: 32834
  Cyclic GFR-binding peptide
  MOD_RES (32), (32): Xaa is C or S

SEQ ID NO: 85046 - protein, 32 aa, Artificial Sequence; identical to SEQ ID NO: 32835
  Cyclic GFR-binding peptide
  MOD_RES (32), (32): Xaa is C or S

SEQ ID NO: 85047 - protein, 37 aa, Artificial Sequence; identical to SEQ ID NO: 32836
  Cyclic GFR-binding peptide
  MOD_RES (31), (32): Xaa is C or S

SEQ ID NO: 85048 - protein, 26 aa, Artificial Sequence
  Cyclic GFR-binding peptide
TMNYHYKLVVNKNEDKYLISIPSMKE

SEQ ID NO: 85049 - protein, 35 aa, Artificial Sequence; identical to SEQ ID NO: 32837
  Cyclic GFR-binding peptide
  MOD_RES (1), (3), (35): Xaa is C or S

SEQ ID NO: 85050 - protein, 39 aa, Artificial Sequence; identical to SEQ ID NO: 32838
  Cyclic GFR-binding peptide
  MOD_RES (1), (3), (35), (36): Xaa is C or S

SEQ ID NO: 85051 - protein, 28 aa, Artificial Sequence
  Cyclic GFR-binding peptide
  MOD_RES (2), (2): Xaa is C or S
KXSKVIMPIKGYIKPTKGIFYLINIPSL

SEQ ID NO: 85052 - protein, 34 aa, Artificial Sequence; identical to SEQ ID NO: 32839
  Cyclic GFR-binding peptide
  MOD_RES (1), (33), (34): Xaa is C or S

SEQ ID NO: 85053 - protein, 33 aa, Artificial Sequence; identical to SEQ ID NO: 32840
  Cyclic GFR-binding peptide
  MOD_RES (31), (32): Xaa is C or S

SEQ ID NO: 85054 - protein, 27 aa, Artificial Sequence
  Cyclic GFR-binding peptide
IMEYKFKLLVRGNDLYLMSIPETKVPA

SEQ ID NO: 85055 - protein, 33 aa, Artificial Sequence
  Cyclic GFR-binding peptide
  MOD_RES (27), (28): Xaa is C or S
GRHKRLIIQQKDNYYLMSTASMKTPTXXPGASG

SEQ ID NO: 85056 - protein, 26 aa, Artificial Sequence
  Cyclic GFR-binding peptide
MGEYKFKIIQQKDNLYLMSIPEMKTP

SEQ ID NO: 85057 - protein, 24 aa, Artificial Sequence
  Cyclic GFR-binding peptide
MNPIKGYVVNKNEDFYLINIPSMK

SEQ ID NO: 85058 - protein, 40 aa, Artificial Sequence; identical to SEQ ID NO: 32845
  Cyclic GFR-binding peptide
  MOD_RES (1), (3), (35), (36): Xaa is C or S

SEQ ID NO: 85059 - protein, 32 aa, Artificial Sequence
  Cyclic GFR-binding peptide
  MOD_RES (30), (31): Xaa is C or S
VTMNRYKKLVVNKNEDFYLISIANMKEPVXXP

SEQ ID NO: 85060 - protein, 33 aa, Artificial Sequence; identical to SEQ ID NO: 32847
  Cyclic GFR-binding peptide
  MOD_RES (1), (33): Xaa is C or S

SEQ ID NO: 85061 - protein, 26 aa, Artificial Sequence
  Cyclic GFR-binding peptide
GRHKRLIIQQKDNYYLMSTASMKTPT

SEQ ID NO: 85062 - protein, 29 aa, Artificial Sequence
  Cyclic GFR-binding peptide
  MOD_RES (27), (28): Xaa is C or S
DRHKRLVVNNASDYYLISTASLRTPVXXT

SEQ ID NO: 85063 - protein, 26 aa, Artificial Sequence
  Cyclic GFR-binding peptide
DYHYKLVVNNASDKYLISIPSLRTPV

SEQ ID NO: 85064 - protein, 33 aa, Artificial Sequence; identical to SEQ ID NO: 32848
  Cyclic GFR-binding peptide
  MOD_RES (1), (33): Xaa is C or S

SEQ ID NO: 85065 - protein, 25 aa, Artificial Sequence
  Cyclic GFR-binding peptide
YHYKLVVNNASDKYLISIPSLRTPV

SEQ ID NO: 85066 - protein, 29 aa, Artificial Sequence
  Cyclic GFR-binding peptide
  MOD_RES (26), (27): Xaa is C or S
EYKFKLLVRGNDLYLMSIPETKVPAXXTS

SEQ ID NO: 85067 - protein, 29 aa, Artificial Sequence
  Cyclic GFR-binding peptide
  MOD_RES (28), (29): Xaa is C or S
IMEYKFKLLVRGNDLYLMSIPETKVPAXX

SEQ ID NO: 85068 - protein, 25 aa, Artificial Sequence
  Cyclic GFR-binding peptide
AMGRHKRLYTVVGKDYYLISTASLK

SEQ ID NO: 85069 - protein, 21 aa, Artificial Sequence
  Cyclic GFR-binding peptide
PIKGYVVNKNEDFYLINIPSM

SEQ ID NO: 85070 - protein, 29 aa, Artificial Sequence
  Cyclic GFR-binding peptide
SVAMGRHKRLYTVVGKDYYLISTASLKTP

SEQ ID NO: 85071 - protein, 30 aa, Artificial Sequence
  Cyclic GFR-binding peptide
  MOD_RES (30), (30): Xaa is C or S
VVMDRHKRLVVNNAADYYLISTASLRAPVX

SEQ ID NO: 85072 - protein, 22 aa, Artificial Sequence
  Cyclic GFR-binding peptide
VMPIKGYVKPTRGVFYLINIPS

SEQ ID NO: 85073 - protein, 34 aa, Artificial Sequence
  Cyclic GFR-binding peptide
  MOD_RES (28), (29): Xaa is C or S
IMRHKRLLLVRGNDYYLMSTASTKVPAXXTSPVR

SEQ ID NO: 85074 - protein, 27 aa, Artificial Sequence
  Cyclic GFR-binding peptide
MNRYKKLVVNKNEDFYLISIANMKEPV

SEQ ID NO: 85075 - protein, 36 aa, Artificial Sequence; identical to SEQ ID NO: 32851
  Cyclic GFR-binding peptide
  MOD_RES (31), (32): Xaa is C or S

SEQ ID NO: 85076 - protein, 31 aa, Artificial Sequence
  Cyclic GFR-binding peptide
  MOD_RES (2), (4): Xaa is C or S
RXAXSEVTMNRHKRLVVNKNEDYYLISTASM

SEQ ID NO: 85077 - protein, 31 aa, Artificial Sequence
  Cyclic GFR-binding peptide
  MOD_RES (26), (27): Xaa is C or S
EYKFKVVNNASDLYLISIPELRTPVXXTPPT

SEQ ID NO: 85078 - protein, 30 aa, Artificial Sequence
  Cyclic GFR-binding peptide
  MOD_RES (28), (29): Xaa is C or S
MGRHKRLYTVVGKDYYLISTASLKTPVXXA

SEQ ID NO: 85079 - protein, 29 aa, Artificial Sequence
  Cyclic GFR-binding peptide
VVMDRHKRLVVNNAADYYLISTASLRAPV

SEQ ID NO: 85080 - protein, 37 aa, Artificial Sequence; identical to SEQ ID NO: 32857
  Cyclic GFR-binding peptide
  MOD_RES (32), (33): Xaa is C or S

SEQ ID NO: 85081 - protein, 25 aa, Artificial Sequence
  Cyclic GFR-binding peptide
VMGEYKFKIIQQKDNLYLMSIPEMK

SEQ ID NO: 85082 - protein, 34 aa, Artificial Sequence
  Cyclic GFR-binding peptide
  MOD_RES (2), (4): Xaa is C or S
RXGXESVAMGRHKRLYTVVGKDYYLISTASLKTP

SEQ ID NO: 85083 - protein, 23 aa, Artificial Sequence
  Cyclic GFR-binding peptide
MPIKGYIKPTKGIFYLINIPSLD

SEQ ID NO: 85084 - protein, 40 aa, Artificial Sequence; identical to SEQ ID NO: 32858
  Cyclic GFR-binding peptide
  MOD_RES (2), (34), (35): Xaa is C or S

SEQ ID NO: 85085 - protein, 34 aa, Artificial Sequence; identical to SEQ ID NO: 32859
  Cyclic GFR-binding peptide
  MOD_RES (1), (3): Xaa is C or S

SEQ ID NO: 85086 - protein, 28 aa, Artificial Sequence
  Cyclic GFR-binding peptide
  MOD_RES (28), (28): Xaa is C or S
IMEYKFKLLVRGNDLYLMSIPETKVPAX

SEQ ID NO: 85087 - protein, 41 aa, Artificial Sequence; identical to SEQ ID NO: 32861
  Cyclic GFR-binding peptide
  MOD_RES (2), (4), (35), (36): Xaa is C or S

SEQ ID NO: 85088 - protein, 25 aa, Artificial Sequence
  Cyclic GFR-binding peptide
VVMDYHYKLVVNNASDKYLISIPSL

SEQ ID NO: 85089 - protein, 29 aa, Artificial Sequence
  Cyclic GFR-binding peptide
  MOD_RES (27), (28): Xaa is C or S
NPIKGYVVNKNEDFYLINIPSMKEPVXXP

SEQ ID NO: 85090 - protein, 40 aa, Artificial Sequence; identical to SEQ ID NO: 32862
  Cyclic GFR-binding peptide
  MOD_RES (2), (34), (35): Xaa is C or S

SEQ ID NO: 85091 - protein, 27 aa, Artificial Sequence
  Cyclic GFR-binding peptide
SEVTMNYHYKLVVNKNEDKYLISIPSM

SEQ ID NO: 85092 - protein, 29 aa, Artificial Sequence
  Cyclic GFR-binding peptide
AAAAAAAAAPIKGYVKPKRGVFYLINIPS

SEQ ID NO: 85093 - protein, 24 aa, Artificial Sequence
  Cyclic GFR-binding peptide
EVIMRHKRLLLVRGNDYYLMSTAS

SEQ ID NO: 85094 - protein, 35 aa, Artificial Sequence; identical to SEQ ID NO: 32864
  Cyclic GFR-binding peptide
  MOD_RES (31), (32): Xaa is C or S

SEQ ID NO: 85095 - protein, 26 aa, Artificial Sequence
  Cyclic GFR-binding peptide
EVVMDRHKRLVVNNAADYYLISTASL

SEQ ID NO: 85096 - protein, 26 aa, Artificial Sequence
  Cyclic GFR-binding peptide
EVTMNPIKGYVVNKNEDFYLINIPSM

SEQ ID NO: 85097 - protein, 27 aa, Artificial Sequence
  Cyclic GFR-binding peptide
MDYHYKLVVNNASDKYLISIPSLRTPV

SEQ ID NO: 85098 - protein, 38 aa, Artificial Sequence; identical to SEQ ID NO: 32866
  Cyclic GFR-binding peptide
  MOD_RES (1), (3), (34), (35): Xaa is C or S

SEQ ID NO: 85099 - protein, 32 aa, Artificial Sequence
  Cyclic GFR-binding peptide
  MOD_RES (30), (31): Xaa is C or S
VVMGEYKFKIIQQKDNLYLMSIPEMKTPTXXP

SEQ ID NO: 85100 - protein, 25 aa, Artificial Sequence
  Cyclic GFR-binding peptide
EYKFKVVNNASDLYLISIPELRTPV

SEQ ID NO: 85101 - protein, 40 aa, Artificial Sequence; identical to SEQ ID NO: 32869
  Cyclic GFR-binding peptide
  MOD_RES (2), (34), (35): Xaa is C or S

SEQ ID NO: 85102 - protein, 29 aa, Artificial Sequence
  Cyclic GFR-binding peptide
  MOD_RES (2), (2): Xaa is C or S
GXRDVVMGRHKRLIIQQKDNYYLMSTASM

SEQ ID NO: 85103 - protein, 24 aa, Artificial Sequence
  Cyclic GFR-binding peptide
MGRHKRLIIQQKDNYYLMSTASMK

SEQ ID NO: 85104 - protein, 29 aa, Artificial Sequence
  Cyclic GFR-binding peptide
  MOD_RES (26), (27): Xaa is C or S
YHYKLLLVRGNDKYLMSIPSTKVPAXXTS

SEQ ID NO: 85105 - protein, 31 aa, Artificial Sequence
  Cyclic GFR-binding peptide
  MOD_RES (2), (2): Xaa is C or S
KXSKVVMPIKGYVKPTRGVFYLINIPSLDQP

SEQ ID NO: 85106 - protein, 33 aa, Artificial Sequence
  Cyclic GFR-binding peptide
  MOD_RES (28), (29): Xaa is C or S
MNYHYKLVVNKNEDKYLISIPSMKEPVXXPEPI

SEQ ID NO: 85107 - protein, 31 aa, Artificial Sequence
  Cyclic GFR-binding peptide
  MOD_RES (27), (28): Xaa is C or S
NRYKKLVVNKNEDFYLISIANMKEPVXXPEP

SEQ ID NO: 85108 - protein, 30 aa, Artificial Sequence
  Cyclic GFR-binding peptide
  MOD_RES (2), (4): Xaa is C or S
SXGXRDVVMGEYKFKIIQQKDNLYLMSIPE

SEQ ID NO: 85109 - protein, 29 aa, Artificial Sequence
  Cyclic GFR-binding peptide
  MOD_RES (27), (28): Xaa is C or S
MRHKRLLLVRGNDYYLMSTASTKVPAXXT

SEQ ID NO: 85110 - protein, 34 aa, Artificial Sequence; identical to SEQ ID NO: 32872
  Cyclic GFR-binding peptide
  MOD_RES (1), (3): Xaa is C or S

SEQ ID NO: 85111 - protein, 30 aa, Artificial Sequence
  Cyclic GFR-binding peptide
  MOD_RES (2), (2): Xaa is C or S
AXSEVTMNRHKRLVVNKNEDYYLISTASMK

SEQ ID NO: 85112 - protein, 38 aa, Artificial Sequence; identical to SEQ ID NO: 32875
  Cyclic GFR-binding peptide
  MOD_RES (32), (33): Xaa is C or S

SEQ ID NO: 85113 - protein, 28 aa, Artificial Sequence
  Cyclic GFR-binding peptide
KVIMPIKGYIKPTKGIFYLINIPSLDQS

SEQ ID NO: 85114 - protein, 35 aa, Artificial Sequence
  Cyclic GFR-binding peptide
  MOD_RES (30), (31): Xaa is C or S
VVMDYHYKLVVNNASDKYLISIPSLRTPVXXTPPT

SEQ ID NO: 85115 - protein, 23 aa, Artificial Sequence
  Cyclic GFR-binding peptide
EYKFKLLVRGNDLYLMSIPETKV

SEQ ID NO: 85116 - protein, 32 aa, Artificial Sequence
  Cyclic GFR-binding peptide
  MOD_RES (27), (28): Xaa is C or S
MPIKGYVKPKRGVFYLINIPSLAQPVXXPAAS

SEQ ID NO: 85117 - protein, 30 aa, Artificial Sequence
  Cyclic GFR-binding peptide
  MOD_RES (1), (1): Xaa is C or S
XSKVIMPIKGYIKPTKGIFYLINIPSLDQS

SEQ ID NO: 85118 - protein, 23 aa, Artificial Sequence
  Cyclic GFR-binding peptide
IMEYKFKLLVRGNDLYLMSIPET

SEQ ID NO: 85119 - protein, 30 aa, Artificial Sequence
  Cyclic GFR-binding peptide
  MOD_RES (28), (29): Xaa is C or S
MNPIKGYVVNKNEDFYLINIPSMKEPVXXP

SEQ ID NO: 85120 - protein, 23 aa, Artificial Sequence
  Cyclic GFR-binding peptide
RHKRLVVNNAADYYLISTASLRA

SEQ ID NO: 85121 - protein, 29 aa, Artificial Sequence
  Cyclic GFR-binding peptide
SEVTMNEYKFKVVNKNEDLYLISIPEMKE

SEQ ID NO: 85122 - protein, 24 aa, Artificial Sequence
  Cyclic GFR-binding peptide
MNRHKRLVVNKNEDYYLISTASMK

SEQ ID NO: 85123 - protein, 28 aa, Artificial Sequence
  Cyclic GFR-binding peptide
  MOD_RES (26), (27): Xaa is C or S
EYKFKLLVRGNDLYLMSIPETKVPAXXT

SEQ ID NO: 85124 - protein, 25 aa, Artificial Sequence
  Cyclic GFR-binding peptide
MNYHYKLVVNKNEDKYLISIPSMKE

SEQ ID NO: 85125 - protein, 29 aa, Artificial Sequence
  Cyclic GFR-binding peptide
  MOD_RES (1), (3): Xaa is C or S
XGXEEVIMYHYKLLLVRGNDKYLMSIPST

SEQ ID NO: 85126 - protein, 25 aa, Artificial Sequence
  Cyclic GFR-binding peptide
MDRHKRLVVNNASDYYLISTASLRT

SEQ ID NO: 85127 - protein, 31 aa, Artificial Sequence
  Cyclic GFR-binding peptide
  MOD_RES (28), (29): Xaa is C or S
MDYHYKLVVNNASDKYLISIPSLRTPVXXTP

SEQ ID NO: 85128 - protein, 34 aa, Artificial Sequence
  Cyclic GFR-binding peptide
  MOD_RES (28), (29): Xaa is C or S
MNRYKKLVVNKNEDFYLISIANMKEPVXXPEPIG

SEQ ID NO: 85129 - protein, 36 aa, Artificial Sequence; identical to SEQ ID NO: 32886
  Cyclic GFR-binding peptide
  MOD_RES (31), (32): Xaa is C or S

SEQ ID NO: 85130 - protein, 28 aa, Artificial Sequence
  Cyclic GFR-binding peptide
  MOD_RES (26), (27): Xaa is C or S
PIKGYVKPKRGVFYLINIPSLAQPVXXP

SEQ ID NO: 85131 - protein, 37 aa, Artificial Sequence; identical to SEQ ID NO: 32887
  Cyclic GFR-binding peptide
  MOD_RES (31), (32): Xaa is C or S

SEQ ID NO: 85132 - protein, 26 aa, Artificial Sequence
  Cyclic GFR-binding peptide
MYHYKLLLVRGNDKYLMSIPSTKVPA

SEQ ID NO: 85133 - protein, 24 aa, Artificial Sequence
  Cyclic GFR-binding peptide
MPIKGYVKPKRGVFYLINIPSLAQ

SEQ ID NO: 85134 - protein, 41 aa, Artificial Sequence; identical to SEQ ID NO: 32890
  Cyclic GFR-binding peptide
  MOD_RES (2), (4), (35), (36): Xaa is C or S

SEQ ID NO: 85135 - protein, 23 aa, Artificial Sequence
  Cyclic GFR-binding peptide
VMGYHYKLIIQQKDNKYLMSIPS

SEQ ID NO: 85136 - protein, 40 aa, Artificial Sequence; identical to SEQ ID NO: 32891
  Cyclic GFR-binding peptide
  MOD_RES (2), (4), (36), (37): Xaa is C or S

SEQ ID NO: 85137 - protein, 30 aa, Artificial Sequence
  Cyclic GFR-binding peptide
  MOD_RES (2), (2): Xaa is C or S
GXESVAMGRHKRLYTVVGKDYYLISTASLK

SEQ ID NO: 85138 - protein, 35 aa, Artificial Sequence; identical to SEQ ID NO: 32894
  Cyclic GFR-binding peptide
  MOD_RES (31), (32): Xaa is C or S

SEQ ID NO: 85139 - protein, 31 aa, Artificial Sequence
  Cyclic GFR-binding peptide
  MOD_RES (2), (2): Xaa is C or S
AXSEVTMNPIKGYVVNKNEDFYLINIPSMKE

SEQ ID NO: 85140 - protein, 29 aa, Artificial Sequence
  Cyclic GFR-binding peptide
EVTMNYHYKLVVNKNEDKYLISIPSMKEP

SEQ ID NO: 85141 - protein, 33 aa, Artificial Sequence
  Cyclic GFR-binding peptide
  MOD_RES (1), (3): Xaa is C or S
XGXESVAMGRHKRLYTVVGKDYYLISTASLKTP

SEQ ID NO: 85142 - protein, 28 aa, Artificial Sequence
  Cyclic GFR-binding peptide
VTMNRYKKLVVNKNEDFYLISIANMKEP

SEQ ID NO: 85143 - protein, 22 aa, Artificial Sequence
  Cyclic GFR-binding peptide
RHKRLIIQQKDNYYLMSTASMK

SEQ ID NO: 85144 - protein, 33 aa, Artificial Sequence
  Cyclic GFR-binding peptide
  MOD_RES (1), (3): Xaa is C or S
XGXRDVVMGEYKFKIIQQKDNLYLMSIPEMKTP

SEQ ID NO: 85145 - protein, 33 aa, Artificial Sequence
  Cyclic GFR-binding peptide
  MOD_RES (28), (29): Xaa is C or S
MNRHKRLVVNKNEDYYLISTASMKEPVXXPEPI

SEQ ID NO: 85146 - protein, 33 aa, Artificial Sequence
  Cyclic GFR-binding peptide
  MOD_RES (2), (4): Xaa is C or S
RXGXESVAMGRHKRLYTVVGKDYYLISTASLKT

SEQ ID NO: 85147 - protein, 35 aa, Artificial Sequence; identical to SEQ ID NO: 32897
  Cyclic GFR-binding peptide
  MOD_RES (1), (3), (35): Xaa is C or S

SEQ ID NO: 85148 - protein, 34 aa, Artificial Sequence
  Cyclic GFR-binding peptide
  MOD_RES (2), (4): Xaa is C or S
RXAXSEVTMNEYKFKVVNKNEDLYLISIPEMKEP

SEQ ID NO: 85149 - protein, 33 aa, Artificial Sequence
  Cyclic GFR-binding peptide
  MOD_RES (28), (29): Xaa is C or S
MGYHYKLIIQQKDNKYLMSIPSMKTPTXXPGAS

SEQ ID NO: 85150 - protein, 23 aa, Artificial Sequence
  Cyclic GFR-binding peptide
DEYKFKVVNNASDLYLISIPELR

SEQ ID NO: 85151 - protein, 35 aa, Artificial Sequence; identical to SEQ ID NO: 32899
  Cyclic GFR-binding peptide
  MOD_RES (2), (34), (35): Xaa is C or S

SEQ ID NO: 85152 - protein, 27 aa, Artificial Sequence
  Cyclic GFR-binding peptide
MGEYKFKIIQQKDNLYLMSIPEMKTPT

SEQ ID NO: 85153 - protein, 22 aa, Artificial Sequence
  Cyclic GFR-binding peptide
EYKFKVVNNASDLYLISIPELR

SEQ ID NO: 85154 - protein, 38 aa, Artificial Sequence; identical to SEQ ID NO: 32900
  Cyclic GFR-binding peptide
  MOD_RES (1), (3), (35), (36): Xaa is C or S

SEQ ID NO: 85155 - protein, 25 aa, Artificial Sequence
  Cyclic GFR-binding peptide
VMGRHKRLIIQQKDNYYLMSTASMK

SEQ ID NO: 85156 - protein, 40 aa, Artificial Sequence; identical to SEQ ID NO: 32901
  Cyclic GFR-binding peptide
  MOD_RES (1), (3), (35), (36): Xaa is C or S

SEQ ID NO: 85157 - protein, 39 aa, Artificial Sequence; identical to SEQ ID NO: 32903
  Cyclic GFR-binding peptide
  MOD_RES (1), (33), (34): Xaa is C or S

SEQ ID NO: 85158 - protein, 29 aa, Artificial Sequence
  Cyclic GFR-binding peptide
  MOD_RES (2), (2): Xaa is C or S
AXSEVTMNEYKFKVVNKNEDLYLISIPEM

SEQ ID NO: 85159 - protein, 30 aa, Artificial Sequence
  Cyclic GFR-binding peptide
  MOD_RES (1), (1): Xaa is C or S
XSEVVMDYHYKLVVNNASDKYLISIPSLRT

SEQ ID NO: 85160 - protein, 35 aa, Artificial Sequence; identical to SEQ ID NO: 32905
  Cyclic GFR-binding peptide
  MOD_RES (1), (32), (33): Xaa is C or S

SEQ ID NO: 85161 - protein, 38 aa, Artificial Sequence; identical to SEQ ID NO: 32906
  Cyclic GFR-binding peptide
  MOD_RES (2), (4), (35), (36): Xaa is C or S

SEQ ID NO: 85162 - protein, 33 aa, Artificial Sequence; identical to SEQ ID NO: 32907
  Cyclic GFR-binding peptide
  MOD_RES (31), (32): Xaa is C or S

SEQ ID NO: 85163 - protein, 33 aa, Artificial Sequence
  Cyclic GFR-binding peptide
  MOD_RES (28), (29): Xaa is C or S
MDEYKFKVVNNASDLYLISIPELRTPVXXTPPT

SEQ ID NO: 85164 - protein, 30 aa, Artificial Sequence
  Cyclic GFR-binding peptide
  MOD_RES (2), (4): Xaa is C or S
RXAXSEVTMNEYKFKVVNKNEDLYLISIPE

SEQ ID NO: 85165 - protein, 28 aa, Artificial Sequence
  Cyclic GFR-binding peptide
  MOD_RES (2), (2): Xaa is C or S
GXEEVIMRHKRLLLVRGNDYYLMSTAST

SEQ ID NO: 85166 - protein, 26 aa, Artificial Sequence
  Cyclic GFR-binding peptide
  MOD_RES (26), (26): Xaa is C or S
EYKFKLLVRGNDLYLMSIPETKVPAX

SEQ ID NO: 85167 - protein, 37 aa, Artificial Sequence; identical to SEQ ID NO: 32911
  Cyclic GFR-binding peptide
  MOD_RES (1), (3), (35), (36): Xaa is C or S

SEQ ID NO: 85168 - protein, 24 aa, Artificial Sequence
  Cyclic GFR-binding peptide
VVMDRHKRLVVNNASDYYLISTAS

SEQ ID NO: 85169 - protein, 27 aa, Artificial Sequence
  Cyclic GFR-binding peptide
  MOD_RES (1), (1): Xaa is C or S
XEEVIMEYKFKLLVRGNDLYLMSIPET

SEQ ID NO: 85170 - protein, 20 aa, Artificial Sequence
  Cyclic GFR-binding peptide
EYKFKLLVRGNDLYLMSIPE

SEQ ID NO: 85171 - protein, 27 aa, Artificial Sequence
  Cyclic GFR-binding peptide
RVIMPIKGYVKPKRGVFYLINIPSLAQ

SEQ ID NO: 85172 - protein, 35 aa, Artificial Sequence; identical to SEQ ID NO: 32913
  Cyclic GFR-binding peptide
  MOD_RES (2), (33), (34): Xaa is C or S

SEQ ID NO: 85173 - protein, 39 aa, Artificial Sequence; identical to SEQ ID NO: 32914
  Cyclic GFR-binding peptide
  MOD_RES (2), (34), (35): Xaa is C or S

SEQ ID NO: 85174 - protein, 39 aa, Artificial Sequence; identical to SEQ ID NO: 32915
  Cyclic GFR-binding peptide
  MOD_RES (2), (33), (34): Xaa is C or S

SEQ ID NO: 85175 - protein, 29 aa, Artificial Sequence
  Cyclic GFR-binding peptide
SEVTMNRYKKLVVNKNEDFYLISIANMKE

SEQ ID NO: 85176 - protein, 22 aa, Artificial Sequence
  Cyclic GFR-binding peptide
YHYKLIIQQKDNKYLMSIPSMK

SEQ ID NO: 85177 - protein, 29 aa, Artificial Sequence
  Cyclic GFR-binding peptide
DVVMGYHYKLIIQQKDNKYLMSIPSMKTP

SEQ ID NO: 85178 - protein, 31 aa, Artificial Sequence
  Cyclic GFR-binding peptide
  MOD_RES (30), (31): Xaa is C or S
VTMNYHYKLVVNKNEDKYLISIPSMKEPVXX

SEQ ID NO: 85179 - protein, 40 aa, Artificial Sequence; identical to SEQ ID NO: 32918
  Cyclic GFR-binding peptide
  MOD_RES (1), (3), (35), (36): Xaa is C or S

SEQ ID NO: 85180 - protein, 38 aa, Artificial Sequence; identical to SEQ ID NO: 32920
  Cyclic GFR-binding peptide
  MOD_RES (1), (33), (34): Xaa is C or S

SEQ ID NO: 85181 - protein, 28 aa, Artificial Sequence
  Cyclic GFR-binding peptide
EVTMNYHYKLVVNKNEDKYLISIPSMKE

SEQ ID NO: 85182 - protein, 30 aa, Artificial Sequence
  Cyclic GFR-binding peptide
  MOD_RES (26), (27): Xaa is C or S
RHKRLYTVVGKDYYLISTASLKTPVXXAKS

SEQ ID NO: 85183 - protein, 31 aa, Artificial Sequence
  Cyclic GFR-binding peptide
  MOD_RES (1), (3): Xaa is C or S
XGXAEVVMDRHKRLVVNNAADYYLISTASLR

SEQ ID NO: 85184 - protein, 28 aa, Artificial Sequence
  Cyclic GFR-binding peptide
RDVVMGRHKRLIIQQKDNYYLMSTASMK

SEQ ID NO: 85185 - protein, 32 aa, Artificial Sequence
  Cyclic GFR-binding peptide
  MOD_RES (26), (27): Xaa is C or S
EYKFKIIQQKDNLYLMSIPEMKTPTXXPGASG

SEQ ID NO: 85186 - protein, 26 aa, Artificial Sequence
  Cyclic GFR-binding peptide
VTMNPIKGYVVNKNEDFYLINIPSMK

SEQ ID NO: 85187 - protein, 29 aa, Artificial Sequence
  Cyclic GFR-binding peptide
  MOD_RES (1), (1): Xaa is C or S
XSKVVMPIKGYVKPTRGVFYLINIPSLDQ

SEQ ID NO: 85188 - protein, 36 aa, Artificial Sequence; identical to SEQ ID NO: 32923
  Cyclic GFR-binding peptide
  MOD_RES (2), (33), (34): Xaa is C or S

SEQ ID NO: 85189 - protein, 28 aa, Artificial Sequence
  Cyclic GFR-binding peptide
SKVVMPIKGYVKPTRGVFYLINIPSLDQ

SEQ ID NO: 85190 - protein, 37 aa, Artificial Sequence; identical to SEQ ID NO: 32924
  Cyclic GFR-binding peptide
  MOD_RES (31), (32): Xaa is C or S

SEQ ID NO: 85191 - protein, 32 aa, Artificial Sequence
  Cyclic GFR-binding peptide
  MOD_RES (1), (3): Xaa is C or S
XKXSKVVMPIKGYVKPTRGVFYLINIPSLDQP

SEQ ID NO: 85192 - protein, 39 aa, Artificial Sequence; identical to SEQ ID NO: 32926
  Cyclic GFR-binding peptide
  MOD_RES (1), (3), (35), (36): Xaa is C or S

SEQ ID NO: 85193 - protein, 29 aa, Artificial Sequence
  Cyclic GFR-binding peptide
  MOD_RES (27), (28): Xaa is C or S
MPIKGYIKPTKGIFYLINIPSLDQSVXXP

SEQ ID NO: 85194 - protein, 26 aa, Artificial Sequence
  Cyclic GFR-binding peptide
ESVAMGRHKRLYTVVGKDYYLISTAS

SEQ ID NO: 85195 - protein, 30 aa, Artificial Sequence
  Cyclic GFR-binding peptide
  MOD_RES (2), (4): Xaa is C or S
SXGXRDVVMGYHYKLIIQQKDNKYLMSIPS

SEQ ID NO: 85196 - protein, 35 aa, Artificial Sequence; identical to SEQ ID NO: 32927
  Cyclic GFR-binding peptide
  MOD_RES (2), (4), (35): Xaa is C or S

SEQ ID NO: 85197 - protein, 30 aa, Artificial Sequence
  Cyclic GFR-binding peptide
  MOD_RES (2), (4): Xaa is C or S
SXKXSKVIMPIKGYIKPTKGIFYLINIPSL

SEQ ID NO: 85198 - protein, 29 aa, Artificial Sequence
  Cyclic GFR-binding peptide
  MOD_RES (2), (4): Xaa is C or S
SXKXSKVVMPIKGYVKPTRGVFYLINIPS

SEQ ID NO: 85199 - protein, 36 aa, Artificial Sequence; identical to SEQ ID NO: 32929
  Cyclic GFR-binding peptide
  MOD_RES (1), (3), (35), (36): Xaa is C or S

SEQ ID NO: 85200 - protein, 31 aa, Artificial Sequence; identical to SEQ ID NO: 32930
  Cyclic GFR-binding peptide
  MOD_RES (31), (31): Xaa is C or S

SEQ ID NO: 85201 - protein, 24 aa, Artificial Sequence
  Cyclic GFR-binding peptide
VMDYHYKLVVNNASDKYLISIPSL

SEQ ID NO: 85202 - protein, 34 aa, Artificial Sequence; identical to SEQ ID NO: 32931
  Cyclic GFR-binding peptide
  MOD_RES (32), (33): Xaa is C or S

SEQ ID NO: 85203 - protein, 28 aa, Artificial Sequence
  Cyclic GFR-binding peptide
  MOD_RES (28), (28): Xaa is C or S
IMPIKGYIKPTKGIFYLINIPSLDQSVX

SEQ ID NO: 85204 - protein, 32 aa, Artificial Sequence
  Cyclic GFR-binding peptide
  MOD_RES (30), (31): Xaa is C or S
EVIMYHYKLLLVRGNDKYLMSIPSTKVPAXXT

SEQ ID NO: 85205 - protein, 26 aa, Artificial Sequence
  Cyclic GFR-binding peptide
IMRHKRLLLVRGNDYYLMSTASTKVP

SEQ ID NO: 85206 - protein, 35 aa, Artificial Sequence; identical to SEQ ID NO: 32933
  Cyclic GFR-binding peptide
  MOD_RES (1), (33), (34): Xaa is C or S

SEQ ID NO: 85207 - protein, 29 aa, Artificial Sequence
  Cyclic GFR-binding peptide
  MOD_RES (29), (29): Xaa is C or S
TMNRHKRLVVNKNEDYYLISTASMKEPVX

SEQ ID NO: 85208 - protein, 26 aa, Artificial Sequence
  Cyclic GFR-binding peptide
VVMDRHKRLVVNNAADYYLISTASLR

SEQ ID NO: 85209 - protein, 30 aa, Artificial Sequence
  Cyclic GFR-binding peptide
  MOD_RES (2), (4): Xaa is C or S
LXGXEEVIMEYKFKLLVRGNDLYLMSIPET

SEQ ID NO: 85210 - protein, 32 aa, Artificial Sequence
  Cyclic GFR-binding peptide
  MOD_RES (2), (4): Xaa is C or S
SXGXRDVVMGYHYKLIIQQKDNKYLMSIPSMK

SEQ ID NO: 85211 - protein, 39 aa, Artificial Sequence; identical to SEQ ID NO: 32937
  Cyclic GFR-binding peptide
  MOD_RES (1), (3), (34), (35): Xaa is C or S

SEQ ID NO: 85212 - protein, 30 aa, Artificial Sequence
  Cyclic GFR-binding peptide
  MOD_RES (26), (27): Xaa is C or S
YHYKLVVNNASDKYLISIPSLRTPVXXTPP

SEQ ID NO: 85213 - protein, 41 aa, Artificial Sequence; identical to SEQ ID NO: 32940
  Cyclic GFR-binding peptide
  MOD_RES (2), (4), (36), (37): Xaa is C or S

SEQ ID NO: 85214 - protein, 32 aa, Artificial Sequence
  Cyclic GFR-binding peptide
  MOD_RES (30), (31): Xaa is C or S
KVVMPIKGYVKPTRGVFYLINIPSLDQPVXXP

SEQ ID NO: 85215 - protein, 29 aa, Artificial Sequence
  Cyclic GFR-binding peptide
  MOD_RES (1), (3): Xaa is C or S
XKXSKVIMPIKGYIKPTKGIFYLINIPSL

SEQ ID NO: 85216 - protein, 27 aa, Artificial Sequence
  Cyclic GFR-binding peptide
EVIMEYKFKLLVRGNDLYLMSIPETKV

SEQ ID NO: 85217 - protein, 39 aa, Artificial Sequence; identical to SEQ ID NO: 32943
  Cyclic GFR-binding peptide
  MOD_RES (2), (34), (35): Xaa is C or S

SEQ ID NO: 85218 - protein, 32 aa, Artificial Sequence
  Cyclic GFR-binding peptide
  MOD_RES (2), (4): Xaa is C or S
RXAXSEVTMNEYKFKVVNKNEDLYLISIPEMK

SEQ ID NO: 85219 - protein, 28 aa, Artificial Sequence
  Cyclic GFR-binding peptide
VVMDRHKRLVVNNASDYYLISTASLRTP

SEQ ID NO: 85220 - protein, 35 aa, Artificial Sequence; identical to SEQ ID NO: 32945
  Cyclic GFR-binding peptide
  MOD_RES (1), (3), (35): Xaa is C or S

SEQ ID NO: 85221 - protein, 33 aa, Artificial Sequence
  Cyclic GFR-binding peptide
  MOD_RES (27), (28): Xaa is C or S
DYHYKLVVNNASDKYLISIPSLRTPVXXTPPTS

SEQ ID NO: 85222 - protein, 28 aa, Artificial Sequence
  Cyclic GFR-binding peptide
  MOD_RES (1), (1): Xaa is C or S
XESVAMGRHKRLYTVVGKDYYLISTASL

SEQ ID NO: 85223 - protein, 33 aa, Artificial Sequence; identical to SEQ ID NO: 32947
  Cyclic GFR-binding peptide
  MOD_RES (2), (2): Xaa is C or S

SEQ ID NO: 85224 - protein, 37 aa, Artificial Sequence; identical to SEQ ID NO: 32948
  Cyclic GFR-binding peptide
  MOD_RES (2), (4), (35), (36): Xaa is C or S

SEQ ID NO: 85225 - protein, 34 aa, Artificial Sequence
  Cyclic GFR-binding peptide
  MOD_RES (29), (30): Xaa is C or S
VVMPIKGYVKPTRGVFYLINIPSLDQPVXXPSAS

SEQ ID NO: 85226 - protein, 27 aa, Artificial Sequence
  Cyclic GFR-binding peptide
  MOD_RES (1), (1): Xaa is C or S
XSEVVMDRHKRLVVNNASDYYLISTAS

SEQ ID NO: 85227 - protein, 30 aa, Artificial Sequence
  Cyclic GFR-binding peptide
SEVVMDRHKRLVVNNASDYYLISTASLRTP

SEQ ID NO: 85228 - protein, 26 aa, Artificial Sequence
  Cyclic GFR-binding peptide
VTMNRYKKLVVNKNEDFYLISIANMK

SEQ ID NO: 85229 - protein, 31 aa, Artificial Sequence
  Cyclic GFR-binding peptide
  MOD_RES (29), (30): Xaa is C or S
TMNRYKKLVVNKNEDFYLISIANMKEPVXXP

SEQ ID NO: 85230 - protein, 34 aa, Artificial Sequence; identical to SEQ ID NO: 32950
  Cyclic GFR-binding peptide
  MOD_RES (32), (33): Xaa is C or S

SEQ ID NO: 85231 - protein, 25 aa, Artificial Sequence
  Cyclic GFR-binding peptide
MGRHKRLYTVVGKDYYLISTASLKT

SEQ ID NO: 85232 - protein, 28 aa, Artificial Sequence
  Cyclic GFR-binding peptide
  MOD_RES (2), (2): Xaa is C or S
GXRDVVMGEYKFKIIQQKDNLYLMSIPE

SEQ ID NO: 85233 - protein, 32 aa, Artificial Sequence
  Cyclic GFR-binding peptide
  MOD_RES (2), (4): Xaa is C or S
RXAXSEVTMNYHYKLVVNKNEDKYLISIPSMK

SEQ ID NO: 85234 - protein, 41 aa, Artificial Sequence; identical to SEQ ID NO: 32952
  Cyclic GFR-binding peptide
  MOD_RES (2), (4), (36), (37): Xaa is C or S

SEQ ID NO: 85235 - protein, 24 aa, Artificial Sequence
  Cyclic GFR-binding peptide
GEYKFKIIQQKDNLYLMSIPEMKT

SEQ ID NO: 85236 - protein, 29 aa, Artificial Sequence
  Cyclic GFR-binding peptide
  MOD_RES (1), (3): Xaa is C or S
XAXSEVTMNRHKRLVVNKNEDYYLISTAS

SEQ ID NO: 85237 - protein, 36 aa, Artificial Sequence
  Cyclic GFR-binding peptide
  MOD_RES (30), (31): Xaa is C or S
VTMNEYKFKVVNKNEDLYLISIPEMKEPVXXPEPIG

SEQ ID NO: 85238 - protein, 33 aa, Artificial Sequence; identical to SEQ ID NO: 32954
  Cyclic GFR-binding peptide
  MOD_RES (31), (32): Xaa is C or S

SEQ ID NO: 85239 - protein, 24 aa, Artificial Sequence
  Cyclic GFR-binding peptide
RHKRLVVNNASDYYLISTASLRTP

SEQ ID NO: 85240 - protein, 20 aa, Artificial Sequence
  Cyclic GFR-binding peptide
PIKGYVKPTRGVFYLINIPS

SEQ ID NO: 85241 - protein, 29 aa, Artificial Sequence
  Cyclic GFR-binding peptide
EVTMNRHKRLVVNKNEDYYLISTASMKEP

SEQ ID NO: 85242 - protein, 25 aa, Artificial Sequence
  Cyclic GFR-binding peptide
KVVMPIKGYVKPTRGVFYLINIPSL

SEQ ID NO: 85243 - protein, 40 aa, Artificial Sequence; identical to SEQ ID NO: 32955
  Cyclic GFR-binding peptide
  MOD_RES (2), (4), (36), (37): Xaa is C or S

SEQ ID NO: 85244 - protein, 29 aa, Artificial Sequence
  Cyclic GFR-binding peptide
DVVMGEYKFKIIQQKDNLYLMSIPEMKTP

SEQ ID NO: 85245 - protein, 32 aa, Artificial Sequence
  Cyclic GFR-binding peptide
  MOD_RES (27), (28): Xaa is C or S
GRHKRLIIQQKDNYYLMSTASMKTPTXXPGAS

SEQ ID NO: 85246 - protein, 28 aa, Artificial Sequence
  Cyclic GFR-binding peptide
VTMNPIKGYVVNKNEDFYLINIPSMKEP

SEQ ID NO: 85247 - protein, 30 aa, Artificial Sequence
  Cyclic GFR-binding peptide
  MOD_RES (1), (1): Xaa is C or S
XSEVTMNPIKGYVVNKNEDFYLINIPSMKE

SEQ ID NO: 85248 - protein, 38 aa, Artificial Sequence; identical to SEQ ID NO: 32959
  Cyclic GFR-binding peptide
  MOD_RES (1), (33), (34): Xaa is C or S

SEQ ID NO: 85249 - protein, 35 aa, Artificial Sequence; identical to SEQ ID NO: 32958
  Cyclic GFR-binding peptide
  MOD_RES (1), (32), (33): Xaa is C or S

SEQ ID NO: 85250 - protein, 26 aa, Artificial Sequence
  Cyclic GFR-binding peptide
NYHYKLVVNKNEDKYLISIPSMKEPV

SEQ ID NO: 85251 - protein, 35 aa, Artificial Sequence; identical to SEQ ID NO: 32961
  Cyclic GFR-binding peptide
  MOD_RES (32), (33): Xaa is C or S

SEQ ID NO: 85252 - protein, 31 aa, Artificial Sequence
  Cyclic GFR-binding peptide
  MOD_RES (27), (28): Xaa is C or S
NRHKRLVVNKNEDYYLISTASMKEPVXXPEP

SEQ ID NO: 85253 - protein, 25 aa, Artificial Sequence
  Cyclic GFR-binding peptide
VIMYHYKLLLVRGNDKYLMSIPSTK

SEQ ID NO: 85254 - protein, 27 aa, Artificial Sequence
  Cyclic GFR-binding peptide
  MOD_RES (27), (27): Xaa is C or S
MYHYKLLLVRGNDKYLMSIPSTKVPAX

SEQ ID NO: 85255 - protein, 29 aa, Artificial Sequence
  Cyclic GFR-binding peptide
  MOD_RES (27), (28): Xaa is C or S
NEYKFKVVNKNEDLYLISIPEMKEPVXXP

SEQ ID NO: 85256 - protein, 41 aa, Artificial Sequence; identical to SEQ ID NO: 32963
  Cyclic GFR-binding peptide
  MOD_RES (1), (3), (35), (36): Xaa is C or S

SEQ ID NO: 85257 - protein, 25 aa, Artificial Sequence
  Cyclic GFR-binding peptide
NRYKKLVVNKNEDFYLISIANMKEP

SEQ ID NO: 85258 - protein, 29 aa, Artificial Sequence
  Cyclic GFR-binding peptide
  MOD_RES (28), (29): Xaa is C or S
IMPIKGYIKPTKGIFYLINIPSLDQSVXX

SEQ ID NO: 85259 - protein, 33 aa, Artificial Sequence; identical to SEQ ID NO: 32965
  Cyclic GFR-binding peptide
  MOD_RES (1), (33): Xaa is C or S

SEQ ID NO: 85260 - protein, 37 aa, Artificial Sequence; identical to SEQ ID NO: 32966
  Cyclic GFR-binding peptide
  MOD_RES (2), (34), (35): Xaa is C or S

SEQ ID NO: 85261 - protein, 27 aa, Artificial Sequence
  Cyclic GFR-binding peptide
VIMYHYKLLLVRGNDKYLMSIPSTKVP

SEQ ID NO: 85262 - protein, 38 aa, Artificial Sequence; identical to SEQ ID NO: 32967
  Cyclic GFR-binding peptide
  MOD_RES (1), (32), (33): Xaa is C or S

SEQ ID NO: 85263 - protein, 41 aa, Artificial Sequence; identical to SEQ ID NO: 32968
  Cyclic GFR-binding peptide
  MOD_RES (1), (3), (35), (36): Xaa is C or S

SEQ ID NO: 85264 - protein, 39 aa, Artificial Sequence; identical to SEQ ID NO: 32969
  Cyclic GFR-binding peptide
  MOD_RES (2), (4), (36), (37): Xaa is C or S

SEQ ID NO: 85265 - protein, 30 aa, Artificial Sequence
  Cyclic GFR-binding peptide
  MOD_RES (1), (1): Xaa is C or S
XSEVTMNEYKFKVVNKNEDLYLISIPEMKE

SEQ ID NO: 85266 - protein, 25 aa, Artificial Sequence
  Cyclic GFR-binding peptide
MGYHYKLIIQQKDNKYLMSIPSMKT

SEQ ID NO: 85267 - protein, 41 aa, Artificial Sequence; identical to SEQ ID NO: 32970
  Cyclic GFR-binding peptide
  MOD_RES (1), (3), (35), (36): Xaa is C or S

SEQ ID NO: 85268 - protein, 29 aa, Artificial Sequence
  Cyclic GFR-binding peptide
  MOD_RES (29), (29): Xaa is C or S
VMGYHYKLIIQQKDNKYLMSIPSMKTPTX

SEQ ID NO: 85269 - protein, 34 aa, Artificial Sequence; identical to SEQ ID NO: 32972
  Cyclic GFR-binding peptide
  MOD_RES (1), (33), (34): Xaa is C or S

SEQ ID NO: 85270 - protein, 31 aa, Artificial Sequence; identical to SEQ ID NO: 32973
  Cyclic GFR-binding peptide
  MOD_RES (31), (31): Xaa is C or S

SEQ ID NO: 85271 - protein, 31 aa, Artificial Sequence
  Cyclic GFR-binding peptide
  MOD_RES (29), (30): Xaa is C or S
VMGEYKFKIIQQKDNLYLMSIPEMKTPTXXP

SEQ ID NO: 85272 - protein, 29 aa, Artificial Sequence
  Cyclic GFR-binding peptide
  MOD_RES (1), (3): Xaa is C or S
XAXSEVTMNPIKGYVVNKNEDFYLINIPS

SEQ ID NO: 85273 - protein, 29 aa, Artificial Sequence
  Cyclic GFR-binding peptide
  MOD_RES (2), (2): Xaa is C or S
AXSEVTMNRYKKLVVNKNEDFYLISIANM

SEQ ID NO: 85274 - protein, 29 aa, Artificial Sequence
  Cyclic GFR-binding peptide
  MOD_RES (28), (29): Xaa is C or S
VMPIKGYVKPTRGVFYLINIPSLDQPVXX

SEQ ID NO: 85275 - protein, 32 aa, Artificial Sequence; identical to SEQ ID NO: 32976
  Cyclic GFR-binding peptide
  MOD_RES (1), (1): Xaa is C or S

SEQ ID NO: 85276 - protein, 36 aa, Artificial Sequence; identical to SEQ ID NO: 32978
  Cyclic GFR-binding peptide
  MOD_RES (31), (32): Xaa is C or S

SEQ ID NO: 85277 - protein, 34 aa, Artificial Sequence; identical to SEQ ID NO: 32977
  Cyclic GFR-binding peptide
  MOD_RES (31), (32): Xaa is C or S

SEQ ID NO: 85278 - protein, 35 aa, Artificial Sequence; identical to SEQ ID NO: 32979
  Cyclic GFR-binding peptide
  MOD_RES (1), (3), (35): Xaa is C or S

SEQ ID NO: 85279 - protein, 25 aa, Artificial Sequence
  Cyclic GFR-binding peptide
IMPIKGYIKPTKGIFYLINIPSLDQ

SEQ ID NO: 85280 - protein, 30 aa, Artificial Sequence
  Cyclic GFR-binding peptide
  MOD_RES (27), (28): Xaa is C or S
GEYKFKIIQQKDNLYLMSIPEMKTPTXXPG

SEQ ID NO: 85281 - protein, 32 aa, Artificial Sequence
  Cyclic GFR-binding peptide
  MOD_RES (2), (4): Xaa is C or S
RXGXSEVVMDYHYKLVVNNASDKYLISIPSLR

SEQ ID NO: 85282 - protein, 30 aa, Artificial Sequence
  Cyclic GFR-binding peptide
  MOD_RES (29), (30): Xaa is C or S
VIMEYKFKLLVRGNDLYLMSIPETKVPAXX

SEQ ID NO: 85283 - protein, 42 aa, Artificial Sequence; identical to SEQ ID NO: 32983
  Cyclic GFR-binding peptide
  MOD_RES (2), (4), (36), (37): Xaa is C or S

SEQ ID NO: 85284 - protein, 28 aa, Artificial Sequence
  Cyclic GFR-binding peptide
  MOD_RES (27), (28): Xaa is C or S
MPIKGYVKPKRGVFYLINIPSLAQPVXX

SEQ ID NO: 85285 - protein, 36 aa, Artificial Sequence; identical to SEQ ID NO: 32984
  Cyclic GFR-binding peptide
  MOD_RES (2), (4), (35), (36): Xaa is C or S

SEQ ID NO: 85286 - protein, 36 aa, Artificial Sequence; identical to SEQ ID NO: 32985
  Cyclic GFR-binding peptide
  MOD_RES (2), (4), (36): Xaa is C or S

SEQ ID NO: 85287 - protein, 23 aa, Artificial Sequence
  Cyclic GFR-binding peptide
TMNYHYKLVVNKNEDKYLISIPS

SEQ ID NO: 85288 - protein, 37 aa, Artificial Sequence; identical to SEQ ID NO: 32986
  Cyclic GFR-binding peptide
  MOD_RES (31), (32): Xaa is C or S

SEQ ID NO: 85289 - protein, 30 aa, Artificial Sequence
  Cyclic GFR-binding peptide
  MOD_RES (26), (27): Xaa is C or S
EYKFKVVNNASDLYLISIPELRTPVXXTPP

SEQ ID NO: 85290 - protein, 38 aa, Artificial Sequence; identical to SEQ ID NO: 32988
  Cyclic GFR-binding peptide
  MOD_RES (1), (33), (34): Xaa is C or S

SEQ ID NO: 85291 - protein, 29 aa, Artificial Sequence
  Cyclic GFR-binding peptide
  MOD_RES (29), (29): Xaa is C or S
VIMPIKGYIKPTKGIFYLINIPSLDQSVX

SEQ ID NO: 85292 - protein, 28 aa, Artificial Sequence
  Cyclic GFR-binding peptide
  MOD_RES (1), (3): Xaa is C or S
XKXSKVVMPIKGYVKPTRGVFYLINIPS

SEQ ID NO: 85293 - protein, 32 aa, Artificial Sequence; identical to SEQ ID NO: 32990
  Cyclic GFR-binding peptide
  MOD_RES (1), (1): Xaa is C or S

SEQ ID NO: 85294 - protein, 30 aa, Artificial Sequence
  Cyclic GFR-binding peptide
  MOD_RES (29), (30): Xaa is C or S
VMDRHKRLVVNNAADYYLISTASLRAPVXX

SEQ ID NO: 85295 - protein, 34 aa, Artificial Sequence; identical to SEQ ID NO: 32991
  Cyclic GFR-binding peptide
  MOD_RES (1), (33), (34): Xaa is C or S

SEQ ID NO: 85296 - protein, 41 aa, Artificial Sequence; identical to SEQ ID NO: 32992
  Cyclic GFR-binding peptide
  MOD_RES (2), (4), (36), (37): Xaa is C or S

SEQ ID NO: 85297 - protein, 31 aa, Artificial Sequence; identical to SEQ ID NO: 32993
  Cyclic GFR-binding peptide
  MOD_RES (31), (31): Xaa is C or S

SEQ ID NO: 85298 - protein, 33 aa, Artificial Sequence; identical to SEQ ID NO: 32994
  Cyclic GFR-binding peptide
  MOD_RES (32), (33): Xaa is C or S

SEQ ID NO: 85299 - protein, 24 aa, Artificial Sequence
  Cyclic GFR-binding peptide
VMDRHKRLVVNNASDYYLISTASL

SEQ ID NO: 85300 - protein, 37 aa, Artificial Sequence; identical to SEQ ID NO: 32997
  Cyclic GFR-binding peptide
  MOD_RES (2), (34), (35): Xaa is C or S

SEQ ID NO: 85301 - protein, 30 aa, Artificial Sequence
  Cyclic GFR-binding peptide
  MOD_RES (30), (30): Xaa is C or S
VTMNEYKFKVVNKNEDLYLISIPEMKEPVX

SEQ ID NO: 85302 - protein, 33 aa, Artificial Sequence
  Cyclic GFR-binding peptide
  MOD_RES (29), (30): Xaa is C or S
VMGRHKRLIIQQKDNYYLMSTASMKTPTXXPGA

SEQ ID NO: 85303 - protein, 35 aa, Artificial Sequence
  Cyclic GFR-binding peptide
  MOD_RES (30), (31): Xaa is C or S
VVMDRHKRLVVNNASDYYLISTASLRTPVXXTPPT

SEQ ID NO: 85304 - protein, 28 aa, Artificial Sequence
  Cyclic GFR-binding peptide
EVTMNEYKFKVVNKNEDLYLISIPEMKE

SEQ ID NO: 85305 - protein, 33 aa, Artificial Sequence
  Cyclic GFR-binding peptide
  MOD_RES (27), (28): Xaa is C or S
DRHKRLVVNNAADYYLISTASLRAPVXXSAPAA

SEQ ID NO: 85306 - protein, 34 aa, Artificial Sequence; identical to SEQ ID NO: 32998
  Cyclic GFR-binding peptide
  MOD_RES (1), (32), (33): Xaa is C or S

SEQ ID NO: 85307 - protein, 32 aa, Artificial Sequence
  Cyclic GFR-binding peptide
  MOD_RES (27), (28): Xaa is C or S
NPIKGYVVNKNEDFYLINIPSMKEPVXXPEPI

SEQ ID NO: 85308 - protein, 41 aa, Artificial Sequence; identical to SEQ ID NO: 32999
  Cyclic GFR-binding peptide
  MOD_RES (1), (3), (35), (36): Xaa is C or S

SEQ ID NO: 85309 - protein, 22 aa, Artificial Sequence
  Cyclic GFR-binding peptide
NRHKRLVVNKNEDYYLISTASM

SEQ ID NO: 85310 - protein, 27 aa, Artificial Sequence
  Cyclic GFR-binding peptide
VVMDEYKFKVVNNASDLYLISIPELRT

SEQ ID NO: 85311 - protein, 38 aa, Artificial Sequence; identical to SEQ ID NO: 33000
  Cyclic GFR-binding peptide
  MOD_RES (1), (33), (34): Xaa is C or S

SEQ ID NO: 85312 - protein, 27 aa, Artificial Sequence
  Cyclic GFR-binding peptide
DVVMGYHYKLIIQQKDNKYLMSIPSMK

SEQ ID NO: 85313 - protein, 23 aa, Artificial Sequence
  Cyclic GFR-binding peptide
VIMPIKGYVKPKRGVFYLINIPS

SEQ ID NO: 85314 - protein, 28 aa, Artificial Sequence
  Cyclic GFR-binding peptide
  MOD_RES (28), (28): Xaa is C or S
VMPIKGYVKPTRGVFYLINIPSLDQPVX

SEQ ID NO: 85315 - protein, 34 aa, Artificial Sequence
  Cyclic GFR-binding peptide
  MOD_RES (28), (29): Xaa is C or S
MDRHKRLVVNNAADYYLISTASLRAPVXXSAPAA

SEQ ID NO: 85316 - protein, 36 aa, Artificial Sequence; identical to SEQ ID NO: 33002
  Cyclic GFR-binding peptide
  MOD_RES (1), (33), (34): Xaa is C or S

SEQ ID NO: 85317 - protein, 30 aa, Artificial Sequence
  Cyclic GFR-binding peptide
  MOD_RES (1), (3): Xaa is C or S
XAXSEVTMNYHYKLVVNKNEDKYLISIPSM

SEQ ID NO: 85318 - protein, 41 aa, Artificial Sequence; identical to SEQ ID NO: 33004
  Cyclic GFR-binding peptide
  MOD_RES (1), (3), (35), (36): Xaa is C or S

SEQ ID NO: 85319 - protein, 27 aa, Artificial Sequence
  Cyclic GFR-binding peptide
  MOD_RES (1), (1): Xaa is C or S
XSEVTMNRHKRLVVNKNEDYYLISTAS

SEQ ID NO: 85320 - protein, 27 aa, Artificial Sequence
  Cyclic GFR-binding peptide
  MOD_RES (26), (27): Xaa is C or S
PIKGYIKPTKGIFYLINIPSLDQSVXX

SEQ ID NO: 85321 - protein, 35 aa, Artificial Sequence; identical to SEQ ID NO: 33006
  Cyclic GFR-binding peptide
  MOD_RES (32), (33): Xaa is C or S

SEQ ID NO: 85322 - protein, 40 aa, Artificial Sequence; identical to SEQ ID NO: 33007
  Cyclic GFR-binding peptide
  MOD_RES (2), (34), (35): Xaa is C or S

SEQ ID NO: 85323 - protein, 30 aa, Artificial Sequence
  Cyclic GFR-binding peptide
  MOD_RES (27), (28): Xaa is C or S
GRHKRLYTVVGKDYYLISTASLKTPVXXAK

SEQ ID NO: 85324 - protein, 30 aa, Artificial Sequence
  Cyclic GFR-binding peptide
  MOD_RES (26), (27): Xaa is C or S
RHKRLVVNNASDYYLISTASLRTPVXXTPP

SEQ ID NO: 85325 - protein, 24 aa, Artificial Sequence
  Cyclic GFR-binding peptide
VVMDYHYKLVVNNASDKYLISIPS

SEQ ID NO: 85326 - protein, 36 aa, Artificial Sequence; identical to SEQ ID NO: 33011
  Cyclic GFR-binding peptide
  MOD_RES (31), (32): Xaa is C or S

SEQ ID NO: 85327 - protein, 34 aa, Artificial Sequence; identical to SEQ ID NO: 33012
  Cyclic GFR-binding peptide
  MOD_RES (2), (34): Xaa is C or S

SEQ ID NO: 85328 - protein, 29 aa, Artificial Sequence
  Cyclic GFR-binding peptide
  MOD_RES (29), (29): Xaa is C or S
TMNRYKKLVVNKNEDFYLISIANMKEPVX

SEQ ID NO: 85329 - protein, 28 aa, Artificial Sequence
  Cyclic GFR-binding peptide
VMGRHKRLIIQQKDNYYLMSTASMKTPT

SEQ ID NO: 85330 - protein, 33 aa, Artificial Sequence; identical to SEQ ID NO: 33013
  Cyclic GFR-binding peptide
  MOD_RES (31), (32): Xaa is C or S

SEQ ID NO: 85331 - protein, 25 aa, Artificial Sequence
  Cyclic GFR-binding peptide
NRHKRLVVNKNEDYYLISTASMKEP

SEQ ID NO: 85332 - protein, 27 aa, Artificial Sequence
  Cyclic GFR-binding peptide
SKVVMPIKGYVKPTRGVFYLINIPSLD

SEQ ID NO: 85333 - protein, 24 aa, Artificial Sequence
  Cyclic GFR-binding peptide
MNEYKFKVVNKNEDLYLISIPEMK

SEQ ID NO: 85334 - protein, 22 aa, Artificial Sequence
  Cyclic GFR-binding peptide
MYHYKLLLVRGNDKYLMSIPST

SEQ ID NO: 85335 - protein, 32 aa, Artificial Sequence
  Cyclic GFR-binding peptide
  MOD_RES (29), (30): Xaa is C or S
TMNRYKKLVVNKNEDFYLISIANMKEPVXXPE

SEQ ID NO: 85336 - protein, 37 aa, Artificial Sequence; identical to SEQ ID NO: 33015
  Cyclic GFR-binding peptide
  MOD_RES (2), (4), (35), (36): Xaa is C or S

SEQ ID NO: 85337 - protein, 31 aa, Artificial Sequence
  Cyclic GFR-binding peptide
  MOD_RES (28), (29): Xaa is C or S
MNEYKFKVVNKNEDLYLISIPEMKEPVXXPE

SEQ ID NO: 85338 - protein, 31 aa, Artificial Sequence
  Cyclic GFR-binding peptide
  MOD_RES (29), (30): Xaa is C or S
VMDRHKRLVVNNAADYYLISTASLRAPVXXS

SEQ ID NO: 85339 - protein, 39 aa, Artificial Sequence; identical to SEQ ID NO: 33016
  Cyclic GFR-binding peptide
  MOD_RES (2), (33), (34): Xaa is C or S

SEQ ID NO: 85340 - protein, 36 aa, Artificial Sequence; identical to SEQ ID NO: 33017
  Cyclic GFR-binding peptide
  MOD_RES (1), (3), (35), (36): Xaa is C or S

SEQ ID NO: 85341 - protein, 32 aa, Artificial Sequence; identical to SEQ ID NO: 33019
  Cyclic GFR-binding peptide
  MOD_RES (2), (2): Xaa is C or S

SEQ ID NO: 85342 - protein, 32 aa, Artificial Sequence
  Cyclic GFR-binding peptide
  MOD_RES (29), (30): Xaa is C or S
VMDRHKRLVVNNASDYYLISTASLRTPVXXTP

SEQ ID NO: 85343 - protein, 28 aa, Artificial Sequence
  Cyclic GFR-binding peptide
  MOD_RES (26), (27): Xaa is C or S
EYKFKVVNKNEDLYLISIPEMKEPVXXP

SEQ ID NO: 85344 - protein, 38 aa, Artificial Sequence; identical to SEQ ID NO: 33020
  Cyclic GFR-binding peptide
  MOD_RES (2), (4), (36), (37): Xaa is C or S

SEQ ID NO: 85345 - protein, 34 aa, Artificial Sequence
  Cyclic GFR-binding peptide
  MOD_RES (2), (4): Xaa is C or S
RXGXSEVVMDEYKFKVVNNASDLYLISIPELRTP

SEQ ID NO: 85346 - protein, 35 aa, Artificial Sequence
  Cyclic GFR-binding peptide
  MOD_RES (29), (30): Xaa is C or S
VIMPIKGYIKPTKGIFYLINIPSLDQSVXXPSASA

SEQ ID NO: 85347 - protein, 28 aa, Artificial Sequence
  Cyclic GFR-binding peptide
  MOD_RES (26), (27): Xaa is C or S
YHYKLVVNKNEDKYLISIPSMKEPVXXP

SEQ ID NO: 85348 - protein, 34 aa, Artificial Sequence; identical to SEQ ID NO: 33022
  Cyclic GFR-binding peptide
  MOD_RES (31), (32): Xaa is C or S

SEQ ID NO: 85349 - protein, 29 aa, Artificial Sequence
  Cyclic GFR-binding peptide
  MOD_RES (1), (1): Xaa is C or S
XEEVIMYHYKLLLVRGNDKYLMSIPSTKV

SEQ ID NO: 85350 - protein, 32 aa, Artificial Sequence
  Cyclic GFR-binding peptide
  MOD_RES (30), (31): Xaa is C or S
RVIMPIKGYVKPKRGVFYLINIPSLAQPVXXP

SEQ ID NO: 85351 - protein, 37 aa, Artificial Sequence; identical to SEQ ID NO: 33025
  Cyclic GFR-binding peptide
  MOD_RES (2), (34), (35): Xaa is C or S

SEQ ID NO: 85352 - protein, 24 aa, Artificial Sequence
  Cyclic GFR-binding peptide
DRHKRLVVNNASDYYLISTASLRT

SEQ ID NO: 85353 - protein, 22 aa, Artificial Sequence
  Cyclic GFR-binding peptide
MPIKGYIKPTKGIFYLINIPSL

SEQ ID NO: 85354 - protein, 26 aa, Artificial Sequence
  Cyclic GFR-binding peptide
MDRHKRLVVNNASDYYLISTASLRTP

SEQ ID NO: 85355 - protein, 30 aa, Artificial Sequence
  Cyclic GFR-binding peptide
  MOD_RES (28), (29): Xaa is C or S
IMEYKFKLLVRGNDLYLMSIPETKVPAXXT

SEQ ID NO: 85356 - protein, 29 aa, Artificial Sequence
  Cyclic GFR-binding peptide
VTMNEYKFKVVNKNEDLYLISIPEMKEPV

SEQ ID NO: 85357 - protein, 34 aa, Artificial Sequence; identical to SEQ ID NO: 33031
  Cyclic GFR-binding peptide
  MOD_RES (2), (34): Xaa is C or S

SEQ ID NO: 85358 - protein, 29 aa, Artificial Sequence
  Cyclic GFR-binding peptide
EVTMNPIKGYVVNKNEDFYLINIPSMKEP

SEQ ID NO: 85359 - protein, 30 aa, Artificial Sequence; identical to SEQ ID NO: 33033
  Cyclic GFR-binding peptide

SEQ ID NO: 85360 - protein, 23 aa, Artificial Sequence
  Cyclic GFR-binding peptide
MEYKFKLLVRGNDLYLMSIPETK

SEQ ID NO: 85361 - protein, 31 aa, Artificial Sequence
  Cyclic GFR-binding peptide
  MOD_RES (1), (3): Xaa is C or S
XKXSRVIMPIKGYVKPKRGVFYLINIPSLAQ

SEQ ID NO: 85362 - protein, 22 aa, Artificial Sequence
  Cyclic GFR-binding peptide
GRHKRLIIQQKDNYYLMSTASM

SEQ ID NO: 85363 - protein, 26 aa, Artificial Sequence
  Cyclic GFR-binding peptide
DVVMGYHYKLIIQQKDNKYLMSIPSM

SEQ ID NO: 85364 - protein, 30 aa, Artificial Sequence
  Cyclic GFR-binding peptide
  MOD_RES (28), (29): Xaa is C or S
MDRHKRLVVNNAADYYLISTASLRAPVXXS

SEQ ID NO: 85365 - protein, 23 aa, Artificial Sequence
  Cyclic GFR-binding peptide
VMDYHYKLVVNNASDKYLISIPS

SEQ ID NO: 85366 - protein, 42 aa, Artificial Sequence; identical to SEQ ID NO: 33037
  Cyclic GFR-binding peptide
  MOD_RES (2), (4), (36), (37): Xaa is C or S

SEQ ID NO: 85367 - protein, 32 aa, Artificial Sequence
  Cyclic GFR-binding peptide
  MOD_RES (2), (2): Xaa is C or S
AXSEVTMNEYKFKVVNKNEDLYLISIPEMKEP

SEQ ID NO: 85368 - protein, 29 aa, Artificial Sequence
  Cyclic GFR-binding peptide
AAAAAAAAARHKRLVVNNASDYYLISTAS

SEQ ID NO: 85369 - protein, 37 aa, Artificial Sequence; identical to SEQ ID NO: 33039
  Cyclic GFR-binding peptide
  MOD_RES (2), (34), (35): Xaa is C or S

SEQ ID NO: 85370 - protein, 34 aa, Artificial Sequence
  Cyclic GFR-binding peptide
  MOD_RES (28), (29): Xaa is C or S
MGRHKRLIIQQKDNYYLMSTASMKTPTXXPGASG

SEQ ID NO: 85371 - protein, 23 aa, Artificial Sequence
  Cyclic GFR-binding peptide
VMDRHKRLVVNNASDYYLISTAS

SEQ ID NO: 85372 - protein, 33 aa, Artificial Sequence
  Cyclic GFR-binding peptide
  MOD_RES (1), (3): Xaa is C or S
XAXSEVTMNRHKRLVVNKNEDYYLISTASMKEP

SEQ ID NO: 85373 - protein, 25 aa, Artificial Sequence
  Cyclic GFR-binding peptide
MDEYKFKVVNNASDLYLISIPELRT

SEQ ID NO: 85374 - protein, 36 aa, Artificial Sequence; identical to SEQ ID NO: 33040
  Cyclic GFR-binding peptide
  MOD_RES (1), (33), (34): Xaa is C or S

SEQ ID NO: 85375 - protein, 30 aa, Artificial Sequence
  Cyclic GFR-binding peptide
  MOD_RES (1), (1): Xaa is C or S
XSEVTMNRHKRLVVNKNEDYYLISTASMKE

SEQ ID NO: 85376 - protein, 21 aa, Artificial Sequence
  Cyclic GFR-binding peptide
MPIKGYVKPKRGVFYLINIPS

SEQ ID NO: 85377 - protein, 24 aa, Artificial Sequence
  Cyclic GFR-binding peptide
IMYHYKLLLVRGNDKYLMSIPSTK

SEQ ID NO: 85378 - protein, 31 aa, Artificial Sequence
  Cyclic GFR-binding peptide
  MOD_RES (1), (3): Xaa is C or S
XAXSEVTMNEYKFKVVNKNEDLYLISIPEMK

SEQ ID NO: 85379 - protein, 26 aa, Artificial Sequence
  Cyclic GFR-binding peptide
VVMGRHKRLIIQQKDNYYLMSTASMK

SEQ ID NO: 85380 - protein, 34 aa, Artificial Sequence; identical to SEQ ID NO: 33042
  Cyclic GFR-binding peptide
  MOD_RES (1), (3): Xaa is C or S

SEQ ID NO: 85381 - protein, 25 aa, Artificial Sequence
  Cyclic GFR-binding peptide
EYKFKLLVRGNDLYLMSIPETKVPA

SEQ ID NO: 85382 - protein, 29 aa, Artificial Sequence
  Cyclic GFR-binding peptide
VAMGRHKRLYTVVGKDYYLISTASLKTPV

SEQ ID NO: 85383 - protein, 29 aa, Artificial Sequence
  Cyclic GFR-binding peptide
RDVVMGYHYKLIIQQKDNKYLMSIPSMKT

SEQ ID NO: 85384 - protein, 37 aa, Artificial Sequence; identical to SEQ ID NO: 33043
  Cyclic GFR-binding peptide
  MOD_RES (2), (4), (36), (37): Xaa is C or S

SEQ ID NO: 85385 - protein, 23 aa, Artificial Sequence
  Cyclic GFR-binding peptide
DRHKRLVVNNAADYYLISTASLR

SEQ ID NO: 85386 - protein, 31 aa, Artificial Sequence
  Cyclic GFR-binding peptide
  MOD_RES (27), (28): Xaa is C or S
DEYKFKVVNNASDLYLISIPELRTPVXXTPP

SEQ ID NO: 85387 - protein, 27 aa, Artificial Sequence
  Cyclic GFR-binding peptide
VIMEYKFKLLVRGNDLYLMSIPETKVP

SEQ ID NO: 85388 - protein, 31 aa, Artificial Sequence
  Cyclic GFR-binding peptide
  MOD_RES (2), (2): Xaa is C or S
AXSEVTMNRHKRLVVNKNEDYYLISTASMKE

SEQ ID NO: 85389 - protein, 25 aa, Artificial Sequence
  Cyclic GFR-binding peptide
TMNYHYKLVVNKNEDKYLISIPSMK

SEQ ID NO: 85390 - protein, 36 aa, Artificial Sequence; identical to SEQ ID NO: 33045
  Cyclic GFR-binding peptide
  MOD_RES (31), (32): Xaa is C or S

SEQ ID NO: 85391 - protein, 27 aa, Artificial Sequence
  Cyclic GFR-binding peptide
VMGEYKFKIIQQKDNLYLMSIPEMKTP

SEQ ID NO: 85392 - protein, 30 aa, Artificial Sequence
  Cyclic GFR-binding peptide
RDVVMGEYKFKIIQQKDNLYLMSIPEMKTP

SEQ ID NO: 85393 - protein, 33 aa, Artificial Sequence
  Cyclic GFR-binding peptide
  MOD_RES (29), (30): Xaa is C or S
VMGYHYKLIIQQKDNKYLMSIPSMKTPTXXPGA

SEQ ID NO: 85394 - protein, 29 aa, Artificial Sequence
  Cyclic GFR-binding peptide
SEVVMDEYKFKVVNNASDLYLISIPELRT

SEQ ID NO: 85395 - protein, 30 aa, Artificial Sequence
  Cyclic GFR-binding peptide
  MOD_RES (2), (4): Xaa is C or S
RXAXSEVTMNYHYKLVVNKNEDKYLISIPS

SEQ ID NO: 85396 - protein, 21 aa, Artificial Sequence
  Cyclic GFR-binding peptide
MEYKFKLLVRGNDLYLMSIPE

SEQ ID NO: 85397 - protein, 36 aa, Artificial Sequence
  Cyclic GFR-binding peptide
  MOD_RES (30), (31): Xaa is C or S
VVMGYHYKLIIQQKDNKYLMSIPSMKTPTXXPGASG

SEQ ID NO: 85398 - protein, 34 aa, Artificial Sequence; identical to SEQ ID NO: 33053
  Cyclic GFR-binding peptide
  MOD_RES (32), (33): Xaa is C or S

SEQ ID NO: 85399 - protein, 31 aa, Artificial Sequence
  Cyclic GFR-binding peptide
  MOD_RES (2), (4): Xaa is C or S
RXGXESVAMGRHKRLYTVVGKDYYLISTASL

SEQ ID NO: 85400 - protein, 32 aa, Artificial Sequence
  Cyclic GFR-binding peptide
  MOD_RES (1), (3): Xaa is C or S
XGXEEVIMYHYKLLLVRGNDKYLMSIPSTKVP

SEQ ID NO: 85401 - protein, 31 aa, Artificial Sequence; identical to SEQ ID NO: 33057
  Cyclic GFR-binding peptide

SEQ ID NO: 85402 - protein, 29 aa, Artificial Sequence
  Cyclic GFR-binding peptide
  MOD_RES (1), (1): Xaa is C or S
XSEVTMNYHYKLVVNKNEDKYLISIPSMK

SEQ ID NO: 85403 - protein, 33 aa, Artificial Sequence
  Cyclic GFR-binding peptide
  MOD_RES (1), (3): Xaa is C or S
XAXSEVTMNPIKGYVVNKNEDFYLINIPSMKEP

SEQ ID NO: 85404 - protein, 28 aa, Artificial Sequence
  Cyclic GFR-binding peptide
  MOD_RES (1), (3): Xaa is C or S
XGXEEVIMYHYKLLLVRGNDKYLMSIPS

SEQ ID NO: 85405 - protein, 29 aa, Artificial Sequence
  Cyclic GFR-binding peptide
DVVMGRHKRLIIQQKDNYYLMSTASMKTP

SEQ ID NO: 85406 - protein, 34 aa, Artificial Sequence
  Cyclic GFR-binding peptide
  MOD_RES (28), (29): Xaa is C or S
IMYHYKLLLVRGNDKYLMSIPSTKVPAXXTSPVR

SEQ ID NO: 85407 - protein, 23 aa, Artificial Sequence
  Cyclic GFR-binding peptide
MPIKGYVKPTRGVFYLINIPSLD

SEQ ID NO: 85408 - protein, 22 aa, Artificial Sequence
  Cyclic GFR-binding peptide
DRHKRLVVNNASDYYLISTASL

SEQ ID NO: 85409 - protein, 39 aa, Artificial Sequence; identical to SEQ ID NO: 33062
  Cyclic GFR-binding peptide
  MOD_RES (2), (33), (34): Xaa is C or S

SEQ ID NO: 85410 - protein, 38 aa, Artificial Sequence; identical to SEQ ID NO: 33063
  Cyclic GFR-binding peptide
  MOD_RES (1), (33), (34): Xaa is C or S

SEQ ID NO: 85411 - protein, 36 aa, Artificial Sequence
  Cyclic GFR-binding peptide
  MOD_RES (30), (31): Xaa is C or S
KVVMPIKGYVKPTRGVFYLINIPSLDQPVXXPSASA

SEQ ID NO: 85412 - protein, 31 aa, Artificial Sequence
  Cyclic GFR-binding peptide
  MOD_RES (2), (4): Xaa is C or S
RXGXSEVVMDEYKFKVVNNASDLYLISIPEL

SEQ ID NO: 85413 - protein, 30 aa, Artificial Sequence; identical to SEQ ID NO: 1930
  Cyclic GFR-binding peptide

SEQ ID NO: 85414 - protein, 38 aa, Artificial Sequence; identical to SEQ ID NO: 33064
  Cyclic GFR-binding peptide
  MOD_RES (2), (4), (36), (37): Xaa is C or S

SEQ ID NO: 85415 - protein, 32 aa, Artificial Sequence
  Cyclic GFR-binding peptide
  MOD_RES (26), (27): Xaa is C or S
YHYKLIIQQKDNKYLMSIPSMKTPTXXPGASG

SEQ ID NO: 85416 - protein, 31 aa, Artificial Sequence
  Cyclic GFR-binding peptide
  MOD_RES (1), (3): Xaa is C or S
XGXRDVVMGYHYKLIIQQKDNKYLMSIPSMK

SEQ ID NO: 85417 - protein, 20 aa, Artificial Sequence
  Cyclic GFR-binding peptide
EYKFKIIQQKDNLYLMSIPE

SEQ ID NO: 85418 - protein, 38 aa, Artificial Sequence; identical to SEQ ID NO: 33069
  Cyclic GFR-binding peptide
  MOD_RES (2), (34), (35): Xaa is C or S

SEQ ID NO: 85419 - protein, 34 aa, Artificial Sequence
  Cyclic GFR-binding peptide
  MOD_RES (30), (31): Xaa is C or S
VVMGRHKRLIIQQKDNYYLMSTASMKTPTXXPGA

SEQ ID NO: 85420 - protein, 29 aa, Artificial Sequence
  Cyclic GFR-binding peptide
EVTMNEYKFKVVNKNEDLYLISIPEMKEP

SEQ ID NO: 85421 - protein, 35 aa, Artificial Sequence; identical to SEQ ID NO: 33070
  Cyclic GFR-binding peptide
  MOD_RES (2), (34), (35): Xaa is C or S

SEQ ID NO: 85422 - protein, 28 aa, Artificial Sequence
  Cyclic GFR-binding peptide
VIMYHYKLLLVRGNDKYLMSIPSTKVPA

SEQ ID NO: 85423 - protein, 32 aa, Artificial Sequence; identical to SEQ ID NO: 33071
  Cyclic GFR-binding peptide
  MOD_RES (32), (32): Xaa is C or S

SEQ ID NO: 85424 - protein, 27 aa, Artificial Sequence
  Cyclic GFR-binding peptide
SEVVMDYHYKLVVNNASDKYLISIPSL

SEQ ID NO: 85425 - protein, 30 aa, Artificial Sequence
  Cyclic GFR-binding peptide
  MOD_RES (27), (28): Xaa is C or S
NEYKFKVVNKNEDLYLISIPEMKEPVXXPE

SEQ ID NO: 85426 - protein, 32 aa, Artificial Sequence
  Cyclic GFR-binding peptide
  MOD_RES (2), (4): Xaa is C or S
SXGXRDVVMGEYKFKIIQQKDNLYLMSIPEMK

SEQ ID NO: 85427 - protein, 34 aa, Artificial Sequence; identical to SEQ ID NO: 33074
  Cyclic GFR-binding peptide
  MOD_RES (1), (32), (33): Xaa is C or S

SEQ ID NO: 85428 - protein, 38 aa, Artificial Sequence; identical to SEQ ID NO: 33075
  Cyclic GFR-binding peptide
  MOD_RES (32), (33): Xaa is C or S

SEQ ID NO: 85429 - protein, 21 aa, Artificial Sequence
  Cyclic GFR-binding peptide
MPIKGYVKPTRGVFYLINIPS

SEQ ID NO: 85430 - protein, 33 aa, Artificial Sequence; identical to SEQ ID NO: 33076
  Cyclic GFR-binding peptide
  MOD_RES (1), (33): Xaa is C or S

SEQ ID NO: 85431 - protein, 24 aa, Artificial Sequence
  Cyclic GFR-binding peptide
YHYKLVVNNASDKYLISIPSLRTP

SEQ ID NO: 85432 - protein, 40 aa, Artificial Sequence; identical to SEQ ID NO: 33078
  Cyclic GFR-binding peptide
  MOD_RES (2), (34), (35): Xaa is C or S

SEQ ID NO: 85433 - protein, 31 aa, Artificial Sequence; identical to SEQ ID NO: 33080
  Cyclic GFR-binding peptide

SEQ ID NO: 85434 - protein, 36 aa, Artificial Sequence; identical to SEQ ID NO: 33079
  Cyclic GFR-binding peptide
  MOD_RES (32), (33): Xaa is C or S

SEQ ID NO: 85435 - protein, 26 aa, Artificial Sequence
  Cyclic GFR-binding peptide
RDVVMGRHKRLIIQQKDNYYLMSTAS

SEQ ID NO: 85436 - protein, 25 aa, Artificial Sequence
  Cyclic GFR-binding peptide
TMNRHKRLVVNKNEDYYLISTASMK

SEQ ID NO: 85437 - protein, 31 aa, Artificial Sequence
  Cyclic GFR-binding peptide
  MOD_RES (2), (4): Xaa is C or S
RXAXSEVTMNPIKGYVVNKNEDFYLINIPSM

SEQ ID NO: 85438 - protein, 39 aa, Artificial Sequence; identical to SEQ ID NO: 33081
  Cyclic GFR-binding peptide
  MOD_RES (1), (33), (34): Xaa is C or S

SEQ ID NO: 85439 - protein, 30 aa, Artificial Sequence
  Cyclic GFR-binding peptide
  MOD_RES (1), (3): Xaa is C or S
XKXSRVIMPIKGYVKPKRGVFYLINIPSLA

SEQ ID NO: 85440 - protein, 36 aa, Artificial Sequence; identical to SEQ ID NO: 33082
  Cyclic GFR-binding peptide
  MOD_RES (2), (4), (36): Xaa is C or S

SEQ ID NO: 85441 - protein, 26 aa, Artificial Sequence
  Cyclic GFR-binding peptide
DVVMGEYKFKIIQQKDNLYLMSIPEM

SEQ ID NO: 85442 - protein, 39 aa, Artificial Sequence; identical to SEQ ID NO: 33083
  Cyclic GFR-binding peptide
  MOD_RES (1), (3), (35), (36): Xaa is C or S

SEQ ID NO: 85443 - protein, 27 aa, Artificial Sequence
  Cyclic GFR-binding peptide
  MOD_RES (1), (1): Xaa is C or S
XRDVVMGEYKFKIIQQKDNLYLMSIPE

SEQ ID NO: 85444 - protein, 31 aa, Artificial Sequence
  Cyclic GFR-binding peptide
  MOD_RES (1), (3): Xaa is C or S
XGXSEVVMDYHYKLVVNNASDKYLISIPSLR

SEQ ID NO: 85445 - protein, 24 aa, Artificial Sequence
  Cyclic GFR-binding peptide
VVMGEYKFKIIQQKDNLYLMSIPE

SEQ ID NO: 85446 - protein, 40 aa, Artificial Sequence; identical to SEQ ID NO: 33086
  Cyclic GFR-binding peptide
  MOD_RES (2), (4), (35), (36): Xaa is C or S

SEQ ID NO: 85447 - protein, 23 aa, Artificial Sequence
  Cyclic GFR-binding peptide
NEYKFKVVNKNEDLYLISIPEMK

SEQ ID NO: 85448 - protein, 28 aa, Artificial Sequence
  Cyclic GFR-binding peptide
SEVVMDYHYKLVVNNASDKYLISIPSLR

SEQ ID NO: 85449 - protein, 37 aa, Artificial Sequence; identical to SEQ ID NO: 33088
  Cyclic GFR-binding peptide
  MOD_RES (1), (3), (34), (35): Xaa is C or S

SEQ ID NO: 85450 - protein, 36 aa, Artificial Sequence; identical to SEQ ID NO: 33089
  Cyclic GFR-binding peptide
  MOD_RES (31), (32): Xaa is C or S

SEQ ID NO: 85451 - protein, 28 aa, Artificial Sequence
  Cyclic GFR-binding peptide
  MOD_RES (1), (3): Xaa is C or S
XKXSRVIMPIKGYVKPKRGVFYLINIPS

SEQ ID NO: 85452 - protein, 24 aa, Artificial Sequence
  Cyclic GFR-binding peptide
VVMDRHKRLVVNNAADYYLISTAS

SEQ ID NO: 85453 - protein, 23 aa, Artificial Sequence
  Cyclic GFR-binding peptide
MGRHKRLIIQQKDNYYLMSTASM

SEQ ID NO: 85454 - protein, 36 aa, Artificial Sequence; identical to SEQ ID NO: 33092
  Cyclic GFR-binding peptide
  MOD_RES (32), (33): Xaa is C or S

SEQ ID NO: 85455 - protein, 26 aa, Artificial Sequence
  Cyclic GFR-binding peptide
VTMNRHKRLVVNKNEDYYLISTASMK

SEQ ID NO: 85456 - protein, 34 aa, Artificial Sequence; identical to SEQ ID NO: 33094
  Cyclic GFR-binding peptide
  MOD_RES (1), (3): Xaa is C or S

SEQ ID NO: 85457 - protein, 27 aa, Artificial Sequence
  Cyclic GFR-binding peptide
TMNPIKGYVVNKNEDFYLINIPSMKEP

SEQ ID NO: 85458 - protein, 27 aa, Artificial Sequence
  Cyclic GFR-binding peptide
IMPIKGYIKPTKGIFYLINIPSLDQSV

SEQ ID NO: 85459 - protein, 29 aa, Artificial Sequence
  Cyclic GFR-binding peptide
  MOD_RES (29), (29): Xaa is C or S
VMDRHKRLVVNNASDYYLISTASLRTPVX

SEQ ID NO: 85460 - protein, 23 aa, Artificial Sequence
  Cyclic GFR-binding peptide
MRHKRLLLVRGNDYYLMSTASTK

SEQ ID NO: 85461 - protein, 36 aa, Artificial Sequence; identical to SEQ ID NO: 33096
  Cyclic GFR-binding peptide
  MOD_RES (1), (32), (33): Xaa is C or S

SEQ ID NO: 85462 - protein, 30 aa, Artificial Sequence
  Cyclic GFR-binding peptide
  MOD_RES (1), (3): Xaa is C or S
XGXEEVIMRHKRLLLVRGNDYYLMSTASTK

SEQ ID NO: 85463 - protein, 28 aa, Artificial Sequence
  Cyclic GFR-binding peptide
SEVTMNYHYKLVVNKNEDKYLISIPSMK

SEQ ID NO: 85464 - protein, 36 aa, Artificial Sequence; identical to SEQ ID NO: 33098
  Cyclic GFR-binding peptide
  MOD_RES (1), (3), (35), (36): Xaa is C or S

SEQ ID NO: 85465 - protein, 22 aa, Artificial Sequence
  Cyclic GFR-binding peptide
EYKFKIIQQKDNLYLMSIPEMK

SEQ ID NO: 85466 - protein, 33 aa, Artificial Sequence
  Cyclic GFR-binding peptide
  MOD_RES (30), (31): Xaa is C or S
RVIMPIKGYVKPKRGVFYLINIPSLAQPVXXPA

SEQ ID NO: 85467 - protein, 37 aa, Artificial Sequence; identical to SEQ ID NO: 33099
  Cyclic GFR-binding peptide
  MOD_RES (31), (32): Xaa is C or S

SEQ ID NO: 85468 - protein, 34 aa, Artificial Sequence; identical to SEQ ID NO: 33100
  Cyclic GFR-binding peptide
  MOD_RES (1), (3): Xaa is C or S

SEQ ID NO: 85469 - protein, 27 aa, Artificial Sequence
  Cyclic GFR-binding peptide
SRVIMPIKGYVKPKRGVFYLINIPSLA

SEQ ID NO: 85470 - protein, 30 aa, Artificial Sequence; identical to SEQ ID NO: 33102
  Cyclic GFR-binding peptide

SEQ ID NO: 85471 - protein, 32 aa, Artificial Sequence
  Cyclic GFR-binding peptide
  MOD_RES (2), (4): Xaa is C or S
LXGXEEVIMRHKRLLLVRGNDYYLMSTASTKV

SEQ ID NO: 85472 - protein, 29 aa, Artificial Sequence
  Cyclic GFR-binding peptide
AAAAAAAAAYHYKLVVNNASDKYLISIPS

SEQ ID NO: 85473 - protein, 30 aa, Artificial Sequence
  Cyclic GFR-binding peptide
  MOD_RES (1), (3): Xaa is C or S
XGXSEVVMDYHYKLVVNNASDKYLISIPSL

SEQ ID NO: 85474 - protein, 31 aa, Artificial Sequence
  Cyclic GFR-binding peptide
  MOD_RES (1), (1): Xaa is C or S
XSEVVMDYHYKLVVNNASDKYLISIPSLRTP

SEQ ID NO: 85475 - protein, 35 aa, Artificial Sequence; identical to SEQ ID NO: 33104
  Cyclic GFR-binding peptide
  MOD_RES (2), (33), (34): Xaa is C or S

SEQ ID NO: 85476 - protein, 26 aa, Artificial Sequence
  Cyclic GFR-binding peptide
  MOD_RES (1), (1): Xaa is C or S
XSKVIMPIKGYIKPTKGIFYLINIPS

SEQ ID NO: 85477 - protein, 31 aa, Artificial Sequence; identical to SEQ ID NO: 33106
  Cyclic GFR-binding peptide
  MOD_RES (31), (31): Xaa is C or S

SEQ ID NO: 85478 - protein, 33 aa, Artificial Sequence; identical to SEQ ID NO: 33107
  Cyclic GFR-binding peptide
  MOD_RES (2), (2): Xaa is C or S

SEQ ID NO: 85479 - protein, 34 aa, Artificial Sequence; identical to SEQ ID NO: 33108
  Cyclic GFR-binding peptide
  MOD_RES (1), (33), (34): Xaa is C or S

SEQ ID NO: 85480 - protein, 38 aa, Artificial Sequence; identical to SEQ ID NO: 33110
  Cyclic GFR-binding peptide
  MOD_RES (1), (33), (34): Xaa is C or S

SEQ ID NO: 85481 - protein, 35 aa, Artificial Sequence; identical to SEQ ID NO: 33111
  Cyclic GFR-binding peptide
  MOD_RES (2), (4): Xaa is C or S

SEQ ID NO: 85482 - protein, 28 aa, Artificial Sequence
  Cyclic GFR-binding peptide
  MOD_RES (27), (28): Xaa is C or S
DRHKRLVVNNASDYYLISTASLRTPVXX

SEQ ID NO: 85483 - protein, 31 aa, Artificial Sequence
  Cyclic GFR-binding peptide
  MOD_RES (30), (31): Xaa is C or S
VVMGYHYKLIIQQKDNKYLMSIPSMKTPTXX

SEQ ID NO: 85484 - protein, 29 aa, Artificial Sequence
  Cyclic GFR-binding peptide
  MOD_RES (28), (29): Xaa is C or S
MGEYKFKIIQQKDNLYLMSIPEMKTPTXX

SEQ ID NO: 85485 - protein, 41 aa, Artificial Sequence; identical to SEQ ID NO: 33114
  Cyclic GFR-binding peptide
  MOD_RES (2), (4), (36), (37): Xaa is C or S

SEQ ID NO: 85486 - protein, 35 aa, Artificial Sequence; identical to SEQ ID NO: 33115
  Cyclic GFR-binding peptide
  MOD_RES (2), (4): Xaa is C or S

SEQ ID NO: 85487 - protein, 25 aa, Artificial Sequence
  Cyclic GFR-binding peptide
DVVMGEYKFKIIQQKDNLYLMSIPE

SEQ ID NO: 85488 - protein, 21 aa, Artificial Sequence
  Cyclic GFR-binding peptide
NRYKKLVVNKNEDFYLISIAN

SEQ ID NO: 85489 - protein, 39 aa, Artificial Sequence; identical to SEQ ID NO: 33117
  Cyclic GFR-binding peptide
  MOD_RES (1), (3), (34), (35): Xaa is C or S

SEQ ID NO: 85490 - protein, 31 aa, Artificial Sequence; identical to SEQ ID NO: 33118
  Cyclic GFR-binding peptide
  MOD_RES (31), (31): Xaa is C or S

SEQ ID NO: 85491 - protein, 38 aa, Artificial Sequence; identical to SEQ ID NO: 33120
  Cyclic GFR-binding peptide
  MOD_RES (1), (3), (35), (36): Xaa is C or S

SEQ ID NO: 85492 - protein, 30 aa, Artificial Sequence
  Cyclic GFR-binding peptide
  MOD_RES (28), (29): Xaa is C or S
VMPIKGYVKPTRGVFYLINIPSLDQPVXXP

SEQ ID NO: 85493 - protein, 26 aa, Artificial Sequence
  Cyclic GFR-binding peptide
RVIMPIKGYVKPKRGVFYLINIPSLA

SEQ ID NO: 85494 - protein, 31 aa, Artificial Sequence
  Cyclic GFR-binding peptide
  MOD_RES (27), (28): Xaa is C or S
MEYKFKLLVRGNDLYLMSIPETKVPAXXTSP

SEQ ID NO: 85495 - protein, 28 aa, Artificial Sequence
  Cyclic GFR-binding peptide
  MOD_RES (28), (28): Xaa is C or S
MGEYKFKIIQQKDNLYLMSIPEMKTPTX

SEQ ID NO: 85496 - protein, 29 aa, Artificial Sequence
  Cyclic GFR-binding peptide
  MOD_RES (2), (4): Xaa is C or S
SXKXSRVIMPIKGYVKPKRGVFYLINIPS

SEQ ID NO: 85497 - protein, 35 aa, Artificial Sequence; identical to SEQ ID NO: 33122
  Cyclic GFR-binding peptide
  MOD_RES (1), (33), (34): Xaa is C or S

SEQ ID NO: 85498 - protein, 37 aa, Artificial Sequence; identical to SEQ ID NO: 33125
  Cyclic GFR-binding peptide
  MOD_RES (2), (4), (35), (36): Xaa is C or S

SEQ ID NO: 85499 - protein, 29 aa, Artificial Sequence
  Cyclic GFR-binding peptide
  MOD_RES (2), (2): Xaa is C or S
GXSEVVMDEYKFKVVNNASDLYLISIPEL

SEQ ID NO: 85500 - protein, 27 aa, Artificial Sequence
  Cyclic GFR-binding peptide
  MOD_RES (1), (1): Xaa is C or S
XSEVTMNEYKFKVVNKNEDLYLISIPE

SEQ ID NO: 85501 - protein, 34 aa, Artificial Sequence; identical to SEQ ID NO: 33126
  Cyclic GFR-binding peptide
  MOD_RES (2), (4): Xaa is C or S

SEQ ID NO: 85502 - protein, 30 aa, Artificial Sequence
  Cyclic GFR-binding peptide
  MOD_RES (28), (29): Xaa is C or S
IMPIKGYIKPTKGIFYLINIPSLDQSVXXP

SEQ ID NO: 85503 - protein, 24 aa, Artificial Sequence
  Cyclic GFR-binding peptide
PIKGYIKPTKGIFYLINIPSLDQS

SEQ ID NO: 85504 - protein, 39 aa, Artificial Sequence; identical to SEQ ID NO: 33127
  Cyclic GFR-binding peptide
  MOD_RES (1), (3), (35), (36): Xaa is C or S

SEQ ID NO: 85505 - protein, 32 aa, Artificial Sequence
  Cyclic GFR-binding peptide
  MOD_RES (29), (30): Xaa is C or S
VMDYHYKLVVNNASDKYLISIPSLRTPVXXTP

SEQ ID NO: 85506 - protein, 27 aa, Artificial Sequence
  Cyclic GFR-binding peptide
VVMGRHKRLIIQQKDNYYLMSTASMKT

SEQ ID NO: 85507 - protein, 38 aa, Artificial Sequence; identical to SEQ ID NO: 33128
  Cyclic GFR-binding peptide
  MOD_RES (1), (3), (35), (36): Xaa is C or S

SEQ ID NO: 85508 - protein, 31 aa, Artificial Sequence
  Cyclic GFR-binding peptide
  MOD_RES (29), (30): Xaa is C or S
TMNYHYKLVVNKNEDKYLISIPSMKEPVXXP

SEQ ID NO: 85509 - protein, 35 aa, Artificial Sequence
  Cyclic GFR-binding peptide
  MOD_RES (30), (31): Xaa is C or S
EVIMEYKFKLLVRGNDLYLMSIPETKVPAXXTSPV

SEQ ID NO: 85510 - protein, 26 aa, Artificial Sequence
  Cyclic GFR-binding peptide
EVTMNRYKKLVVNKNEDFYLISIANM

SEQ ID NO: 85511 - protein, 37 aa, Artificial Sequence; identical to SEQ ID NO: 33130
  Cyclic GFR-binding peptide
  MOD_RES (31), (32): Xaa is C or S

SEQ ID NO: 85512 - protein, 31 aa, Artificial Sequence
  Cyclic GFR-binding peptide
  MOD_RES (28), (29): Xaa is C or S
MGRHKRLIIQQKDNYYLMSTASMKTPTXXPG

SEQ ID NO: 85513 - protein, 32 aa, Artificial Sequence
  Cyclic GFR-binding peptide
  MOD_RES (1), (3): Xaa is C or S
XGXAEVVMDRHKRLVVNNAADYYLISTASLRA

SEQ ID NO: 85514 - protein, 25 aa, Artificial Sequence
  Cyclic GFR-binding peptide
TMNRYKKLVVNKNEDFYLISIANMK

SEQ ID NO: 85515 - protein, 31 aa, Artificial Sequence
  Cyclic GFR-binding peptide
  MOD_RES (1), (1): Xaa is C or S
XRDVVMGRHKRLIIQQKDNYYLMSTASMKTP

SEQ ID NO: 85516 - protein, 33 aa, Artificial Sequence; identical to SEQ ID NO: 33131
  Cyclic GFR-binding peptide
  MOD_RES (1), (33): Xaa is C or S

SEQ ID NO: 85517 - protein, 29 aa, Artificial Sequence
  Cyclic GFR-binding peptide
  MOD_RES (1), (1): Xaa is C or S
XRDVVMGYHYKLIIQQKDNKYLMSIPSMK

SEQ ID NO: 85518 - protein, 20 aa, Artificial Sequence
  Cyclic GFR-binding peptide
YHYKLLLVRGNDKYLMSIPS

SEQ ID NO: 85519 - protein, 32 aa, Artificial Sequence; identical to SEQ ID NO: 33132
  Cyclic GFR-binding peptide
  MOD_RES (1), (1): Xaa is C or S

SEQ ID NO: 85520 - protein, 35 aa, Artificial Sequence; identical to SEQ ID NO: 33133
  Cyclic GFR-binding peptide
  MOD_RES (31), (32): Xaa is C or S

SEQ ID NO: 85521 - protein, 28 aa, Artificial Sequence
  Cyclic GFR-binding peptide
TMNEYKFKVVNKNEDLYLISIPEMKEPV

SEQ ID NO: 85522 - protein, 29 aa, Artificial Sequence
  Cyclic GFR-binding peptide
  MOD_RES (1), (1): Xaa is C or S
XAEVVMDRHKRLVVNNAADYYLISTASLR

SEQ ID NO: 85523 - protein, 41 aa, Artificial Sequence; identical to SEQ ID NO: 33137
  Cyclic GFR-binding peptide
  MOD_RES (2), (4), (36), (37): Xaa is C or S

SEQ ID NO: 85524 - protein, 30 aa, Artificial Sequence
  Cyclic GFR-binding peptide
  MOD_RES (1), (3): Xaa is C or S
XGXSEVVMDEYKFKVVNNASDLYLISIPEL

SEQ ID NO: 85525 - protein, 31 aa, Artificial Sequence
  Cyclic GFR-binding peptide
  MOD_RES (1), (3): Xaa is C or S
XKXSKVIMPIKGYIKPTKGIFYLINIPSLDQ

SEQ ID NO: 85526 - protein, 32 aa, Artificial Sequence
  Cyclic GFR-binding peptide
  MOD_RES (29), (30): Xaa is C or S
VVMPIKGYVKPTRGVFYLINIPSLDQPVXXPS

SEQ ID NO: 85527 - protein, 34 aa, Artificial Sequence
  Cyclic GFR-binding peptide
  MOD_RES (2), (4): Xaa is C or S
RXAXSEVTMNRHKRLVVNKNEDYYLISTASMKEP

SEQ ID NO: 85528 - protein, 38 aa, Artificial Sequence; identical to SEQ ID NO: 33139
  Cyclic GFR-binding peptide
  MOD_RES (32), (33): Xaa is C or S

SEQ ID NO: 85529 - protein, 27 aa, Artificial Sequence
  Cyclic GFR-binding peptide
VMPIKGYVKPTRGVFYLINIPSLDQPV

SEQ ID NO: 85530 - protein, 22 aa, Artificial Sequence
  Cyclic GFR-binding peptide
NPIKGYVVNKNEDFYLINIPSM

SEQ ID NO: 85531 - protein, 29 aa, Artificial Sequence
  Cyclic GFR-binding peptide
  MOD_RES (29), (29): Xaa is C or S
VMGEYKFKIIQQKDNLYLMSIPEMKTPTX

SEQ ID NO: 85532 - protein, 26 aa, Artificial Sequence
  Cyclic GFR-binding peptide
  MOD_RES (26), (26): Xaa is C or S
PIKGYIKPTKGIFYLINIPSLDQSVX

SEQ ID NO: 85533 - protein, 24 aa, Artificial Sequence
  Cyclic GFR-binding peptide
TMNYHYKLVVNKNEDKYLISIPSM

SEQ ID NO: 85534 - protein, 25 aa, Artificial Sequence
  Cyclic GFR-binding peptide
SVAMGRHKRLYTVVGKDYYLISTAS

SEQ ID NO: 85535 - protein, 28 aa, Artificial Sequence
  Cyclic GFR-binding peptide
  MOD_RES (26), (27): Xaa is C or S
RHKRLLLVRGNDYYLMSTASTKVPAXXT

SEQ ID NO: 85536 - protein, 32 aa, Artificial Sequence
  Cyclic GFR-binding peptide
  MOD_RES (29), (30): Xaa is C or S
AMGRHKRLYTVVGKDYYLISTASLKTPVXXAK

SEQ ID NO: 85537 - protein, 39 aa, Artificial Sequence; identical to SEQ ID NO: 33146
  Cyclic GFR-binding peptide
  MOD_RES (1), (33), (34): Xaa is C or S

SEQ ID NO: 85538 - protein, 22 aa, Artificial Sequence
  Cyclic GFR-binding peptide
MDYHYKLVVNNASDKYLISIPS

SEQ ID NO: 85539 - protein, 35 aa, Artificial Sequence
  Cyclic GFR-binding peptide
  MOD_RES (29), (30): Xaa is C or S
VMDEYKFKVVNNASDLYLISIPELRTPVXXTPPTS

SEQ ID NO: 85540 - protein, 39 aa, Artificial Sequence; identical to SEQ ID NO: 33148
  Cyclic GFR-binding peptide
  MOD_RES (2), (4), (35), (36): Xaa is C or S

SEQ ID NO: 85541 - protein, 24 aa, Artificial Sequence
  Cyclic GFR-binding peptide
VIMYHYKLLLVRGNDKYLMSIPST

SEQ ID NO: 85542 - protein, 40 aa, Artificial Sequence; identical to SEQ ID NO: 33149
  Cyclic GFR-binding peptide
  MOD_RES (2), (4), (36), (37): Xaa is C or S

SEQ ID NO: 85543 - protein, 26 aa, Artificial Sequence
  Cyclic GFR-binding peptide
VMDEYKFKVVNNASDLYLISIPELRT

SEQ ID NO: 85544 - protein, 31 aa, Artificial Sequence
  Cyclic GFR-binding peptide
  MOD_RES (27), (28): Xaa is C or S
GYHYKLIIQQKDNKYLMSIPSMKTPTXXPGA

SEQ ID NO: 85545 - protein, 32 aa, Artificial Sequence; identical to SEQ ID NO: 33150
  Cyclic GFR-binding peptide
  MOD_RES (1), (1): Xaa is C or S

SEQ ID NO: 85546 - protein, 25 aa, Artificial Sequence
  Cyclic GFR-binding peptide
EVIMYHYKLLLVRGNDKYLMSIPST

SEQ ID NO: 85547 - protein, 29 aa, Artificial Sequence
  Cyclic GFR-binding peptide
  MOD_RES (28), (29): Xaa is C or S
IMRHKRLLLVRGNDYYLMSTASTKVPAXX

SEQ ID NO: 85548 - protein, 24 aa, Artificial Sequence
  Cyclic GFR-binding peptide
VMGRHKRLIIQQKDNYYLMSTASM

SEQ ID NO: 85549 - protein, 20 aa, Artificial Sequence
  Cyclic GFR-binding peptide
EYKFKVVNNASDLYLISIPE

SEQ ID NO: 85550 - protein, 34 aa, Artificial Sequence; identical to SEQ ID NO: 33151
  Cyclic GFR-binding peptide
  MOD_RES (1), (3), (34): Xaa is C or S

SEQ ID NO: 85551 - protein, 25 aa, Artificial Sequence
  Cyclic GFR-binding peptide
VTMNEYKFKVVNKNEDLYLISIPEM

SEQ ID NO: 85552 - protein, 39 aa, Artificial Sequence; identical to SEQ ID NO: 33152
  Cyclic GFR-binding peptide
  MOD_RES (2), (33), (34): Xaa is C or S

SEQ ID NO: 85553 - protein, 33 aa, Artificial Sequence
  Cyclic GFR-binding peptide
  MOD_RES (30), (31): Xaa is C or S
VVMGEYKFKIIQQKDNLYLMSIPEMKTPTXXPG

SEQ ID NO: 85554 - protein, 31 aa, Artificial Sequence
  Cyclic GFR-binding peptide
  MOD_RES (30), (31): Xaa is C or S
VVMDRHKRLVVNNAADYYLISTASLRAPVXX

SEQ ID NO: 85555 - protein, 34 aa, Artificial Sequence
  Cyclic GFR-binding peptide
  MOD_RES (28), (29): Xaa is C or S
MNEYKFKVVNKNEDLYLISIPEMKEPVXXPEPIG

SEQ ID NO: 85556 - protein, 37 aa, Artificial Sequence; identical to SEQ ID NO: 33153
  Cyclic GFR-binding peptide
  MOD_RES (2), (4), (36), (37): Xaa is C or S

SEQ ID NO: 85557 - protein, 38 aa, Artificial Sequence; identical to SEQ ID NO: 33155
  Cyclic GFR-binding peptide
  MOD_RES (2), (4), (36), (37): Xaa is C or S

SEQ ID NO: 85558 - protein, 29 aa, Artificial Sequence
  Cyclic GFR-binding peptide
  MOD_RES (1), (1): Xaa is C or S
XEEVIMRHKRLLLVRGNDYYLMSTASTKV

SEQ ID NO: 85559 - protein, 33 aa, Artificial Sequence; identical to SEQ ID NO: 33157
  Cyclic GFR-binding peptide
  MOD_RES (2), (2): Xaa is C or S

SEQ ID NO: 85560 - protein, 26 aa, Artificial Sequence
  Cyclic GFR-binding peptide
VMDRHKRLVVNNAADYYLISTASLRA

SEQ ID NO: 85561 - protein, 37 aa, Artificial Sequence; identical to SEQ ID NO: 33158
  Cyclic GFR-binding peptide
  MOD_RES (1), (32), (33): Xaa is C or S

SEQ ID NO: 85562 - protein, 25 aa, Artificial Sequence
  Cyclic GFR-binding peptide
PIKGYVKPTRGVFYLINIPSLDQPV

SEQ ID NO: 85563 - protein, 36 aa, Artificial Sequence
  Cyclic GFR-binding peptide
  MOD_RES (30), (31): Xaa is C or S
RVIMPIKGYVKPKRGVFYLINIPSLAQPVXXPAASA

SEQ ID NO: 85564 - protein, 33 aa, Artificial Sequence
  Cyclic GFR-binding peptide
  MOD_RES (27), (28): Xaa is C or S
NYHYKLVVNKNEDKYLISIPSMKEPVXXPEPIG

SEQ ID NO: 85565 - protein, 26 aa, Artificial Sequence
  Cyclic GFR-binding peptide
EEVIMYHYKLLLVRGNDKYLMSIPST

SEQ ID NO: 85566 - protein, 25 aa, Artificial Sequence
  Cyclic GFR-binding peptide
RHKRLLLVRGNDYYLMSTASTKVPA

SEQ ID NO: 85567 - protein, 28 aa, Artificial Sequence
  Cyclic GFR-binding peptide
  MOD_RES (2), (2): Xaa is C or S
GXESVAMGRHKRLYTVVGKDYYLISTAS

SEQ ID NO: 85568 - protein, 30 aa, Artificial Sequence
  Cyclic GFR-binding peptide
  MOD_RES (27), (28): Xaa is C or S
DYHYKLVVNNASDKYLISIPSLRTPVXXTP

SEQ ID NO: 85569 - protein, 32 aa, Artificial Sequence
  Cyclic GFR-binding peptide
  MOD_RES (26), (27): Xaa is C or S
PIKGYVKPKRGVFYLINIPSLAQPVXXPAASA

SEQ ID NO: 85570 - protein, 32 aa, Artificial Sequence
  Cyclic GFR-binding peptide
  MOD_RES (26), (27): Xaa is C or S
RHKRLIIQQKDNYYLMSTASMKTPTXXPGASG

SEQ ID NO: 85571 - protein, 32 aa, Artificial Sequence; identical to SEQ ID NO: 33163
  Cyclic GFR-binding peptide
  MOD_RES (31), (32): Xaa is C or S

SEQ ID NO: 85572 - protein, 31 aa, Artificial Sequence; identical to SEQ ID NO: 33164
  Cyclic GFR-binding peptide
  MOD_RES (31), (31): Xaa is C or S

SEQ ID NO: 85573 - protein, 37 aa, Artificial Sequence; identical to SEQ ID NO: 33165
  Cyclic GFR-binding peptide
  MOD_RES (2), (34), (35): Xaa is C or S

SEQ ID NO: 85574 - protein, 27 aa, Artificial Sequence
  Cyclic GFR-binding peptide
RDVVMGYHYKLIIQQKDNKYLMSIPSM

SEQ ID NO: 85575 - protein, 38 aa, Artificial Sequence; identical to SEQ ID NO: 33170
  Cyclic GFR-binding peptide
  MOD_RES (1), (3), (35), (36): Xaa is C or S

SEQ ID NO: 85576 - protein, 35 aa, Artificial Sequence
  Cyclic GFR-binding peptide
  MOD_RES (29), (30): Xaa is C or S
TMNYHYKLVVNKNEDKYLISIPSMKEPVXXPEPIG

SEQ ID NO: 85577 - protein, 28 aa, Artificial Sequence
  Cyclic GFR-binding peptide
  MOD_RES (2), (2): Xaa is C or S
GXRDVVMGRHKRLIIQQKDNYYLMSTAS

SEQ ID NO: 85578 - protein, 32 aa, Artificial Sequence
  Cyclic GFR-binding peptide
  MOD_RES (30), (31): Xaa is C or S
EVIMRHKRLLLVRGNDYYLMSTASTKVPAXXT

SEQ ID NO: 85579 - protein, 33 aa, Artificial Sequence
  Cyclic GFR-binding peptide
  MOD_RES (2), (4): Xaa is C or S
RXAXSEVTMNPIKGYVVNKNEDFYLINIPSMKE

SEQ ID NO: 85580 - protein, 29 aa, Artificial Sequence
  Cyclic GFR-binding peptide
  MOD_RES (28), (29): Xaa is C or S
MNPIKGYVVNKNEDFYLINIPSMKEPVXX

SEQ ID NO: 85581 - protein, 32 aa, Artificial Sequence; identical to SEQ ID NO: 33175
  Cyclic GFR-binding peptide
  MOD_RES (31), (32): Xaa is C or S

SEQ ID NO: 85582 - protein, 27 aa, Artificial Sequence
  Cyclic GFR-binding peptide
DVVMGEYKFKIIQQKDNLYLMSIPEMK

SEQ ID NO: 85583 - protein, 28 aa, Artificial Sequence
  Cyclic GFR-binding peptide
  MOD_RES (2), (2): Xaa is C or S
KXSRVIMPIKGYVKPKRGVFYLINIPSL

SEQ ID NO: 85584 - protein, 34 aa, Artificial Sequence; identical to SEQ ID NO: 33176
  Cyclic GFR-binding peptide
  MOD_RES (31), (32): Xaa is C or S

SEQ ID NO: 85585 - protein, 32 aa, Artificial Sequence; identical to SEQ ID NO: 33177
  Cyclic GFR-binding peptide
  MOD_RES (1), (1): Xaa is C or S

SEQ ID NO: 85586 - protein, 30 aa, Artificial Sequence
  Cyclic GFR-binding peptide
  MOD_RES (27), (28): Xaa is C or S
DRHKRLVVNNAADYYLISTASLRAPVXXSA

SEQ ID NO: 85587 - protein, 30 aa, Artificial Sequence; identical to SEQ ID NO: 33178
  Cyclic GFR-binding peptide

SEQ ID NO: 85588 - protein, 22 aa, Artificial Sequence
  Cyclic GFR-binding peptide
PIKGYIKPTKGIFYLINIPSLD

SEQ ID NO: 85589 - protein, 35 aa, Artificial Sequence; identical to SEQ ID NO: 33180
  Cyclic GFR-binding peptide
  MOD_RES (32), (33): Xaa is C or S

SEQ ID NO: 85590 - protein, 22 aa, Artificial Sequence
  Cyclic GFR-binding peptide
RHKRLVVNNASDYYLISTASLR

SEQ ID NO: 85591 - protein, 33 aa, Artificial Sequence; identical to SEQ ID NO: 33182
  Cyclic GFR-binding peptide
  MOD_RES (2), (2): Xaa is C or S

SEQ ID NO: 85592 - protein, 34 aa, Artificial Sequence
  Cyclic GFR-binding peptide
  MOD_RES (30), (31): Xaa is C or S
KVIMPIKGYIKPTKGIFYLINIPSLDQSVXXPSA

SEQ ID NO: 85593 - protein, 27 aa, Artificial Sequence
  Cyclic GFR-binding peptide
  MOD_RES (1), (1): Xaa is C or S
XSRVIMPIKGYVKPKRGVFYLINIPSL

SEQ ID NO: 85594 - protein, 33 aa, Artificial Sequence
  Cyclic GFR-binding peptide
  MOD_RES (2), (4): Xaa is C or S
SXKXSRVIMPIKGYVKPKRGVFYLINIPSLAQP

SEQ ID NO: 85595 - protein, 23 aa, Artificial Sequence
  Cyclic GFR-binding peptide
RHKRLVVNKNEDYYLISTASMKE

SEQ ID NO: 85596 - protein, 32 aa, Artificial Sequence
  Cyclic GFR-binding peptide
  MOD_RES (2), (4): Xaa is C or S
SXKXSKVIMPIKGYIKPTKGIFYLINIPSLDQ

SEQ ID NO: 85597 - protein, 28 aa, Artificial Sequence
  Cyclic GFR-binding peptide
  MOD_RES (26), (27): Xaa is C or S
YHYKLLLVRGNDKYLMSIPSTKVPAXXT

SEQ ID NO: 85598 - protein, 41 aa, Artificial Sequence; identical to SEQ ID NO: 33185
  Cyclic GFR-binding peptide
  MOD_RES (2), (4), (36), (37): Xaa is C or S

SEQ ID NO: 85599 - protein, 35 aa, Artificial Sequence; identical to SEQ ID NO: 33186
  Cyclic GFR-binding peptide
  MOD_RES (2), (33), (34): Xaa is C or S

SEQ ID NO: 85600 - protein, 33 aa, Artificial Sequence; identical to SEQ ID NO: 33187
  Cyclic GFR-binding peptide
  MOD_RES (2), (2): Xaa is C or S

SEQ ID NO: 85601 - protein, 28 aa, Artificial Sequence
  Cyclic GFR-binding peptide
  MOD_RES (1), (1): Xaa is C or S
XSEVTMNYHYKLVVNKNEDKYLISIPSM

SEQ ID NO: 85602 - protein, 34 aa, Artificial Sequence
  Cyclic GFR-binding peptide
  MOD_RES (28), (29): Xaa is C or S
MGEYKFKIIQQKDNLYLMSIPEMKTPTXXPGASG

SEQ ID NO: 85603 - protein, 24 aa, Artificial Sequence
  Cyclic GFR-binding peptide
DRHKRLVVNNAADYYLISTASLRA

SEQ ID NO: 85604 - protein, 40 aa, Artificial Sequence; identical to SEQ ID NO: 33191
  Cyclic GFR-binding peptide
  MOD_RES (2), (4), (36), (37): Xaa is C or S

SEQ ID NO: 85605 - protein, 37 aa, Artificial Sequence; identical to SEQ ID NO: 33193
  Cyclic GFR-binding peptide
  MOD_RES (31), (32): Xaa is C or S

SEQ ID NO: 85606 - protein, 34 aa, Artificial Sequence
  Cyclic GFR-binding peptide
  MOD_RES (2), (4): Xaa is C or S
RXGXAEVVMDRHKRLVVNNAADYYLISTASLRAP

SEQ ID NO: 85607 - protein, 30 aa, Artificial Sequence
  Cyclic GFR-binding peptide
  MOD_RES (1), (1): Xaa is C or S
XRDVVMGEYKFKIIQQKDNLYLMSIPEMKT

SEQ ID NO: 85608 - protein, 34 aa, Artificial Sequence
  Cyclic GFR-binding peptide
  MOD_RES (30), (31): Xaa is C or S
VAMGRHKRLYTVVGKDYYLISTASLKTPVXXAKS

SEQ ID NO: 85609 - protein, 31 aa, Artificial Sequence
  Cyclic GFR-binding peptide
  MOD_RES (27), (28): Xaa is C or S
GRHKRLYTVVGKDYYLISTASLKTPVXXAKS

SEQ ID NO: 85610 - protein, 39 aa, Artificial Sequence; identical to SEQ ID NO: 33195
  Cyclic GFR-binding peptide
  MOD_RES (2), (4), (35), (36): Xaa is C or S

SEQ ID NO: 85611 - protein, 27 aa, Artificial Sequence
  Cyclic GFR-binding peptide
  MOD_RES (27), (27): Xaa is C or S
GEYKFKIIQQKDNLYLMSIPEMKTPTX

SEQ ID NO: 85612 - protein, 28 aa, Artificial Sequence
  Cyclic GFR-binding peptide
VTMNRHKRLVVNKNEDYYLISTASMKEP

SEQ ID NO: 85613 - protein, 27 aa, Artificial Sequence
  Cyclic GFR-binding peptide
TMNRHKRLVVNKNEDYYLISTASMKEP

SEQ ID NO: 85614 - protein, 31 aa, Artificial Sequence
  Cyclic GFR-binding peptide
  MOD_RES (30), (31): Xaa is C or S
EVIMEYKFKLLVRGNDLYLMSIPETKVPAXX

SEQ ID NO: 85615 - protein, 28 aa, Artificial Sequence
  Cyclic GFR-binding peptide
  MOD_RES (26), (27): Xaa is C or S
RHKRLVVNKNEDYYLISTASMKEPVXXP

SEQ ID NO: 85616 - protein, 34 aa, Artificial Sequence; identical to SEQ ID NO: 33197
  Cyclic GFR-binding peptide
  MOD_RES (2), (4): Xaa is C or S

SEQ ID NO: 85617 - protein, 28 aa, Artificial Sequence
  Cyclic GFR-binding peptide
VVMGYHYKLIIQQKDNKYLMSIPSMKTP

SEQ ID NO: 85618 - protein, 35 aa, Artificial Sequence
  Cyclic GFR-binding peptide
  MOD_RES (29), (30): Xaa is C or S
VVMPIKGYVKPTRGVFYLINIPSLDQPVXXPSASA

SEQ ID NO: 85619 - protein, 20 aa, Artificial Sequence
  Cyclic GFR-binding peptide
RHKRLVVNNAADYYLISTAS

SEQ ID NO: 85620 - protein, 24 aa, Artificial Sequence
  Cyclic GFR-binding peptide
MDYHYKLVVNNASDKYLISIPSLR

SEQ ID NO: 85621 - protein, 30 aa, Artificial Sequence
  Cyclic GFR-binding peptide
  MOD_RES (2), (4): Xaa is C or S
SXGXRDVVMGRHKRLIIQQKDNYYLMSTAS

SEQ ID NO: 85622 - protein, 35 aa, Artificial Sequence; identical to SEQ ID NO: 33198
  Cyclic GFR-binding peptide
  MOD_RES (2), (4), (35): Xaa is C or S

SEQ ID NO: 85623 - protein, 37 aa, Artificial Sequence; identical to SEQ ID NO: 33200
  Cyclic GFR-binding peptide
  MOD_RES (2), (4), (36), (37): Xaa is C or S

SEQ ID NO: 85624 - protein, 31 aa, Artificial Sequence
  Cyclic GFR-binding peptide
  MOD_RES (1), (3): Xaa is C or S
XAXSEVTMNRYKKLVVNKNEDFYLISIANMK

SEQ ID NO: 85625 - protein, 28 aa, Artificial Sequence
  Cyclic GFR-binding peptide
  MOD_RES (28), (28): Xaa is C or S
MNPIKGYVVNKNEDFYLINIPSMKEPVX

SEQ ID NO: 85626 - protein, 26 aa, Artificial Sequence
  Cyclic GFR-binding peptide
SVAMGRHKRLYTVVGKDYYLISTASL

SEQ ID NO: 85627 - protein, 34 aa, Artificial Sequence; identical to SEQ ID NO: 33203
  Cyclic GFR-binding peptide
  MOD_RES (31), (32): Xaa is C or S

SEQ ID NO: 85628 - protein, 24 aa, Artificial Sequence
  Cyclic GFR-binding peptide
VIMPIKGYIKPTKGIFYLINIPSL

SEQ ID NO: 85629 - protein, 28 aa, Artificial Sequence
  Cyclic GFR-binding peptide
  MOD_RES (1), (1): Xaa is C or S
XSEVTMNRYKKLVVNKNEDFYLISIANM

SEQ ID NO: 85630 - protein, 24 aa, Artificial Sequence
  Cyclic GFR-binding peptide
MGEYKFKIIQQKDNLYLMSIPEMK

SEQ ID NO: 85631 - protein, 28 aa, Artificial Sequence
  Cyclic GFR-binding peptide
SEVTMNEYKFKVVNKNEDLYLISIPEMK

SEQ ID NO: 85632 - protein, 29 aa, Artificial Sequence
  Cyclic GFR-binding peptide
ESVAMGRHKRLYTVVGKDYYLISTASLKT

SEQ ID NO: 85633 - protein, 28 aa, Artificial Sequence
  Cyclic GFR-binding peptide
  MOD_RES (27), (28): Xaa is C or S
DRHKRLVVNNAADYYLISTASLRAPVXX

SEQ ID NO: 85634 - protein, 23 aa, Artificial Sequence
  Cyclic GFR-binding peptide
MNPIKGYVVNKNEDFYLINIPSM

SEQ ID NO: 85635 - protein, 28 aa, Artificial Sequence
  Cyclic GFR-binding peptide
  MOD_RES (26), (27): Xaa is C or S
YHYKLIIQQKDNKYLMSIPSMKTPTXXP

SEQ ID NO: 85636 - protein, 27 aa, Artificial Sequence
  Cyclic GFR-binding peptide
  MOD_RES (27), (27): Xaa is C or S
MPIKGYIKPTKGIFYLINIPSLDQSVX

SEQ ID NO: 85637 - protein, 38 aa, Artificial Sequence; identical to SEQ ID NO: 33206
  Cyclic GFR-binding peptide
  MOD_RES (2), (4), (36), (37): Xaa is C or S

SEQ ID NO: 85638 - protein, 33 aa, Artificial Sequence; identical to SEQ ID NO: 33207
  Cyclic GFR-binding peptide
  MOD_RES (1), (33): Xaa is C or S

SEQ ID NO: 85639 - protein, 28 aa, Artificial Sequence
  Cyclic GFR-binding peptide
  MOD_RES (27), (28): Xaa is C or S
GYHYKLIIQQKDNKYLMSIPSMKTPTXX

SEQ ID NO: 85640 - protein, 41 aa, Artificial Sequence; identical to SEQ ID NO: 33208
  Cyclic GFR-binding peptide
  MOD_RES (2), (4), (36), (37): Xaa is C or S

SEQ ID NO: 85641 - protein, 35 aa, Artificial Sequence; identical to SEQ ID NO: 33210
  Cyclic GFR-binding peptide
  MOD_RES (31), (32): Xaa is C or S

SEQ ID NO: 85642 - protein, 26 aa, Artificial Sequence
  Cyclic GFR-binding peptide
VMGYHYKLIIQQKDNKYLMSIPSMKT

SEQ ID NO: 85643 - protein, 33 aa, Artificial Sequence
  Cyclic GFR-binding peptide
  MOD_RES (27), (28): Xaa is C or S
NEYKFKIVNSSDDLYLVSIPELKTPAXXPKPVH

SEQ ID NO: 85644 - protein, 38 aa, Artificial Sequence; identical to SEQ ID NO: 33212
  Cyclic GFR-binding peptide
  MOD_RES (32), (33): Xaa is C or S

SEQ ID NO: 85645 - protein, 38 aa, Artificial Sequence; identical to SEQ ID NO: 33213
  Cyclic GFR-binding peptide
  MOD_RES (1), (33), (34): Xaa is C or S

SEQ ID NO: 85646 - protein, 28 aa, Artificial Sequence
  Cyclic GFR-binding peptide
  MOD_RES (27), (28): Xaa is C or S
MEYKFKLLVRGNDLYLMSIPETKVPAXX

SEQ ID NO: 85647 - protein, 31 aa, Artificial Sequence
  Cyclic GFR-binding peptide
  MOD_RES (1), (3): Xaa is C or S
XGXESVAMGRHKRLYTVVGKDYYLISTASLK

SEQ ID NO: 85648 - protein, 28 aa, Artificial Sequence
  Cyclic GFR-binding peptide
VMDRHKRLVVNNAADYYLISTASLRAPV

SEQ ID NO: 85649 - protein, 29 aa, Artificial Sequence
  Cyclic GFR-binding peptide
EVVMDRHKRLVVNNAADYYLISTASLRAP

SEQ ID NO: 85650 - protein, 29 aa, Artificial Sequence
  Cyclic GFR-binding peptide
  MOD_RES (29), (29): Xaa is C or S
TMNPIKGYVVNKNEDFYLINIPSMKEPVX

SEQ ID NO: 85651 - protein, 38 aa, Artificial Sequence; identical to SEQ ID NO: 33216
  Cyclic GFR-binding peptide
  MOD_RES (32), (33): Xaa is C or S

SEQ ID NO: 85652 - protein, 31 aa, Artificial Sequence; identical to SEQ ID NO: 33217
  Cyclic GFR-binding peptide
  MOD_RES (1), (1): Xaa is C or S

SEQ ID NO: 85653 - protein, 34 aa, Artificial Sequence
  Cyclic GFR-binding peptide
  MOD_RES (29), (30): Xaa is C or S
VMGYHYKLIIQQKDNKYLMSIPSMKTPTXXPGAS

SEQ ID NO: 85654 - protein, 24 aa, Artificial Sequence
  Cyclic GFR-binding peptide
PIKGYVKPTRGVFYLINIPSLDQP

SEQ ID NO: 85655 - protein, 27 aa, Artificial Sequence
  Cyclic GFR-binding peptide
ESVAMGRHKRLYTVVGKDYYLISTASL

SEQ ID NO: 85656 - protein, 27 aa, Artificial Sequence
  Cyclic GFR-binding peptide
VAMGRHKRLYTVVGKDYYLISTASLKT

SEQ ID NO: 85657 - protein, 30 aa, Artificial Sequence
  Cyclic GFR-binding peptide
  MOD_RES (30), (30): Xaa is C or S
VVMGEYKFKIIQQKDNLYLMSIPEMKTPTX

SEQ ID NO: 85658 - protein, 23 aa, Artificial Sequence
  Cyclic GFR-binding peptide
RYKKLVVNKNEDFYLISIANMKE

SEQ ID NO: 85659 - protein, 33 aa, Artificial Sequence; identical to SEQ ID NO: 33224
  Cyclic GFR-binding peptide
  MOD_RES (2), (2): Xaa is C or S

SEQ ID NO: 85660 - protein, 35 aa, Artificial Sequence; identical to SEQ ID NO: 21071
  Cyclic GFR-binding peptide
  MOD_RES (2), (4): Xaa is C or S

SEQ ID NO: 85661 - protein, 30 aa, Artificial Sequence; identical to SEQ ID NO: 33225
  Cyclic GFR-binding peptide

SEQ ID NO: 85662 - protein, 39 aa, Artificial Sequence; identical to SEQ ID NO: 33227
  Cyclic GFR-binding peptide
  MOD_RES (2), (4), (36), (37): Xaa is C or S

SEQ ID NO: 85663 - protein, 26 aa, Artificial Sequence
  Cyclic GFR-binding peptide
DVVMGRHKRLIIQQKDNYYLMSTASM

SEQ ID NO: 85664 - protein, 39 aa, Artificial Sequence; identical to SEQ ID NO: 33229
  Cyclic GFR-binding peptide
  MOD_RES (1), (33), (34): Xaa is C or S

SEQ ID NO: 85665 - protein, 36 aa, Artificial Sequence
  Cyclic GFR-binding peptide
  MOD_RES (30), (31): Xaa is C or S
VVMDEYKFKVVNNASDLYLISIPELRTPVXXTPPTS

SEQ ID NO: 85666 - protein, 30 aa, Artificial Sequence; identical to SEQ ID NO: 33231
  Cyclic GFR-binding peptide

SEQ ID NO: 85667 - protein, 31 aa, Artificial Sequence
  Cyclic GFR-binding peptide
  MOD_RES (2), (2): Xaa is C or S
GXSEVVMDRHKRLVVNNASDYYLISTASLRT

SEQ ID NO: 85668 - protein, 21 aa, Artificial Sequence
  Cyclic GFR-binding peptide
NEYKFKVVNKNEDLYLISIPE

SEQ ID NO: 85669 - protein, 39 aa, Artificial Sequence; identical to SEQ ID NO: 33233
  Cyclic GFR-binding peptide
  MOD_RES (1), (33), (34): Xaa is C or S

SEQ ID NO: 85670 - protein, 29 aa, Artificial Sequence
  Cyclic GFR-binding peptide
  MOD_RES (1), (1): Xaa is C or S
XSRVIMPIKGYVKPKRGVFYLINIPSLAQ

SEQ ID NO: 85671 - protein, 42 aa, Artificial Sequence; identical to SEQ ID NO: 33234
  Cyclic GFR-binding peptide
  MOD_RES (2), (4), (36), (37): Xaa is C or S

SEQ ID NO: 85672 - protein, 35 aa, Artificial Sequence
  Cyclic GFR-binding peptide
  MOD_RES (29), (30): Xaa is C or S
VIMEYKFKLLVRGNDLYLMSIPETKVPAXXTSPVR

SEQ ID NO: 85673 - protein, 34 aa, Artificial Sequence; identical to SEQ ID NO: 33235
  Cyclic GFR-binding peptide
  MOD_RES (31), (32): Xaa is C or S

SEQ ID NO: 85674 - protein, 29 aa, Artificial Sequence
  Cyclic GFR-binding peptide
SKVIMPIKGYIKPTKGIFYLINIPSLDQS

SEQ ID NO: 85675 - protein, 33 aa, Artificial Sequence
  Cyclic GFR-binding peptide
  MOD_RES (1), (3): Xaa is C or S
XGXSEVVMDEYKFKVVNNASDLYLISIPELRTP

SEQ ID NO: 85676 - protein, 25 aa, Artificial Sequence
  Cyclic GFR-binding peptide
VVMGYHYKLIIQQKDNKYLMSIPSM

SEQ ID NO: 85677 - protein, 30 aa, Artificial Sequence
  Cyclic GFR-binding peptide
  MOD_RES (29), (30): Xaa is C or S
VMGRHKRLIIQQKDNYYLMSTASMKTPTXX

SEQ ID NO: 85678 - protein, 32 aa, Artificial Sequence; identical to SEQ ID NO: 33236
  Cyclic GFR-binding peptide
  MOD_RES (31), (32): Xaa is C or S

SEQ ID NO: 85679 - protein, 38 aa, Artificial Sequence; identical to SEQ ID NO: 33237
  Cyclic GFR-binding peptide
  MOD_RES (2), (34), (35): Xaa is C or S

SEQ ID NO: 85680 - protein, 31 aa, Artificial Sequence; identical to SEQ ID NO: 33239
  Cyclic GFR-binding peptide
  MOD_RES (31), (31): Xaa is C or S

SEQ ID NO: 85681 - protein, 35 aa, Artificial Sequence; identical to SEQ ID NO: 33241
  Cyclic GFR-binding peptide
  MOD_RES (2), (4): Xaa is C or S

SEQ ID NO: 85682 - protein, 41 aa, Artificial Sequence; identical to SEQ ID NO: 33242
  Cyclic GFR-binding peptide
  MOD_RES (2), (4), (36), (37): Xaa is C or S

SEQ ID NO: 85683 - protein, 33 aa, Artificial Sequence; identical to SEQ ID NO: 33243
  Cyclic GFR-binding peptide
  MOD_RES (1), (3): Xaa is C or S

SEQ ID NO: 85684 - protein, 34 aa, Artificial Sequence; identical to SEQ ID NO: 33244
  Cyclic GFR-binding peptide
  MOD_RES (1), (32), (33): Xaa is C or S

SEQ ID NO: 85685 - protein, 29 aa, Artificial Sequence
  Cyclic GFR-binding peptide
VVMGEYKFKIIQQKDNLYLMSIPEMKTPT

SEQ ID NO: 85686 - protein, 29 aa, Artificial Sequence
  Cyclic GFR-binding peptide
  MOD_RES (2), (2): Xaa is C or S
GXSEVVMDRHKRLVVNNASDYYLISTASL

SEQ ID NO: 85687 - protein, 27 aa, Artificial Sequence
  Cyclic GFR-binding peptide
VMDRHKRLVVNNASDYYLISTASLRTP

SEQ ID NO: 85688 - protein, 37 aa, Artificial Sequence; identical to SEQ ID NO: 33247
  Cyclic GFR-binding peptide
  MOD_RES (32), (33): Xaa is C or S

SEQ ID NO: 85689 - protein, 28 aa, Artificial Sequence
  Cyclic GFR-binding peptide
  MOD_RES (26), (27): Xaa is C or S
EYKFKIIQQKDNLYLMSIPEMKTPTXXP

SEQ ID NO: 85690 - protein, 29 aa, Artificial Sequence
  Cyclic GFR-binding peptide
AAAAAAAAAYHYKLIIQQKDNKYLMSIPS

SEQ ID NO: 85691 - protein, 35 aa, Artificial Sequence
  Cyclic GFR-binding peptide
  MOD_RES (30), (31): Xaa is C or S
VTMNRHKRLVVNKNEDYYLISTASMKEPVXXPEPI

SEQ ID NO: 85692 - protein, 24 aa, Artificial Sequence
  Cyclic GFR-binding peptide
MNRYKKLVVNKNEDFYLISIANMK

SEQ ID NO: 85693 - protein, 28 aa, Artificial Sequence
  Cyclic GFR-binding peptide
  MOD_RES (28), (28): Xaa is C or S
IMRHKRLLLVRGNDYYLMSTASTKVPAX

SEQ ID NO: 85694 - protein, 26 aa, Artificial Sequence
  Cyclic GFR-binding peptide
SEVVMDEYKFKVVNNASDLYLISIPE

SEQ ID NO: 85695 - protein, 25 aa, Artificial Sequence
  Cyclic GFR-binding peptide
GYHYKLIIQQKDNKYLMSIPSMKTP

SEQ ID NO: 85696 - protein, 31 aa, Artificial Sequence
  Cyclic GFR-binding peptide
  MOD_RES (1), (1): Xaa is C or S
XSEVTMNRHKRLVVNKNEDYYLISTASMKEP

SEQ ID NO: 85697 - protein, 28 aa, Artificial Sequence
  Cyclic GFR-binding peptide
  MOD_RES (1), (1): Xaa is C or S
XSRVIMPIKGYVKPKRGVFYLINIPSLA

SEQ ID NO: 85698 - protein, 34 aa, Artificial Sequence
  Cyclic GFR-binding peptide
  MOD_RES (2), (4): Xaa is C or S
RXGXSEVVMDRHKRLVVNNASDYYLISTASLRTP

SEQ ID NO: 85699 - protein, 33 aa, Artificial Sequence; identical to SEQ ID NO: 33250
  Cyclic GFR-binding peptide
  MOD_RES (1), (33): Xaa is C or S

SEQ ID NO: 85700 - protein, 28 aa, Artificial Sequence
  Cyclic GFR-binding peptide
  MOD_RES (27), (28): Xaa is C or S
MPIKGYVKPTRGVFYLINIPSLDQPVXX

SEQ ID NO: 85701 - protein, 29 aa, Artificial Sequence
  Cyclic GFR-binding peptide
  MOD_RES (1), (3): Xaa is C or S
XGXRDVVMGRHKRLIIQQKDNYYLMSTAS

SEQ ID NO: 85702 - protein, 36 aa, Artificial Sequence; identical to SEQ ID NO: 33251
  Cyclic GFR-binding peptide
  MOD_RES (1), (33), (34): Xaa is C or S

SEQ ID NO: 85703 - protein, 38 aa, Artificial Sequence; identical to SEQ ID NO: 33252
  Cyclic GFR-binding peptide
  MOD_RES (32), (33): Xaa is C or S

SEQ ID NO: 85704 - protein, 28 aa, Artificial Sequence
  Cyclic GFR-binding peptide
  MOD_RES (2), (2): Xaa is C or S
AXSEVTMNYHYKLVVNKNEDKYLISIPS

SEQ ID NO: 85705 - protein, 33 aa, Artificial Sequence
  Cyclic GFR-binding peptide
  MOD_RES (29), (30): Xaa is C or S
AMGRHKRLYTVVGKDYYLISTASLKTPVXXAKS

SEQ ID NO: 85706 - protein, 34 aa, Artificial Sequence; identical to SEQ ID NO: 33253
  Cyclic GFR-binding peptide
  MOD_RES (1), (33), (34): Xaa is C or S

SEQ ID NO: 85707 - protein, 38 aa, Artificial Sequence; identical to SEQ ID NO: 33254
  Cyclic GFR-binding peptide
  MOD_RES (1), (3), (35), (36): Xaa is C or S

SEQ ID NO: 85708 - protein, 33 aa, Artificial Sequence
  Cyclic GFR-binding peptide
  MOD_RES (27), (28): Xaa is C or S
GEYKFKIIQQKDNLYLMSIPEMKTPTXXPGASG

SEQ ID NO: 85709 - protein, 35 aa, Artificial Sequence; identical to SEQ ID NO: 33256
  Cyclic GFR-binding peptide
  MOD_RES (2), (34), (35): Xaa is C or S

SEQ ID NO: 85710 - protein, 26 aa, Artificial Sequence
  Cyclic GFR-binding peptide
VIMRHKRLLLVRGNDYYLMSTASTKV

SEQ ID NO: 85711 - protein, 27 aa, Artificial Sequence
  Cyclic GFR-binding peptide
KVVMPIKGYVKPTRGVFYLINIPSLDQ

SEQ ID NO: 85712 - protein, 37 aa, Artificial Sequence; identical to SEQ ID NO: 33257
  Cyclic GFR-binding peptide
  MOD_RES (1), (3), (34), (35): Xaa is C or S

SEQ ID NO: 85713 - protein, 35 aa, Artificial Sequence; identical to SEQ ID NO: 33260
  Cyclic GFR-binding peptide
  MOD_RES (31), (32): Xaa is C or S

SEQ ID NO: 85714 - protein, 28 aa, Artificial Sequence
  Cyclic GFR-binding peptide
RVIMPIKGYVKPKRGVFYLINIPSLAQP

SEQ ID NO: 85715 - protein, 30 aa, Artificial Sequence; identical to SEQ ID NO: 33261
  Cyclic GFR-binding peptide

SEQ ID NO: 85716 - protein, 25 aa, Artificial Sequence
  Cyclic GFR-binding peptide
EVTMNPIKGYVVNKNEDFYLINIPS

SEQ ID NO: 85717 - protein, 30 aa, Artificial Sequence
  Cyclic GFR-binding peptide
  MOD_RES (1), (3): Xaa is C or S
XGXEEVIMEYKFKLLVRGNDLYLMSIPETK

SEQ ID NO: 85718 - protein, 42 aa, Artificial Sequence; identical to SEQ ID NO: 33265
  Cyclic GFR-binding peptide
  MOD_RES (2), (4), (36), (37): Xaa is C or S

SEQ ID NO: 85719 - protein, 35 aa, Artificial Sequence; identical to SEQ ID NO: 33266
  Cyclic GFR-binding peptide
  MOD_RES (2), (34), (35): Xaa is C or S

SEQ ID NO: 85720 - protein, 26 aa, Artificial Sequence
  Cyclic GFR-binding peptide
EEVIMEYKFKLLVRGNDLYLMSIPET

SEQ ID NO: 85721 - protein, 26 aa, Artificial Sequence
  Cyclic GFR-binding peptide
VIMPIKGYVKPKRGVFYLINIPSLAQ

SEQ ID NO: 85722 - protein, 37 aa, Artificial Sequence; identical to SEQ ID NO: 33269
  Cyclic GFR-binding peptide
  MOD_RES (31), (32): Xaa is C or S

SEQ ID NO: 85723 - protein, 35 aa, Artificial Sequence; identical to SEQ ID NO: 33270
  Cyclic GFR-binding peptide
  MOD_RES (31), (32): Xaa is C or S

SEQ ID NO: 85724 - protein, 22 aa, Artificial Sequence
  Cyclic GFR-binding peptide
PIKGYVKPKRGVFYLINIPSLA

SEQ ID NO: 85725 - protein, 24 aa, Artificial Sequence
  Cyclic GFR-binding peptide
VIMPIKGYVKPKRGVFYLINIPSL

SEQ ID NO: 85726 - protein, 39 aa, Artificial Sequence; identical to SEQ ID NO: 33271
  Cyclic GFR-binding peptide
  MOD_RES (1), (33), (34): Xaa is C or S

SEQ ID NO: 85727 - protein, 42 aa, Artificial Sequence; identical to SEQ ID NO: 33273
  Cyclic GFR-binding peptide
  MOD_RES (2), (4), (36), (37): Xaa is C or S

SEQ ID NO: 85728 - protein, 34 aa, Artificial Sequence; identical to SEQ ID NO: 33274
  Cyclic GFR-binding peptide
  MOD_RES (2), (4): Xaa is C or S

SEQ ID NO: 85729 - protein, 31 aa, Artificial Sequence
  Cyclic GFR-binding peptide
  MOD_RES (29), (30): Xaa is C or S
VIMEYKFKLLVRGNDLYLMSIPETKVPAXXT

SEQ ID NO: 85730 - protein, 38 aa, Artificial Sequence; identical to SEQ ID NO: 33277
  Cyclic GFR-binding peptide
  MOD_RES (2), (4), (36), (37): Xaa is C or S

SEQ ID NO: 85731 - protein, 25 aa, Artificial Sequence
  Cyclic GFR-binding peptide
VVMDEYKFKVVNNASDLYLISIPEL

SEQ ID NO: 85732 - protein, 31 aa, Artificial Sequence; identical to SEQ ID NO: 33281
  Cyclic GFR-binding peptide
  MOD_RES (31), (31): Xaa is C or S

SEQ ID NO: 85733 - protein, 23 aa, Artificial Sequence
  Cyclic GFR-binding peptide
VMGRHKRLIIQQKDNYYLMSTAS

SEQ ID NO: 85734 - protein, 32 aa, Artificial Sequence
  Cyclic GFR-binding peptide
  MOD_RES (27), (28): Xaa is C or S
DYHYKLVVNNASDKYLISIPSLRTPVXXTPPT

SEQ ID NO: 85735 - protein, 28 aa, Artificial Sequence
  Cyclic GFR-binding peptide
  MOD_RES (1), (1): Xaa is C or S
XSEVVMDYHYKLVVNNASDKYLISIPSL

SEQ ID NO: 85736 - protein, 28 aa, Artificial Sequence
  Cyclic GFR-binding peptide
  MOD_RES (26), (27): Xaa is C or S
RHKRLIIQQKDNYYLMSTASMKTPTXXP

SEQ ID NO: 85737 - protein, 39 aa, Artificial Sequence; identical to SEQ ID NO: 33284
  Cyclic GFR-binding peptide
  MOD_RES (1), (33), (34): Xaa is C or S

SEQ ID NO: 85738 - protein, 29 aa, Artificial Sequence
  Cyclic GFR-binding peptide
  MOD_RES (2), (2): Xaa is C or S
AXSEVTMNRHKRLVVNKNEDYYLISTASM

SEQ ID NO: 85739 - protein, 37 aa, Artificial Sequence; identical to SEQ ID NO: 33286
  Cyclic GFR-binding peptide
  MOD_RES (1), (33), (34): Xaa is C or S

SEQ ID NO: 85740 - protein, 34 aa, Artificial Sequence; identical to SEQ ID NO: 33288
  Cyclic GFR-binding peptide
  MOD_RES (1), (32), (33): Xaa is C or S

SEQ ID NO: 85741 - protein, 32 aa, Artificial Sequence; identical to SEQ ID NO: 33289
  Cyclic GFR-binding peptide
  MOD_RES (1), (32): Xaa is C or S

SEQ ID NO: 85742 - protein, 26 aa, Artificial Sequence
  Cyclic GFR-binding peptide
  MOD_RES (26), (26): Xaa is C or S
PIKGYVKPTRGVFYLINIPSLDQPVX

SEQ ID NO: 85743 - protein, 33 aa, Artificial Sequence; identical to SEQ ID NO: 33291
  Cyclic GFR-binding peptide
  MOD_RES (31), (32): Xaa is C or S

SEQ ID NO: 85744 - protein, 28 aa, Artificial Sequence
  Cyclic GFR-binding peptide
SEVVMDEYKFKVVNNASDLYLISIPELR

SEQ ID NO: 85745 - protein, 21 aa, Artificial Sequence
  Cyclic GFR-binding peptide
DEYKFKVVNNASDLYLISIPE

SEQ ID NO: 85746 - protein, 27 aa, Artificial Sequence
  Cyclic GFR-binding peptide
  MOD_RES (27), (27): Xaa is C or S
NRHKRLVVNKNEDYYLISTASMKEPVX

SEQ ID NO: 85747 - protein, 33 aa, Artificial Sequence
  Cyclic GFR-binding peptide
  MOD_RES (27), (28): Xaa is C or S
NPIKGYVVNKNEDFYLINIPSMKEPVXXPEPIG

SEQ ID NO: 85748 - protein, 42 aa, Artificial Sequence; identical to SEQ ID NO: 33294
  Cyclic GFR-binding peptide
  MOD_RES (2), (4), (36), (37): Xaa is C or S

SEQ ID NO: 85749 - protein, 26 aa, Artificial Sequence
  Cyclic GFR-binding peptide
IMEYKFKLLVRGNDLYLMSIPETKVP

SEQ ID NO: 85750 - protein, 31 aa, Artificial Sequence
  Cyclic GFR-binding peptide
  MOD_RES (1), (1): Xaa is C or S
XSEVTMNEYKFKVVNKNEDLYLISIPEMKEP

SEQ ID NO: 85751 - protein, 29 aa, Artificial Sequence
  Cyclic GFR-binding peptide
  MOD_RES (27), (28): Xaa is C or S
DYHYKLVVNNASDKYLISIPSLRTPVXXT

SEQ ID NO: 85752 - protein, 35 aa, Artificial Sequence; identical to SEQ ID NO: 33295
  Cyclic GFR-binding peptide
  MOD_RES (1), (3), (35): Xaa is C or S

SEQ ID NO: 85753 - protein, 32 aa, Artificial Sequence
  Cyclic GFR-binding peptide
  MOD_RES (29), (30): Xaa is C or S
TMNPIKGYVVNKNEDFYLINIPSMKEPVXXPE

SEQ ID NO: 85754 - protein, 30 aa, Artificial Sequence
  Cyclic GFR-binding peptide
  MOD_RES (29), (30): Xaa is C or S
TMNEYKFKVVNKNEDLYLISIPEMKEPVXX

SEQ ID NO: 85755 - protein, 26 aa, Artificial Sequence
  Cyclic GFR-binding peptide
MGRHKRLYTVVGKDYYLISTASLKTP

SEQ ID NO: 85756 - protein, 37 aa, Artificial Sequence; identical to SEQ ID NO: 33298
  Cyclic GFR-binding peptide
  MOD_RES (32), (33): Xaa is C or S

SEQ ID NO: 85757 - protein, 27 aa, Artificial Sequence
  Cyclic GFR-binding peptide
SKVIMPIKGYIKPTKGIFYLINIPSLD

SEQ ID NO: 85758 - protein, 26 aa, Artificial Sequence
  Cyclic GFR-binding peptide
TMNEYKFKVVNKNEDLYLISIPEMKE

SEQ ID NO: 85759 - protein, 30 aa, Artificial Sequence
  Cyclic GFR-binding peptide
  MOD_RES (29), (30): Xaa is C or S
VIMPIKGYVKPKRGVFYLINIPSLAQPVXX

SEQ ID NO: 85760 - protein, 39 aa, Artificial Sequence; identical to SEQ ID NO: 33299
  Cyclic GFR-binding peptide
  MOD_RES (1), (3), (35), (36): Xaa is C or S

SEQ ID NO: 85761 - protein, 28 aa, Artificial Sequence
  Cyclic GFR-binding peptide
SRVIMPIKGYVKPKRGVFYLINIPSLAQ

SEQ ID NO: 85762 - protein, 22 aa, Artificial Sequence
  Cyclic GFR-binding peptide
YHYKLVVNNASDKYLISIPSLR

SEQ ID NO: 85763 - protein, 31 aa, Artificial Sequence
  Cyclic GFR-binding peptide
  MOD_RES (1), (1): Xaa is C or S
XRDVVMGEYKFKIIQQKDNLYLMSIPEMKTP

SEQ ID NO: 85764 - protein, 32 aa, Artificial Sequence
  Cyclic GFR-binding peptide
  MOD_RES (2), (4): Xaa is C or S
SXGXRDVVMGRHKRLIIQQKDNYYLMSTASMK

SEQ ID NO: 85765 - protein, 33 aa, Artificial Sequence
  Cyclic GFR-binding peptide
  MOD_RES (1), (3): Xaa is C or S
XGXSEVVMDYHYKLVVNNASDKYLISIPSLRTP

SEQ ID NO: 85766 - protein, 29 aa, Artificial Sequence
  Cyclic GFR-binding peptide
AAAAAAAAARHKRLVVNNAADYYLISTAS

SEQ ID NO: 85767 - protein, 29 aa, Artificial Sequence
  Cyclic GFR-binding peptide
SEVTMNYHYKLVVNKNEDKYLISIPSMKE

SEQ ID NO: 85768 - protein, 31 aa, Artificial Sequence
  Cyclic GFR-binding peptide
  MOD_RES (2), (4): Xaa is C or S
SXKXSKVVMPIKGYVKPTRGVFYLINIPSLD

SEQ ID NO: 85769 - protein, 28 aa, Artificial Sequence
  Cyclic GFR-binding peptide
VMDEYKFKVVNNASDLYLISIPELRTPV

SEQ ID NO: 85770 - protein, 27 aa, Artificial Sequence
  Cyclic GFR-binding peptide
SEVVMDEYKFKVVNNASDLYLISIPEL

SEQ ID NO: 85771 - protein, 23 aa, Artificial Sequence
  Cyclic GFR-binding peptide
MDYHYKLVVNNASDKYLISIPSL

SEQ ID NO: 85772 - protein, 32 aa, Artificial Sequence; identical to SEQ ID NO: 33300
  Cyclic GFR-binding peptide
  MOD_RES (1), (1): Xaa is C or S

SEQ ID NO: 85773 - protein, 31 aa, Artificial Sequence
  Cyclic GFR-binding peptide
  MOD_RES (2), (4): Xaa is C or S
RXGXSEVVMDRHKRLVVNNASDYYLISTASL

SEQ ID NO: 85774 - protein, 35 aa, Artificial Sequence; identical to SEQ ID NO: 33301
  Cyclic GFR-binding peptide
  MOD_RES (2), (34), (35): Xaa is C or S

SEQ ID NO: 85775 - protein, 28 aa, Artificial Sequence
  Cyclic GFR-binding peptide
  MOD_RES (26), (27): Xaa is C or S
RYKKLVVNKNEDFYLISIANMKEPVXXP

SEQ ID NO: 85776 - protein, 33 aa, Artificial Sequence
  Cyclic GFR-binding peptide
  MOD_RES (30), (31): Xaa is C or S
VVMDRHKRLVVNNASDYYLISTASLRTPVXXTP

SEQ ID NO: 85777 - protein, 31 aa, Artificial Sequence
  Cyclic GFR-binding peptide
  MOD_RES (2), (2): Xaa is C or S
GXRDVVMGRHKRLIIQQKDNYYLMSTASMKT

SEQ ID NO: 85778 - protein, 26 aa, Artificial Sequence
  Cyclic GFR-binding peptide
MPIKGYIKPTKGIFYLINIPSLDQSV

SEQ ID NO: 85779 - protein, 26 aa, Artificial Sequence
  Cyclic GFR-binding peptide
SEVTMNEYKFKVVNKNEDLYLISIPE

SEQ ID NO: 85780 - protein, 39 aa, Artificial Sequence; identical to SEQ ID NO: 33307
  Cyclic GFR-binding peptide
  MOD_RES (2), (33), (34): Xaa is C or S

SEQ ID NO: 85781 - protein, 27 aa, Artificial Sequence
  Cyclic GFR-binding peptide
  MOD_RES (26), (27): Xaa is C or S
PIKGYVKPTRGVFYLINIPSLDQPVXX

SEQ ID NO: 85782 - protein, 35 aa, Artificial Sequence; identical to SEQ ID NO: 33308
  Cyclic GFR-binding peptide
  MOD_RES (2), (34), (35): Xaa is C or S

SEQ ID NO: 85783 - protein, 31 aa, Artificial Sequence
  Cyclic GFR-binding peptide
  MOD_RES (2), (2): Xaa is C or S
GXRDVVMGEYKFKIIQQKDNLYLMSIPEMKT

SEQ ID NO: 85784 - protein, 36 aa, Artificial Sequence; identical to SEQ ID NO: 33309
  Cyclic GFR-binding peptide
  MOD_RES (31), (32): Xaa is C or S

SEQ ID NO: 85785 - protein, 25 aa, Artificial Sequence
  Cyclic GFR-binding peptide
PIKGYIKPTKGIFYLINIPSLDQSV

SEQ ID NO: 85786 - protein, 35 aa, Artificial Sequence
  Cyclic GFR-binding peptide
  MOD_RES (5), (6): Xaa is C or S
IPEPXXVPEKMEPISILYLDENKNVVKFKYENMTV

SEQ ID NO: 85787 - protein, 32 aa, Artificial Sequence
  Cyclic GFR-binding peptide
  MOD_RES (4), (5): Xaa is C or S
PPTXXVPTRLSPISILYKDSANNVVLKYHYDM

SEQ ID NO: 85788 - protein, 36 aa, Artificial Sequence; identical to SEQ ID NO: 33312
  Cyclic GFR-binding peptide
  MOD_RES (5), (6): Xaa is C or S

SEQ ID NO: 85789 - protein, 31 aa, Artificial Sequence; identical to SEQ ID NO: 33311
  Cyclic GFR-binding peptide
  MOD_RES (1), (1): Xaa is C or S

SEQ ID NO: 85790 - protein, 32 aa, Artificial Sequence; identical to SEQ ID NO: 33313
  Cyclic GFR-binding peptide
  MOD_RES (1), (2): Xaa is C or S

SEQ ID NO: 85791 - protein, 28 aa, Artificial Sequence
  Cyclic GFR-binding peptide
  MOD_RES (2), (3): Xaa is C or S
TXXVPTRLSPISILYKDSANNVVLKYHY

SEQ ID NO: 85792 - protein, 39 aa, Artificial Sequence; identical to SEQ ID NO: 33315
  Cyclic GFR-binding peptide
  MOD_RES (6), (7), (39): Xaa is C or S

SEQ ID NO: 85793 - protein, 29 aa, Artificial Sequence
  Cyclic GFR-binding peptide
  MOD_RES (27), (29): Xaa is C or S
SPISILYKDSANNVVLKYHYDMVVESXGX

SEQ ID NO: 85794 - protein, 32 aa, Artificial Sequence
  Cyclic GFR-binding peptide
  MOD_RES (4), (5): Xaa is C or S
PPTXXVPTRLSATSILYYDSANNVVLRKHRDM

SEQ ID NO: 85795 - protein, 33 aa, Artificial Sequence; identical to SEQ ID NO: 33316
  Cyclic GFR-binding peptide
  MOD_RES (1), (33): Xaa is C or S

SEQ ID NO: 85796 - protein, 32 aa, Artificial Sequence; identical to SEQ ID NO: 33317
  Cyclic GFR-binding peptide
  MOD_RES (1), (1): Xaa is C or S

SEQ ID NO: 85797 - protein, 33 aa, Artificial Sequence
  Cyclic GFR-binding peptide
  MOD_RES (4), (5): Xaa is C or S
PPTXXVPTRLSPISILYKDSANNVVLKYHYDMV

SEQ ID NO: 85798 - protein, 23 aa, Artificial Sequence
  Cyclic GFR-binding peptide
TRLEPISILYLDSANNVVKFKYE

SEQ ID NO: 85799 - protein, 33 aa, Artificial Sequence; identical to SEQ ID NO: 33318
  Cyclic GFR-binding peptide
  MOD_RES (1), (2), (33): Xaa is C or S

SEQ ID NO: 85800 - protein, 29 aa, Artificial Sequence
  Cyclic GFR-binding peptide
VPQALSPINILYFVGRKPKVYGKIPMIVR

SEQ ID NO: 85801 - protein, 33 aa, Artificial Sequence
  Cyclic GFR-binding peptide
  MOD_RES (31), (33): Xaa is C or S
PARLSATSILYYDAANNVVLRKHRDMVVEAXGX

SEQ ID NO: 85802 - protein, 34 aa, Artificial Sequence; identical to SEQ ID NO: 33323
  Cyclic GFR-binding peptide
  MOD_RES (2), (3), (34): Xaa is C or S

SEQ ID NO: 85803 - protein, 37 aa, Artificial Sequence; identical to SEQ ID NO: 33324
  Cyclic GFR-binding peptide
  MOD_RES (5), (6): Xaa is C or S

SEQ ID NO: 85804 - protein, 29 aa, Artificial Sequence
  Cyclic GFR-binding peptide
PTRLSPISILYKDSANNVVLKYHYDMVVE

SEQ ID NO: 85805 - protein, 35 aa, Artificial Sequence; identical to SEQ ID NO: 33325
  Cyclic GFR-binding peptide
  MOD_RES (3), (4): Xaa is C or S

SEQ ID NO: 85806 - protein, 35 aa, Artificial Sequence
  Cyclic GFR-binding peptide
  MOD_RES (6), (7): Xaa is C or S
RVPSTXXAPVKTSATSMLYYDNGRVLLLRKHRMIV

SEQ ID NO: 85807 - protein, 37 aa, Artificial Sequence; identical to SEQ ID NO: 33326
  Cyclic GFR-binding peptide
  MOD_RES (6), (7): Xaa is C or S

SEQ ID NO: 85808 - protein, 26 aa, Artificial Sequence
  Cyclic GFR-binding peptide
VPEKMNAISILYFDENKNVVLKKYRN

SEQ ID NO: 85809 - protein, 30 aa, Artificial Sequence; identical to SEQ ID NO: 33329
  Cyclic GFR-binding peptide

SEQ ID NO: 85810 - protein, 34 aa, Artificial Sequence; identical to SEQ ID NO: 33330
  Cyclic GFR-binding peptide
  MOD_RES (3), (4): Xaa is C or S

SEQ ID NO: 85811 - protein, 37 aa, Artificial Sequence; identical to SEQ ID NO: 33331
  Cyclic GFR-binding peptide
  MOD_RES (5), (6): Xaa is C or S

SEQ ID NO: 85812 - protein, 26 aa, Artificial Sequence
  Cyclic GFR-binding peptide
SPISILYKDSANNVVLKYHYDMVVES

SEQ ID NO: 85813 - protein, 33 aa, Artificial Sequence; identical to SEQ ID NO: 33336
  Cyclic GFR-binding peptide
  MOD_RES (1), (2): Xaa is C or S

SEQ ID NO: 85814 - protein, 27 aa, Artificial Sequence
  Cyclic GFR-binding peptide
  MOD_RES (1), (2): Xaa is C or S
XXAPVKTSATSMLYYDNGRVLLLRKHR

SEQ ID NO: 85815 - protein, 28 aa, Artificial Sequence
  Cyclic GFR-binding peptide
  MOD_RES (1), (1): Xaa is C or S
XVPTRLSPISILYKDSANNVVLKYHYDM

SEQ ID NO: 85816 - protein, 28 aa, Artificial Sequence
  Cyclic GFR-binding peptide
  MOD_RES (1), (1): Xaa is C or S
XVPTRLSATSILYYDSANNVVLRKHRDM

SEQ ID NO: 85817 - protein, 24 aa, Artificial Sequence
  Cyclic GFR-binding peptide
SATSMLYYNDKQQIILRKHRGMVV

SEQ ID NO: 85818 - protein, 20 aa, Artificial Sequence
  Cyclic GFR-binding peptide
SPISILYKDSANNVVLKYHY

SEQ ID NO: 85819 - protein, 28 aa, Artificial Sequence
  Cyclic GFR-binding peptide
TRLSPISILYKDSANNVVLKYHYDMVVE

SEQ ID NO: 85820 - protein, 37 aa, Artificial Sequence; identical to SEQ ID NO: 33341
  Cyclic GFR-binding peptide
  MOD_RES (4), (5), (36): Xaa is C or S

SEQ ID NO: 85821 - protein, 27 aa, Artificial Sequence
  Cyclic GFR-binding peptide
VPEKMSPINILYFDENKNVVYGKIPNM

SEQ ID NO: 85822 - protein, 24 aa, Artificial Sequence
  Cyclic GFR-binding peptide
EPISILYLDENKNVVKFKYENMTV

SEQ ID NO: 85823 - protein, 26 aa, Artificial Sequence
  Cyclic GFR-binding peptide
  MOD_RES (1), (1): Xaa is C or S
XTPTKMEPISMLYLNDKQQIIKFKYE

SEQ ID NO: 85824 - protein, 28 aa, Artificial Sequence
  Cyclic GFR-binding peptide
  MOD_RES (2), (3): Xaa is C or S
SXXVPARLSATSILYYDAANNVVLRKHR

SEQ ID NO: 85825 - protein, 34 aa, Artificial Sequence; identical to SEQ ID NO: 33342
  Cyclic GFR-binding peptide
  MOD_RES (1), (2), (34): Xaa is C or S

SEQ ID NO: 85826 - protein, 22 aa, Artificial Sequence
  Cyclic GFR-binding peptide
LSPISILYKDSANNVVLKYHYD

SEQ ID NO: 85827 - protein, 31 aa, Artificial Sequence; identical to SEQ ID NO: 33343
  Cyclic GFR-binding peptide
  MOD_RES (1), (1): Xaa is C or S

SEQ ID NO: 85828 - protein, 30 aa, Artificial Sequence
  Cyclic GFR-binding peptide
  MOD_RES (1), (1): Xaa is C or S
XVPTRLEPISILYLDSANNVVKFKYEDMVV

SEQ ID NO: 85829 - protein, 20 aa, Artificial Sequence
  Cyclic GFR-binding peptide
SATSMLYYNDKQQIILRKHR

SEQ ID NO: 85830 - protein, 42 aa, Artificial Sequence; identical to SEQ ID NO: 33344
  Cyclic GFR-binding peptide
  MOD_RES (6), (7), (39), (41): Xaa is C or S

SEQ ID NO: 85831 - protein, 34 aa, Artificial Sequence; identical to SEQ ID NO: 33345
  Cyclic GFR-binding peptide
  MOD_RES (1), (32), (34): Xaa is C or S

SEQ ID NO: 85832 - protein, 38 aa, Artificial Sequence; identical to SEQ ID NO: 33346
  Cyclic GFR-binding peptide
  MOD_RES (3), (4), (36), (38): Xaa is C or S

SEQ ID NO: 85833 - protein, 40 aa, Artificial Sequence; identical to SEQ ID NO: 33347
  Cyclic GFR-binding peptide
  MOD_RES (6), (7), (39): Xaa is C or S

SEQ ID NO: 85834 - protein, 37 aa, Artificial Sequence; identical to SEQ ID NO: 33349
  Cyclic GFR-binding peptide
  MOD_RES (1), (2), (34), (36): Xaa is C or S

SEQ ID NO: 85835 - protein, 30 aa, Artificial Sequence
  Cyclic GFR-binding peptide
  MOD_RES (30), (30): Xaa is C or S
PVKTSPISMLYKDNGRVLLLKYHYMIVEEX

SEQ ID NO: 85836 - protein, 37 aa, Artificial Sequence; identical to SEQ ID NO: 33350
  Cyclic GFR-binding peptide
  MOD_RES (2), (3), (35), (37): Xaa is C or S

SEQ ID NO: 85837 - protein, 31 aa, Artificial Sequence
  Cyclic GFR-binding peptide
  MOD_RES (28), (30): Xaa is C or S
MSPISILYKDENKNVVLKYHYNMTVESXAXR

SEQ ID NO: 85838 - protein, 34 aa, Artificial Sequence; identical to SEQ ID NO: 33351
  Cyclic GFR-binding peptide
  MOD_RES (1), (32), (34): Xaa is C or S

SEQ ID NO: 85839 - protein, 27 aa, Artificial Sequence
  Cyclic GFR-binding peptide
APVKTSATSMLYYDNGRVLLLRKHRMI

SEQ ID NO: 85840 - protein, 36 aa, Artificial Sequence; identical to SEQ ID NO: 33352
  Cyclic GFR-binding peptide
  MOD_RES (4), (5), (36): Xaa is C or S

SEQ ID NO: 85841 - protein, 38 aa, Artificial Sequence; identical to SEQ ID NO: 33353
  Cyclic GFR-binding peptide
  MOD_RES (6), (7): Xaa is C or S

SEQ ID NO: 85842 - protein, 40 aa, Artificial Sequence; identical to SEQ ID NO: 33354
  Cyclic GFR-binding peptide
  MOD_RES (6), (7), (39): Xaa is C or S

SEQ ID NO: 85843 - protein, 33 aa, Artificial Sequence
  Cyclic GFR-binding peptide
  MOD_RES (3), (4): Xaa is C or S
STXXAPVKTSPISMLYKDNGRVLLLKYHYMIVE

SEQ ID NO: 85844 - protein, 34 aa, Artificial Sequence; identical to SEQ ID NO: 33355
  Cyclic GFR-binding peptide
  MOD_RES (2), (3): Xaa is C or S

SEQ ID NO: 85845 - protein, 36 aa, Artificial Sequence; identical to SEQ ID NO: 33356
  Cyclic GFR-binding peptide
  MOD_RES (1), (33), (35): Xaa is C or S

SEQ ID NO: 85846 - protein, 25 aa, Artificial Sequence
  Cyclic GFR-binding peptide
RLSPISILYKDSANNVVLKYHYDMV

SEQ ID NO: 85847 - protein, 27 aa, Artificial Sequence
  Cyclic GFR-binding peptide
  MOD_RES (1), (1): Xaa is C or S
XAPVKTSATSMLYYDNGRVLLLRKHRM

SEQ ID NO: 85848 - protein, 27 aa, Artificial Sequence
  Cyclic GFR-binding peptide
  MOD_RES (27), (27): Xaa is C or S
LSPINILYFVGRTPKVYGKIPMVVKSX

SEQ ID NO: 85849 - protein, 31 aa, Artificial Sequence
  Cyclic GFR-binding peptide
  MOD_RES (29), (31): Xaa is C or S
RLEPISILYLDSANNVVKFKYEDMVVESXGX

SEQ ID NO: 85850 - protein, 34 aa, Artificial Sequence; identical to SEQ ID NO: 33358
  Cyclic GFR-binding peptide
  MOD_RES (31), (33): Xaa is C or S

SEQ ID NO: 85851 - protein, 27 aa, Artificial Sequence
  Cyclic GFR-binding peptide
PTRLSPISILYKDSANNVVLKYHYDMV

SEQ ID NO: 85852 - protein, 32 aa, Artificial Sequence
  Cyclic GFR-binding peptide
  MOD_RES (3), (4): Xaa is C or S
GPXXTPTKMSATSMLYYNDKQQIILRKHRGMV

SEQ ID NO: 85853 - protein, 24 aa, Artificial Sequence
  Cyclic GFR-binding peptide
EPISMLYLDNGRVLLKFKYEMIVE

SEQ ID NO: 85854 - protein, 34 aa, Artificial Sequence; identical to SEQ ID NO: 33360
  Cyclic GFR-binding peptide
  MOD_RES (32), (34): Xaa is C or S

SEQ ID NO: 85855 - protein, 25 aa, Artificial Sequence
  Cyclic GFR-binding peptide
RLSATSILYYDSANNVVLRKHRDMV

SEQ ID NO: 85856 - protein, 37 aa, Artificial Sequence; identical to SEQ ID NO: 33361
  Cyclic GFR-binding peptide
  MOD_RES (3), (4), (36): Xaa is C or S

SEQ ID NO: 85857 - protein, 23 aa, Artificial Sequence
  Cyclic GFR-binding peptide
TKMSATSMLYYNDKQQIILRKHR

SEQ ID NO: 85858 - protein, 37 aa, Artificial Sequence; identical to SEQ ID NO: 33362
  Cyclic GFR-binding peptide
  MOD_RES (1), (2), (34), (36): Xaa is C or S

SEQ ID NO: 85859 - protein, 33 aa, Artificial Sequence
  Cyclic GFR-binding peptide
  MOD_RES (30), (32): Xaa is C or S
PVKTSATSMLYYDNGRVLLLRKHRMIVEEXGXL

SEQ ID NO: 85860 - protein, 27 aa, Artificial Sequence
  Cyclic GFR-binding peptide
PEKMNAISILYFDENKNVVLKKYRNMT

SEQ ID NO: 85861 - protein, 37 aa, Artificial Sequence; identical to SEQ ID NO: 33363
  Cyclic GFR-binding peptide
  MOD_RES (3), (4), (35), (37): Xaa is C or S

SEQ ID NO: 85862 - protein, 31 aa, Artificial Sequence
  Cyclic GFR-binding peptide
  MOD_RES (29), (31): Xaa is C or S
QDLSPINILYFVGRTPKVYGKIPMVVKSXKX

SEQ ID NO: 85863 - protein, 38 aa, Artificial Sequence; identical to SEQ ID NO: 33364
  Cyclic GFR-binding peptide
  MOD_RES (3), (4), (36), (38): Xaa is C or S

SEQ ID NO: 85864 - protein, 28 aa, Artificial Sequence
  Cyclic GFR-binding peptide
  MOD_RES (2), (3): Xaa is C or S
PXXVSQDLSPINILYFIGKTPKIYGKIP

SEQ ID NO: 85865 - protein, 31 aa, Artificial Sequence
  Cyclic GFR-binding peptide
  MOD_RES (29), (31): Xaa is C or S
VKTSPISMLYKDNGRVLLLKYHYMIVEEXGX

SEQ ID NO: 85866 - protein, 36 aa, Artificial Sequence; identical to SEQ ID NO: 33369
  Cyclic GFR-binding peptide
  MOD_RES (5), (6): Xaa is C or S

SEQ ID NO: 85867 - protein, 37 aa, Artificial Sequence; identical to SEQ ID NO: 33368
  Cyclic GFR-binding peptide
  MOD_RES (3), (4), (35), (37): Xaa is C or S

SEQ ID NO: 85868 - protein, 26 aa, Artificial Sequence
  Cyclic GFR-binding peptide
TPTKMEPISMLYLNDKQQIIKFKYEG

SEQ ID NO: 85869 - protein, 30 aa, Artificial Sequence
  Cyclic GFR-binding peptide
  MOD_RES (2), (3): Xaa is C or S
PXXVPEKMNAISILYFDENKNVVLKKYRNM

SEQ ID NO: 85870 - protein, 31 aa, Artificial Sequence
  Cyclic GFR-binding peptide
  MOD_RES (3), (4): Xaa is C or S
EPXXVPEKMNAISILYFDENKNVVLKKYRNM

SEQ ID NO: 85871 - protein, 35 aa, Artificial Sequence; identical to SEQ ID NO: 33370
  Cyclic GFR-binding peptide
  MOD_RES (2), (3), (35): Xaa is C or S

SEQ ID NO: 85872 - protein, 36 aa, Artificial Sequence; identical to SEQ ID NO: 33371
  Cyclic GFR-binding peptide
  MOD_RES (2), (3), (35): Xaa is C or S

SEQ ID NO: 85873 - protein, 31 aa, Artificial Sequence
  Cyclic GFR-binding peptide
  MOD_RES (3), (4): Xaa is C or S
SPXXVPQDLSPINILYFVGRTPKVYGKIPMV

SEQ ID NO: 85874 - protein, 29 aa, Artificial Sequence
  Cyclic GFR-binding peptide
  MOD_RES (27), (29): Xaa is C or S
SATSILYYDAANNVVLRKHRDMVVEAXGX

SEQ ID NO: 85875 - protein, 31 aa, Artificial Sequence; identical to SEQ ID NO: 33372
  Cyclic GFR-binding peptide
  MOD_RES (1), (1): Xaa is C or S

SEQ ID NO: 85876 - protein, 29 aa, Artificial Sequence
  Cyclic GFR-binding peptide
  MOD_RES (2), (3): Xaa is C or S
TXXVPTRLEPISILYLDSANNVVKFKYED

SEQ ID NO: 85877 - protein, 24 aa, Artificial Sequence
  Cyclic GFR-binding peptide
SPINILYFIGKTPKIYGKIPMIVK

SEQ ID NO: 85878 - protein, 31 aa, Artificial Sequence
  Cyclic GFR-binding peptide
  MOD_RES (30), (30): Xaa is C or S
TRLEPISILYLDSANNVVKFKYEDMVVESXG

SEQ ID NO: 85879 - protein, 24 aa, Artificial Sequence
  Cyclic GFR-binding peptide
QDLSPINILYFVGRTPKVYGKIPM

SEQ ID NO: 85880 - protein, 28 aa, Artificial Sequence
  Cyclic GFR-binding peptide
PTRLEPISILYLDSANNVVKFKYEDMVV

SEQ ID NO: 85881 - protein, 32 aa, Artificial Sequence
  Cyclic GFR-binding peptide
  MOD_RES (31), (31): Xaa is C or S
PEKMSATSILYYDENKNVVLRKHRNMTVESXA

SEQ ID NO: 85882 - protein, 26 aa, Artificial Sequence
  Cyclic GFR-binding peptide
VPQALSPINILYFVGRKPKVYGKIPM

SEQ ID NO: 85883 - protein, 37 aa, Artificial Sequence; identical to SEQ ID NO: 33374
  Cyclic GFR-binding peptide
  MOD_RES (4), (5), (37): Xaa is C or S

SEQ ID NO: 85884 - protein, 38 aa, Artificial Sequence; identical to SEQ ID NO: 33375
  Cyclic GFR-binding peptide
  MOD_RES (5), (6), (38): Xaa is C or S

SEQ ID NO: 85885 - protein, 31 aa, Artificial Sequence
  Cyclic GFR-binding peptide
  MOD_RES (30), (30): Xaa is C or S
PQALSPINILYFVGRKPKVYGKIPMIVRSXK

SEQ ID NO: 85886 - protein, 27 aa, Artificial Sequence
  Cyclic GFR-binding peptide
KMSPINILYFDENKNVVYGKIPNMTVE

SEQ ID NO: 85887 - protein, 29 aa, Artificial Sequence
  Cyclic GFR-binding peptide
  MOD_RES (28), (28): Xaa is C or S
DLSPINILYFIGKTPKIYGKIPMIVKSXK

SEQ ID NO: 85888 - protein, 30 aa, Artificial Sequence
  Cyclic GFR-binding peptide
  MOD_RES (3), (4): Xaa is C or S
SPXXVPQDLSPINILYFVGRTPKVYGKIPM

SEQ ID NO: 85889 - protein, 35 aa, Artificial Sequence
  Cyclic GFR-binding peptide
  MOD_RES (6), (7): Xaa is C or S
RVPSTXXAPVKTSPISMLYKDNGRVLLLKYHYMIV

SEQ ID NO: 85890 - protein, 34 aa, Artificial Sequence; identical to SEQ ID NO: 33380
  Cyclic GFR-binding peptide
  MOD_RES (1), (2), (34): Xaa is C or S

SEQ ID NO: 85891 - protein, 30 aa, Artificial Sequence
  Cyclic GFR-binding peptide
  MOD_RES (1), (1): Xaa is C or S
XTPTKMSATSMLYYNDKQQIILRKHRGMVV

SEQ ID NO: 85892 - protein, 22 aa, Artificial Sequence
  Cyclic GFR-binding peptide
KLSATSILYYDKGVVTYLRKHR

SEQ ID NO: 85893 - protein, 26 aa, Artificial Sequence
  Cyclic GFR-binding peptide
APVKTSATSMLYYDNGRVLLLRKHRM

SEQ ID NO: 85894 - protein, 30 aa, Artificial Sequence
  Cyclic GFR-binding peptide
  MOD_RES (1), (1): Xaa is C or S
XTPTKMSPISMLYKNDKQQIILKYHYGMVV

SEQ ID NO: 85895 - protein, 27 aa, Artificial Sequence
  Cyclic GFR-binding peptide
MEPISMLYLNDKQQIIKFKYEGMVVDR

SEQ ID NO: 85896 - protein, 26 aa, Artificial Sequence
  Cyclic GFR-binding peptide
SPISMLYKNDKQQIILKYHYGMVVDR

SEQ ID NO: 85897 - protein, 39 aa, Artificial Sequence; identical to SEQ ID NO: 33382
  Cyclic GFR-binding peptide
  MOD_RES (6), (7), (39): Xaa is C or S

SEQ ID NO: 85898 - protein, 29 aa, Artificial Sequence
  Cyclic GFR-binding peptide
  MOD_RES (3), (4): Xaa is C or S
SPXXVPQDLSPINILYFVGRTPKVYGKIP

SEQ ID NO: 85899 - protein, 32 aa, Artificial Sequence
  Cyclic GFR-binding peptide
  MOD_RES (3), (4): Xaa is C or S
GPXXTPTKMEPISMLYLNDKQQIIKFKYEGMV

SEQ ID NO: 85900 - protein, 29 aa, Artificial Sequence
  Cyclic GFR-binding peptide
  MOD_RES (1), (2): Xaa is C or S
XXVPEKMSATSILYYDENKNVVLRKHRNM

SEQ ID NO: 85901 - protein, 26 aa, Artificial Sequence
  Cyclic GFR-binding peptide
VPEKMSATSILYYDENKNVVLRKHRN

SEQ ID NO: 85902 - protein, 32 aa, Artificial Sequence; identical to SEQ ID NO: 33383
  Cyclic GFR-binding peptide
  MOD_RES (1), (2): Xaa is C or S

SEQ ID NO: 85903 - protein, 24 aa, Artificial Sequence
  Cyclic GFR-binding peptide
TRLEPISILYLDSANNVVKFKYED

SEQ ID NO: 85904 - protein, 29 aa, Artificial Sequence
  Cyclic GFR-binding peptide
  MOD_RES (3), (4): Xaa is C or S
STXXAPVKTSATSMLYYDNGRVLLLRKHR

SEQ ID NO: 85905 - protein, 36 aa, Artificial Sequence; identical to SEQ ID NO: 33385
  Cyclic GFR-binding peptide
  MOD_RES (5), (6): Xaa is C or S

SEQ ID NO: 85906 - protein, 34 aa, Artificial Sequence
  Cyclic GFR-binding peptide
  MOD_RES (6), (7): Xaa is C or S
ASAAPXXVPQALSPINILYFVGRKPKVYGKIPMI

SEQ ID NO: 85907 - protein, 28 aa, Artificial Sequence
  Cyclic GFR-binding peptide
  MOD_RES (27), (27): Xaa is C or S
SATSILYYDSANNVVLRKHRDMVVESXG

SEQ ID NO: 85908 - protein, 30 aa, Artificial Sequence
  Cyclic GFR-binding peptide
  MOD_RES (30), (30): Xaa is C or S
PVKTEPISMLYLDNGRVLLKFKYEMIVEEX

SEQ ID NO: 85909 - protein, 40 aa, Artificial Sequence; identical to SEQ ID NO: 33389
  Cyclic GFR-binding peptide
  MOD_RES (6), (7), (39): Xaa is C or S

SEQ ID NO: 85910 - protein, 41 aa, Artificial Sequence; identical to SEQ ID NO: 33390
  Cyclic GFR-binding peptide
  MOD_RES (6), (7), (39), (41): Xaa is C or S

SEQ ID NO: 85911 - protein, 35 aa, Artificial Sequence; identical to SEQ ID NO: 33391
  Cyclic GFR-binding peptide
  MOD_RES (3), (4), (35): Xaa is C or S

SEQ ID NO: 85912 - protein, 29 aa, Artificial Sequence
  Cyclic GFR-binding peptide
  MOD_RES (27), (29): Xaa is C or S
TEPISMLYLDNGRVLLKFKYEMIVEEXGX

SEQ ID NO: 85913 - protein, 39 aa, Artificial Sequence; identical to SEQ ID NO: 33393
  Cyclic GFR-binding peptide
  MOD_RES (5), (6), (38): Xaa is C or S

SEQ ID NO: 85914 - protein, 31 aa, Artificial Sequence
  Cyclic GFR-binding peptide
  MOD_RES (4), (5): Xaa is C or S
PEPXXVPEKMEPISILYLDENKNVVKFKYEN

SEQ ID NO: 85915 - protein, 27 aa, Artificial Sequence
  Cyclic GFR-binding peptide
  MOD_RES (1), (1): Xaa is C or S
XVPEKMNAISILYFDENKNVVLKKYRN

SEQ ID NO: 85916 - protein, 28 aa, Artificial Sequence
  Cyclic GFR-binding peptide
  MOD_RES (28), (28): Xaa is C or S
MSATSILYYDENKNVVLRKHRNMTVESX

SEQ ID NO: 85917 - protein, 29 aa, Artificial Sequence
  Cyclic GFR-binding peptide
  MOD_RES (1), (2): Xaa is C or S
XXVPEKMSPISILYKDENKNVVLKYHYNM

SEQ ID NO: 85918 - protein, 34 aa, Artificial Sequence; identical to SEQ ID NO: 33395
  Cyclic GFR-binding peptide
  MOD_RES (2), (3): Xaa is C or S

SEQ ID NO: 85919 - protein, 40 aa, Artificial Sequence; identical to SEQ ID NO: 33397
  Cyclic GFR-binding peptide
  MOD_RES (5), (6), (37), (39): Xaa is C or S

SEQ ID NO: 85920 - protein, 28 aa, Artificial Sequence
  Cyclic GFR-binding peptide
  MOD_RES (27), (27): Xaa is C or S
SPISMLYKNDKQQIILKYHYGMVVDRXG

SEQ ID NO: 85921 - protein, 38 aa, Artificial Sequence; identical to SEQ ID NO: 33398
  Cyclic GFR-binding peptide
  MOD_RES (5), (6), (37): Xaa is C or S

SEQ ID NO: 85922 - protein, 39 aa, Artificial Sequence; identical to SEQ ID NO: 33399
  Cyclic GFR-binding peptide
  MOD_RES (6), (7), (39): Xaa is C or S

SEQ ID NO: 85923 - protein, 31 aa, Artificial Sequence
  Cyclic GFR-binding peptide
  MOD_RES (4), (5): Xaa is C or S
PEPXXVPEKMSPISILYKDENKNVVLKYHYN

SEQ ID NO: 85924 - protein, 32 aa, Artificial Sequence; identical to SEQ ID NO: 33401
  Cyclic GFR-binding peptide
  MOD_RES (1), (1): Xaa is C or S

SEQ ID NO: 85925 - protein, 33 aa, Artificial Sequence
  Cyclic GFR-binding peptide
  MOD_RES (3), (4): Xaa is C or S
EPXXVPEKMEPISILYLDENKNVVKFKYENMTV

SEQ ID NO: 85926 - protein, 32 aa, Artificial Sequence
  Cyclic GFR-binding peptide
  MOD_RES (6), (7): Xaa is C or S
AAPASXXVPARLSATSILYYDAANNVVLRKHR

SEQ ID NO: 85927 - protein, 23 aa, Artificial Sequence
  Cyclic GFR-binding peptide
EKMEPISILYLDENKNVVKFKYE

SEQ ID NO: 85928 - protein, 30 aa, Artificial Sequence; identical to SEQ ID NO: 33403
  Cyclic GFR-binding peptide

SEQ ID NO: 85929 - protein, 38 aa, Artificial Sequence; identical to SEQ ID NO: 33404
  Cyclic GFR-binding peptide
  MOD_RES (5), (6), (38): Xaa is C or S

SEQ ID NO: 85930 - protein, 28 aa, Artificial Sequence
  Cyclic GFR-binding peptide
KMSPINILYFDENKNVVYGKIPNMTVES

SEQ ID NO: 85931 - protein, 39 aa, Artificial Sequence; identical to SEQ ID NO: 33405
  Cyclic GFR-binding peptide
  MOD_RES (4), (5), (37), (39): Xaa is C or S

SEQ ID NO: 85932 - protein, 30 aa, Artificial Sequence
  Cyclic GFR-binding peptide
  MOD_RES (4), (5): Xaa is C or S
PSTXXAPVKTSPISMLYKDNGRVLLLKYHY

SEQ ID NO: 85933 - protein, 25 aa, Artificial Sequence
  Cyclic GFR-binding peptide
PTRLEPISILYLDSANNVVKFKYED

SEQ ID NO: 85934 - protein, 38 aa, Artificial Sequence; identical to SEQ ID NO: 33406
  Cyclic GFR-binding peptide
  MOD_RES (2), (3), (35), (37): Xaa is C or S

SEQ ID NO: 85935 - protein, 30 aa, Artificial Sequence
  Cyclic GFR-binding peptide
  MOD_RES (29), (29): Xaa is C or S
QDLSPINILYFVGRTPKVYGKIPMVVKSXK

SEQ ID NO: 85936 - protein, 35 aa, Artificial Sequence; identical to SEQ ID NO: 33408
  Cyclic GFR-binding peptide
  MOD_RES (1), (2), (33), (35): Xaa is C or S

SEQ ID NO: 85937 - protein, 25 aa, Artificial Sequence
  Cyclic GFR-binding peptide
SQDLSPINILYFIGKTPKIYGKIPM

SEQ ID NO: 85938 - protein, 27 aa, Artificial Sequence
  Cyclic GFR-binding peptide
EKMSPINILYFDENKNVVYGKIPNMTV

SEQ ID NO: 85939 - protein, 35 aa, Artificial Sequence; identical to SEQ ID NO: 33409
  Cyclic GFR-binding peptide
  MOD_RES (32), (34): Xaa is C or S

SEQ ID NO: 85940 - protein, 33 aa, Artificial Sequence
  Cyclic GFR-binding peptide
  MOD_RES (6), (7): Xaa is C or S
RVPSTXXAPVKTSATSMLYYDNGRVLLLRKHRM

SEQ ID NO: 85941 - protein, 36 aa, Artificial Sequence; identical to SEQ ID NO: 33411
  Cyclic GFR-binding peptide
  MOD_RES (1), (2), (34), (36): Xaa is C or S

SEQ ID NO: 85942 - protein, 36 aa, Artificial Sequence; identical to SEQ ID NO: 33412
  Cyclic GFR-binding peptide
  MOD_RES (1), (33), (35): Xaa is C or S

SEQ ID NO: 85943 - protein, 31 aa, Artificial Sequence
  Cyclic GFR-binding peptide
  MOD_RES (29), (31): Xaa is C or S
KMSPISILYKDENKNVVLKYHYNMTVESXAX

SEQ ID NO: 85944 - protein, 36 aa, Artificial Sequence; identical to SEQ ID NO: 33414
  Cyclic GFR-binding peptide
  MOD_RES (1), (2), (34), (36): Xaa is C or S

SEQ ID NO: 85945 - protein, 38 aa, Artificial Sequence; identical to SEQ ID NO: 33415
  Cyclic GFR-binding peptide
  MOD_RES (4), (5), (37): Xaa is C or S

SEQ ID NO: 85946 - protein, 35 aa, Artificial Sequence; identical to SEQ ID NO: 33416
  Cyclic GFR-binding peptide
  MOD_RES (3), (4): Xaa is C or S

SEQ ID NO: 85947 - protein, 27 aa, Artificial Sequence
  Cyclic GFR-binding peptide
  MOD_RES (1), (1): Xaa is C or S
XVPEKMSPINILYFDENKNVVYGKIPN

SEQ ID NO: 85948 - protein, 36 aa, Artificial Sequence; identical to SEQ ID NO: 33418
  Cyclic GFR-binding peptide
  MOD_RES (4), (5), (36): Xaa is C or S

SEQ ID NO: 85949 - protein, 30 aa, Artificial Sequence
  Cyclic GFR-binding peptide
  MOD_RES (2), (3): Xaa is C or S
PXXTPTKMEPISMLYLNDKQQIIKFKYEGM

SEQ ID NO: 85950 - protein, 31 aa, Artificial Sequence
  Cyclic GFR-binding peptide
  MOD_RES (2), (3): Xaa is C or S
TXXVPTRLEPISILYLDSANNVVKFKYEDMV

SEQ ID NO: 85951 - protein, 30 aa, Artificial Sequence
  Cyclic GFR-binding peptide
  MOD_RES (4), (5): Xaa is C or S
PEPXXVPEKMSPINILYFDENKNVVYGKIP

SEQ ID NO: 85952 - protein, 29 aa, Artificial Sequence
  Cyclic GFR-binding peptide
APVKTSPISMLYKDNGRVLLLKYHYMIVE

SEQ ID NO: 85953 - protein, 31 aa, Artificial Sequence; identical to SEQ ID NO: 33423
  Cyclic GFR-binding peptide
  MOD_RES (31), (31): Xaa is C or S

SEQ ID NO: 85954 - protein, 37 aa, Artificial Sequence; identical to SEQ ID NO: 33425
  Cyclic GFR-binding peptide
  MOD_RES (3), (4), (36): Xaa is C or S

SEQ ID NO: 85955 - protein, 33 aa, Artificial Sequence
  Cyclic GFR-binding peptide
  MOD_RES (4), (5): Xaa is C or S
PASXXVPARLSATSILYYDAANNVVLRKHRDMV

SEQ ID NO: 85956 - protein, 38 aa, Artificial Sequence; identical to SEQ ID NO: 33427
  Cyclic GFR-binding peptide
  MOD_RES (3), (4), (36), (38): Xaa is C or S

SEQ ID NO: 85957 - protein, 24 aa, Artificial Sequence
  Cyclic GFR-binding peptide
SPISMLYKNDKQQIILKYHYGMVV

SEQ ID NO: 85958 - protein, 23 aa, Artificial Sequence
  Cyclic GFR-binding peptide
EPISMLYLDNGRVLLKFKYEMIV

SEQ ID NO: 85959 - protein, 35 aa, Artificial Sequence; identical to SEQ ID NO: 33434
  Cyclic GFR-binding peptide
  MOD_RES (2), (3), (35): Xaa is C or S

SEQ ID NO: 85960 - protein, 28 aa, Artificial Sequence
  Cyclic GFR-binding peptide
  MOD_RES (28), (28): Xaa is C or S
LSATSILYYDSANNVVLRKHRDMVVESX

SEQ ID NO: 85961 - protein, 29 aa, Artificial Sequence
  Cyclic GFR-binding peptide
  MOD_RES (1), (1): Xaa is C or S
XAPVKTEPISMLYLDNGRVLLKFKYEMIV

SEQ ID NO: 85962 - protein, 30 aa, Artificial Sequence
  Cyclic GFR-binding peptide
  MOD_RES (29), (29): Xaa is C or S
VKTSATSMLYYDNGRVLLLRKHRMIVEEXG

SEQ ID NO: 85963 - protein, 30 aa, Artificial Sequence
  Cyclic GFR-binding peptide
  MOD_RES (4), (5): Xaa is C or S
AAPXXVPQALSPINILYFVGRKPKVYGKIP

SEQ ID NO: 85964 - protein, 37 aa, Artificial Sequence; identical to SEQ ID NO: 33437
  Cyclic GFR-binding peptide
  MOD_RES (6), (7): Xaa is C or S

SEQ ID NO: 85965 - protein, 25 aa, Artificial Sequence
  Cyclic GFR-binding peptide
SPISMLYKNDKQQIILKYHYGMVVD

SEQ ID NO: 85966 - protein, 40 aa, Artificial Sequence; identical to SEQ ID NO: 33438
  Cyclic GFR-binding peptide
  MOD_RES (6), (7), (39): Xaa is C or S

SEQ ID NO: 85967 - protein, 25 aa, Artificial Sequence
  Cyclic GFR-binding peptide
PTRLSPISILYKDSANNVVLKYHYD

SEQ ID NO: 85968 - protein, 33 aa, Artificial Sequence; identical to SEQ ID NO: 33439
  Cyclic GFR-binding peptide
  MOD_RES (31), (33): Xaa is C or S

SEQ ID NO: 85969 - protein, 26 aa, Artificial Sequence
  Cyclic GFR-binding peptide
  MOD_RES (1), (1): Xaa is C or S
XVPEKMNAISILYFDENKNVVLKKYR

SEQ ID NO: 85970 - protein, 28 aa, Artificial Sequence
  Cyclic GFR-binding peptide
VPEKMSPISILYKDENKNVVLKYHYNMT

SEQ ID NO: 85971 - protein, 34 aa, Artificial Sequence
  Cyclic GFR-binding peptide
  MOD_RES (31), (33): Xaa is C or S
PTKMSPISMLYKNDKQQIILKYHYGMVVDRXGXS

SEQ ID NO: 85972 - protein, 25 aa, Artificial Sequence
  Cyclic GFR-binding peptide
RLEPISILYLDSANNVVKFKYEDMV

SEQ ID NO: 85973 - protein, 29 aa, Artificial Sequence
  Cyclic GFR-binding peptide
  MOD_RES (28), (28): Xaa is C or S
KTSATSMLYYDNGRVLLLRKHRMIVEEXG

SEQ ID NO: 85974 - protein, 37 aa, Artificial Sequence; identical to SEQ ID NO: 33443
  Cyclic GFR-binding peptide
  MOD_RES (5), (6): Xaa is C or S

SEQ ID NO: 85975 - protein, 31 aa, Artificial Sequence
  Cyclic GFR-binding peptide
  MOD_RES (1), (2): Xaa is C or S
XXTPTKMSATSMLYYNDKQQIILRKHRGMVV

SEQ ID NO: 85976 - protein, 33 aa, Artificial Sequence
  Cyclic GFR-binding peptide
  MOD_RES (5), (6): Xaa is C or S
VPSTXXAPVKTSATSMLYYDNGRVLLLRKHRMI

SEQ ID NO: 85977 - protein, 29 aa, Artificial Sequence
  Cyclic GFR-binding peptide
  MOD_RES (1), (2): Xaa is C or S
XXVPTKLSATSILYYDKGVVTYLRKHRGM

SEQ ID NO: 85978 - protein, 30 aa, Artificial Sequence
  Cyclic GFR-binding peptide
  MOD_RES (30), (30): Xaa is C or S
TKLSATSILYYDKGVVTYLRKHRGMAVSEX

SEQ ID NO: 85979 - protein, 26 aa, Artificial Sequence
  Cyclic GFR-binding peptide
TSATSMLYYDNGRVLLLRKHRMIVEE

SEQ ID NO: 85980 - protein, 36 aa, Artificial Sequence
  Cyclic GFR-binding peptide
  MOD_RES (6), (7): Xaa is C or S
RVPSTXXAPVKTSPISMLYKDNGRVLLLKYHYMIVE

SEQ ID NO: 85981 - protein, 30 aa, Artificial Sequence
  Cyclic GFR-binding peptide
  MOD_RES (29), (29): Xaa is C or S
RLEPISILYLDSANNVVKFKYEDMVVESXG

SEQ ID NO: 85982 - protein, 36 aa, Artificial Sequence; identical to SEQ ID NO: 33448
  Cyclic GFR-binding peptide
  MOD_RES (2), (3), (34), (36): Xaa is C or S

SEQ ID NO: 85983 - protein, 37 aa, Artificial Sequence; identical to SEQ ID NO: 33449
  Cyclic GFR-binding peptide
  MOD_RES (5), (6): Xaa is C or S

SEQ ID NO: 85984 - protein, 24 aa, Artificial Sequence
  Cyclic GFR-binding peptide
LSATSILYYDKGVVTYLRKHRGMA

SEQ ID NO: 85985 - protein, 34 aa, Artificial Sequence; identical to SEQ ID NO: 33450
  Cyclic GFR-binding peptide
  MOD_RES (32), (34): Xaa is C or S

SEQ ID NO: 85986 - protein, 41 aa, Artificial Sequence; identical to SEQ ID NO: 33452
  Cyclic GFR-binding peptide
  MOD_RES (6), (7), (39), (41): Xaa is C or S

SEQ ID NO: 85987 - protein, 41 aa, Artificial Sequence; identical to SEQ ID NO: 33454
  Cyclic GFR-binding peptide
  MOD_RES (6), (7), (39), (41): Xaa is C or S

SEQ ID NO: 85988 - protein, 33 aa, Artificial Sequence
  Cyclic GFR-binding peptide
  MOD_RES (3), (4): Xaa is C or S
EPXXVPEKMSPINILYFDENKNVVYGKIPNMTV

SEQ ID NO: 85989 - protein, 37 aa, Artificial Sequence; identical to SEQ ID NO: 33456
  Cyclic GFR-binding peptide
  MOD_RES (5), (6): Xaa is C or S

SEQ ID NO: 85990 - protein, 38 aa, Artificial Sequence; identical to SEQ ID NO: 33458
  Cyclic GFR-binding peptide
  MOD_RES (5), (6), (38): Xaa is C or S

SEQ ID NO: 85991 - protein, 28 aa, Artificial Sequence
  Cyclic GFR-binding peptide
TRLEPISILYLDSANNVVKFKYEDMVVE

SEQ ID NO: 85992 - protein, 30 aa, Artificial Sequence
  Cyclic GFR-binding peptide
  MOD_RES (1), (2): Xaa is C or S
XXVSQDLSPINILYFIGKTPKIYGKIPMIV

SEQ ID NO: 85993 - protein, 21 aa, Artificial Sequence
  Cyclic GFR-binding peptide
SATSILYYDAANNVVLRKHRD

SEQ ID NO: 85994 - protein, 36 aa, Artificial Sequence; identical to SEQ ID NO: 33461
  Cyclic GFR-binding peptide
  MOD_RES (5), (6): Xaa is C or S

SEQ ID NO: 85995 - protein, 30 aa, Artificial Sequence; identical to SEQ ID NO: 33462
  Cyclic GFR-binding peptide

SEQ ID NO: 85996 - protein, 35 aa, Artificial Sequence
  Cyclic GFR-binding peptide
  MOD_RES (6), (7): Xaa is C or S
ASAAPXXVPQALSPINILYFVGRKPKVYGKIPMIV

SEQ ID NO: 85997 - protein, 36 aa, Artificial Sequence
  Cyclic GFR-binding peptide
  MOD_RES (6), (7): Xaa is C or S
GSAGPXXTPTKMEPISMLYLNDKQQIIKFKYEGMVV

SEQ ID NO: 85998 - protein, 36 aa, Artificial Sequence; identical to SEQ ID NO: 33463
  Cyclic GFR-binding peptide
  MOD_RES (4), (5): Xaa is C or S

SEQ ID NO: 85999 - protein, 31 aa, Artificial Sequence; identical to SEQ ID NO: 33464
  Cyclic GFR-binding peptide
  MOD_RES (1), (1): Xaa is C or S

SEQ ID NO: 86000 - protein, 23 aa, Artificial Sequence
  Cyclic GFR-binding peptide
NAISILYFDENKNVVLKKYRNMT

SEQ ID NO: 86001 - protein, 27 aa, Artificial Sequence
  Cyclic GFR-binding peptide
  MOD_RES (26), (26): Xaa is C or S
SPINILYFIGKTPKIYGKIPMIVKSXK

SEQ ID NO: 86002 - protein, 27 aa, Artificial Sequence
  Cyclic GFR-binding peptide
  MOD_RES (26), (26): Xaa is C or S
SATSMLYYDNGRVLLLRKHRMIVEEXG

SEQ ID NO: 86003 - protein, 36 aa, Artificial Sequence; identical to SEQ ID NO: 33467
  Cyclic GFR-binding peptide
  MOD_RES (4), (5), (36): Xaa is C or S

SEQ ID NO: 86004 - protein, 29 aa, Artificial Sequence
  Cyclic GFR-binding peptide
  MOD_RES (3), (4): Xaa is C or S
GPXXTPTKMSATSMLYYNDKQQIILRKHR

SEQ ID NO: 86005 - protein, 26 aa, Artificial Sequence
  Cyclic GFR-binding peptide
PEKMEPISILYLDENKNVVKFKYENM

SEQ ID NO: 86006 - protein, 26 aa, Artificial Sequence
  Cyclic GFR-binding peptide
LSPINILYFVGRKPKVYGKIPMIVRS

SEQ ID NO: 86007 - protein, 30 aa, Artificial Sequence
  Cyclic GFR-binding peptide
  MOD_RES (3), (4): Xaa is C or S
SPXXVSQDLSPINILYFIGKTPKIYGKIPM

SEQ ID NO: 86008 - protein, 25 aa, Artificial Sequence
  Cyclic GFR-binding peptide
MSPISILYKDENKNVVLKYHYNMTV

SEQ ID NO: 86009 - protein, 32 aa, Artificial Sequence
  Cyclic GFR-binding peptide
  MOD_RES (30), (32): Xaa is C or S
EKMSPINILYFDENKNVVYGKIPNMTVESXAX

SEQ ID NO: 86010 - protein, 35 aa, Artificial Sequence; identical to SEQ ID NO: 33469
  Cyclic GFR-binding peptide
  MOD_RES (1), (33), (35): Xaa is C or S

SEQ ID NO: 86011 - protein, 32 aa, Artificial Sequence
  Cyclic GFR-binding peptide
  MOD_RES (4), (5): Xaa is C or S
PEPXXVPEKMEPISILYLDENKNVVKFKYENM

SEQ ID NO: 86012 - protein, 34 aa, Artificial Sequence
  Cyclic GFR-binding peptide
  MOD_RES (4), (5): Xaa is C or S
PEPXXVPEKMSPINILYFDENKNVVYGKIPNMTV

SEQ ID NO: 86013 - protein, 35 aa, Artificial Sequence; identical to SEQ ID NO: 33470
  Cyclic GFR-binding peptide
  MOD_RES (1), (33), (35): Xaa is C or S

SEQ ID NO: 86014 - protein, 32 aa, Artificial Sequence
  Cyclic GFR-binding peptide
  MOD_RES (3), (4): Xaa is C or S
GPXXTPTKMSPISMLYKNDKQQIILKYHYGMV

SEQ ID NO: 86015 - protein, 33 aa, Artificial Sequence
  Cyclic GFR-binding peptide
  MOD_RES (5), (6): Xaa is C or S
IPEPXXVPEKMSPINILYFDENKNVVYGKIPNM

SEQ ID NO: 86016 - protein, 32 aa, Artificial Sequence
  Cyclic GFR-binding peptide
  MOD_RES (5), (6): Xaa is C or S
IPEPXXVPEKMEPISILYLDENKNVVKFKYEN

SEQ ID NO: 86017 - protein, 23 aa, Artificial Sequence
  Cyclic GFR-binding peptide
LEPISILYLDSANNVVKFKYEDM

SEQ ID NO: 86018 - protein, 33 aa, Artificial Sequence
  Cyclic GFR-binding peptide
  MOD_RES (4), (5): Xaa is C or S
PPTXXVPTRLSATSILYYDSANNVVLRKHRDMV

SEQ ID NO: 86019 - protein, 24 aa, Artificial Sequence
  Cyclic GFR-binding peptide
TRLSPISILYKDSANNVVLKYHYD

SEQ ID NO: 86020 - protein, 30 aa, Artificial Sequence
  Cyclic GFR-binding peptide
  MOD_RES (4), (5): Xaa is C or S
PSTXXAPVKTEPISMLYLDNGRVLLKFKYE

SEQ ID NO: 86021 - protein, 29 aa, Artificial Sequence
  Cyclic GFR-binding peptide
  MOD_RES (28), (28): Xaa is C or S
LSATSILYYDKGVVTYLRKHRGMAVSEXG

SEQ ID NO: 86022 - protein, 26 aa, Artificial Sequence
  Cyclic GFR-binding peptide
VPTKLSATSILYYDKGVVTYLRKHRG

SEQ ID NO: 86023 - protein, 40 aa, Artificial Sequence; identical to SEQ ID NO: 33477
  Cyclic GFR-binding peptide
  MOD_RES (4), (5), (37), (39): Xaa is C or S

SEQ ID NO: 86024 - protein, 29 aa, Artificial Sequence
  Cyclic GFR-binding peptide
PTRLEPISILYLDSANNVVKFKYEDMVVE

SEQ ID NO: 86025 - protein, 24 aa, Artificial Sequence
  Cyclic GFR-binding peptide
PTKMSPISMLYKNDKQQIILKYHY

SEQ ID NO: 86026 - protein, 21 aa, Artificial Sequence
  Cyclic GFR-binding peptide
LSPINILYFVGRKPKVYGKIP

SEQ ID NO: 86027 - protein, 35 aa, Artificial Sequence; identical to SEQ ID NO: 33485
  Cyclic GFR-binding peptide
  MOD_RES (1), (2), (34): Xaa is C or S

SEQ ID NO: 86028 - protein, 28 aa, Artificial Sequence
  Cyclic GFR-binding peptide
  MOD_RES (1), (1): Xaa is C or S
XVPEKMEPISILYLDENKNVVKFKYENM

SEQ ID NO: 86029 - protein, 23 aa, Artificial Sequence
  Cyclic GFR-binding peptide
EKMSPISILYKDENKNVVLKYHY

SEQ ID NO: 86030 - protein, 24 aa, Artificial Sequence
  Cyclic GFR-binding peptide
RLSATSILYYDAANNVVLRKHRDM

SEQ ID NO: 86031 - protein, 34 aa, Artificial Sequence
  Cyclic GFR-binding peptide
  MOD_RES (6), (7): Xaa is C or S
HVPKPXXAPTKLSATSVLYYDDSSNVILRKHRNM

SEQ ID NO: 86032 - protein, 35 aa, Artificial Sequence
  Cyclic GFR-binding peptide
  MOD_RES (5), (6): Xaa is C or S
SASPXXVSQDLSPINILYFIGKTPKIYGKIPMIVK

SEQ ID NO: 86033 - protein, 31 aa, Artificial Sequence
  Cyclic GFR-binding peptide
  MOD_RES (5), (6): Xaa is C or S
IPEPXXVPEKMEPISILYLDENKNVVKFKYE

SEQ ID NO: 86034 - protein, 21 aa, Artificial Sequence
  Cyclic GFR-binding peptide
SATSMLYYDNGRVLLLRKHRM

SEQ ID NO: 86035 - protein, 42 aa, Artificial Sequence; identical to SEQ ID NO: 33487
  Cyclic GFR-binding peptide
  MOD_RES (6), (7), (39), (41): Xaa is C or S

SEQ ID NO: 86036 - protein, 32 aa, Artificial Sequence
  Cyclic GFR-binding peptide
  MOD_RES (6), (7): Xaa is C or S
STPPTXXVPTRLSATSILYYDSANNVVLRKHR

SEQ ID NO: 86037 - protein, 29 aa, Artificial Sequence
  Cyclic GFR-binding peptide
  MOD_RES (1), (1): Xaa is C or S
XVPTKLSATSILYYDKGVVTYLRKHRGMA

SEQ ID NO: 86038 - protein, 25 aa, Artificial Sequence
  Cyclic GFR-binding peptide
VPEKMSATSILYYDENKNVVLRKHR

SEQ ID NO: 86039 - protein, 27 aa, Artificial Sequence
  Cyclic GFR-binding peptide
VPARLSATSILYYDAANNVVLRKHRDM

SEQ ID NO: 86040 - protein, 35 aa, Artificial Sequence; identical to SEQ ID NO: 33489
  Cyclic GFR-binding peptide
  MOD_RES (2), (3), (34): Xaa is C or S

SEQ ID NO: 86041 - protein, 25 aa, Artificial Sequence
  Cyclic GFR-binding peptide
PQDLSPINILYFVGRTPKVYGKIPM

SEQ ID NO: 86042 - protein, 34 aa, Artificial Sequence; identical to SEQ ID NO: 33490
  Cyclic GFR-binding peptide
  MOD_RES (2), (3): Xaa is C or S

SEQ ID NO: 86043 - protein, 36 aa, Artificial Sequence; identical to SEQ ID NO: 33491
  Cyclic GFR-binding peptide
  MOD_RES (5), (6): Xaa is C or S

SEQ ID NO: 86044 - protein, 29 aa, Artificial Sequence
  Cyclic GFR-binding peptide
  MOD_RES (29), (29): Xaa is C or S
RLSATSILYYDSANNVVLRKHRDMVVESX

SEQ ID NO: 86045 - protein, 32 aa, Artificial Sequence
  Cyclic GFR-binding peptide
  MOD_RES (6), (7): Xaa is C or S
GIPEPXXVPEKMNAISILYFDENKNVVLKKYR

SEQ ID NO: 86046 - protein, 24 aa, Artificial Sequence
  Cyclic GFR-binding peptide
PTKMEPISMLYLNDKQQIIKFKYE

SEQ ID NO: 86047 - protein, 29 aa, Artificial Sequence
  Cyclic GFR-binding peptide
  MOD_RES (1), (2): Xaa is C or S
XXVPARLSATSILYYDAANNVVLRKHRDM

SEQ ID NO: 86048 - protein, 20 aa, Artificial Sequence
  Cyclic GFR-binding peptide
SATSILYYDENKNVVLRKHR

SEQ ID NO: 86049 - protein, 34 aa, Artificial Sequence; identical to SEQ ID NO: 33494
  Cyclic GFR-binding peptide
  MOD_RES (1), (33): Xaa is C or S

SEQ ID NO: 86050 - protein, 32 aa, Artificial Sequence
  Cyclic GFR-binding peptide
  MOD_RES (30), (32): Xaa is C or S
TRLSATSILYYDSANNVVLRKHRDMVVESXGX

SEQ ID NO: 86051 - protein, 29 aa, Artificial Sequence
  Cyclic GFR-binding peptide
  MOD_RES (28), (28): Xaa is C or S
LSATSILYYDAANNVVLRKHRDMVVEAXG

SEQ ID NO: 86052 - protein, 31 aa, Artificial Sequence
  Cyclic GFR-binding peptide
  MOD_RES (4), (5): Xaa is C or S
ASPXXVSQDLSPINILYFIGKTPKIYGKIPM

SEQ ID NO: 86053 - protein, 38 aa, Artificial Sequence; identical to SEQ ID NO: 33496
  Cyclic GFR-binding peptide
  MOD_RES (3), (4), (35), (37): Xaa is C or S

SEQ ID NO: 86054 - protein, 26 aa, Artificial Sequence
  Cyclic GFR-binding peptide
  MOD_RES (1), (1): Xaa is C or S
XVPTRLSPISILYKDSANNVVLKYHY

SEQ ID NO: 86055 - protein, 26 aa, Artificial Sequence
  Cyclic GFR-binding peptide
RLEPISILYLDSANNVVKFKYEDMVV

SEQ ID NO: 86056 - protein, 32 aa, Artificial Sequence
  Cyclic GFR-binding peptide
  MOD_RES (30), (32): Xaa is C or S
PVKTSATSMLYYDNGRVLLLRKHRMIVEEXGX

SEQ ID NO: 86057 - protein, 26 aa, Artificial Sequence
  Cyclic GFR-binding peptide
KTSATSMLYYDNGRVLLLRKHRMIVE

SEQ ID NO: 86058 - protein, 33 aa, Artificial Sequence
  Cyclic GFR-binding peptide
  MOD_RES (4), (5): Xaa is C or S
PEPXXVPEKMNAISILYFDENKNVVLKKYRNMT

SEQ ID NO: 86059 - protein, 38 aa, Artificial Sequence; identical to SEQ ID NO: 33499
  Cyclic GFR-binding peptide
  MOD_RES (4), (5), (37): Xaa is C or S

SEQ ID NO: 86060 - protein, 27 aa, Artificial Sequence
  Cyclic GFR-binding peptide
APVKTSPISMLYKDNGRVLLLKYHYMI

SEQ ID NO: 86061 - protein, 26 aa, Artificial Sequence
  Cyclic GFR-binding peptide
KMSPISMLYKNDKQQIILKYHYGMVV

SEQ ID NO: 86062 - protein, 33 aa, Artificial Sequence
  Cyclic GFR-binding peptide
  MOD_RES (3), (4): Xaa is C or S
STXXAPVKTSATSMLYYDNGRVLLLRKHRMIVE

SEQ ID NO: 86063 - protein, 40 aa, Artificial Sequence; identical to SEQ ID NO: 33503
  Cyclic GFR-binding peptide
  MOD_RES (4), (5), (37), (39): Xaa is C or S

SEQ ID NO: 86064 - protein, 26 aa, Artificial Sequence
  Cyclic GFR-binding peptide
SATSILYYDAANNVVLRKHRDMVVEA

SEQ ID NO: 86065 - protein, 29 aa, Artificial Sequence
  Cyclic GFR-binding peptide
  MOD_RES (1), (2): Xaa is C or S
XXVPTRLEPISILYLDSANNVVKFKYEDM

SEQ ID NO: 86066 - protein, 27 aa, Artificial Sequence
  Cyclic GFR-binding peptide
  MOD_RES (1), (1): Xaa is C or S
XVPTKLSATSILYYDKGVVTYLRKHRG

SEQ ID NO: 86067 - protein, 35 aa, Artificial Sequence; identical to SEQ ID NO: 33505
  Cyclic GFR-binding peptide
  MOD_RES (1), (33), (35): Xaa is C or S

SEQ ID NO: 86068 - protein, 31 aa, Artificial Sequence
  Cyclic GFR-binding peptide
  MOD_RES (31), (31): Xaa is C or S
PTKMSPISMLYKNDKQQIILKYHYGMVVDRX

SEQ ID NO: 86069 - protein, 34 aa, Artificial Sequence
  Cyclic GFR-binding peptide
  MOD_RES (4), (5): Xaa is C or S
PSTXXAPVKTSATSMLYYDNGRVLLLRKHRMIVE

SEQ ID NO: 86070 - protein, 33 aa, Artificial Sequence
  Cyclic GFR-binding peptide
  MOD_RES (4), (5): Xaa is C or S
PPTXXVPTRLEPISILYLDSANNVVKFKYEDMV

SEQ ID NO: 86071 - protein, 29 aa, Artificial Sequence
  Cyclic GFR-binding peptide
  MOD_RES (29), (29): Xaa is C or S
KMSATSMLYYNDKQQIILRKHRGMVVDRX

SEQ ID NO: 86072 - protein, 29 aa, Artificial Sequence
  Cyclic GFR-binding peptide
  MOD_RES (1), (1): Xaa is C or S
XAPVKTSPISMLYKDNGRVLLLKYHYMIV

SEQ ID NO: 86073 - protein, 33 aa, Artificial Sequence
  Cyclic GFR-binding peptide
  MOD_RES (30), (32): Xaa is C or S
TRLEPISILYLDSANNVVKFKYEDMVVESXGXR

SEQ ID NO: 86074 - protein, 37 aa, Artificial Sequence; identical to SEQ ID NO: 33506
  Cyclic GFR-binding peptide
  MOD_RES (6), (7): Xaa is C or S

SEQ ID NO: 86075 - protein, 31 aa, Artificial Sequence
  Cyclic GFR-binding peptide
  MOD_RES (31), (31): Xaa is C or S
PEKMSPISILYKDENKNVVLKYHYNMTVESX

SEQ ID NO: 86076 - protein, 32 aa, Artificial Sequence
  Cyclic GFR-binding peptide
  MOD_RES (5), (6): Xaa is C or S
APASXXVPARLSATSILYYDAANNVVLRKHRD

SEQ ID NO: 86077 - protein, 23 aa, Artificial Sequence
  Cyclic GFR-binding peptide
SATSMLYYDNGRVLLLRKHRMIV

SEQ ID NO: 86078 - protein, 26 aa, Artificial Sequence
  Cyclic GFR-binding peptide
QDLSPINILYFIGKTPKIYGKIPMIV

SEQ ID NO: 86079 - protein, 21 aa, Artificial Sequence
  Cyclic GFR-binding peptide
LSATSILYYDKGVVTYLRKHR

SEQ ID NO: 86080 - protein, 29 aa, Artificial Sequence
  Cyclic GFR-binding peptide
VPTRLSPISILYKDSANNVVLKYHYDMVV

SEQ ID NO: 86081 - protein, 29 aa, Artificial Sequence
  Cyclic GFR-binding peptide
  MOD_RES (1), (1): Xaa is C or S
XAPVKTSATSMLYYDNGRVLLLRKHRMIV

SEQ ID NO: 86082 - protein, 30 aa, Artificial Sequence; identical to SEQ ID NO: 33507
  Cyclic GFR-binding peptide

SEQ ID NO: 86083 - protein, 33 aa, Artificial Sequence
  Cyclic GFR-binding peptide
  MOD_RES (5), (6): Xaa is C or S
SASPXXVSQDLSPINILYFIGKTPKIYGKIPMI

SEQ ID NO: 86084 - protein, 35 aa, Artificial Sequence; identical to SEQ ID NO: 33508
  Cyclic GFR-binding peptide
  MOD_RES (1), (2), (33), (35): Xaa is C or S

SEQ ID NO: 86085 - protein, 29 aa, Artificial Sequence
  Cyclic GFR-binding peptide
  MOD_RES (28), (28): Xaa is C or S
MSPINILYFDENKNVVYGKIPNMTVESXA

SEQ ID NO: 86086 - protein, 34 aa, Artificial Sequence; identical to SEQ ID NO: 33510
  Cyclic GFR-binding peptide
  MOD_RES (1), (2), (34): Xaa is C or S

SEQ ID NO: 86087 - protein, 21 aa, Artificial Sequence
  Cyclic GFR-binding peptide
TSATSMLYYDNGRVLLLRKHR

SEQ ID NO: 86088 - protein, 28 aa, Artificial Sequence
  Cyclic GFR-binding peptide
  MOD_RES (26), (28): Xaa is C or S
SATSMLYYDNGRVLLLRKHRMIVEEXGX

SEQ ID NO: 86089 - protein, 27 aa, Artificial Sequence
  Cyclic GFR-binding peptide
  MOD_RES (27), (27): Xaa is C or S
LSPINILYFIGKTPKIYGKIPMIVKSX

SEQ ID NO: 86090 - protein, 27 aa, Artificial Sequence
  Cyclic GFR-binding peptide
  MOD_RES (26), (26): Xaa is C or S
EPISMLYLDNGRVLLKFKYEMIVEEXG

SEQ ID NO: 86091 - protein, 38 aa, Artificial Sequence; identical to SEQ ID NO: 33515
  Cyclic GFR-binding peptide
  MOD_RES (2), (3), (35), (37): Xaa is C or S

SEQ ID NO: 86092 - protein, 38 aa, Artificial Sequence; identical to SEQ ID NO: 33516
  Cyclic GFR-binding peptide
  MOD_RES (4), (5), (37): Xaa is C or S

SEQ ID NO: 86093 - protein, 34 aa, Artificial Sequence
  Cyclic GFR-binding peptide
  MOD_RES (6), (7): Xaa is C or S
STPPTXXVPTRLSATSILYYDSANNVVLRKHRDM

SEQ ID NO: 86094 - protein, 31 aa, Artificial Sequence; identical to SEQ ID NO: 33519
  Cyclic GFR-binding peptide

SEQ ID NO: 86095 - protein, 23 aa, Artificial Sequence
  Cyclic GFR-binding peptide
QALSPINILYFVGRKPKVYGKIP

SEQ ID NO: 86096 - protein, 32 aa, Artificial Sequence
  Cyclic GFR-binding peptide
  MOD_RES (31), (31): Xaa is C or S
PTRLSPISILYKDSANNVVLKYHYDMVVESXG

SEQ ID NO: 86097 - protein, 23 aa, Artificial Sequence
  Cyclic GFR-binding peptide
LSPINILYFIGKTPKIYGKIPMI

SEQ ID NO: 86098 - protein, 27 aa, Artificial Sequence
  Cyclic GFR-binding peptide
  MOD_RES (1), (1): Xaa is C or S
XVPQALSPINILYFVGRKPKVYGKIPM

SEQ ID NO: 86099 - protein, 30 aa, Artificial Sequence
  Cyclic GFR-binding peptide
PTRLSPISILYKDSANNVVLKYHYDMVVES

SEQ ID NO: 86100 - protein, 29 aa, Artificial Sequence
  Cyclic GFR-binding peptide
EPISILYLDENKNVVKFKYEAAAAAAAAA

SEQ ID NO: 86101 - protein, 32 aa, Artificial Sequence
  Cyclic GFR-binding peptide
  MOD_RES (5), (6): Xaa is C or S
IPEPXXVPEKMSPISILYKDENKNVVLKYHYN

SEQ ID NO: 86102 - protein, 22 aa, Artificial Sequence
  Cyclic GFR-binding peptide
LEPISILYLDSANNVVKFKYED

SEQ ID NO: 86103 - protein, 37 aa, Artificial Sequence; identical to SEQ ID NO: 33522
  Cyclic GFR-binding peptide
  MOD_RES (4), (5), (37): Xaa is C or S

SEQ ID NO: 86104 - protein, 22 aa, Artificial Sequence
  Cyclic GFR-binding peptide
SPISILYKDENKNVVLKYHYNM

SEQ ID NO: 86105 - protein, 33 aa, Artificial Sequence
  Cyclic GFR-binding peptide
  MOD_RES (30), (32): Xaa is C or S
TKMSPISMLYKNDKQQIILKYHYGMVVDRXGXS

SEQ ID NO: 86106 - protein, 29 aa, Artificial Sequence
  Cyclic GFR-binding peptide
  MOD_RES (29), (29): Xaa is C or S
RLSPISILYKDSANNVVLKYHYDMVVESX

SEQ ID NO: 86107 - protein, 32 aa, Artificial Sequence; identical to SEQ ID NO: 33524
  Cyclic GFR-binding peptide
  MOD_RES (1), (1): Xaa is C or S

SEQ ID NO: 86108 - protein, 31 aa, Artificial Sequence
  Cyclic GFR-binding peptide
  MOD_RES (29), (31): Xaa is C or S
KMSATSILYYDENKNVVLRKHRNMTVESXAX

SEQ ID NO: 86109 - protein, 39 aa, Artificial Sequence; identical to SEQ ID NO: 33525
  Cyclic GFR-binding peptide
  MOD_RES (3), (4), (36), (38): Xaa is C or S

SEQ ID NO: 86110 - protein, 30 aa, Artificial Sequence; identical to SEQ ID NO: 33526
  Cyclic GFR-binding peptide

SEQ ID NO: 86111 - protein, 31 aa, Artificial Sequence
  Cyclic GFR-binding peptide
  MOD_RES (1), (2): Xaa is C or S
XXVSQDLSPINILYFIGKTPKIYGKIPMIVK

SEQ ID NO: 86112 - protein, 29 aa, Artificial Sequence
  Cyclic GFR-binding peptide
VPEKMSATSILYYDENKNVVLRKHRNMTV

SEQ ID NO: 86113 - protein, 28 aa, Artificial Sequence
  Cyclic GFR-binding peptide
  MOD_RES (28), (28): Xaa is C or S
DLSPINILYFVGRTPKVYGKIPMVVKSX

SEQ ID NO: 86114 - protein, 32 aa, Artificial Sequence
  Cyclic GFR-binding peptide
  MOD_RES (31), (31): Xaa is C or S
PARLSATSILYYDAANNVVLRKHRDMVVEAXG

SEQ ID NO: 86115 - protein, 22 aa, Artificial Sequence
  Cyclic GFR-binding peptide
MEPISMLYLNDKQQIIKFKYEG

SEQ ID NO: 86116 - protein, 26 aa, Artificial Sequence
  Cyclic GFR-binding peptide
  MOD_RES (1), (1): Xaa is C or S
XVPTRLEPISILYLDSANNVVKFKYE

SEQ ID NO: 86117 - protein, 26 aa, Artificial Sequence
  Cyclic GFR-binding peptide
  MOD_RES (26), (26): Xaa is C or S
SPISMLYKDNGRVLLLKYHYMIVEEX

SEQ ID NO: 86118 - protein, 37 aa, Artificial Sequence; identical to SEQ ID NO: 33528
  Cyclic GFR-binding peptide
  MOD_RES (3), (4), (36): Xaa is C or S

SEQ ID NO: 86119 - protein, 30 aa, Artificial Sequence
  Cyclic GFR-binding peptide
  MOD_RES (3), (4): Xaa is C or S
PTXXVPTRLSATSILYYDSANNVVLRKHRD

SEQ ID NO: 86120 - protein, 21 aa, Artificial Sequence
  Cyclic GFR-binding peptide
SATSILYYDENKNVVLRKHRN

SEQ ID NO: 86121 - protein, 31 aa, Artificial Sequence
  Cyclic GFR-binding peptide
  MOD_RES (1), (2): Xaa is C or S
XXVPTRLEPISILYLDSANNVVKFKYEDMVV

SEQ ID NO: 86122 - protein, 30 aa, Artificial Sequence
  Cyclic GFR-binding peptide
  MOD_RES (29), (29): Xaa is C or S
VKTEPISMLYLDNGRVLLKFKYEMIVEEXG

SEQ ID NO: 86123 - protein, 36 aa, Artificial Sequence
  Cyclic GFR-binding peptide
  MOD_RES (6), (7): Xaa is C or S
RVPSTXXAPVKTSATSMLYYDNGRVLLLRKHRMIVE

SEQ ID NO: 86124 - protein, 38 aa, Artificial Sequence; identical to SEQ ID NO: 33531
  Cyclic GFR-binding peptide
  MOD_RES (6), (7), (38): Xaa is C or S

SEQ ID NO: 86125 - protein, 37 aa, Artificial Sequence; identical to SEQ ID NO: 33532
  Cyclic GFR-binding peptide
  MOD_RES (3), (4), (36): Xaa is C or S

SEQ ID NO: 86126 - protein, 25 aa, Artificial Sequence
  Cyclic GFR-binding peptide
PTKLSATSILYYDKGVVTYLRKHRG

SEQ ID NO: 86127 - protein, 33 aa, Artificial Sequence; identical to SEQ ID NO: 33533
  Cyclic GFR-binding peptide
  MOD_RES (1), (2): Xaa is C or S

SEQ ID NO: 86128 - protein, 25 aa, Artificial Sequence
  Cyclic GFR-binding peptide
SATSILYYDAANNVVLRKHRDMVVE

SEQ ID NO: 86129 - protein, 30 aa, Artificial Sequence
  Cyclic GFR-binding peptide
  MOD_RES (29), (29): Xaa is C or S
RLSATSILYYDAANNVVLRKHRDMVVEAXG

SEQ ID NO: 86130 - protein, 25 aa, Artificial Sequence
  Cyclic GFR-binding peptide
ARLSATSILYYDAANNVVLRKHRDM

SEQ ID NO: 86131 - protein, 27 aa, Artificial Sequence
  Cyclic GFR-binding peptide
KMEPISILYLDENKNVVKFKYENMTVE

SEQ ID NO: 86132 - protein, 41 aa, Artificial Sequence; identical to SEQ ID NO: 33537
  Cyclic GFR-binding peptide
  MOD_RES (6), (7), (39), (41): Xaa is C or S

SEQ ID NO: 86133 - protein, 31 aa, Artificial Sequence
  Cyclic GFR-binding peptide
  MOD_RES (31), (31): Xaa is C or S
PARLSATSILYYDAANNVVLRKHRDMVVEAX

SEQ ID NO: 86134 - protein, 28 aa, Artificial Sequence
  Cyclic GFR-binding peptide
  MOD_RES (28), (28): Xaa is C or S
KTEPISMLYLDNGRVLLKFKYEMIVEEX

SEQ ID NO: 86135 - protein, 35 aa, Artificial Sequence; identical to SEQ ID NO: 21524
  Cyclic GFR-binding peptide
  MOD_RES (32), (34): Xaa is C or S

SEQ ID NO: 86136 - protein, 34 aa, Artificial Sequence; identical to SEQ ID NO: 33539
  Cyclic GFR-binding peptide
  MOD_RES (3), (4): Xaa is C or S

SEQ ID NO: 86137 - protein, 35 aa, Artificial Sequence; identical to SEQ ID NO: 33540
  Cyclic GFR-binding peptide
  MOD_RES (2), (3), (35): Xaa is C or S

SEQ ID NO: 86138 - protein, 28 aa, Artificial Sequence
  Cyclic GFR-binding peptide
  MOD_RES (28), (28): Xaa is C or S
LEPISILYLDSANNVVKFKYEDMVVESX

SEQ ID NO: 86139 - protein, 36 aa, Artificial Sequence; identical to SEQ ID NO: 33542
  Cyclic GFR-binding peptide
  MOD_RES (1), (2), (34), (36): Xaa is C or S

SEQ ID NO: 86140 - protein, 31 aa, Artificial Sequence
  Cyclic GFR-binding peptide
  MOD_RES (2), (3): Xaa is C or S
PXXVPEKMSPINILYFDENKNVVYGKIPNMT

SEQ ID NO: 86141 - protein, 34 aa, Artificial Sequence
  Cyclic GFR-binding peptide
  MOD_RES (4), (5): Xaa is C or S
PPTXXVPTRLSATSILYYDSANNVVLRKHRDMVV

SEQ ID NO: 86142 - protein, 38 aa, Artificial Sequence; identical to SEQ ID NO: 33543
  Cyclic GFR-binding peptide
  MOD_RES (4), (5), (36), (38): Xaa is C or S

SEQ ID NO: 86143 - protein, 30 aa, Artificial Sequence
  Cyclic GFR-binding peptide
  MOD_RES (4), (5): Xaa is C or S
ASPXXVSQDLSPINILYFIGKTPKIYGKIP

SEQ ID NO: 86144 - protein, 36 aa, Artificial Sequence; identical to SEQ ID NO: 33547
  Cyclic GFR-binding peptide
  MOD_RES (1), (33), (35): Xaa is C or S

SEQ ID NO: 86145 - protein, 33 aa, Artificial Sequence; identical to SEQ ID NO: 33548
  Cyclic GFR-binding peptide
  MOD_RES (2), (3): Xaa is C or S

SEQ ID NO: 86146 - protein, 34 aa, Artificial Sequence; identical to SEQ ID NO: 33549
  Cyclic GFR-binding peptide
  MOD_RES (1), (33): Xaa is C or S

SEQ ID NO: 86147 - protein, 37 aa, Artificial Sequence; identical to SEQ ID NO: 33550
  Cyclic GFR-binding peptide
  MOD_RES (5), (6): Xaa is C or S

SEQ ID NO: 86148 - protein, 30 aa, Artificial Sequence
  Cyclic GFR-binding peptide
  MOD_RES (1), (1): Xaa is C or S
XVPTKLSATSILYYDKGVVTYLRKHRGMAV

SEQ ID NO: 86149 - protein, 35 aa, Artificial Sequence; identical to SEQ ID NO: 33551
  Cyclic GFR-binding peptide
  MOD_RES (3), (4): Xaa is C or S

SEQ ID NO: 86150 - protein, 36 aa, Artificial Sequence; identical to SEQ ID NO: 33552
  Cyclic GFR-binding peptide
  MOD_RES (3), (4), (36): Xaa is C or S

SEQ ID NO: 86151 - protein, 24 aa, Artificial Sequence
  Cyclic GFR-binding peptide
TKLSATSILYYDKGVVTYLRKHRG

SEQ ID NO: 86152 - protein, 24 aa, Artificial Sequence
  Cyclic GFR-binding peptide
EKMSPINILYFDENKNVVYGKIPN

SEQ ID NO: 86153 - protein, 30 aa, Artificial Sequence
  Cyclic GFR-binding peptide
  MOD_RES (29), (29): Xaa is C or S
RLSPISILYKDSANNVVLKYHYDMVVESXG

SEQ ID NO: 86154 - protein, 32 aa, Artificial Sequence
  Cyclic GFR-binding peptide
  MOD_RES (29), (31): Xaa is C or S
KMSATSILYYDENKNVVLRKHRNMTVESXAXR

SEQ ID NO: 86155 - protein, 24 aa, Artificial Sequence
  Cyclic GFR-binding peptide
KLSATSILYYDKGVVTYLRKHRGM

SEQ ID NO: 86156 - protein, 34 aa, Artificial Sequence; identical to SEQ ID NO: 33553
  Cyclic GFR-binding peptide
  MOD_RES (1), (2), (33): Xaa is C or S

SEQ ID NO: 86157 - protein, 22 aa, Artificial Sequence
  Cyclic GFR-binding peptide
MSPISMLYKNDKQQIILKYHYG

SEQ ID NO: 86158 - protein, 27 aa, Artificial Sequence
  Cyclic GFR-binding peptide
  MOD_RES (26), (26): Xaa is C or S
SPINILYFVGRTPKVYGKIPMVVKSXK

SEQ ID NO: 86159 - protein, 23 aa, Artificial Sequence
  Cyclic GFR-binding peptide
QDLSPINILYFIGKTPKIYGKIP

SEQ ID NO: 86160 - protein, 28 aa, Artificial Sequence
  Cyclic GFR-binding peptide
  MOD_RES (2), (3): Xaa is C or S
AXXVPTKLSATSILYYDKGVVTYLRKHR

SEQ ID NO: 86161 - protein, 33 aa, Artificial Sequence; identical to SEQ ID NO: 33556
  Cyclic GFR-binding peptide
  MOD_RES (1), (2): Xaa is C or S

SEQ ID NO: 86162 - protein, 34 aa, Artificial Sequence; identical to SEQ ID NO: 33557
  Cyclic GFR-binding peptide
  MOD_RES (1), (33): Xaa is C or S

SEQ ID NO: 86163 - protein, 30 aa, Artificial Sequence
  Cyclic GFR-binding peptide
  MOD_RES (28), (30): Xaa is C or S
LSATSILYYDAANNVVLRKHRDMVVEAXGX

SEQ ID NO: 86164 - protein, 23 aa, Artificial Sequence
  Cyclic GFR-binding peptide
MSATSILYYDENKNVVLRKHRNM

SEQ ID NO: 86165 - protein, 26 aa, Artificial Sequence
  Cyclic GFR-binding peptide
PTKMSPISMLYKNDKQQIILKYHYGM

SEQ ID NO: 86166 - protein, 35 aa, Artificial Sequence; identical to SEQ ID NO: 33559
  Cyclic GFR-binding peptide
  MOD_RES (32), (34): Xaa is C or S

SEQ ID NO: 86167 - protein, 31 aa, Artificial Sequence
  Cyclic GFR-binding peptide
  MOD_RES (3), (4): Xaa is C or S
STXXAPVKTSATSMLYYDNGRVLLLRKHRMI

SEQ ID NO: 86168 - protein, 34 aa, Artificial Sequence; identical to SEQ ID NO: 33560
  Cyclic GFR-binding peptide
  MOD_RES (1), (33): Xaa is C or S

SEQ ID NO: 86169 - protein, 25 aa, Artificial Sequence
  Cyclic GFR-binding peptide
PEKMSPINILYFDENKNVVYGKIPN

SEQ ID NO: 86170 - protein, 30 aa, Artificial Sequence
  Cyclic GFR-binding peptide
  MOD_RES (27), (29): Xaa is C or S
SATSILYYDENKNVVLRKHRNMTVESXAXR

SEQ ID NO: 86171 - protein, 39 aa, Artificial Sequence; identical to SEQ ID NO: 33562
  Cyclic GFR-binding peptide
  MOD_RES (4), (5), (37), (39): Xaa is C or S

SEQ ID NO: 86172 - protein, 32 aa, Artificial Sequence; identical to SEQ ID NO: 33563
  Cyclic GFR-binding peptide
  MOD_RES (1), (2): Xaa is C or S

SEQ ID NO: 86173 - protein, 29 aa, Artificial Sequence
  Cyclic GFR-binding peptide
  MOD_RES (28), (28): Xaa is C or S
KTEPISMLYLDNGRVLLKFKYEMIVEEXG

SEQ ID NO: 86174 - protein, 23 aa, Artificial Sequence
  Cyclic GFR-binding peptide
MSPISILYKDENKNVVLKYHYNM

SEQ ID NO: 86175 - protein, 38 aa, Artificial Sequence; identical to SEQ ID NO: 33565
  Cyclic GFR-binding peptide
  MOD_RES (2), (3), (35), (37): Xaa is C or S

SEQ ID NO: 86176 - protein, 37 aa, Artificial Sequence; identical to SEQ ID NO: 33566
  Cyclic GFR-binding peptide
  MOD_RES (1), (2), (34), (36): Xaa is C or S

SEQ ID NO: 86177 - protein, 22 aa, Artificial Sequence
  Cyclic GFR-binding peptide
KTSATSMLYYDNGRVLLLRKHR

SEQ ID NO: 86178 - protein, 32 aa, Artificial Sequence; identical to SEQ ID NO: 33567
  Cyclic GFR-binding peptide
  MOD_RES (1), (32): Xaa is C or S

SEQ ID NO: 86179 - protein, 27 aa, Artificial Sequence
  Cyclic GFR-binding peptide
EKMEPISILYLDENKNVVKFKYENMTV

SEQ ID NO: 86180 - protein, 20 aa, Artificial Sequence
  Cyclic GFR-binding peptide
SPINILYFIGKTPKIYGKIP

SEQ ID NO: 86181 - protein, 30 aa, Artificial Sequence; identical to SEQ ID NO: 887
  Cyclic GFR-binding peptide

SEQ ID NO: 86182 - protein, 33 aa, Artificial Sequence
  Cyclic GFR-binding peptide
  MOD_RES (4), (5): Xaa is C or S
AAPXXVPQALSPINILYFVGRKPKVYGKIPMIV

SEQ ID NO: 86183 - protein, 22 aa, Artificial Sequence
  Cyclic GFR-binding peptide
SPINILYFIGKTPKIYGKIPMI

SEQ ID NO: 86184 - protein, 34 aa, Artificial Sequence; identical to SEQ ID NO: 33573
  Cyclic GFR-binding peptide
  MOD_RES (3), (4): Xaa is C or S

SEQ ID NO: 86185 - protein, 27 aa, Artificial Sequence
  Cyclic GFR-binding peptide
KMSATSMLYYNDKQQIILRKHRGMVVD

SEQ ID NO: 86186 - protein, 40 aa, Artificial Sequence; identical to SEQ ID NO: 33576
  Cyclic GFR-binding peptide
  MOD_RES (6), (7), (39): Xaa is C or S

SEQ ID NO: 86187 - protein, 30 aa, Artificial Sequence
  Cyclic GFR-binding peptide
  MOD_RES (1), (2): Xaa is C or S
XXAPVKTSPISMLYKDNGRVLLLKYHYMIV

SEQ ID NO: 86188 - protein, 31 aa, Artificial Sequence
  Cyclic GFR-binding peptide
  MOD_RES (30), (30): Xaa is C or S
TKMSPISMLYKNDKQQIILKYHYGMVVDRXG

SEQ ID NO: 86189 - protein, 28 aa, Artificial Sequence
  Cyclic GFR-binding peptide
VPQDLSPINILYFVGRTPKVYGKIPMVV

SEQ ID NO: 86190 - protein, 31 aa, Artificial Sequence
  Cyclic GFR-binding peptide
  MOD_RES (28), (30): Xaa is C or S
LSPISILYKDSANNVVLKYHYDMVVESXGXR

SEQ ID NO: 86191 - protein, 30 aa, Artificial Sequence
  Cyclic GFR-binding peptide
  MOD_RES (29), (29): Xaa is C or S
VKTSPISMLYKDNGRVLLLKYHYMIVEEXG

SEQ ID NO: 86192 - protein, 24 aa, Artificial Sequence
  Cyclic GFR-binding peptide
TSATSMLYYDNGRVLLLRKHRMIV

SEQ ID NO: 86193 - protein, 23 aa, Artificial Sequence
  Cyclic GFR-binding peptide
ALSPINILYFVGRKPKVYGKIPM

SEQ ID NO: 86194 - protein, 28 aa, Artificial Sequence
  Cyclic GFR-binding peptide
PTKLSATSILYYDKGVVTYLRKHRGMAV

SEQ ID NO: 86195 - protein, 31 aa, Artificial Sequence
  Cyclic GFR-binding peptide
  MOD_RES (5), (6): Xaa is C or S
TPPTXXVPTRLSATSILYYDSANNVVLRKHR

SEQ ID NO: 86196 - protein, 40 aa, Artificial Sequence; identical to SEQ ID NO: 33580
  Cyclic GFR-binding peptide
  MOD_RES (5), (6), (37), (39): Xaa is C or S

SEQ ID NO: 86197 - protein, 38 aa, Artificial Sequence; identical to SEQ ID NO: 33584
  Cyclic GFR-binding peptide
  MOD_RES (4), (5), (37): Xaa is C or S

SEQ ID NO: 86198 - protein, 22 aa, Artificial Sequence
  Cyclic GFR-binding peptide
SATSMLYYDNGRVLLLRKHRMI

SEQ ID NO: 86199 - protein, 22 aa, Artificial Sequence
  Cyclic GFR-binding peptide
KMSPISILYKDENKNVVLKYHY

SEQ ID NO: 86200 - protein, 22 aa, Artificial Sequence
  Cyclic GFR-binding peptide
SPISMLYKDNGRVLLLKYHYMI

SEQ ID NO: 86201 - protein, 29 aa, Artificial Sequence
  Cyclic GFR-binding peptide
  MOD_RES (1), (2): Xaa is C or S
XXAPVKTSPISMLYKDNGRVLLLKYHYMI

SEQ ID NO: 86202 - protein, 36 aa, Artificial Sequence; identical to SEQ ID NO: 33588
  Cyclic GFR-binding peptide
  MOD_RES (3), (4), (35): Xaa is C or S

SEQ ID NO: 86203 - protein, 31 aa, Artificial Sequence; identical to SEQ ID NO: 33592
  Cyclic GFR-binding peptide

SEQ ID NO: 86204 - protein, 26 aa, Artificial Sequence
  Cyclic GFR-binding peptide
VPEKMSPINILYFDENKNVVYGKIPN

SEQ ID NO: 86205 - protein, 27 aa, Artificial Sequence
  Cyclic GFR-binding peptide
  MOD_RES (1), (2): Xaa is C or S
XXVPTRLSATSILYYDSANNVVLRKHR

SEQ ID NO: 86206 - protein, 23 aa, Artificial Sequence
  Cyclic GFR-binding peptide
VKTSPISMLYKDNGRVLLLKYHY

SEQ ID NO: 86207 - protein, 39 aa, Artificial Sequence; identical to SEQ ID NO: 33593
  Cyclic GFR-binding peptide
  MOD_RES (5), (6), (38): Xaa is C or S

SEQ ID NO: 86208 - protein, 35 aa, Artificial Sequence
  Cyclic GFR-binding peptide
  MOD_RES (5), (6): Xaa is C or S
IPEPXXVPEKMSPINILYFDENKNVVYGKIPNMTV

SEQ ID NO: 86209 - protein, 27 aa, Artificial Sequence
  Cyclic GFR-binding peptide
VPTRLEPISILYLDSANNVVKFKYEDM

SEQ ID NO: 86210 - protein, 28 aa, Artificial Sequence
  Cyclic GFR-binding peptide
  MOD_RES (2), (3): Xaa is C or S
TXXVPTRLEPISILYLDSANNVVKFKYE

SEQ ID NO: 86211 - protein, 25 aa, Artificial Sequence
  Cyclic GFR-binding peptide
TSATSMLYYDNGRVLLLRKHRMIVE

SEQ ID NO: 86212 - protein, 25 aa, Artificial Sequence
  Cyclic GFR-binding peptide
KTEPISMLYLDNGRVLLKFKYEMIV

SEQ ID NO: 86213 - protein, 41 aa, Artificial Sequence; identical to SEQ ID NO: 33595
  Cyclic GFR-binding peptide
  MOD_RES (6), (7), (38), (40): Xaa is C or S

SEQ ID NO: 86214 - protein, 31 aa, Artificial Sequence
  Cyclic GFR-binding peptide
  MOD_RES (29), (31): Xaa is C or S
VKTSATSMLYYDNGRVLLLRKHRMIVEEXGX

SEQ ID NO: 86215 - protein, 26 aa, Artificial Sequence
  Cyclic GFR-binding peptide
LSPINILYFIGKTPKIYGKIPMIVKS

SEQ ID NO: 86216 - protein, 35 aa, Artificial Sequence
  Cyclic GFR-binding peptide
  MOD_RES (5), (6): Xaa is C or S
SAGPXXTPTKMEPISMLYLNDKQQIIKFKYEGMVV

SEQ ID NO: 86217 - protein, 32 aa, Artificial Sequence; identical to SEQ ID NO: 33597
  Cyclic GFR-binding peptide
  MOD_RES (32), (32): Xaa is C or S

SEQ ID NO: 86218 - protein, 26 aa, Artificial Sequence
  Cyclic GFR-binding peptide
  MOD_RES (26), (26): Xaa is C or S
EPISMLYLDNGRVLLKFKYEMIVEEX

SEQ ID NO: 86219 - protein, 31 aa, Artificial Sequence
  Cyclic GFR-binding peptide
  MOD_RES (5), (6): Xaa is C or S
IPEPXXVPEKMSPINILYFDENKNVVYGKIP

SEQ ID NO: 86220 - protein, 26 aa, Artificial Sequence
  Cyclic GFR-binding peptide
KLSATSILYYDKGVVTYLRKHRGMAV

SEQ ID NO: 86221 - protein, 29 aa, Artificial Sequence
  Cyclic GFR-binding peptide
SPINILYFVGRTPKVYGKIPAAAAAAAAA

SEQ ID NO: 86222 - protein, 37 aa, Artificial Sequence; identical to SEQ ID NO: 33600
  Cyclic GFR-binding peptide
  MOD_RES (5), (6): Xaa is C or S

SEQ ID NO: 86223 - protein, 23 aa, Artificial Sequence
  Cyclic GFR-binding peptide
SATSILYYDAANNVVLRKHRDMV

SEQ ID NO: 86224 - protein, 27 aa, Artificial Sequence
  Cyclic GFR-binding peptide
VPEKMSPISILYKDENKNVVLKYHYNM

SEQ ID NO: 86225 - protein, 33 aa, Artificial Sequence; identical to SEQ ID NO: 33601
  Cyclic GFR-binding peptide
  MOD_RES (1), (32): Xaa is C or S

SEQ ID NO: 86226 - protein, 27 aa, Artificial Sequence
  Cyclic GFR-binding peptide
KMSATSILYYDENKNVVLRKHRNMTVE

SEQ ID NO: 86227 - protein, 27 aa, Artificial Sequence
  Cyclic GFR-binding peptide
TRLSPISILYKDSANNVVLKYHYDMVV

SEQ ID NO: 86228 - protein, 36 aa, Artificial Sequence; identical to SEQ ID NO: 33604
  Cyclic GFR-binding peptide
  MOD_RES (5), (6): Xaa is C or S

SEQ ID NO: 86229 - protein, 31 aa, Artificial Sequence; identical to SEQ ID NO: 33605
  Cyclic GFR-binding peptide

SEQ ID NO: 86230 - protein, 37 aa, Artificial Sequence; identical to SEQ ID NO: 33606
  Cyclic GFR-binding peptide
  MOD_RES (4), (5), (37): Xaa is C or S

SEQ ID NO: 86231 - protein, 39 aa, Artificial Sequence; identical to SEQ ID NO: 33607
  Cyclic GFR-binding peptide
  MOD_RES (5), (6), (38): Xaa is C or S

SEQ ID NO: 86232 - protein, 33 aa, Artificial Sequence
  Cyclic GFR-binding peptide
  MOD_RES (30), (32): Xaa is C or S
PQDLSPINILYFVGRTPKVYGKIPMVVKSXKXS

SEQ ID NO: 86233 - protein, 36 aa, Artificial Sequence; identical to SEQ ID NO: 33611
  Cyclic GFR-binding peptide
  MOD_RES (4), (5), (36): Xaa is C or S

SEQ ID NO: 86234 - protein, 33 aa, Artificial Sequence; identical to SEQ ID NO: 33613
  Cyclic GFR-binding peptide
  MOD_RES (1), (33): Xaa is C or S

SEQ ID NO: 86235 - protein, 37 aa, Artificial Sequence; identical to SEQ ID NO: 33614
  Cyclic GFR-binding peptide
  MOD_RES (6), (7): Xaa is C or S

SEQ ID NO: 86236 - protein, 25 aa, Artificial Sequence
  Cyclic GFR-binding peptide
EKMSPINILYFDENKNVVYGKIPNM

SEQ ID NO: 86237 - protein, 28 aa, Artificial Sequence
  Cyclic GFR-binding peptide
VKTSATSMLYYDNGRVLLLRKHRMIVEE

SEQ ID NO: 86238 - protein, 42 aa, Artificial Sequence; identical to SEQ ID NO: 33616
  Cyclic GFR-binding peptide
  MOD_RES (6), (7), (39), (41): Xaa is C or S

SEQ ID NO: 86239 - protein, 25 aa, Artificial Sequence
  Cyclic GFR-binding peptide
TPTKMSATSMLYYNDKQQIILRKHR

SEQ ID NO: 86240 - protein, 25 aa, Artificial Sequence
  Cyclic GFR-binding peptide
SATSMLYYNDKQQIILRKHRGMVVD

SEQ ID NO: 86241 - protein, 25 aa, Artificial Sequence
  Cyclic GFR-binding peptide
SATSILYYDSANNVVLRKHRDMVVE

SEQ ID NO: 86242 - protein, 34 aa, Artificial Sequence
  Cyclic GFR-binding peptide
  MOD_RES (4), (5): Xaa is C or S
PEPXXVPEKMEPISILYLDENKNVVKFKYENMTV

SEQ ID NO: 86243 - protein, 36 aa, Artificial Sequence; identical to SEQ ID NO: 33619
  Cyclic GFR-binding peptide
  MOD_RES (4), (5): Xaa is C or S

SEQ ID NO: 86244 - protein, 31 aa, Artificial Sequence
  Cyclic GFR-binding peptide
  MOD_RES (1), (2): Xaa is C or S
XXVPEKMNAISILYFDENKNVVLKKYRNMTV

SEQ ID NO: 86245 - protein, 32 aa, Artificial Sequence
  Cyclic GFR-binding peptide
  MOD_RES (4), (5): Xaa is C or S
ASPXXVPQDLSPINILYFVGRTPKVYGKIPMV

SEQ ID NO: 86246 - protein, 27 aa, Artificial Sequence
  Cyclic GFR-binding peptide
  MOD_RES (27), (27): Xaa is C or S
NAISILYFDENKNVVLKKYRNMTVESX

SEQ ID NO: 86247 - protein, 37 aa, Artificial Sequence; identical to SEQ ID NO: 33620
  Cyclic GFR-binding peptide
  MOD_RES (2), (3), (35), (37): Xaa is C or S

SEQ ID NO: 86248 - protein, 32 aa, Artificial Sequence
  Cyclic GFR-binding peptide
  MOD_RES (5), (6): Xaa is C or S
SASPXXVPQDLSPINILYFVGRTPKVYGKIPM

SEQ ID NO: 86249 - protein, 37 aa, Artificial Sequence; identical to SEQ ID NO: 33621
  Cyclic GFR-binding peptide
  MOD_RES (4), (5), (36): Xaa is C or S

SEQ ID NO: 86250 - protein, 23 aa, Artificial Sequence
  Cyclic GFR-binding peptide
KTSPISMLYKDNGRVLLLKYHYM

SEQ ID NO: 86251 - protein, 35 aa, Artificial Sequence; identical to SEQ ID NO: 33623
  Cyclic GFR-binding peptide
  MOD_RES (4), (5): Xaa is C or S

SEQ ID NO: 86252 - protein, 32 aa, Artificial Sequence; identical to SEQ ID NO: 33624
  Cyclic GFR-binding peptide
  MOD_RES (31), (31): Xaa is C or S

SEQ ID NO: 86253 - protein, 33 aa, Artificial Sequence
  Cyclic GFR-binding peptide
  MOD_RES (5), (6): Xaa is C or S
VPSTXXAPVKTSPISMLYKDNGRVLLLKYHYMI

SEQ ID NO: 86254 - protein, 34 aa, Artificial Sequence
  Cyclic GFR-binding peptide
  MOD_RES (6), (7): Xaa is C or S
ASASPXXVSQDLSPINILYFIGKTPKIYGKIPMI

SEQ ID NO: 86255 - protein, 33 aa, Artificial Sequence; identical to SEQ ID NO: 33628
  Cyclic GFR-binding peptide
  MOD_RES (2), (3): Xaa is C or S

SEQ ID NO: 86256 - protein, 39 aa, Artificial Sequence; identical to SEQ ID NO: 33629
  Cyclic GFR-binding peptide
  MOD_RES (3), (4), (36), (38): Xaa is C or S

SEQ ID NO: 86257 - protein, 27 aa, Artificial Sequence
  Cyclic GFR-binding peptide
VPEKMSATSILYYDENKNVVLRKHRNM

SEQ ID NO: 86258 - protein, 36 aa, Artificial Sequence; identical to SEQ ID NO: 33630
  Cyclic GFR-binding peptide
  MOD_RES (2), (3), (35): Xaa is C or S

SEQ ID NO: 86259 - protein, 34 aa, Artificial Sequence
  Cyclic GFR-binding peptide
  MOD_RES (5), (6): Xaa is C or S
VPSTXXAPVKTEPISMLYLDNGRVLLKFKYEMIV

SEQ ID NO: 86260 - protein, 35 aa, Artificial Sequence; identical to SEQ ID NO: 33631
  Cyclic GFR-binding peptide
  MOD_RES (3), (4), (35): Xaa is C or S

SEQ ID NO: 86261 - protein, 29 aa, Artificial Sequence
  Cyclic GFR-binding peptide
APVKTSATSMLYYDNGRVLLLRKHRMIVE

SEQ ID NO: 86262 - protein, 33 aa, Artificial Sequence
  Cyclic GFR-binding peptide
  MOD_RES (6), (7): Xaa is C or S
GIPEPXXVPEKMSATSILYYDENKNVVLRKHRN

SEQ ID NO: 86263 - protein, 29 aa, Artificial Sequence
  Cyclic GFR-binding peptide
  MOD_RES (27), (29): Xaa is C or S
SATSILYYDSANNVVLRKHRDMVVESXGX

SEQ ID NO: 86264 - protein, 24 aa, Artificial Sequence
  Cyclic GFR-binding peptide
TEPISMLYLDNGRVLLKFKYEMIV

SEQ ID NO: 86265 - protein, 35 aa, Artificial Sequence; identical to SEQ ID NO: 33636
  Cyclic GFR-binding peptide
  MOD_RES (4), (5): Xaa is C or S

SEQ ID NO: 86266 - protein, 40 aa, Artificial Sequence; identical to SEQ ID NO: 33637
  Cyclic GFR-binding peptide
  MOD_RES (6), (7), (38), (40): Xaa is C or S

SEQ ID NO: 86267 - protein, 32 aa, Artificial Sequence
  Cyclic GFR-binding peptide
  MOD_RES (3), (4): Xaa is C or S
ASXXVPARLSATSILYYDAANNVVLRKHRDMV

SEQ ID NO: 86268 - protein, 27 aa, Artificial Sequence
  Cyclic GFR-binding peptide
  MOD_RES (27), (27): Xaa is C or S
SATSILYYDAANNVVLRKHRDMVVEAX

SEQ ID NO: 86269 - protein, 36 aa, Artificial Sequence
  Cyclic GFR-binding peptide
  MOD_RES (6), (7): Xaa is C or S
GIPEPXXVPEKMSATSILYYDENKNVVLRKHRNMTV

SEQ ID NO: 86270 - protein, 33 aa, Artificial Sequence
  Cyclic GFR-binding peptide
  MOD_RES (6), (7): Xaa is C or S
STPPTXXVPTRLSATSILYYDSANNVVLRKHRD

SEQ ID NO: 86271 - protein, 40 aa, Artificial Sequence; identical to SEQ ID NO: 33640
  Cyclic GFR-binding peptide
  MOD_RES (6), (7), (38), (40): Xaa is C or S

SEQ ID NO: 86272 - protein, 23 aa, Artificial Sequence
  Cyclic GFR-binding peptide
EKMSPINILYFDENKNVVYGKIP

SEQ ID NO: 86273 - protein, 31 aa, Artificial Sequence
  Cyclic GFR-binding peptide
  MOD_RES (30), (30): Xaa is C or S
SQDLSPINILYFIGKTPKIYGKIPMIVKSXK

SEQ ID NO: 86274 - protein, 31 aa, Artificial Sequence
  Cyclic GFR-binding peptide
  MOD_RES (4), (5): Xaa is C or S
ASPXXVPQDLSPINILYFVGRTPKVYGKIPM

SEQ ID NO: 86275 - protein, 34 aa, Artificial Sequence; identical to SEQ ID NO: 33647
  Cyclic GFR-binding peptide
  MOD_RES (3), (4): Xaa is C or S

SEQ ID NO: 86276 - protein, 34 aa, Artificial Sequence; identical to SEQ ID NO: 33648
  Cyclic GFR-binding peptide
  MOD_RES (1), (33): Xaa is C or S

SEQ ID NO: 86277 - protein, 36 aa, Artificial Sequence
  Cyclic GFR-binding peptide
  MOD_RES (6), (7): Xaa is C or S
HVPKPXXAPTKLEPISVLYLDDSSNVIKFKYENMVV

SEQ ID NO: 86278 - protein, 28 aa, Artificial Sequence
  Cyclic GFR-binding peptide
  MOD_RES (1), (2): Xaa is C or S
XXVPEKMSPISILYKDENKNVVLKYHYN

SEQ ID NO: 86279 - protein, 30 aa, Artificial Sequence
  Cyclic GFR-binding peptide
  MOD_RES (1), (2): Xaa is C or S
XXVPEKMSPISILYKDENKNVVLKYHYNMT

SEQ ID NO: 86280 - protein, 30 aa, Artificial Sequence
  Cyclic GFR-binding peptide
  MOD_RES (29), (29): Xaa is C or S
KMSPISMLYKNDKQQIILKYHYGMVVDRXG

SEQ ID NO: 86281 - protein, 27 aa, Artificial Sequence
  Cyclic GFR-binding peptide
KMSPISILYKDENKNVVLKYHYNMTVE

SEQ ID NO: 86282 - protein, 32 aa, Artificial Sequence
  Cyclic GFR-binding peptide
  MOD_RES (6), (7): Xaa is C or S
RVPSTXXAPVKTSATSMLYYDNGRVLLLRKHR

SEQ ID NO: 86283 - protein, 33 aa, Artificial Sequence; identical to SEQ ID NO: 33653
  Cyclic GFR-binding peptide
  MOD_RES (1), (2): Xaa is C or S

SEQ ID NO: 86284 - protein, 28 aa, Artificial Sequence
  Cyclic GFR-binding peptide
  MOD_RES (27), (27): Xaa is C or S
TEPISMLYLDNGRVLLKFKYEMIVEEXG

SEQ ID NO: 86285 - protein, 34 aa, Artificial Sequence; identical to SEQ ID NO: 33655
  Cyclic GFR-binding peptide
  MOD_RES (1), (33): Xaa is C or S

SEQ ID NO: 86286 - protein, 26 aa, Artificial Sequence
  Cyclic GFR-binding peptide
TKLSATSILYYDKGVVTYLRKHRGMA

SEQ ID NO: 86287 - protein, 37 aa, Artificial Sequence; identical to SEQ ID NO: 33658
  Cyclic GFR-binding peptide
  MOD_RES (1), (2), (34), (36): Xaa is C or S

SEQ ID NO: 86288 - protein, 36 aa, Artificial Sequence; identical to SEQ ID NO: 33659
  Cyclic GFR-binding peptide
  MOD_RES (3), (4), (36): Xaa is C or S

SEQ ID NO: 86289 - protein, 34 aa, Artificial Sequence
  Cyclic GFR-binding peptide
  MOD_RES (5), (6): Xaa is C or S
IPEPXXVPEKMEPISILYLDENKNVVKFKYENMT

SEQ ID NO: 86290 - protein, 31 aa, Artificial Sequence
  Cyclic GFR-binding peptide
  MOD_RES (29), (31): Xaa is C or S
VKTEPISMLYLDNGRVLLKFKYEMIVEEXGX

SEQ ID NO: 86291 - protein, 21 aa, Artificial Sequence
  Cyclic GFR-binding peptide
LSPINILYFVGRTPKVYGKIP

SEQ ID NO: 86292 - protein, 35 aa, Artificial Sequence; identical to SEQ ID NO: 33661
  Cyclic GFR-binding peptide
  MOD_RES (1), (2), (34): Xaa is C or S

SEQ ID NO: 86293 - protein, 31 aa, Artificial Sequence
  Cyclic GFR-binding peptide
  MOD_RES (2), (3): Xaa is C or S
PXXVPEKMEPISILYLDENKNVVKFKYENMT

SEQ ID NO: 86294 - protein, 34 aa, Artificial Sequence
  Cyclic GFR-binding peptide
  MOD_RES (5), (6): Xaa is C or S
VPSTXXAPVKTSATSMLYYDNGRVLLLRKHRMIV

SEQ ID NO: 86295 - protein, 25 aa, Artificial Sequence
  Cyclic GFR-binding peptide
PVKTEPISMLYLDNGRVLLKFKYEM

SEQ ID NO: 86296 - protein, 32 aa, Artificial Sequence
  Cyclic GFR-binding peptide
  MOD_RES (31), (31): Xaa is C or S
PEKMSPINILYFDENKNVVYGKIPNMTVESXA

SEQ ID NO: 86297 - protein, 41 aa, Artificial Sequence; identical to SEQ ID NO: 33662
  Cyclic GFR-binding peptide
  MOD_RES (6), (7), (38), (40): Xaa is C or S

SEQ ID NO: 86298 - protein, 22 aa, Artificial Sequence
  Cyclic GFR-binding peptide
KMNAISILYFDENKNVVLKKYR

SEQ ID NO: 86299 - protein, 26 aa, Artificial Sequence
  Cyclic GFR-binding peptide
PQALSPINILYFVGRKPKVYGKIPMI

SEQ ID NO: 86300 - protein, 21 aa, Artificial Sequence
  Cyclic GFR-binding peptide
EPISMLYLNDKQQIIKFKYEG

SEQ ID NO: 86301 - protein, 25 aa, Artificial Sequence
  Cyclic GFR-binding peptide
KTSATSMLYYDNGRVLLLRKHRMIV

SEQ ID NO: 86302 - protein, 33 aa, Artificial Sequence; identical to SEQ ID NO: 33666
  Cyclic GFR-binding peptide
  MOD_RES (2), (3): Xaa is C or S

SEQ ID NO: 86303 - protein, 35 aa, Artificial Sequence
  Cyclic GFR-binding peptide
  MOD_RES (6), (7): Xaa is C or S
GIPEPXXVPEKMSATSILYYDENKNVVLRKHRNMT

SEQ ID NO: 86304 - protein, 28 aa, Artificial Sequence
  Cyclic GFR-binding peptide
  MOD_RES (28), (28): Xaa is C or S
DLSPINILYFIGKTPKIYGKIPMIVKSX

SEQ ID NO: 86305 - protein, 32 aa, Artificial Sequence
  Cyclic GFR-binding peptide
  MOD_RES (2), (3): Xaa is C or S
PXXTPTKMSATSMLYYNDKQQIILRKHRGMVV

SEQ ID NO: 86306 - protein, 33 aa, Artificial Sequence
  Cyclic GFR-binding peptide
  MOD_RES (4), (5): Xaa is C or S
PEPXXVPEKMSPINILYFDENKNVVYGKIPNMT

SEQ ID NO: 86307 - protein, 25 aa, Artificial Sequence
  Cyclic GFR-binding peptide
LSPINILYFVGRKPKVYGKIPMIVR

SEQ ID NO: 86308 - protein, 28 aa, Artificial Sequence
  Cyclic GFR-binding peptide
  MOD_RES (2), (3): Xaa is C or S
PXXVPEKMSPINILYFDENKNVVYGKIP

SEQ ID NO: 86309 - protein, 31 aa, Artificial Sequence
  Cyclic GFR-binding peptide
  MOD_RES (3), (4): Xaa is C or S
GPXXTPTKMEPISMLYLNDKQQIIKFKYEGM

SEQ ID NO: 86310 - protein, 33 aa, Artificial Sequence
  Cyclic GFR-binding peptide
  MOD_RES (5), (6): Xaa is C or S
IPEPXXVPEKMNAISILYFDENKNVVLKKYRNM

SEQ ID NO: 86311 - protein, 40 aa, Artificial Sequence; identical to SEQ ID NO: 33669
  Cyclic GFR-binding peptide
  MOD_RES (4), (5), (37), (39): Xaa is C or S

SEQ ID NO: 86312 - protein, 28 aa, Artificial Sequence
  Cyclic GFR-binding peptide
EKMNAISILYFDENKNVVLKKYRNMTVE

SEQ ID NO: 86313 - protein, 29 aa, Artificial Sequence
  Cyclic GFR-binding peptide
  MOD_RES (28), (28): Xaa is C or S
DLSPINILYFVGRTPKVYGKIPMVVKSXK

SEQ ID NO: 86314 - protein, 30 aa, Artificial Sequence
  Cyclic GFR-binding peptide
  MOD_RES (29), (29): Xaa is C or S
QDLSPINILYFIGKTPKIYGKIPMIVKSXK

SEQ ID NO: 86315 - protein, 24 aa, Artificial Sequence
  Cyclic GFR-binding peptide
VKTSPISMLYKDNGRVLLLKYHYM

SEQ ID NO: 86316 - protein, 39 aa, Artificial Sequence; identical to SEQ ID NO: 33673
  Cyclic GFR-binding peptide
  MOD_RES (3), (4), (36), (38): Xaa is C or S

SEQ ID NO: 86317 - protein, 32 aa, Artificial Sequence
  Cyclic GFR-binding peptide
  MOD_RES (6), (7): Xaa is C or S
GIPEPXXVPEKMSPISILYKDENKNVVLKYHY

SEQ ID NO: 86318 - protein, 36 aa, Artificial Sequence; identical to SEQ ID NO: 33674
  Cyclic GFR-binding peptide
  MOD_RES (2), (3), (34), (36): Xaa is C or S

SEQ ID NO: 86319 - protein, 29 aa, Artificial Sequence
  Cyclic GFR-binding peptide
EPISMLYLDNGRVLLKFKYEAAAAAAAAA

SEQ ID NO: 86320 - protein, 26 aa, Artificial Sequence
  Cyclic GFR-binding peptide
  MOD_RES (1), (1): Xaa is C or S
XAPVKTSPISMLYKDNGRVLLLKYHY

SEQ ID NO: 86321 - protein, 28 aa, Artificial Sequence
  Cyclic GFR-binding peptide
VKTEPISMLYLDNGRVLLKFKYEMIVEE

SEQ ID NO: 86322 - protein, 28 aa, Artificial Sequence
  Cyclic GFR-binding peptide
  MOD_RES (1), (2): Xaa is C or S
XXVPEKMEPISILYLDENKNVVKFKYEN

SEQ ID NO: 86323 - protein, 30 aa, Artificial Sequence
  Cyclic GFR-binding peptide
  MOD_RES (28), (30): Xaa is C or S
MNAISILYFDENKNVVLKKYRNMTVESXAX

SEQ ID NO: 86324 - protein, 35 aa, Artificial Sequence; identical to SEQ ID NO: 33680
  Cyclic GFR-binding peptide
  MOD_RES (1), (2), (33), (35): Xaa is C or S

SEQ ID NO: 86325 - protein, 25 aa, Artificial Sequence
  Cyclic GFR-binding peptide
VPTRLSATSILYYDSANNVVLRKHR

SEQ ID NO: 86326 - protein, 29 aa, Artificial Sequence
  Cyclic GFR-binding peptide
VPQDLSPINILYFVGRTPKVYGKIPMVVK

SEQ ID NO: 86327 - protein, 25 aa, Artificial Sequence
  Cyclic GFR-binding peptide
EPISILYLDSANNVVKFKYEDMVVE

SEQ ID NO: 86328 - protein, 32 aa, Artificial Sequence
  Cyclic GFR-binding peptide
  MOD_RES (6), (7): Xaa is C or S
GIPEPXXVPEKMEPISILYLDENKNVVKFKYE

SEQ ID NO: 86329 - protein, 25 aa, Artificial Sequence
  Cyclic GFR-binding peptide
PVKTSPISMLYKDNGRVLLLKYHYM

SEQ ID NO: 86330 - protein, 30 aa, Artificial Sequence
  Cyclic GFR-binding peptide
  MOD_RES (1), (1): Xaa is C or S
XAPVKTEPISMLYLDNGRVLLKFKYEMIVE

SEQ ID NO: 86331 - protein, 23 aa, Artificial Sequence
  Cyclic GFR-binding peptide
MEPISMLYLNDKQQIIKFKYEGM

SEQ ID NO: 86332 - protein, 25 aa, Artificial Sequence
  Cyclic GFR-binding peptide
VKTEPISMLYLDNGRVLLKFKYEMI

SEQ ID NO: 86333 - protein, 26 aa, Artificial Sequence
  Cyclic GFR-binding peptide
  MOD_RES (26), (26): Xaa is C or S
SPINILYFVGRKPKVYGKIPMIVRSX

SEQ ID NO: 86334 - protein, 29 aa, Artificial Sequence
  Cyclic GFR-binding peptide
  MOD_RES (1), (2): Xaa is C or S
XXTPTKMSATSMLYYNDKQQIILRKHRGM

SEQ ID NO: 86335 - protein, 37 aa, Artificial Sequence; identical to SEQ ID NO: 33681
  Cyclic GFR-binding peptide
  MOD_RES (2), (3), (35), (37): Xaa is C or S

SEQ ID NO: 86336 - protein, 21 aa, Artificial Sequence
  Cyclic GFR-binding peptide
SPISMLYKNDKQQIILKYHYG

SEQ ID NO: 86337 - protein, 23 aa, Artificial Sequence
  Cyclic GFR-binding peptide
LSPINILYFVGRKPKVYGKIPMI

SEQ ID NO: 86338 - protein, 36 aa, Artificial Sequence; identical to SEQ ID NO: 33682
  Cyclic GFR-binding peptide
  MOD_RES (3), (4), (35): Xaa is C or S

SEQ ID NO: 86339 - protein, 36 aa, Artificial Sequence; identical to SEQ ID NO: 33683
  Cyclic GFR-binding peptide
  MOD_RES (4), (5): Xaa is C or S

SEQ ID NO: 86340 - protein, 37 aa, Artificial Sequence; identical to SEQ ID NO: 33684
  Cyclic GFR-binding peptide
  MOD_RES (4), (5), (37): Xaa is C or S

SEQ ID NO: 86341 - protein, 26 aa, Artificial Sequence
  Cyclic GFR-binding peptide
PTRLSPISILYKDSANNVVLKYHYDM

SEQ ID NO: 86342 - protein, 25 aa, Artificial Sequence
  Cyclic GFR-binding peptide
MNAISILYFDENKNVVLKKYRNMTV

SEQ ID NO: 86343 - protein, 33 aa, Artificial Sequence
  Cyclic GFR-binding peptide
  MOD_RES (3), (4): Xaa is C or S
ASXXVPARLSATSILYYDAANNVVLRKHRDMVV

SEQ ID NO: 86344 - protein, 32 aa, Artificial Sequence; identical to SEQ ID NO: 33685
  Cyclic GFR-binding peptide
  MOD_RES (1), (2): Xaa is C or S

SEQ ID NO: 86345 - protein, 32 aa, Artificial Sequence
  Cyclic GFR-binding peptide
  MOD_RES (30), (32): Xaa is C or S
TRLEPISILYLDSANNVVKFKYEDMVVESXGX

SEQ ID NO: 86346 - protein, 28 aa, Artificial Sequence
  Cyclic GFR-binding peptide
EKMSATSILYYDENKNVVLRKHRNMTVE

SEQ ID NO: 86347 - protein, 32 aa, Artificial Sequence
  Cyclic GFR-binding peptide
  MOD_RES (2), (3): Xaa is C or S
PXXVPEKMSPINILYFDENKNVVYGKIPNMTV

SEQ ID NO: 86348 - protein, 34 aa, Artificial Sequence
  Cyclic GFR-binding peptide
  MOD_RES (6), (7): Xaa is C or S
HVPKPXXAPTKLSPISVLYKDDSSNVILKYHYNM

SEQ ID NO: 86349 - protein, 26 aa, Artificial Sequence
  Cyclic GFR-binding peptide
KMSPISILYKDENKNVVLKYHYNMTV

SEQ ID NO: 86350 - protein, 36 aa, Artificial Sequence; identical to SEQ ID NO: 33686
  Cyclic GFR-binding peptide
  MOD_RES (5), (6): Xaa is C or S

SEQ ID NO: 86351 - protein, 33 aa, Artificial Sequence
  Cyclic GFR-binding peptide
  MOD_RES (30), (32): Xaa is C or S
PVKTSPISMLYKDNGRVLLLKYHYMIVEEXGXL

SEQ ID NO: 86352 - protein, 36 aa, Artificial Sequence; identical to SEQ ID NO: 33689
  Cyclic GFR-binding peptide
  MOD_RES (3), (4), (35): Xaa is C or S

SEQ ID NO: 86353 - protein, 32 aa, Artificial Sequence
  Cyclic GFR-binding peptide
  MOD_RES (31), (31): Xaa is C or S
PTKLSATSILYYDKGVVTYLRKHRGMAVSEXG

SEQ ID NO: 86354 - protein, 31 aa, Artificial Sequence
  Cyclic GFR-binding peptide
  MOD_RES (2), (3): Xaa is C or S
TXXVPTRLSATSILYYDSANNVVLRKHRDMV

SEQ ID NO: 86355 - protein, 28 aa, Artificial Sequence
  Cyclic GFR-binding peptide
  MOD_RES (28), (28): Xaa is C or S
MSATSMLYYNDKQQIILRKHRGMVVDRX

SEQ ID NO: 86356 - protein, 27 aa, Artificial Sequence
  Cyclic GFR-binding peptide
PQDLSPINILYFVGRTPKVYGKIPMVV

SEQ ID NO: 86357 - protein, 31 aa, Artificial Sequence
  Cyclic GFR-binding peptide
  MOD_RES (31), (31): Xaa is C or S
PTRLSATSILYYDSANNVVLRKHRDMVVESX

SEQ ID NO: 86358 - protein, 27 aa, Artificial Sequence
  Cyclic GFR-binding peptide
  MOD_RES (27), (27): Xaa is C or S
EPISILYLDSANNVVKFKYEDMVVESX

SEQ ID NO: 86359 - protein, 32 aa, Artificial Sequence
  Cyclic GFR-binding peptide
  MOD_RES (5), (6): Xaa is C or S
SASPXXVSQDLSPINILYFIGKTPKIYGKIPM

SEQ ID NO: 86360 - protein, 30 aa, Artificial Sequence
  Cyclic GFR-binding peptide
PTKMSPISMLYKNDKQQIILKYHYGMVVDR

SEQ ID NO: 86361 - protein, 29 aa, Artificial Sequence
  Cyclic GFR-binding peptide
  MOD_RES (27), (29): Xaa is C or S
LSPINILYFVGRTPKVYGKIPMVVKSXKX

SEQ ID NO: 86362 - protein, 30 aa, Artificial Sequence
  Cyclic GFR-binding peptide
  MOD_RES (1), (2): Xaa is C or S
XXVPTKLSATSILYYDKGVVTYLRKHRGMA

SEQ ID NO: 86363 - protein, 36 aa, Artificial Sequence; identical to SEQ ID NO: 33691
  Cyclic GFR-binding peptide
  MOD_RES (3), (4), (36): Xaa is C or S

SEQ ID NO: 86364 - protein, 40 aa, Artificial Sequence; identical to SEQ ID NO: 33692
  Cyclic GFR-binding peptide
  MOD_RES (4), (5), (37), (39): Xaa is C or S

SEQ ID NO: 86365 - protein, 28 aa, Artificial Sequence
  Cyclic GFR-binding peptide
TRLSATSILYYDSANNVVLRKHRDMVVE

SEQ ID NO: 86366 - protein, 29 aa, Artificial Sequence
  Cyclic GFR-binding peptide
TKMEPISMLYLNDKQQIIKFKYEGMVVDR

SEQ ID NO: 86367 - protein, 29 aa, Artificial Sequence
  Cyclic GFR-binding peptide
  MOD_RES (29), (29): Xaa is C or S
VKTEPISMLYLDNGRVLLKFKYEMIVEEX

SEQ ID NO: 86368 - protein, 37 aa, Artificial Sequence; identical to SEQ ID NO: 33694
  Cyclic GFR-binding peptide
  MOD_RES (2), (3), (35), (37): Xaa is C or S

SEQ ID NO: 86369 - protein, 27 aa, Artificial Sequence
  Cyclic GFR-binding peptide
MSATSMLYYNDKQQIILRKHRGMVVDR

SEQ ID NO: 86370 - protein, 35 aa, Artificial Sequence
  Cyclic GFR-binding peptide
  MOD_RES (5), (6): Xaa is C or S
VPSTXXAPVKTSPISMLYKDNGRVLLLKYHYMIVE

SEQ ID NO: 86371 - protein, 33 aa, Artificial Sequence
  Cyclic GFR-binding peptide
  MOD_RES (30), (32): Xaa is C or S
TRLSATSILYYDSANNVVLRKHRDMVVESXGXR

SEQ ID NO: 86372 - protein, 29 aa, Artificial Sequence
  Cyclic GFR-binding peptide
TKMSATSMLYYNDKQQIILRKHRGMVVDR

SEQ ID NO: 86373 - protein, 41 aa, Artificial Sequence; identical to SEQ ID NO: 33697
  Cyclic GFR-binding peptide
  MOD_RES (6), (7), (39), (41): Xaa is C or S

SEQ ID NO: 86374 - protein, 26 aa, Artificial Sequence
  Cyclic GFR-binding peptide
DLSPINILYFIGKTPKIYGKIPMIVK

SEQ ID NO: 86375 - protein, 35 aa, Artificial Sequence; identical to SEQ ID NO: 33698
  Cyclic GFR-binding peptide
  MOD_RES (32), (34): Xaa is C or S

SEQ ID NO: 86376 - protein, 37 aa, Artificial Sequence; identical to SEQ ID NO: 33699
  Cyclic GFR-binding peptide
  MOD_RES (1), (2), (34), (36): Xaa is C or S

SEQ ID NO: 86377 - protein, 32 aa, Artificial Sequence
  Cyclic GFR-binding peptide
  MOD_RES (4), (5): Xaa is C or S
PEPXXVPEKMNAISILYFDENKNVVLKKYRNM

SEQ ID NO: 86378 - protein, 35 aa, Artificial Sequence
  Cyclic GFR-binding peptide
  MOD_RES (6), (7): Xaa is C or S
GIPEPXXVPEKMEPISILYLDENKNVVKFKYENMT

SEQ ID NO: 86379 - protein, 31 aa, Artificial Sequence
  Cyclic GFR-binding peptide
  MOD_RES (2), (3): Xaa is C or S
PXXVPEKMSATSILYYDENKNVVLRKHRNMT

SEQ ID NO: 86380 - protein, 25 aa, Artificial Sequence
  Cyclic GFR-binding peptide
KMSPINILYFDENKNVVYGKIPNMT

SEQ ID NO: 86381 - protein, 28 aa, Artificial Sequence
  Cyclic GFR-binding peptide
  MOD_RES (27), (27): Xaa is C or S
SATSILYYDAANNVVLRKHRDMVVEAXG

SEQ ID NO: 86382 - protein, 37 aa, Artificial Sequence; identical to SEQ ID NO: 33701
  Cyclic GFR-binding peptide
  MOD_RES (4), (5), (37): Xaa is C or S

SEQ ID NO: 86383 - protein, 24 aa, Artificial Sequence
  Cyclic GFR-binding peptide
VKTEPISMLYLDNGRVLLKFKYEM

SEQ ID NO: 86384 - protein, 31 aa, Artificial Sequence
  Cyclic GFR-binding peptide
  MOD_RES (31), (31): Xaa is C or S
PEKMSPINILYFDENKNVVYGKIPNMTVESX

SEQ ID NO: 86385 - protein, 31 aa, Artificial Sequence
  Cyclic GFR-binding peptide
  MOD_RES (3), (4): Xaa is C or S
STXXAPVKTSPISMLYKDNGRVLLLKYHYMI

SEQ ID NO: 86386 - protein, 35 aa, Artificial Sequence; identical to SEQ ID NO: 33704
  Cyclic GFR-binding peptide
  MOD_RES (2), (3), (35): Xaa is C or S

SEQ ID NO: 86387 - protein, 36 aa, Artificial Sequence; identical to SEQ ID NO: 33705
  Cyclic GFR-binding peptide
  MOD_RES (4), (5): Xaa is C or S

SEQ ID NO: 86388 - protein, 41 aa, Artificial Sequence; identical to SEQ ID NO: 33706
  Cyclic GFR-binding peptide
  MOD_RES (6), (7), (39), (41): Xaa is C or S

SEQ ID NO: 86389 - protein, 21 aa, Artificial Sequence
  Cyclic GFR-binding peptide
SPINILYFIGKTPKIYGKIPM

SEQ ID NO: 86390 - protein, 27 aa, Artificial Sequence
  Cyclic GFR-binding peptide
  MOD_RES (1), (1): Xaa is C or S
XVPTRLSPISILYKDSANNVVLKYHYD

SEQ ID NO: 86391 - protein, 33 aa, Artificial Sequence
  Cyclic GFR-binding peptide
  MOD_RES (3), (4): Xaa is C or S
SPXXVSQDLSPINILYFIGKTPKIYGKIPMIVK

SEQ ID NO: 86392 - protein, 34 aa, Artificial Sequence
  Cyclic GFR-binding peptide
  MOD_RES (5), (6): Xaa is C or S
IPEPXXVPEKMSATSILYYDENKNVVLRKHRNMT

SEQ ID NO: 86393 - protein, 30 aa, Artificial Sequence
  Cyclic GFR-binding peptide
  MOD_RES (3), (4): Xaa is C or S
APXXVPQALSPINILYFVGRKPKVYGKIPM

SEQ ID NO: 86394 - protein, 32 aa, Artificial Sequence; identical to SEQ ID NO: 33709
  Cyclic GFR-binding peptide
  MOD_RES (32), (32): Xaa is C or S

SEQ ID NO: 86395 - protein, 33 aa, Artificial Sequence
  Cyclic GFR-binding peptide
  MOD_RES (3), (4): Xaa is C or S
PTXXVPTRLSPISILYKDSANNVVLKYHYDMVV

SEQ ID NO: 86396 - protein, 36 aa, Artificial Sequence; identical to SEQ ID NO: 33710
  Cyclic GFR-binding peptide
  MOD_RES (1), (2), (34), (36): Xaa is C or S

SEQ ID NO: 86397 - protein, 34 aa, Artificial Sequence
  Cyclic GFR-binding peptide
  MOD_RES (5), (6): Xaa is C or S
APASXXVPARLSATSILYYDAANNVVLRKHRDMV

SEQ ID NO: 86398 - protein, 27 aa, Artificial Sequence
  Cyclic GFR-binding peptide
KLSATSILYYDKGVVTYLRKHRGMAVS

SEQ ID NO: 86399 - protein, 31 aa, Artificial Sequence
  Cyclic GFR-binding peptide
  MOD_RES (3), (4): Xaa is C or S
PTXXVPTRLEPISILYLDSANNVVKFKYEDM

SEQ ID NO: 86400 - protein, 28 aa, Artificial Sequence
  Cyclic GFR-binding peptide
  MOD_RES (1), (1): Xaa is C or S
XVPEKMNAISILYFDENKNVVLKKYRNM

SEQ ID NO: 86401 - protein, 37 aa, Artificial Sequence; identical to SEQ ID NO: 33714
  Cyclic GFR-binding peptide
  MOD_RES (6), (7): Xaa is C or S

SEQ ID NO: 86402 - protein, 35 aa, Artificial Sequence; identical to SEQ ID NO: 33716
  Cyclic GFR-binding peptide
  MOD_RES (1), (2), (33), (35): Xaa is C or S

SEQ ID NO: 86403 - protein, 39 aa, Artificial Sequence; identical to SEQ ID NO: 33717
  Cyclic GFR-binding peptide
  MOD_RES (4), (5), (36), (38): Xaa is C or S

SEQ ID NO: 86404 - protein, 32 aa, Artificial Sequence
  Cyclic GFR-binding peptide
  MOD_RES (30), (32): Xaa is C or S
EKMEPISILYLDENKNVVKFKYENMTVESXAX

SEQ ID NO: 86405 - protein, 29 aa, Artificial Sequence
  Cyclic GFR-binding peptide
  MOD_RES (3), (4): Xaa is C or S
PTXXVPTRLEPISILYLDSANNVVKFKYE

SEQ ID NO: 86406 - protein, 32 aa, Artificial Sequence
  Cyclic GFR-binding peptide
  MOD_RES (31), (31): Xaa is C or S
PEKMNAISILYFDENKNVVLKKYRNMTVESXA

SEQ ID NO: 86407 - protein, 28 aa, Artificial Sequence
  Cyclic GFR-binding peptide
KMNAISILYFDENKNVVLKKYRNMTVES

SEQ ID NO: 86408 - protein, 36 aa, Artificial Sequence
  Cyclic GFR-binding peptide
  MOD_RES (6), (7): Xaa is C or S
ASASPXXVSQDLSPINILYFIGKTPKIYGKIPMIVK

SEQ ID NO: 86409 - protein, 25 aa, Artificial Sequence
  Cyclic GFR-binding peptide
LSATSILYYDKGVVTYLRKHRGMAV

SEQ ID NO: 86410 - protein, 36 aa, Artificial Sequence
  Cyclic GFR-binding peptide
  MOD_RES (6), (7): Xaa is C or S
HVPKPXXAPTKLSATSVLYYDDSSNVILRKHRNMVV

SEQ ID NO: 86411 - protein, 32 aa, Artificial Sequence
  Cyclic GFR-binding peptide
  MOD_RES (30), (32): Xaa is C or S
TRLSPISILYKDSANNVVLKYHYDMVVESXGX

SEQ ID NO: 86412 - protein, 40 aa, Artificial Sequence; identical to SEQ ID NO: 33722
  Cyclic GFR-binding peptide
  MOD_RES (6), (7), (39): Xaa is C or S

SEQ ID NO: 86413 - protein, 30 aa, Artificial Sequence
  Cyclic GFR-binding peptide
  MOD_RES (28), (30): Xaa is C or S
DLSPINILYFIGKTPKIYGKIPMIVKSXKX

SEQ ID NO: 86414 - protein, 34 aa, Artificial Sequence
  Cyclic GFR-binding peptide
  MOD_RES (6), (7): Xaa is C or S
STPPTXXVPTRLSPISILYKDSANNVVLKYHYDM

SEQ ID NO: 86415 - protein, 32 aa, Artificial Sequence
  Cyclic GFR-binding peptide
  MOD_RES (3), (4): Xaa is C or S
SPXXVSQDLSPINILYFIGKTPKIYGKIPMIV

SEQ ID NO: 86416 - protein, 31 aa, Artificial Sequence
  Cyclic GFR-binding peptide
  MOD_RES (28), (30): Xaa is C or S
MSPISMLYKNDKQQIILKYHYGMVVDRXGXS

SEQ ID NO: 86417 - protein, 30 aa, Artificial Sequence
  Cyclic GFR-binding peptide
  MOD_RES (2), (3): Xaa is C or S
TXXAPVKTSPISMLYKDNGRVLLLKYHYMI

SEQ ID NO: 86418 - protein, 29 aa, Artificial Sequence
  Cyclic GFR-binding peptide
  MOD_RES (3), (4): Xaa is C or S
PTXXVPTRLSPISILYKDSANNVVLKYHY

SEQ ID NO: 86419 - protein, 42 aa, Artificial Sequence; identical to SEQ ID NO: 33727
  Cyclic GFR-binding peptide
  MOD_RES (6), (7), (39), (41): Xaa is C or S

SEQ ID NO: 86420 - protein, 35 aa, Artificial Sequence; identical to SEQ ID NO: 33730
  Cyclic GFR-binding peptide
  MOD_RES (1), (2), (33), (35): Xaa is C or S

SEQ ID NO: 86421 - protein, 33 aa, Artificial Sequence; identical to SEQ ID NO: 33731
  Cyclic GFR-binding peptide
  MOD_RES (2), (3): Xaa is C or S

SEQ ID NO: 86422 - protein, 25 aa, Artificial Sequence
  Cyclic GFR-binding peptide
SPISILYKDSANNVVLKYHYDMVVE

SEQ ID NO: 86423 - protein, 31 aa, Artificial Sequence
  Cyclic GFR-binding peptide
  MOD_RES (31), (31): Xaa is C or S
PTRLEPISILYLDSANNVVKFKYEDMVVESX

SEQ ID NO: 86424 - protein, 32 aa, Artificial Sequence
  Cyclic GFR-binding peptide
  MOD_RES (5), (6): Xaa is C or S
VPSTXXAPVKTSPISMLYKDNGRVLLLKYHYM

SEQ ID NO: 86425 - protein, 29 aa, Artificial Sequence
  Cyclic GFR-binding peptide
  MOD_RES (29), (29): Xaa is C or S
KMSPINILYFDENKNVVYGKIPNMTVESX

SEQ ID NO: 86426 - protein, 33 aa, Artificial Sequence
  Cyclic GFR-binding peptide
  MOD_RES (30), (32): Xaa is C or S
PVKTEPISMLYLDNGRVLLKFKYEMIVEEXGXL

SEQ ID NO: 86427 - protein, 26 aa, Artificial Sequence
  Cyclic GFR-binding peptide
  MOD_RES (26), (26): Xaa is C or S
SPINILYFVGRTPKVYGKIPMVVKSX

SEQ ID NO: 86428 - protein, 28 aa, Artificial Sequence
  Cyclic GFR-binding peptide
VKTSPISMLYKDNGRVLLLKYHYMIVEE

SEQ ID NO: 86429 - protein, 24 aa, Artificial Sequence
  Cyclic GFR-binding peptide
MNAISILYFDENKNVVLKKYRNMT

SEQ ID NO: 86430 - protein, 32 aa, Artificial Sequence
  Cyclic GFR-binding peptide
  MOD_RES (5), (6): Xaa is C or S
TPPTXXVPTRLSATSILYYDSANNVVLRKHRD

SEQ ID NO: 86431 - protein, 28 aa, Artificial Sequence
  Cyclic GFR-binding peptide
  MOD_RES (28), (28): Xaa is C or S
MEPISMLYLNDKQQIIKFKYEGMVVDRX

SEQ ID NO: 86432 - protein, 32 aa, Artificial Sequence
  Cyclic GFR-binding peptide
  MOD_RES (5), (6): Xaa is C or S
IPEPXXVPEKMSATSILYYDENKNVVLRKHRN

SEQ ID NO: 86433 - protein, 35 aa, Artificial Sequence; identical to SEQ ID NO: 33745
  Cyclic GFR-binding peptide
  MOD_RES (2), (3), (34): Xaa is C or S

SEQ ID NO: 86434 - protein, 39 aa, Artificial Sequence; identical to SEQ ID NO: 33746
  Cyclic GFR-binding peptide
  MOD_RES (3), (4), (36), (38): Xaa is C or S

SEQ ID NO: 86435 - protein, 28 aa, Artificial Sequence
  Cyclic GFR-binding peptide
VPTRLSATSILYYDSANNVVLRKHRDMV

SEQ ID NO: 86436 - protein, 39 aa, Artificial Sequence; identical to SEQ ID NO: 33747
  Cyclic GFR-binding peptide
  MOD_RES (6), (7), (39): Xaa is C or S

SEQ ID NO: 86437 - protein, 40 aa, Artificial Sequence; identical to SEQ ID NO: 33748
  Cyclic GFR-binding peptide
  MOD_RES (6), (7), (39): Xaa is C or S

SEQ ID NO: 86438 - protein, 25 aa, Artificial Sequence
  Cyclic GFR-binding peptide
EKMSATSILYYDENKNVVLRKHRNM

SEQ ID NO: 86439 - protein, 24 aa, Artificial Sequence
  Cyclic GFR-binding peptide
KMSPISILYKDENKNVVLKYHYNM

SEQ ID NO: 86440 - protein, 31 aa, Artificial Sequence
  Cyclic GFR-binding peptide
  MOD_RES (3), (4): Xaa is C or S
PTXXVPTRLSATSILYYDSANNVVLRKHRDM

SEQ ID NO: 86441 - protein, 25 aa, Artificial Sequence
  Cyclic GFR-binding peptide
TRLSPISILYKDSANNVVLKYHYDM

SEQ ID NO: 86442 - protein, 36 aa, Artificial Sequence; identical to SEQ ID NO: 33750
  Cyclic GFR-binding peptide
  MOD_RES (3), (4), (36): Xaa is C or S

SEQ ID NO: 86443 - protein, 36 aa, Artificial Sequence; identical to SEQ ID NO: 33751
  Cyclic GFR-binding peptide
  MOD_RES (4), (5): Xaa is C or S

SEQ ID NO: 86444 - protein, 40 aa, Artificial Sequence; identical to SEQ ID NO: 33752
  Cyclic GFR-binding peptide
  MOD_RES (4), (5), (37), (39): Xaa is C or S

SEQ ID NO: 86445 - protein, 30 aa, Artificial Sequence
  Cyclic GFR-binding peptide
  MOD_RES (29), (29): Xaa is C or S
RLSATSILYYDSANNVVLRKHRDMVVESXG

SEQ ID NO: 86446 - protein, 32 aa, Artificial Sequence; identical to SEQ ID NO: 33756
  Cyclic GFR-binding peptide
  MOD_RES (1), (32): Xaa is C or S

SEQ ID NO: 86447 - protein, 36 aa, Artificial Sequence; identical to SEQ ID NO: 33760
  Cyclic GFR-binding peptide
  MOD_RES (2), (3), (35): Xaa is C or S

SEQ ID NO: 86448 - protein, 38 aa, Artificial Sequence; identical to SEQ ID NO: 33761
  Cyclic GFR-binding peptide
  MOD_RES (5), (6), (37): Xaa is C or S

SEQ ID NO: 86449 - protein, 36 aa, Artificial Sequence; identical to SEQ ID NO: 33762
  Cyclic GFR-binding peptide
  MOD_RES (5), (6): Xaa is C or S

SEQ ID NO: 86450 - protein, 34 aa, Artificial Sequence; identical to SEQ ID NO: 33764
  Cyclic GFR-binding peptide
  MOD_RES (32), (34): Xaa is C or S

SEQ ID NO: 86451 - protein, 36 aa, Artificial Sequence; identical to SEQ ID NO: 33765
  Cyclic GFR-binding peptide
  MOD_RES (2), (3), (35): Xaa is C or S

SEQ ID NO: 86452 - protein, 32 aa, Artificial Sequence; identical to SEQ ID NO: 33766
  Cyclic GFR-binding peptide
  MOD_RES (1), (2): Xaa is C or S

SEQ ID NO: 86453 - protein, 29 aa, Artificial Sequence
  Cyclic GFR-binding peptide
  MOD_RES (2), (3): Xaa is C or S
PXXVPEKMSPISILYKDENKNVVLKYHYN

SEQ ID NO: 86454 - protein, 39 aa, Artificial Sequence; identical to SEQ ID NO: 33767
  Cyclic GFR-binding peptide
  MOD_RES (5), (6), (38): Xaa is C or S

SEQ ID NO: 86455 - protein, 33 aa, Artificial Sequence; identical to SEQ ID NO: 33768
  Cyclic GFR-binding peptide
  MOD_RES (2), (3): Xaa is C or S

SEQ ID NO: 86456 - protein, 36 aa, Artificial Sequence; identical to SEQ ID NO: 33769
  Cyclic GFR-binding peptide
  MOD_RES (5), (6): Xaa is C or S

SEQ ID NO: 86457 - protein, 33 aa, Artificial Sequence
  Cyclic GFR-binding peptide
  MOD_RES (6), (7): Xaa is C or S
STPPTXXVPTRLEPISILYLDSANNVVKFKYED

SEQ ID NO: 86458 - protein, 33 aa, Artificial Sequence; identical to SEQ ID NO: 33770
  Cyclic GFR-binding peptide
  MOD_RES (1), (2): Xaa is C or S

SEQ ID NO: 86459 - protein, 23 aa, Artificial Sequence
  Cyclic GFR-binding peptide
TKLSATSILYYDKGVVTYLRKHR

SEQ ID NO: 86460 - protein, 26 aa, Artificial Sequence
  Cyclic GFR-binding peptide
VPTRLEPISILYLDSANNVVKFKYED

SEQ ID NO: 86461 - protein, 22 aa, Artificial Sequence
  Cyclic GFR-binding peptide
KMEPISILYLDENKNVVKFKYE

SEQ ID NO: 86462 - protein, 36 aa, Artificial Sequence; identical to SEQ ID NO: 33771
  Cyclic GFR-binding peptide
  MOD_RES (1), (2), (33), (35): Xaa is C or S

SEQ ID NO: 86463 - protein, 25 aa, Artificial Sequence
  Cyclic GFR-binding peptide
DLSPINILYFIGKTPKIYGKIPMIV

SEQ ID NO: 86464 - protein, 27 aa, Artificial Sequence
  Cyclic GFR-binding peptide
LSATSILYYDAANNVVLRKHRDMVVEA

SEQ ID NO: 86465 - protein, 31 aa, Artificial Sequence
  Cyclic GFR-binding peptide
  MOD_RES (3), (4): Xaa is C or S
EPXXVPEKMSPINILYFDENKNVVYGKIPNM

SEQ ID NO: 86466 - protein, 27 aa, Artificial Sequence
  Cyclic GFR-binding peptide
  MOD_RES (1), (2): Xaa is C or S
XXTPTKMSPISMLYKNDKQQIILKYHY

SEQ ID NO: 86467 - protein, 27 aa, Artificial Sequence
  Cyclic GFR-binding peptide
  MOD_RES (1), (1): Xaa is C or S
XTPTKMSATSMLYYNDKQQIILRKHRG

SEQ ID NO: 86468 - protein, 26 aa, Artificial Sequence
  Cyclic GFR-binding peptide
VPQDLSPINILYFVGRTPKVYGKIPM

SEQ ID NO: 86469 - protein, 36 aa, Artificial Sequence; identical to SEQ ID NO: 33772
  Cyclic GFR-binding peptide
  MOD_RES (1), (2), (34), (36): Xaa is C or S

SEQ ID NO: 86470 - protein, 34 aa, Artificial Sequence; identical to SEQ ID NO: 33773
  Cyclic GFR-binding peptide
  MOD_RES (1), (2), (33): Xaa is C or S

SEQ ID NO: 86471 - protein, 29 aa, Artificial Sequence
  Cyclic GFR-binding peptide
  MOD_RES (2), (3): Xaa is C or S
PXXVPQDLSPINILYFVGRTPKVYGKIPM

SEQ ID NO: 86472 - protein, 34 aa, Artificial Sequence; identical to SEQ ID NO: 33774
  Cyclic GFR-binding peptide
  MOD_RES (2), (3): Xaa is C or S

SEQ ID NO: 86473 - protein, 34 aa, Artificial Sequence; identical to SEQ ID NO: 33775
  Cyclic GFR-binding peptide
  MOD_RES (1), (2), (34): Xaa is C or S

SEQ ID NO: 86474 - protein, 24 aa, Artificial Sequence
  Cyclic GFR-binding peptide
SPINILYFVGRTPKVYGKIPMVVK

SEQ ID NO: 86475 - protein, 30 aa, Artificial Sequence
  Cyclic GFR-binding peptide
  MOD_RES (4), (5): Xaa is C or S
PASXXVPARLSATSILYYDAANNVVLRKHR

SEQ ID NO: 86476 - protein, 37 aa, Artificial Sequence; identical to SEQ ID NO: 33776
  Cyclic GFR-binding peptide
  MOD_RES (6), (7): Xaa is C or S

SEQ ID NO: 86477 - protein, 30 aa, Artificial Sequence
  Cyclic GFR-binding peptide
  MOD_RES (4), (5): Xaa is C or S
PEPXXVPEKMNAISILYFDENKNVVLKKYR

SEQ ID NO: 86478 - protein, 29 aa, Artificial Sequence
  Cyclic GFR-binding peptide
SPISILYKDENKNVVLKYHYAAAAAAAAA

SEQ ID NO: 86479 - protein, 39 aa, Artificial Sequence; identical to SEQ ID NO: 33782
  Cyclic GFR-binding peptide
  MOD_RES (5), (6), (37), (39): Xaa is C or S

SEQ ID NO: 86480 - protein, 27 aa, Artificial Sequence
  Cyclic GFR-binding peptide
PTKMSPISMLYKNDKQQIILKYHYGMV

SEQ ID NO: 86481 - protein, 28 aa, Artificial Sequence
  Cyclic GFR-binding peptide
PVKTSATSMLYYDNGRVLLLRKHRMIVE

SEQ ID NO: 86482 - protein, 33 aa, Artificial Sequence
  Cyclic GFR-binding peptide
  MOD_RES (4), (5): Xaa is C or S
AGPXXTPTKMEPISMLYLNDKQQIIKFKYEGMV

SEQ ID NO: 86483 - protein, 27 aa, Artificial Sequence
  Cyclic GFR-binding peptide
  MOD_RES (1), (2): Xaa is C or S
XXVPTKLSATSILYYDKGVVTYLRKHR

SEQ ID NO: 86484 - protein, 38 aa, Artificial Sequence; identical to SEQ ID NO: 33786
  Cyclic GFR-binding peptide
  MOD_RES (5), (6), (38): Xaa is C or S

SEQ ID NO: 86485 - protein, 29 aa, Artificial Sequence
  Cyclic GFR-binding peptide
ARLSATSILYYDAANNVVLRKHRDMVVEA

SEQ ID NO: 86486 - protein, 29 aa, Artificial Sequence
  Cyclic GFR-binding peptide
  MOD_RES (1), (1): Xaa is C or S
XVPEKMEPISILYLDENKNVVKFKYENMT

SEQ ID NO: 86487 - protein, 32 aa, Artificial Sequence; identical to SEQ ID NO: 33787
  Cyclic GFR-binding peptide
  MOD_RES (1), (2): Xaa is C or S

SEQ ID NO: 86488 - protein, 21 aa, Artificial Sequence
  Cyclic GFR-binding peptide
MNAISILYFDENKNVVLKKYR

SEQ ID NO: 86489 - protein, 30 aa, Artificial Sequence
  Cyclic GFR-binding peptide
  MOD_RES (1), (1): Xaa is C or S
XVPEKMNAISILYFDENKNVVLKKYRNMTV

SEQ ID NO: 86490 - protein, 30 aa, Artificial Sequence
  Cyclic GFR-binding peptide
  MOD_RES (30), (30): Xaa is C or S
EKMNAISILYFDENKNVVLKKYRNMTVESX

SEQ ID NO: 86491 - protein, 29 aa, Artificial Sequence
  Cyclic GFR-binding peptide
  MOD_RES (27), (29): Xaa is C or S
EPISILYLDSANNVVKFKYEDMVVESXGX

SEQ ID NO: 86492 - protein, 26 aa, Artificial Sequence
  Cyclic GFR-binding peptide
PEKMNAISILYFDENKNVVLKKYRNM

SEQ ID NO: 86493 - protein, 28 aa, Artificial Sequence
  Cyclic GFR-binding peptide
TKMSATSMLYYNDKQQIILRKHRGMVVD

SEQ ID NO: 86494 - protein, 23 aa, Artificial Sequence
  Cyclic GFR-binding peptide
LSATSILYYDAANNVVLRKHRDM

SEQ ID NO: 86495 - protein, 24 aa, Artificial Sequence
  Cyclic GFR-binding peptide
RLEPISILYLDSANNVVKFKYEDM

SEQ ID NO: 86496 - protein, 33 aa, Artificial Sequence
  Cyclic GFR-binding peptide
  MOD_RES (30), (32): Xaa is C or S
ARLSATSILYYDAANNVVLRKHRDMVVEAXGXR

SEQ ID NO: 86497 - protein, 25 aa, Artificial Sequence
  Cyclic GFR-binding peptide
KMSPISMLYKNDKQQIILKYHYGMV

SEQ ID NO: 86498 - protein, 30 aa, Artificial Sequence
  Cyclic GFR-binding peptide
  MOD_RES (4), (5): Xaa is C or S
PEPXXVPEKMSPISILYKDENKNVVLKYHY

SEQ ID NO: 86499 - protein, 33 aa, Artificial Sequence
  Cyclic GFR-binding peptide
  MOD_RES (6), (7): Xaa is C or S
HVPKPXXAPTKLSATSVLYYDDSSNVILRKHRN

SEQ ID NO: 86500 - protein, 38 aa, Artificial Sequence; identical to SEQ ID NO: 33793
  Cyclic GFR-binding peptide
  MOD_RES (3), (4), (36), (38): Xaa is C or S

SEQ ID NO: 86501 - protein, 30 aa, Artificial Sequence
  Cyclic GFR-binding peptide
  MOD_RES (3), (4): Xaa is C or S
GPXXTPTKMSPISMLYKNDKQQIILKYHYG

SEQ ID NO: 86502 - protein, 33 aa, Artificial Sequence
  Cyclic GFR-binding peptide
  MOD_RES (5), (6): Xaa is C or S
SAGPXXTPTKMSATSMLYYNDKQQIILRKHRGM

SEQ ID NO: 86503 - protein, 32 aa, Artificial Sequence; identical to SEQ ID NO: 33797
  Cyclic GFR-binding peptide
  MOD_RES (1), (2): Xaa is C or S

SEQ ID NO: 86504 - protein, 28 aa, Artificial Sequence
  Cyclic GFR-binding peptide
  MOD_RES (1), (1): Xaa is C or S
XVPQALSPINILYFVGRKPKVYGKIPMI

SEQ ID NO: 86505 - protein, 31 aa, Artificial Sequence
  Cyclic GFR-binding peptide
  MOD_RES (2), (3): Xaa is C or S
PXXTPTKMSATSMLYYNDKQQIILRKHRGMV

SEQ ID NO: 86506 - protein, 37 aa, Artificial Sequence; identical to SEQ ID NO: 33804
  Cyclic GFR-binding peptide
  MOD_RES (6), (7): Xaa is C or S

SEQ ID NO: 86507 - protein, 32 aa, Artificial Sequence
  Cyclic GFR-binding peptide
  MOD_RES (5), (6): Xaa is C or S
VPSTXXAPVKTEPISMLYLDNGRVLLKFKYEM

SEQ ID NO: 86508 - protein, 28 aa, Artificial Sequence
  Cyclic GFR-binding peptide
PARLSATSILYYDAANNVVLRKHRDMVV

SEQ ID NO: 86509 - protein, 22 aa, Artificial Sequence
  Cyclic GFR-binding peptide
SPINILYFVGRKPKVYGKIPMI

SEQ ID NO: 86510 - protein, 41 aa, Artificial Sequence; identical to SEQ ID NO: 33807
  Cyclic GFR-binding peptide
  MOD_RES (5), (6), (38), (40): Xaa is C or S

SEQ ID NO: 86511 - protein, 24 aa, Artificial Sequence
  Cyclic GFR-binding peptide
EKMNAISILYFDENKNVVLKKYRN

SEQ ID NO: 86512 - protein, 31 aa, Artificial Sequence
  Cyclic GFR-binding peptide
  MOD_RES (1), (2): Xaa is C or S
XXTPTKMEPISMLYLNDKQQIIKFKYEGMVV

SEQ ID NO: 86513 - protein, 24 aa, Artificial Sequence
  Cyclic GFR-binding peptide
SATSILYYDENKNVVLRKHRNMTV

SEQ ID NO: 86514 - protein, 36 aa, Artificial Sequence; identical to SEQ ID NO: 33809
  Cyclic GFR-binding peptide
  MOD_RES (1), (2), (34), (36): Xaa is C or S

SEQ ID NO: 86515 - protein, 32 aa, Artificial Sequence
  Cyclic GFR-binding peptide
  MOD_RES (6), (7): Xaa is C or S
HVPKPXXAPTKLSATSVLYYDDSSNVILRKHR

SEQ ID NO: 86516 - protein, 33 aa, Artificial Sequence; identical to SEQ ID NO: 33810
  Cyclic GFR-binding peptide
  MOD_RES (32), (32): Xaa is C or S

SEQ ID NO: 86517 - protein, 34 aa, Artificial Sequence; identical to SEQ ID NO: 33811
  Cyclic GFR-binding peptide
  MOD_RES (1), (2), (34): Xaa is C or S

SEQ ID NO: 86518 - protein, 30 aa, Artificial Sequence
  Cyclic GFR-binding peptide
  MOD_RES (4), (5): Xaa is C or S
PEPXXVPEKMSATSILYYDENKNVVLRKHR

SEQ ID NO: 86519 - protein, 36 aa, Artificial Sequence; identical to SEQ ID NO: 33812
  Cyclic GFR-binding peptide
  MOD_RES (4), (5): Xaa is C or S

SEQ ID NO: 86520 - protein, 37 aa, Artificial Sequence; identical to SEQ ID NO: 33814
  Cyclic GFR-binding peptide
  MOD_RES (2), (3), (35), (37): Xaa is C or S

SEQ ID NO: 86521 - protein, 26 aa, Artificial Sequence
  Cyclic GFR-binding peptide
PVKTSPISMLYKDNGRVLLLKYHYMI

SEQ ID NO: 86522 - protein, 23 aa, Artificial Sequence
  Cyclic GFR-binding peptide
RLSPISILYKDSANNVVLKYHYD

SEQ ID NO: 86523 - protein, 30 aa, Artificial Sequence
  Cyclic GFR-binding peptide
  MOD_RES (29), (29): Xaa is C or S
KMSPINILYFDENKNVVYGKIPNMTVESXA

SEQ ID NO: 86524 - protein, 37 aa, Artificial Sequence; identical to SEQ ID NO: 33817
  Cyclic GFR-binding peptide
  MOD_RES (2), (3), (34), (36): Xaa is C or S

SEQ ID NO: 86525 - protein, 27 aa, Artificial Sequence
  Cyclic GFR-binding peptide
  MOD_RES (1), (1): Xaa is C or S
XVPTRLEPISILYLDSANNVVKFKYED

SEQ ID NO: 86526 - protein, 29 aa, Artificial Sequence
  Cyclic GFR-binding peptide
PVKTEPISMLYLDNGRVLLKFKYEMIVEE

SEQ ID NO: 86527 - protein, 28 aa, Artificial Sequence
  Cyclic GFR-binding peptide
TKMEPISMLYLNDKQQIIKFKYEGMVVD

SEQ ID NO: 86528 - protein, 30 aa, Artificial Sequence
  Cyclic GFR-binding peptide
  MOD_RES (30), (30): Xaa is C or S
TKMSPISMLYKNDKQQIILKYHYGMVVDRX

SEQ ID NO: 86529 - protein, 41 aa, Artificial Sequence; identical to SEQ ID NO: 33819
  Cyclic GFR-binding peptide
  MOD_RES (5), (6), (38), (40): Xaa is C or S

SEQ ID NO: 86530 - protein, 27 aa, Artificial Sequence
  Cyclic GFR-binding peptide
VPTKLSATSILYYDKGVVTYLRKHRGM

SEQ ID NO: 86531 - protein, 30 aa, Artificial Sequence
  Cyclic GFR-binding peptide
  MOD_RES (1), (1): Xaa is C or S
XVSQDLSPINILYFIGKTPKIYGKIPMIVK

SEQ ID NO: 86532 - protein, 26 aa, Artificial Sequence
  Cyclic GFR-binding peptide
EPISMLYLNDKQQIIKFKYEGMVVDR

SEQ ID NO: 86533 - protein, 32 aa, Artificial Sequence
  Cyclic GFR-binding peptide
  MOD_RES (29), (31): Xaa is C or S
QDLSPINILYFVGRTPKVYGKIPMVVKSXKXS

SEQ ID NO: 86534 - protein, 35 aa, Artificial Sequence
  Cyclic GFR-binding peptide
  MOD_RES (5), (6): Xaa is C or S
ASKAXXVPTKLSATSILYYDKGVVTYLRKHRGMAV

SEQ ID NO: 86535 - protein, 34 aa, Artificial Sequence; identical to SEQ ID NO: 33820
  Cyclic GFR-binding peptide
  MOD_RES (1), (33): Xaa is C or S

SEQ ID NO: 86536 - protein, 29 aa, Artificial Sequence
  Cyclic GFR-binding peptide
VPEKMNAISILYFDENKNVVLKKYRNMTV

SEQ ID NO: 86537 - protein, 36 aa, Artificial Sequence
  Cyclic GFR-binding peptide
  MOD_RES (6), (7): Xaa is C or S
KASKAXXVPTKLSATSILYYDKGVVTYLRKHRGMAV

SEQ ID NO: 86538 - protein, 35 aa, Artificial Sequence
  Cyclic GFR-binding peptide
  MOD_RES (5), (6): Xaa is C or S
APASXXVPARLSATSILYYDAANNVVLRKHRDMVV

SEQ ID NO: 86539 - protein, 22 aa, Artificial Sequence
  Cyclic GFR-binding peptide
MNAISILYFDENKNVVLKKYRN

SEQ ID NO: 86540 - protein, 41 aa, Artificial Sequence; identical to SEQ ID NO: 33827
  Cyclic GFR-binding peptide
  MOD_RES (6), (7), (39), (41): Xaa is C or S

SEQ ID NO: 86541 - protein, 28 aa, Artificial Sequence
  Cyclic GFR-binding peptide
PTKMSATSMLYYNDKQQIILRKHRGMVV

SEQ ID NO: 86542 - protein, 31 aa, Artificial Sequence
  Cyclic GFR-binding peptide
  MOD_RES (30), (30): Xaa is C or S
PVKTEPISMLYLDNGRVLLKFKYEMIVEEXG

SEQ ID NO: 86543 - protein, 29 aa, Artificial Sequence
  Cyclic GFR-binding peptide
EKMSPINILYFDENKNVVYGKIPNMTVES

SEQ ID NO: 86544 - protein, 37 aa, Artificial Sequence; identical to SEQ ID NO: 33830
  Cyclic GFR-binding peptide
  MOD_RES (6), (7): Xaa is C or S

SEQ ID NO: 86545 - protein, 33 aa, Artificial Sequence; identical to SEQ ID NO: 33831
  Cyclic GFR-binding peptide
  MOD_RES (1), (32): Xaa is C or S

SEQ ID NO: 86546 - protein, 32 aa, Artificial Sequence
  Cyclic GFR-binding peptide
  MOD_RES (5), (6): Xaa is C or S
IPEPXXVPEKMNAISILYFDENKNVVLKKYRN

SEQ ID NO: 86547 - protein, 29 aa, Artificial Sequence
  Cyclic GFR-binding peptide
  MOD_RES (3), (4): Xaa is C or S
GPXXTPTKMEPISMLYLNDKQQIIKFKYE

SEQ ID NO: 86548 - protein, 34 aa, Artificial Sequence
  Cyclic GFR-binding peptide
  MOD_RES (4), (5): Xaa is C or S
ASPXXVPQDLSPINILYFVGRTPKVYGKIPMVVK

SEQ ID NO: 86549 - protein, 37 aa, Artificial Sequence; identical to SEQ ID NO: 33833
  Cyclic GFR-binding peptide
  MOD_RES (5), (6), (37): Xaa is C or S

SEQ ID NO: 86550 - protein, 29 aa, Artificial Sequence
  Cyclic GFR-binding peptide
  MOD_RES (27), (29): Xaa is C or S
SPISILYKDENKNVVLKYHYNMTVESXAX

SEQ ID NO: 86551 - protein, 34 aa, Artificial Sequence
  Cyclic GFR-binding peptide
  MOD_RES (31), (33): Xaa is C or S
PTKMSATSMLYYNDKQQIILRKHRGMVVDRXGXS

SEQ ID NO: 86552 - protein, 33 aa, Artificial Sequence; identical to SEQ ID NO: 33834
  Cyclic GFR-binding peptide
  MOD_RES (1), (2): Xaa is C or S

SEQ ID NO: 86553 - protein, 26 aa, Artificial Sequence
  Cyclic GFR-binding peptide
APVKTEPISMLYLDNGRVLLKFKYEM

SEQ ID NO: 86554 - protein, 33 aa, Artificial Sequence; identical to SEQ ID NO: 33835
  Cyclic GFR-binding peptide
  MOD_RES (1), (33): Xaa is C or S

SEQ ID NO: 86555 - protein, 27 aa, Artificial Sequence
  Cyclic GFR-binding peptide
PVKTSATSMLYYDNGRVLLLRKHRMIV

SEQ ID NO: 86556 - protein, 31 aa, Artificial Sequence
  Cyclic GFR-binding peptide
  MOD_RES (1), (2): Xaa is C or S
XXVPTKLSATSILYYDKGVVTYLRKHRGMAV

SEQ ID NO: 86557 - protein, 33 aa, Artificial Sequence
  Cyclic GFR-binding peptide
  MOD_RES (6), (7): Xaa is C or S
KASKAXXVPTKLSATSILYYDKGVVTYLRKHRG

SEQ ID NO: 86558 - protein, 39 aa, Artificial Sequence; identical to SEQ ID NO: 33836
  Cyclic GFR-binding peptide
  MOD_RES (6), (7), (39): Xaa is C or S

SEQ ID NO: 86559 - protein, 31 aa, Artificial Sequence; identical to SEQ ID NO: 33837
  Cyclic GFR-binding peptide
  MOD_RES (1), (1): Xaa is C or S

SEQ ID NO: 86560 - protein, 33 aa, Artificial Sequence
  Cyclic GFR-binding peptide
  MOD_RES (30), (32): Xaa is C or S
EKMSATSILYYDENKNVVLRKHRNMTVESXAXR

SEQ ID NO: 86561 - protein, 38 aa, Artificial Sequence; identical to SEQ ID NO: 33838
  Cyclic GFR-binding peptide
  MOD_RES (6), (7): Xaa is C or S

SEQ ID NO: 86562 - protein, 25 aa, Artificial Sequence
  Cyclic GFR-binding peptide
PTKMEPISMLYLNDKQQIIKFKYEG

SEQ ID NO: 86563 - protein, 25 aa, Artificial Sequence
  Cyclic GFR-binding peptide
TKMSATSMLYYNDKQQIILRKHRGM

SEQ ID NO: 86564 - protein, 29 aa, Artificial Sequence
  Cyclic GFR-binding peptide
SATSMLYYDNGRVLLLRKHRAAAAAAAAA

SEQ ID NO: 86565 - protein, 38 aa, Artificial Sequence; identical to SEQ ID NO: 33841
  Cyclic GFR-binding peptide
  MOD_RES (4), (5), (37): Xaa is C or S

SEQ ID NO: 86566 - protein, 21 aa, Artificial Sequence
  Cyclic GFR-binding peptide
LSATSILYYDAANNVVLRKHR

SEQ ID NO: 86567 - protein, 35 aa, Artificial Sequence
  Cyclic GFR-binding peptide
  MOD_RES (6), (7): Xaa is C or S
STPPTXXVPTRLSPISILYKDSANNVVLKYHYDMV

SEQ ID NO: 86568 - protein, 37 aa, Artificial Sequence; identical to SEQ ID NO: 33844
  Cyclic GFR-binding peptide
  MOD_RES (6), (7): Xaa is C or S

SEQ ID NO: 86569 - protein, 31 aa, Artificial Sequence
  Cyclic GFR-binding peptide
  MOD_RES (5), (6): Xaa is C or S
SASPXXVSQDLSPINILYFIGKTPKIYGKIP

SEQ ID NO: 86570 - protein, 34 aa, Artificial Sequence
  Cyclic GFR-binding peptide
  MOD_RES (31), (33): Xaa is C or S
PEKMSPISILYKDENKNVVLKYHYNMTVESXAXR

SEQ ID NO: 86571 - protein, 32 aa, Artificial Sequence
  Cyclic GFR-binding peptide
  MOD_RES (31), (31): Xaa is C or S
PTKMSATSMLYYNDKQQIILRKHRGMVVDRXG

SEQ ID NO: 86572 - protein, 38 aa, Artificial Sequence; identical to SEQ ID NO: 33846
  Cyclic GFR-binding peptide
  MOD_RES (4), (5), (37): Xaa is C or S

SEQ ID NO: 86573 - protein, 30 aa, Artificial Sequence
  Cyclic GFR-binding peptide
PEKMSATSILYYDENKNVVLRKHRNMTVES

SEQ ID NO: 86574 - protein, 37 aa, Artificial Sequence; identical to SEQ ID NO: 33847
  Cyclic GFR-binding peptide
  MOD_RES (2), (3), (35), (37): Xaa is C or S

SEQ ID NO: 86575 - protein, 23 aa, Artificial Sequence
  Cyclic GFR-binding peptide
EPISILYLDSANNVVKFKYEDMV

SEQ ID NO: 86576 - protein, 31 aa, Artificial Sequence
  Cyclic GFR-binding peptide
  MOD_RES (30), (30): Xaa is C or S
TRLSPISILYKDSANNVVLKYHYDMVVESXG

SEQ ID NO: 86577 - protein, 38 aa, Artificial Sequence; identical to SEQ ID NO: 33848
  Cyclic GFR-binding peptide
  MOD_RES (4), (5), (37): Xaa is C or S

SEQ ID NO: 86578 - protein, 28 aa, Artificial Sequence
  Cyclic GFR-binding peptide
  MOD_RES (26), (28): Xaa is C or S
SPINILYFIGKTPKIYGKIPMIVKSXKX

SEQ ID NO: 86579 - protein, 32 aa, Artificial Sequence; identical to SEQ ID NO: 33849
  Cyclic GFR-binding peptide
  MOD_RES (1), (32): Xaa is C or S

SEQ ID NO: 86580 - protein, 29 aa, Artificial Sequence
  Cyclic GFR-binding peptide
SPISMLYKDNGRVLLLKYHYAAAAAAAAA

SEQ ID NO: 86581 - protein, 36 aa, Artificial Sequence; identical to SEQ ID NO: 33853
  Cyclic GFR-binding peptide
  MOD_RES (2), (3), (34), (36): Xaa is C or S

SEQ ID NO: 86582 - protein, 28 aa, Artificial Sequence
  Cyclic GFR-binding peptide
  MOD_RES (1), (1): Xaa is C or S
XTPTKMSPISMLYKNDKQQIILKYHYGM

SEQ ID NO: 86583 - protein, 26 aa, Artificial Sequence
  Cyclic GFR-binding peptide
LEPISILYLDSANNVVKFKYEDMVVE

SEQ ID NO: 86584 - protein, 35 aa, Artificial Sequence; identical to SEQ ID NO: 33856
  Cyclic GFR-binding peptide
  MOD_RES (2), (3), (35): Xaa is C or S

SEQ ID NO: 86585 - protein, 33 aa, Artificial Sequence; identical to SEQ ID NO: 33857
  Cyclic GFR-binding peptide
  MOD_RES (1), (32): Xaa is C or S

SEQ ID NO: 86586 - protein, 40 aa, Artificial Sequence; identical to SEQ ID NO: 33859
  Cyclic GFR-binding peptide
  MOD_RES (6), (7), (39): Xaa is C or S

SEQ ID NO: 86587 - protein, 31 aa, Artificial Sequence; identical to SEQ ID NO: 33860
  Cyclic GFR-binding peptide
  MOD_RES (1), (1): Xaa is C or S

SEQ ID NO: 86588 - protein, 33 aa, Artificial Sequence
  Cyclic GFR-binding peptide
  MOD_RES (5), (6): Xaa is C or S
TPPTXXVPTRLSPISILYKDSANNVVLKYHYDM

SEQ ID NO: 86589 - protein, 30 aa, Artificial Sequence
  Cyclic GFR-binding peptide
  MOD_RES (1), (1): Xaa is C or S
XVPTRLSATSILYYDSANNVVLRKHRDMVV

SEQ ID NO: 86590 - protein, 32 aa, Artificial Sequence
  Cyclic GFR-binding peptide
  MOD_RES (30), (32): Xaa is C or S
SQDLSPINILYFIGKTPKIYGKIPMIVKSXKX

SEQ ID NO: 86591 - protein, 34 aa, Artificial Sequence
  Cyclic GFR-binding peptide
  MOD_RES (4), (5): Xaa is C or S
PSTXXAPVKTEPISMLYLDNGRVLLKFKYEMIVE

SEQ ID NO: 86592 - protein, 28 aa, Artificial Sequence
  Cyclic GFR-binding peptide
VSQDLSPINILYFIGKTPKIYGKIPMIV

SEQ ID NO: 86593 - protein, 33 aa, Artificial Sequence
  Cyclic GFR-binding peptide
  MOD_RES (4), (5): Xaa is C or S
PSTXXAPVKTSPISMLYKDNGRVLLLKYHYMIV

SEQ ID NO: 86594 - protein, 31 aa, Artificial Sequence
  Cyclic GFR-binding peptide
  MOD_RES (5), (6): Xaa is C or S
IPEPXXVPEKMSATSILYYDENKNVVLRKHR

SEQ ID NO: 86595 - protein, 32 aa, Artificial Sequence
  Cyclic GFR-binding peptide
  MOD_RES (4), (5): Xaa is C or S
PSTXXAPVKTEPISMLYLDNGRVLLKFKYEMI

SEQ ID NO: 86596 - protein, 27 aa, Artificial Sequence
  Cyclic GFR-binding peptide
TKMEPISMLYLNDKQQIIKFKYEGMVV

SEQ ID NO: 86597 - protein, 30 aa, Artificial Sequence
  Cyclic GFR-binding peptide
  MOD_RES (2), (3): Xaa is C or S
PXXVPQALSPINILYFVGRKPKVYGKIPMI

SEQ ID NO: 86598 - protein, 35 aa, Artificial Sequence; identical to SEQ ID NO: 33866
  Cyclic GFR-binding peptide
  MOD_RES (32), (34): Xaa is C or S

SEQ ID NO: 86599 - protein, 30 aa, Artificial Sequence
  Cyclic GFR-binding peptide
  MOD_RES (28), (30): Xaa is C or S
DLSPINILYFVGRTPKVYGKIPMVVKSXKX

SEQ ID NO: 86600 - protein, 21 aa, Artificial Sequence
  Cyclic GFR-binding peptide
MEPISILYLDENKNVVKFKYE

SEQ ID NO: 86601 - protein, 40 aa, Artificial Sequence; identical to SEQ ID NO: 33867
  Cyclic GFR-binding peptide
  MOD_RES (5), (6), (37), (39): Xaa is C or S

SEQ ID NO: 86602 - protein, 38 aa, Artificial Sequence; identical to SEQ ID NO: 33868
  Cyclic GFR-binding peptide
  MOD_RES (3), (4), (35), (37): Xaa is C or S

SEQ ID NO: 86603 - protein, 28 aa, Artificial Sequence
  Cyclic GFR-binding peptide
  MOD_RES (1), (2): Xaa is C or S
XXTPTKMEPISMLYLNDKQQIIKFKYEG

SEQ ID NO: 86604 - protein, 35 aa, Artificial Sequence; identical to SEQ ID NO: 33871
  Cyclic GFR-binding peptide
  MOD_RES (1), (33), (35): Xaa is C or S

SEQ ID NO: 86605 - protein, 32 aa, Artificial Sequence; identical to SEQ ID NO: 33874
  Cyclic GFR-binding peptide
  MOD_RES (31), (31): Xaa is C or S

SEQ ID NO: 86606 - protein, 31 aa, Artificial Sequence
  Cyclic GFR-binding peptide
  MOD_RES (4), (5): Xaa is C or S
AGPXXTPTKMSATSMLYYNDKQQIILRKHRG

SEQ ID NO: 86607 - protein, 21 aa, Artificial Sequence
  Cyclic GFR-binding peptide
MSATSILYYDENKNVVLRKHR

SEQ ID NO: 86608 - protein, 21 aa, Artificial Sequence
  Cyclic GFR-binding peptide
MSATSMLYYNDKQQIILRKHR

SEQ ID NO: 86609 - protein, 35 aa, Artificial Sequence; identical to SEQ ID NO: 33875
  Cyclic GFR-binding peptide
  MOD_RES (3), (4), (35): Xaa is C or S

SEQ ID NO: 86610 - protein, 33 aa, Artificial Sequence; identical to SEQ ID NO: 33877
  Cyclic GFR-binding peptide
  MOD_RES (2), (3): Xaa is C or S

SEQ ID NO: 86611 - protein, 24 aa, Artificial Sequence
  Cyclic GFR-binding peptide
PTKLSATSILYYDKGVVTYLRKHR

SEQ ID NO: 86612 - protein, 21 aa, Artificial Sequence
  Cyclic GFR-binding peptide
SPISMLYKDNGRVLLLKYHYM

SEQ ID NO: 86613 - protein, 28 aa, Artificial Sequence
  Cyclic GFR-binding peptide
KMSATSILYYDENKNVVLRKHRNMTVES

SEQ ID NO: 86614 - protein, 36 aa, Artificial Sequence; identical to SEQ ID NO: 33880
  Cyclic GFR-binding peptide
  MOD_RES (2), (3), (35): Xaa is C or S

SEQ ID NO: 86615 - protein, 27 aa, Artificial Sequence
  Cyclic GFR-binding peptide
PTKMSATSMLYYNDKQQIILRKHRGMV

SEQ ID NO: 86616 - protein, 37 aa, Artificial Sequence; identical to SEQ ID NO: 33881
  Cyclic GFR-binding peptide
  MOD_RES (3), (4), (36): Xaa is C or S

SEQ ID NO: 86617 - protein, 28 aa, Artificial Sequence
  Cyclic GFR-binding peptide
PEKMEPISILYLDENKNVVKFKYENMTV

SEQ ID NO: 86618 - protein, 39 aa, Artificial Sequence; identical to SEQ ID NO: 33884
  Cyclic GFR-binding peptide
  MOD_RES (6), (7), (39): Xaa is C or S

SEQ ID NO: 86619 - protein, 39 aa, Artificial Sequence; identical to SEQ ID NO: 33888
  Cyclic GFR-binding peptide
  MOD_RES (3), (4), (36), (38): Xaa is C or S

SEQ ID NO: 86620 - protein, 35 aa, Artificial Sequence; identical to SEQ ID NO: 33889
  Cyclic GFR-binding peptide
  MOD_RES (3), (4), (35): Xaa is C or S

SEQ ID NO: 86621 - protein, 29 aa, Artificial Sequence
  Cyclic GFR-binding peptide
SATSILYYDENKNVVLRKHRAAAAAAAAA

SEQ ID NO: 86622 - protein, 25 aa, Artificial Sequence
  Cyclic GFR-binding peptide
EKMEPISILYLDENKNVVKFKYENM

SEQ ID NO: 86623 - protein, 29 aa, Artificial Sequence
  Cyclic GFR-binding peptide
  MOD_RES (1), (2): Xaa is C or S
XXVPQALSPINILYFVGRKPKVYGKIPMI

SEQ ID NO: 86624 - protein, 31 aa, Artificial Sequence
  Cyclic GFR-binding peptide
  MOD_RES (5), (6): Xaa is C or S
SASPXXVPQDLSPINILYFVGRTPKVYGKIP

SEQ ID NO: 86625 - protein, 40 aa, Artificial Sequence; identical to SEQ ID NO: 33892
  Cyclic GFR-binding peptide
  MOD_RES (6), (7), (39): Xaa is C or S

SEQ ID NO: 86626 - protein, 36 aa, Artificial Sequence; identical to SEQ ID NO: 33893
  Cyclic GFR-binding peptide
  MOD_RES (3), (4), (36): Xaa is C or S

SEQ ID NO: 86627 - protein, 34 aa, Artificial Sequence
  Cyclic GFR-binding peptide
  MOD_RES (6), (7): Xaa is C or S
GIPEPXXVPEKMSPISILYKDENKNVVLKYHYNM

SEQ ID NO: 86628 - protein, 21 aa, Artificial Sequence
  Cyclic GFR-binding peptide
MSPISILYKDENKNVVLKYHY

SEQ ID NO: 86629 - protein, 23 aa, Artificial Sequence
  Cyclic GFR-binding peptide
TSPISMLYKDNGRVLLLKYHYMI

SEQ ID NO: 86630 - protein, 39 aa, Artificial Sequence; identical to SEQ ID NO: 33898
  Cyclic GFR-binding peptide
  MOD_RES (3), (4), (36), (38): Xaa is C or S

SEQ ID NO: 86631 - protein, 32 aa, Artificial Sequence
  Cyclic GFR-binding peptide
  MOD_RES (4), (5): Xaa is C or S
PASXXVPARLSATSILYYDAANNVVLRKHRDM

SEQ ID NO: 86632 - protein, 32 aa, Artificial Sequence
  Cyclic GFR-binding peptide
  MOD_RES (6), (7): Xaa is C or S
ASASPXXVPQDLSPINILYFVGRTPKVYGKIP

SEQ ID NO: 86633 - protein, 26 aa, Artificial Sequence
  Cyclic GFR-binding peptide
  MOD_RES (1), (1): Xaa is C or S
XVPEKMSPINILYFDENKNVVYGKIP

SEQ ID NO: 86634 - protein, 31 aa, Artificial Sequence; identical to SEQ ID NO: 33899
  Cyclic GFR-binding peptide

SEQ ID NO: 86635 - protein, 36 aa, Artificial Sequence; identical to SEQ ID NO: 33901
  Cyclic GFR-binding peptide
  MOD_RES (2), (3), (35): Xaa is C or S

SEQ ID NO: 86636 - protein, 33 aa, Artificial Sequence; identical to SEQ ID NO: 33902
  Cyclic GFR-binding peptide
  MOD_RES (2), (3): Xaa is C or S

SEQ ID NO: 86637 - protein, 38 aa, Artificial Sequence; identical to SEQ ID NO: 33900
  Cyclic GFR-binding peptide
  MOD_RES (4), (5), (36), (38): Xaa is C or S

SEQ ID NO: 86638 - protein, 25 aa, Artificial Sequence
  Cyclic GFR-binding peptide
VPARLSATSILYYDAANNVVLRKHR

SEQ ID NO: 86639 - protein, 29 aa, Artificial Sequence
  Cyclic GFR-binding peptide
  MOD_RES (29), (29): Xaa is C or S
KMEPISMLYLNDKQQIIKFKYEGMVVDRX

SEQ ID NO: 86640 - protein, 29 aa, Artificial Sequence
  Cyclic GFR-binding peptide
VSQDLSPINILYFIGKTPKIYGKIPMIVK

SEQ ID NO: 86641 - protein, 26 aa, Artificial Sequence
  Cyclic GFR-binding peptide
KTEPISMLYLDNGRVLLKFKYEMIVE

SEQ ID NO: 86642 - protein, 28 aa, Artificial Sequence
  Cyclic GFR-binding peptide
PVKTSPISMLYKDNGRVLLLKYHYMIVE

SEQ ID NO: 86643 - protein, 35 aa, Artificial Sequence; identical to SEQ ID NO: 33903
  Cyclic GFR-binding peptide
  MOD_RES (32), (34): Xaa is C or S

SEQ ID NO: 86644 - protein, 40 aa, Artificial Sequence; identical to SEQ ID NO: 33907
  Cyclic GFR-binding peptide
  MOD_RES (6), (7), (39): Xaa is C or S

SEQ ID NO: 86645 - protein, 35 aa, Artificial Sequence; identical to SEQ ID NO: 22179
  Cyclic GFR-binding peptide
  MOD_RES (32), (34): Xaa is C or S

SEQ ID NO: 86646 - protein, 32 aa, Artificial Sequence
  Cyclic GFR-binding peptide
  MOD_RES (6), (7): Xaa is C or S
HVPKPXXAPTKLSPISVLYKDDSSNVILKYHY

SEQ ID NO: 86647 - protein, 26 aa, Artificial Sequence
  Cyclic GFR-binding peptide
LSPINILYFVGRTPKVYGKIPMVVKS

SEQ ID NO: 86648 - protein, 25 aa, Artificial Sequence
  Cyclic GFR-binding peptide
DLSPINILYFVGRTPKVYGKIPMVV

SEQ ID NO: 86649 - protein, 37 aa, Artificial Sequence; identical to SEQ ID NO: 33909
  Cyclic GFR-binding peptide
  MOD_RES (2), (3), (34), (36): Xaa is C or S

SEQ ID NO: 86650 - protein, 37 aa, Artificial Sequence; identical to SEQ ID NO: 33910
  Cyclic GFR-binding peptide
  MOD_RES (5), (6), (37): Xaa is C or S

SEQ ID NO: 86651 - protein, 32 aa, Artificial Sequence
  Cyclic GFR-binding peptide
  MOD_RES (30), (32): Xaa is C or S
EKMSATSILYYDENKNVVLRKHRNMTVESXAX

SEQ ID NO: 86652 - protein, 33 aa, Artificial Sequence; identical to SEQ ID NO: 33911
  Cyclic GFR-binding peptide
  MOD_RES (1), (2), (33): Xaa is C or S

SEQ ID NO: 86653 - protein, 23 aa, Artificial Sequence
  Cyclic GFR-binding peptide
KMSPISILYKDENKNVVLKYHYN

SEQ ID NO: 86654 - protein, 28 aa, Artificial Sequence
  Cyclic GFR-binding peptide
VPEKMNAISILYFDENKNVVLKKYRNMT

SEQ ID NO: 86655 - protein, 26 aa, Artificial Sequence
  Cyclic GFR-binding peptide
LSATSILYYDSANNVVLRKHRDMVVE

SEQ ID NO: 86656 - protein, 33 aa, Artificial Sequence; identical to SEQ ID NO: 33912
  Cyclic GFR-binding peptide
  MOD_RES (31), (33): Xaa is C or S

SEQ ID NO: 86657 - protein, 28 aa, Artificial Sequence
  Cyclic GFR-binding peptide
  MOD_RES (1), (1): Xaa is C or S
XAPVKTSPISMLYKDNGRVLLLKYHYMI

SEQ ID NO: 86658 - protein, 32 aa, Artificial Sequence; identical to SEQ ID NO: 33914
  Cyclic GFR-binding peptide
  MOD_RES (1), (2): Xaa is C or S

SEQ ID NO: 86659 - protein, 34 aa, Artificial Sequence; identical to SEQ ID NO: 33913
  Cyclic GFR-binding peptide
  MOD_RES (32), (34): Xaa is C or S

SEQ ID NO: 86660 - protein, 26 aa, Artificial Sequence
  Cyclic GFR-binding peptide
PQDLSPINILYFVGRTPKVYGKIPMV

SEQ ID NO: 86661 - protein, 27 aa, Artificial Sequence
  Cyclic GFR-binding peptide
TPTKMSPISMLYKNDKQQIILKYHYGM

SEQ ID NO: 86662 - protein, 29 aa, Artificial Sequence
  Cyclic GFR-binding peptide
  MOD_RES (28), (28): Xaa is C or S
LSPISILYKDSANNVVLKYHYDMVVESXG

SEQ ID NO: 86663 - protein, 34 aa, Artificial Sequence
  Cyclic GFR-binding peptide
  MOD_RES (4), (5): Xaa is C or S
AGPXXTPTKMEPISMLYLNDKQQIIKFKYEGMVV

SEQ ID NO: 86664 - protein, 23 aa, Artificial Sequence
  Cyclic GFR-binding peptide
SATSILYYDENKNVVLRKHRNMT

SEQ ID NO: 86665 - protein, 35 aa, Artificial Sequence
  Cyclic GFR-binding peptide
  MOD_RES (6), (7): Xaa is C or S
GIPEPXXVPEKMSPINILYFDENKNVVYGKIPNMT

SEQ ID NO: 86666 - protein, 23 aa, Artificial Sequence
  Cyclic GFR-binding peptide
MEPISILYLDENKNVVKFKYENM

SEQ ID NO: 86667 - protein, 38 aa, Artificial Sequence; identical to SEQ ID NO: 33919
  Cyclic GFR-binding peptide
  MOD_RES (4), (5), (37): Xaa is C or S

SEQ ID NO: 86668 - protein, 27 aa, Artificial Sequence
  Cyclic GFR-binding peptide
  MOD_RES (1), (2): Xaa is C or S
XXTPTKMSATSMLYYNDKQQIILRKHR

SEQ ID NO: 86669 - protein, 30 aa, Artificial Sequence
  Cyclic GFR-binding peptide
  MOD_RES (3), (4): Xaa is C or S
EPXXVPEKMSPISILYKDENKNVVLKYHYN

SEQ ID NO: 86670 - protein, 28 aa, Artificial Sequence
  Cyclic GFR-binding peptide
EKMSPINILYFDENKNVVYGKIPNMTVE

SEQ ID NO: 86671 - protein, 34 aa, Artificial Sequence
  Cyclic GFR-binding peptide
  MOD_RES (5), (6): Xaa is C or S
SAAPXXVPQALSPINILYFVGRKPKVYGKIPMIV

SEQ ID NO: 86672 - protein, 26 aa, Artificial Sequence
  Cyclic GFR-binding peptide
PEKMSATSILYYDENKNVVLRKHRNM

SEQ ID NO: 86673 - protein, 32 aa, Artificial Sequence; identical to SEQ ID NO: 33923
  Cyclic GFR-binding peptide
  MOD_RES (32), (32): Xaa is C or S

SEQ ID NO: 86674 - protein, 29 aa, Artificial Sequence
  Cyclic GFR-binding peptide
  MOD_RES (29), (29): Xaa is C or S
RLEPISILYLDSANNVVKFKYEDMVVESX

SEQ ID NO: 86675 - protein, 31 aa, Artificial Sequence
  Cyclic GFR-binding peptide
  MOD_RES (4), (5): Xaa is C or S
PASXXVPARLSATSILYYDAANNVVLRKHRD

SEQ ID NO: 86676 - protein, 34 aa, Artificial Sequence
  Cyclic GFR-binding peptide
  MOD_RES (6), (7): Xaa is C or S
HVPKPXXAPTKLEPISVLYLDDSSNVIKFKYENM

SEQ ID NO: 86677 - protein, 33 aa, Artificial Sequence; identical to SEQ ID NO: 33924
  Cyclic GFR-binding peptide
  MOD_RES (1), (2): Xaa is C or S

SEQ ID NO: 86678 - protein, 23 aa, Artificial Sequence
  Cyclic GFR-binding peptide
QDLSPINILYFVGRTPKVYGKIP

SEQ ID NO: 86679 - protein, 32 aa, Artificial Sequence; identical to SEQ ID NO: 33925
  Cyclic GFR-binding peptide
  MOD_RES (1), (32): Xaa is C or S

SEQ ID NO: 86680 - protein, 26 aa, Artificial Sequence
  Cyclic GFR-binding peptide
  MOD_RES (26), (26): Xaa is C or S
SATSMLYYDNGRVLLLRKHRMIVEEX

SEQ ID NO: 86681 - protein, 22 aa, Artificial Sequence
  Cyclic GFR-binding peptide
SATSILYYDKGVVTYLRKHRGM

SEQ ID NO: 86682 - protein, 31 aa, Artificial Sequence
  Cyclic GFR-binding peptide
  MOD_RES (30), (30): Xaa is C or S
PVKTSATSMLYYDNGRVLLLRKHRMIVEEXG

SEQ ID NO: 86683 - protein, 31 aa, Artificial Sequence
  Cyclic GFR-binding peptide
  MOD_RES (1), (2): Xaa is C or S
XXVPEKMSATSILYYDENKNVVLRKHRNMTV

SEQ ID NO: 86684 - protein, 37 aa, Artificial Sequence; identical to SEQ ID NO: 33929
  Cyclic GFR-binding peptide
  MOD_RES (1), (2), (34), (36): Xaa is C or S

SEQ ID NO: 86685 - protein, 27 aa, Artificial Sequence
  Cyclic GFR-binding peptide
PTKLSATSILYYDKGVVTYLRKHRGMA

SEQ ID NO: 86686 - protein, 36 aa, Artificial Sequence; identical to SEQ ID NO: 33930
  Cyclic GFR-binding peptide
  MOD_RES (3), (4), (35): Xaa is C or S

SEQ ID NO: 86687 - protein, 27 aa, Artificial Sequence
  Cyclic GFR-binding peptide
PQALSPINILYFVGRKPKVYGKIPMIV

SEQ ID NO: 86688 - protein, 26 aa, Artificial Sequence
  Cyclic GFR-binding peptide
KTSPISMLYKDNGRVLLLKYHYMIVE

SEQ ID NO: 86689 - protein, 30 aa, Artificial Sequence
  Cyclic GFR-binding peptide
  MOD_RES (28), (30): Xaa is C or S
LSATSILYYDSANNVVLRKHRDMVVESXGX

SEQ ID NO: 86690 - protein, 29 aa, Artificial Sequence
  Cyclic GFR-binding peptide
  MOD_RES (1), (2): Xaa is C or S
XXTPTKMSPISMLYKNDKQQIILKYHYGM

SEQ ID NO: 86691 - protein, 31 aa, Artificial Sequence
  Cyclic GFR-binding peptide
  MOD_RES (5), (6): Xaa is C or S
IPEPXXVPEKMSPISILYKDENKNVVLKYHY

SEQ ID NO: 86692 - protein, 34 aa, Artificial Sequence; identical to SEQ ID NO: 33932
  Cyclic GFR-binding peptide
  MOD_RES (2), (3): Xaa is C or S

SEQ ID NO: 86693 - protein, 29 aa, Artificial Sequence
  Cyclic GFR-binding peptide
  MOD_RES (29), (29): Xaa is C or S
QDLSPINILYFIGKTPKIYGKIPMIVKSX

SEQ ID NO: 86694 - protein, 31 aa, Artificial Sequence
  Cyclic GFR-binding peptide
  MOD_RES (3), (4): Xaa is C or S
GPXXTPTKMSPISMLYKNDKQQIILKYHYGM

SEQ ID NO: 86695 - protein, 22 aa, Artificial Sequence
  Cyclic GFR-binding peptide
TEPISMLYLDNGRVLLKFKYEM

SEQ ID NO: 86696 - protein, 28 aa, Artificial Sequence
  Cyclic GFR-binding peptide
TKMSPISMLYKNDKQQIILKYHYGMVVD

SEQ ID NO: 86697 - protein, 29 aa, Artificial Sequence
  Cyclic GFR-binding peptide
  MOD_RES (2), (3): Xaa is C or S
PXXTPTKMSATSMLYYNDKQQIILRKHRG

SEQ ID NO: 86698 - protein, 39 aa, Artificial Sequence; identical to SEQ ID NO: 33936
  Cyclic GFR-binding peptide
  MOD_RES (4), (5), (37), (39): Xaa is C or S

SEQ ID NO: 86699 - protein, 38 aa, Artificial Sequence; identical to SEQ ID NO: 33937
  Cyclic GFR-binding peptide
  MOD_RES (6), (7): Xaa is C or S

SEQ ID NO: 86700 - protein, 30 aa, Artificial Sequence
  Cyclic GFR-binding peptide
  MOD_RES (1), (1): Xaa is C or S
XVPEKMSPISILYKDENKNVVLKYHYNMTV

SEQ ID NO: 86701 - protein, 35 aa, Artificial Sequence; identical to SEQ ID NO: 33940
  Cyclic GFR-binding peptide
  MOD_RES (3), (4): Xaa is C or S

SEQ ID NO: 86702 - protein, 24 aa, Artificial Sequence
  Cyclic GFR-binding peptide
KMSPISMLYKNDKQQIILKYHYGM

SEQ ID NO: 86703 - protein, 24 aa, Artificial Sequence
  Cyclic GFR-binding peptide
LSPINILYFVGRTPKVYGKIPMVV

SEQ ID NO: 86704 - protein, 29 aa, Artificial Sequence
  Cyclic GFR-binding peptide
VPTRLSATSILYYDSANNVVLRKHRDMVV

SEQ ID NO: 86705 - protein, 33 aa, Artificial Sequence
  Cyclic GFR-binding peptide
  MOD_RES (31), (33): Xaa is C or S
PTRLSATSILYYDSANNVVLRKHRDMVVESXGX

SEQ ID NO: 86706 - protein, 25 aa, Artificial Sequence
  Cyclic GFR-binding peptide
RLSATSILYYDAANNVVLRKHRDMV

SEQ ID NO: 86707 - protein, 34 aa, Artificial Sequence
  Cyclic GFR-binding peptide
  MOD_RES (4), (5): Xaa is C or S
AGPXXTPTKMSPISMLYKNDKQQIILKYHYGMVV

SEQ ID NO: 86708 - protein, 41 aa, Artificial Sequence; identical to SEQ ID NO: 33943
  Cyclic GFR-binding peptide
  MOD_RES (6), (7), (39), (41): Xaa is C or S

SEQ ID NO: 86709 - protein, 28 aa, Artificial Sequence
  Cyclic GFR-binding peptide
TPTKMEPISMLYLNDKQQIIKFKYEGMV

SEQ ID NO: 86710 - protein, 24 aa, Artificial Sequence
  Cyclic GFR-binding peptide
EKMSATSILYYDENKNVVLRKHRN

SEQ ID NO: 86711 - protein, 27 aa, Artificial Sequence
  Cyclic GFR-binding peptide
  MOD_RES (27), (27): Xaa is C or S
TSATSMLYYDNGRVLLLRKHRMIVEEX

SEQ ID NO: 86712 - protein, 24 aa, Artificial Sequence
  Cyclic GFR-binding peptide
PEKMNAISILYFDENKNVVLKKYR

SEQ ID NO: 86713 - protein, 27 aa, Artificial Sequence
  Cyclic GFR-binding peptide
VPTRLSATSILYYDSANNVVLRKHRDM

SEQ ID NO: 86714 - protein, 34 aa, Artificial Sequence; identical to SEQ ID NO: 33946
  Cyclic GFR-binding peptide
  MOD_RES (32), (34): Xaa is C or S

SEQ ID NO: 86715 - protein, 31 aa, Artificial Sequence
  Cyclic GFR-binding peptide
  MOD_RES (31), (31): Xaa is C or S
PEKMNAISILYFDENKNVVLKKYRNMTVESX

SEQ ID NO: 86716 - protein, 35 aa, Artificial Sequence; identical to SEQ ID NO: 33948
  Cyclic GFR-binding peptide
  MOD_RES (3), (4): Xaa is C or S

SEQ ID NO: 86717 - protein, 38 aa, Artificial Sequence; identical to SEQ ID NO: 33949
  Cyclic GFR-binding peptide
  MOD_RES (5), (6), (37): Xaa is C or S

SEQ ID NO: 86718 - protein, 23 aa, Artificial Sequence
  Cyclic GFR-binding peptide
SPISMLYKDNGRVLLLKYHYMIV

SEQ ID NO: 86719 - protein, 33 aa, Artificial Sequence
  Cyclic GFR-binding peptide
  MOD_RES (6), (7): Xaa is C or S
GIPEPXXVPEKMNAISILYFDENKNVVLKKYRN

SEQ ID NO: 86720 - protein, 34 aa, Artificial Sequence; identical to SEQ ID NO: 33950
  Cyclic GFR-binding peptide
  MOD_RES (2), (3): Xaa is C or S

SEQ ID NO: 86721 - protein, 35 aa, Artificial Sequence; identical to SEQ ID NO: 33953
  Cyclic GFR-binding peptide
  MOD_RES (1), (2), (33), (35): Xaa is C or S

SEQ ID NO: 86722 - protein, 31 aa, Artificial Sequence
  Cyclic GFR-binding peptide
  MOD_RES (2), (3): Xaa is C or S
PXXVSQDLSPINILYFIGKTPKIYGKIPMIV

SEQ ID NO: 86723 - protein, 21 aa, Artificial Sequence
  Cyclic GFR-binding peptide
MSPISMLYKNDKQQIILKYHY

SEQ ID NO: 86724 - protein, 33 aa, Artificial Sequence
  Cyclic GFR-binding peptide
  MOD_RES (5), (6): Xaa is C or S
ASKAXXVPTKLSATSILYYDKGVVTYLRKHRGM

SEQ ID NO: 86725 - protein, 27 aa, Artificial Sequence
  Cyclic GFR-binding peptide
  MOD_RES (27), (27): Xaa is C or S
TSPISMLYKDNGRVLLLKYHYMIVEEX

SEQ ID NO: 86726 - protein, 26 aa, Artificial Sequence
  Cyclic GFR-binding peptide
TRLSATSILYYDSANNVVLRKHRDMV

SEQ ID NO: 86727 - protein, 37 aa, Artificial Sequence; identical to SEQ ID NO: 33957
  Cyclic GFR-binding peptide
  MOD_RES (3), (4), (35), (37): Xaa is C or S

SEQ ID NO: 86728 - protein, 35 aa, Artificial Sequence; identical to SEQ ID NO: 33959
  Cyclic GFR-binding peptide
  MOD_RES (32), (34): Xaa is C or S

SEQ ID NO: 86729 - protein, 33 aa, Artificial Sequence
  Cyclic GFR-binding peptide
  MOD_RES (3), (4): Xaa is C or S
STXXAPVKTEPISMLYLDNGRVLLKFKYEMIVE

SEQ ID NO: 86730 - protein, 34 aa, Artificial Sequence
  Cyclic GFR-binding peptide
  MOD_RES (4), (5): Xaa is C or S
AAPXXVPQALSPINILYFVGRKPKVYGKIPMIVR

SEQ ID NO: 86731 - protein, 30 aa, Artificial Sequence
  Cyclic GFR-binding peptide
  MOD_RES (2), (3): Xaa is C or S
TXXAPVKTSATSMLYYDNGRVLLLRKHRMI

SEQ ID NO: 86732 - protein, 36 aa, Artificial Sequence
  Cyclic GFR-binding peptide
  MOD_RES (6), (7): Xaa is C or S
GSAGPXXTPTKMSATSMLYYNDKQQIILRKHRGMVV

SEQ ID NO: 86733 - protein, 31 aa, Artificial Sequence
  Cyclic GFR-binding peptide
  MOD_RES (4), (5): Xaa is C or S
PPTXXVPTRLSPISILYKDSANNVVLKYHYD

SEQ ID NO: 86734 - protein, 39 aa, Artificial Sequence; identical to SEQ ID NO: 33964
  Cyclic GFR-binding peptide
  MOD_RES (6), (7), (39): Xaa is C or S

SEQ ID NO: 86735 - protein, 32 aa, Artificial Sequence
  Cyclic GFR-binding peptide
  MOD_RES (3), (4): Xaa is C or S
PTXXVPTRLEPISILYLDSANNVVKFKYEDMV

SEQ ID NO: 86736 - protein, 26 aa, Artificial Sequence
  Cyclic GFR-binding peptide
RLSATSILYYDSANNVVLRKHRDMVV

SEQ ID NO: 86737 - protein, 24 aa, Artificial Sequence
  Cyclic GFR-binding peptide
MSPINILYFDENKNVVYGKIPNMT

SEQ ID NO: 86738 - protein, 32 aa, Artificial Sequence
  Cyclic GFR-binding peptide
  MOD_RES (6), (7): Xaa is C or S
STPPTXXVPTRLEPISILYLDSANNVVKFKYE

SEQ ID NO: 86739 - protein, 22 aa, Artificial Sequence
  Cyclic GFR-binding peptide
SPINILYFDENKNVVYGKIPNM

SEQ ID NO: 86740 - protein, 26 aa, Artificial Sequence
  Cyclic GFR-binding peptide
TRLSPISILYKDSANNVVLKYHYDMV

SEQ ID NO: 86741 - protein, 35 aa, Artificial Sequence; identical to SEQ ID NO: 33967
  Cyclic GFR-binding peptide
  MOD_RES (4), (5): Xaa is C or S

SEQ ID NO: 86742 - protein, 20 aa, Artificial Sequence
  Cyclic GFR-binding peptide
SATSILYYDKGVVTYLRKHR

SEQ ID NO: 86743 - protein, 23 aa, Artificial Sequence
  Cyclic GFR-binding peptide
MSPISMLYKNDKQQIILKYHYGM

SEQ ID NO: 86744 - protein, 34 aa, Artificial Sequence
  Cyclic GFR-binding peptide
  MOD_RES (4), (5): Xaa is C or S
PSTXXAPVKTSPISMLYKDNGRVLLLKYHYMIVE

SEQ ID NO: 86745 - protein, 29 aa, Artificial Sequence
  Cyclic GFR-binding peptide
  MOD_RES (3), (4): Xaa is C or S
EPXXVPEKMSATSILYYDENKNVVLRKHR

SEQ ID NO: 86746 - protein, 29 aa, Artificial Sequence
  Cyclic GFR-binding peptide
VPEKMSPISILYKDENKNVVLKYHYNMTV

SEQ ID NO: 86747 - protein, 25 aa, Artificial Sequence
  Cyclic GFR-binding peptide
VKTSATSMLYYDNGRVLLLRKHRMI

SEQ ID NO: 86748 - protein, 22 aa, Artificial Sequence
  Cyclic GFR-binding peptide
SATSILYYDAANNVVLRKHRDM

SEQ ID NO: 86749 - protein, 31 aa, Artificial Sequence; identical to SEQ ID NO: 33970
  Cyclic GFR-binding peptide

SEQ ID NO: 86750 - protein, 34 aa, Artificial Sequence; identical to SEQ ID NO: 33971
  Cyclic GFR-binding peptide
  MOD_RES (3), (4): Xaa is C or S

SEQ ID NO: 86751 - protein, 23 aa, Artificial Sequence
  Cyclic GFR-binding peptide
TRLSATSILYYDSANNVVLRKHR

SEQ ID NO: 86752 - protein, 31 aa, Artificial Sequence
  Cyclic GFR-binding peptide
  MOD_RES (4), (5): Xaa is C or S
PSTXXAPVKTSPISMLYKDNGRVLLLKYHYM

SEQ ID NO: 86753 - protein, 38 aa, Artificial Sequence; identical to SEQ ID NO: 33975
  Cyclic GFR-binding peptide
  MOD_RES (3), (4), (36), (38): Xaa is C or S

SEQ ID NO: 86754 - protein, 42 aa, Artificial Sequence; identical to SEQ ID NO: 33979
  Cyclic GFR-binding peptide
  MOD_RES (6), (7), (39), (41): Xaa is C or S

SEQ ID NO: 86755 - protein, 26 aa, Artificial Sequence
  Cyclic GFR-binding peptide
  MOD_RES (1), (1): Xaa is C or S
XTPTKMSATSMLYYNDKQQIILRKHR

SEQ ID NO: 86756 - protein, 33 aa, Artificial Sequence; identical to SEQ ID NO: 33983
  Cyclic GFR-binding peptide
  MOD_RES (1), (2): Xaa is C or S

SEQ ID NO: 86757 - protein, 26 aa, Artificial Sequence
  Cyclic GFR-binding peptide
SQDLSPINILYFIGKTPKIYGKIPMI

SEQ ID NO: 86758 - protein, 29 aa, Artificial Sequence
  Cyclic GFR-binding peptide
  MOD_RES (3), (4): Xaa is C or S
EPXXVPEKMNAISILYFDENKNVVLKKYR

SEQ ID NO: 86759 - protein, 27 aa, Artificial Sequence
  Cyclic GFR-binding peptide
  MOD_RES (1), (2): Xaa is C or S
XXVPEKMSPINILYFDENKNVVYGKIP

SEQ ID NO: 86760 - protein, 30 aa, Artificial Sequence
  Cyclic GFR-binding peptide
  MOD_RES (27), (29): Xaa is C or S
LSPINILYFVGRTPKVYGKIPMVVKSXKXS

SEQ ID NO: 86761 - protein, 30 aa, Artificial Sequence
  Cyclic GFR-binding peptide
  MOD_RES (2), (3): Xaa is C or S
TXXVPTRLEPISILYLDSANNVVKFKYEDM

SEQ ID NO: 86762 - protein, 30 aa, Artificial Sequence
  Cyclic GFR-binding peptide
PTKLSATSILYYDKGVVTYLRKHRGMAVSE

SEQ ID NO: 86763 - protein, 38 aa, Artificial Sequence; identical to SEQ ID NO: 33988
  Cyclic GFR-binding peptide
  MOD_RES (6), (7): Xaa is C or S

SEQ ID NO: 86764 - protein, 21 aa, Artificial Sequence
  Cyclic GFR-binding peptide
SPISILYKDSANNVVLKYHYD

SEQ ID NO: 86765 - protein, 41 aa, Artificial Sequence; identical to SEQ ID NO: 33991
  Cyclic GFR-binding peptide
  MOD_RES (6), (7), (39), (41): Xaa is C or S

SEQ ID NO: 86766 - protein, 24 aa, Artificial Sequence
  Cyclic GFR-binding peptide
MEPISMLYLNDKQQIIKFKYEGMV

SEQ ID NO: 86767 - protein, 35 aa, Artificial Sequence; identical to SEQ ID NO: 33992
  Cyclic GFR-binding peptide
  MOD_RES (4), (5): Xaa is C or S

SEQ ID NO: 86768 - protein, 29 aa, Artificial Sequence
  Cyclic GFR-binding peptide
  MOD_RES (3), (4): Xaa is C or S
ASXXVPARLSATSILYYDAANNVVLRKHR

SEQ ID NO: 86769 - protein, 39 aa, Artificial Sequence; identical to SEQ ID NO: 33993
  Cyclic GFR-binding peptide
  MOD_RES (4), (5), (37), (39): Xaa is C or S

SEQ ID NO: 86770 - protein, 27 aa, Artificial Sequence
  Cyclic GFR-binding peptide
MSATSILYYDENKNVVLRKHRNMTVES

SEQ ID NO: 86771 - protein, 38 aa, Artificial Sequence; identical to SEQ ID NO: 33994
  Cyclic GFR-binding peptide
  MOD_RES (5), (6), (38): Xaa is C or S

SEQ ID NO: 86772 - protein, 26 aa, Artificial Sequence
  Cyclic GFR-binding peptide
VKTEPISMLYLDNGRVLLKFKYEMIV

SEQ ID NO: 86773 - protein, 32 aa, Artificial Sequence
  Cyclic GFR-binding peptide
  MOD_RES (30), (32): Xaa is C or S
TKLSATSILYYDKGVVTYLRKHRGMAVSEXGX

SEQ ID NO: 86774 - protein, 30 aa, Artificial Sequence
  Cyclic GFR-binding peptide
  MOD_RES (27), (29): Xaa is C or S
TSATSMLYYDNGRVLLLRKHRMIVEEXGXL

SEQ ID NO: 86775 - protein, 30 aa, Artificial Sequence
  Cyclic GFR-binding peptide
  MOD_RES (29), (29): Xaa is C or S
KMEPISMLYLNDKQQIIKFKYEGMVVDRXG

SEQ ID NO: 86776 - protein, 34 aa, Artificial Sequence; identical to SEQ ID NO: 33997
  Cyclic GFR-binding peptide
  MOD_RES (1), (2), (33): Xaa is C or S

SEQ ID NO: 86777 - protein, 33 aa, Artificial Sequence
  Cyclic GFR-binding peptide
  MOD_RES (4), (5): Xaa is C or S
ASPXXVSQDLSPINILYFIGKTPKIYGKIPMIV

SEQ ID NO: 86778 - protein, 29 aa, Artificial Sequence
  Cyclic GFR-binding peptide
PVKTSPISMLYKDNGRVLLLKYHYMIVEE

SEQ ID NO: 86779 - protein, 22 aa, Artificial Sequence
  Cyclic GFR-binding peptide
LSPINILYFVGRTPKVYGKIPM

SEQ ID NO: 86780 - protein, 38 aa, Artificial Sequence; identical to SEQ ID NO: 33999
  Cyclic GFR-binding peptide
  MOD_RES (2), (3), (35), (37): Xaa is C or S

SEQ ID NO: 86781 - protein, 32 aa, Artificial Sequence; identical to SEQ ID NO: 34000
  Cyclic GFR-binding peptide
  MOD_RES (1), (1): Xaa is C or S

SEQ ID NO: 86782 - protein, 29 aa, Artificial Sequence
  Cyclic GFR-binding peptide
  MOD_RES (28), (28): Xaa is C or S
MSPISMLYKNDKQQIILKYHYGMVVDRXG

SEQ ID NO: 86783 - protein, 34 aa, Artificial Sequence; identical to SEQ ID NO: 34002
  Cyclic GFR-binding peptide
  MOD_RES (1), (32), (34): Xaa is C or S

SEQ ID NO: 86784 - protein, 37 aa, Artificial Sequence; identical to SEQ ID NO: 34003
  Cyclic GFR-binding peptide
  MOD_RES (5), (6), (37): Xaa is C or S

SEQ ID NO: 86785 - protein, 37 aa, Artificial Sequence; identical to SEQ ID NO: 34005
  Cyclic GFR-binding peptide
  MOD_RES (2), (3), (35), (37): Xaa is C or S

SEQ ID NO: 86786 - protein, 25 aa, Artificial Sequence
  Cyclic GFR-binding peptide
KMEPISILYLDENKNVVKFKYENMT

SEQ ID NO: 86787 - protein, 26 aa, Artificial Sequence
  Cyclic GFR-binding peptide
PTKMSATSMLYYNDKQQIILRKHRGM

SEQ ID NO: 86788 - protein, 29 aa, Artificial Sequence
  Cyclic GFR-binding peptide
  MOD_RES (29), (29): Xaa is C or S
KMSATSILYYDENKNVVLRKHRNMTVESX

SEQ ID NO: 86789 - protein, 21 aa, Artificial Sequence
  Cyclic GFR-binding peptide
LSATSILYYDSANNVVLRKHR

SEQ ID NO: 86790 - protein, 29 aa, Artificial Sequence
  Cyclic GFR-binding peptide
  MOD_RES (26), (28): Xaa is C or S
SPINILYFIGKTPKIYGKIPMIVKSXKXS

SEQ ID NO: 86791 - protein, 35 aa, Artificial Sequence; identical to SEQ ID NO: 34008
  Cyclic GFR-binding peptide
  MOD_RES (2), (3), (35): Xaa is C or S

SEQ ID NO: 86792 - protein, 33 aa, Artificial Sequence
  Cyclic GFR-binding peptide
  MOD_RES (31), (33): Xaa is C or S
PTKMSATSMLYYNDKQQIILRKHRGMVVDRXGX

SEQ ID NO: 86793 - protein, 29 aa, Artificial Sequence
  Cyclic GFR-binding peptide
  MOD_RES (1), (1): Xaa is C or S
XVPQALSPINILYFVGRKPKVYGKIPMIV

SEQ ID NO: 86794 - protein, 38 aa, Artificial Sequence; identical to SEQ ID NO: 34010
  Cyclic GFR-binding peptide
  MOD_RES (5), (6), (37): Xaa is C or S

SEQ ID NO: 86795 - protein, 25 aa, Artificial Sequence
  Cyclic GFR-binding peptide
MSATSILYYDENKNVVLRKHRNMTV

SEQ ID NO: 86796 - protein, 39 aa, Artificial Sequence; identical to SEQ ID NO: 34011
  Cyclic GFR-binding peptide
  MOD_RES (4), (5), (36), (38): Xaa is C or S

SEQ ID NO: 86797 - protein, 26 aa, Artificial Sequence
  Cyclic GFR-binding peptide
VPARLSATSILYYDAANNVVLRKHRD

SEQ ID NO: 86798 - protein, 27 aa, Artificial Sequence
  Cyclic GFR-binding peptide
  MOD_RES (1), (2): Xaa is C or S
XXVPEKMSPISILYKDENKNVVLKYHY

SEQ ID NO: 86799 - protein, 29 aa, Artificial Sequence
  Cyclic GFR-binding peptide
  MOD_RES (3), (4): Xaa is C or S
APXXVPQALSPINILYFVGRKPKVYGKIP

SEQ ID NO: 86800 - protein, 26 aa, Artificial Sequence
  Cyclic GFR-binding peptide
  MOD_RES (1), (1): Xaa is C or S
XVPEKMEPISILYLDENKNVVKFKYE

SEQ ID NO: 86801 - protein, 33 aa, Artificial Sequence; identical to SEQ ID NO: 34013
  Cyclic GFR-binding peptide
  MOD_RES (1), (2): Xaa is C or S

SEQ ID NO: 86802 - protein, 37 aa, Artificial Sequence; identical to SEQ ID NO: 34014
  Cyclic GFR-binding peptide
  MOD_RES (4), (5), (36): Xaa is C or S

SEQ ID NO: 86803 - protein, 31 aa, Artificial Sequence
  Cyclic GFR-binding peptide
  MOD_RES (5), (6): Xaa is C or S
APASXXVPARLSATSILYYDAANNVVLRKHR

SEQ ID NO: 86804 - protein, 29 aa, Artificial Sequence
  Cyclic GFR-binding peptide
  MOD_RES (28), (28): Xaa is C or S
KTSPISMLYKDNGRVLLLKYHYMIVEEXG

SEQ ID NO: 86805 - protein, 30 aa, Artificial Sequence
  Cyclic GFR-binding peptide
PTKMSATSMLYYNDKQQIILRKHRGMVVDR

SEQ ID NO: 86806 - protein, 25 aa, Artificial Sequence
  Cyclic GFR-binding peptide
TKMEPISMLYLNDKQQIIKFKYEGM

SEQ ID NO: 86807 - protein, 34 aa, Artificial Sequence; identical to SEQ ID NO: 34017
  Cyclic GFR-binding peptide
  MOD_RES (1), (32), (34): Xaa is C or S

SEQ ID NO: 86808 - protein, 31 aa, Artificial Sequence; identical to SEQ ID NO: 34018
  Cyclic GFR-binding peptide

SEQ ID NO: 86809 - protein, 39 aa, Artificial Sequence; identical to SEQ ID NO: 34019
  Cyclic GFR-binding peptide
  MOD_RES (3), (4), (36), (38): Xaa is C or S

SEQ ID NO: 86810 - protein, 32 aa, Artificial Sequence
  Cyclic GFR-binding peptide
  MOD_RES (2), (3): Xaa is C or S
PXXTPTKMSPISMLYKNDKQQIILKYHYGMVV

SEQ ID NO: 86811 - protein, 26 aa, Artificial Sequence
  Cyclic GFR-binding peptide
  MOD_RES (1), (1): Xaa is C or S
XVPQALSPINILYFVGRKPKVYGKIP

SEQ ID NO: 86812 - protein, 23 aa, Artificial Sequence
  Cyclic GFR-binding peptide
TRLSPISILYKDSANNVVLKYHY

SEQ ID NO: 86813 - protein, 38 aa, Artificial Sequence; identical to SEQ ID NO: 34024
  Cyclic GFR-binding peptide
  MOD_RES (6), (7): Xaa is C or S

SEQ ID NO: 86814 - protein, 23 aa, Artificial Sequence
  Cyclic GFR-binding peptide
SPINILYFVGRTPKVYGKIPMVV

SEQ ID NO: 86815 - protein, 22 aa, Artificial Sequence
  Cyclic GFR-binding peptide
KMSPINILYFDENKNVVYGKIP

SEQ ID NO: 86816 - protein, 34 aa, Artificial Sequence; identical to SEQ ID NO: 21701
  Cyclic GFR-binding peptide
  MOD_RES (31), (33): Xaa is C or S

SEQ ID NO: 86817 - protein, 31 aa, Artificial Sequence
  Cyclic GFR-binding peptide
  MOD_RES (5), (6): Xaa is C or S
VPSTXXAPVKTSATSMLYYDNGRVLLLRKHR

SEQ ID NO: 86818 - protein, 30 aa, Artificial Sequence
  Cyclic GFR-binding peptide
  MOD_RES (1), (2): Xaa is C or S
XXAPVKTSATSMLYYDNGRVLLLRKHRMIV

SEQ ID NO: 86819 - protein, 24 aa, Artificial Sequence
  Cyclic GFR-binding peptide
PQALSPINILYFVGRKPKVYGKIP

SEQ ID NO: 86820 - protein, 33 aa, Artificial Sequence
  Cyclic GFR-binding peptide
  MOD_RES (6), (7): Xaa is C or S
GSAGPXXTPTKMSPISMLYKNDKQQIILKYHYG

SEQ ID NO: 86821 - protein, 31 aa, Artificial Sequence
  Cyclic GFR-binding peptide
  MOD_RES (2), (3): Xaa is C or S
TXXVPTRLSPISILYKDSANNVVLKYHYDMV

SEQ ID NO: 86822 - protein, 27 aa, Artificial Sequence
  Cyclic GFR-binding peptide
  MOD_RES (1), (2): Xaa is C or S
XXTPTKMEPISMLYLNDKQQIIKFKYE

SEQ ID NO: 86823 - protein, 30 aa, Artificial Sequence
  Cyclic GFR-binding peptide
  MOD_RES (2), (3): Xaa is C or S
PXXTPTKMSPISMLYKNDKQQIILKYHYGM

SEQ ID NO: 86824 - protein, 30 aa, Artificial Sequence; identical to SEQ ID NO: 34031
  Cyclic GFR-binding peptide

SEQ ID NO: 86825 - protein, 32 aa, Artificial Sequence; identical to SEQ ID NO: 34032
  Cyclic GFR-binding peptide
  MOD_RES (1), (1): Xaa is C or S

SEQ ID NO: 86826 - protein, 28 aa, Artificial Sequence
  Cyclic GFR-binding peptide
VPEKMSATSILYYDENKNVVLRKHRNMT

SEQ ID NO: 86827 - protein, 33 aa, Artificial Sequence
  Cyclic GFR-binding peptide
  MOD_RES (30), (32): Xaa is C or S
EKMNAISILYFDENKNVVLKKYRNMTVESXAXR

SEQ ID NO: 86828 - protein, 33 aa, Artificial Sequence
  Cyclic GFR-binding peptide
  MOD_RES (5), (6): Xaa is C or S
SAGPXXTPTKMEPISMLYLNDKQQIIKFKYEGM

SEQ ID NO: 86829 - protein, 35 aa, Artificial Sequence; identical to SEQ ID NO: 34034
  Cyclic GFR-binding peptide
  MOD_RES (4), (5): Xaa is C or S

SEQ ID NO: 86830 - protein, 29 aa, Artificial Sequence
  Cyclic GFR-binding peptide
TRLSATSILYYDSANNVVLRKHRDMVVES

SEQ ID NO: 86831 - protein, 24 aa, Artificial Sequence
  Cyclic GFR-binding peptide
SPISILYKDENKNVVLKYHYNMTV

SEQ ID NO: 86832 - protein, 27 aa, Artificial Sequence
  Cyclic GFR-binding peptide
TRLSATSILYYDSANNVVLRKHRDMVV

SEQ ID NO: 86833 - protein, 28 aa, Artificial Sequence
  Cyclic GFR-binding peptide
  MOD_RES (28), (28): Xaa is C or S
KTSPISMLYKDNGRVLLLKYHYMIVEEX

SEQ ID NO: 86834 - protein, 31 aa, Artificial Sequence
  Cyclic GFR-binding peptide
  MOD_RES (30), (30): Xaa is C or S
TKLSATSILYYDKGVVTYLRKHRGMAVSEXG

SEQ ID NO: 86835 - protein, 27 aa, Artificial Sequence
  Cyclic GFR-binding peptide
RLSPISILYKDSANNVVLKYHYDMVVE

SEQ ID NO: 86836 - protein, 33 aa, Artificial Sequence; identical to SEQ ID NO: 34039
  Cyclic GFR-binding peptide
  MOD_RES (2), (3): Xaa is C or S

SEQ ID NO: 86837 - protein, 37 aa, Artificial Sequence; identical to SEQ ID NO: 34040
  Cyclic GFR-binding peptide
  MOD_RES (4), (5), (37): Xaa is C or S

SEQ ID NO: 86838 - protein, 30 aa, Artificial Sequence
  Cyclic GFR-binding peptide
  MOD_RES (1), (2): Xaa is C or S
XXVPEKMSATSILYYDENKNVVLRKHRNMT

SEQ ID NO: 86839 - protein, 42 aa, Artificial Sequence; identical to SEQ ID NO: 34041
  Cyclic GFR-binding peptide
  MOD_RES (6), (7), (39), (41): Xaa is C or S

SEQ ID NO: 86840 - protein, 28 aa, Artificial Sequence
  Cyclic GFR-binding peptide
RLSATSILYYDSANNVVLRKHRDMVVES

SEQ ID NO: 86841 - protein, 30 aa, Artificial Sequence; identical to SEQ ID NO: 34044
  Cyclic GFR-binding peptide

SEQ ID NO: 86842 - protein, 38 aa, Artificial Sequence; identical to SEQ ID NO: 34045
  Cyclic GFR-binding peptide
  MOD_RES (4), (5), (36), (38): Xaa is C or S

SEQ ID NO: 86843 - protein, 23 aa, Artificial Sequence
  Cyclic GFR-binding peptide
KLSATSILYYDKGVVTYLRKHRG

SEQ ID NO: 86844 - protein, 24 aa, Artificial Sequence
  Cyclic GFR-binding peptide
SPINILYFDENKNVVYGKIPNMTV

SEQ ID NO: 86845 - protein, 28 aa, Artificial Sequence
  Cyclic GFR-binding peptide
  MOD_RES (27), (27): Xaa is C or S
EPISILYLDSANNVVKFKYEDMVVESXG

SEQ ID NO: 86846 - protein, 25 aa, Artificial Sequence
  Cyclic GFR-binding peptide
EPISMLYLDNGRVLLKFKYEMIVEE

SEQ ID NO: 86847 - protein, 32 aa, Artificial Sequence; identical to SEQ ID NO: 34047
  Cyclic GFR-binding peptide
  MOD_RES (31), (31): Xaa is C or S

SEQ ID NO: 86848 - protein, 37 aa, Artificial Sequence; identical to SEQ ID NO: 34048
  Cyclic GFR-binding peptide
  MOD_RES (2), (3), (35), (37): Xaa is C or S

SEQ ID NO: 86849 - protein, 30 aa, Artificial Sequence
  Cyclic GFR-binding peptide
  MOD_RES (4), (5): Xaa is C or S
PEPXXVPEKMEPISILYLDENKNVVKFKYE

SEQ ID NO: 86850 - protein, 28 aa, Artificial Sequence
  Cyclic GFR-binding peptide
  MOD_RES (28), (28): Xaa is C or S
MEPISILYLDENKNVVKFKYENMTVESX

SEQ ID NO: 86851 - protein, 27 aa, Artificial Sequence
  Cyclic GFR-binding peptide
RLEPISILYLDSANNVVKFKYEDMVVE

SEQ ID NO: 86852 - protein, 32 aa, Artificial Sequence
  Cyclic GFR-binding peptide
  MOD_RES (2), (3): Xaa is C or S
SXXVPARLSATSILYYDAANNVVLRKHRDMVV

SEQ ID NO: 86853 - protein, 31 aa, Artificial Sequence; identical to SEQ ID NO: 34049
  Cyclic GFR-binding peptide

SEQ ID NO: 86854 - protein, 21 aa, Artificial Sequence
  Cyclic GFR-binding peptide
LSPISILYKDSANNVVLKYHY

SEQ ID NO: 86855 - protein, 33 aa, Artificial Sequence; identical to SEQ ID NO: 34051
  Cyclic GFR-binding peptide
  MOD_RES (31), (33): Xaa is C or S

SEQ ID NO: 86856 - protein, 31 aa, Artificial Sequence
  Cyclic GFR-binding peptide
  MOD_RES (5), (6): Xaa is C or S
SAGPXXTPTKMSATSMLYYNDKQQIILRKHR

SEQ ID NO: 86857 - protein, 29 aa, Artificial Sequence
  Cyclic GFR-binding peptide
  MOD_RES (27), (29): Xaa is C or S
NAISILYFDENKNVVLKKYRNMTVESXAX

SEQ ID NO: 86858 - protein, 37 aa, Artificial Sequence; identical to SEQ ID NO: 34053
  Cyclic GFR-binding peptide
  MOD_RES (6), (7): Xaa is C or S

SEQ ID NO: 86859 - protein, 25 aa, Artificial Sequence
  Cyclic GFR-binding peptide
PARLSATSILYYDAANNVVLRKHRD

SEQ ID NO: 86860 - protein, 32 aa, Artificial Sequence
  Cyclic GFR-binding peptide
  MOD_RES (6), (7): Xaa is C or S
ASASPXXVSQDLSPINILYFIGKTPKIYGKIP

SEQ ID NO: 86861 - protein, 38 aa, Artificial Sequence; identical to SEQ ID NO: 34054
  Cyclic GFR-binding peptide
  MOD_RES (5), (6), (37): Xaa is C or S

SEQ ID NO: 86862 - protein, 27 aa, Artificial Sequence
  Cyclic GFR-binding peptide
  MOD_RES (1), (2): Xaa is C or S
XXVPEKMSATSILYYDENKNVVLRKHR

SEQ ID NO: 86863 - protein, 33 aa, Artificial Sequence
  Cyclic GFR-binding peptide
  MOD_RES (5), (6): Xaa is C or S
IPEPXXVPEKMEPISILYLDENKNVVKFKYENM

SEQ ID NO: 86864 - protein, 36 aa, Artificial Sequence
  Cyclic GFR-binding peptide
  MOD_RES (6), (7): Xaa is C or S
GIPEPXXVPEKMSPISILYKDENKNVVLKYHYNMTV

SEQ ID NO: 86865 - protein, 32 aa, Artificial Sequence
  Cyclic GFR-binding peptide
  MOD_RES (2), (3): Xaa is C or S
TXXAPVKTEPISMLYLDNGRVLLKFKYEMIVE

SEQ ID NO: 86866 - protein, 33 aa, Artificial Sequence
  Cyclic GFR-binding peptide
  MOD_RES (30), (32): Xaa is C or S
EKMEPISILYLDENKNVVKFKYENMTVESXAXR

SEQ ID NO: 86867 - protein, 24 aa, Artificial Sequence
  Cyclic GFR-binding peptide
PVKTEPISMLYLDNGRVLLKFKYE

SEQ ID NO: 86868 - protein, 23 aa, Artificial Sequence
  Cyclic GFR-binding peptide
KMSATSMLYYNDKQQIILRKHRG

SEQ ID NO: 86869 - protein, 32 aa, Artificial Sequence; identical to SEQ ID NO: 34057
  Cyclic GFR-binding peptide
  MOD_RES (32), (32): Xaa is C or S

SEQ ID NO: 86870 - protein, 27 aa, Artificial Sequence
  Cyclic GFR-binding peptide
VKTSATSMLYYDNGRVLLLRKHRMIVE

SEQ ID NO: 86871 - protein, 35 aa, Artificial Sequence; identical to SEQ ID NO: 34060
  Cyclic GFR-binding peptide
  MOD_RES (1), (2), (34): Xaa is C or S

SEQ ID NO: 86872 - protein, 31 aa, Artificial Sequence
  Cyclic GFR-binding peptide
  MOD_RES (5), (6): Xaa is C or S
VPSTXXAPVKTSPISMLYKDNGRVLLLKYHY

SEQ ID NO: 86873 - protein, 29 aa, Artificial Sequence
  Cyclic GFR-binding peptide
NAISILYFDENKNVVLKKYRAAAAAAAAA

SEQ ID NO: 86874 - protein, 34 aa, Artificial Sequence
  Cyclic GFR-binding peptide
  MOD_RES (31), (33): Xaa is C or S
PTKMEPISMLYLNDKQQIIKFKYEGMVVDRXGXS

SEQ ID NO: 86875 - protein, 34 aa, Artificial Sequence; identical to SEQ ID NO: 34063
  Cyclic GFR-binding peptide
  MOD_RES (3), (4): Xaa is C or S

SEQ ID NO: 86876 - protein, 36 aa, Artificial Sequence; identical to SEQ ID NO: 34064
  Cyclic GFR-binding peptide
  MOD_RES (1), (33), (35): Xaa is C or S

SEQ ID NO: 86877 - protein, 38 aa, Artificial Sequence; identical to SEQ ID NO: 34065
  Cyclic GFR-binding peptide
  MOD_RES (3), (4), (36), (38): Xaa is C or S

SEQ ID NO: 86878 - protein, 37 aa, Artificial Sequence; identical to SEQ ID NO: 34067
  Cyclic GFR-binding peptide
  MOD_RES (4), (5), (37): Xaa is C or S

SEQ ID NO: 86879 - protein, 36 aa, Artificial Sequence; identical to SEQ ID NO: 34069
  Cyclic GFR-binding peptide
  MOD_RES (3), (4), (36): Xaa is C or S

SEQ ID NO: 86880 - protein, 32 aa, Artificial Sequence
  Cyclic GFR-binding peptide
  MOD_RES (2), (3): Xaa is C or S
PXXVPEKMEPISILYLDENKNVVKFKYENMTV

SEQ ID NO: 86881 - protein, 24 aa, Artificial Sequence
  Cyclic GFR-binding peptide
DLSPINILYFIGKTPKIYGKIPMI

SEQ ID NO: 86882 - protein, 22 aa, Artificial Sequence
  Cyclic GFR-binding peptide
EPISMLYLNDKQQIIKFKYEGM

SEQ ID NO: 86883 - protein, 25 aa, Artificial Sequence
  Cyclic GFR-binding peptide
VPTKLSATSILYYDKGVVTYLRKHR

SEQ ID NO: 86884 - protein, 21 aa, Artificial Sequence
  Cyclic GFR-binding peptide
SATSILYYDKGVVTYLRKHRG

SEQ ID NO: 86885 - protein, 37 aa, Artificial Sequence; identical to SEQ ID NO: 34070
  Cyclic GFR-binding peptide
  MOD_RES (1), (2), (34), (36): Xaa is C or S

SEQ ID NO: 86886 - protein, 34 aa, Artificial Sequence
  Cyclic GFR-binding peptide
  MOD_RES (4), (5): Xaa is C or S
PASXXVPARLSATSILYYDAANNVVLRKHRDMVV

SEQ ID NO: 86887 - protein, 35 aa, Artificial Sequence
  Cyclic GFR-binding peptide
  MOD_RES (6), (7): Xaa is C or S
STPPTXXVPTRLSATSILYYDSANNVVLRKHRDMV

SEQ ID NO: 86888 - protein, 36 aa, Artificial Sequence; identical to SEQ ID NO: 34072
  Cyclic GFR-binding peptide
  MOD_RES (1), (2), (33), (35): Xaa is C or S

SEQ ID NO: 86889 - protein, 39 aa, Artificial Sequence; identical to SEQ ID NO: 34073
  Cyclic GFR-binding peptide
  MOD_RES (5), (6), (37), (39): Xaa is C or S

SEQ ID NO: 86890 - protein, 28 aa, Artificial Sequence
  Cyclic GFR-binding peptide
PTRLSPISILYKDSANNVVLKYHYDMVV

SEQ ID NO: 86891 - protein, 23 aa, Artificial Sequence
  Cyclic GFR-binding peptide
RLSATSILYYDSANNVVLRKHRD

SEQ ID NO: 86892 - protein, 39 aa, Artificial Sequence; identical to SEQ ID NO: 34074
  Cyclic GFR-binding peptide
  MOD_RES (3), (4), (36), (38): Xaa is C or S

SEQ ID NO: 86893 - protein, 29 aa, Artificial Sequence
  Cyclic GFR-binding peptide
  MOD_RES (1), (1): Xaa is C or S
XTPTKMSATSMLYYNDKQQIILRKHRGMV

SEQ ID NO: 86894 - protein, 35 aa, Artificial Sequence; identical to SEQ ID NO: 34076
  Cyclic GFR-binding peptide
  MOD_RES (3), (4): Xaa is C or S

SEQ ID NO: 86895 - protein, 29 aa, Artificial Sequence
  Cyclic GFR-binding peptide
PEKMNAISILYFDENKNVVLKKYRNMTVE

SEQ ID NO: 86896 - protein, 30 aa, Artificial Sequence
  Cyclic GFR-binding peptide
  MOD_RES (3), (4): Xaa is C or S
EPXXVPEKMSPINILYFDENKNVVYGKIPN

SEQ ID NO: 86897 - protein, 31 aa, Artificial Sequence
  Cyclic GFR-binding peptide
  MOD_RES (4), (5): Xaa is C or S
AGPXXTPTKMEPISMLYLNDKQQIIKFKYEG

SEQ ID NO: 86898 - protein, 34 aa, Artificial Sequence; identical to SEQ ID NO: 34077
  Cyclic GFR-binding peptide
  MOD_RES (2), (3): Xaa is C or S

SEQ ID NO: 86899 - protein, 26 aa, Artificial Sequence
  Cyclic GFR-binding peptide
  MOD_RES (1), (1): Xaa is C or S
XTPTKMSPISMLYKNDKQQIILKYHY

SEQ ID NO: 86900 - protein, 24 aa, Artificial Sequence
  Cyclic GFR-binding peptide
PEKMSATSILYYDENKNVVLRKHR

SEQ ID NO: 86901 - protein, 33 aa, Artificial Sequence
  Cyclic GFR-binding peptide
  MOD_RES (3), (4): Xaa is C or S
PTXXVPTRLEPISILYLDSANNVVKFKYEDMVV

SEQ ID NO: 86902 - protein, 35 aa, Artificial Sequence; identical to SEQ ID NO: 34080
  Cyclic GFR-binding peptide
  MOD_RES (1), (2), (34): Xaa is C or S

SEQ ID NO: 86903 - protein, 31 aa, Artificial Sequence
  Cyclic GFR-binding peptide
  MOD_RES (5), (6): Xaa is C or S
SAGPXXTPTKMSPISMLYKNDKQQIILKYHY

SEQ ID NO: 86904 - protein, 40 aa, Artificial Sequence; identical to SEQ ID NO: 34083
  Cyclic GFR-binding peptide
  MOD_RES (5), (6), (37), (39): Xaa is C or S

SEQ ID NO: 86905 - protein, 24 aa, Artificial Sequence
  Cyclic GFR-binding peptide
PEKMEPISILYLDENKNVVKFKYE

SEQ ID NO: 86906 - protein, 27 aa, Artificial Sequence
  Cyclic GFR-binding peptide
  MOD_RES (27), (27): Xaa is C or S
SATSILYYDKGVVTYLRKHRGMAVSEX

SEQ ID NO: 86907 - protein, 36 aa, Artificial Sequence; identical to SEQ ID NO: 34086
  Cyclic GFR-binding peptide
  MOD_RES (1), (33), (35): Xaa is C or S

SEQ ID NO: 86908 - protein, 30 aa, Artificial Sequence
  Cyclic GFR-binding peptide
  MOD_RES (28), (30): Xaa is C or S
MSPINILYFDENKNVVYGKIPNMTVESXAX

SEQ ID NO: 86909 - protein, 33 aa, Artificial Sequence
  Cyclic GFR-binding peptide
  MOD_RES (3), (4): Xaa is C or S
EPXXVPEKMSATSILYYDENKNVVLRKHRNMTV

SEQ ID NO: 86910 - protein, 26 aa, Artificial Sequence
  Cyclic GFR-binding peptide
VPTRLSATSILYYDSANNVVLRKHRD

SEQ ID NO: 86911 - protein, 33 aa, Artificial Sequence
  Cyclic GFR-binding peptide
  MOD_RES (30), (32): Xaa is C or S
EKMSPISILYKDENKNVVLKYHYNMTVESXAXR

SEQ ID NO: 86912 - protein, 29 aa, Artificial Sequence
  Cyclic GFR-binding peptide
  MOD_RES (29), (29): Xaa is C or S
KMEPISILYLDENKNVVKFKYENMTVESX

SEQ ID NO: 86913 - protein, 35 aa, Artificial Sequence; identical to SEQ ID NO: 34087
  Cyclic GFR-binding peptide
  MOD_RES (2), (3), (35): Xaa is C or S

SEQ ID NO: 86914 - protein, 38 aa, Artificial Sequence; identical to SEQ ID NO: 34088
  Cyclic GFR-binding peptide
  MOD_RES (4), (5), (37): Xaa is C or S

SEQ ID NO: 86915 - protein, 27 aa, Artificial Sequence
  Cyclic GFR-binding peptide
  MOD_RES (1), (1): Xaa is C or S
XAPVKTEPISMLYLDNGRVLLKFKYEM

SEQ ID NO: 86916 - protein, 31 aa, Artificial Sequence
  Cyclic GFR-binding peptide
  MOD_RES (28), (30): Xaa is C or S
DLSPINILYFIGKTPKIYGKIPMIVKSXKXS

SEQ ID NO: 86917 - protein, 24 aa, Artificial Sequence
  Cyclic GFR-binding peptide
NAISILYFDENKNVVLKKYRNMTV

SEQ ID NO: 86918 - protein, 29 aa, Artificial Sequence
  Cyclic GFR-binding peptide
  MOD_RES (2), (3): Xaa is C or S
AXXVPTKLSATSILYYDKGVVTYLRKHRG

SEQ ID NO: 86919 - protein, 29 aa, Artificial Sequence
  Cyclic GFR-binding peptide
  MOD_RES (1), (1): Xaa is C or S
XVPARLSATSILYYDAANNVVLRKHRDMV

SEQ ID NO: 86920 - protein, 37 aa, Artificial Sequence; identical to SEQ ID NO: 34093
  Cyclic GFR-binding peptide
  MOD_RES (6), (7): Xaa is C or S

SEQ ID NO: 86921 - protein, 38 aa, Artificial Sequence; identical to SEQ ID NO: 34095
  Cyclic GFR-binding peptide
  MOD_RES (6), (7): Xaa is C or S

SEQ ID NO: 86922 - protein, 26 aa, Artificial Sequence
  Cyclic GFR-binding peptide
SATSILYYDENKNVVLRKHRNMTVES

SEQ ID NO: 86923 - protein, 32 aa, Artificial Sequence; identical to SEQ ID NO: 34097
  Cyclic GFR-binding peptide
  MOD_RES (32), (32): Xaa is C or S

SEQ ID NO: 86924 - protein, 40 aa, Artificial Sequence; identical to SEQ ID NO: 34098
  Cyclic GFR-binding peptide
  MOD_RES (5), (6), (38), (40): Xaa is C or S

SEQ ID NO: 86925 - protein, 28 aa, Artificial Sequence
  Cyclic GFR-binding peptide
  MOD_RES (28), (28): Xaa is C or S
KTSATSMLYYDNGRVLLLRKHRMIVEEX

SEQ ID NO: 86926 - protein, 28 aa, Artificial Sequence
  Cyclic GFR-binding peptide
  MOD_RES (1), (2): Xaa is C or S
XXVSQDLSPINILYFIGKTPKIYGKIPM

SEQ ID NO: 86927 - protein, 35 aa, Artificial Sequence; identical to SEQ ID NO: 34099
  Cyclic GFR-binding peptide
  MOD_RES (2), (3), (34): Xaa is C or S

SEQ ID NO: 86928 - protein, 31 aa, Artificial Sequence; identical to SEQ ID NO: 34101
  Cyclic GFR-binding peptide
  MOD_RES (1), (1): Xaa is C or S

SEQ ID NO: 86929 - protein, 30 aa, Artificial Sequence
  Cyclic GFR-binding peptide
  MOD_RES (1), (1): Xaa is C or S
XAPVKTSPISMLYKDNGRVLLLKYHYMIVE

SEQ ID NO: 86930 - protein, 36 aa, Artificial Sequence
  Cyclic GFR-binding peptide
  MOD_RES (6), (7): Xaa is C or S
GIPEPXXVPEKMSPINILYFDENKNVVYGKIPNMTV

SEQ ID NO: 86931 - protein, 32 aa, Artificial Sequence; identical to SEQ ID NO: 34105
  Cyclic GFR-binding peptide
  MOD_RES (31), (31): Xaa is C or S

SEQ ID NO: 86932 - protein, 29 aa, Artificial Sequence
  Cyclic GFR-binding peptide
  MOD_RES (3), (4): Xaa is C or S
KAXXVPTKLSATSILYYDKGVVTYLRKHR

SEQ ID NO: 86933 - protein, 34 aa, Artificial Sequence
  Cyclic GFR-binding peptide
  MOD_RES (6), (7): Xaa is C or S
RVPSTXXAPVKTEPISMLYLDNGRVLLKFKYEMI

SEQ ID NO: 86934 - protein, 27 aa, Artificial Sequence
  Cyclic GFR-binding peptide
  MOD_RES (1), (2): Xaa is C or S
XXVPQALSPINILYFVGRKPKVYGKIP

SEQ ID NO: 86935 - protein, 24 aa, Artificial Sequence
  Cyclic GFR-binding peptide
TKMSPISMLYKNDKQQIILKYHYG

SEQ ID NO: 86936 - protein, 31 aa, Artificial Sequence
  Cyclic GFR-binding peptide
  MOD_RES (2), (3): Xaa is C or S
PXXVPQDLSPINILYFVGRTPKVYGKIPMVV

SEQ ID NO: 86937 - protein, 30 aa, Artificial Sequence; identical to SEQ ID NO: 34106
  Cyclic GFR-binding peptide

SEQ ID NO: 86938 - protein, 30 aa, Artificial Sequence
  Cyclic GFR-binding peptide
  MOD_RES (4), (5): Xaa is C or S
AGPXXTPTKMSPISMLYKNDKQQIILKYHY

SEQ ID NO: 86939 - protein, 32 aa, Artificial Sequence
  Cyclic GFR-binding peptide
  MOD_RES (5), (6): Xaa is C or S
VPSTXXAPVKTSATSMLYYDNGRVLLLRKHRM

SEQ ID NO: 86940 - protein, 24 aa, Artificial Sequence
  Cyclic GFR-binding peptide
PVKTSATSMLYYDNGRVLLLRKHR

SEQ ID NO: 86941 - protein, 31 aa, Artificial Sequence
  Cyclic GFR-binding peptide
  MOD_RES (3), (4): Xaa is C or S
KAXXVPTKLSATSILYYDKGVVTYLRKHRGM

SEQ ID NO: 86942 - protein, 37 aa, Artificial Sequence; identical to SEQ ID NO: 34108
  Cyclic GFR-binding peptide
  MOD_RES (6), (7): Xaa is C or S

SEQ ID NO: 86943 - protein, 25 aa, Artificial Sequence
  Cyclic GFR-binding peptide
ALSPINILYFVGRKPKVYGKIPMIV

SEQ ID NO: 86944 - protein, 34 aa, Artificial Sequence; identical to SEQ ID NO: 34110
  Cyclic GFR-binding peptide
  MOD_RES (32), (34): Xaa is C or S

SEQ ID NO: 86945 - protein, 31 aa, Artificial Sequence
  Cyclic GFR-binding peptide
  MOD_RES (2), (3): Xaa is C or S
TXXAPVKTSATSMLYYDNGRVLLLRKHRMIV

SEQ ID NO: 86946 - protein, 27 aa, Artificial Sequence
  Cyclic GFR-binding peptide
  MOD_RES (1), (1): Xaa is C or S
XVPQDLSPINILYFVGRTPKVYGKIPM

SEQ ID NO: 86947 - protein, 29 aa, Artificial Sequence
  Cyclic GFR-binding peptide
  MOD_RES (1), (1): Xaa is C or S
XVPTRLEPISILYLDSANNVVKFKYEDMV

SEQ ID NO: 86948 - protein, 29 aa, Artificial Sequence
  Cyclic GFR-binding peptide
  MOD_RES (26), (28): Xaa is C or S
EPISMLYLDNGRVLLKFKYEMIVEEXGXL

SEQ ID NO: 86949 - protein, 34 aa, Artificial Sequence; identical to SEQ ID NO: 34114
  Cyclic GFR-binding peptide
  MOD_RES (31), (33): Xaa is C or S

SEQ ID NO: 86950 - protein, 23 aa, Artificial Sequence
  Cyclic GFR-binding peptide
EPISMLYLNDKQQIIKFKYEGMV

SEQ ID NO: 86951 - protein, 30 aa, Artificial Sequence
  Cyclic GFR-binding peptide
PEKMNAISILYFDENKNVVLKKYRNMTVES

SEQ ID NO: 86952 - protein, 30 aa, Artificial Sequence
  Cyclic GFR-binding peptide
  MOD_RES (3), (4): Xaa is C or S
PTXXVPTRLEPISILYLDSANNVVKFKYED

SEQ ID NO: 86953 - protein, 37 aa, Artificial Sequence; identical to SEQ ID NO: 34115
  Cyclic GFR-binding peptide
  MOD_RES (3), (4), (36): Xaa is C or S

SEQ ID NO: 86954 - protein, 26 aa, Artificial Sequence
  Cyclic GFR-binding peptide
EKMSATSILYYDENKNVVLRKHRNMT

SEQ ID NO: 86955 - protein, 35 aa, Artificial Sequence
  Cyclic GFR-binding peptide
  MOD_RES (6), (7): Xaa is C or S
AAPASXXVPARLSATSILYYDAANNVVLRKHRDMV

SEQ ID NO: 86956 - protein, 33 aa, Artificial Sequence
  Cyclic GFR-binding peptide
  MOD_RES (6), (7): Xaa is C or S
HVPKPXXAPTKLSPISVLYKDDSSNVILKYHYN

SEQ ID NO: 86957 - protein, 30 aa, Artificial Sequence
  Cyclic GFR-binding peptide
  MOD_RES (30), (30): Xaa is C or S
PVKTSATSMLYYDNGRVLLLRKHRMIVEEX

SEQ ID NO: 86958 - protein, 35 aa, Artificial Sequence; identical to SEQ ID NO: 34120
  Cyclic GFR-binding peptide
  MOD_RES (3), (4): Xaa is C or S

SEQ ID NO: 86959 - protein, 27 aa, Artificial Sequence
  Cyclic GFR-binding peptide
  MOD_RES (1), (1): Xaa is C or S
XTPTKMSPISMLYKNDKQQIILKYHYG

SEQ ID NO: 86960 - protein, 32 aa, Artificial Sequence; identical to SEQ ID NO: 34123
  Cyclic GFR-binding peptide
  MOD_RES (1), (1): Xaa is C or S

SEQ ID NO: 86961 - protein, 36 aa, Artificial Sequence; identical to SEQ ID NO: 34122
  Cyclic GFR-binding peptide
  MOD_RES (4), (5), (36): Xaa is C or S

SEQ ID NO: 86962 - protein, 28 aa, Artificial Sequence
  Cyclic GFR-binding peptide
  MOD_RES (1), (2): Xaa is C or S
XXAPVKTSPISMLYKDNGRVLLLKYHYM

SEQ ID NO: 86963 - protein, 32 aa, Artificial Sequence
  Cyclic GFR-binding peptide
  MOD_RES (29), (31): Xaa is C or S
VKTSPISMLYKDNGRVLLLKYHYMIVEEXGXL

SEQ ID NO: 86964 - protein, 29 aa, Artificial Sequence
  Cyclic GFR-binding peptide
SPINILYFDENKNVVYGKIPAAAAAAAAA

SEQ ID NO: 86965 - protein, 23 aa, Artificial Sequence
  Cyclic GFR-binding peptide
SPINILYFDENKNVVYGKIPNMT

SEQ ID NO: 86966 - protein, 33 aa, Artificial Sequence; identical to SEQ ID NO: 34125
  Cyclic GFR-binding peptide
  MOD_RES (2), (3): Xaa is C or S

SEQ ID NO: 86967 - protein, 27 aa, Artificial Sequence
  Cyclic GFR-binding peptide
  MOD_RES (26), (26): Xaa is C or S
SPINILYFVGRKPKVYGKIPMIVRSXK

SEQ ID NO: 86968 - protein, 34 aa, Artificial Sequence
  Cyclic GFR-binding peptide
  MOD_RES (6), (7): Xaa is C or S
GSAGPXXTPTKMSPISMLYKNDKQQIILKYHYGM

SEQ ID NO: 86969 - protein, 21 aa, Artificial Sequence
  Cyclic GFR-binding peptide
SPINILYFDENKNVVYGKIPN

SEQ ID NO: 86970 - protein, 31 aa, Artificial Sequence
  Cyclic GFR-binding peptide
  MOD_RES (28), (30): Xaa is C or S
MSATSMLYYNDKQQIILRKHRGMVVDRXGXS

SEQ ID NO: 86971 - protein, 29 aa, Artificial Sequence
  Cyclic GFR-binding peptide
PVKTSATSMLYYDNGRVLLLRKHRMIVEE

SEQ ID NO: 86972 - protein, 22 aa, Artificial Sequence
  Cyclic GFR-binding peptide
LSATSILYYDAANNVVLRKHRD

SEQ ID NO: 86973 - protein, 39 aa, Artificial Sequence; identical to SEQ ID NO: 34129
  Cyclic GFR-binding peptide
  MOD_RES (5), (6), (38): Xaa is C or S

SEQ ID NO: 86974 - protein, 28 aa, Artificial Sequence
  Cyclic GFR-binding peptide
VPEKMSPINILYFDENKNVVYGKIPNMT

SEQ ID NO: 86975 - protein, 29 aa, Artificial Sequence
  Cyclic GFR-binding peptide
SPINILYFIGKTPKIYGKIPAAAAAAAAA

SEQ ID NO: 86976 - protein, 31 aa, Artificial Sequence
  Cyclic GFR-binding peptide
  MOD_RES (2), (3): Xaa is C or S
PXXTPTKMSPISMLYKNDKQQIILKYHYGMV

SEQ ID NO: 86977 - protein, 25 aa, Artificial Sequence
  Cyclic GFR-binding peptide
SPINILYFVGRTPKVYGKIPMVVKS

SEQ ID NO: 86978 - protein, 38 aa, Artificial Sequence; identical to SEQ ID NO: 34133
  Cyclic GFR-binding peptide
  MOD_RES (5), (6), (38): Xaa is C or S

SEQ ID NO: 86979 - protein, 33 aa, Artificial Sequence; identical to SEQ ID NO: 34135
  Cyclic GFR-binding peptide
  MOD_RES (1), (32): Xaa is C or S

SEQ ID NO: 86980 - protein, 36 aa, Artificial Sequence; identical to SEQ ID NO: 34137
  Cyclic GFR-binding peptide
  MOD_RES (3), (4), (36): Xaa is C or S

SEQ ID NO: 86981 - protein, 41 aa, Artificial Sequence; identical to SEQ ID NO: 34138
  Cyclic GFR-binding peptide
  MOD_RES (6), (7), (38), (40): Xaa is C or S

SEQ ID NO: 86982 - protein, 30 aa, Artificial Sequence
  Cyclic GFR-binding peptide
  MOD_RES (2), (3): Xaa is C or S
PXXVPEKMEPISILYLDENKNVVKFKYENM

SEQ ID NO: 86983 - protein, 35 aa, Artificial Sequence
  Cyclic GFR-binding peptide
  MOD_RES (5), (6): Xaa is C or S
VPSTXXAPVKTSATSMLYYDNGRVLLLRKHRMIVE

SEQ ID NO: 86984 - protein, 34 aa, Artificial Sequence; identical to SEQ ID NO: 34139
  Cyclic GFR-binding peptide
  MOD_RES (3), (4): Xaa is C or S

SEQ ID NO: 86985 - protein, 32 aa, Artificial Sequence
  Cyclic GFR-binding peptide
  MOD_RES (29), (31): Xaa is C or S
VKTEPISMLYLDNGRVLLKFKYEMIVEEXGXL

SEQ ID NO: 86986 - protein, 30 aa, Artificial Sequence
  Cyclic GFR-binding peptide
PTRLEPISILYLDSANNVVKFKYEDMVVES

SEQ ID NO: 86987 - protein, 33 aa, Artificial Sequence
  Cyclic GFR-binding peptide
  MOD_RES (31), (33): Xaa is C or S
PEKMSPISILYKDENKNVVLKYHYNMTVESXAX

SEQ ID NO: 86988 - protein, 31 aa, Artificial Sequence
  Cyclic GFR-binding peptide
  MOD_RES (1), (2): Xaa is C or S
XXVPQDLSPINILYFVGRTPKVYGKIPMVVK

SEQ ID NO: 86989 - protein, 33 aa, Artificial Sequence
  Cyclic GFR-binding peptide
  MOD_RES (6), (7): Xaa is C or S
ASASPXXVPQDLSPINILYFVGRTPKVYGKIPM

SEQ ID NO: 86990 - protein, 40 aa, Artificial Sequence; identical to SEQ ID NO: 34142
  Cyclic GFR-binding peptide
  MOD_RES (5), (6), (38), (40): Xaa is C or S

SEQ ID NO: 86991 - protein, 38 aa, Artificial Sequence; identical to SEQ ID NO: 34143
  Cyclic GFR-binding peptide
  MOD_RES (5), (6), (37): Xaa is C or S

SEQ ID NO: 86992 - protein, 33 aa, Artificial Sequence
  Cyclic GFR-binding peptide
  MOD_RES (5), (6): Xaa is C or S
SAAPXXVPQALSPINILYFVGRKPKVYGKIPMI

SEQ ID NO: 86993 - protein, 23 aa, Artificial Sequence
  Cyclic GFR-binding peptide
LSATSILYYDKGVVTYLRKHRGM

SEQ ID NO: 86994 - protein, 26 aa, Artificial Sequence
  Cyclic GFR-binding peptide
MEPISILYLDENKNVVKFKYENMTVE

SEQ ID NO: 86995 - protein, 32 aa, Artificial Sequence; identical to SEQ ID NO: 34144
  Cyclic GFR-binding peptide
  MOD_RES (1), (2): Xaa is C or S

SEQ ID NO: 86996 - protein, 37 aa, Artificial Sequence; identical to SEQ ID NO: 34146
  Cyclic GFR-binding peptide
  MOD_RES (4), (5), (37): Xaa is C or S

SEQ ID NO: 86997 - protein, 30 aa, Artificial Sequence
  Cyclic GFR-binding peptide
  MOD_RES (1), (1): Xaa is C or S
XVPEKMSPINILYFDENKNVVYGKIPNMTV

SEQ ID NO: 86998 - protein, 33 aa, Artificial Sequence; identical to SEQ ID NO: 34147
  Cyclic GFR-binding peptide
  MOD_RES (1), (33): Xaa is C or S

SEQ ID NO: 86999 - protein, 32 aa, Artificial Sequence
  Cyclic GFR-binding peptide
  MOD_RES (2), (3): Xaa is C or S
TXXVPTRLSPISILYKDSANNVVLKYHYDMVV

SEQ ID NO: 87000 - protein, 27 aa, Artificial Sequence
  Cyclic GFR-binding peptide
PTRLEPISILYLDSANNVVKFKYEDMV

SEQ ID NO: 87001 - protein, 31 aa, Artificial Sequence
  Cyclic GFR-binding peptide
  MOD_RES (5), (6): Xaa is C or S
SAGPXXTPTKMEPISMLYLNDKQQIIKFKYE

SEQ ID NO: 87002 - protein, 24 aa, Artificial Sequence
  Cyclic GFR-binding peptide
QDLSPINILYFIGKTPKIYGKIPM

SEQ ID NO: 87003 - protein, 34 aa, Artificial Sequence
  Cyclic GFR-binding peptide
  MOD_RES (5), (6): Xaa is C or S
VPSTXXAPVKTSPISMLYKDNGRVLLLKYHYMIV

SEQ ID NO: 87004 - protein, 30 aa, Artificial Sequence
  Cyclic GFR-binding peptide
  MOD_RES (28), (30): Xaa is C or S
MSATSILYYDENKNVVLRKHRNMTVESXAX

SEQ ID NO: 87005 - protein, 30 aa, Artificial Sequence
  Cyclic GFR-binding peptide
  MOD_RES (27), (29): Xaa is C or S
SPISILYKDSANNVVLKYHYDMVVESXGXR

SEQ ID NO: 87006 - protein, 25 aa, Artificial Sequence
  Cyclic GFR-binding peptide
PQALSPINILYFVGRKPKVYGKIPM

SEQ ID NO: 87007 - protein, 24 aa, Artificial Sequence
  Cyclic GFR-binding peptide
KTSATSMLYYDNGRVLLLRKHRMI

SEQ ID NO: 87008 - protein, 34 aa, Artificial Sequence; identical to SEQ ID NO: 34150
  Cyclic GFR-binding peptide
  MOD_RES (1), (2), (34): Xaa is C or S

SEQ ID NO: 87009 - protein, 30 aa, Artificial Sequence
  Cyclic GFR-binding peptide
  MOD_RES (30), (30): Xaa is C or S
PQALSPINILYFVGRKPKVYGKIPMIVRSX

SEQ ID NO: 87010 - protein, 29 aa, Artificial Sequence
  Cyclic GFR-binding peptide
PTRLSATSILYYDSANNVVLRKHRDMVVE

SEQ ID NO: 87011 - protein, 30 aa, Artificial Sequence; identical to SEQ ID NO: 34151
  Cyclic GFR-binding peptide

SEQ ID NO: 87012 - protein, 36 aa, Artificial Sequence; identical to SEQ ID NO: 34153
  Cyclic GFR-binding peptide
  MOD_RES (3), (4), (36): Xaa is C or S

SEQ ID NO: 87013 - protein, 31 aa, Artificial Sequence
  Cyclic GFR-binding peptide
  MOD_RES (2), (3): Xaa is C or S
AXXVPTKLSATSILYYDKGVVTYLRKHRGMA

SEQ ID NO: 87014 - protein, 31 aa, Artificial Sequence
  Cyclic GFR-binding peptide
  MOD_RES (28), (30): Xaa is C or S
MNAISILYFDENKNVVLKKYRNMTVESXAXR

SEQ ID NO: 87015 - protein, 32 aa, Artificial Sequence
  Cyclic GFR-binding peptide
  MOD_RES (5), (6): Xaa is C or S
TPPTXXVPTRLEPISILYLDSANNVVKFKYED

SEQ ID NO: 87016 - protein, 37 aa, Artificial Sequence; identical to SEQ ID NO: 34154
  Cyclic GFR-binding peptide
  MOD_RES (3), (4), (35), (37): Xaa is C or S

SEQ ID NO: 87017 - protein, 27 aa, Artificial Sequence
  Cyclic GFR-binding peptide
  MOD_RES (1), (2): Xaa is C or S
XXVPARLSATSILYYDAANNVVLRKHR

SEQ ID NO: 87018 - protein, 27 aa, Artificial Sequence
  Cyclic GFR-binding peptide
  MOD_RES (26), (26): Xaa is C or S
SPISMLYKDNGRVLLLKYHYMIVEEXG

SEQ ID NO: 87019 - protein, 40 aa, Artificial Sequence; identical to SEQ ID NO: 34156
  Cyclic GFR-binding peptide
  MOD_RES (5), (6), (38), (40): Xaa is C or S

SEQ ID NO: 87020 - protein, 22 aa, Artificial Sequence
  Cyclic GFR-binding peptide
DLSPINILYFVGRTPKVYGKIP

SEQ ID NO: 87021 - protein, 21 aa, Artificial Sequence
  Cyclic GFR-binding peptide
SPISILYKDENKNVVLKYHYN

SEQ ID NO: 87022 - protein, 33 aa, Artificial Sequence; identical to SEQ ID NO: 34158
  Cyclic GFR-binding peptide
  MOD_RES (1), (33): Xaa is C or S

SEQ ID NO: 87023 - protein, 39 aa, Artificial Sequence; identical to SEQ ID NO: 34162
  Cyclic GFR-binding peptide
  MOD_RES (5), (6), (38): Xaa is C or S

SEQ ID NO: 87024 - protein, 33 aa, Artificial Sequence; identical to SEQ ID NO: 34163
  Cyclic GFR-binding peptide
  MOD_RES (31), (33): Xaa is C or S

SEQ ID NO: 87025 - protein, 23 aa, Artificial Sequence
  Cyclic GFR-binding peptide
TKMEPISMLYLNDKQQIIKFKYE

SEQ ID NO: 87026 - protein, 33 aa, Artificial Sequence; identical to SEQ ID NO: 34164
  Cyclic GFR-binding peptide
  MOD_RES (31), (33): Xaa is C or S

SEQ ID NO: 87027 - protein, 37 aa, Artificial Sequence; identical to SEQ ID NO: 34165
  Cyclic GFR-binding peptide
  MOD_RES (2), (3), (35), (37): Xaa is C or S

SEQ ID NO: 87028 - protein, 34 aa, Artificial Sequence; identical to SEQ ID NO: 34166
  Cyclic GFR-binding peptide
  MOD_RES (1), (2), (33): Xaa is C or S

SEQ ID NO: 87029 - protein, 28 aa, Artificial Sequence
  Cyclic GFR-binding peptide
TKLSATSILYYDKGVVTYLRKHRGMAVS

SEQ ID NO: 87030 - protein, 31 aa, Artificial Sequence
  Cyclic GFR-binding peptide
  MOD_RES (28), (30): Xaa is C or S
LSATSILYYDAANNVVLRKHRDMVVEAXGXR

SEQ ID NO: 87031 - protein, 31 aa, Artificial Sequence
  Cyclic GFR-binding peptide
  MOD_RES (29), (31): Xaa is C or S
KMSATSMLYYNDKQQIILRKHRGMVVDRXGX

SEQ ID NO: 87032 - protein, 30 aa, Artificial Sequence
  Cyclic GFR-binding peptide
  MOD_RES (27), (29): Xaa is C or S
LSPINILYFVGRKPKVYGKIPMIVRSXKXS

SEQ ID NO: 87033 - protein, 30 aa, Artificial Sequence; identical to SEQ ID NO: 34169
  Cyclic GFR-binding peptide

SEQ ID NO: 87034 - protein, 38 aa, Artificial Sequence; identical to SEQ ID NO: 34170
  Cyclic GFR-binding peptide
  MOD_RES (6), (7): Xaa is C or S

SEQ ID NO: 87035 - protein, 22 aa, Artificial Sequence
  Cyclic GFR-binding peptide
EPISILYLDSANNVVKFKYEDM

SEQ ID NO: 87036 - protein, 30 aa, Artificial Sequence
  Cyclic GFR-binding peptide
  MOD_RES (1), (2): Xaa is C or S
XXVPEKMNAISILYFDENKNVVLKKYRNMT

SEQ ID NO: 87037 - protein, 39 aa, Artificial Sequence; identical to SEQ ID NO: 34171
  Cyclic GFR-binding peptide
  MOD_RES (6), (7), (38): Xaa is C or S

SEQ ID NO: 87038 - protein, 36 aa, Artificial Sequence
  Cyclic GFR-binding peptide
  MOD_RES (6), (7): Xaa is C or S
HVPKPXXAPTKLSPISVLYKDDSSNVILKYHYNMVV

SEQ ID NO: 87039 - protein, 25 aa, Artificial Sequence
  Cyclic GFR-binding peptide
LSATSILYYDSANNVVLRKHRDMVV

SEQ ID NO: 87040 - protein, 34 aa, Artificial Sequence
  Cyclic GFR-binding peptide
  MOD_RES (4), (5): Xaa is C or S
PPTXXVPTRLSPISILYKDSANNVVLKYHYDMVV

SEQ ID NO: 87041 - protein, 39 aa, Artificial Sequence; identical to SEQ ID NO: 34174
  Cyclic GFR-binding peptide
  MOD_RES (4), (5), (37), (39): Xaa is C or S

SEQ ID NO: 87042 - protein, 34 aa, Artificial Sequence
  Cyclic GFR-binding peptide
  MOD_RES (5), (6): Xaa is C or S
IPEPXXVPEKMSPISILYKDENKNVVLKYHYNMT

SEQ ID NO: 87043 - protein, 26 aa, Artificial Sequence
  Cyclic GFR-binding peptide
TPTKMSPISMLYKNDKQQIILKYHYG

SEQ ID NO: 87044 - protein, 26 aa, Artificial Sequence
  Cyclic GFR-binding peptide
  MOD_RES (1), (1): Xaa is C or S
XVPEKMSPISILYKDENKNVVLKYHY

SEQ ID NO: 87045 - protein, 25 aa, Artificial Sequence
  Cyclic GFR-binding peptide
VPEKMSPINILYFDENKNVVYGKIP

SEQ ID NO: 87046 - protein, 27 aa, Artificial Sequence
  Cyclic GFR-binding peptide
PARLSATSILYYDAANNVVLRKHRDMV

SEQ ID NO: 87047 - protein, 36 aa, Artificial Sequence; identical to SEQ ID NO: 34177
  Cyclic GFR-binding peptide
  MOD_RES (4), (5): Xaa is C or S

SEQ ID NO: 87048 - protein, 28 aa, Artificial Sequence
  Cyclic GFR-binding peptide
  MOD_RES (1), (2): Xaa is C or S
XXVPEKMSATSILYYDENKNVVLRKHRN

SEQ ID NO: 87049 - protein, 29 aa, Artificial Sequence
  Cyclic GFR-binding peptide
SATSILYYDKGVVTYLRKHRAAAAAAAAA

SEQ ID NO: 87050 - protein, 34 aa, Artificial Sequence; identical to SEQ ID NO: 34178
  Cyclic GFR-binding peptide
  MOD_RES (1), (32), (34): Xaa is C or S

SEQ ID NO: 87051 - protein, 33 aa, Artificial Sequence
  Cyclic GFR-binding peptide
  MOD_RES (31), (33): Xaa is C or S
PEKMEPISILYLDENKNVVKFKYENMTVESXAX

SEQ ID NO: 87052 - protein, 27 aa, Artificial Sequence
  Cyclic GFR-binding peptide
  MOD_RES (27), (27): Xaa is C or S
SPISMLYKNDKQQIILKYHYGMVVDRX

SEQ ID NO: 87053 - protein, 26 aa, Artificial Sequence
  Cyclic GFR-binding peptide
KMEPISILYLDENKNVVKFKYENMTV

SEQ ID NO: 87054 - protein, 29 aa, Artificial Sequence
  Cyclic GFR-binding peptide
  MOD_RES (26), (28): Xaa is C or S
SPISMLYKDNGRVLLLKYHYMIVEEXGXL

SEQ ID NO: 87055 - protein, 29 aa, Artificial Sequence
  Cyclic GFR-binding peptide
PQDLSPINILYFVGRTPKVYGKIPMVVKS

SEQ ID NO: 87056 - protein, 42 aa, Artificial Sequence; identical to SEQ ID NO: 34180
  Cyclic GFR-binding peptide
  MOD_RES (6), (7), (39), (41): Xaa is C or S

SEQ ID NO: 87057 - protein, 36 aa, Artificial Sequence; identical to SEQ ID NO: 34181
  Cyclic GFR-binding peptide
  MOD_RES (1), (33), (35): Xaa is C or S

SEQ ID NO: 87058 - protein, 36 aa, Artificial Sequence
  Cyclic GFR-binding peptide
  MOD_RES (6), (7): Xaa is C or S
GIPEPXXVPEKMNAISILYFDENKNVVLKKYRNMTV

SEQ ID NO: 87059 - protein, 24 aa, Artificial Sequence
  Cyclic GFR-binding peptide
SPISMLYKDNGRVLLLKYHYMIVE

SEQ ID NO: 87060 - protein, 35 aa, Artificial Sequence; identical to SEQ ID NO: 34183
  Cyclic GFR-binding peptide
  MOD_RES (1), (33), (35): Xaa is C or S

SEQ ID NO: 87061 - protein, 24 aa, Artificial Sequence
  Cyclic GFR-binding peptide
PARLSATSILYYDAANNVVLRKHR

SEQ ID NO: 87062 - protein, 39 aa, Artificial Sequence; identical to SEQ ID NO: 34184
  Cyclic GFR-binding peptide
  MOD_RES (5), (6), (38): Xaa is C or S

SEQ ID NO: 87063 - protein, 26 aa, Artificial Sequence
  Cyclic GFR-binding peptide
EKMNAISILYFDENKNVVLKKYRNMT

SEQ ID NO: 87064 - protein, 31 aa, Artificial Sequence
  Cyclic GFR-binding peptide
  MOD_RES (4), (5): Xaa is C or S
AAPXXVPQALSPINILYFVGRKPKVYGKIPM

SEQ ID NO: 87065 - protein, 30 aa, Artificial Sequence
  Cyclic GFR-binding peptide
  MOD_RES (1), (2): Xaa is C or S
XXTPTKMEPISMLYLNDKQQIIKFKYEGMV

SEQ ID NO: 87066 - protein, 29 aa, Artificial Sequence
  Cyclic GFR-binding peptide
VPEKMSPINILYFDENKNVVYGKIPNMTV

SEQ ID NO: 87067 - protein, 40 aa, Artificial Sequence; identical to SEQ ID NO: 34185
  Cyclic GFR-binding peptide
  MOD_RES (5), (6), (38), (40): Xaa is C or S

SEQ ID NO: 87068 - protein, 27 aa, Artificial Sequence
  Cyclic GFR-binding peptide
RLSATSILYYDSANNVVLRKHRDMVVE

SEQ ID NO: 87069 - protein, 26 aa, Artificial Sequence
  Cyclic GFR-binding peptide
  MOD_RES (1), (1): Xaa is C or S
XVPARLSATSILYYDAANNVVLRKHR

SEQ ID NO: 87070 - protein, 30 aa, Artificial Sequence
  Cyclic GFR-binding peptide
  MOD_RES (4), (5): Xaa is C or S
AGPXXTPTKMEPISMLYLNDKQQIIKFKYE

SEQ ID NO: 87071 - protein, 24 aa, Artificial Sequence
  Cyclic GFR-binding peptide
PEKMSPISILYKDENKNVVLKYHY

SEQ ID NO: 87072 - protein, 30 aa, Artificial Sequence
  Cyclic GFR-binding peptide
  MOD_RES (3), (4): Xaa is C or S
STXXAPVKTSATSMLYYDNGRVLLLRKHRM

SEQ ID NO: 87073 - protein, 32 aa, Artificial Sequence
  Cyclic GFR-binding peptide
  MOD_RES (4), (5): Xaa is C or S
AGPXXTPTKMEPISMLYLNDKQQIIKFKYEGM

SEQ ID NO: 87074 - protein, 32 aa, Artificial Sequence
  Cyclic GFR-binding peptide
  MOD_RES (31), (31): Xaa is C or S
PEKMSPISILYKDENKNVVLKYHYNMTVESXA

SEQ ID NO: 87075 - protein, 35 aa, Artificial Sequence; identical to SEQ ID NO: 34187
  Cyclic GFR-binding peptide
  MOD_RES (3), (4): Xaa is C or S

SEQ ID NO: 87076 - protein, 31 aa, Artificial Sequence
  Cyclic GFR-binding peptide
  MOD_RES (29), (31): Xaa is C or S
RLSATSILYYDSANNVVLRKHRDMVVESXGX

SEQ ID NO: 87077 - protein, 22 aa, Artificial Sequence
  Cyclic GFR-binding peptide
SATSILYYDENKNVVLRKHRNM

SEQ ID NO: 87078 - protein, 32 aa, Artificial Sequence; identical to SEQ ID NO: 34194
  Cyclic GFR-binding peptide
  MOD_RES (1), (2): Xaa is C or S

SEQ ID NO: 87079 - protein, 26 aa, Artificial Sequence
  Cyclic GFR-binding peptide
SATSILYYDSANNVVLRKHRDMVVES

SEQ ID NO: 87080 - protein, 31 aa, Artificial Sequence
  Cyclic GFR-binding peptide
  MOD_RES (5), (6): Xaa is C or S
IPEPXXVPEKMNAISILYFDENKNVVLKKYR

SEQ ID NO: 87081 - protein, 32 aa, Artificial Sequence; identical to SEQ ID NO: 34196
  Cyclic GFR-binding peptide
  MOD_RES (1), (2): Xaa is C or S

SEQ ID NO: 87082 - protein, 36 aa, Artificial Sequence
  Cyclic GFR-binding peptide
  MOD_RES (6), (7): Xaa is C or S
STPPTXXVPTRLSATSILYYDSANNVVLRKHRDMVV

SEQ ID NO: 87083 - protein, 30 aa, Artificial Sequence
  Cyclic GFR-binding peptide
  MOD_RES (29), (29): Xaa is C or S
KMSPISILYKDENKNVVLKYHYNMTVESXA

SEQ ID NO: 87084 - protein, 23 aa, Artificial Sequence
  Cyclic GFR-binding peptide
TKMSPISMLYKNDKQQIILKYHY

SEQ ID NO: 87085 - protein, 31 aa, Artificial Sequence; identical to SEQ ID NO: 34198
  Cyclic GFR-binding peptide
  MOD_RES (1), (1): Xaa is C or S

SEQ ID NO: 87086 - protein, 31 aa, Artificial Sequence; identical to SEQ ID NO: 34200
  Cyclic GFR-binding peptide
  MOD_RES (31), (31): Xaa is C or S

SEQ ID NO: 87087 - protein, 32 aa, Artificial Sequence; identical to SEQ ID NO: 34199
  Cyclic GFR-binding peptide
  MOD_RES (1), (32): Xaa is C or S

SEQ ID NO: 87088 - protein, 25 aa, Artificial Sequence
  Cyclic GFR-binding peptide
EKMNAISILYFDENKNVVLKKYRNM

SEQ ID NO: 87089 - protein, 21 aa, Artificial Sequence
  Cyclic GFR-binding peptide
SATSMLYYNDKQQIILRKHRG

SEQ ID NO: 87090 - protein, 26 aa, Artificial Sequence
  Cyclic GFR-binding peptide
SPISILYKDENKNVVLKYHYNMTVES

SEQ ID NO: 87091 - protein, 28 aa, Artificial Sequence
  Cyclic GFR-binding peptide
KLSATSILYYDKGVVTYLRKHRGMAVSE

SEQ ID NO: 87092 - protein, 36 aa, Artificial Sequence; identical to SEQ ID NO: 34202
  Cyclic GFR-binding peptide
  MOD_RES (1), (2), (34), (36): Xaa is C or S

SEQ ID NO: 87093 - protein, 26 aa, Artificial Sequence
  Cyclic GFR-binding peptide
  MOD_RES (1), (1): Xaa is C or S
XVPTRLSATSILYYDSANNVVLRKHR

SEQ ID NO: 87094 - protein, 31 aa, Artificial Sequence; identical to SEQ ID NO: 34204
  Cyclic GFR-binding peptide
  MOD_RES (1), (1): Xaa is C or S

SEQ ID NO: 87095 - protein, 38 aa, Artificial Sequence; identical to SEQ ID NO: 34205
  Cyclic GFR-binding peptide
  MOD_RES (4), (5), (36), (38): Xaa is C or S

SEQ ID NO: 87096 - protein, 30 aa, Artificial Sequence
  Cyclic GFR-binding peptide
  MOD_RES (30), (30): Xaa is C or S
TKMSATSMLYYNDKQQIILRKHRGMVVDRX

SEQ ID NO: 87097 - protein, 34 aa, Artificial Sequence; identical to SEQ ID NO: 34207
  Cyclic GFR-binding peptide
  MOD_RES (32), (34): Xaa is C or S

SEQ ID NO: 87098 - protein, 27 aa, Artificial Sequence
  Cyclic GFR-binding peptide
QDLSPINILYFIGKTPKIYGKIPMIVK

SEQ ID NO: 87099 - protein, 40 aa, Artificial Sequence; identical to SEQ ID NO: 34208
  Cyclic GFR-binding peptide
  MOD_RES (6), (7), (38), (40): Xaa is C or S

SEQ ID NO: 87100 - protein, 37 aa, Artificial Sequence; identical to SEQ ID NO: 34210
  Cyclic GFR-binding peptide
  MOD_RES (1), (2), (34), (36): Xaa is C or S

SEQ ID NO: 87101 - protein, 39 aa, Artificial Sequence; identical to SEQ ID NO: 34211
  Cyclic GFR-binding peptide
  MOD_RES (5), (6), (37), (39): Xaa is C or S

SEQ ID NO: 87102 - protein, 34 aa, Artificial Sequence
  Cyclic GFR-binding peptide
  MOD_RES (31), (33): Xaa is C or S
PEKMNAISILYFDENKNVVLKKYRNMTVESXAXR

SEQ ID NO: 87103 - protein, 32 aa, Artificial Sequence
  Cyclic GFR-binding peptide
  MOD_RES (29), (31): Xaa is C or S
KMSPINILYFDENKNVVYGKIPNMTVESXAXR

SEQ ID NO: 87104 - protein, 34 aa, Artificial Sequence; identical to SEQ ID NO: 34214
  Cyclic GFR-binding peptide
  MOD_RES (2), (3): Xaa is C or S

SEQ ID NO: 87105 - protein, 29 aa, Artificial Sequence
  Cyclic GFR-binding peptide
  MOD_RES (2), (3): Xaa is C or S
PXXTPTKMSPISMLYKNDKQQIILKYHYG

SEQ ID NO: 87106 - protein, 34 aa, Artificial Sequence
  Cyclic GFR-binding peptide
  MOD_RES (6), (7): Xaa is C or S
GIPEPXXVPEKMSPINILYFDENKNVVYGKIPNM

SEQ ID NO: 87107 - protein, 30 aa, Artificial Sequence
  Cyclic GFR-binding peptide
  MOD_RES (27), (29): Xaa is C or S
NAISILYFDENKNVVLKKYRNMTVESXAXR

SEQ ID NO: 87108 - protein, 35 aa, Artificial Sequence
  Cyclic GFR-binding peptide
  MOD_RES (5), (6): Xaa is C or S
SAGPXXTPTKMSPISMLYKNDKQQIILKYHYGMVV

SEQ ID NO: 87109 - protein, 40 aa, Artificial Sequence; identical to SEQ ID NO: 34215
  Cyclic GFR-binding peptide
  MOD_RES (5), (6), (38), (40): Xaa is C or S

SEQ ID NO: 87110 - protein, 23 aa, Artificial Sequence
  Cyclic GFR-binding peptide
LSATSILYYDSANNVVLRKHRDM

SEQ ID NO: 87111 - protein, 28 aa, Artificial Sequence
  Cyclic GFR-binding peptide
PTKMEPISMLYLNDKQQIIKFKYEGMVV

SEQ ID NO: 87112 - protein, 33 aa, Artificial Sequence
  Cyclic GFR-binding peptide
  MOD_RES (30), (32): Xaa is C or S
TRLSPISILYKDSANNVVLKYHYDMVVESXGXR

SEQ ID NO: 87113 - protein, 28 aa, Artificial Sequence
  Cyclic GFR-binding peptide
  MOD_RES (1), (1): Xaa is C or S
XVPEKMSATSILYYDENKNVVLRKHRNM

SEQ ID NO: 87114 - protein, 24 aa, Artificial Sequence
  Cyclic GFR-binding peptide
EKMEPISILYLDENKNVVKFKYEN

SEQ ID NO: 87115 - protein, 37 aa, Artificial Sequence; identical to SEQ ID NO: 34216
  Cyclic GFR-binding peptide
  MOD_RES (4), (5), (36): Xaa is C or S

SEQ ID NO: 87116 - protein, 25 aa, Artificial Sequence
  Cyclic GFR-binding peptide
VPEKMSPISILYKDENKNVVLKYHY

SEQ ID NO: 87117 - protein, 22 aa, Artificial Sequence
  Cyclic GFR-binding peptide
MEPISILYLDENKNVVKFKYEN

SEQ ID NO: 87118 - protein, 35 aa, Artificial Sequence
  Cyclic GFR-binding peptide
  MOD_RES (6), (7): Xaa is C or S
GSAGPXXTPTKMSATSMLYYNDKQQIILRKHRGMV

SEQ ID NO: 87119 - protein, 32 aa, Artificial Sequence; identical to SEQ ID NO: 34218
  Cyclic GFR-binding peptide
  MOD_RES (1), (2): Xaa is C or S

SEQ ID NO: 87120 - protein, 32 aa, Artificial Sequence
  Cyclic GFR-binding peptide
  MOD_RES (4), (5): Xaa is C or S
PEPXXVPEKMSPINILYFDENKNVVYGKIPNM

SEQ ID NO: 87121 - protein, 27 aa, Artificial Sequence
  Cyclic GFR-binding peptide
MEPISILYLDENKNVVKFKYENMTVES

SEQ ID NO: 87122 - protein, 22 aa, Artificial Sequence
  Cyclic GFR-binding peptide
SATSMLYYNDKQQIILRKHRGM

SEQ ID NO: 87123 - protein, 22 aa, Artificial Sequence
  Cyclic GFR-binding peptide
KTEPISMLYLDNGRVLLKFKYE

SEQ ID NO: 87124 - protein, 33 aa, Artificial Sequence
  Cyclic GFR-binding peptide
  MOD_RES (5), (6): Xaa is C or S
APASXXVPARLSATSILYYDAANNVVLRKHRDM

SEQ ID NO: 87125 - protein, 27 aa, Artificial Sequence
  Cyclic GFR-binding peptide
LSATSILYYDSANNVVLRKHRDMVVES

SEQ ID NO: 87126 - protein, 35 aa, Artificial Sequence; identical to SEQ ID NO: 34220
  Cyclic GFR-binding peptide
  MOD_RES (1), (2), (34): Xaa is C or S

SEQ ID NO: 87127 - protein, 26 aa, Artificial Sequence
  Cyclic GFR-binding peptide
PEKMSPINILYFDENKNVVYGKIPNM

SEQ ID NO: 87128 - protein, 30 aa, Artificial Sequence
  Cyclic GFR-binding peptide
  MOD_RES (28), (30): Xaa is C or S
KTSPISMLYKDNGRVLLLKYHYMIVEEXGX

SEQ ID NO: 87129 - protein, 30 aa, Artificial Sequence
  Cyclic GFR-binding peptide
  MOD_RES (1), (2): Xaa is C or S
XXVPTRLSATSILYYDSANNVVLRKHRDMV

SEQ ID NO: 87130 - protein, 29 aa, Artificial Sequence
  Cyclic GFR-binding peptide
  MOD_RES (1), (1): Xaa is C or S
XVPQDLSPINILYFVGRTPKVYGKIPMVV

SEQ ID NO: 87131 - protein, 39 aa, Artificial Sequence; identical to SEQ ID NO: 34222
  Cyclic GFR-binding peptide
  MOD_RES (4), (5), (37), (39): Xaa is C or S

SEQ ID NO: 87132 - protein, 29 aa, Artificial Sequence
  Cyclic GFR-binding peptide
TPTKMSATSMLYYNDKQQIILRKHRGMVV

SEQ ID NO: 87133 - protein, 38 aa, Artificial Sequence; identical to SEQ ID NO: 34224
  Cyclic GFR-binding peptide
  MOD_RES (2), (3), (35), (37): Xaa is C or S

SEQ ID NO: 87134 - protein, 25 aa, Artificial Sequence
  Cyclic GFR-binding peptide
MSPINILYFDENKNVVYGKIPNMTV

SEQ ID NO: 87135 - protein, 30 aa, Artificial Sequence
  Cyclic GFR-binding peptide
  MOD_RES (30), (30): Xaa is C or S
EKMSPISILYKDENKNVVLKYHYNMTVESX

SEQ ID NO: 87136 - protein, 33 aa, Artificial Sequence
  Cyclic GFR-binding peptide
  MOD_RES (3), (4): Xaa is C or S
GPXXTPTKMSPISMLYKNDKQQIILKYHYGMVV

SEQ ID NO: 87137 - protein, 23 aa, Artificial Sequence
  Cyclic GFR-binding peptide
SPINILYFIGKTPKIYGKIPMIV

SEQ ID NO: 87138 - protein, 27 aa, Artificial Sequence
  Cyclic GFR-binding peptide
  MOD_RES (1), (1): Xaa is C or S
XVPTRLSATSILYYDSANNVVLRKHRD

SEQ ID NO: 87139 - protein, 31 aa, Artificial Sequence; identical to SEQ ID NO: 34228
  Cyclic GFR-binding peptide
  MOD_RES (1), (1): Xaa is C or S

SEQ ID NO: 87140 - protein, 30 aa, Artificial Sequence
  Cyclic GFR-binding peptide
  MOD_RES (1), (1): Xaa is C or S
XVPQALSPINILYFVGRKPKVYGKIPMIVR

SEQ ID NO: 87141 - protein, 22 aa, Artificial Sequence
  Cyclic GFR-binding peptide
EPISMLYLDNGRVLLKFKYEMI

SEQ ID NO: 87142 - protein, 25 aa, Artificial Sequence
  Cyclic GFR-binding peptide
VPEKMNAISILYFDENKNVVLKKYR

SEQ ID NO: 87143 - protein, 30 aa, Artificial Sequence
  Cyclic GFR-binding peptide
  MOD_RES (27), (29): Xaa is C or S
SPINILYFDENKNVVYGKIPNMTVESXAXR

SEQ ID NO: 87144 - protein, 27 aa, Artificial Sequence
  Cyclic GFR-binding peptide
  MOD_RES (1), (2): Xaa is C or S
XXAPVKTSPISMLYKDNGRVLLLKYHY

SEQ ID NO: 87145 - protein, 33 aa, Artificial Sequence
  Cyclic GFR-binding peptide
  MOD_RES (31), (33): Xaa is C or S
PTKMSPISMLYKNDKQQIILKYHYGMVVDRXGX

SEQ ID NO: 87146 - protein, 35 aa, Artificial Sequence
  Cyclic GFR-binding peptide
  MOD_RES (6), (7): Xaa is C or S
HVPKPXXAPTKLEPISVLYLDDSSNVIKFKYENMV

SEQ ID NO: 87147 - protein, 39 aa, Artificial Sequence; identical to SEQ ID NO: 34232
  Cyclic GFR-binding peptide
  MOD_RES (4), (5), (37), (39): Xaa is C or S

SEQ ID NO: 87148 - protein, 33 aa, Artificial Sequence
  Cyclic GFR-binding peptide
  MOD_RES (4), (5): Xaa is C or S
PEPXXVPEKMEPISILYLDENKNVVKFKYENMT

SEQ ID NO: 87149 - protein, 31 aa, Artificial Sequence
  Cyclic GFR-binding peptide
  MOD_RES (3), (4): Xaa is C or S
SPXXVSQDLSPINILYFIGKTPKIYGKIPMI

SEQ ID NO: 87150 - protein, 27 aa, Artificial Sequence
  Cyclic GFR-binding peptide
  MOD_RES (1), (2): Xaa is C or S
XXVPEKMEPISILYLDENKNVVKFKYE

SEQ ID NO: 87151 - protein, 34 aa, Artificial Sequence
  Cyclic GFR-binding peptide
  MOD_RES (31), (33): Xaa is C or S
PEKMSPINILYFDENKNVVYGKIPNMTVESXAXR

SEQ ID NO: 87152 - protein, 33 aa, Artificial Sequence; identical to SEQ ID NO: 34234
  Cyclic GFR-binding peptide
  MOD_RES (2), (3): Xaa is C or S

SEQ ID NO: 87153 - protein, 20 aa, Artificial Sequence
  Cyclic GFR-binding peptide
EPISILYLDENKNVVKFKYE

SEQ ID NO: 87154 - protein, 39 aa, Artificial Sequence; identical to SEQ ID NO: 34236
  Cyclic GFR-binding peptide
  MOD_RES (3), (4), (36), (38): Xaa is C or S

SEQ ID NO: 87155 - protein, 35 aa, Artificial Sequence
  Cyclic GFR-binding peptide
  MOD_RES (6), (7): Xaa is C or S
GIPEPXXVPEKMNAISILYFDENKNVVLKKYRNMT

SEQ ID NO: 87156 - protein, 22 aa, Artificial Sequence
  Cyclic GFR-binding peptide
SPISMLYKNDKQQIILKYHYGM

SEQ ID NO: 87157 - protein, 25 aa, Artificial Sequence
  Cyclic GFR-binding peptide
PVKTSATSMLYYDNGRVLLLRKHRM

SEQ ID NO: 87158 - protein, 32 aa, Artificial Sequence
  Cyclic GFR-binding peptide
  MOD_RES (2), (3): Xaa is C or S
PXXVPEKMSPISILYKDENKNVVLKYHYNMTV

SEQ ID NO: 87159 - protein, 37 aa, Artificial Sequence; identical to SEQ ID NO: 34241
  Cyclic GFR-binding peptide
  MOD_RES (3), (4), (36): Xaa is C or S

SEQ ID NO: 87160 - protein, 27 aa, Artificial Sequence
  Cyclic GFR-binding peptide
KTEPISMLYLDNGRVLLKFKYEMIVEE

SEQ ID NO: 87161 - protein, 27 aa, Artificial Sequence
  Cyclic GFR-binding peptide
MNAISILYFDENKNVVLKKYRNMTVES

SEQ ID NO: 87162 - protein, 30 aa, Artificial Sequence
  Cyclic GFR-binding peptide
  MOD_RES (4), (5): Xaa is C or S
AGPXXTPTKMSATSMLYYNDKQQIILRKHR

SEQ ID NO: 87163 - protein, 24 aa, Artificial Sequence
  Cyclic GFR-binding peptide
LSATSILYYDAANNVVLRKHRDMV

SEQ ID NO: 87164 - protein, 32 aa, Artificial Sequence
  Cyclic GFR-binding peptide
  MOD_RES (29), (31): Xaa is C or S
RLSATSILYYDSANNVVLRKHRDMVVESXGXR

SEQ ID NO: 87165 - protein, 37 aa, Artificial Sequence; identical to SEQ ID NO: 34244
  Cyclic GFR-binding peptide
  MOD_RES (5), (6): Xaa is C or S

SEQ ID NO: 87166 - protein, 25 aa, Artificial Sequence
  Cyclic GFR-binding peptide
PEKMEPISILYLDENKNVVKFKYEN

SEQ ID NO: 87167 - protein, 32 aa, Artificial Sequence
  Cyclic GFR-binding peptide
  MOD_RES (29), (31): Xaa is C or S
KMNAISILYFDENKNVVLKKYRNMTVESXAXR

SEQ ID NO: 87168 - protein, 34 aa, Artificial Sequence
  Cyclic GFR-binding peptide
  MOD_RES (5), (6): Xaa is C or S
IPEPXXVPEKMSPINILYFDENKNVVYGKIPNMT

SEQ ID NO: 87169 - protein, 30 aa, Artificial Sequence
  Cyclic GFR-binding peptide
  MOD_RES (30), (30): Xaa is C or S
ARLSATSILYYDAANNVVLRKHRDMVVEAX

SEQ ID NO: 87170 - protein, 29 aa, Artificial Sequence
  Cyclic GFR-binding peptide
  MOD_RES (27), (29): Xaa is C or S
SATSILYYDKGVVTYLRKHRGMAVSEXGX

SEQ ID NO: 87171 - protein, 35 aa, Artificial Sequence; identical to SEQ ID NO: 34249
  Cyclic GFR-binding peptide
  MOD_RES (32), (34): Xaa is C or S

SEQ ID NO: 87172 - protein, 37 aa, Artificial Sequence; identical to SEQ ID NO: 34250
  Cyclic GFR-binding peptide
  MOD_RES (2), (3), (34), (36): Xaa is C or S

SEQ ID NO: 87173 - protein, 35 aa, Artificial Sequence; identical to SEQ ID NO: 34251
  Cyclic GFR-binding peptide
  MOD_RES (32), (34): Xaa is C or S

SEQ ID NO: 87174 - protein, 31 aa, Artificial Sequence
  Cyclic GFR-binding peptide
  MOD_RES (1), (2): Xaa is C or S
XXAPVKTSATSMLYYDNGRVLLLRKHRMIVE

SEQ ID NO: 87175 - protein, 23 aa, Artificial Sequence
  Cyclic GFR-binding peptide
SATSILYYDKGVVTYLRKHRGMA

SEQ ID NO: 87176 - protein, 32 aa, Artificial Sequence
  Cyclic GFR-binding peptide
  MOD_RES (31), (31): Xaa is C or S
PTRLSATSILYYDSANNVVLRKHRDMVVESXG

SEQ ID NO: 87177 - protein, 41 aa, Artificial Sequence; identical to SEQ ID NO: 34252
  Cyclic GFR-binding peptide
  MOD_RES (5), (6), (38), (40): Xaa is C or S

SEQ ID NO: 87178 - protein, 20 aa, Artificial Sequence
  Cyclic GFR-binding peptide
SATSILYYDSANNVVLRKHR

SEQ ID NO: 87179 - protein, 40 aa, Artificial Sequence; identical to SEQ ID NO: 34255
  Cyclic GFR-binding peptide
  MOD_RES (4), (5), (37), (39): Xaa is C or S

SEQ ID NO: 87180 - protein, 24 aa, Artificial Sequence
  Cyclic GFR-binding peptide
VKTSATSMLYYDNGRVLLLRKHRM

SEQ ID NO: 87181 - protein, 31 aa, Artificial Sequence
  Cyclic GFR-binding peptide
  MOD_RES (29), (31): Xaa is C or S
KMSPINILYFDENKNVVYGKIPNMTVESXAX

SEQ ID NO: 87182 - protein, 33 aa, Artificial Sequence; identical to SEQ ID NO: 34256
  Cyclic GFR-binding peptide
  MOD_RES (1), (32): Xaa is C or S

SEQ ID NO: 87183 - protein, 34 aa, Artificial Sequence
  Cyclic GFR-binding peptide
  MOD_RES (4), (5): Xaa is C or S
PEPXXVPEKMSPISILYKDENKNVVLKYHYNMTV

SEQ ID NO: 87184 - protein, 35 aa, Artificial Sequence; identical to SEQ ID NO: 34258
  Cyclic GFR-binding peptide
  MOD_RES (2), (3), (35): Xaa is C or S

SEQ ID NO: 87185 - protein, 32 aa, Artificial Sequence
  Cyclic GFR-binding peptide
  MOD_RES (29), (31): Xaa is C or S
QALSPINILYFVGRKPKVYGKIPMIVRSXKXS

SEQ ID NO: 87186 - protein, 38 aa, Artificial Sequence; identical to SEQ ID NO: 34259
  Cyclic GFR-binding peptide
  MOD_RES (3), (4), (35), (37): Xaa is C or S

SEQ ID NO: 87187 - protein, 29 aa, Artificial Sequence
  Cyclic GFR-binding peptide
  MOD_RES (2), (3): Xaa is C or S
PXXVPEKMSATSILYYDENKNVVLRKHRN

SEQ ID NO: 87188 - protein, 41 aa, Artificial Sequence; identical to SEQ ID NO: 34260
  Cyclic GFR-binding peptide
  MOD_RES (6), (7), (38), (40): Xaa is C or S

SEQ ID NO: 87189 - protein, 27 aa, Artificial Sequence
  Cyclic GFR-binding peptide
  MOD_RES (1), (2): Xaa is C or S
XXVPTRLEPISILYLDSANNVVKFKYE

SEQ ID NO: 87190 - protein, 36 aa, Artificial Sequence; identical to SEQ ID NO: 34261
  Cyclic GFR-binding peptide
  MOD_RES (4), (5): Xaa is C or S

SEQ ID NO: 87191 - protein, 38 aa, Artificial Sequence; identical to SEQ ID NO: 34262
  Cyclic GFR-binding peptide
  MOD_RES (6), (7), (38): Xaa is C or S

SEQ ID NO: 87192 - protein, 29 aa, Artificial Sequence
  Cyclic GFR-binding peptide
  MOD_RES (28), (28): Xaa is C or S
MSPISILYKDENKNVVLKYHYNMTVESXA

SEQ ID NO: 87193 - protein, 31 aa, Artificial Sequence
  Cyclic GFR-binding peptide
  MOD_RES (30), (30): Xaa is C or S
EKMNAISILYFDENKNVVLKKYRNMTVESXA

SEQ ID NO: 87194 - protein, 21 aa, Artificial Sequence
  Cyclic GFR-binding peptide
LSPINILYFIGKTPKIYGKIP

SEQ ID NO: 87195 - protein, 23 aa, Artificial Sequence
  Cyclic GFR-binding peptide
KMSPINILYFDENKNVVYGKIPN

SEQ ID NO: 87196 - protein, 32 aa, Artificial Sequence
  Cyclic GFR-binding peptide
  MOD_RES (5), (6): Xaa is C or S
SAGPXXTPTKMEPISMLYLNDKQQIIKFKYEG

SEQ ID NO: 87197 - protein, 40 aa, Artificial Sequence; identical to SEQ ID NO: 34264
  Cyclic GFR-binding peptide
  MOD_RES (5), (6), (38), (40): Xaa is C or S

SEQ ID NO: 87198 - protein, 26 aa, Artificial Sequence
  Cyclic GFR-binding peptide
MSPISILYKDENKNVVLKYHYNMTVE

SEQ ID NO: 87199 - protein, 38 aa, Artificial Sequence; identical to SEQ ID NO: 34267
  Cyclic GFR-binding peptide
  MOD_RES (6), (7), (38): Xaa is C or S

SEQ ID NO: 87200 - protein, 33 aa, Artificial Sequence
  Cyclic GFR-binding peptide
  MOD_RES (3), (4): Xaa is C or S
KAXXVPTKLSATSILYYDKGVVTYLRKHRGMAV

SEQ ID NO: 87201 - protein, 32 aa, Artificial Sequence; identical to SEQ ID NO: 34269
  Cyclic GFR-binding peptide
  MOD_RES (32), (32): Xaa is C or S

SEQ ID NO: 87202 - protein, 32 aa, Artificial Sequence
  Cyclic GFR-binding peptide
  MOD_RES (5), (6): Xaa is C or S
SAGPXXTPTKMSPISMLYKNDKQQIILKYHYG

SEQ ID NO: 87203 - protein, 31 aa, Artificial Sequence
  Cyclic GFR-binding peptide
  MOD_RES (5), (6): Xaa is C or S
VPSTXXAPVKTEPISMLYLDNGRVLLKFKYE

SEQ ID NO: 87204 - protein, 28 aa, Artificial Sequence
  Cyclic GFR-binding peptide
PVKTEPISMLYLDNGRVLLKFKYEMIVE

SEQ ID NO: 87205 - protein, 40 aa, Artificial Sequence; identical to SEQ ID NO: 34270
  Cyclic GFR-binding peptide
  MOD_RES (6), (7), (38), (40): Xaa is C or S

SEQ ID NO: 87206 - protein, 36 aa, Artificial Sequence; identical to SEQ ID NO: 34271
  Cyclic GFR-binding peptide
  MOD_RES (3), (4), (36): Xaa is C or S

SEQ ID NO: 87207 - protein, 28 aa, Artificial Sequence
  Cyclic GFR-binding peptide
  MOD_RES (2), (3): Xaa is C or S
TXXVPTRLSATSILYYDSANNVVLRKHR

SEQ ID NO: 87208 - protein, 32 aa, Artificial Sequence
  Cyclic GFR-binding peptide
  MOD_RES (5), (6): Xaa is C or S
ASKAXXVPTKLSATSILYYDKGVVTYLRKHRG

SEQ ID NO: 87209 - protein, 23 aa, Artificial Sequence
  Cyclic GFR-binding peptide
KMSPISMLYKNDKQQIILKYHYG

SEQ ID NO: 87210 - protein, 27 aa, Artificial Sequence
  Cyclic GFR-binding peptide
EKMSPISILYKDENKNVVLKYHYNMTV

SEQ ID NO: 87211 - protein, 32 aa, Artificial Sequence; identical to SEQ ID NO: 34275
  Cyclic GFR-binding peptide
  MOD_RES (1), (1): Xaa is C or S

SEQ ID NO: 87212 - protein, 33 aa, Artificial Sequence; identical to SEQ ID NO: 34276
  Cyclic GFR-binding peptide
  MOD_RES (1), (2), (33): Xaa is C or S

SEQ ID NO: 87213 - protein, 23 aa, Artificial Sequence
  Cyclic GFR-binding peptide
KMEPISMLYLNDKQQIIKFKYEG

SEQ ID NO: 87214 - protein, 32 aa, Artificial Sequence; identical to SEQ ID NO: 34277
  Cyclic GFR-binding peptide
  MOD_RES (1), (2): Xaa is C or S

SEQ ID NO: 87215 - protein, 25 aa, Artificial Sequence
  Cyclic GFR-binding peptide
QALSPINILYFVGRKPKVYGKIPMI

SEQ ID NO: 87216 - protein, 36 aa, Artificial Sequence; identical to SEQ ID NO: 34279
  Cyclic GFR-binding peptide
  MOD_RES (2), (3), (35): Xaa is C or S

SEQ ID NO: 87217 - protein, 34 aa, Artificial Sequence
  Cyclic GFR-binding peptide
  MOD_RES (4), (5): Xaa is C or S
PEPXXVPEKMSATSILYYDENKNVVLRKHRNMTV

SEQ ID NO: 87218 - protein, 26 aa, Artificial Sequence
  Cyclic GFR-binding peptide
PARLSATSILYYDAANNVVLRKHRDM

SEQ ID NO: 87219 - protein, 30 aa, Artificial Sequence
  Cyclic GFR-binding peptide
  MOD_RES (27), (29): Xaa is C or S
SATSILYYDKGVVTYLRKHRGMAVSEXGXR

SEQ ID NO: 87220 - protein, 35 aa, Artificial Sequence
  Cyclic GFR-binding peptide
  MOD_RES (6), (7): Xaa is C or S
GSAGPXXTPTKMSPISMLYKNDKQQIILKYHYGMV

SEQ ID NO: 87221 - protein, 38 aa, Artificial Sequence; identical to SEQ ID NO: 34281
  Cyclic GFR-binding peptide
  MOD_RES (2), (3), (35), (37): Xaa is C or S

SEQ ID NO: 87222 - protein, 31 aa, Artificial Sequence
  Cyclic GFR-binding peptide
  MOD_RES (2), (3): Xaa is C or S
TXXAPVKTSPISMLYKDNGRVLLLKYHYMIV

SEQ ID NO: 87223 - protein, 37 aa, Artificial Sequence; identical to SEQ ID NO: 34282
  Cyclic GFR-binding peptide
  MOD_RES (6), (7): Xaa is C or S

SEQ ID NO: 87224 - protein, 33 aa, Artificial Sequence; identical to SEQ ID NO: 34284
  Cyclic GFR-binding peptide
  MOD_RES (1), (2), (33): Xaa is C or S

SEQ ID NO: 87225 - protein, 29 aa, Artificial Sequence
  Cyclic GFR-binding peptide
EPISILYLDSANNVVKFKYEAAAAAAAAA

SEQ ID NO: 87226 - protein, 26 aa, Artificial Sequence
  Cyclic GFR-binding peptide
  MOD_RES (1), (1): Xaa is C or S
XVPEKMSATSILYYDENKNVVLRKHR

SEQ ID NO: 87227 - protein, 32 aa, Artificial Sequence
  Cyclic GFR-binding peptide
  MOD_RES (3), (4): Xaa is C or S
STXXAPVKTSATSMLYYDNGRVLLLRKHRMIV

SEQ ID NO: 87228 - protein, 21 aa, Artificial Sequence
  Cyclic GFR-binding peptide
LEPISILYLDSANNVVKFKYE

SEQ ID NO: 87229 - protein, 38 aa, Artificial Sequence; identical to SEQ ID NO: 34286
  Cyclic GFR-binding peptide
  MOD_RES (6), (7): Xaa is C or S

SEQ ID NO: 87230 - protein, 39 aa, Artificial Sequence; identical to SEQ ID NO: 34287
  Cyclic GFR-binding peptide
  MOD_RES (4), (5), (36), (38): Xaa is C or S

SEQ ID NO: 87231 - protein, 32 aa, Artificial Sequence
  Cyclic GFR-binding peptide
  MOD_RES (3), (4): Xaa is C or S
STXXAPVKTSPISMLYKDNGRVLLLKYHYMIV

SEQ ID NO: 87232 - protein, 38 aa, Artificial Sequence; identical to SEQ ID NO: 34288
  Cyclic GFR-binding peptide
  MOD_RES (4), (5), (37): Xaa is C or S

SEQ ID NO: 87233 - protein, 30 aa, Artificial Sequence
  Cyclic GFR-binding peptide
  MOD_RES (30), (30): Xaa is C or S
TRLEPISILYLDSANNVVKFKYEDMVVESX

SEQ ID NO: 87234 - protein, 33 aa, Artificial Sequence
  Cyclic GFR-binding peptide
  MOD_RES (6), (7): Xaa is C or S
ASASPXXVSQDLSPINILYFIGKTPKIYGKIPM

SEQ ID NO: 87235 - protein, 30 aa, Artificial Sequence
  Cyclic GFR-binding peptide
PEKMSPINILYFDENKNVVYGKIPNMTVES

SEQ ID NO: 87236 - protein, 25 aa, Artificial Sequence
  Cyclic GFR-binding peptide
TPTKMEPISMLYLNDKQQIIKFKYE

SEQ ID NO: 87237 - protein, 33 aa, Artificial Sequence
  Cyclic GFR-binding peptide
  MOD_RES (6), (7): Xaa is C or S
ASAAPXXVPQALSPINILYFVGRKPKVYGKIPM

SEQ ID NO: 87238 - protein, 39 aa, Artificial Sequence; identical to SEQ ID NO: 34290
  Cyclic GFR-binding peptide
  MOD_RES (4), (5), (36), (38): Xaa is C or S

SEQ ID NO: 87239 - protein, 34 aa, Artificial Sequence
  Cyclic GFR-binding peptide
  MOD_RES (5), (6): Xaa is C or S
SASPXXVSQDLSPINILYFIGKTPKIYGKIPMIV

SEQ ID NO: 87240 - protein, 37 aa, Artificial Sequence; identical to SEQ ID NO: 34291
  Cyclic GFR-binding peptide
  MOD_RES (4), (5), (37): Xaa is C or S

SEQ ID NO: 87241 - protein, 30 aa, Artificial Sequence
  Cyclic GFR-binding peptide
  MOD_RES (27), (29): Xaa is C or S
TSPISMLYKDNGRVLLLKYHYMIVEEXGXL

SEQ ID NO: 87242 - protein, 27 aa, Artificial Sequence
  Cyclic GFR-binding peptide
KTSATSMLYYDNGRVLLLRKHRMIVEE

SEQ ID NO: 87243 - protein, 36 aa, Artificial Sequence; identical to SEQ ID NO: 34292
  Cyclic GFR-binding peptide
  MOD_RES (2), (3), (35): Xaa is C or S

SEQ ID NO: 87244 - protein, 33 aa, Artificial Sequence
  Cyclic GFR-binding peptide
  MOD_RES (3), (4): Xaa is C or S
GPXXTPTKMSATSMLYYNDKQQIILRKHRGMVV

SEQ ID NO: 87245 - protein, 34 aa, Artificial Sequence; identical to SEQ ID NO: 34294
  Cyclic GFR-binding peptide
  MOD_RES (1), (33): Xaa is C or S

SEQ ID NO: 87246 - protein, 29 aa, Artificial Sequence
  Cyclic GFR-binding peptide
TPTKMSPISMLYKNDKQQIILKYHYGMVV

SEQ ID NO: 87247 - protein, 25 aa, Artificial Sequence
  Cyclic GFR-binding peptide
LSPINILYFIGKTPKIYGKIPMIVK

SEQ ID NO: 87248 - protein, 31 aa, Artificial Sequence; identical to SEQ ID NO: 34295
  Cyclic GFR-binding peptide
  MOD_RES (1), (1): Xaa is C or S

SEQ ID NO: 87249 - protein, 32 aa, Artificial Sequence
  Cyclic GFR-binding peptide
  MOD_RES (29), (31): Xaa is C or S
KLSATSILYYDKGVVTYLRKHRGMAVSEXGXR

SEQ ID NO: 87250 - protein, 25 aa, Artificial Sequence
  Cyclic GFR-binding peptide
VPQALSPINILYFVGRKPKVYGKIP

SEQ ID NO: 87251 - protein, 22 aa, Artificial Sequence
  Cyclic GFR-binding peptide
NAISILYFDENKNVVLKKYRNM

SEQ ID NO: 87252 - protein, 32 aa, Artificial Sequence
  Cyclic GFR-binding peptide
  MOD_RES (4), (5): Xaa is C or S
AAPXXVPQALSPINILYFVGRKPKVYGKIPMI

SEQ ID NO: 87253 - protein, 30 aa, Artificial Sequence
  Cyclic GFR-binding peptide
  MOD_RES (27), (29): Xaa is C or S
EPISILYLDSANNVVKFKYEDMVVESXGXR

SEQ ID NO: 87254 - protein, 27 aa, Artificial Sequence
  Cyclic GFR-binding peptide
SQDLSPINILYFIGKTPKIYGKIPMIV

SEQ ID NO: 87255 - protein, 26 aa, Artificial Sequence
  Cyclic GFR-binding peptide
QDLSPINILYFVGRTPKVYGKIPMVV

SEQ ID NO: 87256 - protein, 31 aa, Artificial Sequence
  Cyclic GFR-binding peptide
  MOD_RES (2), (3): Xaa is C or S
PXXVPQALSPINILYFVGRKPKVYGKIPMIV

SEQ ID NO: 87257 - protein, 29 aa, Artificial Sequence
  Cyclic GFR-binding peptide
  MOD_RES (2), (3): Xaa is C or S
TXXAPVKTSPISMLYKDNGRVLLLKYHYM

SEQ ID NO: 87258 - protein, 38 aa, Artificial Sequence; identical to SEQ ID NO: 34301
  Cyclic GFR-binding peptide
  MOD_RES (6), (7): Xaa is C or S

SEQ ID NO: 87259 - protein, 27 aa, Artificial Sequence
  Cyclic GFR-binding peptide
ARLSATSILYYDAANNVVLRKHRDMVV

SEQ ID NO: 87260 - protein, 20 aa, Artificial Sequence
  Cyclic GFR-binding peptide
NAISILYFDENKNVVLKKYR

SEQ ID NO: 87261 - protein, 39 aa, Artificial Sequence; identical to SEQ ID NO: 34302
  Cyclic GFR-binding peptide
  MOD_RES (3), (4), (36), (38): Xaa is C or S

SEQ ID NO: 87262 - protein, 28 aa, Artificial Sequence
  Cyclic GFR-binding peptide
  MOD_RES (1), (1): Xaa is C or S
XVPEKMSPISILYKDENKNVVLKYHYNM

SEQ ID NO: 87263 - protein, 38 aa, Artificial Sequence; identical to SEQ ID NO: 34304
  Cyclic GFR-binding peptide
  MOD_RES (3), (4), (35), (37): Xaa is C or S

SEQ ID NO: 87264 - protein, 28 aa, Artificial Sequence
  Cyclic GFR-binding peptide
  MOD_RES (1), (1): Xaa is C or S
XVPTKLSATSILYYDKGVVTYLRKHRGM

SEQ ID NO: 87265 - protein, 36 aa, Artificial Sequence; identical to SEQ ID NO: 34308
  Cyclic GFR-binding peptide
  MOD_RES (1), (2), (33), (35): Xaa is C or S

SEQ ID NO: 87266 - protein, 34 aa, Artificial Sequence; identical to SEQ ID NO: 34311
  Cyclic GFR-binding peptide
  MOD_RES (2), (3): Xaa is C or S

SEQ ID NO: 87267 - protein, 39 aa, Artificial Sequence; identical to SEQ ID NO: 34312
  Cyclic GFR-binding peptide
  MOD_RES (6), (7), (39): Xaa is C or S

SEQ ID NO: 87268 - protein, 40 aa, Artificial Sequence; identical to SEQ ID NO: 34313
  Cyclic GFR-binding peptide
  MOD_RES (5), (6), (38), (40): Xaa is C or S

SEQ ID NO: 87269 - protein, 34 aa, Artificial Sequence; identical to SEQ ID NO: 34314
  Cyclic GFR-binding peptide
  MOD_RES (1), (33): Xaa is C or S

SEQ ID NO: 87270 - protein, 29 aa, Artificial Sequence
  Cyclic GFR-binding peptide
  MOD_RES (2), (3): Xaa is C or S
PXXVPQALSPINILYFVGRKPKVYGKIPM

SEQ ID NO: 87271 - protein, 32 aa, Artificial Sequence
  Cyclic GFR-binding peptide
  MOD_RES (6), (7): Xaa is C or S
GIPEPXXVPEKMSATSILYYDENKNVVLRKHR

SEQ ID NO: 87272 - protein, 32 aa, Artificial Sequence; identical to SEQ ID NO: 34315
  Cyclic GFR-binding peptide
  MOD_RES (1), (2): Xaa is C or S

SEQ ID NO: 87273 - protein, 31 aa, Artificial Sequence
  Cyclic GFR-binding peptide
  MOD_RES (3), (4): Xaa is C or S
APXXVPQALSPINILYFVGRKPKVYGKIPMI

SEQ ID NO: 87274 - protein, 35 aa, Artificial Sequence; identical to SEQ ID NO: 34316
  Cyclic GFR-binding peptide
  MOD_RES (2), (3), (35): Xaa is C or S

SEQ ID NO: 87275 - protein, 39 aa, Artificial Sequence; identical to SEQ ID NO: 34317
  Cyclic GFR-binding peptide
  MOD_RES (5), (6), (38): Xaa is C or S

SEQ ID NO: 87276 - protein, 34 aa, Artificial Sequence; identical to SEQ ID NO: 34318
  Cyclic GFR-binding peptide
  MOD_RES (3), (4): Xaa is C or S

SEQ ID NO: 87277 - protein, 32 aa, Artificial Sequence; identical to SEQ ID NO: 34319
  Cyclic GFR-binding peptide
  MOD_RES (31), (31): Xaa is C or S

SEQ ID NO: 87278 - protein, 32 aa, Artificial Sequence; identical to SEQ ID NO: 34320
  Cyclic GFR-binding peptide
  MOD_RES (1), (2): Xaa is C or S

SEQ ID NO: 87279 - protein, 35 aa, Artificial Sequence
  Cyclic GFR-binding peptide
  MOD_RES (5), (6): Xaa is C or S
SAGPXXTPTKMSATSMLYYNDKQQIILRKHRGMVV

SEQ ID NO: 87280 - protein, 33 aa, Artificial Sequence
  Cyclic GFR-binding peptide
  MOD_RES (4), (5): Xaa is C or S
PEPXXVPEKMSPISILYKDENKNVVLKYHYNMT

SEQ ID NO: 87281 - protein, 30 aa, Artificial Sequence
  Cyclic GFR-binding peptide
  MOD_RES (3), (4): Xaa is C or S
GPXXTPTKMSATSMLYYNDKQQIILRKHRG

SEQ ID NO: 87282 - protein, 25 aa, Artificial Sequence
  Cyclic GFR-binding peptide
QDLSPINILYFVGRTPKVYGKIPMV

SEQ ID NO: 87283 - protein, 27 aa, Artificial Sequence
  Cyclic GFR-binding peptide
  MOD_RES (27), (27): Xaa is C or S
SPISILYKDSANNVVLKYHYDMVVESX

SEQ ID NO: 87284 - protein, 23 aa, Artificial Sequence
  Cyclic GFR-binding peptide
KMNAISILYFDENKNVVLKKYRN

SEQ ID NO: 87285 - protein, 41 aa, Artificial Sequence; identical to SEQ ID NO: 34324
  Cyclic GFR-binding peptide
  MOD_RES (5), (6), (38), (40): Xaa is C or S

SEQ ID NO: 87286 - protein, 32 aa, Artificial Sequence
  Cyclic GFR-binding peptide
  MOD_RES (6), (7): Xaa is C or S
RVPSTXXAPVKTEPISMLYLDNGRVLLKFKYE

SEQ ID NO: 87287 - protein, 24 aa, Artificial Sequence
  Cyclic GFR-binding peptide
MSPISMLYKNDKQQIILKYHYGMV

SEQ ID NO: 87288 - protein, 35 aa, Artificial Sequence; identical to SEQ ID NO: 34325
  Cyclic GFR-binding peptide
  MOD_RES (1), (32), (34): Xaa is C or S

SEQ ID NO: 87289 - protein, 27 aa, Artificial Sequence
  Cyclic GFR-binding peptide
PEKMEPISILYLDENKNVVKFKYENMT

SEQ ID NO: 87290 - protein, 28 aa, Artificial Sequence
  Cyclic GFR-binding peptide
  MOD_RES (1), (1): Xaa is C or S
XVPTRLEPISILYLDSANNVVKFKYEDM

SEQ ID NO: 87291 - protein, 29 aa, Artificial Sequence
  Cyclic GFR-binding peptide
  MOD_RES (27), (29): Xaa is C or S
EPISILYLDENKNVVKFKYENMTVESXAX

SEQ ID NO: 87292 - protein, 27 aa, Artificial Sequence
  Cyclic GFR-binding peptide
  MOD_RES (1), (1): Xaa is C or S
XVPARLSATSILYYDAANNVVLRKHRD

SEQ ID NO: 87293 - protein, 29 aa, Artificial Sequence
  Cyclic GFR-binding peptide
  MOD_RES (29), (29): Xaa is C or S
KLSATSILYYDKGVVTYLRKHRGMAVSEX

SEQ ID NO: 87294 - protein, 39 aa, Artificial Sequence; identical to SEQ ID NO: 34327
  Cyclic GFR-binding peptide
  MOD_RES (3), (4), (36), (38): Xaa is C or S

SEQ ID NO: 87295 - protein, 29 aa, Artificial Sequence
  Cyclic GFR-binding peptide
  MOD_RES (3), (4): Xaa is C or S
EPXXVPEKMEPISILYLDENKNVVKFKYE

SEQ ID NO: 87296 - protein, 31 aa, Artificial Sequence
  Cyclic GFR-binding peptide
  MOD_RES (5), (6): Xaa is C or S
SAAPXXVPQALSPINILYFVGRKPKVYGKIP

SEQ ID NO: 87297 - protein, 31 aa, Artificial Sequence
  Cyclic GFR-binding peptide
  MOD_RES (29), (31): Xaa is C or S
KMEPISMLYLNDKQQIIKFKYEGMVVDRXGX

SEQ ID NO: 87298 - protein, 32 aa, Artificial Sequence
  Cyclic GFR-binding peptide
  MOD_RES (30), (32): Xaa is C or S
PQALSPINILYFVGRKPKVYGKIPMIVRSXKX

SEQ ID NO: 87299 - protein, 35 aa, Artificial Sequence; identical to SEQ ID NO: 34328
  Cyclic GFR-binding peptide
  MOD_RES (1), (33), (35): Xaa is C or S

SEQ ID NO: 87300 - protein, 30 aa, Artificial Sequence
  Cyclic GFR-binding peptide
  MOD_RES (3), (4): Xaa is C or S
EPXXVPEKMSATSILYYDENKNVVLRKHRN

SEQ ID NO: 87301 - protein, 29 aa, Artificial Sequence
  Cyclic GFR-binding peptide
  MOD_RES (28), (28): Xaa is C or S
ALSPINILYFVGRKPKVYGKIPMIVRSXK

SEQ ID NO: 87302 - protein, 33 aa, Artificial Sequence; identical to SEQ ID NO: 34330
  Cyclic GFR-binding peptide
  MOD_RES (32), (32): Xaa is C or S

SEQ ID NO: 87303 - protein, 36 aa, Artificial Sequence; identical to SEQ ID NO: 34329
  Cyclic GFR-binding peptide
  MOD_RES (3), (4), (36): Xaa is C or S

SEQ ID NO: 87304 - protein, 30 aa, Artificial Sequence
  Cyclic GFR-binding peptide
  MOD_RES (1), (2): Xaa is C or S
XXVPEKMSPINILYFDENKNVVYGKIPNMT

SEQ ID NO: 87305 - protein, 30 aa, Artificial Sequence
  Cyclic GFR-binding peptide
  MOD_RES (29), (29): Xaa is C or S
KMSATSMLYYNDKQQIILRKHRGMVVDRXG

SEQ ID NO: 87306 - protein, 32 aa, Artificial Sequence
  Cyclic GFR-binding peptide
  MOD_RES (6), (7): Xaa is C or S
STPPTXXVPTRLSPISILYKDSANNVVLKYHY

SEQ ID NO: 87307 - protein, 28 aa, Artificial Sequence
  Cyclic GFR-binding peptide
  MOD_RES (28), (28): Xaa is C or S
MSPISMLYKNDKQQIILKYHYGMVVDRX

SEQ ID NO: 87308 - protein, 30 aa, Artificial Sequence
  Cyclic GFR-binding peptide
  MOD_RES (4), (5): Xaa is C or S
PSTXXAPVKTSATSMLYYDNGRVLLLRKHR

SEQ ID NO: 87309 - protein, 32 aa, Artificial Sequence
  Cyclic GFR-binding peptide
  MOD_RES (3), (4): Xaa is C or S
APXXVPQALSPINILYFVGRKPKVYGKIPMIV

SEQ ID NO: 87310 - protein, 30 aa, Artificial Sequence
  Cyclic GFR-binding peptide
  MOD_RES (29), (29): Xaa is C or S
QALSPINILYFVGRKPKVYGKIPMIVRSXK

SEQ ID NO: 87311 - protein, 30 aa, Artificial Sequence
  Cyclic GFR-binding peptide
  MOD_RES (2), (3): Xaa is C or S
TXXVPTRLSPISILYKDSANNVVLKYHYDM

SEQ ID NO: 87312 - protein, 24 aa, Artificial Sequence
  Cyclic GFR-binding peptide
EPISILYLDSANNVVKFKYEDMVV

SEQ ID NO: 87313 - protein, 27 aa, Artificial Sequence
  Cyclic GFR-binding peptide
MSPINILYFDENKNVVYGKIPNMTVES

SEQ ID NO: 87314 - protein, 32 aa, Artificial Sequence
  Cyclic GFR-binding peptide
  MOD_RES (3), (4): Xaa is C or S
EPXXVPEKMSPISILYKDENKNVVLKYHYNMT

SEQ ID NO: 87315 - protein, 28 aa, Artificial Sequence
  Cyclic GFR-binding peptide
APVKTEPISMLYLDNGRVLLKFKYEMIV

SEQ ID NO: 87316 - protein, 35 aa, Artificial Sequence
  Cyclic GFR-binding peptide
  MOD_RES (6), (7): Xaa is C or S
HVPKPXXAPTKLSPISVLYKDDSSNVILKYHYNMV

SEQ ID NO: 87317 - protein, 29 aa, Artificial Sequence
  Cyclic GFR-binding peptide
  MOD_RES (1), (2): Xaa is C or S
XXVPEKMEPISILYLDENKNVVKFKYENM

SEQ ID NO: 87318 - protein, 25 aa, Artificial Sequence
  Cyclic GFR-binding peptide
SPISMLYKDNGRVLLLKYHYMIVEE

SEQ ID NO: 87319 - protein, 33 aa, Artificial Sequence; identical to SEQ ID NO: 34335
  Cyclic GFR-binding peptide
  MOD_RES (2), (3): Xaa is C or S

SEQ ID NO: 87320 - protein, 33 aa, Artificial Sequence; identical to SEQ ID NO: 34336
  Cyclic GFR-binding peptide
  MOD_RES (1), (2): Xaa is C or S

SEQ ID NO: 87321 - protein, 31 aa, Artificial Sequence
  Cyclic GFR-binding peptide
  MOD_RES (3), (4): Xaa is C or S
STXXAPVKTEPISMLYLDNGRVLLKFKYEMI

SEQ ID NO: 87322 - protein, 35 aa, Artificial Sequence; identical to SEQ ID NO: 22076
  Cyclic GFR-binding peptide
  MOD_RES (32), (34): Xaa is C or S

SEQ ID NO: 87323 - protein, 34 aa, Artificial Sequence; identical to SEQ ID NO: 34337
  Cyclic GFR-binding peptide
  MOD_RES (3), (4): Xaa is C or S

SEQ ID NO: 87324 - protein, 32 aa, Artificial Sequence
  Cyclic GFR-binding peptide
  MOD_RES (29), (31): Xaa is C or S
RLSATSILYYDAANNVVLRKHRDMVVEAXGXR

SEQ ID NO: 87325 - protein, 27 aa, Artificial Sequence
  Cyclic GFR-binding peptide
VPQALSPINILYFVGRKPKVYGKIPMI

SEQ ID NO: 87326 - protein, 30 aa, Artificial Sequence
  Cyclic GFR-binding peptide
  MOD_RES (3), (4): Xaa is C or S
EPXXVPEKMNAISILYFDENKNVVLKKYRN

SEQ ID NO: 87327 - protein, 30 aa, Artificial Sequence
  Cyclic GFR-binding peptide
  MOD_RES (28), (30): Xaa is C or S
MEPISILYLDENKNVVKFKYENMTVESXAX

SEQ ID NO: 87328 - protein, 38 aa, Artificial Sequence; identical to SEQ ID NO: 34339
  Cyclic GFR-binding peptide
  MOD_RES (6), (7), (38): Xaa is C or S

SEQ ID NO: 87329 - protein, 33 aa, Artificial Sequence; identical to SEQ ID NO: 34340
  Cyclic GFR-binding peptide
  MOD_RES (32), (32): Xaa is C or S

SEQ ID NO: 87330 - protein, 37 aa, Artificial Sequence; identical to SEQ ID NO: 34342
  Cyclic GFR-binding peptide
  MOD_RES (4), (5), (36): Xaa is C or S

SEQ ID NO: 87331 - protein, 22 aa, Artificial Sequence
  Cyclic GFR-binding peptide
LSATSILYYDKGVVTYLRKHRG

SEQ ID NO: 87332 - protein, 27 aa, Artificial Sequence
  Cyclic GFR-binding peptide
EKMNAISILYFDENKNVVLKKYRNMTV

SEQ ID NO: 87333 - protein, 29 aa, Artificial Sequence
  Cyclic GFR-binding peptide
  MOD_RES (3), (4): Xaa is C or S
SPXXVSQDLSPINILYFIGKTPKIYGKIP

SEQ ID NO: 87334 - protein, 30 aa, Artificial Sequence
  Cyclic GFR-binding peptide
  MOD_RES (2), (3): Xaa is C or S
PXXVPEKMSPISILYKDENKNVVLKYHYNM

SEQ ID NO: 87335 - protein, 31 aa, Artificial Sequence; identical to SEQ ID NO: 34345
  Cyclic GFR-binding peptide
  MOD_RES (31), (31): Xaa is C or S

SEQ ID NO: 87336 - protein, 35 aa, Artificial Sequence; identical to SEQ ID NO: 34346
  Cyclic GFR-binding peptide
  MOD_RES (4), (5): Xaa is C or S

SEQ ID NO: 87337 - protein, 32 aa, Artificial Sequence
  Cyclic GFR-binding peptide
  MOD_RES (2), (3): Xaa is C or S
PXXVPEKMSATSILYYDENKNVVLRKHRNMTV

SEQ ID NO: 87338 - protein, 33 aa, Artificial Sequence
  Cyclic GFR-binding peptide
  MOD_RES (6), (7): Xaa is C or S
GIPEPXXVPEKMEPISILYLDENKNVVKFKYEN

SEQ ID NO: 87339 - protein, 32 aa, Artificial Sequence; identical to SEQ ID NO: 34347
  Cyclic GFR-binding peptide
  MOD_RES (1), (1): Xaa is C or S

SEQ ID NO: 87340 - protein, 24 aa, Artificial Sequence
  Cyclic GFR-binding peptide
SATSILYYDKGVVTYLRKHRGMAV

SEQ ID NO: 87341 - protein, 24 aa, Artificial Sequence
  Cyclic GFR-binding peptide
PTRLEPISILYLDSANNVVKFKYE

SEQ ID NO: 87342 - protein, 24 aa, Artificial Sequence
  Cyclic GFR-binding peptide
PVKTSPISMLYKDNGRVLLLKYHY

SEQ ID NO: 87343 - protein, 31 aa, Artificial Sequence
  Cyclic GFR-binding peptide
  MOD_RES (30), (30): Xaa is C or S
ARLSATSILYYDAANNVVLRKHRDMVVEAXG

SEQ ID NO: 87344 - protein, 25 aa, Artificial Sequence
  Cyclic GFR-binding peptide
TEPISMLYLDNGRVLLKFKYEMIVE

SEQ ID NO: 87345 - protein, 36 aa, Artificial Sequence; identical to SEQ ID NO: 34352
  Cyclic GFR-binding peptide
  MOD_RES (1), (33), (35): Xaa is C or S

SEQ ID NO: 87346 - protein, 22 aa, Artificial Sequence
  Cyclic GFR-binding peptide
RLSATSILYYDAANNVVLRKHR

SEQ ID NO: 87347 - protein, 21 aa, Artificial Sequence
  Cyclic GFR-binding peptide
MEPISMLYLNDKQQIIKFKYE

SEQ ID NO: 87348 - protein, 33 aa, Artificial Sequence; identical to SEQ ID NO: 34354
  Cyclic GFR-binding peptide
  MOD_RES (32), (32): Xaa is C or S

SEQ ID NO: 87349 - protein, 33 aa, Artificial Sequence
  Cyclic GFR-binding peptide
  MOD_RES (3), (4): Xaa is C or S
EPXXVPEKMNAISILYFDENKNVVLKKYRNMTV

SEQ ID NO: 87350 - protein, 21 aa, Artificial Sequence
  Cyclic GFR-binding peptide
TSPISMLYKDNGRVLLLKYHY

SEQ ID NO: 87351 - protein, 31 aa, Artificial Sequence; identical to SEQ ID NO: 34357
  Cyclic GFR-binding peptide

SEQ ID NO: 87352 - protein, 24 aa, Artificial Sequence
  Cyclic GFR-binding peptide
PEKMSPINILYFDENKNVVYGKIP

SEQ ID NO: 87353 - protein, 38 aa, Artificial Sequence; identical to SEQ ID NO: 34359
  Cyclic GFR-binding peptide
  MOD_RES (2), (3), (35), (37): Xaa is C or S

SEQ ID NO: 87354 - protein, 32 aa, Artificial Sequence
  Cyclic GFR-binding peptide
  MOD_RES (6), (7): Xaa is C or S
RVPSTXXAPVKTSPISMLYKDNGRVLLLKYHY

SEQ ID NO: 87355 - protein, 37 aa, Artificial Sequence; identical to SEQ ID NO: 34363
  Cyclic GFR-binding peptide
  MOD_RES (1), (2), (34), (36): Xaa is C or S

SEQ ID NO: 87356 - protein, 31 aa, Artificial Sequence; identical to SEQ ID NO: 34364
  Cyclic GFR-binding peptide

SEQ ID NO: 87357 - protein, 35 aa, Artificial Sequence; identical to SEQ ID NO: 34366
  Cyclic GFR-binding peptide
  MOD_RES (4), (5): Xaa is C or S

SEQ ID NO: 87358 - protein, 31 aa, Artificial Sequence
  Cyclic GFR-binding peptide
  MOD_RES (3), (4): Xaa is C or S
ASXXVPARLSATSILYYDAANNVVLRKHRDM

SEQ ID NO: 87359 - protein, 33 aa, Artificial Sequence
  Cyclic GFR-binding peptide
  MOD_RES (30), (32): Xaa is C or S
TKMSATSMLYYNDKQQIILRKHRGMVVDRXGXS

SEQ ID NO: 87360 - protein, 31 aa, Artificial Sequence
  Cyclic GFR-binding peptide
  MOD_RES (1), (2): Xaa is C or S
XXAPVKTSPISMLYKDNGRVLLLKYHYMIVE

SEQ ID NO: 87361 - protein, 27 aa, Artificial Sequence
  Cyclic GFR-binding peptide
  MOD_RES (27), (27): Xaa is C or S
SATSMLYYNDKQQIILRKHRGMVVDRX

SEQ ID NO: 87362 - protein, 34 aa, Artificial Sequence; identical to SEQ ID NO: 34367
  Cyclic GFR-binding peptide
  MOD_RES (3), (4): Xaa is C or S

SEQ ID NO: 87363 - protein, 31 aa, Artificial Sequence
  Cyclic GFR-binding peptide
  MOD_RES (28), (30): Xaa is C or S
MEPISMLYLNDKQQIIKFKYEGMVVDRXGXS

SEQ ID NO: 87364 - protein, 24 aa, Artificial Sequence
  Cyclic GFR-binding peptide
DLSPINILYFVGRTPKVYGKIPMV

SEQ ID NO: 87365 - protein, 31 aa, Artificial Sequence
  Cyclic GFR-binding peptide
  MOD_RES (30), (30): Xaa is C or S
EKMEPISILYLDENKNVVKFKYENMTVESXA

SEQ ID NO: 87366 - protein, 26 aa, Artificial Sequence
  Cyclic GFR-binding peptide
MSATSILYYDENKNVVLRKHRNMTVE

SEQ ID NO: 87367 - protein, 32 aa, Artificial Sequence
  Cyclic GFR-binding peptide
  MOD_RES (4), (5): Xaa is C or S
AGPXXTPTKMSPISMLYKNDKQQIILKYHYGM

SEQ ID NO: 87368 - protein, 32 aa, Artificial Sequence
  Cyclic GFR-binding peptide
  MOD_RES (30), (32): Xaa is C or S
EKMNAISILYFDENKNVVLKKYRNMTVESXAX

SEQ ID NO: 87369 - protein, 30 aa, Artificial Sequence
  Cyclic GFR-binding peptide
  MOD_RES (28), (30): Xaa is C or S
LSATSILYYDKGVVTYLRKHRGMAVSEXGX

SEQ ID NO: 87370 - protein, 29 aa, Artificial Sequence
  Cyclic GFR-binding peptide
VPTRLEPISILYLDSANNVVKFKYEDMVV

SEQ ID NO: 87371 - protein, 27 aa, Artificial Sequence
  Cyclic GFR-binding peptide
RLSATSILYYDAANNVVLRKHRDMVVE

SEQ ID NO: 87372 - protein, 29 aa, Artificial Sequence
  Cyclic GFR-binding peptide
  MOD_RES (1), (2): Xaa is C or S
XXVPTRLSATSILYYDSANNVVLRKHRDM

SEQ ID NO: 87373 - protein, 30 aa, Artificial Sequence
  Cyclic GFR-binding peptide
  MOD_RES (29), (29): Xaa is C or S
KMEPISILYLDENKNVVKFKYENMTVESXA

SEQ ID NO: 87374 - protein, 40 aa, Artificial Sequence; identical to SEQ ID NO: 34371
  Cyclic GFR-binding peptide
  MOD_RES (4), (5), (37), (39): Xaa is C or S

SEQ ID NO: 87375 - protein, 30 aa, Artificial Sequence
  Cyclic GFR-binding peptide
  MOD_RES (1), (2): Xaa is C or S
XXVPTRLSPISILYKDSANNVVLKYHYDMV

SEQ ID NO: 87376 - protein, 40 aa, Artificial Sequence; identical to SEQ ID NO: 34372
  Cyclic GFR-binding peptide
  MOD_RES (5), (6), (37), (39): Xaa is C or S

SEQ ID NO: 87377 - protein, 33 aa, Artificial Sequence
  Cyclic GFR-binding peptide
  MOD_RES (4), (5): Xaa is C or S
PEPXXVPEKMSATSILYYDENKNVVLRKHRNMT

SEQ ID NO: 87378 - protein, 32 aa, Artificial Sequence
  Cyclic GFR-binding peptide
  MOD_RES (30), (32): Xaa is C or S
TKMSATSMLYYNDKQQIILRKHRGMVVDRXGX

SEQ ID NO: 87379 - protein, 25 aa, Artificial Sequence
  Cyclic GFR-binding peptide
LSATSILYYDAANNVVLRKHRDMVV

SEQ ID NO: 87380 - protein, 32 aa, Artificial Sequence; identical to SEQ ID NO: 34375
  Cyclic GFR-binding peptide
  MOD_RES (1), (1): Xaa is C or S

SEQ ID NO: 87381 - protein, 34 aa, Artificial Sequence
  Cyclic GFR-binding peptide
  MOD_RES (6), (7): Xaa is C or S
KASKAXXVPTKLSATSILYYDKGVVTYLRKHRGM

SEQ ID NO: 87382 - protein, 28 aa, Artificial Sequence
  Cyclic GFR-binding peptide
KMEPISMLYLNDKQQIIKFKYEGMVVDR

SEQ ID NO: 87383 - protein, 33 aa, Artificial Sequence; identical to SEQ ID NO: 34378
  Cyclic GFR-binding peptide
  MOD_RES (32), (32): Xaa is C or S

SEQ ID NO: 87384 - protein, 33 aa, Artificial Sequence
  Cyclic GFR-binding peptide
  MOD_RES (30), (32): Xaa is C or S
SQDLSPINILYFIGKTPKIYGKIPMIVKSXKXS

SEQ ID NO: 87385 - protein, 32 aa, Artificial Sequence
  Cyclic GFR-binding peptide
  MOD_RES (3), (4): Xaa is C or S
STXXAPVKTEPISMLYLDNGRVLLKFKYEMIV

SEQ ID NO: 87386 - protein, 31 aa, Artificial Sequence
  Cyclic GFR-binding peptide
  MOD_RES (28), (30): Xaa is C or S
MEPISILYLDENKNVVKFKYENMTVESXAXR

SEQ ID NO: 87387 - protein, 32 aa, Artificial Sequence
  Cyclic GFR-binding peptide
  MOD_RES (31), (31): Xaa is C or S
PTKMSPISMLYKNDKQQIILKYHYGMVVDRXG

SEQ ID NO: 87388 - protein, 34 aa, Artificial Sequence
  Cyclic GFR-binding peptide
  MOD_RES (5), (6): Xaa is C or S
TPPTXXVPTRLSPISILYKDSANNVVLKYHYDMV

SEQ ID NO: 87389 - protein, 27 aa, Artificial Sequence
  Cyclic GFR-binding peptide
  MOD_RES (1), (2): Xaa is C or S
XXVPEKMNAISILYFDENKNVVLKKYR

SEQ ID NO: 87390 - protein, 37 aa, Artificial Sequence; identical to SEQ ID NO: 34380
  Cyclic GFR-binding peptide
  MOD_RES (2), (3), (35), (37): Xaa is C or S

SEQ ID NO: 87391 - protein, 33 aa, Artificial Sequence; identical to SEQ ID NO: 34381
  Cyclic GFR-binding peptide
  MOD_RES (1), (2), (33): Xaa is C or S

SEQ ID NO: 87392 - protein, 20 aa, Artificial Sequence
  Cyclic GFR-binding peptide
SPINILYFVGRKPKVYGKIP

SEQ ID NO: 87393 - protein, 28 aa, Artificial Sequence
  Cyclic GFR-binding peptide
VPTKLSATSILYYDKGVVTYLRKHRGMA

SEQ ID NO: 87394 - protein, 36 aa, Artificial Sequence; identical to SEQ ID NO: 34382
  Cyclic GFR-binding peptide
  MOD_RES (1), (33), (35): Xaa is C or S

SEQ ID NO: 87395 - protein, 28 aa, Artificial Sequence
  Cyclic GFR-binding peptide
QDLSPINILYFIGKTPKIYGKIPMIVKS

SEQ ID NO: 87396 - protein, 36 aa, Artificial Sequence; identical to SEQ ID NO: 34385
  Cyclic GFR-binding peptide
  MOD_RES (1), (2), (33), (35): Xaa is C or S

SEQ ID NO: 87397 - protein, 31 aa, Artificial Sequence
  Cyclic GFR-binding peptide
  MOD_RES (3), (4): Xaa is C or S
EPXXVPEKMSATSILYYDENKNVVLRKHRNM

SEQ ID NO: 87398 - protein, 35 aa, Artificial Sequence
  Cyclic GFR-binding peptide
  MOD_RES (6), (7): Xaa is C or S
HVPKPXXAPTKLSATSVLYYDDSSNVILRKHRNMV

SEQ ID NO: 87399 - protein, 35 aa, Artificial Sequence; identical to SEQ ID NO: 34386
  Cyclic GFR-binding peptide
  MOD_RES (1), (2), (34): Xaa is C or S

SEQ ID NO: 87400 - protein, 35 aa, Artificial Sequence; identical to SEQ ID NO: 34387
  Cyclic GFR-binding peptide
  MOD_RES (4), (5): Xaa is C or S

SEQ ID NO: 87401 - protein, 32 aa, Artificial Sequence; identical to SEQ ID NO: 34389
  Cyclic GFR-binding peptide
  MOD_RES (1), (2): Xaa is C or S

SEQ ID NO: 87402 - protein, 26 aa, Artificial Sequence
  Cyclic GFR-binding peptide
RLSPISILYKDSANNVVLKYHYDMVV

SEQ ID NO: 87403 - protein, 35 aa, Artificial Sequence; identical to SEQ ID NO: 34390
  Cyclic GFR-binding peptide
  MOD_RES (4), (5): Xaa is C or S

SEQ ID NO: 87404 - protein, 30 aa, Artificial Sequence
  Cyclic GFR-binding peptide
  MOD_RES (30), (30): Xaa is C or S
TRLSATSILYYDSANNVVLRKHRDMVVESX

SEQ ID NO: 87405 - protein, 36 aa, Artificial Sequence; identical to SEQ ID NO: 34391
  Cyclic GFR-binding peptide
  MOD_RES (1), (33), (35): Xaa is C or S

SEQ ID NO: 87406 - protein, 24 aa, Artificial Sequence
  Cyclic GFR-binding peptide
PTKMSATSMLYYNDKQQIILRKHR

SEQ ID NO: 87407 - protein, 22 aa, Artificial Sequence
  Cyclic GFR-binding peptide
MSPISILYKDENKNVVLKYHYN

SEQ ID NO: 87408 - protein, 31 aa, Artificial Sequence
  Cyclic GFR-binding peptide
  MOD_RES (1), (2): Xaa is C or S
XXVPTRLSPISILYKDSANNVVLKYHYDMVV

SEQ ID NO: 87409 - protein, 20 aa, Artificial Sequence
  Cyclic GFR-binding peptide
SPISMLYKNDKQQIILKYHY

SEQ ID NO: 87410 - protein, 32 aa, Artificial Sequence
  Cyclic GFR-binding peptide
  MOD_RES (3), (4): Xaa is C or S
EPXXVPEKMSATSILYYDENKNVVLRKHRNMT

SEQ ID NO: 87411 - protein, 36 aa, Artificial Sequence
  Cyclic GFR-binding peptide
  MOD_RES (6), (7): Xaa is C or S
RVPSTXXAPVKTEPISMLYLDNGRVLLKFKYEMIVE

SEQ ID NO: 87412 - protein, 21 aa, Artificial Sequence
  Cyclic GFR-binding peptide
TEPISMLYLDNGRVLLKFKYE

SEQ ID NO: 87413 - protein, 28 aa, Artificial Sequence
  Cyclic GFR-binding peptide
  MOD_RES (1), (2): Xaa is C or S
XXVPTKLSATSILYYDKGVVTYLRKHRG

SEQ ID NO: 87414 - protein, 31 aa, Artificial Sequence
  Cyclic GFR-binding peptide
  MOD_RES (1), (2): Xaa is C or S
XXVPTRLSATSILYYDSANNVVLRKHRDMVV

SEQ ID NO: 87415 - protein, 30 aa, Artificial Sequence
  Cyclic GFR-binding peptide
  MOD_RES (1), (2): Xaa is C or S
XXVPTRLEPISILYLDSANNVVKFKYEDMV

SEQ ID NO: 87416 - protein, 23 aa, Artificial Sequence
  Cyclic GFR-binding peptide
KMSATSILYYDENKNVVLRKHRN

SEQ ID NO: 87417 - protein, 33 aa, Artificial Sequence
  Cyclic GFR-binding peptide
  MOD_RES (5), (6): Xaa is C or S
SASPXXVPQDLSPINILYFVGRTPKVYGKIPMV

SEQ ID NO: 87418 - protein, 27 aa, Artificial Sequence
  Cyclic GFR-binding peptide
VPEKMEPISILYLDENKNVVKFKYENM

SEQ ID NO: 87419 - protein, 29 aa, Artificial Sequence
  Cyclic GFR-binding peptide
  MOD_RES (2), (3): Xaa is C or S
PXXVPEKMNAISILYFDENKNVVLKKYRN

SEQ ID NO: 87420 - protein, 28 aa, Artificial Sequence
  Cyclic GFR-binding peptide
APVKTSATSMLYYDNGRVLLLRKHRMIV

SEQ ID NO: 87421 - protein, 37 aa, Artificial Sequence; identical to SEQ ID NO: 34396
  Cyclic GFR-binding peptide
  MOD_RES (2), (3), (35), (37): Xaa is C or S

SEQ ID NO: 87422 - protein, 35 aa, Artificial Sequence; identical to SEQ ID NO: 34397
  Cyclic GFR-binding peptide
  MOD_RES (1), (2), (34): Xaa is C or S

SEQ ID NO: 87423 - protein, 29 aa, Artificial Sequence
  Cyclic GFR-binding peptide
  MOD_RES (26), (28): Xaa is C or S
SATSMLYYDNGRVLLLRKHRMIVEEXGXL

SEQ ID NO: 87424 - protein, 29 aa, Artificial Sequence
  Cyclic GFR-binding peptide
  MOD_RES (2), (3): Xaa is C or S
PXXTPTKMEPISMLYLNDKQQIIKFKYEG

SEQ ID NO: 87425 - protein, 28 aa, Artificial Sequence
  Cyclic GFR-binding peptide
VPQALSPINILYFVGRKPKVYGKIPMIV

SEQ ID NO: 87426 - protein, 35 aa, Artificial Sequence; identical to SEQ ID NO: 34399
  Cyclic GFR-binding peptide
  MOD_RES (32), (34): Xaa is C or S

SEQ ID NO: 87427 - protein, 25 aa, Artificial Sequence
  Cyclic GFR-binding peptide
SPINILYFIGKTPKIYGKIPMIVKS

SEQ ID NO: 87428 - protein, 33 aa, Artificial Sequence
  Cyclic GFR-binding peptide
  MOD_RES (3), (4): Xaa is C or S
SPXXVPQDLSPINILYFVGRTPKVYGKIPMVVK

SEQ ID NO: 87429 - protein, 35 aa, Artificial Sequence; identical to SEQ ID NO: 34401
  Cyclic GFR-binding peptide
  MOD_RES (4), (5): Xaa is C or S

SEQ ID NO: 87430 - protein, 36 aa, Artificial Sequence; identical to SEQ ID NO: 34402
  Cyclic GFR-binding peptide
  MOD_RES (4), (5): Xaa is C or S

SEQ ID NO: 87431 - protein, 33 aa, Artificial Sequence; identical to SEQ ID NO: 34403
  Cyclic GFR-binding peptide
  MOD_RES (1), (2), (33): Xaa is C or S

SEQ ID NO: 87432 - protein, 26 aa, Artificial Sequence
  Cyclic GFR-binding peptide
KMEPISMLYLNDKQQIIKFKYEGMVV

SEQ ID NO: 87433 - protein, 32 aa, Artificial Sequence; identical to SEQ ID NO: 34405
  Cyclic GFR-binding peptide
  MOD_RES (1), (1): Xaa is C or S

SEQ ID NO: 87434 - protein, 29 aa, Artificial Sequence
  Cyclic GFR-binding peptide
  MOD_RES (27), (29): Xaa is C or S
EPISMLYLNDKQQIIKFKYEGMVVDRXGX

SEQ ID NO: 87435 - protein, 35 aa, Artificial Sequence; identical to SEQ ID NO: 22385
  Cyclic GFR-binding peptide
  MOD_RES (32), (34): Xaa is C or S

SEQ ID NO: 87436 - protein, 34 aa, Artificial Sequence; identical to SEQ ID NO: 34407
  Cyclic GFR-binding peptide
  MOD_RES (3), (4): Xaa is C or S

SEQ ID NO: 87437 - protein, 31 aa, Artificial Sequence
  Cyclic GFR-binding peptide
  MOD_RES (4), (5): Xaa is C or S
PPTXXVPTRLSATSILYYDSANNVVLRKHRD

SEQ ID NO: 87438 - protein, 28 aa, Artificial Sequence
  Cyclic GFR-binding peptide
  MOD_RES (27), (27): Xaa is C or S
TSPISMLYKDNGRVLLLKYHYMIVEEXG

SEQ ID NO: 87439 - protein, 37 aa, Artificial Sequence; identical to SEQ ID NO: 34412
  Cyclic GFR-binding peptide
  MOD_RES (5), (6): Xaa is C or S

SEQ ID NO: 87440 - protein, 31 aa, Artificial Sequence; identical to SEQ ID NO: 34413
  Cyclic GFR-binding peptide

SEQ ID NO: 87441 - protein, 36 aa, Artificial Sequence; identical to SEQ ID NO: 34415
  Cyclic GFR-binding peptide
  MOD_RES (1), (2), (34), (36): Xaa is C or S

SEQ ID NO: 87442 - protein, 34 aa, Artificial Sequence
  Cyclic GFR-binding peptide
  MOD_RES (4), (5): Xaa is C or S
PEPXXVPEKMNAISILYFDENKNVVLKKYRNMTV

SEQ ID NO: 87443 - protein, 24 aa, Artificial Sequence
  Cyclic GFR-binding peptide
EKMSPISILYKDENKNVVLKYHYN

SEQ ID NO: 87444 - protein, 33 aa, Artificial Sequence; identical to SEQ ID NO: 34417
  Cyclic GFR-binding peptide
  MOD_RES (1), (33): Xaa is C or S

SEQ ID NO: 87445 - protein, 28 aa, Artificial Sequence
  Cyclic GFR-binding peptide
  MOD_RES (2), (3): Xaa is C or S
PXXVPQDLSPINILYFVGRTPKVYGKIP

SEQ ID NO: 87446 - protein, 25 aa, Artificial Sequence
  Cyclic GFR-binding peptide
SATSMLYYDNGRVLLLRKHRMIVEE

SEQ ID NO: 87447 - protein, 34 aa, Artificial Sequence; identical to SEQ ID NO: 34418
  Cyclic GFR-binding peptide
  MOD_RES (1), (2), (34): Xaa is C or S

SEQ ID NO: 87448 - protein, 36 aa, Artificial Sequence; identical to SEQ ID NO: 34420
  Cyclic GFR-binding peptide
  MOD_RES (1), (2), (34), (36): Xaa is C or S

SEQ ID NO: 87449 - protein, 25 aa, Artificial Sequence
  Cyclic GFR-binding peptide
APVKTSPISMLYKDNGRVLLLKYHY

SEQ ID NO: 87450 - protein, 25 aa, Artificial Sequence
  Cyclic GFR-binding peptide
PEKMSPISILYKDENKNVVLKYHYN

SEQ ID NO: 87451 - protein, 25 aa, Artificial Sequence
  Cyclic GFR-binding peptide
VPEKMEPISILYLDENKNVVKFKYE

SEQ ID NO: 87452 - protein, 22 aa, Artificial Sequence
  Cyclic GFR-binding peptide
TSATSMLYYDNGRVLLLRKHRM

SEQ ID NO: 87453 - protein, 26 aa, Artificial Sequence
  Cyclic GFR-binding peptide
EKMSPINILYFDENKNVVYGKIPNMT

SEQ ID NO: 87454 - protein, 33 aa, Artificial Sequence; identical to SEQ ID NO: 34424
  Cyclic GFR-binding peptide
  MOD_RES (1), (2): Xaa is C or S

SEQ ID NO: 87455 - protein, 30 aa, Artificial Sequence
  Cyclic GFR-binding peptide
  MOD_RES (4), (5): Xaa is C or S
ASPXXVPQDLSPINILYFVGRTPKVYGKIP

SEQ ID NO: 87456 - protein, 31 aa, Artificial Sequence
  Cyclic GFR-binding peptide
  MOD_RES (1), (2): Xaa is C or S
XXVPEKMEPISILYLDENKNVVKFKYENMTV

SEQ ID NO: 87457 - protein, 29 aa, Artificial Sequence
  Cyclic GFR-binding peptide
  MOD_RES (2), (3): Xaa is C or S
SXXVPARLSATSILYYDAANNVVLRKHRD

SEQ ID NO: 87458 - protein, 20 aa, Artificial Sequence
  Cyclic GFR-binding peptide
SATSMLYYDNGRVLLLRKHR

SEQ ID NO: 87459 - protein, 29 aa, Artificial Sequence
  Cyclic GFR-binding peptide
  MOD_RES (27), (29): Xaa is C or S
TSATSMLYYDNGRVLLLRKHRMIVEEXGX

SEQ ID NO: 87460 - protein, 33 aa, Artificial Sequence
  Cyclic GFR-binding peptide
  MOD_RES (3), (4): Xaa is C or S
EPXXVPEKMSPISILYKDENKNVVLKYHYNMTV

SEQ ID NO: 87461 - protein, 41 aa, Artificial Sequence; identical to SEQ ID NO: 34430
  Cyclic GFR-binding peptide
  MOD_RES (6), (7), (39), (41): Xaa is C or S

SEQ ID NO: 87462 - protein, 34 aa, Artificial Sequence
  Cyclic GFR-binding peptide
  MOD_RES (5), (6): Xaa is C or S
TPPTXXVPTRLSATSILYYDSANNVVLRKHRDMV

SEQ ID NO: 87463 - protein, 25 aa, Artificial Sequence
  Cyclic GFR-binding peptide
VKTSPISMLYKDNGRVLLLKYHYMI

SEQ ID NO: 87464 - protein, 36 aa, Artificial Sequence; identical to SEQ ID NO: 34434
  Cyclic GFR-binding peptide
  MOD_RES (5), (6): Xaa is C or S

SEQ ID NO: 87465 - protein, 28 aa, Artificial Sequence
  Cyclic GFR-binding peptide
  MOD_RES (1), (1): Xaa is C or S
XVPARLSATSILYYDAANNVVLRKHRDM

SEQ ID NO: 87466 - protein, 29 aa, Artificial Sequence
  Cyclic GFR-binding peptide
EKMSATSILYYDENKNVVLRKHRNMTVES

SEQ ID NO: 87467 - protein, 37 aa, Artificial Sequence; identical to SEQ ID NO: 34435
  Cyclic GFR-binding peptide
  MOD_RES (3), (4), (36): Xaa is C or S

SEQ ID NO: 87468 - protein, 30 aa, Artificial Sequence
  Cyclic GFR-binding peptide
  MOD_RES (1), (1): Xaa is C or S
XVPTRLSPISILYKDSANNVVLKYHYDMVV

SEQ ID NO: 87469 - protein, 30 aa, Artificial Sequence
  Cyclic GFR-binding peptide
PEKMSPISILYKDENKNVVLKYHYNMTVES

SEQ ID NO: 87470 - protein, 28 aa, Artificial Sequence
  Cyclic GFR-binding peptide
  MOD_RES (27), (27): Xaa is C or S
SPINILYFDENKNVVYGKIPNMTVESXA

SEQ ID NO: 87471 - protein, 37 aa, Artificial Sequence; identical to SEQ ID NO: 34437
  Cyclic GFR-binding peptide
  MOD_RES (6), (7): Xaa is C or S

SEQ ID NO: 87472 - protein, 36 aa, Artificial Sequence; identical to SEQ ID NO: 34438
  Cyclic GFR-binding peptide
  MOD_RES (1), (33), (35): Xaa is C or S

SEQ ID NO: 87473 - protein, 30 aa, Artificial Sequence
  Cyclic GFR-binding peptide
  MOD_RES (1), (2): Xaa is C or S
XXVPQDLSPINILYFVGRTPKVYGKIPMVV

SEQ ID NO: 87474 - protein, 22 aa, Artificial Sequence
  Cyclic GFR-binding peptide
SATSILYYDSANNVVLRKHRDM

SEQ ID NO: 87475 - protein, 40 aa, Artificial Sequence; identical to SEQ ID NO: 34441
  Cyclic GFR-binding peptide
  MOD_RES (5), (6), (38), (40): Xaa is C or S

SEQ ID NO: 87476 - protein, 26 aa, Artificial Sequence
  Cyclic GFR-binding peptide
LSPISILYKDSANNVVLKYHYDMVVE

SEQ ID NO: 87477 - protein, 40 aa, Artificial Sequence; identical to SEQ ID NO: 34443
  Cyclic GFR-binding peptide
  MOD_RES (6), (7), (39): Xaa is C or S

SEQ ID NO: 87478 - protein, 37 aa, Artificial Sequence; identical to SEQ ID NO: 34445
  Cyclic GFR-binding peptide
  MOD_RES (4), (5), (37): Xaa is C or S

SEQ ID NO: 87479 - protein, 35 aa, Artificial Sequence; identical to SEQ ID NO: 34446
  Cyclic GFR-binding peptide
  MOD_RES (1), (32), (34): Xaa is C or S

SEQ ID NO: 87480 - protein, 31 aa, Artificial Sequence
  Cyclic GFR-binding peptide
  MOD_RES (5), (6): Xaa is C or S
TPPTXXVPTRLSPISILYKDSANNVVLKYHY

SEQ ID NO: 87481 - protein, 25 aa, Artificial Sequence
  Cyclic GFR-binding peptide
EPISILYLDENKNVVKFKYENMTVE

SEQ ID NO: 87482 - protein, 31 aa, Artificial Sequence
  Cyclic GFR-binding peptide
  MOD_RES (28), (30): Xaa is C or S
ALSPINILYFVGRKPKVYGKIPMIVRSXKXS

SEQ ID NO: 87483 - protein, 41 aa, Artificial Sequence; identical to SEQ ID NO: 34449
  Cyclic GFR-binding peptide
  MOD_RES (6), (7), (39), (41): Xaa is C or S

SEQ ID NO: 87484 - protein, 34 aa, Artificial Sequence; identical to SEQ ID NO: 34450
  Cyclic GFR-binding peptide
  MOD_RES (3), (4): Xaa is C or S

SEQ ID NO: 87485 - protein, 34 aa, Artificial Sequence
  Cyclic GFR-binding peptide
  MOD_RES (5), (6): Xaa is C or S
SAGPXXTPTKMEPISMLYLNDKQQIIKFKYEGMV

SEQ ID NO: 87486 - protein, 35 aa, Artificial Sequence; identical to SEQ ID NO: 34451
  Cyclic GFR-binding peptide
  MOD_RES (2), (3), (35): Xaa is C or S

SEQ ID NO: 87487 - protein, 31 aa, Artificial Sequence
  Cyclic GFR-binding peptide
  MOD_RES (28), (30): Xaa is C or S
KTEPISMLYLDNGRVLLKFKYEMIVEEXGXL

SEQ ID NO: 87488 - protein, 40 aa, Artificial Sequence; identical to SEQ ID NO: 34452
  Cyclic GFR-binding peptide
  MOD_RES (5), (6), (38), (40): Xaa is C or S

SEQ ID NO: 87489 - protein, 36 aa, Artificial Sequence; identical to SEQ ID NO: 34453
  Cyclic GFR-binding peptide
  MOD_RES (2), (3), (35): Xaa is C or S

SEQ ID NO: 87490 - protein, 23 aa, Artificial Sequence
  Cyclic GFR-binding peptide
VKTSATSMLYYDNGRVLLLRKHR

SEQ ID NO: 87491 - protein, 32 aa, Artificial Sequence
  Cyclic GFR-binding peptide
  MOD_RES (30), (32): Xaa is C or S
TKMSPISMLYKNDKQQIILKYHYGMVVDRXGX

SEQ ID NO: 87492 - protein, 22 aa, Artificial Sequence
  Cyclic GFR-binding peptide
KMSATSILYYDENKNVVLRKHR

SEQ ID NO: 87493 - protein, 30 aa, Artificial Sequence
  Cyclic GFR-binding peptide
  MOD_RES (1), (1): Xaa is C or S
XAPVKTSATSMLYYDNGRVLLLRKHRMIVE

SEQ ID NO: 87494 - protein, 40 aa, Artificial Sequence; identical to SEQ ID NO: 34454
  Cyclic GFR-binding peptide
  MOD_RES (5), (6), (38), (40): Xaa is C or S

SEQ ID NO: 87495 - protein, 33 aa, Artificial Sequence; identical to SEQ ID NO: 34455
  Cyclic GFR-binding peptide
  MOD_RES (32), (32): Xaa is C or S

SEQ ID NO: 87496 - protein, 31 aa, Artificial Sequence
  Cyclic GFR-binding peptide
  MOD_RES (28), (30): Xaa is C or S
KTSPISMLYKDNGRVLLLKYHYMIVEEXGXL

SEQ ID NO: 87497 - protein, 37 aa, Artificial Sequence; identical to SEQ ID NO: 34457
  Cyclic GFR-binding peptide
  MOD_RES (4), (5), (37): Xaa is C or S

SEQ ID NO: 87498 - protein, 39 aa, Artificial Sequence; identical to SEQ ID NO: 34458
  Cyclic GFR-binding peptide
  MOD_RES (5), (6), (38): Xaa is C or S

SEQ ID NO: 87499 - protein, 32 aa, Artificial Sequence
  Cyclic GFR-binding peptide
  MOD_RES (30), (32): Xaa is C or S
TKMEPISMLYLNDKQQIIKFKYEGMVVDRXGX

SEQ ID NO: 87500 - protein, 25 aa, Artificial Sequence
  Cyclic GFR-binding peptide
PTKMSATSMLYYNDKQQIILRKHRG

SEQ ID NO: 87501 - protein, 27 aa, Artificial Sequence
  Cyclic GFR-binding peptide
VKTSPISMLYKDNGRVLLLKYHYMIVE

SEQ ID NO: 87502 - protein, 36 aa, Artificial Sequence; identical to SEQ ID NO: 34459
  Cyclic GFR-binding peptide
  MOD_RES (1), (2), (33), (35): Xaa is C or S

SEQ ID NO: 87503 - protein, 36 aa, Artificial Sequence; identical to SEQ ID NO: 34460
  Cyclic GFR-binding peptide
  MOD_RES (2), (3), (35): Xaa is C or S

SEQ ID NO: 87504 - protein, 40 aa, Artificial Sequence; identical to SEQ ID NO: 34461
  Cyclic GFR-binding peptide
  MOD_RES (4), (5), (37), (39): Xaa is C or S

SEQ ID NO: 87505 - protein, 28 aa, Artificial Sequence
  Cyclic GFR-binding peptide
  MOD_RES (1), (2): Xaa is C or S
XXAPVKTSATSMLYYDNGRVLLLRKHRM

SEQ ID NO: 87506 - protein, 35 aa, Artificial Sequence; identical to SEQ ID NO: 34462
  Cyclic GFR-binding peptide
  MOD_RES (4), (5): Xaa is C or S

SEQ ID NO: 87507 - protein, 31 aa, Artificial Sequence; identical to SEQ ID NO: 34465
  Cyclic GFR-binding peptide
  MOD_RES (31), (31): Xaa is C or S

SEQ ID NO: 87508 - protein, 28 aa, Artificial Sequence
  Cyclic GFR-binding peptide
  MOD_RES (28), (28): Xaa is C or S
LSATSILYYDAANNVVLRKHRDMVVEAX

SEQ ID NO: 87509 - protein, 23 aa, Artificial Sequence
  Cyclic GFR-binding peptide
EPISILYLDENKNVVKFKYENMT

SEQ ID NO: 87510 - protein, 27 aa, Artificial Sequence
  Cyclic GFR-binding peptide
EKMSATSILYYDENKNVVLRKHRNMTV

SEQ ID NO: 87511 - protein, 41 aa, Artificial Sequence; identical to SEQ ID NO: 34466
  Cyclic GFR-binding peptide
  MOD_RES (5), (6), (38), (40): Xaa is C or S

SEQ ID NO: 87512 - protein, 30 aa, Artificial Sequence
  Cyclic GFR-binding peptide
  MOD_RES (1), (1): Xaa is C or S
XVPEKMSATSILYYDENKNVVLRKHRNMTV

SEQ ID NO: 87513 - protein, 24 aa, Artificial Sequence
  Cyclic GFR-binding peptide
LEPISILYLDSANNVVKFKYEDMV

SEQ ID NO: 87514 - protein, 25 aa, Artificial Sequence
  Cyclic GFR-binding peptide
TPTKMSPISMLYKNDKQQIILKYHY

SEQ ID NO: 87515 - protein, 29 aa, Artificial Sequence
  Cyclic GFR-binding peptide
  MOD_RES (27), (29): Xaa is C or S
SPISMLYKNDKQQIILKYHYGMVVDRXGX

SEQ ID NO: 87516 - protein, 26 aa, Artificial Sequence
  Cyclic GFR-binding peptide
  MOD_RES (1), (1): Xaa is C or S
XVPTKLSATSILYYDKGVVTYLRKHR

SEQ ID NO: 87517 - protein, 39 aa, Artificial Sequence; identical to SEQ ID NO: 34470
  Cyclic GFR-binding peptide
  MOD_RES (4), (5), (37), (39): Xaa is C or S

SEQ ID NO: 87518 - protein, 39 aa, Artificial Sequence; identical to SEQ ID NO: 34471
  Cyclic GFR-binding peptide
  MOD_RES (5), (6), (38): Xaa is C or S

SEQ ID NO: 87519 - protein, 32 aa, Artificial Sequence
  Cyclic GFR-binding peptide
  MOD_RES (3), (4): Xaa is C or S
EPXXVPEKMEPISILYLDENKNVVKFKYENMT

SEQ ID NO: 87520 - protein, 33 aa, Artificial Sequence; identical to SEQ ID NO: 34473
  Cyclic GFR-binding peptide
  MOD_RES (2), (3): Xaa is C or S

SEQ ID NO: 87521 - protein, 35 aa, Artificial Sequence
  Cyclic GFR-binding peptide
  MOD_RES (5), (6): Xaa is C or S
IPEPXXVPEKMSPISILYKDENKNVVLKYHYNMTV

SEQ ID NO: 87522 - protein, 28 aa, Artificial Sequence
  Cyclic GFR-binding peptide
  MOD_RES (26), (28): Xaa is C or S
EPISMLYLDNGRVLLKFKYEMIVEEXGX

SEQ ID NO: 87523 - protein, 23 aa, Artificial Sequence
  Cyclic GFR-binding peptide
LSPINILYFVGRTPKVYGKIPMV

SEQ ID NO: 87524 - protein, 33 aa, Artificial Sequence
  Cyclic GFR-binding peptide
  MOD_RES (4), (5): Xaa is C or S
PSTXXAPVKTEPISMLYLDNGRVLLKFKYEMIV

SEQ ID NO: 87525 - protein, 34 aa, Artificial Sequence
  Cyclic GFR-binding peptide
  MOD_RES (6), (7): Xaa is C or S
STPPTXXVPTRLEPISILYLDSANNVVKFKYEDM

SEQ ID NO: 87526 - protein, 38 aa, Artificial Sequence; identical to SEQ ID NO: 34477
  Cyclic GFR-binding peptide
  MOD_RES (4), (5), (36), (38): Xaa is C or S

SEQ ID NO: 87527 - protein, 27 aa, Artificial Sequence
  Cyclic GFR-binding peptide
  MOD_RES (27), (27): Xaa is C or S
SPINILYFDENKNVVYGKIPNMTVESX

SEQ ID NO: 87528 - protein, 36 aa, Artificial Sequence; identical to SEQ ID NO: 21667
  Cyclic GFR-binding peptide
  MOD_RES (33), (35): Xaa is C or S

SEQ ID NO: 87529 - protein, 36 aa, Artificial Sequence; identical to SEQ ID NO: 34479
  Cyclic GFR-binding peptide
  MOD_RES (3), (4), (35): Xaa is C or S

SEQ ID NO: 87530 - protein, 37 aa, Artificial Sequence; identical to SEQ ID NO: 34480
  Cyclic GFR-binding peptide
  MOD_RES (4), (5), (37): Xaa is C or S

SEQ ID NO: 87531 - protein, 26 aa, Artificial Sequence
  Cyclic GFR-binding peptide
SPINILYFDENKNVVYGKIPNMTVES

SEQ ID NO: 87532 - protein, 33 aa, Artificial Sequence
  Cyclic GFR-binding peptide
  MOD_RES (5), (6): Xaa is C or S
VPSTXXAPVKTEPISMLYLDNGRVLLKFKYEMI

SEQ ID NO: 87533 - protein, 27 aa, Artificial Sequence
  Cyclic GFR-binding peptide
  MOD_RES (1), (2): Xaa is C or S
XXVPTRLSPISILYKDSANNVVLKYHY

SEQ ID NO: 87534 - protein, 32 aa, Artificial Sequence; identical to SEQ ID NO: 34481
  Cyclic GFR-binding peptide
  MOD_RES (32), (32): Xaa is C or S

SEQ ID NO: 87535 - protein, 24 aa, Artificial Sequence
  Cyclic GFR-binding peptide
MSATSILYYDENKNVVLRKHRNMT

SEQ ID NO: 87536 - protein, 22 aa, Artificial Sequence
  Cyclic GFR-binding peptide
EPISILYLDENKNVVKFKYENM

SEQ ID NO: 87537 - protein, 30 aa, Artificial Sequence
  Cyclic GFR-binding peptide
  MOD_RES (2), (3): Xaa is C or S
PXXTPTKMSATSMLYYNDKQQIILRKHRGM

SEQ ID NO: 87538 - protein, 26 aa, Artificial Sequence
  Cyclic GFR-binding peptide
TKMEPISMLYLNDKQQIIKFKYEGMV

SEQ ID NO: 87539 - protein, 30 aa, Artificial Sequence
  Cyclic GFR-binding peptide
  MOD_RES (28), (30): Xaa is C or S
MSPISMLYKNDKQQIILKYHYGMVVDRXGX

SEQ ID NO: 87540 - protein, 42 aa, Artificial Sequence; identical to SEQ ID NO: 34482
  Cyclic GFR-binding peptide
  MOD_RES (6), (7), (39), (41): Xaa is C or S

SEQ ID NO: 87541 - protein, 29 aa, Artificial Sequence
  Cyclic GFR-binding peptide
SATSMLYYNDKQQIILRKHRAAAAAAAAA

SEQ ID NO: 87542 - protein, 35 aa, Artificial Sequence
  Cyclic GFR-binding peptide
  MOD_RES (5), (6): Xaa is C or S
SAAPXXVPQALSPINILYFVGRKPKVYGKIPMIVR

SEQ ID NO: 87543 - protein, 35 aa, Artificial Sequence; identical to SEQ ID NO: 34483
  Cyclic GFR-binding peptide
  MOD_RES (3), (4): Xaa is C or S

SEQ ID NO: 87544 - protein, 29 aa, Artificial Sequence
  Cyclic GFR-binding peptide
  MOD_RES (29), (29): Xaa is C or S
KMNAISILYFDENKNVVLKKYRNMTVESX

SEQ ID NO: 87545 - protein, 28 aa, Artificial Sequence
  Cyclic GFR-binding peptide
  MOD_RES (28), (28): Xaa is C or S
MSPINILYFDENKNVVYGKIPNMTVESX

SEQ ID NO: 87546 - protein, 34 aa, Artificial Sequence
  Cyclic GFR-binding peptide
  MOD_RES (5), (6): Xaa is C or S
ASKAXXVPTKLSATSILYYDKGVVTYLRKHRGMA

SEQ ID NO: 87547 - protein, 36 aa, Artificial Sequence; identical to SEQ ID NO: 34484
  Cyclic GFR-binding peptide
  MOD_RES (5), (6): Xaa is C or S

SEQ ID NO: 87548 - protein, 35 aa, Artificial Sequence; identical to SEQ ID NO: 34485
  Cyclic GFR-binding peptide
  MOD_RES (4), (5): Xaa is C or S

SEQ ID NO: 87549 - protein, 28 aa, Artificial Sequence
  Cyclic GFR-binding peptide
  MOD_RES (1), (2): Xaa is C or S
XXVPTRLSPISILYKDSANNVVLKYHYD

SEQ ID NO: 87550 - protein, 27 aa, Artificial Sequence
  Cyclic GFR-binding peptide
KMNAISILYFDENKNVVLKKYRNMTVE

SEQ ID NO: 87551 - protein, 33 aa, Artificial Sequence
  Cyclic GFR-binding peptide
  MOD_RES (31), (33): Xaa is C or S
PEKMNAISILYFDENKNVVLKKYRNMTVESXAX

SEQ ID NO: 87552 - protein, 37 aa, Artificial Sequence; identical to SEQ ID NO: 34489
  Cyclic GFR-binding peptide
  MOD_RES (5), (6): Xaa is C or S

SEQ ID NO: 87553 - protein, 29 aa, Artificial Sequence
  Cyclic GFR-binding peptide
APVKTEPISMLYLDNGRVLLKFKYEMIVE

SEQ ID NO: 87554 - protein, 35 aa, Artificial Sequence; identical to SEQ ID NO: 34491
  Cyclic GFR-binding peptide
  MOD_RES (1), (33), (35): Xaa is C or S

SEQ ID NO: 87555 - protein, 29 aa, Artificial Sequence
  Cyclic GFR-binding peptide
  MOD_RES (1), (1): Xaa is C or S
XVPTRLSPISILYKDSANNVVLKYHYDMV

SEQ ID NO: 87556 - protein, 34 aa, Artificial Sequence
  Cyclic GFR-binding peptide
  MOD_RES (4), (5): Xaa is C or S
PPTXXVPTRLEPISILYLDSANNVVKFKYEDMVV

SEQ ID NO: 87557 - protein, 21 aa, Artificial Sequence
  Cyclic GFR-binding peptide
SATSILYYDSANNVVLRKHRD

SEQ ID NO: 87558 - protein, 34 aa, Artificial Sequence; identical to SEQ ID NO: 34492
  Cyclic GFR-binding peptide
  MOD_RES (3), (4): Xaa is C or S

SEQ ID NO: 87559 - protein, 31 aa, Artificial Sequence
  Cyclic GFR-binding peptide
  MOD_RES (5), (6): Xaa is C or S
ASKAXXVPTKLSATSILYYDKGVVTYLRKHR

SEQ ID NO: 87560 - protein, 30 aa, Artificial Sequence
  Cyclic GFR-binding peptide
  MOD_RES (30), (30): Xaa is C or S
PQDLSPINILYFVGRTPKVYGKIPMVVKSX

SEQ ID NO: 87561 - protein, 32 aa, Artificial Sequence
  Cyclic GFR-binding peptide
  MOD_RES (6), (7): Xaa is C or S
HVPKPXXAPTKLEPISVLYLDDSSNVIKFKYE

SEQ ID NO: 87562 - protein, 33 aa, Artificial Sequence; identical to SEQ ID NO: 34496
  Cyclic GFR-binding peptide
  MOD_RES (2), (3): Xaa is C or S

SEQ ID NO: 87563 - protein, 32 aa, Artificial Sequence
  Cyclic GFR-binding peptide
  MOD_RES (2), (3): Xaa is C or S
AXXVPTKLSATSILYYDKGVVTYLRKHRGMAV

SEQ ID NO: 87564 - protein, 37 aa, Artificial Sequence; identical to SEQ ID NO: 34499
  Cyclic GFR-binding peptide
  MOD_RES (5), (6), (37): Xaa is C or S

SEQ ID NO: 87565 - protein, 28 aa, Artificial Sequence
  Cyclic GFR-binding peptide
PQDLSPINILYFVGRTPKVYGKIPMVVK

SEQ ID NO: 87566 - protein, 29 aa, Artificial Sequence
  Cyclic GFR-binding peptide
  MOD_RES (27), (29): Xaa is C or S
LSPINILYFVGRKPKVYGKIPMIVRSXKX

SEQ ID NO: 87567 - protein, 39 aa, Artificial Sequence; identical to SEQ ID NO: 34501
  Cyclic GFR-binding peptide
  MOD_RES (5), (6), (38): Xaa is C or S

SEQ ID NO: 87568 - protein, 32 aa, Artificial Sequence
  Cyclic GFR-binding peptide
  MOD_RES (4), (5): Xaa is C or S
SKAXXVPTKLSATSILYYDKGVVTYLRKHRGM

SEQ ID NO: 87569 - protein, 38 aa, Artificial Sequence; identical to SEQ ID NO: 34502
  Cyclic GFR-binding peptide
  MOD_RES (4), (5), (37): Xaa is C or S

SEQ ID NO: 87570 - protein, 29 aa, Artificial Sequence
  Cyclic GFR-binding peptide
  MOD_RES (3), (4): Xaa is C or S
EPXXVPEKMSPISILYKDENKNVVLKYHY

SEQ ID NO: 87571 - protein, 34 aa, Artificial Sequence; identical to SEQ ID NO: 34503
  Cyclic GFR-binding peptide
  MOD_RES (1), (2), (33): Xaa is C or S

SEQ ID NO: 87572 - protein, 28 aa, Artificial Sequence
  Cyclic GFR-binding peptide
RLSATSILYYDAANNVVLRKHRDMVVEA

SEQ ID NO: 87573 - protein, 36 aa, Artificial Sequence; identical to SEQ ID NO: 34504
  Cyclic GFR-binding peptide
  MOD_RES (1), (2), (34), (36): Xaa is C or S

SEQ ID NO: 87574 - protein, 32 aa, Artificial Sequence
  Cyclic GFR-binding peptide
  MOD_RES (4), (5): Xaa is C or S
PSTXXAPVKTSATSMLYYDNGRVLLLRKHRMI

SEQ ID NO: 87575 - protein, 35 aa, Artificial Sequence; identical to SEQ ID NO: 34505
  Cyclic GFR-binding peptide
  MOD_RES (4), (5): Xaa is C or S

SEQ ID NO: 87576 - protein, 25 aa, Artificial Sequence
  Cyclic GFR-binding peptide
MSATSMLYYNDKQQIILRKHRGMVV

SEQ ID NO: 87577 - protein, 25 aa, Artificial Sequence
  Cyclic GFR-binding peptide
PTRLSATSILYYDSANNVVLRKHRD

SEQ ID NO: 87578 - protein, 30 aa, Artificial Sequence
  Cyclic GFR-binding peptide
  MOD_RES (27), (29): Xaa is C or S
SATSILYYDAANNVVLRKHRDMVVEAXGXR

SEQ ID NO: 87579 - protein, 32 aa, Artificial Sequence
  Cyclic GFR-binding peptide
  MOD_RES (4), (5): Xaa is C or S
PSTXXAPVKTSPISMLYKDNGRVLLLKYHYMI

SEQ ID NO: 87580 - protein, 33 aa, Artificial Sequence; identical to SEQ ID NO: 34509
  Cyclic GFR-binding peptide
  MOD_RES (1), (32): Xaa is C or S

SEQ ID NO: 87581 - protein, 29 aa, Artificial Sequence
  Cyclic GFR-binding peptide
  MOD_RES (3), (4): Xaa is C or S
GPXXTPTKMSPISMLYKNDKQQIILKYHY

SEQ ID NO: 87582 - protein, 32 aa, Artificial Sequence
  Cyclic GFR-binding peptide
  MOD_RES (6), (7): Xaa is C or S
KASKAXXVPTKLSATSILYYDKGVVTYLRKHR

SEQ ID NO: 87583 - protein, 34 aa, Artificial Sequence
  Cyclic GFR-binding peptide
  MOD_RES (6), (7): Xaa is C or S
ASASPXXVPQDLSPINILYFVGRTPKVYGKIPMV

SEQ ID NO: 87584 - protein, 25 aa, Artificial Sequence
  Cyclic GFR-binding peptide
SATSILYYDENKNVVLRKHRNMTVE

SEQ ID NO: 87585 - protein, 37 aa, Artificial Sequence; identical to SEQ ID NO: 34510
  Cyclic GFR-binding peptide
  MOD_RES (4), (5), (36): Xaa is C or S

SEQ ID NO: 87586 - protein, 35 aa, Artificial Sequence; identical to SEQ ID NO: 34511
  Cyclic GFR-binding peptide
  MOD_RES (2), (3), (35): Xaa is C or S

SEQ ID NO: 87587 - protein, 28 aa, Artificial Sequence
  Cyclic GFR-binding peptide
TPTKMSPISMLYKNDKQQIILKYHYGMV

SEQ ID NO: 87588 - protein, 32 aa, Artificial Sequence
  Cyclic GFR-binding peptide
  MOD_RES (4), (5): Xaa is C or S
PEPXXVPEKMSATSILYYDENKNVVLRKHRNM

SEQ ID NO: 87589 - protein, 32 aa, Artificial Sequence
  Cyclic GFR-binding peptide
  MOD_RES (4), (5): Xaa is C or S
PEPXXVPEKMSPISILYKDENKNVVLKYHYNM

SEQ ID NO: 87590 - protein, 27 aa, Artificial Sequence
  Cyclic GFR-binding peptide
TKMSPISMLYKNDKQQIILKYHYGMVV

SEQ ID NO: 87591 - protein, 31 aa, Artificial Sequence
  Cyclic GFR-binding peptide
  MOD_RES (1), (2): Xaa is C or S
XXVPQALSPINILYFVGRKPKVYGKIPMIVR

SEQ ID NO: 87592 - protein, 32 aa, Artificial Sequence
  Cyclic GFR-binding peptide
  MOD_RES (4), (5): Xaa is C or S
PPTXXVPTRLEPISILYLDSANNVVKFKYEDM

SEQ ID NO: 87593 - protein, 37 aa, Artificial Sequence; identical to SEQ ID NO: 34515
  Cyclic GFR-binding peptide
  MOD_RES (5), (6), (37): Xaa is C or S

SEQ ID NO: 87594 - protein, 24 aa, Artificial Sequence
  Cyclic GFR-binding peptide
KTEPISMLYLDNGRVLLKFKYEMI

SEQ ID NO: 87595 - protein, 27 aa, Artificial Sequence
  Cyclic GFR-binding peptide
  MOD_RES (1), (2): Xaa is C or S
XXAPVKTEPISMLYLDNGRVLLKFKYE

SEQ ID NO: 87596 - protein, 33 aa, Artificial Sequence; identical to SEQ ID NO: 34516
  Cyclic GFR-binding peptide
  MOD_RES (2), (3): Xaa is C or S

SEQ ID NO: 87597 - protein, 22 aa, Artificial Sequence
  Cyclic GFR-binding peptide
KTSPISMLYKDNGRVLLLKYHY

SEQ ID NO: 87598 - protein, 40 aa, Artificial Sequence; identical to SEQ ID NO: 34517
  Cyclic GFR-binding peptide
  MOD_RES (6), (7), (38), (40): Xaa is C or S

SEQ ID NO: 87599 - protein, 33 aa, Artificial Sequence
  Cyclic GFR-binding peptide
  MOD_RES (6), (7): Xaa is C or S
RVPSTXXAPVKTEPISMLYLDNGRVLLKFKYEM

SEQ ID NO: 87600 - protein, 32 aa, Artificial Sequence
  Cyclic GFR-binding peptide
  MOD_RES (6), (7): Xaa is C or S
GIPEPXXVPEKMSPINILYFDENKNVVYGKIP

SEQ ID NO: 87601 - protein, 24 aa, Artificial Sequence
  Cyclic GFR-binding peptide
ALSPINILYFVGRKPKVYGKIPMI

SEQ ID NO: 87602 - protein, 27 aa, Artificial Sequence
  Cyclic GFR-binding peptide
  MOD_RES (27), (27): Xaa is C or S
SPISILYKDENKNVVLKYHYNMTVESX

SEQ ID NO: 87603 - protein, 20 aa, Artificial Sequence
  Cyclic GFR-binding peptide
SPISILYKDENKNVVLKYHY

SEQ ID NO: 87604 - protein, 24 aa, Artificial Sequence
  Cyclic GFR-binding peptide
RLSATSILYYDSANNVVLRKHRDM

SEQ ID NO: 87605 - protein, 34 aa, Artificial Sequence; identical to SEQ ID NO: 34524
  Cyclic GFR-binding peptide
  MOD_RES (2), (3), (34): Xaa is C or S

SEQ ID NO: 87606 - protein, 26 aa, Artificial Sequence
  Cyclic GFR-binding peptide
PTRLEPISILYLDSANNVVKFKYEDM

SEQ ID NO: 87607 - protein, 38 aa, Artificial Sequence; identical to SEQ ID NO: 34525
  Cyclic GFR-binding peptide
  MOD_RES (6), (7), (38): Xaa is C or S

SEQ ID NO: 87608 - protein, 32 aa, Artificial Sequence
  Cyclic GFR-binding peptide
  MOD_RES (4), (5): Xaa is C or S
ASPXXVSQDLSPINILYFIGKTPKIYGKIPMI

SEQ ID NO: 87609 - protein, 33 aa, Artificial Sequence
  Cyclic GFR-binding peptide
  MOD_RES (4), (5): Xaa is C or S
PSTXXAPVKTSATSMLYYDNGRVLLLRKHRMIV

SEQ ID NO: 87610 - protein, 31 aa, Artificial Sequence
  Cyclic GFR-binding peptide
  MOD_RES (4), (5): Xaa is C or S
PSTXXAPVKTSATSMLYYDNGRVLLLRKHRM

SEQ ID NO: 87611 - protein, 40 aa, Artificial Sequence; identical to SEQ ID NO: 34526
  Cyclic GFR-binding peptide
  MOD_RES (4), (5), (37), (39): Xaa is C or S

SEQ ID NO: 87612 - protein, 28 aa, Artificial Sequence
  Cyclic GFR-binding peptide
  MOD_RES (1), (2): Xaa is C or S
XXVPEKMNAISILYFDENKNVVLKKYRN

SEQ ID NO: 87613 - protein, 38 aa, Artificial Sequence; identical to SEQ ID NO: 34529
  Cyclic GFR-binding peptide
  MOD_RES (3), (4), (36), (38): Xaa is C or S

SEQ ID NO: 87614 - protein, 28 aa, Artificial Sequence
  Cyclic GFR-binding peptide
  MOD_RES (27), (27): Xaa is C or S
SATSILYYDENKNVVLRKHRNMTVESXA

SEQ ID NO: 87615 - protein, 42 aa, Artificial Sequence; identical to SEQ ID NO: 34530
  Cyclic GFR-binding peptide
  MOD_RES (6), (7), (39), (41): Xaa is C or S

SEQ ID NO: 87616 - protein, 32 aa, Artificial Sequence
  Cyclic GFR-binding peptide
  MOD_RES (31), (31): Xaa is C or S
PTKMEPISMLYLNDKQQIIKFKYEGMVVDRXG

SEQ ID NO: 87617 - protein, 27 aa, Artificial Sequence
  Cyclic GFR-binding peptide
PEKMSPISILYKDENKNVVLKYHYNMT

SEQ ID NO: 87618 - protein, 26 aa, Artificial Sequence
  Cyclic GFR-binding peptide
  MOD_RES (1), (1): Xaa is C or S
XAPVKTSATSMLYYDNGRVLLLRKHR

SEQ ID NO: 87619 - protein, 32 aa, Artificial Sequence
  Cyclic GFR-binding peptide
  MOD_RES (2), (3): Xaa is C or S
PXXVSQDLSPINILYFIGKTPKIYGKIPMIVK

SEQ ID NO: 87620 - protein, 34 aa, Artificial Sequence
  Cyclic GFR-binding peptide
  MOD_RES (5), (6): Xaa is C or S
TPPTXXVPTRLEPISILYLDSANNVVKFKYEDMV

SEQ ID NO: 87621 - protein, 34 aa, Artificial Sequence; identical to SEQ ID NO: 34531
  Cyclic GFR-binding peptide
  MOD_RES (1), (33): Xaa is C or S

SEQ ID NO: 87622 - protein, 28 aa, Artificial Sequence
  Cyclic GFR-binding peptide
  MOD_RES (1), (2): Xaa is C or S
XXVPTRLEPISILYLDSANNVVKFKYED

SEQ ID NO: 87623 - protein, 35 aa, Artificial Sequence
  Cyclic GFR-binding peptide
  MOD_RES (5), (6): Xaa is C or S
TPPTXXVPTRLEPISILYLDSANNVVKFKYEDMVV

SEQ ID NO: 87624 - protein, 28 aa, Artificial Sequence
  Cyclic GFR-binding peptide
PEKMSPISILYKDENKNVVLKYHYNMTV

SEQ ID NO: 87625 - protein, 30 aa, Artificial Sequence
  Cyclic GFR-binding peptide
  MOD_RES (28), (30): Xaa is C or S
MEPISMLYLNDKQQIIKFKYEGMVVDRXGX

SEQ ID NO: 87626 - protein, 35 aa, Artificial Sequence; identical to SEQ ID NO: 21945
  Cyclic GFR-binding peptide
  MOD_RES (32), (34): Xaa is C or S

SEQ ID NO: 87627 - protein, 28 aa, Artificial Sequence
  Cyclic GFR-binding peptide
  MOD_RES (1), (2): Xaa is C or S
XXTPTKMSATSMLYYNDKQQIILRKHRG

SEQ ID NO: 87628 - protein, 24 aa, Artificial Sequence
  Cyclic GFR-binding peptide
SPINILYFVGRKPKVYGKIPMIVR

SEQ ID NO: 87629 - protein, 38 aa, Artificial Sequence; identical to SEQ ID NO: 34534
  Cyclic GFR-binding peptide
  MOD_RES (3), (4), (35), (37): Xaa is C or S

SEQ ID NO: 87630 - protein, 36 aa, Artificial Sequence; identical to SEQ ID NO: 34535
  Cyclic GFR-binding peptide
  MOD_RES (5), (6): Xaa is C or S

SEQ ID NO: 87631 - protein, 25 aa, Artificial Sequence
  Cyclic GFR-binding peptide
NAISILYFDENKNVVLKKYRNMTVE

SEQ ID NO: 87632 - protein, 28 aa, Artificial Sequence
  Cyclic GFR-binding peptide
  MOD_RES (27), (27): Xaa is C or S
EPISILYLDENKNVVKFKYENMTVESXA

SEQ ID NO: 87633 - protein, 31 aa, Artificial Sequence
  Cyclic GFR-binding peptide
  MOD_RES (30), (30): Xaa is C or S
EKMSPISILYKDENKNVVLKYHYNMTVESXA

SEQ ID NO: 87634 - protein, 27 aa, Artificial Sequence
  Cyclic GFR-binding peptide
KTSPISMLYKDNGRVLLLKYHYMIVEE

SEQ ID NO: 87635 - protein, 28 aa, Artificial Sequence
  Cyclic GFR-binding peptide
  MOD_RES (1), (1): Xaa is C or S
XTPTKMSATSMLYYNDKQQIILRKHRGM

SEQ ID NO: 87636 - protein, 25 aa, Artificial Sequence
  Cyclic GFR-binding peptide
MEPISMLYLNDKQQIIKFKYEGMVV

SEQ ID NO: 87637 - protein, 33 aa, Artificial Sequence
  Cyclic GFR-binding peptide
  MOD_RES (6), (7): Xaa is C or S
RVPSTXXAPVKTSPISMLYKDNGRVLLLKYHYM

SEQ ID NO: 87638 - protein, 29 aa, Artificial Sequence
  Cyclic GFR-binding peptide
  MOD_RES (1), (1): Xaa is C or S
XVPEKMSPISILYKDENKNVVLKYHYNMT

SEQ ID NO: 87639 - protein, 33 aa, Artificial Sequence
  Cyclic GFR-binding peptide
  MOD_RES (5), (6): Xaa is C or S
TPPTXXVPTRLSATSILYYDSANNVVLRKHRDM

SEQ ID NO: 87640 - protein, 34 aa, Artificial Sequence; identical to SEQ ID NO: 34541
  Cyclic GFR-binding peptide
  MOD_RES (1), (33): Xaa is C or S

SEQ ID NO: 87641 - protein, 26 aa, Artificial Sequence
  Cyclic GFR-binding peptide
VKTSPISMLYKDNGRVLLLKYHYMIV

SEQ ID NO: 87642 - protein, 30 aa, Artificial Sequence
  Cyclic GFR-binding peptide
PEKMEPISILYLDENKNVVKFKYENMTVES

SEQ ID NO: 87643 - protein, 36 aa, Artificial Sequence
  Cyclic GFR-binding peptide
  MOD_RES (6), (7): Xaa is C or S
AAPASXXVPARLSATSILYYDAANNVVLRKHRDMVV

SEQ ID NO: 87644 - protein, 30 aa, Artificial Sequence
  Cyclic GFR-binding peptide
  MOD_RES (28), (30): Xaa is C or S
MSATSMLYYNDKQQIILRKHRGMVVDRXGX

SEQ ID NO: 87645 - protein, 29 aa, Artificial Sequence
  Cyclic GFR-binding peptide
  MOD_RES (28), (28): Xaa is C or S
MEPISMLYLNDKQQIIKFKYEGMVVDRXG

SEQ ID NO: 87646 - protein, 24 aa, Artificial Sequence
  Cyclic GFR-binding peptide
MEPISILYLDENKNVVKFKYENMT

SEQ ID NO: 87647 - protein, 38 aa, Artificial Sequence; identical to SEQ ID NO: 34544
  Cyclic GFR-binding peptide
  MOD_RES (2), (3), (35), (37): Xaa is C or S

SEQ ID NO: 87648 - protein, 30 aa, Artificial Sequence
  Cyclic GFR-binding peptide
  MOD_RES (27), (29): Xaa is C or S
SATSILYYDSANNVVLRKHRDMVVESXGXR

SEQ ID NO: 87649 - protein, 35 aa, Artificial Sequence
  Cyclic GFR-binding peptide
  MOD_RES (5), (6): Xaa is C or S
IPEPXXVPEKMNAISILYFDENKNVVLKKYRNMTV

SEQ ID NO: 87650 - protein, 33 aa, Artificial Sequence
  Cyclic GFR-binding peptide
  MOD_RES (4), (5): Xaa is C or S
ASPXXVPQDLSPINILYFVGRTPKVYGKIPMVV

SEQ ID NO: 87651 - protein, 30 aa, Artificial Sequence
  Cyclic GFR-binding peptide
  MOD_RES (29), (29): Xaa is C or S
KMNAISILYFDENKNVVLKKYRNMTVESXA

SEQ ID NO: 87652 - protein, 28 aa, Artificial Sequence
  Cyclic GFR-binding peptide
  MOD_RES (27), (27): Xaa is C or S
LSPINILYFVGRTPKVYGKIPMVVKSXK

SEQ ID NO: 87653 - protein, 26 aa, Artificial Sequence
  Cyclic GFR-binding peptide
DLSPINILYFVGRTPKVYGKIPMVVK

SEQ ID NO: 87654 - protein, 27 aa, Artificial Sequence
  Cyclic GFR-binding peptide
  MOD_RES (1), (1): Xaa is C or S
XVPEKMEPISILYLDENKNVVKFKYEN

SEQ ID NO: 87655 - protein, 29 aa, Artificial Sequence
  Cyclic GFR-binding peptide
EPISMLYLNDKQQIIKFKYEAAAAAAAAA

SEQ ID NO: 87656 - protein, 32 aa, Artificial Sequence
  Cyclic GFR-binding peptide
  MOD_RES (2), (3): Xaa is C or S
TXXVPTRLEPISILYLDSANNVVKFKYEDMVV

SEQ ID NO: 87657 - protein, 25 aa, Artificial Sequence
  Cyclic GFR-binding peptide
SPISILYKDENKNVVLKYHYNMTVE

SEQ ID NO: 87658 - protein, 27 aa, Artificial Sequence
  Cyclic GFR-binding peptide
  MOD_RES (1), (1): Xaa is C or S
XVPEKMSPISILYKDENKNVVLKYHYN

SEQ ID NO: 87659 - protein, 35 aa, Artificial Sequence; identical to SEQ ID NO: 34547
  Cyclic GFR-binding peptide
  MOD_RES (1), (32), (34): Xaa is C or S

SEQ ID NO: 87660 - protein, 37 aa, Artificial Sequence; identical to SEQ ID NO: 34549
  Cyclic GFR-binding peptide
  MOD_RES (2), (3), (35), (37): Xaa is C or S

SEQ ID NO: 87661 - protein, 31 aa, Artificial Sequence
  Cyclic GFR-binding peptide
  MOD_RES (30), (30): Xaa is C or S
PVKTSPISMLYKDNGRVLLLKYHYMIVEEXG

SEQ ID NO: 87662 - protein, 30 aa, Artificial Sequence
  Cyclic GFR-binding peptide
  MOD_RES (2), (3): Xaa is C or S
TXXVPTRLSATSILYYDSANNVVLRKHRDM

SEQ ID NO: 87663 - protein, 25 aa, Artificial Sequence
  Cyclic GFR-binding peptide
SPINILYFVGRKPKVYGKIPMIVRS

SEQ ID NO: 87664 - protein, 35 aa, Artificial Sequence
  Cyclic GFR-binding peptide
  MOD_RES (6), (7): Xaa is C or S
KASKAXXVPTKLSATSILYYDKGVVTYLRKHRGMA

SEQ ID NO: 87665 - protein, 33 aa, Artificial Sequence; identical to SEQ ID NO: 34550
  Cyclic GFR-binding peptide
  MOD_RES (32), (32): Xaa is C or S

SEQ ID NO: 87666 - protein, 35 aa, Artificial Sequence
  Cyclic GFR-binding peptide
  MOD_RES (6), (7): Xaa is C or S
GSAGPXXTPTKMEPISMLYLNDKQQIIKFKYEGMV

SEQ ID NO: 87667 - protein, 37 aa, Artificial Sequence; identical to SEQ ID NO: 34551
  Cyclic GFR-binding peptide
  MOD_RES (1), (2), (34), (36): Xaa is C or S

SEQ ID NO: 87668 - protein, 34 aa, Artificial Sequence
  Cyclic GFR-binding peptide
  MOD_RES (6), (7): Xaa is C or S
GIPEPXXVPEKMSATSILYYDENKNVVLRKHRNM

SEQ ID NO: 87669 - protein, 35 aa, Artificial Sequence; identical to SEQ ID NO: 34552
  Cyclic GFR-binding peptide
  MOD_RES (1), (33), (35): Xaa is C or S

SEQ ID NO: 87670 - protein, 39 aa, Artificial Sequence; identical to SEQ ID NO: 34554
  Cyclic GFR-binding peptide
  MOD_RES (6), (7), (39): Xaa is C or S

SEQ ID NO: 87671 - protein, 39 aa, Artificial Sequence; identical to SEQ ID NO: 34555
  Cyclic GFR-binding peptide
  MOD_RES (5), (6), (37), (39): Xaa is C or S

SEQ ID NO: 87672 - protein, 34 aa, Artificial Sequence; identical to SEQ ID NO: 34556
  Cyclic GFR-binding peptide
  MOD_RES (32), (34): Xaa is C or S

SEQ ID NO: 87673 - protein, 38 aa, Artificial Sequence; identical to SEQ ID NO: 34557
  Cyclic GFR-binding peptide
  MOD_RES (6), (7): Xaa is C or S

SEQ ID NO: 87674 - protein, 36 aa, Artificial Sequence; identical to SEQ ID NO: 34558
  Cyclic GFR-binding peptide
  MOD_RES (2), (3), (35): Xaa is C or S

SEQ ID NO: 87675 - protein, 30 aa, Artificial Sequence
  Cyclic GFR-binding peptide
  MOD_RES (3), (4): Xaa is C or S
STXXAPVKTSPISMLYKDNGRVLLLKYHYM

SEQ ID NO: 87676 - protein, 31 aa, Artificial Sequence
  Cyclic GFR-binding peptide
  MOD_RES (1), (2): Xaa is C or S
XXVPEKMSPINILYFDENKNVVYGKIPNMTV

SEQ ID NO: 87677 - protein, 36 aa, Artificial Sequence; identical to SEQ ID NO: 34559
  Cyclic GFR-binding peptide
  MOD_RES (2), (3), (34), (36): Xaa is C or S

SEQ ID NO: 87678 - protein, 26 aa, Artificial Sequence
  Cyclic GFR-binding peptide
NAISILYFDENKNVVLKKYRNMTVES

SEQ ID NO: 87679 - protein, 28 aa, Artificial Sequence
  Cyclic GFR-binding peptide
  MOD_RES (1), (2): Xaa is C or S
XXVPEKMSPINILYFDENKNVVYGKIPN

SEQ ID NO: 87680 - protein, 31 aa, Artificial Sequence; identical to SEQ ID NO: 34562
  Cyclic GFR-binding peptide

SEQ ID NO: 87681 - protein, 29 aa, Artificial Sequence
  Cyclic GFR-binding peptide
  MOD_RES (3), (4): Xaa is C or S
PTXXVPTRLSATSILYYDSANNVVLRKHR

SEQ ID NO: 87682 - protein, 36 aa, Artificial Sequence; identical to SEQ ID NO: 34563
  Cyclic GFR-binding peptide
  MOD_RES (2), (3), (35): Xaa is C or S

SEQ ID NO: 87683 - protein, 30 aa, Artificial Sequence
  Cyclic GFR-binding peptide
PARLSATSILYYDAANNVVLRKHRDMVVEA

SEQ ID NO: 87684 - protein, 23 aa, Artificial Sequence
  Cyclic GFR-binding peptide
TSATSMLYYDNGRVLLLRKHRMI

SEQ ID NO: 87685 - protein, 36 aa, Artificial Sequence; identical to SEQ ID NO: 34564
  Cyclic GFR-binding peptide
  MOD_RES (2), (3), (35): Xaa is C or S

SEQ ID NO: 87686 - protein, 35 aa, Artificial Sequence; identical to SEQ ID NO: 22128
  Cyclic GFR-binding peptide
  MOD_RES (32), (34): Xaa is C or S

SEQ ID NO: 87687 - protein, 33 aa, Artificial Sequence; identical to SEQ ID NO: 34565
  Cyclic GFR-binding peptide
  MOD_RES (1), (2): Xaa is C or S

SEQ ID NO: 87688 - protein, 34 aa, Artificial Sequence; identical to SEQ ID NO: 34566
  Cyclic GFR-binding peptide
  MOD_RES (1), (2), (33): Xaa is C or S

SEQ ID NO: 87689 - protein, 32 aa, Artificial Sequence
  Cyclic GFR-binding peptide
  MOD_RES (30), (32): Xaa is C or S
EKMSPISILYKDENKNVVLKYHYNMTVESXAX

SEQ ID NO: 87690 - protein, 36 aa, Artificial Sequence; identical to SEQ ID NO: 34568
  Cyclic GFR-binding peptide
  MOD_RES (4), (5): Xaa is C or S

SEQ ID NO: 87691 - protein, 35 aa, Artificial Sequence; identical to SEQ ID NO: 34569
  Cyclic GFR-binding peptide
  MOD_RES (32), (34): Xaa is C or S

SEQ ID NO: 87692 - protein, 40 aa, Artificial Sequence; identical to SEQ ID NO: 34570
  Cyclic GFR-binding peptide
  MOD_RES (6), (7), (38), (40): Xaa is C or S

SEQ ID NO: 87693 - protein, 20 aa, Artificial Sequence
  Cyclic GFR-binding peptide
SPINILYFDENKNVVYGKIP

SEQ ID NO: 87694 - protein, 22 aa, Artificial Sequence
  Cyclic GFR-binding peptide
LSPINILYFVGRKPKVYGKIPM

SEQ ID NO: 87695 - protein, 36 aa, Artificial Sequence; identical to SEQ ID NO: 34571
  Cyclic GFR-binding peptide
  MOD_RES (4), (5): Xaa is C or S

SEQ ID NO: 87696 - protein, 30 aa, Artificial Sequence
  Cyclic GFR-binding peptide
  MOD_RES (1), (1): Xaa is C or S
XVPQDLSPINILYFVGRTPKVYGKIPMVVK

SEQ ID NO: 87697 - protein, 32 aa, Artificial Sequence
  Cyclic GFR-binding peptide
  MOD_RES (4), (5): Xaa is C or S
AGPXXTPTKMSATSMLYYNDKQQIILRKHRGM

SEQ ID NO: 87698 - protein, 34 aa, Artificial Sequence; identical to SEQ ID NO: 34572
  Cyclic GFR-binding peptide
  MOD_RES (31), (33): Xaa is C or S

SEQ ID NO: 87699 - protein, 35 aa, Artificial Sequence
  Cyclic GFR-binding peptide
  MOD_RES (5), (6): Xaa is C or S
SASPXXVPQDLSPINILYFVGRTPKVYGKIPMVVK

SEQ ID NO: 87700 - protein, 28 aa, Artificial Sequence
  Cyclic GFR-binding peptide
VPTRLSPISILYKDSANNVVLKYHYDMV

SEQ ID NO: 87701 - protein, 30 aa, Artificial Sequence
  Cyclic GFR-binding peptide
  MOD_RES (1), (2): Xaa is C or S
XXTPTKMSPISMLYKNDKQQIILKYHYGMV

SEQ ID NO: 87702 - protein, 42 aa, Artificial Sequence; identical to SEQ ID NO: 34573
  Cyclic GFR-binding peptide
  MOD_RES (6), (7), (39), (41): Xaa is C or S

SEQ ID NO: 87703 - protein, 30 aa, Artificial Sequence; identical to SEQ ID NO: 34574
  Cyclic GFR-binding peptide

SEQ ID NO: 87704 - protein, 29 aa, Artificial Sequence
  Cyclic GFR-binding peptide
  MOD_RES (2), (3): Xaa is C or S
TXXAPVKTEPISMLYLDNGRVLLKFKYEM

SEQ ID NO: 87705 - protein, 24 aa, Artificial Sequence
  Cyclic GFR-binding peptide
TKMSATSMLYYNDKQQIILRKHRG

SEQ ID NO: 87706 - protein, 32 aa, Artificial Sequence
  Cyclic GFR-binding peptide
  MOD_RES (29), (31): Xaa is C or S
RLEPISILYLDSANNVVKFKYEDMVVESXGXR

SEQ ID NO: 87707 - protein, 23 aa, Artificial Sequence
  Cyclic GFR-binding peptide
MNAISILYFDENKNVVLKKYRNM

SEQ ID NO: 87708 - protein, 34 aa, Artificial Sequence
  Cyclic GFR-binding peptide
  MOD_RES (5), (6): Xaa is C or S
IPEPXXVPEKMNAISILYFDENKNVVLKKYRNMT

SEQ ID NO: 87709 - protein, 31 aa, Artificial Sequence
  Cyclic GFR-binding peptide
  MOD_RES (31), (31): Xaa is C or S
PTKLSATSILYYDKGVVTYLRKHRGMAVSEX

SEQ ID NO: 87710 - protein, 32 aa, Artificial Sequence
  Cyclic GFR-binding peptide
  MOD_RES (31), (31): Xaa is C or S
PTRLEPISILYLDSANNVVKFKYEDMVVESXG

SEQ ID NO: 87711 - protein, 28 aa, Artificial Sequence
  Cyclic GFR-binding peptide
ARLSATSILYYDAANNVVLRKHRDMVVE

SEQ ID NO: 87712 - protein, 34 aa, Artificial Sequence; identical to SEQ ID NO: 34577
  Cyclic GFR-binding peptide
  MOD_RES (3), (4): Xaa is C or S

SEQ ID NO: 87713 - protein, 33 aa, Artificial Sequence
  Cyclic GFR-binding peptide
  MOD_RES (30), (32): Xaa is C or S
TKMEPISMLYLNDKQQIIKFKYEGMVVDRXGXS

SEQ ID NO: 87714 - protein, 30 aa, Artificial Sequence
  Cyclic GFR-binding peptide
  MOD_RES (2), (3): Xaa is C or S
PXXVPEKMSATSILYYDENKNVVLRKHRNM

SEQ ID NO: 87715 - protein, 35 aa, Artificial Sequence; identical to SEQ ID NO: 34578
  Cyclic GFR-binding peptide
  MOD_RES (3), (4): Xaa is C or S

SEQ ID NO: 87716 - protein, 34 aa, Artificial Sequence; identical to SEQ ID NO: 34579
  Cyclic GFR-binding peptide
  MOD_RES (2), (3): Xaa is C or S

SEQ ID NO: 87717 - protein, 29 aa, Artificial Sequence
  Cyclic GFR-binding peptide
PQALSPINILYFVGRKPKVYGKIPMIVRS

SEQ ID NO: 87718 - protein, 32 aa, Artificial Sequence
  Cyclic GFR-binding peptide
  MOD_RES (30), (32): Xaa is C or S
PVKTEPISMLYLDNGRVLLKFKYEMIVEEXGX

SEQ ID NO: 87719 - protein, 36 aa, Artificial Sequence; identical to SEQ ID NO: 34580
  Cyclic GFR-binding peptide
  MOD_RES (2), (3), (34), (36): Xaa is C or S

SEQ ID NO: 87720 - protein, 34 aa, Artificial Sequence
  Cyclic GFR-binding peptide
  MOD_RES (31), (33): Xaa is C or S
PTRLSPISILYKDSANNVVLKYHYDMVVESXGXR

SEQ ID NO: 87721 - protein, 29 aa, Artificial Sequence
  Cyclic GFR-binding peptide
  MOD_RES (1), (2): Xaa is C or S
XXVPTRLSPISILYKDSANNVVLKYHYDM

SEQ ID NO: 87722 - protein, 26 aa, Artificial Sequence
  Cyclic GFR-binding peptide
TKMSATSMLYYNDKQQIILRKHRGMV

SEQ ID NO: 87723 - protein, 26 aa, Artificial Sequence
  Cyclic GFR-binding peptide
PEKMSPISILYKDENKNVVLKYHYNM

SEQ ID NO: 87724 - protein, 29 aa, Artificial Sequence
  Cyclic GFR-binding peptide
  MOD_RES (3), (4): Xaa is C or S
EPXXVPEKMSPINILYFDENKNVVYGKIP

SEQ ID NO: 87725 - protein, 27 aa, Artificial Sequence
  Cyclic GFR-binding peptide
TPTKMSATSMLYYNDKQQIILRKHRGM

SEQ ID NO: 87726 - protein, 36 aa, Artificial Sequence; identical to SEQ ID NO: 34581
  Cyclic GFR-binding peptide
  MOD_RES (2), (3), (34), (36): Xaa is C or S

SEQ ID NO: 87727 - protein, 28 aa, Artificial Sequence
  Cyclic GFR-binding peptide
  MOD_RES (27), (27): Xaa is C or S
SPISILYKDSANNVVLKYHYDMVVESXG

SEQ ID NO: 87728 - protein, 30 aa, Artificial Sequence
  Cyclic GFR-binding peptide
  MOD_RES (3), (4): Xaa is C or S
STXXAPVKTEPISMLYLDNGRVLLKFKYEM

SEQ ID NO: 87729 - protein, 34 aa, Artificial Sequence
  Cyclic GFR-binding peptide
  MOD_RES (5), (6): Xaa is C or S
SAGPXXTPTKMSATSMLYYNDKQQIILRKHRGMV

SEQ ID NO: 87730 - protein, 32 aa, Artificial Sequence
  Cyclic GFR-binding peptide
  MOD_RES (2), (3): Xaa is C or S
TXXVPTRLSATSILYYDSANNVVLRKHRDMVV

SEQ ID NO: 87731 - protein, 28 aa, Artificial Sequence
  Cyclic GFR-binding peptide
KMSPISMLYKNDKQQIILKYHYGMVVDR

SEQ ID NO: 87732 - protein, 35 aa, Artificial Sequence; identical to SEQ ID NO: 34583
  Cyclic GFR-binding peptide
  MOD_RES (1), (32), (34): Xaa is C or S

SEQ ID NO: 87733 - protein, 31 aa, Artificial Sequence
  Cyclic GFR-binding peptide
  MOD_RES (3), (4): Xaa is C or S
EPXXVPEKMSPISILYKDENKNVVLKYHYNM

SEQ ID NO: 87734 - protein, 34 aa, Artificial Sequence; identical to SEQ ID NO: 34585
  Cyclic GFR-binding peptide
  MOD_RES (1), (2), (34): Xaa is C or S

SEQ ID NO: 87735 - protein, 31 aa, Artificial Sequence; identical to SEQ ID NO: 34586
  Cyclic GFR-binding peptide
  MOD_RES (31), (31): Xaa is C or S

SEQ ID NO: 87736 - protein, 26 aa, Artificial Sequence
  Cyclic GFR-binding peptide
VPEKMEPISILYLDENKNVVKFKYEN

SEQ ID NO: 87737 - protein, 31 aa, Artificial Sequence
  Cyclic GFR-binding peptide
  MOD_RES (28), (30): Xaa is C or S
KTSATSMLYYDNGRVLLLRKHRMIVEEXGXL

SEQ ID NO: 87738 - protein, 38 aa, Artificial Sequence; identical to SEQ ID NO: 34591
  Cyclic GFR-binding peptide
  MOD_RES (3), (4), (36), (38): Xaa is C or S

SEQ ID NO: 87739 - protein, 31 aa, Artificial Sequence
  Cyclic GFR-binding peptide
  MOD_RES (4), (5): Xaa is C or S
PEPXXVPEKMSPINILYFDENKNVVYGKIPN

SEQ ID NO: 87740 - protein, 29 aa, Artificial Sequence
  Cyclic GFR-binding peptide
  MOD_RES (1), (2): Xaa is C or S
XXVPEKMNAISILYFDENKNVVLKKYRNM

SEQ ID NO: 87741 - protein, 36 aa, Artificial Sequence; identical to SEQ ID NO: 34595
  Cyclic GFR-binding peptide
  MOD_RES (1), (33), (35): Xaa is C or S

SEQ ID NO: 87742 - protein, 36 aa, Artificial Sequence
  Cyclic GFR-binding peptide
  MOD_RES (6), (7): Xaa is C or S
STPPTXXVPTRLSPISILYKDSANNVVLKYHYDMVV

SEQ ID NO: 87743 - protein, 28 aa, Artificial Sequence
  Cyclic GFR-binding peptide
  MOD_RES (27), (27): Xaa is C or S
NAISILYFDENKNVVLKKYRNMTVESXA

SEQ ID NO: 87744 - protein, 29 aa, Artificial Sequence
  Cyclic GFR-binding peptide
TRLSPISILYKDSANNVVLKYHYDMVVES

SEQ ID NO: 87745 - protein, 32 aa, Artificial Sequence; identical to SEQ ID NO: 34596
  Cyclic GFR-binding peptide
  MOD_RES (1), (1): Xaa is C or S

SEQ ID NO: 87746 - protein, 32 aa, Artificial Sequence; identical to SEQ ID NO: 34597
  Cyclic GFR-binding peptide
  MOD_RES (1), (1): Xaa is C or S

SEQ ID NO: 87747 - protein, 37 aa, Artificial Sequence; identical to SEQ ID NO: 34598
  Cyclic GFR-binding peptide
  MOD_RES (6), (7): Xaa is C or S

SEQ ID NO: 87748 - protein, 26 aa, Artificial Sequence
  Cyclic GFR-binding peptide
EKMSPISILYKDENKNVVLKYHYNMT

SEQ ID NO: 87749 - protein, 35 aa, Artificial Sequence; identical to SEQ ID NO: 34599
  Cyclic GFR-binding peptide
  MOD_RES (1), (33), (35): Xaa is C or S

SEQ ID NO: 87750 - protein, 39 aa, Artificial Sequence; identical to SEQ ID NO: 34600
  Cyclic GFR-binding peptide
  MOD_RES (4), (5), (37), (39): Xaa is C or S

SEQ ID NO: 87751 - protein, 28 aa, Artificial Sequence
  Cyclic GFR-binding peptide
  MOD_RES (27), (27): Xaa is C or S
LSPINILYFIGKTPKIYGKIPMIVKSXK

SEQ ID NO: 87752 - protein, 34 aa, Artificial Sequence; identical to SEQ ID NO: 34601
  Cyclic GFR-binding peptide
  MOD_RES (1), (2), (34): Xaa is C or S

SEQ ID NO: 87753 - protein, 33 aa, Artificial Sequence; identical to SEQ ID NO: 34602
  Cyclic GFR-binding peptide
  MOD_RES (2), (3): Xaa is C or S

SEQ ID NO: 87754 - protein, 27 aa, Artificial Sequence
  Cyclic GFR-binding peptide
APVKTEPISMLYLDNGRVLLKFKYEMI

SEQ ID NO: 87755 - protein, 33 aa, Artificial Sequence
  Cyclic GFR-binding peptide
  MOD_RES (6), (7): Xaa is C or S
GSAGPXXTPTKMSATSMLYYNDKQQIILRKHRG

SEQ ID NO: 87756 - protein, 26 aa, Artificial Sequence
  Cyclic GFR-binding peptide
PTKMEPISMLYLNDKQQIIKFKYEGM

SEQ ID NO: 87757 - protein, 24 aa, Artificial Sequence
  Cyclic GFR-binding peptide
KMSPINILYFDENKNVVYGKIPNM

SEQ ID NO: 87758 - protein, 40 aa, Artificial Sequence; identical to SEQ ID NO: 34607
  Cyclic GFR-binding peptide
  MOD_RES (5), (6), (38), (40): Xaa is C or S

SEQ ID NO: 87759 - protein, 32 aa, Artificial Sequence
  Cyclic GFR-binding peptide
  MOD_RES (2), (3): Xaa is C or S
PXXVPEKMNAISILYFDENKNVVLKKYRNMTV

SEQ ID NO: 87760 - protein, 33 aa, Artificial Sequence; identical to SEQ ID NO: 34609
  Cyclic GFR-binding peptide
  MOD_RES (1), (33): Xaa is C or S

SEQ ID NO: 87761 - protein, 26 aa, Artificial Sequence
  Cyclic GFR-binding peptide
TPTKMSATSMLYYNDKQQIILRKHRG

SEQ ID NO: 87762 - protein, 29 aa, Artificial Sequence
  Cyclic GFR-binding peptide
  MOD_RES (2), (3): Xaa is C or S
TXXVPTRLSATSILYYDSANNVVLRKHRD

SEQ ID NO: 87763 - protein, 26 aa, Artificial Sequence
  Cyclic GFR-binding peptide
VPTRLSPISILYKDSANNVVLKYHYD

SEQ ID NO: 87764 - protein, 33 aa, Artificial Sequence; identical to SEQ ID NO: 34610
  Cyclic GFR-binding peptide
  MOD_RES (1), (33): Xaa is C or S

SEQ ID NO: 87765 - protein, 25 aa, Artificial Sequence
  Cyclic GFR-binding peptide
VPTRLSPISILYKDSANNVVLKYHY

SEQ ID NO: 87766 - protein, 29 aa, Artificial Sequence
  Cyclic GFR-binding peptide
  MOD_RES (3), (4): Xaa is C or S
STXXAPVKTEPISMLYLDNGRVLLKFKYE

SEQ ID NO: 87767 - protein, 29 aa, Artificial Sequence
  Cyclic GFR-binding peptide
  MOD_RES (1), (2): Xaa is C or S
XXAPVKTEPISMLYLDNGRVLLKFKYEMI

SEQ ID NO: 87768 - protein, 25 aa, Artificial Sequence
  Cyclic GFR-binding peptide
KLSATSILYYDKGVVTYLRKHRGMA

SEQ ID NO: 87769 - protein, 21 aa, Artificial Sequence
  Cyclic GFR-binding peptide
MSPINILYFDENKNVVYGKIP

SEQ ID NO: 87770 - protein, 29 aa, Artificial Sequence
  Cyclic GFR-binding peptide
PTKLSATSILYYDKGVVTYLRKHRGMAVS

SEQ ID NO: 87771 - protein, 30 aa, Artificial Sequence
  Cyclic GFR-binding peptide
  MOD_RES (1), (1): Xaa is C or S
XVPARLSATSILYYDAANNVVLRKHRDMVV

SEQ ID NO: 87772 - protein, 22 aa, Artificial Sequence
  Cyclic GFR-binding peptide
SPINILYFVGRTPKVYGKIPMV

SEQ ID NO: 87773 - protein, 34 aa, Artificial Sequence
  Cyclic GFR-binding peptide
  MOD_RES (6), (7): Xaa is C or S
RVPSTXXAPVKTSATSMLYYDNGRVLLLRKHRMI

SEQ ID NO: 87774 - protein, 27 aa, Artificial Sequence
  Cyclic GFR-binding peptide
VPEKMNAISILYFDENKNVVLKKYRNM

SEQ ID NO: 87775 - protein, 36 aa, Artificial Sequence; identical to SEQ ID NO: 34613
  Cyclic GFR-binding peptide
  MOD_RES (5), (6): Xaa is C or S

SEQ ID NO: 87776 - protein, 31 aa, Artificial Sequence
  Cyclic GFR-binding peptide
  MOD_RES (28), (30): Xaa is C or S
MSATSILYYDENKNVVLRKHRNMTVESXAXR

SEQ ID NO: 87777 - protein, 31 aa, Artificial Sequence
  Cyclic GFR-binding peptide
  MOD_RES (5), (6): Xaa is C or S
TPPTXXVPTRLEPISILYLDSANNVVKFKYE

SEQ ID NO: 87778 - protein, 30 aa, Artificial Sequence
  Cyclic GFR-binding peptide
  MOD_RES (2), (3): Xaa is C or S
AXXVPTKLSATSILYYDKGVVTYLRKHRGM

SEQ ID NO: 87779 - protein, 29 aa, Artificial Sequence
  Cyclic GFR-binding peptide
VPARLSATSILYYDAANNVVLRKHRDMVV

SEQ ID NO: 87780 - protein, 37 aa, Artificial Sequence; identical to SEQ ID NO: 34619
  Cyclic GFR-binding peptide
  MOD_RES (5), (6): Xaa is C or S

SEQ ID NO: 87781 - protein, 25 aa, Artificial Sequence
  Cyclic GFR-binding peptide
KMEPISMLYLNDKQQIIKFKYEGMV

SEQ ID NO: 87782 - protein, 34 aa, Artificial Sequence
  Cyclic GFR-binding peptide
  MOD_RES (31), (33): Xaa is C or S
PTKLSATSILYYDKGVVTYLRKHRGMAVSEXGXR

SEQ ID NO: 87783 - protein, 23 aa, Artificial Sequence
  Cyclic GFR-binding peptide
DLSPINILYFIGKTPKIYGKIPM

SEQ ID NO: 87784 - protein, 40 aa, Artificial Sequence; identical to SEQ ID NO: 34620
  Cyclic GFR-binding peptide
  MOD_RES (6), (7), (39): Xaa is C or S

SEQ ID NO: 87785 - protein, 34 aa, Artificial Sequence; identical to SEQ ID NO: 34621
  Cyclic GFR-binding peptide
  MOD_RES (32), (34): Xaa is C or S

SEQ ID NO: 87786 - protein, 28 aa, Artificial Sequence
  Cyclic GFR-binding peptide
  MOD_RES (1), (1): Xaa is C or S
XAPVKTEPISMLYLDNGRVLLKFKYEMI

SEQ ID NO: 87787 - protein, 41 aa, Artificial Sequence; identical to SEQ ID NO: 34623
  Cyclic GFR-binding peptide
  MOD_RES (6), (7), (38), (40): Xaa is C or S

SEQ ID NO: 87788 - protein, 25 aa, Artificial Sequence
  Cyclic GFR-binding peptide
LSPISILYKDSANNVVLKYHYDMVV

SEQ ID NO: 87789 - protein, 29 aa, Artificial Sequence
  Cyclic GFR-binding peptide
  MOD_RES (2), (3): Xaa is C or S
PXXVPEKMSPINILYFDENKNVVYGKIPN

SEQ ID NO: 87790 - protein, 40 aa, Artificial Sequence; identical to SEQ ID NO: 34624
  Cyclic GFR-binding peptide
  MOD_RES (6), (7), (39): Xaa is C or S

SEQ ID NO: 87791 - protein, 27 aa, Artificial Sequence
  Cyclic GFR-binding peptide
MSPISILYKDENKNVVLKYHYNMTVES

SEQ ID NO: 87792 - protein, 29 aa, Artificial Sequence
  Cyclic GFR-binding peptide
SPINILYFVGRKPKVYGKIPAAAAAAAAA

SEQ ID NO: 87793 - protein, 24 aa, Artificial Sequence
  Cyclic GFR-binding peptide
SATSMLYYDNGRVLLLRKHRMIVE

SEQ ID NO: 87794 - protein, 35 aa, Artificial Sequence; identical to SEQ ID NO: 34626
  Cyclic GFR-binding peptide
  MOD_RES (4), (5): Xaa is C or S

SEQ ID NO: 87795 - protein, 26 aa, Artificial Sequence
  Cyclic GFR-binding peptide
LSATSILYYDAANNVVLRKHRDMVVE

SEQ ID NO: 87796 - protein, 26 aa, Artificial Sequence
  Cyclic GFR-binding peptide
MSPINILYFDENKNVVYGKIPNMTVE

SEQ ID NO: 87797 - protein, 27 aa, Artificial Sequence
  Cyclic GFR-binding peptide
VPTRLSPISILYKDSANNVVLKYHYDM

SEQ ID NO: 87798 - protein, 38 aa, Artificial Sequence; identical to SEQ ID NO: 34628
  Cyclic GFR-binding peptide
  MOD_RES (4), (5), (36), (38): Xaa is C or S

SEQ ID NO: 87799 - protein, 32 aa, Artificial Sequence
  Cyclic GFR-binding peptide
  MOD_RES (2), (3): Xaa is C or S
PXXTPTKMEPISMLYLNDKQQIIKFKYEGMVV

SEQ ID NO: 87800 - protein, 25 aa, Artificial Sequence
  Cyclic GFR-binding peptide
VPTRLEPISILYLDSANNVVKFKYE

SEQ ID NO: 87801 - protein, 40 aa, Artificial Sequence; identical to SEQ ID NO: 34631
  Cyclic GFR-binding peptide
  MOD_RES (6), (7), (39): Xaa is C or S

SEQ ID NO: 87802 - protein, 29 aa, Artificial Sequence
  Cyclic GFR-binding peptide
  MOD_RES (28), (28): Xaa is C or S
MSATSMLYYNDKQQIILRKHRGMVVDRXG

SEQ ID NO: 87803 - protein, 24 aa, Artificial Sequence
  Cyclic GFR-binding peptide
KMSATSMLYYNDKQQIILRKHRGM

SEQ ID NO: 87804 - protein, 29 aa, Artificial Sequence
  Cyclic GFR-binding peptide
  MOD_RES (3), (4): Xaa is C or S
STXXAPVKTSPISMLYKDNGRVLLLKYHY

SEQ ID NO: 87805 - protein, 31 aa, Artificial Sequence
  Cyclic GFR-binding peptide
  MOD_RES (30), (30): Xaa is C or S
PQDLSPINILYFVGRTPKVYGKIPMVVKSXK

SEQ ID NO: 87806 - protein, 33 aa, Artificial Sequence
  Cyclic GFR-binding peptide
  MOD_RES (5), (6): Xaa is C or S
IPEPXXVPEKMSPISILYKDENKNVVLKYHYNM

SEQ ID NO: 87807 - protein, 31 aa, Artificial Sequence
  Cyclic GFR-binding peptide
  MOD_RES (4), (5): Xaa is C or S
PEPXXVPEKMNAISILYFDENKNVVLKKYRN

SEQ ID NO: 87808 - protein, 30 aa, Artificial Sequence
  Cyclic GFR-binding peptide
  MOD_RES (27), (29): Xaa is C or S
EPISMLYLNDKQQIIKFKYEGMVVDRXGXS

SEQ ID NO: 87809 - protein, 29 aa, Artificial Sequence
  Cyclic GFR-binding peptide
  MOD_RES (2), (3): Xaa is C or S
TXXAPVKTSATSMLYYDNGRVLLLRKHRM

SEQ ID NO: 87810 - protein, 34 aa, Artificial Sequence; identical to SEQ ID NO: 34634
  Cyclic GFR-binding peptide
  MOD_RES (32), (34): Xaa is C or S

SEQ ID NO: 87811 - protein, 30 aa, Artificial Sequence
  Cyclic GFR-binding peptide
  MOD_RES (29), (29): Xaa is C or S
KMSATSILYYDENKNVVLRKHRNMTVESXA

SEQ ID NO: 87812 - protein, 38 aa, Artificial Sequence; identical to SEQ ID NO: 34637
  Cyclic GFR-binding peptide
  MOD_RES (6), (7): Xaa is C or S

SEQ ID NO: 87813 - protein, 28 aa, Artificial Sequence
  Cyclic GFR-binding peptide
SQDLSPINILYFIGKTPKIYGKIPMIVK

SEQ ID NO: 87814 - protein, 35 aa, Artificial Sequence
  Cyclic GFR-binding peptide
  MOD_RES (5), (6): Xaa is C or S
TPPTXXVPTRLSPISILYKDSANNVVLKYHYDMVV

SEQ ID NO: 87815 - protein, 23 aa, Artificial Sequence
  Cyclic GFR-binding peptide
VKTEPISMLYLDNGRVLLKFKYE

SEQ ID NO: 87816 - protein, 32 aa, Artificial Sequence
  Cyclic GFR-binding peptide
  MOD_RES (5), (6): Xaa is C or S
SAAPXXVPQALSPINILYFVGRKPKVYGKIPM

SEQ ID NO: 87817 - protein, 30 aa, Artificial Sequence
  Cyclic GFR-binding peptide
  MOD_RES (30), (30): Xaa is C or S
SQDLSPINILYFIGKTPKIYGKIPMIVKSX

SEQ ID NO: 87818 - protein, 23 aa, Artificial Sequence
  Cyclic GFR-binding peptide
TEPISMLYLDNGRVLLKFKYEMI

SEQ ID NO: 87819 - protein, 30 aa, Artificial Sequence
  Cyclic GFR-binding peptide
  MOD_RES (2), (3): Xaa is C or S
PXXVPEKMSPINILYFDENKNVVYGKIPNM

SEQ ID NO: 87820 - protein, 23 aa, Artificial Sequence
  Cyclic GFR-binding peptide
ARLSATSILYYDAANNVVLRKHR

SEQ ID NO: 87821 - protein, 29 aa, Artificial Sequence
  Cyclic GFR-binding peptide
EKMEPISILYLDENKNVVKFKYENMTVES

SEQ ID NO: 87822 - protein, 24 aa, Artificial Sequence
  Cyclic GFR-binding peptide
KMSATSILYYDENKNVVLRKHRNM

SEQ ID NO: 87823 - protein, 28 aa, Artificial Sequence
  Cyclic GFR-binding peptide
  MOD_RES (2), (3): Xaa is C or S
TXXAPVKTEPISMLYLDNGRVLLKFKYE

SEQ ID NO: 87824 - protein, 25 aa, Artificial Sequence
  Cyclic GFR-binding peptide
EKMSPISILYKDENKNVVLKYHYNM

SEQ ID NO: 87825 - protein, 29 aa, Artificial Sequence
  Cyclic GFR-binding peptide
  MOD_RES (27), (29): Xaa is C or S
TSPISMLYKDNGRVLLLKYHYMIVEEXGX

SEQ ID NO: 87826 - protein, 25 aa, Artificial Sequence
  Cyclic GFR-binding peptide
TRLSATSILYYDSANNVVLRKHRDM

SEQ ID NO: 87827 - protein, 31 aa, Artificial Sequence
  Cyclic GFR-binding peptide
  MOD_RES (3), (4): Xaa is C or S
PTXXVPTRLSPISILYKDSANNVVLKYHYDM

SEQ ID NO: 87828 - protein, 34 aa, Artificial Sequence
  Cyclic GFR-binding peptide
  MOD_RES (6), (7): Xaa is C or S
GIPEPXXVPEKMNAISILYFDENKNVVLKKYRNM

SEQ ID NO: 87829 - protein, 36 aa, Artificial Sequence; identical to SEQ ID NO: 34648
  Cyclic GFR-binding peptide
  MOD_RES (5), (6): Xaa is C or S

SEQ ID NO: 87830 - protein, 28 aa, Artificial Sequence
  Cyclic GFR-binding peptide
  MOD_RES (2), (3): Xaa is C or S
PXXVPQALSPINILYFVGRKPKVYGKIP

SEQ ID NO: 87831 - protein, 37 aa, Artificial Sequence; identical to SEQ ID NO: 34649
  Cyclic GFR-binding peptide
  MOD_RES (6), (7): Xaa is C or S

SEQ ID NO: 87832 - protein, 26 aa, Artificial Sequence
  Cyclic GFR-binding peptide
APVKTSPISMLYKDNGRVLLLKYHYM

SEQ ID NO: 87833 - protein, 24 aa, Artificial Sequence
  Cyclic GFR-binding peptide
QALSPINILYFVGRKPKVYGKIPM

SEQ ID NO: 87834 - protein, 41 aa, Artificial Sequence; identical to SEQ ID NO: 34652
  Cyclic GFR-binding peptide
  MOD_RES (6), (7), (38), (40): Xaa is C or S

SEQ ID NO: 87835 - protein, 23 aa, Artificial Sequence
  Cyclic GFR-binding peptide
SPISMLYKNDKQQIILKYHYGMV

SEQ ID NO: 87836 - protein, 40 aa, Artificial Sequence; identical to SEQ ID NO: 34653
  Cyclic GFR-binding peptide
  MOD_RES (4), (5), (37), (39): Xaa is C or S

SEQ ID NO: 87837 - protein, 30 aa, Artificial Sequence
  Cyclic GFR-binding peptide
  MOD_RES (29), (29): Xaa is C or S
KLSATSILYYDKGVVTYLRKHRGMAVSEXG

SEQ ID NO: 87838 - protein, 35 aa, Artificial Sequence; identical to SEQ ID NO: 34656
  Cyclic GFR-binding peptide
  MOD_RES (4), (5): Xaa is C or S

SEQ ID NO: 87839 - protein, 31 aa, Artificial Sequence
  Cyclic GFR-binding peptide
  MOD_RES (30), (30): Xaa is C or S
EKMSPINILYFDENKNVVYGKIPNMTVESXA

SEQ ID NO: 87840 - protein, 29 aa, Artificial Sequence
  Cyclic GFR-binding peptide
PEKMSPISILYKDENKNVVLKYHYNMTVE

SEQ ID NO: 87841 - protein, 33 aa, Artificial Sequence
  Cyclic GFR-binding peptide
  MOD_RES (31), (33): Xaa is C or S
PTKLSATSILYYDKGVVTYLRKHRGMAVSEXGX

SEQ ID NO: 87842 - protein, 28 aa, Artificial Sequence
  Cyclic GFR-binding peptide
PEKMNAISILYFDENKNVVLKKYRNMTV

SEQ ID NO: 87843 - protein, 22 aa, Artificial Sequence
  Cyclic GFR-binding peptide
KMSATSMLYYNDKQQIILRKHR

SEQ ID NO: 87844 - protein, 33 aa, Artificial Sequence
  Cyclic GFR-binding peptide
  MOD_RES (31), (33): Xaa is C or S
PTKMEPISMLYLNDKQQIIKFKYEGMVVDRXGX

SEQ ID NO: 87845 - protein, 33 aa, Artificial Sequence
  Cyclic GFR-binding peptide
  MOD_RES (5), (6): Xaa is C or S
IPEPXXVPEKMSATSILYYDENKNVVLRKHRNM

SEQ ID NO: 87846 - protein, 33 aa, Artificial Sequence
  Cyclic GFR-binding peptide
  MOD_RES (30), (32): Xaa is C or S
TKLSATSILYYDKGVVTYLRKHRGMAVSEXGXR

SEQ ID NO: 87847 - protein, 35 aa, Artificial Sequence; identical to SEQ ID NO: 34659
  Cyclic GFR-binding peptide
  MOD_RES (1), (33), (35): Xaa is C or S

SEQ ID NO: 87848 - protein, 34 aa, Artificial Sequence
  Cyclic GFR-binding peptide
  MOD_RES (31), (33): Xaa is C or S
PEKMEPISILYLDENKNVVKFKYENMTVESXAXR

SEQ ID NO: 87849 - protein, 33 aa, Artificial Sequence
  Cyclic GFR-binding peptide
  MOD_RES (5), (6): Xaa is C or S
SAGPXXTPTKMSPISMLYKNDKQQIILKYHYGM

SEQ ID NO: 87850 - protein, 23 aa, Artificial Sequence
  Cyclic GFR-binding peptide
RLEPISILYLDSANNVVKFKYED

SEQ ID NO: 87851 - protein, 35 aa, Artificial Sequence; identical to SEQ ID NO: 34661
  Cyclic GFR-binding peptide
  MOD_RES (1), (2), (34): Xaa is C or S

SEQ ID NO: 87852 - protein, 27 aa, Artificial Sequence
  Cyclic GFR-binding peptide
TPTKMEPISMLYLNDKQQIIKFKYEGM

SEQ ID NO: 87853 - protein, 22 aa, Artificial Sequence
  Cyclic GFR-binding peptide
RLEPISILYLDSANNVVKFKYE

SEQ ID NO: 87854 - protein, 38 aa, Artificial Sequence; identical to SEQ ID NO: 34662
  Cyclic GFR-binding peptide
  MOD_RES (3), (4), (36), (38): Xaa is C or S

SEQ ID NO: 87855 - protein, 25 aa, Artificial Sequence
  Cyclic GFR-binding peptide
KMSATSMLYYNDKQQIILRKHRGMV

SEQ ID NO: 87856 - protein, 40 aa, Artificial Sequence; identical to SEQ ID NO: 34663
  Cyclic GFR-binding peptide
  MOD_RES (5), (6), (38), (40): Xaa is C or S

SEQ ID NO: 87857 - protein, 39 aa, Artificial Sequence; identical to SEQ ID NO: 34665
  Cyclic GFR-binding peptide
  MOD_RES (6), (7), (39): Xaa is C or S

SEQ ID NO: 87858 - protein, 29 aa, Artificial Sequence
  Cyclic GFR-binding peptide
  MOD_RES (28), (28): Xaa is C or S
MEPISILYLDENKNVVKFKYENMTVESXA

SEQ ID NO: 87859 - protein, 30 aa, Artificial Sequence
  Cyclic GFR-binding peptide
  MOD_RES (30), (30): Xaa is C or S
TRLSPISILYKDSANNVVLKYHYDMVVESX

SEQ ID NO: 87860 - protein, 35 aa, Artificial Sequence; identical to SEQ ID NO: 34667
  Cyclic GFR-binding peptide
  MOD_RES (3), (4), (35): Xaa is C or S

SEQ ID NO: 87861 - protein, 38 aa, Artificial Sequence; identical to SEQ ID NO: 34668
  Cyclic GFR-binding peptide
  MOD_RES (3), (4), (35), (37): Xaa is C or S

SEQ ID NO: 87862 - protein, 33 aa, Artificial Sequence; identical to SEQ ID NO: 34669
  Cyclic GFR-binding peptide
  MOD_RES (2), (3): Xaa is C or S

SEQ ID NO: 87863 - protein, 33 aa, Artificial Sequence
  Cyclic GFR-binding peptide
  MOD_RES (5), (6): Xaa is C or S
TPPTXXVPTRLEPISILYLDSANNVVKFKYEDM

SEQ ID NO: 87864 - protein, 30 aa, Artificial Sequence
  Cyclic GFR-binding peptide
  MOD_RES (27), (29): Xaa is C or S
EPISILYLDENKNVVKFKYENMTVESXAXR

SEQ ID NO: 87865 - protein, 28 aa, Artificial Sequence
  Cyclic GFR-binding peptide
  MOD_RES (27), (27): Xaa is C or S
TSATSMLYYDNGRVLLLRKHRMIVEEXG

SEQ ID NO: 87866 - protein, 26 aa, Artificial Sequence
  Cyclic GFR-binding peptide
  MOD_RES (1), (1): Xaa is C or S
XAPVKTEPISMLYLDNGRVLLKFKYE

SEQ ID NO: 87867 - protein, 37 aa, Artificial Sequence; identical to SEQ ID NO: 34673
  Cyclic GFR-binding peptide
  MOD_RES (2), (3), (35), (37): Xaa is C or S

SEQ ID NO: 87868 - protein, 24 aa, Artificial Sequence
  Cyclic GFR-binding peptide
SATSILYYDSANNVVLRKHRDMVV

SEQ ID NO: 87869 - protein, 27 aa, Artificial Sequence
  Cyclic GFR-binding peptide
  MOD_RES (27), (27): Xaa is C or S
TEPISMLYLDNGRVLLKFKYEMIVEEX

SEQ ID NO: 87870 - protein, 20 aa, Artificial Sequence
  Cyclic GFR-binding peptide
EPISMLYLDNGRVLLKFKYE

SEQ ID NO: 87871 - protein, 27 aa, Artificial Sequence
  Cyclic GFR-binding peptide
QALSPINILYFVGRKPKVYGKIPMIVR

SEQ ID NO: 87872 - protein, 35 aa, Artificial Sequence; identical to SEQ ID NO: 34675
  Cyclic GFR-binding peptide
  MOD_RES (2), (3), (34): Xaa is C or S

SEQ ID NO: 87873 - protein, 39 aa, Artificial Sequence; identical to SEQ ID NO: 34676
  Cyclic GFR-binding peptide
  MOD_RES (5), (6), (38): Xaa is C or S

SEQ ID NO: 87874 - protein, 39 aa, Artificial Sequence; identical to SEQ ID NO: 34677
  Cyclic GFR-binding peptide
  MOD_RES (6), (7), (38): Xaa is C or S

SEQ ID NO: 87875 - protein, 29 aa, Artificial Sequence
  Cyclic GFR-binding peptide
EKMNAISILYFDENKNVVLKKYRNMTVES

SEQ ID NO: 87876 - protein, 22 aa, Artificial Sequence
  Cyclic GFR-binding peptide
KMSPISMLYKNDKQQIILKYHY

SEQ ID NO: 87877 - protein, 29 aa, Artificial Sequence
  Cyclic GFR-binding peptide
PTKMSPISMLYKNDKQQIILKYHYGMVVD

SEQ ID NO: 87878 - protein, 31 aa, Artificial Sequence
  Cyclic GFR-binding peptide
  MOD_RES (1), (2): Xaa is C or S
XXVPEKMSPISILYKDENKNVVLKYHYNMTV

SEQ ID NO: 87879 - protein, 40 aa, Artificial Sequence; identical to SEQ ID NO: 34680
  Cyclic GFR-binding peptide
  MOD_RES (5), (6), (38), (40): Xaa is C or S

SEQ ID NO: 87880 - protein, 38 aa, Artificial Sequence; identical to SEQ ID NO: 34682
  Cyclic GFR-binding peptide
  MOD_RES (5), (6), (38): Xaa is C or S

SEQ ID NO: 87881 - protein, 28 aa, Artificial Sequence
  Cyclic GFR-binding peptide
EKMSPISILYKDENKNVVLKYHYNMTVE

SEQ ID NO: 87882 - protein, 30 aa, Artificial Sequence
  Cyclic GFR-binding peptide
  MOD_RES (4), (5): Xaa is C or S
SKAXXVPTKLSATSILYYDKGVVTYLRKHR

SEQ ID NO: 87883 - protein, 31 aa, Artificial Sequence
  Cyclic GFR-binding peptide
  MOD_RES (29), (31): Xaa is C or S
RLSATSILYYDAANNVVLRKHRDMVVEAXGX

SEQ ID NO: 87884 - protein, 28 aa, Artificial Sequence
  Cyclic GFR-binding peptide
KMSATSMLYYNDKQQIILRKHRGMVVDR

SEQ ID NO: 87885 - protein, 32 aa, Artificial Sequence
  Cyclic GFR-binding peptide
  MOD_RES (6), (7): Xaa is C or S
GSAGPXXTPTKMEPISMLYLNDKQQIIKFKYE

SEQ ID NO: 87886 - protein, 26 aa, Artificial Sequence
  Cyclic GFR-binding peptide
KMSPINILYFDENKNVVYGKIPNMTV

SEQ ID NO: 87887 - protein, 29 aa, Artificial Sequence
  Cyclic GFR-binding peptide
  MOD_RES (29), (29): Xaa is C or S
QDLSPINILYFVGRTPKVYGKIPMVVKSX

SEQ ID NO: 87888 - protein, 36 aa, Artificial Sequence; identical to SEQ ID NO: 34685
  Cyclic GFR-binding peptide
  MOD_RES (3), (4), (35): Xaa is C or S

SEQ ID NO: 87889 - protein, 28 aa, Artificial Sequence
  Cyclic GFR-binding peptide
QDLSPINILYFVGRTPKVYGKIPMVVKS

SEQ ID NO: 87890 - protein, 37 aa, Artificial Sequence; identical to SEQ ID NO: 34686
  Cyclic GFR-binding peptide
  MOD_RES (6), (7): Xaa is C or S

SEQ ID NO: 87891 - protein, 32 aa, Artificial Sequence
  Cyclic GFR-binding peptide
  MOD_RES (30), (32): Xaa is C or S
PQDLSPINILYFVGRTPKVYGKIPMVVKSXKX

SEQ ID NO: 87892 - protein, 39 aa, Artificial Sequence; identical to SEQ ID NO: 34688
  Cyclic GFR-binding peptide
  MOD_RES (4), (5), (37), (39): Xaa is C or S

SEQ ID NO: 87893 - protein, 29 aa, Artificial Sequence
  Cyclic GFR-binding peptide
  MOD_RES (2), (3): Xaa is C or S
PXXVSQDLSPINILYFIGKTPKIYGKIPM

SEQ ID NO: 87894 - protein, 26 aa, Artificial Sequence
  Cyclic GFR-binding peptide
SATSILYYDKGVVTYLRKHRGMAVSE

SEQ ID NO: 87895 - protein, 30 aa, Artificial Sequence
  Cyclic GFR-binding peptide
  MOD_RES (27), (29): Xaa is C or S
SPISMLYKNDKQQIILKYHYGMVVDRXGXS

SEQ ID NO: 87896 - protein, 35 aa, Artificial Sequence; identical to SEQ ID NO: 34689
  Cyclic GFR-binding peptide
  MOD_RES (1), (32), (34): Xaa is C or S

SEQ ID NO: 87897 - protein, 30 aa, Artificial Sequence
  Cyclic GFR-binding peptide
  MOD_RES (27), (29): Xaa is C or S
LSPINILYFIGKTPKIYGKIPMIVKSXKXS

SEQ ID NO: 87898 - protein, 29 aa, Artificial Sequence
  Cyclic GFR-binding peptide
  MOD_RES (26), (28): Xaa is C or S
SPINILYFVGRTPKVYGKIPMVVKSXKXS

SEQ ID NO: 87899 - protein, 36 aa, Artificial Sequence; identical to SEQ ID NO: 34691
  Cyclic GFR-binding peptide
  MOD_RES (1), (2), (34), (36): Xaa is C or S

SEQ ID NO: 87900 - protein, 31 aa, Artificial Sequence; identical to SEQ ID NO: 34692
  Cyclic GFR-binding peptide
  MOD_RES (1), (1): Xaa is C or S

SEQ ID NO: 87901 - protein, 24 aa, Artificial Sequence
  Cyclic GFR-binding peptide
LSPISILYKDSANNVVLKYHYDMV

SEQ ID NO: 87902 - protein, 34 aa, Artificial Sequence; identical to SEQ ID NO: 34693
  Cyclic GFR-binding peptide
  MOD_RES (2), (3): Xaa is C or S

SEQ ID NO: 87903 - protein, 28 aa, Artificial Sequence
  Cyclic GFR-binding peptide
  MOD_RES (1), (1): Xaa is C or S
XVSQDLSPINILYFIGKTPKIYGKIPMI

SEQ ID NO: 87904 - protein, 32 aa, Artificial Sequence
  Cyclic GFR-binding peptide
  MOD_RES (2), (3): Xaa is C or S
TXXAPVKTSPISMLYKDNGRVLLLKYHYMIVE

SEQ ID NO: 87905 - protein, 26 aa, Artificial Sequence
  Cyclic GFR-binding peptide
PVKTSATSMLYYDNGRVLLLRKHRMI

SEQ ID NO: 87906 - protein, 35 aa, Artificial Sequence; identical to SEQ ID NO: 34695
  Cyclic GFR-binding peptide
  MOD_RES (2), (3), (35): Xaa is C or S

SEQ ID NO: 87907 - protein, 29 aa, Artificial Sequence
  Cyclic GFR-binding peptide
  MOD_RES (1), (1): Xaa is C or S
XVPEKMSATSILYYDENKNVVLRKHRNMT

SEQ ID NO: 87908 - protein, 26 aa, Artificial Sequence
  Cyclic GFR-binding peptide
RLSATSILYYDAANNVVLRKHRDMVV

SEQ ID NO: 87909 - protein, 30 aa, Artificial Sequence
  Cyclic GFR-binding peptide
  MOD_RES (27), (29): Xaa is C or S
TEPISMLYLDNGRVLLKFKYEMIVEEXGXL

SEQ ID NO: 87910 - protein, 32 aa, Artificial Sequence
  Cyclic GFR-binding peptide
  MOD_RES (29), (31): Xaa is C or S
KMSPISMLYKNDKQQIILKYHYGMVVDRXGXS

SEQ ID NO: 87911 - protein, 39 aa, Artificial Sequence; identical to SEQ ID NO: 34699
  Cyclic GFR-binding peptide
  MOD_RES (5), (6), (37), (39): Xaa is C or S

SEQ ID NO: 87912 - protein, 30 aa, Artificial Sequence
  Cyclic GFR-binding peptide
  MOD_RES (4), (5): Xaa is C or S
PPTXXVPTRLSPISILYKDSANNVVLKYHY

SEQ ID NO: 87913 - protein, 41 aa, Artificial Sequence; identical to SEQ ID NO: 34702
  Cyclic GFR-binding peptide
  MOD_RES (5), (6), (38), (40): Xaa is C or S

SEQ ID NO: 87914 - protein, 32 aa, Artificial Sequence
  Cyclic GFR-binding peptide
  MOD_RES (2), (3): Xaa is C or S
PXXVPQDLSPINILYFVGRTPKVYGKIPMVVK

SEQ ID NO: 87915 - protein, 29 aa, Artificial Sequence
  Cyclic GFR-binding peptide
  MOD_RES (27), (29): Xaa is C or S
LSPINILYFIGKTPKIYGKIPMIVKSXKX

SEQ ID NO: 87916 - protein, 27 aa, Artificial Sequence
  Cyclic GFR-binding peptide
VKTEPISMLYLDNGRVLLKFKYEMIVE

SEQ ID NO: 87917 - protein, 39 aa, Artificial Sequence; identical to SEQ ID NO: 34705
  Cyclic GFR-binding peptide
  MOD_RES (5), (6), (38): Xaa is C or S

SEQ ID NO: 87918 - protein, 32 aa, Artificial Sequence
  Cyclic GFR-binding peptide
  MOD_RES (29), (31): Xaa is C or S
KMEPISILYLDENKNVVKFKYENMTVESXAXR

SEQ ID NO: 87919 - protein, 28 aa, Artificial Sequence
  Cyclic GFR-binding peptide
PTRLSATSILYYDSANNVVLRKHRDMVV

SEQ ID NO: 87920 - protein, 35 aa, Artificial Sequence; identical to SEQ ID NO: 34707
  Cyclic GFR-binding peptide
  MOD_RES (1), (33), (35): Xaa is C or S

SEQ ID NO: 87921 - protein, 33 aa, Artificial Sequence
  Cyclic GFR-binding peptide
  MOD_RES (6), (7): Xaa is C or S
STPPTXXVPTRLSPISILYKDSANNVVLKYHYD

SEQ ID NO: 87922 - protein, 28 aa, Artificial Sequence
  Cyclic GFR-binding peptide
  MOD_RES (28), (28): Xaa is C or S
LSATSILYYDKGVVTYLRKHRGMAVSEX

SEQ ID NO: 87923 - protein, 33 aa, Artificial Sequence; identical to SEQ ID NO: 34709
  Cyclic GFR-binding peptide
  MOD_RES (32), (32): Xaa is C or S

SEQ ID NO: 87924 - protein, 37 aa, Artificial Sequence; identical to SEQ ID NO: 34710
  Cyclic GFR-binding peptide
  MOD_RES (2), (3), (34), (36): Xaa is C or S

SEQ ID NO: 87925 - protein, 34 aa, Artificial Sequence
  Cyclic GFR-binding peptide
  MOD_RES (5), (6): Xaa is C or S
SASPXXVPQDLSPINILYFVGRTPKVYGKIPMVV

SEQ ID NO: 87926 - protein, 27 aa, Artificial Sequence
  Cyclic GFR-binding peptide
  MOD_RES (27), (27): Xaa is C or S
SATSILYYDSANNVVLRKHRDMVVESX

SEQ ID NO: 87927 - protein, 30 aa, Artificial Sequence
  Cyclic GFR-binding peptide
PTRLSATSILYYDSANNVVLRKHRDMVVES

SEQ ID NO: 87928 - protein, 26 aa, Artificial Sequence
  Cyclic GFR-binding peptide
KMNAISILYFDENKNVVLKKYRNMTV

SEQ ID NO: 87929 - protein, 31 aa, Artificial Sequence
  Cyclic GFR-binding peptide
  MOD_RES (2), (3): Xaa is C or S
PXXVPEKMNAISILYFDENKNVVLKKYRNMT

SEQ ID NO: 87930 - protein, 34 aa, Artificial Sequence; identical to SEQ ID NO: 34712
  Cyclic GFR-binding peptide
  MOD_RES (2), (3): Xaa is C or S

SEQ ID NO: 87931 - protein, 25 aa, Artificial Sequence
  Cyclic GFR-binding peptide
TKLSATSILYYDKGVVTYLRKHRGM

SEQ ID NO: 87932 - protein, 28 aa, Artificial Sequence
  Cyclic GFR-binding peptide
  MOD_RES (27), (27): Xaa is C or S
EPISMLYLNDKQQIIKFKYEGMVVDRXG

SEQ ID NO: 87933 - protein, 32 aa, Artificial Sequence
  Cyclic GFR-binding peptide
  MOD_RES (29), (31): Xaa is C or S
KMSPISILYKDENKNVVLKYHYNMTVESXAXR

SEQ ID NO: 87934 - protein, 41 aa, Artificial Sequence; identical to SEQ ID NO: 34714
  Cyclic GFR-binding peptide
  MOD_RES (5), (6), (38), (40): Xaa is C or S

SEQ ID NO: 87935 - protein, 24 aa, Artificial Sequence
  Cyclic GFR-binding peptide
TKMEPISMLYLNDKQQIIKFKYEG

SEQ ID NO: 87936 - protein, 29 aa, Artificial Sequence
  Cyclic GFR-binding peptide
  MOD_RES (27), (29): Xaa is C or S
SATSILYYDENKNVVLRKHRNMTVESXAX

SEQ ID NO: 87937 - protein, 36 aa, Artificial Sequence
  Cyclic GFR-binding peptide
  MOD_RES (6), (7): Xaa is C or S
GIPEPXXVPEKMEPISILYLDENKNVVKFKYENMTV

SEQ ID NO: 87938 - protein, 33 aa, Artificial Sequence; identical to SEQ ID NO: 34716
  Cyclic GFR-binding peptide
  MOD_RES (2), (3): Xaa is C or S

SEQ ID NO: 87939 - protein, 24 aa, Artificial Sequence
  Cyclic GFR-binding peptide
PTRLSATSILYYDSANNVVLRKHR

SEQ ID NO: 87940 - protein, 20 aa, Artificial Sequence
  Cyclic GFR-binding peptide
SPINILYFVGRTPKVYGKIP

SEQ ID NO: 87941 - protein, 29 aa, Artificial Sequence
  Cyclic GFR-binding peptide
PEKMSATSILYYDENKNVVLRKHRNMTVE

SEQ ID NO: 87942 - protein, 25 aa, Artificial Sequence
  Cyclic GFR-binding peptide
LSPINILYFVGRTPKVYGKIPMVVK

SEQ ID NO: 87943 - protein, 40 aa, Artificial Sequence; identical to SEQ ID NO: 34717
  Cyclic GFR-binding peptide
  MOD_RES (4), (5), (37), (39): Xaa is C or S

SEQ ID NO: 87944 - protein, 29 aa, Artificial Sequence
  Cyclic GFR-binding peptide
PTKMEPISMLYLNDKQQIIKFKYEGMVVD

SEQ ID NO: 87945 - protein, 32 aa, Artificial Sequence
  Cyclic GFR-binding peptide
  MOD_RES (5), (6): Xaa is C or S
SAGPXXTPTKMSATSMLYYNDKQQIILRKHRG

SEQ ID NO: 87946 - protein, 28 aa, Artificial Sequence
  Cyclic GFR-binding peptide
PEKMSPINILYFDENKNVVYGKIPNMTV

SEQ ID NO: 87947 - protein, 30 aa, Artificial Sequence
  Cyclic GFR-binding peptide
  MOD_RES (30), (30): Xaa is C or S
EKMSPINILYFDENKNVVYGKIPNMTVESX

SEQ ID NO: 87948 - protein, 38 aa, Artificial Sequence; identical to SEQ ID NO: 34721
  Cyclic GFR-binding peptide
  MOD_RES (5), (6), (38): Xaa is C or S

SEQ ID NO: 87949 - protein, 35 aa, Artificial Sequence; identical to SEQ ID NO: 34720
  Cyclic GFR-binding peptide
  MOD_RES (3), (4), (35): Xaa is C or S

SEQ ID NO: 87950 - protein, 26 aa, Artificial Sequence
  Cyclic GFR-binding peptide
VPEKMSPISILYKDENKNVVLKYHYN

SEQ ID NO: 87951 - protein, 35 aa, Artificial Sequence; identical to SEQ ID NO: 34723
  Cyclic GFR-binding peptide
  MOD_RES (3), (4): Xaa is C or S

SEQ ID NO: 87952 - protein, 31 aa, Artificial Sequence
  Cyclic GFR-binding peptide
  MOD_RES (4), (5): Xaa is C or S
PEPXXVPEKMSATSILYYDENKNVVLRKHRN

SEQ ID NO: 87953 - protein, 25 aa, Artificial Sequence
  Cyclic GFR-binding peptide
KTSPISMLYKDNGRVLLLKYHYMIV

SEQ ID NO: 87954 - protein, 27 aa, Artificial Sequence
  Cyclic GFR-binding peptide
  MOD_RES (1), (1): Xaa is C or S
XAPVKTSPISMLYKDNGRVLLLKYHYM

SEQ ID NO: 87955 - protein, 29 aa, Artificial Sequence
  Cyclic GFR-binding peptide
  MOD_RES (2), (3): Xaa is C or S
PXXVPEKMEPISILYLDENKNVVKFKYEN

SEQ ID NO: 87956 - protein, 41 aa, Artificial Sequence; identical to SEQ ID NO: 34725
  Cyclic GFR-binding peptide
  MOD_RES (6), (7), (39), (41): Xaa is C or S

SEQ ID NO: 87957 - protein, 25 aa, Artificial Sequence
  Cyclic GFR-binding peptide
PEKMNAISILYFDENKNVVLKKYRN

SEQ ID NO: 87958 - protein, 29 aa, Artificial Sequence
  Cyclic GFR-binding peptide
  MOD_RES (1), (2): Xaa is C or S
XXVSQDLSPINILYFIGKTPKIYGKIPMI

SEQ ID NO: 87959 - protein, 33 aa, Artificial Sequence; identical to SEQ ID NO: 34727
  Cyclic GFR-binding peptide
  MOD_RES (1), (33): Xaa is C or S

SEQ ID NO: 87960 - protein, 37 aa, Artificial Sequence; identical to SEQ ID NO: 34728
  Cyclic GFR-binding peptide
  MOD_RES (3), (4), (36): Xaa is C or S

SEQ ID NO: 87961 - protein, 27 aa, Artificial Sequence
  Cyclic GFR-binding peptide
PVKTSPISMLYKDNGRVLLLKYHYMIV

SEQ ID NO: 87962 - protein, 38 aa, Artificial Sequence; identical to SEQ ID NO: 34729
  Cyclic GFR-binding peptide
  MOD_RES (6), (7), (38): Xaa is C or S

SEQ ID NO: 87963 - protein, 41 aa, Artificial Sequence; identical to SEQ ID NO: 34730
  Cyclic GFR-binding peptide
  MOD_RES (6), (7), (39), (41): Xaa is C or S

SEQ ID NO: 87964 - protein, 39 aa, Artificial Sequence; identical to SEQ ID NO: 34731
  Cyclic GFR-binding peptide
  MOD_RES (3), (4), (36), (38): Xaa is C or S

SEQ ID NO: 87965 - protein, 30 aa, Artificial Sequence
  Cyclic GFR-binding peptide
  MOD_RES (30), (30): Xaa is C or S
EKMEPISILYLDENKNVVKFKYENMTVESX

SEQ ID NO: 87966 - protein, 25 aa, Artificial Sequence
  Cyclic GFR-binding peptide
TKMSPISMLYKNDKQQIILKYHYGM

SEQ ID NO: 87967 - protein, 41 aa, Artificial Sequence; identical to SEQ ID NO: 34732
  Cyclic GFR-binding peptide
  MOD_RES (6), (7), (39), (41): Xaa is C or S

SEQ ID NO: 87968 - protein, 29 aa, Artificial Sequence
  Cyclic GFR-binding peptide
  MOD_RES (1), (1): Xaa is C or S
XTPTKMSPISMLYKNDKQQIILKYHYGMV

SEQ ID NO: 87969 - protein, 34 aa, Artificial Sequence; identical to SEQ ID NO: 34734
  Cyclic GFR-binding peptide
  MOD_RES (1), (2), (34): Xaa is C or S

SEQ ID NO: 87970 - protein, 31 aa, Artificial Sequence; identical to SEQ ID NO: 34735
  Cyclic GFR-binding peptide
  MOD_RES (1), (1): Xaa is C or S

SEQ ID NO: 87971 - protein, 31 aa, Artificial Sequence
  Cyclic GFR-binding peptide
  MOD_RES (2), (3): Xaa is C or S
PXXTPTKMEPISMLYLNDKQQIIKFKYEGMV

SEQ ID NO: 87972 - protein, 29 aa, Artificial Sequence
  Cyclic GFR-binding peptide
  MOD_RES (27), (29): Xaa is C or S
SPINILYFDENKNVVYGKIPNMTVESXAX

SEQ ID NO: 87973 - protein, 29 aa, Artificial Sequence
  Cyclic GFR-binding peptide
  MOD_RES (28), (28): Xaa is C or S
MNAISILYFDENKNVVLKKYRNMTVESXA

SEQ ID NO: 87974 - protein, 29 aa, Artificial Sequence
  Cyclic GFR-binding peptide
  MOD_RES (1), (2): Xaa is C or S
XXVPQDLSPINILYFVGRTPKVYGKIPMV

SEQ ID NO: 87975 - protein, 32 aa, Artificial Sequence; identical to SEQ ID NO: 34738
  Cyclic GFR-binding peptide
  MOD_RES (32), (32): Xaa is C or S

SEQ ID NO: 87976 - protein, 36 aa, Artificial Sequence; identical to SEQ ID NO: 34740
  Cyclic GFR-binding peptide
  MOD_RES (5), (6): Xaa is C or S

SEQ ID NO: 87977 - protein, 34 aa, Artificial Sequence; identical to SEQ ID NO: 34739
  Cyclic GFR-binding peptide
  MOD_RES (3), (4): Xaa is C or S

SEQ ID NO: 87978 - protein, 35 aa, Artificial Sequence; identical to SEQ ID NO: 34741
  Cyclic GFR-binding peptide
  MOD_RES (1), (33), (35): Xaa is C or S

SEQ ID NO: 87979 - protein, 25 aa, Artificial Sequence
  Cyclic GFR-binding peptide
QDLSPINILYFIGKTPKIYGKIPMI

SEQ ID NO: 87980 - protein, 30 aa, Artificial Sequence
  Cyclic GFR-binding peptide
  MOD_RES (3), (4): Xaa is C or S
GPXXTPTKMEPISMLYLNDKQQIIKFKYEG

SEQ ID NO: 87981 - protein, 32 aa, Artificial Sequence
  Cyclic GFR-binding peptide
  MOD_RES (29), (31): Xaa is C or S
RLSPISILYKDSANNVVLKYHYDMVVESXGXR

SEQ ID NO: 87982 - protein, 30 aa, Artificial Sequence
  Cyclic GFR-binding peptide
  MOD_RES (1), (2): Xaa is C or S
XXAPVKTEPISMLYLDNGRVLLKFKYEMIV

SEQ ID NO: 87983 - protein, 42 aa, Artificial Sequence; identical to SEQ ID NO: 34745
  Cyclic GFR-binding peptide
  MOD_RES (6), (7), (39), (41): Xaa is C or S

SEQ ID NO: 87984 - protein, 28 aa, Artificial Sequence
  Cyclic GFR-binding peptide
  MOD_RES (1), (2): Xaa is C or S
XXVPQALSPINILYFVGRKPKVYGKIPM

SEQ ID NO: 87985 - protein, 36 aa, Artificial Sequence; identical to SEQ ID NO: 34746
  Cyclic GFR-binding peptide
  MOD_RES (1), (2), (33), (35): Xaa is C or S

SEQ ID NO: 87986 - protein, 36 aa, Artificial Sequence; identical to SEQ ID NO: 34747
  Cyclic GFR-binding peptide
  MOD_RES (1), (33), (35): Xaa is C or S

SEQ ID NO: 87987 - protein, 23 aa, Artificial Sequence
  Cyclic GFR-binding peptide
SPISILYKDENKNVVLKYHYNMT

SEQ ID NO: 87988 - protein, 37 aa, Artificial Sequence; identical to SEQ ID NO: 34748
  Cyclic GFR-binding peptide
  MOD_RES (6), (7): Xaa is C or S

SEQ ID NO: 87989 - protein, 30 aa, Artificial Sequence
  Cyclic GFR-binding peptide
  MOD_RES (4), (5): Xaa is C or S
PPTXXVPTRLEPISILYLDSANNVVKFKYE

SEQ ID NO: 87990 - protein, 38 aa, Artificial Sequence; identical to SEQ ID NO: 34750
  Cyclic GFR-binding peptide
  MOD_RES (5), (6), (38): Xaa is C or S

SEQ ID NO: 87991 - protein, 29 aa, Artificial Sequence
  Cyclic GFR-binding peptide
  MOD_RES (1), (1): Xaa is C or S
XVSQDLSPINILYFIGKTPKIYGKIPMIV

SEQ ID NO: 87992 - protein, 28 aa, Artificial Sequence
  Cyclic GFR-binding peptide
  MOD_RES (26), (28): Xaa is C or S
SPINILYFVGRTPKVYGKIPMVVKSXKX

SEQ ID NO: 87993 - protein, 32 aa, Artificial Sequence; identical to SEQ ID NO: 34752
  Cyclic GFR-binding peptide
  MOD_RES (32), (32): Xaa is C or S

SEQ ID NO: 87994 - protein, 30 aa, Artificial Sequence
  Cyclic GFR-binding peptide
  MOD_RES (1), (2): Xaa is C or S
XXVPARLSATSILYYDAANNVVLRKHRDMV

SEQ ID NO: 87995 - protein, 34 aa, Artificial Sequence; identical to SEQ ID NO: 34753
  Cyclic GFR-binding peptide
  MOD_RES (1), (2), (34): Xaa is C or S

SEQ ID NO: 87996 - protein, 41 aa, Artificial Sequence; identical to SEQ ID NO: 34754
  Cyclic GFR-binding peptide
  MOD_RES (5), (6), (38), (40): Xaa is C or S

SEQ ID NO: 87997 - protein, 31 aa, Artificial Sequence; identical to SEQ ID NO: 34755
  Cyclic GFR-binding peptide
  MOD_RES (1), (1): Xaa is C or S

SEQ ID NO: 87998 - protein, 33 aa, Artificial Sequence; identical to SEQ ID NO: 34756
  Cyclic GFR-binding peptide
  MOD_RES (1), (2): Xaa is C or S

SEQ ID NO: 87999 - protein, 24 aa, Artificial Sequence
  Cyclic GFR-binding peptide
LSATSILYYDSANNVVLRKHRDMV

SEQ ID NO: 88000 - protein, 37 aa, Artificial Sequence; identical to SEQ ID NO: 34759
  Cyclic GFR-binding peptide
  MOD_RES (3), (4), (36): Xaa is C or S

SEQ ID NO: 88001 - protein, 30 aa, Artificial Sequence
  Cyclic GFR-binding peptide
  MOD_RES (1), (1): Xaa is C or S
XVPEKMEPISILYLDENKNVVKFKYENMTV

SEQ ID NO: 88002 - protein, 33 aa, Artificial Sequence
  Cyclic GFR-binding peptide
  MOD_RES (4), (5): Xaa is C or S
AGPXXTPTKMSATSMLYYNDKQQIILRKHRGMV

SEQ ID NO: 88003 - protein, 35 aa, Artificial Sequence
  Cyclic GFR-binding peptide
  MOD_RES (5), (6): Xaa is C or S
TPPTXXVPTRLSATSILYYDSANNVVLRKHRDMVV

SEQ ID NO: 88004 - protein, 28 aa, Artificial Sequence
  Cyclic GFR-binding peptide
EKMEPISILYLDENKNVVKFKYENMTVE

SEQ ID NO: 88005 - protein, 33 aa, Artificial Sequence
  Cyclic GFR-binding peptide
  MOD_RES (6), (7): Xaa is C or S
AAPASXXVPARLSATSILYYDAANNVVLRKHRD

SEQ ID NO: 88006 - protein, 34 aa, Artificial Sequence; identical to SEQ ID NO: 34760
  Cyclic GFR-binding peptide
  MOD_RES (2), (3), (34): Xaa is C or S

SEQ ID NO: 88007 - protein, 32 aa, Artificial Sequence
  Cyclic GFR-binding peptide
  MOD_RES (5), (6): Xaa is C or S
IPEPXXVPEKMSPINILYFDENKNVVYGKIPN

SEQ ID NO: 88008 - protein, 41 aa, Artificial Sequence; identical to SEQ ID NO: 34761
  Cyclic GFR-binding peptide
  MOD_RES (6), (7), (39), (41): Xaa is C or S

SEQ ID NO: 88009 - protein, 22 aa, Artificial Sequence
  Cyclic GFR-binding peptide
MSATSILYYDENKNVVLRKHRN

SEQ ID NO: 88010 - protein, 27 aa, Artificial Sequence
  Cyclic GFR-binding peptide
TRLEPISILYLDSANNVVKFKYEDMVV

SEQ ID NO: 88011 - protein, 38 aa, Artificial Sequence; identical to SEQ ID NO: 34762
  Cyclic GFR-binding peptide
  MOD_RES (5), (6), (38): Xaa is C or S

SEQ ID NO: 88012 - protein, 27 aa, Artificial Sequence
  Cyclic GFR-binding peptide
KMSPISMLYKNDKQQIILKYHYGMVVD

SEQ ID NO: 88013 - protein, 23 aa, Artificial Sequence
  Cyclic GFR-binding peptide
SPINILYFVGRKPKVYGKIPMIV

SEQ ID NO: 88014 - protein, 28 aa, Artificial Sequence
  Cyclic GFR-binding peptide
  MOD_RES (1), (1): Xaa is C or S
XVPQDLSPINILYFVGRTPKVYGKIPMV

SEQ ID NO: 88015 - protein, 34 aa, Artificial Sequence
  Cyclic GFR-binding peptide
  MOD_RES (6), (7): Xaa is C or S
AAPASXXVPARLSATSILYYDAANNVVLRKHRDM

SEQ ID NO: 88016 - protein, 36 aa, Artificial Sequence; identical to SEQ ID NO: 34764
  Cyclic GFR-binding peptide
  MOD_RES (3), (4), (36): Xaa is C or S

SEQ ID NO: 88017 - protein, 30 aa, Artificial Sequence
  Cyclic GFR-binding peptide
  MOD_RES (28), (30): Xaa is C or S
MSPISILYKDENKNVVLKYHYNMTVESXAX

SEQ ID NO: 88018 - protein, 41 aa, Artificial Sequence; identical to SEQ ID NO: 34766
  Cyclic GFR-binding peptide
  MOD_RES (6), (7), (39), (41): Xaa is C or S

SEQ ID NO: 88019 - protein, 27 aa, Artificial Sequence
  Cyclic GFR-binding peptide
  MOD_RES (27), (27): Xaa is C or S
SATSILYYDENKNVVLRKHRNMTVESX

SEQ ID NO: 88020 - protein, 27 aa, Artificial Sequence
  Cyclic GFR-binding peptide
  MOD_RES (1), (2): Xaa is C or S
XXVSQDLSPINILYFIGKTPKIYGKIP

SEQ ID NO: 88021 - protein, 35 aa, Artificial Sequence; identical to SEQ ID NO: 34768
  Cyclic GFR-binding peptide
  MOD_RES (3), (4): Xaa is C or S

SEQ ID NO: 88022 - protein, 40 aa, Artificial Sequence; identical to SEQ ID NO: 34769
  Cyclic GFR-binding peptide
  MOD_RES (6), (7), (39): Xaa is C or S

SEQ ID NO: 88023 - protein, 30 aa, Artificial Sequence
  Cyclic GFR-binding peptide
  MOD_RES (3), (4): Xaa is C or S
KAXXVPTKLSATSILYYDKGVVTYLRKHRG

SEQ ID NO: 88024 - protein, 30 aa, Artificial Sequence
  Cyclic GFR-binding peptide
  MOD_RES (4), (5): Xaa is C or S
PPTXXVPTRLSATSILYYDSANNVVLRKHR

SEQ ID NO: 88025 - protein, 24 aa, Artificial Sequence
  Cyclic GFR-binding peptide
SPISILYKDSANNVVLKYHYDMVV

SEQ ID NO: 88026 - protein, 36 aa, Artificial Sequence; identical to SEQ ID NO: 34773
  Cyclic GFR-binding peptide
  MOD_RES (5), (6): Xaa is C or S

SEQ ID NO: 88027 - protein, 34 aa, Artificial Sequence; identical to SEQ ID NO: 34774
  Cyclic GFR-binding peptide
  MOD_RES (1), (33): Xaa is C or S

SEQ ID NO: 88028 - protein, 29 aa, Artificial Sequence
  Cyclic GFR-binding peptide
  MOD_RES (1), (1): Xaa is C or S
XVPEKMNAISILYFDENKNVVLKKYRNMT

SEQ ID NO: 88029 - protein, 28 aa, Artificial Sequence
  Cyclic GFR-binding peptide
TPTKMSATSMLYYNDKQQIILRKHRGMV

SEQ ID NO: 88030 - protein, 33 aa, Artificial Sequence; identical to SEQ ID NO: 34775
  Cyclic GFR-binding peptide
  MOD_RES (2), (3): Xaa is C or S

SEQ ID NO: 88031 - protein, 25 aa, Artificial Sequence
  Cyclic GFR-binding peptide
PEKMSATSILYYDENKNVVLRKHRN

SEQ ID NO: 88032 - protein, 27 aa, Artificial Sequence
  Cyclic GFR-binding peptide
DLSPINILYFVGRTPKVYGKIPMVVKS

SEQ ID NO: 88033 - protein, 24 aa, Artificial Sequence
  Cyclic GFR-binding peptide
KMEPISILYLDENKNVVKFKYENM

SEQ ID NO: 88034 - protein, 22 aa, Artificial Sequence
  Cyclic GFR-binding peptide
TSPISMLYKDNGRVLLLKYHYM

SEQ ID NO: 88035 - protein, 32 aa, Artificial Sequence
  Cyclic GFR-binding peptide
  MOD_RES (3), (4): Xaa is C or S
EPXXVPEKMNAISILYFDENKNVVLKKYRNMT

SEQ ID NO: 88036 - protein, 37 aa, Artificial Sequence; identical to SEQ ID NO: 34777
  Cyclic GFR-binding peptide
  MOD_RES (2), (3), (34), (36): Xaa is C or S

SEQ ID NO: 88037 - protein, 31 aa, Artificial Sequence
  Cyclic GFR-binding peptide
  MOD_RES (3), (4): Xaa is C or S
EPXXVPEKMEPISILYLDENKNVVKFKYENM

SEQ ID NO: 88038 - protein, 31 aa, Artificial Sequence
  Cyclic GFR-binding peptide
  MOD_RES (2), (3): Xaa is C or S
SXXVPARLSATSILYYDAANNVVLRKHRDMV

SEQ ID NO: 88039 - protein, 39 aa, Artificial Sequence; identical to SEQ ID NO: 34778
  Cyclic GFR-binding peptide
  MOD_RES (6), (7), (38): Xaa is C or S

SEQ ID NO: 88040 - protein, 36 aa, Artificial Sequence; identical to SEQ ID NO: 34779
  Cyclic GFR-binding peptide
  MOD_RES (1), (2), (34), (36): Xaa is C or S

SEQ ID NO: 88041 - protein, 32 aa, Artificial Sequence; identical to SEQ ID NO: 34781
  Cyclic GFR-binding peptide
  MOD_RES (31), (31): Xaa is C or S

SEQ ID NO: 88042 - protein, 32 aa, Artificial Sequence
  Cyclic GFR-binding peptide
  MOD_RES (3), (4): Xaa is C or S
PTXXVPTRLSATSILYYDSANNVVLRKHRDMV

SEQ ID NO: 88043 - protein, 28 aa, Artificial Sequence
  Cyclic GFR-binding peptide
  MOD_RES (2), (3): Xaa is C or S
PXXVPEKMEPISILYLDENKNVVKFKYE

SEQ ID NO: 88044 - protein, 38 aa, Artificial Sequence; identical to SEQ ID NO: 34782
  Cyclic GFR-binding peptide
  MOD_RES (2), (3), (35), (37): Xaa is C or S

SEQ ID NO: 88045 - protein, 34 aa, Artificial Sequence
  Cyclic GFR-binding peptide
  MOD_RES (31), (33): Xaa is C or S
PTRLEPISILYLDSANNVVKFKYEDMVVESXGXR

SEQ ID NO: 88046 - protein, 35 aa, Artificial Sequence
  Cyclic GFR-binding peptide
  MOD_RES (6), (7): Xaa is C or S
ASASPXXVSQDLSPINILYFIGKTPKIYGKIPMIV

SEQ ID NO: 88047 - protein, 28 aa, Artificial Sequence
  Cyclic GFR-binding peptide
  MOD_RES (2), (3): Xaa is C or S
PXXVPEKMSPISILYKDENKNVVLKYHY

SEQ ID NO: 88048 - protein, 34 aa, Artificial Sequence; identical to SEQ ID NO: 34784
  Cyclic GFR-binding peptide
  MOD_RES (3), (4): Xaa is C or S

SEQ ID NO: 88049 - protein, 29 aa, Artificial Sequence
  Cyclic GFR-binding peptide
  MOD_RES (29), (29): Xaa is C or S
VKTSPISMLYKDNGRVLLLKYHYMIVEEX

SEQ ID NO: 88050 - protein, 32 aa, Artificial Sequence
  Cyclic GFR-binding peptide
  MOD_RES (2), (3): Xaa is C or S
PXXVPQALSPINILYFVGRKPKVYGKIPMIVR

SEQ ID NO: 88051 - protein, 37 aa, Artificial Sequence; identical to SEQ ID NO: 34787
  Cyclic GFR-binding peptide
  MOD_RES (3), (4), (36): Xaa is C or S

SEQ ID NO: 88052 - protein, 24 aa, Artificial Sequence
  Cyclic GFR-binding peptide
TRLSATSILYYDSANNVVLRKHRD

SEQ ID NO: 88053 - protein, 22 aa, Artificial Sequence
  Cyclic GFR-binding peptide
LSPINILYFIGKTPKIYGKIPM

SEQ ID NO: 88054 - protein, 26 aa, Artificial Sequence
  Cyclic GFR-binding peptide
PTRLSATSILYYDSANNVVLRKHRDM

SEQ ID NO: 88055 - protein, 30 aa, Artificial Sequence
  Cyclic GFR-binding peptide
  MOD_RES (2), (3): Xaa is C or S
TXXAPVKTEPISMLYLDNGRVLLKFKYEMI

SEQ ID NO: 88056 - protein, 29 aa, Artificial Sequence
  Cyclic GFR-binding peptide
VPEKMEPISILYLDENKNVVKFKYENMTV

SEQ ID NO: 88057 - protein, 34 aa, Artificial Sequence; identical to SEQ ID NO: 34793
  Cyclic GFR-binding peptide
  MOD_RES (1), (33): Xaa is C or S

SEQ ID NO: 88058 - protein, 29 aa, Artificial Sequence
  Cyclic GFR-binding peptide
PEKMSPINILYFDENKNVVYGKIPNMTVE

SEQ ID NO: 88059 - protein, 30 aa, Artificial Sequence; identical to SEQ ID NO: 34795
  Cyclic GFR-binding peptide

SEQ ID NO: 88060 - protein, 23 aa, Artificial Sequence
  Cyclic GFR-binding peptide
KTEPISMLYLDNGRVLLKFKYEM

SEQ ID NO: 88061 - protein, 31 aa, Artificial Sequence
  Cyclic GFR-binding peptide
  MOD_RES (29), (31): Xaa is C or S
QALSPINILYFVGRKPKVYGKIPMIVRSXKX

SEQ ID NO: 88062 - protein, 22 aa, Artificial Sequence
  Cyclic GFR-binding peptide
MSATSMLYYNDKQQIILRKHRG

SEQ ID NO: 88063 - protein, 26 aa, Artificial Sequence
  Cyclic GFR-binding peptide
MSPISMLYKNDKQQIILKYHYGMVVD

SEQ ID NO: 88064 - protein, 30 aa, Artificial Sequence
  Cyclic GFR-binding peptide
  MOD_RES (2), (3): Xaa is C or S
SXXVPARLSATSILYYDAANNVVLRKHRDM

SEQ ID NO: 88065 - protein, 23 aa, Artificial Sequence
  Cyclic GFR-binding peptide
SPISILYKDSANNVVLKYHYDMV

SEQ ID NO: 88066 - protein, 42 aa, Artificial Sequence; identical to SEQ ID NO: 34799
  Cyclic GFR-binding peptide
  MOD_RES (6), (7), (39), (41): Xaa is C or S

SEQ ID NO: 88067 - protein, 32 aa, Artificial Sequence
  Cyclic GFR-binding peptide
  MOD_RES (31), (31): Xaa is C or S
PEKMEPISILYLDENKNVVKFKYENMTVESXA

SEQ ID NO: 88068 - protein, 29 aa, Artificial Sequence
  Cyclic GFR-binding peptide
SATSILYYDSANNVVLRKHRAAAAAAAAA

SEQ ID NO: 88069 - protein, 37 aa, Artificial Sequence; identical to SEQ ID NO: 34801
  Cyclic GFR-binding peptide
  MOD_RES (3), (4), (36): Xaa is C or S

SEQ ID NO: 88070 - protein, 34 aa, Artificial Sequence
  Cyclic GFR-binding peptide
  MOD_RES (6), (7): Xaa is C or S
GSAGPXXTPTKMSATSMLYYNDKQQIILRKHRGM

SEQ ID NO: 88071 - protein, 23 aa, Artificial Sequence
  Cyclic GFR-binding peptide
SATSILYYDSANNVVLRKHRDMV

SEQ ID NO: 88072 - protein, 33 aa, Artificial Sequence
  Cyclic GFR-binding peptide
  MOD_RES (31), (33): Xaa is C or S
PEKMSATSILYYDENKNVVLRKHRNMTVESXAX

SEQ ID NO: 88073 - protein, 25 aa, Artificial Sequence
  Cyclic GFR-binding peptide
TRLEPISILYLDSANNVVKFKYEDM

SEQ ID NO: 88074 - protein, 36 aa, Artificial Sequence; identical to SEQ ID NO: 34802
  Cyclic GFR-binding peptide
  MOD_RES (3), (4), (36): Xaa is C or S

SEQ ID NO: 88075 - protein, 30 aa, Artificial Sequence
  Cyclic GFR-binding peptide
  MOD_RES (30), (30): Xaa is C or S
EKMSATSILYYDENKNVVLRKHRNMTVESX

SEQ ID NO: 88076 - protein, 21 aa, Artificial Sequence
  Cyclic GFR-binding peptide
SPINILYFVGRKPKVYGKIPM

SEQ ID NO: 88077 - protein, 24 aa, Artificial Sequence
  Cyclic GFR-binding peptide
KTSPISMLYKDNGRVLLLKYHYMI

SEQ ID NO: 88078 - protein, 31 aa, Artificial Sequence
  Cyclic GFR-binding peptide
  MOD_RES (29), (31): Xaa is C or S
KMEPISILYLDENKNVVKFKYENMTVESXAX

SEQ ID NO: 88079 - protein, 26 aa, Artificial Sequence
  Cyclic GFR-binding peptide
KMSATSMLYYNDKQQIILRKHRGMVV

SEQ ID NO: 88080 - protein, 34 aa, Artificial Sequence; identical to SEQ ID NO: 34804
  Cyclic GFR-binding peptide
  MOD_RES (32), (34): Xaa is C or S

SEQ ID NO: 88081 - protein, 25 aa, Artificial Sequence
  Cyclic GFR-binding peptide
APVKTEPISMLYLDNGRVLLKFKYE

SEQ ID NO: 88082 - protein, 29 aa, Artificial Sequence
  Cyclic GFR-binding peptide
VPTKLSATSILYYDKGVVTYLRKHRGMAV

SEQ ID NO: 88083 - protein, 29 aa, Artificial Sequence
  Cyclic GFR-binding peptide
TKMSPISMLYKNDKQQIILKYHYGMVVDR

SEQ ID NO: 88084 - protein, 37 aa, Artificial Sequence; identical to SEQ ID NO: 34805
  Cyclic GFR-binding peptide
  MOD_RES (1), (2), (34), (36): Xaa is C or S

SEQ ID NO: 88085 - protein, 23 aa, Artificial Sequence
  Cyclic GFR-binding peptide
RLSATSILYYDAANNVVLRKHRD

SEQ ID NO: 88086 - protein, 31 aa, Artificial Sequence
  Cyclic GFR-binding peptide
  MOD_RES (4), (5): Xaa is C or S
PPTXXVPTRLEPISILYLDSANNVVKFKYED

SEQ ID NO: 88087 - protein, 27 aa, Artificial Sequence
  Cyclic GFR-binding peptide
PVKTEPISMLYLDNGRVLLKFKYEMIV

SEQ ID NO: 88088 - protein, 31 aa, Artificial Sequence
  Cyclic GFR-binding peptide
  MOD_RES (30), (30): Xaa is C or S
EKMSATSILYYDENKNVVLRKHRNMTVESXA

SEQ ID NO: 88089 - protein, 25 aa, Artificial Sequence
  Cyclic GFR-binding peptide
KMSPISILYKDENKNVVLKYHYNMT

SEQ ID NO: 88090 - protein, 36 aa, Artificial Sequence; identical to SEQ ID NO: 34807
  Cyclic GFR-binding peptide
  MOD_RES (5), (6): Xaa is C or S

SEQ ID NO: 88091 - protein, 27 aa, Artificial Sequence
  Cyclic GFR-binding peptide
PTKMEPISMLYLNDKQQIIKFKYEGMV

SEQ ID NO: 88092 - protein, 30 aa, Artificial Sequence
  Cyclic GFR-binding peptide
PTKMEPISMLYLNDKQQIIKFKYEGMVVDR

SEQ ID NO: 88093 - protein, 33 aa, Artificial Sequence
  Cyclic GFR-binding peptide
  MOD_RES (4), (5): Xaa is C or S
AGPXXTPTKMSPISMLYKNDKQQIILKYHYGMV

SEQ ID NO: 88094 - protein, 29 aa, Artificial Sequence
  Cyclic GFR-binding peptide
TRLEPISILYLDSANNVVKFKYEDMVVES

SEQ ID NO: 88095 - protein, 30 aa, Artificial Sequence
  Cyclic GFR-binding peptide
  MOD_RES (27), (29): Xaa is C or S
SPISILYKDENKNVVLKYHYNMTVESXAXR

SEQ ID NO: 88096 - protein, 21 aa, Artificial Sequence
  Cyclic GFR-binding peptide
EPISMLYLDNGRVLLKFKYEM

SEQ ID NO: 88097 - protein, 36 aa, Artificial Sequence
  Cyclic GFR-binding peptide
  MOD_RES (6), (7): Xaa is C or S
GSAGPXXTPTKMSPISMLYKNDKQQIILKYHYGMVV

SEQ ID NO: 88098 - protein, 34 aa, Artificial Sequence; identical to SEQ ID NO: 34815
  Cyclic GFR-binding peptide
  MOD_RES (2), (3): Xaa is C or S

SEQ ID NO: 88099 - protein, 31 aa, Artificial Sequence
  Cyclic GFR-binding peptide
  MOD_RES (28), (30): Xaa is C or S
LSATSILYYDKGVVTYLRKHRGMAVSEXGXR

SEQ ID NO: 88100 - protein, 32 aa, Artificial Sequence
  Cyclic GFR-binding peptide
  MOD_RES (30), (32): Xaa is C or S
PVKTSPISMLYKDNGRVLLLKYHYMIVEEXGX

SEQ ID NO: 88101 - protein, 31 aa, Artificial Sequence; identical to SEQ ID NO: 34819
  Cyclic GFR-binding peptide

SEQ ID NO: 88102 - protein, 29 aa, Artificial Sequence
  Cyclic GFR-binding peptide
  MOD_RES (29), (29): Xaa is C or S
KMSPISILYKDENKNVVLKYHYNMTVESX

SEQ ID NO: 88103 - protein, 33 aa, Artificial Sequence
  Cyclic GFR-binding peptide
  MOD_RES (31), (33): Xaa is C or S
PEKMSPINILYFDENKNVVYGKIPNMTVESXAX

SEQ ID NO: 88104 - protein, 28 aa, Artificial Sequence
  Cyclic GFR-binding peptide
  MOD_RES (26), (28): Xaa is C or S
SPISMLYKDNGRVLLLKYHYMIVEEXGX

SEQ ID NO: 88105 - protein, 29 aa, Artificial Sequence
  Cyclic GFR-binding peptide
PTKMSATSMLYYNDKQQIILRKHRGMVVD

SEQ ID NO: 88106 - protein, 34 aa, Artificial Sequence
  Cyclic GFR-binding peptide
  MOD_RES (6), (7): Xaa is C or S
RVPSTXXAPVKTSPISMLYKDNGRVLLLKYHYMI

SEQ ID NO: 88107 - protein, 23 aa, Artificial Sequence
  Cyclic GFR-binding peptide
DLSPINILYFVGRTPKVYGKIPM

SEQ ID NO: 88108 - protein, 22 aa, Artificial Sequence
  Cyclic GFR-binding peptide
LSATSILYYDSANNVVLRKHRD

SEQ ID NO: 88109 - protein, 39 aa, Artificial Sequence; identical to SEQ ID NO: 34824
  Cyclic GFR-binding peptide
  MOD_RES (6), (7), (38): Xaa is C or S

SEQ ID NO: 88110 - protein, 38 aa, Artificial Sequence; identical to SEQ ID NO: 34825
  Cyclic GFR-binding peptide
  MOD_RES (5), (6), (38): Xaa is C or S

SEQ ID NO: 88111 - protein, 36 aa, Artificial Sequence
  Cyclic GFR-binding peptide
  MOD_RES (6), (7): Xaa is C or S
ASASPXXVPQDLSPINILYFVGRTPKVYGKIPMVVK

SEQ ID NO: 88112 - protein, 31 aa, Artificial Sequence
  Cyclic GFR-binding peptide
  MOD_RES (28), (30): Xaa is C or S
LEPISILYLDSANNVVKFKYEDMVVESXGXR

SEQ ID NO: 88113 - protein, 30 aa, Artificial Sequence; identical to SEQ ID NO: 895
  Cyclic GFR-binding peptide

SEQ ID NO: 88114 - protein, 38 aa, Artificial Sequence; identical to SEQ ID NO: 34826
  Cyclic GFR-binding peptide
  MOD_RES (2), (3), (35), (37): Xaa is C or S

SEQ ID NO: 88115 - protein, 32 aa, Artificial Sequence
  Cyclic GFR-binding peptide
  MOD_RES (6), (7): Xaa is C or S
GSAGPXXTPTKMSPISMLYKNDKQQIILKYHY

SEQ ID NO: 88116 - protein, 31 aa, Artificial Sequence
  Cyclic GFR-binding peptide
  MOD_RES (29), (31): Xaa is C or S
KMSPISMLYKNDKQQIILKYHYGMVVDRXGX

SEQ ID NO: 88117 - protein, 20 aa, Artificial Sequence
  Cyclic GFR-binding peptide
EPISMLYLNDKQQIIKFKYE

SEQ ID NO: 88118 - protein, 38 aa, Artificial Sequence; identical to SEQ ID NO: 34831
  Cyclic GFR-binding peptide
  MOD_RES (4), (5), (37): Xaa is C or S

SEQ ID NO: 88119 - protein, 34 aa, Artificial Sequence
  Cyclic GFR-binding peptide
  MOD_RES (4), (5): Xaa is C or S
AGPXXTPTKMSATSMLYYNDKQQIILRKHRGMVV

SEQ ID NO: 88120 - protein, 29 aa, Artificial Sequence
  Cyclic GFR-binding peptide
PEKMEPISILYLDENKNVVKFKYENMTVE

SEQ ID NO: 88121 - protein, 35 aa, Artificial Sequence; identical to SEQ ID NO: 34832
  Cyclic GFR-binding peptide
  MOD_RES (1), (2), (34): Xaa is C or S

SEQ ID NO: 88122 - protein, 28 aa, Artificial Sequence
  Cyclic GFR-binding peptide
APVKTSPISMLYKDNGRVLLLKYHYMIV

SEQ ID NO: 88123 - protein, 32 aa, Artificial Sequence; identical to SEQ ID NO: 34833
  Cyclic GFR-binding peptide
  MOD_RES (1), (1): Xaa is C or S

SEQ ID NO: 88124 - protein, 27 aa, Artificial Sequence
  Cyclic GFR-binding peptide
LSPISILYKDSANNVVLKYHYDMVVES

SEQ ID NO: 88125 - protein, 30 aa, Artificial Sequence
  Cyclic GFR-binding peptide
  MOD_RES (3), (4): Xaa is C or S
EPXXVPEKMEPISILYLDENKNVVKFKYEN

SEQ ID NO: 88126 - protein, 32 aa, Artificial Sequence
  Cyclic GFR-binding peptide
  MOD_RES (29), (31): Xaa is C or S
KMEPISMLYLNDKQQIIKFKYEGMVVDRXGXS

SEQ ID NO: 88127 - protein, 34 aa, Artificial Sequence; identical to SEQ ID NO: 34836
  Cyclic GFR-binding peptide
  MOD_RES (2), (3), (34): Xaa is C or S

SEQ ID NO: 88128 - protein, 38 aa, Artificial Sequence; identical to SEQ ID NO: 34837
  Cyclic GFR-binding peptide
  MOD_RES (6), (7): Xaa is C or S

SEQ ID NO: 88129 - protein, 21 aa, Artificial Sequence
  Cyclic GFR-binding peptide
SPINILYFVGRTPKVYGKIPM

SEQ ID NO: 88130 - protein, 33 aa, Artificial Sequence; identical to SEQ ID NO: 34838
  Cyclic GFR-binding peptide
  MOD_RES (1), (33): Xaa is C or S

SEQ ID NO: 88131 - protein, 24 aa, Artificial Sequence
  Cyclic GFR-binding peptide
PTRLSPISILYKDSANNVVLKYHY

SEQ ID NO: 88132 - protein, 40 aa, Artificial Sequence; identical to SEQ ID NO: 34840
  Cyclic GFR-binding peptide
  MOD_RES (6), (7), (39): Xaa is C or S

SEQ ID NO: 88133 - protein, 31 aa, Artificial Sequence; identical to SEQ ID NO: 34842
  Cyclic GFR-binding peptide

SEQ ID NO: 88134 - protein, 36 aa, Artificial Sequence; identical to SEQ ID NO: 34841
  Cyclic GFR-binding peptide
  MOD_RES (4), (5): Xaa is C or S

SEQ ID NO: 88135 - protein, 26 aa, Artificial Sequence
  Cyclic GFR-binding peptide
SATSMLYYNDKQQIILRKHRGMVVDR

SEQ ID NO: 88136 - protein, 25 aa, Artificial Sequence
  Cyclic GFR-binding peptide
KMSATSILYYDENKNVVLRKHRNMT

SEQ ID NO: 88137 - protein, 31 aa, Artificial Sequence
  Cyclic GFR-binding peptide
  MOD_RES (28), (30): Xaa is C or S
MSPINILYFDENKNVVYGKIPNMTVESXAXR

SEQ ID NO: 88138 - protein, 39 aa, Artificial Sequence; identical to SEQ ID NO: 34843
  Cyclic GFR-binding peptide
  MOD_RES (6), (7), (39): Xaa is C or S

SEQ ID NO: 88139 - protein, 30 aa, Artificial Sequence
  Cyclic GFR-binding peptide
  MOD_RES (28), (30): Xaa is C or S
ALSPINILYFVGRKPKVYGKIPMIVRSXKX

SEQ ID NO: 88140 - protein, 36 aa, Artificial Sequence; identical to SEQ ID NO: 34844
  Cyclic GFR-binding peptide
  MOD_RES (1), (33), (35): Xaa is C or S

SEQ ID NO: 88141 - protein, 26 aa, Artificial Sequence
  Cyclic GFR-binding peptide
MEPISMLYLNDKQQIIKFKYEGMVVD

SEQ ID NO: 88142 - protein, 39 aa, Artificial Sequence; identical to SEQ ID NO: 34845
  Cyclic GFR-binding peptide
  MOD_RES (4), (5), (37), (39): Xaa is C or S

SEQ ID NO: 88143 - protein, 27 aa, Artificial Sequence
  Cyclic GFR-binding peptide
  MOD_RES (27), (27): Xaa is C or S
EPISMLYLNDKQQIIKFKYEGMVVDRX

SEQ ID NO: 88144 - protein, 31 aa, Artificial Sequence
  Cyclic GFR-binding peptide
  MOD_RES (29), (31): Xaa is C or S
RLSPISILYKDSANNVVLKYHYDMVVESXGX

SEQ ID NO: 88145 - protein, 24 aa, Artificial Sequence
  Cyclic GFR-binding peptide
EPISMLYLNDKQQIIKFKYEGMVV

SEQ ID NO: 88146 - protein, 40 aa, Artificial Sequence; identical to SEQ ID NO: 34848
  Cyclic GFR-binding peptide
  MOD_RES (5), (6), (37), (39): Xaa is C or S

SEQ ID NO: 88147 - protein, 23 aa, Artificial Sequence
  Cyclic GFR-binding peptide
KMEPISILYLDENKNVVKFKYEN

SEQ ID NO: 88148 - protein, 28 aa, Artificial Sequence
  Cyclic GFR-binding peptide
RLSPISILYKDSANNVVLKYHYDMVVES

SEQ ID NO: 88149 - protein, 37 aa, Artificial Sequence; identical to SEQ ID NO: 34850
  Cyclic GFR-binding peptide
  MOD_RES (3), (4), (35), (37): Xaa is C or S

SEQ ID NO: 88150 - protein, 36 aa, Artificial Sequence; identical to SEQ ID NO: 34851
  Cyclic GFR-binding peptide
  MOD_RES (5), (6): Xaa is C or S

SEQ ID NO: 88151 - protein, 28 aa, Artificial Sequence
  Cyclic GFR-binding peptide
  MOD_RES (26), (28): Xaa is C or S
SPINILYFVGRKPKVYGKIPMIVRSXKX

SEQ ID NO: 88152 - protein, 24 aa, Artificial Sequence
  Cyclic GFR-binding peptide
SATSILYYDAANNVVLRKHRDMVV

SEQ ID NO: 88153 - protein, 23 aa, Artificial Sequence
  Cyclic GFR-binding peptide
MSATSMLYYNDKQQIILRKHRGM

SEQ ID NO: 88154 - protein, 36 aa, Artificial Sequence; identical to SEQ ID NO: 34854
  Cyclic GFR-binding peptide
  MOD_RES (4), (5): Xaa is C or S

SEQ ID NO: 88155 - protein, 26 aa, Artificial Sequence
  Cyclic GFR-binding peptide
KMSATSILYYDENKNVVLRKHRNMTV

SEQ ID NO: 88156 - protein, 34 aa, Artificial Sequence; identical to SEQ ID NO: 34856
  Cyclic GFR-binding peptide
  MOD_RES (32), (34): Xaa is C or S

SEQ ID NO: 88157 - protein, 27 aa, Artificial Sequence
  Cyclic GFR-binding peptide
PEKMSPINILYFDENKNVVYGKIPNMT

SEQ ID NO: 88158 - protein, 27 aa, Artificial Sequence
  Cyclic GFR-binding peptide
VSQDLSPINILYFIGKTPKIYGKIPMI

SEQ ID NO: 88159 - protein, 29 aa, Artificial Sequence
  Cyclic GFR-binding peptide
  MOD_RES (1), (1): Xaa is C or S
XVPTRLSATSILYYDSANNVVLRKHRDMV

SEQ ID NO: 88160 - protein, 23 aa, Artificial Sequence
  Cyclic GFR-binding peptide
KTSATSMLYYDNGRVLLLRKHRM

SEQ ID NO: 88161 - protein, 36 aa, Artificial Sequence; identical to SEQ ID NO: 34858
  Cyclic GFR-binding peptide
  MOD_RES (4), (5), (36): Xaa is C or S

SEQ ID NO: 88162 - protein, 30 aa, Artificial Sequence
  Cyclic GFR-binding peptide
  MOD_RES (28), (30): Xaa is C or S
KTSATSMLYYDNGRVLLLRKHRMIVEEXGX

SEQ ID NO: 88163 - protein, 28 aa, Artificial Sequence
  Cyclic GFR-binding peptide
KMSPISILYKDENKNVVLKYHYNMTVES

SEQ ID NO: 88164 - protein, 36 aa, Artificial Sequence; identical to SEQ ID NO: 34860
  Cyclic GFR-binding peptide
  MOD_RES (1), (2), (34), (36): Xaa is C or S

SEQ ID NO: 88165 - protein, 22 aa, Artificial Sequence
  Cyclic GFR-binding peptide
KMEPISMLYLNDKQQIIKFKYE

SEQ ID NO: 88166 - protein, 33 aa, Artificial Sequence
  Cyclic GFR-binding peptide
  MOD_RES (3), (4): Xaa is C or S
APXXVPQALSPINILYFVGRKPKVYGKIPMIVR

SEQ ID NO: 88167 - protein, 37 aa, Artificial Sequence; identical to SEQ ID NO: 34861
  Cyclic GFR-binding peptide
  MOD_RES (6), (7): Xaa is C or S

SEQ ID NO: 88168 - protein, 34 aa, Artificial Sequence; identical to SEQ ID NO: 34862
  Cyclic GFR-binding peptide
  MOD_RES (32), (34): Xaa is C or S

SEQ ID NO: 88169 - protein, 27 aa, Artificial Sequence
  Cyclic GFR-binding peptide
ALSPINILYFVGRKPKVYGKIPMIVRS

SEQ ID NO: 88170 - protein, 30 aa, Artificial Sequence; identical to SEQ ID NO: 34864
  Cyclic GFR-binding peptide

SEQ ID NO: 88171 - protein, 32 aa, Artificial Sequence
  Cyclic GFR-binding peptide
  MOD_RES (29), (31): Xaa is C or S
VKTSATSMLYYDNGRVLLLRKHRMIVEEXGXL

SEQ ID NO: 88172 - protein, 29 aa, Artificial Sequence
  Cyclic GFR-binding peptide
SPISILYKDSANNVVLKYHYAAAAAAAAA

SEQ ID NO: 88173 - protein, 30 aa, Artificial Sequence
  Cyclic GFR-binding peptide
  MOD_RES (28), (30): Xaa is C or S
LSPISILYKDSANNVVLKYHYDMVVESXGX

SEQ ID NO: 88174 - protein, 31 aa, Artificial Sequence
  Cyclic GFR-binding peptide
  MOD_RES (31), (31): Xaa is C or S
PTRLSPISILYKDSANNVVLKYHYDMVVESX

SEQ ID NO: 88175 - protein, 35 aa, Artificial Sequence; identical to SEQ ID NO: 34866
  Cyclic GFR-binding peptide
  MOD_RES (2), (3), (34): Xaa is C or S

SEQ ID NO: 88176 - protein, 26 aa, Artificial Sequence
  Cyclic GFR-binding peptide
  MOD_RES (26), (26): Xaa is C or S
SPINILYFIGKTPKIYGKIPMIVKSX

SEQ ID NO: 88177 - protein, 31 aa, Artificial Sequence; identical to SEQ ID NO: 34868
  Cyclic GFR-binding peptide
  MOD_RES (1), (1): Xaa is C or S

SEQ ID NO: 88178 - protein, 33 aa, Artificial Sequence; identical to SEQ ID NO: 34869
  Cyclic GFR-binding peptide
  MOD_RES (32), (32): Xaa is C or S

SEQ ID NO: 88179 - protein, 34 aa, Artificial Sequence; identical to SEQ ID NO: 34870
  Cyclic GFR-binding peptide
  MOD_RES (1), (2), (34): Xaa is C or S

SEQ ID NO: 88180 - protein, 38 aa, Artificial Sequence; identical to SEQ ID NO: 34872
  Cyclic GFR-binding peptide
  MOD_RES (5), (6), (38): Xaa is C or S

SEQ ID NO: 88181 - protein, 35 aa, Artificial Sequence; identical to SEQ ID NO: 34873
  Cyclic GFR-binding peptide
  MOD_RES (32), (34): Xaa is C or S

SEQ ID NO: 88182 - protein, 28 aa, Artificial Sequence
  Cyclic GFR-binding peptide
  MOD_RES (1), (2): Xaa is C or S
XXVPTRLSATSILYYDSANNVVLRKHRD

SEQ ID NO: 88183 - protein, 31 aa, Artificial Sequence
  Cyclic GFR-binding peptide
  MOD_RES (1), (2): Xaa is C or S
XXTPTKMSPISMLYKNDKQQIILKYHYGMVV

SEQ ID NO: 88184 - protein, 29 aa, Artificial Sequence
  Cyclic GFR-binding peptide
  MOD_RES (1), (2): Xaa is C or S
XXTPTKMEPISMLYLNDKQQIIKFKYEGM

SEQ ID NO: 88185 - protein, 41 aa, Artificial Sequence; identical to SEQ ID NO: 34876
  Cyclic GFR-binding peptide
  MOD_RES (5), (6), (38), (40): Xaa is C or S

SEQ ID NO: 88186 - protein, 35 aa, Artificial Sequence; identical to SEQ ID NO: 34877
  Cyclic GFR-binding peptide
  MOD_RES (32), (34): Xaa is C or S

SEQ ID NO: 88187 - protein, 25 aa, Artificial Sequence
  Cyclic GFR-binding peptide
EPISMLYLNDKQQIIKFKYEGMVVD

SEQ ID NO: 88188 - protein, 21 aa, Artificial Sequence
  Cyclic GFR-binding peptide
NAISILYFDENKNVVLKKYRN

SEQ ID NO: 88189 - protein, 39 aa, Artificial Sequence; identical to SEQ ID NO: 34879
  Cyclic GFR-binding peptide
  MOD_RES (5), (6), (37), (39): Xaa is C or S

SEQ ID NO: 88190 - protein, 31 aa, Artificial Sequence; identical to SEQ ID NO: 34880
  Cyclic GFR-binding peptide
  MOD_RES (1), (1): Xaa is C or S

SEQ ID NO: 88191 - protein, 38 aa, Artificial Sequence; identical to SEQ ID NO: 34882
  Cyclic GFR-binding peptide
  MOD_RES (3), (4), (36), (38): Xaa is C or S

SEQ ID NO: 88192 - protein, 30 aa, Artificial Sequence
  Cyclic GFR-binding peptide
  MOD_RES (2), (3): Xaa is C or S
PXXVPQDLSPINILYFVGRTPKVYGKIPMV

SEQ ID NO: 88193 - protein, 26 aa, Artificial Sequence
  Cyclic GFR-binding peptide
ALSPINILYFVGRKPKVYGKIPMIVR

SEQ ID NO: 88194 - protein, 31 aa, Artificial Sequence
  Cyclic GFR-binding peptide
  MOD_RES (4), (5): Xaa is C or S
PSTXXAPVKTEPISMLYLDNGRVLLKFKYEM

SEQ ID NO: 88195 - protein, 28 aa, Artificial Sequence
  Cyclic GFR-binding peptide
  MOD_RES (1), (1): Xaa is C or S
XTPTKMEPISMLYLNDKQQIIKFKYEGM

SEQ ID NO: 88196 - protein, 29 aa, Artificial Sequence
  Cyclic GFR-binding peptide
  MOD_RES (26), (28): Xaa is C or S
SPINILYFVGRKPKVYGKIPMIVRSXKXS

SEQ ID NO: 88197 - protein, 35 aa, Artificial Sequence; identical to SEQ ID NO: 34884
  Cyclic GFR-binding peptide
  MOD_RES (2), (3), (35): Xaa is C or S

SEQ ID NO: 88198 - protein, 37 aa, Artificial Sequence; identical to SEQ ID NO: 34887
  Cyclic GFR-binding peptide
  MOD_RES (2), (3), (34), (36): Xaa is C or S

SEQ ID NO: 88199 - protein, 29 aa, Artificial Sequence
  Cyclic GFR-binding peptide
  MOD_RES (28), (28): Xaa is C or S
LEPISILYLDSANNVVKFKYEDMVVESXG

SEQ ID NO: 88200 - protein, 27 aa, Artificial Sequence
  Cyclic GFR-binding peptide
  MOD_RES (27), (27): Xaa is C or S
EPISILYLDENKNVVKFKYENMTVESX

SEQ ID NO: 88201 - protein, 34 aa, Artificial Sequence; identical to SEQ ID NO: 34888
  Cyclic GFR-binding peptide
  MOD_RES (31), (33): Xaa is C or S

SEQ ID NO: 88202 - protein, 30 aa, Artificial Sequence
  Cyclic GFR-binding peptide
  MOD_RES (2), (3): Xaa is C or S
PXXVSQDLSPINILYFIGKTPKIYGKIPMI

SEQ ID NO: 88203 - protein, 24 aa, Artificial Sequence
  Cyclic GFR-binding peptide
SQDLSPINILYFIGKTPKIYGKIP

SEQ ID NO: 88204 - protein, 39 aa, Artificial Sequence; identical to SEQ ID NO: 34889
  Cyclic GFR-binding peptide
  MOD_RES (4), (5), (37), (39): Xaa is C or S

SEQ ID NO: 88205 - protein, 32 aa, Artificial Sequence
  Cyclic GFR-binding peptide
  MOD_RES (3), (4): Xaa is C or S
PTXXVPTRLSPISILYKDSANNVVLKYHYDMV

SEQ ID NO: 88206 - protein, 27 aa, Artificial Sequence
  Cyclic GFR-binding peptide
TKMSATSMLYYNDKQQIILRKHRGMVV

SEQ ID NO: 88207 - protein, 38 aa, Artificial Sequence; identical to SEQ ID NO: 34890
  Cyclic GFR-binding peptide
  MOD_RES (3), (4), (36), (38): Xaa is C or S

SEQ ID NO: 88208 - protein, 31 aa, Artificial Sequence
  Cyclic GFR-binding peptide
  MOD_RES (2), (3): Xaa is C or S
PXXVPEKMSPISILYKDENKNVVLKYHYNMT

SEQ ID NO: 88209 - protein, 35 aa, Artificial Sequence
  Cyclic GFR-binding peptide
  MOD_RES (5), (6): Xaa is C or S
VPSTXXAPVKTEPISMLYLDNGRVLLKFKYEMIVE

SEQ ID NO: 88210 - protein, 26 aa, Artificial Sequence
  Cyclic GFR-binding peptide
MNAISILYFDENKNVVLKKYRNMTVE

SEQ ID NO: 88211 - protein, 37 aa, Artificial Sequence; identical to SEQ ID NO: 34892
  Cyclic GFR-binding peptide
  MOD_RES (6), (7): Xaa is C or S

SEQ ID NO: 88212 - protein, 31 aa, Artificial Sequence
  Cyclic GFR-binding peptide
  MOD_RES (3), (4): Xaa is C or S
GPXXTPTKMSATSMLYYNDKQQIILRKHRGM

SEQ ID NO: 88213 - protein, 32 aa, Artificial Sequence
  Cyclic GFR-binding peptide
  MOD_RES (30), (32): Xaa is C or S
ARLSATSILYYDAANNVVLRKHRDMVVEAXGX

SEQ ID NO: 88214 - protein, 25 aa, Artificial Sequence
  Cyclic GFR-binding peptide
KMNAISILYFDENKNVVLKKYRNMT

SEQ ID NO: 88215 - protein, 31 aa, Artificial Sequence
  Cyclic GFR-binding peptide
  MOD_RES (31), (31): Xaa is C or S
PTKMSATSMLYYNDKQQIILRKHRGMVVDRX

SEQ ID NO: 88216 - protein, 33 aa, Artificial Sequence; identical to SEQ ID NO: 34893
  Cyclic GFR-binding peptide
  MOD_RES (1), (33): Xaa is C or S

SEQ ID NO: 88217 - protein, 29 aa, Artificial Sequence
  Cyclic GFR-binding peptide
  MOD_RES (29), (29): Xaa is C or S
KMSPISMLYKNDKQQIILKYHYGMVVDRX

SEQ ID NO: 88218 - protein, 20 aa, Artificial Sequence
  Cyclic GFR-binding peptide
SPISMLYKDNGRVLLLKYHY

SEQ ID NO: 88219 - protein, 32 aa, Artificial Sequence; identical to SEQ ID NO: 34894
  Cyclic GFR-binding peptide
  MOD_RES (32), (32): Xaa is C or S

SEQ ID NO: 88220 - protein, 35 aa, Artificial Sequence; identical to SEQ ID NO: 34895
  Cyclic GFR-binding peptide
  MOD_RES (4), (5): Xaa is C or S

SEQ ID NO: 88221 - protein, 28 aa, Artificial Sequence
  Cyclic GFR-binding peptide
VPEKMEPISILYLDENKNVVKFKYENMT

SEQ ID NO: 88222 - protein, 29 aa, Artificial Sequence
  Cyclic GFR-binding peptide
  MOD_RES (29), (29): Xaa is C or S
RLSATSILYYDAANNVVLRKHRDMVVEAX

SEQ ID NO: 88223 - protein, 41 aa, Artificial Sequence; identical to SEQ ID NO: 34899
  Cyclic GFR-binding peptide
  MOD_RES (5), (6), (38), (40): Xaa is C or S

SEQ ID NO: 88224 - protein, 30 aa, Artificial Sequence
  Cyclic GFR-binding peptide
  MOD_RES (28), (30): Xaa is C or S
LEPISILYLDSANNVVKFKYEDMVVESXGX

SEQ ID NO: 88225 - protein, 31 aa, Artificial Sequence
  Cyclic GFR-binding peptide
  MOD_RES (29), (31): Xaa is C or S
QDLSPINILYFIGKTPKIYGKIPMIVKSXKX

SEQ ID NO: 88226 - protein, 32 aa, Artificial Sequence
  Cyclic GFR-binding peptide
  MOD_RES (3), (4): Xaa is C or S
SPXXVPQDLSPINILYFVGRTPKVYGKIPMVV

SEQ ID NO: 88227 - protein, 34 aa, Artificial Sequence
  Cyclic GFR-binding peptide
  MOD_RES (31), (33): Xaa is C or S
PEKMSATSILYYDENKNVVLRKHRNMTVESXAXR

SEQ ID NO: 88228 - protein, 38 aa, Artificial Sequence; identical to SEQ ID NO: 34901
  Cyclic GFR-binding peptide
  MOD_RES (6), (7): Xaa is C or S

SEQ ID NO: 88229 - protein, 27 aa, Artificial Sequence
  Cyclic GFR-binding peptide
VPQDLSPINILYFVGRTPKVYGKIPMV

SEQ ID NO: 88230 - protein, 22 aa, Artificial Sequence
  Cyclic GFR-binding peptide
MSPINILYFDENKNVVYGKIPN

SEQ ID NO: 88231 - protein, 29 aa, Artificial Sequence
  Cyclic GFR-binding peptide
  MOD_RES (1), (1): Xaa is C or S
XTPTKMEPISMLYLNDKQQIIKFKYEGMV

SEQ ID NO: 88232 - protein, 26 aa, Artificial Sequence
  Cyclic GFR-binding peptide
  MOD_RES (1), (1): Xaa is C or S
XVSQDLSPINILYFIGKTPKIYGKIP

SEQ ID NO: 88233 - protein, 24 aa, Artificial Sequence
  Cyclic GFR-binding peptide
MSPISILYKDENKNVVLKYHYNMT

SEQ ID NO: 88234 - protein, 25 aa, Artificial Sequence
  Cyclic GFR-binding peptide
SATSILYYDKGVVTYLRKHRGMAVS

SEQ ID NO: 88235 - protein, 28 aa, Artificial Sequence
  Cyclic GFR-binding peptide
  MOD_RES (2), (3): Xaa is C or S
TXXAPVKTSATSMLYYDNGRVLLLRKHR

SEQ ID NO: 88236 - protein, 32 aa, Artificial Sequence
  Cyclic GFR-binding peptide
  MOD_RES (3), (4): Xaa is C or S
KAXXVPTKLSATSILYYDKGVVTYLRKHRGMA

SEQ ID NO: 88237 - protein, 39 aa, Artificial Sequence; identical to SEQ ID NO: 34908
  Cyclic GFR-binding peptide
  MOD_RES (6), (7), (39): Xaa is C or S

SEQ ID NO: 88238 - protein, 22 aa, Artificial Sequence
  Cyclic GFR-binding peptide
SPISILYKDSANNVVLKYHYDM

SEQ ID NO: 88239 - protein, 35 aa, Artificial Sequence
  Cyclic GFR-binding peptide
  MOD_RES (6), (7): Xaa is C or S
STPPTXXVPTRLEPISILYLDSANNVVKFKYEDMV

SEQ ID NO: 88240 - protein, 39 aa, Artificial Sequence; identical to SEQ ID NO: 34910
  Cyclic GFR-binding peptide
  MOD_RES (4), (5), (36), (38): Xaa is C or S

SEQ ID NO: 88241 - protein, 24 aa, Artificial Sequence
  Cyclic GFR-binding peptide
TSPISMLYKDNGRVLLLKYHYMIV

SEQ ID NO: 88242 - protein, 40 aa, Artificial Sequence; identical to SEQ ID NO: 34911
  Cyclic GFR-binding peptide
  MOD_RES (4), (5), (37), (39): Xaa is C or S

SEQ ID NO: 88243 - protein, 26 aa, Artificial Sequence
  Cyclic GFR-binding peptide
TRLEPISILYLDSANNVVKFKYEDMV

SEQ ID NO: 88244 - protein, 31 aa, Artificial Sequence
  Cyclic GFR-binding peptide
  MOD_RES (4), (5): Xaa is C or S
AGPXXTPTKMSPISMLYKNDKQQIILKYHYG

SEQ ID NO: 88245 - protein, 32 aa, Artificial Sequence; identical to SEQ ID NO: 34912
  Cyclic GFR-binding peptide
  MOD_RES (32), (32): Xaa is C or S

SEQ ID NO: 88246 - protein, 25 aa, Artificial Sequence
  Cyclic GFR-binding peptide
TSPISMLYKDNGRVLLLKYHYMIVE

SEQ ID NO: 88247 - protein, 29 aa, Artificial Sequence
  Cyclic GFR-binding peptide
  MOD_RES (1), (2): Xaa is C or S
XXAPVKTSATSMLYYDNGRVLLLRKHRMI

SEQ ID NO: 88248 - protein, 24 aa, Artificial Sequence
  Cyclic GFR-binding peptide
MSATSMLYYNDKQQIILRKHRGMV

SEQ ID NO: 88249 - protein, 20 aa, Artificial Sequence
  Cyclic GFR-binding peptide
EPISILYLDSANNVVKFKYE

SEQ ID NO: 88250 - protein, 34 aa, Artificial Sequence; identical to SEQ ID NO: 34913
  Cyclic GFR-binding peptide
  MOD_RES (1), (32), (34): Xaa is C or S

SEQ ID NO: 88251 - protein, 25 aa, Artificial Sequence
  Cyclic GFR-binding peptide
MEPISILYLDENKNVVKFKYENMTV

SEQ ID NO: 88252 - protein, 39 aa, Artificial Sequence; identical to SEQ ID NO: 34914
  Cyclic GFR-binding peptide
  MOD_RES (6), (7), (38): Xaa is C or S

SEQ ID NO: 88253 - protein, 33 aa, Artificial Sequence
  Cyclic GFR-binding peptide
  MOD_RES (3), (4): Xaa is C or S
GPXXTPTKMEPISMLYLNDKQQIIKFKYEGMVV

SEQ ID NO: 88254 - protein, 31 aa, Artificial Sequence
  Cyclic GFR-binding peptide
  MOD_RES (1), (2): Xaa is C or S
XXVPARLSATSILYYDAANNVVLRKHRDMVV

SEQ ID NO: 88255 - protein, 34 aa, Artificial Sequence
  Cyclic GFR-binding peptide
  MOD_RES (6), (7): Xaa is C or S
GIPEPXXVPEKMEPISILYLDENKNVVKFKYENM

SEQ ID NO: 88256 - protein, 37 aa, Artificial Sequence; identical to SEQ ID NO: 34915
  Cyclic GFR-binding peptide
  MOD_RES (1), (2), (34), (36): Xaa is C or S

SEQ ID NO: 88257 - protein, 38 aa, Artificial Sequence; identical to SEQ ID NO: 34917
  Cyclic GFR-binding peptide
  MOD_RES (2), (3), (35), (37): Xaa is C or S

SEQ ID NO: 88258 - protein, 29 aa, Artificial Sequence
  Cyclic GFR-binding peptide
  MOD_RES (29), (29): Xaa is C or S
VKTSATSMLYYDNGRVLLLRKHRMIVEEX

SEQ ID NO: 88259 - protein, 33 aa, Artificial Sequence; identical to SEQ ID NO: 34919
  Cyclic GFR-binding peptide
  MOD_RES (32), (32): Xaa is C or S

SEQ ID NO: 88260 - protein, 26 aa, Artificial Sequence
  Cyclic GFR-binding peptide
ARLSATSILYYDAANNVVLRKHRDMV

SEQ ID NO: 88261 - protein, 37 aa, Artificial Sequence; identical to SEQ ID NO: 34920
  Cyclic GFR-binding peptide
  MOD_RES (5), (6), (37): Xaa is C or S

SEQ ID NO: 88262 - protein, 25 aa, Artificial Sequence
  Cyclic GFR-binding peptide
VPQDLSPINILYFVGRTPKVYGKIP

SEQ ID NO: 88263 - protein, 36 aa, Artificial Sequence
  Cyclic GFR-binding peptide
  MOD_RES (6), (7): Xaa is C or S
ASAAPXXVPQALSPINILYFVGRKPKVYGKIPMIVR

SEQ ID NO: 88264 - protein, 33 aa, Artificial Sequence
  Cyclic GFR-binding peptide
  MOD_RES (6), (7): Xaa is C or S
GIPEPXXVPEKMSPISILYKDENKNVVLKYHYN

SEQ ID NO: 88265 - protein, 26 aa, Artificial Sequence
  Cyclic GFR-binding peptide
TSPISMLYKDNGRVLLLKYHYMIVEE

SEQ ID NO: 88266 - protein, 25 aa, Artificial Sequence
  Cyclic GFR-binding peptide
APVKTSATSMLYYDNGRVLLLRKHR

SEQ ID NO: 88267 - protein, 28 aa, Artificial Sequence
  Cyclic GFR-binding peptide
  MOD_RES (27), (27): Xaa is C or S
SATSILYYDKGVVTYLRKHRGMAVSEXG

SEQ ID NO: 88268 - protein, 30 aa, Artificial Sequence
  Cyclic GFR-binding peptide
  MOD_RES (3), (4): Xaa is C or S
PTXXVPTRLSPISILYKDSANNVVLKYHYD

SEQ ID NO: 88269 - protein, 32 aa, Artificial Sequence
  Cyclic GFR-binding peptide
  MOD_RES (6), (7): Xaa is C or S
ASAAPXXVPQALSPINILYFVGRKPKVYGKIP

SEQ ID NO: 88270 - protein, 32 aa, Artificial Sequence
  Cyclic GFR-binding peptide
  MOD_RES (6), (7): Xaa is C or S
GSAGPXXTPTKMSATSMLYYNDKQQIILRKHR

SEQ ID NO: 88271 - protein, 32 aa, Artificial Sequence; identical to SEQ ID NO: 34925
  Cyclic GFR-binding peptide
  MOD_RES (1), (2): Xaa is C or S

SEQ ID NO: 88272 - protein, 31 aa, Artificial Sequence; identical to SEQ ID NO: 34926
  Cyclic GFR-binding peptide
  MOD_RES (1), (1): Xaa is C or S

SEQ ID NO: 88273 - protein, 37 aa, Artificial Sequence; identical to SEQ ID NO: 34927
  Cyclic GFR-binding peptide
  MOD_RES (3), (4), (36): Xaa is C or S

SEQ ID NO: 88274 - protein, 27 aa, Artificial Sequence
  Cyclic GFR-binding peptide
MSPISMLYKNDKQQIILKYHYGMVVDR

SEQ ID NO: 88275 - protein, 38 aa, Artificial Sequence; identical to SEQ ID NO: 34932
  Cyclic GFR-binding peptide
  MOD_RES (3), (4), (36), (38): Xaa is C or S

SEQ ID NO: 88276 - protein, 35 aa, Artificial Sequence
  Cyclic GFR-binding peptide
  MOD_RES (6), (7): Xaa is C or S
GIPEPXXVPEKMSPISILYKDENKNVVLKYHYNMT

SEQ ID NO: 88277 - protein, 28 aa, Artificial Sequence
  Cyclic GFR-binding peptide
  MOD_RES (27), (27): Xaa is C or S
SATSMLYYNDKQQIILRKHRGMVVDRXG

SEQ ID NO: 88278 - protein, 32 aa, Artificial Sequence
  Cyclic GFR-binding peptide
  MOD_RES (2), (3): Xaa is C or S
TXXAPVKTSATSMLYYDNGRVLLLRKHRMIVE

SEQ ID NO: 88279 - protein, 33 aa, Artificial Sequence
  Cyclic GFR-binding peptide
  MOD_RES (30), (32): Xaa is C or S
EKMSPINILYFDENKNVVYGKIPNMTVESXAXR

SEQ ID NO: 88280 - protein, 29 aa, Artificial Sequence
  Cyclic GFR-binding peptide
  MOD_RES (1), (2): Xaa is C or S
XXVPEKMSPINILYFDENKNVVYGKIPNM

SEQ ID NO: 88281 - protein, 32 aa, Artificial Sequence; identical to SEQ ID NO: 34937
  Cyclic GFR-binding peptide
  MOD_RES (1), (2): Xaa is C or S

SEQ ID NO: 88282 - protein, 27 aa, Artificial Sequence
  Cyclic GFR-binding peptide
KMEPISMLYLNDKQQIIKFKYEGMVVD

SEQ ID NO: 88283 - protein, 28 aa, Artificial Sequence
  Cyclic GFR-binding peptide
  MOD_RES (27), (27): Xaa is C or S
LSPINILYFVGRKPKVYGKIPMIVRSXK

SEQ ID NO: 88284 - protein, 34 aa, Artificial Sequence; identical to SEQ ID NO: 34938
  Cyclic GFR-binding peptide
  MOD_RES (3), (4): Xaa is C or S

SEQ ID NO: 88285 - protein, 32 aa, Artificial Sequence; identical to SEQ ID NO: 34939
  Cyclic GFR-binding peptide
  MOD_RES (32), (32): Xaa is C or S

SEQ ID NO: 88286 - protein, 30 aa, Artificial Sequence
  Cyclic GFR-binding peptide
  MOD_RES (3), (4): Xaa is C or S
ASXXVPARLSATSILYYDAANNVVLRKHRD

SEQ ID NO: 88287 - protein, 30 aa, Artificial Sequence; identical to SEQ ID NO: 34940
  Cyclic GFR-binding peptide

SEQ ID NO: 88288 - protein, 22 aa, Artificial Sequence
  Cyclic GFR-binding peptide
DLSPINILYFIGKTPKIYGKIP

SEQ ID NO: 88289 - protein, 35 aa, Artificial Sequence; identical to SEQ ID NO: 34942
  Cyclic GFR-binding peptide
  MOD_RES (3), (4): Xaa is C or S

SEQ ID NO: 88290 - protein, 22 aa, Artificial Sequence
  Cyclic GFR-binding peptide
RLSATSILYYDSANNVVLRKHR

SEQ ID NO: 88291 - protein, 33 aa, Artificial Sequence; identical to SEQ ID NO: 34944
  Cyclic GFR-binding peptide
  MOD_RES (32), (32): Xaa is C or S

SEQ ID NO: 88292 - protein, 34 aa, Artificial Sequence
  Cyclic GFR-binding peptide
  MOD_RES (4), (5): Xaa is C or S
ASPXXVSQDLSPINILYFIGKTPKIYGKIPMIVK

SEQ ID NO: 88293 - protein, 27 aa, Artificial Sequence
  Cyclic GFR-binding peptide
  MOD_RES (27), (27): Xaa is C or S
LSPINILYFVGRKPKVYGKIPMIVRSX

SEQ ID NO: 88294 - protein, 33 aa, Artificial Sequence
  Cyclic GFR-binding peptide
  MOD_RES (30), (32): Xaa is C or S
PQALSPINILYFVGRKPKVYGKIPMIVRSXKXS

SEQ ID NO: 88295 - protein, 23 aa, Artificial Sequence
  Cyclic GFR-binding peptide
EKMSATSILYYDENKNVVLRKHR

SEQ ID NO: 88296 - protein, 32 aa, Artificial Sequence
  Cyclic GFR-binding peptide
  MOD_RES (29), (31): Xaa is C or S
QDLSPINILYFIGKTPKIYGKIPMIVKSXKXS

SEQ ID NO: 88297 - protein, 28 aa, Artificial Sequence
  Cyclic GFR-binding peptide
  MOD_RES (2), (3): Xaa is C or S
TXXAPVKTSPISMLYKDNGRVLLLKYHY

SEQ ID NO: 88298 - protein, 41 aa, Artificial Sequence; identical to SEQ ID NO: 34947
  Cyclic GFR-binding peptide
  MOD_RES (5), (6), (38), (40): Xaa is C or S

SEQ ID NO: 88299 - protein, 35 aa, Artificial Sequence; identical to SEQ ID NO: 34948
  Cyclic GFR-binding peptide
  MOD_RES (2), (3), (34): Xaa is C or S

SEQ ID NO: 88300 - protein, 33 aa, Artificial Sequence; identical to SEQ ID NO: 34949
  Cyclic GFR-binding peptide
  MOD_RES (32), (32): Xaa is C or S

SEQ ID NO: 88301 - protein, 28 aa, Artificial Sequence
  Cyclic GFR-binding peptide
  MOD_RES (28), (28): Xaa is C or S
MSPISILYKDENKNVVLKYHYNMTVESX

SEQ ID NO: 88302 - protein, 34 aa, Artificial Sequence
  Cyclic GFR-binding peptide
  MOD_RES (6), (7): Xaa is C or S
GSAGPXXTPTKMEPISMLYLNDKQQIIKFKYEGM

SEQ ID NO: 88303 - protein, 24 aa, Artificial Sequence
  Cyclic GFR-binding peptide
ARLSATSILYYDAANNVVLRKHRD

SEQ ID NO: 88304 - protein, 40 aa, Artificial Sequence; identical to SEQ ID NO: 34953
  Cyclic GFR-binding peptide
  MOD_RES (4), (5), (37), (39): Xaa is C or S

SEQ ID NO: 88305 - protein, 37 aa, Artificial Sequence; identical to SEQ ID NO: 34955
  Cyclic GFR-binding peptide
  MOD_RES (6), (7): Xaa is C or S

SEQ ID NO: 88306 - protein, 34 aa, Artificial Sequence
  Cyclic GFR-binding peptide
  MOD_RES (31), (33): Xaa is C or S
PARLSATSILYYDAANNVVLRKHRDMVVEAXGXR

SEQ ID NO: 88307 - protein, 30 aa, Artificial Sequence
  Cyclic GFR-binding peptide
  MOD_RES (30), (30): Xaa is C or S
TKMEPISMLYLNDKQQIIKFKYEGMVVDRX

SEQ ID NO: 88308 - protein, 34 aa, Artificial Sequence
  Cyclic GFR-binding peptide
  MOD_RES (4), (5): Xaa is C or S
SKAXXVPTKLSATSILYYDKGVVTYLRKHRGMAV

SEQ ID NO: 88309 - protein, 31 aa, Artificial Sequence
  Cyclic GFR-binding peptide
  MOD_RES (4), (5): Xaa is C or S
SKAXXVPTKLSATSILYYDKGVVTYLRKHRG

SEQ ID NO: 88310 - protein, 39 aa, Artificial Sequence; identical to SEQ ID NO: 34957
  Cyclic GFR-binding peptide
  MOD_RES (4), (5), (36), (38): Xaa is C or S

SEQ ID NO: 88311 - protein, 27 aa, Artificial Sequence
  Cyclic GFR-binding peptide
  MOD_RES (1), (1): Xaa is C or S
XTPTKMEPISMLYLNDKQQIIKFKYEG

SEQ ID NO: 88312 - protein, 28 aa, Artificial Sequence
  Cyclic GFR-binding peptide
PEKMSATSILYYDENKNVVLRKHRNMTV

SEQ ID NO: 88313 - protein, 27 aa, Artificial Sequence
  Cyclic GFR-binding peptide
PEKMSATSILYYDENKNVVLRKHRNMT

SEQ ID NO: 88314 - protein, 31 aa, Artificial Sequence
  Cyclic GFR-binding peptide
  MOD_RES (1), (2): Xaa is C or S
XXAPVKTEPISMLYLDNGRVLLKFKYEMIVE

SEQ ID NO: 88315 - protein, 28 aa, Artificial Sequence
  Cyclic GFR-binding peptide
  MOD_RES (2), (3): Xaa is C or S
PXXVPEKMSATSILYYDENKNVVLRKHR

SEQ ID NO: 88316 - protein, 34 aa, Artificial Sequence; identical to SEQ ID NO: 34959
  Cyclic GFR-binding peptide
  MOD_RES (31), (33): Xaa is C or S

SEQ ID NO: 88317 - protein, 28 aa, Artificial Sequence
  Cyclic GFR-binding peptide
PTKMSPISMLYKNDKQQIILKYHYGMVV

SEQ ID NO: 88318 - protein, 35 aa, Artificial Sequence
  Cyclic GFR-binding peptide
  MOD_RES (6), (7): Xaa is C or S
ASASPXXVPQDLSPINILYFVGRTPKVYGKIPMVV

SEQ ID NO: 88319 - protein, 20 aa, Artificial Sequence
  Cyclic GFR-binding peptide
SATSILYYDAANNVVLRKHR

SEQ ID NO: 88320 - protein, 24 aa, Artificial Sequence
  Cyclic GFR-binding peptide
RLSPISILYKDSANNVVLKYHYDM

SEQ ID NO: 88321 - protein, 30 aa, Artificial Sequence
  Cyclic GFR-binding peptide
  MOD_RES (27), (29): Xaa is C or S
SATSMLYYNDKQQIILRKHRGMVVDRXGXS

SEQ ID NO: 88322 - protein, 35 aa, Artificial Sequence; identical to SEQ ID NO: 34960
  Cyclic GFR-binding peptide
  MOD_RES (1), (32), (34): Xaa is C or S

SEQ ID NO: 88323 - protein, 37 aa, Artificial Sequence; identical to SEQ ID NO: 34962
  Cyclic GFR-binding peptide
  MOD_RES (1), (2), (34), (36): Xaa is C or S

SEQ ID NO: 88324 - protein, 31 aa, Artificial Sequence
  Cyclic GFR-binding peptide
  MOD_RES (29), (31): Xaa is C or S
KMNAISILYFDENKNVVLKKYRNMTVESXAX

SEQ ID NO: 88325 - protein, 28 aa, Artificial Sequence
  Cyclic GFR-binding peptide
  MOD_RES (1), (1): Xaa is C or S
XVPEKMSPINILYFDENKNVVYGKIPNM

SEQ ID NO: 88326 - protein, 26 aa, Artificial Sequence
  Cyclic GFR-binding peptide
LSATSILYYDKGVVTYLRKHRGMAVS

SEQ ID NO: 88327 - protein, 34 aa, Artificial Sequence; identical to SEQ ID NO: 34965
  Cyclic GFR-binding peptide
  MOD_RES (3), (4): Xaa is C or S

SEQ ID NO: 88328 - protein, 24 aa, Artificial Sequence
  Cyclic GFR-binding peptide
LSPINILYFIGKTPKIYGKIPMIV

SEQ ID NO: 88329 - protein, 28 aa, Artificial Sequence
  Cyclic GFR-binding peptide
  MOD_RES (28), (28): Xaa is C or S
MNAISILYFDENKNVVLKKYRNMTVESX

SEQ ID NO: 88330 - protein, 24 aa, Artificial Sequence
  Cyclic GFR-binding peptide
KMEPISMLYLNDKQQIIKFKYEGM

SEQ ID NO: 88331 - protein, 28 aa, Artificial Sequence
  Cyclic GFR-binding peptide
KMEPISILYLDENKNVVKFKYENMTVES

SEQ ID NO: 88332 - protein, 29 aa, Artificial Sequence
  Cyclic GFR-binding peptide
TKLSATSILYYDKGVVTYLRKHRGMAVSE

SEQ ID NO: 88333 - protein, 28 aa, Artificial Sequence
  Cyclic GFR-binding peptide
  MOD_RES (1), (2): Xaa is C or S
XXVPARLSATSILYYDAANNVVLRKHRD

SEQ ID NO: 88334 - protein, 23 aa, Artificial Sequence
  Cyclic GFR-binding peptide
MSPINILYFDENKNVVYGKIPNM

SEQ ID NO: 88335 - protein, 28 aa, Artificial Sequence
  Cyclic GFR-binding peptide
  MOD_RES (2), (3): Xaa is C or S
PXXTPTKMSPISMLYKNDKQQIILKYHY

SEQ ID NO: 88336 - protein, 27 aa, Artificial Sequence
  Cyclic GFR-binding peptide
  MOD_RES (1), (1): Xaa is C or S
XVSQDLSPINILYFIGKTPKIYGKIPM

SEQ ID NO: 88337 - protein, 38 aa, Artificial Sequence; identical to SEQ ID NO: 34968
  Cyclic GFR-binding peptide
  MOD_RES (2), (3), (35), (37): Xaa is C or S

SEQ ID NO: 88338 - protein, 33 aa, Artificial Sequence; identical to SEQ ID NO: 34969
  Cyclic GFR-binding peptide
  MOD_RES (1), (33): Xaa is C or S

SEQ ID NO: 88339 - protein, 28 aa, Artificial Sequence
  Cyclic GFR-binding peptide
  MOD_RES (1), (2): Xaa is C or S
XXTPTKMSPISMLYKNDKQQIILKYHYG

SEQ ID NO: 88340 - protein, 41 aa, Artificial Sequence; identical to SEQ ID NO: 34970
  Cyclic GFR-binding peptide
  MOD_RES (5), (6), (38), (40): Xaa is C or S

SEQ ID NO: 88341 - protein, 35 aa, Artificial Sequence; identical to SEQ ID NO: 34972
  Cyclic GFR-binding peptide
  MOD_RES (4), (5): Xaa is C or S

SEQ ID NO: 88342 - protein, 26 aa, Artificial Sequence
  Cyclic GFR-binding peptide
TKMSPISMLYKNDKQQIILKYHYGMV

SEQ ID NO: 88343 - protein, 33 aa, Artificial Sequence
  Cyclic GFR-binding peptide
  MOD_RES (6), (7): Xaa is C or S
HVPKPXXAPTKLEPISVLYLDDSSNVIKFKYEN

SEQ ID NO: 88344 - protein, 38 aa, Artificial Sequence; identical to SEQ ID NO: 34974
  Cyclic GFR-binding peptide
  MOD_RES (6), (7): Xaa is C or S

SEQ ID NO: 88345 - protein, 38 aa, Artificial Sequence; identical to SEQ ID NO: 34975
  Cyclic GFR-binding peptide
  MOD_RES (5), (6), (38): Xaa is C or S

SEQ ID NO: 88346 - protein, 28 aa, Artificial Sequence
  Cyclic GFR-binding peptide
  MOD_RES (1), (2): Xaa is C or S
XXAPVKTEPISMLYLDNGRVLLKFKYEM

SEQ ID NO: 88347 - protein, 31 aa, Artificial Sequence
  Cyclic GFR-binding peptide
  MOD_RES (29), (31): Xaa is C or S
KLSATSILYYDKGVVTYLRKHRGMAVSEXGX

SEQ ID NO: 88348 - protein, 28 aa, Artificial Sequence
  Cyclic GFR-binding peptide
VPARLSATSILYYDAANNVVLRKHRDMV

SEQ ID NO: 88349 - protein, 29 aa, Artificial Sequence
  Cyclic GFR-binding peptide
PARLSATSILYYDAANNVVLRKHRDMVVE

SEQ ID NO: 88350 - protein, 29 aa, Artificial Sequence
  Cyclic GFR-binding peptide
  MOD_RES (1), (1): Xaa is C or S
XVPEKMSPINILYFDENKNVVYGKIPNMT

SEQ ID NO: 88351 - protein, 38 aa, Artificial Sequence; identical to SEQ ID NO: 34978
  Cyclic GFR-binding peptide
  MOD_RES (6), (7): Xaa is C or S

SEQ ID NO: 88352 - protein, 31 aa, Artificial Sequence; identical to SEQ ID NO: 34979
  Cyclic GFR-binding peptide
  MOD_RES (31), (31): Xaa is C or S

SEQ ID NO: 88353 - protein, 34 aa, Artificial Sequence
  Cyclic GFR-binding peptide
  MOD_RES (5), (6): Xaa is C or S
SAGPXXTPTKMSPISMLYKNDKQQIILKYHYGMV

SEQ ID NO: 88354 - protein, 24 aa, Artificial Sequence
  Cyclic GFR-binding peptide
PQDLSPINILYFVGRTPKVYGKIP

SEQ ID NO: 88355 - protein, 27 aa, Artificial Sequence
  Cyclic GFR-binding peptide
LSATSILYYDKGVVTYLRKHRGMAVSE

SEQ ID NO: 88356 - protein, 27 aa, Artificial Sequence
  Cyclic GFR-binding peptide
TKLSATSILYYDKGVVTYLRKHRGMAV

SEQ ID NO: 88357 - protein, 30 aa, Artificial Sequence
  Cyclic GFR-binding peptide
  MOD_RES (1), (1): Xaa is C or S
XTPTKMEPISMLYLNDKQQIIKFKYEGMVV

SEQ ID NO: 88358 - protein, 23 aa, Artificial Sequence
  Cyclic GFR-binding peptide
EKMNAISILYFDENKNVVLKKYR

SEQ ID NO: 88359 - protein, 33 aa, Artificial Sequence; identical to SEQ ID NO: 34986
  Cyclic GFR-binding peptide
  MOD_RES (32), (32): Xaa is C or S

SEQ ID NO: 88360 - protein, 35 aa, Artificial Sequence; identical to SEQ ID NO: 22080
  Cyclic GFR-binding peptide
  MOD_RES (32), (34): Xaa is C or S

SEQ ID NO: 88361 - protein, 30 aa, Artificial Sequence; identical to SEQ ID NO: 34987
  Cyclic GFR-binding peptide

SEQ ID NO: 88362 - protein, 39 aa, Artificial Sequence; identical to SEQ ID NO: 34989
  Cyclic GFR-binding peptide
  MOD_RES (3), (4), (36), (38): Xaa is C or S

SEQ ID NO: 88363 - protein, 26 aa, Artificial Sequence
  Cyclic GFR-binding peptide
MSATSMLYYNDKQQIILRKHRGMVVD

SEQ ID NO: 88364 - protein, 39 aa, Artificial Sequence; identical to SEQ ID NO: 34991
  Cyclic GFR-binding peptide
  MOD_RES (6), (7), (39): Xaa is C or S

SEQ ID NO: 88365 - protein, 36 aa, Artificial Sequence
  Cyclic GFR-binding peptide
  MOD_RES (6), (7): Xaa is C or S
STPPTXXVPTRLEPISILYLDSANNVVKFKYEDMVV

SEQ ID NO: 88366 - protein, 30 aa, Artificial Sequence; identical to SEQ ID NO: 34993
  Cyclic GFR-binding peptide

SEQ ID NO: 88367 - protein, 31 aa, Artificial Sequence
  Cyclic GFR-binding peptide
  MOD_RES (30), (30): Xaa is C or S
TRLSATSILYYDSANNVVLRKHRDMVVESXG

SEQ ID NO: 88368 - protein, 21 aa, Artificial Sequence
  Cyclic GFR-binding peptide
EPISILYLDENKNVVKFKYEN

SEQ ID NO: 88369 - protein, 39 aa, Artificial Sequence; identical to SEQ ID NO: 34995
  Cyclic GFR-binding peptide
  MOD_RES (6), (7), (39): Xaa is C or S

SEQ ID NO: 88370 - protein, 29 aa, Artificial Sequence
  Cyclic GFR-binding peptide
  MOD_RES (29), (29): Xaa is C or S
QALSPINILYFVGRKPKVYGKIPMIVRSX

SEQ ID NO: 88371 - protein, 42 aa, Artificial Sequence; identical to SEQ ID NO: 34996
  Cyclic GFR-binding peptide
  MOD_RES (6), (7), (39), (41): Xaa is C or S

SEQ ID NO: 88372 - protein, 35 aa, Artificial Sequence
  Cyclic GFR-binding peptide
  MOD_RES (6), (7): Xaa is C or S
RVPSTXXAPVKTEPISMLYLDNGRVLLKFKYEMIV

SEQ ID NO: 88373 - protein, 34 aa, Artificial Sequence; identical to SEQ ID NO: 34997
  Cyclic GFR-binding peptide
  MOD_RES (3), (4): Xaa is C or S

SEQ ID NO: 88374 - protein, 29 aa, Artificial Sequence
  Cyclic GFR-binding peptide
SQDLSPINILYFIGKTPKIYGKIPMIVKS

SEQ ID NO: 88375 - protein, 33 aa, Artificial Sequence
  Cyclic GFR-binding peptide
  MOD_RES (31), (33): Xaa is C or S
PTRLEPISILYLDSANNVVKFKYEDMVVESXGX

SEQ ID NO: 88376 - protein, 25 aa, Artificial Sequence
  Cyclic GFR-binding peptide
MSPISMLYKNDKQQIILKYHYGMVV

SEQ ID NO: 88377 - protein, 30 aa, Artificial Sequence
  Cyclic GFR-binding peptide
  MOD_RES (1), (2): Xaa is C or S
XXTPTKMSATSMLYYNDKQQIILRKHRGMV

SEQ ID NO: 88378 - protein, 32 aa, Artificial Sequence; identical to SEQ ID NO: 34998
  Cyclic GFR-binding peptide
  MOD_RES (1), (2): Xaa is C or S

SEQ ID NO: 88379 - protein, 38 aa, Artificial Sequence; identical to SEQ ID NO: 34999
  Cyclic GFR-binding peptide
  MOD_RES (4), (5), (37): Xaa is C or S

SEQ ID NO: 88380 - protein, 31 aa, Artificial Sequence; identical to SEQ ID NO: 35001
  Cyclic GFR-binding peptide
  MOD_RES (1), (1): Xaa is C or S

SEQ ID NO: 88381 - protein, 35 aa, Artificial Sequence; identical to SEQ ID NO: 35003
  Cyclic GFR-binding peptide
  MOD_RES (32), (34): Xaa is C or S

SEQ ID NO: 88382 - protein, 41 aa, Artificial Sequence; identical to SEQ ID NO: 35004
  Cyclic GFR-binding peptide
  MOD_RES (5), (6), (38), (40): Xaa is C or S

SEQ ID NO: 88383 - protein, 33 aa, Artificial Sequence; identical to SEQ ID NO: 35005
  Cyclic GFR-binding peptide
  MOD_RES (31), (33): Xaa is C or S

SEQ ID NO: 88384 - protein, 34 aa, Artificial Sequence; identical to SEQ ID NO: 35006
  Cyclic GFR-binding peptide
  MOD_RES (2), (3), (34): Xaa is C or S

SEQ ID NO: 88385 - protein, 29 aa, Artificial Sequence
  Cyclic GFR-binding peptide
TPTKMEPISMLYLNDKQQIIKFKYEGMVV

SEQ ID NO: 88386 - protein, 29 aa, Artificial Sequence
  Cyclic GFR-binding peptide
  MOD_RES (28), (28): Xaa is C or S
LSATSILYYDSANNVVLRKHRDMVVESXG

SEQ ID NO: 88387 - protein, 27 aa, Artificial Sequence
  Cyclic GFR-binding peptide
PTRLSATSILYYDSANNVVLRKHRDMV

SEQ ID NO: 88388 - protein, 37 aa, Artificial Sequence; identical to SEQ ID NO: 35009
  Cyclic GFR-binding peptide
  MOD_RES (5), (6): Xaa is C or S

SEQ ID NO: 88389 - protein, 28 aa, Artificial Sequence
  Cyclic GFR-binding peptide
  MOD_RES (2), (3): Xaa is C or S
PXXTPTKMEPISMLYLNDKQQIIKFKYE

SEQ ID NO: 88390 - protein, 29 aa, Artificial Sequence
  Cyclic GFR-binding peptide
SPISMLYKNDKQQIILKYHYAAAAAAAAA

SEQ ID NO: 88391 - protein, 35 aa, Artificial Sequence
  Cyclic GFR-binding peptide
  MOD_RES (5), (6): Xaa is C or S
IPEPXXVPEKMSATSILYYDENKNVVLRKHRNMTV

SEQ ID NO: 88392 - protein, 24 aa, Artificial Sequence
  Cyclic GFR-binding peptide
KMNAISILYFDENKNVVLKKYRNM

SEQ ID NO: 88393 - protein, 28 aa, Artificial Sequence
  Cyclic GFR-binding peptide
  MOD_RES (1), (1): Xaa is C or S
XAPVKTSATSMLYYDNGRVLLLRKHRMI

SEQ ID NO: 88394 - protein, 26 aa, Artificial Sequence
  Cyclic GFR-binding peptide
EPISILYLDSANNVVKFKYEDMVVES

SEQ ID NO: 88395 - protein, 25 aa, Artificial Sequence
  Cyclic GFR-binding peptide
PTKMSPISMLYKNDKQQIILKYHYG

SEQ ID NO: 88396 - protein, 31 aa, Artificial Sequence
  Cyclic GFR-binding peptide
  MOD_RES (31), (31): Xaa is C or S
PEKMSATSILYYDENKNVVLRKHRNMTVESX

SEQ ID NO: 88397 - protein, 28 aa, Artificial Sequence
  Cyclic GFR-binding peptide
  MOD_RES (28), (28): Xaa is C or S
ALSPINILYFVGRKPKVYGKIPMIVRSX

SEQ ID NO: 88398 - protein, 34 aa, Artificial Sequence
  Cyclic GFR-binding peptide
  MOD_RES (31), (33): Xaa is C or S
PTRLSATSILYYDSANNVVLRKHRDMVVESXGXR

SEQ ID NO: 88399 - protein, 33 aa, Artificial Sequence; identical to SEQ ID NO: 35012
  Cyclic GFR-binding peptide
  MOD_RES (1), (33): Xaa is C or S

SEQ ID NO: 88400 - protein, 28 aa, Artificial Sequence
  Cyclic GFR-binding peptide
  MOD_RES (1), (2): Xaa is C or S
XXVPQDLSPINILYFVGRTPKVYGKIPM

SEQ ID NO: 88401 - protein, 29 aa, Artificial Sequence
  Cyclic GFR-binding peptide
  MOD_RES (27), (29): Xaa is C or S
SATSMLYYNDKQQIILRKHRGMVVDRXGX

SEQ ID NO: 88402 - protein, 36 aa, Artificial Sequence; identical to SEQ ID NO: 35013
  Cyclic GFR-binding peptide
  MOD_RES (3), (4), (36): Xaa is C or S

SEQ ID NO: 88403 - protein, 38 aa, Artificial Sequence; identical to SEQ ID NO: 35014
  Cyclic GFR-binding peptide
  MOD_RES (6), (7): Xaa is C or S

SEQ ID NO: 88404 - protein, 28 aa, Artificial Sequence
  Cyclic GFR-binding peptide
  MOD_RES (27), (27): Xaa is C or S
SPISILYKDENKNVVLKYHYNMTVESXA

SEQ ID NO: 88405 - protein, 33 aa, Artificial Sequence
  Cyclic GFR-binding peptide
  MOD_RES (4), (5): Xaa is C or S
SKAXXVPTKLSATSILYYDKGVVTYLRKHRGMA

SEQ ID NO: 88406 - protein, 34 aa, Artificial Sequence; identical to SEQ ID NO: 35015
  Cyclic GFR-binding peptide
  MOD_RES (1), (2), (34): Xaa is C or S

SEQ ID NO: 88407 - protein, 38 aa, Artificial Sequence; identical to SEQ ID NO: 35016
  Cyclic GFR-binding peptide
  MOD_RES (3), (4), (36), (38): Xaa is C or S

SEQ ID NO: 88408 - protein, 33 aa, Artificial Sequence
  Cyclic GFR-binding peptide
  MOD_RES (6), (7): Xaa is C or S
GSAGPXXTPTKMEPISMLYLNDKQQIIKFKYEG

SEQ ID NO: 88409 - protein, 35 aa, Artificial Sequence; identical to SEQ ID NO: 35018
  Cyclic GFR-binding peptide
  MOD_RES (1), (2), (34): Xaa is C or S

SEQ ID NO: 88410 - protein, 26 aa, Artificial Sequence
  Cyclic GFR-binding peptide
VKTSATSMLYYDNGRVLLLRKHRMIV

SEQ ID NO: 88411 - protein, 27 aa, Artificial Sequence
  Cyclic GFR-binding peptide
QDLSPINILYFVGRTPKVYGKIPMVVK

SEQ ID NO: 88412 - protein, 37 aa, Artificial Sequence; identical to SEQ ID NO: 35019
  Cyclic GFR-binding peptide
  MOD_RES (3), (4), (35), (37): Xaa is C or S

SEQ ID NO: 88413 - protein, 35 aa, Artificial Sequence; identical to SEQ ID NO: 35022
  Cyclic GFR-binding peptide
  MOD_RES (4), (5): Xaa is C or S

SEQ ID NO: 88414 - protein, 28 aa, Artificial Sequence
  Cyclic GFR-binding peptide
PQALSPINILYFVGRKPKVYGKIPMIVR

SEQ ID NO: 88415 - protein, 30 aa, Artificial Sequence; identical to SEQ ID NO: 35023
  Cyclic GFR-binding peptide

SEQ ID NO: 88416 - protein, 25 aa, Artificial Sequence
  Cyclic GFR-binding peptide
SPINILYFDENKNVVYGKIPNMTVE

SEQ ID NO: 88417 - protein, 30 aa, Artificial Sequence
  Cyclic GFR-binding peptide
  MOD_RES (28), (30): Xaa is C or S
KTEPISMLYLDNGRVLLKFKYEMIVEEXGX

SEQ ID NO: 88418 - protein, 42 aa, Artificial Sequence; identical to SEQ ID NO: 35027
  Cyclic GFR-binding peptide
  MOD_RES (6), (7), (39), (41): Xaa is C or S

SEQ ID NO: 88419 - protein, 35 aa, Artificial Sequence; identical to SEQ ID NO: 35028
  Cyclic GFR-binding peptide
  MOD_RES (1), (2), (34): Xaa is C or S

SEQ ID NO: 88420 - protein, 26 aa, Artificial Sequence
  Cyclic GFR-binding peptide
TEPISMLYLDNGRVLLKFKYEMIVEE

SEQ ID NO: 88421 - protein, 26 aa, Artificial Sequence
  Cyclic GFR-binding peptide
QALSPINILYFVGRKPKVYGKIPMIV

SEQ ID NO: 88422 - protein, 37 aa, Artificial Sequence; identical to SEQ ID NO: 35031
  Cyclic GFR-binding peptide
  MOD_RES (6), (7): Xaa is C or S

SEQ ID NO: 88423 - protein, 35 aa, Artificial Sequence; identical to SEQ ID NO: 35032
  Cyclic GFR-binding peptide
  MOD_RES (4), (5): Xaa is C or S

SEQ ID NO: 88424 - protein, 22 aa, Artificial Sequence
  Cyclic GFR-binding peptide
ALSPINILYFVGRKPKVYGKIP

SEQ ID NO: 88425 - protein, 24 aa, Artificial Sequence
  Cyclic GFR-binding peptide
LSPINILYFVGRKPKVYGKIPMIV

SEQ ID NO: 88426 - protein, 39 aa, Artificial Sequence; identical to SEQ ID NO: 35033
  Cyclic GFR-binding peptide
  MOD_RES (6), (7), (39): Xaa is C or S

SEQ ID NO: 88427 - protein, 42 aa, Artificial Sequence; identical to SEQ ID NO: 35035
  Cyclic GFR-binding peptide
  MOD_RES (6), (7), (39), (41): Xaa is C or S

SEQ ID NO: 88428 - protein, 34 aa, Artificial Sequence; identical to SEQ ID NO: 35036
  Cyclic GFR-binding peptide
  MOD_RES (31), (33): Xaa is C or S

SEQ ID NO: 88429 - protein, 31 aa, Artificial Sequence
  Cyclic GFR-binding peptide
  MOD_RES (2), (3): Xaa is C or S
TXXAPVKTEPISMLYLDNGRVLLKFKYEMIV

SEQ ID NO: 88430 - protein, 38 aa, Artificial Sequence; identical to SEQ ID NO: 35039
  Cyclic GFR-binding peptide
  MOD_RES (2), (3), (35), (37): Xaa is C or S

SEQ ID NO: 88431 - protein, 25 aa, Artificial Sequence
  Cyclic GFR-binding peptide
LEPISILYLDSANNVVKFKYEDMVV

SEQ ID NO: 88432 - protein, 31 aa, Artificial Sequence; identical to SEQ ID NO: 35043
  Cyclic GFR-binding peptide
  MOD_RES (1), (1): Xaa is C or S

SEQ ID NO: 88433 - protein, 23 aa, Artificial Sequence
  Cyclic GFR-binding peptide
SATSMLYYNDKQQIILRKHRGMV

SEQ ID NO: 88434 - protein, 32 aa, Artificial Sequence
  Cyclic GFR-binding peptide
  MOD_RES (5), (6): Xaa is C or S
TPPTXXVPTRLSPISILYKDSANNVVLKYHYD

SEQ ID NO: 88435 - protein, 28 aa, Artificial Sequence
  Cyclic GFR-binding peptide
  MOD_RES (28), (28): Xaa is C or S
LSPISILYKDSANNVVLKYHYDMVVESX

SEQ ID NO: 88436 - protein, 28 aa, Artificial Sequence
  Cyclic GFR-binding peptide
  MOD_RES (2), (3): Xaa is C or S
PXXTPTKMSATSMLYYNDKQQIILRKHR

SEQ ID NO: 88437 - protein, 39 aa, Artificial Sequence; identical to SEQ ID NO: 35046
  Cyclic GFR-binding peptide
  MOD_RES (6), (7), (39): Xaa is C or S

SEQ ID NO: 88438 - protein, 29 aa, Artificial Sequence
  Cyclic GFR-binding peptide
  MOD_RES (28), (28): Xaa is C or S
MSATSILYYDENKNVVLRKHRNMTVESXA

SEQ ID NO: 88439 - protein, 37 aa, Artificial Sequence; identical to SEQ ID NO: 35048
  Cyclic GFR-binding peptide
  MOD_RES (4), (5), (37): Xaa is C or S

SEQ ID NO: 88440 - protein, 34 aa, Artificial Sequence; identical to SEQ ID NO: 35050
  Cyclic GFR-binding peptide
  MOD_RES (2), (3), (34): Xaa is C or S

SEQ ID NO: 88441 - protein, 32 aa, Artificial Sequence; identical to SEQ ID NO: 35051
  Cyclic GFR-binding peptide
  MOD_RES (1), (32): Xaa is C or S

SEQ ID NO: 88442 - protein, 26 aa, Artificial Sequence
  Cyclic GFR-binding peptide
  MOD_RES (1), (1): Xaa is C or S
XVPQDLSPINILYFVGRTPKVYGKIP

SEQ ID NO: 88443 - protein, 33 aa, Artificial Sequence; identical to SEQ ID NO: 35053
  Cyclic GFR-binding peptide
  MOD_RES (2), (3): Xaa is C or S

SEQ ID NO: 88444 - protein, 28 aa, Artificial Sequence
  Cyclic GFR-binding peptide
RLEPISILYLDSANNVVKFKYEDMVVES

SEQ ID NO: 88445 - protein, 21 aa, Artificial Sequence
  Cyclic GFR-binding peptide
EPISILYLDSANNVVKFKYED

SEQ ID NO: 88446 - protein, 27 aa, Artificial Sequence
  Cyclic GFR-binding peptide
  MOD_RES (1), (1): Xaa is C or S
XVPEKMSATSILYYDENKNVVLRKHRN

SEQ ID NO: 88447 - protein, 33 aa, Artificial Sequence
  Cyclic GFR-binding peptide
  MOD_RES (6), (7): Xaa is C or S
GIPEPXXVPEKMSPINILYFDENKNVVYGKIPN

SEQ ID NO: 88448 - protein, 42 aa, Artificial Sequence; identical to SEQ ID NO: 35056
  Cyclic GFR-binding peptide
  MOD_RES (6), (7), (39), (41): Xaa is C or S

SEQ ID NO: 88449 - protein, 26 aa, Artificial Sequence
  Cyclic GFR-binding peptide
PVKTEPISMLYLDNGRVLLKFKYEMI

SEQ ID NO: 88450 - protein, 31 aa, Artificial Sequence
  Cyclic GFR-binding peptide
  MOD_RES (31), (31): Xaa is C or S
PEKMEPISILYLDENKNVVKFKYENMTVESX

SEQ ID NO: 88451 - protein, 29 aa, Artificial Sequence
  Cyclic GFR-binding peptide
  MOD_RES (2), (3): Xaa is C or S
TXXVPTRLSPISILYKDSANNVVLKYHYD

SEQ ID NO: 88452 - protein, 35 aa, Artificial Sequence; identical to SEQ ID NO: 35057
  Cyclic GFR-binding peptide
  MOD_RES (1), (33), (35): Xaa is C or S

SEQ ID NO: 88453 - protein, 32 aa, Artificial Sequence
  Cyclic GFR-binding peptide
  MOD_RES (3), (4): Xaa is C or S
EPXXVPEKMSPINILYFDENKNVVYGKIPNMT

SEQ ID NO: 88454 - protein, 30 aa, Artificial Sequence
  Cyclic GFR-binding peptide
  MOD_RES (1), (2): Xaa is C or S
XXVPEKMEPISILYLDENKNVVKFKYENMT

SEQ ID NO: 88455 - protein, 26 aa, Artificial Sequence
  Cyclic GFR-binding peptide
PTKLSATSILYYDKGVVTYLRKHRGM

SEQ ID NO: 88456 - protein, 37 aa, Artificial Sequence; identical to SEQ ID NO: 35060
  Cyclic GFR-binding peptide
  MOD_RES (5), (6): Xaa is C or S

SEQ ID NO: 88457 - protein, 27 aa, Artificial Sequence
  Cyclic GFR-binding peptide
DLSPINILYFIGKTPKIYGKIPMIVKS

SEQ ID NO: 88458 - protein, 26 aa, Artificial Sequence
  Cyclic GFR-binding peptide
EKMEPISILYLDENKNVVKFKYENMT

SEQ ID NO: 88459 - protein, 30 aa, Artificial Sequence
  Cyclic GFR-binding peptide
  MOD_RES (1), (2): Xaa is C or S
XXVPQALSPINILYFVGRKPKVYGKIPMIV

SEQ ID NO: 88460 - protein, 39 aa, Artificial Sequence; identical to SEQ ID NO: 35061
  Cyclic GFR-binding peptide
  MOD_RES (4), (5), (37), (39): Xaa is C or S

SEQ ID NO: 88461 - protein, 28 aa, Artificial Sequence
  Cyclic GFR-binding peptide
QALSPINILYFVGRKPKVYGKIPMIVRS

SEQ ID NO: 88462 - protein, 22 aa, Artificial Sequence
  Cyclic GFR-binding peptide
RLSPISILYKDSANNVVLKYHY

SEQ ID NO: 88463 - protein, 31 aa, Artificial Sequence
  Cyclic GFR-binding peptide
  MOD_RES (31), (31): Xaa is C or S
PTKMEPISMLYLNDKQQIIKFKYEGMVVDRX

SEQ ID NO: 88464 - protein, 32 aa, Artificial Sequence
  Cyclic GFR-binding peptide
  MOD_RES (29), (31): Xaa is C or S
KMSATSMLYYNDKQQIILRKHRGMVVDRXGXS

SEQ ID NO: 88465 - protein, 33 aa, Artificial Sequence
  Cyclic GFR-binding peptide
  MOD_RES (31), (33): Xaa is C or S
PTRLSPISILYKDSANNVVLKYHYDMVVESXGX

SEQ ID NO: 88466 - protein, 29 aa, Artificial Sequence
  Cyclic GFR-binding peptide
SATSILYYDAANNVVLRKHRAAAAAAAAA

SEQ ID NO: 88467 - protein, 29 aa, Artificial Sequence
  Cyclic GFR-binding peptide
EKMSPISILYKDENKNVVLKYHYNMTVES

SEQ ID NO: 88468 - protein, 31 aa, Artificial Sequence
  Cyclic GFR-binding peptide
  MOD_RES (28), (30): Xaa is C or S
DLSPINILYFVGRTPKVYGKIPMVVKSXKXS

SEQ ID NO: 88469 - protein, 28 aa, Artificial Sequence
  Cyclic GFR-binding peptide
VPTRLEPISILYLDSANNVVKFKYEDMV

SEQ ID NO: 88470 - protein, 27 aa, Artificial Sequence
  Cyclic GFR-binding peptide
LEPISILYLDSANNVVKFKYEDMVVES

SEQ ID NO: 88471 - protein, 23 aa, Artificial Sequence
  Cyclic GFR-binding peptide
LSPISILYKDSANNVVLKYHYDM

SEQ ID NO: 88472 - protein, 32 aa, Artificial Sequence; identical to SEQ ID NO: 35062
  Cyclic GFR-binding peptide
  MOD_RES (32), (32): Xaa is C or S

SEQ ID NO: 88473 - protein, 31 aa, Artificial Sequence
  Cyclic GFR-binding peptide
  MOD_RES (28), (30): Xaa is C or S
LSATSILYYDSANNVVLRKHRDMVVESXGXR

SEQ ID NO: 88474 - protein, 35 aa, Artificial Sequence; identical to SEQ ID NO: 35063
  Cyclic GFR-binding peptide
  MOD_RES (1), (2), (34): Xaa is C or S

SEQ ID NO: 88475 - protein, 28 aa, Artificial Sequence
  Cyclic GFR-binding peptide
  MOD_RES (2), (3): Xaa is C or S
PXXVPEKMNAISILYFDENKNVVLKKYR

SEQ ID NO: 88476 - protein, 33 aa, Artificial Sequence
  Cyclic GFR-binding peptide
  MOD_RES (3), (4): Xaa is C or S
PTXXVPTRLSATSILYYDSANNVVLRKHRDMVV

SEQ ID NO: 88477 - protein, 31 aa, Artificial Sequence
  Cyclic GFR-binding peptide
  MOD_RES (30), (30): Xaa is C or S
TKMSATSMLYYNDKQQIILRKHRGMVVDRXG

SEQ ID NO: 88478 - protein, 26 aa, Artificial Sequence
  Cyclic GFR-binding peptide
VSQDLSPINILYFIGKTPKIYGKIPM

SEQ ID NO: 88479 - protein, 26 aa, Artificial Sequence
  Cyclic GFR-binding peptide
EPISILYLDENKNVVKFKYENMTVES

SEQ ID NO: 88480 - protein, 39 aa, Artificial Sequence; identical to SEQ ID NO: 35069
  Cyclic GFR-binding peptide
  MOD_RES (6), (7), (38): Xaa is C or S

SEQ ID NO: 88481 - protein, 27 aa, Artificial Sequence
  Cyclic GFR-binding peptide
  MOD_RES (1), (2): Xaa is C or S
XXVPQDLSPINILYFVGRTPKVYGKIP

SEQ ID NO: 88482 - protein, 35 aa, Artificial Sequence; identical to SEQ ID NO: 35070
  Cyclic GFR-binding peptide
  MOD_RES (1), (2), (34): Xaa is C or S

SEQ ID NO: 88483 - protein, 31 aa, Artificial Sequence
  Cyclic GFR-binding peptide
  MOD_RES (30), (30): Xaa is C or S
TKMEPISMLYLNDKQQIIKFKYEGMVVDRXG

SEQ ID NO: 88484 - protein, 36 aa, Artificial Sequence; identical to SEQ ID NO: 35071
  Cyclic GFR-binding peptide
  MOD_RES (5), (6): Xaa is C or S

SEQ ID NO: 88485 - protein, 25 aa, Artificial Sequence
  Cyclic GFR-binding peptide
VSQDLSPINILYFIGKTPKIYGKIP

SEQ ID NO: 88486 - protein, 32 aa, Artificial Sequence
  Cyclic GFR-binding peptide
  MOD_RES (1), (3): Xaa is C or S
XGXEEVIMSMEGILLVRGNDMIQMTINSTKVP

SEQ ID NO: 88487 - protein, 27 aa, Artificial Sequence
  Cyclic GFR-binding peptide
RDVVMGSMEGIIIQQKDNMIQMTINSM

SEQ ID NO: 88488 - protein, 35 aa, Artificial Sequence; identical to SEQ ID NO: 35074
  Cyclic GFR-binding peptide
  MOD_RES (31), (32): Xaa is C or S

SEQ ID NO: 88489 - protein, 37 aa, Artificial Sequence; identical to SEQ ID NO: 35076
  Cyclic GFR-binding peptide
  MOD_RES (32), (33): Xaa is C or S

SEQ ID NO: 88490 - protein, 20 aa, Artificial Sequence
  Cyclic GFR-binding peptide
SMEGILLVRGNDMIQMTINS

SEQ ID NO: 88491 - protein, 24 aa, Artificial Sequence
  Cyclic GFR-binding peptide
VVMDSMEGIVVNNAADMIQITINS

SEQ ID NO: 88492 - protein, 34 aa, Artificial Sequence; identical to SEQ ID NO: 35082
  Cyclic GFR-binding peptide
  MOD_RES (31), (32): Xaa is C or S

SEQ ID NO: 88493 - protein, 34 aa, Artificial Sequence
  Cyclic GFR-binding peptide
  MOD_RES (29), (30): Xaa is C or S
VMDSMEGIVVNNASDMIQITINSLRTPVXXTPPT

SEQ ID NO: 88494 - protein, 27 aa, Artificial Sequence
  Cyclic GFR-binding peptide
  MOD_RES (26), (27): Xaa is C or S
SMEGLVVNNAADMIQITINSLRAPVXX

SEQ ID NO: 88495 - protein, 21 aa, Artificial Sequence
  Cyclic GFR-binding peptide
DSMEGIVVNNAADMIQITINS

SEQ ID NO: 88496 - protein, 23 aa, Artificial Sequence
  Cyclic GFR-binding peptide
MDSMEGLVVNNASDMIQITINSL

SEQ ID NO: 88497 - protein, 31 aa, Artificial Sequence; identical to SEQ ID NO: 35088
  Cyclic GFR-binding peptide

SEQ ID NO: 88498 - protein, 35 aa, Artificial Sequence; identical to SEQ ID NO: 35087
  Cyclic GFR-binding peptide
  MOD_RES (32), (33): Xaa is C or S

SEQ ID NO: 88499 - protein, 26 aa, Artificial Sequence
  Cyclic GFR-binding peptide
SRVVMNSMEGLIVNSSDDMIQVTINS

SEQ ID NO: 88500 - protein, 25 aa, Artificial Sequence
  Cyclic GFR-binding peptide
KVIMSMEGLIKPTKGIMIQITINSL

SEQ ID NO: 88501 - protein, 39 aa, Artificial Sequence; identical to SEQ ID NO: 35091
  Cyclic GFR-binding peptide
  MOD_RES (2), (4), (35), (36): Xaa is C or S

SEQ ID NO: 88502 - protein, 28 aa, Artificial Sequence
  Cyclic GFR-binding peptide
  MOD_RES (27), (28): Xaa is C or S
MSMEGLIKPTKGIMIQITINSLDQSVXX

SEQ ID NO: 88503 - protein, 33 aa, Artificial Sequence
  Cyclic GFR-binding peptide
  MOD_RES (2), (4): Xaa is C or S
SXKXSRVIMSMEGLVKPKRGVMIQITINSLAQP

SEQ ID NO: 88504 - protein, 34 aa, Artificial Sequence; identical to SEQ ID NO: 35095
  Cyclic GFR-binding peptide
  MOD_RES (1), (3): Xaa is C or S

SEQ ID NO: 88505 - protein, 23 aa, Artificial Sequence
  Cyclic GFR-binding peptide
SMEGLVKPKRGVMIQITINSLAQ

SEQ ID NO: 88506 - protein, 30 aa, Artificial Sequence
  Cyclic GFR-binding peptide
  MOD_RES (27), (28): Xaa is C or S
GSMEGIIIQQKDNMIQMTINSMKTPTXXPG

SEQ ID NO: 88507 - protein, 31 aa, Artificial Sequence
  Cyclic GFR-binding peptide
  MOD_RES (26), (27): Xaa is C or S
SMEGIVVNNASDMIQITINSLRTPVXXTPPT

SEQ ID NO: 88508 - protein, 30 aa, Artificial Sequence
  Cyclic GFR-binding peptide
  MOD_RES (30), (30): Xaa is C or S
RVIMSMEGLVKPKRGVMIQITINSLAQPVX

SEQ ID NO: 88509 - protein, 33 aa, Artificial Sequence
  Cyclic GFR-binding peptide
  MOD_RES (27), (28): Xaa is C or S
MSMEGLLLVRGNDMIQMTINSTKVPAXXTSPVR

SEQ ID NO: 88510 - protein, 32 aa, Artificial Sequence
  Cyclic GFR-binding peptide
  MOD_RES (1), (3): Xaa is C or S
XGXSRVVMNSMEGLIVNSSDDMIQVTINSLKT

SEQ ID NO: 88511 - protein, 26 aa, Artificial Sequence
  Cyclic GFR-binding peptide
DSMEGIVVNNASDMIQITINSLRTPV

SEQ ID NO: 88512 - protein, 35 aa, Artificial Sequence; identical to SEQ ID NO: 35099
  Cyclic GFR-binding peptide
  MOD_RES (1), (3), (34), (35): Xaa is C or S

SEQ ID NO: 88513 - protein, 30 aa, Artificial Sequence
  Cyclic GFR-binding peptide
  MOD_RES (27), (28): Xaa is C or S
MSMEGLVKPKRGVMIQITINSLAQPVXXPA

SEQ ID NO: 88514 - protein, 41 aa, Artificial Sequence; identical to SEQ ID NO: 35100
  Cyclic GFR-binding peptide
  MOD_RES (1), (3), (35), (36): Xaa is C or S

SEQ ID NO: 88515 - protein, 33 aa, Artificial Sequence
  Cyclic GFR-binding peptide
  MOD_RES (27), (28): Xaa is C or S
DSMEGIVVNNASDMIQITINSLRTPVXXTPPTS

SEQ ID NO: 88516 - protein, 26 aa, Artificial Sequence
  Cyclic GFR-binding peptide
EEVIMSMEGLLLVRGNDMIQMTINST

SEQ ID NO: 88517 - protein, 38 aa, Artificial Sequence; identical to SEQ ID NO: 35106
  Cyclic GFR-binding peptide
  MOD_RES (2), (33), (34): Xaa is C or S

SEQ ID NO: 88518 - protein, 30 aa, Artificial Sequence
  Cyclic GFR-binding peptide
  MOD_RES (1), (3): Xaa is C or S
XGXEEVIMSMEGLLLVRGNDMIQMTINSTK

SEQ ID NO: 88519 - protein, 32 aa, Artificial Sequence
  Cyclic GFR-binding peptide
  MOD_RES (28), (29): Xaa is C or S
MDSMEGLVVNNASDMIQITINSLRTPVXXTPP

SEQ ID NO: 88520 - protein, 36 aa, Artificial Sequence; identical to SEQ ID NO: 35116
  Cyclic GFR-binding peptide
  MOD_RES (31), (32): Xaa is C or S

SEQ ID NO: 88521 - protein, 35 aa, Artificial Sequence; identical to SEQ ID NO: 35117
  Cyclic GFR-binding peptide
  MOD_RES (1), (32), (33): Xaa is C or S

SEQ ID NO: 88522 - protein, 28 aa, Artificial Sequence
  Cyclic GFR-binding peptide
  MOD_RES (1), (1): Xaa is C or S
XEEVIMSMEGILLVRGNDMIQMTINSTK

SEQ ID NO: 88523 - protein, 23 aa, Artificial Sequence
  Cyclic GFR-binding peptide
DSMEGIVVNNASDMIQITINSLR

SEQ ID NO: 88524 - protein, 27 aa, Artificial Sequence
  Cyclic GFR-binding peptide
KVIMSMEGLIKPTKGIMIQITINSLDQ

SEQ ID NO: 88525 - protein, 27 aa, Artificial Sequence
  Cyclic GFR-binding peptide
SKVVMSMEGLVKPTRGVMIQITINSLD

SEQ ID NO: 88526 - protein, 27 aa, Artificial Sequence
  Cyclic GFR-binding peptide
  MOD_RES (27), (27): Xaa is C or S
MSMEGLLLVRGNDMIQMTINSTKVPAX

SEQ ID NO: 88527 - protein, 33 aa, Artificial Sequence
  Cyclic GFR-binding peptide
  MOD_RES (27), (28): Xaa is C or S
MSMEGLVKPKRGVMIQITINSLAQPVXXPAASA

SEQ ID NO: 88528 - protein, 22 aa, Artificial Sequence
  Cyclic GFR-binding peptide
MGSMEGLIIQQKDNMIQMTINS

SEQ ID NO: 88529 - protein, 36 aa, Artificial Sequence; identical to SEQ ID NO: 35131
  Cyclic GFR-binding peptide
  MOD_RES (2), (34), (35): Xaa is C or S

SEQ ID NO: 88530 - protein, 33 aa, Artificial Sequence; identical to SEQ ID NO: 35137
  Cyclic GFR-binding peptide
  MOD_RES (31), (32): Xaa is C or S

SEQ ID NO: 88531 - protein, 33 aa, Artificial Sequence
  Cyclic GFR-binding peptide
  MOD_RES (28), (29): Xaa is C or S
MDSMEGLVVNNAADMIQITINSLRAPVXXSAPA

SEQ ID NO: 88532 - protein, 40 aa, Artificial Sequence; identical to SEQ ID NO: 35138
  Cyclic GFR-binding peptide
  MOD_RES (1), (3), (35), (36): Xaa is C or S

SEQ ID NO: 88533 - protein, 29 aa, Artificial Sequence
  Cyclic GFR-binding peptide
  MOD_RES (26), (27): Xaa is C or S
SMEGLVKPTRGVMIQITINSLDQPVXXPS

SEQ ID NO: 88534 - protein, 32 aa, Artificial Sequence; identical to SEQ ID NO: 35146
  Cyclic GFR-binding peptide
  MOD_RES (31), (32): Xaa is C or S

SEQ ID NO: 88535 - protein, 38 aa, Artificial Sequence; identical to SEQ ID NO: 35149
  Cyclic GFR-binding peptide
  MOD_RES (32), (33): Xaa is C or S

SEQ ID NO: 88536 - protein, 41 aa, Artificial Sequence; identical to SEQ ID NO: 35150
  Cyclic GFR-binding peptide
  MOD_RES (1), (3), (35), (36): Xaa is C or S

SEQ ID NO: 88537 - protein, 27 aa, Artificial Sequence
  Cyclic GFR-binding peptide
IMSMEGLLLVRGNDMIQMTINSTKVPA

SEQ ID NO: 88538 - protein, 29 aa, Artificial Sequence
  Cyclic GFR-binding peptide
  MOD_RES (1), (1): Xaa is C or S
XSKVIMSMEGLIKPTKGIMIQITINSLDQ

SEQ ID NO: 88539 - protein, 30 aa, Artificial Sequence
  Cyclic GFR-binding peptide
  MOD_RES (2), (2): Xaa is C or S
GXAEVVMDSMEGLVVNNAADMIQITINSLR

SEQ ID NO: 88540 - protein, 34 aa, Artificial Sequence; identical to SEQ ID NO: 35152
  Cyclic GFR-binding peptide
  MOD_RES (1), (3), (34): Xaa is C or S

SEQ ID NO: 88541 - protein, 29 aa, Artificial Sequence
  Cyclic GFR-binding peptide
AAAAAAAAASMEGIIIQQKDNMIQMTINS

SEQ ID NO: 88542 - protein, 34 aa, Artificial Sequence; identical to SEQ ID NO: 35156
  Cyclic GFR-binding peptide
  MOD_RES (1), (3): Xaa is C or S

SEQ ID NO: 88543 - protein, 32 aa, Artificial Sequence; identical to SEQ ID NO: 35158
  Cyclic GFR-binding peptide
  MOD_RES (1), (1): Xaa is C or S

SEQ ID NO: 88544 - protein, 36 aa, Artificial Sequence; identical to SEQ ID NO: 35159
  Cyclic GFR-binding peptide
  MOD_RES (1), (33), (34): Xaa is C or S

SEQ ID NO: 88545 - protein, 32 aa, Artificial Sequence
  Cyclic GFR-binding peptide
  MOD_RES (1), (3): Xaa is C or S
XGXSEVVMDSMEGIVVNNASDMIQITINSLRT

SEQ ID NO: 88546 - protein, 34 aa, Artificial Sequence
  Cyclic GFR-binding peptide
  MOD_RES (2), (4): Xaa is C or S
HXGXSRVVMNSMEGLIVNSSDDMIQVTINSLKTP

SEQ ID NO: 88547 - protein, 29 aa, Artificial Sequence
  Cyclic GFR-binding peptide
EVIMSMEGLLLVRGNDMIQMTINSTKVPA

SEQ ID NO: 88548 - protein, 22 aa, Artificial Sequence
  Cyclic GFR-binding peptide
MSMEGLLLVRGNDMIQMTINST

SEQ ID NO: 88549 - protein, 29 aa, Artificial Sequence
  Cyclic GFR-binding peptide
  MOD_RES (28), (29): Xaa is C or S
MGSMEGIIIQQKDNMIQMTINSMKTPTXX

SEQ ID NO: 88550 - protein, 23 aa, Artificial Sequence
  Cyclic GFR-binding peptide
IMSMEGLVKPKRGVMIQITINSL

SEQ ID NO: 88551 - protein, 36 aa, Artificial Sequence; identical to SEQ ID NO: 35164
  Cyclic GFR-binding peptide
  MOD_RES (2), (4), (36): Xaa is C or S

SEQ ID NO: 88552 - protein, 30 aa, Artificial Sequence
  Cyclic GFR-binding peptide
  MOD_RES (29), (30): Xaa is C or S
VIMSMEGILLVRGNDMIQMTINSTKVPAXX

SEQ ID NO: 88553 - protein, 35 aa, Artificial Sequence; identical to SEQ ID NO: 35167
  Cyclic GFR-binding peptide
  MOD_RES (2), (4): Xaa is C or S

SEQ ID NO: 88554 - protein, 24 aa, Artificial Sequence
  Cyclic GFR-binding peptide
VIMSMEGILLVRGNDMIQMTINST

SEQ ID NO: 88555 - protein, 29 aa, Artificial Sequence
  Cyclic GFR-binding peptide
  MOD_RES (29), (29): Xaa is C or S
VMDSMEGLVVNNASDMIQITINSLRTPVX

SEQ ID NO: 88556 - protein, 41 aa, Artificial Sequence; identical to SEQ ID NO: 35170
  Cyclic GFR-binding peptide
  MOD_RES (1), (3), (35), (36): Xaa is C or S

SEQ ID NO: 88557 - protein, 34 aa, Artificial Sequence
  Cyclic GFR-binding peptide
  MOD_RES (2), (4): Xaa is C or S
SXGXRDVVMGSMEGIIIQQKDNMIQMTINSMKTP

SEQ ID NO: 88558 - protein, 28 aa, Artificial Sequence
  Cyclic GFR-binding peptide
  MOD_RES (28), (28): Xaa is C or S
MDSMEGLVVNNASDMIQITINSLRTPVX

SEQ ID NO: 88559 - protein, 30 aa, Artificial Sequence
  Cyclic GFR-binding peptide
  MOD_RES (27), (28): Xaa is C or S
MSMEGLLLVRGNDMIQMTINSTKVPAXXTS

SEQ ID NO: 88560 - protein, 37 aa, Artificial Sequence; identical to SEQ ID NO: 35176
  Cyclic GFR-binding peptide
  MOD_RES (1), (32), (33): Xaa is C or S

SEQ ID NO: 88561 - protein, 33 aa, Artificial Sequence
  Cyclic GFR-binding peptide
  MOD_RES (29), (30): Xaa is C or S
VIMSMEGLLLVRGNDMIQMTINSTKVPAXXTSP

SEQ ID NO: 88562 - protein, 37 aa, Artificial Sequence; identical to SEQ ID NO: 35180
  Cyclic GFR-binding peptide
  MOD_RES (31), (32): Xaa is C or S

SEQ ID NO: 88563 - protein, 28 aa, Artificial Sequence
  Cyclic GFR-binding peptide
  MOD_RES (2), (2): Xaa is C or S
GXSRVVMNSMEGLIVNSSDDMIQVTINS

SEQ ID NO: 88564 - protein, 36 aa, Artificial Sequence
  Cyclic GFR-binding peptide
  MOD_RES (30), (31): Xaa is C or S
EVIMSMEGLLLVRGNDMIQMTINSTKVPAXXTSPVR

SEQ ID NO: 88565 - protein, 26 aa, Artificial Sequence
  Cyclic GFR-binding peptide
VIMSMEGLVKPKRGVMIQITINSLAQ

SEQ ID NO: 88566 - protein, 25 aa, Artificial Sequence
  Cyclic GFR-binding peptide
DVVMGSMEGIIIQQKDNMIQMTINS

SEQ ID NO: 88567 - protein, 26 aa, Artificial Sequence
  Cyclic GFR-binding peptide
VMDSMEGLVVNNASDMIQITINSLRT

SEQ ID NO: 88568 - protein, 32 aa, Artificial Sequence
  Cyclic GFR-binding peptide
  MOD_RES (27), (28): Xaa is C or S
MSMEGILLVRGNDMIQMTINSTKVPAXXTSPV

SEQ ID NO: 88569 - protein, 24 aa, Artificial Sequence
  Cyclic GFR-binding peptide
IMSMEGILLVRGNDMIQMTINSTK

SEQ ID NO: 88570 - protein, 30 aa, Artificial Sequence
  Cyclic GFR-binding peptide
  MOD_RES (2), (4): Xaa is C or S
RXGXSEVVMDSMEGIVVNNASDMIQITINS

SEQ ID NO: 88571 - protein, 39 aa, Artificial Sequence; identical to SEQ ID NO: 35186
  Cyclic GFR-binding peptide
  MOD_RES (2), (4), (36), (37): Xaa is C or S

SEQ ID NO: 88572 - protein, 40 aa, Artificial Sequence; identical to SEQ ID NO: 35190
  Cyclic GFR-binding peptide
  MOD_RES (2), (34), (35): Xaa is C or S

SEQ ID NO: 88573 - protein, 32 aa, Artificial Sequence
  Cyclic GFR-binding peptide
  MOD_RES (2), (2): Xaa is C or S
GXRDVVMGSMEGIIIQQKDNMIQMTINSMKTP

SEQ ID NO: 88574 - protein, 23 aa, Artificial Sequence
  Cyclic GFR-binding peptide
VVMSMEGLVKPTRGVMIQITINS

SEQ ID NO: 88575 - protein, 37 aa, Artificial Sequence; identical to SEQ ID NO: 35197
  Cyclic GFR-binding peptide
  MOD_RES (1), (3), (35), (36): Xaa is C or S

SEQ ID NO: 88576 - protein, 35 aa, Artificial Sequence; identical to SEQ ID NO: 35199
  Cyclic GFR-binding peptide
  MOD_RES (31), (32): Xaa is C or S

SEQ ID NO: 88577 - protein, 38 aa, Artificial Sequence; identical to SEQ ID NO: 35200
  Cyclic GFR-binding peptide
  MOD_RES (2), (4), (36), (37): Xaa is C or S

SEQ ID NO: 88578 - protein, 38 aa, Artificial Sequence; identical to SEQ ID NO: 35201
  Cyclic GFR-binding peptide
  MOD_RES (1), (32), (33): Xaa is C or S

SEQ ID NO: 88579 - protein, 27 aa, Artificial Sequence
  Cyclic GFR-binding peptide
VMDSMEGLVVNNAADMIQITINSLRAP

SEQ ID NO: 88580 - protein, 32 aa, Artificial Sequence
  Cyclic GFR-binding peptide
  MOD_RES (30), (31): Xaa is C or S
VVMNSMEGLIVNSSDDMIQVTINSLKTPAXXP

SEQ ID NO: 88581 - protein, 30 aa, Artificial Sequence
  Cyclic GFR-binding peptide
  MOD_RES (28), (29): Xaa is C or S
MDSMEGIVVNNAADMIQITINSLRAPVXXS

SEQ ID NO: 88582 - protein, 41 aa, Artificial Sequence; identical to SEQ ID NO: 35205
  Cyclic GFR-binding peptide
  MOD_RES (1), (3), (35), (36): Xaa is C or S

SEQ ID NO: 88583 - protein, 27 aa, Artificial Sequence
  Cyclic GFR-binding peptide
VVMGSMEGIIIQQKDNMIQMTINSMKT

SEQ ID NO: 88584 - protein, 34 aa, Artificial Sequence; identical to SEQ ID NO: 35208
  Cyclic GFR-binding peptide
  MOD_RES (2), (4): Xaa is C or S

SEQ ID NO: 88585 - protein, 37 aa, Artificial Sequence; identical to SEQ ID NO: 35210
  Cyclic GFR-binding peptide
  MOD_RES (32), (33): Xaa is C or S

SEQ ID NO: 88586 - protein, 34 aa, Artificial Sequence
  Cyclic GFR-binding peptide
  MOD_RES (30), (31): Xaa is C or S
VVMDSMEGLVVNNAADMIQITINSLRAPVXXSAP

SEQ ID NO: 88587 - protein, 24 aa, Artificial Sequence
  Cyclic GFR-binding peptide
VMGSMEGIIIQQKDNMIQMTINSM

SEQ ID NO: 88588 - protein, 35 aa, Artificial Sequence
  Cyclic GFR-binding peptide
  MOD_RES (30), (31): Xaa is C or S
EVIMSMEGLLLVRGNDMIQMTINSTKVPAXXTSPV

SEQ ID NO: 88589 - protein, 32 aa, Artificial Sequence; identical to SEQ ID NO: 35214
  Cyclic GFR-binding peptide
  MOD_RES (31), (32): Xaa is C or S

SEQ ID NO: 88590 - protein, 37 aa, Artificial Sequence; identical to SEQ ID NO: 35216
  Cyclic GFR-binding peptide
  MOD_RES (1), (3), (35), (36): Xaa is C or S

SEQ ID NO: 88591 - protein, 32 aa, Artificial Sequence
  Cyclic GFR-binding peptide
  MOD_RES (28), (29): Xaa is C or S
MNSMEGLIVNSSDDMIQVTINSLKTPAXXPKP

SEQ ID NO: 88592 - protein, 37 aa, Artificial Sequence; identical to SEQ ID NO: 35218
  Cyclic GFR-binding peptide
  MOD_RES (1), (32), (33): Xaa is C or S

SEQ ID NO: 88593 - protein, 22 aa, Artificial Sequence
  Cyclic GFR-binding peptide
SMEGIVVNNASDMIQITINSLR

SEQ ID NO: 88594 - protein, 29 aa, Artificial Sequence
  Cyclic GFR-binding peptide
  MOD_RES (27), (28): Xaa is C or S
DSMEGIVVNNAADMIQITINSLRAPVXXS

SEQ ID NO: 88595 - protein, 29 aa, Artificial Sequence
  Cyclic GFR-binding peptide
  MOD_RES (29), (29): Xaa is C or S
VIMSMEGLVKPKRGVMIQITINSLAQPVX

SEQ ID NO: 88596 - protein, 22 aa, Artificial Sequence
  Cyclic GFR-binding peptide
MSMEGLVKPKRGVMIQITINSL

SEQ ID NO: 88597 - protein, 27 aa, Artificial Sequence
  Cyclic GFR-binding peptide
  MOD_RES (1), (1): Xaa is C or S
XEEVIMSMEGLLLVRGNDMIQMTINST

SEQ ID NO: 88598 - protein, 41 aa, Artificial Sequence; identical to SEQ ID NO: 35220
  Cyclic GFR-binding peptide
  MOD_RES (2), (4), (36), (37): Xaa is C or S

SEQ ID NO: 88599 - protein, 31 aa, Artificial Sequence
  Cyclic GFR-binding peptide
  MOD_RES (27), (28): Xaa is C or S
MSMEGLIKPTKGIMIQITINSLDQSVXXPSA

SEQ ID NO: 88600 - protein, 39 aa, Artificial Sequence; identical to SEQ ID NO: 35223
  Cyclic GFR-binding peptide
  MOD_RES (1), (3), (35), (36): Xaa is C or S

SEQ ID NO: 88601 - protein, 40 aa, Artificial Sequence; identical to SEQ ID NO: 35228
  Cyclic GFR-binding peptide
  MOD_RES (2), (4), (36), (37): Xaa is C or S

SEQ ID NO: 88602 - protein, 32 aa, Artificial Sequence; identical to SEQ ID NO: 35229
  Cyclic GFR-binding peptide
  MOD_RES (32), (32): Xaa is C or S

SEQ ID NO: 88603 - protein, 24 aa, Artificial Sequence
  Cyclic GFR-binding peptide
KVIMSMEGLIKPTKGIMIQITINS

SEQ ID NO: 88604 - protein, 37 aa, Artificial Sequence; identical to SEQ ID NO: 35230
  Cyclic GFR-binding peptide
  MOD_RES (1), (33), (34): Xaa is C or S

SEQ ID NO: 88605 - protein, 25 aa, Artificial Sequence
  Cyclic GFR-binding peptide
MSMEGLIKPTKGIMIQITINSLDQS

SEQ ID NO: 88606 - protein, 30 aa, Artificial Sequence
  Cyclic GFR-binding peptide
  MOD_RES (26), (27): Xaa is C or S
SMEGLIVNSSDDMIQVTINSLKTPAXXPKP

SEQ ID NO: 88607 - protein, 37 aa, Artificial Sequence; identical to SEQ ID NO: 35236
  Cyclic GFR-binding peptide
  MOD_RES (1), (3), (35), (36): Xaa is C or S

SEQ ID NO: 88608 - protein, 32 aa, Artificial Sequence
  Cyclic GFR-binding peptide
  MOD_RES (29), (30): Xaa is C or S
VMDSMEGIVVNNAADMIQITINSLRAPVXXSA

SEQ ID NO: 88609 - protein, 35 aa, Artificial Sequence; identical to SEQ ID NO: 35237
  Cyclic GFR-binding peptide
  MOD_RES (2), (34), (35): Xaa is C or S

SEQ ID NO: 88610 - protein, 33 aa, Artificial Sequence
  Cyclic GFR-binding peptide
  MOD_RES (1), (3): Xaa is C or S
XGXAEVVMDSMEGIVVNNAADMIQITINSLRAP

SEQ ID NO: 88611 - protein, 35 aa, Artificial Sequence; identical to SEQ ID NO: 35239
  Cyclic GFR-binding peptide
  MOD_RES (2), (4), (35): Xaa is C or S

SEQ ID NO: 88612 - protein, 26 aa, Artificial Sequence
  Cyclic GFR-binding peptide
  MOD_RES (26), (26): Xaa is C or S
SMEGILLVRGNDMIQMTINSTKVPAX

SEQ ID NO: 88613 - protein, 33 aa, Artificial Sequence; identical to SEQ ID NO: 35241
  Cyclic GFR-binding peptide
  MOD_RES (32), (33): Xaa is C or S

SEQ ID NO: 88614 - protein, 21 aa, Artificial Sequence
  Cyclic GFR-binding peptide
MSMEGILLVRGNDMIQMTINS

SEQ ID NO: 88615 - protein, 28 aa, Artificial Sequence
  Cyclic GFR-binding peptide
RVIMSMEGLVKPKRGVMIQITINSLAQP

SEQ ID NO: 88616 - protein, 34 aa, Artificial Sequence; identical to SEQ ID NO: 35242
  Cyclic GFR-binding peptide
  MOD_RES (31), (32): Xaa is C or S

SEQ ID NO: 88617 - protein, 39 aa, Artificial Sequence; identical to SEQ ID NO: 35244
  Cyclic GFR-binding peptide
  MOD_RES (2), (4), (35), (36): Xaa is C or S

SEQ ID NO: 88618 - protein, 30 aa, Artificial Sequence
  Cyclic GFR-binding peptide
  MOD_RES (1), (3): Xaa is C or S
XGXSRVVMNSMEGLIVNSSDDMIQVTINSL

SEQ ID NO: 88619 - protein, 34 aa, Artificial Sequence
  Cyclic GFR-binding peptide
  MOD_RES (28), (29): Xaa is C or S
MDSMEGLVVNNASDMIQITINSLRTPVXXTPPTS

SEQ ID NO: 88620 - protein, 29 aa, Artificial Sequence
  Cyclic GFR-binding peptide
SKVVMSMEGLVKPTRGVMIQITINSLDQP

SEQ ID NO: 88621 - protein, 29 aa, Artificial Sequence
  Cyclic GFR-binding peptide
  MOD_RES (1), (3): Xaa is C or S
XGXEEVIMSMEGILLVRGNDMIQMTINST

SEQ ID NO: 88622 - protein, 29 aa, Artificial Sequence
  Cyclic GFR-binding peptide
  MOD_RES (28), (29): Xaa is C or S
IMSMEGLVKPKRGVMIQITINSLAQPVXX

SEQ ID NO: 88623 - protein, 26 aa, Artificial Sequence
  Cyclic GFR-binding peptide
AEVVMDSMEGLVVNNAADMIQITINS

SEQ ID NO: 88624 - protein, 31 aa, Artificial Sequence
  Cyclic GFR-binding peptide
  MOD_RES (27), (28): Xaa is C or S
DSMEGIVVNNASDMIQITINSLRTPVXXTPP

SEQ ID NO: 88625 - protein, 30 aa, Artificial Sequence
  Cyclic GFR-binding peptide
  MOD_RES (29), (30): Xaa is C or S
VMNSMEGLIVNSSDDMIQVTINSLKTPAXX

SEQ ID NO: 88626 - protein, 30 aa, Artificial Sequence
  Cyclic GFR-binding peptide
  MOD_RES (1), (3): Xaa is C or S
XKXSKVVMSMEGLVKPTRGVMIQITINSLD

SEQ ID NO: 88627 - protein, 36 aa, Artificial Sequence; identical to SEQ ID NO: 35249
  Cyclic GFR-binding peptide
  MOD_RES (2), (4), (36): Xaa is C or S

SEQ ID NO: 88628 - protein, 32 aa, Artificial Sequence; identical to SEQ ID NO: 35250
  Cyclic GFR-binding peptide
  MOD_RES (31), (32): Xaa is C or S

SEQ ID NO: 88629 - protein, 37 aa, Artificial Sequence; identical to SEQ ID NO: 35253
  Cyclic GFR-binding peptide
  MOD_RES (31), (32): Xaa is C or S

SEQ ID NO: 88630 - protein, 32 aa, Artificial Sequence
  Cyclic GFR-binding peptide
  MOD_RES (26), (27): Xaa is C or S
SMEGIIIQQKDNMIQMTINSMKTPTXXPGASG

SEQ ID NO: 88631 - protein, 36 aa, Artificial Sequence; identical to SEQ ID NO: 35259
  Cyclic GFR-binding peptide
  MOD_RES (32), (33): Xaa is C or S

SEQ ID NO: 88632 - protein, 33 aa, Artificial Sequence; identical to SEQ ID NO: 35261
  Cyclic GFR-binding peptide
  MOD_RES (2), (2): Xaa is C or S

SEQ ID NO: 88633 - protein, 32 aa, Artificial Sequence; identical to SEQ ID NO: 35262
  Cyclic GFR-binding peptide
  MOD_RES (2), (2): Xaa is C or S

SEQ ID NO: 88634 - protein, 34 aa, Artificial Sequence; identical to SEQ ID NO: 35263
  Cyclic GFR-binding peptide
  MOD_RES (31), (32): Xaa is C or S

SEQ ID NO: 88635 - protein, 25 aa, Artificial Sequence
  Cyclic GFR-binding peptide
VVMGSMEGIIIQQKDNMIQMTINSM

SEQ ID NO: 88636 - protein, 38 aa, Artificial Sequence; identical to SEQ ID NO: 35270
  Cyclic GFR-binding peptide
  MOD_RES (2), (4), (36), (37): Xaa is C or S

SEQ ID NO: 88637 - protein, 24 aa, Artificial Sequence
  Cyclic GFR-binding peptide
VMNSMEGLIVNSSDDMIQVTINSL

SEQ ID NO: 88638 - protein, 26 aa, Artificial Sequence
  Cyclic GFR-binding peptide
VMSMEGLVKPTRGVMIQITINSLDQP

SEQ ID NO: 88639 - protein, 26 aa, Artificial Sequence
  Cyclic GFR-binding peptide
  MOD_RES (1), (1): Xaa is C or S
XEEVIMSMEGILLVRGNDMIQMTINS

SEQ ID NO: 88640 - protein, 31 aa, Artificial Sequence
  Cyclic GFR-binding peptide
  MOD_RES (30), (31): Xaa is C or S
KVVMSMEGLVKPTRGVMIQITINSLDQPVXX

SEQ ID NO: 88641 - protein, 28 aa, Artificial Sequence
  Cyclic GFR-binding peptide
  MOD_RES (26), (27): Xaa is C or S
SMEGLIKPTKGIMIQITINSLDQSVXXP

SEQ ID NO: 88642 - protein, 36 aa, Artificial Sequence; identical to SEQ ID NO: 35272
  Cyclic GFR-binding peptide
  MOD_RES (32), (33): Xaa is C or S

SEQ ID NO: 88643 - protein, 31 aa, Artificial Sequence; identical to SEQ ID NO: 35279
  Cyclic GFR-binding peptide
  MOD_RES (31), (31): Xaa is C or S

SEQ ID NO: 88644 - protein, 37 aa, Artificial Sequence; identical to SEQ ID NO: 35280
  Cyclic GFR-binding peptide
  MOD_RES (31), (32): Xaa is C or S

SEQ ID NO: 88645 - protein, 30 aa, Artificial Sequence
  Cyclic GFR-binding peptide
  MOD_RES (28), (29): Xaa is C or S
MDSMEGLVVNNASDMIQITINSLRTPVXXT

SEQ ID NO: 88646 - protein, 21 aa, Artificial Sequence
  Cyclic GFR-binding peptide
GSMEGLIIQQKDNMIQMTINS

SEQ ID NO: 88647 - protein, 28 aa, Artificial Sequence
  Cyclic GFR-binding peptide
  MOD_RES (1), (3): Xaa is C or S
XKXSKVIMSMEGLIKPTKGIMIQITINS

SEQ ID NO: 88648 - protein, 29 aa, Artificial Sequence
  Cyclic GFR-binding peptide
  MOD_RES (2), (2): Xaa is C or S
KXSRVIMSMEGLVKPKRGVMIQITINSLA

SEQ ID NO: 88649 - protein, 25 aa, Artificial Sequence
  Cyclic GFR-binding peptide
SMEGILLVRGNDMIQMTINSTKVPA

SEQ ID NO: 88650 - protein, 29 aa, Artificial Sequence
  Cyclic GFR-binding peptide
VVMDSMEGLVVNNASDMIQITINSLRTPV

SEQ ID NO: 88651 - protein, 37 aa, Artificial Sequence; identical to SEQ ID NO: 35298
  Cyclic GFR-binding peptide
  MOD_RES (1), (33), (34): Xaa is C or S

SEQ ID NO: 88652 - protein, 34 aa, Artificial Sequence; identical to SEQ ID NO: 35299
  Cyclic GFR-binding peptide
  MOD_RES (2), (34): Xaa is C or S

SEQ ID NO: 88653 - protein, 28 aa, Artificial Sequence
  Cyclic GFR-binding peptide
  MOD_RES (1), (1): Xaa is C or S
XSRVIMSMEGLVKPKRGVMIQITINSLA

SEQ ID NO: 88654 - protein, 29 aa, Artificial Sequence
  Cyclic GFR-binding peptide
AAAAAAAAASMEGLVKPKRGVMIQITINS

SEQ ID NO: 88655 - protein, 35 aa, Artificial Sequence; identical to SEQ ID NO: 35304
  Cyclic GFR-binding peptide
  MOD_RES (1), (33), (34): Xaa is C or S

SEQ ID NO: 88656 - protein, 34 aa, Artificial Sequence
  Cyclic GFR-binding peptide
  MOD_RES (30), (31): Xaa is C or S
VVMDSMEGLVVNNASDMIQITINSLRTPVXXTPP

SEQ ID NO: 88657 - protein, 33 aa, Artificial Sequence
  Cyclic GFR-binding peptide
  MOD_RES (29), (30): Xaa is C or S
VMNSMEGLIVNSSDDMIQVTINSLKTPAXXPKP

SEQ ID NO: 88658 - protein, 24 aa, Artificial Sequence
  Cyclic GFR-binding peptide
MSMEGLLLVRGNDMIQMTINSTKV

SEQ ID NO: 88659 - protein, 36 aa, Artificial Sequence; identical to SEQ ID NO: 35310
  Cyclic GFR-binding peptide
  MOD_RES (32), (33): Xaa is C or S

SEQ ID NO: 88660 - protein, 38 aa, Artificial Sequence; identical to SEQ ID NO: 35312
  Cyclic GFR-binding peptide
  MOD_RES (2), (33), (34): Xaa is C or S

SEQ ID NO: 88661 - protein, 29 aa, Artificial Sequence
  Cyclic GFR-binding peptide
KVVMSMEGLVKPTRGVMIQITINSLDQPV

SEQ ID NO: 88662 - protein, 31 aa, Artificial Sequence
  Cyclic GFR-binding peptide
  MOD_RES (26), (27): Xaa is C or S
SMEGIVVNNAADMIQITINSLRAPVXXSAPA

SEQ ID NO: 88663 - protein, 24 aa, Artificial Sequence
  Cyclic GFR-binding peptide
SMEGLIVNSSDDMIQVTINSLKTP

SEQ ID NO: 88664 - protein, 33 aa, Artificial Sequence
  Cyclic GFR-binding peptide
  MOD_RES (2), (4): Xaa is C or S
LXGXEEVIMSMEGILLVRGNDMIQMTINSTKVP

SEQ ID NO: 88665 - protein, 34 aa, Artificial Sequence
  Cyclic GFR-binding peptide
  MOD_RES (29), (30): Xaa is C or S
VMGSMEGLIIQQKDNMIQMTINSMKTPTXXPGAS

SEQ ID NO: 88666 - protein, 28 aa, Artificial Sequence
  Cyclic GFR-binding peptide
  MOD_RES (28), (28): Xaa is C or S
MGSMEGIIIQQKDNMIQMTINSMKTPTX

SEQ ID NO: 88667 - protein, 31 aa, Artificial Sequence
  Cyclic GFR-binding peptide
  MOD_RES (26), (27): Xaa is C or S
SMEGLVKPKRGVMIQITINSLAQPVXXPAAS

SEQ ID NO: 88668 - protein, 27 aa, Artificial Sequence
  Cyclic GFR-binding peptide
MDSMEGLVVNNAADMIQITINSLRAPV

SEQ ID NO: 88669 - protein, 37 aa, Artificial Sequence; identical to SEQ ID NO: 35322
  Cyclic GFR-binding peptide
  MOD_RES (2), (4), (36), (37): Xaa is C or S

SEQ ID NO: 88670 - protein, 25 aa, Artificial Sequence
  Cyclic GFR-binding peptide
MSMEGLLLVRGNDMIQMTINSTKVP

SEQ ID NO: 88671 - protein, 25 aa, Artificial Sequence
  Cyclic GFR-binding peptide
MDSMEGIVVNNASDMIQITINSLRT

SEQ ID NO: 88672 - protein, 29 aa, Artificial Sequence
  Cyclic GFR-binding peptide
  MOD_RES (2), (2): Xaa is C or S
GXSRVVMNSMEGLIVNSSDDMIQVTINSL

SEQ ID NO: 88673 - protein, 36 aa, Artificial Sequence; identical to SEQ ID NO: 35328
  Cyclic GFR-binding peptide
  MOD_RES (31), (32): Xaa is C or S

SEQ ID NO: 88674 - protein, 32 aa, Artificial Sequence
  Cyclic GFR-binding peptide
  MOD_RES (30), (31): Xaa is C or S
EVIMSMEGILLVRGNDMIQMTINSTKVPAXXT

SEQ ID NO: 88675 - protein, 33 aa, Artificial Sequence; identical to SEQ ID NO: 35332
  Cyclic GFR-binding peptide
  MOD_RES (32), (33): Xaa is C or S

SEQ ID NO: 88676 - protein, 40 aa, Artificial Sequence; identical to SEQ ID NO: 35333
  Cyclic GFR-binding peptide
  MOD_RES (1), (3), (34), (35): Xaa is C or S

SEQ ID NO: 88677 - protein, 31 aa, Artificial Sequence
  Cyclic GFR-binding peptide
  MOD_RES (1), (3): Xaa is C or S
XGXEEVIMSMEGLLLVRGNDMIQMTINSTKV

SEQ ID NO: 88678 - protein, 30 aa, Artificial Sequence
  Cyclic GFR-binding peptide
AEVVMDSMEGLVVNNAADMIQITINSLRAP

SEQ ID NO: 88679 - protein, 35 aa, Artificial Sequence; identical to SEQ ID NO: 35334
  Cyclic GFR-binding peptide
  MOD_RES (2), (4): Xaa is C or S

SEQ ID NO: 88680 - protein, 31 aa, Artificial Sequence
  Cyclic GFR-binding peptide
  MOD_RES (30), (31): Xaa is C or S
VVMGSMEGIIIQQKDNMIQMTINSMKTPTXX

SEQ ID NO: 88681 - protein, 34 aa, Artificial Sequence; identical to SEQ ID NO: 35339
  Cyclic GFR-binding peptide
  MOD_RES (31), (32): Xaa is C or S

SEQ ID NO: 88682 - protein, 27 aa, Artificial Sequence
  Cyclic GFR-binding peptide
EVIMSMEGILLVRGNDMIQMTINSTKV

SEQ ID NO: 88683 - protein, 29 aa, Artificial Sequence
  Cyclic GFR-binding peptide
RDVVMGSMEGLIIQQKDNMIQMTINSMKT

SEQ ID NO: 88684 - protein, 27 aa, Artificial Sequence
  Cyclic GFR-binding peptide
EVVMDSMEGIVVNNAADMIQITINSLR

SEQ ID NO: 88685 - protein, 33 aa, Artificial Sequence
  Cyclic GFR-binding peptide
  MOD_RES (2), (4): Xaa is C or S
SXGXRDVVMGSMEGLIIQQKDNMIQMTINSMKT

SEQ ID NO: 88686 - protein, 31 aa, Artificial Sequence; identical to SEQ ID NO: 35347
  Cyclic GFR-binding peptide
  MOD_RES (31), (31): Xaa is C or S

SEQ ID NO: 88687 - protein, 27 aa, Artificial Sequence
  Cyclic GFR-binding peptide
MDSMEGIVVNNASDMIQITINSLRTPV

SEQ ID NO: 88688 - protein, 30 aa, Artificial Sequence
  Cyclic GFR-binding peptide
  MOD_RES (28), (29): Xaa is C or S
IMSMEGILLVRGNDMIQMTINSTKVPAXXT

SEQ ID NO: 88689 - protein, 36 aa, Artificial Sequence; identical to SEQ ID NO: 35352
  Cyclic GFR-binding peptide
  MOD_RES (2), (4), (36): Xaa is C or S

SEQ ID NO: 88690 - protein, 33 aa, Artificial Sequence
  Cyclic GFR-binding peptide
  MOD_RES (28), (29): Xaa is C or S
MNSMEGLIVNSSDDMIQVTINSLKTPAXXPKPV

SEQ ID NO: 88691 - protein, 36 aa, Artificial Sequence; identical to SEQ ID NO: 35353
  Cyclic GFR-binding peptide
  MOD_RES (1), (3), (35), (36): Xaa is C or S

SEQ ID NO: 88692 - protein, 34 aa, Artificial Sequence
  Cyclic GFR-binding peptide
  MOD_RES (29), (30): Xaa is C or S
VIMSMEGLIKPTKGIMIQITINSLDQSVXXPSAS

SEQ ID NO: 88693 - protein, 30 aa, Artificial Sequence
  Cyclic GFR-binding peptide
  MOD_RES (30), (30): Xaa is C or S
KVVMSMEGLVKPTRGVMIQITINSLDQPVX

SEQ ID NO: 88694 - protein, 35 aa, Artificial Sequence; identical to SEQ ID NO: 35357
  Cyclic GFR-binding peptide
  MOD_RES (1), (3), (35): Xaa is C or S

SEQ ID NO: 88695 - protein, 36 aa, Artificial Sequence; identical to SEQ ID NO: 35359
  Cyclic GFR-binding peptide
  MOD_RES (1), (3), (34), (35): Xaa is C or S

SEQ ID NO: 88696 - protein, 38 aa, Artificial Sequence; identical to SEQ ID NO: 35360
  Cyclic GFR-binding peptide
  MOD_RES (2), (34), (35): Xaa is C or S

SEQ ID NO: 88697 - protein, 33 aa, Artificial Sequence; identical to SEQ ID NO: 35361
  Cyclic GFR-binding peptide
  MOD_RES (1), (3): Xaa is C or S

SEQ ID NO: 88698 - protein, 36 aa, Artificial Sequence; identical to SEQ ID NO: 35362
  Cyclic GFR-binding peptide
  MOD_RES (31), (32): Xaa is C or S

SEQ ID NO: 88699 - protein, 29 aa, Artificial Sequence
  Cyclic GFR-binding peptide
  MOD_RES (27), (28): Xaa is C or S
MSMEGLVKPKRGVMIQITINSLAQPVXXP

SEQ ID NO: 88700 - protein, 29 aa, Artificial Sequence
  Cyclic GFR-binding peptide
  MOD_RES (26), (27): Xaa is C or S
SMEGLIKPTKGIMIQITINSLDQSVXXPS

SEQ ID NO: 88701 - protein, 23 aa, Artificial Sequence
  Cyclic GFR-binding peptide
MNSMEGLIVNSSDDMIQVTINSL

SEQ ID NO: 88702 - protein, 36 aa, Artificial Sequence
  Cyclic GFR-binding peptide
  MOD_RES (30), (31): Xaa is C or S
VVMDSMEGLVVNNAADMIQITINSLRAPVXXSAPAA

SEQ ID NO: 88703 - protein, 40 aa, Artificial Sequence; identical to SEQ ID NO: 35370
  Cyclic GFR-binding peptide
  MOD_RES (2), (34), (35): Xaa is C or S

SEQ ID NO: 88704 - protein, 30 aa, Artificial Sequence
  Cyclic GFR-binding peptide
SEVVMDSMEGIVVNNASDMIQITINSLRTP

SEQ ID NO: 88705 - protein, 39 aa, Artificial Sequence; identical to SEQ ID NO: 35373
  Cyclic GFR-binding peptide
  MOD_RES (2), (33), (34): Xaa is C or S

SEQ ID NO: 88706 - protein, 29 aa, Artificial Sequence
  Cyclic GFR-binding peptide
AAAAAAAAASMEGLVVNNASDMIQITINS

SEQ ID NO: 88707 - protein, 37 aa, Artificial Sequence; identical to SEQ ID NO: 35374
  Cyclic GFR-binding peptide
  MOD_RES (31), (32): Xaa is C or S

SEQ ID NO: 88708 - protein, 36 aa, Artificial Sequence; identical to SEQ ID NO: 35376
  Cyclic GFR-binding peptide
  MOD_RES (1), (3), (35), (36): Xaa is C or S

SEQ ID NO: 88709 - protein, 42 aa, Artificial Sequence; identical to SEQ ID NO: 35378
  Cyclic GFR-binding peptide
  MOD_RES (2), (4), (36), (37): Xaa is C or S

SEQ ID NO: 88710 - protein, 28 aa, Artificial Sequence
  Cyclic GFR-binding peptide
VMGSMEGIIIQQKDNMIQMTINSMKTPT

SEQ ID NO: 88711 - protein, 22 aa, Artificial Sequence
  Cyclic GFR-binding peptide
SMEGIVVNNAADMIQITINSLR

SEQ ID NO: 88712 - protein, 31 aa, Artificial Sequence
  Cyclic GFR-binding peptide
  MOD_RES (28), (29): Xaa is C or S
IMSMEGILLVRGNDMIQMTINSTKVPAXXTS

SEQ ID NO: 88713 - protein, 32 aa, Artificial Sequence
  Cyclic GFR-binding peptide
  MOD_RES (30), (31): Xaa is C or S
VVMGSMEGLIIQQKDNMIQMTINSMKTPTXXP

SEQ ID NO: 88714 - protein, 38 aa, Artificial Sequence; identical to SEQ ID NO: 35400
  Cyclic GFR-binding peptide
  MOD_RES (1), (33), (34): Xaa is C or S

SEQ ID NO: 88715 - protein, 39 aa, Artificial Sequence; identical to SEQ ID NO: 35404
  Cyclic GFR-binding peptide
  MOD_RES (2), (4), (35), (36): Xaa is C or S

SEQ ID NO: 88716 - protein, 34 aa, Artificial Sequence
  Cyclic GFR-binding peptide
  MOD_RES (28), (29): Xaa is C or S
IMSMEGILLVRGNDMIQMTINSTKVPAXXTSPVR

SEQ ID NO: 88717 - protein, 27 aa, Artificial Sequence
  Cyclic GFR-binding peptide
  MOD_RES (26), (27): Xaa is C or S
SMEGLIVNSSDDMIQVTINSLKTPAXX

SEQ ID NO: 88718 - protein, 22 aa, Artificial Sequence
  Cyclic GFR-binding peptide
SMEGLVVNNASDMIQITINSLR

SEQ ID NO: 88719 - protein, 30 aa, Artificial Sequence; identical to SEQ ID NO: 35407
  Cyclic GFR-binding peptide

SEQ ID NO: 88720 - protein, 31 aa, Artificial Sequence
  Cyclic GFR-binding peptide
  MOD_RES (26), (27): Xaa is C or S
SMEGLIVNSSDDMIQVTINSLKTPAXXPKPV

SEQ ID NO: 88721 - protein, 37 aa, Artificial Sequence; identical to SEQ ID NO: 35408
  Cyclic GFR-binding peptide
  MOD_RES (1), (33), (34): Xaa is C or S

SEQ ID NO: 88722 - protein, 41 aa, Artificial Sequence; identical to SEQ ID NO: 35410
  Cyclic GFR-binding peptide
  MOD_RES (2), (4), (35), (36): Xaa is C or S

SEQ ID NO: 88723 - protein, 35 aa, Artificial Sequence; identical to SEQ ID NO: 35413
  Cyclic GFR-binding peptide
  MOD_RES (1), (33), (34): Xaa is C or S

SEQ ID NO: 88724 - protein, 39 aa, Artificial Sequence; identical to SEQ ID NO: 35412
  Cyclic GFR-binding peptide
  MOD_RES (1), (3), (34), (35): Xaa is C or S

SEQ ID NO: 88725 - protein, 25 aa, Artificial Sequence
  Cyclic GFR-binding peptide
SMEGLVKPKRGVMIQITINSLAQPV

SEQ ID NO: 88726 - protein, 35 aa, Artificial Sequence
  Cyclic GFR-binding peptide
  MOD_RES (30), (31): Xaa is C or S
VVMDSMEGIVVNNASDMIQITINSLRTPVXXTPPT

SEQ ID NO: 88727 - protein, 40 aa, Artificial Sequence; identical to SEQ ID NO: 35415
  Cyclic GFR-binding peptide
  MOD_RES (2), (4), (35), (36): Xaa is C or S

SEQ ID NO: 88728 - protein, 28 aa, Artificial Sequence
  Cyclic GFR-binding peptide
SEVVMDSMEGIVVNNASDMIQITINSLR

SEQ ID NO: 88729 - protein, 29 aa, Artificial Sequence
  Cyclic GFR-binding peptide
  MOD_RES (1), (3): Xaa is C or S
XGXRDVVMGSMEGIIIQQKDNMIQMTINS

SEQ ID NO: 88730 - protein, 30 aa, Artificial Sequence
  Cyclic GFR-binding peptide
  MOD_RES (26), (27): Xaa is C or S
SMEGLVKPTRGVMIQITINSLDQPVXXPSA

SEQ ID NO: 88731 - protein, 32 aa, Artificial Sequence
  Cyclic GFR-binding peptide
  MOD_RES (26), (27): Xaa is C or S
SMEGLIVNSSDDMIQVTINSLKTPAXXPKPVH

SEQ ID NO: 88732 - protein, 33 aa, Artificial Sequence
  Cyclic GFR-binding peptide
  MOD_RES (29), (30): Xaa is C or S
VMGSMEGIIIQQKDNMIQMTINSMKTPTXXPGA

SEQ ID NO: 88733 - protein, 34 aa, Artificial Sequence; identical to SEQ ID NO: 35420
  Cyclic GFR-binding peptide
  MOD_RES (32), (33): Xaa is C or S

SEQ ID NO: 88734 - protein, 35 aa, Artificial Sequence; identical to SEQ ID NO: 35422
  Cyclic GFR-binding peptide
  MOD_RES (2), (4): Xaa is C or S

SEQ ID NO: 88735 - protein, 34 aa, Artificial Sequence; identical to SEQ ID NO: 35423
  Cyclic GFR-binding peptide
  MOD_RES (1), (33), (34): Xaa is C or S

SEQ ID NO: 88736 - protein, 30 aa, Artificial Sequence
  Cyclic GFR-binding peptide
  MOD_RES (26), (27): Xaa is C or S
SMEGLVKPKRGVMIQITINSLAQPVXXPAA

SEQ ID NO: 88737 - protein, 29 aa, Artificial Sequence
  Cyclic GFR-binding peptide
  MOD_RES (1), (3): Xaa is C or S
XKXSKVIMSMEGLIKPTKGIMIQITINSL

SEQ ID NO: 88738 - protein, 35 aa, Artificial Sequence
  Cyclic GFR-binding peptide
  MOD_RES (30), (31): Xaa is C or S
KVIMSMEGLIKPTKGIMIQITINSLDQSVXXPSAS

SEQ ID NO: 88739 - protein, 38 aa, Artificial Sequence; identical to SEQ ID NO: 35427
  Cyclic GFR-binding peptide
  MOD_RES (1), (3), (35), (36): Xaa is C or S

SEQ ID NO: 88740 - protein, 31 aa, Artificial Sequence
  Cyclic GFR-binding peptide
  MOD_RES (1), (3): Xaa is C or S
XGXAEVVMDSMEGLVVNNAADMIQITINSLR

SEQ ID NO: 88741 - protein, 28 aa, Artificial Sequence
  Cyclic GFR-binding peptide
  MOD_RES (28), (28): Xaa is C or S
IMSMEGLVKPKRGVMIQITINSLAQPVX

SEQ ID NO: 88742 - protein, 29 aa, Artificial Sequence
  Cyclic GFR-binding peptide
  MOD_RES (29), (29): Xaa is C or S
VVMSMEGLVKPTRGVMIQITINSLDQPVX

SEQ ID NO: 88743 - protein, 34 aa, Artificial Sequence; identical to SEQ ID NO: 35434
  Cyclic GFR-binding peptide
  MOD_RES (32), (33): Xaa is C or S

SEQ ID NO: 88744 - protein, 26 aa, Artificial Sequence
  Cyclic GFR-binding peptide
AEVVMDSMEGIVVNNAADMIQITINS

SEQ ID NO: 88745 - protein, 34 aa, Artificial Sequence
  Cyclic GFR-binding peptide
  MOD_RES (28), (29): Xaa is C or S
MNSMEGLIVNSSDDMIQVTINSLKTPAXXPKPVH

SEQ ID NO: 88746 - protein, 29 aa, Artificial Sequence
  Cyclic GFR-binding peptide
AEVVMDSMEGIVVNNAADMIQITINSLRA

SEQ ID NO: 88747 - protein, 32 aa, Artificial Sequence
  Cyclic GFR-binding peptide
  MOD_RES (29), (30): Xaa is C or S
VMDSMEGIVVNNASDMIQITINSLRTPVXXTP

SEQ ID NO: 88748 - protein, 32 aa, Artificial Sequence
  Cyclic GFR-binding peptide
  MOD_RES (26), (27): Xaa is C or S
SMEGIVVNNASDMIQITINSLRTPVXXTPPTS

SEQ ID NO: 88749 - protein, 26 aa, Artificial Sequence
  Cyclic GFR-binding peptide
EVIMSMEGILLVRGNDMIQMTINSTK

SEQ ID NO: 88750 - protein, 27 aa, Artificial Sequence
  Cyclic GFR-binding peptide
  MOD_RES (27), (27): Xaa is C or S
DSMEGIVVNNASDMIQITINSLRTPVX

SEQ ID NO: 88751 - protein, 28 aa, Artificial Sequence
  Cyclic GFR-binding peptide
SKVVMSMEGLVKPTRGVMIQITINSLDQ

SEQ ID NO: 88752 - protein, 32 aa, Artificial Sequence
  Cyclic GFR-binding peptide
  MOD_RES (27), (28): Xaa is C or S
MSMEGLLLVRGNDMIQMTINSTKVPAXXTSPV

SEQ ID NO: 88753 - protein, 33 aa, Artificial Sequence; identical to SEQ ID NO: 35452
  Cyclic GFR-binding peptide
  MOD_RES (2), (2): Xaa is C or S

SEQ ID NO: 88754 - protein, 24 aa, Artificial Sequence
  Cyclic GFR-binding peptide
MDSMEGLVVNNAADMIQITINSLR

SEQ ID NO: 88755 - protein, 32 aa, Artificial Sequence; identical to SEQ ID NO: 35455
  Cyclic GFR-binding peptide
  MOD_RES (31), (32): Xaa is C or S

SEQ ID NO: 88756 - protein, 29 aa, Artificial Sequence
  Cyclic GFR-binding peptide
  MOD_RES (2), (4): Xaa is C or S
SXKXSKVIMSMEGLIKPTKGIMIQITINS

SEQ ID NO: 88757 - protein, 34 aa, Artificial Sequence; identical to SEQ ID NO: 35457
  Cyclic GFR-binding peptide
  MOD_RES (2), (4): Xaa is C or S

SEQ ID NO: 88758 - protein, 26 aa, Artificial Sequence
  Cyclic GFR-binding peptide
DSMEGLVVNNASDMIQITINSLRTPV

SEQ ID NO: 88759 - protein, 33 aa, Artificial Sequence
  Cyclic GFR-binding peptide
  MOD_RES (2), (4): Xaa is C or S
RXGXSEVVMDSMEGIVVNNASDMIQITINSLRT

SEQ ID NO: 88760 - protein, 33 aa, Artificial Sequence
  Cyclic GFR-binding peptide
  MOD_RES (29), (30): Xaa is C or S
VIMSMEGLVKPKRGVMIQITINSLAQPVXXPAA

SEQ ID NO: 88761 - protein, 40 aa, Artificial Sequence; identical to SEQ ID NO: 35462
  Cyclic GFR-binding peptide
  MOD_RES (2), (34), (35): Xaa is C or S

SEQ ID NO: 88762 - protein, 31 aa, Artificial Sequence
  Cyclic GFR-binding peptide
  MOD_RES (29), (30): Xaa is C or S
VMDSMEGIVVNNAADMIQITINSLRAPVXXS

SEQ ID NO: 88763 - protein, 35 aa, Artificial Sequence
  Cyclic GFR-binding peptide
  MOD_RES (29), (30): Xaa is C or S
VMDSMEGLVVNNASDMIQITINSLRTPVXXTPPTS

SEQ ID NO: 88764 - protein, 23 aa, Artificial Sequence
  Cyclic GFR-binding peptide
SMEGLIVNSSDDMIQVTINSLKT

SEQ ID NO: 88765 - protein, 42 aa, Artificial Sequence; identical to SEQ ID NO: 35467
  Cyclic GFR-binding peptide
  MOD_RES (2), (4), (36), (37): Xaa is C or S

SEQ ID NO: 88766 - protein, 29 aa, Artificial Sequence
  Cyclic GFR-binding peptide
  MOD_RES (2), (2): Xaa is C or S
KXSKVIMSMEGLIKPTKGIMIQITINSLD

SEQ ID NO: 88767 - protein, 29 aa, Artificial Sequence
  Cyclic GFR-binding peptide
  MOD_RES (28), (29): Xaa is C or S
MDSMEGLVVNNASDMIQITINSLRTPVXX

SEQ ID NO: 88768 - protein, 29 aa, Artificial Sequence
  Cyclic GFR-binding peptide
  MOD_RES (2), (2): Xaa is C or S
GXRDVVMGSMEGIIIQQKDNMIQMTINSM

SEQ ID NO: 88769 - protein, 34 aa, Artificial Sequence; identical to SEQ ID NO: 35479
  Cyclic GFR-binding peptide
  MOD_RES (32), (33): Xaa is C or S

SEQ ID NO: 88770 - protein, 39 aa, Artificial Sequence; identical to SEQ ID NO: 35481
  Cyclic GFR-binding peptide
  MOD_RES (2), (4), (36), (37): Xaa is C or S

SEQ ID NO: 88771 - protein, 40 aa, Artificial Sequence; identical to SEQ ID NO: 35482
  Cyclic GFR-binding peptide
  MOD_RES (2), (34), (35): Xaa is C or S

SEQ ID NO: 88772 - protein, 21 aa, Artificial Sequence
  Cyclic GFR-binding peptide
NSMEGLIVNSSDDMIQVTINS

SEQ ID NO: 88773 - protein, 36 aa, Artificial Sequence; identical to SEQ ID NO: 35485
  Cyclic GFR-binding peptide
  MOD_RES (1), (3), (34), (35): Xaa is C or S

SEQ ID NO: 88774 - protein, 29 aa, Artificial Sequence
  Cyclic GFR-binding peptide
  MOD_RES (26), (27): Xaa is C or S
SMEGLVVNNASDMIQITINSLRTPVXXTP

SEQ ID NO: 88775 - protein, 37 aa, Artificial Sequence; identical to SEQ ID NO: 35487
  Cyclic GFR-binding peptide
  MOD_RES (2), (4), (36), (37): Xaa is C or S

SEQ ID NO: 88776 - protein, 27 aa, Artificial Sequence
  Cyclic GFR-binding peptide
  MOD_RES (1), (1): Xaa is C or S
XSRVIMSMEGLVKPKRGVMIQITINSL

SEQ ID NO: 88777 - protein, 26 aa, Artificial Sequence
  Cyclic GFR-binding peptide
VMDSMEGIVVNNAADMIQITINSLRA

SEQ ID NO: 88778 - protein, 37 aa, Artificial Sequence; identical to SEQ ID NO: 35488
  Cyclic GFR-binding peptide
  MOD_RES (2), (4), (36), (37): Xaa is C or S

SEQ ID NO: 88779 - protein, 28 aa, Artificial Sequence
  Cyclic GFR-binding peptide
  MOD_RES (26), (27): Xaa is C or S
SMEGLLLVRGNDMIQMTINSTKVPAXXT

SEQ ID NO: 88780 - protein, 37 aa, Artificial Sequence; identical to SEQ ID NO: 35495
  Cyclic GFR-binding peptide
  MOD_RES (31), (32): Xaa is C or S

SEQ ID NO: 88781 - protein, 35 aa, Artificial Sequence
  Cyclic GFR-binding peptide
  MOD_RES (29), (30): Xaa is C or S
VIMSMEGLIKPTKGIMIQITINSLDQSVXXPSASA

SEQ ID NO: 88782 - protein, 39 aa, Artificial Sequence; identical to SEQ ID NO: 35499
  Cyclic GFR-binding peptide
  MOD_RES (1), (3), (35), (36): Xaa is C or S

SEQ ID NO: 88783 - protein, 28 aa, Artificial Sequence
  Cyclic GFR-binding peptide
  MOD_RES (1), (1): Xaa is C or S
XSRVVMNSMEGLIVNSSDDMIQVTINSL

SEQ ID NO: 88784 - protein, 25 aa, Artificial Sequence
  Cyclic GFR-binding peptide
SMEGLIVNSSDDMIQVTINSLKTPA

SEQ ID NO: 88785 - protein, 23 aa, Artificial Sequence
  Cyclic GFR-binding peptide
MDSMEGIVVNNAADMIQITINSL

SEQ ID NO: 88786 - protein, 23 aa, Artificial Sequence
  Cyclic GFR-binding peptide
VIMSMEGLLLVRGNDMIQMTINS

SEQ ID NO: 88787 - protein, 23 aa, Artificial Sequence
  Cyclic GFR-binding peptide
MSMEGILLVRGNDMIQMTINSTK

SEQ ID NO: 88788 - protein, 30 aa, Artificial Sequence
  Cyclic GFR-binding peptide
  MOD_RES (30), (30): Xaa is C or S
VVMGSMEGLIIQQKDNMIQMTINSMKTPTX

SEQ ID NO: 88789 - protein, 31 aa, Artificial Sequence
  Cyclic GFR-binding peptide
  MOD_RES (30), (31): Xaa is C or S
VVMDSMEGLVVNNAADMIQITINSLRAPVXX

SEQ ID NO: 88790 - protein, 33 aa, Artificial Sequence; identical to SEQ ID NO: 35502
  Cyclic GFR-binding peptide
  MOD_RES (31), (32): Xaa is C or S

SEQ ID NO: 88791 - protein, 27 aa, Artificial Sequence
  Cyclic GFR-binding peptide
  MOD_RES (27), (27): Xaa is C or S
DSMEGLVVNNASDMIQITINSLRTPVX

SEQ ID NO: 88792 - protein, 30 aa, Artificial Sequence
  Cyclic GFR-binding peptide
  MOD_RES (2), (2): Xaa is C or S
KXSRVIMSMEGLVKPKRGVMIQITINSLAQ

SEQ ID NO: 88793 - protein, 33 aa, Artificial Sequence
  Cyclic GFR-binding peptide
  MOD_RES (2), (4): Xaa is C or S
RXGXAEVVMDSMEGIVVNNAADMIQITINSLRA

SEQ ID NO: 88794 - protein, 22 aa, Artificial Sequence
  Cyclic GFR-binding peptide
IMSMEGLIKPTKGIMIQITINS

SEQ ID NO: 88795 - protein, 28 aa, Artificial Sequence
  Cyclic GFR-binding peptide
VIMSMEGLLLVRGNDMIQMTINSTKVPA

SEQ ID NO: 88796 - protein, 37 aa, Artificial Sequence; identical to SEQ ID NO: 35510
  Cyclic GFR-binding peptide
  MOD_RES (2), (33), (34): Xaa is C or S

SEQ ID NO: 88797 - protein, 21 aa, Artificial Sequence
  Cyclic GFR-binding peptide
SMEGLVKPKRGVMIQITINSL

SEQ ID NO: 88798 - protein, 25 aa, Artificial Sequence
  Cyclic GFR-binding peptide
VVMDSMEGIVVNNAADMIQITINSL

SEQ ID NO: 88799 - protein, 41 aa, Artificial Sequence; identical to SEQ ID NO: 35513
  Cyclic GFR-binding peptide
  MOD_RES (2), (4), (36), (37): Xaa is C or S

SEQ ID NO: 88800 - protein, 35 aa, Artificial Sequence; identical to SEQ ID NO: 35514
  Cyclic GFR-binding peptide
  MOD_RES (32), (33): Xaa is C or S

SEQ ID NO: 88801 - protein, 25 aa, Artificial Sequence
  Cyclic GFR-binding peptide
EEVIMSMEGILLVRGNDMIQMTINS

SEQ ID NO: 88802 - protein, 29 aa, Artificial Sequence
  Cyclic GFR-binding peptide
  MOD_RES (26), (27): Xaa is C or S
SMEGIIIQQKDNMIQMTINSMKTPTXXPG

SEQ ID NO: 88803 - protein, 26 aa, Artificial Sequence
  Cyclic GFR-binding peptide
SKVVMSMEGLVKPTRGVMIQITINSL

SEQ ID NO: 88804 - protein, 24 aa, Artificial Sequence
  Cyclic GFR-binding peptide
VIMSMEGLIKPTKGIMIQITINSL

SEQ ID NO: 88805 - protein, 24 aa, Artificial Sequence
  Cyclic GFR-binding peptide
GSMEGIIIQQKDNMIQMTINSMKT

SEQ ID NO: 88806 - protein, 24 aa, Artificial Sequence
  Cyclic GFR-binding peptide
MSMEGLIKPTKGIMIQITINSLDQ

SEQ ID NO: 88807 - protein, 31 aa, Artificial Sequence
  Cyclic GFR-binding peptide
  MOD_RES (2), (4): Xaa is C or S
SXGXRDVVMGSMEGIIIQQKDNMIQMTINSM

SEQ ID NO: 88808 - protein, 33 aa, Artificial Sequence
  Cyclic GFR-binding peptide
  MOD_RES (29), (30): Xaa is C or S
VMDSMEGLVVNNAADMIQITINSLRAPVXXSAP

SEQ ID NO: 88809 - protein, 27 aa, Artificial Sequence
  Cyclic GFR-binding peptide
VVMDSMEGIVVNNASDMIQITINSLRT

SEQ ID NO: 88810 - protein, 36 aa, Artificial Sequence
  Cyclic GFR-binding peptide
  MOD_RES (30), (31): Xaa is C or S
VVMGSMEGIIIQQKDNMIQMTINSMKTPTXXPGASG

SEQ ID NO: 88811 - protein, 32 aa, Artificial Sequence
  Cyclic GFR-binding peptide
  MOD_RES (28), (29): Xaa is C or S
IMSMEGLIKPTKGIMIQITINSLDQSVXXPSA

SEQ ID NO: 88812 - protein, 28 aa, Artificial Sequence
  Cyclic GFR-binding peptide
  MOD_RES (27), (28): Xaa is C or S
DSMEGLVVNNASDMIQITINSLRTPVXX

SEQ ID NO: 88813 - protein, 31 aa, Artificial Sequence
  Cyclic GFR-binding peptide
  MOD_RES (1), (3): Xaa is C or S
XGXRDVVMGSMEGLIIQQKDNMIQMTINSMK

SEQ ID NO: 88814 - protein, 32 aa, Artificial Sequence
  Cyclic GFR-binding peptide
  MOD_RES (28), (29): Xaa is C or S
IMSMEGLLLVRGNDMIQMTINSTKVPAXXTSP

SEQ ID NO: 88815 - protein, 35 aa, Artificial Sequence; identical to SEQ ID NO: 35518
  Cyclic GFR-binding peptide
  MOD_RES (32), (33): Xaa is C or S

SEQ ID NO: 88816 - protein, 31 aa, Artificial Sequence
  Cyclic GFR-binding peptide
  MOD_RES (2), (2): Xaa is C or S
GXSEVVMDSMEGLVVNNASDMIQITINSLRT

SEQ ID NO: 88817 - protein, 22 aa, Artificial Sequence
  Cyclic GFR-binding peptide
IMSMEGLLLVRGNDMIQMTINS

SEQ ID NO: 88818 - protein, 23 aa, Artificial Sequence
  Cyclic GFR-binding peptide
VMDSMEGIVVNNASDMIQITINS

SEQ ID NO: 88819 - protein, 35 aa, Artificial Sequence; identical to SEQ ID NO: 35528
  Cyclic GFR-binding peptide
  MOD_RES (2), (33), (34): Xaa is C or S

SEQ ID NO: 88820 - protein, 29 aa, Artificial Sequence
  Cyclic GFR-binding peptide
  MOD_RES (29), (29): Xaa is C or S
VMNSMEGLIVNSSDDMIQVTINSLKTPAX

SEQ ID NO: 88821 - protein, 31 aa, Artificial Sequence; identical to SEQ ID NO: 35530
  Cyclic GFR-binding peptide

SEQ ID NO: 88822 - protein, 36 aa, Artificial Sequence; identical to SEQ ID NO: 35532
  Cyclic GFR-binding peptide
  MOD_RES (2), (34), (35): Xaa is C or S

SEQ ID NO: 88823 - protein, 33 aa, Artificial Sequence; identical to SEQ ID NO: 35539
  Cyclic GFR-binding peptide
  MOD_RES (31), (32): Xaa is C or S

SEQ ID NO: 88824 - protein, 37 aa, Artificial Sequence; identical to SEQ ID NO: 35540
  Cyclic GFR-binding peptide
  MOD_RES (1), (33), (34): Xaa is C or S

SEQ ID NO: 88825 - protein, 33 aa, Artificial Sequence
  Cyclic GFR-binding peptide
  MOD_RES (27), (28): Xaa is C or S
MSMEGLVKPTRGVMIQITINSLDQPVXXPSASA

SEQ ID NO: 88826 - protein, 40 aa, Artificial Sequence; identical to SEQ ID NO: 35546
  Cyclic GFR-binding peptide
  MOD_RES (2), (4), (36), (37): Xaa is C or S

SEQ ID NO: 88827 - protein, 28 aa, Artificial Sequence
  Cyclic GFR-binding peptide
  MOD_RES (27), (28): Xaa is C or S
MSMEGLVKPTRGVMIQITINSLDQPVXX

SEQ ID NO: 88828 - protein, 20 aa, Artificial Sequence
  Cyclic GFR-binding peptide
SMEGLVKPKRGVMIQITINS

SEQ ID NO: 88829 - protein, 29 aa, Artificial Sequence
  Cyclic GFR-binding peptide
  MOD_RES (29), (29): Xaa is C or S
VIMSMEGILLVRGNDMIQMTINSTKVPAX

SEQ ID NO: 88830 - protein, 33 aa, Artificial Sequence; identical to SEQ ID NO: 35551
  Cyclic GFR-binding peptide
  MOD_RES (31), (32): Xaa is C or S

SEQ ID NO: 88831 - protein, 34 aa, Artificial Sequence
  Cyclic GFR-binding peptide
  MOD_RES (30), (31): Xaa is C or S
EVIMSMEGILLVRGNDMIQMTINSTKVPAXXTSP

SEQ ID NO: 88832 - protein, 22 aa, Artificial Sequence
  Cyclic GFR-binding peptide
SMEGLIIQQKDNMIQMTINSMK

SEQ ID NO: 88833 - protein, 23 aa, Artificial Sequence
  Cyclic GFR-binding peptide
VMDSMEGLVVNNAADMIQITINS

SEQ ID NO: 88834 - protein, 38 aa, Artificial Sequence; identical to SEQ ID NO: 35554
  Cyclic GFR-binding peptide
  MOD_RES (1), (33), (34): Xaa is C or S

SEQ ID NO: 88835 - protein, 32 aa, Artificial Sequence; identical to SEQ ID NO: 35557
  Cyclic GFR-binding peptide
  MOD_RES (31), (32): Xaa is C or S

SEQ ID NO: 88836 - protein, 38 aa, Artificial Sequence; identical to SEQ ID NO: 35559
  Cyclic GFR-binding peptide
  MOD_RES (2), (4), (36), (37): Xaa is C or S

SEQ ID NO: 88837 - protein, 30 aa, Artificial Sequence
  Cyclic GFR-binding peptide
  MOD_RES (1), (3): Xaa is C or S
XKXSKVIMSMEGLIKPTKGIMIQITINSLD

SEQ ID NO: 88838 - protein, 22 aa, Artificial Sequence
  Cyclic GFR-binding peptide
IMSMEGILLVRGNDMIQMTINS

SEQ ID NO: 88839 - protein, 35 aa, Artificial Sequence; identical to SEQ ID NO: 35560
  Cyclic GFR-binding peptide
  MOD_RES (1), (3), (35): Xaa is C or S

SEQ ID NO: 88840 - protein, 25 aa, Artificial Sequence
  Cyclic GFR-binding peptide
VMDSMEGIVVNNAADMIQITINSLR

SEQ ID NO: 88841 - protein, 34 aa, Artificial Sequence; identical to SEQ ID NO: 35563
  Cyclic GFR-binding peptide
  MOD_RES (2), (34): Xaa is C or S

SEQ ID NO: 88842 - protein, 30 aa, Artificial Sequence
  Cyclic GFR-binding peptide
  MOD_RES (2), (4): Xaa is C or S
RXGXAEVVMDSMEGIVVNNAADMIQITINS

SEQ ID NO: 88843 - protein, 34 aa, Artificial Sequence; identical to SEQ ID NO: 35565
  Cyclic GFR-binding peptide
  MOD_RES (1), (3): Xaa is C or S

SEQ ID NO: 88844 - protein, 33 aa, Artificial Sequence
  Cyclic GFR-binding peptide
  MOD_RES (27), (28): Xaa is C or S
MSMEGILLVRGNDMIQMTINSTKVPAXXTSPVR

SEQ ID NO: 88845 - protein, 28 aa, Artificial Sequence
  Cyclic GFR-binding peptide
  MOD_RES (27), (28): Xaa is C or S
GSMEGIIIQQKDNMIQMTINSMKTPTXX

SEQ ID NO: 88846 - protein, 24 aa, Artificial Sequence
  Cyclic GFR-binding peptide
SMEGLVVNNAADMIQITINSLRAP

SEQ ID NO: 88847 - protein, 38 aa, Artificial Sequence; identical to SEQ ID NO: 35570
  Cyclic GFR-binding peptide
  MOD_RES (1), (3), (34), (35): Xaa is C or S

SEQ ID NO: 88848 - protein, 24 aa, Artificial Sequence
  Cyclic GFR-binding peptide
RVIMSMEGLVKPKRGVMIQITINS

SEQ ID NO: 88849 - protein, 29 aa, Artificial Sequence
  Cyclic GFR-binding peptide
RVIMSMEGLVKPKRGVMIQITINSLAQPV

SEQ ID NO: 88850 - protein, 30 aa, Artificial Sequence
  Cyclic GFR-binding peptide
  MOD_RES (26), (27): Xaa is C or S
SMEGIVVNNASDMIQITINSLRTPVXXTPP

SEQ ID NO: 88851 - protein, 40 aa, Artificial Sequence; identical to SEQ ID NO: 35572
  Cyclic GFR-binding peptide
  MOD_RES (2), (4), (36), (37): Xaa is C or S

SEQ ID NO: 88852 - protein, 31 aa, Artificial Sequence
  Cyclic GFR-binding peptide
  MOD_RES (2), (4): Xaa is C or S
LXGXEEVIMSMEGILLVRGNDMIQMTINSTK

SEQ ID NO: 88853 - protein, 29 aa, Artificial Sequence
  Cyclic GFR-binding peptide
  MOD_RES (26), (27): Xaa is C or S
SMEGLIVNSSDDMIQVTINSLKTPAXXPK

SEQ ID NO: 88854 - protein, 24 aa, Artificial Sequence
  Cyclic GFR-binding peptide
GSMEGLIIQQKDNMIQMTINSMKT

SEQ ID NO: 88855 - protein, 36 aa, Artificial Sequence; identical to SEQ ID NO: 35579
  Cyclic GFR-binding peptide
  MOD_RES (1), (3), (34), (35): Xaa is C or S

SEQ ID NO: 88856 - protein, 36 aa, Artificial Sequence; identical to SEQ ID NO: 35581
  Cyclic GFR-binding peptide
  MOD_RES (1), (33), (34): Xaa is C or S

SEQ ID NO: 88857 - protein, 32 aa, Artificial Sequence; identical to SEQ ID NO: 35583
  Cyclic GFR-binding peptide
  MOD_RES (1), (32): Xaa is C or S

SEQ ID NO: 88858 - protein, 31 aa, Artificial Sequence
  Cyclic GFR-binding peptide
  MOD_RES (29), (30): Xaa is C or S
VIMSMEGLVKPKRGVMIQITINSLAQPVXXP

SEQ ID NO: 88859 - protein, 33 aa, Artificial Sequence; identical to SEQ ID NO: 35585
  Cyclic GFR-binding peptide
  MOD_RES (1), (32), (33): Xaa is C or S

SEQ ID NO: 88860 - protein, 28 aa, Artificial Sequence
  Cyclic GFR-binding peptide
  MOD_RES (26), (27): Xaa is C or S
SMEGLVKPTRGVMIQITINSLDQPVXXP

SEQ ID NO: 88861 - protein, 25 aa, Artificial Sequence
  Cyclic GFR-binding peptide
GSMEGIIIQQKDNMIQMTINSMKTP

SEQ ID NO: 88862 - protein, 31 aa, Artificial Sequence; identical to SEQ ID NO: 35586
  Cyclic GFR-binding peptide

SEQ ID NO: 88863 - protein, 39 aa, Artificial Sequence; identical to SEQ ID NO: 35588
  Cyclic GFR-binding peptide
  MOD_RES (1), (33), (34): Xaa is C or S

SEQ ID NO: 88864 - protein, 26 aa, Artificial Sequence
  Cyclic GFR-binding peptide
IMSMEGLVKPKRGVMIQITINSLAQP

SEQ ID NO: 88865 - protein, 25 aa, Artificial Sequence
  Cyclic GFR-binding peptide
EVVMDSMEGIVVNNAADMIQITINS

SEQ ID NO: 88866 - protein, 31 aa, Artificial Sequence
  Cyclic GFR-binding peptide
  MOD_RES (2), (4): Xaa is C or S
SXKXSRVIMSMEGLVKPKRGVMIQITINSLA

SEQ ID NO: 88867 - protein, 30 aa, Artificial Sequence
  Cyclic GFR-binding peptide
  MOD_RES (30), (30): Xaa is C or S
EVIMSMEGLLLVRGNDMIQMTINSTKVPAX

SEQ ID NO: 88868 - protein, 30 aa, Artificial Sequence
  Cyclic GFR-binding peptide
  MOD_RES (29), (30): Xaa is C or S
VMDSMEGLVVNNAADMIQITINSLRAPVXX

SEQ ID NO: 88869 - protein, 30 aa, Artificial Sequence
  Cyclic GFR-binding peptide
  MOD_RES (1), (3): Xaa is C or S
XGXRDVVMGSMEGIIIQQKDNMIQMTINSM

SEQ ID NO: 88870 - protein, 37 aa, Artificial Sequence; identical to SEQ ID NO: 35601
  Cyclic GFR-binding peptide
  MOD_RES (31), (32): Xaa is C or S

SEQ ID NO: 88871 - protein, 32 aa, Artificial Sequence
  Cyclic GFR-binding peptide
  MOD_RES (2), (4): Xaa is C or S
RXGXSEVVMDSMEGLVVNNASDMIQITINSLR

SEQ ID NO: 88872 - protein, 37 aa, Artificial Sequence; identical to SEQ ID NO: 35604
  Cyclic GFR-binding peptide
  MOD_RES (2), (4), (36), (37): Xaa is C or S

SEQ ID NO: 88873 - protein, 36 aa, Artificial Sequence; identical to SEQ ID NO: 35607
  Cyclic GFR-binding peptide
  MOD_RES (2), (34), (35): Xaa is C or S

SEQ ID NO: 88874 - protein, 29 aa, Artificial Sequence
  Cyclic GFR-binding peptide
  MOD_RES (2), (2): Xaa is C or S
GXRDVVMGSMEGLIIQQKDNMIQMTINSM

SEQ ID NO: 88875 - protein, 33 aa, Artificial Sequence
  Cyclic GFR-binding peptide
  MOD_RES (29), (30): Xaa is C or S
VVMSMEGLVKPTRGVMIQITINSLDQPVXXPSA

SEQ ID NO: 88876 - protein, 35 aa, Artificial Sequence; identical to SEQ ID NO: 35613
  Cyclic GFR-binding peptide
  MOD_RES (31), (32): Xaa is C or S

SEQ ID NO: 88877 - protein, 23 aa, Artificial Sequence
  Cyclic GFR-binding peptide
SMEGILLVRGNDMIQMTINSTKV

SEQ ID NO: 88878 - protein, 34 aa, Artificial Sequence
  Cyclic GFR-binding peptide
  MOD_RES (30), (31): Xaa is C or S
VVMGSMEGIIIQQKDNMIQMTINSMKTPTXXPGA

SEQ ID NO: 88879 - protein, 27 aa, Artificial Sequence
  Cyclic GFR-binding peptide
DVVMGSMEGLIIQQKDNMIQMTINSMK

SEQ ID NO: 88880 - protein, 26 aa, Artificial Sequence
  Cyclic GFR-binding peptide
EVVMDSMEGIVVNNASDMIQITINSL

SEQ ID NO: 88881 - protein, 34 aa, Artificial Sequence
  Cyclic GFR-binding peptide
  MOD_RES (2), (4): Xaa is C or S
RXGXSEVVMDSMEGIVVNNASDMIQITINSLRTP

SEQ ID NO: 88882 - protein, 37 aa, Artificial Sequence; identical to SEQ ID NO: 35620
  Cyclic GFR-binding peptide
  MOD_RES (2), (33), (34): Xaa is C or S

SEQ ID NO: 88883 - protein, 40 aa, Artificial Sequence; identical to SEQ ID NO: 35622
  Cyclic GFR-binding peptide
  MOD_RES (1), (3), (35), (36): Xaa is C or S

SEQ ID NO: 88884 - protein, 22 aa, Artificial Sequence
  Cyclic GFR-binding peptide
DSMEGLVVNNAADMIQITINSL

SEQ ID NO: 88885 - protein, 34 aa, Artificial Sequence; identical to SEQ ID NO: 35625
  Cyclic GFR-binding peptide
  MOD_RES (31), (32): Xaa is C or S

SEQ ID NO: 88886 - protein, 32 aa, Artificial Sequence
  Cyclic GFR-binding peptide
  MOD_RES (28), (29): Xaa is C or S
VMSMEGLVKPTRGVMIQITINSLDQPVXXPSA

SEQ ID NO: 88887 - protein, 26 aa, Artificial Sequence
  Cyclic GFR-binding peptide
  MOD_RES (1), (1): Xaa is C or S
XSKVIMSMEGLIKPTKGIMIQITINS

SEQ ID NO: 88888 - protein, 33 aa, Artificial Sequence
  Cyclic GFR-binding peptide
  MOD_RES (27), (28): Xaa is C or S
DSMEGIVVNNAADMIQITINSLRAPVXXSAPAA

SEQ ID NO: 88889 - protein, 25 aa, Artificial Sequence
  Cyclic GFR-binding peptide
GSMEGLIIQQKDNMIQMTINSMKTP

SEQ ID NO: 88890 - protein, 28 aa, Artificial Sequence
  Cyclic GFR-binding peptide
  MOD_RES (28), (28): Xaa is C or S
IMSMEGILLVRGNDMIQMTINSTKVPAX

SEQ ID NO: 88891 - protein, 32 aa, Artificial Sequence
  Cyclic GFR-binding peptide
  MOD_RES (29), (30): Xaa is C or S
VIMSMEGLLLVRGNDMIQMTINSTKVPAXXTS

SEQ ID NO: 88892 - protein, 24 aa, Artificial Sequence
  Cyclic GFR-binding peptide
VVMGSMEGLIIQQKDNMIQMTINS

SEQ ID NO: 88893 - protein, 32 aa, Artificial Sequence
  Cyclic GFR-binding peptide
  MOD_RES (29), (30): Xaa is C or S
VMNSMEGLIVNSSDDMIQVTINSLKTPAXXPK

SEQ ID NO: 88894 - protein, 28 aa, Artificial Sequence
  Cyclic GFR-binding peptide
VMDSMEGIVVNNASDMIQITINSLRTPV

SEQ ID NO: 88895 - protein, 37 aa, Artificial Sequence; identical to SEQ ID NO: 35632
  Cyclic GFR-binding peptide
  MOD_RES (2), (4), (35), (36): Xaa is C or S

SEQ ID NO: 88896 - protein, 31 aa, Artificial Sequence
  Cyclic GFR-binding peptide
  MOD_RES (27), (28): Xaa is C or S
MSMEGLVKPKRGVMIQITINSLAQPVXXPAA

SEQ ID NO: 88897 - protein, 39 aa, Artificial Sequence; identical to SEQ ID NO: 35635
  Cyclic GFR-binding peptide
  MOD_RES (2), (34), (35): Xaa is C or S

SEQ ID NO: 88898 - protein, 33 aa, Artificial Sequence
  Cyclic GFR-binding peptide
  MOD_RES (1), (3): Xaa is C or S
XGXSRVVMNSMEGLIVNSSDDMIQVTINSLKTP

SEQ ID NO: 88899 - protein, 32 aa, Artificial Sequence; identical to SEQ ID NO: 35642
  Cyclic GFR-binding peptide
  MOD_RES (1), (1): Xaa is C or S

SEQ ID NO: 88900 - protein, 31 aa, Artificial Sequence; identical to SEQ ID NO: 35641
  Cyclic GFR-binding peptide
  MOD_RES (31), (31): Xaa is C or S

SEQ ID NO: 88901 - protein, 40 aa, Artificial Sequence; identical to SEQ ID NO: 35643
  Cyclic GFR-binding peptide
  MOD_RES (1), (3), (35), (36): Xaa is C or S

SEQ ID NO: 88902 - protein, 23 aa, Artificial Sequence
  Cyclic GFR-binding peptide
SMEGLIKPTKGIMIQITINSLDQ

SEQ ID NO: 88903 - protein, 39 aa, Artificial Sequence; identical to SEQ ID NO: 35645
  Cyclic GFR-binding peptide
  MOD_RES (2), (4), (36), (37): Xaa is C or S

SEQ ID NO: 88904 - protein, 34 aa, Artificial Sequence; identical to SEQ ID NO: 35646
  Cyclic GFR-binding peptide
  MOD_RES (31), (32): Xaa is C or S

SEQ ID NO: 88905 - protein, 26 aa, Artificial Sequence
  Cyclic GFR-binding peptide
DSMEGLVVNNAADMIQITINSLRAPV

SEQ ID NO: 88906 - protein, 20 aa, Artificial Sequence
  Cyclic GFR-binding peptide
SMEGLIKPTKGIMIQITINS

SEQ ID NO: 88907 - protein, 24 aa, Artificial Sequence
  Cyclic GFR-binding peptide
VMDSMEGIVVNNAADMIQITINSL

SEQ ID NO: 88908 - protein, 33 aa, Artificial Sequence; identical to SEQ ID NO: 35649
  Cyclic GFR-binding peptide
  MOD_RES (1), (33): Xaa is C or S

SEQ ID NO: 88909 - protein, 22 aa, Artificial Sequence
  Cyclic GFR-binding peptide
MDSMEGLVVNNAADMIQITINS

SEQ ID NO: 88910 - protein, 30 aa, Artificial Sequence
  Cyclic GFR-binding peptide
  MOD_RES (2), (4): Xaa is C or S
SXKXSRVIMSMEGLVKPKRGVMIQITINSL

SEQ ID NO: 88911 - protein, 25 aa, Artificial Sequence
  Cyclic GFR-binding peptide
VIMSMEGLVKPKRGVMIQITINSLA

SEQ ID NO: 88912 - protein, 37 aa, Artificial Sequence; identical to SEQ ID NO: 35655
  Cyclic GFR-binding peptide
  MOD_RES (1), (3), (34), (35): Xaa is C or S

SEQ ID NO: 88913 - protein, 38 aa, Artificial Sequence; identical to SEQ ID NO: 35656
  Cyclic GFR-binding peptide
  MOD_RES (1), (3), (35), (36): Xaa is C or S

SEQ ID NO: 88914 - protein, 22 aa, Artificial Sequence
  Cyclic GFR-binding peptide
MDSMEGLVVNNASDMIQITINS

SEQ ID NO: 88915 - protein, 27 aa, Artificial Sequence
  Cyclic GFR-binding peptide
  MOD_RES (27), (27): Xaa is C or S
MSMEGLIKPTKGIMIQITINSLDQSVX

SEQ ID NO: 88916 - protein, 30 aa, Artificial Sequence
  Cyclic GFR-binding peptide
  MOD_RES (2), (2): Xaa is C or S
GXEEVIMSMEGILLVRGNDMIQMTINSTKV

SEQ ID NO: 88917 - protein, 33 aa, Artificial Sequence; identical to SEQ ID NO: 35662
  Cyclic GFR-binding peptide
  MOD_RES (31), (32): Xaa is C or S

SEQ ID NO: 88918 - protein, 26 aa, Artificial Sequence
  Cyclic GFR-binding peptide
RVIMSMEGLVKPKRGVMIQITINSLA

SEQ ID NO: 88919 - protein, 31 aa, Artificial Sequence
  Cyclic GFR-binding peptide
  MOD_RES (1), (1): Xaa is C or S
XSRVVMNSMEGLIVNSSDDMIQVTINSLKTP

SEQ ID NO: 88920 - protein, 34 aa, Artificial Sequence
  Cyclic GFR-binding peptide
  MOD_RES (30), (31): Xaa is C or S
KVIMSMEGLIKPTKGIMIQITINSLDQSVXXPSA

SEQ ID NO: 88921 - protein, 39 aa, Artificial Sequence; identical to SEQ ID NO: 35667
  Cyclic GFR-binding peptide
  MOD_RES (1), (33), (34): Xaa is C or S

SEQ ID NO: 88922 - protein, 38 aa, Artificial Sequence; identical to SEQ ID NO: 35669
  Cyclic GFR-binding peptide
  MOD_RES (2), (33), (34): Xaa is C or S

SEQ ID NO: 88923 - protein, 33 aa, Artificial Sequence; identical to SEQ ID NO: 35671
  Cyclic GFR-binding peptide
  MOD_RES (1), (32), (33): Xaa is C or S

SEQ ID NO: 88924 - protein, 36 aa, Artificial Sequence; identical to SEQ ID NO: 35674
  Cyclic GFR-binding peptide
  MOD_RES (31), (32): Xaa is C or S

SEQ ID NO: 88925 - protein, 26 aa, Artificial Sequence
  Cyclic GFR-binding peptide
SRVIMSMEGLVKPKRGVMIQITINSL

SEQ ID NO: 88926 - protein, 24 aa, Artificial Sequence
  Cyclic GFR-binding peptide
VVMSMEGLVKPTRGVMIQITINSL

SEQ ID NO: 88927 - protein, 23 aa, Artificial Sequence
  Cyclic GFR-binding peptide
SMEGIVVNNAADMIQITINSLRA

SEQ ID NO: 88928 - protein, 22 aa, Artificial Sequence
  Cyclic GFR-binding peptide
GSMEGIIIQQKDNMIQMTINSM

SEQ ID NO: 88929 - protein, 40 aa, Artificial Sequence; identical to SEQ ID NO: 35679
  Cyclic GFR-binding peptide
  MOD_RES (2), (4), (35), (36): Xaa is C or S

SEQ ID NO: 88930 - protein, 30 aa, Artificial Sequence
  Cyclic GFR-binding peptide
  MOD_RES (30), (30): Xaa is C or S
VVMDSMEGIVVNNAADMIQITINSLRAPVX

SEQ ID NO: 88931 - protein, 36 aa, Artificial Sequence; identical to SEQ ID NO: 35682
  Cyclic GFR-binding peptide
  MOD_RES (31), (32): Xaa is C or S

SEQ ID NO: 88932 - protein, 27 aa, Artificial Sequence
  Cyclic GFR-binding peptide
  MOD_RES (1), (1): Xaa is C or S
XAEVVMDSMEGIVVNNAADMIQITINS

SEQ ID NO: 88933 - protein, 39 aa, Artificial Sequence; identical to SEQ ID NO: 35685
  Cyclic GFR-binding peptide
  MOD_RES (1), (3), (34), (35): Xaa is C or S

SEQ ID NO: 88934 - protein, 38 aa, Artificial Sequence; identical to SEQ ID NO: 35688
  Cyclic GFR-binding peptide
  MOD_RES (2), (4), (36), (37): Xaa is C or S

SEQ ID NO: 88935 - protein, 35 aa, Artificial Sequence; identical to SEQ ID NO: 35689
  Cyclic GFR-binding peptide
  MOD_RES (2), (33), (34): Xaa is C or S

SEQ ID NO: 88936 - protein, 30 aa, Artificial Sequence
  Cyclic GFR-binding peptide
  MOD_RES (28), (29): Xaa is C or S
MGSMEGLIIQQKDNMIQMTINSMKTPTXXP

SEQ ID NO: 88937 - protein, 29 aa, Artificial Sequence
  Cyclic GFR-binding peptide
EVVMDSMEGIVVNNAADMIQITINSLRAP

SEQ ID NO: 88938 - protein, 37 aa, Artificial Sequence; identical to SEQ ID NO: 35691
  Cyclic GFR-binding peptide
  MOD_RES (2), (33), (34): Xaa is C or S

SEQ ID NO: 88939 - protein, 32 aa, Artificial Sequence; identical to SEQ ID NO: 35693
  Cyclic GFR-binding peptide
  MOD_RES (32), (32): Xaa is C or S

SEQ ID NO: 88940 - protein, 39 aa, Artificial Sequence; identical to SEQ ID NO: 35694
  Cyclic GFR-binding peptide
  MOD_RES (1), (3), (34), (35): Xaa is C or S

SEQ ID NO: 88941 - protein, 33 aa, Artificial Sequence
  Cyclic GFR-binding peptide
  MOD_RES (30), (31): Xaa is C or S
RVIMSMEGLVKPKRGVMIQITINSLAQPVXXPA

SEQ ID NO: 88942 - protein, 30 aa, Artificial Sequence
  Cyclic GFR-binding peptide
  MOD_RES (29), (30): Xaa is C or S
VIMSMEGLIKPTKGIMIQITINSLDQSVXX

SEQ ID NO: 88943 - protein, 30 aa, Artificial Sequence
  Cyclic GFR-binding peptide
SRVVMNSMEGLIVNSSDDMIQVTINSLKTP

SEQ ID NO: 88944 - protein, 28 aa, Artificial Sequence
  Cyclic GFR-binding peptide
EVIMSMEGILLVRGNDMIQMTINSTKVP

SEQ ID NO: 88945 - protein, 39 aa, Artificial Sequence; identical to SEQ ID NO: 35701
  Cyclic GFR-binding peptide
  MOD_RES (1), (33), (34): Xaa is C or S

SEQ ID NO: 88946 - protein, 31 aa, Artificial Sequence; identical to SEQ ID NO: 35704
  Cyclic GFR-binding peptide
  MOD_RES (31), (31): Xaa is C or S

SEQ ID NO: 88947 - protein, 28 aa, Artificial Sequence
  Cyclic GFR-binding peptide
  MOD_RES (1), (1): Xaa is C or S
XEEVIMSMEGLLLVRGNDMIQMTINSTK

SEQ ID NO: 88948 - protein, 22 aa, Artificial Sequence
  Cyclic GFR-binding peptide
SMEGIIIQQKDNMIQMTINSMK

SEQ ID NO: 88949 - protein, 24 aa, Artificial Sequence
  Cyclic GFR-binding peptide
VVMNSMEGLIVNSSDDMIQVTINS

SEQ ID NO: 88950 - protein, 35 aa, Artificial Sequence
  Cyclic GFR-binding peptide
  MOD_RES (29), (30): Xaa is C or S
VIMSMEGLLLVRGNDMIQMTINSTKVPAXXTSPVR

SEQ ID NO: 88951 - protein, 40 aa, Artificial Sequence; identical to SEQ ID NO: 35708
  Cyclic GFR-binding peptide
  MOD_RES (1), (3), (34), (35): Xaa is C or S

SEQ ID NO: 88952 - protein, 32 aa, Artificial Sequence; identical to SEQ ID NO: 35710
  Cyclic GFR-binding peptide
  MOD_RES (31), (32): Xaa is C or S

SEQ ID NO: 88953 - protein, 40 aa, Artificial Sequence; identical to SEQ ID NO: 35712
  Cyclic GFR-binding peptide
  MOD_RES (1), (3), (34), (35): Xaa is C or S

SEQ ID NO: 88954 - protein, 28 aa, Artificial Sequence
  Cyclic GFR-binding peptide
  MOD_RES (2), (2): Xaa is C or S
GXAEVVMDSMEGIVVNNAADMIQITINS

SEQ ID NO: 88955 - protein, 33 aa, Artificial Sequence; identical to SEQ ID NO: 35718
  Cyclic GFR-binding peptide
  MOD_RES (1), (33): Xaa is C or S

SEQ ID NO: 88956 - protein, 25 aa, Artificial Sequence
  Cyclic GFR-binding peptide
SMEGLLLVRGNDMIQMTINSTKVPA

SEQ ID NO: 88957 - protein, 34 aa, Artificial Sequence
  Cyclic GFR-binding peptide
  MOD_RES (2), (4): Xaa is C or S
SXGXRDVVMGSMEGLIIQQKDNMIQMTINSMKTP

SEQ ID NO: 88958 - protein, 33 aa, Artificial Sequence
  Cyclic GFR-binding peptide
  MOD_RES (1), (3): Xaa is C or S
XGXSEVVMDSMEGIVVNNASDMIQITINSLRTP

SEQ ID NO: 88959 - protein, 29 aa, Artificial Sequence
  Cyclic GFR-binding peptide
  MOD_RES (2), (2): Xaa is C or S
GXSEVVMDSMEGLVVNNASDMIQITINSL

SEQ ID NO: 88960 - protein, 30 aa, Artificial Sequence
  Cyclic GFR-binding peptide
  MOD_RES (27), (28): Xaa is C or S
MSMEGLIKPTKGIMIQITINSLDQSVXXPS

SEQ ID NO: 88961 - protein, 33 aa, Artificial Sequence; identical to SEQ ID NO: 35747
  Cyclic GFR-binding peptide
  MOD_RES (31), (32): Xaa is C or S

SEQ ID NO: 88962 - protein, 36 aa, Artificial Sequence; identical to SEQ ID NO: 35750
  Cyclic GFR-binding peptide
  MOD_RES (2), (4), (36): Xaa is C or S

SEQ ID NO: 88963 - protein, 35 aa, Artificial Sequence
  Cyclic GFR-binding peptide
  MOD_RES (30), (31): Xaa is C or S
VVMNSMEGLIVNSSDDMIQVTINSLKTPAXXPKPV

SEQ ID NO: 88964 - protein, 32 aa, Artificial Sequence
  Cyclic GFR-binding peptide
  MOD_RES (27), (28): Xaa is C or S
MSMEGLVKPTRGVMIQITINSLDQPVXXPSAS

SEQ ID NO: 88965 - protein, 28 aa, Artificial Sequence
  Cyclic GFR-binding peptide
  MOD_RES (27), (28): Xaa is C or S
GSMEGLIIQQKDNMIQMTINSMKTPTXX

SEQ ID NO: 88966 - protein, 30 aa, Artificial Sequence
  Cyclic GFR-binding peptide
  MOD_RES (2), (4): Xaa is C or S
LXGXEEVIMSMEGILLVRGNDMIQMTINST

SEQ ID NO: 88967 - protein, 33 aa, Artificial Sequence
  Cyclic GFR-binding peptide
  MOD_RES (30), (31): Xaa is C or S
VVMDSMEGLVVNNASDMIQITINSLRTPVXXTP

SEQ ID NO: 88968 - protein, 31 aa, Artificial Sequence
  Cyclic GFR-binding peptide
  MOD_RES (26), (27): Xaa is C or S
SMEGLVVNNASDMIQITINSLRTPVXXTPPT

SEQ ID NO: 88969 - protein, 40 aa, Artificial Sequence; identical to SEQ ID NO: 35759
  Cyclic GFR-binding peptide
  MOD_RES (2), (4), (35), (36): Xaa is C or S

SEQ ID NO: 88970 - protein, 33 aa, Artificial Sequence; identical to SEQ ID NO: 35760
  Cyclic GFR-binding peptide
  MOD_RES (1), (3): Xaa is C or S

SEQ ID NO: 88971 - protein, 33 aa, Artificial Sequence
  Cyclic GFR-binding peptide
  MOD_RES (27), (28): Xaa is C or S
MSMEGLIKPTKGIMIQITINSLDQSVXXPSASA

SEQ ID NO: 88972 - protein, 29 aa, Artificial Sequence
  Cyclic GFR-binding peptide
  MOD_RES (26), (27): Xaa is C or S
SMEGLIIQQKDNMIQMTINSMKTPTXXPG

SEQ ID NO: 88973 - protein, 29 aa, Artificial Sequence
  Cyclic GFR-binding peptide
  MOD_RES (2), (4): Xaa is C or S
SXKXSKVVMSMEGLVKPTRGVMIQITINS

SEQ ID NO: 88974 - protein, 42 aa, Artificial Sequence; identical to SEQ ID NO: 35765
  Cyclic GFR-binding peptide
  MOD_RES (2), (4), (36), (37): Xaa is C or S

SEQ ID NO: 88975 - protein, 30 aa, Artificial Sequence
  Cyclic GFR-binding peptide
  MOD_RES (27), (28): Xaa is C or S
DSMEGLVVNNAADMIQITINSLRAPVXXSA

SEQ ID NO: 88976 - protein, 37 aa, Artificial Sequence; identical to SEQ ID NO: 35767
  Cyclic GFR-binding peptide
  MOD_RES (32), (33): Xaa is C or S

SEQ ID NO: 88977 - protein, 25 aa, Artificial Sequence
  Cyclic GFR-binding peptide
VMDSMEGLVVNNAADMIQITINSLR

SEQ ID NO: 88978 - protein, 32 aa, Artificial Sequence; identical to SEQ ID NO: 35771
  Cyclic GFR-binding peptide
  MOD_RES (1), (1): Xaa is C or S

SEQ ID NO: 88979 - protein, 38 aa, Artificial Sequence; identical to SEQ ID NO: 35773
  Cyclic GFR-binding peptide
  MOD_RES (32), (33): Xaa is C or S

SEQ ID NO: 88980 - protein, 30 aa, Artificial Sequence
  Cyclic GFR-binding peptide
  MOD_RES (30), (30): Xaa is C or S
VVMNSMEGLIVNSSDDMIQVTINSLKTPAX

SEQ ID NO: 88981 - protein, 28 aa, Artificial Sequence
  Cyclic GFR-binding peptide
VVMDSMEGIVVNNAADMIQITINSLRAP

SEQ ID NO: 88982 - protein, 36 aa, Artificial Sequence; identical to SEQ ID NO: 35779
  Cyclic GFR-binding peptide
  MOD_RES (32), (33): Xaa is C or S

SEQ ID NO: 88983 - protein, 30 aa, Artificial Sequence
  Cyclic GFR-binding peptide
  MOD_RES (29), (30): Xaa is C or S
VIMSMEGLVKPKRGVMIQITINSLAQPVXX

SEQ ID NO: 88984 - protein, 31 aa, Artificial Sequence
  Cyclic GFR-binding peptide
  MOD_RES (29), (30): Xaa is C or S
VVMSMEGLVKPTRGVMIQITINSLDQPVXXP

SEQ ID NO: 88985 - protein, 34 aa, Artificial Sequence; identical to SEQ ID NO: 35780
  Cyclic GFR-binding peptide
  MOD_RES (2), (4): Xaa is C or S

SEQ ID NO: 88986 - protein, 27 aa, Artificial Sequence
  Cyclic GFR-binding peptide
EVVMDSMEGLVVNNAADMIQITINSLR

SEQ ID NO: 88987 - protein, 31 aa, Artificial Sequence
  Cyclic GFR-binding peptide
  MOD_RES (2), (2): Xaa is C or S
GXEEVIMSMEGLLLVRGNDMIQMTINSTKVP

SEQ ID NO: 88988 - protein, 28 aa, Artificial Sequence
  Cyclic GFR-binding peptide
VVMDSMEGLVVNNAADMIQITINSLRAP

SEQ ID NO: 88989 - protein, 37 aa, Artificial Sequence; identical to SEQ ID NO: 35788
  Cyclic GFR-binding peptide
  MOD_RES (1), (33), (34): Xaa is C or S

SEQ ID NO: 88990 - protein, 31 aa, Artificial Sequence
  Cyclic GFR-binding peptide
  MOD_RES (2), (4): Xaa is C or S
SXGXRDVVMGSMEGLIIQQKDNMIQMTINSM

SEQ ID NO: 88991 - protein, 37 aa, Artificial Sequence; identical to SEQ ID NO: 35790
  Cyclic GFR-binding peptide
  MOD_RES (2), (4), (36), (37): Xaa is C or S

SEQ ID NO: 88992 - protein, 32 aa, Artificial Sequence
  Cyclic GFR-binding peptide
  MOD_RES (27), (28): Xaa is C or S
DSMEGLVVNNAADMIQITINSLRAPVXXSAPA

SEQ ID NO: 88993 - protein, 39 aa, Artificial Sequence; identical to SEQ ID NO: 35794
  Cyclic GFR-binding peptide
  MOD_RES (1), (3), (35), (36): Xaa is C or S

SEQ ID NO: 88994 - protein, 33 aa, Artificial Sequence
  Cyclic GFR-binding peptide
  MOD_RES (27), (28): Xaa is C or S
GSMEGIIIQQKDNMIQMTINSMKTPTXXPGASG

SEQ ID NO: 88995 - protein, 33 aa, Artificial Sequence; identical to SEQ ID NO: 35796
  Cyclic GFR-binding peptide
  MOD_RES (32), (33): Xaa is C or S

SEQ ID NO: 88996 - protein, 31 aa, Artificial Sequence
  Cyclic GFR-binding peptide
  MOD_RES (1), (1): Xaa is C or S
XRDVVMGSMEGIIIQQKDNMIQMTINSMKTP

SEQ ID NO: 88997 - protein, 21 aa, Artificial Sequence
  Cyclic GFR-binding peptide
DSMEGIVVNNASDMIQITINS

SEQ ID NO: 88998 - protein, 29 aa, Artificial Sequence
  Cyclic GFR-binding peptide
  MOD_RES (29), (29): Xaa is C or S
VIMSMEGLLLVRGNDMIQMTINSTKVPAX

SEQ ID NO: 88999 - protein, 35 aa, Artificial Sequence
  Cyclic GFR-binding peptide
  MOD_RES (30), (31): Xaa is C or S
VVMDSMEGIVVNNAADMIQITINSLRAPVXXSAPA

SEQ ID NO: 89000 - protein, 26 aa, Artificial Sequence
  Cyclic GFR-binding peptide
MGSMEGIIIQQKDNMIQMTINSMKTP

SEQ ID NO: 89001 - protein, 39 aa, Artificial Sequence; identical to SEQ ID NO: 35802
  Cyclic GFR-binding peptide
  MOD_RES (1), (3), (34), (35): Xaa is C or S

SEQ ID NO: 89002 - protein, 27 aa, Artificial Sequence
  Cyclic GFR-binding peptide
  MOD_RES (26), (27): Xaa is C or S
SMEGIVVNNAADMIQITINSLRAPVXX

SEQ ID NO: 89003 - protein, 22 aa, Artificial Sequence
  Cyclic GFR-binding peptide
MSMEGLVKPTRGVMIQITINSL

SEQ ID NO: 89004 - protein, 29 aa, Artificial Sequence
  Cyclic GFR-binding peptide
AAAAAAAAASMEGILLVRGNDMIQMTINS

SEQ ID NO: 89005 - protein, 30 aa, Artificial Sequence
  Cyclic GFR-binding peptide
  MOD_RES (27), (28): Xaa is C or S
MSMEGLVKPTRGVMIQITINSLDQPVXXPS

SEQ ID NO: 89006 - protein, 28 aa, Artificial Sequence
  Cyclic GFR-binding peptide
SKVIMSMEGLIKPTKGIMIQITINSLDQ

SEQ ID NO: 89007 - protein, 29 aa, Artificial Sequence
  Cyclic GFR-binding peptide
SKVIMSMEGLIKPTKGIMIQITINSLDQS

SEQ ID NO: 89008 - protein, 28 aa, Artificial Sequence
  Cyclic GFR-binding peptide
VMGSMEGLIIQQKDNMIQMTINSMKTPT

SEQ ID NO: 89009 - protein, 22 aa, Artificial Sequence
  Cyclic GFR-binding peptide
MSMEGILLVRGNDMIQMTINST

SEQ ID NO: 89010 - protein, 30 aa, Artificial Sequence
  Cyclic GFR-binding peptide
  MOD_RES (26), (27): Xaa is C or S
SMEGIIIQQKDNMIQMTINSMKTPTXXPGA

SEQ ID NO: 89011 - protein, 27 aa, Artificial Sequence
  Cyclic GFR-binding peptide
MDSMEGIVVNNAADMIQITINSLRAPV

SEQ ID NO: 89012 - protein, 35 aa, Artificial Sequence; identical to SEQ ID NO: 35814
  Cyclic GFR-binding peptide
  MOD_RES (1), (32), (33): Xaa is C or S

SEQ ID NO: 89013 - protein, 29 aa, Artificial Sequence
  Cyclic GFR-binding peptide
SEVVMDSMEGLVVNNASDMIQITINSLRT

SEQ ID NO: 89014 - protein, 30 aa, Artificial Sequence; identical to SEQ ID NO: 35815
  Cyclic GFR-binding peptide

SEQ ID NO: 89015 - protein, 33 aa, Artificial Sequence; identical to SEQ ID NO: 35816
  Cyclic GFR-binding peptide
  MOD_RES (1), (32), (33): Xaa is C or S

SEQ ID NO: 89016 - protein, 34 aa, Artificial Sequence; identical to SEQ ID NO: 35817
  Cyclic GFR-binding peptide
  MOD_RES (31), (32): Xaa is C or S

SEQ ID NO: 89017 - protein, 38 aa, Artificial Sequence; identical to SEQ ID NO: 35818
  Cyclic GFR-binding peptide
  MOD_RES (2), (4), (35), (36): Xaa is C or S

SEQ ID NO: 89018 - protein, 27 aa, Artificial Sequence
  Cyclic GFR-binding peptide
RDVVMGSMEGLIIQQKDNMIQMTINSM

SEQ ID NO: 89019 - protein, 33 aa, Artificial Sequence
  Cyclic GFR-binding peptide
  MOD_RES (29), (30): Xaa is C or S
VMDSMEGIVVNNASDMIQITINSLRTPVXXTPP

SEQ ID NO: 89020 - protein, 41 aa, Artificial Sequence; identical to SEQ ID NO: 35820
  Cyclic GFR-binding peptide
  MOD_RES (2), (4), (36), (37): Xaa is C or S

SEQ ID NO: 89021 - protein, 33 aa, Artificial Sequence
  Cyclic GFR-binding peptide
  MOD_RES (30), (31): Xaa is C or S
VVMDSMEGIVVNNAADMIQITINSLRAPVXXSA

SEQ ID NO: 89022 - protein, 22 aa, Artificial Sequence
  Cyclic GFR-binding peptide
SMEGLIVNSSDDMIQVTINSLK

SEQ ID NO: 89023 - protein, 30 aa, Artificial Sequence
  Cyclic GFR-binding peptide
  MOD_RES (1), (1): Xaa is C or S
XSRVIMSMEGLVKPKRGVMIQITINSLAQP

SEQ ID NO: 89024 - protein, 28 aa, Artificial Sequence
  Cyclic GFR-binding peptide
VVMDSMEGIVVNNASDMIQITINSLRTP

SEQ ID NO: 89025 - protein, 40 aa, Artificial Sequence; identical to SEQ ID NO: 35825
  Cyclic GFR-binding peptide
  MOD_RES (2), (4), (36), (37): Xaa is C or S

SEQ ID NO: 89026 - protein, 27 aa, Artificial Sequence
  Cyclic GFR-binding peptide
  MOD_RES (1), (1): Xaa is C or S
XSKVVMSMEGLVKPTRGVMIQITINSL

SEQ ID NO: 89027 - protein, 38 aa, Artificial Sequence; identical to SEQ ID NO: 35827
  Cyclic GFR-binding peptide
  MOD_RES (2), (4), (35), (36): Xaa is C or S

SEQ ID NO: 89028 - protein, 36 aa, Artificial Sequence; identical to SEQ ID NO: 35828
  Cyclic GFR-binding peptide
  MOD_RES (2), (4), (35), (36): Xaa is C or S

SEQ ID NO: 89029 - protein, 37 aa, Artificial Sequence; identical to SEQ ID NO: 35830
  Cyclic GFR-binding peptide
  MOD_RES (1), (3), (34), (35): Xaa is C or S

SEQ ID NO: 89030 - protein, 23 aa, Artificial Sequence
  Cyclic GFR-binding peptide
IMSMEGLLLVRGNDMIQMTINST

SEQ ID NO: 89031 - protein, 28 aa, Artificial Sequence
  Cyclic GFR-binding peptide
  MOD_RES (1), (3): Xaa is C or S
XGXEEVIMSMEGILLVRGNDMIQMTINS

SEQ ID NO: 89032 - protein, 32 aa, Artificial Sequence; identical to SEQ ID NO: 35832
  Cyclic GFR-binding peptide
  MOD_RES (32), (32): Xaa is C or S

SEQ ID NO: 89033 - protein, 36 aa, Artificial Sequence; identical to SEQ ID NO: 35833
  Cyclic GFR-binding peptide
  MOD_RES (2), (4), (35), (36): Xaa is C or S

SEQ ID NO: 89034 - protein, 34 aa, Artificial Sequence; identical to SEQ ID NO: 35834
  Cyclic GFR-binding peptide
  MOD_RES (1), (33), (34): Xaa is C or S

SEQ ID NO: 89035 - protein, 36 aa, Artificial Sequence; identical to SEQ ID NO: 35837
  Cyclic GFR-binding peptide
  MOD_RES (31), (32): Xaa is C or S

SEQ ID NO: 89036 - protein, 24 aa, Artificial Sequence
  Cyclic GFR-binding peptide
SMEGLLLVRGNDMIQMTINSTKVP

SEQ ID NO: 89037 - protein, 26 aa, Artificial Sequence
  Cyclic GFR-binding peptide
VVMNSMEGLIVNSSDDMIQVTINSLK

SEQ ID NO: 89038 - protein, 37 aa, Artificial Sequence; identical to SEQ ID NO: 35841
  Cyclic GFR-binding peptide
  MOD_RES (32), (33): Xaa is C or S

SEQ ID NO: 89039 - protein, 29 aa, Artificial Sequence
  Cyclic GFR-binding peptide
  MOD_RES (1), (3): Xaa is C or S
XGXSEVVMDSMEGLVVNNASDMIQITINS

SEQ ID NO: 89040 - protein, 28 aa, Artificial Sequence
  Cyclic GFR-binding peptide
VVMGSMEGIIIQQKDNMIQMTINSMKTP

SEQ ID NO: 89041 - protein, 26 aa, Artificial Sequence
  Cyclic GFR-binding peptide
EEVIMSMEGILLVRGNDMIQMTINST

SEQ ID NO: 89042 - protein, 32 aa, Artificial Sequence
  Cyclic GFR-binding peptide
  MOD_RES (29), (30): Xaa is C or S
VIMSMEGILLVRGNDMIQMTINSTKVPAXXTS

SEQ ID NO: 89043 - protein, 35 aa, Artificial Sequence; identical to SEQ ID NO: 35850
  Cyclic GFR-binding peptide
  MOD_RES (1), (33), (34): Xaa is C or S

SEQ ID NO: 89044 - protein, 28 aa, Artificial Sequence
  Cyclic GFR-binding peptide
RDVVMGSMEGLIIQQKDNMIQMTINSMK

SEQ ID NO: 89045 - protein, 30 aa, Artificial Sequence
  Cyclic GFR-binding peptide
  MOD_RES (26), (27): Xaa is C or S
SMEGLIKPTKGIMIQITINSLDQSVXXPSA

SEQ ID NO: 89046 - protein, 29 aa, Artificial Sequence
  Cyclic GFR-binding peptide
  MOD_RES (1), (1): Xaa is C or S
XSEVVMDSMEGIVVNNASDMIQITINSLR

SEQ ID NO: 89047 - protein, 25 aa, Artificial Sequence
  Cyclic GFR-binding peptide
NSMEGLIVNSSDDMIQVTINSLKTP

SEQ ID NO: 89048 - protein, 24 aa, Artificial Sequence
  Cyclic GFR-binding peptide
VMDSMEGLVVNNAADMIQITINSL

SEQ ID NO: 89049 - protein, 28 aa, Artificial Sequence
  Cyclic GFR-binding peptide
EVIMSMEGLLLVRGNDMIQMTINSTKVP

SEQ ID NO: 89050 - protein, 39 aa, Artificial Sequence; identical to SEQ ID NO: 35862
  Cyclic GFR-binding peptide
  MOD_RES (1), (3), (35), (36): Xaa is C or S

SEQ ID NO: 89051 - protein, 28 aa, Artificial Sequence
  Cyclic GFR-binding peptide
VMDSMEGLVVNNASDMIQITINSLRTPV

SEQ ID NO: 89052 - protein, 32 aa, Artificial Sequence
  Cyclic GFR-binding peptide
  MOD_RES (2), (4): Xaa is C or S
LXGXEEVIMSMEGILLVRGNDMIQMTINSTKV

SEQ ID NO: 89053 - protein, 33 aa, Artificial Sequence
  Cyclic GFR-binding peptide
  MOD_RES (29), (30): Xaa is C or S
VMDSMEGLVVNNASDMIQITINSLRTPVXXTPP

SEQ ID NO: 89054 - protein, 25 aa, Artificial Sequence
  Cyclic GFR-binding peptide
SKVVMSMEGLVKPTRGVMIQITINS

SEQ ID NO: 89055 - protein, 33 aa, Artificial Sequence
  Cyclic GFR-binding peptide
  MOD_RES (29), (30): Xaa is C or S
VMDSMEGIVVNNAADMIQITINSLRAPVXXSAP

SEQ ID NO: 89056 - protein, 26 aa, Artificial Sequence
  Cyclic GFR-binding peptide
  MOD_RES (26), (26): Xaa is C or S
SMEGLIVNSSDDMIQVTINSLKTPAX

SEQ ID NO: 89057 - protein, 28 aa, Artificial Sequence
  Cyclic GFR-binding peptide
  MOD_RES (28), (28): Xaa is C or S
MDSMEGIVVNNAADMIQITINSLRAPVX

SEQ ID NO: 89058 - protein, 28 aa, Artificial Sequence
  Cyclic GFR-binding peptide
RDVVMGSMEGIIIQQKDNMIQMTINSMK

SEQ ID NO: 89059 - protein, 40 aa, Artificial Sequence; identical to SEQ ID NO: 35872
  Cyclic GFR-binding peptide
  MOD_RES (2), (34), (35): Xaa is C or S

SEQ ID NO: 89060 - protein, 27 aa, Artificial Sequence
  Cyclic GFR-binding peptide
SEVVMDSMEGIVVNNASDMIQITINSL

SEQ ID NO: 89061 - protein, 30 aa, Artificial Sequence
  Cyclic GFR-binding peptide
  MOD_RES (2), (2): Xaa is C or S
KXSKVVMSMEGLVKPTRGVMIQITINSLDQ

SEQ ID NO: 89062 - protein, 32 aa, Artificial Sequence
  Cyclic GFR-binding peptide
  MOD_RES (2), (4): Xaa is C or S
SXKXSRVIMSMEGLVKPKRGVMIQITINSLAQ

SEQ ID NO: 89063 - protein, 34 aa, Artificial Sequence
  Cyclic GFR-binding peptide
  MOD_RES (28), (29): Xaa is C or S
IMSMEGLLLVRGNDMIQMTINSTKVPAXXTSPVR

SEQ ID NO: 89064 - protein, 37 aa, Artificial Sequence; identical to SEQ ID NO: 35874
  Cyclic GFR-binding peptide
  MOD_RES (2), (4), (35), (36): Xaa is C or S

SEQ ID NO: 89065 - protein, 37 aa, Artificial Sequence; identical to SEQ ID NO: 35875
  Cyclic GFR-binding peptide
  MOD_RES (31), (32): Xaa is C or S

SEQ ID NO: 89066 - protein, 30 aa, Artificial Sequence
  Cyclic GFR-binding peptide
  MOD_RES (2), (2): Xaa is C or S
GXAEVVMDSMEGIVVNNAADMIQITINSLR

SEQ ID NO: 89067 - protein, 23 aa, Artificial Sequence
  Cyclic GFR-binding peptide
DSMEGIVVNNAADMIQITINSLR

SEQ ID NO: 89068 - protein, 35 aa, Artificial Sequence
  Cyclic GFR-binding peptide
  MOD_RES (30), (31): Xaa is C or S
VVMGSMEGLIIQQKDNMIQMTINSMKTPTXXPGAS

SEQ ID NO: 89069 - protein, 29 aa, Artificial Sequence
  Cyclic GFR-binding peptide
VVMNSMEGLIVNSSDDMIQVTINSLKTPA

SEQ ID NO: 89070 - protein, 37 aa, Artificial Sequence; identical to SEQ ID NO: 35882
  Cyclic GFR-binding peptide
  MOD_RES (2), (34), (35): Xaa is C or S

SEQ ID NO: 89071 - protein, 34 aa, Artificial Sequence; identical to SEQ ID NO: 35884
  Cyclic GFR-binding peptide
  MOD_RES (31), (32): Xaa is C or S

SEQ ID NO: 89072 - protein, 35 aa, Artificial Sequence; identical to SEQ ID NO: 35885
  Cyclic GFR-binding peptide
  MOD_RES (1), (3), (34), (35): Xaa is C or S

SEQ ID NO: 89073 - protein, 20 aa, Artificial Sequence
  Cyclic GFR-binding peptide
SMEGLVVNNAADMIQITINS

SEQ ID NO: 89074 - protein, 30 aa, Artificial Sequence
  Cyclic GFR-binding peptide
  MOD_RES (2), (4): Xaa is C or S
LXGXEEVIMSMEGLLLVRGNDMIQMTINST

SEQ ID NO: 89075 - protein, 23 aa, Artificial Sequence
  Cyclic GFR-binding peptide
SMEGIIIQQKDNMIQMTINSMKT

SEQ ID NO: 89076 - protein, 38 aa, Artificial Sequence; identical to SEQ ID NO: 35888
  Cyclic GFR-binding peptide
  MOD_RES (2), (4), (35), (36): Xaa is C or S

SEQ ID NO: 89077 - protein, 21 aa, Artificial Sequence
  Cyclic GFR-binding peptide
SMEGLVVNNAADMIQITINSL

SEQ ID NO: 89078 - protein, 38 aa, Artificial Sequence; identical to SEQ ID NO: 35889
  Cyclic GFR-binding peptide
  MOD_RES (2), (34), (35): Xaa is C or S

SEQ ID NO: 89079 - protein, 25 aa, Artificial Sequence
  Cyclic GFR-binding peptide
MDSMEGLVVNNAADMIQITINSLRA

SEQ ID NO: 89080 - protein, 39 aa, Artificial Sequence; identical to SEQ ID NO: 35890
  Cyclic GFR-binding peptide
  MOD_RES (1), (33), (34): Xaa is C or S

SEQ ID NO: 89081 - protein, 35 aa, Artificial Sequence
  Cyclic GFR-binding peptide
  MOD_RES (29), (30): Xaa is C or S
VIMSMEGILLVRGNDMIQMTINSTKVPAXXTSPVR

SEQ ID NO: 89082 - protein, 27 aa, Artificial Sequence
  Cyclic GFR-binding peptide
MGSMEGLIIQQKDNMIQMTINSMKTPT

SEQ ID NO: 89083 - protein, 32 aa, Artificial Sequence
  Cyclic GFR-binding peptide
  MOD_RES (2), (2): Xaa is C or S
GXAEVVMDSMEGIVVNNAADMIQITINSLRAP

SEQ ID NO: 89084 - protein, 30 aa, Artificial Sequence
  Cyclic GFR-binding peptide
  MOD_RES (28), (29): Xaa is C or S
MNSMEGLIVNSSDDMIQVTINSLKTPAXXP

SEQ ID NO: 89085 - protein, 34 aa, Artificial Sequence; identical to SEQ ID NO: 35892
  Cyclic GFR-binding peptide
  MOD_RES (1), (32), (33): Xaa is C or S

SEQ ID NO: 89086 - protein, 36 aa, Artificial Sequence; identical to SEQ ID NO: 35894
  Cyclic GFR-binding peptide
  MOD_RES (1), (32), (33): Xaa is C or S

SEQ ID NO: 89087 - protein, 27 aa, Artificial Sequence
  Cyclic GFR-binding peptide
VIMSMEGILLVRGNDMIQMTINSTKVP

SEQ ID NO: 89088 - protein, 30 aa, Artificial Sequence
  Cyclic GFR-binding peptide
  MOD_RES (29), (30): Xaa is C or S
VMGSMEGLIIQQKDNMIQMTINSMKTPTXX

SEQ ID NO: 89089 - protein, 29 aa, Artificial Sequence
  Cyclic GFR-binding peptide
RVVMNSMEGLIVNSSDDMIQVTINSLKTP

SEQ ID NO: 89090 - protein, 23 aa, Artificial Sequence
  Cyclic GFR-binding peptide
MGSMEGIIIQQKDNMIQMTINSM

SEQ ID NO: 89091 - protein, 40 aa, Artificial Sequence; identical to SEQ ID NO: 35899
  Cyclic GFR-binding peptide
  MOD_RES (2), (4), (36), (37): Xaa is C or S

SEQ ID NO: 89092 - protein, 35 aa, Artificial Sequence
  Cyclic GFR-binding peptide
  MOD_RES (29), (30): Xaa is C or S
VMDSMEGLVVNNAADMIQITINSLRAPVXXSAPAA

SEQ ID NO: 89093 - protein, 36 aa, Artificial Sequence
  Cyclic GFR-binding peptide
  MOD_RES (30), (31): Xaa is C or S
VVMDSMEGIVVNNAADMIQITINSLRAPVXXSAPAA

SEQ ID NO: 89094 - protein, 32 aa, Artificial Sequence; identical to SEQ ID NO: 35901
  Cyclic GFR-binding peptide
  MOD_RES (31), (32): Xaa is C or S

SEQ ID NO: 89095 - protein, 24 aa, Artificial Sequence
  Cyclic GFR-binding peptide
SMEGILLVRGNDMIQMTINSTKVP

SEQ ID NO: 89096 - protein, 31 aa, Artificial Sequence
  Cyclic GFR-binding peptide
  MOD_RES (1), (3): Xaa is C or S
XGXSRVVMNSMEGLIVNSSDDMIQVTINSLK

SEQ ID NO: 89097 - protein, 36 aa, Artificial Sequence; identical to SEQ ID NO: 35905
  Cyclic GFR-binding peptide
  MOD_RES (2), (4), (36): Xaa is C or S

SEQ ID NO: 89098 - protein, 34 aa, Artificial Sequence; identical to SEQ ID NO: 35907
  Cyclic GFR-binding peptide
  MOD_RES (31), (32): Xaa is C or S

SEQ ID NO: 89099 - protein, 30 aa, Artificial Sequence; identical to SEQ ID NO: 35910
  Cyclic GFR-binding peptide

SEQ ID NO: 89100 - protein, 26 aa, Artificial Sequence
  Cyclic GFR-binding peptide
  MOD_RES (26), (26): Xaa is C or S
SMEGLLLVRGNDMIQMTINSTKVPAX

SEQ ID NO: 89101 - protein, 29 aa, Artificial Sequence
  Cyclic GFR-binding peptide
  MOD_RES (1), (1): Xaa is C or S
XAEVVMDSMEGLVVNNAADMIQITINSLR

SEQ ID NO: 89102 - protein, 27 aa, Artificial Sequence
  Cyclic GFR-binding peptide
VIMSMEGLLLVRGNDMIQMTINSTKVP

SEQ ID NO: 89103 - protein, 28 aa, Artificial Sequence
  Cyclic GFR-binding peptide
  MOD_RES (2), (2): Xaa is C or S
KXSKVIMSMEGLIKPTKGIMIQITINSL

SEQ ID NO: 89104 - protein, 29 aa, Artificial Sequence
  Cyclic GFR-binding peptide
  MOD_RES (1), (3): Xaa is C or S
XGXSEVVMDSMEGIVVNNASDMIQITINS

SEQ ID NO: 89105 - protein, 30 aa, Artificial Sequence
  Cyclic GFR-binding peptide
  MOD_RES (1), (3): Xaa is C or S
XGXSEVVMDSMEGIVVNNASDMIQITINSL

SEQ ID NO: 89106 - protein, 29 aa, Artificial Sequence
  Cyclic GFR-binding peptide
  MOD_RES (1), (1): Xaa is C or S
XAEVVMDSMEGIVVNNAADMIQITINSLR

SEQ ID NO: 89107 - protein, 35 aa, Artificial Sequence; identical to SEQ ID NO: 35914
  Cyclic GFR-binding peptide
  MOD_RES (31), (32): Xaa is C or S

SEQ ID NO: 89108 - protein, 38 aa, Artificial Sequence; identical to SEQ ID NO: 35915
  Cyclic GFR-binding peptide
  MOD_RES (32), (33): Xaa is C or S

SEQ ID NO: 89109 - protein, 30 aa, Artificial Sequence; identical to SEQ ID NO: 2150
  Cyclic GFR-binding peptide

SEQ ID NO: 89110 - protein, 29 aa, Artificial Sequence
  Cyclic GFR-binding peptide
  MOD_RES (27), (28): Xaa is C or S
MSMEGLIKPTKGIMIQITINSLDQSVXXP

SEQ ID NO: 89111 - protein, 26 aa, Artificial Sequence
  Cyclic GFR-binding peptide
EVVMDSMEGLVVNNAADMIQITINSL

SEQ ID NO: 89112 - protein, 30 aa, Artificial Sequence
  Cyclic GFR-binding peptide
  MOD_RES (1), (1): Xaa is C or S
XRDVVMGSMEGIIIQQKDNMIQMTINSMKT

SEQ ID NO: 89113 - protein, 32 aa, Artificial Sequence
  Cyclic GFR-binding peptide
  MOD_RES (30), (31): Xaa is C or S
VVMGSMEGIIIQQKDNMIQMTINSMKTPTXXP

SEQ ID NO: 89114 - protein, 35 aa, Artificial Sequence; identical to SEQ ID NO: 35920
  Cyclic GFR-binding peptide
  MOD_RES (1), (3), (35): Xaa is C or S

SEQ ID NO: 89115 - protein, 36 aa, Artificial Sequence; identical to SEQ ID NO: 35925
  Cyclic GFR-binding peptide
  MOD_RES (31), (32): Xaa is C or S

SEQ ID NO: 89116 - protein, 42 aa, Artificial Sequence; identical to SEQ ID NO: 35926
  Cyclic GFR-binding peptide
  MOD_RES (2), (4), (36), (37): Xaa is C or S

SEQ ID NO: 89117 - protein, 33 aa, Artificial Sequence
  Cyclic GFR-binding peptide
  MOD_RES (28), (29): Xaa is C or S
MDSMEGIVVNNAADMIQITINSLRAPVXXSAPA

SEQ ID NO: 89118 - protein, 32 aa, Artificial Sequence
  Cyclic GFR-binding peptide
  MOD_RES (26), (27): Xaa is C or S
SMEGLIIQQKDNMIQMTINSMKTPTXXPGASG

SEQ ID NO: 89119 - protein, 31 aa, Artificial Sequence
  Cyclic GFR-binding peptide
  MOD_RES (29), (30): Xaa is C or S
VIMSMEGILLVRGNDMIQMTINSTKVPAXXT

SEQ ID NO: 89120 - protein, 25 aa, Artificial Sequence
  Cyclic GFR-binding peptide
IMSMEGLIKPTKGIMIQITINSLDQ

SEQ ID NO: 89121 - protein, 32 aa, Artificial Sequence
  Cyclic GFR-binding peptide
  MOD_RES (26), (27): Xaa is C or S
SMEGLVVNNASDMIQITINSLRTPVXXTPPTS

SEQ ID NO: 89122 - protein, 30 aa, Artificial Sequence
  Cyclic GFR-binding peptide
  MOD_RES (27), (28): Xaa is C or S
DSMEGIVVNNASDMIQITINSLRTPVXXTP

SEQ ID NO: 89123 - protein, 38 aa, Artificial Sequence; identical to SEQ ID NO: 35937
  Cyclic GFR-binding peptide
  MOD_RES (1), (32), (33): Xaa is C or S

SEQ ID NO: 89124 - protein, 27 aa, Artificial Sequence
  Cyclic GFR-binding peptide
VMDSMEGIVVNNASDMIQITINSLRTP

SEQ ID NO: 89125 - protein, 31 aa, Artificial Sequence; identical to SEQ ID NO: 35940
  Cyclic GFR-binding peptide
  MOD_RES (1), (1): Xaa is C or S

SEQ ID NO: 89126 - protein, 28 aa, Artificial Sequence
  Cyclic GFR-binding peptide
  MOD_RES (26), (27): Xaa is C or S
SMEGIIIQQKDNMIQMTINSMKTPTXXP

SEQ ID NO: 89127 - protein, 31 aa, Artificial Sequence
  Cyclic GFR-binding peptide
  MOD_RES (28), (29): Xaa is C or S
MGSMEGIIIQQKDNMIQMTINSMKTPTXXPG

SEQ ID NO: 89128 - protein, 29 aa, Artificial Sequence
  Cyclic GFR-binding peptide
  MOD_RES (27), (28): Xaa is C or S
GSMEGLIIQQKDNMIQMTINSMKTPTXXP

SEQ ID NO: 89129 - protein, 22 aa, Artificial Sequence
  Cyclic GFR-binding peptide
MNSMEGLIVNSSDDMIQVTINS

SEQ ID NO: 89130 - protein, 21 aa, Artificial Sequence
  Cyclic GFR-binding peptide
SMEGIVVNNAADMIQITINSL

SEQ ID NO: 89131 - protein, 24 aa, Artificial Sequence
  Cyclic GFR-binding peptide
SMEGIVVNNAADMIQITINSLRAP

SEQ ID NO: 89132 - protein, 38 aa, Artificial Sequence; identical to SEQ ID NO: 35949
  Cyclic GFR-binding peptide
  MOD_RES (2), (4), (35), (36): Xaa is C or S

SEQ ID NO: 89133 - protein, 28 aa, Artificial Sequence
  Cyclic GFR-binding peptide
  MOD_RES (27), (28): Xaa is C or S
MSMEGILLVRGNDMIQMTINSTKVPAXX

SEQ ID NO: 89134 - protein, 29 aa, Artificial Sequence
  Cyclic GFR-binding peptide
KVIMSMEGLIKPTKGIMIQITINSLDQSV

SEQ ID NO: 89135 - protein, 33 aa, Artificial Sequence
  Cyclic GFR-binding peptide
  MOD_RES (28), (29): Xaa is C or S
MDSMEGLVVNNASDMIQITINSLRTPVXXTPPT

SEQ ID NO: 89136 - protein, 23 aa, Artificial Sequence
  Cyclic GFR-binding peptide
VMGSMEGLIIQQKDNMIQMTINS

SEQ ID NO: 89137 - protein, 36 aa, Artificial Sequence; identical to SEQ ID NO: 35954
  Cyclic GFR-binding peptide
  MOD_RES (2), (33), (34): Xaa is C or S

SEQ ID NO: 89138 - protein, 37 aa, Artificial Sequence; identical to SEQ ID NO: 35955
  Cyclic GFR-binding peptide
  MOD_RES (31), (32): Xaa is C or S

SEQ ID NO: 89139 - protein, 33 aa, Artificial Sequence; identical to SEQ ID NO: 35956
  Cyclic GFR-binding peptide
  MOD_RES (2), (2): Xaa is C or S

SEQ ID NO: 89140 - protein, 34 aa, Artificial Sequence; identical to SEQ ID NO: 35959
  Cyclic GFR-binding peptide
  MOD_RES (1), (3): Xaa is C or S

SEQ ID NO: 89141 - protein, 28 aa, Artificial Sequence
  Cyclic GFR-binding peptide
  MOD_RES (28), (28): Xaa is C or S
MGSMEGLIIQQKDNMIQMTINSMKTPTX

SEQ ID NO: 89142 - protein, 25 aa, Artificial Sequence
  Cyclic GFR-binding peptide
IMSMEGILLVRGNDMIQMTINSTKV

SEQ ID NO: 89143 - protein, 29 aa, Artificial Sequence
  Cyclic GFR-binding peptide
  MOD_RES (29), (29): Xaa is C or S
VMDSMEGIVVNNAADMIQITINSLRAPVX

SEQ ID NO: 89144 - protein, 37 aa, Artificial Sequence; identical to SEQ ID NO: 35964
  Cyclic GFR-binding peptide
  MOD_RES (1), (3), (34), (35): Xaa is C or S

SEQ ID NO: 89145 - protein, 33 aa, Artificial Sequence
  Cyclic GFR-binding peptide
  MOD_RES (2), (4): Xaa is C or S
SXKXSKVVMSMEGLVKPTRGVMIQITINSLDQP

SEQ ID NO: 89146 - protein, 27 aa, Artificial Sequence
  Cyclic GFR-binding peptide
EVVMDSMEGIVVNNASDMIQITINSLR

SEQ ID NO: 89147 - protein, 29 aa, Artificial Sequence
  Cyclic GFR-binding peptide
EVVMDSMEGIVVNNASDMIQITINSLRTP

SEQ ID NO: 89148 - protein, 36 aa, Artificial Sequence; identical to SEQ ID NO: 35967
  Cyclic GFR-binding peptide
  MOD_RES (2), (33), (34): Xaa is C or S

SEQ ID NO: 89149 - protein, 31 aa, Artificial Sequence
  Cyclic GFR-binding peptide
  MOD_RES (26), (27): Xaa is C or S
SMEGLVVNNAADMIQITINSLRAPVXXSAPA

SEQ ID NO: 89150 - protein, 32 aa, Artificial Sequence
  Cyclic GFR-binding peptide
  MOD_RES (2), (4): Xaa is C or S
SXGXRDVVMGSMEGLIIQQKDNMIQMTINSMK

SEQ ID NO: 89151 - protein, 35 aa, Artificial Sequence; identical to SEQ ID NO: 35969
  Cyclic GFR-binding peptide
  MOD_RES (31), (32): Xaa is C or S

SEQ ID NO: 89152 - protein, 21 aa, Artificial Sequence
  Cyclic GFR-binding peptide
DSMEGLVVNNAADMIQITINS

SEQ ID NO: 89153 - protein, 31 aa, Artificial Sequence; identical to SEQ ID NO: 35970
  Cyclic GFR-binding peptide

SEQ ID NO: 89154 - protein, 26 aa, Artificial Sequence
  Cyclic GFR-binding peptide
RDVVMGSMEGLIIQQKDNMIQMTINS

SEQ ID NO: 89155 - protein, 23 aa, Artificial Sequence
  Cyclic GFR-binding peptide
SMEGLLLVRGNDMIQMTINSTKV

SEQ ID NO: 89156 - protein, 29 aa, Artificial Sequence
  Cyclic GFR-binding peptide
  MOD_RES (29), (29): Xaa is C or S
VMDSMEGLVVNNAADMIQITINSLRAPVX

SEQ ID NO: 89157 - protein, 33 aa, Artificial Sequence
  Cyclic GFR-binding peptide
  MOD_RES (30), (31): Xaa is C or S
VVMGSMEGLIIQQKDNMIQMTINSMKTPTXXPG

SEQ ID NO: 89158 - protein, 40 aa, Artificial Sequence; identical to SEQ ID NO: 35980
  Cyclic GFR-binding peptide
  MOD_RES (2), (4), (35), (36): Xaa is C or S

SEQ ID NO: 89159 - protein, 32 aa, Artificial Sequence; identical to SEQ ID NO: 35981
  Cyclic GFR-binding peptide
  MOD_RES (1), (1): Xaa is C or S

SEQ ID NO: 89160 - protein, 32 aa, Artificial Sequence
  Cyclic GFR-binding peptide
  MOD_RES (28), (29): Xaa is C or S
MGSMEGLIIQQKDNMIQMTINSMKTPTXXPGA

SEQ ID NO: 89161 - protein, 21 aa, Artificial Sequence
  Cyclic GFR-binding peptide
SMEGLIKPTKGIMIQITINSL

SEQ ID NO: 89162 - protein, 27 aa, Artificial Sequence
  Cyclic GFR-binding peptide
EEVIMSMEGLLLVRGNDMIQMTINSTK

SEQ ID NO: 89163 - protein, 33 aa, Artificial Sequence
  Cyclic GFR-binding peptide
  MOD_RES (1), (3): Xaa is C or S
XGXRDVVMGSMEGIIIQQKDNMIQMTINSMKTP

SEQ ID NO: 89164 - protein, 22 aa, Artificial Sequence
  Cyclic GFR-binding peptide
SMEGLVVNNAADMIQITINSLR

SEQ ID NO: 89165 - protein, 31 aa, Artificial Sequence
  Cyclic GFR-binding peptide
  MOD_RES (28), (29): Xaa is C or S
MDSMEGIVVNNASDMIQITINSLRTPVXXTP

SEQ ID NO: 89166 - protein, 37 aa, Artificial Sequence; identical to SEQ ID NO: 35985
  Cyclic GFR-binding peptide
  MOD_RES (1), (3), (35), (36): Xaa is C or S

SEQ ID NO: 89167 - protein, 33 aa, Artificial Sequence
  Cyclic GFR-binding peptide
  MOD_RES (30), (31): Xaa is C or S
EVIMSMEGLLLVRGNDMIQMTINSTKVPAXXTS

SEQ ID NO: 89168 - protein, 26 aa, Artificial Sequence
  Cyclic GFR-binding peptide
  MOD_RES (1), (1): Xaa is C or S
XEEVIMSMEGLLLVRGNDMIQMTINS

SEQ ID NO: 89169 - protein, 26 aa, Artificial Sequence
  Cyclic GFR-binding peptide
SEVVMDSMEGIVVNNASDMIQITINS

SEQ ID NO: 89170 - protein, 27 aa, Artificial Sequence
  Cyclic GFR-binding peptide
  MOD_RES (27), (27): Xaa is C or S
DSMEGLVVNNAADMIQITINSLRAPVX

SEQ ID NO: 89171 - protein, 28 aa, Artificial Sequence
  Cyclic GFR-binding peptide
  MOD_RES (27), (28): Xaa is C or S
DSMEGLVVNNAADMIQITINSLRAPVXX

SEQ ID NO: 89172 - protein, 32 aa, Artificial Sequence
  Cyclic GFR-binding peptide
  MOD_RES (2), (4): Xaa is C or S
HXGXSRVVMNSMEGLIVNSSDDMIQVTINSLK

SEQ ID NO: 89173 - protein, 33 aa, Artificial Sequence; identical to SEQ ID NO: 35993
  Cyclic GFR-binding peptide
  MOD_RES (1), (32), (33): Xaa is C or S

SEQ ID NO: 89174 - protein, 31 aa, Artificial Sequence; identical to SEQ ID NO: 35996
  Cyclic GFR-binding peptide
  MOD_RES (1), (1): Xaa is C or S

SEQ ID NO: 89175 - protein, 32 aa, Artificial Sequence; identical to SEQ ID NO: 35997
  Cyclic GFR-binding peptide
  MOD_RES (1), (32): Xaa is C or S

SEQ ID NO: 89176 - protein, 23 aa, Artificial Sequence
  Cyclic GFR-binding peptide
DSMEGLVVNNASDMIQITINSLR

SEQ ID NO: 89177 - protein, 38 aa, Artificial Sequence; identical to SEQ ID NO: 35999
  Cyclic GFR-binding peptide
  MOD_RES (2), (34), (35): Xaa is C or S

SEQ ID NO: 89178 - protein, 37 aa, Artificial Sequence; identical to SEQ ID NO: 36000
  Cyclic GFR-binding peptide
  MOD_RES (2), (4), (35), (36): Xaa is C or S

SEQ ID NO: 89179 - protein, 21 aa, Artificial Sequence
  Cyclic GFR-binding peptide
MSMEGLVKPKRGVMIQITINS

SEQ ID NO: 89180 - protein, 31 aa, Artificial Sequence
  Cyclic GFR-binding peptide
  MOD_RES (27), (28): Xaa is C or S
NSMEGLIVNSSDDMIQVTINSLKTPAXXPKP

SEQ ID NO: 89181 - protein, 27 aa, Artificial Sequence
  Cyclic GFR-binding peptide
  MOD_RES (27), (27): Xaa is C or S
MSMEGILLVRGNDMIQMTINSTKVPAX

SEQ ID NO: 89182 - protein, 31 aa, Artificial Sequence
  Cyclic GFR-binding peptide
  MOD_RES (28), (29): Xaa is C or S
MDSMEGLVVNNAADMIQITINSLRAPVXXSA

SEQ ID NO: 89183 - protein, 29 aa, Artificial Sequence
  Cyclic GFR-binding peptide
  MOD_RES (28), (29): Xaa is C or S
MGSMEGLIIQQKDNMIQMTINSMKTPTXX

SEQ ID NO: 89184 - protein, 34 aa, Artificial Sequence
  Cyclic GFR-binding peptide
  MOD_RES (28), (29): Xaa is C or S
MGSMEGLIIQQKDNMIQMTINSMKTPTXXPGASG

SEQ ID NO: 89185 - protein, 42 aa, Artificial Sequence; identical to SEQ ID NO: 36006
  Cyclic GFR-binding peptide
  MOD_RES (2), (4), (36), (37): Xaa is C or S

SEQ ID NO: 89186 - protein, 30 aa, Artificial Sequence
  Cyclic GFR-binding peptide
  MOD_RES (1), (1): Xaa is C or S
XRDVVMGSMEGLIIQQKDNMIQMTINSMKT

SEQ ID NO: 89187 - protein, 32 aa, Artificial Sequence
  Cyclic GFR-binding peptide
  MOD_RES (28), (29): Xaa is C or S
MDSMEGIVVNNASDMIQITINSLRTPVXXTPP

SEQ ID NO: 89188 - protein, 32 aa, Artificial Sequence
  Cyclic GFR-binding peptide
  MOD_RES (2), (4): Xaa is C or S
LXGXEEVIMSMEGLLLVRGNDMIQMTINSTKV

SEQ ID NO: 89189 - protein, 23 aa, Artificial Sequence
  Cyclic GFR-binding peptide
SMEGLVVNNAADMIQITINSLRA

SEQ ID NO: 89190 - protein, 28 aa, Artificial Sequence
  Cyclic GFR-binding peptide
VMDSMEGLVVNNAADMIQITINSLRAPV

SEQ ID NO: 89191 - protein, 29 aa, Artificial Sequence
  Cyclic GFR-binding peptide
  MOD_RES (29), (29): Xaa is C or S
VMGSMEGLIIQQKDNMIQMTINSMKTPTX

SEQ ID NO: 89192 - protein, 31 aa, Artificial Sequence
  Cyclic GFR-binding peptide
  MOD_RES (2), (4): Xaa is C or S
RXGXSEVVMDSMEGLVVNNASDMIQITINSL

SEQ ID NO: 89193 - protein, 30 aa, Artificial Sequence
  Cyclic GFR-binding peptide
  MOD_RES (29), (30): Xaa is C or S
VMGSMEGIIIQQKDNMIQMTINSMKTPTXX

SEQ ID NO: 89194 - protein, 35 aa, Artificial Sequence; identical to SEQ ID NO: 36013
  Cyclic GFR-binding peptide
  MOD_RES (31), (32): Xaa is C or S

SEQ ID NO: 89195 - protein, 36 aa, Artificial Sequence; identical to SEQ ID NO: 36015
  Cyclic GFR-binding peptide
  MOD_RES (1), (3), (35), (36): Xaa is C or S

SEQ ID NO: 89196 - protein, 30 aa, Artificial Sequence
  Cyclic GFR-binding peptide
  MOD_RES (2), (4): Xaa is C or S
SXGXRDVVMGSMEGLIIQQKDNMIQMTINS

SEQ ID NO: 89197 - protein, 28 aa, Artificial Sequence
  Cyclic GFR-binding peptide
VVMNSMEGLIVNSSDDMIQVTINSLKTP

SEQ ID NO: 89198 - protein, 38 aa, Artificial Sequence; identical to SEQ ID NO: 36018
  Cyclic GFR-binding peptide
  MOD_RES (1), (3), (34), (35): Xaa is C or S

SEQ ID NO: 89199 - protein, 30 aa, Artificial Sequence
  Cyclic GFR-binding peptide
  MOD_RES (1), (1): Xaa is C or S
XSRVVMNSMEGLIVNSSDDMIQVTINSLKT

SEQ ID NO: 89200 - protein, 29 aa, Artificial Sequence
  Cyclic GFR-binding peptide
  MOD_RES (2), (2): Xaa is C or S
KXSKVVMSMEGLVKPTRGVMIQITINSLD

SEQ ID NO: 89201 - protein, 28 aa, Artificial Sequence
  Cyclic GFR-binding peptide
  MOD_RES (2), (2): Xaa is C or S
KXSKVVMSMEGLVKPTRGVMIQITINSL

SEQ ID NO: 89202 - protein, 26 aa, Artificial Sequence
  Cyclic GFR-binding peptide
MDSMEGIVVNNASDMIQITINSLRTP

SEQ ID NO: 89203 - protein, 38 aa, Artificial Sequence; identical to SEQ ID NO: 36024
  Cyclic GFR-binding peptide
  MOD_RES (1), (33), (34): Xaa is C or S

SEQ ID NO: 89204 - protein, 32 aa, Artificial Sequence
  Cyclic GFR-binding peptide
  MOD_RES (30), (31): Xaa is C or S
VVMDSMEGIVVNNASDMIQITINSLRTPVXXT

SEQ ID NO: 89205 - protein, 26 aa, Artificial Sequence
  Cyclic GFR-binding peptide
VIMSMEGILLVRGNDMIQMTINSTKV

SEQ ID NO: 89206 - protein, 35 aa, Artificial Sequence
  Cyclic GFR-binding peptide
  MOD_RES (29), (30): Xaa is C or S
VVMSMEGLVKPTRGVMIQITINSLDQPVXXPSASA

SEQ ID NO: 89207 - protein, 32 aa, Artificial Sequence; identical to SEQ ID NO: 36030
  Cyclic GFR-binding peptide
  MOD_RES (1), (1): Xaa is C or S

SEQ ID NO: 89208 - protein, 32 aa, Artificial Sequence; identical to SEQ ID NO: 36031
  Cyclic GFR-binding peptide
  MOD_RES (31), (32): Xaa is C or S

SEQ ID NO: 89209 - protein, 29 aa, Artificial Sequence
  Cyclic GFR-binding peptide
AAAAAAAAASMEGLIKPTKGIMIQITINS

SEQ ID NO: 89210 - protein, 31 aa, Artificial Sequence
  Cyclic GFR-binding peptide
  MOD_RES (2), (2): Xaa is C or S
GXEEVIMSMEGILLVRGNDMIQMTINSTKVP

SEQ ID NO: 89211 - protein, 34 aa, Artificial Sequence; identical to SEQ ID NO: 36032
  Cyclic GFR-binding peptide
  MOD_RES (32), (33): Xaa is C or S

SEQ ID NO: 89212 - protein, 28 aa, Artificial Sequence
  Cyclic GFR-binding peptide
EVVMDSMEGLVVNNASDMIQITINSLRT

SEQ ID NO: 89213 - protein, 29 aa, Artificial Sequence
  Cyclic GFR-binding peptide
AAAAAAAAASMEGLIVNSSDDMIQVTINS

SEQ ID NO: 89214 - protein, 31 aa, Artificial Sequence
  Cyclic GFR-binding peptide
  MOD_RES (2), (4): Xaa is C or S
HXGXSRVVMNSMEGLIVNSSDDMIQVTINSL

SEQ ID NO: 89215 - protein, 26 aa, Artificial Sequence
  Cyclic GFR-binding peptide
VVMDSMEGIVVNNAADMIQITINSLR

SEQ ID NO: 89216 - protein, 29 aa, Artificial Sequence
  Cyclic GFR-binding peptide
  MOD_RES (1), (1): Xaa is C or S
XSRVIMSMEGLVKPKRGVMIQITINSLAQ

SEQ ID NO: 89217 - protein, 37 aa, Artificial Sequence; identical to SEQ ID NO: 36040
  Cyclic GFR-binding peptide
  MOD_RES (2), (34), (35): Xaa is C or S

SEQ ID NO: 89218 - protein, 32 aa, Artificial Sequence; identical to SEQ ID NO: 36046
  Cyclic GFR-binding peptide
  MOD_RES (1), (32): Xaa is C or S

SEQ ID NO: 89219 - protein, 31 aa, Artificial Sequence; identical to SEQ ID NO: 36049
  Cyclic GFR-binding peptide
  MOD_RES (1), (1): Xaa is C or S

SEQ ID NO: 89220 - protein, 40 aa, Artificial Sequence; identical to SEQ ID NO: 36052
  Cyclic GFR-binding peptide
  MOD_RES (1), (3), (35), (36): Xaa is C or S

SEQ ID NO: 89221 - protein, 31 aa, Artificial Sequence
  Cyclic GFR-binding peptide
  MOD_RES (27), (28): Xaa is C or S
DSMEGLVVNNASDMIQITINSLRTPVXXTPP

SEQ ID NO: 89222 - protein, 30 aa, Artificial Sequence
  Cyclic GFR-binding peptide
  MOD_RES (26), (27): Xaa is C or S
SMEGLLLVRGNDMIQMTINSTKVPAXXTSP

SEQ ID NO: 89223 - protein, 34 aa, Artificial Sequence
  Cyclic GFR-binding peptide
  MOD_RES (30), (31): Xaa is C or S
KVVMSMEGLVKPTRGVMIQITINSLDQPVXXPSA

SEQ ID NO: 89224 - protein, 31 aa, Artificial Sequence
  Cyclic GFR-binding peptide
  MOD_RES (30), (31): Xaa is C or S
VVMDSMEGLVVNNASDMIQITINSLRTPVXX

SEQ ID NO: 89225 - protein, 33 aa, Artificial Sequence; identical to SEQ ID NO: 36061
  Cyclic GFR-binding peptide
  MOD_RES (1), (33): Xaa is C or S

SEQ ID NO: 89226 - protein, 38 aa, Artificial Sequence; identical to SEQ ID NO: 36063
  Cyclic GFR-binding peptide
  MOD_RES (1), (3), (35), (36): Xaa is C or S

SEQ ID NO: 89227 - protein, 29 aa, Artificial Sequence
  Cyclic GFR-binding peptide
  MOD_RES (2), (4): Xaa is C or S
LXGXEEVIMSMEGILLVRGNDMIQMTINS

SEQ ID NO: 89228 - protein, 21 aa, Artificial Sequence
  Cyclic GFR-binding peptide
SMEGLLLVRGNDMIQMTINST

SEQ ID NO: 89229 - protein, 24 aa, Artificial Sequence
  Cyclic GFR-binding peptide
DSMEGIVVNNASDMIQITINSLRT

SEQ ID NO: 89230 - protein, 34 aa, Artificial Sequence; identical to SEQ ID NO: 36064
  Cyclic GFR-binding peptide
  MOD_RES (1), (33), (34): Xaa is C or S

SEQ ID NO: 89231 - protein, 27 aa, Artificial Sequence
  Cyclic GFR-binding peptide
KVVMSMEGLVKPTRGVMIQITINSLDQ

SEQ ID NO: 89232 - protein, 36 aa, Artificial Sequence; identical to SEQ ID NO: 36065
  Cyclic GFR-binding peptide
  MOD_RES (2), (4), (36): Xaa is C or S

SEQ ID NO: 89233 - protein, 29 aa, Artificial Sequence
  Cyclic GFR-binding peptide
  MOD_RES (2), (4): Xaa is C or S
LXGXEEVIMSMEGLLLVRGNDMIQMTINS

SEQ ID NO: 89234 - protein, 36 aa, Artificial Sequence; identical to SEQ ID NO: 36069
  Cyclic GFR-binding peptide
  MOD_RES (1), (32), (33): Xaa is C or S

SEQ ID NO: 89235 - protein, 23 aa, Artificial Sequence
  Cyclic GFR-binding peptide
VMGSMEGIIIQQKDNMIQMTINS

SEQ ID NO: 89236 - protein, 33 aa, Artificial Sequence
  Cyclic GFR-binding peptide
  MOD_RES (29), (30): Xaa is C or S
VIMSMEGLIKPTKGIMIQITINSLDQSVXXPSA

SEQ ID NO: 89237 - protein, 30 aa, Artificial Sequence
  Cyclic GFR-binding peptide
  MOD_RES (1), (3): Xaa is C or S
XKXSRVIMSMEGLVKPKRGVMIQITINSLA

SEQ ID NO: 89238 - protein, 24 aa, Artificial Sequence
  Cyclic GFR-binding peptide
EVIMSMEGILLVRGNDMIQMTINS

SEQ ID NO: 89239 - protein, 31 aa, Artificial Sequence
  Cyclic GFR-binding peptide
  MOD_RES (2), (4): Xaa is C or S
RXGXAEVVMDSMEGLVVNNAADMIQITINSL

SEQ ID NO: 89240 - protein, 30 aa, Artificial Sequence; identical to SEQ ID NO: 2153
  Cyclic GFR-binding peptide

SEQ ID NO: 89241 - protein, 33 aa, Artificial Sequence; identical to SEQ ID NO: 36084
  Cyclic GFR-binding peptide
  MOD_RES (32), (33): Xaa is C or S

SEQ ID NO: 89242 - protein, 33 aa, Artificial Sequence
  Cyclic GFR-binding peptide
  MOD_RES (1), (3): Xaa is C or S
XGXRDVVMGSMEGLIIQQKDNMIQMTINSMKTP

SEQ ID NO: 89243 - protein, 28 aa, Artificial Sequence
  Cyclic GFR-binding peptide
  MOD_RES (26), (27): Xaa is C or S
SMEGIVVNNAADMIQITINSLRAPVXXS

SEQ ID NO: 89244 - protein, 38 aa, Artificial Sequence; identical to SEQ ID NO: 36086
  Cyclic GFR-binding peptide
  MOD_RES (1), (33), (34): Xaa is C or S

SEQ ID NO: 89245 - protein, 36 aa, Artificial Sequence; identical to SEQ ID NO: 36088
  Cyclic GFR-binding peptide
  MOD_RES (2), (4), (35), (36): Xaa is C or S

SEQ ID NO: 89246 - protein, 26 aa, Artificial Sequence
  Cyclic GFR-binding peptide
IMSMEGLLLVRGNDMIQMTINSTKVP

SEQ ID NO: 89247 - protein, 29 aa, Artificial Sequence
  Cyclic GFR-binding peptide
  MOD_RES (28), (29): Xaa is C or S
IMSMEGILLVRGNDMIQMTINSTKVPAXX

SEQ ID NO: 89248 - protein, 35 aa, Artificial Sequence
  Cyclic GFR-binding peptide
  MOD_RES (29), (30): Xaa is C or S
VMDSMEGIVVNNAADMIQITINSLRAPVXXSAPAA

SEQ ID NO: 89249 - protein, 26 aa, Artificial Sequence
  Cyclic GFR-binding peptide
MDSMEGIVVNNAADMIQITINSLRAP

SEQ ID NO: 89250 - protein, 30 aa, Artificial Sequence
  Cyclic GFR-binding peptide
  MOD_RES (26), (27): Xaa is C or S
SMEGLVVNNASDMIQITINSLRTPVXXTPP

SEQ ID NO: 89251 - protein, 24 aa, Artificial Sequence
  Cyclic GFR-binding peptide
MSMEGLVKPTRGVMIQITINSLDQ

SEQ ID NO: 89252 - protein, 24 aa, Artificial Sequence
  Cyclic GFR-binding peptide
MDSMEGLVVNNASDMIQITINSLR

SEQ ID NO: 89253 - protein, 35 aa, Artificial Sequence
  Cyclic GFR-binding peptide
  MOD_RES (29), (30): Xaa is C or S
VIMSMEGLVKPKRGVMIQITINSLAQPVXXPAASA

SEQ ID NO: 89254 - protein, 32 aa, Artificial Sequence; identical to SEQ ID NO: 36092
  Cyclic GFR-binding peptide
  MOD_RES (1), (32): Xaa is C or S

SEQ ID NO: 89255 - protein, 25 aa, Artificial Sequence
  Cyclic GFR-binding peptide
MSMEGLVKPTRGVMIQITINSLDQP

SEQ ID NO: 89256 - protein, 27 aa, Artificial Sequence
  Cyclic GFR-binding peptide
VVMGSMEGLIIQQKDNMIQMTINSMKT

SEQ ID NO: 89257 - protein, 31 aa, Artificial Sequence
  Cyclic GFR-binding peptide
  MOD_RES (28), (29): Xaa is C or S
IMSMEGLVKPKRGVMIQITINSLAQPVXXPA

SEQ ID NO: 89258 - protein, 31 aa, Artificial Sequence
  Cyclic GFR-binding peptide
  MOD_RES (27), (28): Xaa is C or S
MSMEGILLVRGNDMIQMTINSTKVPAXXTSP

SEQ ID NO: 89259 - protein, 34 aa, Artificial Sequence; identical to SEQ ID NO: 36098
  Cyclic GFR-binding peptide
  MOD_RES (1), (33), (34): Xaa is C or S

SEQ ID NO: 89260 - protein, 34 aa, Artificial Sequence; identical to SEQ ID NO: 36100
  Cyclic GFR-binding peptide
  MOD_RES (1), (33), (34): Xaa is C or S

SEQ ID NO: 89261 - protein, 32 aa, Artificial Sequence
  Cyclic GFR-binding peptide
  MOD_RES (30), (31): Xaa is C or S
VVMDSMEGLVVNNAADMIQITINSLRAPVXXS

SEQ ID NO: 89262 - protein, 33 aa, Artificial Sequence; identical to SEQ ID NO: 36101
  Cyclic GFR-binding peptide
  MOD_RES (1), (33): Xaa is C or S

SEQ ID NO: 89263 - protein, 22 aa, Artificial Sequence
  Cyclic GFR-binding peptide
IMSMEGLVKPKRGVMIQITINS

SEQ ID NO: 89264 - protein, 33 aa, Artificial Sequence; identical to SEQ ID NO: 36106
  Cyclic GFR-binding peptide
  MOD_RES (1), (33): Xaa is C or S

SEQ ID NO: 89265 - protein, 32 aa, Artificial Sequence; identical to SEQ ID NO: 36109
  Cyclic GFR-binding peptide
  MOD_RES (1), (1): Xaa is C or S

SEQ ID NO: 89266 - protein, 39 aa, Artificial Sequence; identical to SEQ ID NO: 36110
  Cyclic GFR-binding peptide
  MOD_RES (1), (3), (35), (36): Xaa is C or S

SEQ ID NO: 89267 - protein, 39 aa, Artificial Sequence; identical to SEQ ID NO: 36111
  Cyclic GFR-binding peptide
  MOD_RES (2), (4), (36), (37): Xaa is C or S

SEQ ID NO: 89268 - protein, 30 aa, Artificial Sequence
  Cyclic GFR-binding peptide
  MOD_RES (27), (28): Xaa is C or S
GSMEGLIIQQKDNMIQMTINSMKTPTXXPG

SEQ ID NO: 89269 - protein, 25 aa, Artificial Sequence
  Cyclic GFR-binding peptide
MGSMEGLIIQQKDNMIQMTINSMKT

SEQ ID NO: 89270 - protein, 33 aa, Artificial Sequence
  Cyclic GFR-binding peptide
  MOD_RES (28), (29): Xaa is C or S
IMSMEGILLVRGNDMIQMTINSTKVPAXXTSPV

SEQ ID NO: 89271 - protein, 31 aa, Artificial Sequence
  Cyclic GFR-binding peptide
  MOD_RES (27), (28): Xaa is C or S
GSMEGIIIQQKDNMIQMTINSMKTPTXXPGA

SEQ ID NO: 89272 - protein, 28 aa, Artificial Sequence
  Cyclic GFR-binding peptide
  MOD_RES (26), (27): Xaa is C or S
SMEGILLVRGNDMIQMTINSTKVPAXXT

SEQ ID NO: 89273 - protein, 37 aa, Artificial Sequence; identical to SEQ ID NO: 36116
  Cyclic GFR-binding peptide
  MOD_RES (32), (33): Xaa is C or S

SEQ ID NO: 89274 - protein, 25 aa, Artificial Sequence
  Cyclic GFR-binding peptide
VMSMEGLVKPTRGVMIQITINSLDQ

SEQ ID NO: 89275 - protein, 38 aa, Artificial Sequence; identical to SEQ ID NO: 36118
  Cyclic GFR-binding peptide
  MOD_RES (32), (33): Xaa is C or S

SEQ ID NO: 89276 - protein, 36 aa, Artificial Sequence
  Cyclic GFR-binding peptide
  MOD_RES (30), (31): Xaa is C or S
VVMNSMEGIIVNSSDDMIQVTINSLKTPAXXPKPVH

SEQ ID NO: 89277 - protein, 30 aa, Artificial Sequence
  Cyclic GFR-binding peptide
  MOD_RES (2), (2): Xaa is C or S
KXSKVIMSMEGLIKPTKGIMIQITINSLDQ

SEQ ID NO: 89278 - protein, 38 aa, Artificial Sequence; identical to SEQ ID NO: 36121
  Cyclic GFR-binding peptide
  MOD_RES (2), (4), (36), (37): Xaa is C or S

SEQ ID NO: 89279 - protein, 34 aa, Artificial Sequence; identical to SEQ ID NO: 36124
  Cyclic GFR-binding peptide
  MOD_RES (1), (33), (34): Xaa is C or S

SEQ ID NO: 89280 - protein, 29 aa, Artificial Sequence
  Cyclic GFR-binding peptide
VVMDSMEGIVVNNAADMIQITINSLRAPV

SEQ ID NO: 89281 - protein, 33 aa, Artificial Sequence; identical to SEQ ID NO: 36129
  Cyclic GFR-binding peptide
  MOD_RES (1), (33): Xaa is C or S

SEQ ID NO: 89282 - protein, 30 aa, Artificial Sequence
  Cyclic GFR-binding peptide
  MOD_RES (29), (30): Xaa is C or S
VIMSMEGLLLVRGNDMIQMTINSTKVPAXX

SEQ ID NO: 89283 - protein, 33 aa, Artificial Sequence
  Cyclic GFR-binding peptide
  MOD_RES (1), (3): Xaa is C or S
XGXSEVVMDSMEGLVVNNASDMIQITINSLRTP

SEQ ID NO: 89284 - protein, 37 aa, Artificial Sequence; identical to SEQ ID NO: 36130
  Cyclic GFR-binding peptide
  MOD_RES (1), (3), (34), (35): Xaa is C or S

SEQ ID NO: 89285 - protein, 35 aa, Artificial Sequence; identical to SEQ ID NO: 36133
  Cyclic GFR-binding peptide
  MOD_RES (2), (4): Xaa is C or S

SEQ ID NO: 89286 - protein, 25 aa, Artificial Sequence
  Cyclic GFR-binding peptide
KVVMSMEGLVKPTRGVMIQITINSL

SEQ ID NO: 89287 - protein, 34 aa, Artificial Sequence
  Cyclic GFR-binding peptide
  MOD_RES (28), (29): Xaa is C or S
IMSMEGLIKPTKGIMIQITINSLDQSVXXPSASA

SEQ ID NO: 89288 - protein, 27 aa, Artificial Sequence
  Cyclic GFR-binding peptide
VIMSMEGLIKPTKGIMIQITINSLDQS

SEQ ID NO: 89289 - protein, 29 aa, Artificial Sequence
  Cyclic GFR-binding peptide
  MOD_RES (1), (1): Xaa is C or S
XEEVIMSMEGLLLVRGNDMIQMTINSTKV

SEQ ID NO: 89290 - protein, 24 aa, Artificial Sequence
  Cyclic GFR-binding peptide
VVMDSMEGLVVNNASDMIQITINS

SEQ ID NO: 89291 - protein, 27 aa, Artificial Sequence
  Cyclic GFR-binding peptide
VVMDSMEGLVVNNASDMIQITINSLRT

SEQ ID NO: 89292 - protein, 25 aa, Artificial Sequence
  Cyclic GFR-binding peptide
VVMNSMEGLIVNSSDDMIQVTINSL

SEQ ID NO: 89293 - protein, 27 aa, Artificial Sequence
  Cyclic GFR-binding peptide
VMDSMEGIVVNNAADMIQITINSLRAP

SEQ ID NO: 89294 - protein, 29 aa, Artificial Sequence
  Cyclic GFR-binding peptide
EEVIMSMEGILLVRGNDMIQMTINSTKVP

SEQ ID NO: 89295 - protein, 26 aa, Artificial Sequence
  Cyclic GFR-binding peptide
MSMEGILLVRGNDMIQMTINSTKVPA

SEQ ID NO: 89296 - protein, 28 aa, Artificial Sequence
  Cyclic GFR-binding peptide
VIMSMEGLIKPTKGIMIQITINSLDQSV

SEQ ID NO: 89297 - protein, 33 aa, Artificial Sequence
  Cyclic GFR-binding peptide
  MOD_RES (2), (4): Xaa is C or S
SXGXRDVVMGSMEGIIIQQKDNMIQMTINSMKT

SEQ ID NO: 89298 - protein, 25 aa, Artificial Sequence
  Cyclic GFR-binding peptide
DSMEGIVVNNASDMIQITINSLRTP

SEQ ID NO: 89299 - protein, 30 aa, Artificial Sequence
  Cyclic GFR-binding peptide
  MOD_RES (1), (3): Xaa is C or S
XGXSEVVMDSMEGLVVNNASDMIQITINSL

SEQ ID NO: 89300 - protein, 39 aa, Artificial Sequence; identical to SEQ ID NO: 36146
  Cyclic GFR-binding peptide
  MOD_RES (1), (3), (35), (36): Xaa is C or S

SEQ ID NO: 89301 - protein, 34 aa, Artificial Sequence
  Cyclic GFR-binding peptide
  MOD_RES (28), (29): Xaa is C or S
VMSMEGLVKPTRGVMIQITINSLDQPVXXPSASA

SEQ ID NO: 89302 - protein, 37 aa, Artificial Sequence; identical to SEQ ID NO: 36151
  Cyclic GFR-binding peptide
  MOD_RES (31), (32): Xaa is C or S

SEQ ID NO: 89303 - protein, 28 aa, Artificial Sequence
  Cyclic GFR-binding peptide
VMDSMEGIVVNNAADMIQITINSLRAPV

SEQ ID NO: 89304 - protein, 31 aa, Artificial Sequence
  Cyclic GFR-binding peptide
  MOD_RES (2), (2): Xaa is C or S
KXSKVVMSMEGLVKPTRGVMIQITINSLDQP

SEQ ID NO: 89305 - protein, 37 aa, Artificial Sequence; identical to SEQ ID NO: 35079
  Cyclic GFR-binding peptide
  MOD_RES (31), (32): Xaa is C or S

SEQ ID NO: 89306 - protein, 30 aa, Artificial Sequence
  Cyclic GFR-binding peptide
  MOD_RES (28), (29): Xaa is C or S
MDSMEGIVVNNASDMIQITINSLRTPVXXT

SEQ ID NO: 89307 - protein, 27 aa, Artificial Sequence
  Cyclic GFR-binding peptide
  MOD_RES (27), (27): Xaa is C or S
GSMEGLIIQQKDNMIQMTINSMKTPTX

SEQ ID NO: 89308 - protein, 29 aa, Artificial Sequence
  Cyclic GFR-binding peptide
  MOD_RES (1), (3): Xaa is C or S
XGXRDVVMGSMEGLIIQQKDNMIQMTINS

SEQ ID NO: 89309 - protein, 29 aa, Artificial Sequence
  Cyclic GFR-binding peptide
  MOD_RES (29), (29): Xaa is C or S
VMDSMEGIVVNNASDMIQITINSLRTPVX

SEQ ID NO: 89310 - protein, 29 aa, Artificial Sequence
  Cyclic GFR-binding peptide
SEVVMDSMEGIVVNNASDMIQITINSLRT

SEQ ID NO: 89311 - protein, 31 aa, Artificial Sequence; identical to SEQ ID NO: 35090
  Cyclic GFR-binding peptide
  MOD_RES (31), (31): Xaa is C or S

SEQ ID NO: 89312 - protein, 23 aa, Artificial Sequence
  Cyclic GFR-binding peptide
MDSMEGLVVNNAADMIQITINSL

SEQ ID NO: 89313 - protein, 28 aa, Artificial Sequence
  Cyclic GFR-binding peptide
  MOD_RES (26), (27): Xaa is C or S
SMEGLIVNSSDDMIQVTINSLKTPAXXP

SEQ ID NO: 89314 - protein, 29 aa, Artificial Sequence
  Cyclic GFR-binding peptide
  MOD_RES (2), (2): Xaa is C or S
GXEEVIMSMEGLLLVRGNDMIQMTINSTK

SEQ ID NO: 89315 - protein, 30 aa, Artificial Sequence; identical to SEQ ID NO: 35092
  Cyclic GFR-binding peptide

SEQ ID NO: 89316 - protein, 28 aa, Artificial Sequence
  Cyclic GFR-binding peptide
EVVMDSMEGLVVNNAADMIQITINSLRA

SEQ ID NO: 89317 - protein, 36 aa, Artificial Sequence; identical to SEQ ID NO: 35093
  Cyclic GFR-binding peptide
  MOD_RES (2), (4), (35), (36): Xaa is C or S

SEQ ID NO: 89318 - protein, 35 aa, Artificial Sequence; identical to SEQ ID NO: 35094
  Cyclic GFR-binding peptide
  MOD_RES (1), (32), (33): Xaa is C or S

SEQ ID NO: 89319 - protein, 32 aa, Artificial Sequence; identical to SEQ ID NO: 35098
  Cyclic GFR-binding peptide
  MOD_RES (1), (1): Xaa is C or S

SEQ ID NO: 89320 - protein, 26 aa, Artificial Sequence
  Cyclic GFR-binding peptide
DVVMGSMEGIIIQQKDNMIQMTINSM

SEQ ID NO: 89321 - protein, 27 aa, Artificial Sequence
  Cyclic GFR-binding peptide
  MOD_RES (26), (27): Xaa is C or S
SMEGLVKPTRGVMIQITINSLDQPVXX

SEQ ID NO: 89322 - protein, 29 aa, Artificial Sequence
  Cyclic GFR-binding peptide
  MOD_RES (2), (4): Xaa is C or S
SXKXSRVIMSMEGLVKPKRGVMIQITINS

SEQ ID NO: 89323 - protein, 36 aa, Artificial Sequence; identical to SEQ ID NO: 35101
  Cyclic GFR-binding peptide
  MOD_RES (1), (3), (35), (36): Xaa is C or S

SEQ ID NO: 89324 - protein, 25 aa, Artificial Sequence
  Cyclic GFR-binding peptide
MNSMEGLIVNSSDDMIQVTINSLKT

SEQ ID NO: 89325 - protein, 29 aa, Artificial Sequence
  Cyclic GFR-binding peptide
  MOD_RES (26), (27): Xaa is C or S
SMEGIVVNNAADMIQITINSLRAPVXXSA

SEQ ID NO: 89326 - protein, 25 aa, Artificial Sequence
  Cyclic GFR-binding peptide
MDSMEGLVVNNASDMIQITINSLRT

SEQ ID NO: 89327 - protein, 37 aa, Artificial Sequence; identical to SEQ ID NO: 35104
  Cyclic GFR-binding peptide
  MOD_RES (2), (4), (35), (36): Xaa is C or S

SEQ ID NO: 89328 - protein, 29 aa, Artificial Sequence
  Cyclic GFR-binding peptide
EVIMSMEGILLVRGNDMIQMTINSTKVPA

SEQ ID NO: 89329 - protein, 32 aa, Artificial Sequence
  Cyclic GFR-binding peptide
  MOD_RES (27), (28): Xaa is C or S
NSMEGLIVNSSDDMIQVTINSLKTPAXXPKPV

SEQ ID NO: 89330 - protein, 34 aa, Artificial Sequence; identical to SEQ ID NO: 35112
  Cyclic GFR-binding peptide
  MOD_RES (1), (3), (34): Xaa is C or S

SEQ ID NO: 89331 - protein, 41 aa, Artificial Sequence; identical to SEQ ID NO: 35114
  Cyclic GFR-binding peptide
  MOD_RES (2), (4), (36), (37): Xaa is C or S

SEQ ID NO: 89332 - protein, 35 aa, Artificial Sequence; identical to SEQ ID NO: 35115
  Cyclic GFR-binding peptide
  MOD_RES (1), (3), (34), (35): Xaa is C or S

SEQ ID NO: 89333 - protein, 23 aa, Artificial Sequence
  Cyclic GFR-binding peptide
DSMEGLVVNNAADMIQITINSLR

SEQ ID NO: 89334 - protein, 28 aa, Artificial Sequence
  Cyclic GFR-binding peptide
  MOD_RES (2), (2): Xaa is C or S
GXSEVVMDSMEGIVVNNASDMIQITINS

SEQ ID NO: 89335 - protein, 35 aa, Artificial Sequence; identical to SEQ ID NO: 35119
  Cyclic GFR-binding peptide
  MOD_RES (1), (3), (35): Xaa is C or S

SEQ ID NO: 89336 - protein, 28 aa, Artificial Sequence
  Cyclic GFR-binding peptide
  MOD_RES (1), (1): Xaa is C or S
XSEVVMDSMEGLVVNNASDMIQITINSL

SEQ ID NO: 89337 - protein, 29 aa, Artificial Sequence
  Cyclic GFR-binding peptide
  MOD_RES (1), (3): Xaa is C or S
XGXEEVIMSMEGLLLVRGNDMIQMTINST

SEQ ID NO: 89338 - protein, 29 aa, Artificial Sequence
  Cyclic GFR-binding peptide
  MOD_RES (1), (3): Xaa is C or S
XKXSRVIMSMEGLVKPKRGVMIQITINSL

SEQ ID NO: 89339 - protein, 24 aa, Artificial Sequence
  Cyclic GFR-binding peptide
KVVMSMEGLVKPTRGVMIQITINS

SEQ ID NO: 89340 - protein, 31 aa, Artificial Sequence
  Cyclic GFR-binding peptide
  MOD_RES (28), (29): Xaa is C or S
MDSMEGLVVNNASDMIQITINSLRTPVXXTP

SEQ ID NO: 89341 - protein, 39 aa, Artificial Sequence; identical to SEQ ID NO: 35134
  Cyclic GFR-binding peptide
  MOD_RES (2), (34), (35): Xaa is C or S

SEQ ID NO: 89342 - protein, 35 aa, Artificial Sequence; identical to SEQ ID NO: 35135
  Cyclic GFR-binding peptide
  MOD_RES (1), (3), (35): Xaa is C or S

SEQ ID NO: 89343 - protein, 39 aa, Artificial Sequence; identical to SEQ ID NO: 35136
  Cyclic GFR-binding peptide
  MOD_RES (2), (34), (35): Xaa is C or S

SEQ ID NO: 89344 - protein, 30 aa, Artificial Sequence; identical to SEQ ID NO: 35139
  Cyclic GFR-binding peptide

SEQ ID NO: 89345 - protein, 29 aa, Artificial Sequence
  Cyclic GFR-binding peptide
  MOD_RES (27), (28): Xaa is C or S
MSMEGLLLVRGNDMIQMTINSTKVPAXXT

SEQ ID NO: 89346 - protein, 35 aa, Artificial Sequence; identical to SEQ ID NO: 35141
  Cyclic GFR-binding peptide
  MOD_RES (2), (34), (35): Xaa is C or S

SEQ ID NO: 89347 - protein, 23 aa, Artificial Sequence
  Cyclic GFR-binding peptide
SMEGIVVNNASDMIQITINSLRT

SEQ ID NO: 89348 - protein, 26 aa, Artificial Sequence
  Cyclic GFR-binding peptide
VMGSMEGLIIQQKDNMIQMTINSMKT

SEQ ID NO: 89349 - protein, 24 aa, Artificial Sequence
  Cyclic GFR-binding peptide
VMGSMEGLIIQQKDNMIQMTINSM

SEQ ID NO: 89350 - protein, 28 aa, Artificial Sequence
  Cyclic GFR-binding peptide
  MOD_RES (26), (27): Xaa is C or S
SMEGLVVNNASDMIQITINSLRTPVXXT

SEQ ID NO: 89351 - protein, 38 aa, Artificial Sequence; identical to SEQ ID NO: 35148
  Cyclic GFR-binding peptide
  MOD_RES (2), (4), (36), (37): Xaa is C or S

SEQ ID NO: 89352 - protein, 30 aa, Artificial Sequence
  Cyclic GFR-binding peptide
  MOD_RES (1), (1): Xaa is C or S
XSKVVMSMEGLVKPTRGVMIQITINSLDQP

SEQ ID NO: 89353 - protein, 31 aa, Artificial Sequence
  Cyclic GFR-binding peptide
  MOD_RES (1), (3): Xaa is C or S
XGXAEVVMDSMEGIVVNNAADMIQITINSLR

SEQ ID NO: 89354 - protein, 24 aa, Artificial Sequence
  Cyclic GFR-binding peptide
VMSMEGLVKPTRGVMIQITINSLD

SEQ ID NO: 89355 - protein, 34 aa, Artificial Sequence
  Cyclic GFR-binding peptide
  MOD_RES (30), (31): Xaa is C or S
EVIMSMEGLLLVRGNDMIQMTINSTKVPAXXTSP

SEQ ID NO: 89356 - protein, 28 aa, Artificial Sequence
  Cyclic GFR-binding peptide
SRVVMNSMEGLIVNSSDDMIQVTINSLK

SEQ ID NO: 89357 - protein, 29 aa, Artificial Sequence
  Cyclic GFR-binding peptide
  MOD_RES (29), (29): Xaa is C or S
VIMSMEGLIKPTKGIMIQITINSLDQSVX

SEQ ID NO: 89358 - protein, 25 aa, Artificial Sequence
  Cyclic GFR-binding peptide
EVVMDSMEGLVVNNASDMIQITINS

SEQ ID NO: 89359 - protein, 28 aa, Artificial Sequence
  Cyclic GFR-binding peptide
EEVIMSMEGLLLVRGNDMIQMTINSTKV

SEQ ID NO: 89360 - protein, 38 aa, Artificial Sequence; identical to SEQ ID NO: 35160
  Cyclic GFR-binding peptide
  MOD_RES (1), (3), (35), (36): Xaa is C or S

SEQ ID NO: 89361 - protein, 28 aa, Artificial Sequence
  Cyclic GFR-binding peptide
  MOD_RES (2), (2): Xaa is C or S
GXRDVVMGSMEGLIIQQKDNMIQMTINS

SEQ ID NO: 89362 - protein, 30 aa, Artificial Sequence
  Cyclic GFR-binding peptide
  MOD_RES (30), (30): Xaa is C or S
EVIMSMEGILLVRGNDMIQMTINSTKVPAX

SEQ ID NO: 89363 - protein, 27 aa, Artificial Sequence
  Cyclic GFR-binding peptide
  MOD_RES (2), (2): Xaa is C or S
GXEEVIMSMEGLLLVRGNDMIQMTINS

SEQ ID NO: 89364 - protein, 32 aa, Artificial Sequence
  Cyclic GFR-binding peptide
  MOD_RES (29), (30): Xaa is C or S
VMDSMEGLVVNNAADMIQITINSLRAPVXXSA

SEQ ID NO: 89365 - protein, 27 aa, Artificial Sequence
  Cyclic GFR-binding peptide
  MOD_RES (26), (27): Xaa is C or S
SMEGIVVNNASDMIQITINSLRTPVXX

SEQ ID NO: 89366 - protein, 40 aa, Artificial Sequence; identical to SEQ ID NO: 35161
  Cyclic GFR-binding peptide
  MOD_RES (1), (3), (35), (36): Xaa is C or S

SEQ ID NO: 89367 - protein, 26 aa, Artificial Sequence
  Cyclic GFR-binding peptide
SEVVMDSMEGLVVNNASDMIQITINS

SEQ ID NO: 89368 - protein, 38 aa, Artificial Sequence; identical to SEQ ID NO: 35162
  Cyclic GFR-binding peptide
  MOD_RES (2), (34), (35): Xaa is C or S

SEQ ID NO: 89369 - protein, 35 aa, Artificial Sequence; identical to SEQ ID NO: 35163
  Cyclic GFR-binding peptide
  MOD_RES (1), (3), (35): Xaa is C or S

SEQ ID NO: 89370 - protein, 25 aa, Artificial Sequence
  Cyclic GFR-binding peptide
SMEGLVVNNASDMIQITINSLRTPV

SEQ ID NO: 89371 - protein, 32 aa, Artificial Sequence
  Cyclic GFR-binding peptide
  MOD_RES (2), (2): Xaa is C or S
GXAEVVMDSMEGLVVNNAADMIQITINSLRAP

SEQ ID NO: 89372 - protein, 31 aa, Artificial Sequence
  Cyclic GFR-binding peptide
  MOD_RES (1), (3): Xaa is C or S
XKXSKVIMSMEGLIKPTKGIMIQITINSLDQ

SEQ ID NO: 89373 - protein, 23 aa, Artificial Sequence
  Cyclic GFR-binding peptide
SMEGLIIQQKDNMIQMTINSMKT

SEQ ID NO: 89374 - protein, 33 aa, Artificial Sequence
  Cyclic GFR-binding peptide
  MOD_RES (28), (29): Xaa is C or S
MGSMEGLIIQQKDNMIQMTINSMKTPTXXPGAS

SEQ ID NO: 89375 - protein, 39 aa, Artificial Sequence; identical to SEQ ID NO: 35173
  Cyclic GFR-binding peptide
  MOD_RES (1), (33), (34): Xaa is C or S

SEQ ID NO: 89376 - protein, 30 aa, Artificial Sequence
  Cyclic GFR-binding peptide
  MOD_RES (2), (4): Xaa is C or S
SXKXSKVVMSMEGLVKPTRGVMIQITINSL

SEQ ID NO: 89377 - protein, 20 aa, Artificial Sequence
  Cyclic GFR-binding peptide
SMEGIVVNNAADMIQITINS

SEQ ID NO: 89378 - protein, 36 aa, Artificial Sequence; identical to SEQ ID NO: 35175
  Cyclic GFR-binding peptide
  MOD_RES (1), (33), (34): Xaa is C or S

SEQ ID NO: 89379 - protein, 26 aa, Artificial Sequence
  Cyclic GFR-binding peptide
  MOD_RES (26), (26): Xaa is C or S
SMEGIVVNNAADMIQITINSLRAPVX

SEQ ID NO: 89380 - protein, 25 aa, Artificial Sequence
  Cyclic GFR-binding peptide
RVVMNSMEGLIVNSSDDMIQVTINS

SEQ ID NO: 89381 - protein, 29 aa, Artificial Sequence
  Cyclic GFR-binding peptide
EVVMDSMEGLVVNNAADMIQITINSLRAP

SEQ ID NO: 89382 - protein, 35 aa, Artificial Sequence; identical to SEQ ID NO: 35179
  Cyclic GFR-binding peptide
  MOD_RES (32), (33): Xaa is C or S

SEQ ID NO: 89383 - protein, 34 aa, Artificial Sequence
  Cyclic GFR-binding peptide
  MOD_RES (30), (31): Xaa is C or S
VVMDSMEGIVVNNASDMIQITINSLRTPVXXTPP

SEQ ID NO: 89384 - protein, 30 aa, Artificial Sequence
  Cyclic GFR-binding peptide
  MOD_RES (1), (3): Xaa is C or S
XGXRDVVMGSMEGLIIQQKDNMIQMTINSM

SEQ ID NO: 89385 - protein, 20 aa, Artificial Sequence
  Cyclic GFR-binding peptide
SMEGLVVNNASDMIQITINS

SEQ ID NO: 89386 - protein, 39 aa, Artificial Sequence; identical to SEQ ID NO: 35191
  Cyclic GFR-binding peptide
  MOD_RES (1), (33), (34): Xaa is C or S

SEQ ID NO: 89387 - protein, 38 aa, Artificial Sequence; identical to SEQ ID NO: 35193
  Cyclic GFR-binding peptide
  MOD_RES (1), (3), (34), (35): Xaa is C or S

SEQ ID NO: 89388 - protein, 36 aa, Artificial Sequence; identical to SEQ ID NO: 35194
  Cyclic GFR-binding peptide
  MOD_RES (1), (3), (35), (36): Xaa is C or S

SEQ ID NO: 89389 - protein, 31 aa, Artificial Sequence
  Cyclic GFR-binding peptide
  MOD_RES (30), (31): Xaa is C or S
VVMNSMEGLIVNSSDDMIQVTINSLKTPAXX

SEQ ID NO: 89390 - protein, 28 aa, Artificial Sequence
  Cyclic GFR-binding peptide
  MOD_RES (27), (28): Xaa is C or S
MSMEGLVKPKRGVMIQITINSLAQPVXX

SEQ ID NO: 89391 - protein, 36 aa, Artificial Sequence; identical to SEQ ID NO: 35195
  Cyclic GFR-binding peptide
  MOD_RES (1), (33), (34): Xaa is C or S

SEQ ID NO: 89392 - protein, 35 aa, Artificial Sequence; identical to SEQ ID NO: 35196
  Cyclic GFR-binding peptide
  MOD_RES (31), (32): Xaa is C or S

SEQ ID NO: 89393 - protein, 27 aa, Artificial Sequence
  Cyclic GFR-binding peptide
  MOD_RES (1), (1): Xaa is C or S
XSKVIMSMEGLIKPTKGIMIQITINSL

SEQ ID NO: 89394 - protein, 28 aa, Artificial Sequence
  Cyclic GFR-binding peptide
VMNSMEGLIVNSSDDMIQVTINSLKTPA

SEQ ID NO: 89395 - protein, 32 aa, Artificial Sequence
  Cyclic GFR-binding peptide
  MOD_RES (30), (31): Xaa is C or S
VVMDSMEGLVVNNASDMIQITINSLRTPVXXT

SEQ ID NO: 89396 - protein, 34 aa, Artificial Sequence
  Cyclic GFR-binding peptide
  MOD_RES (28), (29): Xaa is C or S
MNSMEGIIVNSSDDMIQVTINSLKTPAXXPKPVH

SEQ ID NO: 89397 - protein, 31 aa, Artificial Sequence
  Cyclic GFR-binding peptide
  MOD_RES (1), (1): Xaa is C or S
XSEVVMDSMEGLVVNNASDMIQITINSLRTP

SEQ ID NO: 89398 - protein, 34 aa, Artificial Sequence
  Cyclic GFR-binding peptide
  MOD_RES (30), (31): Xaa is C or S
VVMGSMEGLIIQQKDNMIQMTINSMKTPTXXPGA

SEQ ID NO: 89399 - protein, 31 aa, Artificial Sequence
  Cyclic GFR-binding peptide
  MOD_RES (1), (3): Xaa is C or S
XGXRDVVMGSMEGIIIQQKDNMIQMTINSMK

SEQ ID NO: 89400 - protein, 25 aa, Artificial Sequence
  Cyclic GFR-binding peptide
VVMSMEGLVKPTRGVMIQITINSLD

SEQ ID NO: 89401 - protein, 34 aa, Artificial Sequence; identical to SEQ ID NO: 35206
  Cyclic GFR-binding peptide
  MOD_RES (1), (3), (34): Xaa is C or S

SEQ ID NO: 89402 - protein, 24 aa, Artificial Sequence
  Cyclic GFR-binding peptide
VVMDSMEGLVVNNAADMIQITINS

SEQ ID NO: 89403 - protein, 27 aa, Artificial Sequence
  Cyclic GFR-binding peptide
  MOD_RES (1), (1): Xaa is C or S
XRDVVMGSMEGLIIQQKDNMIQMTINS

SEQ ID NO: 89404 - protein, 42 aa, Artificial Sequence; identical to SEQ ID NO: 35212
  Cyclic GFR-binding peptide
  MOD_RES (2), (4), (36), (37): Xaa is C or S

SEQ ID NO: 89405 - protein, 29 aa, Artificial Sequence
  Cyclic GFR-binding peptide
SRVIMSMEGLVKPKRGVMIQITINSLAQP

SEQ ID NO: 89406 - protein, 27 aa, Artificial Sequence
  Cyclic GFR-binding peptide
RVIMSMEGLVKPKRGVMIQITINSLAQ

SEQ ID NO: 89407 - protein, 29 aa, Artificial Sequence
  Cyclic GFR-binding peptide
  MOD_RES (27), (28): Xaa is C or S
DSMEGIVVNNASDMIQITINSLRTPVXXT

SEQ ID NO: 89408 - protein, 26 aa, Artificial Sequence
  Cyclic GFR-binding peptide
GSMEGIIIQQKDNMIQMTINSMKTPT

SEQ ID NO: 89409 - protein, 27 aa, Artificial Sequence
  Cyclic GFR-binding peptide
IMSMEGILLVRGNDMIQMTINSTKVPA

SEQ ID NO: 89410 - protein, 30 aa, Artificial Sequence
  Cyclic GFR-binding peptide
  MOD_RES (30), (30): Xaa is C or S
KVIMSMEGLIKPTKGIMIQITINSLDQSVX

SEQ ID NO: 89411 - protein, 34 aa, Artificial Sequence; identical to SEQ ID NO: 35226
  Cyclic GFR-binding peptide
  MOD_RES (1), (33), (34): Xaa is C or S

SEQ ID NO: 89412 - protein, 27 aa, Artificial Sequence
  Cyclic GFR-binding peptide
  MOD_RES (26), (27): Xaa is C or S
SMEGLLLVRGNDMIQMTINSTKVPAXX

SEQ ID NO: 89413 - protein, 32 aa, Artificial Sequence
  Cyclic GFR-binding peptide
  MOD_RES (27), (28): Xaa is C or S
DSMEGLVVNNASDMIQITINSLRTPVXXTPPT

SEQ ID NO: 89414 - protein, 41 aa, Artificial Sequence; identical to SEQ ID NO: 35232
  Cyclic GFR-binding peptide
  MOD_RES (2), (4), (35), (36): Xaa is C or S

SEQ ID NO: 89415 - protein, 22 aa, Artificial Sequence
  Cyclic GFR-binding peptide
DSMEGIVVNNASDMIQITINSL

SEQ ID NO: 89416 - protein, 31 aa, Artificial Sequence
  Cyclic GFR-binding peptide
  MOD_RES (27), (28): Xaa is C or S
DSMEGIVVNNAADMIQITINSLRAPVXXSAP

SEQ ID NO: 89417 - protein, 36 aa, Artificial Sequence
  Cyclic GFR-binding peptide
  MOD_RES (30), (31): Xaa is C or S
VVMDSMEGLVVNNASDMIQITINSLRTPVXXTPPTS

SEQ ID NO: 89418 - protein, 25 aa, Artificial Sequence
  Cyclic GFR-binding peptide
MSMEGLVKPKRGVMIQITINSLAQP

SEQ ID NO: 89419 - protein, 31 aa, Artificial Sequence
  Cyclic GFR-binding peptide
  MOD_RES (1), (1): Xaa is C or S
XRDVVMGSMEGLIIQQKDNMIQMTINSMKTP

SEQ ID NO: 89420 - protein, 20 aa, Artificial Sequence
  Cyclic GFR-binding peptide
SMEGLVKPTRGVMIQITINS

SEQ ID NO: 89421 - protein, 32 aa, Artificial Sequence
  Cyclic GFR-binding peptide
  MOD_RES (30), (31): Xaa is C or S
EVIMSMEGLLLVRGNDMIQMTINSTKVPAXXT

SEQ ID NO: 89422 - protein, 27 aa, Artificial Sequence
  Cyclic GFR-binding peptide
VIMSMEGLVKPKRGVMIQITINSLAQP

SEQ ID NO: 89423 - protein, 33 aa, Artificial Sequence; identical to SEQ ID NO: 35248
  Cyclic GFR-binding peptide
  MOD_RES (2), (2): Xaa is C or S

SEQ ID NO: 89424 - protein, 26 aa, Artificial Sequence
  Cyclic GFR-binding peptide
  MOD_RES (26), (26): Xaa is C or S
SMEGLVVNNASDMIQITINSLRTPVX

SEQ ID NO: 89425 - protein, 27 aa, Artificial Sequence
  Cyclic GFR-binding peptide
SKVIMSMEGLIKPTKGIMIQITINSLD

SEQ ID NO: 89426 - protein, 32 aa, Artificial Sequence
  Cyclic GFR-binding peptide
  MOD_RES (29), (30): Xaa is C or S
VVMSMEGLVKPTRGVMIQITINSLDQPVXXPS

SEQ ID NO: 89427 - protein, 36 aa, Artificial Sequence; identical to SEQ ID NO: 35255
  Cyclic GFR-binding peptide
  MOD_RES (31), (32): Xaa is C or S

SEQ ID NO: 89428 - protein, 36 aa, Artificial Sequence; identical to SEQ ID NO: 35256
  Cyclic GFR-binding peptide
  MOD_RES (1), (32), (33): Xaa is C or S

SEQ ID NO: 89429 - protein, 31 aa, Artificial Sequence
  Cyclic GFR-binding peptide
  MOD_RES (26), (27): Xaa is C or S
SMEGLIKPTKGIMIQITINSLDQSVXXPSAS

SEQ ID NO: 89430 - protein, 28 aa, Artificial Sequence
  Cyclic GFR-binding peptide
SRVIMSMEGLVKPKRGVMIQITINSLAQ

SEQ ID NO: 89431 - protein, 23 aa, Artificial Sequence
  Cyclic GFR-binding peptide
VMDSMEGIVVNNAADMIQITINS

SEQ ID NO: 89432 - protein, 35 aa, Artificial Sequence; identical to SEQ ID NO: 35265
  Cyclic GFR-binding peptide
  MOD_RES (2), (34), (35): Xaa is C or S

SEQ ID NO: 89433 - protein, 22 aa, Artificial Sequence
  Cyclic GFR-binding peptide
DSMEGLVVNNASDMIQITINSL

SEQ ID NO: 89434 - protein, 30 aa, Artificial Sequence
  Cyclic GFR-binding peptide
  MOD_RES (1), (1): Xaa is C or S
XEEVIMSMEGLLLVRGNDMIQMTINSTKVP

SEQ ID NO: 89435 - protein, 31 aa, Artificial Sequence
  Cyclic GFR-binding peptide
  MOD_RES (2), (4): Xaa is C or S
RXGXAEVVMDSMEGIVVNNAADMIQITINSL

SEQ ID NO: 89436 - protein, 29 aa, Artificial Sequence
  Cyclic GFR-binding peptide
  MOD_RES (1), (3): Xaa is C or S
XGXAEVVMDSMEGLVVNNAADMIQITINS

SEQ ID NO: 89437 - protein, 23 aa, Artificial Sequence
  Cyclic GFR-binding peptide
VIMSMEGLVKPKRGVMIQITINS

SEQ ID NO: 89438 - protein, 31 aa, Artificial Sequence; identical to SEQ ID NO: 35271
  Cyclic GFR-binding peptide

SEQ ID NO: 89439 - protein, 24 aa, Artificial Sequence
  Cyclic GFR-binding peptide
IMSMEGLLLVRGNDMIQMTINSTK

SEQ ID NO: 89440 - protein, 37 aa, Artificial Sequence; identical to SEQ ID NO: 35274
  Cyclic GFR-binding peptide
  MOD_RES (1), (32), (33): Xaa is C or S

SEQ ID NO: 89441 - protein, 31 aa, Artificial Sequence
  Cyclic GFR-binding peptide
  MOD_RES (2), (2): Xaa is C or S
KXSKVIMSMEGLIKPTKGIMIQITINSLDQS

SEQ ID NO: 89442 - protein, 38 aa, Artificial Sequence; identical to SEQ ID NO: 35277
  Cyclic GFR-binding peptide
  MOD_RES (1), (3), (35), (36): Xaa is C or S

SEQ ID NO: 89443 - protein, 39 aa, Artificial Sequence; identical to SEQ ID NO: 35281
  Cyclic GFR-binding peptide
  MOD_RES (1), (33), (34): Xaa is C or S

SEQ ID NO: 89444 - protein, 25 aa, Artificial Sequence
  Cyclic GFR-binding peptide
VVMGSMEGLIIQQKDNMIQMTINSM

SEQ ID NO: 89445 - protein, 32 aa, Artificial Sequence
  Cyclic GFR-binding peptide
  MOD_RES (26), (27): Xaa is C or S
SMEGLVKPTRGVMIQITINSLDQPVXXPSASA

SEQ ID NO: 89446 - protein, 27 aa, Artificial Sequence
  Cyclic GFR-binding peptide
RVVMNSMEGLIVNSSDDMIQVTINSLK

SEQ ID NO: 89447 - protein, 25 aa, Artificial Sequence
  Cyclic GFR-binding peptide
EVIMSMEGILLVRGNDMIQMTINST

SEQ ID NO: 89448 - protein, 30 aa, Artificial Sequence
  Cyclic GFR-binding peptide
RDVVMGSMEGLIIQQKDNMIQMTINSMKTP

SEQ ID NO: 89449 - protein, 32 aa, Artificial Sequence; identical to SEQ ID NO: 35289
  Cyclic GFR-binding peptide
  MOD_RES (32), (32): Xaa is C or S

SEQ ID NO: 89450 - protein, 32 aa, Artificial Sequence; identical to SEQ ID NO: 35292
  Cyclic GFR-binding peptide
  MOD_RES (2), (2): Xaa is C or S

SEQ ID NO: 89451 - protein, 28 aa, Artificial Sequence
  Cyclic GFR-binding peptide
  MOD_RES (27), (28): Xaa is C or S
NSMEGLIVNSSDDMIQVTINSLKTPAXX

SEQ ID NO: 89452 - protein, 35 aa, Artificial Sequence; identical to SEQ ID NO: 35295
  Cyclic GFR-binding peptide
  MOD_RES (2), (33), (34): Xaa is C or S

SEQ ID NO: 89453 - protein, 33 aa, Artificial Sequence; identical to SEQ ID NO: 35296
  Cyclic GFR-binding peptide
  MOD_RES (31), (32): Xaa is C or S

SEQ ID NO: 89454 - protein, 28 aa, Artificial Sequence
  Cyclic GFR-binding peptide
  MOD_RES (2), (2): Xaa is C or S
GXEEVIMSMEGILLVRGNDMIQMTINST

SEQ ID NO: 89455 - protein, 32 aa, Artificial Sequence
  Cyclic GFR-binding peptide
  MOD_RES (27), (28): Xaa is C or S
DSMEGIVVNNASDMIQITINSLRTPVXXTPPT

SEQ ID NO: 89456 - protein, 37 aa, Artificial Sequence; identical to SEQ ID NO: 35301
  Cyclic GFR-binding peptide
  MOD_RES (2), (34), (35): Xaa is C or S

SEQ ID NO: 89457 - protein, 32 aa, Artificial Sequence
  Cyclic GFR-binding peptide
  MOD_RES (2), (4): Xaa is C or S
RXGXAEVVMDSMEGIVVNNAADMIQITINSLR

SEQ ID NO: 89458 - protein, 33 aa, Artificial Sequence; identical to SEQ ID NO: 35303
  Cyclic GFR-binding peptide
  MOD_RES (2), (33): Xaa is C or S

SEQ ID NO: 89459 - protein, 23 aa, Artificial Sequence
  Cyclic GFR-binding peptide
MDSMEGIVVNNASDMIQITINSL

SEQ ID NO: 89460 - protein, 34 aa, Artificial Sequence; identical to SEQ ID NO: 35306
  Cyclic GFR-binding peptide
  MOD_RES (1), (32), (33): Xaa is C or S

SEQ ID NO: 89461 - protein, 21 aa, Artificial Sequence
  Cyclic GFR-binding peptide
SMEGLVKPTRGVMIQITINSL

SEQ ID NO: 89462 - protein, 33 aa, Artificial Sequence; identical to SEQ ID NO: 35307
  Cyclic GFR-binding peptide
  MOD_RES (32), (33): Xaa is C or S

SEQ ID NO: 89463 - protein, 39 aa, Artificial Sequence; identical to SEQ ID NO: 35308
  Cyclic GFR-binding peptide
  MOD_RES (2), (4), (36), (37): Xaa is C or S

SEQ ID NO: 89464 - protein, 29 aa, Artificial Sequence
  Cyclic GFR-binding peptide
  MOD_RES (29), (29): Xaa is C or S
VMGSMEGIIIQQKDNMIQMTINSMKTPTX

SEQ ID NO: 89465 - protein, 29 aa, Artificial Sequence
  Cyclic GFR-binding peptide
  MOD_RES (1), (1): Xaa is C or S
XSEVVMDSMEGLVVNNASDMIQITINSLR

SEQ ID NO: 89466 - protein, 37 aa, Artificial Sequence; identical to SEQ ID NO: 35311
  Cyclic GFR-binding peptide
  MOD_RES (2), (4), (36), (37): Xaa is C or S

SEQ ID NO: 89467 - protein, 31 aa, Artificial Sequence
  Cyclic GFR-binding peptide
  MOD_RES (26), (27): Xaa is C or S
SMEGIIIQQKDNMIQMTINSMKTPTXXPGAS

SEQ ID NO: 89468 - protein, 31 aa, Artificial Sequence
  Cyclic GFR-binding peptide
  MOD_RES (2), (2): Xaa is C or S
GXSRVVMNSMEGLIVNSSDDMIQVTINSLKT

SEQ ID NO: 89469 - protein, 26 aa, Artificial Sequence
  Cyclic GFR-binding peptide
EVIMSMEGLLLVRGNDMIQMTINSTK

SEQ ID NO: 89470 - protein, 26 aa, Artificial Sequence
  Cyclic GFR-binding peptide
VIMSMEGLLLVRGNDMIQMTINSTKV

SEQ ID NO: 89471 - protein, 27 aa, Artificial Sequence
  Cyclic GFR-binding peptide
  MOD_RES (26), (27): Xaa is C or S
SMEGLIKPTKGIMIQITINSLDQSVXX

SEQ ID NO: 89472 - protein, 28 aa, Artificial Sequence
  Cyclic GFR-binding peptide
  MOD_RES (1), (3): Xaa is C or S
XKXSRVIMSMEGLVKPKRGVMIQITINS

SEQ ID NO: 89473 - protein, 30 aa, Artificial Sequence
  Cyclic GFR-binding peptide
  MOD_RES (28), (29): Xaa is C or S
IMSMEGLLLVRGNDMIQMTINSTKVPAXXT

SEQ ID NO: 89474 - protein, 41 aa, Artificial Sequence; identical to SEQ ID NO: 35316
  Cyclic GFR-binding peptide
  MOD_RES (2), (4), (36), (37): Xaa is C or S

SEQ ID NO: 89475 - protein, 33 aa, Artificial Sequence; identical to SEQ ID NO: 35317
  Cyclic GFR-binding peptide
  MOD_RES (1), (33): Xaa is C or S

SEQ ID NO: 89476 - protein, 39 aa, Artificial Sequence; identical to SEQ ID NO: 35318
  Cyclic GFR-binding peptide
  MOD_RES (2), (4), (35), (36): Xaa is C or S

SEQ ID NO: 89477 - protein, 33 aa, Artificial Sequence
  Cyclic GFR-binding peptide
  MOD_RES (29), (30): Xaa is C or S
VIMSMEGILLVRGNDMIQMTINSTKVPAXXTSP

SEQ ID NO: 89478 - protein, 32 aa, Artificial Sequence
  Cyclic GFR-binding peptide
  MOD_RES (2), (4): Xaa is C or S
RXGXSEVVMDSMEGIVVNNASDMIQITINSLR

SEQ ID NO: 89479 - protein, 32 aa, Artificial Sequence
  Cyclic GFR-binding peptide
  MOD_RES (26), (27): Xaa is C or S
SMEGLLLVRGNDMIQMTINSTKVPAXXTSPVR

SEQ ID NO: 89480 - protein, 35 aa, Artificial Sequence; identical to SEQ ID NO: 35319
  Cyclic GFR-binding peptide
  MOD_RES (1), (33), (34): Xaa is C or S

SEQ ID NO: 89481 - protein, 34 aa, Artificial Sequence
  Cyclic GFR-binding peptide
  MOD_RES (30), (31): Xaa is C or S
VVMDSMEGIVVNNAADMIQITINSLRAPVXXSAP

SEQ ID NO: 89482 - protein, 27 aa, Artificial Sequence
  Cyclic GFR-binding peptide
  MOD_RES (2), (2): Xaa is C or S
KXSKVVMSMEGLVKPTRGVMIQITINS

SEQ ID NO: 89483 - protein, 26 aa, Artificial Sequence
  Cyclic GFR-binding peptide
VIMSMEGLIKPTKGIMIQITINSLDQ

SEQ ID NO: 89484 - protein, 33 aa, Artificial Sequence
  Cyclic GFR-binding peptide
  MOD_RES (28), (29): Xaa is C or S
IMSMEGLIKPTKGIMIQITINSLDQSVXXPSAS

SEQ ID NO: 89485 - protein, 38 aa, Artificial Sequence; identical to SEQ ID NO: 35330
  Cyclic GFR-binding peptide
  MOD_RES (32), (33): Xaa is C or S

SEQ ID NO: 89486 - protein, 36 aa, Artificial Sequence; identical to SEQ ID NO: 35331
  Cyclic GFR-binding peptide
  MOD_RES (31), (32): Xaa is C or S

SEQ ID NO: 89487 - protein, 29 aa, Artificial Sequence
  Cyclic GFR-binding peptide
  MOD_RES (27), (28): Xaa is C or S
GSMEGIIIQQKDNMIQMTINSMKTPTXXP

SEQ ID NO: 89488 - protein, 33 aa, Artificial Sequence; identical to SEQ ID NO: 35335
  Cyclic GFR-binding peptide
  MOD_RES (31), (32): Xaa is C or S

SEQ ID NO: 89489 - protein, 24 aa, Artificial Sequence
  Cyclic GFR-binding peptide
MGSMEGLIIQQKDNMIQMTINSMK

SEQ ID NO: 89490 - protein, 24 aa, Artificial Sequence
  Cyclic GFR-binding peptide
VMDSMEGIVVNNASDMIQITINSL

SEQ ID NO: 89491 - protein, 39 aa, Artificial Sequence; identical to SEQ ID NO: 35338
  Cyclic GFR-binding peptide
  MOD_RES (1), (3), (35), (36): Xaa is C or S

SEQ ID NO: 89492 - protein, 33 aa, Artificial Sequence
  Cyclic GFR-binding peptide
  MOD_RES (28), (29): Xaa is C or S
VMSMEGLVKPTRGVMIQITINSLDQPVXXPSAS

SEQ ID NO: 89493 - protein, 26 aa, Artificial Sequence
  Cyclic GFR-binding peptide
MSMEGLVKPTRGVMIQITINSLDQPV

SEQ ID NO: 89494 - protein, 22 aa, Artificial Sequence
  Cyclic GFR-binding peptide
GSMEGLIIQQKDNMIQMTINSM

SEQ ID NO: 89495 - protein, 32 aa, Artificial Sequence; identical to SEQ ID NO: 35344
  Cyclic GFR-binding peptide
  MOD_RES (31), (32): Xaa is C or S

SEQ ID NO: 89496 - protein, 34 aa, Artificial Sequence; identical to SEQ ID NO: 35345
  Cyclic GFR-binding peptide
  MOD_RES (2), (33), (34): Xaa is C or S

SEQ ID NO: 89497 - protein, 36 aa, Artificial Sequence; identical to SEQ ID NO: 35346
  Cyclic GFR-binding peptide
  MOD_RES (1), (3), (35), (36): Xaa is C or S

SEQ ID NO: 89498 - protein, 27 aa, Artificial Sequence
  Cyclic GFR-binding peptide
  MOD_RES (1), (1): Xaa is C or S
XSRVVMNSMEGLIVNSSDDMIQVTINS

SEQ ID NO: 89499 - protein, 34 aa, Artificial Sequence
  Cyclic GFR-binding peptide
  MOD_RES (28), (29): Xaa is C or S
MDSMEGIVVNNASDMIQITINSLRTPVXXTPPTS

SEQ ID NO: 89500 - protein, 29 aa, Artificial Sequence
  Cyclic GFR-binding peptide
  MOD_RES (1), (1): Xaa is C or S
XRDVVMGSMEGLIIQQKDNMIQMTINSMK

SEQ ID NO: 89501 - protein, 34 aa, Artificial Sequence
  Cyclic GFR-binding peptide
  MOD_RES (2), (4): Xaa is C or S
RXGXSEVVMDSMEGLVVNNASDMIQITINSLRTP

SEQ ID NO: 89502 - protein, 35 aa, Artificial Sequence; identical to SEQ ID NO: 35348
  Cyclic GFR-binding peptide
  MOD_RES (2), (4), (35): Xaa is C or S

SEQ ID NO: 89503 - protein, 41 aa, Artificial Sequence; identical to SEQ ID NO: 35350
  Cyclic GFR-binding peptide
  MOD_RES (1), (3), (35), (36): Xaa is C or S

SEQ ID NO: 89504 - protein, 36 aa, Artificial Sequence; identical to SEQ ID NO: 35354
  Cyclic GFR-binding peptide
  MOD_RES (2), (33), (34): Xaa is C or S

SEQ ID NO: 89505 - protein, 30 aa, Artificial Sequence
  Cyclic GFR-binding peptide
  MOD_RES (28), (29): Xaa is C or S
IMSMEGLIKPTKGIMIQITINSLDQSVXXP

SEQ ID NO: 89506 - protein, 35 aa, Artificial Sequence
  Cyclic GFR-binding peptide
  MOD_RES (30), (31): Xaa is C or S
VVMGSMEGIIIQQKDNMIQMTINSMKTPTXXPGAS

SEQ ID NO: 89507 - protein, 23 aa, Artificial Sequence
  Cyclic GFR-binding peptide
VMSMEGLVKPTRGVMIQITINSL

SEQ ID NO: 89508 - protein, 35 aa, Artificial Sequence; identical to SEQ ID NO: 35369
  Cyclic GFR-binding peptide
  MOD_RES (31), (32): Xaa is C or S

SEQ ID NO: 89509 - protein, 30 aa, Artificial Sequence
  Cyclic GFR-binding peptide
  MOD_RES (29), (30): Xaa is C or S
VMDSMEGIVVNNAADMIQITINSLRAPVXX

SEQ ID NO: 89510 - protein, 34 aa, Artificial Sequence
  Cyclic GFR-binding peptide
  MOD_RES (2), (4): Xaa is C or S
RXGXAEVVMDSMEGLVVNNAADMIQITINSLRAP

SEQ ID NO: 89511 - protein, 34 aa, Artificial Sequence
  Cyclic GFR-binding peptide
  MOD_RES (2), (4): Xaa is C or S
RXGXAEVVMDSMEGIVVNNAADMIQITINSLRAP

SEQ ID NO: 89512 - protein, 27 aa, Artificial Sequence
  Cyclic GFR-binding peptide
SRVIMSMEGLVKPKRGVMIQITINSLA

SEQ ID NO: 89513 - protein, 27 aa, Artificial Sequence
  Cyclic GFR-binding peptide
AEVVMDSMEGLVVNNAADMIQITINSL

SEQ ID NO: 89514 - protein, 34 aa, Artificial Sequence; identical to SEQ ID NO: 35377
  Cyclic GFR-binding peptide
  MOD_RES (31), (32): Xaa is C or S

SEQ ID NO: 89515 - protein, 39 aa, Artificial Sequence; identical to SEQ ID NO: 35379
  Cyclic GFR-binding peptide
  MOD_RES (2), (33), (34): Xaa is C or S

SEQ ID NO: 89516 - protein, 29 aa, Artificial Sequence
  Cyclic GFR-binding peptide
AAAAAAAAASMEGIVVNNASDMIQITINS

SEQ ID NO: 89517 - protein, 37 aa, Artificial Sequence; identical to SEQ ID NO: 35381
  Cyclic GFR-binding peptide
  MOD_RES (32), (33): Xaa is C or S

SEQ ID NO: 89518 - protein, 36 aa, Artificial Sequence; identical to SEQ ID NO: 35383
  Cyclic GFR-binding peptide
  MOD_RES (2), (34), (35): Xaa is C or S

SEQ ID NO: 89519 - protein, 31 aa, Artificial Sequence; identical to SEQ ID NO: 35387
  Cyclic GFR-binding peptide
  MOD_RES (31), (31): Xaa is C or S

SEQ ID NO: 89520 - protein, 36 aa, Artificial Sequence; identical to SEQ ID NO: 35392
  Cyclic GFR-binding peptide
  MOD_RES (31), (32): Xaa is C or S

SEQ ID NO: 89521 - protein, 25 aa, Artificial Sequence
  Cyclic GFR-binding peptide
EVVMDSMEGLVVNNAADMIQITINS

SEQ ID NO: 89522 - protein, 31 aa, Artificial Sequence
  Cyclic GFR-binding peptide
  MOD_RES (28), (29): Xaa is C or S
IMSMEGLIKPTKGIMIQITINSLDQSVXXPS

SEQ ID NO: 89523 - protein, 32 aa, Artificial Sequence; identical to SEQ ID NO: 35393
  Cyclic GFR-binding peptide
  MOD_RES (32), (32): Xaa is C or S

SEQ ID NO: 89524 - protein, 30 aa, Artificial Sequence
  Cyclic GFR-binding peptide
RDVVMGSMEGIIIQQKDNMIQMTINSMKTP

SEQ ID NO: 89525 - protein, 35 aa, Artificial Sequence
  Cyclic GFR-binding peptide
  MOD_RES (29), (30): Xaa is C or S
VMDSMEGIVVNNASDMIQITINSLRTPVXXTPPTS

SEQ ID NO: 89526 - protein, 34 aa, Artificial Sequence; identical to SEQ ID NO: 35394
  Cyclic GFR-binding peptide
  MOD_RES (1), (3): Xaa is C or S

SEQ ID NO: 89527 - protein, 37 aa, Artificial Sequence; identical to SEQ ID NO: 35397
  Cyclic GFR-binding peptide
  MOD_RES (1), (3), (35), (36): Xaa is C or S

SEQ ID NO: 89528 - protein, 38 aa, Artificial Sequence; identical to SEQ ID NO: 35398
  Cyclic GFR-binding peptide
  MOD_RES (1), (33), (34): Xaa is C or S

SEQ ID NO: 89529 - protein, 34 aa, Artificial Sequence; identical to SEQ ID NO: 35399
  Cyclic GFR-binding peptide
  MOD_RES (31), (32): Xaa is C or S

SEQ ID NO: 89530 - protein, 27 aa, Artificial Sequence
  Cyclic GFR-binding peptide
VMDSMEGLVVNNASDMIQITINSLRTP

SEQ ID NO: 89531 - protein, 30 aa, Artificial Sequence
  Cyclic GFR-binding peptide
  MOD_RES (26), (27): Xaa is C or S
SMEGILLVRGNDMIQMTINSTKVPAXXTSP

SEQ ID NO: 89532 - protein, 22 aa, Artificial Sequence
  Cyclic GFR-binding peptide
VMSMEGLVKPTRGVMIQITINS

SEQ ID NO: 89533 - protein, 29 aa, Artificial Sequence
  Cyclic GFR-binding peptide
DVVMGSMEGIIIQQKDNMIQMTINSMKTP

SEQ ID NO: 89534 - protein, 29 aa, Artificial Sequence
  Cyclic GFR-binding peptide
  MOD_RES (28), (29): Xaa is C or S
MDSMEGIVVNNAADMIQITINSLRAPVXX

SEQ ID NO: 89535 - protein, 34 aa, Artificial Sequence
  Cyclic GFR-binding peptide
  MOD_RES (28), (29): Xaa is C or S
MDSMEGLVVNNAADMIQITINSLRAPVXXSAPAA

SEQ ID NO: 89536 - protein, 24 aa, Artificial Sequence
  Cyclic GFR-binding peptide
DSMEGIVVNNAADMIQITINSLRA

SEQ ID NO: 89537 - protein, 26 aa, Artificial Sequence
  Cyclic GFR-binding peptide
RDVVMGSMEGIIIQQKDNMIQMTINS

SEQ ID NO: 89538 - protein, 34 aa, Artificial Sequence; identical to SEQ ID NO: 35418
  Cyclic GFR-binding peptide
  MOD_RES (2), (34): Xaa is C or S

SEQ ID NO: 89539 - protein, 31 aa, Artificial Sequence
  Cyclic GFR-binding peptide
  MOD_RES (29), (30): Xaa is C or S
VMNSMEGLIVNSSDDMIQVTINSLKTPAXXP

SEQ ID NO: 89540 - protein, 36 aa, Artificial Sequence; identical to SEQ ID NO: 35419
  Cyclic GFR-binding peptide
  MOD_RES (1), (3), (34), (35): Xaa is C or S

SEQ ID NO: 89541 - protein, 33 aa, Artificial Sequence
  Cyclic GFR-binding peptide
  MOD_RES (30), (31): Xaa is C or S
VVMNSMEGLIVNSSDDMIQVTINSLKTPAXXPK

SEQ ID NO: 89542 - protein, 29 aa, Artificial Sequence
  Cyclic GFR-binding peptide
  MOD_RES (1), (3): Xaa is C or S
XKXSKVVMSMEGLVKPTRGVMIQITINSL

SEQ ID NO: 89543 - protein, 32 aa, Artificial Sequence
  Cyclic GFR-binding peptide
  MOD_RES (28), (29): Xaa is C or S
IMSMEGILLVRGNDMIQMTINSTKVPAXXTSP

SEQ ID NO: 89544 - protein, 28 aa, Artificial Sequence
  Cyclic GFR-binding peptide
  MOD_RES (28), (28): Xaa is C or S
MDSMEGIVVNNASDMIQITINSLRTPVX

SEQ ID NO: 89545 - protein, 31 aa, Artificial Sequence
  Cyclic GFR-binding peptide
  MOD_RES (26), (27): Xaa is C or S
SMEGLIIQQKDNMIQMTINSMKTPTXXPGAS

SEQ ID NO: 89546 - protein, 35 aa, Artificial Sequence; identical to SEQ ID NO: 35421
  Cyclic GFR-binding peptide
  MOD_RES (2), (4): Xaa is C or S

SEQ ID NO: 89547 - protein, 24 aa, Artificial Sequence
  Cyclic GFR-binding peptide
NSMEGLIVNSSDDMIQVTINSLKT

SEQ ID NO: 89548 - protein, 33 aa, Artificial Sequence
  Cyclic GFR-binding peptide
  MOD_RES (27), (28): Xaa is C or S
NSMEGIIVNSSDDMIQVTINSLKTPAXXPKPVH

SEQ ID NO: 89549 - protein, 36 aa, Artificial Sequence
  Cyclic GFR-binding peptide
  MOD_RES (30), (31): Xaa is C or S
KVVMSMEGLVKPTRGVMIQITINSLDQPVXXPSASA

SEQ ID NO: 89550 - protein, 31 aa, Artificial Sequence; identical to SEQ ID NO: 35425
  Cyclic GFR-binding peptide
  MOD_RES (31), (31): Xaa is C or S

SEQ ID NO: 89551 - protein, 35 aa, Artificial Sequence; identical to SEQ ID NO: 35426
  Cyclic GFR-binding peptide
  MOD_RES (1), (33), (34): Xaa is C or S

SEQ ID NO: 89552 - protein, 35 aa, Artificial Sequence
  Cyclic GFR-binding peptide
  MOD_RES (30), (31): Xaa is C or S
VVMDSMEGLVVNNASDMIQITINSLRTPVXXTPPT

SEQ ID NO: 89553 - protein, 34 aa, Artificial Sequence; identical to SEQ ID NO: 35428
  Cyclic GFR-binding peptide
  MOD_RES (1), (32), (33): Xaa is C or S

SEQ ID NO: 89554 - protein, 36 aa, Artificial Sequence; identical to SEQ ID NO: 35432
  Cyclic GFR-binding peptide
  MOD_RES (31), (32): Xaa is C or S

SEQ ID NO: 89555 - protein, 37 aa, Artificial Sequence; identical to SEQ ID NO: 35433
  Cyclic GFR-binding peptide
  MOD_RES (31), (32): Xaa is C or S

SEQ ID NO: 89556 - protein, 34 aa, Artificial Sequence
  Cyclic GFR-binding peptide
  MOD_RES (30), (31): Xaa is C or S
RVIMSMEGLVKPKRGVMIQITINSLAQPVXXPAA

SEQ ID NO: 89557 - protein, 32 aa, Artificial Sequence
  Cyclic GFR-binding peptide
  MOD_RES (2), (4): Xaa is C or S
SXGXRDVVMGSMEGIIIQQKDNMIQMTINSMK

SEQ ID NO: 89558 - protein, 24 aa, Artificial Sequence
  Cyclic GFR-binding peptide
MNSMEGLIVNSSDDMIQVTINSLK

SEQ ID NO: 89559 - protein, 33 aa, Artificial Sequence
  Cyclic GFR-binding peptide
  MOD_RES (28), (29): Xaa is C or S
IMSMEGLVKPKRGVMIQITINSLAQPVXXPAAS

SEQ ID NO: 89560 - protein, 35 aa, Artificial Sequence; identical to SEQ ID NO: 35435
  Cyclic GFR-binding peptide
  MOD_RES (2), (34), (35): Xaa is C or S

SEQ ID NO: 89561 - protein, 25 aa, Artificial Sequence
  Cyclic GFR-binding peptide
DVVMGSMEGLIIQQKDNMIQMTINS

SEQ ID NO: 89562 - protein, 27 aa, Artificial Sequence
  Cyclic GFR-binding peptide
EVIMSMEGLLLVRGNDMIQMTINSTKV

SEQ ID NO: 89563 - protein, 33 aa, Artificial Sequence
  Cyclic GFR-binding peptide
  MOD_RES (29), (30): Xaa is C or S
VMGSMEGLIIQQKDNMIQMTINSMKTPTXXPGA

SEQ ID NO: 89564 - protein, 26 aa, Artificial Sequence
  Cyclic GFR-binding peptide
GSMEGLIIQQKDNMIQMTINSMKTPT

SEQ ID NO: 89565 - protein, 32 aa, Artificial Sequence; identical to SEQ ID NO: 35438
  Cyclic GFR-binding peptide
  MOD_RES (32), (32): Xaa is C or S

SEQ ID NO: 89566 - protein, 34 aa, Artificial Sequence; identical to SEQ ID NO: 35439
  Cyclic GFR-binding peptide
  MOD_RES (1), (3), (34): Xaa is C or S

SEQ ID NO: 89567 - protein, 32 aa, Artificial Sequence
  Cyclic GFR-binding peptide
  MOD_RES (2), (2): Xaa is C or S
GXSEVVMDSMEGLVVNNASDMIQITINSLRTP

SEQ ID NO: 89568 - protein, 31 aa, Artificial Sequence
  Cyclic GFR-binding peptide
  MOD_RES (29), (30): Xaa is C or S
VIMSMEGLLLVRGNDMIQMTINSTKVPAXXT

SEQ ID NO: 89569 - protein, 27 aa, Artificial Sequence
  Cyclic GFR-binding peptide
VMNSMEGLIVNSSDDMIQVTINSLKTP

SEQ ID NO: 89570 - protein, 27 aa, Artificial Sequence
  Cyclic GFR-binding peptide
  MOD_RES (27), (27): Xaa is C or S
NSMEGLIVNSSDDMIQVTINSLKTPAX

SEQ ID NO: 89571 - protein, 41 aa, Artificial Sequence; identical to SEQ ID NO: 35446
  Cyclic GFR-binding peptide
  MOD_RES (2), (4), (35), (36): Xaa is C or S

SEQ ID NO: 89572 - protein, 26 aa, Artificial Sequence
  Cyclic GFR-binding peptide
MSMEGLIKPTKGIMIQITINSLDQSV

SEQ ID NO: 89573 - protein, 28 aa, Artificial Sequence
  Cyclic GFR-binding peptide
VVMSMEGLVKPTRGVMIQITINSLDQPV

SEQ ID NO: 89574 - protein, 25 aa, Artificial Sequence
  Cyclic GFR-binding peptide
VVMDSMEGLVVNNASDMIQITINSL

SEQ ID NO: 89575 - protein, 29 aa, Artificial Sequence
  Cyclic GFR-binding peptide
  MOD_RES (26), (27): Xaa is C or S
SMEGLLLVRGNDMIQMTINSTKVPAXXTS

SEQ ID NO: 89576 - protein, 31 aa, Artificial Sequence
  Cyclic GFR-binding peptide
  MOD_RES (30), (31): Xaa is C or S
VVMGSMEGLIIQQKDNMIQMTINSMKTPTXX

SEQ ID NO: 89577 - protein, 33 aa, Artificial Sequence; identical to SEQ ID NO: 35458
  Cyclic GFR-binding peptide
  MOD_RES (31), (32): Xaa is C or S

SEQ ID NO: 89578 - protein, 29 aa, Artificial Sequence
  Cyclic GFR-binding peptide
VVMDSMEGIVVNNASDMIQITINSLRTPV

SEQ ID NO: 89579 - protein, 28 aa, Artificial Sequence
  Cyclic GFR-binding peptide
  MOD_RES (28), (28): Xaa is C or S
MNSMEGLIVNSSDDMIQVTINSLKTPAX

SEQ ID NO: 89580 - protein, 24 aa, Artificial Sequence
  Cyclic GFR-binding peptide
VIMSMEGLVKPKRGVMIQITINSL

SEQ ID NO: 89581 - protein, 32 aa, Artificial Sequence
  Cyclic GFR-binding peptide
  MOD_RES (30), (31): Xaa is C or S
KVVMSMEGLVKPTRGVMIQITINSLDQPVXXP

SEQ ID NO: 89582 - protein, 24 aa, Artificial Sequence
  Cyclic GFR-binding peptide
SMEGIIIQQKDNMIQMTINSMKTP

SEQ ID NO: 89583 - protein, 31 aa, Artificial Sequence
  Cyclic GFR-binding peptide
  MOD_RES (2), (2): Xaa is C or S
GXRDVVMGSMEGIIIQQKDNMIQMTINSMKT

SEQ ID NO: 89584 - protein, 25 aa, Artificial Sequence
  Cyclic GFR-binding peptide
EEVIMSMEGLLLVRGNDMIQMTINS

SEQ ID NO: 89585 - protein, 33 aa, Artificial Sequence; identical to SEQ ID NO: 35466
  Cyclic GFR-binding peptide
  MOD_RES (1), (3): Xaa is C or S

SEQ ID NO: 89586 - protein, 33 aa, Artificial Sequence; identical to SEQ ID NO: 35468
  Cyclic GFR-binding peptide
  MOD_RES (1), (3): Xaa is C or S

SEQ ID NO: 89587 - protein, 31 aa, Artificial Sequence
  Cyclic GFR-binding peptide
  MOD_RES (26), (27): Xaa is C or S
SMEGLVKPTRGVMIQITINSLDQPVXXPSAS

SEQ ID NO: 89588 - protein, 39 aa, Artificial Sequence; identical to SEQ ID NO: 35470
  Cyclic GFR-binding peptide
  MOD_RES (2), (33), (34): Xaa is C or S

SEQ ID NO: 89589 - protein, 38 aa, Artificial Sequence; identical to SEQ ID NO: 35471
  Cyclic GFR-binding peptide
  MOD_RES (1), (33), (34): Xaa is C or S

SEQ ID NO: 89590 - protein, 30 aa, Artificial Sequence
  Cyclic GFR-binding peptide
  MOD_RES (1), (1): Xaa is C or S
XAEVVMDSMEGLVVNNAADMIQITINSLRA

SEQ ID NO: 89591 - protein, 21 aa, Artificial Sequence
  Cyclic GFR-binding peptide
MSMEGLIKPTKGIMIQITINS

SEQ ID NO: 89592 - protein, 29 aa, Artificial Sequence
  Cyclic GFR-binding peptide
  MOD_RES (28), (29): Xaa is C or S
MDSMEGIVVNNASDMIQITINSLRTPVXX

SEQ ID NO: 89593 - protein, 32 aa, Artificial Sequence; identical to SEQ ID NO: 35474
  Cyclic GFR-binding peptide
  MOD_RES (2), (2): Xaa is C or S

SEQ ID NO: 89594 - protein, 31 aa, Artificial Sequence; identical to SEQ ID NO: 35476
  Cyclic GFR-binding peptide
  MOD_RES (31), (31): Xaa is C or S

SEQ ID NO: 89595 - protein, 30 aa, Artificial Sequence
  Cyclic GFR-binding peptide
  MOD_RES (30), (30): Xaa is C or S
VVMDSMEGIVVNNASDMIQITINSLRTPVX

SEQ ID NO: 89596 - protein, 29 aa, Artificial Sequence
  Cyclic GFR-binding peptide
AAAAAAAAASMEGLVVNNAADMIQITINS

SEQ ID NO: 89597 - protein, 24 aa, Artificial Sequence
  Cyclic GFR-binding peptide
SMEGLIKPTKGIMIQITINSLDQS

SEQ ID NO: 89598 - protein, 31 aa, Artificial Sequence; identical to SEQ ID NO: 35480
  Cyclic GFR-binding peptide

SEQ ID NO: 89599 - protein, 37 aa, Artificial Sequence; identical to SEQ ID NO: 35483
  Cyclic GFR-binding peptide
  MOD_RES (1), (33), (34): Xaa is C or S

SEQ ID NO: 89600 - protein, 35 aa, Artificial Sequence; identical to SEQ ID NO: 35484
  Cyclic GFR-binding peptide
  MOD_RES (32), (33): Xaa is C or S

SEQ ID NO: 89601 - protein, 32 aa, Artificial Sequence
  Cyclic GFR-binding peptide
  MOD_RES (30), (31): Xaa is C or S
VVMDSMEGIVVNNAADMIQITINSLRAPVXXS

SEQ ID NO: 89602 - protein, 28 aa, Artificial Sequence
  Cyclic GFR-binding peptide
  MOD_RES (26), (27): Xaa is C or S
SMEGLVVNNAADMIQITINSLRAPVXXS

SEQ ID NO: 89603 - protein, 32 aa, Artificial Sequence
  Cyclic GFR-binding peptide
  MOD_RES (26), (27): Xaa is C or S
SMEGLIKPTKGIMIQITINSLDQSVXXPSASA

SEQ ID NO: 89604 - protein, 38 aa, Artificial Sequence; identical to SEQ ID NO: 35486
  Cyclic GFR-binding peptide
  MOD_RES (32), (33): Xaa is C or S

SEQ ID NO: 89605 - protein, 31 aa, Artificial Sequence
  Cyclic GFR-binding peptide
  MOD_RES (2), (4): Xaa is C or S
RXGXSEVVMDSMEGIVVNNASDMIQITINSL

SEQ ID NO: 89606 - protein, 30 aa, Artificial Sequence
  Cyclic GFR-binding peptide
  MOD_RES (28), (29): Xaa is C or S
VMSMEGLVKPTRGVMIQITINSLDQPVXXP

SEQ ID NO: 89607 - protein, 30 aa, Artificial Sequence
  Cyclic GFR-binding peptide
  MOD_RES (26), (27): Xaa is C or S
SMEGLIIQQKDNMIQMTINSMKTPTXXPGA

SEQ ID NO: 89608 - protein, 35 aa, Artificial Sequence; identical to SEQ ID NO: 35489
  Cyclic GFR-binding peptide
  MOD_RES (1), (33), (34): Xaa is C or S

SEQ ID NO: 89609 - protein, 29 aa, Artificial Sequence
  Cyclic GFR-binding peptide
  MOD_RES (27), (28): Xaa is C or S
MSMEGLVKPTRGVMIQITINSLDQPVXXP

SEQ ID NO: 89610 - protein, 21 aa, Artificial Sequence
  Cyclic GFR-binding peptide
SMEGILLVRGNDMIQMTINST

SEQ ID NO: 89611 - protein, 36 aa, Artificial Sequence; identical to SEQ ID NO: 35491
  Cyclic GFR-binding peptide
  MOD_RES (1), (32), (33): Xaa is C or S

SEQ ID NO: 89612 - protein, 35 aa, Artificial Sequence; identical to SEQ ID NO: 35494
  Cyclic GFR-binding peptide
  MOD_RES (1), (33), (34): Xaa is C or S

SEQ ID NO: 89613 - protein, 35 aa, Artificial Sequence; identical to SEQ ID NO: 35496
  Cyclic GFR-binding peptide
  MOD_RES (2), (34), (35): Xaa is C or S

SEQ ID NO: 89614 - protein, 36 aa, Artificial Sequence; identical to SEQ ID NO: 35497
  Cyclic GFR-binding peptide
  MOD_RES (1), (3), (34), (35): Xaa is C or S

SEQ ID NO: 89615 - protein, 40 aa, Artificial Sequence; identical to SEQ ID NO: 35498
  Cyclic GFR-binding peptide
  MOD_RES (1), (3), (34), (35): Xaa is C or S

SEQ ID NO: 89616 - protein, 32 aa, Artificial Sequence
  Cyclic GFR-binding peptide
  MOD_RES (1), (3): Xaa is C or S
XGXAEVVMDSMEGLVVNNAADMIQITINSLRA

SEQ ID NO: 89617 - protein, 32 aa, Artificial Sequence
  Cyclic GFR-binding peptide
  MOD_RES (28), (29): Xaa is C or S
MDSMEGLVVNNAADMIQITINSLRAPVXXSAP

SEQ ID NO: 89618 - protein, 34 aa, Artificial Sequence; identical to SEQ ID NO: 35500
  Cyclic GFR-binding peptide
  MOD_RES (1), (32), (33): Xaa is C or S

SEQ ID NO: 89619 - protein, 33 aa, Artificial Sequence
  Cyclic GFR-binding peptide
  MOD_RES (1), (3): Xaa is C or S
XGXAEVVMDSMEGLVVNNAADMIQITINSLRAP

SEQ ID NO: 89620 - protein, 28 aa, Artificial Sequence
  Cyclic GFR-binding peptide
AEVVMDSMEGLVVNNAADMIQITINSLR

SEQ ID NO: 89621 - protein, 25 aa, Artificial Sequence
  Cyclic GFR-binding peptide
IMSMEGLVKPKRGVMIQITINSLAQ

SEQ ID NO: 89622 - protein, 30 aa, Artificial Sequence
  Cyclic GFR-binding peptide
  MOD_RES (2), (4): Xaa is C or S
SXKXSKVIMSMEGLIKPTKGIMIQITINSL

SEQ ID NO: 89623 - protein, 24 aa, Artificial Sequence
  Cyclic GFR-binding peptide
MSMEGLVKPKRGVMIQITINSLAQ

SEQ ID NO: 89624 - protein, 32 aa, Artificial Sequence
  Cyclic GFR-binding peptide
  MOD_RES (30), (31): Xaa is C or S
RVIMSMEGLVKPKRGVMIQITINSLAQPVXXP

SEQ ID NO: 89625 - protein, 25 aa, Artificial Sequence
  Cyclic GFR-binding peptide
DSMEGIVVNNAADMIQITINSLRAP

SEQ ID NO: 89626 - protein, 29 aa, Artificial Sequence
  Cyclic GFR-binding peptide
  MOD_RES (1), (3): Xaa is C or S
XGXSRVVMNSMEGLIVNSSDDMIQVTINS

SEQ ID NO: 89627 - protein, 22 aa, Artificial Sequence
  Cyclic GFR-binding peptide
SMEGLLLVRGNDMIQMTINSTK

SEQ ID NO: 89628 - protein, 34 aa, Artificial Sequence; identical to SEQ ID NO: 35509
  Cyclic GFR-binding peptide
  MOD_RES (1), (3): Xaa is C or S

SEQ ID NO: 89629 - protein, 21 aa, Artificial Sequence
  Cyclic GFR-binding peptide
SMEGIVVNNASDMIQITINSL

SEQ ID NO: 89630 - protein, 23 aa, Artificial Sequence
  Cyclic GFR-binding peptide
MSMEGLIKPTKGIMIQITINSLD

SEQ ID NO: 89631 - protein, 26 aa, Artificial Sequence
  Cyclic GFR-binding peptide
  MOD_RES (26), (26): Xaa is C or S
SMEGLVVNNAADMIQITINSLRAPVX

SEQ ID NO: 89632 - protein, 27 aa, Artificial Sequence
  Cyclic GFR-binding peptide
VVMDSMEGLVVNNAADMIQITINSLRA

SEQ ID NO: 89633 - protein, 32 aa, Artificial Sequence
  Cyclic GFR-binding peptide
  MOD_RES (27), (28): Xaa is C or S
GSMEGLIIQQKDNMIQMTINSMKTPTXXPGAS

SEQ ID NO: 89634 - protein, 31 aa, Artificial Sequence
  Cyclic GFR-binding peptide
  MOD_RES (30), (31): Xaa is C or S
VVMDSMEGIVVNNASDMIQITINSLRTPVXX

SEQ ID NO: 89635 - protein, 35 aa, Artificial Sequence; identical to SEQ ID NO: 35515
  Cyclic GFR-binding peptide
  MOD_RES (2), (33), (34): Xaa is C or S

SEQ ID NO: 89636 - protein, 34 aa, Artificial Sequence
  Cyclic GFR-binding peptide
  MOD_RES (30), (31): Xaa is C or S
VVMNSMEGLIVNSSDDMIQVTINSLKTPAXXPKP

SEQ ID NO: 89637 - protein, 31 aa, Artificial Sequence
  Cyclic GFR-binding peptide
  MOD_RES (2), (2): Xaa is C or S
GXRDVVMGSMEGLIIQQKDNMIQMTINSMKT

SEQ ID NO: 89638 - protein, 26 aa, Artificial Sequence
  Cyclic GFR-binding peptide
EVVMDSMEGLVVNNASDMIQITINSL

SEQ ID NO: 89639 - protein, 31 aa, Artificial Sequence
  Cyclic GFR-binding peptide
  MOD_RES (2), (4): Xaa is C or S
LXGXEEVIMSMEGLLLVRGNDMIQMTINSTK

SEQ ID NO: 89640 - protein, 23 aa, Artificial Sequence
  Cyclic GFR-binding peptide
GSMEGLIIQQKDNMIQMTINSMK

SEQ ID NO: 89641 - protein, 29 aa, Artificial Sequence
  Cyclic GFR-binding peptide
  MOD_RES (1), (1): Xaa is C or S
XEEVIMSMEGILLVRGNDMIQMTINSTKV

SEQ ID NO: 89642 - protein, 38 aa, Artificial Sequence; identical to SEQ ID NO: 35520
  Cyclic GFR-binding peptide
  MOD_RES (32), (33): Xaa is C or S

SEQ ID NO: 89643 - protein, 28 aa, Artificial Sequence
  Cyclic GFR-binding peptide
  MOD_RES (26), (27): Xaa is C or S
SMEGLVKPKRGVMIQITINSLAQPVXXP

SEQ ID NO: 89644 - protein, 31 aa, Artificial Sequence
  Cyclic GFR-binding peptide
  MOD_RES (1), (3): Xaa is C or S
XGXSEVVMDSMEGLVVNNASDMIQITINSLR

SEQ ID NO: 89645 - protein, 35 aa, Artificial Sequence; identical to SEQ ID NO: 35524
  Cyclic GFR-binding peptide
  MOD_RES (31), (32): Xaa is C or S

SEQ ID NO: 89646 - protein, 38 aa, Artificial Sequence; identical to SEQ ID NO: 35526
  Cyclic GFR-binding peptide
  MOD_RES (1), (32), (33): Xaa is C or S

SEQ ID NO: 89647 - protein, 37 aa, Artificial Sequence; identical to SEQ ID NO: 35527
  Cyclic GFR-binding peptide
  MOD_RES (1), (3), (35), (36): Xaa is C or S

SEQ ID NO: 89648 - protein, 32 aa, Artificial Sequence
  Cyclic GFR-binding peptide
  MOD_RES (29), (30): Xaa is C or S
VIMSMEGLVKPKRGVMIQITINSLAQPVXXPA

SEQ ID NO: 89649 - protein, 36 aa, Artificial Sequence; identical to SEQ ID NO: 35529
  Cyclic GFR-binding peptide
  MOD_RES (1), (33), (34): Xaa is C or S

SEQ ID NO: 89650 - protein, 35 aa, Artificial Sequence
  Cyclic GFR-binding peptide
  MOD_RES (29), (30): Xaa is C or S
VMNSMEGIIVNSSDDMIQVTINSLKTPAXXPKPVH

SEQ ID NO: 89651 - protein, 26 aa, Artificial Sequence
  Cyclic GFR-binding peptide
VMDSMEGIVVNNASDMIQITINSLRT

SEQ ID NO: 89652 - protein, 29 aa, Artificial Sequence
  Cyclic GFR-binding peptide
  MOD_RES (28), (29): Xaa is C or S
MNSMEGLIVNSSDDMIQVTINSLKTPAXX

SEQ ID NO: 89653 - protein, 24 aa, Artificial Sequence
  Cyclic GFR-binding peptide
IMSMEGLVKPKRGVMIQITINSLA

SEQ ID NO: 89654 - protein, 31 aa, Artificial Sequence; identical to SEQ ID NO: 35536
  Cyclic GFR-binding peptide
  MOD_RES (1), (1): Xaa is C or S

SEQ ID NO: 89655 - protein, 38 aa, Artificial Sequence; identical to SEQ ID NO: 35537
  Cyclic GFR-binding peptide
  MOD_RES (2), (33), (34): Xaa is C or S

SEQ ID NO: 89656 - protein, 35 aa, Artificial Sequence
  Cyclic GFR-binding peptide
  MOD_RES (29), (30): Xaa is C or S
VMGSMEGLIIQQKDNMIQMTINSMKTPTXXPGASG

SEQ ID NO: 89657 - protein, 25 aa, Artificial Sequence
  Cyclic GFR-binding peptide
VIMSMEGLIKPTKGIMIQITINSLD

SEQ ID NO: 89658 - protein, 28 aa, Artificial Sequence
  Cyclic GFR-binding peptide
  MOD_RES (1), (3): Xaa is C or S
XGXEEVIMSMEGLLLVRGNDMIQMTINS

SEQ ID NO: 89659 - protein, 23 aa, Artificial Sequence
  Cyclic GFR-binding peptide
SMEGLVKPTRGVMIQITINSLDQ

SEQ ID NO: 89660 - protein, 41 aa, Artificial Sequence; identical to SEQ ID NO: 35543
  Cyclic GFR-binding peptide
  MOD_RES (2), (4), (36), (37): Xaa is C or S

SEQ ID NO: 89661 - protein, 29 aa, Artificial Sequence
  Cyclic GFR-binding peptide
AAAAAAAAASMEGLLLVRGNDMIQMTINS

SEQ ID NO: 89662 - protein, 31 aa, Artificial Sequence
  Cyclic GFR-binding peptide
  MOD_RES (29), (30): Xaa is C or S
VMDSMEGLVVNNAADMIQITINSLRAPVXXS

SEQ ID NO: 89663 - protein, 26 aa, Artificial Sequence
  Cyclic GFR-binding peptide
MNSMEGLIVNSSDDMIQVTINSLKTP

SEQ ID NO: 89664 - protein, 31 aa, Artificial Sequence
  Cyclic GFR-binding peptide
  MOD_RES (1), (3): Xaa is C or S
XGXSEVVMDSMEGIVVNNASDMIQITINSLR

SEQ ID NO: 89665 - protein, 29 aa, Artificial Sequence
  Cyclic GFR-binding peptide
DVVMGSMEGLIIQQKDNMIQMTINSMKTP

SEQ ID NO: 89666 - protein, 29 aa, Artificial Sequence
  Cyclic GFR-binding peptide
  MOD_RES (27), (28): Xaa is C or S
DSMEGLVVNNASDMIQITINSLRTPVXXT

SEQ ID NO: 89667 - protein, 41 aa, Artificial Sequence; identical to SEQ ID NO: 35552
  Cyclic GFR-binding peptide
  MOD_RES (1), (3), (35), (36): Xaa is C or S

SEQ ID NO: 89668 - protein, 31 aa, Artificial Sequence
  Cyclic GFR-binding peptide
  MOD_RES (28), (29): Xaa is C or S
VMSMEGLVKPTRGVMIQITINSLDQPVXXPS

SEQ ID NO: 89669 - protein, 30 aa, Artificial Sequence
  Cyclic GFR-binding peptide
  MOD_RES (1), (3): Xaa is C or S
XGXEEVIMSMEGILLVRGNDMIQMTINSTK

SEQ ID NO: 89670 - protein, 28 aa, Artificial Sequence
  Cyclic GFR-binding peptide
  MOD_RES (2), (2): Xaa is C or S
GXAEVVMDSMEGLVVNNAADMIQITINS

SEQ ID NO: 89671 - protein, 33 aa, Artificial Sequence
  Cyclic GFR-binding peptide
  MOD_RES (2), (4): Xaa is C or S
HXGXSRVVMNSMEGLIVNSSDDMIQVTINSLKT

SEQ ID NO: 89672 - protein, 36 aa, Artificial Sequence; identical to SEQ ID NO: 35558
  Cyclic GFR-binding peptide
  MOD_RES (2), (33), (34): Xaa is C or S

SEQ ID NO: 89673 - protein, 23 aa, Artificial Sequence
  Cyclic GFR-binding peptide
VMDSMEGLVVNNASDMIQITINS

SEQ ID NO: 89674 - protein, 28 aa, Artificial Sequence
  Cyclic GFR-binding peptide
VIMSMEGILLVRGNDMIQMTINSTKVPA

SEQ ID NO: 89675 - protein, 35 aa, Artificial Sequence; identical to SEQ ID NO: 35564
  Cyclic GFR-binding peptide
  MOD_RES (2), (4), (35): Xaa is C or S

SEQ ID NO: 89676 - protein, 28 aa, Artificial Sequence
  Cyclic GFR-binding peptide
  MOD_RES (27), (28): Xaa is C or S
DSMEGIVVNNASDMIQITINSLRTPVXX

SEQ ID NO: 89677 - protein, 28 aa, Artificial Sequence
  Cyclic GFR-binding peptide
  MOD_RES (26), (27): Xaa is C or S
SMEGLIIQQKDNMIQMTINSMKTPTXXP

SEQ ID NO: 89678 - protein, 33 aa, Artificial Sequence
  Cyclic GFR-binding peptide
  MOD_RES (30), (31): Xaa is C or S
EVIMSMEGILLVRGNDMIQMTINSTKVPAXXTS

SEQ ID NO: 89679 - protein, 40 aa, Artificial Sequence; identical to SEQ ID NO: 35567
  Cyclic GFR-binding peptide
  MOD_RES (1), (3), (35), (36): Xaa is C or S

SEQ ID NO: 89680 - protein, 35 aa, Artificial Sequence; identical to SEQ ID NO: 35568
  Cyclic GFR-binding peptide
  MOD_RES (32), (33): Xaa is C or S

SEQ ID NO: 89681 - protein, 20 aa, Artificial Sequence
  Cyclic GFR-binding peptide
SMEGIVVNNASDMIQITINS

SEQ ID NO: 89682 - protein, 34 aa, Artificial Sequence
  Cyclic GFR-binding peptide
  MOD_RES (29), (30): Xaa is C or S
VMDSMEGLVVNNASDMIQITINSLRTPVXXTPPT

SEQ ID NO: 89683 - protein, 28 aa, Artificial Sequence
  Cyclic GFR-binding peptide
DVVMGSMEGIIIQQKDNMIQMTINSMKT

SEQ ID NO: 89684 - protein, 32 aa, Artificial Sequence
  Cyclic GFR-binding peptide
  MOD_RES (1), (3): Xaa is C or S
XGXEEVIMSMEGLLLVRGNDMIQMTINSTKVP

SEQ ID NO: 89685 - protein, 32 aa, Artificial Sequence; identical to SEQ ID NO: 35577
  Cyclic GFR-binding peptide
  MOD_RES (31), (32): Xaa is C or S

SEQ ID NO: 89686 - protein, 26 aa, Artificial Sequence
  Cyclic GFR-binding peptide
RVVMNSMEGLIVNSSDDMIQVTINSL

SEQ ID NO: 89687 - protein, 32 aa, Artificial Sequence
  Cyclic GFR-binding peptide
  MOD_RES (2), (4): Xaa is C or S
RXGXAEVVMDSMEGLVVNNAADMIQITINSLR

SEQ ID NO: 89688 - protein, 39 aa, Artificial Sequence; identical to SEQ ID NO: 35582
  Cyclic GFR-binding peptide
  MOD_RES (2), (34), (35): Xaa is C or S

SEQ ID NO: 89689 - protein, 28 aa, Artificial Sequence
  Cyclic GFR-binding peptide
  MOD_RES (1), (1): Xaa is C or S
XSKVVMSMEGLVKPTRGVMIQITINSLD

SEQ ID NO: 89690 - protein, 28 aa, Artificial Sequence
  Cyclic GFR-binding peptide
KVIMSMEGLIKPTKGIMIQITINSLDQS

SEQ ID NO: 89691 - protein, 29 aa, Artificial Sequence
  Cyclic GFR-binding peptide
  MOD_RES (2), (2): Xaa is C or S
GXSEVVMDSMEGIVVNNASDMIQITINSL

SEQ ID NO: 89692 - protein, 36 aa, Artificial Sequence
  Cyclic GFR-binding peptide
  MOD_RES (30), (31): Xaa is C or S
RVIMSMEGLVKPKRGVMIQITINSLAQPVXXPAASA

SEQ ID NO: 89693 - protein, 30 aa, Artificial Sequence
  Cyclic GFR-binding peptide
  MOD_RES (2), (2): Xaa is C or S
GXSRVVMNSMEGLIVNSSDDMIQVTINSLK

SEQ ID NO: 89694 - protein, 34 aa, Artificial Sequence; identical to SEQ ID NO: 35587
  Cyclic GFR-binding peptide
  MOD_RES (2), (4): Xaa is C or S

SEQ ID NO: 89695 - protein, 38 aa, Artificial Sequence; identical to SEQ ID NO: 35589
  Cyclic GFR-binding peptide
  MOD_RES (1), (3), (34), (35): Xaa is C or S

SEQ ID NO: 89696 - protein, 23 aa, Artificial Sequence
  Cyclic GFR-binding peptide
GSMEGIIIQQKDNMIQMTINSMK

SEQ ID NO: 89697 - protein, 35 aa, Artificial Sequence; identical to SEQ ID NO: 35591
  Cyclic GFR-binding peptide
  MOD_RES (2), (34), (35): Xaa is C or S

SEQ ID NO: 89698 - protein, 29 aa, Artificial Sequence
  Cyclic GFR-binding peptide
AAAAAAAAASMEGLIIQQKDNMIQMTINS

SEQ ID NO: 89699 - protein, 33 aa, Artificial Sequence; identical to SEQ ID NO: 35593
  Cyclic GFR-binding peptide
  MOD_RES (1), (3): Xaa is C or S

SEQ ID NO: 89700 - protein, 41 aa, Artificial Sequence; identical to SEQ ID NO: 35595
  Cyclic GFR-binding peptide
  MOD_RES (2), (4), (35), (36): Xaa is C or S

SEQ ID NO: 89701 - protein, 31 aa, Artificial Sequence
  Cyclic GFR-binding peptide
  MOD_RES (26), (27): Xaa is C or S
SMEGILLVRGNDMIQMTINSTKVPAXXTSPV

SEQ ID NO: 89702 - protein, 42 aa, Artificial Sequence; identical to SEQ ID NO: 35597
  Cyclic GFR-binding peptide
  MOD_RES (2), (4), (36), (37): Xaa is C or S

SEQ ID NO: 89703 - protein, 26 aa, Artificial Sequence
  Cyclic GFR-binding peptide
VMDSMEGLVVNNAADMIQITINSLRA

SEQ ID NO: 89704 - protein, 37 aa, Artificial Sequence; identical to SEQ ID NO: 35602
  Cyclic GFR-binding peptide
  MOD_RES (32), (33): Xaa is C or S

SEQ ID NO: 89705 - protein, 31 aa, Artificial Sequence
  Cyclic GFR-binding peptide
  MOD_RES (2), (4): Xaa is C or S
SXKXSKVIMSMEGLIKPTKGIMIQITINSLD

SEQ ID NO: 89706 - protein, 30 aa, Artificial Sequence
  Cyclic GFR-binding peptide
  MOD_RES (2), (2): Xaa is C or S
GXEEVIMSMEGLLLVRGNDMIQMTINSTKV

SEQ ID NO: 89707 - protein, 41 aa, Artificial Sequence; identical to SEQ ID NO: 35609
  Cyclic GFR-binding peptide
  MOD_RES (1), (3), (35), (36): Xaa is C or S

SEQ ID NO: 89708 - protein, 26 aa, Artificial Sequence
  Cyclic GFR-binding peptide
VVMDSMEGLVVNNAADMIQITINSLR

SEQ ID NO: 89709 - protein, 24 aa, Artificial Sequence
  Cyclic GFR-binding peptide
VIMSMEGLLLVRGNDMIQMTINST

SEQ ID NO: 89710 - protein, 27 aa, Artificial Sequence
  Cyclic GFR-binding peptide
  MOD_RES (27), (27): Xaa is C or S
GSMEGIIIQQKDNMIQMTINSMKTPTX

SEQ ID NO: 89711 - protein, 28 aa, Artificial Sequence
  Cyclic GFR-binding peptide
DVVMGSMEGLIIQQKDNMIQMTINSMKT

SEQ ID NO: 89712 - protein, 27 aa, Artificial Sequence
  Cyclic GFR-binding peptide
  MOD_RES (2), (2): Xaa is C or S
KXSKVIMSMEGLIKPTKGIMIQITINS

SEQ ID NO: 89713 - protein, 32 aa, Artificial Sequence
  Cyclic GFR-binding peptide
  MOD_RES (27), (28): Xaa is C or S
GSMEGIIIQQKDNMIQMTINSMKTPTXXPGAS

SEQ ID NO: 89714 - protein, 26 aa, Artificial Sequence
  Cyclic GFR-binding peptide
VVMDSMEGIVVNNASDMIQITINSLR

SEQ ID NO: 89715 - protein, 25 aa, Artificial Sequence
  Cyclic GFR-binding peptide
SMEGIVVNNAADMIQITINSLRAPV

SEQ ID NO: 89716 - protein, 38 aa, Artificial Sequence; identical to SEQ ID NO: 35612
  Cyclic GFR-binding peptide
  MOD_RES (2), (33), (34): Xaa is C or S

SEQ ID NO: 89717 - protein, 23 aa, Artificial Sequence
  Cyclic GFR-binding peptide
VIMSMEGILLVRGNDMIQMTINS

SEQ ID NO: 89718 - protein, 35 aa, Artificial Sequence; identical to SEQ ID NO: 35614
  Cyclic GFR-binding peptide
  MOD_RES (1), (3), (34), (35): Xaa is C or S

SEQ ID NO: 89719 - protein, 32 aa, Artificial Sequence
  Cyclic GFR-binding peptide
  MOD_RES (2), (2): Xaa is C or S
GXSEVVMDSMEGIVVNNASDMIQITINSLRTP

SEQ ID NO: 89720 - protein, 36 aa, Artificial Sequence; identical to SEQ ID NO: 35616
  Cyclic GFR-binding peptide
  MOD_RES (2), (33), (34): Xaa is C or S

SEQ ID NO: 89721 - protein, 33 aa, Artificial Sequence; identical to SEQ ID NO: 35617
  Cyclic GFR-binding peptide
  MOD_RES (32), (33): Xaa is C or S

SEQ ID NO: 89722 - protein, 35 aa, Artificial Sequence; identical to SEQ ID NO: 35618
  Cyclic GFR-binding peptide
  MOD_RES (1), (3), (34), (35): Xaa is C or S

SEQ ID NO: 89723 - protein, 31 aa, Artificial Sequence
  Cyclic GFR-binding peptide
  MOD_RES (1), (3): Xaa is C or S
XGXEEVIMSMEGILLVRGNDMIQMTINSTKV

SEQ ID NO: 89724 - protein, 36 aa, Artificial Sequence
  Cyclic GFR-binding peptide
  MOD_RES (30), (31): Xaa is C or S
EVIMSMEGILLVRGNDMIQMTINSTKVPAXXTSPVR

SEQ ID NO: 89725 - protein, 35 aa, Artificial Sequence; identical to SEQ ID NO: 35619
  Cyclic GFR-binding peptide
  MOD_RES (31), (32): Xaa is C or S

SEQ ID NO: 89726 - protein, 27 aa, Artificial Sequence
  Cyclic GFR-binding peptide
DVVMGSMEGIIIQQKDNMIQMTINSMK

SEQ ID NO: 89727 - protein, 31 aa, Artificial Sequence
  Cyclic GFR-binding peptide
  MOD_RES (2), (4): Xaa is C or S
SXKXSKVVMSMEGLVKPTRGVMIQITINSLD

SEQ ID NO: 89728 - protein, 26 aa, Artificial Sequence
  Cyclic GFR-binding peptide
VVMGSMEGIIIQQKDNMIQMTINSMK

SEQ ID NO: 89729 - protein, 40 aa, Artificial Sequence; identical to SEQ ID NO: 35623
  Cyclic GFR-binding peptide
  MOD_RES (2), (34), (35): Xaa is C or S

SEQ ID NO: 89730 - protein, 33 aa, Artificial Sequence
  Cyclic GFR-binding peptide
  MOD_RES (27), (28): Xaa is C or S
NSMEGLIVNSSDDMIQVTINSLKTPAXXPKPVH

SEQ ID NO: 89731 - protein, 26 aa, Artificial Sequence
  Cyclic GFR-binding peptide
  MOD_RES (26), (26): Xaa is C or S
SMEGIIIQQKDNMIQMTINSMKTPTX

SEQ ID NO: 89732 - protein, 27 aa, Artificial Sequence
  Cyclic GFR-binding peptide
  MOD_RES (1), (1): Xaa is C or S
XAEVVMDSMEGLVVNNAADMIQITINS

SEQ ID NO: 89733 - protein, 26 aa, Artificial Sequence
  Cyclic GFR-binding peptide
NSMEGLIVNSSDDMIQVTINSLKTPA

SEQ ID NO: 89734 - protein, 27 aa, Artificial Sequence
  Cyclic GFR-binding peptide
  MOD_RES (1), (1): Xaa is C or S
XRDVVMGSMEGIIIQQKDNMIQMTINS

SEQ ID NO: 89735 - protein, 24 aa, Artificial Sequence
  Cyclic GFR-binding peptide
MDSMEGIVVNNASDMIQITINSLR

SEQ ID NO: 89736 - protein, 28 aa, Artificial Sequence
  Cyclic GFR-binding peptide
  MOD_RES (27), (28): Xaa is C or S
MSMEGLLLVRGNDMIQMTINSTKVPAXX

SEQ ID NO: 89737 - protein, 24 aa, Artificial Sequence
  Cyclic GFR-binding peptide
MDSMEGIVVNNAADMIQITINSLR

SEQ ID NO: 89738 - protein, 32 aa, Artificial Sequence
  Cyclic GFR-binding peptide
  MOD_RES (29), (30): Xaa is C or S
VMGSMEGLIIQQKDNMIQMTINSMKTPTXXPG

SEQ ID NO: 89739 - protein, 34 aa, Artificial Sequence
  Cyclic GFR-binding peptide
  MOD_RES (28), (29): Xaa is C or S
MDSMEGIVVNNAADMIQITINSLRAPVXXSAPAA

SEQ ID NO: 89740 - protein, 32 aa, Artificial Sequence; identical to SEQ ID NO: 35631
  Cyclic GFR-binding peptide
  MOD_RES (31), (32): Xaa is C or S

SEQ ID NO: 89741 - protein, 36 aa, Artificial Sequence; identical to SEQ ID NO: 35634
  Cyclic GFR-binding peptide
  MOD_RES (32), (33): Xaa is C or S

SEQ ID NO: 89742 - protein, 23 aa, Artificial Sequence
  Cyclic GFR-binding peptide
MGSMEGLIIQQKDNMIQMTINSM

SEQ ID NO: 89743 - protein, 35 aa, Artificial Sequence; identical to SEQ ID NO: 35636
  Cyclic GFR-binding peptide
  MOD_RES (2), (34), (35): Xaa is C or S

SEQ ID NO: 89744 - protein, 25 aa, Artificial Sequence
  Cyclic GFR-binding peptide
IMSMEGLLLVRGNDMIQMTINSTKV

SEQ ID NO: 89745 - protein, 30 aa, Artificial Sequence; identical to SEQ ID NO: 2172
  Cyclic GFR-binding peptide

SEQ ID NO: 89746 - protein, 30 aa, Artificial Sequence
  Cyclic GFR-binding peptide
  MOD_RES (29), (30): Xaa is C or S
VMDSMEGIVVNNASDMIQITINSLRTPVXX

SEQ ID NO: 89747 - protein, 39 aa, Artificial Sequence; identical to SEQ ID NO: 35638
  Cyclic GFR-binding peptide
  MOD_RES (2), (34), (35): Xaa is C or S

SEQ ID NO: 89748 - protein, 32 aa, Artificial Sequence; identical to SEQ ID NO: 35639
  Cyclic GFR-binding peptide
  MOD_RES (1), (32): Xaa is C or S

SEQ ID NO: 89749 - protein, 39 aa, Artificial Sequence; identical to SEQ ID NO: 35640
  Cyclic GFR-binding peptide
  MOD_RES (2), (4), (36), (37): Xaa is C or S

SEQ ID NO: 89750 - protein, 24 aa, Artificial Sequence
  Cyclic GFR-binding peptide
VVMGSMEGIIIQQKDNMIQMTINS

SEQ ID NO: 89751 - protein, 37 aa, Artificial Sequence; identical to SEQ ID NO: 35644
  Cyclic GFR-binding peptide
  MOD_RES (1), (3), (35), (36): Xaa is C or S

SEQ ID NO: 89752 - protein, 29 aa, Artificial Sequence
  Cyclic GFR-binding peptide
  MOD_RES (2), (2): Xaa is C or S
GXEEVIMSMEGILLVRGNDMIQMTINSTK

SEQ ID NO: 89753 - protein, 27 aa, Artificial Sequence
  Cyclic GFR-binding peptide
  MOD_RES (26), (27): Xaa is C or S
SMEGILLVRGNDMIQMTINSTKVPAXX

SEQ ID NO: 89754 - protein, 23 aa, Artificial Sequence
  Cyclic GFR-binding peptide
IMSMEGILLVRGNDMIQMTINST

SEQ ID NO: 89755 - protein, 31 aa, Artificial Sequence
  Cyclic GFR-binding peptide
  MOD_RES (29), (30): Xaa is C or S
VMGSMEGIIIQQKDNMIQMTINSMKTPTXXP

SEQ ID NO: 89756 - protein, 28 aa, Artificial Sequence
  Cyclic GFR-binding peptide
  MOD_RES (27), (28): Xaa is C or S
DSMEGIVVNNAADMIQITINSLRAPVXX

SEQ ID NO: 89757 - protein, 39 aa, Artificial Sequence; identical to SEQ ID NO: 35650
  Cyclic GFR-binding peptide
  MOD_RES (1), (3), (34), (35): Xaa is C or S

SEQ ID NO: 89758 - protein, 39 aa, Artificial Sequence; identical to SEQ ID NO: 35651
  Cyclic GFR-binding peptide
  MOD_RES (2), (34), (35): Xaa is C or S

SEQ ID NO: 89759 - protein, 28 aa, Artificial Sequence
  Cyclic GFR-binding peptide
  MOD_RES (28), (28): Xaa is C or S
MDSMEGLVVNNAADMIQITINSLRAPVX

SEQ ID NO: 89760 - protein, 23 aa, Artificial Sequence
  Cyclic GFR-binding peptide
VMNSMEGLIVNSSDDMIQVTINS

SEQ ID NO: 89761 - protein, 29 aa, Artificial Sequence
  Cyclic GFR-binding peptide
  MOD_RES (27), (28): Xaa is C or S
NSMEGLIVNSSDDMIQVTINSLKTPAXXP

SEQ ID NO: 89762 - protein, 35 aa, Artificial Sequence
  Cyclic GFR-binding peptide
  MOD_RES (29), (30): Xaa is C or S
VMNSMEGLIVNSSDDMIQVTINSLKTPAXXPKPVH

SEQ ID NO: 89763 - protein, 28 aa, Artificial Sequence
  Cyclic GFR-binding peptide
  MOD_RES (2), (2): Xaa is C or S
GXRDVVMGSMEGIIIQQKDNMIQMTINS

SEQ ID NO: 89764 - protein, 26 aa, Artificial Sequence
  Cyclic GFR-binding peptide
  MOD_RES (26), (26): Xaa is C or S
SMEGLVKPKRGVMIQITINSLAQPVX

SEQ ID NO: 89765 - protein, 35 aa, Artificial Sequence
  Cyclic GFR-binding peptide
  MOD_RES (29), (30): Xaa is C or S
VMGSMEGIIIQQKDNMIQMTINSMKTPTXXPGASG

SEQ ID NO: 89766 - protein, 31 aa, Artificial Sequence
  Cyclic GFR-binding peptide
  MOD_RES (30), (31): Xaa is C or S
KVIMSMEGLIKPTKGIMIQITINSLDQSVXX

SEQ ID NO: 89767 - protein, 30 aa, Artificial Sequence
  Cyclic GFR-binding peptide
  MOD_RES (30), (30): Xaa is C or S
VVMDSMEGLVVNNAADMIQITINSLRAPVX

SEQ ID NO: 89768 - protein, 33 aa, Artificial Sequence; identical to SEQ ID NO: 35661
  Cyclic GFR-binding peptide
  MOD_RES (32), (33): Xaa is C or S

SEQ ID NO: 89769 - protein, 32 aa, Artificial Sequence
  Cyclic GFR-binding peptide
  MOD_RES (28), (29): Xaa is C or S
IMSMEGLVKPKRGVMIQITINSLAQPVXXPAA

SEQ ID NO: 89770 - protein, 25 aa, Artificial Sequence
  Cyclic GFR-binding peptide
SRVIMSMEGLVKPKRGVMIQITINS

SEQ ID NO: 89771 - protein, 31 aa, Artificial Sequence; identical to SEQ ID NO: 35665
  Cyclic GFR-binding peptide
  MOD_RES (31), (31): Xaa is C or S

SEQ ID NO: 89772 - protein, 32 aa, Artificial Sequence
  Cyclic GFR-binding peptide
  MOD_RES (30), (31): Xaa is C or S
KVIMSMEGLIKPTKGIMIQITINSLDQSVXXP

SEQ ID NO: 89773 - protein, 40 aa, Artificial Sequence; identical to SEQ ID NO: 35666
  Cyclic GFR-binding peptide
  MOD_RES (1), (3), (34), (35): Xaa is C or S

SEQ ID NO: 89774 - protein, 29 aa, Artificial Sequence
  Cyclic GFR-binding peptide
VVMGSMEGLIIQQKDNMIQMTINSMKTPT

SEQ ID NO: 89775 - protein, 31 aa, Artificial Sequence
  Cyclic GFR-binding peptide
  MOD_RES (1), (3): Xaa is C or S
XKXSKVVMSMEGLVKPTRGVMIQITINSLDQ

SEQ ID NO: 89776 - protein, 41 aa, Artificial Sequence; identical to SEQ ID NO: 35672
  Cyclic GFR-binding peptide
  MOD_RES (2), (4), (36), (37): Xaa is C or S

SEQ ID NO: 89777 - protein, 29 aa, Artificial Sequence
  Cyclic GFR-binding peptide
  MOD_RES (26), (27): Xaa is C or S
SMEGLVKPKRGVMIQITINSLAQPVXXPA

SEQ ID NO: 89778 - protein, 25 aa, Artificial Sequence
  Cyclic GFR-binding peptide
SKVIMSMEGLIKPTKGIMIQITINS

SEQ ID NO: 89779 - protein, 29 aa, Artificial Sequence
  Cyclic GFR-binding peptide
  MOD_RES (28), (29): Xaa is C or S
VMSMEGLVKPTRGVMIQITINSLDQPVXX

SEQ ID NO: 89780 - protein, 22 aa, Artificial Sequence
  Cyclic GFR-binding peptide
DSMEGIVVNNAADMIQITINSL

SEQ ID NO: 89781 - protein, 25 aa, Artificial Sequence
  Cyclic GFR-binding peptide
DSMEGLVVNNASDMIQITINSLRTP

SEQ ID NO: 89782 - protein, 38 aa, Artificial Sequence; identical to SEQ ID NO: 35678
  Cyclic GFR-binding peptide
  MOD_RES (1), (32), (33): Xaa is C or S

SEQ ID NO: 89783 - protein, 31 aa, Artificial Sequence
  Cyclic GFR-binding peptide
  MOD_RES (2), (2): Xaa is C or S
KXSRVIMSMEGLVKPKRGVMIQITINSLAQP

SEQ ID NO: 89784 - protein, 25 aa, Artificial Sequence
  Cyclic GFR-binding peptide
SMEGLIIQQKDNMIQMTINSMKTPT

SEQ ID NO: 89785 - protein, 29 aa, Artificial Sequence
  Cyclic GFR-binding peptide
  MOD_RES (2), (2): Xaa is C or S
GXAEVVMDSMEGIVVNNAADMIQITINSL

SEQ ID NO: 89786 - protein, 27 aa, Artificial Sequence
  Cyclic GFR-binding peptide
VVMNSMEGLIVNSSDDMIQVTINSLKT

SEQ ID NO: 89787 - protein, 27 aa, Artificial Sequence
  Cyclic GFR-binding peptide
  MOD_RES (1), (1): Xaa is C or S
XEEVIMSMEGILLVRGNDMIQMTINST

SEQ ID NO: 89788 - protein, 29 aa, Artificial Sequence
  Cyclic GFR-binding peptide
RDVVMGSMEGIIIQQKDNMIQMTINSMKT

SEQ ID NO: 89789 - protein, 35 aa, Artificial Sequence
  Cyclic GFR-binding peptide
  MOD_RES (30), (31): Xaa is C or S
RVIMSMEGLVKPKRGVMIQITINSLAQPVXXPAAS

SEQ ID NO: 89790 - protein, 23 aa, Artificial Sequence
  Cyclic GFR-binding peptide
MSMEGLLLVRGNDMIQMTINSTK

SEQ ID NO: 89791 - protein, 34 aa, Artificial Sequence
  Cyclic GFR-binding peptide
  MOD_RES (29), (30): Xaa is C or S
VVMSMEGLVKPTRGVMIQITINSLDQPVXXPSAS

SEQ ID NO: 89792 - protein, 21 aa, Artificial Sequence
  Cyclic GFR-binding peptide
SMEGLIVNSSDDMIQVTINSL

SEQ ID NO: 89793 - protein, 27 aa, Artificial Sequence
  Cyclic GFR-binding peptide
  MOD_RES (26), (27): Xaa is C or S
SMEGIIIQQKDNMIQMTINSMKTPTXX

SEQ ID NO: 89794 - protein, 25 aa, Artificial Sequence
  Cyclic GFR-binding peptide
SMEGLVVNNAADMIQITINSLRAPV

SEQ ID NO: 89795 - protein, 27 aa, Artificial Sequence
  Cyclic GFR-binding peptide
IMSMEGLVKPKRGVMIQITINSLAQPV

SEQ ID NO: 89796 - protein, 27 aa, Artificial Sequence
  Cyclic GFR-binding peptide
  MOD_RES (2), (2): Xaa is C or S
KXSRVIMSMEGLVKPKRGVMIQITINS

SEQ ID NO: 89797 - protein, 24 aa, Artificial Sequence
  Cyclic GFR-binding peptide
VVMDSMEGIVVNNASDMIQITINS

SEQ ID NO: 89798 - protein, 25 aa, Artificial Sequence
  Cyclic GFR-binding peptide
VMNSMEGLIVNSSDDMIQVTINSLK

SEQ ID NO: 89799 - protein, 21 aa, Artificial Sequence
  Cyclic GFR-binding peptide
MSMEGLLLVRGNDMIQMTINS

SEQ ID NO: 89800 - protein, 27 aa, Artificial Sequence
  Cyclic GFR-binding peptide
  MOD_RES (27), (27): Xaa is C or S
MSMEGLVKPKRGVMIQITINSLAQPVX

SEQ ID NO: 89801 - protein, 25 aa, Artificial Sequence
  Cyclic GFR-binding peptide
VMGSMEGIIIQQKDNMIQMTINSMK

SEQ ID NO: 89802 - protein, 31 aa, Artificial Sequence
  Cyclic GFR-binding peptide
  MOD_RES (1), (1): Xaa is C or S
XSEVVMDSMEGIVVNNASDMIQITINSLRTP

SEQ ID NO: 89803 - protein, 37 aa, Artificial Sequence; identical to SEQ ID NO: 35700
  Cyclic GFR-binding peptide
  MOD_RES (31), (32): Xaa is C or S

SEQ ID NO: 89804 - protein, 37 aa, Artificial Sequence; identical to SEQ ID NO: 35702
  Cyclic GFR-binding peptide
  MOD_RES (1), (33), (34): Xaa is C or S

SEQ ID NO: 89805 - protein, 34 aa, Artificial Sequence
  Cyclic GFR-binding peptide
  MOD_RES (28), (29): Xaa is C or S
IMSMEGLVKPKRGVMIQITINSLAQPVXXPAASA

SEQ ID NO: 89806 - protein, 36 aa, Artificial Sequence; identical to SEQ ID NO: 35705
  Cyclic GFR-binding peptide
  MOD_RES (32), (33): Xaa is C or S

SEQ ID NO: 89807 - protein, 27 aa, Artificial Sequence
  Cyclic GFR-binding peptide
MNSMEGLIVNSSDDMIQVTINSLKTPA

SEQ ID NO: 89808 - protein, 27 aa, Artificial Sequence
  Cyclic GFR-binding peptide
EEVIMSMEGILLVRGNDMIQMTINSTK

SEQ ID NO: 89809 - protein, 36 aa, Artificial Sequence; identical to SEQ ID NO: 35707
  Cyclic GFR-binding peptide
  MOD_RES (2), (4), (36): Xaa is C or S

SEQ ID NO: 89810 - protein, 30 aa, Artificial Sequence
  Cyclic GFR-binding peptide
  MOD_RES (1), (1): Xaa is C or S
XEEVIMSMEGILLVRGNDMIQMTINSTKVP

SEQ ID NO: 89811 - protein, 27 aa, Artificial Sequence
  Cyclic GFR-binding peptide
  MOD_RES (2), (2): Xaa is C or S
GXEEVIMSMEGILLVRGNDMIQMTINS

SEQ ID NO: 89812 - protein, 26 aa, Artificial Sequence
  Cyclic GFR-binding peptide
SKVIMSMEGLIKPTKGIMIQITINSL

SEQ ID NO: 89813 - protein, 36 aa, Artificial Sequence; identical to SEQ ID NO: 35711
  Cyclic GFR-binding peptide
  MOD_RES (1), (33), (34): Xaa is C or S

SEQ ID NO: 89814 - protein, 32 aa, Artificial Sequence
  Cyclic GFR-binding peptide
  MOD_RES (28), (29): Xaa is C or S
MDSMEGIVVNNAADMIQITINSLRAPVXXSAP

SEQ ID NO: 89815 - protein, 35 aa, Artificial Sequence; identical to SEQ ID NO: 35714
  Cyclic GFR-binding peptide
  MOD_RES (2), (4): Xaa is C or S

SEQ ID NO: 89816 - protein, 36 aa, Artificial Sequence; identical to SEQ ID NO: 35717
  Cyclic GFR-binding peptide
  MOD_RES (2), (34), (35): Xaa is C or S

SEQ ID NO: 89817 - protein, 39 aa, Artificial Sequence; identical to SEQ ID NO: 35720
  Cyclic GFR-binding peptide
  MOD_RES (1), (33), (34): Xaa is C or S

SEQ ID NO: 89818 - protein, 28 aa, Artificial Sequence
  Cyclic GFR-binding peptide
  MOD_RES (26), (27): Xaa is C or S
SMEGIVVNNASDMIQITINSLRTPVXXT

SEQ ID NO: 89819 - protein, 30 aa, Artificial Sequence
  Cyclic GFR-binding peptide
  MOD_RES (2), (2): Xaa is C or S
GXSEVVMDSMEGLVVNNASDMIQITINSLR

SEQ ID NO: 89820 - protein, 29 aa, Artificial Sequence
  Cyclic GFR-binding peptide
VVMGSMEGIIIQQKDNMIQMTINSMKTPT

SEQ ID NO: 89821 - protein, 30 aa, Artificial Sequence
  Cyclic GFR-binding peptide
  MOD_RES (2), (4): Xaa is C or S
RXGXSEVVMDSMEGLVVNNASDMIQITINS

SEQ ID NO: 89822 - protein, 33 aa, Artificial Sequence; identical to SEQ ID NO: 35732
  Cyclic GFR-binding peptide
  MOD_RES (2), (33): Xaa is C or S

SEQ ID NO: 89823 - protein, 26 aa, Artificial Sequence
  Cyclic GFR-binding peptide
  MOD_RES (26), (26): Xaa is C or S
SMEGLIKPTKGIMIQITINSLDQSVX

SEQ ID NO: 89824 - protein, 34 aa, Artificial Sequence; identical to SEQ ID NO: 35734
  Cyclic GFR-binding peptide
  MOD_RES (32), (33): Xaa is C or S

SEQ ID NO: 89825 - protein, 22 aa, Artificial Sequence
  Cyclic GFR-binding peptide
SMEGLVKPTRGVMIQITINSLD

SEQ ID NO: 89826 - protein, 27 aa, Artificial Sequence
  Cyclic GFR-binding peptide
  MOD_RES (27), (27): Xaa is C or S
MSMEGLVKPTRGVMIQITINSLDQPVX

SEQ ID NO: 89827 - protein, 32 aa, Artificial Sequence; identical to SEQ ID NO: 35735
  Cyclic GFR-binding peptide
  MOD_RES (2), (2): Xaa is C or S

SEQ ID NO: 89828 - protein, 31 aa, Artificial Sequence
  Cyclic GFR-binding peptide
  MOD_RES (28), (29): Xaa is C or S
MGSMEGLIIQQKDNMIQMTINSMKTPTXXPG

SEQ ID NO: 89829 - protein, 36 aa, Artificial Sequence; identical to SEQ ID NO: 35741
  Cyclic GFR-binding peptide
  MOD_RES (32), (33): Xaa is C or S

SEQ ID NO: 89830 - protein, 27 aa, Artificial Sequence
  Cyclic GFR-binding peptide
VVMSMEGLVKPTRGVMIQITINSLDQP

SEQ ID NO: 89831 - protein, 32 aa, Artificial Sequence
  Cyclic GFR-binding peptide
  MOD_RES (1), (3): Xaa is C or S
XKXSKVVMSMEGLVKPTRGVMIQITINSLDQP

SEQ ID NO: 89832 - protein, 33 aa, Artificial Sequence; identical to SEQ ID NO: 35744
  Cyclic GFR-binding peptide
  MOD_RES (2), (33): Xaa is C or S

SEQ ID NO: 89833 - protein, 31 aa, Artificial Sequence
  Cyclic GFR-binding peptide
  MOD_RES (28), (29): Xaa is C or S
IMSMEGLLLVRGNDMIQMTINSTKVPAXXTS

SEQ ID NO: 89834 - protein, 24 aa, Artificial Sequence
  Cyclic GFR-binding peptide
DSMEGLVVNNAADMIQITINSLRA

SEQ ID NO: 89835 - protein, 36 aa, Artificial Sequence
  Cyclic GFR-binding peptide
  MOD_RES (30), (31): Xaa is C or S
VVMGSMEGLIIQQKDNMIQMTINSMKTPTXXPGASG

SEQ ID NO: 89836 - protein, 37 aa, Artificial Sequence; identical to SEQ ID NO: 35749
  Cyclic GFR-binding peptide
  MOD_RES (2), (34), (35): Xaa is C or S

SEQ ID NO: 89837 - protein, 36 aa, Artificial Sequence
  Cyclic GFR-binding peptide
  MOD_RES (30), (31): Xaa is C or S
VVMNSMEGLIVNSSDDMIQVTINSLKTPAXXPKPVH

SEQ ID NO: 89838 - protein, 30 aa, Artificial Sequence
  Cyclic GFR-binding peptide
  MOD_RES (1), (1): Xaa is C or S
XSKVIMSMEGLIKPTKGIMIQITINSLDQS

SEQ ID NO: 89839 - protein, 37 aa, Artificial Sequence; identical to SEQ ID NO: 35751
  Cyclic GFR-binding peptide
  MOD_RES (1), (32), (33): Xaa is C or S

SEQ ID NO: 89840 - protein, 29 aa, Artificial Sequence
  Cyclic GFR-binding peptide
VVMDSMEGLVVNNAADMIQITINSLRAPV

SEQ ID NO: 89841 - protein, 34 aa, Artificial Sequence; identical to SEQ ID NO: 35754
  Cyclic GFR-binding peptide
  MOD_RES (1), (3), (34): Xaa is C or S

SEQ ID NO: 89842 - protein, 30 aa, Artificial Sequence
  Cyclic GFR-binding peptide
  MOD_RES (27), (28): Xaa is C or S
DSMEGLVVNNASDMIQITINSLRTPVXXTP

SEQ ID NO: 89843 - protein, 30 aa, Artificial Sequence
  Cyclic GFR-binding peptide
  MOD_RES (27), (28): Xaa is C or S
NSMEGLIVNSSDDMIQVTINSLKTPAXXPK

SEQ ID NO: 89844 - protein, 26 aa, Artificial Sequence
  Cyclic GFR-binding peptide
MGSMEGLIIQQKDNMIQMTINSMKTP

SEQ ID NO: 89845 - protein, 35 aa, Artificial Sequence; identical to SEQ ID NO: 35761
  Cyclic GFR-binding peptide
  MOD_RES (1), (32), (33): Xaa is C or S

SEQ ID NO: 89846 - protein, 31 aa, Artificial Sequence
  Cyclic GFR-binding peptide
  MOD_RES (28), (29): Xaa is C or S
MDSMEGIVVNNAADMIQITINSLRAPVXXSA

SEQ ID NO: 89847 - protein, 25 aa, Artificial Sequence
  Cyclic GFR-binding peptide
SMEGLVKPTRGVMIQITINSLDQPV

SEQ ID NO: 89848 - protein, 32 aa, Artificial Sequence
  Cyclic GFR-binding peptide
  MOD_RES (29), (30): Xaa is C or S
VMGSMEGIIIQQKDNMIQMTINSMKTPTXXPG

SEQ ID NO: 89849 - protein, 25 aa, Artificial Sequence
  Cyclic GFR-binding peptide
VMDSMEGIVVNNASDMIQITINSLR

SEQ ID NO: 89850 - protein, 31 aa, Artificial Sequence
  Cyclic GFR-binding peptide
  MOD_RES (30), (31): Xaa is C or S
RVIMSMEGLVKPKRGVMIQITINSLAQPVXX

SEQ ID NO: 89851 - protein, 34 aa, Artificial Sequence; identical to SEQ ID NO: 35766
  Cyclic GFR-binding peptide
  MOD_RES (2), (33), (34): Xaa is C or S

SEQ ID NO: 89852 - protein, 38 aa, Artificial Sequence; identical to SEQ ID NO: 35769
  Cyclic GFR-binding peptide
  MOD_RES (1), (3), (35), (36): Xaa is C or S

SEQ ID NO: 89853 - protein, 22 aa, Artificial Sequence
  Cyclic GFR-binding peptide
MSMEGLIKPTKGIMIQITINSL

SEQ ID NO: 89854 - protein, 33 aa, Artificial Sequence
  Cyclic GFR-binding peptide
  MOD_RES (2), (4): Xaa is C or S
RXGXAEVVMDSMEGLVVNNAADMIQITINSLRA

SEQ ID NO: 89855 - protein, 31 aa, Artificial Sequence
  Cyclic GFR-binding peptide
  MOD_RES (29), (30): Xaa is C or S
VIMSMEGLIKPTKGIMIQITINSLDQSVXXP

SEQ ID NO: 89856 - protein, 30 aa, Artificial Sequence
  Cyclic GFR-binding peptide
  MOD_RES (28), (29): Xaa is C or S
MGSMEGIIIQQKDNMIQMTINSMKTPTXXP

SEQ ID NO: 89857 - protein, 33 aa, Artificial Sequence; identical to SEQ ID NO: 35776
  Cyclic GFR-binding peptide
  MOD_RES (31), (32): Xaa is C or S

SEQ ID NO: 89858 - protein, 37 aa, Artificial Sequence; identical to SEQ ID NO: 35777
  Cyclic GFR-binding peptide
  MOD_RES (2), (33), (34): Xaa is C or S

SEQ ID NO: 89859 - protein, 31 aa, Artificial Sequence
  Cyclic GFR-binding peptide
  MOD_RES (30), (31): Xaa is C or S
EVIMSMEGILLVRGNDMIQMTINSTKVPAXX

SEQ ID NO: 89860 - protein, 29 aa, Artificial Sequence
  Cyclic GFR-binding peptide
  MOD_RES (26), (27): Xaa is C or S
SMEGLVVNNAADMIQITINSLRAPVXXSA

SEQ ID NO: 89861 - protein, 27 aa, Artificial Sequence
  Cyclic GFR-binding peptide
AEVVMDSMEGIVVNNAADMIQITINSL

SEQ ID NO: 89862 - protein, 40 aa, Artificial Sequence; identical to SEQ ID NO: 35781
  Cyclic GFR-binding peptide
  MOD_RES (2), (34), (35): Xaa is C or S

SEQ ID NO: 89863 - protein, 38 aa, Artificial Sequence; identical to SEQ ID NO: 35782
  Cyclic GFR-binding peptide
  MOD_RES (1), (3), (34), (35): Xaa is C or S

SEQ ID NO: 89864 - protein, 40 aa, Artificial Sequence; identical to SEQ ID NO: 35783
  Cyclic GFR-binding peptide
  MOD_RES (1), (3), (35), (36): Xaa is C or S

SEQ ID NO: 89865 - protein, 35 aa, Artificial Sequence; identical to SEQ ID NO: 35784
  Cyclic GFR-binding peptide
  MOD_RES (1), (32), (33): Xaa is C or S

SEQ ID NO: 89866 - protein, 31 aa, Artificial Sequence; identical to SEQ ID NO: 35786
  Cyclic GFR-binding peptide

SEQ ID NO: 89867 - protein, 20 aa, Artificial Sequence
  Cyclic GFR-binding peptide
SMEGIIIQQKDNMIQMTINS

SEQ ID NO: 89868 - protein, 31 aa, Artificial Sequence; identical to SEQ ID NO: 35787
  Cyclic GFR-binding peptide
  MOD_RES (31), (31): Xaa is C or S

SEQ ID NO: 89869 - protein, 33 aa, Artificial Sequence
  Cyclic GFR-binding peptide
  MOD_RES (30), (31): Xaa is C or S
KVVMSMEGLVKPTRGVMIQITINSLDQPVXXPS

SEQ ID NO: 89870 - protein, 21 aa, Artificial Sequence
  Cyclic GFR-binding peptide
SMEGLIIQQKDNMIQMTINSM

SEQ ID NO: 89871 - protein, 34 aa, Artificial Sequence; identical to SEQ ID NO: 35792
  Cyclic GFR-binding peptide
  MOD_RES (2), (34): Xaa is C or S

SEQ ID NO: 89872 - protein, 33 aa, Artificial Sequence
  Cyclic GFR-binding peptide
  MOD_RES (30), (31): Xaa is C or S
VVMDSMEGLVVNNAADMIQITINSLRAPVXXSA

SEQ ID NO: 89873 - protein, 34 aa, Artificial Sequence; identical to SEQ ID NO: 35795
  Cyclic GFR-binding peptide
  MOD_RES (2), (4): Xaa is C or S

SEQ ID NO: 89874 - protein, 28 aa, Artificial Sequence
  Cyclic GFR-binding peptide
VIMSMEGLVKPKRGVMIQITINSLAQPV

SEQ ID NO: 89875 - protein, 29 aa, Artificial Sequence
  Cyclic GFR-binding peptide
  MOD_RES (28), (29): Xaa is C or S
MDSMEGLVVNNAADMIQITINSLRAPVXX

SEQ ID NO: 89876 - protein, 32 aa, Artificial Sequence
  Cyclic GFR-binding peptide
  MOD_RES (1), (3): Xaa is C or S
XGXAEVVMDSMEGIVVNNAADMIQITINSLRA

SEQ ID NO: 89877 - protein, 31 aa, Artificial Sequence; identical to SEQ ID NO: 35799
  Cyclic GFR-binding peptide
  MOD_RES (1), (1): Xaa is C or S

SEQ ID NO: 89878 - protein, 39 aa, Artificial Sequence; identical to SEQ ID NO: 35800
  Cyclic GFR-binding peptide
  MOD_RES (2), (4), (35), (36): Xaa is C or S

SEQ ID NO: 89879 - protein, 30 aa, Artificial Sequence
  Cyclic GFR-binding peptide
  MOD_RES (26), (27): Xaa is C or S
SMEGIVVNNAADMIQITINSLRAPVXXSAP

SEQ ID NO: 89880 - protein, 30 aa, Artificial Sequence
  Cyclic GFR-binding peptide
  MOD_RES (27), (28): Xaa is C or S
MSMEGILLVRGNDMIQMTINSTKVPAXXTS

SEQ ID NO: 89881 - protein, 33 aa, Artificial Sequence
  Cyclic GFR-binding peptide
  MOD_RES (27), (28): Xaa is C or S
GSMEGLIIQQKDNMIQMTINSMKTPTXXPGASG

SEQ ID NO: 89882 - protein, 36 aa, Artificial Sequence
  Cyclic GFR-binding peptide
  MOD_RES (30), (31): Xaa is C or S
KVIMSMEGLIKPTKGIMIQITINSLDQSVXXPSASA

SEQ ID NO: 89883 - protein, 24 aa, Artificial Sequence
  Cyclic GFR-binding peptide
MSMEGILLVRGNDMIQMTINSTKV

SEQ ID NO: 89884 - protein, 24 aa, Artificial Sequence
  Cyclic GFR-binding peptide
SMEGLVVNNASDMIQITINSLRTP

SEQ ID NO: 89885 - protein, 36 aa, Artificial Sequence; identical to SEQ ID NO: 35811
  Cyclic GFR-binding peptide
  MOD_RES (31), (32): Xaa is C or S

SEQ ID NO: 89886 - protein, 24 aa, Artificial Sequence
  Cyclic GFR-binding peptide
EVIMSMEGLLLVRGNDMIQMTINS

SEQ ID NO: 89887 - protein, 29 aa, Artificial Sequence
  Cyclic GFR-binding peptide
EVVMDSMEGLVVNNASDMIQITINSLRTP

SEQ ID NO: 89888 - protein, 30 aa, Artificial Sequence
  Cyclic GFR-binding peptide
  MOD_RES (1), (1): Xaa is C or S
XAEVVMDSMEGIVVNNAADMIQITINSLRA

SEQ ID NO: 89889 - protein, 30 aa, Artificial Sequence
  Cyclic GFR-binding peptide
  MOD_RES (2), (4): Xaa is C or S
HXGXSRVVMNSMEGLIVNSSDDMIQVTINS

SEQ ID NO: 89890 - protein, 37 aa, Artificial Sequence; identical to SEQ ID NO: 35813
  Cyclic GFR-binding peptide
  MOD_RES (1), (32), (33): Xaa is C or S

SEQ ID NO: 89891 - protein, 27 aa, Artificial Sequence
  Cyclic GFR-binding peptide
VVMDSMEGIVVNNAADMIQITINSLRA

SEQ ID NO: 89892 - protein, 23 aa, Artificial Sequence
  Cyclic GFR-binding peptide
IMSMEGLIKPTKGIMIQITINSL

SEQ ID NO: 89893 - protein, 28 aa, Artificial Sequence
  Cyclic GFR-binding peptide
RVVMNSMEGLIVNSSDDMIQVTINSLKT

SEQ ID NO: 89894 - protein, 32 aa, Artificial Sequence
  Cyclic GFR-binding peptide
  MOD_RES (26), (27): Xaa is C or S
SMEGLVKPKRGVMIQITINSLAQPVXXPAASA

SEQ ID NO: 89895 - protein, 30 aa, Artificial Sequence
  Cyclic GFR-binding peptide
  MOD_RES (1), (3): Xaa is C or S
XGXAEVVMDSMEGIVVNNAADMIQITINSL

SEQ ID NO: 89896 - protein, 28 aa, Artificial Sequence
  Cyclic GFR-binding peptide
  MOD_RES (1), (1): Xaa is C or S
XRDVVMGSMEGIIIQQKDNMIQMTINSM

SEQ ID NO: 89897 - protein, 29 aa, Artificial Sequence
  Cyclic GFR-binding peptide
  MOD_RES (1), (1): Xaa is C or S
XRDVVMGSMEGIIIQQKDNMIQMTINSMK

SEQ ID NO: 89898 - protein, 30 aa, Artificial Sequence
  Cyclic GFR-binding peptide
  MOD_RES (1), (1): Xaa is C or S
XSEVVMDSMEGLVVNNASDMIQITINSLRT

SEQ ID NO: 89899 - protein, 25 aa, Artificial Sequence
  Cyclic GFR-binding peptide
DSMEGLVVNNAADMIQITINSLRAP

SEQ ID NO: 89900 - protein, 23 aa, Artificial Sequence
  Cyclic GFR-binding peptide
SMEGLVVNNASDMIQITINSLRT

SEQ ID NO: 89901 - protein, 32 aa, Artificial Sequence
  Cyclic GFR-binding peptide
  MOD_RES (2), (4): Xaa is C or S
SXKXSKVVMSMEGLVKPTRGVMIQITINSLDQ

SEQ ID NO: 89902 - protein, 32 aa, Artificial Sequence
  Cyclic GFR-binding peptide
  MOD_RES (27), (28): Xaa is C or S
MSMEGLIKPTKGIMIQITINSLDQSVXXPSAS

SEQ ID NO: 89903 - protein, 31 aa, Artificial Sequence
  Cyclic GFR-binding peptide
  MOD_RES (30), (31): Xaa is C or S
EVIMSMEGLLLVRGNDMIQMTINSTKVPAXX

SEQ ID NO: 89904 - protein, 34 aa, Artificial Sequence; identical to SEQ ID NO: 35838
  Cyclic GFR-binding peptide
  MOD_RES (1), (32), (33): Xaa is C or S

SEQ ID NO: 89905 - protein, 25 aa, Artificial Sequence
  Cyclic GFR-binding peptide
SMEGIVVNNASDMIQITINSLRTPV

SEQ ID NO: 89906 - protein, 28 aa, Artificial Sequence
  Cyclic GFR-binding peptide
  MOD_RES (1), (1): Xaa is C or S
XAEVVMDSMEGIVVNNAADMIQITINSL

SEQ ID NO: 89907 - protein, 27 aa, Artificial Sequence
  Cyclic GFR-binding peptide
VMGSMEGIIIQQKDNMIQMTINSMKTP

SEQ ID NO: 89908 - protein, 30 aa, Artificial Sequence
  Cyclic GFR-binding peptide
  MOD_RES (2), (4): Xaa is C or S
RXGXAEVVMDSMEGLVVNNAADMIQITINS

SEQ ID NO: 89909 - protein, 26 aa, Artificial Sequence
  Cyclic GFR-binding peptide
DVVMGSMEGLIIQQKDNMIQMTINSM

SEQ ID NO: 89910 - protein, 23 aa, Artificial Sequence
  Cyclic GFR-binding peptide
MSMEGLVKPKRGVMIQITINSLA

SEQ ID NO: 89911 - protein, 32 aa, Artificial Sequence
  Cyclic GFR-binding peptide
  MOD_RES (27), (28): Xaa is C or S
DSMEGIVVNNAADMIQITINSLRAPVXXSAPA

SEQ ID NO: 89912 - protein, 25 aa, Artificial Sequence
  Cyclic GFR-binding peptide
MDSMEGIVVNNAADMIQITINSLRA

SEQ ID NO: 89913 - protein, 21 aa, Artificial Sequence
  Cyclic GFR-binding peptide
DSMEGLVVNNASDMIQITINS

SEQ ID NO: 89914 - protein, 40 aa, Artificial Sequence; identical to SEQ ID NO: 35845
  Cyclic GFR-binding peptide
  MOD_RES (2), (4), (36), (37): Xaa is C or S

SEQ ID NO: 89915 - protein, 38 aa, Artificial Sequence; identical to SEQ ID NO: 35846
  Cyclic GFR-binding peptide
  MOD_RES (1), (3), (35), (36): Xaa is C or S

SEQ ID NO: 89916 - protein, 35 aa, Artificial Sequence; identical to SEQ ID NO: 35849
  Cyclic GFR-binding peptide
  MOD_RES (2), (4): Xaa is C or S

SEQ ID NO: 89917 - protein, 26 aa, Artificial Sequence
  Cyclic GFR-binding peptide
  MOD_RES (26), (26): Xaa is C or S
SMEGIVVNNASDMIQITINSLRTPVX

SEQ ID NO: 89918 - protein, 30 aa, Artificial Sequence
  Cyclic GFR-binding peptide
AEVVMDSMEGIVVNNAADMIQITINSLRAP

SEQ ID NO: 89919 - protein, 33 aa, Artificial Sequence; identical to SEQ ID NO: 35854
  Cyclic GFR-binding peptide
  MOD_RES (1), (32), (33): Xaa is C or S

SEQ ID NO: 89920 - protein, 36 aa, Artificial Sequence; identical to SEQ ID NO: 35856
  Cyclic GFR-binding peptide
  MOD_RES (1), (33), (34): Xaa is C or S

SEQ ID NO: 89921 - protein, 30 aa, Artificial Sequence
  Cyclic GFR-binding peptide
  MOD_RES (29), (30): Xaa is C or S
VMDSMEGLVVNNASDMIQITINSLRTPVXX

SEQ ID NO: 89922 - protein, 33 aa, Artificial Sequence
  Cyclic GFR-binding peptide
  MOD_RES (28), (29): Xaa is C or S
MDSMEGIVVNNASDMIQITINSLRTPVXXTPPT

SEQ ID NO: 89923 - protein, 35 aa, Artificial Sequence; identical to SEQ ID NO: 35860
  Cyclic GFR-binding peptide
  MOD_RES (32), (33): Xaa is C or S

SEQ ID NO: 89924 - protein, 38 aa, Artificial Sequence; identical to SEQ ID NO: 35861
  Cyclic GFR-binding peptide
  MOD_RES (1), (33), (34): Xaa is C or S

SEQ ID NO: 89925 - protein, 27 aa, Artificial Sequence
  Cyclic GFR-binding peptide
MDSMEGLVVNNASDMIQITINSLRTPV

SEQ ID NO: 89926 - protein, 30 aa, Artificial Sequence; identical to SEQ ID NO: 35863
  Cyclic GFR-binding peptide

SEQ ID NO: 89927 - protein, 36 aa, Artificial Sequence; identical to SEQ ID NO: 35865
  Cyclic GFR-binding peptide
  MOD_RES (1), (3), (35), (36): Xaa is C or S

SEQ ID NO: 89928 - protein, 27 aa, Artificial Sequence
  Cyclic GFR-binding peptide
MGSMEGIIIQQKDNMIQMTINSMKTPT

SEQ ID NO: 89929 - protein, 42 aa, Artificial Sequence; identical to SEQ ID NO: 35870
  Cyclic GFR-binding peptide
  MOD_RES (2), (4), (36), (37): Xaa is C or S

SEQ ID NO: 89930 - protein, 32 aa, Artificial Sequence
  Cyclic GFR-binding peptide
  MOD_RES (26), (27): Xaa is C or S
SMEGIVVNNAADMIQITINSLRAPVXXSAPAA

SEQ ID NO: 89931 - protein, 34 aa, Artificial Sequence; identical to SEQ ID NO: 35873
  Cyclic GFR-binding peptide
  MOD_RES (2), (34): Xaa is C or S

SEQ ID NO: 89932 - protein, 27 aa, Artificial Sequence
  Cyclic GFR-binding peptide
  MOD_RES (26), (27): Xaa is C or S
SMEGLVVNNASDMIQITINSLRTPVXX

SEQ ID NO: 89933 - protein, 28 aa, Artificial Sequence
  Cyclic GFR-binding peptide
  MOD_RES (2), (2): Xaa is C or S
GXSEVVMDSMEGLVVNNASDMIQITINS

SEQ ID NO: 89934 - protein, 38 aa, Artificial Sequence; identical to SEQ ID NO: 35876
  Cyclic GFR-binding peptide
  MOD_RES (2), (4), (36), (37): Xaa is C or S

SEQ ID NO: 89935 - protein, 25 aa, Artificial Sequence
  Cyclic GFR-binding peptide
VMDSMEGLVVNNASDMIQITINSLR

SEQ ID NO: 89936 - protein, 32 aa, Artificial Sequence
  Cyclic GFR-binding peptide
  MOD_RES (29), (30): Xaa is C or S
VIMSMEGLIKPTKGIMIQITINSLDQSVXXPS

SEQ ID NO: 89937 - protein, 24 aa, Artificial Sequence
  Cyclic GFR-binding peptide
MGSMEGIIIQQKDNMIQMTINSMK

SEQ ID NO: 89938 - protein, 29 aa, Artificial Sequence
  Cyclic GFR-binding peptide
  MOD_RES (1), (1): Xaa is C or S
XSKVVMSMEGLVKPTRGVMIQITINSLDQ

SEQ ID NO: 89939 - protein, 32 aa, Artificial Sequence; identical to SEQ ID NO: 35878
  Cyclic GFR-binding peptide
  MOD_RES (32), (32): Xaa is C or S

SEQ ID NO: 89940 - protein, 36 aa, Artificial Sequence; identical to SEQ ID NO: 35880
  Cyclic GFR-binding peptide
  MOD_RES (2), (34), (35): Xaa is C or S

SEQ ID NO: 89941 - protein, 32 aa, Artificial Sequence
  Cyclic GFR-binding peptide
  MOD_RES (2), (2): Xaa is C or S
GXRDVVMGSMEGLIIQQKDNMIQMTINSMKTP

SEQ ID NO: 89942 - protein, 36 aa, Artificial Sequence; identical to SEQ ID NO: 35887
  Cyclic GFR-binding peptide
  MOD_RES (1), (32), (33): Xaa is C or S

SEQ ID NO: 89943 - protein, 30 aa, Artificial Sequence
  Cyclic GFR-binding peptide
  MOD_RES (30), (30): Xaa is C or S
VVMDSMEGLVVNNASDMIQITINSLRTPVX

SEQ ID NO: 89944 - protein, 28 aa, Artificial Sequence
  Cyclic GFR-binding peptide
  MOD_RES (1), (1): Xaa is C or S
XSEVVMDSMEGIVVNNASDMIQITINSL

SEQ ID NO: 89945 - protein, 25 aa, Artificial Sequence
  Cyclic GFR-binding peptide
VMGSMEGLIIQQKDNMIQMTINSMK

SEQ ID NO: 89946 - protein, 31 aa, Artificial Sequence
  Cyclic GFR-binding peptide
  MOD_RES (2), (2): Xaa is C or S
GXSEVVMDSMEGIVVNNASDMIQITINSLRT

SEQ ID NO: 89947 - protein, 22 aa, Artificial Sequence
  Cyclic GFR-binding peptide
MDSMEGIVVNNAADMIQITINS

SEQ ID NO: 89948 - protein, 33 aa, Artificial Sequence; identical to SEQ ID NO: 35893
  Cyclic GFR-binding peptide
  MOD_RES (31), (32): Xaa is C or S

SEQ ID NO: 89949 - protein, 29 aa, Artificial Sequence
  Cyclic GFR-binding peptide
AEVVMDSMEGLVVNNAADMIQITINSLRA

SEQ ID NO: 89950 - protein, 26 aa, Artificial Sequence
  Cyclic GFR-binding peptide
  MOD_RES (1), (1): Xaa is C or S
XSRVIMSMEGLVKPKRGVMIQITINS

SEQ ID NO: 89951 - protein, 29 aa, Artificial Sequence
  Cyclic GFR-binding peptide
  MOD_RES (26), (27): Xaa is C or S
SMEGILLVRGNDMIQMTINSTKVPAXXTS

SEQ ID NO: 89952 - protein, 33 aa, Artificial Sequence
  Cyclic GFR-binding peptide
  MOD_RES (30), (31): Xaa is C or S
VVMGSMEGIIIQQKDNMIQMTINSMKTPTXXPG

SEQ ID NO: 89953 - protein, 36 aa, Artificial Sequence; identical to SEQ ID NO: 35900
  Cyclic GFR-binding peptide
  MOD_RES (2), (34), (35): Xaa is C or S

SEQ ID NO: 89954 - protein, 27 aa, Artificial Sequence
  Cyclic GFR-binding peptide
VMGSMEGLIIQQKDNMIQMTINSMKTP

SEQ ID NO: 89955 - protein, 30 aa, Artificial Sequence
  Cyclic GFR-binding peptide
  MOD_RES (28), (29): Xaa is C or S
MDSMEGLVVNNAADMIQITINSLRAPVXXS

SEQ ID NO: 89956 - protein, 32 aa, Artificial Sequence
  Cyclic GFR-binding peptide
  MOD_RES (29), (30): Xaa is C or S
VMDSMEGLVVNNASDMIQITINSLRTPVXXTP

SEQ ID NO: 89957 - protein, 22 aa, Artificial Sequence
  Cyclic GFR-binding peptide
SMEGLIKPTKGIMIQITINSLD

SEQ ID NO: 89958 - protein, 38 aa, Artificial Sequence; identical to SEQ ID NO: 35909
  Cyclic GFR-binding peptide
  MOD_RES (32), (33): Xaa is C or S

SEQ ID NO: 89959 - protein, 26 aa, Artificial Sequence
  Cyclic GFR-binding peptide
KVVMSMEGLVKPTRGVMIQITINSLD

SEQ ID NO: 89960 - protein, 33 aa, Artificial Sequence
  Cyclic GFR-binding peptide
  MOD_RES (2), (4): Xaa is C or S
LXGXEEVIMSMEGLLLVRGNDMIQMTINSTKVP

SEQ ID NO: 89961 - protein, 34 aa, Artificial Sequence; identical to SEQ ID NO: 35912
  Cyclic GFR-binding peptide
  MOD_RES (2), (34): Xaa is C or S

SEQ ID NO: 89962 - protein, 27 aa, Artificial Sequence
  Cyclic GFR-binding peptide
SEVVMDSMEGLVVNNASDMIQITINSL

SEQ ID NO: 89963 - protein, 31 aa, Artificial Sequence
  Cyclic GFR-binding peptide
  MOD_RES (26), (27): Xaa is C or S
SMEGLLLVRGNDMIQMTINSTKVPAXXTSPV

SEQ ID NO: 89964 - protein, 24 aa, Artificial Sequence
  Cyclic GFR-binding peptide
SMEGLIIQQKDNMIQMTINSMKTP

SEQ ID NO: 89965 - protein, 29 aa, Artificial Sequence
  Cyclic GFR-binding peptide
  MOD_RES (27), (28): Xaa is C or S
MSMEGILLVRGNDMIQMTINSTKVPAXXT

SEQ ID NO: 89966 - protein, 31 aa, Artificial Sequence
  Cyclic GFR-binding peptide
  MOD_RES (2), (2): Xaa is C or S
GXAEVVMDSMEGLVVNNAADMIQITINSLRA

SEQ ID NO: 89967 - protein, 29 aa, Artificial Sequence
  Cyclic GFR-binding peptide
  MOD_RES (26), (27): Xaa is C or S
SMEGIVVNNASDMIQITINSLRTPVXXTP

SEQ ID NO: 89968 - protein, 32 aa, Artificial Sequence
  Cyclic GFR-binding peptide
  MOD_RES (2), (4): Xaa is C or S
SXKXSKVIMSMEGLIKPTKGIMIQITINSLDQ

SEQ ID NO: 89969 - protein, 31 aa, Artificial Sequence
  Cyclic GFR-binding peptide
  MOD_RES (1), (1): Xaa is C or S
XAEVVMDSMEGIVVNNAADMIQITINSLRAP

SEQ ID NO: 89970 - protein, 31 aa, Artificial Sequence
  Cyclic GFR-binding peptide
  MOD_RES (1), (1): Xaa is C or S
XAEVVMDSMEGLVVNNAADMIQITINSLRAP

SEQ ID NO: 89971 - protein, 24 aa, Artificial Sequence
  Cyclic GFR-binding peptide
SMEGIVVNNASDMIQITINSLRTP

SEQ ID NO: 89972 - protein, 33 aa, Artificial Sequence
  Cyclic GFR-binding peptide
  MOD_RES (30), (31): Xaa is C or S
KVIMSMEGLIKPTKGIMIQITINSLDQSVXXPS

SEQ ID NO: 89973 - protein, 21 aa, Artificial Sequence
  Cyclic GFR-binding peptide
SMEGIIIQQKDNMIQMTINSM

SEQ ID NO: 89974 - protein, 26 aa, Artificial Sequence
  Cyclic GFR-binding peptide
  MOD_RES (1), (1): Xaa is C or S
XSKVVMSMEGLVKPTRGVMIQITINS

SEQ ID NO: 89975 - protein, 29 aa, Artificial Sequence
  Cyclic GFR-binding peptide
AAAAAAAAASMEGIVVNNAADMIQITINS

SEQ ID NO: 89976 - protein, 41 aa, Artificial Sequence; identical to SEQ ID NO: 35928
  Cyclic GFR-binding peptide
  MOD_RES (1), (3), (35), (36): Xaa is C or S

SEQ ID NO: 89977 - protein, 23 aa, Artificial Sequence
  Cyclic GFR-binding peptide
VIMSMEGLIKPTKGIMIQITINS

SEQ ID NO: 89978 - protein, 21 aa, Artificial Sequence
  Cyclic GFR-binding peptide
SMEGLVVNNASDMIQITINSL

SEQ ID NO: 89979 - protein, 39 aa, Artificial Sequence; identical to SEQ ID NO: 35934
  Cyclic GFR-binding peptide
  MOD_RES (2), (33), (34): Xaa is C or S

SEQ ID NO: 89980 - protein, 22 aa, Artificial Sequence
  Cyclic GFR-binding peptide
SMEGLVKPKRGVMIQITINSLA

SEQ ID NO: 89981 - protein, 30 aa, Artificial Sequence; identical to SEQ ID NO: 35938
  Cyclic GFR-binding peptide

SEQ ID NO: 89982 - protein, 30 aa, Artificial Sequence
  Cyclic GFR-binding peptide
  MOD_RES (2), (2): Xaa is C or S
GXRDVVMGSMEGLIIQQKDNMIQMTINSMK

SEQ ID NO: 89983 - protein, 20 aa, Artificial Sequence
  Cyclic GFR-binding peptide
SMEGLIIQQKDNMIQMTINS

SEQ ID NO: 89984 - protein, 25 aa, Artificial Sequence
  Cyclic GFR-binding peptide
VIMSMEGLLLVRGNDMIQMTINSTK

SEQ ID NO: 89985 - protein, 25 aa, Artificial Sequence
  Cyclic GFR-binding peptide
VIMSMEGILLVRGNDMIQMTINSTK

SEQ ID NO: 89986 - protein, 32 aa, Artificial Sequence; identical to SEQ ID NO: 35944
  Cyclic GFR-binding peptide
  MOD_RES (31), (32): Xaa is C or S

SEQ ID NO: 89987 - protein, 28 aa, Artificial Sequence
  Cyclic GFR-binding peptide
  MOD_RES (2), (2): Xaa is C or S
KXSRVIMSMEGLVKPKRGVMIQITINSL

SEQ ID NO: 89988 - protein, 38 aa, Artificial Sequence; identical to SEQ ID NO: 35946
  Cyclic GFR-binding peptide
  MOD_RES (2), (34), (35): Xaa is C or S

SEQ ID NO: 89989 - protein, 26 aa, Artificial Sequence
  Cyclic GFR-binding peptide
MSMEGLVKPKRGVMIQITINSLAQPV

SEQ ID NO: 89990 - protein, 25 aa, Artificial Sequence
  Cyclic GFR-binding peptide
SMEGLIKPTKGIMIQITINSLDQSV

SEQ ID NO: 89991 - protein, 34 aa, Artificial Sequence; identical to SEQ ID NO: 35948
  Cyclic GFR-binding peptide
  MOD_RES (1), (3): Xaa is C or S

SEQ ID NO: 89992 - protein, 23 aa, Artificial Sequence
  Cyclic GFR-binding peptide
NSMEGLIVNSSDDMIQVTINSLK

SEQ ID NO: 89993 - protein, 32 aa, Artificial Sequence
  Cyclic GFR-binding peptide
  MOD_RES (26), (27): Xaa is C or S
SMEGLVVNNAADMIQITINSLRAPVXXSAPAA

SEQ ID NO: 89994 - protein, 25 aa, Artificial Sequence
  Cyclic GFR-binding peptide
MSMEGILLVRGNDMIQMTINSTKVP

SEQ ID NO: 89995 - protein, 26 aa, Artificial Sequence
  Cyclic GFR-binding peptide
MSMEGLLLVRGNDMIQMTINSTKVPA

SEQ ID NO: 89996 - protein, 28 aa, Artificial Sequence
  Cyclic GFR-binding peptide
AEVVMDSMEGIVVNNAADMIQITINSLR

SEQ ID NO: 89997 - protein, 30 aa, Artificial Sequence; identical to SEQ ID NO: 35957
  Cyclic GFR-binding peptide

SEQ ID NO: 89998 - protein, 39 aa, Artificial Sequence; identical to SEQ ID NO: 35960
  Cyclic GFR-binding peptide
  MOD_RES (2), (33), (34): Xaa is C or S

SEQ ID NO: 89999 - protein, 34 aa, Artificial Sequence
  Cyclic GFR-binding peptide
  MOD_RES (29), (30): Xaa is C or S
VIMSMEGILLVRGNDMIQMTINSTKVPAXXTSPV

SEQ ID NO: 90000 - protein, 38 aa, Artificial Sequence; identical to SEQ ID NO: 35963
  Cyclic GFR-binding peptide
  MOD_RES (1), (32), (33): Xaa is C or S

SEQ ID NO: 90001 - protein, 21 aa, Artificial Sequence
  Cyclic GFR-binding peptide
GSMEGIIIQQKDNMIQMTINS

SEQ ID NO: 90002 - protein, 33 aa, Artificial Sequence
  Cyclic GFR-binding peptide
  MOD_RES (28), (29): Xaa is C or S
IMSMEGLLLVRGNDMIQMTINSTKVPAXXTSPV

SEQ ID NO: 90003 - protein, 33 aa, Artificial Sequence; identical to SEQ ID NO: 35965
  Cyclic GFR-binding peptide
  MOD_RES (2), (2): Xaa is C or S

SEQ ID NO: 90004 - protein, 32 aa, Artificial Sequence
  Cyclic GFR-binding peptide
  MOD_RES (26), (27): Xaa is C or S
SMEGIIVNSSDDMIQVTINSLKTPAXXPKPVH

SEQ ID NO: 90005 - protein, 31 aa, Artificial Sequence
  Cyclic GFR-binding peptide
  MOD_RES (27), (28): Xaa is C or S
MSMEGLVKPTRGVMIQITINSLDQPVXXPSA

SEQ ID NO: 90006 - protein, 26 aa, Artificial Sequence
  Cyclic GFR-binding peptide
IMSMEGLIKPTKGIMIQITINSLDQS

SEQ ID NO: 90007 - protein, 28 aa, Artificial Sequence
  Cyclic GFR-binding peptide
  MOD_RES (28), (28): Xaa is C or S
IMSMEGLLLVRGNDMIQMTINSTKVPAX

SEQ ID NO: 90008 - protein, 27 aa, Artificial Sequence
  Cyclic GFR-binding peptide
  MOD_RES (1), (1): Xaa is C or S
XSEVVMDSMEGLVVNNASDMIQITINS

SEQ ID NO: 90009 - protein, 38 aa, Artificial Sequence; identical to SEQ ID NO: 35972
  Cyclic GFR-binding peptide
  MOD_RES (2), (34), (35): Xaa is C or S

SEQ ID NO: 90010 - protein, 34 aa, Artificial Sequence
  Cyclic GFR-binding peptide
  MOD_RES (29), (30): Xaa is C or S
VIMSMEGLVKPKRGVMIQITINSLAQPVXXPAAS

SEQ ID NO: 90011 - protein, 26 aa, Artificial Sequence
  Cyclic GFR-binding peptide
  MOD_RES (26), (26): Xaa is C or S
SMEGLIIQQKDNMIQMTINSMKTPTX

SEQ ID NO: 90012 - protein, 31 aa, Artificial Sequence; identical to SEQ ID NO: 35976
  Cyclic GFR-binding peptide
  MOD_RES (31), (31): Xaa is C or S

SEQ ID NO: 90013 - protein, 29 aa, Artificial Sequence
  Cyclic GFR-binding peptide
SRVVMNSMEGLIVNSSDDMIQVTINSLKT

SEQ ID NO: 90014 - protein, 28 aa, Artificial Sequence
  Cyclic GFR-binding peptide
  MOD_RES (2), (2): Xaa is C or S
GXEEVIMSMEGLLLVRGNDMIQMTINST

SEQ ID NO: 90015 - protein, 28 aa, Artificial Sequence
  Cyclic GFR-binding peptide
VVMGSMEGLIIQQKDNMIQMTINSMKTP

SEQ ID NO: 90016 - protein, 33 aa, Artificial Sequence; identical to SEQ ID NO: 35977
  Cyclic GFR-binding peptide
  MOD_RES (2), (2): Xaa is C or S

SEQ ID NO: 90017 - protein, 25 aa, Artificial Sequence
  Cyclic GFR-binding peptide
RVIMSMEGLVKPKRGVMIQITINSL

SEQ ID NO: 90018 - protein, 31 aa, Artificial Sequence
  Cyclic GFR-binding peptide
  MOD_RES (27), (28): Xaa is C or S
DSMEGLVVNNAADMIQITINSLRAPVXXSAP

SEQ ID NO: 90019 - protein, 30 aa, Artificial Sequence
  Cyclic GFR-binding peptide
SEVVMDSMEGLVVNNASDMIQITINSLRTP

SEQ ID NO: 90020 - protein, 26 aa, Artificial Sequence
  Cyclic GFR-binding peptide
MDSMEGLVVNNASDMIQITINSLRTP

SEQ ID NO: 90021 - protein, 24 aa, Artificial Sequence
  Cyclic GFR-binding peptide
VMDSMEGLVVNNASDMIQITINSL

SEQ ID NO: 90022 - protein, 33 aa, Artificial Sequence
  Cyclic GFR-binding peptide
  MOD_RES (2), (4): Xaa is C or S
RXGXSEVVMDSMEGLVVNNASDMIQITINSLRT

SEQ ID NO: 90023 - protein, 32 aa, Artificial Sequence
  Cyclic GFR-binding peptide
  MOD_RES (26), (27): Xaa is C or S
SMEGILLVRGNDMIQMTINSTKVPAXXTSPVR

SEQ ID NO: 90024 - protein, 35 aa, Artificial Sequence; identical to SEQ ID NO: 35988
  Cyclic GFR-binding peptide
  MOD_RES (2), (33), (34): Xaa is C or S

SEQ ID NO: 90025 - protein, 30 aa, Artificial Sequence
  Cyclic GFR-binding peptide
  MOD_RES (1), (3): Xaa is C or S
XGXAEVVMDSMEGLVVNNAADMIQITINSL

SEQ ID NO: 90026 - protein, 34 aa, Artificial Sequence; identical to SEQ ID NO: 35991
  Cyclic GFR-binding peptide
  MOD_RES (32), (33): Xaa is C or S

SEQ ID NO: 90027 - protein, 34 aa, Artificial Sequence
  Cyclic GFR-binding peptide
  MOD_RES (29), (30): Xaa is C or S
VMNSMEGLIVNSSDDMIQVTINSLKTPAXXPKPV

SEQ ID NO: 90028 - protein, 33 aa, Artificial Sequence; identical to SEQ ID NO: 35992
  Cyclic GFR-binding peptide
  MOD_RES (2), (2): Xaa is C or S

SEQ ID NO: 90029 - protein, 31 aa, Artificial Sequence
  Cyclic GFR-binding peptide
  MOD_RES (29), (30): Xaa is C or S
VMDSMEGIVVNNASDMIQITINSLRTPVXXT

SEQ ID NO: 90030 - protein, 32 aa, Artificial Sequence
  Cyclic GFR-binding peptide
  MOD_RES (1), (3): Xaa is C or S
XGXRDVVMGSMEGIIIQQKDNMIQMTINSMKT

SEQ ID NO: 90031 - protein, 35 aa, Artificial Sequence; identical to SEQ ID NO: 35994
  Cyclic GFR-binding peptide
  MOD_RES (31), (32): Xaa is C or S

SEQ ID NO: 90032 - protein, 22 aa, Artificial Sequence
  Cyclic GFR-binding peptide
MGSMEGIIIQQKDNMIQMTINS

SEQ ID NO: 90033 - protein, 28 aa, Artificial Sequence
  Cyclic GFR-binding peptide
  MOD_RES (1), (1): Xaa is C or S
XAEVVMDSMEGLVVNNAADMIQITINSL

SEQ ID NO: 90034 - protein, 26 aa, Artificial Sequence
  Cyclic GFR-binding peptide
DSMEGIVVNNAADMIQITINSLRAPV

SEQ ID NO: 90035 - protein, 28 aa, Artificial Sequence
  Cyclic GFR-binding peptide
SEVVMDSMEGLVVNNASDMIQITINSLR

SEQ ID NO: 90036 - protein, 30 aa, Artificial Sequence
  Cyclic GFR-binding peptide
  MOD_RES (26), (27): Xaa is C or S
SMEGLVVNNAADMIQITINSLRAPVXXSAP

SEQ ID NO: 90037 - protein, 25 aa, Artificial Sequence
  Cyclic GFR-binding peptide
EVVMDSMEGIVVNNASDMIQITINS

SEQ ID NO: 90038 - protein, 27 aa, Artificial Sequence
  Cyclic GFR-binding peptide
EVVMDSMEGLVVNNASDMIQITINSLR

SEQ ID NO: 90039 - protein, 26 aa, Artificial Sequence
  Cyclic GFR-binding peptide
VVMDSMEGLVVNNASDMIQITINSLR

SEQ ID NO: 90040 - protein, 28 aa, Artificial Sequence
  Cyclic GFR-binding peptide
EVVMDSMEGIVVNNASDMIQITINSLRT

SEQ ID NO: 90041 - protein, 31 aa, Artificial Sequence
  Cyclic GFR-binding peptide
  MOD_RES (1), (3): Xaa is C or S
XKXSRVIMSMEGLVKPKRGVMIQITINSLAQ

SEQ ID NO: 90042 - protein, 39 aa, Artificial Sequence; identical to SEQ ID NO: 36008
  Cyclic GFR-binding peptide
  MOD_RES (2), (4), (36), (37): Xaa is C or S

SEQ ID NO: 90043 - protein, 22 aa, Artificial Sequence
  Cyclic GFR-binding peptide
MDSMEGIVVNNASDMIQITINS

SEQ ID NO: 90044 - protein, 31 aa, Artificial Sequence
  Cyclic GFR-binding peptide
  MOD_RES (27), (28): Xaa is C or S
MSMEGLLLVRGNDMIQMTINSTKVPAXXTSP

SEQ ID NO: 90045 - protein, 28 aa, Artificial Sequence
  Cyclic GFR-binding peptide
  MOD_RES (1), (1): Xaa is C or S
XSKVIMSMEGLIKPTKGIMIQITINSLD

SEQ ID NO: 90046 - protein, 30 aa, Artificial Sequence
  Cyclic GFR-binding peptide
  MOD_RES (2), (4): Xaa is C or S
SXGXRDVVMGSMEGIIIQQKDNMIQMTINS

SEQ ID NO: 90047 - protein, 26 aa, Artificial Sequence
  Cyclic GFR-binding peptide
EVVMDSMEGIVVNNAADMIQITINSL

SEQ ID NO: 90048 - protein, 30 aa, Artificial Sequence; identical to SEQ ID NO: 2169
  Cyclic GFR-binding peptide

SEQ ID NO: 90049 - protein, 34 aa, Artificial Sequence; identical to SEQ ID NO: 36014
  Cyclic GFR-binding peptide
  MOD_RES (2), (33), (34): Xaa is C or S

SEQ ID NO: 90050 - protein, 32 aa, Artificial Sequence
  Cyclic GFR-binding peptide
  MOD_RES (27), (28): Xaa is C or S
MSMEGLVKPKRGVMIQITINSLAQPVXXPAAS

SEQ ID NO: 90051 - protein, 30 aa, Artificial Sequence
  Cyclic GFR-binding peptide
  MOD_RES (1), (1): Xaa is C or S
XSEVVMDSMEGIVVNNASDMIQITINSLRT

SEQ ID NO: 90052 - protein, 33 aa, Artificial Sequence
  Cyclic GFR-binding peptide
  MOD_RES (27), (28): Xaa is C or S
DSMEGLVVNNASDMIQITINSLRTPVXXTPPTS

SEQ ID NO: 90053 - protein, 28 aa, Artificial Sequence
  Cyclic GFR-binding peptide
  MOD_RES (1), (1): Xaa is C or S
XRDVVMGSMEGLIIQQKDNMIQMTINSM

SEQ ID NO: 90054 - protein, 32 aa, Artificial Sequence
  Cyclic GFR-binding peptide
  MOD_RES (28), (29): Xaa is C or S
MGSMEGIIIQQKDNMIQMTINSMKTPTXXPGA

SEQ ID NO: 90055 - protein, 34 aa, Artificial Sequence
  Cyclic GFR-binding peptide
  MOD_RES (28), (29): Xaa is C or S
MGSMEGIIIQQKDNMIQMTINSMKTPTXXPGASG

SEQ ID NO: 90056 - protein, 29 aa, Artificial Sequence
  Cyclic GFR-binding peptide
  MOD_RES (27), (28): Xaa is C or S
DSMEGLVVNNAADMIQITINSLRAPVXXS

SEQ ID NO: 90057 - protein, 27 aa, Artificial Sequence
  Cyclic GFR-binding peptide
  MOD_RES (1), (1): Xaa is C or S
XSEVVMDSMEGIVVNNASDMIQITINS

SEQ ID NO: 90058 - protein, 34 aa, Artificial Sequence
  Cyclic GFR-binding peptide
  MOD_RES (29), (30): Xaa is C or S
VMDSMEGLVVNNAADMIQITINSLRAPVXXSAPA

SEQ ID NO: 90059 - protein, 37 aa, Artificial Sequence; identical to SEQ ID NO: 36019
  Cyclic GFR-binding peptide
  MOD_RES (2), (4), (35), (36): Xaa is C or S

SEQ ID NO: 90060 - protein, 34 aa, Artificial Sequence; identical to SEQ ID NO: 36020
  Cyclic GFR-binding peptide
  MOD_RES (31), (32): Xaa is C or S

SEQ ID NO: 90061 - protein, 41 aa, Artificial Sequence; identical to SEQ ID NO: 36021
  Cyclic GFR-binding peptide
  MOD_RES (2), (4), (35), (36): Xaa is C or S

SEQ ID NO: 90062 - protein, 32 aa, Artificial Sequence
  Cyclic GFR-binding peptide
  MOD_RES (1), (3): Xaa is C or S
XKXSRVIMSMEGLVKPKRGVMIQITINSLAQP

SEQ ID NO: 90063 - protein, 32 aa, Artificial Sequence
  Cyclic GFR-binding peptide
  MOD_RES (1), (3): Xaa is C or S
XKXSKVIMSMEGLIKPTKGIMIQITINSLDQS

SEQ ID NO: 90064 - protein, 34 aa, Artificial Sequence; identical to SEQ ID NO: 36023
  Cyclic GFR-binding peptide
  MOD_RES (32), (33): Xaa is C or S

SEQ ID NO: 90065 - protein, 33 aa, Artificial Sequence
  Cyclic GFR-binding peptide
  MOD_RES (28), (29): Xaa is C or S
MGSMEGIIIQQKDNMIQMTINSMKTPTXXPGAS

SEQ ID NO: 90066 - protein, 25 aa, Artificial Sequence
  Cyclic GFR-binding peptide
SMEGIIIQQKDNMIQMTINSMKTPT

SEQ ID NO: 90067 - protein, 26 aa, Artificial Sequence
  Cyclic GFR-binding peptide
VMGSMEGIIIQQKDNMIQMTINSMKT

SEQ ID NO: 90068 - protein, 22 aa, Artificial Sequence
  Cyclic GFR-binding peptide
NSMEGLIVNSSDDMIQVTINSL

SEQ ID NO: 90069 - protein, 25 aa, Artificial Sequence
  Cyclic GFR-binding peptide
VVMDSMEGLVVNNAADMIQITINSL

SEQ ID NO: 90070 - protein, 34 aa, Artificial Sequence; identical to SEQ ID NO: 36029
  Cyclic GFR-binding peptide
  MOD_RES (2), (33), (34): Xaa is C or S

SEQ ID NO: 90071 - protein, 21 aa, Artificial Sequence
  Cyclic GFR-binding peptide
MSMEGLVKPTRGVMIQITINS

SEQ ID NO: 90072 - protein, 34 aa, Artificial Sequence; identical to SEQ ID NO: 36033
  Cyclic GFR-binding peptide
  MOD_RES (2), (33), (34): Xaa is C or S

SEQ ID NO: 90073 - protein, 20 aa, Artificial Sequence
  Cyclic GFR-binding peptide
SMEGLIVNSSDDMIQVTINS

SEQ ID NO: 90074 - protein, 26 aa, Artificial Sequence
  Cyclic GFR-binding peptide
VVMGSMEGLIIQQKDNMIQMTINSMK

SEQ ID NO: 90075 - protein, 25 aa, Artificial Sequence
  Cyclic GFR-binding peptide
EVIMSMEGLLLVRGNDMIQMTINST

SEQ ID NO: 90076 - protein, 34 aa, Artificial Sequence
  Cyclic GFR-binding peptide
  MOD_RES (29), (30): Xaa is C or S
VMGSMEGIIIQQKDNMIQMTINSMKTPTXXPGAS

SEQ ID NO: 90077 - protein, 29 aa, Artificial Sequence
  Cyclic GFR-binding peptide
  MOD_RES (1), (3): Xaa is C or S
XGXAEVVMDSMEGIVVNNAADMIQITINS

SEQ ID NO: 90078 - protein, 33 aa, Artificial Sequence; identical to SEQ ID NO: 36041
  Cyclic GFR-binding peptide
  MOD_RES (31), (32): Xaa is C or S

SEQ ID NO: 90079 - protein, 35 aa, Artificial Sequence
  Cyclic GFR-binding peptide
  MOD_RES (30), (31): Xaa is C or S
EVIMSMEGILLVRGNDMIQMTINSTKVPAXXTSPV

SEQ ID NO: 90080 - protein, 37 aa, Artificial Sequence; identical to SEQ ID NO: 36043
  Cyclic GFR-binding peptide
  MOD_RES (2), (34), (35): Xaa is C or S

SEQ ID NO: 90081 - protein, 40 aa, Artificial Sequence; identical to SEQ ID NO: 36044
  Cyclic GFR-binding peptide
  MOD_RES (2), (4), (36), (37): Xaa is C or S

SEQ ID NO: 90082 - protein, 29 aa, Artificial Sequence
  Cyclic GFR-binding peptide
  MOD_RES (28), (29): Xaa is C or S
IMSMEGLLLVRGNDMIQMTINSTKVPAXX

SEQ ID NO: 90083 - protein, 30 aa, Artificial Sequence
  Cyclic GFR-binding peptide
  MOD_RES (30), (30): Xaa is C or S
VVMGSMEGIIIQQKDNMIQMTINSMKTPTX

SEQ ID NO: 90084 - protein, 31 aa, Artificial Sequence
  Cyclic GFR-binding peptide
  MOD_RES (28), (29): Xaa is C or S
MNSMEGLIVNSSDDMIQVTINSLKTPAXXPK

SEQ ID NO: 90085 - protein, 35 aa, Artificial Sequence
  Cyclic GFR-binding peptide
  MOD_RES (30), (31): Xaa is C or S
VVMDSMEGLVVNNAADMIQITINSLRAPVXXSAPA

SEQ ID NO: 90086 - protein, 31 aa, Artificial Sequence
  Cyclic GFR-binding peptide
  MOD_RES (30), (31): Xaa is C or S
VVMDSMEGIVVNNAADMIQITINSLRAPVXX

SEQ ID NO: 90087 - protein, 26 aa, Artificial Sequence
  Cyclic GFR-binding peptide
KVIMSMEGLIKPTKGIMIQITINSLD

SEQ ID NO: 90088 - protein, 24 aa, Artificial Sequence
  Cyclic GFR-binding peptide
DSMEGLVVNNASDMIQITINSLRT

SEQ ID NO: 90089 - protein, 37 aa, Artificial Sequence; identical to SEQ ID NO: 36054
  Cyclic GFR-binding peptide
  MOD_RES (2), (34), (35): Xaa is C or S

SEQ ID NO: 90090 - protein, 34 aa, Artificial Sequence; identical to SEQ ID NO: 36055
  Cyclic GFR-binding peptide
  MOD_RES (2), (34): Xaa is C or S

SEQ ID NO: 90091 - protein, 26 aa, Artificial Sequence
  Cyclic GFR-binding peptide
MDSMEGLVVNNAADMIQITINSLRAP

SEQ ID NO: 90092 - protein, 37 aa, Artificial Sequence; identical to SEQ ID NO: 36059
  Cyclic GFR-binding peptide
  MOD_RES (2), (33), (34): Xaa is C or S

SEQ ID NO: 90093 - protein, 36 aa, Artificial Sequence
  Cyclic GFR-binding peptide
  MOD_RES (30), (31): Xaa is C or S
VVMDSMEGIVVNNASDMIQITINSLRTPVXXTPPTS

SEQ ID NO: 90094 - protein, 35 aa, Artificial Sequence; identical to SEQ ID NO: 36060
  Cyclic GFR-binding peptide
  MOD_RES (2), (4), (35): Xaa is C or S

SEQ ID NO: 90095 - protein, 32 aa, Artificial Sequence
  Cyclic GFR-binding peptide
  MOD_RES (1), (3): Xaa is C or S
XGXRDVVMGSMEGLIIQQKDNMIQMTINSMKT

SEQ ID NO: 90096 - protein, 26 aa, Artificial Sequence
  Cyclic GFR-binding peptide
IMSMEGILLVRGNDMIQMTINSTKVP

SEQ ID NO: 90097 - protein, 29 aa, Artificial Sequence
  Cyclic GFR-binding peptide
  MOD_RES (28), (29): Xaa is C or S
IMSMEGLIKPTKGIMIQITINSLDQSVXX

SEQ ID NO: 90098 - protein, 27 aa, Artificial Sequence
  Cyclic GFR-binding peptide
SRVVMNSMEGLIVNSSDDMIQVTINSL

SEQ ID NO: 90099 - protein, 30 aa, Artificial Sequence
  Cyclic GFR-binding peptide
  MOD_RES (2), (2): Xaa is C or S
GXSEVVMDSMEGIVVNNASDMIQITINSLR

SEQ ID NO: 90100 - protein, 28 aa, Artificial Sequence
  Cyclic GFR-binding peptide
EEVIMSMEGILLVRGNDMIQMTINSTKV

SEQ ID NO: 90101 - protein, 29 aa, Artificial Sequence
  Cyclic GFR-binding peptide
  MOD_RES (2), (2): Xaa is C or S
GXAEVVMDSMEGLVVNNAADMIQITINSL

SEQ ID NO: 90102 - protein, 24 aa, Artificial Sequence
  Cyclic GFR-binding peptide
SMEGLVKPKRGVMIQITINSLAQP

SEQ ID NO: 90103 - protein, 27 aa, Artificial Sequence
  Cyclic GFR-binding peptide
VMSMEGLVKPTRGVMIQITINSLDQPV

SEQ ID NO: 90104 - protein, 37 aa, Artificial Sequence; identical to SEQ ID NO: 36070
  Cyclic GFR-binding peptide
  MOD_RES (2), (34), (35): Xaa is C or S

SEQ ID NO: 90105 - protein, 31 aa, Artificial Sequence; identical to SEQ ID NO: 36078
  Cyclic GFR-binding peptide
  MOD_RES (31), (31): Xaa is C or S

SEQ ID NO: 90106 - protein, 33 aa, Artificial Sequence; identical to SEQ ID NO: 36080
  Cyclic GFR-binding peptide
  MOD_RES (2), (33): Xaa is C or S

SEQ ID NO: 90107 - protein, 28 aa, Artificial Sequence
  Cyclic GFR-binding peptide
VVMDSMEGLVVNNASDMIQITINSLRTP

SEQ ID NO: 90108 - protein, 30 aa, Artificial Sequence
  Cyclic GFR-binding peptide
  MOD_RES (2), (2): Xaa is C or S
GXRDVVMGSMEGIIIQQKDNMIQMTINSMK

SEQ ID NO: 90109 - protein, 30 aa, Artificial Sequence
  Cyclic GFR-binding peptide
  MOD_RES (27), (28): Xaa is C or S
DSMEGIVVNNAADMIQITINSLRAPVXXSA

SEQ ID NO: 90110 - protein, 25 aa, Artificial Sequence
  Cyclic GFR-binding peptide
VVMDSMEGIVVNNASDMIQITINSL

SEQ ID NO: 90111 - protein, 35 aa, Artificial Sequence; identical to SEQ ID NO: 36089
  Cyclic GFR-binding peptide
  MOD_RES (2), (4), (35): Xaa is C or S

SEQ ID NO: 90112 - protein, 30 aa, Artificial Sequence
  Cyclic GFR-binding peptide
  MOD_RES (29), (30): Xaa is C or S
VVMSMEGLVKPTRGVMIQITINSLDQPVXX

SEQ ID NO: 90113 - protein, 31 aa, Artificial Sequence
  Cyclic GFR-binding peptide
  MOD_RES (2), (2): Xaa is C or S
GXAEVVMDSMEGIVVNNAADMIQITINSLRA

SEQ ID NO: 90114 - protein, 28 aa, Artificial Sequence
  Cyclic GFR-binding peptide
KVVMSMEGLVKPTRGVMIQITINSLDQP

SEQ ID NO: 90115 - protein, 29 aa, Artificial Sequence
  Cyclic GFR-binding peptide
  MOD_RES (1), (1): Xaa is C or S
XSRVVMNSMEGLIVNSSDDMIQVTINSLK

SEQ ID NO: 90116 - protein, 29 aa, Artificial Sequence
  Cyclic GFR-binding peptide
AAAAAAAAASMEGLVKPTRGVMIQITINS

SEQ ID NO: 90117 - protein, 34 aa, Artificial Sequence
  Cyclic GFR-binding peptide
  MOD_RES (29), (30): Xaa is C or S
VMDSMEGIVVNNAADMIQITINSLRAPVXXSAPA

SEQ ID NO: 90118 - protein, 34 aa, Artificial Sequence
  Cyclic GFR-binding peptide
  MOD_RES (29), (30): Xaa is C or S
VIMSMEGLLLVRGNDMIQMTINSTKVPAXXTSPV

SEQ ID NO: 90119 - protein, 38 aa, Artificial Sequence; identical to SEQ ID NO: 36094
  Cyclic GFR-binding peptide
  MOD_RES (2), (4), (35), (36): Xaa is C or S

SEQ ID NO: 90120 - protein, 28 aa, Artificial Sequence
  Cyclic GFR-binding peptide
  MOD_RES (1), (3): Xaa is C or S
XKXSKVVMSMEGLVKPTRGVMIQITINS

SEQ ID NO: 90121 - protein, 31 aa, Artificial Sequence
  Cyclic GFR-binding peptide
  MOD_RES (29), (30): Xaa is C or S
VMGSMEGLIIQQKDNMIQMTINSMKTPTXXP

SEQ ID NO: 90122 - protein, 39 aa, Artificial Sequence; identical to SEQ ID NO: 36097
  Cyclic GFR-binding peptide
  MOD_RES (2), (34), (35): Xaa is C or S

SEQ ID NO: 90123 - protein, 33 aa, Artificial Sequence
  Cyclic GFR-binding peptide
  MOD_RES (27), (28): Xaa is C or S
DSMEGLVVNNAADMIQITINSLRAPVXXSAPAA

SEQ ID NO: 90124 - protein, 28 aa, Artificial Sequence
  Cyclic GFR-binding peptide
  MOD_RES (28), (28): Xaa is C or S
IMSMEGLIKPTKGIMIQITINSLDQSVX

SEQ ID NO: 90125 - protein, 37 aa, Artificial Sequence; identical to SEQ ID NO: 36102
  Cyclic GFR-binding peptide
  MOD_RES (2), (4), (36), (37): Xaa is C or S

SEQ ID NO: 90126 - protein, 35 aa, Artificial Sequence
  Cyclic GFR-binding peptide
  MOD_RES (30), (31): Xaa is C or S
KVVMSMEGLVKPTRGVMIQITINSLDQPVXXPSAS

SEQ ID NO: 90127 - protein, 27 aa, Artificial Sequence
  Cyclic GFR-binding peptide
  MOD_RES (26), (27): Xaa is C or S
SMEGLIIQQKDNMIQMTINSMKTPTXX

SEQ ID NO: 90128 - protein, 37 aa, Artificial Sequence; identical to SEQ ID NO: 36107
  Cyclic GFR-binding peptide
  MOD_RES (1), (3), (34), (35): Xaa is C or S

SEQ ID NO: 90129 - protein, 36 aa, Artificial Sequence; identical to SEQ ID NO: 36113
  Cyclic GFR-binding peptide
  MOD_RES (2), (4), (35), (36): Xaa is C or S

SEQ ID NO: 90130 - protein, 27 aa, Artificial Sequence
  Cyclic GFR-binding peptide
  MOD_RES (27), (27): Xaa is C or S
DSMEGIVVNNAADMIQITINSLRAPVX

SEQ ID NO: 90131 - protein, 26 aa, Artificial Sequence
  Cyclic GFR-binding peptide
VVMSMEGLVKPTRGVMIQITINSLDQ

SEQ ID NO: 90132 - protein, 31 aa, Artificial Sequence
  Cyclic GFR-binding peptide
  MOD_RES (27), (28): Xaa is C or S
GSMEGLIIQQKDNMIQMTINSMKTPTXXPGA

SEQ ID NO: 90133 - protein, 27 aa, Artificial Sequence
  Cyclic GFR-binding peptide
IMSMEGLIKPTKGIMIQITINSLDQSV

SEQ ID NO: 90134 - protein, 24 aa, Artificial Sequence
  Cyclic GFR-binding peptide
SMEGLVKPTRGVMIQITINSLDQP

SEQ ID NO: 90135 - protein, 33 aa, Artificial Sequence
  Cyclic GFR-binding peptide
  MOD_RES (2), (4): Xaa is C or S
SXKXSKVIMSMEGLIKPTKGIMIQITINSLDQS

SEQ ID NO: 90136 - protein, 26 aa, Artificial Sequence
  Cyclic GFR-binding peptide
  MOD_RES (26), (26): Xaa is C or S
SMEGLVKPTRGVMIQITINSLDQPVX

SEQ ID NO: 90137 - protein, 33 aa, Artificial Sequence
  Cyclic GFR-binding peptide
  MOD_RES (30), (31): Xaa is C or S
VVMDSMEGIVVNNASDMIQITINSLRTPVXXTP

SEQ ID NO: 90138 - protein, 35 aa, Artificial Sequence; identical to SEQ ID NO: 36125
  Cyclic GFR-binding peptide
  MOD_RES (1), (3), (35): Xaa is C or S

SEQ ID NO: 90139 - protein, 40 aa, Artificial Sequence; identical to SEQ ID NO: 36126
  Cyclic GFR-binding peptide
  MOD_RES (2), (34), (35): Xaa is C or S

SEQ ID NO: 90140 - protein, 38 aa, Artificial Sequence; identical to SEQ ID NO: 36127
  Cyclic GFR-binding peptide
  MOD_RES (2), (34), (35): Xaa is C or S

SEQ ID NO: 90141 - protein, 32 aa, Artificial Sequence
  Cyclic GFR-binding peptide
  MOD_RES (2), (2): Xaa is C or S
GXSRVVMNSMEGLIVNSSDDMIQVTINSLKTP

SEQ ID NO: 90142 - protein, 22 aa, Artificial Sequence
  Cyclic GFR-binding peptide
SMEGILLVRGNDMIQMTINSTK

SEQ ID NO: 90143 - protein, 28 aa, Artificial Sequence
  Cyclic GFR-binding peptide
EVVMDSMEGIVVNNAADMIQITINSLRA

SEQ ID NO: 90144 - protein, 28 aa, Artificial Sequence
  Cyclic GFR-binding peptide
  MOD_RES (28), (28): Xaa is C or S
VMSMEGLVKPTRGVMIQITINSLDQPVX

SEQ ID NO: 90145 - protein, 31 aa, Artificial Sequence
  Cyclic GFR-binding peptide
  MOD_RES (29), (30): Xaa is C or S
VMDSMEGLVVNNASDMIQITINSLRTPVXXT

SEQ ID NO: 90146 - protein, 24 aa, Artificial Sequence
  Cyclic GFR-binding peptide
IMSMEGLIKPTKGIMIQITINSLD

SEQ ID NO: 90147 - protein, 30 aa, Artificial Sequence
  Cyclic GFR-binding peptide
  MOD_RES (28), (29): Xaa is C or S
IMSMEGLVKPKRGVMIQITINSLAQPVXXP

SEQ ID NO: 90148 - protein, 29 aa, Artificial Sequence
  Cyclic GFR-binding peptide
EEVIMSMEGLLLVRGNDMIQMTINSTKVP

SEQ ID NO: 90149 - protein, 33 aa, Artificial Sequence; identical to SEQ ID NO: 36139
  Cyclic GFR-binding peptide
  MOD_RES (2), (33): Xaa is C or S

SEQ ID NO: 90150 - protein, 40 aa, Artificial Sequence; identical to SEQ ID NO: 36140
  Cyclic GFR-binding peptide
  MOD_RES (2), (4), (35), (36): Xaa is C or S

SEQ ID NO: 90151 - protein, 37 aa, Artificial Sequence; identical to SEQ ID NO: 36141
  Cyclic GFR-binding peptide
  MOD_RES (31), (32): Xaa is C or S

SEQ ID NO: 90152 - protein, 26 aa, Artificial Sequence
  Cyclic GFR-binding peptide
VMNSMEGLIVNSSDDMIQVTINSLKT

SEQ ID NO: 90153 - protein, 32 aa, Artificial Sequence
  Cyclic GFR-binding peptide
  MOD_RES (1), (3): Xaa is C or S
XGXSEVVMDSMEGLVVNNASDMIQITINSLRT

SEQ ID NO: 90154 - protein, 32 aa, Artificial Sequence; identical to SEQ ID NO: 36144
  Cyclic GFR-binding peptide
  MOD_RES (2), (2): Xaa is C or S

SEQ ID NO: 90155 - protein, 23 aa, Artificial Sequence
  Cyclic GFR-binding peptide
MSMEGLVKPTRGVMIQITINSLD

SEQ ID NO: 90156 - protein, 20 aa, Artificial Sequence
  Cyclic GFR-binding peptide
SMEGLLLVRGNDMIQMTINS

SEQ ID NO: 90157 - protein, 27 aa, Artificial Sequence
  Cyclic GFR-binding peptide
  MOD_RES (26), (27): Xaa is C or S
SMEGLVKPKRGVMIQITINSLAQPVXX

SEQ ID NO: 90158 - protein, 25 aa, Artificial Sequence
  Cyclic GFR-binding peptide
MGSMEGIIIQQKDNMIQMTINSMKT

SEQ ID NO: 90159 - protein, 35 aa, Artificial Sequence; identical to SEQ ID NO: 36149
  Cyclic GFR-binding peptide
  MOD_RES (31), (32): Xaa is C or S

SEQ ID NO: 90160 - protein, 32 aa, Artificial Sequence
  Cyclic GFR-binding peptide
  MOD_RES (30), (32): Xaa is C or S
PVKTSNITMQIMDNGRVLLIGEMSMIVEEXGX

SEQ ID NO: 90161 - protein, 27 aa, Artificial Sequence
  Cyclic GFR-binding peptide
MSNITMQIMNDKQQIIIGEMSGMVVDR

SEQ ID NO: 90162 - protein, 35 aa, Artificial Sequence; identical to SEQ ID NO: 36154
  Cyclic GFR-binding peptide
  MOD_RES (4), (5): Xaa is C or S

SEQ ID NO: 90163 - protein, 37 aa, Artificial Sequence; identical to SEQ ID NO: 36156
  Cyclic GFR-binding peptide
  MOD_RES (5), (6): Xaa is C or S

SEQ ID NO: 90164 - protein, 20 aa, Artificial Sequence
  Cyclic GFR-binding peptide
SNITMQIMDNGRVLLIGEMS

SEQ ID NO: 90165 - protein, 24 aa, Artificial Sequence
  Cyclic GFR-binding peptide
SNITIQIMDAANNVVIGEMSDMVV

SEQ ID NO: 90166 - protein, 34 aa, Artificial Sequence; identical to SEQ ID NO: 36162
  Cyclic GFR-binding peptide
  MOD_RES (3), (4): Xaa is C or S

SEQ ID NO: 90167 - protein, 34 aa, Artificial Sequence
  Cyclic GFR-binding peptide
  MOD_RES (5), (6): Xaa is C or S
TPPTXXVPTRLSNITIQIMDSANNVVIGEMSDMV

SEQ ID NO: 90168 - protein, 27 aa, Artificial Sequence
  Cyclic GFR-binding peptide
  MOD_RES (1), (2): Xaa is C or S
XXVPARLSNITIQIMDAANNVVLGEMS

SEQ ID NO: 90169 - protein, 21 aa, Artificial Sequence
  Cyclic GFR-binding peptide
SNITIQIMDAANNVVIGEMSD

SEQ ID NO: 90170 - protein, 23 aa, Artificial Sequence
  Cyclic GFR-binding peptide
LSNITIQIMDSANNVVLGEMSDM

SEQ ID NO: 90171 - protein, 31 aa, Artificial Sequence; identical to SEQ ID NO: 36168
  Cyclic GFR-binding peptide

SEQ ID NO: 90172 - protein, 35 aa, Artificial Sequence; identical to SEQ ID NO: 36167
  Cyclic GFR-binding peptide
  MOD_RES (3), (4): Xaa is C or S

SEQ ID NO: 90173 - protein, 26 aa, Artificial Sequence
  Cyclic GFR-binding peptide
SNITVQIMDDSSNVILGEMSNMVVRS

SEQ ID NO: 90174 - protein, 25 aa, Artificial Sequence
  Cyclic GFR-binding peptide
LSNITIQIMIGKTPKILGEMSMIVK

SEQ ID NO: 90175 - protein, 39 aa, Artificial Sequence; identical to SEQ ID NO: 36171
  Cyclic GFR-binding peptide
  MOD_RES (4), (5), (36), (38): Xaa is C or S

SEQ ID NO: 90176 - protein, 28 aa, Artificial Sequence
  Cyclic GFR-binding peptide
  MOD_RES (1), (2): Xaa is C or S
XXVSQDLSNITIQIMIGKTPKILGEMSM

SEQ ID NO: 90177 - protein, 33 aa, Artificial Sequence
  Cyclic GFR-binding peptide
  MOD_RES (30), (32): Xaa is C or S
PQALSNITIQIMVGRKPKVLGEMSMIVRSXKXS

SEQ ID NO: 90178 - protein, 34 aa, Artificial Sequence; identical to SEQ ID NO: 36175
  Cyclic GFR-binding peptide
  MOD_RES (32), (34): Xaa is C or S

SEQ ID NO: 90179 - protein, 23 aa, Artificial Sequence
  Cyclic GFR-binding peptide
QALSNITIQIMVGRKPKVLGEMS

SEQ ID NO: 90180 - protein, 30 aa, Artificial Sequence
  Cyclic GFR-binding peptide
  MOD_RES (3), (4): Xaa is C or S
GPXXTPTKMSNITMQIMNDKQQIIIGEMSG

SEQ ID NO: 90181 - protein, 31 aa, Artificial Sequence
  Cyclic GFR-binding peptide
  MOD_RES (5), (6): Xaa is C or S
TPPTXXVPTRLSNITIQIMDSANNVVIGEMS

SEQ ID NO: 90182 - protein, 30 aa, Artificial Sequence
  Cyclic GFR-binding peptide
  MOD_RES (1), (1): Xaa is C or S
XVPQALSNITIQIMVGRKPKVLGEMSMIVR

SEQ ID NO: 90183 - protein, 33 aa, Artificial Sequence
  Cyclic GFR-binding peptide
  MOD_RES (6), (7): Xaa is C or S
RVPSTXXAPVKTSNITMQIMDNGRVLLLGEMSM

SEQ ID NO: 90184 - protein, 32 aa, Artificial Sequence
  Cyclic GFR-binding peptide
  MOD_RES (30), (32): Xaa is C or S
TKLSNITVQIMDDSSNVILGEMSNMVVRSXGX

SEQ ID NO: 90185 - protein, 26 aa, Artificial Sequence
  Cyclic GFR-binding peptide
VPTRLSNITIQIMDSANNVVIGEMSD

SEQ ID NO: 90186 - protein, 35 aa, Artificial Sequence; identical to SEQ ID NO: 36179
  Cyclic GFR-binding peptide
  MOD_RES (1), (2), (33), (35): Xaa is C or S

SEQ ID NO: 90187 - protein, 30 aa, Artificial Sequence
  Cyclic GFR-binding peptide
  MOD_RES (3), (4): Xaa is C or S
APXXVPQALSNITIQIMVGRKPKVLGEMSM

SEQ ID NO: 90188 - protein, 41 aa, Artificial Sequence; identical to SEQ ID NO: 36180
  Cyclic GFR-binding peptide
  MOD_RES (6), (7), (39), (41): Xaa is C or S

SEQ ID NO: 90189 - protein, 33 aa, Artificial Sequence
  Cyclic GFR-binding peptide
  MOD_RES (6), (7): Xaa is C or S
STPPTXXVPTRLSNITIQIMDSANNVVIGEMSD

SEQ ID NO: 90190 - protein, 26 aa, Artificial Sequence
  Cyclic GFR-binding peptide
TSNITMQIMDNGRVLLLGEMSMIVEE

SEQ ID NO: 90191 - protein, 38 aa, Artificial Sequence; identical to SEQ ID NO: 36186
  Cyclic GFR-binding peptide
  MOD_RES (5), (6), (37): Xaa is C or S

SEQ ID NO: 90192 - protein, 30 aa, Artificial Sequence
  Cyclic GFR-binding peptide
  MOD_RES (28), (30): Xaa is C or S
KTSNITMQIMDNGRVLLLGEMSMIVEEXGX

SEQ ID NO: 90193 - protein, 32 aa, Artificial Sequence
  Cyclic GFR-binding peptide
  MOD_RES (4), (5): Xaa is C or S
PPTXXVPTRLSNITIQIMDSANNVVLGEMSDM

SEQ ID NO: 90194 - protein, 36 aa, Artificial Sequence; identical to SEQ ID NO: 36196
  Cyclic GFR-binding peptide
  MOD_RES (5), (6): Xaa is C or S

SEQ ID NO: 90195 - protein, 35 aa, Artificial Sequence; identical to SEQ ID NO: 36197
  Cyclic GFR-binding peptide
  MOD_RES (3), (4), (35): Xaa is C or S

SEQ ID NO: 90196 - protein, 28 aa, Artificial Sequence
  Cyclic GFR-binding peptide
  MOD_RES (28), (28): Xaa is C or S
KTSNITMQIMDNGRVLLIGEMSMIVEEX

SEQ ID NO: 90197 - protein, 23 aa, Artificial Sequence
  Cyclic GFR-binding peptide
RLSNITIQIMDSANNVVIGEMSD

SEQ ID NO: 90198 - protein, 27 aa, Artificial Sequence
  Cyclic GFR-binding peptide
QDLSNITIQIMIGKTPKILGEMSMIVK

SEQ ID NO: 90199 - protein, 27 aa, Artificial Sequence
  Cyclic GFR-binding peptide
DLSNITIQIMVGRTPKVLGEMSMVVKS

SEQ ID NO: 90200 - protein, 27 aa, Artificial Sequence
  Cyclic GFR-binding peptide
  MOD_RES (1), (1): Xaa is C or S
XAPVKTSNITMQIMDNGRVLLLGEMSM

SEQ ID NO: 90201 - protein, 33 aa, Artificial Sequence
  Cyclic GFR-binding peptide
  MOD_RES (6), (7): Xaa is C or S
ASAAPXXVPQALSNITIQIMVGRKPKVLGEMSM

SEQ ID NO: 90202 - protein, 22 aa, Artificial Sequence
  Cyclic GFR-binding peptide
SNITMQIMNDKQQIILGEMSGM

SEQ ID NO: 90203 - protein, 36 aa, Artificial Sequence; identical to SEQ ID NO: 36211
  Cyclic GFR-binding peptide
  MOD_RES (2), (3), (35): Xaa is C or S

SEQ ID NO: 90204 - protein, 33 aa, Artificial Sequence; identical to SEQ ID NO: 36217
  Cyclic GFR-binding peptide
  MOD_RES (2), (3): Xaa is C or S

SEQ ID NO: 90205 - protein, 33 aa, Artificial Sequence
  Cyclic GFR-binding peptide
  MOD_RES (5), (6): Xaa is C or S
APASXXVPARLSNITIQIMDAANNVVLGEMSDM

SEQ ID NO: 90206 - protein, 40 aa, Artificial Sequence; identical to SEQ ID NO: 36218
  Cyclic GFR-binding peptide
  MOD_RES (5), (6), (38), (40): Xaa is C or S

SEQ ID NO: 90207 - protein, 29 aa, Artificial Sequence
  Cyclic GFR-binding peptide
  MOD_RES (3), (4): Xaa is C or S
SPXXVPQDLSNITIQIMVGRTPKVLGEMS

SEQ ID NO: 90208 - protein, 32 aa, Artificial Sequence; identical to SEQ ID NO: 36226
  Cyclic GFR-binding peptide
  MOD_RES (1), (2): Xaa is C or S

SEQ ID NO: 90209 - protein, 38 aa, Artificial Sequence; identical to SEQ ID NO: 36229
  Cyclic GFR-binding peptide
  MOD_RES (6), (7): Xaa is C or S

SEQ ID NO: 90210 - protein, 41 aa, Artificial Sequence; identical to SEQ ID NO: 36230
  Cyclic GFR-binding peptide
  MOD_RES (6), (7), (39), (41): Xaa is C or S

SEQ ID NO: 90211 - protein, 27 aa, Artificial Sequence
  Cyclic GFR-binding peptide
APVKTSNITMQIMDNGRVLLLGEMSMI

SEQ ID NO: 90212 - protein, 29 aa, Artificial Sequence
  Cyclic GFR-binding peptide
  MOD_RES (29), (29): Xaa is C or S
QDLSNITIQIMIGKTPKILGEMSMIVKSX

SEQ ID NO: 90213 - protein, 30 aa, Artificial Sequence
  Cyclic GFR-binding peptide
  MOD_RES (29), (29): Xaa is C or S
RLSNITIQIMDAANNVVLGEMSDMVVEAXG

SEQ ID NO: 90214 - protein, 34 aa, Artificial Sequence; identical to SEQ ID NO: 36232
  Cyclic GFR-binding peptide
  MOD_RES (1), (32), (34): Xaa is C or S

SEQ ID NO: 90215 - protein, 29 aa, Artificial Sequence
  Cyclic GFR-binding peptide
SNITMQIMNDKQQIIIGEMSAAAAAAAAA

SEQ ID NO: 90216 - protein, 34 aa, Artificial Sequence; identical to SEQ ID NO: 36236
  Cyclic GFR-binding peptide
  MOD_RES (32), (34): Xaa is C or S

SEQ ID NO: 90217 - protein, 32 aa, Artificial Sequence; identical to SEQ ID NO: 36238
  Cyclic GFR-binding peptide
  MOD_RES (32), (32): Xaa is C or S

SEQ ID NO: 90218 - protein, 36 aa, Artificial Sequence; identical to SEQ ID NO: 36239
  Cyclic GFR-binding peptide
  MOD_RES (3), (4), (36): Xaa is C or S

SEQ ID NO: 90219 - protein, 32 aa, Artificial Sequence
  Cyclic GFR-binding peptide
  MOD_RES (30), (32): Xaa is C or S
TRLSNITIQIMDSANNVVIGEMSDMVVESXGX

SEQ ID NO: 90220 - protein, 34 aa, Artificial Sequence
  Cyclic GFR-binding peptide
  MOD_RES (31), (33): Xaa is C or S
PTKLSNITVQIMDDSSNVILGEMSNMVVRSXGXH

SEQ ID NO: 90221 - protein, 29 aa, Artificial Sequence
  Cyclic GFR-binding peptide
APVKTSNITMQIMDNGRVLLLGEMSMIVE

SEQ ID NO: 90222 - protein, 22 aa, Artificial Sequence
  Cyclic GFR-binding peptide
TSNITMQIMDNGRVLLLGEMSM

SEQ ID NO: 90223 - protein, 29 aa, Artificial Sequence
  Cyclic GFR-binding peptide
  MOD_RES (1), (2): Xaa is C or S
XXTPTKMSNITMQIMNDKQQIIIGEMSGM

SEQ ID NO: 90224 - protein, 23 aa, Artificial Sequence
  Cyclic GFR-binding peptide
LSNITIQIMVGRKPKVLGEMSMI

SEQ ID NO: 90225 - protein, 36 aa, Artificial Sequence; identical to SEQ ID NO: 36244
  Cyclic GFR-binding peptide
  MOD_RES (1), (33), (35): Xaa is C or S

SEQ ID NO: 90226 - protein, 30 aa, Artificial Sequence
  Cyclic GFR-binding peptide
  MOD_RES (1), (2): Xaa is C or S
XXAPVKTSNITMQIMDNGRVLLIGEMSMIV

SEQ ID NO: 90227 - protein, 35 aa, Artificial Sequence; identical to SEQ ID NO: 36247
  Cyclic GFR-binding peptide
  MOD_RES (32), (34): Xaa is C or S

SEQ ID NO: 90228 - protein, 24 aa, Artificial Sequence
  Cyclic GFR-binding peptide
TSNITMQIMDNGRVLLIGEMSMIV

SEQ ID NO: 90229 - protein, 29 aa, Artificial Sequence
  Cyclic GFR-binding peptide
  MOD_RES (1), (1): Xaa is C or S
XVPTRLSNITIQIMDSANNVVLGEMSDMV

SEQ ID NO: 90230 - protein, 41 aa, Artificial Sequence; identical to SEQ ID NO: 36250
  Cyclic GFR-binding peptide
  MOD_RES (6), (7), (39), (41): Xaa is C or S

SEQ ID NO: 90231 - protein, 34 aa, Artificial Sequence
  Cyclic GFR-binding peptide
  MOD_RES (31), (33): Xaa is C or S
PTKMSNITMQIMNDKQQIIIGEMSGMVVDRXGXS

SEQ ID NO: 90232 - protein, 28 aa, Artificial Sequence
  Cyclic GFR-binding peptide
  MOD_RES (1), (1): Xaa is C or S
XVPTRLSNITIQIMDSANNVVLGEMSDM

SEQ ID NO: 90233 - protein, 30 aa, Artificial Sequence
  Cyclic GFR-binding peptide
  MOD_RES (3), (4): Xaa is C or S
STXXAPVKTSNITMQIMDNGRVLLLGEMSM

SEQ ID NO: 90234 - protein, 37 aa, Artificial Sequence; identical to SEQ ID NO: 36256
  Cyclic GFR-binding peptide
  MOD_RES (5), (6), (37): Xaa is C or S

SEQ ID NO: 90235 - protein, 33 aa, Artificial Sequence
  Cyclic GFR-binding peptide
  MOD_RES (4), (5): Xaa is C or S
PSTXXAPVKTSNITMQIMDNGRVLLLGEMSMIV

SEQ ID NO: 90236 - protein, 37 aa, Artificial Sequence; identical to SEQ ID NO: 36260
  Cyclic GFR-binding peptide
  MOD_RES (6), (7): Xaa is C or S

SEQ ID NO: 90237 - protein, 28 aa, Artificial Sequence
  Cyclic GFR-binding peptide
  MOD_RES (27), (27): Xaa is C or S
SNITVQIMDDSSNVILGEMSNMVVRSXG

SEQ ID NO: 90238 - protein, 36 aa, Artificial Sequence
  Cyclic GFR-binding peptide
  MOD_RES (6), (7): Xaa is C or S
RVPSTXXAPVKTSNITMQIMDNGRVLLLGEMSMIVE

SEQ ID NO: 90239 - protein, 26 aa, Artificial Sequence
  Cyclic GFR-binding peptide
QALSNITIQIMVGRKPKVLGEMSMIV

SEQ ID NO: 90240 - protein, 25 aa, Artificial Sequence
  Cyclic GFR-binding peptide
SNITMQIMNDKQQIIIGEMSGMVVD

SEQ ID NO: 90241 - protein, 26 aa, Artificial Sequence
  Cyclic GFR-binding peptide
TRLSNITIQIMDSANNVVLGEMSDMV

SEQ ID NO: 90242 - protein, 32 aa, Artificial Sequence
  Cyclic GFR-binding peptide
  MOD_RES (5), (6): Xaa is C or S
VPSTXXAPVKTSNITMQIMDNGRVLLIGEMSM

SEQ ID NO: 90243 - protein, 24 aa, Artificial Sequence
  Cyclic GFR-binding peptide
KTSNITMQIMDNGRVLLIGEMSMI

SEQ ID NO: 90244 - protein, 30 aa, Artificial Sequence
  Cyclic GFR-binding peptide
  MOD_RES (27), (29): Xaa is C or S
SNITIQIMDSANNVVIGEMSDMVVESXGXR

SEQ ID NO: 90245 - protein, 39 aa, Artificial Sequence; identical to SEQ ID NO: 36266
  Cyclic GFR-binding peptide
  MOD_RES (3), (4), (36), (38): Xaa is C or S

SEQ ID NO: 90246 - protein, 40 aa, Artificial Sequence; identical to SEQ ID NO: 36270
  Cyclic GFR-binding peptide
  MOD_RES (6), (7), (39): Xaa is C or S

SEQ ID NO: 90247 - protein, 32 aa, Artificial Sequence
  Cyclic GFR-binding peptide
  MOD_RES (31), (31): Xaa is C or S
PTKMSNITMQIMNDKQQIIIGEMSGMVVDRXG

SEQ ID NO: 90248 - protein, 23 aa, Artificial Sequence
  Cyclic GFR-binding peptide
SNITIQIMVGRTPKVLGEMSMVV

SEQ ID NO: 90249 - protein, 37 aa, Artificial Sequence; identical to SEQ ID NO: 36277
  Cyclic GFR-binding peptide
  MOD_RES (2), (3), (35), (37): Xaa is C or S

SEQ ID NO: 90250 - protein, 35 aa, Artificial Sequence; identical to SEQ ID NO: 36279
  Cyclic GFR-binding peptide
  MOD_RES (4), (5): Xaa is C or S

SEQ ID NO: 90251 - protein, 38 aa, Artificial Sequence; identical to SEQ ID NO: 36280
  Cyclic GFR-binding peptide
  MOD_RES (2), (3), (35), (37): Xaa is C or S

SEQ ID NO: 90252 - protein, 38 aa, Artificial Sequence; identical to SEQ ID NO: 36281
  Cyclic GFR-binding peptide
  MOD_RES (6), (7), (38): Xaa is C or S

SEQ ID NO: 90253 - protein, 27 aa, Artificial Sequence
  Cyclic GFR-binding peptide
PARLSNITIQIMDAANNVVLGEMSDMV

SEQ ID NO: 90254 - protein, 32 aa, Artificial Sequence
  Cyclic GFR-binding peptide
  MOD_RES (2), (3): Xaa is C or S
PXXAPTKLSNITVQIMDDSSNVILGEMSNMVV

SEQ ID NO: 90255 - protein, 30 aa, Artificial Sequence
  Cyclic GFR-binding peptide
  MOD_RES (2), (3): Xaa is C or S
SXXVPARLSNITIQIMDAANNVVIGEMSDM

SEQ ID NO: 90256 - protein, 41 aa, Artificial Sequence; identical to SEQ ID NO: 36285
  Cyclic GFR-binding peptide
  MOD_RES (6), (7), (39), (41): Xaa is C or S

SEQ ID NO: 90257 - protein, 27 aa, Artificial Sequence
  Cyclic GFR-binding peptide
TKMSNITMQIMNDKQQIIIGEMSGMVV

SEQ ID NO: 90258 - protein, 34 aa, Artificial Sequence; identical to SEQ ID NO: 36288
  Cyclic GFR-binding peptide
  MOD_RES (31), (33): Xaa is C or S

SEQ ID NO: 90259 - protein, 37 aa, Artificial Sequence; identical to SEQ ID NO: 36290
  Cyclic GFR-binding peptide
  MOD_RES (5), (6): Xaa is C or S

SEQ ID NO: 90260 - protein, 34 aa, Artificial Sequence
  Cyclic GFR-binding peptide
  MOD_RES (4), (5): Xaa is C or S
PASXXVPARLSNITIQIMDAANNVVLGEMSDMVV

SEQ ID NO: 90261 - protein, 24 aa, Artificial Sequence
  Cyclic GFR-binding peptide
MSNITMQIMNDKQQIIIGEMSGMV

SEQ ID NO: 90262 - protein, 35 aa, Artificial Sequence
  Cyclic GFR-binding peptide
  MOD_RES (5), (6): Xaa is C or S
VPSTXXAPVKTSNITMQIMDNGRVLLLGEMSMIVE

SEQ ID NO: 90263 - protein, 32 aa, Artificial Sequence; identical to SEQ ID NO: 36294
  Cyclic GFR-binding peptide
  MOD_RES (1), (2): Xaa is C or S

SEQ ID NO: 90264 - protein, 37 aa, Artificial Sequence; identical to SEQ ID NO: 36296
  Cyclic GFR-binding peptide
  MOD_RES (2), (3), (35), (37): Xaa is C or S

SEQ ID NO: 90265 - protein, 32 aa, Artificial Sequence
  Cyclic GFR-binding peptide
  MOD_RES (4), (5): Xaa is C or S
PKPXXAPTKLSNITVQIMDDSSNVILGEMSNM

SEQ ID NO: 90266 - protein, 37 aa, Artificial Sequence; identical to SEQ ID NO: 36298
  Cyclic GFR-binding peptide
  MOD_RES (5), (6), (37): Xaa is C or S

SEQ ID NO: 90267 - protein, 22 aa, Artificial Sequence
  Cyclic GFR-binding peptide
RLSNITIQIMDSANNVVIGEMS

SEQ ID NO: 90268 - protein, 29 aa, Artificial Sequence
  Cyclic GFR-binding peptide
  MOD_RES (2), (3): Xaa is C or S
SXXVPARLSNITIQIMDAANNVVIGEMSD

SEQ ID NO: 90269 - protein, 29 aa, Artificial Sequence
  Cyclic GFR-binding peptide
  MOD_RES (1), (1): Xaa is C or S
XVPQALSNITIQIMVGRKPKVLGEMSMIV

SEQ ID NO: 90270 - protein, 22 aa, Artificial Sequence
  Cyclic GFR-binding peptide
LSNITIQIMVGRKPKVLGEMSM

SEQ ID NO: 90271 - protein, 27 aa, Artificial Sequence
  Cyclic GFR-binding peptide
  MOD_RES (27), (27): Xaa is C or S
TSNITMQIMDNGRVLLLGEMSMIVEEX

SEQ ID NO: 90272 - protein, 41 aa, Artificial Sequence; identical to SEQ ID NO: 36300
  Cyclic GFR-binding peptide
  MOD_RES (5), (6), (38), (40): Xaa is C or S

SEQ ID NO: 90273 - protein, 31 aa, Artificial Sequence
  Cyclic GFR-binding peptide
  MOD_RES (4), (5): Xaa is C or S
ASPXXVSQDLSNITIQIMIGKTPKILGEMSM

SEQ ID NO: 90274 - protein, 39 aa, Artificial Sequence; identical to SEQ ID NO: 36303
  Cyclic GFR-binding peptide
  MOD_RES (4), (5), (37), (39): Xaa is C or S

SEQ ID NO: 90275 - protein, 40 aa, Artificial Sequence; identical to SEQ ID NO: 36308
  Cyclic GFR-binding peptide
  MOD_RES (4), (5), (37), (39): Xaa is C or S

SEQ ID NO: 90276 - protein, 32 aa, Artificial Sequence; identical to SEQ ID NO: 36309
  Cyclic GFR-binding peptide
  MOD_RES (1), (1): Xaa is C or S

SEQ ID NO: 90277 - protein, 24 aa, Artificial Sequence
  Cyclic GFR-binding peptide
SNITIQIMIGKTPKILGEMSMIVK

SEQ ID NO: 90278 - protein, 37 aa, Artificial Sequence; identical to SEQ ID NO: 36310
  Cyclic GFR-binding peptide
  MOD_RES (4), (5), (37): Xaa is C or S

SEQ ID NO: 90279 - protein, 25 aa, Artificial Sequence
  Cyclic GFR-binding peptide
SQDLSNITIQIMIGKTPKILGEMSM

SEQ ID NO: 90280 - protein, 30 aa, Artificial Sequence
  Cyclic GFR-binding peptide
  MOD_RES (4), (5): Xaa is C or S
PKPXXAPTKLSNITVQIMDDSSNVILGEMS

SEQ ID NO: 90281 - protein, 37 aa, Artificial Sequence; identical to SEQ ID NO: 36316
  Cyclic GFR-binding peptide
  MOD_RES (2), (3), (35), (37): Xaa is C or S

SEQ ID NO: 90282 - protein, 32 aa, Artificial Sequence
  Cyclic GFR-binding peptide
  MOD_RES (3), (4): Xaa is C or S
ASXXVPARLSNITIQIMDAANNVVIGEMSDMV

SEQ ID NO: 90283 - protein, 35 aa, Artificial Sequence; identical to SEQ ID NO: 36317
  Cyclic GFR-binding peptide
  MOD_RES (1), (2), (34): Xaa is C or S

SEQ ID NO: 90284 - protein, 33 aa, Artificial Sequence
  Cyclic GFR-binding peptide
  MOD_RES (31), (33): Xaa is C or S
PARLSNITIQIMDAANNVVIGEMSDMVVEAXGX

SEQ ID NO: 90285 - protein, 35 aa, Artificial Sequence; identical to SEQ ID NO: 36319
  Cyclic GFR-binding peptide
  MOD_RES (1), (32), (34): Xaa is C or S

SEQ ID NO: 90286 - protein, 26 aa, Artificial Sequence
  Cyclic GFR-binding peptide
  MOD_RES (1), (1): Xaa is C or S
XAPVKTSNITMQIMDNGRVLLIGEMS

SEQ ID NO: 90287 - protein, 33 aa, Artificial Sequence; identical to SEQ ID NO: 36321
  Cyclic GFR-binding peptide
  MOD_RES (1), (2): Xaa is C or S

SEQ ID NO: 90288 - protein, 21 aa, Artificial Sequence
  Cyclic GFR-binding peptide
SNITMQIMDNGRVLLIGEMSM

SEQ ID NO: 90289 - protein, 28 aa, Artificial Sequence
  Cyclic GFR-binding peptide
PQALSNITIQIMVGRKPKVLGEMSMIVR

SEQ ID NO: 90290 - protein, 34 aa, Artificial Sequence; identical to SEQ ID NO: 36322
  Cyclic GFR-binding peptide
  MOD_RES (3), (4): Xaa is C or S

SEQ ID NO: 90291 - protein, 39 aa, Artificial Sequence; identical to SEQ ID NO: 36324
  Cyclic GFR-binding peptide
  MOD_RES (4), (5), (36), (38): Xaa is C or S

SEQ ID NO: 90292 - protein, 30 aa, Artificial Sequence
  Cyclic GFR-binding peptide
  MOD_RES (28), (30): Xaa is C or S
LSNITVQIMDDSSNVILGEMSNMVVRSXGX

SEQ ID NO: 90293 - protein, 34 aa, Artificial Sequence
  Cyclic GFR-binding peptide
  MOD_RES (6), (7): Xaa is C or S
STPPTXXVPTRLSNITIQIMDSANNVVLGEMSDM

SEQ ID NO: 90294 - protein, 29 aa, Artificial Sequence
  Cyclic GFR-binding peptide
PQDLSNITIQIMVGRTPKVLGEMSMVVKS

SEQ ID NO: 90295 - protein, 29 aa, Artificial Sequence
  Cyclic GFR-binding peptide
  MOD_RES (27), (29): Xaa is C or S
TSNITMQIMDNGRVLLIGEMSMIVEEXGX

SEQ ID NO: 90296 - protein, 29 aa, Artificial Sequence
  Cyclic GFR-binding peptide
  MOD_RES (1), (2): Xaa is C or S
XXVPQALSNITIQIMVGRKPKVLGEMSMI

SEQ ID NO: 90297 - protein, 26 aa, Artificial Sequence
  Cyclic GFR-binding peptide
SNITIQIMDAANNVVLGEMSDMVVEA

SEQ ID NO: 90298 - protein, 31 aa, Artificial Sequence
  Cyclic GFR-binding peptide
  MOD_RES (4), (5): Xaa is C or S
PPTXXVPTRLSNITIQIMDSANNVVIGEMSD

SEQ ID NO: 90299 - protein, 30 aa, Artificial Sequence
  Cyclic GFR-binding peptide
  MOD_RES (1), (2): Xaa is C or S
XXAPTKLSNITVQIMDDSSNVILGEMSNMV

SEQ ID NO: 90300 - protein, 30 aa, Artificial Sequence
  Cyclic GFR-binding peptide
  MOD_RES (28), (30): Xaa is C or S
DLSNITIQIMVGRTPKVLGEMSMVVKSXKX

SEQ ID NO: 90301 - protein, 36 aa, Artificial Sequence; identical to SEQ ID NO: 36329
  Cyclic GFR-binding peptide
  MOD_RES (1), (33), (35): Xaa is C or S

SEQ ID NO: 90302 - protein, 32 aa, Artificial Sequence; identical to SEQ ID NO: 36330
  Cyclic GFR-binding peptide
  MOD_RES (1), (2): Xaa is C or S

SEQ ID NO: 90303 - protein, 37 aa, Artificial Sequence; identical to SEQ ID NO: 36333
  Cyclic GFR-binding peptide
  MOD_RES (6), (7): Xaa is C or S

SEQ ID NO: 90304 - protein, 32 aa, Artificial Sequence
  Cyclic GFR-binding peptide
  MOD_RES (6), (7): Xaa is C or S
GSAGPXXTPTKMSNITMQIMNDKQQIIIGEMS

SEQ ID NO: 90305 - protein, 36 aa, Artificial Sequence; identical to SEQ ID NO: 36339
  Cyclic GFR-binding peptide
  MOD_RES (4), (5): Xaa is C or S

SEQ ID NO: 90306 - protein, 33 aa, Artificial Sequence; identical to SEQ ID NO: 36341
  Cyclic GFR-binding peptide
  MOD_RES (32), (32): Xaa is C or S

SEQ ID NO: 90307 - protein, 32 aa, Artificial Sequence; identical to SEQ ID NO: 36342
  Cyclic GFR-binding peptide
  MOD_RES (31), (31): Xaa is C or S

SEQ ID NO: 90308 - protein, 34 aa, Artificial Sequence; identical to SEQ ID NO: 36343
  Cyclic GFR-binding peptide
  MOD_RES (3), (4): Xaa is C or S

SEQ ID NO: 90309 - protein, 25 aa, Artificial Sequence
  Cyclic GFR-binding peptide
MSNITMQIMNDKQQIIIGEMSGMVV

SEQ ID NO: 90310 - protein, 38 aa, Artificial Sequence; identical to SEQ ID NO: 36350
  Cyclic GFR-binding peptide
  MOD_RES (2), (3), (35), (37): Xaa is C or S

SEQ ID NO: 90311 - protein, 24 aa, Artificial Sequence
  Cyclic GFR-binding peptide
LSNITVQIMDDSSNVILGEMSNMV

SEQ ID NO: 90312 - protein, 26 aa, Artificial Sequence
  Cyclic GFR-binding peptide
PQDLSNITIQIMVGRTPKVLGEMSMV

SEQ ID NO: 90313 - protein, 26 aa, Artificial Sequence
  Cyclic GFR-binding peptide
  MOD_RES (26), (26): Xaa is C or S
SNITMQIMDNGRVLLIGEMSMIVEEX

SEQ ID NO: 90314 - protein, 31 aa, Artificial Sequence
  Cyclic GFR-binding peptide
  MOD_RES (1), (2): Xaa is C or S
XXVPQDLSNITIQIMVGRTPKVLGEMSMVVK

SEQ ID NO: 90315 - protein, 28 aa, Artificial Sequence
  Cyclic GFR-binding peptide
  MOD_RES (2), (3): Xaa is C or S
PXXVSQDLSNITIQIMIGKTPKILGEMS

SEQ ID NO: 90316 - protein, 36 aa, Artificial Sequence; identical to SEQ ID NO: 36352
  Cyclic GFR-binding peptide
  MOD_RES (4), (5): Xaa is C or S

SEQ ID NO: 90317 - protein, 31 aa, Artificial Sequence; identical to SEQ ID NO: 36359
  Cyclic GFR-binding peptide
  MOD_RES (1), (1): Xaa is C or S

SEQ ID NO: 90318 - protein, 37 aa, Artificial Sequence; identical to SEQ ID NO: 36360
  Cyclic GFR-binding peptide
  MOD_RES (6), (7): Xaa is C or S

SEQ ID NO: 90319 - protein, 30 aa, Artificial Sequence
  Cyclic GFR-binding peptide
  MOD_RES (2), (3): Xaa is C or S
TXXVPTRLSNITIQIMDSANNVVLGEMSDM

SEQ ID NO: 90320 - protein, 21 aa, Artificial Sequence
  Cyclic GFR-binding peptide
SNITMQIMNDKQQIILGEMSG

SEQ ID NO: 90321 - protein, 28 aa, Artificial Sequence
  Cyclic GFR-binding peptide
  MOD_RES (26), (28): Xaa is C or S
SNITIQIMIGKTPKILGEMSMIVKSXKX

SEQ ID NO: 90322 - protein, 29 aa, Artificial Sequence
  Cyclic GFR-binding peptide
  MOD_RES (28), (28): Xaa is C or S
ALSNITIQIMVGRKPKVLGEMSMIVRSXK

SEQ ID NO: 90323 - protein, 25 aa, Artificial Sequence
  Cyclic GFR-binding peptide
APVKTSNITMQIMDNGRVLLIGEMS

SEQ ID NO: 90324 - protein, 29 aa, Artificial Sequence
  Cyclic GFR-binding peptide
VPTRLSNITIQIMDSANNVVLGEMSDMVV

SEQ ID NO: 90325 - protein, 37 aa, Artificial Sequence; identical to SEQ ID NO: 36378
  Cyclic GFR-binding peptide
  MOD_RES (4), (5), (37): Xaa is C or S

SEQ ID NO: 90326 - protein, 34 aa, Artificial Sequence; identical to SEQ ID NO: 36379
  Cyclic GFR-binding peptide
  MOD_RES (1), (33): Xaa is C or S

SEQ ID NO: 90327 - protein, 28 aa, Artificial Sequence
  Cyclic GFR-binding peptide
  MOD_RES (28), (28): Xaa is C or S
ALSNITIQIMVGRKPKVLGEMSMIVRSX

SEQ ID NO: 90328 - protein, 29 aa, Artificial Sequence
  Cyclic GFR-binding peptide
SNITIQIMVGRKPKVLGEMSAAAAAAAAA

SEQ ID NO: 90329 - protein, 35 aa, Artificial Sequence; identical to SEQ ID NO: 36384
  Cyclic GFR-binding peptide
  MOD_RES (2), (3), (35): Xaa is C or S

SEQ ID NO: 90330 - protein, 34 aa, Artificial Sequence
  Cyclic GFR-binding peptide
  MOD_RES (4), (5): Xaa is C or S
PPTXXVPTRLSNITIQIMDSANNVVLGEMSDMVV

SEQ ID NO: 90331 - protein, 33 aa, Artificial Sequence
  Cyclic GFR-binding peptide
  MOD_RES (4), (5): Xaa is C or S
PKPXXAPTKLSNITVQIMDDSSNVILGEMSNMV

SEQ ID NO: 90332 - protein, 24 aa, Artificial Sequence
  Cyclic GFR-binding peptide
VKTSNITMQIMDNGRVLLLGEMSM

SEQ ID NO: 90333 - protein, 36 aa, Artificial Sequence; identical to SEQ ID NO: 36390
  Cyclic GFR-binding peptide
  MOD_RES (4), (5): Xaa is C or S

SEQ ID NO: 90334 - protein, 38 aa, Artificial Sequence; identical to SEQ ID NO: 36392
  Cyclic GFR-binding peptide
  MOD_RES (5), (6), (37): Xaa is C or S

SEQ ID NO: 90335 - protein, 29 aa, Artificial Sequence
  Cyclic GFR-binding peptide
VPQDLSNITIQIMVGRTPKVLGEMSMVVK

SEQ ID NO: 90336 - protein, 31 aa, Artificial Sequence
  Cyclic GFR-binding peptide
  MOD_RES (5), (6): Xaa is C or S
APASXXVPARLSNITIQIMDAANNVVIGEMS

SEQ ID NO: 90337 - protein, 24 aa, Artificial Sequence
  Cyclic GFR-binding peptide
PTKLSNITVQIMDDSSNVILGEMS

SEQ ID NO: 90338 - protein, 33 aa, Artificial Sequence
  Cyclic GFR-binding peptide
  MOD_RES (30), (32): Xaa is C or S
PVKTSNITMQIMDNGRVLLIGEMSMIVEEXGXL

SEQ ID NO: 90339 - protein, 34 aa, Artificial Sequence
  Cyclic GFR-binding peptide
  MOD_RES (5), (6): Xaa is C or S
SAGPXXTPTKMSNITMQIMNDKQQIILGEMSGMV

SEQ ID NO: 90340 - protein, 28 aa, Artificial Sequence
  Cyclic GFR-binding peptide
  MOD_RES (1), (1): Xaa is C or S
XTPTKMSNITMQIMNDKQQIIIGEMSGM

SEQ ID NO: 90341 - protein, 31 aa, Artificial Sequence
  Cyclic GFR-binding peptide
  MOD_RES (5), (6): Xaa is C or S
SAAPXXVPQALSNITIQIMVGRKPKVLGEMS

SEQ ID NO: 90342 - protein, 27 aa, Artificial Sequence
  Cyclic GFR-binding peptide
VPARLSNITIQIMDAANNVVLGEMSDM

SEQ ID NO: 90343 - protein, 37 aa, Artificial Sequence; identical to SEQ ID NO: 36402
  Cyclic GFR-binding peptide
  MOD_RES (1), (2), (34), (36): Xaa is C or S

SEQ ID NO: 90344 - protein, 25 aa, Artificial Sequence
  Cyclic GFR-binding peptide
PVKTSNITMQIMDNGRVLLLGEMSM

SEQ ID NO: 90345 - protein, 25 aa, Artificial Sequence
  Cyclic GFR-binding peptide
TRLSNITIQIMDSANNVVIGEMSDM

SEQ ID NO: 90346 - protein, 29 aa, Artificial Sequence
  Cyclic GFR-binding peptide
  MOD_RES (28), (28): Xaa is C or S
LSNITVQIMDDSSNVILGEMSNMVVRSXG

SEQ ID NO: 90347 - protein, 36 aa, Artificial Sequence; identical to SEQ ID NO: 36408
  Cyclic GFR-binding peptide
  MOD_RES (5), (6): Xaa is C or S

SEQ ID NO: 90348 - protein, 32 aa, Artificial Sequence
  Cyclic GFR-binding peptide
  MOD_RES (2), (3): Xaa is C or S
TXXAPVKTSNITMQIMDNGRVLLIGEMSMIVE

SEQ ID NO: 90349 - protein, 33 aa, Artificial Sequence; identical to SEQ ID NO: 36412
  Cyclic GFR-binding peptide
  MOD_RES (1), (2): Xaa is C or S

SEQ ID NO: 90350 - protein, 40 aa, Artificial Sequence; identical to SEQ ID NO: 36413
  Cyclic GFR-binding peptide
  MOD_RES (6), (7), (38), (40): Xaa is C or S

SEQ ID NO: 90351 - protein, 31 aa, Artificial Sequence
  Cyclic GFR-binding peptide
  MOD_RES (29), (31): Xaa is C or S
VKTSNITMQIMDNGRVLLLGEMSMIVEEXGX

SEQ ID NO: 90352 - protein, 30 aa, Artificial Sequence
  Cyclic GFR-binding peptide
PARLSNITIQIMDAANNVVLGEMSDMVVEA

SEQ ID NO: 90353 - protein, 35 aa, Artificial Sequence; identical to SEQ ID NO: 36414
  Cyclic GFR-binding peptide
  MOD_RES (32), (34): Xaa is C or S

SEQ ID NO: 90354 - protein, 31 aa, Artificial Sequence
  Cyclic GFR-binding peptide
  MOD_RES (1), (2): Xaa is C or S
XXTPTKMSNITMQIMNDKQQIIIGEMSGMVV

SEQ ID NO: 90355 - protein, 34 aa, Artificial Sequence; identical to SEQ ID NO: 36419
  Cyclic GFR-binding peptide
  MOD_RES (3), (4): Xaa is C or S

SEQ ID NO: 90356 - protein, 27 aa, Artificial Sequence
  Cyclic GFR-binding peptide
VKTSNITMQIMDNGRVLLIGEMSMIVE

SEQ ID NO: 90357 - protein, 29 aa, Artificial Sequence
  Cyclic GFR-binding peptide
TKMSNITMQIMNDKQQIILGEMSGMVVDR

SEQ ID NO: 90358 - protein, 27 aa, Artificial Sequence
  Cyclic GFR-binding peptide
RLSNITIQIMDAANNVVIGEMSDMVVE

SEQ ID NO: 90359 - protein, 33 aa, Artificial Sequence
  Cyclic GFR-binding peptide
  MOD_RES (30), (32): Xaa is C or S
TKMSNITMQIMNDKQQIILGEMSGMVVDRXGXS

SEQ ID NO: 90360 - protein, 31 aa, Artificial Sequence; identical to SEQ ID NO: 36427
  Cyclic GFR-binding peptide
  MOD_RES (1), (1): Xaa is C or S

SEQ ID NO: 90361 - protein, 27 aa, Artificial Sequence
  Cyclic GFR-binding peptide
VPTRLSNITIQIMDSANNVVIGEMSDM

SEQ ID NO: 90362 - protein, 30 aa, Artificial Sequence
  Cyclic GFR-binding peptide
  MOD_RES (2), (3): Xaa is C or S
TXXAPVKTSNITMQIMDNGRVLLIGEMSMI

SEQ ID NO: 90363 - protein, 36 aa, Artificial Sequence; identical to SEQ ID NO: 36432
  Cyclic GFR-binding peptide
  MOD_RES (1), (33), (35): Xaa is C or S

SEQ ID NO: 90364 - protein, 33 aa, Artificial Sequence
  Cyclic GFR-binding peptide
  MOD_RES (5), (6): Xaa is C or S
VPKPXXAPTKLSNITVQIMDDSSNVILGEMSNM

SEQ ID NO: 90365 - protein, 36 aa, Artificial Sequence; identical to SEQ ID NO: 36433
  Cyclic GFR-binding peptide
  MOD_RES (1), (2), (34), (36): Xaa is C or S

SEQ ID NO: 90366 - protein, 34 aa, Artificial Sequence
  Cyclic GFR-binding peptide
  MOD_RES (5), (6): Xaa is C or S
SASPXXVSQDLSNITIQIMIGKTPKILGEMSMIV

SEQ ID NO: 90367 - protein, 30 aa, Artificial Sequence
  Cyclic GFR-binding peptide
  MOD_RES (1), (1): Xaa is C or S
XVPQDLSNITIQIMVGRTPKVLGEMSMVVK

SEQ ID NO: 90368 - protein, 35 aa, Artificial Sequence; identical to SEQ ID NO: 36437
  Cyclic GFR-binding peptide
  MOD_RES (1), (33), (35): Xaa is C or S

SEQ ID NO: 90369 - protein, 36 aa, Artificial Sequence; identical to SEQ ID NO: 36439
  Cyclic GFR-binding peptide
  MOD_RES (2), (3), (34), (36): Xaa is C or S

SEQ ID NO: 90370 - protein, 38 aa, Artificial Sequence; identical to SEQ ID NO: 36440
  Cyclic GFR-binding peptide
  MOD_RES (4), (5), (37): Xaa is C or S

SEQ ID NO: 90371 - protein, 33 aa, Artificial Sequence; identical to SEQ ID NO: 36441
  Cyclic GFR-binding peptide
  MOD_RES (31), (33): Xaa is C or S

SEQ ID NO: 90372 - protein, 36 aa, Artificial Sequence; identical to SEQ ID NO: 36442
  Cyclic GFR-binding peptide
  MOD_RES (5), (6): Xaa is C or S

SEQ ID NO: 90373 - protein, 29 aa, Artificial Sequence
  Cyclic GFR-binding peptide
  MOD_RES (2), (3): Xaa is C or S
PXXVPQALSNITIQIMVGRKPKVLGEMSM

SEQ ID NO: 90374 - protein, 29 aa, Artificial Sequence
  Cyclic GFR-binding peptide
  MOD_RES (3), (4): Xaa is C or S
SPXXVSQDLSNITIQIMIGKTPKILGEMS

SEQ ID NO: 90375 - protein, 23 aa, Artificial Sequence
  Cyclic GFR-binding peptide
LSNITVQIMDDSSNVILGEMSNM

SEQ ID NO: 90376 - protein, 36 aa, Artificial Sequence
  Cyclic GFR-binding peptide
  MOD_RES (6), (7): Xaa is C or S
AAPASXXVPARLSNITIQIMDAANNVVLGEMSDMVV

SEQ ID NO: 90377 - protein, 40 aa, Artificial Sequence; identical to SEQ ID NO: 36450
  Cyclic GFR-binding peptide
  MOD_RES (6), (7), (39): Xaa is C or S

SEQ ID NO: 90378 - protein, 30 aa, Artificial Sequence
  Cyclic GFR-binding peptide
PTRLSNITIQIMDSANNVVIGEMSDMVVES

SEQ ID NO: 90379 - protein, 39 aa, Artificial Sequence; identical to SEQ ID NO: 36453
  Cyclic GFR-binding peptide
  MOD_RES (6), (7), (38): Xaa is C or S

SEQ ID NO: 90380 - protein, 29 aa, Artificial Sequence
  Cyclic GFR-binding peptide
SNITIQIMDSANNVVLGEMSAAAAAAAAA

SEQ ID NO: 90381 - protein, 37 aa, Artificial Sequence; identical to SEQ ID NO: 36454
  Cyclic GFR-binding peptide
  MOD_RES (6), (7): Xaa is C or S

SEQ ID NO: 90382 - protein, 36 aa, Artificial Sequence; identical to SEQ ID NO: 36456
  Cyclic GFR-binding peptide
  MOD_RES (1), (2), (34), (36): Xaa is C or S

SEQ ID NO: 90383 - protein, 42 aa, Artificial Sequence; identical to SEQ ID NO: 36458
  Cyclic GFR-binding peptide
  MOD_RES (6), (7), (39), (41): Xaa is C or S

SEQ ID NO: 90384 - protein, 28 aa, Artificial Sequence
  Cyclic GFR-binding peptide
TPTKMSNITMQIMNDKQQIIIGEMSGMV

SEQ ID NO: 90385 - protein, 22 aa, Artificial Sequence
  Cyclic GFR-binding peptide
RLSNITIQIMDAANNVVIGEMS

SEQ ID NO: 90386 - protein, 31 aa, Artificial Sequence
  Cyclic GFR-binding peptide
  MOD_RES (3), (4): Xaa is C or S
STXXAPVKTSNITMQIMDNGRVLLIGEMSMI

SEQ ID NO: 90387 - protein, 32 aa, Artificial Sequence
  Cyclic GFR-binding peptide
  MOD_RES (2), (3): Xaa is C or S
PXXTPTKMSNITMQIMNDKQQIILGEMSGMVV

SEQ ID NO: 90388 - protein, 38 aa, Artificial Sequence; identical to SEQ ID NO: 36480
  Cyclic GFR-binding peptide
  MOD_RES (5), (6), (38): Xaa is C or S

SEQ ID NO: 90389 - protein, 39 aa, Artificial Sequence; identical to SEQ ID NO: 36484
  Cyclic GFR-binding peptide
  MOD_RES (4), (5), (36), (38): Xaa is C or S

SEQ ID NO: 90390 - protein, 34 aa, Artificial Sequence
  Cyclic GFR-binding peptide
  MOD_RES (6), (7): Xaa is C or S
RVPSTXXAPVKTSNITMQIMDNGRVLLIGEMSMI

SEQ ID NO: 90391 - protein, 27 aa, Artificial Sequence
  Cyclic GFR-binding peptide
  MOD_RES (1), (2): Xaa is C or S
XXAPTKLSNITVQIMDDSSNVILGEMS

SEQ ID NO: 90392 - protein, 22 aa, Artificial Sequence
  Cyclic GFR-binding peptide
RLSNITIQIMDSANNVVLGEMS

SEQ ID NO: 90393 - protein, 30 aa, Artificial Sequence; identical to SEQ ID NO: 36487
  Cyclic GFR-binding peptide

SEQ ID NO: 90394 - protein, 31 aa, Artificial Sequence
  Cyclic GFR-binding peptide
  MOD_RES (5), (6): Xaa is C or S
VPKPXXAPTKLSNITVQIMDDSSNVILGEMS

SEQ ID NO: 90395 - protein, 37 aa, Artificial Sequence; identical to SEQ ID NO: 36488
  Cyclic GFR-binding peptide
  MOD_RES (4), (5), (37): Xaa is C or S

SEQ ID NO: 90396 - protein, 41 aa, Artificial Sequence; identical to SEQ ID NO: 36490
  Cyclic GFR-binding peptide
  MOD_RES (6), (7), (38), (40): Xaa is C or S

SEQ ID NO: 90397 - protein, 35 aa, Artificial Sequence; identical to SEQ ID NO: 36493
  Cyclic GFR-binding peptide
  MOD_RES (2), (3), (35): Xaa is C or S

SEQ ID NO: 90398 - protein, 39 aa, Artificial Sequence; identical to SEQ ID NO: 36492
  Cyclic GFR-binding peptide
  MOD_RES (5), (6), (37), (39): Xaa is C or S

SEQ ID NO: 90399 - protein, 25 aa, Artificial Sequence
  Cyclic GFR-binding peptide
VPQALSNITIQIMVGRKPKVLGEMS

SEQ ID NO: 90400 - protein, 35 aa, Artificial Sequence
  Cyclic GFR-binding peptide
  MOD_RES (5), (6): Xaa is C or S
TPPTXXVPTRLSNITIQIMDSANNVVIGEMSDMVV

SEQ ID NO: 90401 - protein, 40 aa, Artificial Sequence; identical to SEQ ID NO: 36495
  Cyclic GFR-binding peptide
  MOD_RES (5), (6), (37), (39): Xaa is C or S

SEQ ID NO: 90402 - protein, 28 aa, Artificial Sequence
  Cyclic GFR-binding peptide
RLSNITIQIMDSANNVVIGEMSDMVVES

SEQ ID NO: 90403 - protein, 29 aa, Artificial Sequence
  Cyclic GFR-binding peptide
  MOD_RES (27), (29): Xaa is C or S
SNITMQIMNDKQQIIIGEMSGMVVDRXGX

SEQ ID NO: 90404 - protein, 30 aa, Artificial Sequence
  Cyclic GFR-binding peptide
  MOD_RES (4), (5): Xaa is C or S
ASPXXVPQDLSNITIQIMVGRTPKVLGEMS

SEQ ID NO: 90405 - protein, 32 aa, Artificial Sequence
  Cyclic GFR-binding peptide
  MOD_RES (6), (7): Xaa is C or S
HVPKPXXAPTKLSNITVQIMDDSSNVILGEMS

SEQ ID NO: 90406 - protein, 33 aa, Artificial Sequence
  Cyclic GFR-binding peptide
  MOD_RES (4), (5): Xaa is C or S
AGPXXTPTKMSNITMQIMNDKQQIIIGEMSGMV

SEQ ID NO: 90407 - protein, 34 aa, Artificial Sequence; identical to SEQ ID NO: 36500
  Cyclic GFR-binding peptide
  MOD_RES (2), (3): Xaa is C or S

SEQ ID NO: 90408 - protein, 35 aa, Artificial Sequence; identical to SEQ ID NO: 36502
  Cyclic GFR-binding peptide
  MOD_RES (32), (34): Xaa is C or S

SEQ ID NO: 90409 - protein, 34 aa, Artificial Sequence; identical to SEQ ID NO: 36503
  Cyclic GFR-binding peptide
  MOD_RES (1), (2), (34): Xaa is C or S

SEQ ID NO: 90410 - protein, 30 aa, Artificial Sequence
  Cyclic GFR-binding peptide
  MOD_RES (4), (5): Xaa is C or S
AAPXXVPQALSNITIQIMVGRKPKVLGEMS

SEQ ID NO: 90411 - protein, 29 aa, Artificial Sequence
  Cyclic GFR-binding peptide
  MOD_RES (27), (29): Xaa is C or S
LSNITIQIMIGKTPKILGEMSMIVKSXKX

SEQ ID NO: 90412 - protein, 35 aa, Artificial Sequence
  Cyclic GFR-binding peptide
  MOD_RES (5), (6): Xaa is C or S
SASPXXVSQDLSNITIQIMIGKTPKILGEMSMIVK

SEQ ID NO: 90413 - protein, 38 aa, Artificial Sequence; identical to SEQ ID NO: 36507
  Cyclic GFR-binding peptide
  MOD_RES (3), (4), (36), (38): Xaa is C or S

SEQ ID NO: 90414 - protein, 31 aa, Artificial Sequence
  Cyclic GFR-binding peptide
  MOD_RES (29), (31): Xaa is C or S
RLSNITIQIMDAANNVVLGEMSDMVVEAXGX

SEQ ID NO: 90415 - protein, 28 aa, Artificial Sequence
  Cyclic GFR-binding peptide
  MOD_RES (1), (1): Xaa is C or S
XVPQALSNITIQIMVGRKPKVLGEMSMI

SEQ ID NO: 90416 - protein, 29 aa, Artificial Sequence
  Cyclic GFR-binding peptide
  MOD_RES (1), (1): Xaa is C or S
XVPQDLSNITIQIMVGRTPKVLGEMSMVV

SEQ ID NO: 90417 - protein, 34 aa, Artificial Sequence; identical to SEQ ID NO: 36514
  Cyclic GFR-binding peptide
  MOD_RES (2), (3): Xaa is C or S

SEQ ID NO: 90418 - protein, 26 aa, Artificial Sequence
  Cyclic GFR-binding peptide
SNITIQIMDAANNVVIGEMSDMVVEA

SEQ ID NO: 90419 - protein, 34 aa, Artificial Sequence
  Cyclic GFR-binding peptide
  MOD_RES (6), (7): Xaa is C or S
HVPKPXXAPTKLSNITVQIMDDSSNVILGEMSNM

SEQ ID NO: 90420 - protein, 29 aa, Artificial Sequence
  Cyclic GFR-binding peptide
ARLSNITIQIMDAANNVVIGEMSDMVVEA

SEQ ID NO: 90421 - protein, 32 aa, Artificial Sequence
  Cyclic GFR-binding peptide
  MOD_RES (3), (4): Xaa is C or S
PTXXVPTRLSNITIQIMDSANNVVIGEMSDMV

SEQ ID NO: 90422 - protein, 32 aa, Artificial Sequence
  Cyclic GFR-binding peptide
  MOD_RES (6), (7): Xaa is C or S
STPPTXXVPTRLSNITIQIMDSANNVVIGEMS

SEQ ID NO: 90423 - protein, 26 aa, Artificial Sequence
  Cyclic GFR-binding peptide
KTSNITMQIMDNGRVLLIGEMSMIVE

SEQ ID NO: 90424 - protein, 27 aa, Artificial Sequence
  Cyclic GFR-binding peptide
  MOD_RES (1), (1): Xaa is C or S
XVPTRLSNITIQIMDSANNVVIGEMSD

SEQ ID NO: 90425 - protein, 28 aa, Artificial Sequence
  Cyclic GFR-binding peptide
QDLSNITIQIMVGRTPKVLGEMSMVVKS

SEQ ID NO: 90426 - protein, 32 aa, Artificial Sequence
  Cyclic GFR-binding peptide
  MOD_RES (5), (6): Xaa is C or S
VPSTXXAPVKTSNITMQIMDNGRVLLLGEMSM

SEQ ID NO: 90427 - protein, 33 aa, Artificial Sequence; identical to SEQ ID NO: 36532
  Cyclic GFR-binding peptide
  MOD_RES (32), (32): Xaa is C or S

SEQ ID NO: 90428 - protein, 24 aa, Artificial Sequence
  Cyclic GFR-binding peptide
RLSNITIQIMDAANNVVLGEMSDM

SEQ ID NO: 90429 - protein, 32 aa, Artificial Sequence; identical to SEQ ID NO: 36535
  Cyclic GFR-binding peptide
  MOD_RES (1), (2): Xaa is C or S

SEQ ID NO: 90430 - protein, 29 aa, Artificial Sequence
  Cyclic GFR-binding peptide
  MOD_RES (26), (28): Xaa is C or S
SNITIQIMIGKTPKILGEMSMIVKSXKXS

SEQ ID NO: 90431 - protein, 34 aa, Artificial Sequence; identical to SEQ ID NO: 36537
  Cyclic GFR-binding peptide
  MOD_RES (31), (33): Xaa is C or S

SEQ ID NO: 90432 - protein, 26 aa, Artificial Sequence
  Cyclic GFR-binding peptide
VPTRLSNITIQIMDSANNVVLGEMSD

SEQ ID NO: 90433 - protein, 33 aa, Artificial Sequence
  Cyclic GFR-binding peptide
  MOD_RES (30), (32): Xaa is C or S
TRLSNITIQIMDSANNVVIGEMSDMVVESXGXR

SEQ ID NO: 90434 - protein, 33 aa, Artificial Sequence
  Cyclic GFR-binding peptide
  MOD_RES (4), (5): Xaa is C or S
AAPXXVPQALSNITIQIMVGRKPKVLGEMSMIV

SEQ ID NO: 90435 - protein, 40 aa, Artificial Sequence; identical to SEQ ID NO: 36542
  Cyclic GFR-binding peptide
  MOD_RES (6), (7), (39): Xaa is C or S

SEQ ID NO: 90436 - protein, 31 aa, Artificial Sequence
  Cyclic GFR-binding peptide
  MOD_RES (2), (3): Xaa is C or S
SXXVPARLSNITIQIMDAANNVVIGEMSDMV

SEQ ID NO: 90437 - protein, 35 aa, Artificial Sequence
  Cyclic GFR-binding peptide
  MOD_RES (6), (7): Xaa is C or S
STPPTXXVPTRLSNITIQIMDSANNVVLGEMSDMV

SEQ ID NO: 90438 - protein, 23 aa, Artificial Sequence
  Cyclic GFR-binding peptide
TKLSNITVQIMDDSSNVILGEMS

SEQ ID NO: 90439 - protein, 42 aa, Artificial Sequence; identical to SEQ ID NO: 36547
  Cyclic GFR-binding peptide
  MOD_RES (6), (7), (39), (41): Xaa is C or S

SEQ ID NO: 90440 - protein, 29 aa, Artificial Sequence
  Cyclic GFR-binding peptide
  MOD_RES (28), (28): Xaa is C or S
DLSNITIQIMIGKTPKILGEMSMIVKSXK

SEQ ID NO: 90441 - protein, 29 aa, Artificial Sequence
  Cyclic GFR-binding peptide
  MOD_RES (1), (2): Xaa is C or S
XXVPTRLSNITIQIMDSANNVVLGEMSDM

SEQ ID NO: 90442 - protein, 29 aa, Artificial Sequence
  Cyclic GFR-binding peptide
  MOD_RES (28), (28): Xaa is C or S
MSNITMQIMNDKQQIIIGEMSGMVVDRXG

SEQ ID NO: 90443 - protein, 34 aa, Artificial Sequence; identical to SEQ ID NO: 36559
  Cyclic GFR-binding peptide
  MOD_RES (2), (3): Xaa is C or S

SEQ ID NO: 90444 - protein, 39 aa, Artificial Sequence; identical to SEQ ID NO: 36561
  Cyclic GFR-binding peptide
  MOD_RES (3), (4), (36), (38): Xaa is C or S

SEQ ID NO: 90445 - protein, 40 aa, Artificial Sequence; identical to SEQ ID NO: 36562
  Cyclic GFR-binding peptide
  MOD_RES (6), (7), (39): Xaa is C or S

SEQ ID NO: 90446 - protein, 21 aa, Artificial Sequence
  Cyclic GFR-binding peptide
SNITVQIMDDSSNVILGEMSN

SEQ ID NO: 90447 - protein, 36 aa, Artificial Sequence; identical to SEQ ID NO: 36565
  Cyclic GFR-binding peptide
  MOD_RES (2), (3), (34), (36): Xaa is C or S

SEQ ID NO: 90448 - protein, 29 aa, Artificial Sequence
  Cyclic GFR-binding peptide
  MOD_RES (3), (4): Xaa is C or S
PTXXVPTRLSNITIQIMDSANNVVLGEMS

SEQ ID NO: 90449 - protein, 37 aa, Artificial Sequence; identical to SEQ ID NO: 36567
  Cyclic GFR-binding peptide
  MOD_RES (1), (2), (34), (36): Xaa is C or S

SEQ ID NO: 90450 - protein, 27 aa, Artificial Sequence
  Cyclic GFR-binding peptide
  MOD_RES (27), (27): Xaa is C or S
LSNITIQIMVGRKPKVLGEMSMIVRSX

SEQ ID NO: 90451 - protein, 26 aa, Artificial Sequence
  Cyclic GFR-binding peptide
ARLSNITIQIMDAANNVVIGEMSDMV

SEQ ID NO: 90452 - protein, 37 aa, Artificial Sequence; identical to SEQ ID NO: 36568
  Cyclic GFR-binding peptide
  MOD_RES (1), (2), (34), (36): Xaa is C or S

SEQ ID NO: 90453 - protein, 28 aa, Artificial Sequence
  Cyclic GFR-binding peptide
  MOD_RES (2), (3): Xaa is C or S
TXXAPVKTSNITMQIMDNGRVLLLGEMS

SEQ ID NO: 90454 - protein, 37 aa, Artificial Sequence; identical to SEQ ID NO: 36575
  Cyclic GFR-binding peptide
  MOD_RES (6), (7): Xaa is C or S

SEQ ID NO: 90455 - protein, 35 aa, Artificial Sequence
  Cyclic GFR-binding peptide
  MOD_RES (6), (7): Xaa is C or S
ASASPXXVSQDLSNITIQIMIGKTPKILGEMSMIV

SEQ ID NO: 90456 - protein, 39 aa, Artificial Sequence; identical to SEQ ID NO: 36579
  Cyclic GFR-binding peptide
  MOD_RES (4), (5), (37), (39): Xaa is C or S

SEQ ID NO: 90457 - protein, 28 aa, Artificial Sequence
  Cyclic GFR-binding peptide
  MOD_RES (28), (28): Xaa is C or S
LSNITVQIMDDSSNVILGEMSNMVVRSX

SEQ ID NO: 90458 - protein, 25 aa, Artificial Sequence
  Cyclic GFR-binding peptide
APTKLSNITVQIMDDSSNVILGEMS

SEQ ID NO: 90459 - protein, 23 aa, Artificial Sequence
  Cyclic GFR-binding peptide
LSNITIQIMDAANNVVIGEMSDM

SEQ ID NO: 90460 - protein, 23 aa, Artificial Sequence
  Cyclic GFR-binding peptide
SNITMQIMDNGRVLLLGEMSMIV

SEQ ID NO: 90461 - protein, 23 aa, Artificial Sequence
  Cyclic GFR-binding peptide
KTSNITMQIMDNGRVLLIGEMSM

SEQ ID NO: 90462 - protein, 30 aa, Artificial Sequence
  Cyclic GFR-binding peptide
  MOD_RES (1), (1): Xaa is C or S
XTPTKMSNITMQIMNDKQQIILGEMSGMVV

SEQ ID NO: 90463 - protein, 31 aa, Artificial Sequence
  Cyclic GFR-binding peptide
  MOD_RES (1), (2): Xaa is C or S
XXVPARLSNITIQIMDAANNVVLGEMSDMVV

SEQ ID NO: 90464 - protein, 33 aa, Artificial Sequence; identical to SEQ ID NO: 36582
  Cyclic GFR-binding peptide
  MOD_RES (2), (3): Xaa is C or S

SEQ ID NO: 90465 - protein, 27 aa, Artificial Sequence
  Cyclic GFR-binding peptide
  MOD_RES (1), (1): Xaa is C or S
XVPTRLSNITIQIMDSANNVVLGEMSD

SEQ ID NO: 90466 - protein, 30 aa, Artificial Sequence
  Cyclic GFR-binding peptide
  MOD_RES (29), (29): Xaa is C or S
QALSNITIQIMVGRKPKVLGEMSMIVRSXK

SEQ ID NO: 90467 - protein, 33 aa, Artificial Sequence
  Cyclic GFR-binding peptide
  MOD_RES (30), (32): Xaa is C or S
ARLSNITIQIMDAANNVVIGEMSDMVVEAXGXR

SEQ ID NO: 90468 - protein, 22 aa, Artificial Sequence
  Cyclic GFR-binding peptide
SNITIQIMIGKTPKILGEMSMI

SEQ ID NO: 90469 - protein, 28 aa, Artificial Sequence
  Cyclic GFR-binding peptide
APVKTSNITMQIMDNGRVLLLGEMSMIV

SEQ ID NO: 90470 - protein, 37 aa, Artificial Sequence; identical to SEQ ID NO: 36590
  Cyclic GFR-binding peptide
  MOD_RES (4), (5), (36): Xaa is C or S

SEQ ID NO: 90471 - protein, 21 aa, Artificial Sequence
  Cyclic GFR-binding peptide
LSNITIQIMVGRKPKVLGEMS

SEQ ID NO: 90472 - protein, 25 aa, Artificial Sequence
  Cyclic GFR-binding peptide
LSNITIQIMDAANNVVIGEMSDMVV

SEQ ID NO: 90473 - protein, 41 aa, Artificial Sequence; identical to SEQ ID NO: 36593
  Cyclic GFR-binding peptide
  MOD_RES (5), (6), (38), (40): Xaa is C or S

SEQ ID NO: 90474 - protein, 35 aa, Artificial Sequence; identical to SEQ ID NO: 36594
  Cyclic GFR-binding peptide
  MOD_RES (3), (4): Xaa is C or S

SEQ ID NO: 90475 - protein, 25 aa, Artificial Sequence
  Cyclic GFR-binding peptide
SNITMQIMDNGRVLLIGEMSMIVEE

SEQ ID NO: 90476 - protein, 29 aa, Artificial Sequence
  Cyclic GFR-binding peptide
  MOD_RES (3), (4): Xaa is C or S
GPXXTPTKMSNITMQIMNDKQQIIIGEMS

SEQ ID NO: 90477 - protein, 26 aa, Artificial Sequence
  Cyclic GFR-binding peptide
LSNITIQIMVGRTPKVLGEMSMVVKS

SEQ ID NO: 90478 - protein, 24 aa, Artificial Sequence
  Cyclic GFR-binding peptide
LSNITIQIMIGKTPKILGEMSMIV

SEQ ID NO: 90479 - protein, 24 aa, Artificial Sequence
  Cyclic GFR-binding peptide
TKMSNITMQIMNDKQQIIIGEMSG

SEQ ID NO: 90480 - protein, 24 aa, Artificial Sequence
  Cyclic GFR-binding peptide
QDLSNITIQIMIGKTPKILGEMSM

SEQ ID NO: 90481 - protein, 31 aa, Artificial Sequence
  Cyclic GFR-binding peptide
  MOD_RES (28), (30): Xaa is C or S
MSNITMQIMNDKQQIIIGEMSGMVVDRXGXS

SEQ ID NO: 90482 - protein, 33 aa, Artificial Sequence
  Cyclic GFR-binding peptide
  MOD_RES (4), (5): Xaa is C or S
PASXXVPARLSNITIQIMDAANNVVLGEMSDMV

SEQ ID NO: 90483 - protein, 27 aa, Artificial Sequence
  Cyclic GFR-binding peptide
TRLSNITIQIMDSANNVVIGEMSDMVV

SEQ ID NO: 90484 - protein, 36 aa, Artificial Sequence
  Cyclic GFR-binding peptide
  MOD_RES (6), (7): Xaa is C or S
GSAGPXXTPTKMSNITMQIMNDKQQIIIGEMSGMVV

SEQ ID NO: 90485 - protein, 32 aa, Artificial Sequence
  Cyclic GFR-binding peptide
  MOD_RES (4), (5): Xaa is C or S
ASPXXVSQDLSNITIQIMIGKTPKILGEMSMI

SEQ ID NO: 90486 - protein, 28 aa, Artificial Sequence
  Cyclic GFR-binding peptide
  MOD_RES (1), (2): Xaa is C or S
XXVPTRLSNITIQIMDSANNVVLGEMSD

SEQ ID NO: 90487 - protein, 31 aa, Artificial Sequence
  Cyclic GFR-binding peptide
  MOD_RES (29), (31): Xaa is C or S
KMSNITMQIMNDKQQIILGEMSGMVVDRXGX

SEQ ID NO: 90488 - protein, 32 aa, Artificial Sequence
  Cyclic GFR-binding peptide
  MOD_RES (4), (5): Xaa is C or S
PSTXXAPVKTSNITMQIMDNGRVLLLGEMSMI

SEQ ID NO: 90489 - protein, 35 aa, Artificial Sequence; identical to SEQ ID NO: 36598
  Cyclic GFR-binding peptide
  MOD_RES (3), (4): Xaa is C or S

SEQ ID NO: 90490 - protein, 31 aa, Artificial Sequence
  Cyclic GFR-binding peptide
  MOD_RES (30), (30): Xaa is C or S
TRLSNITIQIMDSANNVVLGEMSDMVVESXG

SEQ ID NO: 90491 - protein, 22 aa, Artificial Sequence
  Cyclic GFR-binding peptide
SNITMQIMDNGRVLLLGEMSMI

SEQ ID NO: 90492 - protein, 23 aa, Artificial Sequence
  Cyclic GFR-binding peptide
SNITIQIMDSANNVVIGEMSDMV

SEQ ID NO: 90493 - protein, 35 aa, Artificial Sequence; identical to SEQ ID NO: 36608
  Cyclic GFR-binding peptide
  MOD_RES (2), (3), (34): Xaa is C or S

SEQ ID NO: 90494 - protein, 29 aa, Artificial Sequence
  Cyclic GFR-binding peptide
  MOD_RES (1), (1): Xaa is C or S
XAPTKLSNITVQIMDDSSNVILGEMSNMV

SEQ ID NO: 90495 - protein, 31 aa, Artificial Sequence; identical to SEQ ID NO: 36610
  Cyclic GFR-binding peptide

SEQ ID NO: 90496 - protein, 36 aa, Artificial Sequence; identical to SEQ ID NO: 36612
  Cyclic GFR-binding peptide
  MOD_RES (2), (3), (35): Xaa is C or S

SEQ ID NO: 90497 - protein, 33 aa, Artificial Sequence; identical to SEQ ID NO: 36619
  Cyclic GFR-binding peptide
  MOD_RES (2), (3): Xaa is C or S

SEQ ID NO: 90498 - protein, 37 aa, Artificial Sequence; identical to SEQ ID NO: 36620
  Cyclic GFR-binding peptide
  MOD_RES (4), (5), (37): Xaa is C or S

SEQ ID NO: 90499 - protein, 33 aa, Artificial Sequence
  Cyclic GFR-binding peptide
  MOD_RES (6), (7): Xaa is C or S
ASASPXXVPQDLSNITIQIMVGRTPKVLGEMSM

SEQ ID NO: 90500 - protein, 40 aa, Artificial Sequence; identical to SEQ ID NO: 36626
  Cyclic GFR-binding peptide
  MOD_RES (4), (5), (37), (39): Xaa is C or S

SEQ ID NO: 90501 - protein, 28 aa, Artificial Sequence
  Cyclic GFR-binding peptide
  MOD_RES (1), (2): Xaa is C or S
XXVPQDLSNITIQIMVGRTPKVLGEMSM

SEQ ID NO: 90502 - protein, 20 aa, Artificial Sequence
  Cyclic GFR-binding peptide
SNITIQIMVGRKPKVLGEMS

SEQ ID NO: 90503 - protein, 29 aa, Artificial Sequence
  Cyclic GFR-binding peptide
  MOD_RES (1), (1): Xaa is C or S
XAPVKTSNITMQIMDNGRVLLIGEMSMIV

SEQ ID NO: 90504 - protein, 33 aa, Artificial Sequence; identical to SEQ ID NO: 36631
  Cyclic GFR-binding peptide
  MOD_RES (2), (3): Xaa is C or S

SEQ ID NO: 90505 - protein, 34 aa, Artificial Sequence
  Cyclic GFR-binding peptide
  MOD_RES (4), (5): Xaa is C or S
PSTXXAPVKTSNITMQIMDNGRVLLIGEMSMIVE

SEQ ID NO: 90506 - protein, 22 aa, Artificial Sequence
  Cyclic GFR-binding peptide
KMSNITMQIMNDKQQIILGEMS

SEQ ID NO: 90507 - protein, 23 aa, Artificial Sequence
  Cyclic GFR-binding peptide
SNITIQIMDAANNVVLGEMSDMV

SEQ ID NO: 90508 - protein, 38 aa, Artificial Sequence; identical to SEQ ID NO: 36634
  Cyclic GFR-binding peptide
  MOD_RES (5), (6), (38): Xaa is C or S

SEQ ID NO: 90509 - protein, 32 aa, Artificial Sequence; identical to SEQ ID NO: 36637
  Cyclic GFR-binding peptide
  MOD_RES (1), (2): Xaa is C or S

SEQ ID NO: 90510 - protein, 38 aa, Artificial Sequence; identical to SEQ ID NO: 36639
  Cyclic GFR-binding peptide
  MOD_RES (2), (3), (35), (37): Xaa is C or S

SEQ ID NO: 90511 - protein, 30 aa, Artificial Sequence
  Cyclic GFR-binding peptide
  MOD_RES (28), (30): Xaa is C or S
DLSNITIQIMIGKTPKILGEMSMIVKSXKX

SEQ ID NO: 90512 - protein, 22 aa, Artificial Sequence
  Cyclic GFR-binding peptide
SNITMQIMDNGRVLLIGEMSMI

SEQ ID NO: 90513 - protein, 35 aa, Artificial Sequence; identical to SEQ ID NO: 36640
  Cyclic GFR-binding peptide
  MOD_RES (1), (33), (35): Xaa is C or S

SEQ ID NO: 90514 - protein, 25 aa, Artificial Sequence
  Cyclic GFR-binding peptide
RLSNITIQIMDAANNVVIGEMSDMV

SEQ ID NO: 90515 - protein, 34 aa, Artificial Sequence; identical to SEQ ID NO: 36643
  Cyclic GFR-binding peptide
  MOD_RES (1), (33): Xaa is C or S

SEQ ID NO: 90516 - protein, 30 aa, Artificial Sequence
  Cyclic GFR-binding peptide
  MOD_RES (27), (29): Xaa is C or S
SNITIQIMDAANNVVIGEMSDMVVEAXGXR

SEQ ID NO: 90517 - protein, 34 aa, Artificial Sequence; identical to SEQ ID NO: 36645
  Cyclic GFR-binding peptide
  MOD_RES (32), (34): Xaa is C or S

SEQ ID NO: 90518 - protein, 33 aa, Artificial Sequence
  Cyclic GFR-binding peptide
  MOD_RES (6), (7): Xaa is C or S
RVPSTXXAPVKTSNITMQIMDNGRVLLIGEMSM

SEQ ID NO: 90519 - protein, 28 aa, Artificial Sequence
  Cyclic GFR-binding peptide
  MOD_RES (1), (2): Xaa is C or S
XXTPTKMSNITMQIMNDKQQIIIGEMSG

SEQ ID NO: 90520 - protein, 24 aa, Artificial Sequence
  Cyclic GFR-binding peptide
PARLSNITIQIMDAANNVVLGEMS

SEQ ID NO: 90521 - protein, 38 aa, Artificial Sequence; identical to SEQ ID NO: 36650
  Cyclic GFR-binding peptide
  MOD_RES (4), (5), (36), (38): Xaa is C or S

SEQ ID NO: 90522 - protein, 24 aa, Artificial Sequence
  Cyclic GFR-binding peptide
SNITIQIMVGRKPKVLGEMSMIVR

SEQ ID NO: 90523 - protein, 29 aa, Artificial Sequence
  Cyclic GFR-binding peptide
VPQALSNITIQIMVGRKPKVLGEMSMIVR

SEQ ID NO: 90524 - protein, 30 aa, Artificial Sequence
  Cyclic GFR-binding peptide
  MOD_RES (4), (5): Xaa is C or S
PPTXXVPTRLSNITIQIMDSANNVVIGEMS

SEQ ID NO: 90525 - protein, 40 aa, Artificial Sequence; identical to SEQ ID NO: 36652
  Cyclic GFR-binding peptide
  MOD_RES (4), (5), (37), (39): Xaa is C or S

SEQ ID NO: 90526 - protein, 31 aa, Artificial Sequence
  Cyclic GFR-binding peptide
  MOD_RES (28), (30): Xaa is C or S
KTSNITMQIMDNGRVLLIGEMSMIVEEXGXL

SEQ ID NO: 90527 - protein, 29 aa, Artificial Sequence
  Cyclic GFR-binding peptide
  MOD_RES (3), (4): Xaa is C or S
KPXXAPTKLSNITVQIMDDSSNVILGEMS

SEQ ID NO: 90528 - protein, 24 aa, Artificial Sequence
  Cyclic GFR-binding peptide
TKMSNITMQIMNDKQQIILGEMSG

SEQ ID NO: 90529 - protein, 36 aa, Artificial Sequence; identical to SEQ ID NO: 36659
  Cyclic GFR-binding peptide
  MOD_RES (2), (3), (34), (36): Xaa is C or S

SEQ ID NO: 90530 - protein, 36 aa, Artificial Sequence; identical to SEQ ID NO: 36661
  Cyclic GFR-binding peptide
  MOD_RES (3), (4), (36): Xaa is C or S

SEQ ID NO: 90531 - protein, 32 aa, Artificial Sequence; identical to SEQ ID NO: 36663
  Cyclic GFR-binding peptide
  MOD_RES (1), (32): Xaa is C or S

SEQ ID NO: 90532 - protein, 31 aa, Artificial Sequence
  Cyclic GFR-binding peptide
  MOD_RES (2), (3): Xaa is C or S
PXXVPQALSNITIQIMVGRKPKVLGEMSMIV

SEQ ID NO: 90533 - protein, 33 aa, Artificial Sequence; identical to SEQ ID NO: 36665
  Cyclic GFR-binding peptide
  MOD_RES (1), (2), (33): Xaa is C or S

SEQ ID NO: 90534 - protein, 28 aa, Artificial Sequence
  Cyclic GFR-binding peptide
  MOD_RES (2), (3): Xaa is C or S
PXXVPQDLSNITIQIMVGRTPKVLGEMS

SEQ ID NO: 90535 - protein, 25 aa, Artificial Sequence
  Cyclic GFR-binding peptide
PTKMSNITMQIMNDKQQIIIGEMSG

SEQ ID NO: 90536 - protein, 31 aa, Artificial Sequence; identical to SEQ ID NO: 36666
  Cyclic GFR-binding peptide

SEQ ID NO: 90537 - protein, 39 aa, Artificial Sequence; identical to SEQ ID NO: 36668
  Cyclic GFR-binding peptide
  MOD_RES (6), (7), (39): Xaa is C or S

SEQ ID NO: 90538 - protein, 26 aa, Artificial Sequence
  Cyclic GFR-binding peptide
PQALSNITIQIMVGRKPKVLGEMSMI

SEQ ID NO: 90539 - protein, 25 aa, Artificial Sequence
  Cyclic GFR-binding peptide
SNITIQIMDAANNVVIGEMSDMVVE

SEQ ID NO: 90540 - protein, 31 aa, Artificial Sequence
  Cyclic GFR-binding peptide
  MOD_RES (28), (30): Xaa is C or S
ALSNITIQIMVGRKPKVLGEMSMIVRSXKXS

SEQ ID NO: 90541 - protein, 30 aa, Artificial Sequence
  Cyclic GFR-binding peptide
  MOD_RES (1), (1): Xaa is C or S
XAPVKTSNITMQIMDNGRVLLLGEMSMIVE

SEQ ID NO: 90542 - protein, 30 aa, Artificial Sequence
  Cyclic GFR-binding peptide
  MOD_RES (1), (2): Xaa is C or S
XXVPARLSNITIQIMDAANNVVLGEMSDMV

SEQ ID NO: 90543 - protein, 30 aa, Artificial Sequence
  Cyclic GFR-binding peptide
  MOD_RES (28), (30): Xaa is C or S
MSNITMQIMNDKQQIIIGEMSGMVVDRXGX

SEQ ID NO: 90544 - protein, 37 aa, Artificial Sequence; identical to SEQ ID NO: 36681
  Cyclic GFR-binding peptide
  MOD_RES (6), (7): Xaa is C or S

SEQ ID NO: 90545 - protein, 32 aa, Artificial Sequence
  Cyclic GFR-binding peptide
  MOD_RES (29), (31): Xaa is C or S
RLSNITIQIMDSANNVVLGEMSDMVVESXGXR

SEQ ID NO: 90546 - protein, 37 aa, Artificial Sequence; identical to SEQ ID NO: 36684
  Cyclic GFR-binding peptide
  MOD_RES (1), (2), (34), (36): Xaa is C or S

SEQ ID NO: 90547 - protein, 36 aa, Artificial Sequence; identical to SEQ ID NO: 36687
  Cyclic GFR-binding peptide
  MOD_RES (2), (3), (35): Xaa is C or S

SEQ ID NO: 90548 - protein, 29 aa, Artificial Sequence
  Cyclic GFR-binding peptide
  MOD_RES (28), (28): Xaa is C or S
MSNITMQIMNDKQQIILGEMSGMVVDRXG

SEQ ID NO: 90549 - protein, 33 aa, Artificial Sequence
  Cyclic GFR-binding peptide
  MOD_RES (4), (5): Xaa is C or S
ASPXXVPQDLSNITIQIMVGRTPKVLGEMSMVV

SEQ ID NO: 90550 - protein, 35 aa, Artificial Sequence; identical to SEQ ID NO: 36693
  Cyclic GFR-binding peptide
  MOD_RES (4), (5): Xaa is C or S

SEQ ID NO: 90551 - protein, 23 aa, Artificial Sequence
  Cyclic GFR-binding peptide
VKTSNITMQIMDNGRVLLIGEMS

SEQ ID NO: 90552 - protein, 34 aa, Artificial Sequence
  Cyclic GFR-binding peptide
  MOD_RES (4), (5): Xaa is C or S
AGPXXTPTKMSNITMQIMNDKQQIIIGEMSGMVV

SEQ ID NO: 90553 - protein, 27 aa, Artificial Sequence
  Cyclic GFR-binding peptide
KMSNITMQIMNDKQQIILGEMSGMVVD

SEQ ID NO: 90554 - protein, 26 aa, Artificial Sequence
  Cyclic GFR-binding peptide
LSNITIQIMDSANNVVIGEMSDMVVE

SEQ ID NO: 90555 - protein, 34 aa, Artificial Sequence
  Cyclic GFR-binding peptide
  MOD_RES (31), (33): Xaa is C or S
PTRLSNITIQIMDSANNVVIGEMSDMVVESXGXR

SEQ ID NO: 90556 - protein, 37 aa, Artificial Sequence; identical to SEQ ID NO: 36700
  Cyclic GFR-binding peptide
  MOD_RES (4), (5), (36): Xaa is C or S

SEQ ID NO: 90557 - protein, 40 aa, Artificial Sequence; identical to SEQ ID NO: 36702
  Cyclic GFR-binding peptide
  MOD_RES (5), (6), (38), (40): Xaa is C or S

SEQ ID NO: 90558 - protein, 22 aa, Artificial Sequence
  Cyclic GFR-binding peptide
LSNITIQIMDAANNVVLGEMSD

SEQ ID NO: 90559 - protein, 34 aa, Artificial Sequence; identical to SEQ ID NO: 36705
  Cyclic GFR-binding peptide
  MOD_RES (3), (4): Xaa is C or S

SEQ ID NO: 90560 - protein, 32 aa, Artificial Sequence
  Cyclic GFR-binding peptide
  MOD_RES (4), (5): Xaa is C or S
ASPXXVPQDLSNITIQIMVGRTPKVLGEMSMV

SEQ ID NO: 90561 - protein, 26 aa, Artificial Sequence
  Cyclic GFR-binding peptide
  MOD_RES (26), (26): Xaa is C or S
SNITIQIMIGKTPKILGEMSMIVKSX

SEQ ID NO: 90562 - protein, 33 aa, Artificial Sequence
  Cyclic GFR-binding peptide
  MOD_RES (6), (7): Xaa is C or S
AAPASXXVPARLSNITIQIMDAANNVVIGEMSD

SEQ ID NO: 90563 - protein, 25 aa, Artificial Sequence
  Cyclic GFR-binding peptide
PTKMSNITMQIMNDKQQIILGEMSG

SEQ ID NO: 90564 - protein, 28 aa, Artificial Sequence
  Cyclic GFR-binding peptide
  MOD_RES (1), (1): Xaa is C or S
XAPVKTSNITMQIMDNGRVLLIGEMSMI

SEQ ID NO: 90565 - protein, 32 aa, Artificial Sequence
  Cyclic GFR-binding peptide
  MOD_RES (3), (4): Xaa is C or S
STXXAPVKTSNITMQIMDNGRVLLLGEMSMIV

SEQ ID NO: 90566 - protein, 24 aa, Artificial Sequence
  Cyclic GFR-binding peptide
SNITMQIMNDKQQIILGEMSGMVV

SEQ ID NO: 90567 - protein, 32 aa, Artificial Sequence
  Cyclic GFR-binding peptide
  MOD_RES (3), (4): Xaa is C or S
KPXXAPTKLSNITVQIMDDSSNVILGEMSNMV

SEQ ID NO: 90568 - protein, 28 aa, Artificial Sequence
  Cyclic GFR-binding peptide
VPTRLSNITIQIMDSANNVVIGEMSDMV

SEQ ID NO: 90569 - protein, 37 aa, Artificial Sequence; identical to SEQ ID NO: 36712
  Cyclic GFR-binding peptide
  MOD_RES (2), (3), (34), (36): Xaa is C or S

SEQ ID NO: 90570 - protein, 31 aa, Artificial Sequence
  Cyclic GFR-binding peptide
  MOD_RES (4), (5): Xaa is C or S
AAPXXVPQALSNITIQIMVGRKPKVLGEMSM

SEQ ID NO: 90571 - protein, 39 aa, Artificial Sequence; identical to SEQ ID NO: 36715
  Cyclic GFR-binding peptide
  MOD_RES (5), (6), (38): Xaa is C or S

SEQ ID NO: 90572 - protein, 33 aa, Artificial Sequence
  Cyclic GFR-binding peptide
  MOD_RES (31), (33): Xaa is C or S
PTKLSNITVQIMDDSSNVILGEMSNMVVRSXGX

SEQ ID NO: 90573 - protein, 32 aa, Artificial Sequence; identical to SEQ ID NO: 36722
  Cyclic GFR-binding peptide
  MOD_RES (32), (32): Xaa is C or S

SEQ ID NO: 90574 - protein, 31 aa, Artificial Sequence; identical to SEQ ID NO: 36721
  Cyclic GFR-binding peptide
  MOD_RES (1), (1): Xaa is C or S

SEQ ID NO: 90575 - protein, 40 aa, Artificial Sequence; identical to SEQ ID NO: 36723
  Cyclic GFR-binding peptide
  MOD_RES (5), (6), (38), (40): Xaa is C or S

SEQ ID NO: 90576 - protein, 23 aa, Artificial Sequence
  Cyclic GFR-binding peptide
QDLSNITIQIMIGKTPKILGEMS

SEQ ID NO: 90577 - protein, 39 aa, Artificial Sequence; identical to SEQ ID NO: 36725
  Cyclic GFR-binding peptide
  MOD_RES (3), (4), (36), (38): Xaa is C or S

SEQ ID NO: 90578 - protein, 34 aa, Artificial Sequence; identical to SEQ ID NO: 36726
  Cyclic GFR-binding peptide
  MOD_RES (3), (4): Xaa is C or S

SEQ ID NO: 90579 - protein, 26 aa, Artificial Sequence
  Cyclic GFR-binding peptide
VPARLSNITIQIMDAANNVVLGEMSD

SEQ ID NO: 90580 - protein, 20 aa, Artificial Sequence
  Cyclic GFR-binding peptide
SNITIQIMIGKTPKILGEMS

SEQ ID NO: 90581 - protein, 24 aa, Artificial Sequence
  Cyclic GFR-binding peptide
LSNITIQIMDAANNVVIGEMSDMV

SEQ ID NO: 90582 - protein, 33 aa, Artificial Sequence; identical to SEQ ID NO: 36729
  Cyclic GFR-binding peptide
  MOD_RES (1), (33): Xaa is C or S

SEQ ID NO: 90583 - protein, 22 aa, Artificial Sequence
  Cyclic GFR-binding peptide
SNITIQIMDAANNVVLGEMSDM

SEQ ID NO: 90584 - protein, 30 aa, Artificial Sequence
  Cyclic GFR-binding peptide
  MOD_RES (27), (29): Xaa is C or S
LSNITIQIMVGRKPKVLGEMSMIVRSXKXS

SEQ ID NO: 90585 - protein, 25 aa, Artificial Sequence
  Cyclic GFR-binding peptide
ALSNITIQIMVGRKPKVLGEMSMIV

SEQ ID NO: 90586 - protein, 37 aa, Artificial Sequence; identical to SEQ ID NO: 36735
  Cyclic GFR-binding peptide
  MOD_RES (3), (4), (35), (37): Xaa is C or S

SEQ ID NO: 90587 - protein, 38 aa, Artificial Sequence; identical to SEQ ID NO: 36736
  Cyclic GFR-binding peptide
  MOD_RES (3), (4), (36), (38): Xaa is C or S

SEQ ID NO: 90588 - protein, 22 aa, Artificial Sequence
  Cyclic GFR-binding peptide
SNITIQIMDSANNVVLGEMSDM

SEQ ID NO: 90589 - protein, 27 aa, Artificial Sequence
  Cyclic GFR-binding peptide
  MOD_RES (1), (1): Xaa is C or S
XVSQDLSNITIQIMIGKTPKILGEMSM

SEQ ID NO: 90590 - protein, 30 aa, Artificial Sequence
  Cyclic GFR-binding peptide
  MOD_RES (29), (29): Xaa is C or S
VKTSNITMQIMDNGRVLLIGEMSMIVEEXG

SEQ ID NO: 90591 - protein, 33 aa, Artificial Sequence; identical to SEQ ID NO: 36742
  Cyclic GFR-binding peptide
  MOD_RES (2), (3): Xaa is C or S

SEQ ID NO: 90592 - protein, 26 aa, Artificial Sequence
  Cyclic GFR-binding peptide
ALSNITIQIMVGRKPKVLGEMSMIVR

SEQ ID NO: 90593 - protein, 31 aa, Artificial Sequence
  Cyclic GFR-binding peptide
  MOD_RES (31), (31): Xaa is C or S
PTKLSNITVQIMDDSSNVILGEMSNMVVRSX

SEQ ID NO: 90594 - protein, 34 aa, Artificial Sequence
  Cyclic GFR-binding peptide
  MOD_RES (4), (5): Xaa is C or S
ASPXXVSQDLSNITIQIMIGKTPKILGEMSMIVK

SEQ ID NO: 90595 - protein, 39 aa, Artificial Sequence; identical to SEQ ID NO: 36747
  Cyclic GFR-binding peptide
  MOD_RES (6), (7), (39): Xaa is C or S

SEQ ID NO: 90596 - protein, 38 aa, Artificial Sequence; identical to SEQ ID NO: 36749
  Cyclic GFR-binding peptide
  MOD_RES (5), (6), (37): Xaa is C or S

SEQ ID NO: 90597 - protein, 33 aa, Artificial Sequence; identical to SEQ ID NO: 36751
  Cyclic GFR-binding peptide
  MOD_RES (1), (2), (33): Xaa is C or S

SEQ ID NO: 90598 - protein, 36 aa, Artificial Sequence; identical to SEQ ID NO: 36754
  Cyclic GFR-binding peptide
  MOD_RES (5), (6): Xaa is C or S

SEQ ID NO: 90599 - protein, 26 aa, Artificial Sequence
  Cyclic GFR-binding peptide
LSNITIQIMVGRKPKVLGEMSMIVRS

SEQ ID NO: 90600 - protein, 24 aa, Artificial Sequence
  Cyclic GFR-binding peptide
LSNITIQIMVGRTPKVLGEMSMVV

SEQ ID NO: 90601 - protein, 23 aa, Artificial Sequence
  Cyclic GFR-binding peptide
ARLSNITIQIMDAANNVVIGEMS

SEQ ID NO: 90602 - protein, 22 aa, Artificial Sequence
  Cyclic GFR-binding peptide
MSNITMQIMNDKQQIIIGEMSG

SEQ ID NO: 90603 - protein, 40 aa, Artificial Sequence; identical to SEQ ID NO: 36759
  Cyclic GFR-binding peptide
  MOD_RES (5), (6), (37), (39): Xaa is C or S

SEQ ID NO: 90604 - protein, 30 aa, Artificial Sequence
  Cyclic GFR-binding peptide
  MOD_RES (1), (1): Xaa is C or S
XVPARLSNITIQIMDAANNVVIGEMSDMVV

SEQ ID NO: 90605 - protein, 36 aa, Artificial Sequence; identical to SEQ ID NO: 36762
  Cyclic GFR-binding peptide
  MOD_RES (5), (6): Xaa is C or S

SEQ ID NO: 90606 - protein, 27 aa, Artificial Sequence
  Cyclic GFR-binding peptide
  MOD_RES (27), (27): Xaa is C or S
SNITIQIMDAANNVVIGEMSDMVVEAX

SEQ ID NO: 90607 - protein, 39 aa, Artificial Sequence; identical to SEQ ID NO: 36765
  Cyclic GFR-binding peptide
  MOD_RES (5), (6), (37), (39): Xaa is C or S

SEQ ID NO: 90608 - protein, 38 aa, Artificial Sequence; identical to SEQ ID NO: 36768
  Cyclic GFR-binding peptide
  MOD_RES (2), (3), (35), (37): Xaa is C or S

SEQ ID NO: 90609 - protein, 35 aa, Artificial Sequence; identical to SEQ ID NO: 36769
  Cyclic GFR-binding peptide
  MOD_RES (2), (3), (34): Xaa is C or S

SEQ ID NO: 90610 - protein, 30 aa, Artificial Sequence
  Cyclic GFR-binding peptide
  MOD_RES (2), (3): Xaa is C or S
PXXTPTKMSNITMQIMNDKQQIILGEMSGM

SEQ ID NO: 90611 - protein, 29 aa, Artificial Sequence
  Cyclic GFR-binding peptide
PARLSNITIQIMDAANNVVIGEMSDMVVE

SEQ ID NO: 90612 - protein, 37 aa, Artificial Sequence; identical to SEQ ID NO: 36771
  Cyclic GFR-binding peptide
  MOD_RES (4), (5), (36): Xaa is C or S

SEQ ID NO: 90613 - protein, 32 aa, Artificial Sequence; identical to SEQ ID NO: 36773
  Cyclic GFR-binding peptide
  MOD_RES (1), (1): Xaa is C or S

SEQ ID NO: 90614 - protein, 39 aa, Artificial Sequence; identical to SEQ ID NO: 36774
  Cyclic GFR-binding peptide
  MOD_RES (5), (6), (37), (39): Xaa is C or S

SEQ ID NO: 90615 - protein, 33 aa, Artificial Sequence
  Cyclic GFR-binding peptide
  MOD_RES (3), (4): Xaa is C or S
APXXVPQALSNITIQIMVGRKPKVLGEMSMIVR

SEQ ID NO: 90616 - protein, 30 aa, Artificial Sequence
  Cyclic GFR-binding peptide
  MOD_RES (1), (2): Xaa is C or S
XXVSQDLSNITIQIMIGKTPKILGEMSMIV

SEQ ID NO: 90617 - protein, 30 aa, Artificial Sequence
  Cyclic GFR-binding peptide
PTKLSNITVQIMDDSSNVILGEMSNMVVRS

SEQ ID NO: 90618 - protein, 28 aa, Artificial Sequence
  Cyclic GFR-binding peptide
PVKTSNITMQIMDNGRVLLIGEMSMIVE

SEQ ID NO: 90619 - protein, 39 aa, Artificial Sequence; identical to SEQ ID NO: 36781
  Cyclic GFR-binding peptide
  MOD_RES (6), (7), (39): Xaa is C or S

SEQ ID NO: 90620 - protein, 31 aa, Artificial Sequence; identical to SEQ ID NO: 36784
  Cyclic GFR-binding peptide
  MOD_RES (1), (1): Xaa is C or S

SEQ ID NO: 90621 - protein, 28 aa, Artificial Sequence
  Cyclic GFR-binding peptide
  MOD_RES (28), (28): Xaa is C or S
KTSNITMQIMDNGRVLLLGEMSMIVEEX

SEQ ID NO: 90622 - protein, 22 aa, Artificial Sequence
  Cyclic GFR-binding peptide
KMSNITMQIMNDKQQIIIGEMS

SEQ ID NO: 90623 - protein, 24 aa, Artificial Sequence
  Cyclic GFR-binding peptide
SNITVQIMDDSSNVILGEMSNMVV

SEQ ID NO: 90624 - protein, 35 aa, Artificial Sequence
  Cyclic GFR-binding peptide
  MOD_RES (6), (7): Xaa is C or S
RVPSTXXAPVKTSNITMQIMDNGRVLLLGEMSMIV

SEQ ID NO: 90625 - protein, 40 aa, Artificial Sequence; identical to SEQ ID NO: 36788
  Cyclic GFR-binding peptide
  MOD_RES (6), (7), (38), (40): Xaa is C or S

SEQ ID NO: 90626 - protein, 32 aa, Artificial Sequence; identical to SEQ ID NO: 36790
  Cyclic GFR-binding peptide
  MOD_RES (1), (2): Xaa is C or S

SEQ ID NO: 90627 - protein, 40 aa, Artificial Sequence; identical to SEQ ID NO: 36792
  Cyclic GFR-binding peptide
  MOD_RES (6), (7), (38), (40): Xaa is C or S

SEQ ID NO: 90628 - protein, 28 aa, Artificial Sequence
  Cyclic GFR-binding peptide
  MOD_RES (27), (27): Xaa is C or S
SNITIQIMDAANNVVIGEMSDMVVEAXG

SEQ ID NO: 90629 - protein, 33 aa, Artificial Sequence; identical to SEQ ID NO: 36798
  Cyclic GFR-binding peptide
  MOD_RES (1), (33): Xaa is C or S

SEQ ID NO: 90630 - protein, 25 aa, Artificial Sequence
  Cyclic GFR-binding peptide
APVKTSNITMQIMDNGRVLLLGEMS

SEQ ID NO: 90631 - protein, 34 aa, Artificial Sequence
  Cyclic GFR-binding peptide
  MOD_RES (31), (33): Xaa is C or S
PTKMSNITMQIMNDKQQIILGEMSGMVVDRXGXS

SEQ ID NO: 90632 - protein, 33 aa, Artificial Sequence
  Cyclic GFR-binding peptide
  MOD_RES (31), (33): Xaa is C or S
PTRLSNITIQIMDSANNVVIGEMSDMVVESXGX

SEQ ID NO: 90633 - protein, 29 aa, Artificial Sequence
  Cyclic GFR-binding peptide
  MOD_RES (28), (28): Xaa is C or S
LSNITIQIMDSANNVVLGEMSDMVVESXG

SEQ ID NO: 90634 - protein, 30 aa, Artificial Sequence
  Cyclic GFR-binding peptide
  MOD_RES (3), (4): Xaa is C or S
SPXXVSQDLSNITIQIMIGKTPKILGEMSM

SEQ ID NO: 90635 - protein, 33 aa, Artificial Sequence; identical to SEQ ID NO: 36827
  Cyclic GFR-binding peptide
  MOD_RES (2), (3): Xaa is C or S

SEQ ID NO: 90636 - protein, 36 aa, Artificial Sequence; identical to SEQ ID NO: 36830
  Cyclic GFR-binding peptide
  MOD_RES (1), (33), (35): Xaa is C or S

SEQ ID NO: 90637 - protein, 35 aa, Artificial Sequence
  Cyclic GFR-binding peptide
  MOD_RES (5), (6): Xaa is C or S
VPKPXXAPTKLSNITVQIMDDSSNVILGEMSNMVV

SEQ ID NO: 90638 - protein, 32 aa, Artificial Sequence
  Cyclic GFR-binding peptide
  MOD_RES (5), (6): Xaa is C or S
SASPXXVPQDLSNITIQIMVGRTPKVLGEMSM

SEQ ID NO: 90639 - protein, 28 aa, Artificial Sequence
  Cyclic GFR-binding peptide
  MOD_RES (1), (2): Xaa is C or S
XXTPTKMSNITMQIMNDKQQIILGEMSG

SEQ ID NO: 90640 - protein, 30 aa, Artificial Sequence
  Cyclic GFR-binding peptide
  MOD_RES (27), (29): Xaa is C or S
TSNITMQIMDNGRVLLIGEMSMIVEEXGXL

SEQ ID NO: 90641 - protein, 33 aa, Artificial Sequence
  Cyclic GFR-binding peptide
  MOD_RES (3), (4): Xaa is C or S
PTXXVPTRLSNITIQIMDSANNVVLGEMSDMVV

SEQ ID NO: 90642 - protein, 31 aa, Artificial Sequence
  Cyclic GFR-binding peptide
  MOD_RES (5), (6): Xaa is C or S
TPPTXXVPTRLSNITIQIMDSANNVVLGEMS

SEQ ID NO: 90643 - protein, 40 aa, Artificial Sequence; identical to SEQ ID NO: 36839
  Cyclic GFR-binding peptide
  MOD_RES (5), (6), (37), (39): Xaa is C or S

SEQ ID NO: 90644 - protein, 33 aa, Artificial Sequence; identical to SEQ ID NO: 36840
  Cyclic GFR-binding peptide
  MOD_RES (31), (33): Xaa is C or S

SEQ ID NO: 90645 - protein, 33 aa, Artificial Sequence
  Cyclic GFR-binding peptide
  MOD_RES (6), (7): Xaa is C or S
ASASPXXVSQDLSNITIQIMIGKTPKILGEMSM

SEQ ID NO: 90646 - protein, 29 aa, Artificial Sequence
  Cyclic GFR-binding peptide
  MOD_RES (3), (4): Xaa is C or S
GPXXTPTKMSNITMQIMNDKQQIILGEMS

SEQ ID NO: 90647 - protein, 29 aa, Artificial Sequence
  Cyclic GFR-binding peptide
  MOD_RES (26), (28): Xaa is C or S
SNITIQIMVGRTPKVLGEMSMVVKSXKXS

SEQ ID NO: 90648 - protein, 42 aa, Artificial Sequence; identical to SEQ ID NO: 36845
  Cyclic GFR-binding peptide
  MOD_RES (6), (7), (39), (41): Xaa is C or S

SEQ ID NO: 90649 - protein, 30 aa, Artificial Sequence
  Cyclic GFR-binding peptide
  MOD_RES (3), (4): Xaa is C or S
ASXXVPARLSNITIQIMDAANNVVLGEMSD

SEQ ID NO: 90650 - protein, 37 aa, Artificial Sequence; identical to SEQ ID NO: 36847
  Cyclic GFR-binding peptide
  MOD_RES (5), (6): Xaa is C or S

SEQ ID NO: 90651 - protein, 25 aa, Artificial Sequence
  Cyclic GFR-binding peptide
RLSNITIQIMDAANNVVLGEMSDMV

SEQ ID NO: 90652 - protein, 32 aa, Artificial Sequence; identical to SEQ ID NO: 36851
  Cyclic GFR-binding peptide
  MOD_RES (32), (32): Xaa is C or S

SEQ ID NO: 90653 - protein, 38 aa, Artificial Sequence; identical to SEQ ID NO: 36853
  Cyclic GFR-binding peptide
  MOD_RES (6), (7): Xaa is C or S

SEQ ID NO: 90654 - protein, 30 aa, Artificial Sequence
  Cyclic GFR-binding peptide
  MOD_RES (1), (1): Xaa is C or S
XAPTKLSNITVQIMDDSSNVILGEMSNMVV

SEQ ID NO: 90655 - protein, 28 aa, Artificial Sequence
  Cyclic GFR-binding peptide
PARLSNITIQIMDAANNVVIGEMSDMVV

SEQ ID NO: 90656 - protein, 36 aa, Artificial Sequence; identical to SEQ ID NO: 36859
  Cyclic GFR-binding peptide
  MOD_RES (4), (5): Xaa is C or S

SEQ ID NO: 90657 - protein, 30 aa, Artificial Sequence
  Cyclic GFR-binding peptide
  MOD_RES (1), (2): Xaa is C or S
XXVPQALSNITIQIMVGRKPKVLGEMSMIV

SEQ ID NO: 90658 - protein, 31 aa, Artificial Sequence
  Cyclic GFR-binding peptide
  MOD_RES (2), (3): Xaa is C or S
PXXVPQDLSNITIQIMVGRTPKVLGEMSMVV

SEQ ID NO: 90659 - protein, 34 aa, Artificial Sequence; identical to SEQ ID NO: 36860
  Cyclic GFR-binding peptide
  MOD_RES (31), (33): Xaa is C or S

SEQ ID NO: 90660 - protein, 27 aa, Artificial Sequence
  Cyclic GFR-binding peptide
RLSNITIQIMDAANNVVLGEMSDMVVE

SEQ ID NO: 90661 - protein, 31 aa, Artificial Sequence
  Cyclic GFR-binding peptide
  MOD_RES (30), (30): Xaa is C or S
PVKTSNITMQIMDNGRVLLLGEMSMIVEEXG

SEQ ID NO: 90662 - protein, 28 aa, Artificial Sequence
  Cyclic GFR-binding peptide
PARLSNITIQIMDAANNVVLGEMSDMVV

SEQ ID NO: 90663 - protein, 37 aa, Artificial Sequence; identical to SEQ ID NO: 36868
  Cyclic GFR-binding peptide
  MOD_RES (4), (5), (37): Xaa is C or S

SEQ ID NO: 90664 - protein, 31 aa, Artificial Sequence
  Cyclic GFR-binding peptide
  MOD_RES (28), (30): Xaa is C or S
MSNITMQIMNDKQQIILGEMSGMVVDRXGXS

SEQ ID NO: 90665 - protein, 37 aa, Artificial Sequence; identical to SEQ ID NO: 36870
  Cyclic GFR-binding peptide
  MOD_RES (1), (2), (34), (36): Xaa is C or S

SEQ ID NO: 90666 - protein, 32 aa, Artificial Sequence
  Cyclic GFR-binding peptide
  MOD_RES (5), (6): Xaa is C or S
APASXXVPARLSNITIQIMDAANNVVLGEMSD

SEQ ID NO: 90667 - protein, 39 aa, Artificial Sequence; identical to SEQ ID NO: 36874
  Cyclic GFR-binding peptide
  MOD_RES (4), (5), (37), (39): Xaa is C or S

SEQ ID NO: 90668 - protein, 33 aa, Artificial Sequence
  Cyclic GFR-binding peptide
  MOD_RES (6), (7): Xaa is C or S
GSAGPXXTPTKMSNITMQIMNDKQQIIIGEMSG

SEQ ID NO: 90669 - protein, 33 aa, Artificial Sequence; identical to SEQ ID NO: 36876
  Cyclic GFR-binding peptide
  MOD_RES (1), (2): Xaa is C or S

SEQ ID NO: 90670 - protein, 31 aa, Artificial Sequence
  Cyclic GFR-binding peptide
  MOD_RES (31), (31): Xaa is C or S
PTKMSNITMQIMNDKQQIIIGEMSGMVVDRX

SEQ ID NO: 90671 - protein, 21 aa, Artificial Sequence
  Cyclic GFR-binding peptide
SNITIQIMDSANNVVIGEMSD

SEQ ID NO: 90672 - protein, 29 aa, Artificial Sequence
  Cyclic GFR-binding peptide
  MOD_RES (1), (1): Xaa is C or S
XAPVKTSNITMQIMDNGRVLLLGEMSMIV

SEQ ID NO: 90673 - protein, 35 aa, Artificial Sequence
  Cyclic GFR-binding peptide
  MOD_RES (5), (6): Xaa is C or S
APASXXVPARLSNITIQIMDAANNVVIGEMSDMVV

SEQ ID NO: 90674 - protein, 26 aa, Artificial Sequence
  Cyclic GFR-binding peptide
PTKMSNITMQIMNDKQQIIIGEMSGM

SEQ ID NO: 90675 - protein, 39 aa, Artificial Sequence; identical to SEQ ID NO: 36882
  Cyclic GFR-binding peptide
  MOD_RES (5), (6), (37), (39): Xaa is C or S

SEQ ID NO: 90676 - protein, 27 aa, Artificial Sequence
  Cyclic GFR-binding peptide
  MOD_RES (1), (2): Xaa is C or S
XXVPARLSNITIQIMDAANNVVIGEMS

SEQ ID NO: 90677 - protein, 22 aa, Artificial Sequence
  Cyclic GFR-binding peptide
LSNITIQIMVGRTPKVLGEMSM

SEQ ID NO: 90678 - protein, 29 aa, Artificial Sequence
  Cyclic GFR-binding peptide
SNITMQIMDNGRVLLIGEMSAAAAAAAAA

SEQ ID NO: 90679 - protein, 30 aa, Artificial Sequence
  Cyclic GFR-binding peptide
  MOD_RES (3), (4): Xaa is C or S
SPXXVPQDLSNITIQIMVGRTPKVLGEMSM

SEQ ID NO: 90680 - protein, 28 aa, Artificial Sequence
  Cyclic GFR-binding peptide
QDLSNITIQIMIGKTPKILGEMSMIVKS

SEQ ID NO: 90681 - protein, 29 aa, Artificial Sequence
  Cyclic GFR-binding peptide
SQDLSNITIQIMIGKTPKILGEMSMIVKS

SEQ ID NO: 90682 - protein, 28 aa, Artificial Sequence
  Cyclic GFR-binding peptide
TPTKMSNITMQIMNDKQQIILGEMSGMV

SEQ ID NO: 90683 - protein, 22 aa, Artificial Sequence
  Cyclic GFR-binding peptide
TSNITMQIMDNGRVLLIGEMSM

SEQ ID NO: 90684 - protein, 30 aa, Artificial Sequence
  Cyclic GFR-binding peptide
  MOD_RES (4), (5): Xaa is C or S
AGPXXTPTKMSNITMQIMNDKQQIIIGEMS

SEQ ID NO: 90685 - protein, 27 aa, Artificial Sequence
  Cyclic GFR-binding peptide
VPARLSNITIQIMDAANNVVIGEMSDM

SEQ ID NO: 90686 - protein, 35 aa, Artificial Sequence; identical to SEQ ID NO: 36894
  Cyclic GFR-binding peptide
  MOD_RES (3), (4), (35): Xaa is C or S

SEQ ID NO: 90687 - protein, 29 aa, Artificial Sequence
  Cyclic GFR-binding peptide
TRLSNITIQIMDSANNVVLGEMSDMVVES

SEQ ID NO: 90688 - protein, 30 aa, Artificial Sequence; identical to SEQ ID NO: 36895
  Cyclic GFR-binding peptide

SEQ ID NO: 90689 - protein, 33 aa, Artificial Sequence; identical to SEQ ID NO: 36896
  Cyclic GFR-binding peptide
  MOD_RES (1), (2), (33): Xaa is C or S

SEQ ID NO: 90690 - protein, 34 aa, Artificial Sequence; identical to SEQ ID NO: 36897
  Cyclic GFR-binding peptide
  MOD_RES (3), (4): Xaa is C or S

SEQ ID NO: 90691 - protein, 38 aa, Artificial Sequence; identical to SEQ ID NO: 36898
  Cyclic GFR-binding peptide
  MOD_RES (3), (4), (35), (37): Xaa is C or S

SEQ ID NO: 90692 - protein, 27 aa, Artificial Sequence
  Cyclic GFR-binding peptide
MSNITMQIMNDKQQIILGEMSGMVVDR

SEQ ID NO: 90693 - protein, 33 aa, Artificial Sequence
  Cyclic GFR-binding peptide
  MOD_RES (4), (5): Xaa is C or S
PPTXXVPTRLSNITIQIMDSANNVVIGEMSDMV

SEQ ID NO: 90694 - protein, 41 aa, Artificial Sequence; identical to SEQ ID NO: 36900
  Cyclic GFR-binding peptide
  MOD_RES (5), (6), (38), (40): Xaa is C or S

SEQ ID NO: 90695 - protein, 33 aa, Artificial Sequence
  Cyclic GFR-binding peptide
  MOD_RES (3), (4): Xaa is C or S
ASXXVPARLSNITIQIMDAANNVVIGEMSDMVV

SEQ ID NO: 90696 - protein, 22 aa, Artificial Sequence
  Cyclic GFR-binding peptide
KLSNITVQIMDDSSNVILGEMS

SEQ ID NO: 90697 - protein, 30 aa, Artificial Sequence
  Cyclic GFR-binding peptide
  MOD_RES (30), (30): Xaa is C or S
PQALSNITIQIMVGRKPKVLGEMSMIVRSX

SEQ ID NO: 90698 - protein, 28 aa, Artificial Sequence
  Cyclic GFR-binding peptide
PTRLSNITIQIMDSANNVVIGEMSDMVV

SEQ ID NO: 90699 - protein, 40 aa, Artificial Sequence; identical to SEQ ID NO: 36905
  Cyclic GFR-binding peptide
  MOD_RES (4), (5), (37), (39): Xaa is C or S

SEQ ID NO: 90700 - protein, 27 aa, Artificial Sequence
  Cyclic GFR-binding peptide
  MOD_RES (27), (27): Xaa is C or S
LSNITIQIMVGRTPKVLGEMSMVVKSX

SEQ ID NO: 90701 - protein, 38 aa, Artificial Sequence; identical to SEQ ID NO: 36907
  Cyclic GFR-binding peptide
  MOD_RES (3), (4), (35), (37): Xaa is C or S

SEQ ID NO: 90702 - protein, 36 aa, Artificial Sequence; identical to SEQ ID NO: 36908
  Cyclic GFR-binding peptide
  MOD_RES (1), (2), (33), (35): Xaa is C or S

SEQ ID NO: 90703 - protein, 37 aa, Artificial Sequence; identical to SEQ ID NO: 36910
  Cyclic GFR-binding peptide
  MOD_RES (3), (4), (35), (37): Xaa is C or S

SEQ ID NO: 90704 - protein, 23 aa, Artificial Sequence
  Cyclic GFR-binding peptide
TSNITMQIMDNGRVLLLGEMSMI

SEQ ID NO: 90705 - protein, 28 aa, Artificial Sequence
  Cyclic GFR-binding peptide
  MOD_RES (26), (28): Xaa is C or S
SNITMQIMDNGRVLLIGEMSMIVEEXGX

SEQ ID NO: 90706 - protein, 32 aa, Artificial Sequence; identical to SEQ ID NO: 36912
  Cyclic GFR-binding peptide
  MOD_RES (1), (1): Xaa is C or S

SEQ ID NO: 90707 - protein, 36 aa, Artificial Sequence; identical to SEQ ID NO: 36913
  Cyclic GFR-binding peptide
  MOD_RES (1), (2), (33), (35): Xaa is C or S

SEQ ID NO: 90708 - protein, 34 aa, Artificial Sequence; identical to SEQ ID NO: 36914
  Cyclic GFR-binding peptide
  MOD_RES (1), (2), (34): Xaa is C or S

SEQ ID NO: 90709 - protein, 36 aa, Artificial Sequence; identical to SEQ ID NO: 36917
  Cyclic GFR-binding peptide
  MOD_RES (5), (6): Xaa is C or S

SEQ ID NO: 90710 - protein, 24 aa, Artificial Sequence
  Cyclic GFR-binding peptide
PVKTSNITMQIMDNGRVLLLGEMS

SEQ ID NO: 90711 - protein, 26 aa, Artificial Sequence
  Cyclic GFR-binding peptide
KLSNITVQIMDDSSNVILGEMSNMVV

SEQ ID NO: 90712 - protein, 37 aa, Artificial Sequence; identical to SEQ ID NO: 36921
  Cyclic GFR-binding peptide
  MOD_RES (5), (6): Xaa is C or S

SEQ ID NO: 90713 - protein, 29 aa, Artificial Sequence
  Cyclic GFR-binding peptide
  MOD_RES (27), (29): Xaa is C or S
SNITIQIMDSANNVVLGEMSDMVVESXGX

SEQ ID NO: 90714 - protein, 28 aa, Artificial Sequence
  Cyclic GFR-binding peptide
PTKMSNITMQIMNDKQQIIIGEMSGMVV

SEQ ID NO: 90715 - protein, 26 aa, Artificial Sequence
  Cyclic GFR-binding peptide
TSNITMQIMDNGRVLLIGEMSMIVEE

SEQ ID NO: 90716 - protein, 32 aa, Artificial Sequence
  Cyclic GFR-binding peptide
  MOD_RES (3), (4): Xaa is C or S
STXXAPVKTSNITMQIMDNGRVLLIGEMSMIV

SEQ ID NO: 90717 - protein, 35 aa, Artificial Sequence; identical to SEQ ID NO: 36930
  Cyclic GFR-binding peptide
  MOD_RES (2), (3), (35): Xaa is C or S

SEQ ID NO: 90718 - protein, 28 aa, Artificial Sequence
  Cyclic GFR-binding peptide
KMSNITMQIMNDKQQIILGEMSGMVVDR

SEQ ID NO: 90719 - protein, 30 aa, Artificial Sequence
  Cyclic GFR-binding peptide
  MOD_RES (4), (5): Xaa is C or S
ASPXXVSQDLSNITIQIMIGKTPKILGEMS

SEQ ID NO: 90720 - protein, 29 aa, Artificial Sequence
  Cyclic GFR-binding peptide
  MOD_RES (29), (29): Xaa is C or S
RLSNITIQIMDSANNVVIGEMSDMVVESX

SEQ ID NO: 90721 - protein, 25 aa, Artificial Sequence
  Cyclic GFR-binding peptide
PTKLSNITVQIMDDSSNVILGEMSN

SEQ ID NO: 90722 - protein, 24 aa, Artificial Sequence
  Cyclic GFR-binding peptide
LSNITIQIMDAANNVVLGEMSDMV

SEQ ID NO: 90723 - protein, 28 aa, Artificial Sequence
  Cyclic GFR-binding peptide
PVKTSNITMQIMDNGRVLLLGEMSMIVE

SEQ ID NO: 90724 - protein, 39 aa, Artificial Sequence; identical to SEQ ID NO: 36942
  Cyclic GFR-binding peptide
  MOD_RES (4), (5), (37), (39): Xaa is C or S

SEQ ID NO: 90725 - protein, 28 aa, Artificial Sequence
  Cyclic GFR-binding peptide
VPTRLSNITIQIMDSANNVVLGEMSDMV

SEQ ID NO: 90726 - protein, 32 aa, Artificial Sequence
  Cyclic GFR-binding peptide
  MOD_RES (29), (31): Xaa is C or S
VKTSNITMQIMDNGRVLLIGEMSMIVEEXGXL

SEQ ID NO: 90727 - protein, 33 aa, Artificial Sequence
  Cyclic GFR-binding peptide
  MOD_RES (4), (5): Xaa is C or S
PPTXXVPTRLSNITIQIMDSANNVVLGEMSDMV

SEQ ID NO: 90728 - protein, 25 aa, Artificial Sequence
  Cyclic GFR-binding peptide
SNITIQIMVGRTPKVLGEMSMVVKS

SEQ ID NO: 90729 - protein, 33 aa, Artificial Sequence
  Cyclic GFR-binding peptide
  MOD_RES (4), (5): Xaa is C or S
PASXXVPARLSNITIQIMDAANNVVIGEMSDMV

SEQ ID NO: 90730 - protein, 26 aa, Artificial Sequence
  Cyclic GFR-binding peptide
  MOD_RES (1), (1): Xaa is C or S
XAPTKLSNITVQIMDDSSNVILGEMS

SEQ ID NO: 90731 - protein, 28 aa, Artificial Sequence
  Cyclic GFR-binding peptide
  MOD_RES (1), (1): Xaa is C or S
XVPARLSNITIQIMDAANNVVIGEMSDM

SEQ ID NO: 90732 - protein, 28 aa, Artificial Sequence
  Cyclic GFR-binding peptide
KMSNITMQIMNDKQQIIIGEMSGMVVDR

SEQ ID NO: 90733 - protein, 40 aa, Artificial Sequence; identical to SEQ ID NO: 36952
  Cyclic GFR-binding peptide
  MOD_RES (6), (7), (39): Xaa is C or S

SEQ ID NO: 90734 - protein, 27 aa, Artificial Sequence
  Cyclic GFR-binding peptide
LSNITIQIMDSANNVVIGEMSDMVVES

SEQ ID NO: 90735 - protein, 30 aa, Artificial Sequence
  Cyclic GFR-binding peptide
  MOD_RES (29), (29): Xaa is C or S
QDLSNITIQIMVGRTPKVLGEMSMVVKSXK

SEQ ID NO: 90736 - protein, 32 aa, Artificial Sequence
  Cyclic GFR-binding peptide
  MOD_RES (29), (31): Xaa is C or S
QALSNITIQIMVGRKPKVLGEMSMIVRSXKXS

SEQ ID NO: 90737 - protein, 34 aa, Artificial Sequence
  Cyclic GFR-binding peptide
  MOD_RES (6), (7): Xaa is C or S
RVPSTXXAPVKTSNITMQIMDNGRVLLLGEMSMI

SEQ ID NO: 90738 - protein, 37 aa, Artificial Sequence; identical to SEQ ID NO: 36954
  Cyclic GFR-binding peptide
  MOD_RES (2), (3), (34), (36): Xaa is C or S

SEQ ID NO: 90739 - protein, 37 aa, Artificial Sequence; identical to SEQ ID NO: 36955
  Cyclic GFR-binding peptide
  MOD_RES (6), (7): Xaa is C or S

SEQ ID NO: 90740 - protein, 30 aa, Artificial Sequence
  Cyclic GFR-binding peptide
  MOD_RES (29), (29): Xaa is C or S
RLSNITIQIMDAANNVVIGEMSDMVVEAXG

SEQ ID NO: 90741 - protein, 23 aa, Artificial Sequence
  Cyclic GFR-binding peptide
RLSNITIQIMDAANNVVIGEMSD

SEQ ID NO: 90742 - protein, 35 aa, Artificial Sequence
  Cyclic GFR-binding peptide
  MOD_RES (5), (6): Xaa is C or S
SAGPXXTPTKMSNITMQIMNDKQQIILGEMSGMVV

SEQ ID NO: 90743 - protein, 29 aa, Artificial Sequence
  Cyclic GFR-binding peptide
APTKLSNITVQIMDDSSNVILGEMSNMVV

SEQ ID NO: 90744 - protein, 37 aa, Artificial Sequence; identical to SEQ ID NO: 36962
  Cyclic GFR-binding peptide
  MOD_RES (3), (4), (36): Xaa is C or S

SEQ ID NO: 90745 - protein, 34 aa, Artificial Sequence; identical to SEQ ID NO: 36964
  Cyclic GFR-binding peptide
  MOD_RES (3), (4): Xaa is C or S

SEQ ID NO: 90746 - protein, 35 aa, Artificial Sequence; identical to SEQ ID NO: 36965
  Cyclic GFR-binding peptide
  MOD_RES (1), (2), (33), (35): Xaa is C or S

SEQ ID NO: 90747 - protein, 20 aa, Artificial Sequence
  Cyclic GFR-binding peptide
SNITIQIMDAANNVVLGEMS

SEQ ID NO: 90748 - protein, 30 aa, Artificial Sequence
  Cyclic GFR-binding peptide
  MOD_RES (27), (29): Xaa is C or S
TSNITMQIMDNGRVLLLGEMSMIVEEXGXL

SEQ ID NO: 90749 - protein, 23 aa, Artificial Sequence
  Cyclic GFR-binding peptide
TKMSNITMQIMNDKQQIIIGEMS

SEQ ID NO: 90750 - protein, 38 aa, Artificial Sequence; identical to SEQ ID NO: 36968
  Cyclic GFR-binding peptide
  MOD_RES (3), (4), (35), (37): Xaa is C or S

SEQ ID NO: 90751 - protein, 21 aa, Artificial Sequence
  Cyclic GFR-binding peptide
LSNITIQIMDAANNVVLGEMS

SEQ ID NO: 90752 - protein, 38 aa, Artificial Sequence; identical to SEQ ID NO: 36969
  Cyclic GFR-binding peptide
  MOD_RES (4), (5), (37): Xaa is C or S

SEQ ID NO: 90753 - protein, 25 aa, Artificial Sequence
  Cyclic GFR-binding peptide
ARLSNITIQIMDAANNVVLGEMSDM

SEQ ID NO: 90754 - protein, 39 aa, Artificial Sequence; identical to SEQ ID NO: 36970
  Cyclic GFR-binding peptide
  MOD_RES (6), (7), (39): Xaa is C or S

SEQ ID NO: 90755 - protein, 35 aa, Artificial Sequence
  Cyclic GFR-binding peptide
  MOD_RES (6), (7): Xaa is C or S
RVPSTXXAPVKTSNITMQIMDNGRVLLIGEMSMIV

SEQ ID NO: 90756 - protein, 27 aa, Artificial Sequence
  Cyclic GFR-binding peptide
TPTKMSNITMQIMNDKQQIILGEMSGM

SEQ ID NO: 90757 - protein, 32 aa, Artificial Sequence
  Cyclic GFR-binding peptide
  MOD_RES (31), (31): Xaa is C or S
PARLSNITIQIMDAANNVVIGEMSDMVVEAXG

SEQ ID NO: 90758 - protein, 30 aa, Artificial Sequence
  Cyclic GFR-binding peptide
  MOD_RES (2), (3): Xaa is C or S
PXXAPTKLSNITVQIMDDSSNVILGEMSNM

SEQ ID NO: 90759 - protein, 34 aa, Artificial Sequence; identical to SEQ ID NO: 36972
  Cyclic GFR-binding peptide
  MOD_RES (2), (3), (34): Xaa is C or S

SEQ ID NO: 90760 - protein, 36 aa, Artificial Sequence; identical to SEQ ID NO: 36974
  Cyclic GFR-binding peptide
  MOD_RES (4), (5), (36): Xaa is C or S

SEQ ID NO: 90761 - protein, 27 aa, Artificial Sequence
  Cyclic GFR-binding peptide
PVKTSNITMQIMDNGRVLLIGEMSMIV

SEQ ID NO: 90762 - protein, 30 aa, Artificial Sequence
  Cyclic GFR-binding peptide
  MOD_RES (1), (2): Xaa is C or S
XXTPTKMSNITMQIMNDKQQIILGEMSGMV

SEQ ID NO: 90763 - protein, 29 aa, Artificial Sequence
  Cyclic GFR-binding peptide
PTKLSNITVQIMDDSSNVILGEMSNMVVR

SEQ ID NO: 90764 - protein, 23 aa, Artificial Sequence
  Cyclic GFR-binding peptide
MSNITMQIMNDKQQIIIGEMSGM

SEQ ID NO: 90765 - protein, 40 aa, Artificial Sequence; identical to SEQ ID NO: 36979
  Cyclic GFR-binding peptide
  MOD_RES (4), (5), (37), (39): Xaa is C or S

SEQ ID NO: 90766 - protein, 35 aa, Artificial Sequence
  Cyclic GFR-binding peptide
  MOD_RES (6), (7): Xaa is C or S
AAPASXXVPARLSNITIQIMDAANNVVLGEMSDMV

SEQ ID NO: 90767 - protein, 36 aa, Artificial Sequence
  Cyclic GFR-binding peptide
  MOD_RES (6), (7): Xaa is C or S
AAPASXXVPARLSNITIQIMDAANNVVIGEMSDMVV

SEQ ID NO: 90768 - protein, 32 aa, Artificial Sequence; identical to SEQ ID NO: 36981
  Cyclic GFR-binding peptide
  MOD_RES (1), (2): Xaa is C or S

SEQ ID NO: 90769 - protein, 24 aa, Artificial Sequence
  Cyclic GFR-binding peptide
PVKTSNITMQIMDNGRVLLIGEMS

SEQ ID NO: 90770 - protein, 31 aa, Artificial Sequence
  Cyclic GFR-binding peptide
  MOD_RES (29), (31): Xaa is C or S
KLSNITVQIMDDSSNVILGEMSNMVVRSXGX

SEQ ID NO: 90771 - protein, 36 aa, Artificial Sequence; identical to SEQ ID NO: 36985
  Cyclic GFR-binding peptide
  MOD_RES (1), (33), (35): Xaa is C or S

SEQ ID NO: 90772 - protein, 34 aa, Artificial Sequence; identical to SEQ ID NO: 36987
  Cyclic GFR-binding peptide
  MOD_RES (3), (4): Xaa is C or S

SEQ ID NO: 90773 - protein, 30 aa, Artificial Sequence; identical to SEQ ID NO: 36990
  Cyclic GFR-binding peptide

SEQ ID NO: 90774 - protein, 26 aa, Artificial Sequence
  Cyclic GFR-binding peptide
  MOD_RES (1), (1): Xaa is C or S
XAPVKTSNITMQIMDNGRVLLLGEMS

SEQ ID NO: 90775 - protein, 29 aa, Artificial Sequence
  Cyclic GFR-binding peptide
  MOD_RES (29), (29): Xaa is C or S
RLSNITIQIMDAANNVVLGEMSDMVVEAX

SEQ ID NO: 90776 - protein, 27 aa, Artificial Sequence
  Cyclic GFR-binding peptide
PVKTSNITMQIMDNGRVLLLGEMSMIV

SEQ ID NO: 90777 - protein, 28 aa, Artificial Sequence
  Cyclic GFR-binding peptide
  MOD_RES (27), (27): Xaa is C or S
LSNITIQIMIGKTPKILGEMSMIVKSXK

SEQ ID NO: 90778 - protein, 29 aa, Artificial Sequence
  Cyclic GFR-binding peptide
  MOD_RES (27), (29): Xaa is C or S
SNITIQIMDSANNVVIGEMSDMVVESXGX

SEQ ID NO: 90779 - protein, 30 aa, Artificial Sequence
  Cyclic GFR-binding peptide
  MOD_RES (28), (30): Xaa is C or S
LSNITIQIMDSANNVVIGEMSDMVVESXGX

SEQ ID NO: 90780 - protein, 29 aa, Artificial Sequence
  Cyclic GFR-binding peptide
  MOD_RES (29), (29): Xaa is C or S
RLSNITIQIMDAANNVVIGEMSDMVVEAX

SEQ ID NO: 90781 - protein, 35 aa, Artificial Sequence; identical to SEQ ID NO: 36994
  Cyclic GFR-binding peptide
  MOD_RES (4), (5): Xaa is C or S

SEQ ID NO: 90782 - protein, 38 aa, Artificial Sequence; identical to SEQ ID NO: 36995
  Cyclic GFR-binding peptide
  MOD_RES (6), (7): Xaa is C or S

SEQ ID NO: 90783 - protein, 30 aa, Artificial Sequence; identical to SEQ ID NO: 1115
  Cyclic GFR-binding peptide

SEQ ID NO: 90784 - protein, 29 aa, Artificial Sequence
  Cyclic GFR-binding peptide
  MOD_RES (2), (3): Xaa is C or S
PXXVSQDLSNITIQIMIGKTPKILGEMSM

SEQ ID NO: 90785 - protein, 26 aa, Artificial Sequence
  Cyclic GFR-binding peptide
LSNITIQIMDAANNVVLGEMSDMVVE

SEQ ID NO: 90786 - protein, 30 aa, Artificial Sequence
  Cyclic GFR-binding peptide
  MOD_RES (30), (30): Xaa is C or S
TKMSNITMQIMNDKQQIIIGEMSGMVVDRX

SEQ ID NO: 90787 - protein, 32 aa, Artificial Sequence
  Cyclic GFR-binding peptide
  MOD_RES (2), (3): Xaa is C or S
PXXTPTKMSNITMQIMNDKQQIIIGEMSGMVV

SEQ ID NO: 90788 - protein, 35 aa, Artificial Sequence; identical to SEQ ID NO: 37000
  Cyclic GFR-binding peptide
  MOD_RES (1), (33), (35): Xaa is C or S

SEQ ID NO: 90789 - protein, 36 aa, Artificial Sequence; identical to SEQ ID NO: 37005
  Cyclic GFR-binding peptide
  MOD_RES (5), (6): Xaa is C or S

SEQ ID NO: 90790 - protein, 42 aa, Artificial Sequence; identical to SEQ ID NO: 37006
  Cyclic GFR-binding peptide
  MOD_RES (6), (7), (39), (41): Xaa is C or S

SEQ ID NO: 90791 - protein, 33 aa, Artificial Sequence
  Cyclic GFR-binding peptide
  MOD_RES (5), (6): Xaa is C or S
APASXXVPARLSNITIQIMDAANNVVIGEMSDM

SEQ ID NO: 90792 - protein, 32 aa, Artificial Sequence
  Cyclic GFR-binding peptide
  MOD_RES (6), (7): Xaa is C or S
GSAGPXXTPTKMSNITMQIMNDKQQIILGEMS

SEQ ID NO: 90793 - protein, 31 aa, Artificial Sequence
  Cyclic GFR-binding peptide
  MOD_RES (2), (3): Xaa is C or S
TXXAPVKTSNITMQIMDNGRVLLIGEMSMIV

SEQ ID NO: 90794 - protein, 25 aa, Artificial Sequence
  Cyclic GFR-binding peptide
QDLSNITIQIMIGKTPKILGEMSMI

SEQ ID NO: 90795 - protein, 32 aa, Artificial Sequence
  Cyclic GFR-binding peptide
  MOD_RES (6), (7): Xaa is C or S
STPPTXXVPTRLSNITIQIMDSANNVVLGEMS

SEQ ID NO: 90796 - protein, 30 aa, Artificial Sequence
  Cyclic GFR-binding peptide
  MOD_RES (3), (4): Xaa is C or S
PTXXVPTRLSNITIQIMDSANNVVIGEMSD

SEQ ID NO: 90797 - protein, 38 aa, Artificial Sequence; identical to SEQ ID NO: 37017
  Cyclic GFR-binding peptide
  MOD_RES (6), (7), (38): Xaa is C or S

SEQ ID NO: 90798 - protein, 27 aa, Artificial Sequence
  Cyclic GFR-binding peptide
PTRLSNITIQIMDSANNVVIGEMSDMV

SEQ ID NO: 90799 - protein, 31 aa, Artificial Sequence; identical to SEQ ID NO: 37020
  Cyclic GFR-binding peptide
  MOD_RES (31), (31): Xaa is C or S

SEQ ID NO: 90800 - protein, 28 aa, Artificial Sequence
  Cyclic GFR-binding peptide
  MOD_RES (2), (3): Xaa is C or S
PXXTPTKMSNITMQIMNDKQQIIIGEMS

SEQ ID NO: 90801 - protein, 31 aa, Artificial Sequence
  Cyclic GFR-binding peptide
  MOD_RES (3), (4): Xaa is C or S
GPXXTPTKMSNITMQIMNDKQQIIIGEMSGM

SEQ ID NO: 90802 - protein, 29 aa, Artificial Sequence
  Cyclic GFR-binding peptide
  MOD_RES (2), (3): Xaa is C or S
PXXTPTKMSNITMQIMNDKQQIILGEMSG

SEQ ID NO: 90803 - protein, 22 aa, Artificial Sequence
  Cyclic GFR-binding peptide
SNITVQIMDDSSNVILGEMSNM

SEQ ID NO: 90804 - protein, 21 aa, Artificial Sequence
  Cyclic GFR-binding peptide
LSNITIQIMDAANNVVIGEMS

SEQ ID NO: 90805 - protein, 24 aa, Artificial Sequence
  Cyclic GFR-binding peptide
PARLSNITIQIMDAANNVVIGEMS

SEQ ID NO: 90806 - protein, 38 aa, Artificial Sequence; identical to SEQ ID NO: 37029
  Cyclic GFR-binding peptide
  MOD_RES (3), (4), (35), (37): Xaa is C or S

SEQ ID NO: 90807 - protein, 28 aa, Artificial Sequence
  Cyclic GFR-binding peptide
  MOD_RES (1), (2): Xaa is C or S
XXAPVKTSNITMQIMDNGRVLLIGEMSM

SEQ ID NO: 90808 - protein, 29 aa, Artificial Sequence
  Cyclic GFR-binding peptide
VSQDLSNITIQIMIGKTPKILGEMSMIVK

SEQ ID NO: 90809 - protein, 33 aa, Artificial Sequence
  Cyclic GFR-binding peptide
  MOD_RES (5), (6): Xaa is C or S
TPPTXXVPTRLSNITIQIMDSANNVVLGEMSDM

SEQ ID NO: 90810 - protein, 23 aa, Artificial Sequence
  Cyclic GFR-binding peptide
SNITMQIMNDKQQIILGEMSGMV

SEQ ID NO: 90811 - protein, 36 aa, Artificial Sequence; identical to SEQ ID NO: 37034
  Cyclic GFR-binding peptide
  MOD_RES (3), (4), (35): Xaa is C or S

SEQ ID NO: 90812 - protein, 37 aa, Artificial Sequence; identical to SEQ ID NO: 37035
  Cyclic GFR-binding peptide
  MOD_RES (6), (7): Xaa is C or S

SEQ ID NO: 90813 - protein, 33 aa, Artificial Sequence; identical to SEQ ID NO: 37036
  Cyclic GFR-binding peptide
  MOD_RES (32), (32): Xaa is C or S

SEQ ID NO: 90814 - protein, 34 aa, Artificial Sequence; identical to SEQ ID NO: 37039
  Cyclic GFR-binding peptide
  MOD_RES (32), (34): Xaa is C or S

SEQ ID NO: 90815 - protein, 28 aa, Artificial Sequence
  Cyclic GFR-binding peptide
  MOD_RES (1), (1): Xaa is C or S
XTPTKMSNITMQIMNDKQQIILGEMSGM

SEQ ID NO: 90816 - protein, 25 aa, Artificial Sequence
  Cyclic GFR-binding peptide
VKTSNITMQIMDNGRVLLIGEMSMI

SEQ ID NO: 90817 - protein, 29 aa, Artificial Sequence
  Cyclic GFR-binding peptide
  MOD_RES (1), (1): Xaa is C or S
XVPARLSNITIQIMDAANNVVIGEMSDMV

SEQ ID NO: 90818 - protein, 37 aa, Artificial Sequence; identical to SEQ ID NO: 37044
  Cyclic GFR-binding peptide
  MOD_RES (3), (4), (35), (37): Xaa is C or S

SEQ ID NO: 90819 - protein, 33 aa, Artificial Sequence
  Cyclic GFR-binding peptide
  MOD_RES (30), (32): Xaa is C or S
PQDLSNITIQIMVGRTPKVLGEMSMVVKSXKXS

SEQ ID NO: 90820 - protein, 27 aa, Artificial Sequence
  Cyclic GFR-binding peptide
RLSNITIQIMDSANNVVIGEMSDMVVE

SEQ ID NO: 90821 - protein, 29 aa, Artificial Sequence
  Cyclic GFR-binding peptide
PTRLSNITIQIMDSANNVVIGEMSDMVVE

SEQ ID NO: 90822 - protein, 36 aa, Artificial Sequence; identical to SEQ ID NO: 37047
  Cyclic GFR-binding peptide
  MOD_RES (3), (4), (35): Xaa is C or S

SEQ ID NO: 90823 - protein, 31 aa, Artificial Sequence
  Cyclic GFR-binding peptide
  MOD_RES (5), (6): Xaa is C or S
APASXXVPARLSNITIQIMDAANNVVLGEMS

SEQ ID NO: 90824 - protein, 32 aa, Artificial Sequence
  Cyclic GFR-binding peptide
  MOD_RES (29), (31): Xaa is C or S
KMSNITMQIMNDKQQIILGEMSGMVVDRXGXS

SEQ ID NO: 90825 - protein, 35 aa, Artificial Sequence; identical to SEQ ID NO: 37049
  Cyclic GFR-binding peptide
  MOD_RES (4), (5): Xaa is C or S

SEQ ID NO: 90826 - protein, 21 aa, Artificial Sequence
  Cyclic GFR-binding peptide
SNITIQIMDAANNVVLGEMSD

SEQ ID NO: 90827 - protein, 31 aa, Artificial Sequence; identical to SEQ ID NO: 37050
  Cyclic GFR-binding peptide

SEQ ID NO: 90828 - protein, 26 aa, Artificial Sequence
  Cyclic GFR-binding peptide
SNITMQIMNDKQQIILGEMSGMVVDR

SEQ ID NO: 90829 - protein, 23 aa, Artificial Sequence
  Cyclic GFR-binding peptide
VKTSNITMQIMDNGRVLLLGEMS

SEQ ID NO: 90830 - protein, 29 aa, Artificial Sequence
  Cyclic GFR-binding peptide
  MOD_RES (1), (1): Xaa is C or S
XVPARLSNITIQIMDAANNVVLGEMSDMV

SEQ ID NO: 90831 - protein, 33 aa, Artificial Sequence
  Cyclic GFR-binding peptide
  MOD_RES (3), (4): Xaa is C or S
GPXXTPTKMSNITMQIMNDKQQIILGEMSGMVV

SEQ ID NO: 90832 - protein, 40 aa, Artificial Sequence; identical to SEQ ID NO: 37060
  Cyclic GFR-binding peptide
  MOD_RES (5), (6), (37), (39): Xaa is C or S

SEQ ID NO: 90833 - protein, 32 aa, Artificial Sequence; identical to SEQ ID NO: 37061
  Cyclic GFR-binding peptide
  MOD_RES (32), (32): Xaa is C or S

SEQ ID NO: 90834 - protein, 32 aa, Artificial Sequence
  Cyclic GFR-binding peptide
  MOD_RES (4), (5): Xaa is C or S
AGPXXTPTKMSNITMQIMNDKQQIILGEMSGM

SEQ ID NO: 90835 - protein, 21 aa, Artificial Sequence
  Cyclic GFR-binding peptide
LSNITIQIMIGKTPKILGEMS

SEQ ID NO: 90836 - protein, 27 aa, Artificial Sequence
  Cyclic GFR-binding peptide
KTSNITMQIMDNGRVLLLGEMSMIVEE

SEQ ID NO: 90837 - protein, 33 aa, Artificial Sequence
  Cyclic GFR-binding peptide
  MOD_RES (31), (33): Xaa is C or S
PTKMSNITMQIMNDKQQIIIGEMSGMVVDRXGX

SEQ ID NO: 90838 - protein, 22 aa, Artificial Sequence
  Cyclic GFR-binding peptide
RLSNITIQIMDAANNVVLGEMS

SEQ ID NO: 90839 - protein, 31 aa, Artificial Sequence
  Cyclic GFR-binding peptide
  MOD_RES (3), (4): Xaa is C or S
PTXXVPTRLSNITIQIMDSANNVVIGEMSDM

SEQ ID NO: 90840 - protein, 37 aa, Artificial Sequence; identical to SEQ ID NO: 37065
  Cyclic GFR-binding peptide
  MOD_RES (2), (3), (35), (37): Xaa is C or S

SEQ ID NO: 90841 - protein, 33 aa, Artificial Sequence
  Cyclic GFR-binding peptide
  MOD_RES (3), (4): Xaa is C or S
STXXAPVKTSNITMQIMDNGRVLLLGEMSMIVE

SEQ ID NO: 90842 - protein, 26 aa, Artificial Sequence
  Cyclic GFR-binding peptide
  MOD_RES (26), (26): Xaa is C or S
SNITMQIMDNGRVLLLGEMSMIVEEX

SEQ ID NO: 90843 - protein, 26 aa, Artificial Sequence
  Cyclic GFR-binding peptide
SNITIQIMDSANNVVIGEMSDMVVES

SEQ ID NO: 90844 - protein, 27 aa, Artificial Sequence
  Cyclic GFR-binding peptide
  MOD_RES (1), (1): Xaa is C or S
XVPARLSNITIQIMDAANNVVLGEMSD

SEQ ID NO: 90845 - protein, 28 aa, Artificial Sequence
  Cyclic GFR-binding peptide
  MOD_RES (1), (2): Xaa is C or S
XXVPARLSNITIQIMDAANNVVLGEMSD

SEQ ID NO: 90846 - protein, 32 aa, Artificial Sequence
  Cyclic GFR-binding peptide
  MOD_RES (29), (31): Xaa is C or S
KLSNITVQIMDDSSNVILGEMSNMVVRSXGXH

SEQ ID NO: 90847 - protein, 33 aa, Artificial Sequence; identical to SEQ ID NO: 37073
  Cyclic GFR-binding peptide
  MOD_RES (1), (2), (33): Xaa is C or S

SEQ ID NO: 90848 - protein, 31 aa, Artificial Sequence; identical to SEQ ID NO: 37076
  Cyclic GFR-binding peptide
  MOD_RES (31), (31): Xaa is C or S

SEQ ID NO: 90849 - protein, 32 aa, Artificial Sequence; identical to SEQ ID NO: 37077
  Cyclic GFR-binding peptide
  MOD_RES (1), (32): Xaa is C or S

SEQ ID NO: 90850 - protein, 23 aa, Artificial Sequence
  Cyclic GFR-binding peptide
RLSNITIQIMDSANNVVLGEMSD

SEQ ID NO: 90851 - protein, 38 aa, Artificial Sequence; identical to SEQ ID NO: 37079
  Cyclic GFR-binding peptide
  MOD_RES (4), (5), (37): Xaa is C or S

SEQ ID NO: 90852 - protein, 37 aa, Artificial Sequence; identical to SEQ ID NO: 37080
  Cyclic GFR-binding peptide
  MOD_RES (2), (3), (34), (36): Xaa is C or S

SEQ ID NO: 90853 - protein, 21 aa, Artificial Sequence
  Cyclic GFR-binding peptide
SNITIQIMVGRKPKVLGEMSM

SEQ ID NO: 90854 - protein, 31 aa, Artificial Sequence
  Cyclic GFR-binding peptide
  MOD_RES (4), (5): Xaa is C or S
PKPXXAPTKLSNITVQIMDDSSNVILGEMSN

SEQ ID NO: 90855 - protein, 27 aa, Artificial Sequence
  Cyclic GFR-binding peptide
  MOD_RES (1), (1): Xaa is C or S
XAPVKTSNITMQIMDNGRVLLIGEMSM

SEQ ID NO: 90856 - protein, 31 aa, Artificial Sequence
  Cyclic GFR-binding peptide
  MOD_RES (3), (4): Xaa is C or S
ASXXVPARLSNITIQIMDAANNVVLGEMSDM

SEQ ID NO: 90857 - protein, 29 aa, Artificial Sequence
  Cyclic GFR-binding peptide
  MOD_RES (1), (2): Xaa is C or S
XXTPTKMSNITMQIMNDKQQIILGEMSGM

SEQ ID NO: 90858 - protein, 34 aa, Artificial Sequence
  Cyclic GFR-binding peptide
  MOD_RES (6), (7): Xaa is C or S
GSAGPXXTPTKMSNITMQIMNDKQQIILGEMSGM

SEQ ID NO: 90859 - protein, 42 aa, Artificial Sequence; identical to SEQ ID NO: 37086
  Cyclic GFR-binding peptide
  MOD_RES (6), (7), (39), (41): Xaa is C or S

SEQ ID NO: 90860 - protein, 30 aa, Artificial Sequence
  Cyclic GFR-binding peptide
  MOD_RES (30), (30): Xaa is C or S
TKMSNITMQIMNDKQQIILGEMSGMVVDRX

SEQ ID NO: 90861 - protein, 32 aa, Artificial Sequence
  Cyclic GFR-binding peptide
  MOD_RES (4), (5): Xaa is C or S
PPTXXVPTRLSNITIQIMDSANNVVIGEMSDM

SEQ ID NO: 90862 - protein, 32 aa, Artificial Sequence
  Cyclic GFR-binding peptide
  MOD_RES (29), (31): Xaa is C or S
VKTSNITMQIMDNGRVLLLGEMSMIVEEXGXL

SEQ ID NO: 90863 - protein, 23 aa, Artificial Sequence
  Cyclic GFR-binding peptide
ARLSNITIQIMDAANNVVLGEMS

SEQ ID NO: 90864 - protein, 28 aa, Artificial Sequence
  Cyclic GFR-binding peptide
VPARLSNITIQIMDAANNVVLGEMSDMV

SEQ ID NO: 90865 - protein, 29 aa, Artificial Sequence
  Cyclic GFR-binding peptide
  MOD_RES (1), (1): Xaa is C or S
XTPTKMSNITMQIMNDKQQIILGEMSGMV

SEQ ID NO: 90866 - protein, 31 aa, Artificial Sequence
  Cyclic GFR-binding peptide
  MOD_RES (28), (30): Xaa is C or S
LSNITIQIMDSANNVVLGEMSDMVVESXGXR

SEQ ID NO: 90867 - protein, 30 aa, Artificial Sequence
  Cyclic GFR-binding peptide
  MOD_RES (1), (2): Xaa is C or S
XXTPTKMSNITMQIMNDKQQIIIGEMSGMV

SEQ ID NO: 90868 - protein, 35 aa, Artificial Sequence; identical to SEQ ID NO: 37093
  Cyclic GFR-binding peptide
  MOD_RES (4), (5): Xaa is C or S

SEQ ID NO: 90869 - protein, 36 aa, Artificial Sequence; identical to SEQ ID NO: 37095
  Cyclic GFR-binding peptide
  MOD_RES (1), (2), (34), (36): Xaa is C or S

SEQ ID NO: 90870 - protein, 30 aa, Artificial Sequence
  Cyclic GFR-binding peptide
  MOD_RES (27), (29): Xaa is C or S
SNITMQIMNDKQQIILGEMSGMVVDRXGXS

SEQ ID NO: 90871 - protein, 28 aa, Artificial Sequence
  Cyclic GFR-binding peptide
PTKLSNITVQIMDDSSNVILGEMSNMVV

SEQ ID NO: 90872 - protein, 38 aa, Artificial Sequence; identical to SEQ ID NO: 37098
  Cyclic GFR-binding peptide
  MOD_RES (4), (5), (36), (38): Xaa is C or S

SEQ ID NO: 90873 - protein, 30 aa, Artificial Sequence
  Cyclic GFR-binding peptide
  MOD_RES (30), (30): Xaa is C or S
TKLSNITVQIMDDSSNVILGEMSNMVVRSX

SEQ ID NO: 90874 - protein, 29 aa, Artificial Sequence
  Cyclic GFR-binding peptide
  MOD_RES (28), (28): Xaa is C or S
DLSNITIQIMVGRTPKVLGEMSMVVKSXK

SEQ ID NO: 90875 - protein, 28 aa, Artificial Sequence
  Cyclic GFR-binding peptide
  MOD_RES (27), (27): Xaa is C or S
LSNITIQIMVGRTPKVLGEMSMVVKSXK

SEQ ID NO: 90876 - protein, 26 aa, Artificial Sequence
  Cyclic GFR-binding peptide
PTRLSNITIQIMDSANNVVIGEMSDM

SEQ ID NO: 90877 - protein, 38 aa, Artificial Sequence; identical to SEQ ID NO: 37104
  Cyclic GFR-binding peptide
  MOD_RES (5), (6), (38): Xaa is C or S

SEQ ID NO: 90878 - protein, 32 aa, Artificial Sequence
  Cyclic GFR-binding peptide
  MOD_RES (2), (3): Xaa is C or S
TXXVPTRLSNITIQIMDSANNVVIGEMSDMVV

SEQ ID NO: 90879 - protein, 26 aa, Artificial Sequence
  Cyclic GFR-binding peptide
VKTSNITMQIMDNGRVLLIGEMSMIV

SEQ ID NO: 90880 - protein, 35 aa, Artificial Sequence
  Cyclic GFR-binding peptide
  MOD_RES (6), (7): Xaa is C or S
ASASPXXVPQDLSNITIQIMVGRTPKVLGEMSMVV

SEQ ID NO: 90881 - protein, 32 aa, Artificial Sequence; identical to SEQ ID NO: 37110
  Cyclic GFR-binding peptide
  MOD_RES (32), (32): Xaa is C or S

SEQ ID NO: 90882 - protein, 32 aa, Artificial Sequence; identical to SEQ ID NO: 37111
  Cyclic GFR-binding peptide
  MOD_RES (1), (2): Xaa is C or S

SEQ ID NO: 90883 - protein, 29 aa, Artificial Sequence
  Cyclic GFR-binding peptide
SNITIQIMIGKTPKILGEMSAAAAAAAAA

SEQ ID NO: 90884 - protein, 31 aa, Artificial Sequence
  Cyclic GFR-binding peptide
  MOD_RES (30), (30): Xaa is C or S
PVKTSNITMQIMDNGRVLLIGEMSMIVEEXG

SEQ ID NO: 90885 - protein, 34 aa, Artificial Sequence; identical to SEQ ID NO: 37112
  Cyclic GFR-binding peptide
  MOD_RES (2), (3): Xaa is C or S

SEQ ID NO: 90886 - protein, 28 aa, Artificial Sequence
  Cyclic GFR-binding peptide
TRLSNITIQIMDSANNVVLGEMSDMVVE

SEQ ID NO: 90887 - protein, 29 aa, Artificial Sequence
  Cyclic GFR-binding peptide
SNITVQIMDDSSNVILGEMSAAAAAAAAA

SEQ ID NO: 90888 - protein, 31 aa, Artificial Sequence
  Cyclic GFR-binding peptide
  MOD_RES (28), (30): Xaa is C or S
LSNITVQIMDDSSNVILGEMSNMVVRSXGXH

SEQ ID NO: 90889 - protein, 26 aa, Artificial Sequence
  Cyclic GFR-binding peptide
RLSNITIQIMDAANNVVIGEMSDMVV

SEQ ID NO: 90890 - protein, 29 aa, Artificial Sequence
  Cyclic GFR-binding peptide
  MOD_RES (29), (29): Xaa is C or S
QALSNITIQIMVGRKPKVLGEMSMIVRSX

SEQ ID NO: 90891 - protein, 37 aa, Artificial Sequence; identical to SEQ ID NO: 37120
  Cyclic GFR-binding peptide
  MOD_RES (3), (4), (36): Xaa is C or S

SEQ ID NO: 90892 - protein, 32 aa, Artificial Sequence; identical to SEQ ID NO: 37126
  Cyclic GFR-binding peptide
  MOD_RES (1), (32): Xaa is C or S

SEQ ID NO: 90893 - protein, 31 aa, Artificial Sequence; identical to SEQ ID NO: 37129
  Cyclic GFR-binding peptide
  MOD_RES (31), (31): Xaa is C or S

SEQ ID NO: 90894 - protein, 40 aa, Artificial Sequence; identical to SEQ ID NO: 37132
  Cyclic GFR-binding peptide
  MOD_RES (5), (6), (38), (40): Xaa is C or S

SEQ ID NO: 90895 - protein, 31 aa, Artificial Sequence
  Cyclic GFR-binding peptide
  MOD_RES (4), (5): Xaa is C or S
PPTXXVPTRLSNITIQIMDSANNVVLGEMSD

SEQ ID NO: 90896 - protein, 30 aa, Artificial Sequence
  Cyclic GFR-binding peptide
  MOD_RES (4), (5): Xaa is C or S
PSTXXAPVKTSNITMQIMDNGRVLLLGEMS

SEQ ID NO: 90897 - protein, 34 aa, Artificial Sequence
  Cyclic GFR-binding peptide
  MOD_RES (4), (5): Xaa is C or S
ASPXXVPQDLSNITIQIMVGRTPKVLGEMSMVVK

SEQ ID NO: 90898 - protein, 31 aa, Artificial Sequence
  Cyclic GFR-binding peptide
  MOD_RES (1), (2): Xaa is C or S
XXVPTRLSNITIQIMDSANNVVLGEMSDMVV

SEQ ID NO: 90899 - protein, 33 aa, Artificial Sequence; identical to SEQ ID NO: 37141
  Cyclic GFR-binding peptide
  MOD_RES (1), (33): Xaa is C or S

SEQ ID NO: 90900 - protein, 38 aa, Artificial Sequence; identical to SEQ ID NO: 37143
  Cyclic GFR-binding peptide
  MOD_RES (3), (4), (36), (38): Xaa is C or S

SEQ ID NO: 90901 - protein, 29 aa, Artificial Sequence
  Cyclic GFR-binding peptide
  MOD_RES (26), (28): Xaa is C or S
SNITMQIMDNGRVLLIGEMSMIVEEXGXL

SEQ ID NO: 90902 - protein, 21 aa, Artificial Sequence
  Cyclic GFR-binding peptide
TSNITMQIMDNGRVLLLGEMS

SEQ ID NO: 90903 - protein, 24 aa, Artificial Sequence
  Cyclic GFR-binding peptide
TRLSNITIQIMDSANNVVIGEMSD

SEQ ID NO: 90904 - protein, 34 aa, Artificial Sequence; identical to SEQ ID NO: 37144
  Cyclic GFR-binding peptide
  MOD_RES (1), (2), (34): Xaa is C or S

SEQ ID NO: 90905 - protein, 27 aa, Artificial Sequence
  Cyclic GFR-binding peptide
QDLSNITIQIMVGRTPKVLGEMSMVVK

SEQ ID NO: 90906 - protein, 36 aa, Artificial Sequence; identical to SEQ ID NO: 37145
  Cyclic GFR-binding peptide
  MOD_RES (1), (33), (35): Xaa is C or S

SEQ ID NO: 90907 - protein, 29 aa, Artificial Sequence
  Cyclic GFR-binding peptide
  MOD_RES (26), (28): Xaa is C or S
SNITMQIMDNGRVLLLGEMSMIVEEXGXL

SEQ ID NO: 90908 - protein, 36 aa, Artificial Sequence; identical to SEQ ID NO: 37149
  Cyclic GFR-binding peptide
  MOD_RES (4), (5), (36): Xaa is C or S

SEQ ID NO: 90909 - protein, 23 aa, Artificial Sequence
  Cyclic GFR-binding peptide
SNITMQIMNDKQQIIIGEMSGMV

SEQ ID NO: 90910 - protein, 33 aa, Artificial Sequence
  Cyclic GFR-binding peptide
  MOD_RES (4), (5): Xaa is C or S
ASPXXVSQDLSNITIQIMIGKTPKILGEMSMIV

SEQ ID NO: 90911 - protein, 30 aa, Artificial Sequence
  Cyclic GFR-binding peptide
  MOD_RES (28), (30): Xaa is C or S
ALSNITIQIMVGRKPKVLGEMSMIVRSXKX

SEQ ID NO: 90912 - protein, 24 aa, Artificial Sequence
  Cyclic GFR-binding peptide
SNITMQIMDNGRVLLIGEMSMIVE

SEQ ID NO: 90913 - protein, 31 aa, Artificial Sequence
  Cyclic GFR-binding peptide
  MOD_RES (28), (30): Xaa is C or S
LSNITIQIMDAANNVVLGEMSDMVVEAXGXR

SEQ ID NO: 90914 - protein, 30 aa, Artificial Sequence; identical to SEQ ID NO: 1118
  Cyclic GFR-binding peptide

SEQ ID NO: 90915 - protein, 33 aa, Artificial Sequence; identical to SEQ ID NO: 37164
  Cyclic GFR-binding peptide
  MOD_RES (1), (2): Xaa is C or S

SEQ ID NO: 90916 - protein, 33 aa, Artificial Sequence
  Cyclic GFR-binding peptide
  MOD_RES (31), (33): Xaa is C or S
PTKMSNITMQIMNDKQQIILGEMSGMVVDRXGX

SEQ ID NO: 90917 - protein, 28 aa, Artificial Sequence
  Cyclic GFR-binding peptide
  MOD_RES (2), (3): Xaa is C or S
SXXVPARLSNITIQIMDAANNVVIGEMS

SEQ ID NO: 90918 - protein, 38 aa, Artificial Sequence; identical to SEQ ID NO: 37166
  Cyclic GFR-binding peptide
  MOD_RES (5), (6), (38): Xaa is C or S

SEQ ID NO: 90919 - protein, 36 aa, Artificial Sequence; identical to SEQ ID NO: 37168
  Cyclic GFR-binding peptide
  MOD_RES (1), (2), (33), (35): Xaa is C or S

SEQ ID NO: 90920 - protein, 26 aa, Artificial Sequence
  Cyclic GFR-binding peptide
PVKTSNITMQIMDNGRVLLLGEMSMI

SEQ ID NO: 90921 - protein, 29 aa, Artificial Sequence
  Cyclic GFR-binding peptide
  MOD_RES (1), (2): Xaa is C or S
XXAPVKTSNITMQIMDNGRVLLIGEMSMI

SEQ ID NO: 90922 - protein, 35 aa, Artificial Sequence
  Cyclic GFR-binding peptide
  MOD_RES (6), (7): Xaa is C or S
AAPASXXVPARLSNITIQIMDAANNVVIGEMSDMV

SEQ ID NO: 90923 - protein, 26 aa, Artificial Sequence
  Cyclic GFR-binding peptide
PARLSNITIQIMDAANNVVIGEMSDM

SEQ ID NO: 90924 - protein, 30 aa, Artificial Sequence
  Cyclic GFR-binding peptide
  MOD_RES (4), (5): Xaa is C or S
PPTXXVPTRLSNITIQIMDSANNVVLGEMS

SEQ ID NO: 90925 - protein, 24 aa, Artificial Sequence
  Cyclic GFR-binding peptide
QDLSNITIQIMVGRTPKVLGEMSM

SEQ ID NO: 90926 - protein, 24 aa, Artificial Sequence
  Cyclic GFR-binding peptide
RLSNITIQIMDSANNVVLGEMSDM

SEQ ID NO: 90927 - protein, 35 aa, Artificial Sequence
  Cyclic GFR-binding peptide
  MOD_RES (6), (7): Xaa is C or S
ASAAPXXVPQALSNITIQIMVGRKPKVLGEMSMIV

SEQ ID NO: 90928 - protein, 32 aa, Artificial Sequence; identical to SEQ ID NO: 37172
  Cyclic GFR-binding peptide
  MOD_RES (1), (32): Xaa is C or S

SEQ ID NO: 90929 - protein, 25 aa, Artificial Sequence
  Cyclic GFR-binding peptide
PQDLSNITIQIMVGRTPKVLGEMSM

SEQ ID NO: 90930 - protein, 27 aa, Artificial Sequence
  Cyclic GFR-binding peptide
TKMSNITMQIMNDKQQIILGEMSGMVV

SEQ ID NO: 90931 - protein, 31 aa, Artificial Sequence
  Cyclic GFR-binding peptide
  MOD_RES (3), (4): Xaa is C or S
APXXVPQALSNITIQIMVGRKPKVLGEMSMI

SEQ ID NO: 90932 - protein, 31 aa, Artificial Sequence
  Cyclic GFR-binding peptide
  MOD_RES (4), (5): Xaa is C or S
PSTXXAPVKTSNITMQIMDNGRVLLIGEMSM

SEQ ID NO: 90933 - protein, 34 aa, Artificial Sequence; identical to SEQ ID NO: 37178
  Cyclic GFR-binding peptide
  MOD_RES (1), (2), (34): Xaa is C or S

SEQ ID NO: 90934 - protein, 34 aa, Artificial Sequence; identical to SEQ ID NO: 37180
  Cyclic GFR-binding peptide
  MOD_RES (1), (2), (34): Xaa is C or S

SEQ ID NO: 90935 - protein, 32 aa, Artificial Sequence
  Cyclic GFR-binding peptide
  MOD_RES (2), (3): Xaa is C or S
SXXVPARLSNITIQIMDAANNVVLGEMSDMVV

SEQ ID NO: 90936 - protein, 33 aa, Artificial Sequence; identical to SEQ ID NO: 37181
  Cyclic GFR-binding peptide
  MOD_RES (1), (33): Xaa is C or S

SEQ ID NO: 90937 - protein, 22 aa, Artificial Sequence
  Cyclic GFR-binding peptide
SNITIQIMVGRKPKVLGEMSMI

SEQ ID NO: 90938 - protein, 33 aa, Artificial Sequence; identical to SEQ ID NO: 37186
  Cyclic GFR-binding peptide
  MOD_RES (1), (33): Xaa is C or S

SEQ ID NO: 90939 - protein, 32 aa, Artificial Sequence; identical to SEQ ID NO: 37189
  Cyclic GFR-binding peptide
  MOD_RES (32), (32): Xaa is C or S

SEQ ID NO: 90940 - protein, 39 aa, Artificial Sequence; identical to SEQ ID NO: 37190
  Cyclic GFR-binding peptide
  MOD_RES (4), (5), (37), (39): Xaa is C or S

SEQ ID NO: 90941 - protein, 39 aa, Artificial Sequence; identical to SEQ ID NO: 37191
  Cyclic GFR-binding peptide
  MOD_RES (3), (4), (36), (38): Xaa is C or S

SEQ ID NO: 90942 - protein, 30 aa, Artificial Sequence
  Cyclic GFR-binding peptide
  MOD_RES (3), (4): Xaa is C or S
GPXXTPTKMSNITMQIMNDKQQIILGEMSG

SEQ ID NO: 90943 - protein, 25 aa, Artificial Sequence
  Cyclic GFR-binding peptide
TKMSNITMQIMNDKQQIILGEMSGM

SEQ ID NO: 90944 - protein, 33 aa, Artificial Sequence
  Cyclic GFR-binding peptide
  MOD_RES (5), (6): Xaa is C or S
VPSTXXAPVKTSNITMQIMDNGRVLLIGEMSMI

SEQ ID NO: 90945 - protein, 31 aa, Artificial Sequence
  Cyclic GFR-binding peptide
  MOD_RES (4), (5): Xaa is C or S
AGPXXTPTKMSNITMQIMNDKQQIIIGEMSG

SEQ ID NO: 90946 - protein, 28 aa, Artificial Sequence
  Cyclic GFR-binding peptide
  MOD_RES (2), (3): Xaa is C or S
TXXAPVKTSNITMQIMDNGRVLLIGEMS

SEQ ID NO: 90947 - protein, 37 aa, Artificial Sequence; identical to SEQ ID NO: 37196
  Cyclic GFR-binding peptide
  MOD_RES (5), (6): Xaa is C or S

SEQ ID NO: 90948 - protein, 25 aa, Artificial Sequence
  Cyclic GFR-binding peptide
QDLSNITIQIMVGRTPKVLGEMSMV

SEQ ID NO: 90949 - protein, 38 aa, Artificial Sequence; identical to SEQ ID NO: 37198
  Cyclic GFR-binding peptide
  MOD_RES (6), (7): Xaa is C or S

SEQ ID NO: 90950 - protein, 36 aa, Artificial Sequence
  Cyclic GFR-binding peptide
  MOD_RES (6), (7): Xaa is C or S
HVPKPXXAPTKLSNITVQIMDDSSNVIIGEMSNMVV

SEQ ID NO: 90951 - protein, 30 aa, Artificial Sequence
  Cyclic GFR-binding peptide
  MOD_RES (29), (29): Xaa is C or S
QDLSNITIQIMIGKTPKILGEMSMIVKSXK

SEQ ID NO: 90952 - protein, 38 aa, Artificial Sequence; identical to SEQ ID NO: 37201
  Cyclic GFR-binding peptide
  MOD_RES (2), (3), (35), (37): Xaa is C or S

SEQ ID NO: 90953 - protein, 34 aa, Artificial Sequence; identical to SEQ ID NO: 37204
  Cyclic GFR-binding peptide
  MOD_RES (1), (2), (34): Xaa is C or S

SEQ ID NO: 90954 - protein, 29 aa, Artificial Sequence
  Cyclic GFR-binding peptide
VPARLSNITIQIMDAANNVVIGEMSDMVV

SEQ ID NO: 90955 - protein, 33 aa, Artificial Sequence; identical to SEQ ID NO: 37209
  Cyclic GFR-binding peptide
  MOD_RES (1), (33): Xaa is C or S

SEQ ID NO: 90956 - protein, 30 aa, Artificial Sequence
  Cyclic GFR-binding peptide
  MOD_RES (1), (2): Xaa is C or S
XXAPVKTSNITMQIMDNGRVLLLGEMSMIV

SEQ ID NO: 90957 - protein, 33 aa, Artificial Sequence
  Cyclic GFR-binding peptide
  MOD_RES (31), (33): Xaa is C or S
PTRLSNITIQIMDSANNVVLGEMSDMVVESXGX

SEQ ID NO: 90958 - protein, 37 aa, Artificial Sequence; identical to SEQ ID NO: 37210
  Cyclic GFR-binding peptide
  MOD_RES (3), (4), (35), (37): Xaa is C or S

SEQ ID NO: 90959 - protein, 35 aa, Artificial Sequence; identical to SEQ ID NO: 37213
  Cyclic GFR-binding peptide
  MOD_RES (32), (34): Xaa is C or S

SEQ ID NO: 90960 - protein, 25 aa, Artificial Sequence
  Cyclic GFR-binding peptide
LSNITIQIMVGRTPKVLGEMSMVVK

SEQ ID NO: 90961 - protein, 34 aa, Artificial Sequence
  Cyclic GFR-binding peptide
  MOD_RES (6), (7): Xaa is C or S
ASASPXXVSQDLSNITIQIMIGKTPKILGEMSMI

SEQ ID NO: 90962 - protein, 27 aa, Artificial Sequence
  Cyclic GFR-binding peptide
SQDLSNITIQIMIGKTPKILGEMSMIV

SEQ ID NO: 90963 - protein, 29 aa, Artificial Sequence
  Cyclic GFR-binding peptide
  MOD_RES (29), (29): Xaa is C or S
VKTSNITMQIMDNGRVLLLGEMSMIVEEX

SEQ ID NO: 90964 - protein, 24 aa, Artificial Sequence
  Cyclic GFR-binding peptide
SNITIQIMDSANNVVLGEMSDMVV

SEQ ID NO: 90965 - protein, 27 aa, Artificial Sequence
  Cyclic GFR-binding peptide
TRLSNITIQIMDSANNVVLGEMSDMVV

SEQ ID NO: 90966 - protein, 25 aa, Artificial Sequence
  Cyclic GFR-binding peptide
LSNITVQIMDDSSNVILGEMSNMVV

SEQ ID NO: 90967 - protein, 27 aa, Artificial Sequence
  Cyclic GFR-binding peptide
PARLSNITIQIMDAANNVVIGEMSDMV

SEQ ID NO: 90968 - protein, 29 aa, Artificial Sequence
  Cyclic GFR-binding peptide
PVKTSNITMQIMDNGRVLLIGEMSMIVEE

SEQ ID NO: 90969 - protein, 26 aa, Artificial Sequence
  Cyclic GFR-binding peptide
APVKTSNITMQIMDNGRVLLIGEMSM

SEQ ID NO: 90970 - protein, 28 aa, Artificial Sequence
  Cyclic GFR-binding peptide
VSQDLSNITIQIMIGKTPKILGEMSMIV

SEQ ID NO: 90971 - protein, 33 aa, Artificial Sequence
  Cyclic GFR-binding peptide
  MOD_RES (30), (32): Xaa is C or S
TKMSNITMQIMNDKQQIIIGEMSGMVVDRXGXS

SEQ ID NO: 90972 - protein, 25 aa, Artificial Sequence
  Cyclic GFR-binding peptide
PTRLSNITIQIMDSANNVVIGEMSD

SEQ ID NO: 90973 - protein, 30 aa, Artificial Sequence
  Cyclic GFR-binding peptide
  MOD_RES (28), (30): Xaa is C or S
LSNITIQIMDSANNVVLGEMSDMVVESXGX

SEQ ID NO: 90974 - protein, 39 aa, Artificial Sequence; identical to SEQ ID NO: 37226
  Cyclic GFR-binding peptide
  MOD_RES (4), (5), (37), (39): Xaa is C or S

SEQ ID NO: 90975 - protein, 34 aa, Artificial Sequence
  Cyclic GFR-binding peptide
  MOD_RES (6), (7): Xaa is C or S
ASASPXXVPQDLSNITIQIMVGRTPKVLGEMSMV

SEQ ID NO: 90976 - protein, 37 aa, Artificial Sequence; identical to SEQ ID NO: 37231
  Cyclic GFR-binding peptide
  MOD_RES (6), (7): Xaa is C or S

SEQ ID NO: 90977 - protein, 28 aa, Artificial Sequence
  Cyclic GFR-binding peptide
VPARLSNITIQIMDAANNVVIGEMSDMV

SEQ ID NO: 90978 - protein, 31 aa, Artificial Sequence
  Cyclic GFR-binding peptide
  MOD_RES (30), (30): Xaa is C or S
PQDLSNITIQIMVGRTPKVLGEMSMVVKSXK

SEQ ID NO: 90979 - protein, 37 aa, Artificial Sequence; identical to SEQ ID NO: 36159
  Cyclic GFR-binding peptide
  MOD_RES (6), (7): Xaa is C or S

SEQ ID NO: 90980 - protein, 30 aa, Artificial Sequence
  Cyclic GFR-binding peptide
  MOD_RES (2), (3): Xaa is C or S
TXXVPTRLSNITIQIMDSANNVVIGEMSDM

SEQ ID NO: 90981 - protein, 27 aa, Artificial Sequence
  Cyclic GFR-binding peptide
  MOD_RES (1), (1): Xaa is C or S
XTPTKMSNITMQIMNDKQQIILGEMSG

SEQ ID NO: 90982 - protein, 29 aa, Artificial Sequence
  Cyclic GFR-binding peptide
  MOD_RES (27), (29): Xaa is C or S
SNITMQIMNDKQQIILGEMSGMVVDRXGX

SEQ ID NO: 90983 - protein, 29 aa, Artificial Sequence
  Cyclic GFR-binding peptide
  MOD_RES (1), (1): Xaa is C or S
XVPTRLSNITIQIMDSANNVVIGEMSDMV

SEQ ID NO: 90984 - protein, 29 aa, Artificial Sequence
  Cyclic GFR-binding peptide
TRLSNITIQIMDSANNVVIGEMSDMVVES

SEQ ID NO: 90985 - protein, 31 aa, Artificial Sequence; identical to SEQ ID NO: 36170
  Cyclic GFR-binding peptide
  MOD_RES (1), (1): Xaa is C or S

SEQ ID NO: 90986 - protein, 23 aa, Artificial Sequence
  Cyclic GFR-binding peptide
LSNITIQIMDAANNVVLGEMSDM

SEQ ID NO: 90987 - protein, 28 aa, Artificial Sequence
  Cyclic GFR-binding peptide
  MOD_RES (2), (3): Xaa is C or S
PXXAPTKLSNITVQIMDDSSNVILGEMS

SEQ ID NO: 90988 - protein, 29 aa, Artificial Sequence
  Cyclic GFR-binding peptide
  MOD_RES (28), (28): Xaa is C or S
KTSNITMQIMDNGRVLLLGEMSMIVEEXG

SEQ ID NO: 90989 - protein, 30 aa, Artificial Sequence; identical to SEQ ID NO: 36172
  Cyclic GFR-binding peptide

SEQ ID NO: 90990 - protein, 28 aa, Artificial Sequence
  Cyclic GFR-binding peptide
ARLSNITIQIMDAANNVVLGEMSDMVVE

SEQ ID NO: 90991 - protein, 36 aa, Artificial Sequence; identical to SEQ ID NO: 36173
  Cyclic GFR-binding peptide
  MOD_RES (1), (2), (33), (35): Xaa is C or S

SEQ ID NO: 90992 - protein, 35 aa, Artificial Sequence; identical to SEQ ID NO: 36174
  Cyclic GFR-binding peptide
  MOD_RES (3), (4), (35): Xaa is C or S

SEQ ID NO: 90993 - protein, 32 aa, Artificial Sequence; identical to SEQ ID NO: 36178
  Cyclic GFR-binding peptide
  MOD_RES (32), (32): Xaa is C or S

SEQ ID NO: 90994 - protein, 26 aa, Artificial Sequence
  Cyclic GFR-binding peptide
MSNITMQIMNDKQQIIIGEMSGMVVD

SEQ ID NO: 90995 - protein, 27 aa, Artificial Sequence
  Cyclic GFR-binding peptide
  MOD_RES (1), (2): Xaa is C or S
XXVPQDLSNITIQIMVGRTPKVLGEMS

SEQ ID NO: 90996 - protein, 29 aa, Artificial Sequence
  Cyclic GFR-binding peptide
  MOD_RES (26), (28): Xaa is C or S
SNITIQIMVGRKPKVLGEMSMIVRSXKXS

SEQ ID NO: 90997 - protein, 36 aa, Artificial Sequence; identical to SEQ ID NO: 36181
  Cyclic GFR-binding peptide
  MOD_RES (1), (2), (34), (36): Xaa is C or S

SEQ ID NO: 90998 - protein, 25 aa, Artificial Sequence
  Cyclic GFR-binding peptide
TKLSNITVQIMDDSSNVILGEMSNM

SEQ ID NO: 90999 - protein, 29 aa, Artificial Sequence
  Cyclic GFR-binding peptide
  MOD_RES (3), (4): Xaa is C or S
ASXXVPARLSNITIQIMDAANNVVIGEMS

SEQ ID NO: 91000 - protein, 25 aa, Artificial Sequence
  Cyclic GFR-binding peptide
TRLSNITIQIMDSANNVVLGEMSDM

SEQ ID NO: 91001 - protein, 37 aa, Artificial Sequence; identical to SEQ ID NO: 36184
  Cyclic GFR-binding peptide
  MOD_RES (2), (3), (34), (36): Xaa is C or S

SEQ ID NO: 91002 - protein, 29 aa, Artificial Sequence
  Cyclic GFR-binding peptide
APVKTSNITMQIMDNGRVLLIGEMSMIVE

SEQ ID NO: 91003 - protein, 32 aa, Artificial Sequence
  Cyclic GFR-binding peptide
  MOD_RES (5), (6): Xaa is C or S
VPKPXXAPTKLSNITVQIMDDSSNVILGEMSN

SEQ ID NO: 91004 - protein, 34 aa, Artificial Sequence; identical to SEQ ID NO: 36192
  Cyclic GFR-binding peptide
  MOD_RES (1), (32), (34): Xaa is C or S

SEQ ID NO: 91005 - protein, 41 aa, Artificial Sequence; identical to SEQ ID NO: 36194
  Cyclic GFR-binding peptide
  MOD_RES (5), (6), (38), (40): Xaa is C or S

SEQ ID NO: 91006 - protein, 35 aa, Artificial Sequence; identical to SEQ ID NO: 36195
  Cyclic GFR-binding peptide
  MOD_RES (1), (2), (33), (35): Xaa is C or S

SEQ ID NO: 91007 - protein, 23 aa, Artificial Sequence
  Cyclic GFR-binding peptide
RLSNITIQIMDAANNVVLGEMSD

SEQ ID NO: 91008 - protein, 28 aa, Artificial Sequence
  Cyclic GFR-binding peptide
  MOD_RES (27), (27): Xaa is C or S
SNITIQIMDSANNVVIGEMSDMVVESXG

SEQ ID NO: 91009 - protein, 35 aa, Artificial Sequence; identical to SEQ ID NO: 36199
  Cyclic GFR-binding peptide
  MOD_RES (1), (33), (35): Xaa is C or S

SEQ ID NO: 91010 - protein, 28 aa, Artificial Sequence
  Cyclic GFR-binding peptide
  MOD_RES (28), (28): Xaa is C or S
LSNITIQIMDSANNVVLGEMSDMVVESX

SEQ ID NO: 91011 - protein, 29 aa, Artificial Sequence
  Cyclic GFR-binding peptide
  MOD_RES (27), (29): Xaa is C or S
TSNITMQIMDNGRVLLLGEMSMIVEEXGX

SEQ ID NO: 91012 - protein, 29 aa, Artificial Sequence
  Cyclic GFR-binding peptide
  MOD_RES (27), (29): Xaa is C or S
LSNITIQIMVGRKPKVLGEMSMIVRSXKX

SEQ ID NO: 91013 - protein, 24 aa, Artificial Sequence
  Cyclic GFR-binding peptide
SNITIQIMVGRTPKVLGEMSMVVK

SEQ ID NO: 91014 - protein, 31 aa, Artificial Sequence
  Cyclic GFR-binding peptide
  MOD_RES (3), (4): Xaa is C or S
PTXXVPTRLSNITIQIMDSANNVVLGEMSDM

SEQ ID NO: 91015 - protein, 39 aa, Artificial Sequence; identical to SEQ ID NO: 36214
  Cyclic GFR-binding peptide
  MOD_RES (5), (6), (38): Xaa is C or S

SEQ ID NO: 91016 - protein, 35 aa, Artificial Sequence; identical to SEQ ID NO: 36215
  Cyclic GFR-binding peptide
  MOD_RES (1), (33), (35): Xaa is C or S

SEQ ID NO: 91017 - protein, 39 aa, Artificial Sequence; identical to SEQ ID NO: 36216
  Cyclic GFR-binding peptide
  MOD_RES (5), (6), (38): Xaa is C or S

SEQ ID NO: 91018 - protein, 30 aa, Artificial Sequence; identical to SEQ ID NO: 36219
  Cyclic GFR-binding peptide

SEQ ID NO: 91019 - protein, 29 aa, Artificial Sequence
  Cyclic GFR-binding peptide
  MOD_RES (2), (3): Xaa is C or S
TXXAPVKTSNITMQIMDNGRVLLLGEMSM

SEQ ID NO: 91020 - protein, 35 aa, Artificial Sequence; identical to SEQ ID NO: 36221
  Cyclic GFR-binding peptide
  MOD_RES (1), (2), (34): Xaa is C or S

SEQ ID NO: 91021 - protein, 23 aa, Artificial Sequence
  Cyclic GFR-binding peptide
TRLSNITIQIMDSANNVVIGEMS

SEQ ID NO: 91022 - protein, 26 aa, Artificial Sequence
  Cyclic GFR-binding peptide
TKMSNITMQIMNDKQQIILGEMSGMV

SEQ ID NO: 91023 - protein, 24 aa, Artificial Sequence
  Cyclic GFR-binding peptide
MSNITMQIMNDKQQIILGEMSGMV

SEQ ID NO: 91024 - protein, 28 aa, Artificial Sequence
  Cyclic GFR-binding peptide
  MOD_RES (2), (3): Xaa is C or S
TXXVPTRLSNITIQIMDSANNVVLGEMS

SEQ ID NO: 91025 - protein, 38 aa, Artificial Sequence; identical to SEQ ID NO: 36228
  Cyclic GFR-binding peptide
  MOD_RES (2), (3), (35), (37): Xaa is C or S

SEQ ID NO: 91026 - protein, 30 aa, Artificial Sequence
  Cyclic GFR-binding peptide
  MOD_RES (30), (30): Xaa is C or S
PQDLSNITIQIMVGRTPKVLGEMSMVVKSX

SEQ ID NO: 91027 - protein, 31 aa, Artificial Sequence
  Cyclic GFR-binding peptide
  MOD_RES (29), (31): Xaa is C or S
RLSNITIQIMDAANNVVIGEMSDMVVEAXGX

SEQ ID NO: 91028 - protein, 24 aa, Artificial Sequence
  Cyclic GFR-binding peptide
DLSNITIQIMVGRTPKVLGEMSMV

SEQ ID NO: 91029 - protein, 34 aa, Artificial Sequence
  Cyclic GFR-binding peptide
  MOD_RES (4), (5): Xaa is C or S
PSTXXAPVKTSNITMQIMDNGRVLLLGEMSMIVE

SEQ ID NO: 91030 - protein, 28 aa, Artificial Sequence
  Cyclic GFR-binding peptide
KLSNITVQIMDDSSNVILGEMSNMVVRS

SEQ ID NO: 91031 - protein, 29 aa, Artificial Sequence
  Cyclic GFR-binding peptide
  MOD_RES (1), (1): Xaa is C or S
XVSQDLSNITIQIMIGKTPKILGEMSMIV

SEQ ID NO: 91032 - protein, 25 aa, Artificial Sequence
  Cyclic GFR-binding peptide
SNITIQIMDSANNVVLGEMSDMVVE

SEQ ID NO: 91033 - protein, 28 aa, Artificial Sequence
  Cyclic GFR-binding peptide
VKTSNITMQIMDNGRVLLLGEMSMIVEE

SEQ ID NO: 91034 - protein, 38 aa, Artificial Sequence; identical to SEQ ID NO: 36240
  Cyclic GFR-binding peptide
  MOD_RES (3), (4), (36), (38): Xaa is C or S

SEQ ID NO: 91035 - protein, 28 aa, Artificial Sequence
  Cyclic GFR-binding peptide
  MOD_RES (27), (27): Xaa is C or S
SNITMQIMNDKQQIILGEMSGMVVDRXG

SEQ ID NO: 91036 - protein, 30 aa, Artificial Sequence
  Cyclic GFR-binding peptide
  MOD_RES (1), (1): Xaa is C or S
XAPVKTSNITMQIMDNGRVLLIGEMSMIVE

SEQ ID NO: 91037 - protein, 27 aa, Artificial Sequence
  Cyclic GFR-binding peptide
  MOD_RES (26), (26): Xaa is C or S
SNITMQIMDNGRVLLLGEMSMIVEEXG

SEQ ID NO: 91038 - protein, 32 aa, Artificial Sequence
  Cyclic GFR-binding peptide
  MOD_RES (3), (4): Xaa is C or S
ASXXVPARLSNITIQIMDAANNVVLGEMSDMV

SEQ ID NO: 91039 - protein, 27 aa, Artificial Sequence
  Cyclic GFR-binding peptide
  MOD_RES (1), (2): Xaa is C or S
XXVPTRLSNITIQIMDSANNVVIGEMS

SEQ ID NO: 91040 - protein, 40 aa, Artificial Sequence; identical to SEQ ID NO: 36241
  Cyclic GFR-binding peptide
  MOD_RES (5), (6), (38), (40): Xaa is C or S

SEQ ID NO: 91041 - protein, 26 aa, Artificial Sequence
  Cyclic GFR-binding peptide
SNITIQIMDSANNVVLGEMSDMVVES

SEQ ID NO: 91042 - protein, 38 aa, Artificial Sequence; identical to SEQ ID NO: 36242
  Cyclic GFR-binding peptide
  MOD_RES (4), (5), (37): Xaa is C or S

SEQ ID NO: 91043 - protein, 35 aa, Artificial Sequence; identical to SEQ ID NO: 36243
  Cyclic GFR-binding peptide
  MOD_RES (1), (33), (35): Xaa is C or S

SEQ ID NO: 91044 - protein, 25 aa, Artificial Sequence
  Cyclic GFR-binding peptide
VPTRLSNITIQIMDSANNVVLGEMS

SEQ ID NO: 91045 - protein, 32 aa, Artificial Sequence
  Cyclic GFR-binding peptide
  MOD_RES (31), (31): Xaa is C or S
PARLSNITIQIMDAANNVVLGEMSDMVVEAXG

SEQ ID NO: 91046 - protein, 31 aa, Artificial Sequence
  Cyclic GFR-binding peptide
  MOD_RES (29), (31): Xaa is C or S
QDLSNITIQIMIGKTPKILGEMSMIVKSXKX

SEQ ID NO: 91047 - protein, 23 aa, Artificial Sequence
  Cyclic GFR-binding peptide
TKMSNITMQIMNDKQQIILGEMS

SEQ ID NO: 91048 - protein, 33 aa, Artificial Sequence
  Cyclic GFR-binding peptide
  MOD_RES (5), (6): Xaa is C or S
SAGPXXTPTKMSNITMQIMNDKQQIILGEMSGM

SEQ ID NO: 91049 - protein, 39 aa, Artificial Sequence; identical to SEQ ID NO: 36253
  Cyclic GFR-binding peptide
  MOD_RES (6), (7), (39): Xaa is C or S

SEQ ID NO: 91050 - protein, 30 aa, Artificial Sequence
  Cyclic GFR-binding peptide
  MOD_RES (27), (29): Xaa is C or S
LSNITIQIMVGRTPKVLGEMSMVVKSXKXS

SEQ ID NO: 91051 - protein, 20 aa, Artificial Sequence
  Cyclic GFR-binding peptide
SNITIQIMDAANNVVIGEMS

SEQ ID NO: 91052 - protein, 36 aa, Artificial Sequence; identical to SEQ ID NO: 36255
  Cyclic GFR-binding peptide
  MOD_RES (3), (4), (36): Xaa is C or S

SEQ ID NO: 91053 - protein, 26 aa, Artificial Sequence
  Cyclic GFR-binding peptide
  MOD_RES (1), (1): Xaa is C or S
XVPARLSNITIQIMDAANNVVIGEMS

SEQ ID NO: 91054 - protein, 25 aa, Artificial Sequence
  Cyclic GFR-binding peptide
SNITVQIMDDSSNVILGEMSNMVVR

SEQ ID NO: 91055 - protein, 29 aa, Artificial Sequence
  Cyclic GFR-binding peptide
PARLSNITIQIMDAANNVVLGEMSDMVVE

SEQ ID NO: 91056 - protein, 35 aa, Artificial Sequence; identical to SEQ ID NO: 36259
  Cyclic GFR-binding peptide
  MOD_RES (3), (4): Xaa is C or S

SEQ ID NO: 91057 - protein, 34 aa, Artificial Sequence
  Cyclic GFR-binding peptide
  MOD_RES (4), (5): Xaa is C or S
PPTXXVPTRLSNITIQIMDSANNVVIGEMSDMVV

SEQ ID NO: 91058 - protein, 30 aa, Artificial Sequence
  Cyclic GFR-binding peptide
  MOD_RES (28), (30): Xaa is C or S
MSNITMQIMNDKQQIILGEMSGMVVDRXGX

SEQ ID NO: 91059 - protein, 20 aa, Artificial Sequence
  Cyclic GFR-binding peptide
SNITIQIMDSANNVVLGEMS

SEQ ID NO: 91060 - protein, 39 aa, Artificial Sequence; identical to SEQ ID NO: 36271
  Cyclic GFR-binding peptide
  MOD_RES (6), (7), (39): Xaa is C or S

SEQ ID NO: 91061 - protein, 38 aa, Artificial Sequence; identical to SEQ ID NO: 36273
  Cyclic GFR-binding peptide
  MOD_RES (4), (5), (36), (38): Xaa is C or S

SEQ ID NO: 91062 - protein, 36 aa, Artificial Sequence; identical to SEQ ID NO: 36274
  Cyclic GFR-binding peptide
  MOD_RES (1), (2), (34), (36): Xaa is C or S

SEQ ID NO: 91063 - protein, 31 aa, Artificial Sequence
  Cyclic GFR-binding peptide
  MOD_RES (1), (2): Xaa is C or S
XXAPTKLSNITVQIMDDSSNVILGEMSNMVV

SEQ ID NO: 91064 - protein, 28 aa, Artificial Sequence
  Cyclic GFR-binding peptide
  MOD_RES (1), (2): Xaa is C or S
XXVPQALSNITIQIMVGRKPKVLGEMSM

SEQ ID NO: 91065 - protein, 36 aa, Artificial Sequence; identical to SEQ ID NO: 36275
  Cyclic GFR-binding peptide
  MOD_RES (3), (4), (36): Xaa is C or S

SEQ ID NO: 91066 - protein, 35 aa, Artificial Sequence; identical to SEQ ID NO: 36276
  Cyclic GFR-binding peptide
  MOD_RES (4), (5): Xaa is C or S

SEQ ID NO: 91067 - protein, 27 aa, Artificial Sequence
  Cyclic GFR-binding peptide
  MOD_RES (27), (27): Xaa is C or S
LSNITIQIMIGKTPKILGEMSMIVKSX

SEQ ID NO: 91068 - protein, 28 aa, Artificial Sequence
  Cyclic GFR-binding peptide
APTKLSNITVQIMDDSSNVILGEMSNMV

SEQ ID NO: 91069 - protein, 32 aa, Artificial Sequence
  Cyclic GFR-binding peptide
  MOD_RES (2), (3): Xaa is C or S
TXXVPTRLSNITIQIMDSANNVVLGEMSDMVV

SEQ ID NO: 91070 - protein, 34 aa, Artificial Sequence
  Cyclic GFR-binding peptide
  MOD_RES (6), (7): Xaa is C or S
HVPKPXXAPTKLSNITVQIMDDSSNVIIGEMSNM

SEQ ID NO: 91071 - protein, 31 aa, Artificial Sequence
  Cyclic GFR-binding peptide
  MOD_RES (31), (31): Xaa is C or S
PTRLSNITIQIMDSANNVVLGEMSDMVVESX

SEQ ID NO: 91072 - protein, 34 aa, Artificial Sequence
  Cyclic GFR-binding peptide
  MOD_RES (4), (5): Xaa is C or S
AGPXXTPTKMSNITMQIMNDKQQIILGEMSGMVV

SEQ ID NO: 91073 - protein, 31 aa, Artificial Sequence
  Cyclic GFR-binding peptide
  MOD_RES (29), (31): Xaa is C or S
KMSNITMQIMNDKQQIIIGEMSGMVVDRXGX

SEQ ID NO: 91074 - protein, 25 aa, Artificial Sequence
  Cyclic GFR-binding peptide
DLSNITIQIMVGRTPKVLGEMSMVV

SEQ ID NO: 91075 - protein, 34 aa, Artificial Sequence; identical to SEQ ID NO: 36286
  Cyclic GFR-binding peptide
  MOD_RES (1), (32), (34): Xaa is C or S

SEQ ID NO: 91076 - protein, 24 aa, Artificial Sequence
  Cyclic GFR-binding peptide
SNITIQIMDAANNVVLGEMSDMVV

SEQ ID NO: 91077 - protein, 27 aa, Artificial Sequence
  Cyclic GFR-binding peptide
  MOD_RES (27), (27): Xaa is C or S
SNITMQIMNDKQQIILGEMSGMVVDRX

SEQ ID NO: 91078 - protein, 42 aa, Artificial Sequence; identical to SEQ ID NO: 36292
  Cyclic GFR-binding peptide
  MOD_RES (6), (7), (39), (41): Xaa is C or S

SEQ ID NO: 91079 - protein, 29 aa, Artificial Sequence
  Cyclic GFR-binding peptide
PQALSNITIQIMVGRKPKVLGEMSMIVRS

SEQ ID NO: 91080 - protein, 27 aa, Artificial Sequence
  Cyclic GFR-binding peptide
QALSNITIQIMVGRKPKVLGEMSMIVR

SEQ ID NO: 91081 - protein, 29 aa, Artificial Sequence
  Cyclic GFR-binding peptide
  MOD_RES (2), (3): Xaa is C or S
TXXVPTRLSNITIQIMDSANNVVIGEMSD

SEQ ID NO: 91082 - protein, 26 aa, Artificial Sequence
  Cyclic GFR-binding peptide
TPTKMSNITMQIMNDKQQIIIGEMSG

SEQ ID NO: 91083 - protein, 27 aa, Artificial Sequence
  Cyclic GFR-binding peptide
APVKTSNITMQIMDNGRVLLIGEMSMI

SEQ ID NO: 91084 - protein, 30 aa, Artificial Sequence
  Cyclic GFR-binding peptide
  MOD_RES (1), (1): Xaa is C or S
XVSQDLSNITIQIMIGKTPKILGEMSMIVK

SEQ ID NO: 91085 - protein, 34 aa, Artificial Sequence; identical to SEQ ID NO: 36306
  Cyclic GFR-binding peptide
  MOD_RES (1), (2), (34): Xaa is C or S

SEQ ID NO: 91086 - protein, 27 aa, Artificial Sequence
  Cyclic GFR-binding peptide
  MOD_RES (1), (2): Xaa is C or S
XXAPVKTSNITMQIMDNGRVLLLGEMS

SEQ ID NO: 91087 - protein, 32 aa, Artificial Sequence
  Cyclic GFR-binding peptide
  MOD_RES (5), (6): Xaa is C or S
TPPTXXVPTRLSNITIQIMDSANNVVLGEMSD

SEQ ID NO: 91088 - protein, 41 aa, Artificial Sequence; identical to SEQ ID NO: 36312
  Cyclic GFR-binding peptide
  MOD_RES (6), (7), (38), (40): Xaa is C or S

SEQ ID NO: 91089 - protein, 22 aa, Artificial Sequence
  Cyclic GFR-binding peptide
LSNITIQIMDSANNVVIGEMSD

SEQ ID NO: 91090 - protein, 31 aa, Artificial Sequence
  Cyclic GFR-binding peptide
  MOD_RES (4), (5): Xaa is C or S
PASXXVPARLSNITIQIMDAANNVVIGEMSD

SEQ ID NO: 91091 - protein, 36 aa, Artificial Sequence
  Cyclic GFR-binding peptide
  MOD_RES (6), (7): Xaa is C or S
STPPTXXVPTRLSNITIQIMDSANNVVLGEMSDMVV

SEQ ID NO: 91092 - protein, 25 aa, Artificial Sequence
  Cyclic GFR-binding peptide
PQALSNITIQIMVGRKPKVLGEMSM

SEQ ID NO: 91093 - protein, 31 aa, Artificial Sequence
  Cyclic GFR-binding peptide
  MOD_RES (31), (31): Xaa is C or S
PTKMSNITMQIMNDKQQIILGEMSGMVVDRX

SEQ ID NO: 91094 - protein, 20 aa, Artificial Sequence
  Cyclic GFR-binding peptide
SNITIQIMVGRTPKVLGEMS

SEQ ID NO: 91095 - protein, 32 aa, Artificial Sequence
  Cyclic GFR-binding peptide
  MOD_RES (2), (3): Xaa is C or S
TXXAPVKTSNITMQIMDNGRVLLLGEMSMIVE

SEQ ID NO: 91096 - protein, 27 aa, Artificial Sequence
  Cyclic GFR-binding peptide
PQALSNITIQIMVGRKPKVLGEMSMIV

SEQ ID NO: 91097 - protein, 33 aa, Artificial Sequence; identical to SEQ ID NO: 36328
  Cyclic GFR-binding peptide
  MOD_RES (32), (32): Xaa is C or S

SEQ ID NO: 91098 - protein, 26 aa, Artificial Sequence
  Cyclic GFR-binding peptide
  MOD_RES (1), (1): Xaa is C or S
XVPTRLSNITIQIMDSANNVVLGEMS

SEQ ID NO: 91099 - protein, 27 aa, Artificial Sequence
  Cyclic GFR-binding peptide
DLSNITIQIMIGKTPKILGEMSMIVKS

SEQ ID NO: 91100 - protein, 32 aa, Artificial Sequence
  Cyclic GFR-binding peptide
  MOD_RES (3), (4): Xaa is C or S
SPXXVPQDLSNITIQIMVGRTPKVLGEMSMVV

SEQ ID NO: 91101 - protein, 36 aa, Artificial Sequence; identical to SEQ ID NO: 36335
  Cyclic GFR-binding peptide
  MOD_RES (5), (6): Xaa is C or S

SEQ ID NO: 91102 - protein, 36 aa, Artificial Sequence; identical to SEQ ID NO: 36336
  Cyclic GFR-binding peptide
  MOD_RES (4), (5), (36): Xaa is C or S

SEQ ID NO: 91103 - protein, 31 aa, Artificial Sequence
  Cyclic GFR-binding peptide
  MOD_RES (5), (6): Xaa is C or S
SASPXXVSQDLSNITIQIMIGKTPKILGEMS

SEQ ID NO: 91104 - protein, 28 aa, Artificial Sequence
  Cyclic GFR-binding peptide
QALSNITIQIMVGRKPKVLGEMSMIVRS

SEQ ID NO: 91105 - protein, 23 aa, Artificial Sequence
  Cyclic GFR-binding peptide
SNITIQIMDAANNVVIGEMSDMV

SEQ ID NO: 91106 - protein, 35 aa, Artificial Sequence; identical to SEQ ID NO: 36345
  Cyclic GFR-binding peptide
  MOD_RES (1), (2), (34): Xaa is C or S

SEQ ID NO: 91107 - protein, 22 aa, Artificial Sequence
  Cyclic GFR-binding peptide
LSNITIQIMDSANNVVLGEMSD

SEQ ID NO: 91108 - protein, 30 aa, Artificial Sequence
  Cyclic GFR-binding peptide
  MOD_RES (30), (30): Xaa is C or S
PVKTSNITMQIMDNGRVLLLGEMSMIVEEX

SEQ ID NO: 91109 - protein, 31 aa, Artificial Sequence
  Cyclic GFR-binding peptide
  MOD_RES (28), (30): Xaa is C or S
LSNITIQIMDAANNVVIGEMSDMVVEAXGXR

SEQ ID NO: 91110 - protein, 29 aa, Artificial Sequence
  Cyclic GFR-binding peptide
  MOD_RES (27), (29): Xaa is C or S
SNITIQIMDAANNVVLGEMSDMVVEAXGX

SEQ ID NO: 91111 - protein, 23 aa, Artificial Sequence
  Cyclic GFR-binding peptide
SNITIQIMVGRKPKVLGEMSMIV

SEQ ID NO: 91112 - protein, 31 aa, Artificial Sequence; identical to SEQ ID NO: 36351
  Cyclic GFR-binding peptide

SEQ ID NO: 91113 - protein, 24 aa, Artificial Sequence
  Cyclic GFR-binding peptide
KTSNITMQIMDNGRVLLLGEMSMI

SEQ ID NO: 91114 - protein, 37 aa, Artificial Sequence; identical to SEQ ID NO: 36354
  Cyclic GFR-binding peptide
  MOD_RES (5), (6), (37): Xaa is C or S

SEQ ID NO: 91115 - protein, 31 aa, Artificial Sequence
  Cyclic GFR-binding peptide
  MOD_RES (30), (30): Xaa is C or S
SQDLSNITIQIMIGKTPKILGEMSMIVKSXK

SEQ ID NO: 91116 - protein, 38 aa, Artificial Sequence; identical to SEQ ID NO: 36357
  Cyclic GFR-binding peptide
  MOD_RES (3), (4), (36), (38): Xaa is C or S

SEQ ID NO: 91117 - protein, 39 aa, Artificial Sequence; identical to SEQ ID NO: 36361
  Cyclic GFR-binding peptide
  MOD_RES (6), (7), (39): Xaa is C or S

SEQ ID NO: 91118 - protein, 25 aa, Artificial Sequence
  Cyclic GFR-binding peptide
MSNITMQIMNDKQQIILGEMSGMVV

SEQ ID NO: 91119 - protein, 32 aa, Artificial Sequence
  Cyclic GFR-binding peptide
  MOD_RES (6), (7): Xaa is C or S
ASASPXXVPQDLSNITIQIMVGRTPKVLGEMS

SEQ ID NO: 91120 - protein, 27 aa, Artificial Sequence
  Cyclic GFR-binding peptide
KLSNITVQIMDDSSNVILGEMSNMVVR

SEQ ID NO: 91121 - protein, 25 aa, Artificial Sequence
  Cyclic GFR-binding peptide
TSNITMQIMDNGRVLLIGEMSMIVE

SEQ ID NO: 91122 - protein, 30 aa, Artificial Sequence
  Cyclic GFR-binding peptide
PTKMSNITMQIMNDKQQIILGEMSGMVVDR

SEQ ID NO: 91123 - protein, 32 aa, Artificial Sequence; identical to SEQ ID NO: 36369
  Cyclic GFR-binding peptide
  MOD_RES (1), (1): Xaa is C or S

SEQ ID NO: 91124 - protein, 32 aa, Artificial Sequence; identical to SEQ ID NO: 36372
  Cyclic GFR-binding peptide
  MOD_RES (31), (31): Xaa is C or S

SEQ ID NO: 91125 - protein, 28 aa, Artificial Sequence
  Cyclic GFR-binding peptide
  MOD_RES (1), (2): Xaa is C or S
XXAPTKLSNITVQIMDDSSNVILGEMSN

SEQ ID NO: 91126 - protein, 35 aa, Artificial Sequence; identical to SEQ ID NO: 36375
  Cyclic GFR-binding peptide
  MOD_RES (2), (3), (34): Xaa is C or S

SEQ ID NO: 91127 - protein, 33 aa, Artificial Sequence; identical to SEQ ID NO: 36376
  Cyclic GFR-binding peptide
  MOD_RES (2), (3): Xaa is C or S

SEQ ID NO: 91128 - protein, 28 aa, Artificial Sequence
  Cyclic GFR-binding peptide
  MOD_RES (27), (27): Xaa is C or S
TSNITMQIMDNGRVLLIGEMSMIVEEXG

SEQ ID NO: 91129 - protein, 32 aa, Artificial Sequence
  Cyclic GFR-binding peptide
  MOD_RES (5), (6): Xaa is C or S
TPPTXXVPTRLSNITIQIMDSANNVVIGEMSD

SEQ ID NO: 91130 - protein, 37 aa, Artificial Sequence; identical to SEQ ID NO: 36381
  Cyclic GFR-binding peptide
  MOD_RES (3), (4), (36): Xaa is C or S

SEQ ID NO: 91131 - protein, 32 aa, Artificial Sequence
  Cyclic GFR-binding peptide
  MOD_RES (29), (31): Xaa is C or S
RLSNITIQIMDAANNVVIGEMSDMVVEAXGXR

SEQ ID NO: 91132 - protein, 33 aa, Artificial Sequence; identical to SEQ ID NO: 36383
  Cyclic GFR-binding peptide
  MOD_RES (1), (32): Xaa is C or S

SEQ ID NO: 91133 - protein, 23 aa, Artificial Sequence
  Cyclic GFR-binding peptide
LSNITIQIMDSANNVVIGEMSDM

SEQ ID NO: 91134 - protein, 34 aa, Artificial Sequence; identical to SEQ ID NO: 36386
  Cyclic GFR-binding peptide
  MOD_RES (2), (3), (34): Xaa is C or S

SEQ ID NO: 91135 - protein, 21 aa, Artificial Sequence
  Cyclic GFR-binding peptide
LSNITIQIMVGRTPKVLGEMS

SEQ ID NO: 91136 - protein, 33 aa, Artificial Sequence; identical to SEQ ID NO: 36387
  Cyclic GFR-binding peptide
  MOD_RES (1), (2): Xaa is C or S

SEQ ID NO: 91137 - protein, 39 aa, Artificial Sequence; identical to SEQ ID NO: 36388
  Cyclic GFR-binding peptide
  MOD_RES (3), (4), (36), (38): Xaa is C or S

SEQ ID NO: 91138 - protein, 29 aa, Artificial Sequence
  Cyclic GFR-binding peptide
  MOD_RES (1), (1): Xaa is C or S
XTPTKMSNITMQIMNDKQQIIIGEMSGMV

SEQ ID NO: 91139 - protein, 29 aa, Artificial Sequence
  Cyclic GFR-binding peptide
  MOD_RES (29), (29): Xaa is C or S
RLSNITIQIMDSANNVVLGEMSDMVVESX

SEQ ID NO: 91140 - protein, 37 aa, Artificial Sequence; identical to SEQ ID NO: 36391
  Cyclic GFR-binding peptide
  MOD_RES (1), (2), (34), (36): Xaa is C or S

SEQ ID NO: 91141 - protein, 31 aa, Artificial Sequence
  Cyclic GFR-binding peptide
  MOD_RES (5), (6): Xaa is C or S
SAGPXXTPTKMSNITMQIMNDKQQIIIGEMS

SEQ ID NO: 91142 - protein, 31 aa, Artificial Sequence
  Cyclic GFR-binding peptide
  MOD_RES (30), (30): Xaa is C or S
TKLSNITVQIMDDSSNVILGEMSNMVVRSXG

SEQ ID NO: 91143 - protein, 26 aa, Artificial Sequence
  Cyclic GFR-binding peptide
KTSNITMQIMDNGRVLLLGEMSMIVE

SEQ ID NO: 91144 - protein, 26 aa, Artificial Sequence
  Cyclic GFR-binding peptide
VKTSNITMQIMDNGRVLLLGEMSMIV

SEQ ID NO: 91145 - protein, 27 aa, Artificial Sequence
  Cyclic GFR-binding peptide
  MOD_RES (1), (2): Xaa is C or S
XXVSQDLSNITIQIMIGKTPKILGEMS

SEQ ID NO: 91146 - protein, 28 aa, Artificial Sequence
  Cyclic GFR-binding peptide
  MOD_RES (26), (28): Xaa is C or S
SNITIQIMVGRKPKVLGEMSMIVRSXKX

SEQ ID NO: 91147 - protein, 30 aa, Artificial Sequence
  Cyclic GFR-binding peptide
  MOD_RES (2), (3): Xaa is C or S
TXXAPVKTSNITMQIMDNGRVLLLGEMSMI

SEQ ID NO: 91148 - protein, 41 aa, Artificial Sequence; identical to SEQ ID NO: 36396
  Cyclic GFR-binding peptide
  MOD_RES (5), (6), (38), (40): Xaa is C or S

SEQ ID NO: 91149 - protein, 33 aa, Artificial Sequence; identical to SEQ ID NO: 36397
  Cyclic GFR-binding peptide
  MOD_RES (1), (33): Xaa is C or S

SEQ ID NO: 91150 - protein, 39 aa, Artificial Sequence; identical to SEQ ID NO: 36398
  Cyclic GFR-binding peptide
  MOD_RES (4), (5), (36), (38): Xaa is C or S

SEQ ID NO: 91151 - protein, 33 aa, Artificial Sequence
  Cyclic GFR-binding peptide
  MOD_RES (4), (5): Xaa is C or S
PSTXXAPVKTSNITMQIMDNGRVLLIGEMSMIV

SEQ ID NO: 91152 - protein, 32 aa, Artificial Sequence
  Cyclic GFR-binding peptide
  MOD_RES (29), (31): Xaa is C or S
RLSNITIQIMDSANNVVIGEMSDMVVESXGXR

SEQ ID NO: 91153 - protein, 32 aa, Artificial Sequence
  Cyclic GFR-binding peptide
  MOD_RES (6), (7): Xaa is C or S
RVPSTXXAPVKTSNITMQIMDNGRVLLLGEMS

SEQ ID NO: 91154 - protein, 35 aa, Artificial Sequence; identical to SEQ ID NO: 36399
  Cyclic GFR-binding peptide
  MOD_RES (2), (3), (35): Xaa is C or S

SEQ ID NO: 91155 - protein, 34 aa, Artificial Sequence
  Cyclic GFR-binding peptide
  MOD_RES (4), (5): Xaa is C or S
PASXXVPARLSNITIQIMDAANNVVIGEMSDMVV

SEQ ID NO: 91156 - protein, 27 aa, Artificial Sequence
  Cyclic GFR-binding peptide
  MOD_RES (26), (26): Xaa is C or S
SNITIQIMVGRTPKVLGEMSMVVKSXK

SEQ ID NO: 91157 - protein, 26 aa, Artificial Sequence
  Cyclic GFR-binding peptide
QDLSNITIQIMIGKTPKILGEMSMIV

SEQ ID NO: 91158 - protein, 33 aa, Artificial Sequence
  Cyclic GFR-binding peptide
  MOD_RES (5), (6): Xaa is C or S
SASPXXVSQDLSNITIQIMIGKTPKILGEMSMI

SEQ ID NO: 91159 - protein, 38 aa, Artificial Sequence; identical to SEQ ID NO: 36410
  Cyclic GFR-binding peptide
  MOD_RES (6), (7): Xaa is C or S

SEQ ID NO: 91160 - protein, 36 aa, Artificial Sequence; identical to SEQ ID NO: 36411
  Cyclic GFR-binding peptide
  MOD_RES (5), (6): Xaa is C or S

SEQ ID NO: 91161 - protein, 29 aa, Artificial Sequence
  Cyclic GFR-binding peptide
  MOD_RES (2), (3): Xaa is C or S
PXXTPTKMSNITMQIMNDKQQIIIGEMSG

SEQ ID NO: 91162 - protein, 33 aa, Artificial Sequence; identical to SEQ ID NO: 36415
  Cyclic GFR-binding peptide
  MOD_RES (2), (3): Xaa is C or S

SEQ ID NO: 91163 - protein, 24 aa, Artificial Sequence
  Cyclic GFR-binding peptide
KMSNITMQIMNDKQQIILGEMSGM

SEQ ID NO: 91164 - protein, 24 aa, Artificial Sequence
  Cyclic GFR-binding peptide
LSNITIQIMDSANNVVIGEMSDMV

SEQ ID NO: 91165 - protein, 39 aa, Artificial Sequence; identical to SEQ ID NO: 36418
  Cyclic GFR-binding peptide
  MOD_RES (4), (5), (37), (39): Xaa is C or S

SEQ ID NO: 91166 - protein, 33 aa, Artificial Sequence
  Cyclic GFR-binding peptide
  MOD_RES (5), (6): Xaa is C or S
SASPXXVPQDLSNITIQIMVGRTPKVLGEMSMV

SEQ ID NO: 91167 - protein, 26 aa, Artificial Sequence
  Cyclic GFR-binding peptide
VPQDLSNITIQIMVGRTPKVLGEMSM

SEQ ID NO: 91168 - protein, 22 aa, Artificial Sequence
  Cyclic GFR-binding peptide
MSNITMQIMNDKQQIILGEMSG

SEQ ID NO: 91169 - protein, 32 aa, Artificial Sequence; identical to SEQ ID NO: 36424
  Cyclic GFR-binding peptide
  MOD_RES (1), (2): Xaa is C or S

SEQ ID NO: 91170 - protein, 34 aa, Artificial Sequence; identical to SEQ ID NO: 36425
  Cyclic GFR-binding peptide
  MOD_RES (1), (2), (33): Xaa is C or S

SEQ ID NO: 91171 - protein, 36 aa, Artificial Sequence; identical to SEQ ID NO: 36426
  Cyclic GFR-binding peptide
  MOD_RES (1), (2), (34), (36): Xaa is C or S

SEQ ID NO: 91172 - protein, 27 aa, Artificial Sequence
  Cyclic GFR-binding peptide
  MOD_RES (27), (27): Xaa is C or S
SNITVQIMDDSSNVILGEMSNMVVRSX

SEQ ID NO: 91173 - protein, 34 aa, Artificial Sequence
  Cyclic GFR-binding peptide
  MOD_RES (6), (7): Xaa is C or S
STPPTXXVPTRLSNITIQIMDSANNVVIGEMSDM

SEQ ID NO: 91174 - protein, 29 aa, Artificial Sequence
  Cyclic GFR-binding peptide
  MOD_RES (29), (29): Xaa is C or S
KMSNITMQIMNDKQQIILGEMSGMVVDRX

SEQ ID NO: 91175 - protein, 34 aa, Artificial Sequence
  Cyclic GFR-binding peptide
  MOD_RES (31), (33): Xaa is C or S
PTRLSNITIQIMDSANNVVLGEMSDMVVESXGXR

SEQ ID NO: 91176 - protein, 35 aa, Artificial Sequence; identical to SEQ ID NO: 36428
  Cyclic GFR-binding peptide
  MOD_RES (1), (32), (34): Xaa is C or S

SEQ ID NO: 91177 - protein, 41 aa, Artificial Sequence; identical to SEQ ID NO: 36430
  Cyclic GFR-binding peptide
  MOD_RES (6), (7), (39), (41): Xaa is C or S

SEQ ID NO: 91178 - protein, 36 aa, Artificial Sequence; identical to SEQ ID NO: 36434
  Cyclic GFR-binding peptide
  MOD_RES (3), (4), (35): Xaa is C or S

SEQ ID NO: 91179 - protein, 30 aa, Artificial Sequence
  Cyclic GFR-binding peptide
  MOD_RES (2), (3): Xaa is C or S
PXXVSQDLSNITIQIMIGKTPKILGEMSMI

SEQ ID NO: 91180 - protein, 35 aa, Artificial Sequence
  Cyclic GFR-binding peptide
  MOD_RES (5), (6): Xaa is C or S
SAGPXXTPTKMSNITMQIMNDKQQIIIGEMSGMVV

SEQ ID NO: 91181 - protein, 23 aa, Artificial Sequence
  Cyclic GFR-binding peptide
LSNITIQIMVGRTPKVLGEMSMV

SEQ ID NO: 91182 - protein, 35 aa, Artificial Sequence; identical to SEQ ID NO: 36449
  Cyclic GFR-binding peptide
  MOD_RES (4), (5): Xaa is C or S

SEQ ID NO: 91183 - protein, 30 aa, Artificial Sequence
  Cyclic GFR-binding peptide
  MOD_RES (1), (2): Xaa is C or S
XXVPARLSNITIQIMDAANNVVIGEMSDMV

SEQ ID NO: 91184 - protein, 34 aa, Artificial Sequence
  Cyclic GFR-binding peptide
  MOD_RES (31), (33): Xaa is C or S
PARLSNITIQIMDAANNVVLGEMSDMVVEAXGXR

SEQ ID NO: 91185 - protein, 34 aa, Artificial Sequence
  Cyclic GFR-binding peptide
  MOD_RES (31), (33): Xaa is C or S
PARLSNITIQIMDAANNVVIGEMSDMVVEAXGXR

SEQ ID NO: 91186 - protein, 27 aa, Artificial Sequence
  Cyclic GFR-binding peptide
ALSNITIQIMVGRKPKVLGEMSMIVRS

SEQ ID NO: 91187 - protein, 27 aa, Artificial Sequence
  Cyclic GFR-binding peptide
LSNITIQIMDAANNVVLGEMSDMVVEA

SEQ ID NO: 91188 - protein, 34 aa, Artificial Sequence; identical to SEQ ID NO: 36457
  Cyclic GFR-binding peptide
  MOD_RES (3), (4): Xaa is C or S

SEQ ID NO: 91189 - protein, 39 aa, Artificial Sequence; identical to SEQ ID NO: 36459
  Cyclic GFR-binding peptide
  MOD_RES (6), (7), (38): Xaa is C or S

SEQ ID NO: 91190 - protein, 29 aa, Artificial Sequence
  Cyclic GFR-binding peptide
SNITIQIMDSANNVVIGEMSAAAAAAAAA

SEQ ID NO: 91191 - protein, 37 aa, Artificial Sequence; identical to SEQ ID NO: 36461
  Cyclic GFR-binding peptide
  MOD_RES (5), (6): Xaa is C or S

SEQ ID NO: 91192 - protein, 36 aa, Artificial Sequence; identical to SEQ ID NO: 36463
  Cyclic GFR-binding peptide
  MOD_RES (2), (3), (35): Xaa is C or S

SEQ ID NO: 91193 - protein, 31 aa, Artificial Sequence; identical to SEQ ID NO: 36467
  Cyclic GFR-binding peptide
  MOD_RES (1), (1): Xaa is C or S

SEQ ID NO: 91194 - protein, 36 aa, Artificial Sequence; identical to SEQ ID NO: 36472
  Cyclic GFR-binding peptide
  MOD_RES (5), (6): Xaa is C or S

SEQ ID NO: 91195 - protein, 25 aa, Artificial Sequence
  Cyclic GFR-binding peptide
SNITIQIMDAANNVVLGEMSDMVVE

SEQ ID NO: 91196 - protein, 31 aa, Artificial Sequence
  Cyclic GFR-binding peptide
  MOD_RES (3), (4): Xaa is C or S
SPXXVSQDLSNITIQIMIGKTPKILGEMSMI

SEQ ID NO: 91197 - protein, 32 aa, Artificial Sequence; identical to SEQ ID NO: 36473
  Cyclic GFR-binding peptide
  MOD_RES (1), (1): Xaa is C or S

SEQ ID NO: 91198 - protein, 30 aa, Artificial Sequence
  Cyclic GFR-binding peptide
PTKMSNITMQIMNDKQQIIIGEMSGMVVDR

SEQ ID NO: 91199 - protein, 35 aa, Artificial Sequence
  Cyclic GFR-binding peptide
  MOD_RES (6), (7): Xaa is C or S
STPPTXXVPTRLSNITIQIMDSANNVVIGEMSDMV

SEQ ID NO: 91200 - protein, 34 aa, Artificial Sequence; identical to SEQ ID NO: 36474
  Cyclic GFR-binding peptide
  MOD_RES (32), (34): Xaa is C or S

SEQ ID NO: 91201 - protein, 37 aa, Artificial Sequence; identical to SEQ ID NO: 36477
  Cyclic GFR-binding peptide
  MOD_RES (2), (3), (35), (37): Xaa is C or S

SEQ ID NO: 91202 - protein, 38 aa, Artificial Sequence; identical to SEQ ID NO: 36478
  Cyclic GFR-binding peptide
  MOD_RES (5), (6), (38): Xaa is C or S

SEQ ID NO: 91203 - protein, 34 aa, Artificial Sequence; identical to SEQ ID NO: 36479
  Cyclic GFR-binding peptide
  MOD_RES (3), (4): Xaa is C or S

SEQ ID NO: 91204 - protein, 27 aa, Artificial Sequence
  Cyclic GFR-binding peptide
PTRLSNITIQIMDSANNVVLGEMSDMV

SEQ ID NO: 91205 - protein, 30 aa, Artificial Sequence
  Cyclic GFR-binding peptide
  MOD_RES (4), (5): Xaa is C or S
PSTXXAPVKTSNITMQIMDNGRVLLIGEMS

SEQ ID NO: 91206 - protein, 22 aa, Artificial Sequence
  Cyclic GFR-binding peptide
SNITIQIMVGRTPKVLGEMSMV

SEQ ID NO: 91207 - protein, 29 aa, Artificial Sequence
  Cyclic GFR-binding peptide
PTKMSNITMQIMNDKQQIIIGEMSGMVVD

SEQ ID NO: 91208 - protein, 29 aa, Artificial Sequence
  Cyclic GFR-binding peptide
  MOD_RES (1), (2): Xaa is C or S
XXVPARLSNITIQIMDAANNVVIGEMSDM

SEQ ID NO: 91209 - protein, 34 aa, Artificial Sequence
  Cyclic GFR-binding peptide
  MOD_RES (6), (7): Xaa is C or S
AAPASXXVPARLSNITIQIMDAANNVVLGEMSDM

SEQ ID NO: 91210 - protein, 24 aa, Artificial Sequence
  Cyclic GFR-binding peptide
ARLSNITIQIMDAANNVVIGEMSD

SEQ ID NO: 91211 - protein, 26 aa, Artificial Sequence
  Cyclic GFR-binding peptide
SNITMQIMNDKQQIIIGEMSGMVVDR

SEQ ID NO: 91212 - protein, 34 aa, Artificial Sequence; identical to SEQ ID NO: 36498
  Cyclic GFR-binding peptide
  MOD_RES (1), (33): Xaa is C or S

SEQ ID NO: 91213 - protein, 31 aa, Artificial Sequence
  Cyclic GFR-binding peptide
  MOD_RES (2), (3): Xaa is C or S
PXXAPTKLSNITVQIMDDSSNVILGEMSNMV

SEQ ID NO: 91214 - protein, 36 aa, Artificial Sequence; identical to SEQ ID NO: 36499
  Cyclic GFR-binding peptide
  MOD_RES (2), (3), (34), (36): Xaa is C or S

SEQ ID NO: 91215 - protein, 33 aa, Artificial Sequence
  Cyclic GFR-binding peptide
  MOD_RES (3), (4): Xaa is C or S
KPXXAPTKLSNITVQIMDDSSNVILGEMSNMVV

SEQ ID NO: 91216 - protein, 29 aa, Artificial Sequence
  Cyclic GFR-binding peptide
  MOD_RES (27), (29): Xaa is C or S
LSNITIQIMVGRTPKVLGEMSMVVKSXKX

SEQ ID NO: 91217 - protein, 32 aa, Artificial Sequence
  Cyclic GFR-binding peptide
  MOD_RES (4), (5): Xaa is C or S
PSTXXAPVKTSNITMQIMDNGRVLLIGEMSMI

SEQ ID NO: 91218 - protein, 28 aa, Artificial Sequence
  Cyclic GFR-binding peptide
  MOD_RES (1), (1): Xaa is C or S
XVPTRLSNITIQIMDSANNVVIGEMSDM

SEQ ID NO: 91219 - protein, 31 aa, Artificial Sequence
  Cyclic GFR-binding peptide
  MOD_RES (5), (6): Xaa is C or S
SAGPXXTPTKMSNITMQIMNDKQQIILGEMS

SEQ ID NO: 91220 - protein, 35 aa, Artificial Sequence; identical to SEQ ID NO: 36501
  Cyclic GFR-binding peptide
  MOD_RES (32), (34): Xaa is C or S

SEQ ID NO: 91221 - protein, 24 aa, Artificial Sequence
  Cyclic GFR-binding peptide
TKLSNITVQIMDDSSNVILGEMSN

SEQ ID NO: 91222 - protein, 33 aa, Artificial Sequence
  Cyclic GFR-binding peptide
  MOD_RES (6), (7): Xaa is C or S
HVPKPXXAPTKLSNITVQIMDDSSNVIIGEMSN

SEQ ID NO: 91223 - protein, 36 aa, Artificial Sequence
  Cyclic GFR-binding peptide
  MOD_RES (6), (7): Xaa is C or S
ASASPXXVPQDLSNITIQIMVGRTPKVLGEMSMVVK

SEQ ID NO: 91224 - protein, 31 aa, Artificial Sequence; identical to SEQ ID NO: 36505
  Cyclic GFR-binding peptide
  MOD_RES (1), (1): Xaa is C or S

SEQ ID NO: 91225 - protein, 35 aa, Artificial Sequence; identical to SEQ ID NO: 36506
  Cyclic GFR-binding peptide
  MOD_RES (2), (3), (35): Xaa is C or S

SEQ ID NO: 91226 - protein, 35 aa, Artificial Sequence
  Cyclic GFR-binding peptide
  MOD_RES (5), (6): Xaa is C or S
TPPTXXVPTRLSNITIQIMDSANNVVLGEMSDMVV

SEQ ID NO: 91227 - protein, 34 aa, Artificial Sequence; identical to SEQ ID NO: 36508
  Cyclic GFR-binding peptide
  MOD_RES (2), (3), (34): Xaa is C or S

SEQ ID NO: 91228 - protein, 36 aa, Artificial Sequence; identical to SEQ ID NO: 36512
  Cyclic GFR-binding peptide
  MOD_RES (5), (6): Xaa is C or S

SEQ ID NO: 91229 - protein, 37 aa, Artificial Sequence; identical to SEQ ID NO: 36513
  Cyclic GFR-binding peptide
  MOD_RES (6), (7): Xaa is C or S

SEQ ID NO: 91230 - protein, 34 aa, Artificial Sequence
  Cyclic GFR-binding peptide
  MOD_RES (4), (5): Xaa is C or S
AAPXXVPQALSNITIQIMVGRKPKVLGEMSMIVR

SEQ ID NO: 91231 - protein, 32 aa, Artificial Sequence
  Cyclic GFR-binding peptide
  MOD_RES (29), (31): Xaa is C or S
KMSNITMQIMNDKQQIIIGEMSGMVVDRXGXS

SEQ ID NO: 91232 - protein, 24 aa, Artificial Sequence
  Cyclic GFR-binding peptide
KLSNITVQIMDDSSNVILGEMSNM

SEQ ID NO: 91233 - protein, 33 aa, Artificial Sequence
  Cyclic GFR-binding peptide
  MOD_RES (5), (6): Xaa is C or S
SAAPXXVPQALSNITIQIMVGRKPKVLGEMSMI

SEQ ID NO: 91234 - protein, 35 aa, Artificial Sequence; identical to SEQ ID NO: 36515
  Cyclic GFR-binding peptide
  MOD_RES (1), (2), (34): Xaa is C or S

SEQ ID NO: 91235 - protein, 25 aa, Artificial Sequence
  Cyclic GFR-binding peptide
SNITMQIMNDKQQIILGEMSGMVVD

SEQ ID NO: 91236 - protein, 27 aa, Artificial Sequence
  Cyclic GFR-binding peptide
VKTSNITMQIMDNGRVLLLGEMSMIVE

SEQ ID NO: 91237 - protein, 33 aa, Artificial Sequence
  Cyclic GFR-binding peptide
  MOD_RES (4), (5): Xaa is C or S
AGPXXTPTKMSNITMQIMNDKQQIILGEMSGMV

SEQ ID NO: 91238 - protein, 26 aa, Artificial Sequence
  Cyclic GFR-binding peptide
TPTKMSNITMQIMNDKQQIILGEMSG

SEQ ID NO: 91239 - protein, 32 aa, Artificial Sequence; identical to SEQ ID NO: 36518
  Cyclic GFR-binding peptide
  MOD_RES (1), (1): Xaa is C or S

SEQ ID NO: 91240 - protein, 34 aa, Artificial Sequence; identical to SEQ ID NO: 36519
  Cyclic GFR-binding peptide
  MOD_RES (1), (32), (34): Xaa is C or S

SEQ ID NO: 91241 - protein, 32 aa, Artificial Sequence
  Cyclic GFR-binding peptide
  MOD_RES (31), (31): Xaa is C or S
PTRLSNITIQIMDSANNVVLGEMSDMVVESXG

SEQ ID NO: 91242 - protein, 31 aa, Artificial Sequence
  Cyclic GFR-binding peptide
  MOD_RES (2), (3): Xaa is C or S
TXXAPVKTSNITMQIMDNGRVLLLGEMSMIV

SEQ ID NO: 91243 - protein, 27 aa, Artificial Sequence
  Cyclic GFR-binding peptide
PTKLSNITVQIMDDSSNVILGEMSNMV

SEQ ID NO: 91244 - protein, 27 aa, Artificial Sequence
  Cyclic GFR-binding peptide
  MOD_RES (1), (1): Xaa is C or S
XAPTKLSNITVQIMDDSSNVILGEMSN

SEQ ID NO: 91245 - protein, 41 aa, Artificial Sequence; identical to SEQ ID NO: 36526
  Cyclic GFR-binding peptide
  MOD_RES (6), (7), (38), (40): Xaa is C or S

SEQ ID NO: 91246 - protein, 26 aa, Artificial Sequence
  Cyclic GFR-binding peptide
VSQDLSNITIQIMIGKTPKILGEMSM

SEQ ID NO: 91247 - protein, 28 aa, Artificial Sequence
  Cyclic GFR-binding peptide
VPQDLSNITIQIMVGRTPKVLGEMSMVV

SEQ ID NO: 91248 - protein, 25 aa, Artificial Sequence
  Cyclic GFR-binding peptide
LSNITIQIMDSANNVVLGEMSDMVV

SEQ ID NO: 91249 - protein, 29 aa, Artificial Sequence
  Cyclic GFR-binding peptide
  MOD_RES (3), (4): Xaa is C or S
STXXAPVKTSNITMQIMDNGRVLLLGEMS

SEQ ID NO: 91250 - protein, 31 aa, Artificial Sequence
  Cyclic GFR-binding peptide
  MOD_RES (1), (2): Xaa is C or S
XXTPTKMSNITMQIMNDKQQIILGEMSGMVV

SEQ ID NO: 91251 - protein, 33 aa, Artificial Sequence; identical to SEQ ID NO: 36538
  Cyclic GFR-binding peptide
  MOD_RES (2), (3): Xaa is C or S

SEQ ID NO: 91252 - protein, 29 aa, Artificial Sequence
  Cyclic GFR-binding peptide
VPTRLSNITIQIMDSANNVVIGEMSDMVV

SEQ ID NO: 91253 - protein, 28 aa, Artificial Sequence
  Cyclic GFR-binding peptide
  MOD_RES (1), (1): Xaa is C or S
XAPTKLSNITVQIMDDSSNVILGEMSNM

SEQ ID NO: 91254 - protein, 24 aa, Artificial Sequence
  Cyclic GFR-binding peptide
LSNITIQIMVGRKPKVLGEMSMIV

SEQ ID NO: 91255 - protein, 32 aa, Artificial Sequence
  Cyclic GFR-binding peptide
  MOD_RES (2), (3): Xaa is C or S
PXXVPQDLSNITIQIMVGRTPKVLGEMSMVVK

SEQ ID NO: 91256 - protein, 24 aa, Artificial Sequence
  Cyclic GFR-binding peptide
PTKMSNITMQIMNDKQQIIIGEMS

SEQ ID NO: 91257 - protein, 31 aa, Artificial Sequence
  Cyclic GFR-binding peptide
  MOD_RES (30), (30): Xaa is C or S
TKMSNITMQIMNDKQQIIIGEMSGMVVDRXG

SEQ ID NO: 91258 - protein, 25 aa, Artificial Sequence
  Cyclic GFR-binding peptide
SNITMQIMDNGRVLLLGEMSMIVEE

SEQ ID NO: 91259 - protein, 33 aa, Artificial Sequence; identical to SEQ ID NO: 36546
  Cyclic GFR-binding peptide
  MOD_RES (31), (33): Xaa is C or S

SEQ ID NO: 91260 - protein, 33 aa, Artificial Sequence; identical to SEQ ID NO: 36548
  Cyclic GFR-binding peptide
  MOD_RES (31), (33): Xaa is C or S

SEQ ID NO: 91261 - protein, 31 aa, Artificial Sequence
  Cyclic GFR-binding peptide
  MOD_RES (5), (6): Xaa is C or S
SASPXXVPQDLSNITIQIMVGRTPKVLGEMS

SEQ ID NO: 91262 - protein, 39 aa, Artificial Sequence; identical to SEQ ID NO: 36550
  Cyclic GFR-binding peptide
  MOD_RES (6), (7), (38): Xaa is C or S

SEQ ID NO: 91263 - protein, 38 aa, Artificial Sequence; identical to SEQ ID NO: 36551
  Cyclic GFR-binding peptide
  MOD_RES (5), (6), (38): Xaa is C or S

SEQ ID NO: 91264 - protein, 30 aa, Artificial Sequence
  Cyclic GFR-binding peptide
  MOD_RES (30), (30): Xaa is C or S
ARLSNITIQIMDAANNVVLGEMSDMVVEAX

SEQ ID NO: 91265 - protein, 21 aa, Artificial Sequence
  Cyclic GFR-binding peptide
SNITIQIMIGKTPKILGEMSM

SEQ ID NO: 91266 - protein, 29 aa, Artificial Sequence
  Cyclic GFR-binding peptide
  MOD_RES (1), (2): Xaa is C or S
XXVPTRLSNITIQIMDSANNVVIGEMSDM

SEQ ID NO: 91267 - protein, 32 aa, Artificial Sequence; identical to SEQ ID NO: 36554
  Cyclic GFR-binding peptide
  MOD_RES (31), (31): Xaa is C or S

SEQ ID NO: 91268 - protein, 31 aa, Artificial Sequence; identical to SEQ ID NO: 36556
  Cyclic GFR-binding peptide
  MOD_RES (1), (1): Xaa is C or S

SEQ ID NO: 91269 - protein, 30 aa, Artificial Sequence
  Cyclic GFR-binding peptide
  MOD_RES (1), (1): Xaa is C or S
XVPTRLSNITIQIMDSANNVVIGEMSDMVV

SEQ ID NO: 91270 - protein, 29 aa, Artificial Sequence
  Cyclic GFR-binding peptide
SNITIQIMDAANNVVLGEMSAAAAAAAAA

SEQ ID NO: 91271 - protein, 24 aa, Artificial Sequence
  Cyclic GFR-binding peptide
SQDLSNITIQIMIGKTPKILGEMS

SEQ ID NO: 91272 - protein, 31 aa, Artificial Sequence; identical to SEQ ID NO: 36560
  Cyclic GFR-binding peptide

SEQ ID NO: 91273 - protein, 37 aa, Artificial Sequence; identical to SEQ ID NO: 36563
  Cyclic GFR-binding peptide
  MOD_RES (4), (5), (37): Xaa is C or S

SEQ ID NO: 91274 - protein, 35 aa, Artificial Sequence; identical to SEQ ID NO: 36564
  Cyclic GFR-binding peptide
  MOD_RES (3), (4): Xaa is C or S

SEQ ID NO: 91275 - protein, 32 aa, Artificial Sequence
  Cyclic GFR-binding peptide
  MOD_RES (2), (3): Xaa is C or S
SXXVPARLSNITIQIMDAANNVVIGEMSDMVV

SEQ ID NO: 91276 - protein, 28 aa, Artificial Sequence
  Cyclic GFR-binding peptide
  MOD_RES (2), (3): Xaa is C or S
SXXVPARLSNITIQIMDAANNVVLGEMS

SEQ ID NO: 91277 - protein, 32 aa, Artificial Sequence
  Cyclic GFR-binding peptide
  MOD_RES (6), (7): Xaa is C or S
ASASPXXVSQDLSNITIQIMIGKTPKILGEMS

SEQ ID NO: 91278 - protein, 38 aa, Artificial Sequence; identical to SEQ ID NO: 36566
  Cyclic GFR-binding peptide
  MOD_RES (6), (7): Xaa is C or S

SEQ ID NO: 91279 - protein, 31 aa, Artificial Sequence
  Cyclic GFR-binding peptide
  MOD_RES (28), (30): Xaa is C or S
LSNITIQIMDSANNVVIGEMSDMVVESXGXR

SEQ ID NO: 91280 - protein, 30 aa, Artificial Sequence
  Cyclic GFR-binding peptide
  MOD_RES (2), (3): Xaa is C or S
PXXVPQDLSNITIQIMVGRTPKVLGEMSMV

SEQ ID NO: 91281 - protein, 30 aa, Artificial Sequence
  Cyclic GFR-binding peptide
  MOD_RES (4), (5): Xaa is C or S
AGPXXTPTKMSNITMQIMNDKQQIILGEMS

SEQ ID NO: 91282 - protein, 35 aa, Artificial Sequence; identical to SEQ ID NO: 36569
  Cyclic GFR-binding peptide
  MOD_RES (2), (3), (35): Xaa is C or S

SEQ ID NO: 91283 - protein, 29 aa, Artificial Sequence
  Cyclic GFR-binding peptide
  MOD_RES (2), (3): Xaa is C or S
PXXVPQDLSNITIQIMVGRTPKVLGEMSM

SEQ ID NO: 91284 - protein, 21 aa, Artificial Sequence
  Cyclic GFR-binding peptide
TSNITMQIMDNGRVLLIGEMS

SEQ ID NO: 91285 - protein, 36 aa, Artificial Sequence; identical to SEQ ID NO: 36571
  Cyclic GFR-binding peptide
  MOD_RES (4), (5), (36): Xaa is C or S

SEQ ID NO: 91286 - protein, 35 aa, Artificial Sequence; identical to SEQ ID NO: 36574
  Cyclic GFR-binding peptide
  MOD_RES (2), (3), (35): Xaa is C or S

SEQ ID NO: 91287 - protein, 35 aa, Artificial Sequence; identical to SEQ ID NO: 36576
  Cyclic GFR-binding peptide
  MOD_RES (1), (2), (34): Xaa is C or S

SEQ ID NO: 91288 - protein, 36 aa, Artificial Sequence; identical to SEQ ID NO: 36577
  Cyclic GFR-binding peptide
  MOD_RES (2), (3), (34), (36): Xaa is C or S

SEQ ID NO: 91289 - protein, 40 aa, Artificial Sequence; identical to SEQ ID NO: 36578
  Cyclic GFR-binding peptide
  MOD_RES (6), (7), (38), (40): Xaa is C or S

SEQ ID NO: 91290 - protein, 32 aa, Artificial Sequence
  Cyclic GFR-binding peptide
  MOD_RES (30), (32): Xaa is C or S
ARLSNITIQIMDAANNVVLGEMSDMVVEAXGX

SEQ ID NO: 91291 - protein, 32 aa, Artificial Sequence
  Cyclic GFR-binding peptide
  MOD_RES (4), (5): Xaa is C or S
PASXXVPARLSNITIQIMDAANNVVLGEMSDM

SEQ ID NO: 91292 - protein, 34 aa, Artificial Sequence; identical to SEQ ID NO: 36580
  Cyclic GFR-binding peptide
  MOD_RES (2), (3), (34): Xaa is C or S

SEQ ID NO: 91293 - protein, 33 aa, Artificial Sequence
  Cyclic GFR-binding peptide
  MOD_RES (31), (33): Xaa is C or S
PARLSNITIQIMDAANNVVLGEMSDMVVEAXGX

SEQ ID NO: 91294 - protein, 28 aa, Artificial Sequence
  Cyclic GFR-binding peptide
RLSNITIQIMDAANNVVLGEMSDMVVEA

SEQ ID NO: 91295 - protein, 25 aa, Artificial Sequence
  Cyclic GFR-binding peptide
QALSNITIQIMVGRKPKVLGEMSMI

SEQ ID NO: 91296 - protein, 30 aa, Artificial Sequence
  Cyclic GFR-binding peptide
  MOD_RES (27), (29): Xaa is C or S
LSNITIQIMIGKTPKILGEMSMIVKSXKXS

SEQ ID NO: 91297 - protein, 24 aa, Artificial Sequence
  Cyclic GFR-binding peptide
QALSNITIQIMVGRKPKVLGEMSM

SEQ ID NO: 91298 - protein, 32 aa, Artificial Sequence
  Cyclic GFR-binding peptide
  MOD_RES (2), (3): Xaa is C or S
PXXVPQALSNITIQIMVGRKPKVLGEMSMIVR

SEQ ID NO: 91299 - protein, 25 aa, Artificial Sequence
  Cyclic GFR-binding peptide
PARLSNITIQIMDAANNVVIGEMSD

SEQ ID NO: 91300 - protein, 29 aa, Artificial Sequence
  Cyclic GFR-binding peptide
  MOD_RES (27), (29): Xaa is C or S
SNITVQIMDDSSNVILGEMSNMVVRSXGX

SEQ ID NO: 91301 - protein, 22 aa, Artificial Sequence
  Cyclic GFR-binding peptide
KTSNITMQIMDNGRVLLLGEMS

SEQ ID NO: 91302 - protein, 34 aa, Artificial Sequence; identical to SEQ ID NO: 36589
  Cyclic GFR-binding peptide
  MOD_RES (32), (34): Xaa is C or S

SEQ ID NO: 91303 - protein, 21 aa, Artificial Sequence
  Cyclic GFR-binding peptide
LSNITIQIMDSANNVVIGEMS

SEQ ID NO: 91304 - protein, 23 aa, Artificial Sequence
  Cyclic GFR-binding peptide
DLSNITIQIMIGKTPKILGEMSM

SEQ ID NO: 91305 - protein, 26 aa, Artificial Sequence
  Cyclic GFR-binding peptide
  MOD_RES (1), (1): Xaa is C or S
XVPARLSNITIQIMDAANNVVLGEMS

SEQ ID NO: 91306 - protein, 27 aa, Artificial Sequence
  Cyclic GFR-binding peptide
ARLSNITIQIMDAANNVVLGEMSDMVV

SEQ ID NO: 91307 - protein, 32 aa, Artificial Sequence
  Cyclic GFR-binding peptide
  MOD_RES (5), (6): Xaa is C or S
SAGPXXTPTKMSNITMQIMNDKQQIILGEMSG

SEQ ID NO: 91308 - protein, 31 aa, Artificial Sequence
  Cyclic GFR-binding peptide
  MOD_RES (1), (2): Xaa is C or S
XXVPTRLSNITIQIMDSANNVVIGEMSDMVV

SEQ ID NO: 91309 - protein, 35 aa, Artificial Sequence; identical to SEQ ID NO: 36595
  Cyclic GFR-binding peptide
  MOD_RES (2), (3), (34): Xaa is C or S

SEQ ID NO: 91310 - protein, 34 aa, Artificial Sequence
  Cyclic GFR-binding peptide
  MOD_RES (4), (5): Xaa is C or S
PKPXXAPTKLSNITVQIMDDSSNVILGEMSNMVV

SEQ ID NO: 91311 - protein, 31 aa, Artificial Sequence
  Cyclic GFR-binding peptide
  MOD_RES (30), (30): Xaa is C or S
TKMSNITMQIMNDKQQIILGEMSGMVVDRXG

SEQ ID NO: 91312 - protein, 26 aa, Artificial Sequence
  Cyclic GFR-binding peptide
LSNITIQIMDSANNVVLGEMSDMVVE

SEQ ID NO: 91313 - protein, 31 aa, Artificial Sequence
  Cyclic GFR-binding peptide
  MOD_RES (28), (30): Xaa is C or S
KTSNITMQIMDNGRVLLLGEMSMIVEEXGXL

SEQ ID NO: 91314 - protein, 23 aa, Artificial Sequence
  Cyclic GFR-binding peptide
KMSNITMQIMNDKQQIILGEMSG

SEQ ID NO: 91315 - protein, 29 aa, Artificial Sequence
  Cyclic GFR-binding peptide
  MOD_RES (29), (29): Xaa is C or S
VKTSNITMQIMDNGRVLLIGEMSMIVEEX

SEQ ID NO: 91316 - protein, 38 aa, Artificial Sequence; identical to SEQ ID NO: 36600
  Cyclic GFR-binding peptide
  MOD_RES (6), (7): Xaa is C or S

SEQ ID NO: 91317 - protein, 28 aa, Artificial Sequence
  Cyclic GFR-binding peptide
  MOD_RES (2), (3): Xaa is C or S
PXXVPQALSNITIQIMVGRKPKVLGEMS

SEQ ID NO: 91318 - protein, 31 aa, Artificial Sequence
  Cyclic GFR-binding peptide
  MOD_RES (29), (31): Xaa is C or S
RLSNITIQIMDSANNVVLGEMSDMVVESXGX

SEQ ID NO: 91319 - protein, 35 aa, Artificial Sequence; identical to SEQ ID NO: 36604
  Cyclic GFR-binding peptide
  MOD_RES (4), (5): Xaa is C or S

SEQ ID NO: 91320 - protein, 38 aa, Artificial Sequence; identical to SEQ ID NO: 36606
  Cyclic GFR-binding peptide
  MOD_RES (6), (7), (38): Xaa is C or S

SEQ ID NO: 91321 - protein, 37 aa, Artificial Sequence; identical to SEQ ID NO: 36607
  Cyclic GFR-binding peptide
  MOD_RES (2), (3), (35), (37): Xaa is C or S

SEQ ID NO: 91322 - protein, 32 aa, Artificial Sequence
  Cyclic GFR-binding peptide
  MOD_RES (3), (4): Xaa is C or S
APXXVPQALSNITIQIMVGRKPKVLGEMSMIV

SEQ ID NO: 91323 - protein, 36 aa, Artificial Sequence; identical to SEQ ID NO: 36609
  Cyclic GFR-binding peptide
  MOD_RES (3), (4), (36): Xaa is C or S

SEQ ID NO: 91324 - protein, 35 aa, Artificial Sequence
  Cyclic GFR-binding peptide
  MOD_RES (6), (7): Xaa is C or S
HVPKPXXAPTKLSNITVQIMDDSSNVIIGEMSNMV

SEQ ID NO: 91325 - protein, 26 aa, Artificial Sequence
  Cyclic GFR-binding peptide
TRLSNITIQIMDSANNVVIGEMSDMV

SEQ ID NO: 91326 - protein, 29 aa, Artificial Sequence
  Cyclic GFR-binding peptide
  MOD_RES (1), (2): Xaa is C or S
XXAPTKLSNITVQIMDDSSNVILGEMSNM

SEQ ID NO: 91327 - protein, 24 aa, Artificial Sequence
  Cyclic GFR-binding peptide
ALSNITIQIMVGRKPKVLGEMSMI

SEQ ID NO: 91328 - protein, 31 aa, Artificial Sequence; identical to SEQ ID NO: 36616
  Cyclic GFR-binding peptide
  MOD_RES (31), (31): Xaa is C or S

SEQ ID NO: 91329 - protein, 38 aa, Artificial Sequence; identical to SEQ ID NO: 36617
  Cyclic GFR-binding peptide
  MOD_RES (5), (6), (37): Xaa is C or S

SEQ ID NO: 91330 - protein, 35 aa, Artificial Sequence
  Cyclic GFR-binding peptide
  MOD_RES (6), (7): Xaa is C or S
GSAGPXXTPTKMSNITMQIMNDKQQIILGEMSGMV

SEQ ID NO: 91331 - protein, 25 aa, Artificial Sequence
  Cyclic GFR-binding peptide
DLSNITIQIMIGKTPKILGEMSMIV

SEQ ID NO: 91332 - protein, 28 aa, Artificial Sequence
  Cyclic GFR-binding peptide
  MOD_RES (26), (28): Xaa is C or S
SNITMQIMDNGRVLLLGEMSMIVEEXGX

SEQ ID NO: 91333 - protein, 23 aa, Artificial Sequence
  Cyclic GFR-binding peptide
QDLSNITIQIMVGRTPKVLGEMS

SEQ ID NO: 91334 - protein, 41 aa, Artificial Sequence; identical to SEQ ID NO: 36623
  Cyclic GFR-binding peptide
  MOD_RES (5), (6), (38), (40): Xaa is C or S

SEQ ID NO: 91335 - protein, 29 aa, Artificial Sequence
  Cyclic GFR-binding peptide
SNITMQIMDNGRVLLLGEMSAAAAAAAAA

SEQ ID NO: 91336 - protein, 31 aa, Artificial Sequence
  Cyclic GFR-binding peptide
  MOD_RES (2), (3): Xaa is C or S
SXXVPARLSNITIQIMDAANNVVLGEMSDMV

SEQ ID NO: 91337 - protein, 26 aa, Artificial Sequence
  Cyclic GFR-binding peptide
PTKLSNITVQIMDDSSNVILGEMSNM

SEQ ID NO: 91338 - protein, 31 aa, Artificial Sequence
  Cyclic GFR-binding peptide
  MOD_RES (29), (31): Xaa is C or S
RLSNITIQIMDSANNVVIGEMSDMVVESXGX

SEQ ID NO: 91339 - protein, 29 aa, Artificial Sequence
  Cyclic GFR-binding peptide
PTKMSNITMQIMNDKQQIILGEMSGMVVD

SEQ ID NO: 91340 - protein, 29 aa, Artificial Sequence
  Cyclic GFR-binding peptide
  MOD_RES (2), (3): Xaa is C or S
TXXVPTRLSNITIQIMDSANNVVLGEMSD

SEQ ID NO: 91341 - protein, 41 aa, Artificial Sequence; identical to SEQ ID NO: 36632
  Cyclic GFR-binding peptide
  MOD_RES (6), (7), (39), (41): Xaa is C or S

SEQ ID NO: 91342 - protein, 31 aa, Artificial Sequence
  Cyclic GFR-binding peptide
  MOD_RES (3), (4): Xaa is C or S
SPXXVPQDLSNITIQIMVGRTPKVLGEMSMV

SEQ ID NO: 91343 - protein, 30 aa, Artificial Sequence
  Cyclic GFR-binding peptide
  MOD_RES (28), (30): Xaa is C or S
KTSNITMQIMDNGRVLLIGEMSMIVEEXGX

SEQ ID NO: 91344 - protein, 28 aa, Artificial Sequence
  Cyclic GFR-binding peptide
  MOD_RES (27), (27): Xaa is C or S
SNITIQIMDAANNVVLGEMSDMVVEAXG

SEQ ID NO: 91345 - protein, 33 aa, Artificial Sequence
  Cyclic GFR-binding peptide
  MOD_RES (30), (32): Xaa is C or S
TKLSNITVQIMDDSSNVILGEMSNMVVRSXGXH

SEQ ID NO: 91346 - protein, 36 aa, Artificial Sequence; identical to SEQ ID NO: 36638
  Cyclic GFR-binding peptide
  MOD_RES (3), (4), (35): Xaa is C or S

SEQ ID NO: 91347 - protein, 23 aa, Artificial Sequence
  Cyclic GFR-binding peptide
SNITIQIMDSANNVVLGEMSDMV

SEQ ID NO: 91348 - protein, 28 aa, Artificial Sequence
  Cyclic GFR-binding peptide
APVKTSNITMQIMDNGRVLLIGEMSMIV

SEQ ID NO: 91349 - protein, 35 aa, Artificial Sequence; identical to SEQ ID NO: 36644
  Cyclic GFR-binding peptide
  MOD_RES (1), (32), (34): Xaa is C or S

SEQ ID NO: 91350 - protein, 28 aa, Artificial Sequence
  Cyclic GFR-binding peptide
  MOD_RES (1), (2): Xaa is C or S
XXVPTRLSNITIQIMDSANNVVIGEMSD

SEQ ID NO: 91351 - protein, 28 aa, Artificial Sequence
  Cyclic GFR-binding peptide
  MOD_RES (2), (3): Xaa is C or S
PXXTPTKMSNITMQIMNDKQQIILGEMS

SEQ ID NO: 91352 - protein, 33 aa, Artificial Sequence
  Cyclic GFR-binding peptide
  MOD_RES (3), (4): Xaa is C or S
STXXAPVKTSNITMQIMDNGRVLLIGEMSMIVE

SEQ ID NO: 91353 - protein, 40 aa, Artificial Sequence; identical to SEQ ID NO: 36647
  Cyclic GFR-binding peptide
  MOD_RES (5), (6), (38), (40): Xaa is C or S

SEQ ID NO: 91354 - protein, 35 aa, Artificial Sequence; identical to SEQ ID NO: 36648
  Cyclic GFR-binding peptide
  MOD_RES (3), (4): Xaa is C or S

SEQ ID NO: 91355 - protein, 20 aa, Artificial Sequence
  Cyclic GFR-binding peptide
SNITIQIMDSANNVVIGEMS

SEQ ID NO: 91356 - protein, 34 aa, Artificial Sequence
  Cyclic GFR-binding peptide
  MOD_RES (5), (6): Xaa is C or S
TPPTXXVPTRLSNITIQIMDSANNVVLGEMSDMV

SEQ ID NO: 91357 - protein, 28 aa, Artificial Sequence
  Cyclic GFR-binding peptide
TKMSNITMQIMNDKQQIIIGEMSGMVVD

SEQ ID NO: 91358 - protein, 32 aa, Artificial Sequence
  Cyclic GFR-binding peptide
  MOD_RES (30), (32): Xaa is C or S
PVKTSNITMQIMDNGRVLLLGEMSMIVEEXGX

SEQ ID NO: 91359 - protein, 32 aa, Artificial Sequence; identical to SEQ ID NO: 36657
  Cyclic GFR-binding peptide
  MOD_RES (1), (2): Xaa is C or S

SEQ ID NO: 91360 - protein, 26 aa, Artificial Sequence
  Cyclic GFR-binding peptide
LSNITVQIMDDSSNVILGEMSNMVVR

SEQ ID NO: 91361 - protein, 32 aa, Artificial Sequence
  Cyclic GFR-binding peptide
  MOD_RES (29), (31): Xaa is C or S
RLSNITIQIMDAANNVVLGEMSDMVVEAXGXR

SEQ ID NO: 91362 - protein, 39 aa, Artificial Sequence; identical to SEQ ID NO: 36662
  Cyclic GFR-binding peptide
  MOD_RES (5), (6), (38): Xaa is C or S

SEQ ID NO: 91363 - protein, 28 aa, Artificial Sequence
  Cyclic GFR-binding peptide
  MOD_RES (28), (28): Xaa is C or S
DLSNITIQIMVGRTPKVLGEMSMVVKSX

SEQ ID NO: 91364 - protein, 28 aa, Artificial Sequence
  Cyclic GFR-binding peptide
SQDLSNITIQIMIGKTPKILGEMSMIVK

SEQ ID NO: 91365 - protein, 29 aa, Artificial Sequence
  Cyclic GFR-binding peptide
  MOD_RES (28), (28): Xaa is C or S
LSNITIQIMDSANNVVIGEMSDMVVESXG

SEQ ID NO: 91366 - protein, 36 aa, Artificial Sequence
  Cyclic GFR-binding peptide
  MOD_RES (6), (7): Xaa is C or S
ASAAPXXVPQALSNITIQIMVGRKPKVLGEMSMIVR

SEQ ID NO: 91367 - protein, 30 aa, Artificial Sequence
  Cyclic GFR-binding peptide
  MOD_RES (29), (29): Xaa is C or S
KLSNITVQIMDDSSNVILGEMSNMVVRSXG

SEQ ID NO: 91368 - protein, 34 aa, Artificial Sequence; identical to SEQ ID NO: 36667
  Cyclic GFR-binding peptide
  MOD_RES (31), (33): Xaa is C or S

SEQ ID NO: 91369 - protein, 38 aa, Artificial Sequence; identical to SEQ ID NO: 36669
  Cyclic GFR-binding peptide
  MOD_RES (4), (5), (36), (38): Xaa is C or S

SEQ ID NO: 91370 - protein, 23 aa, Artificial Sequence
  Cyclic GFR-binding peptide
KMSNITMQIMNDKQQIIIGEMSG

SEQ ID NO: 91371 - protein, 35 aa, Artificial Sequence; identical to SEQ ID NO: 36671
  Cyclic GFR-binding peptide
  MOD_RES (1), (2), (34): Xaa is C or S

SEQ ID NO: 91372 - protein, 29 aa, Artificial Sequence
  Cyclic GFR-binding peptide
SNITMQIMNDKQQIILGEMSAAAAAAAAA

SEQ ID NO: 91373 - protein, 33 aa, Artificial Sequence; identical to SEQ ID NO: 36673
  Cyclic GFR-binding peptide
  MOD_RES (31), (33): Xaa is C or S

SEQ ID NO: 91374 - protein, 41 aa, Artificial Sequence; identical to SEQ ID NO: 36675
  Cyclic GFR-binding peptide
  MOD_RES (6), (7), (38), (40): Xaa is C or S

SEQ ID NO: 91375 - protein, 31 aa, Artificial Sequence
  Cyclic GFR-binding peptide
  MOD_RES (5), (6): Xaa is C or S
VPSTXXAPVKTSNITMQIMDNGRVLLIGEMS

SEQ ID NO: 91376 - protein, 42 aa, Artificial Sequence; identical to SEQ ID NO: 36677
  Cyclic GFR-binding peptide
  MOD_RES (6), (7), (39), (41): Xaa is C or S

SEQ ID NO: 91377 - protein, 26 aa, Artificial Sequence
  Cyclic GFR-binding peptide
ARLSNITIQIMDAANNVVLGEMSDMV

SEQ ID NO: 91378 - protein, 37 aa, Artificial Sequence; identical to SEQ ID NO: 36682
  Cyclic GFR-binding peptide
  MOD_RES (5), (6): Xaa is C or S

SEQ ID NO: 91379 - protein, 31 aa, Artificial Sequence
  Cyclic GFR-binding peptide
  MOD_RES (28), (30): Xaa is C or S
DLSNITIQIMIGKTPKILGEMSMIVKSXKXS

SEQ ID NO: 91380 - protein, 30 aa, Artificial Sequence
  Cyclic GFR-binding peptide
  MOD_RES (29), (29): Xaa is C or S
VKTSNITMQIMDNGRVLLLGEMSMIVEEXG

SEQ ID NO: 91381 - protein, 41 aa, Artificial Sequence; identical to SEQ ID NO: 36689
  Cyclic GFR-binding peptide
  MOD_RES (6), (7), (39), (41): Xaa is C or S

SEQ ID NO: 91382 - protein, 26 aa, Artificial Sequence
  Cyclic GFR-binding peptide
RLSNITIQIMDAANNVVLGEMSDMVV

SEQ ID NO: 91383 - protein, 24 aa, Artificial Sequence
  Cyclic GFR-binding peptide
TSNITMQIMDNGRVLLLGEMSMIV

SEQ ID NO: 91384 - protein, 27 aa, Artificial Sequence
  Cyclic GFR-binding peptide
  MOD_RES (1), (1): Xaa is C or S
XTPTKMSNITMQIMNDKQQIIIGEMSG

SEQ ID NO: 91385 - protein, 28 aa, Artificial Sequence
  Cyclic GFR-binding peptide
TKMSNITMQIMNDKQQIILGEMSGMVVD

SEQ ID NO: 91386 - protein, 27 aa, Artificial Sequence
  Cyclic GFR-binding peptide
  MOD_RES (26), (26): Xaa is C or S
SNITIQIMIGKTPKILGEMSMIVKSXK

SEQ ID NO: 91387 - protein, 32 aa, Artificial Sequence
  Cyclic GFR-binding peptide
  MOD_RES (5), (6): Xaa is C or S
SAGPXXTPTKMSNITMQIMNDKQQIIIGEMSG

SEQ ID NO: 91388 - protein, 26 aa, Artificial Sequence
  Cyclic GFR-binding peptide
RLSNITIQIMDSANNVVIGEMSDMVV

SEQ ID NO: 91389 - protein, 25 aa, Artificial Sequence
  Cyclic GFR-binding peptide
VPARLSNITIQIMDAANNVVIGEMS

SEQ ID NO: 91390 - protein, 38 aa, Artificial Sequence; identical to SEQ ID NO: 36692
  Cyclic GFR-binding peptide
  MOD_RES (5), (6), (37): Xaa is C or S

SEQ ID NO: 91391 - protein, 23 aa, Artificial Sequence
  Cyclic GFR-binding peptide
SNITMQIMDNGRVLLIGEMSMIV

SEQ ID NO: 91392 - protein, 35 aa, Artificial Sequence; identical to SEQ ID NO: 36694
  Cyclic GFR-binding peptide
  MOD_RES (1), (2), (33), (35): Xaa is C or S

SEQ ID NO: 91393 - protein, 32 aa, Artificial Sequence
  Cyclic GFR-binding peptide
  MOD_RES (31), (31): Xaa is C or S
PTRLSNITIQIMDSANNVVIGEMSDMVVESXG

SEQ ID NO: 91394 - protein, 36 aa, Artificial Sequence; identical to SEQ ID NO: 36696
  Cyclic GFR-binding peptide
  MOD_RES (3), (4), (35): Xaa is C or S

SEQ ID NO: 91395 - protein, 33 aa, Artificial Sequence; identical to SEQ ID NO: 36697
  Cyclic GFR-binding peptide
  MOD_RES (1), (2): Xaa is C or S

SEQ ID NO: 91396 - protein, 35 aa, Artificial Sequence; identical to SEQ ID NO: 36698
  Cyclic GFR-binding peptide
  MOD_RES (1), (2), (33), (35): Xaa is C or S

SEQ ID NO: 91397 - protein, 31 aa, Artificial Sequence
  Cyclic GFR-binding peptide
  MOD_RES (29), (31): Xaa is C or S
VKTSNITMQIMDNGRVLLIGEMSMIVEEXGX

SEQ ID NO: 91398 - protein, 36 aa, Artificial Sequence
  Cyclic GFR-binding peptide
  MOD_RES (6), (7): Xaa is C or S
RVPSTXXAPVKTSNITMQIMDNGRVLLIGEMSMIVE

SEQ ID NO: 91399 - protein, 35 aa, Artificial Sequence; identical to SEQ ID NO: 36699
  Cyclic GFR-binding peptide
  MOD_RES (4), (5): Xaa is C or S

SEQ ID NO: 91400 - protein, 27 aa, Artificial Sequence
  Cyclic GFR-binding peptide
KMSNITMQIMNDKQQIIIGEMSGMVVD

SEQ ID NO: 91401 - protein, 31 aa, Artificial Sequence
  Cyclic GFR-binding peptide
  MOD_RES (28), (30): Xaa is C or S
DLSNITIQIMVGRTPKVLGEMSMVVKSXKXS

SEQ ID NO: 91402 - protein, 26 aa, Artificial Sequence
  Cyclic GFR-binding peptide
KMSNITMQIMNDKQQIIIGEMSGMVV

SEQ ID NO: 91403 - protein, 40 aa, Artificial Sequence; identical to SEQ ID NO: 36703
  Cyclic GFR-binding peptide
  MOD_RES (6), (7), (39): Xaa is C or S

SEQ ID NO: 91404 - protein, 33 aa, Artificial Sequence
  Cyclic GFR-binding peptide
  MOD_RES (6), (7): Xaa is C or S
HVPKPXXAPTKLSNITVQIMDDSSNVILGEMSN

SEQ ID NO: 91405 - protein, 26 aa, Artificial Sequence
  Cyclic GFR-binding peptide
  MOD_RES (1), (1): Xaa is C or S
XTPTKMSNITMQIMNDKQQIIIGEMS

SEQ ID NO: 91406 - protein, 27 aa, Artificial Sequence
  Cyclic GFR-binding peptide
  MOD_RES (27), (27): Xaa is C or S
SNITIQIMDAANNVVLGEMSDMVVEAX

SEQ ID NO: 91407 - protein, 26 aa, Artificial Sequence
  Cyclic GFR-binding peptide
APTKLSNITVQIMDDSSNVILGEMSN

SEQ ID NO: 91408 - protein, 27 aa, Artificial Sequence
  Cyclic GFR-binding peptide
  MOD_RES (27), (27): Xaa is C or S
SNITMQIMNDKQQIIIGEMSGMVVDRX

SEQ ID NO: 91409 - protein, 24 aa, Artificial Sequence
  Cyclic GFR-binding peptide
RLSNITIQIMDSANNVVIGEMSDM

SEQ ID NO: 91410 - protein, 28 aa, Artificial Sequence
  Cyclic GFR-binding peptide
  MOD_RES (1), (2): Xaa is C or S
XXAPVKTSNITMQIMDNGRVLLLGEMSM

SEQ ID NO: 91411 - protein, 24 aa, Artificial Sequence
  Cyclic GFR-binding peptide
RLSNITIQIMDAANNVVIGEMSDM

SEQ ID NO: 91412 - protein, 32 aa, Artificial Sequence
  Cyclic GFR-binding peptide
  MOD_RES (3), (4): Xaa is C or S
GPXXTPTKMSNITMQIMNDKQQIILGEMSGMV

SEQ ID NO: 91413 - protein, 34 aa, Artificial Sequence
  Cyclic GFR-binding peptide
  MOD_RES (6), (7): Xaa is C or S
AAPASXXVPARLSNITIQIMDAANNVVIGEMSDM

SEQ ID NO: 91414 - protein, 32 aa, Artificial Sequence; identical to SEQ ID NO: 36711
  Cyclic GFR-binding peptide
  MOD_RES (1), (2): Xaa is C or S

SEQ ID NO: 91415 - protein, 36 aa, Artificial Sequence; identical to SEQ ID NO: 36714
  Cyclic GFR-binding peptide
  MOD_RES (4), (5): Xaa is C or S

SEQ ID NO: 91416 - protein, 23 aa, Artificial Sequence
  Cyclic GFR-binding peptide
MSNITMQIMNDKQQIILGEMSGM

SEQ ID NO: 91417 - protein, 35 aa, Artificial Sequence; identical to SEQ ID NO: 36716
  Cyclic GFR-binding peptide
  MOD_RES (1), (2), (34): Xaa is C or S

SEQ ID NO: 91418 - protein, 25 aa, Artificial Sequence
  Cyclic GFR-binding peptide
VKTSNITMQIMDNGRVLLLGEMSMI

SEQ ID NO: 91419 - protein, 30 aa, Artificial Sequence; identical to SEQ ID NO: 1137
  Cyclic GFR-binding peptide

SEQ ID NO: 91420 - protein, 30 aa, Artificial Sequence
  Cyclic GFR-binding peptide
  MOD_RES (1), (2): Xaa is C or S
XXVPTRLSNITIQIMDSANNVVIGEMSDMV

SEQ ID NO: 91421 - protein, 39 aa, Artificial Sequence; identical to SEQ ID NO: 36718
  Cyclic GFR-binding peptide
  MOD_RES (5), (6), (38): Xaa is C or S

SEQ ID NO: 91422 - protein, 32 aa, Artificial Sequence; identical to SEQ ID NO: 36719
  Cyclic GFR-binding peptide
  MOD_RES (1), (32): Xaa is C or S

SEQ ID NO: 91423 - protein, 39 aa, Artificial Sequence; identical to SEQ ID NO: 36720
  Cyclic GFR-binding peptide
  MOD_RES (3), (4), (36), (38): Xaa is C or S

SEQ ID NO: 91424 - protein, 24 aa, Artificial Sequence
  Cyclic GFR-binding peptide
SNITMQIMNDKQQIIIGEMSGMVV

SEQ ID NO: 91425 - protein, 37 aa, Artificial Sequence; identical to SEQ ID NO: 36724
  Cyclic GFR-binding peptide
  MOD_RES (2), (3), (35), (37): Xaa is C or S

SEQ ID NO: 91426 - protein, 29 aa, Artificial Sequence
  Cyclic GFR-binding peptide
  MOD_RES (28), (28): Xaa is C or S
KTSNITMQIMDNGRVLLIGEMSMIVEEXG

SEQ ID NO: 91427 - protein, 27 aa, Artificial Sequence
  Cyclic GFR-binding peptide
  MOD_RES (1), (2): Xaa is C or S
XXAPVKTSNITMQIMDNGRVLLIGEMS

SEQ ID NO: 91428 - protein, 23 aa, Artificial Sequence
  Cyclic GFR-binding peptide
TSNITMQIMDNGRVLLIGEMSMI

SEQ ID NO: 91429 - protein, 31 aa, Artificial Sequence
  Cyclic GFR-binding peptide
  MOD_RES (2), (3): Xaa is C or S
PXXTPTKMSNITMQIMNDKQQIIIGEMSGMV

SEQ ID NO: 91430 - protein, 28 aa, Artificial Sequence
  Cyclic GFR-binding peptide
  MOD_RES (1), (2): Xaa is C or S
XXVPARLSNITIQIMDAANNVVIGEMSD

SEQ ID NO: 91431 - protein, 39 aa, Artificial Sequence; identical to SEQ ID NO: 36730
  Cyclic GFR-binding peptide
  MOD_RES (5), (6), (37), (39): Xaa is C or S

SEQ ID NO: 91432 - protein, 39 aa, Artificial Sequence; identical to SEQ ID NO: 36731
  Cyclic GFR-binding peptide
  MOD_RES (5), (6), (38): Xaa is C or S

SEQ ID NO: 91433 - protein, 28 aa, Artificial Sequence
  Cyclic GFR-binding peptide
  MOD_RES (1), (1): Xaa is C or S
XVPARLSNITIQIMDAANNVVLGEMSDM

SEQ ID NO: 91434 - protein, 23 aa, Artificial Sequence
  Cyclic GFR-binding peptide
SNITVQIMDDSSNVILGEMSNMV

SEQ ID NO: 91435 - protein, 29 aa, Artificial Sequence
  Cyclic GFR-binding peptide
  MOD_RES (2), (3): Xaa is C or S
PXXAPTKLSNITVQIMDDSSNVILGEMSN

SEQ ID NO: 91436 - protein, 35 aa, Artificial Sequence
  Cyclic GFR-binding peptide
  MOD_RES (6), (7): Xaa is C or S
HVPKPXXAPTKLSNITVQIMDDSSNVILGEMSNMV

SEQ ID NO: 91437 - protein, 28 aa, Artificial Sequence
  Cyclic GFR-binding peptide
  MOD_RES (27), (27): Xaa is C or S
SNITMQIMNDKQQIIIGEMSGMVVDRXG

SEQ ID NO: 91438 - protein, 26 aa, Artificial Sequence
  Cyclic GFR-binding peptide
  MOD_RES (1), (1): Xaa is C or S
XVPQALSNITIQIMVGRKPKVLGEMS

SEQ ID NO: 91439 - protein, 35 aa, Artificial Sequence
  Cyclic GFR-binding peptide
  MOD_RES (6), (7): Xaa is C or S
GSAGPXXTPTKMSNITMQIMNDKQQIIIGEMSGMV

SEQ ID NO: 91440 - protein, 31 aa, Artificial Sequence
  Cyclic GFR-binding peptide
  MOD_RES (1), (2): Xaa is C or S
XXVSQDLSNITIQIMIGKTPKILGEMSMIVK

SEQ ID NO: 91441 - protein, 30 aa, Artificial Sequence
  Cyclic GFR-binding peptide
  MOD_RES (1), (1): Xaa is C or S
XVPARLSNITIQIMDAANNVVLGEMSDMVV

SEQ ID NO: 91442 - protein, 33 aa, Artificial Sequence; identical to SEQ ID NO: 36741
  Cyclic GFR-binding peptide
  MOD_RES (1), (2): Xaa is C or S

SEQ ID NO: 91443 - protein, 32 aa, Artificial Sequence
  Cyclic GFR-binding peptide
  MOD_RES (4), (5): Xaa is C or S
AAPXXVPQALSNITIQIMVGRKPKVLGEMSMI

SEQ ID NO: 91444 - protein, 25 aa, Artificial Sequence
  Cyclic GFR-binding peptide
SNITIQIMVGRKPKVLGEMSMIVRS

SEQ ID NO: 91445 - protein, 31 aa, Artificial Sequence; identical to SEQ ID NO: 36745
  Cyclic GFR-binding peptide
  MOD_RES (1), (1): Xaa is C or S

SEQ ID NO: 91446 - protein, 32 aa, Artificial Sequence
  Cyclic GFR-binding peptide
  MOD_RES (2), (3): Xaa is C or S
PXXVSQDLSNITIQIMIGKTPKILGEMSMIVK

SEQ ID NO: 91447 - protein, 40 aa, Artificial Sequence; identical to SEQ ID NO: 36746
  Cyclic GFR-binding peptide
  MOD_RES (6), (7), (38), (40): Xaa is C or S

SEQ ID NO: 91448 - protein, 29 aa, Artificial Sequence
  Cyclic GFR-binding peptide
TPTKMSNITMQIMNDKQQIILGEMSGMVV

SEQ ID NO: 91449 - protein, 31 aa, Artificial Sequence
  Cyclic GFR-binding peptide
  MOD_RES (29), (31): Xaa is C or S
QDLSNITIQIMVGRTPKVLGEMSMVVKSXKX

SEQ ID NO: 91450 - protein, 41 aa, Artificial Sequence; identical to SEQ ID NO: 36752
  Cyclic GFR-binding peptide
  MOD_RES (5), (6), (38), (40): Xaa is C or S

SEQ ID NO: 91451 - protein, 29 aa, Artificial Sequence
  Cyclic GFR-binding peptide
  MOD_RES (3), (4): Xaa is C or S
APXXVPQALSNITIQIMVGRKPKVLGEMS

SEQ ID NO: 91452 - protein, 25 aa, Artificial Sequence
  Cyclic GFR-binding peptide
SNITIQIMIGKTPKILGEMSMIVKS

SEQ ID NO: 91453 - protein, 29 aa, Artificial Sequence
  Cyclic GFR-binding peptide
  MOD_RES (1), (2): Xaa is C or S
XXVPQDLSNITIQIMVGRTPKVLGEMSMV

SEQ ID NO: 91454 - protein, 22 aa, Artificial Sequence
  Cyclic GFR-binding peptide
LSNITIQIMDAANNVVIGEMSD

SEQ ID NO: 91455 - protein, 25 aa, Artificial Sequence
  Cyclic GFR-binding peptide
PTRLSNITIQIMDSANNVVLGEMSD

SEQ ID NO: 91456 - protein, 38 aa, Artificial Sequence; identical to SEQ ID NO: 36758
  Cyclic GFR-binding peptide
  MOD_RES (6), (7), (38): Xaa is C or S

SEQ ID NO: 91457 - protein, 31 aa, Artificial Sequence
  Cyclic GFR-binding peptide
  MOD_RES (30), (30): Xaa is C or S
PQALSNITIQIMVGRKPKVLGEMSMIVRSXK

SEQ ID NO: 91458 - protein, 25 aa, Artificial Sequence
  Cyclic GFR-binding peptide
TPTKMSNITMQIMNDKQQIILGEMS

SEQ ID NO: 91459 - protein, 29 aa, Artificial Sequence
  Cyclic GFR-binding peptide
  MOD_RES (28), (28): Xaa is C or S
LSNITIQIMDAANNVVIGEMSDMVVEAXG

SEQ ID NO: 91460 - protein, 27 aa, Artificial Sequence
  Cyclic GFR-binding peptide
TKLSNITVQIMDDSSNVILGEMSNMVV

SEQ ID NO: 91461 - protein, 27 aa, Artificial Sequence
  Cyclic GFR-binding peptide
  MOD_RES (27), (27): Xaa is C or S
TSNITMQIMDNGRVLLIGEMSMIVEEX

SEQ ID NO: 91462 - protein, 29 aa, Artificial Sequence
  Cyclic GFR-binding peptide
TKMSNITMQIMNDKQQIIIGEMSGMVVDR

SEQ ID NO: 91463 - protein, 35 aa, Artificial Sequence
  Cyclic GFR-binding peptide
  MOD_RES (5), (6): Xaa is C or S
SAAPXXVPQALSNITIQIMVGRKPKVLGEMSMIVR

SEQ ID NO: 91464 - protein, 23 aa, Artificial Sequence
  Cyclic GFR-binding peptide
KTSNITMQIMDNGRVLLLGEMSM

SEQ ID NO: 91465 - protein, 34 aa, Artificial Sequence
  Cyclic GFR-binding peptide
  MOD_RES (5), (6): Xaa is C or S
SASPXXVPQDLSNITIQIMVGRTPKVLGEMSMVV

SEQ ID NO: 91466 - protein, 21 aa, Artificial Sequence
  Cyclic GFR-binding peptide
LSNITVQIMDDSSNVILGEMS

SEQ ID NO: 91467 - protein, 27 aa, Artificial Sequence
  Cyclic GFR-binding peptide
  MOD_RES (1), (2): Xaa is C or S
XXTPTKMSNITMQIMNDKQQIIIGEMS

SEQ ID NO: 91468 - protein, 25 aa, Artificial Sequence
  Cyclic GFR-binding peptide
VPARLSNITIQIMDAANNVVLGEMS

SEQ ID NO: 91469 - protein, 27 aa, Artificial Sequence
  Cyclic GFR-binding peptide
VPQALSNITIQIMVGRKPKVLGEMSMI

SEQ ID NO: 91470 - protein, 27 aa, Artificial Sequence
  Cyclic GFR-binding peptide
  MOD_RES (26), (26): Xaa is C or S
SNITIQIMVGRKPKVLGEMSMIVRSXK

SEQ ID NO: 91471 - protein, 24 aa, Artificial Sequence
  Cyclic GFR-binding peptide
SNITIQIMDSANNVVIGEMSDMVV

SEQ ID NO: 91472 - protein, 25 aa, Artificial Sequence
  Cyclic GFR-binding peptide
KLSNITVQIMDDSSNVILGEMSNMV

SEQ ID NO: 91473 - protein, 21 aa, Artificial Sequence
  Cyclic GFR-binding peptide
SNITMQIMDNGRVLLLGEMSM

SEQ ID NO: 91474 - protein, 27 aa, Artificial Sequence
  Cyclic GFR-binding peptide
  MOD_RES (1), (1): Xaa is C or S
XVPQALSNITIQIMVGRKPKVLGEMSM

SEQ ID NO: 91475 - protein, 25 aa, Artificial Sequence
  Cyclic GFR-binding peptide
KMSNITMQIMNDKQQIIIGEMSGMV

SEQ ID NO: 91476 - protein, 31 aa, Artificial Sequence
  Cyclic GFR-binding peptide
  MOD_RES (31), (31): Xaa is C or S
PTRLSNITIQIMDSANNVVIGEMSDMVVESX

SEQ ID NO: 91477 - protein, 37 aa, Artificial Sequence; identical to SEQ ID NO: 36780
  Cyclic GFR-binding peptide
  MOD_RES (6), (7): Xaa is C or S

SEQ ID NO: 91478 - protein, 37 aa, Artificial Sequence; identical to SEQ ID NO: 36782
  Cyclic GFR-binding peptide
  MOD_RES (4), (5), (37): Xaa is C or S

SEQ ID NO: 91479 - protein, 34 aa, Artificial Sequence
  Cyclic GFR-binding peptide
  MOD_RES (6), (7): Xaa is C or S
ASAAPXXVPQALSNITIQIMVGRKPKVLGEMSMI

SEQ ID NO: 91480 - protein, 36 aa, Artificial Sequence; identical to SEQ ID NO: 36785
  Cyclic GFR-binding peptide
  MOD_RES (4), (5): Xaa is C or S

SEQ ID NO: 91481 - protein, 27 aa, Artificial Sequence
  Cyclic GFR-binding peptide
APTKLSNITVQIMDDSSNVILGEMSNM

SEQ ID NO: 91482 - protein, 27 aa, Artificial Sequence
  Cyclic GFR-binding peptide
KTSNITMQIMDNGRVLLIGEMSMIVEE

SEQ ID NO: 91483 - protein, 36 aa, Artificial Sequence; identical to SEQ ID NO: 36787
  Cyclic GFR-binding peptide
  MOD_RES (1), (33), (35): Xaa is C or S

SEQ ID NO: 91484 - protein, 30 aa, Artificial Sequence
  Cyclic GFR-binding peptide
  MOD_RES (30), (30): Xaa is C or S
PVKTSNITMQIMDNGRVLLIGEMSMIVEEX

SEQ ID NO: 91485 - protein, 27 aa, Artificial Sequence
  Cyclic GFR-binding peptide
  MOD_RES (26), (26): Xaa is C or S
SNITMQIMDNGRVLLIGEMSMIVEEXG

SEQ ID NO: 91486 - protein, 26 aa, Artificial Sequence
  Cyclic GFR-binding peptide
LSNITIQIMIGKTPKILGEMSMIVKS

SEQ ID NO: 91487 - protein, 36 aa, Artificial Sequence; identical to SEQ ID NO: 36791
  Cyclic GFR-binding peptide
  MOD_RES (3), (4), (36): Xaa is C or S

SEQ ID NO: 91488 - protein, 32 aa, Artificial Sequence
  Cyclic GFR-binding peptide
  MOD_RES (4), (5): Xaa is C or S
PASXXVPARLSNITIQIMDAANNVVIGEMSDM

SEQ ID NO: 91489 - protein, 35 aa, Artificial Sequence; identical to SEQ ID NO: 36794
  Cyclic GFR-binding peptide
  MOD_RES (32), (34): Xaa is C or S

SEQ ID NO: 91490 - protein, 36 aa, Artificial Sequence; identical to SEQ ID NO: 36797
  Cyclic GFR-binding peptide
  MOD_RES (2), (3), (35): Xaa is C or S

SEQ ID NO: 91491 - protein, 39 aa, Artificial Sequence; identical to SEQ ID NO: 36800
  Cyclic GFR-binding peptide
  MOD_RES (6), (7), (39): Xaa is C or S

SEQ ID NO: 91492 - protein, 28 aa, Artificial Sequence
  Cyclic GFR-binding peptide
  MOD_RES (2), (3): Xaa is C or S
TXXVPTRLSNITIQIMDSANNVVIGEMS

SEQ ID NO: 91493 - protein, 30 aa, Artificial Sequence
  Cyclic GFR-binding peptide
  MOD_RES (29), (29): Xaa is C or S
RLSNITIQIMDSANNVVLGEMSDMVVESXG

SEQ ID NO: 91494 - protein, 29 aa, Artificial Sequence
  Cyclic GFR-binding peptide
TPTKMSNITMQIMNDKQQIIIGEMSGMVV

SEQ ID NO: 91495 - protein, 30 aa, Artificial Sequence
  Cyclic GFR-binding peptide
  MOD_RES (27), (29): Xaa is C or S
SNITIQIMDSANNVVLGEMSDMVVESXGXR

SEQ ID NO: 91496 - protein, 33 aa, Artificial Sequence; identical to SEQ ID NO: 36812
  Cyclic GFR-binding peptide
  MOD_RES (1), (32): Xaa is C or S

SEQ ID NO: 91497 - protein, 26 aa, Artificial Sequence
  Cyclic GFR-binding peptide
  MOD_RES (1), (1): Xaa is C or S
XVSQDLSNITIQIMIGKTPKILGEMS

SEQ ID NO: 91498 - protein, 34 aa, Artificial Sequence; identical to SEQ ID NO: 36814
  Cyclic GFR-binding peptide
  MOD_RES (2), (3): Xaa is C or S

SEQ ID NO: 91499 - protein, 22 aa, Artificial Sequence
  Cyclic GFR-binding peptide
DLSNITIQIMVGRTPKVLGEMS

SEQ ID NO: 91500 - protein, 27 aa, Artificial Sequence
  Cyclic GFR-binding peptide
  MOD_RES (1), (1): Xaa is C or S
XVPQDLSNITIQIMVGRTPKVLGEMSM

SEQ ID NO: 91501 - protein, 32 aa, Artificial Sequence; identical to SEQ ID NO: 36815
  Cyclic GFR-binding peptide
  MOD_RES (31), (31): Xaa is C or S

SEQ ID NO: 91502 - protein, 31 aa, Artificial Sequence
  Cyclic GFR-binding peptide
  MOD_RES (3), (4): Xaa is C or S
GPXXTPTKMSNITMQIMNDKQQIILGEMSGM

SEQ ID NO: 91503 - protein, 36 aa, Artificial Sequence; identical to SEQ ID NO: 36821
  Cyclic GFR-binding peptide
  MOD_RES (4), (5): Xaa is C or S

SEQ ID NO: 91504 - protein, 27 aa, Artificial Sequence
  Cyclic GFR-binding peptide
PQDLSNITIQIMVGRTPKVLGEMSMVV

SEQ ID NO: 91505 - protein, 32 aa, Artificial Sequence
  Cyclic GFR-binding peptide
  MOD_RES (30), (32): Xaa is C or S
PQDLSNITIQIMVGRTPKVLGEMSMVVKSXKX

SEQ ID NO: 91506 - protein, 33 aa, Artificial Sequence; identical to SEQ ID NO: 36824
  Cyclic GFR-binding peptide
  MOD_RES (1), (32): Xaa is C or S

SEQ ID NO: 91507 - protein, 31 aa, Artificial Sequence
  Cyclic GFR-binding peptide
  MOD_RES (3), (4): Xaa is C or S
STXXAPVKTSNITMQIMDNGRVLLLGEMSMI

SEQ ID NO: 91508 - protein, 24 aa, Artificial Sequence
  Cyclic GFR-binding peptide
ARLSNITIQIMDAANNVVLGEMSD

SEQ ID NO: 91509 - protein, 36 aa, Artificial Sequence
  Cyclic GFR-binding peptide
  MOD_RES (6), (7): Xaa is C or S
GSAGPXXTPTKMSNITMQIMNDKQQIILGEMSGMVV

SEQ ID NO: 91510 - protein, 37 aa, Artificial Sequence; identical to SEQ ID NO: 36829
  Cyclic GFR-binding peptide
  MOD_RES (3), (4), (36): Xaa is C or S

SEQ ID NO: 91511 - protein, 36 aa, Artificial Sequence
  Cyclic GFR-binding peptide
  MOD_RES (6), (7): Xaa is C or S
HVPKPXXAPTKLSNITVQIMDDSSNVILGEMSNMVV

SEQ ID NO: 91512 - protein, 30 aa, Artificial Sequence
  Cyclic GFR-binding peptide
  MOD_RES (30), (30): Xaa is C or S
SQDLSNITIQIMIGKTPKILGEMSMIVKSX

SEQ ID NO: 91513 - protein, 37 aa, Artificial Sequence; identical to SEQ ID NO: 36831
  Cyclic GFR-binding peptide
  MOD_RES (5), (6), (37): Xaa is C or S

SEQ ID NO: 91514 - protein, 29 aa, Artificial Sequence
  Cyclic GFR-binding peptide
VPARLSNITIQIMDAANNVVLGEMSDMVV

SEQ ID NO: 91515 - protein, 34 aa, Artificial Sequence; identical to SEQ ID NO: 36834
  Cyclic GFR-binding peptide
  MOD_RES (1), (32), (34): Xaa is C or S

SEQ ID NO: 91516 - protein, 30 aa, Artificial Sequence
  Cyclic GFR-binding peptide
  MOD_RES (3), (4): Xaa is C or S
PTXXVPTRLSNITIQIMDSANNVVLGEMSD

SEQ ID NO: 91517 - protein, 30 aa, Artificial Sequence
  Cyclic GFR-binding peptide
  MOD_RES (3), (4): Xaa is C or S
KPXXAPTKLSNITVQIMDDSSNVILGEMSN

SEQ ID NO: 91518 - protein, 26 aa, Artificial Sequence
  Cyclic GFR-binding peptide
PTKMSNITMQIMNDKQQIILGEMSGM

SEQ ID NO: 91519 - protein, 35 aa, Artificial Sequence; identical to SEQ ID NO: 36841
  Cyclic GFR-binding peptide
  MOD_RES (3), (4), (35): Xaa is C or S

SEQ ID NO: 91520 - protein, 31 aa, Artificial Sequence
  Cyclic GFR-binding peptide
  MOD_RES (3), (4): Xaa is C or S
ASXXVPARLSNITIQIMDAANNVVIGEMSDM

SEQ ID NO: 91521 - protein, 25 aa, Artificial Sequence
  Cyclic GFR-binding peptide
VPQDLSNITIQIMVGRTPKVLGEMS

SEQ ID NO: 91522 - protein, 32 aa, Artificial Sequence
  Cyclic GFR-binding peptide
  MOD_RES (3), (4): Xaa is C or S
GPXXTPTKMSNITMQIMNDKQQIIIGEMSGMV

SEQ ID NO: 91523 - protein, 25 aa, Artificial Sequence
  Cyclic GFR-binding peptide
RLSNITIQIMDSANNVVIGEMSDMV

SEQ ID NO: 91524 - protein, 31 aa, Artificial Sequence
  Cyclic GFR-binding peptide
  MOD_RES (1), (2): Xaa is C or S
XXVPQALSNITIQIMVGRKPKVLGEMSMIVR

SEQ ID NO: 91525 - protein, 34 aa, Artificial Sequence; identical to SEQ ID NO: 36846
  Cyclic GFR-binding peptide
  MOD_RES (1), (2), (33): Xaa is C or S

SEQ ID NO: 91526 - protein, 38 aa, Artificial Sequence; identical to SEQ ID NO: 36849
  Cyclic GFR-binding peptide
  MOD_RES (3), (4), (36), (38): Xaa is C or S

SEQ ID NO: 91527 - protein, 22 aa, Artificial Sequence
  Cyclic GFR-binding peptide
LSNITIQIMIGKTPKILGEMSM

SEQ ID NO: 91528 - protein, 33 aa, Artificial Sequence
  Cyclic GFR-binding peptide
  MOD_RES (30), (32): Xaa is C or S
ARLSNITIQIMDAANNVVLGEMSDMVVEAXGXR

SEQ ID NO: 91529 - protein, 31 aa, Artificial Sequence
  Cyclic GFR-binding peptide
  MOD_RES (2), (3): Xaa is C or S
PXXVSQDLSNITIQIMIGKTPKILGEMSMIV

SEQ ID NO: 91530 - protein, 30 aa, Artificial Sequence
  Cyclic GFR-binding peptide
  MOD_RES (2), (3): Xaa is C or S
PXXTPTKMSNITMQIMNDKQQIIIGEMSGM

SEQ ID NO: 91531 - protein, 33 aa, Artificial Sequence; identical to SEQ ID NO: 36856
  Cyclic GFR-binding peptide
  MOD_RES (2), (3): Xaa is C or S

SEQ ID NO: 91532 - protein, 37 aa, Artificial Sequence; identical to SEQ ID NO: 36857
  Cyclic GFR-binding peptide
  MOD_RES (4), (5), (36): Xaa is C or S

SEQ ID NO: 91533 - protein, 31 aa, Artificial Sequence
  Cyclic GFR-binding peptide
  MOD_RES (1), (2): Xaa is C or S
XXAPVKTSNITMQIMDNGRVLLIGEMSMIVE

SEQ ID NO: 91534 - protein, 29 aa, Artificial Sequence
  Cyclic GFR-binding peptide
  MOD_RES (3), (4): Xaa is C or S
ASXXVPARLSNITIQIMDAANNVVLGEMS

SEQ ID NO: 91535 - protein, 27 aa, Artificial Sequence
  Cyclic GFR-binding peptide
LSNITIQIMDAANNVVIGEMSDMVVEA

SEQ ID NO: 91536 - protein, 40 aa, Artificial Sequence; identical to SEQ ID NO: 36861
  Cyclic GFR-binding peptide
  MOD_RES (6), (7), (39): Xaa is C or S

SEQ ID NO: 91537 - protein, 38 aa, Artificial Sequence; identical to SEQ ID NO: 36862
  Cyclic GFR-binding peptide
  MOD_RES (4), (5), (36), (38): Xaa is C or S

SEQ ID NO: 91538 - protein, 40 aa, Artificial Sequence; identical to SEQ ID NO: 36863
  Cyclic GFR-binding peptide
  MOD_RES (5), (6), (38), (40): Xaa is C or S

SEQ ID NO: 91539 - protein, 35 aa, Artificial Sequence; identical to SEQ ID NO: 36864
  Cyclic GFR-binding peptide
  MOD_RES (3), (4), (35): Xaa is C or S

SEQ ID NO: 91540 - protein, 31 aa, Artificial Sequence; identical to SEQ ID NO: 36866
  Cyclic GFR-binding peptide

SEQ ID NO: 91541 - protein, 20 aa, Artificial Sequence
  Cyclic GFR-binding peptide
SNITMQIMNDKQQIIIGEMS

SEQ ID NO: 91542 - protein, 31 aa, Artificial Sequence; identical to SEQ ID NO: 36867
  Cyclic GFR-binding peptide
  MOD_RES (1), (1): Xaa is C or S

SEQ ID NO: 91543 - protein, 33 aa, Artificial Sequence
  Cyclic GFR-binding peptide
  MOD_RES (3), (4): Xaa is C or S
SPXXVPQDLSNITIQIMVGRTPKVLGEMSMVVK

SEQ ID NO: 91544 - protein, 21 aa, Artificial Sequence
  Cyclic GFR-binding peptide
MSNITMQIMNDKQQIILGEMS

SEQ ID NO: 91545 - protein, 34 aa, Artificial Sequence; identical to SEQ ID NO: 36872
  Cyclic GFR-binding peptide
  MOD_RES (1), (33): Xaa is C or S

SEQ ID NO: 91546 - protein, 33 aa, Artificial Sequence
  Cyclic GFR-binding peptide
  MOD_RES (3), (4): Xaa is C or S
ASXXVPARLSNITIQIMDAANNVVLGEMSDMVV

SEQ ID NO: 91547 - protein, 34 aa, Artificial Sequence; identical to SEQ ID NO: 36875
  Cyclic GFR-binding peptide
  MOD_RES (31), (33): Xaa is C or S

SEQ ID NO: 91548 - protein, 28 aa, Artificial Sequence
  Cyclic GFR-binding peptide
VPQALSNITIQIMVGRKPKVLGEMSMIV

SEQ ID NO: 91549 - protein, 29 aa, Artificial Sequence
  Cyclic GFR-binding peptide
  MOD_RES (1), (2): Xaa is C or S
XXVPARLSNITIQIMDAANNVVLGEMSDM

SEQ ID NO: 91550 - protein, 32 aa, Artificial Sequence
  Cyclic GFR-binding peptide
  MOD_RES (30), (32): Xaa is C or S
ARLSNITIQIMDAANNVVIGEMSDMVVEAXGX

SEQ ID NO: 91551 - protein, 31 aa, Artificial Sequence; identical to SEQ ID NO: 36879
  Cyclic GFR-binding peptide
  MOD_RES (31), (31): Xaa is C or S

SEQ ID NO: 91552 - protein, 39 aa, Artificial Sequence; identical to SEQ ID NO: 36880
  Cyclic GFR-binding peptide
  MOD_RES (4), (5), (36), (38): Xaa is C or S

SEQ ID NO: 91553 - protein, 30 aa, Artificial Sequence
  Cyclic GFR-binding peptide
  MOD_RES (4), (5): Xaa is C or S
PASXXVPARLSNITIQIMDAANNVVIGEMS

SEQ ID NO: 91554 - protein, 30 aa, Artificial Sequence
  Cyclic GFR-binding peptide
  MOD_RES (3), (4): Xaa is C or S
STXXAPVKTSNITMQIMDNGRVLLIGEMSM

SEQ ID NO: 91555 - protein, 33 aa, Artificial Sequence
  Cyclic GFR-binding peptide
  MOD_RES (6), (7): Xaa is C or S
GSAGPXXTPTKMSNITMQIMNDKQQIILGEMSG

SEQ ID NO: 91556 - protein, 36 aa, Artificial Sequence
  Cyclic GFR-binding peptide
  MOD_RES (6), (7): Xaa is C or S
ASASPXXVSQDLSNITIQIMIGKTPKILGEMSMIVK

SEQ ID NO: 91557 - protein, 24 aa, Artificial Sequence
  Cyclic GFR-binding peptide
VKTSNITMQIMDNGRVLLIGEMSM

SEQ ID NO: 91558 - protein, 24 aa, Artificial Sequence
  Cyclic GFR-binding peptide
PTRLSNITIQIMDSANNVVLGEMS

SEQ ID NO: 91559 - protein, 36 aa, Artificial Sequence; identical to SEQ ID NO: 36891
  Cyclic GFR-binding peptide
  MOD_RES (5), (6): Xaa is C or S

SEQ ID NO: 91560 - protein, 24 aa, Artificial Sequence
  Cyclic GFR-binding peptide
SNITMQIMDNGRVLLLGEMSMIVE

SEQ ID NO: 91561 - protein, 29 aa, Artificial Sequence
  Cyclic GFR-binding peptide
PTRLSNITIQIMDSANNVVLGEMSDMVVE

SEQ ID NO: 91562 - protein, 30 aa, Artificial Sequence
  Cyclic GFR-binding peptide
  MOD_RES (30), (30): Xaa is C or S
ARLSNITIQIMDAANNVVIGEMSDMVVEAX

SEQ ID NO: 91563 - protein, 30 aa, Artificial Sequence
  Cyclic GFR-binding peptide
  MOD_RES (27), (29): Xaa is C or S
SNITVQIMDDSSNVILGEMSNMVVRSXGXH

SEQ ID NO: 91564 - protein, 37 aa, Artificial Sequence; identical to SEQ ID NO: 36893
  Cyclic GFR-binding peptide
  MOD_RES (5), (6), (37): Xaa is C or S

SEQ ID NO: 91565 - protein, 27 aa, Artificial Sequence
  Cyclic GFR-binding peptide
ARLSNITIQIMDAANNVVIGEMSDMVV

SEQ ID NO: 91566 - protein, 23 aa, Artificial Sequence
  Cyclic GFR-binding peptide
LSNITIQIMIGKTPKILGEMSMI

SEQ ID NO: 91567 - protein, 28 aa, Artificial Sequence
  Cyclic GFR-binding peptide
TKLSNITVQIMDDSSNVILGEMSNMVVR

SEQ ID NO: 91568 - protein, 32 aa, Artificial Sequence
  Cyclic GFR-binding peptide
  MOD_RES (6), (7): Xaa is C or S
ASAAPXXVPQALSNITIQIMVGRKPKVLGEMS

SEQ ID NO: 91569 - protein, 30 aa, Artificial Sequence
  Cyclic GFR-binding peptide
  MOD_RES (28), (30): Xaa is C or S
LSNITIQIMDAANNVVIGEMSDMVVEAXGX

SEQ ID NO: 91570 - protein, 28 aa, Artificial Sequence
  Cyclic GFR-binding peptide
  MOD_RES (28), (28): Xaa is C or S
MSNITMQIMNDKQQIIIGEMSGMVVDRX

SEQ ID NO: 91571 - protein, 29 aa, Artificial Sequence
  Cyclic GFR-binding peptide
  MOD_RES (29), (29): Xaa is C or S
KMSNITMQIMNDKQQIIIGEMSGMVVDRX

SEQ ID NO: 91572 - protein, 30 aa, Artificial Sequence
  Cyclic GFR-binding peptide
  MOD_RES (30), (30): Xaa is C or S
TRLSNITIQIMDSANNVVLGEMSDMVVESX

SEQ ID NO: 91573 - protein, 25 aa, Artificial Sequence
  Cyclic GFR-binding peptide
PARLSNITIQIMDAANNVVLGEMSD

SEQ ID NO: 91574 - protein, 23 aa, Artificial Sequence
  Cyclic GFR-binding peptide
TRLSNITIQIMDSANNVVLGEMS

SEQ ID NO: 91575 - protein, 32 aa, Artificial Sequence
  Cyclic GFR-binding peptide
  MOD_RES (29), (31): Xaa is C or S
QDLSNITIQIMVGRTPKVLGEMSMVVKSXKXS

SEQ ID NO: 91576 - protein, 32 aa, Artificial Sequence
  Cyclic GFR-binding peptide
  MOD_RES (5), (6): Xaa is C or S
SASPXXVSQDLSNITIQIMIGKTPKILGEMSM

SEQ ID NO: 91577 - protein, 31 aa, Artificial Sequence
  Cyclic GFR-binding peptide
  MOD_RES (1), (2): Xaa is C or S
XXAPVKTSNITMQIMDNGRVLLLGEMSMIVE

SEQ ID NO: 91578 - protein, 34 aa, Artificial Sequence; identical to SEQ ID NO: 36918
  Cyclic GFR-binding peptide
  MOD_RES (2), (3), (34): Xaa is C or S

SEQ ID NO: 91579 - protein, 25 aa, Artificial Sequence
  Cyclic GFR-binding peptide
VPTRLSNITIQIMDSANNVVIGEMS

SEQ ID NO: 91580 - protein, 28 aa, Artificial Sequence
  Cyclic GFR-binding peptide
  MOD_RES (28), (28): Xaa is C or S
LSNITIQIMDAANNVVIGEMSDMVVEAX

SEQ ID NO: 91581 - protein, 27 aa, Artificial Sequence
  Cyclic GFR-binding peptide
PTKMSNITMQIMNDKQQIIIGEMSGMV

SEQ ID NO: 91582 - protein, 30 aa, Artificial Sequence
  Cyclic GFR-binding peptide
  MOD_RES (27), (29): Xaa is C or S
SNITIQIMDAANNVVLGEMSDMVVEAXGXR

SEQ ID NO: 91583 - protein, 26 aa, Artificial Sequence
  Cyclic GFR-binding peptide
MSNITMQIMNDKQQIILGEMSGMVVD

SEQ ID NO: 91584 - protein, 23 aa, Artificial Sequence
  Cyclic GFR-binding peptide
ALSNITIQIMVGRKPKVLGEMSM

SEQ ID NO: 91585 - protein, 32 aa, Artificial Sequence
  Cyclic GFR-binding peptide
  MOD_RES (5), (6): Xaa is C or S
APASXXVPARLSNITIQIMDAANNVVIGEMSD

SEQ ID NO: 91586 - protein, 25 aa, Artificial Sequence
  Cyclic GFR-binding peptide
ARLSNITIQIMDAANNVVIGEMSDM

SEQ ID NO: 91587 - protein, 21 aa, Artificial Sequence
  Cyclic GFR-binding peptide
SNITIQIMDSANNVVLGEMSD

SEQ ID NO: 91588 - protein, 40 aa, Artificial Sequence; identical to SEQ ID NO: 36925
  Cyclic GFR-binding peptide
  MOD_RES (4), (5), (37), (39): Xaa is C or S

SEQ ID NO: 91589 - protein, 38 aa, Artificial Sequence; identical to SEQ ID NO: 36926
  Cyclic GFR-binding peptide
  MOD_RES (3), (4), (36), (38): Xaa is C or S

SEQ ID NO: 91590 - protein, 35 aa, Artificial Sequence; identical to SEQ ID NO: 36929
  Cyclic GFR-binding peptide
  MOD_RES (32), (34): Xaa is C or S

SEQ ID NO: 91591 - protein, 26 aa, Artificial Sequence
  Cyclic GFR-binding peptide
  MOD_RES (1), (1): Xaa is C or S
XVPTRLSNITIQIMDSANNVVIGEMS

SEQ ID NO: 91592 - protein, 30 aa, Artificial Sequence
  Cyclic GFR-binding peptide
PARLSNITIQIMDAANNVVIGEMSDMVVEA

SEQ ID NO: 91593 - protein, 33 aa, Artificial Sequence; identical to SEQ ID NO: 36934
  Cyclic GFR-binding peptide
  MOD_RES (1), (2), (33): Xaa is C or S

SEQ ID NO: 91594 - protein, 36 aa, Artificial Sequence; identical to SEQ ID NO: 36936
  Cyclic GFR-binding peptide
  MOD_RES (3), (4), (36): Xaa is C or S

SEQ ID NO: 91595 - protein, 30 aa, Artificial Sequence
  Cyclic GFR-binding peptide
  MOD_RES (1), (2): Xaa is C or S
XXVPTRLSNITIQIMDSANNVVLGEMSDMV

SEQ ID NO: 91596 - protein, 33 aa, Artificial Sequence
  Cyclic GFR-binding peptide
  MOD_RES (5), (6): Xaa is C or S
TPPTXXVPTRLSNITIQIMDSANNVVIGEMSDM

SEQ ID NO: 91597 - protein, 35 aa, Artificial Sequence; identical to SEQ ID NO: 36940
  Cyclic GFR-binding peptide
  MOD_RES (3), (4): Xaa is C or S

SEQ ID NO: 91598 - protein, 38 aa, Artificial Sequence; identical to SEQ ID NO: 36941
  Cyclic GFR-binding peptide
  MOD_RES (5), (6), (38): Xaa is C or S

SEQ ID NO: 91599 - protein, 27 aa, Artificial Sequence
  Cyclic GFR-binding peptide
VPTRLSNITIQIMDSANNVVLGEMSDM

SEQ ID NO: 91600 - protein, 30 aa, Artificial Sequence; identical to SEQ ID NO: 36943
  Cyclic GFR-binding peptide

SEQ ID NO: 91601 - protein, 36 aa, Artificial Sequence; identical to SEQ ID NO: 36945
  Cyclic GFR-binding peptide
  MOD_RES (1), (2), (34), (36): Xaa is C or S

SEQ ID NO: 91602 - protein, 27 aa, Artificial Sequence
  Cyclic GFR-binding peptide
TPTKMSNITMQIMNDKQQIIIGEMSGM

SEQ ID NO: 91603 - protein, 42 aa, Artificial Sequence; identical to SEQ ID NO: 36950
  Cyclic GFR-binding peptide
  MOD_RES (6), (7), (39), (41): Xaa is C or S

SEQ ID NO: 91604 - protein, 32 aa, Artificial Sequence
  Cyclic GFR-binding peptide
  MOD_RES (6), (7): Xaa is C or S
AAPASXXVPARLSNITIQIMDAANNVVIGEMS

SEQ ID NO: 91605 - protein, 34 aa, Artificial Sequence; identical to SEQ ID NO: 36953
  Cyclic GFR-binding peptide
  MOD_RES (1), (33): Xaa is C or S

SEQ ID NO: 91606 - protein, 27 aa, Artificial Sequence
  Cyclic GFR-binding peptide
  MOD_RES (1), (2): Xaa is C or S
XXVPTRLSNITIQIMDSANNVVLGEMS

SEQ ID NO: 91607 - protein, 28 aa, Artificial Sequence
  Cyclic GFR-binding peptide
  MOD_RES (27), (27): Xaa is C or S
SNITIQIMDSANNVVLGEMSDMVVESXG

SEQ ID NO: 91608 - protein, 38 aa, Artificial Sequence; identical to SEQ ID NO: 36956
  Cyclic GFR-binding peptide
  MOD_RES (2), (3), (35), (37): Xaa is C or S

SEQ ID NO: 91609 - protein, 25 aa, Artificial Sequence
  Cyclic GFR-binding peptide
RLSNITIQIMDSANNVVLGEMSDMV

SEQ ID NO: 91610 - protein, 32 aa, Artificial Sequence
  Cyclic GFR-binding peptide
  MOD_RES (3), (4): Xaa is C or S
SPXXVSQDLSNITIQIMIGKTPKILGEMSMIV

SEQ ID NO: 91611 - protein, 24 aa, Artificial Sequence
  Cyclic GFR-binding peptide
KMSNITMQIMNDKQQIIIGEMSGM

SEQ ID NO: 91612 - protein, 29 aa, Artificial Sequence
  Cyclic GFR-binding peptide
  MOD_RES (29), (29): Xaa is C or S
QDLSNITIQIMVGRTPKVLGEMSMVVKSX

SEQ ID NO: 91613 - protein, 32 aa, Artificial Sequence; identical to SEQ ID NO: 36958
  Cyclic GFR-binding peptide
  MOD_RES (1), (1): Xaa is C or S

SEQ ID NO: 91614 - protein, 36 aa, Artificial Sequence; identical to SEQ ID NO: 36960
  Cyclic GFR-binding peptide
  MOD_RES (2), (3), (35): Xaa is C or S

SEQ ID NO: 91615 - protein, 32 aa, Artificial Sequence
  Cyclic GFR-binding peptide
  MOD_RES (31), (31): Xaa is C or S
PTKMSNITMQIMNDKQQIILGEMSGMVVDRXG

SEQ ID NO: 91616 - protein, 36 aa, Artificial Sequence; identical to SEQ ID NO: 36967
  Cyclic GFR-binding peptide
  MOD_RES (4), (5), (36): Xaa is C or S

SEQ ID NO: 91617 - protein, 30 aa, Artificial Sequence
  Cyclic GFR-binding peptide
  MOD_RES (1), (1): Xaa is C or S
XVPTRLSNITIQIMDSANNVVLGEMSDMVV

SEQ ID NO: 91618 - protein, 28 aa, Artificial Sequence
  Cyclic GFR-binding peptide
  MOD_RES (28), (28): Xaa is C or S
LSNITIQIMDSANNVVIGEMSDMVVESX

SEQ ID NO: 91619 - protein, 25 aa, Artificial Sequence
  Cyclic GFR-binding peptide
KMSNITMQIMNDKQQIILGEMSGMV

SEQ ID NO: 91620 - protein, 31 aa, Artificial Sequence
  Cyclic GFR-binding peptide
  MOD_RES (30), (30): Xaa is C or S
TRLSNITIQIMDSANNVVIGEMSDMVVESXG

SEQ ID NO: 91621 - protein, 22 aa, Artificial Sequence
  Cyclic GFR-binding peptide
SNITIQIMDAANNVVIGEMSDM

SEQ ID NO: 91622 - protein, 33 aa, Artificial Sequence; identical to SEQ ID NO: 36973
  Cyclic GFR-binding peptide
  MOD_RES (2), (3): Xaa is C or S

SEQ ID NO: 91623 - protein, 29 aa, Artificial Sequence
  Cyclic GFR-binding peptide
ARLSNITIQIMDAANNVVLGEMSDMVVEA

SEQ ID NO: 91624 - protein, 26 aa, Artificial Sequence
  Cyclic GFR-binding peptide
  MOD_RES (26), (26): Xaa is C or S
SNITIQIMVGRKPKVLGEMSMIVRSX

SEQ ID NO: 91625 - protein, 29 aa, Artificial Sequence
  Cyclic GFR-binding peptide
  MOD_RES (3), (4): Xaa is C or S
STXXAPVKTSNITMQIMDNGRVLLIGEMS

SEQ ID NO: 91626 - protein, 33 aa, Artificial Sequence
  Cyclic GFR-binding peptide
  MOD_RES (3), (4): Xaa is C or S
GPXXTPTKMSNITMQIMNDKQQIIIGEMSGMVV

SEQ ID NO: 91627 - protein, 36 aa, Artificial Sequence; identical to SEQ ID NO: 36980
  Cyclic GFR-binding peptide
  MOD_RES (2), (3), (35): Xaa is C or S

SEQ ID NO: 91628 - protein, 27 aa, Artificial Sequence
  Cyclic GFR-binding peptide
PTKMSNITMQIMNDKQQIILGEMSGMV

SEQ ID NO: 91629 - protein, 30 aa, Artificial Sequence
  Cyclic GFR-binding peptide
  MOD_RES (2), (3): Xaa is C or S
SXXVPARLSNITIQIMDAANNVVLGEMSDM

SEQ ID NO: 91630 - protein, 32 aa, Artificial Sequence
  Cyclic GFR-binding peptide
  MOD_RES (3), (4): Xaa is C or S
PTXXVPTRLSNITIQIMDSANNVVLGEMSDMV

SEQ ID NO: 91631 - protein, 22 aa, Artificial Sequence
  Cyclic GFR-binding peptide
DLSNITIQIMIGKTPKILGEMS

SEQ ID NO: 91632 - protein, 38 aa, Artificial Sequence; identical to SEQ ID NO: 36989
  Cyclic GFR-binding peptide
  MOD_RES (6), (7): Xaa is C or S

SEQ ID NO: 91633 - protein, 26 aa, Artificial Sequence
  Cyclic GFR-binding peptide
DLSNITIQIMVGRTPKVLGEMSMVVK

SEQ ID NO: 91634 - protein, 33 aa, Artificial Sequence
  Cyclic GFR-binding peptide
  MOD_RES (30), (32): Xaa is C or S
PVKTSNITMQIMDNGRVLLLGEMSMIVEEXGXL

SEQ ID NO: 91635 - protein, 34 aa, Artificial Sequence; identical to SEQ ID NO: 36992
  Cyclic GFR-binding peptide
  MOD_RES (1), (33): Xaa is C or S

SEQ ID NO: 91636 - protein, 27 aa, Artificial Sequence
  Cyclic GFR-binding peptide
LSNITIQIMDSANNVVLGEMSDMVVES

SEQ ID NO: 91637 - protein, 31 aa, Artificial Sequence
  Cyclic GFR-binding peptide
  MOD_RES (5), (6): Xaa is C or S
VPSTXXAPVKTSNITMQIMDNGRVLLLGEMS

SEQ ID NO: 91638 - protein, 24 aa, Artificial Sequence
  Cyclic GFR-binding peptide
PTKMSNITMQIMNDKQQIILGEMS

SEQ ID NO: 91639 - protein, 29 aa, Artificial Sequence
  Cyclic GFR-binding peptide
  MOD_RES (2), (3): Xaa is C or S
TXXAPVKTSNITMQIMDNGRVLLIGEMSM

SEQ ID NO: 91640 - protein, 31 aa, Artificial Sequence
  Cyclic GFR-binding peptide
  MOD_RES (30), (30): Xaa is C or S
ARLSNITIQIMDAANNVVLGEMSDMVVEAXG

SEQ ID NO: 91641 - protein, 29 aa, Artificial Sequence
  Cyclic GFR-binding peptide
  MOD_RES (3), (4): Xaa is C or S
PTXXVPTRLSNITIQIMDSANNVVIGEMS

SEQ ID NO: 91642 - protein, 32 aa, Artificial Sequence
  Cyclic GFR-binding peptide
  MOD_RES (29), (31): Xaa is C or S
QDLSNITIQIMIGKTPKILGEMSMIVKSXKXS

SEQ ID NO: 91643 - protein, 31 aa, Artificial Sequence
  Cyclic GFR-binding peptide
  MOD_RES (31), (31): Xaa is C or S
PARLSNITIQIMDAANNVVIGEMSDMVVEAX

SEQ ID NO: 91644 - protein, 31 aa, Artificial Sequence
  Cyclic GFR-binding peptide
  MOD_RES (31), (31): Xaa is C or S
PARLSNITIQIMDAANNVVLGEMSDMVVEAX

SEQ ID NO: 91645 - protein, 24 aa, Artificial Sequence
  Cyclic GFR-binding peptide
PTRLSNITIQIMDSANNVVIGEMS

SEQ ID NO: 91646 - protein, 33 aa, Artificial Sequence
  Cyclic GFR-binding peptide
  MOD_RES (3), (4): Xaa is C or S
SPXXVSQDLSNITIQIMIGKTPKILGEMSMIVK

SEQ ID NO: 91647 - protein, 21 aa, Artificial Sequence
  Cyclic GFR-binding peptide
MSNITMQIMNDKQQIIIGEMS

SEQ ID NO: 91648 - protein, 26 aa, Artificial Sequence
  Cyclic GFR-binding peptide
  MOD_RES (26), (26): Xaa is C or S
SNITIQIMVGRTPKVLGEMSMVVKSX

SEQ ID NO: 91649 - protein, 29 aa, Artificial Sequence
  Cyclic GFR-binding peptide
SNITIQIMDAANNVVIGEMSAAAAAAAAA

SEQ ID NO: 91650 - protein, 41 aa, Artificial Sequence; identical to SEQ ID NO: 37008
  Cyclic GFR-binding peptide
  MOD_RES (6), (7), (39), (41): Xaa is C or S

SEQ ID NO: 91651 - protein, 23 aa, Artificial Sequence
  Cyclic GFR-binding peptide
SNITIQIMIGKTPKILGEMSMIV

SEQ ID NO: 91652 - protein, 21 aa, Artificial Sequence
  Cyclic GFR-binding peptide
LSNITIQIMDSANNVVLGEMS

SEQ ID NO: 91653 - protein, 39 aa, Artificial Sequence; identical to SEQ ID NO: 37014
  Cyclic GFR-binding peptide
  MOD_RES (6), (7), (38): Xaa is C or S

SEQ ID NO: 91654 - protein, 22 aa, Artificial Sequence
  Cyclic GFR-binding peptide
ALSNITIQIMVGRKPKVLGEMS

SEQ ID NO: 91655 - protein, 30 aa, Artificial Sequence; identical to SEQ ID NO: 37018
  Cyclic GFR-binding peptide

SEQ ID NO: 91656 - protein, 30 aa, Artificial Sequence
  Cyclic GFR-binding peptide
  MOD_RES (29), (29): Xaa is C or S
KMSNITMQIMNDKQQIILGEMSGMVVDRXG

SEQ ID NO: 91657 - protein, 20 aa, Artificial Sequence
  Cyclic GFR-binding peptide
SNITMQIMNDKQQIILGEMS

SEQ ID NO: 91658 - protein, 25 aa, Artificial Sequence
  Cyclic GFR-binding peptide
KTSNITMQIMDNGRVLLLGEMSMIV

SEQ ID NO: 91659 - protein, 25 aa, Artificial Sequence
  Cyclic GFR-binding peptide
KTSNITMQIMDNGRVLLIGEMSMIV

SEQ ID NO: 91660 - protein, 32 aa, Artificial Sequence; identical to SEQ ID NO: 37024
  Cyclic GFR-binding peptide
  MOD_RES (1), (2): Xaa is C or S

SEQ ID NO: 91661 - protein, 28 aa, Artificial Sequence
  Cyclic GFR-binding peptide
  MOD_RES (27), (27): Xaa is C or S
LSNITIQIMVGRKPKVLGEMSMIVRSXK

SEQ ID NO: 91662 - protein, 38 aa, Artificial Sequence; identical to SEQ ID NO: 37026
  Cyclic GFR-binding peptide
  MOD_RES (4), (5), (37): Xaa is C or S

SEQ ID NO: 91663 - protein, 26 aa, Artificial Sequence
  Cyclic GFR-binding peptide
VPQALSNITIQIMVGRKPKVLGEMSM

SEQ ID NO: 91664 - protein, 25 aa, Artificial Sequence
  Cyclic GFR-binding peptide
VSQDLSNITIQIMIGKTPKILGEMS

SEQ ID NO: 91665 - protein, 34 aa, Artificial Sequence; identical to SEQ ID NO: 37028
  Cyclic GFR-binding peptide
  MOD_RES (32), (34): Xaa is C or S

SEQ ID NO: 91666 - protein, 23 aa, Artificial Sequence
  Cyclic GFR-binding peptide
KLSNITVQIMDDSSNVILGEMSN

SEQ ID NO: 91667 - protein, 32 aa, Artificial Sequence
  Cyclic GFR-binding peptide
  MOD_RES (6), (7): Xaa is C or S
AAPASXXVPARLSNITIQIMDAANNVVLGEMS

SEQ ID NO: 91668 - protein, 25 aa, Artificial Sequence
  Cyclic GFR-binding peptide
PVKTSNITMQIMDNGRVLLIGEMSM

SEQ ID NO: 91669 - protein, 26 aa, Artificial Sequence
  Cyclic GFR-binding peptide
APVKTSNITMQIMDNGRVLLLGEMSM

SEQ ID NO: 91670 - protein, 28 aa, Artificial Sequence
  Cyclic GFR-binding peptide
RLSNITIQIMDAANNVVIGEMSDMVVEA

SEQ ID NO: 91671 - protein, 30 aa, Artificial Sequence; identical to SEQ ID NO: 37037
  Cyclic GFR-binding peptide

SEQ ID NO: 91672 - protein, 39 aa, Artificial Sequence; identical to SEQ ID NO: 37040
  Cyclic GFR-binding peptide
  MOD_RES (6), (7), (38): Xaa is C or S

SEQ ID NO: 91673 - protein, 34 aa, Artificial Sequence
  Cyclic GFR-binding peptide
  MOD_RES (5), (6): Xaa is C or S
VPSTXXAPVKTSNITMQIMDNGRVLLIGEMSMIV

SEQ ID NO: 91674 - protein, 38 aa, Artificial Sequence; identical to SEQ ID NO: 37043
  Cyclic GFR-binding peptide
  MOD_RES (6), (7), (38): Xaa is C or S

SEQ ID NO: 91675 - protein, 21 aa, Artificial Sequence
  Cyclic GFR-binding peptide
SNITMQIMNDKQQIIIGEMSG

SEQ ID NO: 91676 - protein, 33 aa, Artificial Sequence
  Cyclic GFR-binding peptide
  MOD_RES (5), (6): Xaa is C or S
VPSTXXAPVKTSNITMQIMDNGRVLLLGEMSMI

SEQ ID NO: 91677 - protein, 33 aa, Artificial Sequence; identical to SEQ ID NO: 37045
  Cyclic GFR-binding peptide
  MOD_RES (32), (32): Xaa is C or S

SEQ ID NO: 91678 - protein, 32 aa, Artificial Sequence
  Cyclic GFR-binding peptide
  MOD_RES (6), (7): Xaa is C or S
HVPKPXXAPTKLSNITVQIMDDSSNVIIGEMS

SEQ ID NO: 91679 - protein, 31 aa, Artificial Sequence
  Cyclic GFR-binding peptide
  MOD_RES (4), (5): Xaa is C or S
ASPXXVPQDLSNITIQIMVGRTPKVLGEMSM

SEQ ID NO: 91680 - protein, 26 aa, Artificial Sequence
  Cyclic GFR-binding peptide
SQDLSNITIQIMIGKTPKILGEMSMI

SEQ ID NO: 91681 - protein, 28 aa, Artificial Sequence
  Cyclic GFR-binding peptide
  MOD_RES (1), (1): Xaa is C or S
XAPVKTSNITMQIMDNGRVLLLGEMSMI

SEQ ID NO: 91682 - protein, 27 aa, Artificial Sequence
  Cyclic GFR-binding peptide
  MOD_RES (27), (27): Xaa is C or S
SNITIQIMDSANNVVLGEMSDMVVESX

SEQ ID NO: 91683 - protein, 38 aa, Artificial Sequence; identical to SEQ ID NO: 37052
  Cyclic GFR-binding peptide
  MOD_RES (4), (5), (37): Xaa is C or S

SEQ ID NO: 91684 - protein, 34 aa, Artificial Sequence
  Cyclic GFR-binding peptide
  MOD_RES (5), (6): Xaa is C or S
SAAPXXVPQALSNITIQIMVGRKPKVLGEMSMIV

SEQ ID NO: 91685 - protein, 26 aa, Artificial Sequence
  Cyclic GFR-binding peptide
  MOD_RES (1), (1): Xaa is C or S
XTPTKMSNITMQIMNDKQQIILGEMS

SEQ ID NO: 91686 - protein, 31 aa, Artificial Sequence; identical to SEQ ID NO: 37056
  Cyclic GFR-binding peptide
  MOD_RES (1), (1): Xaa is C or S

SEQ ID NO: 91687 - protein, 29 aa, Artificial Sequence
  Cyclic GFR-binding peptide
TKLSNITVQIMDDSSNVILGEMSNMVVRS

SEQ ID NO: 91688 - protein, 28 aa, Artificial Sequence
  Cyclic GFR-binding peptide
  MOD_RES (27), (27): Xaa is C or S
TSNITMQIMDNGRVLLLGEMSMIVEEXG

SEQ ID NO: 91689 - protein, 28 aa, Artificial Sequence
  Cyclic GFR-binding peptide
PTKMSNITMQIMNDKQQIILGEMSGMVV

SEQ ID NO: 91690 - protein, 33 aa, Artificial Sequence; identical to SEQ ID NO: 37057
  Cyclic GFR-binding peptide
  MOD_RES (32), (32): Xaa is C or S

SEQ ID NO: 91691 - protein, 25 aa, Artificial Sequence
  Cyclic GFR-binding peptide
LSNITIQIMVGRKPKVLGEMSMIVR

SEQ ID NO: 91692 - protein, 31 aa, Artificial Sequence
  Cyclic GFR-binding peptide
  MOD_RES (4), (5): Xaa is C or S
PASXXVPARLSNITIQIMDAANNVVLGEMSD

SEQ ID NO: 91693 - protein, 30 aa, Artificial Sequence
  Cyclic GFR-binding peptide
PTRLSNITIQIMDSANNVVLGEMSDMVVES

SEQ ID NO: 91694 - protein, 26 aa, Artificial Sequence
  Cyclic GFR-binding peptide
PTRLSNITIQIMDSANNVVLGEMSDM

SEQ ID NO: 91695 - protein, 24 aa, Artificial Sequence
  Cyclic GFR-binding peptide
LSNITIQIMDSANNVVLGEMSDMV

SEQ ID NO: 91696 - protein, 33 aa, Artificial Sequence
  Cyclic GFR-binding peptide
  MOD_RES (30), (32): Xaa is C or S
TRLSNITIQIMDSANNVVLGEMSDMVVESXGXR

SEQ ID NO: 91697 - protein, 32 aa, Artificial Sequence
  Cyclic GFR-binding peptide
  MOD_RES (6), (7): Xaa is C or S
RVPSTXXAPVKTSNITMQIMDNGRVLLIGEMS

SEQ ID NO: 91698 - protein, 35 aa, Artificial Sequence; identical to SEQ ID NO: 37068
  Cyclic GFR-binding peptide
  MOD_RES (2), (3), (34): Xaa is C or S

SEQ ID NO: 91699 - protein, 30 aa, Artificial Sequence
  Cyclic GFR-binding peptide
  MOD_RES (28), (30): Xaa is C or S
LSNITIQIMDAANNVVLGEMSDMVVEAXGX

SEQ ID NO: 91700 - protein, 34 aa, Artificial Sequence; identical to SEQ ID NO: 37071
  Cyclic GFR-binding peptide
  MOD_RES (2), (3): Xaa is C or S

SEQ ID NO: 91701 - protein, 34 aa, Artificial Sequence
  Cyclic GFR-binding peptide
  MOD_RES (5), (6): Xaa is C or S
VPKPXXAPTKLSNITVQIMDDSSNVILGEMSNMV

SEQ ID NO: 91702 - protein, 33 aa, Artificial Sequence; identical to SEQ ID NO: 37072
  Cyclic GFR-binding peptide
  MOD_RES (32), (32): Xaa is C or S

SEQ ID NO: 91703 - protein, 31 aa, Artificial Sequence
  Cyclic GFR-binding peptide
  MOD_RES (2), (3): Xaa is C or S
TXXVPTRLSNITIQIMDSANNVVIGEMSDMV

SEQ ID NO: 91704 - protein, 32 aa, Artificial Sequence
  Cyclic GFR-binding peptide
  MOD_RES (30), (32): Xaa is C or S
TKMSNITMQIMNDKQQIIIGEMSGMVVDRXGX

SEQ ID NO: 91705 - protein, 35 aa, Artificial Sequence; identical to SEQ ID NO: 37074
  Cyclic GFR-binding peptide
  MOD_RES (4), (5): Xaa is C or S

SEQ ID NO: 91706 - protein, 22 aa, Artificial Sequence
  Cyclic GFR-binding peptide
SNITMQIMNDKQQIIIGEMSGM

SEQ ID NO: 91707 - protein, 28 aa, Artificial Sequence
  Cyclic GFR-binding peptide
  MOD_RES (28), (28): Xaa is C or S
LSNITIQIMDAANNVVLGEMSDMVVEAX

SEQ ID NO: 91708 - protein, 26 aa, Artificial Sequence
  Cyclic GFR-binding peptide
VPARLSNITIQIMDAANNVVIGEMSD

SEQ ID NO: 91709 - protein, 28 aa, Artificial Sequence
  Cyclic GFR-binding peptide
RLSNITIQIMDSANNVVLGEMSDMVVES

SEQ ID NO: 91710 - protein, 30 aa, Artificial Sequence
  Cyclic GFR-binding peptide
  MOD_RES (4), (5): Xaa is C or S
PASXXVPARLSNITIQIMDAANNVVLGEMS

SEQ ID NO: 91711 - protein, 25 aa, Artificial Sequence
  Cyclic GFR-binding peptide
SNITIQIMDSANNVVIGEMSDMVVE

SEQ ID NO: 91712 - protein, 27 aa, Artificial Sequence
  Cyclic GFR-binding peptide
RLSNITIQIMDSANNVVLGEMSDMVVE

SEQ ID NO: 91713 - protein, 26 aa, Artificial Sequence
  Cyclic GFR-binding peptide
RLSNITIQIMDSANNVVLGEMSDMVV

SEQ ID NO: 91714 - protein, 28 aa, Artificial Sequence
  Cyclic GFR-binding peptide
TRLSNITIQIMDSANNVVIGEMSDMVVE

SEQ ID NO: 91715 - protein, 31 aa, Artificial Sequence
  Cyclic GFR-binding peptide
  MOD_RES (29), (31): Xaa is C or S
QALSNITIQIMVGRKPKVLGEMSMIVRSXKX

SEQ ID NO: 91716 - protein, 39 aa, Artificial Sequence; identical to SEQ ID NO: 37088
  Cyclic GFR-binding peptide
  MOD_RES (3), (4), (36), (38): Xaa is C or S

SEQ ID NO: 91717 - protein, 22 aa, Artificial Sequence
  Cyclic GFR-binding peptide
SNITIQIMDSANNVVIGEMSDM

SEQ ID NO: 91718 - protein, 31 aa, Artificial Sequence
  Cyclic GFR-binding peptide
  MOD_RES (4), (5): Xaa is C or S
PSTXXAPVKTSNITMQIMDNGRVLLLGEMSM

SEQ ID NO: 91719 - protein, 28 aa, Artificial Sequence
  Cyclic GFR-binding peptide
  MOD_RES (28), (28): Xaa is C or S
DLSNITIQIMIGKTPKILGEMSMIVKSX

SEQ ID NO: 91720 - protein, 30 aa, Artificial Sequence
  Cyclic GFR-binding peptide
  MOD_RES (27), (29): Xaa is C or S
SNITMQIMNDKQQIIIGEMSGMVVDRXGXS

SEQ ID NO: 91721 - protein, 26 aa, Artificial Sequence
  Cyclic GFR-binding peptide
LSNITIQIMDAANNVVIGEMSDMVVE

SEQ ID NO: 91722 - protein, 30 aa, Artificial Sequence; identical to SEQ ID NO: 1134
  Cyclic GFR-binding peptide

SEQ ID NO: 91723 - protein, 34 aa, Artificial Sequence; identical to SEQ ID NO: 37094
  Cyclic GFR-binding peptide
  MOD_RES (1), (2), (33): Xaa is C or S

SEQ ID NO: 91724 - protein, 32 aa, Artificial Sequence
  Cyclic GFR-binding peptide
  MOD_RES (5), (6): Xaa is C or S
SAAPXXVPQALSNITIQIMVGRKPKVLGEMSM

SEQ ID NO: 91725 - protein, 30 aa, Artificial Sequence
  Cyclic GFR-binding peptide
  MOD_RES (30), (30): Xaa is C or S
TRLSNITIQIMDSANNVVIGEMSDMVVESX

SEQ ID NO: 91726 - protein, 33 aa, Artificial Sequence
  Cyclic GFR-binding peptide
  MOD_RES (6), (7): Xaa is C or S
STPPTXXVPTRLSNITIQIMDSANNVVLGEMSD

SEQ ID NO: 91727 - protein, 28 aa, Artificial Sequence
  Cyclic GFR-binding peptide
  MOD_RES (28), (28): Xaa is C or S
MSNITMQIMNDKQQIILGEMSGMVVDRX

SEQ ID NO: 91728 - protein, 32 aa, Artificial Sequence
  Cyclic GFR-binding peptide
  MOD_RES (4), (5): Xaa is C or S
AGPXXTPTKMSNITMQIMNDKQQIIIGEMSGM

SEQ ID NO: 91729 - protein, 34 aa, Artificial Sequence
  Cyclic GFR-binding peptide
  MOD_RES (6), (7): Xaa is C or S
GSAGPXXTPTKMSNITMQIMNDKQQIIIGEMSGM

SEQ ID NO: 91730 - protein, 29 aa, Artificial Sequence
  Cyclic GFR-binding peptide
  MOD_RES (2), (3): Xaa is C or S
SXXVPARLSNITIQIMDAANNVVLGEMSD

SEQ ID NO: 91731 - protein, 27 aa, Artificial Sequence
  Cyclic GFR-binding peptide
  MOD_RES (27), (27): Xaa is C or S
SNITIQIMDSANNVVIGEMSDMVVESX

SEQ ID NO: 91732 - protein, 34 aa, Artificial Sequence
  Cyclic GFR-binding peptide
  MOD_RES (5), (6): Xaa is C or S
APASXXVPARLSNITIQIMDAANNVVLGEMSDMV

SEQ ID NO: 91733 - protein, 37 aa, Artificial Sequence; identical to SEQ ID NO: 37099
  Cyclic GFR-binding peptide
  MOD_RES (2), (3), (34), (36): Xaa is C or S

SEQ ID NO: 91734 - protein, 34 aa, Artificial Sequence; identical to SEQ ID NO: 37100
  Cyclic GFR-binding peptide
  MOD_RES (3), (4): Xaa is C or S

SEQ ID NO: 91735 - protein, 41 aa, Artificial Sequence; identical to SEQ ID NO: 37101
  Cyclic GFR-binding peptide
  MOD_RES (6), (7), (38), (40): Xaa is C or S

SEQ ID NO: 91736 - protein, 32 aa, Artificial Sequence
  Cyclic GFR-binding peptide
  MOD_RES (30), (32): Xaa is C or S
PQALSNITIQIMVGRKPKVLGEMSMIVRSXKX

SEQ ID NO: 91737 - protein, 32 aa, Artificial Sequence
  Cyclic GFR-binding peptide
  MOD_RES (30), (32): Xaa is C or S
SQDLSNITIQIMIGKTPKILGEMSMIVKSXKX

SEQ ID NO: 91738 - protein, 34 aa, Artificial Sequence; identical to SEQ ID NO: 37103
  Cyclic GFR-binding peptide
  MOD_RES (2), (3): Xaa is C or S

SEQ ID NO: 91739 - protein, 33 aa, Artificial Sequence
  Cyclic GFR-binding peptide
  MOD_RES (5), (6): Xaa is C or S
SAGPXXTPTKMSNITMQIMNDKQQIIIGEMSGM

SEQ ID NO: 91740 - protein, 25 aa, Artificial Sequence
  Cyclic GFR-binding peptide
TPTKMSNITMQIMNDKQQIIIGEMS

SEQ ID NO: 91741 - protein, 26 aa, Artificial Sequence
  Cyclic GFR-binding peptide
TKMSNITMQIMNDKQQIIIGEMSGMV

SEQ ID NO: 91742 - protein, 22 aa, Artificial Sequence
  Cyclic GFR-binding peptide
LSNITVQIMDDSSNVILGEMSN

SEQ ID NO: 91743 - protein, 25 aa, Artificial Sequence
  Cyclic GFR-binding peptide
LSNITIQIMDAANNVVLGEMSDMVV

SEQ ID NO: 91744 - protein, 34 aa, Artificial Sequence; identical to SEQ ID NO: 37109
  Cyclic GFR-binding peptide
  MOD_RES (1), (2), (33): Xaa is C or S

SEQ ID NO: 91745 - protein, 21 aa, Artificial Sequence
  Cyclic GFR-binding peptide
SNITIQIMVGRTPKVLGEMSM

SEQ ID NO: 91746 - protein, 34 aa, Artificial Sequence; identical to SEQ ID NO: 37113
  Cyclic GFR-binding peptide
  MOD_RES (1), (2), (33): Xaa is C or S

SEQ ID NO: 91747 - protein, 20 aa, Artificial Sequence
  Cyclic GFR-binding peptide
SNITVQIMDDSSNVILGEMS

SEQ ID NO: 91748 - protein, 26 aa, Artificial Sequence
  Cyclic GFR-binding peptide
KMSNITMQIMNDKQQIILGEMSGMVV

SEQ ID NO: 91749 - protein, 25 aa, Artificial Sequence
  Cyclic GFR-binding peptide
TSNITMQIMDNGRVLLLGEMSMIVE

SEQ ID NO: 91750 - protein, 34 aa, Artificial Sequence
  Cyclic GFR-binding peptide
  MOD_RES (5), (6): Xaa is C or S
SAGPXXTPTKMSNITMQIMNDKQQIIIGEMSGMV

SEQ ID NO: 91751 - protein, 29 aa, Artificial Sequence
  Cyclic GFR-binding peptide
  MOD_RES (27), (29): Xaa is C or S
SNITIQIMDAANNVVIGEMSDMVVEAXGX

SEQ ID NO: 91752 - protein, 33 aa, Artificial Sequence; identical to SEQ ID NO: 37121
  Cyclic GFR-binding peptide
  MOD_RES (2), (3): Xaa is C or S

SEQ ID NO: 91753 - protein, 35 aa, Artificial Sequence
  Cyclic GFR-binding peptide
  MOD_RES (5), (6): Xaa is C or S
VPSTXXAPVKTSNITMQIMDNGRVLLIGEMSMIVE

SEQ ID NO: 91754 - protein, 37 aa, Artificial Sequence; identical to SEQ ID NO: 37123
  Cyclic GFR-binding peptide
  MOD_RES (3), (4), (36): Xaa is C or S

SEQ ID NO: 91755 - protein, 40 aa, Artificial Sequence; identical to SEQ ID NO: 37124
  Cyclic GFR-binding peptide
  MOD_RES (4), (5), (37), (39): Xaa is C or S

SEQ ID NO: 91756 - protein, 29 aa, Artificial Sequence
  Cyclic GFR-binding peptide
  MOD_RES (1), (2): Xaa is C or S
XXAPVKTSNITMQIMDNGRVLLLGEMSMI

SEQ ID NO: 91757 - protein, 30 aa, Artificial Sequence
  Cyclic GFR-binding peptide
  MOD_RES (1), (1): Xaa is C or S
XTPTKMSNITMQIMNDKQQIIIGEMSGMVV

SEQ ID NO: 91758 - protein, 31 aa, Artificial Sequence
  Cyclic GFR-binding peptide
  MOD_RES (3), (4): Xaa is C or S
KPXXAPTKLSNITVQIMDDSSNVILGEMSNM

SEQ ID NO: 91759 - protein, 35 aa, Artificial Sequence
  Cyclic GFR-binding peptide
  MOD_RES (5), (6): Xaa is C or S
APASXXVPARLSNITIQIMDAANNVVLGEMSDMVV

SEQ ID NO: 91760 - protein, 31 aa, Artificial Sequence
  Cyclic GFR-binding peptide
  MOD_RES (1), (2): Xaa is C or S
XXVPARLSNITIQIMDAANNVVIGEMSDMVV

SEQ ID NO: 91761 - protein, 26 aa, Artificial Sequence
  Cyclic GFR-binding peptide
DLSNITIQIMIGKTPKILGEMSMIVK

SEQ ID NO: 91762 - protein, 24 aa, Artificial Sequence
  Cyclic GFR-binding peptide
TRLSNITIQIMDSANNVVLGEMSD

SEQ ID NO: 91763 - protein, 37 aa, Artificial Sequence; identical to SEQ ID NO: 37134
  Cyclic GFR-binding peptide
  MOD_RES (3), (4), (36): Xaa is C or S

SEQ ID NO: 91764 - protein, 34 aa, Artificial Sequence; identical to SEQ ID NO: 37135
  Cyclic GFR-binding peptide
  MOD_RES (1), (33): Xaa is C or S

SEQ ID NO: 91765 - protein, 26 aa, Artificial Sequence
  Cyclic GFR-binding peptide
PARLSNITIQIMDAANNVVLGEMSDM

SEQ ID NO: 91766 - protein, 37 aa, Artificial Sequence; identical to SEQ ID NO: 37139
  Cyclic GFR-binding peptide
  MOD_RES (4), (5), (36): Xaa is C or S

SEQ ID NO: 91767 - protein, 36 aa, Artificial Sequence
  Cyclic GFR-binding peptide
  MOD_RES (6), (7): Xaa is C or S
STPPTXXVPTRLSNITIQIMDSANNVVIGEMSDMVV

SEQ ID NO: 91768 - protein, 35 aa, Artificial Sequence; identical to SEQ ID NO: 37140
  Cyclic GFR-binding peptide
  MOD_RES (1), (32), (34): Xaa is C or S

SEQ ID NO: 91769 - protein, 32 aa, Artificial Sequence
  Cyclic GFR-binding peptide
  MOD_RES (30), (32): Xaa is C or S
TKMSNITMQIMNDKQQIILGEMSGMVVDRXGX

SEQ ID NO: 91770 - protein, 26 aa, Artificial Sequence
  Cyclic GFR-binding peptide
PVKTSNITMQIMDNGRVLLIGEMSMI

SEQ ID NO: 91771 - protein, 29 aa, Artificial Sequence
  Cyclic GFR-binding peptide
  MOD_RES (1), (2): Xaa is C or S
XXVSQDLSNITIQIMIGKTPKILGEMSMI

SEQ ID NO: 91772 - protein, 27 aa, Artificial Sequence
  Cyclic GFR-binding peptide
LSNITVQIMDDSSNVILGEMSNMVVRS

SEQ ID NO: 91773 - protein, 30 aa, Artificial Sequence
  Cyclic GFR-binding peptide
  MOD_RES (29), (29): Xaa is C or S
RLSNITIQIMDSANNVVIGEMSDMVVESXG

SEQ ID NO: 91774 - protein, 28 aa, Artificial Sequence
  Cyclic GFR-binding peptide
VKTSNITMQIMDNGRVLLIGEMSMIVEE

SEQ ID NO: 91775 - protein, 29 aa, Artificial Sequence
  Cyclic GFR-binding peptide
  MOD_RES (28), (28): Xaa is C or S
LSNITIQIMDAANNVVLGEMSDMVVEAXG

SEQ ID NO: 91776 - protein, 24 aa, Artificial Sequence
  Cyclic GFR-binding peptide
PQALSNITIQIMVGRKPKVLGEMS

SEQ ID NO: 91777 - protein, 27 aa, Artificial Sequence
  Cyclic GFR-binding peptide
VPQDLSNITIQIMVGRTPKVLGEMSMV

SEQ ID NO: 91778 - protein, 37 aa, Artificial Sequence; identical to SEQ ID NO: 37150
  Cyclic GFR-binding peptide
  MOD_RES (3), (4), (36): Xaa is C or S

SEQ ID NO: 91779 - protein, 31 aa, Artificial Sequence; identical to SEQ ID NO: 37158
  Cyclic GFR-binding peptide
  MOD_RES (1), (1): Xaa is C or S

SEQ ID NO: 91780 - protein, 33 aa, Artificial Sequence; identical to SEQ ID NO: 37160
  Cyclic GFR-binding peptide
  MOD_RES (1), (32): Xaa is C or S

SEQ ID NO: 91781 - protein, 28 aa, Artificial Sequence
  Cyclic GFR-binding peptide
PTRLSNITIQIMDSANNVVLGEMSDMVV

SEQ ID NO: 91782 - protein, 30 aa, Artificial Sequence
  Cyclic GFR-binding peptide
  MOD_RES (29), (29): Xaa is C or S
KMSNITMQIMNDKQQIIIGEMSGMVVDRXG

SEQ ID NO: 91783 - protein, 30 aa, Artificial Sequence
  Cyclic GFR-binding peptide
  MOD_RES (3), (4): Xaa is C or S
ASXXVPARLSNITIQIMDAANNVVIGEMSD

SEQ ID NO: 91784 - protein, 25 aa, Artificial Sequence
  Cyclic GFR-binding peptide
LSNITIQIMDSANNVVIGEMSDMVV

SEQ ID NO: 91785 - protein, 35 aa, Artificial Sequence; identical to SEQ ID NO: 37169
  Cyclic GFR-binding peptide
  MOD_RES (1), (32), (34): Xaa is C or S

SEQ ID NO: 91786 - protein, 30 aa, Artificial Sequence
  Cyclic GFR-binding peptide
  MOD_RES (1), (2): Xaa is C or S
XXVPQDLSNITIQIMVGRTPKVLGEMSMVV

SEQ ID NO: 91787 - protein, 31 aa, Artificial Sequence
  Cyclic GFR-binding peptide
  MOD_RES (30), (30): Xaa is C or S
ARLSNITIQIMDAANNVVIGEMSDMVVEAXG

SEQ ID NO: 91788 - protein, 28 aa, Artificial Sequence
  Cyclic GFR-binding peptide
PQDLSNITIQIMVGRTPKVLGEMSMVVK

SEQ ID NO: 91789 - protein, 29 aa, Artificial Sequence
  Cyclic GFR-binding peptide
  MOD_RES (29), (29): Xaa is C or S
KLSNITVQIMDDSSNVILGEMSNMVVRSX

SEQ ID NO: 91790 - protein, 29 aa, Artificial Sequence
  Cyclic GFR-binding peptide
SNITIQIMVGRTPKVLGEMSAAAAAAAAA

SEQ ID NO: 91791 - protein, 34 aa, Artificial Sequence
  Cyclic GFR-binding peptide
  MOD_RES (5), (6): Xaa is C or S
APASXXVPARLSNITIQIMDAANNVVIGEMSDMV

SEQ ID NO: 91792 - protein, 34 aa, Artificial Sequence
  Cyclic GFR-binding peptide
  MOD_RES (5), (6): Xaa is C or S
VPSTXXAPVKTSNITMQIMDNGRVLLLGEMSMIV

SEQ ID NO: 91793 - protein, 38 aa, Artificial Sequence; identical to SEQ ID NO: 37174
  Cyclic GFR-binding peptide
  MOD_RES (3), (4), (35), (37): Xaa is C or S

SEQ ID NO: 91794 - protein, 28 aa, Artificial Sequence
  Cyclic GFR-binding peptide
  MOD_RES (26), (28): Xaa is C or S
SNITIQIMVGRTPKVLGEMSMVVKSXKX

SEQ ID NO: 91795 - protein, 31 aa, Artificial Sequence
  Cyclic GFR-binding peptide
  MOD_RES (2), (3): Xaa is C or S
PXXTPTKMSNITMQIMNDKQQIILGEMSGMV

SEQ ID NO: 91796 - protein, 39 aa, Artificial Sequence; identical to SEQ ID NO: 37177
  Cyclic GFR-binding peptide
  MOD_RES (5), (6), (38): Xaa is C or S

SEQ ID NO: 91797 - protein, 33 aa, Artificial Sequence
  Cyclic GFR-binding peptide
  MOD_RES (6), (7): Xaa is C or S
AAPASXXVPARLSNITIQIMDAANNVVLGEMSD

SEQ ID NO: 91798 - protein, 28 aa, Artificial Sequence
  Cyclic GFR-binding peptide
  MOD_RES (1), (1): Xaa is C or S
XVSQDLSNITIQIMIGKTPKILGEMSMI

SEQ ID NO: 91799 - protein, 37 aa, Artificial Sequence; identical to SEQ ID NO: 37182
  Cyclic GFR-binding peptide
  MOD_RES (1), (2), (34), (36): Xaa is C or S

SEQ ID NO: 91800 - protein, 35 aa, Artificial Sequence
  Cyclic GFR-binding peptide
  MOD_RES (5), (6): Xaa is C or S
SASPXXVPQDLSNITIQIMVGRTPKVLGEMSMVVK

SEQ ID NO: 91801 - protein, 27 aa, Artificial Sequence
  Cyclic GFR-binding peptide
  MOD_RES (1), (2): Xaa is C or S
XXTPTKMSNITMQIMNDKQQIILGEMS

SEQ ID NO: 91802 - protein, 37 aa, Artificial Sequence; identical to SEQ ID NO: 37187
  Cyclic GFR-binding peptide
  MOD_RES (3), (4), (35), (37): Xaa is C or S

SEQ ID NO: 91803 - protein, 36 aa, Artificial Sequence; identical to SEQ ID NO: 37193
  Cyclic GFR-binding peptide
  MOD_RES (1), (2), (33), (35): Xaa is C or S

SEQ ID NO: 91804 - protein, 27 aa, Artificial Sequence
  Cyclic GFR-binding peptide
  MOD_RES (1), (1): Xaa is C or S
XVPARLSNITIQIMDAANNVVIGEMSD

SEQ ID NO: 91805 - protein, 26 aa, Artificial Sequence
  Cyclic GFR-binding peptide
QDLSNITIQIMVGRTPKVLGEMSMVV

SEQ ID NO: 91806 - protein, 31 aa, Artificial Sequence
  Cyclic GFR-binding peptide
  MOD_RES (4), (5): Xaa is C or S
AGPXXTPTKMSNITMQIMNDKQQIILGEMSG

SEQ ID NO: 91807 - protein, 27 aa, Artificial Sequence
  Cyclic GFR-binding peptide
VSQDLSNITIQIMIGKTPKILGEMSMI

SEQ ID NO: 91808 - protein, 24 aa, Artificial Sequence
  Cyclic GFR-binding peptide
PQDLSNITIQIMVGRTPKVLGEMS

SEQ ID NO: 91809 - protein, 33 aa, Artificial Sequence
  Cyclic GFR-binding peptide
  MOD_RES (30), (32): Xaa is C or S
SQDLSNITIQIMIGKTPKILGEMSMIVKSXKXS

SEQ ID NO: 91810 - protein, 26 aa, Artificial Sequence
  Cyclic GFR-binding peptide
  MOD_RES (1), (1): Xaa is C or S
XVPQDLSNITIQIMVGRTPKVLGEMS

SEQ ID NO: 91811 - protein, 33 aa, Artificial Sequence
  Cyclic GFR-binding peptide
  MOD_RES (3), (4): Xaa is C or S
PTXXVPTRLSNITIQIMDSANNVVIGEMSDMVV

SEQ ID NO: 91812 - protein, 35 aa, Artificial Sequence; identical to SEQ ID NO: 37205
  Cyclic GFR-binding peptide
  MOD_RES (1), (33), (35): Xaa is C or S

SEQ ID NO: 91813 - protein, 40 aa, Artificial Sequence; identical to SEQ ID NO: 37206
  Cyclic GFR-binding peptide
  MOD_RES (6), (7), (39): Xaa is C or S

SEQ ID NO: 91814 - protein, 38 aa, Artificial Sequence; identical to SEQ ID NO: 37207
  Cyclic GFR-binding peptide
  MOD_RES (4), (5), (37): Xaa is C or S

SEQ ID NO: 91815 - protein, 32 aa, Artificial Sequence
  Cyclic GFR-binding peptide
  MOD_RES (31), (31): Xaa is C or S
PTKLSNITVQIMDDSSNVILGEMSNMVVRSXG

SEQ ID NO: 91816 - protein, 22 aa, Artificial Sequence
  Cyclic GFR-binding peptide
KTSNITMQIMDNGRVLLIGEMS

SEQ ID NO: 91817 - protein, 28 aa, Artificial Sequence
  Cyclic GFR-binding peptide
ARLSNITIQIMDAANNVVIGEMSDMVVE

SEQ ID NO: 91818 - protein, 28 aa, Artificial Sequence
  Cyclic GFR-binding peptide
  MOD_RES (1), (1): Xaa is C or S
XVPQDLSNITIQIMVGRTPKVLGEMSMV

SEQ ID NO: 91819 - protein, 31 aa, Artificial Sequence
  Cyclic GFR-binding peptide
  MOD_RES (2), (3): Xaa is C or S
TXXVPTRLSNITIQIMDSANNVVLGEMSDMV

SEQ ID NO: 91820 - protein, 24 aa, Artificial Sequence
  Cyclic GFR-binding peptide
DLSNITIQIMIGKTPKILGEMSMI

SEQ ID NO: 91821 - protein, 30 aa, Artificial Sequence
  Cyclic GFR-binding peptide
  MOD_RES (2), (3): Xaa is C or S
PXXVPQALSNITIQIMVGRKPKVLGEMSMI

SEQ ID NO: 91822 - protein, 29 aa, Artificial Sequence
  Cyclic GFR-binding peptide
PVKTSNITMQIMDNGRVLLLGEMSMIVEE

SEQ ID NO: 91823 - protein, 33 aa, Artificial Sequence; identical to SEQ ID NO: 37219
  Cyclic GFR-binding peptide
  MOD_RES (1), (32): Xaa is C or S

SEQ ID NO: 91824 - protein, 40 aa, Artificial Sequence; identical to SEQ ID NO: 37220
  Cyclic GFR-binding peptide
  MOD_RES (5), (6), (37), (39): Xaa is C or S

SEQ ID NO: 91825 - protein, 37 aa, Artificial Sequence; identical to SEQ ID NO: 37221
  Cyclic GFR-binding peptide
  MOD_RES (6), (7): Xaa is C or S

SEQ ID NO: 91826 - protein, 26 aa, Artificial Sequence
  Cyclic GFR-binding peptide
TKLSNITVQIMDDSSNVILGEMSNMV

SEQ ID NO: 91827 - protein, 32 aa, Artificial Sequence
  Cyclic GFR-binding peptide
  MOD_RES (30), (32): Xaa is C or S
TRLSNITIQIMDSANNVVLGEMSDMVVESXGX

SEQ ID NO: 91828 - protein, 32 aa, Artificial Sequence; identical to SEQ ID NO: 37224
  Cyclic GFR-binding peptide
  MOD_RES (31), (31): Xaa is C or S

SEQ ID NO: 91829 - protein, 23 aa, Artificial Sequence
  Cyclic GFR-binding peptide
DLSNITIQIMVGRTPKVLGEMSM

SEQ ID NO: 91830 - protein, 20 aa, Artificial Sequence
  Cyclic GFR-binding peptide
SNITMQIMDNGRVLLLGEMS

SEQ ID NO: 91831 - protein, 27 aa, Artificial Sequence
  Cyclic GFR-binding peptide
  MOD_RES (1), (2): Xaa is C or S
XXVPQALSNITIQIMVGRKPKVLGEMS

SEQ ID NO: 91832 - protein, 25 aa, Artificial Sequence
  Cyclic GFR-binding peptide
TKMSNITMQIMNDKQQIIIGEMSGM

SEQ ID NO: 91833 - protein, 35 aa, Artificial Sequence; identical to SEQ ID NO: 37229
  Cyclic GFR-binding peptide
  MOD_RES (4), (5): Xaa is C or S

SEQ ID NO: 91834 - protein, 37 aa, Artificial Sequence; identical to SEQ ID NO: 37233
  Cyclic GFR-binding peptide
  MOD_RES (31), (32): Xaa is C or S

SEQ ID NO: 91835 - protein, 29 aa, Artificial Sequence
  Cyclic GFR-binding peptide
  MOD_RES (1), (1): Xaa is C or S
XAEVVMDQYNKLVVNNAADLYLISIASLR

SEQ ID NO: 91836 - protein, 32 aa, Artificial Sequence
  Cyclic GFR-binding peptide
  MOD_RES (26), (27): Xaa is C or S
QYNKLVVNNAADLYLISIASLRAPVXXSAPAA

SEQ ID NO: 91837 - protein, 30 aa, Artificial Sequence
  Cyclic GFR-binding peptide
  MOD_RES (26), (27): Xaa is C or S
QYNKLIIQQKDNLYLMSIASMKTPTXXPGA

SEQ ID NO: 91838 - protein, 35 aa, Artificial Sequence
  Cyclic GFR-binding peptide
  MOD_RES (29), (30): Xaa is C or S
VMGQYNKLIIQQKDNLYLMSIASMKTPTXXPGASG

SEQ ID NO: 91839 - protein, 28 aa, Artificial Sequence
  Cyclic GFR-binding peptide
ESVAMGQYNKLYTVVGKDLYLISIASLK

SEQ ID NO: 91840 - protein, 22 aa, Artificial Sequence
  Cyclic GFR-binding peptide
QYNKLYTVVGKDLYLISIASLK

SEQ ID NO: 91841 - protein, 38 aa, Artificial Sequence; identical to SEQ ID NO: 37238
  Cyclic GFR-binding peptide
  MOD_RES (2), (4), (36), (37): Xaa is C or S

SEQ ID NO: 91842 - protein, 29 aa, Artificial Sequence
  Cyclic GFR-binding peptide
  MOD_RES (26), (27): Xaa is C or S
QYNKLLLVRGNDLYLMSIASTKVPAXXTS

SEQ ID NO: 91843 - protein, 36 aa, Artificial Sequence; identical to SEQ ID NO: 37244
  Cyclic GFR-binding peptide
  MOD_RES (2), (34), (35): Xaa is C or S

SEQ ID NO: 91844 - protein, 36 aa, Artificial Sequence; identical to SEQ ID NO: 37247
  Cyclic GFR-binding peptide
  MOD_RES (1), (33), (34): Xaa is C or S

SEQ ID NO: 91845 - protein, 35 aa, Artificial Sequence; identical to SEQ ID NO: 37248
  Cyclic GFR-binding peptide
  MOD_RES (32), (33): Xaa is C or S

SEQ ID NO: 91846 - protein, 34 aa, Artificial Sequence; identical to SEQ ID NO: 37250
  Cyclic GFR-binding peptide
  MOD_RES (1), (32), (33): Xaa is C or S

SEQ ID NO: 91847 - protein, 34 aa, Artificial Sequence; identical to SEQ ID NO: 37251
  Cyclic GFR-binding peptide
  MOD_RES (32), (33): Xaa is C or S

SEQ ID NO: 91848 - protein, 29 aa, Artificial Sequence
  Cyclic GFR-binding peptide
  MOD_RES (1), (1): Xaa is C or S
XEEVIMQYNKLLLVRGNDLYLMSIASTKV

SEQ ID NO: 91849 - protein, 35 aa, Artificial Sequence
  Cyclic GFR-binding peptide
  MOD_RES (29), (30): Xaa is C or S
VIMQYNKLLLVRGNDLYLMSIASTKVPAXXTSPVR

SEQ ID NO: 91850 - protein, 20 aa, Artificial Sequence
  Cyclic GFR-binding peptide
QYNKLIIQQKDNLYLMSIAS

SEQ ID NO: 91851 - protein, 28 aa, Artificial Sequence
  Cyclic GFR-binding peptide
  MOD_RES (26), (27): Xaa is C or S
QYNKLIIQQKDNLYLMSIASMKTPTXXP

SEQ ID NO: 91852 - protein, 26 aa, Artificial Sequence
  Cyclic GFR-binding peptide
  MOD_RES (26), (26): Xaa is C or S
QYNKLVVNKNEDLYLISIASMKEPVX

SEQ ID NO: 91853 - protein, 35 aa, Artificial Sequence; identical to SEQ ID NO: 37260
  Cyclic GFR-binding peptide
  MOD_RES (1), (33), (34): Xaa is C or S

SEQ ID NO: 91854 - protein, 33 aa, Artificial Sequence; identical to SEQ ID NO: 37264
  Cyclic GFR-binding peptide
  MOD_RES (2), (33): Xaa is C or S

SEQ ID NO: 91855 - protein, 31 aa, Artificial Sequence
  Cyclic GFR-binding peptide
  MOD_RES (30), (31): Xaa is C or S
VTMNQYNKLVVNKNEDLYLISIASMKEPVXX

SEQ ID NO: 91856 - protein, 28 aa, Artificial Sequence
  Cyclic GFR-binding peptide
  MOD_RES (26), (27): Xaa is C or S
QYNKLVVNNAADLYLISIASLRAPVXXS

SEQ ID NO: 91857 - protein, 22 aa, Artificial Sequence
  Cyclic GFR-binding peptide
IMQYNKLLLVRGNDLYLMSIAS

SEQ ID NO: 91858 - protein, 22 aa, Artificial Sequence
  Cyclic GFR-binding peptide
QYNKLVVNNAADLYLISIASLR

SEQ ID NO: 91859 - protein, 30 aa, Artificial Sequence
  Cyclic GFR-binding peptide
  MOD_RES (2), (2): Xaa is C or S
GXAEVVMDQYNKLVVNNAADLYLISIASLR

SEQ ID NO: 91860 - protein, 34 aa, Artificial Sequence; identical to SEQ ID NO: 37272
  Cyclic GFR-binding peptide
  MOD_RES (1), (33), (34): Xaa is C or S

SEQ ID NO: 91861 - protein, 29 aa, Artificial Sequence
  Cyclic GFR-binding peptide
  MOD_RES (28), (29): Xaa is C or S
MGQYNKLYTVVGKDLYLISIASLKTPVXX

SEQ ID NO: 91862 - protein, 36 aa, Artificial Sequence; identical to SEQ ID NO: 37279
  Cyclic GFR-binding peptide
  MOD_RES (32), (33): Xaa is C or S

SEQ ID NO: 91863 - protein, 29 aa, Artificial Sequence
  Cyclic GFR-binding peptide
  MOD_RES (29), (29): Xaa is C or S
VIMQYNKLLLVRGNDLYLMSIASTKVPAX

SEQ ID NO: 91864 - protein, 33 aa, Artificial Sequence
  Cyclic GFR-binding peptide
  MOD_RES (30), (31): Xaa is C or S
VVMDQYNKLVVNNAADLYLISIASLRAPVXXSA

SEQ ID NO: 91865 - protein, 41 aa, Artificial Sequence; identical to SEQ ID NO: 37284
  Cyclic GFR-binding peptide
  MOD_RES (1), (3), (35), (36): Xaa is C or S

SEQ ID NO: 91866 - protein, 34 aa, Artificial Sequence; identical to SEQ ID NO: 37287
  Cyclic GFR-binding peptide
  MOD_RES (1), (3): Xaa is C or S

SEQ ID NO: 91867 - protein, 37 aa, Artificial Sequence; identical to SEQ ID NO: 37291
  Cyclic GFR-binding peptide
  MOD_RES (2), (33), (34): Xaa is C or S

SEQ ID NO: 91868 - protein, 29 aa, Artificial Sequence
  Cyclic GFR-binding peptide
RDVVMGQYNKLIIQQKDNLYLMSIASMKT

SEQ ID NO: 91869 - protein, 29 aa, Artificial Sequence
  Cyclic GFR-binding peptide
VAMGQYNKLYTVVGKDLYLISIASLKTPV

SEQ ID NO: 91870 - protein, 33 aa, Artificial Sequence
  Cyclic GFR-binding peptide
  MOD_RES (1), (3): Xaa is C or S
XGXAEVVMDQYNKLVVNNAADLYLISIASLRAP

SEQ ID NO: 91871 - protein, 36 aa, Artificial Sequence
  Cyclic GFR-binding peptide
  MOD_RES (30), (31): Xaa is C or S
VVMGQYNKLIIQQKDNLYLMSIASMKTPTXXPGASG

SEQ ID NO: 91872 - protein, 34 aa, Artificial Sequence; identical to SEQ ID NO: 37295
  Cyclic GFR-binding peptide
  MOD_RES (2), (33), (34): Xaa is C or S

SEQ ID NO: 91873 - protein, 39 aa, Artificial Sequence; identical to SEQ ID NO: 37301
  Cyclic GFR-binding peptide
  MOD_RES (1), (3), (35), (36): Xaa is C or S

SEQ ID NO: 91874 - protein, 37 aa, Artificial Sequence; identical to SEQ ID NO: 37303
  Cyclic GFR-binding peptide
  MOD_RES (2), (34), (35): Xaa is C or S

SEQ ID NO: 91875 - protein, 31 aa, Artificial Sequence
  Cyclic GFR-binding peptide
  MOD_RES (28), (29): Xaa is C or S
MDQYNKLVVNNAADLYLISIASLRAPVXXSA

SEQ ID NO: 91876 - protein, 30 aa, Artificial Sequence; identical to SEQ ID NO: 37304
  Cyclic GFR-binding peptide

SEQ ID NO: 91877 - protein, 36 aa, Artificial Sequence
  Cyclic GFR-binding peptide
  MOD_RES (30), (31): Xaa is C or S
VVMNQYNKLIVNSSDDLYLVSIASLKTPAXXPKPVH

SEQ ID NO: 91878 - protein, 37 aa, Artificial Sequence; identical to SEQ ID NO: 37308
  Cyclic GFR-binding peptide
  MOD_RES (32), (33): Xaa is C or S

SEQ ID NO: 91879 - protein, 39 aa, Artificial Sequence; identical to SEQ ID NO: 37311
  Cyclic GFR-binding peptide
  MOD_RES (2), (4), (35), (36): Xaa is C or S

SEQ ID NO: 91880 - protein, 32 aa, Artificial Sequence
  Cyclic GFR-binding peptide
  MOD_RES (29), (30): Xaa is C or S
VMGQYNKLIIQQKDNLYLMSIASMKTPTXXPG

SEQ ID NO: 91881 - protein, 35 aa, Artificial Sequence; identical to SEQ ID NO: 37312
  Cyclic GFR-binding peptide
  MOD_RES (1), (33), (34): Xaa is C or S

SEQ ID NO: 91882 - protein, 29 aa, Artificial Sequence
  Cyclic GFR-binding peptide
AAAAAAAAAQYNKLVVNKNEDLYLISIAS

SEQ ID NO: 91883 - protein, 31 aa, Artificial Sequence; identical to SEQ ID NO: 37315
  Cyclic GFR-binding peptide
  MOD_RES (31), (31): Xaa is C or S

SEQ ID NO: 91884 - protein, 22 aa, Artificial Sequence
  Cyclic GFR-binding peptide
GQYNKLIIQQKDNLYLMSIASM

SEQ ID NO: 91885 - protein, 31 aa, Artificial Sequence
  Cyclic GFR-binding peptide
  MOD_RES (2), (2): Xaa is C or S
GXESVAMGQYNKLYTVVGKDLYLISIASLKT

SEQ ID NO: 91886 - protein, 28 aa, Artificial Sequence
  Cyclic GFR-binding peptide
  MOD_RES (27), (28): Xaa is C or S
GQYNKLIIQQKDNLYLMSIASMKTPTXX

SEQ ID NO: 91887 - protein, 25 aa, Artificial Sequence
  Cyclic GFR-binding peptide
MDQYNKLVVNNAADLYLISIASLRA

SEQ ID NO: 91888 - protein, 31 aa, Artificial Sequence
  Cyclic GFR-binding peptide
  MOD_RES (27), (28): Xaa is C or S
MQYNKLLLVRGNDLYLMSIASTKVPAXXTSP

SEQ ID NO: 91889 - protein, 33 aa, Artificial Sequence
  Cyclic GFR-binding peptide
  MOD_RES (2), (4): Xaa is C or S
LXGXEEVIMQYNKLLLVRGNDLYLMSIASTKVP

SEQ ID NO: 91890 - protein, 27 aa, Artificial Sequence
  Cyclic GFR-binding peptide
MDQYNKLVVNNAADLYLISIASLRAPV

SEQ ID NO: 91891 - protein, 30 aa, Artificial Sequence
  Cyclic GFR-binding peptide
  MOD_RES (30), (30): Xaa is C or S
VVMDQYNKLVVNNAADLYLISIASLRAPVX

SEQ ID NO: 91892 - protein, 42 aa, Artificial Sequence; identical to SEQ ID NO: 37325
  Cyclic GFR-binding peptide
  MOD_RES (2), (4), (36), (37): Xaa is C or S

SEQ ID NO: 91893 - protein, 33 aa, Artificial Sequence; identical to SEQ ID NO: 37326
  Cyclic GFR-binding peptide
  MOD_RES (32), (33): Xaa is C or S

SEQ ID NO: 91894 - protein, 40 aa, Artificial Sequence; identical to SEQ ID NO: 37329
  Cyclic GFR-binding peptide
  MOD_RES (1), (3), (35), (36): Xaa is C or S

SEQ ID NO: 91895 - protein, 33 aa, Artificial Sequence; identical to SEQ ID NO: 37330
  Cyclic GFR-binding peptide
  MOD_RES (1), (3): Xaa is C or S

SEQ ID NO: 91896 - protein, 26 aa, Artificial Sequence
  Cyclic GFR-binding peptide
EVTMNQYNKLVVNKNEDLYLISIASM

SEQ ID NO: 91897 - protein, 27 aa, Artificial Sequence
  Cyclic GFR-binding peptide
EVVMDQYNKLVVNNAADLYLISIASLR

SEQ ID NO: 91898 - protein, 36 aa, Artificial Sequence; identical to SEQ ID NO: 37338
  Cyclic GFR-binding peptide
  MOD_RES (32), (33): Xaa is C or S

SEQ ID NO: 91899 - protein, 34 aa, Artificial Sequence
  Cyclic GFR-binding peptide
  MOD_RES (30), (31): Xaa is C or S
VVMGQYNKLIIQQKDNLYLMSIASMKTPTXXPGA

SEQ ID NO: 91900 - protein, 26 aa, Artificial Sequence
  Cyclic GFR-binding peptide
AMGQYNKLYTVVGKDLYLISIASLKT

SEQ ID NO: 91901 - protein, 31 aa, Artificial Sequence; identical to SEQ ID NO: 37341
  Cyclic GFR-binding peptide

SEQ ID NO: 91902 - protein, 23 aa, Artificial Sequence
  Cyclic GFR-binding peptide
MQYNKLLLVRGNDLYLMSIASTK

SEQ ID NO: 91903 - protein, 30 aa, Artificial Sequence
  Cyclic GFR-binding peptide
  MOD_RES (28), (29): Xaa is C or S
MGQYNKLIIQQKDNLYLMSIASMKTPTXXP

SEQ ID NO: 91904 - protein, 36 aa, Artificial Sequence; identical to SEQ ID NO: 37343
  Cyclic GFR-binding peptide
  MOD_RES (32), (33): Xaa is C or S

SEQ ID NO: 91905 - protein, 29 aa, Artificial Sequence
  Cyclic GFR-binding peptide
AAAAAAAAAQYNKLVVNNAADLYLISIAS

SEQ ID NO: 91906 - protein, 32 aa, Artificial Sequence; identical to SEQ ID NO: 37350
  Cyclic GFR-binding peptide
  MOD_RES (32), (32): Xaa is C or S

SEQ ID NO: 91907 - protein, 31 aa, Artificial Sequence
  Cyclic GFR-binding peptide
  MOD_RES (28), (29): Xaa is C or S
MGQYNKLIIQQKDNLYLMSIASMKTPTXXPG

SEQ ID NO: 91908 - protein, 34 aa, Artificial Sequence
  Cyclic GFR-binding peptide
  MOD_RES (28), (29): Xaa is C or S
IMQYNKLLLVRGNDLYLMSIASTKVPAXXTSPVR

SEQ ID NO: 91909 - protein, 35 aa, Artificial Sequence; identical to SEQ ID NO: 37358
  Cyclic GFR-binding peptide
  MOD_RES (31), (32): Xaa is C or S

SEQ ID NO: 91910 - protein, 32 aa, Artificial Sequence
  Cyclic GFR-binding peptide
  MOD_RES (2), (4): Xaa is C or S
RXAXSEVTMNQYNKLVVNKNEDLYLISIASMK

SEQ ID NO: 91911 - protein, 35 aa, Artificial Sequence
  Cyclic GFR-binding peptide
  MOD_RES (29), (30): Xaa is C or S
AMGQYNKLYTVVGKDLYLISIASLKTPVXXAKSAK

SEQ ID NO: 91912 - protein, 30 aa, Artificial Sequence
  Cyclic GFR-binding peptide
  MOD_RES (1), (1): Xaa is C or S
XESVAMGQYNKLYTVVGKDLYLISIASLKT

SEQ ID NO: 91913 - protein, 29 aa, Artificial Sequence
  Cyclic GFR-binding peptide
VVMDQYNKLVVNNAADLYLISIASLRAPV

SEQ ID NO: 91914 - protein, 26 aa, Artificial Sequence
  Cyclic GFR-binding peptide
VTMNQYNKLVVNKNEDLYLISIASMK

SEQ ID NO: 91915 - protein, 40 aa, Artificial Sequence; identical to SEQ ID NO: 37361
  Cyclic GFR-binding peptide
  MOD_RES (1), (3), (35), (36): Xaa is C or S

SEQ ID NO: 91916 - protein, 25 aa, Artificial Sequence
  Cyclic GFR-binding peptide
EEVIMQYNKLLLVRGNDLYLMSIAS

SEQ ID NO: 91917 - protein, 40 aa, Artificial Sequence; identical to SEQ ID NO: 37362
  Cyclic GFR-binding peptide
  MOD_RES (1), (3), (35), (36): Xaa is C or S

SEQ ID NO: 91918 - protein, 25 aa, Artificial Sequence
  Cyclic GFR-binding peptide
DVVMGQYNKLIIQQKDNLYLMSIAS

SEQ ID NO: 91919 - protein, 40 aa, Artificial Sequence; identical to SEQ ID NO: 37363
  Cyclic GFR-binding peptide
  MOD_RES (2), (4), (36), (37): Xaa is C or S

SEQ ID NO: 91920 - protein, 29 aa, Artificial Sequence
  Cyclic GFR-binding peptide
VTMNQYNKLVVNKNEDLYLISIASMKEPV

SEQ ID NO: 91921 - protein, 30 aa, Artificial Sequence
  Cyclic GFR-binding peptide
  MOD_RES (29), (30): Xaa is C or S
VMGQYNKLIIQQKDNLYLMSIASMKTPTXX

SEQ ID NO: 91922 - protein, 38 aa, Artificial Sequence; identical to SEQ ID NO: 37364
  Cyclic GFR-binding peptide
  MOD_RES (1), (3), (35), (36): Xaa is C or S

SEQ ID NO: 91923 - protein, 24 aa, Artificial Sequence
  Cyclic GFR-binding peptide
VVMDQYNKLVVNNAADLYLISIAS

SEQ ID NO: 91924 - protein, 21 aa, Artificial Sequence
  Cyclic GFR-binding peptide
QYNKLYTVVGKDLYLISIASL

SEQ ID NO: 91925 - protein, 27 aa, Artificial Sequence
  Cyclic GFR-binding peptide
  MOD_RES (1), (1): Xaa is C or S
XESVAMGQYNKLYTVVGKDLYLISIAS

SEQ ID NO: 91926 - protein, 26 aa, Artificial Sequence
  Cyclic GFR-binding peptide
MDQYNKLVVNNAADLYLISIASLRAP

SEQ ID NO: 91927 - protein, 33 aa, Artificial Sequence
  Cyclic GFR-binding peptide
  MOD_RES (2), (4): Xaa is C or S
RXGXESVAMGQYNKLYTVVGKDLYLISIASLKT

SEQ ID NO: 91928 - protein, 32 aa, Artificial Sequence
  Cyclic GFR-binding peptide
  MOD_RES (2), (4): Xaa is C or S
SXGXRDVVMGQYNKLIIQQKDNLYLMSIASMK

SEQ ID NO: 91929 - protein, 38 aa, Artificial Sequence; identical to SEQ ID NO: 37371
  Cyclic GFR-binding peptide
  MOD_RES (1), (3), (35), (36): Xaa is C or S

SEQ ID NO: 91930 - protein, 36 aa, Artificial Sequence; identical to SEQ ID NO: 37373
  Cyclic GFR-binding peptide
  MOD_RES (1), (3), (35), (36): Xaa is C or S

SEQ ID NO: 91931 - protein, 31 aa, Artificial Sequence
  Cyclic GFR-binding peptide
  MOD_RES (29), (30): Xaa is C or S
AMGQYNKLYTVVGKDLYLISIASLKTPVXXA

SEQ ID NO: 91932 - protein, 35 aa, Artificial Sequence
  Cyclic GFR-binding peptide
  MOD_RES (29), (30): Xaa is C or S
TMNQYNKLVVNKNEDLYLISIASMKEPVXXPEPIG

SEQ ID NO: 91933 - protein, 39 aa, Artificial Sequence; identical to SEQ ID NO: 37377
  Cyclic GFR-binding peptide
  MOD_RES (1), (33), (34): Xaa is C or S

SEQ ID NO: 91934 - protein, 24 aa, Artificial Sequence
  Cyclic GFR-binding peptide
GQYNKLIIQQKDNLYLMSIASMKT

SEQ ID NO: 91935 - protein, 37 aa, Artificial Sequence; identical to SEQ ID NO: 37379
  Cyclic GFR-binding peptide
  MOD_RES (32), (33): Xaa is C or S

SEQ ID NO: 91936 - protein, 29 aa, Artificial Sequence
  Cyclic GFR-binding peptide
  MOD_RES (1), (3): Xaa is C or S
XGXRDVVMGQYNKLIIQQKDNLYLMSIAS

SEQ ID NO: 91937 - protein, 31 aa, Artificial Sequence
  Cyclic GFR-binding peptide
  MOD_RES (2), (2): Xaa is C or S
AXSEVTMNQYNKLVVNKNEDLYLISIASMKE

SEQ ID NO: 91938 - protein, 33 aa, Artificial Sequence; identical to SEQ ID NO: 37381
  Cyclic GFR-binding peptide
  MOD_RES (32), (33): Xaa is C or S

SEQ ID NO: 91939 - protein, 23 aa, Artificial Sequence
  Cyclic GFR-binding peptide
QYNKLIIQQKDNLYLMSIASMKT

SEQ ID NO: 91940 - protein, 28 aa, Artificial Sequence
  Cyclic GFR-binding peptide
VMDQYNKLVVNNAADLYLISIASLRAPV

SEQ ID NO: 91941 - protein, 28 aa, Artificial Sequence
  Cyclic GFR-binding peptide
EVIMQYNKLLLVRGNDLYLMSIASTKVP

SEQ ID NO: 91942 - protein, 37 aa, Artificial Sequence; identical to SEQ ID NO: 37386
  Cyclic GFR-binding peptide
  MOD_RES (1), (33), (34): Xaa is C or S

SEQ ID NO: 91943 - protein, 38 aa, Artificial Sequence; identical to SEQ ID NO: 37388
  Cyclic GFR-binding peptide
  MOD_RES (1), (33), (34): Xaa is C or S

SEQ ID NO: 91944 - protein, 28 aa, Artificial Sequence
  Cyclic GFR-binding peptide
  MOD_RES (26), (27): Xaa is C or S
QYNKLYTVVGKDLYLISIASLKTPVXXA

SEQ ID NO: 91945 - protein, 32 aa, Artificial Sequence; identical to SEQ ID NO: 37390
  Cyclic GFR-binding peptide
  MOD_RES (31), (32): Xaa is C or S

SEQ ID NO: 91946 - protein, 33 aa, Artificial Sequence
  Cyclic GFR-binding peptide
  MOD_RES (2), (4): Xaa is C or S
RXGXAEVVMDQYNKLVVNNAADLYLISIASLRA

SEQ ID NO: 91947 - protein, 33 aa, Artificial Sequence
  Cyclic GFR-binding peptide
  MOD_RES (29), (30): Xaa is C or S
VMDQYNKLVVNNAADLYLISIASLRAPVXXSAP

SEQ ID NO: 91948 - protein, 26 aa, Artificial Sequence
  Cyclic GFR-binding peptide
VMGQYNKLIIQQKDNLYLMSIASMKT

SEQ ID NO: 91949 - protein, 23 aa, Artificial Sequence
  Cyclic GFR-binding peptide
GQYNKLYTVVGKDLYLISIASLK

SEQ ID NO: 91950 - protein, 24 aa, Artificial Sequence
  Cyclic GFR-binding peptide
VTMNQYNKLVVNKNEDLYLISIAS

SEQ ID NO: 91951 - protein, 23 aa, Artificial Sequence
  Cyclic GFR-binding peptide
AMGQYNKLYTVVGKDLYLISIAS

SEQ ID NO: 91952 - protein, 29 aa, Artificial Sequence
  Cyclic GFR-binding peptide
  MOD_RES (26), (27): Xaa is C or S
QYNKLIIQQKDNLYLMSIASMKTPTXXPG

SEQ ID NO: 91953 - protein, 32 aa, Artificial Sequence; identical to SEQ ID NO: 37402
  Cyclic GFR-binding peptide
  MOD_RES (32), (32): Xaa is C or S

SEQ ID NO: 91954 - protein, 32 aa, Artificial Sequence
  Cyclic GFR-binding peptide
  MOD_RES (29), (30): Xaa is C or S
VMDQYNKLVVNNAADLYLISIASLRAPVXXSA

SEQ ID NO: 91955 - protein, 29 aa, Artificial Sequence
  Cyclic GFR-binding peptide
AAAAAAAAAQYNKLIIQQKDNLYLMSIAS

SEQ ID NO: 91956 - protein, 30 aa, Artificial Sequence
  Cyclic GFR-binding peptide
  MOD_RES (28), (29): Xaa is C or S
MGQYNKLYTVVGKDLYLISIASLKTPVXXA

SEQ ID NO: 91957 - protein, 26 aa, Artificial Sequence
  Cyclic GFR-binding peptide
VVMDQYNKLVVNNAADLYLISIASLR

SEQ ID NO: 91958 - protein, 34 aa, Artificial Sequence; identical to SEQ ID NO: 37408
  Cyclic GFR-binding peptide
  MOD_RES (2), (34): Xaa is C or S

SEQ ID NO: 91959 - protein, 28 aa, Artificial Sequence
  Cyclic GFR-binding peptide
  MOD_RES (28), (28): Xaa is C or S
MGQYNKLYTVVGKDLYLISIASLKTPVX

SEQ ID NO: 91960 - protein, 28 aa, Artificial Sequence
  Cyclic GFR-binding peptide
VVMDQYNKLVVNNAADLYLISIASLRAP

SEQ ID NO: 91961 - protein, 35 aa, Artificial Sequence; identical to SEQ ID NO: 37414
  Cyclic GFR-binding peptide
  MOD_RES (32), (33): Xaa is C or S

SEQ ID NO: 91962 - protein, 32 aa, Artificial Sequence; identical to SEQ ID NO: 37416
  Cyclic GFR-binding peptide
  MOD_RES (32), (32): Xaa is C or S

SEQ ID NO: 91963 - protein, 25 aa, Artificial Sequence
  Cyclic GFR-binding peptide
GQYNKLIIQQKDNLYLMSIASMKTP

SEQ ID NO: 91964 - protein, 42 aa, Artificial Sequence; identical to SEQ ID NO: 37419
  Cyclic GFR-binding peptide
  MOD_RES (2), (4), (36), (37): Xaa is C or S

SEQ ID NO: 91965 - protein, 35 aa, Artificial Sequence; identical to SEQ ID NO: 37420
  Cyclic GFR-binding peptide
  MOD_RES (1), (3), (34), (35): Xaa is C or S

SEQ ID NO: 91966 - protein, 37 aa, Artificial Sequence; identical to SEQ ID NO: 37421
  Cyclic GFR-binding peptide
  MOD_RES (1), (3), (35), (36): Xaa is C or S

SEQ ID NO: 91967 - protein, 31 aa, Artificial Sequence
  Cyclic GFR-binding peptide
  MOD_RES (28), (29): Xaa is C or S
MGQYNKLYTVVGKDLYLISIASLKTPVXXAK

SEQ ID NO: 91968 - protein, 27 aa, Artificial Sequence
  Cyclic GFR-binding peptide
  MOD_RES (26), (27): Xaa is C or S
QYNKLLLVRGNDLYLMSIASTKVPAXX

SEQ ID NO: 91969 - protein, 33 aa, Artificial Sequence
  Cyclic GFR-binding peptide
  MOD_RES (27), (28): Xaa is C or S
NQYNKLIVNSSDDLYLVSIASLKTPAXXPKPVH

SEQ ID NO: 91970 - protein, 35 aa, Artificial Sequence
  Cyclic GFR-binding peptide
  MOD_RES (30), (31): Xaa is C or S
VAMGQYNKLYTVVGKDLYLISIASLKTPVXXAKSA

SEQ ID NO: 91971 - protein, 26 aa, Artificial Sequence
  Cyclic GFR-binding peptide
MGQYNKLIIQQKDNLYLMSIASMKTP

SEQ ID NO: 91972 - protein, 27 aa, Artificial Sequence
  Cyclic GFR-binding peptide
IMQYNKLLLVRGNDLYLMSIASTKVPA

SEQ ID NO: 91973 - protein, 25 aa, Artificial Sequence
  Cyclic GFR-binding peptide
EVVMDQYNKLVVNNAADLYLISIAS

SEQ ID NO: 91974 - protein, 30 aa, Artificial Sequence
  Cyclic GFR-binding peptide
  MOD_RES (1), (3): Xaa is C or S
XGXRDVVMGQYNKLIIQQKDNLYLMSIASM

SEQ ID NO: 91975 - protein, 26 aa, Artificial Sequence
  Cyclic GFR-binding peptide
VIMQYNKLLLVRGNDLYLMSIASTKV

SEQ ID NO: 91976 - protein, 32 aa, Artificial Sequence; identical to SEQ ID NO: 37443
  Cyclic GFR-binding peptide
  MOD_RES (1), (32): Xaa is C or S

SEQ ID NO: 91977 - protein, 29 aa, Artificial Sequence
  Cyclic GFR-binding peptide
  MOD_RES (27), (28): Xaa is C or S
GQYNKLYTVVGKDLYLISIASLKTPVXXA

SEQ ID NO: 91978 - protein, 31 aa, Artificial Sequence
  Cyclic GFR-binding peptide
  MOD_RES (29), (30): Xaa is C or S
VIMQYNKLLLVRGNDLYLMSIASTKVPAXXT

SEQ ID NO: 91979 - protein, 21 aa, Artificial Sequence
  Cyclic GFR-binding peptide
NQYNKLVVNKNEDLYLISIAS

SEQ ID NO: 91980 - protein, 29 aa, Artificial Sequence
  Cyclic GFR-binding peptide
AAAAAAAAAQYNKLLLVRGNDLYLMSIAS

SEQ ID NO: 91981 - protein, 34 aa, Artificial Sequence; identical to SEQ ID NO: 37450
  Cyclic GFR-binding peptide
  MOD_RES (1), (3): Xaa is C or S

SEQ ID NO: 91982 - protein, 35 aa, Artificial Sequence; identical to SEQ ID NO: 37452
  Cyclic GFR-binding peptide
  MOD_RES (31), (32): Xaa is C or S

SEQ ID NO: 91983 - protein, 37 aa, Artificial Sequence; identical to SEQ ID NO: 37453
  Cyclic GFR-binding peptide
  MOD_RES (2), (34), (35): Xaa is C or S

SEQ ID NO: 91984 - protein, 36 aa, Artificial Sequence
  Cyclic GFR-binding peptide
  MOD_RES (30), (31): Xaa is C or S
VTMNQYNKLVVNKNEDLYLISIASMKEPVXXPEPIG

SEQ ID NO: 91985 - protein, 36 aa, Artificial Sequence; identical to SEQ ID NO: 37454
  Cyclic GFR-binding peptide
  MOD_RES (2), (34), (35): Xaa is C or S

SEQ ID NO: 91986 - protein, 26 aa, Artificial Sequence
  Cyclic GFR-binding peptide
  MOD_RES (26), (26): Xaa is C or S
QYNKLLLVRGNDLYLMSIASTKVPAX

SEQ ID NO: 91987 - protein, 30 aa, Artificial Sequence; identical to SEQ ID NO: 37456
  Cyclic GFR-binding peptide

SEQ ID NO: 91988 - protein, 32 aa, Artificial Sequence
  Cyclic GFR-binding peptide
  MOD_RES (26), (27): Xaa is C or S
QYNKLVVNKNEDLYLISIASMKEPVXXPEPIG

SEQ ID NO: 91989 - protein, 40 aa, Artificial Sequence; identical to SEQ ID NO: 37457
  Cyclic GFR-binding peptide
  MOD_RES (2), (34), (35): Xaa is C or S

SEQ ID NO: 91990 - protein, 34 aa, Artificial Sequence
  Cyclic GFR-binding peptide
  MOD_RES (2), (4): Xaa is C or S
RXGXESVAMGQYNKLYTVVGKDLYLISIASLKTP

SEQ ID NO: 91991 - protein, 27 aa, Artificial Sequence
  Cyclic GFR-binding peptide
ESVAMGQYNKLYTVVGKDLYLISIASL

SEQ ID NO: 91992 - protein, 33 aa, Artificial Sequence; identical to SEQ ID NO: 37459
  Cyclic GFR-binding peptide
  MOD_RES (2), (2): Xaa is C or S

SEQ ID NO: 91993 - protein, 36 aa, Artificial Sequence; identical to SEQ ID NO: 37461
  Cyclic GFR-binding peptide
  MOD_RES (31), (32): Xaa is C or S

SEQ ID NO: 91994 - protein, 30 aa, Artificial Sequence
  Cyclic GFR-binding peptide
  MOD_RES (2), (2): Xaa is C or S
GXESVAMGQYNKLYTVVGKDLYLISIASLK

SEQ ID NO: 91995 - protein, 32 aa, Artificial Sequence
  Cyclic GFR-binding peptide
  MOD_RES (28), (29): Xaa is C or S
MGQYNKLIIQQKDNLYLMSIASMKTPTXXPGA

SEQ ID NO: 91996 - protein, 31 aa, Artificial Sequence
  Cyclic GFR-binding peptide
  MOD_RES (2), (4): Xaa is C or S
LXGXEEVIMQYNKLLLVRGNDLYLMSIASTK

SEQ ID NO: 91997 - protein, 32 aa, Artificial Sequence
  Cyclic GFR-binding peptide
  MOD_RES (27), (28): Xaa is C or S
MQYNKLLLVRGNDLYLMSIASTKVPAXXTSPV

SEQ ID NO: 91998 - protein, 39 aa, Artificial Sequence; identical to SEQ ID NO: 37470
  Cyclic GFR-binding peptide
  MOD_RES (2), (33), (34): Xaa is C or S

SEQ ID NO: 91999 - protein, 28 aa, Artificial Sequence
  Cyclic GFR-binding peptide
EEVIMQYNKLLLVRGNDLYLMSIASTKV

SEQ ID NO: 92000 - protein, 24 aa, Artificial Sequence
  Cyclic GFR-binding peptide
VIMQYNKLLLVRGNDLYLMSIAST

SEQ ID NO: 92001 - protein, 27 aa, Artificial Sequence
  Cyclic GFR-binding peptide
MGQYNKLYTVVGKDLYLISIASLKTPV

SEQ ID NO: 92002 - protein, 32 aa, Artificial Sequence
  Cyclic GFR-binding peptide
  MOD_RES (29), (30): Xaa is C or S
AMGQYNKLYTVVGKDLYLISIASLKTPVXXAK

SEQ ID NO: 92003 - protein, 32 aa, Artificial Sequence
  Cyclic GFR-binding peptide
  MOD_RES (30), (31): Xaa is C or S
VVMGQYNKLIIQQKDNLYLMSIASMKTPTXXP

SEQ ID NO: 92004 - protein, 31 aa, Artificial Sequence
  Cyclic GFR-binding peptide
  MOD_RES (27), (28): Xaa is C or S
NQYNKLVVNKNEDLYLISIASMKEPVXXPEP

SEQ ID NO: 92005 - protein, 29 aa, Artificial Sequence
  Cyclic GFR-binding peptide
SEVTMNQYNKLVVNKNEDLYLISIASMKE

SEQ ID NO: 92006 - protein, 24 aa, Artificial Sequence
  Cyclic GFR-binding peptide
QYNKLIIQQKDNLYLMSIASMKTP

SEQ ID NO: 92007 - protein, 36 aa, Artificial Sequence; identical to SEQ ID NO: 37475
  Cyclic GFR-binding peptide
  MOD_RES (32), (33): Xaa is C or S

SEQ ID NO: 92008 - protein, 40 aa, Artificial Sequence; identical to SEQ ID NO: 37476
  Cyclic GFR-binding peptide
  MOD_RES (2), (4), (35), (36): Xaa is C or S

SEQ ID NO: 92009 - protein, 41 aa, Artificial Sequence; identical to SEQ ID NO: 37477
  Cyclic GFR-binding peptide
  MOD_RES (2), (4), (36), (37): Xaa is C or S

SEQ ID NO: 92010 - protein, 39 aa, Artificial Sequence; identical to SEQ ID NO: 37478
  Cyclic GFR-binding peptide
  MOD_RES (2), (34), (35): Xaa is C or S

SEQ ID NO: 92011 - protein, 32 aa, Artificial Sequence
  Cyclic GFR-binding peptide
  MOD_RES (27), (28): Xaa is C or S
GQYNKLIIQQKDNLYLMSIASMKTPTXXPGAS

SEQ ID NO: 92012 - protein, 33 aa, Artificial Sequence; identical to SEQ ID NO: 37480
  Cyclic GFR-binding peptide
  MOD_RES (31), (32): Xaa is C or S

SEQ ID NO: 92013 - protein, 27 aa, Artificial Sequence
  Cyclic GFR-binding peptide
EVIMQYNKLLLVRGNDLYLMSIASTKV

SEQ ID NO: 92014 - protein, 37 aa, Artificial Sequence; identical to SEQ ID NO: 37483
  Cyclic GFR-binding peptide
  MOD_RES (32), (33): Xaa is C or S

SEQ ID NO: 92015 - protein, 29 aa, Artificial Sequence
  Cyclic GFR-binding peptide
  MOD_RES (27), (28): Xaa is C or S
DQYNKLVVNNAADLYLISIASLRAPVXXS

SEQ ID NO: 92016 - protein, 32 aa, Artificial Sequence
  Cyclic GFR-binding peptide
  MOD_RES (26), (27): Xaa is C or S
QYNKLYTVVGKDLYLISIASLKTPVXXAKSAK

SEQ ID NO: 92017 - protein, 28 aa, Artificial Sequence
  Cyclic GFR-binding peptide
VIMQYNKLLLVRGNDLYLMSIASTKVPA

SEQ ID NO: 92018 - protein, 30 aa, Artificial Sequence
  Cyclic GFR-binding peptide
  MOD_RES (1), (3): Xaa is C or S
XGXEEVIMQYNKLLLVRGNDLYLMSIASTK

SEQ ID NO: 92019 - protein, 28 aa, Artificial Sequence
  Cyclic GFR-binding peptide
EVVMDQYNKLVVNNAADLYLISIASLRA

SEQ ID NO: 92020 - protein, 29 aa, Artificial Sequence
  Cyclic GFR-binding peptide
  MOD_RES (28), (29): Xaa is C or S
MGQYNKLIIQQKDNLYLMSIASMKTPTXX

SEQ ID NO: 92021 - protein, 36 aa, Artificial Sequence; identical to SEQ ID NO: 37495
  Cyclic GFR-binding peptide
  MOD_RES (2), (4), (36): Xaa is C or S

SEQ ID NO: 92022 - protein, 27 aa, Artificial Sequence
  Cyclic GFR-binding peptide
TMNQYNKLVVNKNEDLYLISIASMKEP

SEQ ID NO: 92023 - protein, 23 aa, Artificial Sequence
  Cyclic GFR-binding peptide
VMDQYNKLVVNNAADLYLISIAS

SEQ ID NO: 92024 - protein, 26 aa, Artificial Sequence
  Cyclic GFR-binding peptide
EVIMQYNKLLLVRGNDLYLMSIASTK

SEQ ID NO: 92025 - protein, 29 aa, Artificial Sequence
  Cyclic GFR-binding peptide
  MOD_RES (27), (28): Xaa is C or S
NQYNKLVVNKNEDLYLISIASMKEPVXXP

SEQ ID NO: 92026 - protein, 26 aa, Artificial Sequence
  Cyclic GFR-binding peptide
MQYNKLLLVRGNDLYLMSIASTKVPA

SEQ ID NO: 92027 - protein, 34 aa, Artificial Sequence; identical to SEQ ID NO: 37498
  Cyclic GFR-binding peptide
  MOD_RES (31), (32): Xaa is C or S

SEQ ID NO: 92028 - protein, 38 aa, Artificial Sequence; identical to SEQ ID NO: 37502
  Cyclic GFR-binding peptide
  MOD_RES (2), (4), (36), (37): Xaa is C or S

SEQ ID NO: 92029 - protein, 27 aa, Artificial Sequence
  Cyclic GFR-binding peptide
VMDQYNKLVVNNAADLYLISIASLRAP

SEQ ID NO: 92030 - protein, 37 aa, Artificial Sequence; identical to SEQ ID NO: 37506
  Cyclic GFR-binding peptide
  MOD_RES (31), (32): Xaa is C or S

SEQ ID NO: 92031 - protein, 30 aa, Artificial Sequence
  Cyclic GFR-binding peptide
  MOD_RES (2), (4): Xaa is C or S
RXGXAEVVMDQYNKLVVNNAADLYLISIAS

SEQ ID NO: 92032 - protein, 42 aa, Artificial Sequence; identical to SEQ ID NO: 37508
  Cyclic GFR-binding peptide
  MOD_RES (2), (4), (36), (37): Xaa is C or S

SEQ ID NO: 92033 - protein, 26 aa, Artificial Sequence
  Cyclic GFR-binding peptide
  MOD_RES (26), (26): Xaa is C or S
QYNKLIIQQKDNLYLMSIASMKTPTX

SEQ ID NO: 92034 - protein, 33 aa, Artificial Sequence; identical to SEQ ID NO: 37513
  Cyclic GFR-binding peptide
  MOD_RES (1), (33): Xaa is C or S

SEQ ID NO: 92035 - protein, 25 aa, Artificial Sequence
  Cyclic GFR-binding peptide
VVMDQYNKLVVNNAADLYLISIASL

SEQ ID NO: 92036 - protein, 33 aa, Artificial Sequence
  Cyclic GFR-binding peptide
  MOD_RES (28), (29): Xaa is C or S
IMQYNKLLLVRGNDLYLMSIASTKVPAXXTSPV

SEQ ID NO: 92037 - protein, 28 aa, Artificial Sequence
  Cyclic GFR-binding peptide
  MOD_RES (28), (28): Xaa is C or S
MGQYNKLIIQQKDNLYLMSIASMKTPTX

SEQ ID NO: 92038 - protein, 34 aa, Artificial Sequence; identical to SEQ ID NO: 37524
  Cyclic GFR-binding peptide
  MOD_RES (1), (33), (34): Xaa is C or S

SEQ ID NO: 92039 - protein, 31 aa, Artificial Sequence
  Cyclic GFR-binding peptide
  MOD_RES (26), (27): Xaa is C or S
QYNKLLLVRGNDLYLMSIASTKVPAXXTSPV

SEQ ID NO: 92040 - protein, 30 aa, Artificial Sequence
  Cyclic GFR-binding peptide
ESVAMGQYNKLYTVVGKDLYLISIASLKTP

SEQ ID NO: 92041 - protein, 41 aa, Artificial Sequence; identical to SEQ ID NO: 37530
  Cyclic GFR-binding peptide
  MOD_RES (2), (4), (36), (37): Xaa is C or S

SEQ ID NO: 92042 - protein, 34 aa, Artificial Sequence; identical to SEQ ID NO: 37531
  Cyclic GFR-binding peptide
  MOD_RES (1), (3), (34): Xaa is C or S

SEQ ID NO: 92043 - protein, 34 aa, Artificial Sequence
  Cyclic GFR-binding peptide
  MOD_RES (28), (29): Xaa is C or S
MNQYNKLVVNKNEDLYLISIASMKEPVXXPEPIG

SEQ ID NO: 92044 - protein, 38 aa, Artificial Sequence; identical to SEQ ID NO: 37535
  Cyclic GFR-binding peptide
  MOD_RES (1), (33), (34): Xaa is C or S

SEQ ID NO: 92045 - protein, 27 aa, Artificial Sequence
  Cyclic GFR-binding peptide
  MOD_RES (27), (27): Xaa is C or S
MQYNKLLLVRGNDLYLMSIASTKVPAX

SEQ ID NO: 92046 - protein, 26 aa, Artificial Sequence
  Cyclic GFR-binding peptide
VVMGQYNKLIIQQKDNLYLMSIASMK

SEQ ID NO: 92047 - protein, 31 aa, Artificial Sequence
  Cyclic GFR-binding peptide
  MOD_RES (1), (3): Xaa is C or S
XAXSEVTMNQYNKLVVNKNEDLYLISIASMK

SEQ ID NO: 92048 - protein, 23 aa, Artificial Sequence
  Cyclic GFR-binding peptide
TMNQYNKLVVNKNEDLYLISIAS

SEQ ID NO: 92049 - protein, 38 aa, Artificial Sequence; identical to SEQ ID NO: 37542
  Cyclic GFR-binding peptide
  MOD_RES (1), (33), (34): Xaa is C or S

SEQ ID NO: 92050 - protein, 33 aa, Artificial Sequence
  Cyclic GFR-binding peptide
  MOD_RES (27), (28): Xaa is C or S
MQYNKLLLVRGNDLYLMSIASTKVPAXXTSPVR

SEQ ID NO: 92051 - protein, 36 aa, Artificial Sequence; identical to SEQ ID NO: 37545
  Cyclic GFR-binding peptide
  MOD_RES (2), (4), (35), (36): Xaa is C or S

SEQ ID NO: 92052 - protein, 22 aa, Artificial Sequence
  Cyclic GFR-binding peptide
QYNKLVVNKNEDLYLISIASMK

SEQ ID NO: 92053 - protein, 33 aa, Artificial Sequence
  Cyclic GFR-binding peptide
  MOD_RES (27), (28): Xaa is C or S
GQYNKLYTVVGKDLYLISIASLKTPVXXAKSAK

SEQ ID NO: 92054 - protein, 30 aa, Artificial Sequence
  Cyclic GFR-binding peptide
  MOD_RES (2), (4): Xaa is C or S
LXGXEEVIMQYNKLLLVRGNDLYLMSIAST

SEQ ID NO: 92055 - protein, 34 aa, Artificial Sequence
  Cyclic GFR-binding peptide
  MOD_RES (2), (4): Xaa is C or S
SXGXRDVVMGQYNKLIIQQKDNLYLMSIASMKTP

SEQ ID NO: 92056 - protein, 31 aa, Artificial Sequence
  Cyclic GFR-binding peptide
  MOD_RES (2), (2): Xaa is C or S
GXRDVVMGQYNKLIIQQKDNLYLMSIASMKT

SEQ ID NO: 92057 - protein, 28 aa, Artificial Sequence
  Cyclic GFR-binding peptide
  MOD_RES (1), (1): Xaa is C or S
XSEVTMNQYNKLVVNKNEDLYLISIASM

SEQ ID NO: 92058 - protein, 34 aa, Artificial Sequence; identical to SEQ ID NO: 37550
  Cyclic GFR-binding peptide
  MOD_RES (32), (33): Xaa is C or S

SEQ ID NO: 92059 - protein, 34 aa, Artificial Sequence; identical to SEQ ID NO: 37552
  Cyclic GFR-binding peptide
  MOD_RES (32), (33): Xaa is C or S

SEQ ID NO: 92060 - protein, 37 aa, Artificial Sequence; identical to SEQ ID NO: 37554
  Cyclic GFR-binding peptide
  MOD_RES (1), (33), (34): Xaa is C or S

SEQ ID NO: 92061 - protein, 32 aa, Artificial Sequence
  Cyclic GFR-binding peptide
  MOD_RES (2), (4): Xaa is C or S
LXGXEEVIMQYNKLLLVRGNDLYLMSIASTKV

SEQ ID NO: 92062 - protein, 31 aa, Artificial Sequence
  Cyclic GFR-binding peptide
  MOD_RES (1), (3): Xaa is C or S
XGXESVAMGQYNKLYTVVGKDLYLISIASLK

SEQ ID NO: 92063 - protein, 39 aa, Artificial Sequence; identical to SEQ ID NO: 37556
  Cyclic GFR-binding peptide
  MOD_RES (1), (33), (34): Xaa is C or S

SEQ ID NO: 92064 - protein, 39 aa, Artificial Sequence; identical to SEQ ID NO: 37558
  Cyclic GFR-binding peptide
  MOD_RES (1), (3), (35), (36): Xaa is C or S

SEQ ID NO: 92065 - protein, 24 aa, Artificial Sequence
  Cyclic GFR-binding peptide
EVIMQYNKLLLVRGNDLYLMSIAS

SEQ ID NO: 92066 - protein, 39 aa, Artificial Sequence; identical to SEQ ID NO: 37561
  Cyclic GFR-binding peptide
  MOD_RES (2), (34), (35): Xaa is C or S

SEQ ID NO: 92067 - protein, 26 aa, Artificial Sequence
  Cyclic GFR-binding peptide
AEVVMDQYNKLVVNNAADLYLISIAS

SEQ ID NO: 92068 - protein, 30 aa, Artificial Sequence
  Cyclic GFR-binding peptide
  MOD_RES (2), (4): Xaa is C or S
SXGXRDVVMGQYNKLIIQQKDNLYLMSIAS

SEQ ID NO: 92069 - protein, 34 aa, Artificial Sequence
  Cyclic GFR-binding peptide
  MOD_RES (30), (31): Xaa is C or S
EVIMQYNKLLLVRGNDLYLMSIASTKVPAXXTSP

SEQ ID NO: 92070 - protein, 38 aa, Artificial Sequence; identical to SEQ ID NO: 37568
  Cyclic GFR-binding peptide
  MOD_RES (32), (33): Xaa is C or S

SEQ ID NO: 92071 - protein, 33 aa, Artificial Sequence
  Cyclic GFR-binding peptide
  MOD_RES (28), (29): Xaa is C or S
MNQYNKLVVNKNEDLYLISIASMKEPVXXPEPI

SEQ ID NO: 92072 - protein, 30 aa, Artificial Sequence
  Cyclic GFR-binding peptide
  MOD_RES (28), (29): Xaa is C or S
MDQYNKLVVNNAADLYLISIASLRAPVXXS

SEQ ID NO: 92073 - protein, 30 aa, Artificial Sequence
  Cyclic GFR-binding peptide
  MOD_RES (1), (1): Xaa is C or S
XSEVTMNQYNKLVVNKNEDLYLISIASMKE

SEQ ID NO: 92074 - protein, 30 aa, Artificial Sequence
  Cyclic GFR-binding peptide
  MOD_RES (1), (1): Xaa is C or S
XRDVVMGQYNKLIIQQKDNLYLMSIASMKT

SEQ ID NO: 92075 - protein, 33 aa, Artificial Sequence
  Cyclic GFR-binding peptide
  MOD_RES (2), (4): Xaa is C or S
RXAXSEVTMNQYNKLVVNKNEDLYLISIASMKE

SEQ ID NO: 92076 - protein, 38 aa, Artificial Sequence; identical to SEQ ID NO: 37575
  Cyclic GFR-binding peptide
  MOD_RES (2), (4), (35), (36): Xaa is C or S

SEQ ID NO: 92077 - protein, 33 aa, Artificial Sequence
  Cyclic GFR-binding peptide
  MOD_RES (28), (29): Xaa is C or S
MDQYNKLVVNNAADLYLISIASLRAPVXXSAPA

SEQ ID NO: 92078 - protein, 33 aa, Artificial Sequence; identical to SEQ ID NO: 37576
  Cyclic GFR-binding peptide
  MOD_RES (2), (2): Xaa is C or S

SEQ ID NO: 92079 - protein, 35 aa, Artificial Sequence
  Cyclic GFR-binding peptide
  MOD_RES (29), (30): Xaa is C or S
VMDQYNKLVVNNAADLYLISIASLRAPVXXSAPAA

SEQ ID NO: 92080 - protein, 20 aa, Artificial Sequence
  Cyclic GFR-binding peptide
QYNKLLLVRGNDLYLMSIAS

SEQ ID NO: 92081 - protein, 30 aa, Artificial Sequence
  Cyclic GFR-binding peptide
  MOD_RES (29), (30): Xaa is C or S
VIMQYNKLLLVRGNDLYLMSIASTKVPAXX

SEQ ID NO: 92082 - protein, 30 aa, Artificial Sequence
  Cyclic GFR-binding peptide
  MOD_RES (27), (28): Xaa is C or S
GQYNKLYTVVGKDLYLISIASLKTPVXXAK

SEQ ID NO: 92083 - protein, 35 aa, Artificial Sequence; identical to SEQ ID NO: 37586
  Cyclic GFR-binding peptide
  MOD_RES (2), (34), (35): Xaa is C or S

SEQ ID NO: 92084 - protein, 33 aa, Artificial Sequence
  Cyclic GFR-binding peptide
  MOD_RES (29), (30): Xaa is C or S
AMGQYNKLYTVVGKDLYLISIASLKTPVXXAKS

SEQ ID NO: 92085 - protein, 33 aa, Artificial Sequence; identical to SEQ ID NO: 37588
  Cyclic GFR-binding peptide
  MOD_RES (2), (2): Xaa is C or S

SEQ ID NO: 92086 - protein, 31 aa, Artificial Sequence
  Cyclic GFR-binding peptide
  MOD_RES (2), (2): Xaa is C or S
GXAEVVMDQYNKLVVNNAADLYLISIASLRA

SEQ ID NO: 92087 - protein, 31 aa, Artificial Sequence
  Cyclic GFR-binding peptide
  MOD_RES (28), (29): Xaa is C or S
IMQYNKLLLVRGNDLYLMSIASTKVPAXXTS

SEQ ID NO: 92088 - protein, 27 aa, Artificial Sequence
  Cyclic GFR-binding peptide
  MOD_RES (1), (1): Xaa is C or S
XSEVTMNQYNKLVVNKNEDLYLISIAS

SEQ ID NO: 92089 - protein, 28 aa, Artificial Sequence
  Cyclic GFR-binding peptide
SEVTMNQYNKLVVNKNEDLYLISIASMK

SEQ ID NO: 92090 - protein, 25 aa, Artificial Sequence
  Cyclic GFR-binding peptide
QYNKLVVNKNEDLYLISIASMKEPV

SEQ ID NO: 92091 - protein, 39 aa, Artificial Sequence; identical to SEQ ID NO: 37593
  Cyclic GFR-binding peptide
  MOD_RES (2), (4), (36), (37): Xaa is C or S

SEQ ID NO: 92092 - protein, 29 aa, Artificial Sequence
  Cyclic GFR-binding peptide
  MOD_RES (29), (29): Xaa is C or S
VMGQYNKLIIQQKDNLYLMSIASMKTPTX

SEQ ID NO: 92093 - protein, 22 aa, Artificial Sequence
  Cyclic GFR-binding peptide
GQYNKLYTVVGKDLYLISIASL

SEQ ID NO: 92094 - protein, 28 aa, Artificial Sequence
  Cyclic GFR-binding peptide
VMGQYNKLIIQQKDNLYLMSIASMKTPT

SEQ ID NO: 92095 - protein, 29 aa, Artificial Sequence
  Cyclic GFR-binding peptide
  MOD_RES (28), (29): Xaa is C or S
MDQYNKLVVNNAADLYLISIASLRAPVXX

SEQ ID NO: 92096 - protein, 36 aa, Artificial Sequence; identical to SEQ ID NO: 37601
  Cyclic GFR-binding peptide
  MOD_RES (31), (32): Xaa is C or S

SEQ ID NO: 92097 - protein, 31 aa, Artificial Sequence; identical to SEQ ID NO: 37600
  Cyclic GFR-binding peptide

SEQ ID NO: 92098 - protein, 31 aa, Artificial Sequence
  Cyclic GFR-binding peptide
  MOD_RES (1), (1): Xaa is C or S
XSEVTMNQYNKLVVNKNEDLYLISIASMKEP

SEQ ID NO: 92099 - protein, 27 aa, Artificial Sequence
  Cyclic GFR-binding peptide
  MOD_RES (1), (1): Xaa is C or S
XEEVIMQYNKLLLVRGNDLYLMSIAST

SEQ ID NO: 92100 - protein, 39 aa, Artificial Sequence; identical to SEQ ID NO: 37606
  Cyclic GFR-binding peptide
  MOD_RES (1), (33), (34): Xaa is C or S

SEQ ID NO: 92101 - protein, 32 aa, Artificial Sequence
  Cyclic GFR-binding peptide
  MOD_RES (28), (29): Xaa is C or S
IMQYNKLLLVRGNDLYLMSIASTKVPAXXTSP

SEQ ID NO: 92102 - protein, 36 aa, Artificial Sequence
  Cyclic GFR-binding peptide
  MOD_RES (30), (31): Xaa is C or S
EVIMQYNKLLLVRGNDLYLMSIASTKVPAXXTSPVR

SEQ ID NO: 92103 - protein, 32 aa, Artificial Sequence; identical to SEQ ID NO: 37609
  Cyclic GFR-binding peptide
  MOD_RES (1), (1): Xaa is C or S

SEQ ID NO: 92104 - protein, 26 aa, Artificial Sequence
  Cyclic GFR-binding peptide
GQYNKLYTVVGKDLYLISIASLKTPV

SEQ ID NO: 92105 - protein, 34 aa, Artificial Sequence; identical to SEQ ID NO: 37612
  Cyclic GFR-binding peptide
  MOD_RES (31), (32): Xaa is C or S

SEQ ID NO: 92106 - protein, 27 aa, Artificial Sequence
  Cyclic GFR-binding peptide
EEVIMQYNKLLLVRGNDLYLMSIASTK

SEQ ID NO: 92107 - protein, 29 aa, Artificial Sequence
  Cyclic GFR-binding peptide
  MOD_RES (28), (29): Xaa is C or S
MNQYNKLVVNKNEDLYLISIASMKEPVXX

SEQ ID NO: 92108 - protein, 25 aa, Artificial Sequence
  Cyclic GFR-binding peptide
QYNKLIIQQKDNLYLMSIASMKTPT

SEQ ID NO: 92109 - protein, 35 aa, Artificial Sequence; identical to SEQ ID NO: 37616
  Cyclic GFR-binding peptide
  MOD_RES (2), (34), (35): Xaa is C or S

SEQ ID NO: 92110 - protein, 36 aa, Artificial Sequence; identical to SEQ ID NO: 37619
  Cyclic GFR-binding peptide
  MOD_RES (31), (32): Xaa is C or S

SEQ ID NO: 92111 - protein, 24 aa, Artificial Sequence
  Cyclic GFR-binding peptide
AMGQYNKLYTVVGKDLYLISIASL

SEQ ID NO: 92112 - protein, 37 aa, Artificial Sequence; identical to SEQ ID NO: 37621
  Cyclic GFR-binding peptide
  MOD_RES (32), (33): Xaa is C or S

SEQ ID NO: 92113 - protein, 26 aa, Artificial Sequence
  Cyclic GFR-binding peptide
EVVMDQYNKLVVNNAADLYLISIASL

SEQ ID NO: 92114 - protein, 21 aa, Artificial Sequence
  Cyclic GFR-binding peptide
MQYNKLLLVRGNDLYLMSIAS

SEQ ID NO: 92115 - protein, 38 aa, Artificial Sequence; identical to SEQ ID NO: 37623
  Cyclic GFR-binding peptide
  MOD_RES (2), (34), (35): Xaa is C or S

SEQ ID NO: 92116 - protein, 30 aa, Artificial Sequence
  Cyclic GFR-binding peptide
  MOD_RES (30), (30): Xaa is C or S
VAMGQYNKLYTVVGKDLYLISIASLKTPVX

SEQ ID NO: 92117 - protein, 31 aa, Artificial Sequence
  Cyclic GFR-binding peptide
  MOD_RES (28), (29): Xaa is C or S
MNQYNKLVVNKNEDLYLISIASMKEPVXXPE

SEQ ID NO: 92118 - protein, 33 aa, Artificial Sequence
  Cyclic GFR-binding peptide
  MOD_RES (1), (3): Xaa is C or S
XGXRDVVMGQYNKLIIQQKDNLYLMSIASMKTP

SEQ ID NO: 92119 - protein, 26 aa, Artificial Sequence
  Cyclic GFR-binding peptide
MNQYNKLVVNKNEDLYLISIASMKEP

SEQ ID NO: 92120 - protein, 37 aa, Artificial Sequence; identical to SEQ ID NO: 37627
  Cyclic GFR-binding peptide
  MOD_RES (1), (3), (35), (36): Xaa is C or S

SEQ ID NO: 92121 - protein, 32 aa, Artificial Sequence
  Cyclic GFR-binding peptide
  MOD_RES (28), (29): Xaa is C or S
MNQYNKLVVNKNEDLYLISIASMKEPVXXPEP

SEQ ID NO: 92122 - protein, 37 aa, Artificial Sequence; identical to SEQ ID NO: 37629
  Cyclic GFR-binding peptide
  MOD_RES (1), (33), (34): Xaa is C or S

SEQ ID NO: 92123 - protein, 41 aa, Artificial Sequence; identical to SEQ ID NO: 37630
  Cyclic GFR-binding peptide
  MOD_RES (1), (3), (35), (36): Xaa is C or S

SEQ ID NO: 92124 - protein, 22 aa, Artificial Sequence
  Cyclic GFR-binding peptide
MQYNKLLLVRGNDLYLMSIAST

SEQ ID NO: 92125 - protein, 27 aa, Artificial Sequence
  Cyclic GFR-binding peptide
VTMNQYNKLVVNKNEDLYLISIASMKE

SEQ ID NO: 92126 - protein, 31 aa, Artificial Sequence
  Cyclic GFR-binding peptide
  MOD_RES (27), (28): Xaa is C or S
GQYNKLIIQQKDNLYLMSIASMKTPTXXPGA

SEQ ID NO: 92127 - protein, 28 aa, Artificial Sequence
  Cyclic GFR-binding peptide
  MOD_RES (28), (28): Xaa is C or S
MDQYNKLVVNNAADLYLISIASLRAPVX

SEQ ID NO: 92128 - protein, 32 aa, Artificial Sequence; identical to SEQ ID NO: 37634
  Cyclic GFR-binding peptide
  MOD_RES (31), (32): Xaa is C or S

SEQ ID NO: 92129 - protein, 31 aa, Artificial Sequence; identical to SEQ ID NO: 37638
  Cyclic GFR-binding peptide

SEQ ID NO: 92130 - protein, 28 aa, Artificial Sequence
  Cyclic GFR-binding peptide
TMNQYNKLVVNKNEDLYLISIASMKEPV

SEQ ID NO: 92131 - protein, 35 aa, Artificial Sequence; identical to SEQ ID NO: 37639
  Cyclic GFR-binding peptide
  MOD_RES (31), (32): Xaa is C or S

SEQ ID NO: 92132 - protein, 33 aa, Artificial Sequence
  Cyclic GFR-binding peptide
  MOD_RES (27), (28): Xaa is C or S
DQYNKLVVNNAADLYLISIASLRAPVXXSAPAA

SEQ ID NO: 92133 - protein, 23 aa, Artificial Sequence
  Cyclic GFR-binding peptide
DQYNKLVVNNAADLYLISIASLR

SEQ ID NO: 92134 - protein, 34 aa, Artificial Sequence; identical to SEQ ID NO: 37646
  Cyclic GFR-binding peptide
  MOD_RES (31), (32): Xaa is C or S

SEQ ID NO: 92135 - protein, 30 aa, Artificial Sequence
  Cyclic GFR-binding peptide
  MOD_RES (28), (29): Xaa is C or S
IMQYNKLLLVRGNDLYLMSIASTKVPAXXT

SEQ ID NO: 92136 - protein, 41 aa, Artificial Sequence; identical to SEQ ID NO: 37647
  Cyclic GFR-binding peptide
  MOD_RES (2), (4), (36), (37): Xaa is C or S

SEQ ID NO: 92137 - protein, 33 aa, Artificial Sequence; identical to SEQ ID NO: 37648
  Cyclic GFR-binding peptide
  MOD_RES (1), (33): Xaa is C or S

SEQ ID NO: 92138 - protein, 35 aa, Artificial Sequence; identical to SEQ ID NO: 37649
  Cyclic GFR-binding peptide
  MOD_RES (1), (3), (35): Xaa is C or S

SEQ ID NO: 92139 - protein, 31 aa, Artificial Sequence
  Cyclic GFR-binding peptide
  MOD_RES (26), (27): Xaa is C or S
QYNKLYTVVGKDLYLISIASLKTPVXXAKSA

SEQ ID NO: 92140 - protein, 25 aa, Artificial Sequence
  Cyclic GFR-binding peptide
EVTMNQYNKLVVNKNEDLYLISIAS

SEQ ID NO: 92141 - protein, 30 aa, Artificial Sequence
  Cyclic GFR-binding peptide
  MOD_RES (2), (2): Xaa is C or S
GXRDVVMGQYNKLIIQQKDNLYLMSIASMK

SEQ ID NO: 92142 - protein, 22 aa, Artificial Sequence
  Cyclic GFR-binding peptide
QYNKLLLVRGNDLYLMSIASTK

SEQ ID NO: 92143 - protein, 34 aa, Artificial Sequence; identical to SEQ ID NO: 37652
  Cyclic GFR-binding peptide
  MOD_RES (1), (33), (34): Xaa is C or S

SEQ ID NO: 92144 - protein, 25 aa, Artificial Sequence
  Cyclic GFR-binding peptide
VMDQYNKLVVNNAADLYLISIASLR

SEQ ID NO: 92145 - protein, 26 aa, Artificial Sequence
  Cyclic GFR-binding peptide
SEVTMNQYNKLVVNKNEDLYLISIAS

SEQ ID NO: 92146 - protein, 28 aa, Artificial Sequence
  Cyclic GFR-binding peptide
VAMGQYNKLYTVVGKDLYLISIASLKTP

SEQ ID NO: 92147 - protein, 37 aa, Artificial Sequence; identical to SEQ ID NO: 37657
  Cyclic GFR-binding peptide
  MOD_RES (31), (32): Xaa is C or S

SEQ ID NO: 92148 - protein, 27 aa, Artificial Sequence
  Cyclic GFR-binding peptide
SVAMGQYNKLYTVVGKDLYLISIASLK

SEQ ID NO: 92149 - protein, 33 aa, Artificial Sequence; identical to SEQ ID NO: 37659
  Cyclic GFR-binding peptide
  MOD_RES (31), (32): Xaa is C or S

SEQ ID NO: 92150 - protein, 28 aa, Artificial Sequence
  Cyclic GFR-binding peptide
  MOD_RES (28), (28): Xaa is C or S
MNQYNKLVVNKNEDLYLISIASMKEPVX

SEQ ID NO: 92151 - protein, 32 aa, Artificial Sequence
  Cyclic GFR-binding peptide
  MOD_RES (30), (31): Xaa is C or S
VAMGQYNKLYTVVGKDLYLISIASLKTPVXXA

SEQ ID NO: 92152 - protein, 24 aa, Artificial Sequence
  Cyclic GFR-binding peptide
NQYNKLVVNKNEDLYLISIASMKE

SEQ ID NO: 92153 - protein, 31 aa, Artificial Sequence
  Cyclic GFR-binding peptide
  MOD_RES (1), (1): Xaa is C or S
XRDVVMGQYNKLIIQQKDNLYLMSIASMKTP

SEQ ID NO: 92154 - protein, 32 aa, Artificial Sequence
  Cyclic GFR-binding peptide
  MOD_RES (26), (27): Xaa is C or S
QYNKLLLVRGNDLYLMSIASTKVPAXXTSPVR

SEQ ID NO: 92155 - protein, 27 aa, Artificial Sequence
  Cyclic GFR-binding peptide
  MOD_RES (27), (27): Xaa is C or S
GQYNKLYTVVGKDLYLISIASLKTPVX

SEQ ID NO: 92156 - protein, 23 aa, Artificial Sequence
  Cyclic GFR-binding peptide
MNQYNKLVVNKNEDLYLISIASM

SEQ ID NO: 92157 - protein, 25 aa, Artificial Sequence
  Cyclic GFR-binding peptide
VVMGQYNKLIIQQKDNLYLMSIASM

SEQ ID NO: 92158 - protein, 33 aa, Artificial Sequence; identical to SEQ ID NO: 37667
  Cyclic GFR-binding peptide
  MOD_RES (2), (2): Xaa is C or S

SEQ ID NO: 92159 - protein, 28 aa, Artificial Sequence
  Cyclic GFR-binding peptide
  MOD_RES (1), (1): Xaa is C or S
XESVAMGQYNKLYTVVGKDLYLISIASL

SEQ ID NO: 92160 - protein, 34 aa, Artificial Sequence
  Cyclic GFR-binding peptide
  MOD_RES (28), (29): Xaa is C or S
MNQYNKLIVNSSDDLYLVSIASLKTPAXXPKPVH

SEQ ID NO: 92161 - protein, 32 aa, Artificial Sequence
  Cyclic GFR-binding peptide
  MOD_RES (29), (30): Xaa is C or S
VIMQYNKLLLVRGNDLYLMSIASTKVPAXXTS

SEQ ID NO: 92162 - protein, 32 aa, Artificial Sequence
  Cyclic GFR-binding peptide
  MOD_RES (29), (30): Xaa is C or S
TMNQYNKLVVNKNEDLYLISIASMKEPVXXPE

SEQ ID NO: 92163 - protein, 31 aa, Artificial Sequence
  Cyclic GFR-binding peptide
  MOD_RES (2), (4): Xaa is C or S
RXGXESVAMGQYNKLYTVVGKDLYLISIASL

SEQ ID NO: 92164 - protein, 21 aa, Artificial Sequence
  Cyclic GFR-binding peptide
QYNKLIIQQKDNLYLMSIASM

SEQ ID NO: 92165 - protein, 27 aa, Artificial Sequence
  Cyclic GFR-binding peptide
VIMQYNKLLLVRGNDLYLMSIASTKVP

SEQ ID NO: 92166 - protein, 34 aa, Artificial Sequence
  Cyclic GFR-binding peptide
  MOD_RES (30), (31): Xaa is C or S
VTMNQYNKLVVNKNEDLYLISIASMKEPVXXPEP

SEQ ID NO: 92167 - protein, 37 aa, Artificial Sequence; identical to SEQ ID NO: 37676
  Cyclic GFR-binding peptide
  MOD_RES (1), (3), (34), (35): Xaa is C or S

SEQ ID NO: 92168 - protein, 31 aa, Artificial Sequence; identical to SEQ ID NO: 37677
  Cyclic GFR-binding peptide
  MOD_RES (31), (31): Xaa is C or S

SEQ ID NO: 92169 - protein, 35 aa, Artificial Sequence; identical to SEQ ID NO: 37678
  Cyclic GFR-binding peptide
  MOD_RES (1), (32), (33): Xaa is C or S

SEQ ID NO: 92170 - protein, 26 aa, Artificial Sequence
  Cyclic GFR-binding peptide
VAMGQYNKLYTVVGKDLYLISIASLK

SEQ ID NO: 92171 - protein, 36 aa, Artificial Sequence
  Cyclic GFR-binding peptide
  MOD_RES (30), (31): Xaa is C or S
VAMGQYNKLYTVVGKDLYLISIASLKTPVXXAKSAK

SEQ ID NO: 92172 - protein, 35 aa, Artificial Sequence; identical to SEQ ID NO: 37682
  Cyclic GFR-binding peptide
  MOD_RES (2), (33), (34): Xaa is C or S

SEQ ID NO: 92173 - protein, 24 aa, Artificial Sequence
  Cyclic GFR-binding peptide
VMGQYNKLIIQQKDNLYLMSIASM

SEQ ID NO: 92174 - protein, 35 aa, Artificial Sequence
  Cyclic GFR-binding peptide
  MOD_RES (30), (31): Xaa is C or S
VVMDQYNKLVVNNAADLYLISIASLRAPVXXSAPA

SEQ ID NO: 92175 - protein, 39 aa, Artificial Sequence; identical to SEQ ID NO: 37684
  Cyclic GFR-binding peptide
  MOD_RES (1), (3), (34), (35): Xaa is C or S

SEQ ID NO: 92176 - protein, 27 aa, Artificial Sequence
  Cyclic GFR-binding peptide
MNQYNKLVVNKNEDLYLISIASMKEPV

SEQ ID NO: 92177 - protein, 32 aa, Artificial Sequence
  Cyclic GFR-binding peptide
  MOD_RES (27), (28): Xaa is C or S
NQYNKLVVNKNEDLYLISIASMKEPVXXPEPI

SEQ ID NO: 92178 - protein, 34 aa, Artificial Sequence
  Cyclic GFR-binding peptide
  MOD_RES (28), (29): Xaa is C or S
MGQYNKLYTVVGKDLYLISIASLKTPVXXAKSAK

SEQ ID NO: 92179 - protein, 39 aa, Artificial Sequence; identical to SEQ ID NO: 37691
  Cyclic GFR-binding peptide
  MOD_RES (1), (33), (34): Xaa is C or S

SEQ ID NO: 92180 - protein, 33 aa, Artificial Sequence; identical to SEQ ID NO: 37692
  Cyclic GFR-binding peptide
  MOD_RES (1), (33): Xaa is C or S

SEQ ID NO: 92181 - protein, 28 aa, Artificial Sequence
  Cyclic GFR-binding peptide
VVMGQYNKLIIQQKDNLYLMSIASMKTP

SEQ ID NO: 92182 - protein, 29 aa, Artificial Sequence
  Cyclic GFR-binding peptide
  MOD_RES (1), (1): Xaa is C or S
XSEVTMNQYNKLVVNKNEDLYLISIASMK

SEQ ID NO: 92183 - protein, 29 aa, Artificial Sequence
  Cyclic GFR-binding peptide
  MOD_RES (2), (4): Xaa is C or S
LXGXEEVIMQYNKLLLVRGNDLYLMSIAS

SEQ ID NO: 92184 - protein, 31 aa, Artificial Sequence
  Cyclic GFR-binding peptide
  MOD_RES (27), (28): Xaa is C or S
DQYNKLVVNNAADLYLISIASLRAPVXXSAP

SEQ ID NO: 92185 - protein, 28 aa, Artificial Sequence
  Cyclic GFR-binding peptide
  MOD_RES (2), (2): Xaa is C or S
GXRDVVMGQYNKLIIQQKDNLYLMSIAS

SEQ ID NO: 92186 - protein, 27 aa, Artificial Sequence
  Cyclic GFR-binding peptide
EVTMNQYNKLVVNKNEDLYLISIASMK

SEQ ID NO: 92187 - protein, 25 aa, Artificial Sequence
  Cyclic GFR-binding peptide
EVIMQYNKLLLVRGNDLYLMSIAST

SEQ ID NO: 92188 - protein, 34 aa, Artificial Sequence; identical to SEQ ID NO: 37699
  Cyclic GFR-binding peptide
  MOD_RES (1), (3): Xaa is C or S

SEQ ID NO: 92189 - protein, 28 aa, Artificial Sequence
  Cyclic GFR-binding peptide
  MOD_RES (27), (28): Xaa is C or S
GQYNKLYTVVGKDLYLISIASLKTPVXX

SEQ ID NO: 92190 - protein, 35 aa, Artificial Sequence; identical to SEQ ID NO: 37701
  Cyclic GFR-binding peptide
  MOD_RES (2), (34), (35): Xaa is C or S

SEQ ID NO: 92191 - protein, 32 aa, Artificial Sequence
  Cyclic GFR-binding peptide
  MOD_RES (28), (29): Xaa is C or S
MGQYNKLYTVVGKDLYLISIASLKTPVXXAKS

SEQ ID NO: 92192 - protein, 38 aa, Artificial Sequence; identical to SEQ ID NO: 37704
  Cyclic GFR-binding peptide
  MOD_RES (32), (33): Xaa is C or S

SEQ ID NO: 92193 - protein, 35 aa, Artificial Sequence; identical to SEQ ID NO: 37705
  Cyclic GFR-binding peptide
  MOD_RES (2), (34), (35): Xaa is C or S

SEQ ID NO: 92194 - protein, 35 aa, Artificial Sequence; identical to SEQ ID NO: 37706
  Cyclic GFR-binding peptide
  MOD_RES (2), (4): Xaa is C or S

SEQ ID NO: 92195 - protein, 24 aa, Artificial Sequence
  Cyclic GFR-binding peptide
VMDQYNKLVVNNAADLYLISIASL

SEQ ID NO: 92196 - protein, 25 aa, Artificial Sequence
  Cyclic GFR-binding peptide
NQYNKLVVNKNEDLYLISIASMKEP

SEQ ID NO: 92197 - protein, 31 aa, Artificial Sequence
  Cyclic GFR-binding peptide
  MOD_RES (1), (1): Xaa is C or S
XAEVVMDQYNKLVVNNAADLYLISIASLRAP

SEQ ID NO: 92198 - protein, 29 aa, Artificial Sequence
  Cyclic GFR-binding peptide
EVTMNQYNKLVVNKNEDLYLISIASMKEP

SEQ ID NO: 92199 - protein, 35 aa, Artificial Sequence
  Cyclic GFR-binding peptide
  MOD_RES (30), (31): Xaa is C or S
VVMGQYNKLIIQQKDNLYLMSIASMKTPTXXPGAS

SEQ ID NO: 92200 - protein, 36 aa, Artificial Sequence
  Cyclic GFR-binding peptide
  MOD_RES (30), (31): Xaa is C or S
VVMDQYNKLVVNNAADLYLISIASLRAPVXXSAPAA

SEQ ID NO: 92201 - protein, 23 aa, Artificial Sequence
  Cyclic GFR-binding peptide
IMQYNKLLLVRGNDLYLMSIAST

SEQ ID NO: 92202 - protein, 25 aa, Artificial Sequence
  Cyclic GFR-binding peptide
VMGQYNKLIIQQKDNLYLMSIASMK

SEQ ID NO: 92203 - protein, 34 aa, Artificial Sequence
  Cyclic GFR-binding peptide
  MOD_RES (29), (30): Xaa is C or S
TMNQYNKLVVNKNEDLYLISIASMKEPVXXPEPI

SEQ ID NO: 92204 - protein, 32 aa, Artificial Sequence
  Cyclic GFR-binding peptide
  MOD_RES (27), (28): Xaa is C or S
DQYNKLVVNNAADLYLISIASLRAPVXXSAPA

SEQ ID NO: 92205 - protein, 33 aa, Artificial Sequence; identical to SEQ ID NO: 37245
  Cyclic GFR-binding peptide
  MOD_RES (32), (33): Xaa is C or S

SEQ ID NO: 92206 - protein, 28 aa, Artificial Sequence
  Cyclic GFR-binding peptide
  MOD_RES (1), (3): Xaa is C or S
XGXEEVIMQYNKLLLVRGNDLYLMSIAS

SEQ ID NO: 92207 - protein, 33 aa, Artificial Sequence
  Cyclic GFR-binding peptide
  MOD_RES (30), (31): Xaa is C or S
VVMGQYNKLIIQQKDNLYLMSIASMKTPTXXPG

SEQ ID NO: 92208 - protein, 32 aa, Artificial Sequence
  Cyclic GFR-binding peptide
  MOD_RES (26), (27): Xaa is C or S
QYNKLIVNSSDDLYLVSIASLKTPAXXPKPVH

SEQ ID NO: 92209 - protein, 33 aa, Artificial Sequence
  Cyclic GFR-binding peptide
  MOD_RES (27), (28): Xaa is C or S
NQYNKLVVNKNEDLYLISIASMKEPVXXPEPIG

SEQ ID NO: 92210 - protein, 38 aa, Artificial Sequence; identical to SEQ ID NO: 37255
  Cyclic GFR-binding peptide
  MOD_RES (1), (33), (34): Xaa is C or S

SEQ ID NO: 92211 - protein, 29 aa, Artificial Sequence
  Cyclic GFR-binding peptide
SVAMGQYNKLYTVVGKDLYLISIASLKTP

SEQ ID NO: 92212 - protein, 33 aa, Artificial Sequence
  Cyclic GFR-binding peptide
  MOD_RES (30), (31): Xaa is C or S
EVIMQYNKLLLVRGNDLYLMSIASTKVPAXXTS

SEQ ID NO: 92213 - protein, 28 aa, Artificial Sequence
  Cyclic GFR-binding peptide
EVTMNQYNKLVVNKNEDLYLISIASMKE

SEQ ID NO: 92214 - protein, 34 aa, Artificial Sequence; identical to SEQ ID NO: 37257
  Cyclic GFR-binding peptide
  MOD_RES (1), (33), (34): Xaa is C or S

SEQ ID NO: 92215 - protein, 39 aa, Artificial Sequence; identical to SEQ ID NO: 37261
  Cyclic GFR-binding peptide
  MOD_RES (2), (34), (35): Xaa is C or S

SEQ ID NO: 92216 - protein, 23 aa, Artificial Sequence
  Cyclic GFR-binding peptide
QYNKLYTVVGKDLYLISIASLKT

SEQ ID NO: 92217 - protein, 27 aa, Artificial Sequence
  Cyclic GFR-binding peptide
MGQYNKLIIQQKDNLYLMSIASMKTPT

SEQ ID NO: 92218 - protein, 35 aa, Artificial Sequence; identical to SEQ ID NO: 37265
  Cyclic GFR-binding peptide
  MOD_RES (32), (33): Xaa is C or S

SEQ ID NO: 92219 - protein, 32 aa, Artificial Sequence
  Cyclic GFR-binding peptide
  MOD_RES (2), (2): Xaa is C or S
GXAEVVMDQYNKLVVNNAADLYLISIASLRAP

SEQ ID NO: 92220 - protein, 24 aa, Artificial Sequence
  Cyclic GFR-binding peptide
VAMGQYNKLYTVVGKDLYLISIAS

SEQ ID NO: 92221 - protein, 39 aa, Artificial Sequence; identical to SEQ ID NO: 37269
  Cyclic GFR-binding peptide
  MOD_RES (2), (34), (35): Xaa is C or S

SEQ ID NO: 92222 - protein, 28 aa, Artificial Sequence
  Cyclic GFR-binding peptide
SVAMGQYNKLYTVVGKDLYLISIASLKT

SEQ ID NO: 92223 - protein, 32 aa, Artificial Sequence
  Cyclic GFR-binding peptide
  MOD_RES (30), (31): Xaa is C or S
VTMNQYNKLVVNKNEDLYLISIASMKEPVXXP

SEQ ID NO: 92224 - protein, 28 aa, Artificial Sequence
  Cyclic GFR-binding peptide
  MOD_RES (2), (2): Xaa is C or S
GXESVAMGQYNKLYTVVGKDLYLISIAS

SEQ ID NO: 92225 - protein, 29 aa, Artificial Sequence
  Cyclic GFR-binding peptide
  MOD_RES (1), (3): Xaa is C or S
XAXSEVTMNQYNKLVVNKNEDLYLISIAS

SEQ ID NO: 92226 - protein, 40 aa, Artificial Sequence; identical to SEQ ID NO: 37273
  Cyclic GFR-binding peptide
  MOD_RES (2), (34), (35): Xaa is C or S

SEQ ID NO: 92227 - protein, 35 aa, Artificial Sequence; identical to SEQ ID NO: 37275
  Cyclic GFR-binding peptide
  MOD_RES (1), (3), (35): Xaa is C or S

SEQ ID NO: 92228 - protein, 27 aa, Artificial Sequence
  Cyclic GFR-binding peptide
AMGQYNKLYTVVGKDLYLISIASLKTP

SEQ ID NO: 92229 - protein, 34 aa, Artificial Sequence; identical to SEQ ID NO: 37277
  Cyclic GFR-binding peptide
  MOD_RES (32), (33): Xaa is C or S

SEQ ID NO: 92230 - protein, 31 aa, Artificial Sequence
  Cyclic GFR-binding peptide
  MOD_RES (1), (3): Xaa is C or S
XGXRDVVMGQYNKLIIQQKDNLYLMSIASMK

SEQ ID NO: 92231 - protein, 25 aa, Artificial Sequence
  Cyclic GFR-binding peptide
AMGQYNKLYTVVGKDLYLISIASLK

SEQ ID NO: 92232 - protein, 34 aa, Artificial Sequence
  Cyclic GFR-binding peptide
  MOD_RES (29), (30): Xaa is C or S
VMDQYNKLVVNNAADLYLISIASLRAPVXXSAPA

SEQ ID NO: 92233 - protein, 27 aa, Artificial Sequence
  Cyclic GFR-binding peptide
AEVVMDQYNKLVVNNAADLYLISIASL

SEQ ID NO: 92234 - protein, 26 aa, Artificial Sequence
  Cyclic GFR-binding peptide
ESVAMGQYNKLYTVVGKDLYLISIAS

SEQ ID NO: 92235 - protein, 33 aa, Artificial Sequence
  Cyclic GFR-binding peptide
  MOD_RES (1), (3): Xaa is C or S
XGXESVAMGQYNKLYTVVGKDLYLISIASLKTP

SEQ ID NO: 92236 - protein, 29 aa, Artificial Sequence
  Cyclic GFR-binding peptide
  MOD_RES (2), (2): Xaa is C or S
GXAEVVMDQYNKLVVNNAADLYLISIASL

SEQ ID NO: 92237 - protein, 33 aa, Artificial Sequence
  Cyclic GFR-binding peptide
  MOD_RES (27), (28): Xaa is C or S
GQYNKLIIQQKDNLYLMSIASMKTPTXXPGASG

SEQ ID NO: 92238 - protein, 30 aa, Artificial Sequence
  Cyclic GFR-binding peptide
  MOD_RES (30), (30): Xaa is C or S
VVMGQYNKLIIQQKDNLYLMSIASMKTPTX

SEQ ID NO: 92239 - protein, 33 aa, Artificial Sequence
  Cyclic GFR-binding peptide
  MOD_RES (2), (4): Xaa is C or S
SXGXRDVVMGQYNKLIIQQKDNLYLMSIASMKT

SEQ ID NO: 92240 - protein, 29 aa, Artificial Sequence
  Cyclic GFR-binding peptide
  MOD_RES (1), (1): Xaa is C or S
XRDVVMGQYNKLIIQQKDNLYLMSIASMK

SEQ ID NO: 92241 - protein, 38 aa, Artificial Sequence; identical to SEQ ID NO: 37282
  Cyclic GFR-binding peptide
  MOD_RES (1), (32), (33): Xaa is C or S

SEQ ID NO: 92242 - protein, 30 aa, Artificial Sequence
  Cyclic GFR-binding peptide
  MOD_RES (1), (3): Xaa is C or S
XAXSEVTMNQYNKLVVNKNEDLYLISIASM

SEQ ID NO: 92243 - protein, 31 aa, Artificial Sequence
  Cyclic GFR-binding peptide
  MOD_RES (1), (3): Xaa is C or S
XGXAEVVMDQYNKLVVNNAADLYLISIASLR

SEQ ID NO: 92244 - protein, 36 aa, Artificial Sequence; identical to SEQ ID NO: 37283
  Cyclic GFR-binding peptide
  MOD_RES (1), (3), (35), (36): Xaa is C or S

SEQ ID NO: 92245 - protein, 30 aa, Artificial Sequence
  Cyclic GFR-binding peptide
  MOD_RES (26), (27): Xaa is C or S
QYNKLVVNNAADLYLISIASLRAPVXXSAP

SEQ ID NO: 92246 - protein, 38 aa, Artificial Sequence; identical to SEQ ID NO: 37288
  Cyclic GFR-binding peptide
  MOD_RES (2), (34), (35): Xaa is C or S

SEQ ID NO: 92247 - protein, 34 aa, Artificial Sequence; identical to SEQ ID NO: 37289
  Cyclic GFR-binding peptide
  MOD_RES (2), (34): Xaa is C or S

SEQ ID NO: 92248 - protein, 29 aa, Artificial Sequence
  Cyclic GFR-binding peptide
  MOD_RES (2), (2): Xaa is C or S
AXSEVTMNQYNKLVVNKNEDLYLISIASM

SEQ ID NO: 92249 - protein, 24 aa, Artificial Sequence
  Cyclic GFR-binding peptide
MGQYNKLYTVVGKDLYLISIASLK

SEQ ID NO: 92250 - protein, 23 aa, Artificial Sequence
  Cyclic GFR-binding peptide
QYNKLVVNNAADLYLISIASLRA

SEQ ID NO: 92251 - protein, 26 aa, Artificial Sequence
  Cyclic GFR-binding peptide
DVVMGQYNKLIIQQKDNLYLMSIASM

SEQ ID NO: 92252 - protein, 28 aa, Artificial Sequence
  Cyclic GFR-binding peptide
RDVVMGQYNKLIIQQKDNLYLMSIASMK

SEQ ID NO: 92253 - protein, 22 aa, Artificial Sequence
  Cyclic GFR-binding peptide
QYNKLIIQQKDNLYLMSIASMK

SEQ ID NO: 92254 - protein, 32 aa, Artificial Sequence; identical to SEQ ID NO: 37296
  Cyclic GFR-binding peptide
  MOD_RES (1), (1): Xaa is C or S

SEQ ID NO: 92255 - protein, 39 aa, Artificial Sequence; identical to SEQ ID NO: 37300
  Cyclic GFR-binding peptide
  MOD_RES (1), (33), (34): Xaa is C or S

SEQ ID NO: 92256 - protein, 30 aa, Artificial Sequence
  Cyclic GFR-binding peptide
  MOD_RES (2), (4): Xaa is C or S
RXGXESVAMGQYNKLYTVVGKDLYLISIAS

SEQ ID NO: 92257 - protein, 35 aa, Artificial Sequence; identical to SEQ ID NO: 37302
  Cyclic GFR-binding peptide
  MOD_RES (2), (4): Xaa is C or S

SEQ ID NO: 92258 - protein, 28 aa, Artificial Sequence
  Cyclic GFR-binding peptide
  MOD_RES (27), (28): Xaa is C or S
MQYNKLLLVRGNDLYLMSIASTKVPAXX

SEQ ID NO: 92259 - protein, 29 aa, Artificial Sequence
  Cyclic GFR-binding peptide
  MOD_RES (29), (29): Xaa is C or S
TMNQYNKLVVNKNEDLYLISIASMKEPVX

SEQ ID NO: 92260 - protein, 31 aa, Artificial Sequence
  Cyclic GFR-binding peptide
  MOD_RES (2), (2): Xaa is C or S
GXEEVIMQYNKLLLVRGNDLYLMSIASTKVP

SEQ ID NO: 92261 - protein, 37 aa, Artificial Sequence; identical to SEQ ID NO: 37309
  Cyclic GFR-binding peptide
  MOD_RES (2), (4), (35), (36): Xaa is C or S

SEQ ID NO: 92262 - protein, 33 aa, Artificial Sequence
  Cyclic GFR-binding peptide
  MOD_RES (1), (3): Xaa is C or S
XAXSEVTMNQYNKLVVNKNEDLYLISIASMKEP

SEQ ID NO: 92263 - protein, 31 aa, Artificial Sequence
  Cyclic GFR-binding peptide
  MOD_RES (27), (28): Xaa is C or S
GQYNKLYTVVGKDLYLISIASLKTPVXXAKS

SEQ ID NO: 92264 - protein, 36 aa, Artificial Sequence; identical to SEQ ID NO: 37313
  Cyclic GFR-binding peptide
  MOD_RES (1), (32), (33): Xaa is C or S

SEQ ID NO: 92265 - protein, 41 aa, Artificial Sequence; identical to SEQ ID NO: 37316
  Cyclic GFR-binding peptide
  MOD_RES (2), (4), (35), (36): Xaa is C or S

SEQ ID NO: 92266 - protein, 36 aa, Artificial Sequence; identical to SEQ ID NO: 37317
  Cyclic GFR-binding peptide
  MOD_RES (31), (32): Xaa is C or S

SEQ ID NO: 92267 - protein, 33 aa, Artificial Sequence
  Cyclic GFR-binding peptide
  MOD_RES (28), (29): Xaa is C or S
MGQYNKLYTVVGKDLYLISIASLKTPVXXAKSA

SEQ ID NO: 92268 - protein, 34 aa, Artificial Sequence; identical to SEQ ID NO: 37320
  Cyclic GFR-binding peptide
  MOD_RES (1), (3): Xaa is C or S

SEQ ID NO: 92269 - protein, 30 aa, Artificial Sequence
  Cyclic GFR-binding peptide
  MOD_RES (29), (30): Xaa is C or S
AMGQYNKLYTVVGKDLYLISIASLKTPVXX

SEQ ID NO: 92270 - protein, 41 aa, Artificial Sequence; identical to SEQ ID NO: 37322
  Cyclic GFR-binding peptide
  MOD_RES (2), (4), (36), (37): Xaa is C or S

SEQ ID NO: 92271 - protein, 29 aa, Artificial Sequence
  Cyclic GFR-binding peptide
  MOD_RES (2), (2): Xaa is C or S
GXESVAMGQYNKLYTVVGKDLYLISIASL

SEQ ID NO: 92272 - protein, 29 aa, Artificial Sequence
  Cyclic GFR-binding peptide
AEVVMDQYNKLVVNNAADLYLISIASLRA

SEQ ID NO: 92273 - protein, 28 aa, Artificial Sequence
  Cyclic GFR-binding peptide
  MOD_RES (27), (28): Xaa is C or S
DQYNKLVVNNAADLYLISIASLRAPVXX

SEQ ID NO: 92274 - protein, 25 aa, Artificial Sequence
  Cyclic GFR-binding peptide
VAMGQYNKLYTVVGKDLYLISIASL

SEQ ID NO: 92275 - protein, 34 aa, Artificial Sequence
  Cyclic GFR-binding peptide
  MOD_RES (29), (30): Xaa is C or S
VIMQYNKLLLVRGNDLYLMSIASTKVPAXXTSPV

SEQ ID NO: 92276 - protein, 35 aa, Artificial Sequence; identical to SEQ ID NO: 37327
  Cyclic GFR-binding peptide
  MOD_RES (1), (33), (34): Xaa is C or S

SEQ ID NO: 92277 - protein, 32 aa, Artificial Sequence; identical to SEQ ID NO: 37328
  Cyclic GFR-binding peptide
  MOD_RES (31), (32): Xaa is C or S

SEQ ID NO: 92278 - protein, 32 aa, Artificial Sequence
  Cyclic GFR-binding peptide
  MOD_RES (2), (4): Xaa is C or S
RXGXESVAMGQYNKLYTVVGKDLYLISIASLK

SEQ ID NO: 92279 - protein, 33 aa, Artificial Sequence; identical to SEQ ID NO: 37331
  Cyclic GFR-binding peptide
  MOD_RES (31), (32): Xaa is C or S

SEQ ID NO: 92280 - protein, 24 aa, Artificial Sequence
  Cyclic GFR-binding peptide
DQYNKLVVNNAADLYLISIASLRA

SEQ ID NO: 92281 - protein, 36 aa, Artificial Sequence; identical to SEQ ID NO: 37336
  Cyclic GFR-binding peptide
  MOD_RES (1), (3), (35), (36): Xaa is C or S

SEQ ID NO: 92282 - protein, 40 aa, Artificial Sequence; identical to SEQ ID NO: 37340
  Cyclic GFR-binding peptide
  MOD_RES (2), (4), (36), (37): Xaa is C or S

SEQ ID NO: 92283 - protein, 28 aa, Artificial Sequence
  Cyclic GFR-binding peptide
  MOD_RES (2), (2): Xaa is C or S
GXAEVVMDQYNKLVVNNAADLYLISIAS

SEQ ID NO: 92284 - protein, 31 aa, Artificial Sequence
  Cyclic GFR-binding peptide
  MOD_RES (29), (30): Xaa is C or S
VMGQYNKLIIQQKDNLYLMSIASMKTPTXXP

SEQ ID NO: 92285 - protein, 36 aa, Artificial Sequence; identical to SEQ ID NO: 37344
  Cyclic GFR-binding peptide
  MOD_RES (1), (33), (34): Xaa is C or S

SEQ ID NO: 92286 - protein, 29 aa, Artificial Sequence
  Cyclic GFR-binding peptide
  MOD_RES (26), (27): Xaa is C or S
QYNKLVVNKNEDLYLISIASMKEPVXXPE

SEQ ID NO: 92287 - protein, 30 aa, Artificial Sequence
  Cyclic GFR-binding peptide
  MOD_RES (29), (30): Xaa is C or S
VMDQYNKLVVNNAADLYLISIASLRAPVXX

SEQ ID NO: 92288 - protein, 32 aa, Artificial Sequence; identical to SEQ ID NO: 37347
  Cyclic GFR-binding peptide
  MOD_RES (1), (1): Xaa is C or S

SEQ ID NO: 92289 - protein, 35 aa, Artificial Sequence
  Cyclic GFR-binding peptide
  MOD_RES (30), (31): Xaa is C or S
EVIMQYNKLLLVRGNDLYLMSIASTKVPAXXTSPV

SEQ ID NO: 92290 - protein, 25 aa, Artificial Sequence
  Cyclic GFR-binding peptide
DQYNKLVVNNAADLYLISIASLRAP

SEQ ID NO: 92291 - protein, 39 aa, Artificial Sequence; identical to SEQ ID NO: 37351
  Cyclic GFR-binding peptide
  MOD_RES (2), (4), (36), (37): Xaa is C or S

SEQ ID NO: 92292 - protein, 36 aa, Artificial Sequence; identical to SEQ ID NO: 37355
  Cyclic GFR-binding peptide
  MOD_RES (1), (33), (34): Xaa is C or S

SEQ ID NO: 92293 - protein, 23 aa, Artificial Sequence
  Cyclic GFR-binding peptide
GQYNKLIIQQKDNLYLMSIASMK

SEQ ID NO: 92294 - protein, 26 aa, Artificial Sequence
  Cyclic GFR-binding peptide
TMNQYNKLVVNKNEDLYLISIASMKE

SEQ ID NO: 92295 - protein, 27 aa, Artificial Sequence
  Cyclic GFR-binding peptide
DVVMGQYNKLIIQQKDNLYLMSIASMK

SEQ ID NO: 92296 - protein, 35 aa, Artificial Sequence; identical to SEQ ID NO: 37357
  Cyclic GFR-binding peptide
  MOD_RES (1), (3), (35): Xaa is C or S

SEQ ID NO: 92297 - protein, 31 aa, Artificial Sequence
  Cyclic GFR-binding peptide
  MOD_RES (29), (30): Xaa is C or S
VMDQYNKLVVNNAADLYLISIASLRAPVXXS

SEQ ID NO: 92298 - protein, 27 aa, Artificial Sequence
  Cyclic GFR-binding peptide
  MOD_RES (1), (1): Xaa is C or S
XAEVVMDQYNKLVVNNAADLYLISIAS

SEQ ID NO: 92299 - protein, 27 aa, Artificial Sequence
  Cyclic GFR-binding peptide
  MOD_RES (1), (1): Xaa is C or S
XRDVVMGQYNKLIIQQKDNLYLMSIAS

SEQ ID NO: 92300 - protein, 37 aa, Artificial Sequence; identical to SEQ ID NO: 37360
  Cyclic GFR-binding peptide
  MOD_RES (1), (32), (33): Xaa is C or S

SEQ ID NO: 92301 - protein, 29 aa, Artificial Sequence
  Cyclic GFR-binding peptide
ESVAMGQYNKLYTVVGKDLYLISIASLKT

SEQ ID NO: 92302 - protein, 24 aa, Artificial Sequence
  Cyclic GFR-binding peptide
MGQYNKLIIQQKDNLYLMSIASMK

SEQ ID NO: 92303 - protein, 25 aa, Artificial Sequence
  Cyclic GFR-binding peptide
VTMNQYNKLVVNKNEDLYLISIASM

SEQ ID NO: 92304 - protein, 27 aa, Artificial Sequence
  Cyclic GFR-binding peptide
  MOD_RES (26), (27): Xaa is C or S
QYNKLIIQQKDNLYLMSIASMKTPTXX

SEQ ID NO: 92305 - protein, 36 aa, Artificial Sequence; identical to SEQ ID NO: 37368
  Cyclic GFR-binding peptide
  MOD_RES (2), (34), (35): Xaa is C or S

SEQ ID NO: 92306 - protein, 29 aa, Artificial Sequence
  Cyclic GFR-binding peptide
  MOD_RES (2), (2): Xaa is C or S
GXEEVIMQYNKLLLVRGNDLYLMSIASTK

SEQ ID NO: 92307 - protein, 30 aa, Artificial Sequence
  Cyclic GFR-binding peptide
  MOD_RES (2), (2): Xaa is C or S
GXEEVIMQYNKLLLVRGNDLYLMSIASTKV

SEQ ID NO: 92308 - protein, 30 aa, Artificial Sequence
  Cyclic GFR-binding peptide
  MOD_RES (27), (28): Xaa is C or S
MQYNKLLLVRGNDLYLMSIASTKVPAXXTS

SEQ ID NO: 92309 - protein, 27 aa, Artificial Sequence
  Cyclic GFR-binding peptide
  MOD_RES (26), (27): Xaa is C or S
QYNKLVVNNAADLYLISIASLRAPVXX

SEQ ID NO: 92310 - protein, 40 aa, Artificial Sequence; identical to SEQ ID NO: 37374
  Cyclic GFR-binding peptide
  MOD_RES (1), (3), (35), (36): Xaa is C or S

SEQ ID NO: 92311 - protein, 25 aa, Artificial Sequence
  Cyclic GFR-binding peptide
SVAMGQYNKLYTVVGKDLYLISIAS

SEQ ID NO: 92312 - protein, 36 aa, Artificial Sequence; identical to SEQ ID NO: 37382
  Cyclic GFR-binding peptide
  MOD_RES (1), (3), (34), (35): Xaa is C or S

SEQ ID NO: 92313 - protein, 30 aa, Artificial Sequence
  Cyclic GFR-binding peptide
  MOD_RES (30), (30): Xaa is C or S
EVIMQYNKLLLVRGNDLYLMSIASTKVPAX

SEQ ID NO: 92314 - protein, 27 aa, Artificial Sequence
  Cyclic GFR-binding peptide
  MOD_RES (26), (27): Xaa is C or S
QYNKLYTVVGKDLYLISIASLKTPVXX

SEQ ID NO: 92315 - protein, 31 aa, Artificial Sequence
  Cyclic GFR-binding peptide
  MOD_RES (2), (4): Xaa is C or S
RXGXAEVVMDQYNKLVVNNAADLYLISIASL

SEQ ID NO: 92316 - protein, 25 aa, Artificial Sequence
  Cyclic GFR-binding peptide
IMQYNKLLLVRGNDLYLMSIASTKV

SEQ ID NO: 92317 - protein, 37 aa, Artificial Sequence; identical to SEQ ID NO: 37384
  Cyclic GFR-binding peptide
  MOD_RES (2), (4), (36), (37): Xaa is C or S

SEQ ID NO: 92318 - protein, 29 aa, Artificial Sequence
  Cyclic GFR-binding peptide
  MOD_RES (29), (29): Xaa is C or S
VMDQYNKLVVNNAADLYLISIASLRAPVX

SEQ ID NO: 92319 - protein, 23 aa, Artificial Sequence
  Cyclic GFR-binding peptide
MGQYNKLIIQQKDNLYLMSIASM

SEQ ID NO: 92320 - protein, 29 aa, Artificial Sequence
  Cyclic GFR-binding peptide
  MOD_RES (1), (1): Xaa is C or S
XESVAMGQYNKLYTVVGKDLYLISIASLK

SEQ ID NO: 92321 - protein, 38 aa, Artificial Sequence; identical to SEQ ID NO: 37391
  Cyclic GFR-binding peptide
  MOD_RES (2), (33), (34): Xaa is C or S

SEQ ID NO: 92322 - protein, 38 aa, Artificial Sequence; identical to SEQ ID NO: 37395
  Cyclic GFR-binding peptide
  MOD_RES (32), (33): Xaa is C or S

SEQ ID NO: 92323 - protein, 25 aa, Artificial Sequence
  Cyclic GFR-binding peptide
QYNKLVVNNAADLYLISIASLRAPV

SEQ ID NO: 92324 - protein, 38 aa, Artificial Sequence; identical to SEQ ID NO: 37398
  Cyclic GFR-binding peptide
  MOD_RES (2), (4), (36), (37): Xaa is C or S

SEQ ID NO: 92325 - protein, 34 aa, Artificial Sequence; identical to SEQ ID NO: 37400
  Cyclic GFR-binding peptide
  MOD_RES (2), (34): Xaa is C or S

SEQ ID NO: 92326 - protein, 24 aa, Artificial Sequence
  Cyclic GFR-binding peptide
GQYNKLYTVVGKDLYLISIASLKT

SEQ ID NO: 92327 - protein, 30 aa, Artificial Sequence
  Cyclic GFR-binding peptide
  MOD_RES (28), (29): Xaa is C or S
MNQYNKLVVNKNEDLYLISIASMKEPVXXP

SEQ ID NO: 92328 - protein, 23 aa, Artificial Sequence
  Cyclic GFR-binding peptide
VMGQYNKLIIQQKDNLYLMSIAS

SEQ ID NO: 92329 - protein, 32 aa, Artificial Sequence
  Cyclic GFR-binding peptide
  MOD_RES (1), (3): Xaa is C or S
XGXEEVIMQYNKLLLVRGNDLYLMSIASTKVP

SEQ ID NO: 92330 - protein, 24 aa, Artificial Sequence
  Cyclic GFR-binding peptide
QYNKLVVNKNEDLYLISIASMKEP

SEQ ID NO: 92331 - protein, 27 aa, Artificial Sequence
  Cyclic GFR-binding peptide
  MOD_RES (27), (27): Xaa is C or S
NQYNKLVVNKNEDLYLISIASMKEPVX

SEQ ID NO: 92332 - protein, 36 aa, Artificial Sequence; identical to SEQ ID NO: 37418
  Cyclic GFR-binding peptide
  MOD_RES (2), (33), (34): Xaa is C or S

SEQ ID NO: 92333 - protein, 29 aa, Artificial Sequence
  Cyclic GFR-binding peptide
DVVMGQYNKLIIQQKDNLYLMSIASMKTP

SEQ ID NO: 92334 - protein, 31 aa, Artificial Sequence
  Cyclic GFR-binding peptide
  MOD_RES (30), (31): Xaa is C or S
EVIMQYNKLLLVRGNDLYLMSIASTKVPAXX

SEQ ID NO: 92335 - protein, 32 aa, Artificial Sequence
  Cyclic GFR-binding peptide
  MOD_RES (2), (2): Xaa is C or S
GXRDVVMGQYNKLIIQQKDNLYLMSIASMKTP

SEQ ID NO: 92336 - protein, 35 aa, Artificial Sequence; identical to SEQ ID NO: 37425
  Cyclic GFR-binding peptide
  MOD_RES (32), (33): Xaa is C or S

SEQ ID NO: 92337 - protein, 25 aa, Artificial Sequence
  Cyclic GFR-binding peptide
MGQYNKLYTVVGKDLYLISIASLKT

SEQ ID NO: 92338 - protein, 34 aa, Artificial Sequence; identical to SEQ ID NO: 37426
  Cyclic GFR-binding peptide
  MOD_RES (2), (34): Xaa is C or S

SEQ ID NO: 92339 - protein, 22 aa, Artificial Sequence
  Cyclic GFR-binding peptide
DQYNKLVVNNAADLYLISIASL

SEQ ID NO: 92340 - protein, 29 aa, Artificial Sequence
  Cyclic GFR-binding peptide
  MOD_RES (26), (27): Xaa is C or S
QYNKLVVNNAADLYLISIASLRAPVXXSA

SEQ ID NO: 92341 - protein, 42 aa, Artificial Sequence; identical to SEQ ID NO: 37433
  Cyclic GFR-binding peptide
  MOD_RES (2), (4), (36), (37): Xaa is C or S

SEQ ID NO: 92342 - protein, 37 aa, Artificial Sequence; identical to SEQ ID NO: 37434
  Cyclic GFR-binding peptide
  MOD_RES (1), (3), (35), (36): Xaa is C or S

SEQ ID NO: 92343 - protein, 38 aa, Artificial Sequence; identical to SEQ ID NO: 37435
  Cyclic GFR-binding peptide
  MOD_RES (1), (3), (35), (36): Xaa is C or S

SEQ ID NO: 92344 - protein, 34 aa, Artificial Sequence
  Cyclic GFR-binding peptide
  MOD_RES (29), (30): Xaa is C or S
VMGQYNKLIIQQKDNLYLMSIASMKTPTXXPGAS

SEQ ID NO: 92345 - protein, 28 aa, Artificial Sequence
  Cyclic GFR-binding peptide
AEVVMDQYNKLVVNNAADLYLISIASLR

SEQ ID NO: 92346 - protein, 24 aa, Artificial Sequence
  Cyclic GFR-binding peptide
QYNKLYTVVGKDLYLISIASLKTP

SEQ ID NO: 92347 - protein, 39 aa, Artificial Sequence; identical to SEQ ID NO: 37440
  Cyclic GFR-binding peptide
  MOD_RES (1), (3), (35), (36): Xaa is C or S

SEQ ID NO: 92348 - protein, 26 aa, Artificial Sequence
  Cyclic GFR-binding peptide
IMQYNKLLLVRGNDLYLMSIASTKVP

SEQ ID NO: 92349 - protein, 34 aa, Artificial Sequence; identical to SEQ ID NO: 37442
  Cyclic GFR-binding peptide
  MOD_RES (2), (4): Xaa is C or S

SEQ ID NO: 92350 - protein, 31 aa, Artificial Sequence
  Cyclic GFR-binding peptide
  MOD_RES (2), (4): Xaa is C or S
RXAXSEVTMNQYNKLVVNKNEDLYLISIASM

SEQ ID NO: 92351 - protein, 37 aa, Artificial Sequence; identical to SEQ ID NO: 37444
  Cyclic GFR-binding peptide
  MOD_RES (2), (34), (35): Xaa is C or S

SEQ ID NO: 92352 - protein, 29 aa, Artificial Sequence
  Cyclic GFR-binding peptide
VVMGQYNKLIIQQKDNLYLMSIASMKTPT

SEQ ID NO: 92353 - protein, 39 aa, Artificial Sequence; identical to SEQ ID NO: 37445
  Cyclic GFR-binding peptide
  MOD_RES (1), (3), (35), (36): Xaa is C or S

SEQ ID NO: 92354 - protein, 36 aa, Artificial Sequence; identical to SEQ ID NO: 37447
  Cyclic GFR-binding peptide
  MOD_RES (2), (4), (36): Xaa is C or S

SEQ ID NO: 92355 - protein, 25 aa, Artificial Sequence
  Cyclic GFR-binding peptide
GQYNKLYTVVGKDLYLISIASLKTP

SEQ ID NO: 92356 - protein, 37 aa, Artificial Sequence; identical to SEQ ID NO: 37449
  Cyclic GFR-binding peptide
  MOD_RES (2), (4), (36), (37): Xaa is C or S

SEQ ID NO: 92357 - protein, 29 aa, Artificial Sequence
  Cyclic GFR-binding peptide
  MOD_RES (28), (29): Xaa is C or S
IMQYNKLLLVRGNDLYLMSIASTKVPAXX

SEQ ID NO: 92358 - protein, 24 aa, Artificial Sequence
  Cyclic GFR-binding peptide
TMNQYNKLVVNKNEDLYLISIASM

SEQ ID NO: 92359 - protein, 28 aa, Artificial Sequence
  Cyclic GFR-binding peptide
  MOD_RES (28), (28): Xaa is C or S
IMQYNKLLLVRGNDLYLMSIASTKVPAX

SEQ ID NO: 92360 - protein, 28 aa, Artificial Sequence
  Cyclic GFR-binding peptide
  MOD_RES (27), (28): Xaa is C or S
NQYNKLVVNKNEDLYLISIASMKEPVXX

SEQ ID NO: 92361 - protein, 28 aa, Artificial Sequence
  Cyclic GFR-binding peptide
DVVMGQYNKLIIQQKDNLYLMSIASMKT

SEQ ID NO: 92362 - protein, 29 aa, Artificial Sequence
  Cyclic GFR-binding peptide
  MOD_RES (1), (3): Xaa is C or S
XGXEEVIMQYNKLLLVRGNDLYLMSIAST

SEQ ID NO: 92363 - protein, 38 aa, Artificial Sequence; identical to SEQ ID NO: 37455
  Cyclic GFR-binding peptide
  MOD_RES (1), (3), (34), (35): Xaa is C or S

SEQ ID NO: 92364 - protein, 27 aa, Artificial Sequence
  Cyclic GFR-binding peptide
VVMDQYNKLVVNNAADLYLISIASLRA

SEQ ID NO: 92365 - protein, 30 aa, Artificial Sequence
  Cyclic GFR-binding peptide
  MOD_RES (1), (1): Xaa is C or S
XAEVVMDQYNKLVVNNAADLYLISIASLRA

SEQ ID NO: 92366 - protein, 30 aa, Artificial Sequence
  Cyclic GFR-binding peptide
  MOD_RES (29), (30): Xaa is C or S
TMNQYNKLVVNKNEDLYLISIASMKEPVXX

SEQ ID NO: 92367 - protein, 29 aa, Artificial Sequence
  Cyclic GFR-binding peptide
EVIMQYNKLLLVRGNDLYLMSIASTKVPA

SEQ ID NO: 92368 - protein, 34 aa, Artificial Sequence
  Cyclic GFR-binding peptide
  MOD_RES (30), (31): Xaa is C or S
VAMGQYNKLYTVVGKDLYLISIASLKTPVXXAKS

SEQ ID NO: 92369 - protein, 27 aa, Artificial Sequence
  Cyclic GFR-binding peptide
  MOD_RES (26), (27): Xaa is C or S
QYNKLVVNKNEDLYLISIASMKEPVXX

SEQ ID NO: 92370 - protein, 26 aa, Artificial Sequence
  Cyclic GFR-binding peptide
GQYNKLIIQQKDNLYLMSIASMKTPT

SEQ ID NO: 92371 - protein, 31 aa, Artificial Sequence; identical to SEQ ID NO: 37463
  Cyclic GFR-binding peptide
  MOD_RES (1), (1): Xaa is C or S

SEQ ID NO: 92372 - protein, 27 aa, Artificial Sequence
  Cyclic GFR-binding peptide
  MOD_RES (2), (2): Xaa is C or S
GXEEVIMQYNKLLLVRGNDLYLMSIAS

SEQ ID NO: 92373 - protein, 36 aa, Artificial Sequence; identical to SEQ ID NO: 37472
  Cyclic GFR-binding peptide
  MOD_RES (2), (4), (36): Xaa is C or S

SEQ ID NO: 92374 - protein, 26 aa, Artificial Sequence
  Cyclic GFR-binding peptide
MGQYNKLYTVVGKDLYLISIASLKTP

SEQ ID NO: 92375 - protein, 34 aa, Artificial Sequence; identical to SEQ ID NO: 37474
  Cyclic GFR-binding peptide
  MOD_RES (31), (32): Xaa is C or S

SEQ ID NO: 92376 - protein, 32 aa, Artificial Sequence
  Cyclic GFR-binding peptide
  MOD_RES (26), (27): Xaa is C or S
QYNKLIIQQKDNLYLMSIASMKTPTXXPGASG

SEQ ID NO: 92377 - protein, 35 aa, Artificial Sequence; identical to SEQ ID NO: 37482
  Cyclic GFR-binding peptide
  MOD_RES (2), (4): Xaa is C or S

SEQ ID NO: 92378 - protein, 27 aa, Artificial Sequence
  Cyclic GFR-binding peptide
SEVTMNQYNKLVVNKNEDLYLISIASM

SEQ ID NO: 92379 - protein, 32 aa, Artificial Sequence
  Cyclic GFR-binding peptide
  MOD_RES (2), (4): Xaa is C or S
RXGXAEVVMDQYNKLVVNNAADLYLISIASLR

SEQ ID NO: 92380 - protein, 37 aa, Artificial Sequence; identical to SEQ ID NO: 37484
  Cyclic GFR-binding peptide
  MOD_RES (31), (32): Xaa is C or S

SEQ ID NO: 92381 - protein, 26 aa, Artificial Sequence
  Cyclic GFR-binding peptide
NQYNKLVVNKNEDLYLISIASMKEPV

SEQ ID NO: 92382 - protein, 31 aa, Artificial Sequence
  Cyclic GFR-binding peptide
  MOD_RES (26), (27): Xaa is C or S
QYNKLIIQQKDNLYLMSIASMKTPTXXPGAS

SEQ ID NO: 92383 - protein, 20 aa, Artificial Sequence
  Cyclic GFR-binding peptide
QYNKLVVNKNEDLYLISIAS

SEQ ID NO: 92384 - protein, 31 aa, Artificial Sequence
  Cyclic GFR-binding peptide
  MOD_RES (30), (31): Xaa is C or S
VVMGQYNKLIIQQKDNLYLMSIASMKTPTXX

SEQ ID NO: 92385 - protein, 40 aa, Artificial Sequence; identical to SEQ ID NO: 37493
  Cyclic GFR-binding peptide
  MOD_RES (2), (4), (36), (37): Xaa is C or S

SEQ ID NO: 92386 - protein, 40 aa, Artificial Sequence; identical to SEQ ID NO: 37494
  Cyclic GFR-binding peptide
  MOD_RES (2), (34), (35): Xaa is C or S

SEQ ID NO: 92387 - protein, 32 aa, Artificial Sequence
  Cyclic GFR-binding peptide
  MOD_RES (2), (2): Xaa is C or S
AXSEVTMNQYNKLVVNKNEDLYLISIASMKEP

SEQ ID NO: 92388 - protein, 21 aa, Artificial Sequence
  Cyclic GFR-binding peptide
GQYNKLIIQQKDNLYLMSIAS

SEQ ID NO: 92389 - protein, 26 aa, Artificial Sequence
  Cyclic GFR-binding peptide
  MOD_RES (26), (26): Xaa is C or S
QYNKLYTVVGKDLYLISIASLKTPVX

SEQ ID NO: 92390 - protein, 30 aa, Artificial Sequence
  Cyclic GFR-binding peptide
  MOD_RES (2), (2): Xaa is C or S
AXSEVTMNQYNKLVVNKNEDLYLISIASMK

SEQ ID NO: 92391 - protein, 35 aa, Artificial Sequence; identical to SEQ ID NO: 37501
  Cyclic GFR-binding peptide
  MOD_RES (2), (4): Xaa is C or S

SEQ ID NO: 92392 - protein, 32 aa, Artificial Sequence; identical to SEQ ID NO: 37504
  Cyclic GFR-binding peptide
  MOD_RES (32), (32): Xaa is C or S

SEQ ID NO: 92393 - protein, 30 aa, Artificial Sequence; identical to SEQ ID NO: 1771
  Cyclic GFR-binding peptide

SEQ ID NO: 92394 - protein, 23 aa, Artificial Sequence
  Cyclic GFR-binding peptide
VIMQYNKLLLVRGNDLYLMSIAS

SEQ ID NO: 92395 - protein, 32 aa, Artificial Sequence
  Cyclic GFR-binding peptide
  MOD_RES (1), (3): Xaa is C or S
XAXSEVTMNQYNKLVVNKNEDLYLISIASMKE

SEQ ID NO: 92396 - protein, 37 aa, Artificial Sequence; identical to SEQ ID NO: 37509
  Cyclic GFR-binding peptide
  MOD_RES (31), (32): Xaa is C or S

SEQ ID NO: 92397 - protein, 33 aa, Artificial Sequence
  Cyclic GFR-binding peptide
  MOD_RES (30), (31): Xaa is C or S
VTMNQYNKLVVNKNEDLYLISIASMKEPVXXPE

SEQ ID NO: 92398 - protein, 25 aa, Artificial Sequence
  Cyclic GFR-binding peptide
MGQYNKLIIQQKDNLYLMSIASMKT

SEQ ID NO: 92399 - protein, 32 aa, Artificial Sequence; identical to SEQ ID NO: 37514
  Cyclic GFR-binding peptide
  MOD_RES (31), (32): Xaa is C or S

SEQ ID NO: 92400 - protein, 29 aa, Artificial Sequence
  Cyclic GFR-binding peptide
EVVMDQYNKLVVNNAADLYLISIASLRAP

SEQ ID NO: 92401 - protein, 31 aa, Artificial Sequence
  Cyclic GFR-binding peptide
  MOD_RES (30), (31): Xaa is C or S
VVMDQYNKLVVNNAADLYLISIASLRAPVXX

SEQ ID NO: 92402 - protein, 35 aa, Artificial Sequence
  Cyclic GFR-binding peptide
  MOD_RES (30), (31): Xaa is C or S
VTMNQYNKLVVNKNEDLYLISIASMKEPVXXPEPI

SEQ ID NO: 92403 - protein, 22 aa, Artificial Sequence
  Cyclic GFR-binding peptide
MNQYNKLVVNKNEDLYLISIAS

SEQ ID NO: 92404 - protein, 29 aa, Artificial Sequence
  Cyclic GFR-binding peptide
  MOD_RES (27), (28): Xaa is C or S
GQYNKLIIQQKDNLYLMSIASMKTPTXXP

SEQ ID NO: 92405 - protein, 31 aa, Artificial Sequence
  Cyclic GFR-binding peptide
  MOD_RES (26), (27): Xaa is C or S
QYNKLVVNNAADLYLISIASLRAPVXXSAPA

SEQ ID NO: 92406 - protein, 37 aa, Artificial Sequence; identical to SEQ ID NO: 37519
  Cyclic GFR-binding peptide
  MOD_RES (2), (4), (36), (37): Xaa is C or S

SEQ ID NO: 92407 - protein, 38 aa, Artificial Sequence; identical to SEQ ID NO: 37522
  Cyclic GFR-binding peptide
  MOD_RES (32), (33): Xaa is C or S

SEQ ID NO: 92408 - protein, 31 aa, Artificial Sequence
  Cyclic GFR-binding peptide
  MOD_RES (2), (4): Xaa is C or S
SXGXRDVVMGQYNKLIIQQKDNLYLMSIASM

SEQ ID NO: 92409 - protein, 31 aa, Artificial Sequence; identical to SEQ ID NO: 37523
  Cyclic GFR-binding peptide
  MOD_RES (31), (31): Xaa is C or S

SEQ ID NO: 92410 - protein, 32 aa, Artificial Sequence
  Cyclic GFR-binding peptide
  MOD_RES (27), (28): Xaa is C or S
GQYNKLYTVVGKDLYLISIASLKTPVXXAKSA

SEQ ID NO: 92411 - protein, 31 aa, Artificial Sequence; identical to SEQ ID NO: 37528
  Cyclic GFR-binding peptide

SEQ ID NO: 92412 - protein, 27 aa, Artificial Sequence
  Cyclic GFR-binding peptide
  MOD_RES (27), (27): Xaa is C or S
GQYNKLIIQQKDNLYLMSIASMKTPTX

SEQ ID NO: 92413 - protein, 21 aa, Artificial Sequence
  Cyclic GFR-binding peptide
QYNKLVVNKNEDLYLISIASM

SEQ ID NO: 92414 - protein, 33 aa, Artificial Sequence
  Cyclic GFR-binding peptide
  MOD_RES (28), (29): Xaa is C or S
MGQYNKLIIQQKDNLYLMSIASMKTPTXXPGAS

SEQ ID NO: 92415 - protein, 32 aa, Artificial Sequence
  Cyclic GFR-binding peptide
  MOD_RES (1), (3): Xaa is C or S
XGXESVAMGQYNKLYTVVGKDLYLISIASLKT

SEQ ID NO: 92416 - protein, 30 aa, Artificial Sequence
  Cyclic GFR-binding peptide
  MOD_RES (26), (27): Xaa is C or S
QYNKLLLVRGNDLYLMSIASTKVPAXXTSP

SEQ ID NO: 92417 - protein, 25 aa, Artificial Sequence
  Cyclic GFR-binding peptide
MQYNKLLLVRGNDLYLMSIASTKVP

SEQ ID NO: 92418 - protein, 23 aa, Artificial Sequence
  Cyclic GFR-binding peptide
MDQYNKLVVNNAADLYLISIASL

SEQ ID NO: 92419 - protein, 38 aa, Artificial Sequence; identical to SEQ ID NO: 37539
  Cyclic GFR-binding peptide
  MOD_RES (1), (3), (35), (36): Xaa is C or S

SEQ ID NO: 92420 - protein, 30 aa, Artificial Sequence
  Cyclic GFR-binding peptide
RDVVMGQYNKLIIQQKDNLYLMSIASMKTP

SEQ ID NO: 92421 - protein, 32 aa, Artificial Sequence; identical to SEQ ID NO: 37541
  Cyclic GFR-binding peptide
  MOD_RES (2), (2): Xaa is C or S

SEQ ID NO: 92422 - protein, 30 aa, Artificial Sequence
  Cyclic GFR-binding peptide
  MOD_RES (1), (3): Xaa is C or S
XGXAEVVMDQYNKLVVNNAADLYLISIASL

SEQ ID NO: 92423 - protein, 30 aa, Artificial Sequence
  Cyclic GFR-binding peptide
  MOD_RES (30), (30): Xaa is C or S
VTMNQYNKLVVNKNEDLYLISIASMKEPVX

SEQ ID NO: 92424 - protein, 32 aa, Artificial Sequence
  Cyclic GFR-binding peptide
  MOD_RES (1), (3): Xaa is C or S
XGXAEVVMDQYNKLVVNNAADLYLISIASLRA

SEQ ID NO: 92425 - protein, 38 aa, Artificial Sequence; identical to SEQ ID NO: 37543
  Cyclic GFR-binding peptide
  MOD_RES (2), (4), (36), (37): Xaa is C or S

SEQ ID NO: 92426 - protein, 23 aa, Artificial Sequence
  Cyclic GFR-binding peptide
QYNKLLLVRGNDLYLMSIASTKV

SEQ ID NO: 92427 - protein, 34 aa, Artificial Sequence
  Cyclic GFR-binding peptide
  MOD_RES (2), (4): Xaa is C or S
RXGXAEVVMDQYNKLVVNNAADLYLISIASLRAP

SEQ ID NO: 92428 - protein, 26 aa, Artificial Sequence
  Cyclic GFR-binding peptide
RDVVMGQYNKLIIQQKDNLYLMSIAS

SEQ ID NO: 92429 - protein, 29 aa, Artificial Sequence
  Cyclic GFR-binding peptide
  MOD_RES (26), (27): Xaa is C or S
QYNKLYTVVGKDLYLISIASLKTPVXXAK

SEQ ID NO: 92430 - protein, 35 aa, Artificial Sequence; identical to SEQ ID NO: 37548
  Cyclic GFR-binding peptide
  MOD_RES (1), (33), (34): Xaa is C or S

SEQ ID NO: 92431 - protein, 26 aa, Artificial Sequence
  Cyclic GFR-binding peptide
VMDQYNKLVVNNAADLYLISIASLRA

SEQ ID NO: 92432 - protein, 29 aa, Artificial Sequence
  Cyclic GFR-binding peptide
  MOD_RES (2), (2): Xaa is C or S
GXRDVVMGQYNKLIIQQKDNLYLMSIASM

SEQ ID NO: 92433 - protein, 34 aa, Artificial Sequence; identical to SEQ ID NO: 37557
  Cyclic GFR-binding peptide
  MOD_RES (31), (32): Xaa is C or S

SEQ ID NO: 92434 - protein, 24 aa, Artificial Sequence
  Cyclic GFR-binding peptide
MQYNKLLLVRGNDLYLMSIASTKV

SEQ ID NO: 92435 - protein, 37 aa, Artificial Sequence; identical to SEQ ID NO: 37559
  Cyclic GFR-binding peptide
  MOD_RES (31), (32): Xaa is C or S

SEQ ID NO: 92436 - protein, 29 aa, Artificial Sequence
  Cyclic GFR-binding peptide
  MOD_RES (27), (28): Xaa is C or S
MQYNKLLLVRGNDLYLMSIASTKVPAXXT

SEQ ID NO: 92437 - protein, 23 aa, Artificial Sequence
  Cyclic GFR-binding peptide
MGQYNKLYTVVGKDLYLISIASL

SEQ ID NO: 92438 - protein, 39 aa, Artificial Sequence; identical to SEQ ID NO: 37562
  Cyclic GFR-binding peptide
  MOD_RES (2), (4), (36), (37): Xaa is C or S

SEQ ID NO: 92439 - protein, 31 aa, Artificial Sequence
  Cyclic GFR-binding peptide
  MOD_RES (29), (30): Xaa is C or S
TMNQYNKLVVNKNEDLYLISIASMKEPVXXP

SEQ ID NO: 92440 - protein, 24 aa, Artificial Sequence
  Cyclic GFR-binding peptide
QYNKLVVNNAADLYLISIASLRAP

SEQ ID NO: 92441 - protein, 21 aa, Artificial Sequence
  Cyclic GFR-binding peptide
QYNKLLLVRGNDLYLMSIAST

SEQ ID NO: 92442 - protein, 29 aa, Artificial Sequence
  Cyclic GFR-binding peptide
AAAAAAAAAQYNKLYTVVGKDLYLISIAS

SEQ ID NO: 92443 - protein, 34 aa, Artificial Sequence
  Cyclic GFR-binding peptide
  MOD_RES (28), (29): Xaa is C or S
MGQYNKLIIQQKDNLYLMSIASMKTPTXXPGASG

SEQ ID NO: 92444 - protein, 31 aa, Artificial Sequence
  Cyclic GFR-binding peptide
  MOD_RES (1), (3): Xaa is C or S
XGXEEVIMQYNKLLLVRGNDLYLMSIASTKV

SEQ ID NO: 92445 - protein, 26 aa, Artificial Sequence
  Cyclic GFR-binding peptide
EEVIMQYNKLLLVRGNDLYLMSIAST

SEQ ID NO: 92446 - protein, 20 aa, Artificial Sequence
  Cyclic GFR-binding peptide
QYNKLYTVVGKDLYLISIAS

SEQ ID NO: 92447 - protein, 22 aa, Artificial Sequence
  Cyclic GFR-binding peptide
MGQYNKLIIQQKDNLYLMSIAS

SEQ ID NO: 92448 - protein, 33 aa, Artificial Sequence; identical to SEQ ID NO: 37579
  Cyclic GFR-binding peptide
  MOD_RES (31), (32): Xaa is C or S

SEQ ID NO: 92449 - protein, 27 aa, Artificial Sequence
  Cyclic GFR-binding peptide
RDVVMGQYNKLIIQQKDNLYLMSIASM

SEQ ID NO: 92450 - protein, 37 aa, Artificial Sequence; identical to SEQ ID NO: 37581
  Cyclic GFR-binding peptide
  MOD_RES (2), (4), (36), (37): Xaa is C or S

SEQ ID NO: 92451 - protein, 41 aa, Artificial Sequence; identical to SEQ ID NO: 37584
  Cyclic GFR-binding peptide
  MOD_RES (1), (3), (35), (36): Xaa is C or S

SEQ ID NO: 92452 - protein, 41 aa, Artificial Sequence; identical to SEQ ID NO: 37587
  Cyclic GFR-binding peptide
  MOD_RES (1), (3), (35), (36): Xaa is C or S

SEQ ID NO: 92453 - protein, 24 aa, Artificial Sequence
  Cyclic GFR-binding peptide
IMQYNKLLLVRGNDLYLMSIASTK

SEQ ID NO: 92454 - protein, 26 aa, Artificial Sequence
  Cyclic GFR-binding peptide
  MOD_RES (26), (26): Xaa is C or S
QYNKLVVNNAADLYLISIASLRAPVX

SEQ ID NO: 92455 - protein, 30 aa, Artificial Sequence
  Cyclic GFR-binding peptide
SEVTMNQYNKLVVNKNEDLYLISIASMKEP

SEQ ID NO: 92456 - protein, 31 aa, Artificial Sequence; identical to SEQ ID NO: 37590
  Cyclic GFR-binding peptide
  MOD_RES (31), (31): Xaa is C or S

SEQ ID NO: 92457 - protein, 30 aa, Artificial Sequence; identical to SEQ ID NO: 37591
  Cyclic GFR-binding peptide

SEQ ID NO: 92458 - protein, 30 aa, Artificial Sequence
  Cyclic GFR-binding peptide
  MOD_RES (26), (27): Xaa is C or S
QYNKLVVNKNEDLYLISIASMKEPVXXPEP

SEQ ID NO: 92459 - protein, 30 aa, Artificial Sequence
  Cyclic GFR-binding peptide
  MOD_RES (1), (1): Xaa is C or S
XEEVIMQYNKLLLVRGNDLYLMSIASTKVP

SEQ ID NO: 92460 - protein, 30 aa, Artificial Sequence
  Cyclic GFR-binding peptide
  MOD_RES (27), (28): Xaa is C or S
DQYNKLVVNNAADLYLISIASLRAPVXXSA

SEQ ID NO: 92461 - protein, 25 aa, Artificial Sequence
  Cyclic GFR-binding peptide
QYNKLYTVVGKDLYLISIASLKTPV

SEQ ID NO: 92462 - protein, 34 aa, Artificial Sequence
  Cyclic GFR-binding peptide
  MOD_RES (2), (4): Xaa is C or S
RXAXSEVTMNQYNKLVVNKNEDLYLISIASMKEP

SEQ ID NO: 92463 - protein, 25 aa, Artificial Sequence
  Cyclic GFR-binding peptide
QYNKLLLVRGNDLYLMSIASTKVPA

SEQ ID NO: 92464 - protein, 30 aa, Artificial Sequence
  Cyclic GFR-binding peptide
  MOD_RES (1), (3): Xaa is C or S
XGXESVAMGQYNKLYTVVGKDLYLISIASL

SEQ ID NO: 92465 - protein, 24 aa, Artificial Sequence
  Cyclic GFR-binding peptide
VVMGQYNKLIIQQKDNLYLMSIAS

SEQ ID NO: 92466 - protein, 26 aa, Artificial Sequence
  Cyclic GFR-binding peptide
SVAMGQYNKLYTVVGKDLYLISIASL

SEQ ID NO: 92467 - protein, 30 aa, Artificial Sequence
  Cyclic GFR-binding peptide
  MOD_RES (2), (4): Xaa is C or S
RXAXSEVTMNQYNKLVVNKNEDLYLISIAS

SEQ ID NO: 92468 - protein, 40 aa, Artificial Sequence; identical to SEQ ID NO: 37615
  Cyclic GFR-binding peptide
  MOD_RES (2), (34), (35): Xaa is C or S

SEQ ID NO: 92469 - protein, 37 aa, Artificial Sequence; identical to SEQ ID NO: 37617
  Cyclic GFR-binding peptide
  MOD_RES (1), (33), (34): Xaa is C or S

SEQ ID NO: 92470 - protein, 39 aa, Artificial Sequence; identical to SEQ ID NO: 37618
  Cyclic GFR-binding peptide
  MOD_RES (2), (4), (36), (37): Xaa is C or S

SEQ ID NO: 92471 - protein, 33 aa, Artificial Sequence; identical to SEQ ID NO: 37620
  Cyclic GFR-binding peptide
  MOD_RES (1), (33): Xaa is C or S

SEQ ID NO: 92472 - protein, 21 aa, Artificial Sequence
  Cyclic GFR-binding peptide
GQYNKLYTVVGKDLYLISIAS

SEQ ID NO: 92473 - protein, 32 aa, Artificial Sequence
  Cyclic GFR-binding peptide
  MOD_RES (2), (2): Xaa is C or S
GXESVAMGQYNKLYTVVGKDLYLISIASLKTP

SEQ ID NO: 92474 - protein, 38 aa, Artificial Sequence; identical to SEQ ID NO: 37624
  Cyclic GFR-binding peptide
  MOD_RES (2), (34), (35): Xaa is C or S

SEQ ID NO: 92475 - protein, 37 aa, Artificial Sequence; identical to SEQ ID NO: 37625
  Cyclic GFR-binding peptide
  MOD_RES (2), (34), (35): Xaa is C or S

SEQ ID NO: 92476 - protein, 26 aa, Artificial Sequence
  Cyclic GFR-binding peptide
  MOD_RES (1), (1): Xaa is C or S
XEEVIMQYNKLLLVRGNDLYLMSIAS

SEQ ID NO: 92477 - protein, 28 aa, Artificial Sequence
  Cyclic GFR-binding peptide
AMGQYNKLYTVVGKDLYLISIASLKTPV

SEQ ID NO: 92478 - protein, 30 aa, Artificial Sequence
  Cyclic GFR-binding peptide
AEVVMDQYNKLVVNNAADLYLISIASLRAP

SEQ ID NO: 92479 - protein, 33 aa, Artificial Sequence; identical to SEQ ID NO: 37632
  Cyclic GFR-binding peptide
  MOD_RES (31), (32): Xaa is C or S

SEQ ID NO: 92480 - protein, 36 aa, Artificial Sequence; identical to SEQ ID NO: 37633
  Cyclic GFR-binding peptide
  MOD_RES (1), (33), (34): Xaa is C or S

SEQ ID NO: 92481 - protein, 30 aa, Artificial Sequence
  Cyclic GFR-binding peptide
  MOD_RES (26), (27): Xaa is C or S
QYNKLYTVVGKDLYLISIASLKTPVXXAKS

SEQ ID NO: 92482 - protein, 28 aa, Artificial Sequence
  Cyclic GFR-binding peptide
  MOD_RES (1), (1): Xaa is C or S
XEEVIMQYNKLLLVRGNDLYLMSIASTK

SEQ ID NO: 92483 - protein, 27 aa, Artificial Sequence
  Cyclic GFR-binding peptide
  MOD_RES (27), (27): Xaa is C or S
DQYNKLVVNNAADLYLISIASLRAPVX

SEQ ID NO: 92484 - protein, 25 aa, Artificial Sequence
  Cyclic GFR-binding peptide
MNQYNKLVVNKNEDLYLISIASMKE

SEQ ID NO: 92485 - protein, 25 aa, Artificial Sequence
  Cyclic GFR-binding peptide
VIMQYNKLLLVRGNDLYLMSIASTK

SEQ ID NO: 92486 - protein, 22 aa, Artificial Sequence
  Cyclic GFR-binding peptide
MDQYNKLVVNNAADLYLISIAS

SEQ ID NO: 92487 - protein, 33 aa, Artificial Sequence
  Cyclic GFR-binding peptide
  MOD_RES (29), (30): Xaa is C or S
TMNQYNKLVVNKNEDLYLISIASMKEPVXXPEP

SEQ ID NO: 92488 - protein, 30 aa, Artificial Sequence
  Cyclic GFR-binding peptide
  MOD_RES (27), (28): Xaa is C or S
NQYNKLVVNKNEDLYLISIASMKEPVXXPE

SEQ ID NO: 92489 - protein, 35 aa, Artificial Sequence; identical to SEQ ID NO: 37641
  Cyclic GFR-binding peptide
  MOD_RES (31), (32): Xaa is C or S

SEQ ID NO: 92490 - protein, 36 aa, Artificial Sequence; identical to SEQ ID NO: 37642
  Cyclic GFR-binding peptide
  MOD_RES (2), (4), (36): Xaa is C or S

SEQ ID NO: 92491 - protein, 31 aa, Artificial Sequence; identical to SEQ ID NO: 37643
  Cyclic GFR-binding peptide
  MOD_RES (31), (31): Xaa is C or S

SEQ ID NO: 92492 - protein, 33 aa, Artificial Sequence
  Cyclic GFR-binding peptide
  MOD_RES (29), (30): Xaa is C or S
VMGQYNKLIIQQKDNLYLMSIASMKTPTXXPGA

SEQ ID NO: 92493 - protein, 32 aa, Artificial Sequence
  Cyclic GFR-binding peptide
  MOD_RES (1), (3): Xaa is C or S
XGXRDVVMGQYNKLIIQQKDNLYLMSIASMKT

SEQ ID NO: 92494 - protein, 29 aa, Artificial Sequence
  Cyclic GFR-binding peptide
  MOD_RES (1), (3): Xaa is C or S
XGXAEVVMDQYNKLVVNNAADLYLISIAS

SEQ ID NO: 92495 - protein, 30 aa, Artificial Sequence
  Cyclic GFR-binding peptide
  MOD_RES (27), (28): Xaa is C or S
GQYNKLIIQQKDNLYLMSIASMKTPTXXPG

SEQ ID NO: 92496 - protein, 25 aa, Artificial Sequence
  Cyclic GFR-binding peptide
TMNQYNKLVVNKNEDLYLISIASMK

SEQ ID NO: 92497 - protein, 32 aa, Artificial Sequence; identical to SEQ ID NO: 37656
  Cyclic GFR-binding peptide
  MOD_RES (31), (32): Xaa is C or S

SEQ ID NO: 92498 - protein, 29 aa, Artificial Sequence
  Cyclic GFR-binding peptide
  MOD_RES (1), (3): Xaa is C or S
XGXESVAMGQYNKLYTVVGKDLYLISIAS

SEQ ID NO: 92499 - protein, 33 aa, Artificial Sequence; identical to SEQ ID NO: 37658
  Cyclic GFR-binding peptide
  MOD_RES (1), (32), (33): Xaa is C or S

SEQ ID NO: 92500 - protein, 33 aa, Artificial Sequence; identical to SEQ ID NO: 37660
  Cyclic GFR-binding peptide
  MOD_RES (32), (33): Xaa is C or S

SEQ ID NO: 92501 - protein, 23 aa, Artificial Sequence
  Cyclic GFR-binding peptide
NQYNKLVVNKNEDLYLISIASMK

SEQ ID NO: 92502 - protein, 32 aa, Artificial Sequence; identical to SEQ ID NO: 37662
  Cyclic GFR-binding peptide
  MOD_RES (1), (1): Xaa is C or S

SEQ ID NO: 92503 - protein, 33 aa, Artificial Sequence
  Cyclic GFR-binding peptide
  MOD_RES (30), (31): Xaa is C or S
VAMGQYNKLYTVVGKDLYLISIASLKTPVXXAK

SEQ ID NO: 92504 - protein, 28 aa, Artificial Sequence
  Cyclic GFR-binding peptide
  MOD_RES (26), (27): Xaa is C or S
QYNKLLLVRGNDLYLMSIASTKVPAXXT

SEQ ID NO: 92505 - protein, 40 aa, Artificial Sequence; identical to SEQ ID NO: 37664
  Cyclic GFR-binding peptide
  MOD_RES (1), (3), (34), (35): Xaa is C or S

SEQ ID NO: 92506 - protein, 26 aa, Artificial Sequence
  Cyclic GFR-binding peptide
DQYNKLVVNNAADLYLISIASLRAPV

SEQ ID NO: 92507 - protein, 35 aa, Artificial Sequence
  Cyclic GFR-binding peptide
  MOD_RES (29), (30): Xaa is C or S
VMNQYNKLIVNSSDDLYLVSIASLKTPAXXPKPVH

SEQ ID NO: 92508 - protein, 31 aa, Artificial Sequence
  Cyclic GFR-binding peptide
  MOD_RES (26), (27): Xaa is C or S
QYNKLVVNKNEDLYLISIASMKEPVXXPEPI

SEQ ID NO: 92509 - protein, 27 aa, Artificial Sequence
  Cyclic GFR-binding peptide
VMGQYNKLIIQQKDNLYLMSIASMKTP

SEQ ID NO: 92510 - protein, 33 aa, Artificial Sequence
  Cyclic GFR-binding peptide
  MOD_RES (29), (30): Xaa is C or S
VIMQYNKLLLVRGNDLYLMSIASTKVPAXXTSP

SEQ ID NO: 92511 - protein, 42 aa, Artificial Sequence; identical to SEQ ID NO: 37671
  Cyclic GFR-binding peptide
  MOD_RES (2), (4), (36), (37): Xaa is C or S

SEQ ID NO: 92512 - protein, 36 aa, Artificial Sequence; identical to SEQ ID NO: 37672
  Cyclic GFR-binding peptide
  MOD_RES (2), (34), (35): Xaa is C or S

SEQ ID NO: 92513 - protein, 32 aa, Artificial Sequence
  Cyclic GFR-binding peptide
  MOD_RES (30), (31): Xaa is C or S
EVIMQYNKLLLVRGNDLYLMSIASTKVPAXXT

SEQ ID NO: 92514 - protein, 22 aa, Artificial Sequence
  Cyclic GFR-binding peptide
MGQYNKLYTVVGKDLYLISIAS

SEQ ID NO: 92515 - protein, 40 aa, Artificial Sequence; identical to SEQ ID NO: 37675
  Cyclic GFR-binding peptide
  MOD_RES (2), (34), (35): Xaa is C or S

SEQ ID NO: 92516 - protein, 24 aa, Artificial Sequence
  Cyclic GFR-binding peptide
QYNKLLLVRGNDLYLMSIASTKVP

SEQ ID NO: 92517 - protein, 32 aa, Artificial Sequence
  Cyclic GFR-binding peptide
  MOD_RES (28), (29): Xaa is C or S
MDQYNKLVVNNAADLYLISIASLRAPVXXSAP

SEQ ID NO: 92518 - protein, 27 aa, Artificial Sequence
  Cyclic GFR-binding peptide
VVMGQYNKLIIQQKDNLYLMSIASMKT

SEQ ID NO: 92519 - protein, 38 aa, Artificial Sequence; identical to SEQ ID NO: 37681
  Cyclic GFR-binding peptide
  MOD_RES (2), (34), (35): Xaa is C or S

SEQ ID NO: 92520 - protein, 32 aa, Artificial Sequence
  Cyclic GFR-binding peptide
  MOD_RES (30), (31): Xaa is C or S
VVMDQYNKLVVNNAADLYLISIASLRAPVXXS

SEQ ID NO: 92521 - protein, 35 aa, Artificial Sequence; identical to SEQ ID NO: 37683
  Cyclic GFR-binding peptide
  MOD_RES (2), (4), (35): Xaa is C or S

SEQ ID NO: 92522 - protein, 24 aa, Artificial Sequence
  Cyclic GFR-binding peptide
MNQYNKLVVNKNEDLYLISIASMK

SEQ ID NO: 92523 - protein, 27 aa, Artificial Sequence
  Cyclic GFR-binding peptide
VAMGQYNKLYTVVGKDLYLISIASLKT

SEQ ID NO: 92524 - protein, 21 aa, Artificial Sequence
  Cyclic GFR-binding peptide
QYNKLVVNNAADLYLISIASL

SEQ ID NO: 92525 - protein, 35 aa, Artificial Sequence; identical to SEQ ID NO: 37685
  Cyclic GFR-binding peptide
  MOD_RES (31), (32): Xaa is C or S

SEQ ID NO: 92526 - protein, 30 aa, Artificial Sequence; identical to SEQ ID NO: 1773
  Cyclic GFR-binding peptide

SEQ ID NO: 92527 - protein, 41 aa, Artificial Sequence; identical to SEQ ID NO: 37688
  Cyclic GFR-binding peptide
  MOD_RES (1), (3), (35), (36): Xaa is C or S

SEQ ID NO: 92528 - protein, 36 aa, Artificial Sequence; identical to SEQ ID NO: 37690
  Cyclic GFR-binding peptide
  MOD_RES (31), (32): Xaa is C or S

SEQ ID NO: 92529 - protein, 28 aa, Artificial Sequence
  Cyclic GFR-binding peptide
  MOD_RES (2), (2): Xaa is C or S
AXSEVTMNQYNKLVVNKNEDLYLISIAS

SEQ ID NO: 92530 - protein, 36 aa, Artificial Sequence; identical to SEQ ID NO: 37693
  Cyclic GFR-binding peptide
  MOD_RES (1), (3), (35), (36): Xaa is C or S

SEQ ID NO: 92531 - protein, 22 aa, Artificial Sequence
  Cyclic GFR-binding peptide
NQYNKLVVNKNEDLYLISIASM

SEQ ID NO: 92532 - protein, 34 aa, Artificial Sequence
  Cyclic GFR-binding peptide
  MOD_RES (30), (31): Xaa is C or S
VVMDQYNKLVVNNAADLYLISIASLRAPVXXSAP

SEQ ID NO: 92533 - protein, 34 aa, Artificial Sequence
  Cyclic GFR-binding peptide
  MOD_RES (28), (29): Xaa is C or S
MDQYNKLVVNNAADLYLISIASLRAPVXXSAPAA

SEQ ID NO: 92534 - protein, 29 aa, Artificial Sequence
  Cyclic GFR-binding peptide
  MOD_RES (29), (29): Xaa is C or S
AMGQYNKLYTVVGKDLYLISIASLKTPVX

SEQ ID NO: 92535 - protein, 24 aa, Artificial Sequence
  Cyclic GFR-binding peptide
MDQYNKLVVNNAADLYLISIASLR

SEQ ID NO: 92536 - protein, 29 aa, Artificial Sequence
  Cyclic GFR-binding peptide
EEVIMQYNKLLLVRGNDLYLMSIASTKVP

SEQ ID NO: 92537 - protein, 40 aa, Artificial Sequence; identical to SEQ ID NO: 37697
  Cyclic GFR-binding peptide
  MOD_RES (2), (4), (36), (37): Xaa is C or S

SEQ ID NO: 92538 - protein, 38 aa, Artificial Sequence; identical to SEQ ID NO: 37698
  Cyclic GFR-binding peptide
  MOD_RES (32), (33): Xaa is C or S

SEQ ID NO: 92539 - protein, 28 aa, Artificial Sequence
  Cyclic GFR-binding peptide
  MOD_RES (2), (2): Xaa is C or S
GXEEVIMQYNKLLLVRGNDLYLMSIAST

SEQ ID NO: 92540 - protein, 23 aa, Artificial Sequence
  Cyclic GFR-binding peptide
QYNKLVVNKNEDLYLISIASMKE

SEQ ID NO: 92541 - protein, 31 aa, Artificial Sequence
  Cyclic GFR-binding peptide
  MOD_RES (30), (31): Xaa is C or S
VAMGQYNKLYTVVGKDLYLISIASLKTPVXX

SEQ ID NO: 92542 - protein, 28 aa, Artificial Sequence
  Cyclic GFR-binding peptide
  MOD_RES (26), (27): Xaa is C or S
QYNKLVVNKNEDLYLISIASMKEPVXXP

SEQ ID NO: 92543 - protein, 28 aa, Artificial Sequence
  Cyclic GFR-binding peptide
  MOD_RES (1), (1): Xaa is C or S
XRDVVMGQYNKLIIQQKDNLYLMSIASM

SEQ ID NO: 92544 - protein, 37 aa, Artificial Sequence; identical to SEQ ID NO: 37700
  Cyclic GFR-binding peptide
  MOD_RES (1), (3), (35), (36): Xaa is C or S

SEQ ID NO: 92545 - protein, 28 aa, Artificial Sequence
  Cyclic GFR-binding peptide
  MOD_RES (1), (1): Xaa is C or S
XAEVVMDQYNKLVVNNAADLYLISIASL

SEQ ID NO: 92546 - protein, 34 aa, Artificial Sequence
  Cyclic GFR-binding peptide
  MOD_RES (29), (30): Xaa is C or S
AMGQYNKLYTVVGKDLYLISIASLKTPVXXAKSA

SEQ ID NO: 92547 - protein, 21 aa, Artificial Sequence
  Cyclic GFR-binding peptide
DQYNKLVVNNAADLYLISIAS

SEQ ID NO: 92548 - protein, 35 aa, Artificial Sequence; identical to SEQ ID NO: 37702
  Cyclic GFR-binding peptide
  MOD_RES (1), (3), (35): Xaa is C or S

SEQ ID NO: 92549 - protein, 28 aa, Artificial Sequence
  Cyclic GFR-binding peptide
VTMNQYNKLVVNKNEDLYLISIASMKEP

SEQ ID NO: 92550 - protein, 31 aa, Artificial Sequence
  Cyclic GFR-binding peptide
  MOD_RES (1), (1): Xaa is C or S
XESVAMGQYNKLYTVVGKDLYLISIASLKTP

SEQ ID NO: 92551 - protein, 20 aa, Artificial Sequence
  Cyclic GFR-binding peptide
QYNKLVVNNAADLYLISIAS

SEQ ID NO: 92552 - protein, 37 aa, Artificial Sequence; identical to SEQ ID NO: 37707
  Cyclic GFR-binding peptide
  MOD_RES (6), (7): Xaa is C or S

SEQ ID NO: 92553 - protein, 29 aa, Artificial Sequence
  Cyclic GFR-binding peptide
  MOD_RES (29), (29): Xaa is C or S
RLSAISILYLDAANNVVLKNYQDMVVEAX

SEQ ID NO: 92554 - protein, 32 aa, Artificial Sequence
  Cyclic GFR-binding peptide
  MOD_RES (6), (7): Xaa is C or S
AAPASXXVPARLSAISILYLDAANNVVLKNYQ

SEQ ID NO: 92555 - protein, 30 aa, Artificial Sequence
  Cyclic GFR-binding peptide
  MOD_RES (4), (5): Xaa is C or S
AGPXXTPTKMSAISMLYLNDKQQIILKNYQ

SEQ ID NO: 92556 - protein, 35 aa, Artificial Sequence
  Cyclic GFR-binding peptide
  MOD_RES (6), (7): Xaa is C or S
GSAGPXXTPTKMSAISMLYLNDKQQIILKNYQGMV

SEQ ID NO: 92557 - protein, 28 aa, Artificial Sequence
  Cyclic GFR-binding peptide
KLSAISILYLDKGVVTYLKNYQGMAVSE

SEQ ID NO: 92558 - protein, 22 aa, Artificial Sequence
  Cyclic GFR-binding peptide
KLSAISILYLDKGVVTYLKNYQ

SEQ ID NO: 92559 - protein, 38 aa, Artificial Sequence; identical to SEQ ID NO: 37712
  Cyclic GFR-binding peptide
  MOD_RES (2), (3), (35), (37): Xaa is C or S

SEQ ID NO: 92560 - protein, 29 aa, Artificial Sequence
  Cyclic GFR-binding peptide
  MOD_RES (3), (4): Xaa is C or S
STXXAPVKTSAISMLYLDNGRVLLLKNYQ

SEQ ID NO: 92561 - protein, 36 aa, Artificial Sequence; identical to SEQ ID NO: 37718
  Cyclic GFR-binding peptide
  MOD_RES (2), (3), (35): Xaa is C or S

SEQ ID NO: 92562 - protein, 36 aa, Artificial Sequence; identical to SEQ ID NO: 37721
  Cyclic GFR-binding peptide
  MOD_RES (3), (4), (36): Xaa is C or S

SEQ ID NO: 92563 - protein, 35 aa, Artificial Sequence; identical to SEQ ID NO: 37722
  Cyclic GFR-binding peptide
  MOD_RES (3), (4): Xaa is C or S

SEQ ID NO: 92564 - protein, 34 aa, Artificial Sequence; identical to SEQ ID NO: 37724
  Cyclic GFR-binding peptide
  MOD_RES (2), (3), (34): Xaa is C or S

SEQ ID NO: 92565 - protein, 34 aa, Artificial Sequence; identical to SEQ ID NO: 37725
  Cyclic GFR-binding peptide
  MOD_RES (2), (3): Xaa is C or S

SEQ ID NO: 92566 - protein, 29 aa, Artificial Sequence
  Cyclic GFR-binding peptide
  MOD_RES (29), (29): Xaa is C or S
VKTSAISMLYLDNGRVLLLKNYQMIVEEX

SEQ ID NO: 92567 - protein, 35 aa, Artificial Sequence
  Cyclic GFR-binding peptide
  MOD_RES (6), (7): Xaa is C or S
RVPSTXXAPVKTSAISMLYLDNGRVLLLKNYQMIV

SEQ ID NO: 92568 - protein, 20 aa, Artificial Sequence
  Cyclic GFR-binding peptide
SAISMLYLNDKQQIILKNYQ

SEQ ID NO: 92569 - protein, 28 aa, Artificial Sequence
  Cyclic GFR-binding peptide
  MOD_RES (2), (3): Xaa is C or S
PXXTPTKMSAISMLYLNDKQQIILKNYQ

SEQ ID NO: 92570 - protein, 26 aa, Artificial Sequence
  Cyclic GFR-binding peptide
  MOD_RES (1), (1): Xaa is C or S
XVPEKMSAISILYLDENKNVVLKNYQ

SEQ ID NO: 92571 - protein, 35 aa, Artificial Sequence; identical to SEQ ID NO: 37734
  Cyclic GFR-binding peptide
  MOD_RES (2), (3), (35): Xaa is C or S

SEQ ID NO: 92572 - protein, 33 aa, Artificial Sequence; identical to SEQ ID NO: 37738
  Cyclic GFR-binding peptide
  MOD_RES (1), (32): Xaa is C or S

SEQ ID NO: 92573 - protein, 31 aa, Artificial Sequence
  Cyclic GFR-binding peptide
  MOD_RES (1), (2): Xaa is C or S
XXVPEKMSAISILYLDENKNVVLKNYQNMTV

SEQ ID NO: 92574 - protein, 28 aa, Artificial Sequence
  Cyclic GFR-binding peptide
  MOD_RES (2), (3): Xaa is C or S
SXXVPARLSAISILYLDAANNVVLKNYQ

SEQ ID NO: 92575 - protein, 22 aa, Artificial Sequence
  Cyclic GFR-binding peptide
SAISMLYLDNGRVLLLKNYQMI

SEQ ID NO: 92576 - protein, 22 aa, Artificial Sequence
  Cyclic GFR-binding peptide
RLSAISILYLDAANNVVLKNYQ

SEQ ID NO: 92577 - protein, 30 aa, Artificial Sequence
  Cyclic GFR-binding peptide
  MOD_RES (29), (29): Xaa is C or S
RLSAISILYLDAANNVVLKNYQDMVVEAXG

SEQ ID NO: 92578 - protein, 34 aa, Artificial Sequence; identical to SEQ ID NO: 37746
  Cyclic GFR-binding peptide
  MOD_RES (1), (2), (34): Xaa is C or S

SEQ ID NO: 92579 - protein, 29 aa, Artificial Sequence
  Cyclic GFR-binding peptide
  MOD_RES (1), (2): Xaa is C or S
XXVPTKLSAISILYLDKGVVTYLKNYQGM

SEQ ID NO: 92580 - protein, 36 aa, Artificial Sequence; identical to SEQ ID NO: 37753
  Cyclic GFR-binding peptide
  MOD_RES (4), (5): Xaa is C or S

SEQ ID NO: 92581 - protein, 29 aa, Artificial Sequence
  Cyclic GFR-binding peptide
  MOD_RES (1), (1): Xaa is C or S
XAPVKTSAISMLYLDNGRVLLLKNYQMIV

SEQ ID NO: 92582 - protein, 33 aa, Artificial Sequence
  Cyclic GFR-binding peptide
  MOD_RES (3), (4): Xaa is C or S
ASXXVPARLSAISILYLDAANNVVLKNYQDMVV

SEQ ID NO: 92583 - protein, 41 aa, Artificial Sequence; identical to SEQ ID NO: 37758
  Cyclic GFR-binding peptide
  MOD_RES (6), (7), (39), (41): Xaa is C or S

SEQ ID NO: 92584 - protein, 34 aa, Artificial Sequence; identical to SEQ ID NO: 37761
  Cyclic GFR-binding peptide
  MOD_RES (32), (34): Xaa is C or S

SEQ ID NO: 92585 - protein, 37 aa, Artificial Sequence; identical to SEQ ID NO: 37765
  Cyclic GFR-binding peptide
  MOD_RES (4), (5), (36): Xaa is C or S

SEQ ID NO: 92586 - protein, 29 aa, Artificial Sequence
  Cyclic GFR-binding peptide
TKMSAISMLYLNDKQQIILKNYQGMVVDR

SEQ ID NO: 92587 - protein, 29 aa, Artificial Sequence
  Cyclic GFR-binding peptide
VPTKLSAISILYLDKGVVTYLKNYQGMAV

SEQ ID NO: 92588 - protein, 33 aa, Artificial Sequence
  Cyclic GFR-binding peptide
  MOD_RES (31), (33): Xaa is C or S
PARLSAISILYLDAANNVVLKNYQDMVVEAXGX

SEQ ID NO: 92589 - protein, 36 aa, Artificial Sequence
  Cyclic GFR-binding peptide
  MOD_RES (6), (7): Xaa is C or S
GSAGPXXTPTKMSAISMLYLNDKQQIILKNYQGMVV

SEQ ID NO: 92590 - protein, 34 aa, Artificial Sequence; identical to SEQ ID NO: 37769
  Cyclic GFR-binding peptide
  MOD_RES (1), (2), (33): Xaa is C or S

SEQ ID NO: 92591 - protein, 39 aa, Artificial Sequence; identical to SEQ ID NO: 37775
  Cyclic GFR-binding peptide
  MOD_RES (4), (5), (37), (39): Xaa is C or S

SEQ ID NO: 92592 - protein, 37 aa, Artificial Sequence; identical to SEQ ID NO: 37777
  Cyclic GFR-binding peptide
  MOD_RES (3), (4), (36): Xaa is C or S

SEQ ID NO: 92593 - protein, 31 aa, Artificial Sequence
  Cyclic GFR-binding peptide
  MOD_RES (3), (4): Xaa is C or S
ASXXVPARLSAISILYLDAANNVVLKNYQDM

SEQ ID NO: 92594 - protein, 30 aa, Artificial Sequence; identical to SEQ ID NO: 37778
  Cyclic GFR-binding peptide

SEQ ID NO: 92595 - protein, 36 aa, Artificial Sequence
  Cyclic GFR-binding peptide
  MOD_RES (6), (7): Xaa is C or S
HVPKPXXAPTKLSAISVLYLDDSSNVILKNYQNMVV

SEQ ID NO: 92596 - protein, 37 aa, Artificial Sequence; identical to SEQ ID NO: 37782
  Cyclic GFR-binding peptide
  MOD_RES (5), (6): Xaa is C or S

SEQ ID NO: 92597 - protein, 39 aa, Artificial Sequence; identical to SEQ ID NO: 37785
  Cyclic GFR-binding peptide
  MOD_RES (4), (5), (36), (38): Xaa is C or S

SEQ ID NO: 92598 - protein, 32 aa, Artificial Sequence
  Cyclic GFR-binding peptide
  MOD_RES (3), (4): Xaa is C or S
GPXXTPTKMSAISMLYLNDKQQIILKNYQGMV

SEQ ID NO: 92599 - protein, 35 aa, Artificial Sequence; identical to SEQ ID NO: 37786
  Cyclic GFR-binding peptide
  MOD_RES (2), (3), (35): Xaa is C or S

SEQ ID NO: 92600 - protein, 29 aa, Artificial Sequence
  Cyclic GFR-binding peptide
SAISILYLDENKNVVLKNYQAAAAAAAAA

SEQ ID NO: 92601 - protein, 31 aa, Artificial Sequence; identical to SEQ ID NO: 37789
  Cyclic GFR-binding peptide
  MOD_RES (1), (1): Xaa is C or S

SEQ ID NO: 92602 - protein, 22 aa, Artificial Sequence
  Cyclic GFR-binding peptide
MSAISMLYLNDKQQIILKNYQG

SEQ ID NO: 92603 - protein, 31 aa, Artificial Sequence
  Cyclic GFR-binding peptide
  MOD_RES (30), (30): Xaa is C or S
TKLSAISILYLDKGVVTYLKNYQGMAVSEXG

SEQ ID NO: 92604 - protein, 28 aa, Artificial Sequence
  Cyclic GFR-binding peptide
  MOD_RES (1), (2): Xaa is C or S
XXTPTKMSAISMLYLNDKQQIILKNYQG

SEQ ID NO: 92605 - protein, 25 aa, Artificial Sequence
  Cyclic GFR-binding peptide
ARLSAISILYLDAANNVVLKNYQDM

SEQ ID NO: 92606 - protein, 31 aa, Artificial Sequence
  Cyclic GFR-binding peptide
  MOD_RES (4), (5): Xaa is C or S
PSTXXAPVKTSAISMLYLDNGRVLLLKNYQM

SEQ ID NO: 92607 - protein, 33 aa, Artificial Sequence
  Cyclic GFR-binding peptide
  MOD_RES (30), (32): Xaa is C or S
PVKTSAISMLYLDNGRVLLLKNYQMIVEEXGXL

SEQ ID NO: 92608 - protein, 27 aa, Artificial Sequence
  Cyclic GFR-binding peptide
VPARLSAISILYLDAANNVVLKNYQDM

SEQ ID NO: 92609 - protein, 30 aa, Artificial Sequence
  Cyclic GFR-binding peptide
  MOD_RES (1), (1): Xaa is C or S
XVPARLSAISILYLDAANNVVLKNYQDMVV

SEQ ID NO: 92610 - protein, 42 aa, Artificial Sequence; identical to SEQ ID NO: 37799
  Cyclic GFR-binding peptide
  MOD_RES (6), (7), (39), (41): Xaa is C or S

SEQ ID NO: 92611 - protein, 33 aa, Artificial Sequence; identical to SEQ ID NO: 37800
  Cyclic GFR-binding peptide
  MOD_RES (1), (2): Xaa is C or S

SEQ ID NO: 92612 - protein, 40 aa, Artificial Sequence; identical to SEQ ID NO: 37803
  Cyclic GFR-binding peptide
  MOD_RES (5), (6), (38), (40): Xaa is C or S

SEQ ID NO: 92613 - protein, 33 aa, Artificial Sequence; identical to SEQ ID NO: 37804
  Cyclic GFR-binding peptide
  MOD_RES (31), (33): Xaa is C or S

SEQ ID NO: 92614 - protein, 26 aa, Artificial Sequence
  Cyclic GFR-binding peptide
MSAISILYLDENKNVVLKNYQNMTVE

SEQ ID NO: 92615 - protein, 27 aa, Artificial Sequence
  Cyclic GFR-binding peptide
RLSAISILYLDAANNVVLKNYQDMVVE

SEQ ID NO: 92616 - protein, 36 aa, Artificial Sequence; identical to SEQ ID NO: 37812
  Cyclic GFR-binding peptide
  MOD_RES (4), (5): Xaa is C or S

SEQ ID NO: 92617 - protein, 34 aa, Artificial Sequence
  Cyclic GFR-binding peptide
  MOD_RES (4), (5): Xaa is C or S
AGPXXTPTKMSAISMLYLNDKQQIILKNYQGMVV

SEQ ID NO: 92618 - protein, 26 aa, Artificial Sequence
  Cyclic GFR-binding peptide
TKLSAISILYLDKGVVTYLKNYQGMA

SEQ ID NO: 92619 - protein, 31 aa, Artificial Sequence; identical to SEQ ID NO: 37815
  Cyclic GFR-binding peptide

SEQ ID NO: 92620 - protein, 23 aa, Artificial Sequence
  Cyclic GFR-binding peptide
KTSAISMLYLDNGRVLLLKNYQM

SEQ ID NO: 92621 - protein, 30 aa, Artificial Sequence
  Cyclic GFR-binding peptide
  MOD_RES (2), (3): Xaa is C or S
PXXTPTKMSAISMLYLNDKQQIILKNYQGM

SEQ ID NO: 92622 - protein, 36 aa, Artificial Sequence; identical to SEQ ID NO: 37817
  Cyclic GFR-binding peptide
  MOD_RES (4), (5): Xaa is C or S

SEQ ID NO: 92623 - protein, 29 aa, Artificial Sequence
  Cyclic GFR-binding peptide
SAISILYLDAANNVVLKNYQAAAAAAAAA

SEQ ID NO: 92624 - protein, 32 aa, Artificial Sequence; identical to SEQ ID NO: 37824
  Cyclic GFR-binding peptide
  MOD_RES (1), (1): Xaa is C or S

SEQ ID NO: 92625 - protein, 31 aa, Artificial Sequence
  Cyclic GFR-binding peptide
  MOD_RES (3), (4): Xaa is C or S
GPXXTPTKMSAISMLYLNDKQQIILKNYQGM

SEQ ID NO: 92626 - protein, 34 aa, Artificial Sequence
  Cyclic GFR-binding peptide
  MOD_RES (6), (7): Xaa is C or S
RVPSTXXAPVKTSAISMLYLDNGRVLLLKNYQMI

SEQ ID NO: 92627 - protein, 35 aa, Artificial Sequence; identical to SEQ ID NO: 37832
  Cyclic GFR-binding peptide
  MOD_RES (4), (5): Xaa is C or S

SEQ ID NO: 92628 - protein, 32 aa, Artificial Sequence
  Cyclic GFR-binding peptide
  MOD_RES (29), (31): Xaa is C or S
KMSAISILYLDENKNVVLKNYQNMTVESXAXR

SEQ ID NO: 92629 - protein, 35 aa, Artificial Sequence
  Cyclic GFR-binding peptide
  MOD_RES (6), (7): Xaa is C or S
KASKAXXVPTKLSAISILYLDKGVVTYLKNYQGMA

SEQ ID NO: 92630 - protein, 30 aa, Artificial Sequence
  Cyclic GFR-binding peptide
  MOD_RES (30), (30): Xaa is C or S
TKLSAISILYLDKGVVTYLKNYQGMAVSEX

SEQ ID NO: 92631 - protein, 29 aa, Artificial Sequence
  Cyclic GFR-binding peptide
VPARLSAISILYLDAANNVVLKNYQDMVV

SEQ ID NO: 92632 - protein, 26 aa, Artificial Sequence
  Cyclic GFR-binding peptide
KMSAISILYLDENKNVVLKNYQNMTV

SEQ ID NO: 92633 - protein, 40 aa, Artificial Sequence; identical to SEQ ID NO: 37835
  Cyclic GFR-binding peptide
  MOD_RES (5), (6), (38), (40): Xaa is C or S

SEQ ID NO: 92634 - protein, 25 aa, Artificial Sequence
  Cyclic GFR-binding peptide
SAISMLYLDNGRVLLLKNYQMIVEE

SEQ ID NO: 92635 - protein, 40 aa, Artificial Sequence; identical to SEQ ID NO: 37836
  Cyclic GFR-binding peptide
  MOD_RES (5), (6), (38), (40): Xaa is C or S

SEQ ID NO: 92636 - protein, 25 aa, Artificial Sequence
  Cyclic GFR-binding peptide
SAISMLYLNDKQQIILKNYQGMVVD

SEQ ID NO: 92637 - protein, 40 aa, Artificial Sequence; identical to SEQ ID NO: 37837
  Cyclic GFR-binding peptide
  MOD_RES (4), (5), (37), (39): Xaa is C or S

SEQ ID NO: 92638 - protein, 29 aa, Artificial Sequence
  Cyclic GFR-binding peptide
VPEKMSAISILYLDENKNVVLKNYQNMTV

SEQ ID NO: 92639 - protein, 30 aa, Artificial Sequence
  Cyclic GFR-binding peptide
  MOD_RES (1), (2): Xaa is C or S
XXTPTKMSAISMLYLNDKQQIILKNYQGMV

SEQ ID NO: 92640 - protein, 38 aa, Artificial Sequence; identical to SEQ ID NO: 37838
  Cyclic GFR-binding peptide
  MOD_RES (3), (4), (36), (38): Xaa is C or S

SEQ ID NO: 92641 - protein, 24 aa, Artificial Sequence
  Cyclic GFR-binding peptide
SAISILYLDAANNVVLKNYQDMVV

SEQ ID NO: 92642 - protein, 21 aa, Artificial Sequence
  Cyclic GFR-binding peptide
LSAISILYLDKGVVTYLKNYQ

SEQ ID NO: 92643 - protein, 27 aa, Artificial Sequence
  Cyclic GFR-binding peptide
  MOD_RES (27), (27): Xaa is C or S
SAISILYLDKGVVTYLKNYQGMAVSEX

SEQ ID NO: 92644 - protein, 26 aa, Artificial Sequence
  Cyclic GFR-binding peptide
PARLSAISILYLDAANNVVLKNYQDM

SEQ ID NO: 92645 - protein, 33 aa, Artificial Sequence
  Cyclic GFR-binding peptide
  MOD_RES (30), (32): Xaa is C or S
TKLSAISILYLDKGVVTYLKNYQGMAVSEXGXR

SEQ ID NO: 92646 - protein, 32 aa, Artificial Sequence
  Cyclic GFR-binding peptide
  MOD_RES (29), (31): Xaa is C or S
KMSAISMLYLNDKQQIILKNYQGMVVDRXGXS

SEQ ID NO: 92647 - protein, 38 aa, Artificial Sequence; identical to SEQ ID NO: 37845
  Cyclic GFR-binding peptide
  MOD_RES (3), (4), (36), (38): Xaa is C or S

SEQ ID NO: 92648 - protein, 36 aa, Artificial Sequence; identical to SEQ ID NO: 37847
  Cyclic GFR-binding peptide
  MOD_RES (1), (2), (34), (36): Xaa is C or S

SEQ ID NO: 92649 - protein, 31 aa, Artificial Sequence
  Cyclic GFR-binding peptide
  MOD_RES (2), (3): Xaa is C or S
AXXVPTKLSAISILYLDKGVVTYLKNYQGMA

SEQ ID NO: 92650 - protein, 35 aa, Artificial Sequence
  Cyclic GFR-binding peptide
  MOD_RES (6), (7): Xaa is C or S
GIPEPXXVPEKMSAISILYLDENKNVVLKNYQNMT

SEQ ID NO: 92651 - protein, 39 aa, Artificial Sequence; identical to SEQ ID NO: 37851
  Cyclic GFR-binding peptide
  MOD_RES (6), (7), (39): Xaa is C or S

SEQ ID NO: 92652 - protein, 24 aa, Artificial Sequence
  Cyclic GFR-binding peptide
TKMSAISMLYLNDKQQIILKNYQG

SEQ ID NO: 92653 - protein, 37 aa, Artificial Sequence; identical to SEQ ID NO: 37853
  Cyclic GFR-binding peptide
  MOD_RES (5), (6): Xaa is C or S

SEQ ID NO: 92654 - protein, 29 aa, Artificial Sequence
  Cyclic GFR-binding peptide
  MOD_RES (27), (29): Xaa is C or S
SAISMLYLNDKQQIILKNYQGMVVDRXGX

SEQ ID NO: 92655 - protein, 31 aa, Artificial Sequence
  Cyclic GFR-binding peptide
  MOD_RES (30), (30): Xaa is C or S
EKMSAISILYLDENKNVVLKNYQNMTVESXA

SEQ ID NO: 92656 - protein, 33 aa, Artificial Sequence; identical to SEQ ID NO: 37855
  Cyclic GFR-binding peptide
  MOD_RES (1), (2): Xaa is C or S

SEQ ID NO: 92657 - protein, 23 aa, Artificial Sequence
  Cyclic GFR-binding peptide
TKMSAISMLYLNDKQQIILKNYQ

SEQ ID NO: 92658 - protein, 28 aa, Artificial Sequence
  Cyclic GFR-binding peptide
VPARLSAISILYLDAANNVVLKNYQDMV

SEQ ID NO: 92659 - protein, 28 aa, Artificial Sequence
  Cyclic GFR-binding peptide
PVKTSAISMLYLDNGRVLLLKNYQMIVE

SEQ ID NO: 92660 - protein, 37 aa, Artificial Sequence; identical to SEQ ID NO: 37860
  Cyclic GFR-binding peptide
  MOD_RES (4), (5), (37): Xaa is C or S

SEQ ID NO: 92661 - protein, 38 aa, Artificial Sequence; identical to SEQ ID NO: 37862
  Cyclic GFR-binding peptide
  MOD_RES (5), (6), (38): Xaa is C or S

SEQ ID NO: 92662 - protein, 28 aa, Artificial Sequence
  Cyclic GFR-binding peptide
  MOD_RES (2), (3): Xaa is C or S
AXXVPTKLSAISILYLDKGVVTYLKNYQ

SEQ ID NO: 92663 - protein, 32 aa, Artificial Sequence; identical to SEQ ID NO: 37864
  Cyclic GFR-binding peptide
  MOD_RES (1), (2): Xaa is C or S

SEQ ID NO: 92664 - protein, 33 aa, Artificial Sequence
  Cyclic GFR-binding peptide
  MOD_RES (30), (32): Xaa is C or S
ARLSAISILYLDAANNVVLKNYQDMVVEAXGXR

SEQ ID NO: 92665 - protein, 33 aa, Artificial Sequence
  Cyclic GFR-binding peptide
  MOD_RES (4), (5): Xaa is C or S
PASXXVPARLSAISILYLDAANNVVLKNYQDMV

SEQ ID NO: 92666 - protein, 26 aa, Artificial Sequence
  Cyclic GFR-binding peptide
TKMSAISMLYLNDKQQIILKNYQGMV

SEQ ID NO: 92667 - protein, 23 aa, Artificial Sequence
  Cyclic GFR-binding peptide
KLSAISILYLDKGVVTYLKNYQG

SEQ ID NO: 92668 - protein, 24 aa, Artificial Sequence
  Cyclic GFR-binding peptide
SAISILYLDENKNVVLKNYQNMTV

SEQ ID NO: 92669 - protein, 23 aa, Artificial Sequence
  Cyclic GFR-binding peptide
SAISILYLDKGVVTYLKNYQGMA

SEQ ID NO: 92670 - protein, 29 aa, Artificial Sequence
  Cyclic GFR-binding peptide
  MOD_RES (3), (4): Xaa is C or S
GPXXTPTKMSAISMLYLNDKQQIILKNYQ

SEQ ID NO: 92671 - protein, 32 aa, Artificial Sequence; identical to SEQ ID NO: 37876
  Cyclic GFR-binding peptide
  MOD_RES (1), (1): Xaa is C or S

SEQ ID NO: 92672 - protein, 32 aa, Artificial Sequence
  Cyclic GFR-binding peptide
  MOD_RES (3), (4): Xaa is C or S
ASXXVPARLSAISILYLDAANNVVLKNYQDMV

SEQ ID NO: 92673 - protein, 29 aa, Artificial Sequence
  Cyclic GFR-binding peptide
SAISMLYLNDKQQIILKNYQAAAAAAAAA

SEQ ID NO: 92674 - protein, 30 aa, Artificial Sequence
  Cyclic GFR-binding peptide
  MOD_RES (2), (3): Xaa is C or S
AXXVPTKLSAISILYLDKGVVTYLKNYQGM

SEQ ID NO: 92675 - protein, 26 aa, Artificial Sequence
  Cyclic GFR-binding peptide
RLSAISILYLDAANNVVLKNYQDMVV

SEQ ID NO: 92676 - protein, 34 aa, Artificial Sequence; identical to SEQ ID NO: 37882
  Cyclic GFR-binding peptide
  MOD_RES (1), (33): Xaa is C or S

SEQ ID NO: 92677 - protein, 28 aa, Artificial Sequence
  Cyclic GFR-binding peptide
  MOD_RES (1), (1): Xaa is C or S
XVPTKLSAISILYLDKGVVTYLKNYQGM

SEQ ID NO: 92678 - protein, 28 aa, Artificial Sequence
  Cyclic GFR-binding peptide
PARLSAISILYLDAANNVVLKNYQDMVV

SEQ ID NO: 92679 - protein, 35 aa, Artificial Sequence; identical to SEQ ID NO: 37888
  Cyclic GFR-binding peptide
  MOD_RES (3), (4): Xaa is C or S

SEQ ID NO: 92680 - protein, 32 aa, Artificial Sequence; identical to SEQ ID NO: 37890
  Cyclic GFR-binding peptide
  MOD_RES (1), (1): Xaa is C or S

SEQ ID NO: 92681 - protein, 25 aa, Artificial Sequence
  Cyclic GFR-binding peptide
PTKMSAISMLYLNDKQQIILKNYQG

SEQ ID NO: 92682 - protein, 42 aa, Artificial Sequence; identical to SEQ ID NO: 37893
  Cyclic GFR-binding peptide
  MOD_RES (6), (7), (39), (41): Xaa is C or S

SEQ ID NO: 92683 - protein, 35 aa, Artificial Sequence; identical to SEQ ID NO: 37894
  Cyclic GFR-binding peptide
  MOD_RES (1), (2), (33), (35): Xaa is C or S

SEQ ID NO: 92684 - protein, 37 aa, Artificial Sequence; identical to SEQ ID NO: 37895
  Cyclic GFR-binding peptide
  MOD_RES (2), (3), (35), (37): Xaa is C or S

SEQ ID NO: 92685 - protein, 31 aa, Artificial Sequence
  Cyclic GFR-binding peptide
  MOD_RES (3), (4): Xaa is C or S
KAXXVPTKLSAISILYLDKGVVTYLKNYQGM

SEQ ID NO: 92686 - protein, 27 aa, Artificial Sequence
  Cyclic GFR-binding peptide
  MOD_RES (1), (2): Xaa is C or S
XXAPVKTSAISMLYLDNGRVLLLKNYQ

SEQ ID NO: 92687 - protein, 33 aa, Artificial Sequence
  Cyclic GFR-binding peptide
  MOD_RES (6), (7): Xaa is C or S
HVPKPXXAPTKLSAISVLYLDDSSNVILKNYQN

SEQ ID NO: 92688 - protein, 35 aa, Artificial Sequence
  Cyclic GFR-binding peptide
  MOD_RES (5), (6): Xaa is C or S
ASKAXXVPTKLSAISILYLDKGVVTYLKNYQGMAV

SEQ ID NO: 92689 - protein, 26 aa, Artificial Sequence
  Cyclic GFR-binding peptide
PTKMSAISMLYLNDKQQIILKNYQGM

SEQ ID NO: 92690 - protein, 27 aa, Artificial Sequence
  Cyclic GFR-binding peptide
APVKTSAISMLYLDNGRVLLLKNYQMI

SEQ ID NO: 92691 - protein, 25 aa, Artificial Sequence
  Cyclic GFR-binding peptide
SAISILYLDAANNVVLKNYQDMVVE

SEQ ID NO: 92692 - protein, 30 aa, Artificial Sequence
  Cyclic GFR-binding peptide
  MOD_RES (28), (30): Xaa is C or S
MSAISMLYLNDKQQIILKNYQGMVVDRXGX

SEQ ID NO: 92693 - protein, 26 aa, Artificial Sequence
  Cyclic GFR-binding peptide
VKTSAISMLYLDNGRVLLLKNYQMIV

SEQ ID NO: 92694 - protein, 32 aa, Artificial Sequence; identical to SEQ ID NO: 37917
  Cyclic GFR-binding peptide
  MOD_RES (1), (32): Xaa is C or S

SEQ ID NO: 92695 - protein, 29 aa, Artificial Sequence
  Cyclic GFR-binding peptide
  MOD_RES (2), (3): Xaa is C or S
AXXVPTKLSAISILYLDKGVVTYLKNYQG

SEQ ID NO: 92696 - protein, 31 aa, Artificial Sequence
  Cyclic GFR-binding peptide
  MOD_RES (2), (3): Xaa is C or S
TXXAPVKTSAISMLYLDNGRVLLLKNYQMIV

SEQ ID NO: 92697 - protein, 21 aa, Artificial Sequence
  Cyclic GFR-binding peptide
SAISILYLDENKNVVLKNYQN

SEQ ID NO: 92698 - protein, 29 aa, Artificial Sequence
  Cyclic GFR-binding peptide
SAISMLYLDNGRVLLLKNYQAAAAAAAAA

SEQ ID NO: 92699 - protein, 34 aa, Artificial Sequence; identical to SEQ ID NO: 37924
  Cyclic GFR-binding peptide
  MOD_RES (32), (34): Xaa is C or S

SEQ ID NO: 92700 - protein, 35 aa, Artificial Sequence; identical to SEQ ID NO: 37926
  Cyclic GFR-binding peptide
  MOD_RES (4), (5): Xaa is C or S

SEQ ID NO: 92701 - protein, 37 aa, Artificial Sequence; identical to SEQ ID NO: 37927
  Cyclic GFR-binding peptide
  MOD_RES (3), (4), (36): Xaa is C or S

SEQ ID NO: 92702 - protein, 36 aa, Artificial Sequence
  Cyclic GFR-binding peptide
  MOD_RES (6), (7): Xaa is C or S
GIPEPXXVPEKMSAISILYLDENKNVVLKNYQNMTV

SEQ ID NO: 92703 - protein, 36 aa, Artificial Sequence; identical to SEQ ID NO: 37928
  Cyclic GFR-binding peptide
  MOD_RES (2), (3), (35): Xaa is C or S

SEQ ID NO: 92704 - protein, 26 aa, Artificial Sequence
  Cyclic GFR-binding peptide
  MOD_RES (1), (1): Xaa is C or S
XAPVKTSAISMLYLDNGRVLLLKNYQ

SEQ ID NO: 92705 - protein, 30 aa, Artificial Sequence; identical to SEQ ID NO: 37930
  Cyclic GFR-binding peptide

SEQ ID NO: 92706 - protein, 32 aa, Artificial Sequence
  Cyclic GFR-binding peptide
  MOD_RES (6), (7): Xaa is C or S
GIPEPXXVPEKMSAISILYLDENKNVVLKNYQ

SEQ ID NO: 92707 - protein, 40 aa, Artificial Sequence; identical to SEQ ID NO: 37931
  Cyclic GFR-binding peptide
  MOD_RES (6), (7), (39): Xaa is C or S

SEQ ID NO: 92708 - protein, 34 aa, Artificial Sequence
  Cyclic GFR-binding peptide
  MOD_RES (31), (33): Xaa is C or S
PTKLSAISILYLDKGVVTYLKNYQGMAVSEXGXR

SEQ ID NO: 92709 - protein, 27 aa, Artificial Sequence
  Cyclic GFR-binding peptide
LSAISILYLDKGVVTYLKNYQGMAVSE

SEQ ID NO: 92710 - protein, 33 aa, Artificial Sequence; identical to SEQ ID NO: 37933
  Cyclic GFR-binding peptide
  MOD_RES (32), (32): Xaa is C or S

SEQ ID NO: 92711 - protein, 36 aa, Artificial Sequence; identical to SEQ ID NO: 37935
  Cyclic GFR-binding peptide
  MOD_RES (5), (6): Xaa is C or S

SEQ ID NO: 92712 - protein, 30 aa, Artificial Sequence
  Cyclic GFR-binding peptide
  MOD_RES (29), (29): Xaa is C or S
KLSAISILYLDKGVVTYLKNYQGMAVSEXG

SEQ ID NO: 92713 - protein, 32 aa, Artificial Sequence
  Cyclic GFR-binding peptide
  MOD_RES (4), (5): Xaa is C or S
AGPXXTPTKMSAISMLYLNDKQQIILKNYQGM

SEQ ID NO: 92714 - protein, 31 aa, Artificial Sequence
  Cyclic GFR-binding peptide
  MOD_RES (28), (30): Xaa is C or S
KTSAISMLYLDNGRVLLLKNYQMIVEEXGXL

SEQ ID NO: 92715 - protein, 32 aa, Artificial Sequence
  Cyclic GFR-binding peptide
  MOD_RES (5), (6): Xaa is C or S
VPSTXXAPVKTSAISMLYLDNGRVLLLKNYQM

SEQ ID NO: 92716 - protein, 39 aa, Artificial Sequence; identical to SEQ ID NO: 37944
  Cyclic GFR-binding peptide
  MOD_RES (6), (7), (38): Xaa is C or S

SEQ ID NO: 92717 - protein, 28 aa, Artificial Sequence
  Cyclic GFR-binding peptide
VKTSAISMLYLDNGRVLLLKNYQMIVEE

SEQ ID NO: 92718 - protein, 24 aa, Artificial Sequence
  Cyclic GFR-binding peptide
TSAISMLYLDNGRVLLLKNYQMIV

SEQ ID NO: 92719 - protein, 27 aa, Artificial Sequence
  Cyclic GFR-binding peptide
VPTKLSAISILYLDKGVVTYLKNYQGM

SEQ ID NO: 92720 - protein, 32 aa, Artificial Sequence
  Cyclic GFR-binding peptide
  MOD_RES (3), (4): Xaa is C or S
KAXXVPTKLSAISILYLDKGVVTYLKNYQGMA

SEQ ID NO: 92721 - protein, 32 aa, Artificial Sequence
  Cyclic GFR-binding peptide
  MOD_RES (2), (3): Xaa is C or S
PXXTPTKMSAISMLYLNDKQQIILKNYQGMVV

SEQ ID NO: 92722 - protein, 31 aa, Artificial Sequence
  Cyclic GFR-binding peptide
  MOD_RES (4), (5): Xaa is C or S
PEPXXVPEKMSAISILYLDENKNVVLKNYQN

SEQ ID NO: 92723 - protein, 29 aa, Artificial Sequence
  Cyclic GFR-binding peptide
EKMSAISILYLDENKNVVLKNYQNMTVES

SEQ ID NO: 92724 - protein, 24 aa, Artificial Sequence
  Cyclic GFR-binding peptide
PTKMSAISMLYLNDKQQIILKNYQ

SEQ ID NO: 92725 - protein, 36 aa, Artificial Sequence; identical to SEQ ID NO: 37949
  Cyclic GFR-binding peptide
  MOD_RES (4), (5): Xaa is C or S

SEQ ID NO: 92726 - protein, 40 aa, Artificial Sequence; identical to SEQ ID NO: 37950
  Cyclic GFR-binding peptide
  MOD_RES (5), (6), (37), (39): Xaa is C or S

SEQ ID NO: 92727 - protein, 41 aa, Artificial Sequence; identical to SEQ ID NO: 37951
  Cyclic GFR-binding peptide
  MOD_RES (5), (6), (38), (40): Xaa is C or S

SEQ ID NO: 92728 - protein, 39 aa, Artificial Sequence; identical to SEQ ID NO: 37952
  Cyclic GFR-binding peptide
  MOD_RES (5), (6), (38): Xaa is C or S

SEQ ID NO: 92729 - protein, 32 aa, Artificial Sequence
  Cyclic GFR-binding peptide
  MOD_RES (5), (6): Xaa is C or S
SAGPXXTPTKMSAISMLYLNDKQQIILKNYQG

SEQ ID NO: 92730 - protein, 33 aa, Artificial Sequence; identical to SEQ ID NO: 37954
  Cyclic GFR-binding peptide
  MOD_RES (2), (3): Xaa is C or S

SEQ ID NO: 92731 - protein, 27 aa, Artificial Sequence
  Cyclic GFR-binding peptide
VKTSAISMLYLDNGRVLLLKNYQMIVE

SEQ ID NO: 92732 - protein, 37 aa, Artificial Sequence; identical to SEQ ID NO: 37957
  Cyclic GFR-binding peptide
  MOD_RES (5), (6): Xaa is C or S

SEQ ID NO: 92733 - protein, 29 aa, Artificial Sequence
  Cyclic GFR-binding peptide
  MOD_RES (2), (3): Xaa is C or S
SXXVPARLSAISILYLDAANNVVLKNYQD

SEQ ID NO: 92734 - protein, 32 aa, Artificial Sequence
  Cyclic GFR-binding peptide
  MOD_RES (6), (7): Xaa is C or S
KASKAXXVPTKLSAISILYLDKGVVTYLKNYQ

SEQ ID NO: 92735 - protein, 28 aa, Artificial Sequence
  Cyclic GFR-binding peptide
APVKTSAISMLYLDNGRVLLLKNYQMIV

SEQ ID NO: 92736 - protein, 30 aa, Artificial Sequence
  Cyclic GFR-binding peptide
  MOD_RES (28), (30): Xaa is C or S
KTSAISMLYLDNGRVLLLKNYQMIVEEXGX

SEQ ID NO: 92737 - protein, 28 aa, Artificial Sequence
  Cyclic GFR-binding peptide
ARLSAISILYLDAANNVVLKNYQDMVVE

SEQ ID NO: 92738 - protein, 29 aa, Artificial Sequence
  Cyclic GFR-binding peptide
  MOD_RES (1), (2): Xaa is C or S
XXTPTKMSAISMLYLNDKQQIILKNYQGM

SEQ ID NO: 92739 - protein, 36 aa, Artificial Sequence; identical to SEQ ID NO: 37969
  Cyclic GFR-binding peptide
  MOD_RES (1), (33), (35): Xaa is C or S

SEQ ID NO: 92740 - protein, 27 aa, Artificial Sequence
  Cyclic GFR-binding peptide
PEKMSAISILYLDENKNVVLKNYQNMT

SEQ ID NO: 92741 - protein, 23 aa, Artificial Sequence
  Cyclic GFR-binding peptide
SAISILYLDAANNVVLKNYQDMV

SEQ ID NO: 92742 - protein, 26 aa, Artificial Sequence
  Cyclic GFR-binding peptide
KTSAISMLYLDNGRVLLLKNYQMIVE

SEQ ID NO: 92743 - protein, 29 aa, Artificial Sequence
  Cyclic GFR-binding peptide
  MOD_RES (2), (3): Xaa is C or S
PXXVPEKMSAISILYLDENKNVVLKNYQN

SEQ ID NO: 92744 - protein, 26 aa, Artificial Sequence
  Cyclic GFR-binding peptide
APVKTSAISMLYLDNGRVLLLKNYQM

SEQ ID NO: 92745 - protein, 34 aa, Artificial Sequence; identical to SEQ ID NO: 37972
  Cyclic GFR-binding peptide
  MOD_RES (3), (4): Xaa is C or S

SEQ ID NO: 92746 - protein, 38 aa, Artificial Sequence; identical to SEQ ID NO: 37976
  Cyclic GFR-binding peptide
  MOD_RES (2), (3), (35), (37): Xaa is C or S

SEQ ID NO: 92747 - protein, 27 aa, Artificial Sequence
  Cyclic GFR-binding peptide
PARLSAISILYLDAANNVVLKNYQDMV

SEQ ID NO: 92748 - protein, 37 aa, Artificial Sequence; identical to SEQ ID NO: 37980
  Cyclic GFR-binding peptide
  MOD_RES (6), (7): Xaa is C or S

SEQ ID NO: 92749 - protein, 30 aa, Artificial Sequence
  Cyclic GFR-binding peptide
  MOD_RES (27), (29): Xaa is C or S
SAISILYLDAANNVVLKNYQDMVVEAXGXR

SEQ ID NO: 92750 - protein, 42 aa, Artificial Sequence; identical to SEQ ID NO: 37982
  Cyclic GFR-binding peptide
  MOD_RES (6), (7), (39), (41): Xaa is C or S

SEQ ID NO: 92751 - protein, 26 aa, Artificial Sequence
  Cyclic GFR-binding peptide
  MOD_RES (1), (1): Xaa is C or S
XTPTKMSAISMLYLNDKQQIILKNYQ

SEQ ID NO: 92752 - protein, 33 aa, Artificial Sequence; identical to SEQ ID NO: 37987
  Cyclic GFR-binding peptide
  MOD_RES (1), (33): Xaa is C or S

SEQ ID NO: 92753 - protein, 25 aa, Artificial Sequence
  Cyclic GFR-binding peptide
LSAISILYLDAANNVVLKNYQDMVV

SEQ ID NO: 92754 - protein, 33 aa, Artificial Sequence
  Cyclic GFR-binding peptide
  MOD_RES (5), (6): Xaa is C or S
VPSTXXAPVKTSAISMLYLDNGRVLLLKNYQMI

SEQ ID NO: 92755 - protein, 28 aa, Artificial Sequence
  Cyclic GFR-binding peptide
  MOD_RES (1), (1): Xaa is C or S
XTPTKMSAISMLYLNDKQQIILKNYQGM

SEQ ID NO: 92756 - protein, 34 aa, Artificial Sequence; identical to SEQ ID NO: 37998
  Cyclic GFR-binding peptide
  MOD_RES (1), (2), (34): Xaa is C or S

SEQ ID NO: 92757 - protein, 31 aa, Artificial Sequence
  Cyclic GFR-binding peptide
  MOD_RES (5), (6): Xaa is C or S
VPSTXXAPVKTSAISMLYLDNGRVLLLKNYQ

SEQ ID NO: 92758 - protein, 30 aa, Artificial Sequence
  Cyclic GFR-binding peptide
PTKLSAISILYLDKGVVTYLKNYQGMAVSE

SEQ ID NO: 92759 - protein, 41 aa, Artificial Sequence; identical to SEQ ID NO: 38004
  Cyclic GFR-binding peptide
  MOD_RES (5), (6), (38), (40): Xaa is C or S

SEQ ID NO: 92760 - protein, 34 aa, Artificial Sequence; identical to SEQ ID NO: 38005
  Cyclic GFR-binding peptide
  MOD_RES (1), (32), (34): Xaa is C or S

SEQ ID NO: 92761 - protein, 34 aa, Artificial Sequence
  Cyclic GFR-binding peptide
  MOD_RES (6), (7): Xaa is C or S
GIPEPXXVPEKMSAISILYLDENKNVVLKNYQNM

SEQ ID NO: 92762 - protein, 38 aa, Artificial Sequence; identical to SEQ ID NO: 38009
  Cyclic GFR-binding peptide
  MOD_RES (5), (6), (38): Xaa is C or S

SEQ ID NO: 92763 - protein, 27 aa, Artificial Sequence
  Cyclic GFR-binding peptide
  MOD_RES (1), (1): Xaa is C or S
XAPVKTSAISMLYLDNGRVLLLKNYQM

SEQ ID NO: 92764 - protein, 26 aa, Artificial Sequence
  Cyclic GFR-binding peptide
KMSAISMLYLNDKQQIILKNYQGMVV

SEQ ID NO: 92765 - protein, 31 aa, Artificial Sequence
  Cyclic GFR-binding peptide
  MOD_RES (29), (31): Xaa is C or S
KMSAISILYLDENKNVVLKNYQNMTVESXAX

SEQ ID NO: 92766 - protein, 23 aa, Artificial Sequence
  Cyclic GFR-binding peptide
SAISILYLDENKNVVLKNYQNMT

SEQ ID NO: 92767 - protein, 38 aa, Artificial Sequence; identical to SEQ ID NO: 38016
  Cyclic GFR-binding peptide
  MOD_RES (5), (6), (38): Xaa is C or S

SEQ ID NO: 92768 - protein, 33 aa, Artificial Sequence
  Cyclic GFR-binding peptide
  MOD_RES (6), (7): Xaa is C or S
RVPSTXXAPVKTSAISMLYLDNGRVLLLKNYQM

SEQ ID NO: 92769 - protein, 36 aa, Artificial Sequence; identical to SEQ ID NO: 38019
  Cyclic GFR-binding peptide
  MOD_RES (1), (2), (33), (35): Xaa is C or S

SEQ ID NO: 92770 - protein, 22 aa, Artificial Sequence
  Cyclic GFR-binding peptide
KMSAISILYLDENKNVVLKNYQ

SEQ ID NO: 92771 - protein, 33 aa, Artificial Sequence
  Cyclic GFR-binding peptide
  MOD_RES (6), (7): Xaa is C or S
KASKAXXVPTKLSAISILYLDKGVVTYLKNYQG

SEQ ID NO: 92772 - protein, 30 aa, Artificial Sequence
  Cyclic GFR-binding peptide
  MOD_RES (27), (29): Xaa is C or S
TSAISMLYLDNGRVLLLKNYQMIVEEXGXL

SEQ ID NO: 92773 - protein, 34 aa, Artificial Sequence
  Cyclic GFR-binding peptide
  MOD_RES (31), (33): Xaa is C or S
PTKMSAISMLYLNDKQQIILKNYQGMVVDRXGXS

SEQ ID NO: 92774 - protein, 31 aa, Artificial Sequence
  Cyclic GFR-binding peptide
  MOD_RES (30), (30): Xaa is C or S
TKMSAISMLYLNDKQQIILKNYQGMVVDRXG

SEQ ID NO: 92775 - protein, 28 aa, Artificial Sequence
  Cyclic GFR-binding peptide
  MOD_RES (28), (28): Xaa is C or S
MSAISILYLDENKNVVLKNYQNMTVESX

SEQ ID NO: 92776 - protein, 34 aa, Artificial Sequence; identical to SEQ ID NO: 38024
  Cyclic GFR-binding peptide
  MOD_RES (2), (3): Xaa is C or S

SEQ ID NO: 92777 - protein, 34 aa, Artificial Sequence; identical to SEQ ID NO: 38026
  Cyclic GFR-binding peptide
  MOD_RES (2), (3): Xaa is C or S

SEQ ID NO: 92778 - protein, 37 aa, Artificial Sequence; identical to SEQ ID NO: 38028
  Cyclic GFR-binding peptide
  MOD_RES (4), (5), (37): Xaa is C or S

SEQ ID NO: 92779 - protein, 32 aa, Artificial Sequence
  Cyclic GFR-binding peptide
  MOD_RES (29), (31): Xaa is C or S
VKTSAISMLYLDNGRVLLLKNYQMIVEEXGXL

SEQ ID NO: 92780 - protein, 31 aa, Artificial Sequence
  Cyclic GFR-binding peptide
  MOD_RES (29), (31): Xaa is C or S
KLSAISILYLDKGVVTYLKNYQGMAVSEXGX

SEQ ID NO: 92781 - protein, 39 aa, Artificial Sequence; identical to SEQ ID NO: 38030
  Cyclic GFR-binding peptide
  MOD_RES (6), (7), (39): Xaa is C or S

SEQ ID NO: 92782 - protein, 39 aa, Artificial Sequence; identical to SEQ ID NO: 38032
  Cyclic GFR-binding peptide
  MOD_RES (4), (5), (37), (39): Xaa is C or S

SEQ ID NO: 92783 - protein, 24 aa, Artificial Sequence
  Cyclic GFR-binding peptide
SAISMLYLDNGRVLLLKNYQMIVE

SEQ ID NO: 92784 - protein, 39 aa, Artificial Sequence; identical to SEQ ID NO: 38035
  Cyclic GFR-binding peptide
  MOD_RES (5), (6), (38): Xaa is C or S

SEQ ID NO: 92785 - protein, 26 aa, Artificial Sequence
  Cyclic GFR-binding peptide
SAISILYLDAANNVVLKNYQDMVVEA

SEQ ID NO: 92786 - protein, 30 aa, Artificial Sequence
  Cyclic GFR-binding peptide
  MOD_RES (27), (29): Xaa is C or S
SAISMLYLNDKQQIILKNYQGMVVDRXGXS

SEQ ID NO: 92787 - protein, 34 aa, Artificial Sequence
  Cyclic GFR-binding peptide
  MOD_RES (4), (5): Xaa is C or S
PSTXXAPVKTSAISMLYLDNGRVLLLKNYQMIVE

SEQ ID NO: 92788 - protein, 38 aa, Artificial Sequence; identical to SEQ ID NO: 38042
  Cyclic GFR-binding peptide
  MOD_RES (6), (7): Xaa is C or S

SEQ ID NO: 92789 - protein, 33 aa, Artificial Sequence
  Cyclic GFR-binding peptide
  MOD_RES (5), (6): Xaa is C or S
IPEPXXVPEKMSAISILYLDENKNVVLKNYQNM

SEQ ID NO: 92790 - protein, 30 aa, Artificial Sequence
  Cyclic GFR-binding peptide
  MOD_RES (2), (3): Xaa is C or S
SXXVPARLSAISILYLDAANNVVLKNYQDM

SEQ ID NO: 92791 - protein, 30 aa, Artificial Sequence
  Cyclic GFR-binding peptide
  MOD_RES (30), (30): Xaa is C or S
EKMSAISILYLDENKNVVLKNYQNMTVESX

SEQ ID NO: 92792 - protein, 30 aa, Artificial Sequence
  Cyclic GFR-binding peptide
  MOD_RES (30), (30): Xaa is C or S
TKMSAISMLYLNDKQQIILKNYQGMVVDRX

SEQ ID NO: 92793 - protein, 33 aa, Artificial Sequence
  Cyclic GFR-binding peptide
  MOD_RES (30), (32): Xaa is C or S
EKMSAISILYLDENKNVVLKNYQNMTVESXAXR

SEQ ID NO: 92794 - protein, 38 aa, Artificial Sequence; identical to SEQ ID NO: 38049
  Cyclic GFR-binding peptide
  MOD_RES (3), (4), (35), (37): Xaa is C or S

SEQ ID NO: 92795 - protein, 33 aa, Artificial Sequence
  Cyclic GFR-binding peptide
  MOD_RES (5), (6): Xaa is C or S
APASXXVPARLSAISILYLDAANNVVLKNYQDM

SEQ ID NO: 92796 - protein, 33 aa, Artificial Sequence; identical to SEQ ID NO: 38050
  Cyclic GFR-binding peptide
  MOD_RES (32), (32): Xaa is C or S

SEQ ID NO: 92797 - protein, 35 aa, Artificial Sequence
  Cyclic GFR-binding peptide
  MOD_RES (6), (7): Xaa is C or S
AAPASXXVPARLSAISILYLDAANNVVLKNYQDMV

SEQ ID NO: 92798 - protein, 20 aa, Artificial Sequence
  Cyclic GFR-binding peptide
SAISMLYLDNGRVLLLKNYQ

SEQ ID NO: 92799 - protein, 30 aa, Artificial Sequence
  Cyclic GFR-binding peptide
  MOD_RES (1), (2): Xaa is C or S
XXAPVKTSAISMLYLDNGRVLLLKNYQMIV

SEQ ID NO: 92800 - protein, 30 aa, Artificial Sequence
  Cyclic GFR-binding peptide
  MOD_RES (3), (4): Xaa is C or S
KAXXVPTKLSAISILYLDKGVVTYLKNYQG

SEQ ID NO: 92801 - protein, 35 aa, Artificial Sequence; identical to SEQ ID NO: 38060
  Cyclic GFR-binding peptide
  MOD_RES (1), (2), (34): Xaa is C or S

SEQ ID NO: 92802 - protein, 33 aa, Artificial Sequence
  Cyclic GFR-binding peptide
  MOD_RES (4), (5): Xaa is C or S
SKAXXVPTKLSAISILYLDKGVVTYLKNYQGMA

SEQ ID NO: 92803 - protein, 33 aa, Artificial Sequence; identical to SEQ ID NO: 38062
  Cyclic GFR-binding peptide
  MOD_RES (32), (32): Xaa is C or S

SEQ ID NO: 92804 - protein, 31 aa, Artificial Sequence
  Cyclic GFR-binding peptide
  MOD_RES (30), (30): Xaa is C or S
ARLSAISILYLDAANNVVLKNYQDMVVEAXG

SEQ ID NO: 92805 - protein, 31 aa, Artificial Sequence
  Cyclic GFR-binding peptide
  MOD_RES (3), (4): Xaa is C or S
STXXAPVKTSAISMLYLDNGRVLLLKNYQMI

SEQ ID NO: 92806 - protein, 27 aa, Artificial Sequence
  Cyclic GFR-binding peptide
  MOD_RES (27), (27): Xaa is C or S
SAISILYLDENKNVVLKNYQNMTVESX

SEQ ID NO: 92807 - protein, 28 aa, Artificial Sequence
  Cyclic GFR-binding peptide
KMSAISILYLDENKNVVLKNYQNMTVES

SEQ ID NO: 92808 - protein, 25 aa, Artificial Sequence
  Cyclic GFR-binding peptide
VPEKMSAISILYLDENKNVVLKNYQ

SEQ ID NO: 92809 - protein, 39 aa, Artificial Sequence; identical to SEQ ID NO: 38067
  Cyclic GFR-binding peptide
  MOD_RES (3), (4), (36), (38): Xaa is C or S

SEQ ID NO: 92810 - protein, 29 aa, Artificial Sequence
  Cyclic GFR-binding peptide
  MOD_RES (1), (1): Xaa is C or S
XTPTKMSAISMLYLNDKQQIILKNYQGMV

SEQ ID NO: 92811 - protein, 22 aa, Artificial Sequence
  Cyclic GFR-binding peptide
LSAISILYLDKGVVTYLKNYQG

SEQ ID NO: 92812 - protein, 28 aa, Artificial Sequence
  Cyclic GFR-binding peptide
TPTKMSAISMLYLNDKQQIILKNYQGMV

SEQ ID NO: 92813 - protein, 29 aa, Artificial Sequence
  Cyclic GFR-binding peptide
  MOD_RES (1), (2): Xaa is C or S
XXVPARLSAISILYLDAANNVVLKNYQDM

SEQ ID NO: 92814 - protein, 36 aa, Artificial Sequence; identical to SEQ ID NO: 38075
  Cyclic GFR-binding peptide
  MOD_RES (5), (6): Xaa is C or S

SEQ ID NO: 92815 - protein, 31 aa, Artificial Sequence; identical to SEQ ID NO: 38074
  Cyclic GFR-binding peptide

SEQ ID NO: 92816 - protein, 31 aa, Artificial Sequence
  Cyclic GFR-binding peptide
  MOD_RES (31), (31): Xaa is C or S
PEKMSAISILYLDENKNVVLKNYQNMTVESX

SEQ ID NO: 92817 - protein, 27 aa, Artificial Sequence
  Cyclic GFR-binding peptide
  MOD_RES (27), (27): Xaa is C or S
TSAISMLYLDNGRVLLLKNYQMIVEEX

SEQ ID NO: 92818 - protein, 39 aa, Artificial Sequence; identical to SEQ ID NO: 38080
  Cyclic GFR-binding peptide
  MOD_RES (6), (7), (39): Xaa is C or S

SEQ ID NO: 92819 - protein, 32 aa, Artificial Sequence
  Cyclic GFR-binding peptide
  MOD_RES (4), (5): Xaa is C or S
PSTXXAPVKTSAISMLYLDNGRVLLLKNYQMI

SEQ ID NO: 92820 - protein, 36 aa, Artificial Sequence
  Cyclic GFR-binding peptide
  MOD_RES (6), (7): Xaa is C or S
RVPSTXXAPVKTSAISMLYLDNGRVLLLKNYQMIVE

SEQ ID NO: 92821 - protein, 32 aa, Artificial Sequence; identical to SEQ ID NO: 38083
  Cyclic GFR-binding peptide
  MOD_RES (32), (32): Xaa is C or S

SEQ ID NO: 92822 - protein, 26 aa, Artificial Sequence
  Cyclic GFR-binding peptide
VPTKLSAISILYLDKGVVTYLKNYQG

SEQ ID NO: 92823 - protein, 34 aa, Artificial Sequence; identical to SEQ ID NO: 38086
  Cyclic GFR-binding peptide
  MOD_RES (3), (4): Xaa is C or S

SEQ ID NO: 92824 - protein, 27 aa, Artificial Sequence
  Cyclic GFR-binding peptide
KTSAISMLYLDNGRVLLLKNYQMIVEE

SEQ ID NO: 92825 - protein, 29 aa, Artificial Sequence
  Cyclic GFR-binding peptide
  MOD_RES (1), (2): Xaa is C or S
XXVPEKMSAISILYLDENKNVVLKNYQNM

SEQ ID NO: 92826 - protein, 25 aa, Artificial Sequence
  Cyclic GFR-binding peptide
TPTKMSAISMLYLNDKQQIILKNYQ

SEQ ID NO: 92827 - protein, 35 aa, Artificial Sequence; identical to SEQ ID NO: 38090
  Cyclic GFR-binding peptide
  MOD_RES (1), (2), (34): Xaa is C or S

SEQ ID NO: 92828 - protein, 36 aa, Artificial Sequence; identical to SEQ ID NO: 38093
  Cyclic GFR-binding peptide
  MOD_RES (5), (6): Xaa is C or S

SEQ ID NO: 92829 - protein, 24 aa, Artificial Sequence
  Cyclic GFR-binding peptide
LSAISILYLDKGVVTYLKNYQGMA

SEQ ID NO: 92830 - protein, 37 aa, Artificial Sequence; identical to SEQ ID NO: 38095
  Cyclic GFR-binding peptide
  MOD_RES (5), (6): Xaa is C or S

SEQ ID NO: 92831 - protein, 26 aa, Artificial Sequence
  Cyclic GFR-binding peptide
LSAISILYLDAANNVVLKNYQDMVVE

SEQ ID NO: 92832 - protein, 21 aa, Artificial Sequence
  Cyclic GFR-binding peptide
SAISMLYLDNGRVLLLKNYQM

SEQ ID NO: 92833 - protein, 38 aa, Artificial Sequence; identical to SEQ ID NO: 38097
  Cyclic GFR-binding peptide
  MOD_RES (4), (5), (37): Xaa is C or S

SEQ ID NO: 92834 - protein, 30 aa, Artificial Sequence
  Cyclic GFR-binding peptide
  MOD_RES (1), (1): Xaa is C or S
XVPTKLSAISILYLDKGVVTYLKNYQGMAV

SEQ ID NO: 92835 - protein, 31 aa, Artificial Sequence
  Cyclic GFR-binding peptide
  MOD_RES (3), (4): Xaa is C or S
EPXXVPEKMSAISILYLDENKNVVLKNYQNM

SEQ ID NO: 92836 - protein, 33 aa, Artificial Sequence
  Cyclic GFR-binding peptide
  MOD_RES (31), (33): Xaa is C or S
PTKMSAISMLYLNDKQQIILKNYQGMVVDRXGX

SEQ ID NO: 92837 - protein, 26 aa, Artificial Sequence
  Cyclic GFR-binding peptide
PEKMSAISILYLDENKNVVLKNYQNM

SEQ ID NO: 92838 - protein, 37 aa, Artificial Sequence; identical to SEQ ID NO: 38101
  Cyclic GFR-binding peptide
  MOD_RES (2), (3), (35), (37): Xaa is C or S

SEQ ID NO: 92839 - protein, 32 aa, Artificial Sequence
  Cyclic GFR-binding peptide
  MOD_RES (4), (5): Xaa is C or S
PEPXXVPEKMSAISILYLDENKNVVLKNYQNM

SEQ ID NO: 92840 - protein, 37 aa, Artificial Sequence; identical to SEQ ID NO: 38103
  Cyclic GFR-binding peptide
  MOD_RES (4), (5), (37): Xaa is C or S

SEQ ID NO: 92841 - protein, 41 aa, Artificial Sequence; identical to SEQ ID NO: 38104
  Cyclic GFR-binding peptide
  MOD_RES (6), (7), (39), (41): Xaa is C or S

SEQ ID NO: 92842 - protein, 22 aa, Artificial Sequence
  Cyclic GFR-binding peptide
TSAISMLYLDNGRVLLLKNYQM

SEQ ID NO: 92843 - protein, 27 aa, Artificial Sequence
  Cyclic GFR-binding peptide
EKMSAISILYLDENKNVVLKNYQNMTV

SEQ ID NO: 92844 - protein, 31 aa, Artificial Sequence
  Cyclic GFR-binding peptide
  MOD_RES (4), (5): Xaa is C or S
AGPXXTPTKMSAISMLYLNDKQQIILKNYQG

SEQ ID NO: 92845 - protein, 28 aa, Artificial Sequence
  Cyclic GFR-binding peptide
  MOD_RES (1), (1): Xaa is C or S
XVPARLSAISILYLDAANNVVLKNYQDM

SEQ ID NO: 92846 - protein, 32 aa, Artificial Sequence; identical to SEQ ID NO: 38108
  Cyclic GFR-binding peptide
  MOD_RES (1), (2): Xaa is C or S

SEQ ID NO: 92847 - protein, 31 aa, Artificial Sequence; identical to SEQ ID NO: 38112
  Cyclic GFR-binding peptide

SEQ ID NO: 92848 - protein, 28 aa, Artificial Sequence
  Cyclic GFR-binding peptide
VPEKMSAISILYLDENKNVVLKNYQNMT

SEQ ID NO: 92849 - protein, 35 aa, Artificial Sequence; identical to SEQ ID NO: 38113
  Cyclic GFR-binding peptide
  MOD_RES (4), (5): Xaa is C or S

SEQ ID NO: 92850 - protein, 33 aa, Artificial Sequence
  Cyclic GFR-binding peptide
  MOD_RES (6), (7): Xaa is C or S
AAPASXXVPARLSAISILYLDAANNVVLKNYQD

SEQ ID NO: 92851 - protein, 23 aa, Artificial Sequence
  Cyclic GFR-binding peptide
RLSAISILYLDAANNVVLKNYQD

SEQ ID NO: 92852 - protein, 34 aa, Artificial Sequence; identical to SEQ ID NO: 38120
  Cyclic GFR-binding peptide
  MOD_RES (3), (4): Xaa is C or S

SEQ ID NO: 92853 - protein, 30 aa, Artificial Sequence
  Cyclic GFR-binding peptide
  MOD_RES (2), (3): Xaa is C or S
TXXAPVKTSAISMLYLDNGRVLLLKNYQMI

SEQ ID NO: 92854 - protein, 41 aa, Artificial Sequence; identical to SEQ ID NO: 38121
  Cyclic GFR-binding peptide
  MOD_RES (5), (6), (38), (40): Xaa is C or S

SEQ ID NO: 92855 - protein, 33 aa, Artificial Sequence; identical to SEQ ID NO: 38122
  Cyclic GFR-binding peptide
  MOD_RES (1), (33): Xaa is C or S

SEQ ID NO: 92856 - protein, 35 aa, Artificial Sequence; identical to SEQ ID NO: 38123
  Cyclic GFR-binding peptide
  MOD_RES (1), (33), (35): Xaa is C or S

SEQ ID NO: 92857 - protein, 31 aa, Artificial Sequence
  Cyclic GFR-binding peptide
  MOD_RES (5), (6): Xaa is C or S
ASKAXXVPTKLSAISILYLDKGVVTYLKNYQ

SEQ ID NO: 92858 - protein, 25 aa, Artificial Sequence
  Cyclic GFR-binding peptide
SAISILYLDENKNVVLKNYQNMTVE

SEQ ID NO: 92859 - protein, 30 aa, Artificial Sequence
  Cyclic GFR-binding peptide
  MOD_RES (29), (29): Xaa is C or S
KMSAISMLYLNDKQQIILKNYQGMVVDRXG

SEQ ID NO: 92860 - protein, 22 aa, Artificial Sequence
  Cyclic GFR-binding peptide
KTSAISMLYLDNGRVLLLKNYQ

SEQ ID NO: 92861 - protein, 34 aa, Artificial Sequence; identical to SEQ ID NO: 38126
  Cyclic GFR-binding peptide
  MOD_RES (1), (2), (34): Xaa is C or S

SEQ ID NO: 92862 - protein, 25 aa, Artificial Sequence
  Cyclic GFR-binding peptide
RLSAISILYLDAANNVVLKNYQDMV

SEQ ID NO: 92863 - protein, 26 aa, Artificial Sequence
  Cyclic GFR-binding peptide
SAISILYLDENKNVVLKNYQNMTVES

SEQ ID NO: 92864 - protein, 28 aa, Artificial Sequence
  Cyclic GFR-binding peptide
PTKLSAISILYLDKGVVTYLKNYQGMAV

SEQ ID NO: 92865 - protein, 37 aa, Artificial Sequence; identical to SEQ ID NO: 38131
  Cyclic GFR-binding peptide
  MOD_RES (6), (7): Xaa is C or S

SEQ ID NO: 92866 - protein, 27 aa, Artificial Sequence
  Cyclic GFR-binding peptide
KLSAISILYLDKGVVTYLKNYQGMAVS

SEQ ID NO: 92867 - protein, 33 aa, Artificial Sequence; identical to SEQ ID NO: 38133
  Cyclic GFR-binding peptide
  MOD_RES (2), (3): Xaa is C or S

SEQ ID NO: 92868 - protein, 28 aa, Artificial Sequence
  Cyclic GFR-binding peptide
  MOD_RES (1), (1): Xaa is C or S
XVPEKMSAISILYLDENKNVVLKNYQNM

SEQ ID NO: 92869 - protein, 32 aa, Artificial Sequence
  Cyclic GFR-binding peptide
  MOD_RES (2), (3): Xaa is C or S
AXXVPTKLSAISILYLDKGVVTYLKNYQGMAV

SEQ ID NO: 92870 - protein, 24 aa, Artificial Sequence
  Cyclic GFR-binding peptide
EKMSAISILYLDENKNVVLKNYQN

SEQ ID NO: 92871 - protein, 31 aa, Artificial Sequence
  Cyclic GFR-binding peptide
  MOD_RES (31), (31): Xaa is C or S
PTKMSAISMLYLNDKQQIILKNYQGMVVDRX

SEQ ID NO: 92872 - protein, 32 aa, Artificial Sequence
  Cyclic GFR-binding peptide
  MOD_RES (6), (7): Xaa is C or S
RVPSTXXAPVKTSAISMLYLDNGRVLLLKNYQ

SEQ ID NO: 92873 - protein, 27 aa, Artificial Sequence
  Cyclic GFR-binding peptide
  MOD_RES (1), (1): Xaa is C or S
XVPTKLSAISILYLDKGVVTYLKNYQG

SEQ ID NO: 92874 - protein, 23 aa, Artificial Sequence
  Cyclic GFR-binding peptide
MSAISILYLDENKNVVLKNYQNM

SEQ ID NO: 92875 - protein, 25 aa, Artificial Sequence
  Cyclic GFR-binding peptide
MSAISMLYLNDKQQIILKNYQGMVV

SEQ ID NO: 92876 - protein, 33 aa, Artificial Sequence; identical to SEQ ID NO: 38141
  Cyclic GFR-binding peptide
  MOD_RES (32), (32): Xaa is C or S

SEQ ID NO: 92877 - protein, 28 aa, Artificial Sequence
  Cyclic GFR-binding peptide
  MOD_RES (28), (28): Xaa is C or S
LSAISILYLDKGVVTYLKNYQGMAVSEX

SEQ ID NO: 92878 - protein, 34 aa, Artificial Sequence
  Cyclic GFR-binding peptide
  MOD_RES (6), (7): Xaa is C or S
HVPKPXXAPTKLSAISVLYLDDSSNVILKNYQNM

SEQ ID NO: 92879 - protein, 32 aa, Artificial Sequence
  Cyclic GFR-binding peptide
  MOD_RES (3), (4): Xaa is C or S
STXXAPVKTSAISMLYLDNGRVLLLKNYQMIV

SEQ ID NO: 92880 - protein, 32 aa, Artificial Sequence
  Cyclic GFR-binding peptide
  MOD_RES (3), (4): Xaa is C or S
EPXXVPEKMSAISILYLDENKNVVLKNYQNMT

SEQ ID NO: 92881 - protein, 31 aa, Artificial Sequence
  Cyclic GFR-binding peptide
  MOD_RES (28), (30): Xaa is C or S
LSAISILYLDKGVVTYLKNYQGMAVSEXGXR

SEQ ID NO: 92882 - protein, 21 aa, Artificial Sequence
  Cyclic GFR-binding peptide
MSAISMLYLNDKQQIILKNYQ

SEQ ID NO: 92883 - protein, 27 aa, Artificial Sequence
  Cyclic GFR-binding peptide
PVKTSAISMLYLDNGRVLLLKNYQMIV

SEQ ID NO: 92884 - protein, 34 aa, Artificial Sequence
  Cyclic GFR-binding peptide
  MOD_RES (4), (5): Xaa is C or S
PEPXXVPEKMSAISILYLDENKNVVLKNYQNMTV

SEQ ID NO: 92885 - protein, 37 aa, Artificial Sequence; identical to SEQ ID NO: 38150
  Cyclic GFR-binding peptide
  MOD_RES (3), (4), (35), (37): Xaa is C or S

SEQ ID NO: 92886 - protein, 31 aa, Artificial Sequence; identical to SEQ ID NO: 38151
  Cyclic GFR-binding peptide
  MOD_RES (1), (1): Xaa is C or S

SEQ ID NO: 92887 - protein, 35 aa, Artificial Sequence; identical to SEQ ID NO: 38152
  Cyclic GFR-binding peptide
  MOD_RES (3), (4), (35): Xaa is C or S

SEQ ID NO: 92888 - protein, 26 aa, Artificial Sequence
  Cyclic GFR-binding peptide
KLSAISILYLDKGVVTYLKNYQGMAV

SEQ ID NO: 92889 - protein, 36 aa, Artificial Sequence
  Cyclic GFR-binding peptide
  MOD_RES (6), (7): Xaa is C or S
KASKAXXVPTKLSAISILYLDKGVVTYLKNYQGMAV

SEQ ID NO: 92890 - protein, 35 aa, Artificial Sequence; identical to SEQ ID NO: 38156
  Cyclic GFR-binding peptide
  MOD_RES (2), (3), (34): Xaa is C or S

SEQ ID NO: 92891 - protein, 24 aa, Artificial Sequence
  Cyclic GFR-binding peptide
MSAISMLYLNDKQQIILKNYQGMV

SEQ ID NO: 92892 - protein, 35 aa, Artificial Sequence
  Cyclic GFR-binding peptide
  MOD_RES (5), (6): Xaa is C or S
APASXXVPARLSAISILYLDAANNVVLKNYQDMVV

SEQ ID NO: 92893 - protein, 39 aa, Artificial Sequence; identical to SEQ ID NO: 38158
  Cyclic GFR-binding peptide
  MOD_RES (5), (6), (37), (39): Xaa is C or S

SEQ ID NO: 92894 - protein, 27 aa, Artificial Sequence
  Cyclic GFR-binding peptide
VPEKMSAISILYLDENKNVVLKNYQNM

SEQ ID NO: 92895 - protein, 32 aa, Artificial Sequence
  Cyclic GFR-binding peptide
  MOD_RES (5), (6): Xaa is C or S
IPEPXXVPEKMSAISILYLDENKNVVLKNYQN

SEQ ID NO: 92896 - protein, 34 aa, Artificial Sequence
  Cyclic GFR-binding peptide
  MOD_RES (6), (7): Xaa is C or S
KASKAXXVPTKLSAISILYLDKGVVTYLKNYQGM

SEQ ID NO: 92897 - protein, 39 aa, Artificial Sequence; identical to SEQ ID NO: 38165
  Cyclic GFR-binding peptide
  MOD_RES (6), (7), (39): Xaa is C or S

SEQ ID NO: 92898 - protein, 33 aa, Artificial Sequence; identical to SEQ ID NO: 38166
  Cyclic GFR-binding peptide
  MOD_RES (1), (33): Xaa is C or S

SEQ ID NO: 92899 - protein, 28 aa, Artificial Sequence
  Cyclic GFR-binding peptide
PTKMSAISMLYLNDKQQIILKNYQGMVV

SEQ ID NO: 92900 - protein, 29 aa, Artificial Sequence
  Cyclic GFR-binding peptide
  MOD_RES (29), (29): Xaa is C or S
KMSAISILYLDENKNVVLKNYQNMTVESX

SEQ ID NO: 92901 - protein, 29 aa, Artificial Sequence
  Cyclic GFR-binding peptide
  MOD_RES (26), (28): Xaa is C or S
SAISMLYLDNGRVLLLKNYQMIVEEXGXL

SEQ ID NO: 92902 - protein, 31 aa, Artificial Sequence
  Cyclic GFR-binding peptide
  MOD_RES (4), (5): Xaa is C or S
PASXXVPARLSAISILYLDAANNVVLKNYQD

SEQ ID NO: 92903 - protein, 28 aa, Artificial Sequence
  Cyclic GFR-binding peptide
  MOD_RES (27), (27): Xaa is C or S
SAISMLYLNDKQQIILKNYQGMVVDRXG

SEQ ID NO: 92904 - protein, 27 aa, Artificial Sequence
  Cyclic GFR-binding peptide
KMSAISILYLDENKNVVLKNYQNMTVE

SEQ ID NO: 92905 - protein, 25 aa, Artificial Sequence
  Cyclic GFR-binding peptide
TSAISMLYLDNGRVLLLKNYQMIVE

SEQ ID NO: 92906 - protein, 34 aa, Artificial Sequence; identical to SEQ ID NO: 38173
  Cyclic GFR-binding peptide
  MOD_RES (32), (34): Xaa is C or S

SEQ ID NO: 92907 - protein, 28 aa, Artificial Sequence
  Cyclic GFR-binding peptide
  MOD_RES (1), (2): Xaa is C or S
XXVPTKLSAISILYLDKGVVTYLKNYQG

SEQ ID NO: 92908 - protein, 35 aa, Artificial Sequence; identical to SEQ ID NO: 38175
  Cyclic GFR-binding peptide
  MOD_RES (1), (2), (34): Xaa is C or S

SEQ ID NO: 92909 - protein, 32 aa, Artificial Sequence
  Cyclic GFR-binding peptide
  MOD_RES (4), (5): Xaa is C or S
SKAXXVPTKLSAISILYLDKGVVTYLKNYQGM

SEQ ID NO: 92910 - protein, 38 aa, Artificial Sequence; identical to SEQ ID NO: 38178
  Cyclic GFR-binding peptide
  MOD_RES (6), (7): Xaa is C or S

SEQ ID NO: 92911 - protein, 35 aa, Artificial Sequence; identical to SEQ ID NO: 38179
  Cyclic GFR-binding peptide
  MOD_RES (1), (2), (34): Xaa is C or S

SEQ ID NO: 92912 - protein, 35 aa, Artificial Sequence; identical to SEQ ID NO: 38180
  Cyclic GFR-binding peptide
  MOD_RES (32), (34): Xaa is C or S

SEQ ID NO: 92913 - protein, 24 aa, Artificial Sequence
  Cyclic GFR-binding peptide
LSAISILYLDAANNVVLKNYQDMV

SEQ ID NO: 92914 - protein, 25 aa, Artificial Sequence
  Cyclic GFR-binding peptide
PEKMSAISILYLDENKNVVLKNYQN

SEQ ID NO: 92915 - protein, 31 aa, Artificial Sequence
  Cyclic GFR-binding peptide
  MOD_RES (31), (31): Xaa is C or S
PARLSAISILYLDAANNVVLKNYQDMVVEAX

SEQ ID NO: 92916 - protein, 29 aa, Artificial Sequence
  Cyclic GFR-binding peptide
PEKMSAISILYLDENKNVVLKNYQNMTVE

SEQ ID NO: 92917 - protein, 35 aa, Artificial Sequence
  Cyclic GFR-binding peptide
  MOD_RES (5), (6): Xaa is C or S
SAGPXXTPTKMSAISMLYLNDKQQIILKNYQGMVV

SEQ ID NO: 92918 - protein, 36 aa, Artificial Sequence
  Cyclic GFR-binding peptide
  MOD_RES (6), (7): Xaa is C or S
AAPASXXVPARLSAISILYLDAANNVVLKNYQDMVV

SEQ ID NO: 92919 - protein, 23 aa, Artificial Sequence
  Cyclic GFR-binding peptide
TSAISMLYLDNGRVLLLKNYQMI

SEQ ID NO: 92920 - protein, 25 aa, Artificial Sequence
  Cyclic GFR-binding peptide
KMSAISMLYLNDKQQIILKNYQGMV

SEQ ID NO: 92921 - protein, 34 aa, Artificial Sequence
  Cyclic GFR-binding peptide
  MOD_RES (5), (6): Xaa is C or S
IPEPXXVPEKMSAISILYLDENKNVVLKNYQNMT

SEQ ID NO: 92922 - protein, 32 aa, Artificial Sequence
  Cyclic GFR-binding peptide
  MOD_RES (5), (6): Xaa is C or S
APASXXVPARLSAISILYLDAANNVVLKNYQD

SEQ ID NO: 92923 - protein, 33 aa, Artificial Sequence; identical to SEQ ID NO: 37719
  Cyclic GFR-binding peptide
  MOD_RES (1), (2): Xaa is C or S

SEQ ID NO: 92924 - protein, 28 aa, Artificial Sequence
  Cyclic GFR-binding peptide
  MOD_RES (26), (28): Xaa is C or S
SAISMLYLDNGRVLLLKNYQMIVEEXGX

SEQ ID NO: 92925 - protein, 33 aa, Artificial Sequence
  Cyclic GFR-binding peptide
  MOD_RES (3), (4): Xaa is C or S
GPXXTPTKMSAISMLYLNDKQQIILKNYQGMVV

SEQ ID NO: 92926 - protein, 32 aa, Artificial Sequence
  Cyclic GFR-binding peptide
  MOD_RES (6), (7): Xaa is C or S
HVPKPXXAPTKLSAISVLYLDDSSNVILKNYQ

SEQ ID NO: 92927 - protein, 33 aa, Artificial Sequence
  Cyclic GFR-binding peptide
  MOD_RES (6), (7): Xaa is C or S
GIPEPXXVPEKMSAISILYLDENKNVVLKNYQN

SEQ ID NO: 92928 - protein, 38 aa, Artificial Sequence; identical to SEQ ID NO: 37729
  Cyclic GFR-binding peptide
  MOD_RES (5), (6), (38): Xaa is C or S

SEQ ID NO: 92929 - protein, 29 aa, Artificial Sequence
  Cyclic GFR-binding peptide
PTKLSAISILYLDKGVVTYLKNYQGMAVS

SEQ ID NO: 92930 - protein, 33 aa, Artificial Sequence
  Cyclic GFR-binding peptide
  MOD_RES (3), (4): Xaa is C or S
STXXAPVKTSAISMLYLDNGRVLLLKNYQMIVE

SEQ ID NO: 92931 - protein, 28 aa, Artificial Sequence
  Cyclic GFR-binding peptide
EKMSAISILYLDENKNVVLKNYQNMTVE

SEQ ID NO: 92932 - protein, 34 aa, Artificial Sequence; identical to SEQ ID NO: 37731
  Cyclic GFR-binding peptide
  MOD_RES (1), (2), (34): Xaa is C or S

SEQ ID NO: 92933 - protein, 39 aa, Artificial Sequence; identical to SEQ ID NO: 37735
  Cyclic GFR-binding peptide
  MOD_RES (5), (6), (38): Xaa is C or S

SEQ ID NO: 92934 - protein, 23 aa, Artificial Sequence
  Cyclic GFR-binding peptide
TKLSAISILYLDKGVVTYLKNYQ

SEQ ID NO: 92935 - protein, 27 aa, Artificial Sequence
  Cyclic GFR-binding peptide
TPTKMSAISMLYLNDKQQIILKNYQGM

SEQ ID NO: 92936 - protein, 35 aa, Artificial Sequence; identical to SEQ ID NO: 37739
  Cyclic GFR-binding peptide
  MOD_RES (3), (4): Xaa is C or S

SEQ ID NO: 92937 - protein, 32 aa, Artificial Sequence
  Cyclic GFR-binding peptide
  MOD_RES (31), (31): Xaa is C or S
PARLSAISILYLDAANNVVLKNYQDMVVEAXG

SEQ ID NO: 92938 - protein, 24 aa, Artificial Sequence
  Cyclic GFR-binding peptide
SAISILYLDKGVVTYLKNYQGMAV

SEQ ID NO: 92939 - protein, 39 aa, Artificial Sequence; identical to SEQ ID NO: 37743
  Cyclic GFR-binding peptide
  MOD_RES (5), (6), (38): Xaa is C or S

SEQ ID NO: 92940 - protein, 28 aa, Artificial Sequence
  Cyclic GFR-binding peptide
TKLSAISILYLDKGVVTYLKNYQGMAVS

SEQ ID NO: 92941 - protein, 32 aa, Artificial Sequence
  Cyclic GFR-binding peptide
  MOD_RES (2), (3): Xaa is C or S
PXXVPEKMSAISILYLDENKNVVLKNYQNMTV

SEQ ID NO: 92942 - protein, 28 aa, Artificial Sequence
  Cyclic GFR-binding peptide
  MOD_RES (27), (27): Xaa is C or S
SAISILYLDKGVVTYLKNYQGMAVSEXG

SEQ ID NO: 92943 - protein, 29 aa, Artificial Sequence
  Cyclic GFR-binding peptide
  MOD_RES (27), (29): Xaa is C or S
SAISILYLDENKNVVLKNYQNMTVESXAX

SEQ ID NO: 92944 - protein, 40 aa, Artificial Sequence; identical to SEQ ID NO: 37747
  Cyclic GFR-binding peptide
  MOD_RES (6), (7), (39): Xaa is C or S

SEQ ID NO: 92945 - protein, 35 aa, Artificial Sequence; identical to SEQ ID NO: 37749
  Cyclic GFR-binding peptide
  MOD_RES (1), (33), (35): Xaa is C or S

SEQ ID NO: 92946 - protein, 27 aa, Artificial Sequence
  Cyclic GFR-binding peptide
PTKLSAISILYLDKGVVTYLKNYQGMA

SEQ ID NO: 92947 - protein, 34 aa, Artificial Sequence; identical to SEQ ID NO: 37751
  Cyclic GFR-binding peptide
  MOD_RES (2), (3): Xaa is C or S

SEQ ID NO: 92948 - protein, 31 aa, Artificial Sequence
  Cyclic GFR-binding peptide
  MOD_RES (29), (31): Xaa is C or S
KMSAISMLYLNDKQQIILKNYQGMVVDRXGX

SEQ ID NO: 92949 - protein, 25 aa, Artificial Sequence
  Cyclic GFR-binding peptide
KLSAISILYLDKGVVTYLKNYQGMA

SEQ ID NO: 92950 - protein, 34 aa, Artificial Sequence
  Cyclic GFR-binding peptide
  MOD_RES (5), (6): Xaa is C or S
APASXXVPARLSAISILYLDAANNVVLKNYQDMV

SEQ ID NO: 92951 - protein, 27 aa, Artificial Sequence
  Cyclic GFR-binding peptide
LSAISILYLDAANNVVLKNYQDMVVEA

SEQ ID NO: 92952 - protein, 26 aa, Artificial Sequence
  Cyclic GFR-binding peptide
SAISILYLDKGVVTYLKNYQGMAVSE

SEQ ID NO: 92953 - protein, 33 aa, Artificial Sequence
  Cyclic GFR-binding peptide
  MOD_RES (31), (33): Xaa is C or S
PTKLSAISILYLDKGVVTYLKNYQGMAVSEXGX

SEQ ID NO: 92954 - protein, 29 aa, Artificial Sequence
  Cyclic GFR-binding peptide
  MOD_RES (28), (28): Xaa is C or S
LSAISILYLDAANNVVLKNYQDMVVEAXG

SEQ ID NO: 92955 - protein, 33 aa, Artificial Sequence
  Cyclic GFR-binding peptide
  MOD_RES (6), (7): Xaa is C or S
GSAGPXXTPTKMSAISMLYLNDKQQIILKNYQG

SEQ ID NO: 92956 - protein, 30 aa, Artificial Sequence
  Cyclic GFR-binding peptide
  MOD_RES (1), (1): Xaa is C or S
XTPTKMSAISMLYLNDKQQIILKNYQGMVV

SEQ ID NO: 92957 - protein, 33 aa, Artificial Sequence
  Cyclic GFR-binding peptide
  MOD_RES (30), (32): Xaa is C or S
TKMSAISMLYLNDKQQIILKNYQGMVVDRXGXS

SEQ ID NO: 92958 - protein, 29 aa, Artificial Sequence
  Cyclic GFR-binding peptide
  MOD_RES (29), (29): Xaa is C or S
KMSAISMLYLNDKQQIILKNYQGMVVDRX

SEQ ID NO: 92959 - protein, 38 aa, Artificial Sequence; identical to SEQ ID NO: 37756
  Cyclic GFR-binding peptide
  MOD_RES (6), (7), (38): Xaa is C or S

SEQ ID NO: 92960 - protein, 30 aa, Artificial Sequence
  Cyclic GFR-binding peptide
  MOD_RES (28), (30): Xaa is C or S
MSAISILYLDENKNVVLKNYQNMTVESXAX

SEQ ID NO: 92961 - protein, 31 aa, Artificial Sequence
  Cyclic GFR-binding peptide
  MOD_RES (29), (31): Xaa is C or S
RLSAISILYLDAANNVVLKNYQDMVVEAXGX

SEQ ID NO: 92962 - protein, 36 aa, Artificial Sequence; identical to SEQ ID NO: 37757
  Cyclic GFR-binding peptide
  MOD_RES (1), (2), (34), (36): Xaa is C or S

SEQ ID NO: 92963 - protein, 30 aa, Artificial Sequence
  Cyclic GFR-binding peptide
  MOD_RES (4), (5): Xaa is C or S
PASXXVPARLSAISILYLDAANNVVLKNYQ

SEQ ID NO: 92964 - protein, 38 aa, Artificial Sequence; identical to SEQ ID NO: 37762
  Cyclic GFR-binding peptide
  MOD_RES (4), (5), (37): Xaa is C or S

SEQ ID NO: 92965 - protein, 34 aa, Artificial Sequence; identical to SEQ ID NO: 37763
  Cyclic GFR-binding peptide
  MOD_RES (1), (33): Xaa is C or S

SEQ ID NO: 92966 - protein, 29 aa, Artificial Sequence
  Cyclic GFR-binding peptide
  MOD_RES (28), (28): Xaa is C or S
MSAISILYLDENKNVVLKNYQNMTVESXA

SEQ ID NO: 92967 - protein, 24 aa, Artificial Sequence
  Cyclic GFR-binding peptide
KLSAISILYLDKGVVTYLKNYQGM

SEQ ID NO: 92968 - protein, 23 aa, Artificial Sequence
  Cyclic GFR-binding peptide
ARLSAISILYLDAANNVVLKNYQ

SEQ ID NO: 92969 - protein, 26 aa, Artificial Sequence
  Cyclic GFR-binding peptide
MSAISMLYLNDKQQIILKNYQGMVVD

SEQ ID NO: 92970 - protein, 28 aa, Artificial Sequence
  Cyclic GFR-binding peptide
KMSAISMLYLNDKQQIILKNYQGMVVDR

SEQ ID NO: 92971 - protein, 22 aa, Artificial Sequence
  Cyclic GFR-binding peptide
KMSAISMLYLNDKQQIILKNYQ

SEQ ID NO: 92972 - protein, 32 aa, Artificial Sequence; identical to SEQ ID NO: 37770
  Cyclic GFR-binding peptide
  MOD_RES (32), (32): Xaa is C or S

SEQ ID NO: 92973 - protein, 39 aa, Artificial Sequence; identical to SEQ ID NO: 37774
  Cyclic GFR-binding peptide
  MOD_RES (6), (7), (39): Xaa is C or S

SEQ ID NO: 92974 - protein, 30 aa, Artificial Sequence
  Cyclic GFR-binding peptide
  MOD_RES (27), (29): Xaa is C or S
SAISILYLDKGVVTYLKNYQGMAVSEXGXR

SEQ ID NO: 92975 - protein, 35 aa, Artificial Sequence; identical to SEQ ID NO: 37776
  Cyclic GFR-binding peptide
  MOD_RES (32), (34): Xaa is C or S

SEQ ID NO: 92976 - protein, 28 aa, Artificial Sequence
  Cyclic GFR-binding peptide
  MOD_RES (1), (2): Xaa is C or S
XXAPVKTSAISMLYLDNGRVLLLKNYQM

SEQ ID NO: 92977 - protein, 29 aa, Artificial Sequence
  Cyclic GFR-binding peptide
  MOD_RES (1), (1): Xaa is C or S
XVPEKMSAISILYLDENKNVVLKNYQNMT

SEQ ID NO: 92978 - protein, 31 aa, Artificial Sequence
  Cyclic GFR-binding peptide
  MOD_RES (30), (30): Xaa is C or S
PVKTSAISMLYLDNGRVLLLKNYQMIVEEXG

SEQ ID NO: 92979 - protein, 37 aa, Artificial Sequence; identical to SEQ ID NO: 37783
  Cyclic GFR-binding peptide
  MOD_RES (2), (3), (34), (36): Xaa is C or S

SEQ ID NO: 92980 - protein, 33 aa, Artificial Sequence
  Cyclic GFR-binding peptide
  MOD_RES (31), (33): Xaa is C or S
PEKMSAISILYLDENKNVVLKNYQNMTVESXAX

SEQ ID NO: 92981 - protein, 31 aa, Artificial Sequence
  Cyclic GFR-binding peptide
  MOD_RES (4), (5): Xaa is C or S
SKAXXVPTKLSAISILYLDKGVVTYLKNYQG

SEQ ID NO: 92982 - protein, 36 aa, Artificial Sequence; identical to SEQ ID NO: 37787
  Cyclic GFR-binding peptide
  MOD_RES (4), (5), (36): Xaa is C or S

SEQ ID NO: 92983 - protein, 41 aa, Artificial Sequence; identical to SEQ ID NO: 37790
  Cyclic GFR-binding peptide
  MOD_RES (6), (7), (38), (40): Xaa is C or S

SEQ ID NO: 92984 - protein, 36 aa, Artificial Sequence; identical to SEQ ID NO: 37791
  Cyclic GFR-binding peptide
  MOD_RES (5), (6): Xaa is C or S

SEQ ID NO: 92985 - protein, 33 aa, Artificial Sequence
  Cyclic GFR-binding peptide
  MOD_RES (5), (6): Xaa is C or S
ASKAXXVPTKLSAISILYLDKGVVTYLKNYQGM

SEQ ID NO: 92986 - protein, 34 aa, Artificial Sequence; identical to SEQ ID NO: 37794
  Cyclic GFR-binding peptide
  MOD_RES (32), (34): Xaa is C or S

SEQ ID NO: 92987 - protein, 30 aa, Artificial Sequence
  Cyclic GFR-binding peptide
  MOD_RES (1), (2): Xaa is C or S
XXVPTKLSAISILYLDKGVVTYLKNYQGMA

SEQ ID NO: 92988 - protein, 41 aa, Artificial Sequence; identical to SEQ ID NO: 37796
  Cyclic GFR-binding peptide
  MOD_RES (5), (6), (38), (40): Xaa is C or S

SEQ ID NO: 92989 - protein, 29 aa, Artificial Sequence
  Cyclic GFR-binding peptide
  MOD_RES (28), (28): Xaa is C or S
LSAISILYLDKGVVTYLKNYQGMAVSEXG

SEQ ID NO: 92990 - protein, 29 aa, Artificial Sequence
  Cyclic GFR-binding peptide
ARLSAISILYLDAANNVVLKNYQDMVVEA

SEQ ID NO: 92991 - protein, 28 aa, Artificial Sequence
  Cyclic GFR-binding peptide
  MOD_RES (1), (2): Xaa is C or S
XXVPARLSAISILYLDAANNVVLKNYQD

SEQ ID NO: 92992 - protein, 25 aa, Artificial Sequence
  Cyclic GFR-binding peptide
LSAISILYLDKGVVTYLKNYQGMAV

SEQ ID NO: 92993 - protein, 34 aa, Artificial Sequence
  Cyclic GFR-binding peptide
  MOD_RES (5), (6): Xaa is C or S
VPSTXXAPVKTSAISMLYLDNGRVLLLKNYQMIV

SEQ ID NO: 92994 - protein, 35 aa, Artificial Sequence; identical to SEQ ID NO: 37801
  Cyclic GFR-binding peptide
  MOD_RES (2), (3), (35): Xaa is C or S

SEQ ID NO: 92995 - protein, 32 aa, Artificial Sequence; identical to SEQ ID NO: 37802
  Cyclic GFR-binding peptide
  MOD_RES (1), (2): Xaa is C or S

SEQ ID NO: 92996 - protein, 32 aa, Artificial Sequence
  Cyclic GFR-binding peptide
  MOD_RES (29), (31): Xaa is C or S
KLSAISILYLDKGVVTYLKNYQGMAVSEXGXR

SEQ ID NO: 92997 - protein, 33 aa, Artificial Sequence; identical to SEQ ID NO: 37805
  Cyclic GFR-binding peptide
  MOD_RES (2), (3): Xaa is C or S

SEQ ID NO: 92998 - protein, 24 aa, Artificial Sequence
  Cyclic GFR-binding peptide
ARLSAISILYLDAANNVVLKNYQD

SEQ ID NO: 92999 - protein, 36 aa, Artificial Sequence; identical to SEQ ID NO: 37810
  Cyclic GFR-binding peptide
  MOD_RES (1), (2), (34), (36): Xaa is C or S

SEQ ID NO: 93000 - protein, 40 aa, Artificial Sequence; identical to SEQ ID NO: 37814
  Cyclic GFR-binding peptide
  MOD_RES (4), (5), (37), (39): Xaa is C or S

SEQ ID NO: 93001 - protein, 28 aa, Artificial Sequence
  Cyclic GFR-binding peptide
  MOD_RES (27), (27): Xaa is C or S
SAISILYLDAANNVVLKNYQDMVVEAXG

SEQ ID NO: 93002 - protein, 31 aa, Artificial Sequence
  Cyclic GFR-binding peptide
  MOD_RES (2), (3): Xaa is C or S
PXXTPTKMSAISMLYLNDKQQIILKNYQGMV

SEQ ID NO: 93003 - protein, 36 aa, Artificial Sequence; identical to SEQ ID NO: 37818
  Cyclic GFR-binding peptide
  MOD_RES (3), (4), (36): Xaa is C or S

SEQ ID NO: 93004 - protein, 29 aa, Artificial Sequence
  Cyclic GFR-binding peptide
  MOD_RES (3), (4): Xaa is C or S
EPXXVPEKMSAISILYLDENKNVVLKNYQ

SEQ ID NO: 93005 - protein, 30 aa, Artificial Sequence
  Cyclic GFR-binding peptide
  MOD_RES (1), (2): Xaa is C or S
XXVPARLSAISILYLDAANNVVLKNYQDMV

SEQ ID NO: 93006 - protein, 32 aa, Artificial Sequence; identical to SEQ ID NO: 37821
  Cyclic GFR-binding peptide
  MOD_RES (32), (32): Xaa is C or S

SEQ ID NO: 93007 - protein, 35 aa, Artificial Sequence
  Cyclic GFR-binding peptide
  MOD_RES (5), (6): Xaa is C or S
VPSTXXAPVKTSAISMLYLDNGRVLLLKNYQMIVE

SEQ ID NO: 93008 - protein, 25 aa, Artificial Sequence
  Cyclic GFR-binding peptide
PARLSAISILYLDAANNVVLKNYQD

SEQ ID NO: 93009 - protein, 39 aa, Artificial Sequence; identical to SEQ ID NO: 37825
  Cyclic GFR-binding peptide
  MOD_RES (3), (4), (36), (38): Xaa is C or S

SEQ ID NO: 93010 - protein, 36 aa, Artificial Sequence; identical to SEQ ID NO: 37829
  Cyclic GFR-binding peptide
  MOD_RES (3), (4), (36): Xaa is C or S

SEQ ID NO: 93011 - protein, 23 aa, Artificial Sequence
  Cyclic GFR-binding peptide
KMSAISMLYLNDKQQIILKNYQG

SEQ ID NO: 93012 - protein, 26 aa, Artificial Sequence
  Cyclic GFR-binding peptide
EKMSAISILYLDENKNVVLKNYQNMT

SEQ ID NO: 93013 - protein, 27 aa, Artificial Sequence
  Cyclic GFR-binding peptide
KMSAISMLYLNDKQQIILKNYQGMVVD

SEQ ID NO: 93014 - protein, 35 aa, Artificial Sequence; identical to SEQ ID NO: 37831
  Cyclic GFR-binding peptide
  MOD_RES (1), (33), (35): Xaa is C or S

SEQ ID NO: 93015 - protein, 31 aa, Artificial Sequence
  Cyclic GFR-binding peptide
  MOD_RES (2), (3): Xaa is C or S
SXXVPARLSAISILYLDAANNVVLKNYQDMV

SEQ ID NO: 93016 - protein, 27 aa, Artificial Sequence
  Cyclic GFR-binding peptide
  MOD_RES (27), (27): Xaa is C or S
SAISILYLDAANNVVLKNYQDMVVEAX

SEQ ID NO: 93017 - protein, 27 aa, Artificial Sequence
  Cyclic GFR-binding peptide
  MOD_RES (27), (27): Xaa is C or S
SAISMLYLNDKQQIILKNYQGMVVDRX

SEQ ID NO: 93018 - protein, 37 aa, Artificial Sequence; identical to SEQ ID NO: 37834
  Cyclic GFR-binding peptide
  MOD_RES (5), (6), (37): Xaa is C or S

SEQ ID NO: 93019 - protein, 29 aa, Artificial Sequence
  Cyclic GFR-binding peptide
TKLSAISILYLDKGVVTYLKNYQGMAVSE

SEQ ID NO: 93020 - protein, 24 aa, Artificial Sequence
  Cyclic GFR-binding peptide
KMSAISMLYLNDKQQIILKNYQGM

SEQ ID NO: 93021 - protein, 25 aa, Artificial Sequence
  Cyclic GFR-binding peptide
MSAISILYLDENKNVVLKNYQNMTV

SEQ ID NO: 93022 - protein, 27 aa, Artificial Sequence
  Cyclic GFR-binding peptide
  MOD_RES (1), (2): Xaa is C or S
XXTPTKMSAISMLYLNDKQQIILKNYQ

SEQ ID NO: 93023 - protein, 36 aa, Artificial Sequence; identical to SEQ ID NO: 37842
  Cyclic GFR-binding peptide
  MOD_RES (2), (3), (35): Xaa is C or S

SEQ ID NO: 93024 - protein, 29 aa, Artificial Sequence
  Cyclic GFR-binding peptide
  MOD_RES (28), (28): Xaa is C or S
KTSAISMLYLDNGRVLLLKNYQMIVEEXG

SEQ ID NO: 93025 - protein, 30 aa, Artificial Sequence
  Cyclic GFR-binding peptide
  MOD_RES (29), (29): Xaa is C or S
VKTSAISMLYLDNGRVLLLKNYQMIVEEXG

SEQ ID NO: 93026 - protein, 30 aa, Artificial Sequence
  Cyclic GFR-binding peptide
  MOD_RES (3), (4): Xaa is C or S
STXXAPVKTSAISMLYLDNGRVLLLKNYQM

SEQ ID NO: 93027 - protein, 27 aa, Artificial Sequence
  Cyclic GFR-binding peptide
  MOD_RES (1), (2): Xaa is C or S
XXVPARLSAISILYLDAANNVVLKNYQ

SEQ ID NO: 93028 - protein, 40 aa, Artificial Sequence; identical to SEQ ID NO: 37848
  Cyclic GFR-binding peptide
  MOD_RES (5), (6), (38), (40): Xaa is C or S

SEQ ID NO: 93029 - protein, 25 aa, Artificial Sequence
  Cyclic GFR-binding peptide
SAISILYLDKGVVTYLKNYQGMAVS

SEQ ID NO: 93030 - protein, 36 aa, Artificial Sequence; identical to SEQ ID NO: 37856
  Cyclic GFR-binding peptide
  MOD_RES (2), (3), (34), (36): Xaa is C or S

SEQ ID NO: 93031 - protein, 30 aa, Artificial Sequence
  Cyclic GFR-binding peptide
  MOD_RES (1), (1): Xaa is C or S
XAPVKTSAISMLYLDNGRVLLLKNYQMIVE

SEQ ID NO: 93032 - protein, 27 aa, Artificial Sequence
  Cyclic GFR-binding peptide
  MOD_RES (1), (2): Xaa is C or S
XXVPTKLSAISILYLDKGVVTYLKNYQ

SEQ ID NO: 93033 - protein, 31 aa, Artificial Sequence
  Cyclic GFR-binding peptide
  MOD_RES (28), (30): Xaa is C or S
LSAISILYLDAANNVVLKNYQDMVVEAXGXR

SEQ ID NO: 93034 - protein, 25 aa, Artificial Sequence
  Cyclic GFR-binding peptide
VKTSAISMLYLDNGRVLLLKNYQMI

SEQ ID NO: 93035 - protein, 37 aa, Artificial Sequence; identical to SEQ ID NO: 37858
  Cyclic GFR-binding peptide
  MOD_RES (1), (2), (34), (36): Xaa is C or S

SEQ ID NO: 93036 - protein, 29 aa, Artificial Sequence
  Cyclic GFR-binding peptide
  MOD_RES (1), (1): Xaa is C or S
XVPARLSAISILYLDAANNVVLKNYQDMV

SEQ ID NO: 93037 - protein, 23 aa, Artificial Sequence
  Cyclic GFR-binding peptide
MSAISMLYLNDKQQIILKNYQGM

SEQ ID NO: 93038 - protein, 29 aa, Artificial Sequence
  Cyclic GFR-binding peptide
  MOD_RES (29), (29): Xaa is C or S
KLSAISILYLDKGVVTYLKNYQGMAVSEX

SEQ ID NO: 93039 - protein, 38 aa, Artificial Sequence; identical to SEQ ID NO: 37865
  Cyclic GFR-binding peptide
  MOD_RES (5), (6), (37): Xaa is C or S

SEQ ID NO: 93040 - protein, 38 aa, Artificial Sequence; identical to SEQ ID NO: 37869
  Cyclic GFR-binding peptide
  MOD_RES (6), (7): Xaa is C or S

SEQ ID NO: 93041 - protein, 25 aa, Artificial Sequence
  Cyclic GFR-binding peptide
VPARLSAISILYLDAANNVVLKNYQ

SEQ ID NO: 93042 - protein, 38 aa, Artificial Sequence; identical to SEQ ID NO: 37872
  Cyclic GFR-binding peptide
  MOD_RES (2), (3), (35), (37): Xaa is C or S

SEQ ID NO: 93043 - protein, 34 aa, Artificial Sequence; identical to SEQ ID NO: 37874
  Cyclic GFR-binding peptide
  MOD_RES (1), (33): Xaa is C or S

SEQ ID NO: 93044 - protein, 24 aa, Artificial Sequence
  Cyclic GFR-binding peptide
TKLSAISILYLDKGVVTYLKNYQG

SEQ ID NO: 93045 - protein, 30 aa, Artificial Sequence
  Cyclic GFR-binding peptide
  MOD_RES (2), (3): Xaa is C or S
PXXVPEKMSAISILYLDENKNVVLKNYQNM

SEQ ID NO: 93046 - protein, 23 aa, Artificial Sequence
  Cyclic GFR-binding peptide
SAISMLYLNDKQQIILKNYQGMV

SEQ ID NO: 93047 - protein, 32 aa, Artificial Sequence
  Cyclic GFR-binding peptide
  MOD_RES (30), (32): Xaa is C or S
PVKTSAISMLYLDNGRVLLLKNYQMIVEEXGX

SEQ ID NO: 93048 - protein, 24 aa, Artificial Sequence
  Cyclic GFR-binding peptide
PEKMSAISILYLDENKNVVLKNYQ

SEQ ID NO: 93049 - protein, 27 aa, Artificial Sequence
  Cyclic GFR-binding peptide
  MOD_RES (1), (1): Xaa is C or S
XVPEKMSAISILYLDENKNVVLKNYQN

SEQ ID NO: 93050 - protein, 36 aa, Artificial Sequence; identical to SEQ ID NO: 37892
  Cyclic GFR-binding peptide
  MOD_RES (3), (4), (35): Xaa is C or S

SEQ ID NO: 93051 - protein, 29 aa, Artificial Sequence
  Cyclic GFR-binding peptide
PTKMSAISMLYLNDKQQIILKNYQGMVVD

SEQ ID NO: 93052 - protein, 31 aa, Artificial Sequence
  Cyclic GFR-binding peptide
  MOD_RES (1), (2): Xaa is C or S
XXAPVKTSAISMLYLDNGRVLLLKNYQMIVE

SEQ ID NO: 93053 - protein, 32 aa, Artificial Sequence
  Cyclic GFR-binding peptide
  MOD_RES (31), (31): Xaa is C or S
PTKMSAISMLYLNDKQQIILKNYQGMVVDRXG

SEQ ID NO: 93054 - protein, 35 aa, Artificial Sequence; identical to SEQ ID NO: 37899
  Cyclic GFR-binding peptide
  MOD_RES (3), (4): Xaa is C or S

SEQ ID NO: 93055 - protein, 25 aa, Artificial Sequence
  Cyclic GFR-binding peptide
TKLSAISILYLDKGVVTYLKNYQGM

SEQ ID NO: 93056 - protein, 34 aa, Artificial Sequence; identical to SEQ ID NO: 37900
  Cyclic GFR-binding peptide
  MOD_RES (1), (33): Xaa is C or S

SEQ ID NO: 93057 - protein, 22 aa, Artificial Sequence
  Cyclic GFR-binding peptide
LSAISILYLDAANNVVLKNYQD

SEQ ID NO: 93058 - protein, 29 aa, Artificial Sequence
  Cyclic GFR-binding peptide
  MOD_RES (3), (4): Xaa is C or S
ASXXVPARLSAISILYLDAANNVVLKNYQ

SEQ ID NO: 93059 - protein, 42 aa, Artificial Sequence; identical to SEQ ID NO: 37907
  Cyclic GFR-binding peptide
  MOD_RES (6), (7), (39), (41): Xaa is C or S

SEQ ID NO: 93060 - protein, 37 aa, Artificial Sequence; identical to SEQ ID NO: 37908
  Cyclic GFR-binding peptide
  MOD_RES (2), (3), (35), (37): Xaa is C or S

SEQ ID NO: 93061 - protein, 38 aa, Artificial Sequence; identical to SEQ ID NO: 37909
  Cyclic GFR-binding peptide
  MOD_RES (3), (4), (36), (38): Xaa is C or S

SEQ ID NO: 93062 - protein, 34 aa, Artificial Sequence
  Cyclic GFR-binding peptide
  MOD_RES (5), (6): Xaa is C or S
SAGPXXTPTKMSAISMLYLNDKQQIILKNYQGMV

SEQ ID NO: 93063 - protein, 28 aa, Artificial Sequence
  Cyclic GFR-binding peptide
RLSAISILYLDAANNVVLKNYQDMVVEA

SEQ ID NO: 93064 - protein, 24 aa, Artificial Sequence
  Cyclic GFR-binding peptide
PTKLSAISILYLDKGVVTYLKNYQ

SEQ ID NO: 93065 - protein, 39 aa, Artificial Sequence; identical to SEQ ID NO: 37914
  Cyclic GFR-binding peptide
  MOD_RES (4), (5), (37), (39): Xaa is C or S

SEQ ID NO: 93066 - protein, 26 aa, Artificial Sequence
  Cyclic GFR-binding peptide
PVKTSAISMLYLDNGRVLLLKNYQMI

SEQ ID NO: 93067 - protein, 34 aa, Artificial Sequence; identical to SEQ ID NO: 37916
  Cyclic GFR-binding peptide
  MOD_RES (31), (33): Xaa is C or S

SEQ ID NO: 93068 - protein, 31 aa, Artificial Sequence
  Cyclic GFR-binding peptide
  MOD_RES (28), (30): Xaa is C or S
MSAISILYLDENKNVVLKNYQNMTVESXAXR

SEQ ID NO: 93069 - protein, 37 aa, Artificial Sequence; identical to SEQ ID NO: 37918
  Cyclic GFR-binding peptide
  MOD_RES (3), (4), (36): Xaa is C or S

SEQ ID NO: 93070 - protein, 29 aa, Artificial Sequence
  Cyclic GFR-binding peptide
TPTKMSAISMLYLNDKQQIILKNYQGMVV

SEQ ID NO: 93071 - protein, 39 aa, Artificial Sequence; identical to SEQ ID NO: 37919
  Cyclic GFR-binding peptide
  MOD_RES (4), (5), (37), (39): Xaa is C or S

SEQ ID NO: 93072 - protein, 36 aa, Artificial Sequence; identical to SEQ ID NO: 37921
  Cyclic GFR-binding peptide
  MOD_RES (1), (33), (35): Xaa is C or S

SEQ ID NO: 93073 - protein, 25 aa, Artificial Sequence
  Cyclic GFR-binding peptide
PTKLSAISILYLDKGVVTYLKNYQG

SEQ ID NO: 93074 - protein, 37 aa, Artificial Sequence; identical to SEQ ID NO: 37923
  Cyclic GFR-binding peptide
  MOD_RES (1), (2), (34), (36): Xaa is C or S

SEQ ID NO: 93075 - protein, 29 aa, Artificial Sequence
  Cyclic GFR-binding peptide
  MOD_RES (1), (2): Xaa is C or S
XXAPVKTSAISMLYLDNGRVLLLKNYQMI

SEQ ID NO: 93076 - protein, 24 aa, Artificial Sequence
  Cyclic GFR-binding peptide
MSAISILYLDENKNVVLKNYQNMT

SEQ ID NO: 93077 - protein, 28 aa, Artificial Sequence
  Cyclic GFR-binding peptide
  MOD_RES (1), (1): Xaa is C or S
XAPVKTSAISMLYLDNGRVLLLKNYQMI

SEQ ID NO: 93078 - protein, 28 aa, Artificial Sequence
  Cyclic GFR-binding peptide
  MOD_RES (1), (2): Xaa is C or S
XXVPEKMSAISILYLDENKNVVLKNYQN

SEQ ID NO: 93079 - protein, 28 aa, Artificial Sequence
  Cyclic GFR-binding peptide
TKMSAISMLYLNDKQQIILKNYQGMVVD

SEQ ID NO: 93080 - protein, 29 aa, Artificial Sequence
  Cyclic GFR-binding peptide
  MOD_RES (27), (29): Xaa is C or S
TSAISMLYLDNGRVLLLKNYQMIVEEXGX

SEQ ID NO: 93081 - protein, 38 aa, Artificial Sequence; identical to SEQ ID NO: 37929
  Cyclic GFR-binding peptide
  MOD_RES (4), (5), (36), (38): Xaa is C or S

SEQ ID NO: 93082 - protein, 27 aa, Artificial Sequence
  Cyclic GFR-binding peptide
ARLSAISILYLDAANNVVLKNYQDMVV

SEQ ID NO: 93083 - protein, 30 aa, Artificial Sequence
  Cyclic GFR-binding peptide
  MOD_RES (30), (30): Xaa is C or S
ARLSAISILYLDAANNVVLKNYQDMVVEAX

SEQ ID NO: 93084 - protein, 30 aa, Artificial Sequence
  Cyclic GFR-binding peptide
  MOD_RES (1), (2): Xaa is C or S
XXVPEKMSAISILYLDENKNVVLKNYQNMT

SEQ ID NO: 93085 - protein, 29 aa, Artificial Sequence
  Cyclic GFR-binding peptide
APVKTSAISMLYLDNGRVLLLKNYQMIVE

SEQ ID NO: 93086 - protein, 34 aa, Artificial Sequence
  Cyclic GFR-binding peptide
  MOD_RES (4), (5): Xaa is C or S
SKAXXVPTKLSAISILYLDKGVVTYLKNYQGMAV

SEQ ID NO: 93087 - protein, 27 aa, Artificial Sequence
  Cyclic GFR-binding peptide
  MOD_RES (1), (2): Xaa is C or S
XXVPEKMSAISILYLDENKNVVLKNYQ

SEQ ID NO: 93088 - protein, 26 aa, Artificial Sequence
  Cyclic GFR-binding peptide
TPTKMSAISMLYLNDKQQIILKNYQG

SEQ ID NO: 93089 - protein, 31 aa, Artificial Sequence; identical to SEQ ID NO: 37937
  Cyclic GFR-binding peptide
  MOD_RES (31), (31): Xaa is C or S

SEQ ID NO: 93090 - protein, 27 aa, Artificial Sequence
  Cyclic GFR-binding peptide
  MOD_RES (26), (26): Xaa is C or S
SAISMLYLDNGRVLLLKNYQMIVEEXG

SEQ ID NO: 93091 - protein, 36 aa, Artificial Sequence; identical to SEQ ID NO: 37946
  Cyclic GFR-binding peptide
  MOD_RES (1), (33), (35): Xaa is C or S

SEQ ID NO: 93092 - protein, 26 aa, Artificial Sequence
  Cyclic GFR-binding peptide
PTKLSAISILYLDKGVVTYLKNYQGM

SEQ ID NO: 93093 - protein, 34 aa, Artificial Sequence; identical to SEQ ID NO: 37948
  Cyclic GFR-binding peptide
  MOD_RES (3), (4): Xaa is C or S

SEQ ID NO: 93094 - protein, 32 aa, Artificial Sequence
  Cyclic GFR-binding peptide
  MOD_RES (6), (7): Xaa is C or S
GSAGPXXTPTKMSAISMLYLNDKQQIILKNYQ

SEQ ID NO: 93095 - protein, 35 aa, Artificial Sequence; identical to SEQ ID NO: 37956
  Cyclic GFR-binding peptide
  MOD_RES (32), (34): Xaa is C or S

SEQ ID NO: 93096 - protein, 27 aa, Artificial Sequence
  Cyclic GFR-binding peptide
MSAISILYLDENKNVVLKNYQNMTVES

SEQ ID NO: 93097 - protein, 32 aa, Artificial Sequence
  Cyclic GFR-binding peptide
  MOD_RES (29), (31): Xaa is C or S
RLSAISILYLDAANNVVLKNYQDMVVEAXGXR

SEQ ID NO: 93098 - protein, 37 aa, Artificial Sequence; identical to SEQ ID NO: 37958
  Cyclic GFR-binding peptide
  MOD_RES (6), (7): Xaa is C or S

SEQ ID NO: 93099 - protein, 26 aa, Artificial Sequence
  Cyclic GFR-binding peptide
VPEKMSAISILYLDENKNVVLKNYQN

SEQ ID NO: 93100 - protein, 31 aa, Artificial Sequence
  Cyclic GFR-binding peptide
  MOD_RES (5), (6): Xaa is C or S
SAGPXXTPTKMSAISMLYLNDKQQIILKNYQ

SEQ ID NO: 93101 - protein, 20 aa, Artificial Sequence
  Cyclic GFR-binding peptide
SAISILYLDENKNVVLKNYQ

SEQ ID NO: 93102 - protein, 31 aa, Artificial Sequence
  Cyclic GFR-binding peptide
  MOD_RES (1), (2): Xaa is C or S
XXTPTKMSAISMLYLNDKQQIILKNYQGMVV

SEQ ID NO: 93103 - protein, 40 aa, Artificial Sequence; identical to SEQ ID NO: 37967
  Cyclic GFR-binding peptide
  MOD_RES (4), (5), (37), (39): Xaa is C or S

SEQ ID NO: 93104 - protein, 40 aa, Artificial Sequence; identical to SEQ ID NO: 37968
  Cyclic GFR-binding peptide
  MOD_RES (6), (7), (39): Xaa is C or S

SEQ ID NO: 93105 - protein, 32 aa, Artificial Sequence
  Cyclic GFR-binding peptide
  MOD_RES (31), (31): Xaa is C or S
PEKMSAISILYLDENKNVVLKNYQNMTVESXA

SEQ ID NO: 93106 - protein, 21 aa, Artificial Sequence
  Cyclic GFR-binding peptide
SAISMLYLNDKQQIILKNYQG

SEQ ID NO: 93107 - protein, 26 aa, Artificial Sequence
  Cyclic GFR-binding peptide
  MOD_RES (1), (1): Xaa is C or S
XVPTKLSAISILYLDKGVVTYLKNYQ

SEQ ID NO: 93108 - protein, 30 aa, Artificial Sequence
  Cyclic GFR-binding peptide
  MOD_RES (29), (29): Xaa is C or S
KMSAISILYLDENKNVVLKNYQNMTVESXA

SEQ ID NO: 93109 - protein, 35 aa, Artificial Sequence; identical to SEQ ID NO: 37975
  Cyclic GFR-binding peptide
  MOD_RES (32), (34): Xaa is C or S

SEQ ID NO: 93110 - protein, 32 aa, Artificial Sequence; identical to SEQ ID NO: 37978
  Cyclic GFR-binding peptide
  MOD_RES (1), (1): Xaa is C or S

SEQ ID NO: 93111 - protein, 30 aa, Artificial Sequence; identical to SEQ ID NO: 736
  Cyclic GFR-binding peptide

SEQ ID NO: 93112 - protein, 23 aa, Artificial Sequence
  Cyclic GFR-binding peptide
SAISMLYLDNGRVLLLKNYQMIV

SEQ ID NO: 93113 - protein, 32 aa, Artificial Sequence
  Cyclic GFR-binding peptide
  MOD_RES (30), (32): Xaa is C or S
EKMSAISILYLDENKNVVLKNYQNMTVESXAX

SEQ ID NO: 93114 - protein, 37 aa, Artificial Sequence; identical to SEQ ID NO: 37983
  Cyclic GFR-binding peptide
  MOD_RES (6), (7): Xaa is C or S

SEQ ID NO: 93115 - protein, 33 aa, Artificial Sequence
  Cyclic GFR-binding peptide
  MOD_RES (3), (4): Xaa is C or S
EPXXVPEKMSAISILYLDENKNVVLKNYQNMTV

SEQ ID NO: 93116 - protein, 25 aa, Artificial Sequence
  Cyclic GFR-binding peptide
TKMSAISMLYLNDKQQIILKNYQGM

SEQ ID NO: 93117 - protein, 32 aa, Artificial Sequence; identical to SEQ ID NO: 37988
  Cyclic GFR-binding peptide
  MOD_RES (1), (2): Xaa is C or S

SEQ ID NO: 93118 - protein, 29 aa, Artificial Sequence
  Cyclic GFR-binding peptide
PARLSAISILYLDAANNVVLKNYQDMVVE

SEQ ID NO: 93119 - protein, 31 aa, Artificial Sequence
  Cyclic GFR-binding peptide
  MOD_RES (1), (2): Xaa is C or S
XXVPARLSAISILYLDAANNVVLKNYQDMVV

SEQ ID NO: 93120 - protein, 35 aa, Artificial Sequence
  Cyclic GFR-binding peptide
  MOD_RES (5), (6): Xaa is C or S
IPEPXXVPEKMSAISILYLDENKNVVLKNYQNMTV

SEQ ID NO: 93121 - protein, 22 aa, Artificial Sequence
  Cyclic GFR-binding peptide
SAISILYLDENKNVVLKNYQNM

SEQ ID NO: 93122 - protein, 29 aa, Artificial Sequence
  Cyclic GFR-binding peptide
  MOD_RES (2), (3): Xaa is C or S
PXXTPTKMSAISMLYLNDKQQIILKNYQG

SEQ ID NO: 93123 - protein, 31 aa, Artificial Sequence
  Cyclic GFR-binding peptide
  MOD_RES (5), (6): Xaa is C or S
APASXXVPARLSAISILYLDAANNVVLKNYQ

SEQ ID NO: 93124 - protein, 37 aa, Artificial Sequence; identical to SEQ ID NO: 37993
  Cyclic GFR-binding peptide
  MOD_RES (1), (2), (34), (36): Xaa is C or S

SEQ ID NO: 93125 - protein, 38 aa, Artificial Sequence; identical to SEQ ID NO: 37996
  Cyclic GFR-binding peptide
  MOD_RES (6), (7): Xaa is C or S

SEQ ID NO: 93126 - protein, 31 aa, Artificial Sequence
  Cyclic GFR-binding peptide
  MOD_RES (28), (30): Xaa is C or S
MSAISMLYLNDKQQIILKNYQGMVVDRXGXS

SEQ ID NO: 93127 - protein, 31 aa, Artificial Sequence; identical to SEQ ID NO: 37997
  Cyclic GFR-binding peptide
  MOD_RES (1), (1): Xaa is C or S

SEQ ID NO: 93128 - protein, 32 aa, Artificial Sequence
  Cyclic GFR-binding peptide
  MOD_RES (5), (6): Xaa is C or S
ASKAXXVPTKLSAISILYLDKGVVTYLKNYQG

SEQ ID NO: 93129 - protein, 31 aa, Artificial Sequence; identical to SEQ ID NO: 38002
  Cyclic GFR-binding peptide

SEQ ID NO: 93130 - protein, 27 aa, Artificial Sequence
  Cyclic GFR-binding peptide
  MOD_RES (1), (1): Xaa is C or S
XTPTKMSAISMLYLNDKQQIILKNYQG

SEQ ID NO: 93131 - protein, 21 aa, Artificial Sequence
  Cyclic GFR-binding peptide
MSAISILYLDENKNVVLKNYQ

SEQ ID NO: 93132 - protein, 33 aa, Artificial Sequence
  Cyclic GFR-binding peptide
  MOD_RES (5), (6): Xaa is C or S
SAGPXXTPTKMSAISMLYLNDKQQIILKNYQGM

SEQ ID NO: 93133 - protein, 32 aa, Artificial Sequence
  Cyclic GFR-binding peptide
  MOD_RES (30), (32): Xaa is C or S
TKLSAISILYLDKGVVTYLKNYQGMAVSEXGX

SEQ ID NO: 93134 - protein, 30 aa, Artificial Sequence
  Cyclic GFR-binding peptide
  MOD_RES (4), (5): Xaa is C or S
PSTXXAPVKTSAISMLYLDNGRVLLLKNYQ

SEQ ID NO: 93135 - protein, 25 aa, Artificial Sequence
  Cyclic GFR-binding peptide
PVKTSAISMLYLDNGRVLLLKNYQM

SEQ ID NO: 93136 - protein, 23 aa, Artificial Sequence
  Cyclic GFR-binding peptide
LSAISILYLDAANNVVLKNYQDM

SEQ ID NO: 93137 - protein, 38 aa, Artificial Sequence; identical to SEQ ID NO: 38013
  Cyclic GFR-binding peptide
  MOD_RES (3), (4), (36), (38): Xaa is C or S

SEQ ID NO: 93138 - protein, 30 aa, Artificial Sequence
  Cyclic GFR-binding peptide
PTKMSAISMLYLNDKQQIILKNYQGMVVDR

SEQ ID NO: 93139 - protein, 32 aa, Artificial Sequence; identical to SEQ ID NO: 38015
  Cyclic GFR-binding peptide
  MOD_RES (31), (31): Xaa is C or S

SEQ ID NO: 93140 - protein, 30 aa, Artificial Sequence
  Cyclic GFR-binding peptide
  MOD_RES (28), (30): Xaa is C or S
LSAISILYLDAANNVVLKNYQDMVVEAXGX

SEQ ID NO: 93141 - protein, 30 aa, Artificial Sequence
  Cyclic GFR-binding peptide
  MOD_RES (1), (1): Xaa is C or S
XVPEKMSAISILYLDENKNVVLKNYQNMTV

SEQ ID NO: 93142 - protein, 32 aa, Artificial Sequence
  Cyclic GFR-binding peptide
  MOD_RES (30), (32): Xaa is C or S
ARLSAISILYLDAANNVVLKNYQDMVVEAXGX

SEQ ID NO: 93143 - protein, 38 aa, Artificial Sequence; identical to SEQ ID NO: 38017
  Cyclic GFR-binding peptide
  MOD_RES (2), (3), (35), (37): Xaa is C or S

SEQ ID NO: 93144 - protein, 23 aa, Artificial Sequence
  Cyclic GFR-binding peptide
VKTSAISMLYLDNGRVLLLKNYQ

SEQ ID NO: 93145 - protein, 34 aa, Artificial Sequence
  Cyclic GFR-binding peptide
  MOD_RES (31), (33): Xaa is C or S
PARLSAISILYLDAANNVVLKNYQDMVVEAXGXR

SEQ ID NO: 93146 - protein, 26 aa, Artificial Sequence
  Cyclic GFR-binding peptide
SAISMLYLNDKQQIILKNYQGMVVDR

SEQ ID NO: 93147 - protein, 29 aa, Artificial Sequence
  Cyclic GFR-binding peptide
  MOD_RES (3), (4): Xaa is C or S
KAXXVPTKLSAISILYLDKGVVTYLKNYQ

SEQ ID NO: 93148 - protein, 35 aa, Artificial Sequence; identical to SEQ ID NO: 38022
  Cyclic GFR-binding peptide
  MOD_RES (2), (3), (35): Xaa is C or S

SEQ ID NO: 93149 - protein, 26 aa, Artificial Sequence
  Cyclic GFR-binding peptide
ARLSAISILYLDAANNVVLKNYQDMV

SEQ ID NO: 93150 - protein, 29 aa, Artificial Sequence
  Cyclic GFR-binding peptide
  MOD_RES (28), (28): Xaa is C or S
MSAISMLYLNDKQQIILKNYQGMVVDRXG

SEQ ID NO: 93151 - protein, 34 aa, Artificial Sequence; identical to SEQ ID NO: 38031
  Cyclic GFR-binding peptide
  MOD_RES (3), (4): Xaa is C or S

SEQ ID NO: 93152 - protein, 24 aa, Artificial Sequence
  Cyclic GFR-binding peptide
VKTSAISMLYLDNGRVLLLKNYQM

SEQ ID NO: 93153 - protein, 37 aa, Artificial Sequence; identical to SEQ ID NO: 38033
  Cyclic GFR-binding peptide
  MOD_RES (6), (7): Xaa is C or S

SEQ ID NO: 93154 - protein, 29 aa, Artificial Sequence
  Cyclic GFR-binding peptide
  MOD_RES (2), (3): Xaa is C or S
TXXAPVKTSAISMLYLDNGRVLLLKNYQM

SEQ ID NO: 93155 - protein, 23 aa, Artificial Sequence
  Cyclic GFR-binding peptide
LSAISILYLDKGVVTYLKNYQGM

SEQ ID NO: 93156 - protein, 39 aa, Artificial Sequence; identical to SEQ ID NO: 38036
  Cyclic GFR-binding peptide
  MOD_RES (3), (4), (36), (38): Xaa is C or S

SEQ ID NO: 93157 - protein, 31 aa, Artificial Sequence
  Cyclic GFR-binding peptide
  MOD_RES (2), (3): Xaa is C or S
PXXVPEKMSAISILYLDENKNVVLKNYQNMT

SEQ ID NO: 93158 - protein, 24 aa, Artificial Sequence
  Cyclic GFR-binding peptide
PARLSAISILYLDAANNVVLKNYQ

SEQ ID NO: 93159 - protein, 21 aa, Artificial Sequence
  Cyclic GFR-binding peptide
TSAISMLYLDNGRVLLLKNYQ

SEQ ID NO: 93160 - protein, 29 aa, Artificial Sequence
  Cyclic GFR-binding peptide
SAISILYLDKGVVTYLKNYQAAAAAAAAA

SEQ ID NO: 93161 - protein, 34 aa, Artificial Sequence
  Cyclic GFR-binding peptide
  MOD_RES (6), (7): Xaa is C or S
GSAGPXXTPTKMSAISMLYLNDKQQIILKNYQGM

SEQ ID NO: 93162 - protein, 31 aa, Artificial Sequence
  Cyclic GFR-binding peptide
  MOD_RES (29), (31): Xaa is C or S
VKTSAISMLYLDNGRVLLLKNYQMIVEEXGX

SEQ ID NO: 93163 - protein, 26 aa, Artificial Sequence
  Cyclic GFR-binding peptide
TSAISMLYLDNGRVLLLKNYQMIVEE

SEQ ID NO: 93164 - protein, 20 aa, Artificial Sequence
  Cyclic GFR-binding peptide
SAISILYLDKGVVTYLKNYQ

SEQ ID NO: 93165 - protein, 22 aa, Artificial Sequence
  Cyclic GFR-binding peptide
SAISMLYLNDKQQIILKNYQGM

SEQ ID NO: 93166 - protein, 33 aa, Artificial Sequence; identical to SEQ ID NO: 38053
  Cyclic GFR-binding peptide
  MOD_RES (2), (3): Xaa is C or S

SEQ ID NO: 93167 - protein, 27 aa, Artificial Sequence
  Cyclic GFR-binding peptide
MSAISMLYLNDKQQIILKNYQGMVVDR

SEQ ID NO: 93168 - protein, 37 aa, Artificial Sequence; identical to SEQ ID NO: 38055
  Cyclic GFR-binding peptide
  MOD_RES (1), (2), (34), (36): Xaa is C or S

SEQ ID NO: 93169 - protein, 41 aa, Artificial Sequence; identical to SEQ ID NO: 38058
  Cyclic GFR-binding peptide
  MOD_RES (6), (7), (39), (41): Xaa is C or S

SEQ ID NO: 93170 - protein, 41 aa, Artificial Sequence; identical to SEQ ID NO: 38061
  Cyclic GFR-binding peptide
  MOD_RES (6), (7), (39), (41): Xaa is C or S

SEQ ID NO: 93171 - protein, 24 aa, Artificial Sequence
  Cyclic GFR-binding peptide
KTSAISMLYLDNGRVLLLKNYQMI

SEQ ID NO: 93172 - protein, 26 aa, Artificial Sequence
  Cyclic GFR-binding peptide
  MOD_RES (1), (1): Xaa is C or S
XVPARLSAISILYLDAANNVVLKNYQ

SEQ ID NO: 93173 - protein, 30 aa, Artificial Sequence
  Cyclic GFR-binding peptide
PEKMSAISILYLDENKNVVLKNYQNMTVES

SEQ ID NO: 93174 - protein, 31 aa, Artificial Sequence; identical to SEQ ID NO: 38064
  Cyclic GFR-binding peptide
  MOD_RES (1), (1): Xaa is C or S

SEQ ID NO: 93175 - protein, 30 aa, Artificial Sequence; identical to SEQ ID NO: 38065
  Cyclic GFR-binding peptide

SEQ ID NO: 93176 - protein, 30 aa, Artificial Sequence
  Cyclic GFR-binding peptide
  MOD_RES (4), (5): Xaa is C or S
PEPXXVPEKMSAISILYLDENKNVVLKNYQ

SEQ ID NO: 93177 - protein, 30 aa, Artificial Sequence
  Cyclic GFR-binding peptide
  MOD_RES (30), (30): Xaa is C or S
PVKTSAISMLYLDNGRVLLLKNYQMIVEEX

SEQ ID NO: 93178 - protein, 30 aa, Artificial Sequence
  Cyclic GFR-binding peptide
  MOD_RES (3), (4): Xaa is C or S
ASXXVPARLSAISILYLDAANNVVLKNYQD

SEQ ID NO: 93179 - protein, 25 aa, Artificial Sequence
  Cyclic GFR-binding peptide
VPTKLSAISILYLDKGVVTYLKNYQ

SEQ ID NO: 93180 - protein, 34 aa, Artificial Sequence
  Cyclic GFR-binding peptide
  MOD_RES (31), (33): Xaa is C or S
PEKMSAISILYLDENKNVVLKNYQNMTVESXAXR

SEQ ID NO: 93181 - protein, 25 aa, Artificial Sequence
  Cyclic GFR-binding peptide
APVKTSAISMLYLDNGRVLLLKNYQ

SEQ ID NO: 93182 - protein, 30 aa, Artificial Sequence
  Cyclic GFR-binding peptide
  MOD_RES (28), (30): Xaa is C or S
LSAISILYLDKGVVTYLKNYQGMAVSEXGX

SEQ ID NO: 93183 - protein, 24 aa, Artificial Sequence
  Cyclic GFR-binding peptide
SAISMLYLNDKQQIILKNYQGMVV

SEQ ID NO: 93184 - protein, 26 aa, Artificial Sequence
  Cyclic GFR-binding peptide
LSAISILYLDKGVVTYLKNYQGMAVS

SEQ ID NO: 93185 - protein, 30 aa, Artificial Sequence
  Cyclic GFR-binding peptide
  MOD_RES (27), (29): Xaa is C or S
SAISILYLDENKNVVLKNYQNMTVESXAXR

SEQ ID NO: 93186 - protein, 40 aa, Artificial Sequence; identical to SEQ ID NO: 38089
  Cyclic GFR-binding peptide
  MOD_RES (6), (7), (39): Xaa is C or S

SEQ ID NO: 93187 - protein, 37 aa, Artificial Sequence; identical to SEQ ID NO: 38091
  Cyclic GFR-binding peptide
  MOD_RES (4), (5), (37): Xaa is C or S

SEQ ID NO: 93188 - protein, 39 aa, Artificial Sequence; identical to SEQ ID NO: 38092
  Cyclic GFR-binding peptide
  MOD_RES (3), (4), (36), (38): Xaa is C or S

SEQ ID NO: 93189 - protein, 33 aa, Artificial Sequence; identical to SEQ ID NO: 38094
  Cyclic GFR-binding peptide
  MOD_RES (1), (33): Xaa is C or S

SEQ ID NO: 93190 - protein, 21 aa, Artificial Sequence
  Cyclic GFR-binding peptide
SAISILYLDKGVVTYLKNYQG

SEQ ID NO: 93191 - protein, 32 aa, Artificial Sequence
  Cyclic GFR-binding peptide
  MOD_RES (31), (31): Xaa is C or S
PTKLSAISILYLDKGVVTYLKNYQGMAVSEXG

SEQ ID NO: 93192 - protein, 38 aa, Artificial Sequence; identical to SEQ ID NO: 38098
  Cyclic GFR-binding peptide
  MOD_RES (4), (5), (37): Xaa is C or S

SEQ ID NO: 93193 - protein, 37 aa, Artificial Sequence; identical to SEQ ID NO: 38099
  Cyclic GFR-binding peptide
  MOD_RES (3), (4), (36): Xaa is C or S

SEQ ID NO: 93194 - protein, 26 aa, Artificial Sequence
  Cyclic GFR-binding peptide
  MOD_RES (26), (26): Xaa is C or S
SAISMLYLDNGRVLLLKNYQMIVEEX

SEQ ID NO: 93195 - protein, 28 aa, Artificial Sequence
  Cyclic GFR-binding peptide
VPTKLSAISILYLDKGVVTYLKNYQGMA

SEQ ID NO: 93196 - protein, 30 aa, Artificial Sequence
  Cyclic GFR-binding peptide
PARLSAISILYLDAANNVVLKNYQDMVVEA

SEQ ID NO: 93197 - protein, 33 aa, Artificial Sequence; identical to SEQ ID NO: 38106
  Cyclic GFR-binding peptide
  MOD_RES (2), (3): Xaa is C or S

SEQ ID NO: 93198 - protein, 36 aa, Artificial Sequence; identical to SEQ ID NO: 38107
  Cyclic GFR-binding peptide
  MOD_RES (3), (4), (36): Xaa is C or S

SEQ ID NO: 93199 - protein, 30 aa, Artificial Sequence
  Cyclic GFR-binding peptide
  MOD_RES (4), (5): Xaa is C or S
SKAXXVPTKLSAISILYLDKGVVTYLKNYQ

SEQ ID NO: 93200 - protein, 28 aa, Artificial Sequence
  Cyclic GFR-binding peptide
  MOD_RES (28), (28): Xaa is C or S
KTSAISMLYLDNGRVLLLKNYQMIVEEX

SEQ ID NO: 93201 - protein, 27 aa, Artificial Sequence
  Cyclic GFR-binding peptide
  MOD_RES (1), (1): Xaa is C or S
XVPARLSAISILYLDAANNVVLKNYQD

SEQ ID NO: 93202 - protein, 25 aa, Artificial Sequence
  Cyclic GFR-binding peptide
EKMSAISILYLDENKNVVLKNYQNM

SEQ ID NO: 93203 - protein, 25 aa, Artificial Sequence
  Cyclic GFR-binding peptide
KTSAISMLYLDNGRVLLLKNYQMIV

SEQ ID NO: 93204 - protein, 22 aa, Artificial Sequence
  Cyclic GFR-binding peptide
SAISILYLDAANNVVLKNYQDM

SEQ ID NO: 93205 - protein, 33 aa, Artificial Sequence
  Cyclic GFR-binding peptide
  MOD_RES (4), (5): Xaa is C or S
PEPXXVPEKMSAISILYLDENKNVVLKNYQNMT

SEQ ID NO: 93206 - protein, 30 aa, Artificial Sequence
  Cyclic GFR-binding peptide
  MOD_RES (3), (4): Xaa is C or S
EPXXVPEKMSAISILYLDENKNVVLKNYQN

SEQ ID NO: 93207 - protein, 35 aa, Artificial Sequence; identical to SEQ ID NO: 38115
  Cyclic GFR-binding peptide
  MOD_RES (4), (5): Xaa is C or S

SEQ ID NO: 93208 - protein, 36 aa, Artificial Sequence; identical to SEQ ID NO: 38116
  Cyclic GFR-binding peptide
  MOD_RES (1), (33), (35): Xaa is C or S

SEQ ID NO: 93209 - protein, 31 aa, Artificial Sequence; identical to SEQ ID NO: 38117
  Cyclic GFR-binding peptide
  MOD_RES (1), (1): Xaa is C or S

SEQ ID NO: 93210 - protein, 33 aa, Artificial Sequence
  Cyclic GFR-binding peptide
  MOD_RES (4), (5): Xaa is C or S
AGPXXTPTKMSAISMLYLNDKQQIILKNYQGMV

SEQ ID NO: 93211 - protein, 32 aa, Artificial Sequence
  Cyclic GFR-binding peptide
  MOD_RES (30), (32): Xaa is C or S
TKMSAISMLYLNDKQQIILKNYQGMVVDRXGX

SEQ ID NO: 93212 - protein, 29 aa, Artificial Sequence
  Cyclic GFR-binding peptide
  MOD_RES (27), (29): Xaa is C or S
SAISILYLDAANNVVLKNYQDMVVEAXGX

SEQ ID NO: 93213 - protein, 30 aa, Artificial Sequence
  Cyclic GFR-binding peptide
  MOD_RES (3), (4): Xaa is C or S
GPXXTPTKMSAISMLYLNDKQQIILKNYQG

SEQ ID NO: 93214 - protein, 25 aa, Artificial Sequence
  Cyclic GFR-binding peptide
KMSAISILYLDENKNVVLKNYQNMT

SEQ ID NO: 93215 - protein, 32 aa, Artificial Sequence; identical to SEQ ID NO: 38130
  Cyclic GFR-binding peptide
  MOD_RES (1), (2): Xaa is C or S

SEQ ID NO: 93216 - protein, 29 aa, Artificial Sequence
  Cyclic GFR-binding peptide
  MOD_RES (27), (29): Xaa is C or S
SAISILYLDKGVVTYLKNYQGMAVSEXGX

SEQ ID NO: 93217 - protein, 33 aa, Artificial Sequence; identical to SEQ ID NO: 38132
  Cyclic GFR-binding peptide
  MOD_RES (1), (2), (33): Xaa is C or S

SEQ ID NO: 93218 - protein, 33 aa, Artificial Sequence; identical to SEQ ID NO: 38134
  Cyclic GFR-binding peptide
  MOD_RES (1), (2): Xaa is C or S

SEQ ID NO: 93219 - protein, 23 aa, Artificial Sequence
  Cyclic GFR-binding peptide
KMSAISILYLDENKNVVLKNYQN

SEQ ID NO: 93220 - protein, 32 aa, Artificial Sequence; identical to SEQ ID NO: 38136
  Cyclic GFR-binding peptide
  MOD_RES (32), (32): Xaa is C or S

SEQ ID NO: 93221 - protein, 33 aa, Artificial Sequence
  Cyclic GFR-binding peptide
  MOD_RES (3), (4): Xaa is C or S
KAXXVPTKLSAISILYLDKGVVTYLKNYQGMAV

SEQ ID NO: 93222 - protein, 28 aa, Artificial Sequence
  Cyclic GFR-binding peptide
  MOD_RES (2), (3): Xaa is C or S
TXXAPVKTSAISMLYLDNGRVLLLKNYQ

SEQ ID NO: 93223 - protein, 40 aa, Artificial Sequence; identical to SEQ ID NO: 38138
  Cyclic GFR-binding peptide
  MOD_RES (6), (7), (38), (40): Xaa is C or S

SEQ ID NO: 93224 - protein, 26 aa, Artificial Sequence
  Cyclic GFR-binding peptide
VPARLSAISILYLDAANNVVLKNYQD

SEQ ID NO: 93225 - protein, 35 aa, Artificial Sequence
  Cyclic GFR-binding peptide
  MOD_RES (6), (7): Xaa is C or S
HVPKPXXAPTKLSAISVLYLDDSSNVILKNYQNMV

SEQ ID NO: 93226 - protein, 31 aa, Artificial Sequence
  Cyclic GFR-binding peptide
  MOD_RES (5), (6): Xaa is C or S
IPEPXXVPEKMSAISILYLDENKNVVLKNYQ

SEQ ID NO: 93227 - protein, 27 aa, Artificial Sequence
  Cyclic GFR-binding peptide
PTKMSAISMLYLNDKQQIILKNYQGMV

SEQ ID NO: 93228 - protein, 33 aa, Artificial Sequence
  Cyclic GFR-binding peptide
  MOD_RES (4), (5): Xaa is C or S
PSTXXAPVKTSAISMLYLDNGRVLLLKNYQMIV

SEQ ID NO: 93229 - protein, 42 aa, Artificial Sequence; identical to SEQ ID NO: 38145
  Cyclic GFR-binding peptide
  MOD_RES (6), (7), (39), (41): Xaa is C or S

SEQ ID NO: 93230 - protein, 36 aa, Artificial Sequence; identical to SEQ ID NO: 38146
  Cyclic GFR-binding peptide
  MOD_RES (2), (3), (35): Xaa is C or S

SEQ ID NO: 93231 - protein, 32 aa, Artificial Sequence
  Cyclic GFR-binding peptide
  MOD_RES (2), (3): Xaa is C or S
TXXAPVKTSAISMLYLDNGRVLLLKNYQMIVE

SEQ ID NO: 93232 - protein, 22 aa, Artificial Sequence
  Cyclic GFR-binding peptide
SAISILYLDKGVVTYLKNYQGM

SEQ ID NO: 93233 - protein, 40 aa, Artificial Sequence; identical to SEQ ID NO: 38149
  Cyclic GFR-binding peptide
  MOD_RES (6), (7), (39): Xaa is C or S

SEQ ID NO: 93234 - protein, 24 aa, Artificial Sequence
  Cyclic GFR-binding peptide
PVKTSAISMLYLDNGRVLLLKNYQ

SEQ ID NO: 93235 - protein, 32 aa, Artificial Sequence
  Cyclic GFR-binding peptide
  MOD_RES (4), (5): Xaa is C or S
PASXXVPARLSAISILYLDAANNVVLKNYQDM

SEQ ID NO: 93236 - protein, 27 aa, Artificial Sequence
  Cyclic GFR-binding peptide
TKMSAISMLYLNDKQQIILKNYQGMVV

SEQ ID NO: 93237 - protein, 38 aa, Artificial Sequence; identical to SEQ ID NO: 38155
  Cyclic GFR-binding peptide
  MOD_RES (4), (5), (37): Xaa is C or S

SEQ ID NO: 93238 - protein, 32 aa, Artificial Sequence
  Cyclic GFR-binding peptide
  MOD_RES (2), (3): Xaa is C or S
SXXVPARLSAISILYLDAANNVVLKNYQDMVV

SEQ ID NO: 93239 - protein, 35 aa, Artificial Sequence; identical to SEQ ID NO: 38157
  Cyclic GFR-binding peptide
  MOD_RES (1), (32), (34): Xaa is C or S

SEQ ID NO: 93240 - protein, 24 aa, Artificial Sequence
  Cyclic GFR-binding peptide
KMSAISILYLDENKNVVLKNYQNM

SEQ ID NO: 93241 - protein, 27 aa, Artificial Sequence
  Cyclic GFR-binding peptide
TKLSAISILYLDKGVVTYLKNYQGMAV

SEQ ID NO: 93242 - protein, 21 aa, Artificial Sequence
  Cyclic GFR-binding peptide
LSAISILYLDAANNVVLKNYQ

SEQ ID NO: 93243 - protein, 35 aa, Artificial Sequence; identical to SEQ ID NO: 38159
  Cyclic GFR-binding peptide
  MOD_RES (4), (5): Xaa is C or S

SEQ ID NO: 93244 - protein, 30 aa, Artificial Sequence; identical to SEQ ID NO: 738
  Cyclic GFR-binding peptide

SEQ ID NO: 93245 - protein, 41 aa, Artificial Sequence; identical to SEQ ID NO: 38162
  Cyclic GFR-binding peptide
  MOD_RES (6), (7), (39), (41): Xaa is C or S

SEQ ID NO: 93246 - protein, 36 aa, Artificial Sequence; identical to SEQ ID NO: 38164
  Cyclic GFR-binding peptide
  MOD_RES (5), (6): Xaa is C or S

SEQ ID NO: 93247 - protein, 28 aa, Artificial Sequence
  Cyclic GFR-binding peptide
  MOD_RES (27), (27): Xaa is C or S
SAISILYLDENKNVVLKNYQNMTVESXA

SEQ ID NO: 93248 - protein, 36 aa, Artificial Sequence; identical to SEQ ID NO: 38167
  Cyclic GFR-binding peptide
  MOD_RES (1), (2), (34), (36): Xaa is C or S

SEQ ID NO: 93249 - protein, 22 aa, Artificial Sequence
  Cyclic GFR-binding peptide
MSAISILYLDENKNVVLKNYQN

SEQ ID NO: 93250 - protein, 34 aa, Artificial Sequence
  Cyclic GFR-binding peptide
  MOD_RES (4), (5): Xaa is C or S
PASXXVPARLSAISILYLDAANNVVLKNYQDMVV

SEQ ID NO: 93251 - protein, 34 aa, Artificial Sequence
  Cyclic GFR-binding peptide
  MOD_RES (6), (7): Xaa is C or S
AAPASXXVPARLSAISILYLDAANNVVLKNYQDM

SEQ ID NO: 93252 - protein, 29 aa, Artificial Sequence
  Cyclic GFR-binding peptide
  MOD_RES (1), (1): Xaa is C or S
XVPTKLSAISILYLDKGVVTYLKNYQGMA

SEQ ID NO: 93253 - protein, 24 aa, Artificial Sequence
  Cyclic GFR-binding peptide
RLSAISILYLDAANNVVLKNYQDM

SEQ ID NO: 93254 - protein, 29 aa, Artificial Sequence
  Cyclic GFR-binding peptide
PVKTSAISMLYLDNGRVLLLKNYQMIVEE

SEQ ID NO: 93255 - protein, 40 aa, Artificial Sequence; identical to SEQ ID NO: 38171
  Cyclic GFR-binding peptide
  MOD_RES (4), (5), (37), (39): Xaa is C or S

SEQ ID NO: 93256 - protein, 38 aa, Artificial Sequence; identical to SEQ ID NO: 38172
  Cyclic GFR-binding peptide
  MOD_RES (6), (7): Xaa is C or S

SEQ ID NO: 93257 - protein, 28 aa, Artificial Sequence
  Cyclic GFR-binding peptide
  MOD_RES (27), (27): Xaa is C or S
TSAISMLYLDNGRVLLLKNYQMIVEEXG

SEQ ID NO: 93258 - protein, 23 aa, Artificial Sequence
  Cyclic GFR-binding peptide
EKMSAISILYLDENKNVVLKNYQ

SEQ ID NO: 93259 - protein, 31 aa, Artificial Sequence
  Cyclic GFR-binding peptide
  MOD_RES (1), (2): Xaa is C or S
XXVPTKLSAISILYLDKGVVTYLKNYQGMAV

SEQ ID NO: 93260 - protein, 28 aa, Artificial Sequence
  Cyclic GFR-binding peptide
  MOD_RES (2), (3): Xaa is C or S
PXXVPEKMSAISILYLDENKNVVLKNYQ

SEQ ID NO: 93261 - protein, 28 aa, Artificial Sequence
  Cyclic GFR-binding peptide
  MOD_RES (28), (28): Xaa is C or S
MSAISMLYLNDKQQIILKNYQGMVVDRX

SEQ ID NO: 93262 - protein, 37 aa, Artificial Sequence; identical to SEQ ID NO: 38174
  Cyclic GFR-binding peptide
  MOD_RES (2), (3), (35), (37): Xaa is C or S

SEQ ID NO: 93263 - protein, 28 aa, Artificial Sequence
  Cyclic GFR-binding peptide
  MOD_RES (28), (28): Xaa is C or S
LSAISILYLDAANNVVLKNYQDMVVEAX

SEQ ID NO: 93264 - protein, 34 aa, Artificial Sequence
  Cyclic GFR-binding peptide
  MOD_RES (5), (6): Xaa is C or S
ASKAXXVPTKLSAISILYLDKGVVTYLKNYQGMA

SEQ ID NO: 93265 - protein, 21 aa, Artificial Sequence
  Cyclic GFR-binding peptide
SAISILYLDAANNVVLKNYQD

SEQ ID NO: 93266 - protein, 35 aa, Artificial Sequence; identical to SEQ ID NO: 38176
  Cyclic GFR-binding peptide
  MOD_RES (1), (33), (35): Xaa is C or S

SEQ ID NO: 93267 - protein, 28 aa, Artificial Sequence
  Cyclic GFR-binding peptide
PEKMSAISILYLDENKNVVLKNYQNMTV

SEQ ID NO: 93268 - protein, 31 aa, Artificial Sequence
  Cyclic GFR-binding peptide
  MOD_RES (31), (31): Xaa is C or S
PTKLSAISILYLDKGVVTYLKNYQGMAVSEX

SEQ ID NO: 93269 - protein, 20 aa, Artificial Sequence
  Cyclic GFR-binding peptide
SAISILYLDAANNVVLKNYQ

SEQ ID NO: 93270 - protein, 27 aa, Artificial Sequence
  Cyclic GFR-binding peptide
AAAAAAARYKKLIKPTKGIFYLISIAN

SEQ ID NO: 93271 - protein, 29 aa, Artificial Sequence
  Cyclic GFR-binding peptide
AAAAAAARHKRLFIPKKRVIEYYLVSTAS

SEQ ID NO: 93272 - protein, 27 aa, Artificial Sequence
  Cyclic GFR-binding peptide
AAAAAAAYHYKLVVKDYEDKYLMSIPS

SEQ ID NO: 93273 - protein, 27 aa, Artificial Sequence
  Cyclic GFR-binding peptide
AAAAAAAQYNKLIVNNSSDLYLVSIAS

SEQ ID NO: 93274 - protein, 27 aa, Artificial Sequence
  Cyclic GFR-binding peptide
AAAAAAARYKKLVVKDYEDFYLMSIAN

SEQ ID NO: 93275 - protein, 27 aa, Artificial Sequence
  Cyclic GFR-binding peptide
AAAAAAARYKKLVKPTRGVFYLISIAN

SEQ ID NO: 93276 - protein, 27 aa, Artificial Sequence
  Cyclic GFR-binding peptide
AAAAAAARHKRLVVKENEDYYLMSTAS

SEQ ID NO: 93277 - protein, 27 aa, Artificial Sequence
  Cyclic GFR-binding peptide
AAAAAAAYHYKLIKPTKGIKYLISIPS

SEQ ID NO: 93278 - protein, 29 aa, Artificial Sequence
  Cyclic GFR-binding peptide
AAAAAAARYKKLFIPKKRVIEFYLVSIAN

SEQ ID NO: 93279 - protein, 27 aa, Artificial Sequence
  Cyclic GFR-binding peptide
AAAAAAAYHYKLVVKENEDKYLMSIPS

SEQ ID NO: 93280 - protein, 27 aa, Artificial Sequence
  Cyclic GFR-binding peptide
AAAAAAARHKRLVKPKRGVYYLISTAS

SEQ ID NO: 93281 - protein, 27 aa, Artificial Sequence
  Cyclic GFR-binding peptide
AAAAAAAYHYKLVKPKRGVKYLISIPS

SEQ ID NO: 93282 - protein, 29 aa, Artificial Sequence
  Cyclic GFR-binding peptide
AAAAAAAQYNKLFIPKKRVIELYLVSIAS

SEQ ID NO: 93283 - protein, 27 aa, Artificial Sequence
  Cyclic GFR-binding peptide
AAAAAAAQYNKLVKPTRGVLYLISIAS

SEQ ID NO: 93284 - protein, 27 aa, Artificial Sequence
  Cyclic GFR-binding peptide
AAAAAAARYKKLVVKENEDFYLMSIAN

SEQ ID NO: 93285 - protein, 27 aa, Artificial Sequence
  Cyclic GFR-binding peptide
AAAAAAAQYNKLTPVGMDDLYLVSIAS

SEQ ID NO: 93286 - protein, 27 aa, Artificial Sequence
  Cyclic GFR-binding peptide
AAAAAAARYKKLTPVGMDDFYLVSIAN

SEQ ID NO: 93287 - protein, 27 aa, Artificial Sequence
  Cyclic GFR-binding peptide
AAAAAAARYKKLVKPKRGVFYLISIAN

SEQ ID NO: 93288 - protein, 27 aa, Artificial Sequence
  Cyclic GFR-binding peptide
AAAAAAAQYNKLVVKENEDLYLMSIAS

SEQ ID NO: 93289 - protein, 27 aa, Artificial Sequence
  Cyclic GFR-binding peptide
AAAAAAAYHYKLIVNSSDDKYLVSIPS

SEQ ID NO: 93290 - protein, 27 aa, Artificial Sequence
  Cyclic GFR-binding peptide
AAAAAAAQYNKLVKPKRGVLYLISIAS

SEQ ID NO: 93291 - protein, 27 aa, Artificial Sequence
  Cyclic GFR-binding peptide
AAAAAAARYKKLIVNNSSDFYLVSIAN

SEQ ID NO: 93292 - protein, 27 aa, Artificial Sequence
  Cyclic GFR-binding peptide
AAAAAAARYKKLIVNSSDDFYLVSIAN

SEQ ID NO: 93293 - protein, 27 aa, Artificial Sequence
  Cyclic GFR-binding peptide
AAAAAAARHKRLVKPTRGVYYLISTAS

SEQ ID NO: 93294 - protein, 29 aa, Artificial Sequence
  Cyclic GFR-binding peptide
AAAAAAAYHYKLFIPKKRVIEKYLVSIPS

SEQ ID NO: 93295 - protein, 27 aa, Artificial Sequence
  Cyclic GFR-binding peptide
AAAAAAARHKRLIKPTKGIYYLISTAS

SEQ ID NO: 93296 - protein, 27 aa, Artificial Sequence
  Cyclic GFR-binding peptide
AAAAAAARHKRLTPVGMDDYYLVSTAS

SEQ ID NO: 93297 - protein, 27 aa, Artificial Sequence
  Cyclic GFR-binding peptide
AAAAAAAYHYKLTPVGMDDKYLVSIPS

SEQ ID NO: 93298 - protein, 27 aa, Artificial Sequence
  Cyclic GFR-binding peptide
AAAAAAAYHYKLIVNNSSDKYLVSIPS

SEQ ID NO: 93299 - protein, 27 aa, Artificial Sequence
  Cyclic GFR-binding peptide
AAAAAAARHKRLIVNNSSDYYLVSTAS

SEQ ID NO: 93300 - protein, 27 aa, Artificial Sequence
  Cyclic GFR-binding peptide
AAAAAAAYHYKLVKPTRGVKYLISIPS

SEQ ID NO: 93301 - protein, 27 aa, Artificial Sequence
  Cyclic GFR-binding peptide
AAAAAAARHKRLIVNSSDDYYLVSTAS

SEQ ID NO: 93302 - protein, 27 aa, Artificial Sequence
  Cyclic GFR-binding peptide
AAAAAAARHKRLVVKDYEDYYLMSTAS

SEQ ID NO: 93303 - protein, 27 aa, Artificial Sequence
  Cyclic GFR-binding peptide
AAAAAAAQYNKLIKPTKGILYLISIAS

SEQ ID NO: 93304 - protein, 27 aa, Artificial Sequence
  Cyclic GFR-binding peptide
AAAAAAAQYNKLVVKDYEDLYLMSIAS

SEQ ID NO: 93305 - protein, 27 aa, Artificial Sequence
  Cyclic GFR-binding peptide
AAAAAAAQYNKLIVNSSDDLYLVSIAS

SEQ ID NO: 93306 - protein, 27 aa, Artificial Sequence
  Cyclic GFR-binding peptide
NAISILYFIGKTPKILKKYRAAAAAAA

SEQ ID NO: 93307 - protein, 29 aa, Artificial Sequence
  Cyclic GFR-binding peptide
SATSVLYYEIVRKKPIFLRKHRAAAAAAA

SEQ ID NO: 93308 - protein, 27 aa, Artificial Sequence
  Cyclic GFR-binding peptide
SPISMLYKDEYDKVVLKYHYAAAAAAA

SEQ ID NO: 93309 - protein, 27 aa, Artificial Sequence
  Cyclic GFR-binding peptide
SAISVLYLDSSNNVILKNYQAAAAAAA

SEQ ID NO: 93310 - protein, 27 aa, Artificial Sequence
  Cyclic GFR-binding peptide
NAISMLYFDEYDKVVLKKYRAAAAAAA

SEQ ID NO: 93311 - protein, 27 aa, Artificial Sequence
  Cyclic GFR-binding peptide
NAISILYFVGRTPKVLKKYRAAAAAAA

SEQ ID NO: 93312 - protein, 27 aa, Artificial Sequence
  Cyclic GFR-binding peptide
SATSMLYYDENEKVVLRKHRAAAAAAA

SEQ ID NO: 93313 - protein, 27 aa, Artificial Sequence
  Cyclic GFR-binding peptide
SPISILYKIGKTPKILKYHYAAAAAAA

SEQ ID NO: 93314 - protein, 29 aa, Artificial Sequence
  Cyclic GFR-binding peptide
NAISVLYFEIVRKKPIFLKKYRAAAAAAA

SEQ ID NO: 93315 - protein, 27 aa, Artificial Sequence
  Cyclic GFR-binding peptide
SPISMLYKDENEKVVLKYHYAAAAAAA

SEQ ID NO: 93316 - protein, 27 aa, Artificial Sequence
  Cyclic GFR-binding peptide
SATSILYYVGRKPKVLRKHRAAAAAAA

SEQ ID NO: 93317 - protein, 27 aa, Artificial Sequence
  Cyclic GFR-binding peptide
SPISILYKVGRKPKVLKYHYAAAAAAA

SEQ ID NO: 93318 - protein, 29 aa, Artificial Sequence
  Cyclic GFR-binding peptide
SAISVLYLEIVRKKPIFLKNYQAAAAAAA

SEQ ID NO: 93319 - protein, 27 aa, Artificial Sequence
  Cyclic GFR-binding peptide
SAISILYLVGRTPKVLKNYQAAAAAAA

SEQ ID NO: 93320 - protein, 27 aa, Artificial Sequence
  Cyclic GFR-binding peptide
NAISMLYFDENEKVVLKKYRAAAAAAA

SEQ ID NO: 93321 - protein, 27 aa, Artificial Sequence
  Cyclic GFR-binding peptide
SAISVLYLDDMGVPTLKNYQAAAAAAA

SEQ ID NO: 93322 - protein, 27 aa, Artificial Sequence
  Cyclic GFR-binding peptide
NAISVLYFDDMGVPTLKKYRAAAAAAA

SEQ ID NO: 93323 - protein, 27 aa, Artificial Sequence
  Cyclic GFR-binding peptide
NAISILYFVGRKPKVLKKYRAAAAAAA

SEQ ID NO: 93324 - protein, 27 aa, Artificial Sequence
  Cyclic GFR-binding peptide
SAISMLYLDENEKVVLKNYQAAAAAAA

SEQ ID NO: 93325 - protein, 27 aa, Artificial Sequence
  Cyclic GFR-binding peptide
SPISVLYKDDSSNVILKYHYAAAAAAA

SEQ ID NO: 93326 - protein, 27 aa, Artificial Sequence
  Cyclic GFR-binding peptide
SAISILYLVGRKPKVLKNYQAAAAAAA

SEQ ID NO: 93327 - protein, 27 aa, Artificial Sequence
  Cyclic GFR-binding peptide
NAISVLYFDSSNNVILKKYRAAAAAAA

SEQ ID NO: 93328 - protein, 27 aa, Artificial Sequence
  Cyclic GFR-binding peptide
NAISVLYFDDSSNVILKKYRAAAAAAA

SEQ ID NO: 93329 - protein, 27 aa, Artificial Sequence
  Cyclic GFR-binding peptide
SATSILYYVGRTPKVLRKHRAAAAAAA

SEQ ID NO: 93330 - protein, 29 aa, Artificial Sequence
  Cyclic GFR-binding peptide
SPISVLYKEIVRKKPIFLKYHYAAAAAAA

SEQ ID NO: 93331 - protein, 27 aa, Artificial Sequence
  Cyclic GFR-binding peptide
SATSILYYIGKTPKILRKHRAAAAAAA

SEQ ID NO: 93332 - protein, 27 aa, Artificial Sequence
  Cyclic GFR-binding peptide
SATSVLYYDDMGVPTLRKHRAAAAAAA

SEQ ID NO: 93333 - protein, 27 aa, Artificial Sequence
  Cyclic GFR-binding peptide
SPISVLYKDDMGVPTLKYHYAAAAAAA

SEQ ID NO: 93334 - protein, 27 aa, Artificial Sequence
  Cyclic GFR-binding peptide
SPISVLYKDSSNNVILKYHYAAAAAAA

SEQ ID NO: 93335 - protein, 27 aa, Artificial Sequence
  Cyclic GFR-binding peptide
SATSVLYYDSSNNVILRKHRAAAAAAA

SEQ ID NO: 93336 - protein, 27 aa, Artificial Sequence
  Cyclic GFR-binding peptide
SPISILYKVGRTPKVLKYHYAAAAAAA

SEQ ID NO: 93337 - protein, 27 aa, Artificial Sequence
  Cyclic GFR-binding peptide
SATSVLYYDDSSNVILRKHRAAAAAAA

SEQ ID NO: 93338 - protein, 27 aa, Artificial Sequence
  Cyclic GFR-binding peptide
SATSMLYYDEYDKVVLRKHRAAAAAAA

SEQ ID NO: 93339 - protein, 27 aa, Artificial Sequence
  Cyclic GFR-binding peptide
SAISILYLIGKTPKILKNYQAAAAAAA

SEQ ID NO: 93340 - protein, 27 aa, Artificial Sequence
  Cyclic GFR-binding peptide
SAISMLYLDEYDKVVLKNYQAAAAAAA

SEQ ID NO: 93341 - protein, 27 aa, Artificial Sequence
  Cyclic GFR-binding peptide
SAISVLYLDDSSNVILKNYQAAAAAAA

SEQ ID NO: 93342 - protein, 27 aa, Artificial Sequence
  Cyclic GFR-binding peptide
AAAAAAANSLQEVVKDYEDYYLMTLPE

SEQ ID NO: 93343 - protein, 27 aa, Artificial Sequence
  Cyclic GFR-binding peptide
AAAAAAANSLQEIKPTKGIYYVIPLPE

SEQ ID NO: 93344 - protein, 27 aa, Artificial Sequence
  Cyclic GFR-binding peptide
AAAAAAANSLQEVKPKRGVYYLITLPE

SEQ ID NO: 93345 - protein, 27 aa, Artificial Sequence
  Cyclic GFR-binding peptide
AAAAAAANSLQEVKPTRGVYYVIPLPE

SEQ ID NO: 93346 - protein, 27 aa, Artificial Sequence
  Cyclic GFR-binding peptide
AAAAAAAEYQKYIVNSSDDIFLVSIPS

SEQ ID NO: 93347 - protein, 27 aa, Artificial Sequence
  Cyclic GFR-binding peptide
AAAAAAAEYQKYVKPTRGVIFLISIPS

SEQ ID NO: 93348 - protein, 27 aa, Artificial Sequence
  Cyclic GFR-binding peptide
AAAAAAANSLQEVVKENEDYYLMTLPE

SEQ ID NO: 93349 - protein, 27 aa, Artificial Sequence
  Cyclic GFR-binding peptide
AAAAAAANSLQEVVNNASDYYLITLPE

SEQ ID NO: 93350 - protein, 27 aa, Artificial Sequence
  Cyclic GFR-binding peptide
AAAAAAANSLQEVKPKRGVYYVIPLPE

SEQ ID NO: 93351 - protein, 27 aa, Artificial Sequence
  Cyclic GFR-binding peptide
AAAAAAANSLQEVVNNASDYYVIPLPE

SEQ ID NO: 93352 - protein, 27 aa, Artificial Sequence
  Cyclic GFR-binding peptide
AAAAAAANSLQEVKPTRGVYYLITLPE

SEQ ID NO: 93353 - protein, 27 aa, Artificial Sequence
  Cyclic GFR-binding peptide
AAAAAAAEYQKYIKPTKGIIFLISIPS

SEQ ID NO: 93354 - protein, 27 aa, Artificial Sequence
  Cyclic GFR-binding peptide
AAAAAAAEYQKYVVNNASDIFLISIPS

SEQ ID NO: 93355 - protein, 27 aa, Artificial Sequence
  Cyclic GFR-binding peptide
AAAAAAANSLQEIVNSSDDYYVVPLPE

SEQ ID NO: 93356 - protein, 27 aa, Artificial Sequence
  Cyclic GFR-binding peptide
AAAAAAANSLQEVVKDYEDYYVMPLPE

SEQ ID NO: 93357 - protein, 27 aa, Artificial Sequence
  Cyclic GFR-binding peptide
AAAAAAAEYQKYVVKENEDIFLMSIPS

SEQ ID NO: 93358 - protein, 27 aa, Artificial Sequence
  Cyclic GFR-binding peptide
AAAAAAANSLQEVVKENEDYYVMPLPE

SEQ ID NO: 93359 - protein, 27 aa, Artificial Sequence
  Cyclic GFR-binding peptide
AAAAAAAEYQKYVVKDYEDIFLMSIPS

SEQ ID NO: 93360 - protein, 27 aa, Artificial Sequence
  Cyclic GFR-binding peptide
AAAAAAAQYNKLVVNNASDLYLISIAS

SEQ ID NO: 93361 - protein, 27 aa, Artificial Sequence
  Cyclic GFR-binding peptide
AAAAAAANSLQEIKPTKGIYYLITLPE

SEQ ID NO: 93362 - protein, 27 aa, Artificial Sequence
  Cyclic GFR-binding peptide
AAAAAAAEYQKYVKPKRGVIFLISIPS

SEQ ID NO: 93363 - protein, 27 aa, Artificial Sequence
  Cyclic GFR-binding peptide
AAAAAAARYKKLVVNNASDFYLISIAN

SEQ ID NO: 93364 - protein, 27 aa, Artificial Sequence
  Cyclic GFR-binding peptide
AAAAAAANSLQEIVNSSDDYYLVTLPE

SEQ ID NO: 93365 - protein, 27 aa, Artificial Sequence
  Cyclic GFR-binding peptide
EPLTMLYYDEYDKVVEQLSNAAAAAAA

SEQ ID NO: 93366 - protein, 27 aa, Artificial Sequence
  Cyclic GFR-binding peptide
EPLPIVYYIGKTPKIEQLSNAAAAAAA

SEQ ID NO: 93367 - protein, 27 aa, Artificial Sequence
  Cyclic GFR-binding peptide
EPLTILYYVGRKPKVEQLSNAAAAAAA

SEQ ID NO: 93368 - protein, 27 aa, Artificial Sequence
  Cyclic GFR-binding peptide
EPLPIVYYVGRTPKVEQLSNAAAAAAA

SEQ ID NO: 93369 - protein, 27 aa, Artificial Sequence
  Cyclic GFR-binding peptide
SPISVLFIDDSSNVIYKQYEAAAAAAA

SEQ ID NO: 93370 - protein, 27 aa, Artificial Sequence
  Cyclic GFR-binding peptide
SPISILFIVGRTPKVYKQYEAAAAAAA

SEQ ID NO: 93371 - protein, 27 aa, Artificial Sequence
  Cyclic GFR-binding peptide
EPLTMLYYDENEKVVEQLSNAAAAAAA

SEQ ID NO: 93372 - protein, 27 aa, Artificial Sequence
  Cyclic GFR-binding peptide
EPLTILYYDSANNVVEQLSNAAAAAAA

SEQ ID NO: 93373 - protein, 27 aa, Artificial Sequence
  Cyclic GFR-binding peptide
EPLPIVYYVGRKPKVEQLSNAAAAAAA

SEQ ID NO: 93374 - protein, 27 aa, Artificial Sequence
  Cyclic GFR-binding peptide
EPLPIVYYDSANNVVEQLSNAAAAAAA

SEQ ID NO: 93375 - protein, 27 aa, Artificial Sequence
  Cyclic GFR-binding peptide
EPLTILYYVGRTPKVEQLSNAAAAAAA

SEQ ID NO: 93376 - protein, 27 aa, Artificial Sequence
  Cyclic GFR-binding peptide
SPISILFIIGKTPKIYKQYEAAAAAAA

SEQ ID NO: 93377 - protein, 27 aa, Artificial Sequence
  Cyclic GFR-binding peptide
SPISILFIDSANNVVYKQYEAAAAAAA

SEQ ID NO: 93378 - protein, 27 aa, Artificial Sequence
  Cyclic GFR-binding peptide
EPLPVVYYDDSSNVIEQLSNAAAAAAA

SEQ ID NO: 93379 - protein, 27 aa, Artificial Sequence
  Cyclic GFR-binding peptide
EPLPMVYYDEYDKVVEQLSNAAAAAAA

SEQ ID NO: 93380 - protein, 27 aa, Artificial Sequence
  Cyclic GFR-binding peptide
SPISMLFIDENEKVVYKQYEAAAAAAA

SEQ ID NO: 93381 - protein, 27 aa, Artificial Sequence
  Cyclic GFR-binding peptide
EPLPMVYYDENEKVVEQLSNAAAAAAA

SEQ ID NO: 93382 - protein, 27 aa, Artificial Sequence
  Cyclic GFR-binding peptide
SPISMLFIDEYDKVVYKQYEAAAAAAA

SEQ ID NO: 93383 - protein, 27 aa, Artificial Sequence
  Cyclic GFR-binding peptide
SAISILYLDSANNVVLKNYQAAAAAAA

SEQ ID NO: 93384 - protein, 27 aa, Artificial Sequence
  Cyclic GFR-binding peptide
EPLTILYYIGKTPKIEQLSNAAAAAAA

SEQ ID NO: 93385 - protein, 27 aa, Artificial Sequence
  Cyclic GFR-binding peptide
SPISILFIVGRKPKVYKQYEAAAAAAA

SEQ ID NO: 93386 - protein, 27 aa, Artificial Sequence
  Cyclic GFR-binding peptide
NAISILYFDSANNVVLKKYRAAAAAAA

SEQ ID NO: 93387 - protein, 27 aa, Artificial Sequence
  Cyclic GFR-binding peptide
EPLTVLYYDDSSNVIEQLSNAAAAAAA

SEQ ID NO: 93388 - protein, 29 aa, Artificial Sequence
  Cyclic GFR-binding peptide
AAAAAAAVTAKKLKPKKRVYEIKRVQVPR

SEQ ID NO: 93389 - protein, 29 aa, Artificial Sequence
  Cyclic GFR-binding peptide
AAAAAAAVQVEKLKPKKRVYEVKAVKVSR

SEQ ID NO: 93390 - protein, 29 aa, Artificial Sequence
  Cyclic GFR-binding peptide
AAAAAAAVQVEKFIPKKRVIEVKAVKVSR

SEQ ID NO: 93391 - protein, 29 aa, Artificial Sequence
  Cyclic GFR-binding peptide
AAAAAAAVQVEKHQGQHPKIRVKAMKVSR

SEQ ID NO: 93392 - protein, 29 aa, Artificial Sequence
  Cyclic GFR-binding peptide
AAAAAAAVTAKKHQGQHPKIRIKRMQVPR

SEQ ID NO: 93393 - protein, 29 aa, Artificial Sequence
  Cyclic GFR-binding peptide
AAAAAAASMEGLLKPKKRVYEMIQVTINS

SEQ ID NO: 93394 - protein, 29 aa, Artificial Sequence
  Cyclic GFR-binding peptide
AAAAAAASMEGIFIPKKRVIEMIQVTINS

SEQ ID NO: 93395 - protein, 29 aa, Artificial Sequence
  Cyclic GFR-binding peptide
AAAAAAASMEGLHQGQHPKIRMIQMTINS

SEQ ID NO: 93396 - protein, 29 aa, Artificial Sequence
  Cyclic GFR-binding peptide
AAAAAAASMEGILKPKKRVYEMIQVTINS

SEQ ID NO: 93397 - protein, 29 aa, Artificial Sequence
  Cyclic GFR-binding peptide
AAAAAAASMEGLFIPKKRVIEMIQVTINS

SEQ ID NO: 93398 - protein, 29 aa, Artificial Sequence
  Cyclic GFR-binding peptide
AAAAAAAVTAKKFIPKKRVIEIKRVQVPR

SEQ ID NO: 93399 - protein, 29 aa, Artificial Sequence
  Cyclic GFR-binding peptide
AAAAAAASMEGIHQGQHPKIRMIQMTINS

SEQ ID NO: 93400 - protein, 29 aa, Artificial Sequence
  Cyclic GFR-binding peptide
RPVQVRKIEYVRKKPKLKKATVAAAAAAA

SEQ ID NO: 93401 - protein, 29 aa, Artificial Sequence
  Cyclic GFR-binding peptide
RSVKVAKVEYVRKKPKLKEVQVAAAAAAA

SEQ ID NO: 93402 - protein, 29 aa, Artificial Sequence
  Cyclic GFR-binding peptide
RSVKVAKVEIVRKKPIFKEVQVAAAAAAA

SEQ ID NO: 93403 - protein, 29 aa, Artificial Sequence
  Cyclic GFR-binding peptide
RSVKMAKVRIKPHQGQHKEVQVAAAAAAA

SEQ ID NO: 93404 - protein, 29 aa, Artificial Sequence
  Cyclic GFR-binding peptide
RPVQMRKIRIKPHQGQHKKATVAAAAAAA

SEQ ID NO: 93405 - protein, 29 aa, Artificial Sequence
  Cyclic GFR-binding peptide
SNITVQIMEYVRKKPKLLGEMSAAAAAAA

SEQ ID NO: 93406 - protein, 29 aa, Artificial Sequence
  Cyclic GFR-binding peptide
SNITVQIMEIVRKKPIFIGEMSAAAAAAA

SEQ ID NO: 93407 - protein, 29 aa, Artificial Sequence
  Cyclic GFR-binding peptide
SNITMQIMRIKPHQGQHLGEMSAAAAAAA

SEQ ID NO: 93408 - protein, 29 aa, Artificial Sequence
  Cyclic GFR-binding peptide
SNITVQIMEYVRKKPKLIGEMSAAAAAAA

SEQ ID NO: 93409 - protein, 29 aa, Artificial Sequence
  Cyclic GFR-binding peptide
SNITVQIMEIVRKKPIFLGEMSAAAAAAA

SEQ ID NO: 93410 - protein, 29 aa, Artificial Sequence
  Cyclic GFR-binding peptide
RPVQVRKIEIVRKKPIFKKATVAAAAAAA

SEQ ID NO: 93411 - protein, 29 aa, Artificial Sequence
  Cyclic GFR-binding peptide
SNITMQIMRIKPHQGQHIGEMSAAAAAAA

SEQ ID NO: 93412 - protein, 27 aa, Artificial Sequence
  Cyclic GFR-binding peptide
AAAAAAAEYKFKVKPTRGVLYLISIPE

SEQ ID NO: 93413 - protein, 27 aa, Artificial Sequence
  Cyclic GFR-binding peptide
AAAAAAAEYKFKTPVGMDDLYLVSIPE

SEQ ID NO: 93414 - protein, 27 aa, Artificial Sequence
  Cyclic GFR-binding peptide
AAAAAAAEYQKYVKPKRGVIYLISIPS

SEQ ID NO: 93415 - protein, 27 aa, Artificial Sequence
  Cyclic GFR-binding peptide
AAAAAAAEYQKYVVKDYEDIYLMSIPS

SEQ ID NO: 93416 - protein, 27 aa, Artificial Sequence
  Cyclic GFR-binding peptide
AAAAAAAEYKFKIKPTKGILYLISIPE

SEQ ID NO: 93417 - protein, 27 aa, Artificial Sequence
  Cyclic GFR-binding peptide
AAAAAAAYHYKLYTVVGKDKYLISIPS

SEQ ID NO: 93418 - protein, 27 aa, Artificial Sequence
  Cyclic GFR-binding peptide
AAAAAAARYKKLYTVVGKDFYLISIAN

SEQ ID NO: 93419 - protein, 27 aa, Artificial Sequence
  Cyclic GFR-binding peptide
AAAAAAAEYQKYVVNNAADIYLISIPS

SEQ ID NO: 93420 - protein, 27 aa, Artificial Sequence
  Cyclic GFR-binding peptide
AAAAAAAEYQKYVKPTRGVIYLISIPS

SEQ ID NO: 93421 - protein, 27 aa, Artificial Sequence
  Cyclic GFR-binding peptide
AAAAAAAEYQKYTPVGMDDIYLVSIPS

SEQ ID NO: 93422 - protein, 27 aa, Artificial Sequence
  Cyclic GFR-binding peptide
AAAAAAAEYKFKVVKDYEDLYLMSIPE

SEQ ID NO: 93423 - protein, 27 aa, Artificial Sequence
  Cyclic GFR-binding peptide
AAAAAAAEYKFKVVNNAADLYLISIPE

SEQ ID NO: 93424 - protein, 27 aa, Artificial Sequence
  Cyclic GFR-binding peptide
AAAAAAAEYQKYVVKENEDIYLMSIPS

SEQ ID NO: 93425 - protein, 27 aa, Artificial Sequence
  Cyclic GFR-binding peptide
AAAAAAAEYQKYIKPTKGIIYLISIPS

SEQ ID NO: 93426 - protein, 27 aa, Artificial Sequence
  Cyclic GFR-binding peptide
AAAAAAARYKKLVVNNAADFYLISIAN

SEQ ID NO: 93427 - protein, 27 aa, Artificial Sequence
  Cyclic GFR-binding peptide
AAAAAAAYHYKLVVNNAADKYLISIPS

SEQ ID NO: 93428 - protein, 27 aa, Artificial Sequence
  Cyclic GFR-binding peptide
AAAAAAAEYKFKIVNNSSDLYLVSIPE

SEQ ID NO: 93429 - protein, 27 aa, Artificial Sequence
  Cyclic GFR-binding peptide
AAAAAAAEYQKYIVNSSDDIYLVSIPS

SEQ ID NO: 93430 - protein, 27 aa, Artificial Sequence
  Cyclic GFR-binding peptide
AAAAAAAEYKFKIVNSSDDLYLVSIPE

SEQ ID NO: 93431 - protein, 27 aa, Artificial Sequence
  Cyclic GFR-binding peptide
AAAAAAAEYKFKVKPKRGVLYLISIPE

SEQ ID NO: 93432 - protein, 27 aa, Artificial Sequence
  Cyclic GFR-binding peptide
AAAAAAAEYQKYYTVVGKDIYLISIPS

SEQ ID NO: 93433 - protein, 27 aa, Artificial Sequence
  Cyclic GFR-binding peptide
AAAAAAAEYKFKVVKENEDLYLMSIPE

SEQ ID NO: 93434 - protein, 27 aa, Artificial Sequence
  Cyclic GFR-binding peptide
AAAAAAAEYQKYIVNNSSDIYLVSIPS

SEQ ID NO: 93435 - protein, 27 aa, Artificial Sequence
  Cyclic GFR-binding peptide
AAAAAAAEYKFKYTVVGKDLYLISIPE

SEQ ID NO: 93436 - protein, 27 aa, Artificial Sequence
  Cyclic GFR-binding peptide
EPISILYLVGRTPKVKFKYEAAAAAAA

SEQ ID NO: 93437 - protein, 27 aa, Artificial Sequence
  Cyclic GFR-binding peptide
EPISVLYLDDMGVPTKFKYEAAAAAAA

SEQ ID NO: 93438 - protein, 27 aa, Artificial Sequence
  Cyclic GFR-binding peptide
SPISILYIVGRKPKVYKQYEAAAAAAA

SEQ ID NO: 93439 - protein, 27 aa, Artificial Sequence
  Cyclic GFR-binding peptide
SPISMLYIDEYDKVVYKQYEAAAAAAA

SEQ ID NO: 93440 - protein, 27 aa, Artificial Sequence
  Cyclic GFR-binding peptide
EPISILYLIGKTPKIKFKYEAAAAAAA

SEQ ID NO: 93441 - protein, 27 aa, Artificial Sequence
  Cyclic GFR-binding peptide
SPISILYKDKGVVTYLKYHYAAAAAAA

SEQ ID NO: 93442 - protein, 27 aa, Artificial Sequence
  Cyclic GFR-binding peptide
NAISILYFDKGVVTYLKKYRAAAAAAA

SEQ ID NO: 93443 - protein, 27 aa, Artificial Sequence
  Cyclic GFR-binding peptide
SPISILYIDAANNVVYKQYEAAAAAAA

SEQ ID NO: 93444 - protein, 27 aa, Artificial Sequence
  Cyclic GFR-binding peptide
SPISILYIVGRTPKVYKQYEAAAAAAA

SEQ ID NO: 93445 - protein, 27 aa, Artificial Sequence
  Cyclic GFR-binding peptide
SPISVLYIDDMGVPTYKQYEAAAAAAA

SEQ ID NO: 93446 - protein, 27 aa, Artificial Sequence
  Cyclic GFR-binding peptide
EPISMLYLDEYDKVVKFKYEAAAAAAA

SEQ ID NO: 93447 - protein, 27 aa, Artificial Sequence
  Cyclic GFR-binding peptide
EPISILYLDAANNVVKFKYEAAAAAAA

SEQ ID NO: 93448 - protein, 27 aa, Artificial Sequence
  Cyclic GFR-binding peptide
SPISMLYIDENEKVVYKQYEAAAAAAA

SEQ ID NO: 93449 - protein, 27 aa, Artificial Sequence
  Cyclic GFR-binding peptide
SPISILYIIGKTPKIYKQYEAAAAAAA

SEQ ID NO: 93450 - protein, 27 aa, Artificial Sequence
  Cyclic GFR-binding peptide
NAISILYFDAANNVVLKKYRAAAAAAA

SEQ ID NO: 93451 - protein, 27 aa, Artificial Sequence
  Cyclic GFR-binding peptide
SPISILYKDAANNVVLKYHYAAAAAAA

SEQ ID NO: 93452 - protein, 27 aa, Artificial Sequence
  Cyclic GFR-binding peptide
EPISVLYLDSSNNVIKFKYEAAAAAAA

SEQ ID NO: 93453 - protein, 27 aa, Artificial Sequence
  Cyclic GFR-binding peptide
SPISVLYIDDSSNVIYKQYEAAAAAAA

SEQ ID NO: 93454 - protein, 27 aa, Artificial Sequence
  Cyclic GFR-binding peptide
EPISVLYLDDSSNVIKFKYEAAAAAAA

SEQ ID NO: 93455 - protein, 27 aa, Artificial Sequence
  Cyclic GFR-binding peptide
EPISILYLVGRKPKVKFKYEAAAAAAA

SEQ ID NO: 93456 - protein, 27 aa, Artificial Sequence
  Cyclic GFR-binding peptide
SPISILYIDKGVVTYYKQYEAAAAAAA

SEQ ID NO: 93457 - protein, 27 aa, Artificial Sequence
  Cyclic GFR-binding peptide
EPISMLYLDENEKVVKFKYEAAAAAAA

SEQ ID NO: 93458 - protein, 27 aa, Artificial Sequence
  Cyclic GFR-binding peptide
SPISVLYIDSSNNVIYKQYEAAAAAAA

SEQ ID NO: 93459 - protein, 27 aa, Artificial Sequence
  Cyclic GFR-binding peptide
EPISILYLDKGVVTYKFKYEAAAAAAA

SEQ ID NO: 93460 - protein, 27 aa, Artificial Sequence
  Cyclic GFR-binding peptide
AAAAAAAPIKGYIIQQKDNFYLMNIPS

SEQ ID NO: 93461 - protein, 27 aa, Artificial Sequence
  Cyclic GFR-binding peptide
AAAAAAAPIKGYVVKDYEDFYLMNIPS

SEQ ID NO: 93462 - protein, 27 aa, Artificial Sequence
  Cyclic GFR-binding peptide
AAAAAAAPIKGYIVNSSDDFYLVNIPS

SEQ ID NO: 93463 - protein, 27 aa, Artificial Sequence
  Cyclic GFR-binding peptide
AAAAAAAPIKGYVVNNAADFYLINIPS

SEQ ID NO: 93464 - protein, 27 aa, Artificial Sequence
  Cyclic GFR-binding peptide
AAAAAAAPIKGYYTVVGKDFYLINIPS

SEQ ID NO: 93465 - protein, 27 aa, Artificial Sequence
  Cyclic GFR-binding peptide
AAAAAAAPIKGYLLVRGNDFYLMNIPS

SEQ ID NO: 93466 - protein, 27 aa, Artificial Sequence
  Cyclic GFR-binding peptide
AAAAAAAPIKGYVVKENEDFYLMNIPS

SEQ ID NO: 93467 - protein, 27 aa, Artificial Sequence
  Cyclic GFR-binding peptide
AAAAAAAPIKGYVVNNASDFYLINIPS

SEQ ID NO: 93468 - protein, 27 aa, Artificial Sequence
  Cyclic GFR-binding peptide
AAAAAAAPIKGYTPVGMDDFYLVNIPS

SEQ ID NO: 93469 - protein, 27 aa, Artificial Sequence
  Cyclic GFR-binding peptide
AAAAAAAPIKGYIVNNSSDFYLVNIPS

SEQ ID NO: 93470 - protein, 27 aa, Artificial Sequence
  Cyclic GFR-binding peptide
SPINMLYFNDKQQIIYGKIPAAAAAAA

SEQ ID NO: 93471 - protein, 27 aa, Artificial Sequence
  Cyclic GFR-binding peptide
SPINMLYFDEYDKVVYGKIPAAAAAAA

SEQ ID NO: 93472 - protein, 27 aa, Artificial Sequence
  Cyclic GFR-binding peptide
SPINVLYFDDSSNVIYGKIPAAAAAAA

SEQ ID NO: 93473 - protein, 27 aa, Artificial Sequence
  Cyclic GFR-binding peptide
SPINILYFDAANNVVYGKIPAAAAAAA

SEQ ID NO: 93474 - protein, 27 aa, Artificial Sequence
  Cyclic GFR-binding peptide
SPINILYFDKGVVTYYGKIPAAAAAAA

SEQ ID NO: 93475 - protein, 27 aa, Artificial Sequence
  Cyclic GFR-binding peptide
SPINMLYFDNGRVLLYGKIPAAAAAAA

SEQ ID NO: 93476 - protein, 27 aa, Artificial Sequence
  Cyclic GFR-binding peptide
SPINMLYFDENEKVVYGKIPAAAAAAA

SEQ ID NO: 93477 - protein, 27 aa, Artificial Sequence
  Cyclic GFR-binding peptide
SPINILYFDSANNVVYGKIPAAAAAAA

SEQ ID NO: 93478 - protein, 27 aa, Artificial Sequence
  Cyclic GFR-binding peptide
SPINVLYFDDMGVPTYGKIPAAAAAAA

SEQ ID NO: 93479 - protein, 27 aa, Artificial Sequence
  Cyclic GFR-binding peptide
SPINVLYFDSSNNVIYGKIPAAAAAAA

SEQ ID NO: 93480 - protein, 27 aa, Artificial Sequence
  Cyclic GFR-binding peptide
AAAAAAAEYQKYVVNNASDIYLISIPS

SEQ ID NO: 93481 - protein, 27 aa, Artificial Sequence
  Cyclic GFR-binding peptide
AAAAAAAEYQKYIIQQKDNIYLMSIPS

SEQ ID NO: 93482 - protein, 27 aa, Artificial Sequence
  Cyclic GFR-binding peptide
AAAAAAAEYQKYLLVRGNDIYLMSIPS

SEQ ID NO: 93483 - protein, 27 aa, Artificial Sequence
  Cyclic GFR-binding peptide
SPISILYIDSANNVVYKQYEAAAAAAA

SEQ ID NO: 93484 - protein, 27 aa, Artificial Sequence
  Cyclic GFR-binding peptide
SPISMLYINDKQQIIYKQYEAAAAAAA

SEQ ID NO: 93485 - protein, 27 aa, Artificial Sequence
  Cyclic GFR-binding peptide
SPISMLYIDNGRVLLYKQYEAAAAAAA

SEQ ID NO: 93486 - protein, 27 aa, Artificial Sequence
  Cyclic GFR-binding peptide
AAAAAAAPYVKLYTVVGKDFFLISLSS

SEQ ID NO: 93487 - protein, 27 aa, Artificial Sequence
  Cyclic GFR-binding peptide
AAAAAAAPYVKLIKPTKGIFFLISLSS

SEQ ID NO: 93488 - protein, 27 aa, Artificial Sequence
  Cyclic GFR-binding peptide
AAAAAAAPYVKLIIQQKDNFFLMSLSS

SEQ ID NO: 93489 - protein, 27 aa, Artificial Sequence
  Cyclic GFR-binding peptide
AAAAAAAPYVKLIVNSSDDFFLVSLSS

SEQ ID NO: 93490 - protein, 27 aa, Artificial Sequence
  Cyclic GFR-binding peptide
AAAAAAAPYVKLVKPKRGVFFLISLSS

SEQ ID NO: 93491 - protein, 27 aa, Artificial Sequence
  Cyclic GFR-binding peptide
AAAAAAAPYVKLVKPTRGVFFLISLSS

SEQ ID NO: 93492 - protein, 27 aa, Artificial Sequence
  Cyclic GFR-binding peptide
AAAAAAAPYVKLTPVGMDDFFLVSLSS

SEQ ID NO: 93493 - protein, 29 aa, Artificial Sequence
  Cyclic GFR-binding peptide
AAAAAAAPYVKLHQGQHPKIRFFLMSLSS

SEQ ID NO: 93494 - protein, 27 aa, Artificial Sequence
  Cyclic GFR-binding peptide
AAAAAAAPYVKLVVNKNEDFFLISLSS

SEQ ID NO: 93495 - protein, 27 aa, Artificial Sequence
  Cyclic GFR-binding peptide
AAAAAAAPYVKLVVNNASDFFLISLSS

SEQ ID NO: 93496 - protein, 27 aa, Artificial Sequence
  Cyclic GFR-binding peptide
AAAAAAAPYVKLVVKENEDFFLMSLSS

SEQ ID NO: 93497 - protein, 27 aa, Artificial Sequence
  Cyclic GFR-binding peptide
AAAAAAAPYVKLIVNNSSDFFLVSLSS

SEQ ID NO: 93498 - protein, 29 aa, Artificial Sequence
  Cyclic GFR-binding peptide
AAAAAAAPYVKLLKPKKRVYEFFLVSLSS

SEQ ID NO: 93499 - protein, 27 aa, Artificial Sequence
  Cyclic GFR-binding peptide
AAAAAAAPYVKLLLVRGNDFFLMSLSS

SEQ ID NO: 93500 - protein, 27 aa, Artificial Sequence
  Cyclic GFR-binding peptide
AAAAAAAPYVKLVVKDYEDFFLMSLSS

SEQ ID NO: 93501 - protein, 27 aa, Artificial Sequence
  Cyclic GFR-binding peptide
AAAAAAAPYVKLVVNNAADFFLISLSS

SEQ ID NO: 93502 - protein, 27 aa, Artificial Sequence
  Cyclic GFR-binding peptide
SSLSILFFDKGVVTYLKVYPAAAAAAA

SEQ ID NO: 93503 - protein, 27 aa, Artificial Sequence
  Cyclic GFR-binding peptide
SSLSILFFIGKTPKILKVYPAAAAAAA

SEQ ID NO: 93504 - protein, 27 aa, Artificial Sequence
  Cyclic GFR-binding peptide
SSLSMLFFNDKQQIILKVYPAAAAAAA

SEQ ID NO: 93505 - protein, 27 aa, Artificial Sequence
  Cyclic GFR-binding peptide
SSLSVLFFDDSSNVILKVYPAAAAAAA

SEQ ID NO: 93506 - protein, 27 aa, Artificial Sequence
  Cyclic GFR-binding peptide
SSLSILFFVGRKPKVLKVYPAAAAAAA

SEQ ID NO: 93507 - protein, 27 aa, Artificial Sequence
  Cyclic GFR-binding peptide
SSLSILFFVGRTPKVLKVYPAAAAAAA

SEQ ID NO: 93508 - protein, 27 aa, Artificial Sequence
  Cyclic GFR-binding peptide
SSLSVLFFDDMGVPTLKVYPAAAAAAA

SEQ ID NO: 93509 - protein, 29 aa, Artificial Sequence
  Cyclic GFR-binding peptide
SSLSMLFFRIKPHQGQHLKVYPAAAAAAA

SEQ ID NO: 93510 - protein, 27 aa, Artificial Sequence
  Cyclic GFR-binding peptide
SSLSILFFDENKNVVLKVYPAAAAAAA

SEQ ID NO: 93511 - protein, 27 aa, Artificial Sequence
  Cyclic GFR-binding peptide
SSLSILFFDSANNVVLKVYPAAAAAAA

SEQ ID NO: 93512 - protein, 27 aa, Artificial Sequence
  Cyclic GFR-binding peptide
SSLSMLFFDENEKVVLKVYPAAAAAAA

SEQ ID NO: 93513 - protein, 27 aa, Artificial Sequence
  Cyclic GFR-binding peptide
SSLSVLFFDSSNNVILKVYPAAAAAAA

SEQ ID NO: 93514 - protein, 29 aa, Artificial Sequence
  Cyclic GFR-binding peptide
SSLSVLFFEYVRKKPKLLKVYPAAAAAAA

SEQ ID NO: 93515 - protein, 27 aa, Artificial Sequence
  Cyclic GFR-binding peptide
SSLSMLFFDNGRVLLLKVYPAAAAAAA

SEQ ID NO: 93516 - protein, 27 aa, Artificial Sequence
  Cyclic GFR-binding peptide
SSLSMLFFDEYDKVVLKVYPAAAAAAA

SEQ ID NO: 93517 - protein, 27 aa, Artificial Sequence
  Cyclic GFR-binding peptide
SSLSILFFDAANNVVLKVYPAAAAAAA

SEQ ID NO: 93518 - protein, 27 aa, Artificial Sequence
  Cyclic GFR-binding peptide
AAAAAAASMEGIIVNSSDDMIQVTINS

SEQ ID NO: 93519 - protein, 27 aa, Artificial Sequence
  Cyclic GFR-binding peptide
AAAAAAAVTAKKVVKENEDIKRMQVPR

SEQ ID NO: 93520 - protein, 27 aa, Artificial Sequence
  Cyclic GFR-binding peptide
AAAAAAASMEGIVVKDYEDMIQMTINS

SEQ ID NO: 93521 - protein, 27 aa, Artificial Sequence
  Cyclic GFR-binding peptide
AAAAAAAVTAKKIKPTKGIIKRIQVPR

SEQ ID NO: 93522 - protein, 27 aa, Artificial Sequence
  Cyclic GFR-binding peptide
AAAAAAASMEGIVKPTRGVMIQITINS

SEQ ID NO: 93523 - protein, 29 aa, Artificial Sequence
  Cyclic GFR-binding peptide
AAAAAAANSLQEFIPKKRVIEYYVVPLPE

SEQ ID NO: 93524 - protein, 27 aa, Artificial Sequence
  Cyclic GFR-binding peptide
AAAAAAAVQVEKVKPKRGVVKAIKVSR

SEQ ID NO: 93525 - protein, 27 aa, Artificial Sequence
  Cyclic GFR-binding peptide
AAAAAAAVQVEKVVKENEDVKAMKVSR

SEQ ID NO: 93526 - protein, 27 aa, Artificial Sequence
  Cyclic GFR-binding peptide
AAAAAAAVTAKKIVNSSDDIKRVQVPR

SEQ ID NO: 93527 - protein, 27 aa, Artificial Sequence
  Cyclic GFR-binding peptide
AAAAAAAVQVEKIKPTKGIVKAIKVSR

SEQ ID NO: 93528 - protein, 29 aa, Artificial Sequence
  Cyclic GFR-binding peptide
AAAAAAANSLQEFIPKKRVIEYYLVTLPE

SEQ ID NO: 93529 - protein, 27 aa, Artificial Sequence
  Cyclic GFR-binding peptide
AAAAAAAVQVEKIVNSSDDVKAVKVSR

SEQ ID NO: 93530 - protein, 27 aa, Artificial Sequence
  Cyclic GFR-binding peptide
AAAAAAAVTAKKVKPKRGVIKRIQVPR

SEQ ID NO: 93531 - protein, 27 aa, Artificial Sequence
  Cyclic GFR-binding peptide
AAAAAAAVQVEKVKPTRGVVKAIKVSR

SEQ ID NO: 93532 - protein, 27 aa, Artificial Sequence
  Cyclic GFR-binding peptide
AAAAAAAVTAKKVKPTRGVIKRIQVPR

SEQ ID NO: 93533 - protein, 29 aa, Artificial Sequence
  Cyclic GFR-binding peptide
AAAAAAANSLQELKPKKRVYEYYLVTLPE

SEQ ID NO: 93534 - protein, 27 aa, Artificial Sequence
  Cyclic GFR-binding peptide
AAAAAAASMEGIVKPKRGVMIQITINS

SEQ ID NO: 93535 - protein, 27 aa, Artificial Sequence
  Cyclic GFR-binding peptide
AAAAAAASMEGIVVKENEDMIQMTINS

SEQ ID NO: 93536 - protein, 27 aa, Artificial Sequence
  Cyclic GFR-binding peptide
AAAAAAASMEGIIKPTKGIMIQITINS

SEQ ID NO: 93537 - protein, 29 aa, Artificial Sequence
  Cyclic GFR-binding peptide
AAAAAAANSLQEHQGQHPKIRYYLMTLPE

SEQ ID NO: 93538 - protein, 27 aa, Artificial Sequence
  Cyclic GFR-binding peptide
AAAAAAAVTAKKVVKDYEDIKRMQVPR

SEQ ID NO: 93539 - protein, 29 aa, Artificial Sequence
  Cyclic GFR-binding peptide
AAAAAAANSLQEHQGQHPKIRYYVMPLPE

SEQ ID NO: 93540 - protein, 29 aa, Artificial Sequence
  Cyclic GFR-binding peptide
AAAAAAANSLQELKPKKRVYEYYVVPLPE

SEQ ID NO: 93541 - protein, 27 aa, Artificial Sequence
  Cyclic GFR-binding peptide
AAAAAAAVQVEKVVKDYEDVKAMKVSR

SEQ ID NO: 93542 - protein, 27 aa, Artificial Sequence
  Cyclic GFR-binding peptide
SNITVQIMDDSSNVIIGEMSAAAAAAA

SEQ ID NO: 93543 - protein, 27 aa, Artificial Sequence
  Cyclic GFR-binding peptide
RPVQMRKIDENEKVVKKATVAAAAAAA

SEQ ID NO: 93544 - protein, 27 aa, Artificial Sequence
  Cyclic GFR-binding peptide
SNITMQIMDEYDKVVIGEMSAAAAAAA

SEQ ID NO: 93545 - protein, 27 aa, Artificial Sequence
  Cyclic GFR-binding peptide
RPVQIRKIIGKTPKIKKATVAAAAAAA

SEQ ID NO: 93546 - protein, 27 aa, Artificial Sequence
  Cyclic GFR-binding peptide
SNITIQIMVGRTPKVIGEMSAAAAAAA

SEQ ID NO: 93547 - protein, 29 aa, Artificial Sequence
  Cyclic GFR-binding peptide
EPLPVVYYEIVRKKPIFEQLSNAAAAAAA

SEQ ID NO: 93548 - protein, 27 aa, Artificial Sequence
  Cyclic GFR-binding peptide
RSVKIAKVVGRKPKVKEVQVAAAAAAA

SEQ ID NO: 93549 - protein, 27 aa, Artificial Sequence
  Cyclic GFR-binding peptide
RSVKMAKVDENEKVVKEVQVAAAAAAA

SEQ ID NO: 93550 - protein, 27 aa, Artificial Sequence
  Cyclic GFR-binding peptide
RPVQVRKIDDSSNVIKKATVAAAAAAA

SEQ ID NO: 93551 - protein, 27 aa, Artificial Sequence
  Cyclic GFR-binding peptide
RSVKIAKVIGKTPKIKEVQVAAAAAAA

SEQ ID NO: 93552 - protein, 29 aa, Artificial Sequence
  Cyclic GFR-binding peptide
EPLTVLYYEIVRKKPIFEQLSNAAAAAAA

SEQ ID NO: 93553 - protein, 27 aa, Artificial Sequence
  Cyclic GFR-binding peptide
RSVKVAKVDDSSNVIKEVQVAAAAAAA

SEQ ID NO: 93554 - protein, 27 aa, Artificial Sequence
  Cyclic GFR-binding peptide
RPVQIRKIVGRKPKVKKATVAAAAAAA

SEQ ID NO: 93555 - protein, 27 aa, Artificial Sequence
  Cyclic GFR-binding peptide
RSVKIAKVVGRTPKVKEVQVAAAAAAA

SEQ ID NO: 93556 - protein, 27 aa, Artificial Sequence
  Cyclic GFR-binding peptide
RPVQIRKIVGRTPKVKKATVAAAAAAA

SEQ ID NO: 93557 - protein, 29 aa, Artificial Sequence
  Cyclic GFR-binding peptide
EPLTVLYYEYVRKKPKLEQLSNAAAAAAA

SEQ ID NO: 93558 - protein, 27 aa, Artificial Sequence
  Cyclic GFR-binding peptide
SNITIQIMVGRKPKVIGEMSAAAAAAA

SEQ ID NO: 93559 - protein, 27 aa, Artificial Sequence
  Cyclic GFR-binding peptide
SNITMQIMDENEKVVIGEMSAAAAAAA

SEQ ID NO: 93560 - protein, 27 aa, Artificial Sequence
  Cyclic GFR-binding peptide
SNITIQIMIGKTPKIIGEMSAAAAAAA

SEQ ID NO: 93561 - protein, 29 aa, Artificial Sequence
  Cyclic GFR-binding peptide
EPLTMLYYRIKPHQGQHEQLSNAAAAAAA

SEQ ID NO: 93562 - protein, 27 aa, Artificial Sequence
  Cyclic GFR-binding peptide
RPVQMRKIDEYDKVVKKATVAAAAAAA

SEQ ID NO: 93563 - protein, 29 aa, Artificial Sequence
  Cyclic GFR-binding peptide
EPLPMVYYRIKPHQGQHEQLSNAAAAAAA

SEQ ID NO: 93564 - protein, 29 aa, Artificial Sequence
  Cyclic GFR-binding peptide
EPLPVVYYEYVRKKPKLEQLSNAAAAAAA

SEQ ID NO: 93565 - protein, 27 aa, Artificial Sequence
  Cyclic GFR-binding peptide
RSVKMAKVDEYDKVVKEVQVAAAAAAA

SEQ ID NO: 93566 - protein, 27 aa, Artificial Sequence
  Cyclic GFR-binding peptide
AAAAAAARYKKLIIQQKDNFYLMSIAN

SEQ ID NO: 93567 - protein, 27 aa, Artificial Sequence
  Cyclic GFR-binding peptide
AAAAAAARYKKLLLVRGNDFYLMSIAN

SEQ ID NO: 93568 - protein, 27 aa, Artificial Sequence
  Cyclic GFR-binding peptide
NAISMLYFNDKQQIILKKYRAAAAAAA

SEQ ID NO: 93569 - protein, 27 aa, Artificial Sequence
  Cyclic GFR-binding peptide
NAISMLYFDNGRVLLLKKYRAAAAAAA

SEQ ID NO: 93570 - protein, 27 aa, Artificial Sequence
  Cyclic GFR-binding peptide
AAAAAAAEYKFKVVNKNEDLYLISIPE

SEQ ID NO: 93571 - protein, 27 aa, Artificial Sequence
  Cyclic GFR-binding peptide
AAAAAAAPIKGYVKPTRGVFYLINIPS

SEQ ID NO: 93572 - protein, 27 aa, Artificial Sequence
  Cyclic GFR-binding peptide
AAAAAAAEYKFKLLVRGNDLYLMSIPE

SEQ ID NO: 93573 - protein, 27 aa, Artificial Sequence
  Cyclic GFR-binding peptide
AAAAAAAYHYKLVVNKNEDKYLISIPS

SEQ ID NO: 93574 - protein, 27 aa, Artificial Sequence
  Cyclic GFR-binding peptide
AAAAAAARHKRLLLVRGNDYYLMSTAS

SEQ ID NO: 93575 - protein, 27 aa, Artificial Sequence
  Cyclic GFR-binding peptide
AAAAAAAYHYKLLLVRGNDKYLMSIPS

SEQ ID NO: 93576 - protein, 27 aa, Artificial Sequence
  Cyclic GFR-binding peptide
AAAAAAARHKRLVVNKNEDYYLISTAS

SEQ ID NO: 93577 - protein, 27 aa, Artificial Sequence
  Cyclic GFR-binding peptide
AAAAAAARYKKLVVNKNEDFYLISIAN

SEQ ID NO: 93578 - protein, 27 aa, Artificial Sequence
  Cyclic GFR-binding peptide
AAAAAAAPIKGYVVNKNEDFYLINIPS

SEQ ID NO: 93579 - protein, 27 aa, Artificial Sequence
  Cyclic GFR-binding peptide
AAAAAAAPIKGYIKPTKGIFYLINIPS

SEQ ID NO: 93580 - protein, 27 aa, Artificial Sequence
  Cyclic GFR-binding peptide
AAAAAAARHKRLYTVVGKDYYLISTAS

SEQ ID NO: 93581 - protein, 27 aa, Artificial Sequence
  Cyclic GFR-binding peptide
AAAAAAAEYKFKVVNNASDLYLISIPE

SEQ ID NO: 93582 - protein, 27 aa, Artificial Sequence
  Cyclic GFR-binding peptide
AAAAAAARHKRLIIQQKDNYYLMSTAS

SEQ ID NO: 93583 - protein, 27 aa, Artificial Sequence
  Cyclic GFR-binding peptide
AAAAAAAEYKFKIIQQKDNLYLMSIPE

SEQ ID NO: 93584 - protein, 27 aa, Artificial Sequence
  Cyclic GFR-binding peptide
AAAAAAAPIKGYVKPKRGVFYLINIPS

SEQ ID NO: 93585 - protein, 27 aa, Artificial Sequence
  Cyclic GFR-binding peptide
AAAAAAARHKRLVVNNASDYYLISTAS

SEQ ID NO: 93586 - protein, 27 aa, Artificial Sequence
  Cyclic GFR-binding peptide
AAAAAAAYHYKLVVNNASDKYLISIPS

SEQ ID NO: 93587 - protein, 27 aa, Artificial Sequence
  Cyclic GFR-binding peptide
AAAAAAAYHYKLIIQQKDNKYLMSIPS

SEQ ID NO: 93588 - protein, 27 aa, Artificial Sequence
  Cyclic GFR-binding peptide
AAAAAAARHKRLVVNNAADYYLISTAS

SEQ ID NO: 93589 - protein, 27 aa, Artificial Sequence
  Cyclic GFR-binding peptide
EPISILYLDENKNVVKFKYEAAAAAAA

SEQ ID NO: 93590 - protein, 27 aa, Artificial Sequence
  Cyclic GFR-binding peptide
SPINILYFVGRTPKVYGKIPAAAAAAA

SEQ ID NO: 93591 - protein, 27 aa, Artificial Sequence
  Cyclic GFR-binding peptide
EPISMLYLDNGRVLLKFKYEAAAAAAA

SEQ ID NO: 93592 - protein, 27 aa, Artificial Sequence
  Cyclic GFR-binding peptide
SPISILYKDENKNVVLKYHYAAAAAAA

SEQ ID NO: 93593 - protein, 27 aa, Artificial Sequence
  Cyclic GFR-binding peptide
SATSMLYYDNGRVLLLRKHRAAAAAAA

SEQ ID NO: 93594 - protein, 27 aa, Artificial Sequence
  Cyclic GFR-binding peptide
SPISMLYKDNGRVLLLKYHYAAAAAAA

SEQ ID NO: 93595 - protein, 27 aa, Artificial Sequence
  Cyclic GFR-binding peptide
SATSILYYDENKNVVLRKHRAAAAAAA

SEQ ID NO: 93596 - protein, 27 aa, Artificial Sequence
  Cyclic GFR-binding peptide
NAISILYFDENKNVVLKKYRAAAAAAA

SEQ ID NO: 93597 - protein, 27 aa, Artificial Sequence
  Cyclic GFR-binding peptide
SPINILYFDENKNVVYGKIPAAAAAAA

SEQ ID NO: 93598 - protein, 27 aa, Artificial Sequence
  Cyclic GFR-binding peptide
SPINILYFIGKTPKIYGKIPAAAAAAA

SEQ ID NO: 93599 - protein, 27 aa, Artificial Sequence
  Cyclic GFR-binding peptide
SATSILYYDKGVVTYLRKHRAAAAAAA

SEQ ID NO: 93600 - protein, 27 aa, Artificial Sequence
  Cyclic GFR-binding peptide
EPISILYLDSANNVVKFKYEAAAAAAA

SEQ ID NO: 93601 - protein, 27 aa, Artificial Sequence
  Cyclic GFR-binding peptide
SATSMLYYNDKQQIILRKHRAAAAAAA

SEQ ID NO: 93602 - protein, 27 aa, Artificial Sequence
  Cyclic GFR-binding peptide
EPISMLYLNDKQQIIKFKYEAAAAAAA

SEQ ID NO: 93603 - protein, 27 aa, Artificial Sequence
  Cyclic GFR-binding peptide
SPINILYFVGRKPKVYGKIPAAAAAAA

SEQ ID NO: 93604 - protein, 27 aa, Artificial Sequence
  Cyclic GFR-binding peptide
SATSILYYDSANNVVLRKHRAAAAAAA

SEQ ID NO: 93605 - protein, 27 aa, Artificial Sequence
  Cyclic GFR-binding peptide
SPISILYKDSANNVVLKYHYAAAAAAA

SEQ ID NO: 93606 - protein, 27 aa, Artificial Sequence
  Cyclic GFR-binding peptide
SPISMLYKNDKQQIILKYHYAAAAAAA

SEQ ID NO: 93607 - protein, 27 aa, Artificial Sequence
  Cyclic GFR-binding peptide
SATSILYYDAANNVVLRKHRAAAAAAA

SEQ ID NO: 93608 - protein, 27 aa, Artificial Sequence
  Cyclic GFR-binding peptide
AAAAAAASMEGIIIQQKDNMIQMTINS

SEQ ID NO: 93609 - protein, 27 aa, Artificial Sequence
  Cyclic GFR-binding peptide
AAAAAAASMEGLVKPKRGVMIQITINS

SEQ ID NO: 93610 - protein, 27 aa, Artificial Sequence
  Cyclic GFR-binding peptide
AAAAAAASMEGLVVNNASDMIQITINS

SEQ ID NO: 93611 - protein, 27 aa, Artificial Sequence
  Cyclic GFR-binding peptide
AAAAAAASMEGILLVRGNDMIQMTINS

SEQ ID NO: 93612 - protein, 27 aa, Artificial Sequence
  Cyclic GFR-binding peptide
AAAAAAASMEGLIKPTKGIMIQITINS

SEQ ID NO: 93613 - protein, 27 aa, Artificial Sequence
  Cyclic GFR-binding peptide
AAAAAAASMEGLIVNSSDDMIQVTINS

SEQ ID NO: 93614 - protein, 27 aa, Artificial Sequence
  Cyclic GFR-binding peptide
AAAAAAASMEGIVVNNASDMIQITINS

SEQ ID NO: 93615 - protein, 27 aa, Artificial Sequence
  Cyclic GFR-binding peptide
AAAAAAASMEGLVVNNAADMIQITINS

SEQ ID NO: 93616 - protein, 27 aa, Artificial Sequence
  Cyclic GFR-binding peptide
AAAAAAASMEGLLLVRGNDMIQMTINS

SEQ ID NO: 93617 - protein, 27 aa, Artificial Sequence
  Cyclic GFR-binding peptide
AAAAAAASMEGLIIQQKDNMIQMTINS

SEQ ID NO: 93618 - protein, 27 aa, Artificial Sequence
  Cyclic GFR-binding peptide
AAAAAAASMEGIVVNNAADMIQITINS

SEQ ID NO: 93619 - protein, 27 aa, Artificial Sequence
  Cyclic GFR-binding peptide
AAAAAAASMEGLVKPTRGVMIQITINS

SEQ ID NO: 93620 - protein, 27 aa, Artificial Sequence
  Cyclic GFR-binding peptide
SNITMQIMNDKQQIIIGEMSAAAAAAA

SEQ ID NO: 93621 - protein, 27 aa, Artificial Sequence
  Cyclic GFR-binding peptide
SNITIQIMVGRKPKVLGEMSAAAAAAA

SEQ ID NO: 93622 - protein, 27 aa, Artificial Sequence
  Cyclic GFR-binding peptide
SNITIQIMDSANNVVLGEMSAAAAAAA

SEQ ID NO: 93623 - protein, 27 aa, Artificial Sequence
  Cyclic GFR-binding peptide
SNITMQIMDNGRVLLIGEMSAAAAAAA

SEQ ID NO: 93624 - protein, 27 aa, Artificial Sequence
  Cyclic GFR-binding peptide
SNITIQIMIGKTPKILGEMSAAAAAAA

SEQ ID NO: 93625 - protein, 27 aa, Artificial Sequence
  Cyclic GFR-binding peptide
SNITVQIMDDSSNVILGEMSAAAAAAA

SEQ ID NO: 93626 - protein, 27 aa, Artificial Sequence
  Cyclic GFR-binding peptide
SNITIQIMDSANNVVIGEMSAAAAAAA

SEQ ID NO: 93627 - protein, 27 aa, Artificial Sequence
  Cyclic GFR-binding peptide
SNITIQIMDAANNVVLGEMSAAAAAAA

SEQ ID NO: 93628 - protein, 27 aa, Artificial Sequence
  Cyclic GFR-binding peptide
SNITMQIMDNGRVLLLGEMSAAAAAAA

SEQ ID NO: 93629 - protein, 27 aa, Artificial Sequence
  Cyclic GFR-binding peptide
SNITMQIMNDKQQIILGEMSAAAAAAA

SEQ ID NO: 93630 - protein, 27 aa, Artificial Sequence
  Cyclic GFR-binding peptide
SNITIQIMDAANNVVIGEMSAAAAAAA

SEQ ID NO: 93631 - protein, 27 aa, Artificial Sequence
  Cyclic GFR-binding peptide
SNITIQIMVGRTPKVLGEMSAAAAAAA

SEQ ID NO: 93632 - protein, 27 aa, Artificial Sequence
  Cyclic GFR-binding peptide
AAAAAAAQYNKLVVNKNEDLYLISIAS

SEQ ID NO: 93633 - protein, 27 aa, Artificial Sequence
  Cyclic GFR-binding peptide
AAAAAAAQYNKLVVNNAADLYLISIAS

SEQ ID NO: 93634 - protein, 27 aa, Artificial Sequence
  Cyclic GFR-binding peptide
AAAAAAAQYNKLIIQQKDNLYLMSIAS

SEQ ID NO: 93635 - protein, 27 aa, Artificial Sequence
  Cyclic GFR-binding peptide
AAAAAAAQYNKLLLVRGNDLYLMSIAS

SEQ ID NO: 93636 - protein, 27 aa, Artificial Sequence
  Cyclic GFR-binding peptide
AAAAAAAQYNKLYTVVGKDLYLISIAS

SEQ ID NO: 93637 - protein, 27 aa, Artificial Sequence
  Cyclic GFR-binding peptide
SAISILYLDENKNVVLKNYQAAAAAAA

SEQ ID NO: 93638 - protein, 27 aa, Artificial Sequence
  Cyclic GFR-binding peptide
SAISILYLDAANNVVLKNYQAAAAAAA

SEQ ID NO: 93639 - protein, 27 aa, Artificial Sequence
  Cyclic GFR-binding peptide
SAISMLYLNDKQQIILKNYQAAAAAAA

SEQ ID NO: 93640 - protein, 27 aa, Artificial Sequence
  Cyclic GFR-binding peptide
SAISMLYLDNGRVLLLKNYQAAAAAAA

SEQ ID NO: 93641 - protein, 27 aa, Artificial Sequence
  Cyclic GFR-binding peptide
SAISILYLDKGVVTYLKNYQAAAAAAA

SEQ ID NO: 93642 - protein, 27 aa, Artificial Sequence
  Cyclic GFR-binding peptide
GGGGGGGRYKKLIKPTKGIFYLISIAN

SEQ ID NO: 93643 - protein, 29 aa, Artificial Sequence
  Cyclic GFR-binding peptide
GGGGGGGRHKRLFIPKKRVIEYYLVSTAS

SEQ ID NO: 93644 - protein, 27 aa, Artificial Sequence
  Cyclic GFR-binding peptide
GGGGGGGYHYKLVVKDYEDKYLMSIPS

SEQ ID NO: 93645 - protein, 27 aa, Artificial Sequence
  Cyclic GFR-binding peptide
GGGGGGGQYNKLIVNNSSDLYLVSIAS

SEQ ID NO: 93646 - protein, 27 aa, Artificial Sequence
  Cyclic GFR-binding peptide
GGGGGGGRYKKLVVKDYEDFYLMSIAN

SEQ ID NO: 93647 - protein, 27 aa, Artificial Sequence
  Cyclic GFR-binding peptide
GGGGGGGRYKKLVKPTRGVFYLISIAN

SEQ ID NO: 93648 - protein, 27 aa, Artificial Sequence
  Cyclic GFR-binding peptide
GGGGGGGRHKRLVVKENEDYYLMSTAS

SEQ ID NO: 93649 - protein, 27 aa, Artificial Sequence
  Cyclic GFR-binding peptide
GGGGGGGYHYKLIKPTKGIKYLISIPS

SEQ ID NO: 93650 - protein, 29 aa, Artificial Sequence
  Cyclic GFR-binding peptide
GGGGGGGRYKKLFIPKKRVIEFYLVSIAN

SEQ ID NO: 93651 - protein, 27 aa, Artificial Sequence
  Cyclic GFR-binding peptide
GGGGGGGYHYKLVVKENEDKYLMSIPS

SEQ ID NO: 93652 - protein, 27 aa, Artificial Sequence
  Cyclic GFR-binding peptide
GGGGGGGRHKRLVKPKRGVYYLISTAS

SEQ ID NO: 93653 - protein, 27 aa, Artificial Sequence
  Cyclic GFR-binding peptide
GGGGGGGYHYKLVKPKRGVKYLISIPS

SEQ ID NO: 93654 - protein, 29 aa, Artificial Sequence
  Cyclic GFR-binding peptide
GGGGGGGQYNKLFIPKKRVIELYLVSIAS

SEQ ID NO: 93655 - protein, 27 aa, Artificial Sequence
  Cyclic GFR-binding peptide
GGGGGGGQYNKLVKPTRGVLYLISIAS

SEQ ID NO: 93656 - protein, 27 aa, Artificial Sequence
  Cyclic GFR-binding peptide
GGGGGGGRYKKLVVKENEDFYLMSIAN

SEQ ID NO: 93657 - protein, 27 aa, Artificial Sequence
  Cyclic GFR-binding peptide
GGGGGGGQYNKLTPVGMDDLYLVSIAS

SEQ ID NO: 93658 - protein, 27 aa, Artificial Sequence
  Cyclic GFR-binding peptide
GGGGGGGRYKKLTPVGMDDFYLVSIAN

SEQ ID NO: 93659 - protein, 27 aa, Artificial Sequence
  Cyclic GFR-binding peptide
GGGGGGGRYKKLVKPKRGVFYLISIAN

SEQ ID NO: 93660 - protein, 27 aa, Artificial Sequence
  Cyclic GFR-binding peptide
GGGGGGGQYNKLVVKENEDLYLMSIAS

SEQ ID NO: 93661 - protein, 27 aa, Artificial Sequence
  Cyclic GFR-binding peptide
GGGGGGGYHYKLIVNSSDDKYLVSIPS

SEQ ID NO: 93662 - protein, 27 aa, Artificial Sequence
  Cyclic GFR-binding peptide
GGGGGGGQYNKLVKPKRGVLYLISIAS

SEQ ID NO: 93663 - protein, 27 aa, Artificial Sequence
  Cyclic GFR-binding peptide
GGGGGGGRYKKLIVNNSSDFYLVSIAN

SEQ ID NO: 93664 - protein, 27 aa, Artificial Sequence
  Cyclic GFR-binding peptide
GGGGGGGRYKKLIVNSSDDFYLVSIAN

SEQ ID NO: 93665 - protein, 27 aa, Artificial Sequence
  Cyclic GFR-binding peptide
GGGGGGGRHKRLVKPTRGVYYLISTAS

SEQ ID NO: 93666 - protein, 29 aa, Artificial Sequence
  Cyclic GFR-binding peptide
GGGGGGGYHYKLFIPKKRVIEKYLVSIPS

SEQ ID NO: 93667 - protein, 27 aa, Artificial Sequence
  Cyclic GFR-binding peptide
GGGGGGGRHKRLIKPTKGIYYLISTAS

SEQ ID NO: 93668 - protein, 27 aa, Artificial Sequence
  Cyclic GFR-binding peptide
GGGGGGGRHKRLTPVGMDDYYLVSTAS

SEQ ID NO: 93669 - protein, 27 aa, Artificial Sequence
  Cyclic GFR-binding peptide
GGGGGGGYHYKLTPVGMDDKYLVSIPS

SEQ ID NO: 93670 - protein, 27 aa, Artificial Sequence
  Cyclic GFR-binding peptide
GGGGGGGYHYKLIVNNSSDKYLVSIPS

SEQ ID NO: 93671 - protein, 27 aa, Artificial Sequence
  Cyclic GFR-binding peptide
GGGGGGGRHKRLIVNNSSDYYLVSTAS

SEQ ID NO: 93672 - protein, 27 aa, Artificial Sequence
  Cyclic GFR-binding peptide
GGGGGGGYHYKLVKPTRGVKYLISIPS

SEQ ID NO: 93673 - protein, 27 aa, Artificial Sequence
  Cyclic GFR-binding peptide
GGGGGGGRHKRLIVNSSDDYYLVSTAS

SEQ ID NO: 93674 - protein, 27 aa, Artificial Sequence
  Cyclic GFR-binding peptide
GGGGGGGRHKRLVVKDYEDYYLMSTAS

SEQ ID NO: 93675 - protein, 27 aa, Artificial Sequence
  Cyclic GFR-binding peptide
GGGGGGGQYNKLIKPTKGILYLISIAS

SEQ ID NO: 93676 - protein, 27 aa, Artificial Sequence
  Cyclic GFR-binding peptide
GGGGGGGQYNKLVVKDYEDLYLMSIAS

SEQ ID NO: 93677 - protein, 27 aa, Artificial Sequence
  Cyclic GFR-binding peptide
GGGGGGGQYNKLIVNSSDDLYLVSIAS

SEQ ID NO: 93678 - protein, 27 aa, Artificial Sequence
  Cyclic GFR-binding peptide
NAISILYFIGKTPKILKKYRGGGGGGG

SEQ ID NO: 93679 - protein, 29 aa, Artificial Sequence
  Cyclic GFR-binding peptide
SATSVLYYEIVRKKPIFLRKHRGGGGGGG

SEQ ID NO: 93680 - protein, 27 aa, Artificial Sequence
  Cyclic GFR-binding peptide
SPISMLYKDEYDKVVLKYHYGGGGGGG

SEQ ID NO: 93681 - protein, 27 aa, Artificial Sequence
  Cyclic GFR-binding peptide
SAISVLYLDSSNNVILKNYQGGGGGGG

SEQ ID NO: 93682 - protein, 27 aa, Artificial Sequence
  Cyclic GFR-binding peptide
NAISMLYFDEYDKVVLKKYRGGGGGGG

SEQ ID NO: 93683 - protein, 27 aa, Artificial Sequence
  Cyclic GFR-binding peptide
NAISILYFVGRTPKVLKKYRGGGGGGG

SEQ ID NO: 93684 - protein, 27 aa, Artificial Sequence
  Cyclic GFR-binding peptide
SATSMLYYDENEKVVLRKHRGGGGGGG

SEQ ID NO: 93685 - protein, 27 aa, Artificial Sequence
  Cyclic GFR-binding peptide
SPISILYKIGKTPKILKYHYGGGGGGG

SEQ ID NO: 93686 - protein, 29 aa, Artificial Sequence
  Cyclic GFR-binding peptide
NAISVLYFEIVRKKPIFLKKYRGGGGGGG

SEQ ID NO: 93687 - protein, 27 aa, Artificial Sequence
  Cyclic GFR-binding peptide
SPISMLYKDENEKVVLKYHYGGGGGGG

SEQ ID NO: 93688 - protein, 27 aa, Artificial Sequence
  Cyclic GFR-binding peptide
SATSILYYVGRKPKVLRKHRGGGGGGG

SEQ ID NO: 93689 - protein, 27 aa, Artificial Sequence
  Cyclic GFR-binding peptide
SPISILYKVGRKPKVLKYHYGGGGGGG

SEQ ID NO: 93690 - protein, 29 aa, Artificial Sequence
  Cyclic GFR-binding peptide
SAISVLYLEIVRKKPIFLKNYQGGGGGGG

SEQ ID NO: 93691 - protein, 27 aa, Artificial Sequence
  Cyclic GFR-binding peptide
SAISILYLVGRTPKVLKNYQGGGGGGG

SEQ ID NO: 93692 - protein, 27 aa, Artificial Sequence
  Cyclic GFR-binding peptide
NAISMLYFDENEKVVLKKYRGGGGGGG

SEQ ID NO: 93693 - protein, 27 aa, Artificial Sequence
  Cyclic GFR-binding peptide
SAISVLYLDDMGVPTLKNYQGGGGGGG

SEQ ID NO: 93694 - protein, 27 aa, Artificial Sequence
  Cyclic GFR-binding peptide
NAISVLYFDDMGVPTLKKYRGGGGGGG

SEQ ID NO: 93695 - protein, 27 aa, Artificial Sequence
  Cyclic GFR-binding peptide
NAISILYFVGRKPKVLKKYRGGGGGGG

SEQ ID NO: 93696 - protein, 27 aa, Artificial Sequence
  Cyclic GFR-binding peptide
SAISMLYLDENEKVVLKNYQGGGGGGG

SEQ ID NO: 93697 - protein, 27 aa, Artificial Sequence
  Cyclic GFR-binding peptide
SPISVLYKDDSSNVILKYHYGGGGGGG

SEQ ID NO: 93698 - protein, 27 aa, Artificial Sequence
  Cyclic GFR-binding peptide
SAISILYLVGRKPKVLKNYQGGGGGGG

SEQ ID NO: 93699 - protein, 27 aa, Artificial Sequence
  Cyclic GFR-binding peptide
NAISVLYFDSSNNVILKKYRGGGGGGG

SEQ ID NO: 93700 - protein, 27 aa, Artificial Sequence
  Cyclic GFR-binding peptide
NAISVLYFDDSSNVILKKYRGGGGGGG

SEQ ID NO: 93701 - protein, 27 aa, Artificial Sequence
  Cyclic GFR-binding peptide
SATSILYYVGRTPKVLRKHRGGGGGGG

SEQ ID NO: 93702 - protein, 29 aa, Artificial Sequence
  Cyclic GFR-binding peptide
SPISVLYKEIVRKKPIFLKYHYGGGGGGG

SEQ ID NO: 93703 - protein, 27 aa, Artificial Sequence
  Cyclic GFR-binding peptide
SATSILYYIGKTPKILRKHRGGGGGGG

SEQ ID NO: 93704 - protein, 27 aa, Artificial Sequence
  Cyclic GFR-binding peptide
SATSVLYYDDMGVPTLRKHRGGGGGGG

SEQ ID NO: 93705 - protein, 27 aa, Artificial Sequence
  Cyclic GFR-binding peptide
SPISVLYKDDMGVPTLKYHYGGGGGGG

SEQ ID NO: 93706 - protein, 27 aa, Artificial Sequence
  Cyclic GFR-binding peptide
SPISVLYKDSSNNVILKYHYGGGGGGG

SEQ ID NO: 93707 - protein, 27 aa, Artificial Sequence
  Cyclic GFR-binding peptide
SATSVLYYDSSNNVILRKHRGGGGGGG

SEQ ID NO: 93708 - protein, 27 aa, Artificial Sequence
  Cyclic GFR-binding peptide
SPISILYKVGRTPKVLKYHYGGGGGGG

SEQ ID NO: 93709 - protein, 27 aa, Artificial Sequence
  Cyclic GFR-binding peptide
SATSVLYYDDSSNVILRKHRGGGGGGG

SEQ ID NO: 93710 - protein, 27 aa, Artificial Sequence
  Cyclic GFR-binding peptide
SATSMLYYDEYDKVVLRKHRGGGGGGG

SEQ ID NO: 93711 - protein, 27 aa, Artificial Sequence
  Cyclic GFR-binding peptide
SAISILYLIGKTPKILKNYQGGGGGGG

SEQ ID NO: 93712 - protein, 27 aa, Artificial Sequence
  Cyclic GFR-binding peptide
SAISMLYLDEYDKVVLKNYQGGGGGGG

SEQ ID NO: 93713 - protein, 27 aa, Artificial Sequence
  Cyclic GFR-binding peptide
SAISVLYLDDSSNVILKNYQGGGGGGG

SEQ ID NO: 93714 - protein, 27 aa, Artificial Sequence
  Cyclic GFR-binding peptide
GGGGGGGNSLQEVVKDYEDYYLMTLPE

SEQ ID NO: 93715 - protein, 27 aa, Artificial Sequence
  Cyclic GFR-binding peptide
GGGGGGGNSLQEIKPTKGIYYVIPLPE

SEQ ID NO: 93716 - protein, 27 aa, Artificial Sequence
  Cyclic GFR-binding peptide
GGGGGGGNSLQEVKPKRGVYYLITLPE

SEQ ID NO: 93717 - protein, 27 aa, Artificial Sequence
  Cyclic GFR-binding peptide
GGGGGGGNSLQEVKPTRGVYYVIPLPE

SEQ ID NO: 93718 - protein, 27 aa, Artificial Sequence
  Cyclic GFR-binding peptide
GGGGGGGEYQKYIVNSSDDIFLVSIPS

SEQ ID NO: 93719 - protein, 27 aa, Artificial Sequence
  Cyclic GFR-binding peptide
GGGGGGGEYQKYVKPTRGVIFLISIPS

SEQ ID NO: 93720 - protein, 27 aa, Artificial Sequence
  Cyclic GFR-binding peptide
GGGGGGGNSLQEVVKENEDYYLMTLPE

SEQ ID NO: 93721 - protein, 27 aa, Artificial Sequence
  Cyclic GFR-binding peptide
GGGGGGGNSLQEVVNNASDYYLITLPE

SEQ ID NO: 93722 - protein, 27 aa, Artificial Sequence
  Cyclic GFR-binding peptide
GGGGGGGNSLQEVKPKRGVYYVIPLPE

SEQ ID NO: 93723 - protein, 27 aa, Artificial Sequence
  Cyclic GFR-binding peptide
GGGGGGGNSLQEVVNNASDYYVIPLPE

SEQ ID NO: 93724 - protein, 27 aa, Artificial Sequence
  Cyclic GFR-binding peptide
GGGGGGGNSLQEVKPTRGVYYLITLPE

SEQ ID NO: 93725 - protein, 27 aa, Artificial Sequence
  Cyclic GFR-binding peptide
GGGGGGGEYQKYIKPTKGIIFLISIPS

SEQ ID NO: 93726 - protein, 27 aa, Artificial Sequence
  Cyclic GFR-binding peptide
GGGGGGGEYQKYVVNNASDIFLISIPS

SEQ ID NO: 93727 - protein, 27 aa, Artificial Sequence
  Cyclic GFR-binding peptide
GGGGGGGNSLQEIVNSSDDYYVVPLPE

SEQ ID NO: 93728 - protein, 27 aa, Artificial Sequence
  Cyclic GFR-binding peptide
GGGGGGGNSLQEVVKDYEDYYVMPLPE

SEQ ID NO: 93729 - protein, 27 aa, Artificial Sequence
  Cyclic GFR-binding peptide
GGGGGGGEYQKYVVKENEDIFLMSIPS

SEQ ID NO: 93730 - protein, 27 aa, Artificial Sequence
  Cyclic GFR-binding peptide
GGGGGGGNSLQEVVKENEDYYVMPLPE

SEQ ID NO: 93731 - protein, 27 aa, Artificial Sequence
  Cyclic GFR-binding peptide
GGGGGGGEYQKYVVKDYEDIFLMSIPS

SEQ ID NO: 93732 - protein, 27 aa, Artificial Sequence
  Cyclic GFR-binding peptide
GGGGGGGQYNKLVVNNASDLYLISIAS

SEQ ID NO: 93733 - protein, 27 aa, Artificial Sequence
  Cyclic GFR-binding peptide
GGGGGGGNSLQEIKPTKGIYYLITLPE

SEQ ID NO: 93734 - protein, 27 aa, Artificial Sequence
  Cyclic GFR-binding peptide
GGGGGGGEYQKYVKPKRGVIFLISIPS

SEQ ID NO: 93735 - protein, 27 aa, Artificial Sequence
  Cyclic GFR-binding peptide
GGGGGGGRYKKLVVNNASDFYLISIAN

SEQ ID NO: 93736 - protein, 27 aa, Artificial Sequence
  Cyclic GFR-binding peptide
GGGGGGGNSLQEIVNSSDDYYLVTLPE

SEQ ID NO: 93737 - protein, 27 aa, Artificial Sequence
  Cyclic GFR-binding peptide
EPLTMLYYDEYDKVVEQLSNGGGGGGG

SEQ ID NO: 93738 - protein, 27 aa, Artificial Sequence
  Cyclic GFR-binding peptide
EPLPIVYYIGKTPKIEQLSNGGGGGGG

SEQ ID NO: 93739 - protein, 27 aa, Artificial Sequence
  Cyclic GFR-binding peptide
EPLTILYYVGRKPKVEQLSNGGGGGGG

SEQ ID NO: 93740 - protein, 27 aa, Artificial Sequence
  Cyclic GFR-binding peptide
EPLPIVYYVGRTPKVEQLSNGGGGGGG

SEQ ID NO: 93741 - protein, 27 aa, Artificial Sequence
  Cyclic GFR-binding peptide
SPISVLFIDDSSNVIYKQYEGGGGGGG

SEQ ID NO: 93742 - protein, 27 aa, Artificial Sequence
  Cyclic GFR-binding peptide
SPISILFIVGRTPKVYKQYEGGGGGGG

SEQ ID NO: 93743 - protein, 27 aa, Artificial Sequence
  Cyclic GFR-binding peptide
EPLTMLYYDENEKVVEQLSNGGGGGGG

SEQ ID NO: 93744 - protein, 27 aa, Artificial Sequence
  Cyclic GFR-binding peptide
EPLTILYYDSANNVVEQLSNGGGGGGG

SEQ ID NO: 93745 - protein, 27 aa, Artificial Sequence
  Cyclic GFR-binding peptide
EPLPIVYYVGRKPKVEQLSNGGGGGGG

SEQ ID NO: 93746 - protein, 27 aa, Artificial Sequence
  Cyclic GFR-binding peptide
EPLPIVYYDSANNVVEQLSNGGGGGGG

SEQ ID NO: 93747 - protein, 27 aa, Artificial Sequence
  Cyclic GFR-binding peptide
EPLTILYYVGRTPKVEQLSNGGGGGGG

SEQ ID NO: 93748 - protein, 27 aa, Artificial Sequence
  Cyclic GFR-binding peptide
SPISILFIIGKTPKIYKQYEGGGGGGG

SEQ ID NO: 93749 - protein, 27 aa, Artificial Sequence
  Cyclic GFR-binding peptide
SPISILFIDSANNVVYKQYEGGGGGGG

SEQ ID NO: 93750 - protein, 27 aa, Artificial Sequence
  Cyclic GFR-binding peptide
EPLPVVYYDDSSNVIEQLSNGGGGGGG

SEQ ID NO: 93751 - protein, 27 aa, Artificial Sequence
  Cyclic GFR-binding peptide
EPLPMVYYDEYDKVVEQLSNGGGGGGG

SEQ ID NO: 93752 - protein, 27 aa, Artificial Sequence
  Cyclic GFR-binding peptide
SPISMLFIDENEKVVYKQYEGGGGGGG

SEQ ID NO: 93753 - protein, 27 aa, Artificial Sequence
  Cyclic GFR-binding peptide
EPLPMVYYDENEKVVEQLSNGGGGGGG

SEQ ID NO: 93754 - protein, 27 aa, Artificial Sequence
  Cyclic GFR-binding peptide
SPISMLFIDEYDKVVYKQYEGGGGGGG

SEQ ID NO: 93755 - protein, 27 aa, Artificial Sequence
  Cyclic GFR-binding peptide
SAISILYLDSANNVVLKNYQGGGGGGG

SEQ ID NO: 93756 - protein, 27 aa, Artificial Sequence
  Cyclic GFR-binding peptide
EPLTILYYIGKTPKIEQLSNGGGGGGG

SEQ ID NO: 93757 - protein, 27 aa, Artificial Sequence
  Cyclic GFR-binding peptide
SPISILFIVGRKPKVYKQYEGGGGGGG

SEQ ID NO: 93758 - protein, 27 aa, Artificial Sequence
  Cyclic GFR-binding peptide
NAISILYFDSANNVVLKKYRGGGGGGG

SEQ ID NO: 93759 - protein, 27 aa, Artificial Sequence
  Cyclic GFR-binding peptide
EPLTVLYYDDSSNVIEQLSNGGGGGGG

SEQ ID NO: 93760 - protein, 29 aa, Artificial Sequence
  Cyclic GFR-binding peptide
GGGGGGGVTAKKLKPKKRVYEIKRVQVPR

SEQ ID NO: 93761 - protein, 29 aa, Artificial Sequence
  Cyclic GFR-binding peptide
GGGGGGGVQVEKLKPKKRVYEVKAVKVSR

SEQ ID NO: 93762 - protein, 29 aa, Artificial Sequence
  Cyclic GFR-binding peptide
GGGGGGGVQVEKFIPKKRVIEVKAVKVSR

SEQ ID NO: 93763 - protein, 29 aa, Artificial Sequence
  Cyclic GFR-binding peptide
GGGGGGGVQVEKHQGQHPKIRVKAMKVSR

SEQ ID NO: 93764 - protein, 29 aa, Artificial Sequence
  Cyclic GFR-binding peptide
GGGGGGGVTAKKHQGQHPKIRIKRMQVPR

SEQ ID NO: 93765 - protein, 29 aa, Artificial Sequence
  Cyclic GFR-binding peptide
GGGGGGGSMEGLLKPKKRVYEMIQVTINS

SEQ ID NO: 93766 - protein, 29 aa, Artificial Sequence
  Cyclic GFR-binding peptide
GGGGGGGSMEGIFIPKKRVIEMIQVTINS

SEQ ID NO: 93767 - protein, 29 aa, Artificial Sequence
  Cyclic GFR-binding peptide
GGGGGGGSMEGLHQGQHPKIRMIQMTINS

SEQ ID NO: 93768 - protein, 29 aa, Artificial Sequence
  Cyclic GFR-binding peptide
GGGGGGGSMEGILKPKKRVYEMIQVTINS

SEQ ID NO: 93769 - protein, 29 aa, Artificial Sequence
  Cyclic GFR-binding peptide
GGGGGGGSMEGLFIPKKRVIEMIQVTINS

SEQ ID NO: 93770 - protein, 29 aa, Artificial Sequence
  Cyclic GFR-binding peptide
GGGGGGGVTAKKFIPKKRVIEIKRVQVPR

SEQ ID NO: 93771 - protein, 29 aa, Artificial Sequence
  Cyclic GFR-binding peptide
GGGGGGGSMEGIHQGQHPKIRMIQMTINS

SEQ ID NO: 93772 - protein, 29 aa, Artificial Sequence
  Cyclic GFR-binding peptide
RPVQVRKIEYVRKKPKLKKATVGGGGGGG

SEQ ID NO: 93773 - protein, 29 aa, Artificial Sequence
  Cyclic GFR-binding peptide
RSVKVAKVEYVRKKPKLKEVQVGGGGGGG

SEQ ID NO: 93774 - protein, 29 aa, Artificial Sequence
  Cyclic GFR-binding peptide
RSVKVAKVEIVRKKPIFKEVQVGGGGGGG

SEQ ID NO: 93775 - protein, 29 aa, Artificial Sequence
  Cyclic GFR-binding peptide
RSVKMAKVRIKPHQGQHKEVQVGGGGGGG

SEQ ID NO: 93776 - protein, 29 aa, Artificial Sequence
  Cyclic GFR-binding peptide
RPVQMRKIRIKPHQGQHKKATVGGGGGGG

SEQ ID NO: 93777 - protein, 29 aa, Artificial Sequence
  Cyclic GFR-binding peptide
SNITVQIMEYVRKKPKLLGEMSGGGGGGG

SEQ ID NO: 93778 - protein, 29 aa, Artificial Sequence
  Cyclic GFR-binding peptide
SNITVQIMEIVRKKPIFIGEMSGGGGGGG

SEQ ID NO: 93779 - protein, 29 aa, Artificial Sequence
  Cyclic GFR-binding peptide
SNITMQIMRIKPHQGQHLGEMSGGGGGGG

SEQ ID NO: 93780 - protein, 29 aa, Artificial Sequence
  Cyclic GFR-binding peptide
SNITVQIMEYVRKKPKLIGEMSGGGGGGG

SEQ ID NO: 93781 - protein, 29 aa, Artificial Sequence
  Cyclic GFR-binding peptide
SNITVQIMEIVRKKPIFLGEMSGGGGGGG

SEQ ID NO: 93782 - protein, 29 aa, Artificial Sequence
  Cyclic GFR-binding peptide
RPVQVRKIEIVRKKPIFKKATVGGGGGGG

SEQ ID NO: 93783 - protein, 29 aa, Artificial Sequence
  Cyclic GFR-binding peptide
SNITMQIMRIKPHQGQHIGEMSGGGGGGG

SEQ ID NO: 93784 - protein, 27 aa, Artificial Sequence
  Cyclic GFR-binding peptide
GGGGGGGEYKFKVKPTRGVLYLISIPE

SEQ ID NO: 93785 - protein, 27 aa, Artificial Sequence
  Cyclic GFR-binding peptide
GGGGGGGEYKFKTPVGMDDLYLVSIPE

SEQ ID NO: 93786 - protein, 27 aa, Artificial Sequence
  Cyclic GFR-binding peptide
GGGGGGGEYQKYVKPKRGVIYLISIPS

SEQ ID NO: 93787 - protein, 27 aa, Artificial Sequence
  Cyclic GFR-binding peptide
GGGGGGGEYQKYVVKDYEDIYLMSIPS

SEQ ID NO: 93788 - protein, 27 aa, Artificial Sequence
  Cyclic GFR-binding peptide
GGGGGGGEYKFKIKPTKGILYLISIPE

SEQ ID NO: 93789 - protein, 27 aa, Artificial Sequence
  Cyclic GFR-binding peptide
GGGGGGGYHYKLYTVVGKDKYLISIPS

SEQ ID NO: 93790 - protein, 27 aa, Artificial Sequence
  Cyclic GFR-binding peptide
GGGGGGGRYKKLYTVVGKDFYLISIAN

SEQ ID NO: 93791 - protein, 27 aa, Artificial Sequence
  Cyclic GFR-binding peptide
GGGGGGGEYQKYVVNNAADIYLISIPS

SEQ ID NO: 93792 - protein, 27 aa, Artificial Sequence
  Cyclic GFR-binding peptide
GGGGGGGEYQKYVKPTRGVIYLISIPS

SEQ ID NO: 93793 - protein, 27 aa, Artificial Sequence
  Cyclic GFR-binding peptide
GGGGGGGEYQKYTPVGMDDIYLVSIPS

SEQ ID NO: 93794 - protein, 27 aa, Artificial Sequence
  Cyclic GFR-binding peptide
GGGGGGGEYKFKVVKDYEDLYLMSIPE

SEQ ID NO: 93795 - protein, 27 aa, Artificial Sequence
  Cyclic GFR-binding peptide
GGGGGGGEYKFKVVNNAADLYLISIPE

SEQ ID NO: 93796 - protein, 27 aa, Artificial Sequence
  Cyclic GFR-binding peptide
GGGGGGGEYQKYVVKENEDIYLMSIPS

SEQ ID NO: 93797 - protein, 27 aa, Artificial Sequence
  Cyclic GFR-binding peptide
GGGGGGGEYQKYIKPTKGIIYLISIPS

SEQ ID NO: 93798 - protein, 27 aa, Artificial Sequence
  Cyclic GFR-binding peptide
GGGGGGGRYKKLVVNNAADFYLISIAN

SEQ ID NO: 93799 - protein, 27 aa, Artificial Sequence
  Cyclic GFR-binding peptide
GGGGGGGYHYKLVVNNAADKYLISIPS

SEQ ID NO: 93800 - protein, 27 aa, Artificial Sequence
  Cyclic GFR-binding peptide
GGGGGGGEYKFKIVNNSSDLYLVSIPE

SEQ ID NO: 93801 - protein, 27 aa, Artificial Sequence
  Cyclic GFR-binding peptide
GGGGGGGEYQKYIVNSSDDIYLVSIPS

SEQ ID NO: 93802 - protein, 27 aa, Artificial Sequence
  Cyclic GFR-binding peptide
GGGGGGGEYKFKIVNSSDDLYLVSIPE

SEQ ID NO: 93803 - protein, 27 aa, Artificial Sequence
  Cyclic GFR-binding peptide
GGGGGGGEYKFKVKPKRGVLYLISIPE

SEQ ID NO: 93804 - protein, 27 aa, Artificial Sequence
  Cyclic GFR-binding peptide
GGGGGGGEYQKYYTVVGKDIYLISIPS

SEQ ID NO: 93805 - protein, 27 aa, Artificial Sequence
  Cyclic GFR-binding peptide
GGGGGGGEYKFKVVKENEDLYLMSIPE

SEQ ID NO: 93806 - protein, 27 aa, Artificial Sequence
  Cyclic GFR-binding peptide
GGGGGGGEYQKYIVNNSSDIYLVSIPS

SEQ ID NO: 93807 - protein, 27 aa, Artificial Sequence
  Cyclic GFR-binding peptide
GGGGGGGEYKFKYTVVGKDLYLISIPE

SEQ ID NO: 93808 - protein, 27 aa, Artificial Sequence
  Cyclic GFR-binding peptide
EPISILYLVGRTPKVKFKYEGGGGGGG

SEQ ID NO: 93809 - protein, 27 aa, Artificial Sequence
  Cyclic GFR-binding peptide
EPISVLYLDDMGVPTKFKYEGGGGGGG

SEQ ID NO: 93810 - protein, 27 aa, Artificial Sequence
  Cyclic GFR-binding peptide
SPISILYIVGRKPKVYKQYEGGGGGGG

SEQ ID NO: 93811 - protein, 27 aa, Artificial Sequence
  Cyclic GFR-binding peptide
SPISMLYIDEYDKVVYKQYEGGGGGGG

SEQ ID NO: 93812 - protein, 27 aa, Artificial Sequence
  Cyclic GFR-binding peptide
EPISILYLIGKTPKIKFKYEGGGGGGG

SEQ ID NO: 93813 - protein, 27 aa, Artificial Sequence
  Cyclic GFR-binding peptide
SPISILYKDKGVVTYLKYHYGGGGGGG

SEQ ID NO: 93814 - protein, 27 aa, Artificial Sequence
  Cyclic GFR-binding peptide
NAISILYFDKGVVTYLKKYRGGGGGGG

SEQ ID NO: 93815 - protein, 27 aa, Artificial Sequence
  Cyclic GFR-binding peptide
SPISILYIDAANNVVYKQYEGGGGGGG

SEQ ID NO: 93816 - protein, 27 aa, Artificial Sequence
  Cyclic GFR-binding peptide
SPISILYIVGRTPKVYKQYEGGGGGGG

SEQ ID NO: 93817 - protein, 27 aa, Artificial Sequence
  Cyclic GFR-binding peptide
SPISVLYIDDMGVPTYKQYEGGGGGGG

SEQ ID NO: 93818 - protein, 27 aa, Artificial Sequence
  Cyclic GFR-binding peptide
EPISMLYLDEYDKVVKFKYEGGGGGGG

SEQ ID NO: 93819 - protein, 27 aa, Artificial Sequence
  Cyclic GFR-binding peptide
EPISILYLDAANNVVKFKYEGGGGGGG

SEQ ID NO: 93820 - protein, 27 aa, Artificial Sequence
  Cyclic GFR-binding peptide
SPISMLYIDENEKVVYKQYEGGGGGGG

SEQ ID NO: 93821 - protein, 27 aa, Artificial Sequence
  Cyclic GFR-binding peptide
SPISILYIIGKTPKIYKQYEGGGGGGG

SEQ ID NO: 93822 - protein, 27 aa, Artificial Sequence
  Cyclic GFR-binding peptide
NAISILYFDAANNVVLKKYRGGGGGGG

SEQ ID NO: 93823 - protein, 27 aa, Artificial Sequence
  Cyclic GFR-binding peptide
SPISILYKDAANNVVLKYHYGGGGGGG

SEQ ID NO: 93824 - protein, 27 aa, Artificial Sequence
  Cyclic GFR-binding peptide
EPISVLYLDSSNNVIKFKYEGGGGGGG

SEQ ID NO: 93825 - protein, 27 aa, Artificial Sequence
  Cyclic GFR-binding peptide
SPISVLYIDDSSNVIYKQYEGGGGGGG

SEQ ID NO: 93826 - protein, 27 aa, Artificial Sequence
  Cyclic GFR-binding peptide
EPISVLYLDDSSNVIKFKYEGGGGGGG

SEQ ID NO: 93827 - protein, 27 aa, Artificial Sequence
  Cyclic GFR-binding peptide
EPISILYLVGRKPKVKFKYEGGGGGGG

SEQ ID NO: 93828 - protein, 27 aa, Artificial Sequence
  Cyclic GFR-binding peptide
SPISILYIDKGVVTYYKQYEGGGGGGG

SEQ ID NO: 93829 - protein, 27 aa, Artificial Sequence
  Cyclic GFR-binding peptide
EPISMLYLDENEKVVKFKYEGGGGGGG

SEQ ID NO: 93830 - protein, 27 aa, Artificial Sequence
  Cyclic GFR-binding peptide
SPISVLYIDSSNNVIYKQYEGGGGGGG

SEQ ID NO: 93831 - protein, 27 aa, Artificial Sequence
  Cyclic GFR-binding peptide
EPISILYLDKGVVTYKFKYEGGGGGGG

SEQ ID NO: 93832 - protein, 27 aa, Artificial Sequence
  Cyclic GFR-binding peptide
GGGGGGGPIKGYIIQQKDNFYLMNIPS

SEQ ID NO: 93833 - protein, 27 aa, Artificial Sequence
  Cyclic GFR-binding peptide
GGGGGGGPIKGYVVKDYEDFYLMNIPS

SEQ ID NO: 93834 - protein, 27 aa, Artificial Sequence
  Cyclic GFR-binding peptide
GGGGGGGPIKGYIVNSSDDFYLVNIPS

SEQ ID NO: 93835 - protein, 27 aa, Artificial Sequence
  Cyclic GFR-binding peptide
GGGGGGGPIKGYVVNNAADFYLINIPS

SEQ ID NO: 93836 - protein, 27 aa, Artificial Sequence
  Cyclic GFR-binding peptide
GGGGGGGPIKGYYTVVGKDFYLINIPS

SEQ ID NO: 93837 - protein, 27 aa, Artificial Sequence
  Cyclic GFR-binding peptide
GGGGGGGPIKGYLLVRGNDFYLMNIPS

SEQ ID NO: 93838 - protein, 27 aa, Artificial Sequence
  Cyclic GFR-binding peptide
GGGGGGGPIKGYVVKENEDFYLMNIPS

SEQ ID NO: 93839 - protein, 27 aa, Artificial Sequence
  Cyclic GFR-binding peptide
GGGGGGGPIKGYVVNNASDFYLINIPS

SEQ ID NO: 93840 - protein, 27 aa, Artificial Sequence
  Cyclic GFR-binding peptide
GGGGGGGPIKGYTPVGMDDFYLVNIPS

SEQ ID NO: 93841 - protein, 27 aa, Artificial Sequence
  Cyclic GFR-binding peptide
GGGGGGGPIKGYIVNNSSDFYLVNIPS

SEQ ID NO: 93842 - protein, 27 aa, Artificial Sequence
  Cyclic GFR-binding peptide
SPINMLYFNDKQQIIYGKIPGGGGGGG

SEQ ID NO: 93843 - protein, 27 aa, Artificial Sequence
  Cyclic GFR-binding peptide
SPINMLYFDEYDKVVYGKIPGGGGGGG

SEQ ID NO: 93844 - protein, 27 aa, Artificial Sequence
  Cyclic GFR-binding peptide
SPINVLYFDDSSNVIYGKIPGGGGGGG

SEQ ID NO: 93845 - protein, 27 aa, Artificial Sequence
  Cyclic GFR-binding peptide
SPINILYFDAANNVVYGKIPGGGGGGG

SEQ ID NO: 93846 - protein, 27 aa, Artificial Sequence
  Cyclic GFR-binding peptide
SPINILYFDKGVVTYYGKIPGGGGGGG

SEQ ID NO: 93847 - protein, 27 aa, Artificial Sequence
  Cyclic GFR-binding peptide
SPINMLYFDNGRVLLYGKIPGGGGGGG

SEQ ID NO: 93848 - protein, 27 aa, Artificial Sequence
  Cyclic GFR-binding peptide
SPINMLYFDENEKVVYGKIPGGGGGGG

SEQ ID NO: 93849 - protein, 27 aa, Artificial Sequence
  Cyclic GFR-binding peptide
SPINILYFDSANNVVYGKIPGGGGGGG

SEQ ID NO: 93850 - protein, 27 aa, Artificial Sequence
  Cyclic GFR-binding peptide
SPINVLYFDDMGVPTYGKIPGGGGGGG

SEQ ID NO: 93851 - protein, 27 aa, Artificial Sequence
  Cyclic GFR-binding peptide
SPINVLYFDSSNNVIYGKIPGGGGGGG

SEQ ID NO: 93852 - protein, 27 aa, Artificial Sequence
  Cyclic GFR-binding peptide
GGGGGGGEYQKYVVNNASDIYLISIPS

SEQ ID NO: 93853 - protein, 27 aa, Artificial Sequence
  Cyclic GFR-binding peptide
GGGGGGGEYQKYIIQQKDNIYLMSIPS

SEQ ID NO: 93854 - protein, 27 aa, Artificial Sequence
  Cyclic GFR-binding peptide
GGGGGGGEYQKYLLVRGNDIYLMSIPS

SEQ ID NO: 93855 - protein, 27 aa, Artificial Sequence
  Cyclic GFR-binding peptide
SPISILYIDSANNVVYKQYEGGGGGGG

SEQ ID NO: 93856 - protein, 27 aa, Artificial Sequence
  Cyclic GFR-binding peptide
SPISMLYINDKQQIIYKQYEGGGGGGG

SEQ ID NO: 93857 - protein, 27 aa, Artificial Sequence
  Cyclic GFR-binding peptide
SPISMLYIDNGRVLLYKQYEGGGGGGG

SEQ ID NO: 93858 - protein, 27 aa, Artificial Sequence
  Cyclic GFR-binding peptide
GGGGGGGPYVKLYTVVGKDFFLISLSS

SEQ ID NO: 93859 - protein, 27 aa, Artificial Sequence
  Cyclic GFR-binding peptide
GGGGGGGPYVKLIKPTKGIFFLISLSS

SEQ ID NO: 93860 - protein, 27 aa, Artificial Sequence
  Cyclic GFR-binding peptide
GGGGGGGPYVKLIIQQKDNFFLMSLSS

SEQ ID NO: 93861 - protein, 27 aa, Artificial Sequence
  Cyclic GFR-binding peptide
GGGGGGGPYVKLIVNSSDDFFLVSLSS

SEQ ID NO: 93862 - protein, 27 aa, Artificial Sequence
  Cyclic GFR-binding peptide
GGGGGGGPYVKLVKPKRGVFFLISLSS

SEQ ID NO: 93863 - protein, 27 aa, Artificial Sequence
  Cyclic GFR-binding peptide
GGGGGGGPYVKLVKPTRGVFFLISLSS

SEQ ID NO: 93864 - protein, 27 aa, Artificial Sequence
  Cyclic GFR-binding peptide
GGGGGGGPYVKLTPVGMDDFFLVSLSS

SEQ ID NO: 93865 - protein, 29 aa, Artificial Sequence
  Cyclic GFR-binding peptide
GGGGGGGPYVKLHQGQHPKIRFFLMSLSS

SEQ ID NO: 93866 - protein, 27 aa, Artificial Sequence
  Cyclic GFR-binding peptide
GGGGGGGPYVKLVVNKNEDFFLISLSS

SEQ ID NO: 93867 - protein, 27 aa, Artificial Sequence
  Cyclic GFR-binding peptide
GGGGGGGPYVKLVVNNASDFFLISLSS

SEQ ID NO: 93868 - protein, 27 aa, Artificial Sequence
  Cyclic GFR-binding peptide
GGGGGGGPYVKLVVKENEDFFLMSLSS

SEQ ID NO: 93869 - protein, 27 aa, Artificial Sequence
  Cyclic GFR-binding peptide
GGGGGGGPYVKLIVNNSSDFFLVSLSS

SEQ ID NO: 93870 - protein, 29 aa, Artificial Sequence
  Cyclic GFR-binding peptide
GGGGGGGPYVKLLKPKKRVYEFFLVSLSS

SEQ ID NO: 93871 - protein, 27 aa, Artificial Sequence
  Cyclic GFR-binding peptide
GGGGGGGPYVKLLLVRGNDFFLMSLSS

SEQ ID NO: 93872 - protein, 27 aa, Artificial Sequence
  Cyclic GFR-binding peptide
GGGGGGGPYVKLVVKDYEDFFLMSLSS

SEQ ID NO: 93873 - protein, 27 aa, Artificial Sequence
  Cyclic GFR-binding peptide
GGGGGGGPYVKLVVNNAADFFLISLSS

SEQ ID NO: 93874 - protein, 27 aa, Artificial Sequence
  Cyclic GFR-binding peptide
SSLSILFFDKGVVTYLKVYPGGGGGGG

SEQ ID NO: 93875 - protein, 27 aa, Artificial Sequence
  Cyclic GFR-binding peptide
SSLSILFFIGKTPKILKVYPGGGGGGG

SEQ ID NO: 93876 - protein, 27 aa, Artificial Sequence
  Cyclic GFR-binding peptide
SSLSMLFFNDKQQIILKVYPGGGGGGG

SEQ ID NO: 93877 - protein, 27 aa, Artificial Sequence
  Cyclic GFR-binding peptide
SSLSVLFFDDSSNVILKVYPGGGGGGG

SEQ ID NO: 93878 - protein, 27 aa, Artificial Sequence
  Cyclic GFR-binding peptide
SSLSILFFVGRKPKVLKVYPGGGGGGG

SEQ ID NO: 93879 - protein, 27 aa, Artificial Sequence
  Cyclic GFR-binding peptide
SSLSILFFVGRTPKVLKVYPGGGGGGG

SEQ ID NO: 93880 - protein, 27 aa, Artificial Sequence
  Cyclic GFR-binding peptide
SSLSVLFFDDMGVPTLKVYPGGGGGGG

SEQ ID NO: 93881 - protein, 29 aa, Artificial Sequence
  Cyclic GFR-binding peptide
SSLSMLFFRIKPHQGQHLKVYPGGGGGGG

SEQ ID NO: 93882 - protein, 27 aa, Artificial Sequence
  Cyclic GFR-binding peptide
SSLSILFFDENKNVVLKVYPGGGGGGG

SEQ ID NO: 93883 - protein, 27 aa, Artificial Sequence
  Cyclic GFR-binding peptide
SSLSILFFDSANNVVLKVYPGGGGGGG

SEQ ID NO: 93884 - protein, 27 aa, Artificial Sequence
  Cyclic GFR-binding peptide
SSLSMLFFDENEKVVLKVYPGGGGGGG

SEQ ID NO: 93885 - protein, 27 aa, Artificial Sequence
  Cyclic GFR-binding peptide
SSLSVLFFDSSNNVILKVYPGGGGGGG

SEQ ID NO: 93886 - protein, 29 aa, Artificial Sequence
  Cyclic GFR-binding peptide
SSLSVLFFEYVRKKPKLLKVYPGGGGGGG

SEQ ID NO: 93887 - protein, 27 aa, Artificial Sequence
  Cyclic GFR-binding peptide
SSLSMLFFDNGRVLLLKVYPGGGGGGG

SEQ ID NO: 93888 - protein, 27 aa, Artificial Sequence
  Cyclic GFR-binding peptide
SSLSMLFFDEYDKVVLKVYPGGGGGGG

SEQ ID NO: 93889 - protein, 27 aa, Artificial Sequence
  Cyclic GFR-binding peptide
SSLSILFFDAANNVVLKVYPGGGGGGG

SEQ ID NO: 93890 - protein, 27 aa, Artificial Sequence
  Cyclic GFR-binding peptide
GGGGGGGSMEGIIVNSSDDMIQVTINS

SEQ ID NO: 93891 - protein, 27 aa, Artificial Sequence
  Cyclic GFR-binding peptide
GGGGGGGVTAKKVVKENEDIKRMQVPR

SEQ ID NO: 93892 - protein, 27 aa, Artificial Sequence
  Cyclic GFR-binding peptide
GGGGGGGSMEGIVVKDYEDMIQMTINS

SEQ ID NO: 93893 - protein, 27 aa, Artificial Sequence
  Cyclic GFR-binding peptide
GGGGGGGVTAKKIKPTKGIIKRIQVPR

SEQ ID NO: 93894 - protein, 27 aa, Artificial Sequence
  Cyclic GFR-binding peptide
GGGGGGGSMEGIVKPTRGVMIQITINS

SEQ ID NO: 93895 - protein, 29 aa, Artificial Sequence
  Cyclic GFR-binding peptide
GGGGGGGNSLQEFIPKKRVIEYYVVPLPE

SEQ ID NO: 93896 - protein, 27 aa, Artificial Sequence
  Cyclic GFR-binding peptide
GGGGGGGVQVEKVKPKRGVVKAIKVSR

SEQ ID NO: 93897 - protein, 27 aa, Artificial Sequence
  Cyclic GFR-binding peptide
GGGGGGGVQVEKVVKENEDVKAMKVSR

SEQ ID NO: 93898 - protein, 27 aa, Artificial Sequence
  Cyclic GFR-binding peptide
GGGGGGGVTAKKIVNSSDDIKRVQVPR

SEQ ID NO: 93899 - protein, 27 aa, Artificial Sequence
  Cyclic GFR-binding peptide
GGGGGGGVQVEKIKPTKGIVKAIKVSR

SEQ ID NO: 93900 - protein, 29 aa, Artificial Sequence
  Cyclic GFR-binding peptide
GGGGGGGNSLQEFIPKKRVIEYYLVTLPE

SEQ ID NO: 93901 - protein, 27 aa, Artificial Sequence
  Cyclic GFR-binding peptide
GGGGGGGVQVEKIVNSSDDVKAVKVSR

SEQ ID NO: 93902 - protein, 27 aa, Artificial Sequence
  Cyclic GFR-binding peptide
GGGGGGGVTAKKVKPKRGVIKRIQVPR

SEQ ID NO: 93903 - protein, 27 aa, Artificial Sequence
  Cyclic GFR-binding peptide
GGGGGGGVQVEKVKPTRGVVKAIKVSR

SEQ ID NO: 93904 - protein, 27 aa, Artificial Sequence
  Cyclic GFR-binding peptide
GGGGGGGVTAKKVKPTRGVIKRIQVPR

SEQ ID NO: 93905 - protein, 29 aa, Artificial Sequence
  Cyclic GFR-binding peptide
GGGGGGGNSLQELKPKKRVYEYYLVTLPE

SEQ ID NO: 93906 - protein, 27 aa, Artificial Sequence
  Cyclic GFR-binding peptide
GGGGGGGSMEGIVKPKRGVMIQITINS

SEQ ID NO: 93907 - protein, 27 aa, Artificial Sequence
  Cyclic GFR-binding peptide
GGGGGGGSMEGIVVKENEDMIQMTINS

SEQ ID NO: 93908 - protein, 27 aa, Artificial Sequence
  Cyclic GFR-binding peptide
GGGGGGGSMEGIIKPTKGIMIQITINS

SEQ ID NO: 93909 - protein, 29 aa, Artificial Sequence
  Cyclic GFR-binding peptide
GGGGGGGNSLQEHQGQHPKIRYYLMTLPE

SEQ ID NO: 93910 - protein, 27 aa, Artificial Sequence
  Cyclic GFR-binding peptide
GGGGGGGVTAKKVVKDYEDIKRMQVPR

SEQ ID NO: 93911 - protein, 29 aa, Artificial Sequence
  Cyclic GFR-binding peptide
GGGGGGGNSLQEHQGQHPKIRYYVMPLPE

SEQ ID NO: 93912 - protein, 29 aa, Artificial Sequence
  Cyclic GFR-binding peptide
GGGGGGGNSLQELKPKKRVYEYYVVPLPE

SEQ ID NO: 93913 - protein, 27 aa, Artificial Sequence
  Cyclic GFR-binding peptide
GGGGGGGVQVEKVVKDYEDVKAMKVSR

SEQ ID NO: 93914 - protein, 27 aa, Artificial Sequence
  Cyclic GFR-binding peptide
SNITVQIMDDSSNVIIGEMSGGGGGGG

SEQ ID NO: 93915 - protein, 27 aa, Artificial Sequence
  Cyclic GFR-binding peptide
RPVQMRKIDENEKVVKKATVGGGGGGG

SEQ ID NO: 93916 - protein, 27 aa, Artificial Sequence
  Cyclic GFR-binding peptide
SNITMQIMDEYDKVVIGEMSGGGGGGG

SEQ ID NO: 93917 - protein, 27 aa, Artificial Sequence
  Cyclic GFR-binding peptide
RPVQIRKIIGKTPKIKKATVGGGGGGG

SEQ ID NO: 93918 - protein, 27 aa, Artificial Sequence
  Cyclic GFR-binding peptide
SNITIQIMVGRTPKVIGEMSGGGGGGG

SEQ ID NO: 93919 - protein, 29 aa, Artificial Sequence
  Cyclic GFR-binding peptide
EPLPVVYYEIVRKKPIFEQLSNGGGGGGG

SEQ ID NO: 93920 - protein, 27 aa, Artificial Sequence
  Cyclic GFR-binding peptide
RSVKIAKVVGRKPKVKEVQVGGGGGGG

SEQ ID NO: 93921 - protein, 27 aa, Artificial Sequence
  Cyclic GFR-binding peptide
RSVKMAKVDENEKVVKEVQVGGGGGGG

SEQ ID NO: 93922 - protein, 27 aa, Artificial Sequence
  Cyclic GFR-binding peptide
RPVQVRKIDDSSNVIKKATVGGGGGGG

SEQ ID NO: 93923 - protein, 27 aa, Artificial Sequence
  Cyclic GFR-binding peptide
RSVKIAKVIGKTPKIKEVQVGGGGGGG

SEQ ID NO: 93924 - protein, 29 aa, Artificial Sequence
  Cyclic GFR-binding peptide
EPLTVLYYEIVRKKPIFEQLSNGGGGGGG

SEQ ID NO: 93925 - protein, 27 aa, Artificial Sequence
  Cyclic GFR-binding peptide
RSVKVAKVDDSSNVIKEVQVGGGGGGG

SEQ ID NO: 93926 - protein, 27 aa, Artificial Sequence
  Cyclic GFR-binding peptide
RPVQIRKIVGRKPKVKKATVGGGGGGG

SEQ ID NO: 93927 - protein, 27 aa, Artificial Sequence
  Cyclic GFR-binding peptide
RSVKIAKVVGRTPKVKEVQVGGGGGGG

SEQ ID NO: 93928 - protein, 27 aa, Artificial Sequence
  Cyclic GFR-binding peptide
RPVQIRKIVGRTPKVKKATVGGGGGGG

SEQ ID NO: 93929 - protein, 29 aa, Artificial Sequence
  Cyclic GFR-binding peptide
EPLTVLYYEYVRKKPKLEQLSNGGGGGGG

SEQ ID NO: 93930 - protein, 27 aa, Artificial Sequence
  Cyclic GFR-binding peptide
SNITIQIMVGRKPKVIGEMSGGGGGGG

SEQ ID NO: 93931 - protein, 27 aa, Artificial Sequence
  Cyclic GFR-binding peptide
SNITMQIMDENEKVVIGEMSGGGGGGG

SEQ ID NO: 93932 - protein, 27 aa, Artificial Sequence
  Cyclic GFR-binding peptide
SNITIQIMIGKTPKIIGEMSGGGGGGG

SEQ ID NO: 93933 - protein, 29 aa, Artificial Sequence
  Cyclic GFR-binding peptide
EPLTMLYYRIKPHQGQHEQLSNGGGGGGG

SEQ ID NO: 93934 - protein, 27 aa, Artificial Sequence
  Cyclic GFR-binding peptide
RPVQMRKIDEYDKVVKKATVGGGGGGG

SEQ ID NO: 93935 - protein, 29 aa, Artificial Sequence
  Cyclic GFR-binding peptide
EPLPMVYYRIKPHQGQHEQLSNGGGGGGG

SEQ ID NO: 93936 - protein, 29 aa, Artificial Sequence
  Cyclic GFR-binding peptide
EPLPVVYYEYVRKKPKLEQLSNGGGGGGG

SEQ ID NO: 93937 - protein, 27 aa, Artificial Sequence
  Cyclic GFR-binding peptide
RSVKMAKVDEYDKVVKEVQVGGGGGGG

SEQ ID NO: 93938 - protein, 27 aa, Artificial Sequence
  Cyclic GFR-binding peptide
GGGGGGGRYKKLIIQQKDNFYLMSIAN

SEQ ID NO: 93939 - protein, 27 aa, Artificial Sequence
  Cyclic GFR-binding peptide
GGGGGGGRYKKLLLVRGNDFYLMSIAN

SEQ ID NO: 93940 - protein, 27 aa, Artificial Sequence
  Cyclic GFR-binding peptide
NAISMLYFNDKQQIILKKYRGGGGGGG

SEQ ID NO: 93941 - protein, 27 aa, Artificial Sequence
  Cyclic GFR-binding peptide
NAISMLYFDNGRVLLLKKYRGGGGGGG

SEQ ID NO: 93942 - protein, 27 aa, Artificial Sequence
  Cyclic GFR-binding peptide
GGGGGGGEYKFKVVNKNEDLYLISIPE

SEQ ID NO: 93943 - protein, 27 aa, Artificial Sequence
  Cyclic GFR-binding peptide
GGGGGGGPIKGYVKPTRGVFYLINIPS

SEQ ID NO: 93944 - protein, 27 aa, Artificial Sequence
  Cyclic GFR-binding peptide
GGGGGGGEYKFKLLVRGNDLYLMSIPE

SEQ ID NO: 93945 - protein, 27 aa, Artificial Sequence
  Cyclic GFR-binding peptide
GGGGGGGYHYKLVVNKNEDKYLISIPS

SEQ ID NO: 93946 - protein, 27 aa, Artificial Sequence
  Cyclic GFR-binding peptide
GGGGGGGRHKRLLLVRGNDYYLMSTAS

SEQ ID NO: 93947 - protein, 27 aa, Artificial Sequence
  Cyclic GFR-binding peptide
GGGGGGGYHYKLLLVRGNDKYLMSIPS

SEQ ID NO: 93948 - protein, 27 aa, Artificial Sequence
  Cyclic GFR-binding peptide
GGGGGGGRHKRLVVNKNEDYYLISTAS

SEQ ID NO: 93949 - protein, 27 aa, Artificial Sequence
  Cyclic GFR-binding peptide
GGGGGGGRYKKLVVNKNEDFYLISIAN

SEQ ID NO: 93950 - protein, 27 aa, Artificial Sequence
  Cyclic GFR-binding peptide
GGGGGGGPIKGYVVNKNEDFYLINIPS

SEQ ID NO: 93951 - protein, 27 aa, Artificial Sequence
  Cyclic GFR-binding peptide
GGGGGGGPIKGYIKPTKGIFYLINIPS

SEQ ID NO: 93952 - protein, 27 aa, Artificial Sequence
  Cyclic GFR-binding peptide
GGGGGGGRHKRLYTVVGKDYYLISTAS

SEQ ID NO: 93953 - protein, 27 aa, Artificial Sequence
  Cyclic GFR-binding peptide
GGGGGGGEYKFKVVNNASDLYLISIPE

SEQ ID NO: 93954 - protein, 27 aa, Artificial Sequence
  Cyclic GFR-binding peptide
GGGGGGGRHKRLIIQQKDNYYLMSTAS

SEQ ID NO: 93955 - protein, 27 aa, Artificial Sequence
  Cyclic GFR-binding peptide
GGGGGGGEYKFKIIQQKDNLYLMSIPE

SEQ ID NO: 93956 - protein, 27 aa, Artificial Sequence
  Cyclic GFR-binding peptide
GGGGGGGPIKGYVKPKRGVFYLINIPS

SEQ ID NO: 93957 - protein, 27 aa, Artificial Sequence
  Cyclic GFR-binding peptide
GGGGGGGRHKRLVVNNASDYYLISTAS

SEQ ID NO: 93958 - protein, 27 aa, Artificial Sequence
  Cyclic GFR-binding peptide
GGGGGGGYHYKLVVNNASDKYLISIPS

SEQ ID NO: 93959 - protein, 27 aa, Artificial Sequence
  Cyclic GFR-binding peptide
GGGGGGGYHYKLIIQQKDNKYLMSIPS

SEQ ID NO: 93960 - protein, 27 aa, Artificial Sequence
  Cyclic GFR-binding peptide
GGGGGGGRHKRLVVNNAADYYLISTAS

SEQ ID NO: 93961 - protein, 27 aa, Artificial Sequence
  Cyclic GFR-binding peptide
EPISILYLDENKNVVKFKYEGGGGGGG

SEQ ID NO: 93962 - protein, 27 aa, Artificial Sequence
  Cyclic GFR-binding peptide
SPINILYFVGRTPKVYGKIPGGGGGGG

SEQ ID NO: 93963 - protein, 27 aa, Artificial Sequence
  Cyclic GFR-binding peptide
EPISMLYLDNGRVLLKFKYEGGGGGGG

SEQ ID NO: 93964 - protein, 27 aa, Artificial Sequence
  Cyclic GFR-binding peptide
SPISILYKDENKNVVLKYHYGGGGGGG

SEQ ID NO: 93965 - protein, 27 aa, Artificial Sequence
  Cyclic GFR-binding peptide
SATSMLYYDNGRVLLLRKHRGGGGGGG

SEQ ID NO: 93966 - protein, 27 aa, Artificial Sequence
  Cyclic GFR-binding peptide
SPISMLYKDNGRVLLLKYHYGGGGGGG

SEQ ID NO: 93967 - protein, 27 aa, Artificial Sequence
  Cyclic GFR-binding peptide
SATSILYYDENKNVVLRKHRGGGGGGG

SEQ ID NO: 93968 - protein, 27 aa, Artificial Sequence
  Cyclic GFR-binding peptide
NAISILYFDENKNVVLKKYRGGGGGGG

SEQ ID NO: 93969 - protein, 27 aa, Artificial Sequence
  Cyclic GFR-binding peptide
SPINILYFDENKNVVYGKIPGGGGGGG

SEQ ID NO: 93970 - protein, 27 aa, Artificial Sequence
  Cyclic GFR-binding peptide
SPINILYFIGKTPKIYGKIPGGGGGGG

SEQ ID NO: 93971 - protein, 27 aa, Artificial Sequence
  Cyclic GFR-binding peptide
SATSILYYDKGVVTYLRKHRGGGGGGG

SEQ ID NO: 93972 - protein, 27 aa, Artificial Sequence
  Cyclic GFR-binding peptide
EPISILYLDSANNVVKFKYEGGGGGGG

SEQ ID NO: 93973 - protein, 27 aa, Artificial Sequence
  Cyclic GFR-binding peptide
SATSMLYYNDKQQIILRKHRGGGGGGG

SEQ ID NO: 93974 - protein, 27 aa, Artificial Sequence
  Cyclic GFR-binding peptide
EPISMLYLNDKQQIIKFKYEGGGGGGG

SEQ ID NO: 93975 - protein, 27 aa, Artificial Sequence
  Cyclic GFR-binding peptide
SPINILYFVGRKPKVYGKIPGGGGGGG

SEQ ID NO: 93976 - protein, 27 aa, Artificial Sequence
  Cyclic GFR-binding peptide
SATSILYYDSANNVVLRKHRGGGGGGG

SEQ ID NO: 93977 - protein, 27 aa, Artificial Sequence
  Cyclic GFR-binding peptide
SPISILYKDSANNVVLKYHYGGGGGGG

SEQ ID NO: 93978 - protein, 27 aa, Artificial Sequence
  Cyclic GFR-binding peptide
SPISMLYKNDKQQIILKYHYGGGGGGG

SEQ ID NO: 93979 - protein, 27 aa, Artificial Sequence
  Cyclic GFR-binding peptide
SATSILYYDAANNVVLRKHRGGGGGGG

SEQ ID NO: 93980 - protein, 27 aa, Artificial Sequence
  Cyclic GFR-binding peptide
GGGGGGGSMEGIIIQQKDNMIQMTINS

SEQ ID NO: 93981 - protein, 27 aa, Artificial Sequence
  Cyclic GFR-binding peptide
GGGGGGGSMEGLVKPKRGVMIQITINS

SEQ ID NO: 93982 - protein, 27 aa, Artificial Sequence
  Cyclic GFR-binding peptide
GGGGGGGSMEGLVVNNASDMIQITINS

SEQ ID NO: 93983 - protein, 27 aa, Artificial Sequence
  Cyclic GFR-binding peptide
GGGGGGGSMEGILLVRGNDMIQMTINS

SEQ ID NO: 93984 - protein, 27 aa, Artificial Sequence
  Cyclic GFR-binding peptide
GGGGGGGSMEGLIKPTKGIMIQITINS

SEQ ID NO: 93985 - protein, 27 aa, Artificial Sequence
  Cyclic GFR-binding peptide
GGGGGGGSMEGLIVNSSDDMIQVTINS

SEQ ID NO: 93986 - protein, 27 aa, Artificial Sequence
  Cyclic GFR-binding peptide
GGGGGGGSMEGIVVNNASDMIQITINS

SEQ ID NO: 93987 - protein, 27 aa, Artificial Sequence
  Cyclic GFR-binding peptide
GGGGGGGSMEGLVVNNAADMIQITINS

SEQ ID NO: 93988 - protein, 27 aa, Artificial Sequence
  Cyclic GFR-binding peptide
GGGGGGGSMEGLLLVRGNDMIQMTINS

SEQ ID NO: 93989 - protein, 27 aa, Artificial Sequence
  Cyclic GFR-binding peptide
GGGGGGGSMEGLIIQQKDNMIQMTINS

SEQ ID NO: 93990 - protein, 27 aa, Artificial Sequence
  Cyclic GFR-binding peptide
GGGGGGGSMEGIVVNNAADMIQITINS

SEQ ID NO: 93991 - protein, 27 aa, Artificial Sequence
  Cyclic GFR-binding peptide
GGGGGGGSMEGLVKPTRGVMIQITINS

SEQ ID NO: 93992 - protein, 27 aa, Artificial Sequence
  Cyclic GFR-binding peptide
SNITMQIMNDKQQIIIGEMSGGGGGGG

SEQ ID NO: 93993 - protein, 27 aa, Artificial Sequence
  Cyclic GFR-binding peptide
SNITIQIMVGRKPKVLGEMSGGGGGGG

SEQ ID NO: 93994 - protein, 27 aa, Artificial Sequence
  Cyclic GFR-binding peptide
SNITIQIMDSANNVVLGEMSGGGGGGG

SEQ ID NO: 93995 - protein, 27 aa, Artificial Sequence
  Cyclic GFR-binding peptide
SNITMQIMDNGRVLLIGEMSGGGGGGG

SEQ ID NO: 93996 - protein, 27 aa, Artificial Sequence
  Cyclic GFR-binding peptide
SNITIQIMIGKTPKILGEMSGGGGGGG

SEQ ID NO: 93997 - protein, 27 aa, Artificial Sequence
  Cyclic GFR-binding peptide
SNITVQIMDDSSNVILGEMSGGGGGGG

SEQ ID NO: 93998 - protein, 27 aa, Artificial Sequence
  Cyclic GFR-binding peptide
SNITIQIMDSANNVVIGEMSGGGGGGG

SEQ ID NO: 93999 - protein, 27 aa, Artificial Sequence
  Cyclic GFR-binding peptide
SNITIQIMDAANNVVLGEMSGGGGGGG

SEQ ID NO: 94000 - protein, 27 aa, Artificial Sequence
  Cyclic GFR-binding peptide
SNITMQIMDNGRVLLLGEMSGGGGGGG

SEQ ID NO: 94001 - protein, 27 aa, Artificial Sequence
  Cyclic GFR-binding peptide
SNITMQIMNDKQQIILGEMSGGGGGGG

SEQ ID NO: 94002 - protein, 27 aa, Artificial Sequence
  Cyclic GFR-binding peptide
SNITIQIMDAANNVVIGEMSGGGGGGG

SEQ ID NO: 94003 - protein, 27 aa, Artificial Sequence
  Cyclic GFR-binding peptide
SNITIQIMVGRTPKVLGEMSGGGGGGG

SEQ ID NO: 94004 - protein, 27 aa, Artificial Sequence
  Cyclic GFR-binding peptide
GGGGGGGQYNKLVVNKNEDLYLISIAS

SEQ ID NO: 94005 - protein, 27 aa, Artificial Sequence
  Cyclic GFR-binding peptide
GGGGGGGQYNKLVVNNAADLYLISIAS

SEQ ID NO: 94006 - protein, 27 aa, Artificial Sequence
  Cyclic GFR-binding peptide
GGGGGGGQYNKLIIQQKDNLYLMSIAS

SEQ ID NO: 94007 - protein, 27 aa, Artificial Sequence
  Cyclic GFR-binding peptide
GGGGGGGQYNKLLLVRGNDLYLMSIAS

SEQ ID NO: 94008 - protein, 27 aa, Artificial Sequence
  Cyclic GFR-binding peptide
GGGGGGGQYNKLYTVVGKDLYLISIAS

SEQ ID NO: 94009 - protein, 27 aa, Artificial Sequence
  Cyclic GFR-binding peptide
SAISILYLDENKNVVLKNYQGGGGGGG

SEQ ID NO: 94010 - protein, 27 aa, Artificial Sequence
  Cyclic GFR-binding peptide
SAISILYLDAANNVVLKNYQGGGGGGG

SEQ ID NO: 94011 - protein, 27 aa, Artificial Sequence
  Cyclic GFR-binding peptide
SAISMLYLNDKQQIILKNYQGGGGGGG

SEQ ID NO: 94012 - protein, 27 aa, Artificial Sequence
  Cyclic GFR-binding peptide
SAISMLYLDNGRVLLLKNYQGGGGGGG

SEQ ID NO: 94013 - protein, 27 aa, Artificial Sequence
  Cyclic GFR-binding peptide
SAISILYLDKGVVTYLKNYQGGGGGGG

SEQ ID NO: 94014 - protein, 27 aa, Artificial Sequence
  Cyclic GFR-binding peptide
DENEKVVRYKKLIKPTKGIFYLISIAN

SEQ ID NO: 94015 - protein, 29 aa, Artificial Sequence
  Cyclic GFR-binding peptide
DENEKVVRHKRLFIPKKRVIEYYLVSTAS

SEQ ID NO: 94016 - protein, 27 aa, Artificial Sequence
  Cyclic GFR-binding peptide
DENEKVVYHYKLVVKDYEDKYLMSIPS

SEQ ID NO: 94017 - protein, 27 aa, Artificial Sequence
  Cyclic GFR-binding peptide
DENEKVVQYNKLIVNNSSDLYLVSIAS

SEQ ID NO: 94018 - protein, 27 aa, Artificial Sequence
  Cyclic GFR-binding peptide
DENEKVVRYKKLVVKDYEDFYLMSIAN

SEQ ID NO: 94019 - protein, 27 aa, Artificial Sequence
  Cyclic GFR-binding peptide
DENEKVVRYKKLVKPTRGVFYLISIAN

SEQ ID NO: 94020 - protein, 27 aa, Artificial Sequence
  Cyclic GFR-binding peptide
DENEKVVRHKRLVVKENEDYYLMSTAS

SEQ ID NO: 94021 - protein, 27 aa, Artificial Sequence
  Cyclic GFR-binding peptide
DENEKVVYHYKLIKPTKGIKYLISIPS

SEQ ID NO: 94022 - protein, 29 aa, Artificial Sequence
  Cyclic GFR-binding peptide
DENEKVVRYKKLFIPKKRVIEFYLVSIAN

SEQ ID NO: 94023 - protein, 27 aa, Artificial Sequence
  Cyclic GFR-binding peptide
DENEKVVYHYKLVVKENEDKYLMSIPS

SEQ ID NO: 94024 - protein, 27 aa, Artificial Sequence
  Cyclic GFR-binding peptide
DENEKVVRHKRLVKPKRGVYYLISTAS

SEQ ID NO: 94025 - protein, 27 aa, Artificial Sequence
  Cyclic GFR-binding peptide
DENEKVVYHYKLVKPKRGVKYLISIPS

SEQ ID NO: 94026 - protein, 29 aa, Artificial Sequence
  Cyclic GFR-binding peptide
DENEKVVQYNKLFIPKKRVIELYLVSIAS

SEQ ID NO: 94027 - protein, 27 aa, Artificial Sequence
  Cyclic GFR-binding peptide
DENEKVVQYNKLVKPTRGVLYLISIAS

SEQ ID NO: 94028 - protein, 27 aa, Artificial Sequence
  Cyclic GFR-binding peptide
DENEKVVRYKKLVVKENEDFYLMSIAN

SEQ ID NO: 94029 - protein, 27 aa, Artificial Sequence
  Cyclic GFR-binding peptide
DENEKVVQYNKLTPVGMDDLYLVSIAS

SEQ ID NO: 94030 - protein, 27 aa, Artificial Sequence
  Cyclic GFR-binding peptide
DENEKVVRYKKLTPVGMDDFYLVSIAN

SEQ ID NO: 94031 - protein, 27 aa, Artificial Sequence
  Cyclic GFR-binding peptide
DENEKVVRYKKLVKPKRGVFYLISIAN

SEQ ID NO: 94032 - protein, 27 aa, Artificial Sequence
  Cyclic GFR-binding peptide
DENEKVVQYNKLVVKENEDLYLMSIAS

SEQ ID NO: 94033 - protein, 27 aa, Artificial Sequence
  Cyclic GFR-binding peptide
DENEKVVYHYKLIVNSSDDKYLVSIPS

SEQ ID NO: 94034 - protein, 27 aa, Artificial Sequence
  Cyclic GFR-binding peptide
DENEKVVQYNKLVKPKRGVLYLISIAS

SEQ ID NO: 94035 - protein, 27 aa, Artificial Sequence
  Cyclic GFR-binding peptide
DENEKVVRYKKLIVNNSSDFYLVSIAN

SEQ ID NO: 94036 - protein, 27 aa, Artificial Sequence
  Cyclic GFR-binding peptide
DENEKVVRYKKLIVNSSDDFYLVSIAN

SEQ ID NO: 94037 - protein, 27 aa, Artificial Sequence
  Cyclic GFR-binding peptide
DENEKVVRHKRLVKPTRGVYYLISTAS

SEQ ID NO: 94038 - protein, 29 aa, Artificial Sequence
  Cyclic GFR-binding peptide
DENEKVVYHYKLFIPKKRVIEKYLVSIPS

SEQ ID NO: 94039 - protein, 27 aa, Artificial Sequence
  Cyclic GFR-binding peptide
DENEKVVRHKRLIKPTKGIYYLISTAS

SEQ ID NO: 94040 - protein, 27 aa, Artificial Sequence
  Cyclic GFR-binding peptide
DENEKVVRHKRLTPVGMDDYYLVSTAS

SEQ ID NO: 94041 - protein, 27 aa, Artificial Sequence
  Cyclic GFR-binding peptide
DENEKVVYHYKLTPVGMDDKYLVSIPS

SEQ ID NO: 94042 - protein, 27 aa, Artificial Sequence
  Cyclic GFR-binding peptide
DENEKVVYHYKLIVNNSSDKYLVSIPS

SEQ ID NO: 94043 - protein, 27 aa, Artificial Sequence
  Cyclic GFR-binding peptide
DENEKVVRHKRLIVNNSSDYYLVSTAS

SEQ ID NO: 94044 - protein, 27 aa, Artificial Sequence
  Cyclic GFR-binding peptide
DENEKVVYHYKLVKPTRGVKYLISIPS

SEQ ID NO: 94045 - protein, 27 aa, Artificial Sequence
  Cyclic GFR-binding peptide
DENEKVVRHKRLIVNSSDDYYLVSTAS

SEQ ID NO: 94046 - protein, 27 aa, Artificial Sequence
  Cyclic GFR-binding peptide
DENEKVVRHKRLVVKDYEDYYLMSTAS

SEQ ID NO: 94047 - protein, 27 aa, Artificial Sequence
  Cyclic GFR-binding peptide
DENEKVVQYNKLIKPTKGILYLISIAS

SEQ ID NO: 94048 - protein, 27 aa, Artificial Sequence
  Cyclic GFR-binding peptide
DENEKVVQYNKLVVKDYEDLYLMSIAS

SEQ ID NO: 94049 - protein, 27 aa, Artificial Sequence
  Cyclic GFR-binding peptide
DENEKVVQYNKLIVNSSDDLYLVSIAS

SEQ ID NO: 94050 - protein, 27 aa, Artificial Sequence
  Cyclic GFR-binding peptide
NAISILYFIGKTPKILKKYRDENEKVV

SEQ ID NO: 94051 - protein, 29 aa, Artificial Sequence
  Cyclic GFR-binding peptide
SATSVLYYEIVRKKPIFLRKHRDENEKVV

SEQ ID NO: 94052 - protein, 27 aa, Artificial Sequence
  Cyclic GFR-binding peptide
SPISMLYKDEYDKVVLKYHYDENEKVV

SEQ ID NO: 94053 - protein, 27 aa, Artificial Sequence
  Cyclic GFR-binding peptide
SAISVLYLDSSNNVILKNYQDENEKVV

SEQ ID NO: 94054 - protein, 27 aa, Artificial Sequence
  Cyclic GFR-binding peptide
NAISMLYFDEYDKVVLKKYRDENEKVV

SEQ ID NO: 94055 - protein, 27 aa, Artificial Sequence
  Cyclic GFR-binding peptide
NAISILYFVGRTPKVLKKYRDENEKVV

SEQ ID NO: 94056 - protein, 27 aa, Artificial Sequence
  Cyclic GFR-binding peptide
SATSMLYYDENEKVVLRKHRDENEKVV

SEQ ID NO: 94057 - protein, 27 aa, Artificial Sequence
  Cyclic GFR-binding peptide
SPISILYKIGKTPKILKYHYDENEKVV

SEQ ID NO: 94058 - protein, 29 aa, Artificial Sequence
  Cyclic GFR-binding peptide
NAISVLYFEIVRKKPIFLKKYRDENEKVV

SEQ ID NO: 94059 - protein, 27 aa, Artificial Sequence
  Cyclic GFR-binding peptide
SPISMLYKDENEKVVLKYHYDENEKVV

SEQ ID NO: 94060 - protein, 27 aa, Artificial Sequence
  Cyclic GFR-binding peptide
SATSILYYVGRKPKVLRKHRDENEKVV

SEQ ID NO: 94061 - protein, 27 aa, Artificial Sequence
  Cyclic GFR-binding peptide
SPISILYKVGRKPKVLKYHYDENEKVV

SEQ ID NO: 94062 - protein, 29 aa, Artificial Sequence
  Cyclic GFR-binding peptide
SAISVLYLEIVRKKPIFLKNYQDENEKVV

SEQ ID NO: 94063 - protein, 27 aa, Artificial Sequence
  Cyclic GFR-binding peptide
SAISILYLVGRTPKVLKNYQDENEKVV

SEQ ID NO: 94064 - protein, 27 aa, Artificial Sequence
  Cyclic GFR-binding peptide
NAISMLYFDENEKVVLKKYRDENEKVV

SEQ ID NO: 94065 - protein, 27 aa, Artificial Sequence
  Cyclic GFR-binding peptide
SAISVLYLDDMGVPTLKNYQDENEKVV

SEQ ID NO: 94066 - protein, 27 aa, Artificial Sequence
  Cyclic GFR-binding peptide
NAISVLYFDDMGVPTLKKYRDENEKVV

SEQ ID NO: 94067 - protein, 27 aa, Artificial Sequence
  Cyclic GFR-binding peptide
NAISILYFVGRKPKVLKKYRDENEKVV

SEQ ID NO: 94068 - protein, 27 aa, Artificial Sequence
  Cyclic GFR-binding peptide
SPISVLYKDDSSNVILKYHYDENEKVV

SEQ ID NO: 94069 - protein, 27 aa, Artificial Sequence
  Cyclic GFR-binding peptide
SAISILYLVGRKPKVLKNYQDENEKVV

SEQ ID NO: 94070 - protein, 27 aa, Artificial Sequence
  Cyclic GFR-binding peptide
NAISVLYFDSSNNVILKKYRDENEKVV

SEQ ID NO: 94071 - protein, 27 aa, Artificial Sequence
  Cyclic GFR-binding peptide
NAISVLYFDDSSNVILKKYRDENEKVV

SEQ ID NO: 94072 - protein, 27 aa, Artificial Sequence
  Cyclic GFR-binding peptide
SATSILYYVGRTPKVLRKHRDENEKVV

SEQ ID NO: 94073 - protein, 29 aa, Artificial Sequence
  Cyclic GFR-binding peptide
SPISVLYKEIVRKKPIFLKYHYDENEKVV

SEQ ID NO: 94074 - protein, 27 aa, Artificial Sequence
  Cyclic GFR-binding peptide
SATSILYYIGKTPKILRKHRDENEKVV

SEQ ID NO: 94075 - protein, 27 aa, Artificial Sequence
  Cyclic GFR-binding peptide
SATSVLYYDDMGVPTLRKHRDENEKVV

SEQ ID NO: 94076 - protein, 27 aa, Artificial Sequence
  Cyclic GFR-binding peptide
SPISVLYKDDMGVPTLKYHYDENEKVV

SEQ ID NO: 94077 - protein, 27 aa, Artificial Sequence
  Cyclic GFR-binding peptide
SPISVLYKDSSNNVILKYHYDENEKVV

SEQ ID NO: 94078 - protein, 27 aa, Artificial Sequence
  Cyclic GFR-binding peptide
SATSVLYYDSSNNVILRKHRDENEKVV

SEQ ID NO: 94079 - protein, 27 aa, Artificial Sequence
  Cyclic GFR-binding peptide
SPISILYKVGRTPKVLKYHYDENEKVV

SEQ ID NO: 94080 - protein, 27 aa, Artificial Sequence
  Cyclic GFR-binding peptide
SATSVLYYDDSSNVILRKHRDENEKVV

SEQ ID NO: 94081 - protein, 27 aa, Artificial Sequence
  Cyclic GFR-binding peptide
SATSMLYYDEYDKVVLRKHRDENEKVV

SEQ ID NO: 94082 - protein, 27 aa, Artificial Sequence
  Cyclic GFR-binding peptide
SAISILYLIGKTPKILKNYQDENEKVV

SEQ ID NO: 94083 - protein, 27 aa, Artificial Sequence
  Cyclic GFR-binding peptide
SAISMLYLDEYDKVVLKNYQDENEKVV

SEQ ID NO: 94084 - protein, 27 aa, Artificial Sequence
  Cyclic GFR-binding peptide
SAISVLYLDDSSNVILKNYQDENEKVV

SEQ ID NO: 94085 - protein, 27 aa, Artificial Sequence
  Cyclic GFR-binding peptide
DENEKVVNSLQEVVKDYEDYYLMTLPE

SEQ ID NO: 94086 - protein, 27 aa, Artificial Sequence
  Cyclic GFR-binding peptide
DENEKVVNSLQEIKPTKGIYYVIPLPE

SEQ ID NO: 94087 - protein, 27 aa, Artificial Sequence
  Cyclic GFR-binding peptide
DENEKVVNSLQEVKPKRGVYYLITLPE

SEQ ID NO: 94088 - protein, 27 aa, Artificial Sequence
  Cyclic GFR-binding peptide
DENEKVVNSLQEVKPTRGVYYVIPLPE

SEQ ID NO: 94089 - protein, 27 aa, Artificial Sequence
  Cyclic GFR-binding peptide
DENEKVVEYQKYIVNSSDDIFLVSIPS

SEQ ID NO: 94090 - protein, 27 aa, Artificial Sequence
  Cyclic GFR-binding peptide
DENEKVVEYQKYVKPTRGVIFLISIPS

SEQ ID NO: 94091 - protein, 27 aa, Artificial Sequence
  Cyclic GFR-binding peptide
DENEKVVNSLQEVVKENEDYYLMTLPE

SEQ ID NO: 94092 - protein, 27 aa, Artificial Sequence
  Cyclic GFR-binding peptide
DENEKVVNSLQEVVNNASDYYLITLPE

SEQ ID NO: 94093 - protein, 27 aa, Artificial Sequence
  Cyclic GFR-binding peptide
DENEKVVNSLQEVKPKRGVYYVIPLPE

SEQ ID NO: 94094 - protein, 27 aa, Artificial Sequence
  Cyclic GFR-binding peptide
DENEKVVNSLQEVVNNASDYYVIPLPE

SEQ ID NO: 94095 - protein, 27 aa, Artificial Sequence
  Cyclic GFR-binding peptide
DENEKVVNSLQEVKPTRGVYYLITLPE

SEQ ID NO: 94096 - protein, 27 aa, Artificial Sequence
  Cyclic GFR-binding peptide
DENEKVVEYQKYIKPTKGIIFLISIPS

SEQ ID NO: 94097 - protein, 27 aa, Artificial Sequence
  Cyclic GFR-binding peptide
DENEKVVEYQKYVVNNASDIFLISIPS

SEQ ID NO: 94098 - protein, 27 aa, Artificial Sequence
  Cyclic GFR-binding peptide
DENEKVVNSLQEIVNSSDDYYVVPLPE

SEQ ID NO: 94099 - protein, 27 aa, Artificial Sequence
  Cyclic GFR-binding peptide
DENEKVVNSLQEVVKDYEDYYVMPLPE

SEQ ID NO: 94100 - protein, 27 aa, Artificial Sequence
  Cyclic GFR-binding peptide
DENEKVVEYQKYVVKENEDIFLMSIPS

SEQ ID NO: 94101 - protein, 27 aa, Artificial Sequence
  Cyclic GFR-binding peptide
DENEKVVNSLQEVVKENEDYYVMPLPE

SEQ ID NO: 94102 - protein, 27 aa, Artificial Sequence
  Cyclic GFR-binding peptide
DENEKVVEYQKYVVKDYEDIFLMSIPS

SEQ ID NO: 94103 - protein, 27 aa, Artificial Sequence
  Cyclic GFR-binding peptide
DENEKVVQYNKLVVNNASDLYLISIAS

SEQ ID NO: 94104 - protein, 27 aa, Artificial Sequence
  Cyclic GFR-binding peptide
DENEKVVNSLQEIKPTKGIYYLITLPE

SEQ ID NO: 94105 - protein, 27 aa, Artificial Sequence
  Cyclic GFR-binding peptide
DENEKVVEYQKYVKPKRGVIFLISIPS

SEQ ID NO: 94106 - protein, 27 aa, Artificial Sequence
  Cyclic GFR-binding peptide
DENEKVVRYKKLVVNNASDFYLISIAN

SEQ ID NO: 94107 - protein, 27 aa, Artificial Sequence
  Cyclic GFR-binding peptide
DENEKVVNSLQEIVNSSDDYYLVTLPE

SEQ ID NO: 94108 - protein, 27 aa, Artificial Sequence
  Cyclic GFR-binding peptide
EPLTMLYYDEYDKVVEQLSNDENEKVV

SEQ ID NO: 94109 - protein, 27 aa, Artificial Sequence
  Cyclic GFR-binding peptide
EPLPIVYYIGKTPKIEQLSNDENEKVV

SEQ ID NO: 94110 - protein, 27 aa, Artificial Sequence
  Cyclic GFR-binding peptide
EPLTILYYVGRKPKVEQLSNDENEKVV

SEQ ID NO: 94111 - protein, 27 aa, Artificial Sequence
  Cyclic GFR-binding peptide
EPLPIVYYVGRTPKVEQLSNDENEKVV

SEQ ID NO: 94112 - protein, 27 aa, Artificial Sequence
  Cyclic GFR-binding peptide
SPISVLFIDDSSNVIYKQYEDENEKVV

SEQ ID NO: 94113 - protein, 27 aa, Artificial Sequence
  Cyclic GFR-binding peptide
SPISILFIVGRTPKVYKQYEDENEKVV

SEQ ID NO: 94114 - protein, 27 aa, Artificial Sequence
  Cyclic GFR-binding peptide
EPLTMLYYDENEKVVEQLSNDENEKVV

SEQ ID NO: 94115 - protein, 27 aa, Artificial Sequence
  Cyclic GFR-binding peptide
EPLTILYYDSANNVVEQLSNDENEKVV

SEQ ID NO: 94116 - protein, 27 aa, Artificial Sequence
  Cyclic GFR-binding peptide
EPLPIVYYVGRKPKVEQLSNDENEKVV

SEQ ID NO: 94117 - protein, 27 aa, Artificial Sequence
  Cyclic GFR-binding peptide
EPLPIVYYDSANNVVEQLSNDENEKVV

SEQ ID NO: 94118 - protein, 27 aa, Artificial Sequence
  Cyclic GFR-binding peptide
EPLTILYYVGRTPKVEQLSNDENEKVV

SEQ ID NO: 94119 - protein, 27 aa, Artificial Sequence
  Cyclic GFR-binding peptide
SPISILFIIGKTPKIYKQYEDENEKVV

SEQ ID NO: 94120 - protein, 27 aa, Artificial Sequence
  Cyclic GFR-binding peptide
SPISILFIDSANNVVYKQYEDENEKVV

SEQ ID NO: 94121 - protein, 27 aa, Artificial Sequence
  Cyclic GFR-binding peptide
EPLPVVYYDDSSNVIEQLSNDENEKVV

SEQ ID NO: 94122 - protein, 27 aa, Artificial Sequence
  Cyclic GFR-binding peptide
EPLPMVYYDEYDKVVEQLSNDENEKVV

SEQ ID NO: 94123 - protein, 27 aa, Artificial Sequence
  Cyclic GFR-binding peptide
SPISMLFIDENEKVVYKQYEDENEKVV

SEQ ID NO: 94124 - protein, 27 aa, Artificial Sequence
  Cyclic GFR-binding peptide
EPLPMVYYDENEKVVEQLSNDENEKVV

SEQ ID NO: 94125 - protein, 27 aa, Artificial Sequence
  Cyclic GFR-binding peptide
SPISMLFIDEYDKVVYKQYEDENEKVV

SEQ ID NO: 94126 - protein, 27 aa, Artificial Sequence
  Cyclic GFR-binding peptide
SAISILYLDSANNVVLKNYQDENEKVV

SEQ ID NO: 94127 - protein, 27 aa, Artificial Sequence
  Cyclic GFR-binding peptide
EPLTILYYIGKTPKIEQLSNDENEKVV

SEQ ID NO: 94128 - protein, 27 aa, Artificial Sequence
  Cyclic GFR-binding peptide
SPISILFIVGRKPKVYKQYEDENEKVV

SEQ ID NO: 94129 - protein, 27 aa, Artificial Sequence
  Cyclic GFR-binding peptide
NAISILYFDSANNVVLKKYRDENEKVV

SEQ ID NO: 94130 - protein, 27 aa, Artificial Sequence
  Cyclic GFR-binding peptide
EPLTVLYYDDSSNVIEQLSNDENEKVV

SEQ ID NO: 94131 - protein, 29 aa, Artificial Sequence
  Cyclic GFR-binding peptide
DENEKVVVTAKKLKPKKRVYEIKRVQVPR

SEQ ID NO: 94132 - protein, 29 aa, Artificial Sequence
  Cyclic GFR-binding peptide
DENEKVVVQVEKLKPKKRVYEVKAVKVSR

SEQ ID NO: 94133 - protein, 29 aa, Artificial Sequence
  Cyclic GFR-binding peptide
DENEKVVVQVEKFIPKKRVIEVKAVKVSR

SEQ ID NO: 94134 - protein, 29 aa, Artificial Sequence
  Cyclic GFR-binding peptide
DENEKVVVQVEKHQGQHPKIRVKAMKVSR

SEQ ID NO: 94135 - protein, 29 aa, Artificial Sequence
  Cyclic GFR-binding peptide
DENEKVVVTAKKHQGQHPKIRIKRMQVPR

SEQ ID NO: 94136 - protein, 29 aa, Artificial Sequence
  Cyclic GFR-binding peptide
DENEKVVSMEGLLKPKKRVYEMIQVTINS

SEQ ID NO: 94137 - protein, 29 aa, Artificial Sequence
  Cyclic GFR-binding peptide
DENEKVVSMEGIFIPKKRVIEMIQVTINS

SEQ ID NO: 94138 - protein, 29 aa, Artificial Sequence
  Cyclic GFR-binding peptide
DENEKVVSMEGLHQGQHPKIRMIQMTINS

SEQ ID NO: 94139 - protein, 29 aa, Artificial Sequence
  Cyclic GFR-binding peptide
DENEKVVSMEGILKPKKRVYEMIQVTINS

SEQ ID NO: 94140 - protein, 29 aa, Artificial Sequence
  Cyclic GFR-binding peptide
DENEKVVSMEGLFIPKKRVIEMIQVTINS

SEQ ID NO: 94141 - protein, 29 aa, Artificial Sequence
  Cyclic GFR-binding peptide
DENEKVVVTAKKFIPKKRVIEIKRVQVPR

SEQ ID NO: 94142 - protein, 29 aa, Artificial Sequence
  Cyclic GFR-binding peptide
DENEKVVSMEGIHQGQHPKIRMIQMTINS

SEQ ID NO: 94143 - protein, 29 aa, Artificial Sequence
  Cyclic GFR-binding peptide
RPVQVRKIEYVRKKPKLKKATVDENEKVV

SEQ ID NO: 94144 - protein, 29 aa, Artificial Sequence
  Cyclic GFR-binding peptide
RSVKVAKVEYVRKKPKLKEVQVDENEKVV

SEQ ID NO: 94145 - protein, 29 aa, Artificial Sequence
  Cyclic GFR-binding peptide
RSVKVAKVEIVRKKPIFKEVQVDENEKVV

SEQ ID NO: 94146 - protein, 29 aa, Artificial Sequence
  Cyclic GFR-binding peptide
RSVKMAKVRIKPHQGQHKEVQVDENEKVV

SEQ ID NO: 94147 - protein, 29 aa, Artificial Sequence
  Cyclic GFR-binding peptide
RPVQMRKIRIKPHQGQHKKATVDENEKVV

SEQ ID NO: 94148 - protein, 29 aa, Artificial Sequence
  Cyclic GFR-binding peptide
SNITVQIMEYVRKKPKLLGEMSDENEKVV

SEQ ID NO: 94149 - protein, 29 aa, Artificial Sequence
  Cyclic GFR-binding peptide
SNITVQIMEIVRKKPIFIGEMSDENEKVV

SEQ ID NO: 94150 - protein, 29 aa, Artificial Sequence
  Cyclic GFR-binding peptide
SNITMQIMRIKPHQGQHLGEMSDENEKVV

SEQ ID NO: 94151 - protein, 29 aa, Artificial Sequence
  Cyclic GFR-binding peptide
SNITVQIMEYVRKKPKLIGEMSDENEKVV

SEQ ID NO: 94152 - protein, 29 aa, Artificial Sequence
  Cyclic GFR-binding peptide
SNITVQIMEIVRKKPIFLGEMSDENEKVV

SEQ ID NO: 94153 - protein, 29 aa, Artificial Sequence
  Cyclic GFR-binding peptide
RPVQVRKIEIVRKKPIFKKATVDENEKVV

SEQ ID NO: 94154 - protein, 29 aa, Artificial Sequence
  Cyclic GFR-binding peptide
SNITMQIMRIKPHQGQHIGEMSDENEKVV

SEQ ID NO: 94155 - protein, 27 aa, Artificial Sequence
  Cyclic GFR-binding peptide
DENEKVVEYKFKVKPTRGVLYLISIPE

SEQ ID NO: 94156 - protein, 27 aa, Artificial Sequence
  Cyclic GFR-binding peptide
DENEKVVEYKFKTPVGMDDLYLVSIPE

SEQ ID NO: 94157 - protein, 27 aa, Artificial Sequence
  Cyclic GFR-binding peptide
DENEKVVEYQKYVKPKRGVIYLISIPS

SEQ ID NO: 94158 - protein, 27 aa, Artificial Sequence
  Cyclic GFR-binding peptide
DENEKVVEYQKYVVKDYEDIYLMSIPS

SEQ ID NO: 94159 - protein, 27 aa, Artificial Sequence
  Cyclic GFR-binding peptide
DENEKVVEYKFKIKPTKGILYLISIPE

SEQ ID NO: 94160 - protein, 27 aa, Artificial Sequence
  Cyclic GFR-binding peptide
DENEKVVYHYKLYTVVGKDKYLISIPS

SEQ ID NO: 94161 - protein, 27 aa, Artificial Sequence
  Cyclic GFR-binding peptide
DENEKVVRYKKLYTVVGKDFYLISIAN

SEQ ID NO: 94162 - protein, 27 aa, Artificial Sequence
  Cyclic GFR-binding peptide
DENEKVVEYQKYVVNNAADIYLISIPS

SEQ ID NO: 94163 - protein, 27 aa, Artificial Sequence
  Cyclic GFR-binding peptide
DENEKVVEYQKYVKPTRGVIYLISIPS

SEQ ID NO: 94164 - protein, 27 aa, Artificial Sequence
  Cyclic GFR-binding peptide
DENEKVVEYQKYTPVGMDDIYLVSIPS

SEQ ID NO: 94165 - protein, 27 aa, Artificial Sequence
  Cyclic GFR-binding peptide
DENEKVVEYKFKVVKDYEDLYLMSIPE

SEQ ID NO: 94166 - protein, 27 aa, Artificial Sequence
  Cyclic GFR-binding peptide
DENEKVVEYKFKVVNNAADLYLISIPE

SEQ ID NO: 94167 - protein, 27 aa, Artificial Sequence
  Cyclic GFR-binding peptide
DENEKVVEYQKYVVKENEDIYLMSIPS

SEQ ID NO: 94168 - protein, 27 aa, Artificial Sequence
  Cyclic GFR-binding peptide
DENEKVVEYQKYIKPTKGIIYLISIPS

SEQ ID NO: 94169 - protein, 27 aa, Artificial Sequence
  Cyclic GFR-binding peptide
DENEKVVRYKKLVVNNAADFYLISIAN

SEQ ID NO: 94170 - protein, 27 aa, Artificial Sequence
  Cyclic GFR-binding peptide
DENEKVVYHYKLVVNNAADKYLISIPS

SEQ ID NO: 94171 - protein, 27 aa, Artificial Sequence
  Cyclic GFR-binding peptide
DENEKVVEYKFKIVNNSSDLYLVSIPE

SEQ ID NO: 94172 - protein, 27 aa, Artificial Sequence
  Cyclic GFR-binding peptide
DENEKVVEYQKYIVNSSDDIYLVSIPS

SEQ ID NO: 94173 - protein, 27 aa, Artificial Sequence
  Cyclic GFR-binding peptide
DENEKVVEYKFKIVNSSDDLYLVSIPE

SEQ ID NO: 94174 - protein, 27 aa, Artificial Sequence
  Cyclic GFR-binding peptide
DENEKVVEYKFKVKPKRGVLYLISIPE

SEQ ID NO: 94175 - protein, 27 aa, Artificial Sequence
  Cyclic GFR-binding peptide
DENEKVVEYQKYYTVVGKDIYLISIPS

SEQ ID NO: 94176 - protein, 27 aa, Artificial Sequence
  Cyclic GFR-binding peptide
DENEKVVEYKFKVVKENEDLYLMSIPE

SEQ ID NO: 94177 - protein, 27 aa, Artificial Sequence
  Cyclic GFR-binding peptide
DENEKVVEYQKYIVNNSSDIYLVSIPS

SEQ ID NO: 94178 - protein, 27 aa, Artificial Sequence
  Cyclic GFR-binding peptide
DENEKVVEYKFKYTVVGKDLYLISIPE

SEQ ID NO: 94179 - protein, 27 aa, Artificial Sequence
  Cyclic GFR-binding peptide
EPISILYLVGRTPKVKFKYEDENEKVV

SEQ ID NO: 94180 - protein, 27 aa, Artificial Sequence
  Cyclic GFR-binding peptide
EPISVLYLDDMGVPTKFKYEDENEKVV

SEQ ID NO: 94181 - protein, 27 aa, Artificial Sequence
  Cyclic GFR-binding peptide
SPISILYIVGRKPKVYKQYEDENEKVV

SEQ ID NO: 94182 - protein, 27 aa, Artificial Sequence
  Cyclic GFR-binding peptide
SPISMLYIDEYDKVVYKQYEDENEKVV

SEQ ID NO: 94183 - protein, 27 aa, Artificial Sequence
  Cyclic GFR-binding peptide
EPISILYLIGKTPKIKFKYEDENEKVV

SEQ ID NO: 94184 - protein, 27 aa, Artificial Sequence
  Cyclic GFR-binding peptide
SPISILYKDKGVVTYLKYHYDENEKVV

SEQ ID NO: 94185 - protein, 27 aa, Artificial Sequence
  Cyclic GFR-binding peptide
NAISILYFDKGVVTYLKKYRDENEKVV

SEQ ID NO: 94186 - protein, 27 aa, Artificial Sequence
  Cyclic GFR-binding peptide
SPISILYIDAANNVVYKQYEDENEKVV

SEQ ID NO: 94187 - protein, 27 aa, Artificial Sequence
  Cyclic GFR-binding peptide
SPISILYIVGRTPKVYKQYEDENEKVV

SEQ ID NO: 94188 - protein, 27 aa, Artificial Sequence
  Cyclic GFR-binding peptide
SPISVLYIDDMGVPTYKQYEDENEKVV

SEQ ID NO: 94189 - protein, 27 aa, Artificial Sequence
  Cyclic GFR-binding peptide
EPISMLYLDEYDKVVKFKYEDENEKVV

SEQ ID NO: 94190 - protein, 27 aa, Artificial Sequence
  Cyclic GFR-binding peptide
EPISILYLDAANNVVKFKYEDENEKVV

SEQ ID NO: 94191 - protein, 27 aa, Artificial Sequence
  Cyclic GFR-binding peptide
SPISMLYIDENEKVVYKQYEDENEKVV

SEQ ID NO: 94192 - protein, 27 aa, Artificial Sequence
  Cyclic GFR-binding peptide
SPISILYIIGKTPKIYKQYEDENEKVV

SEQ ID NO: 94193 - protein, 27 aa, Artificial Sequence
  Cyclic GFR-binding peptide
NAISILYFDAANNVVLKKYRDENEKVV

SEQ ID NO: 94194 - protein, 27 aa, Artificial Sequence
  Cyclic GFR-binding peptide
SPISILYKDAANNVVLKYHYDENEKVV

SEQ ID NO: 94195 - protein, 27 aa, Artificial Sequence
  Cyclic GFR-binding peptide
EPISVLYLDSSNNVIKFKYEDENEKVV

SEQ ID NO: 94196 - protein, 27 aa, Artificial Sequence
  Cyclic GFR-binding peptide
SPISVLYIDDSSNVIYKQYEDENEKVV

SEQ ID NO: 94197 - protein, 27 aa, Artificial Sequence
  Cyclic GFR-binding peptide
EPISVLYLDDSSNVIKFKYEDENEKVV

SEQ ID NO: 94198 - protein, 27 aa, Artificial Sequence
  Cyclic GFR-binding peptide
EPISILYLVGRKPKVKFKYEDENEKVV

SEQ ID NO: 94199 - protein, 27 aa, Artificial Sequence
  Cyclic GFR-binding peptide
SPISILYIDKGVVTYYKQYEDENEKVV

SEQ ID NO: 94200 - protein, 27 aa, Artificial Sequence
  Cyclic GFR-binding peptide
EPISMLYLDENEKVVKFKYEDENEKVV

SEQ ID NO: 94201 - protein, 27 aa, Artificial Sequence
  Cyclic GFR-binding peptide
SPISVLYIDSSNNVIYKQYEDENEKVV

SEQ ID NO: 94202 - protein, 27 aa, Artificial Sequence
  Cyclic GFR-binding peptide
EPISILYLDKGVVTYKFKYEDENEKVV

SEQ ID NO: 94203 - protein, 27 aa, Artificial Sequence
  Cyclic GFR-binding peptide
DENEKVVPIKGYIIQQKDNFYLMNIPS

SEQ ID NO: 94204 - protein, 27 aa, Artificial Sequence
  Cyclic GFR-binding peptide
DENEKVVPIKGYVVKDYEDFYLMNIPS

SEQ ID NO: 94205 - protein, 27 aa, Artificial Sequence
  Cyclic GFR-binding peptide
DENEKVVPIKGYIVNSSDDFYLVNIPS

SEQ ID NO: 94206 - protein, 27 aa, Artificial Sequence
  Cyclic GFR-binding peptide
DENEKVVPIKGYVVNNAADFYLINIPS

SEQ ID NO: 94207 - protein, 27 aa, Artificial Sequence
  Cyclic GFR-binding peptide
DENEKVVPIKGYYTVVGKDFYLINIPS

SEQ ID NO: 94208 - protein, 27 aa, Artificial Sequence
  Cyclic GFR-binding peptide
DENEKVVPIKGYLLVRGNDFYLMNIPS

SEQ ID NO: 94209 - protein, 27 aa, Artificial Sequence
  Cyclic GFR-binding peptide
DENEKVVPIKGYVVKENEDFYLMNIPS

SEQ ID NO: 94210 - protein, 27 aa, Artificial Sequence
  Cyclic GFR-binding peptide
DENEKVVPIKGYVVNNASDFYLINIPS

SEQ ID NO: 94211 - protein, 27 aa, Artificial Sequence
  Cyclic GFR-binding peptide
DENEKVVPIKGYTPVGMDDFYLVNIPS

SEQ ID NO: 94212 - protein, 27 aa, Artificial Sequence
  Cyclic GFR-binding peptide
DENEKVVPIKGYIVNNSSDFYLVNIPS

SEQ ID NO: 94213 - protein, 27 aa, Artificial Sequence
  Cyclic GFR-binding peptide
SPINMLYFNDKQQIIYGKIPDENEKVV

SEQ ID NO: 94214 - protein, 27 aa, Artificial Sequence
  Cyclic GFR-binding peptide
SPINMLYFDEYDKVVYGKIPDENEKVV

SEQ ID NO: 94215 - protein, 27 aa, Artificial Sequence
  Cyclic GFR-binding peptide
SPINVLYFDDSSNVIYGKIPDENEKVV

SEQ ID NO: 94216 - protein, 27 aa, Artificial Sequence
  Cyclic GFR-binding peptide
SPINILYFDAANNVVYGKIPDENEKVV

SEQ ID NO: 94217 - protein, 27 aa, Artificial Sequence
  Cyclic GFR-binding peptide
SPINILYFDKGVVTYYGKIPDENEKVV

SEQ ID NO: 94218 - protein, 27 aa, Artificial Sequence
  Cyclic GFR-binding peptide
SPINMLYFDNGRVLLYGKIPDENEKVV

SEQ ID NO: 94219 - protein, 27 aa, Artificial Sequence
  Cyclic GFR-binding peptide
SPINMLYFDENEKVVYGKIPDENEKVV

SEQ ID NO: 94220 - protein, 27 aa, Artificial Sequence
  Cyclic GFR-binding peptide
SPINILYFDSANNVVYGKIPDENEKVV

SEQ ID NO: 94221 - protein, 27 aa, Artificial Sequence
  Cyclic GFR-binding peptide
SPINVLYFDDMGVPTYGKIPDENEKVV

SEQ ID NO: 94222 - protein, 27 aa, Artificial Sequence
  Cyclic GFR-binding peptide
SPINVLYFDSSNNVIYGKIPDENEKVV

SEQ ID NO: 94223 - protein, 27 aa, Artificial Sequence
  Cyclic GFR-binding peptide
DENEKVVEYQKYVVNNASDIYLISIPS

SEQ ID NO: 94224 - protein, 27 aa, Artificial Sequence
  Cyclic GFR-binding peptide
DENEKVVEYQKYIIQQKDNIYLMSIPS

SEQ ID NO: 94225 - protein, 27 aa, Artificial Sequence
  Cyclic GFR-binding peptide
DENEKVVEYQKYLLVRGNDIYLMSIPS

SEQ ID NO: 94226 - protein, 27 aa, Artificial Sequence
  Cyclic GFR-binding peptide
SPISILYIDSANNVVYKQYEDENEKVV

SEQ ID NO: 94227 - protein, 27 aa, Artificial Sequence
  Cyclic GFR-binding peptide
SPISMLYINDKQQIIYKQYEDENEKVV

SEQ ID NO: 94228 - protein, 27 aa, Artificial Sequence
  Cyclic GFR-binding peptide
SPISMLYIDNGRVLLYKQYEDENEKVV

SEQ ID NO: 94229 - protein, 27 aa, Artificial Sequence
  Cyclic GFR-binding peptide
DENEKVVPYVKLYTVVGKDFFLISLSS

SEQ ID NO: 94230 - protein, 27 aa, Artificial Sequence
  Cyclic GFR-binding peptide
DENEKVVPYVKLIKPTKGIFFLISLSS

SEQ ID NO: 94231 - protein, 27 aa, Artificial Sequence
  Cyclic GFR-binding peptide
DENEKVVPYVKLIIQQKDNFFLMSLSS

SEQ ID NO: 94232 - protein, 27 aa, Artificial Sequence
  Cyclic GFR-binding peptide
DENEKVVPYVKLIVNSSDDFFLVSLSS

SEQ ID NO: 94233 - protein, 27 aa, Artificial Sequence
  Cyclic GFR-binding peptide
DENEKVVPYVKLVKPKRGVFFLISLSS

SEQ ID NO: 94234 - protein, 27 aa, Artificial Sequence
  Cyclic GFR-binding peptide
DENEKVVPYVKLVKPTRGVFFLISLSS

SEQ ID NO: 94235 - protein, 27 aa, Artificial Sequence
  Cyclic GFR-binding peptide
DENEKVVPYVKLTPVGMDDFFLVSLSS

SEQ ID NO: 94236 - protein, 29 aa, Artificial Sequence
  Cyclic GFR-binding peptide
DENEKVVPYVKLHQGQHPKIRFFLMSLSS

SEQ ID NO: 94237 - protein, 27 aa, Artificial Sequence
  Cyclic GFR-binding peptide
DENEKVVPYVKLVVNKNEDFFLISLSS

SEQ ID NO: 94238 - protein, 27 aa, Artificial Sequence
  Cyclic GFR-binding peptide
DENEKVVPYVKLVVNNASDFFLISLSS

SEQ ID NO: 94239 - protein, 27 aa, Artificial Sequence
  Cyclic GFR-binding peptide
DENEKVVPYVKLVVKENEDFFLMSLSS

SEQ ID NO: 94240 - protein, 27 aa, Artificial Sequence
  Cyclic GFR-binding peptide
DENEKVVPYVKLIVNNSSDFFLVSLSS

SEQ ID NO: 94241 - protein, 29 aa, Artificial Sequence
  Cyclic GFR-binding peptide
DENEKVVPYVKLLKPKKRVYEFFLVSLSS

SEQ ID NO: 94242 - protein, 27 aa, Artificial Sequence
  Cyclic GFR-binding peptide
DENEKVVPYVKLLLVRGNDFFLMSLSS

SEQ ID NO: 94243 - protein, 27 aa, Artificial Sequence
  Cyclic GFR-binding peptide
DENEKVVPYVKLVVKDYEDFFLMSLSS

SEQ ID NO: 94244 - protein, 27 aa, Artificial Sequence
  Cyclic GFR-binding peptide
DENEKVVPYVKLVVNNAADFFLISLSS

SEQ ID NO: 94245 - protein, 27 aa, Artificial Sequence
  Cyclic GFR-binding peptide
SSLSILFFDKGVVTYLKVYPDENEKVV

SEQ ID NO: 94246 - protein, 27 aa, Artificial Sequence
  Cyclic GFR-binding peptide
SSLSILFFIGKTPKILKVYPDENEKVV

SEQ ID NO: 94247 - protein, 27 aa, Artificial Sequence
  Cyclic GFR-binding peptide
SSLSMLFFNDKQQIILKVYPDENEKVV

SEQ ID NO: 94248 - protein, 27 aa, Artificial Sequence
  Cyclic GFR-binding peptide
SSLSVLFFDDSSNVILKVYPDENEKVV

SEQ ID NO: 94249 - protein, 27 aa, Artificial Sequence
  Cyclic GFR-binding peptide
SSLSILFFVGRKPKVLKVYPDENEKVV

SEQ ID NO: 94250 - protein, 27 aa, Artificial Sequence
  Cyclic GFR-binding peptide
SSLSILFFVGRTPKVLKVYPDENEKVV

SEQ ID NO: 94251 - protein, 27 aa, Artificial Sequence
  Cyclic GFR-binding peptide
SSLSVLFFDDMGVPTLKVYPDENEKVV

SEQ ID NO: 94252 - protein, 29 aa, Artificial Sequence
  Cyclic GFR-binding peptide
SSLSMLFFRIKPHQGQHLKVYPDENEKVV

SEQ ID NO: 94253 - protein, 27 aa, Artificial Sequence
  Cyclic GFR-binding peptide
SSLSILFFDENKNVVLKVYPDENEKVV

SEQ ID NO: 94254 - protein, 27 aa, Artificial Sequence
  Cyclic GFR-binding peptide
SSLSILFFDSANNVVLKVYPDENEKVV

SEQ ID NO: 94255 - protein, 27 aa, Artificial Sequence
  Cyclic GFR-binding peptide
SSLSMLFFDENEKVVLKVYPDENEKVV

SEQ ID NO: 94256 - protein, 27 aa, Artificial Sequence
  Cyclic GFR-binding peptide
SSLSVLFFDSSNNVILKVYPDENEKVV

SEQ ID NO: 94257 - protein, 29 aa, Artificial Sequence
  Cyclic GFR-binding peptide
SSLSVLFFEYVRKKPKLLKVYPDENEKVV

SEQ ID NO: 94258 - protein, 27 aa, Artificial Sequence
  Cyclic GFR-binding peptide
SSLSMLFFDNGRVLLLKVYPDENEKVV

SEQ ID NO: 94259 - protein, 27 aa, Artificial Sequence
  Cyclic GFR-binding peptide
SSLSMLFFDEYDKVVLKVYPDENEKVV

SEQ ID NO: 94260 - protein, 27 aa, Artificial Sequence
  Cyclic GFR-binding peptide
SSLSILFFDAANNVVLKVYPDENEKVV

SEQ ID NO: 94261 - protein, 27 aa, Artificial Sequence
  Cyclic GFR-binding peptide
DENEKVVSMEGIIVNSSDDMIQVTINS

SEQ ID NO: 94262 - protein, 27 aa, Artificial Sequence
  Cyclic GFR-binding peptide
DENEKVVVTAKKVVKENEDIKRMQVPR

SEQ ID NO: 94263 - protein, 27 aa, Artificial Sequence
  Cyclic GFR-binding peptide
DENEKVVSMEGIVVKDYEDMIQMTINS

SEQ ID NO: 94264 - protein, 27 aa, Artificial Sequence
  Cyclic GFR-binding peptide
DENEKVVVTAKKIKPTKGIIKRIQVPR

SEQ ID NO: 94265 - protein, 27 aa, Artificial Sequence
  Cyclic GFR-binding peptide
DENEKVVSMEGIVKPTRGVMIQITINS

SEQ ID NO: 94266 - protein, 29 aa, Artificial Sequence
  Cyclic GFR-binding peptide
DENEKVVNSLQEFIPKKRVIEYYVVPLPE

SEQ ID NO: 94267 - protein, 27 aa, Artificial Sequence
  Cyclic GFR-binding peptide
DENEKVVVQVEKVKPKRGVVKAIKVSR

SEQ ID NO: 94268 - protein, 27 aa, Artificial Sequence
  Cyclic GFR-binding peptide
DENEKVVVQVEKVVKENEDVKAMKVSR

SEQ ID NO: 94269 - protein, 27 aa, Artificial Sequence
  Cyclic GFR-binding peptide
DENEKVVVTAKKIVNSSDDIKRVQVPR

SEQ ID NO: 94270 - protein, 27 aa, Artificial Sequence
  Cyclic GFR-binding peptide
DENEKVVVQVEKIKPTKGIVKAIKVSR

SEQ ID NO: 94271 - protein, 29 aa, Artificial Sequence
  Cyclic GFR-binding peptide
DENEKVVNSLQEFIPKKRVIEYYLVTLPE

SEQ ID NO: 94272 - protein, 27 aa, Artificial Sequence
  Cyclic GFR-binding peptide
DENEKVVVQVEKIVNSSDDVKAVKVSR

SEQ ID NO: 94273 - protein, 27 aa, Artificial Sequence
  Cyclic GFR-binding peptide
DENEKVVVTAKKVKPKRGVIKRIQVPR

SEQ ID NO: 94274 - protein, 27 aa, Artificial Sequence
  Cyclic GFR-binding peptide
DENEKVVVQVEKVKPTRGVVKAIKVSR

SEQ ID NO: 94275 - protein, 27 aa, Artificial Sequence
  Cyclic GFR-binding peptide
DENEKVVVTAKKVKPTRGVIKRIQVPR

SEQ ID NO: 94276 - protein, 29 aa, Artificial Sequence
  Cyclic GFR-binding peptide
DENEKVVNSLQELKPKKRVYEYYLVTLPE

SEQ ID NO: 94277 - protein, 27 aa, Artificial Sequence
  Cyclic GFR-binding peptide
DENEKVVSMEGIVKPKRGVMIQITINS

SEQ ID NO: 94278 - protein, 27 aa, Artificial Sequence
  Cyclic GFR-binding peptide
DENEKVVSMEGIVVKENEDMIQMTINS

SEQ ID NO: 94279 - protein, 27 aa, Artificial Sequence
  Cyclic GFR-binding peptide
DENEKVVSMEGIIKPTKGIMIQITINS

SEQ ID NO: 94280 - protein, 29 aa, Artificial Sequence
  Cyclic GFR-binding peptide
DENEKVVNSLQEHQGQHPKIRYYLMTLPE

SEQ ID NO: 94281 - protein, 27 aa, Artificial Sequence
  Cyclic GFR-binding peptide
DENEKVVVTAKKVVKDYEDIKRMQVPR

SEQ ID NO: 94282 - protein, 29 aa, Artificial Sequence
  Cyclic GFR-binding peptide
DENEKVVNSLQEHQGQHPKIRYYVMPLPE

SEQ ID NO: 94283 - protein, 29 aa, Artificial Sequence
  Cyclic GFR-binding peptide
DENEKVVNSLQELKPKKRVYEYYVVPLPE

SEQ ID NO: 94284 - protein, 27 aa, Artificial Sequence
  Cyclic GFR-binding peptide
DENEKVVVQVEKVVKDYEDVKAMKVSR

SEQ ID NO: 94285 - protein, 27 aa, Artificial Sequence
  Cyclic GFR-binding peptide
SNITVQIMDDSSNVIIGEMSDENEKVV

SEQ ID NO: 94286 - protein, 27 aa, Artificial Sequence
  Cyclic GFR-binding peptide
RPVQMRKIDENEKVVKKATVDENEKVV

SEQ ID NO: 94287 - protein, 27 aa, Artificial Sequence
  Cyclic GFR-binding peptide
SNITMQIMDEYDKVVIGEMSDENEKVV

SEQ ID NO: 94288 - protein, 27 aa, Artificial Sequence
  Cyclic GFR-binding peptide
RPVQIRKIIGKTPKIKKATVDENEKVV

SEQ ID NO: 94289 - protein, 27 aa, Artificial Sequence
  Cyclic GFR-binding peptide
SNITIQIMVGRTPKVIGEMSDENEKVV

SEQ ID NO: 94290 - protein, 29 aa, Artificial Sequence
  Cyclic GFR-binding peptide
EPLPVVYYEIVRKKPIFEQLSNDENEKVV

SEQ ID NO: 94291 - protein, 27 aa, Artificial Sequence
  Cyclic GFR-binding peptide
RSVKIAKVVGRKPKVKEVQVDENEKVV

SEQ ID NO: 94292 - protein, 27 aa, Artificial Sequence
  Cyclic GFR-binding peptide
RSVKMAKVDENEKVVKEVQVDENEKVV

SEQ ID NO: 94293 - protein, 27 aa, Artificial Sequence
  Cyclic GFR-binding peptide
RPVQVRKIDDSSNVIKKATVDENEKVV

SEQ ID NO: 94294 - protein, 27 aa, Artificial Sequence
  Cyclic GFR-binding peptide
RSVKIAKVIGKTPKIKEVQVDENEKVV

SEQ ID NO: 94295 - protein, 29 aa, Artificial Sequence
  Cyclic GFR-binding peptide
EPLTVLYYEIVRKKPIFEQLSNDENEKVV

SEQ ID NO: 94296 - protein, 27 aa, Artificial Sequence
  Cyclic GFR-binding peptide
RSVKVAKVDDSSNVIKEVQVDENEKVV

SEQ ID NO: 94297 - protein, 27 aa, Artificial Sequence
  Cyclic GFR-binding peptide
RPVQIRKIVGRKPKVKKATVDENEKVV

SEQ ID NO: 94298 - protein, 27 aa, Artificial Sequence
  Cyclic GFR-binding peptide
RSVKIAKVVGRTPKVKEVQVDENEKVV

SEQ ID NO: 94299 - protein, 27 aa, Artificial Sequence
  Cyclic GFR-binding peptide
RPVQIRKIVGRTPKVKKATVDENEKVV

SEQ ID NO: 94300 - protein, 29 aa, Artificial Sequence
  Cyclic GFR-binding peptide
EPLTVLYYEYVRKKPKLEQLSNDENEKVV

SEQ ID NO: 94301 - protein, 27 aa, Artificial Sequence
  Cyclic GFR-binding peptide
SNITIQIMVGRKPKVIGEMSDENEKVV

SEQ ID NO: 94302 - protein, 27 aa, Artificial Sequence
  Cyclic GFR-binding peptide
SNITMQIMDENEKVVIGEMSDENEKVV

SEQ ID NO: 94303 - protein, 27 aa, Artificial Sequence
  Cyclic GFR-binding peptide
SNITIQIMIGKTPKIIGEMSDENEKVV

SEQ ID NO: 94304 - protein, 29 aa, Artificial Sequence
  Cyclic GFR-binding peptide
EPLTMLYYRIKPHQGQHEQLSNDENEKVV

SEQ ID NO: 94305 - protein, 27 aa, Artificial Sequence
  Cyclic GFR-binding peptide
RPVQMRKIDEYDKVVKKATVDENEKVV

SEQ ID NO: 94306 - protein, 29 aa, Artificial Sequence
  Cyclic GFR-binding peptide
EPLPMVYYRIKPHQGQHEQLSNDENEKVV

SEQ ID NO: 94307 - protein, 29 aa, Artificial Sequence
  Cyclic GFR-binding peptide
EPLPVVYYEYVRKKPKLEQLSNDENEKVV

SEQ ID NO: 94308 - protein, 27 aa, Artificial Sequence
  Cyclic GFR-binding peptide
RSVKMAKVDEYDKVVKEVQVDENEKVV

SEQ ID NO: 94309 - protein, 27 aa, Artificial Sequence
  Cyclic GFR-binding peptide
DENEKVVRYKKLIIQQKDNFYLMSIAN

SEQ ID NO: 94310 - protein, 27 aa, Artificial Sequence
  Cyclic GFR-binding peptide
DENEKVVRYKKLLLVRGNDFYLMSIAN

SEQ ID NO: 94311 - protein, 27 aa, Artificial Sequence
  Cyclic GFR-binding peptide
NAISMLYFNDKQQIILKKYRDENEKVV

SEQ ID NO: 94312 - protein, 27 aa, Artificial Sequence
  Cyclic GFR-binding peptide
NAISMLYFDNGRVLLLKKYRDENEKVV

SEQ ID NO: 94313 - protein, 27 aa, Artificial Sequence
  Cyclic GFR-binding peptide
DENEKVVEYKFKVVNKNEDLYLISIPE

SEQ ID NO: 94314 - protein, 27 aa, Artificial Sequence
  Cyclic GFR-binding peptide
DENEKVVPIKGYVKPTRGVFYLINIPS

SEQ ID NO: 94315 - protein, 27 aa, Artificial Sequence
  Cyclic GFR-binding peptide
DENEKVVEYKFKLLVRGNDLYLMSIPE

SEQ ID NO: 94316 - protein, 27 aa, Artificial Sequence
  Cyclic GFR-binding peptide
DENEKVVYHYKLVVNKNEDKYLISIPS

SEQ ID NO: 94317 - protein, 27 aa, Artificial Sequence
  Cyclic GFR-binding peptide
DENEKVVRHKRLLLVRGNDYYLMSTAS

SEQ ID NO: 94318 - protein, 27 aa, Artificial Sequence
  Cyclic GFR-binding peptide
DENEKVVYHYKLLLVRGNDKYLMSIPS

SEQ ID NO: 94319 - protein, 27 aa, Artificial Sequence
  Cyclic GFR-binding peptide
DENEKVVRHKRLVVNKNEDYYLISTAS

SEQ ID NO: 94320 - protein, 27 aa, Artificial Sequence
  Cyclic GFR-binding peptide
DENEKVVRYKKLVVNKNEDFYLISIAN

SEQ ID NO: 94321 - protein, 27 aa, Artificial Sequence
  Cyclic GFR-binding peptide
DENEKVVPIKGYVVNKNEDFYLINIPS

SEQ ID NO: 94322 - protein, 27 aa, Artificial Sequence
  Cyclic GFR-binding peptide
DENEKVVPIKGYIKPTKGIFYLINIPS

SEQ ID NO: 94323 - protein, 27 aa, Artificial Sequence
  Cyclic GFR-binding peptide
DENEKVVRHKRLYTVVGKDYYLISTAS

SEQ ID NO: 94324 - protein, 27 aa, Artificial Sequence
  Cyclic GFR-binding peptide
DENEKVVEYKFKVVNNASDLYLISIPE

SEQ ID NO: 94325 - protein, 27 aa, Artificial Sequence
  Cyclic GFR-binding peptide
DENEKVVRHKRLIIQQKDNYYLMSTAS

SEQ ID NO: 94326 - protein, 27 aa, Artificial Sequence
  Cyclic GFR-binding peptide
DENEKVVEYKFKIIQQKDNLYLMSIPE

SEQ ID NO: 94327 - protein, 27 aa, Artificial Sequence
  Cyclic GFR-binding peptide
DENEKVVPIKGYVKPKRGVFYLINIPS

SEQ ID NO: 94328 - protein, 27 aa, Artificial Sequence
  Cyclic GFR-binding peptide
DENEKVVRHKRLVVNNASDYYLISTAS

SEQ ID NO: 94329 - protein, 27 aa, Artificial Sequence
  Cyclic GFR-binding peptide
DENEKVVYHYKLVVNNASDKYLISIPS

SEQ ID NO: 94330 - protein, 27 aa, Artificial Sequence
  Cyclic GFR-binding peptide
DENEKVVYHYKLIIQQKDNKYLMSIPS

SEQ ID NO: 94331 - protein, 27 aa, Artificial Sequence
  Cyclic GFR-binding peptide
DENEKVVRHKRLVVNNAADYYLISTAS

SEQ ID NO: 94332 - protein, 27 aa, Artificial Sequence
  Cyclic GFR-binding peptide
EPISILYLDENKNVVKFKYEDENEKVV

SEQ ID NO: 94333 - protein, 27 aa, Artificial Sequence
  Cyclic GFR-binding peptide
SPINILYFVGRTPKVYGKIPDENEKVV

SEQ ID NO: 94334 - protein, 27 aa, Artificial Sequence
  Cyclic GFR-binding peptide
EPISMLYLDNGRVLLKFKYEDENEKVV

SEQ ID NO: 94335 - protein, 27 aa, Artificial Sequence
  Cyclic GFR-binding peptide
SPISILYKDENKNVVLKYHYDENEKVV

SEQ ID NO: 94336 - protein, 27 aa, Artificial Sequence
  Cyclic GFR-binding peptide
SATSMLYYDNGRVLLLRKHRDENEKVV

SEQ ID NO: 94337 - protein, 27 aa, Artificial Sequence
  Cyclic GFR-binding peptide
SPISMLYKDNGRVLLLKYHYDENEKVV

SEQ ID NO: 94338 - protein, 27 aa, Artificial Sequence
  Cyclic GFR-binding peptide
SATSILYYDENKNVVLRKHRDENEKVV

SEQ ID NO: 94339 - protein, 27 aa, Artificial Sequence
  Cyclic GFR-binding peptide
NAISILYFDENKNVVLKKYRDENEKVV

SEQ ID NO: 94340 - protein, 27 aa, Artificial Sequence
  Cyclic GFR-binding peptide
SPINILYFDENKNVVYGKIPDENEKVV

SEQ ID NO: 94341 - protein, 27 aa, Artificial Sequence
  Cyclic GFR-binding peptide
SPINILYFIGKTPKIYGKIPDENEKVV

SEQ ID NO: 94342 - protein, 27 aa, Artificial Sequence
  Cyclic GFR-binding peptide
SATSILYYDKGVVTYLRKHRDENEKVV

SEQ ID NO: 94343 - protein, 27 aa, Artificial Sequence
  Cyclic GFR-binding peptide
EPISILYLDSANNVVKFKYEDENEKVV

SEQ ID NO: 94344 - protein, 27 aa, Artificial Sequence
  Cyclic GFR-binding peptide
SATSMLYYNDKQQIILRKHRDENEKVV

SEQ ID NO: 94345 - protein, 27 aa, Artificial Sequence
  Cyclic GFR-binding peptide
EPISMLYLNDKQQIIKFKYEDENEKVV

SEQ ID NO: 94346 - protein, 27 aa, Artificial Sequence
  Cyclic GFR-binding peptide
SPINILYFVGRKPKVYGKIPDENEKVV

SEQ ID NO: 94347 - protein, 27 aa, Artificial Sequence
  Cyclic GFR-binding peptide
SATSILYYDSANNVVLRKHRDENEKVV

SEQ ID NO: 94348 - protein, 27 aa, Artificial Sequence
  Cyclic GFR-binding peptide
SPISILYKDSANNVVLKYHYDENEKVV

SEQ ID NO: 94349 - protein, 27 aa, Artificial Sequence
  Cyclic GFR-binding peptide
SPISMLYKNDKQQIILKYHYDENEKVV

SEQ ID NO: 94350 - protein, 27 aa, Artificial Sequence
  Cyclic GFR-binding peptide
SATSILYYDAANNVVLRKHRDENEKVV

SEQ ID NO: 94351 - protein, 27 aa, Artificial Sequence
  Cyclic GFR-binding peptide
DENEKVVSMEGIIIQQKDNMIQMTINS

SEQ ID NO: 94352 - protein, 27 aa, Artificial Sequence
  Cyclic GFR-binding peptide
DENEKVVSMEGLVKPKRGVMIQITINS

SEQ ID NO: 94353 - protein, 27 aa, Artificial Sequence
  Cyclic GFR-binding peptide
DENEKVVSMEGLVVNNASDMIQITINS

SEQ ID NO: 94354 - protein, 27 aa, Artificial Sequence
  Cyclic GFR-binding peptide
DENEKVVSMEGILLVRGNDMIQMTINS

SEQ ID NO: 94355 - protein, 27 aa, Artificial Sequence
  Cyclic GFR-binding peptide
DENEKVVSMEGLIKPTKGIMIQITINS

SEQ ID NO: 94356 - protein, 27 aa, Artificial Sequence
  Cyclic GFR-binding peptide
DENEKVVSMEGLIVNSSDDMIQVTINS

SEQ ID NO: 94357 - protein, 27 aa, Artificial Sequence
  Cyclic GFR-binding peptide
DENEKVVSMEGIVVNNASDMIQITINS

SEQ ID NO: 94358 - protein, 27 aa, Artificial Sequence
  Cyclic GFR-binding peptide
DENEKVVSMEGLVVNNAADMIQITINS

SEQ ID NO: 94359 - protein, 27 aa, Artificial Sequence
  Cyclic GFR-binding peptide
DENEKVVSMEGLLLVRGNDMIQMTINS

SEQ ID NO: 94360 - protein, 27 aa, Artificial Sequence
  Cyclic GFR-binding peptide
DENEKVVSMEGLIIQQKDNMIQMTINS

SEQ ID NO: 94361 - protein, 27 aa, Artificial Sequence
  Cyclic GFR-binding peptide
DENEKVVSMEGIVVNNAADMIQITINS

SEQ ID NO: 94362 - protein, 27 aa, Artificial Sequence
  Cyclic GFR-binding peptide
DENEKVVSMEGLVKPTRGVMIQITINS

SEQ ID NO: 94363 - protein, 27 aa, Artificial Sequence
  Cyclic GFR-binding peptide
SNITMQIMNDKQQIIIGEMSDENEKVV

SEQ ID NO: 94364 - protein, 27 aa, Artificial Sequence
  Cyclic GFR-binding peptide
SNITIQIMVGRKPKVLGEMSDENEKVV

SEQ ID NO: 94365 - protein, 27 aa, Artificial Sequence
  Cyclic GFR-binding peptide
SNITIQIMDSANNVVLGEMSDENEKVV

SEQ ID NO: 94366 - protein, 27 aa, Artificial Sequence
  Cyclic GFR-binding peptide
SNITMQIMDNGRVLLIGEMSDENEKVV

SEQ ID NO: 94367 - protein, 27 aa, Artificial Sequence
  Cyclic GFR-binding peptide
SNITIQIMIGKTPKILGEMSDENEKVV

SEQ ID NO: 94368 - protein, 27 aa, Artificial Sequence
  Cyclic GFR-binding peptide
SNITVQIMDDSSNVILGEMSDENEKVV

SEQ ID NO: 94369 - protein, 27 aa, Artificial Sequence
  Cyclic GFR-binding peptide
SNITIQIMDSANNVVIGEMSDENEKVV

SEQ ID NO: 94370 - protein, 27 aa, Artificial Sequence
  Cyclic GFR-binding peptide
SNITIQIMDAANNVVLGEMSDENEKVV

SEQ ID NO: 94371 - protein, 27 aa, Artificial Sequence
  Cyclic GFR-binding peptide
SNITMQIMDNGRVLLLGEMSDENEKVV

SEQ ID NO: 94372 - protein, 27 aa, Artificial Sequence
  Cyclic GFR-binding peptide
SNITMQIMNDKQQIILGEMSDENEKVV

SEQ ID NO: 94373 - protein, 27 aa, Artificial Sequence
  Cyclic GFR-binding peptide
SNITIQIMDAANNVVIGEMSDENEKVV

SEQ ID NO: 94374 - protein, 27 aa, Artificial Sequence
  Cyclic GFR-binding peptide
SNITIQIMVGRTPKVLGEMSDENEKVV

SEQ ID NO: 94375 - protein, 27 aa, Artificial Sequence
  Cyclic GFR-binding peptide
DENEKVVQYNKLVVNKNEDLYLISIAS

SEQ ID NO: 94376 - protein, 27 aa, Artificial Sequence
  Cyclic GFR-binding peptide
DENEKVVQYNKLVVNNAADLYLISIAS

SEQ ID NO: 94377 - protein, 27 aa, Artificial Sequence
  Cyclic GFR-binding peptide
DENEKVVQYNKLIIQQKDNLYLMSIAS

SEQ ID NO: 94378 - protein, 27 aa, Artificial Sequence
  Cyclic GFR-binding peptide
DENEKVVQYNKLLLVRGNDLYLMSIAS

SEQ ID NO: 94379 - protein, 27 aa, Artificial Sequence
  Cyclic GFR-binding peptide
DENEKVVQYNKLYTVVGKDLYLISIAS

SEQ ID NO: 94380 - protein, 27 aa, Artificial Sequence
  Cyclic GFR-binding peptide
SAISILYLDENKNVVLKNYQDENEKVV

SEQ ID NO: 94381 - protein, 27 aa, Artificial Sequence
  Cyclic GFR-binding peptide
SAISILYLDAANNVVLKNYQDENEKVV

SEQ ID NO: 94382 - protein, 27 aa, Artificial Sequence
  Cyclic GFR-binding peptide
SAISMLYLNDKQQIILKNYQDENEKVV

SEQ ID NO: 94383 - protein, 27 aa, Artificial Sequence
  Cyclic GFR-binding peptide
SAISMLYLDNGRVLLLKNYQDENEKVV

SEQ ID NO: 94384 - protein, 27 aa, Artificial Sequence
  Cyclic GFR-binding peptide
SAISILYLDKGVVTYLKNYQDENEKVV

SEQ ID NO: 94385 - protein, 27 aa, Artificial Sequence
  Cyclic GFR-binding peptide
DENKNVVRYKKLIKPTKGIFYLISIAN

SEQ ID NO: 94386 - protein, 29 aa, Artificial Sequence
  Cyclic GFR-binding peptide
DENKNVVRHKRLFIPKKRVIEYYLVSTAS

SEQ ID NO: 94387 - protein, 27 aa, Artificial Sequence
  Cyclic GFR-binding peptide
DENKNVVYHYKLVVKDYEDKYLMSIPS

SEQ ID NO: 94388 - protein, 27 aa, Artificial Sequence
  Cyclic GFR-binding peptide
DENKNVVQYNKLIVNNSSDLYLVSIAS

SEQ ID NO: 94389 - protein, 27 aa, Artificial Sequence
  Cyclic GFR-binding peptide
DENKNVVRYKKLVVKDYEDFYLMSIAN

SEQ ID NO: 94390 - protein, 27 aa, Artificial Sequence
  Cyclic GFR-binding peptide
DENKNVVRYKKLVKPTRGVFYLISIAN

SEQ ID NO: 94391 - protein, 27 aa, Artificial Sequence
  Cyclic GFR-binding peptide
DENKNVVRHKRLVVKENEDYYLMSTAS

SEQ ID NO: 94392 - protein, 27 aa, Artificial Sequence
  Cyclic GFR-binding peptide
DENKNVVYHYKLIKPTKGIKYLISIPS

SEQ ID NO: 94393 - protein, 29 aa, Artificial Sequence
  Cyclic GFR-binding peptide
DENKNVVRYKKLFIPKKRVIEFYLVSIAN

SEQ ID NO: 94394 - protein, 27 aa, Artificial Sequence
  Cyclic GFR-binding peptide
DENKNVVYHYKLVVKENEDKYLMSIPS

SEQ ID NO: 94395 - protein, 27 aa, Artificial Sequence
  Cyclic GFR-binding peptide
DENKNVVRHKRLVKPKRGVYYLISTAS

SEQ ID NO: 94396 - protein, 27 aa, Artificial Sequence
  Cyclic GFR-binding peptide
DENKNVVYHYKLVKPKRGVKYLISIPS

SEQ ID NO: 94397 - protein, 29 aa, Artificial Sequence
  Cyclic GFR-binding peptide
DENKNVVQYNKLFIPKKRVIELYLVSIAS

SEQ ID NO: 94398 - protein, 27 aa, Artificial Sequence
  Cyclic GFR-binding peptide
DENKNVVQYNKLVKPTRGVLYLISIAS

SEQ ID NO: 94399 - protein, 27 aa, Artificial Sequence
  Cyclic GFR-binding peptide
DENKNVVRYKKLVVKENEDFYLMSIAN

SEQ ID NO: 94400 - protein, 27 aa, Artificial Sequence
  Cyclic GFR-binding peptide
DENKNVVQYNKLTPVGMDDLYLVSIAS

SEQ ID NO: 94401 - protein, 27 aa, Artificial Sequence
  Cyclic GFR-binding peptide
DENKNVVRYKKLTPVGMDDFYLVSIAN

SEQ ID NO: 94402 - protein, 27 aa, Artificial Sequence
  Cyclic GFR-binding peptide
DENKNVVRYKKLVKPKRGVFYLISIAN

SEQ ID NO: 94403 - protein, 27 aa, Artificial Sequence
  Cyclic GFR-binding peptide
DENKNVVQYNKLVVKENEDLYLMSIAS

SEQ ID NO: 94404 - protein, 27 aa, Artificial Sequence
  Cyclic GFR-binding peptide
DENKNVVYHYKLIVNSSDDKYLVSIPS

SEQ ID NO: 94405 - protein, 27 aa, Artificial Sequence
  Cyclic GFR-binding peptide
DENKNVVQYNKLVKPKRGVLYLISIAS

SEQ ID NO: 94406 - protein, 27 aa, Artificial Sequence
  Cyclic GFR-binding peptide
DENKNVVRYKKLIVNNSSDFYLVSIAN

SEQ ID NO: 94407 - protein, 27 aa, Artificial Sequence
  Cyclic GFR-binding peptide
DENKNVVRYKKLIVNSSDDFYLVSIAN

SEQ ID NO: 94408 - protein, 27 aa, Artificial Sequence
  Cyclic GFR-binding peptide
DENKNVVRHKRLVKPTRGVYYLISTAS

SEQ ID NO: 94409 - protein, 29 aa, Artificial Sequence
  Cyclic GFR-binding peptide
DENKNVVYHYKLFIPKKRVIEKYLVSIPS

SEQ ID NO: 94410 - protein, 27 aa, Artificial Sequence
  Cyclic GFR-binding peptide
DENKNVVRHKRLIKPTKGIYYLISTAS

SEQ ID NO: 94411 - protein, 27 aa, Artificial Sequence
  Cyclic GFR-binding peptide
DENKNVVRHKRLTPVGMDDYYLVSTAS

SEQ ID NO: 94412 - protein, 27 aa, Artificial Sequence
  Cyclic GFR-binding peptide
DENKNVVYHYKLTPVGMDDKYLVSIPS

SEQ ID NO: 94413 - protein, 27 aa, Artificial Sequence
  Cyclic GFR-binding peptide
DENKNVVYHYKLIVNNSSDKYLVSIPS

SEQ ID NO: 94414 - protein, 27 aa, Artificial Sequence
  Cyclic GFR-binding peptide
DENKNVVRHKRLIVNNSSDYYLVSTAS

SEQ ID NO: 94415 - protein, 27 aa, Artificial Sequence
  Cyclic GFR-binding peptide
DENKNVVYHYKLVKPTRGVKYLISIPS

SEQ ID NO: 94416 - protein, 27 aa, Artificial Sequence
  Cyclic GFR-binding peptide
DENKNVVRHKRLIVNSSDDYYLVSTAS

SEQ ID NO: 94417 - protein, 27 aa, Artificial Sequence
  Cyclic GFR-binding peptide
DENKNVVRHKRLVVKDYEDYYLMSTAS

SEQ ID NO: 94418 - protein, 27 aa, Artificial Sequence
  Cyclic GFR-binding peptide
DENKNVVQYNKLIKPTKGILYLISIAS

SEQ ID NO: 94419 - protein, 27 aa, Artificial Sequence
  Cyclic GFR-binding peptide
DENKNVVQYNKLVVKDYEDLYLMSIAS

SEQ ID NO: 94420 - protein, 27 aa, Artificial Sequence
  Cyclic GFR-binding peptide
DENKNVVQYNKLIVNSSDDLYLVSIAS

SEQ ID NO: 94421 - protein, 27 aa, Artificial Sequence
  Cyclic GFR-binding peptide
NAISILYFIGKTPKILKKYRDENKNVV

SEQ ID NO: 94422 - protein, 29 aa, Artificial Sequence
  Cyclic GFR-binding peptide
SATSVLYYEIVRKKPIFLRKHRDENKNVV

SEQ ID NO: 94423 - protein, 27 aa, Artificial Sequence
  Cyclic GFR-binding peptide
SPISMLYKDEYDKVVLKYHYDENKNVV

SEQ ID NO: 94424 - protein, 27 aa, Artificial Sequence
  Cyclic GFR-binding peptide
SAISVLYLDSSNNVILKNYQDENKNVV

SEQ ID NO: 94425 - protein, 27 aa, Artificial Sequence
  Cyclic GFR-binding peptide
NAISMLYFDEYDKVVLKKYRDENKNVV

SEQ ID NO: 94426 - protein, 27 aa, Artificial Sequence
  Cyclic GFR-binding peptide
NAISILYFVGRTPKVLKKYRDENKNVV

SEQ ID NO: 94427 - protein, 27 aa, Artificial Sequence
  Cyclic GFR-binding peptide
SATSMLYYDENEKVVLRKHRDENKNVV

SEQ ID NO: 94428 - protein, 27 aa, Artificial Sequence
  Cyclic GFR-binding peptide
SPISILYKIGKTPKILKYHYDENKNVV

SEQ ID NO: 94429 - protein, 29 aa, Artificial Sequence
  Cyclic GFR-binding peptide
NAISVLYFEIVRKKPIFLKKYRDENKNVV

SEQ ID NO: 94430 - protein, 27 aa, Artificial Sequence
  Cyclic GFR-binding peptide
SPISMLYKDENEKVVLKYHYDENKNVV

SEQ ID NO: 94431 - protein, 27 aa, Artificial Sequence
  Cyclic GFR-binding peptide
SATSILYYVGRKPKVLRKHRDENKNVV

SEQ ID NO: 94432 - protein, 27 aa, Artificial Sequence
  Cyclic GFR-binding peptide
SPISILYKVGRKPKVLKYHYDENKNVV

SEQ ID NO: 94433 - protein, 29 aa, Artificial Sequence
  Cyclic GFR-binding peptide
SAISVLYLEIVRKKPIFLKNYQDENKNVV

SEQ ID NO: 94434 - protein, 27 aa, Artificial Sequence
  Cyclic GFR-binding peptide
SAISILYLVGRTPKVLKNYQDENKNVV

SEQ ID NO: 94435 - protein, 27 aa, Artificial Sequence
  Cyclic GFR-binding peptide
NAISMLYFDENEKVVLKKYRDENKNVV

SEQ ID NO: 94436 - protein, 27 aa, Artificial Sequence
  Cyclic GFR-binding peptide
SAISVLYLDDMGVPTLKNYQDENKNVV

SEQ ID NO: 94437 - protein, 27 aa, Artificial Sequence
  Cyclic GFR-binding peptide
NAISVLYFDDMGVPTLKKYRDENKNVV

SEQ ID NO: 94438 - protein, 27 aa, Artificial Sequence
  Cyclic GFR-binding peptide
NAISILYFVGRKPKVLKKYRDENKNVV

SEQ ID NO: 94439 - protein, 27 aa, Artificial Sequence
  Cyclic GFR-binding peptide
SAISMLYLDENEKVVLKNYQDENKNVV

SEQ ID NO: 94440 - protein, 27 aa, Artificial Sequence
  Cyclic GFR-binding peptide
SPISVLYKDDSSNVILKYHYDENKNVV

SEQ ID NO: 94441 - protein, 27 aa, Artificial Sequence
  Cyclic GFR-binding peptide
SAISILYLVGRKPKVLKNYQDENKNVV

SEQ ID NO: 94442 - protein, 27 aa, Artificial Sequence
  Cyclic GFR-binding peptide
NAISVLYFDSSNNVILKKYRDENKNVV

SEQ ID NO: 94443 - protein, 27 aa, Artificial Sequence
  Cyclic GFR-binding peptide
NAISVLYFDDSSNVILKKYRDENKNVV

SEQ ID NO: 94444 - protein, 27 aa, Artificial Sequence
  Cyclic GFR-binding peptide
SATSILYYVGRTPKVLRKHRDENKNVV

SEQ ID NO: 94445 - protein, 29 aa, Artificial Sequence
  Cyclic GFR-binding peptide
SPISVLYKEIVRKKPIFLKYHYDENKNVV

SEQ ID NO: 94446 - protein, 27 aa, Artificial Sequence
  Cyclic GFR-binding peptide
SATSILYYIGKTPKILRKHRDENKNVV

SEQ ID NO: 94447 - protein, 27 aa, Artificial Sequence
  Cyclic GFR-binding peptide
SATSVLYYDDMGVPTLRKHRDENKNVV

SEQ ID NO: 94448 - protein, 27 aa, Artificial Sequence
  Cyclic GFR-binding peptide
SPISVLYKDDMGVPTLKYHYDENKNVV

SEQ ID NO: 94449 - protein, 27 aa, Artificial Sequence
  Cyclic GFR-binding peptide
SPISVLYKDSSNNVILKYHYDENKNVV

SEQ ID NO: 94450 - protein, 27 aa, Artificial Sequence
  Cyclic GFR-binding peptide
SATSVLYYDSSNNVILRKHRDENKNVV

SEQ ID NO: 94451 - protein, 27 aa, Artificial Sequence
  Cyclic GFR-binding peptide
SPISILYKVGRTPKVLKYHYDENKNVV

SEQ ID NO: 94452 - protein, 27 aa, Artificial Sequence
  Cyclic GFR-binding peptide
SATSVLYYDDSSNVILRKHRDENKNVV

SEQ ID NO: 94453 - protein, 27 aa, Artificial Sequence
  Cyclic GFR-binding peptide
SATSMLYYDEYDKVVLRKHRDENKNVV

SEQ ID NO: 94454 - protein, 27 aa, Artificial Sequence
  Cyclic GFR-binding peptide
SAISILYLIGKTPKILKNYQDENKNVV

SEQ ID NO: 94455 - protein, 27 aa, Artificial Sequence
  Cyclic GFR-binding peptide
SAISMLYLDEYDKVVLKNYQDENKNVV

SEQ ID NO: 94456 - protein, 27 aa, Artificial Sequence
  Cyclic GFR-binding peptide
SAISVLYLDDSSNVILKNYQDENKNVV

SEQ ID NO: 94457 - protein, 27 aa, Artificial Sequence
  Cyclic GFR-binding peptide
DENKNVVNSLQEVVKDYEDYYLMTLPE

SEQ ID NO: 94458 - protein, 27 aa, Artificial Sequence
  Cyclic GFR-binding peptide
DENKNVVNSLQEIKPTKGIYYVIPLPE

SEQ ID NO: 94459 - protein, 27 aa, Artificial Sequence
  Cyclic GFR-binding peptide
DENKNVVNSLQEVKPKRGVYYLITLPE

SEQ ID NO: 94460 - protein, 27 aa, Artificial Sequence
  Cyclic GFR-binding peptide
DENKNVVNSLQEVKPTRGVYYVIPLPE

SEQ ID NO: 94461 - protein, 27 aa, Artificial Sequence
  Cyclic GFR-binding peptide
DENKNVVEYQKYIVNSSDDIFLVSIPS

SEQ ID NO: 94462 - protein, 27 aa, Artificial Sequence
  Cyclic GFR-binding peptide
DENKNVVEYQKYVKPTRGVIFLISIPS

SEQ ID NO: 94463 - protein, 27 aa, Artificial Sequence
  Cyclic GFR-binding peptide
DENKNVVNSLQEVVKENEDYYLMTLPE

SEQ ID NO: 94464 - protein, 27 aa, Artificial Sequence
  Cyclic GFR-binding peptide
DENKNVVNSLQEVVNNASDYYLITLPE

SEQ ID NO: 94465 - protein, 27 aa, Artificial Sequence
  Cyclic GFR-binding peptide
DENKNVVNSLQEVKPKRGVYYVIPLPE

SEQ ID NO: 94466 - protein, 27 aa, Artificial Sequence
  Cyclic GFR-binding peptide
DENKNVVNSLQEVVNNASDYYVIPLPE

SEQ ID NO: 94467 - protein, 27 aa, Artificial Sequence
  Cyclic GFR-binding peptide
DENKNVVNSLQEVKPTRGVYYLITLPE

SEQ ID NO: 94468 - protein, 27 aa, Artificial Sequence
  Cyclic GFR-binding peptide
DENKNVVEYQKYIKPTKGIIFLISIPS

SEQ ID NO: 94469 - protein, 27 aa, Artificial Sequence
  Cyclic GFR-binding peptide
DENKNVVEYQKYVVNNASDIFLISIPS

SEQ ID NO: 94470 - protein, 27 aa, Artificial Sequence
  Cyclic GFR-binding peptide
DENKNVVNSLQEIVNSSDDYYVVPLPE

SEQ ID NO: 94471 - protein, 27 aa, Artificial Sequence
  Cyclic GFR-binding peptide
DENKNVVNSLQEVVKDYEDYYVMPLPE

SEQ ID NO: 94472 - protein, 27 aa, Artificial Sequence
  Cyclic GFR-binding peptide
DENKNVVEYQKYVVKENEDIFLMSIPS

SEQ ID NO: 94473 - protein, 27 aa, Artificial Sequence
  Cyclic GFR-binding peptide
DENKNVVNSLQEVVKENEDYYVMPLPE

SEQ ID NO: 94474 - protein, 27 aa, Artificial Sequence
  Cyclic GFR-binding peptide
DENKNVVEYQKYVVKDYEDIFLMSIPS

SEQ ID NO: 94475 - protein, 27 aa, Artificial Sequence
  Cyclic GFR-binding peptide
DENKNVVQYNKLVVNNASDLYLISIAS

SEQ ID NO: 94476 - protein, 27 aa, Artificial Sequence
  Cyclic GFR-binding peptide
DENKNVVNSLQEIKPTKGIYYLITLPE

SEQ ID NO: 94477 - protein, 27 aa, Artificial Sequence
  Cyclic GFR-binding peptide
DENKNVVEYQKYVKPKRGVIFLISIPS

SEQ ID NO: 94478 - protein, 27 aa, Artificial Sequence
  Cyclic GFR-binding peptide
DENKNVVRYKKLVVNNASDFYLISIAN

SEQ ID NO: 94479 - protein, 27 aa, Artificial Sequence
  Cyclic GFR-binding peptide
DENKNVVNSLQEIVNSSDDYYLVTLPE

SEQ ID NO: 94480 - protein, 27 aa, Artificial Sequence
  Cyclic GFR-binding peptide
EPLTMLYYDEYDKVVEQLSNDENKNVV

SEQ ID NO: 94481 - protein, 27 aa, Artificial Sequence
  Cyclic GFR-binding peptide
EPLPIVYYIGKTPKIEQLSNDENKNVV

SEQ ID NO: 94482 - protein, 27 aa, Artificial Sequence
  Cyclic GFR-binding peptide
EPLTILYYVGRKPKVEQLSNDENKNVV

SEQ ID NO: 94483 - protein, 27 aa, Artificial Sequence
  Cyclic GFR-binding peptide
EPLPIVYYVGRTPKVEQLSNDENKNVV

SEQ ID NO: 94484 - protein, 27 aa, Artificial Sequence
  Cyclic GFR-binding peptide
SPISVLFIDDSSNVIYKQYEDENKNVV

SEQ ID NO: 94485 - protein, 27 aa, Artificial Sequence
  Cyclic GFR-binding peptide
SPISILFIVGRTPKVYKQYEDENKNVV

SEQ ID NO: 94486 - protein, 27 aa, Artificial Sequence
  Cyclic GFR-binding peptide
EPLTMLYYDENEKVVEQLSNDENKNVV

SEQ ID NO: 94487 - protein, 27 aa, Artificial Sequence
  Cyclic GFR-binding peptide
EPLTILYYDSANNVVEQLSNDENKNVV

SEQ ID NO: 94488 - protein, 27 aa, Artificial Sequence
  Cyclic GFR-binding peptide
EPLPIVYYVGRKPKVEQLSNDENKNVV

SEQ ID NO: 94489 - protein, 27 aa, Artificial Sequence
  Cyclic GFR-binding peptide
EPLPIVYYDSANNVVEQLSNDENKNVV

SEQ ID NO: 94490 - protein, 27 aa, Artificial Sequence
  Cyclic GFR-binding peptide
EPLTILYYVGRTPKVEQLSNDENKNVV

SEQ ID NO: 94491 - protein, 27 aa, Artificial Sequence
  Cyclic GFR-binding peptide
SPISILFIIGKTPKIYKQYEDENKNVV

SEQ ID NO: 94492 - protein, 27 aa, Artificial Sequence
  Cyclic GFR-binding peptide
SPISILFIDSANNVVYKQYEDENKNVV

SEQ ID NO: 94493 - protein, 27 aa, Artificial Sequence
  Cyclic GFR-binding peptide
EPLPVVYYDDSSNVIEQLSNDENKNVV

SEQ ID NO: 94494 - protein, 27 aa, Artificial Sequence
  Cyclic GFR-binding peptide
EPLPMVYYDEYDKVVEQLSNDENKNVV

SEQ ID NO: 94495 - protein, 27 aa, Artificial Sequence
  Cyclic GFR-binding peptide
SPISMLFIDENEKVVYKQYEDENKNVV

SEQ ID NO: 94496 - protein, 27 aa, Artificial Sequence
  Cyclic GFR-binding peptide
EPLPMVYYDENEKVVEQLSNDENKNVV

SEQ ID NO: 94497 - protein, 27 aa, Artificial Sequence
  Cyclic GFR-binding peptide
SPISMLFIDEYDKVVYKQYEDENKNVV

SEQ ID NO: 94498 - protein, 27 aa, Artificial Sequence
  Cyclic GFR-binding peptide
SAISILYLDSANNVVLKNYQDENKNVV

SEQ ID NO: 94499 - protein, 27 aa, Artificial Sequence
  Cyclic GFR-binding peptide
EPLTILYYIGKTPKIEQLSNDENKNVV

SEQ ID NO: 94500 - protein, 27 aa, Artificial Sequence
  Cyclic GFR-binding peptide
SPISILFIVGRKPKVYKQYEDENKNVV

SEQ ID NO: 94501 - protein, 27 aa, Artificial Sequence
  Cyclic GFR-binding peptide
NAISILYFDSANNVVLKKYRDENKNVV

SEQ ID NO: 94502 - protein, 27 aa, Artificial Sequence
  Cyclic GFR-binding peptide
EPLTVLYYDDSSNVIEQLSNDENKNVV

SEQ ID NO: 94503 - protein, 29 aa, Artificial Sequence
  Cyclic GFR-binding peptide
DENKNVVVTAKKLKPKKRVYEIKRVQVPR

SEQ ID NO: 94504 - protein, 29 aa, Artificial Sequence
  Cyclic GFR-binding peptide
DENKNVVVQVEKLKPKKRVYEVKAVKVSR

SEQ ID NO: 94505 - protein, 29 aa, Artificial Sequence
  Cyclic GFR-binding peptide
DENKNVVVQVEKFIPKKRVIEVKAVKVSR

SEQ ID NO: 94506 - protein, 29 aa, Artificial Sequence
  Cyclic GFR-binding peptide
DENKNVVVQVEKHQGQHPKIRVKAMKVSR

SEQ ID NO: 94507 - protein, 29 aa, Artificial Sequence
  Cyclic GFR-binding peptide
DENKNVVVTAKKHQGQHPKIRIKRMQVPR

SEQ ID NO: 94508 - protein, 29 aa, Artificial Sequence
  Cyclic GFR-binding peptide
DENKNVVSMEGLLKPKKRVYEMIQVTINS

SEQ ID NO: 94509 - protein, 29 aa, Artificial Sequence
  Cyclic GFR-binding peptide
DENKNVVSMEGIFIPKKRVIEMIQVTINS

SEQ ID NO: 94510 - protein, 29 aa, Artificial Sequence
  Cyclic GFR-binding peptide
DENKNVVSMEGLHQGQHPKIRMIQMTINS

SEQ ID NO: 94511 - protein, 29 aa, Artificial Sequence
  Cyclic GFR-binding peptide
DENKNVVSMEGILKPKKRVYEMIQVTINS

SEQ ID NO: 94512 - protein, 29 aa, Artificial Sequence
  Cyclic GFR-binding peptide
DENKNVVSMEGLFIPKKRVIEMIQVTINS

SEQ ID NO: 94513 - protein, 29 aa, Artificial Sequence
  Cyclic GFR-binding peptide
DENKNVVVTAKKFIPKKRVIEIKRVQVPR

SEQ ID NO: 94514 - protein, 29 aa, Artificial Sequence
  Cyclic GFR-binding peptide
DENKNVVSMEGIHQGQHPKIRMIQMTINS

SEQ ID NO: 94515 - protein, 29 aa, Artificial Sequence
  Cyclic GFR-binding peptide
RPVQVRKIEYVRKKPKLKKATVDENKNVV

SEQ ID NO: 94516 - protein, 29 aa, Artificial Sequence
  Cyclic GFR-binding peptide
RSVKVAKVEYVRKKPKLKEVQVDENKNVV

SEQ ID NO: 94517 - protein, 29 aa, Artificial Sequence
  Cyclic GFR-binding peptide
RSVKVAKVEIVRKKPIFKEVQVDENKNVV

SEQ ID NO: 94518 - protein, 29 aa, Artificial Sequence
  Cyclic GFR-binding peptide
RSVKMAKVRIKPHQGQHKEVQVDENKNVV

SEQ ID NO: 94519 - protein, 29 aa, Artificial Sequence
  Cyclic GFR-binding peptide
RPVQMRKIRIKPHQGQHKKATVDENKNVV

SEQ ID NO: 94520 - protein, 29 aa, Artificial Sequence
  Cyclic GFR-binding peptide
SNITVQIMEYVRKKPKLLGEMSDENKNVV

SEQ ID NO: 94521 - protein, 29 aa, Artificial Sequence
  Cyclic GFR-binding peptide
SNITVQIMEIVRKKPIFIGEMSDENKNVV

SEQ ID NO: 94522 - protein, 29 aa, Artificial Sequence
  Cyclic GFR-binding peptide
SNITMQIMRIKPHQGQHLGEMSDENKNVV

SEQ ID NO: 94523 - protein, 29 aa, Artificial Sequence
  Cyclic GFR-binding peptide
SNITVQIMEYVRKKPKLIGEMSDENKNVV

SEQ ID NO: 94524 - protein, 29 aa, Artificial Sequence
  Cyclic GFR-binding peptide
SNITVQIMEIVRKKPIFLGEMSDENKNVV

SEQ ID NO: 94525 - protein, 29 aa, Artificial Sequence
  Cyclic GFR-binding peptide
RPVQVRKIEIVRKKPIFKKATVDENKNVV

SEQ ID NO: 94526 - protein, 29 aa, Artificial Sequence
  Cyclic GFR-binding peptide
SNITMQIMRIKPHQGQHIGEMSDENKNVV

SEQ ID NO: 94527 - protein, 27 aa, Artificial Sequence
  Cyclic GFR-binding peptide
DENKNVVEYKFKVKPTRGVLYLISIPE

SEQ ID NO: 94528 - protein, 27 aa, Artificial Sequence
  Cyclic GFR-binding peptide
DENKNVVEYKFKTPVGMDDLYLVSIPE

SEQ ID NO: 94529 - protein, 27 aa, Artificial Sequence
  Cyclic GFR-binding peptide
DENKNVVEYQKYVKPKRGVIYLISIPS

SEQ ID NO: 94530 - protein, 27 aa, Artificial Sequence
  Cyclic GFR-binding peptide
DENKNVVEYQKYVVKDYEDIYLMSIPS

SEQ ID NO: 94531 - protein, 27 aa, Artificial Sequence
  Cyclic GFR-binding peptide
DENKNVVEYKFKIKPTKGILYLISIPE

SEQ ID NO: 94532 - protein, 27 aa, Artificial Sequence
  Cyclic GFR-binding peptide
DENKNVVYHYKLYTVVGKDKYLISIPS

SEQ ID NO: 94533 - protein, 27 aa, Artificial Sequence
  Cyclic GFR-binding peptide
DENKNVVRYKKLYTVVGKDFYLISIAN

SEQ ID NO: 94534 - protein, 27 aa, Artificial Sequence
  Cyclic GFR-binding peptide
DENKNVVEYQKYVVNNAADIYLISIPS

SEQ ID NO: 94535 - protein, 27 aa, Artificial Sequence
  Cyclic GFR-binding peptide
DENKNVVEYQKYVKPTRGVIYLISIPS

SEQ ID NO: 94536 - protein, 27 aa, Artificial Sequence
  Cyclic GFR-binding peptide
DENKNVVEYQKYTPVGMDDIYLVSIPS

SEQ ID NO: 94537 - protein, 27 aa, Artificial Sequence
  Cyclic GFR-binding peptide
DENKNVVEYKFKVVKDYEDLYLMSIPE

SEQ ID NO: 94538 - protein, 27 aa, Artificial Sequence
  Cyclic GFR-binding peptide
DENKNVVEYKFKVVNNAADLYLISIPE

SEQ ID NO: 94539 - protein, 27 aa, Artificial Sequence
  Cyclic GFR-binding peptide
DENKNVVEYQKYVVKENEDIYLMSIPS

SEQ ID NO: 94540 - protein, 27 aa, Artificial Sequence
  Cyclic GFR-binding peptide
DENKNVVEYQKYIKPTKGIIYLISIPS

SEQ ID NO: 94541 - protein, 27 aa, Artificial Sequence
  Cyclic GFR-binding peptide
DENKNVVRYKKLVVNNAADFYLISIAN

SEQ ID NO: 94542 - protein, 27 aa, Artificial Sequence
  Cyclic GFR-binding peptide
DENKNVVYHYKLVVNNAADKYLISIPS

SEQ ID NO: 94543 - protein, 27 aa, Artificial Sequence
  Cyclic GFR-binding peptide
DENKNVVEYKFKIVNNSSDLYLVSIPE

SEQ ID NO: 94544 - protein, 27 aa, Artificial Sequence
  Cyclic GFR-binding peptide
DENKNVVEYQKYIVNSSDDIYLVSIPS

SEQ ID NO: 94545 - protein, 27 aa, Artificial Sequence
  Cyclic GFR-binding peptide
DENKNVVEYKFKIVNSSDDLYLVSIPE

SEQ ID NO: 94546 - protein, 27 aa, Artificial Sequence
  Cyclic GFR-binding peptide
DENKNVVEYKFKVKPKRGVLYLISIPE

SEQ ID NO: 94547 - protein, 27 aa, Artificial Sequence
  Cyclic GFR-binding peptide
DENKNVVEYQKYYTVVGKDIYLISIPS

SEQ ID NO: 94548 - protein, 27 aa, Artificial Sequence
  Cyclic GFR-binding peptide
DENKNVVEYKFKVVKENEDLYLMSIPE

SEQ ID NO: 94549 - protein, 27 aa, Artificial Sequence
  Cyclic GFR-binding peptide
DENKNVVEYQKYIVNNSSDIYLVSIPS

SEQ ID NO: 94550 - protein, 27 aa, Artificial Sequence
  Cyclic GFR-binding peptide
DENKNVVEYKFKYTVVGKDLYLISIPE

SEQ ID NO: 94551 - protein, 27 aa, Artificial Sequence
  Cyclic GFR-binding peptide
EPISILYLVGRTPKVKFKYEDENKNVV

SEQ ID NO: 94552 - protein, 27 aa, Artificial Sequence
  Cyclic GFR-binding peptide
EPISVLYLDDMGVPTKFKYEDENKNVV

SEQ ID NO: 94553 - protein, 27 aa, Artificial Sequence
  Cyclic GFR-binding peptide
SPISILYIVGRKPKVYKQYEDENKNVV

SEQ ID NO: 94554 - protein, 27 aa, Artificial Sequence
  Cyclic GFR-binding peptide
SPISMLYIDEYDKVVYKQYEDENKNVV

SEQ ID NO: 94555 - protein, 27 aa, Artificial Sequence
  Cyclic GFR-binding peptide
EPISILYLIGKTPKIKFKYEDENKNVV

SEQ ID NO: 94556 - protein, 27 aa, Artificial Sequence
  Cyclic GFR-binding peptide
SPISILYKDKGVVTYLKYHYDENKNVV

SEQ ID NO: 94557 - protein, 27 aa, Artificial Sequence
  Cyclic GFR-binding peptide
NAISILYFDKGVVTYLKKYRDENKNVV

SEQ ID NO: 94558 - protein, 27 aa, Artificial Sequence
  Cyclic GFR-binding peptide
SPISILYIDAANNVVYKQYEDENKNVV

SEQ ID NO: 94559 - protein, 27 aa, Artificial Sequence
  Cyclic GFR-binding peptide
SPISILYIVGRTPKVYKQYEDENKNVV

SEQ ID NO: 94560 - protein, 27 aa, Artificial Sequence
  Cyclic GFR-binding peptide
SPISVLYIDDMGVPTYKQYEDENKNVV

SEQ ID NO: 94561 - protein, 27 aa, Artificial Sequence
  Cyclic GFR-binding peptide
EPISMLYLDEYDKVVKFKYEDENKNVV

SEQ ID NO: 94562 - protein, 27 aa, Artificial Sequence
  Cyclic GFR-binding peptide
EPISILYLDAANNVVKFKYEDENKNVV

SEQ ID NO: 94563 - protein, 27 aa, Artificial Sequence
  Cyclic GFR-binding peptide
SPISMLYIDENEKVVYKQYEDENKNVV

SEQ ID NO: 94564 - protein, 27 aa, Artificial Sequence
  Cyclic GFR-binding peptide
SPISILYIIGKTPKIYKQYEDENKNVV

SEQ ID NO: 94565 - protein, 27 aa, Artificial Sequence
  Cyclic GFR-binding peptide
NAISILYFDAANNVVLKKYRDENKNVV

SEQ ID NO: 94566 - protein, 27 aa, Artificial Sequence
  Cyclic GFR-binding peptide
SPISILYKDAANNVVLKYHYDENKNVV

SEQ ID NO: 94567 - protein, 27 aa, Artificial Sequence
  Cyclic GFR-binding peptide
EPISVLYLDSSNNVIKFKYEDENKNVV

SEQ ID NO: 94568 - protein, 27 aa, Artificial Sequence
  Cyclic GFR-binding peptide
SPISVLYIDDSSNVIYKQYEDENKNVV

SEQ ID NO: 94569 - protein, 27 aa, Artificial Sequence
  Cyclic GFR-binding peptide
EPISVLYLDDSSNVIKFKYEDENKNVV

SEQ ID NO: 94570 - protein, 27 aa, Artificial Sequence
  Cyclic GFR-binding peptide
EPISILYLVGRKPKVKFKYEDENKNVV

SEQ ID NO: 94571 - protein, 27 aa, Artificial Sequence
  Cyclic GFR-binding peptide
SPISILYIDKGVVTYYKQYEDENKNVV

SEQ ID NO: 94572 - protein, 27 aa, Artificial Sequence
  Cyclic GFR-binding peptide
EPISMLYLDENEKVVKFKYEDENKNVV

SEQ ID NO: 94573 - protein, 27 aa, Artificial Sequence
  Cyclic GFR-binding peptide
SPISVLYIDSSNNVIYKQYEDENKNVV

SEQ ID NO: 94574 - protein, 27 aa, Artificial Sequence
  Cyclic GFR-binding peptide
EPISILYLDKGVVTYKFKYEDENKNVV

SEQ ID NO: 94575 - protein, 27 aa, Artificial Sequence
  Cyclic GFR-binding peptide
DENKNVVPIKGYIIQQKDNFYLMNIPS

SEQ ID NO: 94576 - protein, 27 aa, Artificial Sequence
  Cyclic GFR-binding peptide
DENKNVVPIKGYVVKDYEDFYLMNIPS

SEQ ID NO: 94577 - protein, 27 aa, Artificial Sequence
  Cyclic GFR-binding peptide
DENKNVVPIKGYIVNSSDDFYLVNIPS

SEQ ID NO: 94578 - protein, 27 aa, Artificial Sequence
  Cyclic GFR-binding peptide
DENKNVVPIKGYVVNNAADFYLINIPS

SEQ ID NO: 94579 - protein, 27 aa, Artificial Sequence
  Cyclic GFR-binding peptide
DENKNVVPIKGYYTVVGKDFYLINIPS

SEQ ID NO: 94580 - protein, 27 aa, Artificial Sequence
  Cyclic GFR-binding peptide
DENKNVVPIKGYLLVRGNDFYLMNIPS

SEQ ID NO: 94581 - protein, 27 aa, Artificial Sequence
  Cyclic GFR-binding peptide
DENKNVVPIKGYVVKENEDFYLMNIPS

SEQ ID NO: 94582 - protein, 27 aa, Artificial Sequence
  Cyclic GFR-binding peptide
DENKNVVPIKGYVVNNASDFYLINIPS

SEQ ID NO: 94583 - protein, 27 aa, Artificial Sequence
  Cyclic GFR-binding peptide
DENKNVVPIKGYTPVGMDDFYLVNIPS

SEQ ID NO: 94584 - protein, 27 aa, Artificial Sequence
  Cyclic GFR-binding peptide
DENKNVVPIKGYIVNNSSDFYLVNIPS

SEQ ID NO: 94585 - protein, 27 aa, Artificial Sequence
  Cyclic GFR-binding peptide
SPINMLYFNDKQQIIYGKIPDENKNVV

SEQ ID NO: 94586 - protein, 27 aa, Artificial Sequence
  Cyclic GFR-binding peptide
SPINMLYFDEYDKVVYGKIPDENKNVV

SEQ ID NO: 94587 - protein, 27 aa, Artificial Sequence
  Cyclic GFR-binding peptide
SPINVLYFDDSSNVIYGKIPDENKNVV

SEQ ID NO: 94588 - protein, 27 aa, Artificial Sequence
  Cyclic GFR-binding peptide
SPINILYFDAANNVVYGKIPDENKNVV

SEQ ID NO: 94589 - protein, 27 aa, Artificial Sequence
  Cyclic GFR-binding peptide
SPINILYFDKGVVTYYGKIPDENKNVV

SEQ ID NO: 94590 - protein, 27 aa, Artificial Sequence
  Cyclic GFR-binding peptide
SPINMLYFDNGRVLLYGKIPDENKNVV

SEQ ID NO: 94591 - protein, 27 aa, Artificial Sequence
  Cyclic GFR-binding peptide
SPINMLYFDENEKVVYGKIPDENKNVV

SEQ ID NO: 94592 - protein, 27 aa, Artificial Sequence
  Cyclic GFR-binding peptide
SPINILYFDSANNVVYGKIPDENKNVV

SEQ ID NO: 94593 - protein, 27 aa, Artificial Sequence
  Cyclic GFR-binding peptide
SPINVLYFDDMGVPTYGKIPDENKNVV

SEQ ID NO: 94594 - protein, 27 aa, Artificial Sequence
  Cyclic GFR-binding peptide
SPINVLYFDSSNNVIYGKIPDENKNVV

SEQ ID NO: 94595 - protein, 27 aa, Artificial Sequence
  Cyclic GFR-binding peptide
DENKNVVEYQKYVVNNASDIYLISIPS

SEQ ID NO: 94596 - protein, 27 aa, Artificial Sequence
  Cyclic GFR-binding peptide
DENKNVVEYQKYIIQQKDNIYLMSIPS

SEQ ID NO: 94597 - protein, 27 aa, Artificial Sequence
  Cyclic GFR-binding peptide
DENKNVVEYQKYLLVRGNDIYLMSIPS

SEQ ID NO: 94598 - protein, 27 aa, Artificial Sequence
  Cyclic GFR-binding peptide
SPISILYIDSANNVVYKQYEDENKNVV

SEQ ID NO: 94599 - protein, 27 aa, Artificial Sequence
  Cyclic GFR-binding peptide
SPISMLYINDKQQIIYKQYEDENKNVV

SEQ ID NO: 94600 - protein, 27 aa, Artificial Sequence
  Cyclic GFR-binding peptide
SPISMLYIDNGRVLLYKQYEDENKNVV

SEQ ID NO: 94601 - protein, 27 aa, Artificial Sequence
  Cyclic GFR-binding peptide
DENKNVVPYVKLYTVVGKDFFLISLSS

SEQ ID NO: 94602 - protein, 27 aa, Artificial Sequence
  Cyclic GFR-binding peptide
DENKNVVPYVKLIKPTKGIFFLISLSS

SEQ ID NO: 94603 - protein, 27 aa, Artificial Sequence
  Cyclic GFR-binding peptide
DENKNVVPYVKLIIQQKDNFFLMSLSS

SEQ ID NO: 94604 - protein, 27 aa, Artificial Sequence
  Cyclic GFR-binding peptide
DENKNVVPYVKLIVNSSDDFFLVSLSS

SEQ ID NO: 94605 - protein, 27 aa, Artificial Sequence
  Cyclic GFR-binding peptide
DENKNVVPYVKLVKPKRGVFFLISLSS

SEQ ID NO: 94606 - protein, 27 aa, Artificial Sequence
  Cyclic GFR-binding peptide
DENKNVVPYVKLVKPTRGVFFLISLSS

SEQ ID NO: 94607 - protein, 27 aa, Artificial Sequence
  Cyclic GFR-binding peptide
DENKNVVPYVKLTPVGMDDFFLVSLSS

SEQ ID NO: 94608 - protein, 29 aa, Artificial Sequence
  Cyclic GFR-binding peptide
DENKNVVPYVKLHQGQHPKIRFFLMSLSS

SEQ ID NO: 94609 - protein, 27 aa, Artificial Sequence
  Cyclic GFR-binding peptide
DENKNVVPYVKLVVNKNEDFFLISLSS

SEQ ID NO: 94610 - protein, 27 aa, Artificial Sequence
  Cyclic GFR-binding peptide
DENKNVVPYVKLVVNNASDFFLISLSS

SEQ ID NO: 94611 - protein, 27 aa, Artificial Sequence
  Cyclic GFR-binding peptide
DENKNVVPYVKLVVKENEDFFLMSLSS

SEQ ID NO: 94612 - protein, 27 aa, Artificial Sequence
  Cyclic GFR-binding peptide
DENKNVVPYVKLIVNNSSDFFLVSLSS

SEQ ID NO: 94613 - protein, 29 aa, Artificial Sequence
  Cyclic GFR-binding peptide
DENKNVVPYVKLLKPKKRVYEFFLVSLSS

SEQ ID NO: 94614 - protein, 27 aa, Artificial Sequence
  Cyclic GFR-binding peptide
DENKNVVPYVKLLLVRGNDFFLMSLSS

SEQ ID NO: 94615 - protein, 27 aa, Artificial Sequence
  Cyclic GFR-binding peptide
DENKNVVPYVKLVVKDYEDFFLMSLSS

SEQ ID NO: 94616 - protein, 27 aa, Artificial Sequence
  Cyclic GFR-binding peptide
DENKNVVPYVKLVVNNAADFFLISLSS

SEQ ID NO: 94617 - protein, 27 aa, Artificial Sequence
  Cyclic GFR-binding peptide
SSLSILFFDKGVVTYLKVYPDENKNVV

SEQ ID NO: 94618 - protein, 27 aa, Artificial Sequence
  Cyclic GFR-binding peptide
SSLSILFFIGKTPKILKVYPDENKNVV

SEQ ID NO: 94619 - protein, 27 aa, Artificial Sequence
  Cyclic GFR-binding peptide
SSLSMLFFNDKQQIILKVYPDENKNVV

SEQ ID NO: 94620 - protein, 27 aa, Artificial Sequence
  Cyclic GFR-binding peptide
SSLSVLFFDDSSNVILKVYPDENKNVV

SEQ ID NO: 94621 - protein, 27 aa, Artificial Sequence
  Cyclic GFR-binding peptide
SSLSILFFVGRKPKVLKVYPDENKNVV

SEQ ID NO: 94622 - protein, 27 aa, Artificial Sequence
  Cyclic GFR-binding peptide
SSLSILFFVGRTPKVLKVYPDENKNVV

SEQ ID NO: 94623 - protein, 27 aa, Artificial Sequence
  Cyclic GFR-binding peptide
SSLSVLFFDDMGVPTLKVYPDENKNVV

SEQ ID NO: 94624 - protein, 29 aa, Artificial Sequence
  Cyclic GFR-binding peptide
SSLSMLFFRIKPHQGQHLKVYPDENKNVV

SEQ ID NO: 94625 - protein, 27 aa, Artificial Sequence
  Cyclic GFR-binding peptide
SSLSILFFDENKNVVLKVYPDENKNVV

SEQ ID NO: 94626 - protein, 27 aa, Artificial Sequence
  Cyclic GFR-binding peptide
SSLSILFFDSANNVVLKVYPDENKNVV

SEQ ID NO: 94627 - protein, 27 aa, Artificial Sequence
  Cyclic GFR-binding peptide
SSLSMLFFDENEKVVLKVYPDENKNVV

SEQ ID NO: 94628 - protein, 27 aa, Artificial Sequence
  Cyclic GFR-binding peptide
SSLSVLFFDSSNNVILKVYPDENKNVV

SEQ ID NO: 94629 - protein, 29 aa, Artificial Sequence
  Cyclic GFR-binding peptide
SSLSVLFFEYVRKKPKLLKVYPDENKNVV

SEQ ID NO: 94630 - protein, 27 aa, Artificial Sequence
  Cyclic GFR-binding peptide
SSLSMLFFDNGRVLLLKVYPDENKNVV

SEQ ID NO: 94631 - protein, 27 aa, Artificial Sequence
  Cyclic GFR-binding peptide
SSLSMLFFDEYDKVVLKVYPDENKNVV

SEQ ID NO: 94632 - protein, 27 aa, Artificial Sequence
  Cyclic GFR-binding peptide
SSLSILFFDAANNVVLKVYPDENKNVV

SEQ ID NO: 94633 - protein, 27 aa, Artificial Sequence
  Cyclic GFR-binding peptide
DENKNVVSMEGIIVNSSDDMIQVTINS

SEQ ID NO: 94634 - protein, 27 aa, Artificial Sequence
  Cyclic GFR-binding peptide
DENKNVVVTAKKVVKENEDIKRMQVPR

SEQ ID NO: 94635 - protein, 27 aa, Artificial Sequence
  Cyclic GFR-binding peptide
DENKNVVSMEGIVVKDYEDMIQMTINS

SEQ ID NO: 94636 - protein, 27 aa, Artificial Sequence
  Cyclic GFR-binding peptide
DENKNVVVTAKKIKPTKGIIKRIQVPR

SEQ ID NO: 94637 - protein, 27 aa, Artificial Sequence
  Cyclic GFR-binding peptide
DENKNVVSMEGIVKPTRGVMIQITINS

SEQ ID NO: 94638 - protein, 29 aa, Artificial Sequence
  Cyclic GFR-binding peptide
DENKNVVNSLQEFIPKKRVIEYYVVPLPE

SEQ ID NO: 94639 - protein, 27 aa, Artificial Sequence
  Cyclic GFR-binding peptide
DENKNVVVQVEKVKPKRGVVKAIKVSR

SEQ ID NO: 94640 - protein, 27 aa, Artificial Sequence
  Cyclic GFR-binding peptide
DENKNVVVQVEKVVKENEDVKAMKVSR

SEQ ID NO: 94641 - protein, 27 aa, Artificial Sequence
  Cyclic GFR-binding peptide
DENKNVVVTAKKIVNSSDDIKRVQVPR

SEQ ID NO: 94642 - protein, 27 aa, Artificial Sequence
  Cyclic GFR-binding peptide
DENKNVVVQVEKIKPTKGIVKAIKVSR

SEQ ID NO: 94643 - protein, 29 aa, Artificial Sequence
  Cyclic GFR-binding peptide
DENKNVVNSLQEFIPKKRVIEYYLVTLPE

SEQ ID NO: 94644 - protein, 27 aa, Artificial Sequence
  Cyclic GFR-binding peptide
DENKNVVVQVEKIVNSSDDVKAVKVSR

SEQ ID NO: 94645 - protein, 27 aa, Artificial Sequence
  Cyclic GFR-binding peptide
DENKNVVVTAKKVKPKRGVIKRIQVPR

SEQ ID NO: 94646 - protein, 27 aa, Artificial Sequence
  Cyclic GFR-binding peptide
DENKNVVVQVEKVKPTRGVVKAIKVSR

SEQ ID NO: 94647 - protein, 27 aa, Artificial Sequence
  Cyclic GFR-binding peptide
DENKNVVVTAKKVKPTRGVIKRIQVPR

SEQ ID NO: 94648 - protein, 29 aa, Artificial Sequence
  Cyclic GFR-binding peptide
DENKNVVNSLQELKPKKRVYEYYLVTLPE

SEQ ID NO: 94649 - protein, 27 aa, Artificial Sequence
  Cyclic GFR-binding peptide
DENKNVVSMEGIVKPKRGVMIQITINS

SEQ ID NO: 94650 - protein, 27 aa, Artificial Sequence
  Cyclic GFR-binding peptide
DENKNVVSMEGIVVKENEDMIQMTINS

SEQ ID NO: 94651 - protein, 27 aa, Artificial Sequence
  Cyclic GFR-binding peptide
DENKNVVSMEGIIKPTKGIMIQITINS

SEQ ID NO: 94652 - protein, 29 aa, Artificial Sequence
  Cyclic GFR-binding peptide
DENKNVVNSLQEHQGQHPKIRYYLMTLPE

SEQ ID NO: 94653 - protein, 27 aa, Artificial Sequence
  Cyclic GFR-binding peptide
DENKNVVVTAKKVVKDYEDIKRMQVPR

SEQ ID NO: 94654 - protein, 29 aa, Artificial Sequence
  Cyclic GFR-binding peptide
DENKNVVNSLQEHQGQHPKIRYYVMPLPE

SEQ ID NO: 94655 - protein, 29 aa, Artificial Sequence
  Cyclic GFR-binding peptide
DENKNVVNSLQELKPKKRVYEYYVVPLPE

SEQ ID NO: 94656 - protein, 27 aa, Artificial Sequence
  Cyclic GFR-binding peptide
DENKNVVVQVEKVVKDYEDVKAMKVSR

SEQ ID NO: 94657 - protein, 27 aa, Artificial Sequence
  Cyclic GFR-binding peptide
SNITVQIMDDSSNVIIGEMSDENKNVV

SEQ ID NO: 94658 - protein, 27 aa, Artificial Sequence
  Cyclic GFR-binding peptide
RPVQMRKIDENEKVVKKATVDENKNVV

SEQ ID NO: 94659 - protein, 27 aa, Artificial Sequence
  Cyclic GFR-binding peptide
SNITMQIMDEYDKVVIGEMSDENKNVV

SEQ ID NO: 94660 - protein, 27 aa, Artificial Sequence
  Cyclic GFR-binding peptide
RPVQIRKIIGKTPKIKKATVDENKNVV

SEQ ID NO: 94661 - protein, 27 aa, Artificial Sequence
  Cyclic GFR-binding peptide
SNITIQIMVGRTPKVIGEMSDENKNVV

SEQ ID NO: 94662 - protein, 29 aa, Artificial Sequence
  Cyclic GFR-binding peptide
EPLPVVYYEIVRKKPIFEQLSNDENKNVV

SEQ ID NO: 94663 - protein, 27 aa, Artificial Sequence
  Cyclic GFR-binding peptide
RSVKIAKVVGRKPKVKEVQVDENKNVV

SEQ ID NO: 94664 - protein, 27 aa, Artificial Sequence
  Cyclic GFR-binding peptide
RSVKMAKVDENEKVVKEVQVDENKNVV

SEQ ID NO: 94665 - protein, 27 aa, Artificial Sequence
  Cyclic GFR-binding peptide
RPVQVRKIDDSSNVIKKATVDENKNVV

SEQ ID NO: 94666 - protein, 27 aa, Artificial Sequence
  Cyclic GFR-binding peptide
RSVKIAKVIGKTPKIKEVQVDENKNVV

SEQ ID NO: 94667 - protein, 29 aa, Artificial Sequence
  Cyclic GFR-binding peptide
EPLTVLYYEIVRKKPIFEQLSNDENKNVV

SEQ ID NO: 94668 - protein, 27 aa, Artificial Sequence
  Cyclic GFR-binding peptide
RSVKVAKVDDSSNVIKEVQVDENKNVV

SEQ ID NO: 94669 - protein, 27 aa, Artificial Sequence
  Cyclic GFR-binding peptide
RPVQIRKIVGRKPKVKKATVDENKNVV

SEQ ID NO: 94670 - protein, 27 aa, Artificial Sequence
  Cyclic GFR-binding peptide
RSVKIAKVVGRTPKVKEVQVDENKNVV

SEQ ID NO: 94671 - protein, 27 aa, Artificial Sequence
  Cyclic GFR-binding peptide
RPVQIRKIVGRTPKVKKATVDENKNVV

SEQ ID NO: 94672 - protein, 29 aa, Artificial Sequence
  Cyclic GFR-binding peptide
EPLTVLYYEYVRKKPKLEQLSNDENKNVV

SEQ ID NO: 94673 - protein, 27 aa, Artificial Sequence
  Cyclic GFR-binding peptide
SNITIQIMVGRKPKVIGEMSDENKNVV

SEQ ID NO: 94674 - protein, 27 aa, Artificial Sequence
  Cyclic GFR-binding peptide
SNITMQIMDENEKVVIGEMSDENKNVV

SEQ ID NO: 94675 - protein, 27 aa, Artificial Sequence
  Cyclic GFR-binding peptide
SNITIQIMIGKTPKIIGEMSDENKNVV

SEQ ID NO: 94676 - protein, 29 aa, Artificial Sequence
  Cyclic GFR-binding peptide
EPLTMLYYRIKPHQGQHEQLSNDENKNVV

SEQ ID NO: 94677 - protein, 27 aa, Artificial Sequence
  Cyclic GFR-binding peptide
RPVQMRKIDEYDKVVKKATVDENKNVV

SEQ ID NO: 94678 - protein, 29 aa, Artificial Sequence
  Cyclic GFR-binding peptide
EPLPMVYYRIKPHQGQHEQLSNDENKNVV

SEQ ID NO: 94679 - protein, 29 aa, Artificial Sequence
  Cyclic GFR-binding peptide
EPLPVVYYEYVRKKPKLEQLSNDENKNVV

SEQ ID NO: 94680 - protein, 27 aa, Artificial Sequence
  Cyclic GFR-binding peptide
RSVKMAKVDEYDKVVKEVQVDENKNVV

SEQ ID NO: 94681 - protein, 27 aa, Artificial Sequence
  Cyclic GFR-binding peptide
DENKNVVRYKKLIIQQKDNFYLMSIAN

SEQ ID NO: 94682 - protein, 27 aa, Artificial Sequence
  Cyclic GFR-binding peptide
DENKNVVRYKKLLLVRGNDFYLMSIAN

SEQ ID NO: 94683 - protein, 27 aa, Artificial Sequence
  Cyclic GFR-binding peptide
NAISMLYFNDKQQIILKKYRDENKNVV

SEQ ID NO: 94684 - protein, 27 aa, Artificial Sequence
  Cyclic GFR-binding peptide
NAISMLYFDNGRVLLLKKYRDENKNVV

SEQ ID NO: 94685 - protein, 27 aa, Artificial Sequence
  Cyclic GFR-binding peptide
DENKNVVEYKFKVVNKNEDLYLISIPE

SEQ ID NO: 94686 - protein, 27 aa, Artificial Sequence
  Cyclic GFR-binding peptide
DENKNVVPIKGYVKPTRGVFYLINIPS

SEQ ID NO: 94687 - protein, 27 aa, Artificial Sequence
  Cyclic GFR-binding peptide
DENKNVVEYKFKLLVRGNDLYLMSIPE

SEQ ID NO: 94688 - protein, 27 aa, Artificial Sequence
  Cyclic GFR-binding peptide
DENKNVVYHYKLVVNKNEDKYLISIPS

SEQ ID NO: 94689 - protein, 27 aa, Artificial Sequence
  Cyclic GFR-binding peptide
DENKNVVRHKRLLLVRGNDYYLMSTAS

SEQ ID NO: 94690 - protein, 27 aa, Artificial Sequence
  Cyclic GFR-binding peptide
DENKNVVYHYKLLLVRGNDKYLMSIPS

SEQ ID NO: 94691 - protein, 27 aa, Artificial Sequence
  Cyclic GFR-binding peptide
DENKNVVRHKRLVVNKNEDYYLISTAS

SEQ ID NO: 94692 - protein, 27 aa, Artificial Sequence
  Cyclic GFR-binding peptide
DENKNVVRYKKLVVNKNEDFYLISIAN

SEQ ID NO: 94693 - protein, 27 aa, Artificial Sequence
  Cyclic GFR-binding peptide
DENKNVVPIKGYVVNKNEDFYLINIPS

SEQ ID NO: 94694 - protein, 27 aa, Artificial Sequence
  Cyclic GFR-binding peptide
DENKNVVPIKGYIKPTKGIFYLINIPS

SEQ ID NO: 94695 - protein, 27 aa, Artificial Sequence
  Cyclic GFR-binding peptide
DENKNVVRHKRLYTVVGKDYYLISTAS

SEQ ID NO: 94696 - protein, 27 aa, Artificial Sequence
  Cyclic GFR-binding peptide
DENKNVVEYKFKVVNNASDLYLISIPE

SEQ ID NO: 94697 - protein, 27 aa, Artificial Sequence
  Cyclic GFR-binding peptide
DENKNVVRHKRLIIQQKDNYYLMSTAS

SEQ ID NO: 94698 - protein, 27 aa, Artificial Sequence
  Cyclic GFR-binding peptide
DENKNVVEYKFKIIQQKDNLYLMSIPE

SEQ ID NO: 94699 - protein, 27 aa, Artificial Sequence
  Cyclic GFR-binding peptide
DENKNVVPIKGYVKPKRGVFYLINIPS

SEQ ID NO: 94700 - protein, 27 aa, Artificial Sequence
  Cyclic GFR-binding peptide
DENKNVVRHKRLVVNNASDYYLISTAS

SEQ ID NO: 94701 - protein, 27 aa, Artificial Sequence
  Cyclic GFR-binding peptide
DENKNVVYHYKLVVNNASDKYLISIPS

SEQ ID NO: 94702 - protein, 27 aa, Artificial Sequence
  Cyclic GFR-binding peptide
DENKNVVYHYKLIIQQKDNKYLMSIPS

SEQ ID NO: 94703 - protein, 27 aa, Artificial Sequence
  Cyclic GFR-binding peptide
DENKNVVRHKRLVVNNAADYYLISTAS

SEQ ID NO: 94704 - protein, 27 aa, Artificial Sequence
  Cyclic GFR-binding peptide
EPISILYLDENKNVVKFKYEDENKNVV

SEQ ID NO: 94705 - protein, 27 aa, Artificial Sequence
  Cyclic GFR-binding peptide
SPINILYFVGRTPKVYGKIPDENKNVV

SEQ ID NO: 94706 - protein, 27 aa, Artificial Sequence
  Cyclic GFR-binding peptide
EPISMLYLDNGRVLLKFKYEDENKNVV

SEQ ID NO: 94707 - protein, 27 aa, Artificial Sequence
  Cyclic GFR-binding peptide
SPISILYKDENKNVVLKYHYDENKNVV

SEQ ID NO: 94708 - protein, 27 aa, Artificial Sequence
  Cyclic GFR-binding peptide
SATSMLYYDNGRVLLLRKHRDENKNVV

SEQ ID NO: 94709 - protein, 27 aa, Artificial Sequence
  Cyclic GFR-binding peptide
SPISMLYKDNGRVLLLKYHYDENKNVV

SEQ ID NO: 94710 - protein, 27 aa, Artificial Sequence
  Cyclic GFR-binding peptide
SATSILYYDENKNVVLRKHRDENKNVV

SEQ ID NO: 94711 - protein, 27 aa, Artificial Sequence
  Cyclic GFR-binding peptide
NAISILYFDENKNVVLKKYRDENKNVV

SEQ ID NO: 94712 - protein, 27 aa, Artificial Sequence
  Cyclic GFR-binding peptide
SPINILYFDENKNVVYGKIPDENKNVV

SEQ ID NO: 94713 - protein, 27 aa, Artificial Sequence
  Cyclic GFR-binding peptide
SPINILYFIGKTPKIYGKIPDENKNVV

SEQ ID NO: 94714 - protein, 27 aa, Artificial Sequence
  Cyclic GFR-binding peptide
SATSILYYDKGVVTYLRKHRDENKNVV

SEQ ID NO: 94715 - protein, 27 aa, Artificial Sequence
  Cyclic GFR-binding peptide
EPISILYLDSANNVVKFKYEDENKNVV

SEQ ID NO: 94716 - protein, 27 aa, Artificial Sequence
  Cyclic GFR-binding peptide
SATSMLYYNDKQQIILRKHRDENKNVV

SEQ ID NO: 94717 - protein, 27 aa, Artificial Sequence
  Cyclic GFR-binding peptide
EPISMLYLNDKQQIIKFKYEDENKNVV

SEQ ID NO: 94718 - protein, 27 aa, Artificial Sequence
  Cyclic GFR-binding peptide
SPINILYFVGRKPKVYGKIPDENKNVV

SEQ ID NO: 94719 - protein, 27 aa, Artificial Sequence
  Cyclic GFR-binding peptide
SATSILYYDSANNVVLRKHRDENKNVV

SEQ ID NO: 94720 - protein, 27 aa, Artificial Sequence
  Cyclic GFR-binding peptide
SPISILYKDSANNVVLKYHYDENKNVV

SEQ ID NO: 94721 - protein, 27 aa, Artificial Sequence
  Cyclic GFR-binding peptide
SPISMLYKNDKQQIILKYHYDENKNVV

SEQ ID NO: 94722 - protein, 27 aa, Artificial Sequence
  Cyclic GFR-binding peptide
SATSILYYDAANNVVLRKHRDENKNVV

SEQ ID NO: 94723 - protein, 27 aa, Artificial Sequence
  Cyclic GFR-binding peptide
DENKNVVSMEGIIIQQKDNMIQMTINS

SEQ ID NO: 94724 - protein, 27 aa, Artificial Sequence
  Cyclic GFR-binding peptide
DENKNVVSMEGLVKPKRGVMIQITINS

SEQ ID NO: 94725 - protein, 27 aa, Artificial Sequence
  Cyclic GFR-binding peptide
DENKNVVSMEGLVVNNASDMIQITINS

SEQ ID NO: 94726 - protein, 27 aa, Artificial Sequence
  Cyclic GFR-binding peptide
DENKNVVSMEGILLVRGNDMIQMTINS

SEQ ID NO: 94727 - protein, 27 aa, Artificial Sequence
  Cyclic GFR-binding peptide
DENKNVVSMEGLIKPTKGIMIQITINS

SEQ ID NO: 94728 - protein, 27 aa, Artificial Sequence
  Cyclic GFR-binding peptide
DENKNVVSMEGLIVNSSDDMIQVTINS

SEQ ID NO: 94729 - protein, 27 aa, Artificial Sequence
  Cyclic GFR-binding peptide
DENKNVVSMEGIVVNNASDMIQITINS

SEQ ID NO: 94730 - protein, 27 aa, Artificial Sequence
  Cyclic GFR-binding peptide
DENKNVVSMEGLVVNNAADMIQITINS

SEQ ID NO: 94731 - protein, 27 aa, Artificial Sequence
  Cyclic GFR-binding peptide
DENKNVVSMEGLLLVRGNDMIQMTINS

SEQ ID NO: 94732 - protein, 27 aa, Artificial Sequence
  Cyclic GFR-binding peptide
DENKNVVSMEGLIIQQKDNMIQMTINS

SEQ ID NO: 94733 - protein, 27 aa, Artificial Sequence
  Cyclic GFR-binding peptide
DENKNVVSMEGIVVNNAADMIQITINS

SEQ ID NO: 94734 - protein, 27 aa, Artificial Sequence
  Cyclic GFR-binding peptide
DENKNVVSMEGLVKPTRGVMIQITINS

SEQ ID NO: 94735 - protein, 27 aa, Artificial Sequence
  Cyclic GFR-binding peptide
SNITMQIMNDKQQIIIGEMSDENKNVV

SEQ ID NO: 94736 - protein, 27 aa, Artificial Sequence
  Cyclic GFR-binding peptide
SNITIQIMVGRKPKVLGEMSDENKNVV

SEQ ID NO: 94737 - protein, 27 aa, Artificial Sequence
  Cyclic GFR-binding peptide
SNITIQIMDSANNVVLGEMSDENKNVV

SEQ ID NO: 94738 - protein, 27 aa, Artificial Sequence
  Cyclic GFR-binding peptide
SNITMQIMDNGRVLLIGEMSDENKNVV

SEQ ID NO: 94739 - protein, 27 aa, Artificial Sequence
  Cyclic GFR-binding peptide
SNITIQIMIGKTPKILGEMSDENKNVV

SEQ ID NO: 94740 - protein, 27 aa, Artificial Sequence
  Cyclic GFR-binding peptide
SNITVQIMDDSSNVILGEMSDENKNVV

SEQ ID NO: 94741 - protein, 27 aa, Artificial Sequence
  Cyclic GFR-binding peptide
SNITIQIMDSANNVVIGEMSDENKNVV

SEQ ID NO: 94742 - protein, 27 aa, Artificial Sequence
  Cyclic GFR-binding peptide
SNITIQIMDAANNVVLGEMSDENKNVV

SEQ ID NO: 94743 - protein, 27 aa, Artificial Sequence
  Cyclic GFR-binding peptide
SNITMQIMDNGRVLLLGEMSDENKNVV

SEQ ID NO: 94744 - protein, 27 aa, Artificial Sequence
  Cyclic GFR-binding peptide
SNITMQIMNDKQQIILGEMSDENKNVV

SEQ ID NO: 94745 - protein, 27 aa, Artificial Sequence
  Cyclic GFR-binding peptide
SNITIQIMDAANNVVIGEMSDENKNVV

SEQ ID NO: 94746 - protein, 27 aa, Artificial Sequence
  Cyclic GFR-binding peptide
SNITIQIMVGRTPKVLGEMSDENKNVV

SEQ ID NO: 94747 - protein, 27 aa, Artificial Sequence
  Cyclic GFR-binding peptide
DENKNVVQYNKLVVNKNEDLYLISIAS

SEQ ID NO: 94748 - protein, 27 aa, Artificial Sequence
  Cyclic GFR-binding peptide
DENKNVVQYNKLVVNNAADLYLISIAS

SEQ ID NO: 94749 - protein, 27 aa, Artificial Sequence
  Cyclic GFR-binding peptide
DENKNVVQYNKLIIQQKDNLYLMSIAS

SEQ ID NO: 94750 - protein, 27 aa, Artificial Sequence
  Cyclic GFR-binding peptide
DENKNVVQYNKLLLVRGNDLYLMSIAS

SEQ ID NO: 94751 - protein, 27 aa, Artificial Sequence
  Cyclic GFR-binding peptide
DENKNVVQYNKLYTVVGKDLYLISIAS

SEQ ID NO: 94752 - protein, 27 aa, Artificial Sequence
  Cyclic GFR-binding peptide
SAISILYLDENKNVVLKNYQDENKNVV

SEQ ID NO: 94753 - protein, 27 aa, Artificial Sequence
  Cyclic GFR-binding peptide
SAISILYLDAANNVVLKNYQDENKNVV

SEQ ID NO: 94754 - protein, 27 aa, Artificial Sequence
  Cyclic GFR-binding peptide
SAISMLYLNDKQQIILKNYQDENKNVV

SEQ ID NO: 94755 - protein, 27 aa, Artificial Sequence
  Cyclic GFR-binding peptide
SAISMLYLDNGRVLLLKNYQDENKNVV

SEQ ID NO: 94756 - protein, 27 aa, Artificial Sequence
  Cyclic GFR-binding peptide
SAISILYLDKGVVTYLKNYQDENKNVV

SEQ ID NO: 94757 - protein, 27 aa, Artificial Sequence
  Cyclic GFR-binding peptide
DEYDKVVRYKKLIKPTKGIFYLISIAN

SEQ ID NO: 94758 - protein, 29 aa, Artificial Sequence
  Cyclic GFR-binding peptide
DEYDKVVRHKRLFIPKKRVIEYYLVSTAS

SEQ ID NO: 94759 - protein, 27 aa, Artificial Sequence
  Cyclic GFR-binding peptide
DEYDKVVYHYKLVVKDYEDKYLMSIPS

SEQ ID NO: 94760 - protein, 27 aa, Artificial Sequence
  Cyclic GFR-binding peptide
DEYDKVVQYNKLIVNNSSDLYLVSIAS

SEQ ID NO: 94761 - protein, 27 aa, Artificial Sequence
  Cyclic GFR-binding peptide
DEYDKVVRYKKLVVKDYEDFYLMSIAN

SEQ ID NO: 94762 - protein, 27 aa, Artificial Sequence
  Cyclic GFR-binding peptide
DEYDKVVRYKKLVKPTRGVFYLISIAN

SEQ ID NO: 94763 - protein, 27 aa, Artificial Sequence
  Cyclic GFR-binding peptide
DEYDKVVRHKRLVVKENEDYYLMSTAS

SEQ ID NO: 94764 - protein, 27 aa, Artificial Sequence
  Cyclic GFR-binding peptide
DEYDKVVYHYKLIKPTKGIKYLISIPS

SEQ ID NO: 94765 - protein, 29 aa, Artificial Sequence
  Cyclic GFR-binding peptide
DEYDKVVRYKKLFIPKKRVIEFYLVSIAN

SEQ ID NO: 94766 - protein, 27 aa, Artificial Sequence
  Cyclic GFR-binding peptide
DEYDKVVYHYKLVVKENEDKYLMSIPS

SEQ ID NO: 94767 - protein, 27 aa, Artificial Sequence
  Cyclic GFR-binding peptide
DEYDKVVRHKRLVKPKRGVYYLISTAS

SEQ ID NO: 94768 - protein, 27 aa, Artificial Sequence
  Cyclic GFR-binding peptide
DEYDKVVYHYKLVKPKRGVKYLISIPS

SEQ ID NO: 94769 - protein, 29 aa, Artificial Sequence
  Cyclic GFR-binding peptide
DEYDKVVQYNKLFIPKKRVIELYLVSIAS

SEQ ID NO: 94770 - protein, 27 aa, Artificial Sequence
  Cyclic GFR-binding peptide
DEYDKVVQYNKLVKPTRGVLYLISIAS

SEQ ID NO: 94771 - protein, 27 aa, Artificial Sequence
  Cyclic GFR-binding peptide
DEYDKVVRYKKLVVKENEDFYLMSIAN

SEQ ID NO: 94772 - protein, 27 aa, Artificial Sequence
  Cyclic GFR-binding peptide
DEYDKVVQYNKLTPVGMDDLYLVSIAS

SEQ ID NO: 94773 - protein, 27 aa, Artificial Sequence
  Cyclic GFR-binding peptide
DEYDKVVRYKKLTPVGMDDFYLVSIAN

SEQ ID NO: 94774 - protein, 27 aa, Artificial Sequence
  Cyclic GFR-binding peptide
DEYDKVVRYKKLVKPKRGVFYLISIAN

SEQ ID NO: 94775 - protein, 27 aa, Artificial Sequence
  Cyclic GFR-binding peptide
DEYDKVVQYNKLVVKENEDLYLMSIAS

SEQ ID NO: 94776 - protein, 27 aa, Artificial Sequence
  Cyclic GFR-binding peptide
DEYDKVVYHYKLIVNSSDDKYLVSIPS

SEQ ID NO: 94777 - protein, 27 aa, Artificial Sequence
  Cyclic GFR-binding peptide
DEYDKVVQYNKLVKPKRGVLYLISIAS

SEQ ID NO: 94778 - protein, 27 aa, Artificial Sequence
  Cyclic GFR-binding peptide
DEYDKVVRYKKLIVNNSSDFYLVSIAN

SEQ ID NO: 94779 - protein, 27 aa, Artificial Sequence
  Cyclic GFR-binding peptide
DEYDKVVRYKKLIVNSSDDFYLVSIAN

SEQ ID NO: 94780 - protein, 27 aa, Artificial Sequence
  Cyclic GFR-binding peptide
DEYDKVVRHKRLVKPTRGVYYLISTAS

SEQ ID NO: 94781 - protein, 29 aa, Artificial Sequence
  Cyclic GFR-binding peptide
DEYDKVVYHYKLFIPKKRVIEKYLVSIPS

SEQ ID NO: 94782 - protein, 27 aa, Artificial Sequence
  Cyclic GFR-binding peptide
DEYDKVVRHKRLIKPTKGIYYLISTAS

SEQ ID NO: 94783 - protein, 27 aa, Artificial Sequence
  Cyclic GFR-binding peptide
DEYDKVVRHKRLTPVGMDDYYLVSTAS

SEQ ID NO: 94784 - protein, 27 aa, Artificial Sequence
  Cyclic GFR-binding peptide
DEYDKVVYHYKLTPVGMDDKYLVSIPS

SEQ ID NO: 94785 - protein, 27 aa, Artificial Sequence
  Cyclic GFR-binding peptide
DEYDKVVYHYKLIVNNSSDKYLVSIPS

SEQ ID NO: 94786 - protein, 27 aa, Artificial Sequence
  Cyclic GFR-binding peptide
DEYDKVVRHKRLIVNNSSDYYLVSTAS

SEQ ID NO: 94787 - protein, 27 aa, Artificial Sequence
  Cyclic GFR-binding peptide
DEYDKVVYHYKLVKPTRGVKYLISIPS

SEQ ID NO: 94788 - protein, 27 aa, Artificial Sequence
  Cyclic GFR-binding peptide
DEYDKVVRHKRLIVNSSDDYYLVSTAS

SEQ ID NO: 94789 - protein, 27 aa, Artificial Sequence
  Cyclic GFR-binding peptide
DEYDKVVRHKRLVVKDYEDYYLMSTAS

SEQ ID NO: 94790 - protein, 27 aa, Artificial Sequence
  Cyclic GFR-binding peptide
DEYDKVVQYNKLIKPTKGILYLISIAS

SEQ ID NO: 94791 - protein, 27 aa, Artificial Sequence
  Cyclic GFR-binding peptide
DEYDKVVQYNKLVVKDYEDLYLMSIAS

SEQ ID NO: 94792 - protein, 27 aa, Artificial Sequence
  Cyclic GFR-binding peptide
DEYDKVVQYNKLIVNSSDDLYLVSIAS

SEQ ID NO: 94793 - protein, 27 aa, Artificial Sequence
  Cyclic GFR-binding peptide
NAISILYFIGKTPKILKKYRDEYDKVV

SEQ ID NO: 94794 - protein, 29 aa, Artificial Sequence
  Cyclic GFR-binding peptide
SATSVLYYEIVRKKPIFLRKHRDEYDKVV

SEQ ID NO: 94795 - protein, 27 aa, Artificial Sequence
  Cyclic GFR-binding peptide
SPISMLYKDEYDKVVLKYHYDEYDKVV

SEQ ID NO: 94796 - protein, 27 aa, Artificial Sequence
  Cyclic GFR-binding peptide
SAISVLYLDSSNNVILKNYQDEYDKVV

SEQ ID NO: 94797 - protein, 27 aa, Artificial Sequence
  Cyclic GFR-binding peptide
NAISMLYFDEYDKVVLKKYRDEYDKVV

SEQ ID NO: 94798 - protein, 27 aa, Artificial Sequence
  Cyclic GFR-binding peptide
NAISILYFVGRTPKVLKKYRDEYDKVV

SEQ ID NO: 94799 - protein, 27 aa, Artificial Sequence
  Cyclic GFR-binding peptide
SATSMLYYDENEKVVLRKHRDEYDKVV

SEQ ID NO: 94800 - protein, 27 aa, Artificial Sequence
  Cyclic GFR-binding peptide
SPISILYKIGKTPKILKYHYDEYDKVV

SEQ ID NO: 94801 - protein, 29 aa, Artificial Sequence
  Cyclic GFR-binding peptide
NAISVLYFEIVRKKPIFLKKYRDEYDKVV

SEQ ID NO: 94802 - protein, 27 aa, Artificial Sequence
  Cyclic GFR-binding peptide
SPISMLYKDENEKVVLKYHYDEYDKVV

SEQ ID NO: 94803 - protein, 27 aa, Artificial Sequence
  Cyclic GFR-binding peptide
SATSILYYVGRKPKVLRKHRDEYDKVV

SEQ ID NO: 94804 - protein, 27 aa, Artificial Sequence
  Cyclic GFR-binding peptide
SPISILYKVGRKPKVLKYHYDEYDKVV

SEQ ID NO: 94805 - protein, 29 aa, Artificial Sequence
  Cyclic GFR-binding peptide
SAISVLYLEIVRKKPIFLKNYQDEYDKVV

SEQ ID NO: 94806 - protein, 27 aa, Artificial Sequence
  Cyclic GFR-binding peptide
SAISILYLVGRTPKVLKNYQDEYDKVV

SEQ ID NO: 94807 - protein, 27 aa, Artificial Sequence
  Cyclic GFR-binding peptide
NAISMLYFDENEKVVLKKYRDEYDKVV

SEQ ID NO: 94808 - protein, 27 aa, Artificial Sequence
  Cyclic GFR-binding peptide
SAISVLYLDDMGVPTLKNYQDEYDKVV

SEQ ID NO: 94809 - protein, 27 aa, Artificial Sequence
  Cyclic GFR-binding peptide
NAISVLYFDDMGVPTLKKYRDEYDKVV

SEQ ID NO: 94810 - protein, 27 aa, Artificial Sequence
  Cyclic GFR-binding peptide
NAISILYFVGRKPKVLKKYRDEYDKVV

SEQ ID NO: 94811 - protein, 27 aa, Artificial Sequence
  Cyclic GFR-binding peptide
SAISMLYLDENEKVVLKNYQDEYDKVV

SEQ ID NO: 94812 - protein, 27 aa, Artificial Sequence
  Cyclic GFR-binding peptide
SPISVLYKDDSSNVILKYHYDEYDKVV

SEQ ID NO: 94813 - protein, 27 aa, Artificial Sequence
  Cyclic GFR-binding peptide
SAISILYLVGRKPKVLKNYQDEYDKVV

SEQ ID NO: 94814 - protein, 27 aa, Artificial Sequence
  Cyclic GFR-binding peptide
NAISVLYFDSSNNVILKKYRDEYDKVV

SEQ ID NO: 94815 - protein, 27 aa, Artificial Sequence
  Cyclic GFR-binding peptide
NAISVLYFDDSSNVILKKYRDEYDKVV

SEQ ID NO: 94816 - protein, 27 aa, Artificial Sequence
  Cyclic GFR-binding peptide
SATSILYYVGRTPKVLRKHRDEYDKVV

SEQ ID NO: 94817 - protein, 29 aa, Artificial Sequence
  Cyclic GFR-binding peptide
SPISVLYKEIVRKKPIFLKYHYDEYDKVV

SEQ ID NO: 94818 - protein, 27 aa, Artificial Sequence
  Cyclic GFR-binding peptide
SATSILYYIGKTPKILRKHRDEYDKVV

SEQ ID NO: 94819 - protein, 27 aa, Artificial Sequence
  Cyclic GFR-binding peptide
SATSVLYYDDMGVPTLRKHRDEYDKVV

SEQ ID NO: 94820 - protein, 27 aa, Artificial Sequence
  Cyclic GFR-binding peptide
SPISVLYKDDMGVPTLKYHYDEYDKVV

SEQ ID NO: 94821 - protein, 27 aa, Artificial Sequence
  Cyclic GFR-binding peptide
SPISVLYKDSSNNVILKYHYDEYDKVV

SEQ ID NO: 94822 - protein, 27 aa, Artificial Sequence
  Cyclic GFR-binding peptide
SATSVLYYDSSNNVILRKHRDEYDKVV

SEQ ID NO: 94823 - protein, 27 aa, Artificial Sequence
  Cyclic GFR-binding peptide
SPISILYKVGRTPKVLKYHYDEYDKVV

SEQ ID NO: 94824 - protein, 27 aa, Artificial Sequence
  Cyclic GFR-binding peptide
SATSVLYYDDSSNVILRKHRDEYDKVV

SEQ ID NO: 94825 - protein, 27 aa, Artificial Sequence
  Cyclic GFR-binding peptide
SATSMLYYDEYDKVVLRKHRDEYDKVV

SEQ ID NO: 94826 - protein, 27 aa, Artificial Sequence
  Cyclic GFR-binding peptide
SAISILYLIGKTPKILKNYQDEYDKVV

SEQ ID NO: 94827 - protein, 27 aa, Artificial Sequence
  Cyclic GFR-binding peptide
SAISVLYLDDSSNVILKNYQDEYDKVV

SEQ ID NO: 94828 - protein, 27 aa, Artificial Sequence
  Cyclic GFR-binding peptide
DEYDKVVNSLQEVVKDYEDYYLMTLPE

SEQ ID NO: 94829 - protein, 27 aa, Artificial Sequence
  Cyclic GFR-binding peptide
DEYDKVVNSLQEIKPTKGIYYVIPLPE

SEQ ID NO: 94830 - protein, 27 aa, Artificial Sequence
  Cyclic GFR-binding peptide
DEYDKVVNSLQEVKPKRGVYYLITLPE

SEQ ID NO: 94831 - protein, 27 aa, Artificial Sequence
  Cyclic GFR-binding peptide
DEYDKVVNSLQEVKPTRGVYYVIPLPE

SEQ ID NO: 94832 - protein, 27 aa, Artificial Sequence
  Cyclic GFR-binding peptide
DEYDKVVEYQKYIVNSSDDIFLVSIPS

SEQ ID NO: 94833 - protein, 27 aa, Artificial Sequence
  Cyclic GFR-binding peptide
DEYDKVVEYQKYVKPTRGVIFLISIPS

SEQ ID NO: 94834 - protein, 27 aa, Artificial Sequence
  Cyclic GFR-binding peptide
DEYDKVVNSLQEVVKENEDYYLMTLPE

SEQ ID NO: 94835 - protein, 27 aa, Artificial Sequence
  Cyclic GFR-binding peptide
DEYDKVVNSLQEVVNNASDYYLITLPE

SEQ ID NO: 94836 - protein, 27 aa, Artificial Sequence
  Cyclic GFR-binding peptide
DEYDKVVNSLQEVKPKRGVYYVIPLPE

SEQ ID NO: 94837 - protein, 27 aa, Artificial Sequence
  Cyclic GFR-binding peptide
DEYDKVVNSLQEVVNNASDYYVIPLPE

SEQ ID NO: 94838 - protein, 27 aa, Artificial Sequence
  Cyclic GFR-binding peptide
DEYDKVVNSLQEVKPTRGVYYLITLPE

SEQ ID NO: 94839 - protein, 27 aa, Artificial Sequence
  Cyclic GFR-binding peptide
DEYDKVVEYQKYIKPTKGIIFLISIPS

SEQ ID NO: 94840 - protein, 27 aa, Artificial Sequence
  Cyclic GFR-binding peptide
DEYDKVVEYQKYVVNNASDIFLISIPS

SEQ ID NO: 94841 - protein, 27 aa, Artificial Sequence
  Cyclic GFR-binding peptide
DEYDKVVNSLQEIVNSSDDYYVVPLPE

SEQ ID NO: 94842 - protein, 27 aa, Artificial Sequence
  Cyclic GFR-binding peptide
DEYDKVVNSLQEVVKDYEDYYVMPLPE

SEQ ID NO: 94843 - protein, 27 aa, Artificial Sequence
  Cyclic GFR-binding peptide
DEYDKVVEYQKYVVKENEDIFLMSIPS

SEQ ID NO: 94844 - protein, 27 aa, Artificial Sequence
  Cyclic GFR-binding peptide
DEYDKVVNSLQEVVKENEDYYVMPLPE

SEQ ID NO: 94845 - protein, 27 aa, Artificial Sequence
  Cyclic GFR-binding peptide
DEYDKVVEYQKYVVKDYEDIFLMSIPS

SEQ ID NO: 94846 - protein, 27 aa, Artificial Sequence
  Cyclic GFR-binding peptide
DEYDKVVQYNKLVVNNASDLYLISIAS

SEQ ID NO: 94847 - protein, 27 aa, Artificial Sequence
  Cyclic GFR-binding peptide
DEYDKVVNSLQEIKPTKGIYYLITLPE

SEQ ID NO: 94848 - protein, 27 aa, Artificial Sequence
  Cyclic GFR-binding peptide
DEYDKVVEYQKYVKPKRGVIFLISIPS

SEQ ID NO: 94849 - protein, 27 aa, Artificial Sequence
  Cyclic GFR-binding peptide
DEYDKVVRYKKLVVNNASDFYLISIAN

SEQ ID NO: 94850 - protein, 27 aa, Artificial Sequence
  Cyclic GFR-binding peptide
DEYDKVVNSLQEIVNSSDDYYLVTLPE

SEQ ID NO: 94851 - protein, 27 aa, Artificial Sequence
  Cyclic GFR-binding peptide
EPLTMLYYDEYDKVVEQLSNDEYDKVV

SEQ ID NO: 94852 - protein, 27 aa, Artificial Sequence
  Cyclic GFR-binding peptide
EPLPIVYYIGKTPKIEQLSNDEYDKVV

SEQ ID NO: 94853 - protein, 27 aa, Artificial Sequence
  Cyclic GFR-binding peptide
EPLTILYYVGRKPKVEQLSNDEYDKVV

SEQ ID NO: 94854 - protein, 27 aa, Artificial Sequence
  Cyclic GFR-binding peptide
EPLPIVYYVGRTPKVEQLSNDEYDKVV

SEQ ID NO: 94855 - protein, 27 aa, Artificial Sequence
  Cyclic GFR-binding peptide
SPISVLFIDDSSNVIYKQYEDEYDKVV

SEQ ID NO: 94856 - protein, 27 aa, Artificial Sequence
  Cyclic GFR-binding peptide
SPISILFIVGRTPKVYKQYEDEYDKVV

SEQ ID NO: 94857 - protein, 27 aa, Artificial Sequence
  Cyclic GFR-binding peptide
EPLTMLYYDENEKVVEQLSNDEYDKVV

SEQ ID NO: 94858 - protein, 27 aa, Artificial Sequence
  Cyclic GFR-binding peptide
EPLTILYYDSANNVVEQLSNDEYDKVV

SEQ ID NO: 94859 - protein, 27 aa, Artificial Sequence
  Cyclic GFR-binding peptide
EPLPIVYYVGRKPKVEQLSNDEYDKVV

SEQ ID NO: 94860 - protein, 27 aa, Artificial Sequence
  Cyclic GFR-binding peptide
EPLPIVYYDSANNVVEQLSNDEYDKVV

SEQ ID NO: 94861 - protein, 27 aa, Artificial Sequence
  Cyclic GFR-binding peptide
EPLTILYYVGRTPKVEQLSNDEYDKVV

SEQ ID NO: 94862 - protein, 27 aa, Artificial Sequence
  Cyclic GFR-binding peptide
SPISILFIIGKTPKIYKQYEDEYDKVV

SEQ ID NO: 94863 - protein, 27 aa, Artificial Sequence
  Cyclic GFR-binding peptide
SPISILFIDSANNVVYKQYEDEYDKVV

SEQ ID NO: 94864 - protein, 27 aa, Artificial Sequence
  Cyclic GFR-binding peptide
EPLPVVYYDDSSNVIEQLSNDEYDKVV

SEQ ID NO: 94865 - protein, 27 aa, Artificial Sequence
  Cyclic GFR-binding peptide
EPLPMVYYDEYDKVVEQLSNDEYDKVV

SEQ ID NO: 94866 - protein, 27 aa, Artificial Sequence
  Cyclic GFR-binding peptide
SPISMLFIDENEKVVYKQYEDEYDKVV

SEQ ID NO: 94867 - protein, 27 aa, Artificial Sequence
  Cyclic GFR-binding peptide
EPLPMVYYDENEKVVEQLSNDEYDKVV

SEQ ID NO: 94868 - protein, 27 aa, Artificial Sequence
  Cyclic GFR-binding peptide
SPISMLFIDEYDKVVYKQYEDEYDKVV

SEQ ID NO: 94869 - protein, 27 aa, Artificial Sequence
  Cyclic GFR-binding peptide
SAISILYLDSANNVVLKNYQDEYDKVV

SEQ ID NO: 94870 - protein, 27 aa, Artificial Sequence
  Cyclic GFR-binding peptide
EPLTILYYIGKTPKIEQLSNDEYDKVV

SEQ ID NO: 94871 - protein, 27 aa, Artificial Sequence
  Cyclic GFR-binding peptide
SPISILFIVGRKPKVYKQYEDEYDKVV

SEQ ID NO: 94872 - protein, 27 aa, Artificial Sequence
  Cyclic GFR-binding peptide
NAISILYFDSANNVVLKKYRDEYDKVV

SEQ ID NO: 94873 - protein, 27 aa, Artificial Sequence
  Cyclic GFR-binding peptide
EPLTVLYYDDSSNVIEQLSNDEYDKVV

SEQ ID NO: 94874 - protein, 29 aa, Artificial Sequence
  Cyclic GFR-binding peptide
DEYDKVVVTAKKLKPKKRVYEIKRVQVPR

SEQ ID NO: 94875 - protein, 29 aa, Artificial Sequence
  Cyclic GFR-binding peptide
DEYDKVVVQVEKLKPKKRVYEVKAVKVSR

SEQ ID NO: 94876 - protein, 29 aa, Artificial Sequence
  Cyclic GFR-binding peptide
DEYDKVVVQVEKFIPKKRVIEVKAVKVSR

SEQ ID NO: 94877 - protein, 29 aa, Artificial Sequence
  Cyclic GFR-binding peptide
DEYDKVVVQVEKHQGQHPKIRVKAMKVSR

SEQ ID NO: 94878 - protein, 29 aa, Artificial Sequence
  Cyclic GFR-binding peptide
DEYDKVVVTAKKHQGQHPKIRIKRMQVPR

SEQ ID NO: 94879 - protein, 29 aa, Artificial Sequence
  Cyclic GFR-binding peptide
DEYDKVVSMEGLLKPKKRVYEMIQVTINS

SEQ ID NO: 94880 - protein, 29 aa, Artificial Sequence
  Cyclic GFR-binding peptide
DEYDKVVSMEGIFIPKKRVIEMIQVTINS

SEQ ID NO: 94881 - protein, 29 aa, Artificial Sequence
  Cyclic GFR-binding peptide
DEYDKVVSMEGLHQGQHPKIRMIQMTINS

SEQ ID NO: 94882 - protein, 29 aa, Artificial Sequence
  Cyclic GFR-binding peptide
DEYDKVVSMEGILKPKKRVYEMIQVTINS

SEQ ID NO: 94883 - protein, 29 aa, Artificial Sequence
  Cyclic GFR-binding peptide
DEYDKVVSMEGLFIPKKRVIEMIQVTINS

SEQ ID NO: 94884 - protein, 29 aa, Artificial Sequence
  Cyclic GFR-binding peptide
DEYDKVVVTAKKFIPKKRVIEIKRVQVPR

SEQ ID NO: 94885 - protein, 29 aa, Artificial Sequence
  Cyclic GFR-binding peptide
DEYDKVVSMEGIHQGQHPKIRMIQMTINS

SEQ ID NO: 94886 - protein, 29 aa, Artificial Sequence
  Cyclic GFR-binding peptide
RPVQVRKIEYVRKKPKLKKATVDEYDKVV

SEQ ID NO: 94887 - protein, 29 aa, Artificial Sequence
  Cyclic GFR-binding peptide
RSVKVAKVEYVRKKPKLKEVQVDEYDKVV

SEQ ID NO: 94888 - protein, 29 aa, Artificial Sequence
  Cyclic GFR-binding peptide
RSVKVAKVEIVRKKPIFKEVQVDEYDKVV

SEQ ID NO: 94889 - protein, 29 aa, Artificial Sequence
  Cyclic GFR-binding peptide
RSVKMAKVRIKPHQGQHKEVQVDEYDKVV

SEQ ID NO: 94890 - protein, 29 aa, Artificial Sequence
  Cyclic GFR-binding peptide
RPVQMRKIRIKPHQGQHKKATVDEYDKVV

SEQ ID NO: 94891 - protein, 29 aa, Artificial Sequence
  Cyclic GFR-binding peptide
SNITVQIMEYVRKKPKLLGEMSDEYDKVV

SEQ ID NO: 94892 - protein, 29 aa, Artificial Sequence
  Cyclic GFR-binding peptide
SNITVQIMEIVRKKPIFIGEMSDEYDKVV

SEQ ID NO: 94893 - protein, 29 aa, Artificial Sequence
  Cyclic GFR-binding peptide
SNITMQIMRIKPHQGQHLGEMSDEYDKVV

SEQ ID NO: 94894 - protein, 29 aa, Artificial Sequence
  Cyclic GFR-binding peptide
SNITVQIMEYVRKKPKLIGEMSDEYDKVV

SEQ ID NO: 94895 - protein, 29 aa, Artificial Sequence
  Cyclic GFR-binding peptide
SNITVQIMEIVRKKPIFLGEMSDEYDKVV

SEQ ID NO: 94896 - protein, 29 aa, Artificial Sequence
  Cyclic GFR-binding peptide
RPVQVRKIEIVRKKPIFKKATVDEYDKVV

SEQ ID NO: 94897 - protein, 29 aa, Artificial Sequence
  Cyclic GFR-binding peptide
SNITMQIMRIKPHQGQHIGEMSDEYDKVV

SEQ ID NO: 94898 - protein, 27 aa, Artificial Sequence
  Cyclic GFR-binding peptide
DEYDKVVEYKFKVKPTRGVLYLISIPE

SEQ ID NO: 94899 - protein, 27 aa, Artificial Sequence
  Cyclic GFR-binding peptide
DEYDKVVEYKFKTPVGMDDLYLVSIPE

SEQ ID NO: 94900 - protein, 27 aa, Artificial Sequence
  Cyclic GFR-binding peptide
DEYDKVVEYQKYVKPKRGVIYLISIPS

SEQ ID NO: 94901 - protein, 27 aa, Artificial Sequence
  Cyclic GFR-binding peptide
DEYDKVVEYQKYVVKDYEDIYLMSIPS

SEQ ID NO: 94902 - protein, 27 aa, Artificial Sequence
  Cyclic GFR-binding peptide
DEYDKVVEYKFKIKPTKGILYLISIPE

SEQ ID NO: 94903 - protein, 27 aa, Artificial Sequence
  Cyclic GFR-binding peptide
DEYDKVVYHYKLYTVVGKDKYLISIPS

SEQ ID NO: 94904 - protein, 27 aa, Artificial Sequence
  Cyclic GFR-binding peptide
DEYDKVVRYKKLYTVVGKDFYLISIAN

SEQ ID NO: 94905 - protein, 27 aa, Artificial Sequence
  Cyclic GFR-binding peptide
DEYDKVVEYQKYVVNNAADIYLISIPS

SEQ ID NO: 94906 - protein, 27 aa, Artificial Sequence
  Cyclic GFR-binding peptide
DEYDKVVEYQKYVKPTRGVIYLISIPS

SEQ ID NO: 94907 - protein, 27 aa, Artificial Sequence
  Cyclic GFR-binding peptide
DEYDKVVEYQKYTPVGMDDIYLVSIPS

SEQ ID NO: 94908 - protein, 27 aa, Artificial Sequence
  Cyclic GFR-binding peptide
DEYDKVVEYKFKVVKDYEDLYLMSIPE

SEQ ID NO: 94909 - protein, 27 aa, Artificial Sequence
  Cyclic GFR-binding peptide
DEYDKVVEYKFKVVNNAADLYLISIPE

SEQ ID NO: 94910 - protein, 27 aa, Artificial Sequence
  Cyclic GFR-binding peptide
DEYDKVVEYQKYVVKENEDIYLMSIPS

SEQ ID NO: 94911 - protein, 27 aa, Artificial Sequence
  Cyclic GFR-binding peptide
DEYDKVVEYQKYIKPTKGIIYLISIPS

SEQ ID NO: 94912 - protein, 27 aa, Artificial Sequence
  Cyclic GFR-binding peptide
DEYDKVVRYKKLVVNNAADFYLISIAN

SEQ ID NO: 94913 - protein, 27 aa, Artificial Sequence
  Cyclic GFR-binding peptide
DEYDKVVYHYKLVVNNAADKYLISIPS

SEQ ID NO: 94914 - protein, 27 aa, Artificial Sequence
  Cyclic GFR-binding peptide
DEYDKVVEYKFKIVNNSSDLYLVSIPE

SEQ ID NO: 94915 - protein, 27 aa, Artificial Sequence
  Cyclic GFR-binding peptide
DEYDKVVEYQKYIVNSSDDIYLVSIPS

SEQ ID NO: 94916 - protein, 27 aa, Artificial Sequence
  Cyclic GFR-binding peptide
DEYDKVVEYKFKIVNSSDDLYLVSIPE

SEQ ID NO: 94917 - protein, 27 aa, Artificial Sequence
  Cyclic GFR-binding peptide
DEYDKVVEYKFKVKPKRGVLYLISIPE

SEQ ID NO: 94918 - protein, 27 aa, Artificial Sequence
  Cyclic GFR-binding peptide
DEYDKVVEYQKYYTVVGKDIYLISIPS

SEQ ID NO: 94919 - protein, 27 aa, Artificial Sequence
  Cyclic GFR-binding peptide
DEYDKVVEYKFKVVKENEDLYLMSIPE

SEQ ID NO: 94920 - protein, 27 aa, Artificial Sequence
  Cyclic GFR-binding peptide
DEYDKVVEYQKYIVNNSSDIYLVSIPS

SEQ ID NO: 94921 - protein, 27 aa, Artificial Sequence
  Cyclic GFR-binding peptide
DEYDKVVEYKFKYTVVGKDLYLISIPE

SEQ ID NO: 94922 - protein, 27 aa, Artificial Sequence
  Cyclic GFR-binding peptide
EPISILYLVGRTPKVKFKYEDEYDKVV

SEQ ID NO: 94923 - protein, 27 aa, Artificial Sequence
  Cyclic GFR-binding peptide
EPISVLYLDDMGVPTKFKYEDEYDKVV

SEQ ID NO: 94924 - protein, 27 aa, Artificial Sequence
  Cyclic GFR-binding peptide
SPISILYIVGRKPKVYKQYEDEYDKVV

SEQ ID NO: 94925 - protein, 27 aa, Artificial Sequence
  Cyclic GFR-binding peptide
SPISMLYIDEYDKVVYKQYEDEYDKVV

SEQ ID NO: 94926 - protein, 27 aa, Artificial Sequence
  Cyclic GFR-binding peptide
EPISILYLIGKTPKIKFKYEDEYDKVV

SEQ ID NO: 94927 - protein, 27 aa, Artificial Sequence
  Cyclic GFR-binding peptide
SPISILYKDKGVVTYLKYHYDEYDKVV

SEQ ID NO: 94928 - protein, 27 aa, Artificial Sequence
  Cyclic GFR-binding peptide
NAISILYFDKGVVTYLKKYRDEYDKVV

SEQ ID NO: 94929 - protein, 27 aa, Artificial Sequence
  Cyclic GFR-binding peptide
SPISILYIDAANNVVYKQYEDEYDKVV

SEQ ID NO: 94930 - protein, 27 aa, Artificial Sequence
  Cyclic GFR-binding peptide
SPISILYIVGRTPKVYKQYEDEYDKVV

SEQ ID NO: 94931 - protein, 27 aa, Artificial Sequence
  Cyclic GFR-binding peptide
SPISVLYIDDMGVPTYKQYEDEYDKVV

SEQ ID NO: 94932 - protein, 27 aa, Artificial Sequence
  Cyclic GFR-binding peptide
EPISMLYLDEYDKVVKFKYEDEYDKVV

SEQ ID NO: 94933 - protein, 27 aa, Artificial Sequence
  Cyclic GFR-binding peptide
EPISILYLDAANNVVKFKYEDEYDKVV

SEQ ID NO: 94934 - protein, 27 aa, Artificial Sequence
  Cyclic GFR-binding peptide
SPISMLYIDENEKVVYKQYEDEYDKVV

SEQ ID NO: 94935 - protein, 27 aa, Artificial Sequence
  Cyclic GFR-binding peptide
SPISILYIIGKTPKIYKQYEDEYDKVV

SEQ ID NO: 94936 - protein, 27 aa, Artificial Sequence
  Cyclic GFR-binding peptide
NAISILYFDAANNVVLKKYRDEYDKVV

SEQ ID NO: 94937 - protein, 27 aa, Artificial Sequence
  Cyclic GFR-binding peptide
SPISILYKDAANNVVLKYHYDEYDKVV

SEQ ID NO: 94938 - protein, 27 aa, Artificial Sequence
  Cyclic GFR-binding peptide
EPISVLYLDSSNNVIKFKYEDEYDKVV

SEQ ID NO: 94939 - protein, 27 aa, Artificial Sequence
  Cyclic GFR-binding peptide
SPISVLYIDDSSNVIYKQYEDEYDKVV

SEQ ID NO: 94940 - protein, 27 aa, Artificial Sequence
  Cyclic GFR-binding peptide
EPISVLYLDDSSNVIKFKYEDEYDKVV

SEQ ID NO: 94941 - protein, 27 aa, Artificial Sequence
  Cyclic GFR-binding peptide
EPISILYLVGRKPKVKFKYEDEYDKVV

SEQ ID NO: 94942 - protein, 27 aa, Artificial Sequence
  Cyclic GFR-binding peptide
SPISILYIDKGVVTYYKQYEDEYDKVV

SEQ ID NO: 94943 - protein, 27 aa, Artificial Sequence
  Cyclic GFR-binding peptide
EPISMLYLDENEKVVKFKYEDEYDKVV

SEQ ID NO: 94944 - protein, 27 aa, Artificial Sequence
  Cyclic GFR-binding peptide
SPISVLYIDSSNNVIYKQYEDEYDKVV

SEQ ID NO: 94945 - protein, 27 aa, Artificial Sequence
  Cyclic GFR-binding peptide
EPISILYLDKGVVTYKFKYEDEYDKVV

SEQ ID NO: 94946 - protein, 27 aa, Artificial Sequence
  Cyclic GFR-binding peptide
DEYDKVVPIKGYIIQQKDNFYLMNIPS

SEQ ID NO: 94947 - protein, 27 aa, Artificial Sequence
  Cyclic GFR-binding peptide
DEYDKVVPIKGYVVKDYEDFYLMNIPS

SEQ ID NO: 94948 - protein, 27 aa, Artificial Sequence
  Cyclic GFR-binding peptide
DEYDKVVPIKGYIVNSSDDFYLVNIPS

SEQ ID NO: 94949 - protein, 27 aa, Artificial Sequence
  Cyclic GFR-binding peptide
DEYDKVVPIKGYVVNNAADFYLINIPS

SEQ ID NO: 94950 - protein, 27 aa, Artificial Sequence
  Cyclic GFR-binding peptide
DEYDKVVPIKGYYTVVGKDFYLINIPS

SEQ ID NO: 94951 - protein, 27 aa, Artificial Sequence
  Cyclic GFR-binding peptide
DEYDKVVPIKGYLLVRGNDFYLMNIPS

SEQ ID NO: 94952 - protein, 27 aa, Artificial Sequence
  Cyclic GFR-binding peptide
DEYDKVVPIKGYVVKENEDFYLMNIPS

SEQ ID NO: 94953 - protein, 27 aa, Artificial Sequence
  Cyclic GFR-binding peptide
DEYDKVVPIKGYVVNNASDFYLINIPS

SEQ ID NO: 94954 - protein, 27 aa, Artificial Sequence
  Cyclic GFR-binding peptide
DEYDKVVPIKGYTPVGMDDFYLVNIPS

SEQ ID NO: 94955 - protein, 27 aa, Artificial Sequence
  Cyclic GFR-binding peptide
DEYDKVVPIKGYIVNNSSDFYLVNIPS

SEQ ID NO: 94956 - protein, 27 aa, Artificial Sequence
  Cyclic GFR-binding peptide
SPINMLYFNDKQQIIYGKIPDEYDKVV

SEQ ID NO: 94957 - protein, 27 aa, Artificial Sequence
  Cyclic GFR-binding peptide
SPINMLYFDEYDKVVYGKIPDEYDKVV

SEQ ID NO: 94958 - protein, 27 aa, Artificial Sequence
  Cyclic GFR-binding peptide
SPINVLYFDDSSNVIYGKIPDEYDKVV

SEQ ID NO: 94959 - protein, 27 aa, Artificial Sequence
  Cyclic GFR-binding peptide
SPINILYFDAANNVVYGKIPDEYDKVV

SEQ ID NO: 94960 - protein, 27 aa, Artificial Sequence
  Cyclic GFR-binding peptide
SPINILYFDKGVVTYYGKIPDEYDKVV

SEQ ID NO: 94961 - protein, 27 aa, Artificial Sequence
  Cyclic GFR-binding peptide
SPINMLYFDNGRVLLYGKIPDEYDKVV

SEQ ID NO: 94962 - protein, 27 aa, Artificial Sequence
  Cyclic GFR-binding peptide
SPINMLYFDENEKVVYGKIPDEYDKVV

SEQ ID NO: 94963 - protein, 27 aa, Artificial Sequence
  Cyclic GFR-binding peptide
SPINILYFDSANNVVYGKIPDEYDKVV

SEQ ID NO: 94964 - protein, 27 aa, Artificial Sequence
  Cyclic GFR-binding peptide
SPINVLYFDDMGVPTYGKIPDEYDKVV

SEQ ID NO: 94965 - protein, 27 aa, Artificial Sequence
  Cyclic GFR-binding peptide
SPINVLYFDSSNNVIYGKIPDEYDKVV

SEQ ID NO: 94966 - protein, 27 aa, Artificial Sequence
  Cyclic GFR-binding peptide
DEYDKVVEYQKYVVNNASDIYLISIPS

SEQ ID NO: 94967 - protein, 27 aa, Artificial Sequence
  Cyclic GFR-binding peptide
DEYDKVVEYQKYIIQQKDNIYLMSIPS

SEQ ID NO: 94968 - protein, 27 aa, Artificial Sequence
  Cyclic GFR-binding peptide
DEYDKVVEYQKYLLVRGNDIYLMSIPS

SEQ ID NO: 94969 - protein, 27 aa, Artificial Sequence
  Cyclic GFR-binding peptide
SPISILYIDSANNVVYKQYEDEYDKVV

SEQ ID NO: 94970 - protein, 27 aa, Artificial Sequence
  Cyclic GFR-binding peptide
SPISMLYINDKQQIIYKQYEDEYDKVV

SEQ ID NO: 94971 - protein, 27 aa, Artificial Sequence
  Cyclic GFR-binding peptide
SPISMLYIDNGRVLLYKQYEDEYDKVV

SEQ ID NO: 94972 - protein, 27 aa, Artificial Sequence
  Cyclic GFR-binding peptide
DEYDKVVPYVKLYTVVGKDFFLISLSS

SEQ ID NO: 94973 - protein, 27 aa, Artificial Sequence
  Cyclic GFR-binding peptide
DEYDKVVPYVKLIKPTKGIFFLISLSS

SEQ ID NO: 94974 - protein, 27 aa, Artificial Sequence
  Cyclic GFR-binding peptide
DEYDKVVPYVKLIIQQKDNFFLMSLSS

SEQ ID NO: 94975 - protein, 27 aa, Artificial Sequence
  Cyclic GFR-binding peptide
DEYDKVVPYVKLIVNSSDDFFLVSLSS

SEQ ID NO: 94976 - protein, 27 aa, Artificial Sequence
  Cyclic GFR-binding peptide
DEYDKVVPYVKLVKPKRGVFFLISLSS

SEQ ID NO: 94977 - protein, 27 aa, Artificial Sequence
  Cyclic GFR-binding peptide
DEYDKVVPYVKLVKPTRGVFFLISLSS

SEQ ID NO: 94978 - protein, 27 aa, Artificial Sequence
  Cyclic GFR-binding peptide
DEYDKVVPYVKLTPVGMDDFFLVSLSS

SEQ ID NO: 94979 - protein, 29 aa, Artificial Sequence
  Cyclic GFR-binding peptide
DEYDKVVPYVKLHQGQHPKIRFFLMSLSS

SEQ ID NO: 94980 - protein, 27 aa, Artificial Sequence
  Cyclic GFR-binding peptide
DEYDKVVPYVKLVVNKNEDFFLISLSS

SEQ ID NO: 94981 - protein, 27 aa, Artificial Sequence
  Cyclic GFR-binding peptide
DEYDKVVPYVKLVVNNASDFFLISLSS

SEQ ID NO: 94982 - protein, 27 aa, Artificial Sequence
  Cyclic GFR-binding peptide
DEYDKVVPYVKLVVKENEDFFLMSLSS

SEQ ID NO: 94983 - protein, 27 aa, Artificial Sequence
  Cyclic GFR-binding peptide
DEYDKVVPYVKLIVNNSSDFFLVSLSS

SEQ ID NO: 94984 - protein, 29 aa, Artificial Sequence
  Cyclic GFR-binding peptide
DEYDKVVPYVKLLKPKKRVYEFFLVSLSS

SEQ ID NO: 94985 - protein, 27 aa, Artificial Sequence
  Cyclic GFR-binding peptide
DEYDKVVPYVKLLLVRGNDFFLMSLSS

SEQ ID NO: 94986 - protein, 27 aa, Artificial Sequence
  Cyclic GFR-binding peptide
DEYDKVVPYVKLVVKDYEDFFLMSLSS

SEQ ID NO: 94987 - protein, 27 aa, Artificial Sequence
  Cyclic GFR-binding peptide
DEYDKVVPYVKLVVNNAADFFLISLSS

SEQ ID NO: 94988 - protein, 27 aa, Artificial Sequence
  Cyclic GFR-binding peptide
SSLSILFFDKGVVTYLKVYPDEYDKVV

SEQ ID NO: 94989 - protein, 27 aa, Artificial Sequence
  Cyclic GFR-binding peptide
SSLSILFFIGKTPKILKVYPDEYDKVV

SEQ ID NO: 94990 - protein, 27 aa, Artificial Sequence
  Cyclic GFR-binding peptide
SSLSMLFFNDKQQIILKVYPDEYDKVV

SEQ ID NO: 94991 - protein, 27 aa, Artificial Sequence
  Cyclic GFR-binding peptide
SSLSVLFFDDSSNVILKVYPDEYDKVV

SEQ ID NO: 94992 - protein, 27 aa, Artificial Sequence
  Cyclic GFR-binding peptide
SSLSILFFVGRKPKVLKVYPDEYDKVV

SEQ ID NO: 94993 - protein, 27 aa, Artificial Sequence
  Cyclic GFR-binding peptide
SSLSILFFVGRTPKVLKVYPDEYDKVV

SEQ ID NO: 94994 - protein, 27 aa, Artificial Sequence
  Cyclic GFR-binding peptide
SSLSVLFFDDMGVPTLKVYPDEYDKVV

SEQ ID NO: 94995 - protein, 29 aa, Artificial Sequence
  Cyclic GFR-binding peptide
SSLSMLFFRIKPHQGQHLKVYPDEYDKVV

SEQ ID NO: 94996 - protein, 27 aa, Artificial Sequence
  Cyclic GFR-binding peptide
SSLSILFFDENKNVVLKVYPDEYDKVV

SEQ ID NO: 94997 - protein, 27 aa, Artificial Sequence
  Cyclic GFR-binding peptide
SSLSILFFDSANNVVLKVYPDEYDKVV

SEQ ID NO: 94998 - protein, 27 aa, Artificial Sequence
  Cyclic GFR-binding peptide
SSLSMLFFDENEKVVLKVYPDEYDKVV

SEQ ID NO: 94999 - protein, 27 aa, Artificial Sequence
  Cyclic GFR-binding peptide
SSLSVLFFDSSNNVILKVYPDEYDKVV

SEQ ID NO: 95000 - protein, 29 aa, Artificial Sequence
  Cyclic GFR-binding peptide
SSLSVLFFEYVRKKPKLLKVYPDEYDKVV

SEQ ID NO: 95001 - protein, 27 aa, Artificial Sequence
  Cyclic GFR-binding peptide
SSLSMLFFDNGRVLLLKVYPDEYDKVV

SEQ ID NO: 95002 - protein, 27 aa, Artificial Sequence
  Cyclic GFR-binding peptide
SSLSMLFFDEYDKVVLKVYPDEYDKVV

SEQ ID NO: 95003 - protein, 27 aa, Artificial Sequence
  Cyclic GFR-binding peptide
SSLSILFFDAANNVVLKVYPDEYDKVV

SEQ ID NO: 95004 - protein, 27 aa, Artificial Sequence
  Cyclic GFR-binding peptide
DEYDKVVSMEGIIVNSSDDMIQVTINS

SEQ ID NO: 95005 - protein, 27 aa, Artificial Sequence
  Cyclic GFR-binding peptide
DEYDKVVVTAKKVVKENEDIKRMQVPR

SEQ ID NO: 95006 - protein, 27 aa, Artificial Sequence
  Cyclic GFR-binding peptide
DEYDKVVSMEGIVVKDYEDMIQMTINS

SEQ ID NO: 95007 - protein, 27 aa, Artificial Sequence
  Cyclic GFR-binding peptide
DEYDKVVVTAKKIKPTKGIIKRIQVPR

SEQ ID NO: 95008 - protein, 27 aa, Artificial Sequence
  Cyclic GFR-binding peptide
DEYDKVVSMEGIVKPTRGVMIQITINS

SEQ ID NO: 95009 - protein, 29 aa, Artificial Sequence
  Cyclic GFR-binding peptide
DEYDKVVNSLQEFIPKKRVIEYYVVPLPE

SEQ ID NO: 95010 - protein, 27 aa, Artificial Sequence
  Cyclic GFR-binding peptide
DEYDKVVVQVEKVKPKRGVVKAIKVSR

SEQ ID NO: 95011 - protein, 27 aa, Artificial Sequence
  Cyclic GFR-binding peptide
DEYDKVVVQVEKVVKENEDVKAMKVSR

SEQ ID NO: 95012 - protein, 27 aa, Artificial Sequence
  Cyclic GFR-binding peptide
DEYDKVVVTAKKIVNSSDDIKRVQVPR

SEQ ID NO: 95013 - protein, 27 aa, Artificial Sequence
  Cyclic GFR-binding peptide
DEYDKVVVQVEKIKPTKGIVKAIKVSR

SEQ ID NO: 95014 - protein, 29 aa, Artificial Sequence
  Cyclic GFR-binding peptide
DEYDKVVNSLQEFIPKKRVIEYYLVTLPE

SEQ ID NO: 95015 - protein, 27 aa, Artificial Sequence
  Cyclic GFR-binding peptide
DEYDKVVVQVEKIVNSSDDVKAVKVSR

SEQ ID NO: 95016 - protein, 27 aa, Artificial Sequence
  Cyclic GFR-binding peptide
DEYDKVVVTAKKVKPKRGVIKRIQVPR

SEQ ID NO: 95017 - protein, 27 aa, Artificial Sequence
  Cyclic GFR-binding peptide
DEYDKVVVQVEKVKPTRGVVKAIKVSR

SEQ ID NO: 95018 - protein, 27 aa, Artificial Sequence
  Cyclic GFR-binding peptide
DEYDKVVVTAKKVKPTRGVIKRIQVPR

SEQ ID NO: 95019 - protein, 29 aa, Artificial Sequence
  Cyclic GFR-binding peptide
DEYDKVVNSLQELKPKKRVYEYYLVTLPE

SEQ ID NO: 95020 - protein, 27 aa, Artificial Sequence
  Cyclic GFR-binding peptide
DEYDKVVSMEGIVKPKRGVMIQITINS

SEQ ID NO: 95021 - protein, 27 aa, Artificial Sequence
  Cyclic GFR-binding peptide
DEYDKVVSMEGIVVKENEDMIQMTINS

SEQ ID NO: 95022 - protein, 27 aa, Artificial Sequence
  Cyclic GFR-binding peptide
DEYDKVVSMEGIIKPTKGIMIQITINS

SEQ ID NO: 95023 - protein, 29 aa, Artificial Sequence
  Cyclic GFR-binding peptide
DEYDKVVNSLQEHQGQHPKIRYYLMTLPE

SEQ ID NO: 95024 - protein, 27 aa, Artificial Sequence
  Cyclic GFR-binding peptide
DEYDKVVVTAKKVVKDYEDIKRMQVPR

SEQ ID NO: 95025 - protein, 29 aa, Artificial Sequence
  Cyclic GFR-binding peptide
DEYDKVVNSLQEHQGQHPKIRYYVMPLPE

SEQ ID NO: 95026 - protein, 29 aa, Artificial Sequence
  Cyclic GFR-binding peptide
DEYDKVVNSLQELKPKKRVYEYYVVPLPE

SEQ ID NO: 95027 - protein, 27 aa, Artificial Sequence
  Cyclic GFR-binding peptide
DEYDKVVVQVEKVVKDYEDVKAMKVSR

SEQ ID NO: 95028 - protein, 27 aa, Artificial Sequence
  Cyclic GFR-binding peptide
SNITVQIMDDSSNVIIGEMSDEYDKVV

SEQ ID NO: 95029 - protein, 27 aa, Artificial Sequence
  Cyclic GFR-binding peptide
RPVQMRKIDENEKVVKKATVDEYDKVV

SEQ ID NO: 95030 - protein, 27 aa, Artificial Sequence
  Cyclic GFR-binding peptide
SNITMQIMDEYDKVVIGEMSDEYDKVV

SEQ ID NO: 95031 - protein, 27 aa, Artificial Sequence
  Cyclic GFR-binding peptide
RPVQIRKIIGKTPKIKKATVDEYDKVV

SEQ ID NO: 95032 - protein, 27 aa, Artificial Sequence
  Cyclic GFR-binding peptide
SNITIQIMVGRTPKVIGEMSDEYDKVV

SEQ ID NO: 95033 - protein, 29 aa, Artificial Sequence
  Cyclic GFR-binding peptide
EPLPVVYYEIVRKKPIFEQLSNDEYDKVV

SEQ ID NO: 95034 - protein, 27 aa, Artificial Sequence
  Cyclic GFR-binding peptide
RSVKIAKVVGRKPKVKEVQVDEYDKVV

SEQ ID NO: 95035 - protein, 27 aa, Artificial Sequence
  Cyclic GFR-binding peptide
RSVKMAKVDENEKVVKEVQVDEYDKVV

SEQ ID NO: 95036 - protein, 27 aa, Artificial Sequence
  Cyclic GFR-binding peptide
RPVQVRKIDDSSNVIKKATVDEYDKVV

SEQ ID NO: 95037 - protein, 27 aa, Artificial Sequence
  Cyclic GFR-binding peptide
RSVKIAKVIGKTPKIKEVQVDEYDKVV

SEQ ID NO: 95038 - protein, 29 aa, Artificial Sequence
  Cyclic GFR-binding peptide
EPLTVLYYEIVRKKPIFEQLSNDEYDKVV

SEQ ID NO: 95039 - protein, 27 aa, Artificial Sequence
  Cyclic GFR-binding peptide
RSVKVAKVDDSSNVIKEVQVDEYDKVV

SEQ ID NO: 95040 - protein, 27 aa, Artificial Sequence
  Cyclic GFR-binding peptide
RPVQIRKIVGRKPKVKKATVDEYDKVV

SEQ ID NO: 95041 - protein, 27 aa, Artificial Sequence
  Cyclic GFR-binding peptide
RSVKIAKVVGRTPKVKEVQVDEYDKVV

SEQ ID NO: 95042 - protein, 27 aa, Artificial Sequence
  Cyclic GFR-binding peptide
RPVQIRKIVGRTPKVKKATVDEYDKVV

SEQ ID NO: 95043 - protein, 29 aa, Artificial Sequence
  Cyclic GFR-binding peptide
EPLTVLYYEYVRKKPKLEQLSNDEYDKVV

SEQ ID NO: 95044 - protein, 27 aa, Artificial Sequence
  Cyclic GFR-binding peptide
SNITIQIMVGRKPKVIGEMSDEYDKVV

SEQ ID NO: 95045 - protein, 27 aa, Artificial Sequence
  Cyclic GFR-binding peptide
SNITMQIMDENEKVVIGEMSDEYDKVV

SEQ ID NO: 95046 - protein, 27 aa, Artificial Sequence
  Cyclic GFR-binding peptide
SNITIQIMIGKTPKIIGEMSDEYDKVV

SEQ ID NO: 95047 - protein, 29 aa, Artificial Sequence
  Cyclic GFR-binding peptide
EPLTMLYYRIKPHQGQHEQLSNDEYDKVV

SEQ ID NO: 95048 - protein, 27 aa, Artificial Sequence
  Cyclic GFR-binding peptide
RPVQMRKIDEYDKVVKKATVDEYDKVV

SEQ ID NO: 95049 - protein, 29 aa, Artificial Sequence
  Cyclic GFR-binding peptide
EPLPMVYYRIKPHQGQHEQLSNDEYDKVV

SEQ ID NO: 95050 - protein, 29 aa, Artificial Sequence
  Cyclic GFR-binding peptide
EPLPVVYYEYVRKKPKLEQLSNDEYDKVV

SEQ ID NO: 95051 - protein, 27 aa, Artificial Sequence
  Cyclic GFR-binding peptide
RSVKMAKVDEYDKVVKEVQVDEYDKVV

SEQ ID NO: 95052 - protein, 27 aa, Artificial Sequence
  Cyclic GFR-binding peptide
DEYDKVVRYKKLIIQQKDNFYLMSIAN

SEQ ID NO: 95053 - protein, 27 aa, Artificial Sequence
  Cyclic GFR-binding peptide
DEYDKVVRYKKLLLVRGNDFYLMSIAN

SEQ ID NO: 95054 - protein, 27 aa, Artificial Sequence
  Cyclic GFR-binding peptide
NAISMLYFNDKQQIILKKYRDEYDKVV

SEQ ID NO: 95055 - protein, 27 aa, Artificial Sequence
  Cyclic GFR-binding peptide
NAISMLYFDNGRVLLLKKYRDEYDKVV

SEQ ID NO: 95056 - protein, 27 aa, Artificial Sequence
  Cyclic GFR-binding peptide
DEYDKVVEYKFKVVNKNEDLYLISIPE

SEQ ID NO: 95057 - protein, 27 aa, Artificial Sequence
  Cyclic GFR-binding peptide
DEYDKVVPIKGYVKPTRGVFYLINIPS

SEQ ID NO: 95058 - protein, 27 aa, Artificial Sequence
  Cyclic GFR-binding peptide
DEYDKVVEYKFKLLVRGNDLYLMSIPE

SEQ ID NO: 95059 - protein, 27 aa, Artificial Sequence
  Cyclic GFR-binding peptide
DEYDKVVYHYKLVVNKNEDKYLISIPS

SEQ ID NO: 95060 - protein, 27 aa, Artificial Sequence
  Cyclic GFR-binding peptide
DEYDKVVRHKRLLLVRGNDYYLMSTAS

SEQ ID NO: 95061 - protein, 27 aa, Artificial Sequence
  Cyclic GFR-binding peptide
DEYDKVVYHYKLLLVRGNDKYLMSIPS

SEQ ID NO: 95062 - protein, 27 aa, Artificial Sequence
  Cyclic GFR-binding peptide
DEYDKVVRHKRLVVNKNEDYYLISTAS

SEQ ID NO: 95063 - protein, 27 aa, Artificial Sequence
  Cyclic GFR-binding peptide
DEYDKVVRYKKLVVNKNEDFYLISIAN

SEQ ID NO: 95064 - protein, 27 aa, Artificial Sequence
  Cyclic GFR-binding peptide
DEYDKVVPIKGYVVNKNEDFYLINIPS

SEQ ID NO: 95065 - protein, 27 aa, Artificial Sequence
  Cyclic GFR-binding peptide
DEYDKVVPIKGYIKPTKGIFYLINIPS

SEQ ID NO: 95066 - protein, 27 aa, Artificial Sequence
  Cyclic GFR-binding peptide
DEYDKVVRHKRLYTVVGKDYYLISTAS

SEQ ID NO: 95067 - protein, 27 aa, Artificial Sequence
  Cyclic GFR-binding peptide
DEYDKVVEYKFKVVNNASDLYLISIPE

SEQ ID NO: 95068 - protein, 27 aa, Artificial Sequence
  Cyclic GFR-binding peptide
DEYDKVVRHKRLIIQQKDNYYLMSTAS

SEQ ID NO: 95069 - protein, 27 aa, Artificial Sequence
  Cyclic GFR-binding peptide
DEYDKVVEYKFKIIQQKDNLYLMSIPE

SEQ ID NO: 95070 - protein, 27 aa, Artificial Sequence
  Cyclic GFR-binding peptide
DEYDKVVPIKGYVKPKRGVFYLINIPS

SEQ ID NO: 95071 - protein, 27 aa, Artificial Sequence
  Cyclic GFR-binding peptide
DEYDKVVRHKRLVVNNASDYYLISTAS

SEQ ID NO: 95072 - protein, 27 aa, Artificial Sequence
  Cyclic GFR-binding peptide
DEYDKVVYHYKLVVNNASDKYLISIPS

SEQ ID NO: 95073 - protein, 27 aa, Artificial Sequence
  Cyclic GFR-binding peptide
DEYDKVVYHYKLIIQQKDNKYLMSIPS

SEQ ID NO: 95074 - protein, 27 aa, Artificial Sequence
  Cyclic GFR-binding peptide
DEYDKVVRHKRLVVNNAADYYLISTAS

SEQ ID NO: 95075 - protein, 27 aa, Artificial Sequence
  Cyclic GFR-binding peptide
EPISILYLDENKNVVKFKYEDEYDKVV

SEQ ID NO: 95076 - protein, 27 aa, Artificial Sequence
  Cyclic GFR-binding peptide
SPINILYFVGRTPKVYGKIPDEYDKVV

SEQ ID NO: 95077 - protein, 27 aa, Artificial Sequence
  Cyclic GFR-binding peptide
EPISMLYLDNGRVLLKFKYEDEYDKVV

SEQ ID NO: 95078 - protein, 27 aa, Artificial Sequence
  Cyclic GFR-binding peptide
SPISILYKDENKNVVLKYHYDEYDKVV

SEQ ID NO: 95079 - protein, 27 aa, Artificial Sequence
  Cyclic GFR-binding peptide
SATSMLYYDNGRVLLLRKHRDEYDKVV

SEQ ID NO: 95080 - protein, 27 aa, Artificial Sequence
  Cyclic GFR-binding peptide
SPISMLYKDNGRVLLLKYHYDEYDKVV

SEQ ID NO: 95081 - protein, 27 aa, Artificial Sequence
  Cyclic GFR-binding peptide
SATSILYYDENKNVVLRKHRDEYDKVV

SEQ ID NO: 95082 - protein, 27 aa, Artificial Sequence
  Cyclic GFR-binding peptide
NAISILYFDENKNVVLKKYRDEYDKVV

SEQ ID NO: 95083 - protein, 27 aa, Artificial Sequence
  Cyclic GFR-binding peptide
SPINILYFDENKNVVYGKIPDEYDKVV

SEQ ID NO: 95084 - protein, 27 aa, Artificial Sequence
  Cyclic GFR-binding peptide
SPINILYFIGKTPKIYGKIPDEYDKVV

SEQ ID NO: 95085 - protein, 27 aa, Artificial Sequence
  Cyclic GFR-binding peptide
SATSILYYDKGVVTYLRKHRDEYDKVV

SEQ ID NO: 95086 - protein, 27 aa, Artificial Sequence
  Cyclic GFR-binding peptide
EPISILYLDSANNVVKFKYEDEYDKVV

SEQ ID NO: 95087 - protein, 27 aa, Artificial Sequence
  Cyclic GFR-binding peptide
SATSMLYYNDKQQIILRKHRDEYDKVV

SEQ ID NO: 95088 - protein, 27 aa, Artificial Sequence
  Cyclic GFR-binding peptide
EPISMLYLNDKQQIIKFKYEDEYDKVV

SEQ ID NO: 95089 - protein, 27 aa, Artificial Sequence
  Cyclic GFR-binding peptide
SPINILYFVGRKPKVYGKIPDEYDKVV

SEQ ID NO: 95090 - protein, 27 aa, Artificial Sequence
  Cyclic GFR-binding peptide
SATSILYYDSANNVVLRKHRDEYDKVV

SEQ ID NO: 95091 - protein, 27 aa, Artificial Sequence
  Cyclic GFR-binding peptide
SPISILYKDSANNVVLKYHYDEYDKVV

SEQ ID NO: 95092 - protein, 27 aa, Artificial Sequence
  Cyclic GFR-binding peptide
SPISMLYKNDKQQIILKYHYDEYDKVV

SEQ ID NO: 95093 - protein, 27 aa, Artificial Sequence
  Cyclic GFR-binding peptide
SATSILYYDAANNVVLRKHRDEYDKVV

SEQ ID NO: 95094 - protein, 27 aa, Artificial Sequence
  Cyclic GFR-binding peptide
DEYDKVVSMEGIIIQQKDNMIQMTINS

SEQ ID NO: 95095 - protein, 27 aa, Artificial Sequence
  Cyclic GFR-binding peptide
DEYDKVVSMEGLVKPKRGVMIQITINS

SEQ ID NO: 95096 - protein, 27 aa, Artificial Sequence
  Cyclic GFR-binding peptide
DEYDKVVSMEGLVVNNASDMIQITINS

SEQ ID NO: 95097 - protein, 27 aa, Artificial Sequence
  Cyclic GFR-binding peptide
DEYDKVVSMEGILLVRGNDMIQMTINS

SEQ ID NO: 95098 - protein, 27 aa, Artificial Sequence
  Cyclic GFR-binding peptide
DEYDKVVSMEGLIKPTKGIMIQITINS

SEQ ID NO: 95099 - protein, 27 aa, Artificial Sequence
  Cyclic GFR-binding peptide
DEYDKVVSMEGLIVNSSDDMIQVTINS

SEQ ID NO: 95100 - protein, 27 aa, Artificial Sequence
  Cyclic GFR-binding peptide
DEYDKVVSMEGIVVNNASDMIQITINS

SEQ ID NO: 95101 - protein, 27 aa, Artificial Sequence
  Cyclic GFR-binding peptide
DEYDKVVSMEGLVVNNAADMIQITINS

SEQ ID NO: 95102 - protein, 27 aa, Artificial Sequence
  Cyclic GFR-binding peptide
DEYDKVVSMEGLLLVRGNDMIQMTINS

SEQ ID NO: 95103 - protein, 27 aa, Artificial Sequence
  Cyclic GFR-binding peptide
DEYDKVVSMEGLIIQQKDNMIQMTINS

SEQ ID NO: 95104 - protein, 27 aa, Artificial Sequence
  Cyclic GFR-binding peptide
DEYDKVVSMEGIVVNNAADMIQITINS

SEQ ID NO: 95105 - protein, 27 aa, Artificial Sequence
  Cyclic GFR-binding peptide
DEYDKVVSMEGLVKPTRGVMIQITINS

SEQ ID NO: 95106 - protein, 27 aa, Artificial Sequence
  Cyclic GFR-binding peptide
SNITMQIMNDKQQIIIGEMSDEYDKVV

SEQ ID NO: 95107 - protein, 27 aa, Artificial Sequence
  Cyclic GFR-binding peptide
SNITIQIMVGRKPKVLGEMSDEYDKVV

SEQ ID NO: 95108 - protein, 27 aa, Artificial Sequence
  Cyclic GFR-binding peptide
SNITIQIMDSANNVVLGEMSDEYDKVV

SEQ ID NO: 95109 - protein, 27 aa, Artificial Sequence
  Cyclic GFR-binding peptide
SNITMQIMDNGRVLLIGEMSDEYDKVV

SEQ ID NO: 95110 - protein, 27 aa, Artificial Sequence
  Cyclic GFR-binding peptide
SNITIQIMIGKTPKILGEMSDEYDKVV

SEQ ID NO: 95111 - protein, 27 aa, Artificial Sequence
  Cyclic GFR-binding peptide
SNITVQIMDDSSNVILGEMSDEYDKVV

SEQ ID NO: 95112 - protein, 27 aa, Artificial Sequence
  Cyclic GFR-binding peptide
SNITIQIMDSANNVVIGEMSDEYDKVV

SEQ ID NO: 95113 - protein, 27 aa, Artificial Sequence
  Cyclic GFR-binding peptide
SNITIQIMDAANNVVLGEMSDEYDKVV

SEQ ID NO: 95114 - protein, 27 aa, Artificial Sequence
  Cyclic GFR-binding peptide
SNITMQIMDNGRVLLLGEMSDEYDKVV

SEQ ID NO: 95115 - protein, 27 aa, Artificial Sequence
  Cyclic GFR-binding peptide
SNITMQIMNDKQQIILGEMSDEYDKVV

SEQ ID NO: 95116 - protein, 27 aa, Artificial Sequence
  Cyclic GFR-binding peptide
SNITIQIMDAANNVVIGEMSDEYDKVV

SEQ ID NO: 95117 - protein, 27 aa, Artificial Sequence
  Cyclic GFR-binding peptide
SNITIQIMVGRTPKVLGEMSDEYDKVV

SEQ ID NO: 95118 - protein, 27 aa, Artificial Sequence
  Cyclic GFR-binding peptide
DEYDKVVQYNKLVVNKNEDLYLISIAS

SEQ ID NO: 95119 - protein, 27 aa, Artificial Sequence
  Cyclic GFR-binding peptide
DEYDKVVQYNKLVVNNAADLYLISIAS

SEQ ID NO: 95120 - protein, 27 aa, Artificial Sequence
  Cyclic GFR-binding peptide
DEYDKVVQYNKLIIQQKDNLYLMSIAS

SEQ ID NO: 95121 - protein, 27 aa, Artificial Sequence
  Cyclic GFR-binding peptide
DEYDKVVQYNKLLLVRGNDLYLMSIAS

SEQ ID NO: 95122 - protein, 27 aa, Artificial Sequence
  Cyclic GFR-binding peptide
DEYDKVVQYNKLYTVVGKDLYLISIAS

SEQ ID NO: 95123 - protein, 27 aa, Artificial Sequence
  Cyclic GFR-binding peptide
SAISILYLDENKNVVLKNYQDEYDKVV

SEQ ID NO: 95124 - protein, 27 aa, Artificial Sequence
  Cyclic GFR-binding peptide
SAISILYLDAANNVVLKNYQDEYDKVV

SEQ ID NO: 95125 - protein, 27 aa, Artificial Sequence
  Cyclic GFR-binding peptide
SAISMLYLNDKQQIILKNYQDEYDKVV

SEQ ID NO: 95126 - protein, 27 aa, Artificial Sequence
  Cyclic GFR-binding peptide
SAISMLYLDNGRVLLLKNYQDEYDKVV

SEQ ID NO: 95127 - protein, 27 aa, Artificial Sequence
  Cyclic GFR-binding peptide
SAISILYLDKGVVTYLKNYQDEYDKVV

SEQ ID NO: 95128 - protein, 27 aa, Artificial Sequence
  Cyclic GFR-binding peptide
DDSSNVIRYKKLIKPTKGIFYLISIAN

SEQ ID NO: 95129 - protein, 29 aa, Artificial Sequence
  Cyclic GFR-binding peptide
DDSSNVIRHKRLFIPKKRVIEYYLVSTAS

SEQ ID NO: 95130 - protein, 27 aa, Artificial Sequence
  Cyclic GFR-binding peptide
DDSSNVIYHYKLVVKDYEDKYLMSIPS

SEQ ID NO: 95131 - protein, 27 aa, Artificial Sequence
  Cyclic GFR-binding peptide
DDSSNVIQYNKLIVNNSSDLYLVSIAS

SEQ ID NO: 95132 - protein, 27 aa, Artificial Sequence
  Cyclic GFR-binding peptide
DDSSNVIRYKKLVVKDYEDFYLMSIAN

SEQ ID NO: 95133 - protein, 27 aa, Artificial Sequence
  Cyclic GFR-binding peptide
DDSSNVIRYKKLVKPTRGVFYLISIAN

SEQ ID NO: 95134 - protein, 27 aa, Artificial Sequence
  Cyclic GFR-binding peptide
DDSSNVIRHKRLVVKENEDYYLMSTAS

SEQ ID NO: 95135 - protein, 27 aa, Artificial Sequence
  Cyclic GFR-binding peptide
DDSSNVIYHYKLIKPTKGIKYLISIPS

SEQ ID NO: 95136 - protein, 29 aa, Artificial Sequence
  Cyclic GFR-binding peptide
DDSSNVIRYKKLFIPKKRVIEFYLVSIAN

SEQ ID NO: 95137 - protein, 27 aa, Artificial Sequence
  Cyclic GFR-binding peptide
DDSSNVIYHYKLVVKENEDKYLMSIPS

SEQ ID NO: 95138 - protein, 27 aa, Artificial Sequence
  Cyclic GFR-binding peptide
DDSSNVIRHKRLVKPKRGVYYLISTAS

SEQ ID NO: 95139 - protein, 27 aa, Artificial Sequence
  Cyclic GFR-binding peptide
DDSSNVIYHYKLVKPKRGVKYLISIPS

SEQ ID NO: 95140 - protein, 29 aa, Artificial Sequence
  Cyclic GFR-binding peptide
DDSSNVIQYNKLFIPKKRVIELYLVSIAS

SEQ ID NO: 95141 - protein, 27 aa, Artificial Sequence
  Cyclic GFR-binding peptide
DDSSNVIQYNKLVKPTRGVLYLISIAS

SEQ ID NO: 95142 - protein, 27 aa, Artificial Sequence
  Cyclic GFR-binding peptide
DDSSNVIRYKKLVVKENEDFYLMSIAN

SEQ ID NO: 95143 - protein, 27 aa, Artificial Sequence
  Cyclic GFR-binding peptide
DDSSNVIQYNKLTPVGMDDLYLVSIAS

SEQ ID NO: 95144 - protein, 27 aa, Artificial Sequence
  Cyclic GFR-binding peptide
DDSSNVIRYKKLTPVGMDDFYLVSIAN

SEQ ID NO: 95145 - protein, 27 aa, Artificial Sequence
  Cyclic GFR-binding peptide
DDSSNVIRYKKLVKPKRGVFYLISIAN

SEQ ID NO: 95146 - protein, 27 aa, Artificial Sequence
  Cyclic GFR-binding peptide
DDSSNVIQYNKLVVKENEDLYLMSIAS

SEQ ID NO: 95147 - protein, 27 aa, Artificial Sequence
  Cyclic GFR-binding peptide
DDSSNVIYHYKLIVNSSDDKYLVSIPS

SEQ ID NO: 95148 - protein, 27 aa, Artificial Sequence
  Cyclic GFR-binding peptide
DDSSNVIQYNKLVKPKRGVLYLISIAS

SEQ ID NO: 95149 - protein, 27 aa, Artificial Sequence
  Cyclic GFR-binding peptide
DDSSNVIRYKKLIVNNSSDFYLVSIAN

SEQ ID NO: 95150 - protein, 27 aa, Artificial Sequence
  Cyclic GFR-binding peptide
DDSSNVIRYKKLIVNSSDDFYLVSIAN

SEQ ID NO: 95151 - protein, 27 aa, Artificial Sequence
  Cyclic GFR-binding peptide
DDSSNVIRHKRLVKPTRGVYYLISTAS

SEQ ID NO: 95152 - protein, 29 aa, Artificial Sequence
  Cyclic GFR-binding peptide
DDSSNVIYHYKLFIPKKRVIEKYLVSIPS

SEQ ID NO: 95153 - protein, 27 aa, Artificial Sequence
  Cyclic GFR-binding peptide
DDSSNVIRHKRLIKPTKGIYYLISTAS

SEQ ID NO: 95154 - protein, 27 aa, Artificial Sequence
  Cyclic GFR-binding peptide
DDSSNVIRHKRLTPVGMDDYYLVSTAS

SEQ ID NO: 95155 - protein, 27 aa, Artificial Sequence
  Cyclic GFR-binding peptide
DDSSNVIYHYKLTPVGMDDKYLVSIPS

SEQ ID NO: 95156 - protein, 27 aa, Artificial Sequence
  Cyclic GFR-binding peptide
DDSSNVIYHYKLIVNNSSDKYLVSIPS

SEQ ID NO: 95157 - protein, 27 aa, Artificial Sequence
  Cyclic GFR-binding peptide
DDSSNVIRHKRLIVNNSSDYYLVSTAS

SEQ ID NO: 95158 - protein, 27 aa, Artificial Sequence
  Cyclic GFR-binding peptide
DDSSNVIYHYKLVKPTRGVKYLISIPS

SEQ ID NO: 95159 - protein, 27 aa, Artificial Sequence
  Cyclic GFR-binding peptide
DDSSNVIRHKRLIVNSSDDYYLVSTAS

SEQ ID NO: 95160 - protein, 27 aa, Artificial Sequence
  Cyclic GFR-binding peptide
DDSSNVIRHKRLVVKDYEDYYLMSTAS

SEQ ID NO: 95161 - protein, 27 aa, Artificial Sequence
  Cyclic GFR-binding peptide
DDSSNVIQYNKLIKPTKGILYLISIAS

SEQ ID NO: 95162 - protein, 27 aa, Artificial Sequence
  Cyclic GFR-binding peptide
DDSSNVIQYNKLVVKDYEDLYLMSIAS

SEQ ID NO: 95163 - protein, 27 aa, Artificial Sequence
  Cyclic GFR-binding peptide
DDSSNVIQYNKLIVNSSDDLYLVSIAS

SEQ ID NO: 95164 - protein, 27 aa, Artificial Sequence
  Cyclic GFR-binding peptide
NAISILYFIGKTPKILKKYRDDSSNVI

SEQ ID NO: 95165 - protein, 29 aa, Artificial Sequence
  Cyclic GFR-binding peptide
SATSVLYYEIVRKKPIFLRKHRDDSSNVI

SEQ ID NO: 95166 - protein, 27 aa, Artificial Sequence
  Cyclic GFR-binding peptide
SPISMLYKDEYDKVVLKYHYDDSSNVI

SEQ ID NO: 95167 - protein, 27 aa, Artificial Sequence
  Cyclic GFR-binding peptide
SAISVLYLDSSNNVILKNYQDDSSNVI

SEQ ID NO: 95168 - protein, 27 aa, Artificial Sequence
  Cyclic GFR-binding peptide
NAISMLYFDEYDKVVLKKYRDDSSNVI

SEQ ID NO: 95169 - protein, 27 aa, Artificial Sequence
  Cyclic GFR-binding peptide
NAISILYFVGRTPKVLKKYRDDSSNVI

SEQ ID NO: 95170 - protein, 27 aa, Artificial Sequence
  Cyclic GFR-binding peptide
SATSMLYYDENEKVVLRKHRDDSSNVI

SEQ ID NO: 95171 - protein, 27 aa, Artificial Sequence
  Cyclic GFR-binding peptide
SPISILYKIGKTPKILKYHYDDSSNVI

SEQ ID NO: 95172 - protein, 29 aa, Artificial Sequence
  Cyclic GFR-binding peptide
NAISVLYFEIVRKKPIFLKKYRDDSSNVI

SEQ ID NO: 95173 - protein, 27 aa, Artificial Sequence
  Cyclic GFR-binding peptide
SPISMLYKDENEKVVLKYHYDDSSNVI

SEQ ID NO: 95174 - protein, 27 aa, Artificial Sequence
  Cyclic GFR-binding peptide
SATSILYYVGRKPKVLRKHRDDSSNVI

SEQ ID NO: 95175 - protein, 27 aa, Artificial Sequence
  Cyclic GFR-binding peptide
SPISILYKVGRKPKVLKYHYDDSSNVI

SEQ ID NO: 95176 - protein, 29 aa, Artificial Sequence
  Cyclic GFR-binding peptide
SAISVLYLEIVRKKPIFLKNYQDDSSNVI

SEQ ID NO: 95177 - protein, 27 aa, Artificial Sequence
  Cyclic GFR-binding peptide
SAISILYLVGRTPKVLKNYQDDSSNVI

SEQ ID NO: 95178 - protein, 27 aa, Artificial Sequence
  Cyclic GFR-binding peptide
NAISMLYFDENEKVVLKKYRDDSSNVI

SEQ ID NO: 95179 - protein, 27 aa, Artificial Sequence
  Cyclic GFR-binding peptide
SAISVLYLDDMGVPTLKNYQDDSSNVI

SEQ ID NO: 95180 - protein, 27 aa, Artificial Sequence
  Cyclic GFR-binding peptide
NAISVLYFDDMGVPTLKKYRDDSSNVI

SEQ ID NO: 95181 - protein, 27 aa, Artificial Sequence
  Cyclic GFR-binding peptide
NAISILYFVGRKPKVLKKYRDDSSNVI

SEQ ID NO: 95182 - protein, 27 aa, Artificial Sequence
  Cyclic GFR-binding peptide
SAISMLYLDENEKVVLKNYQDDSSNVI

SEQ ID NO: 95183 - protein, 27 aa, Artificial Sequence
  Cyclic GFR-binding peptide
SPISVLYKDDSSNVILKYHYDDSSNVI

SEQ ID NO: 95184 - protein, 27 aa, Artificial Sequence
  Cyclic GFR-binding peptide
SAISILYLVGRKPKVLKNYQDDSSNVI

SEQ ID NO: 95185 - protein, 27 aa, Artificial Sequence
  Cyclic GFR-binding peptide
NAISVLYFDSSNNVILKKYRDDSSNVI

SEQ ID NO: 95186 - protein, 27 aa, Artificial Sequence
  Cyclic GFR-binding peptide
NAISVLYFDDSSNVILKKYRDDSSNVI

SEQ ID NO: 95187 - protein, 27 aa, Artificial Sequence
  Cyclic GFR-binding peptide
SATSILYYVGRTPKVLRKHRDDSSNVI

SEQ ID NO: 95188 - protein, 29 aa, Artificial Sequence
  Cyclic GFR-binding peptide
SPISVLYKEIVRKKPIFLKYHYDDSSNVI

SEQ ID NO: 95189 - protein, 27 aa, Artificial Sequence
  Cyclic GFR-binding peptide
SATSILYYIGKTPKILRKHRDDSSNVI

SEQ ID NO: 95190 - protein, 27 aa, Artificial Sequence
  Cyclic GFR-binding peptide
SATSVLYYDDMGVPTLRKHRDDSSNVI

SEQ ID NO: 95191 - protein, 27 aa, Artificial Sequence
  Cyclic GFR-binding peptide
SPISVLYKDDMGVPTLKYHYDDSSNVI

SEQ ID NO: 95192 - protein, 27 aa, Artificial Sequence
  Cyclic GFR-binding peptide
SPISVLYKDSSNNVILKYHYDDSSNVI

SEQ ID NO: 95193 - protein, 27 aa, Artificial Sequence
  Cyclic GFR-binding peptide
SATSVLYYDSSNNVILRKHRDDSSNVI

SEQ ID NO: 95194 - protein, 27 aa, Artificial Sequence
  Cyclic GFR-binding peptide
SPISILYKVGRTPKVLKYHYDDSSNVI

SEQ ID NO: 95195 - protein, 27 aa, Artificial Sequence
  Cyclic GFR-binding peptide
SATSVLYYDDSSNVILRKHRDDSSNVI

SEQ ID NO: 95196 - protein, 27 aa, Artificial Sequence
  Cyclic GFR-binding peptide
SATSMLYYDEYDKVVLRKHRDDSSNVI

SEQ ID NO: 95197 - protein, 27 aa, Artificial Sequence
  Cyclic GFR-binding peptide
SAISILYLIGKTPKILKNYQDDSSNVI

SEQ ID NO: 95198 - protein, 27 aa, Artificial Sequence
  Cyclic GFR-binding peptide
SAISMLYLDEYDKVVLKNYQDDSSNVI

SEQ ID NO: 95199 - protein, 27 aa, Artificial Sequence
  Cyclic GFR-binding peptide
DDSSNVINSLQEVVKDYEDYYLMTLPE

SEQ ID NO: 95200 - protein, 27 aa, Artificial Sequence
  Cyclic GFR-binding peptide
DDSSNVINSLQEIKPTKGIYYVIPLPE

SEQ ID NO: 95201 - protein, 27 aa, Artificial Sequence
  Cyclic GFR-binding peptide
DDSSNVINSLQEVKPKRGVYYLITLPE

SEQ ID NO: 95202 - protein, 27 aa, Artificial Sequence
  Cyclic GFR-binding peptide
DDSSNVINSLQEVKPTRGVYYVIPLPE

SEQ ID NO: 95203 - protein, 27 aa, Artificial Sequence
  Cyclic GFR-binding peptide
DDSSNVIEYQKYIVNSSDDIFLVSIPS

SEQ ID NO: 95204 - protein, 27 aa, Artificial Sequence
  Cyclic GFR-binding peptide
DDSSNVIEYQKYVKPTRGVIFLISIPS

SEQ ID NO: 95205 - protein, 27 aa, Artificial Sequence
  Cyclic GFR-binding peptide
DDSSNVINSLQEVVKENEDYYLMTLPE

SEQ ID NO: 95206 - protein, 27 aa, Artificial Sequence
  Cyclic GFR-binding peptide
DDSSNVINSLQEVVNNASDYYLITLPE

SEQ ID NO: 95207 - protein, 27 aa, Artificial Sequence
  Cyclic GFR-binding peptide
DDSSNVINSLQEVKPKRGVYYVIPLPE

SEQ ID NO: 95208 - protein, 27 aa, Artificial Sequence
  Cyclic GFR-binding peptide
DDSSNVINSLQEVVNNASDYYVIPLPE

SEQ ID NO: 95209 - protein, 27 aa, Artificial Sequence
  Cyclic GFR-binding peptide
DDSSNVINSLQEVKPTRGVYYLITLPE

SEQ ID NO: 95210 - protein, 27 aa, Artificial Sequence
  Cyclic GFR-binding peptide
DDSSNVIEYQKYIKPTKGIIFLISIPS

SEQ ID NO: 95211 - protein, 27 aa, Artificial Sequence
  Cyclic GFR-binding peptide
DDSSNVIEYQKYVVNNASDIFLISIPS

SEQ ID NO: 95212 - protein, 27 aa, Artificial Sequence
  Cyclic GFR-binding peptide
DDSSNVINSLQEIVNSSDDYYVVPLPE

SEQ ID NO: 95213 - protein, 27 aa, Artificial Sequence
  Cyclic GFR-binding peptide
DDSSNVINSLQEVVKDYEDYYVMPLPE

SEQ ID NO: 95214 - protein, 27 aa, Artificial Sequence
  Cyclic GFR-binding peptide
DDSSNVIEYQKYVVKENEDIFLMSIPS

SEQ ID NO: 95215 - protein, 27 aa, Artificial Sequence
  Cyclic GFR-binding peptide
DDSSNVINSLQEVVKENEDYYVMPLPE

SEQ ID NO: 95216 - protein, 27 aa, Artificial Sequence
  Cyclic GFR-binding peptide
DDSSNVIEYQKYVVKDYEDIFLMSIPS

SEQ ID NO: 95217 - protein, 27 aa, Artificial Sequence
  Cyclic GFR-binding peptide
DDSSNVIQYNKLVVNNASDLYLISIAS

SEQ ID NO: 95218 - protein, 27 aa, Artificial Sequence
  Cyclic GFR-binding peptide
DDSSNVINSLQEIKPTKGIYYLITLPE

SEQ ID NO: 95219 - protein, 27 aa, Artificial Sequence
  Cyclic GFR-binding peptide
DDSSNVIEYQKYVKPKRGVIFLISIPS

SEQ ID NO: 95220 - protein, 27 aa, Artificial Sequence
  Cyclic GFR-binding peptide
DDSSNVIRYKKLVVNNASDFYLISIAN

SEQ ID NO: 95221 - protein, 27 aa, Artificial Sequence
  Cyclic GFR-binding peptide
DDSSNVINSLQEIVNSSDDYYLVTLPE

SEQ ID NO: 95222 - protein, 27 aa, Artificial Sequence
  Cyclic GFR-binding peptide
EPLTMLYYDEYDKVVEQLSNDDSSNVI

SEQ ID NO: 95223 - protein, 27 aa, Artificial Sequence
  Cyclic GFR-binding peptide
EPLPIVYYIGKTPKIEQLSNDDSSNVI

SEQ ID NO: 95224 - protein, 27 aa, Artificial Sequence
  Cyclic GFR-binding peptide
EPLTILYYVGRKPKVEQLSNDDSSNVI

SEQ ID NO: 95225 - protein, 27 aa, Artificial Sequence
  Cyclic GFR-binding peptide
EPLPIVYYVGRTPKVEQLSNDDSSNVI

SEQ ID NO: 95226 - protein, 27 aa, Artificial Sequence
  Cyclic GFR-binding peptide
SPISVLFIDDSSNVIYKQYEDDSSNVI

SEQ ID NO: 95227 - protein, 27 aa, Artificial Sequence
  Cyclic GFR-binding peptide
SPISILFIVGRTPKVYKQYEDDSSNVI

SEQ ID NO: 95228 - protein, 27 aa, Artificial Sequence
  Cyclic GFR-binding peptide
EPLTMLYYDENEKVVEQLSNDDSSNVI

SEQ ID NO: 95229 - protein, 27 aa, Artificial Sequence
  Cyclic GFR-binding peptide
EPLTILYYDSANNVVEQLSNDDSSNVI

SEQ ID NO: 95230 - protein, 27 aa, Artificial Sequence
  Cyclic GFR-binding peptide
EPLPIVYYVGRKPKVEQLSNDDSSNVI

SEQ ID NO: 95231 - protein, 27 aa, Artificial Sequence
  Cyclic GFR-binding peptide
EPLPIVYYDSANNVVEQLSNDDSSNVI

SEQ ID NO: 95232 - protein, 27 aa, Artificial Sequence
  Cyclic GFR-binding peptide
EPLTILYYVGRTPKVEQLSNDDSSNVI

SEQ ID NO: 95233 - protein, 27 aa, Artificial Sequence
  Cyclic GFR-binding peptide
SPISILFIIGKTPKIYKQYEDDSSNVI

SEQ ID NO: 95234 - protein, 27 aa, Artificial Sequence
  Cyclic GFR-binding peptide
SPISILFIDSANNVVYKQYEDDSSNVI

SEQ ID NO: 95235 - protein, 27 aa, Artificial Sequence
  Cyclic GFR-binding peptide
EPLPVVYYDDSSNVIEQLSNDDSSNVI

SEQ ID NO: 95236 - protein, 27 aa, Artificial Sequence
  Cyclic GFR-binding peptide
EPLPMVYYDEYDKVVEQLSNDDSSNVI

SEQ ID NO: 95237 - protein, 27 aa, Artificial Sequence
  Cyclic GFR-binding peptide
SPISMLFIDENEKVVYKQYEDDSSNVI

SEQ ID NO: 95238 - protein, 27 aa, Artificial Sequence
  Cyclic GFR-binding peptide
EPLPMVYYDENEKVVEQLSNDDSSNVI

SEQ ID NO: 95239 - protein, 27 aa, Artificial Sequence
  Cyclic GFR-binding peptide
SPISMLFIDEYDKVVYKQYEDDSSNVI

SEQ ID NO: 95240 - protein, 27 aa, Artificial Sequence
  Cyclic GFR-binding peptide
SAISILYLDSANNVVLKNYQDDSSNVI

SEQ ID NO: 95241 - protein, 27 aa, Artificial Sequence
  Cyclic GFR-binding peptide
EPLTILYYIGKTPKIEQLSNDDSSNVI

SEQ ID NO: 95242 - protein, 27 aa, Artificial Sequence
  Cyclic GFR-binding peptide
SPISILFIVGRKPKVYKQYEDDSSNVI

SEQ ID NO: 95243 - protein, 27 aa, Artificial Sequence
  Cyclic GFR-binding peptide
NAISILYFDSANNVVLKKYRDDSSNVI

SEQ ID NO: 95244 - protein, 27 aa, Artificial Sequence
  Cyclic GFR-binding peptide
EPLTVLYYDDSSNVIEQLSNDDSSNVI

SEQ ID NO: 95245 - protein, 29 aa, Artificial Sequence
  Cyclic GFR-binding peptide
DDSSNVIVTAKKLKPKKRVYEIKRVQVPR

SEQ ID NO: 95246 - protein, 29 aa, Artificial Sequence
  Cyclic GFR-binding peptide
DDSSNVIVQVEKLKPKKRVYEVKAVKVSR

SEQ ID NO: 95247 - protein, 29 aa, Artificial Sequence
  Cyclic GFR-binding peptide
DDSSNVIVQVEKFIPKKRVIEVKAVKVSR

SEQ ID NO: 95248 - protein, 29 aa, Artificial Sequence
  Cyclic GFR-binding peptide
DDSSNVIVQVEKHQGQHPKIRVKAMKVSR

SEQ ID NO: 95249 - protein, 29 aa, Artificial Sequence
  Cyclic GFR-binding peptide
DDSSNVIVTAKKHQGQHPKIRIKRMQVPR

SEQ ID NO: 95250 - protein, 29 aa, Artificial Sequence
  Cyclic GFR-binding peptide
DDSSNVISMEGLLKPKKRVYEMIQVTINS

SEQ ID NO: 95251 - protein, 29 aa, Artificial Sequence
  Cyclic GFR-binding peptide
DDSSNVISMEGIFIPKKRVIEMIQVTINS

SEQ ID NO: 95252 - protein, 29 aa, Artificial Sequence
  Cyclic GFR-binding peptide
DDSSNVISMEGLHQGQHPKIRMIQMTINS

SEQ ID NO: 95253 - protein, 29 aa, Artificial Sequence
  Cyclic GFR-binding peptide
DDSSNVISMEGILKPKKRVYEMIQVTINS

SEQ ID NO: 95254 - protein, 29 aa, Artificial Sequence
  Cyclic GFR-binding peptide
DDSSNVISMEGLFIPKKRVIEMIQVTINS

SEQ ID NO: 95255 - protein, 29 aa, Artificial Sequence
  Cyclic GFR-binding peptide
DDSSNVIVTAKKFIPKKRVIEIKRVQVPR

SEQ ID NO: 95256 - protein, 29 aa, Artificial Sequence
  Cyclic GFR-binding peptide
DDSSNVISMEGIHQGQHPKIRMIQMTINS

SEQ ID NO: 95257 - protein, 29 aa, Artificial Sequence
  Cyclic GFR-binding peptide
RPVQVRKIEYVRKKPKLKKATVDDSSNVI

SEQ ID NO: 95258 - protein, 29 aa, Artificial Sequence
  Cyclic GFR-binding peptide
RSVKVAKVEYVRKKPKLKEVQVDDSSNVI

SEQ ID NO: 95259 - protein, 29 aa, Artificial Sequence
  Cyclic GFR-binding peptide
RSVKVAKVEIVRKKPIFKEVQVDDSSNVI

SEQ ID NO: 95260 - protein, 29 aa, Artificial Sequence
  Cyclic GFR-binding peptide
RSVKMAKVRIKPHQGQHKEVQVDDSSNVI

SEQ ID NO: 95261 - protein, 29 aa, Artificial Sequence
  Cyclic GFR-binding peptide
RPVQMRKIRIKPHQGQHKKATVDDSSNVI

SEQ ID NO: 95262 - protein, 29 aa, Artificial Sequence
  Cyclic GFR-binding peptide
SNITVQIMEYVRKKPKLLGEMSDDSSNVI

SEQ ID NO: 95263 - protein, 29 aa, Artificial Sequence
  Cyclic GFR-binding peptide
SNITVQIMEIVRKKPIFIGEMSDDSSNVI

SEQ ID NO: 95264 - protein, 29 aa, Artificial Sequence
  Cyclic GFR-binding peptide
SNITMQIMRIKPHQGQHLGEMSDDSSNVI

SEQ ID NO: 95265 - protein, 29 aa, Artificial Sequence
  Cyclic GFR-binding peptide
SNITVQIMEYVRKKPKLIGEMSDDSSNVI

SEQ ID NO: 95266 - protein, 29 aa, Artificial Sequence
  Cyclic GFR-binding peptide
SNITVQIMEIVRKKPIFLGEMSDDSSNVI

SEQ ID NO: 95267 - protein, 29 aa, Artificial Sequence
  Cyclic GFR-binding peptide
RPVQVRKIEIVRKKPIFKKATVDDSSNVI

SEQ ID NO: 95268 - protein, 29 aa, Artificial Sequence
  Cyclic GFR-binding peptide
SNITMQIMRIKPHQGQHIGEMSDDSSNVI

SEQ ID NO: 95269 - protein, 27 aa, Artificial Sequence
  Cyclic GFR-binding peptide
DDSSNVIEYKFKVKPTRGVLYLISIPE

SEQ ID NO: 95270 - protein, 27 aa, Artificial Sequence
  Cyclic GFR-binding peptide
DDSSNVIEYKFKTPVGMDDLYLVSIPE

SEQ ID NO: 95271 - protein, 27 aa, Artificial Sequence
  Cyclic GFR-binding peptide
DDSSNVIEYQKYVKPKRGVIYLISIPS

SEQ ID NO: 95272 - protein, 27 aa, Artificial Sequence
  Cyclic GFR-binding peptide
DDSSNVIEYQKYVVKDYEDIYLMSIPS

SEQ ID NO: 95273 - protein, 27 aa, Artificial Sequence
  Cyclic GFR-binding peptide
DDSSNVIEYKFKIKPTKGILYLISIPE

SEQ ID NO: 95274 - protein, 27 aa, Artificial Sequence
  Cyclic GFR-binding peptide
DDSSNVIYHYKLYTVVGKDKYLISIPS

SEQ ID NO: 95275 - protein, 27 aa, Artificial Sequence
  Cyclic GFR-binding peptide
DDSSNVIRYKKLYTVVGKDFYLISIAN

SEQ ID NO: 95276 - protein, 27 aa, Artificial Sequence
  Cyclic GFR-binding peptide
DDSSNVIEYQKYVVNNAADIYLISIPS

SEQ ID NO: 95277 - protein, 27 aa, Artificial Sequence
  Cyclic GFR-binding peptide
DDSSNVIEYQKYVKPTRGVIYLISIPS

SEQ ID NO: 95278 - protein, 27 aa, Artificial Sequence
  Cyclic GFR-binding peptide
DDSSNVIEYQKYTPVGMDDIYLVSIPS

SEQ ID NO: 95279 - protein, 27 aa, Artificial Sequence
  Cyclic GFR-binding peptide
DDSSNVIEYKFKVVKDYEDLYLMSIPE

SEQ ID NO: 95280 - protein, 27 aa, Artificial Sequence
  Cyclic GFR-binding peptide
DDSSNVIEYKFKVVNNAADLYLISIPE

SEQ ID NO: 95281 - protein, 27 aa, Artificial Sequence
  Cyclic GFR-binding peptide
DDSSNVIEYQKYVVKENEDIYLMSIPS

SEQ ID NO: 95282 - protein, 27 aa, Artificial Sequence
  Cyclic GFR-binding peptide
DDSSNVIEYQKYIKPTKGIIYLISIPS

SEQ ID NO: 95283 - protein, 27 aa, Artificial Sequence
  Cyclic GFR-binding peptide
DDSSNVIRYKKLVVNNAADFYLISIAN

SEQ ID NO: 95284 - protein, 27 aa, Artificial Sequence
  Cyclic GFR-binding peptide
DDSSNVIYHYKLVVNNAADKYLISIPS

SEQ ID NO: 95285 - protein, 27 aa, Artificial Sequence
  Cyclic GFR-binding peptide
DDSSNVIEYKFKIVNNSSDLYLVSIPE

SEQ ID NO: 95286 - protein, 27 aa, Artificial Sequence
  Cyclic GFR-binding peptide
DDSSNVIEYQKYIVNSSDDIYLVSIPS

SEQ ID NO: 95287 - protein, 27 aa, Artificial Sequence
  Cyclic GFR-binding peptide
DDSSNVIEYKFKIVNSSDDLYLVSIPE

SEQ ID NO: 95288 - protein, 27 aa, Artificial Sequence
  Cyclic GFR-binding peptide
DDSSNVIEYKFKVKPKRGVLYLISIPE

SEQ ID NO: 95289 - protein, 27 aa, Artificial Sequence
  Cyclic GFR-binding peptide
DDSSNVIEYQKYYTVVGKDIYLISIPS

SEQ ID NO: 95290 - protein, 27 aa, Artificial Sequence
  Cyclic GFR-binding peptide
DDSSNVIEYKFKVVKENEDLYLMSIPE

SEQ ID NO: 95291 - protein, 27 aa, Artificial Sequence
  Cyclic GFR-binding peptide
DDSSNVIEYQKYIVNNSSDIYLVSIPS

SEQ ID NO: 95292 - protein, 27 aa, Artificial Sequence
  Cyclic GFR-binding peptide
DDSSNVIEYKFKYTVVGKDLYLISIPE

SEQ ID NO: 95293 - protein, 27 aa, Artificial Sequence
  Cyclic GFR-binding peptide
EPISILYLVGRTPKVKFKYEDDSSNVI

SEQ ID NO: 95294 - protein, 27 aa, Artificial Sequence
  Cyclic GFR-binding peptide
EPISVLYLDDMGVPTKFKYEDDSSNVI

SEQ ID NO: 95295 - protein, 27 aa, Artificial Sequence
  Cyclic GFR-binding peptide
SPISILYIVGRKPKVYKQYEDDSSNVI

SEQ ID NO: 95296 - protein, 27 aa, Artificial Sequence
  Cyclic GFR-binding peptide
SPISMLYIDEYDKVVYKQYEDDSSNVI

SEQ ID NO: 95297 - protein, 27 aa, Artificial Sequence
  Cyclic GFR-binding peptide
EPISILYLIGKTPKIKFKYEDDSSNVI

SEQ ID NO: 95298 - protein, 27 aa, Artificial Sequence
  Cyclic GFR-binding peptide
SPISILYKDKGVVTYLKYHYDDSSNVI

SEQ ID NO: 95299 - protein, 27 aa, Artificial Sequence
  Cyclic GFR-binding peptide
NAISILYFDKGVVTYLKKYRDDSSNVI

SEQ ID NO: 95300 - protein, 27 aa, Artificial Sequence
  Cyclic GFR-binding peptide
SPISILYIDAANNVVYKQYEDDSSNVI

SEQ ID NO: 95301 - protein, 27 aa, Artificial Sequence
  Cyclic GFR-binding peptide
SPISILYIVGRTPKVYKQYEDDSSNVI

SEQ ID NO: 95302 - protein, 27 aa, Artificial Sequence
  Cyclic GFR-binding peptide
SPISVLYIDDMGVPTYKQYEDDSSNVI

SEQ ID NO: 95303 - protein, 27 aa, Artificial Sequence
  Cyclic GFR-binding peptide
EPISMLYLDEYDKVVKFKYEDDSSNVI

SEQ ID NO: 95304 - protein, 27 aa, Artificial Sequence
  Cyclic GFR-binding peptide
EPISILYLDAANNVVKFKYEDDSSNVI

SEQ ID NO: 95305 - protein, 27 aa, Artificial Sequence
  Cyclic GFR-binding peptide
SPISMLYIDENEKVVYKQYEDDSSNVI

SEQ ID NO: 95306 - protein, 27 aa, Artificial Sequence
  Cyclic GFR-binding peptide
SPISILYIIGKTPKIYKQYEDDSSNVI

SEQ ID NO: 95307 - protein, 27 aa, Artificial Sequence
  Cyclic GFR-binding peptide
NAISILYFDAANNVVLKKYRDDSSNVI

SEQ ID NO: 95308 - protein, 27 aa, Artificial Sequence
  Cyclic GFR-binding peptide
SPISILYKDAANNVVLKYHYDDSSNVI

SEQ ID NO: 95309 - protein, 27 aa, Artificial Sequence
  Cyclic GFR-binding peptide
EPISVLYLDSSNNVIKFKYEDDSSNVI

SEQ ID NO: 95310 - protein, 27 aa, Artificial Sequence
  Cyclic GFR-binding peptide
SPISVLYIDDSSNVIYKQYEDDSSNVI

SEQ ID NO: 95311 - protein, 27 aa, Artificial Sequence
  Cyclic GFR-binding peptide
EPISVLYLDDSSNVIKFKYEDDSSNVI

SEQ ID NO: 95312 - protein, 27 aa, Artificial Sequence
  Cyclic GFR-binding peptide
EPISILYLVGRKPKVKFKYEDDSSNVI

SEQ ID NO: 95313 - protein, 27 aa, Artificial Sequence
  Cyclic GFR-binding peptide
SPISILYIDKGVVTYYKQYEDDSSNVI

SEQ ID NO: 95314 - protein, 27 aa, Artificial Sequence
  Cyclic GFR-binding peptide
EPISMLYLDENEKVVKFKYEDDSSNVI

SEQ ID NO: 95315 - protein, 27 aa, Artificial Sequence
  Cyclic GFR-binding peptide
SPISVLYIDSSNNVIYKQYEDDSSNVI

SEQ ID NO: 95316 - protein, 27 aa, Artificial Sequence
  Cyclic GFR-binding peptide
EPISILYLDKGVVTYKFKYEDDSSNVI

SEQ ID NO: 95317 - protein, 27 aa, Artificial Sequence
  Cyclic GFR-binding peptide
DDSSNVIPIKGYIIQQKDNFYLMNIPS

SEQ ID NO: 95318 - protein, 27 aa, Artificial Sequence
  Cyclic GFR-binding peptide
DDSSNVIPIKGYVVKDYEDFYLMNIPS

SEQ ID NO: 95319 - protein, 27 aa, Artificial Sequence
  Cyclic GFR-binding peptide
DDSSNVIPIKGYIVNSSDDFYLVNIPS

SEQ ID NO: 95320 - protein, 27 aa, Artificial Sequence
  Cyclic GFR-binding peptide
DDSSNVIPIKGYVVNNAADFYLINIPS

SEQ ID NO: 95321 - protein, 27 aa, Artificial Sequence
  Cyclic GFR-binding peptide
DDSSNVIPIKGYYTVVGKDFYLINIPS

SEQ ID NO: 95322 - protein, 27 aa, Artificial Sequence
  Cyclic GFR-binding peptide
DDSSNVIPIKGYLLVRGNDFYLMNIPS

SEQ ID NO: 95323 - protein, 27 aa, Artificial Sequence
  Cyclic GFR-binding peptide
DDSSNVIPIKGYVVKENEDFYLMNIPS

SEQ ID NO: 95324 - protein, 27 aa, Artificial Sequence
  Cyclic GFR-binding peptide
DDSSNVIPIKGYVVNNASDFYLINIPS

SEQ ID NO: 95325 - protein, 27 aa, Artificial Sequence
  Cyclic GFR-binding peptide
DDSSNVIPIKGYTPVGMDDFYLVNIPS

SEQ ID NO: 95326 - protein, 27 aa, Artificial Sequence
  Cyclic GFR-binding peptide
DDSSNVIPIKGYIVNNSSDFYLVNIPS

SEQ ID NO: 95327 - protein, 27 aa, Artificial Sequence
  Cyclic GFR-binding peptide
SPINMLYFNDKQQIIYGKIPDDSSNVI

SEQ ID NO: 95328 - protein, 27 aa, Artificial Sequence
  Cyclic GFR-binding peptide
SPINMLYFDEYDKVVYGKIPDDSSNVI

SEQ ID NO: 95329 - protein, 27 aa, Artificial Sequence
  Cyclic GFR-binding peptide
SPINVLYFDDSSNVIYGKIPDDSSNVI

SEQ ID NO: 95330 - protein, 27 aa, Artificial Sequence
  Cyclic GFR-binding peptide
SPINILYFDAANNVVYGKIPDDSSNVI

SEQ ID NO: 95331 - protein, 27 aa, Artificial Sequence
  Cyclic GFR-binding peptide
SPINILYFDKGVVTYYGKIPDDSSNVI

SEQ ID NO: 95332 - protein, 27 aa, Artificial Sequence
  Cyclic GFR-binding peptide
SPINMLYFDNGRVLLYGKIPDDSSNVI

SEQ ID NO: 95333 - protein, 27 aa, Artificial Sequence
  Cyclic GFR-binding peptide
SPINMLYFDENEKVVYGKIPDDSSNVI

SEQ ID NO: 95334 - protein, 27 aa, Artificial Sequence
  Cyclic GFR-binding peptide
SPINILYFDSANNVVYGKIPDDSSNVI

SEQ ID NO: 95335 - protein, 27 aa, Artificial Sequence
  Cyclic GFR-binding peptide
SPINVLYFDDMGVPTYGKIPDDSSNVI

SEQ ID NO: 95336 - protein, 27 aa, Artificial Sequence
  Cyclic GFR-binding peptide
SPINVLYFDSSNNVIYGKIPDDSSNVI

SEQ ID NO: 95337 - protein, 27 aa, Artificial Sequence
  Cyclic GFR-binding peptide
DDSSNVIEYQKYVVNNASDIYLISIPS

SEQ ID NO: 95338 - protein, 27 aa, Artificial Sequence
  Cyclic GFR-binding peptide
DDSSNVIEYQKYIIQQKDNIYLMSIPS

SEQ ID NO: 95339 - protein, 27 aa, Artificial Sequence
  Cyclic GFR-binding peptide
DDSSNVIEYQKYLLVRGNDIYLMSIPS

SEQ ID NO: 95340 - protein, 27 aa, Artificial Sequence
  Cyclic GFR-binding peptide
SPISILYIDSANNVVYKQYEDDSSNVI

SEQ ID NO: 95341 - protein, 27 aa, Artificial Sequence
  Cyclic GFR-binding peptide
SPISMLYINDKQQIIYKQYEDDSSNVI

SEQ ID NO: 95342 - protein, 27 aa, Artificial Sequence
  Cyclic GFR-binding peptide
SPISMLYIDNGRVLLYKQYEDDSSNVI

SEQ ID NO: 95343 - protein, 27 aa, Artificial Sequence
  Cyclic GFR-binding peptide
DDSSNVIPYVKLYTVVGKDFFLISLSS

SEQ ID NO: 95344 - protein, 27 aa, Artificial Sequence
  Cyclic GFR-binding peptide
DDSSNVIPYVKLIKPTKGIFFLISLSS

SEQ ID NO: 95345 - protein, 27 aa, Artificial Sequence
  Cyclic GFR-binding peptide
DDSSNVIPYVKLIIQQKDNFFLMSLSS

SEQ ID NO: 95346 - protein, 27 aa, Artificial Sequence
  Cyclic GFR-binding peptide
DDSSNVIPYVKLIVNSSDDFFLVSLSS

SEQ ID NO: 95347 - protein, 27 aa, Artificial Sequence
  Cyclic GFR-binding peptide
DDSSNVIPYVKLVKPKRGVFFLISLSS

SEQ ID NO: 95348 - protein, 27 aa, Artificial Sequence
  Cyclic GFR-binding peptide
DDSSNVIPYVKLVKPTRGVFFLISLSS

SEQ ID NO: 95349 - protein, 27 aa, Artificial Sequence
  Cyclic GFR-binding peptide
DDSSNVIPYVKLTPVGMDDFFLVSLSS

SEQ ID NO: 95350 - protein, 29 aa, Artificial Sequence
  Cyclic GFR-binding peptide
DDSSNVIPYVKLHQGQHPKIRFFLMSLSS

SEQ ID NO: 95351 - protein, 27 aa, Artificial Sequence
  Cyclic GFR-binding peptide
DDSSNVIPYVKLVVNKNEDFFLISLSS

SEQ ID NO: 95352 - protein, 27 aa, Artificial Sequence
  Cyclic GFR-binding peptide
DDSSNVIPYVKLVVNNASDFFLISLSS

SEQ ID NO: 95353 - protein, 27 aa, Artificial Sequence
  Cyclic GFR-binding peptide
DDSSNVIPYVKLVVKENEDFFLMSLSS

SEQ ID NO: 95354 - protein, 27 aa, Artificial Sequence
  Cyclic GFR-binding peptide
DDSSNVIPYVKLIVNNSSDFFLVSLSS

SEQ ID NO: 95355 - protein, 29 aa, Artificial Sequence
  Cyclic GFR-binding peptide
DDSSNVIPYVKLLKPKKRVYEFFLVSLSS

SEQ ID NO: 95356 - protein, 27 aa, Artificial Sequence
  Cyclic GFR-binding peptide
DDSSNVIPYVKLLLVRGNDFFLMSLSS

SEQ ID NO: 95357 - protein, 27 aa, Artificial Sequence
  Cyclic GFR-binding peptide
DDSSNVIPYVKLVVKDYEDFFLMSLSS

SEQ ID NO: 95358 - protein, 27 aa, Artificial Sequence
  Cyclic GFR-binding peptide
DDSSNVIPYVKLVVNNAADFFLISLSS

SEQ ID NO: 95359 - protein, 27 aa, Artificial Sequence
  Cyclic GFR-binding peptide
SSLSILFFDKGVVTYLKVYPDDSSNVI

SEQ ID NO: 95360 - protein, 27 aa, Artificial Sequence
  Cyclic GFR-binding peptide
SSLSILFFIGKTPKILKVYPDDSSNVI

SEQ ID NO: 95361 - protein, 27 aa, Artificial Sequence
  Cyclic GFR-binding peptide
SSLSMLFFNDKQQIILKVYPDDSSNVI

SEQ ID NO: 95362 - protein, 27 aa, Artificial Sequence
  Cyclic GFR-binding peptide
SSLSVLFFDDSSNVILKVYPDDSSNVI

SEQ ID NO: 95363 - protein, 27 aa, Artificial Sequence
  Cyclic GFR-binding peptide
SSLSILFFVGRKPKVLKVYPDDSSNVI

SEQ ID NO: 95364 - protein, 27 aa, Artificial Sequence
  Cyclic GFR-binding peptide
SSLSILFFVGRTPKVLKVYPDDSSNVI

SEQ ID NO: 95365 - protein, 27 aa, Artificial Sequence
  Cyclic GFR-binding peptide
SSLSVLFFDDMGVPTLKVYPDDSSNVI

SEQ ID NO: 95366 - protein, 29 aa, Artificial Sequence
  Cyclic GFR-binding peptide
SSLSMLFFRIKPHQGQHLKVYPDDSSNVI

SEQ ID NO: 95367 - protein, 27 aa, Artificial Sequence
  Cyclic GFR-binding peptide
SSLSILFFDENKNVVLKVYPDDSSNVI

SEQ ID NO: 95368 - protein, 27 aa, Artificial Sequence
  Cyclic GFR-binding peptide
SSLSILFFDSANNVVLKVYPDDSSNVI

SEQ ID NO: 95369 - protein, 27 aa, Artificial Sequence
  Cyclic GFR-binding peptide
SSLSMLFFDENEKVVLKVYPDDSSNVI

SEQ ID NO: 95370 - protein, 27 aa, Artificial Sequence
  Cyclic GFR-binding peptide
SSLSVLFFDSSNNVILKVYPDDSSNVI

SEQ ID NO: 95371 - protein, 29 aa, Artificial Sequence
  Cyclic GFR-binding peptide
SSLSVLFFEYVRKKPKLLKVYPDDSSNVI

SEQ ID NO: 95372 - protein, 27 aa, Artificial Sequence
  Cyclic GFR-binding peptide
SSLSMLFFDNGRVLLLKVYPDDSSNVI

SEQ ID NO: 95373 - protein, 27 aa, Artificial Sequence
  Cyclic GFR-binding peptide
SSLSMLFFDEYDKVVLKVYPDDSSNVI

SEQ ID NO: 95374 - protein, 27 aa, Artificial Sequence
  Cyclic GFR-binding peptide
SSLSILFFDAANNVVLKVYPDDSSNVI

SEQ ID NO: 95375 - protein, 27 aa, Artificial Sequence
  Cyclic GFR-binding peptide
DDSSNVISMEGIIVNSSDDMIQVTINS

SEQ ID NO: 95376 - protein, 27 aa, Artificial Sequence
  Cyclic GFR-binding peptide
DDSSNVIVTAKKVVKENEDIKRMQVPR

SEQ ID NO: 95377 - protein, 27 aa, Artificial Sequence
  Cyclic GFR-binding peptide
DDSSNVISMEGIVVKDYEDMIQMTINS

SEQ ID NO: 95378 - protein, 27 aa, Artificial Sequence
  Cyclic GFR-binding peptide
DDSSNVIVTAKKIKPTKGIIKRIQVPR

SEQ ID NO: 95379 - protein, 27 aa, Artificial Sequence
  Cyclic GFR-binding peptide
DDSSNVISMEGIVKPTRGVMIQITINS

SEQ ID NO: 95380 - protein, 29 aa, Artificial Sequence
  Cyclic GFR-binding peptide
DDSSNVINSLQEFIPKKRVIEYYVVPLPE

SEQ ID NO: 95381 - protein, 27 aa, Artificial Sequence
  Cyclic GFR-binding peptide
DDSSNVIVQVEKVKPKRGVVKAIKVSR

SEQ ID NO: 95382 - protein, 27 aa, Artificial Sequence
  Cyclic GFR-binding peptide
DDSSNVIVQVEKVVKENEDVKAMKVSR

SEQ ID NO: 95383 - protein, 27 aa, Artificial Sequence
  Cyclic GFR-binding peptide
DDSSNVIVTAKKIVNSSDDIKRVQVPR

SEQ ID NO: 95384 - protein, 27 aa, Artificial Sequence
  Cyclic GFR-binding peptide
DDSSNVIVQVEKIKPTKGIVKAIKVSR

SEQ ID NO: 95385 - protein, 29 aa, Artificial Sequence
  Cyclic GFR-binding peptide
DDSSNVINSLQEFIPKKRVIEYYLVTLPE

SEQ ID NO: 95386 - protein, 27 aa, Artificial Sequence
  Cyclic GFR-binding peptide
DDSSNVIVQVEKIVNSSDDVKAVKVSR

SEQ ID NO: 95387 - protein, 27 aa, Artificial Sequence
  Cyclic GFR-binding peptide
DDSSNVIVTAKKVKPKRGVIKRIQVPR

SEQ ID NO: 95388 - protein, 27 aa, Artificial Sequence
  Cyclic GFR-binding peptide
DDSSNVIVQVEKVKPTRGVVKAIKVSR

SEQ ID NO: 95389 - protein, 27 aa, Artificial Sequence
  Cyclic GFR-binding peptide
DDSSNVIVTAKKVKPTRGVIKRIQVPR

SEQ ID NO: 95390 - protein, 29 aa, Artificial Sequence
  Cyclic GFR-binding peptide
DDSSNVINSLQELKPKKRVYEYYLVTLPE

SEQ ID NO: 95391 - protein, 27 aa, Artificial Sequence
  Cyclic GFR-binding peptide
DDSSNVISMEGIVKPKRGVMIQITINS

SEQ ID NO: 95392 - protein, 27 aa, Artificial Sequence
  Cyclic GFR-binding peptide
DDSSNVISMEGIVVKENEDMIQMTINS

SEQ ID NO: 95393 - protein, 27 aa, Artificial Sequence
  Cyclic GFR-binding peptide
DDSSNVISMEGIIKPTKGIMIQITINS

SEQ ID NO: 95394 - protein, 29 aa, Artificial Sequence
  Cyclic GFR-binding peptide
DDSSNVINSLQEHQGQHPKIRYYLMTLPE

SEQ ID NO: 95395 - protein, 27 aa, Artificial Sequence
  Cyclic GFR-binding peptide
DDSSNVIVTAKKVVKDYEDIKRMQVPR

SEQ ID NO: 95396 - protein, 29 aa, Artificial Sequence
  Cyclic GFR-binding peptide
DDSSNVINSLQEHQGQHPKIRYYVMPLPE

SEQ ID NO: 95397 - protein, 29 aa, Artificial Sequence
  Cyclic GFR-binding peptide
DDSSNVINSLQELKPKKRVYEYYVVPLPE

SEQ ID NO: 95398 - protein, 27 aa, Artificial Sequence
  Cyclic GFR-binding peptide
DDSSNVIVQVEKVVKDYEDVKAMKVSR

SEQ ID NO: 95399 - protein, 27 aa, Artificial Sequence
  Cyclic GFR-binding peptide
SNITVQIMDDSSNVIIGEMSDDSSNVI

SEQ ID NO: 95400 - protein, 27 aa, Artificial Sequence
  Cyclic GFR-binding peptide
RPVQMRKIDENEKVVKKATVDDSSNVI

SEQ ID NO: 95401 - protein, 27 aa, Artificial Sequence
  Cyclic GFR-binding peptide
SNITMQIMDEYDKVVIGEMSDDSSNVI

SEQ ID NO: 95402 - protein, 27 aa, Artificial Sequence
  Cyclic GFR-binding peptide
RPVQIRKIIGKTPKIKKATVDDSSNVI

SEQ ID NO: 95403 - protein, 27 aa, Artificial Sequence
  Cyclic GFR-binding peptide
SNITIQIMVGRTPKVIGEMSDDSSNVI

SEQ ID NO: 95404 - protein, 29 aa, Artificial Sequence
  Cyclic GFR-binding peptide
EPLPVVYYEIVRKKPIFEQLSNDDSSNVI

SEQ ID NO: 95405 - protein, 27 aa, Artificial Sequence
  Cyclic GFR-binding peptide
RSVKIAKVVGRKPKVKEVQVDDSSNVI

SEQ ID NO: 95406 - protein, 27 aa, Artificial Sequence
  Cyclic GFR-binding peptide
RSVKMAKVDENEKVVKEVQVDDSSNVI

SEQ ID NO: 95407 - protein, 27 aa, Artificial Sequence
  Cyclic GFR-binding peptide
RPVQVRKIDDSSNVIKKATVDDSSNVI

SEQ ID NO: 95408 - protein, 27 aa, Artificial Sequence
  Cyclic GFR-binding peptide
RSVKIAKVIGKTPKIKEVQVDDSSNVI

SEQ ID NO: 95409 - protein, 29 aa, Artificial Sequence
  Cyclic GFR-binding peptide
EPLTVLYYEIVRKKPIFEQLSNDDSSNVI

SEQ ID NO: 95410 - protein, 27 aa, Artificial Sequence
  Cyclic GFR-binding peptide
RSVKVAKVDDSSNVIKEVQVDDSSNVI

SEQ ID NO: 95411 - protein, 27 aa, Artificial Sequence
  Cyclic GFR-binding peptide
RPVQIRKIVGRKPKVKKATVDDSSNVI

SEQ ID NO: 95412 - protein, 27 aa, Artificial Sequence
  Cyclic GFR-binding peptide
RSVKIAKVVGRTPKVKEVQVDDSSNVI

SEQ ID NO: 95413 - protein, 27 aa, Artificial Sequence
  Cyclic GFR-binding peptide
RPVQIRKIVGRTPKVKKATVDDSSNVI

SEQ ID NO: 95414 - protein, 29 aa, Artificial Sequence
  Cyclic GFR-binding peptide
EPLTVLYYEYVRKKPKLEQLSNDDSSNVI

SEQ ID NO: 95415 - protein, 27 aa, Artificial Sequence
  Cyclic GFR-binding peptide
SNITIQIMVGRKPKVIGEMSDDSSNVI

SEQ ID NO: 95416 - protein, 27 aa, Artificial Sequence
  Cyclic GFR-binding peptide
SNITMQIMDENEKVVIGEMSDDSSNVI

SEQ ID NO: 95417 - protein, 27 aa, Artificial Sequence
  Cyclic GFR-binding peptide
SNITIQIMIGKTPKIIGEMSDDSSNVI

SEQ ID NO: 95418 - protein, 29 aa, Artificial Sequence
  Cyclic GFR-binding peptide
EPLTMLYYRIKPHQGQHEQLSNDDSSNVI

SEQ ID NO: 95419 - protein, 27 aa, Artificial Sequence
  Cyclic GFR-binding peptide
RPVQMRKIDEYDKVVKKATVDDSSNVI

SEQ ID NO: 95420 - protein, 29 aa, Artificial Sequence
  Cyclic GFR-binding peptide
EPLPMVYYRIKPHQGQHEQLSNDDSSNVI

SEQ ID NO: 95421 - protein, 29 aa, Artificial Sequence
  Cyclic GFR-binding peptide
EPLPVVYYEYVRKKPKLEQLSNDDSSNVI

SEQ ID NO: 95422 - protein, 27 aa, Artificial Sequence
  Cyclic GFR-binding peptide
RSVKMAKVDEYDKVVKEVQVDDSSNVI

SEQ ID NO: 95423 - protein, 27 aa, Artificial Sequence
  Cyclic GFR-binding peptide
DDSSNVIRYKKLIIQQKDNFYLMSIAN

SEQ ID NO: 95424 - protein, 27 aa, Artificial Sequence
  Cyclic GFR-binding peptide
DDSSNVIRYKKLLLVRGNDFYLMSIAN

SEQ ID NO: 95425 - protein, 27 aa, Artificial Sequence
  Cyclic GFR-binding peptide
NAISMLYFNDKQQIILKKYRDDSSNVI

SEQ ID NO: 95426 - protein, 27 aa, Artificial Sequence
  Cyclic GFR-binding peptide
NAISMLYFDNGRVLLLKKYRDDSSNVI

SEQ ID NO: 95427 - protein, 27 aa, Artificial Sequence
  Cyclic GFR-binding peptide
DDSSNVIEYKFKVVNKNEDLYLISIPE

SEQ ID NO: 95428 - protein, 27 aa, Artificial Sequence
  Cyclic GFR-binding peptide
DDSSNVIPIKGYVKPTRGVFYLINIPS

SEQ ID NO: 95429 - protein, 27 aa, Artificial Sequence
  Cyclic GFR-binding peptide
DDSSNVIEYKFKLLVRGNDLYLMSIPE

SEQ ID NO: 95430 - protein, 27 aa, Artificial Sequence
  Cyclic GFR-binding peptide
DDSSNVIYHYKLVVNKNEDKYLISIPS

SEQ ID NO: 95431 - protein, 27 aa, Artificial Sequence
  Cyclic GFR-binding peptide
DDSSNVIRHKRLLLVRGNDYYLMSTAS

SEQ ID NO: 95432 - protein, 27 aa, Artificial Sequence
  Cyclic GFR-binding peptide
DDSSNVIYHYKLLLVRGNDKYLMSIPS

SEQ ID NO: 95433 - protein, 27 aa, Artificial Sequence
  Cyclic GFR-binding peptide
DDSSNVIRHKRLVVNKNEDYYLISTAS

SEQ ID NO: 95434 - protein, 27 aa, Artificial Sequence
  Cyclic GFR-binding peptide
DDSSNVIRYKKLVVNKNEDFYLISIAN

SEQ ID NO: 95435 - protein, 27 aa, Artificial Sequence
  Cyclic GFR-binding peptide
DDSSNVIPIKGYVVNKNEDFYLINIPS

SEQ ID NO: 95436 - protein, 27 aa, Artificial Sequence
  Cyclic GFR-binding peptide
DDSSNVIPIKGYIKPTKGIFYLINIPS

SEQ ID NO: 95437 - protein, 27 aa, Artificial Sequence
  Cyclic GFR-binding peptide
DDSSNVIRHKRLYTVVGKDYYLISTAS

SEQ ID NO: 95438 - protein, 27 aa, Artificial Sequence
  Cyclic GFR-binding peptide
DDSSNVIEYKFKVVNNASDLYLISIPE

SEQ ID NO: 95439 - protein, 27 aa, Artificial Sequence
  Cyclic GFR-binding peptide
DDSSNVIRHKRLIIQQKDNYYLMSTAS

SEQ ID NO: 95440 - protein, 27 aa, Artificial Sequence
  Cyclic GFR-binding peptide
DDSSNVIEYKFKIIQQKDNLYLMSIPE

SEQ ID NO: 95441 - protein, 27 aa, Artificial Sequence
  Cyclic GFR-binding peptide
DDSSNVIPIKGYVKPKRGVFYLINIPS

SEQ ID NO: 95442 - protein, 27 aa, Artificial Sequence
  Cyclic GFR-binding peptide
DDSSNVIRHKRLVVNNASDYYLISTAS

SEQ ID NO: 95443 - protein, 27 aa, Artificial Sequence
  Cyclic GFR-binding peptide
DDSSNVIYHYKLVVNNASDKYLISIPS

SEQ ID NO: 95444 - protein, 27 aa, Artificial Sequence
  Cyclic GFR-binding peptide
DDSSNVIYHYKLIIQQKDNKYLMSIPS

SEQ ID NO: 95445 - protein, 27 aa, Artificial Sequence
  Cyclic GFR-binding peptide
DDSSNVIRHKRLVVNNAADYYLISTAS

SEQ ID NO: 95446 - protein, 27 aa, Artificial Sequence
  Cyclic GFR-binding peptide
EPISILYLDENKNVVKFKYEDDSSNVI

SEQ ID NO: 95447 - protein, 27 aa, Artificial Sequence
  Cyclic GFR-binding peptide
SPINILYFVGRTPKVYGKIPDDSSNVI

SEQ ID NO: 95448 - protein, 27 aa, Artificial Sequence
  Cyclic GFR-binding peptide
EPISMLYLDNGRVLLKFKYEDDSSNVI

SEQ ID NO: 95449 - protein, 27 aa, Artificial Sequence
  Cyclic GFR-binding peptide
SPISILYKDENKNVVLKYHYDDSSNVI

SEQ ID NO: 95450 - protein, 27 aa, Artificial Sequence
  Cyclic GFR-binding peptide
SATSMLYYDNGRVLLLRKHRDDSSNVI

SEQ ID NO: 95451 - protein, 27 aa, Artificial Sequence
  Cyclic GFR-binding peptide
SPISMLYKDNGRVLLLKYHYDDSSNVI

SEQ ID NO: 95452 - protein, 27 aa, Artificial Sequence
  Cyclic GFR-binding peptide
SATSILYYDENKNVVLRKHRDDSSNVI

SEQ ID NO: 95453 - protein, 27 aa, Artificial Sequence
  Cyclic GFR-binding peptide
NAISILYFDENKNVVLKKYRDDSSNVI

SEQ ID NO: 95454 - protein, 27 aa, Artificial Sequence
  Cyclic GFR-binding peptide
SPINILYFDENKNVVYGKIPDDSSNVI

SEQ ID NO: 95455 - protein, 27 aa, Artificial Sequence
  Cyclic GFR-binding peptide
SPINILYFIGKTPKIYGKIPDDSSNVI

SEQ ID NO: 95456 - protein, 27 aa, Artificial Sequence
  Cyclic GFR-binding peptide
SATSILYYDKGVVTYLRKHRDDSSNVI

SEQ ID NO: 95457 - protein, 27 aa, Artificial Sequence
  Cyclic GFR-binding peptide
EPISILYLDSANNVVKFKYEDDSSNVI

SEQ ID NO: 95458 - protein, 27 aa, Artificial Sequence
  Cyclic GFR-binding peptide
SATSMLYYNDKQQIILRKHRDDSSNVI

SEQ ID NO: 95459 - protein, 27 aa, Artificial Sequence
  Cyclic GFR-binding peptide
EPISMLYLNDKQQIIKFKYEDDSSNVI

SEQ ID NO: 95460 - protein, 27 aa, Artificial Sequence
  Cyclic GFR-binding peptide
SPINILYFVGRKPKVYGKIPDDSSNVI

SEQ ID NO: 95461 - protein, 27 aa, Artificial Sequence
  Cyclic GFR-binding peptide
SATSILYYDSANNVVLRKHRDDSSNVI

SEQ ID NO: 95462 - protein, 27 aa, Artificial Sequence
  Cyclic GFR-binding peptide
SPISILYKDSANNVVLKYHYDDSSNVI

SEQ ID NO: 95463 - protein, 27 aa, Artificial Sequence
  Cyclic GFR-binding peptide
SPISMLYKNDKQQIILKYHYDDSSNVI

SEQ ID NO: 95464 - protein, 27 aa, Artificial Sequence
  Cyclic GFR-binding peptide
SATSILYYDAANNVVLRKHRDDSSNVI

SEQ ID NO: 95465 - protein, 27 aa, Artificial Sequence
  Cyclic GFR-binding peptide
DDSSNVISMEGIIIQQKDNMIQMTINS

SEQ ID NO: 95466 - protein, 27 aa, Artificial Sequence
  Cyclic GFR-binding peptide
DDSSNVISMEGLVKPKRGVMIQITINS

SEQ ID NO: 95467 - protein, 27 aa, Artificial Sequence
  Cyclic GFR-binding peptide
DDSSNVISMEGLVVNNASDMIQITINS

SEQ ID NO: 95468 - protein, 27 aa, Artificial Sequence
  Cyclic GFR-binding peptide
DDSSNVISMEGILLVRGNDMIQMTINS

SEQ ID NO: 95469 - protein, 27 aa, Artificial Sequence
  Cyclic GFR-binding peptide
DDSSNVISMEGLIKPTKGIMIQITINS

SEQ ID NO: 95470 - protein, 27 aa, Artificial Sequence
  Cyclic GFR-binding peptide
DDSSNVISMEGLIVNSSDDMIQVTINS

SEQ ID NO: 95471 - protein, 27 aa, Artificial Sequence
  Cyclic GFR-binding peptide
DDSSNVISMEGIVVNNASDMIQITINS

SEQ ID NO: 95472 - protein, 27 aa, Artificial Sequence
  Cyclic GFR-binding peptide
DDSSNVISMEGLVVNNAADMIQITINS

SEQ ID NO: 95473 - protein, 27 aa, Artificial Sequence
  Cyclic GFR-binding peptide
DDSSNVISMEGLLLVRGNDMIQMTINS

SEQ ID NO: 95474 - protein, 27 aa, Artificial Sequence
  Cyclic GFR-binding peptide
DDSSNVISMEGLIIQQKDNMIQMTINS

SEQ ID NO: 95475 - protein, 27 aa, Artificial Sequence
  Cyclic GFR-binding peptide
DDSSNVISMEGIVVNNAADMIQITINS

SEQ ID NO: 95476 - protein, 27 aa, Artificial Sequence
  Cyclic GFR-binding peptide
DDSSNVISMEGLVKPTRGVMIQITINS

SEQ ID NO: 95477 - protein, 27 aa, Artificial Sequence
  Cyclic GFR-binding peptide
SNITMQIMNDKQQIIIGEMSDDSSNVI

SEQ ID NO: 95478 - protein, 27 aa, Artificial Sequence
  Cyclic GFR-binding peptide
SNITIQIMVGRKPKVLGEMSDDSSNVI

SEQ ID NO: 95479 - protein, 27 aa, Artificial Sequence
  Cyclic GFR-binding peptide
SNITIQIMDSANNVVLGEMSDDSSNVI

SEQ ID NO: 95480 - protein, 27 aa, Artificial Sequence
  Cyclic GFR-binding peptide
SNITMQIMDNGRVLLIGEMSDDSSNVI

SEQ ID NO: 95481 - protein, 27 aa, Artificial Sequence
  Cyclic GFR-binding peptide
SNITIQIMIGKTPKILGEMSDDSSNVI

SEQ ID NO: 95482 - protein, 27 aa, Artificial Sequence
  Cyclic GFR-binding peptide
SNITVQIMDDSSNVILGEMSDDSSNVI

SEQ ID NO: 95483 - protein, 27 aa, Artificial Sequence
  Cyclic GFR-binding peptide
SNITIQIMDSANNVVIGEMSDDSSNVI

SEQ ID NO: 95484 - protein, 27 aa, Artificial Sequence
  Cyclic GFR-binding peptide
SNITIQIMDAANNVVLGEMSDDSSNVI

SEQ ID NO: 95485 - protein, 27 aa, Artificial Sequence
  Cyclic GFR-binding peptide
SNITMQIMDNGRVLLLGEMSDDSSNVI

SEQ ID NO: 95486 - protein, 27 aa, Artificial Sequence
  Cyclic GFR-binding peptide
SNITMQIMNDKQQIILGEMSDDSSNVI

SEQ ID NO: 95487 - protein, 27 aa, Artificial Sequence
  Cyclic GFR-binding peptide
SNITIQIMDAANNVVIGEMSDDSSNVI

SEQ ID NO: 95488 - protein, 27 aa, Artificial Sequence
  Cyclic GFR-binding peptide
SNITIQIMVGRTPKVLGEMSDDSSNVI

SEQ ID NO: 95489 - protein, 27 aa, Artificial Sequence
  Cyclic GFR-binding peptide
DDSSNVIQYNKLVVNKNEDLYLISIAS

SEQ ID NO: 95490 - protein, 27 aa, Artificial Sequence
  Cyclic GFR-binding peptide
DDSSNVIQYNKLVVNNAADLYLISIAS

SEQ ID NO: 95491 - protein, 27 aa, Artificial Sequence
  Cyclic GFR-binding peptide
DDSSNVIQYNKLIIQQKDNLYLMSIAS

SEQ ID NO: 95492 - protein, 27 aa, Artificial Sequence
  Cyclic GFR-binding peptide
DDSSNVIQYNKLLLVRGNDLYLMSIAS

SEQ ID NO: 95493 - protein, 27 aa, Artificial Sequence
  Cyclic GFR-binding peptide
DDSSNVIQYNKLYTVVGKDLYLISIAS

SEQ ID NO: 95494 - protein, 27 aa, Artificial Sequence
  Cyclic GFR-binding peptide
SAISILYLDENKNVVLKNYQDDSSNVI

SEQ ID NO: 95495 - protein, 27 aa, Artificial Sequence
  Cyclic GFR-binding peptide
SAISILYLDAANNVVLKNYQDDSSNVI

SEQ ID NO: 95496 - protein, 27 aa, Artificial Sequence
  Cyclic GFR-binding peptide
SAISMLYLNDKQQIILKNYQDDSSNVI

SEQ ID NO: 95497 - protein, 27 aa, Artificial Sequence
  Cyclic GFR-binding peptide
SAISMLYLDNGRVLLLKNYQDDSSNVI

SEQ ID NO: 95498 - protein, 27 aa, Artificial Sequence
  Cyclic GFR-binding peptide
SAISILYLDKGVVTYLKNYQDDSSNVI

SEQ ID NO: 95499 - protein, 27 aa, Artificial Sequence
  Cyclic GFR-binding peptide
DSSNNVIRYKKLIKPTKGIFYLISIAN

SEQ ID NO: 95500 - protein, 29 aa, Artificial Sequence
  Cyclic GFR-binding peptide
DSSNNVIRHKRLFIPKKRVIEYYLVSTAS

SEQ ID NO: 95501 - protein, 27 aa, Artificial Sequence
  Cyclic GFR-binding peptide
DSSNNVIYHYKLVVKDYEDKYLMSIPS

SEQ ID NO: 95502 - protein, 27 aa, Artificial Sequence
  Cyclic GFR-binding peptide
DSSNNVIQYNKLIVNNSSDLYLVSIAS

SEQ ID NO: 95503 - protein, 27 aa, Artificial Sequence
  Cyclic GFR-binding peptide
DSSNNVIRYKKLVVKDYEDFYLMSIAN

SEQ ID NO: 95504 - protein, 27 aa, Artificial Sequence
  Cyclic GFR-binding peptide
DSSNNVIRYKKLVKPTRGVFYLISIAN

SEQ ID NO: 95505 - protein, 27 aa, Artificial Sequence
  Cyclic GFR-binding peptide
DSSNNVIRHKRLVVKENEDYYLMSTAS

SEQ ID NO: 95506 - protein, 27 aa, Artificial Sequence
  Cyclic GFR-binding peptide
DSSNNVIYHYKLIKPTKGIKYLISIPS

SEQ ID NO: 95507 - protein, 29 aa, Artificial Sequence
  Cyclic GFR-binding peptide
DSSNNVIRYKKLFIPKKRVIEFYLVSIAN

SEQ ID NO: 95508 - protein, 27 aa, Artificial Sequence
  Cyclic GFR-binding peptide
DSSNNVIYHYKLVVKENEDKYLMSIPS

SEQ ID NO: 95509 - protein, 27 aa, Artificial Sequence
  Cyclic GFR-binding peptide
DSSNNVIRHKRLVKPKRGVYYLISTAS

SEQ ID NO: 95510 - protein, 27 aa, Artificial Sequence
  Cyclic GFR-binding peptide
DSSNNVIYHYKLVKPKRGVKYLISIPS

SEQ ID NO: 95511 - protein, 29 aa, Artificial Sequence
  Cyclic GFR-binding peptide
DSSNNVIQYNKLFIPKKRVIELYLVSIAS

SEQ ID NO: 95512 - protein, 27 aa, Artificial Sequence
  Cyclic GFR-binding peptide
DSSNNVIQYNKLVKPTRGVLYLISIAS

SEQ ID NO: 95513 - protein, 27 aa, Artificial Sequence
  Cyclic GFR-binding peptide
DSSNNVIRYKKLVVKENEDFYLMSIAN

SEQ ID NO: 95514 - protein, 27 aa, Artificial Sequence
  Cyclic GFR-binding peptide
DSSNNVIQYNKLTPVGMDDLYLVSIAS

SEQ ID NO: 95515 - protein, 27 aa, Artificial Sequence
  Cyclic GFR-binding peptide
DSSNNVIRYKKLTPVGMDDFYLVSIAN

SEQ ID NO: 95516 - protein, 27 aa, Artificial Sequence
  Cyclic GFR-binding peptide
DSSNNVIRYKKLVKPKRGVFYLISIAN

SEQ ID NO: 95517 - protein, 27 aa, Artificial Sequence
  Cyclic GFR-binding peptide
DSSNNVIQYNKLVVKENEDLYLMSIAS

SEQ ID NO: 95518 - protein, 27 aa, Artificial Sequence
  Cyclic GFR-binding peptide
DSSNNVIYHYKLIVNSSDDKYLVSIPS

SEQ ID NO: 95519 - protein, 27 aa, Artificial Sequence
  Cyclic GFR-binding peptide
DSSNNVIQYNKLVKPKRGVLYLISIAS

SEQ ID NO: 95520 - protein, 27 aa, Artificial Sequence
  Cyclic GFR-binding peptide
DSSNNVIRYKKLIVNNSSDFYLVSIAN

SEQ ID NO: 95521 - protein, 27 aa, Artificial Sequence
  Cyclic GFR-binding peptide
DSSNNVIRYKKLIVNSSDDFYLVSIAN

SEQ ID NO: 95522 - protein, 27 aa, Artificial Sequence
  Cyclic GFR-binding peptide
DSSNNVIRHKRLVKPTRGVYYLISTAS

SEQ ID NO: 95523 - protein, 29 aa, Artificial Sequence
  Cyclic GFR-binding peptide
DSSNNVIYHYKLFIPKKRVIEKYLVSIPS

SEQ ID NO: 95524 - protein, 27 aa, Artificial Sequence
  Cyclic GFR-binding peptide
DSSNNVIRHKRLIKPTKGIYYLISTAS

SEQ ID NO: 95525 - protein, 27 aa, Artificial Sequence
  Cyclic GFR-binding peptide
DSSNNVIRHKRLTPVGMDDYYLVSTAS

SEQ ID NO: 95526 - protein, 27 aa, Artificial Sequence
  Cyclic GFR-binding peptide
DSSNNVIYHYKLTPVGMDDKYLVSIPS

SEQ ID NO: 95527 - protein, 27 aa, Artificial Sequence
  Cyclic GFR-binding peptide
DSSNNVIYHYKLIVNNSSDKYLVSIPS

SEQ ID NO: 95528 - protein, 27 aa, Artificial Sequence
  Cyclic GFR-binding peptide
DSSNNVIRHKRLIVNNSSDYYLVSTAS

SEQ ID NO: 95529 - protein, 27 aa, Artificial Sequence
  Cyclic GFR-binding peptide
DSSNNVIYHYKLVKPTRGVKYLISIPS

SEQ ID NO: 95530 - protein, 27 aa, Artificial Sequence
  Cyclic GFR-binding peptide
DSSNNVIRHKRLIVNSSDDYYLVSTAS

SEQ ID NO: 95531 - protein, 27 aa, Artificial Sequence
  Cyclic GFR-binding peptide
DSSNNVIRHKRLVVKDYEDYYLMSTAS

SEQ ID NO: 95532 - protein, 27 aa, Artificial Sequence
  Cyclic GFR-binding peptide
DSSNNVIQYNKLIKPTKGILYLISIAS

SEQ ID NO: 95533 - protein, 27 aa, Artificial Sequence
  Cyclic GFR-binding peptide
DSSNNVIQYNKLVVKDYEDLYLMSIAS

SEQ ID NO: 95534 - protein, 27 aa, Artificial Sequence
  Cyclic GFR-binding peptide
DSSNNVIQYNKLIVNSSDDLYLVSIAS

SEQ ID NO: 95535 - protein, 27 aa, Artificial Sequence
  Cyclic GFR-binding peptide
NAISILYFIGKTPKILKKYRDSSNNVI

SEQ ID NO: 95536 - protein, 29 aa, Artificial Sequence
  Cyclic GFR-binding peptide
SATSVLYYEIVRKKPIFLRKHRDSSNNVI

SEQ ID NO: 95537 - protein, 27 aa, Artificial Sequence
  Cyclic GFR-binding peptide
SPISMLYKDEYDKVVLKYHYDSSNNVI

SEQ ID NO: 95538 - protein, 27 aa, Artificial Sequence
  Cyclic GFR-binding peptide
NAISMLYFDEYDKVVLKKYRDSSNNVI

SEQ ID NO: 95539 - protein, 27 aa, Artificial Sequence
  Cyclic GFR-binding peptide
NAISILYFVGRTPKVLKKYRDSSNNVI

SEQ ID NO: 95540 - protein, 27 aa, Artificial Sequence
  Cyclic GFR-binding peptide
SATSMLYYDENEKVVLRKHRDSSNNVI

SEQ ID NO: 95541 - protein, 27 aa, Artificial Sequence
  Cyclic GFR-binding peptide
SPISILYKIGKTPKILKYHYDSSNNVI

SEQ ID NO: 95542 - protein, 29 aa, Artificial Sequence
  Cyclic GFR-binding peptide
NAISVLYFEIVRKKPIFLKKYRDSSNNVI

SEQ ID NO: 95543 - protein, 27 aa, Artificial Sequence
  Cyclic GFR-binding peptide
SPISMLYKDENEKVVLKYHYDSSNNVI

SEQ ID NO: 95544 - protein, 27 aa, Artificial Sequence
  Cyclic GFR-binding peptide
SATSILYYVGRKPKVLRKHRDSSNNVI

SEQ ID NO: 95545 - protein, 27 aa, Artificial Sequence
  Cyclic GFR-binding peptide
SPISILYKVGRKPKVLKYHYDSSNNVI

SEQ ID NO: 95546 - protein, 29 aa, Artificial Sequence
  Cyclic GFR-binding peptide
SAISVLYLEIVRKKPIFLKNYQDSSNNVI

SEQ ID NO: 95547 - protein, 27 aa, Artificial Sequence
  Cyclic GFR-binding peptide
SAISILYLVGRTPKVLKNYQDSSNNVI

SEQ ID NO: 95548 - protein, 27 aa, Artificial Sequence
  Cyclic GFR-binding peptide
NAISMLYFDENEKVVLKKYRDSSNNVI

SEQ ID NO: 95549 - protein, 27 aa, Artificial Sequence
  Cyclic GFR-binding peptide
SAISVLYLDDMGVPTLKNYQDSSNNVI

SEQ ID NO: 95550 - protein, 27 aa, Artificial Sequence
  Cyclic GFR-binding peptide
NAISVLYFDDMGVPTLKKYRDSSNNVI

SEQ ID NO: 95551 - protein, 27 aa, Artificial Sequence
  Cyclic GFR-binding peptide
NAISILYFVGRKPKVLKKYRDSSNNVI

SEQ ID NO: 95552 - protein, 27 aa, Artificial Sequence
  Cyclic GFR-binding peptide
SAISMLYLDENEKVVLKNYQDSSNNVI

SEQ ID NO: 95553 - protein, 27 aa, Artificial Sequence
  Cyclic GFR-binding peptide
SPISVLYKDDSSNVILKYHYDSSNNVI

SEQ ID NO: 95554 - protein, 27 aa, Artificial Sequence
  Cyclic GFR-binding peptide
SAISILYLVGRKPKVLKNYQDSSNNVI

SEQ ID NO: 95555 - protein, 27 aa, Artificial Sequence
  Cyclic GFR-binding peptide
NAISVLYFDSSNNVILKKYRDSSNNVI

SEQ ID NO: 95556 - protein, 27 aa, Artificial Sequence
  Cyclic GFR-binding peptide
NAISVLYFDDSSNVILKKYRDSSNNVI

SEQ ID NO: 95557 - protein, 27 aa, Artificial Sequence
  Cyclic GFR-binding peptide
SATSILYYVGRTPKVLRKHRDSSNNVI

SEQ ID NO: 95558 - protein, 29 aa, Artificial Sequence
  Cyclic GFR-binding peptide
SPISVLYKEIVRKKPIFLKYHYDSSNNVI

SEQ ID NO: 95559 - protein, 27 aa, Artificial Sequence
  Cyclic GFR-binding peptide
SATSILYYIGKTPKILRKHRDSSNNVI

SEQ ID NO: 95560 - protein, 27 aa, Artificial Sequence
  Cyclic GFR-binding peptide
SATSVLYYDDMGVPTLRKHRDSSNNVI

SEQ ID NO: 95561 - protein, 27 aa, Artificial Sequence
  Cyclic GFR-binding peptide
SPISVLYKDDMGVPTLKYHYDSSNNVI

SEQ ID NO: 95562 - protein, 27 aa, Artificial Sequence
  Cyclic GFR-binding peptide
SPISVLYKDSSNNVILKYHYDSSNNVI

SEQ ID NO: 95563 - protein, 27 aa, Artificial Sequence
  Cyclic GFR-binding peptide
SATSVLYYDSSNNVILRKHRDSSNNVI

SEQ ID NO: 95564 - protein, 27 aa, Artificial Sequence
  Cyclic GFR-binding peptide
SPISILYKVGRTPKVLKYHYDSSNNVI

SEQ ID NO: 95565 - protein, 27 aa, Artificial Sequence
  Cyclic GFR-binding peptide
SATSVLYYDDSSNVILRKHRDSSNNVI

SEQ ID NO: 95566 - protein, 27 aa, Artificial Sequence
  Cyclic GFR-binding peptide
SATSMLYYDEYDKVVLRKHRDSSNNVI

SEQ ID NO: 95567 - protein, 27 aa, Artificial Sequence
  Cyclic GFR-binding peptide
SAISILYLIGKTPKILKNYQDSSNNVI

SEQ ID NO: 95568 - protein, 27 aa, Artificial Sequence
  Cyclic GFR-binding peptide
SAISMLYLDEYDKVVLKNYQDSSNNVI

SEQ ID NO: 95569 - protein, 27 aa, Artificial Sequence
  Cyclic GFR-binding peptide
SAISVLYLDDSSNVILKNYQDSSNNVI

SEQ ID NO: 95570 - protein, 27 aa, Artificial Sequence
  Cyclic GFR-binding peptide
DSSNNVINSLQEVVKDYEDYYLMTLPE

SEQ ID NO: 95571 - protein, 27 aa, Artificial Sequence
  Cyclic GFR-binding peptide
DSSNNVINSLQEIKPTKGIYYVIPLPE

SEQ ID NO: 95572 - protein, 27 aa, Artificial Sequence
  Cyclic GFR-binding peptide
DSSNNVINSLQEVKPKRGVYYLITLPE

SEQ ID NO: 95573 - protein, 27 aa, Artificial Sequence
  Cyclic GFR-binding peptide
DSSNNVINSLQEVKPTRGVYYVIPLPE

SEQ ID NO: 95574 - protein, 27 aa, Artificial Sequence
  Cyclic GFR-binding peptide
DSSNNVIEYQKYIVNSSDDIFLVSIPS

SEQ ID NO: 95575 - protein, 27 aa, Artificial Sequence
  Cyclic GFR-binding peptide
DSSNNVIEYQKYVKPTRGVIFLISIPS

SEQ ID NO: 95576 - protein, 27 aa, Artificial Sequence
  Cyclic GFR-binding peptide
DSSNNVINSLQEVVKENEDYYLMTLPE

SEQ ID NO: 95577 - protein, 27 aa, Artificial Sequence
  Cyclic GFR-binding peptide
DSSNNVINSLQEVVNNASDYYLITLPE

SEQ ID NO: 95578 - protein, 27 aa, Artificial Sequence
  Cyclic GFR-binding peptide
DSSNNVINSLQEVKPKRGVYYVIPLPE

SEQ ID NO: 95579 - protein, 27 aa, Artificial Sequence
  Cyclic GFR-binding peptide
DSSNNVINSLQEVVNNASDYYVIPLPE

SEQ ID NO: 95580 - protein, 27 aa, Artificial Sequence
  Cyclic GFR-binding peptide
DSSNNVINSLQEVKPTRGVYYLITLPE

SEQ ID NO: 95581 - protein, 27 aa, Artificial Sequence
  Cyclic GFR-binding peptide
DSSNNVIEYQKYIKPTKGIIFLISIPS

SEQ ID NO: 95582 - protein, 27 aa, Artificial Sequence
  Cyclic GFR-binding peptide
DSSNNVIEYQKYVVNNASDIFLISIPS

SEQ ID NO: 95583 - protein, 27 aa, Artificial Sequence
  Cyclic GFR-binding peptide
DSSNNVINSLQEIVNSSDDYYVVPLPE

SEQ ID NO: 95584 - protein, 27 aa, Artificial Sequence
  Cyclic GFR-binding peptide
DSSNNVINSLQEVVKDYEDYYVMPLPE

SEQ ID NO: 95585 - protein, 27 aa, Artificial Sequence
  Cyclic GFR-binding peptide
DSSNNVIEYQKYVVKENEDIFLMSIPS

SEQ ID NO: 95586 - protein, 27 aa, Artificial Sequence
  Cyclic GFR-binding peptide
DSSNNVINSLQEVVKENEDYYVMPLPE

SEQ ID NO: 95587 - protein, 27 aa, Artificial Sequence
  Cyclic GFR-binding peptide
DSSNNVIEYQKYVVKDYEDIFLMSIPS

SEQ ID NO: 95588 - protein, 27 aa, Artificial Sequence
  Cyclic GFR-binding peptide
DSSNNVIQYNKLVVNNASDLYLISIAS

SEQ ID NO: 95589 - protein, 27 aa, Artificial Sequence
  Cyclic GFR-binding peptide
DSSNNVINSLQEIKPTKGIYYLITLPE

SEQ ID NO: 95590 - protein, 27 aa, Artificial Sequence
  Cyclic GFR-binding peptide
DSSNNVIEYQKYVKPKRGVIFLISIPS

SEQ ID NO: 95591 - protein, 27 aa, Artificial Sequence
  Cyclic GFR-binding peptide
DSSNNVIRYKKLVVNNASDFYLISIAN

SEQ ID NO: 95592 - protein, 27 aa, Artificial Sequence
  Cyclic GFR-binding peptide
DSSNNVINSLQEIVNSSDDYYLVTLPE

SEQ ID NO: 95593 - protein, 27 aa, Artificial Sequence
  Cyclic GFR-binding peptide
EPLTMLYYDEYDKVVEQLSNDSSNNVI

SEQ ID NO: 95594 - protein, 27 aa, Artificial Sequence
  Cyclic GFR-binding peptide
EPLPIVYYIGKTPKIEQLSNDSSNNVI

SEQ ID NO: 95595 - protein, 27 aa, Artificial Sequence
  Cyclic GFR-binding peptide
EPLTILYYVGRKPKVEQLSNDSSNNVI

SEQ ID NO: 95596 - protein, 27 aa, Artificial Sequence
  Cyclic GFR-binding peptide
EPLPIVYYVGRTPKVEQLSNDSSNNVI

SEQ ID NO: 95597 - protein, 27 aa, Artificial Sequence
  Cyclic GFR-binding peptide
SPISVLFIDDSSNVIYKQYEDSSNNVI

SEQ ID NO: 95598 - protein, 27 aa, Artificial Sequence
  Cyclic GFR-binding peptide
SPISILFIVGRTPKVYKQYEDSSNNVI

SEQ ID NO: 95599 - protein, 27 aa, Artificial Sequence
  Cyclic GFR-binding peptide
EPLTMLYYDENEKVVEQLSNDSSNNVI

SEQ ID NO: 95600 - protein, 27 aa, Artificial Sequence
  Cyclic GFR-binding peptide
EPLTILYYDSANNVVEQLSNDSSNNVI

SEQ ID NO: 95601 - protein, 27 aa, Artificial Sequence
  Cyclic GFR-binding peptide
EPLPIVYYVGRKPKVEQLSNDSSNNVI

SEQ ID NO: 95602 - protein, 27 aa, Artificial Sequence
  Cyclic GFR-binding peptide
EPLPIVYYDSANNVVEQLSNDSSNNVI

SEQ ID NO: 95603 - protein, 27 aa, Artificial Sequence
  Cyclic GFR-binding peptide
EPLTILYYVGRTPKVEQLSNDSSNNVI

SEQ ID NO: 95604 - protein, 27 aa, Artificial Sequence
  Cyclic GFR-binding peptide
SPISILFIIGKTPKIYKQYEDSSNNVI

SEQ ID NO: 95605 - protein, 27 aa, Artificial Sequence
  Cyclic GFR-binding peptide
SPISILFIDSANNVVYKQYEDSSNNVI

SEQ ID NO: 95606 - protein, 27 aa, Artificial Sequence
  Cyclic GFR-binding peptide
EPLPVVYYDDSSNVIEQLSNDSSNNVI

SEQ ID NO: 95607 - protein, 27 aa, Artificial Sequence
  Cyclic GFR-binding peptide
EPLPMVYYDEYDKVVEQLSNDSSNNVI

SEQ ID NO: 95608 - protein, 27 aa, Artificial Sequence
  Cyclic GFR-binding peptide
SPISMLFIDENEKVVYKQYEDSSNNVI

SEQ ID NO: 95609 - protein, 27 aa, Artificial Sequence
  Cyclic GFR-binding peptide
EPLPMVYYDENEKVVEQLSNDSSNNVI

SEQ ID NO: 95610 - protein, 27 aa, Artificial Sequence
  Cyclic GFR-binding peptide
SPISMLFIDEYDKVVYKQYEDSSNNVI

SEQ ID NO: 95611 - protein, 27 aa, Artificial Sequence
  Cyclic GFR-binding peptide
SAISILYLDSANNVVLKNYQDSSNNVI

SEQ ID NO: 95612 - protein, 27 aa, Artificial Sequence
  Cyclic GFR-binding peptide
EPLTILYYIGKTPKIEQLSNDSSNNVI

SEQ ID NO: 95613 - protein, 27 aa, Artificial Sequence
  Cyclic GFR-binding peptide
SPISILFIVGRKPKVYKQYEDSSNNVI

SEQ ID NO: 95614 - protein, 27 aa, Artificial Sequence
  Cyclic GFR-binding peptide
NAISILYFDSANNVVLKKYRDSSNNVI

SEQ ID NO: 95615 - protein, 27 aa, Artificial Sequence
  Cyclic GFR-binding peptide
EPLTVLYYDDSSNVIEQLSNDSSNNVI

SEQ ID NO: 95616 - protein, 29 aa, Artificial Sequence
  Cyclic GFR-binding peptide
DSSNNVIVTAKKLKPKKRVYEIKRVQVPR

SEQ ID NO: 95617 - protein, 29 aa, Artificial Sequence
  Cyclic GFR-binding peptide
DSSNNVIVQVEKLKPKKRVYEVKAVKVSR

SEQ ID NO: 95618 - protein, 29 aa, Artificial Sequence
  Cyclic GFR-binding peptide
DSSNNVIVQVEKFIPKKRVIEVKAVKVSR

SEQ ID NO: 95619 - protein, 29 aa, Artificial Sequence
  Cyclic GFR-binding peptide
DSSNNVIVQVEKHQGQHPKIRVKAMKVSR

SEQ ID NO: 95620 - protein, 29 aa, Artificial Sequence
  Cyclic GFR-binding peptide
DSSNNVIVTAKKHQGQHPKIRIKRMQVPR

SEQ ID NO: 95621 - protein, 29 aa, Artificial Sequence
  Cyclic GFR-binding peptide
DSSNNVISMEGLLKPKKRVYEMIQVTINS

SEQ ID NO: 95622 - protein, 29 aa, Artificial Sequence
  Cyclic GFR-binding peptide
DSSNNVISMEGIFIPKKRVIEMIQVTINS

SEQ ID NO: 95623 - protein, 29 aa, Artificial Sequence
  Cyclic GFR-binding peptide
DSSNNVISMEGLHQGQHPKIRMIQMTINS

SEQ ID NO: 95624 - protein, 29 aa, Artificial Sequence
  Cyclic GFR-binding peptide
DSSNNVISMEGILKPKKRVYEMIQVTINS

SEQ ID NO: 95625 - protein, 29 aa, Artificial Sequence
  Cyclic GFR-binding peptide
DSSNNVISMEGLFIPKKRVIEMIQVTINS

SEQ ID NO: 95626 - protein, 29 aa, Artificial Sequence
  Cyclic GFR-binding peptide
DSSNNVIVTAKKFIPKKRVIEIKRVQVPR

SEQ ID NO: 95627 - protein, 29 aa, Artificial Sequence
  Cyclic GFR-binding peptide
DSSNNVISMEGIHQGQHPKIRMIQMTINS

SEQ ID NO: 95628 - protein, 29 aa, Artificial Sequence
  Cyclic GFR-binding peptide
RPVQVRKIEYVRKKPKLKKATVDSSNNVI

SEQ ID NO: 95629 - protein, 29 aa, Artificial Sequence
  Cyclic GFR-binding peptide
RSVKVAKVEYVRKKPKLKEVQVDSSNNVI

SEQ ID NO: 95630 - protein, 29 aa, Artificial Sequence
  Cyclic GFR-binding peptide
RSVKVAKVEIVRKKPIFKEVQVDSSNNVI

SEQ ID NO: 95631 - protein, 29 aa, Artificial Sequence
  Cyclic GFR-binding peptide
RSVKMAKVRIKPHQGQHKEVQVDSSNNVI

SEQ ID NO: 95632 - protein, 29 aa, Artificial Sequence
  Cyclic GFR-binding peptide
RPVQMRKIRIKPHQGQHKKATVDSSNNVI

SEQ ID NO: 95633 - protein, 29 aa, Artificial Sequence
  Cyclic GFR-binding peptide
SNITVQIMEYVRKKPKLLGEMSDSSNNVI

SEQ ID NO: 95634 - protein, 29 aa, Artificial Sequence
  Cyclic GFR-binding peptide
SNITVQIMEIVRKKPIFIGEMSDSSNNVI

SEQ ID NO: 95635 - protein, 29 aa, Artificial Sequence
  Cyclic GFR-binding peptide
SNITMQIMRIKPHQGQHLGEMSDSSNNVI

SEQ ID NO: 95636 - protein, 29 aa, Artificial Sequence
  Cyclic GFR-binding peptide
SNITVQIMEYVRKKPKLIGEMSDSSNNVI

SEQ ID NO: 95637 - protein, 29 aa, Artificial Sequence
  Cyclic GFR-binding peptide
SNITVQIMEIVRKKPIFLGEMSDSSNNVI

SEQ ID NO: 95638 - protein, 29 aa, Artificial Sequence
  Cyclic GFR-binding peptide
RPVQVRKIEIVRKKPIFKKATVDSSNNVI

SEQ ID NO: 95639 - protein, 29 aa, Artificial Sequence
  Cyclic GFR-binding peptide
SNITMQIMRIKPHQGQHIGEMSDSSNNVI

SEQ ID NO: 95640 - protein, 27 aa, Artificial Sequence
  Cyclic GFR-binding peptide
DSSNNVIEYKFKVKPTRGVLYLISIPE

SEQ ID NO: 95641 - protein, 27 aa, Artificial Sequence
  Cyclic GFR-binding peptide
DSSNNVIEYKFKTPVGMDDLYLVSIPE

SEQ ID NO: 95642 - protein, 27 aa, Artificial Sequence
  Cyclic GFR-binding peptide
DSSNNVIEYQKYVKPKRGVIYLISIPS

SEQ ID NO: 95643 - protein, 27 aa, Artificial Sequence
  Cyclic GFR-binding peptide
DSSNNVIEYQKYVVKDYEDIYLMSIPS

SEQ ID NO: 95644 - protein, 27 aa, Artificial Sequence
  Cyclic GFR-binding peptide
DSSNNVIEYKFKIKPTKGILYLISIPE

SEQ ID NO: 95645 - protein, 27 aa, Artificial Sequence
  Cyclic GFR-binding peptide
DSSNNVIYHYKLYTVVGKDKYLISIPS

SEQ ID NO: 95646 - protein, 27 aa, Artificial Sequence
  Cyclic GFR-binding peptide
DSSNNVIRYKKLYTVVGKDFYLISIAN

SEQ ID NO: 95647 - protein, 27 aa, Artificial Sequence
  Cyclic GFR-binding peptide
DSSNNVIEYQKYVVNNAADIYLISIPS

SEQ ID NO: 95648 - protein, 27 aa, Artificial Sequence
  Cyclic GFR-binding peptide
DSSNNVIEYQKYVKPTRGVIYLISIPS

SEQ ID NO: 95649 - protein, 27 aa, Artificial Sequence
  Cyclic GFR-binding peptide
DSSNNVIEYQKYTPVGMDDIYLVSIPS

SEQ ID NO: 95650 - protein, 27 aa, Artificial Sequence
  Cyclic GFR-binding peptide
DSSNNVIEYKFKVVKDYEDLYLMSIPE

SEQ ID NO: 95651 - protein, 27 aa, Artificial Sequence
  Cyclic GFR-binding peptide
DSSNNVIEYKFKVVNNAADLYLISIPE

SEQ ID NO: 95652 - protein, 27 aa, Artificial Sequence
  Cyclic GFR-binding peptide
DSSNNVIEYQKYVVKENEDIYLMSIPS

SEQ ID NO: 95653 - protein, 27 aa, Artificial Sequence
  Cyclic GFR-binding peptide
DSSNNVIEYQKYIKPTKGIIYLISIPS

SEQ ID NO: 95654 - protein, 27 aa, Artificial Sequence
  Cyclic GFR-binding peptide
DSSNNVIRYKKLVVNNAADFYLISIAN

SEQ ID NO: 95655 - protein, 27 aa, Artificial Sequence
  Cyclic GFR-binding peptide
DSSNNVIYHYKLVVNNAADKYLISIPS

SEQ ID NO: 95656 - protein, 27 aa, Artificial Sequence
  Cyclic GFR-binding peptide
DSSNNVIEYKFKIVNNSSDLYLVSIPE

SEQ ID NO: 95657 - protein, 27 aa, Artificial Sequence
  Cyclic GFR-binding peptide
DSSNNVIEYQKYIVNSSDDIYLVSIPS

SEQ ID NO: 95658 - protein, 27 aa, Artificial Sequence
  Cyclic GFR-binding peptide
DSSNNVIEYKFKIVNSSDDLYLVSIPE

SEQ ID NO: 95659 - protein, 27 aa, Artificial Sequence
  Cyclic GFR-binding peptide
DSSNNVIEYKFKVKPKRGVLYLISIPE

SEQ ID NO: 95660 - protein, 27 aa, Artificial Sequence
  Cyclic GFR-binding peptide
DSSNNVIEYQKYYTVVGKDIYLISIPS

SEQ ID NO: 95661 - protein, 27 aa, Artificial Sequence
  Cyclic GFR-binding peptide
DSSNNVIEYKFKVVKENEDLYLMSIPE

SEQ ID NO: 95662 - protein, 27 aa, Artificial Sequence
  Cyclic GFR-binding peptide
DSSNNVIEYQKYIVNNSSDIYLVSIPS

SEQ ID NO: 95663 - protein, 27 aa, Artificial Sequence
  Cyclic GFR-binding peptide
DSSNNVIEYKFKYTVVGKDLYLISIPE

SEQ ID NO: 95664 - protein, 27 aa, Artificial Sequence
  Cyclic GFR-binding peptide
EPISILYLVGRTPKVKFKYEDSSNNVI

SEQ ID NO: 95665 - protein, 27 aa, Artificial Sequence
  Cyclic GFR-binding peptide
EPISVLYLDDMGVPTKFKYEDSSNNVI

SEQ ID NO: 95666 - protein, 27 aa, Artificial Sequence
  Cyclic GFR-binding peptide
SPISILYIVGRKPKVYKQYEDSSNNVI

SEQ ID NO: 95667 - protein, 27 aa, Artificial Sequence
  Cyclic GFR-binding peptide
SPISMLYIDEYDKVVYKQYEDSSNNVI

SEQ ID NO: 95668 - protein, 27 aa, Artificial Sequence
  Cyclic GFR-binding peptide
EPISILYLIGKTPKIKFKYEDSSNNVI

SEQ ID NO: 95669 - protein, 27 aa, Artificial Sequence
  Cyclic GFR-binding peptide
SPISILYKDKGVVTYLKYHYDSSNNVI

SEQ ID NO: 95670 - protein, 27 aa, Artificial Sequence
  Cyclic GFR-binding peptide
NAISILYFDKGVVTYLKKYRDSSNNVI

SEQ ID NO: 95671 - protein, 27 aa, Artificial Sequence
  Cyclic GFR-binding peptide
SPISILYIDAANNVVYKQYEDSSNNVI

SEQ ID NO: 95672 - protein, 27 aa, Artificial Sequence
  Cyclic GFR-binding peptide
SPISILYIVGRTPKVYKQYEDSSNNVI

SEQ ID NO: 95673 - protein, 27 aa, Artificial Sequence
  Cyclic GFR-binding peptide
SPISVLYIDDMGVPTYKQYEDSSNNVI

SEQ ID NO: 95674 - protein, 27 aa, Artificial Sequence
  Cyclic GFR-binding peptide
EPISMLYLDEYDKVVKFKYEDSSNNVI

SEQ ID NO: 95675 - protein, 27 aa, Artificial Sequence
  Cyclic GFR-binding peptide
EPISILYLDAANNVVKFKYEDSSNNVI

SEQ ID NO: 95676 - protein, 27 aa, Artificial Sequence
  Cyclic GFR-binding peptide
SPISMLYIDENEKVVYKQYEDSSNNVI

SEQ ID NO: 95677 - protein, 27 aa, Artificial Sequence
  Cyclic GFR-binding peptide
SPISILYIIGKTPKIYKQYEDSSNNVI

SEQ ID NO: 95678 - protein, 27 aa, Artificial Sequence
  Cyclic GFR-binding peptide
NAISILYFDAANNVVLKKYRDSSNNVI

SEQ ID NO: 95679 - protein, 27 aa, Artificial Sequence
  Cyclic GFR-binding peptide
SPISILYKDAANNVVLKYHYDSSNNVI

SEQ ID NO: 95680 - protein, 27 aa, Artificial Sequence
  Cyclic GFR-binding peptide
EPISVLYLDSSNNVIKFKYEDSSNNVI

SEQ ID NO: 95681 - protein, 27 aa, Artificial Sequence
  Cyclic GFR-binding peptide
SPISVLYIDDSSNVIYKQYEDSSNNVI

SEQ ID NO: 95682 - protein, 27 aa, Artificial Sequence
  Cyclic GFR-binding peptide
EPISVLYLDDSSNVIKFKYEDSSNNVI

SEQ ID NO: 95683 - protein, 27 aa, Artificial Sequence
  Cyclic GFR-binding peptide
EPISILYLVGRKPKVKFKYEDSSNNVI

SEQ ID NO: 95684 - protein, 27 aa, Artificial Sequence
  Cyclic GFR-binding peptide
SPISILYIDKGVVTYYKQYEDSSNNVI

SEQ ID NO: 95685 - protein, 27 aa, Artificial Sequence
  Cyclic GFR-binding peptide
EPISMLYLDENEKVVKFKYEDSSNNVI

SEQ ID NO: 95686 - protein, 27 aa, Artificial Sequence
  Cyclic GFR-binding peptide
SPISVLYIDSSNNVIYKQYEDSSNNVI

SEQ ID NO: 95687 - protein, 27 aa, Artificial Sequence
  Cyclic GFR-binding peptide
EPISILYLDKGVVTYKFKYEDSSNNVI

SEQ ID NO: 95688 - protein, 27 aa, Artificial Sequence
  Cyclic GFR-binding peptide
DSSNNVIPIKGYIIQQKDNFYLMNIPS

SEQ ID NO: 95689 - protein, 27 aa, Artificial Sequence
  Cyclic GFR-binding peptide
DSSNNVIPIKGYVVKDYEDFYLMNIPS

SEQ ID NO: 95690 - protein, 27 aa, Artificial Sequence
  Cyclic GFR-binding peptide
DSSNNVIPIKGYIVNSSDDFYLVNIPS

SEQ ID NO: 95691 - protein, 27 aa, Artificial Sequence
  Cyclic GFR-binding peptide
DSSNNVIPIKGYVVNNAADFYLINIPS

SEQ ID NO: 95692 - protein, 27 aa, Artificial Sequence
  Cyclic GFR-binding peptide
DSSNNVIPIKGYYTVVGKDFYLINIPS

SEQ ID NO: 95693 - protein, 27 aa, Artificial Sequence
  Cyclic GFR-binding peptide
DSSNNVIPIKGYLLVRGNDFYLMNIPS

SEQ ID NO: 95694 - protein, 27 aa, Artificial Sequence
  Cyclic GFR-binding peptide
DSSNNVIPIKGYVVKENEDFYLMNIPS

SEQ ID NO: 95695 - protein, 27 aa, Artificial Sequence
  Cyclic GFR-binding peptide
DSSNNVIPIKGYVVNNASDFYLINIPS

SEQ ID NO: 95696 - protein, 27 aa, Artificial Sequence
  Cyclic GFR-binding peptide
DSSNNVIPIKGYTPVGMDDFYLVNIPS

SEQ ID NO: 95697 - protein, 27 aa, Artificial Sequence
  Cyclic GFR-binding peptide
DSSNNVIPIKGYIVNNSSDFYLVNIPS

SEQ ID NO: 95698 - protein, 27 aa, Artificial Sequence
  Cyclic GFR-binding peptide
SPINMLYFNDKQQIIYGKIPDSSNNVI

SEQ ID NO: 95699 - protein, 27 aa, Artificial Sequence
  Cyclic GFR-binding peptide
SPINMLYFDEYDKVVYGKIPDSSNNVI

SEQ ID NO: 95700 - protein, 27 aa, Artificial Sequence
  Cyclic GFR-binding peptide
SPINVLYFDDSSNVIYGKIPDSSNNVI

SEQ ID NO: 95701 - protein, 27 aa, Artificial Sequence
  Cyclic GFR-binding peptide
SPINILYFDAANNVVYGKIPDSSNNVI

SEQ ID NO: 95702 - protein, 27 aa, Artificial Sequence
  Cyclic GFR-binding peptide
SPINILYFDKGVVTYYGKIPDSSNNVI

SEQ ID NO: 95703 - protein, 27 aa, Artificial Sequence
  Cyclic GFR-binding peptide
SPINMLYFDNGRVLLYGKIPDSSNNVI

SEQ ID NO: 95704 - protein, 27 aa, Artificial Sequence
  Cyclic GFR-binding peptide
SPINMLYFDENEKVVYGKIPDSSNNVI

SEQ ID NO: 95705 - protein, 27 aa, Artificial Sequence
  Cyclic GFR-binding peptide
SPINILYFDSANNVVYGKIPDSSNNVI

SEQ ID NO: 95706 - protein, 27 aa, Artificial Sequence
  Cyclic GFR-binding peptide
SPINVLYFDDMGVPTYGKIPDSSNNVI

SEQ ID NO: 95707 - protein, 27 aa, Artificial Sequence
  Cyclic GFR-binding peptide
SPINVLYFDSSNNVIYGKIPDSSNNVI

SEQ ID NO: 95708 - protein, 27 aa, Artificial Sequence
  Cyclic GFR-binding peptide
DSSNNVIEYQKYVVNNASDIYLISIPS

SEQ ID NO: 95709 - protein, 27 aa, Artificial Sequence
  Cyclic GFR-binding peptide
DSSNNVIEYQKYIIQQKDNIYLMSIPS

SEQ ID NO: 95710 - protein, 27 aa, Artificial Sequence
  Cyclic GFR-binding peptide
DSSNNVIEYQKYLLVRGNDIYLMSIPS

SEQ ID NO: 95711 - protein, 27 aa, Artificial Sequence
  Cyclic GFR-binding peptide
SPISILYIDSANNVVYKQYEDSSNNVI

SEQ ID NO: 95712 - protein, 27 aa, Artificial Sequence
  Cyclic GFR-binding peptide
SPISMLYINDKQQIIYKQYEDSSNNVI

SEQ ID NO: 95713 - protein, 27 aa, Artificial Sequence
  Cyclic GFR-binding peptide
SPISMLYIDNGRVLLYKQYEDSSNNVI

SEQ ID NO: 95714 - protein, 27 aa, Artificial Sequence
  Cyclic GFR-binding peptide
DSSNNVIPYVKLYTVVGKDFFLISLSS

SEQ ID NO: 95715 - protein, 27 aa, Artificial Sequence
  Cyclic GFR-binding peptide
DSSNNVIPYVKLIKPTKGIFFLISLSS

SEQ ID NO: 95716 - protein, 27 aa, Artificial Sequence
  Cyclic GFR-binding peptide
DSSNNVIPYVKLIIQQKDNFFLMSLSS

SEQ ID NO: 95717 - protein, 27 aa, Artificial Sequence
  Cyclic GFR-binding peptide
DSSNNVIPYVKLIVNSSDDFFLVSLSS

SEQ ID NO: 95718 - protein, 27 aa, Artificial Sequence
  Cyclic GFR-binding peptide
DSSNNVIPYVKLVKPKRGVFFLISLSS

SEQ ID NO: 95719 - protein, 27 aa, Artificial Sequence
  Cyclic GFR-binding peptide
DSSNNVIPYVKLVKPTRGVFFLISLSS

SEQ ID NO: 95720 - protein, 27 aa, Artificial Sequence
  Cyclic GFR-binding peptide
DSSNNVIPYVKLTPVGMDDFFLVSLSS

SEQ ID NO: 95721 - protein, 29 aa, Artificial Sequence
  Cyclic GFR-binding peptide
DSSNNVIPYVKLHQGQHPKIRFFLMSLSS

SEQ ID NO: 95722 - protein, 27 aa, Artificial Sequence
  Cyclic GFR-binding peptide
DSSNNVIPYVKLVVNKNEDFFLISLSS

SEQ ID NO: 95723 - protein, 27 aa, Artificial Sequence
  Cyclic GFR-binding peptide
DSSNNVIPYVKLVVNNASDFFLISLSS

SEQ ID NO: 95724 - protein, 27 aa, Artificial Sequence
  Cyclic GFR-binding peptide
DSSNNVIPYVKLVVKENEDFFLMSLSS

SEQ ID NO: 95725 - protein, 27 aa, Artificial Sequence
  Cyclic GFR-binding peptide
DSSNNVIPYVKLIVNNSSDFFLVSLSS

SEQ ID NO: 95726 - protein, 29 aa, Artificial Sequence
  Cyclic GFR-binding peptide
DSSNNVIPYVKLLKPKKRVYEFFLVSLSS

SEQ ID NO: 95727 - protein, 27 aa, Artificial Sequence
  Cyclic GFR-binding peptide
DSSNNVIPYVKLLLVRGNDFFLMSLSS

SEQ ID NO: 95728 - protein, 27 aa, Artificial Sequence
  Cyclic GFR-binding peptide
DSSNNVIPYVKLVVKDYEDFFLMSLSS

SEQ ID NO: 95729 - protein, 27 aa, Artificial Sequence
  Cyclic GFR-binding peptide
DSSNNVIPYVKLVVNNAADFFLISLSS

SEQ ID NO: 95730 - protein, 27 aa, Artificial Sequence
  Cyclic GFR-binding peptide
SSLSILFFDKGVVTYLKVYPDSSNNVI

SEQ ID NO: 95731 - protein, 27 aa, Artificial Sequence
  Cyclic GFR-binding peptide
SSLSILFFIGKTPKILKVYPDSSNNVI

SEQ ID NO: 95732 - protein, 27 aa, Artificial Sequence
  Cyclic GFR-binding peptide
SSLSMLFFNDKQQIILKVYPDSSNNVI

SEQ ID NO: 95733 - protein, 27 aa, Artificial Sequence
  Cyclic GFR-binding peptide
SSLSVLFFDDSSNVILKVYPDSSNNVI

SEQ ID NO: 95734 - protein, 27 aa, Artificial Sequence
  Cyclic GFR-binding peptide
SSLSILFFVGRKPKVLKVYPDSSNNVI

SEQ ID NO: 95735 - protein, 27 aa, Artificial Sequence
  Cyclic GFR-binding peptide
SSLSILFFVGRTPKVLKVYPDSSNNVI

SEQ ID NO: 95736 - protein, 27 aa, Artificial Sequence
  Cyclic GFR-binding peptide
SSLSVLFFDDMGVPTLKVYPDSSNNVI

SEQ ID NO: 95737 - protein, 29 aa, Artificial Sequence
  Cyclic GFR-binding peptide
SSLSMLFFRIKPHQGQHLKVYPDSSNNVI

SEQ ID NO: 95738 - protein, 27 aa, Artificial Sequence
  Cyclic GFR-binding peptide
SSLSILFFDENKNVVLKVYPDSSNNVI

SEQ ID NO: 95739 - protein, 27 aa, Artificial Sequence
  Cyclic GFR-binding peptide
SSLSILFFDSANNVVLKVYPDSSNNVI

SEQ ID NO: 95740 - protein, 27 aa, Artificial Sequence
  Cyclic GFR-binding peptide
SSLSMLFFDENEKVVLKVYPDSSNNVI

SEQ ID NO: 95741 - protein, 27 aa, Artificial Sequence
  Cyclic GFR-binding peptide
SSLSVLFFDSSNNVILKVYPDSSNNVI

SEQ ID NO: 95742 - protein, 29 aa, Artificial Sequence
  Cyclic GFR-binding peptide
SSLSVLFFEYVRKKPKLLKVYPDSSNNVI

SEQ ID NO: 95743 - protein, 27 aa, Artificial Sequence
  Cyclic GFR-binding peptide
SSLSMLFFDNGRVLLLKVYPDSSNNVI

SEQ ID NO: 95744 - protein, 27 aa, Artificial Sequence
  Cyclic GFR-binding peptide
SSLSMLFFDEYDKVVLKVYPDSSNNVI

SEQ ID NO: 95745 - protein, 27 aa, Artificial Sequence
  Cyclic GFR-binding peptide
SSLSILFFDAANNVVLKVYPDSSNNVI

SEQ ID NO: 95746 - protein, 27 aa, Artificial Sequence
  Cyclic GFR-binding peptide
DSSNNVISMEGIIVNSSDDMIQVTINS

SEQ ID NO: 95747 - protein, 27 aa, Artificial Sequence
  Cyclic GFR-binding peptide
DSSNNVIVTAKKVVKENEDIKRMQVPR

SEQ ID NO: 95748 - protein, 27 aa, Artificial Sequence
  Cyclic GFR-binding peptide
DSSNNVISMEGIVVKDYEDMIQMTINS

SEQ ID NO: 95749 - protein, 27 aa, Artificial Sequence
  Cyclic GFR-binding peptide
DSSNNVIVTAKKIKPTKGIIKRIQVPR

SEQ ID NO: 95750 - protein, 27 aa, Artificial Sequence
  Cyclic GFR-binding peptide
DSSNNVISMEGIVKPTRGVMIQITINS

SEQ ID NO: 95751 - protein, 29 aa, Artificial Sequence
  Cyclic GFR-binding peptide
DSSNNVINSLQEFIPKKRVIEYYVVPLPE

SEQ ID NO: 95752 - protein, 27 aa, Artificial Sequence
  Cyclic GFR-binding peptide
DSSNNVIVQVEKVKPKRGVVKAIKVSR

SEQ ID NO: 95753 - protein, 27 aa, Artificial Sequence
  Cyclic GFR-binding peptide
DSSNNVIVQVEKVVKENEDVKAMKVSR

SEQ ID NO: 95754 - protein, 27 aa, Artificial Sequence
  Cyclic GFR-binding peptide
DSSNNVIVTAKKIVNSSDDIKRVQVPR

SEQ ID NO: 95755 - protein, 27 aa, Artificial Sequence
  Cyclic GFR-binding peptide
DSSNNVIVQVEKIKPTKGIVKAIKVSR

SEQ ID NO: 95756 - protein, 29 aa, Artificial Sequence
  Cyclic GFR-binding peptide
DSSNNVINSLQEFIPKKRVIEYYLVTLPE

SEQ ID NO: 95757 - protein, 27 aa, Artificial Sequence
  Cyclic GFR-binding peptide
DSSNNVIVQVEKIVNSSDDVKAVKVSR

SEQ ID NO: 95758 - protein, 27 aa, Artificial Sequence
  Cyclic GFR-binding peptide
DSSNNVIVTAKKVKPKRGVIKRIQVPR

SEQ ID NO: 95759 - protein, 27 aa, Artificial Sequence
  Cyclic GFR-binding peptide
DSSNNVIVQVEKVKPTRGVVKAIKVSR

SEQ ID NO: 95760 - protein, 27 aa, Artificial Sequence
  Cyclic GFR-binding peptide
DSSNNVIVTAKKVKPTRGVIKRIQVPR

SEQ ID NO: 95761 - protein, 29 aa, Artificial Sequence
  Cyclic GFR-binding peptide
DSSNNVINSLQELKPKKRVYEYYLVTLPE

SEQ ID NO: 95762 - protein, 27 aa, Artificial Sequence
  Cyclic GFR-binding peptide
DSSNNVISMEGIVKPKRGVMIQITINS

SEQ ID NO: 95763 - protein, 27 aa, Artificial Sequence
  Cyclic GFR-binding peptide
DSSNNVISMEGIVVKENEDMIQMTINS

SEQ ID NO: 95764 - protein, 27 aa, Artificial Sequence
  Cyclic GFR-binding peptide
DSSNNVISMEGIIKPTKGIMIQITINS

SEQ ID NO: 95765 - protein, 29 aa, Artificial Sequence
  Cyclic GFR-binding peptide
DSSNNVINSLQEHQGQHPKIRYYLMTLPE

SEQ ID NO: 95766 - protein, 27 aa, Artificial Sequence
  Cyclic GFR-binding peptide
DSSNNVIVTAKKVVKDYEDIKRMQVPR

SEQ ID NO: 95767 - protein, 29 aa, Artificial Sequence
  Cyclic GFR-binding peptide
DSSNNVINSLQEHQGQHPKIRYYVMPLPE

SEQ ID NO: 95768 - protein, 29 aa, Artificial Sequence
  Cyclic GFR-binding peptide
DSSNNVINSLQELKPKKRVYEYYVVPLPE

SEQ ID NO: 95769 - protein, 27 aa, Artificial Sequence
  Cyclic GFR-binding peptide
DSSNNVIVQVEKVVKDYEDVKAMKVSR

SEQ ID NO: 95770 - protein, 27 aa, Artificial Sequence
  Cyclic GFR-binding peptide
SNITVQIMDDSSNVIIGEMSDSSNNVI

SEQ ID NO: 95771 - protein, 27 aa, Artificial Sequence
  Cyclic GFR-binding peptide
RPVQMRKIDENEKVVKKATVDSSNNVI

SEQ ID NO: 95772 - protein, 27 aa, Artificial Sequence
  Cyclic GFR-binding peptide
SNITMQIMDEYDKVVIGEMSDSSNNVI

SEQ ID NO: 95773 - protein, 27 aa, Artificial Sequence
  Cyclic GFR-binding peptide
RPVQIRKIIGKTPKIKKATVDSSNNVI

SEQ ID NO: 95774 - protein, 27 aa, Artificial Sequence
  Cyclic GFR-binding peptide
SNITIQIMVGRTPKVIGEMSDSSNNVI

SEQ ID NO: 95775 - protein, 29 aa, Artificial Sequence
  Cyclic GFR-binding peptide
EPLPVVYYEIVRKKPIFEQLSNDSSNNVI

SEQ ID NO: 95776 - protein, 27 aa, Artificial Sequence
  Cyclic GFR-binding peptide
RSVKIAKVVGRKPKVKEVQVDSSNNVI

SEQ ID NO: 95777 - protein, 27 aa, Artificial Sequence
  Cyclic GFR-binding peptide
RSVKMAKVDENEKVVKEVQVDSSNNVI

SEQ ID NO: 95778 - protein, 27 aa, Artificial Sequence
  Cyclic GFR-binding peptide
RPVQVRKIDDSSNVIKKATVDSSNNVI

SEQ ID NO: 95779 - protein, 27 aa, Artificial Sequence
  Cyclic GFR-binding peptide
RSVKIAKVIGKTPKIKEVQVDSSNNVI

SEQ ID NO: 95780 - protein, 29 aa, Artificial Sequence
  Cyclic GFR-binding peptide
EPLTVLYYEIVRKKPIFEQLSNDSSNNVI

SEQ ID NO: 95781 - protein, 27 aa, Artificial Sequence
  Cyclic GFR-binding peptide
RSVKVAKVDDSSNVIKEVQVDSSNNVI

SEQ ID NO: 95782 - protein, 27 aa, Artificial Sequence
  Cyclic GFR-binding peptide
RPVQIRKIVGRKPKVKKATVDSSNNVI

SEQ ID NO: 95783 - protein, 27 aa, Artificial Sequence
  Cyclic GFR-binding peptide
RSVKIAKVVGRTPKVKEVQVDSSNNVI

SEQ ID NO: 95784 - protein, 27 aa, Artificial Sequence
  Cyclic GFR-binding peptide
RPVQIRKIVGRTPKVKKATVDSSNNVI

SEQ ID NO: 95785 - protein, 29 aa, Artificial Sequence
  Cyclic GFR-binding peptide
EPLTVLYYEYVRKKPKLEQLSNDSSNNVI

SEQ ID NO: 95786 - protein, 27 aa, Artificial Sequence
  Cyclic GFR-binding peptide
SNITIQIMVGRKPKVIGEMSDSSNNVI

SEQ ID NO: 95787 - protein, 27 aa, Artificial Sequence
  Cyclic GFR-binding peptide
SNITMQIMDENEKVVIGEMSDSSNNVI

SEQ ID NO: 95788 - protein, 27 aa, Artificial Sequence
  Cyclic GFR-binding peptide
SNITIQIMIGKTPKIIGEMSDSSNNVI

SEQ ID NO: 95789 - protein, 29 aa, Artificial Sequence
  Cyclic GFR-binding peptide
EPLTMLYYRIKPHQGQHEQLSNDSSNNVI

SEQ ID NO: 95790 - protein, 27 aa, Artificial Sequence
  Cyclic GFR-binding peptide
RPVQMRKIDEYDKVVKKATVDSSNNVI

SEQ ID NO: 95791 - protein, 29 aa, Artificial Sequence
  Cyclic GFR-binding peptide
EPLPMVYYRIKPHQGQHEQLSNDSSNNVI

SEQ ID NO: 95792 - protein, 29 aa, Artificial Sequence
  Cyclic GFR-binding peptide
EPLPVVYYEYVRKKPKLEQLSNDSSNNVI

SEQ ID NO: 95793 - protein, 27 aa, Artificial Sequence
  Cyclic GFR-binding peptide
RSVKMAKVDEYDKVVKEVQVDSSNNVI

SEQ ID NO: 95794 - protein, 27 aa, Artificial Sequence
  Cyclic GFR-binding peptide
DSSNNVIRYKKLIIQQKDNFYLMSIAN

SEQ ID NO: 95795 - protein, 27 aa, Artificial Sequence
  Cyclic GFR-binding peptide
DSSNNVIRYKKLLLVRGNDFYLMSIAN

SEQ ID NO: 95796 - protein, 27 aa, Artificial Sequence
  Cyclic GFR-binding peptide
NAISMLYFNDKQQIILKKYRDSSNNVI

SEQ ID NO: 95797 - protein, 27 aa, Artificial Sequence
  Cyclic GFR-binding peptide
NAISMLYFDNGRVLLLKKYRDSSNNVI

SEQ ID NO: 95798 - protein, 27 aa, Artificial Sequence
  Cyclic GFR-binding peptide
DSSNNVIEYKFKVVNKNEDLYLISIPE

SEQ ID NO: 95799 - protein, 27 aa, Artificial Sequence
  Cyclic GFR-binding peptide
DSSNNVIPIKGYVKPTRGVFYLINIPS

SEQ ID NO: 95800 - protein, 27 aa, Artificial Sequence
  Cyclic GFR-binding peptide
DSSNNVIEYKFKLLVRGNDLYLMSIPE

SEQ ID NO: 95801 - protein, 27 aa, Artificial Sequence
  Cyclic GFR-binding peptide
DSSNNVIYHYKLVVNKNEDKYLISIPS

SEQ ID NO: 95802 - protein, 27 aa, Artificial Sequence
  Cyclic GFR-binding peptide
DSSNNVIRHKRLLLVRGNDYYLMSTAS

SEQ ID NO: 95803 - protein, 27 aa, Artificial Sequence
  Cyclic GFR-binding peptide
DSSNNVIYHYKLLLVRGNDKYLMSIPS

SEQ ID NO: 95804 - protein, 27 aa, Artificial Sequence
  Cyclic GFR-binding peptide
DSSNNVIRHKRLVVNKNEDYYLISTAS

SEQ ID NO: 95805 - protein, 27 aa, Artificial Sequence
  Cyclic GFR-binding peptide
DSSNNVIRYKKLVVNKNEDFYLISIAN

SEQ ID NO: 95806 - protein, 27 aa, Artificial Sequence
  Cyclic GFR-binding peptide
DSSNNVIPIKGYVVNKNEDFYLINIPS

SEQ ID NO: 95807 - protein, 27 aa, Artificial Sequence
  Cyclic GFR-binding peptide
DSSNNVIPIKGYIKPTKGIFYLINIPS

SEQ ID NO: 95808 - protein, 27 aa, Artificial Sequence
  Cyclic GFR-binding peptide
DSSNNVIRHKRLYTVVGKDYYLISTAS

SEQ ID NO: 95809 - protein, 27 aa, Artificial Sequence
  Cyclic GFR-binding peptide
DSSNNVIEYKFKVVNNASDLYLISIPE

SEQ ID NO: 95810 - protein, 27 aa, Artificial Sequence
  Cyclic GFR-binding peptide
DSSNNVIRHKRLIIQQKDNYYLMSTAS

SEQ ID NO: 95811 - protein, 27 aa, Artificial Sequence
  Cyclic GFR-binding peptide
DSSNNVIEYKFKIIQQKDNLYLMSIPE

SEQ ID NO: 95812 - protein, 27 aa, Artificial Sequence
  Cyclic GFR-binding peptide
DSSNNVIPIKGYVKPKRGVFYLINIPS

SEQ ID NO: 95813 - protein, 27 aa, Artificial Sequence
  Cyclic GFR-binding peptide
DSSNNVIRHKRLVVNNASDYYLISTAS

SEQ ID NO: 95814 - protein, 27 aa, Artificial Sequence
  Cyclic GFR-binding peptide
DSSNNVIYHYKLVVNNASDKYLISIPS

SEQ ID NO: 95815 - protein, 27 aa, Artificial Sequence
  Cyclic GFR-binding peptide
DSSNNVIYHYKLIIQQKDNKYLMSIPS

SEQ ID NO: 95816 - protein, 27 aa, Artificial Sequence
  Cyclic GFR-binding peptide
DSSNNVIRHKRLVVNNAADYYLISTAS

SEQ ID NO: 95817 - protein, 27 aa, Artificial Sequence
  Cyclic GFR-binding peptide
EPISILYLDENKNVVKFKYEDSSNNVI

SEQ ID NO: 95818 - protein, 27 aa, Artificial Sequence
  Cyclic GFR-binding peptide
SPINILYFVGRTPKVYGKIPDSSNNVI

SEQ ID NO: 95819 - protein, 27 aa, Artificial Sequence
  Cyclic GFR-binding peptide
EPISMLYLDNGRVLLKFKYEDSSNNVI

SEQ ID NO: 95820 - protein, 27 aa, Artificial Sequence
  Cyclic GFR-binding peptide
SPISILYKDENKNVVLKYHYDSSNNVI

SEQ ID NO: 95821 - protein, 27 aa, Artificial Sequence
  Cyclic GFR-binding peptide
SATSMLYYDNGRVLLLRKHRDSSNNVI

SEQ ID NO: 95822 - protein, 27 aa, Artificial Sequence
  Cyclic GFR-binding peptide
SPISMLYKDNGRVLLLKYHYDSSNNVI

SEQ ID NO: 95823 - protein, 27 aa, Artificial Sequence
  Cyclic GFR-binding peptide
SATSILYYDENKNVVLRKHRDSSNNVI

SEQ ID NO: 95824 - protein, 27 aa, Artificial Sequence
  Cyclic GFR-binding peptide
NAISILYFDENKNVVLKKYRDSSNNVI

SEQ ID NO: 95825 - protein, 27 aa, Artificial Sequence
  Cyclic GFR-binding peptide
SPINILYFDENKNVVYGKIPDSSNNVI

SEQ ID NO: 95826 - protein, 27 aa, Artificial Sequence
  Cyclic GFR-binding peptide
SPINILYFIGKTPKIYGKIPDSSNNVI

SEQ ID NO: 95827 - protein, 27 aa, Artificial Sequence
  Cyclic GFR-binding peptide
SATSILYYDKGVVTYLRKHRDSSNNVI

SEQ ID NO: 95828 - protein, 27 aa, Artificial Sequence
  Cyclic GFR-binding peptide
EPISILYLDSANNVVKFKYEDSSNNVI

SEQ ID NO: 95829 - protein, 27 aa, Artificial Sequence
  Cyclic GFR-binding peptide
SATSMLYYNDKQQIILRKHRDSSNNVI

SEQ ID NO: 95830 - protein, 27 aa, Artificial Sequence
  Cyclic GFR-binding peptide
EPISMLYLNDKQQIIKFKYEDSSNNVI

SEQ ID NO: 95831 - protein, 27 aa, Artificial Sequence
  Cyclic GFR-binding peptide
SPINILYFVGRKPKVYGKIPDSSNNVI

SEQ ID NO: 95832 - protein, 27 aa, Artificial Sequence
  Cyclic GFR-binding peptide
SATSILYYDSANNVVLRKHRDSSNNVI

SEQ ID NO: 95833 - protein, 27 aa, Artificial Sequence
  Cyclic GFR-binding peptide
SPISILYKDSANNVVLKYHYDSSNNVI

SEQ ID NO: 95834 - protein, 27 aa, Artificial Sequence
  Cyclic GFR-binding peptide
SPISMLYKNDKQQIILKYHYDSSNNVI

SEQ ID NO: 95835 - protein, 27 aa, Artificial Sequence
  Cyclic GFR-binding peptide
SATSILYYDAANNVVLRKHRDSSNNVI

SEQ ID NO: 95836 - protein, 27 aa, Artificial Sequence
  Cyclic GFR-binding peptide
DSSNNVISMEGIIIQQKDNMIQMTINS

SEQ ID NO: 95837 - protein, 27 aa, Artificial Sequence
  Cyclic GFR-binding peptide
DSSNNVISMEGLVKPKRGVMIQITINS

SEQ ID NO: 95838 - protein, 27 aa, Artificial Sequence
  Cyclic GFR-binding peptide
DSSNNVISMEGLVVNNASDMIQITINS

SEQ ID NO: 95839 - protein, 27 aa, Artificial Sequence
  Cyclic GFR-binding peptide
DSSNNVISMEGILLVRGNDMIQMTINS

SEQ ID NO: 95840 - protein, 27 aa, Artificial Sequence
  Cyclic GFR-binding peptide
DSSNNVISMEGLIKPTKGIMIQITINS

SEQ ID NO: 95841 - protein, 27 aa, Artificial Sequence
  Cyclic GFR-binding peptide
DSSNNVISMEGLIVNSSDDMIQVTINS

SEQ ID NO: 95842 - protein, 27 aa, Artificial Sequence
  Cyclic GFR-binding peptide
DSSNNVISMEGIVVNNASDMIQITINS

SEQ ID NO: 95843 - protein, 27 aa, Artificial Sequence
  Cyclic GFR-binding peptide
DSSNNVISMEGLVVNNAADMIQITINS

SEQ ID NO: 95844 - protein, 27 aa, Artificial Sequence
  Cyclic GFR-binding peptide
DSSNNVISMEGLLLVRGNDMIQMTINS

SEQ ID NO: 95845 - protein, 27 aa, Artificial Sequence
  Cyclic GFR-binding peptide
DSSNNVISMEGLIIQQKDNMIQMTINS

SEQ ID NO: 95846 - protein, 27 aa, Artificial Sequence
  Cyclic GFR-binding peptide
DSSNNVISMEGIVVNNAADMIQITINS

SEQ ID NO: 95847 - protein, 27 aa, Artificial Sequence
  Cyclic GFR-binding peptide
DSSNNVISMEGLVKPTRGVMIQITINS

SEQ ID NO: 95848 - protein, 27 aa, Artificial Sequence
  Cyclic GFR-binding peptide
SNITMQIMNDKQQIIIGEMSDSSNNVI

SEQ ID NO: 95849 - protein, 27 aa, Artificial Sequence
  Cyclic GFR-binding peptide
SNITIQIMVGRKPKVLGEMSDSSNNVI

SEQ ID NO: 95850 - protein, 27 aa, Artificial Sequence
  Cyclic GFR-binding peptide
SNITIQIMDSANNVVLGEMSDSSNNVI

SEQ ID NO: 95851 - protein, 27 aa, Artificial Sequence
  Cyclic GFR-binding peptide
SNITMQIMDNGRVLLIGEMSDSSNNVI

SEQ ID NO: 95852 - protein, 27 aa, Artificial Sequence
  Cyclic GFR-binding peptide
SNITIQIMIGKTPKILGEMSDSSNNVI

SEQ ID NO: 95853 - protein, 27 aa, Artificial Sequence
  Cyclic GFR-binding peptide
SNITVQIMDDSSNVILGEMSDSSNNVI

SEQ ID NO: 95854 - protein, 27 aa, Artificial Sequence
  Cyclic GFR-binding peptide
SNITIQIMDSANNVVIGEMSDSSNNVI

SEQ ID NO: 95855 - protein, 27 aa, Artificial Sequence
  Cyclic GFR-binding peptide
SNITIQIMDAANNVVLGEMSDSSNNVI

SEQ ID NO: 95856 - protein, 27 aa, Artificial Sequence
  Cyclic GFR-binding peptide
SNITMQIMDNGRVLLLGEMSDSSNNVI

SEQ ID NO: 95857 - protein, 27 aa, Artificial Sequence
  Cyclic GFR-binding peptide
SNITMQIMNDKQQIILGEMSDSSNNVI

SEQ ID NO: 95858 - protein, 27 aa, Artificial Sequence
  Cyclic GFR-binding peptide
SNITIQIMDAANNVVIGEMSDSSNNVI

SEQ ID NO: 95859 - protein, 27 aa, Artificial Sequence
  Cyclic GFR-binding peptide
SNITIQIMVGRTPKVLGEMSDSSNNVI

SEQ ID NO: 95860 - protein, 27 aa, Artificial Sequence
  Cyclic GFR-binding peptide
DSSNNVIQYNKLVVNKNEDLYLISIAS

SEQ ID NO: 95861 - protein, 27 aa, Artificial Sequence
  Cyclic GFR-binding peptide
DSSNNVIQYNKLVVNNAADLYLISIAS

SEQ ID NO: 95862 - protein, 27 aa, Artificial Sequence
  Cyclic GFR-binding peptide
DSSNNVIQYNKLIIQQKDNLYLMSIAS

SEQ ID NO: 95863 - protein, 27 aa, Artificial Sequence
  Cyclic GFR-binding peptide
DSSNNVIQYNKLLLVRGNDLYLMSIAS

SEQ ID NO: 95864 - protein, 27 aa, Artificial Sequence
  Cyclic GFR-binding peptide
DSSNNVIQYNKLYTVVGKDLYLISIAS

SEQ ID NO: 95865 - protein, 27 aa, Artificial Sequence
  Cyclic GFR-binding peptide
SAISILYLDENKNVVLKNYQDSSNNVI

SEQ ID NO: 95866 - protein, 27 aa, Artificial Sequence
  Cyclic GFR-binding peptide
SAISILYLDAANNVVLKNYQDSSNNVI

SEQ ID NO: 95867 - protein, 27 aa, Artificial Sequence
  Cyclic GFR-binding peptide
SAISMLYLNDKQQIILKNYQDSSNNVI

SEQ ID NO: 95868 - protein, 27 aa, Artificial Sequence
  Cyclic GFR-binding peptide
SAISMLYLDNGRVLLLKNYQDSSNNVI

SEQ ID NO: 95869 - protein, 27 aa, Artificial Sequence
  Cyclic GFR-binding peptide
SAISILYLDKGVVTYLKNYQDSSNNVI

SEQ ID NO: 95870 - protein, 27 aa, Artificial Sequence
  Cyclic GFR-binding peptide
DDMGVPTRYKKLIKPTKGIFYLISIAN

SEQ ID NO: 95871 - protein, 29 aa, Artificial Sequence
  Cyclic GFR-binding peptide
DDMGVPTRHKRLFIPKKRVIEYYLVSTAS

SEQ ID NO: 95872 - protein, 27 aa, Artificial Sequence
  Cyclic GFR-binding peptide
DDMGVPTYHYKLVVKDYEDKYLMSIPS

SEQ ID NO: 95873 - protein, 27 aa, Artificial Sequence
  Cyclic GFR-binding peptide
DDMGVPTQYNKLIVNNSSDLYLVSIAS

SEQ ID NO: 95874 - protein, 27 aa, Artificial Sequence
  Cyclic GFR-binding peptide
DDMGVPTRYKKLVVKDYEDFYLMSIAN

SEQ ID NO: 95875 - protein, 27 aa, Artificial Sequence
  Cyclic GFR-binding peptide
DDMGVPTRYKKLVKPTRGVFYLISIAN

SEQ ID NO: 95876 - protein, 27 aa, Artificial Sequence
  Cyclic GFR-binding peptide
DDMGVPTRHKRLVVKENEDYYLMSTAS

SEQ ID NO: 95877 - protein, 27 aa, Artificial Sequence
  Cyclic GFR-binding peptide
DDMGVPTYHYKLIKPTKGIKYLISIPS

SEQ ID NO: 95878 - protein, 29 aa, Artificial Sequence
  Cyclic GFR-binding peptide
DDMGVPTRYKKLFIPKKRVIEFYLVSIAN

SEQ ID NO: 95879 - protein, 27 aa, Artificial Sequence
  Cyclic GFR-binding peptide
DDMGVPTYHYKLVVKENEDKYLMSIPS

SEQ ID NO: 95880 - protein, 27 aa, Artificial Sequence
  Cyclic GFR-binding peptide
DDMGVPTRHKRLVKPKRGVYYLISTAS

SEQ ID NO: 95881 - protein, 27 aa, Artificial Sequence
  Cyclic GFR-binding peptide
DDMGVPTYHYKLVKPKRGVKYLISIPS

SEQ ID NO: 95882 - protein, 29 aa, Artificial Sequence
  Cyclic GFR-binding peptide
DDMGVPTQYNKLFIPKKRVIELYLVSIAS

SEQ ID NO: 95883 - protein, 27 aa, Artificial Sequence
  Cyclic GFR-binding peptide
DDMGVPTQYNKLVKPTRGVLYLISIAS

SEQ ID NO: 95884 - protein, 27 aa, Artificial Sequence
  Cyclic GFR-binding peptide
DDMGVPTRYKKLVVKENEDFYLMSIAN

SEQ ID NO: 95885 - protein, 27 aa, Artificial Sequence
  Cyclic GFR-binding peptide
DDMGVPTQYNKLTPVGMDDLYLVSIAS

SEQ ID NO: 95886 - protein, 27 aa, Artificial Sequence
  Cyclic GFR-binding peptide
DDMGVPTRYKKLTPVGMDDFYLVSIAN

SEQ ID NO: 95887 - protein, 27 aa, Artificial Sequence
  Cyclic GFR-binding peptide
DDMGVPTRYKKLVKPKRGVFYLISIAN

SEQ ID NO: 95888 - protein, 27 aa, Artificial Sequence
  Cyclic GFR-binding peptide
DDMGVPTQYNKLVVKENEDLYLMSIAS

SEQ ID NO: 95889 - protein, 27 aa, Artificial Sequence
  Cyclic GFR-binding peptide
DDMGVPTYHYKLIVNSSDDKYLVSIPS

SEQ ID NO: 95890 - protein, 27 aa, Artificial Sequence
  Cyclic GFR-binding peptide
DDMGVPTQYNKLVKPKRGVLYLISIAS

SEQ ID NO: 95891 - protein, 27 aa, Artificial Sequence
  Cyclic GFR-binding peptide
DDMGVPTRYKKLIVNNSSDFYLVSIAN

SEQ ID NO: 95892 - protein, 27 aa, Artificial Sequence
  Cyclic GFR-binding peptide
DDMGVPTRYKKLIVNSSDDFYLVSIAN

SEQ ID NO: 95893 - protein, 27 aa, Artificial Sequence
  Cyclic GFR-binding peptide
DDMGVPTRHKRLVKPTRGVYYLISTAS

SEQ ID NO: 95894 - protein, 29 aa, Artificial Sequence
  Cyclic GFR-binding peptide
DDMGVPTYHYKLFIPKKRVIEKYLVSIPS

SEQ ID NO: 95895 - protein, 27 aa, Artificial Sequence
  Cyclic GFR-binding peptide
DDMGVPTRHKRLIKPTKGIYYLISTAS

SEQ ID NO: 95896 - protein, 27 aa, Artificial Sequence
  Cyclic GFR-binding peptide
DDMGVPTRHKRLTPVGMDDYYLVSTAS

SEQ ID NO: 95897 - protein, 27 aa, Artificial Sequence
  Cyclic GFR-binding peptide
DDMGVPTYHYKLTPVGMDDKYLVSIPS

SEQ ID NO: 95898 - protein, 27 aa, Artificial Sequence
  Cyclic GFR-binding peptide
DDMGVPTYHYKLIVNNSSDKYLVSIPS

SEQ ID NO: 95899 - protein, 27 aa, Artificial Sequence
  Cyclic GFR-binding peptide
DDMGVPTRHKRLIVNNSSDYYLVSTAS

SEQ ID NO: 95900 - protein, 27 aa, Artificial Sequence
  Cyclic GFR-binding peptide
DDMGVPTYHYKLVKPTRGVKYLISIPS

SEQ ID NO: 95901 - protein, 27 aa, Artificial Sequence
  Cyclic GFR-binding peptide
DDMGVPTRHKRLIVNSSDDYYLVSTAS

SEQ ID NO: 95902 - protein, 27 aa, Artificial Sequence
  Cyclic GFR-binding peptide
DDMGVPTRHKRLVVKDYEDYYLMSTAS

SEQ ID NO: 95903 - protein, 27 aa, Artificial Sequence
  Cyclic GFR-binding peptide
DDMGVPTQYNKLIKPTKGILYLISIAS

SEQ ID NO: 95904 - protein, 27 aa, Artificial Sequence
  Cyclic GFR-binding peptide
DDMGVPTQYNKLVVKDYEDLYLMSIAS

SEQ ID NO: 95905 - protein, 27 aa, Artificial Sequence
  Cyclic GFR-binding peptide
DDMGVPTQYNKLIVNSSDDLYLVSIAS

SEQ ID NO: 95906 - protein, 27 aa, Artificial Sequence
  Cyclic GFR-binding peptide
NAISILYFIGKTPKILKKYRDDMGVPT

SEQ ID NO: 95907 - protein, 29 aa, Artificial Sequence
  Cyclic GFR-binding peptide
SATSVLYYEIVRKKPIFLRKHRDDMGVPT

SEQ ID NO: 95908 - protein, 27 aa, Artificial Sequence
  Cyclic GFR-binding peptide
SPISMLYKDEYDKVVLKYHYDDMGVPT

SEQ ID NO: 95909 - protein, 27 aa, Artificial Sequence
  Cyclic GFR-binding peptide
SAISVLYLDSSNNVILKNYQDDMGVPT

SEQ ID NO: 95910 - protein, 27 aa, Artificial Sequence
  Cyclic GFR-binding peptide
NAISMLYFDEYDKVVLKKYRDDMGVPT

SEQ ID NO: 95911 - protein, 27 aa, Artificial Sequence
  Cyclic GFR-binding peptide
NAISILYFVGRTPKVLKKYRDDMGVPT

SEQ ID NO: 95912 - protein, 27 aa, Artificial Sequence
  Cyclic GFR-binding peptide
SATSMLYYDENEKVVLRKHRDDMGVPT

SEQ ID NO: 95913 - protein, 27 aa, Artificial Sequence
  Cyclic GFR-binding peptide
SPISILYKIGKTPKILKYHYDDMGVPT

SEQ ID NO: 95914 - protein, 29 aa, Artificial Sequence
  Cyclic GFR-binding peptide
NAISVLYFEIVRKKPIFLKKYRDDMGVPT

SEQ ID NO: 95915 - protein, 27 aa, Artificial Sequence
  Cyclic GFR-binding peptide
SPISMLYKDENEKVVLKYHYDDMGVPT

SEQ ID NO: 95916 - protein, 27 aa, Artificial Sequence
  Cyclic GFR-binding peptide
SATSILYYVGRKPKVLRKHRDDMGVPT

SEQ ID NO: 95917 - protein, 27 aa, Artificial Sequence
  Cyclic GFR-binding peptide
SPISILYKVGRKPKVLKYHYDDMGVPT

SEQ ID NO: 95918 - protein, 29 aa, Artificial Sequence
  Cyclic GFR-binding peptide
SAISVLYLEIVRKKPIFLKNYQDDMGVPT

SEQ ID NO: 95919 - protein, 27 aa, Artificial Sequence
  Cyclic GFR-binding peptide
SAISILYLVGRTPKVLKNYQDDMGVPT

SEQ ID NO: 95920 - protein, 27 aa, Artificial Sequence
  Cyclic GFR-binding peptide
NAISMLYFDENEKVVLKKYRDDMGVPT

SEQ ID NO: 95921 - protein, 27 aa, Artificial Sequence
  Cyclic GFR-binding peptide
NAISVLYFDDMGVPTLKKYRDDMGVPT

SEQ ID NO: 95922 - protein, 27 aa, Artificial Sequence
  Cyclic GFR-binding peptide
NAISILYFVGRKPKVLKKYRDDMGVPT

SEQ ID NO: 95923 - protein, 27 aa, Artificial Sequence
  Cyclic GFR-binding peptide
SAISMLYLDENEKVVLKNYQDDMGVPT

SEQ ID NO: 95924 - protein, 27 aa, Artificial Sequence
  Cyclic GFR-binding peptide
SPISVLYKDDSSNVILKYHYDDMGVPT

SEQ ID NO: 95925 - protein, 27 aa, Artificial Sequence
  Cyclic GFR-binding peptide
SAISILYLVGRKPKVLKNYQDDMGVPT

SEQ ID NO: 95926 - protein, 27 aa, Artificial Sequence
  Cyclic GFR-binding peptide
NAISVLYFDSSNNVILKKYRDDMGVPT

SEQ ID NO: 95927 - protein, 27 aa, Artificial Sequence
  Cyclic GFR-binding peptide
NAISVLYFDDSSNVILKKYRDDMGVPT

SEQ ID NO: 95928 - protein, 27 aa, Artificial Sequence
  Cyclic GFR-binding peptide
SATSILYYVGRTPKVLRKHRDDMGVPT

SEQ ID NO: 95929 - protein, 29 aa, Artificial Sequence
  Cyclic GFR-binding peptide
SPISVLYKEIVRKKPIFLKYHYDDMGVPT

SEQ ID NO: 95930 - protein, 27 aa, Artificial Sequence
  Cyclic GFR-binding peptide
SATSILYYIGKTPKILRKHRDDMGVPT

SEQ ID NO: 95931 - protein, 27 aa, Artificial Sequence
  Cyclic GFR-binding peptide
SATSVLYYDDMGVPTLRKHRDDMGVPT

SEQ ID NO: 95932 - protein, 27 aa, Artificial Sequence
  Cyclic GFR-binding peptide
SPISVLYKDDMGVPTLKYHYDDMGVPT

SEQ ID NO: 95933 - protein, 27 aa, Artificial Sequence
  Cyclic GFR-binding peptide
SPISVLYKDSSNNVILKYHYDDMGVPT

SEQ ID NO: 95934 - protein, 27 aa, Artificial Sequence
  Cyclic GFR-binding peptide
SATSVLYYDSSNNVILRKHRDDMGVPT

SEQ ID NO: 95935 - protein, 27 aa, Artificial Sequence
  Cyclic GFR-binding peptide
SPISILYKVGRTPKVLKYHYDDMGVPT

SEQ ID NO: 95936 - protein, 27 aa, Artificial Sequence
  Cyclic GFR-binding peptide
SATSVLYYDDSSNVILRKHRDDMGVPT

SEQ ID NO: 95937 - protein, 27 aa, Artificial Sequence
  Cyclic GFR-binding peptide
SATSMLYYDEYDKVVLRKHRDDMGVPT

SEQ ID NO: 95938 - protein, 27 aa, Artificial Sequence
  Cyclic GFR-binding peptide
SAISILYLIGKTPKILKNYQDDMGVPT

SEQ ID NO: 95939 - protein, 27 aa, Artificial Sequence
  Cyclic GFR-binding peptide
SAISMLYLDEYDKVVLKNYQDDMGVPT

SEQ ID NO: 95940 - protein, 27 aa, Artificial Sequence
  Cyclic GFR-binding peptide
SAISVLYLDDSSNVILKNYQDDMGVPT

SEQ ID NO: 95941 - protein, 27 aa, Artificial Sequence
  Cyclic GFR-binding peptide
DDMGVPTNSLQEVVKDYEDYYLMTLPE

SEQ ID NO: 95942 - protein, 27 aa, Artificial Sequence
  Cyclic GFR-binding peptide
DDMGVPTNSLQEIKPTKGIYYVIPLPE

SEQ ID NO: 95943 - protein, 27 aa, Artificial Sequence
  Cyclic GFR-binding peptide
DDMGVPTNSLQEVKPKRGVYYLITLPE

SEQ ID NO: 95944 - protein, 27 aa, Artificial Sequence
  Cyclic GFR-binding peptide
DDMGVPTNSLQEVKPTRGVYYVIPLPE

SEQ ID NO: 95945 - protein, 27 aa, Artificial Sequence
  Cyclic GFR-binding peptide
DDMGVPTEYQKYIVNSSDDIFLVSIPS

SEQ ID NO: 95946 - protein, 27 aa, Artificial Sequence
  Cyclic GFR-binding peptide
DDMGVPTEYQKYVKPTRGVIFLISIPS

SEQ ID NO: 95947 - protein, 27 aa, Artificial Sequence
  Cyclic GFR-binding peptide
DDMGVPTNSLQEVVKENEDYYLMTLPE

SEQ ID NO: 95948 - protein, 27 aa, Artificial Sequence
  Cyclic GFR-binding peptide
DDMGVPTNSLQEVVNNASDYYLITLPE

SEQ ID NO: 95949 - protein, 27 aa, Artificial Sequence
  Cyclic GFR-binding peptide
DDMGVPTNSLQEVKPKRGVYYVIPLPE

SEQ ID NO: 95950 - protein, 27 aa, Artificial Sequence
  Cyclic GFR-binding peptide
DDMGVPTNSLQEVVNNASDYYVIPLPE

SEQ ID NO: 95951 - protein, 27 aa, Artificial Sequence
  Cyclic GFR-binding peptide
DDMGVPTNSLQEVKPTRGVYYLITLPE

SEQ ID NO: 95952 - protein, 27 aa, Artificial Sequence
  Cyclic GFR-binding peptide
DDMGVPTEYQKYIKPTKGIIFLISIPS

SEQ ID NO: 95953 - protein, 27 aa, Artificial Sequence
  Cyclic GFR-binding peptide
DDMGVPTEYQKYVVNNASDIFLISIPS

SEQ ID NO: 95954 - protein, 27 aa, Artificial Sequence
  Cyclic GFR-binding peptide
DDMGVPTNSLQEIVNSSDDYYVVPLPE

SEQ ID NO: 95955 - protein, 27 aa, Artificial Sequence
  Cyclic GFR-binding peptide
DDMGVPTNSLQEVVKDYEDYYVMPLPE

SEQ ID NO: 95956 - protein, 27 aa, Artificial Sequence
  Cyclic GFR-binding peptide
DDMGVPTEYQKYVVKENEDIFLMSIPS

SEQ ID NO: 95957 - protein, 27 aa, Artificial Sequence
  Cyclic GFR-binding peptide
DDMGVPTNSLQEVVKENEDYYVMPLPE

SEQ ID NO: 95958 - protein, 27 aa, Artificial Sequence
  Cyclic GFR-binding peptide
DDMGVPTEYQKYVVKDYEDIFLMSIPS

SEQ ID NO: 95959 - protein, 27 aa, Artificial Sequence
  Cyclic GFR-binding peptide
DDMGVPTQYNKLVVNNASDLYLISIAS

SEQ ID NO: 95960 - protein, 27 aa, Artificial Sequence
  Cyclic GFR-binding peptide
DDMGVPTNSLQEIKPTKGIYYLITLPE

SEQ ID NO: 95961 - protein, 27 aa, Artificial Sequence
  Cyclic GFR-binding peptide
DDMGVPTEYQKYVKPKRGVIFLISIPS

SEQ ID NO: 95962 - protein, 27 aa, Artificial Sequence
  Cyclic GFR-binding peptide
DDMGVPTRYKKLVVNNASDFYLISIAN

SEQ ID NO: 95963 - protein, 27 aa, Artificial Sequence
  Cyclic GFR-binding peptide
DDMGVPTNSLQEIVNSSDDYYLVTLPE

SEQ ID NO: 95964 - protein, 27 aa, Artificial Sequence
  Cyclic GFR-binding peptide
EPLTMLYYDEYDKVVEQLSNDDMGVPT

SEQ ID NO: 95965 - protein, 27 aa, Artificial Sequence
  Cyclic GFR-binding peptide
EPLPIVYYIGKTPKIEQLSNDDMGVPT

SEQ ID NO: 95966 - protein, 27 aa, Artificial Sequence
  Cyclic GFR-binding peptide
EPLTILYYVGRKPKVEQLSNDDMGVPT

SEQ ID NO: 95967 - protein, 27 aa, Artificial Sequence
  Cyclic GFR-binding peptide
EPLPIVYYVGRTPKVEQLSNDDMGVPT

SEQ ID NO: 95968 - protein, 27 aa, Artificial Sequence
  Cyclic GFR-binding peptide
SPISVLFIDDSSNVIYKQYEDDMGVPT

SEQ ID NO: 95969 - protein, 27 aa, Artificial Sequence
  Cyclic GFR-binding peptide
SPISILFIVGRTPKVYKQYEDDMGVPT

SEQ ID NO: 95970 - protein, 27 aa, Artificial Sequence
  Cyclic GFR-binding peptide
EPLTMLYYDENEKVVEQLSNDDMGVPT

SEQ ID NO: 95971 - protein, 27 aa, Artificial Sequence
  Cyclic GFR-binding peptide
EPLTILYYDSANNVVEQLSNDDMGVPT

SEQ ID NO: 95972 - protein, 27 aa, Artificial Sequence
  Cyclic GFR-binding peptide
EPLPIVYYVGRKPKVEQLSNDDMGVPT

SEQ ID NO: 95973 - protein, 27 aa, Artificial Sequence
  Cyclic GFR-binding peptide
EPLPIVYYDSANNVVEQLSNDDMGVPT

SEQ ID NO: 95974 - protein, 27 aa, Artificial Sequence
  Cyclic GFR-binding peptide
EPLTILYYVGRTPKVEQLSNDDMGVPT

SEQ ID NO: 95975 - protein, 27 aa, Artificial Sequence
  Cyclic GFR-binding peptide
SPISILFIIGKTPKIYKQYEDDMGVPT

SEQ ID NO: 95976 - protein, 27 aa, Artificial Sequence
  Cyclic GFR-binding peptide
SPISILFIDSANNVVYKQYEDDMGVPT

SEQ ID NO: 95977 - protein, 27 aa, Artificial Sequence
  Cyclic GFR-binding peptide
EPLPVVYYDDSSNVIEQLSNDDMGVPT

SEQ ID NO: 95978 - protein, 27 aa, Artificial Sequence
  Cyclic GFR-binding peptide
EPLPMVYYDEYDKVVEQLSNDDMGVPT

SEQ ID NO: 95979 - protein, 27 aa, Artificial Sequence
  Cyclic GFR-binding peptide
SPISMLFIDENEKVVYKQYEDDMGVPT

SEQ ID NO: 95980 - protein, 27 aa, Artificial Sequence
  Cyclic GFR-binding peptide
EPLPMVYYDENEKVVEQLSNDDMGVPT

SEQ ID NO: 95981 - protein, 27 aa, Artificial Sequence
  Cyclic GFR-binding peptide
SPISMLFIDEYDKVVYKQYEDDMGVPT

SEQ ID NO: 95982 - protein, 27 aa, Artificial Sequence
  Cyclic GFR-binding peptide
SAISILYLDSANNVVLKNYQDDMGVPT

SEQ ID NO: 95983 - protein, 27 aa, Artificial Sequence
  Cyclic GFR-binding peptide
EPLTILYYIGKTPKIEQLSNDDMGVPT

SEQ ID NO: 95984 - protein, 27 aa, Artificial Sequence
  Cyclic GFR-binding peptide
SPISILFIVGRKPKVYKQYEDDMGVPT

SEQ ID NO: 95985 - protein, 27 aa, Artificial Sequence
  Cyclic GFR-binding peptide
NAISILYFDSANNVVLKKYRDDMGVPT

SEQ ID NO: 95986 - protein, 27 aa, Artificial Sequence
  Cyclic GFR-binding peptide
EPLTVLYYDDSSNVIEQLSNDDMGVPT

SEQ ID NO: 95987 - protein, 29 aa, Artificial Sequence
  Cyclic GFR-binding peptide
DDMGVPTVTAKKLKPKKRVYEIKRVQVPR

SEQ ID NO: 95988 - protein, 29 aa, Artificial Sequence
  Cyclic GFR-binding peptide
DDMGVPTVQVEKLKPKKRVYEVKAVKVSR

SEQ ID NO: 95989 - protein, 29 aa, Artificial Sequence
  Cyclic GFR-binding peptide
DDMGVPTVQVEKFIPKKRVIEVKAVKVSR

SEQ ID NO: 95990 - protein, 29 aa, Artificial Sequence
  Cyclic GFR-binding peptide
DDMGVPTVQVEKHQGQHPKIRVKAMKVSR

SEQ ID NO: 95991 - protein, 29 aa, Artificial Sequence
  Cyclic GFR-binding peptide
DDMGVPTVTAKKHQGQHPKIRIKRMQVPR

SEQ ID NO: 95992 - protein, 29 aa, Artificial Sequence
  Cyclic GFR-binding peptide
DDMGVPTSMEGLLKPKKRVYEMIQVTINS

SEQ ID NO: 95993 - protein, 29 aa, Artificial Sequence
  Cyclic GFR-binding peptide
DDMGVPTSMEGIFIPKKRVIEMIQVTINS

SEQ ID NO: 95994 - protein, 29 aa, Artificial Sequence
  Cyclic GFR-binding peptide
DDMGVPTSMEGLHQGQHPKIRMIQMTINS

SEQ ID NO: 95995 - protein, 29 aa, Artificial Sequence
  Cyclic GFR-binding peptide
DDMGVPTSMEGILKPKKRVYEMIQVTINS

SEQ ID NO: 95996 - protein, 29 aa, Artificial Sequence
  Cyclic GFR-binding peptide
DDMGVPTSMEGLFIPKKRVIEMIQVTINS

SEQ ID NO: 95997 - protein, 29 aa, Artificial Sequence
  Cyclic GFR-binding peptide
DDMGVPTVTAKKFIPKKRVIEIKRVQVPR

SEQ ID NO: 95998 - protein, 29 aa, Artificial Sequence
  Cyclic GFR-binding peptide
DDMGVPTSMEGIHQGQHPKIRMIQMTINS

SEQ ID NO: 95999 - protein, 29 aa, Artificial Sequence
  Cyclic GFR-binding peptide
RPVQVRKIEYVRKKPKLKKATVDDMGVPT

SEQ ID NO: 96000 - protein, 29 aa, Artificial Sequence
  Cyclic GFR-binding peptide
RSVKVAKVEYVRKKPKLKEVQVDDMGVPT

SEQ ID NO: 96001 - protein, 29 aa, Artificial Sequence
  Cyclic GFR-binding peptide
RSVKVAKVEIVRKKPIFKEVQVDDMGVPT

SEQ ID NO: 96002 - protein, 29 aa, Artificial Sequence
  Cyclic GFR-binding peptide
RSVKMAKVRIKPHQGQHKEVQVDDMGVPT

SEQ ID NO: 96003 - protein, 29 aa, Artificial Sequence
  Cyclic GFR-binding peptide
RPVQMRKIRIKPHQGQHKKATVDDMGVPT

SEQ ID NO: 96004 - protein, 29 aa, Artificial Sequence
  Cyclic GFR-binding peptide
SNITVQIMEYVRKKPKLLGEMSDDMGVPT

SEQ ID NO: 96005 - protein, 29 aa, Artificial Sequence
  Cyclic GFR-binding peptide
SNITVQIMEIVRKKPIFIGEMSDDMGVPT

SEQ ID NO: 96006 - protein, 29 aa, Artificial Sequence
  Cyclic GFR-binding peptide
SNITMQIMRIKPHQGQHLGEMSDDMGVPT

SEQ ID NO: 96007 - protein, 29 aa, Artificial Sequence
  Cyclic GFR-binding peptide
SNITVQIMEYVRKKPKLIGEMSDDMGVPT

SEQ ID NO: 96008 - protein, 29 aa, Artificial Sequence
  Cyclic GFR-binding peptide
SNITVQIMEIVRKKPIFLGEMSDDMGVPT

SEQ ID NO: 96009 - protein, 29 aa, Artificial Sequence
  Cyclic GFR-binding peptide
RPVQVRKIEIVRKKPIFKKATVDDMGVPT

SEQ ID NO: 96010 - protein, 29 aa, Artificial Sequence
  Cyclic GFR-binding peptide
SNITMQIMRIKPHQGQHIGEMSDDMGVPT

SEQ ID NO: 96011 - protein, 27 aa, Artificial Sequence
  Cyclic GFR-binding peptide
DDMGVPTEYKFKVKPTRGVLYLISIPE

SEQ ID NO: 96012 - protein, 27 aa, Artificial Sequence
  Cyclic GFR-binding peptide
DDMGVPTEYKFKTPVGMDDLYLVSIPE

SEQ ID NO: 96013 - protein, 27 aa, Artificial Sequence
  Cyclic GFR-binding peptide
DDMGVPTEYQKYVKPKRGVIYLISIPS

SEQ ID NO: 96014 - protein, 27 aa, Artificial Sequence
  Cyclic GFR-binding peptide
DDMGVPTEYQKYVVKDYEDIYLMSIPS

SEQ ID NO: 96015 - protein, 27 aa, Artificial Sequence
  Cyclic GFR-binding peptide
DDMGVPTEYKFKIKPTKGILYLISIPE

SEQ ID NO: 96016 - protein, 27 aa, Artificial Sequence
  Cyclic GFR-binding peptide
DDMGVPTYHYKLYTVVGKDKYLISIPS

SEQ ID NO: 96017 - protein, 27 aa, Artificial Sequence
  Cyclic GFR-binding peptide
DDMGVPTRYKKLYTVVGKDFYLISIAN

SEQ ID NO: 96018 - protein, 27 aa, Artificial Sequence
  Cyclic GFR-binding peptide
DDMGVPTEYQKYVVNNAADIYLISIPS

SEQ ID NO: 96019 - protein, 27 aa, Artificial Sequence
  Cyclic GFR-binding peptide
DDMGVPTEYQKYVKPTRGVIYLISIPS

SEQ ID NO: 96020 - protein, 27 aa, Artificial Sequence
  Cyclic GFR-binding peptide
DDMGVPTEYQKYTPVGMDDIYLVSIPS

SEQ ID NO: 96021 - protein, 27 aa, Artificial Sequence
  Cyclic GFR-binding peptide
DDMGVPTEYKFKVVKDYEDLYLMSIPE

SEQ ID NO: 96022 - protein, 27 aa, Artificial Sequence
  Cyclic GFR-binding peptide
DDMGVPTEYKFKVVNNAADLYLISIPE

SEQ ID NO: 96023 - protein, 27 aa, Artificial Sequence
  Cyclic GFR-binding peptide
DDMGVPTEYQKYVVKENEDIYLMSIPS

SEQ ID NO: 96024 - protein, 27 aa, Artificial Sequence
  Cyclic GFR-binding peptide
DDMGVPTEYQKYIKPTKGIIYLISIPS

SEQ ID NO: 96025 - protein, 27 aa, Artificial Sequence
  Cyclic GFR-binding peptide
DDMGVPTRYKKLVVNNAADFYLISIAN

SEQ ID NO: 96026 - protein, 27 aa, Artificial Sequence
  Cyclic GFR-binding peptide
DDMGVPTYHYKLVVNNAADKYLISIPS

SEQ ID NO: 96027 - protein, 27 aa, Artificial Sequence
  Cyclic GFR-binding peptide
DDMGVPTEYKFKIVNNSSDLYLVSIPE

SEQ ID NO: 96028 - protein, 27 aa, Artificial Sequence
  Cyclic GFR-binding peptide
DDMGVPTEYQKYIVNSSDDIYLVSIPS

SEQ ID NO: 96029 - protein, 27 aa, Artificial Sequence
  Cyclic GFR-binding peptide
DDMGVPTEYKFKIVNSSDDLYLVSIPE

SEQ ID NO: 96030 - protein, 27 aa, Artificial Sequence
  Cyclic GFR-binding peptide
DDMGVPTEYKFKVKPKRGVLYLISIPE

SEQ ID NO: 96031 - protein, 27 aa, Artificial Sequence
  Cyclic GFR-binding peptide
DDMGVPTEYQKYYTVVGKDIYLISIPS

SEQ ID NO: 96032 - protein, 27 aa, Artificial Sequence
  Cyclic GFR-binding peptide
DDMGVPTEYKFKVVKENEDLYLMSIPE

SEQ ID NO: 96033 - protein, 27 aa, Artificial Sequence
  Cyclic GFR-binding peptide
DDMGVPTEYQKYIVNNSSDIYLVSIPS

SEQ ID NO: 96034 - protein, 27 aa, Artificial Sequence
  Cyclic GFR-binding peptide
DDMGVPTEYKFKYTVVGKDLYLISIPE

SEQ ID NO: 96035 - protein, 27 aa, Artificial Sequence
  Cyclic GFR-binding peptide
EPISILYLVGRTPKVKFKYEDDMGVPT

SEQ ID NO: 96036 - protein, 27 aa, Artificial Sequence
  Cyclic GFR-binding peptide
EPISVLYLDDMGVPTKFKYEDDMGVPT

SEQ ID NO: 96037 - protein, 27 aa, Artificial Sequence
  Cyclic GFR-binding peptide
SPISILYIVGRKPKVYKQYEDDMGVPT

SEQ ID NO: 96038 - protein, 27 aa, Artificial Sequence
  Cyclic GFR-binding peptide
SPISMLYIDEYDKVVYKQYEDDMGVPT

SEQ ID NO: 96039 - protein, 27 aa, Artificial Sequence
  Cyclic GFR-binding peptide
EPISILYLIGKTPKIKFKYEDDMGVPT

SEQ ID NO: 96040 - protein, 27 aa, Artificial Sequence
  Cyclic GFR-binding peptide
SPISILYKDKGVVTYLKYHYDDMGVPT

SEQ ID NO: 96041 - protein, 27 aa, Artificial Sequence
  Cyclic GFR-binding peptide
NAISILYFDKGVVTYLKKYRDDMGVPT

SEQ ID NO: 96042 - protein, 27 aa, Artificial Sequence
  Cyclic GFR-binding peptide
SPISILYIDAANNVVYKQYEDDMGVPT

SEQ ID NO: 96043 - protein, 27 aa, Artificial Sequence
  Cyclic GFR-binding peptide
SPISILYIVGRTPKVYKQYEDDMGVPT

SEQ ID NO: 96044 - protein, 27 aa, Artificial Sequence
  Cyclic GFR-binding peptide
SPISVLYIDDMGVPTYKQYEDDMGVPT

SEQ ID NO: 96045 - protein, 27 aa, Artificial Sequence
  Cyclic GFR-binding peptide
EPISMLYLDEYDKVVKFKYEDDMGVPT

SEQ ID NO: 96046 - protein, 27 aa, Artificial Sequence
  Cyclic GFR-binding peptide
EPISILYLDAANNVVKFKYEDDMGVPT

SEQ ID NO: 96047 - protein, 27 aa, Artificial Sequence
  Cyclic GFR-binding peptide
SPISMLYIDENEKVVYKQYEDDMGVPT

SEQ ID NO: 96048 - protein, 27 aa, Artificial Sequence
  Cyclic GFR-binding peptide
SPISILYIIGKTPKIYKQYEDDMGVPT

SEQ ID NO: 96049 - protein, 27 aa, Artificial Sequence
  Cyclic GFR-binding peptide
NAISILYFDAANNVVLKKYRDDMGVPT

SEQ ID NO: 96050 - protein, 27 aa, Artificial Sequence
  Cyclic GFR-binding peptide
SPISILYKDAANNVVLKYHYDDMGVPT

SEQ ID NO: 96051 - protein, 27 aa, Artificial Sequence
  Cyclic GFR-binding peptide
EPISVLYLDSSNNVIKFKYEDDMGVPT

SEQ ID NO: 96052 - protein, 27 aa, Artificial Sequence
  Cyclic GFR-binding peptide
SPISVLYIDDSSNVIYKQYEDDMGVPT

SEQ ID NO: 96053 - protein, 27 aa, Artificial Sequence
  Cyclic GFR-binding peptide
EPISVLYLDDSSNVIKFKYEDDMGVPT

SEQ ID NO: 96054 - protein, 27 aa, Artificial Sequence
  Cyclic GFR-binding peptide
EPISILYLVGRKPKVKFKYEDDMGVPT

SEQ ID NO: 96055 - protein, 27 aa, Artificial Sequence
  Cyclic GFR-binding peptide
SPISILYIDKGVVTYYKQYEDDMGVPT

SEQ ID NO: 96056 - protein, 27 aa, Artificial Sequence
  Cyclic GFR-binding peptide
EPISMLYLDENEKVVKFKYEDDMGVPT

SEQ ID NO: 96057 - protein, 27 aa, Artificial Sequence
  Cyclic GFR-binding peptide
SPISVLYIDSSNNVIYKQYEDDMGVPT

SEQ ID NO: 96058 - protein, 27 aa, Artificial Sequence
  Cyclic GFR-binding peptide
EPISILYLDKGVVTYKFKYEDDMGVPT

SEQ ID NO: 96059 - protein, 27 aa, Artificial Sequence
  Cyclic GFR-binding peptide
DDMGVPTPIKGYIIQQKDNFYLMNIPS

SEQ ID NO: 96060 - protein, 27 aa, Artificial Sequence
  Cyclic GFR-binding peptide
DDMGVPTPIKGYVVKDYEDFYLMNIPS

SEQ ID NO: 96061 - protein, 27 aa, Artificial Sequence
  Cyclic GFR-binding peptide
DDMGVPTPIKGYIVNSSDDFYLVNIPS

SEQ ID NO: 96062 - protein, 27 aa, Artificial Sequence
  Cyclic GFR-binding peptide
DDMGVPTPIKGYVVNNAADFYLINIPS

SEQ ID NO: 96063 - protein, 27 aa, Artificial Sequence
  Cyclic GFR-binding peptide
DDMGVPTPIKGYYTVVGKDFYLINIPS

SEQ ID NO: 96064 - protein, 27 aa, Artificial Sequence
  Cyclic GFR-binding peptide
DDMGVPTPIKGYLLVRGNDFYLMNIPS

SEQ ID NO: 96065 - protein, 27 aa, Artificial Sequence
  Cyclic GFR-binding peptide
DDMGVPTPIKGYVVKENEDFYLMNIPS

SEQ ID NO: 96066 - protein, 27 aa, Artificial Sequence
  Cyclic GFR-binding peptide
DDMGVPTPIKGYVVNNASDFYLINIPS

SEQ ID NO: 96067 - protein, 27 aa, Artificial Sequence
  Cyclic GFR-binding peptide
DDMGVPTPIKGYTPVGMDDFYLVNIPS

SEQ ID NO: 96068 - protein, 27 aa, Artificial Sequence
  Cyclic GFR-binding peptide
DDMGVPTPIKGYIVNNSSDFYLVNIPS

SEQ ID NO: 96069 - protein, 27 aa, Artificial Sequence
  Cyclic GFR-binding peptide
SPINMLYFNDKQQIIYGKIPDDMGVPT

SEQ ID NO: 96070 - protein, 27 aa, Artificial Sequence
  Cyclic GFR-binding peptide
SPINMLYFDEYDKVVYGKIPDDMGVPT

SEQ ID NO: 96071 - protein, 27 aa, Artificial Sequence
  Cyclic GFR-binding peptide
SPINVLYFDDSSNVIYGKIPDDMGVPT

SEQ ID NO: 96072 - protein, 27 aa, Artificial Sequence
  Cyclic GFR-binding peptide
SPINILYFDAANNVVYGKIPDDMGVPT

SEQ ID NO: 96073 - protein, 27 aa, Artificial Sequence
  Cyclic GFR-binding peptide
SPINILYFDKGVVTYYGKIPDDMGVPT

SEQ ID NO: 96074 - protein, 27 aa, Artificial Sequence
  Cyclic GFR-binding peptide
SPINMLYFDNGRVLLYGKIPDDMGVPT

SEQ ID NO: 96075 - protein, 27 aa, Artificial Sequence
  Cyclic GFR-binding peptide
SPINMLYFDENEKVVYGKIPDDMGVPT

SEQ ID NO: 96076 - protein, 27 aa, Artificial Sequence
  Cyclic GFR-binding peptide
SPINILYFDSANNVVYGKIPDDMGVPT

SEQ ID NO: 96077 - protein, 27 aa, Artificial Sequence
  Cyclic GFR-binding peptide
SPINVLYFDDMGVPTYGKIPDDMGVPT

SEQ ID NO: 96078 - protein, 27 aa, Artificial Sequence
  Cyclic GFR-binding peptide
SPINVLYFDSSNNVIYGKIPDDMGVPT

SEQ ID NO: 96079 - protein, 27 aa, Artificial Sequence
  Cyclic GFR-binding peptide
DDMGVPTEYQKYVVNNASDIYLISIPS

SEQ ID NO: 96080 - protein, 27 aa, Artificial Sequence
  Cyclic GFR-binding peptide
DDMGVPTEYQKYIIQQKDNIYLMSIPS

SEQ ID NO: 96081 - protein, 27 aa, Artificial Sequence
  Cyclic GFR-binding peptide
DDMGVPTEYQKYLLVRGNDIYLMSIPS

SEQ ID NO: 96082 - protein, 27 aa, Artificial Sequence
  Cyclic GFR-binding peptide
SPISILYIDSANNVVYKQYEDDMGVPT

SEQ ID NO: 96083 - protein, 27 aa, Artificial Sequence
  Cyclic GFR-binding peptide
SPISMLYINDKQQIIYKQYEDDMGVPT

SEQ ID NO: 96084 - protein, 27 aa, Artificial Sequence
  Cyclic GFR-binding peptide
SPISMLYIDNGRVLLYKQYEDDMGVPT

SEQ ID NO: 96085 - protein, 27 aa, Artificial Sequence
  Cyclic GFR-binding peptide
DDMGVPTPYVKLYTVVGKDFFLISLSS

SEQ ID NO: 96086 - protein, 27 aa, Artificial Sequence
  Cyclic GFR-binding peptide
DDMGVPTPYVKLIKPTKGIFFLISLSS

SEQ ID NO: 96087 - protein, 27 aa, Artificial Sequence
  Cyclic GFR-binding peptide
DDMGVPTPYVKLIIQQKDNFFLMSLSS

SEQ ID NO: 96088 - protein, 27 aa, Artificial Sequence
  Cyclic GFR-binding peptide
DDMGVPTPYVKLIVNSSDDFFLVSLSS

SEQ ID NO: 96089 - protein, 27 aa, Artificial Sequence
  Cyclic GFR-binding peptide
DDMGVPTPYVKLVKPKRGVFFLISLSS

SEQ ID NO: 96090 - protein, 27 aa, Artificial Sequence
  Cyclic GFR-binding peptide
DDMGVPTPYVKLVKPTRGVFFLISLSS

SEQ ID NO: 96091 - protein, 27 aa, Artificial Sequence
  Cyclic GFR-binding peptide
DDMGVPTPYVKLTPVGMDDFFLVSLSS

SEQ ID NO: 96092 - protein, 29 aa, Artificial Sequence
  Cyclic GFR-binding peptide
DDMGVPTPYVKLHQGQHPKIRFFLMSLSS

SEQ ID NO: 96093 - protein, 27 aa, Artificial Sequence
  Cyclic GFR-binding peptide
DDMGVPTPYVKLVVNKNEDFFLISLSS

SEQ ID NO: 96094 - protein, 27 aa, Artificial Sequence
  Cyclic GFR-binding peptide
DDMGVPTPYVKLVVNNASDFFLISLSS

SEQ ID NO: 96095 - protein, 27 aa, Artificial Sequence
  Cyclic GFR-binding peptide
DDMGVPTPYVKLVVKENEDFFLMSLSS

SEQ ID NO: 96096 - protein, 27 aa, Artificial Sequence
  Cyclic GFR-binding peptide
DDMGVPTPYVKLIVNNSSDFFLVSLSS

SEQ ID NO: 96097 - protein, 29 aa, Artificial Sequence
  Cyclic GFR-binding peptide
DDMGVPTPYVKLLKPKKRVYEFFLVSLSS

SEQ ID NO: 96098 - protein, 27 aa, Artificial Sequence
  Cyclic GFR-binding peptide
DDMGVPTPYVKLLLVRGNDFFLMSLSS

SEQ ID NO: 96099 - protein, 27 aa, Artificial Sequence
  Cyclic GFR-binding peptide
DDMGVPTPYVKLVVKDYEDFFLMSLSS

SEQ ID NO: 96100 - protein, 27 aa, Artificial Sequence
  Cyclic GFR-binding peptide
DDMGVPTPYVKLVVNNAADFFLISLSS

SEQ ID NO: 96101 - protein, 27 aa, Artificial Sequence
  Cyclic GFR-binding peptide
SSLSILFFDKGVVTYLKVYPDDMGVPT

SEQ ID NO: 96102 - protein, 27 aa, Artificial Sequence
  Cyclic GFR-binding peptide
SSLSILFFIGKTPKILKVYPDDMGVPT

SEQ ID NO: 96103 - protein, 27 aa, Artificial Sequence
  Cyclic GFR-binding peptide
SSLSMLFFNDKQQIILKVYPDDMGVPT

SEQ ID NO: 96104 - protein, 27 aa, Artificial Sequence
  Cyclic GFR-binding peptide
SSLSVLFFDDSSNVILKVYPDDMGVPT

SEQ ID NO: 96105 - protein, 27 aa, Artificial Sequence
  Cyclic GFR-binding peptide
SSLSILFFVGRKPKVLKVYPDDMGVPT

SEQ ID NO: 96106 - protein, 27 aa, Artificial Sequence
  Cyclic GFR-binding peptide
SSLSILFFVGRTPKVLKVYPDDMGVPT

SEQ ID NO: 96107 - protein, 27 aa, Artificial Sequence
  Cyclic GFR-binding peptide
SSLSVLFFDDMGVPTLKVYPDDMGVPT

SEQ ID NO: 96108 - protein, 29 aa, Artificial Sequence
  Cyclic GFR-binding peptide
SSLSMLFFRIKPHQGQHLKVYPDDMGVPT

SEQ ID NO: 96109 - protein, 27 aa, Artificial Sequence
  Cyclic GFR-binding peptide
SSLSILFFDENKNVVLKVYPDDMGVPT

SEQ ID NO: 96110 - protein, 27 aa, Artificial Sequence
  Cyclic GFR-binding peptide
SSLSILFFDSANNVVLKVYPDDMGVPT

SEQ ID NO: 96111 - protein, 27 aa, Artificial Sequence
  Cyclic GFR-binding peptide
SSLSMLFFDENEKVVLKVYPDDMGVPT

SEQ ID NO: 96112 - protein, 27 aa, Artificial Sequence
  Cyclic GFR-binding peptide
SSLSVLFFDSSNNVILKVYPDDMGVPT

SEQ ID NO: 96113 - protein, 29 aa, Artificial Sequence
  Cyclic GFR-binding peptide
SSLSVLFFEYVRKKPKLLKVYPDDMGVPT

SEQ ID NO: 96114 - protein, 27 aa, Artificial Sequence
  Cyclic GFR-binding peptide
SSLSMLFFDNGRVLLLKVYPDDMGVPT

SEQ ID NO: 96115 - protein, 27 aa, Artificial Sequence
  Cyclic GFR-binding peptide
SSLSMLFFDEYDKVVLKVYPDDMGVPT

SEQ ID NO: 96116 - protein, 27 aa, Artificial Sequence
  Cyclic GFR-binding peptide
SSLSILFFDAANNVVLKVYPDDMGVPT

SEQ ID NO: 96117 - protein, 27 aa, Artificial Sequence
  Cyclic GFR-binding peptide
DDMGVPTSMEGIIVNSSDDMIQVTINS

SEQ ID NO: 96118 - protein, 27 aa, Artificial Sequence
  Cyclic GFR-binding peptide
DDMGVPTVTAKKVVKENEDIKRMQVPR

SEQ ID NO: 96119 - protein, 27 aa, Artificial Sequence
  Cyclic GFR-binding peptide
DDMGVPTSMEGIVVKDYEDMIQMTINS

SEQ ID NO: 96120 - protein, 27 aa, Artificial Sequence
  Cyclic GFR-binding peptide
DDMGVPTVTAKKIKPTKGIIKRIQVPR

SEQ ID NO: 96121 - protein, 27 aa, Artificial Sequence
  Cyclic GFR-binding peptide
DDMGVPTSMEGIVKPTRGVMIQITINS

SEQ ID NO: 96122 - protein, 29 aa, Artificial Sequence
  Cyclic GFR-binding peptide
DDMGVPTNSLQEFIPKKRVIEYYVVPLPE

SEQ ID NO: 96123 - protein, 27 aa, Artificial Sequence
  Cyclic GFR-binding peptide
DDMGVPTVQVEKVKPKRGVVKAIKVSR

SEQ ID NO: 96124 - protein, 27 aa, Artificial Sequence
  Cyclic GFR-binding peptide
DDMGVPTVQVEKVVKENEDVKAMKVSR

SEQ ID NO: 96125 - protein, 27 aa, Artificial Sequence
  Cyclic GFR-binding peptide
DDMGVPTVTAKKIVNSSDDIKRVQVPR

SEQ ID NO: 96126 - protein, 27 aa, Artificial Sequence
  Cyclic GFR-binding peptide
DDMGVPTVQVEKIKPTKGIVKAIKVSR

SEQ ID NO: 96127 - protein, 29 aa, Artificial Sequence
  Cyclic GFR-binding peptide
DDMGVPTNSLQEFIPKKRVIEYYLVTLPE

SEQ ID NO: 96128 - protein, 27 aa, Artificial Sequence
  Cyclic GFR-binding peptide
DDMGVPTVQVEKIVNSSDDVKAVKVSR

SEQ ID NO: 96129 - protein, 27 aa, Artificial Sequence
  Cyclic GFR-binding peptide
DDMGVPTVTAKKVKPKRGVIKRIQVPR

SEQ ID NO: 96130 - protein, 27 aa, Artificial Sequence
  Cyclic GFR-binding peptide
DDMGVPTVQVEKVKPTRGVVKAIKVSR

SEQ ID NO: 96131 - protein, 27 aa, Artificial Sequence
  Cyclic GFR-binding peptide
DDMGVPTVTAKKVKPTRGVIKRIQVPR

SEQ ID NO: 96132 - protein, 29 aa, Artificial Sequence
  Cyclic GFR-binding peptide
DDMGVPTNSLQELKPKKRVYEYYLVTLPE

SEQ ID NO: 96133 - protein, 27 aa, Artificial Sequence
  Cyclic GFR-binding peptide
DDMGVPTSMEGIVKPKRGVMIQITINS

SEQ ID NO: 96134 - protein, 27 aa, Artificial Sequence
  Cyclic GFR-binding peptide
DDMGVPTSMEGIVVKENEDMIQMTINS

SEQ ID NO: 96135 - protein, 27 aa, Artificial Sequence
  Cyclic GFR-binding peptide
DDMGVPTSMEGIIKPTKGIMIQITINS

SEQ ID NO: 96136 - protein, 29 aa, Artificial Sequence
  Cyclic GFR-binding peptide
DDMGVPTNSLQEHQGQHPKIRYYLMTLPE

SEQ ID NO: 96137 - protein, 27 aa, Artificial Sequence
  Cyclic GFR-binding peptide
DDMGVPTVTAKKVVKDYEDIKRMQVPR

SEQ ID NO: 96138 - protein, 29 aa, Artificial Sequence
  Cyclic GFR-binding peptide
DDMGVPTNSLQEHQGQHPKIRYYVMPLPE

SEQ ID NO: 96139 - protein, 29 aa, Artificial Sequence
  Cyclic GFR-binding peptide
DDMGVPTNSLQELKPKKRVYEYYVVPLPE

SEQ ID NO: 96140 - protein, 27 aa, Artificial Sequence
  Cyclic GFR-binding peptide
DDMGVPTVQVEKVVKDYEDVKAMKVSR

SEQ ID NO: 96141 - protein, 27 aa, Artificial Sequence
  Cyclic GFR-binding peptide
SNITVQIMDDSSNVIIGEMSDDMGVPT

SEQ ID NO: 96142 - protein, 27 aa, Artificial Sequence
  Cyclic GFR-binding peptide
RPVQMRKIDENEKVVKKATVDDMGVPT

SEQ ID NO: 96143 - protein, 27 aa, Artificial Sequence
  Cyclic GFR-binding peptide
SNITMQIMDEYDKVVIGEMSDDMGVPT

SEQ ID NO: 96144 - protein, 27 aa, Artificial Sequence
  Cyclic GFR-binding peptide
RPVQIRKIIGKTPKIKKATVDDMGVPT

SEQ ID NO: 96145 - protein, 27 aa, Artificial Sequence
  Cyclic GFR-binding peptide
SNITIQIMVGRTPKVIGEMSDDMGVPT

SEQ ID NO: 96146 - protein, 29 aa, Artificial Sequence
  Cyclic GFR-binding peptide
EPLPVVYYEIVRKKPIFEQLSNDDMGVPT

SEQ ID NO: 96147 - protein, 27 aa, Artificial Sequence
  Cyclic GFR-binding peptide
RSVKIAKVVGRKPKVKEVQVDDMGVPT

SEQ ID NO: 96148 - protein, 27 aa, Artificial Sequence
  Cyclic GFR-binding peptide
RSVKMAKVDENEKVVKEVQVDDMGVPT

SEQ ID NO: 96149 - protein, 27 aa, Artificial Sequence
  Cyclic GFR-binding peptide
RPVQVRKIDDSSNVIKKATVDDMGVPT

SEQ ID NO: 96150 - protein, 27 aa, Artificial Sequence
  Cyclic GFR-binding peptide
RSVKIAKVIGKTPKIKEVQVDDMGVPT

SEQ ID NO: 96151 - protein, 29 aa, Artificial Sequence
  Cyclic GFR-binding peptide
EPLTVLYYEIVRKKPIFEQLSNDDMGVPT

SEQ ID NO: 96152 - protein, 27 aa, Artificial Sequence
  Cyclic GFR-binding peptide
RSVKVAKVDDSSNVIKEVQVDDMGVPT

SEQ ID NO: 96153 - protein, 27 aa, Artificial Sequence
  Cyclic GFR-binding peptide
RPVQIRKIVGRKPKVKKATVDDMGVPT

SEQ ID NO: 96154 - protein, 27 aa, Artificial Sequence
  Cyclic GFR-binding peptide
RSVKIAKVVGRTPKVKEVQVDDMGVPT

SEQ ID NO: 96155 - protein, 27 aa, Artificial Sequence
  Cyclic GFR-binding peptide
RPVQIRKIVGRTPKVKKATVDDMGVPT

SEQ ID NO: 96156 - protein, 29 aa, Artificial Sequence
  Cyclic GFR-binding peptide
EPLTVLYYEYVRKKPKLEQLSNDDMGVPT

SEQ ID NO: 96157 - protein, 27 aa, Artificial Sequence
  Cyclic GFR-binding peptide
SNITIQIMVGRKPKVIGEMSDDMGVPT

SEQ ID NO: 96158 - protein, 27 aa, Artificial Sequence
  Cyclic GFR-binding peptide
SNITMQIMDENEKVVIGEMSDDMGVPT

SEQ ID NO: 96159 - protein, 27 aa, Artificial Sequence
  Cyclic GFR-binding peptide
SNITIQIMIGKTPKIIGEMSDDMGVPT

SEQ ID NO: 96160 - protein, 29 aa, Artificial Sequence
  Cyclic GFR-binding peptide
EPLTMLYYRIKPHQGQHEQLSNDDMGVPT

SEQ ID NO: 96161 - protein, 27 aa, Artificial Sequence
  Cyclic GFR-binding peptide
RPVQMRKIDEYDKVVKKATVDDMGVPT

SEQ ID NO: 96162 - protein, 29 aa, Artificial Sequence
  Cyclic GFR-binding peptide
EPLPMVYYRIKPHQGQHEQLSNDDMGVPT

SEQ ID NO: 96163 - protein, 29 aa, Artificial Sequence
  Cyclic GFR-binding peptide
EPLPVVYYEYVRKKPKLEQLSNDDMGVPT

SEQ ID NO: 96164 - protein, 27 aa, Artificial Sequence
  Cyclic GFR-binding peptide
RSVKMAKVDEYDKVVKEVQVDDMGVPT

SEQ ID NO: 96165 - protein, 27 aa, Artificial Sequence
  Cyclic GFR-binding peptide
DDMGVPTRYKKLIIQQKDNFYLMSIAN

SEQ ID NO: 96166 - protein, 27 aa, Artificial Sequence
  Cyclic GFR-binding peptide
DDMGVPTRYKKLLLVRGNDFYLMSIAN

SEQ ID NO: 96167 - protein, 27 aa, Artificial Sequence
  Cyclic GFR-binding peptide
NAISMLYFNDKQQIILKKYRDDMGVPT

SEQ ID NO: 96168 - protein, 27 aa, Artificial Sequence
  Cyclic GFR-binding peptide
NAISMLYFDNGRVLLLKKYRDDMGVPT

SEQ ID NO: 96169 - protein, 27 aa, Artificial Sequence
  Cyclic GFR-binding peptide
DDMGVPTEYKFKVVNKNEDLYLISIPE

SEQ ID NO: 96170 - protein, 27 aa, Artificial Sequence
  Cyclic GFR-binding peptide
DDMGVPTPIKGYVKPTRGVFYLINIPS

SEQ ID NO: 96171 - protein, 27 aa, Artificial Sequence
  Cyclic GFR-binding peptide
DDMGVPTEYKFKLLVRGNDLYLMSIPE

SEQ ID NO: 96172 - protein, 27 aa, Artificial Sequence
  Cyclic GFR-binding peptide
DDMGVPTYHYKLVVNKNEDKYLISIPS

SEQ ID NO: 96173 - protein, 27 aa, Artificial Sequence
  Cyclic GFR-binding peptide
DDMGVPTRHKRLLLVRGNDYYLMSTAS

SEQ ID NO: 96174 - protein, 27 aa, Artificial Sequence
  Cyclic GFR-binding peptide
DDMGVPTYHYKLLLVRGNDKYLMSIPS

SEQ ID NO: 96175 - protein, 27 aa, Artificial Sequence
  Cyclic GFR-binding peptide
DDMGVPTRHKRLVVNKNEDYYLISTAS

SEQ ID NO: 96176 - protein, 27 aa, Artificial Sequence
  Cyclic GFR-binding peptide
DDMGVPTRYKKLVVNKNEDFYLISIAN

SEQ ID NO: 96177 - protein, 27 aa, Artificial Sequence
  Cyclic GFR-binding peptide
DDMGVPTPIKGYVVNKNEDFYLINIPS

SEQ ID NO: 96178 - protein, 27 aa, Artificial Sequence
  Cyclic GFR-binding peptide
DDMGVPTPIKGYIKPTKGIFYLINIPS

SEQ ID NO: 96179 - protein, 27 aa, Artificial Sequence
  Cyclic GFR-binding peptide
DDMGVPTRHKRLYTVVGKDYYLISTAS

SEQ ID NO: 96180 - protein, 27 aa, Artificial Sequence
  Cyclic GFR-binding peptide
DDMGVPTEYKFKVVNNASDLYLISIPE

SEQ ID NO: 96181 - protein, 27 aa, Artificial Sequence
  Cyclic GFR-binding peptide
DDMGVPTRHKRLIIQQKDNYYLMSTAS

SEQ ID NO: 96182 - protein, 27 aa, Artificial Sequence
  Cyclic GFR-binding peptide
DDMGVPTEYKFKIIQQKDNLYLMSIPE

SEQ ID NO: 96183 - protein, 27 aa, Artificial Sequence
  Cyclic GFR-binding peptide
DDMGVPTPIKGYVKPKRGVFYLINIPS

SEQ ID NO: 96184 - protein, 27 aa, Artificial Sequence
  Cyclic GFR-binding peptide
DDMGVPTRHKRLVVNNASDYYLISTAS

SEQ ID NO: 96185 - protein, 27 aa, Artificial Sequence
  Cyclic GFR-binding peptide
DDMGVPTYHYKLVVNNASDKYLISIPS

SEQ ID NO: 96186 - protein, 27 aa, Artificial Sequence
  Cyclic GFR-binding peptide
DDMGVPTYHYKLIIQQKDNKYLMSIPS

SEQ ID NO: 96187 - protein, 27 aa, Artificial Sequence
  Cyclic GFR-binding peptide
DDMGVPTRHKRLVVNNAADYYLISTAS

SEQ ID NO: 96188 - protein, 27 aa, Artificial Sequence
  Cyclic GFR-binding peptide
EPISILYLDENKNVVKFKYEDDMGVPT

SEQ ID NO: 96189 - protein, 27 aa, Artificial Sequence
  Cyclic GFR-binding peptide
SPINILYFVGRTPKVYGKIPDDMGVPT

SEQ ID NO: 96190 - protein, 27 aa, Artificial Sequence
  Cyclic GFR-binding peptide
EPISMLYLDNGRVLLKFKYEDDMGVPT

SEQ ID NO: 96191 - protein, 27 aa, Artificial Sequence
  Cyclic GFR-binding peptide
SPISILYKDENKNVVLKYHYDDMGVPT

SEQ ID NO: 96192 - protein, 27 aa, Artificial Sequence
  Cyclic GFR-binding peptide
SATSMLYYDNGRVLLLRKHRDDMGVPT

SEQ ID NO: 96193 - protein, 27 aa, Artificial Sequence
  Cyclic GFR-binding peptide
SPISMLYKDNGRVLLLKYHYDDMGVPT

SEQ ID NO: 96194 - protein, 27 aa, Artificial Sequence
  Cyclic GFR-binding peptide
SATSILYYDENKNVVLRKHRDDMGVPT

SEQ ID NO: 96195 - protein, 27 aa, Artificial Sequence
  Cyclic GFR-binding peptide
NAISILYFDENKNVVLKKYRDDMGVPT

SEQ ID NO: 96196 - protein, 27 aa, Artificial Sequence
  Cyclic GFR-binding peptide
SPINILYFDENKNVVYGKIPDDMGVPT

SEQ ID NO: 96197 - protein, 27 aa, Artificial Sequence
  Cyclic GFR-binding peptide
SPINILYFIGKTPKIYGKIPDDMGVPT

SEQ ID NO: 96198 - protein, 27 aa, Artificial Sequence
  Cyclic GFR-binding peptide
SATSILYYDKGVVTYLRKHRDDMGVPT

SEQ ID NO: 96199 - protein, 27 aa, Artificial Sequence
  Cyclic GFR-binding peptide
EPISILYLDSANNVVKFKYEDDMGVPT

SEQ ID NO: 96200 - protein, 27 aa, Artificial Sequence
  Cyclic GFR-binding peptide
SATSMLYYNDKQQIILRKHRDDMGVPT

SEQ ID NO: 96201 - protein, 27 aa, Artificial Sequence
  Cyclic GFR-binding peptide
EPISMLYLNDKQQIIKFKYEDDMGVPT

SEQ ID NO: 96202 - protein, 27 aa, Artificial Sequence
  Cyclic GFR-binding peptide
SPINILYFVGRKPKVYGKIPDDMGVPT

SEQ ID NO: 96203 - protein, 27 aa, Artificial Sequence
  Cyclic GFR-binding peptide
SATSILYYDSANNVVLRKHRDDMGVPT

SEQ ID NO: 96204 - protein, 27 aa, Artificial Sequence
  Cyclic GFR-binding peptide
SPISILYKDSANNVVLKYHYDDMGVPT

SEQ ID NO: 96205 - protein, 27 aa, Artificial Sequence
  Cyclic GFR-binding peptide
SPISMLYKNDKQQIILKYHYDDMGVPT

SEQ ID NO: 96206 - protein, 27 aa, Artificial Sequence
  Cyclic GFR-binding peptide
SATSILYYDAANNVVLRKHRDDMGVPT

SEQ ID NO: 96207 - protein, 27 aa, Artificial Sequence
  Cyclic GFR-binding peptide
DDMGVPTSMEGIIIQQKDNMIQMTINS

SEQ ID NO: 96208 - protein, 27 aa, Artificial Sequence
  Cyclic GFR-binding peptide
DDMGVPTSMEGLVKPKRGVMIQITINS

SEQ ID NO: 96209 - protein, 27 aa, Artificial Sequence
  Cyclic GFR-binding peptide
DDMGVPTSMEGLVVNNASDMIQITINS

SEQ ID NO: 96210 - protein, 27 aa, Artificial Sequence
  Cyclic GFR-binding peptide
DDMGVPTSMEGILLVRGNDMIQMTINS

SEQ ID NO: 96211 - protein, 27 aa, Artificial Sequence
  Cyclic GFR-binding peptide
DDMGVPTSMEGLIKPTKGIMIQITINS

SEQ ID NO: 96212 - protein, 27 aa, Artificial Sequence
  Cyclic GFR-binding peptide
DDMGVPTSMEGLIVNSSDDMIQVTINS

SEQ ID NO: 96213 - protein, 27 aa, Artificial Sequence
  Cyclic GFR-binding peptide
DDMGVPTSMEGIVVNNASDMIQITINS

SEQ ID NO: 96214 - protein, 27 aa, Artificial Sequence
  Cyclic GFR-binding peptide
DDMGVPTSMEGLVVNNAADMIQITINS

SEQ ID NO: 96215 - protein, 27 aa, Artificial Sequence
  Cyclic GFR-binding peptide
DDMGVPTSMEGLLLVRGNDMIQMTINS

SEQ ID NO: 96216 - protein, 27 aa, Artificial Sequence
  Cyclic GFR-binding peptide
DDMGVPTSMEGLIIQQKDNMIQMTINS

SEQ ID NO: 96217 - protein, 27 aa, Artificial Sequence
  Cyclic GFR-binding peptide
DDMGVPTSMEGIVVNNAADMIQITINS

SEQ ID NO: 96218 - protein, 27 aa, Artificial Sequence
  Cyclic GFR-binding peptide
DDMGVPTSMEGLVKPTRGVMIQITINS

SEQ ID NO: 96219 - protein, 27 aa, Artificial Sequence
  Cyclic GFR-binding peptide
SNITMQIMNDKQQIIIGEMSDDMGVPT

SEQ ID NO: 96220 - protein, 27 aa, Artificial Sequence
  Cyclic GFR-binding peptide
SNITIQIMVGRKPKVLGEMSDDMGVPT

SEQ ID NO: 96221 - protein, 27 aa, Artificial Sequence
  Cyclic GFR-binding peptide
SNITIQIMDSANNVVLGEMSDDMGVPT

SEQ ID NO: 96222 - protein, 27 aa, Artificial Sequence
  Cyclic GFR-binding peptide
SNITMQIMDNGRVLLIGEMSDDMGVPT

SEQ ID NO: 96223 - protein, 27 aa, Artificial Sequence
  Cyclic GFR-binding peptide
SNITIQIMIGKTPKILGEMSDDMGVPT

SEQ ID NO: 96224 - protein, 27 aa, Artificial Sequence
  Cyclic GFR-binding peptide
SNITVQIMDDSSNVILGEMSDDMGVPT

SEQ ID NO: 96225 - protein, 27 aa, Artificial Sequence
  Cyclic GFR-binding peptide
SNITIQIMDSANNVVIGEMSDDMGVPT

SEQ ID NO: 96226 - protein, 27 aa, Artificial Sequence
  Cyclic GFR-binding peptide
SNITIQIMDAANNVVLGEMSDDMGVPT

SEQ ID NO: 96227 - protein, 27 aa, Artificial Sequence
  Cyclic GFR-binding peptide
SNITMQIMDNGRVLLLGEMSDDMGVPT

SEQ ID NO: 96228 - protein, 27 aa, Artificial Sequence
  Cyclic GFR-binding peptide
SNITMQIMNDKQQIILGEMSDDMGVPT

SEQ ID NO: 96229 - protein, 27 aa, Artificial Sequence
  Cyclic GFR-binding peptide
SNITIQIMDAANNVVIGEMSDDMGVPT

SEQ ID NO: 96230 - protein, 27 aa, Artificial Sequence
  Cyclic GFR-binding peptide
SNITIQIMVGRTPKVLGEMSDDMGVPT

SEQ ID NO: 96231 - protein, 27 aa, Artificial Sequence
  Cyclic GFR-binding peptide
DDMGVPTQYNKLVVNKNEDLYLISIAS

SEQ ID NO: 96232 - protein, 27 aa, Artificial Sequence
  Cyclic GFR-binding peptide
DDMGVPTQYNKLVVNNAADLYLISIAS

SEQ ID NO: 96233 - protein, 27 aa, Artificial Sequence
  Cyclic GFR-binding peptide
DDMGVPTQYNKLIIQQKDNLYLMSIAS

SEQ ID NO: 96234 - protein, 27 aa, Artificial Sequence
  Cyclic GFR-binding peptide
DDMGVPTQYNKLLLVRGNDLYLMSIAS

SEQ ID NO: 96235 - protein, 27 aa, Artificial Sequence
  Cyclic GFR-binding peptide
DDMGVPTQYNKLYTVVGKDLYLISIAS

SEQ ID NO: 96236 - protein, 27 aa, Artificial Sequence
  Cyclic GFR-binding peptide
SAISILYLDENKNVVLKNYQDDMGVPT

SEQ ID NO: 96237 - protein, 27 aa, Artificial Sequence
  Cyclic GFR-binding peptide
SAISILYLDAANNVVLKNYQDDMGVPT

SEQ ID NO: 96238 - protein, 27 aa, Artificial Sequence
  Cyclic GFR-binding peptide
SAISMLYLNDKQQIILKNYQDDMGVPT

SEQ ID NO: 96239 - protein, 27 aa, Artificial Sequence
  Cyclic GFR-binding peptide
SAISMLYLDNGRVLLLKNYQDDMGVPT

SEQ ID NO: 96240 - protein, 27 aa, Artificial Sequence
  Cyclic GFR-binding peptide
SAISILYLDKGVVTYLKNYQDDMGVPT

SEQ ID NO: 96241 - protein, 27 aa, Artificial Sequence
  Cyclic GFR-binding peptide
DKGVVTYRYKKLIKPTKGIFYLISIAN

SEQ ID NO: 96242 - protein, 29 aa, Artificial Sequence
  Cyclic GFR-binding peptide
DKGVVTYRHKRLFIPKKRVIEYYLVSTAS

SEQ ID NO: 96243 - protein, 27 aa, Artificial Sequence
  Cyclic GFR-binding peptide
DKGVVTYYHYKLVVKDYEDKYLMSIPS

SEQ ID NO: 96244 - protein, 27 aa, Artificial Sequence
  Cyclic GFR-binding peptide
DKGVVTYQYNKLIVNNSSDLYLVSIAS

SEQ ID NO: 96245 - protein, 27 aa, Artificial Sequence
  Cyclic GFR-binding peptide
DKGVVTYRYKKLVVKDYEDFYLMSIAN

SEQ ID NO: 96246 - protein, 27 aa, Artificial Sequence
  Cyclic GFR-binding peptide
DKGVVTYRYKKLVKPTRGVFYLISIAN

SEQ ID NO: 96247 - protein, 27 aa, Artificial Sequence
  Cyclic GFR-binding peptide
DKGVVTYRHKRLVVKENEDYYLMSTAS

SEQ ID NO: 96248 - protein, 27 aa, Artificial Sequence
  Cyclic GFR-binding peptide
DKGVVTYYHYKLIKPTKGIKYLISIPS

SEQ ID NO: 96249 - protein, 29 aa, Artificial Sequence
  Cyclic GFR-binding peptide
DKGVVTYRYKKLFIPKKRVIEFYLVSIAN

SEQ ID NO: 96250 - protein, 27 aa, Artificial Sequence
  Cyclic GFR-binding peptide
DKGVVTYYHYKLVVKENEDKYLMSIPS

SEQ ID NO: 96251 - protein, 27 aa, Artificial Sequence
  Cyclic GFR-binding peptide
DKGVVTYRHKRLVKPKRGVYYLISTAS

SEQ ID NO: 96252 - protein, 27 aa, Artificial Sequence
  Cyclic GFR-binding peptide
DKGVVTYYHYKLVKPKRGVKYLISIPS

SEQ ID NO: 96253 - protein, 29 aa, Artificial Sequence
  Cyclic GFR-binding peptide
DKGVVTYQYNKLFIPKKRVIELYLVSIAS

SEQ ID NO: 96254 - protein, 27 aa, Artificial Sequence
  Cyclic GFR-binding peptide
DKGVVTYQYNKLVKPTRGVLYLISIAS

SEQ ID NO: 96255 - protein, 27 aa, Artificial Sequence
  Cyclic GFR-binding peptide
DKGVVTYRYKKLVVKENEDFYLMSIAN

SEQ ID NO: 96256 - protein, 27 aa, Artificial Sequence
  Cyclic GFR-binding peptide
DKGVVTYQYNKLTPVGMDDLYLVSIAS

SEQ ID NO: 96257 - protein, 27 aa, Artificial Sequence
  Cyclic GFR-binding peptide
DKGVVTYRYKKLTPVGMDDFYLVSIAN

SEQ ID NO: 96258 - protein, 27 aa, Artificial Sequence
  Cyclic GFR-binding peptide
DKGVVTYRYKKLVKPKRGVFYLISIAN

SEQ ID NO: 96259 - protein, 27 aa, Artificial Sequence
  Cyclic GFR-binding peptide
DKGVVTYQYNKLVVKENEDLYLMSIAS

SEQ ID NO: 96260 - protein, 27 aa, Artificial Sequence
  Cyclic GFR-binding peptide
DKGVVTYYHYKLIVNSSDDKYLVSIPS

SEQ ID NO: 96261 - protein, 27 aa, Artificial Sequence
  Cyclic GFR-binding peptide
DKGVVTYQYNKLVKPKRGVLYLISIAS

SEQ ID NO: 96262 - protein, 27 aa, Artificial Sequence
  Cyclic GFR-binding peptide
DKGVVTYRYKKLIVNNSSDFYLVSIAN

SEQ ID NO: 96263 - protein, 27 aa, Artificial Sequence
  Cyclic GFR-binding peptide
DKGVVTYRYKKLIVNSSDDFYLVSIAN

SEQ ID NO: 96264 - protein, 27 aa, Artificial Sequence
  Cyclic GFR-binding peptide
DKGVVTYRHKRLVKPTRGVYYLISTAS

SEQ ID NO: 96265 - protein, 29 aa, Artificial Sequence
  Cyclic GFR-binding peptide
DKGVVTYYHYKLFIPKKRVIEKYLVSIPS

SEQ ID NO: 96266 - protein, 27 aa, Artificial Sequence
  Cyclic GFR-binding peptide
DKGVVTYRHKRLIKPTKGIYYLISTAS

SEQ ID NO: 96267 - protein, 27 aa, Artificial Sequence
  Cyclic GFR-binding peptide
DKGVVTYRHKRLTPVGMDDYYLVSTAS

SEQ ID NO: 96268 - protein, 27 aa, Artificial Sequence
  Cyclic GFR-binding peptide
DKGVVTYYHYKLTPVGMDDKYLVSIPS

SEQ ID NO: 96269 - protein, 27 aa, Artificial Sequence
  Cyclic GFR-binding peptide
DKGVVTYYHYKLIVNNSSDKYLVSIPS

SEQ ID NO: 96270 - protein, 27 aa, Artificial Sequence
  Cyclic GFR-binding peptide
DKGVVTYRHKRLIVNNSSDYYLVSTAS

SEQ ID NO: 96271 - protein, 27 aa, Artificial Sequence
  Cyclic GFR-binding peptide
DKGVVTYYHYKLVKPTRGVKYLISIPS

SEQ ID NO: 96272 - protein, 27 aa, Artificial Sequence
  Cyclic GFR-binding peptide
DKGVVTYRHKRLIVNSSDDYYLVSTAS

SEQ ID NO: 96273 - protein, 27 aa, Artificial Sequence
  Cyclic GFR-binding peptide
DKGVVTYRHKRLVVKDYEDYYLMSTAS

SEQ ID NO: 96274 - protein, 27 aa, Artificial Sequence
  Cyclic GFR-binding peptide
DKGVVTYQYNKLIKPTKGILYLISIAS

SEQ ID NO: 96275 - protein, 27 aa, Artificial Sequence
  Cyclic GFR-binding peptide
DKGVVTYQYNKLVVKDYEDLYLMSIAS

SEQ ID NO: 96276 - protein, 27 aa, Artificial Sequence
  Cyclic GFR-binding peptide
DKGVVTYQYNKLIVNSSDDLYLVSIAS

SEQ ID NO: 96277 - protein, 27 aa, Artificial Sequence
  Cyclic GFR-binding peptide
NAISILYFIGKTPKILKKYRDKGVVTY

SEQ ID NO: 96278 - protein, 29 aa, Artificial Sequence
  Cyclic GFR-binding peptide
SATSVLYYEIVRKKPIFLRKHRDKGVVTY

SEQ ID NO: 96279 - protein, 27 aa, Artificial Sequence
  Cyclic GFR-binding peptide
SPISMLYKDEYDKVVLKYHYDKGVVTY

SEQ ID NO: 96280 - protein, 27 aa, Artificial Sequence
  Cyclic GFR-binding peptide
SAISVLYLDSSNNVILKNYQDKGVVTY

SEQ ID NO: 96281 - protein, 27 aa, Artificial Sequence
  Cyclic GFR-binding peptide
NAISMLYFDEYDKVVLKKYRDKGVVTY

SEQ ID NO: 96282 - protein, 27 aa, Artificial Sequence
  Cyclic GFR-binding peptide
NAISILYFVGRTPKVLKKYRDKGVVTY

SEQ ID NO: 96283 - protein, 27 aa, Artificial Sequence
  Cyclic GFR-binding peptide
SATSMLYYDENEKVVLRKHRDKGVVTY

SEQ ID NO: 96284 - protein, 27 aa, Artificial Sequence
  Cyclic GFR-binding peptide
SPISILYKIGKTPKILKYHYDKGVVTY

SEQ ID NO: 96285 - protein, 29 aa, Artificial Sequence
  Cyclic GFR-binding peptide
NAISVLYFEIVRKKPIFLKKYRDKGVVTY

SEQ ID NO: 96286 - protein, 27 aa, Artificial Sequence
  Cyclic GFR-binding peptide
SPISMLYKDENEKVVLKYHYDKGVVTY

SEQ ID NO: 96287 - protein, 27 aa, Artificial Sequence
  Cyclic GFR-binding peptide
SATSILYYVGRKPKVLRKHRDKGVVTY

SEQ ID NO: 96288 - protein, 27 aa, Artificial Sequence
  Cyclic GFR-binding peptide
SPISILYKVGRKPKVLKYHYDKGVVTY

SEQ ID NO: 96289 - protein, 29 aa, Artificial Sequence
  Cyclic GFR-binding peptide
SAISVLYLEIVRKKPIFLKNYQDKGVVTY

SEQ ID NO: 96290 - protein, 27 aa, Artificial Sequence
  Cyclic GFR-binding peptide
SAISILYLVGRTPKVLKNYQDKGVVTY

SEQ ID NO: 96291 - protein, 27 aa, Artificial Sequence
  Cyclic GFR-binding peptide
NAISMLYFDENEKVVLKKYRDKGVVTY

SEQ ID NO: 96292 - protein, 27 aa, Artificial Sequence
  Cyclic GFR-binding peptide
SAISVLYLDDMGVPTLKNYQDKGVVTY

SEQ ID NO: 96293 - protein, 27 aa, Artificial Sequence
  Cyclic GFR-binding peptide
NAISVLYFDDMGVPTLKKYRDKGVVTY

SEQ ID NO: 96294 - protein, 27 aa, Artificial Sequence
  Cyclic GFR-binding peptide
NAISILYFVGRKPKVLKKYRDKGVVTY

SEQ ID NO: 96295 - protein, 27 aa, Artificial Sequence
  Cyclic GFR-binding peptide
SAISMLYLDENEKVVLKNYQDKGVVTY

SEQ ID NO: 96296 - protein, 27 aa, Artificial Sequence
  Cyclic GFR-binding peptide
SPISVLYKDDSSNVILKYHYDKGVVTY

SEQ ID NO: 96297 - protein, 27 aa, Artificial Sequence
  Cyclic GFR-binding peptide
SAISILYLVGRKPKVLKNYQDKGVVTY

SEQ ID NO: 96298 - protein, 27 aa, Artificial Sequence
  Cyclic GFR-binding peptide
NAISVLYFDSSNNVILKKYRDKGVVTY

SEQ ID NO: 96299 - protein, 27 aa, Artificial Sequence
  Cyclic GFR-binding peptide
NAISVLYFDDSSNVILKKYRDKGVVTY

SEQ ID NO: 96300 - protein, 27 aa, Artificial Sequence
  Cyclic GFR-binding peptide
SATSILYYVGRTPKVLRKHRDKGVVTY

SEQ ID NO: 96301 - protein, 29 aa, Artificial Sequence
  Cyclic GFR-binding peptide
SPISVLYKEIVRKKPIFLKYHYDKGVVTY

SEQ ID NO: 96302 - protein, 27 aa, Artificial Sequence
  Cyclic GFR-binding peptide
SATSILYYIGKTPKILRKHRDKGVVTY

SEQ ID NO: 96303 - protein, 27 aa, Artificial Sequence
  Cyclic GFR-binding peptide
SATSVLYYDDMGVPTLRKHRDKGVVTY

SEQ ID NO: 96304 - protein, 27 aa, Artificial Sequence
  Cyclic GFR-binding peptide
SPISVLYKDDMGVPTLKYHYDKGVVTY

SEQ ID NO: 96305 - protein, 27 aa, Artificial Sequence
  Cyclic GFR-binding peptide
SPISVLYKDSSNNVILKYHYDKGVVTY

SEQ ID NO: 96306 - protein, 27 aa, Artificial Sequence
  Cyclic GFR-binding peptide
SATSVLYYDSSNNVILRKHRDKGVVTY

SEQ ID NO: 96307 - protein, 27 aa, Artificial Sequence
  Cyclic GFR-binding peptide
SPISILYKVGRTPKVLKYHYDKGVVTY

SEQ ID NO: 96308 - protein, 27 aa, Artificial Sequence
  Cyclic GFR-binding peptide
SATSVLYYDDSSNVILRKHRDKGVVTY

SEQ ID NO: 96309 - protein, 27 aa, Artificial Sequence
  Cyclic GFR-binding peptide
SATSMLYYDEYDKVVLRKHRDKGVVTY

SEQ ID NO: 96310 - protein, 27 aa, Artificial Sequence
  Cyclic GFR-binding peptide
SAISILYLIGKTPKILKNYQDKGVVTY

SEQ ID NO: 96311 - protein, 27 aa, Artificial Sequence
  Cyclic GFR-binding peptide
SAISMLYLDEYDKVVLKNYQDKGVVTY

SEQ ID NO: 96312 - protein, 27 aa, Artificial Sequence
  Cyclic GFR-binding peptide
SAISVLYLDDSSNVILKNYQDKGVVTY

SEQ ID NO: 96313 - protein, 27 aa, Artificial Sequence
  Cyclic GFR-binding peptide
DKGVVTYNSLQEVVKDYEDYYLMTLPE

SEQ ID NO: 96314 - protein, 27 aa, Artificial Sequence
  Cyclic GFR-binding peptide
DKGVVTYNSLQEIKPTKGIYYVIPLPE

SEQ ID NO: 96315 - protein, 27 aa, Artificial Sequence
  Cyclic GFR-binding peptide
DKGVVTYNSLQEVKPKRGVYYLITLPE

SEQ ID NO: 96316 - protein, 27 aa, Artificial Sequence
  Cyclic GFR-binding peptide
DKGVVTYNSLQEVKPTRGVYYVIPLPE

SEQ ID NO: 96317 - protein, 27 aa, Artificial Sequence
  Cyclic GFR-binding peptide
DKGVVTYEYQKYIVNSSDDIFLVSIPS

SEQ ID NO: 96318 - protein, 27 aa, Artificial Sequence
  Cyclic GFR-binding peptide
DKGVVTYEYQKYVKPTRGVIFLISIPS

SEQ ID NO: 96319 - protein, 27 aa, Artificial Sequence
  Cyclic GFR-binding peptide
DKGVVTYNSLQEVVKENEDYYLMTLPE

SEQ ID NO: 96320 - protein, 27 aa, Artificial Sequence
  Cyclic GFR-binding peptide
DKGVVTYNSLQEVVNNASDYYLITLPE

SEQ ID NO: 96321 - protein, 27 aa, Artificial Sequence
  Cyclic GFR-binding peptide
DKGVVTYNSLQEVKPKRGVYYVIPLPE

SEQ ID NO: 96322 - protein, 27 aa, Artificial Sequence
  Cyclic GFR-binding peptide
DKGVVTYNSLQEVVNNASDYYVIPLPE

SEQ ID NO: 96323 - protein, 27 aa, Artificial Sequence
  Cyclic GFR-binding peptide
DKGVVTYNSLQEVKPTRGVYYLITLPE

SEQ ID NO: 96324 - protein, 27 aa, Artificial Sequence
  Cyclic GFR-binding peptide
DKGVVTYEYQKYIKPTKGIIFLISIPS

SEQ ID NO: 96325 - protein, 27 aa, Artificial Sequence
  Cyclic GFR-binding peptide
DKGVVTYEYQKYVVNNASDIFLISIPS

SEQ ID NO: 96326 - protein, 27 aa, Artificial Sequence
  Cyclic GFR-binding peptide
DKGVVTYNSLQEIVNSSDDYYVVPLPE

SEQ ID NO: 96327 - protein, 27 aa, Artificial Sequence
  Cyclic GFR-binding peptide
DKGVVTYNSLQEVVKDYEDYYVMPLPE

SEQ ID NO: 96328 - protein, 27 aa, Artificial Sequence
  Cyclic GFR-binding peptide
DKGVVTYEYQKYVVKENEDIFLMSIPS

SEQ ID NO: 96329 - protein, 27 aa, Artificial Sequence
  Cyclic GFR-binding peptide
DKGVVTYNSLQEVVKENEDYYVMPLPE

SEQ ID NO: 96330 - protein, 27 aa, Artificial Sequence
  Cyclic GFR-binding peptide
DKGVVTYEYQKYVVKDYEDIFLMSIPS

SEQ ID NO: 96331 - protein, 27 aa, Artificial Sequence
  Cyclic GFR-binding peptide
DKGVVTYQYNKLVVNNASDLYLISIAS

SEQ ID NO: 96332 - protein, 27 aa, Artificial Sequence
  Cyclic GFR-binding peptide
DKGVVTYNSLQEIKPTKGIYYLITLPE

SEQ ID NO: 96333 - protein, 27 aa, Artificial Sequence
  Cyclic GFR-binding peptide
DKGVVTYEYQKYVKPKRGVIFLISIPS

SEQ ID NO: 96334 - protein, 27 aa, Artificial Sequence
  Cyclic GFR-binding peptide
DKGVVTYRYKKLVVNNASDFYLISIAN

SEQ ID NO: 96335 - protein, 27 aa, Artificial Sequence
  Cyclic GFR-binding peptide
DKGVVTYNSLQEIVNSSDDYYLVTLPE

SEQ ID NO: 96336 - protein, 27 aa, Artificial Sequence
  Cyclic GFR-binding peptide
EPLTMLYYDEYDKVVEQLSNDKGVVTY

SEQ ID NO: 96337 - protein, 27 aa, Artificial Sequence
  Cyclic GFR-binding peptide
EPLPIVYYIGKTPKIEQLSNDKGVVTY

SEQ ID NO: 96338 - protein, 27 aa, Artificial Sequence
  Cyclic GFR-binding peptide
EPLTILYYVGRKPKVEQLSNDKGVVTY

SEQ ID NO: 96339 - protein, 27 aa, Artificial Sequence
  Cyclic GFR-binding peptide
EPLPIVYYVGRTPKVEQLSNDKGVVTY

SEQ ID NO: 96340 - protein, 27 aa, Artificial Sequence
  Cyclic GFR-binding peptide
SPISVLFIDDSSNVIYKQYEDKGVVTY

SEQ ID NO: 96341 - protein, 27 aa, Artificial Sequence
  Cyclic GFR-binding peptide
SPISILFIVGRTPKVYKQYEDKGVVTY

SEQ ID NO: 96342 - protein, 27 aa, Artificial Sequence
  Cyclic GFR-binding peptide
EPLTMLYYDENEKVVEQLSNDKGVVTY

SEQ ID NO: 96343 - protein, 27 aa, Artificial Sequence
  Cyclic GFR-binding peptide
EPLTILYYDSANNVVEQLSNDKGVVTY

SEQ ID NO: 96344 - protein, 27 aa, Artificial Sequence
  Cyclic GFR-binding peptide
EPLPIVYYVGRKPKVEQLSNDKGVVTY

SEQ ID NO: 96345 - protein, 27 aa, Artificial Sequence
  Cyclic GFR-binding peptide
EPLPIVYYDSANNVVEQLSNDKGVVTY

SEQ ID NO: 96346 - protein, 27 aa, Artificial Sequence
  Cyclic GFR-binding peptide
EPLTILYYVGRTPKVEQLSNDKGVVTY

SEQ ID NO: 96347 - protein, 27 aa, Artificial Sequence
  Cyclic GFR-binding peptide
SPISILFIIGKTPKIYKQYEDKGVVTY

SEQ ID NO: 96348 - protein, 27 aa, Artificial Sequence
  Cyclic GFR-binding peptide
SPISILFIDSANNVVYKQYEDKGVVTY

SEQ ID NO: 96349 - protein, 27 aa, Artificial Sequence
  Cyclic GFR-binding peptide
EPLPVVYYDDSSNVIEQLSNDKGVVTY

SEQ ID NO: 96350 - protein, 27 aa, Artificial Sequence
  Cyclic GFR-binding peptide
EPLPMVYYDEYDKVVEQLSNDKGVVTY

SEQ ID NO: 96351 - protein, 27 aa, Artificial Sequence
  Cyclic GFR-binding peptide
SPISMLFIDENEKVVYKQYEDKGVVTY

SEQ ID NO: 96352 - protein, 27 aa, Artificial Sequence
  Cyclic GFR-binding peptide
EPLPMVYYDENEKVVEQLSNDKGVVTY

SEQ ID NO: 96353 - protein, 27 aa, Artificial Sequence
  Cyclic GFR-binding peptide
SPISMLFIDEYDKVVYKQYEDKGVVTY

SEQ ID NO: 96354 - protein, 27 aa, Artificial Sequence
  Cyclic GFR-binding peptide
SAISILYLDSANNVVLKNYQDKGVVTY

SEQ ID NO: 96355 - protein, 27 aa, Artificial Sequence
  Cyclic GFR-binding peptide
EPLTILYYIGKTPKIEQLSNDKGVVTY

SEQ ID NO: 96356 - protein, 27 aa, Artificial Sequence
  Cyclic GFR-binding peptide
SPISILFIVGRKPKVYKQYEDKGVVTY

SEQ ID NO: 96357 - protein, 27 aa, Artificial Sequence
  Cyclic GFR-binding peptide
NAISILYFDSANNVVLKKYRDKGVVTY

SEQ ID NO: 96358 - protein, 27 aa, Artificial Sequence
  Cyclic GFR-binding peptide
EPLTVLYYDDSSNVIEQLSNDKGVVTY

SEQ ID NO: 96359 - protein, 29 aa, Artificial Sequence
  Cyclic GFR-binding peptide
DKGVVTYVTAKKLKPKKRVYEIKRVQVPR

SEQ ID NO: 96360 - protein, 29 aa, Artificial Sequence
  Cyclic GFR-binding peptide
DKGVVTYVQVEKLKPKKRVYEVKAVKVSR

SEQ ID NO: 96361 - protein, 29 aa, Artificial Sequence
  Cyclic GFR-binding peptide
DKGVVTYVQVEKFIPKKRVIEVKAVKVSR

SEQ ID NO: 96362 - protein, 29 aa, Artificial Sequence
  Cyclic GFR-binding peptide
DKGVVTYVQVEKHQGQHPKIRVKAMKVSR

SEQ ID NO: 96363 - protein, 29 aa, Artificial Sequence
  Cyclic GFR-binding peptide
DKGVVTYVTAKKHQGQHPKIRIKRMQVPR

SEQ ID NO: 96364 - protein, 29 aa, Artificial Sequence
  Cyclic GFR-binding peptide
DKGVVTYSMEGLLKPKKRVYEMIQVTINS

SEQ ID NO: 96365 - protein, 29 aa, Artificial Sequence
  Cyclic GFR-binding peptide
DKGVVTYSMEGIFIPKKRVIEMIQVTINS

SEQ ID NO: 96366 - protein, 29 aa, Artificial Sequence
  Cyclic GFR-binding peptide
DKGVVTYSMEGLHQGQHPKIRMIQMTINS

SEQ ID NO: 96367 - protein, 29 aa, Artificial Sequence
  Cyclic GFR-binding peptide
DKGVVTYSMEGILKPKKRVYEMIQVTINS

SEQ ID NO: 96368 - protein, 29 aa, Artificial Sequence
  Cyclic GFR-binding peptide
DKGVVTYSMEGLFIPKKRVIEMIQVTINS

SEQ ID NO: 96369 - protein, 29 aa, Artificial Sequence
  Cyclic GFR-binding peptide
DKGVVTYVTAKKFIPKKRVIEIKRVQVPR

SEQ ID NO: 96370 - protein, 29 aa, Artificial Sequence
  Cyclic GFR-binding peptide
DKGVVTYSMEGIHQGQHPKIRMIQMTINS

SEQ ID NO: 96371 - protein, 29 aa, Artificial Sequence
  Cyclic GFR-binding peptide
RPVQVRKIEYVRKKPKLKKATVDKGVVTY

SEQ ID NO: 96372 - protein, 29 aa, Artificial Sequence
  Cyclic GFR-binding peptide
RSVKVAKVEYVRKKPKLKEVQVDKGVVTY

SEQ ID NO: 96373 - protein, 29 aa, Artificial Sequence
  Cyclic GFR-binding peptide
RSVKVAKVEIVRKKPIFKEVQVDKGVVTY

SEQ ID NO: 96374 - protein, 29 aa, Artificial Sequence
  Cyclic GFR-binding peptide
RSVKMAKVRIKPHQGQHKEVQVDKGVVTY

SEQ ID NO: 96375 - protein, 29 aa, Artificial Sequence
  Cyclic GFR-binding peptide
RPVQMRKIRIKPHQGQHKKATVDKGVVTY

SEQ ID NO: 96376 - protein, 29 aa, Artificial Sequence
  Cyclic GFR-binding peptide
SNITVQIMEYVRKKPKLLGEMSDKGVVTY

SEQ ID NO: 96377 - protein, 29 aa, Artificial Sequence
  Cyclic GFR-binding peptide
SNITVQIMEIVRKKPIFIGEMSDKGVVTY

SEQ ID NO: 96378 - protein, 29 aa, Artificial Sequence
  Cyclic GFR-binding peptide
SNITMQIMRIKPHQGQHLGEMSDKGVVTY

SEQ ID NO: 96379 - protein, 29 aa, Artificial Sequence
  Cyclic GFR-binding peptide
SNITVQIMEYVRKKPKLIGEMSDKGVVTY

SEQ ID NO: 96380 - protein, 29 aa, Artificial Sequence
  Cyclic GFR-binding peptide
SNITVQIMEIVRKKPIFLGEMSDKGVVTY

SEQ ID NO: 96381 - protein, 29 aa, Artificial Sequence
  Cyclic GFR-binding peptide
RPVQVRKIEIVRKKPIFKKATVDKGVVTY

SEQ ID NO: 96382 - protein, 29 aa, Artificial Sequence
  Cyclic GFR-binding peptide
SNITMQIMRIKPHQGQHIGEMSDKGVVTY

SEQ ID NO: 96383 - protein, 27 aa, Artificial Sequence
  Cyclic GFR-binding peptide
DKGVVTYEYKFKVKPTRGVLYLISIPE

SEQ ID NO: 96384 - protein, 27 aa, Artificial Sequence
  Cyclic GFR-binding peptide
DKGVVTYEYKFKTPVGMDDLYLVSIPE

SEQ ID NO: 96385 - protein, 27 aa, Artificial Sequence
  Cyclic GFR-binding peptide
DKGVVTYEYQKYVKPKRGVIYLISIPS

SEQ ID NO: 96386 - protein, 27 aa, Artificial Sequence
  Cyclic GFR-binding peptide
DKGVVTYEYQKYVVKDYEDIYLMSIPS

SEQ ID NO: 96387 - protein, 27 aa, Artificial Sequence
  Cyclic GFR-binding peptide
DKGVVTYEYKFKIKPTKGILYLISIPE

SEQ ID NO: 96388 - protein, 27 aa, Artificial Sequence
  Cyclic GFR-binding peptide
DKGVVTYYHYKLYTVVGKDKYLISIPS

SEQ ID NO: 96389 - protein, 27 aa, Artificial Sequence
  Cyclic GFR-binding peptide
DKGVVTYRYKKLYTVVGKDFYLISIAN

SEQ ID NO: 96390 - protein, 27 aa, Artificial Sequence
  Cyclic GFR-binding peptide
DKGVVTYEYQKYVVNNAADIYLISIPS

SEQ ID NO: 96391 - protein, 27 aa, Artificial Sequence
  Cyclic GFR-binding peptide
DKGVVTYEYQKYVKPTRGVIYLISIPS

SEQ ID NO: 96392 - protein, 27 aa, Artificial Sequence
  Cyclic GFR-binding peptide
DKGVVTYEYQKYTPVGMDDIYLVSIPS

SEQ ID NO: 96393 - protein, 27 aa, Artificial Sequence
  Cyclic GFR-binding peptide
DKGVVTYEYKFKVVKDYEDLYLMSIPE

SEQ ID NO: 96394 - protein, 27 aa, Artificial Sequence
  Cyclic GFR-binding peptide
DKGVVTYEYKFKVVNNAADLYLISIPE

SEQ ID NO: 96395 - protein, 27 aa, Artificial Sequence
  Cyclic GFR-binding peptide
DKGVVTYEYQKYVVKENEDIYLMSIPS

SEQ ID NO: 96396 - protein, 27 aa, Artificial Sequence
  Cyclic GFR-binding peptide
DKGVVTYEYQKYIKPTKGIIYLISIPS

SEQ ID NO: 96397 - protein, 27 aa, Artificial Sequence
  Cyclic GFR-binding peptide
DKGVVTYRYKKLVVNNAADFYLISIAN

SEQ ID NO: 96398 - protein, 27 aa, Artificial Sequence
  Cyclic GFR-binding peptide
DKGVVTYYHYKLVVNNAADKYLISIPS

SEQ ID NO: 96399 - protein, 27 aa, Artificial Sequence
  Cyclic GFR-binding peptide
DKGVVTYEYKFKIVNNSSDLYLVSIPE

SEQ ID NO: 96400 - protein, 27 aa, Artificial Sequence
  Cyclic GFR-binding peptide
DKGVVTYEYQKYIVNSSDDIYLVSIPS

SEQ ID NO: 96401 - protein, 27 aa, Artificial Sequence
  Cyclic GFR-binding peptide
DKGVVTYEYKFKIVNSSDDLYLVSIPE

SEQ ID NO: 96402 - protein, 27 aa, Artificial Sequence
  Cyclic GFR-binding peptide
DKGVVTYEYKFKVKPKRGVLYLISIPE

SEQ ID NO: 96403 - protein, 27 aa, Artificial Sequence
  Cyclic GFR-binding peptide
DKGVVTYEYQKYYTVVGKDIYLISIPS

SEQ ID NO: 96404 - protein, 27 aa, Artificial Sequence
  Cyclic GFR-binding peptide
DKGVVTYEYKFKVVKENEDLYLMSIPE

SEQ ID NO: 96405 - protein, 27 aa, Artificial Sequence
  Cyclic GFR-binding peptide
DKGVVTYEYQKYIVNNSSDIYLVSIPS

SEQ ID NO: 96406 - protein, 27 aa, Artificial Sequence
  Cyclic GFR-binding peptide
DKGVVTYEYKFKYTVVGKDLYLISIPE

SEQ ID NO: 96407 - protein, 27 aa, Artificial Sequence
  Cyclic GFR-binding peptide
EPISILYLVGRTPKVKFKYEDKGVVTY

SEQ ID NO: 96408 - protein, 27 aa, Artificial Sequence
  Cyclic GFR-binding peptide
EPISVLYLDDMGVPTKFKYEDKGVVTY

SEQ ID NO: 96409 - protein, 27 aa, Artificial Sequence
  Cyclic GFR-binding peptide
SPISILYIVGRKPKVYKQYEDKGVVTY

SEQ ID NO: 96410 - protein, 27 aa, Artificial Sequence
  Cyclic GFR-binding peptide
SPISMLYIDEYDKVVYKQYEDKGVVTY

SEQ ID NO: 96411 - protein, 27 aa, Artificial Sequence
  Cyclic GFR-binding peptide
EPISILYLIGKTPKIKFKYEDKGVVTY

SEQ ID NO: 96412 - protein, 27 aa, Artificial Sequence
  Cyclic GFR-binding peptide
SPISILYKDKGVVTYLKYHYDKGVVTY

SEQ ID NO: 96413 - protein, 27 aa, Artificial Sequence
  Cyclic GFR-binding peptide
NAISILYFDKGVVTYLKKYRDKGVVTY

SEQ ID NO: 96414 - protein, 27 aa, Artificial Sequence
  Cyclic GFR-binding peptide
SPISILYIDAANNVVYKQYEDKGVVTY

SEQ ID NO: 96415 - protein, 27 aa, Artificial Sequence
  Cyclic GFR-binding peptide
SPISILYIVGRTPKVYKQYEDKGVVTY

SEQ ID NO: 96416 - protein, 27 aa, Artificial Sequence
  Cyclic GFR-binding peptide
SPISVLYIDDMGVPTYKQYEDKGVVTY

SEQ ID NO: 96417 - protein, 27 aa, Artificial Sequence
  Cyclic GFR-binding peptide
EPISMLYLDEYDKVVKFKYEDKGVVTY

SEQ ID NO: 96418 - protein, 27 aa, Artificial Sequence
  Cyclic GFR-binding peptide
EPISILYLDAANNVVKFKYEDKGVVTY

SEQ ID NO: 96419 - protein, 27 aa, Artificial Sequence
  Cyclic GFR-binding peptide
SPISMLYIDENEKVVYKQYEDKGVVTY

SEQ ID NO: 96420 - protein, 27 aa, Artificial Sequence
  Cyclic GFR-binding peptide
SPISILYIIGKTPKIYKQYEDKGVVTY

SEQ ID NO: 96421 - protein, 27 aa, Artificial Sequence
  Cyclic GFR-binding peptide
NAISILYFDAANNVVLKKYRDKGVVTY

SEQ ID NO: 96422 - protein, 27 aa, Artificial Sequence
  Cyclic GFR-binding peptide
SPISILYKDAANNVVLKYHYDKGVVTY

SEQ ID NO: 96423 - protein, 27 aa, Artificial Sequence
  Cyclic GFR-binding peptide
EPISVLYLDSSNNVIKFKYEDKGVVTY

SEQ ID NO: 96424 - protein, 27 aa, Artificial Sequence
  Cyclic GFR-binding peptide
SPISVLYIDDSSNVIYKQYEDKGVVTY

SEQ ID NO: 96425 - protein, 27 aa, Artificial Sequence
  Cyclic GFR-binding peptide
EPISVLYLDDSSNVIKFKYEDKGVVTY

SEQ ID NO: 96426 - protein, 27 aa, Artificial Sequence
  Cyclic GFR-binding peptide
EPISILYLVGRKPKVKFKYEDKGVVTY

SEQ ID NO: 96427 - protein, 27 aa, Artificial Sequence
  Cyclic GFR-binding peptide
SPISILYIDKGVVTYYKQYEDKGVVTY

SEQ ID NO: 96428 - protein, 27 aa, Artificial Sequence
  Cyclic GFR-binding peptide
EPISMLYLDENEKVVKFKYEDKGVVTY

SEQ ID NO: 96429 - protein, 27 aa, Artificial Sequence
  Cyclic GFR-binding peptide
SPISVLYIDSSNNVIYKQYEDKGVVTY

SEQ ID NO: 96430 - protein, 27 aa, Artificial Sequence
  Cyclic GFR-binding peptide
EPISILYLDKGVVTYKFKYEDKGVVTY

SEQ ID NO: 96431 - protein, 27 aa, Artificial Sequence
  Cyclic GFR-binding peptide
DKGVVTYPIKGYIIQQKDNFYLMNIPS

SEQ ID NO: 96432 - protein, 27 aa, Artificial Sequence
  Cyclic GFR-binding peptide
DKGVVTYPIKGYVVKDYEDFYLMNIPS

SEQ ID NO: 96433 - protein, 27 aa, Artificial Sequence
  Cyclic GFR-binding peptide
DKGVVTYPIKGYIVNSSDDFYLVNIPS

SEQ ID NO: 96434 - protein, 27 aa, Artificial Sequence
  Cyclic GFR-binding peptide
DKGVVTYPIKGYVVNNAADFYLINIPS

SEQ ID NO: 96435 - protein, 27 aa, Artificial Sequence
  Cyclic GFR-binding peptide
DKGVVTYPIKGYYTVVGKDFYLINIPS

SEQ ID NO: 96436 - protein, 27 aa, Artificial Sequence
  Cyclic GFR-binding peptide
DKGVVTYPIKGYLLVRGNDFYLMNIPS

SEQ ID NO: 96437 - protein, 27 aa, Artificial Sequence
  Cyclic GFR-binding peptide
DKGVVTYPIKGYVVKENEDFYLMNIPS

SEQ ID NO: 96438 - protein, 27 aa, Artificial Sequence
  Cyclic GFR-binding peptide
DKGVVTYPIKGYVVNNASDFYLINIPS

SEQ ID NO: 96439 - protein, 27 aa, Artificial Sequence
  Cyclic GFR-binding peptide
DKGVVTYPIKGYTPVGMDDFYLVNIPS

SEQ ID NO: 96440 - protein, 27 aa, Artificial Sequence
  Cyclic GFR-binding peptide
DKGVVTYPIKGYIVNNSSDFYLVNIPS

SEQ ID NO: 96441 - protein, 27 aa, Artificial Sequence
  Cyclic GFR-binding peptide
SPINMLYFNDKQQIIYGKIPDKGVVTY

SEQ ID NO: 96442 - protein, 27 aa, Artificial Sequence
  Cyclic GFR-binding peptide
SPINMLYFDEYDKVVYGKIPDKGVVTY

SEQ ID NO: 96443 - protein, 27 aa, Artificial Sequence
  Cyclic GFR-binding peptide
SPINVLYFDDSSNVIYGKIPDKGVVTY

SEQ ID NO: 96444 - protein, 27 aa, Artificial Sequence
  Cyclic GFR-binding peptide
SPINILYFDAANNVVYGKIPDKGVVTY

SEQ ID NO: 96445 - protein, 27 aa, Artificial Sequence
  Cyclic GFR-binding peptide
SPINILYFDKGVVTYYGKIPDKGVVTY

SEQ ID NO: 96446 - protein, 27 aa, Artificial Sequence
  Cyclic GFR-binding peptide
SPINMLYFDNGRVLLYGKIPDKGVVTY

SEQ ID NO: 96447 - protein, 27 aa, Artificial Sequence
  Cyclic GFR-binding peptide
SPINMLYFDENEKVVYGKIPDKGVVTY

SEQ ID NO: 96448 - protein, 27 aa, Artificial Sequence
  Cyclic GFR-binding peptide
SPINILYFDSANNVVYGKIPDKGVVTY

SEQ ID NO: 96449 - protein, 27 aa, Artificial Sequence
  Cyclic GFR-binding peptide
SPINVLYFDDMGVPTYGKIPDKGVVTY

SEQ ID NO: 96450 - protein, 27 aa, Artificial Sequence
  Cyclic GFR-binding peptide
SPINVLYFDSSNNVIYGKIPDKGVVTY

SEQ ID NO: 96451 - protein, 27 aa, Artificial Sequence
  Cyclic GFR-binding peptide
DKGVVTYEYQKYVVNNASDIYLISIPS

SEQ ID NO: 96452 - protein, 27 aa, Artificial Sequence
  Cyclic GFR-binding peptide
DKGVVTYEYQKYIIQQKDNIYLMSIPS

SEQ ID NO: 96453 - protein, 27 aa, Artificial Sequence
  Cyclic GFR-binding peptide
DKGVVTYEYQKYLLVRGNDIYLMSIPS

SEQ ID NO: 96454 - protein, 27 aa, Artificial Sequence
  Cyclic GFR-binding peptide
SPISILYIDSANNVVYKQYEDKGVVTY

SEQ ID NO: 96455 - protein, 27 aa, Artificial Sequence
  Cyclic GFR-binding peptide
SPISMLYINDKQQIIYKQYEDKGVVTY

SEQ ID NO: 96456 - protein, 27 aa, Artificial Sequence
  Cyclic GFR-binding peptide
SPISMLYIDNGRVLLYKQYEDKGVVTY

SEQ ID NO: 96457 - protein, 27 aa, Artificial Sequence
  Cyclic GFR-binding peptide
DKGVVTYPYVKLYTVVGKDFFLISLSS

SEQ ID NO: 96458 - protein, 27 aa, Artificial Sequence
  Cyclic GFR-binding peptide
DKGVVTYPYVKLIKPTKGIFFLISLSS

SEQ ID NO: 96459 - protein, 27 aa, Artificial Sequence
  Cyclic GFR-binding peptide
DKGVVTYPYVKLIIQQKDNFFLMSLSS

SEQ ID NO: 96460 - protein, 27 aa, Artificial Sequence
  Cyclic GFR-binding peptide
DKGVVTYPYVKLIVNSSDDFFLVSLSS

SEQ ID NO: 96461 - protein, 27 aa, Artificial Sequence
  Cyclic GFR-binding peptide
DKGVVTYPYVKLVKPKRGVFFLISLSS

SEQ ID NO: 96462 - protein, 27 aa, Artificial Sequence
  Cyclic GFR-binding peptide
DKGVVTYPYVKLVKPTRGVFFLISLSS

SEQ ID NO: 96463 - protein, 27 aa, Artificial Sequence
  Cyclic GFR-binding peptide
DKGVVTYPYVKLTPVGMDDFFLVSLSS

SEQ ID NO: 96464 - protein, 29 aa, Artificial Sequence
  Cyclic GFR-binding peptide
DKGVVTYPYVKLHQGQHPKIRFFLMSLSS

SEQ ID NO: 96465 - protein, 27 aa, Artificial Sequence
  Cyclic GFR-binding peptide
DKGVVTYPYVKLVVNKNEDFFLISLSS

SEQ ID NO: 96466 - protein, 27 aa, Artificial Sequence
  Cyclic GFR-binding peptide
DKGVVTYPYVKLVVNNASDFFLISLSS

SEQ ID NO: 96467 - protein, 27 aa, Artificial Sequence
  Cyclic GFR-binding peptide
DKGVVTYPYVKLVVKENEDFFLMSLSS

SEQ ID NO: 96468 - protein, 27 aa, Artificial Sequence
  Cyclic GFR-binding peptide
DKGVVTYPYVKLIVNNSSDFFLVSLSS

SEQ ID NO: 96469 - protein, 29 aa, Artificial Sequence
  Cyclic GFR-binding peptide
DKGVVTYPYVKLLKPKKRVYEFFLVSLSS

SEQ ID NO: 96470 - protein, 27 aa, Artificial Sequence
  Cyclic GFR-binding peptide
DKGVVTYPYVKLLLVRGNDFFLMSLSS

SEQ ID NO: 96471 - protein, 27 aa, Artificial Sequence
  Cyclic GFR-binding peptide
DKGVVTYPYVKLVVKDYEDFFLMSLSS

SEQ ID NO: 96472 - protein, 27 aa, Artificial Sequence
  Cyclic GFR-binding peptide
DKGVVTYPYVKLVVNNAADFFLISLSS

SEQ ID NO: 96473 - protein, 27 aa, Artificial Sequence
  Cyclic GFR-binding peptide
SSLSILFFDKGVVTYLKVYPDKGVVTY

SEQ ID NO: 96474 - protein, 27 aa, Artificial Sequence
  Cyclic GFR-binding peptide
SSLSILFFIGKTPKILKVYPDKGVVTY

SEQ ID NO: 96475 - protein, 27 aa, Artificial Sequence
  Cyclic GFR-binding peptide
SSLSMLFFNDKQQIILKVYPDKGVVTY

SEQ ID NO: 96476 - protein, 27 aa, Artificial Sequence
  Cyclic GFR-binding peptide
SSLSVLFFDDSSNVILKVYPDKGVVTY

SEQ ID NO: 96477 - protein, 27 aa, Artificial Sequence
  Cyclic GFR-binding peptide
SSLSILFFVGRKPKVLKVYPDKGVVTY

SEQ ID NO: 96478 - protein, 27 aa, Artificial Sequence
  Cyclic GFR-binding peptide
SSLSILFFVGRTPKVLKVYPDKGVVTY

SEQ ID NO: 96479 - protein, 27 aa, Artificial Sequence
  Cyclic GFR-binding peptide
SSLSVLFFDDMGVPTLKVYPDKGVVTY

SEQ ID NO: 96480 - protein, 29 aa, Artificial Sequence
  Cyclic GFR-binding peptide
SSLSMLFFRIKPHQGQHLKVYPDKGVVTY

SEQ ID NO: 96481 - protein, 27 aa, Artificial Sequence
  Cyclic GFR-binding peptide
SSLSILFFDENKNVVLKVYPDKGVVTY

SEQ ID NO: 96482 - protein, 27 aa, Artificial Sequence
  Cyclic GFR-binding peptide
SSLSILFFDSANNVVLKVYPDKGVVTY

SEQ ID NO: 96483 - protein, 27 aa, Artificial Sequence
  Cyclic GFR-binding peptide
SSLSMLFFDENEKVVLKVYPDKGVVTY

SEQ ID NO: 96484 - protein, 27 aa, Artificial Sequence
  Cyclic GFR-binding peptide
SSLSVLFFDSSNNVILKVYPDKGVVTY

SEQ ID NO: 96485 - protein, 29 aa, Artificial Sequence
  Cyclic GFR-binding peptide
SSLSVLFFEYVRKKPKLLKVYPDKGVVTY

SEQ ID NO: 96486 - protein, 27 aa, Artificial Sequence
  Cyclic GFR-binding peptide
SSLSMLFFDNGRVLLLKVYPDKGVVTY

SEQ ID NO: 96487 - protein, 27 aa, Artificial Sequence
  Cyclic GFR-binding peptide
SSLSMLFFDEYDKVVLKVYPDKGVVTY

SEQ ID NO: 96488 - protein, 27 aa, Artificial Sequence
  Cyclic GFR-binding peptide
SSLSILFFDAANNVVLKVYPDKGVVTY

SEQ ID NO: 96489 - protein, 27 aa, Artificial Sequence
  Cyclic GFR-binding peptide
DKGVVTYSMEGIIVNSSDDMIQVTINS

SEQ ID NO: 96490 - protein, 27 aa, Artificial Sequence
  Cyclic GFR-binding peptide
DKGVVTYVTAKKVVKENEDIKRMQVPR

SEQ ID NO: 96491 - protein, 27 aa, Artificial Sequence
  Cyclic GFR-binding peptide
DKGVVTYSMEGIVVKDYEDMIQMTINS

SEQ ID NO: 96492 - protein, 27 aa, Artificial Sequence
  Cyclic GFR-binding peptide
DKGVVTYVTAKKIKPTKGIIKRIQVPR

SEQ ID NO: 96493 - protein, 27 aa, Artificial Sequence
  Cyclic GFR-binding peptide
DKGVVTYSMEGIVKPTRGVMIQITINS

SEQ ID NO: 96494 - protein, 29 aa, Artificial Sequence
  Cyclic GFR-binding peptide
DKGVVTYNSLQEFIPKKRVIEYYVVPLPE

SEQ ID NO: 96495 - protein, 27 aa, Artificial Sequence
  Cyclic GFR-binding peptide
DKGVVTYVQVEKVKPKRGVVKAIKVSR

SEQ ID NO: 96496 - protein, 27 aa, Artificial Sequence
  Cyclic GFR-binding peptide
DKGVVTYVQVEKVVKENEDVKAMKVSR

SEQ ID NO: 96497 - protein, 27 aa, Artificial Sequence
  Cyclic GFR-binding peptide
DKGVVTYVTAKKIVNSSDDIKRVQVPR

SEQ ID NO: 96498 - protein, 27 aa, Artificial Sequence
  Cyclic GFR-binding peptide
DKGVVTYVQVEKIKPTKGIVKAIKVSR

SEQ ID NO: 96499 - protein, 29 aa, Artificial Sequence
  Cyclic GFR-binding peptide
DKGVVTYNSLQEFIPKKRVIEYYLVTLPE

SEQ ID NO: 96500 - protein, 27 aa, Artificial Sequence
  Cyclic GFR-binding peptide
DKGVVTYVQVEKIVNSSDDVKAVKVSR

SEQ ID NO: 96501 - protein, 27 aa, Artificial Sequence
  Cyclic GFR-binding peptide
DKGVVTYVTAKKVKPKRGVIKRIQVPR

SEQ ID NO: 96502 - protein, 27 aa, Artificial Sequence
  Cyclic GFR-binding peptide
DKGVVTYVQVEKVKPTRGVVKAIKVSR

SEQ ID NO: 96503 - protein, 27 aa, Artificial Sequence
  Cyclic GFR-binding peptide
DKGVVTYVTAKKVKPTRGVIKRIQVPR

SEQ ID NO: 96504 - protein, 29 aa, Artificial Sequence
  Cyclic GFR-binding peptide
DKGVVTYNSLQELKPKKRVYEYYLVTLPE

SEQ ID NO: 96505 - protein, 27 aa, Artificial Sequence
  Cyclic GFR-binding peptide
DKGVVTYSMEGIVKPKRGVMIQITINS

SEQ ID NO: 96506 - protein, 27 aa, Artificial Sequence
  Cyclic GFR-binding peptide
DKGVVTYSMEGIVVKENEDMIQMTINS

SEQ ID NO: 96507 - protein, 27 aa, Artificial Sequence
  Cyclic GFR-binding peptide
DKGVVTYSMEGIIKPTKGIMIQITINS

SEQ ID NO: 96508 - protein, 29 aa, Artificial Sequence
  Cyclic GFR-binding peptide
DKGVVTYNSLQEHQGQHPKIRYYLMTLPE

SEQ ID NO: 96509 - protein, 27 aa, Artificial Sequence
  Cyclic GFR-binding peptide
DKGVVTYVTAKKVVKDYEDIKRMQVPR

SEQ ID NO: 96510 - protein, 29 aa, Artificial Sequence
  Cyclic GFR-binding peptide
DKGVVTYNSLQEHQGQHPKIRYYVMPLPE

SEQ ID NO: 96511 - protein, 29 aa, Artificial Sequence
  Cyclic GFR-binding peptide
DKGVVTYNSLQELKPKKRVYEYYVVPLPE

SEQ ID NO: 96512 - protein, 27 aa, Artificial Sequence
  Cyclic GFR-binding peptide
DKGVVTYVQVEKVVKDYEDVKAMKVSR

SEQ ID NO: 96513 - protein, 27 aa, Artificial Sequence
  Cyclic GFR-binding peptide
SNITVQIMDDSSNVIIGEMSDKGVVTY

SEQ ID NO: 96514 - protein, 27 aa, Artificial Sequence
  Cyclic GFR-binding peptide
RPVQMRKIDENEKVVKKATVDKGVVTY

SEQ ID NO: 96515 - protein, 27 aa, Artificial Sequence
  Cyclic GFR-binding peptide
SNITMQIMDEYDKVVIGEMSDKGVVTY

SEQ ID NO: 96516 - protein, 27 aa, Artificial Sequence
  Cyclic GFR-binding peptide
RPVQIRKIIGKTPKIKKATVDKGVVTY

SEQ ID NO: 96517 - protein, 27 aa, Artificial Sequence
  Cyclic GFR-binding peptide
SNITIQIMVGRTPKVIGEMSDKGVVTY

SEQ ID NO: 96518 - protein, 29 aa, Artificial Sequence
  Cyclic GFR-binding peptide
EPLPVVYYEIVRKKPIFEQLSNDKGVVTY

SEQ ID NO: 96519 - protein, 27 aa, Artificial Sequence
  Cyclic GFR-binding peptide
RSVKIAKVVGRKPKVKEVQVDKGVVTY

SEQ ID NO: 96520 - protein, 27 aa, Artificial Sequence
  Cyclic GFR-binding peptide
RSVKMAKVDENEKVVKEVQVDKGVVTY

SEQ ID NO: 96521 - protein, 27 aa, Artificial Sequence
  Cyclic GFR-binding peptide
RPVQVRKIDDSSNVIKKATVDKGVVTY

SEQ ID NO: 96522 - protein, 27 aa, Artificial Sequence
  Cyclic GFR-binding peptide
RSVKIAKVIGKTPKIKEVQVDKGVVTY

SEQ ID NO: 96523 - protein, 29 aa, Artificial Sequence
  Cyclic GFR-binding peptide
EPLTVLYYEIVRKKPIFEQLSNDKGVVTY

SEQ ID NO: 96524 - protein, 27 aa, Artificial Sequence
  Cyclic GFR-binding peptide
RSVKVAKVDDSSNVIKEVQVDKGVVTY

SEQ ID NO: 96525 - protein, 27 aa, Artificial Sequence
  Cyclic GFR-binding peptide
RPVQIRKIVGRKPKVKKATVDKGVVTY

SEQ ID NO: 96526 - protein, 27 aa, Artificial Sequence
  Cyclic GFR-binding peptide
RSVKIAKVVGRTPKVKEVQVDKGVVTY

SEQ ID NO: 96527 - protein, 27 aa, Artificial Sequence
  Cyclic GFR-binding peptide
RPVQIRKIVGRTPKVKKATVDKGVVTY

SEQ ID NO: 96528 - protein, 29 aa, Artificial Sequence
  Cyclic GFR-binding peptide
EPLTVLYYEYVRKKPKLEQLSNDKGVVTY

SEQ ID NO: 96529 - protein, 27 aa, Artificial Sequence
  Cyclic GFR-binding peptide
SNITIQIMVGRKPKVIGEMSDKGVVTY

SEQ ID NO: 96530 - protein, 27 aa, Artificial Sequence
  Cyclic GFR-binding peptide
SNITMQIMDENEKVVIGEMSDKGVVTY

SEQ ID NO: 96531 - protein, 27 aa, Artificial Sequence
  Cyclic GFR-binding peptide
SNITIQIMIGKTPKIIGEMSDKGVVTY

SEQ ID NO: 96532 - protein, 29 aa, Artificial Sequence
  Cyclic GFR-binding peptide
EPLTMLYYRIKPHQGQHEQLSNDKGVVTY

SEQ ID NO: 96533 - protein, 27 aa, Artificial Sequence
  Cyclic GFR-binding peptide
RPVQMRKIDEYDKVVKKATVDKGVVTY

SEQ ID NO: 96534 - protein, 29 aa, Artificial Sequence
  Cyclic GFR-binding peptide
EPLPMVYYRIKPHQGQHEQLSNDKGVVTY

SEQ ID NO: 96535 - protein, 29 aa, Artificial Sequence
  Cyclic GFR-binding peptide
EPLPVVYYEYVRKKPKLEQLSNDKGVVTY

SEQ ID NO: 96536 - protein, 27 aa, Artificial Sequence
  Cyclic GFR-binding peptide
RSVKMAKVDEYDKVVKEVQVDKGVVTY

SEQ ID NO: 96537 - protein, 27 aa, Artificial Sequence
  Cyclic GFR-binding peptide
DKGVVTYRYKKLIIQQKDNFYLMSIAN

SEQ ID NO: 96538 - protein, 27 aa, Artificial Sequence
  Cyclic GFR-binding peptide
DKGVVTYRYKKLLLVRGNDFYLMSIAN

SEQ ID NO: 96539 - protein, 27 aa, Artificial Sequence
  Cyclic GFR-binding peptide
NAISMLYFNDKQQIILKKYRDKGVVTY

SEQ ID NO: 96540 - protein, 27 aa, Artificial Sequence
  Cyclic GFR-binding peptide
NAISMLYFDNGRVLLLKKYRDKGVVTY

SEQ ID NO: 96541 - protein, 27 aa, Artificial Sequence
  Cyclic GFR-binding peptide
DKGVVTYEYKFKVVNKNEDLYLISIPE

SEQ ID NO: 96542 - protein, 27 aa, Artificial Sequence
  Cyclic GFR-binding peptide
DKGVVTYPIKGYVKPTRGVFYLINIPS

SEQ ID NO: 96543 - protein, 27 aa, Artificial Sequence
  Cyclic GFR-binding peptide
DKGVVTYEYKFKLLVRGNDLYLMSIPE

SEQ ID NO: 96544 - protein, 27 aa, Artificial Sequence
  Cyclic GFR-binding peptide
DKGVVTYYHYKLVVNKNEDKYLISIPS

SEQ ID NO: 96545 - protein, 27 aa, Artificial Sequence
  Cyclic GFR-binding peptide
DKGVVTYRHKRLLLVRGNDYYLMSTAS

SEQ ID NO: 96546 - protein, 27 aa, Artificial Sequence
  Cyclic GFR-binding peptide
DKGVVTYYHYKLLLVRGNDKYLMSIPS

SEQ ID NO: 96547 - protein, 27 aa, Artificial Sequence
  Cyclic GFR-binding peptide
DKGVVTYRHKRLVVNKNEDYYLISTAS

SEQ ID NO: 96548 - protein, 27 aa, Artificial Sequence
  Cyclic GFR-binding peptide
DKGVVTYRYKKLVVNKNEDFYLISIAN

SEQ ID NO: 96549 - protein, 27 aa, Artificial Sequence
  Cyclic GFR-binding peptide
DKGVVTYPIKGYVVNKNEDFYLINIPS

SEQ ID NO: 96550 - protein, 27 aa, Artificial Sequence
  Cyclic GFR-binding peptide
DKGVVTYPIKGYIKPTKGIFYLINIPS

SEQ ID NO: 96551 - protein, 27 aa, Artificial Sequence
  Cyclic GFR-binding peptide
DKGVVTYRHKRLYTVVGKDYYLISTAS

SEQ ID NO: 96552 - protein, 27 aa, Artificial Sequence
  Cyclic GFR-binding peptide
DKGVVTYEYKFKVVNNASDLYLISIPE

SEQ ID NO: 96553 - protein, 27 aa, Artificial Sequence
  Cyclic GFR-binding peptide
DKGVVTYRHKRLIIQQKDNYYLMSTAS

SEQ ID NO: 96554 - protein, 27 aa, Artificial Sequence
  Cyclic GFR-binding peptide
DKGVVTYEYKFKIIQQKDNLYLMSIPE

SEQ ID NO: 96555 - protein, 27 aa, Artificial Sequence
  Cyclic GFR-binding peptide
DKGVVTYPIKGYVKPKRGVFYLINIPS

SEQ ID NO: 96556 - protein, 27 aa, Artificial Sequence
  Cyclic GFR-binding peptide
DKGVVTYRHKRLVVNNASDYYLISTAS

SEQ ID NO: 96557 - protein, 27 aa, Artificial Sequence
  Cyclic GFR-binding peptide
DKGVVTYYHYKLVVNNASDKYLISIPS

SEQ ID NO: 96558 - protein, 27 aa, Artificial Sequence
  Cyclic GFR-binding peptide
DKGVVTYYHYKLIIQQKDNKYLMSIPS

SEQ ID NO: 96559 - protein, 27 aa, Artificial Sequence
  Cyclic GFR-binding peptide
DKGVVTYRHKRLVVNNAADYYLISTAS

SEQ ID NO: 96560 - protein, 27 aa, Artificial Sequence
  Cyclic GFR-binding peptide
EPISILYLDENKNVVKFKYEDKGVVTY

SEQ ID NO: 96561 - protein, 27 aa, Artificial Sequence
  Cyclic GFR-binding peptide
SPINILYFVGRTPKVYGKIPDKGVVTY

SEQ ID NO: 96562 - protein, 27 aa, Artificial Sequence
  Cyclic GFR-binding peptide
EPISMLYLDNGRVLLKFKYEDKGVVTY

SEQ ID NO: 96563 - protein, 27 aa, Artificial Sequence
  Cyclic GFR-binding peptide
SPISILYKDENKNVVLKYHYDKGVVTY

SEQ ID NO: 96564 - protein, 27 aa, Artificial Sequence
  Cyclic GFR-binding peptide
SATSMLYYDNGRVLLLRKHRDKGVVTY

SEQ ID NO: 96565 - protein, 27 aa, Artificial Sequence
  Cyclic GFR-binding peptide
SPISMLYKDNGRVLLLKYHYDKGVVTY

SEQ ID NO: 96566 - protein, 27 aa, Artificial Sequence
  Cyclic GFR-binding peptide
SATSILYYDENKNVVLRKHRDKGVVTY

SEQ ID NO: 96567 - protein, 27 aa, Artificial Sequence
  Cyclic GFR-binding peptide
NAISILYFDENKNVVLKKYRDKGVVTY

SEQ ID NO: 96568 - protein, 27 aa, Artificial Sequence
  Cyclic GFR-binding peptide
SPINILYFDENKNVVYGKIPDKGVVTY

SEQ ID NO: 96569 - protein, 27 aa, Artificial Sequence
  Cyclic GFR-binding peptide
SPINILYFIGKTPKIYGKIPDKGVVTY

SEQ ID NO: 96570 - protein, 27 aa, Artificial Sequence
  Cyclic GFR-binding peptide
SATSILYYDKGVVTYLRKHRDKGVVTY

SEQ ID NO: 96571 - protein, 27 aa, Artificial Sequence
  Cyclic GFR-binding peptide
EPISILYLDSANNVVKFKYEDKGVVTY

SEQ ID NO: 96572 - protein, 27 aa, Artificial Sequence
  Cyclic GFR-binding peptide
SATSMLYYNDKQQIILRKHRDKGVVTY

SEQ ID NO: 96573 - protein, 27 aa, Artificial Sequence
  Cyclic GFR-binding peptide
EPISMLYLNDKQQIIKFKYEDKGVVTY

SEQ ID NO: 96574 - protein, 27 aa, Artificial Sequence
  Cyclic GFR-binding peptide
SPINILYFVGRKPKVYGKIPDKGVVTY

SEQ ID NO: 96575 - protein, 27 aa, Artificial Sequence
  Cyclic GFR-binding peptide
SATSILYYDSANNVVLRKHRDKGVVTY

SEQ ID NO: 96576 - protein, 27 aa, Artificial Sequence
  Cyclic GFR-binding peptide
SPISILYKDSANNVVLKYHYDKGVVTY

SEQ ID NO: 96577 - protein, 27 aa, Artificial Sequence
  Cyclic GFR-binding peptide
SPISMLYKNDKQQIILKYHYDKGVVTY

SEQ ID NO: 96578 - protein, 27 aa, Artificial Sequence
  Cyclic GFR-binding peptide
SATSILYYDAANNVVLRKHRDKGVVTY

SEQ ID NO: 96579 - protein, 27 aa, Artificial Sequence
  Cyclic GFR-binding peptide
DKGVVTYSMEGIIIQQKDNMIQMTINS

SEQ ID NO: 96580 - protein, 27 aa, Artificial Sequence
  Cyclic GFR-binding peptide
DKGVVTYSMEGLVKPKRGVMIQITINS

SEQ ID NO: 96581 - protein, 27 aa, Artificial Sequence
  Cyclic GFR-binding peptide
DKGVVTYSMEGLVVNNASDMIQITINS

SEQ ID NO: 96582 - protein, 27 aa, Artificial Sequence
  Cyclic GFR-binding peptide
DKGVVTYSMEGILLVRGNDMIQMTINS

SEQ ID NO: 96583 - protein, 27 aa, Artificial Sequence
  Cyclic GFR-binding peptide
DKGVVTYSMEGLIKPTKGIMIQITINS

SEQ ID NO: 96584 - protein, 27 aa, Artificial Sequence
  Cyclic GFR-binding peptide
DKGVVTYSMEGLIVNSSDDMIQVTINS

SEQ ID NO: 96585 - protein, 27 aa, Artificial Sequence
  Cyclic GFR-binding peptide
DKGVVTYSMEGIVVNNASDMIQITINS

SEQ ID NO: 96586 - protein, 27 aa, Artificial Sequence
  Cyclic GFR-binding peptide
DKGVVTYSMEGLVVNNAADMIQITINS

SEQ ID NO: 96587 - protein, 27 aa, Artificial Sequence
  Cyclic GFR-binding peptide
DKGVVTYSMEGLLLVRGNDMIQMTINS

SEQ ID NO: 96588 - protein, 27 aa, Artificial Sequence
  Cyclic GFR-binding peptide
DKGVVTYSMEGLIIQQKDNMIQMTINS

SEQ ID NO: 96589 - protein, 27 aa, Artificial Sequence
  Cyclic GFR-binding peptide
DKGVVTYSMEGIVVNNAADMIQITINS

SEQ ID NO: 96590 - protein, 27 aa, Artificial Sequence
  Cyclic GFR-binding peptide
DKGVVTYSMEGLVKPTRGVMIQITINS

SEQ ID NO: 96591 - protein, 27 aa, Artificial Sequence
  Cyclic GFR-binding peptide
SNITMQIMNDKQQIIIGEMSDKGVVTY

SEQ ID NO: 96592 - protein, 27 aa, Artificial Sequence
  Cyclic GFR-binding peptide
SNITIQIMVGRKPKVLGEMSDKGVVTY

SEQ ID NO: 96593 - protein, 27 aa, Artificial Sequence
  Cyclic GFR-binding peptide
SNITIQIMDSANNVVLGEMSDKGVVTY

SEQ ID NO: 96594 - protein, 27 aa, Artificial Sequence
  Cyclic GFR-binding peptide
SNITMQIMDNGRVLLIGEMSDKGVVTY

SEQ ID NO: 96595 - protein, 27 aa, Artificial Sequence
  Cyclic GFR-binding peptide
SNITIQIMIGKTPKILGEMSDKGVVTY

SEQ ID NO: 96596 - protein, 27 aa, Artificial Sequence
  Cyclic GFR-binding peptide
SNITVQIMDDSSNVILGEMSDKGVVTY

SEQ ID NO: 96597 - protein, 27 aa, Artificial Sequence
  Cyclic GFR-binding peptide
SNITIQIMDSANNVVIGEMSDKGVVTY

SEQ ID NO: 96598 - protein, 27 aa, Artificial Sequence
  Cyclic GFR-binding peptide
SNITIQIMDAANNVVLGEMSDKGVVTY

SEQ ID NO: 96599 - protein, 27 aa, Artificial Sequence
  Cyclic GFR-binding peptide
SNITMQIMDNGRVLLLGEMSDKGVVTY

SEQ ID NO: 96600 - protein, 27 aa, Artificial Sequence
  Cyclic GFR-binding peptide
SNITMQIMNDKQQIILGEMSDKGVVTY

SEQ ID NO: 96601 - protein, 27 aa, Artificial Sequence
  Cyclic GFR-binding peptide
SNITIQIMDAANNVVIGEMSDKGVVTY

SEQ ID NO: 96602 - protein, 27 aa, Artificial Sequence
  Cyclic GFR-binding peptide
SNITIQIMVGRTPKVLGEMSDKGVVTY

SEQ ID NO: 96603 - protein, 27 aa, Artificial Sequence
  Cyclic GFR-binding peptide
DKGVVTYQYNKLVVNKNEDLYLISIAS

SEQ ID NO: 96604 - protein, 27 aa, Artificial Sequence
  Cyclic GFR-binding peptide
DKGVVTYQYNKLVVNNAADLYLISIAS

SEQ ID NO: 96605 - protein, 27 aa, Artificial Sequence
  Cyclic GFR-binding peptide
DKGVVTYQYNKLIIQQKDNLYLMSIAS

SEQ ID NO: 96606 - protein, 27 aa, Artificial Sequence
  Cyclic GFR-binding peptide
DKGVVTYQYNKLLLVRGNDLYLMSIAS

SEQ ID NO: 96607 - protein, 27 aa, Artificial Sequence
  Cyclic GFR-binding peptide
DKGVVTYQYNKLYTVVGKDLYLISIAS

SEQ ID NO: 96608 - protein, 27 aa, Artificial Sequence
  Cyclic GFR-binding peptide
SAISILYLDENKNVVLKNYQDKGVVTY

SEQ ID NO: 96609 - protein, 27 aa, Artificial Sequence
  Cyclic GFR-binding peptide
SAISILYLDAANNVVLKNYQDKGVVTY

SEQ ID NO: 96610 - protein, 27 aa, Artificial Sequence
  Cyclic GFR-binding peptide
SAISMLYLNDKQQIILKNYQDKGVVTY

SEQ ID NO: 96611 - protein, 27 aa, Artificial Sequence
  Cyclic GFR-binding peptide
SAISMLYLDNGRVLLLKNYQDKGVVTY

SEQ ID NO: 96612 - protein, 27 aa, Artificial Sequence
  Cyclic GFR-binding peptide
SAISILYLDKGVVTYLKNYQDKGVVTY

SEQ ID NO: 96613 - protein, 27 aa, Artificial Sequence
  Cyclic GFR-binding peptide
NDKQQIIRYKKLIKPTKGIFYLISIAN

SEQ ID NO: 96614 - protein, 29 aa, Artificial Sequence
  Cyclic GFR-binding peptide
NDKQQIIRHKRLFIPKKRVIEYYLVSTAS

SEQ ID NO: 96615 - protein, 27 aa, Artificial Sequence
  Cyclic GFR-binding peptide
NDKQQIIYHYKLVVKDYEDKYLMSIPS

SEQ ID NO: 96616 - protein, 27 aa, Artificial Sequence
  Cyclic GFR-binding peptide
NDKQQIIQYNKLIVNNSSDLYLVSIAS

SEQ ID NO: 96617 - protein, 27 aa, Artificial Sequence
  Cyclic GFR-binding peptide
NDKQQIIRYKKLVVKDYEDFYLMSIAN

SEQ ID NO: 96618 - protein, 27 aa, Artificial Sequence
  Cyclic GFR-binding peptide
NDKQQIIRYKKLVKPTRGVFYLISIAN

SEQ ID NO: 96619 - protein, 27 aa, Artificial Sequence
  Cyclic GFR-binding peptide
NDKQQIIRHKRLVVKENEDYYLMSTAS

SEQ ID NO: 96620 - protein, 27 aa, Artificial Sequence
  Cyclic GFR-binding peptide
NDKQQIIYHYKLIKPTKGIKYLISIPS

SEQ ID NO: 96621 - protein, 29 aa, Artificial Sequence
  Cyclic GFR-binding peptide
NDKQQIIRYKKLFIPKKRVIEFYLVSIAN

SEQ ID NO: 96622 - protein, 27 aa, Artificial Sequence
  Cyclic GFR-binding peptide
NDKQQIIYHYKLVVKENEDKYLMSIPS

SEQ ID NO: 96623 - protein, 27 aa, Artificial Sequence
  Cyclic GFR-binding peptide
NDKQQIIRHKRLVKPKRGVYYLISTAS

SEQ ID NO: 96624 - protein, 27 aa, Artificial Sequence
  Cyclic GFR-binding peptide
NDKQQIIYHYKLVKPKRGVKYLISIPS

SEQ ID NO: 96625 - protein, 29 aa, Artificial Sequence
  Cyclic GFR-binding peptide
NDKQQIIQYNKLFIPKKRVIELYLVSIAS

SEQ ID NO: 96626 - protein, 27 aa, Artificial Sequence
  Cyclic GFR-binding peptide
NDKQQIIQYNKLVKPTRGVLYLISIAS

SEQ ID NO: 96627 - protein, 27 aa, Artificial Sequence
  Cyclic GFR-binding peptide
NDKQQIIRYKKLVVKENEDFYLMSIAN

SEQ ID NO: 96628 - protein, 27 aa, Artificial Sequence
  Cyclic GFR-binding peptide
NDKQQIIQYNKLTPVGMDDLYLVSIAS

SEQ ID NO: 96629 - protein, 27 aa, Artificial Sequence
  Cyclic GFR-binding peptide
NDKQQIIRYKKLTPVGMDDFYLVSIAN

SEQ ID NO: 96630 - protein, 27 aa, Artificial Sequence
  Cyclic GFR-binding peptide
NDKQQIIRYKKLVKPKRGVFYLISIAN

SEQ ID NO: 96631 - protein, 27 aa, Artificial Sequence
  Cyclic GFR-binding peptide
NDKQQIIQYNKLVVKENEDLYLMSIAS

SEQ ID NO: 96632 - protein, 27 aa, Artificial Sequence
  Cyclic GFR-binding peptide
NDKQQIIYHYKLIVNSSDDKYLVSIPS

SEQ ID NO: 96633 - protein, 27 aa, Artificial Sequence
  Cyclic GFR-binding peptide
NDKQQIIQYNKLVKPKRGVLYLISIAS

SEQ ID NO: 96634 - protein, 27 aa, Artificial Sequence
  Cyclic GFR-binding peptide
NDKQQIIRYKKLIVNNSSDFYLVSIAN

SEQ ID NO: 96635 - protein, 27 aa, Artificial Sequence
  Cyclic GFR-binding peptide
NDKQQIIRYKKLIVNSSDDFYLVSIAN

SEQ ID NO: 96636 - protein, 27 aa, Artificial Sequence
  Cyclic GFR-binding peptide
NDKQQIIRHKRLVKPTRGVYYLISTAS

SEQ ID NO: 96637 - protein, 29 aa, Artificial Sequence
  Cyclic GFR-binding peptide
NDKQQIIYHYKLFIPKKRVIEKYLVSIPS

SEQ ID NO: 96638 - protein, 27 aa, Artificial Sequence
  Cyclic GFR-binding peptide
NDKQQIIRHKRLIKPTKGIYYLISTAS

SEQ ID NO: 96639 - protein, 27 aa, Artificial Sequence
  Cyclic GFR-binding peptide
NDKQQIIRHKRLTPVGMDDYYLVSTAS

SEQ ID NO: 96640 - protein, 27 aa, Artificial Sequence
  Cyclic GFR-binding peptide
NDKQQIIYHYKLTPVGMDDKYLVSIPS

SEQ ID NO: 96641 - protein, 27 aa, Artificial Sequence
  Cyclic GFR-binding peptide
NDKQQIIYHYKLIVNNSSDKYLVSIPS

SEQ ID NO: 96642 - protein, 27 aa, Artificial Sequence
  Cyclic GFR-binding peptide
NDKQQIIRHKRLIVNNSSDYYLVSTAS

SEQ ID NO: 96643 - protein, 27 aa, Artificial Sequence
  Cyclic GFR-binding peptide
NDKQQIIYHYKLVKPTRGVKYLISIPS

SEQ ID NO: 96644 - protein, 27 aa, Artificial Sequence
  Cyclic GFR-binding peptide
NDKQQIIRHKRLIVNSSDDYYLVSTAS

SEQ ID NO: 96645 - protein, 27 aa, Artificial Sequence
  Cyclic GFR-binding peptide
NDKQQIIRHKRLVVKDYEDYYLMSTAS

SEQ ID NO: 96646 - protein, 27 aa, Artificial Sequence
  Cyclic GFR-binding peptide
NDKQQIIQYNKLIKPTKGILYLISIAS

SEQ ID NO: 96647 - protein, 27 aa, Artificial Sequence
  Cyclic GFR-binding peptide
NDKQQIIQYNKLVVKDYEDLYLMSIAS

SEQ ID NO: 96648 - protein, 27 aa, Artificial Sequence
  Cyclic GFR-binding peptide
NDKQQIIQYNKLIVNSSDDLYLVSIAS

SEQ ID NO: 96649 - protein, 27 aa, Artificial Sequence
  Cyclic GFR-binding peptide
NAISILYFIGKTPKILKKYRNDKQQII

SEQ ID NO: 96650 - protein, 29 aa, Artificial Sequence
  Cyclic GFR-binding peptide
SATSVLYYEIVRKKPIFLRKHRNDKQQII

SEQ ID NO: 96651 - protein, 27 aa, Artificial Sequence
  Cyclic GFR-binding peptide
SPISMLYKDEYDKVVLKYHYNDKQQII

SEQ ID NO: 96652 - protein, 27 aa, Artificial Sequence
  Cyclic GFR-binding peptide
SAISVLYLDSSNNVILKNYQNDKQQII

SEQ ID NO: 96653 - protein, 27 aa, Artificial Sequence
  Cyclic GFR-binding peptide
NAISMLYFDEYDKVVLKKYRNDKQQII

SEQ ID NO: 96654 - protein, 27 aa, Artificial Sequence
  Cyclic GFR-binding peptide
NAISILYFVGRTPKVLKKYRNDKQQII

SEQ ID NO: 96655 - protein, 27 aa, Artificial Sequence
  Cyclic GFR-binding peptide
SATSMLYYDENEKVVLRKHRNDKQQII

SEQ ID NO: 96656 - protein, 27 aa, Artificial Sequence
  Cyclic GFR-binding peptide
SPISILYKIGKTPKILKYHYNDKQQII

SEQ ID NO: 96657 - protein, 29 aa, Artificial Sequence
  Cyclic GFR-binding peptide
NAISVLYFEIVRKKPIFLKKYRNDKQQII

SEQ ID NO: 96658 - protein, 27 aa, Artificial Sequence
  Cyclic GFR-binding peptide
SPISMLYKDENEKVVLKYHYNDKQQII

SEQ ID NO: 96659 - protein, 27 aa, Artificial Sequence
  Cyclic GFR-binding peptide
SATSILYYVGRKPKVLRKHRNDKQQII

SEQ ID NO: 96660 - protein, 27 aa, Artificial Sequence
  Cyclic GFR-binding peptide
SPISILYKVGRKPKVLKYHYNDKQQII

SEQ ID NO: 96661 - protein, 29 aa, Artificial Sequence
  Cyclic GFR-binding peptide
SAISVLYLEIVRKKPIFLKNYQNDKQQII

SEQ ID NO: 96662 - protein, 27 aa, Artificial Sequence
  Cyclic GFR-binding peptide
SAISILYLVGRTPKVLKNYQNDKQQII

SEQ ID NO: 96663 - protein, 27 aa, Artificial Sequence
  Cyclic GFR-binding peptide
NAISMLYFDENEKVVLKKYRNDKQQII

SEQ ID NO: 96664 - protein, 27 aa, Artificial Sequence
  Cyclic GFR-binding peptide
SAISVLYLDDMGVPTLKNYQNDKQQII

SEQ ID NO: 96665 - protein, 27 aa, Artificial Sequence
  Cyclic GFR-binding peptide
NAISVLYFDDMGVPTLKKYRNDKQQII

SEQ ID NO: 96666 - protein, 27 aa, Artificial Sequence
  Cyclic GFR-binding peptide
NAISILYFVGRKPKVLKKYRNDKQQII

SEQ ID NO: 96667 - protein, 27 aa, Artificial Sequence
  Cyclic GFR-binding peptide
SAISMLYLDENEKVVLKNYQNDKQQII

SEQ ID NO: 96668 - protein, 27 aa, Artificial Sequence
  Cyclic GFR-binding peptide
SPISVLYKDDSSNVILKYHYNDKQQII

SEQ ID NO: 96669 - protein, 27 aa, Artificial Sequence
  Cyclic GFR-binding peptide
SAISILYLVGRKPKVLKNYQNDKQQII

SEQ ID NO: 96670 - protein, 27 aa, Artificial Sequence
  Cyclic GFR-binding peptide
NAISVLYFDSSNNVILKKYRNDKQQII

SEQ ID NO: 96671 - protein, 27 aa, Artificial Sequence
  Cyclic GFR-binding peptide
NAISVLYFDDSSNVILKKYRNDKQQII

SEQ ID NO: 96672 - protein, 27 aa, Artificial Sequence
  Cyclic GFR-binding peptide
SATSILYYVGRTPKVLRKHRNDKQQII

SEQ ID NO: 96673 - protein, 29 aa, Artificial Sequence
  Cyclic GFR-binding peptide
SPISVLYKEIVRKKPIFLKYHYNDKQQII

SEQ ID NO: 96674 - protein, 27 aa, Artificial Sequence
  Cyclic GFR-binding peptide
SATSILYYIGKTPKILRKHRNDKQQII

SEQ ID NO: 96675 - protein, 27 aa, Artificial Sequence
  Cyclic GFR-binding peptide
SATSVLYYDDMGVPTLRKHRNDKQQII

SEQ ID NO: 96676 - protein, 27 aa, Artificial Sequence
  Cyclic GFR-binding peptide
SPISVLYKDDMGVPTLKYHYNDKQQII

SEQ ID NO: 96677 - protein, 27 aa, Artificial Sequence
  Cyclic GFR-binding peptide
SPISVLYKDSSNNVILKYHYNDKQQII

SEQ ID NO: 96678 - protein, 27 aa, Artificial Sequence
  Cyclic GFR-binding peptide
SATSVLYYDSSNNVILRKHRNDKQQII

SEQ ID NO: 96679 - protein, 27 aa, Artificial Sequence
  Cyclic GFR-binding peptide
SPISILYKVGRTPKVLKYHYNDKQQII

SEQ ID NO: 96680 - protein, 27 aa, Artificial Sequence
  Cyclic GFR-binding peptide
SATSVLYYDDSSNVILRKHRNDKQQII

SEQ ID NO: 96681 - protein, 27 aa, Artificial Sequence
  Cyclic GFR-binding peptide
SATSMLYYDEYDKVVLRKHRNDKQQII

SEQ ID NO: 96682 - protein, 27 aa, Artificial Sequence
  Cyclic GFR-binding peptide
SAISILYLIGKTPKILKNYQNDKQQII

SEQ ID NO: 96683 - protein, 27 aa, Artificial Sequence
  Cyclic GFR-binding peptide
SAISMLYLDEYDKVVLKNYQNDKQQII

SEQ ID NO: 96684 - protein, 27 aa, Artificial Sequence
  Cyclic GFR-binding peptide
SAISVLYLDDSSNVILKNYQNDKQQII

SEQ ID NO: 96685 - protein, 27 aa, Artificial Sequence
  Cyclic GFR-binding peptide
NDKQQIINSLQEVVKDYEDYYLMTLPE

SEQ ID NO: 96686 - protein, 27 aa, Artificial Sequence
  Cyclic GFR-binding peptide
NDKQQIINSLQEIKPTKGIYYVIPLPE

SEQ ID NO: 96687 - protein, 27 aa, Artificial Sequence
  Cyclic GFR-binding peptide
NDKQQIINSLQEVKPKRGVYYLITLPE

SEQ ID NO: 96688 - protein, 27 aa, Artificial Sequence
  Cyclic GFR-binding peptide
NDKQQIINSLQEVKPTRGVYYVIPLPE

SEQ ID NO: 96689 - protein, 27 aa, Artificial Sequence
  Cyclic GFR-binding peptide
NDKQQIIEYQKYIVNSSDDIFLVSIPS

SEQ ID NO: 96690 - protein, 27 aa, Artificial Sequence
  Cyclic GFR-binding peptide
NDKQQIIEYQKYVKPTRGVIFLISIPS

SEQ ID NO: 96691 - protein, 27 aa, Artificial Sequence
  Cyclic GFR-binding peptide
NDKQQIINSLQEVVKENEDYYLMTLPE

SEQ ID NO: 96692 - protein, 27 aa, Artificial Sequence
  Cyclic GFR-binding peptide
NDKQQIINSLQEVVNNASDYYLITLPE

SEQ ID NO: 96693 - protein, 27 aa, Artificial Sequence
  Cyclic GFR-binding peptide
NDKQQIINSLQEVKPKRGVYYVIPLPE

SEQ ID NO: 96694 - protein, 27 aa, Artificial Sequence
  Cyclic GFR-binding peptide
NDKQQIINSLQEVVNNASDYYVIPLPE

SEQ ID NO: 96695 - protein, 27 aa, Artificial Sequence
  Cyclic GFR-binding peptide
NDKQQIINSLQEVKPTRGVYYLITLPE

SEQ ID NO: 96696 - protein, 27 aa, Artificial Sequence
  Cyclic GFR-binding peptide
NDKQQIIEYQKYIKPTKGIIFLISIPS

SEQ ID NO: 96697 - protein, 27 aa, Artificial Sequence
  Cyclic GFR-binding peptide
NDKQQIIEYQKYVVNNASDIFLISIPS

SEQ ID NO: 96698 - protein, 27 aa, Artificial Sequence
  Cyclic GFR-binding peptide
NDKQQIINSLQEIVNSSDDYYVVPLPE

SEQ ID NO: 96699 - protein, 27 aa, Artificial Sequence
  Cyclic GFR-binding peptide
NDKQQIINSLQEVVKDYEDYYVMPLPE

SEQ ID NO: 96700 - protein, 27 aa, Artificial Sequence
  Cyclic GFR-binding peptide
NDKQQIIEYQKYVVKENEDIFLMSIPS

SEQ ID NO: 96701 - protein, 27 aa, Artificial Sequence
  Cyclic GFR-binding peptide
NDKQQIINSLQEVVKENEDYYVMPLPE

SEQ ID NO: 96702 - protein, 27 aa, Artificial Sequence
  Cyclic GFR-binding peptide
NDKQQIIEYQKYVVKDYEDIFLMSIPS

SEQ ID NO: 96703 - protein, 27 aa, Artificial Sequence
  Cyclic GFR-binding peptide
NDKQQIIQYNKLVVNNASDLYLISIAS

SEQ ID NO: 96704 - protein, 27 aa, Artificial Sequence
  Cyclic GFR-binding peptide
NDKQQIINSLQEIKPTKGIYYLITLPE

SEQ ID NO: 96705 - protein, 27 aa, Artificial Sequence
  Cyclic GFR-binding peptide
NDKQQIIEYQKYVKPKRGVIFLISIPS

SEQ ID NO: 96706 - protein, 27 aa, Artificial Sequence
  Cyclic GFR-binding peptide
NDKQQIIRYKKLVVNNASDFYLISIAN

SEQ ID NO: 96707 - protein, 27 aa, Artificial Sequence
  Cyclic GFR-binding peptide
NDKQQIINSLQEIVNSSDDYYLVTLPE

SEQ ID NO: 96708 - protein, 27 aa, Artificial Sequence
  Cyclic GFR-binding peptide
EPLTMLYYDEYDKVVEQLSNNDKQQII

SEQ ID NO: 96709 - protein, 27 aa, Artificial Sequence
  Cyclic GFR-binding peptide
EPLPIVYYIGKTPKIEQLSNNDKQQII

SEQ ID NO: 96710 - protein, 27 aa, Artificial Sequence
  Cyclic GFR-binding peptide
EPLTILYYVGRKPKVEQLSNNDKQQII

SEQ ID NO: 96711 - protein, 27 aa, Artificial Sequence
  Cyclic GFR-binding peptide
EPLPIVYYVGRTPKVEQLSNNDKQQII

SEQ ID NO: 96712 - protein, 27 aa, Artificial Sequence
  Cyclic GFR-binding peptide
SPISVLFIDDSSNVIYKQYENDKQQII

SEQ ID NO: 96713 - protein, 27 aa, Artificial Sequence
  Cyclic GFR-binding peptide
SPISILFIVGRTPKVYKQYENDKQQII

SEQ ID NO: 96714 - protein, 27 aa, Artificial Sequence
  Cyclic GFR-binding peptide
EPLTMLYYDENEKVVEQLSNNDKQQII

SEQ ID NO: 96715 - protein, 27 aa, Artificial Sequence
  Cyclic GFR-binding peptide
EPLTILYYDSANNVVEQLSNNDKQQII

SEQ ID NO: 96716 - protein, 27 aa, Artificial Sequence
  Cyclic GFR-binding peptide
EPLPIVYYVGRKPKVEQLSNNDKQQII

SEQ ID NO: 96717 - protein, 27 aa, Artificial Sequence
  Cyclic GFR-binding peptide
EPLPIVYYDSANNVVEQLSNNDKQQII

SEQ ID NO: 96718 - protein, 27 aa, Artificial Sequence
  Cyclic GFR-binding peptide
EPLTILYYVGRTPKVEQLSNNDKQQII

SEQ ID NO: 96719 - protein, 27 aa, Artificial Sequence
  Cyclic GFR-binding peptide
SPISILFIIGKTPKIYKQYENDKQQII

SEQ ID NO: 96720 - protein, 27 aa, Artificial Sequence
  Cyclic GFR-binding peptide
SPISILFIDSANNVVYKQYENDKQQII

SEQ ID NO: 96721 - protein, 27 aa, Artificial Sequence
  Cyclic GFR-binding peptide
EPLPVVYYDDSSNVIEQLSNNDKQQII

SEQ ID NO: 96722 - protein, 27 aa, Artificial Sequence
  Cyclic GFR-binding peptide
EPLPMVYYDEYDKVVEQLSNNDKQQII

SEQ ID NO: 96723 - protein, 27 aa, Artificial Sequence
  Cyclic GFR-binding peptide
SPISMLFIDENEKVVYKQYENDKQQII

SEQ ID NO: 96724 - protein, 27 aa, Artificial Sequence
  Cyclic GFR-binding peptide
EPLPMVYYDENEKVVEQLSNNDKQQII

SEQ ID NO: 96725 - protein, 27 aa, Artificial Sequence
  Cyclic GFR-binding peptide
SPISMLFIDEYDKVVYKQYENDKQQII

SEQ ID NO: 96726 - protein, 27 aa, Artificial Sequence
  Cyclic GFR-binding peptide
SAISILYLDSANNVVLKNYQNDKQQII

SEQ ID NO: 96727 - protein, 27 aa, Artificial Sequence
  Cyclic GFR-binding peptide
EPLTILYYIGKTPKIEQLSNNDKQQII

SEQ ID NO: 96728 - protein, 27 aa, Artificial Sequence
  Cyclic GFR-binding peptide
SPISILFIVGRKPKVYKQYENDKQQII

SEQ ID NO: 96729 - protein, 27 aa, Artificial Sequence
  Cyclic GFR-binding peptide
NAISILYFDSANNVVLKKYRNDKQQII

SEQ ID NO: 96730 - protein, 27 aa, Artificial Sequence
  Cyclic GFR-binding peptide
EPLTVLYYDDSSNVIEQLSNNDKQQII

SEQ ID NO: 96731 - protein, 29 aa, Artificial Sequence
  Cyclic GFR-binding peptide
NDKQQIIVTAKKLKPKKRVYEIKRVQVPR

SEQ ID NO: 96732 - protein, 29 aa, Artificial Sequence
  Cyclic GFR-binding peptide
NDKQQIIVQVEKLKPKKRVYEVKAVKVSR

SEQ ID NO: 96733 - protein, 29 aa, Artificial Sequence
  Cyclic GFR-binding peptide
NDKQQIIVQVEKFIPKKRVIEVKAVKVSR

SEQ ID NO: 96734 - protein, 29 aa, Artificial Sequence
  Cyclic GFR-binding peptide
NDKQQIIVQVEKHQGQHPKIRVKAMKVSR

SEQ ID NO: 96735 - protein, 29 aa, Artificial Sequence
  Cyclic GFR-binding peptide
NDKQQIIVTAKKHQGQHPKIRIKRMQVPR

SEQ ID NO: 96736 - protein, 29 aa, Artificial Sequence
  Cyclic GFR-binding peptide
NDKQQIISMEGLLKPKKRVYEMIQVTINS

SEQ ID NO: 96737 - protein, 29 aa, Artificial Sequence
  Cyclic GFR-binding peptide
NDKQQIISMEGIFIPKKRVIEMIQVTINS

SEQ ID NO: 96738 - protein, 29 aa, Artificial Sequence
  Cyclic GFR-binding peptide
NDKQQIISMEGLHQGQHPKIRMIQMTINS

SEQ ID NO: 96739 - protein, 29 aa, Artificial Sequence
  Cyclic GFR-binding peptide
NDKQQIISMEGILKPKKRVYEMIQVTINS

SEQ ID NO: 96740 - protein, 29 aa, Artificial Sequence
  Cyclic GFR-binding peptide
NDKQQIISMEGLFIPKKRVIEMIQVTINS

SEQ ID NO: 96741 - protein, 29 aa, Artificial Sequence
  Cyclic GFR-binding peptide
NDKQQIIVTAKKFIPKKRVIEIKRVQVPR

SEQ ID NO: 96742 - protein, 29 aa, Artificial Sequence
  Cyclic GFR-binding peptide
NDKQQIISMEGIHQGQHPKIRMIQMTINS

SEQ ID NO: 96743 - protein, 29 aa, Artificial Sequence
  Cyclic GFR-binding peptide
RPVQVRKIEYVRKKPKLKKATVNDKQQII

SEQ ID NO: 96744 - protein, 29 aa, Artificial Sequence
  Cyclic GFR-binding peptide
RSVKVAKVEYVRKKPKLKEVQVNDKQQII

SEQ ID NO: 96745 - protein, 29 aa, Artificial Sequence
  Cyclic GFR-binding peptide
RSVKVAKVEIVRKKPIFKEVQVNDKQQII

SEQ ID NO: 96746 - protein, 29 aa, Artificial Sequence
  Cyclic GFR-binding peptide
RSVKMAKVRIKPHQGQHKEVQVNDKQQII

SEQ ID NO: 96747 - protein, 29 aa, Artificial Sequence
  Cyclic GFR-binding peptide
RPVQMRKIRIKPHQGQHKKATVNDKQQII

SEQ ID NO: 96748 - protein, 29 aa, Artificial Sequence
  Cyclic GFR-binding peptide
SNITVQIMEYVRKKPKLLGEMSNDKQQII

SEQ ID NO: 96749 - protein, 29 aa, Artificial Sequence
  Cyclic GFR-binding peptide
SNITVQIMEIVRKKPIFIGEMSNDKQQII

SEQ ID NO: 96750 - protein, 29 aa, Artificial Sequence
  Cyclic GFR-binding peptide
SNITMQIMRIKPHQGQHLGEMSNDKQQII

SEQ ID NO: 96751 - protein, 29 aa, Artificial Sequence
  Cyclic GFR-binding peptide
SNITVQIMEYVRKKPKLIGEMSNDKQQII

SEQ ID NO: 96752 - protein, 29 aa, Artificial Sequence
  Cyclic GFR-binding peptide
SNITVQIMEIVRKKPIFLGEMSNDKQQII

SEQ ID NO: 96753 - protein, 29 aa, Artificial Sequence
  Cyclic GFR-binding peptide
RPVQVRKIEIVRKKPIFKKATVNDKQQII

SEQ ID NO: 96754 - protein, 29 aa, Artificial Sequence
  Cyclic GFR-binding peptide
SNITMQIMRIKPHQGQHIGEMSNDKQQII

SEQ ID NO: 96755 - protein, 27 aa, Artificial Sequence
  Cyclic GFR-binding peptide
NDKQQIIEYKFKVKPTRGVLYLISIPE

SEQ ID NO: 96756 - protein, 27 aa, Artificial Sequence
  Cyclic GFR-binding peptide
NDKQQIIEYKFKTPVGMDDLYLVSIPE

SEQ ID NO: 96757 - protein, 27 aa, Artificial Sequence
  Cyclic GFR-binding peptide
NDKQQIIEYQKYVKPKRGVIYLISIPS

SEQ ID NO: 96758 - protein, 27 aa, Artificial Sequence
  Cyclic GFR-binding peptide
NDKQQIIEYQKYVVKDYEDIYLMSIPS

SEQ ID NO: 96759 - protein, 27 aa, Artificial Sequence
  Cyclic GFR-binding peptide
NDKQQIIEYKFKIKPTKGILYLISIPE

SEQ ID NO: 96760 - protein, 27 aa, Artificial Sequence
  Cyclic GFR-binding peptide
NDKQQIIYHYKLYTVVGKDKYLISIPS

SEQ ID NO: 96761 - protein, 27 aa, Artificial Sequence
  Cyclic GFR-binding peptide
NDKQQIIRYKKLYTVVGKDFYLISIAN

SEQ ID NO: 96762 - protein, 27 aa, Artificial Sequence
  Cyclic GFR-binding peptide
NDKQQIIEYQKYVVNNAADIYLISIPS

SEQ ID NO: 96763 - protein, 27 aa, Artificial Sequence
  Cyclic GFR-binding peptide
NDKQQIIEYQKYVKPTRGVIYLISIPS

SEQ ID NO: 96764 - protein, 27 aa, Artificial Sequence
  Cyclic GFR-binding peptide
NDKQQIIEYQKYTPVGMDDIYLVSIPS

SEQ ID NO: 96765 - protein, 27 aa, Artificial Sequence
  Cyclic GFR-binding peptide
NDKQQIIEYKFKVVKDYEDLYLMSIPE

SEQ ID NO: 96766 - protein, 27 aa, Artificial Sequence
  Cyclic GFR-binding peptide
NDKQQIIEYKFKVVNNAADLYLISIPE

SEQ ID NO: 96767 - protein, 27 aa, Artificial Sequence
  Cyclic GFR-binding peptide
NDKQQIIEYQKYVVKENEDIYLMSIPS

SEQ ID NO: 96768 - protein, 27 aa, Artificial Sequence
  Cyclic GFR-binding peptide
NDKQQIIEYQKYIKPTKGIIYLISIPS

SEQ ID NO: 96769 - protein, 27 aa, Artificial Sequence
  Cyclic GFR-binding peptide
NDKQQIIRYKKLVVNNAADFYLISIAN

SEQ ID NO: 96770 - protein, 27 aa, Artificial Sequence
  Cyclic GFR-binding peptide
NDKQQIIYHYKLVVNNAADKYLISIPS

SEQ ID NO: 96771 - protein, 27 aa, Artificial Sequence
  Cyclic GFR-binding peptide
NDKQQIIEYKFKIVNNSSDLYLVSIPE

SEQ ID NO: 96772 - protein, 27 aa, Artificial Sequence
  Cyclic GFR-binding peptide
NDKQQIIEYQKYIVNSSDDIYLVSIPS

SEQ ID NO: 96773 - protein, 27 aa, Artificial Sequence
  Cyclic GFR-binding peptide
NDKQQIIEYKFKIVNSSDDLYLVSIPE

SEQ ID NO: 96774 - protein, 27 aa, Artificial Sequence
  Cyclic GFR-binding peptide
NDKQQIIEYKFKVKPKRGVLYLISIPE

SEQ ID NO: 96775 - protein, 27 aa, Artificial Sequence
  Cyclic GFR-binding peptide
NDKQQIIEYQKYYTVVGKDIYLISIPS

SEQ ID NO: 96776 - protein, 27 aa, Artificial Sequence
  Cyclic GFR-binding peptide
NDKQQIIEYKFKVVKENEDLYLMSIPE

SEQ ID NO: 96777 - protein, 27 aa, Artificial Sequence
  Cyclic GFR-binding peptide
NDKQQIIEYQKYIVNNSSDIYLVSIPS

SEQ ID NO: 96778 - protein, 27 aa, Artificial Sequence
  Cyclic GFR-binding peptide
NDKQQIIEYKFKYTVVGKDLYLISIPE

SEQ ID NO: 96779 - protein, 27 aa, Artificial Sequence
  Cyclic GFR-binding peptide
EPISILYLVGRTPKVKFKYENDKQQII

SEQ ID NO: 96780 - protein, 27 aa, Artificial Sequence
  Cyclic GFR-binding peptide
EPISVLYLDDMGVPTKFKYENDKQQII

SEQ ID NO: 96781 - protein, 27 aa, Artificial Sequence
  Cyclic GFR-binding peptide
SPISILYIVGRKPKVYKQYENDKQQII

SEQ ID NO: 96782 - protein, 27 aa, Artificial Sequence
  Cyclic GFR-binding peptide
SPISMLYIDEYDKVVYKQYENDKQQII

SEQ ID NO: 96783 - protein, 27 aa, Artificial Sequence
  Cyclic GFR-binding peptide
EPISILYLIGKTPKIKFKYENDKQQII

SEQ ID NO: 96784 - protein, 27 aa, Artificial Sequence
  Cyclic GFR-binding peptide
SPISILYKDKGVVTYLKYHYNDKQQII

SEQ ID NO: 96785 - protein, 27 aa, Artificial Sequence
  Cyclic GFR-binding peptide
NAISILYFDKGVVTYLKKYRNDKQQII

SEQ ID NO: 96786 - protein, 27 aa, Artificial Sequence
  Cyclic GFR-binding peptide
SPISILYIDAANNVVYKQYENDKQQII

SEQ ID NO: 96787 - protein, 27 aa, Artificial Sequence
  Cyclic GFR-binding peptide
SPISILYIVGRTPKVYKQYENDKQQII

SEQ ID NO: 96788 - protein, 27 aa, Artificial Sequence
  Cyclic GFR-binding peptide
SPISVLYIDDMGVPTYKQYENDKQQII

SEQ ID NO: 96789 - protein, 27 aa, Artificial Sequence
  Cyclic GFR-binding peptide
EPISMLYLDEYDKVVKFKYENDKQQII

SEQ ID NO: 96790 - protein, 27 aa, Artificial Sequence
  Cyclic GFR-binding peptide
EPISILYLDAANNVVKFKYENDKQQII

SEQ ID NO: 96791 - protein, 27 aa, Artificial Sequence
  Cyclic GFR-binding peptide
SPISMLYIDENEKVVYKQYENDKQQII

SEQ ID NO: 96792 - protein, 27 aa, Artificial Sequence
  Cyclic GFR-binding peptide
SPISILYIIGKTPKIYKQYENDKQQII

SEQ ID NO: 96793 - protein, 27 aa, Artificial Sequence
  Cyclic GFR-binding peptide
NAISILYFDAANNVVLKKYRNDKQQII

SEQ ID NO: 96794 - protein, 27 aa, Artificial Sequence
  Cyclic GFR-binding peptide
SPISILYKDAANNVVLKYHYNDKQQII

SEQ ID NO: 96795 - protein, 27 aa, Artificial Sequence
  Cyclic GFR-binding peptide
EPISVLYLDSSNNVIKFKYENDKQQII

SEQ ID NO: 96796 - protein, 27 aa, Artificial Sequence
  Cyclic GFR-binding peptide
SPISVLYIDDSSNVIYKQYENDKQQII

SEQ ID NO: 96797 - protein, 27 aa, Artificial Sequence
  Cyclic GFR-binding peptide
EPISVLYLDDSSNVIKFKYENDKQQII

SEQ ID NO: 96798 - protein, 27 aa, Artificial Sequence
  Cyclic GFR-binding peptide
EPISILYLVGRKPKVKFKYENDKQQII

SEQ ID NO: 96799 - protein, 27 aa, Artificial Sequence
  Cyclic GFR-binding peptide
SPISILYIDKGVVTYYKQYENDKQQII

SEQ ID NO: 96800 - protein, 27 aa, Artificial Sequence
  Cyclic GFR-binding peptide
EPISMLYLDENEKVVKFKYENDKQQII

SEQ ID NO: 96801 - protein, 27 aa, Artificial Sequence
  Cyclic GFR-binding peptide
SPISVLYIDSSNNVIYKQYENDKQQII

SEQ ID NO: 96802 - protein, 27 aa, Artificial Sequence
  Cyclic GFR-binding peptide
EPISILYLDKGVVTYKFKYENDKQQII

SEQ ID NO: 96803 - protein, 27 aa, Artificial Sequence
  Cyclic GFR-binding peptide
NDKQQIIPIKGYIIQQKDNFYLMNIPS

SEQ ID NO: 96804 - protein, 27 aa, Artificial Sequence
  Cyclic GFR-binding peptide
NDKQQIIPIKGYVVKDYEDFYLMNIPS

SEQ ID NO: 96805 - protein, 27 aa, Artificial Sequence
  Cyclic GFR-binding peptide
NDKQQIIPIKGYIVNSSDDFYLVNIPS

SEQ ID NO: 96806 - protein, 27 aa, Artificial Sequence
  Cyclic GFR-binding peptide
NDKQQIIPIKGYVVNNAADFYLINIPS

SEQ ID NO: 96807 - protein, 27 aa, Artificial Sequence
  Cyclic GFR-binding peptide
NDKQQIIPIKGYYTVVGKDFYLINIPS

SEQ ID NO: 96808 - protein, 27 aa, Artificial Sequence
  Cyclic GFR-binding peptide
NDKQQIIPIKGYLLVRGNDFYLMNIPS

SEQ ID NO: 96809 - protein, 27 aa, Artificial Sequence
  Cyclic GFR-binding peptide
NDKQQIIPIKGYVVKENEDFYLMNIPS

SEQ ID NO: 96810 - protein, 27 aa, Artificial Sequence
  Cyclic GFR-binding peptide
NDKQQIIPIKGYVVNNASDFYLINIPS

SEQ ID NO: 96811 - protein, 27 aa, Artificial Sequence
  Cyclic GFR-binding peptide
NDKQQIIPIKGYTPVGMDDFYLVNIPS

SEQ ID NO: 96812 - protein, 27 aa, Artificial Sequence
  Cyclic GFR-binding peptide
NDKQQIIPIKGYIVNNSSDFYLVNIPS

SEQ ID NO: 96813 - protein, 27 aa, Artificial Sequence
  Cyclic GFR-binding peptide
SPINMLYFNDKQQIIYGKIPNDKQQII

SEQ ID NO: 96814 - protein, 27 aa, Artificial Sequence
  Cyclic GFR-binding peptide
SPINMLYFDEYDKVVYGKIPNDKQQII

SEQ ID NO: 96815 - protein, 27 aa, Artificial Sequence
  Cyclic GFR-binding peptide
SPINVLYFDDSSNVIYGKIPNDKQQII

SEQ ID NO: 96816 - protein, 27 aa, Artificial Sequence
  Cyclic GFR-binding peptide
SPINILYFDAANNVVYGKIPNDKQQII

SEQ ID NO: 96817 - protein, 27 aa, Artificial Sequence
  Cyclic GFR-binding peptide
SPINILYFDKGVVTYYGKIPNDKQQII

SEQ ID NO: 96818 - protein, 27 aa, Artificial Sequence
  Cyclic GFR-binding peptide
SPINMLYFDNGRVLLYGKIPNDKQQII

SEQ ID NO: 96819 - protein, 27 aa, Artificial Sequence
  Cyclic GFR-binding peptide
SPINMLYFDENEKVVYGKIPNDKQQII

SEQ ID NO: 96820 - protein, 27 aa, Artificial Sequence
  Cyclic GFR-binding peptide
SPINILYFDSANNVVYGKIPNDKQQII

SEQ ID NO: 96821 - protein, 27 aa, Artificial Sequence
  Cyclic GFR-binding peptide
SPINVLYFDDMGVPTYGKIPNDKQQII

SEQ ID NO: 96822 - protein, 27 aa, Artificial Sequence
  Cyclic GFR-binding peptide
SPINVLYFDSSNNVIYGKIPNDKQQII

SEQ ID NO: 96823 - protein, 27 aa, Artificial Sequence
  Cyclic GFR-binding peptide
NDKQQIIEYQKYVVNNASDIYLISIPS

SEQ ID NO: 96824 - protein, 27 aa, Artificial Sequence
  Cyclic GFR-binding peptide
NDKQQIIEYQKYIIQQKDNIYLMSIPS

SEQ ID NO: 96825 - protein, 27 aa, Artificial Sequence
  Cyclic GFR-binding peptide
NDKQQIIEYQKYLLVRGNDIYLMSIPS

SEQ ID NO: 96826 - protein, 27 aa, Artificial Sequence
  Cyclic GFR-binding peptide
SPISILYIDSANNVVYKQYENDKQQII

SEQ ID NO: 96827 - protein, 27 aa, Artificial Sequence
  Cyclic GFR-binding peptide
SPISMLYINDKQQIIYKQYENDKQQII

SEQ ID NO: 96828 - protein, 27 aa, Artificial Sequence
  Cyclic GFR-binding peptide
SPISMLYIDNGRVLLYKQYENDKQQII

SEQ ID NO: 96829 - protein, 27 aa, Artificial Sequence
  Cyclic GFR-binding peptide
NDKQQIIPYVKLYTVVGKDFFLISLSS

SEQ ID NO: 96830 - protein, 27 aa, Artificial Sequence
  Cyclic GFR-binding peptide
NDKQQIIPYVKLIKPTKGIFFLISLSS

SEQ ID NO: 96831 - protein, 27 aa, Artificial Sequence
  Cyclic GFR-binding peptide
NDKQQIIPYVKLIIQQKDNFFLMSLSS

SEQ ID NO: 96832 - protein, 27 aa, Artificial Sequence
  Cyclic GFR-binding peptide
NDKQQIIPYVKLIVNSSDDFFLVSLSS

SEQ ID NO: 96833 - protein, 27 aa, Artificial Sequence
  Cyclic GFR-binding peptide
NDKQQIIPYVKLVKPKRGVFFLISLSS

SEQ ID NO: 96834 - protein, 27 aa, Artificial Sequence
  Cyclic GFR-binding peptide
NDKQQIIPYVKLVKPTRGVFFLISLSS

SEQ ID NO: 96835 - protein, 27 aa, Artificial Sequence
  Cyclic GFR-binding peptide
NDKQQIIPYVKLTPVGMDDFFLVSLSS

SEQ ID NO: 96836 - protein, 29 aa, Artificial Sequence
  Cyclic GFR-binding peptide
NDKQQIIPYVKLHQGQHPKIRFFLMSLSS

SEQ ID NO: 96837 - protein, 27 aa, Artificial Sequence
  Cyclic GFR-binding peptide
NDKQQIIPYVKLVVNKNEDFFLISLSS

SEQ ID NO: 96838 - protein, 27 aa, Artificial Sequence
  Cyclic GFR-binding peptide
NDKQQIIPYVKLVVNNASDFFLISLSS

SEQ ID NO: 96839 - protein, 27 aa, Artificial Sequence
  Cyclic GFR-binding peptide
NDKQQIIPYVKLVVKENEDFFLMSLSS

SEQ ID NO: 96840 - protein, 27 aa, Artificial Sequence
  Cyclic GFR-binding peptide
NDKQQIIPYVKLIVNNSSDFFLVSLSS

SEQ ID NO: 96841 - protein, 29 aa, Artificial Sequence
  Cyclic GFR-binding peptide
NDKQQIIPYVKLLKPKKRVYEFFLVSLSS

SEQ ID NO: 96842 - protein, 27 aa, Artificial Sequence
  Cyclic GFR-binding peptide
NDKQQIIPYVKLLLVRGNDFFLMSLSS

SEQ ID NO: 96843 - protein, 27 aa, Artificial Sequence
  Cyclic GFR-binding peptide
NDKQQIIPYVKLVVKDYEDFFLMSLSS

SEQ ID NO: 96844 - protein, 27 aa, Artificial Sequence
  Cyclic GFR-binding peptide
NDKQQIIPYVKLVVNNAADFFLISLSS

SEQ ID NO: 96845 - protein, 27 aa, Artificial Sequence
  Cyclic GFR-binding peptide
SSLSILFFDKGVVTYLKVYPNDKQQII

SEQ ID NO: 96846 - protein, 27 aa, Artificial Sequence
  Cyclic GFR-binding peptide
SSLSILFFIGKTPKILKVYPNDKQQII

SEQ ID NO: 96847 - protein, 27 aa, Artificial Sequence
  Cyclic GFR-binding peptide
SSLSMLFFNDKQQIILKVYPNDKQQII

SEQ ID NO: 96848 - protein, 27 aa, Artificial Sequence
  Cyclic GFR-binding peptide
SSLSVLFFDDSSNVILKVYPNDKQQII

SEQ ID NO: 96849 - protein, 27 aa, Artificial Sequence
  Cyclic GFR-binding peptide
SSLSILFFVGRKPKVLKVYPNDKQQII

SEQ ID NO: 96850 - protein, 27 aa, Artificial Sequence
  Cyclic GFR-binding peptide
SSLSILFFVGRTPKVLKVYPNDKQQII

SEQ ID NO: 96851 - protein, 27 aa, Artificial Sequence
  Cyclic GFR-binding peptide
SSLSVLFFDDMGVPTLKVYPNDKQQII

SEQ ID NO: 96852 - protein, 29 aa, Artificial Sequence
  Cyclic GFR-binding peptide
SSLSMLFFRIKPHQGQHLKVYPNDKQQII

SEQ ID NO: 96853 - protein, 27 aa, Artificial Sequence
  Cyclic GFR-binding peptide
SSLSILFFDENKNVVLKVYPNDKQQII

SEQ ID NO: 96854 - protein, 27 aa, Artificial Sequence
  Cyclic GFR-binding peptide
SSLSILFFDSANNVVLKVYPNDKQQII

SEQ ID NO: 96855 - protein, 27 aa, Artificial Sequence
  Cyclic GFR-binding peptide
SSLSMLFFDENEKVVLKVYPNDKQQII

SEQ ID NO: 96856 - protein, 27 aa, Artificial Sequence
  Cyclic GFR-binding peptide
SSLSVLFFDSSNNVILKVYPNDKQQII

SEQ ID NO: 96857 - protein, 29 aa, Artificial Sequence
  Cyclic GFR-binding peptide
SSLSVLFFEYVRKKPKLLKVYPNDKQQII

SEQ ID NO: 96858 - protein, 27 aa, Artificial Sequence
  Cyclic GFR-binding peptide
SSLSMLFFDNGRVLLLKVYPNDKQQII

SEQ ID NO: 96859 - protein, 27 aa, Artificial Sequence
  Cyclic GFR-binding peptide
SSLSMLFFDEYDKVVLKVYPNDKQQII

SEQ ID NO: 96860 - protein, 27 aa, Artificial Sequence
  Cyclic GFR-binding peptide
SSLSILFFDAANNVVLKVYPNDKQQII

SEQ ID NO: 96861 - protein, 27 aa, Artificial Sequence
  Cyclic GFR-binding peptide
NDKQQIISMEGIIVNSSDDMIQVTINS

SEQ ID NO: 96862 - protein, 27 aa, Artificial Sequence
  Cyclic GFR-binding peptide
NDKQQIIVTAKKVVKENEDIKRMQVPR

SEQ ID NO: 96863 - protein, 27 aa, Artificial Sequence
  Cyclic GFR-binding peptide
NDKQQIISMEGIVVKDYEDMIQMTINS

SEQ ID NO: 96864 - protein, 27 aa, Artificial Sequence
  Cyclic GFR-binding peptide
NDKQQIIVTAKKIKPTKGIIKRIQVPR

SEQ ID NO: 96865 - protein, 27 aa, Artificial Sequence
  Cyclic GFR-binding peptide
NDKQQIISMEGIVKPTRGVMIQITINS

SEQ ID NO: 96866 - protein, 29 aa, Artificial Sequence
  Cyclic GFR-binding peptide
NDKQQIINSLQEFIPKKRVIEYYVVPLPE

SEQ ID NO: 96867 - protein, 27 aa, Artificial Sequence
  Cyclic GFR-binding peptide
NDKQQIIVQVEKVKPKRGVVKAIKVSR

SEQ ID NO: 96868 - protein, 27 aa, Artificial Sequence
  Cyclic GFR-binding peptide
NDKQQIIVQVEKVVKENEDVKAMKVSR

SEQ ID NO: 96869 - protein, 27 aa, Artificial Sequence
  Cyclic GFR-binding peptide
NDKQQIIVTAKKIVNSSDDIKRVQVPR

SEQ ID NO: 96870 - protein, 27 aa, Artificial Sequence
  Cyclic GFR-binding peptide
NDKQQIIVQVEKIKPTKGIVKAIKVSR

SEQ ID NO: 96871 - protein, 29 aa, Artificial Sequence
  Cyclic GFR-binding peptide
NDKQQIINSLQEFIPKKRVIEYYLVTLPE

SEQ ID NO: 96872 - protein, 27 aa, Artificial Sequence
  Cyclic GFR-binding peptide
NDKQQIIVQVEKIVNSSDDVKAVKVSR

SEQ ID NO: 96873 - protein, 27 aa, Artificial Sequence
  Cyclic GFR-binding peptide
NDKQQIIVTAKKVKPKRGVIKRIQVPR

SEQ ID NO: 96874 - protein, 27 aa, Artificial Sequence
  Cyclic GFR-binding peptide
NDKQQIIVQVEKVKPTRGVVKAIKVSR

SEQ ID NO: 96875 - protein, 27 aa, Artificial Sequence
  Cyclic GFR-binding peptide
NDKQQIIVTAKKVKPTRGVIKRIQVPR

SEQ ID NO: 96876 - protein, 29 aa, Artificial Sequence
  Cyclic GFR-binding peptide
NDKQQIINSLQELKPKKRVYEYYLVTLPE

SEQ ID NO: 96877 - protein, 27 aa, Artificial Sequence
  Cyclic GFR-binding peptide
NDKQQIISMEGIVKPKRGVMIQITINS

SEQ ID NO: 96878 - protein, 27 aa, Artificial Sequence
  Cyclic GFR-binding peptide
NDKQQIISMEGIVVKENEDMIQMTINS

SEQ ID NO: 96879 - protein, 27 aa, Artificial Sequence
  Cyclic GFR-binding peptide
NDKQQIISMEGIIKPTKGIMIQITINS

SEQ ID NO: 96880 - protein, 29 aa, Artificial Sequence
  Cyclic GFR-binding peptide
NDKQQIINSLQEHQGQHPKIRYYLMTLPE

SEQ ID NO: 96881 - protein, 27 aa, Artificial Sequence
  Cyclic GFR-binding peptide
NDKQQIIVTAKKVVKDYEDIKRMQVPR

SEQ ID NO: 96882 - protein, 29 aa, Artificial Sequence
  Cyclic GFR-binding peptide
NDKQQIINSLQEHQGQHPKIRYYVMPLPE

SEQ ID NO: 96883 - protein, 29 aa, Artificial Sequence
  Cyclic GFR-binding peptide
NDKQQIINSLQELKPKKRVYEYYVVPLPE

SEQ ID NO: 96884 - protein, 27 aa, Artificial Sequence
  Cyclic GFR-binding peptide
NDKQQIIVQVEKVVKDYEDVKAMKVSR

SEQ ID NO: 96885 - protein, 27 aa, Artificial Sequence
  Cyclic GFR-binding peptide
SNITVQIMDDSSNVIIGEMSNDKQQII

SEQ ID NO: 96886 - protein, 27 aa, Artificial Sequence
  Cyclic GFR-binding peptide
RPVQMRKIDENEKVVKKATVNDKQQII

SEQ ID NO: 96887 - protein, 27 aa, Artificial Sequence
  Cyclic GFR-binding peptide
SNITMQIMDEYDKVVIGEMSNDKQQII

SEQ ID NO: 96888 - protein, 27 aa, Artificial Sequence
  Cyclic GFR-binding peptide
RPVQIRKIIGKTPKIKKATVNDKQQII

SEQ ID NO: 96889 - protein, 27 aa, Artificial Sequence
  Cyclic GFR-binding peptide
SNITIQIMVGRTPKVIGEMSNDKQQII

SEQ ID NO: 96890 - protein, 29 aa, Artificial Sequence
  Cyclic GFR-binding peptide
EPLPVVYYEIVRKKPIFEQLSNNDKQQII

SEQ ID NO: 96891 - protein, 27 aa, Artificial Sequence
  Cyclic GFR-binding peptide
RSVKIAKVVGRKPKVKEVQVNDKQQII

SEQ ID NO: 96892 - protein, 27 aa, Artificial Sequence
  Cyclic GFR-binding peptide
RSVKMAKVDENEKVVKEVQVNDKQQII

SEQ ID NO: 96893 - protein, 27 aa, Artificial Sequence
  Cyclic GFR-binding peptide
RPVQVRKIDDSSNVIKKATVNDKQQII

SEQ ID NO: 96894 - protein, 27 aa, Artificial Sequence
  Cyclic GFR-binding peptide
RSVKIAKVIGKTPKIKEVQVNDKQQII

SEQ ID NO: 96895 - protein, 29 aa, Artificial Sequence
  Cyclic GFR-binding peptide
EPLTVLYYEIVRKKPIFEQLSNNDKQQII

SEQ ID NO: 96896 - protein, 27 aa, Artificial Sequence
  Cyclic GFR-binding peptide
RSVKVAKVDDSSNVIKEVQVNDKQQII

SEQ ID NO: 96897 - protein, 27 aa, Artificial Sequence
  Cyclic GFR-binding peptide
RPVQIRKIVGRKPKVKKATVNDKQQII

SEQ ID NO: 96898 - protein, 27 aa, Artificial Sequence
  Cyclic GFR-binding peptide
RSVKIAKVVGRTPKVKEVQVNDKQQII

SEQ ID NO: 96899 - protein, 27 aa, Artificial Sequence
  Cyclic GFR-binding peptide
RPVQIRKIVGRTPKVKKATVNDKQQII

SEQ ID NO: 96900 - protein, 29 aa, Artificial Sequence
  Cyclic GFR-binding peptide
EPLTVLYYEYVRKKPKLEQLSNNDKQQII

SEQ ID NO: 96901 - protein, 27 aa, Artificial Sequence
  Cyclic GFR-binding peptide
SNITIQIMVGRKPKVIGEMSNDKQQII

SEQ ID NO: 96902 - protein, 27 aa, Artificial Sequence
  Cyclic GFR-binding peptide
SNITMQIMDENEKVVIGEMSNDKQQII

SEQ ID NO: 96903 - protein, 27 aa, Artificial Sequence
  Cyclic GFR-binding peptide
SNITIQIMIGKTPKIIGEMSNDKQQII

SEQ ID NO: 96904 - protein, 29 aa, Artificial Sequence
  Cyclic GFR-binding peptide
EPLTMLYYRIKPHQGQHEQLSNNDKQQII

SEQ ID NO: 96905 - protein, 27 aa, Artificial Sequence
  Cyclic GFR-binding peptide
RPVQMRKIDEYDKVVKKATVNDKQQII

SEQ ID NO: 96906 - protein, 29 aa, Artificial Sequence
  Cyclic GFR-binding peptide
EPLPMVYYRIKPHQGQHEQLSNNDKQQII

SEQ ID NO: 96907 - protein, 29 aa, Artificial Sequence
  Cyclic GFR-binding peptide
EPLPVVYYEYVRKKPKLEQLSNNDKQQII

SEQ ID NO: 96908 - protein, 27 aa, Artificial Sequence
  Cyclic GFR-binding peptide
RSVKMAKVDEYDKVVKEVQVNDKQQII

SEQ ID NO: 96909 - protein, 27 aa, Artificial Sequence
  Cyclic GFR-binding peptide
NDKQQIIRYKKLIIQQKDNFYLMSIAN

SEQ ID NO: 96910 - protein, 27 aa, Artificial Sequence
  Cyclic GFR-binding peptide
NDKQQIIRYKKLLLVRGNDFYLMSIAN

SEQ ID NO: 96911 - protein, 27 aa, Artificial Sequence
  Cyclic GFR-binding peptide
NAISMLYFNDKQQIILKKYRNDKQQII

SEQ ID NO: 96912 - protein, 27 aa, Artificial Sequence
  Cyclic GFR-binding peptide
NAISMLYFDNGRVLLLKKYRNDKQQII

SEQ ID NO: 96913 - protein, 27 aa, Artificial Sequence
  Cyclic GFR-binding peptide
NDKQQIIEYKFKVVNKNEDLYLISIPE

SEQ ID NO: 96914 - protein, 27 aa, Artificial Sequence
  Cyclic GFR-binding peptide
NDKQQIIPIKGYVKPTRGVFYLINIPS

SEQ ID NO: 96915 - protein, 27 aa, Artificial Sequence
  Cyclic GFR-binding peptide
NDKQQIIEYKFKLLVRGNDLYLMSIPE

SEQ ID NO: 96916 - protein, 27 aa, Artificial Sequence
  Cyclic GFR-binding peptide
NDKQQIIYHYKLVVNKNEDKYLISIPS

SEQ ID NO: 96917 - protein, 27 aa, Artificial Sequence
  Cyclic GFR-binding peptide
NDKQQIIRHKRLLLVRGNDYYLMSTAS

SEQ ID NO: 96918 - protein, 27 aa, Artificial Sequence
  Cyclic GFR-binding peptide
NDKQQIIYHYKLLLVRGNDKYLMSIPS

SEQ ID NO: 96919 - protein, 27 aa, Artificial Sequence
  Cyclic GFR-binding peptide
NDKQQIIRHKRLVVNKNEDYYLISTAS

SEQ ID NO: 96920 - protein, 27 aa, Artificial Sequence
  Cyclic GFR-binding peptide
NDKQQIIRYKKLVVNKNEDFYLISIAN

SEQ ID NO: 96921 - protein, 27 aa, Artificial Sequence
  Cyclic GFR-binding peptide
NDKQQIIPIKGYVVNKNEDFYLINIPS

SEQ ID NO: 96922 - protein, 27 aa, Artificial Sequence
  Cyclic GFR-binding peptide
NDKQQIIPIKGYIKPTKGIFYLINIPS

SEQ ID NO: 96923 - protein, 27 aa, Artificial Sequence
  Cyclic GFR-binding peptide
NDKQQIIRHKRLYTVVGKDYYLISTAS

SEQ ID NO: 96924 - protein, 27 aa, Artificial Sequence
  Cyclic GFR-binding peptide
NDKQQIIEYKFKVVNNASDLYLISIPE

SEQ ID NO: 96925 - protein, 27 aa, Artificial Sequence
  Cyclic GFR-binding peptide
NDKQQIIRHKRLIIQQKDNYYLMSTAS

SEQ ID NO: 96926 - protein, 27 aa, Artificial Sequence
  Cyclic GFR-binding peptide
NDKQQIIEYKFKIIQQKDNLYLMSIPE

SEQ ID NO: 96927 - protein, 27 aa, Artificial Sequence
  Cyclic GFR-binding peptide
NDKQQIIPIKGYVKPKRGVFYLINIPS

SEQ ID NO: 96928 - protein, 27 aa, Artificial Sequence
  Cyclic GFR-binding peptide
NDKQQIIRHKRLVVNNASDYYLISTAS

SEQ ID NO: 96929 - protein, 27 aa, Artificial Sequence
  Cyclic GFR-binding peptide
NDKQQIIYHYKLVVNNASDKYLISIPS

SEQ ID NO: 96930 - protein, 27 aa, Artificial Sequence
  Cyclic GFR-binding peptide
NDKQQIIYHYKLIIQQKDNKYLMSIPS

SEQ ID NO: 96931 - protein, 27 aa, Artificial Sequence
  Cyclic GFR-binding peptide
NDKQQIIRHKRLVVNNAADYYLISTAS

SEQ ID NO: 96932 - protein, 27 aa, Artificial Sequence
  Cyclic GFR-binding peptide
EPISILYLDENKNVVKFKYENDKQQII

SEQ ID NO: 96933 - protein, 27 aa, Artificial Sequence
  Cyclic GFR-binding peptide
SPINILYFVGRTPKVYGKIPNDKQQII

SEQ ID NO: 96934 - protein, 27 aa, Artificial Sequence
  Cyclic GFR-binding peptide
EPISMLYLDNGRVLLKFKYENDKQQII

SEQ ID NO: 96935 - protein, 27 aa, Artificial Sequence
  Cyclic GFR-binding peptide
SPISILYKDENKNVVLKYHYNDKQQII

SEQ ID NO: 96936 - protein, 27 aa, Artificial Sequence
  Cyclic GFR-binding peptide
SATSMLYYDNGRVLLLRKHRNDKQQII

SEQ ID NO: 96937 - protein, 27 aa, Artificial Sequence
  Cyclic GFR-binding peptide
SPISMLYKDNGRVLLLKYHYNDKQQII

SEQ ID NO: 96938 - protein, 27 aa, Artificial Sequence
  Cyclic GFR-binding peptide
SATSILYYDENKNVVLRKHRNDKQQII

SEQ ID NO: 96939 - protein, 27 aa, Artificial Sequence
  Cyclic GFR-binding peptide
NAISILYFDENKNVVLKKYRNDKQQII

SEQ ID NO: 96940 - protein, 27 aa, Artificial Sequence
  Cyclic GFR-binding peptide
SPINILYFDENKNVVYGKIPNDKQQII

SEQ ID NO: 96941 - protein, 27 aa, Artificial Sequence
  Cyclic GFR-binding peptide
SPINILYFIGKTPKIYGKIPNDKQQII

SEQ ID NO: 96942 - protein, 27 aa, Artificial Sequence
  Cyclic GFR-binding peptide
SATSILYYDKGVVTYLRKHRNDKQQII

SEQ ID NO: 96943 - protein, 27 aa, Artificial Sequence
  Cyclic GFR-binding peptide
EPISILYLDSANNVVKFKYENDKQQII

SEQ ID NO: 96944 - protein, 27 aa, Artificial Sequence
  Cyclic GFR-binding peptide
SATSMLYYNDKQQIILRKHRNDKQQII

SEQ ID NO: 96945 - protein, 27 aa, Artificial Sequence
  Cyclic GFR-binding peptide
EPISMLYLNDKQQIIKFKYENDKQQII

SEQ ID NO: 96946 - protein, 27 aa, Artificial Sequence
  Cyclic GFR-binding peptide
SPINILYFVGRKPKVYGKIPNDKQQII

SEQ ID NO: 96947 - protein, 27 aa, Artificial Sequence
  Cyclic GFR-binding peptide
SATSILYYDSANNVVLRKHRNDKQQII

SEQ ID NO: 96948 - protein, 27 aa, Artificial Sequence
  Cyclic GFR-binding peptide
SPISILYKDSANNVVLKYHYNDKQQII

SEQ ID NO: 96949 - protein, 27 aa, Artificial Sequence
  Cyclic GFR-binding peptide
SPISMLYKNDKQQIILKYHYNDKQQII

SEQ ID NO: 96950 - protein, 27 aa, Artificial Sequence
  Cyclic GFR-binding peptide
SATSILYYDAANNVVLRKHRNDKQQII

SEQ ID NO: 96951 - protein, 27 aa, Artificial Sequence
  Cyclic GFR-binding peptide
NDKQQIISMEGIIIQQKDNMIQMTINS

SEQ ID NO: 96952 - protein, 27 aa, Artificial Sequence
  Cyclic GFR-binding peptide
NDKQQIISMEGLVKPKRGVMIQITINS

SEQ ID NO: 96953 - protein, 27 aa, Artificial Sequence
  Cyclic GFR-binding peptide
NDKQQIISMEGLVVNNASDMIQITINS

SEQ ID NO: 96954 - protein, 27 aa, Artificial Sequence
  Cyclic GFR-binding peptide
NDKQQIISMEGILLVRGNDMIQMTINS

SEQ ID NO: 96955 - protein, 27 aa, Artificial Sequence
  Cyclic GFR-binding peptide
NDKQQIISMEGLIKPTKGIMIQITINS

SEQ ID NO: 96956 - protein, 27 aa, Artificial Sequence
  Cyclic GFR-binding peptide
NDKQQIISMEGLIVNSSDDMIQVTINS

SEQ ID NO: 96957 - protein, 27 aa, Artificial Sequence
  Cyclic GFR-binding peptide
NDKQQIISMEGIVVNNASDMIQITINS

SEQ ID NO: 96958 - protein, 27 aa, Artificial Sequence
  Cyclic GFR-binding peptide
NDKQQIISMEGLVVNNAADMIQITINS

SEQ ID NO: 96959 - protein, 27 aa, Artificial Sequence
  Cyclic GFR-binding peptide
NDKQQIISMEGLLLVRGNDMIQMTINS

SEQ ID NO: 96960 - protein, 27 aa, Artificial Sequence
  Cyclic GFR-binding peptide
NDKQQIISMEGLIIQQKDNMIQMTINS

SEQ ID NO: 96961 - protein, 27 aa, Artificial Sequence
  Cyclic GFR-binding peptide
NDKQQIISMEGIVVNNAADMIQITINS

SEQ ID NO: 96962 - protein, 27 aa, Artificial Sequence
  Cyclic GFR-binding peptide
NDKQQIISMEGLVKPTRGVMIQITINS

SEQ ID NO: 96963 - protein, 27 aa, Artificial Sequence
  Cyclic GFR-binding peptide
SNITMQIMNDKQQIIIGEMSNDKQQII

SEQ ID NO: 96964 - protein, 27 aa, Artificial Sequence
  Cyclic GFR-binding peptide
SNITIQIMVGRKPKVLGEMSNDKQQII

SEQ ID NO: 96965 - protein, 27 aa, Artificial Sequence
  Cyclic GFR-binding peptide
SNITIQIMDSANNVVLGEMSNDKQQII

SEQ ID NO: 96966 - protein, 27 aa, Artificial Sequence
  Cyclic GFR-binding peptide
SNITMQIMDNGRVLLIGEMSNDKQQII

SEQ ID NO: 96967 - protein, 27 aa, Artificial Sequence
  Cyclic GFR-binding peptide
SNITIQIMIGKTPKILGEMSNDKQQII

SEQ ID NO: 96968 - protein, 27 aa, Artificial Sequence
  Cyclic GFR-binding peptide
SNITVQIMDDSSNVILGEMSNDKQQII

SEQ ID NO: 96969 - protein, 27 aa, Artificial Sequence
  Cyclic GFR-binding peptide
SNITIQIMDSANNVVIGEMSNDKQQII

SEQ ID NO: 96970 - protein, 27 aa, Artificial Sequence
  Cyclic GFR-binding peptide
SNITIQIMDAANNVVLGEMSNDKQQII

SEQ ID NO: 96971 - protein, 27 aa, Artificial Sequence
  Cyclic GFR-binding peptide
SNITMQIMDNGRVLLLGEMSNDKQQII

SEQ ID NO: 96972 - protein, 27 aa, Artificial Sequence
  Cyclic GFR-binding peptide
SNITMQIMNDKQQIILGEMSNDKQQII

SEQ ID NO: 96973 - protein, 27 aa, Artificial Sequence
  Cyclic GFR-binding peptide
SNITIQIMDAANNVVIGEMSNDKQQII

SEQ ID NO: 96974 - protein, 27 aa, Artificial Sequence
  Cyclic GFR-binding peptide
SNITIQIMVGRTPKVLGEMSNDKQQII

SEQ ID NO: 96975 - protein, 27 aa, Artificial Sequence
  Cyclic GFR-binding peptide
NDKQQIIQYNKLVVNKNEDLYLISIAS

SEQ ID NO: 96976 - protein, 27 aa, Artificial Sequence
  Cyclic GFR-binding peptide
NDKQQIIQYNKLVVNNAADLYLISIAS

SEQ ID NO: 96977 - protein, 27 aa, Artificial Sequence
  Cyclic GFR-binding peptide
NDKQQIIQYNKLIIQQKDNLYLMSIAS

SEQ ID NO: 96978 - protein, 27 aa, Artificial Sequence
  Cyclic GFR-binding peptide
NDKQQIIQYNKLLLVRGNDLYLMSIAS

SEQ ID NO: 96979 - protein, 27 aa, Artificial Sequence
  Cyclic GFR-binding peptide
NDKQQIIQYNKLYTVVGKDLYLISIAS

SEQ ID NO: 96980 - protein, 27 aa, Artificial Sequence
  Cyclic GFR-binding peptide
SAISILYLDENKNVVLKNYQNDKQQII

SEQ ID NO: 96981 - protein, 27 aa, Artificial Sequence
  Cyclic GFR-binding peptide
SAISILYLDAANNVVLKNYQNDKQQII

SEQ ID NO: 96982 - protein, 27 aa, Artificial Sequence
  Cyclic GFR-binding peptide
SAISMLYLNDKQQIILKNYQNDKQQII

SEQ ID NO: 96983 - protein, 27 aa, Artificial Sequence
  Cyclic GFR-binding peptide
SAISMLYLDNGRVLLLKNYQNDKQQII

SEQ ID NO: 96984 - protein, 27 aa, Artificial Sequence
  Cyclic GFR-binding peptide
SAISILYLDKGVVTYLKNYQNDKQQII

SEQ ID NO: 96985 - protein, 27 aa, Artificial Sequence
  Cyclic GFR-binding peptide
DAANNVVRYKKLIKPTKGIFYLISIAN

SEQ ID NO: 96986 - protein, 29 aa, Artificial Sequence
  Cyclic GFR-binding peptide
DAANNVVRHKRLFIPKKRVIEYYLVSTAS

SEQ ID NO: 96987 - protein, 27 aa, Artificial Sequence
  Cyclic GFR-binding peptide
DAANNVVYHYKLVVKDYEDKYLMSIPS

SEQ ID NO: 96988 - protein, 27 aa, Artificial Sequence
  Cyclic GFR-binding peptide
DAANNVVQYNKLIVNNSSDLYLVSIAS

SEQ ID NO: 96989 - protein, 27 aa, Artificial Sequence
  Cyclic GFR-binding peptide
DAANNVVRYKKLVVKDYEDFYLMSIAN

SEQ ID NO: 96990 - protein, 27 aa, Artificial Sequence
  Cyclic GFR-binding peptide
DAANNVVRYKKLVKPTRGVFYLISIAN

SEQ ID NO: 96991 - protein, 27 aa, Artificial Sequence
  Cyclic GFR-binding peptide
DAANNVVRHKRLVVKENEDYYLMSTAS

SEQ ID NO: 96992 - protein, 27 aa, Artificial Sequence
  Cyclic GFR-binding peptide
DAANNVVYHYKLIKPTKGIKYLISIPS

SEQ ID NO: 96993 - protein, 29 aa, Artificial Sequence
  Cyclic GFR-binding peptide
DAANNVVRYKKLFIPKKRVIEFYLVSIAN

SEQ ID NO: 96994 - protein, 27 aa, Artificial Sequence
  Cyclic GFR-binding peptide
DAANNVVYHYKLVVKENEDKYLMSIPS

SEQ ID NO: 96995 - protein, 27 aa, Artificial Sequence
  Cyclic GFR-binding peptide
DAANNVVRHKRLVKPKRGVYYLISTAS

SEQ ID NO: 96996 - protein, 27 aa, Artificial Sequence
  Cyclic GFR-binding peptide
DAANNVVYHYKLVKPKRGVKYLISIPS

SEQ ID NO: 96997 - protein, 29 aa, Artificial Sequence
  Cyclic GFR-binding peptide
DAANNVVQYNKLFIPKKRVIELYLVSIAS

SEQ ID NO: 96998 - protein, 27 aa, Artificial Sequence
  Cyclic GFR-binding peptide
DAANNVVQYNKLVKPTRGVLYLISIAS

SEQ ID NO: 96999 - protein, 27 aa, Artificial Sequence
  Cyclic GFR-binding peptide
DAANNVVRYKKLVVKENEDFYLMSIAN

SEQ ID NO: 97000 - protein, 27 aa, Artificial Sequence
  Cyclic GFR-binding peptide
DAANNVVQYNKLTPVGMDDLYLVSIAS

SEQ ID NO: 97001 - protein, 27 aa, Artificial Sequence
  Cyclic GFR-binding peptide
DAANNVVRYKKLTPVGMDDFYLVSIAN

SEQ ID NO: 97002 - protein, 27 aa, Artificial Sequence
  Cyclic GFR-binding peptide
DAANNVVRYKKLVKPKRGVFYLISIAN

SEQ ID NO: 97003 - protein, 27 aa, Artificial Sequence
  Cyclic GFR-binding peptide
DAANNVVQYNKLVVKENEDLYLMSIAS

SEQ ID NO: 97004 - protein, 27 aa, Artificial Sequence
  Cyclic GFR-binding peptide
DAANNVVYHYKLIVNSSDDKYLVSIPS

SEQ ID NO: 97005 - protein, 27 aa, Artificial Sequence
  Cyclic GFR-binding peptide
DAANNVVQYNKLVKPKRGVLYLISIAS

SEQ ID NO: 97006 - protein, 27 aa, Artificial Sequence
  Cyclic GFR-binding peptide
DAANNVVRYKKLIVNNSSDFYLVSIAN

SEQ ID NO: 97007 - protein, 27 aa, Artificial Sequence
  Cyclic GFR-binding peptide
DAANNVVRYKKLIVNSSDDFYLVSIAN

SEQ ID NO: 97008 - protein, 27 aa, Artificial Sequence
  Cyclic GFR-binding peptide
DAANNVVRHKRLVKPTRGVYYLISTAS

SEQ ID NO: 97009 - protein, 29 aa, Artificial Sequence
  Cyclic GFR-binding peptide
DAANNVVYHYKLFIPKKRVIEKYLVSIPS

SEQ ID NO: 97010 - protein, 27 aa, Artificial Sequence
  Cyclic GFR-binding peptide
DAANNVVRHKRLIKPTKGIYYLISTAS

SEQ ID NO: 97011 - protein, 27 aa, Artificial Sequence
  Cyclic GFR-binding peptide
DAANNVVRHKRLTPVGMDDYYLVSTAS

SEQ ID NO: 97012 - protein, 27 aa, Artificial Sequence
  Cyclic GFR-binding peptide
DAANNVVYHYKLTPVGMDDKYLVSIPS

SEQ ID NO: 97013 - protein, 27 aa, Artificial Sequence
  Cyclic GFR-binding peptide
DAANNVVYHYKLIVNNSSDKYLVSIPS

SEQ ID NO: 97014 - protein, 27 aa, Artificial Sequence
  Cyclic GFR-binding peptide
DAANNVVRHKRLIVNNSSDYYLVSTAS

SEQ ID NO: 97015 - protein, 27 aa, Artificial Sequence
  Cyclic GFR-binding peptide
DAANNVVYHYKLVKPTRGVKYLISIPS

SEQ ID NO: 97016 - protein, 27 aa, Artificial Sequence
  Cyclic GFR-binding peptide
DAANNVVRHKRLIVNSSDDYYLVSTAS

SEQ ID NO: 97017 - protein, 27 aa, Artificial Sequence
  Cyclic GFR-binding peptide
DAANNVVRHKRLVVKDYEDYYLMSTAS

SEQ ID NO: 97018 - protein, 27 aa, Artificial Sequence
  Cyclic GFR-binding peptide
DAANNVVQYNKLIKPTKGILYLISIAS

SEQ ID NO: 97019 - protein, 27 aa, Artificial Sequence
  Cyclic GFR-binding peptide
DAANNVVQYNKLVVKDYEDLYLMSIAS

SEQ ID NO: 97020 - protein, 27 aa, Artificial Sequence
  Cyclic GFR-binding peptide
DAANNVVQYNKLIVNSSDDLYLVSIAS

SEQ ID NO: 97021 - protein, 27 aa, Artificial Sequence
  Cyclic GFR-binding peptide
NAISILYFIGKTPKILKKYRDAANNVV

SEQ ID NO: 97022 - protein, 29 aa, Artificial Sequence
  Cyclic GFR-binding peptide
SATSVLYYEIVRKKPIFLRKHRDAANNVV

SEQ ID NO: 97023 - protein, 27 aa, Artificial Sequence
  Cyclic GFR-binding peptide
SPISMLYKDEYDKVVLKYHYDAANNVV

SEQ ID NO: 97024 - protein, 27 aa, Artificial Sequence
  Cyclic GFR-binding peptide
SAISVLYLDSSNNVILKNYQDAANNVV

SEQ ID NO: 97025 - protein, 27 aa, Artificial Sequence
  Cyclic GFR-binding peptide
NAISMLYFDEYDKVVLKKYRDAANNVV

SEQ ID NO: 97026 - protein, 27 aa, Artificial Sequence
  Cyclic GFR-binding peptide
NAISILYFVGRTPKVLKKYRDAANNVV

SEQ ID NO: 97027 - protein, 27 aa, Artificial Sequence
  Cyclic GFR-binding peptide
SATSMLYYDENEKVVLRKHRDAANNVV

SEQ ID NO: 97028 - protein, 27 aa, Artificial Sequence
  Cyclic GFR-binding peptide
SPISILYKIGKTPKILKYHYDAANNVV

SEQ ID NO: 97029 - protein, 29 aa, Artificial Sequence
  Cyclic GFR-binding peptide
NAISVLYFEIVRKKPIFLKKYRDAANNVV

SEQ ID NO: 97030 - protein, 27 aa, Artificial Sequence
  Cyclic GFR-binding peptide
SPISMLYKDENEKVVLKYHYDAANNVV

SEQ ID NO: 97031 - protein, 27 aa, Artificial Sequence
  Cyclic GFR-binding peptide
SATSILYYVGRKPKVLRKHRDAANNVV

SEQ ID NO: 97032 - protein, 27 aa, Artificial Sequence
  Cyclic GFR-binding peptide
SPISILYKVGRKPKVLKYHYDAANNVV

SEQ ID NO: 97033 - protein, 29 aa, Artificial Sequence
  Cyclic GFR-binding peptide
SAISVLYLEIVRKKPIFLKNYQDAANNVV

SEQ ID NO: 97034 - protein, 27 aa, Artificial Sequence
  Cyclic GFR-binding peptide
SAISILYLVGRTPKVLKNYQDAANNVV

SEQ ID NO: 97035 - protein, 27 aa, Artificial Sequence
  Cyclic GFR-binding peptide
NAISMLYFDENEKVVLKKYRDAANNVV

SEQ ID NO: 97036 - protein, 27 aa, Artificial Sequence
  Cyclic GFR-binding peptide
SAISVLYLDDMGVPTLKNYQDAANNVV

SEQ ID NO: 97037 - protein, 27 aa, Artificial Sequence
  Cyclic GFR-binding peptide
NAISVLYFDDMGVPTLKKYRDAANNVV

SEQ ID NO: 97038 - protein, 27 aa, Artificial Sequence
  Cyclic GFR-binding peptide
NAISILYFVGRKPKVLKKYRDAANNVV

SEQ ID NO: 97039 - protein, 27 aa, Artificial Sequence
  Cyclic GFR-binding peptide
SAISMLYLDENEKVVLKNYQDAANNVV

SEQ ID NO: 97040 - protein, 27 aa, Artificial Sequence
  Cyclic GFR-binding peptide
SPISVLYKDDSSNVILKYHYDAANNVV

SEQ ID NO: 97041 - protein, 27 aa, Artificial Sequence
  Cyclic GFR-binding peptide
SAISILYLVGRKPKVLKNYQDAANNVV

SEQ ID NO: 97042 - protein, 27 aa, Artificial Sequence
  Cyclic GFR-binding peptide
NAISVLYFDSSNNVILKKYRDAANNVV

SEQ ID NO: 97043 - protein, 27 aa, Artificial Sequence
  Cyclic GFR-binding peptide
NAISVLYFDDSSNVILKKYRDAANNVV

SEQ ID NO: 97044 - protein, 27 aa, Artificial Sequence
  Cyclic GFR-binding peptide
SATSILYYVGRTPKVLRKHRDAANNVV

SEQ ID NO: 97045 - protein, 29 aa, Artificial Sequence
  Cyclic GFR-binding peptide
SPISVLYKEIVRKKPIFLKYHYDAANNVV

SEQ ID NO: 97046 - protein, 27 aa, Artificial Sequence
  Cyclic GFR-binding peptide
SATSILYYIGKTPKILRKHRDAANNVV

SEQ ID NO: 97047 - protein, 27 aa, Artificial Sequence
  Cyclic GFR-binding peptide
SATSVLYYDDMGVPTLRKHRDAANNVV

SEQ ID NO: 97048 - protein, 27 aa, Artificial Sequence
  Cyclic GFR-binding peptide
SPISVLYKDDMGVPTLKYHYDAANNVV

SEQ ID NO: 97049 - protein, 27 aa, Artificial Sequence
  Cyclic GFR-binding peptide
SPISVLYKDSSNNVILKYHYDAANNVV

SEQ ID NO: 97050 - protein, 27 aa, Artificial Sequence
  Cyclic GFR-binding peptide
SATSVLYYDSSNNVILRKHRDAANNVV

SEQ ID NO: 97051 - protein, 27 aa, Artificial Sequence
  Cyclic GFR-binding peptide
SPISILYKVGRTPKVLKYHYDAANNVV

SEQ ID NO: 97052 - protein, 27 aa, Artificial Sequence
  Cyclic GFR-binding peptide
SATSVLYYDDSSNVILRKHRDAANNVV

SEQ ID NO: 97053 - protein, 27 aa, Artificial Sequence
  Cyclic GFR-binding peptide
SATSMLYYDEYDKVVLRKHRDAANNVV

SEQ ID NO: 97054 - protein, 27 aa, Artificial Sequence
  Cyclic GFR-binding peptide
SAISILYLIGKTPKILKNYQDAANNVV

SEQ ID NO: 97055 - protein, 27 aa, Artificial Sequence
  Cyclic GFR-binding peptide
SAISMLYLDEYDKVVLKNYQDAANNVV

SEQ ID NO: 97056 - protein, 27 aa, Artificial Sequence
  Cyclic GFR-binding peptide
SAISVLYLDDSSNVILKNYQDAANNVV

SEQ ID NO: 97057 - protein, 27 aa, Artificial Sequence
  Cyclic GFR-binding peptide
DAANNVVNSLQEVVKDYEDYYLMTLPE

SEQ ID NO: 97058 - protein, 27 aa, Artificial Sequence
  Cyclic GFR-binding peptide
DAANNVVNSLQEIKPTKGIYYVIPLPE

SEQ ID NO: 97059 - protein, 27 aa, Artificial Sequence
  Cyclic GFR-binding peptide
DAANNVVNSLQEVKPKRGVYYLITLPE

SEQ ID NO: 97060 - protein, 27 aa, Artificial Sequence
  Cyclic GFR-binding peptide
DAANNVVNSLQEVKPTRGVYYVIPLPE

SEQ ID NO: 97061 - protein, 27 aa, Artificial Sequence
  Cyclic GFR-binding peptide
DAANNVVEYQKYIVNSSDDIFLVSIPS

SEQ ID NO: 97062 - protein, 27 aa, Artificial Sequence
  Cyclic GFR-binding peptide
DAANNVVEYQKYVKPTRGVIFLISIPS

SEQ ID NO: 97063 - protein, 27 aa, Artificial Sequence
  Cyclic GFR-binding peptide
DAANNVVNSLQEVVKENEDYYLMTLPE

SEQ ID NO: 97064 - protein, 27 aa, Artificial Sequence
  Cyclic GFR-binding peptide
DAANNVVNSLQEVVNNASDYYLITLPE

SEQ ID NO: 97065 - protein, 27 aa, Artificial Sequence
  Cyclic GFR-binding peptide
DAANNVVNSLQEVKPKRGVYYVIPLPE

SEQ ID NO: 97066 - protein, 27 aa, Artificial Sequence
  Cyclic GFR-binding peptide
DAANNVVNSLQEVVNNASDYYVIPLPE

SEQ ID NO: 97067 - protein, 27 aa, Artificial Sequence
  Cyclic GFR-binding peptide
DAANNVVNSLQEVKPTRGVYYLITLPE

SEQ ID NO: 97068 - protein, 27 aa, Artificial Sequence
  Cyclic GFR-binding peptide
DAANNVVEYQKYIKPTKGIIFLISIPS

SEQ ID NO: 97069 - protein, 27 aa, Artificial Sequence
  Cyclic GFR-binding peptide
DAANNVVEYQKYVVNNASDIFLISIPS

SEQ ID NO: 97070 - protein, 27 aa, Artificial Sequence
  Cyclic GFR-binding peptide
DAANNVVNSLQEIVNSSDDYYVVPLPE

SEQ ID NO: 97071 - protein, 27 aa, Artificial Sequence
  Cyclic GFR-binding peptide
DAANNVVNSLQEVVKDYEDYYVMPLPE

SEQ ID NO: 97072 - protein, 27 aa, Artificial Sequence
  Cyclic GFR-binding peptide
DAANNVVEYQKYVVKENEDIFLMSIPS

SEQ ID NO: 97073 - protein, 27 aa, Artificial Sequence
  Cyclic GFR-binding peptide
DAANNVVNSLQEVVKENEDYYVMPLPE

SEQ ID NO: 97074 - protein, 27 aa, Artificial Sequence
  Cyclic GFR-binding peptide
DAANNVVEYQKYVVKDYEDIFLMSIPS

SEQ ID NO: 97075 - protein, 27 aa, Artificial Sequence
  Cyclic GFR-binding peptide
DAANNVVQYNKLVVNNASDLYLISIAS

SEQ ID NO: 97076 - protein, 27 aa, Artificial Sequence
  Cyclic GFR-binding peptide
DAANNVVNSLQEIKPTKGIYYLITLPE

SEQ ID NO: 97077 - protein, 27 aa, Artificial Sequence
  Cyclic GFR-binding peptide
DAANNVVEYQKYVKPKRGVIFLISIPS

SEQ ID NO: 97078 - protein, 27 aa, Artificial Sequence
  Cyclic GFR-binding peptide
DAANNVVRYKKLVVNNASDFYLISIAN

SEQ ID NO: 97079 - protein, 27 aa, Artificial Sequence
  Cyclic GFR-binding peptide
DAANNVVNSLQEIVNSSDDYYLVTLPE

SEQ ID NO: 97080 - protein, 27 aa, Artificial Sequence
  Cyclic GFR-binding peptide
EPLTMLYYDEYDKVVEQLSNDAANNVV

SEQ ID NO: 97081 - protein, 27 aa, Artificial Sequence
  Cyclic GFR-binding peptide
EPLPIVYYIGKTPKIEQLSNDAANNVV

SEQ ID NO: 97082 - protein, 27 aa, Artificial Sequence
  Cyclic GFR-binding peptide
EPLTILYYVGRKPKVEQLSNDAANNVV

SEQ ID NO: 97083 - protein, 27 aa, Artificial Sequence
  Cyclic GFR-binding peptide
EPLPIVYYVGRTPKVEQLSNDAANNVV

SEQ ID NO: 97084 - protein, 27 aa, Artificial Sequence
  Cyclic GFR-binding peptide
SPISVLFIDDSSNVIYKQYEDAANNVV

SEQ ID NO: 97085 - protein, 27 aa, Artificial Sequence
  Cyclic GFR-binding peptide
SPISILFIVGRTPKVYKQYEDAANNVV

SEQ ID NO: 97086 - protein, 27 aa, Artificial Sequence
  Cyclic GFR-binding peptide
EPLTMLYYDENEKVVEQLSNDAANNVV

SEQ ID NO: 97087 - protein, 27 aa, Artificial Sequence
  Cyclic GFR-binding peptide
EPLTILYYDSANNVVEQLSNDAANNVV

SEQ ID NO: 97088 - protein, 27 aa, Artificial Sequence
  Cyclic GFR-binding peptide
EPLPIVYYVGRKPKVEQLSNDAANNVV

SEQ ID NO: 97089 - protein, 27 aa, Artificial Sequence
  Cyclic GFR-binding peptide
EPLPIVYYDSANNVVEQLSNDAANNVV

SEQ ID NO: 97090 - protein, 27 aa, Artificial Sequence
  Cyclic GFR-binding peptide
EPLTILYYVGRTPKVEQLSNDAANNVV

SEQ ID NO: 97091 - protein, 27 aa, Artificial Sequence
  Cyclic GFR-binding peptide
SPISILFIIGKTPKIYKQYEDAANNVV

SEQ ID NO: 97092 - protein, 27 aa, Artificial Sequence
  Cyclic GFR-binding peptide
SPISILFIDSANNVVYKQYEDAANNVV

SEQ ID NO: 97093 - protein, 27 aa, Artificial Sequence
  Cyclic GFR-binding peptide
EPLPVVYYDDSSNVIEQLSNDAANNVV

SEQ ID NO: 97094 - protein, 27 aa, Artificial Sequence
  Cyclic GFR-binding peptide
EPLPMVYYDEYDKVVEQLSNDAANNVV

SEQ ID NO: 97095 - protein, 27 aa, Artificial Sequence
  Cyclic GFR-binding peptide
SPISMLFIDENEKVVYKQYEDAANNVV

SEQ ID NO: 97096 - protein, 27 aa, Artificial Sequence
  Cyclic GFR-binding peptide
EPLPMVYYDENEKVVEQLSNDAANNVV

SEQ ID NO: 97097 - protein, 27 aa, Artificial Sequence
  Cyclic GFR-binding peptide
SPISMLFIDEYDKVVYKQYEDAANNVV

SEQ ID NO: 97098 - protein, 27 aa, Artificial Sequence
  Cyclic GFR-binding peptide
SAISILYLDSANNVVLKNYQDAANNVV

SEQ ID NO: 97099 - protein, 27 aa, Artificial Sequence
  Cyclic GFR-binding peptide
EPLTILYYIGKTPKIEQLSNDAANNVV

SEQ ID NO: 97100 - protein, 27 aa, Artificial Sequence
  Cyclic GFR-binding peptide
SPISILFIVGRKPKVYKQYEDAANNVV

SEQ ID NO: 97101 - protein, 27 aa, Artificial Sequence
  Cyclic GFR-binding peptide
NAISILYFDSANNVVLKKYRDAANNVV

SEQ ID NO: 97102 - protein, 27 aa, Artificial Sequence
  Cyclic GFR-binding peptide
EPLTVLYYDDSSNVIEQLSNDAANNVV

SEQ ID NO: 97103 - protein, 29 aa, Artificial Sequence
  Cyclic GFR-binding peptide
DAANNVVVTAKKLKPKKRVYEIKRVQVPR

SEQ ID NO: 97104 - protein, 29 aa, Artificial Sequence
  Cyclic GFR-binding peptide
DAANNVVVQVEKLKPKKRVYEVKAVKVSR

SEQ ID NO: 97105 - protein, 29 aa, Artificial Sequence
  Cyclic GFR-binding peptide
DAANNVVVQVEKFIPKKRVIEVKAVKVSR

SEQ ID NO: 97106 - protein, 29 aa, Artificial Sequence
  Cyclic GFR-binding peptide
DAANNVVVQVEKHQGQHPKIRVKAMKVSR

SEQ ID NO: 97107 - protein, 29 aa, Artificial Sequence
  Cyclic GFR-binding peptide
DAANNVVVTAKKHQGQHPKIRIKRMQVPR

SEQ ID NO: 97108 - protein, 29 aa, Artificial Sequence
  Cyclic GFR-binding peptide
DAANNVVSMEGLLKPKKRVYEMIQVTINS

SEQ ID NO: 97109 - protein, 29 aa, Artificial Sequence
  Cyclic GFR-binding peptide
DAANNVVSMEGIFIPKKRVIEMIQVTINS

SEQ ID NO: 97110 - protein, 29 aa, Artificial Sequence
  Cyclic GFR-binding peptide
DAANNVVSMEGLHQGQHPKIRMIQMTINS

SEQ ID NO: 97111 - protein, 29 aa, Artificial Sequence
  Cyclic GFR-binding peptide
DAANNVVSMEGILKPKKRVYEMIQVTINS

SEQ ID NO: 97112 - protein, 29 aa, Artificial Sequence
  Cyclic GFR-binding peptide
DAANNVVSMEGLFIPKKRVIEMIQVTINS

SEQ ID NO: 97113 - protein, 29 aa, Artificial Sequence
  Cyclic GFR-binding peptide
DAANNVVVTAKKFIPKKRVIEIKRVQVPR

SEQ ID NO: 97114 - protein, 29 aa, Artificial Sequence
  Cyclic GFR-binding peptide
DAANNVVSMEGIHQGQHPKIRMIQMTINS

SEQ ID NO: 97115 - protein, 29 aa, Artificial Sequence
  Cyclic GFR-binding peptide
RPVQVRKIEYVRKKPKLKKATVDAANNVV

SEQ ID NO: 97116 - protein, 29 aa, Artificial Sequence
  Cyclic GFR-binding peptide
RSVKVAKVEYVRKKPKLKEVQVDAANNVV

SEQ ID NO: 97117 - protein, 29 aa, Artificial Sequence
  Cyclic GFR-binding peptide
RSVKVAKVEIVRKKPIFKEVQVDAANNVV

SEQ ID NO: 97118 - protein, 29 aa, Artificial Sequence
  Cyclic GFR-binding peptide
RSVKMAKVRIKPHQGQHKEVQVDAANNVV

SEQ ID NO: 97119 - protein, 29 aa, Artificial Sequence
  Cyclic GFR-binding peptide
RPVQMRKIRIKPHQGQHKKATVDAANNVV

SEQ ID NO: 97120 - protein, 29 aa, Artificial Sequence
  Cyclic GFR-binding peptide
SNITVQIMEYVRKKPKLLGEMSDAANNVV

SEQ ID NO: 97121 - protein, 29 aa, Artificial Sequence
  Cyclic GFR-binding peptide
SNITVQIMEIVRKKPIFIGEMSDAANNVV

SEQ ID NO: 97122 - protein, 29 aa, Artificial Sequence
  Cyclic GFR-binding peptide
SNITMQIMRIKPHQGQHLGEMSDAANNVV

SEQ ID NO: 97123 - protein, 29 aa, Artificial Sequence
  Cyclic GFR-binding peptide
SNITVQIMEYVRKKPKLIGEMSDAANNVV

SEQ ID NO: 97124 - protein, 29 aa, Artificial Sequence
  Cyclic GFR-binding peptide
SNITVQIMEIVRKKPIFLGEMSDAANNVV

SEQ ID NO: 97125 - protein, 29 aa, Artificial Sequence
  Cyclic GFR-binding peptide
RPVQVRKIEIVRKKPIFKKATVDAANNVV

SEQ ID NO: 97126 - protein, 29 aa, Artificial Sequence
  Cyclic GFR-binding peptide
SNITMQIMRIKPHQGQHIGEMSDAANNVV

SEQ ID NO: 97127 - protein, 27 aa, Artificial Sequence
  Cyclic GFR-binding peptide
DAANNVVEYKFKVKPTRGVLYLISIPE

SEQ ID NO: 97128 - protein, 27 aa, Artificial Sequence
  Cyclic GFR-binding peptide
DAANNVVEYKFKTPVGMDDLYLVSIPE

SEQ ID NO: 97129 - protein, 27 aa, Artificial Sequence
  Cyclic GFR-binding peptide
DAANNVVEYQKYVKPKRGVIYLISIPS

SEQ ID NO: 97130 - protein, 27 aa, Artificial Sequence
  Cyclic GFR-binding peptide
DAANNVVEYQKYVVKDYEDIYLMSIPS

SEQ ID NO: 97131 - protein, 27 aa, Artificial Sequence
  Cyclic GFR-binding peptide
DAANNVVEYKFKIKPTKGILYLISIPE

SEQ ID NO: 97132 - protein, 27 aa, Artificial Sequence
  Cyclic GFR-binding peptide
DAANNVVYHYKLYTVVGKDKYLISIPS

SEQ ID NO: 97133 - protein, 27 aa, Artificial Sequence
  Cyclic GFR-binding peptide
DAANNVVRYKKLYTVVGKDFYLISIAN

SEQ ID NO: 97134 - protein, 27 aa, Artificial Sequence
  Cyclic GFR-binding peptide
DAANNVVEYQKYVVNNAADIYLISIPS

SEQ ID NO: 97135 - protein, 27 aa, Artificial Sequence
  Cyclic GFR-binding peptide
DAANNVVEYQKYVKPTRGVIYLISIPS

SEQ ID NO: 97136 - protein, 27 aa, Artificial Sequence
  Cyclic GFR-binding peptide
DAANNVVEYQKYTPVGMDDIYLVSIPS

SEQ ID NO: 97137 - protein, 27 aa, Artificial Sequence
  Cyclic GFR-binding peptide
DAANNVVEYKFKVVKDYEDLYLMSIPE

SEQ ID NO: 97138 - protein, 27 aa, Artificial Sequence
  Cyclic GFR-binding peptide
DAANNVVEYKFKVVNNAADLYLISIPE

SEQ ID NO: 97139 - protein, 27 aa, Artificial Sequence
  Cyclic GFR-binding peptide
DAANNVVEYQKYVVKENEDIYLMSIPS

SEQ ID NO: 97140 - protein, 27 aa, Artificial Sequence
  Cyclic GFR-binding peptide
DAANNVVEYQKYIKPTKGIIYLISIPS

SEQ ID NO: 97141 - protein, 27 aa, Artificial Sequence
  Cyclic GFR-binding peptide
DAANNVVRYKKLVVNNAADFYLISIAN

SEQ ID NO: 97142 - protein, 27 aa, Artificial Sequence
  Cyclic GFR-binding peptide
DAANNVVYHYKLVVNNAADKYLISIPS

SEQ ID NO: 97143 - protein, 27 aa, Artificial Sequence
  Cyclic GFR-binding peptide
DAANNVVEYKFKIVNNSSDLYLVSIPE

SEQ ID NO: 97144 - protein, 27 aa, Artificial Sequence
  Cyclic GFR-binding peptide
DAANNVVEYQKYIVNSSDDIYLVSIPS

SEQ ID NO: 97145 - protein, 27 aa, Artificial Sequence
  Cyclic GFR-binding peptide
DAANNVVEYKFKIVNSSDDLYLVSIPE

SEQ ID NO: 97146 - protein, 27 aa, Artificial Sequence
  Cyclic GFR-binding peptide
DAANNVVEYKFKVKPKRGVLYLISIPE

SEQ ID NO: 97147 - protein, 27 aa, Artificial Sequence
  Cyclic GFR-binding peptide
DAANNVVEYQKYYTVVGKDIYLISIPS

SEQ ID NO: 97148 - protein, 27 aa, Artificial Sequence
  Cyclic GFR-binding peptide
DAANNVVEYKFKVVKENEDLYLMSIPE

SEQ ID NO: 97149 - protein, 27 aa, Artificial Sequence
  Cyclic GFR-binding peptide
DAANNVVEYQKYIVNNSSDIYLVSIPS

SEQ ID NO: 97150 - protein, 27 aa, Artificial Sequence
  Cyclic GFR-binding peptide
DAANNVVEYKFKYTVVGKDLYLISIPE

SEQ ID NO: 97151 - protein, 27 aa, Artificial Sequence
  Cyclic GFR-binding peptide
EPISILYLVGRTPKVKFKYEDAANNVV

SEQ ID NO: 97152 - protein, 27 aa, Artificial Sequence
  Cyclic GFR-binding peptide
EPISVLYLDDMGVPTKFKYEDAANNVV

SEQ ID NO: 97153 - protein, 27 aa, Artificial Sequence
  Cyclic GFR-binding peptide
SPISILYIVGRKPKVYKQYEDAANNVV

SEQ ID NO: 97154 - protein, 27 aa, Artificial Sequence
  Cyclic GFR-binding peptide
SPISMLYIDEYDKVVYKQYEDAANNVV

SEQ ID NO: 97155 - protein, 27 aa, Artificial Sequence
  Cyclic GFR-binding peptide
EPISILYLIGKTPKIKFKYEDAANNVV

SEQ ID NO: 97156 - protein, 27 aa, Artificial Sequence
  Cyclic GFR-binding peptide
SPISILYKDKGVVTYLKYHYDAANNVV

SEQ ID NO: 97157 - protein, 27 aa, Artificial Sequence
  Cyclic GFR-binding peptide
NAISILYFDKGVVTYLKKYRDAANNVV

SEQ ID NO: 97158 - protein, 27 aa, Artificial Sequence
  Cyclic GFR-binding peptide
SPISILYIDAANNVVYKQYEDAANNVV

SEQ ID NO: 97159 - protein, 27 aa, Artificial Sequence
  Cyclic GFR-binding peptide
SPISILYIVGRTPKVYKQYEDAANNVV

SEQ ID NO: 97160 - protein, 27 aa, Artificial Sequence
  Cyclic GFR-binding peptide
SPISVLYIDDMGVPTYKQYEDAANNVV

SEQ ID NO: 97161 - protein, 27 aa, Artificial Sequence
  Cyclic GFR-binding peptide
EPISMLYLDEYDKVVKFKYEDAANNVV

SEQ ID NO: 97162 - protein, 27 aa, Artificial Sequence
  Cyclic GFR-binding peptide
EPISILYLDAANNVVKFKYEDAANNVV

SEQ ID NO: 97163 - protein, 27 aa, Artificial Sequence
  Cyclic GFR-binding peptide
SPISMLYIDENEKVVYKQYEDAANNVV

SEQ ID NO: 97164 - protein, 27 aa, Artificial Sequence
  Cyclic GFR-binding peptide
SPISILYIIGKTPKIYKQYEDAANNVV

SEQ ID NO: 97165 - protein, 27 aa, Artificial Sequence
  Cyclic GFR-binding peptide
NAISILYFDAANNVVLKKYRDAANNVV

SEQ ID NO: 97166 - protein, 27 aa, Artificial Sequence
  Cyclic GFR-binding peptide
SPISILYKDAANNVVLKYHYDAANNVV

SEQ ID NO: 97167 - protein, 27 aa, Artificial Sequence
  Cyclic GFR-binding peptide
EPISVLYLDSSNNVIKFKYEDAANNVV

SEQ ID NO: 97168 - protein, 27 aa, Artificial Sequence
  Cyclic GFR-binding peptide
SPISVLYIDDSSNVIYKQYEDAANNVV

SEQ ID NO: 97169 - protein, 27 aa, Artificial Sequence
  Cyclic GFR-binding peptide
EPISVLYLDDSSNVIKFKYEDAANNVV

SEQ ID NO: 97170 - protein, 27 aa, Artificial Sequence
  Cyclic GFR-binding peptide
EPISILYLVGRKPKVKFKYEDAANNVV

SEQ ID NO: 97171 - protein, 27 aa, Artificial Sequence
  Cyclic GFR-binding peptide
SPISILYIDKGVVTYYKQYEDAANNVV

SEQ ID NO: 97172 - protein, 27 aa, Artificial Sequence
  Cyclic GFR-binding peptide
EPISMLYLDENEKVVKFKYEDAANNVV

SEQ ID NO: 97173 - protein, 27 aa, Artificial Sequence
  Cyclic GFR-binding peptide
SPISVLYIDSSNNVIYKQYEDAANNVV

SEQ ID NO: 97174 - protein, 27 aa, Artificial Sequence
  Cyclic GFR-binding peptide
EPISILYLDKGVVTYKFKYEDAANNVV

SEQ ID NO: 97175 - protein, 27 aa, Artificial Sequence
  Cyclic GFR-binding peptide
DAANNVVPIKGYIIQQKDNFYLMNIPS

SEQ ID NO: 97176 - protein, 27 aa, Artificial Sequence
  Cyclic GFR-binding peptide
DAANNVVPIKGYVVKDYEDFYLMNIPS

SEQ ID NO: 97177 - protein, 27 aa, Artificial Sequence
  Cyclic GFR-binding peptide
DAANNVVPIKGYIVNSSDDFYLVNIPS

SEQ ID NO: 97178 - protein, 27 aa, Artificial Sequence
  Cyclic GFR-binding peptide
DAANNVVPIKGYVVNNAADFYLINIPS

SEQ ID NO: 97179 - protein, 27 aa, Artificial Sequence
  Cyclic GFR-binding peptide
DAANNVVPIKGYYTVVGKDFYLINIPS

SEQ ID NO: 97180 - protein, 27 aa, Artificial Sequence
  Cyclic GFR-binding peptide
DAANNVVPIKGYLLVRGNDFYLMNIPS

SEQ ID NO: 97181 - protein, 27 aa, Artificial Sequence
  Cyclic GFR-binding peptide
DAANNVVPIKGYVVKENEDFYLMNIPS

SEQ ID NO: 97182 - protein, 27 aa, Artificial Sequence
  Cyclic GFR-binding peptide
DAANNVVPIKGYVVNNASDFYLINIPS

SEQ ID NO: 97183 - protein, 27 aa, Artificial Sequence
  Cyclic GFR-binding peptide
DAANNVVPIKGYTPVGMDDFYLVNIPS

SEQ ID NO: 97184 - protein, 27 aa, Artificial Sequence
  Cyclic GFR-binding peptide
DAANNVVPIKGYIVNNSSDFYLVNIPS

SEQ ID NO: 97185 - protein, 27 aa, Artificial Sequence
  Cyclic GFR-binding peptide
SPINMLYFNDKQQIIYGKIPDAANNVV

SEQ ID NO: 97186 - protein, 27 aa, Artificial Sequence
  Cyclic GFR-binding peptide
SPINMLYFDEYDKVVYGKIPDAANNVV

SEQ ID NO: 97187 - protein, 27 aa, Artificial Sequence
  Cyclic GFR-binding peptide
SPINVLYFDDSSNVIYGKIPDAANNVV

SEQ ID NO: 97188 - protein, 27 aa, Artificial Sequence
  Cyclic GFR-binding peptide
SPINILYFDAANNVVYGKIPDAANNVV

SEQ ID NO: 97189 - protein, 27 aa, Artificial Sequence
  Cyclic GFR-binding peptide
SPINILYFDKGVVTYYGKIPDAANNVV

SEQ ID NO: 97190 - protein, 27 aa, Artificial Sequence
  Cyclic GFR-binding peptide
SPINMLYFDNGRVLLYGKIPDAANNVV

SEQ ID NO: 97191 - protein, 27 aa, Artificial Sequence
  Cyclic GFR-binding peptide
SPINMLYFDENEKVVYGKIPDAANNVV

SEQ ID NO: 97192 - protein, 27 aa, Artificial Sequence
  Cyclic GFR-binding peptide
SPINILYFDSANNVVYGKIPDAANNVV

SEQ ID NO: 97193 - protein, 27 aa, Artificial Sequence
  Cyclic GFR-binding peptide
SPINVLYFDDMGVPTYGKIPDAANNVV

SEQ ID NO: 97194 - protein, 27 aa, Artificial Sequence
  Cyclic GFR-binding peptide
SPINVLYFDSSNNVIYGKIPDAANNVV

SEQ ID NO: 97195 - protein, 27 aa, Artificial Sequence
  Cyclic GFR-binding peptide
DAANNVVEYQKYVVNNASDIYLISIPS

SEQ ID NO: 97196 - protein, 27 aa, Artificial Sequence
  Cyclic GFR-binding peptide
DAANNVVEYQKYIIQQKDNIYLMSIPS

SEQ ID NO: 97197 - protein, 27 aa, Artificial Sequence
  Cyclic GFR-binding peptide
DAANNVVEYQKYLLVRGNDIYLMSIPS

SEQ ID NO: 97198 - protein, 27 aa, Artificial Sequence
  Cyclic GFR-binding peptide
SPISILYIDSANNVVYKQYEDAANNVV

SEQ ID NO: 97199 - protein, 27 aa, Artificial Sequence
  Cyclic GFR-binding peptide
SPISMLYINDKQQIIYKQYEDAANNVV

SEQ ID NO: 97200 - protein, 27 aa, Artificial Sequence
  Cyclic GFR-binding peptide
SPISMLYIDNGRVLLYKQYEDAANNVV

SEQ ID NO: 97201 - protein, 27 aa, Artificial Sequence
  Cyclic GFR-binding peptide
DAANNVVPYVKLYTVVGKDFFLISLSS

SEQ ID NO: 97202 - protein, 27 aa, Artificial Sequence
  Cyclic GFR-binding peptide
DAANNVVPYVKLIKPTKGIFFLISLSS

SEQ ID NO: 97203 - protein, 27 aa, Artificial Sequence
  Cyclic GFR-binding peptide
DAANNVVPYVKLIIQQKDNFFLMSLSS

SEQ ID NO: 97204 - protein, 27 aa, Artificial Sequence
  Cyclic GFR-binding peptide
DAANNVVPYVKLIVNSSDDFFLVSLSS

SEQ ID NO: 97205 - protein, 27 aa, Artificial Sequence
  Cyclic GFR-binding peptide
DAANNVVPYVKLVKPKRGVFFLISLSS

SEQ ID NO: 97206 - protein, 27 aa, Artificial Sequence
  Cyclic GFR-binding peptide
DAANNVVPYVKLVKPTRGVFFLISLSS

SEQ ID NO: 97207 - protein, 27 aa, Artificial Sequence
  Cyclic GFR-binding peptide
DAANNVVPYVKLTPVGMDDFFLVSLSS

SEQ ID NO: 97208 - protein, 29 aa, Artificial Sequence
  Cyclic GFR-binding peptide
DAANNVVPYVKLHQGQHPKIRFFLMSLSS

SEQ ID NO: 97209 - protein, 27 aa, Artificial Sequence
  Cyclic GFR-binding peptide
DAANNVVPYVKLVVNKNEDFFLISLSS

SEQ ID NO: 97210 - protein, 27 aa, Artificial Sequence
  Cyclic GFR-binding peptide
DAANNVVPYVKLVVNNASDFFLISLSS

SEQ ID NO: 97211 - protein, 27 aa, Artificial Sequence
  Cyclic GFR-binding peptide
DAANNVVPYVKLVVKENEDFFLMSLSS

SEQ ID NO: 97212 - protein, 27 aa, Artificial Sequence
  Cyclic GFR-binding peptide
DAANNVVPYVKLIVNNSSDFFLVSLSS

SEQ ID NO: 97213 - protein, 29 aa, Artificial Sequence
  Cyclic GFR-binding peptide
DAANNVVPYVKLLKPKKRVYEFFLVSLSS

SEQ ID NO: 97214 - protein, 27 aa, Artificial Sequence
  Cyclic GFR-binding peptide
DAANNVVPYVKLLLVRGNDFFLMSLSS

SEQ ID NO: 97215 - protein, 27 aa, Artificial Sequence
  Cyclic GFR-binding peptide
DAANNVVPYVKLVVKDYEDFFLMSLSS

SEQ ID NO: 97216 - protein, 27 aa, Artificial Sequence
  Cyclic GFR-binding peptide
DAANNVVPYVKLVVNNAADFFLISLSS

SEQ ID NO: 97217 - protein, 27 aa, Artificial Sequence
  Cyclic GFR-binding peptide
SSLSILFFDKGVVTYLKVYPDAANNVV

SEQ ID NO: 97218 - protein, 27 aa, Artificial Sequence
  Cyclic GFR-binding peptide
SSLSILFFIGKTPKILKVYPDAANNVV

SEQ ID NO: 97219 - protein, 27 aa, Artificial Sequence
  Cyclic GFR-binding peptide
SSLSMLFFNDKQQIILKVYPDAANNVV

SEQ ID NO: 97220 - protein, 27 aa, Artificial Sequence
  Cyclic GFR-binding peptide
SSLSVLFFDDSSNVILKVYPDAANNVV

SEQ ID NO: 97221 - protein, 27 aa, Artificial Sequence
  Cyclic GFR-binding peptide
SSLSILFFVGRKPKVLKVYPDAANNVV

SEQ ID NO: 97222 - protein, 27 aa, Artificial Sequence
  Cyclic GFR-binding peptide
SSLSILFFVGRTPKVLKVYPDAANNVV

SEQ ID NO: 97223 - protein, 27 aa, Artificial Sequence
  Cyclic GFR-binding peptide
SSLSVLFFDDMGVPTLKVYPDAANNVV

SEQ ID NO: 97224 - protein, 29 aa, Artificial Sequence
  Cyclic GFR-binding peptide
SSLSMLFFRIKPHQGQHLKVYPDAANNVV

SEQ ID NO: 97225 - protein, 27 aa, Artificial Sequence
  Cyclic GFR-binding peptide
SSLSILFFDENKNVVLKVYPDAANNVV

SEQ ID NO: 97226 - protein, 27 aa, Artificial Sequence
  Cyclic GFR-binding peptide
SSLSILFFDSANNVVLKVYPDAANNVV

SEQ ID NO: 97227 - protein, 27 aa, Artificial Sequence
  Cyclic GFR-binding peptide
SSLSMLFFDENEKVVLKVYPDAANNVV

SEQ ID NO: 97228 - protein, 27 aa, Artificial Sequence
  Cyclic GFR-binding peptide
SSLSVLFFDSSNNVILKVYPDAANNVV

SEQ ID NO: 97229 - protein, 29 aa, Artificial Sequence
  Cyclic GFR-binding peptide
SSLSVLFFEYVRKKPKLLKVYPDAANNVV

SEQ ID NO: 97230 - protein, 27 aa, Artificial Sequence
  Cyclic GFR-binding peptide
SSLSMLFFDNGRVLLLKVYPDAANNVV

SEQ ID NO: 97231 - protein, 27 aa, Artificial Sequence
  Cyclic GFR-binding peptide
SSLSMLFFDEYDKVVLKVYPDAANNVV

SEQ ID NO: 97232 - protein, 27 aa, Artificial Sequence
  Cyclic GFR-binding peptide
SSLSILFFDAANNVVLKVYPDAANNVV

SEQ ID NO: 97233 - protein, 27 aa, Artificial Sequence
  Cyclic GFR-binding peptide
DAANNVVSMEGIIVNSSDDMIQVTINS

SEQ ID NO: 97234 - protein, 27 aa, Artificial Sequence
  Cyclic GFR-binding peptide
DAANNVVVTAKKVVKENEDIKRMQVPR

SEQ ID NO: 97235 - protein, 27 aa, Artificial Sequence
  Cyclic GFR-binding peptide
DAANNVVSMEGIVVKDYEDMIQMTINS

SEQ ID NO: 97236 - protein, 27 aa, Artificial Sequence
  Cyclic GFR-binding peptide
DAANNVVVTAKKIKPTKGIIKRIQVPR

SEQ ID NO: 97237 - protein, 27 aa, Artificial Sequence
  Cyclic GFR-binding peptide
DAANNVVSMEGIVKPTRGVMIQITINS

SEQ ID NO: 97238 - protein, 29 aa, Artificial Sequence
  Cyclic GFR-binding peptide
DAANNVVNSLQEFIPKKRVIEYYVVPLPE

SEQ ID NO: 97239 - protein, 27 aa, Artificial Sequence
  Cyclic GFR-binding peptide
DAANNVVVQVEKVKPKRGVVKAIKVSR

SEQ ID NO: 97240 - protein, 27 aa, Artificial Sequence
  Cyclic GFR-binding peptide
DAANNVVVQVEKVVKENEDVKAMKVSR

SEQ ID NO: 97241 - protein, 27 aa, Artificial Sequence
  Cyclic GFR-binding peptide
DAANNVVVTAKKIVNSSDDIKRVQVPR

SEQ ID NO: 97242 - protein, 27 aa, Artificial Sequence
  Cyclic GFR-binding peptide
DAANNVVVQVEKIKPTKGIVKAIKVSR

SEQ ID NO: 97243 - protein, 29 aa, Artificial Sequence
  Cyclic GFR-binding peptide
DAANNVVNSLQEFIPKKRVIEYYLVTLPE

SEQ ID NO: 97244 - protein, 27 aa, Artificial Sequence
  Cyclic GFR-binding peptide
DAANNVVVQVEKIVNSSDDVKAVKVSR

SEQ ID NO: 97245 - protein, 27 aa, Artificial Sequence
  Cyclic GFR-binding peptide
DAANNVVVTAKKVKPKRGVIKRIQVPR

SEQ ID NO: 97246 - protein, 27 aa, Artificial Sequence
  Cyclic GFR-binding peptide
DAANNVVVQVEKVKPTRGVVKAIKVSR

SEQ ID NO: 97247 - protein, 27 aa, Artificial Sequence
  Cyclic GFR-binding peptide
DAANNVVVTAKKVKPTRGVIKRIQVPR

SEQ ID NO: 97248 - protein, 29 aa, Artificial Sequence
  Cyclic GFR-binding peptide
DAANNVVNSLQELKPKKRVYEYYLVTLPE

SEQ ID NO: 97249 - protein, 27 aa, Artificial Sequence
  Cyclic GFR-binding peptide
DAANNVVSMEGIVKPKRGVMIQITINS

SEQ ID NO: 97250 - protein, 27 aa, Artificial Sequence
  Cyclic GFR-binding peptide
DAANNVVSMEGIVVKENEDMIQMTINS

SEQ ID NO: 97251 - protein, 27 aa, Artificial Sequence
  Cyclic GFR-binding peptide
DAANNVVSMEGIIKPTKGIMIQITINS

SEQ ID NO: 97252 - protein, 29 aa, Artificial Sequence
  Cyclic GFR-binding peptide
DAANNVVNSLQEHQGQHPKIRYYLMTLPE

SEQ ID NO: 97253 - protein, 27 aa, Artificial Sequence
  Cyclic GFR-binding peptide
DAANNVVVTAKKVVKDYEDIKRMQVPR

SEQ ID NO: 97254 - protein, 29 aa, Artificial Sequence
  Cyclic GFR-binding peptide
DAANNVVNSLQEHQGQHPKIRYYVMPLPE

SEQ ID NO: 97255 - protein, 29 aa, Artificial Sequence
  Cyclic GFR-binding peptide
DAANNVVNSLQELKPKKRVYEYYVVPLPE

SEQ ID NO: 97256 - protein, 27 aa, Artificial Sequence
  Cyclic GFR-binding peptide
DAANNVVVQVEKVVKDYEDVKAMKVSR

SEQ ID NO: 97257 - protein, 27 aa, Artificial Sequence
  Cyclic GFR-binding peptide
SNITVQIMDDSSNVIIGEMSDAANNVV

SEQ ID NO: 97258 - protein, 27 aa, Artificial Sequence
  Cyclic GFR-binding peptide
RPVQMRKIDENEKVVKKATVDAANNVV

SEQ ID NO: 97259 - protein, 27 aa, Artificial Sequence
  Cyclic GFR-binding peptide
SNITMQIMDEYDKVVIGEMSDAANNVV

SEQ ID NO: 97260 - protein, 27 aa, Artificial Sequence
  Cyclic GFR-binding peptide
RPVQIRKIIGKTPKIKKATVDAANNVV

SEQ ID NO: 97261 - protein, 27 aa, Artificial Sequence
  Cyclic GFR-binding peptide
SNITIQIMVGRTPKVIGEMSDAANNVV

SEQ ID NO: 97262 - protein, 29 aa, Artificial Sequence
  Cyclic GFR-binding peptide
EPLPVVYYEIVRKKPIFEQLSNDAANNVV

SEQ ID NO: 97263 - protein, 27 aa, Artificial Sequence
  Cyclic GFR-binding peptide
RSVKIAKVVGRKPKVKEVQVDAANNVV

SEQ ID NO: 97264 - protein, 27 aa, Artificial Sequence
  Cyclic GFR-binding peptide
RSVKMAKVDENEKVVKEVQVDAANNVV

SEQ ID NO: 97265 - protein, 27 aa, Artificial Sequence
  Cyclic GFR-binding peptide
RPVQVRKIDDSSNVIKKATVDAANNVV

SEQ ID NO: 97266 - protein, 27 aa, Artificial Sequence
  Cyclic GFR-binding peptide
RSVKIAKVIGKTPKIKEVQVDAANNVV

SEQ ID NO: 97267 - protein, 29 aa, Artificial Sequence
  Cyclic GFR-binding peptide
EPLTVLYYEIVRKKPIFEQLSNDAANNVV

SEQ ID NO: 97268 - protein, 27 aa, Artificial Sequence
  Cyclic GFR-binding peptide
RSVKVAKVDDSSNVIKEVQVDAANNVV

SEQ ID NO: 97269 - protein, 27 aa, Artificial Sequence
  Cyclic GFR-binding peptide
RPVQIRKIVGRKPKVKKATVDAANNVV

SEQ ID NO: 97270 - protein, 27 aa, Artificial Sequence
  Cyclic GFR-binding peptide
RSVKIAKVVGRTPKVKEVQVDAANNVV

SEQ ID NO: 97271 - protein, 27 aa, Artificial Sequence
  Cyclic GFR-binding peptide
RPVQIRKIVGRTPKVKKATVDAANNVV

SEQ ID NO: 97272 - protein, 29 aa, Artificial Sequence
  Cyclic GFR-binding peptide
EPLTVLYYEYVRKKPKLEQLSNDAANNVV

SEQ ID NO: 97273 - protein, 27 aa, Artificial Sequence
  Cyclic GFR-binding peptide
SNITIQIMVGRKPKVIGEMSDAANNVV

SEQ ID NO: 97274 - protein, 27 aa, Artificial Sequence
  Cyclic GFR-binding peptide
SNITMQIMDENEKVVIGEMSDAANNVV

SEQ ID NO: 97275 - protein, 27 aa, Artificial Sequence
  Cyclic GFR-binding peptide
SNITIQIMIGKTPKIIGEMSDAANNVV

SEQ ID NO: 97276 - protein, 29 aa, Artificial Sequence
  Cyclic GFR-binding peptide
EPLTMLYYRIKPHQGQHEQLSNDAANNVV

SEQ ID NO: 97277 - protein, 27 aa, Artificial Sequence
  Cyclic GFR-binding peptide
RPVQMRKIDEYDKVVKKATVDAANNVV

SEQ ID NO: 97278 - protein, 29 aa, Artificial Sequence
  Cyclic GFR-binding peptide
EPLPMVYYRIKPHQGQHEQLSNDAANNVV

SEQ ID NO: 97279 - protein, 29 aa, Artificial Sequence
  Cyclic GFR-binding peptide
EPLPVVYYEYVRKKPKLEQLSNDAANNVV

SEQ ID NO: 97280 - protein, 27 aa, Artificial Sequence
  Cyclic GFR-binding peptide
RSVKMAKVDEYDKVVKEVQVDAANNVV

SEQ ID NO: 97281 - protein, 27 aa, Artificial Sequence
  Cyclic GFR-binding peptide
DAANNVVRYKKLIIQQKDNFYLMSIAN

SEQ ID NO: 97282 - protein, 27 aa, Artificial Sequence
  Cyclic GFR-binding peptide
DAANNVVRYKKLLLVRGNDFYLMSIAN

SEQ ID NO: 97283 - protein, 27 aa, Artificial Sequence
  Cyclic GFR-binding peptide
NAISMLYFNDKQQIILKKYRDAANNVV

SEQ ID NO: 97284 - protein, 27 aa, Artificial Sequence
  Cyclic GFR-binding peptide
NAISMLYFDNGRVLLLKKYRDAANNVV

SEQ ID NO: 97285 - protein, 27 aa, Artificial Sequence
  Cyclic GFR-binding peptide
DAANNVVEYKFKVVNKNEDLYLISIPE

SEQ ID NO: 97286 - protein, 27 aa, Artificial Sequence
  Cyclic GFR-binding peptide
DAANNVVPIKGYVKPTRGVFYLINIPS

SEQ ID NO: 97287 - protein, 27 aa, Artificial Sequence
  Cyclic GFR-binding peptide
DAANNVVEYKFKLLVRGNDLYLMSIPE

SEQ ID NO: 97288 - protein, 27 aa, Artificial Sequence
  Cyclic GFR-binding peptide
DAANNVVYHYKLVVNKNEDKYLISIPS

SEQ ID NO: 97289 - protein, 27 aa, Artificial Sequence
  Cyclic GFR-binding peptide
DAANNVVRHKRLLLVRGNDYYLMSTAS

SEQ ID NO: 97290 - protein, 27 aa, Artificial Sequence
  Cyclic GFR-binding peptide
DAANNVVYHYKLLLVRGNDKYLMSIPS

SEQ ID NO: 97291 - protein, 27 aa, Artificial Sequence
  Cyclic GFR-binding peptide
DAANNVVRHKRLVVNKNEDYYLISTAS

SEQ ID NO: 97292 - protein, 27 aa, Artificial Sequence
  Cyclic GFR-binding peptide
DAANNVVRYKKLVVNKNEDFYLISIAN

SEQ ID NO: 97293 - protein, 27 aa, Artificial Sequence
  Cyclic GFR-binding peptide
DAANNVVPIKGYVVNKNEDFYLINIPS

SEQ ID NO: 97294 - protein, 27 aa, Artificial Sequence
  Cyclic GFR-binding peptide
DAANNVVPIKGYIKPTKGIFYLINIPS

SEQ ID NO: 97295 - protein, 27 aa, Artificial Sequence
  Cyclic GFR-binding peptide
DAANNVVRHKRLYTVVGKDYYLISTAS

SEQ ID NO: 97296 - protein, 27 aa, Artificial Sequence
  Cyclic GFR-binding peptide
DAANNVVEYKFKVVNNASDLYLISIPE

SEQ ID NO: 97297 - protein, 27 aa, Artificial Sequence
  Cyclic GFR-binding peptide
DAANNVVRHKRLIIQQKDNYYLMSTAS

SEQ ID NO: 97298 - protein, 27 aa, Artificial Sequence
  Cyclic GFR-binding peptide
DAANNVVEYKFKIIQQKDNLYLMSIPE

SEQ ID NO: 97299 - protein, 27 aa, Artificial Sequence
  Cyclic GFR-binding peptide
DAANNVVPIKGYVKPKRGVFYLINIPS

SEQ ID NO: 97300 - protein, 27 aa, Artificial Sequence
  Cyclic GFR-binding peptide
DAANNVVRHKRLVVNNASDYYLISTAS

SEQ ID NO: 97301 - protein, 27 aa, Artificial Sequence
  Cyclic GFR-binding peptide
DAANNVVYHYKLVVNNASDKYLISIPS

SEQ ID NO: 97302 - protein, 27 aa, Artificial Sequence
  Cyclic GFR-binding peptide
DAANNVVYHYKLIIQQKDNKYLMSIPS

SEQ ID NO: 97303 - protein, 27 aa, Artificial Sequence
  Cyclic GFR-binding peptide
DAANNVVRHKRLVVNNAADYYLISTAS

SEQ ID NO: 97304 - protein, 27 aa, Artificial Sequence
  Cyclic GFR-binding peptide
EPISILYLDENKNVVKFKYEDAANNVV

SEQ ID NO: 97305 - protein, 27 aa, Artificial Sequence
  Cyclic GFR-binding peptide
SPINILYFVGRTPKVYGKIPDAANNVV

SEQ ID NO: 97306 - protein, 27 aa, Artificial Sequence
  Cyclic GFR-binding peptide
EPISMLYLDNGRVLLKFKYEDAANNVV

SEQ ID NO: 97307 - protein, 27 aa, Artificial Sequence
  Cyclic GFR-binding peptide
SPISILYKDENKNVVLKYHYDAANNVV

SEQ ID NO: 97308 - protein, 27 aa, Artificial Sequence
  Cyclic GFR-binding peptide
SATSMLYYDNGRVLLLRKHRDAANNVV

SEQ ID NO: 97309 - protein, 27 aa, Artificial Sequence
  Cyclic GFR-binding peptide
SPISMLYKDNGRVLLLKYHYDAANNVV

SEQ ID NO: 97310 - protein, 27 aa, Artificial Sequence
  Cyclic GFR-binding peptide
SATSILYYDENKNVVLRKHRDAANNVV

SEQ ID NO: 97311 - protein, 27 aa, Artificial Sequence
  Cyclic GFR-binding peptide
NAISILYFDENKNVVLKKYRDAANNVV

SEQ ID NO: 97312 - protein, 27 aa, Artificial Sequence
  Cyclic GFR-binding peptide
SPINILYFDENKNVVYGKIPDAANNVV

SEQ ID NO: 97313 - protein, 27 aa, Artificial Sequence
  Cyclic GFR-binding peptide
SPINILYFIGKTPKIYGKIPDAANNVV

SEQ ID NO: 97314 - protein, 27 aa, Artificial Sequence
  Cyclic GFR-binding peptide
SATSILYYDKGVVTYLRKHRDAANNVV

SEQ ID NO: 97315 - protein, 27 aa, Artificial Sequence
  Cyclic GFR-binding peptide
EPISILYLDSANNVVKFKYEDAANNVV

SEQ ID NO: 97316 - protein, 27 aa, Artificial Sequence
  Cyclic GFR-binding peptide
SATSMLYYNDKQQIILRKHRDAANNVV

SEQ ID NO: 97317 - protein, 27 aa, Artificial Sequence
  Cyclic GFR-binding peptide
EPISMLYLNDKQQIIKFKYEDAANNVV

SEQ ID NO: 97318 - protein, 27 aa, Artificial Sequence
  Cyclic GFR-binding peptide
SPINILYFVGRKPKVYGKIPDAANNVV

SEQ ID NO: 97319 - protein, 27 aa, Artificial Sequence
  Cyclic GFR-binding peptide
SATSILYYDSANNVVLRKHRDAANNVV

SEQ ID NO: 97320 - protein, 27 aa, Artificial Sequence
  Cyclic GFR-binding peptide
SPISILYKDSANNVVLKYHYDAANNVV

SEQ ID NO: 97321 - protein, 27 aa, Artificial Sequence
  Cyclic GFR-binding peptide
SPISMLYKNDKQQIILKYHYDAANNVV

SEQ ID NO: 97322 - protein, 27 aa, Artificial Sequence
  Cyclic GFR-binding peptide
SATSILYYDAANNVVLRKHRDAANNVV

SEQ ID NO: 97323 - protein, 27 aa, Artificial Sequence
  Cyclic GFR-binding peptide
DAANNVVSMEGIIIQQKDNMIQMTINS

SEQ ID NO: 97324 - protein, 27 aa, Artificial Sequence
  Cyclic GFR-binding peptide
DAANNVVSMEGLVKPKRGVMIQITINS

SEQ ID NO: 97325 - protein, 27 aa, Artificial Sequence
  Cyclic GFR-binding peptide
DAANNVVSMEGLVVNNASDMIQITINS

SEQ ID NO: 97326 - protein, 27 aa, Artificial Sequence
  Cyclic GFR-binding peptide
DAANNVVSMEGILLVRGNDMIQMTINS

SEQ ID NO: 97327 - protein, 27 aa, Artificial Sequence
  Cyclic GFR-binding peptide
DAANNVVSMEGLIKPTKGIMIQITINS

SEQ ID NO: 97328 - protein, 27 aa, Artificial Sequence
  Cyclic GFR-binding peptide
DAANNVVSMEGLIVNSSDDMIQVTINS

SEQ ID NO: 97329 - protein, 27 aa, Artificial Sequence
  Cyclic GFR-binding peptide
DAANNVVSMEGIVVNNASDMIQITINS

SEQ ID NO: 97330 - protein, 27 aa, Artificial Sequence
  Cyclic GFR-binding peptide
DAANNVVSMEGLVVNNAADMIQITINS

SEQ ID NO: 97331 - protein, 27 aa, Artificial Sequence
  Cyclic GFR-binding peptide
DAANNVVSMEGLLLVRGNDMIQMTINS

SEQ ID NO: 97332 - protein, 27 aa, Artificial Sequence
  Cyclic GFR-binding peptide
DAANNVVSMEGLIIQQKDNMIQMTINS

SEQ ID NO: 97333 - protein, 27 aa, Artificial Sequence
  Cyclic GFR-binding peptide
DAANNVVSMEGIVVNNAADMIQITINS

SEQ ID NO: 97334 - protein, 27 aa, Artificial Sequence
  Cyclic GFR-binding peptide
DAANNVVSMEGLVKPTRGVMIQITINS

SEQ ID NO: 97335 - protein, 27 aa, Artificial Sequence
  Cyclic GFR-binding peptide
SNITMQIMNDKQQIIIGEMSDAANNVV

SEQ ID NO: 97336 - protein, 27 aa, Artificial Sequence
  Cyclic GFR-binding peptide
SNITIQIMVGRKPKVLGEMSDAANNVV

SEQ ID NO: 97337 - protein, 27 aa, Artificial Sequence
  Cyclic GFR-binding peptide
SNITIQIMDSANNVVLGEMSDAANNVV

SEQ ID NO: 97338 - protein, 27 aa, Artificial Sequence
  Cyclic GFR-binding peptide
SNITMQIMDNGRVLLIGEMSDAANNVV

SEQ ID NO: 97339 - protein, 27 aa, Artificial Sequence
  Cyclic GFR-binding peptide
SNITIQIMIGKTPKILGEMSDAANNVV

SEQ ID NO: 97340 - protein, 27 aa, Artificial Sequence
  Cyclic GFR-binding peptide
SNITVQIMDDSSNVILGEMSDAANNVV

SEQ ID NO: 97341 - protein, 27 aa, Artificial Sequence
  Cyclic GFR-binding peptide
SNITIQIMDSANNVVIGEMSDAANNVV

SEQ ID NO: 97342 - protein, 27 aa, Artificial Sequence
  Cyclic GFR-binding peptide
SNITIQIMDAANNVVLGEMSDAANNVV

SEQ ID NO: 97343 - protein, 27 aa, Artificial Sequence
  Cyclic GFR-binding peptide
SNITMQIMDNGRVLLLGEMSDAANNVV

SEQ ID NO: 97344 - protein, 27 aa, Artificial Sequence
  Cyclic GFR-binding peptide
SNITMQIMNDKQQIILGEMSDAANNVV

SEQ ID NO: 97345 - protein, 27 aa, Artificial Sequence
  Cyclic GFR-binding peptide
SNITIQIMDAANNVVIGEMSDAANNVV

SEQ ID NO: 97346 - protein, 27 aa, Artificial Sequence
  Cyclic GFR-binding peptide
SNITIQIMVGRTPKVLGEMSDAANNVV

SEQ ID NO: 97347 - protein, 27 aa, Artificial Sequence
  Cyclic GFR-binding peptide
DAANNVVQYNKLVVNKNEDLYLISIAS

SEQ ID NO: 97348 - protein, 27 aa, Artificial Sequence
  Cyclic GFR-binding peptide
DAANNVVQYNKLVVNNAADLYLISIAS

SEQ ID NO: 97349 - protein, 27 aa, Artificial Sequence
  Cyclic GFR-binding peptide
DAANNVVQYNKLIIQQKDNLYLMSIAS

SEQ ID NO: 97350 - protein, 27 aa, Artificial Sequence
  Cyclic GFR-binding peptide
DAANNVVQYNKLLLVRGNDLYLMSIAS

SEQ ID NO: 97351 - protein, 27 aa, Artificial Sequence
  Cyclic GFR-binding peptide
DAANNVVQYNKLYTVVGKDLYLISIAS

SEQ ID NO: 97352 - protein, 27 aa, Artificial Sequence
  Cyclic GFR-binding peptide
SAISILYLDENKNVVLKNYQDAANNVV

SEQ ID NO: 97353 - protein, 27 aa, Artificial Sequence
  Cyclic GFR-binding peptide
SAISILYLDAANNVVLKNYQDAANNVV

SEQ ID NO: 97354 - protein, 27 aa, Artificial Sequence
  Cyclic GFR-binding peptide
SAISMLYLNDKQQIILKNYQDAANNVV

SEQ ID NO: 97355 - protein, 27 aa, Artificial Sequence
  Cyclic GFR-binding peptide
SAISMLYLDNGRVLLLKNYQDAANNVV

SEQ ID NO: 97356 - protein, 27 aa, Artificial Sequence
  Cyclic GFR-binding peptide
SAISILYLDKGVVTYLKNYQDAANNVV

SEQ ID NO: 97357 - protein, 27 aa, Artificial Sequence
  Cyclic GFR-binding peptide
DSANNVVRYKKLIKPTKGIFYLISIAN

SEQ ID NO: 97358 - protein, 29 aa, Artificial Sequence
  Cyclic GFR-binding peptide
DSANNVVRHKRLFIPKKRVIEYYLVSTAS

SEQ ID NO: 97359 - protein, 27 aa, Artificial Sequence
  Cyclic GFR-binding peptide
DSANNVVYHYKLVVKDYEDKYLMSIPS

SEQ ID NO: 97360 - protein, 27 aa, Artificial Sequence
  Cyclic GFR-binding peptide
DSANNVVQYNKLIVNNSSDLYLVSIAS

SEQ ID NO: 97361 - protein, 27 aa, Artificial Sequence
  Cyclic GFR-binding peptide
DSANNVVRYKKLVVKDYEDFYLMSIAN

SEQ ID NO: 97362 - protein, 27 aa, Artificial Sequence
  Cyclic GFR-binding peptide
DSANNVVRYKKLVKPTRGVFYLISIAN

SEQ ID NO: 97363 - protein, 27 aa, Artificial Sequence
  Cyclic GFR-binding peptide
DSANNVVRHKRLVVKENEDYYLMSTAS

SEQ ID NO: 97364 - protein, 27 aa, Artificial Sequence
  Cyclic GFR-binding peptide
DSANNVVYHYKLIKPTKGIKYLISIPS

SEQ ID NO: 97365 - protein, 29 aa, Artificial Sequence
  Cyclic GFR-binding peptide
DSANNVVRYKKLFIPKKRVIEFYLVSIAN

SEQ ID NO: 97366 - protein, 27 aa, Artificial Sequence
  Cyclic GFR-binding peptide
DSANNVVYHYKLVVKENEDKYLMSIPS

SEQ ID NO: 97367 - protein, 27 aa, Artificial Sequence
  Cyclic GFR-binding peptide
DSANNVVRHKRLVKPKRGVYYLISTAS

SEQ ID NO: 97368 - protein, 27 aa, Artificial Sequence
  Cyclic GFR-binding peptide
DSANNVVYHYKLVKPKRGVKYLISIPS

SEQ ID NO: 97369 - protein, 29 aa, Artificial Sequence
  Cyclic GFR-binding peptide
DSANNVVQYNKLFIPKKRVIELYLVSIAS

SEQ ID NO: 97370 - protein, 27 aa, Artificial Sequence
  Cyclic GFR-binding peptide
DSANNVVQYNKLVKPTRGVLYLISIAS

SEQ ID NO: 97371 - protein, 27 aa, Artificial Sequence
  Cyclic GFR-binding peptide
DSANNVVRYKKLVVKENEDFYLMSIAN

SEQ ID NO: 97372 - protein, 27 aa, Artificial Sequence
  Cyclic GFR-binding peptide
DSANNVVQYNKLTPVGMDDLYLVSIAS

SEQ ID NO: 97373 - protein, 27 aa, Artificial Sequence
  Cyclic GFR-binding peptide
DSANNVVRYKKLTPVGMDDFYLVSIAN

SEQ ID NO: 97374 - protein, 27 aa, Artificial Sequence
  Cyclic GFR-binding peptide
DSANNVVRYKKLVKPKRGVFYLISIAN

SEQ ID NO: 97375 - protein, 27 aa, Artificial Sequence
  Cyclic GFR-binding peptide
DSANNVVQYNKLVVKENEDLYLMSIAS

SEQ ID NO: 97376 - protein, 27 aa, Artificial Sequence
  Cyclic GFR-binding peptide
DSANNVVYHYKLIVNSSDDKYLVSIPS

SEQ ID NO: 97377 - protein, 27 aa, Artificial Sequence
  Cyclic GFR-binding peptide
DSANNVVQYNKLVKPKRGVLYLISIAS

SEQ ID NO: 97378 - protein, 27 aa, Artificial Sequence
  Cyclic GFR-binding peptide
DSANNVVRYKKLIVNNSSDFYLVSIAN

SEQ ID NO: 97379 - protein, 27 aa, Artificial Sequence
  Cyclic GFR-binding peptide
DSANNVVRYKKLIVNSSDDFYLVSIAN

SEQ ID NO: 97380 - protein, 27 aa, Artificial Sequence
  Cyclic GFR-binding peptide
DSANNVVRHKRLVKPTRGVYYLISTAS

SEQ ID NO: 97381 - protein, 29 aa, Artificial Sequence
  Cyclic GFR-binding peptide
DSANNVVYHYKLFIPKKRVIEKYLVSIPS

SEQ ID NO: 97382 - protein, 27 aa, Artificial Sequence
  Cyclic GFR-binding peptide
DSANNVVRHKRLIKPTKGIYYLISTAS

SEQ ID NO: 97383 - protein, 27 aa, Artificial Sequence
  Cyclic GFR-binding peptide
DSANNVVRHKRLTPVGMDDYYLVSTAS

SEQ ID NO: 97384 - protein, 27 aa, Artificial Sequence
  Cyclic GFR-binding peptide
DSANNVVYHYKLTPVGMDDKYLVSIPS

SEQ ID NO: 97385 - protein, 27 aa, Artificial Sequence
  Cyclic GFR-binding peptide
DSANNVVYHYKLIVNNSSDKYLVSIPS

SEQ ID NO: 97386 - protein, 27 aa, Artificial Sequence
  Cyclic GFR-binding peptide
DSANNVVRHKRLIVNNSSDYYLVSTAS

SEQ ID NO: 97387 - protein, 27 aa, Artificial Sequence
  Cyclic GFR-binding peptide
DSANNVVYHYKLVKPTRGVKYLISIPS

SEQ ID NO: 97388 - protein, 27 aa, Artificial Sequence
  Cyclic GFR-binding peptide
DSANNVVRHKRLIVNSSDDYYLVSTAS

SEQ ID NO: 97389 - protein, 27 aa, Artificial Sequence
  Cyclic GFR-binding peptide
DSANNVVRHKRLVVKDYEDYYLMSTAS

SEQ ID NO: 97390 - protein, 27 aa, Artificial Sequence
  Cyclic GFR-binding peptide
DSANNVVQYNKLIKPTKGILYLISIAS

SEQ ID NO: 97391 - protein, 27 aa, Artificial Sequence
  Cyclic GFR-binding peptide
DSANNVVQYNKLVVKDYEDLYLMSIAS

SEQ ID NO: 97392 - protein, 27 aa, Artificial Sequence
  Cyclic GFR-binding peptide
DSANNVVQYNKLIVNSSDDLYLVSIAS

SEQ ID NO: 97393 - protein, 27 aa, Artificial Sequence
  Cyclic GFR-binding peptide
NAISILYFIGKTPKILKKYRDSANNVV

SEQ ID NO: 97394 - protein, 29 aa, Artificial Sequence
  Cyclic GFR-binding peptide
SATSVLYYEIVRKKPIFLRKHRDSANNVV

SEQ ID NO: 97395 - protein, 27 aa, Artificial Sequence
  Cyclic GFR-binding peptide
SPISMLYKDEYDKVVLKYHYDSANNVV

SEQ ID NO: 97396 - protein, 27 aa, Artificial Sequence
  Cyclic GFR-binding peptide
SAISVLYLDSSNNVILKNYQDSANNVV

SEQ ID NO: 97397 - protein, 27 aa, Artificial Sequence
  Cyclic GFR-binding peptide
NAISMLYFDEYDKVVLKKYRDSANNVV

SEQ ID NO: 97398 - protein, 27 aa, Artificial Sequence
  Cyclic GFR-binding peptide
NAISILYFVGRTPKVLKKYRDSANNVV

SEQ ID NO: 97399 - protein, 27 aa, Artificial Sequence
  Cyclic GFR-binding peptide
SATSMLYYDENEKVVLRKHRDSANNVV

SEQ ID NO: 97400 - protein, 27 aa, Artificial Sequence
  Cyclic GFR-binding peptide
SPISILYKIGKTPKILKYHYDSANNVV

SEQ ID NO: 97401 - protein, 29 aa, Artificial Sequence
  Cyclic GFR-binding peptide
NAISVLYFEIVRKKPIFLKKYRDSANNVV

SEQ ID NO: 97402 - protein, 27 aa, Artificial Sequence
  Cyclic GFR-binding peptide
SPISMLYKDENEKVVLKYHYDSANNVV

SEQ ID NO: 97403 - protein, 27 aa, Artificial Sequence
  Cyclic GFR-binding peptide
SATSILYYVGRKPKVLRKHRDSANNVV

SEQ ID NO: 97404 - protein, 27 aa, Artificial Sequence
  Cyclic GFR-binding peptide
SPISILYKVGRKPKVLKYHYDSANNVV

SEQ ID NO: 97405 - protein, 29 aa, Artificial Sequence
  Cyclic GFR-binding peptide
SAISVLYLEIVRKKPIFLKNYQDSANNVV

SEQ ID NO: 97406 - protein, 27 aa, Artificial Sequence
  Cyclic GFR-binding peptide
SAISILYLVGRTPKVLKNYQDSANNVV

SEQ ID NO: 97407 - protein, 27 aa, Artificial Sequence
  Cyclic GFR-binding peptide
NAISMLYFDENEKVVLKKYRDSANNVV

SEQ ID NO: 97408 - protein, 27 aa, Artificial Sequence
  Cyclic GFR-binding peptide
SAISVLYLDDMGVPTLKNYQDSANNVV

SEQ ID NO: 97409 - protein, 27 aa, Artificial Sequence
  Cyclic GFR-binding peptide
NAISVLYFDDMGVPTLKKYRDSANNVV

SEQ ID NO: 97410 - protein, 27 aa, Artificial Sequence
  Cyclic GFR-binding peptide
NAISILYFVGRKPKVLKKYRDSANNVV

SEQ ID NO: 97411 - protein, 27 aa, Artificial Sequence
  Cyclic GFR-binding peptide
SAISMLYLDENEKVVLKNYQDSANNVV

SEQ ID NO: 97412 - protein, 27 aa, Artificial Sequence
  Cyclic GFR-binding peptide
SPISVLYKDDSSNVILKYHYDSANNVV

SEQ ID NO: 97413 - protein, 27 aa, Artificial Sequence
  Cyclic GFR-binding peptide
SAISILYLVGRKPKVLKNYQDSANNVV

SEQ ID NO: 97414 - protein, 27 aa, Artificial Sequence
  Cyclic GFR-binding peptide
NAISVLYFDSSNNVILKKYRDSANNVV

SEQ ID NO: 97415 - protein, 27 aa, Artificial Sequence
  Cyclic GFR-binding peptide
NAISVLYFDDSSNVILKKYRDSANNVV

SEQ ID NO: 97416 - protein, 27 aa, Artificial Sequence
  Cyclic GFR-binding peptide
SATSILYYVGRTPKVLRKHRDSANNVV

SEQ ID NO: 97417 - protein, 29 aa, Artificial Sequence
  Cyclic GFR-binding peptide
SPISVLYKEIVRKKPIFLKYHYDSANNVV

SEQ ID NO: 97418 - protein, 27 aa, Artificial Sequence
  Cyclic GFR-binding peptide
SATSILYYIGKTPKILRKHRDSANNVV

SEQ ID NO: 97419 - protein, 27 aa, Artificial Sequence
  Cyclic GFR-binding peptide
SATSVLYYDDMGVPTLRKHRDSANNVV

SEQ ID NO: 97420 - protein, 27 aa, Artificial Sequence
  Cyclic GFR-binding peptide
SPISVLYKDDMGVPTLKYHYDSANNVV

SEQ ID NO: 97421 - protein, 27 aa, Artificial Sequence
  Cyclic GFR-binding peptide
SPISVLYKDSSNNVILKYHYDSANNVV

SEQ ID NO: 97422 - protein, 27 aa, Artificial Sequence
  Cyclic GFR-binding peptide
SATSVLYYDSSNNVILRKHRDSANNVV

SEQ ID NO: 97423 - protein, 27 aa, Artificial Sequence
  Cyclic GFR-binding peptide
SPISILYKVGRTPKVLKYHYDSANNVV

SEQ ID NO: 97424 - protein, 27 aa, Artificial Sequence
  Cyclic GFR-binding peptide
SATSVLYYDDSSNVILRKHRDSANNVV

SEQ ID NO: 97425 - protein, 27 aa, Artificial Sequence
  Cyclic GFR-binding peptide
SATSMLYYDEYDKVVLRKHRDSANNVV

SEQ ID NO: 97426 - protein, 27 aa, Artificial Sequence
  Cyclic GFR-binding peptide
SAISILYLIGKTPKILKNYQDSANNVV

SEQ ID NO: 97427 - protein, 27 aa, Artificial Sequence
  Cyclic GFR-binding peptide
SAISMLYLDEYDKVVLKNYQDSANNVV

SEQ ID NO: 97428 - protein, 27 aa, Artificial Sequence
  Cyclic GFR-binding peptide
SAISVLYLDDSSNVILKNYQDSANNVV

SEQ ID NO: 97429 - protein, 27 aa, Artificial Sequence
  Cyclic GFR-binding peptide
DSANNVVNSLQEVVKDYEDYYLMTLPE

SEQ ID NO: 97430 - protein, 27 aa, Artificial Sequence
  Cyclic GFR-binding peptide
DSANNVVNSLQEIKPTKGIYYVIPLPE

SEQ ID NO: 97431 - protein, 27 aa, Artificial Sequence
  Cyclic GFR-binding peptide
DSANNVVNSLQEVKPKRGVYYLITLPE

SEQ ID NO: 97432 - protein, 27 aa, Artificial Sequence
  Cyclic GFR-binding peptide
DSANNVVNSLQEVKPTRGVYYVIPLPE

SEQ ID NO: 97433 - protein, 27 aa, Artificial Sequence
  Cyclic GFR-binding peptide
DSANNVVEYQKYIVNSSDDIFLVSIPS

SEQ ID NO: 97434 - protein, 27 aa, Artificial Sequence
  Cyclic GFR-binding peptide
DSANNVVEYQKYVKPTRGVIFLISIPS

SEQ ID NO: 97435 - protein, 27 aa, Artificial Sequence
  Cyclic GFR-binding peptide
DSANNVVNSLQEVVKENEDYYLMTLPE

SEQ ID NO: 97436 - protein, 27 aa, Artificial Sequence
  Cyclic GFR-binding peptide
DSANNVVNSLQEVVNNASDYYLITLPE

SEQ ID NO: 97437 - protein, 27 aa, Artificial Sequence
  Cyclic GFR-binding peptide
DSANNVVNSLQEVKPKRGVYYVIPLPE

SEQ ID NO: 97438 - protein, 27 aa, Artificial Sequence
  Cyclic GFR-binding peptide
DSANNVVNSLQEVVNNASDYYVIPLPE

SEQ ID NO: 97439 - protein, 27 aa, Artificial Sequence
  Cyclic GFR-binding peptide
DSANNVVNSLQEVKPTRGVYYLITLPE

SEQ ID NO: 97440 - protein, 27 aa, Artificial Sequence
  Cyclic GFR-binding peptide
DSANNVVEYQKYIKPTKGIIFLISIPS

SEQ ID NO: 97441 - protein, 27 aa, Artificial Sequence
  Cyclic GFR-binding peptide
DSANNVVEYQKYVVNNASDIFLISIPS

SEQ ID NO: 97442 - protein, 27 aa, Artificial Sequence
  Cyclic GFR-binding peptide
DSANNVVNSLQEIVNSSDDYYVVPLPE

SEQ ID NO: 97443 - protein, 27 aa, Artificial Sequence
  Cyclic GFR-binding peptide
DSANNVVNSLQEVVKDYEDYYVMPLPE

SEQ ID NO: 97444 - protein, 27 aa, Artificial Sequence
  Cyclic GFR-binding peptide
DSANNVVEYQKYVVKENEDIFLMSIPS

SEQ ID NO: 97445 - protein, 27 aa, Artificial Sequence
  Cyclic GFR-binding peptide
DSANNVVNSLQEVVKENEDYYVMPLPE

SEQ ID NO: 97446 - protein, 27 aa, Artificial Sequence
  Cyclic GFR-binding peptide
DSANNVVEYQKYVVKDYEDIFLMSIPS

SEQ ID NO: 97447 - protein, 27 aa, Artificial Sequence
  Cyclic GFR-binding peptide
DSANNVVQYNKLVVNNASDLYLISIAS

SEQ ID NO: 97448 - protein, 27 aa, Artificial Sequence
  Cyclic GFR-binding peptide
DSANNVVNSLQEIKPTKGIYYLITLPE

SEQ ID NO: 97449 - protein, 27 aa, Artificial Sequence
  Cyclic GFR-binding peptide
DSANNVVEYQKYVKPKRGVIFLISIPS

SEQ ID NO: 97450 - protein, 27 aa, Artificial Sequence
  Cyclic GFR-binding peptide
DSANNVVRYKKLVVNNASDFYLISIAN

SEQ ID NO: 97451 - protein, 27 aa, Artificial Sequence
  Cyclic GFR-binding peptide
DSANNVVNSLQEIVNSSDDYYLVTLPE

SEQ ID NO: 97452 - protein, 27 aa, Artificial Sequence
  Cyclic GFR-binding peptide
EPLTMLYYDEYDKVVEQLSNDSANNVV

SEQ ID NO: 97453 - protein, 27 aa, Artificial Sequence
  Cyclic GFR-binding peptide
EPLPIVYYIGKTPKIEQLSNDSANNVV

SEQ ID NO: 97454 - protein, 27 aa, Artificial Sequence
  Cyclic GFR-binding peptide
EPLTILYYVGRKPKVEQLSNDSANNVV

SEQ ID NO: 97455 - protein, 27 aa, Artificial Sequence
  Cyclic GFR-binding peptide
EPLPIVYYVGRTPKVEQLSNDSANNVV

SEQ ID NO: 97456 - protein, 27 aa, Artificial Sequence
  Cyclic GFR-binding peptide
SPISVLFIDDSSNVIYKQYEDSANNVV

SEQ ID NO: 97457 - protein, 27 aa, Artificial Sequence
  Cyclic GFR-binding peptide
SPISILFIVGRTPKVYKQYEDSANNVV

SEQ ID NO: 97458 - protein, 27 aa, Artificial Sequence
  Cyclic GFR-binding peptide
EPLTMLYYDENEKVVEQLSNDSANNVV

SEQ ID NO: 97459 - protein, 27 aa, Artificial Sequence
  Cyclic GFR-binding peptide
EPLTILYYDSANNVVEQLSNDSANNVV

SEQ ID NO: 97460 - protein, 27 aa, Artificial Sequence
  Cyclic GFR-binding peptide
EPLPIVYYVGRKPKVEQLSNDSANNVV

SEQ ID NO: 97461 - protein, 27 aa, Artificial Sequence
  Cyclic GFR-binding peptide
EPLPIVYYDSANNVVEQLSNDSANNVV

SEQ ID NO: 97462 - protein, 27 aa, Artificial Sequence
  Cyclic GFR-binding peptide
EPLTILYYVGRTPKVEQLSNDSANNVV

SEQ ID NO: 97463 - protein, 27 aa, Artificial Sequence
  Cyclic GFR-binding peptide
SPISILFIIGKTPKIYKQYEDSANNVV

SEQ ID NO: 97464 - protein, 27 aa, Artificial Sequence
  Cyclic GFR-binding peptide
SPISILFIDSANNVVYKQYEDSANNVV

SEQ ID NO: 97465 - protein, 27 aa, Artificial Sequence
  Cyclic GFR-binding peptide
EPLPVVYYDDSSNVIEQLSNDSANNVV

SEQ ID NO: 97466 - protein, 27 aa, Artificial Sequence
  Cyclic GFR-binding peptide
EPLPMVYYDEYDKVVEQLSNDSANNVV

SEQ ID NO: 97467 - protein, 27 aa, Artificial Sequence
  Cyclic GFR-binding peptide
SPISMLFIDENEKVVYKQYEDSANNVV

SEQ ID NO: 97468 - protein, 27 aa, Artificial Sequence
  Cyclic GFR-binding peptide
EPLPMVYYDENEKVVEQLSNDSANNVV

SEQ ID NO: 97469 - protein, 27 aa, Artificial Sequence
  Cyclic GFR-binding peptide
SPISMLFIDEYDKVVYKQYEDSANNVV

SEQ ID NO: 97470 - protein, 27 aa, Artificial Sequence
  Cyclic GFR-binding peptide
SAISILYLDSANNVVLKNYQDSANNVV

SEQ ID NO: 97471 - protein, 27 aa, Artificial Sequence
  Cyclic GFR-binding peptide
EPLTILYYIGKTPKIEQLSNDSANNVV

SEQ ID NO: 97472 - protein, 27 aa, Artificial Sequence
  Cyclic GFR-binding peptide
SPISILFIVGRKPKVYKQYEDSANNVV

SEQ ID NO: 97473 - protein, 27 aa, Artificial Sequence
  Cyclic GFR-binding peptide
NAISILYFDSANNVVLKKYRDSANNVV

SEQ ID NO: 97474 - protein, 27 aa, Artificial Sequence
  Cyclic GFR-binding peptide
EPLTVLYYDDSSNVIEQLSNDSANNVV

SEQ ID NO: 97475 - protein, 29 aa, Artificial Sequence
  Cyclic GFR-binding peptide
DSANNVVVTAKKLKPKKRVYEIKRVQVPR

SEQ ID NO: 97476 - protein, 29 aa, Artificial Sequence
  Cyclic GFR-binding peptide
DSANNVVVQVEKLKPKKRVYEVKAVKVSR

SEQ ID NO: 97477 - protein, 29 aa, Artificial Sequence
  Cyclic GFR-binding peptide
DSANNVVVQVEKFIPKKRVIEVKAVKVSR

SEQ ID NO: 97478 - protein, 29 aa, Artificial Sequence
  Cyclic GFR-binding peptide
DSANNVVVQVEKHQGQHPKIRVKAMKVSR

SEQ ID NO: 97479 - protein, 29 aa, Artificial Sequence
  Cyclic GFR-binding peptide
DSANNVVVTAKKHQGQHPKIRIKRMQVPR

SEQ ID NO: 97480 - protein, 29 aa, Artificial Sequence
  Cyclic GFR-binding peptide
DSANNVVSMEGLLKPKKRVYEMIQVTINS

SEQ ID NO: 97481 - protein, 29 aa, Artificial Sequence
  Cyclic GFR-binding peptide
DSANNVVSMEGIFIPKKRVIEMIQVTINS

SEQ ID NO: 97482 - protein, 29 aa, Artificial Sequence
  Cyclic GFR-binding peptide
DSANNVVSMEGLHQGQHPKIRMIQMTINS

SEQ ID NO: 97483 - protein, 29 aa, Artificial Sequence
  Cyclic GFR-binding peptide
DSANNVVSMEGILKPKKRVYEMIQVTINS

SEQ ID NO: 97484 - protein, 29 aa, Artificial Sequence
  Cyclic GFR-binding peptide
DSANNVVSMEGLFIPKKRVIEMIQVTINS

SEQ ID NO: 97485 - protein, 29 aa, Artificial Sequence
  Cyclic GFR-binding peptide
DSANNVVVTAKKFIPKKRVIEIKRVQVPR

SEQ ID NO: 97486 - protein, 29 aa, Artificial Sequence
  Cyclic GFR-binding peptide
DSANNVVSMEGIHQGQHPKIRMIQMTINS

SEQ ID NO: 97487 - protein, 29 aa, Artificial Sequence
  Cyclic GFR-binding peptide
RPVQVRKIEYVRKKPKLKKATVDSANNVV

SEQ ID NO: 97488 - protein, 29 aa, Artificial Sequence
  Cyclic GFR-binding peptide
RSVKVAKVEYVRKKPKLKEVQVDSANNVV

SEQ ID NO: 97489 - protein, 29 aa, Artificial Sequence
  Cyclic GFR-binding peptide
RSVKVAKVEIVRKKPIFKEVQVDSANNVV

SEQ ID NO: 97490 - protein, 29 aa, Artificial Sequence
  Cyclic GFR-binding peptide
RSVKMAKVRIKPHQGQHKEVQVDSANNVV

SEQ ID NO: 97491 - protein, 29 aa, Artificial Sequence
  Cyclic GFR-binding peptide
RPVQMRKIRIKPHQGQHKKATVDSANNVV

SEQ ID NO: 97492 - protein, 29 aa, Artificial Sequence
  Cyclic GFR-binding peptide
SNITVQIMEYVRKKPKLLGEMSDSANNVV

SEQ ID NO: 97493 - protein, 29 aa, Artificial Sequence
  Cyclic GFR-binding peptide
SNITVQIMEIVRKKPIFIGEMSDSANNVV

SEQ ID NO: 97494 - protein, 29 aa, Artificial Sequence
  Cyclic GFR-binding peptide
SNITMQIMRIKPHQGQHLGEMSDSANNVV

SEQ ID NO: 97495 - protein, 29 aa, Artificial Sequence
  Cyclic GFR-binding peptide
SNITVQIMEYVRKKPKLIGEMSDSANNVV

SEQ ID NO: 97496 - protein, 29 aa, Artificial Sequence
  Cyclic GFR-binding peptide
SNITVQIMEIVRKKPIFLGEMSDSANNVV

SEQ ID NO: 97497 - protein, 29 aa, Artificial Sequence
  Cyclic GFR-binding peptide
RPVQVRKIEIVRKKPIFKKATVDSANNVV

SEQ ID NO: 97498 - protein, 29 aa, Artificial Sequence
  Cyclic GFR-binding peptide
SNITMQIMRIKPHQGQHIGEMSDSANNVV

SEQ ID NO: 97499 - protein, 27 aa, Artificial Sequence
  Cyclic GFR-binding peptide
DSANNVVEYKFKVKPTRGVLYLISIPE

SEQ ID NO: 97500 - protein, 27 aa, Artificial Sequence
  Cyclic GFR-binding peptide
DSANNVVEYKFKTPVGMDDLYLVSIPE

SEQ ID NO: 97501 - protein, 27 aa, Artificial Sequence
  Cyclic GFR-binding peptide
DSANNVVEYQKYVKPKRGVIYLISIPS

SEQ ID NO: 97502 - protein, 27 aa, Artificial Sequence
  Cyclic GFR-binding peptide
DSANNVVEYQKYVVKDYEDIYLMSIPS

SEQ ID NO: 97503 - protein, 27 aa, Artificial Sequence
  Cyclic GFR-binding peptide
DSANNVVEYKFKIKPTKGILYLISIPE

SEQ ID NO: 97504 - protein, 27 aa, Artificial Sequence
  Cyclic GFR-binding peptide
DSANNVVYHYKLYTVVGKDKYLISIPS

SEQ ID NO: 97505 - protein, 27 aa, Artificial Sequence
  Cyclic GFR-binding peptide
DSANNVVRYKKLYTVVGKDFYLISIAN

SEQ ID NO: 97506 - protein, 27 aa, Artificial Sequence
  Cyclic GFR-binding peptide
DSANNVVEYQKYVVNNAADIYLISIPS

SEQ ID NO: 97507 - protein, 27 aa, Artificial Sequence
  Cyclic GFR-binding peptide
DSANNVVEYQKYVKPTRGVIYLISIPS

SEQ ID NO: 97508 - protein, 27 aa, Artificial Sequence
  Cyclic GFR-binding peptide
DSANNVVEYQKYTPVGMDDIYLVSIPS

SEQ ID NO: 97509 - protein, 27 aa, Artificial Sequence
  Cyclic GFR-binding peptide
DSANNVVEYKFKVVKDYEDLYLMSIPE

SEQ ID NO: 97510 - protein, 27 aa, Artificial Sequence
  Cyclic GFR-binding peptide
DSANNVVEYKFKVVNNAADLYLISIPE

SEQ ID NO: 97511 - protein, 27 aa, Artificial Sequence
  Cyclic GFR-binding peptide
DSANNVVEYQKYVVKENEDIYLMSIPS

SEQ ID NO: 97512 - protein, 27 aa, Artificial Sequence
  Cyclic GFR-binding peptide
DSANNVVEYQKYIKPTKGIIYLISIPS

SEQ ID NO: 97513 - protein, 27 aa, Artificial Sequence
  Cyclic GFR-binding peptide
DSANNVVRYKKLVVNNAADFYLISIAN

SEQ ID NO: 97514 - protein, 27 aa, Artificial Sequence
  Cyclic GFR-binding peptide
DSANNVVYHYKLVVNNAADKYLISIPS

SEQ ID NO: 97515 - protein, 27 aa, Artificial Sequence
  Cyclic GFR-binding peptide
DSANNVVEYKFKIVNNSSDLYLVSIPE

SEQ ID NO: 97516 - protein, 27 aa, Artificial Sequence
  Cyclic GFR-binding peptide
DSANNVVEYQKYIVNSSDDIYLVSIPS

SEQ ID NO: 97517 - protein, 27 aa, Artificial Sequence
  Cyclic GFR-binding peptide
DSANNVVEYKFKIVNSSDDLYLVSIPE

SEQ ID NO: 97518 - protein, 27 aa, Artificial Sequence
  Cyclic GFR-binding peptide
DSANNVVEYKFKVKPKRGVLYLISIPE

SEQ ID NO: 97519 - protein, 27 aa, Artificial Sequence
  Cyclic GFR-binding peptide
DSANNVVEYQKYYTVVGKDIYLISIPS

SEQ ID NO: 97520 - protein, 27 aa, Artificial Sequence
  Cyclic GFR-binding peptide
DSANNVVEYKFKVVKENEDLYLMSIPE

SEQ ID NO: 97521 - protein, 27 aa, Artificial Sequence
  Cyclic GFR-binding peptide
DSANNVVEYQKYIVNNSSDIYLVSIPS

SEQ ID NO: 97522 - protein, 27 aa, Artificial Sequence
  Cyclic GFR-binding peptide
DSANNVVEYKFKYTVVGKDLYLISIPE

SEQ ID NO: 97523 - protein, 27 aa, Artificial Sequence
  Cyclic GFR-binding peptide
EPISILYLVGRTPKVKFKYEDSANNVV

SEQ ID NO: 97524 - protein, 27 aa, Artificial Sequence
  Cyclic GFR-binding peptide
EPISVLYLDDMGVPTKFKYEDSANNVV

SEQ ID NO: 97525 - protein, 27 aa, Artificial Sequence
  Cyclic GFR-binding peptide
SPISILYIVGRKPKVYKQYEDSANNVV

SEQ ID NO: 97526 - protein, 27 aa, Artificial Sequence
  Cyclic GFR-binding peptide
SPISMLYIDEYDKVVYKQYEDSANNVV

SEQ ID NO: 97527 - protein, 27 aa, Artificial Sequence
  Cyclic GFR-binding peptide
EPISILYLIGKTPKIKFKYEDSANNVV

SEQ ID NO: 97528 - protein, 27 aa, Artificial Sequence
  Cyclic GFR-binding peptide
SPISILYKDKGVVTYLKYHYDSANNVV

SEQ ID NO: 97529 - protein, 27 aa, Artificial Sequence
  Cyclic GFR-binding peptide
NAISILYFDKGVVTYLKKYRDSANNVV

SEQ ID NO: 97530 - protein, 27 aa, Artificial Sequence
  Cyclic GFR-binding peptide
SPISILYIDAANNVVYKQYEDSANNVV

SEQ ID NO: 97531 - protein, 27 aa, Artificial Sequence
  Cyclic GFR-binding peptide
SPISILYIVGRTPKVYKQYEDSANNVV

SEQ ID NO: 97532 - protein, 27 aa, Artificial Sequence
  Cyclic GFR-binding peptide
SPISVLYIDDMGVPTYKQYEDSANNVV

SEQ ID NO: 97533 - protein, 27 aa, Artificial Sequence
  Cyclic GFR-binding peptide
EPISMLYLDEYDKVVKFKYEDSANNVV

SEQ ID NO: 97534 - protein, 27 aa, Artificial Sequence
  Cyclic GFR-binding peptide
EPISILYLDAANNVVKFKYEDSANNVV

SEQ ID NO: 97535 - protein, 27 aa, Artificial Sequence
  Cyclic GFR-binding peptide
SPISMLYIDENEKVVYKQYEDSANNVV

SEQ ID NO: 97536 - protein, 27 aa, Artificial Sequence
  Cyclic GFR-binding peptide
SPISILYIIGKTPKIYKQYEDSANNVV

SEQ ID NO: 97537 - protein, 27 aa, Artificial Sequence
  Cyclic GFR-binding peptide
NAISILYFDAANNVVLKKYRDSANNVV

SEQ ID NO: 97538 - protein, 27 aa, Artificial Sequence
  Cyclic GFR-binding peptide
SPISILYKDAANNVVLKYHYDSANNVV

SEQ ID NO: 97539 - protein, 27 aa, Artificial Sequence
  Cyclic GFR-binding peptide
EPISVLYLDSSNNVIKFKYEDSANNVV

SEQ ID NO: 97540 - protein, 27 aa, Artificial Sequence
  Cyclic GFR-binding peptide
SPISVLYIDDSSNVIYKQYEDSANNVV

SEQ ID NO: 97541 - protein, 27 aa, Artificial Sequence
  Cyclic GFR-binding peptide
EPISVLYLDDSSNVIKFKYEDSANNVV

SEQ ID NO: 97542 - protein, 27 aa, Artificial Sequence
  Cyclic GFR-binding peptide
EPISILYLVGRKPKVKFKYEDSANNVV

SEQ ID NO: 97543 - protein, 27 aa, Artificial Sequence
  Cyclic GFR-binding peptide
SPISILYIDKGVVTYYKQYEDSANNVV

SEQ ID NO: 97544 - protein, 27 aa, Artificial Sequence
  Cyclic GFR-binding peptide
EPISMLYLDENEKVVKFKYEDSANNVV

SEQ ID NO: 97545 - protein, 27 aa, Artificial Sequence
  Cyclic GFR-binding peptide
SPISVLYIDSSNNVIYKQYEDSANNVV

SEQ ID NO: 97546 - protein, 27 aa, Artificial Sequence
  Cyclic GFR-binding peptide
EPISILYLDKGVVTYKFKYEDSANNVV

SEQ ID NO: 97547 - protein, 27 aa, Artificial Sequence
  Cyclic GFR-binding peptide
DSANNVVPIKGYIIQQKDNFYLMNIPS

SEQ ID NO: 97548 - protein, 27 aa, Artificial Sequence
  Cyclic GFR-binding peptide
DSANNVVPIKGYVVKDYEDFYLMNIPS

SEQ ID NO: 97549 - protein, 27 aa, Artificial Sequence
  Cyclic GFR-binding peptide
DSANNVVPIKGYIVNSSDDFYLVNIPS

SEQ ID NO: 97550 - protein, 27 aa, Artificial Sequence
  Cyclic GFR-binding peptide
DSANNVVPIKGYVVNNAADFYLINIPS

SEQ ID NO: 97551 - protein, 27 aa, Artificial Sequence
  Cyclic GFR-binding peptide
DSANNVVPIKGYYTVVGKDFYLINIPS

SEQ ID NO: 97552 - protein, 27 aa, Artificial Sequence
  Cyclic GFR-binding peptide
DSANNVVPIKGYLLVRGNDFYLMNIPS

SEQ ID NO: 97553 - protein, 27 aa, Artificial Sequence
  Cyclic GFR-binding peptide
DSANNVVPIKGYVVKENEDFYLMNIPS

SEQ ID NO: 97554 - protein, 27 aa, Artificial Sequence
  Cyclic GFR-binding peptide
DSANNVVPIKGYVVNNASDFYLINIPS

SEQ ID NO: 97555 - protein, 27 aa, Artificial Sequence
  Cyclic GFR-binding peptide
DSANNVVPIKGYTPVGMDDFYLVNIPS

SEQ ID NO: 97556 - protein, 27 aa, Artificial Sequence
  Cyclic GFR-binding peptide
DSANNVVPIKGYIVNNSSDFYLVNIPS

SEQ ID NO: 97557 - protein, 27 aa, Artificial Sequence
  Cyclic GFR-binding peptide
SPINMLYFNDKQQIIYGKIPDSANNVV

SEQ ID NO: 97558 - protein, 27 aa, Artificial Sequence
  Cyclic GFR-binding peptide
SPINMLYFDEYDKVVYGKIPDSANNVV

SEQ ID NO: 97559 - protein, 27 aa, Artificial Sequence
  Cyclic GFR-binding peptide
SPINVLYFDDSSNVIYGKIPDSANNVV

SEQ ID NO: 97560 - protein, 27 aa, Artificial Sequence
  Cyclic GFR-binding peptide
SPINILYFDAANNVVYGKIPDSANNVV

SEQ ID NO: 97561 - protein, 27 aa, Artificial Sequence
  Cyclic GFR-binding peptide
SPINILYFDKGVVTYYGKIPDSANNVV

SEQ ID NO: 97562 - protein, 27 aa, Artificial Sequence
  Cyclic GFR-binding peptide
SPINMLYFDNGRVLLYGKIPDSANNVV

SEQ ID NO: 97563 - protein, 27 aa, Artificial Sequence
  Cyclic GFR-binding peptide
SPINMLYFDENEKVVYGKIPDSANNVV

SEQ ID NO: 97564 - protein, 27 aa, Artificial Sequence
  Cyclic GFR-binding peptide
SPINILYFDSANNVVYGKIPDSANNVV

SEQ ID NO: 97565 - protein, 27 aa, Artificial Sequence
  Cyclic GFR-binding peptide
SPINVLYFDDMGVPTYGKIPDSANNVV

SEQ ID NO: 97566 - protein, 27 aa, Artificial Sequence
  Cyclic GFR-binding peptide
SPINVLYFDSSNNVIYGKIPDSANNVV

SEQ ID NO: 97567 - protein, 27 aa, Artificial Sequence
  Cyclic GFR-binding peptide
DSANNVVEYQKYVVNNASDIYLISIPS

SEQ ID NO: 97568 - protein, 27 aa, Artificial Sequence
  Cyclic GFR-binding peptide
DSANNVVEYQKYIIQQKDNIYLMSIPS

SEQ ID NO: 97569 - protein, 27 aa, Artificial Sequence
  Cyclic GFR-binding peptide
DSANNVVEYQKYLLVRGNDIYLMSIPS

SEQ ID NO: 97570 - protein, 27 aa, Artificial Sequence
  Cyclic GFR-binding peptide
SPISILYIDSANNVVYKQYEDSANNVV

SEQ ID NO: 97571 - protein, 27 aa, Artificial Sequence
  Cyclic GFR-binding peptide
SPISMLYINDKQQIIYKQYEDSANNVV

SEQ ID NO: 97572 - protein, 27 aa, Artificial Sequence
  Cyclic GFR-binding peptide
SPISMLYIDNGRVLLYKQYEDSANNVV

SEQ ID NO: 97573 - protein, 27 aa, Artificial Sequence
  Cyclic GFR-binding peptide
DSANNVVPYVKLYTVVGKDFFLISLSS

SEQ ID NO: 97574 - protein, 27 aa, Artificial Sequence
  Cyclic GFR-binding peptide
DSANNVVPYVKLIKPTKGIFFLISLSS

SEQ ID NO: 97575 - protein, 27 aa, Artificial Sequence
  Cyclic GFR-binding peptide
DSANNVVPYVKLIIQQKDNFFLMSLSS

SEQ ID NO: 97576 - protein, 27 aa, Artificial Sequence
  Cyclic GFR-binding peptide
DSANNVVPYVKLIVNSSDDFFLVSLSS

SEQ ID NO: 97577 - protein, 27 aa, Artificial Sequence
  Cyclic GFR-binding peptide
DSANNVVPYVKLVKPKRGVFFLISLSS

SEQ ID NO: 97578 - protein, 27 aa, Artificial Sequence
  Cyclic GFR-binding peptide
DSANNVVPYVKLVKPTRGVFFLISLSS

SEQ ID NO: 97579 - protein, 27 aa, Artificial Sequence
  Cyclic GFR-binding peptide
DSANNVVPYVKLTPVGMDDFFLVSLSS

SEQ ID NO: 97580 - protein, 29 aa, Artificial Sequence
  Cyclic GFR-binding peptide
DSANNVVPYVKLHQGQHPKIRFFLMSLSS

SEQ ID NO: 97581 - protein, 27 aa, Artificial Sequence
  Cyclic GFR-binding peptide
DSANNVVPYVKLVVNKNEDFFLISLSS

SEQ ID NO: 97582 - protein, 27 aa, Artificial Sequence
  Cyclic GFR-binding peptide
DSANNVVPYVKLVVNNASDFFLISLSS

SEQ ID NO: 97583 - protein, 27 aa, Artificial Sequence
  Cyclic GFR-binding peptide
DSANNVVPYVKLVVKENEDFFLMSLSS

SEQ ID NO: 97584 - protein, 27 aa, Artificial Sequence
  Cyclic GFR-binding peptide
DSANNVVPYVKLIVNNSSDFFLVSLSS

SEQ ID NO: 97585 - protein, 29 aa, Artificial Sequence
  Cyclic GFR-binding peptide
DSANNVVPYVKLLKPKKRVYEFFLVSLSS

SEQ ID NO: 97586 - protein, 27 aa, Artificial Sequence
  Cyclic GFR-binding peptide
DSANNVVPYVKLLLVRGNDFFLMSLSS

SEQ ID NO: 97587 - protein, 27 aa, Artificial Sequence
  Cyclic GFR-binding peptide
DSANNVVPYVKLVVKDYEDFFLMSLSS

SEQ ID NO: 97588 - protein, 27 aa, Artificial Sequence
  Cyclic GFR-binding peptide
DSANNVVPYVKLVVNNAADFFLISLSS

SEQ ID NO: 97589 - protein, 27 aa, Artificial Sequence
  Cyclic GFR-binding peptide
SSLSILFFDKGVVTYLKVYPDSANNVV

SEQ ID NO: 97590 - protein, 27 aa, Artificial Sequence
  Cyclic GFR-binding peptide
SSLSILFFIGKTPKILKVYPDSANNVV

SEQ ID NO: 97591 - protein, 27 aa, Artificial Sequence
  Cyclic GFR-binding peptide
SSLSMLFFNDKQQIILKVYPDSANNVV

SEQ ID NO: 97592 - protein, 27 aa, Artificial Sequence
  Cyclic GFR-binding peptide
SSLSVLFFDDSSNVILKVYPDSANNVV

SEQ ID NO: 97593 - protein, 27 aa, Artificial Sequence
  Cyclic GFR-binding peptide
SSLSILFFVGRKPKVLKVYPDSANNVV

SEQ ID NO: 97594 - protein, 27 aa, Artificial Sequence
  Cyclic GFR-binding peptide
SSLSILFFVGRTPKVLKVYPDSANNVV

SEQ ID NO: 97595 - protein, 27 aa, Artificial Sequence
  Cyclic GFR-binding peptide
SSLSVLFFDDMGVPTLKVYPDSANNVV

SEQ ID NO: 97596 - protein, 29 aa, Artificial Sequence
  Cyclic GFR-binding peptide
SSLSMLFFRIKPHQGQHLKVYPDSANNVV

SEQ ID NO: 97597 - protein, 27 aa, Artificial Sequence
  Cyclic GFR-binding peptide
SSLSILFFDENKNVVLKVYPDSANNVV

SEQ ID NO: 97598 - protein, 27 aa, Artificial Sequence
  Cyclic GFR-binding peptide
SSLSILFFDSANNVVLKVYPDSANNVV

SEQ ID NO: 97599 - protein, 27 aa, Artificial Sequence
  Cyclic GFR-binding peptide
SSLSMLFFDENEKVVLKVYPDSANNVV

SEQ ID NO: 97600 - protein, 27 aa, Artificial Sequence
  Cyclic GFR-binding peptide
SSLSVLFFDSSNNVILKVYPDSANNVV

SEQ ID NO: 97601 - protein, 29 aa, Artificial Sequence
  Cyclic GFR-binding peptide
SSLSVLFFEYVRKKPKLLKVYPDSANNVV

SEQ ID NO: 97602 - protein, 27 aa, Artificial Sequence
  Cyclic GFR-binding peptide
SSLSMLFFDNGRVLLLKVYPDSANNVV

SEQ ID NO: 97603 - protein, 27 aa, Artificial Sequence
  Cyclic GFR-binding peptide
SSLSMLFFDEYDKVVLKVYPDSANNVV

SEQ ID NO: 97604 - protein, 27 aa, Artificial Sequence
  Cyclic GFR-binding peptide
SSLSILFFDAANNVVLKVYPDSANNVV

SEQ ID NO: 97605 - protein, 27 aa, Artificial Sequence
  Cyclic GFR-binding peptide
DSANNVVSMEGIIVNSSDDMIQVTINS

SEQ ID NO: 97606 - protein, 27 aa, Artificial Sequence
  Cyclic GFR-binding peptide
DSANNVVVTAKKVVKENEDIKRMQVPR

SEQ ID NO: 97607 - protein, 27 aa, Artificial Sequence
  Cyclic GFR-binding peptide
DSANNVVSMEGIVVKDYEDMIQMTINS

SEQ ID NO: 97608 - protein, 27 aa, Artificial Sequence
  Cyclic GFR-binding peptide
DSANNVVVTAKKIKPTKGIIKRIQVPR

SEQ ID NO: 97609 - protein, 27 aa, Artificial Sequence
  Cyclic GFR-binding peptide
DSANNVVSMEGIVKPTRGVMIQITINS

SEQ ID NO: 97610 - protein, 29 aa, Artificial Sequence
  Cyclic GFR-binding peptide
DSANNVVNSLQEFIPKKRVIEYYVVPLPE

SEQ ID NO: 97611 - protein, 27 aa, Artificial Sequence
  Cyclic GFR-binding peptide
DSANNVVVQVEKVKPKRGVVKAIKVSR

SEQ ID NO: 97612 - protein, 27 aa, Artificial Sequence
  Cyclic GFR-binding peptide
DSANNVVVQVEKVVKENEDVKAMKVSR

SEQ ID NO: 97613 - protein, 27 aa, Artificial Sequence
  Cyclic GFR-binding peptide
DSANNVVVTAKKIVNSSDDIKRVQVPR

SEQ ID NO: 97614 - protein, 27 aa, Artificial Sequence
  Cyclic GFR-binding peptide
DSANNVVVQVEKIKPTKGIVKAIKVSR

SEQ ID NO: 97615 - protein, 29 aa, Artificial Sequence
  Cyclic GFR-binding peptide
DSANNVVNSLQEFIPKKRVIEYYLVTLPE

SEQ ID NO: 97616 - protein, 27 aa, Artificial Sequence
  Cyclic GFR-binding peptide
DSANNVVVQVEKIVNSSDDVKAVKVSR

SEQ ID NO: 97617 - protein, 27 aa, Artificial Sequence
  Cyclic GFR-binding peptide
DSANNVVVTAKKVKPKRGVIKRIQVPR

SEQ ID NO: 97618 - protein, 27 aa, Artificial Sequence
  Cyclic GFR-binding peptide
DSANNVVVQVEKVKPTRGVVKAIKVSR

SEQ ID NO: 97619 - protein, 27 aa, Artificial Sequence
  Cyclic GFR-binding peptide
DSANNVVVTAKKVKPTRGVIKRIQVPR

SEQ ID NO: 97620 - protein, 29 aa, Artificial Sequence
  Cyclic GFR-binding peptide
DSANNVVNSLQELKPKKRVYEYYLVTLPE

SEQ ID NO: 97621 - protein, 27 aa, Artificial Sequence
  Cyclic GFR-binding peptide
DSANNVVSMEGIVKPKRGVMIQITINS

SEQ ID NO: 97622 - protein, 27 aa, Artificial Sequence
  Cyclic GFR-binding peptide
DSANNVVSMEGIVVKENEDMIQMTINS

SEQ ID NO: 97623 - protein, 27 aa, Artificial Sequence
  Cyclic GFR-binding peptide
DSANNVVSMEGIIKPTKGIMIQITINS

SEQ ID NO: 97624 - protein, 29 aa, Artificial Sequence
  Cyclic GFR-binding peptide
DSANNVVNSLQEHQGQHPKIRYYLMTLPE

SEQ ID NO: 97625 - protein, 27 aa, Artificial Sequence
  Cyclic GFR-binding peptide
DSANNVVVTAKKVVKDYEDIKRMQVPR

SEQ ID NO: 97626 - protein, 29 aa, Artificial Sequence
  Cyclic GFR-binding peptide
DSANNVVNSLQEHQGQHPKIRYYVMPLPE

SEQ ID NO: 97627 - protein, 29 aa, Artificial Sequence
  Cyclic GFR-binding peptide
DSANNVVNSLQELKPKKRVYEYYVVPLPE

SEQ ID NO: 97628 - protein, 27 aa, Artificial Sequence
  Cyclic GFR-binding peptide
DSANNVVVQVEKVVKDYEDVKAMKVSR

SEQ ID NO: 97629 - protein, 27 aa, Artificial Sequence
  Cyclic GFR-binding peptide
SNITVQIMDDSSNVIIGEMSDSANNVV

SEQ ID NO: 97630 - protein, 27 aa, Artificial Sequence
  Cyclic GFR-binding peptide
RPVQMRKIDENEKVVKKATVDSANNVV

SEQ ID NO: 97631 - protein, 27 aa, Artificial Sequence
  Cyclic GFR-binding peptide
SNITMQIMDEYDKVVIGEMSDSANNVV

SEQ ID NO: 97632 - protein, 27 aa, Artificial Sequence
  Cyclic GFR-binding peptide
RPVQIRKIIGKTPKIKKATVDSANNVV

SEQ ID NO: 97633 - protein, 27 aa, Artificial Sequence
  Cyclic GFR-binding peptide
SNITIQIMVGRTPKVIGEMSDSANNVV

SEQ ID NO: 97634 - protein, 29 aa, Artificial Sequence
  Cyclic GFR-binding peptide
EPLPVVYYEIVRKKPIFEQLSNDSANNVV

SEQ ID NO: 97635 - protein, 27 aa, Artificial Sequence
  Cyclic GFR-binding peptide
RSVKIAKVVGRKPKVKEVQVDSANNVV

SEQ ID NO: 97636 - protein, 27 aa, Artificial Sequence
  Cyclic GFR-binding peptide
RSVKMAKVDENEKVVKEVQVDSANNVV

SEQ ID NO: 97637 - protein, 27 aa, Artificial Sequence
  Cyclic GFR-binding peptide
RPVQVRKIDDSSNVIKKATVDSANNVV

SEQ ID NO: 97638 - protein, 27 aa, Artificial Sequence
  Cyclic GFR-binding peptide
RSVKIAKVIGKTPKIKEVQVDSANNVV

SEQ ID NO: 97639 - protein, 29 aa, Artificial Sequence
  Cyclic GFR-binding peptide
EPLTVLYYEIVRKKPIFEQLSNDSANNVV

SEQ ID NO: 97640 - protein, 27 aa, Artificial Sequence
  Cyclic GFR-binding peptide
RSVKVAKVDDSSNVIKEVQVDSANNVV

SEQ ID NO: 97641 - protein, 27 aa, Artificial Sequence
  Cyclic GFR-binding peptide
RPVQIRKIVGRKPKVKKATVDSANNVV

SEQ ID NO: 97642 - protein, 27 aa, Artificial Sequence
  Cyclic GFR-binding peptide
RSVKIAKVVGRTPKVKEVQVDSANNVV

SEQ ID NO: 97643 - protein, 27 aa, Artificial Sequence
  Cyclic GFR-binding peptide
RPVQIRKIVGRTPKVKKATVDSANNVV

SEQ ID NO: 97644 - protein, 29 aa, Artificial Sequence
  Cyclic GFR-binding peptide
EPLTVLYYEYVRKKPKLEQLSNDSANNVV

SEQ ID NO: 97645 - protein, 27 aa, Artificial Sequence
  Cyclic GFR-binding peptide
SNITIQIMVGRKPKVIGEMSDSANNVV

SEQ ID NO: 97646 - protein, 27 aa, Artificial Sequence
  Cyclic GFR-binding peptide
SNITMQIMDENEKVVIGEMSDSANNVV

SEQ ID NO: 97647 - protein, 27 aa, Artificial Sequence
  Cyclic GFR-binding peptide
SNITIQIMIGKTPKIIGEMSDSANNVV

SEQ ID NO: 97648 - protein, 29 aa, Artificial Sequence
  Cyclic GFR-binding peptide
EPLTMLYYRIKPHQGQHEQLSNDSANNVV

SEQ ID NO: 97649 - protein, 27 aa, Artificial Sequence
  Cyclic GFR-binding peptide
RPVQMRKIDEYDKVVKKATVDSANNVV

SEQ ID NO: 97650 - protein, 29 aa, Artificial Sequence
  Cyclic GFR-binding peptide
EPLPMVYYRIKPHQGQHEQLSNDSANNVV

SEQ ID NO: 97651 - protein, 29 aa, Artificial Sequence
  Cyclic GFR-binding peptide
EPLPVVYYEYVRKKPKLEQLSNDSANNVV

SEQ ID NO: 97652 - protein, 27 aa, Artificial Sequence
  Cyclic GFR-binding peptide
RSVKMAKVDEYDKVVKEVQVDSANNVV

SEQ ID NO: 97653 - protein, 27 aa, Artificial Sequence
  Cyclic GFR-binding peptide
DSANNVVRYKKLIIQQKDNFYLMSIAN

SEQ ID NO: 97654 - protein, 27 aa, Artificial Sequence
  Cyclic GFR-binding peptide
DSANNVVRYKKLLLVRGNDFYLMSIAN

SEQ ID NO: 97655 - protein, 27 aa, Artificial Sequence
  Cyclic GFR-binding peptide
NAISMLYFNDKQQIILKKYRDSANNVV

SEQ ID NO: 97656 - protein, 27 aa, Artificial Sequence
  Cyclic GFR-binding peptide
NAISMLYFDNGRVLLLKKYRDSANNVV

SEQ ID NO: 97657 - protein, 27 aa, Artificial Sequence
  Cyclic GFR-binding peptide
DSANNVVEYKFKVVNKNEDLYLISIPE

SEQ ID NO: 97658 - protein, 27 aa, Artificial Sequence
  Cyclic GFR-binding peptide
DSANNVVPIKGYVKPTRGVFYLINIPS

SEQ ID NO: 97659 - protein, 27 aa, Artificial Sequence
  Cyclic GFR-binding peptide
DSANNVVEYKFKLLVRGNDLYLMSIPE

SEQ ID NO: 97660 - protein, 27 aa, Artificial Sequence
  Cyclic GFR-binding peptide
DSANNVVYHYKLVVNKNEDKYLISIPS

SEQ ID NO: 97661 - protein, 27 aa, Artificial Sequence
  Cyclic GFR-binding peptide
DSANNVVRHKRLLLVRGNDYYLMSTAS

SEQ ID NO: 97662 - protein, 27 aa, Artificial Sequence
  Cyclic GFR-binding peptide
DSANNVVYHYKLLLVRGNDKYLMSIPS

SEQ ID NO: 97663 - protein, 27 aa, Artificial Sequence
  Cyclic GFR-binding peptide
DSANNVVRHKRLVVNKNEDYYLISTAS

SEQ ID NO: 97664 - protein, 27 aa, Artificial Sequence
  Cyclic GFR-binding peptide
DSANNVVRYKKLVVNKNEDFYLISIAN

SEQ ID NO: 97665 - protein, 27 aa, Artificial Sequence
  Cyclic GFR-binding peptide
DSANNVVPIKGYVVNKNEDFYLINIPS

SEQ ID NO: 97666 - protein, 27 aa, Artificial Sequence
  Cyclic GFR-binding peptide
DSANNVVPIKGYIKPTKGIFYLINIPS

SEQ ID NO: 97667 - protein, 27 aa, Artificial Sequence
  Cyclic GFR-binding peptide
DSANNVVRHKRLYTVVGKDYYLISTAS

SEQ ID NO: 97668 - protein, 27 aa, Artificial Sequence
  Cyclic GFR-binding peptide
DSANNVVEYKFKVVNNASDLYLISIPE

SEQ ID NO: 97669 - protein, 27 aa, Artificial Sequence
  Cyclic GFR-binding peptide
DSANNVVRHKRLIIQQKDNYYLMSTAS

SEQ ID NO: 97670 - protein, 27 aa, Artificial Sequence
  Cyclic GFR-binding peptide
DSANNVVEYKFKIIQQKDNLYLMSIPE

SEQ ID NO: 97671 - protein, 27 aa, Artificial Sequence
  Cyclic GFR-binding peptide
DSANNVVPIKGYVKPKRGVFYLINIPS

SEQ ID NO: 97672 - protein, 27 aa, Artificial Sequence
  Cyclic GFR-binding peptide
DSANNVVRHKRLVVNNASDYYLISTAS

SEQ ID NO: 97673 - protein, 27 aa, Artificial Sequence
  Cyclic GFR-binding peptide
DSANNVVYHYKLVVNNASDKYLISIPS

SEQ ID NO: 97674 - protein, 27 aa, Artificial Sequence
  Cyclic GFR-binding peptide
DSANNVVYHYKLIIQQKDNKYLMSIPS

SEQ ID NO: 97675 - protein, 27 aa, Artificial Sequence
  Cyclic GFR-binding peptide
DSANNVVRHKRLVVNNAADYYLISTAS

SEQ ID NO: 97676 - protein, 27 aa, Artificial Sequence
  Cyclic GFR-binding peptide
EPISILYLDENKNVVKFKYEDSANNVV

SEQ ID NO: 97677 - protein, 27 aa, Artificial Sequence
  Cyclic GFR-binding peptide
SPINILYFVGRTPKVYGKIPDSANNVV

SEQ ID NO: 97678 - protein, 27 aa, Artificial Sequence
  Cyclic GFR-binding peptide
EPISMLYLDNGRVLLKFKYEDSANNVV

SEQ ID NO: 97679 - protein, 27 aa, Artificial Sequence
  Cyclic GFR-binding peptide
SPISILYKDENKNVVLKYHYDSANNVV

SEQ ID NO: 97680 - protein, 27 aa, Artificial Sequence
  Cyclic GFR-binding peptide
SATSMLYYDNGRVLLLRKHRDSANNVV

SEQ ID NO: 97681 - protein, 27 aa, Artificial Sequence
  Cyclic GFR-binding peptide
SPISMLYKDNGRVLLLKYHYDSANNVV

SEQ ID NO: 97682 - protein, 27 aa, Artificial Sequence
  Cyclic GFR-binding peptide
SATSILYYDENKNVVLRKHRDSANNVV

SEQ ID NO: 97683 - protein, 27 aa, Artificial Sequence
  Cyclic GFR-binding peptide
NAISILYFDENKNVVLKKYRDSANNVV

SEQ ID NO: 97684 - protein, 27 aa, Artificial Sequence
  Cyclic GFR-binding peptide
SPINILYFDENKNVVYGKIPDSANNVV

SEQ ID NO: 97685 - protein, 27 aa, Artificial Sequence
  Cyclic GFR-binding peptide
SPINILYFIGKTPKIYGKIPDSANNVV

SEQ ID NO: 97686 - protein, 27 aa, Artificial Sequence
  Cyclic GFR-binding peptide
SATSILYYDKGVVTYLRKHRDSANNVV

SEQ ID NO: 97687 - protein, 27 aa, Artificial Sequence
  Cyclic GFR-binding peptide
EPISILYLDSANNVVKFKYEDSANNVV

SEQ ID NO: 97688 - protein, 27 aa, Artificial Sequence
  Cyclic GFR-binding peptide
SATSMLYYNDKQQIILRKHRDSANNVV

SEQ ID NO: 97689 - protein, 27 aa, Artificial Sequence
  Cyclic GFR-binding peptide
EPISMLYLNDKQQIIKFKYEDSANNVV

SEQ ID NO: 97690 - protein, 27 aa, Artificial Sequence
  Cyclic GFR-binding peptide
SPINILYFVGRKPKVYGKIPDSANNVV

SEQ ID NO: 97691 - protein, 27 aa, Artificial Sequence
  Cyclic GFR-binding peptide
SATSILYYDSANNVVLRKHRDSANNVV

SEQ ID NO: 97692 - protein, 27 aa, Artificial Sequence
  Cyclic GFR-binding peptide
SPISILYKDSANNVVLKYHYDSANNVV

SEQ ID NO: 97693 - protein, 27 aa, Artificial Sequence
  Cyclic GFR-binding peptide
SPISMLYKNDKQQIILKYHYDSANNVV

SEQ ID NO: 97694 - protein, 27 aa, Artificial Sequence
  Cyclic GFR-binding peptide
SATSILYYDAANNVVLRKHRDSANNVV

SEQ ID NO: 97695 - protein, 27 aa, Artificial Sequence
  Cyclic GFR-binding peptide
DSANNVVSMEGIIIQQKDNMIQMTINS

SEQ ID NO: 97696 - protein, 27 aa, Artificial Sequence
  Cyclic GFR-binding peptide
DSANNVVSMEGLVKPKRGVMIQITINS

SEQ ID NO: 97697 - protein, 27 aa, Artificial Sequence
  Cyclic GFR-binding peptide
DSANNVVSMEGLVVNNASDMIQITINS

SEQ ID NO: 97698 - protein, 27 aa, Artificial Sequence
  Cyclic GFR-binding peptide
DSANNVVSMEGILLVRGNDMIQMTINS

SEQ ID NO: 97699 - protein, 27 aa, Artificial Sequence
  Cyclic GFR-binding peptide
DSANNVVSMEGLIKPTKGIMIQITINS

SEQ ID NO: 97700 - protein, 27 aa, Artificial Sequence
  Cyclic GFR-binding peptide
DSANNVVSMEGLIVNSSDDMIQVTINS

SEQ ID NO: 97701 - protein, 27 aa, Artificial Sequence
  Cyclic GFR-binding peptide
DSANNVVSMEGIVVNNASDMIQITINS

SEQ ID NO: 97702 - protein, 27 aa, Artificial Sequence
  Cyclic GFR-binding peptide
DSANNVVSMEGLVVNNAADMIQITINS

SEQ ID NO: 97703 - protein, 27 aa, Artificial Sequence
  Cyclic GFR-binding peptide
DSANNVVSMEGLLLVRGNDMIQMTINS

SEQ ID NO: 97704 - protein, 27 aa, Artificial Sequence
  Cyclic GFR-binding peptide
DSANNVVSMEGLIIQQKDNMIQMTINS

SEQ ID NO: 97705 - protein, 27 aa, Artificial Sequence
  Cyclic GFR-binding peptide
DSANNVVSMEGIVVNNAADMIQITINS

SEQ ID NO: 97706 - protein, 27 aa, Artificial Sequence
  Cyclic GFR-binding peptide
DSANNVVSMEGLVKPTRGVMIQITINS

SEQ ID NO: 97707 - protein, 27 aa, Artificial Sequence
  Cyclic GFR-binding peptide
SNITMQIMNDKQQIIIGEMSDSANNVV

SEQ ID NO: 97708 - protein, 27 aa, Artificial Sequence
  Cyclic GFR-binding peptide
SNITIQIMVGRKPKVLGEMSDSANNVV

SEQ ID NO: 97709 - protein, 27 aa, Artificial Sequence
  Cyclic GFR-binding peptide
SNITIQIMDSANNVVLGEMSDSANNVV

SEQ ID NO: 97710 - protein, 27 aa, Artificial Sequence
  Cyclic GFR-binding peptide
SNITMQIMDNGRVLLIGEMSDSANNVV

SEQ ID NO: 97711 - protein, 27 aa, Artificial Sequence
  Cyclic GFR-binding peptide
SNITIQIMIGKTPKILGEMSDSANNVV

SEQ ID NO: 97712 - protein, 27 aa, Artificial Sequence
  Cyclic GFR-binding peptide
SNITVQIMDDSSNVILGEMSDSANNVV

SEQ ID NO: 97713 - protein, 27 aa, Artificial Sequence
  Cyclic GFR-binding peptide
SNITIQIMDSANNVVIGEMSDSANNVV

SEQ ID NO: 97714 - protein, 27 aa, Artificial Sequence
  Cyclic GFR-binding peptide
SNITIQIMDAANNVVLGEMSDSANNVV

SEQ ID NO: 97715 - protein, 27 aa, Artificial Sequence
  Cyclic GFR-binding peptide
SNITMQIMDNGRVLLLGEMSDSANNVV

SEQ ID NO: 97716 - protein, 27 aa, Artificial Sequence
  Cyclic GFR-binding peptide
SNITMQIMNDKQQIILGEMSDSANNVV

SEQ ID NO: 97717 - protein, 27 aa, Artificial Sequence
  Cyclic GFR-binding peptide
SNITIQIMDAANNVVIGEMSDSANNVV

SEQ ID NO: 97718 - protein, 27 aa, Artificial Sequence
  Cyclic GFR-binding peptide
SNITIQIMVGRTPKVLGEMSDSANNVV

SEQ ID NO: 97719 - protein, 27 aa, Artificial Sequence
  Cyclic GFR-binding peptide
DSANNVVQYNKLVVNKNEDLYLISIAS

SEQ ID NO: 97720 - protein, 27 aa, Artificial Sequence
  Cyclic GFR-binding peptide
DSANNVVQYNKLVVNNAADLYLISIAS

SEQ ID NO: 97721 - protein, 27 aa, Artificial Sequence
  Cyclic GFR-binding peptide
DSANNVVQYNKLIIQQKDNLYLMSIAS

SEQ ID NO: 97722 - protein, 27 aa, Artificial Sequence
  Cyclic GFR-binding peptide
DSANNVVQYNKLLLVRGNDLYLMSIAS

SEQ ID NO: 97723 - protein, 27 aa, Artificial Sequence
  Cyclic GFR-binding peptide
DSANNVVQYNKLYTVVGKDLYLISIAS

SEQ ID NO: 97724 - protein, 27 aa, Artificial Sequence
  Cyclic GFR-binding peptide
SAISILYLDENKNVVLKNYQDSANNVV

SEQ ID NO: 97725 - protein, 27 aa, Artificial Sequence
  Cyclic GFR-binding peptide
SAISILYLDAANNVVLKNYQDSANNVV

SEQ ID NO: 97726 - protein, 27 aa, Artificial Sequence
  Cyclic GFR-binding peptide
SAISMLYLNDKQQIILKNYQDSANNVV

SEQ ID NO: 97727 - protein, 27 aa, Artificial Sequence
  Cyclic GFR-binding peptide
SAISMLYLDNGRVLLLKNYQDSANNVV

SEQ ID NO: 97728 - protein, 27 aa, Artificial Sequence
  Cyclic GFR-binding peptide
SAISILYLDKGVVTYLKNYQDSANNVV

SEQ ID NO: 97729 - protein, 27 aa, Artificial Sequence
  Cyclic GFR-binding peptide
DNGRVLLRYKKLIKPTKGIFYLISIAN

SEQ ID NO: 97730 - protein, 29 aa, Artificial Sequence
  Cyclic GFR-binding peptide
DNGRVLLRHKRLFIPKKRVIEYYLVSTAS

SEQ ID NO: 97731 - protein, 27 aa, Artificial Sequence
  Cyclic GFR-binding peptide
DNGRVLLYHYKLVVKDYEDKYLMSIPS

SEQ ID NO: 97732 - protein, 27 aa, Artificial Sequence
  Cyclic GFR-binding peptide
DNGRVLLQYNKLIVNNSSDLYLVSIAS

SEQ ID NO: 97733 - protein, 27 aa, Artificial Sequence
  Cyclic GFR-binding peptide
DNGRVLLRYKKLVVKDYEDFYLMSIAN

SEQ ID NO: 97734 - protein, 27 aa, Artificial Sequence
  Cyclic GFR-binding peptide
DNGRVLLRYKKLVKPTRGVFYLISIAN

SEQ ID NO: 97735 - protein, 27 aa, Artificial Sequence
  Cyclic GFR-binding peptide
DNGRVLLRHKRLVVKENEDYYLMSTAS

SEQ ID NO: 97736 - protein, 27 aa, Artificial Sequence
  Cyclic GFR-binding peptide
DNGRVLLYHYKLIKPTKGIKYLISIPS

SEQ ID NO: 97737 - protein, 29 aa, Artificial Sequence
  Cyclic GFR-binding peptide
DNGRVLLRYKKLFIPKKRVIEFYLVSIAN

SEQ ID NO: 97738 - protein, 27 aa, Artificial Sequence
  Cyclic GFR-binding peptide
DNGRVLLYHYKLVVKENEDKYLMSIPS

SEQ ID NO: 97739 - protein, 27 aa, Artificial Sequence
  Cyclic GFR-binding peptide
DNGRVLLRHKRLVKPKRGVYYLISTAS

SEQ ID NO: 97740 - protein, 27 aa, Artificial Sequence
  Cyclic GFR-binding peptide
DNGRVLLYHYKLVKPKRGVKYLISIPS

SEQ ID NO: 97741 - protein, 29 aa, Artificial Sequence
  Cyclic GFR-binding peptide
DNGRVLLQYNKLFIPKKRVIELYLVSIAS

SEQ ID NO: 97742 - protein, 27 aa, Artificial Sequence
  Cyclic GFR-binding peptide
DNGRVLLQYNKLVKPTRGVLYLISIAS

SEQ ID NO: 97743 - protein, 27 aa, Artificial Sequence
  Cyclic GFR-binding peptide
DNGRVLLRYKKLVVKENEDFYLMSIAN

SEQ ID NO: 97744 - protein, 27 aa, Artificial Sequence
  Cyclic GFR-binding peptide
DNGRVLLQYNKLTPVGMDDLYLVSIAS

SEQ ID NO: 97745 - protein, 27 aa, Artificial Sequence
  Cyclic GFR-binding peptide
DNGRVLLRYKKLTPVGMDDFYLVSIAN

SEQ ID NO: 97746 - protein, 27 aa, Artificial Sequence
  Cyclic GFR-binding peptide
DNGRVLLRYKKLVKPKRGVFYLISIAN

SEQ ID NO: 97747 - protein, 27 aa, Artificial Sequence
  Cyclic GFR-binding peptide
DNGRVLLQYNKLVVKENEDLYLMSIAS

SEQ ID NO: 97748 - protein, 27 aa, Artificial Sequence
  Cyclic GFR-binding peptide
DNGRVLLYHYKLIVNSSDDKYLVSIPS

SEQ ID NO: 97749 - protein, 27 aa, Artificial Sequence
  Cyclic GFR-binding peptide
DNGRVLLQYNKLVKPKRGVLYLISIAS

SEQ ID NO: 97750 - protein, 27 aa, Artificial Sequence
  Cyclic GFR-binding peptide
DNGRVLLRYKKLIVNNSSDFYLVSIAN

SEQ ID NO: 97751 - protein, 27 aa, Artificial Sequence
  Cyclic GFR-binding peptide
DNGRVLLRYKKLIVNSSDDFYLVSIAN

SEQ ID NO: 97752 - protein, 27 aa, Artificial Sequence
  Cyclic GFR-binding peptide
DNGRVLLRHKRLVKPTRGVYYLISTAS

SEQ ID NO: 97753 - protein, 29 aa, Artificial Sequence
  Cyclic GFR-binding peptide
DNGRVLLYHYKLFIPKKRVIEKYLVSIPS

SEQ ID NO: 97754 - protein, 27 aa, Artificial Sequence
  Cyclic GFR-binding peptide
DNGRVLLRHKRLIKPTKGIYYLISTAS

SEQ ID NO: 97755 - protein, 27 aa, Artificial Sequence
  Cyclic GFR-binding peptide
DNGRVLLRHKRLTPVGMDDYYLVSTAS

SEQ ID NO: 97756 - protein, 27 aa, Artificial Sequence
  Cyclic GFR-binding peptide
DNGRVLLYHYKLTPVGMDDKYLVSIPS

SEQ ID NO: 97757 - protein, 27 aa, Artificial Sequence
  Cyclic GFR-binding peptide
DNGRVLLYHYKLIVNNSSDKYLVSIPS

SEQ ID NO: 97758 - protein, 27 aa, Artificial Sequence
  Cyclic GFR-binding peptide
DNGRVLLRHKRLIVNNSSDYYLVSTAS

SEQ ID NO: 97759 - protein, 27 aa, Artificial Sequence
  Cyclic GFR-binding peptide
DNGRVLLYHYKLVKPTRGVKYLISIPS

SEQ ID NO: 97760 - protein, 27 aa, Artificial Sequence
  Cyclic GFR-binding peptide
DNGRVLLRHKRLIVNSSDDYYLVSTAS

SEQ ID NO: 97761 - protein, 27 aa, Artificial Sequence
  Cyclic GFR-binding peptide
DNGRVLLRHKRLVVKDYEDYYLMSTAS

SEQ ID NO: 97762 - protein, 27 aa, Artificial Sequence
  Cyclic GFR-binding peptide
DNGRVLLQYNKLIKPTKGILYLISIAS

SEQ ID NO: 97763 - protein, 27 aa, Artificial Sequence
  Cyclic GFR-binding peptide
DNGRVLLQYNKLVVKDYEDLYLMSIAS

SEQ ID NO: 97764 - protein, 27 aa, Artificial Sequence
  Cyclic GFR-binding peptide
DNGRVLLQYNKLIVNSSDDLYLVSIAS

SEQ ID NO: 97765 - protein, 27 aa, Artificial Sequence
  Cyclic GFR-binding peptide
NAISILYFIGKTPKILKKYRDNGRVLL

SEQ ID NO: 97766 - protein, 29 aa, Artificial Sequence
  Cyclic GFR-binding peptide
SATSVLYYEIVRKKPIFLRKHRDNGRVLL

SEQ ID NO: 97767 - protein, 27 aa, Artificial Sequence
  Cyclic GFR-binding peptide
SPISMLYKDEYDKVVLKYHYDNGRVLL

SEQ ID NO: 97768 - protein, 27 aa, Artificial Sequence
  Cyclic GFR-binding peptide
SAISVLYLDSSNNVILKNYQDNGRVLL

SEQ ID NO: 97769 - protein, 27 aa, Artificial Sequence
  Cyclic GFR-binding peptide
NAISMLYFDEYDKVVLKKYRDNGRVLL

SEQ ID NO: 97770 - protein, 27 aa, Artificial Sequence
  Cyclic GFR-binding peptide
NAISILYFVGRTPKVLKKYRDNGRVLL

SEQ ID NO: 97771 - protein, 27 aa, Artificial Sequence
  Cyclic GFR-binding peptide
SATSMLYYDENEKVVLRKHRDNGRVLL

SEQ ID NO: 97772 - protein, 27 aa, Artificial Sequence
  Cyclic GFR-binding peptide
SPISILYKIGKTPKILKYHYDNGRVLL

SEQ ID NO: 97773 - protein, 29 aa, Artificial Sequence
  Cyclic GFR-binding peptide
NAISVLYFEIVRKKPIFLKKYRDNGRVLL

SEQ ID NO: 97774 - protein, 27 aa, Artificial Sequence
  Cyclic GFR-binding peptide
SPISMLYKDENEKVVLKYHYDNGRVLL

SEQ ID NO: 97775 - protein, 27 aa, Artificial Sequence
  Cyclic GFR-binding peptide
SATSILYYVGRKPKVLRKHRDNGRVLL

SEQ ID NO: 97776 - protein, 27 aa, Artificial Sequence
  Cyclic GFR-binding peptide
SPISILYKVGRKPKVLKYHYDNGRVLL

SEQ ID NO: 97777 - protein, 29 aa, Artificial Sequence
  Cyclic GFR-binding peptide
SAISVLYLEIVRKKPIFLKNYQDNGRVLL

SEQ ID NO: 97778 - protein, 27 aa, Artificial Sequence
  Cyclic GFR-binding peptide
SAISILYLVGRTPKVLKNYQDNGRVLL

SEQ ID NO: 97779 - protein, 27 aa, Artificial Sequence
  Cyclic GFR-binding peptide
NAISMLYFDENEKVVLKKYRDNGRVLL

SEQ ID NO: 97780 - protein, 27 aa, Artificial Sequence
  Cyclic GFR-binding peptide
SAISVLYLDDMGVPTLKNYQDNGRVLL

SEQ ID NO: 97781 - protein, 27 aa, Artificial Sequence
  Cyclic GFR-binding peptide
NAISVLYFDDMGVPTLKKYRDNGRVLL

SEQ ID NO: 97782 - protein, 27 aa, Artificial Sequence
  Cyclic GFR-binding peptide
NAISILYFVGRKPKVLKKYRDNGRVLL

SEQ ID NO: 97783 - protein, 27 aa, Artificial Sequence
  Cyclic GFR-binding peptide
SAISMLYLDENEKVVLKNYQDNGRVLL

SEQ ID NO: 97784 - protein, 27 aa, Artificial Sequence
  Cyclic GFR-binding peptide
SPISVLYKDDSSNVILKYHYDNGRVLL

SEQ ID NO: 97785 - protein, 27 aa, Artificial Sequence
  Cyclic GFR-binding peptide
SAISILYLVGRKPKVLKNYQDNGRVLL

SEQ ID NO: 97786 - protein, 27 aa, Artificial Sequence
  Cyclic GFR-binding peptide
NAISVLYFDSSNNVILKKYRDNGRVLL

SEQ ID NO: 97787 - protein, 27 aa, Artificial Sequence
  Cyclic GFR-binding peptide
NAISVLYFDDSSNVILKKYRDNGRVLL

SEQ ID NO: 97788 - protein, 27 aa, Artificial Sequence
  Cyclic GFR-binding peptide
SATSILYYVGRTPKVLRKHRDNGRVLL

SEQ ID NO: 97789 - protein, 29 aa, Artificial Sequence
  Cyclic GFR-binding peptide
SPISVLYKEIVRKKPIFLKYHYDNGRVLL

SEQ ID NO: 97790 - protein, 27 aa, Artificial Sequence
  Cyclic GFR-binding peptide
SATSILYYIGKTPKILRKHRDNGRVLL

SEQ ID NO: 97791 - protein, 27 aa, Artificial Sequence
  Cyclic GFR-binding peptide
SATSVLYYDDMGVPTLRKHRDNGRVLL

SEQ ID NO: 97792 - protein, 27 aa, Artificial Sequence
  Cyclic GFR-binding peptide
SPISVLYKDDMGVPTLKYHYDNGRVLL

SEQ ID NO: 97793 - protein, 27 aa, Artificial Sequence
  Cyclic GFR-binding peptide
SPISVLYKDSSNNVILKYHYDNGRVLL

SEQ ID NO: 97794 - protein, 27 aa, Artificial Sequence
  Cyclic GFR-binding peptide
SATSVLYYDSSNNVILRKHRDNGRVLL

SEQ ID NO: 97795 - protein, 27 aa, Artificial Sequence
  Cyclic GFR-binding peptide
SPISILYKVGRTPKVLKYHYDNGRVLL

SEQ ID NO: 97796 - protein, 27 aa, Artificial Sequence
  Cyclic GFR-binding peptide
SATSVLYYDDSSNVILRKHRDNGRVLL

SEQ ID NO: 97797 - protein, 27 aa, Artificial Sequence
  Cyclic GFR-binding peptide
SATSMLYYDEYDKVVLRKHRDNGRVLL

SEQ ID NO: 97798 - protein, 27 aa, Artificial Sequence
  Cyclic GFR-binding peptide
SAISILYLIGKTPKILKNYQDNGRVLL

SEQ ID NO: 97799 - protein, 27 aa, Artificial Sequence
  Cyclic GFR-binding peptide
SAISMLYLDEYDKVVLKNYQDNGRVLL

SEQ ID NO: 97800 - protein, 27 aa, Artificial Sequence
  Cyclic GFR-binding peptide
SAISVLYLDDSSNVILKNYQDNGRVLL

SEQ ID NO: 97801 - protein, 27 aa, Artificial Sequence
  Cyclic GFR-binding peptide
DNGRVLLNSLQEVVKDYEDYYLMTLPE

SEQ ID NO: 97802 - protein, 27 aa, Artificial Sequence
  Cyclic GFR-binding peptide
DNGRVLLNSLQEIKPTKGIYYVIPLPE

SEQ ID NO: 97803 - protein, 27 aa, Artificial Sequence
  Cyclic GFR-binding peptide
DNGRVLLNSLQEVKPKRGVYYLITLPE

SEQ ID NO: 97804 - protein, 27 aa, Artificial Sequence
  Cyclic GFR-binding peptide
DNGRVLLNSLQEVKPTRGVYYVIPLPE

SEQ ID NO: 97805 - protein, 27 aa, Artificial Sequence
  Cyclic GFR-binding peptide
DNGRVLLEYQKYIVNSSDDIFLVSIPS

SEQ ID NO: 97806 - protein, 27 aa, Artificial Sequence
  Cyclic GFR-binding peptide
DNGRVLLEYQKYVKPTRGVIFLISIPS

SEQ ID NO: 97807 - protein, 27 aa, Artificial Sequence
  Cyclic GFR-binding peptide
DNGRVLLNSLQEVVKENEDYYLMTLPE

SEQ ID NO: 97808 - protein, 27 aa, Artificial Sequence
  Cyclic GFR-binding peptide
DNGRVLLNSLQEVVNNASDYYLITLPE

SEQ ID NO: 97809 - protein, 27 aa, Artificial Sequence
  Cyclic GFR-binding peptide
DNGRVLLNSLQEVKPKRGVYYVIPLPE

SEQ ID NO: 97810 - protein, 27 aa, Artificial Sequence
  Cyclic GFR-binding peptide
DNGRVLLNSLQEVVNNASDYYVIPLPE

SEQ ID NO: 97811 - protein, 27 aa, Artificial Sequence
  Cyclic GFR-binding peptide
DNGRVLLNSLQEVKPTRGVYYLITLPE

SEQ ID NO: 97812 - protein, 27 aa, Artificial Sequence
  Cyclic GFR-binding peptide
DNGRVLLEYQKYIKPTKGIIFLISIPS

SEQ ID NO: 97813 - protein, 27 aa, Artificial Sequence
  Cyclic GFR-binding peptide
DNGRVLLEYQKYVVNNASDIFLISIPS

SEQ ID NO: 97814 - protein, 27 aa, Artificial Sequence
  Cyclic GFR-binding peptide
DNGRVLLNSLQEIVNSSDDYYVVPLPE

SEQ ID NO: 97815 - protein, 27 aa, Artificial Sequence
  Cyclic GFR-binding peptide
DNGRVLLNSLQEVVKDYEDYYVMPLPE

SEQ ID NO: 97816 - protein, 27 aa, Artificial Sequence
  Cyclic GFR-binding peptide
DNGRVLLEYQKYVVKENEDIFLMSIPS

SEQ ID NO: 97817 - protein, 27 aa, Artificial Sequence
  Cyclic GFR-binding peptide
DNGRVLLNSLQEVVKENEDYYVMPLPE

SEQ ID NO: 97818 - protein, 27 aa, Artificial Sequence
  Cyclic GFR-binding peptide
DNGRVLLEYQKYVVKDYEDIFLMSIPS

SEQ ID NO: 97819 - protein, 27 aa, Artificial Sequence
  Cyclic GFR-binding peptide
DNGRVLLQYNKLVVNNASDLYLISIAS

SEQ ID NO: 97820 - protein, 27 aa, Artificial Sequence
  Cyclic GFR-binding peptide
DNGRVLLNSLQEIKPTKGIYYLITLPE

SEQ ID NO: 97821 - protein, 27 aa, Artificial Sequence
  Cyclic GFR-binding peptide
DNGRVLLEYQKYVKPKRGVIFLISIPS

SEQ ID NO: 97822 - protein, 27 aa, Artificial Sequence
  Cyclic GFR-binding peptide
DNGRVLLRYKKLVVNNASDFYLISIAN

SEQ ID NO: 97823 - protein, 27 aa, Artificial Sequence
  Cyclic GFR-binding peptide
DNGRVLLNSLQEIVNSSDDYYLVTLPE

SEQ ID NO: 97824 - protein, 27 aa, Artificial Sequence
  Cyclic GFR-binding peptide
EPLTMLYYDEYDKVVEQLSNDNGRVLL

SEQ ID NO: 97825 - protein, 27 aa, Artificial Sequence
  Cyclic GFR-binding peptide
EPLPIVYYIGKTPKIEQLSNDNGRVLL

SEQ ID NO: 97826 - protein, 27 aa, Artificial Sequence
  Cyclic GFR-binding peptide
EPLTILYYVGRKPKVEQLSNDNGRVLL

SEQ ID NO: 97827 - protein, 27 aa, Artificial Sequence
  Cyclic GFR-binding peptide
EPLPIVYYVGRTPKVEQLSNDNGRVLL

SEQ ID NO: 97828 - protein, 27 aa, Artificial Sequence
  Cyclic GFR-binding peptide
SPISVLFIDDSSNVIYKQYEDNGRVLL

SEQ ID NO: 97829 - protein, 27 aa, Artificial Sequence
  Cyclic GFR-binding peptide
SPISILFIVGRTPKVYKQYEDNGRVLL

SEQ ID NO: 97830 - protein, 27 aa, Artificial Sequence
  Cyclic GFR-binding peptide
EPLTMLYYDENEKVVEQLSNDNGRVLL

SEQ ID NO: 97831 - protein, 27 aa, Artificial Sequence
  Cyclic GFR-binding peptide
EPLTILYYDSANNVVEQLSNDNGRVLL

SEQ ID NO: 97832 - protein, 27 aa, Artificial Sequence
  Cyclic GFR-binding peptide
EPLPIVYYVGRKPKVEQLSNDNGRVLL

SEQ ID NO: 97833 - protein, 27 aa, Artificial Sequence
  Cyclic GFR-binding peptide
EPLPIVYYDSANNVVEQLSNDNGRVLL

SEQ ID NO: 97834 - protein, 27 aa, Artificial Sequence
  Cyclic GFR-binding peptide
EPLTILYYVGRTPKVEQLSNDNGRVLL

SEQ ID NO: 97835 - protein, 27 aa, Artificial Sequence
  Cyclic GFR-binding peptide
SPISILFIIGKTPKIYKQYEDNGRVLL

SEQ ID NO: 97836 - protein, 27 aa, Artificial Sequence
  Cyclic GFR-binding peptide
SPISILFIDSANNVVYKQYEDNGRVLL

SEQ ID NO: 97837 - protein, 27 aa, Artificial Sequence
  Cyclic GFR-binding peptide
EPLPVVYYDDSSNVIEQLSNDNGRVLL

SEQ ID NO: 97838 - protein, 27 aa, Artificial Sequence
  Cyclic GFR-binding peptide
EPLPMVYYDEYDKVVEQLSNDNGRVLL

SEQ ID NO: 97839 - protein, 27 aa, Artificial Sequence
  Cyclic GFR-binding peptide
SPISMLFIDENEKVVYKQYEDNGRVLL

SEQ ID NO: 97840 - protein, 27 aa, Artificial Sequence
  Cyclic GFR-binding peptide
EPLPMVYYDENEKVVEQLSNDNGRVLL

SEQ ID NO: 97841 - protein, 27 aa, Artificial Sequence
  Cyclic GFR-binding peptide
SPISMLFIDEYDKVVYKQYEDNGRVLL

SEQ ID NO: 97842 - protein, 27 aa, Artificial Sequence
  Cyclic GFR-binding peptide
SAISILYLDSANNVVLKNYQDNGRVLL

SEQ ID NO: 97843 - protein, 27 aa, Artificial Sequence
  Cyclic GFR-binding peptide
EPLTILYYIGKTPKIEQLSNDNGRVLL

SEQ ID NO: 97844 - protein, 27 aa, Artificial Sequence
  Cyclic GFR-binding peptide
SPISILFIVGRKPKVYKQYEDNGRVLL

SEQ ID NO: 97845 - protein, 27 aa, Artificial Sequence
  Cyclic GFR-binding peptide
NAISILYFDSANNVVLKKYRDNGRVLL

SEQ ID NO: 97846 - protein, 27 aa, Artificial Sequence
  Cyclic GFR-binding peptide
EPLTVLYYDDSSNVIEQLSNDNGRVLL

SEQ ID NO: 97847 - protein, 29 aa, Artificial Sequence
  Cyclic GFR-binding peptide
DNGRVLLVTAKKLKPKKRVYEIKRVQVPR

SEQ ID NO: 97848 - protein, 29 aa, Artificial Sequence
  Cyclic GFR-binding peptide
DNGRVLLVQVEKLKPKKRVYEVKAVKVSR

SEQ ID NO: 97849 - protein, 29 aa, Artificial Sequence
  Cyclic GFR-binding peptide
DNGRVLLVQVEKFIPKKRVIEVKAVKVSR

SEQ ID NO: 97850 - protein, 29 aa, Artificial Sequence
  Cyclic GFR-binding peptide
DNGRVLLVQVEKHQGQHPKIRVKAMKVSR

SEQ ID NO: 97851 - protein, 29 aa, Artificial Sequence
  Cyclic GFR-binding peptide
DNGRVLLVTAKKHQGQHPKIRIKRMQVPR

SEQ ID NO: 97852 - protein, 29 aa, Artificial Sequence
  Cyclic GFR-binding peptide
DNGRVLLSMEGLLKPKKRVYEMIQVTINS

SEQ ID NO: 97853 - protein, 29 aa, Artificial Sequence
  Cyclic GFR-binding peptide
DNGRVLLSMEGIFIPKKRVIEMIQVTINS

SEQ ID NO: 97854 - protein, 29 aa, Artificial Sequence
  Cyclic GFR-binding peptide
DNGRVLLSMEGLHQGQHPKIRMIQMTINS

SEQ ID NO: 97855 - protein, 29 aa, Artificial Sequence
  Cyclic GFR-binding peptide
DNGRVLLSMEGILKPKKRVYEMIQVTINS

SEQ ID NO: 97856 - protein, 29 aa, Artificial Sequence
  Cyclic GFR-binding peptide
DNGRVLLSMEGLFIPKKRVIEMIQVTINS

SEQ ID NO: 97857 - protein, 29 aa, Artificial Sequence
  Cyclic GFR-binding peptide
DNGRVLLVTAKKFIPKKRVIEIKRVQVPR

SEQ ID NO: 97858 - protein, 29 aa, Artificial Sequence
  Cyclic GFR-binding peptide
DNGRVLLSMEGIHQGQHPKIRMIQMTINS

SEQ ID NO: 97859 - protein, 29 aa, Artificial Sequence
  Cyclic GFR-binding peptide
RPVQVRKIEYVRKKPKLKKATVDNGRVLL

SEQ ID NO: 97860 - protein, 29 aa, Artificial Sequence
  Cyclic GFR-binding peptide
RSVKVAKVEYVRKKPKLKEVQVDNGRVLL

SEQ ID NO: 97861 - protein, 29 aa, Artificial Sequence
  Cyclic GFR-binding peptide
RSVKVAKVEIVRKKPIFKEVQVDNGRVLL

SEQ ID NO: 97862 - protein, 29 aa, Artificial Sequence
  Cyclic GFR-binding peptide
RSVKMAKVRIKPHQGQHKEVQVDNGRVLL

SEQ ID NO: 97863 - protein, 29 aa, Artificial Sequence
  Cyclic GFR-binding peptide
RPVQMRKIRIKPHQGQHKKATVDNGRVLL

SEQ ID NO: 97864 - protein, 29 aa, Artificial Sequence
  Cyclic GFR-binding peptide
SNITVQIMEYVRKKPKLLGEMSDNGRVLL

SEQ ID NO: 97865 - protein, 29 aa, Artificial Sequence
  Cyclic GFR-binding peptide
SNITVQIMEIVRKKPIFIGEMSDNGRVLL

SEQ ID NO: 97866 - protein, 29 aa, Artificial Sequence
  Cyclic GFR-binding peptide
SNITMQIMRIKPHQGQHLGEMSDNGRVLL

SEQ ID NO: 97867 - protein, 29 aa, Artificial Sequence
  Cyclic GFR-binding peptide
SNITVQIMEYVRKKPKLIGEMSDNGRVLL

SEQ ID NO: 97868 - protein, 29 aa, Artificial Sequence
  Cyclic GFR-binding peptide
SNITVQIMEIVRKKPIFLGEMSDNGRVLL

SEQ ID NO: 97869 - protein, 29 aa, Artificial Sequence
  Cyclic GFR-binding peptide
RPVQVRKIEIVRKKPIFKKATVDNGRVLL

SEQ ID NO: 97870 - protein, 29 aa, Artificial Sequence
  Cyclic GFR-binding peptide
SNITMQIMRIKPHQGQHIGEMSDNGRVLL

SEQ ID NO: 97871 - protein, 27 aa, Artificial Sequence
  Cyclic GFR-binding peptide
DNGRVLLEYKFKVKPTRGVLYLISIPE

SEQ ID NO: 97872 - protein, 27 aa, Artificial Sequence
  Cyclic GFR-binding peptide
DNGRVLLEYKFKTPVGMDDLYLVSIPE

SEQ ID NO: 97873 - protein, 27 aa, Artificial Sequence
  Cyclic GFR-binding peptide
DNGRVLLEYQKYVKPKRGVIYLISIPS

SEQ ID NO: 97874 - protein, 27 aa, Artificial Sequence
  Cyclic GFR-binding peptide
DNGRVLLEYQKYVVKDYEDIYLMSIPS

SEQ ID NO: 97875 - protein, 27 aa, Artificial Sequence
  Cyclic GFR-binding peptide
DNGRVLLEYKFKIKPTKGILYLISIPE

SEQ ID NO: 97876 - protein, 27 aa, Artificial Sequence
  Cyclic GFR-binding peptide
DNGRVLLYHYKLYTVVGKDKYLISIPS

SEQ ID NO: 97877 - protein, 27 aa, Artificial Sequence
  Cyclic GFR-binding peptide
DNGRVLLRYKKLYTVVGKDFYLISIAN

SEQ ID NO: 97878 - protein, 27 aa, Artificial Sequence
  Cyclic GFR-binding peptide
DNGRVLLEYQKYVVNNAADIYLISIPS

SEQ ID NO: 97879 - protein, 27 aa, Artificial Sequence
  Cyclic GFR-binding peptide
DNGRVLLEYQKYVKPTRGVIYLISIPS

SEQ ID NO: 97880 - protein, 27 aa, Artificial Sequence
  Cyclic GFR-binding peptide
DNGRVLLEYQKYTPVGMDDIYLVSIPS

SEQ ID NO: 97881 - protein, 27 aa, Artificial Sequence
  Cyclic GFR-binding peptide
DNGRVLLEYKFKVVKDYEDLYLMSIPE

SEQ ID NO: 97882 - protein, 27 aa, Artificial Sequence
  Cyclic GFR-binding peptide
DNGRVLLEYKFKVVNNAADLYLISIPE

SEQ ID NO: 97883 - protein, 27 aa, Artificial Sequence
  Cyclic GFR-binding peptide
DNGRVLLEYQKYVVKENEDIYLMSIPS

SEQ ID NO: 97884 - protein, 27 aa, Artificial Sequence
  Cyclic GFR-binding peptide
DNGRVLLEYQKYIKPTKGIIYLISIPS

SEQ ID NO: 97885 - protein, 27 aa, Artificial Sequence
  Cyclic GFR-binding peptide
DNGRVLLRYKKLVVNNAADFYLISIAN

SEQ ID NO: 97886 - protein, 27 aa, Artificial Sequence
  Cyclic GFR-binding peptide
DNGRVLLYHYKLVVNNAADKYLISIPS

SEQ ID NO: 97887 - protein, 27 aa, Artificial Sequence
  Cyclic GFR-binding peptide
DNGRVLLEYKFKIVNNSSDLYLVSIPE

SEQ ID NO: 97888 - protein, 27 aa, Artificial Sequence
  Cyclic GFR-binding peptide
DNGRVLLEYQKYIVNSSDDIYLVSIPS

SEQ ID NO: 97889 - protein, 27 aa, Artificial Sequence
  Cyclic GFR-binding peptide
DNGRVLLEYKFKIVNSSDDLYLVSIPE

SEQ ID NO: 97890 - protein, 27 aa, Artificial Sequence
  Cyclic GFR-binding peptide
DNGRVLLEYKFKVKPKRGVLYLISIPE

SEQ ID NO: 97891 - protein, 27 aa, Artificial Sequence
  Cyclic GFR-binding peptide
DNGRVLLEYQKYYTVVGKDIYLISIPS

SEQ ID NO: 97892 - protein, 27 aa, Artificial Sequence
  Cyclic GFR-binding peptide
DNGRVLLEYKFKVVKENEDLYLMSIPE

SEQ ID NO: 97893 - protein, 27 aa, Artificial Sequence
  Cyclic GFR-binding peptide
DNGRVLLEYQKYIVNNSSDIYLVSIPS

SEQ ID NO: 97894 - protein, 27 aa, Artificial Sequence
  Cyclic GFR-binding peptide
DNGRVLLEYKFKYTVVGKDLYLISIPE

SEQ ID NO: 97895 - protein, 27 aa, Artificial Sequence
  Cyclic GFR-binding peptide
EPISILYLVGRTPKVKFKYEDNGRVLL

SEQ ID NO: 97896 - protein, 27 aa, Artificial Sequence
  Cyclic GFR-binding peptide
EPISVLYLDDMGVPTKFKYEDNGRVLL

SEQ ID NO: 97897 - protein, 27 aa, Artificial Sequence
  Cyclic GFR-binding peptide
SPISILYIVGRKPKVYKQYEDNGRVLL

SEQ ID NO: 97898 - protein, 27 aa, Artificial Sequence
  Cyclic GFR-binding peptide
SPISMLYIDEYDKVVYKQYEDNGRVLL

SEQ ID NO: 97899 - protein, 27 aa, Artificial Sequence
  Cyclic GFR-binding peptide
EPISILYLIGKTPKIKFKYEDNGRVLL

SEQ ID NO: 97900 - protein, 27 aa, Artificial Sequence
  Cyclic GFR-binding peptide
SPISILYKDKGVVTYLKYHYDNGRVLL

SEQ ID NO: 97901 - protein, 27 aa, Artificial Sequence
  Cyclic GFR-binding peptide
NAISILYFDKGVVTYLKKYRDNGRVLL

SEQ ID NO: 97902 - protein, 27 aa, Artificial Sequence
  Cyclic GFR-binding peptide
SPISILYIDAANNVVYKQYEDNGRVLL

SEQ ID NO: 97903 - protein, 27 aa, Artificial Sequence
  Cyclic GFR-binding peptide
SPISILYIVGRTPKVYKQYEDNGRVLL

SEQ ID NO: 97904 - protein, 27 aa, Artificial Sequence
  Cyclic GFR-binding peptide
SPISVLYIDDMGVPTYKQYEDNGRVLL

SEQ ID NO: 97905 - protein, 27 aa, Artificial Sequence
  Cyclic GFR-binding peptide
EPISMLYLDEYDKVVKFKYEDNGRVLL

SEQ ID NO: 97906 - protein, 27 aa, Artificial Sequence
  Cyclic GFR-binding peptide
EPISILYLDAANNVVKFKYEDNGRVLL

SEQ ID NO: 97907 - protein, 27 aa, Artificial Sequence
  Cyclic GFR-binding peptide
SPISMLYIDENEKVVYKQYEDNGRVLL

SEQ ID NO: 97908 - protein, 27 aa, Artificial Sequence
  Cyclic GFR-binding peptide
SPISILYIIGKTPKIYKQYEDNGRVLL

SEQ ID NO: 97909 - protein, 27 aa, Artificial Sequence
  Cyclic GFR-binding peptide
NAISILYFDAANNVVLKKYRDNGRVLL

SEQ ID NO: 97910 - protein, 27 aa, Artificial Sequence
  Cyclic GFR-binding peptide
SPISILYKDAANNVVLKYHYDNGRVLL

SEQ ID NO: 97911 - protein, 27 aa, Artificial Sequence
  Cyclic GFR-binding peptide
EPISVLYLDSSNNVIKFKYEDNGRVLL

SEQ ID NO: 97912 - protein, 27 aa, Artificial Sequence
  Cyclic GFR-binding peptide
SPISVLYIDDSSNVIYKQYEDNGRVLL

SEQ ID NO: 97913 - protein, 27 aa, Artificial Sequence
  Cyclic GFR-binding peptide
EPISVLYLDDSSNVIKFKYEDNGRVLL

SEQ ID NO: 97914 - protein, 27 aa, Artificial Sequence
  Cyclic GFR-binding peptide
EPISILYLVGRKPKVKFKYEDNGRVLL

SEQ ID NO: 97915 - protein, 27 aa, Artificial Sequence
  Cyclic GFR-binding peptide
SPISILYIDKGVVTYYKQYEDNGRVLL

SEQ ID NO: 97916 - protein, 27 aa, Artificial Sequence
  Cyclic GFR-binding peptide
EPISMLYLDENEKVVKFKYEDNGRVLL

SEQ ID NO: 97917 - protein, 27 aa, Artificial Sequence
  Cyclic GFR-binding peptide
SPISVLYIDSSNNVIYKQYEDNGRVLL

SEQ ID NO: 97918 - protein, 27 aa, Artificial Sequence
  Cyclic GFR-binding peptide
EPISILYLDKGVVTYKFKYEDNGRVLL

SEQ ID NO: 97919 - protein, 27 aa, Artificial Sequence
  Cyclic GFR-binding peptide
DNGRVLLPIKGYIIQQKDNFYLMNIPS

SEQ ID NO: 97920 - protein, 27 aa, Artificial Sequence
  Cyclic GFR-binding peptide
DNGRVLLPIKGYVVKDYEDFYLMNIPS

SEQ ID NO: 97921 - protein, 27 aa, Artificial Sequence
  Cyclic GFR-binding peptide
DNGRVLLPIKGYIVNSSDDFYLVNIPS

SEQ ID NO: 97922 - protein, 27 aa, Artificial Sequence
  Cyclic GFR-binding peptide
DNGRVLLPIKGYVVNNAADFYLINIPS

SEQ ID NO: 97923 - protein, 27 aa, Artificial Sequence
  Cyclic GFR-binding peptide
DNGRVLLPIKGYYTVVGKDFYLINIPS

SEQ ID NO: 97924 - protein, 27 aa, Artificial Sequence
  Cyclic GFR-binding peptide
DNGRVLLPIKGYLLVRGNDFYLMNIPS

SEQ ID NO: 97925 - protein, 27 aa, Artificial Sequence
  Cyclic GFR-binding peptide
DNGRVLLPIKGYVVKENEDFYLMNIPS

SEQ ID NO: 97926 - protein, 27 aa, Artificial Sequence
  Cyclic GFR-binding peptide
DNGRVLLPIKGYVVNNASDFYLINIPS

SEQ ID NO: 97927 - protein, 27 aa, Artificial Sequence
  Cyclic GFR-binding peptide
DNGRVLLPIKGYTPVGMDDFYLVNIPS

SEQ ID NO: 97928 - protein, 27 aa, Artificial Sequence
  Cyclic GFR-binding peptide
DNGRVLLPIKGYIVNNSSDFYLVNIPS

SEQ ID NO: 97929 - protein, 27 aa, Artificial Sequence
  Cyclic GFR-binding peptide
SPINMLYFNDKQQIIYGKIPDNGRVLL

SEQ ID NO: 97930 - protein, 27 aa, Artificial Sequence
  Cyclic GFR-binding peptide
SPINMLYFDEYDKVVYGKIPDNGRVLL

SEQ ID NO: 97931 - protein, 27 aa, Artificial Sequence
  Cyclic GFR-binding peptide
SPINVLYFDDSSNVIYGKIPDNGRVLL

SEQ ID NO: 97932 - protein, 27 aa, Artificial Sequence
  Cyclic GFR-binding peptide
SPINILYFDAANNVVYGKIPDNGRVLL

SEQ ID NO: 97933 - protein, 27 aa, Artificial Sequence
  Cyclic GFR-binding peptide
SPINILYFDKGVVTYYGKIPDNGRVLL

SEQ ID NO: 97934 - protein, 27 aa, Artificial Sequence
  Cyclic GFR-binding peptide
SPINMLYFDNGRVLLYGKIPDNGRVLL

SEQ ID NO: 97935 - protein, 27 aa, Artificial Sequence
  Cyclic GFR-binding peptide
SPINMLYFDENEKVVYGKIPDNGRVLL

SEQ ID NO: 97936 - protein, 27 aa, Artificial Sequence
  Cyclic GFR-binding peptide
SPINILYFDSANNVVYGKIPDNGRVLL

SEQ ID NO: 97937 - protein, 27 aa, Artificial Sequence
  Cyclic GFR-binding peptide
SPINVLYFDDMGVPTYGKIPDNGRVLL

SEQ ID NO: 97938 - protein, 27 aa, Artificial Sequence
  Cyclic GFR-binding peptide
SPINVLYFDSSNNVIYGKIPDNGRVLL

SEQ ID NO: 97939 - protein, 27 aa, Artificial Sequence
  Cyclic GFR-binding peptide
DNGRVLLEYQKYVVNNASDIYLISIPS

SEQ ID NO: 97940 - protein, 27 aa, Artificial Sequence
  Cyclic GFR-binding peptide
DNGRVLLEYQKYIIQQKDNIYLMSIPS

SEQ ID NO: 97941 - protein, 27 aa, Artificial Sequence
  Cyclic GFR-binding peptide
DNGRVLLEYQKYLLVRGNDIYLMSIPS

SEQ ID NO: 97942 - protein, 27 aa, Artificial Sequence
  Cyclic GFR-binding peptide
SPISILYIDSANNVVYKQYEDNGRVLL

SEQ ID NO: 97943 - protein, 27 aa, Artificial Sequence
  Cyclic GFR-binding peptide
SPISMLYINDKQQIIYKQYEDNGRVLL

SEQ ID NO: 97944 - protein, 27 aa, Artificial Sequence
  Cyclic GFR-binding peptide
SPISMLYIDNGRVLLYKQYEDNGRVLL

SEQ ID NO: 97945 - protein, 27 aa, Artificial Sequence
  Cyclic GFR-binding peptide
DNGRVLLPYVKLYTVVGKDFFLISLSS

SEQ ID NO: 97946 - protein, 27 aa, Artificial Sequence
  Cyclic GFR-binding peptide
DNGRVLLPYVKLIKPTKGIFFLISLSS

SEQ ID NO: 97947 - protein, 27 aa, Artificial Sequence
  Cyclic GFR-binding peptide
DNGRVLLPYVKLIIQQKDNFFLMSLSS

SEQ ID NO: 97948 - protein, 27 aa, Artificial Sequence
  Cyclic GFR-binding peptide
DNGRVLLPYVKLIVNSSDDFFLVSLSS

SEQ ID NO: 97949 - protein, 27 aa, Artificial Sequence
  Cyclic GFR-binding peptide
DNGRVLLPYVKLVKPKRGVFFLISLSS

SEQ ID NO: 97950 - protein, 27 aa, Artificial Sequence
  Cyclic GFR-binding peptide
DNGRVLLPYVKLVKPTRGVFFLISLSS

SEQ ID NO: 97951 - protein, 27 aa, Artificial Sequence
  Cyclic GFR-binding peptide
DNGRVLLPYVKLTPVGMDDFFLVSLSS

SEQ ID NO: 97952 - protein, 29 aa, Artificial Sequence
  Cyclic GFR-binding peptide
DNGRVLLPYVKLHQGQHPKIRFFLMSLSS

SEQ ID NO: 97953 - protein, 27 aa, Artificial Sequence
  Cyclic GFR-binding peptide
DNGRVLLPYVKLVVNKNEDFFLISLSS

SEQ ID NO: 97954 - protein, 27 aa, Artificial Sequence
  Cyclic GFR-binding peptide
DNGRVLLPYVKLVVNNASDFFLISLSS

SEQ ID NO: 97955 - protein, 27 aa, Artificial Sequence
  Cyclic GFR-binding peptide
DNGRVLLPYVKLVVKENEDFFLMSLSS

SEQ ID NO: 97956 - protein, 27 aa, Artificial Sequence
  Cyclic GFR-binding peptide
DNGRVLLPYVKLIVNNSSDFFLVSLSS

SEQ ID NO: 97957 - protein, 29 aa, Artificial Sequence
  Cyclic GFR-binding peptide
DNGRVLLPYVKLLKPKKRVYEFFLVSLSS

SEQ ID NO: 97958 - protein, 27 aa, Artificial Sequence
  Cyclic GFR-binding peptide
DNGRVLLPYVKLLLVRGNDFFLMSLSS

SEQ ID NO: 97959 - protein, 27 aa, Artificial Sequence
  Cyclic GFR-binding peptide
DNGRVLLPYVKLVVKDYEDFFLMSLSS

SEQ ID NO: 97960 - protein, 27 aa, Artificial Sequence
  Cyclic GFR-binding peptide
DNGRVLLPYVKLVVNNAADFFLISLSS

SEQ ID NO: 97961 - protein, 27 aa, Artificial Sequence
  Cyclic GFR-binding peptide
SSLSILFFDKGVVTYLKVYPDNGRVLL

SEQ ID NO: 97962 - protein, 27 aa, Artificial Sequence
  Cyclic GFR-binding peptide
SSLSILFFIGKTPKILKVYPDNGRVLL

SEQ ID NO: 97963 - protein, 27 aa, Artificial Sequence
  Cyclic GFR-binding peptide
SSLSMLFFNDKQQIILKVYPDNGRVLL

SEQ ID NO: 97964 - protein, 27 aa, Artificial Sequence
  Cyclic GFR-binding peptide
SSLSVLFFDDSSNVILKVYPDNGRVLL

SEQ ID NO: 97965 - protein, 27 aa, Artificial Sequence
  Cyclic GFR-binding peptide
SSLSILFFVGRKPKVLKVYPDNGRVLL

SEQ ID NO: 97966 - protein, 27 aa, Artificial Sequence
  Cyclic GFR-binding peptide
SSLSILFFVGRTPKVLKVYPDNGRVLL

SEQ ID NO: 97967 - protein, 27 aa, Artificial Sequence
  Cyclic GFR-binding peptide
SSLSVLFFDDMGVPTLKVYPDNGRVLL

SEQ ID NO: 97968 - protein, 29 aa, Artificial Sequence
  Cyclic GFR-binding peptide
SSLSMLFFRIKPHQGQHLKVYPDNGRVLL

SEQ ID NO: 97969 - protein, 27 aa, Artificial Sequence
  Cyclic GFR-binding peptide
SSLSILFFDENKNVVLKVYPDNGRVLL

SEQ ID NO: 97970 - protein, 27 aa, Artificial Sequence
  Cyclic GFR-binding peptide
SSLSILFFDSANNVVLKVYPDNGRVLL

SEQ ID NO: 97971 - protein, 27 aa, Artificial Sequence
  Cyclic GFR-binding peptide
SSLSMLFFDENEKVVLKVYPDNGRVLL

SEQ ID NO: 97972 - protein, 27 aa, Artificial Sequence
  Cyclic GFR-binding peptide
SSLSVLFFDSSNNVILKVYPDNGRVLL

SEQ ID NO: 97973 - protein, 29 aa, Artificial Sequence
  Cyclic GFR-binding peptide
SSLSVLFFEYVRKKPKLLKVYPDNGRVLL

SEQ ID NO: 97974 - protein, 27 aa, Artificial Sequence
  Cyclic GFR-binding peptide
SSLSMLFFDNGRVLLLKVYPDNGRVLL

SEQ ID NO: 97975 - protein, 27 aa, Artificial Sequence
  Cyclic GFR-binding peptide
SSLSMLFFDEYDKVVLKVYPDNGRVLL

SEQ ID NO: 97976 - protein, 27 aa, Artificial Sequence
  Cyclic GFR-binding peptide
SSLSILFFDAANNVVLKVYPDNGRVLL

SEQ ID NO: 97977 - protein, 27 aa, Artificial Sequence
  Cyclic GFR-binding peptide
DNGRVLLSMEGIIVNSSDDMIQVTINS

SEQ ID NO: 97978 - protein, 27 aa, Artificial Sequence
  Cyclic GFR-binding peptide
DNGRVLLVTAKKVVKENEDIKRMQVPR

SEQ ID NO: 97979 - protein, 27 aa, Artificial Sequence
  Cyclic GFR-binding peptide
DNGRVLLSMEGIVVKDYEDMIQMTINS

SEQ ID NO: 97980 - protein, 27 aa, Artificial Sequence
  Cyclic GFR-binding peptide
DNGRVLLVTAKKIKPTKGIIKRIQVPR

SEQ ID NO: 97981 - protein, 27 aa, Artificial Sequence
  Cyclic GFR-binding peptide
DNGRVLLSMEGIVKPTRGVMIQITINS

SEQ ID NO: 97982 - protein, 29 aa, Artificial Sequence
  Cyclic GFR-binding peptide
DNGRVLLNSLQEFIPKKRVIEYYVVPLPE

SEQ ID NO: 97983 - protein, 27 aa, Artificial Sequence
  Cyclic GFR-binding peptide
DNGRVLLVQVEKVKPKRGVVKAIKVSR

SEQ ID NO: 97984 - protein, 27 aa, Artificial Sequence
  Cyclic GFR-binding peptide
DNGRVLLVQVEKVVKENEDVKAMKVSR

SEQ ID NO: 97985 - protein, 27 aa, Artificial Sequence
  Cyclic GFR-binding peptide
DNGRVLLVTAKKIVNSSDDIKRVQVPR

SEQ ID NO: 97986 - protein, 27 aa, Artificial Sequence
  Cyclic GFR-binding peptide
DNGRVLLVQVEKIKPTKGIVKAIKVSR

SEQ ID NO: 97987 - protein, 29 aa, Artificial Sequence
  Cyclic GFR-binding peptide
DNGRVLLNSLQEFIPKKRVIEYYLVTLPE

SEQ ID NO: 97988 - protein, 27 aa, Artificial Sequence
  Cyclic GFR-binding peptide
DNGRVLLVQVEKIVNSSDDVKAVKVSR

SEQ ID NO: 97989 - protein, 27 aa, Artificial Sequence
  Cyclic GFR-binding peptide
DNGRVLLVTAKKVKPKRGVIKRIQVPR

SEQ ID NO: 97990 - protein, 27 aa, Artificial Sequence
  Cyclic GFR-binding peptide
DNGRVLLVQVEKVKPTRGVVKAIKVSR

SEQ ID NO: 97991 - protein, 27 aa, Artificial Sequence
  Cyclic GFR-binding peptide
DNGRVLLVTAKKVKPTRGVIKRIQVPR

SEQ ID NO: 97992 - protein, 29 aa, Artificial Sequence
  Cyclic GFR-binding peptide
DNGRVLLNSLQELKPKKRVYEYYLVTLPE

SEQ ID NO: 97993 - protein, 27 aa, Artificial Sequence
  Cyclic GFR-binding peptide
DNGRVLLSMEGIVKPKRGVMIQITINS

SEQ ID NO: 97994 - protein, 27 aa, Artificial Sequence
  Cyclic GFR-binding peptide
DNGRVLLSMEGIVVKENEDMIQMTINS

SEQ ID NO: 97995 - protein, 27 aa, Artificial Sequence
  Cyclic GFR-binding peptide
DNGRVLLSMEGIIKPTKGIMIQITINS

SEQ ID NO: 97996 - protein, 29 aa, Artificial Sequence
  Cyclic GFR-binding peptide
DNGRVLLNSLQEHQGQHPKIRYYLMTLPE

SEQ ID NO: 97997 - protein, 27 aa, Artificial Sequence
  Cyclic GFR-binding peptide
DNGRVLLVTAKKVVKDYEDIKRMQVPR

SEQ ID NO: 97998 - protein, 29 aa, Artificial Sequence
  Cyclic GFR-binding peptide
DNGRVLLNSLQEHQGQHPKIRYYVMPLPE

SEQ ID NO: 97999 - protein, 29 aa, Artificial Sequence
  Cyclic GFR-binding peptide
DNGRVLLNSLQELKPKKRVYEYYVVPLPE

SEQ ID NO: 98000 - protein, 27 aa, Artificial Sequence
  Cyclic GFR-binding peptide
DNGRVLLVQVEKVVKDYEDVKAMKVSR

SEQ ID NO: 98001 - protein, 27 aa, Artificial Sequence
  Cyclic GFR-binding peptide
SNITVQIMDDSSNVIIGEMSDNGRVLL

SEQ ID NO: 98002 - protein, 27 aa, Artificial Sequence
  Cyclic GFR-binding peptide
RPVQMRKIDENEKVVKKATVDNGRVLL

SEQ ID NO: 98003 - protein, 27 aa, Artificial Sequence
  Cyclic GFR-binding peptide
SNITMQIMDEYDKVVIGEMSDNGRVLL

SEQ ID NO: 98004 - protein, 27 aa, Artificial Sequence
  Cyclic GFR-binding peptide
RPVQIRKIIGKTPKIKKATVDNGRVLL

SEQ ID NO: 98005 - protein, 27 aa, Artificial Sequence
  Cyclic GFR-binding peptide
SNITIQIMVGRTPKVIGEMSDNGRVLL

SEQ ID NO: 98006 - protein, 29 aa, Artificial Sequence
  Cyclic GFR-binding peptide
EPLPVVYYEIVRKKPIFEQLSNDNGRVLL

SEQ ID NO: 98007 - protein, 27 aa, Artificial Sequence
  Cyclic GFR-binding peptide
RSVKIAKVVGRKPKVKEVQVDNGRVLL

SEQ ID NO: 98008 - protein, 27 aa, Artificial Sequence
  Cyclic GFR-binding peptide
RSVKMAKVDENEKVVKEVQVDNGRVLL

SEQ ID NO: 98009 - protein, 27 aa, Artificial Sequence
  Cyclic GFR-binding peptide
RPVQVRKIDDSSNVIKKATVDNGRVLL

SEQ ID NO: 98010 - protein, 27 aa, Artificial Sequence
  Cyclic GFR-binding peptide
RSVKIAKVIGKTPKIKEVQVDNGRVLL

SEQ ID NO: 98011 - protein, 29 aa, Artificial Sequence
  Cyclic GFR-binding peptide
EPLTVLYYEIVRKKPIFEQLSNDNGRVLL

SEQ ID NO: 98012 - protein, 27 aa, Artificial Sequence
  Cyclic GFR-binding peptide
RSVKVAKVDDSSNVIKEVQVDNGRVLL

SEQ ID NO: 98013 - protein, 27 aa, Artificial Sequence
  Cyclic GFR-binding peptide
RPVQIRKIVGRKPKVKKATVDNGRVLL

SEQ ID NO: 98014 - protein, 27 aa, Artificial Sequence
  Cyclic GFR-binding peptide
RSVKIAKVVGRTPKVKEVQVDNGRVLL

SEQ ID NO: 98015 - protein, 27 aa, Artificial Sequence
  Cyclic GFR-binding peptide
RPVQIRKIVGRTPKVKKATVDNGRVLL

SEQ ID NO: 98016 - protein, 29 aa, Artificial Sequence
  Cyclic GFR-binding peptide
EPLTVLYYEYVRKKPKLEQLSNDNGRVLL

SEQ ID NO: 98017 - protein, 27 aa, Artificial Sequence
  Cyclic GFR-binding peptide
SNITIQIMVGRKPKVIGEMSDNGRVLL

SEQ ID NO: 98018 - protein, 27 aa, Artificial Sequence
  Cyclic GFR-binding peptide
SNITMQIMDENEKVVIGEMSDNGRVLL

SEQ ID NO: 98019 - protein, 27 aa, Artificial Sequence
  Cyclic GFR-binding peptide
SNITIQIMIGKTPKIIGEMSDNGRVLL

SEQ ID NO: 98020 - protein, 29 aa, Artificial Sequence
  Cyclic GFR-binding peptide
EPLTMLYYRIKPHQGQHEQLSNDNGRVLL

SEQ ID NO: 98021 - protein, 27 aa, Artificial Sequence
  Cyclic GFR-binding peptide
RPVQMRKIDEYDKVVKKATVDNGRVLL

SEQ ID NO: 98022 - protein, 29 aa, Artificial Sequence
  Cyclic GFR-binding peptide
EPLPMVYYRIKPHQGQHEQLSNDNGRVLL

SEQ ID NO: 98023 - protein, 29 aa, Artificial Sequence
  Cyclic GFR-binding peptide
EPLPVVYYEYVRKKPKLEQLSNDNGRVLL

SEQ ID NO: 98024 - protein, 27 aa, Artificial Sequence
  Cyclic GFR-binding peptide
RSVKMAKVDEYDKVVKEVQVDNGRVLL

SEQ ID NO: 98025 - protein, 27 aa, Artificial Sequence
  Cyclic GFR-binding peptide
DNGRVLLRYKKLIIQQKDNFYLMSIAN

SEQ ID NO: 98026 - protein, 27 aa, Artificial Sequence
  Cyclic GFR-binding peptide
DNGRVLLRYKKLLLVRGNDFYLMSIAN

SEQ ID NO: 98027 - protein, 27 aa, Artificial Sequence
  Cyclic GFR-binding peptide
NAISMLYFNDKQQIILKKYRDNGRVLL

SEQ ID NO: 98028 - protein, 27 aa, Artificial Sequence
  Cyclic GFR-binding peptide
NAISMLYFDNGRVLLLKKYRDNGRVLL

SEQ ID NO: 98029 - protein, 27 aa, Artificial Sequence
  Cyclic GFR-binding peptide
DNGRVLLEYKFKVVNKNEDLYLISIPE

SEQ ID NO: 98030 - protein, 27 aa, Artificial Sequence
  Cyclic GFR-binding peptide
DNGRVLLPIKGYVKPTRGVFYLINIPS

SEQ ID NO: 98031 - protein, 27 aa, Artificial Sequence
  Cyclic GFR-binding peptide
DNGRVLLEYKFKLLVRGNDLYLMSIPE

SEQ ID NO: 98032 - protein, 27 aa, Artificial Sequence
  Cyclic GFR-binding peptide
DNGRVLLYHYKLVVNKNEDKYLISIPS

SEQ ID NO: 98033 - protein, 27 aa, Artificial Sequence
  Cyclic GFR-binding peptide
DNGRVLLRHKRLLLVRGNDYYLMSTAS

SEQ ID NO: 98034 - protein, 27 aa, Artificial Sequence
  Cyclic GFR-binding peptide
DNGRVLLYHYKLLLVRGNDKYLMSIPS

SEQ ID NO: 98035 - protein, 27 aa, Artificial Sequence
  Cyclic GFR-binding peptide
DNGRVLLRHKRLVVNKNEDYYLISTAS

SEQ ID NO: 98036 - protein, 27 aa, Artificial Sequence
  Cyclic GFR-binding peptide
DNGRVLLRYKKLVVNKNEDFYLISIAN

SEQ ID NO: 98037 - protein, 27 aa, Artificial Sequence
  Cyclic GFR-binding peptide
DNGRVLLPIKGYVVNKNEDFYLINIPS

SEQ ID NO: 98038 - protein, 27 aa, Artificial Sequence
  Cyclic GFR-binding peptide
DNGRVLLPIKGYIKPTKGIFYLINIPS

SEQ ID NO: 98039 - protein, 27 aa, Artificial Sequence
  Cyclic GFR-binding peptide
DNGRVLLRHKRLYTVVGKDYYLISTAS

SEQ ID NO: 98040 - protein, 27 aa, Artificial Sequence
  Cyclic GFR-binding peptide
DNGRVLLEYKFKVVNNASDLYLISIPE

SEQ ID NO: 98041 - protein, 27 aa, Artificial Sequence
  Cyclic GFR-binding peptide
DNGRVLLRHKRLIIQQKDNYYLMSTAS

SEQ ID NO: 98042 - protein, 27 aa, Artificial Sequence
  Cyclic GFR-binding peptide
DNGRVLLEYKFKIIQQKDNLYLMSIPE

SEQ ID NO: 98043 - protein, 27 aa, Artificial Sequence
  Cyclic GFR-binding peptide
DNGRVLLPIKGYVKPKRGVFYLINIPS

SEQ ID NO: 98044 - protein, 27 aa, Artificial Sequence
  Cyclic GFR-binding peptide
DNGRVLLRHKRLVVNNASDYYLISTAS

SEQ ID NO: 98045 - protein, 27 aa, Artificial Sequence
  Cyclic GFR-binding peptide
DNGRVLLYHYKLVVNNASDKYLISIPS

SEQ ID NO: 98046 - protein, 27 aa, Artificial Sequence
  Cyclic GFR-binding peptide
DNGRVLLYHYKLIIQQKDNKYLMSIPS

SEQ ID NO: 98047 - protein, 27 aa, Artificial Sequence
  Cyclic GFR-binding peptide
DNGRVLLRHKRLVVNNAADYYLISTAS

SEQ ID NO: 98048 - protein, 27 aa, Artificial Sequence
  Cyclic GFR-binding peptide
EPISILYLDENKNVVKFKYEDNGRVLL

SEQ ID NO: 98049 - protein, 27 aa, Artificial Sequence
  Cyclic GFR-binding peptide
SPINILYFVGRTPKVYGKIPDNGRVLL

SEQ ID NO: 98050 - protein, 27 aa, Artificial Sequence
  Cyclic GFR-binding peptide
EPISMLYLDNGRVLLKFKYEDNGRVLL

SEQ ID NO: 98051 - protein, 27 aa, Artificial Sequence
  Cyclic GFR-binding peptide
SPISILYKDENKNVVLKYHYDNGRVLL

SEQ ID NO: 98052 - protein, 27 aa, Artificial Sequence
  Cyclic GFR-binding peptide
SATSMLYYDNGRVLLLRKHRDNGRVLL

SEQ ID NO: 98053 - protein, 27 aa, Artificial Sequence
  Cyclic GFR-binding peptide
SPISMLYKDNGRVLLLKYHYDNGRVLL

SEQ ID NO: 98054 - protein, 27 aa, Artificial Sequence
  Cyclic GFR-binding peptide
SATSILYYDENKNVVLRKHRDNGRVLL

SEQ ID NO: 98055 - protein, 27 aa, Artificial Sequence
  Cyclic GFR-binding peptide
NAISILYFDENKNVVLKKYRDNGRVLL

SEQ ID NO: 98056 - protein, 27 aa, Artificial Sequence
  Cyclic GFR-binding peptide
SPINILYFDENKNVVYGKIPDNGRVLL

SEQ ID NO: 98057 - protein, 27 aa, Artificial Sequence
  Cyclic GFR-binding peptide
SPINILYFIGKTPKIYGKIPDNGRVLL

SEQ ID NO: 98058 - protein, 27 aa, Artificial Sequence
  Cyclic GFR-binding peptide
SATSILYYDKGVVTYLRKHRDNGRVLL

SEQ ID NO: 98059 - protein, 27 aa, Artificial Sequence
  Cyclic GFR-binding peptide
EPISILYLDSANNVVKFKYEDNGRVLL

SEQ ID NO: 98060 - protein, 27 aa, Artificial Sequence
  Cyclic GFR-binding peptide
SATSMLYYNDKQQIILRKHRDNGRVLL

SEQ ID NO: 98061 - protein, 27 aa, Artificial Sequence
  Cyclic GFR-binding peptide
EPISMLYLNDKQQIIKFKYEDNGRVLL

SEQ ID NO: 98062 - protein, 27 aa, Artificial Sequence
  Cyclic GFR-binding peptide
SPINILYFVGRKPKVYGKIPDNGRVLL

SEQ ID NO: 98063 - protein, 27 aa, Artificial Sequence
  Cyclic GFR-binding peptide
SATSILYYDSANNVVLRKHRDNGRVLL

SEQ ID NO: 98064 - protein, 27 aa, Artificial Sequence
  Cyclic GFR-binding peptide
SPISILYKDSANNVVLKYHYDNGRVLL

SEQ ID NO: 98065 - protein, 27 aa, Artificial Sequence
  Cyclic GFR-binding peptide
SPISMLYKNDKQQIILKYHYDNGRVLL

SEQ ID NO: 98066 - protein, 27 aa, Artificial Sequence
  Cyclic GFR-binding peptide
SATSILYYDAANNVVLRKHRDNGRVLL

SEQ ID NO: 98067 - protein, 27 aa, Artificial Sequence
  Cyclic GFR-binding peptide
DNGRVLLSMEGIIIQQKDNMIQMTINS

SEQ ID NO: 98068 - protein, 27 aa, Artificial Sequence
  Cyclic GFR-binding peptide
DNGRVLLSMEGLVKPKRGVMIQITINS

SEQ ID NO: 98069 - protein, 27 aa, Artificial Sequence
  Cyclic GFR-binding peptide
DNGRVLLSMEGLVVNNASDMIQITINS

SEQ ID NO: 98070 - protein, 27 aa, Artificial Sequence
  Cyclic GFR-binding peptide
DNGRVLLSMEGILLVRGNDMIQMTINS

SEQ ID NO: 98071 - protein, 27 aa, Artificial Sequence
  Cyclic GFR-binding peptide
DNGRVLLSMEGLIKPTKGIMIQITINS

SEQ ID NO: 98072 - protein, 27 aa, Artificial Sequence
  Cyclic GFR-binding peptide
DNGRVLLSMEGLIVNSSDDMIQVTINS

SEQ ID NO: 98073 - protein, 27 aa, Artificial Sequence
  Cyclic GFR-binding peptide
DNGRVLLSMEGIVVNNASDMIQITINS

SEQ ID NO: 98074 - protein, 27 aa, Artificial Sequence
  Cyclic GFR-binding peptide
DNGRVLLSMEGLVVNNAADMIQITINS

SEQ ID NO: 98075 - protein, 27 aa, Artificial Sequence
  Cyclic GFR-binding peptide
DNGRVLLSMEGLLLVRGNDMIQMTINS

SEQ ID NO: 98076 - protein, 27 aa, Artificial Sequence
  Cyclic GFR-binding peptide
DNGRVLLSMEGLIIQQKDNMIQMTINS

SEQ ID NO: 98077 - protein, 27 aa, Artificial Sequence
  Cyclic GFR-binding peptide
DNGRVLLSMEGIVVNNAADMIQITINS

SEQ ID NO: 98078 - protein, 27 aa, Artificial Sequence
  Cyclic GFR-binding peptide
DNGRVLLSMEGLVKPTRGVMIQITINS

SEQ ID NO: 98079 - protein, 27 aa, Artificial Sequence
  Cyclic GFR-binding peptide
SNITMQIMNDKQQIIIGEMSDNGRVLL

SEQ ID NO: 98080 - protein, 27 aa, Artificial Sequence
  Cyclic GFR-binding peptide
SNITIQIMVGRKPKVLGEMSDNGRVLL

SEQ ID NO: 98081 - protein, 27 aa, Artificial Sequence
  Cyclic GFR-binding peptide
SNITIQIMDSANNVVLGEMSDNGRVLL

SEQ ID NO: 98082 - protein, 27 aa, Artificial Sequence
  Cyclic GFR-binding peptide
SNITMQIMDNGRVLLIGEMSDNGRVLL

SEQ ID NO: 98083 - protein, 27 aa, Artificial Sequence
  Cyclic GFR-binding peptide
SNITIQIMIGKTPKILGEMSDNGRVLL

SEQ ID NO: 98084 - protein, 27 aa, Artificial Sequence
  Cyclic GFR-binding peptide
SNITVQIMDDSSNVILGEMSDNGRVLL

SEQ ID NO: 98085 - protein, 27 aa, Artificial Sequence
  Cyclic GFR-binding peptide
SNITIQIMDSANNVVIGEMSDNGRVLL

SEQ ID NO: 98086 - protein, 27 aa, Artificial Sequence
  Cyclic GFR-binding peptide
SNITIQIMDAANNVVLGEMSDNGRVLL

SEQ ID NO: 98087 - protein, 27 aa, Artificial Sequence
  Cyclic GFR-binding peptide
SNITMQIMDNGRVLLLGEMSDNGRVLL

SEQ ID NO: 98088 - protein, 27 aa, Artificial Sequence
  Cyclic GFR-binding peptide
SNITMQIMNDKQQIILGEMSDNGRVLL

SEQ ID NO: 98089 - protein, 27 aa, Artificial Sequence
  Cyclic GFR-binding peptide
SNITIQIMDAANNVVIGEMSDNGRVLL

SEQ ID NO: 98090 - protein, 27 aa, Artificial Sequence
  Cyclic GFR-binding peptide
SNITIQIMVGRTPKVLGEMSDNGRVLL

SEQ ID NO: 98091 - protein, 27 aa, Artificial Sequence
  Cyclic GFR-binding peptide
DNGRVLLQYNKLVVNKNEDLYLISIAS

SEQ ID NO: 98092 - protein, 27 aa, Artificial Sequence
  Cyclic GFR-binding peptide
DNGRVLLQYNKLVVNNAADLYLISIAS

SEQ ID NO: 98093 - protein, 27 aa, Artificial Sequence
  Cyclic GFR-binding peptide
DNGRVLLQYNKLIIQQKDNLYLMSIAS

SEQ ID NO: 98094 - protein, 27 aa, Artificial Sequence
  Cyclic GFR-binding peptide
DNGRVLLQYNKLLLVRGNDLYLMSIAS

SEQ ID NO: 98095 - protein, 27 aa, Artificial Sequence
  Cyclic GFR-binding peptide
DNGRVLLQYNKLYTVVGKDLYLISIAS

SEQ ID NO: 98096 - protein, 27 aa, Artificial Sequence
  Cyclic GFR-binding peptide
SAISILYLDENKNVVLKNYQDNGRVLL

SEQ ID NO: 98097 - protein, 27 aa, Artificial Sequence
  Cyclic GFR-binding peptide
SAISILYLDAANNVVLKNYQDNGRVLL

SEQ ID NO: 98098 - protein, 27 aa, Artificial Sequence
  Cyclic GFR-binding peptide
SAISMLYLNDKQQIILKNYQDNGRVLL

SEQ ID NO: 98099 - protein, 27 aa, Artificial Sequence
  Cyclic GFR-binding peptide
SAISMLYLDNGRVLLLKNYQDNGRVLL

SEQ ID NO: 98100 - protein, 27 aa, Artificial Sequence
  Cyclic GFR-binding peptide
SAISILYLDKGVVTYLKNYQDNGRVLL

SEQ ID NO: 98101 - protein, 27 aa, Artificial Sequence
  Cyclic GFR-binding peptide
VGRKPKVRYKKLIKPTKGIFYLISIAN

SEQ ID NO: 98102 - protein, 29 aa, Artificial Sequence
  Cyclic GFR-binding peptide
VGRKPKVRHKRLFIPKKRVIEYYLVSTAS

SEQ ID NO: 98103 - protein, 27 aa, Artificial Sequence
  Cyclic GFR-binding peptide
VGRKPKVYHYKLVVKDYEDKYLMSIPS

SEQ ID NO: 98104 - protein, 27 aa, Artificial Sequence
  Cyclic GFR-binding peptide
VGRKPKVQYNKLIVNNSSDLYLVSIAS

SEQ ID NO: 98105 - protein, 27 aa, Artificial Sequence
  Cyclic GFR-binding peptide
VGRKPKVRYKKLVVKDYEDFYLMSIAN

SEQ ID NO: 98106 - protein, 27 aa, Artificial Sequence
  Cyclic GFR-binding peptide
VGRKPKVRYKKLVKPTRGVFYLISIAN

SEQ ID NO: 98107 - protein, 27 aa, Artificial Sequence
  Cyclic GFR-binding peptide
VGRKPKVRHKRLVVKENEDYYLMSTAS

SEQ ID NO: 98108 - protein, 27 aa, Artificial Sequence
  Cyclic GFR-binding peptide
VGRKPKVYHYKLIKPTKGIKYLISIPS

SEQ ID NO: 98109 - protein, 29 aa, Artificial Sequence
  Cyclic GFR-binding peptide
VGRKPKVRYKKLFIPKKRVIEFYLVSIAN

SEQ ID NO: 98110 - protein, 27 aa, Artificial Sequence
  Cyclic GFR-binding peptide
VGRKPKVYHYKLVVKENEDKYLMSIPS

SEQ ID NO: 98111 - protein, 27 aa, Artificial Sequence
  Cyclic GFR-binding peptide
VGRKPKVRHKRLVKPKRGVYYLISTAS

SEQ ID NO: 98112 - protein, 27 aa, Artificial Sequence
  Cyclic GFR-binding peptide
VGRKPKVYHYKLVKPKRGVKYLISIPS

SEQ ID NO: 98113 - protein, 29 aa, Artificial Sequence
  Cyclic GFR-binding peptide
VGRKPKVQYNKLFIPKKRVIELYLVSIAS

SEQ ID NO: 98114 - protein, 27 aa, Artificial Sequence
  Cyclic GFR-binding peptide
VGRKPKVQYNKLVKPTRGVLYLISIAS

SEQ ID NO: 98115 - protein, 27 aa, Artificial Sequence
  Cyclic GFR-binding peptide
VGRKPKVRYKKLVVKENEDFYLMSIAN

SEQ ID NO: 98116 - protein, 27 aa, Artificial Sequence
  Cyclic GFR-binding peptide
VGRKPKVQYNKLTPVGMDDLYLVSIAS

SEQ ID NO: 98117 - protein, 27 aa, Artificial Sequence
  Cyclic GFR-binding peptide
VGRKPKVRYKKLTPVGMDDFYLVSIAN

SEQ ID NO: 98118 - protein, 27 aa, Artificial Sequence
  Cyclic GFR-binding peptide
VGRKPKVRYKKLVKPKRGVFYLISIAN

SEQ ID NO: 98119 - protein, 27 aa, Artificial Sequence
  Cyclic GFR-binding peptide
VGRKPKVQYNKLVVKENEDLYLMSIAS

SEQ ID NO: 98120 - protein, 27 aa, Artificial Sequence
  Cyclic GFR-binding peptide
VGRKPKVYHYKLIVNSSDDKYLVSIPS

SEQ ID NO: 98121 - protein, 27 aa, Artificial Sequence
  Cyclic GFR-binding peptide
VGRKPKVQYNKLVKPKRGVLYLISIAS

SEQ ID NO: 98122 - protein, 27 aa, Artificial Sequence
  Cyclic GFR-binding peptide
VGRKPKVRYKKLIVNNSSDFYLVSIAN

SEQ ID NO: 98123 - protein, 27 aa, Artificial Sequence
  Cyclic GFR-binding peptide
VGRKPKVRYKKLIVNSSDDFYLVSIAN

SEQ ID NO: 98124 - protein, 27 aa, Artificial Sequence
  Cyclic GFR-binding peptide
VGRKPKVRHKRLVKPTRGVYYLISTAS

SEQ ID NO: 98125 - protein, 29 aa, Artificial Sequence
  Cyclic GFR-binding peptide
VGRKPKVYHYKLFIPKKRVIEKYLVSIPS

SEQ ID NO: 98126 - protein, 27 aa, Artificial Sequence
  Cyclic GFR-binding peptide
VGRKPKVRHKRLIKPTKGIYYLISTAS

SEQ ID NO: 98127 - protein, 27 aa, Artificial Sequence
  Cyclic GFR-binding peptide
VGRKPKVRHKRLTPVGMDDYYLVSTAS

SEQ ID NO: 98128 - protein, 27 aa, Artificial Sequence
  Cyclic GFR-binding peptide
VGRKPKVYHYKLTPVGMDDKYLVSIPS

SEQ ID NO: 98129 - protein, 27 aa, Artificial Sequence
  Cyclic GFR-binding peptide
VGRKPKVYHYKLIVNNSSDKYLVSIPS

SEQ ID NO: 98130 - protein, 27 aa, Artificial Sequence
  Cyclic GFR-binding peptide
VGRKPKVRHKRLIVNNSSDYYLVSTAS

SEQ ID NO: 98131 - protein, 27 aa, Artificial Sequence
  Cyclic GFR-binding peptide
VGRKPKVYHYKLVKPTRGVKYLISIPS

SEQ ID NO: 98132 - protein, 27 aa, Artificial Sequence
  Cyclic GFR-binding peptide
VGRKPKVRHKRLIVNSSDDYYLVSTAS

SEQ ID NO: 98133 - protein, 27 aa, Artificial Sequence
  Cyclic GFR-binding peptide
VGRKPKVRHKRLVVKDYEDYYLMSTAS

SEQ ID NO: 98134 - protein, 27 aa, Artificial Sequence
  Cyclic GFR-binding peptide
VGRKPKVQYNKLIKPTKGILYLISIAS

SEQ ID NO: 98135 - protein, 27 aa, Artificial Sequence
  Cyclic GFR-binding peptide
VGRKPKVQYNKLVVKDYEDLYLMSIAS

SEQ ID NO: 98136 - protein, 27 aa, Artificial Sequence
  Cyclic GFR-binding peptide
VGRKPKVQYNKLIVNSSDDLYLVSIAS

SEQ ID NO: 98137 - protein, 27 aa, Artificial Sequence
  Cyclic GFR-binding peptide
NAISILYFIGKTPKILKKYRVGRKPKV

SEQ ID NO: 98138 - protein, 29 aa, Artificial Sequence
  Cyclic GFR-binding peptide
SATSVLYYEIVRKKPIFLRKHRVGRKPKV

SEQ ID NO: 98139 - protein, 27 aa, Artificial Sequence
  Cyclic GFR-binding peptide
SPISMLYKDEYDKVVLKYHYVGRKPKV

SEQ ID NO: 98140 - protein, 27 aa, Artificial Sequence
  Cyclic GFR-binding peptide
SAISVLYLDSSNNVILKNYQVGRKPKV

SEQ ID NO: 98141 - protein, 27 aa, Artificial Sequence
  Cyclic GFR-binding peptide
NAISMLYFDEYDKVVLKKYRVGRKPKV

SEQ ID NO: 98142 - protein, 27 aa, Artificial Sequence
  Cyclic GFR-binding peptide
NAISILYFVGRTPKVLKKYRVGRKPKV

SEQ ID NO: 98143 - protein, 27 aa, Artificial Sequence
  Cyclic GFR-binding peptide
SATSMLYYDENEKVVLRKHRVGRKPKV

SEQ ID NO: 98144 - protein, 27 aa, Artificial Sequence
  Cyclic GFR-binding peptide
SPISILYKIGKTPKILKYHYVGRKPKV

SEQ ID NO: 98145 - protein, 29 aa, Artificial Sequence
  Cyclic GFR-binding peptide
NAISVLYFEIVRKKPIFLKKYRVGRKPKV

SEQ ID NO: 98146 - protein, 27 aa, Artificial Sequence
  Cyclic GFR-binding peptide
SPISMLYKDENEKVVLKYHYVGRKPKV

SEQ ID NO: 98147 - protein, 27 aa, Artificial Sequence
  Cyclic GFR-binding peptide
SATSILYYVGRKPKVLRKHRVGRKPKV

SEQ ID NO: 98148 - protein, 27 aa, Artificial Sequence
  Cyclic GFR-binding peptide
SPISILYKVGRKPKVLKYHYVGRKPKV

SEQ ID NO: 98149 - protein, 29 aa, Artificial Sequence
  Cyclic GFR-binding peptide
SAISVLYLEIVRKKPIFLKNYQVGRKPKV

SEQ ID NO: 98150 - protein, 27 aa, Artificial Sequence
  Cyclic GFR-binding peptide
SAISILYLVGRTPKVLKNYQVGRKPKV

SEQ ID NO: 98151 - protein, 27 aa, Artificial Sequence
  Cyclic GFR-binding peptide
NAISMLYFDENEKVVLKKYRVGRKPKV

SEQ ID NO: 98152 - protein, 27 aa, Artificial Sequence
  Cyclic GFR-binding peptide
SAISVLYLDDMGVPTLKNYQVGRKPKV

SEQ ID NO: 98153 - protein, 27 aa, Artificial Sequence
  Cyclic GFR-binding peptide
NAISVLYFDDMGVPTLKKYRVGRKPKV

SEQ ID NO: 98154 - protein, 27 aa, Artificial Sequence
  Cyclic GFR-binding peptide
NAISILYFVGRKPKVLKKYRVGRKPKV

SEQ ID NO: 98155 - protein, 27 aa, Artificial Sequence
  Cyclic GFR-binding peptide
SAISMLYLDENEKVVLKNYQVGRKPKV

SEQ ID NO: 98156 - protein, 27 aa, Artificial Sequence
  Cyclic GFR-binding peptide
SPISVLYKDDSSNVILKYHYVGRKPKV

SEQ ID NO: 98157 - protein, 27 aa, Artificial Sequence
  Cyclic GFR-binding peptide
NAISVLYFDSSNNVILKKYRVGRKPKV

SEQ ID NO: 98158 - protein, 27 aa, Artificial Sequence
  Cyclic GFR-binding peptide
NAISVLYFDDSSNVILKKYRVGRKPKV

SEQ ID NO: 98159 - protein, 27 aa, Artificial Sequence
  Cyclic GFR-binding peptide
SATSILYYVGRTPKVLRKHRVGRKPKV

SEQ ID NO: 98160 - protein, 29 aa, Artificial Sequence
  Cyclic GFR-binding peptide
SPISVLYKEIVRKKPIFLKYHYVGRKPKV

SEQ ID NO: 98161 - protein, 27 aa, Artificial Sequence
  Cyclic GFR-binding peptide
SATSILYYIGKTPKILRKHRVGRKPKV

SEQ ID NO: 98162 - protein, 27 aa, Artificial Sequence
  Cyclic GFR-binding peptide
SATSVLYYDDMGVPTLRKHRVGRKPKV

SEQ ID NO: 98163 - protein, 27 aa, Artificial Sequence
  Cyclic GFR-binding peptide
SPISVLYKDDMGVPTLKYHYVGRKPKV

SEQ ID NO: 98164 - protein, 27 aa, Artificial Sequence
  Cyclic GFR-binding peptide
SPISVLYKDSSNNVILKYHYVGRKPKV

SEQ ID NO: 98165 - protein, 27 aa, Artificial Sequence
  Cyclic GFR-binding peptide
SATSVLYYDSSNNVILRKHRVGRKPKV

SEQ ID NO: 98166 - protein, 27 aa, Artificial Sequence
  Cyclic GFR-binding peptide
SPISILYKVGRTPKVLKYHYVGRKPKV

SEQ ID NO: 98167 - protein, 27 aa, Artificial Sequence
  Cyclic GFR-binding peptide
SATSVLYYDDSSNVILRKHRVGRKPKV

SEQ ID NO: 98168 - protein, 27 aa, Artificial Sequence
  Cyclic GFR-binding peptide
SATSMLYYDEYDKVVLRKHRVGRKPKV

SEQ ID NO: 98169 - protein, 27 aa, Artificial Sequence
  Cyclic GFR-binding peptide
SAISILYLIGKTPKILKNYQVGRKPKV

SEQ ID NO: 98170 - protein, 27 aa, Artificial Sequence
  Cyclic GFR-binding peptide
SAISMLYLDEYDKVVLKNYQVGRKPKV

SEQ ID NO: 98171 - protein, 27 aa, Artificial Sequence
  Cyclic GFR-binding peptide
SAISVLYLDDSSNVILKNYQVGRKPKV

SEQ ID NO: 98172 - protein, 27 aa, Artificial Sequence
  Cyclic GFR-binding peptide
VGRKPKVNSLQEVVKDYEDYYLMTLPE

SEQ ID NO: 98173 - protein, 27 aa, Artificial Sequence
  Cyclic GFR-binding peptide
VGRKPKVNSLQEIKPTKGIYYVIPLPE

SEQ ID NO: 98174 - protein, 27 aa, Artificial Sequence
  Cyclic GFR-binding peptide
VGRKPKVNSLQEVKPKRGVYYLITLPE

SEQ ID NO: 98175 - protein, 27 aa, Artificial Sequence
  Cyclic GFR-binding peptide
VGRKPKVNSLQEVKPTRGVYYVIPLPE

SEQ ID NO: 98176 - protein, 27 aa, Artificial Sequence
  Cyclic GFR-binding peptide
VGRKPKVEYQKYIVNSSDDIFLVSIPS

SEQ ID NO: 98177 - protein, 27 aa, Artificial Sequence
  Cyclic GFR-binding peptide
VGRKPKVEYQKYVKPTRGVIFLISIPS

SEQ ID NO: 98178 - protein, 27 aa, Artificial Sequence
  Cyclic GFR-binding peptide
VGRKPKVNSLQEVVKENEDYYLMTLPE

SEQ ID NO: 98179 - protein, 27 aa, Artificial Sequence
  Cyclic GFR-binding peptide
VGRKPKVNSLQEVVNNASDYYLITLPE

SEQ ID NO: 98180 - protein, 27 aa, Artificial Sequence
  Cyclic GFR-binding peptide
VGRKPKVNSLQEVKPKRGVYYVIPLPE

SEQ ID NO: 98181 - protein, 27 aa, Artificial Sequence
  Cyclic GFR-binding peptide
VGRKPKVNSLQEVVNNASDYYVIPLPE

SEQ ID NO: 98182 - protein, 27 aa, Artificial Sequence
  Cyclic GFR-binding peptide
VGRKPKVNSLQEVKPTRGVYYLITLPE

SEQ ID NO: 98183 - protein, 27 aa, Artificial Sequence
  Cyclic GFR-binding peptide
VGRKPKVEYQKYIKPTKGIIFLISIPS

SEQ ID NO: 98184 - protein, 27 aa, Artificial Sequence
  Cyclic GFR-binding peptide
VGRKPKVEYQKYVVNNASDIFLISIPS

SEQ ID NO: 98185 - protein, 27 aa, Artificial Sequence
  Cyclic GFR-binding peptide
VGRKPKVNSLQEIVNSSDDYYVVPLPE

SEQ ID NO: 98186 - protein, 27 aa, Artificial Sequence
  Cyclic GFR-binding peptide
VGRKPKVNSLQEVVKDYEDYYVMPLPE

SEQ ID NO: 98187 - protein, 27 aa, Artificial Sequence
  Cyclic GFR-binding peptide
VGRKPKVEYQKYVVKENEDIFLMSIPS

SEQ ID NO: 98188 - protein, 27 aa, Artificial Sequence
  Cyclic GFR-binding peptide
VGRKPKVNSLQEVVKENEDYYVMPLPE

SEQ ID NO: 98189 - protein, 27 aa, Artificial Sequence
  Cyclic GFR-binding peptide
VGRKPKVEYQKYVVKDYEDIFLMSIPS

SEQ ID NO: 98190 - protein, 27 aa, Artificial Sequence
  Cyclic GFR-binding peptide
VGRKPKVQYNKLVVNNASDLYLISIAS

SEQ ID NO: 98191 - protein, 27 aa, Artificial Sequence
  Cyclic GFR-binding peptide
VGRKPKVNSLQEIKPTKGIYYLITLPE

SEQ ID NO: 98192 - protein, 27 aa, Artificial Sequence
  Cyclic GFR-binding peptide
VGRKPKVEYQKYVKPKRGVIFLISIPS

SEQ ID NO: 98193 - protein, 27 aa, Artificial Sequence
  Cyclic GFR-binding peptide
VGRKPKVRYKKLVVNNASDFYLISIAN

SEQ ID NO: 98194 - protein, 27 aa, Artificial Sequence
  Cyclic GFR-binding peptide
VGRKPKVNSLQEIVNSSDDYYLVTLPE

SEQ ID NO: 98195 - protein, 27 aa, Artificial Sequence
  Cyclic GFR-binding peptide
EPLTMLYYDEYDKVVEQLSNVGRKPKV

SEQ ID NO: 98196 - protein, 27 aa, Artificial Sequence
  Cyclic GFR-binding peptide
EPLPIVYYIGKTPKIEQLSNVGRKPKV

SEQ ID NO: 98197 - protein, 27 aa, Artificial Sequence
  Cyclic GFR-binding peptide
EPLTILYYVGRKPKVEQLSNVGRKPKV

SEQ ID NO: 98198 - protein, 27 aa, Artificial Sequence
  Cyclic GFR-binding peptide
EPLPIVYYVGRTPKVEQLSNVGRKPKV

SEQ ID NO: 98199 - protein, 27 aa, Artificial Sequence
  Cyclic GFR-binding peptide
SPISVLFIDDSSNVIYKQYEVGRKPKV

SEQ ID NO: 98200 - protein, 27 aa, Artificial Sequence
  Cyclic GFR-binding peptide
SPISILFIVGRTPKVYKQYEVGRKPKV

SEQ ID NO: 98201 - protein, 27 aa, Artificial Sequence
  Cyclic GFR-binding peptide
EPLTMLYYDENEKVVEQLSNVGRKPKV

SEQ ID NO: 98202 - protein, 27 aa, Artificial Sequence
  Cyclic GFR-binding peptide
EPLTILYYDSANNVVEQLSNVGRKPKV

SEQ ID NO: 98203 - protein, 27 aa, Artificial Sequence
  Cyclic GFR-binding peptide
EPLPIVYYVGRKPKVEQLSNVGRKPKV

SEQ ID NO: 98204 - protein, 27 aa, Artificial Sequence
  Cyclic GFR-binding peptide
EPLPIVYYDSANNVVEQLSNVGRKPKV

SEQ ID NO: 98205 - protein, 27 aa, Artificial Sequence
  Cyclic GFR-binding peptide
EPLTILYYVGRTPKVEQLSNVGRKPKV

SEQ ID NO: 98206 - protein, 27 aa, Artificial Sequence
  Cyclic GFR-binding peptide
SPISILFIIGKTPKIYKQYEVGRKPKV

SEQ ID NO: 98207 - protein, 27 aa, Artificial Sequence
  Cyclic GFR-binding peptide
SPISILFIDSANNVVYKQYEVGRKPKV

SEQ ID NO: 98208 - protein, 27 aa, Artificial Sequence
  Cyclic GFR-binding peptide
EPLPVVYYDDSSNVIEQLSNVGRKPKV

SEQ ID NO: 98209 - protein, 27 aa, Artificial Sequence
  Cyclic GFR-binding peptide
EPLPMVYYDEYDKVVEQLSNVGRKPKV

SEQ ID NO: 98210 - protein, 27 aa, Artificial Sequence
  Cyclic GFR-binding peptide
SPISMLFIDENEKVVYKQYEVGRKPKV

SEQ ID NO: 98211 - protein, 27 aa, Artificial Sequence
  Cyclic GFR-binding peptide
EPLPMVYYDENEKVVEQLSNVGRKPKV

SEQ ID NO: 98212 - protein, 27 aa, Artificial Sequence
  Cyclic GFR-binding peptide
SPISMLFIDEYDKVVYKQYEVGRKPKV

SEQ ID NO: 98213 - protein, 27 aa, Artificial Sequence
  Cyclic GFR-binding peptide
SAISILYLDSANNVVLKNYQVGRKPKV

SEQ ID NO: 98214 - protein, 27 aa, Artificial Sequence
  Cyclic GFR-binding peptide
EPLTILYYIGKTPKIEQLSNVGRKPKV

SEQ ID NO: 98215 - protein, 27 aa, Artificial Sequence
  Cyclic GFR-binding peptide
SPISILFIVGRKPKVYKQYEVGRKPKV

SEQ ID NO: 98216 - protein, 27 aa, Artificial Sequence
  Cyclic GFR-binding peptide
NAISILYFDSANNVVLKKYRVGRKPKV

SEQ ID NO: 98217 - protein, 27 aa, Artificial Sequence
  Cyclic GFR-binding peptide
EPLTVLYYDDSSNVIEQLSNVGRKPKV

SEQ ID NO: 98218 - protein, 29 aa, Artificial Sequence
  Cyclic GFR-binding peptide
VGRKPKVVTAKKLKPKKRVYEIKRVQVPR

SEQ ID NO: 98219 - protein, 29 aa, Artificial Sequence
  Cyclic GFR-binding peptide
VGRKPKVVQVEKLKPKKRVYEVKAVKVSR

SEQ ID NO: 98220 - protein, 29 aa, Artificial Sequence
  Cyclic GFR-binding peptide
VGRKPKVVQVEKFIPKKRVIEVKAVKVSR

SEQ ID NO: 98221 - protein, 29 aa, Artificial Sequence
  Cyclic GFR-binding peptide
VGRKPKVVQVEKHQGQHPKIRVKAMKVSR

SEQ ID NO: 98222 - protein, 29 aa, Artificial Sequence
  Cyclic GFR-binding peptide
VGRKPKVVTAKKHQGQHPKIRIKRMQVPR

SEQ ID NO: 98223 - protein, 29 aa, Artificial Sequence
  Cyclic GFR-binding peptide
VGRKPKVSMEGLLKPKKRVYEMIQVTINS

SEQ ID NO: 98224 - protein, 29 aa, Artificial Sequence
  Cyclic GFR-binding peptide
VGRKPKVSMEGIFIPKKRVIEMIQVTINS

SEQ ID NO: 98225 - protein, 29 aa, Artificial Sequence
  Cyclic GFR-binding peptide
VGRKPKVSMEGLHQGQHPKIRMIQMTINS

SEQ ID NO: 98226 - protein, 29 aa, Artificial Sequence
  Cyclic GFR-binding peptide
VGRKPKVSMEGILKPKKRVYEMIQVTINS

SEQ ID NO: 98227 - protein, 29 aa, Artificial Sequence
  Cyclic GFR-binding peptide
VGRKPKVSMEGLFIPKKRVIEMIQVTINS

SEQ ID NO: 98228 - protein, 29 aa, Artificial Sequence
  Cyclic GFR-binding peptide
VGRKPKVVTAKKFIPKKRVIEIKRVQVPR

SEQ ID NO: 98229 - protein, 29 aa, Artificial Sequence
  Cyclic GFR-binding peptide
VGRKPKVSMEGIHQGQHPKIRMIQMTINS

SEQ ID NO: 98230 - protein, 29 aa, Artificial Sequence
  Cyclic GFR-binding peptide
RPVQVRKIEYVRKKPKLKKATVVGRKPKV

SEQ ID NO: 98231 - protein, 29 aa, Artificial Sequence
  Cyclic GFR-binding peptide
RSVKVAKVEYVRKKPKLKEVQVVGRKPKV

SEQ ID NO: 98232 - protein, 29 aa, Artificial Sequence
  Cyclic GFR-binding peptide
RSVKVAKVEIVRKKPIFKEVQVVGRKPKV

SEQ ID NO: 98233 - protein, 29 aa, Artificial Sequence
  Cyclic GFR-binding peptide
RSVKMAKVRIKPHQGQHKEVQVVGRKPKV

SEQ ID NO: 98234 - protein, 29 aa, Artificial Sequence
  Cyclic GFR-binding peptide
RPVQMRKIRIKPHQGQHKKATVVGRKPKV

SEQ ID NO: 98235 - protein, 29 aa, Artificial Sequence
  Cyclic GFR-binding peptide
SNITVQIMEYVRKKPKLLGEMSVGRKPKV

SEQ ID NO: 98236 - protein, 29 aa, Artificial Sequence
  Cyclic GFR-binding peptide
SNITVQIMEIVRKKPIFIGEMSVGRKPKV

SEQ ID NO: 98237 - protein, 29 aa, Artificial Sequence
  Cyclic GFR-binding peptide
SNITMQIMRIKPHQGQHLGEMSVGRKPKV

SEQ ID NO: 98238 - protein, 29 aa, Artificial Sequence
  Cyclic GFR-binding peptide
SNITVQIMEYVRKKPKLIGEMSVGRKPKV

SEQ ID NO: 98239 - protein, 29 aa, Artificial Sequence
  Cyclic GFR-binding peptide
SNITVQIMEIVRKKPIFLGEMSVGRKPKV

SEQ ID NO: 98240 - protein, 29 aa, Artificial Sequence
  Cyclic GFR-binding peptide
RPVQVRKIEIVRKKPIFKKATVVGRKPKV

SEQ ID NO: 98241 - protein, 29 aa, Artificial Sequence
  Cyclic GFR-binding peptide
SNITMQIMRIKPHQGQHIGEMSVGRKPKV

SEQ ID NO: 98242 - protein, 27 aa, Artificial Sequence
  Cyclic GFR-binding peptide
VGRKPKVEYKFKVKPTRGVLYLISIPE

SEQ ID NO: 98243 - protein, 27 aa, Artificial Sequence
  Cyclic GFR-binding peptide
VGRKPKVEYKFKTPVGMDDLYLVSIPE

SEQ ID NO: 98244 - protein, 27 aa, Artificial Sequence
  Cyclic GFR-binding peptide
VGRKPKVEYQKYVKPKRGVIYLISIPS

SEQ ID NO: 98245 - protein, 27 aa, Artificial Sequence
  Cyclic GFR-binding peptide
VGRKPKVEYQKYVVKDYEDIYLMSIPS

SEQ ID NO: 98246 - protein, 27 aa, Artificial Sequence
  Cyclic GFR-binding peptide
VGRKPKVEYKFKIKPTKGILYLISIPE

SEQ ID NO: 98247 - protein, 27 aa, Artificial Sequence
  Cyclic GFR-binding peptide
VGRKPKVYHYKLYTVVGKDKYLISIPS

SEQ ID NO: 98248 - protein, 27 aa, Artificial Sequence
  Cyclic GFR-binding peptide
VGRKPKVRYKKLYTVVGKDFYLISIAN

SEQ ID NO: 98249 - protein, 27 aa, Artificial Sequence
  Cyclic GFR-binding peptide
VGRKPKVEYQKYVVNNAADIYLISIPS

SEQ ID NO: 98250 - protein, 27 aa, Artificial Sequence
  Cyclic GFR-binding peptide
VGRKPKVEYQKYVKPTRGVIYLISIPS

SEQ ID NO: 98251 - protein, 27 aa, Artificial Sequence
  Cyclic GFR-binding peptide
VGRKPKVEYQKYTPVGMDDIYLVSIPS

SEQ ID NO: 98252 - protein, 27 aa, Artificial Sequence
  Cyclic GFR-binding peptide
VGRKPKVEYKFKVVKDYEDLYLMSIPE

SEQ ID NO: 98253 - protein, 27 aa, Artificial Sequence
  Cyclic GFR-binding peptide
VGRKPKVEYKFKVVNNAADLYLISIPE

SEQ ID NO: 98254 - protein, 27 aa, Artificial Sequence
  Cyclic GFR-binding peptide
VGRKPKVEYQKYVVKENEDIYLMSIPS

SEQ ID NO: 98255 - protein, 27 aa, Artificial Sequence
  Cyclic GFR-binding peptide
VGRKPKVEYQKYIKPTKGIIYLISIPS

SEQ ID NO: 98256 - protein, 27 aa, Artificial Sequence
  Cyclic GFR-binding peptide
VGRKPKVRYKKLVVNNAADFYLISIAN

SEQ ID NO: 98257 - protein, 27 aa, Artificial Sequence
  Cyclic GFR-binding peptide
VGRKPKVYHYKLVVNNAADKYLISIPS

SEQ ID NO: 98258 - protein, 27 aa, Artificial Sequence
  Cyclic GFR-binding peptide
VGRKPKVEYKFKIVNNSSDLYLVSIPE

SEQ ID NO: 98259 - protein, 27 aa, Artificial Sequence
  Cyclic GFR-binding peptide
VGRKPKVEYQKYIVNSSDDIYLVSIPS

SEQ ID NO: 98260 - protein, 27 aa, Artificial Sequence
  Cyclic GFR-binding peptide
VGRKPKVEYKFKIVNSSDDLYLVSIPE

SEQ ID NO: 98261 - protein, 27 aa, Artificial Sequence
  Cyclic GFR-binding peptide
VGRKPKVEYKFKVKPKRGVLYLISIPE

SEQ ID NO: 98262 - protein, 27 aa, Artificial Sequence
  Cyclic GFR-binding peptide
VGRKPKVEYQKYYTVVGKDIYLISIPS

SEQ ID NO: 98263 - protein, 27 aa, Artificial Sequence
  Cyclic GFR-binding peptide
VGRKPKVEYKFKVVKENEDLYLMSIPE

SEQ ID NO: 98264 - protein, 27 aa, Artificial Sequence
  Cyclic GFR-binding peptide
VGRKPKVEYQKYIVNNSSDIYLVSIPS

SEQ ID NO: 98265 - protein, 27 aa, Artificial Sequence
  Cyclic GFR-binding peptide
VGRKPKVEYKFKYTVVGKDLYLISIPE

SEQ ID NO: 98266 - protein, 27 aa, Artificial Sequence
  Cyclic GFR-binding peptide
EPISILYLVGRTPKVKFKYEVGRKPKV

SEQ ID NO: 98267 - protein, 27 aa, Artificial Sequence
  Cyclic GFR-binding peptide
EPISVLYLDDMGVPTKFKYEVGRKPKV

SEQ ID NO: 98268 - protein, 27 aa, Artificial Sequence
  Cyclic GFR-binding peptide
SPISILYIVGRKPKVYKQYEVGRKPKV

SEQ ID NO: 98269 - protein, 27 aa, Artificial Sequence
  Cyclic GFR-binding peptide
SPISMLYIDEYDKVVYKQYEVGRKPKV

SEQ ID NO: 98270 - protein, 27 aa, Artificial Sequence
  Cyclic GFR-binding peptide
EPISILYLIGKTPKIKFKYEVGRKPKV

SEQ ID NO: 98271 - protein, 27 aa, Artificial Sequence
  Cyclic GFR-binding peptide
SPISILYKDKGVVTYLKYHYVGRKPKV

SEQ ID NO: 98272 - protein, 27 aa, Artificial Sequence
  Cyclic GFR-binding peptide
NAISILYFDKGVVTYLKKYRVGRKPKV

SEQ ID NO: 98273 - protein, 27 aa, Artificial Sequence
  Cyclic GFR-binding peptide
SPISILYIDAANNVVYKQYEVGRKPKV

SEQ ID NO: 98274 - protein, 27 aa, Artificial Sequence
  Cyclic GFR-binding peptide
SPISILYIVGRTPKVYKQYEVGRKPKV

SEQ ID NO: 98275 - protein, 27 aa, Artificial Sequence
  Cyclic GFR-binding peptide
SPISVLYIDDMGVPTYKQYEVGRKPKV

SEQ ID NO: 98276 - protein, 27 aa, Artificial Sequence
  Cyclic GFR-binding peptide
EPISMLYLDEYDKVVKFKYEVGRKPKV

SEQ ID NO: 98277 - protein, 27 aa, Artificial Sequence
  Cyclic GFR-binding peptide
EPISILYLDAANNVVKFKYEVGRKPKV

SEQ ID NO: 98278 - protein, 27 aa, Artificial Sequence
  Cyclic GFR-binding peptide
SPISMLYIDENEKVVYKQYEVGRKPKV

SEQ ID NO: 98279 - protein, 27 aa, Artificial Sequence
  Cyclic GFR-binding peptide
SPISILYIIGKTPKIYKQYEVGRKPKV

SEQ ID NO: 98280 - protein, 27 aa, Artificial Sequence
  Cyclic GFR-binding peptide
NAISILYFDAANNVVLKKYRVGRKPKV

SEQ ID NO: 98281 - protein, 27 aa, Artificial Sequence
  Cyclic GFR-binding peptide
SPISILYKDAANNVVLKYHYVGRKPKV

SEQ ID NO: 98282 - protein, 27 aa, Artificial Sequence
  Cyclic GFR-binding peptide
EPISVLYLDSSNNVIKFKYEVGRKPKV

SEQ ID NO: 98283 - protein, 27 aa, Artificial Sequence
  Cyclic GFR-binding peptide
SPISVLYIDDSSNVIYKQYEVGRKPKV

SEQ ID NO: 98284 - protein, 27 aa, Artificial Sequence
  Cyclic GFR-binding peptide
EPISVLYLDDSSNVIKFKYEVGRKPKV

SEQ ID NO: 98285 - protein, 27 aa, Artificial Sequence
  Cyclic GFR-binding peptide
EPISILYLVGRKPKVKFKYEVGRKPKV

SEQ ID NO: 98286 - protein, 27 aa, Artificial Sequence
  Cyclic GFR-binding peptide
SPISILYIDKGVVTYYKQYEVGRKPKV

SEQ ID NO: 98287 - protein, 27 aa, Artificial Sequence
  Cyclic GFR-binding peptide
EPISMLYLDENEKVVKFKYEVGRKPKV

SEQ ID NO: 98288 - protein, 27 aa, Artificial Sequence
  Cyclic GFR-binding peptide
SPISVLYIDSSNNVIYKQYEVGRKPKV

SEQ ID NO: 98289 - protein, 27 aa, Artificial Sequence
  Cyclic GFR-binding peptide
EPISILYLDKGVVTYKFKYEVGRKPKV

SEQ ID NO: 98290 - protein, 27 aa, Artificial Sequence
  Cyclic GFR-binding peptide
VGRKPKVPIKGYIIQQKDNFYLMNIPS

SEQ ID NO: 98291 - protein, 27 aa, Artificial Sequence
  Cyclic GFR-binding peptide
VGRKPKVPIKGYVVKDYEDFYLMNIPS

SEQ ID NO: 98292 - protein, 27 aa, Artificial Sequence
  Cyclic GFR-binding peptide
VGRKPKVPIKGYIVNSSDDFYLVNIPS

SEQ ID NO: 98293 - protein, 27 aa, Artificial Sequence
  Cyclic GFR-binding peptide
VGRKPKVPIKGYVVNNAADFYLINIPS

SEQ ID NO: 98294 - protein, 27 aa, Artificial Sequence
  Cyclic GFR-binding peptide
VGRKPKVPIKGYYTVVGKDFYLINIPS

SEQ ID NO: 98295 - protein, 27 aa, Artificial Sequence
  Cyclic GFR-binding peptide
VGRKPKVPIKGYLLVRGNDFYLMNIPS

SEQ ID NO: 98296 - protein, 27 aa, Artificial Sequence
  Cyclic GFR-binding peptide
VGRKPKVPIKGYVVKENEDFYLMNIPS

SEQ ID NO: 98297 - protein, 27 aa, Artificial Sequence
  Cyclic GFR-binding peptide
VGRKPKVPIKGYVVNNASDFYLINIPS

SEQ ID NO: 98298 - protein, 27 aa, Artificial Sequence
  Cyclic GFR-binding peptide
VGRKPKVPIKGYTPVGMDDFYLVNIPS

SEQ ID NO: 98299 - protein, 27 aa, Artificial Sequence
  Cyclic GFR-binding peptide
VGRKPKVPIKGYIVNNSSDFYLVNIPS

SEQ ID NO: 98300 - protein, 27 aa, Artificial Sequence
  Cyclic GFR-binding peptide
SPINMLYFNDKQQIIYGKIPVGRKPKV

SEQ ID NO: 98301 - protein, 27 aa, Artificial Sequence
  Cyclic GFR-binding peptide
SPINMLYFDEYDKVVYGKIPVGRKPKV

SEQ ID NO: 98302 - protein, 27 aa, Artificial Sequence
  Cyclic GFR-binding peptide
SPINVLYFDDSSNVIYGKIPVGRKPKV

SEQ ID NO: 98303 - protein, 27 aa, Artificial Sequence
  Cyclic GFR-binding peptide
SPINILYFDAANNVVYGKIPVGRKPKV

SEQ ID NO: 98304 - protein, 27 aa, Artificial Sequence
  Cyclic GFR-binding peptide
SPINILYFDKGVVTYYGKIPVGRKPKV

SEQ ID NO: 98305 - protein, 27 aa, Artificial Sequence
  Cyclic GFR-binding peptide
SPINMLYFDNGRVLLYGKIPVGRKPKV

SEQ ID NO: 98306 - protein, 27 aa, Artificial Sequence
  Cyclic GFR-binding peptide
SPINMLYFDENEKVVYGKIPVGRKPKV

SEQ ID NO: 98307 - protein, 27 aa, Artificial Sequence
  Cyclic GFR-binding peptide
SPINILYFDSANNVVYGKIPVGRKPKV

SEQ ID NO: 98308 - protein, 27 aa, Artificial Sequence
  Cyclic GFR-binding peptide
SPINVLYFDDMGVPTYGKIPVGRKPKV

SEQ ID NO: 98309 - protein, 27 aa, Artificial Sequence
  Cyclic GFR-binding peptide
SPINVLYFDSSNNVIYGKIPVGRKPKV

SEQ ID NO: 98310 - protein, 27 aa, Artificial Sequence
  Cyclic GFR-binding peptide
VGRKPKVEYQKYVVNNASDIYLISIPS

SEQ ID NO: 98311 - protein, 27 aa, Artificial Sequence
  Cyclic GFR-binding peptide
VGRKPKVEYQKYIIQQKDNIYLMSIPS

SEQ ID NO: 98312 - protein, 27 aa, Artificial Sequence
  Cyclic GFR-binding peptide
VGRKPKVEYQKYLLVRGNDIYLMSIPS

SEQ ID NO: 98313 - protein, 27 aa, Artificial Sequence
  Cyclic GFR-binding peptide
SPISILYIDSANNVVYKQYEVGRKPKV

SEQ ID NO: 98314 - protein, 27 aa, Artificial Sequence
  Cyclic GFR-binding peptide
SPISMLYINDKQQIIYKQYEVGRKPKV

SEQ ID NO: 98315 - protein, 27 aa, Artificial Sequence
  Cyclic GFR-binding peptide
SPISMLYIDNGRVLLYKQYEVGRKPKV

SEQ ID NO: 98316 - protein, 27 aa, Artificial Sequence
  Cyclic GFR-binding peptide
VGRKPKVPYVKLYTVVGKDFFLISLSS

SEQ ID NO: 98317 - protein, 27 aa, Artificial Sequence
  Cyclic GFR-binding peptide
VGRKPKVPYVKLIKPTKGIFFLISLSS

SEQ ID NO: 98318 - protein, 27 aa, Artificial Sequence
  Cyclic GFR-binding peptide
VGRKPKVPYVKLIIQQKDNFFLMSLSS

SEQ ID NO: 98319 - protein, 27 aa, Artificial Sequence
  Cyclic GFR-binding peptide
VGRKPKVPYVKLIVNSSDDFFLVSLSS

SEQ ID NO: 98320 - protein, 27 aa, Artificial Sequence
  Cyclic GFR-binding peptide
VGRKPKVPYVKLVKPKRGVFFLISLSS

SEQ ID NO: 98321 - protein, 27 aa, Artificial Sequence
  Cyclic GFR-binding peptide
VGRKPKVPYVKLVKPTRGVFFLISLSS

SEQ ID NO: 98322 - protein, 27 aa, Artificial Sequence
  Cyclic GFR-binding peptide
VGRKPKVPYVKLTPVGMDDFFLVSLSS

SEQ ID NO: 98323 - protein, 29 aa, Artificial Sequence
  Cyclic GFR-binding peptide
VGRKPKVPYVKLHQGQHPKIRFFLMSLSS

SEQ ID NO: 98324 - protein, 27 aa, Artificial Sequence
  Cyclic GFR-binding peptide
VGRKPKVPYVKLVVNKNEDFFLISLSS

SEQ ID NO: 98325 - protein, 27 aa, Artificial Sequence
  Cyclic GFR-binding peptide
VGRKPKVPYVKLVVNNASDFFLISLSS

SEQ ID NO: 98326 - protein, 27 aa, Artificial Sequence
  Cyclic GFR-binding peptide
VGRKPKVPYVKLVVKENEDFFLMSLSS

SEQ ID NO: 98327 - protein, 27 aa, Artificial Sequence
  Cyclic GFR-binding peptide
VGRKPKVPYVKLIVNNSSDFFLVSLSS

SEQ ID NO: 98328 - protein, 29 aa, Artificial Sequence
  Cyclic GFR-binding peptide
VGRKPKVPYVKLLKPKKRVYEFFLVSLSS

SEQ ID NO: 98329 - protein, 27 aa, Artificial Sequence
  Cyclic GFR-binding peptide
VGRKPKVPYVKLLLVRGNDFFLMSLSS

SEQ ID NO: 98330 - protein, 27 aa, Artificial Sequence
  Cyclic GFR-binding peptide
VGRKPKVPYVKLVVKDYEDFFLMSLSS

SEQ ID NO: 98331 - protein, 27 aa, Artificial Sequence
  Cyclic GFR-binding peptide
VGRKPKVPYVKLVVNNAADFFLISLSS

SEQ ID NO: 98332 - protein, 27 aa, Artificial Sequence
  Cyclic GFR-binding peptide
SSLSILFFDKGVVTYLKVYPVGRKPKV

SEQ ID NO: 98333 - protein, 27 aa, Artificial Sequence
  Cyclic GFR-binding peptide
SSLSILFFIGKTPKILKVYPVGRKPKV

SEQ ID NO: 98334 - protein, 27 aa, Artificial Sequence
  Cyclic GFR-binding peptide
SSLSMLFFNDKQQIILKVYPVGRKPKV

SEQ ID NO: 98335 - protein, 27 aa, Artificial Sequence
  Cyclic GFR-binding peptide
SSLSVLFFDDSSNVILKVYPVGRKPKV

SEQ ID NO: 98336 - protein, 27 aa, Artificial Sequence
  Cyclic GFR-binding peptide
SSLSILFFVGRKPKVLKVYPVGRKPKV

SEQ ID NO: 98337 - protein, 27 aa, Artificial Sequence
  Cyclic GFR-binding peptide
SSLSILFFVGRTPKVLKVYPVGRKPKV

SEQ ID NO: 98338 - protein, 27 aa, Artificial Sequence
  Cyclic GFR-binding peptide
SSLSVLFFDDMGVPTLKVYPVGRKPKV

SEQ ID NO: 98339 - protein, 29 aa, Artificial Sequence
  Cyclic GFR-binding peptide
SSLSMLFFRIKPHQGQHLKVYPVGRKPKV

SEQ ID NO: 98340 - protein, 27 aa, Artificial Sequence
  Cyclic GFR-binding peptide
SSLSILFFDENKNVVLKVYPVGRKPKV

SEQ ID NO: 98341 - protein, 27 aa, Artificial Sequence
  Cyclic GFR-binding peptide
SSLSILFFDSANNVVLKVYPVGRKPKV

SEQ ID NO: 98342 - protein, 27 aa, Artificial Sequence
  Cyclic GFR-binding peptide
SSLSMLFFDENEKVVLKVYPVGRKPKV

SEQ ID NO: 98343 - protein, 27 aa, Artificial Sequence
  Cyclic GFR-binding peptide
SSLSVLFFDSSNNVILKVYPVGRKPKV

SEQ ID NO: 98344 - protein, 29 aa, Artificial Sequence
  Cyclic GFR-binding peptide
SSLSVLFFEYVRKKPKLLKVYPVGRKPKV

SEQ ID NO: 98345 - protein, 27 aa, Artificial Sequence
  Cyclic GFR-binding peptide
SSLSMLFFDNGRVLLLKVYPVGRKPKV

SEQ ID NO: 98346 - protein, 27 aa, Artificial Sequence
  Cyclic GFR-binding peptide
SSLSMLFFDEYDKVVLKVYPVGRKPKV

SEQ ID NO: 98347 - protein, 27 aa, Artificial Sequence
  Cyclic GFR-binding peptide
SSLSILFFDAANNVVLKVYPVGRKPKV

SEQ ID NO: 98348 - protein, 27 aa, Artificial Sequence
  Cyclic GFR-binding peptide
VGRKPKVSMEGIIVNSSDDMIQVTINS

SEQ ID NO: 98349 - protein, 27 aa, Artificial Sequence
  Cyclic GFR-binding peptide
VGRKPKVVTAKKVVKENEDIKRMQVPR

SEQ ID NO: 98350 - protein, 27 aa, Artificial Sequence
  Cyclic GFR-binding peptide
VGRKPKVSMEGIVVKDYEDMIQMTINS

SEQ ID NO: 98351 - protein, 27 aa, Artificial Sequence
  Cyclic GFR-binding peptide
VGRKPKVVTAKKIKPTKGIIKRIQVPR

SEQ ID NO: 98352 - protein, 27 aa, Artificial Sequence
  Cyclic GFR-binding peptide
VGRKPKVSMEGIVKPTRGVMIQITINS

SEQ ID NO: 98353 - protein, 29 aa, Artificial Sequence
  Cyclic GFR-binding peptide
VGRKPKVNSLQEFIPKKRVIEYYVVPLPE

SEQ ID NO: 98354 - protein, 27 aa, Artificial Sequence
  Cyclic GFR-binding peptide
VGRKPKVVQVEKVKPKRGVVKAIKVSR

SEQ ID NO: 98355 - protein, 27 aa, Artificial Sequence
  Cyclic GFR-binding peptide
VGRKPKVVQVEKVVKENEDVKAMKVSR

SEQ ID NO: 98356 - protein, 27 aa, Artificial Sequence
  Cyclic GFR-binding peptide
VGRKPKVVTAKKIVNSSDDIKRVQVPR

SEQ ID NO: 98357 - protein, 27 aa, Artificial Sequence
  Cyclic GFR-binding peptide
VGRKPKVVQVEKIKPTKGIVKAIKVSR

SEQ ID NO: 98358 - protein, 29 aa, Artificial Sequence
  Cyclic GFR-binding peptide
VGRKPKVNSLQEFIPKKRVIEYYLVTLPE

SEQ ID NO: 98359 - protein, 27 aa, Artificial Sequence
  Cyclic GFR-binding peptide
VGRKPKVVQVEKIVNSSDDVKAVKVSR

SEQ ID NO: 98360 - protein, 27 aa, Artificial Sequence
  Cyclic GFR-binding peptide
VGRKPKVVTAKKVKPKRGVIKRIQVPR

SEQ ID NO: 98361 - protein, 27 aa, Artificial Sequence
  Cyclic GFR-binding peptide
VGRKPKVVQVEKVKPTRGVVKAIKVSR

SEQ ID NO: 98362 - protein, 27 aa, Artificial Sequence
  Cyclic GFR-binding peptide
VGRKPKVVTAKKVKPTRGVIKRIQVPR

SEQ ID NO: 98363 - protein, 29 aa, Artificial Sequence
  Cyclic GFR-binding peptide
VGRKPKVNSLQELKPKKRVYEYYLVTLPE

SEQ ID NO: 98364 - protein, 27 aa, Artificial Sequence
  Cyclic GFR-binding peptide
VGRKPKVSMEGIVKPKRGVMIQITINS

SEQ ID NO: 98365 - protein, 27 aa, Artificial Sequence
  Cyclic GFR-binding peptide
VGRKPKVSMEGIVVKENEDMIQMTINS

SEQ ID NO: 98366 - protein, 27 aa, Artificial Sequence
  Cyclic GFR-binding peptide
VGRKPKVSMEGIIKPTKGIMIQITINS

SEQ ID NO: 98367 - protein, 29 aa, Artificial Sequence
  Cyclic GFR-binding peptide
VGRKPKVNSLQEHQGQHPKIRYYLMTLPE

SEQ ID NO: 98368 - protein, 27 aa, Artificial Sequence
  Cyclic GFR-binding peptide
VGRKPKVVTAKKVVKDYEDIKRMQVPR

SEQ ID NO: 98369 - protein, 29 aa, Artificial Sequence
  Cyclic GFR-binding peptide
VGRKPKVNSLQEHQGQHPKIRYYVMPLPE

SEQ ID NO: 98370 - protein, 29 aa, Artificial Sequence
  Cyclic GFR-binding peptide
VGRKPKVNSLQELKPKKRVYEYYVVPLPE

SEQ ID NO: 98371 - protein, 27 aa, Artificial Sequence
  Cyclic GFR-binding peptide
VGRKPKVVQVEKVVKDYEDVKAMKVSR

SEQ ID NO: 98372 - protein, 27 aa, Artificial Sequence
  Cyclic GFR-binding peptide
SNITVQIMDDSSNVIIGEMSVGRKPKV

SEQ ID NO: 98373 - protein, 27 aa, Artificial Sequence
  Cyclic GFR-binding peptide
RPVQMRKIDENEKVVKKATVVGRKPKV

SEQ ID NO: 98374 - protein, 27 aa, Artificial Sequence
  Cyclic GFR-binding peptide
SNITMQIMDEYDKVVIGEMSVGRKPKV

SEQ ID NO: 98375 - protein, 27 aa, Artificial Sequence
  Cyclic GFR-binding peptide
RPVQIRKIIGKTPKIKKATVVGRKPKV

SEQ ID NO: 98376 - protein, 27 aa, Artificial Sequence
  Cyclic GFR-binding peptide
SNITIQIMVGRTPKVIGEMSVGRKPKV

SEQ ID NO: 98377 - protein, 29 aa, Artificial Sequence
  Cyclic GFR-binding peptide
EPLPVVYYEIVRKKPIFEQLSNVGRKPKV

SEQ ID NO: 98378 - protein, 27 aa, Artificial Sequence
  Cyclic GFR-binding peptide
RSVKIAKVVGRKPKVKEVQVVGRKPKV

SEQ ID NO: 98379 - protein, 27 aa, Artificial Sequence
  Cyclic GFR-binding peptide
RSVKMAKVDENEKVVKEVQVVGRKPKV

SEQ ID NO: 98380 - protein, 27 aa, Artificial Sequence
  Cyclic GFR-binding peptide
RPVQVRKIDDSSNVIKKATVVGRKPKV

SEQ ID NO: 98381 - protein, 27 aa, Artificial Sequence
  Cyclic GFR-binding peptide
RSVKIAKVIGKTPKIKEVQVVGRKPKV

SEQ ID NO: 98382 - protein, 29 aa, Artificial Sequence
  Cyclic GFR-binding peptide
EPLTVLYYEIVRKKPIFEQLSNVGRKPKV

SEQ ID NO: 98383 - protein, 27 aa, Artificial Sequence
  Cyclic GFR-binding peptide
RSVKVAKVDDSSNVIKEVQVVGRKPKV

SEQ ID NO: 98384 - protein, 27 aa, Artificial Sequence
  Cyclic GFR-binding peptide
RPVQIRKIVGRKPKVKKATVVGRKPKV

SEQ ID NO: 98385 - protein, 27 aa, Artificial Sequence
  Cyclic GFR-binding peptide
RSVKIAKVVGRTPKVKEVQVVGRKPKV

SEQ ID NO: 98386 - protein, 27 aa, Artificial Sequence
  Cyclic GFR-binding peptide
RPVQIRKIVGRTPKVKKATVVGRKPKV

SEQ ID NO: 98387 - protein, 29 aa, Artificial Sequence
  Cyclic GFR-binding peptide
EPLTVLYYEYVRKKPKLEQLSNVGRKPKV

SEQ ID NO: 98388 - protein, 27 aa, Artificial Sequence
  Cyclic GFR-binding peptide
SNITIQIMVGRKPKVIGEMSVGRKPKV

SEQ ID NO: 98389 - protein, 27 aa, Artificial Sequence
  Cyclic GFR-binding peptide
SNITMQIMDENEKVVIGEMSVGRKPKV

SEQ ID NO: 98390 - protein, 27 aa, Artificial Sequence
  Cyclic GFR-binding peptide
SNITIQIMIGKTPKIIGEMSVGRKPKV

SEQ ID NO: 98391 - protein, 29 aa, Artificial Sequence
  Cyclic GFR-binding peptide
EPLTMLYYRIKPHQGQHEQLSNVGRKPKV

SEQ ID NO: 98392 - protein, 27 aa, Artificial Sequence
  Cyclic GFR-binding peptide
RPVQMRKIDEYDKVVKKATVVGRKPKV

SEQ ID NO: 98393 - protein, 29 aa, Artificial Sequence
  Cyclic GFR-binding peptide
EPLPMVYYRIKPHQGQHEQLSNVGRKPKV

SEQ ID NO: 98394 - protein, 29 aa, Artificial Sequence
  Cyclic GFR-binding peptide
EPLPVVYYEYVRKKPKLEQLSNVGRKPKV

SEQ ID NO: 98395 - protein, 27 aa, Artificial Sequence
  Cyclic GFR-binding peptide
RSVKMAKVDEYDKVVKEVQVVGRKPKV

SEQ ID NO: 98396 - protein, 27 aa, Artificial Sequence
  Cyclic GFR-binding peptide
VGRKPKVRYKKLIIQQKDNFYLMSIAN

SEQ ID NO: 98397 - protein, 27 aa, Artificial Sequence
  Cyclic GFR-binding peptide
VGRKPKVRYKKLLLVRGNDFYLMSIAN

SEQ ID NO: 98398 - protein, 27 aa, Artificial Sequence
  Cyclic GFR-binding peptide
NAISMLYFNDKQQIILKKYRVGRKPKV

SEQ ID NO: 98399 - protein, 27 aa, Artificial Sequence
  Cyclic GFR-binding peptide
NAISMLYFDNGRVLLLKKYRVGRKPKV

SEQ ID NO: 98400 - protein, 27 aa, Artificial Sequence
  Cyclic GFR-binding peptide
VGRKPKVEYKFKVVNKNEDLYLISIPE

SEQ ID NO: 98401 - protein, 27 aa, Artificial Sequence
  Cyclic GFR-binding peptide
VGRKPKVPIKGYVKPTRGVFYLINIPS

SEQ ID NO: 98402 - protein, 27 aa, Artificial Sequence
  Cyclic GFR-binding peptide
VGRKPKVEYKFKLLVRGNDLYLMSIPE

SEQ ID NO: 98403 - protein, 27 aa, Artificial Sequence
  Cyclic GFR-binding peptide
VGRKPKVYHYKLVVNKNEDKYLISIPS

SEQ ID NO: 98404 - protein, 27 aa, Artificial Sequence
  Cyclic GFR-binding peptide
VGRKPKVRHKRLLLVRGNDYYLMSTAS

SEQ ID NO: 98405 - protein, 27 aa, Artificial Sequence
  Cyclic GFR-binding peptide
VGRKPKVYHYKLLLVRGNDKYLMSIPS

SEQ ID NO: 98406 - protein, 27 aa, Artificial Sequence
  Cyclic GFR-binding peptide
VGRKPKVRHKRLVVNKNEDYYLISTAS

SEQ ID NO: 98407 - protein, 27 aa, Artificial Sequence
  Cyclic GFR-binding peptide
VGRKPKVRYKKLVVNKNEDFYLISIAN

SEQ ID NO: 98408 - protein, 27 aa, Artificial Sequence
  Cyclic GFR-binding peptide
VGRKPKVPIKGYVVNKNEDFYLINIPS

SEQ ID NO: 98409 - protein, 27 aa, Artificial Sequence
  Cyclic GFR-binding peptide
VGRKPKVPIKGYIKPTKGIFYLINIPS

SEQ ID NO: 98410 - protein, 27 aa, Artificial Sequence
  Cyclic GFR-binding peptide
VGRKPKVRHKRLYTVVGKDYYLISTAS

SEQ ID NO: 98411 - protein, 27 aa, Artificial Sequence
  Cyclic GFR-binding peptide
VGRKPKVEYKFKVVNNASDLYLISIPE

SEQ ID NO: 98412 - protein, 27 aa, Artificial Sequence
  Cyclic GFR-binding peptide
VGRKPKVRHKRLIIQQKDNYYLMSTAS

SEQ ID NO: 98413 - protein, 27 aa, Artificial Sequence
  Cyclic GFR-binding peptide
VGRKPKVEYKFKIIQQKDNLYLMSIPE

SEQ ID NO: 98414 - protein, 27 aa, Artificial Sequence
  Cyclic GFR-binding peptide
VGRKPKVPIKGYVKPKRGVFYLINIPS

SEQ ID NO: 98415 - protein, 27 aa, Artificial Sequence
  Cyclic GFR-binding peptide
VGRKPKVRHKRLVVNNASDYYLISTAS

SEQ ID NO: 98416 - protein, 27 aa, Artificial Sequence
  Cyclic GFR-binding peptide
VGRKPKVYHYKLVVNNASDKYLISIPS

SEQ ID NO: 98417 - protein, 27 aa, Artificial Sequence
  Cyclic GFR-binding peptide
VGRKPKVYHYKLIIQQKDNKYLMSIPS

SEQ ID NO: 98418 - protein, 27 aa, Artificial Sequence
  Cyclic GFR-binding peptide
VGRKPKVRHKRLVVNNAADYYLISTAS

SEQ ID NO: 98419 - protein, 27 aa, Artificial Sequence
  Cyclic GFR-binding peptide
EPISILYLDENKNVVKFKYEVGRKPKV

SEQ ID NO: 98420 - protein, 27 aa, Artificial Sequence
  Cyclic GFR-binding peptide
SPINILYFVGRTPKVYGKIPVGRKPKV

SEQ ID NO: 98421 - protein, 27 aa, Artificial Sequence
  Cyclic GFR-binding peptide
EPISMLYLDNGRVLLKFKYEVGRKPKV

SEQ ID NO: 98422 - protein, 27 aa, Artificial Sequence
  Cyclic GFR-binding peptide
SPISILYKDENKNVVLKYHYVGRKPKV

SEQ ID NO: 98423 - protein, 27 aa, Artificial Sequence
  Cyclic GFR-binding peptide
SATSMLYYDNGRVLLLRKHRVGRKPKV

SEQ ID NO: 98424 - protein, 27 aa, Artificial Sequence
  Cyclic GFR-binding peptide
SPISMLYKDNGRVLLLKYHYVGRKPKV

SEQ ID NO: 98425 - protein, 27 aa, Artificial Sequence
  Cyclic GFR-binding peptide
SATSILYYDENKNVVLRKHRVGRKPKV

SEQ ID NO: 98426 - protein, 27 aa, Artificial Sequence
  Cyclic GFR-binding peptide
NAISILYFDENKNVVLKKYRVGRKPKV

SEQ ID NO: 98427 - protein, 27 aa, Artificial Sequence
  Cyclic GFR-binding peptide
SPINILYFDENKNVVYGKIPVGRKPKV

SEQ ID NO: 98428 - protein, 27 aa, Artificial Sequence
  Cyclic GFR-binding peptide
SPINILYFIGKTPKIYGKIPVGRKPKV

SEQ ID NO: 98429 - protein, 27 aa, Artificial Sequence
  Cyclic GFR-binding peptide
SATSILYYDKGVVTYLRKHRVGRKPKV

SEQ ID NO: 98430 - protein, 27 aa, Artificial Sequence
  Cyclic GFR-binding peptide
EPISILYLDSANNVVKFKYEVGRKPKV

SEQ ID NO: 98431 - protein, 27 aa, Artificial Sequence
  Cyclic GFR-binding peptide
SATSMLYYNDKQQIILRKHRVGRKPKV

SEQ ID NO: 98432 - protein, 27 aa, Artificial Sequence
  Cyclic GFR-binding peptide
EPISMLYLNDKQQIIKFKYEVGRKPKV

SEQ ID NO: 98433 - protein, 27 aa, Artificial Sequence
  Cyclic GFR-binding peptide
SPINILYFVGRKPKVYGKIPVGRKPKV

SEQ ID NO: 98434 - protein, 27 aa, Artificial Sequence
  Cyclic GFR-binding peptide
SATSILYYDSANNVVLRKHRVGRKPKV

SEQ ID NO: 98435 - protein, 27 aa, Artificial Sequence
  Cyclic GFR-binding peptide
SPISILYKDSANNVVLKYHYVGRKPKV

SEQ ID NO: 98436 - protein, 27 aa, Artificial Sequence
  Cyclic GFR-binding peptide
SPISMLYKNDKQQIILKYHYVGRKPKV

SEQ ID NO: 98437 - protein, 27 aa, Artificial Sequence
  Cyclic GFR-binding peptide
SATSILYYDAANNVVLRKHRVGRKPKV

SEQ ID NO: 98438 - protein, 27 aa, Artificial Sequence
  Cyclic GFR-binding peptide
VGRKPKVSMEGIIIQQKDNMIQMTINS

SEQ ID NO: 98439 - protein, 27 aa, Artificial Sequence
  Cyclic GFR-binding peptide
VGRKPKVSMEGLVKPKRGVMIQITINS

SEQ ID NO: 98440 - protein, 27 aa, Artificial Sequence
  Cyclic GFR-binding peptide
VGRKPKVSMEGLVVNNASDMIQITINS

SEQ ID NO: 98441 - protein, 27 aa, Artificial Sequence
  Cyclic GFR-binding peptide
VGRKPKVSMEGILLVRGNDMIQMTINS

SEQ ID NO: 98442 - protein, 27 aa, Artificial Sequence
  Cyclic GFR-binding peptide
VGRKPKVSMEGLIKPTKGIMIQITINS

SEQ ID NO: 98443 - protein, 27 aa, Artificial Sequence
  Cyclic GFR-binding peptide
VGRKPKVSMEGLIVNSSDDMIQVTINS

SEQ ID NO: 98444 - protein, 27 aa, Artificial Sequence
  Cyclic GFR-binding peptide
VGRKPKVSMEGIVVNNASDMIQITINS

SEQ ID NO: 98445 - protein, 27 aa, Artificial Sequence
  Cyclic GFR-binding peptide
VGRKPKVSMEGLVVNNAADMIQITINS

SEQ ID NO: 98446 - protein, 27 aa, Artificial Sequence
  Cyclic GFR-binding peptide
VGRKPKVSMEGLLLVRGNDMIQMTINS

SEQ ID NO: 98447 - protein, 27 aa, Artificial Sequence
  Cyclic GFR-binding peptide
VGRKPKVSMEGLIIQQKDNMIQMTINS

SEQ ID NO: 98448 - protein, 27 aa, Artificial Sequence
  Cyclic GFR-binding peptide
VGRKPKVSMEGIVVNNAADMIQITINS

SEQ ID NO: 98449 - protein, 27 aa, Artificial Sequence
  Cyclic GFR-binding peptide
VGRKPKVSMEGLVKPTRGVMIQITINS

SEQ ID NO: 98450 - protein, 27 aa, Artificial Sequence
  Cyclic GFR-binding peptide
SNITMQIMNDKQQIIIGEMSVGRKPKV

SEQ ID NO: 98451 - protein, 27 aa, Artificial Sequence
  Cyclic GFR-binding peptide
SNITIQIMVGRKPKVLGEMSVGRKPKV

SEQ ID NO: 98452 - protein, 27 aa, Artificial Sequence
  Cyclic GFR-binding peptide
SNITIQIMDSANNVVLGEMSVGRKPKV

SEQ ID NO: 98453 - protein, 27 aa, Artificial Sequence
  Cyclic GFR-binding peptide
SNITMQIMDNGRVLLIGEMSVGRKPKV

SEQ ID NO: 98454 - protein, 27 aa, Artificial Sequence
  Cyclic GFR-binding peptide
SNITIQIMIGKTPKILGEMSVGRKPKV

SEQ ID NO: 98455 - protein, 27 aa, Artificial Sequence
  Cyclic GFR-binding peptide
SNITVQIMDDSSNVILGEMSVGRKPKV

SEQ ID NO: 98456 - protein, 27 aa, Artificial Sequence
  Cyclic GFR-binding peptide
SNITIQIMDSANNVVIGEMSVGRKPKV

SEQ ID NO: 98457 - protein, 27 aa, Artificial Sequence
  Cyclic GFR-binding peptide
SNITIQIMDAANNVVLGEMSVGRKPKV

SEQ ID NO: 98458 - protein, 27 aa, Artificial Sequence
  Cyclic GFR-binding peptide
SNITMQIMDNGRVLLLGEMSVGRKPKV

SEQ ID NO: 98459 - protein, 27 aa, Artificial Sequence
  Cyclic GFR-binding peptide
SNITMQIMNDKQQIILGEMSVGRKPKV

SEQ ID NO: 98460 - protein, 27 aa, Artificial Sequence
  Cyclic GFR-binding peptide
SNITIQIMDAANNVVIGEMSVGRKPKV

SEQ ID NO: 98461 - protein, 27 aa, Artificial Sequence
  Cyclic GFR-binding peptide
SNITIQIMVGRTPKVLGEMSVGRKPKV

SEQ ID NO: 98462 - protein, 27 aa, Artificial Sequence
  Cyclic GFR-binding peptide
VGRKPKVQYNKLVVNKNEDLYLISIAS

SEQ ID NO: 98463 - protein, 27 aa, Artificial Sequence
  Cyclic GFR-binding peptide
VGRKPKVQYNKLVVNNAADLYLISIAS

SEQ ID NO: 98464 - protein, 27 aa, Artificial Sequence
  Cyclic GFR-binding peptide
VGRKPKVQYNKLIIQQKDNLYLMSIAS

SEQ ID NO: 98465 - protein, 27 aa, Artificial Sequence
  Cyclic GFR-binding peptide
VGRKPKVQYNKLLLVRGNDLYLMSIAS

SEQ ID NO: 98466 - protein, 27 aa, Artificial Sequence
  Cyclic GFR-binding peptide
VGRKPKVQYNKLYTVVGKDLYLISIAS

SEQ ID NO: 98467 - protein, 27 aa, Artificial Sequence
  Cyclic GFR-binding peptide
SAISILYLDENKNVVLKNYQVGRKPKV

SEQ ID NO: 98468 - protein, 27 aa, Artificial Sequence
  Cyclic GFR-binding peptide
SAISILYLDAANNVVLKNYQVGRKPKV

SEQ ID NO: 98469 - protein, 27 aa, Artificial Sequence
  Cyclic GFR-binding peptide
SAISMLYLNDKQQIILKNYQVGRKPKV

SEQ ID NO: 98470 - protein, 27 aa, Artificial Sequence
  Cyclic GFR-binding peptide
SAISMLYLDNGRVLLLKNYQVGRKPKV

SEQ ID NO: 98471 - protein, 27 aa, Artificial Sequence
  Cyclic GFR-binding peptide
SAISILYLDKGVVTYLKNYQVGRKPKV

SEQ ID NO: 98472 - protein, 27 aa, Artificial Sequence
  Cyclic GFR-binding peptide
IGKTPKIRYKKLIKPTKGIFYLISIAN

SEQ ID NO: 98473 - protein, 29 aa, Artificial Sequence
  Cyclic GFR-binding peptide
IGKTPKIRHKRLFIPKKRVIEYYLVSTAS

SEQ ID NO: 98474 - protein, 27 aa, Artificial Sequence
  Cyclic GFR-binding peptide
IGKTPKIYHYKLVVKDYEDKYLMSIPS

SEQ ID NO: 98475 - protein, 27 aa, Artificial Sequence
  Cyclic GFR-binding peptide
IGKTPKIQYNKLIVNNSSDLYLVSIAS

SEQ ID NO: 98476 - protein, 27 aa, Artificial Sequence
  Cyclic GFR-binding peptide
IGKTPKIRYKKLVVKDYEDFYLMSIAN

SEQ ID NO: 98477 - protein, 27 aa, Artificial Sequence
  Cyclic GFR-binding peptide
IGKTPKIRYKKLVKPTRGVFYLISIAN

SEQ ID NO: 98478 - protein, 27 aa, Artificial Sequence
  Cyclic GFR-binding peptide
IGKTPKIRHKRLVVKENEDYYLMSTAS

SEQ ID NO: 98479 - protein, 27 aa, Artificial Sequence
  Cyclic GFR-binding peptide
IGKTPKIYHYKLIKPTKGIKYLISIPS

SEQ ID NO: 98480 - protein, 29 aa, Artificial Sequence
  Cyclic GFR-binding peptide
IGKTPKIRYKKLFIPKKRVIEFYLVSIAN

SEQ ID NO: 98481 - protein, 27 aa, Artificial Sequence
  Cyclic GFR-binding peptide
IGKTPKIYHYKLVVKENEDKYLMSIPS

SEQ ID NO: 98482 - protein, 27 aa, Artificial Sequence
  Cyclic GFR-binding peptide
IGKTPKIRHKRLVKPKRGVYYLISTAS

SEQ ID NO: 98483 - protein, 27 aa, Artificial Sequence
  Cyclic GFR-binding peptide
IGKTPKIYHYKLVKPKRGVKYLISIPS

SEQ ID NO: 98484 - protein, 29 aa, Artificial Sequence
  Cyclic GFR-binding peptide
IGKTPKIQYNKLFIPKKRVIELYLVSIAS

SEQ ID NO: 98485 - protein, 27 aa, Artificial Sequence
  Cyclic GFR-binding peptide
IGKTPKIQYNKLVKPTRGVLYLISIAS

SEQ ID NO: 98486 - protein, 27 aa, Artificial Sequence
  Cyclic GFR-binding peptide
IGKTPKIRYKKLVVKENEDFYLMSIAN

SEQ ID NO: 98487 - protein, 27 aa, Artificial Sequence
  Cyclic GFR-binding peptide
IGKTPKIQYNKLTPVGMDDLYLVSIAS

SEQ ID NO: 98488 - protein, 27 aa, Artificial Sequence
  Cyclic GFR-binding peptide
IGKTPKIRYKKLTPVGMDDFYLVSIAN

SEQ ID NO: 98489 - protein, 27 aa, Artificial Sequence
  Cyclic GFR-binding peptide
IGKTPKIRYKKLVKPKRGVFYLISIAN

SEQ ID NO: 98490 - protein, 27 aa, Artificial Sequence
  Cyclic GFR-binding peptide
IGKTPKIQYNKLVVKENEDLYLMSIAS

SEQ ID NO: 98491 - protein, 27 aa, Artificial Sequence
  Cyclic GFR-binding peptide
IGKTPKIYHYKLIVNSSDDKYLVSIPS

SEQ ID NO: 98492 - protein, 27 aa, Artificial Sequence
  Cyclic GFR-binding peptide
IGKTPKIQYNKLVKPKRGVLYLISIAS

SEQ ID NO: 98493 - protein, 27 aa, Artificial Sequence
  Cyclic GFR-binding peptide
IGKTPKIRYKKLIVNNSSDFYLVSIAN

SEQ ID NO: 98494 - protein, 27 aa, Artificial Sequence
  Cyclic GFR-binding peptide
IGKTPKIRYKKLIVNSSDDFYLVSIAN

SEQ ID NO: 98495 - protein, 27 aa, Artificial Sequence
  Cyclic GFR-binding peptide
IGKTPKIRHKRLVKPTRGVYYLISTAS

SEQ ID NO: 98496 - protein, 29 aa, Artificial Sequence
  Cyclic GFR-binding peptide
IGKTPKIYHYKLFIPKKRVIEKYLVSIPS

SEQ ID NO: 98497 - protein, 27 aa, Artificial Sequence
  Cyclic GFR-binding peptide
IGKTPKIRHKRLIKPTKGIYYLISTAS

SEQ ID NO: 98498 - protein, 27 aa, Artificial Sequence
  Cyclic GFR-binding peptide
IGKTPKIRHKRLTPVGMDDYYLVSTAS

SEQ ID NO: 98499 - protein, 27 aa, Artificial Sequence
  Cyclic GFR-binding peptide
IGKTPKIYHYKLTPVGMDDKYLVSIPS

SEQ ID NO: 98500 - protein, 27 aa, Artificial Sequence
  Cyclic GFR-binding peptide
IGKTPKIYHYKLIVNNSSDKYLVSIPS

SEQ ID NO: 98501 - protein, 27 aa, Artificial Sequence
  Cyclic GFR-binding peptide
IGKTPKIRHKRLIVNNSSDYYLVSTAS

SEQ ID NO: 98502 - protein, 27 aa, Artificial Sequence
  Cyclic GFR-binding peptide
IGKTPKIYHYKLVKPTRGVKYLISIPS

SEQ ID NO: 98503 - protein, 27 aa, Artificial Sequence
  Cyclic GFR-binding peptide
IGKTPKIRHKRLIVNSSDDYYLVSTAS

SEQ ID NO: 98504 - protein, 27 aa, Artificial Sequence
  Cyclic GFR-binding peptide
IGKTPKIRHKRLVVKDYEDYYLMSTAS

SEQ ID NO: 98505 - protein, 27 aa, Artificial Sequence
  Cyclic GFR-binding peptide
IGKTPKIQYNKLIKPTKGILYLISIAS

SEQ ID NO: 98506 - protein, 27 aa, Artificial Sequence
  Cyclic GFR-binding peptide
IGKTPKIQYNKLVVKDYEDLYLMSIAS

SEQ ID NO: 98507 - protein, 27 aa, Artificial Sequence
  Cyclic GFR-binding peptide
IGKTPKIQYNKLIVNSSDDLYLVSIAS

SEQ ID NO: 98508 - protein, 27 aa, Artificial Sequence
  Cyclic GFR-binding peptide
NAISILYFIGKTPKILKKYRIGKTPKI

SEQ ID NO: 98509 - protein, 29 aa, Artificial Sequence
  Cyclic GFR-binding peptide
SATSVLYYEIVRKKPIFLRKHRIGKTPKI

SEQ ID NO: 98510 - protein, 27 aa, Artificial Sequence
  Cyclic GFR-binding peptide
SPISMLYKDEYDKVVLKYHYIGKTPKI

SEQ ID NO: 98511 - protein, 27 aa, Artificial Sequence
  Cyclic GFR-binding peptide
SAISVLYLDSSNNVILKNYQIGKTPKI

SEQ ID NO: 98512 - protein, 27 aa, Artificial Sequence
  Cyclic GFR-binding peptide
NAISMLYFDEYDKVVLKKYRIGKTPKI

SEQ ID NO: 98513 - protein, 27 aa, Artificial Sequence
  Cyclic GFR-binding peptide
NAISILYFVGRTPKVLKKYRIGKTPKI

SEQ ID NO: 98514 - protein, 27 aa, Artificial Sequence
  Cyclic GFR-binding peptide
SATSMLYYDENEKVVLRKHRIGKTPKI

SEQ ID NO: 98515 - protein, 27 aa, Artificial Sequence
  Cyclic GFR-binding peptide
SPISILYKIGKTPKILKYHYIGKTPKI

SEQ ID NO: 98516 - protein, 29 aa, Artificial Sequence
  Cyclic GFR-binding peptide
NAISVLYFEIVRKKPIFLKKYRIGKTPKI

SEQ ID NO: 98517 - protein, 27 aa, Artificial Sequence
  Cyclic GFR-binding peptide
SPISMLYKDENEKVVLKYHYIGKTPKI

SEQ ID NO: 98518 - protein, 27 aa, Artificial Sequence
  Cyclic GFR-binding peptide
SATSILYYVGRKPKVLRKHRIGKTPKI

SEQ ID NO: 98519 - protein, 27 aa, Artificial Sequence
  Cyclic GFR-binding peptide
SPISILYKVGRKPKVLKYHYIGKTPKI

SEQ ID NO: 98520 - protein, 29 aa, Artificial Sequence
  Cyclic GFR-binding peptide
SAISVLYLEIVRKKPIFLKNYQIGKTPKI

SEQ ID NO: 98521 - protein, 27 aa, Artificial Sequence
  Cyclic GFR-binding peptide
SAISILYLVGRTPKVLKNYQIGKTPKI

SEQ ID NO: 98522 - protein, 27 aa, Artificial Sequence
  Cyclic GFR-binding peptide
NAISMLYFDENEKVVLKKYRIGKTPKI

SEQ ID NO: 98523 - protein, 27 aa, Artificial Sequence
  Cyclic GFR-binding peptide
SAISVLYLDDMGVPTLKNYQIGKTPKI

SEQ ID NO: 98524 - protein, 27 aa, Artificial Sequence
  Cyclic GFR-binding peptide
NAISVLYFDDMGVPTLKKYRIGKTPKI

SEQ ID NO: 98525 - protein, 27 aa, Artificial Sequence
  Cyclic GFR-binding peptide
NAISILYFVGRKPKVLKKYRIGKTPKI

SEQ ID NO: 98526 - protein, 27 aa, Artificial Sequence
  Cyclic GFR-binding peptide
SAISMLYLDENEKVVLKNYQIGKTPKI

SEQ ID NO: 98527 - protein, 27 aa, Artificial Sequence
  Cyclic GFR-binding peptide
SPISVLYKDDSSNVILKYHYIGKTPKI

SEQ ID NO: 98528 - protein, 27 aa, Artificial Sequence
  Cyclic GFR-binding peptide
SAISILYLVGRKPKVLKNYQIGKTPKI

SEQ ID NO: 98529 - protein, 27 aa, Artificial Sequence
  Cyclic GFR-binding peptide
NAISVLYFDSSNNVILKKYRIGKTPKI

SEQ ID NO: 98530 - protein, 27 aa, Artificial Sequence
  Cyclic GFR-binding peptide
NAISVLYFDDSSNVILKKYRIGKTPKI

SEQ ID NO: 98531 - protein, 27 aa, Artificial Sequence
  Cyclic GFR-binding peptide
SATSILYYVGRTPKVLRKHRIGKTPKI

SEQ ID NO: 98532 - protein, 29 aa, Artificial Sequence
  Cyclic GFR-binding peptide
SPISVLYKEIVRKKPIFLKYHYIGKTPKI

SEQ ID NO: 98533 - protein, 27 aa, Artificial Sequence
  Cyclic GFR-binding peptide
SATSILYYIGKTPKILRKHRIGKTPKI

SEQ ID NO: 98534 - protein, 27 aa, Artificial Sequence
  Cyclic GFR-binding peptide
SATSVLYYDDMGVPTLRKHRIGKTPKI

SEQ ID NO: 98535 - protein, 27 aa, Artificial Sequence
  Cyclic GFR-binding peptide
SPISVLYKDDMGVPTLKYHYIGKTPKI

SEQ ID NO: 98536 - protein, 27 aa, Artificial Sequence
  Cyclic GFR-binding peptide
SPISVLYKDSSNNVILKYHYIGKTPKI

SEQ ID NO: 98537 - protein, 27 aa, Artificial Sequence
  Cyclic GFR-binding peptide
SATSVLYYDSSNNVILRKHRIGKTPKI

SEQ ID NO: 98538 - protein, 27 aa, Artificial Sequence
  Cyclic GFR-binding peptide
SPISILYKVGRTPKVLKYHYIGKTPKI

SEQ ID NO: 98539 - protein, 27 aa, Artificial Sequence
  Cyclic GFR-binding peptide
SATSVLYYDDSSNVILRKHRIGKTPKI

SEQ ID NO: 98540 - protein, 27 aa, Artificial Sequence
  Cyclic GFR-binding peptide
SATSMLYYDEYDKVVLRKHRIGKTPKI

SEQ ID NO: 98541 - protein, 27 aa, Artificial Sequence
  Cyclic GFR-binding peptide
SAISMLYLDEYDKVVLKNYQIGKTPKI

SEQ ID NO: 98542 - protein, 27 aa, Artificial Sequence
  Cyclic GFR-binding peptide
SAISVLYLDDSSNVILKNYQIGKTPKI

SEQ ID NO: 98543 - protein, 27 aa, Artificial Sequence
  Cyclic GFR-binding peptide
IGKTPKINSLQEVVKDYEDYYLMTLPE

SEQ ID NO: 98544 - protein, 27 aa, Artificial Sequence
  Cyclic GFR-binding peptide
IGKTPKINSLQEIKPTKGIYYVIPLPE

SEQ ID NO: 98545 - protein, 27 aa, Artificial Sequence
  Cyclic GFR-binding peptide
IGKTPKINSLQEVKPKRGVYYLITLPE

SEQ ID NO: 98546 - protein, 27 aa, Artificial Sequence
  Cyclic GFR-binding peptide
IGKTPKINSLQEVKPTRGVYYVIPLPE

SEQ ID NO: 98547 - protein, 27 aa, Artificial Sequence
  Cyclic GFR-binding peptide
IGKTPKIEYQKYIVNSSDDIFLVSIPS

SEQ ID NO: 98548 - protein, 27 aa, Artificial Sequence
  Cyclic GFR-binding peptide
IGKTPKIEYQKYVKPTRGVIFLISIPS

SEQ ID NO: 98549 - protein, 27 aa, Artificial Sequence
  Cyclic GFR-binding peptide
IGKTPKINSLQEVVKENEDYYLMTLPE

SEQ ID NO: 98550 - protein, 27 aa, Artificial Sequence
  Cyclic GFR-binding peptide
IGKTPKINSLQEVVNNASDYYLITLPE

SEQ ID NO: 98551 - protein, 27 aa, Artificial Sequence
  Cyclic GFR-binding peptide
IGKTPKINSLQEVKPKRGVYYVIPLPE

SEQ ID NO: 98552 - protein, 27 aa, Artificial Sequence
  Cyclic GFR-binding peptide
IGKTPKINSLQEVVNNASDYYVIPLPE

SEQ ID NO: 98553 - protein, 27 aa, Artificial Sequence
  Cyclic GFR-binding peptide
IGKTPKINSLQEVKPTRGVYYLITLPE

SEQ ID NO: 98554 - protein, 27 aa, Artificial Sequence
  Cyclic GFR-binding peptide
IGKTPKIEYQKYIKPTKGIIFLISIPS

SEQ ID NO: 98555 - protein, 27 aa, Artificial Sequence
  Cyclic GFR-binding peptide
IGKTPKIEYQKYVVNNASDIFLISIPS

SEQ ID NO: 98556 - protein, 27 aa, Artificial Sequence
  Cyclic GFR-binding peptide
IGKTPKINSLQEIVNSSDDYYVVPLPE

SEQ ID NO: 98557 - protein, 27 aa, Artificial Sequence
  Cyclic GFR-binding peptide
IGKTPKINSLQEVVKDYEDYYVMPLPE

SEQ ID NO: 98558 - protein, 27 aa, Artificial Sequence
  Cyclic GFR-binding peptide
IGKTPKIEYQKYVVKENEDIFLMSIPS

SEQ ID NO: 98559 - protein, 27 aa, Artificial Sequence
  Cyclic GFR-binding peptide
IGKTPKINSLQEVVKENEDYYVMPLPE

SEQ ID NO: 98560 - protein, 27 aa, Artificial Sequence
  Cyclic GFR-binding peptide
IGKTPKIEYQKYVVKDYEDIFLMSIPS

SEQ ID NO: 98561 - protein, 27 aa, Artificial Sequence
  Cyclic GFR-binding peptide
IGKTPKIQYNKLVVNNASDLYLISIAS

SEQ ID NO: 98562 - protein, 27 aa, Artificial Sequence
  Cyclic GFR-binding peptide
IGKTPKINSLQEIKPTKGIYYLITLPE

SEQ ID NO: 98563 - protein, 27 aa, Artificial Sequence
  Cyclic GFR-binding peptide
IGKTPKIEYQKYVKPKRGVIFLISIPS

SEQ ID NO: 98564 - protein, 27 aa, Artificial Sequence
  Cyclic GFR-binding peptide
IGKTPKIRYKKLVVNNASDFYLISIAN

SEQ ID NO: 98565 - protein, 27 aa, Artificial Sequence
  Cyclic GFR-binding peptide
IGKTPKINSLQEIVNSSDDYYLVTLPE

SEQ ID NO: 98566 - protein, 27 aa, Artificial Sequence
  Cyclic GFR-binding peptide
EPLTMLYYDEYDKVVEQLSNIGKTPKI

SEQ ID NO: 98567 - protein, 27 aa, Artificial Sequence
  Cyclic GFR-binding peptide
EPLPIVYYIGKTPKIEQLSNIGKTPKI

SEQ ID NO: 98568 - protein, 27 aa, Artificial Sequence
  Cyclic GFR-binding peptide
EPLTILYYVGRKPKVEQLSNIGKTPKI

SEQ ID NO: 98569 - protein, 27 aa, Artificial Sequence
  Cyclic GFR-binding peptide
EPLPIVYYVGRTPKVEQLSNIGKTPKI

SEQ ID NO: 98570 - protein, 27 aa, Artificial Sequence
  Cyclic GFR-binding peptide
SPISVLFIDDSSNVIYKQYEIGKTPKI

SEQ ID NO: 98571 - protein, 27 aa, Artificial Sequence
  Cyclic GFR-binding peptide
SPISILFIVGRTPKVYKQYEIGKTPKI

SEQ ID NO: 98572 - protein, 27 aa, Artificial Sequence
  Cyclic GFR-binding peptide
EPLTMLYYDENEKVVEQLSNIGKTPKI

SEQ ID NO: 98573 - protein, 27 aa, Artificial Sequence
  Cyclic GFR-binding peptide
EPLTILYYDSANNVVEQLSNIGKTPKI

SEQ ID NO: 98574 - protein, 27 aa, Artificial Sequence
  Cyclic GFR-binding peptide
EPLPIVYYVGRKPKVEQLSNIGKTPKI

SEQ ID NO: 98575 - protein, 27 aa, Artificial Sequence
  Cyclic GFR-binding peptide
EPLPIVYYDSANNVVEQLSNIGKTPKI

SEQ ID NO: 98576 - protein, 27 aa, Artificial Sequence
  Cyclic GFR-binding peptide
EPLTILYYVGRTPKVEQLSNIGKTPKI

SEQ ID NO: 98577 - protein, 27 aa, Artificial Sequence
  Cyclic GFR-binding peptide
SPISILFIIGKTPKIYKQYEIGKTPKI

SEQ ID NO: 98578 - protein, 27 aa, Artificial Sequence
  Cyclic GFR-binding peptide
SPISILFIDSANNVVYKQYEIGKTPKI

SEQ ID NO: 98579 - protein, 27 aa, Artificial Sequence
  Cyclic GFR-binding peptide
EPLPVVYYDDSSNVIEQLSNIGKTPKI

SEQ ID NO: 98580 - protein, 27 aa, Artificial Sequence
  Cyclic GFR-binding peptide
EPLPMVYYDEYDKVVEQLSNIGKTPKI

SEQ ID NO: 98581 - protein, 27 aa, Artificial Sequence
  Cyclic GFR-binding peptide
SPISMLFIDENEKVVYKQYEIGKTPKI

SEQ ID NO: 98582 - protein, 27 aa, Artificial Sequence
  Cyclic GFR-binding peptide
EPLPMVYYDENEKVVEQLSNIGKTPKI

SEQ ID NO: 98583 - protein, 27 aa, Artificial Sequence
  Cyclic GFR-binding peptide
SPISMLFIDEYDKVVYKQYEIGKTPKI

SEQ ID NO: 98584 - protein, 27 aa, Artificial Sequence
  Cyclic GFR-binding peptide
SAISILYLDSANNVVLKNYQIGKTPKI

SEQ ID NO: 98585 - protein, 27 aa, Artificial Sequence
  Cyclic GFR-binding peptide
EPLTILYYIGKTPKIEQLSNIGKTPKI

SEQ ID NO: 98586 - protein, 27 aa, Artificial Sequence
  Cyclic GFR-binding peptide
SPISILFIVGRKPKVYKQYEIGKTPKI

SEQ ID NO: 98587 - protein, 27 aa, Artificial Sequence
  Cyclic GFR-binding peptide
NAISILYFDSANNVVLKKYRIGKTPKI

SEQ ID NO: 98588 - protein, 27 aa, Artificial Sequence
  Cyclic GFR-binding peptide
EPLTVLYYDDSSNVIEQLSNIGKTPKI

SEQ ID NO: 98589 - protein, 29 aa, Artificial Sequence
  Cyclic GFR-binding peptide
IGKTPKIVTAKKLKPKKRVYEIKRVQVPR

SEQ ID NO: 98590 - protein, 29 aa, Artificial Sequence
  Cyclic GFR-binding peptide
IGKTPKIVQVEKLKPKKRVYEVKAVKVSR

SEQ ID NO: 98591 - protein, 29 aa, Artificial Sequence
  Cyclic GFR-binding peptide
IGKTPKIVQVEKFIPKKRVIEVKAVKVSR

SEQ ID NO: 98592 - protein, 29 aa, Artificial Sequence
  Cyclic GFR-binding peptide
IGKTPKIVQVEKHQGQHPKIRVKAMKVSR

SEQ ID NO: 98593 - protein, 29 aa, Artificial Sequence
  Cyclic GFR-binding peptide
IGKTPKIVTAKKHQGQHPKIRIKRMQVPR

SEQ ID NO: 98594 - protein, 29 aa, Artificial Sequence
  Cyclic GFR-binding peptide
IGKTPKISMEGLLKPKKRVYEMIQVTINS

SEQ ID NO: 98595 - protein, 29 aa, Artificial Sequence
  Cyclic GFR-binding peptide
IGKTPKISMEGIFIPKKRVIEMIQVTINS

SEQ ID NO: 98596 - protein, 29 aa, Artificial Sequence
  Cyclic GFR-binding peptide
IGKTPKISMEGLHQGQHPKIRMIQMTINS

SEQ ID NO: 98597 - protein, 29 aa, Artificial Sequence
  Cyclic GFR-binding peptide
IGKTPKISMEGILKPKKRVYEMIQVTINS

SEQ ID NO: 98598 - protein, 29 aa, Artificial Sequence
  Cyclic GFR-binding peptide
IGKTPKISMEGLFIPKKRVIEMIQVTINS

SEQ ID NO: 98599 - protein, 29 aa, Artificial Sequence
  Cyclic GFR-binding peptide
IGKTPKIVTAKKFIPKKRVIEIKRVQVPR

SEQ ID NO: 98600 - protein, 29 aa, Artificial Sequence
  Cyclic GFR-binding peptide
IGKTPKISMEGIHQGQHPKIRMIQMTINS

SEQ ID NO: 98601 - protein, 29 aa, Artificial Sequence
  Cyclic GFR-binding peptide
RPVQVRKIEYVRKKPKLKKATVIGKTPKI

SEQ ID NO: 98602 - protein, 29 aa, Artificial Sequence
  Cyclic GFR-binding peptide
RSVKVAKVEYVRKKPKLKEVQVIGKTPKI

SEQ ID NO: 98603 - protein, 29 aa, Artificial Sequence
  Cyclic GFR-binding peptide
RSVKVAKVEIVRKKPIFKEVQVIGKTPKI

SEQ ID NO: 98604 - protein, 29 aa, Artificial Sequence
  Cyclic GFR-binding peptide
RSVKMAKVRIKPHQGQHKEVQVIGKTPKI

SEQ ID NO: 98605 - protein, 29 aa, Artificial Sequence
  Cyclic GFR-binding peptide
RPVQMRKIRIKPHQGQHKKATVIGKTPKI

SEQ ID NO: 98606 - protein, 29 aa, Artificial Sequence
  Cyclic GFR-binding peptide
SNITVQIMEYVRKKPKLLGEMSIGKTPKI

SEQ ID NO: 98607 - protein, 29 aa, Artificial Sequence
  Cyclic GFR-binding peptide
SNITVQIMEIVRKKPIFIGEMSIGKTPKI

SEQ ID NO: 98608 - protein, 29 aa, Artificial Sequence
  Cyclic GFR-binding peptide
SNITMQIMRIKPHQGQHLGEMSIGKTPKI

SEQ ID NO: 98609 - protein, 29 aa, Artificial Sequence
  Cyclic GFR-binding peptide
SNITVQIMEYVRKKPKLIGEMSIGKTPKI

SEQ ID NO: 98610 - protein, 29 aa, Artificial Sequence
  Cyclic GFR-binding peptide
SNITVQIMEIVRKKPIFLGEMSIGKTPKI

SEQ ID NO: 98611 - protein, 29 aa, Artificial Sequence
  Cyclic GFR-binding peptide
RPVQVRKIEIVRKKPIFKKATVIGKTPKI

SEQ ID NO: 98612 - protein, 29 aa, Artificial Sequence
  Cyclic GFR-binding peptide
SNITMQIMRIKPHQGQHIGEMSIGKTPKI

SEQ ID NO: 98613 - protein, 27 aa, Artificial Sequence
  Cyclic GFR-binding peptide
IGKTPKIEYKFKVKPTRGVLYLISIPE

SEQ ID NO: 98614 - protein, 27 aa, Artificial Sequence
  Cyclic GFR-binding peptide
IGKTPKIEYKFKTPVGMDDLYLVSIPE

SEQ ID NO: 98615 - protein, 27 aa, Artificial Sequence
  Cyclic GFR-binding peptide
IGKTPKIEYQKYVKPKRGVIYLISIPS

SEQ ID NO: 98616 - protein, 27 aa, Artificial Sequence
  Cyclic GFR-binding peptide
IGKTPKIEYQKYVVKDYEDIYLMSIPS

SEQ ID NO: 98617 - protein, 27 aa, Artificial Sequence
  Cyclic GFR-binding peptide
IGKTPKIEYKFKIKPTKGILYLISIPE

SEQ ID NO: 98618 - protein, 27 aa, Artificial Sequence
  Cyclic GFR-binding peptide
IGKTPKIYHYKLYTVVGKDKYLISIPS

SEQ ID NO: 98619 - protein, 27 aa, Artificial Sequence
  Cyclic GFR-binding peptide
IGKTPKIRYKKLYTVVGKDFYLISIAN

SEQ ID NO: 98620 - protein, 27 aa, Artificial Sequence
  Cyclic GFR-binding peptide
IGKTPKIEYQKYVVNNAADIYLISIPS

SEQ ID NO: 98621 - protein, 27 aa, Artificial Sequence
  Cyclic GFR-binding peptide
IGKTPKIEYQKYVKPTRGVIYLISIPS

SEQ ID NO: 98622 - protein, 27 aa, Artificial Sequence
  Cyclic GFR-binding peptide
IGKTPKIEYQKYTPVGMDDIYLVSIPS

SEQ ID NO: 98623 - protein, 27 aa, Artificial Sequence
  Cyclic GFR-binding peptide
IGKTPKIEYKFKVVKDYEDLYLMSIPE

SEQ ID NO: 98624 - protein, 27 aa, Artificial Sequence
  Cyclic GFR-binding peptide
IGKTPKIEYKFKVVNNAADLYLISIPE

SEQ ID NO: 98625 - protein, 27 aa, Artificial Sequence
  Cyclic GFR-binding peptide
IGKTPKIEYQKYVVKENEDIYLMSIPS

SEQ ID NO: 98626 - protein, 27 aa, Artificial Sequence
  Cyclic GFR-binding peptide
IGKTPKIEYQKYIKPTKGIIYLISIPS

SEQ ID NO: 98627 - protein, 27 aa, Artificial Sequence
  Cyclic GFR-binding peptide
IGKTPKIRYKKLVVNNAADFYLISIAN

SEQ ID NO: 98628 - protein, 27 aa, Artificial Sequence
  Cyclic GFR-binding peptide
IGKTPKIYHYKLVVNNAADKYLISIPS

SEQ ID NO: 98629 - protein, 27 aa, Artificial Sequence
  Cyclic GFR-binding peptide
IGKTPKIEYKFKIVNNSSDLYLVSIPE

SEQ ID NO: 98630 - protein, 27 aa, Artificial Sequence
  Cyclic GFR-binding peptide
IGKTPKIEYQKYIVNSSDDIYLVSIPS

SEQ ID NO: 98631 - protein, 27 aa, Artificial Sequence
  Cyclic GFR-binding peptide
IGKTPKIEYKFKIVNSSDDLYLVSIPE

SEQ ID NO: 98632 - protein, 27 aa, Artificial Sequence
  Cyclic GFR-binding peptide
IGKTPKIEYKFKVKPKRGVLYLISIPE

SEQ ID NO: 98633 - protein, 27 aa, Artificial Sequence
  Cyclic GFR-binding peptide
IGKTPKIEYQKYYTVVGKDIYLISIPS

SEQ ID NO: 98634 - protein, 27 aa, Artificial Sequence
  Cyclic GFR-binding peptide
IGKTPKIEYKFKVVKENEDLYLMSIPE

SEQ ID NO: 98635 - protein, 27 aa, Artificial Sequence
  Cyclic GFR-binding peptide
IGKTPKIEYQKYIVNNSSDIYLVSIPS

SEQ ID NO: 98636 - protein, 27 aa, Artificial Sequence
  Cyclic GFR-binding peptide
IGKTPKIEYKFKYTVVGKDLYLISIPE

SEQ ID NO: 98637 - protein, 27 aa, Artificial Sequence
  Cyclic GFR-binding peptide
EPISILYLVGRTPKVKFKYEIGKTPKI

SEQ ID NO: 98638 - protein, 27 aa, Artificial Sequence
  Cyclic GFR-binding peptide
EPISVLYLDDMGVPTKFKYEIGKTPKI

SEQ ID NO: 98639 - protein, 27 aa, Artificial Sequence
  Cyclic GFR-binding peptide
SPISILYIVGRKPKVYKQYEIGKTPKI

SEQ ID NO: 98640 - protein, 27 aa, Artificial Sequence
  Cyclic GFR-binding peptide
SPISMLYIDEYDKVVYKQYEIGKTPKI

SEQ ID NO: 98641 - protein, 27 aa, Artificial Sequence
  Cyclic GFR-binding peptide
EPISILYLIGKTPKIKFKYEIGKTPKI

SEQ ID NO: 98642 - protein, 27 aa, Artificial Sequence
  Cyclic GFR-binding peptide
SPISILYKDKGVVTYLKYHYIGKTPKI

SEQ ID NO: 98643 - protein, 27 aa, Artificial Sequence
  Cyclic GFR-binding peptide
NAISILYFDKGVVTYLKKYRIGKTPKI

SEQ ID NO: 98644 - protein, 27 aa, Artificial Sequence
  Cyclic GFR-binding peptide
SPISILYIDAANNVVYKQYEIGKTPKI

SEQ ID NO: 98645 - protein, 27 aa, Artificial Sequence
  Cyclic GFR-binding peptide
SPISILYIVGRTPKVYKQYEIGKTPKI

SEQ ID NO: 98646 - protein, 27 aa, Artificial Sequence
  Cyclic GFR-binding peptide
SPISVLYIDDMGVPTYKQYEIGKTPKI

SEQ ID NO: 98647 - protein, 27 aa, Artificial Sequence
  Cyclic GFR-binding peptide
EPISMLYLDEYDKVVKFKYEIGKTPKI

SEQ ID NO: 98648 - protein, 27 aa, Artificial Sequence
  Cyclic GFR-binding peptide
EPISILYLDAANNVVKFKYEIGKTPKI

SEQ ID NO: 98649 - protein, 27 aa, Artificial Sequence
  Cyclic GFR-binding peptide
SPISMLYIDENEKVVYKQYEIGKTPKI

SEQ ID NO: 98650 - protein, 27 aa, Artificial Sequence
  Cyclic GFR-binding peptide
SPISILYIIGKTPKIYKQYEIGKTPKI

SEQ ID NO: 98651 - protein, 27 aa, Artificial Sequence
  Cyclic GFR-binding peptide
NAISILYFDAANNVVLKKYRIGKTPKI

SEQ ID NO: 98652 - protein, 27 aa, Artificial Sequence
  Cyclic GFR-binding peptide
SPISILYKDAANNVVLKYHYIGKTPKI

SEQ ID NO: 98653 - protein, 27 aa, Artificial Sequence
  Cyclic GFR-binding peptide
EPISVLYLDSSNNVIKFKYEIGKTPKI

SEQ ID NO: 98654 - protein, 27 aa, Artificial Sequence
  Cyclic GFR-binding peptide
SPISVLYIDDSSNVIYKQYEIGKTPKI

SEQ ID NO: 98655 - protein, 27 aa, Artificial Sequence
  Cyclic GFR-binding peptide
EPISVLYLDDSSNVIKFKYEIGKTPKI

SEQ ID NO: 98656 - protein, 27 aa, Artificial Sequence
  Cyclic GFR-binding peptide
EPISILYLVGRKPKVKFKYEIGKTPKI

SEQ ID NO: 98657 - protein, 27 aa, Artificial Sequence
  Cyclic GFR-binding peptide
SPISILYIDKGVVTYYKQYEIGKTPKI

SEQ ID NO: 98658 - protein, 27 aa, Artificial Sequence
  Cyclic GFR-binding peptide
EPISMLYLDENEKVVKFKYEIGKTPKI

SEQ ID NO: 98659 - protein, 27 aa, Artificial Sequence
  Cyclic GFR-binding peptide
SPISVLYIDSSNNVIYKQYEIGKTPKI

SEQ ID NO: 98660 - protein, 27 aa, Artificial Sequence
  Cyclic GFR-binding peptide
EPISILYLDKGVVTYKFKYEIGKTPKI

SEQ ID NO: 98661 - protein, 27 aa, Artificial Sequence
  Cyclic GFR-binding peptide
IGKTPKIPIKGYIIQQKDNFYLMNIPS

SEQ ID NO: 98662 - protein, 27 aa, Artificial Sequence
  Cyclic GFR-binding peptide
IGKTPKIPIKGYVVKDYEDFYLMNIPS

SEQ ID NO: 98663 - protein, 27 aa, Artificial Sequence
  Cyclic GFR-binding peptide
IGKTPKIPIKGYIVNSSDDFYLVNIPS

SEQ ID NO: 98664 - protein, 27 aa, Artificial Sequence
  Cyclic GFR-binding peptide
IGKTPKIPIKGYVVNNAADFYLINIPS

SEQ ID NO: 98665 - protein, 27 aa, Artificial Sequence
  Cyclic GFR-binding peptide
IGKTPKIPIKGYYTVVGKDFYLINIPS

SEQ ID NO: 98666 - protein, 27 aa, Artificial Sequence
  Cyclic GFR-binding peptide
IGKTPKIPIKGYLLVRGNDFYLMNIPS

SEQ ID NO: 98667 - protein, 27 aa, Artificial Sequence
  Cyclic GFR-binding peptide
IGKTPKIPIKGYVVKENEDFYLMNIPS

SEQ ID NO: 98668 - protein, 27 aa, Artificial Sequence
  Cyclic GFR-binding peptide
IGKTPKIPIKGYVVNNASDFYLINIPS

SEQ ID NO: 98669 - protein, 27 aa, Artificial Sequence
  Cyclic GFR-binding peptide
IGKTPKIPIKGYTPVGMDDFYLVNIPS

SEQ ID NO: 98670 - protein, 27 aa, Artificial Sequence
  Cyclic GFR-binding peptide
IGKTPKIPIKGYIVNNSSDFYLVNIPS

SEQ ID NO: 98671 - protein, 27 aa, Artificial Sequence
  Cyclic GFR-binding peptide
SPINMLYFNDKQQIIYGKIPIGKTPKI

SEQ ID NO: 98672 - protein, 27 aa, Artificial Sequence
  Cyclic GFR-binding peptide
SPINMLYFDEYDKVVYGKIPIGKTPKI

SEQ ID NO: 98673 - protein, 27 aa, Artificial Sequence
  Cyclic GFR-binding peptide
SPINVLYFDDSSNVIYGKIPIGKTPKI

SEQ ID NO: 98674 - protein, 27 aa, Artificial Sequence
  Cyclic GFR-binding peptide
SPINILYFDAANNVVYGKIPIGKTPKI

SEQ ID NO: 98675 - protein, 27 aa, Artificial Sequence
  Cyclic GFR-binding peptide
SPINILYFDKGVVTYYGKIPIGKTPKI

SEQ ID NO: 98676 - protein, 27 aa, Artificial Sequence
  Cyclic GFR-binding peptide
SPINMLYFDNGRVLLYGKIPIGKTPKI

SEQ ID NO: 98677 - protein, 27 aa, Artificial Sequence
  Cyclic GFR-binding peptide
SPINMLYFDENEKVVYGKIPIGKTPKI

SEQ ID NO: 98678 - protein, 27 aa, Artificial Sequence
  Cyclic GFR-binding peptide
SPINILYFDSANNVVYGKIPIGKTPKI

SEQ ID NO: 98679 - protein, 27 aa, Artificial Sequence
  Cyclic GFR-binding peptide
SPINVLYFDDMGVPTYGKIPIGKTPKI

SEQ ID NO: 98680 - protein, 27 aa, Artificial Sequence
  Cyclic GFR-binding peptide
SPINVLYFDSSNNVIYGKIPIGKTPKI

SEQ ID NO: 98681 - protein, 27 aa, Artificial Sequence
  Cyclic GFR-binding peptide
IGKTPKIEYQKYVVNNASDIYLISIPS

SEQ ID NO: 98682 - protein, 27 aa, Artificial Sequence
  Cyclic GFR-binding peptide
IGKTPKIEYQKYIIQQKDNIYLMSIPS

SEQ ID NO: 98683 - protein, 27 aa, Artificial Sequence
  Cyclic GFR-binding peptide
IGKTPKIEYQKYLLVRGNDIYLMSIPS

SEQ ID NO: 98684 - protein, 27 aa, Artificial Sequence
  Cyclic GFR-binding peptide
SPISILYIDSANNVVYKQYEIGKTPKI

SEQ ID NO: 98685 - protein, 27 aa, Artificial Sequence
  Cyclic GFR-binding peptide
SPISMLYINDKQQIIYKQYEIGKTPKI

SEQ ID NO: 98686 - protein, 27 aa, Artificial Sequence
  Cyclic GFR-binding peptide
SPISMLYIDNGRVLLYKQYEIGKTPKI

SEQ ID NO: 98687 - protein, 27 aa, Artificial Sequence
  Cyclic GFR-binding peptide
IGKTPKIPYVKLYTVVGKDFFLISLSS

SEQ ID NO: 98688 - protein, 27 aa, Artificial Sequence
  Cyclic GFR-binding peptide
IGKTPKIPYVKLIKPTKGIFFLISLSS

SEQ ID NO: 98689 - protein, 27 aa, Artificial Sequence
  Cyclic GFR-binding peptide
IGKTPKIPYVKLIIQQKDNFFLMSLSS

SEQ ID NO: 98690 - protein, 27 aa, Artificial Sequence
  Cyclic GFR-binding peptide
IGKTPKIPYVKLIVNSSDDFFLVSLSS

SEQ ID NO: 98691 - protein, 27 aa, Artificial Sequence
  Cyclic GFR-binding peptide
IGKTPKIPYVKLVKPKRGVFFLISLSS

SEQ ID NO: 98692 - protein, 27 aa, Artificial Sequence
  Cyclic GFR-binding peptide
IGKTPKIPYVKLVKPTRGVFFLISLSS

SEQ ID NO: 98693 - protein, 27 aa, Artificial Sequence
  Cyclic GFR-binding peptide
IGKTPKIPYVKLTPVGMDDFFLVSLSS

SEQ ID NO: 98694 - protein, 29 aa, Artificial Sequence
  Cyclic GFR-binding peptide
IGKTPKIPYVKLHQGQHPKIRFFLMSLSS

SEQ ID NO: 98695 - protein, 27 aa, Artificial Sequence
  Cyclic GFR-binding peptide
IGKTPKIPYVKLVVNKNEDFFLISLSS

SEQ ID NO: 98696 - protein, 27 aa, Artificial Sequence
  Cyclic GFR-binding peptide
IGKTPKIPYVKLVVNNASDFFLISLSS

SEQ ID NO: 98697 - protein, 27 aa, Artificial Sequence
  Cyclic GFR-binding peptide
IGKTPKIPYVKLVVKENEDFFLMSLSS

SEQ ID NO: 98698 - protein, 27 aa, Artificial Sequence
  Cyclic GFR-binding peptide
IGKTPKIPYVKLIVNNSSDFFLVSLSS

SEQ ID NO: 98699 - protein, 29 aa, Artificial Sequence
  Cyclic GFR-binding peptide
IGKTPKIPYVKLLKPKKRVYEFFLVSLSS

SEQ ID NO: 98700 - protein, 27 aa, Artificial Sequence
  Cyclic GFR-binding peptide
IGKTPKIPYVKLLLVRGNDFFLMSLSS

SEQ ID NO: 98701 - protein, 27 aa, Artificial Sequence
  Cyclic GFR-binding peptide
IGKTPKIPYVKLVVKDYEDFFLMSLSS

SEQ ID NO: 98702 - protein, 27 aa, Artificial Sequence
  Cyclic GFR-binding peptide
IGKTPKIPYVKLVVNNAADFFLISLSS

SEQ ID NO: 98703 - protein, 27 aa, Artificial Sequence
  Cyclic GFR-binding peptide
SSLSILFFDKGVVTYLKVYPIGKTPKI

SEQ ID NO: 98704 - protein, 27 aa, Artificial Sequence
  Cyclic GFR-binding peptide
SSLSILFFIGKTPKILKVYPIGKTPKI

SEQ ID NO: 98705 - protein, 27 aa, Artificial Sequence
  Cyclic GFR-binding peptide
SSLSMLFFNDKQQIILKVYPIGKTPKI

SEQ ID NO: 98706 - protein, 27 aa, Artificial Sequence
  Cyclic GFR-binding peptide
SSLSVLFFDDSSNVILKVYPIGKTPKI

SEQ ID NO: 98707 - protein, 27 aa, Artificial Sequence
  Cyclic GFR-binding peptide
SSLSILFFVGRKPKVLKVYPIGKTPKI

SEQ ID NO: 98708 - protein, 27 aa, Artificial Sequence
  Cyclic GFR-binding peptide
SSLSILFFVGRTPKVLKVYPIGKTPKI

SEQ ID NO: 98709 - protein, 27 aa, Artificial Sequence
  Cyclic GFR-binding peptide
SSLSVLFFDDMGVPTLKVYPIGKTPKI

SEQ ID NO: 98710 - protein, 29 aa, Artificial Sequence
  Cyclic GFR-binding peptide
SSLSMLFFRIKPHQGQHLKVYPIGKTPKI

SEQ ID NO: 98711 - protein, 27 aa, Artificial Sequence
  Cyclic GFR-binding peptide
SSLSILFFDENKNVVLKVYPIGKTPKI

SEQ ID NO: 98712 - protein, 27 aa, Artificial Sequence
  Cyclic GFR-binding peptide
SSLSILFFDSANNVVLKVYPIGKTPKI

SEQ ID NO: 98713 - protein, 27 aa, Artificial Sequence
  Cyclic GFR-binding peptide
SSLSMLFFDENEKVVLKVYPIGKTPKI

SEQ ID NO: 98714 - protein, 27 aa, Artificial Sequence
  Cyclic GFR-binding peptide
SSLSVLFFDSSNNVILKVYPIGKTPKI

SEQ ID NO: 98715 - protein, 29 aa, Artificial Sequence
  Cyclic GFR-binding peptide
SSLSVLFFEYVRKKPKLLKVYPIGKTPKI

SEQ ID NO: 98716 - protein, 27 aa, Artificial Sequence
  Cyclic GFR-binding peptide
SSLSMLFFDNGRVLLLKVYPIGKTPKI

SEQ ID NO: 98717 - protein, 27 aa, Artificial Sequence
  Cyclic GFR-binding peptide
SSLSMLFFDEYDKVVLKVYPIGKTPKI

SEQ ID NO: 98718 - protein, 27 aa, Artificial Sequence
  Cyclic GFR-binding peptide
SSLSILFFDAANNVVLKVYPIGKTPKI

SEQ ID NO: 98719 - protein, 27 aa, Artificial Sequence
  Cyclic GFR-binding peptide
IGKTPKISMEGIIVNSSDDMIQVTINS

SEQ ID NO: 98720 - protein, 27 aa, Artificial Sequence
  Cyclic GFR-binding peptide
IGKTPKIVTAKKVVKENEDIKRMQVPR

SEQ ID NO: 98721 - protein, 27 aa, Artificial Sequence
  Cyclic GFR-binding peptide
IGKTPKISMEGIVVKDYEDMIQMTINS

SEQ ID NO: 98722 - protein, 27 aa, Artificial Sequence
  Cyclic GFR-binding peptide
IGKTPKIVTAKKIKPTKGIIKRIQVPR

SEQ ID NO: 98723 - protein, 27 aa, Artificial Sequence
  Cyclic GFR-binding peptide
IGKTPKISMEGIVKPTRGVMIQITINS

SEQ ID NO: 98724 - protein, 29 aa, Artificial Sequence
  Cyclic GFR-binding peptide
IGKTPKINSLQEFIPKKRVIEYYVVPLPE

SEQ ID NO: 98725 - protein, 27 aa, Artificial Sequence
  Cyclic GFR-binding peptide
IGKTPKIVQVEKVKPKRGVVKAIKVSR

SEQ ID NO: 98726 - protein, 27 aa, Artificial Sequence
  Cyclic GFR-binding peptide
IGKTPKIVQVEKVVKENEDVKAMKVSR

SEQ ID NO: 98727 - protein, 27 aa, Artificial Sequence
  Cyclic GFR-binding peptide
IGKTPKIVTAKKIVNSSDDIKRVQVPR

SEQ ID NO: 98728 - protein, 27 aa, Artificial Sequence
  Cyclic GFR-binding peptide
IGKTPKIVQVEKIKPTKGIVKAIKVSR

SEQ ID NO: 98729 - protein, 29 aa, Artificial Sequence
  Cyclic GFR-binding peptide
IGKTPKINSLQEFIPKKRVIEYYLVTLPE

SEQ ID NO: 98730 - protein, 27 aa, Artificial Sequence
  Cyclic GFR-binding peptide
IGKTPKIVQVEKIVNSSDDVKAVKVSR

SEQ ID NO: 98731 - protein, 27 aa, Artificial Sequence
  Cyclic GFR-binding peptide
IGKTPKIVTAKKVKPKRGVIKRIQVPR

SEQ ID NO: 98732 - protein, 27 aa, Artificial Sequence
  Cyclic GFR-binding peptide
IGKTPKIVQVEKVKPTRGVVKAIKVSR

SEQ ID NO: 98733 - protein, 27 aa, Artificial Sequence
  Cyclic GFR-binding peptide
IGKTPKIVTAKKVKPTRGVIKRIQVPR

SEQ ID NO: 98734 - protein, 29 aa, Artificial Sequence
  Cyclic GFR-binding peptide
IGKTPKINSLQELKPKKRVYEYYLVTLPE

SEQ ID NO: 98735 - protein, 27 aa, Artificial Sequence
  Cyclic GFR-binding peptide
IGKTPKISMEGIVKPKRGVMIQITINS

SEQ ID NO: 98736 - protein, 27 aa, Artificial Sequence
  Cyclic GFR-binding peptide
IGKTPKISMEGIVVKENEDMIQMTINS

SEQ ID NO: 98737 - protein, 27 aa, Artificial Sequence
  Cyclic GFR-binding peptide
IGKTPKISMEGIIKPTKGIMIQITINS

SEQ ID NO: 98738 - protein, 29 aa, Artificial Sequence
  Cyclic GFR-binding peptide
IGKTPKINSLQEHQGQHPKIRYYLMTLPE

SEQ ID NO: 98739 - protein, 27 aa, Artificial Sequence
  Cyclic GFR-binding peptide
IGKTPKIVTAKKVVKDYEDIKRMQVPR

SEQ ID NO: 98740 - protein, 29 aa, Artificial Sequence
  Cyclic GFR-binding peptide
IGKTPKINSLQEHQGQHPKIRYYVMPLPE

SEQ ID NO: 98741 - protein, 29 aa, Artificial Sequence
  Cyclic GFR-binding peptide
IGKTPKINSLQELKPKKRVYEYYVVPLPE

SEQ ID NO: 98742 - protein, 27 aa, Artificial Sequence
  Cyclic GFR-binding peptide
IGKTPKIVQVEKVVKDYEDVKAMKVSR

SEQ ID NO: 98743 - protein, 27 aa, Artificial Sequence
  Cyclic GFR-binding peptide
SNITVQIMDDSSNVIIGEMSIGKTPKI

SEQ ID NO: 98744 - protein, 27 aa, Artificial Sequence
  Cyclic GFR-binding peptide
RPVQMRKIDENEKVVKKATVIGKTPKI

SEQ ID NO: 98745 - protein, 27 aa, Artificial Sequence
  Cyclic GFR-binding peptide
SNITMQIMDEYDKVVIGEMSIGKTPKI

SEQ ID NO: 98746 - protein, 27 aa, Artificial Sequence
  Cyclic GFR-binding peptide
RPVQIRKIIGKTPKIKKATVIGKTPKI

SEQ ID NO: 98747 - protein, 27 aa, Artificial Sequence
  Cyclic GFR-binding peptide
SNITIQIMVGRTPKVIGEMSIGKTPKI

SEQ ID NO: 98748 - protein, 29 aa, Artificial Sequence
  Cyclic GFR-binding peptide
EPLPVVYYEIVRKKPIFEQLSNIGKTPKI

SEQ ID NO: 98749 - protein, 27 aa, Artificial Sequence
  Cyclic GFR-binding peptide
RSVKIAKVVGRKPKVKEVQVIGKTPKI

SEQ ID NO: 98750 - protein, 27 aa, Artificial Sequence
  Cyclic GFR-binding peptide
RSVKMAKVDENEKVVKEVQVIGKTPKI

SEQ ID NO: 98751 - protein, 27 aa, Artificial Sequence
  Cyclic GFR-binding peptide
RPVQVRKIDDSSNVIKKATVIGKTPKI

SEQ ID NO: 98752 - protein, 27 aa, Artificial Sequence
  Cyclic GFR-binding peptide
RSVKIAKVIGKTPKIKEVQVIGKTPKI

SEQ ID NO: 98753 - protein, 29 aa, Artificial Sequence
  Cyclic GFR-binding peptide
EPLTVLYYEIVRKKPIFEQLSNIGKTPKI

SEQ ID NO: 98754 - protein, 27 aa, Artificial Sequence
  Cyclic GFR-binding peptide
RSVKVAKVDDSSNVIKEVQVIGKTPKI

SEQ ID NO: 98755 - protein, 27 aa, Artificial Sequence
  Cyclic GFR-binding peptide
RPVQIRKIVGRKPKVKKATVIGKTPKI

SEQ ID NO: 98756 - protein, 27 aa, Artificial Sequence
  Cyclic GFR-binding peptide
RSVKIAKVVGRTPKVKEVQVIGKTPKI

SEQ ID NO: 98757 - protein, 27 aa, Artificial Sequence
  Cyclic GFR-binding peptide
RPVQIRKIVGRTPKVKKATVIGKTPKI

SEQ ID NO: 98758 - protein, 29 aa, Artificial Sequence
  Cyclic GFR-binding peptide
EPLTVLYYEYVRKKPKLEQLSNIGKTPKI

SEQ ID NO: 98759 - protein, 27 aa, Artificial Sequence
  Cyclic GFR-binding peptide
SNITIQIMVGRKPKVIGEMSIGKTPKI

SEQ ID NO: 98760 - protein, 27 aa, Artificial Sequence
  Cyclic GFR-binding peptide
SNITMQIMDENEKVVIGEMSIGKTPKI

SEQ ID NO: 98761 - protein, 27 aa, Artificial Sequence
  Cyclic GFR-binding peptide
SNITIQIMIGKTPKIIGEMSIGKTPKI

SEQ ID NO: 98762 - protein, 29 aa, Artificial Sequence
  Cyclic GFR-binding peptide
EPLTMLYYRIKPHQGQHEQLSNIGKTPKI

SEQ ID NO: 98763 - protein, 27 aa, Artificial Sequence
  Cyclic GFR-binding peptide
RPVQMRKIDEYDKVVKKATVIGKTPKI

SEQ ID NO: 98764 - protein, 29 aa, Artificial Sequence
  Cyclic GFR-binding peptide
EPLPMVYYRIKPHQGQHEQLSNIGKTPKI

SEQ ID NO: 98765 - protein, 29 aa, Artificial Sequence
  Cyclic GFR-binding peptide
EPLPVVYYEYVRKKPKLEQLSNIGKTPKI

SEQ ID NO: 98766 - protein, 27 aa, Artificial Sequence
  Cyclic GFR-binding peptide
RSVKMAKVDEYDKVVKEVQVIGKTPKI

SEQ ID NO: 98767 - protein, 27 aa, Artificial Sequence
  Cyclic GFR-binding peptide
IGKTPKIRYKKLIIQQKDNFYLMSIAN

SEQ ID NO: 98768 - protein, 27 aa, Artificial Sequence
  Cyclic GFR-binding peptide
IGKTPKIRYKKLLLVRGNDFYLMSIAN

SEQ ID NO: 98769 - protein, 27 aa, Artificial Sequence
  Cyclic GFR-binding peptide
NAISMLYFNDKQQIILKKYRIGKTPKI

SEQ ID NO: 98770 - protein, 27 aa, Artificial Sequence
  Cyclic GFR-binding peptide
NAISMLYFDNGRVLLLKKYRIGKTPKI

SEQ ID NO: 98771 - protein, 27 aa, Artificial Sequence
  Cyclic GFR-binding peptide
IGKTPKIEYKFKVVNKNEDLYLISIPE

SEQ ID NO: 98772 - protein, 27 aa, Artificial Sequence
  Cyclic GFR-binding peptide
IGKTPKIPIKGYVKPTRGVFYLINIPS

SEQ ID NO: 98773 - protein, 27 aa, Artificial Sequence
  Cyclic GFR-binding peptide
IGKTPKIEYKFKLLVRGNDLYLMSIPE

SEQ ID NO: 98774 - protein, 27 aa, Artificial Sequence
  Cyclic GFR-binding peptide
IGKTPKIYHYKLVVNKNEDKYLISIPS

SEQ ID NO: 98775 - protein, 27 aa, Artificial Sequence
  Cyclic GFR-binding peptide
IGKTPKIRHKRLLLVRGNDYYLMSTAS

SEQ ID NO: 98776 - protein, 27 aa, Artificial Sequence
  Cyclic GFR-binding peptide
IGKTPKIYHYKLLLVRGNDKYLMSIPS

SEQ ID NO: 98777 - protein, 27 aa, Artificial Sequence
  Cyclic GFR-binding peptide
IGKTPKIRHKRLVVNKNEDYYLISTAS

SEQ ID NO: 98778 - protein, 27 aa, Artificial Sequence
  Cyclic GFR-binding peptide
IGKTPKIRYKKLVVNKNEDFYLISIAN

SEQ ID NO: 98779 - protein, 27 aa, Artificial Sequence
  Cyclic GFR-binding peptide
IGKTPKIPIKGYVVNKNEDFYLINIPS

SEQ ID NO: 98780 - protein, 27 aa, Artificial Sequence
  Cyclic GFR-binding peptide
IGKTPKIPIKGYIKPTKGIFYLINIPS

SEQ ID NO: 98781 - protein, 27 aa, Artificial Sequence
  Cyclic GFR-binding peptide
IGKTPKIRHKRLYTVVGKDYYLISTAS

SEQ ID NO: 98782 - protein, 27 aa, Artificial Sequence
  Cyclic GFR-binding peptide
IGKTPKIEYKFKVVNNASDLYLISIPE

SEQ ID NO: 98783 - protein, 27 aa, Artificial Sequence
  Cyclic GFR-binding peptide
IGKTPKIRHKRLIIQQKDNYYLMSTAS

SEQ ID NO: 98784 - protein, 27 aa, Artificial Sequence
  Cyclic GFR-binding peptide
IGKTPKIEYKFKIIQQKDNLYLMSIPE

SEQ ID NO: 98785 - protein, 27 aa, Artificial Sequence
  Cyclic GFR-binding peptide
IGKTPKIPIKGYVKPKRGVFYLINIPS
